United States Patent Application Publication US 2013/0129668 A1 - sequence listing, part 15

SEQ ID NO: 240832 - DNA, 122 bp, Homo sapiens
ggggcggctgcacctggccccgagtctcggtgcacgtggccggcccagccgccgcctttccgaagctctggttaagtggcacgtttgtggcctcttttgacgtgactggcaaaaagctccat

SEQ ID NO: 240833 - DNA, 122 bp, Homo sapiens
cctgctcctctgggggccctacgtcgtggccagctacctgcgggtcctggtgcggcccggcgccgtcccccaggcctacctgacggcctccgtgtggctgaccttcgcgcaggccggcatca

SEQ ID NO: 240834 - DNA, 122 bp, Homo sapiens
ggctctgggctcccttgcttgctcagagtggccctgcttgcagccccgccggcgttggcacggtgacagtagccaagtgtgcaaacttgtcccattgtccgcaggccagggggagccatgga

SEQ ID NO: 240835 - DNA, 122 bp, Homo sapiens
gtaatgagccttgcactgaatgtttctggtctgctactttccctggagggtcatgtgagccggagtggtatgtggcctgctttgcaagtgattaacatggtgtaagcaatctgcatagagag

SEQ ID NO: 240836 - DNA, 122 bp, Homo sapiens
agtatcggcaattcatttagatgacggtgctcaaaatattcgtcctgtggaaagtcacaacgaaaggtaaaattctcaggacatctgtgagttaaaacaacagacccagcgtagggattgtg

SEQ ID NO: 240837 - DNA, 122 bp, Homo sapiens
ttcctgggaggcgctgtcagggaggggcgctgagcggggctatctgtgcacaggttcctgcgccacgtgcctgtcgtgtatgtggattacccgggccccgcctccctcacacagatctacgg

SEQ ID NO: 240838 - DNA, 122 bp, Homo sapiens
ttctgactgtggttaagcaacacaaagctgccacatcctgtcagctgctcatcgggaccacgtatgcaatagcacagggctcctgtcctctagaagctgacatcttaaacacacattgagtg

SEQ ID NO: 240839 - DNA, 122 bp, Homo sapiens
gaagttttagagtagattaaatgaatgaaggaatcacctgaagaggcacagtggtgtggccgataaaacccaggaatcagaatacttggcttggattagtggctgttttgcagtggatgttg

SEQ ID NO: 240840 - DNA, 122 bp, Homo sapiens
gcgagaaaagacacagaaaacgctctgtcagtcacgtgtcactgaggagccaatggctgacgcactacggcaggaagggatgctgcagttccgtctgcagttgacgaggctgttggtacaca

SEQ ID NO: 240841 - DNA, 122 bp, Homo sapiens
gcctgccacgctgaaccgaccataacacctgccacgctgaaccgaccataacacctgccacgctgaacctaacatacgcctgccacgatgaacctaccgtaacacctgccacgctgaaccca

SEQ ID NO: 240842 - DNA, 122 bp, Homo sapiens
gccgaaatcgaggtgagagaaggggcccctcacgctgcctctcatggtgtgggaacccctcggcgagctggaggacatcctgtcctgccctgacccctgcagctcggtgaacggaaaggact

SEQ ID NO: 240843 - DNA, 122 bp, Homo sapiens
ctgaccagccatctctggccctgggcaggcctgcaggagttgttccaggccccagacctgcgtgggatctccgagcagagcctggtggtgtccggcgtgcagcatcagtccaccctggagct

SEQ ID NO: 240844 - DNA, 122 bp, Homo sapiens
tacccgcaagagacgccccaaccttcaggctgctttatgtctccaaagctctgcaggtgccgctcttccccagaggacaccccttccctgccagtcaaccccaccagccgcaggcagacatt

SEQ ID NO: 240845 - DNA, 122 bp, Homo sapiens
atgtatacatgtgccatgctggtgtgctgcaccgggaagttctttatagcagtgtgaaaacggacttacacaagcaccaaccaatatttatggtgtctctgggtgaacatgtaagatgccat

SEQ ID NO: 240846 - DNA, 122 bp, Homo sapiens
tcatctgatagttcctgataattattttaaatggatactgaacatatgccttctttggtgcgtttgtgtttcaagaaacttaacatgaccacattttagaggagtcagaatggtagagagag

SEQ ID NO: 240847 - DNA, 122 bp, Homo sapiens
gggatatgcggagtgctcagatcaggtgggaacctgcgggtgccccaggtgggggtcttgcggggtgcccagggctagaggggcccgctgggagcccgcagcggggctgggatgggcggcca

SEQ ID NO: 240848 - DNA, 122 bp, Homo sapiens
aaccagcccagggaagtgtagtcaagtttcagtttgggcatttctccgggtgagggaatccggtgggctccatttctacaaggctcacaaacgcaggtgcagttcggccgccgcacgctgcc

SEQ ID NO: 240849 - DNA, 122 bp, Homo sapiens
ttaattgttgccacaagctaagtccaccagtctctccctacagggaaatgaagtcctgagcgaagtgacacaaatatggaaaaggtttagaactgatttattctggtagtcatccccaaagc

SEQ ID NO: 240850 - DNA, 122 bp, Homo sapiens
tcccgggcggtgacaatgcagcaaaatccgagggctcaaacaatgtggcccctccatccccggctccagggcattctgattgctctgccgctttgacgtcccggccacttggctgattttca

SEQ ID NO: 240851 - DNA, 122 bp, Homo sapiens
gtgggactccacgtcccacaccagggcacagctcaagctgcacagcagccaagggctccccggggccgacacttgcctcagcgcacactgcacgcctgtctcatctccgtaggctgagtaga

SEQ ID NO: 240852 - DNA, 122 bp, Homo sapiens
aaaccaacctatctttctttaatgagtaagttgagatgggccgtacatatgtaaagatggcgctgccataaaagagaaagacaatggccaggtgggaggcacatgtagagaaggcttttcgt

SEQ ID NO: 240853 - DNA, 122 bp, Homo sapiens
ggggtcggtgggaaagtagacggtggggcggcggcatcacacatacgcaagcgcagcctccgtttcctccggcgcgcctgcgctcgcgttcacgagtggttgaagcggaaatggcgccgcgg

SEQ ID NO: 240854 - DNA, 122 bp, Homo sapiens
tcttgaactttttgttgcacacggggcagtcaaacggccgcagattgaggtgcatgttcacgtgccggtcccgcatgctcttgtgggagaaggccttcccacaatggcacagaaagatctta

SEQ ID NO: 240855 - DNA, 122 bp, Homo sapiens
cctcttgattgaaggatcggaatggatggcgaaggggcaggctcgctgagcgctcactagcggctcctcgcagcctctaggatcgccttagtgctgattgcaacgcgcggtccctccagcca

SEQ ID NO: 240856 - DNA, 122 bp, Homo sapiens
tggcacgcagggatcccgagaggagatgcactggggagacccaggcatgccacgtgtgcacgtgaagggagacaaactgaaacggaaagggcagggagtggtttcagggcccaacatcctga

SEQ ID NO: 240857 - DNA, 122 bp, Homo sapiens
tgtgaagctttccccagttaacttcagtggttctgatcactcattactcaatatgcaatccgcttccattcaacaaatgtttagtgaactcccacaatgagtaatgcactgtgctagttgct

SEQ ID NO: 240858 - DNA, 122 bp, Homo sapiens
agatcctggaggaaatagtgatcttatttgcatttattgtttgagtaagatcaccatgttcgttatttgtcatgtggtgctttttggtgggggtttgtcagacatgtattttgtcctccttg

SEQ ID NO: 240859 - DNA, 122 bp, Homo sapiens
gagctatttttagatgaccagaaccttggagtagacagccatagtgagatggaagcctgccggtacttttatggtctttatttccaagatgttctcttggagcatcttcctttaagaagctt

SEQ ID NO: 240860 - DNA, 122 bp, Homo sapiens
tatttacaaaagcaggagagagcctgttgtagacatgtgaggagttacttatggaagcctcgttctaatactgtccgggttggcctgtgataattatctgcggaccctcttcaggcggggca

SEQ ID NO: 240861 - DNA, 122 bp, Homo sapiens
attttaggtttacggttcagtagtgttaagtatattcacatcgttgtgcaacagacctcccgaactttttcatcttgcaaaatgaaaactctgtgcccattcaacaacttcccatcccccca

SEQ ID NO: 240862 - DNA, 122 bp, Homo sapiens
aggagatctcttctgattatttcagcaatgaaggcattccatgaagcctgggtttgttctcggcacttcatttgaatgaagatatgtttagtgtaagaatttctgactttaaaatgtgaaat

SEQ ID NO: 240863 - DNA, 122 bp, Homo sapiens
tggctgagggaaactcagaccaaagagcagcggcaagaaagcagttgggtccccacaaaacgcccgaagtcaaggtgagggtcacacaacgactcttgacgattccggcgagttcatcctgg

SEQ ID NO: 240864 - DNA, 122 bp, Homo sapiens
ggaagcctccgcggtggtgcaagtggaacccaagccttgaggtttcagtgagtagggggccgacgtgagctttagcgtccccctttagcctccctcttcgattccttgaagaccctggtgca

SEQ ID NO: 240865 - DNA, 122 bp, Homo sapiens
attcctgcttgctgatccacatctgctggacggtggacagccaggccaggatggagctgccgatccacacggagtacttgcgcttgggaggagcagtgatcttgatcttcattgtgctgggc

SEQ ID NO: 240866 - DNA, 122 bp, Homo sapiens
tcttctaaatcacgcccctaatagaaagaacagaagacagagcatgtgctgtaagtcattcgcctgctgaatgtgctctgcacagggtgatgtaacatgtggggtcagcccctgcgtcaacg

SEQ ID NO: 240867 - DNA, 122 bp, Homo sapiens
ctgctgctgccgccctatcattacaaaccagctcagcttcctcatgggcttgtatttaagcgcctgcctgtcacaccaacttactacagctaaatgatgatgcaaattctccaggtttgcat

SEQ ID NO: 240868 - DNA, 122 bp, Homo sapiens
ctctctctctctctctctctctctctctctcctctctctctcctctctctctctctctctcgtgttcaggtttcttggaaaatccccaggaaagaaaaaacgtgtgaatcgtgtgtgaatgt

SEQ ID NO: 240869 - DNA, 122 bp, Homo sapiens
ccaggccccagccctgtggattgaaaccacagcctacgccctgctgcacctcctgcttcacgagggcaaagcagagatggcagaccaggcttcggcctggctcacccgtcagggcagcttcc

SEQ ID NO: 240870 - DNA, 122 bp, Homo sapiens
gccacaggaggacaccctgcaccctggcttccctttcctctgcgattcgggaggtgagggcgtacatctgctgagaaggcctcccagagccccgtgagcatcctggagtgtgcctattcctc

SEQ ID NO: 240871 - DNA, 122 bp, Homo sapiens
tgtccgcggagctggcaaacgggtccagtgagccctaaaggcaaaggctcccatcccggccgcccagtccctggtgcctcccccacttccaggcctttgtccctctcctttctccagcaacc

SEQ ID NO: 240872 - DNA, 122 bp, Homo sapiens
ccgacctttccttactttcgggttcgacagaaaggcggcaataaaaagacccattggtcccgcctctctactgtcacgggttagtagggaagtcagtccaagatcagcctggagtttccgtg

SEQ ID NO: 240873 - DNA, 122 bp, Homo sapiens
ttgtccctttccacctgcataatgggggcccacaaggcgctgtccccatgccccgagaggcgtgtctcggcacagcaaagtccacctgcgctggtccgcggagccccgcccagctaggtgag

SEQ ID NO: 240874 - DNA, 122 bp, Homo sapiens
ctaagcgcatcttgctcctgtggtgcttgccagtcgtggctggttctcgagcctcccatccgtcccctggggccacgttcagacacaaactctacgcatcctgatgaaaaagtgcacctgct

SEQ ID NO: 240875 - DNA, 122 bp, Homo sapiens
ttcctctaacctgttgtcccatttgtaaaaggactgttgtgaggactgaattaggagaggcgatgaagagggtcattccttgtgaatcataaaagaaaggaccacagaacgatgactggacc

SEQ ID NO: 240876 - DNA, 122 bp, Homo sapiens
gagaaaaatgcattccgaaaaagatatcaattcgttttaaggaaaggggggaggaaaccccgcatttcccacagagtgcacacgagaggaattgaaaacagctggtaccggtctataaataa

SEQ ID NO: 240877 - DNA, 122 bp, Homo sapiens
agggcggctgggggtggggagacggcaggaatgttctcctggcctgctggtctgtgccggcgagtgtgctgagaggagggcctctggacatcaaaggttccttttgtccccttccgagtggc

SEQ ID NO: 240878 - DNA, 122 bp, Homo sapiens
tctccgcctcccaccagagcccggaaaaccagtcctgagaagagcccccaggcctcctagcgcgggaacgctgcgctcgcgtccggtcagcctctgcaggccagaggagccgggagcccctc

SEQ ID NO: 240879 - DNA, 122 bp, Homo sapiens
actttccttccagatatcactgatgtattttaccaccgtgtctggatattgcctgtaaatcgtgtcctgttccacctgtgatgagcacgtcttgggctagaaaatgctgttgtggacactga

SEQ ID NO: 240880 - DNA, 122 bp, Homo sapiens
tgaattgtaatccccagtgttggaggcagggtctggtgggaggcgatcagatcatgagggcggagttctcatggatggtttagcaccatcctcccttggtaccatatagtgagtgagttctc

SEQ ID NO: 240881 - DNA, 122 bp, Homo sapiens
tgctctcagggctgcgctcagcctcgtgttttcacttccttttcagagctgtatccgggtcgctgctttccctattgtctgaggcagccgccctcgcgctgtgcaatttctggtctttcgtt

SEQ ID NO: 240882 - DNA, 122 bp, Homo sapiens
gtacggggccgagcaggggttggtgctccgtgcggtccttccctctccccgcctccaccacgggaccccgccctcctgggccgactgcagagccttcctgaatcctctgacctcgggcctca

SEQ ID NO: 240883 - DNA, 122 bp, Homo sapiens
aaggtactagtggaagcagatgggagccggacttaggaagttaacctgcagctgtcccaccggccctcttaggacgaatctgacaagaccaatcctggcagccccgcatctggcttccgggc

SEQ ID NO: 240884 - DNA, 122 bp, Homo sapiens
ggcccctgcccttctgcgctgcccacccccagccaagcatgccaccctctttcccgttaacggcctgctaaggaacctcaattaatagctcactgtagccttctgattctccatgagaaaga

SEQ ID NO: 240885 - DNA, 122 bp, Homo sapiens
acctgttctttaactcaaaggctttgttaaccttaatacaatgtaaattacagagaatgtcggaaacaaaactggcagcaggtatttatgactagaggaggtgagtagggatggtgatggga

SEQ ID NO: 240886 - DNA, 122 bp, Homo sapiens
tagtgttttgaagagattgggcaactggtagtctttgagaacctttagggttcagaagctcggcgtggatctggcaggcatctttgtcaaactggcctcacctgtgatgagttcgtaggcat

SEQ ID NO: 240887 - DNA, 122 bp, Homo sapiens
gaagaacatcgtgggatccccgagagggtcacggcggccgctaaggccctcgacaagtaacggttctacgtctccaatcgggagtaccagcagctccggaaagctcccgtcgccctggcaac

SEQ ID NO: 240888 - DNA, 122 bp, Homo sapiens
tgaactcctgagctcaagtggtcctcccacctcagccttccaaagttttgcgattataggcgtgaaccactgtgtccagctagtaatattttaaaaagtgttatggagcagtactcaagctg

SEQ ID NO: 240889 - DNA, 122 bp, Homo sapiens
ggggccgacaccccgcgggcctcggtgccagcctcccgcttacccggtcagcccctgggccgagtacccctgggagagaaagcgctaaattcccccaacactcccgtgatgggggcacaggg

SEQ ID NO: 240890 - DNA, 122 bp, Homo sapiens
gaaagccccttgagtttaccttatcattctggtatgcagtcacagcgatgaattcagtttcggggaacaagtatgtccgaaatgtactataagggagtttcaagatgtcattggctcttaca

SEQ ID NO: 240891 - DNA, 122 bp, Homo sapiens
cttccccggacggacgcgcagggcccgggaggaactggttcccgggacgggtgggggcctcggccgcccacagagcccgcggagaagggaacggcctcagcctcggctccttcccacacctg

SEQ ID NO: 240892 - DNA, 122 bp, Homo sapiens
cttttctaaatagatcccatgcgaggcccaagaaaactagaagtagtggaggtcaaatctcggcaaatcactatccgctgggagccatttggatataatgtaactcgttgccacagttataa

SEQ ID NO: 240893 - DNA, 122 bp, Homo sapiens
ctgccactgcccggttaagaactggggaatctgtcctccctctcagggttccaggcctttcggcactcagatacctccaacagcacgcccagcactcgccccatcttcacgtgattcctccc

SEQ ID NO: 240894 - DNA, 122 bp, Homo sapiens
ggggctggagccaggggaccacctgtgtctcattagtcctgtcgggcaaagtactgcagacgttaactccctgctggctccaactgttccctggatcccactccatccgctatccgccatct

SEQ ID NO: 240895 - DNA, 122 bp, Homo sapiens
gtgacacgggcgctgacgcctgcccaaaagttccgggggccggccctgaagtggtgtcaccgcacggcccaggggcggggcccgggcggaccaactacaactcccgacatgctcggcggcat

SEQ ID NO: 240896 - DNA, 122 bp, Homo sapiens
ccgccattgtcatgatgggccatccccaatgagccgctgggcacacctcccagacggggtcgtggccgggcagaggggctcctcacttcccagtaggggcggccgggcagaagcgcccctca

SEQ ID NO: 240897 - DNA, 122 bp, Homo sapiens
gcgccgagaggcccggactggcgactgctgccgcgccaccggggcccacctgcgcagggacgctcggcctcaggccctctgggctgctccaccctgctccggccgcaggcgagcggcgaggg

SEQ ID NO: 240898 - DNA, 122 bp, Homo sapiens
ccgaaactgcaattcgaacaggaggtggatttttttttttttttaagtcgagacttgggacgccaagcacaaaagccagggacagcccgggaaggagggaccaggtgtcctggggcggccgc

SEQ ID NO: 240899 - DNA, 122 bp, Homo sapiens
gctgtgggttggtgatgctcaccacgctgcgaaaccctgtggtttgcattcagtgtgattcgtcctgcctgctgaccactatgctgggttcagacttctgacactgccaggctacccaactt

SEQ ID NO: 240900 - DNA, 122 bp, Homo sapiens
ctgggattacagtcgtgagccattgggcccagtcacaaattccttattttctttgtcctacgatatgaacaacccagttggaacataatacgacgtgagaagagaagcctgccatggggagg

SEQ ID NO: 240901 - DNA, 122 bp, Homo sapiens
ctttagcaggcgccggaagagggctggggagggacgggggagcgcgcagctggggactaacggcagccacatctgagctagcccgagtcaccatccctgcagctgcccacgcaaaagcgaat

SEQ ID NO: 240902 - DNA, 122 bp, Homo sapiens
gatgagaggagggaggaagcatcactaagacaaagctgtaatgaagtttgaactcttctgcgcctatgtaccttccatctttaactttctctgtgtctctgggctaagagaacacaaacctt

SEQ ID NO: 240903 - DNA, 122 bp, Homo sapiens
ttggacccaaaaggaatttccagaagtatgactacagacccagggcaggatcaggaaacacgaggaaagcaagtgtgggtcctggaccaactgccctcctaaggtctgtccttagcagggac

SEQ ID NO: 240904 - DNA, 122 bp, Homo sapiens
atgttgtggggtctataattgatgactgtgagcacaggaacagtgatgaggaactgaggccgagtggaggcagatgagactgaaactgtgggcctctagcactggaaatgggtggagaggaa

SEQ ID NO: 240905 - DNA, 122 bp, Homo sapiens
cccggtcgggttgactgtcgggggcgatttccgcggggcaaggcgggggcgcgggagcagcgcgcagctgcggggccattccacctgagcgccctgaggtcagggccggggcctgaggacac

SEQ ID NO: 240906 - DNA, 122 bp, Homo sapiens
ggaggaaaggccacccgggacggcggcggacttggaacgatattatttatttgcgttgggcgtttttttaagggatgggaggagtgagtgtgggagggggaagctgtgagtttctctggccg

SEQ ID NO: 240907 - DNA, 122 bp, Homo sapiens
gcaggtttcccaccgacgcccgctcggaaggcgagagcccccacgtggcccggcgcggcgcggcccccggggaccgcgagcaacaaaagcccggcccgcagcccctgctcctcgccttcctt

SEQ ID NO: 240908 - DNA, 122 bp, Homo sapiens
gttcatctgcctctggaaaggtactcttgcaggtcctgaaggcgcctaaatttaatgcatcgaaaatgcaactcacccagtccctccaaccctgaaccttttctcatatttcctaccgcttt

SEQ ID NO: 240909 - DNA, 122 bp, Homo sapiens
tcggcggcgccctcgcccctgagcccagggccagcttctctcgccgccgcggctgctgcgcgcgtccccgcccagcccagcccagccccgagcacgaccccagccccacgcacgaccctagc

SEQ ID NO: 240910 - DNA, 122 bp, Homo sapiens
cccacgctccgctcgccccgtggcggcatgagagcgagcctgtgattggacagggcctggcggtgaaaggttaatcccggccccccagccactcaggagcagggagacagcgggcgcgcgcg

SEQ ID NO: 240911 - DNA, 122 bp, Homo sapiens
agctgagccatctccagccagatcctcacctctctagcatattatgcttgtgacgatattcggagtctccttctcacttcaccactcattctttctatgtcttgaacttacatatcccagag

SEQ ID NO: 240912 - DNA, 122 bp, Homo sapiens
acaaactaggttttctgtctacacagtgacccccagtttccttttgacagtctgcttattcgaggacagggtgggatggggcactggaacagagcttggtgcgcgtgggtgtggctggggag

SEQ ID NO: 240913 - DNA, 122 bp, Homo sapiens
aaggagcacacacgcctcattctctgccctcacccactgctcacctagagcatcgctgagcgttagacaaagtgttacacagaatgattaaaactttcagacttctacctatgctctttagt

SEQ ID NO: 240914 - DNA, 122 bp, Homo sapiens
agaaggagtggattgcttcccacttggaaacctctgctcttcgcttctggagaggctcatcgggaacccctgcagaaggtgcccttgcagtctccactggatggcccttagggaagacttgg

SEQ ID NO: 240915 - DNA, 122 bp, Homo sapiens
ctagggttgaggctgagtgttgcgcgcacgcatttctcaacgaggcaaggctgcagagttcgtcttaaatgtctcacctgcagcacatctctcaagtcgttttgtgtgtctgagggaaggaa

SEQ ID NO: 240916 - DNA, 122 bp, Homo sapiens
ggaagctttctgttgctccgcataactgtggtcagctaatagctgctggtaagatcagcacgctttcatcagaaatgctactaatactaatggcagtttgcatttatagagcacttactatg

SEQ ID NO: 240917 - DNA, 122 bp, Homo sapiens
tcatcatttctgccatcctgaggatgcattcagctgagggaagacagaaggctttctcgacgtgtggctctcacatgctggcagtcaccatattctatgggaccctcatttttatgtactta

SEQ ID NO: 240918 - DNA, 122 bp, Homo sapiens
acatccaccagtgcctcatccacctcacactgttctgagcacacgaggctgcataacaaccgtgaggatctctggaggtgggaacgatgctaactgtcctgttcttcgcgccctaagaacag

SEQ ID NO: 240919 - DNA, 122 bp, Homo sapiens
tatctctgagtagtggagtgtttgagtgttttctgcatctatttttttcctagttttctacggtgaacatgtacaacatttgcagtcagaaaacaaaacagccggacacagtggctcacacc

SEQ ID NO: 240920 - DNA, 122 bp, Homo sapiens
ggctcaagcgatcttcctgctttggcctcccaaagtgctgggaatacaggcatgagccaccgcgacaggccatgttgctgaatttggaaagtggagcaaagaatcatgcaaaaaattaagaa

SEQ ID NO: 240921 - DNA, 122 bp, Homo sapiens
aactatctggccctggctgggctgggaaggcccttattactgaatctcccaccagagacccgctctgctaaaggcaagattgaagcttgactctcagaaagcagacatgccagatgccagag

SEQ ID NO: 240922 - DNA, 122 bp, Homo sapiens
agcctttcgtaccgtggcccctgaggctttcccaggctgatgatgaatgagcccagggcccgacggaggcatccgaggcacgtgacaacccccgctctggttgtaaattgtcaggcgattca

SEQ ID NO: 240923 - DNA, 122 bp, Homo sapiens
aggtcaaaatgttagttaccagagacctctgataaagacagagccacaggtaaaacgcagcggcacaacccctcgaccctaaaatcagaagcctatctgtgtcctggcaaggagagaagcac

SEQ ID NO: 240924 - DNA, 122 bp, Homo sapiens
tctgcacacctcgcccattcgctggacgagggcctgcctcgggtagcagcctctgtttcccggtctcctgagcgggcaccccagccccaacccctctagagaaagcctgcgcatcgggtggg

SEQ ID NO: 240925 - DNA, 122 bp, Homo sapiens
tcctgcaatccccactcctcatccttggagctttctccacagaagtgacttgacacaccgcgctacatctggggaggggggcgggtccgctttccgggagactcaagtctttgctatttgcc

SEQ ID NO: 240926 - DNA, 122 bp, Homo sapiens
tcacgaaggacagaaaccttgtccatcttgtcaactatgatttccccagcactgtggctccgacctggcacatggtaggtgctcggtgaatactggtttgaacagacgactgcggcagacgg

SEQ ID NO: 240927 - DNA, 122 bp, Homo sapiens
caggtgctggtaaaggcctagtcaactgtccgtgatgggcagggtctcactgcaggcactcggcagccggcccaccccgggtgtctgtagtcccacgtcttcaagacaccctttcagtggct

SEQ ID NO: 240928 - DNA, 122 bp, Homo sapiens
ggagtccccaactctgctcaccagctcctccggctgctgccatctgctcctgcagcatggcggcctgggaagcctgcactggtgattttctgccactcaagttttgcagacttcgggaagat

SEQ ID NO: 240929 - DNA, 122 bp, Homo sapiens
atgtaaaacaaacaattttgtccttatgtacaaaagacagccttcttcctcacaccctcacggcctattccaaaaagtgggaagggcatggggagcagctatccatcccctttcaactctca

SEQ ID NO: 240930 - DNA, 122 bp, Homo sapiens
ttttcatgcgtcctggcaggttcacactgtgctcccaggctgcagctggctcactgcggccggagcctgccaggcgggttcccgcgggcgcagccgagggtgcagctaggctccgggtcgcc

SEQ ID NO: 240931 - DNA, 122 bp, Homo sapiens
gaggtgggctggatgagccagggaggcgctggtaggggccttggcagacgcaacctcctccgtcagccccaaggccactgaaccctgcgtagcgagaaccgggagggggggctgcagacgga

SEQ ID NO: 240932 - DNA, 122 bp, Homo sapiens
actgtctaccaaaaaaacaaattattttttaaattagctgggggtagtggcatgcccttccgtctcaggcttccagttagcttggatgttgaaatttaattgctgttgtaacagtattaaca

SEQ ID NO: 240933 - DNA, 122 bp, Homo sapiens
gcgagtgtgcgcgcgcggaggagggcgcggggggccgggaatgggcgcgctgtgggggcccgcgccacggcgggcggcggccgggggcagggcggcgtggggcggcggccaccgcgcctccc

SEQ ID NO: 240934 - DNA, 122 bp, Homo sapiens
gtgagcccaggcgcaggcgcggagctaaacccggaggtgaagcaactacagctggggccacgcccacagactccgggctgtcggggcgggcggcactcgcgcttccagcctgggccaaccag

SEQ ID NO: 240935 - DNA, 122 bp, Homo sapiens
ccagagctattgttagtccgaatgtaaataagattcagggcgggagtccccgcgccgcagcggctggtgcgctcctgccaggagccggcgcgcgcgggagcacgtccggggcttttacggcc

SEQ ID NO: 240936 - DNA, 122 bp, Homo sapiens
gaagcaaaaaatcgttcattcaagtgatcatttcagaagagctctttcaccgccgttcagcgcccccctagccattagagagaaaaaccaaggccggtacaatgcgagcgcagtgtaccaag

SEQ ID NO: 240937 - DNA, 122 bp, Homo sapiens
catcattttaatgaatacataattagtgtttggggactgttaatatggaggcataactctcggagactggaagagggcctcatccaggattccagctaacagtctggatggggccctctgcc

SEQ ID NO: 240938 - DNA, 122 bp, Homo sapiens
cgcgggtgctggaggcacagcggcttccacgcagacgcccgcagcaccacagcctgtgcacggcgcatccacgccctgttacaaatgttccattcaacgccttctagcacattcacagatcg

SEQ ID NO: 240939 - DNA, 122 bp, Homo sapiens
ctgcgtcgcagtcttaaggccccgccttttcagacagcttccgctgggcctgggccgctgcggggcggtcacggcccctttaagcctgagccccgccccctggctccccgccccctcttctc

SEQ ID NO: 240940 - DNA, 122 bp, Homo sapiens
gggccctggcagccctcccccctacaagatgatccagaccattgggttgtcggtgggtgccgctgtggcctacatcattgccgtgctgggcctcatgttctactgcaagaagcgctgcaaag

SEQ ID NO: 240941 - DNA, 122 bp, Homo sapiens
tgggaggaggaagggtcaacaaagacaaacttgtcttgggggttttaggaacccacgttccgatgggagagggaggatctaatggggatcccgagtaggggatggggtcccagaacaagaaa

SEQ ID NO: 240942 - DNA, 122 bp, Homo sapiens
ggactctctttgctttttattgctcccctcggcctcccccgacacactcacacacacgcgcgcgctcacacccgcggacttggatactaaactccgcctccgaaaagacctagggaaaggag

SEQ ID NO: 240943 - DNA, 122 bp, Homo sapiens
tgggaaaaaaagaaaattaaaagagaaaagagagccttaggactgagggctgtgatcccccgtttcccacgccggcagcaggcctggctgtgtcaggaaagcactgccctaagtgtctgact

SEQ ID NO: 240944 - DNA, 122 bp, Homo sapiens
ttccctgctcttgccacgtgaggtgcccaaatatggtcggactcaggaggagccagggagcgcttgcctttctcctgctaatggggaggaggctggaacaaatgtttggagttaaacacaat

SEQ ID NO: 240945 - DNA, 122 bp, Homo sapiens
ctcagagaggggaggccgagccaaggtcacgccacctctagaaatggaggtgctgggtctcgcacctcctcctgctggtttcagagtgtgaggagcctctatcccagcttcccacgctttgt

SEQ ID NO: 240946 - DNA, 122 bp, Homo sapiens
tggaacagaatgaaatttcattcttcaaggagagtatcctttaagcatctaggttcctttcgcagctttttctttgtctgcctcctggtctaaccttaagtccttctctaggaaccaaagtt

SEQ ID NO: 240947 - DNA, 122 bp, Homo sapiens
gctaaaaccttcatgatcacagaaataatttaaaagcctagacaagagtcattaatttgtcgtcctgttagctgaattctgcatattaatgcattttgtttggttggcaggttgcttttttg

SEQ ID NO: 240948 - DNA, 122 bp, Homo sapiens
gtagatttcacttgcacctgagagtccctattcttgccagcttcgccgggcaaagcccggcgaccaggttggttcttccagcaactttgttcagaaggttggtagggaggagaaacgccaag

SEQ ID NO: 240949 - DNA, 122 bp, Homo sapiens
cagtcatagaagcgaggggcctcgatgagaatcagacttagggagagcggcgaacaggcacggctgtccaaaggcactggtggagcggcagtttggagaaactcaagattcctccagcgtct

SEQ ID NO: 240950 - DNA, 122 bp, Homo sapiens
cactgacttgtaagtgaaagaagtaactcctggtcatctcacaatatcttaagatctaaccgactaaccaagatatttaagaaatatttttatgggcacaaaaagaatagagtgaataagac

SEQ ID NO: 240951 - DNA, 122 bp, Homo sapiens
gactgcgccgctgctttgggattggtagctgagttttgtgtcgcgccttttctgacgatgcgaacaacatggcggcggaaagtggtagcgattttcagcagagacgtagaaggcgccgggac

SEQ ID NO: 240952 - DNA, 122 bp, Homo sapiens
acctgcatgagccactcttcatcctggaggagcatgagctgggagccatcacagaggagtcggccactgcctccccggaaagctcctctcccactgaggggcgcagcccggcccacctggcc

SEQ ID NO: 240953 - DNA, 122 bp, Homo sapiens
ctctatggagttctgcttgaagcaccgagaggtggccaggaggtgggtgtacgtgtagtacgagcagaaccgatcccccgacccttgtgggtggtcgctggtgctttcttagccatgagcgt

SEQ ID NO: 240954 - DNA, 122 bp, Homo sapiens
agcccacgttgccatggagaagcgccccgggcgggggaggggcggccccacgacaatgaccgcattgaggctgcgcttggcctcgcgcctctcctcgaacagcccagcgtcctctggaccgt

SEQ ID NO: 240955 - DNA, 122 bp, Homo sapiens
ccttttctggaaatttttgccacactctcagaggagatgtttcttcttactctatttctccgggattatgactcgaaaggacatgtaaattggctttgtttgccaatgaggagaaagccatg

SEQ ID NO: 240956 - DNA, 122 bp, Homo sapiens
tggcccgccaccccccgccccgcgcccccggcccgcctgcgccatggagcccggccgcggcggcacagagaccgtgggcaagttcgagttctcccgcaaggacctgatcggccacggcgcct

SEQ ID NO: 240957 - DNA, 122 bp, Homo sapiens
taccgttgcctccaccaccatcagctggagggtcacagaaggcgaccccagagccggagccggagccaagcctcagccacgagtcagcctctgccggctctgaggacccccagagagggtgc

SEQ ID NO: 240958 - DNA, 122 bp, Homo sapiens
gcgtcaaggctctgaggcggaaggcagcctggtgtatttgactggcccagaggaggccagcgtggtgcagtgtgcgacagggaggtggaggggagaagcgcacatccatcctcggctcccac

SEQ ID NO: 240959 - DNA, 122 bp, Homo sapiens
aggggagggtggaggcgggcctgaacggcagcggcccccgggcgcaggctgccagcgctgcggggaggtctgctggttgctgccgggtcccctgctattcccccagacccgcactgttccct

SEQ ID NO: 240960 - DNA, 122 bp, Homo sapiens
tgaggcagtggtgggggcaccggtgtcagggcgcagggacgccctctggactttgcaaggcgcccgcccccagagtaggcggctgggccatggggttgagaagactgaggggtgccacccag

SEQ ID NO: 240961 - DNA, 122 bp, Homo sapiens
gctatgggagacgtgtgtgtccggacacccctctccaccaggtgctctccagacagggggcgggcgttcaacccacagagccaaacgctgccttcctgggcgtgctgggacccggctgctcc

SEQ ID NO: 240962 - DNA, 122 bp, Homo sapiens
tgctctgaccattactgatgagggtgaaggtgtagaggtcgggccggcccttgaaatcatcgccctgccgcaccagggcctgccggatggtgtccaggccgctcagcaccaccacgggtgtg

SEQ ID NO: 240963 - DNA, 122 bp, Homo sapiens
gatcggatccttgcagctgtttcttctgtaggtctcggagctcactgagaacgtccagcacgccttcccggcggggcccggcccaggtgcgcactagatgaggcagtcaaccaagtcaattg

SEQ ID NO: 240964 - DNA, 122 bp, Homo sapiens
acagtgaggacgtccagggcgctgtccagggtgaggagtttatagatgatgatctcgactcgcagactctaggtaacgtccgccccaaacccaccccgccctcccacaggccaccccgctgg

SEQ ID NO: 240965 - DNA, 122 bp, Homo sapiens
atcaggacttgaggagactgacagacacatacagcatctgatgagatcaaggcaaccaaacgcgaggcaatagaaggcagggcaggtgggcacagtgggaatcctgagcgaggcatggcccc

SEQ ID NO: 240966 - DNA, 122 bp, Homo sapiens
atttgatgttttgcgacccttttaaggcgcagggcgcgaaagaacagaaacagaagtgtccgttcaagtaggtcggccggggtgtcactcgtataaaaacctatgctttgaaggttctcgtg

SEQ ID NO: 240967 - DNA, 122 bp, Homo sapiens
taaaaaagatgaaagtcaggctggcgcagtggctcacgcctataattccagggatgtcaccgtgttggccaggctagtcttgaattcctggcctcaagtgatccgaccacctcagcctccca

SEQ ID NO: 240968 - DNA, 122 bp, Homo sapiens
cccgcagcttgtccgcagccggggcgcgtatccccactgctggccccgctgcccttcaggcgctgccgagcccctcgactagccatggcaagcctggggaaaaaagaattcggcaccctatg

SEQ ID NO: 240969 - DNA, 122 bp, Homo sapiens
tcttgccctcagatagcaaaactccaggttcttggccttcaaactccaggacttaaccagcggcccctcaggttcttaggtcctcagcctcagactgagttacaccatcatctcctctggtt

SEQ ID NO: 240970 - DNA, 122 bp, Homo sapiens
agggtccctgcagccggagtgggggtcctcggccggtgctggagtctgggtgctggatggcgcagccggcagcagcgcagagatggagagatgaaggcagcggcggggggggggggcggggg

SEQ ID NO: 240971 - DNA, 122 bp, Homo sapiens
cttttgccattcatgggccgctggatcaaagcctccctctgctctgttgagggcagtcttcgcagccctcagaagcgcaattggaggcttctgaggaaaaatcagtggcagctccctcagaa

SEQ ID NO: 240972 - DNA, 122 bp, Homo sapiens
ggaccgcatgggactcgtgtgtctcgcccaggggagcaggcacacactgggcagagtccccggcctcggcgtccgtctccagcatgggccgcgtactctggcaggaggcgaggtcacagcgc

SEQ ID NO: 240973 - DNA, 122 bp, Homo sapiens
ggaactgcggttgctacacaggtcacatttgaaataaaagtcctgggacggcggccggcgcgacactctcccccgcacagcgcaggctctcactgggaatctgccgggaccgcagttgccaa

SEQ ID NO: 240974 - DNA, 122 bp, Homo sapiens
ctccccagaaaaactgcaagtgctctcaccctggtgaccctgccctcactgattcaagctcgtcactttaggctctcccactggatgggctggggcaggtcacactcaggaaaggaaggaaa

SEQ ID NO: 240975 - DNA, 122 bp, Homo sapiens
gcgcgggcgggaaccggggctgtacgcggtgcttgcgggccagcgtgagttcccggtgggcgtgggcttggcgggccccgcactgggagcggccggccagccggccccaacggccccaggca

SEQ ID NO: 240976 - DNA, 122 bp, Homo sapiens
acctccttaggcatttcacggatgtgttatttatgctcaaggaggggtctcctttcagcccggcaacccaaatctttgctctgtgcttcggactcagtgggggcttgtcggatgagccactg

SEQ ID NO: 240977 - DNA, 122 bp, Homo sapiens
tcttctgtagcctgagacagctgccttgtgtgcgactgagatgcacagctgccttgtgtgcgactgagatgcaggatttcctcacgcctcccctatgtgtcttaggggactctggcttctct

SEQ ID NO: 240978 - DNA, 122 bp, Homo sapiens
gtggtgcccttctgcaggcacccctgcagcctagggggcggggctcggcagccaggtcagcgctctgtgcctgccgggagtcagcacagtccagtgtctctagcttggcctcagctctggcc

SEQ ID NO: 240979 - DNA, 122 bp, Homo sapiens
ggactgcagacgccgtagaagcggtgcagaaagtgggaacccctccctggccgaaatgagcggactggatctaaagataccccagcttcgcacgcggaaagaactggtcgagttaacgcgtt

SEQ ID NO: 240980 - DNA, 122 bp, Homo sapiens
gaggtcatacatcaaatgtgcccctccagagcaggctgagggctggggcagctttgtgttcgccgttcagtgactcttggaataagagccggtgaggtatccccgagcccccggcctgtact

SEQ ID NO: 240981 - DNA, 122 bp, Homo sapiens
gatttggcttccagcccctgctgcctttatcagctgtctgagcttagcatgttactttaccgctatcccaataccttcatttgtaaatggacagggttccttttgttcttttattttgtttg

SEQ ID NO: 240982 - DNA, 122 bp, Homo sapiens
catcagcaaggtgatggaggagctgctgcgcaggctgcaccctgggaccctgccacactgcgccgtgctgcacaccctcgccagcctctcggtggccaacggtaggtgacgcgcggcctgcc

SEQ ID NO: 240983 - DNA, 122 bp, Homo sapiens
cagaaggagccacatccctgccaatctgccacagtccgatgccagctgagtctctgaggacgcaaggcggacatggagggggagactcgatggggcaggggtctgaccgtggggccctgtgt

SEQ ID NO: 240984 - DNA, 122 bp, Homo sapiens
attattatagcattactagttttgttctctgcactattgatttctgagaaaacggtgttacggggaaaaaacaaacttccatcatgagtgcagatttttcagttttaccttataactctcag

SEQ ID NO: 240985 - DNA, 122 bp, Homo sapiens
atgctttatagtaactatcttatttaatgaaactcagtgcaaacctataaggtaagcaatcgtattttcaccattttgtgagtgaggcaccagaagctgagaggttaagtgatttgtccaag

SEQ ID NO: 240986 - DNA, 122 bp, Homo sapiens
cactcccatggggcctcagtttcctcatctgtagatggggtcagatcattgcctccacttcgcagggccagggcaacggccccaggaggagacacccgaacgcagcacctgctcacaggcgt

SEQ ID NO: 240987 - DNA, 122 bp, Homo sapiens
cgccgtaccccgagagccggtaagcccccgccagcacctcttccctcatctcccggccctcgagcccagatcctgacgtcgtctgatccgccagtccaggctgccccgaaggcgtgcgcgga

SEQ ID NO: 240988 - DNA, 122 bp, Homo sapiens
ctcccaggttcaagcaattctcctgcctcagcctcctgagtagctgagactgcaggcactcgccaccatgcctggctaagttctgtcttttatgtcgagacagggtttcaccatgttggcca

SEQ ID NO: 240989 - DNA, 122 bp, Homo sapiens
gtggtaaggatggtgacagggcaggtacagggctgtggctggggaggtacagggctgtgacgggagacactgaggaggatatgggagcacatagcagagacaacaaacatagtcctaacatc

SEQ ID NO: 240990 - DNA, 122 bp, Homo sapiens
gcgcccgcagcgtgagctcagcaaggtcctaagcctctccgacatggggcgtggcggggccgcggggctaccaggtgggacctctgacgcgccgccttcgccttcgccttcgccttcgcctc

SEQ ID NO: 240991 - DNA, 122 bp, Homo sapiens
ttccagggcaggaaaggttcagagacagagccagcccaggctgtgtaccaagatgacaaccgagctgcctggagatgagggtgcagagagagacaccccagagccacgtttcagagggccct

SEQ ID NO: 240992 - DNA, 122 bp, Homo sapiens
cttgatctcctgaccttttgatccgcccgcctcggtctcccaaagtgctgggattacaggcgtgaaccaccaagcccggccggtaacaaagtcttaaaagcggtcttattctgtaatacgtt

SEQ ID NO: 240993 - DNA, 122 bp, Homo sapiens
tgagacggttccctaccttccttctgcgcagagattgcctgttggggatgaatcgcttagcgagacccagccatagctggctacgctgagttccggcccgggaccgcgcggagaggcaagat

SEQ ID NO: 240994 - DNA, 122 bp, Homo sapiens
gtgaccagggagaatgtacatgggtgggggatttgtaattcattaatcagcacgaggcaacggaccagtttcaacaccacaggcttcttgggtgactcagcgggaatgctccgattcaaggc

SEQ ID NO: 240995 - DNA, 122 bp, Homo sapiens
tttccagtttcgctgaggcctgttaaccgctgggggcgccttcgggacagctggcttctgcgcatgctcttgaccctccgtcccccggaggaatgtcttaagtcaggagctgattagtggtt

SEQ ID NO: 240996 - DNA, 122 bp, Homo sapiens
tattgggacaaacctacctcttctaaagcttaaaatggtaagtcagggttttagcgtccacgttctgcggagagaaggcagacttgactggggaaagcgcaggctgaccgagtgtggcggga

SEQ ID NO: 240997 - DNA, 122 bp, Homo sapiens
tgccctcagaaaagggcttgagggagggagtccacccatttttgcccttctgctttgtgccgtgtgagaacacgacaaatctccctttaggaagatgtagtcttcaatgcgccatcttggaa

SEQ ID NO: 240998 - DNA, 122 bp, Homo sapiens
gcctaggaggaaccgggggagggacctgcgcagctggttctgagcaaagactttggccaccgtggctctcactgacttcagcacgtgttttcgtagtctcgcgagtgcagggagtctcagca

SEQ ID NO: 240999 - DNA, 122 bp, Homo sapiens
cagcagcgtggagcagccatcccccagcgggtagcgttggtagcgggggacgctgaaaggcggcagggcgtgaaagcgccgttccagcagcggctccaggcgtgaagctgacgggtccgcgg

SEQ ID NO: 241000 - DNA, 122 bp, Homo sapiens
tcctctttctcacgcagcctcttgctggcagcatccaagttctgctgacactgcctgttgcgctccagctgctcctgcatcttctcctccgccccggcctcccgctcctgaagctgccggat

SEQ ID NO: 241001 - DNA, 122 bp, Homo sapiens
cagtccagggagcaccccagccttccatggtagaaaacccactccacatccactgttcctcggaataatctggttttaggatgcaggggacatacaaccaatttgatacaggcagagttttc

SEQ ID NO: 241002 - DNA, 122 bp, Homo sapiens
ccagatgatggaagggcagtgcacagcctgcggggcagacagtggggcagacagcggggccggcagcacaggctggggcacctgcgggccagcgggcggcgccgcgggtacctgcgtagcag

SEQ ID NO: 241003 - DNA, 122 bp, Homo sapiens
tggccactcagcacctagctttgaagggctgttttatgtgacagccactcccctgcctgtcgtgagggggcccgggtgttcatctcagattgatggatccctgccatcaagactgggcattc

SEQ ID NO: 241004 - DNA, 122 bp, Homo sapiens
agactcctaattcctgagctccattctggagccttcctcttactggggggcaggatgatgcgccccggagaggtggctcccgccggaggctcccctctggccgtaggaggcgcctttagggt

SEQ ID NO: 241005 - DNA, 122 bp, Homo sapiens
tactgtgtgtgagacaccactctagccgcagagaacacaaacctgtccgctaggcttcagcggcagacattgagaagtgcagtagcaatcgtgcaacaccctaacaggcactctttgagttg

SEQ ID NO: 241006 - DNA, 122 bp, Homo sapiens
aggctgaggtgggaggatcgcttgaaccccggtggtcgaggctgcagggagccatgatcgcgcgcgccactgaacaccagcctgggcgacaaagcaagaccttgtcccaaaatagattaaat

SEQ ID NO: 241007 - DNA, 122 bp, Homo sapiens
gcgcccgaggtggcaggggaggcggggcgggaggcggcggtgcccaatcagcagccgagccgttgggccaggctgggaagcagtgctgtcttttggcaccgtctgatccgggctgagggatt

SEQ ID NO: 241008 - DNA, 122 bp, Homo sapiens
gctttaagaattgtgacactctaaagagaaattgtcattgccacttaatttttagtgaaacggaacagcatgctgaatatagttaacaattgagtactctggctttcaatattggttaagaa

SEQ ID NO: 241009 - DNA, 122 bp, Homo sapiens
gccggggttgtgaggggtgatgtcctcaggcggcggcgctgcggggtgcggcgaggacaccggtggggtgagagcaccggcggggcagcagcgggggccgcagcgccgggtccctcggcccg

SEQ ID NO: 241010 - DNA, 122 bp, Homo sapiens
actgtttgtaatttcatgagcatgtcagcctaacggtgagccgaccttcaggctcctaagcgtgaaggccggagactctccctttgtaaggcttaaatctgagtgcagcaaagaatgaggaa

SEQ ID NO: 241011 - DNA, 122 bp, Homo sapiens
tgccaccgactgcagcagctacttccgcctgggcgtgaagggcgtgctcttccagccctgcgagcggacctcactctgctacgcacccagctgggtgtgtgatggcgccaatgactgtgggg

SEQ ID NO: 241012 - DNA, 122 bp, Homo sapiens
gacctcaagtgatccaccgacctgggcctcccaaaatgttaggattactggcatgaaccacggcgcccagcccatccgacttttgtaacactcagaattgtagttttgtttgtttgtttgag

SEQ ID NO: 241013 - DNA, 122 bp, Homo sapiens
gtcccacgggcattgcctccccaagtgggacccattttgtggcacgtggcccggacgacacgtatccctgggcttgacatacacagacacacaggaaacattggccatgggacatgcctctc

SEQ ID NO: 241014 - DNA, 122 bp, Homo sapiens
cctcccctcctcttccttccctctccctgggcccttgatgtccctccgacgttccctggacgttgtgaagtgacaagcaagaaagcatatactgtctgctcacatttttaagggcaggaaac

SEQ ID NO: 241015 - DNA, 122 bp, Homo sapiens
tcacacgcataagcacgttactgagaagatttatcccaaagcacgtacggggctccggcccgtgcaaacacttgcctgctggtttacagtgatttactcacagattaccctctgacgaaggg

SEQ ID NO: 241016 - DNA, 122 bp, Homo sapiens
tgtctgcactgtgagtggctccgtgctggcgtccgcaccagccgcttggggccagaccttcgcgtctctgcagctcggagcagttctgctcttcagcagatgcttgaccggctgtagccaag

SEQ ID NO: 241017 - DNA, 122 bp, Homo sapiens
ccttagtttctacagatgagtatagaggagtcccttctaagattcctcaggtcagacctacgattcagattaggcctcagagaaagagatacacctcccccctccccaaacgtgccaggttc

SEQ ID NO: 241018 - DNA, 122 bp, Homo sapiens
cccagcagaaggccacaggtcaaggagggaaagaccgtactacttcctgtcacccctgtgcgttgctctgcaaagagcaggtgggagccaggacaagagctgcaggcacgggcgttatctgt

SEQ ID NO: 241019 - DNA, 122 bp, Homo sapiens
aggccaaggtgtttgtggtgctcgtgggaaacttagaagcacagatcccccaacctgctccggatcctcatgagcacagactggcttgcacatcattgttctcattgccttcccagacacca

SEQ ID NO: 241020 - DNA, 122 bp, Homo sapiens
tcacatatggaagtcagaagcttggtcccgtctcccagcatctcactttgttaaggcctccgcttctttccccctctgtgatatgagtaggctgacagaaagcccctttcctcaacacaagg

SEQ ID NO: 241021 - DNA, 122 bp, Homo sapiens
aactcactggcattattcacccttggttgaaggtcagcattctcactggaacctcactcccggttcccagcttcaggtgtggcaggagaaggttaggacatcaggtgattgcttacacaggt

SEQ ID NO: 241022 - DNA, 122 bp, Homo sapiens
ggctgggccagcctggttcttccaagtgccctcaccatggcctccttaatttccttgttgcggaaactataaatgatggggttgcacatgggggtaatgatggtgtacaggagggagaaagg

SEQ ID NO: 241023 - DNA, 122 bp, Homo sapiens
atgggaacagtattcagtggttagacggcctttcagacccaacaatatcaaggattgccacggttcatattgggataatcattttagagcattcgctttgctgcagaatacaaattgggttt

SEQ ID NO: 241024 - DNA, 122 bp, Homo sapiens
aggcggccttctggcccctgtgggtctagggcggtaaagcgtctaagggtagctgccaagcgggccatgacctgggctgggttttcgtctttacctcgggtagtttccttaagttcgtcata

SEQ ID NO: 241025 - DNA, 122 bp, Homo sapiens
cggccagccgcccaccccacgtcagcaaagccagctgcccgtggcccgaggatgtgtcctcgccatgttcctacggccagtcctcctgaggccaccgtgaccccgaggggtcccgtgacggg

SEQ ID NO: 241026 - DNA, 122 bp, Homo sapiens
aacttcaggtcctaccttccacgggaaacagcctctaattccttcctttacttttctaggcgcaggagccagctccccgcccctccacaccgctccactccccgcttccaggcgcatccctg

SEQ ID NO: 241027 - DNA, 122 bp, Homo sapiens
aggacgcggagactcggaggaagagtgtttcggtggcgctgggacgggggcgtttcccagcgctggttttctgctggcgtcccgaggtgtggtctctccgaggtccagcacagcaactaact

SEQ ID NO: 241028 - DNA, 122 bp, Homo sapiens
gctgcacggcccgaatgcttcttcgtgggttttgtttaagcagccgcgacctgtgcctgccgccggctacctccgctgtggcgggcgagcacctagggtcctcacctacctgggtcacagtc

SEQ ID NO: 241029 - DNA, 122 bp, Homo sapiens
aggaggctggggatagaagggcttcctccaggattctctgcaggagatgagcaaaacgtccgcagagccagtgactgcgggacccacgacaatctcaggtcacgcctgccgggagaagcagc

SEQ ID NO: 241030 - DNA, 122 bp, Homo sapiens
agaaagtgaattccaaacccaatgagattagacagtccatactcagagtccttctgtgtccgcaggagctgctctgaatggcacaggcctcaccgaccatcttaaatgctttgaacatgctt

SEQ ID NO: 241031 - DNA, 122 bp, Homo sapiens
tgtgccagcacctactcatttgtaaagctcctgtgaaaatgaaggacagattcttcacttcgatgattatggtggtgatgggacctgatcccagcagtcacaaatcacaggggaaggtccct

SEQ ID NO: 241032 - DNA, 122 bp, Homo sapiens
gggtctgggtgctggagatgatggggggtcctgttgagaaacagcgtcccattaggcacccgggaagggcacgtccctgctggcgccctcttgggtgggttcagaagtgtattcattaatcc

SEQ ID NO: 241033 - DNA, 122 bp, Homo sapiens
tccagcgccgcccggtcctcacacagaaaactcttctagctctgcgggtgcggctctaaacggtaatgtttgcattttctctagggtgatccgcagagggggccaagccataagtcccctcc

SEQ ID NO: 241034 - DNA, 122 bp, Homo sapiens
tgtggctggttgctgaccttcttccacatctgtgtcactgttcaaattgaaggcaaaaggcggcccaaggccgcccaggaccggggaatgcccctcttcatcactgtgaagggaagaaaaga

SEQ ID NO: 241035 - DNA, 122 bp, Homo sapiens
cccgggcgcagtaccccaggtagtcggccagcaacagctcggtgcgctcccgcagcgggtcggccatggtggtgcgctcccgcaactggtcaaccatggtccggcctctgctggggggccgg

SEQ ID NO: 241036 - DNA, 122 bp, Homo sapiens
tgtattcacccacatcaggaaccccgcatcttggctttttcatgacatctaaggtgttatcgtcaagtttgccagtcacctctaagccgaagaaagactgcatttctcggagcctctcagtc

SEQ ID NO: 241037 - DNA, 122 bp, Homo sapiens
caaaatgatacagctaaattgaactatatagttaagctcactgcattaagaaaaacattacgcaaaaccaacgatagcaaagttccaattatccatgctaattgaaagaaaccggggcacta

SEQ ID NO: 241038 - DNA, 122 bp, Homo sapiens
ttatttctacagaaaaggatagttttcagagtgacaccccagcaaacgctctgggtggctcgcagaggctgagtttaaaccacgtgagacctggccgcggcgagagtcctgtccaatgactt

SEQ ID NO: 241039 - DNA, 122 bp, Homo sapiens
atcatggacttttcttctggagtctcaacctcagtccccagatgacctagaaactcagaacgacagtatttgattccttgggtgtaatgcagagctcaatatactcaaaaactgcactgtag

SEQ ID NO: 241040 - DNA, 122 bp, Homo sapiens
ggcggaacgctccgagccaggtcgagtacagatgttttcccattggcaagtggacgagaacgttcttcagaagtgttggtgttggcacagaagccctgtttcctgctgcgctggtgtgacca

SEQ ID NO: 241041 - DNA, 122 bp, Homo sapiens
aggagtcctcattagaggcaactgcggtggcccttgtccgaggagccttccctgaccagccgccccaggcacccttccctgatgaaccaaggtgtaatcacgtgtcctgatcccgctcccca

SEQ ID NO: 241042 - DNA, 122 bp, Homo sapiens
tctgatgggttcatcggggctttccgcctttgcttcttcctcattttctctttctgccgccgtgtaagaagtgccttccgcctcccgccatgatgctgaggcctccccagccacgtggaact

SEQ ID NO: 241043 - DNA, 122 bp, Homo sapiens
cctggggcgagccggtgagggtagcccgaggcccggagaggtctttaagcatcgcgggtccgcctccctccctctcgagccctctttgttttccaaatactctaacgctgacgtcaccgggc

SEQ ID NO: 241044 - DNA, 122 bp, Homo sapiens
tagaccagtaatcctcaacatgaggtcgaaaaagaaagacgagagtagaggatgaaaggacggcctggcatactaggccatctaaagtgcatccagcagctcacctgcacccccacaaacca

SEQ ID NO: 241045 - DNA, 122 bp, Homo sapiens
aaggcagttaaccaatcggagaagagatgggtggctcgaaggatggcctgctttccccggcgtctccaggaagtagtggtgggacccagatctttccctcgagcccacctctccaggtcttg

SEQ ID NO: 241046 - DNA, 122 bp, Homo sapiens
ctcgtcttctcacactcactcggtgtgtgacagcgacaggtcacagagggcggtaaagtgcggcgcccttggggcggtttcgtctggcgcggagtagaggtggccggcagttgtggttgctc

SEQ ID NO: 241047 - DNA, 122 bp, Homo sapiens
gagtgggagtcactggttctggatggacccacggacggttcatctctagtcgaagtcagccgcaggcaggaaggcagagggcagggtgcagaggctggcgggggaagggcggtggaaaggcc

SEQ ID NO: 241048 - DNA, 122 bp, Homo sapiens
ctagaccaggaaaagattctttgtctacaatgtcacaagctctagtgcctttccacaaaacgatgagagacagagaagtatttgaatttgcactaatggccaatataactggccacgaacgt

SEQ ID NO: 241049 - DNA, 122 bp, Homo sapiens
ggtgatcaggaacaccagcaaaccagggctgacaagagcaaggaatcgccaggcccaaaccgcggggtgagccagggctcagaaacgagggtggcccgggagccattctgcccgggcgatgg

SEQ ID NO: 241050 - DNA, 122 bp, Homo sapiens
ctgaccgtccacactcaaatatgtgcgtgtccacactgaccgtccacactcaagtatgcgcgtgtccactgtgcctcagggtctagagcattaatttaacccatgcaattatttgcaagtat

SEQ ID NO: 241051 - DNA, 122 bp, Homo sapiens
aaagagcagcagtttcaaaagacacgtccactccggcttttgccttgcagtagctgccggcggctgcaaacgggccgtcacatccgcctccttattggctgcgaacctcgcgcgatatcacc

SEQ ID NO: 241052 - DNA, 122 bp, Homo sapiens
gcgccgcgggcggctggcccccgagtgcgggaagggccggcagggaggcggagcggaagccgagtgcgagggacgagcggagtaaaatctccacaagctgggaacaaacctcgtcccaactc

SEQ ID NO: 241053 - DNA, 122 bp, Homo sapiens
ccacatcctgccctcgagccggggcgaaactcacgcatcctctctgggcgtggggggctgcgagcgccgggcccctcccagtgccgagccagccgtgccctctggtgcctgccggcggttgg

SEQ ID NO: 241054 - DNA, 122 bp, Homo sapiens
acagagcacagcacagccagccgcctgctcacgtaatgtaccatggcaggggaggcggctcgaatgacaaaactgctgcttctgcttgtctgctggataaaatgcctgcgggctggacaaag

SEQ ID NO: 241055 - DNA, 122 bp, Homo sapiens
gcgggggaggccacatttcctggctctaaactgtacttctaacgcctggggacacattaacgagcgggcattttcactctaaagccatgagaccaagagcactcgatgggcaccaaacgtgt

SEQ ID NO: 241056 - DNA, 122 bp, Homo sapiens
gactgggcaaaaattaaccagggctccaacaggcgaaggtcactggactgggcaggggcacgctccgcctggggagaggagatccaggaacggtgtgtggagctgggctcggggggtgcctg

SEQ ID NO: 241057 - DNA, 122 bp, Homo sapiens
tctggtattatgtcttaacatttttaaatctatggtaatctttacaaaatattttacttccgaactcatatacctggggattttattactctgggaattatgtgttctgccccatcactctc

SEQ ID NO: 241058 - DNA, 122 bp, Homo sapiens
gcagtgcctatggtattgacacttacatgaaggctcagccttgactttaaacggtggaagcgtctctcctcttgatgtggcggcaggaagtgtctcccacgcgaggactctgtgctaaacgt

SEQ ID NO: 241059 - DNA, 122 bp, Homo sapiens
tgcgaatggcacatgaacagagccatggaggaggattcctaatcaaacttagccattgatcgatatagggaaactgatcagggtggccgggagttccggtaacaacccatcacacggcttga

SEQ ID NO: 241060 - DNA, 122 bp, Homo sapiens
ccttatgaatgttatcctcattttgaggtgagaaaactgaggtacagagagaagttcttccgaggatcacatggttggtaaaaggtgaaagcaagatttgaaatcaggcagtctggctccag

SEQ ID NO: 241061 - DNA, 122 bp, Homo sapiens
tttccaaatcaaagtattaaaataactgttcagacctctcccacttcgatgcgaagccagcgcggtcccaggcggacgagcgaaggcatcgaaggccgggggcgcagccgcgggcccacctc

SEQ ID NO: 241062 - DNA, 122 bp, Homo sapiens
gagttgggcccgggtgtggagaacgaagccgaacgctgggctctggattctcctccagagcgctccgccggcctaagcacggccgccccacccccggcccgccaggcgcagtcggccccgcc

SEQ ID NO: 241063 - DNA, 122 bp, Homo sapiens
atctggaagaggtggaatcccgggcctctagaaagataggactacaacgtccagcatcaccgcaccaaacactccttcgtgttggtgatctccacagggaggcaccaagggcacagggagag

SEQ ID NO: 241064 - DNA, 122 bp, Homo sapiens
gggggcgagcaagctcggtggctgggtgggttggggcgttccgcgcgcccttcattgaagcggcggtggccgggctgggcgccggtagtggaaagcgacggcgcggctggaaaatgccagtc

SEQ ID NO: 241065 - DNA, 122 bp, Homo sapiens
actggcaccccggaacctcaggggctgccgagctgggggggcgctcaagctgcgaggatccgggctgcccgcgagacgaggagcgggcgcccaggtgagtgccgcgcacaggggaccgggaa

SEQ ID NO: 241066 - DNA, 122 bp, Homo sapiens
gattcctgctgctggtggagccggctgagtttcccagatgggctccacctgcctcctcctcggttgctgcagcattcattgcttcgtgcttcctgtctggctcgcctccaaatgagcctgtt

SEQ ID NO: 241067 - DNA, 122 bp, Homo sapiens
agattttcagattaggaacattcacctggttatacatatagtccaaaatccaaaaaaatccggaatctgaaacacttctggtctcaaacatttcagataaagcatagtcagcctatagtgat

SEQ ID NO: 241068 - DNA, 122 bp, Homo sapiens
tagtcctcctttactggatctattttaatagcataatgagggctgtgcaacccagccctccgacattccctgagagtgcacccctaagtgtctcaagatgtctgaggaacatcaaagaaaag

SEQ ID NO: 241069 - DNA, 122 bp, Homo sapiens
gctgtgccccagggtcttggccccggcccacctgcatgtaggtgatgggctccagctgggcggcccggagcttccgcagctgctccttgtccttcctcaggtctgtcttgcagccgatgagc

SEQ ID NO: 241070 - DNA, 122 bp, Homo sapiens
tgatgagcagttttttctttatcctatgagcactaggaagcccccaaaaggtgccaagtacggaagtaacacgatcaggtatgtcttttaaaaaaaatcattctgggtggaaaacactggag

SEQ ID NO: 241071 - DNA, 122 bp, Homo sapiens
gtgcggggactttggtgctggtctggcatcgacactgagccacctctgctctgtctcccccggacagttctacctcctgtgttggtgccacgccacacagagatcccggccgagttcccccc

SEQ ID NO: 241072 - DNA, 122 bp, Homo sapiens
cctccttctctggtatcctttgccgtctcatcagaaggcacagagcagggagaagatccacgctcggaaaaagatcacagcagacctcacaagcaccgagcgcggcatgcacgtaagttctg

SEQ ID NO: 241073 - DNA, 122 bp, Homo sapiens
gagttttcagctgtgcggcttcattccaaagcttatctctttgcaaaccagtccttccagcgcctgaccccactgccccttgccttagccccagaaaactctcatactggttctgaggatag

SEQ ID NO: 241074 - DNA, 122 bp, Homo sapiens
gaactgagagtggtggcctccttcactgggcaggaccacgatcatcctcacccctgctcccgtcctgcgctgctacgattgcaaccttttgtaggttaaactggctgtgctcatattgtatt

SEQ ID NO: 241075 - DNA, 122 bp, Homo sapiens
aaagcattgacggtggttgcggacggcttctgcggacagagccttgggctccgacgtctgcgcgggtaccggcagcacccccaccccgaagggagggcgggacctggatctcgcgaccgctg

SEQ ID NO: 241076 - DNA, 122 bp, Homo sapiens
tctcttggtttttcctttccgcgcggcttgggcggacgtctcgtgagacgtgggacttctcgcgggaactgcattcaaatatcccaggcgcttactcgagagctagctgagcgaatgggccg

SEQ ID NO: 241077 - DNA, 122 bp, Homo sapiens
ctgggtcatcctcctgccccagggacactgattagagaaaatccgtctgtgctggcaatacggcagtgctggacactcggaattcccttgaaggcaaaagcaaggaacagagcgtgattagg

SEQ ID NO: 241078 - DNA, 122 bp, Homo sapiens
atgagtgaggcagggtaggcaaatctgagcaagtttaggattggctaggttgaataatttcggcagactctgggttatgggaatggtctctagttgtccagtatcttctctggggggtggtg

SEQ ID NO: 241079 - DNA, 122 bp, Homo sapiens
aacaccacacaccaagtggatgacagactccggagactgatcaccaaactataacattcccgggagaaaacgggaggagggcttcgggagcgtggggcagccccagcgtcctaggtacaacg

SEQ ID NO: 241080 - DNA, 122 bp, Homo sapiens
agatgagggcatctctcaaccatctggtgctcaggaaatgaaaccttgtgagggtcaccacgcttggctaaggaggctaaatgactggcagaggatgttcctggtggtggatgctcagggtc

SEQ ID NO: 241081 - DNA, 122 bp, Homo sapiens
aaaaaaaggaaatgggatggggcacactgtcccagggcaggctcatgacaggaagtgacccgttaaggaagcagcacatcgctgcattcggctggttttcagggtcttgttcccaatcagtt

SEQ ID NO: 241082 - DNA, 122 bp, Homo sapiens
ataacttatagttaagataaaaaccattacttgccataattactttggcttctgtcatctcgttttaatatggatatactgatgaagacttcaaaattcacctgtggaaaaatgtgtatttc

SEQ ID NO: 241083 - DNA, 122 bp, Homo sapiens
acccccgaccagctgcctgatgacactgcctcttttgggggagggtggtgaccatgtgaacggcaggagtttgcccagaacaagccaaacactgctcctcctgaagctgtttggtcatccca

SEQ ID NO: 241084 - DNA, 122 bp, Homo sapiens
taaatgaacgcgccccacgctatctgaataaacagctgtgtgagaataacttctctgagacgtggtcaacacacacgcgtcctcttgcaacagtagttaccaattaagatctttggggagta

SEQ ID NO: 241085 - DNA, 122 bp, Homo sapiens
gtgaacatccccacgaagcgtcaagagccggctgccttcccagtgtcccgcagcccgcgccgccttgtggcccacactgccttgcagcccgagacctcaggaggcccagccctcaggtccgc

SEQ ID NO: 241086 - DNA, 122 bp, Homo sapiens
ccataagctggggttctaggatgtccattcttagttgagtctcatttcctgtcatatcgacgtcaaaggcccaagaccttcctcctccccttgagcaaacaagccacgccctgcaccaaagt

SEQ ID NO: 241087 - DNA, 122 bp, Homo sapiens
tggctctggctgggcggtggttcttgctgagccttagtttccttttctgcagaaaggcagcggtaatgccgccttcctgagggaagccattcttgtgacacatttatagaacgcctactgtg

SEQ ID NO: 241088 - DNA, 122 bp, Homo sapiens
agtaaatggccccaatatttatccgattgatcaagtgacaatcttaggaatccttgacaccgccctctccctcaatccccatgtccaatctaccaccaaacccttcaaaacaaaacccaagt

SEQ ID NO: 241089 - DNA, 122 bp, Homo sapiens
ctctttcttagacaagcagagaggcagagaaagcgagcaagcaatcgagagaaacacacacgagcgagaacaggcaggaaggagaacattaaatctatttgatttttaaaaagcactgactc

SEQ ID NO: 241090 - DNA, 122 bp, Homo sapiens
gtctccataaccagttcttacttgcctgtgcagactttgaggggaaggttgtgaagacttcggttgtgttccaccaactggggacagccatgcctatgtcggtggaggaagggcctgagtgc

SEQ ID NO: 241091 - DNA, 122 bp, Homo sapiens
aagagtcatcaacatcaatgcatttataatgtcatctttatgtcttattgctaccagtagcgttaagtatactcacaatactcaccatagtcacagagtaccaccaacaatagatttgaaaa

SEQ ID NO: 241092 - DNA, 122 bp, Homo sapiens
tgtgggtcttgacagatcccggtacttctgtacactggggctgtagaatgtgagcagttgcgcaagactcaggatggagtgtgttgtctcggccgggctgagacaaacatgtctgtgatcta

SEQ ID NO: 241093 - DNA, 122 bp, Homo sapiens
gtgtgggtctcttccctggaacgcggggttgagagggcagcctctactcccggaaggccccgcccccagacgccaatcaccaccgctaccccgccccgcccccagcggagccagactggggg

SEQ ID NO: 241094 - DNA, 122 bp, Homo sapiens
gccgggcgggctagtcccgggcgcccacagctgcccagtgcctcctcccctggtggcagccgctgagcagcctggagcaggagcccggagacgatggctttgacctcccaaagaatccgcca

SEQ ID NO: 241095 - DNA, 122 bp, Homo sapiens
aacactggccctcatcacgccgccacaaattgcgagggatagaagaaagctgcaaagtcacgttaaaaggaagcctagtcaaaaagtgaaaattttgtcccgccctaggcacacagcactca

SEQ ID NO: 241096 - DNA, 122 bp, Homo sapiens
gggagcggggagaggccaggcagcaggagcagacacctctgagcctgcgggggcagggcgcgggtccttcccgaccccgagagtgcagagatgcctgggtgtgcagccatgacttgggtggc

SEQ ID NO: 241097 - DNA, 122 bp, Homo sapiens
gagcccctacggccaaaccccactcccgggggacagccagatttggagtgaatcagatcacgcagtgcccactcttggagaccgctccgggggaagtccggcggggctgtgtgctgggatct

SEQ ID NO: 241098 - DNA, 122 bp, Homo sapiens
tttcttgtctttcttaaggaaaaatgcctacagagcagtgggacacagagctctgctggccgcctccgacgaggatctaatggcttttccaggagcgcaccccatcaccacccccagacaac

SEQ ID NO: 241099 - DNA, 122 bp, Homo sapiens
agcaattctcgtgcctcagcctcccaagtagctgggattacagacgtatgccaccaggcccgggtattttttgtgtgtattttagtacagacagggtttcaccatgttggccaggctggtct

SEQ ID NO: 241100 - DNA, 122 bp, Homo sapiens
gtggagctttgggcttaatgtttgagaagggaggaaaatgaaaggaaaggctgttgctggcggatggggaggctgtgagcagatccgactgtctgcatttacttaaacgccgcagttgaaaa

SEQ ID NO: 241101 - DNA, 122 bp, Homo sapiens
gtaaaaagaaaaataagaaaggtacagaagtgctactatttgtgcagaggggaaaaagcgcggacaatctataacggtgtaatatatctacggaaggatatacaagtcacgaaaaatattgt

SEQ ID NO: 241102 - DNA, 122 bp, Homo sapiens
atcggcccgggcccagcactggcgggactgacgcagttcttctacctgctttcccaagggcgacactcggctccactccagttgggccgctggacgccctaggggcccggcagttgctaggc

SEQ ID NO: 241103 - DNA, 122 bp, Homo sapiens
cagactgcgggcccagccacagccgtggagactaggcaggggcaggcgcctggggctccgcgaatgcagcatatatcctgctgatggcctaaggaacatacgctatgaagacagcctcacag

SEQ ID NO: 241104 - DNA, 122 bp, Homo sapiens
actggagagcgtgtttctcgcaggagtcaggtggggaaccgggctcctagggcctggtcacgtaagggaagaggcagtggggagccgtatgcgggaagaagggggagcctggccttccctgc

SEQ ID NO: 241105 - DNA, 122 bp, Homo sapiens
gggactcccggttctcccgctgcgaagcagcgcggccccccggggccggggcagcggcgccggcatgtcgtctggcaccatgaagttcaatggctatttgagggtccgcatcggtgaggcag

SEQ ID NO: 241106 - DNA, 122 bp, Homo sapiens
ggcctccgttcgtggcggtagcggaaccaggggtgcaggggcggagccagcgccgctggccgtggcgtccgggagctgtggggccgtcccctcatcgtccgtttccattttccttctgcgtt

SEQ ID NO: 241107 - DNA, 122 bp, Homo sapiens
tgttaaaagtaagtatatgtaacatgttttatcactctgtcattggaaatttgagccagtcgctgtgctacgaggccctctaaataattaagacataactagagggctgtgattcagtaaat

SEQ ID NO: 241108 - DNA, 122 bp, Homo sapiens
caccggtgcttctgggttgctcctgcccgcggaacccctaggacgatagaggcagggccccgggacttgcagcggtctcagctccctccgcaccagagccgtctagcgtccgggcagcgttt

SEQ ID NO: 241109 - DNA, 122 bp, Homo sapiens
tgtgagggtccactgaagtgctttaggtgagagttccctataaactgtaaagcgcgctgccgtcgtttttgcaaagctactcttttctgtcggcccagtgtagcatctggcggttttcttct

SEQ ID NO: 241110 - DNA, 122 bp, Homo sapiens
ggagtttgaatccagcctggacaacatagtgagacccttctcttataataataaagagatcgtataatttatatagatcattggtcttgaaagagtgtgtgtatgcacctctggggatgcat

SEQ ID NO: 241111 - DNA, 122 bp, Homo sapiens
ccgctgccctccgccgagccaggcctgcctgggacaggggtcgtcaccaccgggagcgcccggccgcgctacctggaccacacagtccgactgcagcagacacgcgcccaggtcctccttca

SEQ ID NO: 241112 - DNA, 122 bp, Homo sapiens
cttcacagacgcggctcgcgcccaccggggtcctggcgggtgggacccgcagcctccacgcggcccaggccagcctgccaccctctgggcctcctacctgtgcctttctctgaggggacacc

SEQ ID NO: 241113 - DNA, 122 bp, Homo sapiens
ctttatacaaaacactttcagatgatgtgctctctttgacaaagagtaataaccaggctgcgcctgtgaaaattgatgaaaaaattgcaatcaggggaaagtgtgatctgttctgtgttttt

SEQ ID NO: 241114 - DNA, 122 bp, Homo sapiens
agctcaggaggcggcagaacccaggggtggagagtggggggcgggcttcccgggcgccgccgggtcgagtcacttccggtgccctgacctttataggagtaaacagacccccgccatccccg

SEQ ID NO: 241115 - DNA, 122 bp, Homo sapiens
ttctgtaaagaaatgttcacgtgggagcctgtccacatgggctgtactaaggatctggcacgaggaagaaatatcactgcagaacctgaagccctccgttggaagggtcgttcactcgagta

SEQ ID NO: 241116 - DNA, 122 bp, Homo sapiens
aggatgtgtcaactagtttaccagagacgaaggtaaagtcccgtctcctgcagttgttgacgttcagtaggtcgtcggttaagaaaagtggctccctggttgaccccagctggatagaggct

SEQ ID NO: 241117 - DNA, 122 bp, Homo sapiens
gaacttctgagctgaacccacatatctgtcccaattattaaaggagtcgatgagagtgagcgtctccacagaagagacacttctaggatatgcttccctcactcaattcaaaaagaggagac

SEQ ID NO: 241118 - DNA, 122 bp, Homo sapiens
tgccttactatccttccagcccagagcacgtgagctgacgtcttctttggcctgtgtggccgtttccttgccaaaagctcagtttggggagagcttcttgcgtattagatgcagtctgcaga

SEQ ID NO: 241119 - DNA, 122 bp, Homo sapiens
ctctgcaggggcccagtcacctagaacccatgcctcccagctctgggttggatctgaacacgtggcagaatgtcctgattgcacttgtcaaactgcatattaacaggacttctctcccagat

SEQ ID NO: 241120 - DNA, 122 bp, Homo sapiens
ccctggcctcgcacacgcagtcgggactggatttctgatggcaattcagtgacgcacaatcgaaaaccagcagggcggaacaggagatgggagcaaactaagctaccgtttcactaacttca

SEQ ID NO: 241121 - DNA, 122 bp, Homo sapiens
tcattaggactcattcatcctatataactgcaactttgtacactttgacctgcatcattccgtttcttccctgcccctggtaaccaccactgtttccacgtattccgtgtgtgtgtgtgtgt

SEQ ID NO: 241122 - DNA, 122 bp, Homo sapiens
ctgtgggccgactgcctgattttggccactaggtggagtatggctctagggtttcgaggccgctggtgtcggcgggcggagtccgggtttgcagccgctgtgcgccatgagcaggtagcagc

SEQ ID NO: 241123 - DNA, 122 bp, Homo sapiens
ccgggaccccgtccctctttccccttcagtcttcagggagggggaggcgctccgcattagcggggcagttcagcaaccccgaccccacccgcgtggctccaggcccaggggtccgttcactt

SEQ ID NO: 241124 - DNA, 122 bp, Homo sapiens
gaggtggctactgagagaggctcctctgcctgtggaaagaagaaggaacaaaaggaaagacgagggaacaaaaggaaagatgaagaacaaaaggaaagactgtcttgtagtttgagtgccag

SEQ ID NO: 241125 - DNA, 122 bp, Homo sapiens
tctggagctggagaaccactgggcgactctgcgtgactcctgcacccactgtcaggaccccggaagccaaccggtttggagaaaagggcccactcctcaccgcgctctctgcccgcggcctg

SEQ ID NO: 241126 - DNA, 122 bp, Homo sapiens
ccaggaaagggaggaaagccctgtccctgcctgagcctgtgaacccagcgaagaggcagtcgggctgattttacatgcacctctgcacttagagggatcagggcgttctcgcatgaaatccc

SEQ ID NO: 241127 - DNA, 122 bp, Homo sapiens
ctacagtttgcttcatctgactggtctccacagtcattgtccccattgcaaagaagtctgcggtttacacaccttcctagaatggagaaagagtattacccacagccacatggttggcaaga

SEQ ID NO: 241128 - DNA, 122 bp, Homo sapiens
gaaagacaaagaaaggttgaagaatttgttcgttgtccataagtgcttgaagaaataattcgttcatgaatggaactgaaagtggaaatttcaagttgaaaatcagcaaactggcttttagc

SEQ ID NO: 241129 - DNA, 122 bp, Homo sapiens
tcactggactgctatgagaactcaatgacgaaagagttgagaaggacttaggacagtgcccggcacaggaaaccccgcatgtgctgcaagaggctattttgctccatggcaaatccccaccc

SEQ ID NO: 241130 - DNA, 122 bp, Homo sapiens
ttttgcataaagtttgctggtaagtgaggctggcagcacttctgaggctggagtcagctccgtggaggcagggccctcatcttattcatcccacctcccctcagaggctggcacagtgctta

SEQ ID NO: 241131 - DNA, 122 bp, Homo sapiens
gaatatctgaggcagacagaattctgaaatgtcccatgcatttcctgcccctcagtggcacgccccgcatctgcccctcccctgagtgtggatgaaaccatgaaattaatgtgcctataaat

SEQ ID NO: 241132 - DNA, 122 bp, Homo sapiens
aagttcgcccagaggtgacacacttgggaatttgtggtgccatcgtgccaggtccctcctcgtaaaagtgcctacccagcgcctgcaaccagagccaaagcctggacatgatagggaaactc

SEQ ID NO: 241133 - DNA, 122 bp, Homo sapiens
gcagcaaaggtgccaaagatggggccctcacgctgctgctggacgagtttgagaacatgtcggtgacacgctccaactccctgcggagagacagcccgccgccgcccgcccgtgcccgccag

SEQ ID NO: 241134 - DNA, 122 bp, Homo sapiens
tcccagccctttgatgcctctttctcactgccctgaagttaaccagcgcagtcctccgtgcgtcccgcccgccgctgccctcactcccggccaggatggcatcctgtctggccctgcgcatg

SEQ ID NO: 241135 - DNA, 122 bp, Homo sapiens
gccgcgcgtgccgggcagggtcccccaaggagaaatccctcttaaaagagtttttcctttcgcgtgaactcgccgcctgcatccagcagcgcggtctccaaggtgaacctcgcacaaatgcg

SEQ ID NO: 241136 - DNA, 122 bp, Homo sapiens
ggcctcctgggtccctatccgggggcggggaccagaaggttctggctgaggcggacgatgcggtgggaacctgggcccagtcccaccatccgggcccggggctcacctgctgaactctgagg

SEQ ID NO: 241137 - DNA, 122 bp, Homo sapiens
cgcacaccacccccaacctagcaccctgattcctacctactcactttcctctcggggaaacgtgacttgtcagtgtcatttgggaactgtcacctgcagaaaagctagggatacgcctatcc

SEQ ID NO: 241138 - DNA, 122 bp, Homo sapiens
tcgggaccgctctaggctgccaccacgccggctggccccaaaaactcgatggttgttgggcggggtcgtgacgtccttggcgtggctgcaggggaggccgcggcggggaaaatggcggacgg

SEQ ID NO: 241139 - DNA, 122 bp, Homo sapiens
agttgcttcacggtttgccgaagttcctccagctcttttatctgggctgcctccagaccacgaagcttggccaactcctggtccttgccttccttttccgtcagggcatgagccagtgcctc

SEQ ID NO: 241140 - DNA, 122 bp, Homo sapiens
cacaccatcttatatcccatatagcactcagctggtgacctcaaaacagagctggagttgcgtaaacatttgttgttttcgtttattcctcttctctaagaaatctcagattgatggaaacc

SEQ ID NO: 241141 - DNA, 122 bp, Homo sapiens
cggcctccccttttagtgaacctaaaaaacagcggcaccgtttccgagggcctcctctaacggggaattttatgttgtttctgacattgtttgttgtgcttcccacaagaccgaatgctgcc

SEQ ID NO: 241142 - DNA, 122 bp, Homo sapiens
caccttgaaaatacctcccattcagcctatccaagatgacaagctggaagaatgtttgaccgagctttcctcttcaaatttagcccagtaatgtggcacaaatcacagatgcattggtactg

SEQ ID NO: 241143 - DNA, 122 bp, Homo sapiens
cttaatctaccaacctccgagaaatcatcatccggctcgggagtactagcctcctcgctccgggcccataacactagggggtgactattttgaaactatacctggcatctggttcttacttc

SEQ ID NO: 241144 - DNA, 122 bp, Homo sapiens
caggcccagggctgctgacttaatcacgccgcctaatgtcattacctctgtgttaataaccggtgcggcggccgcagggaaggagcccttcactgtggctcagacactttccagctgacggg

SEQ ID NO: 241145 - DNA, 122 bp, Homo sapiens
gaaacagaggctggagtcgggctggaagaggctgaaaaagagagtggggtggggccaggtcgctgttgcagcacaggcaacttagaggctgtcccaccctgacgggcatcccctctgctccc

SEQ ID NO: 241146 - DNA, 122 bp, Homo sapiens
ggcactttgggaggccaagtcaggcggctgggaggtggaggttgtagctagccgagaccacgccactgcactccagcctgggcaacattgagcactgagtgaacgagactccgtctgcaatc

SEQ ID NO: 241147 - DNA, 122 bp, Homo sapiens
gcaactttccctgttctggccccgccccagccagggagggctgaggaccaaggtgtgaggcggcgctgcccccgcatccgcccgaccctgcgctcgtcccgggctcctctcgccgctccagc

SEQ ID NO: 241148 - DNA, 122 bp, Homo sapiens
ggtattagcggtgctggtggtatgtggagtggaagcagagcagggcacagggcacagcggcgggccaggctgttgcctggagcaacagggcctgttgcctctggcagagtttcctgcccgtg

SEQ ID NO: 241149 - DNA, 122 bp, Homo sapiens
acctaggtcatagttgctgccttgtgctactcttccaatatatcacatccagccctctttcgcttatgattctcattaaaataaagcaaaacatgaaaacatagtatactacactgtgattc

SEQ ID NO: 241150 - DNA, 122 bp, Homo sapiens
agtcctcccagctcatccttcaattaccattggatgacctctggtgatagattaaacactcggccgtcccccgcccccgcgcctccccacccgcggagaacctagcctagcaagtgcaaagt

SEQ ID NO: 241151 - DNA, 122 bp, Homo sapiens
cctcatttctaacccacctctgggaaataggtattctataataaagcctttgggacagggcgactgtgagcataaaataaagtggaatatataaagtgcacacgtgaggaactgggcatgca

SEQ ID NO: 241152 - DNA, 122 bp, Homo sapiens
gcagtgggccccgctcagggccatcttggctgtcgccgggcacagctggagccggaccaccgagctgacctcgggctacgggggcctcttggaacctgcgttttcaaacttttgcagggttt

SEQ ID NO: 241153 - DNA, 122 bp, Homo sapiens
cccccaaaactgaaaaaaatggcagtgtaccttgtgaattttttaaatgaaaaaagaatacgaaatgatgaaggcccttatctgatgatgacaaactagaaaactgaaatgtaaaggggaaa

SEQ ID NO: 241154 - DNA, 122 bp, Homo sapiens
gagatcaagtctcgctgtgtcacccaggctggagtgcagtggcgccatcatgtgcccagccgacacattaggtttttaaaaatgattattcatgctgggcacaatggctcacacctgttatc

SEQ ID NO: 241155 - DNA, 122 bp, Homo sapiens
ttccaccgtgcctaccaaatgaagcagtcataggaaacactgcagggagaggaagtgagtcgttagcaggaactgatggtggcttttcccaggcaccttgccacgtctgattcaatctgttt

SEQ ID NO: 241156 - DNA, 122 bp, Homo sapiens
atcttgggtttggctatcctttaatccgataggccatttgcgcaccaagtggtcaaacaccgtttcaaatgaccgggtgaacagcacttccaatgtggtgtgccaccaagtggctatcttta

SEQ ID NO: 241157 - DNA, 122 bp, Homo sapiens
tccctgttggtttggcaatgagagctctccttcctcctttgactccaacctggtcttcttcggaggttggcttcccagtgttctccaccttccacaactctaaggcctggcctgagtgtggg

SEQ ID NO: 241158 - DNA, 122 bp, Homo sapiens
tgagagcagctagcgggggctggactgggtccctgcggccaggcttccaagtcgagctgccgtttgggtgggaccagaagacgggctagtctgcgccccaggatccctccctgaggacaaac

SEQ ID NO: 241159 - DNA, 122 bp, Homo sapiens
tatcttttaggttgtatttaaaatatttaaagttgtttatgcatcaatattcagaccttgcgtgtgtgtttagttaggcttcctagtagaaaatatgaaatctctatgcatacagctataat

SEQ ID NO: 241160 - DNA, 122 bp, Homo sapiens
gcctcccaggccttgagcccctttgcggcgcagccccagccttgcgcggcctgggctttgcggccaccacaatggaaatctacggggaaaatgccagggctggttctgctggagtcctggga

SEQ ID NO: 241161 - DNA, 122 bp, Homo sapiens
aaggacccgaggtatgagaagcgctggctggacaccttgtccgtgcctctgtccatggctcgcatctcaaggtacaaagccggaacggaaaaattaaggtgtgtgaccattgtctgagatgg

SEQ ID NO: 241162 - DNA, 122 bp, Homo sapiens
gggaggagtggccggttcggttttgtttgttccttttggagggaggcaacggggggagtacgatgggtaggtggaataacagccccctcccaaagcttagcaacaacagcctcccagattca

SEQ ID NO: 241163 - DNA, 122 bp, Homo sapiens
gcgggtggctgagaacattcccactttggggagcctttgtttcacaccctctgatgtaggcggcagccttcctttcctttgggcctctggttatggagaaggctaaggcaaggtcctttctc

SEQ ID NO: 241164 - DNA, 122 bp, Homo sapiens
ctgagttaaaagaaagcaaaagtcctttctcctgctggccacattgtgtctggccttactcgcctcttttggcaaatgaggcaaatagaactaccttttcctaaggaaaggtcataagatgt

SEQ ID NO: 241165 - DNA, 122 bp, Homo sapiens
caggcagtccctcctccgagctgaaatattagaggtatgaagcagagctaccctggcgagcgcaggaaggttggcatgattgggcaccagacagtggggaagggctgggctatcagaggcag

SEQ ID NO: 241166 - DNA, 122 bp, Homo sapiens
cctggaggtcggcttcttggggacgtggctcccaactttgaggccaataccaccgccggccgcgtccgtttccaggactttctgggaaactcactgggcattctcttctcccaccctcggga

SEQ ID NO: 241167 - DNA, 122 bp, Homo sapiens
cccctggacctccaacgtttgtctataaaggatgttaaatgtcaagacacttctccagttcgagagaattcaactgccagaagccagctccagagacaggattcacccaggaggagcccagg

SEQ ID NO: 241168 - DNA, 122 bp, Homo sapiens
accagcccgatgcaaatgctttggtgaatgggctaccctaaaacagaggatgatgaagaacgatggccattcccagagtataatgagggattccctttaagtgagctttgctctgccctctg

SEQ ID NO: 241169 - DNA, 122 bp, Homo sapiens
tgtccagggtgttgaactgtgggagaggttttggagcctgggctcactgttcacacctggcggtgggcatttctcctaacgtacagttttcagttctgtacacaaggctcttggccttcacc

SEQ ID NO: 241170 - DNA, 122 bp, Homo sapiens
tagggggaagcaccctgggcaggaccccatgagtttccttcttaccaggaaagtgtcattcgtcccactttgtgatctgaactggtattatgaaacatgaagcttaaaggcaacaaagtatg

SEQ ID NO: 241171 - DNA, 122 bp, Homo sapiens
ccaccttttaaaatgtctattaacggtcttgttttattgacacatctctgctgtctacctcgctggttcaagaagttctcaagaatggattgttttctcaatcagttttatcctagtgctta

SEQ ID NO: 241172 - DNA, 122 bp, Homo sapiens
tgtagaactctaataacgaacttggcaagttgtcaacgcttgatgtgctgaagtagtcaccgcagtagccacagcagcaccgttacagtggtttcccttagttctcacctgccttgtgaaca

SEQ ID NO: 241173 - DNA, 122 bp, Homo sapiens
catgattctggtgcaccactcgtgacttttccaggaggtaactgaggatgtggccacccacgggggcaccctgtgggcagggcagggcatgaggccgggtcacggggactgggaaaagagcc

SEQ ID NO: 241174 - DNA, 122 bp, Homo sapiens
gaaggaagctggataagctaggcctttaccccagggctcgagtgagtcgctttcgcctgccgcctggggaacatcaccggggagaccagcggctcctcacggccggggcgcttcaccgcggg

SEQ ID NO: 241175 - DNA, 122 bp, Homo sapiens
cgggccggctccgggacgcgaagcccatagagggggttttccggccgcaggcgctggggccgctcctcctacggcgaggcccggggctgcgcgctgcgctctttgcagggcccccgtggccc

SEQ ID NO: 241176 - DNA, 122 bp, Homo sapiens
aaaaccttgaaagtctcactttctagttgtcccatgcaggggttgaaatttgattccaagcggaaagtatattatgttttttcaggccttcacatctagagagatggataacttccaatttg

SEQ ID NO: 241177 - DNA, 122 bp, Homo sapiens
gggttcccagcaggaaggctcacacctgcaggaggccacacgtgagcgtgtgtacatgtgcgtgtgtgcttgtgcagggcgctcccagcctccaggtgatctgctgccccagcacagcccat

SEQ ID NO: 241178 - DNA, 122 bp, Homo sapiens
ggccacctacaggaggcagcctgagcagccccagcagagacgatcacagcacgcaccagacggtacccgttctaagctctttcagtccaacccatgaaagttttgggcccctcctccaccac

SEQ ID NO: 241179 - DNA, 122 bp, Homo sapiens
tgtgtgtgtgtgtgtgtgcgcgcgcgcgcgcgcgcgtgtgtgtgtgtgtgagcgcgcgcacgtttctggggcgagtgcctctgggcaccctcaacagccccagccggaggtgcagactgcat

SEQ ID NO: 241180 - DNA, 122 bp, Homo sapiens
acaaaattgtggaatatttgaggattagtatgtgcaggcacagcctgctctttccactttcgccccaatcctaaatggagatgacaccatcaattaatcaaacaacacatatttattcagca

SEQ ID NO: 241181 - DNA, 122 bp, Homo sapiens
ggaatggcatggaaaaggcaatgagttgagaggagacaatgtatattcaggggacagagacgatactgatttgtctgaagcaaagaatgtatagaataacaaaggatggtaatgctgaaaaa

SEQ ID NO: 241182 - DNA, 122 bp, Homo sapiens
aaaaggggctgatttgagtcgtccaagagttcctgatacctgactttgggaaggacgacacgtaacctatcctgactctggatttacttgtttgctttgcctgggttgttattggaattaat

SEQ ID NO: 241183 - DNA, 122 bp, Homo sapiens
attgggccgggcgcagtggctcacgcctgtgatcccagcactgtgggaggccaaggcgggcggatcacgaggtcagcagttcgagatcagcgtggccaacatgatgaaaccctatctctact

SEQ ID NO: 241184 - DNA, 122 bp, Homo sapiens
ctcaccataacttgacgcacgacatcaggctggaaggtgccagggggcctctggaaattgcgagccgtaggagatggagtgacttctggggcttggtcctttcgcagagaggggaaggggtc

SEQ ID NO: 241185 - DNA, 122 bp, Homo sapiens
aatgacttctcctgcacccctaactttttctgagccccttggcacctctctcttaggctgcgcttggaaaggtaagtctttcttctgttctctgtattgtttggcatttcagcattcaccct

SEQ ID NO: 241186 - DNA, 122 bp, Homo sapiens
tttcttagaagggaggttctttaagaataacatgaaattatcatcttaactttataatgccgaaagtatttgataaatacaatgttttggttatgagatctaatcagactttgacggctaat

SEQ ID NO: 241187 - DNA, 122 bp, Homo sapiens
gcgtcgccatcgggacagggctgtgtggggcgggcagggcagcggggccaggctggcacacgtcgccattgggacagggctgtcctctcgccccaccctgccttagcttcgttcgaaatgga

SEQ ID NO: 241188 - DNA, 122 bp, Homo sapiens
catgttttgcttaatcctttatcacataagagagttgaagtattgacagtctttcccttgcgagtaagagaccctagtctgtctggacctgtttctgtccttaatgcctcctgcctcatttg

SEQ ID NO: 241189 - DNA, 122 bp, Homo sapiens
atccagtcaagtcaacggttctgacctggccatgtcttttaccgaattcgtagctcccttcgtaggtgtccccgttgggtagccgtgccctcccacgtccgtgcctttcgcctgcctcattc

SEQ ID NO: 241190 - DNA, 122 bp, Homo sapiens
aactccgctcccacgttcgtggagaggagcgtcgccctgggacccccaactccgctcccacgttcgtggagacgagcgtcgccctgggacccccaactccgctcccacgttcgtggagagga

SEQ ID NO: 241191 - DNA, 122 bp, Homo sapiens
ggttgacggcttattttctccttgccccacagaaagagtcagggccgtgtggacaaggttcgcccctggaagctagagcaacaagatgggtgtcctgatgccaagaagtcaccccctctctt

SEQ ID NO: 241192 - DNA, 122 bp, Homo sapiens
tcccggaagtggctgatctgttggatttgacgcggaggcggttcctcttactacggtggccggggtgctcaaagtacctgtagctgcggcgctgaggtcggaacgtctgcgtgtgtgcgggc

SEQ ID NO: 241193 - DNA, 122 bp, Homo sapiens
aatactgatttaaccgaaactgtgacaaacctcatcagccgggcagggatgcgtgtggagcgagccgctggccaagtgctgccagatgccccaagtgacccagagaaatggtcatctggatt

SEQ ID NO: 241194 - DNA, 122 bp, Homo sapiens
gttatgataccgaaagccagtgatgagggcattattcttgtgcatttgtctttcagagttcgcagattgctttctgactccagcagtgttccttattaccggttctttgtattctaattctt

SEQ ID NO: 241195 - DNA, 122 bp, Homo sapiens
ggaaacatagagtccggaggttaagtggtttgcccccagtgccccgccgacaaggcaaggcgcgcggacggggctgtgactcccagggcggcagccccctcggcgcggtctcgcgacccgac

SEQ ID NO: 241196 - DNA, 122 bp, Homo sapiens
cacagccaccctccactttgagcgcgcggacgggggcggggcaccaggccacgccctcgtcgcgaccacgcccactagactttctccgctggtggaaagccccacccagctcttccgtcctg

SEQ ID NO: 241197 - DNA, 122 bp, Homo sapiens
ttctgcgcgggcgtggagctggagcgcatgcgctcgtccgttaccataacgaccagaagacgctgcagccactagggaggagagcaaagtaatcagaacctcccaaggatggataacaaaat

SEQ ID NO: 241198 - DNA, 122 bp, Homo sapiens
tcacacctgaagtccaagtgcttccaccctgcagaatatgcagaccgctgggtcactggacgccaggccgcagcgccggcctcgttctgcttttggctctaaatgcagtcgggggacgcgac

SEQ ID NO: 241199 - DNA, 122 bp, Homo sapiens
cactgtctctattaaaaaaaattaaaaagaagaaaaaagtactgctgcattactgttgctcgtaaaagcacagagaacaagattgttggaaagcacaggcattaacaactgagttgaatatt

SEQ ID NO: 241200 - DNA, 122 bp, Homo sapiens
tgcgctcgggagcctgacagcagggcaggtggggacgggtctccaatgactgtggctagacggagcccttcttcactctccagcgcttctcccttcaaggacccaaccccggatccacccag

SEQ ID NO: 241201 - DNA, 122 bp, Homo sapiens
gtctgggaggaggttagcggatcaagacacctcggactgcagctcagagtcgtggcaagtcgtagctagtccactgagccacggtccgctcgctaggtttctcctgcgtgtgacaggacgag

SEQ ID NO: 241202 - DNA, 122 bp, Homo sapiens
ttgcacaccgagggccacgctcttcttcgggcggtgggtcagggtaagctacgcttggcccgtttgcttctggagggaggcgcctacgtgaatgagggtgatgcgcagggggagactgcgct

SEQ ID NO: 241203 - DNA, 122 bp, Homo sapiens
aaaaatgctttgaatgctgtttttgaggtatactacttccctactcccaccagcttggctcgtgtgaccttcgttgcattgagccagtgccatttagggtagggatatagttcaaagaattc

SEQ ID NO: 241204 - DNA, 122 bp, Homo sapiens
cagccacaacaccttcattcaaggccctaaaccgcagagactttctagacctatcttaagcgtcagtaccacacgcacttcgtgatggaacggtattgttctcctagaacagacccgttttc

SEQ ID NO: 241205 - DNA, 122 bp, Homo sapiens
gggaggaagtggctctgtcctccaaaagaggccaattgggctggcgagggactggagatccgtctccagtggaaaggtgaagatggactatgctggatggaacaatctctgtgtgtcttttt

SEQ ID NO: 241206 - DNA, 122 bp, Homo sapiens
gaactgaagttaactttgaggccggcccagcatttgttaaatctgagcttctgaagctgccgcagctgcaaggtgtgctcccagctcctgcagcaacccaagtaaccgggggaagtgccgga

SEQ ID NO: 241207 - DNA, 122 bp, Homo sapiens
tgttttagaaaactaagtagtaggtactcctagaaatatcatgagaaaagcttttggctccgagaactgtgaacctctcattttacaaaccatgtaaatagatccctccccagtctcccaat

SEQ ID NO: 241208 - DNA, 122 bp, Homo sapiens
cggcaccttcttgacaggggcctgggtgaggggggattggcaggtatccagcccctgcagcgggctggccatgtagtagtctgcagtcactatccttactgaaaacatgttcgccgccgccg

SEQ ID NO: 241209 - DNA, 122 bp, Homo sapiens
agccaacgcgtgagcagagcgcgggggcacaggcccattgaccgagcgcggccgaggggccggccggctgggcagcatccgaagctgccttaattaataccatcttaaatagtccagcagcc

SEQ ID NO: 241210 - DNA, 122 bp, Homo sapiens
aatgcttccgcccgcctgaccaccccctaccccgtcccttggtgcacccagacggtgactcgtcctgccctctgtggcggtggctgtacgtccctggcctgagctcgctccacagggcgtgg

SEQ ID NO: 241211 - DNA, 122 bp, Homo sapiens
cactgatgagtcaggctaaaataaagtcttcaacggagctgacactttattttgcatctacgccaccaagattacatcatcatggtgaaattcatggtccactaatatttagttaagaactc

SEQ ID NO: 241212 - DNA, 122 bp, Homo sapiens
aagttcaggaacctggcatgggccggccgcctcccgcgaagggacacacctgttggtcaccgcgctcttactggccagacccggatattggccttctggcgtcagcggcaggggcatgtccc

SEQ ID NO: 241213 - DNA, 122 bp, Homo sapiens
ggtgaaaccccgtctctactaaaaacactaaaaaattagccgggtgttgtggcgggtgcccgtagtcccagctacaggctggggcaggagaatggtgtgaacccgggaggcagagtttgcag

SEQ ID NO: 241214 - DNA, 122 bp, Homo sapiens
cgggctctcggcaggcgggaggcggcagggctggcattgcagtgcgggccgtgcgggctgcgcgggcgcggggaggcgcgggcggcaaactgcgggcacccggcaccccgcagccagtaccg

SEQ ID NO: 241215 - DNA, 122 bp, Homo sapiens
ccagggggagagagccatcctagcaggatggagaggagcatcagggcctgctgggactggcgagaggccaaggaaaaaatgggccctgtgttcccaggcactgtgtaggatgcagatttggg

SEQ ID NO: 241216 - DNA, 122 bp, Homo sapiens
tgcctagtggctcttgagtaaacaggaaggcttacgtgtcaaagtcattgatcggcactgcggcaaggtagagagggaaagacagatggcctgacctcagaggaggaggaagggttcaggaa

SEQ ID NO: 241217 - DNA, 122 bp, Homo sapiens
agctggggtgaaatttcttctgcatcatccttttggggatgtttatgatgtgacgtcagtcggattgatttttctctcttgaatgaaggatgggaggggagaaagagagacggagagagaga

SEQ ID NO: 241218 - DNA, 122 bp, Homo sapiens
atcccaaattcaatcagtccatagagacgaacagaatgagaccttccggcccaagcgtggcgctgcgggcactttggtagactgtgccaccacggcgtgtgttgtgaaacgtgaaataaaaa

SEQ ID NO: 241219 - DNA, 122 bp, Homo sapiens
gatgcatgttggattaggaagacgacaaagagtatacgctctaccgagaatcagtgactccggtgggctgtgtgtggtgtcaccagggaaaatgcttgtagagggaaatcctggggtacact

SEQ ID NO: 241220 - DNA, 122 bp, Homo sapiens
cttctccacacactaacgtgcttctctttagcgaggggttttattcgcccgccgaggctccgcccctgcctcctctgctcccctccatcctcagtcccgtctcctccctcctctgcaattta

SEQ ID NO: 241221 - DNA, 122 bp, Homo sapiens
ctgtcccgcctgcctagatcttgcaccgtggccacggggctccctcctgatagccctgaacgctccgctccatgtcctacagagagggatgtcccaagtagatgtcagctccctccagcatc

SEQ ID NO: 241222 - DNA, 122 bp, Homo sapiens
gttgggcccaggagtccagagcctgcagggcggccccgaaccgcattgcggctgggtggtcgcgggtccttcccggccggcgcgcgcccgctggctctcatcttttcctgcctctcccccgc

SEQ ID NO: 241223 - DNA, 122 bp, Homo sapiens
tggggattaaatctgtttcctgaagaggtcttccttggcctggctccagattttctttttcgttttttaaacttttaatagagttggggtttcactatgctgcccagactggtctcaaaatc

SEQ ID NO: 241224 - DNA, 122 bp, Homo sapiens
ccaagaggatctactaacaaggggaaagatctcccagtggaggtgtttcagcggatgctgcggtcttacccttgtagcctggatgaccagacagatcaaaaaaaatgttaaagtccaggcat

SEQ ID NO: 241225 - DNA, 122 bp, Homo sapiens
caatcaatccttctagtcacttgatctttctatggttttaaagcaactggttttgggagtcgaccatgaactgactcagaaaatgattaccagaagtggggttcaaaaaaagctctgggcag

SEQ ID NO: 241226 - DNA, 122 bp, Homo sapiens
cattgcctagctgggtgcctgactccccttaagtgctcagtagacgttgaactggacgggcgctggcgtggtggctcacgcctgtaatcccagcaatttgggaggccgaagcgagtggatca

SEQ ID NO: 241227 - DNA, 122 bp, Homo sapiens
tgtatgtagtgatacagagaccactgaaaccatggaacgagatatcttagctaagaaattcgctgctgcttgaaggctcggagccaaagtatagggttcaggaataagatagcagcagagag

SEQ ID NO: 241228 - DNA, 122 bp, Homo sapiens
atggagttgggaagagatgagcacagttggttcttgcaagtaggtaagggccagctccagcgtgtcactgggtaaatgtccctgcctcccccccgagcccagtatggccagtaaaggccttt

SEQ ID NO: 241229 - DNA, 122 bp, Homo sapiens
cttcctggcctccaggaatgcaggtgtctgcccagttcactaggtcctggatgaaggaaccgtggtggcctagaccagtcaggggacagcacaggcactgctggaacagcaaaggatcctct

SEQ ID NO: 241230 - DNA, 122 bp, Homo sapiens
atttgggaggtgatctcaggatacacaggtaggggagaaggaaatgagaaaggtgaaggacggctgtgcataacaggtgtgttgtcaagcaaattaccactgtgggtgaccggagctcagtc

SEQ ID NO: 241231 - DNA, 122 bp, Homo sapiens
gttcaccgggcacattctaccccggcgcaggccagtgggatgggagagtttggacgtgctcgggtgccgcccaaagacttggctttttctgctgacagcgccccacccccatcctagaaact

SEQ ID NO: 241232 - DNA, 122 bp, Homo sapiens
aaaaataccaatcaagtttaaacatgagacatgtttaaaaagtaagaccagagaaataaacggaagttaaacaggggcaacagaaagaatgttggctgtgggaccagaaaagctgcattctc

SEQ ID NO: 241233 - DNA, 122 bp, Homo sapiens
caaaaaacaaaaaacaaaagccagatagtacccaaataaccacccaaggagcccaggaggcgccattgaggaggtgatgctcgagtcggggttggaagaattaaggaattatctgagtggaa

SEQ ID NO: 241234 - DNA, 122 bp, Homo sapiens
actccccagtattacttctgaagtcttaattgtctcttttaccagtccttgatccacttacgtttttcctccctggatatgcaccttctgccccaactttgcatagtcatcctctcagttct

SEQ ID NO: 241235 - DNA, 122 bp, Homo sapiens
cagttccacaggagcctcttcatccatcagcagcaaaaccctcgggggtcccagtggtagcgggggtcccggcccaagacctgggctgcgtcctctcctcgagcctctcatgagaaagacct

SEQ ID NO: 241236 - DNA, 122 bp, Homo sapiens
tcattgctacctggttcttggccgcatccccaatgagccgctcggtgtctgtgaaggccacgtagctgggggtggtgcggttgccctggtcgttggcgatgatctccaccttgccgtgctgg

SEQ ID NO: 241237 - DNA, 122 bp, Homo sapiens
atgtatgtcattctcatcagtaaacaagatttaactgctttcagatgcaaaccataatgccgaagaagtgacatgaaggggataaaagtctaatgctttcatcttcacagcaatcaaatgca

SEQ ID NO: 241238 - DNA, 122 bp, Homo sapiens
tcggctcttggccccagcctgagtcttgggctgcagaggctgtgtgggctgcggaggaggcgcctggggctggggcgcgggcgtcttcttgcctggggagtgggccgagggccgcgccttgc

SEQ ID NO: 241239 - DNA, 122 bp, Homo sapiens
aaaacgaatgtaggaagtttttatgttccttgtcatttggctgtcccttttctccttcctcgcacaaccctgtatcagtggggcagcacttccttctcagaccgcttgtcccagggtccctg

SEQ ID NO: 241240 - DNA, 122 bp, Homo sapiens
cccacaacaagataccactacacgccagctctgaagactgacaacaccaagcactgttaacgtgttaacacgcacctgccacttgacctgaagattctacccccaggtgtcatccagaaaag

SEQ ID NO: 241241 - DNA, 122 bp, Homo sapiens
gaatgggctgtctaggactagagtgacctcttgaaagcacagctgcacttcaaggtcggacggtgtgtgtgggaagcagggggaggccttgaatgggtgcttggaggaaggtgtaggtgtcg

SEQ ID NO: 241242 - DNA, 122 bp, Homo sapiens
tgggctgcctgcgggttcccggtgaccctttccccctcctggagatgctctgcattgccccgctcgcacactccagttcccatcctcgtgttctaggacggcagggatgaatcactataggc

SEQ ID NO: 241243 - DNA, 122 bp, Homo sapiens
atcagggagtcaatagttacaaagtacttcttagcatgacactttgcaaaataaactccacgatgtcatcatcattattctcaatagcaacttctttttctgggcaattgactcaaatgcta

SEQ ID NO: 241244 - DNA, 122 bp, Homo sapiens
ccccactacctagttttctcctcagaagcagtgacttacttttttttgtatgtagtcttccggatgttctgtgcatatacaaacatgtctgtatatcctttattgttgtttttttttaaatg

SEQ ID NO: 241245 - DNA, 122 bp, Homo sapiens
ctgggaagaggaaggaaccgagatatgggggcatgcagcaattatccatttctcctcccacgctctactgcatacaggaaaaccgaggaaaaatgaaattgggaagaaggcaggaccctgtg

SEQ ID NO: 241246 - DNA, 122 bp, Homo sapiens
tcacctccttagtccccctggtctgaactagttgagagagtagttttgaacagtcgtaaccgtggctggtgtttgtagttgacataaaggattaagaccgcaaattgtccttcatgggtaga

SEQ ID NO: 241247 - DNA, 122 bp, Homo sapiens
ccacggccgccaccgccccgccccgtcgcgtgccattggttcggcccgcgaccagcgcgacgccgcctagccgcaattggctacataacctgcccgtcagcaacgcgcctaacgccgacgcc

SEQ ID NO: 241248 - DNA, 122 bp, Homo sapiens
ctggagccggagagagggttgagagcgagcaggggaccctgaggatccagcctaaccgagcggcggagactgggacggcaaggggacgctgtctccactgaaggagtcagcctgggctctct

SEQ ID NO: 241249 - DNA, 122 bp, Homo sapiens
gtgtcagagctgcttgtatggaagcagctgtttgcaataactaggccacagcacccaggccgccagcaatcaccgagcttccatcctgctcactgacaaactccatgaccaggaggccccac

SEQ ID NO: 241250 - DNA, 122 bp, Homo sapiens
tgcggcgctatcatcatctggcgctttgctggcaatttcgagagaaccgtgggcaccgtccgccactgcttcttcaccgtgatcttcgccatcttctccgctatcatcttcctgtcattcga

SEQ ID NO: 241251 - DNA, 122 bp, Homo sapiens
cgaggcggccgcgggggagggtgccaggaccagcccaggaacctcggagaccacggtaagcggtggctggttcagatcccaactccggagctgtgtgaccccagaaagttccttagcccctt

SEQ ID NO: 241252 - DNA, 122 bp, Homo sapiens
agtttagtagtcttcttgtgtacctgaggatgcctcatgtgctagaaaatggtaaagtaacgtagaagcatgctcttctagagcagcaggatgattcttatttgaaggatatcaccccatcc

SEQ ID NO: 241253 - DNA, 122 bp, Homo sapiens
cttccttcagattttcactggatgtgtccccatgttttttcaaggaaggttgatatatgacgtaatagcaagattgtggaccatgacataactaagacttgaactcaaggttcaaacattga

SEQ ID NO: 241254 - DNA, 122 bp, Homo sapiens
tacagacccagttagggacctgccctcaggtttgctacccaggactgggtgtggggagggcggggcaacccgctgggagctgctgagtgtggggcacaacccagcttggggagtggacctgc

SEQ ID NO: 241255 - DNA, 122 bp, Homo sapiens
acctcagcctcccaaagtgctgggattacatacgtgagccaccacacccacccccggaaccgtaggcatttaatacattctaaatagaatgacttttagtgcttgcgttaaatcacattttg

SEQ ID NO: 241256 - DNA, 122 bp, Homo sapiens
ccccctcccccagagcctcggattccccagctgggcccggccccggcgcactcgcggcggcggagggaaactgaggaagcggtgcctgtctccccgaggaaataggcccttcaccttccgtg

SEQ ID NO: 241257 - DNA, 122 bp, Homo sapiens
tagagaactgagagggtgtgtaccactagtcagctgcaggatgccttgtgggaatgaaaacgtcggggctgtaagaattctgatttttcaggagtcagaaatccaaattttctggtgaaata

SEQ ID NO: 241258 - DNA, 122 bp, Homo sapiens
gtacgccatcacaacagacgtgcaggctgcccccggacctagcagggagcacacagcaaacgtgcaggaagtcactggagtgagccctcggcacacgccatctactccagtgatcgcagcgc

SEQ ID NO: 241259 - DNA, 122 bp, Homo sapiens
gactcctaacacctcaccccaccagtgacttacgtgcctgtagaatctactgccacagcccggaccccaccacgatgacagagaatctttgccagtggctccttcatagctggactccataa

SEQ ID NO: 241260 - DNA, 122 bp, Homo sapiens
tgcagagaaccaggttttgttgagagaagaaaaggctcttgagaatcaaaagggaaggcccggaagcatcagggattgggctttacccacactggaaagagactagagggagagctggacta

SEQ ID NO: 241261 - DNA, 122 bp, Homo sapiens
caagccactttaagataaaatactgacttttgtgcaaactggaaatggtgtcagaaacttcgaatctagccttgcttctggccttgctcatcatatgaagacatctgggcaagtgaaccgag

SEQ ID NO: 241262 - DNA, 122 bp, Homo sapiens
acagactccaagccatgacgtcaatgttgatgcatttcaggccacattccttttagtctccggagaagttctttacaaaaagcatgaaaggtggaatcaaatagttcctgggatcatctcca

SEQ ID NO: 241263 - DNA, 122 bp, Homo sapiens
cccggagagcaaccagaaaggccgtcggattgcaacgcagcctgcattgtcctcgctgaacgcctggtcctgtcccacctgcaccggacagcaactgcttcccctccagggcggcccccatc

SEQ ID NO: 241264 - DNA, 122 bp, Homo sapiens
tcaactcctggtgctgcttaattaaggtcagggccacccggaagataatcttcgagccttcgttaaacaaacagtcccagatccgaagcactgtctgcagagacatgggaacccggtgtcac

SEQ ID NO: 241265 - DNA, 122 bp, Homo sapiens
ttcccagcagccccgtgctgctgtcgcccacactacctcttccttgcggcttccggcccccgcagcctcagtacctctgctatctcttttgcagaagtccaggtaagaggcctttcgttcct

SEQ ID NO: 241266 - DNA, 122 bp, Homo sapiens
gacagtggaagctggaattgtaggatccaagcatctcagcatcagcagttctcctgggaacgccaccaagctcttagcttgcattgtagtaaagaaaatacataacagagaaaactgtcttc

SEQ ID NO: 241267 - DNA, 122 bp, Homo sapiens
ccagctcctccagtaccgaactctcggaggggtattggtacgtggtctccagggctgtctcgctgaaggagatcttaagctgaaggagggagaaaaagggggcaggaggcaaggtcagcagg

SEQ ID NO: 241268 - DNA, 122 bp, Homo sapiens
aaagctcagccaacgtgtccctctttgccaggaaagctcattcccagatagtctttcccacggtgagggcaggggaggaaaggagctgcctcactgaggaatttttaagagcacccaaaagc

SEQ ID NO: 241269 - DNA, 122 bp, Homo sapiens
gcaggcgtgccccgaaagaccagcttgaacaatgaagaggacctcggcgttaggtgggaccgcaaccaacaaggactacagttcccagcgggcagagcgccaactccaagtgaaggtccggt

SEQ ID NO: 241270 - DNA, 122 bp, Homo sapiens
taccacagatgaacgattactaatgaagctggtttcccctctacgagtgtgcaggttgaacgccctttccctacccctttaaggctttcacagggaacagaaggaaaatatttgacatccct

SEQ ID NO: 241271 - DNA, 122 bp, Homo sapiens
ctcaggtgatccgcccgcctcggcctcccaaagtgctgggattacaggcgtgacccatcacgcctggcttaaaatgtttaaatatgtattttctacctggcctgccctagattttgtttttt

SEQ ID NO: 241272 - DNA, 122 bp, Homo sapiens
ccccacttcttcgtgggtctctgtggcgcccaggcggctgaccacactcaaagacagctacggctgaattcccagcgcactttggtccttggggcatgctaaattaatattttcttataagt

SEQ ID NO: 241273 - DNA, 122 bp, Homo sapiens
tctcgggcccagagccggaggctagttttgtgggaaggcaccccagtccacacacccactcggcagcctcgagggacagggtgctggttttaagggtggactcctacgtgtcccatcacagt

SEQ ID NO: 241274 - DNA, 122 bp, Homo sapiens
gcggcagcggcggcctgagcttcagggcagccagctccctcccggtctcgccttccctcgcggtcagcatgaaagccttcagtcccgtgaggtccgttaggaaaaacagcctgtcggaccac

SEQ ID NO: 241275 - DNA, 122 bp, Homo sapiens
atcactgtaactaaactgctgctcccaaagaaaccagttttatcatccatttctgcagaacgtcatctaaatggattccgctttcattcatgtccttatccagtaagaggaagcttctgatt

SEQ ID NO: 241276 - DNA, 122 bp, Homo sapiens
cctcggcttctgcacgggaaagggtgccactcggagatggggggcgtcacctgggcggcccgcgacgcggaatgctcgccacagaaatctgcaaacttcaaataaatggagctaaattgggg

SEQ ID NO: 241277 - DNA, 122 bp, Homo sapiens
tagagtccttcagcaagctgcctggtgttcgcagtggacaggtgatggtgcctggagatacgggctttaaccgggacagggaggacgtctcctcgttgtccttccctccaggaagggttgct

SEQ ID NO: 241278 - DNA, 122 bp, Homo sapiens
tacttcctttttaccccaactgaattttggacatggtggtggtgagcccaactttgaccacgcagcagaggacaacatccctagaagctggtggaagaaccacatggaagtaacccagtccc

SEQ ID NO: 241279 - DNA, 122 bp, Homo sapiens
cccacccccatttccatgaaaaagggtgtggccattcctataagtttttctttccagtctcgtctttttgctgcgccatttccataggttcctttaagaaggccaagtgacctctttgctgg

SEQ ID NO: 241280 - DNA, 122 bp, Homo sapiens
aagacaggagagaaaaaagaccacccagctgcaggaggcaaggctggagcgagtagcgctcgcctgccctttaagcaaaggagggaagcccatgtgcactcgtgcactgggctccggagcag

SEQ ID NO: 241281 - DNA, 122 bp, Homo sapiens
gcccccttttgtgtcctcatgacaaaggccatgcactgggggaccgaaacaactggggctcgtctctcaggttccgtggggctgtgccccttccggaggctcctcctgctttggggacgcag

SEQ ID NO: 241282 - DNA, 122 bp, Homo sapiens
actgctctggtatagagctgggctctgtgctatggagacagtactgacatttcatcttcccgaggcacgtcccctggctccgtgatgtggccgtacaacaagcctgccctttgttacggtgt

SEQ ID NO: 241283 - DNA, 122 bp, Homo sapiens
cggcctcacttccctgcacctggcagaacctattatggctccccttcactacatgaataccgtgttgccacctcctgctgctacctggcacttcccactaccctgaagctccctgaagccag

SEQ ID NO: 241284 - DNA, 122 bp, Homo sapiens
gactgcgttcaaatgggcagtctttgctggaaacctcgcctccgcgcgccttccctcgctcggattcaggcgcttttacgttaagggttgaatttttgtgtcaacaggcacctcgggaggtc

SEQ ID NO: 241285 - DNA, 122 bp, Homo sapiens
aggctcgcggggtggtgagcatcaagtgacagaagcaaagcgctgagcactgggcacgagcgtcttagggctcgagatgggttttactccagaaaaacccagcctgtcccaggctcctcgcg

SEQ ID NO: 241286 - DNA, 122 bp, Homo sapiens
agaggagataggcagagaagtcttgcttagttccttcgtgcagcttcttgcccctgttgacgtggaatgctgtgtctgctttagcacgcacgctccgaatgactcctggtgctaggccatgc

SEQ ID NO: 241287 - DNA, 122 bp, Homo sapiens
taattctctgccctctaccggcttgagatgcttattcctcagggagggcaagaatcgaaacgattgagaccaactatttacaagtgaggcaaccgggctacaggtgcctcgagggaaaggag

SEQ ID NO: 241288 - DNA, 122 bp, Homo sapiens
ctccttcagaccacaaaagccccagccatggagcccagccccatttctcagtcaggcctccgttatggactgcacccggtgatccatggccctcacaacccaggaggccttccttgattgcc

SEQ ID NO: 241289 - DNA, 122 bp, Homo sapiens
gacacactctcagcgctggggttggagtttctccgctgcagacgttctatgggggcccctcgcaggaccacaccagctttgtttcctgtgccccgctcttccacctcacccagccgtttgga

SEQ ID NO: 241290 - DNA, 122 bp, Homo sapiens
atctttgaggtcctgaaattgtaaaatatctcacagtgtctcgctccgttgtctgtgcttcgtctgtgtttacttgtttgtttctcattgtcgctgcacaatcttctcatcgtgtatagggt

SEQ ID NO: 241291 - DNA, 122 bp, Homo sapiens
tcctagtcttagcctactctactcacttgtgtctaacgataaattcctttgtctgagtcccgtgctttccttttaaagaattagactgtcaaaagcatgttaaacaaaaggcacaggggcct

SEQ ID NO: 241292 - DNA, 122 bp, Homo sapiens
ggccaaaatccccgcgggttggtcggggcgggggcggggctcggtgggcggggctgaccgcgggggcggggccagggtctaacaccctccagataatgtatggctgcgacttggggctggaa

SEQ ID NO: 241293 - DNA, 122 bp, Homo sapiens
gagttgctgcgcaaggtgcagatggtgaaggatgcacacgagggccgcatcaccacgctgcggaagaaaaagaaggggaaggatggagccggggccaaggaggctgataagggcacaagcaa

SEQ ID NO: 241294 - DNA, 122 bp, Homo sapiens
gtgaccatctgctgactgttcttgtggatcttgtgtccagggacatggggtgacatgcctcgtatgtgttagagggtggaatggatgtgtttggcgctgcatgggatctggtgcccctcttc

SEQ ID NO: 241295 - DNA, 122 bp, Homo sapiens
gcccacgtttaggaggaagcccgtcttgtgggctcccagctctgtgtcctcgtgcagggacggcctctctctaggtagcttgctactcgttttgtgcatctcctctttcctggttcctggat

SEQ ID NO: 241296 - DNA, 122 bp, Homo sapiens
gattgcatcattcttggctttgttctcagagcagcaggtgcaggagtggggcctgccacccgccgcccccctccttccctctcatctccttccactccctcctgggtaatccccctccttcc

SEQ ID NO: 241297 - DNA, 122 bp, Homo sapiens
cccgcggaaggccagcctcctgcccctgcagcgcctgcggcggagcagcttgcggcccggcgtggtggtgccccgatccgcctcagcaaggcgcccgcgcccaccttccagcgccagaggcc

SEQ ID NO: 241298 - DNA, 122 bp, Homo sapiens
gcggttcagagggagatcctgacctgatgcttttgaatctcagcaaccctgaggccgaatcgctcctgctgttacttgatttggttgtgtaaaccaaaactaaaattctaagccacccgacg

SEQ ID NO: 241299 - DNA, 122 bp, Homo sapiens
ttgctctccgctcacggccccagtactgcccagttcaatcgtcaacaccacctgccggcgcggctcctgctcgccgagaatttgaagacaaacccgccagggtcacttccggtgccggggac

SEQ ID NO: 241300 - DNA, 122 bp, Homo sapiens
aaagagagaagggatgggggggggggttactttccacctgttctgaaccccgagagagcccgagttcggttcccactttcgacagaagaactggctcttttttgcaagttagaatgttagaa

SEQ ID NO: 241301 - DNA, 122 bp, Homo sapiens
tctcatttccggtcccagcaccccgcctccatgacgtcaacgcgccgcgccaccgggctgcgtcatctcggcgcgccgctgccagggctgtacacctgctggctgccatggctgaggtgggc

SEQ ID NO: 241302 - DNA, 122 bp, Homo sapiens
gggacggtccccatcttcttggagcgctttaggctggccggcggcgctgggaggtggagtcgttgctgttgctgtttgtgagcctgtggcgcggcttctgtgggccggaaccttaaaggtga

SEQ ID NO: 241303 - DNA, 122 bp, Homo sapiens
cctaggctacaactctgtacagcatgttaactgcactgaatatcataggcagttgtaacacgtggtgtttgtgtgtctacacataggaaaggtatggtaaaaatatgatattataatttaat

SEQ ID NO: 241304 - DNA, 122 bp, Homo sapiens
cctacccctgcagctgctcctcctgctgctgctgctcctggcctgcctgctgccctcctccgaagaagactacagctgcactcaggccaacaactttgcccggtccttttaccccatgctga

SEQ ID NO: 241305 - DNA, 122 bp, Homo sapiens
acatcctccagctgttagcccatgtatctatgaagcaagagttcactaaggaaacagaagcgctgcgagtgatgtaggtattatggggattcgaccttacacaatcaggggaggggctgggg

SEQ ID NO: 241306 - DNA, 122 bp, Homo sapiens
ggggagggaggtgcagcggcgcggggtgggagagcagggagacagtgacattgaggaggacgtgtggccgactgagctctggtcgtgcttgatgagcctgcctccactgcgtccagcccccg

SEQ ID NO: 241307 - DNA, 122 bp, Homo sapiens
aaggctagcgtttcaatcctgtgcaggactgggatttttcttctcataatttgggggagccggagtagaggtcagagggacaggcgaggatctcaaaaagagaccgagggttgtgaacatgg

SEQ ID NO: 241308 - DNA, 122 bp, Homo sapiens
ccgccaacggccattctctggacctgtctttcttccgggaggcggtgacagctgctgagacgtgttgcagccagagtctctccgctttaatgcgctcccattagtgccgtcccccactggaa

SEQ ID NO: 241309 - DNA, 122 bp, Homo sapiens
gcagggatctcgctcagctggttgttcgagaggtccaacgtctgcaaagagaaacatggacgcgtcagacgcccggactctgggaagagagtccaaggtcatgctcgagaggcagggagacc

SEQ ID NO: 241310 - DNA, 122 bp, Homo sapiens
cccgccctttctgccaccatgacgctgcttctgcagaggaagttcaagaaggtacgccggcgctcccccgcctccaggccagagtctccgtcctcccttctgtcctctcttgcttcctccct

SEQ ID NO: 241311 - DNA, 122 bp, Homo sapiens
gtgctgggatcagaagtgaatagcatggtccctctctcctcaaggcactttctgcctagtcgaggagcagacacatgataaacaccaacaccagtccagaggccattccgataggaagaagg

SEQ ID NO: 241312 - DNA, 122 bp, Homo sapiens
acccaacccctcccatccctccctcctttcttcctttcaggaaagcgtgtgcaagttctccgcaaaatgatgaatctctgctcctcaggggaatgtacgaatcagaaaagcttttaaaaagg

SEQ ID NO: 241313 - DNA, 122 bp, Homo sapiens
ccgtgcctagagacgagaaacgctggggcgaactgacaggcccagatttaggagtcatgacgaagatcctgagacgcttattcagtctgcagagaagccaaaaggagattcacataatggcc

SEQ ID NO: 241314 - DNA, 122 bp, Homo sapiens
cagcacctgtgcagtatctgcacagaccagctcatgcatgttgtgtgctgagtgagttcacgttgcagttagtagtggcagtgaggagagctgagtcattccaccacatcattctgttagca

SEQ ID NO: 241315 - DNA, 122 bp, Homo sapiens
cagcgcgcctcttgcgcgggtgcgggcccttattacactttagcagcgagggagggtccccggagggtgcctaagactagggcgtctgcacagcccttgttgattttctcgtgcttgttctt

SEQ ID NO: 241316 - DNA, 122 bp, Homo sapiens
atggtaatatctatcaaggacacttacaaacagtaaaagacaaaaggacatacaaagaaacgtacaacttaactaaaacagaaaagaaaaaagaaaagctctgaagtctacaaaattataac

SEQ ID NO: 241317 - DNA, 122 bp, Homo sapiens
tccgttagcccccggcaccccccgccccagcctcctctctccaccatgctgcctgccctccgggagccttggcccccactgctcccagcacgggctaaagccccgcctggcccaggacccca

SEQ ID NO: 241318 - DNA, 122 bp, Homo sapiens
ggcgggagagggctgcagcgggctaaggagacgtctgtcctgcgtgttccgaagcctttccggccaccagccaactgactgccctgctctttgggaatgggcggggcgcacaggtgagggaa

SEQ ID NO: 241319 - DNA, 122 bp, Homo sapiens
atttatgtaacaaaaatccacttctactccaaaatctattgaaataatttttcttttaagcgtggcacgttggcatgctggataccttgaactaaaggaaattggaaggacctcggaagcca

SEQ ID NO: 241320 - DNA, 122 bp, Homo sapiens
tatcaggatgatgtgaaaaatctgtggcaagctctgatagaagatttacaacggagggtccggtatcagagtcaggcctatggaaaagtcagccacagcactgccctgtcgacaacacatcc

SEQ ID NO: 241321 - DNA, 122 bp, Homo sapiens
tgagaaacacattgttaggcaattcggcgtgtgttcatcagagcatatttacacaaacctcgatagtgcagcctactatccactattgctcctacgctgcaaacctgaacagcatgggactg

SEQ ID NO: 241322 - DNA, 122 bp, Homo sapiens
tggccaccatgtcttgggtcctgctgcctgtactttggctcattgttcaaactcaaggtacgtaccatcacaccagcattttacataaaagtcaaattatttgatgaatgtttaaagtgcct

SEQ ID NO: 241323 - DNA, 122 bp, Homo sapiens
aggtatgcggagtctgggtcatccaattctgagagatccaactccttttcctgcagccgccggatctctgccacatagagcgccagcagctgctccaaacgctggatctgccgccgggaacc

SEQ ID NO: 241324 - DNA, 122 bp, Homo sapiens
tgtgtctatttctcgctgactgtccacagggcagcagcacctgcttgagaccaagcccggcgacctggcaaggtggggccccctaccgcgcaatctttgcggctggcccccggctctcagct

SEQ ID NO: 241325 - DNA, 122 bp, Homo sapiens
ctcgcgctacgagtccgccgcggtggtgctgcactcgccgctcaccttggacctgagcgtcgccttcccgacaccaagaagacctactgcttcgacgccttccccaagtgagcaggctgggg

SEQ ID NO: 241326 - DNA, 122 bp, Homo sapiens
tcctccatctagaccagccagcattggtttcttccactcccccagctgccgcgtgggaggcgccactgcaaacttccctggggtctcccagctgctcagagatccccatgcccttccctgat

SEQ ID NO: 241327 - DNA, 122 bp, Homo sapiens
ggtacccctcagcggcggggacatccaggtgtccctggatttccagggcacagtgcgggccggaaataggaacacagaggagcccttcgggaggctctcgaggcagtctctttccagtggat

SEQ ID NO: 241328 - DNA, 122 bp, Homo sapiens
ggagtgcatggagcaggctacgctcagaggaggaagggcgggcgctgggcacccgttgaccgacttttccaagtgcgatcagtgcccgtccgtcctgcctccatggacccgcccgggaacgg

SEQ ID NO: 241329 - DNA, 122 bp, Homo sapiens
taggtgagtagaagagaggagagcagagggtgcccgcggcggcccgggcgaggccgggcgcgaagtcccctcgcagggaagtcctgcctcgcctgtccgaggtgggcattgtttcccgggcc

SEQ ID NO: 241330 - DNA, 122 bp, Homo sapiens
ctctgtgggcgacagaggggtgcggtggggcctaggaggctcgtgggcgattccgagcaccgggtcggtcccgagtgaggggccagccctggggctgggaggaaggcgagaggcagcgccac

SEQ ID NO: 241331 - DNA, 122 bp, Homo sapiens
gacttcatgctttttaagtccaaagattccctttctagttttattatgaagccaatacatcgaagaatactttcctcccacagtgcttaagaccagtgctagattacaaatacataaatggg

SEQ ID NO: 241332 - DNA, 122 bp, Homo sapiens
agtggatactaaattctgtattcagtagtcaccttaatatgcactctgtttgtggtttaccgtctaatggggagacacacgtctcagttgtgaagttagctttacgtaataacaagcatttt

SEQ ID NO: 241333 - DNA, 122 bp, Homo sapiens
tgaatgcatccagcactgggattctgttttgctttggtgttaattctgttttcttcttttcgttttcaaattaggttctccctgcaatctctgtccttttgtaagcactgactgaggtacac

SEQ ID NO: 241334 - DNA, 122 bp, Homo sapiens
cgctctctcgctcgctccatcgtggggcctggacgggggcaggagaagtccccccaccctcgaggctgcagcccccaccccgcagctccgggccacctgggcgcctccaagccccaaatccc

SEQ ID NO: 241335 - DNA, 122 bp, Homo sapiens
atggcaggcctagggttctgattcagtccattggattccaaggcctgtgcttgttccacccggccacactgcctgtcatcaaaacacatgtctttcttgcaggctggtctattgcatttccg

SEQ ID NO: 241336 - DNA, 122 bp, Homo sapiens
tggacattctatatatacagtttgtgaaatctggcaacactactgaccagtcatgaggcccgtggcccaggaaggattatctactaatctaagtccaccacctgaaagaggacccggtaaga

SEQ ID NO: 241337 - DNA, 122 bp, Homo sapiens
cttccttcaatgtttccccttcccaacagtacccgggaatccctaagccaggagaatggccgcatagtggaaggaactcttcagaccctgctacatcccattctctgccttccaacaccccc

SEQ ID NO: 241338 - DNA, 122 bp, Homo sapiens
atagcaaccttaatcccatctggaaccttaatttccctttgccatgtaacctaattcctacgttccagggattaggatgtggacatctttgatggtgttggggttgaagacatcattctgcc

SEQ ID NO: 241339 - DNA, 122 bp, Homo sapiens
ccggccgccgccaccggccccggagacgcggggggtggggagcgaagcccggggagcccgcgcgccgacactcacctgtctccgcgaggaaagacagcaaagtccaaggccgccgccgctcc

SEQ ID NO: 241340 - DNA, 122 bp, Homo sapiens
tggtcagtgagggcatcttctcataaaggacactggtgagaaactgggctcagggtttgtcgtgctgggttagtctcacgatcataagcggcagagcagacattgccacctggagtttttga

SEQ ID NO: 241341 - DNA, 122 bp, Homo sapiens
ttacaggagtgtggctcagcctctcatttctaaggtttagccaagggtgccagatctttgcggggaagagggatgacttgaagtgagtggaagttaaaaatggtagtacccagaatttcctg

SEQ ID NO: 241342 - DNA, 122 bp, Homo sapiens
gggtgacggacgcacctggaaaatcgggtcactcccacccgaatattgcgcttttccgaccggcttaaaaaacggcgcaccacgagattatatcccacacatggctcggagggtcctacgcc

SEQ ID NO: 241343 - DNA, 122 bp, Homo sapiens
cctgcagattcatatagacacacgagagacaggcagtatactggctatttcagcactttgcgggtaaaaccacgctaataaatttccccattctcctccatatggcaaagcagagaggagcc

SEQ ID NO: 241344 - DNA, 122 bp, Homo sapiens
gcgttttccacctccaggccaccagcggcccttatggtctgaacttttcggaggctgaggcggcatgcgaagcacagggagccgtccttgcttcattccctcagctctctgctgcccagcag

SEQ ID NO: 241345 - DNA, 122 bp, Homo sapiens
catgaatgtactcatatttaaacacggacataattgtgtacgcattcctgaagccctcaacgtacagaaaatacacagtatcatggactccttgaaggtcaccttacaactgttttatatgt

SEQ ID NO: 241346 - DNA, 122 bp, Homo sapiens
cgcagagaggatggctggaaacccgcgtagagggcggggcggggcaagccggtgccggggcggggcaggggcggagccacaccggggtgggtggtggttacggctaaccaaagctttttccc

SEQ ID NO: 241347 - DNA, 122 bp, Homo sapiens
gtagtggcagctgagctgctggcctgagctggggactccacttattgaggagttgggtgtcgagggctcacagggaagagagactggattcctctaagtatggtgactgtggcatgctgtaa

SEQ ID NO: 241348 - DNA, 122 bp, Homo sapiens
cacgaaccttgagcagcatgcggcactgcttggggaaggtcaggaagcagggcaccagcacgctgatgtgccgcagcacggccgccaacaccgtcgtctccgacagacaggacaccagctgg

SEQ ID NO: 241349 - DNA, 122 bp, Homo sapiens
ctgcagttccttattctgatcttccaacccagtgaggggaagaggatgtgatcatgcgaccgccagcagaagggaaattgtgaaagcgacctgctgtagaaaaggcggcccacagccacctc

SEQ ID NO: 241350 - DNA, 122 bp, Homo sapiens
ggcccggccctgcccaaccctgccccgccctgccccgcccagccggccacctcttaaccgcgatcctccagtgcacttgccagttgttccggacacatagaaagataacgacgggaagagcg

SEQ ID NO: 241351 - DNA, 122 bp, Homo sapiens
tgccagatcgctacaatctcttgggcagatcttttaaaaaaaaaacaacacaggcctatccgttctccctcaacctagagacctggcattagttgggagtactgcaggtgattgtgtttcgt

SEQ ID NO: 241352 - DNA, 122 bp, Homo sapiens
taggcctggccttccatgcccgagcagagcccaaggcagggccccaagccctgggcagagcgtgcccctcccgcggtccaggggtccgcggcgggcagcacataccttcccggcgtggtcag

SEQ ID NO: 241353 - DNA, 122 bp, Homo sapiens
gtggaggcagaggaagccctggacgcctggcttttccaaaggaacacaatgctgctcggacgctgcggtcagtgaagaggggcccctcagggtggatcgctcccaccggagtttaaatcctg

SEQ ID NO: 241354 - DNA, 122 bp, Homo sapiens
tctctcctccaggggtggggagcagctcggagacgggagacaagtgtccggctcctccttcggcggccagggggctacaccatctcctcgcacaaagccgaggcgccggccgggagtgtggg

SEQ ID NO: 241355 - DNA, 122 bp, Homo sapiens
gattgacttcagcatgtttataaagtcaagggtcttcagtgtcctgggcctatgtcactgcgtcagagggagagaggaagaggctggggtgatgggcactggggcttatgctcctcctggaa

SEQ ID NO: 241356 - DNA, 122 bp, Homo sapiens
gagtccaaaaataagcccgtacatctgtggtcaactgactttcaacaagggtttcaagaccgtacaatggggaaagaatagacttttcaacaaatgatgcttaggcaagtagatttctacat

SEQ ID NO: 241357 - DNA, 122 bp, Homo sapiens
gcaagactgatgacaaaacttatttttaaaaattcttcttgctatttaagtcacagcagacgatgagctgcactgagctgtgcagaggggtgccccatcgggtggggagcaactttggcttg

SEQ ID NO: 241358 - DNA, 122 bp, Homo sapiens
agggggccctgtgggaggtagcctgtggctgggcctgctctcaggcgagagaagcccagccgtggggtctctgcagccccacgtccaccacatggcaggtgccagctgaccaagcgctctca

SEQ ID NO: 241359 - DNA, 122 bp, Homo sapiens
ggtacctggcacagtagatgctcaatatattttgaatgaatgaatgggtggttgagtgaacgaatgttagtgtcactattgaggtcctctccgagccgtcgttcctttcacaggggtcatgc

SEQ ID NO: 241360 - DNA, 122 bp, Homo sapiens
gcgtcgggcatgcttggaagctggcctgccaggaccttccaccctggggcctgtgtcagccgccggccctccgcaccctggaagcacacggcctctgggaaggacagccctgaccttcggtt

SEQ ID NO: 241361 - DNA, 122 bp, Homo sapiens
aaccaaggtctcagggccctggaaaaggtgtgttctaatcacaagtgctatttccccacccgctcccatgacgggtcagctgcaggcatcagcttcagagaagtgggcttctagggctcctg

SEQ ID NO: 241362 - DNA, 122 bp, Homo sapiens
ccttttgttttaaatattaataaaaacattttctaaggacatgctttagaaggaaactggcgtaatttttatatgtctcatttgtgtatttgctttaaaaaggagtcctaggatgacatgga

SEQ ID NO: 241363 - DNA, 122 bp, Homo sapiens
gcacgtgtgtcaggggacggaattttccattgcaggcatgtctaagcaagtcacctgggtcgcccttctcatgtttgtgggcgtgtcttaggcaagcccctatgcaaattcctgtatctgtg

SEQ ID NO: 241364 - DNA, 122 bp, Homo sapiens
gtttgaactgccaacctgcaggaaggccagggacaaagctggaacccaggaacacctgaacgagggcacctgaaagccaccaggaccctgtgtcctttgcctctgcttctctctgtgctagc

SEQ ID NO: 241365 - DNA, 122 bp, Homo sapiens
tgagaaggacttcacgcaataaagtttcctggtgttacactgccactgtaattgtgtccccgaccaggacctctcccttctcatcctttccgtgatcggccctgcaaaaccttccaaagaac

SEQ ID NO: 241366 - DNA, 122 bp, Homo sapiens
ccttttccccaggcctcagagcattgctcatccgtgccaaactgggtaggtggatttgagcggaaagactcccaaaatgtgccaagaatttcccagtcccaggcagggcaggggaaactaag

SEQ ID NO: 241367 - DNA, 122 bp, Homo sapiens
gtgggccagcgcgagttccgggtgggcatggtccgcaggcccagcactgggagcggccagcgggccccgccagccccccgcaagtgaggggcttagcacctgggccagcagctgctgtgctc

SEQ ID NO: 241368 - DNA, 122 bp, Homo sapiens
ggtcgggaaccaagcctgccccggggtatccgggccaccagaacagggtcagcatcaaggcgcccaggcattggaagagctgattggttcccggacgaaccaatcaaccagcgaggccgtgc

SEQ ID NO: 241369 - DNA, 122 bp, Homo sapiens
gctaattctggtttggcagggaaaaaaaatgcagtcacctcacatgcacactcttgtggccggttgaagtttatagctttggctgaggttccgctaaggcgctgcacatttatcactggcgg

SEQ ID NO: 241370 - DNA, 122 bp, Homo sapiens
cgaagggggccggatcacagacccttaacccctgacctcatctcaggtgcctccctctcccgagcaactctgcgcggagtctccgcagtcgtcgcccccatgccaaggttgcttggacaagg

SEQ ID NO: 241371 - DNA, 122 bp, Homo sapiens
tgttgcaggcaactgcctattcttctatcttctgtttaatatgattgctaggttaaaggtcgttccttccctgccatccccatttaagcaacaatgaagtagaaatgccattctgttgctca

SEQ ID NO: 241372 - DNA, 122 bp, Homo sapiens
tcacatccacactggaatcctaatcttgattgttctctctaggctggcctctgttattcccgttgattcctgttttttttttttttgttttttttttgttttttttgttttttttttttgag

SEQ ID NO: 241373 - DNA, 122 bp, Homo sapiens
agtcttgcttgatcctcatgcagcctatcatcaacaatgaagcgtcagccccctgatcaccgggaaaccatgaaagagctgccactgagacatgtgatggtctcattagactgacaaaacat

SEQ ID NO: 241374 - DNA, 122 bp, Homo sapiens
attttcaagaagtaccctcagcagacttcccatcacatttcattgatcagaatggggcttcgtggtctcctatagtagcaaggaagactggaaaggtggaaaatgggttgatcatgcctgat

SEQ ID NO: 241375 - DNA, 122 bp, Homo sapiens
atcacttgttttgtcaaccagcatggaaactgtcagaactgtcaatcaacaaagcaagggcgatagaaaatgtgtcactttcaaacggtatacaataatagaaataatgacaacacatcatt

SEQ ID NO: 241376 - DNA, 122 bp, Homo sapiens
gcacaaccccattggtcatcatgggattgaagtagaggctctcgtggacgctggccatggcggcccgagactaagtctcgggcccgcggcgcgctgccgccagttgtcaccacaaggcacaa

SEQ ID NO: 241377 - DNA, 122 bp, Homo sapiens
ctataatgtggagatgatagagtttccctctcggatggctgtaagaatcacgtgggatgacgtgtgtgcctagctcagctcctgcctcatcgttggtgcctggtaagagccatgtctgctgt

SEQ ID NO: 241378 - DNA, 122 bp, Homo sapiens
gtcagcgtttgcaggtcgcggtaaccccaggccagattgacatgggctccgcacccgggccggtgattctgcctcttaaccgctcttgcaggagaggtgacgttaatctcacaaacgttttc

SEQ ID NO: 241379 - DNA, 122 bp, Homo sapiens
accgtcctgaagtctttcattgcccacaatgagcatccaggaagcagaccaatcaagcgacgtgagctttcatagctaaagaatagtctgccctcttctgcttggcattcaaggccctggct

SEQ ID NO: 241380 - DNA, 122 bp, Homo sapiens
gttgacctgctgctggctgctgttatggtggcctgtggcttgcgtcctgccctgcccacccgcccacgtgctcgtggccatctggtgggcgtcatgtgccttgtgtcccagcacctgcaggc

SEQ ID NO: 241381 - DNA, 122 bp, Homo sapiens
catggccggccaggagctcccccagctggtggcacagcgcggcctcttcgcgccgctgcccggccctctgcgccttggctttcgccttgctcagctctgtgggaggaagaggagggctgggc

SEQ ID NO: 241382 - DNA, 122 bp, Homo sapiens
caatttacacagtgcatggtacatcatggagtacttgaaaaatggttgcaatattattgtcgttattattattcatattaaggaaccatcatgctgcctccagggctctttgcataatcaaa

SEQ ID NO: 241383 - DNA, 122 bp, Homo sapiens
attgggcagggtcagggagggccctgagctgtcaatggtgtcagccaggggatcgcagggcgggcgccggggttccccatgccctcgcatccgggcactgtggaagaaggagctcatgtcca

SEQ ID NO: 241384 - DNA, 122 bp, Homo sapiens
cctagtggccaaggtgctgcagggcagctctgagggctggagggctgcgcagccgccacccgaggacacggggaggaggcacagtaagagaatccttagagcctaacgcccccttctccgtc

SEQ ID NO: 241385 - DNA, 122 bp, Homo sapiens
ataaacacataacaaacactctgcagggcaggaaaggctgcagggcccacacacagtggacgaaagtgggtcatgtccttctcttggtgtttatgaggtgataatactattgtttccttttc

SEQ ID NO: 241386 - DNA, 122 bp, Homo sapiens
ggatcactcaaacatgaaacagagaagaaaggccagtgtttattcctttaagaaggcagtcgtgcaacttgttaaactttatcccatttgctggggtaagggagaaaaaaaaagagagacag

SEQ ID NO: 241387 - DNA, 122 bp, Homo sapiens
tactaggtaaaaaacagcaaaccaaaccaaacagtaaggaacaacacacacacacacacacgcagccaattctttgaaacccaggaacgcagggaatgtcttcacagcaggccttgagttgg

SEQ ID NO: 241388 - DNA, 122 bp, Homo sapiens
ggaggcagtaggaatgcggcaacaagagtgtaggtagagtctatggacaagttcccctaacgcagtgcttctcaacggagggtgggaggttacccctagggtacatttacaacatctggaag

SEQ ID NO: 241389 - DNA, 122 bp, Homo sapiens
gcgcggggagcgggggcggggcaggcgcggaccctccctccccaggacccgccagacgcccggggcccccaacggccagcacggtccgaatcgaccccaagcttgacccgagggcagcgggg

SEQ ID NO: 241390 - DNA, 122 bp, Homo sapiens
agattcctaatcttttgttctgtttcatttccccgttaggagttgtaagacgttcatcgccgtgttatccttgagtaaaggtgagtattaggtgcgagagccttttgaatgcctcttcggaa

SEQ ID NO: 241391 - DNA, 122 bp, Homo sapiens
cacgtagaggagaagccttcagaggggaccgggctgaggtgaggctggcgtgaggtggggcgagcaggaatggaggcacccagctcaccggccctgctaccagttccccagaagcctgggga

SEQ ID NO: 241392 - DNA, 122 bp, Homo sapiens
ttactaatcgccaatgggcgccaggaggcggggttctccctctgatggacagcatcgctccgcccaatctaattcatcttttccttagccccgcccactccggcccctgagaccccgagggt

SEQ ID NO: 241393 - DNA, 122 bp, Homo sapiens
cgggggctgtggccatggccgtgacgctggaggacggggcggaaccccctgtgctgaccacgcacctgaagaaggtggagaaccacatcactgaagcccagcgcttctcccacctacccaag

SEQ ID NO: 241394 - DNA, 122 bp, Homo sapiens
ccatcattgttttaagagatctcatgattggacacttatctgtagtggttgccttcttaacgtagctaaacctagattttgggtctgggtctcagaagcagccatcaaacctatcagcaaac

SEQ ID NO: 241395 - DNA, 122 bp, Homo sapiens
caggggctgaggagcgtgggtgactggtggctgtcgcatgatggttgtctctggccggggcggtaaagatgtcgtctccacaaggagagagaatgtggggctgatacccaggactggctcct

SEQ ID NO: 241396 - DNA, 122 bp, Homo sapiens
tgaccctttgatcctaggtgggcgatgccctggattcctacctgcctactgaaactctggcgcggcgcctttccaagggcggccgctacttcctggttggtttgcccttaactgacatggcg

SEQ ID NO: 241397 - DNA, 122 bp, Homo sapiens
atacgagcacatcagtgtgattctgctgtgatgaagggcaagagagggctcactttccggcgtgacattcaagctagccccgaggcctgagcaggacccgcccaggggaagatctggaggaa

SEQ ID NO: 241398 - DNA, 122 bp, Homo sapiens
cgtgattggcggggacccgagctgaagggggcggggccgctatatcagcagagtccctgtcgcagcgcaggcagttgggctgctggagtgcggcgccaccgcggaggacaggggcagctggc

SEQ ID NO: 241399 - DNA, 122 bp, Homo sapiens
tgcggaaagtgtgggtttggctgcatgatggcctcgtaatggctgtggtgacgccctctgcgtcttctcccagcgccagcctttcaacagagcagcacattatgcctggataagactcaaag

SEQ ID NO: 241400 - DNA, 122 bp, Homo sapiens
gttttagaccacctgcaggctctaatctacgcaaatttatttggtacaaactttcttctacgtcaccttcttattcagtataattccagagaggtttattgctaacatttaacagtattaat

SEQ ID NO: 241401 - DNA, 122 bp, Homo sapiens
gctcctcttcacacgaggatgaatttccctacttagtgccaactgtacacttgcatactccgaaaataggggcaagccgtgaataccagaggttacaagggcaatgttttattttattatgg

SEQ ID NO: 241402 - DNA, 122 bp, Homo sapiens
ggatatgactggcgggccgactagtgctggttgccaccgccggtttagaaatcctattctcgcgccggggactggatttttccctacgtcagcgcagctaggcgatgtcgggagcgagctcg

SEQ ID NO: 241403 - DNA, 122 bp, Homo sapiens
gtgtgtgtgggggaggtggaaccacccccatgttttcccgaggcggagcttgcagtgagccgagatcgcaccactgccctccagcctgggcgacagagcgagactccatctcaaaacaaaaa

SEQ ID NO: 241404 - DNA, 122 bp, Homo sapiens
taaatgcacgtaaatgtatgttaatgacgctggcgtggctggggcggagcttcgtgggaacgagtggaggggatttgtcgtttccgttctaggaaaagcaggggtgcccccctttccttggg

SEQ ID NO: 241405 - DNA, 122 bp, Homo sapiens
gcaaatcccctcaggaggttctgaatcccttcctttctcaagagaatccctgaacaaaaacgaaagtttctgtaaggtgtcaccgctcttcaaaggtgtcaggaccctgtcttctctaaagg

SEQ ID NO: 241406 - DNA, 122 bp, Homo sapiens
acgtctccctccagcatctccgtccggatgtattcagccaggtaggtcctgcacagccgacggtcccagtcatctgtgatgtggccgccatacatgatttcaccaaaaaggtagcggagatc

SEQ ID NO: 241407 - DNA, 122 bp, Homo sapiens
ctgtgccagcggtgaaggtgttctcacctcatagagcaaggtagaaactacgcagacaggcgctgttctttgggatgaaagcagggcctttggggctctttcttagtgtccccgttcggttg

SEQ ID NO: 241408 - DNA, 122 bp, Homo sapiens
ccgtgatttgtggcggggcaagacgttaagttgggtgacaccgaggtgagccacggtcctcggcaccagatgaggaaccactgtctcaataaggtgtgacatggaaaatgtgtgtgtcttat

SEQ ID NO: 241409 - DNA, 122 bp, Homo sapiens
ctgggagccgcaggcaaaacgcggcaagtggattcagagtttgcgggcccgggtgccggccgagcatgcgcagtggcgcgagcgcagcggctacgcgggcgcggagaggtagccgcagagtg

SEQ ID NO: 241410 - DNA, 122 bp, Homo sapiens
tgctgagcttcagacttgagggcagcaggtccagctgtgtaaaacggagggctccgccagcgcccacggacctgccgtgtgcccacgggaaggcaaacggagcaagggagcttcctccccag

SEQ ID NO: 241411 - DNA, 122 bp, Homo sapiens
gagtcatcacatgtcacacagtagcccatggcaaactcagtgctgtaactgttggtgccacgttcctactaaaaatagaaattgcacataacacacatgcacttacatatatttgcaacaac

SEQ ID NO: 241412 - DNA, 122 bp, Homo sapiens
gccccagccggggctttgggagtcagaggagccggaagaatgcatggccggcggcggggccggcggaagaaggcggtggcggggccctgccccgctccggctgtggcgcggcccgcgcccgt

SEQ ID NO: 241413 - DNA, 122 bp, Homo sapiens
gggtccagtgaggagacaacaaatgaacgctcgggcccttccacaggtaccacctggggccgtccatccctgtccctgtactggaccatgaaggtgtcaaactggccctcagggacagtcca

SEQ ID NO: 241414 - DNA, 122 bp, Homo sapiens
caccttcctcttccgcttttaaggaccctcatgatgacattgggcccacctgtataatcccggagcacctctttaagatcagctgtagcaaccttaattcctccccgccaggtaacttagca

SEQ ID NO: 241415 - DNA, 122 bp, Homo sapiens
tgtaacctaatcctcttatcagatctgcatagccctgtcctgcctccacacttgctgctccgttcctctcaagtctgtcaacagctcagtctccagggccatgaaccacacctgccatttgt

SEQ ID NO: 241416 - DNA, 122 bp, Homo sapiens
aggccatattggaggagcggcggccgcggcgggaggagccatgttggcggctgtttatcccgctctcctcgggctcgccgcccccgccccgtgccccctcccccatcgcgagggccccttcc

SEQ ID NO: 241417 - DNA, 122 bp, Homo sapiens
ttgcaaaaatgagccgcagaccacacgtcagtgagttacgcaacatttcttttattgcctcgggttggaagctccagcgccccctcccttagccctacgtccccgccccccgcccccgcccc

SEQ ID NO: 241418 - DNA, 122 bp, Homo sapiens
ggagcggcgcgtaacgcagctgagtgaggtcgtcggtggaggcacggagcagcaggcgcccggggcgctgcggaggccttataggctccccgaggggaggcgacggggcgggccgcgccctg

SEQ ID NO: 241419 - DNA, 122 bp, Homo sapiens
gaagtttgaccaaatggaatggaggctgtgagcaatgtgaggattctatttatttatttacgtttgataaaacttactggaactagtactaccatgcgtattccctgtccaaagcatcactg

SEQ ID NO: 241420 - DNA, 122 bp, Homo sapiens
gtggggctgtgatcagaaaggaagccgcgtggtgacacataaagcagggctgcccccacacgagtccccagaggaatcttaagctccccattgccctggggtgttggtcccagctgccccat

SEQ ID NO: 241421 - DNA, 122 bp, Homo sapiens
ggccccatgcgggacggtagacagcgtgggcaggggcctggccgggtggagggtgcagggcggtggggcagtgtagaaggcagggccgggacctgaggccgggctggggcaggcgggctggg

SEQ ID NO: 241422 - DNA, 122 bp, Homo sapiens
ggacggacacgccctgagcgggggatgctgcgatggagccgccggcctcttaaaggagcccgctgctgccatccggcgcgctccaggctcgtacctggcccgcctgggccccgcgcctccct

SEQ ID NO: 241423 - DNA, 122 bp, Homo sapiens
atccacctgctttggccatacaaactgctgggattacaggcataagccaccacgcccgaccgagaatagttttaagaggatttgtttctaattaaagtgagtgactttacgatcattctggg

SEQ ID NO: 241424 - DNA, 122 bp, Homo sapiens
catcatttcagaaaacaaataaaacacttaattgtccaggcataaacccccattacagtacgacatacatacttcagatctctttggttgggtaattaagcacagaaatgttctgggacatg

SEQ ID NO: 241425 - DNA, 122 bp, Homo sapiens
tcccttgcttgctccctgacagaggctcaaagaccgtctaggaggcagcgagcaggtgagcggaagccgagagtcaccggccggccggtaccggtctgacgagtcaccgagcagattgcagc

SEQ ID NO: 241426 - DNA, 122 bp, Homo sapiens
agagacggagccttcctgtggttcgcgcacttccttcctgaagcctcatatttcccattccgttgatacttggccacctcaacctgcaacgtgcagtttccagtgtcatcttcatccaaatg

SEQ ID NO: 241427 - DNA, 122 bp, Homo sapiens
agcaaagggttaaaatccttttgattgacgttgtagcctccggtgccctgggctcaggcgcgcgccattggccgccagaccttgtgcctggcggccaatgggggggcgcggtccacgagcgg

SEQ ID NO: 241428 - DNA, 122 bp, Homo sapiens
ttgcacactatggattgtctgtggtgtaataccttgcacaatttggacttcactggttggcggccgagactcttgaagttgtagatgtacaacaggctgtgctggagaaatctgaatattct

SEQ ID NO: 241429 - DNA, 122 bp, Homo sapiens
tcctcgcgcggcttcccgcttccggctcccagctgctagctactgtggatctgggggggccggacggaggcatcggaggcggctgcgagagtggcagaggagctggcggagagcggcctgcg

SEQ ID NO: 241430 - DNA, 122 bp, Homo sapiens
catgtgggcaccttctttcccagttaatgaaaatattcatgtcctctctttaaaagaccacgtgttgcagttactagcaatgagtgagtctttggccatcctcaaagagagccacagtgtct

SEQ ID NO: 241431 - DNA, 122 bp, Homo sapiens
tagaattttattttcggtttacactctcaacacagctgccgcctcatacatgggtgaccacgtggccacccaggaatcaaaggtttctcaccactgccccaccccccgcccacccttttttt

SEQ ID NO: 241432 - DNA, 122 bp, Homo sapiens
cttcagcagaatcccccaggctggtggacgcaggagggagcgaggaggcaggagtccccacggacatggctgcacagcctggggccacagggcttccaagagggagccagtctgcagcagaa

SEQ ID NO: 241433 - DNA, 122 bp, Homo sapiens
cggcggcccagctgttttgaaaaatgcttcctgtttctttaaaggcgctcgcggctcgggcggcccgggctggggaggcggtggcggcgggagctgcctcctctccgggcggcggcgctgac

SEQ ID NO: 241434 - DNA, 122 bp, Homo sapiens
ggaagtgaggtgtgggaagtaggtcgctttctgatgaattcagtggcagtgaattgagaccggagggaatctggcccctagaggctggtacttgggcccgaaacccccatctccggcggaga

SEQ ID NO: 241435 - DNA, 122 bp, Homo sapiens
acacatactagtccacgcgggcccagccaccaaggccgcggcagggccagcgctgcgccccgggcccctgcctttagggctgggcaacccaagcagagcaaaggaggttcctgaatgtgtaa

SEQ ID NO: 241436 - DNA, 122 bp, Homo sapiens
actcaaagacgttctctgagcgagtctgtggggctctctgggtgtgaatgtcggaggctgcgatcgacatgccactccctactcaccataacttgacgcacgacatcaggctggaaggtgcc

SEQ ID NO: 241437 - DNA, 122 bp, Homo sapiens
ggtgtggagtgagcccaaactccttgcctcccacatctcccctgccacctttcccagggccgggaaacccccaggaggatcgagactcagcttccacccaacccctagaagacctctaatgg

SEQ ID NO: 241438 - DNA, 122 bp, Homo sapiens
ctctgtattccagatgcttcaggccagaatactcactgccaaaataggcagtgacagagacggccagagggcagcacagcacacccagagacctcaaaaagaagaagaaatcaaagtattaa

SEQ ID NO: 241439 - DNA, 122 bp, Homo sapiens
gcctagttaggcttccagtgaccccctaatttgcctggaaataatgcagagaccacctaccgtgtgcaaagcagtgtgacatttagaacaaaggtggcagaatctcaatgttcaaaagaaca

SEQ ID NO: 241440 - DNA, 122 bp, Homo sapiens
acttgagcacctgctgcatgttcactgattttcatgaccagcctgttatgtggtaattaccgcccctgttttacaggagaggaaatcagaggcttgaagagattaagtcatttattaagggc

SEQ ID NO: 241441 - DNA, 122 bp, Homo sapiens
tccctcttcagcagagggatggcctatgaagctttataactaacaagcatctgagcagaccgtggaggacttttgcctggaatcccctcaaccagagtcctctgccctgaggcctaacactt

SEQ ID NO: 241442 - DNA, 122 bp, Homo sapiens
cctcgctaagcaaattaaaccttttaaggtaacgatcagatggtccggatagtggctgtgcgtgtggacatttgaaagattcaaacacactggtgggaccaggcccacagtcatttgtgccg

SEQ ID NO: 241443 - DNA, 122 bp, Homo sapiens
ataacaatccggaagccaaagtgagacgctctttagctccttggcaaccgctgggttgaacgtcaggcatcgctcgttccgttcgctctttaagtatttattaaagctccaaaattcagctc

SEQ ID NO: 241444 - DNA, 122 bp, Homo sapiens
ccgtttccagctttgccagattcacagcaacaaagacgttctactcaacatcgtgtaatacgtcttactttataatgaaatatgcgtatgtgtacttgaatttttaaataaaaatgtgaaat

SEQ ID NO: 241445 - DNA, 122 bp, Homo sapiens
cagctggtgcctccgccgggctagaccatttgccactttacactgaggggctcgggggtacggaaggcagaatcgtacctgattgggacaggtgaccttaccaggaaaacggacaatcttcc

SEQ ID NO: 241446 - DNA, 122 bp, Homo sapiens
tacgcgccttcgaggtagtctggccggtgtggccattggatgggtttgaggtctcagaaccgagtgggagtggactccgtgtttaatatttagtcccgatgaaggtaaattcctcccagtaa

SEQ ID NO: 241447 - DNA, 122 bp, Homo sapiens
aggcggcgggggaacaaaaagctgcggaggcaaaaagccgcggcgggcaaaaacccgaggcggcggggggggcgcaaaaaaccgcagtggggaaaaagccgcagcggcagggggcgaaaagc

SEQ ID NO: 241448 - DNA, 122 bp, Homo sapiens
acgtgctgcaaattgtgtggcagcatccagcttcataacagataatcacagtatcaacctcggagggttctttggagggtggaataataccatggcatggtacctggtacatggtaatctct

SEQ ID NO: 241449 - DNA, 122 bp, Homo sapiens
tccatttccttggactttgagcccagtatagagtaccagtttgtggagcggttggaagagcgctacaaatgtgccttctgccactcggtgcttcacaacccccaccagacaggatgtgggca

SEQ ID NO: 241450 - DNA, 122 bp, Homo sapiens
tgcactgatgatctcctcggaaaacagaaataccatacaatagaatgtaacatctccaaccgtttcaagtctatttgtatttcaaagcccagggcaatgccaccttctccaggaggacaccc

SEQ ID NO: 241451 - DNA, 122 bp, Homo sapiens
ttctgtgaaacatggtgttcagtggtgcctcgatatgttcaactcaaacaatggcacaggcgcctttatcttgaaacagtcacggtgtttccgtgtgcagcagaagtgctttatgcagtgag

SEQ ID NO: 241452 - DNA, 122 bp, Homo sapiens
agattccccctggaggcccaaacacagggaccctagggctgcctggcagggaggggccgccgttccaaggatgcgcactcaccaccagctggggcacaggcagcgacctgccttcctggctc

SEQ ID NO: 241453 - DNA, 122 bp, Homo sapiens
gccacctcgcctgcctgcagtggctgctgtcgcagggcggctgcagagtgcaggtgggtccgcgcggttcgccaggggcactgaggcttcctcctcaggacagagtcctggcccagagtccc

SEQ ID NO: 241454 - DNA, 122 bp, Homo sapiens
gccctggtctgacagggaaggcgagggggcgctggtgcccctgcaggtgggcagggaaaccgccctcttcaggacgcgcttgtatttctgcatcctgtgtcctgagcctggcgcgggaaccg

SEQ ID NO: 241455 - DNA, 122 bp, Homo sapiens
gtgtgaaggagcagaaggcatcttctcactgtgctgcaaatctttatagcctttacaatacggacttctgtgtatatgttatactgattctactctgcttttatcctttggagcctgggaga

SEQ ID NO: 241456 - DNA, 122 bp, Homo sapiens
tgctgcgggtctctcagggccagcgaaggtcaggggtacccgaaggcgcttctaacctaacggctgggtacccgcgcgcagccaggccctttgttcctcagagggtgcgaggtggcacagcc

SEQ ID NO: 241457 - DNA, 122 bp, Homo sapiens
caggcagctcgtggccctccagcttgaccttgatgaggtggttggccagcgcgaactcctcgtcgtccagcagcccgtccttgtccacgtcggccagcttccagatcttccctagcacggtg

SEQ ID NO: 241458 - DNA, 122 bp, Homo sapiens
agaggctacagcctgttcagctttccaggctacaacccggctccccagcccgccccaagccgtgctgtgctctcacctggctgtctcctcgtagtcccatgactgcctcataagaagggggg

SEQ ID NO: 241459 - DNA, 122 bp, Homo sapiens
ttttgtttcgttccaacccctctccaacgccagctccccacccccccaggaagtcctggccgcccccgcaccgcagctcccgtcgccacctcgcgtcccgctatccccgcgcacgccgcctc

SEQ ID NO: 241460 - DNA, 122 bp, Homo sapiens
tcatcgtgcaggatactgattggggtggcgggcatctgggtctcctatgggcttctacctcgcggctgctcctgaagtgtgcgttcggaaggacagaacgacgcaggaatggaccgatggac

SEQ ID NO: 241461 - DNA, 122 bp, Homo sapiens
ctcatagctgagacatataatcaatcaatacttcctgaacagagtaggggagggagacagcgaccaggtttccttaacagtgtcaggaagtaaggcgctacttctggcctgaattctgagag

SEQ ID NO: 241462 - DNA, 122 bp, Homo sapiens
tgaaagtcaaaaagtggctaagaaaaagatgctccgcctgccactactaaaaagaaaaaacgtttgccataagccaccatgactcagagttcacagatgggaagaaacagataaattagagc

SEQ ID NO: 241463 - DNA, 122 bp, Homo sapiens
cagaacaatagtgacagccttgtcatccggcaacagtcttccctaaaaccattcctaaaacgaaacaaagctacttcagaccaacagcgttgaacaagggaaaagaacagataaaacacagt

SEQ ID NO: 241464 - DNA, 122 bp, Homo sapiens
gctaacactctccggctcgcagaagcggcagcagccggcgggttttgagcttccgagtcccgggtgcgcaagagtgtggacgccacccctccagggctgccaagcctccagggctgccaagc

SEQ ID NO: 241465 - DNA, 122 bp, Homo sapiens
gggagctctggtgtggggcactgccaggctctggggcttactgggagctgttgcttgtggcgctggggcaccatgagaacagtagtatggatccctgtgggatattaagggagctgagatcc

SEQ ID NO: 241466 - DNA, 122 bp, Homo sapiens
aatcaagagaccagtggggtgcatgccaaaccacagccagatggatggttttgcttatcacggtctctttattgcctgtggtgcaggattgtctcaccctgtggtggagggaagaggaaatg

SEQ ID NO: 241467 - DNA, 122 bp, Homo sapiens
cttctcaatgcaaacctcttggattctctatgggatacatttcagaataaatcagctgctcgaggaaaggtaacatggatttatcttatttgttggtctatgattgcaatgaacccttttta

SEQ ID NO: 241468 - DNA, 122 bp, Homo sapiens
cagctggtgacggcgctccgctcacctctgcacatgtcttgctgtgggcctgcgggtggccgccagggaggcagagccctcccgcaaaccttccctgctggtgtccacctcagggtgtggga

SEQ ID NO: 241469 - DNA, 122 bp, Homo sapiens
tgaaactcagcgcatgcgtgggcagttcaggaaagtcagaccaatgtcatatgactcctgcgcgatcctctcaggaaacagggccccaggcaatttcgttcctaagtgagacttcttccctc

SEQ ID NO: 241470 - DNA, 122 bp, Homo sapiens
ccgtggcaaaggtgtggcagccgtgaccctactctcccccttccacgtgtgcctgtgccccgtggtgccacctcacagacaccagtctgagaagggattatgcctgggaattcccacggctg

SEQ ID NO: 241471 - DNA, 122 bp, Homo sapiens
ggtgttggtgggagggacagagaggggcgggaacagccagcagcctgccgggagccaaaacgaaagcactccgtgctggaagtaggaggagagtcaggactcccaggacagagagtgcacaa

SEQ ID NO: 241472 - DNA, 122 bp, Homo sapiens
aacccagtgtcagttgctgtcggtatcccagcaccactctgtagctttgtagtcatctaccgtgtatgagaaagcacgtctttctgtctcctagacttccttggctattcttccccactgta

SEQ ID NO: 241473 - DNA, 122 bp, Homo sapiens
gggtaggaggggcgagagaaaggatgggggtacagaaccggaagaaacgaagggctcgtccgcttcggcttgtcctaatttggtgcccaatctgaagctgggctgtaccattgcatacctgg

SEQ ID NO: 241474 - DNA, 122 bp, Homo sapiens
agagaggtgctagtggctggacttgacctggaaaggtaaggcttctctcggcccctctttcgcacccctgtgcatgggtaccgtccttttcccagcgggacaaggaccttcctcgccgcttt

SEQ ID NO: 241475 - DNA, 122 bp, Homo sapiens
gagttcagagccaggtgatcggcagtgctcgctcttaatgactgtgtttcatctgcagggcgaacgctgttggagaagctgttcagccagcaggagaacgggcctccagaagaagcagagaa

SEQ ID NO: 241476 - DNA, 122 bp, Homo sapiens
actctggcttctgcttttgttttaagggattaacttccctgtcaagtccaagaagacttgcgtatgagaagattacctgatggacttaattctaagattagcttttttcatcaagatggaaa

SEQ ID NO: 241477 - DNA, 122 bp, Homo sapiens
gcaggcccaggacacgctgcgtctgcacccaggagacgcccctcccgcccctctccccgacggccgcttcccccggtacaagcccagcaaactccctgcagatggcaggctgccagctcagg

SEQ ID NO: 241478 - DNA, 122 bp, Homo sapiens
gggtgctgggacagggagagggaatgaccagaatatgccacaactaggggtgtgcttgcccgcacacagcagggatgggatatgccgagaataacacgccacgctcacagggcccactgaga

SEQ ID NO: 241479 - DNA, 122 bp, Homo sapiens
gcgttgataagataggagattttagtcgaaaatatgttttcttttacatagcagaatgcacgagtaaattaaacccgggaaaatttagaaacccaggtagatcccaattctccctccacccc

SEQ ID NO: 241480 - DNA, 122 bp, Homo sapiens
tgtttaagccagggagtgtctggttctcgtttgtgatcatagagacagctttaggggcctcgtggaggagttggggcaatggacagggtctgctttagggattctgccccttactgctgtgt

SEQ ID NO: 241481 - DNA, 122 bp, Homo sapiens
gcctccgacagtgtcctcgctctacctctgacctctccggaggttccgctgcctccaagccggacttagggcttcaagaggcgggcgtgccctctggagtcccctaccatgactgaaggcgc

SEQ ID NO: 241482 - DNA, 122 bp, Homo sapiens
gaaggcgatgttccactgggcgaacacacacacactggagaaggtggcactccagctgggcgaacacacacacacactcgagaaggcggcgttctgctgggtgaacacacacacccactcta

SEQ ID NO: 241483 - DNA, 122 bp, Homo sapiens
gcagggtcatggggtcagaggcagggtccgtgtggtgtggagcaggggttcctccccactcgctcgctcggctgccttcagcccctgcagacacgcaggcaccgtccaccttctccactctt

SEQ ID NO: 241484 - DNA, 122 bp, Homo sapiens
gcgctggacgcgctgacaggcgagcgcccacgggtcgcgtgcttcccggcagcccgggggcggggcctcagaccacgcccccgccttatgattggtcccttcgaaacaggcggcggccagcg

SEQ ID NO: 241485 - DNA, 122 bp, Homo sapiens
tgaatcagtactcctcaggccacaggaaaaatggacaagaaggttccgtgaggcaggcttcgttataaacacctccctccgccatccatattctagcaactcttattagcagtgggcttcct

SEQ ID NO: 241486 - DNA, 122 bp, Homo sapiens
ggactggctctttgacaacttgcttgtgttccatgtattacccctgcatatctgcctctgcgttctctctctccccttctaaattcctggtttaatcttgccagctggttgctagatgtgac

SEQ ID NO: 241487 - DNA, 122 bp, Homo sapiens
gcatctccatggtactggcgttgagcatccagggagaagcagcccagttccgaagggcgccggtagaaaggaaagggcccagagtagagggcagggtctgtgggcagagaaggtgctggacg

SEQ ID NO: 241488 - DNA, 122 bp, Homo sapiens
ctctcagaatcgcaaccctccaccatgtggggccttgctcagcacctcacgtaagcgcagcgcctcccgtaagagggacccagcgtgtattcttggatgaaggagtaaatgaataagtgact

SEQ ID NO: 241489 - DNA, 122 bp, Homo sapiens
cggggcgcagagggccgctctctagaacgcgaccgcgagcgtgagcggtaggactggtttcgggagccttggctgaggccacccagctgatgggtgagtccattccggtccccggaccgaga

SEQ ID NO: 241490 - DNA, 122 bp, Homo sapiens
tttgagttctaccgtcagtcctggcattatttctctctctacaaggagccttaggaggtacggggagctcgcaaatactccttttggtttattcttaccaccttgcttctgtgttccttggg

SEQ ID NO: 241491 - DNA, 122 bp, Homo sapiens
gtcgcgcgttcattacttccaaaggaaactcaaatgtagctattacaaggcccattttcccggaaatgatggctgctttggttcctacgtgaggaaaagcctgttgataatttcaggcaggc

SEQ ID NO: 241492 - DNA, 122 bp, Homo sapiens
ttaaacaaatcccagtctctttaaacaaaatctgcagcttaacaagagcctcaggtgattcgtatgcacattaaagtctgaggagtactggtctttagggaccacagctgccaacctgacag

SEQ ID NO: 241493 - DNA, 122 bp, Homo sapiens
cctattgcagccttcagggctcggcctattttccactactcccttcatccgcctgtgtgccgtcccctttagctgcctcctattgatctcagggaagcctgggagtcccttctcacccctca

SEQ ID NO: 241494 - DNA, 122 bp, Homo sapiens
ggcagagagggccgggcgtctccggcaactcgggcgcccccggcagcagacgcccagaaccgccccggctccggctaacaataggatccggccgcagcgcactggctcttataggcgccggc

SEQ ID NO: 241495 - DNA, 122 bp, Homo sapiens
agacgcaggctcaggcggctcctcgggcctgcggctcacggcccagctgctgcttcctggcgaggccacccaggaccccccgctgcccaccagggccgctgccgccgtcaatttcttcaaca

SEQ ID NO: 241496 - DNA, 122 bp, Homo sapiens
actattgagttactccttcagcaggaagctcttttccttctgcagagcaagttcatttcacgaagtatagtctgaggaccatctgtattaggatcctgggccccactccgccacctcctgct

SEQ ID NO: 241497 - DNA, 122 bp, Homo sapiens
tcccgctcgttggtggcgctgttacatagcccgtagtcagaggcctttcagcccaggggccggcgcacggtaggtagttccctgcggctggaggcgggtctggcgcgggctgggcggtgctg

SEQ ID NO: 241498 - DNA, 122 bp, Homo sapiens
gcacccagactctcaggaggagtgagggaggagagggagtgagggcaagcagtcagcaatcgaaagaccagcttttgctgcacatgggtgaatttcaaaagcattgtgctaattgcaagaaa

SEQ ID NO: 241499 - DNA, 122 bp, Homo sapiens
ggcgctgctgagccggatgcaggcggaggaccccggggaccggccggaccttgaggtaagcgaggctgccctgggccaccccaggctgtgaccctgaccccacaggcctggacaccgtgtgc

SEQ ID NO: 241500 - DNA, 122 bp, Homo sapiens
gcaggatttcagtattttcgactccccaggtgacgccaagagggtgggttccactgtgcacggtggggaaactgaggctcggaggggacaaggaaggtactcgaggtcacgcggctcctccg

SEQ ID NO: 241501 - DNA, 122 bp, Homo sapiens
cggcgctccggggcggcggcggcggcggcggcacccaggccggcgagcccaagacagcatcgcagtttatttacaagcccggtgccagccgccctcccgcccgccagccacacgcgccgccg

SEQ ID NO: 241502 - DNA, 122 bp, Homo sapiens
cctaggaacaaaaatgatttgcctgactcagttccaaaatgcagcaaataataattaaagcgaaacacacacgcactgttttttttaaatgcaagagcaaaacttttaaaattccaaaagaa

SEQ ID NO: 241503 - DNA, 122 bp, Homo sapiens
tgtagtgttgtgcaaacacttgggtttctatgaccactgctccatgtcgtctccttccctcgtgtccccagggccagtctaagggtctcaggtggagggcttacctccagcacctcctaatc

SEQ ID NO: 241504 - DNA, 122 bp, Homo sapiens
acacgctgacatgcaagagatcgctttgtagtgcactgggcacagaaacacacacgcacacgggcacgcacacacagagagacagagaaagtgagagaaacagacagagagtgagtgacaga

SEQ ID NO: 241505 - DNA, 122 bp, Homo sapiens
ctgcctagccatttataaagttttttaacttgcagaaaatcactgaagttctttcagtttcggagcctctaaaataaagtggaaatactataaacacatgtcacagagatgttctgaagatt

SEQ ID NO: 241506 - DNA, 122 bp, Homo sapiens
agtgcctgcaaggtagactggaacaaagtcaccctcaaggtctgtgttaatacacaaacacgtcactcacactaatgttatctgtgtgtatgccaccaggaccacagatgagattgtagagt

SEQ ID NO: 241507 - DNA, 122 bp, Homo sapiens
ggagggcatccactgtccggggccattcccacagctcccggatgctgggtctggaggctgcgcccttcccctgcaggagctcagcccagtggtaagtcatctgtgtgtcatctatgtattta

SEQ ID NO: 241508 - DNA, 122 bp, Homo sapiens
tatgtacattccttggaaagctgaacaaaatgagtgaaaactctataccgtcatcctcgtcgaactgaggtccagcatactgctcatcaggggctagagagagggacaacatccgtttgttg

SEQ ID NO: 241509 - DNA, 122 bp, Homo sapiens
catcatttctcccctgaactatgtggagtaggctcccaactccctccaatccatcttccacgtagcaaccacagagatttttctgttagcacagatttttctgaaacacagagcatttccct

SEQ ID NO: 241510 - DNA, 122 bp, Homo sapiens
cctccggtggtgtttgagcccatctgggctgtgcatcatcttgcccctgtgcttactgggcggatattccacatgtcatcataattcaaaggaaatttacaaaacaggaagcaagaaaatcc

SEQ ID NO: 241511 - DNA, 122 bp, Homo sapiens
cttcccaagataggtcctgcgctggcagcctccggacagcgttctgttttgaactttaagcggagatgctacctctggaaggccggggaaggacagagcctgccttctccccaggatggcct

SEQ ID NO: 241512 - DNA, 122 bp, Homo sapiens
cacctgggccaggtaccctaacagccctaggctgcttaagggctgagtcccactgccatgcggatgtgaagatgggggaggaggggtgggccggctcctggagcactggctgcctaggaagc

SEQ ID NO: 241513 - DNA, 122 bp, Homo sapiens
cccatcctctggccttagctggcctgaaattaaggccacggtaataggggtagcaggaggcggcggactgacctaaagcagctggttctttgtgcgcatagaccgtaagggggaatgatctg

SEQ ID NO: 241514 - DNA, 122 bp, Homo sapiens
ccaggccgatctcagccacgatgaagcggcagccatgggtgtagaagcgctcgctggtgtcgtgccagccaacggcaggcagggccgacaggatgaaggacaccatccagatacccatgact

SEQ ID NO: 241515 - DNA, 122 bp, Homo sapiens
ctgccccgggatccccacggcgccgcccgccccgccctacccgcggggatccggcgctaacgggacggctcccgcctgccattggctgtgagttctgccagtcttccagagaccccgcccct

SEQ ID NO: 241516 - DNA, 122 bp, Homo sapiens
gtgggcctctggggctcctgcgcacgccctgcggggcctgtcacacctccggacccgatgcgaacagctccccctgcaggcgtcccgtgaacacaacgcccatgaccctccagggtggcgtc

SEQ ID NO: 241517 - DNA, 122 bp, Homo sapiens
cggccacttacattgttccactgggacttgagcttctccttctcaaagcgcctgtactcccggaggtcgctcaggtggatcagagccttccagatgaccagcaggagaatgccgatcagcac

SEQ ID NO: 241518 - DNA, 122 bp, Homo sapiens
ccgcccagctagactcggcttcactctctgaatcgaaaagtaacttggctcctctgcctccgggcggccgccgctggcccagcgagcctcctgaacctcgcagggcctggaggagtcggggc

SEQ ID NO: 241519 - DNA, 122 bp, Homo sapiens
tttgattggccgcggcaccaggacacgtcacaggggcggggccgattttaaagagccgggcgcggaaaaaaaaaggccgcctgtcgtcgtggagagaatgagtcacagatttactgagttaa

SEQ ID NO: 241520 - DNA, 122 bp, Homo sapiens
cagcggttaagtgattaggcctggataagcaagcagaatttcgaacccaagtagcctgaccgtgggccttgtgctgttagccctgaggctgctttagggaccagagattacgttattaggca

SEQ ID NO: 241521 - DNA, 122 bp, Homo sapiens
caacccgggatccaaggggcctggaagctgctgagaaaggccctcaggaaatcccaataccgtgcaaattgagctttgtaataaggcacagggcacttttggatcacacggacgggattctt

SEQ ID NO: 241522 - DNA, 122 bp, Homo sapiens
acgaaccccaccagaaggaagaaactccgaacacatctgaacatcagaaggaatgaattccggacatgccgtctttaagacctgtaacactcaccgcgagggtccgcagcttcattcttgaa

SEQ ID NO: 241523 - DNA, 122 bp, Homo sapiens
atccgcagtgcagtctgaggagtttgggcagctcagtgatgacaaatgaccgctgtcagccgccctgtcccccccgtgtgggatccgtgctctctgttgttccacactacctggtgtttaat

SEQ ID NO: 241524 - DNA, 122 bp, Homo sapiens
gaaagcgccgcagggagagactcgaactccactccgctggtgagcagcccctaaaccaagcgacgcagcatcgtaagcccggagcaaacctactgtgtgtgctcagttccaaatgagcctta

SEQ ID NO: 241525 - DNA, 122 bp, Homo sapiens
gcgttcggcattctgagaacgtttggtgtcttctggactccagaatctggacggtccgaccgcctcgtgcttggtgggtttacaaactctgactggttcttaccacccatctaacaggaaat

SEQ ID NO: 241526 - DNA, 122 bp, Homo sapiens
actgacaggcaggcaggccgcgggctgggatccggacaccaaagcaaaagcaccgctgggcgccggaggagccgcggggcttccatccttcctttgactgatttttaaattttaatttgtat

SEQ ID NO: 241527 - DNA, 122 bp, Homo sapiens
aggtgcgggaataggcaagcccttgatgtctggagcagatcgcatcagctactactaagccgctgttgtcaggcacagagaagacactcagcatcggatgagagaataaagccgtgtgcggt

SEQ ID NO: 241528 - DNA, 122 bp, Homo sapiens
ccggcgacggccggcacgaaggtgcttcctgagagctggtgtgggggagctctgtcccagcgccacctgccccgtcggagctgcgaccccggagcagaggagggaaggaagtggggaaacgc

SEQ ID NO: 241529 - DNA, 122 bp, Homo sapiens
ccgtatccagtacagaacatttctggcagatattccttaccaaaatgaccccaaaatccacggcagagacacctgcactgggattctcaacgctggctgcacattactatttccaggaagga

SEQ ID NO: 241530 - DNA, 122 bp, Homo sapiens
acgcgcgggcccaggcggcccccagccctgtgagctcgcatggcgcgccctctgggtcctcgcggtcaccttgcattccgagcacggccgtgttatgtatgcctttagttgatgctggccaa

SEQ ID NO: 241531 - DNA, 122 bp, Homo sapiens
tctcgttctgcttactaagtaagcagctacagatggccaacaaatttgaaacttcttcttcgtcagtgaaaagttaaaaccaaattccctgtttgtggcaaggctcctttgttcagtaaaca

SEQ ID NO: 241532 - DNA, 122 bp, Homo sapiens
gcacagcgtttgaaactctcggagcagcccgaggtagcgagtgggaatgagaagccatcccggcagatttggcagaaactaaaataaggtgtccatacggtgtggggtctcgcccccccatc

SEQ ID NO: 241533 - DNA, 122 bp, Homo sapiens
acacaatacaataacagtctgcactcctaaccccagtctgtaattttacaaatgtatatccgttactaaagaggacagagaacagtaatttaaagaaaacccatcattttactaggggaaaa

SEQ ID NO: 241534 - DNA, 122 bp, Homo sapiens
caggaggtattggccaggctggacccctcaggaccctccagccaacccagcccagcccaccggccctacctggcccactccagcccctggttggcagggtagacaggagtgtcccctggtgg

SEQ ID NO: 241535 - DNA, 122 bp, Homo sapiens
gccgggacccgcgggtcagctggccattggcggatccaaaggcggaactggcgccaagggcgaggccttgttccctgcttcgccgcggtccagcagccgccggccccgccccacggccccgg

SEQ ID NO: 241536 - DNA, 122 bp, Homo sapiens
tcccagctggggagctgagcccggctctgcgcccatcgccgaccccggccactctcccttcgctgctcgctccaaaagcgcctgtcccgccccgcggggcgacttctccctttcggccctgg

SEQ ID NO: 241537 - DNA, 122 bp, Homo sapiens
catttttagtgccatccctgcatactagttggcaaggcctgataatctattcctaggtgacgagatgtactgctgcaacctttaagtcaagaaagcagagaaagaaaggtccatggatataa

SEQ ID NO: 241538 - DNA, 122 bp, Homo sapiens
acctcgtgatctgcccgcctcggcctcccaaagtgccgagattacaggtgtgagccaccgcgctcggccagagctctgggttttaatcctactttagctgtagaaccttgggcaaataactt

SEQ ID NO: 241539 - DNA, 122 bp, Homo sapiens
tcacctcttgatcccaatccccttcttcttccccttcccttaacataaagaagagcctaacgttcatgctgacttcagatggttctttatgatgctggtccaccatcttcttggttttctgg

SEQ ID NO: 241540 - DNA, 122 bp, Homo sapiens
caacagtcataacgtaggtgacgacgactgactcatctcttaaaagatgtgtgtgtccctcgacaaataacctgtctgcccctatcgttctgtaggaggacggagtcccagagaactacaac

SEQ ID NO: 241541 - DNA, 122 bp, Homo sapiens
cacgttccccagtcacctggctggggttcgttggtgtcaaaaccccagccttggtgccctcggtgccagcaggaccctcgcccactggctagcggaattaggcacctgcacgcgggctcctc

SEQ ID NO: 241542 - DNA, 122 bp, Homo sapiens
tacaagtcggtttcttgttgcatatcatgcttctgacctttgctgcgcttttgagcaaaacggtgacttgtcagaaatgttttgacaaatgattaatgttttgacccatgttggttcccgct

SEQ ID NO: 241543 - DNA, 122 bp, Homo sapiens
cacgtgtcaccaggccaggtgactctcagcaagcccctccggtgggcgaggacctctgcacgtgtctccagaggccaaagcagaagaaaacgttagcacaggagtcacttgacttcaccaaa

SEQ ID NO: 241544 - DNA, 122 bp, Homo sapiens
gcgcctcctccgagtctagagtcccacacagaacagccctggactctgggcctctccgtccgagccagctagcagttcatttcaagtgagagaaagggacgttaggattgtttctcccactg

SEQ ID NO: 241545 - DNA, 122 bp, Homo sapiens
aaatatccaatgggtgacggcatcatcgagaagagaatagaaacagatttccggagtccacgggctggtgagatgctctagagagcaggactctgctctctggtgtgccagccccagccggg

SEQ ID NO: 241546 - DNA, 122 bp, Homo sapiens
atttgtatataacagcggcaaatatttagaaaaattttgaaaatgataccatttagacttcgggcttatgataatggaataattggtcagacaaatactctcaaacataaaaactgtaaaat

SEQ ID NO: 241547 - DNA, 122 bp, Homo sapiens
gagccaccccaacttttgttttgtaaaatgtatgagttttcaaatgacaccacgtttatccgtattcgatttcgtgttaaaaagtgttttccggccgggcgcggtggctcacgcctgtaatc

SEQ ID NO: 241548 - DNA, 122 bp, Homo sapiens
tgacgcagaatcggggtataaaatatcaatgctgtttgtcacgacaccgctttctccacccgggcagagctgcggctcccgggcgttgcgcgtggcgtttttcatcacggagggaaagccgc

SEQ ID NO: 241549 - DNA, 122 bp, Homo sapiens
tgtctccttgacacggagggtgaggaacggcgtctgcgaatctcattacacagggtcccacgcctccctctgctgttctccggctcccgtttcttggctgccgccagtgggagtcgcacggg

SEQ ID NO: 241550 - DNA, 122 bp, Homo sapiens
gaaaggatgcaggttgcgcagacgcagcagaggtgacagtcgcctccgcttgcagtggggcgagacgtggggcaggggagcgagggcttacgcagcttttgcctggaaggaatggcagccct

SEQ ID NO: 241551 - DNA, 122 bp, Homo sapiens
ggaaatgtgcacctatctgcagttccagtgaaacaaatcataaattaagaccagaatagtcgactttgtacagtagttagacctggacaatggtggtgcttttattatttcaagcctttttt

SEQ ID NO: 241552 - DNA, 122 bp, Homo sapiens
tacaggtgaggaacagtggggtgtctatactcagctgctatatcaggattccaaagtaggcgattcagaataaacatagccaaccctgtgacatcactgttatcttccaaagatatgagttc

SEQ ID NO: 241553 - DNA, 122 bp, Homo sapiens
tgccgtgctccaagtgagaaatgctgcttggtgagctgggctggctgggctgctggccctcggtcagccgcctgcaacaggcagggccacgggaacctcatcagcagagcttcctggaggca

SEQ ID NO: 241554 - DNA, 122 bp, Homo sapiens
ccaccacagcagcagctgcaggctctccaggctgccagactcggctcagtagtgtagggccgtgttgccactggcgctgcgccggttcacctgggcgccctgcttcagcaggtagcgggcga

SEQ ID NO: 241555 - DNA, 122 bp, Homo sapiens
aatcttttagagcttgagtttttggaatttgaggcttcttttgaggctttagtttactatcggtatttgggaaatgttccacgtgtccttgagaagaatgttttaatttatatgtggtataa

SEQ ID NO: 241556 - DNA, 122 bp, Homo sapiens
agtttgccagaagcaagatcaccctccttccacccccggggtggcaaaggacattcattccgtggagggggaggggactgtgtaactcactctaaatggggctggggtgaccggggagtggg

SEQ ID NO: 241557 - DNA, 122 bp, Homo sapiens
taactataaatactacggtgggggctagtcgcgggcggcctcgggctgctgggctgtgcgcgccctgaccccagacgccgaccctcccggctctgtacactatttacagctcctcgttcctc

SEQ ID NO: 241558 - DNA, 122 bp, Homo sapiens
cccagatgagaaggagcgctctccggagatgcatcgcgtctcctacgccatgtccctgcacgacctgcccgcccggcccaccgccttcaaccgcgtgctgcagcagatccgctcccggccct

SEQ ID NO: 241559 - DNA, 122 bp, Homo sapiens
aagccactccgacgtgtttgagatgggcttagttcccggacccgtcctactgcccccaggcgctggacagcctcagaaagaggacaagtctgcatggaaagataatcgcacaactgagcctt

SEQ ID NO: 241560 - DNA, 122 bp, Homo sapiens
gttcaggcatctcgtccaaatgtggctccccaagcccccaggctcagttactccatcagacgcacccaacctgagtcccattttccaaaggcatcggaaaatccacagaggctcccagatcc

SEQ ID NO: 241561 - DNA, 122 bp, Homo sapiens
gcaccacctggagagtgggaggccctcgcgtgcctgccacatccaccggcaggtggcagccgagtacaggctagtgcaccggaccatggcccagccacccgtccacgactacgtgcctgtct

SEQ ID NO: 241562 - DNA, 122 bp, Homo sapiens
catcagagctgacgcagtacctgctgctgggagactagaggacaggttataccactgaaccgtctgcagatattccccagcaacagtctggggtgcggaagccccactgggtggctagacta

SEQ ID NO: 241563 - DNA, 122 bp, Homo sapiens
cgggaggcggggcctggactgcctcgtgaccagtggggcggggcctgagccagctgtgtgcggatggggcggggctttggaggccgcgtgaccagcggcgggtcacgtgacgcggtgcctgg

SEQ ID NO: 241564 - DNA, 122 bp, Homo sapiens
ggccagctgctgactggtgaatgtcggggaagtgccgggttccaaagctgacgttctggccggcgtcgttcacgggacattcctccagggggagctctggtgaggagcagaccgtgtccatg

SEQ ID NO: 241565 - DNA, 122 bp, Homo sapiens
ggactcgcggccgcgcacccctccgcctcccggcaacgcccgccccgccggggccggggccgactcccagggaagggtccccagcccaagagaccaccaagggtcggcggctacgcgcccgc

SEQ ID NO: 241566 - DNA, 122 bp, Homo sapiens
gccagacttcttataattcttcataaagccattaccaacctgccctctgtgtgcctcactcgatccctgtctttgacctcctgatgtgccaagttgaatgactttcggtctcccagaatagc

SEQ ID NO: 241567 - DNA, 122 bp, Homo sapiens
ttcgcgctgtcactgttagggaaatctgtgtcatcaggcgcaggactggaaaacagccagcgcagggggcccttgagcccgagccctccccgcccgcgctgtcaccagggccacggggctcg

SEQ ID NO: 241568 - DNA, 122 bp, Homo sapiens
caaggacccaagaccaaaagaatatgcgtcacatcaacttggcaatgcacaggggccatacgtttttcagacatgggatgtctggtctgaaagcgtatgggccataaacgaagacactgagc

SEQ ID NO: 241569 - DNA, 122 bp, Homo sapiens
aacaaagaaatgtgcgccaagcaaaggaaagccagaggttagcaacaggggagccgctaccggcactggtcacataatccgtggggcccctgcaaaatgaacccacagcgcccctttgaaaa

SEQ ID NO: 241570 - DNA, 122 bp, Homo sapiens
cggcagctgcaccgaagccccggcgtgtgcctaatgggcctgcagggctggccaggaggccggacagagcgatggggcaatggggggcgaggagggcagagaggaaggtgagtagaagcagc

SEQ ID NO: 241571 - DNA, 122 bp, Homo sapiens
aagcatttcccagtgactttaagcaacggagactttctgtgcctgaatcttcattagtcacgttgctgaaaactggacaaaaggtttctttgctttgtaacattttctaagcatccaagatt

SEQ ID NO: 241572 - DNA, 122 bp, Homo sapiens
gaaaacaggattttggggttcagccccctcatgctcgagttctcccatggtggggcttcccggctcggcctgtccctgggctccacctccacttccaggttcacttgaaataaatccgggta

SEQ ID NO: 241573 - DNA, 122 bp, Homo sapiens
tgaggtcaaagatgccaaacgtcgtaaatggatctgaccatttctccttggcttgggaaccggaatataagatgaaagtggggtgagtgttccagagccagtaggcagaggcctctctgagg

SEQ ID NO: 241574 - DNA, 122 bp, Homo sapiens
gacacccacccggatacatgttaccatcgggtacagccccatgaccaggggacgcacacccggatacatgttaccatcgggtacagccccatggccaggggacacacacccagatacatgtt

SEQ ID NO: 241575 - DNA, 122 bp, Homo sapiens
attcatcaagcatcaggccagtgtgtttcagttatcactatgtggcaggcatttcccacacgctgtttaatttccaccagaaacctgcagagaggtggtgtcacagggcaggtaaggaatgg

SEQ ID NO: 241576 - DNA, 122 bp, Homo sapiens
gacaatctgtcaggctcgcgttgaaataaaatgttaacgtgctagactgaatctggtaatcggaaaaccatgcttaaaactcagagggtagctaggtaacatctctcctactctcttaggac

SEQ ID NO: 241577 - DNA, 122 bp, Homo sapiens
ccccgtgggcatgtgtccctgccggcacccatgctgcaactgccggacaggccctccctgcggcagtggtgcacagcaggggagcagcccagccccgcctcaccatgctgagcaccgcatgt

SEQ ID NO: 241578 - DNA, 122 bp, Homo sapiens
aatctatgcttttaattgtatgttaattatacctcaattttttttaaaaggtctccccctcggccaggcatggtggctcacacctgtaatccccacactttgggaggccgaggtgggtggat

SEQ ID NO: 241579 - DNA, 122 bp, Homo sapiens
tcagtgttggagaagccagtttaggaatggggggagaagaggaagggacctggaatagaacgctagaaagacaattcgtattatggaatgtgacgatttggcagaggcagctgggcaaatgc

SEQ ID NO: 241580 - DNA, 122 bp, Homo sapiens
cgggaaaaaacctccaaataactctcttttctccctcccctcccctcgcctccttttcctcgcctccagtccagtcttctggtttcagacggcccctttaatttaagttccctagtttcccc

SEQ ID NO: 241581 - DNA, 122 bp, Homo sapiens
atttggaggttgcatcttttaagagtaatcatttaaaaggaggcagagcttccaattgcacggtgtcatttacaacctcagccgtggttgcaatagggatctcatgcctcctgctgtcttct

SEQ ID NO: 241582 - DNA, 122 bp, Homo sapiens
ccgcactgcaagggccaggtctcccaagactgcaggaagccttcatctcatggtgactgccggacactcggcccggcatcacgggctggatttaggatggtgactgccggacactcggcccg

SEQ ID NO: 241583 - DNA, 122 bp, Homo sapiens
ctggaatgagtgctggggctgggacccagaaaggaaccagtagtggagtgggggtaatggcgttgcctgatactgccctatggttggaataaggaagggcagagaaaacttgaagcaggtat

SEQ ID NO: 241584 - DNA, 122 bp, Homo sapiens
gccttggggccagggttgccaaccaagcttgtgtccccaccccagtgggaagccctgggacgcggaaacgggaagcttggggacctagggctagcggagggactgacctggtcccgggtccg

SEQ ID NO: 241585 - DNA, 122 bp, Homo sapiens
gagcatggcctatgacgtcaaggatccaggtagcgcccggaggaaagcgccaaaggaggccgccatctttcatacagcagcccggaattttgcgcatgcgcctctgattgtctgtccgcaat

SEQ ID NO: 241586 - DNA, 122 bp, Homo sapiens
agaacacactgggctgctttattttacaagctggatgcctccctcgtgagaacggcagaacgagccgtggtacatccgcaccgtggagcgtttccaggcatctagagaatcagagcgtgatc

SEQ ID NO: 241587 - DNA, 122 bp, Homo sapiens
atttaattccaagttcacaagtctccagggtagctgcccttttgtttggggatttcctcccgggtgctaaatcacttcctcctagctccaatctgaaaagcaattcaggtctcctgtggcct

SEQ ID NO: 241588 - DNA, 122 bp, Homo sapiens
cacctgtttttcctctgaactttccaggtggcgtgggcatagaaggaaggccagtggccacgagggacaatcttggtcttgggagatcctggaaatgatagggagtcccttgatatgtgtgg

SEQ ID NO: 241589 - DNA, 122 bp, Homo sapiens
agggaaaccttcctacccacctattctctttcccaggcagagttagttatgtttcttttgcgctcctgtaacattctatcatatatttataactcatcacactacattttagctatggactt

SEQ ID NO: 241590 - DNA, 122 bp, Homo sapiens
ctttttgccagggttagaatttttacacgccacccctgctccttcctgcctctgtcacagcgctctgcgcggcccacccccgcctcccgcccgccgcccggccgcggcgcaggctccgcgct

SEQ ID NO: 241591 - DNA, 122 bp, Homo sapiens
acagcgcctccttcacgcagatgtccagaggccctgtgtccgtgacgcagttggatcagtcggctttaaattactcaggtgggcaagagaaaagcccgagtgtgccccccaccactgctgct

SEQ ID NO: 241592 - DNA, 122 bp, Homo sapiens
tctgctctcagccagctcagagtccagtgagagggacaaacagttcaacatccaatcatgcgtggaataaccaaggtgtgaaatgcagggaaggaatggagaggtgggagggatgcaattgt

SEQ ID NO: 241593 - DNA, 122 bp, Homo sapiens
ctgacctgcaagccagcagacaagtggaacaagagctccgcagtcagatcagctccctttcgagcaccgagcgagggatccgctcagaaatgggccagcttcggcaggagaacgagctgctg

SEQ ID NO: 241594 - DNA, 122 bp, Homo sapiens
tagacagtattaaaataattccgacatcataatttaatattcacatctattcgtgtaacacgcagtataatagagttatgacgatatggatcctcagctgcctgacaatgtataggttattt

SEQ ID NO: 241595 - DNA, 122 bp, Homo sapiens
ctccgctaaagcgtcccacctaatgactgtaacaacgtcccctgaggagggccaatatggcgacggtctcctcttggcatagccctcttccctccctcatgatgggcagctccagtaacgcc

SEQ ID NO: 241596 - DNA, 122 bp, Homo sapiens
ttattacattcttattattccaaccctcgctccctgtcattagagaaaattagtaaaaatcgactctgagtattttcatccctctggggaggaaatggcatttcaatagcatttgtccgcaa

SEQ ID NO: 241597 - DNA, 122 bp, Homo sapiens
cccttcggcatcatcagcaggattttgtttaaggcttctggagcttgtctttgtttcacccgggaaagtccctgcagggagagctaagatctccccggaggaatgggccagagccctgacct

SEQ ID NO: 241598 - DNA, 122 bp, Homo sapiens
gggtgcccacctgctaggcctaggccagggagaaggaggaagctgctgggtgaccgcaggcgctgagggaaggggcccagagccccctcacatttcctgaaatgaacaatgggagggacttc

SEQ ID NO: 241599 - DNA, 122 bp, Homo sapiens
ggagggagtccgagggggcggaggtggagtgcagcggggccgaggccgcggagcccagagcggacagcctgagcccagcggccgctgtcagcaggctcaggcgcggggcgcgccggggctcc

SEQ ID NO: 241600 - DNA, 122 bp, Homo sapiens
ggccctgggcatgcatcatgctaagcactcttccccatgatcttggaaatcttgaagggacgcttatctggattcatttttggaaacagtacagaaaagtggctagcataaatgactaggag

SEQ ID NO: 241601 - DNA, 122 bp, Homo sapiens
gaaacccctttctgggcccaaggggcagcattatgtttcccagggtggtgataaaccttccggtacatatcccatgggaaaacatttgggcaagcagcagcaccttgtcctggtccctgagg

SEQ ID NO: 241602 - DNA, 122 bp, Homo sapiens
ggacgcctggggtccagagacctggagatctggagaccagacgacgaggccccaggaggccggaccccaccaggcgctccctgtgttcttaaaactctcggccgggcgcggtggttcacgcc

SEQ ID NO: 241603 - DNA, 122 bp, Homo sapiens
gtaccacagccattttctgtgtaccaatatgaagctgttccttcataagttcttccttttcgcttttttaaactgaaattattttcattaggatcactaccttcccatgtgcattttaccac

SEQ ID NO: 241604 - DNA, 122 bp, Homo sapiens
ctcagcgatgatgctgtccgtgtccatggagcggctgttgtccatggacagcaccacagacgtggcggagatctgggactgcagctcccggatcttctcttcatacagccgcctgaggaagt

SEQ ID NO: 241605 - DNA, 122 bp, Homo sapiens
gtagaggccactctgctctacagggccaaggtcggagcgccaggctcctcctggccgtcccgcaggctccaaagcctctctgagatgagctgccttgaagggagtgagttccccgtaccttg

SEQ ID NO: 241606 - DNA, 122 bp, Homo sapiens
agacagaggaaattgttttcagacctggctttactaaaagcttcttttccctgctttcaacgactcagatgagagcactgcaggaagaagaaaaacaagttcctagatctccctgagccaat

SEQ ID NO: 241607 - DNA, 122 bp, Homo sapiens
aacaaagcaattaaaaagctgcaaaagatcatcagcttgctgaccacatttcaaagaatgcgagaaagcaggtgatcatattcccaagcctccagcttctgtgagaacccataggtcaagca

SEQ ID NO: 241608 - DNA, 122 bp, Homo sapiens
aggtcacgctggcacgaggccttcaggcggccgtagcgcatgctgcagtggtgcaggctgcggcgctgccactgctgccgctgcccctcccagtcgccgctgactccaaaccactgggctgc

SEQ ID NO: 241609 - DNA, 122 bp, Homo sapiens
agcagccagagggaggaaacctgcagctcagccccatcccagcgcttgcactgtgctcagcgcctgtaatcccactctctgggcgcggacaaggaagactggaccttacggtgggagggcgg

SEQ ID NO: 241610 - DNA, 122 bp, Homo sapiens
ataaggaaacagcagtttcatggtcattgttgtcagcctagcagcgcttggttgcacttccgttgctcaacgtgtttctcctggctagggtgtttgtagtatattttgagttttaggaatct

SEQ ID NO: 241611 - DNA, 122 bp, Homo sapiens
acgcagtccctctgccccatctagatccacctcagacatcggcagcaagaccagaatggccgagtctacagggcccgagccggcccagctgcacgacagcgcctccttcacgcagatgtcca

SEQ ID NO: 241612 - DNA, 122 bp, Homo sapiens
cgggctcactctgtacccaccccgcgccctttccgcggcctgttccgccggaacgcccgtcgcaggccttcagcagccagcatcttcgtcgcccctaagaggccgtgtcctctccctcgggc

SEQ ID NO: 241613 - DNA, 122 bp, Homo sapiens
tcggggccgtccctccagggtcagcagggccataggtgctggagcatcgagggcacagcacgtatgaatgcagggagcgtgtggtgtgactggtcagagccagaggtctgcaggacactccc

SEQ ID NO: 241614 - DNA, 122 bp, Homo sapiens
ccttagcaactgaactaggccagagcaaccgaactaggcagaatcgaacagaatttggcgcggtcgggctggccaggctgctcaagagtcaaagtgggccaacatggtgagaccctgtctct

SEQ ID NO: 241615 - DNA, 122 bp, Homo sapiens
aaaaacaaacaaacaaaacaaaacaaaacaaaaaacaaattagcctggtgtggtgacacgcgtttgtagtcctagctacagagcgagaccctgtccctaaaaagagagagagagagacatgc

SEQ ID NO: 241616 - DNA, 122 bp, Homo sapiens
ggccagagagccggggggtgacagacaggggggccggcagccgagccaggcaggacgctgcgcgccgcgttactggagccggtgtcccggcaaccccggaacgcgcctctgtgggagaagca

SEQ ID NO: 241617 - DNA, 122 bp, Homo sapiens
caggtggtgtagagcgtggctgtgtggggtggcaggcaactcccttctgacgcgctttcccgccacaggctttactgcagatggtgcgtgacgagagccaccagatcctggcgctgtcagaa

SEQ ID NO: 241618 - DNA, 122 bp, Homo sapiens
tctctcagctagaccctagcagtctcagcacacaccgcacggggcgacagcttccgggggcggagcctggtctcgctccacgtctaccgcgcctgctccccggacgaaatccgcggaccggg

SEQ ID NO: 241619 - DNA, 122 bp, Homo sapiens
cgcctgcatgggggggggggaggaggaggacggaggaagtttctgcgccgagtcctccgtcgggaaaactctaccaacttccccaggggaagggaagacaacagtgtcccagcttcccgagc

SEQ ID NO: 241620 - DNA, 122 bp, Homo sapiens
cctccccattcctgtgtggtttctgaggaggggcagtccttgcccacctacttgtggacgcgcttgtgtggacttggccctgctcgtcatctatcctggtgctttaggacaacaccagttcc

SEQ ID NO: 241621 - DNA, 122 bp, Homo sapiens
cggcggtggtggcggcggtggcggcggcgtggaatccggcgtgggctggggggtccgagccgcggggggcagtgccatgcacaagcaccagcactgctgtaagtgccctgagtgctatgagg

SEQ ID NO: 241622 - DNA, 122 bp, Homo sapiens
gcctgcccggccgaggctctgcagcgtgcgcgcccggcttctgggggcccgcgggaggcgcggaggaaagtgcagactcccagtcacggccaaatgtggaaggaccggacccctgggttgca

SEQ ID NO: 241623 - DNA, 122 bp, Homo sapiens
atcacgggaatttcgcgcctattttttgttggctgggtgttctcgccagtgattgggtcccggcaaggcgtgccggtgcgctcggctgcggctgctccgtcgacctttgcaggaccgggcgg

SEQ ID NO: 241624 - DNA, 122 bp, Homo sapiens
ggtgtctgggggagctggagggacgcggcgtgcaccagcccgggagaagcgtgcgagctacggagcagatgggctctttatatagagtccaggtccggtccgccagagcagtgcaactcgtg

SEQ ID NO: 241625 - DNA, 122 bp, Homo sapiens
ttgagctccgactggttgtggaagcgggtgaggcgcttgcacttgcacgaggccaccaggcgcaccttgcgcgcgcgcggcgcctcaccaccgggacacagcagctgcacgcgctgcgcgcg

SEQ ID NO: 241626 - DNA, 122 bp, Homo sapiens
attcttcactcctcaggcaaaaaggttgctcaaggagactccaggatttggggtctgcctcgtcactgtcaccaggaggctttttttctgacttgccagagctccccatcagtcctcacaga

SEQ ID NO: 241627 - DNA, 122 bp, Homo sapiens
gggacaagaacatggccacttccaccttcagcaggagtgcagcactggaagtaagcataacgctgtgccatgtccctccatgtaaatatgcattgaatggactcactcgactaccaccaaga

SEQ ID NO: 241628 - DNA, 122 bp, Homo sapiens
ccaaaacgaaccaggttcggcctaatgcagaaggaaatccggagcaatccccaaagtcaacgccttggaaaggttcgccctgggtctcagtactccggggcatgcgcgtcctgccgctcgct

SEQ ID NO: 241629 - DNA, 122 bp, Homo sapiens
acagatgttcaaatatcatcaatttccatcaatgccggcagcccctgctccacccatccccgcttcatgaaggagactgcagaagtccagagggcagtgcaagtgcacgtgaaaaaatcgat

SEQ ID NO: 241630 - DNA, 122 bp, Homo sapiens
tcacgctcctcagggaggccccgccccgtgctctcgggccgcccctcttcgccgtctccacgcctccgcgggcagttaccagctttggctgctcgcgcctccccaactcgggtaaagctcct

SEQ ID NO: 241631 - DNA, 122 bp, Homo sapiens
aaagtgccctgacctgaaaatagcaggtgctaatttgcatgttacttatttaagtagcaacgcttctgggatcctgctccttcccctataaaagctcaccataacctccacgaagcagtaag

SEQ ID NO: 241632 - DNA, 122 bp, Homo sapiens
ggcctagagcaactgggaaggaatttggtaggaagtggcagtgggcaaacagccagagtgcgctatctttagaatttgaatgatggtagcaatgtcccacaataccccttcgtgattcttca

SEQ ID NO: 241633 - DNA, 122 bp, Homo sapiens
aatagtaaaaaagacacagaagccctaaaatatgtatgtatgtatatgtgtgtgtgcatgcgtgagtacttgtgtgtaaatttttcattatctataggtaaaagcacacttggaattagcaa

SEQ ID NO: 241634 - DNA, 122 bp, Homo sapiens
gaccgactggggtgtttcgcaattgtgagaggcgggtaaccgcgctgcgctcctgtgctgcggccggtggcttcattgcctgcgacgccctgcctctgctgcccgactggctggcaagatga

SEQ ID NO: 241635 - DNA, 122 bp, Homo sapiens
gcgtgcgtgggatcagaggaccgccctccccacaacaaccggcccctgcatcttagcagccgttggaagccccagctcttttaccgccaagttcatccttgggagacagaagacgcgtgatc

SEQ ID NO: 241636 - DNA, 122 bp, Homo sapiens
gggtcctacggagcctgcactttcaagaggtacagcggcatcctgtgggggcctgggcaccgcaggaagactgcacagaaactttgccattgttggaacgggacgttgctccttccccgagc

SEQ ID NO: 241637 - DNA, 122 bp, Homo sapiens
ccgcggccaatgccccgaccacacgctggccacaggagtcctggctcccattggctgcagcgggaaatggtgaaccaatgctcatagaccttaacgccctcctctcgggatcacttccgcct

SEQ ID NO: 241638 - DNA, 122 bp, Homo sapiens
agatcagcactcgcacaggccccgaagagcccctgatgaatccaggtcccttaagacagccgcgatccggggtgggtggggtggcgtggcaaagccaccaacagcctctgtaccgtgctttc

SEQ ID NO: 241639 - DNA, 122 bp, Homo sapiens
ggtgatccgcccgcctcggcctcccaaagtgctgggattacaggcataagccacagcgcccgaccatatttcaaggcctttttgctccacgtgctggttgccctaccagaactaaacggaca

SEQ ID NO: 241640 - DNA, 122 bp, Homo sapiens
cccagaagtccccatgaggcctgaggcctgggaatcggggctagaggcccatttgttccccgccgcaggccagggagcaggcacgcgtaactgggtcagccccgccccgccccgccgcgcgc

SEQ ID NO: 241641 - DNA, 122 bp, Homo sapiens
aagaaagaaagaaaggtgctccagtggctctcaggcagagctccacctctgtctggttgccggtggtgccacagcacagcaggcctctcgtctccggagcagtgactgtgacctgttgccag

SEQ ID NO: 241642 - DNA, 122 bp, Homo sapiens
aagggccatccttctcctgattccctggcgtcctaaagcactcctggcaaaagcccgcttcgcacctcggggtactgacctccgcttcccacaggtcagaatattgaatccagtctgcattc

SEQ ID NO: 241643 - DNA, 122 bp, Homo sapiens
ttttgattaaatacagaaactaaaacaattaatgttatagtgaaagtaattctgtatattcgttaaagaaaagggaaaatggcaaaacatgaaataatcctgccactcaatatattaaaatg

SEQ ID NO: 241644 - DNA, 122 bp, Homo sapiens
tgaagagagaaagcagggaccattcctatgttgggaaaatgggggctcaaaaaaaggtcacgcacaaggcaggggagctgaaaatagaacgcaggaggcctttagctacctcccagtgtagc

SEQ ID NO: 241645 - DNA, 122 bp, Homo sapiens
gactctctcacaagtaagaattctacctgatggctttcaaactggaacatcagctcttcccggtgctacagcagcctacaggccttcgaactggaactggggcactggctctgcagattttg

SEQ ID NO: 241646 - DNA, 122 bp, Homo sapiens
gcccctgcactgcgtcccgggtgaggaggcccctttcacagcagaagaggtgggtggggtcgcccagctttggaagctgcgtgacttagtgggagaaccccggccttcttccaggctgcagg

SEQ ID NO: 241647 - DNA, 122 bp, Homo sapiens
tacatgtaaaaattaccctttctctcactcttaaagtagatatagatcattcattcaattcgaaagtgaaatttgcatttgttacttaacattggtcacagagaaaacatgatgggaacaaa

SEQ ID NO: 241648 - DNA, 122 bp, Homo sapiens
tggcggtgtgcccggctcccccggccttgcagggcctccagggccgcgcgccgctgccggcgcccgcgctcaggctcataggcggaagggattcggcttgtctcagataccctattttagtc

SEQ ID NO: 241649 - DNA, 122 bp, Homo sapiens
ctgctcctgcctcctggcacctctgtgctggctctggcttctctatcctcgccctccttccgggtcattgttcccaaaagtgggttgtaacaaatcacaaacgcagcggcttacaaatcaca

SEQ ID NO: 241650 - DNA, 122 bp, Homo sapiens
taattatgaacaaatagccaaggatcaccagatattcaaggaaaatttccaacaagacaacgtcaaccccctactcaaaaacaacaaaatactaaggaaaaactttggaggagggatcagaa

SEQ ID NO: 241651 - DNA, 122 bp, Homo sapiens
cctcagctccaaattgcttcctttttcggtgggagaaaaaactccgaggagttgtgtgagcgcctaaggagcgcacgctcctccggccctcaacacccagtatagttttcgctaagttcctg

SEQ ID NO: 241652 - DNA, 122 bp, Homo sapiens
gcccacgacttctggtgccgggtcggcggcgactgggggagcccagttccgagaccgtaccgcacccactgcggacctcctgggccctacatagtaggcgggtcatgcagggcagcgggagg

SEQ ID NO: 241653 - DNA, 122 bp, Homo sapiens
gcggaagaagcgcacgcggtgctggggcactgccagcacgcccggcccgagcgccgccagcggctggtcccagcaaaaggcgctgaagggctcctcgcgcacacccagaaagcggtcgacgt

SEQ ID NO: 241654 - DNA, 122 bp, Homo sapiens
caaataggagtggaggaagaatagtttctgctgctgacttgtgactttgtggcgcctcagcgggggagcagaggggagggagcactaatctaagacttgtctggtctagcgggagggccctg

SEQ ID NO: 241655 - DNA, 122 bp, Homo sapiens
tggagggggcggggcccgggcgctgggcggggcgcagatggctgagcgcaaccgcgtccccgcatgggatccttccgccaaacgggccgagtaaataggcccgcccccaatgccgggcccga

SEQ ID NO: 241656 - DNA, 122 bp, Homo sapiens
cgaggcggatatgggcggaggaatcgcctggtgcctcacattcaggctagtgaattggaccgctccgccccgtccagccccgttccgccccgccgcaggctgggatccaaggggcgtgatcc

SEQ ID NO: 241657 - DNA, 122 bp, Homo sapiens
gacagttagtaagtgctagacagagagcaaagagctgcaccccctatttcctgcagcagccgctgtgaggggcttgaaaatccgcagagcatcggccatattatggggatagactgaaagct

SEQ ID NO: 241658 - DNA, 122 bp, Homo sapiens
gattcgggtgtgagctactgtgcctggccaacacagctttgctttctatctctattaattcgaatattttagtttcaaagtgagggattggttcacattcctcaacctgtttgtcgtcatgc

SEQ ID NO: 241659 - DNA, 122 bp, Homo sapiens
ggggagggagtgacctttggtttcccacatttcccaccatgaggccaggaagttcttcctcgtgtctgaccacacggtctctgaccacgaggccaggaagttcttcctcgtgtctgaccaca

SEQ ID NO: 241660 - DNA, 122 bp, Homo sapiens
ggaagtggatgatggtaagttggaaagtgacaaatgtctattccccaaaaaatattgtttcgaagtcatggtgggtttttagactaaacattatcattcaatagctgtgagaccttggataa

SEQ ID NO: 241661 - DNA, 122 bp, Homo sapiens
cttgagagttcaccgtcgccgccactgctcatgtctgtgggaggttttctccggtgtagacgtggtgtcaagtgttcagcaccctcttcctgactcaccttccaggacccctctgcccattt

SEQ ID NO: 241662 - DNA, 122 bp, Homo sapiens
tatctgaaggaacctgtcatcattgagtgtgggcacaacttctgcaaagcttgcatcacccgctggtgggaggacctagagagggacttcccttgtcctgtctgtcgaaagacatcccgcta

SEQ ID NO: 241663 - DNA, 122 bp, Homo sapiens
ggctattataaacaccactgctatgaacattctagtagatgcatacacatgtccacataccgaagcaaggaattactgggtcataggatctgcatatctacaattttaatagatactgacat

SEQ ID NO: 241664 - DNA, 122 bp, Homo sapiens
ctgccatcttaccccttgactttgatttctggacccatgaggtgatacagctgcagcccccgcataagtgttctcacccttgggaagcaagaaggggtataggatgcacactttccctttag

SEQ ID NO: 241665 - DNA, 122 bp, Homo sapiens
aagttgccattgggacttcggtgcctgctgagaaatgcctgggcctctggctccccctggcggccggtccctggcttgacggaagcgcgtcgcgcgggctccagacgtcctgggccaagtcc

SEQ ID NO: 241666 - DNA, 122 bp, Homo sapiens
cagcctgggcgacagagtgagggaaggctatctcaaataaataataaataaataaaagtacgggcagtagtcaggagcttatgctgtattgttccaggtgagggtatctctgaccaaggtga

SEQ ID NO: 241667 - DNA, 122 bp, Homo sapiens
ggttaagacttggtgcacacaagctttcctgtcccacaagaatacagcgtgctctcttttcgggttccattccaatcacgtaacaaacatgactgccttttttgtttcggcatcagaaagat

SEQ ID NO: 241668 - DNA, 122 bp, Homo sapiens
ccaaatcgctgggtaaccttggccaagacgttaccaaacattcaaagaaattatggagcccgtttaattggccacttcagcaagaacaaaacaaggttattaaggtttagctggatacagcc

SEQ ID NO: 241669 - DNA, 122 bp, Homo sapiens
tggaataagtcagtttatatcacactgctctgcaccaggcacttatggaatgctttgccccgcctctgtcactaggtgattctgtctagggtagacatctttttcatcatctctaatccctg

SEQ ID NO: 241670 - DNA, 122 bp, Homo sapiens
ggagcagcagaattagcgaaatgttagtagttgctaggtaatagggtttatgttaaagatcggagactaagacgtggtcattgttaaatccccttgaggaatttatggtgaagtagccaatt

SEQ ID NO: 241671 - DNA, 122 bp, Homo sapiens
cccgggccccctctctcggtgagggaggcactcagtcggcctcggtgtgcccagagagctcgagccacgccatgcccgctgcacgtgccagcttggccagcacatcagggcgctggtctctc

SEQ ID NO: 241672 - DNA, 122 bp, Homo sapiens
ggccagcgagccggccttgtgcatgtgcgtcttcatgtggcgcttgagcttgctggcctgcgagcacgcgtggtcgcacagctggcacttgtagggcttctcgcccgtgtgactgcgccggt

SEQ ID NO: 241673 - DNA, 122 bp, Homo sapiens
tccccagggtcttagcgtggcctagggatgcagatcttggcggccggcgtctgttgctggcgtatcccccatatggctgcccgggctgaactcggccgcgagaaagaggaggcgcgcgcggg

SEQ ID NO: 241674 - DNA, 122 bp, Homo sapiens
accagactctatttattcttcacgcgcctagaagagcaggactccggaggagcttgggagcgaggctcggggcttggctgtctctgggcgatctctcccagactttttcgggctgatttcta

SEQ ID NO: 241675 - DNA, 122 bp, Homo sapiens
tataacactcactgcatgatccaagattccattccttggaatccgtgaggccaagaatcccgggtcagagaacacaaagcttgccaccatcttggaagcggcccaccaccatcttggaagcg

SEQ ID NO: 241676 - DNA, 122 bp, Homo sapiens
gatggcgccgccgagcgcctgaaatatacttgcaaggccgcagcaatatacttgcaaggccgcagccggagcagctgttccagccgatcctagctcgaaagttcctctgttgctctgggaga

SEQ ID NO: 241677 - DNA, 122 bp, Homo sapiens
gagggggagtgcgtgcctccctgctggtggcccgagggtctgcaggtgagccttgcctcgcggcccgcgcaagttaaaataaatgcacatggggaaaatgtcaaacagtacaaaaatagaca

SEQ ID NO: 241678 - DNA, 122 bp, Homo sapiens
tgggccctcagtcaggttcttctgctccaacccagtggccacctgtgctcttggggagctcgggggaggctgggaaactttcaaagagcagttaatcactaactagctggagataagagaga

SEQ ID NO: 241679 - DNA, 122 bp, Homo sapiens
gtggtgcccacaggctggcacaggccccggtgtggatgttcaccgaggtggcagtggctgcggtgcccacaggctggcacaggccccggtgtggatgttcaccgacaggccccagtgtggat

SEQ ID NO: 241680 - DNA, 122 bp, Homo sapiens
tagggcctggcaaaacctttgctagcaaagcgccttttgtgccgggctgtggctcgctatcgacatctcgtccgttaccaaggctgggtttcctactgatttccctcctcctctgctttcac

SEQ ID NO: 241681 - DNA, 122 bp, Homo sapiens
accctcaggcccttcacgtgaggtctgtgaggaccaatttgtgggtagttcatcttccctcgattggttaactccttagtttcagaccacagactcaagattggctcttcccagagggcagc

SEQ ID NO: 241682 - DNA, 122 bp, Homo sapiens
gggaagccggctattccggggcttggtgcggtcttggagccggagggtggcccgtgtgagcgcgagcgccccggaccttcgcggtgcgcgtggactgtgcgcttcctcgtctttggtcgggg

SEQ ID NO: 241683 - DNA, 122 bp, Homo sapiens
ctcagcagctggagtcacatcttcgtttccctgcccatttccaacatcttagagttgatgcgtccttttttacttaaaacaactacaaccaaccatgttctcaggtaccagaacttttctgg

SEQ ID NO: 241684 - DNA, 122 bp, Homo sapiens
aaggcttggtgtttcctcggtcttggccgttcagagccctgctttctgtgaaggggcagccgggcagccaagcccgttttggctacacagacgccctgagcctacgctggagggaaggaact

SEQ ID NO: 241685 - DNA, 122 bp, Homo sapiens
tgggtgggtggggagggcaggggctggatccaggacttaacaggccaccaggtggctgggcgcagtggctcgagcctgtaatcccagcactttgggaggccgaggcaggcagatcacttgag

SEQ ID NO: 241686 - DNA, 122 bp, Homo sapiens
gtcgctcgagcctctgcgtggagggctgccccctagtggtcagcggcgggccatgcacttcgagcccggtggatgcttatggccatggtgcggggtgctcaactagggcatttttctctcaa

SEQ ID NO: 241687 - DNA, 122 bp, Homo sapiens
gggtggtccggcccgagtactgggccagccgggcagcctcacacgccagctgctcaaacacgtcgtttacaaacgagttcatgatgctcatggccttggcagagatgccaatgtcagggtgc

SEQ ID NO: 241688 - DNA, 122 bp, Homo sapiens
aaatggcatattggtgactgcatgggtggcaaggtcttgagcacaaacaaaagaacatgtcggggaaagctctggttctacaaatagggagtgaagcagctagaggcctcgccaggaatgaa

SEQ ID NO: 241689 - DNA, 122 bp, Homo sapiens
tttcagcctctgcctgcaagactgagctgcttttacctgcttcttttcccagcctggctccgtctgcattacagactcagggctctgtgtaggatgagctccataatcaaggtcctgctgac

SEQ ID NO: 241690 - DNA, 122 bp, Homo sapiens
ccgtgtacctggcaccagtcacgcagcgaacatacatgcaggagacgcggttgcggcgggcgctcttggtggggaagacctcaatggtgtccagctcgcgctggctgtactggaagtcggcg

SEQ ID NO: 241691 - DNA, 122 bp, Homo sapiens
caggccttcatcaccttgccctggattactgcattatcaatggtgcctctctgttcttcccgggaactcttttcatcagtttaccctgctgctcaaaaacttacactaactctccactgcat

SEQ ID NO: 241692 - DNA, 122 bp, Homo sapiens
tacccaaagaagcctccaggaaaacacatcgcttgctccaggagtgtgttcccagagtgtcgacacagctccagcgtttctcacagcctctgctgccaggaaaggataaaacaccacccata

SEQ ID NO: 241693 - DNA, 122 bp, Homo sapiens
ttaaattttccccacttccctccctgacacctgtttaaatcaatatcttcctctccaggtcgcggggagaatgtgcccagctctccacacaacgcttctcaaatccactaaaatcaacacaa

SEQ ID NO: 241694 - DNA, 122 bp, Homo sapiens
tttatcgccagagtccctgaactctcgctttctttttaatcccctgcatcggatcaccggcgtgccccaccatgtcagacgcagccgtagacgccagctccgaaatcaccatcaaggactta

SEQ ID NO: 241695 - DNA, 122 bp, Homo sapiens
ttgcaaatgtgtttcactttggcagcaatgttttcatgaaaaatgtttttggccaggcaccgtggctcacgcctgtaatcctagcaccttgggaggccgaggcaggcagatcacctgaggtc

SEQ ID NO: 241696 - DNA, 122 bp, Homo sapiens
tctttttccccaccatgccatttatttgttgaagagaatgataatcttttaaagttaaatcgtgtcagccatctacttagaaatctctaatggccgggcatggtggctcatgcctgtaatcc

SEQ ID NO: 241697 - DNA, 122 bp, Homo sapiens
ctagccctgagttctagaatgccttctgggcatgggctcctggctgcaagctgtccagcacggccccgtttgatccccacacagctgggagggtggaggggctcttcccatgttacggacgg

SEQ ID NO: 241698 - DNA, 122 bp, Homo sapiens
agcagcagcagcgacagcgaggaactctgcagctccttacacacctgccacaggaagtggcggaaagagccgcctgtaggacagacgagacacatgggcacctggggtgtcccggcgggagg

SEQ ID NO: 241699 - DNA, 122 bp, Homo sapiens
tgaaatattggctgtgtgatgttttgcatgaacattcaccactgcacacagggaccctctcgtatttccttgccaatgatgactgagcatctctggttcacagatcctcctgcttctcttca

SEQ ID NO: 241700 - DNA, 122 bp, Homo sapiens
ttaggcaatgtaattgcaaaaacaaacgaaacatgccatgatgaccttgtacccgaagtccgaaatggcagattgtttgccctaaaggctgtaccgtacatacttgccttaacccacctaca

SEQ ID NO: 241701 - DNA, 122 bp, Homo sapiens
ctcgagccctctgtcgctctctgaggctcactgtccccaggacaataattgaagttggggcggagcgcagggggccggggaggagggcggggagggccgtcttctttgcattccaatctccg

SEQ ID NO: 241702 - DNA, 122 bp, Homo sapiens
agagacatcctgcgtcctagaacatccatttatcagtgattcatcttttaatttatagtgcgtcaaacctttcctcgggcctagagtgagcggggcgtggggagccaaaggaattcattttc

SEQ ID NO: 241703 - DNA, 122 bp, Homo sapiens
cagcctattttcgtctggaggcggtggattcccggtaggaggcgccttcagtcctcggctcgatcctgtgacgccagccagctgcctatcggcttctcagtgtttgaacttcaaagggctgg

SEQ ID NO: 241704 - DNA, 122 bp, Homo sapiens
ttttctgtgatgcgtgggctgtcgggacatctgtcttctatacctaataaagtcgcccgacgcagaatgaactcctcggcatcgctttgaatccgggctcacatatggttgctaattagctg

SEQ ID NO: 241705 - DNA, 122 bp, Homo sapiens
tggagacttccatcagttctagggagctattagcccccttgccctggctgtaatggagaccgctgtgtctgcctcctttcgcactttggagccaaaagaggaagggaccgcctcccacgtcc

SEQ ID NO: 241706 - DNA, 122 bp, Homo sapiens
caggaaatgacatcagaggcctgtgctcagggagtgggggtctgagccgggctggggcggcgggggcggcagtgagtggggtgggggcgagcggacctcggcggagcctccggcctgaggca

SEQ ID NO: 241707 - DNA, 122 bp, Homo sapiens
acaagccagaaaaaccactcccgccaaccccgtcggtcccagtggtggcatgagcgacgacgacaaaatcaggctgcagttggccctagatgttgagtacttgggagagcaggtaacccatc

SEQ ID NO: 241708 - DNA, 122 bp, Homo sapiens
gctgccacacagtcggcttgaaaactcccggaagccctctgtccttcatccaatcagcagcgtaccaggtatgaagctctctaggtgccatcttgagtgagggcacgctctccttagagggg

SEQ ID NO: 241709 - DNA, 122 bp, Homo sapiens
tttagagccggcccaatgagggcctccagggggcgggtcggactgccgcgggccggggagcgctctgggtggccagctgtgggcccgggccgtcgtgggctccggcttgcgtgcggagatga

SEQ ID NO: 241710 - DNA, 122 bp, Homo sapiens
gagagggggcgtggctggggtcccaaagtggcttcgctgtcggcttgtggcgctctcaggcggtaaacaaccttacgcaaatagctgttaatggtggtggtaaactcgtgcaaatcccagag

SEQ ID NO: 241711 - DNA, 122 bp, Homo sapiens
acgagaagtgctcctttgtctcagagctgcagacagagctgcacccagcagggctggagccggggctggaggggagggcccgccccggagcgccccccgtatgcacgtgaacaaggccggga

SEQ ID NO: 241712 - DNA, 122 bp, Homo sapiens
gggctttgtaggtgggtgggcgactgaagccccctggaggggcttcctggggtccaacgccgagagggtccgggacaagaagatgctcagtcacgtgtttgtgctgcaggtgcacccccagc

SEQ ID NO: 241713 - DNA, 122 bp, Homo sapiens
tgggagccggacctctagccttaaaccagcgtgaaaaggctcggccggaaccacaaggaccgtgcctctgcggctttctctactgccggccaactcacggctgggctttgggttctgtaacg

SEQ ID NO: 241714 - DNA, 122 bp, Homo sapiens
tccgcgccgagggatcggcgatcccaggtccggggaaactccgcgagcgacgcgctcgcccgcggccttccttgtcgctctcggatgttcccgattaatgggctccaagtgaccactgccag

SEQ ID NO: 241715 - DNA, 122 bp, Homo sapiens
tctcgtggtgcaccgttttttaagcccgtcggaaaatcgcagtatttgggtgggagtgaacggattctccaggtgccgtccatcacccctttctttgactaggaaagggaactccctgagcc

SEQ ID NO: 241716 - DNA, 122 bp, Homo sapiens
agcctgcaacagcacccacacacccaggcgagcatctgatggcctggaactgcacccagacgcccaggtgagcatccgacatcctgaaacagctcccacacccccaggtgagcatccgacag

SEQ ID NO: 241717 - DNA, 122 bp, Homo sapiens
tggtaaggagcgcgggctgtggagggtggtgcgagctgtggggcgcggatacagctgccacggtttccccagctcccaaggacactcagtgtctctagagggtcaagtgtaaaccagcacgc

SEQ ID NO: 241718 - DNA, 122 bp, Homo sapiens
ttgtcaatgctatgaatagtgacaactgctaccatttcctgggcatctactgcattccagcgtcatactgacgtcacctccgatcctcacatggacttgctattaatccttattattgcatt

SEQ ID NO: 241719 - DNA, 122 bp, Homo sapiens
gcccccagcaccaccctccatgctctgtgggaccccactccagagcctaacctcatcccccgggtaagaatactagaatttctccttggaggctaaagaagacgttagtttctctgccgccg

SEQ ID NO: 241720 - DNA, 122 bp, Homo sapiens
gaggagaggggaggggagaggagacgataaacttgccaacagcccggccaaggtgaaccccggctcctggcgccttcccatccgcattcattccacaaacgcgggccaaatctccgaaccag

SEQ ID NO: 241721 - DNA, 122 bp, Homo sapiens
tctctggggagtttgcagcagctgagagacaaggctggctttaaagcatccctctgatgtcgacggagaaagggtttttaagggcacacgagggaatgagccacccaggggactgccgacgt

SEQ ID NO: 241722 - DNA, 122 bp, Homo sapiens
ctcctggaggcgctctaaaaacgttcttggtgacttatctggcctttggacaacttcggtcgtcttagacaagtttatgggtttctgagcggctcttttaatacttgtgagaggagatacca

SEQ ID NO: 241723 - DNA, 122 bp, Homo sapiens
aggaatcagccggacttgccacaccccttccagacactagcaaggcccagcaaggcccgtcgccgtcccgcagtgaagagcgcctgacctcttggctccgcagctgcctcttgagcatctct

SEQ ID NO: 241724 - DNA, 122 bp, Homo sapiens
gtcagttcagcatgaaatttaatcactggatcaatattgtgacacagcttgtcagagagccggggactggtcaggaatacctggttgccaagaatgctttcatttggttggcttctcctttg

SEQ ID NO: 241725 - DNA, 122 bp, Homo sapiens
aactgtgtatgtctacaaaagtctgaagaaatcaccatagattatgaaagcttgggagaccgcatttcccagacacctccacggggcctacacttccacggggcctacaactcccaaacacc

SEQ ID NO: 241726 - DNA, 122 bp, Homo sapiens
gagggcttgaacctaagtggcccctgcagcatccatggcgggaccgtggacctccaagcccgcctccctcggaagcacagcttcctcagcgtggccccacactctcccaggctcacccagcc

SEQ ID NO: 241727 - DNA, 122 bp, Homo sapiens
gtggcttcctgagaaatcggacccaagggggacgccttccctggagccctgcagtgatgacggtggtccaggcaggagagggttccttcagtctcacacatagtagctcccagctgagtcta

SEQ ID NO: 241728 - DNA, 122 bp, Homo sapiens
ttgaatctcgagagcagggagaccagccagacagcccacctggctgacgagacccggcctcgcttagaaagctcctccaagatgccaccgcatgtgaaatgcttggggttgaaatgtaacga

SEQ ID NO: 241729 - DNA, 122 bp, Homo sapiens
ggtttctactctccgtgccccgccccgcgccatcctggggagcagcgggaataaatgatccgcccctggccagtgctcacccgactgaccagagcgcagcccggtgaccgaagcgcacgggg

SEQ ID NO: 241730 - DNA, 122 bp, Homo sapiens
gcctatctaccaggctccaagcaaccggacggtcatccaggccccgcttacttctggttccgcagactagaatggatgggagtctgagtaggataccagaaagcgagaaagacccaagagga

SEQ ID NO: 241731 - DNA, 122 bp, Homo sapiens
ctacgagacgccattattctgtttccggcagttttacttccgtttgtttaacagctggcccggaagtttaagtgaatatgcggcttgggctccaaaagttgctgtacggtattttattttaa

SEQ ID NO: 241732 - DNA, 122 bp, Homo sapiens
ctcaagaaatatgtgtcgaatgaatgagagtctgggcttctccctctccctgcatcactccgcaacagccgggccggctctggcgcgactttctcagcccctgcccaccttcagctacgccg

SEQ ID NO: 241733 - DNA, 122 bp, Homo sapiens
ttacttgaaagaacaactgaaaaactatggttaaacttgtgcatctgacctacattttctcgaaaatgagcaaagtgagcctgacacttcaagaaaaactgacagtatttgttgccaatgat

SEQ ID NO: 241734 - DNA, 122 bp, Homo sapiens
cactgaggatcaggtcactgctgcttctgccaaaggccagggggcgttgacctttatgagcgaagtttgaggccttgccctccctctccttcttgtcatctcatgagttccagttctctccc

SEQ ID NO: 241735 - DNA, 122 bp, Homo sapiens
ctgtgccttcaggggccagtcaccctctcagctcctcaaatttattgaatgtgtgtgtggcgctatccctcaatgcatcaacagccataagcacaatggccagctgctcccttatgccttcc

SEQ ID NO: 241736 - DNA, 122 bp, Homo sapiens
tcaaaacactcacaaatgccatctttgttgtccccaaacaaacctgtgtcccatcctgatcgcaaccgctttaagccgtggctctcaaatgaacccatccatccctatcccgcttcccagat

SEQ ID NO: 241737 - DNA, 122 bp, Homo sapiens
ccaatagaaagcctcagtggccttggcggggctggcccggagagcagatgggaggtgcggcgacagtgtttgacgagagccgaaggaggctgtgggaggtgttggcggcggcggcgcgggcg

SEQ ID NO: 241738 - DNA, 122 bp, Homo sapiens
actgaatgagctggaggaacgggcagaggccctggaccgccagcggaccaagaacatatccgctatcaggtgtgttatggagcctatttttggcccgcagaccttggccaaaattatcaggc

SEQ ID NO: 241739 - DNA, 122 bp, Homo sapiens
tttccttgccttgccagacctcagtgtacttgaaagcaaataaaaatggtatcaaaccaccggcaatgggaatatatacttctcttaaataagtgagtctgccttaaaaccattttgctcct

SEQ ID NO: 241740 - DNA, 122 bp, Homo sapiens
gatttggcaatgtgacacatacccagtactcactgagctaagaaaagagagacacaaacacgtctgagccggccagtgacttgtcatggtcttgtttcactagctttctgtccacacccaat

SEQ ID NO: 241741 - DNA, 122 bp, Homo sapiens
ctgccttgggggtcttaaagggctggggaatgtggcaacgatgtccccctcccctgcctccggatttcctgagctcaaagctttgaggctgggcagggcccaggctcccacctggctgggtg

SEQ ID NO: 241742 - DNA, 122 bp, Homo sapiens
aggcactctgctgggcactgtgcagatactcaagaacaaaccatcagggcctgctctcctcgagcttactgccttgttcccaaaggaaatcactcatcgtgctgtcttggggggcggcacct

SEQ ID NO: 241743 - DNA, 122 bp, Homo sapiens
tcgcagtttcctctcccatttgggtccaaaccagaagagaagagccacgatcttgggcaccgtcttgtaaaatcacccaagtagctgctaagggagtgggttttgggggtggggatgggctc

SEQ ID NO: 241744 - DNA, 122 bp, Homo sapiens
gtcaacattttttcaaggagctataaagcccgtggaggagtcagctgacggcacagtgttcgcggctgcaccgctcggaggctgggtgacccgcgtagaagtgaagtacttttttatttgca

SEQ ID NO: 241745 - DNA, 122 bp, Homo sapiens
agaagcccagtgcatctccgcctgttttaacaggttatgctgctctaaggaattgcgttccggagagcgtaagcggtgaagttttagctatttctatccttccaactgagaagccctcctgg

SEQ ID NO: 241746 - DNA, 122 bp, Homo sapiens
gtctctctgttcttgagacacaggcattacctggttagacctgttttgtttgaacactaacgtgtgagttggccaaatgcaaatgagccagtgtttgtaatcctttattttatttttttaaa

SEQ ID NO: 241747 - DNA, 122 bp, Homo sapiens
gcggaaccggcccctcctggggcggggtgggggtctctagcgtggcctccctggggcctgcgcccacggtgtcggcacgcgatgagcgactcacagggcagctgcagtcacagtgagagcag

SEQ ID NO: 241748 - DNA, 122 bp, Homo sapiens
ggggcatgtagaaggggtggttgcggttggtgggcgacatgacgtggggccgggcgtactcgctcagagtccgaagggcaggtgtgtcgggcccgatgtaggggggcacagcagcaatggtg

SEQ ID NO: 241749 - DNA, 122 bp, Homo sapiens
tggtcctccaccccaagtaaagtgaaagctccttgtgagcaaggattgtgcccagtcttacgcagttccccaggcatgtgcgaggtagtaacagtagtaataacagtaatggtaatggccac

SEQ ID NO: 241750 - DNA, 122 bp, Homo sapiens
ttcctcttcacctgcaacctgctgggcagcgtcatcttcatcacctgcatcagcctcaaccgctacctgggcatcgtgcaccccttcttcgcccgaagccacctgcgacccaagcacgcctg

SEQ ID NO: 241751 - DNA, 122 bp, Homo sapiens
acacagcctcaggccagtgcctgaaaacgctcactgatgatgacaacccctggtgtctttcgtgaagctctccccgaagggtggatacatcgtggctgccacgctgggcaacactcaagctc

SEQ ID NO: 241752 - DNA, 122 bp, Homo sapiens
tctctagtaaacgaggtgggtcatacgtctatgtcaaattgaatcagccaggacagcttccgtggtaattaaactggacgtctgtattggtcacagcaaagggtgccttgtgaattcaggtt

SEQ ID NO: 241753 - DNA, 122 bp, Homo sapiens
ttttgggtgcaaagcgccgctagcgggaagacgggggccgggcggggacaggggcacctgcgtagctggactgagagcctgcgcccagcttacatcgaccccacccggccccggcccgaccc

SEQ ID NO: 241754 - DNA, 122 bp, Homo sapiens
gtgaatttccttttcaccctgtctacagtgatttcagggagctacttgtgatgtcctttccgatgtcagaattaagggtagggcagaggcagatgtaagtacagtactgcccactccccttc

SEQ ID NO: 241755 - DNA, 122 bp, Homo sapiens
accggaaacagcgacatccacaggcgctcggcagggaccaggaacccagaaggcttgacgcgcagggggtctcggagaaactctacccctgtccttcccagcctcctgcttagctgggcctc

SEQ ID NO: 241756 - DNA, 122 bp, Homo sapiens
ttctggcgggttagcactccgggtccattcaccttgttatcggctctcttcctttccccgcgtcagtgtccacagtgcagtgcccgagcttcagccactactccgtgtgcacaagcagctgc

SEQ ID NO: 241757 - DNA, 122 bp, Homo sapiens
ccaatcggaatgtgtgttacagagacacttagtttgatgaaaggactgcgcaggaaaggccgtgggacactcattctgagatcttaccgttgattggaccaaattgttactcccttattttc

SEQ ID NO: 241758 - DNA, 122 bp, Homo sapiens
gagacacggacccctcaccgcttctcacgtgcccccagccgcaaccccaccacggctgctcggtggttccgagacacactggctcccagcactttgcaaccacagggtccacggctgcaagt

SEQ ID NO: 241759 - DNA, 122 bp, Homo sapiens
ggcttgtttttaaaatccatccgaaagggccaatcagacgcggcagtctgagtgcgcaggcgcggattggtccgcagctacttagagtgaccaataggcgtggaggtaagtttggttgagac

SEQ ID NO: 241760 - DNA, 122 bp, Homo sapiens
tgccttcaccatccagggacacctctggcagggcaagaaacccaccactcccaagaagggcggcggcacccccaaatagccccacccgggcggtccacgggccgggccctgtgtgctgcggc

SEQ ID NO: 241761 - DNA, 122 bp, Homo sapiens
aagttgacctttgcagaagcagcacctactcttttaggtcacttaatgagcaccaattaacgaatgactttactttgaacctctaggaaattaactaatggaaacaggacattgtgacctca

SEQ ID NO: 241762 - DNA, 122 bp, Homo sapiens
agagacggaacagcccacgccccgacagaagaagccccgccggagtcgcaccatcttcaccgagctgcagctcatgggcctggagaagaaattccagaagcagaagtatttgtcaaccccag

SEQ ID NO: 241763 - DNA, 122 bp, Homo sapiens
ggcgactgggggaagtggatgggggagcctggccagggctgactgagcgcccctggaatccgtgctccgggcgttggctcactcccgccccgacacctgggcccgccctcccgctgcgcagc

SEQ ID NO: 241764 - DNA, 122 bp, Homo sapiens
taatagcggaatggataaatgaacgcaaggaggcacaggaatcccagaggccgctccaaccgggagcccgacccctcatcccaggctctaggatccgcgacagccggcgaggggcgccaggg

SEQ ID NO: 241765 - DNA, 122 bp, Homo sapiens
cccagaggttgtaaaattttatgtctgtacctgattcacctggtaacttgctaaaaataccgatgtccaggcctacctttctagattcggatacataaagtgacactttccatattaaataa

SEQ ID NO: 241766 - DNA, 122 bp, Homo sapiens
ggaaggctttgttttccggtccggggggagtgcagatgacctaaggagttgaatgtcacccgggattccacagtcctgtgtaacagaaacgagctgagcgagttggacccgctgtttttatc

SEQ ID NO: 241767 - DNA, 122 bp, Homo sapiens
tctcaacccgctgcagcaggaagtcaaaggcggcaggattctagcacaacagtgagacgacggggtcagaggggaaacacacccacactagcctgcctcaggtttgacgctgtggctgcacg

SEQ ID NO: 241768 - DNA, 122 bp, Homo sapiens
cagcgccctgcactgggccaccaccagctccagattgccaagaagctgtccaagggcatccgcccggttctggggcagccggaggaagtgcagttccggcgactgcaggcgctcatgatgga

SEQ ID NO: 241769 - DNA, 122 bp, Homo sapiens
cgaactcctgacctcgggtgatccgatcgcctcggcctcccaaagtgctgggattacagacgtgagccaccgcgcccggccctcatgaacttattctttagcgtttcattttgagagcggga

SEQ ID NO: 241770 - DNA, 122 bp, Homo sapiens
ggggtggctggggcggtctagggtggcgagccgggccggctggagagcgggtctgggcggcgccttggcgggaggagggactgccggacccacgcggcggcccgccccctgcctagccgcaa

SEQ ID NO: 241771 - DNA, 122 bp, Homo sapiens
agcgcgagcgcgagaaggagcgcgagcttgaacgcagcgtggtgagtgcgtcactgcctgcgccaccgccttctttccctctttccttccttccctctgcgctgcgctgcgctacgctacgc

SEQ ID NO: 241772 - DNA, 122 bp, Homo sapiens
ggcccccgagcaccccttgcacaggggaggggagccctaggcctggctcctggaggggagcgtgatagtccggtggaccccataccctggagagaatggaaacccccaacccacgaccggtt

SEQ ID NO: 241773 - DNA, 122 bp, Homo sapiens
cgctcagcgtggagaaatgccagcctgcaacagaggcttgcgctggaaccgaacccctggcgtgagccggtgcgagggggcggtgccgtggctctgctcagggtgcgctgtggtcgccagcc

SEQ ID NO: 241774 - DNA, 122 bp, Homo sapiens
gcccggacggcggagcgacagaagagccagctccagcggctgctgcaggagctccgcaggcgtctgacccccctgcagctggagatccagcgggtggtggaaaaggtaaggtgggggtggac

SEQ ID NO: 241775 - DNA, 122 bp, Homo sapiens
cctgggtgccctcaagaaacacatccgaagccacacgctgcccttcgcctgcgaaacctgcgggaaggccttctccagaccctggctgctgcggggccatgtccggacccacactggtgaga

SEQ ID NO: 241776 - DNA, 122 bp, Homo sapiens
cctcggggggaggtgacgcttgtataggctcccctctgtgctccggcggggcgattttcacggtcaccaggctgcggacgggccgggggtgctgggccttccaaaaccaccgcttcatgtag

SEQ ID NO: 241777 - DNA, 122 bp, Homo sapiens
gttctgtagggcaagtctcacatgaagctactcatcatttgcttcgtgtcctccgagctccgagagttggcaaagctgatgaaggagcagtagacagcgacccaagcacaccacttcagcta

SEQ ID NO: 241778 - DNA, 122 bp, Homo sapiens
ctccacaggctgcatggcctcctgcacgtagacgatgaactccgaggcctccccgccctgcgtgtagacagtcaccgtctcaatgccctccacgtcgtcggaggacaccaccaggtggtgct

SEQ ID NO: 241779 - DNA, 122 bp, Homo sapiens
aaggcccccgggaccccgaggcgggagccggccgcccaaacaacgctcaccgttacacgccgcaatcgaggcgtctcaaccatcgccagaaccaggacgattgctccgaaggccccaccacg

SEQ ID NO: 241780 - DNA, 122 bp, Homo sapiens
ggaggcggaggttgcagtgagccgagatcgcgccattgcactccagcctgggcgacaaagcgagactccgtctcaaaaaagaaaaagaaaaacctgtctagggggcgtgtgtgtaagtagtc

SEQ ID NO: 241781 - DNA, 122 bp, Homo sapiens
gggcggagaaggggcggggagaatcacctttccttttttacaattggtcgtagtagactccgagtcctgccgcccgtcctgcagccgacaggctgccaggactgtcactcgaggagctgccg

SEQ ID NO: 241782 - DNA, 122 bp, Homo sapiens
agtccccacccttggctccagtttccaagtgacgcaaccaagtgtctggattcagagaatcgcaaaatgtttatctggaatcacaaccaccaccatgaccatttaatcaaaccttatcctgt

SEQ ID NO: 241783 - DNA, 122 bp, Homo sapiens
tgggaggaaccaaggtggacaagcctcgaagtaagagatctgttcaaggtcacagggagtcgggactcatgcggaggcacagatccaagctctctgtactgggccctttggtattctgttgg

SEQ ID NO: 241784 - DNA, 122 bp, Homo sapiens
gagtaaagggagggaatatcctgaaaaattacaaagagactcagataatctgagggataccgcaaggaaataaaatgaaaacatgaagagctggcttcagatctccaaggggttggccaaga

SEQ ID NO: 241785 - DNA, 122 bp, Homo sapiens
cgcctcaggtgagtcctgctcgacgcccaaggcccaacggtcagaaccgcctctgcccgccggacccagcgaagctaggggaacaaatcccaaaaacagttcgggcctttccggtgcgctca

SEQ ID NO: 241786 - DNA, 122 bp, Homo sapiens
tcgctgccccgaggacctttgagtatgtcccctcacaggcccacgggttcctgttctgctcgatcaaagcccagccagacaacactgtgtcccaggaaacaagaagtttagcagagagggac

SEQ ID NO: 241787 - DNA, 122 bp, Homo sapiens
gagattttagaagccacgcgctgcaatagcggctggagcgaagggactgcaaataggtcacgtcacccaggatggcattatctcgcttggggacaaagttcaaattgtatggatgtttgtgg

SEQ ID NO: 241788 - DNA, 122 bp, Homo sapiens
agcctctccggctactcggggtcagcgtggggcccctgcagcagatgagggtcttcacttcggtgaactgaacccttgaagcggctgtgggcagggcagcagggctatggccaccccccagg

SEQ ID NO: 241789 - DNA, 122 bp, Homo sapiens
caaaccatggccacaggcacagtaaacataatgaagcatgttggagcaccctggactgttcgcaaacatgaagcaagagaagaggctgagcctactttggagtgccagagaagcattgcctc

SEQ ID NO: 241790 - DNA, 122 bp, Homo sapiens
gtccccagccagaaacagaggctaagaactatgccagaggttttggttcacctctgtcaccggctgacaccaccgacacgttgtccttaggcaccagacctgccagtgagcccccagcagag

SEQ ID NO: 241791 - DNA, 122 bp, Homo sapiens
cagggcgtgacggccacagggtctgcccgctgcacgttctgccaaggtggtggtggcgggcgggtaggggtgtgggggccgtcttcctcctgtctctttcctttcaccctagcctgactgga

SEQ ID NO: 241792 - DNA, 122 bp, Homo sapiens
tgaaagtctcgctgcgacctgagctgctgaatcaggtttctggttactatgggcaacggccgtgttttctttttgatgtcctttgcagtggatcacagctacctgctgaggtgagtagcctg

SEQ ID NO: 241793 - DNA, 122 bp, Homo sapiens
ttcagactaagttagccagctcaacctccttgtgaggtggggcctgtatccctcatcttgcggatggggaaactgaggttgagctggtaaccagtgaagtgtgggtgtgagccaggtctgtc

SEQ ID NO: 241794 - DNA, 122 bp, Homo sapiens
gcccacaatcctcctccaggtaaatccctggcctcattactctggggctctttaagtcgccggttcctggcgaaagcgccagtcacttccgcctctttttactgggattcttccgctctagc

SEQ ID NO: 241795 - DNA, 122 bp, Homo sapiens
tgtgagagcatacctgttctctgtttaatgacagagctttgcttttctgcaaatcatacccgcttgaattcgtattcagtgattggtggccaatcagggctaatgagcattataaggaagac

SEQ ID NO: 241796 - DNA, 122 bp, Homo sapiens
catgccccgcggacttgatttatgccgcctgctccacgtcaactgcaggctggcgggaggcgggcgggtcgtgccgggtgggagggctctgcggagggctggcgcgggtgggctggcttcgg

SEQ ID NO: 241797 - DNA, 122 bp, Homo sapiens
caacagcaaaacggaactaaaatttcaggctcgacaccacacagcgtgtcgagatcagcacgaacttggcgctgtgacttttccttagaggggccacttaggcttacacttccggatcctgg

SEQ ID NO: 241798 - DNA, 122 bp, Homo sapiens
acctcctcgtacacaaagaagtgtgtactgttgctcacgggggacacactgaggtcaagacgggtggacaagcccaaaaggcaggttcatctgaccgcagctctgtgggtaaacgcctgtgc

SEQ ID NO: 241799 - DNA, 122 bp, Homo sapiens
cttcggtcgccggagagggaactttcaaacttagttaggaagccagactgtccgcgcgtccgccagtcggtgcgtcggtcccgggccggctggagccaagcgcgggttttcgtcactcggag

SEQ ID NO: 241800 - DNA, 122 bp, Homo sapiens
agtctaaggccagggttctcaatgttggcagtgcaagatcacgtgaggtacgactgaacacggagatctccaaaactgcggagagttttgcgtgtgaacgtatgcacagacatctacatgga

SEQ ID NO: 241801 - DNA, 122 bp, Homo sapiens
tgattgccttgccgattctgcattactgggcagagtaagagctctgcttctaatgctgcccgcttaagacagggactgatagctgtagcatatcctaggtcttttttcctatctattggagg

SEQ ID NO: 241802 - DNA, 122 bp, Homo sapiens
gtcagcaaactttttctgtaaagggccagacgggaaatattttgggctttgcaggccatgcggcctctgtcacatctactcaactctgctgttgacatgcaaaagcagcaatagacaatatg

SEQ ID NO: 241803 - DNA, 122 bp, Homo sapiens
acttcaagcttttgtactctagactaagttttcctcccctcctttttaaaattctgttgacgtaagtttccatttgctgttttgaaatttgttacattggtttccttgagcttcctgtcaaa

SEQ ID NO: 241804 - DNA, 122 bp, Homo sapiens
gagcccctccctggccctgcccttcagaaaactctcaacaacgacctgggccccaactggcgggacaagttggaatacttcgaggagcggcccttcgccgccgcatccattgggcaggtgca

SEQ ID NO: 241805 - DNA, 122 bp, Homo sapiens
gaataaatattttagaagggggtgagtatgtctatggtgtgtactggaggttaaggggctcgttttttcacagacacagaaaatgtggcactgtgaacagctatctcaaaggcagaaagaga

SEQ ID NO: 241806 - DNA, 122 bp, Homo sapiens
tttgaatggctgggagagtaaaggggatcaaatttagctgtgttttactttccgcttcagcgtagaaacaagaggcaatctcatgcgattgagaagtaccaccctcctgtaaatgacaactt

SEQ ID NO: 241807 - DNA, 122 bp, Homo sapiens
gggtggtgggttctgagcctctgggctcctggtcaggcatgcaggtgtctgggcataccccggctcctggccccaccacccgccttgttctgtgccaggtggggtggggaggccttgtctgg

SEQ ID NO: 241808 - DNA, 122 bp, Homo sapiens
tccacccgccttggcttccaagagtgctaggattacaggcctgagccaccgtgcctggcccgaagaatttgctgggtttttttgtttgtttgttattatgttttgagacggagtctcgctct

SEQ ID NO: 241809 - DNA, 122 bp, Homo sapiens
aggccactttttgtcctacttgagcatctcaagttgggatgcatcttctgatggcacttccggaactggctgtggtttttttgggtgtaccgagagtgccagtgactgtgcttcttacaatt

SEQ ID NO: 241810 - DNA, 122 bp, Homo sapiens
tttccatcaatcatcccaagctcttagtttccaatactgtcagcttctctttcccttacacgccaacaggggtttgtgctgcattttaaacctcgtttctcaaaactactctcagacttagt

SEQ ID NO: 241811 - DNA, 122 bp, Homo sapiens
tgaaaggagtgtattaattatgcatagaagggccatggcagtttgccagctgcatcttaacgaactctattccactccccagacatcccagcccttccctacttctgttaggtccttcctga

SEQ ID NO: 241812 - DNA, 122 bp, Homo sapiens
gtagaccggcgcgcctccgggggggattcctcccgggcgttgagttgccaacctgggacccgaggaagttcggcgtggtggtgtgctttttgttgttgttaaccctcctcggatttctcgaa

SEQ ID NO: 241813 - DNA, 122 bp, Homo sapiens
gagagaaaaaaaaaaagaaaccaaaaaactcacatgtaccccatagatacgtatgactaccgtttgtcaataacaaaagaaaataaaatggcaaccacacacacaaaaaagttgtggttctg

SEQ ID NO: 241814 - DNA, 122 bp, Homo sapiens
agctgcggccgggtttcactgctcgaggcgggaaggcggggagctgaggccccgaccggtcggccagccagagcgtggaattggtagcgcctcctagtcccaggatgtttatggctggtgaa

SEQ ID NO: 241815 - DNA, 122 bp, Homo sapiens
acagagaagggaagagactcgccctaggtcccacagcaagcagcagtactggagccaacacggaggccccccggtttcacggtcagggctcgctacgctacaccctgaacgcagacccaggg

SEQ ID NO: 241816 - DNA, 122 bp, Homo sapiens
agggggtctccgcggctgggcccagtcctggggggctgttctgagggagggggttccccacggctggtctatactccctcccgggctgccccatcctgggctcccgcccaccaccctgtgcc

SEQ ID NO: 241817 - DNA, 122 bp, Homo sapiens
cttcgtcgtgctccccggagtagcatacagcatgctgaatgtgttcctgaagtcgcaccacggagagcactagggacacgagttcatcccctacccccatcttagcatcaggaccaagccgt

SEQ ID NO: 241818 - DNA, 122 bp, Homo sapiens
gttaattacagtgacccccatggggtgtgtattgttatcctatctttcaggttaggaaaccgaggcttaaagaggctaagtggcacacctaggtctctgttttgattatagcagtaagcagt

SEQ ID NO: 241819 - DNA, 122 bp, Homo sapiens
cccactgcctgttcctccccatactaccacagctgatgctctcttgaaagcaccacctcccggcaggaggccaaccagcacaaaaattgtgcattaatcaatcaaagctaaggaccctcaca

SEQ ID NO: 241820 - DNA, 122 bp, Homo sapiens
gagttttctctgggtatttaggtgtcctcctacatcccagagatgtgcctgttaggaaaccgcatgtctaaaggatcccagtcagagtgagggagggtgtgagtgcgccctgcaaggggatg

SEQ ID NO: 241821 - DNA, 122 bp, Homo sapiens
ggtcactgatttggggacaccaaggctgaaaacccagcagagcataactgtgcaggtctccgacgtcaatgacaacgtccccgccttcacccaaacctcctacaccctgttcgtccgcgaga

SEQ ID NO: 241822 - DNA, 122 bp, Homo sapiens
tagttgcttaaggttcctgcaaagacaggtgggatgtaacccagagcccacacgaagggacgggcatttatctccagcacttcagaaggagaggaagaggagggggtgggtacagctgcaga

SEQ ID NO: 241823 - DNA, 122 bp, Homo sapiens
gaggcggatcccgtgggctggggctggggtgccggttcagcatttctctaacacaccccgcggatgtgcagggccacacggagagccatccgcctggacgtagatatcctgcagacctgtca

SEQ ID NO: 241824 - DNA, 122 bp, Homo sapiens
cagggaggtgggcctcctggcctttgtgctgagtgtgtgaactctagccccatagacattcgtggggattgatggacattttggccacttcagaggaagggaaagggatagttaacaaaaag

SEQ ID NO: 241825 - DNA, 122 bp, Homo sapiens
ccttcctctttgggttcatgttgtcctaagctgagacaatttagttcactgggggaaagccgtggagaaaagaaaatcctggggatgaaacccatagttaatattctaaaatagcatcatga

SEQ ID NO: 241826 - DNA, 122 bp, Homo sapiens
ctacatggaggctgagacaccagcatcccttgaacctgggaggcagaggttgcagtgagccgagattgagccaccgccccacagcctgggcaacagagtaatactctgtttcaaaacaaaac

SEQ ID NO: 241827 - DNA, 122 bp, Homo sapiens
ctcccggcgaaagtccatcagactcccatctcatctcctttctgtctgtagagctatctgcgcggtctgtctctccaactctctccctctctccatctgtctcttcccctccctcccccttt

SEQ ID NO: 241828 - DNA, 122 bp, Homo sapiens
cttgctcgttccatgcagtggaggaggaagaggctgggcccctgctgtgtgggggcagcccgggaaggacatggtcaccagccttgggtcatcagtaattagtgagcgtcacgggtaaagag

SEQ ID NO: 241829 - DNA, 122 bp, Homo sapiens
gcagagattcccgtggtgcacctttgaagccgaaatttgacagaaaccaagcgagcatgccgctgaggacggaggggctgcgggattgctcggccgcaggtcagggtctcatggaagctggg

SEQ ID NO: 241830 - DNA, 122 bp, Homo sapiens
gttggtcccccccctccaccgcgctcgcacacacacacgcacacacacgcacactcgcgccggccccactgcgctggtagtttgctctcactccaggcagtgtttggccacagggcacgcgc

SEQ ID NO: 241831 - DNA, 122 bp, Homo sapiens
gtaaaagtttcggggaggaggcggctgcactgagcgagttttaattacagacgaaccgaccggggacaggcgccttggcagttgtgccgcctgtttacgtttcaccagttcttggaaatgaa

SEQ ID NO: 241832 - DNA, 122 bp, Homo sapiens
tagaaatcaacggaacccagatttgccccaacgacctagtggcgttccatgacttctcctcggacctggagaacgtgccacacctgcgctacctgcggctggatggaaactacttgaagccg

SEQ ID NO: 241833 - DNA, 122 bp, Homo sapiens
tggtaactcgaggcggggatactactaatgcccatggcagtcctcgtcactttcaccccacgtttcccatgttacgtcactggctgttctaagtgcacaatgcttaacgtggggaataaagt

SEQ ID NO: 241834 - DNA, 122 bp, Homo sapiens
aatcaactttagttattctgcagatgaggagttttttctcacttcagttaacagttcattcggaatgcaattgacttgcattgttgggatcttttatgagttttatatatgtatgtatgtat

SEQ ID NO: 241835 - DNA, 122 bp, Homo sapiens
tatgcacagcaacctttcagctgtggttggttgaatccacgcgtgtggaacctgcagatacggaggaccaaccaaggacttgagcagtcatggatttggtatcccaggagtcctggaaccgg

SEQ ID NO: 241836 - DNA, 122 bp, Homo sapiens
tgtaaaacttgtgaacaagctttcattttgatcaaactgatcttcatttttgtaataaaacggaagactcatccagtaattgtttatgaatttattttggggggatcaattagtaatattaa

SEQ ID NO: 241837 - DNA, 122 bp, Homo sapiens
ccacagagatgatgtcatccctgatggataggaaggtgtcctcgtgatgatgtcacctcccgttgttaggaaggcatcctggtgatgtcacctccagttgttaggaaggtgtcctggtgatg

SEQ ID NO: 241838 - DNA, 122 bp, Homo sapiens
gtcctccaacgtcgatcttggccctaagacgtccagtctgggcacggagttgttgagatccggcaggaagtccctgctccagggccaaaggccccacccgggctcccccggatgtccccgca

SEQ ID NO: 241839 - DNA, 122 bp, Homo sapiens
aatattagtgacagagcagaagttagctgctgcttcttacacattcatctatgtgcatggcgataaggcttgacagctttgcactgataagaaaacaggggcaatgctccttgaatggtttc

SEQ ID NO: 241840 - DNA, 122 bp, Homo sapiens
ccgctgggactcagcggcaccagcatcatcgaccatactgggaccagcagccgcggagcgcgctcgaggcggctttcgcaagacctcttccagacccaggcgcgaagctcgggctctctttt

SEQ ID NO: 241841 - DNA, 122 bp, Homo sapiens
tcgccggcccaccgggactcagattctccccagacgccaaggttgcgggtcatggagtcccgaaccctcctcctgctgttctcgggagccgtggccctgatccagacctgggcaggtgagtg

SEQ ID NO: 241842 - DNA, 122 bp, Homo sapiens
gcgtgcggcacccagcagccaccgcgcggcagggcccccggcgtgacgtcatttccgcgtcgtccggtttggccttcagcgcccaatcccaaaacgcgaagcgtagtcccaccctcgactga

SEQ ID NO: 241843 - DNA, 122 bp, Homo sapiens
attcccaggtctttttcctccctttcacgaggatgaagcctctgaagtgtcccccgctgccgcacgcccctcggcctggaggagggatcatctccacaccgtgggcctccggcgagggctct

SEQ ID NO: 241844 - DNA, 122 bp, Homo sapiens
ccaggtcctccctggcatggtggctgtgactgtgactgaatgagcaagcccaggcaccttcggcttgctgggcacagcctggctcacctgcctgtccaagtcggccaaagtccagcctttga

SEQ ID NO: 241845 - DNA, 122 bp, Homo sapiens
gagatacttctacctttagaaatgcctaaagtatacagttgatggtgtagccaccagcaccgactagtggtgaaaataaaagcacaaaaatgcaaagtgcaaacggccgttgaatgaaatat

SEQ ID NO: 241846 - DNA, 122 bp, Homo sapiens
gccgtggaaccaagcctcctgttcccaggtgggcacccgtgggtaacgggtaagccctagcggttactagcaggggactggatgagatgggcaccacccagtgtacatagctcagcctgagt

SEQ ID NO: 241847 - DNA, 122 bp, Homo sapiens
gtgttccctcagggccaggctgagctgtgctctggtggcggtgaggtcttggagaccatgcggtggggctctctgctgggccgcatagcatccacttgtccctctgtctcagccaccacctg

SEQ ID NO: 241848 - DNA, 122 bp, Homo sapiens
acttcccggaccagagaaggggggctcccgagccccgcccccggccgccccgaaccgccccgcccgtctcgaatcgcccagcccacaaagtgagccccgcccccgccacccaatttgggagc

SEQ ID NO: 241849 - DNA, 122 bp, Homo sapiens
tacgctcacacctgcggcaggtgacgtagcagcaccagtggtacttacagtggcaccgctcgaccacgcggtctgtgtaggggttgtagccacgcccgcagcacataaggtcgcagctgtcg

SEQ ID NO: 241850 - DNA, 122 bp, Homo sapiens
ttaattaaaaagctaatcaatctgttgcctttttccaagaggttaggcctagtccagggacggctctggtactgatggagtttgtgtatgatcactaactcattagacatgatgcttgtatt

SEQ ID NO: 241851 - DNA, 122 bp, Homo sapiens
ttgtgttagagaagtgcctgggctgcctgacagagccagtgcaaatcctcttcaaagggacgtgcccttaaccccatccttagagaatttcacagatcaaacaatgtgaaagtacaaaagag

SEQ ID NO: 241852 - DNA, 122 bp, Homo sapiens
cttctctctcagaagcagctcctgacctcccttgagggctctgtggctccagtccctaagcgtgcagaaggccacctcttcctgtgccttttgaccccagggtcaaggtcaagcccctgaat

SEQ ID NO: 241853 - DNA, 122 bp, Homo sapiens
aagtgctgggtagagaaaggcgggtacctaactagggctccaccctcgggcctgtgcctacggacctacatgaggacaggcactcctgccttctcactcaaatgggtctgtgcctataaaaa

SEQ ID NO: 241854 - DNA, 122 bp, Homo sapiens
ggtggggccgggggcggggcgggggtggggccgagaatcgagcggtcccggagatggccgcgatccgggtgggcttgccggttgcgctaggcaaactggaggagggttctatttattatgaa

SEQ ID NO: 241855 - DNA, 122 bp, Homo sapiens
gaaggggagggcagccgtggcgtggagggccttgcgcacccaggtggtgatgagggcgggcggggcgcggggaacgtgcagccagagaccgtgctaagaccccgaagtcgagccctgggcag

SEQ ID NO: 241856 - DNA, 122 bp, Homo sapiens
gagggctctccatctgtgcagactccattaacactgggtgcttgtgtggatggtggtggccgtggctgggttctgggatgaccaaaggcaacacagaatcattagtccctgggtggcctggg

SEQ ID NO: 241857 - DNA, 122 bp, Homo sapiens
gttgctgttacagggggcgggaaccaattggagaccggggccctgcctggcgtccgccttcggcagggctctggagagtgtcccatgcccactcacctgggctccccagtcttcgtggcccc

SEQ ID NO: 241858 - DNA, 122 bp, Homo sapiens
tacccccaggtaatcttagcagtggcaaagattaccagacacttagaaacgacgggattccgacctctgcttgcctgccagtctttccagtagaactcagttttcaagttaaccattcatga

SEQ ID NO: 241859 - DNA, 122 bp, Homo sapiens
catacaggtgggtgacacaagccaggaaacaatctcagcaagctgggtgggaccgtccaccgccagcagcatgtgttggggccaggcaggcaagtggcagtgtccactccagcgttctttcc

SEQ ID NO: 241860 - DNA, 122 bp, Homo sapiens
tagatgttttgaatgacttccagagagagttggattccacaggcagatggagctattatccgtgtttttttctccccagtgacaggctgcaagcctgtaattccagtgactagcagccctca

SEQ ID NO: 241861 - DNA, 122 bp, Homo sapiens
actgctgcgttcgctttctcaagcgtacctggggcccctgcttgctctgcaggagtcctgcggcctgtgccatccgcacgattccctggcagcgagaaatctaggtcctcccctgaccacct

SEQ ID NO: 241862 - DNA, 122 bp, Homo sapiens
cgaccagaaatcgcaagcggaggagacgcagtagcgcaggctgagcgctaactgaaggcgcgacctgagcccggcgcctgctggggagctgcgcagccaggacagcggtcggcagcacaggg

SEQ ID NO: 241863 - DNA, 122 bp, Homo sapiens
gtgaagtgcgacacctcgccatggggccaggaggaacttgtacttggtctggggcaggaacgccacagagggcttccccaggtccaggccgggccagccttgacctctaaagtcacagcagg

SEQ ID NO: 241864 - DNA, 122 bp, Homo sapiens
aaagccccgggcttgaccttagtggaaagccgagactgcgtccaggttgctggactacaccgggggcacggtcagaggtctttaggggagggcggcggtctgagagtcctgggtgccgacct

SEQ ID NO: 241865 - DNA, 122 bp, Homo sapiens
atgtgccaggaactgggtcaaataccatacatacattgtcccttttaattctcacaaccacgattgttggggtagaaattatttgcctattttacatatgaggaaactgagggttttagaga

SEQ ID NO: 241866 - DNA, 122 bp, Homo sapiens
tctcccctgccccatgacaatcgacacccaatacattgttatccaacagaatatgacaatcgccacactcaaaggccctacgaacacattcatgctggtgatggctgctaggagtcaacaga

SEQ ID NO: 241867 - DNA, 122 bp, Homo sapiens
ccaaccggccagtgcactggggtggagcctcaggaaatgtgtgccctttgcagcaaagagcgtggttcctcctcttcctgggtgtaaactgcgattcaaaaagccaggtgggaagccctgta

SEQ ID NO: 241868 - DNA, 122 bp, Homo sapiens
attcatgaacatttaccagattctccaaagggcgtgggttgccaaatgcttaggaacttccgctttcagtgtttagcaggttagcggggaaatattagtcccattatttaagctgagatttg

SEQ ID NO: 241869 - DNA, 122 bp, Homo sapiens
ttgggagaagactgagatttctgggatccggcttggggtgtttccgctgggtgggggcgccggtttgcgaagagctttcctcggacagctactgctgatttttgtcgctcagccagccaagt

SEQ ID NO: 241870 - DNA, 122 bp, Homo sapiens
caggcgagccattaccctggtttagggttagtgcctcacctaggagttgtgaacagtgtgcgtattttctaaaaatcaagtaagcaagttaaaaattgctcaaaatctaaattttacaatga

SEQ ID NO: 241871 - DNA, 122 bp, Homo sapiens
gcctctgtaagcaaatcgactctgtaagcaaaaggaagaagctctatctattataatatccggggatggtaaggccaacttagagccaccgtagactaggacaaggaatgaatggtgttcca

SEQ ID NO: 241872 - DNA, 122 bp, Homo sapiens
taaaagtgagaagcaagagaaaagtccaagttgtggaatcaagttgtgttgcactggagccgggagaattcaggctcttggcatataaagaaggagttaatacaacacacccaggcaccggg

SEQ ID NO: 241873 - DNA, 122 bp, Homo sapiens
tttattcattaccatttaagcaagaagagatcttgtgtgtttaaagagagaaaagtttagcgtgctccattctcaatggcactgcaaagggcccaaactgaaagaaaatgctgaaaggggaa

SEQ ID NO: 241874 - DNA, 122 bp, Homo sapiens
attctgaggtgtcacaagcaatgaagctatgcaaacaataggagggtgtgacaggggaaccgtagactttatatatgtaattactgttattataatactattgttatattaaatgtatttac

SEQ ID NO: 241875 - DNA, 122 bp, Homo sapiens
tcgcagggaggacagggagagacctctgcgtggatgagctccccggcaggggacagcagccggacgcctgggtcacgggcagtggcgtgcgcttgctcctctcccggctgccaaggaggctg

SEQ ID NO: 241876 - DNA, 122 bp, Homo sapiens
ggtcgctcgagtccgtgagcgaggaaggttaacagggccttctgcccaaggtcaaggcaccgaagtcgggagagcctgaagacccagacctcatggctgggggcacctcgcagctggcgggc

SEQ ID NO: 241877 - DNA, 122 bp, Homo sapiens
tcagaatgacagtcgggggtagagacattgattttcttgtagataccggtgctgaacatacgctagtaaccgccccggtcgcccccttatccagaaagactcttgacatcaccggagccacg

SEQ ID NO: 241878 - DNA, 122 bp, Homo sapiens
tagcttgggtccaccatgcagaacaccaatattaacacgctgcctggtctgtctggatcccgaggtatggcagaggtgcaagacctagtcccctttcctctaactcactgcctaggaggctg

SEQ ID NO: 241879 - DNA, 122 bp, Homo sapiens
taacctgagattttcccaaggtaaaatccaaatagagacctgatgtgccactggctcggccgtgcatgctagaatcaccagccagagatgaggatgaaccgcgtgccttcaggacagggcgg

SEQ ID NO: 241880 - DNA, 122 bp, Homo sapiens
ggggtgacggaatgctctgtgcggggatcgcaggcccccgagctgcagggggcagcaaagcgcgcccacctgcccgcctgcccgaggagaacaccgcagctctgctaatcgagggacagccg

SEQ ID NO: 241881 - DNA, 122 bp, Homo sapiens
agcaagcaatagaagcaagaaagatgtgttttttcctttctcgaattttgcattgtcactcggtgaaggggaagggagccttttaccttctgcctcaatggaagacaggagcagggccgcgc

SEQ ID NO: 241882 - DNA, 122 bp, Homo sapiens
cccgactcccgggccgcccccgtctcgcgccctgcctccctccttcggccttcacctacccgcctccggattggccgctaggaatcccgcccctctaaagccctgcctgctattggtcacgg

SEQ ID NO: 241883 - DNA, 122 bp, Homo sapiens
gggtgacttctcatccattggccacctggtgcccctctctccctggatttatacacaaggcgcctgcctgggatcgcctgggtggagtctttcttgtcgcttccccttttctccctctagga

SEQ ID NO: 241884 - DNA, 122 bp, Homo sapiens
gaggcagggggattccgcccctttggaaggtggccgagaccctcagccactaaaggacttcgtcgagacaggagagcccgcagagatcgttctcttctggataaccagattattccacaatc

SEQ ID NO: 241885 - DNA, 122 bp, Homo sapiens
cctttgtggttccccgccccactggcttgtgtcagcactgacaacacagacagtagcagccgctaaggaggaagaacatccacagaaacaggggcctgaatttaccggcacttcacttacag

SEQ ID NO: 241886 - DNA, 122 bp, Homo sapiens
ttcacccactcaacagaaatctgctgagagcctactacgtgctgggaactattttcacatcggagacaaaacagagggtgacatgaagagcacggcccacttggagcctacggagatggcgt

SEQ ID NO: 241887 - DNA, 122 bp, Homo sapiens
cagaggctcagccagccacggcgctcccagcgtggagggcgaggggcatccgggagcggccgggagggctcggtcacccctcaagctgtcaccccagtcccacaaccagcaccccgatccta

SEQ ID NO: 241888 - DNA, 122 bp, Homo sapiens
cctggcggccgggggtcctctcttccatagtggccaagttcgccatccgtcggcgggcagcggccttgctgtttgtaaagcttagcgtggcacaggcccgaatggacccttagagtacctgc

SEQ ID NO: 241889 - DNA, 122 bp, Homo sapiens
aggtgaagcagtcacaggatagggtgggatcttgtgggaacctagcagtaggaattggcgcgagcagctcggtcaccggccctactgtctcagagggcggacccagctcgggctggtagtgg

SEQ ID NO: 241890 - DNA, 122 bp, Homo sapiens
gtcagagtcggggctgagaccagtcctggccagggtgttaacaggatggtctccggagatcgggattctcggagggtcgaccaccaggaagaaacctcaggagcaagaaagctcaggcagat

SEQ ID NO: 241891 - DNA, 122 bp, Homo sapiens
agaccgcccagagcgctgaaagtaactcggccgccagggtcacaacaaacttgctggcagcggcggcactagaactacagagctgtgactgctcgttggaggtgttctagcatctgaaacaa

SEQ ID NO: 241892 - DNA, 122 bp, Homo sapiens
gaataccagaggaatcaagccactcagaatatgcttatagggacaaagtctcccacatcccgtcccctggatccccctacagccccctgctgtccatcgcggcctcaacccctgcagatggc

SEQ ID NO: 241893 - DNA, 122 bp, Homo sapiens
tgggaagcctctaaaaatactgatgccagggctctaccccaagccagttaaaatctccagcgctggacctgggcattggtactttttgtaaagctttcaggtgagtcagagttgaggaccac

SEQ ID NO: 241894 - DNA, 122 bp, Homo sapiens
cagccaggcccggcgaggccgcggcgggtccggcgccccggacctccggacccggaggtccggcgccctggttggcgccctgcccccaaagtccgtcctccccgttaggtggcgcccaaggg

SEQ ID NO: 241895 - DNA, 122 bp, Homo sapiens
gtgccaggtggtgttcttccgcgtgaaggagatcctgcactgccactccatgttccagatcgccctgtcctcccgcgtggctgagtgggattccaccgagaagatcggggacctcttcgtgg

SEQ ID NO: 241896 - DNA, 122 bp, Homo sapiens
tgtatttacaatctataggattgtagattgggaaaaaagtctttatctgatcaactcaaccgtcctatattaggactagggctttgctgctataacataatcatggtggaatgtatctcctt

SEQ ID NO: 241897 - DNA, 122 bp, Homo sapiens
ccaggaatagccgtgtctgcgttggcgtcttaccatccaccataggggctggtgatgtgacgaacatccaggagccatagacagcagattacacggctccaagaagtcagcggctggcggat

SEQ ID NO: 241898 - DNA, 122 bp, Homo sapiens
aaaatccaccgcaggagaccaagcaggatgactacaaatcgacctttgaacccggtcatacgggtgtcactgcgagccttaacagaagcactttttagtggattagttgggagaataactta

SEQ ID NO: 241899 - DNA, 122 bp, Homo sapiens
gcaacggaaggaactcacatccactggccgcattccgctccccggaacggaggacagagccgagtttcttcaggcagtggctccggccaactctgccccacaggtaaggagcgcgcagctgc

SEQ ID NO: 241900 - DNA, 122 bp, Homo sapiens
tgccgccgcgatctgcttgggttcgtttccacagcgtggagtaaattttgctgcggctcacgctttgggtctgccacgtctttaagagcggtaacactcaccgcggaggtctgcagcttccc

SEQ ID NO: 241901 - DNA, 122 bp, Homo sapiens
cgggctgtggggccaccgtttcatctgctcaccttgctggtaaggccagggctttgttcccgggagtgctcgggccgcaggtgtgtgtgtccgggaggctcctgccgggcagggcagggaga

SEQ ID NO: 241902 - DNA, 122 bp, Homo sapiens
ggagaggaaaggaggccccaccttggcggtacatgcgcatggcatcgagcaggcgggagccgcggagctgggtgcggagcaggggcacgtcgagctgcaggagcccagcctcgcagtggtct

SEQ ID NO: 241903 - DNA, 122 bp, Homo sapiens
gctctttaaaagggacctaaaggtcaactggagtccctggtgatcagccccttctgcactcggatctattccgcaagcctacgcgcccatattcactgggccccacctgcctagcggacggg

SEQ ID NO: 241904 - DNA, 122 bp, Homo sapiens
gctgtctctaggctccccatattcctccaccctgaagtttcaaggagtccctctactccccgtctcagttcacctgcagacctgcactgtctataatttttcagagtcacgtaggagaattt

SEQ ID NO: 241905 - DNA, 122 bp, Homo sapiens
gagcttatgcttggcactcccaagagtccctgctgttttagccaattcaaagaaacttgccgcaactcccctccctttcccttcatcccattattcaaataattcaattcctatttccgtcc

SEQ ID NO: 241906 - DNA, 122 bp, Homo sapiens
ggagccaacacttttttccctaactctgtttaggcggtgttggactaagaaaacagcatccggtgcgtcccgggaccacaaggtggccgtgcaccgtcgaggttactaaacactgtctcctt

SEQ ID NO: 241907 - DNA, 122 bp, Homo sapiens
attcccttacatagagcaggtttgaaacactatttctgtagtatctggacatggacatttcgagcgatttcaggcctatgttgaaaacggaaatatcttcccataaatactagacagaagca

SEQ ID NO: 241908 - DNA, 122 bp, Homo sapiens
catctaggccccgggctggtgggagatggggcccttcccttgtagctcaggcaggagtcccgcagtgagctgcactggctcttgattggccggcttgagtgctgagcccacccctcagccag

SEQ ID NO: 241909 - DNA, 122 bp, Homo sapiens
gagagctagctggcttacacattttaaggcaatgtggtatgaaaagtgttgaagttgaggcgagttttgcagatcaagatactatggaagaatacctacgaagtgttatacagggaaaaggt

SEQ ID NO: 241910 - DNA, 122 bp, Homo sapiens
gcgaaagaacaaagcttccacagtgtcgaaggggacccgagcgggttgccactgctggctcgggcagctgcttttattctcttatccggccccaccccagtcctgctgattggtagagccga

SEQ ID NO: 241911 - DNA, 122 bp, Homo sapiens
ctcgagtccccccacccctccccacccaccaccgctcccgcgggaagccagcccgtgcaacggaagccaggccaactgccccgcgtcttcagctgtttcgcatccaccgccaccccactgag

SEQ ID NO: 241912 - DNA, 122 bp, Homo sapiens
agctcgcagcgcaggccccaggccacagccttagatgaccttctgtttgctctcgggacacgcagacgggccggagcgttggctgtgtccgcaccctagatcatctggttccgcttcttcat

SEQ ID NO: 241913 - DNA, 122 bp, Homo sapiens
tcgcttttgaccacaggtgaccatggcactaggaagccctggggaaggtgctgctgtggccgagggggagctgccaggttgtggaaatgtaaaccccggctgcgctggtcagacctggactt

SEQ ID NO: 241914 - DNA, 122 bp, Homo sapiens
cgcgcgccggagcatgagtcccggccggagccccacggccgcgggcggcgcctaggacggcgatccgcgccctggaggatccgccggccgcccggctccactacagctccagccgcctgcag

SEQ ID NO: 241915 - DNA, 122 bp, Homo sapiens
gcgctccttcgccacgccgccgcgcagcccctccatcttcctgctcggcaccgggccccgcgcgcccctgcctacggggtcccgctgctctccggggctcctgccagccccaacccccggcc

SEQ ID NO: 241916 - DNA, 122 bp, Homo sapiens
gacggtggagtggagtgaggttgaacagcaggtttggcgtttggtgggtctggtatctagcggcggtctgttagccttttaggggggattcacggacacctctagcgccctgtagggttgcc

SEQ ID NO: 241917 - DNA, 122 bp, Homo sapiens
gaaaggaagaaaaggactgagaaaacgcaggagccctggcttgccggtgagcagagccggcgcagccacagcgcggagccgcggcgcccactggtcctcggagctgccaatcggcgtgtaat

SEQ ID NO: 241918 - DNA, 122 bp, Homo sapiens
atgtggttaataggggatgacctccatctaactggctcagctactccagggaaatgaagccgactgcgtgaactggaaggaaagacgccgcacaaaatatccgtccccaggtgctactgaca

SEQ ID NO: 241919 - DNA, 122 bp, Homo sapiens
gcacgctgtcccctctcactgggttgctattaaaaatgggcgctgaatataaaaattaaccgggcgtggtggtgcatgtctgtaagtcccagctactccggaggctgaggtgggagaatagt

SEQ ID NO: 241920 - DNA, 122 bp, Homo sapiens
ctcaggtgatccacccgcctcagtctcccaaagtgctgggattacaggcatgagccactgcgcccagcctggcttatcttgtcttaagcaagccaagctctttcgtggcctcaggacctttg

SEQ ID NO: 241921 - DNA, 122 bp, Homo sapiens
gccactcactttgtaggaaactcatctccttcctgaggagccgggaggctggaccagtcccgtcgtgcagtcaggtgggcggtgtgtctttccagaaggtcacgtggaaatgtctcgggact

SEQ ID NO: 241922 - DNA, 122 bp, Homo sapiens
tctggcatggccatggctgggccttccgcctcacccgctctgggagggagccctggcctgcgctggaacactcggcctcctccgtgagggggtttgtgctcggacaacatgaaggcagacgg

SEQ ID NO: 241923 - DNA, 122 bp, Homo sapiens
ggcgtctccaggcacctgcttgctcttcgtctcctgagggcacggggcgtctttctcccccgattcctccagctgcccgggctcctcctgcctgtcagctcctgacctccgtgatggtggct

SEQ ID NO: 241924 - DNA, 122 bp, Homo sapiens
tccgggactttgcttcttgaaatcccatccagctgtgtctaaaagtcctgtggtttctatcgccctactttttcagagcaacttatccctgcagacggtgtggctatttctgggtcaggtgt

SEQ ID NO: 241925 - DNA, 122 bp, Homo sapiens
tttaagcgcagagggccgcgggtcacgtggtgggcggggtgggggcgtggcaccaggaagcggcgtccgcgccgggcccagagccgcagccgcagccgccgctacagtccgggccgggctcc

SEQ ID NO: 241926 - DNA, 122 bp, Homo sapiens
agctccggacatccgtccccacctttccgctaagcgcggcgcccgcggggcctgcctcggcggtcaggtcagcggcctccagcctcactctccggccccagcccgcagccgccgccgagcgg

SEQ ID NO: 241927 - DNA, 122 bp, Homo sapiens
cagcactgtcgggaaactgcattgtctgcccagcagaagcgtagcaacagtcagcaacgccgcctgccagttctaacacagcgggtccacattctccagcctccgcaacaccttccccttta

SEQ ID NO: 241928 - DNA, 122 bp, Homo sapiens
ctggggaactgggggcgcctgcagggcgcagagaggcgaaggcaccggtgtcagggagaacgcatccgttaccgcccgcctcccgcaggtctgcgtcaaactagatcctggcttctgggttc

SEQ ID NO: 241929 - DNA, 122 bp, Homo sapiens
tgggacagagatcactggtcaccactctgtcagcatcattagcagctagggaggagttcccgattcacacgctctgccctgatttttttctttctttcattttctttttttctcttggttgg

SEQ ID NO: 241930 - DNA, 122 bp, Homo sapiens
gagatgtggggagcacctctgccctgccgccccgtctgggatgtgaggagcgtctctgcccggccgccccgtctgagaggtgaggagaccctctgcctggcaaccaccccgtctgagaagtg

SEQ ID NO: 241931 - DNA, 122 bp, Homo sapiens
acatatcaatttttgtttcctagagtagtgaccaagtttctgactatccattaaatcaaccgtagagaatacccgcagttctttttcaaaatgtgatgctaacaagctaatctcagtagtca

SEQ ID NO: 241932 - DNA, 122 bp, Homo sapiens
ccaggcgggccgggcgctgccctggcagcctccgtccgctgtggactccgaagcccctctcgctgtgtctgagagaggccctgcctggagtttctgtctgcactgggcactggaggctgtcc

SEQ ID NO: 241933 - DNA, 122 bp, Homo sapiens
attcgttcatcctagagagtataccaataccactcacaaaacttgagggtgcctgcttcccgacattcctgctagcagtgtcatcaacctttgtgatctttgttaacatatgaaaagtggta

SEQ ID NO: 241934 - DNA, 122 bp, Homo sapiens
ttggctgaacagaagtcccgaagctggcactgctcacctgaggcagaggacagagggagccgtttctagcattgtacgaattctagcccatctgaggttacccagtgctcactctggattat

SEQ ID NO: 241935 - DNA, 122 bp, Homo sapiens
gccgaggcccagggcgcctgaggggcgcagaggtgtcagcgtgcaaccgccgccccccagcgttcccgccaccaccgccaccaccctcaaagcccgggcgcgcggaccccacgccgcgcaca

SEQ ID NO: 241936 - DNA, 122 bp, Homo sapiens
acagtacatgaatgaatgaatgtggctctgttccaataaaactttatttaaagaaatggacggtgggctggatttgacccggggcaatagttttttgatccctggtctagatgattatcaac

SEQ ID NO: 241937 - DNA, 122 bp, Homo sapiens
aaggcttctgcattgaaattgttcaagaattgggttccaatttcccaggagcacggaaagcgttgccaggaaagcggagttgctggcgatttatgtcggtttttctgacataacgaagattt

SEQ ID NO: 241938 - DNA, 122 bp, Homo sapiens
ctttcatcttggtacagagcacttgagggtgggcgatttcctggggggagtggcttaagccgcttccccaccggccagttggctgtagacggtccatgctcaatggtcctctacagatatga

SEQ ID NO: 241939 - DNA, 122 bp, Homo sapiens
acctggtggcttgttgcaacattacaaattagctcctcaaagactggaactgtgtcttgtcgatatgtgaacctcagctagacacttagtagctgcttggtcaacgacagccgaacaaaaat

SEQ ID NO: 241940 - DNA, 122 bp, Homo sapiens
cggcagcctctacaggcccagctcctgccttgcagtggcctctttaggccaagctcatgccgcatggcgacttttccaggcacagcttttgccttttgcagcctgtccaggcccagaatgtc

SEQ ID NO: 241941 - DNA, 122 bp, Homo sapiens
tcagaaaagctcttcctctaagaccccactgtcctctgcaggatggagccacaaggtgctcgccgaccggttgccgggcaacacgggctgggggcggggtcggagaggggacgggatcccag

SEQ ID NO: 241942 - DNA, 122 bp, Homo sapiens
ggagggctcagcatgaggtgcccaagaggccctgaaacccatttccatgacattttcccacgagctggagcataaacccccaccgaataactgaagggaagcggaaggcgcagaaacgcgga

SEQ ID NO: 241943 - DNA, 122 bp, Homo sapiens
cgcaggctccacccacggctcagctttgagcctccctgggcggaatccgcggttcctcggcgctcattggttatcagaaatttagaaccactccacttgggagacaaagggctatttcgctg

SEQ ID NO: 241944 - DNA, 122 bp, Homo sapiens
tcaatagaactacatagggacaacagcaaatacaaatctttaaacacttcatgatgtggccggaatgagtacaagtatgcaattcaatgattccaacatttgatggtgactgtgaattatta

SEQ ID NO: 241945 - DNA, 122 bp, Homo sapiens
ccgcccccggaatgctgccgaggacccagcccggtaggacagggcagcgggacttgtctccgattctacggcctcctctccgcggagggacccggacggggcagctgcagttcccgcgcagg

SEQ ID NO: 241946 - DNA, 122 bp, Homo sapiens
acactcaaactccaggggaaccgttcattgggcttggacacgaaggcgggaccctgccgacgcagtgattggatgcatgtccggccagcgcggtgattgggtacaggtctcgggagcgcggt

SEQ ID NO: 241947 - DNA, 122 bp, Homo sapiens
ctctccttacttttgtgtggtcatctaagtctctttgtaggtgtgtaacaacttgttttacgaatctgagtgctccagtgttagggatgtgtgtgtgtgtgtatatatatatatatgtagaa

SEQ ID NO: 241948 - DNA, 122 bp, Homo sapiens
tatgatgaggaaacaagtttgcccagctgcaggggtggccgagtcaggatgactctagcccgtgtcctggacaccagaccctgcccaggtccagccggggctggtctcagccttcctgggct

SEQ ID NO: 241949 - DNA, 122 bp, Homo sapiens
gtactaatgtataaccgtgcttgaaacaggtatttgaacatccagaatcatgcagtatatcggtttgtgtatttctgataacgctgttaaattctttgagagtgtgttcgaggggggtgctg

SEQ ID NO: 241950 - DNA, 122 bp, Homo sapiens
acggctatggtgccagcgtgtgaaaggcgaggtgcggggggcgcgggggctggggctccccgccatccttcagccgggaccacggccaagccccgaggctccaggaaacgacagagctgggg

SEQ ID NO: 241951 - DNA, 122 bp, Homo sapiens
gccggggcttcctccacaccgcgcctgcgccgatgacaacccgcctctacaggacgcctgcgcaacgccatagtcacctcatcagctccgtgcacttacgagtctctctctgatcgaccacg

SEQ ID NO: 241952 - DNA, 122 bp, Homo sapiens
gcatgaattcaatgttagtagttattattatcatgtattgagtgcttactaggtgccagacgttgtgctaagtactatgtgttgtttaattttcaccacagtcttttgagatagagactatt

SEQ ID NO: 241953 - DNA, 122 bp, Homo sapiens
atggaaaccccaacacctttgccgcctgtacccgcctccccgacctgcaacccagccccacggacaatccagatcgagttcccacagcatagctcgtctctgctggaatctctgaaccgcca

SEQ ID NO: 241954 - DNA, 122 bp, Homo sapiens
agcgttgcttaacaacgacagcaagtgctacttccaaagccaagaaacactcctttacgtcgggtagtcttctgtcccaattcagccttctacaaggtgaagccaaaaatacttggctccca

SEQ ID NO: 241955 - DNA, 122 bp, Homo sapiens
cgcccgtgcactcagcacagctctcccctcctctccgctgctgaccacagccctgctccccgccagcaggtgccccagccccatcagctggctctgagcccagcccctgtccctcccctgtc

SEQ ID NO: 241956 - DNA, 122 bp, Homo sapiens
gaaactgcagagagctttggtgagtcaaggaactttcaattctgttttgctcagagcttccgtgtcggcatgagcctgtcatgaaaatcaagaaatagtcagacctgcacgtcagggtggtg

SEQ ID NO: 241957 - DNA, 122 bp, Homo sapiens
cacacaactcttccattatgcatgagggagacccagcggtgagcgagtgagcaagccggccgagggaggggtgagtggttattaataaacaagtgtattgtgtggcgttccattcacggcac

SEQ ID NO: 241958 - DNA, 122 bp, Homo sapiens
aaaactccgcaatcaaacagtaactgacctcacgtagttcttacagcataaatgcattcacgtggcccgaaaagtaagaatttttattgcagtacacaaaggtgtctctcaatgcagcaagc

SEQ ID NO: 241959 - DNA, 122 bp, Homo sapiens
cctctcattaaggtccccccacgggcagagggaagacgggcaccgggtccccttcgtgttcgatgtgcaccccagcaaggcctccttagctcatccggattggtaggggtggaggaggcttg

SEQ ID NO: 241960 - DNA, 122 bp, Homo sapiens
cactgatcttacctctaggtattcccgagagagagcgcctcctccgtcactgtggatctgcgtagcccgcatcactgatgtcacctctaggtactcctgagaacgtctcctccatcactgtg

SEQ ID NO: 241961 - DNA, 122 bp, Homo sapiens
accgagccaaagtttctctcgctgttgtttttccaggcctgcctctgggacaggctcctccgagaggggccgggctcgacccagggcgggaagggagccagacagctggggcgccgcggacg

SEQ ID NO: 241962 - DNA, 122 bp, Homo sapiens
tttacatttacattatttcaaatggtacaggattgcctgtcttttggtaaccaatcctgtcgtgaagagatgctgggaagtaaagtcaactgtatggcaggccccagctccagggccagcca

SEQ ID NO: 241963 - DNA, 122 bp, Homo sapiens
aagccacccctgctattgcagcagcctgggctatgagccagctttatgggccccaccctccgctggccagagttccagagcctaccatgaccctgccacgaggagggagccacagagggctg

SEQ ID NO: 241964 - DNA, 122 bp, Homo sapiens
cactagctcagcgccaggggcctgacctggccatgggagcccctgccaggggaggcatcccgctgtcgctgccggggcagggcctgagccatcttgttgaccacgagctctacgatgagctg

SEQ ID NO: 241965 - DNA, 122 bp, Homo sapiens
aggccggaccccgggctccagaggctgctgtgagggaaccctgctccccactctgcccaacggcccagcccaagccccaggcctcaggtaatcggattaagcagcctgccttggctctcagc

SEQ ID NO: 241966 - DNA, 122 bp, Homo sapiens
tctggagcggtttctctagggaaggcaggcgggccggcgggcggggcgcacttgcggtgtcggcacaggtgactaattgctcggtagacctgaagccaaagaagaagtgctggtcgcagcag

SEQ ID NO: 241967 - DNA, 122 bp, Homo sapiens
caattatatctcagtaaagctgttaccaaaaaaaataaatgaaccgaagctccactgcaccgtgacttctgcatgttgggctccagttccctgtttacaattgtacacttcgggattttgtg

SEQ ID NO: 241968 - DNA, 122 bp, Homo sapiens
accgtctttccctggcagggaaatagtcaggaatgaggagtttgggagagtgagaacaagcgggccagttcccaagtaagagaaatccagaggggaggagcctgaaggccagtagaattgcc

SEQ ID NO: 241969 - DNA, 122 bp, Homo sapiens
cctgacacccctgcagtcacggtgtttgaatggcagctgatgctggcccacccagagtatcggtgcatctctcctaaagccacagttcagcactgcatgttgaccaggcggatatcctataa

SEQ ID NO: 241970 - DNA, 122 bp, Homo sapiens
gaccagcccagtcaacagggcgaaaccgtgtctcctccaaatatacaaaaaccagtcaggcgtggcggcgcgtgcccgcaatcccaggcactcggcaggccaaggcaggagaaccaggggag

SEQ ID NO: 241971 - DNA, 122 bp, Homo sapiens
cctgcacgatctctttgtctggcttcagcaagttggcgattttgcgcaaggccacattgacgtctgcggtgggggttgaacggggagagagagagcgccagagagttggcagggaaactcag

SEQ ID NO: 241972 - DNA, 122 bp, Homo sapiens
ttaaaagccttcaatagccgtggctttttgcattcagaaaaacctccaagtttgtcaattcgtgaaggttatttccggtctgaacctgatctcccactagtcttttgcctacgcaccctcaa

SEQ ID NO: 241973 - DNA, 122 bp, Homo sapiens
ggacagataatcttttccacaaatgatactgaaaagacaggacatctatagattcccccccgccaaaaataacccttacataaaaattaagtggctagatataactgtgacgagtaaaatta

SEQ ID NO: 241974 - DNA, 122 bp, Homo sapiens
tttatggctatttgtgggatgaggaatttgccagtttaatggagacttttaaaaataaatcgcttttgaaagattaggttgaaatgtaatcagtgtagtgtctcatcagtcattactgaact

SEQ ID NO: 241975 - DNA, 122 bp, Homo sapiens
tgcgctcctgacataccatgagaatgcggcactgacgggcaagtgacttctgcaagcctgcggctggtcccaatgccctgaatcacctctctcatggaagaaccaattaacaccaatgaatc

SEQ ID NO: 241976 - DNA, 122 bp, Homo sapiens
caggtgctcgcagcaggcaccaaagcgcctttgcgaacgcttagggctgtttcaggaaaccgctcagtagcaaaggcagaagatgccaagacaccttcaaaaagcaggaattaactttccac

SEQ ID NO: 241977 - DNA, 122 bp, Homo sapiens
cgtgggaactgtccaatcaggagcgcagcttgagaggcggagggggtttccgggatctggcggggcctttgtcttgtgctccagctggagctttggtcccgtattctcggctatttatcccc

SEQ ID NO: 241978 - DNA, 122 bp, Homo sapiens
cctgcggttaaggtagccgcgccaactacggacacccggtcgggtcaataagtacctgcgcggccaaagtgcctagcatggtgacaggaggagccgggccattcgaatcacctctccttcca

SEQ ID NO: 241979 - DNA, 122 bp, Homo sapiens
cagggctcgggagatgtgcgctgtgacggaggtgggaaagtgccgtcacaaatggagcatcgtctgtggccaggcttcttgctggtttctggttctaacttgatgaccactgggcagtgaac

SEQ ID NO: 241980 - DNA, 122 bp, Homo sapiens
gcgcaggagcctcgggtgggggaagcagcgtcgggccggggcagggcagcgagcaggcgccgctgaccactcggctccctttcagatcgaagacctgcaggtgaagctgcagcacgcggagg

SEQ ID NO: 241981 - DNA, 122 bp, Homo sapiens
ggccagacaccaagacgggacgggcgtgtgggcgcctcccccgcgctggtcgcgagctcacgttacgcgctgggatctccaaagggcagcagagtcaactccaaatagaaaggatattgttc

SEQ ID NO: 241982 - DNA, 122 bp, Homo sapiens
ggcctcggcactatgggcggggcctgggcggggttatataagccagcggcgggcggaaggcggggcgtgggggtctgtggctgctgggctggcggggcgcaggccgcgggacccgagcccgg

SEQ ID NO: 241983 - DNA, 122 bp, Homo sapiens
gtatggagggaggcggtgccccgcgctgccccaccccggcgcgcggctcgaacctctgggcggcctgcgaccccggggacccagctggcttccaatacccgggaagccaggggtggggggaa

SEQ ID NO: 241984 - DNA, 122 bp, Homo sapiens
acaaaagacaggaaatggtggagggtaatgacaaaattcaaagtgcttttgtgaagcccacgttgtgataagatcagtttgggtcttaagatgagatgcctgtagcatatacaggtggggat

SEQ ID NO: 241985 - DNA, 122 bp, Homo sapiens
agtgaggggagcctcctgtgccccacatggtgccttccaagggcaggggtgatgtccctccgcagtagctcctgccttagcacctcccttacacaaaccccctgggagctctccaagggtga

SEQ ID NO: 241986 - DNA, 122 bp, Homo sapiens
tctgggcccacctctcctcctcctggcaaatgagccctctcacctccacttcaacaaaatcggtcccctgggacccgtgccttgaatctctcagcgagacgcctccttcaatgtacggctgc

SEQ ID NO: 241987 - DNA, 122 bp, Homo sapiens
tcattattaacctggacacatcacttaatgtttttactatcttaaaggtagttgctatagcgaataaatgcttaacataactgagctcttctcatctgtaaaagggactgttgtgaggttag

SEQ ID NO: 241988 - DNA, 122 bp, Homo sapiens
cgcttgaacctgggaggtggagtttgcagtgagccgagagcgccccactgcactctagctcgtgcgacagagcaagcaagactccatctcaaaaaaaaaagagagagagagagagaatattg

SEQ ID NO: 241989 - DNA, 122 bp, Homo sapiens
acagtgctgagtcccagtccggggtgaaggcaagttaccatggttctctggctattattgcgttcagcacatcagggaatggaaataagtgcgcacatgttctaaaaggccctttgggaaaa

SEQ ID NO: 241990 - DNA, 122 bp, Homo sapiens
gacccacgagggcaggttccacccgggcctggggtacgagcagcgctaccacagtggggacgtgcgcctcgacaccgtgggcagcgacgcctaccgcctctcagtgtcccgggctctgtctg

SEQ ID NO: 241991 - DNA, 122 bp, Homo sapiens
tttaaagtcaaatactaaatatgatgacttacatctgtacaaaaatctgaagtgcagtaccgatactaatgcggtgacatcagcaaggccaaacaggaagctgaggtatagcccccatcaca

SEQ ID NO: 241992 - DNA, 122 bp, Homo sapiens
gatgtggagggtgtggcatttgccatcgtgaggtcttgcttgctgttcccatggctctgccgaagggccgaggagtggccctccctgaccccagcctggtgggggcagaaatcccatggcag

SEQ ID NO: 241993 - DNA, 122 bp, Homo sapiens
agggatgactttctatgtggcctctctggctctggagctaatttggatgctgagtagccccgcaggtatttatatgtagcgtttggtatttttactgggtcctattcttctcccttggatca

SEQ ID NO: 241994 - DNA, 122 bp, Homo sapiens
gtggtatggccttggccccagaccactggtctggggcagaagcccacctgtcttgcagcccgtcctgcaaccagcccttttgaagagcagcttctgtgttcctcccctctctgagcagaact

SEQ ID NO: 241995 - DNA, 122 bp, Homo sapiens
tttgtttcaggtctttttctttatttgtttctagtgattcagttatctgcttggagaaaacgtgttaatcttttgttaggaaagagattccctagctttgtgcatagatggtggactaagga

SEQ ID NO: 241996 - DNA, 122 bp, Homo sapiens
ctcctttcctgctccctctccgctcctgctggcgagtggagaccggcacctaggtccagacgcggctgcgctgcctctcctagccatcgagacaggatgtgactccctcccctggccactga

SEQ ID NO: 241997 - DNA, 122 bp, Homo sapiens
aaatttcctcaaaatgtgtttcaccagcaccagggtatcttgggaggctcattaagaatgcgaatccccaagcccaccacagatttactcaactaaatcttcacaagccagcccaataagat

SEQ ID NO: 241998 - DNA, 122 bp, Homo sapiens
tcctgactccagagcccagatgctggaatgcctctcatgtgagggagtggtctatggaaacggcctggcagacccgcgtttgtttaattgagacagaatggagggtgaagagctcgaattag

SEQ ID NO: 241999 - DNA, 122 bp, Homo sapiens
gcctacaaggaaccgagtgtccacaaagcaggaagcgaagaacgtttctcctacctagagcgcagccgttttgcggaaggcacagtccgggctccgggagccaagcagggatccgggcctcg

SEQ ID NO: 242000 - DNA, 122 bp, Homo sapiens
cagctccccaaattcagcgctgcgctcaggcatggcagccacccgttacgtggggccgttcgcatttgcatttattgaggtcaaataaaatgctggaaattggtgcctggtgacactgtcag

SEQ ID NO: 242001 - DNA, 122 bp, Homo sapiens
ggcctcccgggagctccgagtgcgctcgcttgcggggctgcaggtgttgcgggaggaccgcgtggcgcggaactttctgccgccgcccaccttctgctctgcttttctggctaccccggtga

SEQ ID NO: 242002 - DNA, 122 bp, Homo sapiens
ctggaagcaaaagacatattggaattagagaataaacagaccatgcagtgcgtcactccacgctgcagtcattggtgctcatctgccaaccaaacatttccttaagtctcactgtggcaatc

SEQ ID NO: 242003 - DNA, 122 bp, Homo sapiens
ttccactgtgccttccggaactcacttcctcatgagaaaaatccattatatcttcaatggcgtttaaaaatgcccctttatcgtcttgtcctaacttaatccttgctctgcctcaatgatca

SEQ ID NO: 242004 - DNA, 122 bp, Homo sapiens
cagatggaggggatgtcggggtccagatggaagggacggcggggtccagcaggcaggctccggccgtgcagggtgtggactgtcccgggggcgctgggggcttctgagggtgtctctgtccg

SEQ ID NO: 242005 - DNA, 122 bp, Homo sapiens
tcacaccggcccctcccacgctgagagaggtcagtgtgagcccctgcctcaacaggccaccgtgagggaggagcagggtcgcacgcgggctgctgggaggtaggcagggacttgggcctggg

SEQ ID NO: 242006 - DNA, 122 bp, Homo sapiens
aagttgctgattaagatgatgtagtgggtggagttcttcttcccaccattggagaagggccgctgaagcctgggataatgagtccttaggcaatagtttatggcctaataagagttaaggat

SEQ ID NO: 242007 - DNA, 122 bp, Homo sapiens
gaggcgcaggcaggaactggggctgcgagtgcggcgcagcgtggcgctagagggccagcgcgagctacgagtgggtgtgagctacgagtgggtgggggctcagcaggcccagtactccgagc

SEQ ID NO: 242008 - DNA, 122 bp, Homo sapiens
ctccgcgtcagcgacccgcttagaaaagcgctacgtcaaacgagagtcctaaagagcaggcgaaagccacggcgtctgcgtttgcaatgcatgctggtccgtgtagttctcagcctgacacc

SEQ ID NO: 242009 - DNA, 122 bp, Homo sapiens
ccaggagctctgctaagtgttttatatacattgccttagtgcatcttcacaacaaacctacgaggtgggcatgtttggcctgtaactggatacaaaggaaacagtcagtaagtgggagtttt

SEQ ID NO: 242010 - DNA, 122 bp, Homo sapiens
gtggctcagggtggagcacagcgtggctcccaggcgttccaggccctctcatcaagaggccgaggctgttgggcatcttgtctgaaacagtgaggcaggtctgcactgagggcaccaccagc

SEQ ID NO: 242011 - DNA, 122 bp, Homo sapiens
cccacacacacacacagccccagcgtgcacggccccacacacacacagccccagcgtgcacggcccccacacacacagccccagcgtgcacggccccacacacacagccccagcgtgcacgg

SEQ ID NO: 242012 - DNA, 122 bp, Homo sapiens
tcactccctagaagatctcggggagagtctcctatacgtgttgctgtgtagcttccgtaccgcaaaatggcgccattctaatcagaagagttgacacaatcaaatagccacacggcacgaag

SEQ ID NO: 242013 - DNA, 122 bp, Homo sapiens
gcgacggggaaaaaatacacattacactccagcaggattgaacgctttcaccctgtgccccgcgcctggcgtaacgcgtggccccagaccacacgctgtaacccggggtgagagggagtgag

SEQ ID NO: 242014 - DNA, 122 bp, Homo sapiens
cctgtctccgggagggcgtgctggatttcaacgccgaccgcctccgcggggtggactgggcgcctctgctgagcaccctcaagatcaataaagacctgcccttggtctccatcaagagcttc

SEQ ID NO: 242015 - DNA, 122 bp, Homo sapiens
ttattctcctaattgtttctctttgtaccagttcattgcttgttgggatcaccaccagttcgatttagctaaatgttgacacagtatttggtatctacgtgaaagatttggcagtgatcttt

SEQ ID NO: 242016 - DNA, 122 bp, Homo sapiens
gggtcggcttcacatgttgcggataatgacataacaccttatcttgtcagtagattttatcgtgctcctgaaatcagtaagtttcttaatgttctttgacctgggccatcatatgtggtgga

SEQ ID NO: 242017 - DNA, 122 bp, Homo sapiens
tagaatagcaagagcccctggcacacaggagtcacccgaggagctgaaaataatccccgacgcccaggccccagcccggagcaaatagagggaccctcggggtggcctgagcaccaggagct

SEQ ID NO: 242018 - DNA, 122 bp, Homo sapiens
gctgcagcctcaggtgcctcatctggggcttcattcagagtgggtggggaggcgacaggtcgaggcagttgccccgtgctcacgaatccctgacacagctggtgacctctccaggtgacctc

SEQ ID NO: 242019 - DNA, 122 bp, Homo sapiens
gagctgtcccccggctccgctttcggagcagcccttgggcgctggagaggtttcccattgcggtctccaggtcatggccaaggaggagaagcaattagaatgggggaaagggtcccaagaca

SEQ ID NO: 242020 - DNA, 122 bp, Homo sapiens
gatgcgtaaaaaataaagctggttaatggggagtgcaggaaatgagcgcagctgtcttgccgttttaatcagataggtcagagaaggcttctctactagggtggcttttgacctgcctctct

SEQ ID NO: 242021 - DNA, 122 bp, Homo sapiens
tccagaagaataagcatgtagctttgcttatgtttatggagctggagcccagggatgctccgattggcaggagtcggggaaagatcagccaatcaaagggcgcctccatttcagggaaactc

SEQ ID NO: 242022 - DNA, 122 bp, Homo sapiens
gctcatccgtgagacatgtggccacacactgagatcccgcagtggctcatccgtgagacacgtgtccgcacactgagatcccgcagtggctcatccgtgagacacgtggccgcacactgaga

SEQ ID NO: 242023 - DNA, 122 bp, Homo sapiens
ctgcacttagctcaaggggcctcgaggactctctgcgtctctggagacaagggcactacacgcacttcagaatgaagagttgtaagtcgctgacctggggcggactggagggtggggtgggg

SEQ ID NO: 242024 - DNA, 122 bp, Homo sapiens
ccagctttaagatgtcctgcatgctctacatgattgcttaaaggcgtgctttcctttccccggtatgacaacaccgctcccgacctgatcttcctaataccatcactgtaattgccttgaca

SEQ ID NO: 242025 - DNA, 122 bp, Homo sapiens
tccgggaggggtgggggggcagcgggcggcggcagcagtggccgcacatctggatggaagcgagctttgtccagaccaccatggctctggggctgtcctccaagaaagcgtcctctcgcaac

SEQ ID NO: 242026 - DNA, 122 bp, Homo sapiens
taaagggttctcagtaattcagactctcacatggcttctgccgtatgcctgaggtgacggcgacggcggtaacagtgtgtcagagccaggtggagatataagatggtcaggcccagaggagc

SEQ ID NO: 242027 - DNA, 122 bp, Homo sapiens
ggcgggtggatcacctgaggtcaggagttcaagaccagccaggccaacatggtgaaaccccgtctcaactaaaagtacacaaattagccaggccaacatggtgaaaacccgtctctactaaa

SEQ ID NO: 242028 - DNA, 122 bp, Homo sapiens
actaactttcctttcttcccttctcttttcttccctctctggatgggtaatcacaggctccgctgccaagcgcgctgcgaggagccgctgcccgttcccgtcggtgcccctccccgcggcag

SEQ ID NO: 242029 - DNA, 122 bp, Homo sapiens
cctggccagctggcagggtccaatgaggagccttccccggaggctctcggcagtgacccccggctctgagtgactcgcttggtgggcctagctccaggaggtcctcagcacaaggatggacg

SEQ ID NO: 242030 - DNA, 122 bp, Homo sapiens
gcaatgctgaatccaaaaggatgagggtggcccaagggaggctcagaagggaagtggctgcgggagtggaggcttgctctagaggcctcacgccattcacctgtactgtcatccccaagctc

SEQ ID NO: 242031 - DNA, 122 bp, Homo sapiens
cccagggctgtcctgctgctgcggagctgcagcaatggacgggggccagctccctgcccacgcctcggactctaggccgtcccttcccctgcgctgtgggcatctgagcatccggcaaggtg

SEQ ID NO: 242032 - DNA, 122 bp, Homo sapiens
tcgtttttgttttgatccagtgctctcccatctaacaactaaacaggagccatttcaaggcgggagatattttaaacacccaaaatgttgggtctgattttcaaacttttaaactcactact

SEQ ID NO: 242033 - DNA, 122 bp, Homo sapiens
ttggacctgggtccccctagtggaagaaagtgccttcccagcagcccctgcgcagggccccggtatcctggcatccctcgttcacacccacgatgtgtgtcccacatgccaggggcagcaaa

SEQ ID NO: 242034 - DNA, 122 bp, Homo sapiens
gccttgccgccagtcttgccgcggcccgacatgctagcgaggtagaccggtgaagcacgacggctcaaacactagaacagacgcccgccgcagtgtaactgctgtcgcgcgcgcgccgcgag

SEQ ID NO: 242035 - DNA, 122 bp, Homo sapiens
attgacagagtctgttgtgtaaactttctttgtgaaatatactacctttaagctatgttacggcttatagaacaatgtggtgtctacatctcaggggcattttaattcagggaagtgagtgt

SEQ ID NO: 242036 - DNA, 122 bp, Homo sapiens
acagccctgagtcaaatccagactttgctgctcactcgctgtgtgaccttgggcaaatcacgtcacctctctggacctgttttctcatgaacaaagtaggaataattatgcctctttagtgt

SEQ ID NO: 242037 - DNA, 122 bp, Homo sapiens
ccggggggcgggggcgggggccgggccaggccgggtcggggtcggggtccgggtggaggtcggaagggaggttcgagcgccaggctccgaggacccgaggccagctctgagcgcccgagagt

SEQ ID NO: 242038 - DNA, 122 bp, Homo sapiens
tgttttgttttttctttgaggtggagttttgctcttgtcgcccaggctggagcgcaattgcgcgatctcaactcactgcaacctccgcctcccaggttcaagtgattctcctgcctcagcct

SEQ ID NO: 242039 - DNA, 122 bp, Homo sapiens
ctcctcatccctttctctttggcagtgagatcttaaggtcaaggtgagtagtaggccaggcgcagtggcttaggtgaaggccacaccagacttgggcctacgtcttggccttccaggtcagc

SEQ ID NO: 242040 - DNA, 122 bp, Homo sapiens
gacccagccctggccccctcagtcccaggcaggccctctccaaggagctgagccccagcccgtgtgcacctccaccccaggcccagctgggtttttcacgcagccctttcctaacattccca

SEQ ID NO: 242041 - DNA, 122 bp, Homo sapiens
cttcccaggggcccgggagctttcttccagtaggtcacgcgcctatggtcctggcgagaacgtctccaaagtgggcagcatgtggcctgggactggtagtgtgacctctcccctggacgggg

SEQ ID NO: 242042 - DNA, 122 bp, Homo sapiens
ttttaggccctccagcctgtttggataaaacatgttacactgagaaagcatcaaagaaaacgaaacaacagtgacatttaaagggaactccgccggctagacagagccccattttgggttca

SEQ ID NO: 242043 - DNA, 122 bp, Homo sapiens
gtgaccctgtgaatgttggcaatgtggggaataatctttatatctctctggtgatgagaacggtgatttgaacattataaatatttgaattgaattgtttccagcccatgtttattttaatg

SEQ ID NO: 242044 - DNA, 122 bp, Homo sapiens
ggtccagtttgtctccatgacttacgcttgttgatcaatctaaacgcagacacacgtggacgagttttcaggttctcgtttcagagcggacggttgcttcatcggggagagggggacccaca

SEQ ID NO: 242045 - DNA, 122 bp, Homo sapiens
gatgcccttggctcgattttgcttataggtagattttcaccaagatggacgcaggagactcgcctgtcacctgctggagaaatcacagcatgcaaatcactttgtgccttctgcctttttat

SEQ ID NO: 242046 - DNA, 122 bp, Homo sapiens
cggtaggggttctgcggcgatgggcgggctaggggcggggcgcgggtgggctctaaaagtcggtgcccactcgctccgcgctgccgcggcaaccagcacaccccggcacctcctctgcggca

SEQ ID NO: 242047 - DNA, 122 bp, Homo sapiens
ggggctgcctgcattaggaggtctttgctgggttctagagcactgtagatttgaggccaacggggccgactagactgacttctgtatttatcctttgctggtgtcaggaagttcctttcctt

SEQ ID NO: 242048 - DNA, 122 bp, Homo sapiens
ggaagatgctgaatgtattgatgacgacgaggaagacgaggaggatgaggaggaagacagcgagaagacagaaagcgatgaaaagagcagcatcgctctgactgccccggacgccgctgcag

SEQ ID NO: 242049 - DNA, 122 bp, Homo sapiens
gcctgcggggaagaagctgaacgggggcgggacccgggcgcggtgagcccattcattccccgagggctgggaaagtctccaccaggagacggaatccctgggatgtccccaacgctgggccc

SEQ ID NO: 242050 - DNA, 122 bp, Homo sapiens
cgcccaggaccctagctgcgggactctagcggggaaggcacccccaattctgggccctggcgaccttgggtcagggccaggaaaggcacttccagccaagcgctggcgccgggtgcgcctcg

SEQ ID NO: 242051 - DNA, 122 bp, Homo sapiens
caactcacttaatcctcatcacagccctaaaaggtagctattgttattctctctcaattacggattaaaaacttgaatcccaaagaggttaagtaacttgcccaagggcacgcagtggatca

SEQ ID NO: 242052 - DNA, 122 bp, Homo sapiens
gcgcttatttgccatctgtatccagctgtctctcagtatccatgcggattggcttcagggcgctcctcagataccaaaatccccggatgctcaagtccgtgatgtaaaatggcacagcattt

SEQ ID NO: 242053 - DNA, 122 bp, Homo sapiens
cccagagctgtcgttgggttctgaggctgctgaactgtgagtgagtaaagagcttcgagccgctgaagctcactggctctcggctctgagacacagggatgttcagacaggcggcctctgtt

SEQ ID NO: 242054 - DNA, 122 bp, Homo sapiens
acgaagggttttctgggtccggagtggtgctagccagatccactgcacgcttggggtttccgctcccaccctggccagggccctgggcagcttccccagtggcatttgccataccccaccca

SEQ ID NO: 242055 - DNA, 122 bp, Homo sapiens
ccccaggcagaaggaggcattggccaaggtgagctgtagccctggcccgggctcccgcctcgggctgtggccctcgccctcctgcggcagcgagaagggacggggctgggtgggggccgagg

SEQ ID NO: 242056 - DNA, 122 bp, Homo sapiens
acttcacactctcaaggtagaacatgaaactcctagattgttccagaagtcttgctcaatcgggaacatctaaatggttccttggcaataagcaaacaaacaaatgcataaatgatgttgct

SEQ ID NO: 242057 - DNA, 122 bp, Homo sapiens
cctttcctagtcaaagaaaggggtgacagacggcacctggaaaatcgggtcactcccacccgaatactgcgcttttccggcgggcttaaaaaatggcgcaccaggagattatatcccgcacc

SEQ ID NO: 242058 - DNA, 122 bp, Homo sapiens
caactttggccttcagaacttactggggcttcccgatggcttcacatgttaactcaagcgcgtccccttcccgggttaagccttgtagaggataagtcatctgaatgtgcacttgaggctta

SEQ ID NO: 242059 - DNA, 122 bp, Homo sapiens
aatcagaaaagtgtttacaggagacacacagctggcaataacagctttgaggggccactgcgtctctgtgactatttcatcttccacgccaacttaaacatgagaaaaaaaggctttgcagc

SEQ ID NO: 242060 - DNA, 122 bp, Homo sapiens
taaggaaagttggggcactgccaaaatcaacactgcctgctttgagttttcactgcttgtcggacaaaccttaggttgggggattgggggatatatacaaacagggactaaaacaagcaaca

SEQ ID NO: 242061 - DNA, 122 bp, Homo sapiens
ctaagattgaaaaggtcattaagaggaaattaataaaagggaactctttaaggtgggtaacgcaggtattatagtcttagcccctggaatatgacccagtgggcagagtaagccctggcaaa

SEQ ID NO: 242062 - DNA, 122 bp, Homo sapiens
gcaggcaattcccctctggctgtcagtctccctatcccctgccgcgtctccttcgcggggcgatgggtctcagagccacccccagccaaagaaaggggcacgctttcgagatgtctccctgg

SEQ ID NO: 242063 - DNA, 122 bp, Homo sapiens
aagcttcgagtcgaaggcagagagtccatttgcgacagacttggaagaggctggcttcgccgtggcatcgggctggttggtttgcttggggtctagtgagttagatttagggcacttgggaa

SEQ ID NO: 242064 - DNA, 122 bp, Homo sapiens
aggagggtgaggagcacagcgcacttctgcagcagcagctgcggattggcttgtgggaggcggttctccggagcaaggcaagggcccctgccgcttctgggctgactgtggattccgccaca

SEQ ID NO: 242065 - DNA, 122 bp, Homo sapiens
agccagggtcctttcccaccctgatagcctgaatatagaattctactccctttttctacccggaagaaataagataggaatgggatgccctagagtggccccacctttagggcttggtcctg

SEQ ID NO: 242066 - DNA, 122 bp, Homo sapiens
caccatcctggtcctggctgggcccaaacccctggccccggcattcaccctacaacactgcgcagaatgtgggaagagccttgtctttgaaggaaagtctcgaggccccactgaagccggac

SEQ ID NO: 242067 - DNA, 122 bp, Homo sapiens
ggggagagatagcagaggtcagaggttctccctaaaccagcagagatgaatccaaagccccgggtggaggcccggtggcaatgaggtatcagaggagccaggaaagtctggccaggaggagt

SEQ ID NO: 242068 - DNA, 122 bp, Homo sapiens
ccaatgagtgatgcctggcgaccaccaatgcaaatgtcagcctggccagaatgtgatcgccggtgaggggtaggggaaggggagagaagacggagacatgcaagagtggttctggaacgttt

SEQ ID NO: 242069 - DNA, 122 bp, Homo sapiens
gtctgcggaggctgagaacaaggttcgggaacagcagccccatgtggagcgcatcttcagcgtgggggtgagcgtccttccgaaggactgtccggacaacccccacatctggctgcagctgg

SEQ ID NO: 242070 - DNA, 122 bp, Homo sapiens
ctcgtcgccggcgtccaggtgcaggatcacgctgttgctggcgtagtcgtagttctggtccgcgtcctgggcaatagcactggcccgcacctgcgggtgggggacacgggagggagggcgag

SEQ ID NO: 242071 - DNA, 122 bp, Homo sapiens
gtcttcccttggaaaccctaggcgaggaagagaggagaatgcagtgaaagcaggtgtgggcgctgtggggcagattcccaggaggaaggatcccaggcaggatcacaccaagccctgggccc

SEQ ID NO: 242072 - DNA, 122 bp, Homo sapiens
gtaggtggctggctgagggctgggcggggctgggacacgcagcacactccaggcccagaacgtggtgctcccgggctgtggaggggggcgtgcgggggcaaacccagaagtgttcacctcac

SEQ ID NO: 242073 - DNA, 122 bp, Homo sapiens
tctgtgaaagggtcgacccgcgcgcacagccactcgtgcctgtcctggtacatggtgtcacggacgtgcacaacatcgtcacacttcagggacatggtgcaggcgtccagctggctggagat

SEQ ID NO: 242074 - DNA, 122 bp, Homo sapiens
cgtttttctttttttcctttacgcatgtaaccacggtcctgcatcgtgaaacggtacgcgcgtcggtggcaaaagaaaaacagcagtggctgcaaagctaagggccctcgctttcagaggag

SEQ ID NO: 242075 - DNA, 122 bp, Homo sapiens
gcagctctccaggaacccataggcagggcacggtagtgtggcctggccaatgtctgctgacgggtttgctgtgagtagagacatagacgaaacctgtctgggagcaggaaagtcctgaacgc

SEQ ID NO: 242076 - DNA, 122 bp, Homo sapiens
atgagaggcaatataccaaaaaactgtcctcttcattcagaatttcactagagaataaggcgattggaatcctccctttctaatttctaagagcagaataaatcatgtaattataaataaac

SEQ ID NO: 242077 - DNA, 122 bp, Homo sapiens
gctcattggaccttgccatttcataaaggatatgccgaacatcccaaactaggactgaggcgggactgaggaccatgggaacctctactaggaaataactactgtctgaatatgtgaaattc

SEQ ID NO: 242078 - DNA, 122 bp, Homo sapiens
aaaccccagtaatcctagcaccaacacagcaaacccacctgccccacttcacagagaggacgggtgtcacaaggcaattgaccttggcttacgactctgtggaaatatgcgtttgcataaag

SEQ ID NO: 242079 - DNA, 122 bp, Homo sapiens
agtcctaagtctcaactatcatttgcaaactactttttaaaattccccttcaaatttcagcgatgttatttttaaaaaatagtcaaaaactgtaataagaaagaaaaataaagaaaactgga

SEQ ID NO: 242080 - DNA, 122 bp, Homo sapiens
gggggtgggaggagcatcctaggaccttatctaggagggtttgtgggacctggtgactcacgggatgtgggtctggaaggagttctgagcagctgatgctaccaggtggggagatagtgggg

SEQ ID NO: 242081 - DNA, 122 bp, Homo sapiens
agaagtcttcagttgttcatgtgtggcccttcaacatctttctttcctagaaaaatcaagcgtcttagcttcagtgttctaagcccctcccccagaacgtgtaggcagctgggtggagccta

SEQ ID NO: 242082 - DNA, 122 bp, Homo sapiens
acgtgcagaggagcgggctgagctctcagaagggtaagcgggcccggcgccaggaggccacgaatggggtgctgcagagcagtgactaaacagcatgaccttctggcagctgcacattacct

SEQ ID NO: 242083 - DNA, 122 bp, Homo sapiens
gcatgatccaccatgtggtttaattgagtcacgctggctttggtgctaaatagactgaagcggcaagggtggaaaccaagagataggagacttatagtaattcaggcaagaggctgtggtag

SEQ ID NO: 242084 - DNA, 122 bp, Homo sapiens
tggtggctgattaaaggcagagccaggcccactcacctgatgcacatcacactcctgacacgtcctggtggctgtattaaaggcagccaacccaggcccgctcagatgcccggcggtaacct

SEQ ID NO: 242085 - DNA, 122 bp, Homo sapiens
cagcacgtctgggctgtgcgcggcaccccaggtaaatgcagcggcctctgcattagcccgcgctgcttagagacgctgccacgacacttctgcccttgagtccggttttggggatggttgat

SEQ ID NO: 242086 - DNA, 122 bp, Homo sapiens
ccagagcctttctgtgacagcagcggtggcgtggccgccgcccccgtctccgccggtagccgccaccaaagctgaggcctctcagttcctgcgaccggggccgcccgctgcggctcctgcac

SEQ ID NO: 242087 - DNA, 122 bp, Homo sapiens
acaagcctgggcaacactgcaagaccccaactctacaaaaaacgaaaaattagccgggagcggtgatgtgtgcctgtagtcccagctactcaggagactgaggtggaagaatcacttgagcc

SEQ ID NO: 242088 - DNA, 122 bp, Homo sapiens
gtattcatcgctaatttgtccttgtgaaagggtgcccattcctaatgcaggtgcactggccgtgtgcactccatggtcccagcagctctcgctccctggactcccgccgtagtgagcgttta

SEQ ID NO: 242089 - DNA, 122 bp, Homo sapiens
tgtggatgtgcaggagggctcctcggccaccttccgttgccggatctccccggccaactacgagcctgtgcactggttcctggacaagacacccctgcatgccaacgagctcaatgagatcg

SEQ ID NO: 242090 - DNA, 122 bp, Homo sapiens
gcacacacatctctgttgtccctgtgtgtcctaatatttccttatgtcaccagtcatattcgataaaagtacacctcaatggactaattttaacttaatcccctctttaaagaccttgtctg

SEQ ID NO: 242091 - DNA, 122 bp, Homo sapiens
cctctgacagctctcagtatcagcccagtggctccctgccattggctcagtgcaatggaccggcaacgccgctcactataataacactcatgcctgccagcagcagcaactccgagtgcagg

SEQ ID NO: 242092 - DNA, 122 bp, Homo sapiens
gtggaggggaagagagagagagagagtgagaacgaacgagaacgctggcgaagaggaatgcgctgcaaacccgggtgaacagatgtgcatggtgccctcacccagccccggcatggcctaga

SEQ ID NO: 242093 - DNA, 122 bp, Homo sapiens
ttcaagaacgaagccgcaggccctcgcggtgagtgttacacttcttaaagatggtgtgtccggagtttgttccttcagatgttcagatgtgcccggagtttcctccttctggtgggttcatg

SEQ ID NO: 242094 - DNA, 122 bp, Homo sapiens
taaggagaaatgcaaataaagatcaggcttgggggcaggggtctgatgatgcccccaaaacgccagtcagcagggactctgacatttaaagaggcaccataaccacttgagccaaatctctt

SEQ ID NO: 242095 - DNA, 122 bp, Homo sapiens
acaggcgcgcagggcctacttacgatggtgtcgcaccagaactcggccacctcgtgcacccgcatggaggtaagcaggatctcccagacctcgagcttgaacatgtttccgatgatgatgtg

SEQ ID NO: 242096 - DNA, 122 bp, Homo sapiens
gaacgcagccaacgattcatctgtttgcattaataggttccagcaatggttctacaggcacggaaagccaagccggtttgccactgcacttagcaagcacatgagcttaaaaataaactttt

SEQ ID NO: 242097 - DNA, 122 bp, Homo sapiens
cccctttcctagcgaagctcgctccggcaatcaaactccctggagagctgtagttcccatcgggtgggttaccccaactcagctactcatcgcctgcctggctgtgctttacggctggcgag

SEQ ID NO: 242098 - DNA, 122 bp, Homo sapiens
tgttcctgtaggagaacaattggtaaagggttctgtctgaccatcttgccccattctgcccgattcacaaggttatttttaacaaattgaatgttacaacttttaccaaatcatcccaatta

SEQ ID NO: 242099 - DNA, 122 bp, Homo sapiens
taaaaataactcagatgctgccactatgtcatttcctagtttctaaacaaaaataaaacccgaaactgctttgtgtaaaatgtacacacagtcatagttacaagttttcctgcagccttatg

SEQ ID NO: 242100 - DNA, 122 bp, Homo sapiens
cagacacgaaggtgaagccaaagacgggacgctcacttcctgagaatttgctgcctgctgcgtggacaccaccgacctattgtttacagcggtcagggacccgccccccagacccccaggac

SEQ ID NO: 242101 - DNA, 122 bp, Homo sapiens
agccccctccggccctcacttggagctggacaccgagtaggggccgactgcgaggggcgacgccgccggttgtagtttgcggaggacgagggcttttctctgtgtgccgtagggaagggaag

SEQ ID NO: 242102 - DNA, 122 bp, Homo sapiens
cctgcatcccctctccactgaaagctgttttcatcactcaataaaactccccacccaggccgagtgggcaggccatctcctgcagcaggtagtgtggcccactgaggcctgggcagggtgtc

SEQ ID NO: 242103 - DNA, 122 bp, Homo sapiens
tgtcggctagggacaggtcaccctccagccgcacactgtccagcttggctcccggggcctcgacgtccacctccatgctgggcagagacacctccacgacgggggtcatcacatccgccttg

SEQ ID NO: 242104 - DNA, 122 bp, Homo sapiens
cccctgctttgacttggctccccacggagtttgggagcatttatttcagagatggatgggcggcggctgggcattggcaggtgggcgtcagggagaggaaagggaggcagcgaacacatcca

SEQ ID NO: 242105 - DNA, 122 bp, Homo sapiens
gataaatatattggaaaaatctgttggctctccaacagctcttataaaacaaagctcagacgctgtgtttttgttgtttgaaagagagaaatcaggggcttgggcattattaggctcccttt

SEQ ID NO: 242106 - DNA, 122 bp, Homo sapiens
cctgtaggataaaatctaaactccttggcatgataccagaggcttttgagcattctgtatcgctaacacatactattctacctcagcctttgtaccactagttcatagactactcttcttca

SEQ ID NO: 242107 - DNA, 122 bp, Homo sapiens
ttcagattgaaccaaagtttttgaaactttcaactgctctctcaagtagtgctctctcagcgtgaagactagaatttgttaaaacccatatatcacaagatacagtaaatcacttccaatag

SEQ ID NO: 242108 - DNA, 122 bp, Homo sapiens
gttgaaaacccagcgtaaacgcggctcccggcgtctgctggatgcctgccgggcgcagtccgagccagagagcccttgcacctgcatggcagaggccatggagcccgcacatttccaccctg

SEQ ID NO: 242109 - DNA, 122 bp, Homo sapiens
cggcccccgagggttagccctaagtggcgctctctttggacgttaggctgtcgggggccccgtccttcttccccagcggggacggtgtctccggagtcgggtcctaaggaagagagcagcgc

SEQ ID NO: 242110 - DNA, 122 bp, Homo sapiens
agtttgcagtgagccgagatcctgccactgcactccagcctgggcgacagagcgagactccgtcttaaaaaagaaaaaagaaagaaagaaagaaatagtgcctattggccaggctcataccc

SEQ ID NO: 242111 - DNA, 122 bp, Homo sapiens
ttcgcggcgcaggcaaaagcaggaatggcgacccctctgcggggggacctcaggaggaaacgtctggcttggggagtccgcgctcggcgcgagctgtgggggcggccgggcgctctgggggc

SEQ ID NO: 242112 - DNA, 122 bp, Homo sapiens
ccgaagccacagaagccagtctccttgtagtccttgcagatgtcaggctggtaatcccagcgcacagtggcgcgcagatgccctggcgcacgtatggggcccttcctcgccatccccgagga

SEQ ID NO: 242113 - DNA, 122 bp, Homo sapiens
aatgaggaactataaccagtgtctaccgtttaggaaccaaacaaaagctgacaggaatcccgccaccgacccagccgccccagactttgccctggcctatcccgcgccgctcctcaaactag

SEQ ID NO: 242114 - DNA, 122 bp, Homo sapiens
gatggattttttattttttttaaatggattattttaaggtagtatagtataaatagaaagcgcaacactgggtggtgatgtaatttttccacatacgtaggaatgatctaaatgactcgttc

SEQ ID NO: 242115 - DNA, 122 bp, Homo sapiens
aagcctctgtatcccctggaccattaaacaaccccttcgttgggctttacactgtggtaccggggtcttctcgggtaatttcccagcttatttaactcatcagaagcgaaggggcatctcag

SEQ ID NO: 242116 - DNA, 122 bp, Homo sapiens
ggaggtcgctgtcctttctgggaaccaagcaggggtcgcaggagggcggggatgggtcagcggggatctctgagtggggttcggctgagagaggccacagtttcatctttgggaagctaccc

SEQ ID NO: 242117 - DNA, 122 bp, Homo sapiens
agtgttggttctctccaagtttctgtcctttagctgtttgtctgtgtgacatcattaacccgcataattttaatttccttctatttcttactgtctttagcccagttccagacattgtgagg

SEQ ID NO: 242118 - DNA, 122 bp, Homo sapiens
gggtcgtgggtgagtgccagcccagcccgtctctgctgcaggactctggtgctgccagaacgcccggactccggactccgccttaagtggcccctggccccgccctccgcccttctcccaag

SEQ ID NO: 242119 - DNA, 122 bp, Homo sapiens
ttatagattgagtgtttatgtcttcctcaaactcatatgttgaagccttaaccctcaatgcgatggtgtgtggtggtgggacctttgggaggtaattaggtttagatggagtcataaggttg

SEQ ID NO: 242120 - DNA, 122 bp, Homo sapiens
cctgacgccatgaagtcaaagatctaactccccagggggagagttatgcccaagaaccatcggtattttgtgttagtggtcattgccagagtgaattccacagtgtttgtgataaaccctaa

SEQ ID NO: 242121 - DNA, 122 bp, Homo sapiens
ataggctctaaggcaaaggtcatatagcttttatttaaaacaggctcaattttgggaggccgaggcggatggatcacttgaggtcaggagttcaagaccagactggccaatgtggcaaaacc

SEQ ID NO: 242122 - DNA, 122 bp, Homo sapiens
caaaatgggaactagggaacagacacgggtccttgcagggctggtgggagatctgcaaaccgaagtcaccatgggaccgcgcatgctatcaacagccaggccgagcagcacctgccgccctc

SEQ ID NO: 242123 - DNA, 122 bp, Homo sapiens
ctgaatgcagggagtcctatttttttctaggccatgaaagcaactttctaaaagagaacacgttaatatcttctcctcactatattaccctatcaaactatttggtgaaaagcaccctgtct

SEQ ID NO: 242124 - DNA, 122 bp, Homo sapiens
gggcaggttctgggggccaggcacagccatctggatgccagtgcctgaagcaggtagctccggtcacaggcacaagtgttgtagacctttgcggagaggccgggcctccatgcacctccagc

SEQ ID NO: 242125 - DNA, 122 bp, Homo sapiens
tcctgagccaacaaacccaaagaagaccggttgctaggaagagaaagccgagcgttgctccgtgacgtcatcactccgcgccacccgcgacagtttcccagcagggctcacagcagcgttcc

SEQ ID NO: 242126 - DNA, 122 bp, Homo sapiens
gaactaggttacctgtctgtatgacagagagcatgcagagcgactgagtgacgaccacggcgctgccccaataacccagcgacccgcaaccaagggcctggagtttgttttaaaaagggtct

SEQ ID NO: 242127 - DNA, 122 bp, Homo sapiens
cttgtctgccacaggactttgcgtgtgaccactgcacctccaggaaggccaggtgcacatcgcttcccatgcgcccggcctcatggcctttgggggttgtcgtgtggaatggagatgacacg

SEQ ID NO: 242128 - DNA, 122 bp, Homo sapiens
ctcacctgcggcaggtgcgcgccgctcatcgctcccccagcggcgcggcgcctccacctgcgcacctgtcgcccccccgagtgacccgcgggagtcaaggcctctctacaggaggctggtgg

SEQ ID NO: 242129 - DNA, 122 bp, Homo sapiens
gaggaagcggtgagcctagcacagaaagctgggagggaagaggactgacttcctggcagccggggctccggttcctgattcctgccctggtatcctgtcccaagaatggcctccgcccagac

SEQ ID NO: 242130 - DNA, 122 bp, Homo sapiens
aaacggtagggagccagaagggggctgatccaacaacctgacggaaagcgttgtctatttcgcagcctggccggggtgaacaagtttggcaagtgtcggaccgaaccaggtcaagccttacc

SEQ ID NO: 242131 - DNA, 122 bp, Homo sapiens
cagggcaaaacaggaagactgcagagcagctgtgctggcacagaagatcagccccttgcccgtgccaagtgctgcccccaacaaccaggccagcctgggagggagatggattccagggacag

SEQ ID NO: 242132 - DNA, 122 bp, Homo sapiens
catgccccagggctcggtcactgtgccagatcagatgaatgaaggccgaatttccccagccggacctagtaaggcacatacccagagtggagatatcaattggtatttggacagtgggagga

SEQ ID NO: 242133 - DNA, 122 bp, Homo sapiens
tatctgagccatgccattctacatcacgtgagccacactattctacaacatcatattggccgcgttcaccccatgtcatacgcaccacgctcttctccgtcgacacccatgggtcatgctca

SEQ ID NO: 242134 - DNA, 122 bp, Homo sapiens
gcccggttgcatctctcaaacgggaccagattggaagggagaccagctgctttgggcaaccgaggctgcttctgggtgaactcccaaactagatggtgccgagagccctggacctggcagct

SEQ ID NO: 242135 - DNA, 122 bp, Homo sapiens
aaaaaggctgatgcttagaagcgccggctcttccccattcgcgcactcgagaggtcacggcgtagtaaagtttggtttcactagcgggcttggacgctcgcgaccaaagtctcccaagaaaa

SEQ ID NO: 242136 - DNA, 122 bp, Homo sapiens
acagtaaacttgagctcaatgaagatacgctcagcctctcctcggtacacccagttggtgcggagccagttgtcctggtcgccagacatcacgttgcacacggagtacatgtagatcggcat

SEQ ID NO: 242137 - DNA, 122 bp, Homo sapiens
acctcggcctcgcacaccacagctccagctctgagacacaagcgacccgcacccccccaccgcccagccccagcctccagactggctgagatcacagtgtgcgccaccccatccctggcttg

SEQ ID NO: 242138 - DNA, 122 bp, Homo sapiens
gacccaaacggcctgtgtgcgggctgctctctgcccccaggaacaggagcacctttcaggcggcggaagagtgcgtgcatactgagctcctagctcccagcacagaattcaggccacagaaa

SEQ ID NO: 242139 - DNA, 122 bp, Homo sapiens
ggaggccgaggcttggggacccgactgtcatcagggtcttccgccagaccctgggcgctgcgccctcagaggccgatgaaaagaagcagaagggagaggtgagtaagtcgcagctccgggcg

SEQ ID NO: 242140 - DNA, 122 bp, Homo sapiens
attcttctccagcttgggttcccttggctctggcagcctgctgacagcaccactccccttcggcttccctggaaatgagaagcaggaaggcctgagagcactgagattgcctagggtgcggg

SEQ ID NO: 242141 - DNA, 122 bp, Homo sapiens
cttcattcttatctttgattttttatctttccccttttctatgtgagaatatttttagagcgtaagtcagagaacttcaactactggctatgtaattgggcaagtctctgcatcttggtttc

SEQ ID NO: 242142 - DNA, 122 bp, Homo sapiens
cagctgctttaccagttgggtcacgttggccaggtgccggttgggccgcatgtgcctctgcgggaaggtctcccggcactgcgggcacgacacgttagtctctgccgtgccccagcagcggg

SEQ ID NO: 242143 - DNA, 122 bp, Homo sapiens
ctaatgtaacagaagagagaacccataaattaacccaaatacttacagcagactgatcttcgacaaagtaagcaaaaaataaagtggggaaaggacacccttttcaacatatgatgttggga

SEQ ID NO: 242144 - DNA, 122 bp, Homo sapiens
agcgcttacggcagtctcgcgggatttccccctctcgcgggaattatttgaacgttcgagcggtaaatactccctggggctgtcatagaagactactcggagagcgctgcctctgggttggc

SEQ ID NO: 242145 - DNA, 122 bp, Homo sapiens
agaagttagcatctgttactgtgttgtgcagtggttgccgctatcccagaacatctttatcgccccgaaaagaaatcctgtaccagttaccatcgcttccatatcccgcccctttccacccc

SEQ ID NO: 242146 - DNA, 122 bp, Homo sapiens
cggctcacaccggaagtgcggctcacaccggaagtgcggctcacacaggctgtggagaaccggcccagctccgcgctgagctgcagggcgtgcggaacgcgcaccacgcgaagacagacagg

SEQ ID NO: 242147 - DNA, 122 bp, Homo sapiens
gtgtccgagggcaccaaggctgtcaccaagtacaccagctccaagtgaggcgttcctcggcgtcctgaacccaaaggctcttttcagagccacccacacgatcaagaaagggtttcgaacac

SEQ ID NO: 242148 - DNA, 122 bp, Homo sapiens
gcggccgggcatgggaagccgagcgccgcccactaatctatattaaagcttctggcgccgcgtgagtcccccactggctgctctgaaaagccatctttgcattgttcctcatccgcctcctt

SEQ ID NO: 242149 - DNA, 122 bp, Homo sapiens
gaagcctcgtccaaaattggaaggatcagcccccagggcgagtatctcacagtcagcacccggccgccccagccctcgcagcaccgcttcccggggccactcctccgccggcggtagcgccg

SEQ ID NO: 242150 - DNA, 122 bp, Homo sapiens
ggatgcggacgtctgacctgtggaaaacccagcatctgcagtgcccagccgcacagggaacgtgggcggcgtggttccaagcacagtgaagacgccaggctcggatctgtgctcagagccgg

SEQ ID NO: 242151 - DNA, 122 bp, Homo sapiens
cctatcagcgctaccgttgttccacgcacacagggagtaagtactgggagtcccagccaccgccgcggaaaatctgggatgccagcgagcggccgcatctcggcgcctgcgcactgtgcccg

SEQ ID NO: 242152 - DNA, 122 bp, Homo sapiens
tggagtcgctcggttttggaggcatgctttccaaactttctaattcacagggtctttgcacgcagcccctgccccacaacaccttggcagtctctgagacttctggggctcttctcccgggc

SEQ ID NO: 242153 - DNA, 122 bp, Homo sapiens
gcggggtggcgacagtggcgcgggcgcagtgagcgcgtccgagaacagaatgggacgaaacggggcgcttagaggcccgggaatctgtgggtcttttaggcggagaggggcgaaggaggtta

SEQ ID NO: 242154 - DNA, 122 bp, Homo sapiens
gtcccgttacctgacgaattttgtcggaaactcgaaccttaactcctctagggcaggacgcgggcacctctaacaaggtgaacgctctatacatgttgactccatttacttttttgaaacgc

SEQ ID NO: 242155 - DNA, 122 bp, Homo sapiens
aagcctcctttctcttctcacttttttctgctgagaacattgggcacattgagtctagcacgcccatcttgtagatggggaaagggagatacagaaccagtgaccaacttggtaagaggtgc

SEQ ID NO: 242156 - DNA, 122 bp, Homo sapiens
attgctttttcttctttcttaggcacatattcatgtatggtcactttaacgcagtgctaccgtctgagacgtgtcggacaaaggcctgggcagaggggctagaaaccatgtatcaccaaagc

SEQ ID NO: 242157 - DNA, 122 bp, Homo sapiens
ggtttctcgccactggggctgaccacgcccccagctgtgaccgtgggtgtggctggctctcggccctgcccagctttgttctgaggacgtggtgacttcctgaacatcagcttcaatcctcc

SEQ ID NO: 242158 - DNA, 122 bp, Homo sapiens
ttgataagcagactggccaagcccagtgacccccatgaggatatgcaaccccccccacagcggtgggtcttcccaccaatatttaggaggttaaagaaaaggtggcttctcagtgggatagc

SEQ ID NO: 242159 - DNA, 122 bp, Homo sapiens
actctgtctcaaaaaacaaacaaacagcaacaacaaaaaacatttaaagacacacaaggccgggcgcagtggctcttgcctgtaatcctagcactttgggaggctgaggcaggaggatcgct

SEQ ID NO: 242160 - DNA, 122 bp, Homo sapiens
tccgactggccttatagcggtcggtgccccggaggccagctcggccaagcccaccccgcccgcccaagtcccgcccgcgccccaccctgcgccgtggcttacacaacgcacattcgcggttt

SEQ ID NO: 242161 - DNA, 122 bp, Homo sapiens
cagaacactgcctgtccagtgagtcgatggtgctcttcagtgcctccagctctgtggtctcggccggaagctgacgctgatactcagttatctcctcctgcactcagcacatggagtctgtg

SEQ ID NO: 242162 - DNA, 122 bp, Homo sapiens
cacaccaatgagattggaactgagcctagaaaagtagtatcaacggaaggtgcaaatgaacgaatagaaaagcttcccggttggactcatggtgctcagtcaactagtctggaagtttccct

SEQ ID NO: 242163 - DNA, 122 bp, Homo sapiens
tatctgcgccgtcctttcctctgtgaggggcgaggtggggcgggaatccctcagccagcccgacgaaaactgcagaggcttctgggccttttaactttggagaagttgaggaccttgtcgct

SEQ ID NO: 242164 - DNA, 122 bp, Homo sapiens
ccacgatcacttccggtcaccccttctcaaccccacggcttagaaccaaatccaggtttccgctgagccgacttctcgccctctgtagccccccacggcctggaaacatggaaggagaaagt

SEQ ID NO: 242165 - DNA, 122 bp, Homo sapiens
cggagaaggggacaggaagcggcacctagccgagtccgccggaaactccttcccccgcggcgcggccggctcagtagactcagcccggccctacccggccctgcatggcccagacgggcgga

SEQ ID NO: 242166 - DNA, 122 bp, Homo sapiens
ggagagcctggcggcctgctcactggtggagtcccagtccaaggccaaccaagaggagttcgaggcgggctctgagtacagcgatcggctgcccctgggcgccgaggcggtcaacatcgccc

SEQ ID NO: 242167 - DNA, 122 bp, Homo sapiens
caaaataataaccccaaaaacgaatatatttattaagcagtggtcttgttctacctttaccgggtgtctttccttatttaccccattcctctgctgtttgacccagttcaagccactgagag

SEQ ID NO: 242168 - DNA, 122 bp, Homo sapiens
acctcccggagtgggggctgcaaagatcatggccactgtgccacccacaggggcccaggccggacgcctgggctgtgccgcctcggcagccaggccgaggaacgtgcaggtgcggccgggag

SEQ ID NO: 242169 - DNA, 122 bp, Homo sapiens
tctaaaaagcccagatccaacaatccatgcaggacaaagcaggaccctccttctgaccctcgccgcgctagaaacaacggcccctcagtgtccagtcaggactctccttctgaccctcgctg

SEQ ID NO: 242170 - DNA, 122 bp, Homo sapiens
agcccgggcagccactgccccgcagccccagtgacaggaggagaccataacccccgacagcgccatggcccagattctgccaattcgttttcaggagcatctccaggtgcggccgggcccgg

SEQ ID NO: 242171 - DNA, 122 bp, Homo sapiens
ctagcccacctgcagtggaaccagcggggctgctgagccaccatgctcaagctgaggatgcgtttccaggaacaaaggggcagagggcacgtgggacgtcgttggggcagcaagaggcgagg

SEQ ID NO: 242172 - DNA, 122 bp, Homo sapiens
tcctcccggggcgtcggggtctgagcggagagccacctgggctgggagtgaacttggccccggcgaagaagaaagggggaggggcgccccctccccgggctgaggcgcttcagcccggagcg

SEQ ID NO: 242173 - DNA, 122 bp, Homo sapiens
ttccgctggcccatagtgatctttgcagtgacccaggtaacagattgtactcttttctgacggttcgggcgaaggccaccactgcactgaggcctgggggcaatggtggggaagagactagg

SEQ ID NO: 242174 - DNA, 122 bp, Homo sapiens
ttaccggcctggcactggctttgatcagagtgaccttttccttccaaacgagagcactttcgagagccggagaggatgctggtaatagtggcacagggacagcagatgtgaactggggctgt

SEQ ID NO: 242175 - DNA, 122 bp, Homo sapiens
tatcctctagtttatgtctgctgaagcccagccgatcctttaaaaccctaataaaattatcgccatgaaggtttctcctcccccaatcagaattacaatcctttctattccatactgatatt

SEQ ID NO: 242176 - DNA, 122 bp, Homo sapiens
agctgcacaccgctgagggtcggcggcctccccgcccaccgcctgcagtcacggtgtccacgcacaaggccaagctgcacaccgctgagggtcgggggcctcctcgcccaccgcctgcggtc

SEQ ID NO: 242177 - DNA, 122 bp, Homo sapiens
attgagatttactgttgattccaagacacttgagacccctcagctcctggggccaggatccgttccagagggtagttgaggccagagtagcagggtaggtggaggaactagggaaaaaactg

SEQ ID NO: 242178 - DNA, 122 bp, Homo sapiens
ttctccgcaaagaggccgagaaggtgcgggtctgggggaatagcggaaaaccacagaacgcggccgccactgcgccgctctggctacttttctctggcaccacaaacgccttcccgcgaatg

SEQ ID NO: 242179 - DNA, 122 bp, Homo sapiens
ggagcccgagctgccgccgcaaccaccacccccgcccggccggcccaggatagaagcgaccgtttgacatcagtcttttaaaaaatggattccacatatgagggagatcaggtgttatttgt

SEQ ID NO: 242180 - DNA, 122 bp, Homo sapiens
gtgggaagaacacgggttggagcttggagacctagtgaactactccagccctttacagatcggctgcaagaactctttacctaaaaacttggtgagaggccaggcgtggtggctcacgtgtg

SEQ ID NO: 242181 - DNA, 122 bp, Homo sapiens
cggcccctccgtgagtcttctgtcagtcattggctccctgcggtttccttggggacgtggcgccgccgccggccgggccctccttccggctgggcaaggggccgcggggagcagctcgggac

SEQ ID NO: 242182 - DNA, 122 bp, Homo sapiens
agttccgcggaactcagacgaggagatctgcgcagtctccgtgcgtacgtgcgttaagcccgcgcttttacacaaaccacagcttctcctacgtggccaatgaagagccggagactttctcc

SEQ ID NO: 242183 - DNA, 122 bp, Homo sapiens
cctgggtctccctggtgcggatgcgggggccgcctccattctgctttctgacactgccaccgcggggccaggcttgatgtgaccccatcactgctcagttcactacacagtttcatcttttg

SEQ ID NO: 242184 - DNA, 122 bp, Homo sapiens
agggcctgcgcgtgaccctccgagctctcctgcccggtaactgcatggcatccaccccgccgggtttgggtgctatccttcctgtcgggttcttcaagcgttcttaactccagttgtccatt

SEQ ID NO: 242185 - DNA, 122 bp, Homo sapiens
ccttgggagcactgccgtcctggtttcctgctagtttccgcacttacagaaggccgagaccggggtttgggctaaatttgtcagctcccgtggacgtggcgctgactcatctcggctggggc

SEQ ID NO: 242186 - DNA, 122 bp, Homo sapiens
ccagcttattcctggagagttaaaacacagttactagcactaaaaacattaaaagtgctgcgcgctggcctcaatgactggtacattggagaagctatgcagcagcatccttttctgtggtg

SEQ ID NO: 242187 - DNA, 122 bp, Homo sapiens
attttactggaagtaaggccagatcccaacctgcctcccaggacagggagcggcaagaaccggggacaggtagggacgtgggccagtgggcagctgggtgggagcccaggggtggggaagat

SEQ ID NO: 242188 - DNA, 122 bp, Homo sapiens
aaagcaggccctttacacaccggactccgcgtcttgtcccaatacaaatacatgaaaatgcggttcctcaggtggcgagaacagtgagcacttctgaagcaagcccattaggaacattgaag

SEQ ID NO: 242189 - DNA, 122 bp, Homo sapiens
ctgcgccgcagcacccggttggtcaggaccaagtgggcccgaggcggacgtgagaagggtcgggccaagatggcggtgcaggtggtgcaggcggtgcaggcggttcatctcgagtctgacgc

SEQ ID NO: 242190 - DNA, 122 bp, Homo sapiens
gactcaggccaggagcaagagaaagcacctcaggtatgagtatgcactcacctacatgagcgttttggtggatatcccgaggattcatgacagcctctagcaagaatgaatgaaaacagaga

SEQ ID NO: 242191 - DNA, 122 bp, Homo sapiens
aggcgcgggcccacctggggccgcctcaggctgccagaggtccttctagtgaccgtctctcgtccccttgcgcggtccccagaggcgattggccccggtgcctctcttgtgttccccggagc

SEQ ID NO: 242192 - DNA, 122 bp, Homo sapiens
tcgcacccgcgggacacggcgcatggattccgcgagtacactgtcgcggccacggcatcccgggccagcaccgcggcctcggctccctgctctgccgctctatccccaaggcggctttgggt

SEQ ID NO: 242193 - DNA, 122 bp, Homo sapiens
ccatgaccggggtgtcctctatgaccgggtgtcctccctgactggggtgtcctctatgaccgggtgtcctccatgaccgggtgtcctccatgaccggggtgtcctccatgaccgggtgtcct

SEQ ID NO: 242194 - DNA, 122 bp, Homo sapiens
agggttcagtcccattttattgatatttgggttgtttcccatttttgctcttaataacaccgtacagaacatatttgtgaccataactttctctttaggattatttttttagatgtatgccc

SEQ ID NO: 242195 - DNA, 122 bp, Homo sapiens
cttaagacttttttgcagtacattcaagaatgtagcaataagacatcaaattcggctgggcgcggtggctcatgcctgtaatcccagcactttgggaggccaaggcaggcggatcacctgaa

SEQ ID NO: 242196 - DNA, 122 bp, Homo sapiens
cgaggcccctagcctcggtttcccagcccgctccctcgcttctaaacgtggtgctgctcccgccccactccaggtgactccggccccccagccccgccccagccagcggccggaggaggccc

SEQ ID NO: 242197 - DNA, 122 bp, Homo sapiens
gcgagcggcggcgccatccccagccccggcgtctctgggaagaaaccggggccgagtccccgtcaaaagggaggggacgggccaggatccccaaccaggtcccgcttcctgggctcgcgacc

SEQ ID NO: 242198 - DNA, 122 bp, Homo sapiens
cgccggggaggctcgtccccgagtaggggacgggaacgcctgggtcccggggacgtggggcgcagggtctggggcccgaggccacggacgaagcgggaagccggctaggcagcggtctctgt

SEQ ID NO: 242199 - DNA, 122 bp, Homo sapiens
tccgaatcttgcttccaccccgccccgtcccccactagttggatttgtacataggataaacgggagctgggaatgcacatgtgcatatttttacttagcactaactttgcaaaatatttaaa

SEQ ID NO: 242200 - DNA, 122 bp, Homo sapiens
gcggcaaccggcagcgtccagctcccgcacctcgctgcacatcgcacctgagccccgccgcgaccgcatcgcgctcgctgcgacccattcagaccccccagaaacgccaagccgctcccgct

SEQ ID NO: 242201 - DNA, 122 bp, Homo sapiens
agattgtggagggggagcaggtgaaaatcatattgttaatcacaaacaaacataattaaccggcaactggattaagatacctaatcagtcaaaattatttagaggctcttataaccatcacc

SEQ ID NO: 242202 - DNA, 122 bp, Homo sapiens
caaaaccaagatggccacaagagtgacctctggtcatcctcactgctacactcccaccagcgccatgacaggttacagatgcgatgacaacatcaggaagttaccctatatggtctaaaaag

SEQ ID NO: 242203 - DNA, 122 bp, Homo sapiens
gatctctgaaatctagttccacatatttgcattgacattttatttactaaaaaatcattgcggtaatttaaaatatttgtagggtttgccagggtaaaattctcagattttgggcttacaac

SEQ ID NO: 242204 - DNA, 122 bp, Homo sapiens
aagtcagcaaactttttctgtaaagggccagatagtaaatctttcaggtttttcaggccacgtgatctctgcttcagctactcaactctgcagcggtagagcaaaagtggccacagaaatat

SEQ ID NO: 242205 - DNA, 122 bp, Homo sapiens
ggaggtggagcttgcagtgacccgagatctcaccacagcactccagcctgggtgacagtgcgaacctccatctcaaaaaaaagagagagagagagagacagagagaaaaagtttattgattt

SEQ ID NO: 242206 - DNA, 122 bp, Homo sapiens
tacgcgtgccccgagtgcggcaagctgtttcgccgcagcttcgcgctcctggagcaccagcgcatccacagcggcgagaagccctacgcctgccccgagtgcagcaagaccttcacgcgcag

SEQ ID NO: 242207 - DNA, 122 bp, Homo sapiens
ctgggacttcctctggagggcctgcttctgtctgcaggtgtgagtgcacgcttgtgcatgcgcaggccaaatgtgttcctttttcgaagcatacatggcctgaatgcccgtgtgaggttggg

SEQ ID NO: 242208 - DNA, 122 bp, Homo sapiens
tcgtcacgtcgccttccccgcccctaaatttccagttccgattggtctgtttcatgggaccgcccctctggcccgaccaatgtggaagcctcctcgggtgctccgccctccccgcaggcggc

SEQ ID NO: 242209 - DNA, 122 bp, Homo sapiens
cggtgcgaccgccggaagcccctttcctaactcctggaattccctgtcactcagtcactccgccagccgttcagcaagcattaggcctttcaggcgagggcactgtgccaggcactggggtg

SEQ ID NO: 242210 - DNA, 122 bp, Homo sapiens
cagggaagggtaacagggaacacgccgcaccacgggcatcagggtgggtgaagtagggctcggggagggaggaccagcagcctgggagggtcgtgtggtggctgaagttgccaaggaggcca

SEQ ID NO: 242211 - DNA, 122 bp, Homo sapiens
cctttagaaaacagggagtcaggagccctgggcgctggtcctggctctgccatgcctggccggtgtactcctgggcaaggtacggcacctctctggacttccgtggcttgtcattgaagacc

SEQ ID NO: 242212 - DNA, 122 bp, Homo sapiens
ggctggtgctggtcacttcaggctggaattttctagtcatgcagctttctagtgagaggccgcagtgagctgtggccagtgttggtcattcctgcagtcattactctcccccagcctgttgt

SEQ ID NO: 242213 - DNA, 122 bp, Homo sapiens
atgaagataaattagggaaagccccacctaccctgcccccccccccctccccccccaaatcgtcttcctcccatggcaatgactttaggcgcctgtgagaggcacaaaagcggcaaagcttc

SEQ ID NO: 242214 - DNA, 122 bp, Homo sapiens
cgagacacagtgagagcgagacacagtgagagcgagacacagtgagagcgagacacagagcgagacagtgagagcgagacagagcgagacagtgagagcgagacagagcgagagacagtgag

SEQ ID NO: 242215 - DNA, 122 bp, Homo sapiens
cccctcttgcccttgaaggccggaagtcggtcttacagataaaagcgaaacaggaagtcccgcccctctatggaaagtaaatggtagctcggaagggtcaaaagagtccgcggtttcgccgc

SEQ ID NO: 242216 - DNA, 122 bp, Homo sapiens
tggctccaaagcctgtctcattcctggggctccacccggggccctcacagcagttacaagcgcccccataacagatgaggagggtgtactcagagacaggtgcaccaggagccgggggctgg

SEQ ID NO: 242217 - DNA, 122 bp, Homo sapiens
ttcctcgtctcccggcaaaggaacaatgcgccggcgagggagggagccccgaggagccaacgcctgagcctgccaaggggcccgatgtgggccaagctgcccccgctgccccgcgccgatac

SEQ ID NO: 242218 - DNA, 122 bp, Homo sapiens
tccggggtcgccgcagcccgggaggagtgtctggtctccggcctgcctgtgctgtccccgcgccctgtccactggactcccgagacccttggaacccaggtaacccggggcgggactccccg

SEQ ID NO: 242219 - DNA, 122 bp, Homo sapiens
ggtggccatgcgcccgctgcacctgcacctccctggggtcccggcggtccggagggaccccgcacctccccaggctttgggacccccagcatcggcagccagcgcccccagggtcctggggt

SEQ ID NO: 242220 - DNA, 122 bp, Homo sapiens
tttaactcaccagctccgagttaatttgttgattcgcttaacctggaaactccccgggggcgggtcttgtgctactgaattcccttgcgcgcagcctggggtataataggcgctcaatacac

SEQ ID NO: 242221 - DNA, 122 bp, Homo sapiens
cggaaagatcttttaaagcttcttgagcactttgtcccatgtccctacagtccctaccgtcgcatctggccgggacgggggctgctacctgtgtggcccagtccctctgttctgctgggctc

SEQ ID NO: 242222 - DNA, 122 bp, Homo sapiens
acagactggggcaagcagatggctgcgaaggcgccatttctctgtgtgtccagcagggggcgccgatgacaagcgcgcgggctgcgaggccgcacagactcttacgcaacgatgagggcgca

SEQ ID NO: 242223 - DNA, 122 bp, Homo sapiens
gccccagggtggatggtgcaggtcgctcataccatgttagagtgggcacgtcgcggcatccgctcactcgtgtgtaggtacaggaacttgttgatctgggaggaggcgagccggtctcggac

SEQ ID NO: 242224 - DNA, 122 bp, Homo sapiens
ctagccccatttttccttttaccatttttacatgttatgagaggtggcttagaaatacttcgatttttgcctcttcatcacaacacactgaacgttaaaatcaagtggttgggtttttattg

SEQ ID NO: 242225 - DNA, 122 bp, Homo sapiens
gcccacccacaacagcccggccccgccctcccccacgcagccccgccccccgcgcagccccgcccttccccgcgcagccccgcccgacggcagcccgcccagccccttctcgcccggcccca

SEQ ID NO: 242226 - DNA, 122 bp, Homo sapiens
tccatgcactggacactgcaggccctgaggcatcaggtctcgctggctttgctggccgtccggagctctggcctaggtgcggagtcctgggggtcctggggaacccacctgaagccccccct

SEQ ID NO: 242227 - DNA, 122 bp, Homo sapiens
cccgccccaccgggccacctgcagccccggctggagtgactgctctaggaactgctgtctcgcctcctcctcctcgtcttccacctcgtcttcatcttcctcctctcccaggacatcgattt

SEQ ID NO: 242228 - DNA, 122 bp, Homo sapiens
ggaattgcaaagctttcgctagtctccgcatggccggtgccaatgcttggcggcaatgctcggctcttcggcatatgggcaaaaagagccaaggaagctgaaaaacaggatgtgtgaaagca

SEQ ID NO: 242229 - DNA, 122 bp, Homo sapiens
gtgtgcagcagtaccaatgctagtggctgaagcggttgaaaaacagcataaagccatattcgctcccatgtgtacacacaggcatctgctataacgtgaagccactgcaacttcttttctca

SEQ ID NO: 242230 - DNA, 122 bp, Homo sapiens
ttgctccttctctcctaagtgcaccctttatctctccttcctgcttcactgcctgctgaacggatcctcctacaaatgcttgtaagggtgagagcccacatccctgtcttatttctggtgtt

SEQ ID NO: 242231 - DNA, 122 bp, Homo sapiens
gcggtctgttccgggtcccgctcctgcacgagcaaccagcgcgacagctcgtccccgccccgtaatctcccggctattcggggcccttcgccgagatttctcccggaccagccccgggattg

SEQ ID NO: 242232 - DNA, 122 bp, Homo sapiens
tgttctctatgtgtgtacaccctgtggtactgttcataataggctattcagcaaggctcccgcgcccaccttccagccccagaggccggcgcggaagggcagcaccaaggacagtggccacc

SEQ ID NO: 242233 - DNA, 122 bp, Homo sapiens
ggctgggctccaaggcgcaaggcggcctgacaccaggtacccggctcccggttcctccgacgttctctggcgttcccgggccctgaccagttcctccatctcagaagtcttaatggccttct

SEQ ID NO: 242234 - DNA, 122 bp, Homo sapiens
tctacacatcctgtcccttcccacccagctacccaccacctagccctccaccccaactcccgcccttggctttcagcaaggatggcccagctcacggccacagggtggcaaggggccacttg

SEQ ID NO: 242235 - DNA, 122 bp, Homo sapiens
ctccatgtctgagttcttgacagcatggtcaagccactgaactatattaccagcaaccatcgcttaccagtcttcttgttacatgaggaaaagaagcagctccaatttgtaggagccctaga

SEQ ID NO: 242236 - DNA, 122 bp, Homo sapiens
tcagccttcagccctgtttttgctcagctttttgctcaaaggcctcagctgtgaatacagcgcttgggggggcgggggaggctgtaacttgcgcaagcgcactcaggcagtctccgagcccg

SEQ ID NO: 242237 - DNA, 122 bp, Homo sapiens
tatatattcatctcaatgacctttcattgagtgcttactacagattgtgtatcccttatccgaaaagcttgtgaccagacctgaatagaagtttcaaaaaaagttattgttttatttttatg

SEQ ID NO: 242238 - DNA, 122 bp, Homo sapiens
ctcaagcagtcctcccacctcagcctcccaaagtgctggaactataggcgtgagccaccgcgtccagccactgctattctgaggtcaagtggccctgggttcgaattctggctcagcccttt

SEQ ID NO: 242239 - DNA, 122 bp, Homo sapiens
cgggagccctgggggcacctccccagcccccacgggggagacgatactgccgggaaggcccggactagcccccgcccccgcagagtagccttcggggaacaccgattccaccaggctctcac

SEQ ID NO: 242240 - DNA, 122 bp, Homo sapiens
agcgccgcggctcagggaccaggcgctgatagcgcgcggccgacccccttcccgccgggccggccctgcccagccccctctggcctcagaagaggcgccccgctcccagcctccccgcctcg

SEQ ID NO: 242241 - DNA, 122 bp, Homo sapiens
tctctctgcttccagtctctcctcccaatcactcatatttcttaaaaggagatactgagccgggcatggtggctcacacctataatcccagcattttgggaggctgaggtgggtggatcacg

SEQ ID NO: 242242 - DNA, 122 bp, Homo sapiens
acaccttgtagcattagcaaagcgtgtctgctggaaatagagcaaaaagaaaaaaaacgccggtggaggaaatgtcaggagggactaagaataatttcaaggagcttcagaatttgtctcag

SEQ ID NO: 242243 - DNA, 122 bp, Homo sapiens
gcacacagggagtaagtactgggagtcccagccaccgccgcggaaaatctgggatgccagcgagcggccgcatctcggcgcctgcgcactgtgcccgcgctctcaggcagcgccgttgcgcg

SEQ ID NO: 242244 - DNA, 122 bp, Homo sapiens
gtagctcagactttttcacgtctgttgttatctctttgggaatgctgaatacatacatttcgagaaggaaatgactgttaaactcttaagacttcaggttcatattgctaaactgcccagca

SEQ ID NO: 242245 - DNA, 122 bp, Homo sapiens
atgggggttgtggctgtggagcggaagtgggtctcaaccactataaatcctctctgtgcccgtccggagctggtgaggacagcctgccagagtctggtaagaaagggactcagggtgcgggg

SEQ ID NO: 242246 - DNA, 122 bp, Homo sapiens
aatataaactatttcagtccctcttaacatgtaagacactgactcaaaatacttttataccgtttttttcaagtattgcacaatataggtacaaaattaatatttacgattacatttttctt

SEQ ID NO: 242247 - DNA, 122 bp, Homo sapiens
acagctcgggggtcagcaccttggccatgtggttgttgtgggcgctcaggtcggggaactcgtcctcggccgggaagcgcagcttcagtgcgttgtggctgttggagaagggcatggcggcg

SEQ ID NO: 242248 - DNA, 122 bp, Homo sapiens
caggtccagggtgtgtgacacaggtgacagggcgagagtggggatagcctgtgcctctgccgtacagtggcagagccttctgggaagtgagcctatgctggcaaagtgaattcaaggacaga

SEQ ID NO: 242249 - DNA, 122 bp, Homo sapiens
acgggcctgtatcagccggctccttctctactgaagaaattggggctgaaggaggtgaagcgacttgcttacattcagacagcgctcgggtgggacagctgggacttggcctcacggtgggg

SEQ ID NO: 242250 - DNA, 122 bp, Homo sapiens
tagttcccaggaggcataatttctgctgtaaatcaattaaaacttctagagcgctctacacggtgctaacatgcttttactgcctaatcctcacactgtctttgtgatgcaggtgtcatcgt

SEQ ID NO: 242251 - DNA, 122 bp, Homo sapiens
agtacttcaccatcaattacagctacaaaaccaaactcaatatatgaaggatcatatttccgagtgaaactagcatgaactcttttggttttcccttcttcaggataacttctattgttaac

SEQ ID NO: 242252 - DNA, 122 bp, Homo sapiens
ccgttgctcggttccggtgaaggggcacgtttaccgttgctcacttccggtgaaggggcacgttcaccgttgctcggttccggtgaagggacgcgtctgccgttgctcggttccggtgaagg

SEQ ID NO: 242253 - DNA, 122 bp, Homo sapiens
gcgcgcgcgccctttcttaaagcgccttagtgccgtggacagcgtcacaggcaccgggcacggagaggtgggcagggcacggttaccggcggcgccccggacaacgccacccgcacaggcag

SEQ ID NO: 242254 - DNA, 122 bp, Homo sapiens
ggccagtccagtggagtccagtgtttctctgatgagcccccgtttaatctatttttcccacgtgtgcccccttctagagtataaataccttgagggcactgagcacatgttggctttctgct

SEQ ID NO: 242255 - DNA, 122 bp, Homo sapiens
gactcagccactggtgtaagtcaggcgggaggtggcgcccaataagctcaagagaggaggcgggttctggaaaaaggccaatagcctgtgaaggcgagtctagcagcaaccaatagctatga

SEQ ID NO: 242256 - DNA, 122 bp, Homo sapiens
ctcaggcgattctcccgcctcggcctcccaaagtgctgggattacagtcgtgagccaccgcgcccggcctagttaattttttaatttaatttttttgtggagacgaggtctcactattgccc

SEQ ID NO: 242257 - DNA, 122 bp, Homo sapiens
gtaggtcttaaggctatatcatgattttaagccctaatatcagagactctacctttctcccgagtatcaatacacttcacaaaataaaaagaataaaaactttttctatttacagtgcaaaa

SEQ ID NO: 242258 - DNA, 122 bp, Homo sapiens
cacgacgtgagctggccagaaccagaggcacacgtggccctgatggaatggatccgcaggcggttggctgtgtcccgcagcacctgcacggtcttcacgtcgggcttggcgtcgttggccat

SEQ ID NO: 242259 - DNA, 122 bp, Homo sapiens
cagggccactggtctctgagggtggaacggttgcagggttgggaagattctccgtgattgcggggcccaggaagtgatcctgttcacttcaacctgcagtgactcaccctccctgccctgcc

SEQ ID NO: 242260 - DNA, 122 bp, Homo sapiens
acgtggttccctggctgctccttgtggctccacctcgcgggttttcccgcgcggcgtccacgctgggctggtgtctggttcacagtgccgcctactggagttgacatatttcgcagcaccca

SEQ ID NO: 242261 - DNA, 122 bp, Homo sapiens
cacactcccacctatttgttacacaaccacatcctggtggctgcctctgtgccagggcctcgtggactctgggcatggtgctctgaatgaagacaaacatgaccacacagtctatggtgggg

SEQ ID NO: 242262 - DNA, 122 bp, Homo sapiens
taaaaagttgtttacatacctcatttctgaaaagtcatgggccactggcaagttaggaaacgaaagtgaaatcagctgatagtgacatcagtcagaacaaatgtaccaaagttcagagagct

SEQ ID NO: 242263 - DNA, 122 bp, Homo sapiens
aagccaaacttactttccactgtgctgcttctagtcctgctaccggtgtcctccctgagccgtcgggttaaaagctttccttcctggccgggtgcggtgactcacgcctgtaatcccagcag

SEQ ID NO: 242264 - DNA, 122 bp, Homo sapiens
ccctgagagtggggcggaattcccacgtctctccccgcccggtactgcctttcctcaggacgcgggcctgtcaggctcctctcgcccctggtccgcccgcgtcccccgacccgaggtcagcc

SEQ ID NO: 242265 - DNA, 122 bp, Homo sapiens
gacttttactattaattgcgactagaactatggcaggttagatggtcagaagacattttacgtgacctatgctggaaacccaagtgtttaggttagtcctatgagaaacagttagcagcaaa

SEQ ID NO: 242266 - DNA, 122 bp, Homo sapiens
cctaagtcatggtctcccagccccctctgtttagatcagggaatttcagacatgcacactcgggtagggaatcttatgaacagaaccaggacagggaggctggccggaggttcctgcagagg

SEQ ID NO: 242267 - DNA, 122 bp, Homo sapiens
cgggacgctacgggaatcgagggaacggagcgcaccggggaccccgcggcgggccgaagacggcagtacccctaggctgcagcctgacgctcaggccccaaggcccccagcgccctttgaag

SEQ ID NO: 242268 - DNA, 122 bp, Homo sapiens
gccgcaggaagggtgggcggggccggggttgaggtttttccgtgcacgaggctgcccgggcggtcgcggacatcatctttaggctgtggatgccttggccggggtctccagacgctgaccct

SEQ ID NO: 242269 - DNA, 122 bp, Homo sapiens
ggcgctcctcacttcccaggcggtgcgggggatgggcagaggcgctcctcccttacaaaccgtgagggggccgggcagaggcactcctcacttcgtacatagggcggcggctgggcagaggc

SEQ ID NO: 242270 - DNA, 122 bp, Homo sapiens
acaaagggcgccagcctcctctacgcatccacagccaaaacccgctctccccgtgcccaccggcctggagggcgcccattttgagcacatgaatctgtctactgcacaagactgcatgtcac

SEQ ID NO: 242271 - DNA, 122 bp, Homo sapiens
gaacctggaaaaaaataatctttggtgggacactcctaacctatcaccgctgggttcccacgggccagggtcgcacccacggcgagcaccccttcattttacctctcccctcgtctttgctc

SEQ ID NO: 242272 - DNA, 122 bp, Homo sapiens
gagggcttctctacttgggcgctctgctcctgaagattgtggtgggggctgtctgtgcatcggaggctcgttagcagcatccttggcctctacctgctgggtgccggtcgcatctcttcccc

SEQ ID NO: 242273 - DNA, 122 bp, Homo sapiens
ccggttccctactttccgtgacaaacccattagttcgtgtgcagatttttccattcaggtcgcttctagggcgaacgcttttgttcgctaccactctgtagtgcgagaggaactagagaggc

SEQ ID NO: 242274 - DNA, 122 bp, Homo sapiens
ggccttcctgaggggaggagggtcctctctgggacctccaggccaggcagagacccctgacgacctctgtggaatggatcccaacatgggtctttccacagccagcttagacgctctccccc

SEQ ID NO: 242275 - DNA, 122 bp, Homo sapiens
ctgagctgagcagtcctgaccctaaagagctgccattcctctggggccacggcaggaaatcgcaggcactgagtgggaggaagaggatgaccgggtgttgggatgggtgcacatcgcagagc

SEQ ID NO: 242276 - DNA, 122 bp, Homo sapiens
agtggcagcagggagggccggtgagatgccagagcaaggtagggtcctgtatttggggaccgctgacgtttgggtccccctcccgcggctgttagcgctgcgtggcccgagacctgcggtcg

SEQ ID NO: 242277 - DNA, 122 bp, Homo sapiens
gccactgcttgagtcaggacctcattggctatttttgtccgtgagaagtcctctacaccacgacttgggaggcagcctgggagaaagagaaattagtcgtggctcctttaaggggtccgcgg

SEQ ID NO: 242278 - DNA, 122 bp, Homo sapiens
gggatttaagtaggggtagtcaagacaacactttgcaatgtcagtgaagatctgattgaccgtttgggtggaagacaggacacacactgtagctgggatagtggtaacatccatttcagtgc

SEQ ID NO: 242279 - DNA, 122 bp, Homo sapiens
cgcagttctcaggcctcacaactcgtgttattttcctgttcttgatcattgccatcctaccggcgtgaagccgcgtcttgggtgtgaagtggtgtctcatgtgcttttggtgtgcattttcc

SEQ ID NO: 242280 - DNA, 122 bp, Homo sapiens
aagggaattagaccaagttcacaagcacaaacactttactggcacattcagattggaaatcgagggcttctgctcccaggtcagaactaaatgccctttctagctagggtgttctttgatct

SEQ ID NO: 242281 - DNA, 122 bp, Homo sapiens
accaggaagggggagggggtcagaagtttaaaaattttaccaccagtctctgattacgtgcgtatatatgtgaggagaaacatgtgcaaaggaaggttatatatttctgagtactgggctct

SEQ ID NO: 242282 - DNA, 122 bp, Homo sapiens
ctggctaacttttggtttttttgtacagatgtggtttccccatgttgcccaggttggtctcgaactccttagctcaggtgatcttccaccttggcctcctaaagtgctaggattagtggtgt

SEQ ID NO: 242283 - DNA, 122 bp, Homo sapiens
ctctctcagcatgttgtctctgtaacttagcttcctctcctgctcctgagttgtgtctgtcgccttccctcctactcctccccctccctccccatgtctcaagctgctccctggctctctca

SEQ ID NO: 242284 - DNA, 122 bp, Homo sapiens
acaaggcaaaacctgaaactgttaagagacatgcagcgtcagtttgattcccgctgcggacgaggggcagcctgcacatgctgaggatggaccccgaccctcctgttgctagcaggctgagg

SEQ ID NO: 242285 - DNA, 122 bp, Homo sapiens
ctcccagcctacgcgcgttcaccctggaccttcctcgcgaccgcgcctgagtcgcaccagcggcagagagcgatttcaccaagcatctaagagttctttagatctttaggaagtctaaggca

SEQ ID NO: 242286 - DNA, 122 bp, Homo sapiens
tgcttctcttggtacctccatgaaatctgcagggctctgcaaagaacagtttgaagaccacggatatagcctaccttctaatttctcaaaaagagaaactgagaccaagaaaggcaaaatgg

SEQ ID NO: 242287 - DNA, 122 bp, Homo sapiens
tcttccagtccaactctgaagtaaccgccccttacccaagctttctttaaactggaataacgccagcagaagaatgtagtaggtgtgcttcaagtgtcctcaaataattcccgcagcttcca

SEQ ID NO: 242288 - DNA, 122 bp, Homo sapiens
cacctggaatccgaggctcaggcaagttaacctccacagtcacacagggagtagccaggacgcaaaatctgtggggtgggcccgtgggcacccaggacagcacgcagcccttccacgggagt

SEQ ID NO: 242289 - DNA, 122 bp, Homo sapiens
gttctaggggagaggggagtcttaggtttgactcataagtttactgcaatacactcatcacgcaactccactccatccccccacaggcaacaggactgaacctactgcaagtcaagaaacac

SEQ ID NO: 242290 - DNA, 122 bp, Homo sapiens
tccactcccagggctggggatcctaggagggggagggtcaccctcctttcccggctctctcgacccccaacctccagggccttcctcaagtcaaggagcccaaagaaagctcaaggagggga

SEQ ID NO: 242291 - DNA, 122 bp, Homo sapiens
cggatgctccatgtagggaatggctctgccatgaaagcccaagaaccctgagtgtgtccacgtgggccatacagggaaggcctggtccatggtgatctctgtctgggagggactcaggagcc

SEQ ID NO: 242292 - DNA, 122 bp, Homo sapiens
ctgcaagggagaattcctgtcattcctggcctcagttctgcagggaccgagggcgagacacgcctgggcccaggtgtggcgtctctgtccccatctggttttaggtaacaagcggagcttct

SEQ ID NO: 242293 - DNA, 122 bp, Homo sapiens
tctccgctcattttactttcatgggaccagtgattagtgatgaatgcctgagtgggtaaacggaggcactgagtcaatgaaagaattctctttggtcttttcaagaaaaagccgagacaaaa

SEQ ID NO: 242294 - DNA, 122 bp, Homo sapiens
cagtccatccaccatacaggatgtgagtccagttcggatcattccaacagaaatgcaaaccgagacacccctgcaaacgtgtgtgtgtgccttttccttgctcggtagatttctctgcagcc

SEQ ID NO: 242295 - DNA, 122 bp, Homo sapiens
taagtactcgggctttggcatcctaatgtccctagagaaatcatctaagcagaggagtggcgtcagcagattcgcattttaaaatgctacttcatttgcagtgtggagcatggactataggg

SEQ ID NO: 242296 - DNA, 122 bp, Homo sapiens
ccgagaggaaggtggatgacccgggcgtgggggtgattacccagaccaaggcgcgtcccacggggccctgctacttcgcttttaaacaagcctcagggaggaaaccgggagcccgggccaag

SEQ ID NO: 242297 - DNA, 122 bp, Homo sapiens
ctcataagtaaagttggcttggagagaccagaagacgtggctttcacccagaccgatgaccgctctgcagtgccaaagggtgtggcgtcccgattccagggccctttgcttcctatccactt

SEQ ID NO: 242298 - DNA, 122 bp, Homo sapiens
cggatcatgccccctgctcctcccactactgctttgcgcctgcgcggaggctcggggagtcggcgccatgaccccatcgaggcttccctggttgcttagctgggtctcggccacggcgtgga

SEQ ID NO: 242299 - DNA, 122 bp, Homo sapiens
ttttcagatgtaatttttatctttgctccgatcctcatttgctggtgtgggtgagggatccggcggcatgggctggtttcacccccttcacgaggggccgcagagtcacacgctggtgccgg

SEQ ID NO: 242300 - DNA, 122 bp, Homo sapiens
tgccaagcacacgaggtctttcctagcaccgccccctgcctacagctccacacaaaggcgcgtgggtgccggctggaccctgctccaaagttgagcggagagataagaaagagccgagcggg

SEQ ID NO: 242301 - DNA, 122 bp, Homo sapiens
catcatctgagctctccacagagtcactgaggacatttcgaaggtgccagggggcaccgccgcccgggggaggaccacctgttaaagggaacacatctgttaaccaagcctgagatgttgtc

SEQ ID NO: 242302 - DNA, 122 bp, Homo sapiens
agggcggcatgaggggcggtggaaatccccgctctggttaggtgaaggtgcctgggggaccggtgtttccccactggccaggcagggacccgggtagatcctctccagttctcaccaggaca

SEQ ID NO: 242303 - DNA, 122 bp, Homo sapiens
agacctgatccgccagagcactaaggactccccgctctgggagttcctgagcctgggctacgcgctcatgctctgccctttcgtcgtggtcctgggcggcatgttcttcctcgccactgcgc

SEQ ID NO: 242304 - DNA, 122 bp, Homo sapiens
cacgtctcgctccttggagcccagactgagggagcgtcgcgaaagttgcccgttttggaacgctcccatttggctctccaaagggaagaattggttaaatagttgcactgaaaataatgcga

SEQ ID NO: 242305 - DNA, 122 bp, Homo sapiens
tctgaggaggcaccggcagctcctctaggtactgcctgagatgcgaactgcagctgctctcgccgccagtccgtataaaataaagttcttggagcagttgcggaggcttctgcaatggggtc

SEQ ID NO: 242306 - DNA, 122 bp, Homo sapiens
ctagagaaactcaactgtagcaacccagccttccccaaacagccccattacatacatacccggacaaaactgtcatccaacctcactgactgttgtgcatctccaagagcttcccggaacct

SEQ ID NO: 242307 - DNA, 122 bp, Homo sapiens
gatttctcggcgcgcttgtcccgattgggaactgtgacgttaggagattttgcacaagcgcggatgaacacacacataacaaacacaaacacacacataccccgcggggattttttatccac

SEQ ID NO: 242308 - DNA, 122 bp, Homo sapiens
gggctaccacgcttccaccagggccgctgctctcaccataagcttcagactctcatctcccgagatcttgctcacagcgcagctgccttccgctcacacaggccagaggggccaccttgtct

SEQ ID NO: 242309 - DNA, 122 bp, Homo sapiens
ccgacggcccacctgggcttcgtgaacagtgggagggagagtctggggccaggagagggacggtgcaggatcagggaaaggtgagtcctaggacgctgaggctctagaaaagtcgagagcgc

SEQ ID NO: 242310 - DNA, 122 bp, Homo sapiens
cctaagagtacttactttattttttagaaagaacccggagctgctgatgtctgagggagtcgtttcaacagagactagaatatcgagagagaaaattgatccagctctcttgtctggtgctt

SEQ ID NO: 242311 - DNA, 122 bp, Homo sapiens
gaagggagagagagagagacagagacgtaagagacagtagtgggcacacagacgcgcgtgcgcgcgcacacacacagacacacagacacacacacacacacccataacgcacacagacatac

SEQ ID NO: 242312 - DNA, 122 bp, Homo sapiens
ggcctcgttttccatctctggatccttccagccgtgcaaacatacacagtgttgccatggcgactctgggacagacacatgcatgagagaaaagcgtgaggcaaaatctctcctctgatgat

SEQ ID NO: 242313 - DNA, 122 bp, Homo sapiens
cagcgaggtggatggggtggccagaagggggatggagtgggaaggcggtttcccccggcccggagtcgggccacccagtgcccgggcctcctccaaccacctcggccatactccgcaaatcg

SEQ ID NO: 242314 - DNA, 122 bp, Homo sapiens
ggaactgccaccactagcttcccccccttctcctagcctctgtgtggccctctcccgcggcgggccttccccattggccagccaaacacaaccgactgcggcagccaataggagccgctctc

SEQ ID NO: 242315 - DNA, 122 bp, Homo sapiens
gtccaaagggcactgatgtggactgccaaatgtttgcagtgcactttaattacttctctgcgaacgaaagctttcctgtagttagcagaaccccttgttctaactgtcgtttgggaagattt

SEQ ID NO: 242316 - DNA, 122 bp, Homo sapiens
cggacggctgcgcctccttctctggttctcttccttgctgggagtcttgctctgtgctggcgccggcgctcatccctccaccctcgactctagggacagtcttaaactctagggacaatcca

SEQ ID NO: 242317 - DNA, 122 bp, Homo sapiens
tactcgagaggctgaggccggaggagcgtgtgagcccagtaggcagtggctgcgctgagccgtgattgtgccactgcactcccgcctgggcaaaagagtaagatcctgtctcgaaaaaaaaa

SEQ ID NO: 242318 - DNA, 122 bp, Homo sapiens
atcctggccctaccccaggcctcgccctcatgacgctcatcctggccccaccccaggccccgccctcctataagctcatcttggccccgccctagagtccgcccccaggacgctcctcctga

SEQ ID NO: 242319 - DNA, 122 bp, Homo sapiens
tatggttcctcagcagagtccacagggccctccctgtgctacagcctggagcctgtcaggcggtgagctgaagccacgactgcactcacctcatgggtttgcggggagaatgattcacccag

SEQ ID NO: 242320 - DNA, 122 bp, Homo sapiens
gccgggtgcacgtcgcggctgtagcccagcttctccaggcgcgcgctcagggccaggtagcgctgcgtcagctcgcgcagcttcctctcgtccacggagccgtccagagacttggtggaggt

SEQ ID NO: 242321 - DNA, 122 bp, Homo sapiens
tgccgcccccgccagtgatgccggggggcggctacggagactggcagccgccaccgccaccgatgcccccgccacccgggccggccctcagctatcagaagcagcagcagtacaaacaccag

SEQ ID NO: 242322 - DNA, 122 bp, Homo sapiens
tagagactggattccgctaggttagccaggctggtctcgaactcctgacctcaggtgatccgcccgccttggcctcccaaagtaccaggattaaaggtgcaggccaccgcacccagcctacc

SEQ ID NO: 242323 - DNA, 122 bp, Homo sapiens
cgtgcaaaaattataataataatagcaacaataatagtctcatccgccctggagaccacccgtgcccccgtggcatccctcaaggactctccgggcggtggcagccgcccaccctggggacg

SEQ ID NO: 242324 - DNA, 122 bp, Homo sapiens
gagaagaagtttcgcggctggtcccggggcggcaggcgcacgggacgctggcggcggcggcggcttccgacttgggctcagaccccgccgctccagacaagtccccgcgactgcgacagtgt

SEQ ID NO: 242325 - DNA, 122 bp, Homo sapiens
ggccagaacggcaagagtgtccagtatgtaaagctgggatcagcagagagaaggttgtcccgctttatgggcgagggagccagaagccccaggatcccaggtgagagactggaggtgttgct

SEQ ID NO: 242326 - DNA, 122 bp, Homo sapiens
ctgggctgagccaaagggtggtgaccctgccacgtcctgccgggtatgggagtggcaatgcgagcctagtgctgcagcattctagacctggagcgggctagaacaggcttggtgttgtgagg

SEQ ID NO: 242327 - DNA, 122 bp, Homo sapiens
atctttggtcctcctctgtcatctggaatactccacttggtaaccagcatgatcttataacgctagttttacccttgtcagcactttgccgaaaacctcaaataaagactttttaaaaaatg

SEQ ID NO: 242328 - DNA, 122 bp, Homo sapiens
tgaaaatgattaggaagaagcaaatggacatggcaagtgcagacaagtcatgagagaccccgactactcctcagccacatcgcaccaacaattctcttcaggtctaggatggcagtcactat

SEQ ID NO: 242329 - DNA, 122 bp, Homo sapiens
ggggctgacgggctgccgagaccctgggcccacgtgacggacaggtggggccggcctgcgcgctcagttccagagaccacctggggaacaggagagggagatgggcagtcagccccaaagcg

SEQ ID NO: 242330 - DNA, 122 bp, Homo sapiens
tcccctggttaaaacaacagaacagtttctcattgctcttaaaatgcaagaacccaaacacggcctatgagagcctgcacagctccttccagcacctgcaaccccatctcccaccacactac

SEQ ID NO: 242331 - DNA, 122 bp, Homo sapiens
agaaaaggctctgggcagctgccttggctgggacctccaacctcaacttacatacaagcacgtttgtagagttagaaacagaacttgagtcagaaaaggaatgttttttgtgttgtattaac

SEQ ID NO: 242332 - DNA, 122 bp, Homo sapiens
taggtaggtaataagagagtatcccaggccataataggaaacagaagcattgaacagaagcgaaggcacagcacggagaactaggagccttgcattctaagcttgaacaagccccttagcat

SEQ ID NO: 242333 - DNA, 122 bp, Homo sapiens
ggaaagctcgttcgcctacaaataaactatctgagagactgtgtcttccaggaagcttctcgtcattgttgggggaaatgcagacaactcactttggtcattgcaatggtttggatgtggtt

SEQ ID NO: 242334 - DNA, 122 bp, Homo sapiens
agctcaactcggacaggccccgggaaagtaagagcttggggggagacccacaggcccacacggcagcactgcgaggctagaccgtaaacatgggtcaattgaatatttataaacaggatact

SEQ ID NO: 242335 - DNA, 122 bp, Homo sapiens
aacacttaatgtccagagaattcacattaaccagtatgtgacgtttataaaacatgctgtcggggaacatactgggcggggtctcgattccctgttgtaaaatgttgtgtcactttactaaa

SEQ ID NO: 242336 - DNA, 122 bp, Homo sapiens
ccacacttacttgtggaaagaaagtgcctcccctgatgtgttcatcgcggagaggtcgcacgtgtctggctctgtggcgcaatggatagcgcattggacttctagatagttagagaaattca

SEQ ID NO: 242337 - DNA, 122 bp, Homo sapiens
cagagggcgcgggctgctgatgcttggcttggagcccgtgggggagacctagttcggctccgccatgccggccgccgggagtaacgagccggacggcgtcctcagctatcaggtagggcccc

SEQ ID NO: 242338 - DNA, 122 bp, Homo sapiens
gtgtgtccactaagatagtggtgacaaagggtcaggccacaatacctgcacgcgtgcacgcgcgcgcgcacacacacacacacacacacacacacacacacacactctgaagctgccaagaa

SEQ ID NO: 242339 - DNA, 122 bp, Homo sapiens
gcgtagactcactccagtatttaagggaagcacctactatgcgccactcactgttccaagcgctgaggatacaagaattgaacttggcaaagtttctaccccctggagtttacgggacaatt

SEQ ID NO: 242340 - DNA, 122 bp, Homo sapiens
gaggagccacgggtcaaatgcaggaggccacacctgcctgcccaggaggactgcaggagccggatccttaacacctggaggggagcgggtgggtgcggtggcgtacatctgtaactccagca

SEQ ID NO: 242341 - DNA, 122 bp, Homo sapiens
tggttggcctgaatctcaagcagttatgtcatagagagtcctacattctcgtcctggaatcgccacactcacagacaagtcagaatgaatggtcactcagggcatagtttgcttgatgttgt

SEQ ID NO: 242342 - DNA, 122 bp, Homo sapiens
tacatgcacacacgggcgcacatgcacctagggacacacacgtgcacacacgtgcacacacgggtgcacatgcacataggggcgcacatgcacacacgggcacacatgcacctagggacaca

SEQ ID NO: 242343 - DNA, 122 bp, Homo sapiens
ccctagactgtgaaatgggaggaagaattgtgttgggcccaatggccctgggccagtatccgtcagcctggtgtccagcccctggtgtgctgaagctcatgcccttcctggtgccctagttt

SEQ ID NO: 242344 - DNA, 122 bp, Homo sapiens
ggcgaggactagggagccgcgggtgtgggaggccgagccgcagccgagcagcatgctggccgccacccccactcggcgcccccccacccgagcccgggctgctgggcggccgccgccgctgc

SEQ ID NO: 242345 - DNA, 122 bp, Homo sapiens
aggtctcaaccttggaagggcatcagcatcaccccagcatcacctggtattgccgggccccgcccccagaggatctgattcgaaaggccagggtggagcctgagaatttgcatttccaataa

SEQ ID NO: 242346 - DNA, 122 bp, Homo sapiens
tccaaaactactcagggaggtcacaccccacaaggggtgggcctgggcgcttgcattttgcgcaggcgcagggccttgggcggattctgtgagacgccaatgcagcggagaaggcggcaggg

SEQ ID NO: 242347 - DNA, 122 bp, Homo sapiens
caggttgaggtggtcgtgaagggtggacttctgtgtgaagcacttgccgcagatgccgcacgagtgtgacttgacaccacgatgcacgttcatgtggcggttgaggttgctgctgtggttga

SEQ ID NO: 242348 - DNA, 122 bp, Homo sapiens
ggggaatggcgtggaacctgcgggaagaagcgaaagatgcccaggaggcctctgtgagcccggcagcccctgctggccgcctgcccaccacaccgggaacagaggcctcagcgtttctgtcc

SEQ ID NO: 242349 - DNA, 122 bp, Homo sapiens
gcagagagttttagctctgggaggtttggtgtcttaggggaaatcacattgtcacatgctcgtgaacaggtacccagggttccaactgcatctataacattgggtgggccggcttcttacta

SEQ ID NO: 242350 - DNA, 122 bp, Homo sapiens
cccagctctccatctaagcatatctgctctaatgcattgatctctggcttgctgtccttccgtccatcctggatcaatggtcagaaataacttaagagggcacagggctttctctcagtgtt

SEQ ID NO: 242351 - DNA, 122 bp, Homo sapiens
aaaatggttccccaggaccttaacactttttcccttgatgcgattaatctagaagagtcccgctgtcttagaaatgtccactctgtcccaagtgaacaatgccctctttataacatctgttg

SEQ ID NO: 242352 - DNA, 122 bp, Homo sapiens
cggggccgccctgcgagaggttgtcaccaacgcacgtgacctggcgcccggccggcggcgcgctcagctccgaaacaagcccgggcaacaaaaaccgggagctgagcgtgaaggcctgggcg

SEQ ID NO: 242353 - DNA, 122 bp, Homo sapiens
attttggagctaggtaaagcattctcccattgctactgtttcagggttagacatcagtgacgagtagcctgggatatggcactggctcccaggtatgatgtatttctttgatcctagtcttt

SEQ ID NO: 242354 - DNA, 122 bp, Homo sapiens
tatagtctctaaaagtttgtatgccctagaagttcacattgaatttcgatgaaaacgactcgcttcccttccatccaattgcttgcgactgtcttacccgatctttccctttccttttttcc

SEQ ID NO: 242355 - DNA, 122 bp, Homo sapiens
ccagggagcaaaatggccttgcagcaggtccattctcacagaagcctgcaagcttagatccgctggattagaatccccactagccagcatagcagcctggagtacgccagagatgaccgagt

SEQ ID NO: 242356 - DNA, 122 bp, Homo sapiens
attccattaagttaggagcagcgctgataacgactggaaagttcgacggctgggtgggcccgcgacccgcaggcctggcgagcaaccatcgaaaataaaacaattgctgtccttggcggcaa

SEQ ID NO: 242357 - DNA, 122 bp, Homo sapiens
ctactcaaggggcatccacggagctgggtcagcaaacataacactggtcatctgagcctgcgcccgcccttcctcccaggccagggcgcccccaccccctgggtttttcctccgtggacgcc

SEQ ID NO: 242358 - DNA, 122 bp, Homo sapiens
tcatcggatgcctccctttctggagcttgcggtgccagcagcagaagaagacgatggtggcgatggtgcccagcagaagcaacaagaggaagagggcacattggatgctgtagggtctcagc

SEQ ID NO: 242359 - DNA, 122 bp, Homo sapiens
cttgccatgcttctcccgagcctgagcccgccccacgctgggcaccaagtccaccttgtccgcagcttctcagaatgaccaccagagggcgcagttcctcaccgcgggcgcttgcctgcctc

SEQ ID NO: 242360 - DNA, 122 bp, Homo sapiens
aggggggccgcaccttgggcgtgcagatgggacttgaggctgagctcagcctcccgcctgcgctgtaacccgggctctcctgccctgctgggcctcagtttcctccttggcgaattgagaag

SEQ ID NO: 242361 - DNA, 122 bp, Homo sapiens
gcccgggaaggcaagccccagtcaggcggaaggtagctggctgcggggcgcggcgactggcgggcggcgggcggcgggaggcgccaaccgccacagacgactcccagctggctgagggcggg

SEQ ID NO: 242362 - DNA, 122 bp, Homo sapiens
ccgcccgcctcgcccgagggccccgccgtcgtgcccatctgcaggaacatacttttgatgcggtggacgttggagccatatttcttgtggtgggcccccttgggtgcctcgtcgggcccggg

SEQ ID NO: 242363 - DNA, 122 bp, Homo sapiens
ttctaactgctcttgggaaatgagtgggtctgccaacactgggcctgccttcccacacagcgggagaacttgccccctttacacaggacagggatgtgttttccagtttgccacagtccctg

SEQ ID NO: 242364 - DNA, 122 bp, Homo sapiens
aggctgtaaaagccccacaacaggacatggagatcagtccagacccacagtagaaccaatcgagcggaggaaaccgcggcgttagcgtgacccggatgcgcatcgctaggaaccggaagtaa

SEQ ID NO: 242365 - DNA, 122 bp, Homo sapiens
tgaaccaccaggaggaaaagcatttgaggtatttccatgggaaatggtagccaacaaaagcgccgttgggtggtattctagttaattgcaggaaggcgggcagccctccaggatattacctt

SEQ ID NO: 242366 - DNA, 122 bp, Homo sapiens
cccgtcccttcccatgacccgctcggctgcagcggccctcggtgggcacagtcaccgggccggcttccccgcctgtgcttcctctgaggggttccccagcccacagcatggtccagggccgg

SEQ ID NO: 242367 - DNA, 122 bp, Homo sapiens
cacgctggccctgggagagggaaagattgtcccccgctgcgcgcactgagggcgcattctcggtcaggcacttggctaagcgcggtagctatagatacagatagagacatagatcgcgctcg

SEQ ID NO: 242368 - DNA, 122 bp, Homo sapiens
ctgcgtctgcgtaaactcagttatatttaattacgccggcgcctgacactgatgtaatcacgttccctccgtattgacgttagtgcatgctcagttgctaattttgaaggcgggtccgcccg

SEQ ID NO: 242369 - DNA, 122 bp, Homo sapiens
tatgagcaagttttgtgccctctctgtgcctcagtttcctctatctgcacaatggtgatacgtgctgaataatttttgctattattactattgcttcattcctacaagatggaggccctatt

SEQ ID NO: 242370 - DNA, 122 bp, Homo sapiens
ggctccggacgggcggactggctggcaagtgcgcagtgccggggcgagctggcgaggctgcggcgctctgcggctgcgcacgcccggaaccaggccccccctccccgcccccaccccaccca

SEQ ID NO: 242371 - DNA, 122 bp, Homo sapiens
ggtgatccacccgccttggcctcccaaagtgctgggattacaggcttgagccaccatgcccggcaagaactgttgttttctagatgccagatgaatgagtttagaatgacctatttgaggag

SEQ ID NO: 242372 - DNA, 122 bp, Homo sapiens
cccctggaaagggttccaagtcctttagtacccgacgctgtctgggaattccgggcgtttcggctccttggtcgcagaggcaggaggcgtgcgtggcaggagggttcgggttatatactcct

SEQ ID NO: 242373 - DNA, 122 bp, Homo sapiens
gacagagccagtctcaggctggccacccctgccggcggctggagagccccactgtgcctccgcttgtctcatggaaggggctcacctgaccgtttgaacctcagcggccctggcccgccact

SEQ ID NO: 242374 - DNA, 122 bp, Homo sapiens
gccaggccacctgcagacagggccagaagcacagcctgagaatgctgccatgtctgccctcgacacctgctgccatcaagctcccagcagccaccgggccactttccttccccatctgagcc

SEQ ID NO: 242375 - DNA, 122 bp, Homo sapiens
acctgcgctcctggaccgcagcggacactgcggctcagatctccaagcgcaagtgtgaggcggccaatgtggctgaacaaaggagagcctacctggagggcacgtgcgtggagtggctccac

SEQ ID NO: 242376 - DNA, 122 bp, Homo sapiens
tatttttaaagcctttgattatttttctaaaaatgtttttgcatgcttatagcctgatgccgtaaatgttttatgagtttaatgtacagcacctctaggtgctatttaaaattgttttttct

SEQ ID NO: 242377 - DNA, 122 bp, Homo sapiens
ggaaggtgaaggggaagcaagcacgttttaccatggtggagcaggaaaaagagagtgaggcgggaagtgccacacactttgaaaccatcaggtctcatgagaactcactctcactatcatga

SEQ ID NO: 242378 - DNA, 122 bp, Homo sapiens
tcacggttgccaggggctggggagtgacaacagagggatgggggtgactgtgaaagggtacgtggtttctttcccagaggataagaacgttctaacatggcctgtcctgttggcttcacagc

SEQ ID NO: 242379 - DNA, 122 bp, Homo sapiens
ctcccccccactgttatctttattctcttatcctactcctctccatgcccctcatctcttcgtttaggtttttgccacgcaggtcttctctgtaggcacccctccatggatgcgcgaggaac

SEQ ID NO: 242380 - DNA, 122 bp, Homo sapiens
cttgatgggcataggtgagtacatcctgctggtgtcctggtccatgagccagggtgcgtacggttgccggaggtcacctttaggccatgtgggtttcctcagggagctgacctgaatcccca

SEQ ID NO: 242381 - DNA, 122 bp, Homo sapiens
gacgcagcatcctggcggccccagctcggccccacccgctccgccccgcccccggcctcgcgccgcccaccgctctcccaggccgccgggggtcgctgcccatcaccctcgggcccgacccg

SEQ ID NO: 242382 - DNA, 122 bp, Homo sapiens
gtccctcagcccactcttccccacgcttctctctggtcatgcccaactggtcacatgggccgtggaacacagcctgcttgccagtaattagcagctacgttatggcaggagataaaccaaag

SEQ ID NO: 242383 - DNA, 122 bp, Homo sapiens
tgcaggaggagctgaacgagttcgtggagagcggctgccggacgttggaggaggtgaccgcgtccctgggctgggacctagatagtctggatcccggggaagaggaggcggcggaggtgagg

SEQ ID NO: 242384 - DNA, 122 bp, Homo sapiens
ttaaaaattatttgtggccacgcatagtcgtcacgccttgatcctagtactttgggaggccgaggcgggtggatcacctgaggtcaggagttcgagaccagcctaggcaacatggcaaaacc

SEQ ID NO: 242385 - DNA, 122 bp, Homo sapiens
ccccggtattaaaacgaacggggcggaaagaagccctcagtcgccggccgggaggcgagccgatgccgagctgctccacgtccaccatgccgggcatgatctgcaagaacccagacctcgag

SEQ ID NO: 242386 - DNA, 122 bp, Homo sapiens
tacacagtaggtgtatatatttatggggtatatgccgtattttgatacagacaaacaatgcgtaataattacatcagggtaaatgaggtttccatcacctcagcatttatcctttgtgttac

SEQ ID NO: 242387 - DNA, 122 bp, Homo sapiens
tcactttgtcctttctcctgtatccctcaatgcttttctcctgtacttatcatattataccgcaattttgttgttaacttattctgtcttttgcactggattataaagccctttagtggagg

SEQ ID NO: 242388 - DNA, 122 bp, Homo sapiens
tgcttggtttccagaacatctctgcggggcgcagggccttcctgtcagttgaatcgtgctcggcttaattaacggtctcgttaactgggcaggcccgacccgggacgtttaatcaaaaaggc

SEQ ID NO: 242389 - DNA, 122 bp, Homo sapiens
gtgagagaaaccttgattgcaccgagcagtccgtccctcaccttccccagcccctgcagccgtggatccatgtgctgtccctgtggacttgctggttgcggacatctcacctcaccagagtc

SEQ ID NO: 242390 - DNA, 122 bp, Homo sapiens
gccccgtggccctgttccagcagctggccacggcgcactatggcttcccctgggcccacacgcacctgtggctggttgacgagcgctgcgtcccactctcagacccggagtccaacttccag

SEQ ID NO: 242391 - DNA, 122 bp, Homo sapiens
gtctgggtcaaggatggcacagggctggtgccctcggagcgtgtcctggtggggccccagcggctgcaggtgctgaatgcctcccacgaggactccggggcctacagctgccggcagcggct

SEQ ID NO: 242392 - DNA, 122 bp, Homo sapiens
accttgtgatctgcccacctcagactctcaaagtgctaggattccaggcatgagccaccgcgcccagagtccttagtgatttttacaccatgaattgttgaagccctaagccagagccaagg

SEQ ID NO: 242393 - DNA, 122 bp, Homo sapiens
ctcaagtgcacatatggtctagagcgcagcctccaccatgttccaggcattcagacaccccgtgctacagaaaaggaggctgacctacaggcccctggggcctcagggttgcagcctcctga

SEQ ID NO: 242394 - DNA, 122 bp, Homo sapiens
tatagaagaggggtcccgagcgcggatgcgtgaggattatgacagcgtggagcaggatggcgatgaacccggaccacaacgctgtgagtaataatggaacctgtgaggtatccgtgtctgtg

SEQ ID NO: 242395 - DNA, 122 bp, Homo sapiens
ccgcgctgtgtggctaggcgggaggcgcgcgggcggaggcagttgacaggaggaaccgcccggcagcagctgccgccgccaccaccgaaggagccggaaccggagcgggcaggacctgaggc

SEQ ID NO: 242396 - DNA, 122 bp, Homo sapiens
tgacgttgttaactcctgtagccgaatctaccgctcttccaaacagtgccggaatcgctacgagaatgtcatcattccacgagaggaggggaaggtaagcacggtctcgtttgtccttcgag

SEQ ID NO: 242397 - DNA, 122 bp, Homo sapiens
cccttttttccatgtaaaacttgagcagagcatttggttcccttatctgccagcaactggcgccaggaggaccgtgctcccaggagatgcggagcttgtaggctgagccctgcgtcgggcgc

SEQ ID NO: 242398 - DNA, 122 bp, Homo sapiens
tgggcagccccctgtgggggtggtttgtccgtgctctctgtctactctcaaagcagcatacgcttctataaccaggaagttcaggaagagcttcatgtgcttggattgatggcaacatggtg

SEQ ID NO: 242399 - DNA, 122 bp, Homo sapiens
ataggaactcagagggtcagtttttctccagcatgactctctgggggctagcgatgaagacgctgcagaatgaaaacgagttagaccagtgatgtaccgcgcttctccacggtagaggcgtg

SEQ ID NO: 242400 - DNA, 122 bp, Homo sapiens
cgagacagaatcactcgactgggtgatgttcaatatcggttggatgaagatggtttcctacgtcaaaggggcacggaaatctttgaatatagctccaaggggcttctaactcgagtttacag

SEQ ID NO: 242401 - DNA, 122 bp, Homo sapiens
acaacggggagaggaggcgcttgggggcttctggggacccgggctccacgaagccgtctccgcgaccccttcccgcccagctcctcactcacgccttcccggcaaatcttccagcctgctgt

SEQ ID NO: 242402 - DNA, 122 bp, Homo sapiens
tcctcgggagaccccgccactttcctggagcgtagcctgccaccccccgtccgggaaccccggattctcacggcagagaacagacaccatacttaagcacaggctctcgcatccgacatcag

SEQ ID NO: 242403 - DNA, 122 bp, Homo sapiens
aacccatgtggccaggctgggactgctctttctttattctagagcagcaggactgctttgcgtagctagctcttcctctctcctacactcattgccagacaatacagtatgcagaacccagc

SEQ ID NO: 242404 - DNA, 122 bp, Homo sapiens
aggggcgcacaggaggcgggagctgcacgggtgactgtggggtggcggccgtggccagagcgcagggagggagacgggaggccacccggctgccgggtttcctcctggaggctccgtggcca

SEQ ID NO: 242405 - DNA, 122 bp, Homo sapiens
tgaggagccatgaagccagggcgtaaagtttgccctggcaggtggctcatccctgtggcccggccggcgccaggagtcgggcatcccggacttacctggtctctgcagctcgccagacgccc

SEQ ID NO: 242406 - DNA, 122 bp, Homo sapiens
ccagagccctggggtgctcaggcgccgctacgcgtgcatcccctctgctcggcagttctgcgcttttgtcctaatgagcgcggactagatggcttgattttcaagataatgatcaacccagc

SEQ ID NO: 242407 - DNA, 122 bp, Homo sapiens
tggagaatctgcacgtcacagaggacacgatcatggcgtttgcgttccacttacctggtacgtcagctccttgaccctccgctcatacttcctcaggcccttaacagactctgtgttcttct

SEQ ID NO: 242408 - DNA, 122 bp, Homo sapiens
gcctgggagtctagggagtggcgggggtgtttcttggcccggcagggtggggtttccaagcgtgatctcctcgccctggcagagccggggtgccgggtgggggcaggctcgggggcctgcct

SEQ ID NO: 242409 - DNA, 122 bp, Homo sapiens
gcccggccttaatccagcctggaggaggacgttttgactctgctgtcatgagcctgtcagcgggcaccaaggtgttctctgaaaacatgggacgaagagaggacccctccccaccatagggc

SEQ ID NO: 242410 - DNA, 122 bp, Homo sapiens
gagagttgcaccttgagcgggaactgcagagggttttaatggcaccagctccaaacatttcgcccacagcgtctgcagtcctccactgcggaaggcagaataaacgccccaagggtgtccac

SEQ ID NO: 242411 - DNA, 122 bp, Homo sapiens
aggttaccagcgttagccacacctcttcctgcccttcatcccccaccccacccacgttgccggaacgtcccttgtgctgcagaacagagttagggtcaggacacgctaggcaccttctccca

SEQ ID NO: 242412 - DNA, 122 bp, Homo sapiens
cttcagcaggtccaggctctgcgccagtgcatccttctccaagagtgcgctgcctgggcccgcttgccctggagtgtaagtgctgggtaaataagaaccgcctggcgcaggctgtgtctact

SEQ ID NO: 242413 - DNA, 122 bp, Homo sapiens
gcgggggtcggcagccggctgagtgggaaccgcgcggtgtctgaggaggcagtcggcgaccggtgaggggactgaagggcaggggagggcaagggtggctcggggcagcagtcctcagctgt

SEQ ID NO: 242414 - DNA, 122 bp, Homo sapiens
tagtccagtatatatatttaaaaaacaaaacaaaacaaaacaacaacaacgtaaagctaacgtctgtgtaaagagaaatctaaccaaattaggccatgtgtcaaagaccatgaaatcgatga

SEQ ID NO: 242415 - DNA, 122 bp, Homo sapiens
catggtggcatgcacctgtagtctcagcaactcgggagactgaggtgggagaattacttgcgcctgagaggtggagactgcagagtccagattgtgcagctgcactacagcctgggtaacag

SEQ ID NO: 242416 - DNA, 122 bp, Homo sapiens
tgcctgcccatttcccaccgccgggcctggggcggggcgttcaggaggctctgggaaaggcggcggtggccggcgcggggggcgcgcaggcgcagagcggcgggccgggcgtccgcaaggtg

SEQ ID NO: 242417 - DNA, 122 bp, Homo sapiens
cgggccatgacacaaacaccaggctttgccctccctgctgattagtgattggccattagtcgagaagtttgtcctcatgaaattctgcttccactgaatcctagaatagctttggctaaagc

SEQ ID NO: 242418 - DNA, 122 bp, Homo sapiens
gctgcgagccgactgtgcgcgctccgagagtcgcccgaacaatgcgagcggggcgctgagcgcgcccggcctatgggcgttacgtcactgttctgccttataaggcgctccgcgtgtgcggc

SEQ ID NO: 242419 - DNA, 122 bp, Homo sapiens
ctcccaggcccaaatgatcctttcacctcagcctcctgagtagctgagaccacaggtgcacgccaccatgcccagctaattttgtattttcacggggttttaccgtgttggctggtcttgaa

SEQ ID NO: 242420 - DNA, 122 bp, Homo sapiens
tctgtttggccttcttgcctaaacatcaggaatacaagtatttctttagtgtttacaaagcgactgacagaagaattaaaagacaactgagttaaaaaccaaaaaaacaccagctacctcaa

SEQ ID NO: 242421 - DNA, 122 bp, Homo sapiens
aggcggttcagctggtcgtgcagggctgccttcaaccgcagcagcgtctcctcctccttgcgcagttcctgaagccggctcagcatgttgcctggtcacatagccaacctccgggctgctgt

SEQ ID NO: 242422 - DNA, 122 bp, Homo sapiens
aagagggccagtggggtggtcagggcaggggcaggtgaccgtggctgccaagtgtcaggacggccgcccgcccccacacccacccctaggagctctgcaaacagctgcacgccaagatcgat

SEQ ID NO: 242423 - DNA, 122 bp, Homo sapiens
tgctcttttgagatgatcccatgaaaagtgtcaggtccaggacctgacccagataacccccgactgttttcaccatgtatgttcacctcagaccctggcagagaccccaacagcagcaaggt

SEQ ID NO: 242424 - DNA, 122 bp, Homo sapiens
tgttgggaaatcacctaaatccgttcagatttagccagaaaaggggaaataagtctccctcgccggccaaatcatggcctttgtcgctttcggctccccattggctgcggccgctgtggccc

SEQ ID NO: 242425 - DNA, 122 bp, Homo sapiens
cagtatctacagaacctggtcctcaagccagtctcggaagggagaccccgtgtcgggagccggtccctgagtttcaccacttgccccgtgtggttctggacctgctggctctgaggcccggg

SEQ ID NO: 242426 - DNA, 122 bp, Homo sapiens
tgccccctcctgctcccacgccgcgcggcacagaatctccatgaagaccaagtggtccagcggcgcccaccctgcagcctggggtgtgcgccgtatcccatcctgcgtcatctcctcttgga

SEQ ID NO: 242427 - DNA, 122 bp, Homo sapiens
ctggaggaatgagacatggaacgagggaatggagtcatgtggctgacactgcactgagctcggggtccctgtgtctcaatcactgtaaacaccggctccagttggcttcagtatccccaagt

SEQ ID NO: 242428 - DNA, 122 bp, Homo sapiens
aggcgttggccgcggccagttggctttcaccgcagcccggtgtagcccgccagcctcgtgcggagtcctggtcgaccccttgctgacagtgtgatcttcatttgatcacggatgtcgacgtg

SEQ ID NO: 242429 - DNA, 122 bp, Homo sapiens
tgcttcccatctctgagaagcagcaaagtcaccctccccatctgcccttccctgggggagcggtccccacccccacgtccatctggacctcagtgcggccatccctcccatgcacaaagctc

SEQ ID NO: 242430 - DNA, 122 bp, Homo sapiens
gggctgaaatgaatgagacagggctccattctggcttcacaaaggctgcattgtccaactcgtgaatgggttccttctgcttgggccaagaggaccatttgcagcggggaggcatccagaaa

SEQ ID NO: 242431 - DNA, 122 bp, Homo sapiens
acctggctccgagaactggaaggtcgcgtgggaggaaatctctttcgagaagcgccaaggcgtgtgcgcccgggtcctccgcaggcgggcaggcgcgcgaggcgctccggtaatcgctatcc

SEQ ID NO: 242432 - DNA, 122 bp, Homo sapiens
ttcttcgtggcagggtctctctctgggtctaatttctgtttcttttcctccacttctccccgcatttccccgacagatctttcctttctttatccccgcctgcttttccgcactccgtctca

SEQ ID NO: 242433 - DNA, 122 bp, Homo sapiens
ggggtttcaccatgttggccaggcagatctcaaacttctgacctcgtgatgcactcacctcggcctcccaaagtgctgggattacaggcgtgagccactgcgccctgcctgtttgtagtaat

SEQ ID NO: 242434 - DNA, 122 bp, Homo sapiens
cataggagagcaggtatactgatggaaccaggattcagaaaagatgcctggatccaaaaacgggaggctctctgcaagtcaaagatgaagagaaaaatagtagcatctcaagctactgatcc

SEQ ID NO: 242435 - DNA, 122 bp, Homo sapiens
ttcttctgagcccatttactggaacttgtaaacacagactcctttctttcctgccacacccgcttctgggctataaacaccacaagaacaggaaccagatgagcgttcagaccctggatcct

SEQ ID NO: 242436 - DNA, 122 bp, Homo sapiens
tgccaccaccgtgagtatactctgagtacttaggtagaagaattaaattagcataaagttcgaaggtaaaagctgccgcctttctcacagggttaactctttagtgaccctctcatggtgtg

SEQ ID NO: 242437 - DNA, 122 bp, Homo sapiens
atgaggtcacacaattaaaattaaaaaaacgaaaccaaaccaacccctccatttgcgttgcgctttcagggtgcttgaggctttcctgtgccttactttgtcggagcctggcaacatcgctg

SEQ ID NO: 242438 - DNA, 122 bp, Homo sapiens
agtgagtcaccttctggctgcaagtcaaggaactctcactgcgcccttgtttggacaagacgaggaggcgcactcagagtcagagaccccggggcagagacaggggcaagaagaaggggcca

SEQ ID NO: 242439 - DNA, 122 bp, Homo sapiens
atttttctggagatatataaatatcttccctcaggggttggaaagaaaatagccatgcctcgtgacaatttatgcatgtgaaatgtcaaatcatggtactaagggcaggagaagagagattg

SEQ ID NO: 242440 - DNA, 122 bp, Homo sapiens
caccgcgccggcccttctttttttaaagagcctagccacgggcgctgactggccggcagccgggcgcgtcatcctccgggggcggggcccgggccgcattgtctcgtctagggccggctgga

SEQ ID NO: 242441 - DNA, 122 bp, Homo sapiens
gcggagtcgcagggcaccataggaaatgcagttccctccgagcaccagagagtggatttccggatcgcgcaatgcatgcgtggaagtgcgtccccggaagtacggaggccgacaggaagaga

SEQ ID NO: 242442 - DNA, 122 bp, Homo sapiens
acctcatgatccacccaccttcacctcctaaagtgctggaattacaggcgtgagccaccgcgcccgtccgtgttagtccattttgtgttgctataaagaaatacctgagactgggtaattga

SEQ ID NO: 242443 - DNA, 122 bp, Homo sapiens
tgccctcgtccggtcctgctggggctctcagcttctggaggactaggccttctgaggttacggagctccgagatacctgggcagggctggctgtggtgactgcggtgggacttagtgggatc

SEQ ID NO: 242444 - DNA, 122 bp, Homo sapiens
tggcctccctttcagcaggaacagttgtattcctgaagcttgctcatcagcttttctaaacggacccacagactagagatagtgccaataaaaagtagttgaacaaaaatgagcctaacaaa

SEQ ID NO: 242445 - DNA, 122 bp, Homo sapiens
ccctctctaaatccttcagtgatctctcatcactcctaggacaagaacaaaacttcttaacgaggctccctgcctgattacgtccctgtttgtggatacattttttttttggccaaatatcc

SEQ ID NO: 242446 - DNA, 122 bp, Homo sapiens
tcccttctaggccacaccctgggtggtgggggcgcggtctgtccagctggcaacgtgtgacggtaggaggggcttcaaggacaaacagattctgcaactgaaattatatggatcctggctca

SEQ ID NO: 242447 - DNA, 122 bp, Homo sapiens
ggctggagaaagcaagggaagattctcccgagaactctgaaagccgagcagcccttctgacgcctcgatttcaggacttccgagttccagagccgtgagcgaatacatctgcatctttaagc

SEQ ID NO: 242448 - DNA, 122 bp, Homo sapiens
gctgacttaccagggcctcagtttcattaactggtgaatggagtcataatagaatctcctcggaggtcacaataaggatgcaatgagatgatgtgtatatttctttaacatggtggaaggga

SEQ ID NO: 242449 - DNA, 122 bp, Homo sapiens
ttcacggaagaacagctcggcgatctgcccgggtagctgtgaagtcacagccatgttggccgatggatagtggacactgttccgtttttagcaaaaaaccccacaatcctcaaccttcaaga

SEQ ID NO: 242450 - DNA, 122 bp, Homo sapiens
ccctgcaagcgtgaccctgatggacatccagtctctccaattaactaacaaagcggttgccgacgaccaatagtaaggcagtaggatgaggctccggcataaggcccacctcctacctgccg

SEQ ID NO: 242451 - DNA, 122 bp, Homo sapiens
gtgaaccatagagagcattttgtaaatgtaagaggatgttgatagtagtcattaaagattcgggtcgggtattagtggcatttggtagacagaacccagagatgctagactttccacaatgt

SEQ ID NO: 242452 - DNA, 122 bp, Homo sapiens
cagggcctcactggccacggtgaggaaggacgcctgacccgacatccatctgagaagcctcgccctgactgctgggtcaaaaagagacttgaaggggagcaagaggagaggcagggagagca

SEQ ID NO: 242453 - DNA, 122 bp, Homo sapiens
cgccgtttccgagacggcttcacccatgggctgtcttttcgccatttcttcttggccttgcgccggccactggaaccactctgggaagggggaggaggaggagttaggaaccctcaccccca

SEQ ID NO: 242454 - DNA, 122 bp, Homo sapiens
ttccttctgcttcctcggggcagagatggtgaaatctacttgttaggacagttgcaaacccgattgcagtctgggctctggatgctgaaattatcctgtgatgattcatcatctttaacaga

SEQ ID NO: 242455 - DNA, 122 bp, Homo sapiens
atacaagtcagaatttaagagattactactttatattttctttctttcttcttagctgctcgctgttactccttaaaaagaattggctattcacccgcagttccacaaagtaagaattcagc

SEQ ID NO: 242456 - DNA, 122 bp, Homo sapiens
aaatctttttattaagagggtaggatccaaggttagtttttgtagcctcggctggcctgtcggcctctgatgcactcgaacttccagcccttggagcagacatagggtttggtgtggctgtg

SEQ ID NO: 242457 - DNA, 122 bp, Homo sapiens
ggggtggggctgcgggaggccctggagcgcggcggtgatggcggggccggtgaaggaccgcgaggccttccagaggctcaacttcctgtaccaggtgagtctgcgacaagggccccacgggg

SEQ ID NO: 242458 - DNA, 122 bp, Homo sapiens
gacataatctagaggtatttatgccaaaaggactgacggaaataccaccactgccaaccacgacagcatcctggttccctaaacggatgggcttctttgttttcctttgtcacaaggaatta

SEQ ID NO: 242459 - DNA, 122 bp, Homo sapiens
tcacctctaaaagatatggttataaaaatccagcaatgcagaaacttcagtgtcaaaagccgttaactctaatacacactgccaaaccactggtagcaaactatatatacatgacacccttg

SEQ ID NO: 242460 - DNA, 122 bp, Homo sapiens
cacgcgacattgcagctgtgccatggtgacggcaagactgtgacacacggcggccccacgcggtgtccactgcacagtcacgtgacattgcagcactgctgtggtgagggcaagactgtgac

SEQ ID NO: 242461 - DNA, 122 bp, Homo sapiens
cattaaacatctttgctttacaaatttcccagcttcagaaatgtctgtattagcagtgtgcgatcagactaatacagaggggatttcagggactccccatgaatgccccctttctcccttaa

SEQ ID NO: 242462 - DNA, 122 bp, Homo sapiens
ctatgtcagccgctccaagacatgctggcttctgaggcaggacttggcaaggagccagtgcgtggagtggggtgtccagcccaccttgtggggtactcagggcccctgccacacccatgcca

SEQ ID NO: 242463 - DNA, 122 bp, Homo sapiens
cacttcggggccttggctgcctgttccgtttagcctgtttgttttacagagttccctttccgagttcgttttgccgaagttcgttttaccgaaatctggatgatgctgggggtcgggagatg

SEQ ID NO: 242464 - DNA, 122 bp, Homo sapiens
tgctgctgtaggtactatggctcctgaagttgctttccctgcagtaactggagtcctcctcgtcgtcttccagctcctccgggtaagggtaatcgaagtcatcgtcgtcctcctccatctca

SEQ ID NO: 242465 - DNA, 122 bp, Homo sapiens
cccaggagccaatcagaggctgcgtcgggaggaagttggagcgcggacatgccccctctacggtgtccttgcaaagtgtggcagtcactacaggtttgaggaaggctctgtcgctgctctgg

SEQ ID NO: 242466 - DNA, 122 bp, Homo sapiens
gtgtagatgaggagggaggccttgtgagcgcagatcatgcagtgggcctgtggacagggccgtcttttggcggtaggcctgtgtgctgttgcagagtagcgtgttaccctctcgcatggctc

SEQ ID NO: 242467 - DNA, 122 bp, Homo sapiens
gcggggctcccgggttcggatggacggagggggcgtccggcaggtgaactgggcccgctccgcgtcccgaacgttcccctaaacccacaagtcccggagaccctggggcattctgcgatttc

SEQ ID NO: 242468 - DNA, 122 bp, Homo sapiens
aaaaaacattcctgggtgttaaagacaaaaggcctgtcagctttcaaaacaatttatatacgttacagagagaagagaaagtacttacaacttttctaaagtaaatgctctaagagaaaaga

SEQ ID NO: 242469 - DNA, 122 bp, Homo sapiens
caactttatggcttttttgtcctttcttttaatttctaagcaattgattttctgccttaccggaacacttgtttttctcaggccataaagaaaatagcaaactactaatacacagagcatgg

SEQ ID NO: 242470 - DNA, 122 bp, Homo sapiens
tgatgcatttttaaggacccgtcataaacacaagcttggcaggggccacggaaaggtgcgcgcaggcgtcttcgggtctttgatagctgttcacgtgcaatccgtgtacttgcacacctcca

SEQ ID NO: 242471 - DNA, 122 bp, Homo sapiens
atatagagatggtaagtagatgaaaaattaaatgaccaaatgaccgaatgactgaaaggtcggttgacaaaatttttcctactggagaagatgagctgctctggtaactacccaagaacaat

SEQ ID NO: 242472 - DNA, 122 bp, Homo sapiens
ggggccggggccggggcccggagcggggatgggcgggcgcagccgggattagctggcgggcgagggcgcagcgcagggaggaggaggggaggcggcgccggcgcgggcggggcggaggatct

SEQ ID NO: 242473 - DNA, 122 bp, Homo sapiens
ccggccagagccgagccgcctgaggcctgcagtgttctccatcaccactgtgatggcatccgcttccgtgactgtcactgtgcaccctccgcctgtcctgggcccacgcaggacccccaagc

SEQ ID NO: 242474 - DNA, 122 bp, Homo sapiens
ctgagtggagggtttcttgctttgtggacagagtgtcttccgtcccattaagacttccttcggctttgtaaatagccatttgtgattatatcataaagtgtcttggtttgctgggaggaggt

SEQ ID NO: 242475 - DNA, 122 bp, Homo sapiens
gtccccgcctctccactcctaacgctttactccctactccccctgcgaccactacacagccggctacggaggcccctaatgtacaaatatcccccaggcccttgctcatcctgataggtttt

SEQ ID NO: 242476 - DNA, 122 bp, Homo sapiens
ccctttgcactgagtcctgtcatggaggtacaaaccccctgctggaagcacctgcagtgccggcagctcaggactggcttgagttctggcccttccccttactagctgtgggacatcggaca

SEQ ID NO: 242477 - DNA, 122 bp, Homo sapiens
gatttcagggaccgtgcctatgtgctgagtcaaaccccgccgctgggctgggtctgcagccgggccgctgagcacaatccgctgtggttaatgattaatcgctgaccaccccgcctcccgca

SEQ ID NO: 242478 - DNA, 122 bp, Homo sapiens
gggcctagacttcccgggttatatggtgatacagtttaaacgcatgtccttgccaagcctcgtgttgaactgtcatcccccgtgttggaggtggggcctgggggcaggtgtttaggtcacgg

SEQ ID NO: 242479 - DNA, 122 bp, Homo sapiens
atctcaggtgccgcttggggcagcgtccattctttgtgtcctattttgtatttttaaacccggacaatcttcggccgaaaaccccgagaacacacaggggagatgtagttcatcatctctct

SEQ ID NO: 242480 - DNA, 122 bp, Homo sapiens
agctggcgtgcgccaagcagccactaggagccacttcatgccaatgctccacttcctgcacgccacagtcacgttcagctgcaaaagtagttatgctttgggtttttttggttttttttttt

SEQ ID NO: 242481 - DNA, 122 bp, Homo sapiens
tccgcggaaggagcgaattgtgcttacctctaagttttttgaggattaaatggaccacaacgtggtggctagttattatatcctgacaaaacagccaaaacctgattcttttttcccattta

SEQ ID NO: 242482 - DNA, 122 bp, Homo sapiens
ggagggggcgggggcgggggcggggggcggctctgggccttataagcggcgggggcagggcggcagggaggcaagtgtcaggccgatgtgtcgcccgcgaggggccggggtcggggccgccg

SEQ ID NO: 242483 - DNA, 122 bp, Homo sapiens
ctgcactaaagccatccctggggacctccaggagagtcgctcggggtgtccatccctgtgcggccctcaccccgtcccctgtgcggccctcaccccgtcccctctgcggccctcaccccgtc

SEQ ID NO: 242484 - DNA, 122 bp, Homo sapiens
agctaaacaaagaaatcatggcggattgtttacatttggcagcgcccgggctgcgccgaccgccggccccgagccgccgcgggctccgaggagtcggccgagctgctcccgcgccctggccg

SEQ ID NO: 242485 - DNA, 122 bp, Homo sapiens
atcaccaccacgcagcgcctgtgctgggggtgcccaccctgcagagccccaccatccccccggtgtctgctcagccctcgccctgcacccacacgcccctgaagcctgggcgggctgccgcc

SEQ ID NO: 242486 - DNA, 122 bp, Homo sapiens
atgaattgggtatatttgacatcaaagacaggagatccagtggggaatgagacccacggccgggcgtgggcagcgctggaggacaggctctcccagtgtgctgcgggggagggcagcccctg

SEQ ID NO: 242487 - DNA, 122 bp, Homo sapiens
gagaaaggagtgggggccctgcagtccactgagtggggtgcctctcagtgggggagggagcgagctggcttcattcacctctgactgtggccaggaagatggaagcccgatgctgtcagata

SEQ ID NO: 242488 - DNA, 122 bp, Homo sapiens
cgggggagggggacggagcgcggggcgggggaggggaggggaggcgggaggagccgctggcgctggacccggcccctcacctccgcggaccccgaggaacaagccggcaggtgagggagccg

SEQ ID NO: 242489 - DNA, 122 bp, Homo sapiens
tgcgggctccgggagagggtcgaaggtgaagatctcaggaccggagccccgccggggtcccgggatggtggagggggccggggtcggggcctgcaggatggtcatggtcgggtggcagctgc

SEQ ID NO: 242490 - DNA, 122 bp, Homo sapiens
cgccgccgcgccccacgccggcctcctcccgcccgcccggccgcgccgccgcccgaccctcggccccgaagacacagtcgacttacccagagattgaaccaactgctccttccttcctcgtt

SEQ ID NO: 242491 - DNA, 122 bp, Homo sapiens
cctcaaaagggaacactagcccacacagaaacagcttaaaaagaaaactaaagaaggcaacgactttaaaggaaactaggcagtgcgcttaaagagaaaagggcaatgggaacaacatgaac

SEQ ID NO: 242492 - DNA, 122 bp, Homo sapiens
ccctttctcccccacccgtctcttgggtccccagagagatcgggggtcctgagactcgggcggggtgggcttgtggcgtgcccggggcgaggcaggcggcccgcgggccagggtaccggagg

SEQ ID NO: 242493 - DNA, 122 bp, Homo sapiens
gtcttccctttaaaagactctcagggaactcaaccccaaaacccaccctctgggtttccccgtcaccctggcaacggaagcaggaagaggcgggcttcgccatccaccctccccgcccgcgg

SEQ ID NO: 242494 - DNA, 122 bp, Homo sapiens
cctggcattaaagggagggggacaatcagcgctgaaatcttggcgttttgctgctgcgggcgtgagcactgggggcgttcgcccagcaccttcttcgggggctctttgctttgtctgtagag

SEQ ID NO: 242495 - DNA, 122 bp, Homo sapiens
gaaggtgaagcagctgcgggtaagagtataggtttggcagtgggaagtcgagggcgttcccgtcgaagctccttttgtgtataaggcctaagaaggggcagtgcgctttgcgaaggtctgaa

SEQ ID NO: 242496 - DNA, 122 bp, Homo sapiens
ctctgagtggtcggaacctttatacccctctgtgttgattgtgctgcccctgcctggcttcgagaagccttcctcttccttgttgttgttgtaggcactgttgtgttagtagtgttggttca

SEQ ID NO: 242497 - DNA, 122 bp, Homo sapiens
gcaaatgggacctgagaccaccccgagggccccaccaggagctctctttctcctttaaaacgtggtcatcggcactcatctccggtcacatccgtgaggtctgtgaagagccacagaagcag

SEQ ID NO: 242498 - DNA, 122 bp, Homo sapiens
atttttatgtatttatttatttatgtgccagtcttctccttgctgcctctgaggttcggtcgggaggggagggcagcggcaacccaggaggcagcagtccgggctccctccctccctctccc

SEQ ID NO: 242499 - DNA, 122 bp, Homo sapiens
taaacggtcccacccttctggacatttacattgaatcagtcagccagccagccagttgtgcgaaaaaagtctgggagtaattaaaatgagagttataaattttattttaatttttttgccat

SEQ ID NO: 242500 - DNA, 122 bp, Homo sapiens
ggtgcgcgccctccccacctgcgcttgcgcagcgggccctgagggctgggctgggaggggcggagctgagctgggatccacttacccggttgggcaggcgaccaagagaaaactgccccctg

SEQ ID NO: 242501 - DNA, 122 bp, Homo sapiens
gccgcaggcgctcctcgttctgctagccgatggccgcgatggtgccgtaggtgagcttgtcgtcggggatggcatggcgccgcagccagccgccgcaggcgaacgagtataagtcctggcat

SEQ ID NO: 242502 - DNA, 122 bp, Homo sapiens
tccaccaagctatgctctattagggcgccaggcgggcgaagcaaaggcagggatggcgggcggggcggcggcggaggtggaatgggcgcttttttcttccatctggctttatttatttattt

SEQ ID NO: 242503 - DNA, 122 bp, Homo sapiens
ttcctaggcaagatgcaggccacacagtctacgtctgtccgttggcgctctcagctcaaacgagtcctacaggccttggtccctgtagggtgcaggccccctgctccagatccccagcccca

SEQ ID NO: 242504 - DNA, 122 bp, Homo sapiens
ctggcctccagcacacacaggttctcatagaggtgctcattgcctgggggcccactggcacgcttgcacactgaagcgtagagcccggacgccagatcgttgggctccgggcctagcagtag

SEQ ID NO: 242505 - DNA, 122 bp, Homo sapiens
ttccttcaataagtctttttcaatgtccccctgatccctcatctccacatgtgctcagcacgatgctataccaatcccctagaagaccgaggccttgccattgaggtgctcaccaggacatc

SEQ ID NO: 242506 - DNA, 122 bp, Homo sapiens
caatgcacttacaacccaaagccattaccgagataaggtttgttgccccatctgggccctcgcgtgcagagacttccccgcctcagtctcagtactcttccctgttcactcacccgctgccc

SEQ ID NO: 242507 - DNA, 122 bp, Homo sapiens
ctccgaccacgtgacattccccctcaatccccgagactccccgccgtcgacccctcccttcgggccgcagcccgctttaccccgcctctcaggcccacgtgaccgcctctctcccacctgac

SEQ ID NO: 242508 - DNA, 122 bp, Homo sapiens
tccttctggaaggaagacaagctgctcagacccccatactacactgaagttacaccttcccggaagtagcctgccctaattaaatatcactaggcaacctactgagtgttagtgttacaaac

SEQ ID NO: 242509 - DNA, 122 bp, Homo sapiens
gtcaagcaacgcgcatcccgctcaacggcacctggctcttcacccccgtgagcaagatggcgactgtgaagagtgagcttattgagcgtttcacttccgagaagcccgttcatcacagtaag

SEQ ID NO: 242510 - DNA, 122 bp, Homo sapiens
attccaaaagccaatcctcctaatgagcattcggtcattagaattttcatcaataccaaacggaattacatttggggccccttttggtctttcttgtcatacctgagatgatgagatccttt

SEQ ID NO: 242511 - DNA, 122 bp, Homo sapiens
ggaaacatcctacctcctacctgcccacgcactgttaccactgttatatctatggttccgcgcctcggggtatatcccgaacctcagctaagagtccttaccagtgctgtcttgcacctgca

SEQ ID NO: 242512 - DNA, 122 bp, Homo sapiens
tgtaggcaagaatgtggaatcatagaagatttgtaagagaaggttaatcagctattcttgcgggatgctttcattgtaatcacatctacacattggggccagggtgtggcctgtcagtattc

SEQ ID NO: 242513 - DNA, 122 bp, Homo sapiens
agcttcatcacatcacaccagctctgcagcgccaaggcagacacaccagctctgcggcaccgaggcagacacaccagctctgcggtgccgaggcagagcctgcgccctctgatgctctgtgt

SEQ ID NO: 242514 - DNA, 122 bp, Homo sapiens
cacatcccggccggaggcacgtgcggtgcaatcacgggcctgttcccacaccaccaccaccgagtcgacggcttacctgagggttcactcttgggttgtgcatttaaataatatttttaaaa

SEQ ID NO: 242515 - DNA, 122 bp, Homo sapiens
gacccggggcggccccgcttcccccccggactcacccggggttcggccccgcagcccgcgcgctccctcgctgccctctggcggcaaaaccgtgaaaccggcgcccgccccgccccgccccg

SEQ ID NO: 242516 - DNA, 122 bp, Homo sapiens
tgctctaccgcaagctcacgcacgtgactccatcatccacaactacgggctgcagctcaacgagggccgcacgggcgatgagttcctgctgccgttcaccatgtcctccaaccaccgcgcct

SEQ ID NO: 242517 - DNA, 122 bp, Homo sapiens
ggcggggagtgggcggggctcgggggcggggcggggtgtgggcggggctcacgggcggggcgggtgagtgggcggggcctcggcgtggtaggcgcgctgcgtaaagaggcctgcagtcccgc

SEQ ID NO: 242518 - DNA, 122 bp, Homo sapiens
ccccctctcccgggcccagcaccagaggccggatccccagaggcgctgggtggttgcggccgccgtctcacagcctgggaaggggaggcaagcacaacggccgggctgtgttctagtccgag

SEQ ID NO: 242519 - DNA, 122 bp, Homo sapiens
agcagttttccttcagaacagtggggttgtgaggtcttggtaggtttgctgtgcacagagcgcccatcaccttcccaccaagcctgattcacaatctaagtgactctggaggactgagcaag

SEQ ID NO: 242520 - DNA, 122 bp, Homo sapiens
atcagacagtaacgtctgcagaaagttcgttgcatcaaagacccagatgcagactcagtccgcttcttccacactcacccacaacttattcctcattgactaagcctaagatctataggtaa

SEQ ID NO: 242521 - DNA, 122 bp, Homo sapiens
tatttttttggacaattaaatagttctctttttaaaatagttattcaattgatgatgggccggcatacgttgggttctgctaggctctggagatggtgcacaagacaagtttcctgccttct

SEQ ID NO: 242522 - DNA, 122 bp, Homo sapiens
tgttcacgttggctaaacgccggagcagcggcgcctccagggagggtggatgggtgaacacgatgtgggccccacgacagcaggaccgatgcagcctttgaaggaagggaattgggacgcag

SEQ ID NO: 242523 - DNA, 122 bp, Homo sapiens
gccagtatggagagggtggccaggcataagaagactagacagaccgggtgcaggggctcacgccttgaatcccagcactttgggaggccgaggtgggtggatctcttgagcccaggagtttg

SEQ ID NO: 242524 - DNA, 122 bp, Homo sapiens
ctacaattctatatattgttattaaagattaatccaaccagcaacccaaggacatataagcgatttccactattgcatcagagcactcggcaggaaaggcctagccacggggaacattagaa

SEQ ID NO: 242525 - DNA, 122 bp, Homo sapiens
cggccctgaacccccacaacaccgtgttcgatgccaagcggctgatcgggcgcaagttcgcggacaccacggtgcagtcggacatgaagcactggcccttccaggtggtgagcgagggcggc

SEQ ID NO: 242526 - DNA, 122 bp, Homo sapiens
ggttactcaagagcaggtcacaggcttgggttgtgagggtcaggagaggccaggcctcctcgagcaaggtgggggtcccagggtcaggtcaggtgcagatcctgtggcagccacgtctttcc

SEQ ID NO: 242527 - DNA, 122 bp, Homo sapiens
tgataaacatgtgcccctctttttgtgtcattccatgaattatacttgcctgaggcagctcgttaatctattgtcccctgacaacactcagtaagattgcctgagcttgtttggctacctag

SEQ ID NO: 242528 - DNA, 122 bp, Homo sapiens
acaaggagacataggagtcagccagagccggttggtttatcaagggtcaattgggggaatcgtaggggatggaaggccggtgcagcatgtccaagccagcctgagtgcaggcgccatctgtc

SEQ ID NO: 242529 - DNA, 122 bp, Homo sapiens
cctgactcacaagagacagcgaatcgctgccagcgcagcgatgcctagggagcggacttgcgctacgctcgccgcgggctcccgctttctctctctctgctctctccccagtcctctttgct

SEQ ID NO: 242530 - DNA, 122 bp, Homo sapiens
accgtctctgttacaggaaaggtttggctgctttctaatctcactcatgttcaaagaactcgtggcaggcagtagtaaccatggcaacaaaggccatgaattcctggaagtcacattcgccg

SEQ ID NO: 242531 - DNA, 122 bp, Homo sapiens
atccccattccttcagcacagtctggcactacagcttatccactaccctctacccaggggcgtccttccccatcctgctgtgggagggaagagtcaagagaatcttctcagagctgtcctcc

SEQ ID NO: 242532 - DNA, 122 bp, Homo sapiens
cgcggctgggccgaccccaggacaggggttggaggcgggagcccggcagctgcaggcccacggccctcccttaccggcgccgccgccgccgccgcccccgccgaggatgctccgggacccgg

SEQ ID NO: 242533 - DNA, 122 bp, Homo sapiens
attttgtattttatgtagagatgaggtttcaccattttccccatcttgctctggaactcccgggctcgagcaatctgcctaccttagcctcccaaagtgctaggattacaggtgtgagccac

SEQ ID NO: 242534 - DNA, 122 bp, Homo sapiens
cgaggcccccggacggccccgcccacccgcgcccactccctcgcccacgcctctccccaacgccttgctgggttcacctctccaggcagggaaagttgcttctagactctgagctctcaccg

SEQ ID NO: 242535 - DNA, 122 bp, Homo sapiens
gggccgaaaaccccatttccgtttgaggtaactaaagtacccagcgagcaaggtgacttgcgcgtgtgtctgtgtttgtgtgttttaatgattggcgccttgctttgggtttctcttctgtg

SEQ ID NO: 242536 - DNA, 122 bp, Homo sapiens
cgggggtccaggctgggacctgggacgagcagacacagtgcaaagtgcacacagttgctgcgcatggagtgataggatggtgggtccgcgtccgtcgcttcgctcactctgcgcagcacgcg

SEQ ID NO: 242537 - DNA, 122 bp, Homo sapiens
gaccatctcacccagtcctggggcctgtcacacggacagatgctccctgaagtgtggctgcggtgtgtgtgtatctgtgtgccttagagacagacacatctgcatccttggaaaatcatact

SEQ ID NO: 242538 - DNA, 122 bp, Homo sapiens
tcaggggatccgggcgacggggtctggcgggcagggttgttccagccgcctttataaagccggcctccccgacccctcctcctctctgcagctctcccctcctcccttgggggctgggaggg

SEQ ID NO: 242539 - DNA, 122 bp, Homo sapiens
cctgccaaggaaaaccatgcagtcctcccctccctggtctcctgcttcagctctgtacaacgagggcaaagatgctaaatcttgctttgcattcagtaaagtgtcaagtgattaagtgtgta

SEQ ID NO: 242540 - DNA, 122 bp, Homo sapiens
tttcctccctgaaaagtctggttgttaagacattcaccagcacaccacctcgacttaggccgttcccttttgccctttgcctttcgaggcatgctttttccggactgtgttgcaattaacca

SEQ ID NO: 242541 - DNA, 122 bp, Homo sapiens
ctgacgacgccctcggccccgcagcccgggcgcccgcgccaccctgtcctgctctgcgcccgcctgtccagccccactcaccgcctgccccgcagaatgctgggcaccggggacgccagacg

SEQ ID NO: 242542 - DNA, 122 bp, Homo sapiens
tgacgtgatacgagactcactgaaggaacacgccagaaacacacatgtcaggcccagaggcgaaggaaaagcaaagcggatgtgcagacactgggctgacaaggagagaggtgaaagccagg

SEQ ID NO: 242543 - DNA, 122 bp, Homo sapiens
gacccctgacgtcggcccgggatgggcacagctttggggtcgcggtgtttggggttgtgccgggtggctctggagggcccttgtgggggcgctgcactggggatcctcatggtcttcggcct

SEQ ID NO: 242544 - DNA, 122 bp, Homo sapiens
gggatgtgtccgcagttgccagagcaatgacaacactgcgggaccgcggaggcggctgggcggggctggagcctgtgaccgcgcccgctgcgcgcatgcccaaggccccagcgcttctgcag

SEQ ID NO: 242545 - DNA, 122 bp, Homo sapiens
agctgggtgggcatcctgccaggcattcttcgggtccgctgtgcgcttggagtcagtcaccgctgtgtcctgagaggaggtcccattgttctggttcgcatctgcctctcctgcaaacaaca

SEQ ID NO: 242546 - DNA, 122 bp, Homo sapiens
cgagatcccgcactcgccgcttatatttgagctcctgccgctcgtgccggctcagctccacgtccccaaaaaggaactcctcatcagccagctccgcctccaggtcctcaagcttctctcgc

SEQ ID NO: 242547 - DNA, 122 bp, Homo sapiens
acgagtccctacgcagcccgtccgcgtggagactgacacccttgcgtggccggtgccaagcgccccggaccttgcacacaacctcgcgcgcaccccaaacacgccctgcagctcttggagcc

SEQ ID NO: 242548 - DNA, 122 bp, Homo sapiens
acagatgctggagttgggggagggaagaaagctcattacacacacggggaaataggggtccgagagagaaactagcgcccctgtgatccttgctgtccccatccccgttcccagaagcaaaa

SEQ ID NO: 242549 - DNA, 122 bp, Homo sapiens
gacctcttcaggatctgaaaccacctcttagtgatgttggaaaagctttcatctgcccaccgtacatctgctccttccttatgttacgcaaataaagggagtcatgactataaaggaatgag

SEQ ID NO: 242550 - DNA, 122 bp, Homo sapiens
agtctaaaataaaacaatttctccctctaaccattttgaaagtatagactacaggctgtgcgcattactgagaggaggaggcttcctcccttctgggtcttgcatttggatgggcagagagt

SEQ ID NO: 242551 - DNA, 122 bp, Homo sapiens
acatttattgcctatattaaggattattgcccattgcaggattctctcacatgcagtggccgcagttgtacactccaggacacctagtcactgctgcagcttttgttcaaaattttgtactg

SEQ ID NO: 242552 - DNA, 122 bp, Homo sapiens
tgcatggccagagccctcctggtcatcatgagagagtcccatcattatacctgaggactgcgtaaggcagtgcccgagagaggacaggtgggaaagtcagcaggccatgcacacggtcattt

SEQ ID NO: 242553 - DNA, 122 bp, Homo sapiens
tgagcggcctggcagccggctttgccatagacatcttgggggacgccggtgtgcgagccacggcccagcagccccgactattcatgggcatgatcctgatcctcatcttccccgaggtgctc

SEQ ID NO: 242554 - DNA, 122 bp, Homo sapiens
tgttgtatttagctgttaggtagtttttattagatatttatataggtataccttttgtcacgtgtataaatgagagccaagttcattatttgaggtctcactgattgggatttatgataagt

SEQ ID NO: 242555 - DNA, 122 bp, Homo sapiens
gcaggtgccagaaatgctacagcttccatacaccatcattaggcagcccccaggagtcttcggaaccaagggaaaccaagtcaagcccgggcccaggctgggctccaggagaaaggccacag

SEQ ID NO: 242556 - DNA, 122 bp, Homo sapiens
tgaggtctgaggaacggtgttaatcccgttttgcagctgaggaaactgaggctacatttacggtcacctagctggcaagcaagtggctgagcctggagcagcagcagatctggggaactcca

SEQ ID NO: 242557 - DNA, 122 bp, Homo sapiens
catacttctcctccatttctgtaaaaacctcctgaagggagaccacagtggtttaagactcgttatacattacaaagtgtcattagatataactcatgtatgtttattagcagagaaacatt

SEQ ID NO: 242558 - DNA, 122 bp, Homo sapiens
gaagaccgagacagcggagaggttgcgggtgagctgcgctgagcccaggagccgaggagtcgggagcgcagtagcgctgagcccgagcccgagcggccccgcgtcccgagcgcatcggagcg

SEQ ID NO: 242559 - DNA, 122 bp, Homo sapiens
actccctgggaaaggggttgtcaagagagagtcaaagccggatgtcccatctgctcctcccgttccccttaaggaggtggctcccagcactcaaccaacctccccgcagagctcccttcctg

SEQ ID NO: 242560 - DNA, 122 bp, Homo sapiens
ttgaattcccaggctcaattaatcctcccactttagcctcttgagtagctgggactaaatcgtgcctcgctaatttttgtattttttgtaaaaacggggtgtcgccatgttgcccaggctgg

SEQ ID NO: 242561 - DNA, 122 bp, Homo sapiens
gccagtatcactattggcattcctgagccactggctcagaatttcagtacattatctgcccgcgggacacacctcagaggaaaggggatgaagcgtggtccatgaccatggcaccccctggt

SEQ ID NO: 242562 - DNA, 122 bp, Homo sapiens
ctttgtgtaagatggtgtgactatgaccactacgcggaccactgccttcctggcctttcacgaaaccaccttctgccacacattagcctgttaatgggaccatcctcagagggtttctgaca

SEQ ID NO: 242563 - DNA, 122 bp, Homo sapiens
cagtgctggacacggaccgggccccagccctgagcccaaggcagagccgggatccggccccgagagcacgcctggccctgcccctggccctggccctgcccctgcccctgcccctgcccctg

SEQ ID NO: 242564 - DNA, 122 bp, Homo sapiens
acaccgccttccctctgcaggtgaggaatggggtctgcttcgtttggaatgtgcctttgccgggtcctgcctgacctccaccttccagccgggacgcgcgagcttttccgtttggctgagtc

SEQ ID NO: 242565 - DNA, 122 bp, Homo sapiens
cacactctcaccgcatcattttaaaaaacagcaggagcccaagatatccctccatgcccccggcactgaaggagggtgtgggggggccttcaacagacattgaaatctgtctcctacatact

SEQ ID NO: 242566 - DNA, 122 bp, Homo sapiens
cctccagacccttctccctctcgtgcgcgcggaggtttcggtttcctcttttacgtaggccgccccactcgcttgaaaacaaagtccgcgatcctctagcccgcaagagagctccgggactc

SEQ ID NO: 242567 - DNA, 122 bp, Homo sapiens
ctgagacgtttctgcaaagctgtctagtttttctaaaacccacggtggcgtttcgagaaacgtcctcatttcgggagtatccagtcagaggctggtcaggccgccaggcctagcggatcatg

SEQ ID NO: 242568 - DNA, 122 bp, Homo sapiens
gaaagcacaaacttgcaggtttatgcaaactttaattaggcatatagaaaaacacattagcgttgtagaaagggaaatgtacttaagaaaaaacataactttttaaaaaacttttttagctt

SEQ ID NO: 242569 - DNA, 122 bp, Homo sapiens
tgaaccatgactatcctctgttttgggacctgatcaatagccccctttcatgaggctgggcgggggccccaagccaccagggagcaggcttcgttgaggcatgcgggaatgtgcgtacaagt

SEQ ID NO: 242570 - DNA, 122 bp, Homo sapiens
atgagttctggtcccttcttatctctctggtgactttaaaaattattggagtatcctagtcgtctgttcttccatgtttcctctgtctgtgttcactcccttcagtctcatggctttactca

SEQ ID NO: 242571 - DNA, 122 bp, Homo sapiens
ccaccccatgaggtagatagtgttgttatccctatttcacagatgaggaaaccgtagcaccgagcagttaggcaaatgggacagagtcatagcagcactgggcaggtacgctttaaagccta

SEQ ID NO: 242572 - DNA, 122 bp, Homo sapiens
tgaaaggtgggacttcatgatcctacagtcaatctagctgttctgggctttgaaccccagcgaccccatccagaagaaaccaggagaagcacaaactggcgctaggttcgctaccatccacc

SEQ ID NO: 242573 - DNA, 122 bp, Homo sapiens
actaaaatggaaaattcaaagctgggactgccataaagtgtgttttgtgttctgctctgccgtgtacgtgcagcatatacaacagtgtgcgccacgcagatgactctgcctgccatacaagc

SEQ ID NO: 242574 - DNA, 122 bp, Homo sapiens
ttaggacatgcttataaaatttcacaggcaggtggatcaagcctccctttgaagtatcttcgtacagaaaagtcagccctttgcagactcaagaagggcccagtgcctaagtcttctctgca

SEQ ID NO: 242575 - DNA, 122 bp, Homo sapiens
agactctcttggaacattcttcccatgcgggtggtatgaactgcgtggcactgctgtcctcgctggcatatatagatttacactccacgcacgagacttccaaggcaacacctaggatttag

SEQ ID NO: 242576 - DNA, 122 bp, Homo sapiens
aatgggatgcaatttccccggtgtttttcaggcccagagctattgaataaatgaagtgcgcgccggcggagtcagtaactcactgcgcggctcccggcaggcgggggcggagtgggggccgc

SEQ ID NO: 242577 - DNA, 122 bp, Homo sapiens
atggacagacctgtccagcaaacacaagcctcccacctctccactctgaagctccaaactcgacaaaaagaggtgctgtgtttactgggctgggtcctgtcatgtcacctcttagagcccca

SEQ ID NO: 242578 - DNA, 122 bp, Homo sapiens
ccctcttcaggagcccaagccttagcttgtgaagccagttccatgatgcccaggggctagcggcccctcccttggctatgggcagccaaacagaaaagtgaaccccaggagctggcagggag

SEQ ID NO: 242579 - DNA, 122 bp, Homo sapiens
cagtaacagataagacagaaaagacaagtgacacttactctggttccaagggactttgtccgtgaagtctttgtttctggggctttctgggtttttatgaattcaagtttcaagatcctgac

SEQ ID NO: 242580 - DNA, 122 bp, Homo sapiens
gcgccggtgatcgcttggtggccgctgctatacccaagcctccctaagccgcagtatgctcggtcgcagatcactgagttcagacaaaaagaggggttttagggtctgggacggcggcttgg

SEQ ID NO: 242581 - DNA, 122 bp, Homo sapiens
tcgcggcggaggcgccggggccgccgctcgggggcgagggttcgcgccgcggctcgcgcccgcttctcccgctttacggctgctgaaaatccggcctggcccggcagccgtaccgcagacga

SEQ ID NO: 242582 - DNA, 122 bp, Homo sapiens
tggttgatctgggagggtggggcgagggacgctccggaccaatgagcgggctccaaagaacggccaactggcgagggccgcctacgtcacgtgccagggtcgccgaggcagcgccctgctag

SEQ ID NO: 242583 - DNA, 122 bp, Homo sapiens
ctggtcggaagcgggcattccggggtccccttctcagagttccctaaagccagggtgccgcgccccctgccaccaggagggggtagtctccccgaggcgccgccggccctcccactccccgg

SEQ ID NO: 242584 - DNA, 122 bp, Homo sapiens
ccacccccaacaggaattctatagtaaggaggaggagaaggggggctccttccctctcctcgaatgacgttatgggcacatgccttttaaaagttctttaagcaacacagagctgagtcctc

SEQ ID NO: 242585 - DNA, 122 bp, Homo sapiens
agccagtgcgtgatgtctccacctcgcaggagctgagggggcagttgccatgctcagattcgtggtctcactggatggggtacccagcctgaaccccatgttcaccccacagccccccagtg

SEQ ID NO: 242586 - DNA, 122 bp, Homo sapiens
gacaacacccacgagggtttaatcctgttccatgtggatctttcagcaaccccaggacagcgccaggcaactccacttgctatctgaagttcccaggataccttgggcaggcctagataccc

SEQ ID NO: 242587 - DNA, 122 bp, Homo sapiens
taatttttcacctattgattagatgctgagaaacttcctactctgttatcttctagatggcgagcaccttgaagactgagattgtattgatcatctctgactaacagggaatttgccttgct

SEQ ID NO: 242588 - DNA, 122 bp, Homo sapiens
gcgtctgtctctgtgcccctcaaagtggcccatagttttgtcctgggggcccgcctgggacggagtcctctatggcgggtccctaatgacaccccatccgtggggaacctgggggacgggga

SEQ ID NO: 242589 - DNA, 122 bp, Homo sapiens
gaagacgcagaataggggagcgtcacacccagtcccaggtagtatgcaaatataatgtcacgtgacgtcaggctgagctggagagtgggcgcggcgctgggtgtaggttggagtcaaacact

SEQ ID NO: 242590 - DNA, 122 bp, Homo sapiens
acccaaagctctttgaaaagctgccgaagctccaaggttcctccgcttcctgcccgcaggcggaaccttagagcttcagccatggaaattaacctcttccggttggggccggaagtccctcc

SEQ ID NO: 242591 - DNA, 122 bp, Homo sapiens
agtgatcctcccatctcagcctcccaaactgctgggattacaggcgtgagccaccgtgcccggccaagaaaaggatatttttattgcatgcatcttcacatagagatgagccaccaggaaga

SEQ ID NO: 242592 - DNA, 122 bp, Homo sapiens
ctggagccgggcctgggcagtggcgacataggtgcagctgggcctagggaagcagggacccggcctgtgggcccagaggctgcccctggctgtgaaggtgggttccggccacctagagcagc

SEQ ID NO: 242593 - DNA, 122 bp, Homo sapiens
gtaaattaggtgagagccgcttctcacccgaatctaccattattcttctaaatacaactgcgtaacacctgtcccttcaacctcactcctcttctgctctgggctttgatttgttgcccttc

SEQ ID NO: 242594 - DNA, 122 bp, Homo sapiens
aaggtggcagggttgaagtgaaactatgcttcttagccttctaattcaattttcattccacgtaccttgtggttgtctcatgttagtgtccaagtagtggagttttaaaagagatattctgg

SEQ ID NO: 242595 - DNA, 122 bp, Homo sapiens
gccatgtgcccctcctcggggaactgtgagtgtaacctctcctttcagggtggttgtttccgtgtctgtcactctatcatccgagattcaaacaaacccaggtacaggttcccaggtggcag

SEQ ID NO: 242596 - DNA, 122 bp, Homo sapiens
atggtggccaggcgggagtttccgggaagggcgcgcgccgcctgttcttattattggatgcgaccagcggaaccccgccccggccagcgcggagtagggaggagtggagggcgttgggagtg

SEQ ID NO: 242597 - DNA, 122 bp, Homo sapiens
gaataattacataagcagttgtgcagcactaggtctgcctgaggcaatgtcctaagtcctcgatgtacatgaactcatgtagtgcccccagtgaccctatgatgcaggtgctaatgtttttg

SEQ ID NO: 242598 - DNA, 122 bp, Homo sapiens
cgccatgcgcaggggctggggcatacgctaacgtctgcaagccaagcttttggggagggccgggccgcgcgactgcccagtggctcccatcgctaggtcctactgcgttgggcggcgctgcg

SEQ ID NO: 242599 - DNA, 122 bp, Homo sapiens
ggcaggcggggctggctgttggaggaatgtgcgaggatctccgtggccggtgtctgaagtcgtcagtttactgcttgtaatgaacatagtgatcactgggaacctggaagtagagactcctt

SEQ ID NO: 242600 - DNA, 122 bp, Homo sapiens
gcacttgcccagggttatgtagttagtgacagagcccacactaaaactgggacctcccaacgtttttttttaaaccacaatttgttgtaaggtggggaggagggcaaacatgcagacacaat

SEQ ID NO: 242601 - DNA, 122 bp, Homo sapiens
tggactcacaagcatagtaagttcacaagcagccacgctgctactggtacactttcttggcggtgaatctcagtgggttttttcccaccagctaggaaaccgaggccaaagattctgacctt

SEQ ID NO: 242602 - DNA, 122 bp, Homo sapiens
cacaggaaggcacgggcatatttttagcccaaagatccagcaccatcttcccgcccagaccgtcgccaagaccaggcgggaccatgacacccaggccaaactggccccatgcaaacaccacc

SEQ ID NO: 242603 - DNA, 122 bp, Homo sapiens
cgcttcccgtgcgcggcaaacggtgcgcggggcccgtggggaccttcctgcctccaaccccgggacccagttccccaccacctgctaaccggggcctcctgcctccagccagcccagcagag

SEQ ID NO: 242604 - DNA, 122 bp, Homo sapiens
cgaaggaagccacaaaaaacccaagagctgcaggcgagttcaatgagaccggtttccgcccgccaccctgcctcttataccctatcttagaaccttccagaaggggcccgcccctgctgcct

SEQ ID NO: 242605 - DNA, 122 bp, Homo sapiens
gaaacaagcctgcatgagcctttgcccaatgtgcccaaggacagccacaacaaaaaaggacgaggagaaattcttgcatccagtgggcatggggctggggaggaagggggtgtttctgggtg

SEQ ID NO: 242606 - DNA, 122 bp, Homo sapiens
agggggcggaacgcccgcgctgagcagccaataggggtgctaggggcggggcgtgcggaccgcgggccaatgggggcgcggggcccgggtgcgccgcggcgctgggggcggcaggttgcggc

SEQ ID NO: 242607 - DNA, 122 bp, Homo sapiens
catagtggaatattattcattaacaaaaattaaggagatagtcaagccactaaaaagatacggaagaaacttaaatgtctgttgctgaatcaaagaggccagtgtgacagagctaactattg

SEQ ID NO: 242608 - DNA, 122 bp, Homo sapiens
ctacctactttccactacccctatccccactccccctagggggtgaggcagagataagcacgctttgtggggcacactgatccacaaacttgcaagcctgagctccactcagcagcagcctg

SEQ ID NO: 242609 - DNA, 122 bp, Homo sapiens
ttaaaggcaaaccgtggcattccccaaatctgtccagttccctggcatggtacagtgtcgcggagcccgaggtggcatcttttgtttggctgctgatggcggccttcgggccttggcatcca

SEQ ID NO: 242610 - DNA, 122 bp, Homo sapiens
ctcccaacttttcggctctctgaagcctgaggttccctgcaggaagggctcttgtggccccgccttccgcctcttcggctatctccgtacacgttcggcaacgctcagtaagtggctcttcc

SEQ ID NO: 242611 - DNA, 122 bp, Homo sapiens
gcgcggggagccccagccctgaagaggcgcccgcccggcgtgtcccctgtgcttcgtcatcgcccttcataagcgtcccagaggtcatggtgaccattgccatcttgtggacaggacattga

SEQ ID NO: 242612 - DNA, 122 bp, Homo sapiens
agtttgccagcggactagctaacgccagttcctcacttaccatcttgcagtggaagaaagcgctgcagaaactgagcccactcaatttttcagtaaaaccagtgggagctttaaatgagact

SEQ ID NO: 242613 - DNA, 122 bp, Homo sapiens
cacctctgcctcccaaagtgttgggattacacgcatgaaacactgcttatggcctgtttccgcctctgtctcctgggtaatggggaccacaggtgcgcaccgccacgccaggctaaagaaat

SEQ ID NO: 242614 - DNA, 122 bp, Homo sapiens
aattgctattgataacattttcccatcactgattatgtgcctaaatagttctgagtacttcgcatgtatcaatttgctgaattttcacggcaatctatgggctaggtatcactgccactccc

SEQ ID NO: 242615 - DNA, 122 bp, Homo sapiens
cagaagacgcggctgggagcccggaagtggtagggacctctggaagggctggtgttcatccgcttgcggaggaaagccaggtagttcaacttgtttctgtagaaattgccagaaatgttgat

SEQ ID NO: 242616 - DNA, 122 bp, Homo sapiens
tcattctgctggggaaaaaaatttaaatggcctgagtccggaagctcgccagggcagaagcgcagggtcgctccgccgggctcgccgggccggggaccccccagccacccgccaccacggcg

SEQ ID NO: 242617 - DNA, 122 bp, Homo sapiens
cgcgggccccgggcccggggatgacgccgcggagacccccggcctgcccccggcccacagcgggaccctcatgatggctttccgggacgtcacggtgcagatcgccaaccagaacatatccg

SEQ ID NO: 242618 - DNA, 122 bp, Homo sapiens
ggggctgcgggctgccgggggccaggggcctgctgggggccaggggcctgctgccgtctccgctggaagtaggggcggtttcgtgggcgctggggctcaggccgggaaccatcagcgggacc

SEQ ID NO: 242619 - DNA, 122 bp, Homo sapiens
cgggggccaccgtcacattggcctggatgctccgtgccagtggcgtgtccccaaatgacacgacaaacacaaagcagtagtgccccacaggcagcgccagccacggcagcaccagctgaggc

SEQ ID NO: 242620 - DNA, 122 bp, Homo sapiens
ctcgcgcttgactgacgaggcttgcgggccaatcggaatgtagtcaaaggagccgctaggcgatccaataggtagtagggggcgggagagaggggccaatgagcctggagctgggggcgggg

SEQ ID NO: 242621 - DNA, 122 bp, Homo sapiens
caacggagaacgtggcagtgttgctcccgagggctgtggtggacctccttgggctggggccgccagcggggggtggacacccctctcacactcatcgcagagcaggggtaagcttcagcact

SEQ ID NO: 242622 - DNA, 122 bp, Homo sapiens
tggcggcggcggcggcggcggcggggaccggagcaggggacgcatctgcagccacctccccgcctatgattttcggaggcgattgctcacttagctgaggatctgtagccccgggagatctt

SEQ ID NO: 242623 - DNA, 122 bp, Homo sapiens
acttagcacagtgccaggaactgagcaggtactcaacagatgttttctaggtttctcaaacgattaatcagaagactgacaaagtacctgcagagacagtgttctctcacttttgtcccttc

SEQ ID NO: 242624 - DNA, 122 bp, Homo sapiens
agagaaacccaccgaaggccggacgacccaccccggagacgtgtccagaccgcaccgtttcgcaggaggaacaaggaaatcgcccggcttagcaacgtagataagcagcagggctccgcgag

SEQ ID NO: 242625 - DNA, 122 bp, Homo sapiens
tttggtgatttctcagtttgcccaccattgctttgcactctggagaggcgttgttgggaacgaatttttctcccattactctgaacactgttgaaagcaagctcaggcttccagggggttga

SEQ ID NO: 242626 - DNA, 122 bp, Homo sapiens
aaaagaaacggcgagctcagagtgggggccccggcgtccccggccttgcacgtgcgcgcccggatgcctagcccgggccgcctggcgctgcaaactttacactttctttgtgccgagcgccc

SEQ ID NO: 242627 - DNA, 122 bp, Homo sapiens
gaacggctctacctttagaagaccgcagaagcactggcattaaaaccctctttcggtgcacggggagggcctggggccttggatctacccgaggattttacgctcctccagaccctatcaac

SEQ ID NO: 242628 - DNA, 122 bp, Homo sapiens
ttccctttaactttcttctttcccggggtgaaaactttgctcggagctggcggcagctcgcggacgttattggccggcgccccgcccggcggccccgccccccgcccccgcgctcccctccg

SEQ ID NO: 242629 - DNA, 122 bp, Homo sapiens
ctggccccagtcgactccagccaggcggggctccaagccgagactcctgcacgcccggcccgaagctagcccgacaccctcagctgagtcctccgccgtcccagcattccctgcgtccctac

SEQ ID NO: 242630 - DNA, 122 bp, Homo sapiens
gcttcctctttcagctgctttttctgattcagaaacttgaaagcatcctggggcagaaagcggaccttgcagctggggttacccatgtgtgaagggtgcagcagggtgggattgctcatgac

SEQ ID NO: 242631 - DNA, 122 bp, Homo sapiens
cgttctgaaacttcacaattcttctcattttccccagttaattgaagcattctgatgcttcgtccttggaggtcttatttctttagataagactgctgttgtctagtgtcttctgagttgtc

SEQ ID NO: 242632 - DNA, 122 bp, Homo sapiens
ttaagaatccttcactagcttttcttcccgacgctgcttatttatctatcggtagcatgacgggtaattgacgccctcggatggctttgaggtcgccatttttggttggtgcctttgtcttg

SEQ ID NO: 242633 - DNA, 122 bp, Homo sapiens
tcttgccttatgggtgagcatgaacaaggaacagagagtcagcttgtgatgcagtgggtgcgtctctccccacaggagcatatgggggctgttggattggagatgtatgtgtttgtacacac

SEQ ID NO: 242634 - DNA, 122 bp, Homo sapiens
gtgggggcacaagcacccgctgccgtcaaaacacggctcgcaccgcaccacacccccccgcggcaggcaaggccctgcaccctcgcggccacctcagtgccagaacggcctgctattcgggg

SEQ ID NO: 242635 - DNA, 122 bp, Homo sapiens
ccgagggcagcgggggcgggacaggacagacgagaatcccgcggaggtgaggccgggggccgccccgcccccgagggcaggccctgagccccggccccgcctcggccggccccgcctcggcc

SEQ ID NO: 242636 - DNA, 122 bp, Homo sapiens
gcacagaatgtttcatagttataaattattattgtcgcctgtgagtccttggagtgtcctcggaggcacacgtgtgcacgcacgcactctcacgtgtgggcccccgcctgcaagcccaccca

SEQ ID NO: 242637 - DNA, 122 bp, Homo sapiens
ctcgaactcctgacctcgtgatctgcccacctcggcctcccaaagtactgggattataggcgtgagtcgccgcgcccagccacatcttctttacgtagctattacactgttaagcaaatggt

SEQ ID NO: 242638 - DNA, 122 bp, Homo sapiens
tcttgccagttttgggccgagctagggcccgtgctggaagcagtcctttggtgctggtttcggggacaccttggcacgcctggagccccccacatggtggcctcgggcaggagcccacgtgt

SEQ ID NO: 242639 - DNA, 122 bp, Homo sapiens
ctgtggagttctcaagaatatgcctaactcatgggtgtctactctacagccatgcttgcacgggtgtgaaatggtttgtaagtcatcccttgctatggttaacacagtagcaaaagcacaga

SEQ ID NO: 242640 - DNA, 122 bp, Homo sapiens
tcccactgcggcccatctgctcctggggagcgggcataaccgccgcctggccccacggcgcgcaaagcaagcaaaagctgcccgggaatgaaaggcaggggcccgggccagcccagatcccc

SEQ ID NO: 242641 - DNA, 122 bp, Homo sapiens
ccaagccggccccccgtaccccttgcctgggagcaaaccgccaggacgcagcctccacgccgcacctgccacattcagccctgcccaggaaggaacacatgacccttctgtctgtgactgtt

SEQ ID NO: 242642 - DNA, 122 bp, Homo sapiens
tgggaggtgcggagggtgggggagaggagagagggcggggcgccagctcccggcgcccaacggccccaacggctatcagccttggtcgcccctagtcggtcgtgagcctctttgccgcttgt

SEQ ID NO: 242643 - DNA, 122 bp, Homo sapiens
gagaggcacatggccttgacctccagccccaaggggaaacagccaggttgctgttggggccgcagatgtgcctggccttacttactctgcagctcagcctcctcccctgtggtgtcagggac

SEQ ID NO: 242644 - DNA, 122 bp, Homo sapiens
cagggaacggcttatttctacagctggttaaaaaacaatctctctaacttttccaagtttcgtttggtgtggccaggagggcagggccccgcggggagcaggggccgcgctatgcggcggtc

SEQ ID NO: 242645 - DNA, 122 bp, Homo sapiens
cagaaaggcgttggaagcgaagcggagcccttgtgggggaaagagccggattcaagaggccgactaaaaggggaaatgggcagccaaaccccggaggtaaaaaccccagagatgtcctaata

SEQ ID NO: 242646 - DNA, 122 bp, Homo sapiens
gtacaaggaaaagagaaaggtttattctcttcagaacaaggtcactgaaatccaggaccacgccagggcaagtaactgcgcttccccttttggggatgagaatatacagcaaccaggaagtg

SEQ ID NO: 242647 - DNA, 122 bp, Homo sapiens
gacttgcatgggagaccaaggtcacccagccccatacccgcctttaggtctgaactgaatcgggggaggaggtagcagagtgcagagctcctgcccctggcagctgtgctcagtgtctggtg

SEQ ID NO: 242648 - DNA, 122 bp, Homo sapiens
tgtttccttaagtggtttctatactatcgaggcccattttcccctgagagtccccatttacgtatttttaaagaaggggctcagtagcttgaggtgtagctattccagaagctcttttctga

SEQ ID NO: 242649 - DNA, 122 bp, Homo sapiens
ttatttgtatttcctcttacacaaaaccatcaaaacaagaacagaaaaaggctgaaaatccgttcaaaccccatgttctcagggatattccagggagttcttgaggctgagtgcgtagcttc

SEQ ID NO: 242650 - DNA, 122 bp, Homo sapiens
ttcttcgcctaatttgacccgttctttttcccctccttgaaaccttgctctgtacgcatgcgctctttgagtggcctttcccctagttcaagctcccctccgagtcagcgtcctgttcgtta

SEQ ID NO: 242651 - DNA, 122 bp, Homo sapiens
gccagagcccctgaaagctccggtaggaaattcaatgggcctcctgttcctttaaactctcgctttcgcccccgctgacactttgcaaagccgcggcggcagcggcggggaccacgctgcgg

SEQ ID NO: 242652 - DNA, 122 bp, Homo sapiens
tcagggcggagagcaagacattactcttctcggattgccggttcgctcgcgagacttgagcgttgctaggagattcggcaggcgggcggagccagactcggcggggcggggaggggtggggc

SEQ ID NO: 242653 - DNA, 122 bp, Homo sapiens
cctcagtggcccagggggctccaagttgaagagcccaagacaggtcagagatgggctgggcggcctctgccactcacctccggagagggcagggagcagaggcctcagtcatgaggtggggc

SEQ ID NO: 242654 - DNA, 122 bp, Homo sapiens
accgacacggggacgttcacccttccagcaccaacacggggacgtttactattccagcaccgacaaggggcactgacaggggaatgcacactattccagcactgacacagggatgctcacta

SEQ ID NO: 242655 - DNA, 122 bp, Homo sapiens
gagtcttacatctgtgtagaagttgtgccaagtctaagaaaatttcaccccaggagcagtcgcttagcttccgagtccacacagcagcaacctgccccatggtttttagtttgacaccgtgt

SEQ ID NO: 242656 - DNA, 122 bp, Homo sapiens
agccttgtcacaatttagaacggtcaggttcagactctggccttcccccactggcaaggccgcctgcttgaccagacacaggtcccaggctggcctctgtaaggatggaggccttcaggtgg

SEQ ID NO: 242657 - DNA, 122 bp, Homo sapiens
ttctgttgctggcaaaaaaaaaaacaaaaaacagttttatgtcaaagtccaatatgaaatcgcaaagaattaaaataataatacaaatgctgccaatgtgtatgaaaaagaaacttttaaaa

SEQ ID NO: 242658 - DNA, 122 bp, Homo sapiens
ggtcgtgcaggacgcacttaactccccgcacagtgagccgtgacagcgcgtgtgcagtgtcgtcgccaggaaagcacactagagactcggtgccagggtttttactgggggctgggcacatg

SEQ ID NO: 242659 - DNA, 122 bp, Homo sapiens
ccgagggagggggcgcggccgggcctgcgggggccgcagtcctcccccctgctcccaacgcggcgtgcccccgcccccctaaaggcccggccttcccggccccgccacgtgcgcgcgtcgcc

SEQ ID NO: 242660 - DNA, 122 bp, Homo sapiens
gcccactcggccgggagcctggttatgtaacccgcgaagggggctccggacacgggctggcggggcaaatgtaggccccaggaggagccgctgcggcgcccggctcggcggtaacagcagcc

SEQ ID NO: 242661 - DNA, 122 bp, Homo sapiens
aggtaaacaggattattgaaagctcagacattagcccggtggtggtggtggaaggaggggcgatggggaagcttattattcctgtggatggcatataaggatttggtacatttcagccataa

SEQ ID NO: 242662 - DNA, 122 bp, Homo sapiens
tagggaggggctctcgattctcagtccgcagaggctgggaggatgagctgtcggagttcccggccagggaagagaagggattgttgccaaactgttcccgggcagcactgaacatgggctcc

SEQ ID NO: 242663 - DNA, 122 bp, Homo sapiens
aacagcttgcctctggattctccctagtaagcttggaatgatgctggagcagctctgggccgaggggaccagtctaacgctggacgcaaaagactgggcgccacctagtctgttcatcaggt

SEQ ID NO: 242664 - DNA, 122 bp, Homo sapiens
tgtgtgcacttatgtgtgtgtttctcctgcttctctggccaggcctagcttctccactcacgggtgcacccaggtcatcactgagggctcatggccagcattagagcttctataggtgttcc

SEQ ID NO: 242665 - DNA, 122 bp, Homo sapiens
tgcagaattcaatccactatctttccttatatttcccgctttgagtcctgtccactcccacgttgcatctttcacatgacagttttcagaactgagaaatattaaacatttctgttaggttc

SEQ ID NO: 242666 - DNA, 122 bp, Homo sapiens
taagtcaccttttttaatgtaggacatctttctttgacaggctactgtatctataatcaccgttaatctagctcactgcaatgtcattcacacatcagttttacatgaatatgcaaagaaca

SEQ ID NO: 242667 - DNA, 122 bp, Homo sapiens
ttctgcatgcctagagaggcctcaggaaacttacagtcatggcataaagggaagcaaacacgtccttcataaggcggcaggagagagaagtatgaggaaccaagtgggaagagccccttata

SEQ ID NO: 242668 - DNA, 122 bp, Homo sapiens
tactcatcaaatgagcagcaacaacacccctagaccagctggtcctgtcctgggtcatctcgttgtccccagtttctagctggtataaggttaaagataccctttccagccccaggcaaagc

SEQ ID NO: 242669 - DNA, 122 bp, Homo sapiens
actaagcagtatttcattattatacatagctcttccataaagatcatgagttttcctttccgtggactatccaggtgacacagcctttaagacatctctcccagattcctaattaagagcac

SEQ ID NO: 242670 - DNA, 122 bp, Homo sapiens
gctctgcacagttgggcccaccaccctctcgtgcacgcactttccacacttcacgttagccgccgtcgcccccccgccctaagctcctggagaacagagacctcgtttgtctgtatgcagtg

SEQ ID NO: 242671 - DNA, 122 bp, Homo sapiens
ggccgccgattggttttgccagatttccctgtcggcttccttactcgaggtagagccgcacggcagcgtgaggttgcatcagccggggcgggggggggggggggggggggggggggaatgca

SEQ ID NO: 242672 - DNA, 122 bp, Homo sapiens
cgcttcgccttccggttaactcctcttagagaccaccgttttcccctttgctctgacgggcgggctccagggagtccctggtcaagcaccctggggtcctcttgggtttttcaccggtggcc

SEQ ID NO: 242673 - DNA, 122 bp, Homo sapiens
acacacacacacacacacacacacacacacacagaaatatcaagtttggcaaacaggttgcgaaactggaacctttgtgtaatgcatttggaaatacaaaatagggcacctgttatggaaaa

SEQ ID NO: 242674 - DNA, 122 bp, Homo sapiens
cacagggcccaggcagcggggtgggaggctcaggagatggtggctctggggacccgatcccgaggagagagggggcagcaggcagaggcctgcaatggctcagattgggggaagagggcggc

SEQ ID NO: 242675 - DNA, 122 bp, Homo sapiens
gatgggcggccgggcagagacgatcctcacttcccagacgtgatggcggccgggaagaggcgctcctcacttcccagactgggcagctgggcagaggggctcctcacatcccagacgatggg

SEQ ID NO: 242676 - DNA, 122 bp, Homo sapiens
ccgtggggtgggggtggcaagagtgctctagcatcgcagctccggcgcagatcggaatcccgcagtcaccctggtggcctcgtggtgggaaagacgcgccccagcgaatcggtcgcgtcact

SEQ ID NO: 242677 - DNA, 122 bp, Homo sapiens
gcatcccctgggggtgggcagcagtgagagctttccctctgctgtttgccactgagctcacgtgcctagttctagctccgtctttcggaccactctgcagtgcttcatgcagggaaccggcc

SEQ ID NO: 242678 - DNA, 122 bp, Homo sapiens
ccagagcgctgcggcctccgtgagcggggcctgggcgaagggggcggggcgtcgagggggcgccccggcggtcgcagggaagggggagaggggagcgaggcgcggggggcgccgggagagcg

SEQ ID NO: 242679 - DNA, 122 bp, Homo sapiens
tcatccagagcacgccggcggaagagcacgctgacaggccgtagcaggccagcaggccatcgatctgcagaataacatggtgtttgcctggagcagtcagaggagagcccgggccaccgagc

SEQ ID NO: 242680 - DNA, 122 bp, Homo sapiens
ccccggccacgcgagcgggaacagtctcctccactcggagcggtaagggacccggaaatgcgcgggtgcccctacagagtcttgagttttccccgccctcacctccgaaaatgctcttttcg

SEQ ID NO: 242681 - DNA, 122 bp, Homo sapiens
tgttctctggccaaactgtgcggaatcttacacccacttccccaagtttagcaaggtccgcgttacaggaccttgaaagaaaggttagaaagaagctcagaacacgacgcctgtcttccctt

SEQ ID NO: 242682 - DNA, 122 bp, Homo sapiens
aggctgtgtgagaagctgcagccgccggcagaggagacctcagcatcatctagagcccagcgctggccctgcctccgcctgccccgccgccgccgtcgccgtttctgttcctgctactgtcc

SEQ ID NO: 242683 - DNA, 122 bp, Homo sapiens
gaggcgggactgccctctggcctgggagggcgggaggagccagctgctggcagcatatggcgctgtggtcagggtgtgctcctgaggactgctcaccaggcctctctgcctggccgtcggaa

SEQ ID NO: 242684 - DNA, 122 bp, Homo sapiens
ccaatctcagttaagttattaatgcactttgcccagactagtaactctcccctgacgttccgcatttcccttgcttctcccggaaacgtggggcgcccaggaatcctaaacttccaatccct

SEQ ID NO: 242685 - DNA, 122 bp, Homo sapiens
aggcacagcacctcccatgaggtgtttagagtcaattatcctcatggtaaatgcctgacacggaagctctccaataaatgctagctgaggtggagtttttcatgacgattattattcagacc

SEQ ID NO: 242686 - DNA, 122 bp, Homo sapiens
agggaagaagaaactacactgcggggacgagcgtaagagtgggcacgagcgacaaaaggtcgtgaagcgggtgggaaaccgagcactggaatcatggagccgaaggactctgggcgagcaga

SEQ ID NO: 242687 - DNA, 122 bp, Homo sapiens
caacataaatgcccagtgcactgtggtctggggagacatggatgaagaaaaaaagtgagacgcatgcttgaaaaattcataatgcaaatgacaggccagtgtgagacggtgtgcttctcctg

SEQ ID NO: 242688 - DNA, 122 bp, Homo sapiens
tggccttttggtggtccaggaagactgccagatccgagactagaaaacaagcccagtctgcggttgatccaaagggagagaagtgatgttgtaggcacagaagcctagaggctctggggtgg

SEQ ID NO: 242689 - DNA, 122 bp, Homo sapiens
ctgggatgtgttcagtttcttccttttggtggggttcgtggtctcgctggctgactttcccggtgaatgttacagctcttaagggggcatctggagctcttcgtttctcgcggtgggttctt

SEQ ID NO: 242690 - DNA, 122 bp, Homo sapiens
ccaataagttacacactcactcaggtactaggaaggttattgcacagctccttaactgatcggggtcagggcagagtggtcactttccccacagccaggctctggatttgcctcctgtgaag

SEQ ID NO: 242691 - DNA, 122 bp, Homo sapiens
atgcacaggcgtgttccttcccagaacagagtctgcagagtcgggtgacagcagtgcagtcgggggcgagcagagggagaacatgagagcgcctgtttatgtgtttcgtgccacatcattgt

SEQ ID NO: 242692 - DNA, 122 bp, Homo sapiens
agggctggaaaatggcaaggggcaccgaggcctctgcggggagctgtgtggcggcctgggcggctgctccccttgtaacagactccaccgacaggaggcgctcctcctgtcaagccacagct

SEQ ID NO: 242693 - DNA, 122 bp, Homo sapiens
ctacaaatagccccctctaaaaataaaactcagacccttgagaggtcagccgcttgtagacgttggctttgggtgcttgaggtggagccgggccagttagagaatgagacacgccttagaaa

SEQ ID NO: 242694 - DNA, 122 bp, Homo sapiens
gattccccgctcagggcctttcgcgccccggcccttcgcgagccacggccccagcacgcccgggcccccagaacgcaccaacagcaccacgctcgtggtgcctcaggttgttaaaccagccg

SEQ ID NO: 242695 - DNA, 122 bp, Homo sapiens
taggtatcaggaagctcggctccagccgctacctggtgacgctaatgacgtgcgatgtctcgcagctgccgcaattagacaggccaagccttcgcctttaagaagctgactcacgtggatgc

SEQ ID NO: 242696 - DNA, 122 bp, Homo sapiens
gggctgctggccccgctcctgccctggatcctgcccgggttttcctcctcgccccaggagcgctcctcccagaacccgttcctggatccgctcccgggttttgtgccccccccccaaaaggg

SEQ ID NO: 242697 - DNA, 122 bp, Homo sapiens
caccctaactcctggtcacaacctgaacccctgcttcaggtgtgagaactgatagaccggcgttggaatggaaggagggtgaggcaagctgagtgggattctcgtgtccccagccccgcccg

SEQ ID NO: 242698 - DNA, 122 bp, Homo sapiens
aggaagggtggtgttggaatccaggccccctgtaccttgcaggtgcccatggcgtccgagcggggcaaggtcaagcacaactggagcagcacgtcggaagggtgtccccgcaagcgcagctg

SEQ ID NO: 242699 - DNA, 122 bp, Homo sapiens
tgggtaaggctaaataagcttcccgaggtgcttgcctggctgctgggctgcctccctggccgtgcctgggtccttgagtagccctcattgtggtgtgaggcagcgtttttgtcctgcaggta

SEQ ID NO: 242700 - DNA, 122 bp, Homo sapiens
cttttattggcccgcttaatgtcctccagagtgtcatgcaaatacaggaggcttccggagcggtccttgccatagcccacagtgttaacatgctctggttctatgaggaaggcgcggtcacc

SEQ ID NO: 242701 - DNA, 122 bp, Homo sapiens
cttcagtcatattgagaattccttgtagttgcttagtgctaccctcttcttccagtgtcacggcctttacacatgctgttcatgtgctcccttctctgtgtgtagcatcctgcacaaagcct

SEQ ID NO: 242702 - DNA, 122 bp, Homo sapiens
ggggagggggtagtgcgaggaggaacttggaaggggttgggggcagcgggatgctcagggcggcgtagaagaaccagggccccacaccaacccccgccctcgggagcttcgggccaggaggg

SEQ ID NO: 242703 - DNA, 122 bp, Homo sapiens
cacgaccacgatgaacggctgcatgaggctgtgttcctccgtggggtggacatatatacacgcctgctgcctgcccttgccagtgtgcctgccctgcccagtgacagctgagccctggaact

SEQ ID NO: 242704 - DNA, 122 bp, Homo sapiens
cctcgcggaatcagtgagttcttccctggaaactaggtctcgtataaacttctgtaaatgcgacccaggaggactaggcaggtcacacagtgaagaagggaaccagaaacttcacttgctaa

SEQ ID NO: 242705 - DNA, 122 bp, Homo sapiens
gctattttccatttcattaatgatagccatcctagtggatttgaagtggtaccttattatcgtggttttgattgcattctctattgactaatgatatcgagcatcttttcatgtattttttg

SEQ ID NO: 242706 - DNA, 122 bp, Homo sapiens
gcaaggtaacaaagcccctttctccagcgagaaaggcgtcgggccccttgtgtgcagctacgcgctccgtgggaaccgctgctggcgtgctggccactcaggttgcctggcgatgaggggac

SEQ ID NO: 242707 - DNA, 122 bp, Homo sapiens
tagaccaggaaaacgtgagaagctagagctgctctactcagttggcccaaaccaggactccggagattattcccttatacagcaggcaccacattagagaaaggattctggaaaagtgagct

SEQ ID NO: 242708 - DNA, 122 bp, Homo sapiens
ttctcaaccctggcccccaccgagttgagacagggcacctcgtaaaaaggtgcttctggccgagcgggaggcggggggacgggcggcggaaagcccccagccccgagttcttctcaataaaa

SEQ ID NO: 242709 - DNA, 122 bp, Homo sapiens
ctggctggagtgcagtggcatgatcttggctcactgcaacctccacctcccaggttcaagcgatgctcccacctcggcctccctagtagctgggactacaccatgcctggctaatttttgtt

SEQ ID NO: 242710 - DNA, 122 bp, Homo sapiens
tcaggtggacctcatcattgtcccgccccaccaaggcccgccctcccggccccctccctccgcccacctcctggaggccacaggggcagcagctgcagccacagtgcagcgggcggagcaaa

SEQ ID NO: 242711 - DNA, 122 bp, Homo sapiens
cagtaaaaagtaaaaatacaaaatttaaagcagcttttaacacatgaaataaccagctagcgtcataatgacaggatcaaattcacagataacaatattaaccttaaatgtaaatgggctaa

SEQ ID NO: 242712 - DNA, 122 bp, Homo sapiens
ggctcacgctgactccacctggcatacctgatgagccaaggagtggacaccagacccatgcgagccagccagaactttctggaatgtgggtaaaaagtttgttctctctagtgacccatatt

SEQ ID NO: 242713 - DNA, 122 bp, Homo sapiens
tgaggcagtgaggcagtaacgctcccaggctcctggactggcctcaaagtccaaaatggccgagcttctggcttcccatcccatattctattggaggagccactggcctctggtgtgggagg

SEQ ID NO: 242714 - DNA, 122 bp, Homo sapiens
tcactgacacaggtttataaaacatctgatatagaaagatactctctaaatacaggcattcgaacaagtatttacctaaagtttaactttgggcacatcattttaacctattatgtagtttc

SEQ ID NO: 242715 - DNA, 122 bp, Homo sapiens
agctaacaagcacagcatatttcacagacgctgccagctgcacagcttctatttctcttccgtatccagctccatgcaggtgactgagatcttcctctgctcatctctcatggagaccacat

SEQ ID NO: 242716 - DNA, 122 bp, Homo sapiens
ccagtttccaaagctgattgtgtcttcctttgccctcctttcttttctactatgtgcattcggtgctatgaattttcctctaagtactgcgtttcctgcatctcacaaattttgttacattt

SEQ ID NO: 242717 - DNA, 122 bp, Homo sapiens
agccacaggtatttctctttctctgactgccttttctctaatgtagatgaggctgtggaccgagagatagagggagacctgctgctgggggatatgggccagggcatcccattcaagccagg

SEQ ID NO: 242718 - DNA, 122 bp, Homo sapiens
cggggcgtggggggggcttgcaatggctccaaccggaagggcggtgctcgagctgtggtgcgtgccgctaagttgtgcgttccagggtgcactcgccggcgaggctgcacggcgccggtttc

SEQ ID NO: 242719 - DNA, 122 bp, Homo sapiens
aaaattatttggccactgccctcactgccgctgctgctgttgacctcgccagggctgcttcgtctccgaggtcagactgctcccaatgccatgaacggagacagcacctttgcaaagagacc

SEQ ID NO: 242720 - DNA, 122 bp, Homo sapiens
ctgccagttggcagcactgattgagtgtgcgggggtcctccctcttctgaagagagtccccggagggatgtgtccagtgtgtgtccttcccgggactgaagcctggaaaagcacaaagcatt

SEQ ID NO: 242721 - DNA, 122 bp, Homo sapiens
ccgcgcactgcaggaagggggcggcgacgttgaccgccgcaagcagccaaaggagggcggcggctgagagcggccaagaccaagaaagacgcacagctgtggctttactaaaccgccgggcg

SEQ ID NO: 242722 - DNA, 122 bp, Homo sapiens
caggtggggcctctgacctcatcccggaggccgcttcagttctcgaatggatgtctcttccgcctcccgcgggttaggctcgtgatagagagtgggctgtccgggggaggtctgtagttttc

SEQ ID NO: 242723 - DNA, 122 bp, Homo sapiens
ggcagctagtggttagcaccagctagcacagcactcccccaccaccgccccgccacgccccgaccggccccaacagcacatcaacttcatcccaggtccatgttctgctgtacttagtaccc

SEQ ID NO: 242724 - DNA, 122 bp, Homo sapiens
cccaaggcgggatctaggctttggaacgttggaggtttccggccacagaggcagggcctccggggagccaagaggggcggggagagacacacacagagaagcagaggagaccaacggaccgg

SEQ ID NO: 242725 - DNA, 122 bp, Homo sapiens
ccaggaggtggaggtgggctacgggaccaaaggtggtggctgggagggattcagaaatcccgccccaccccttggtacagcatgaagcacacccctttgatgagaaggaagacatccgtgct

SEQ ID NO: 242726 - DNA, 122 bp, Homo sapiens
ggtctccctttgtcattctaggggagttcccacaggcaggggctgtgctcagtgctggtgcggcagcagggctgacacctccagcatcctgagaactcagccacatggggatctgcggcatc

SEQ ID NO: 242727 - DNA, 122 bp, Homo sapiens
ctcagcctcactatgccgcgaggctccctgggaagcgtagttctggaaatgcattaaaaacgccataggctcggaccggaagactactattcccggcgagcattgtgattcgaagcctgccg

SEQ ID NO: 242728 - DNA, 122 bp, Homo sapiens
cacaagatttcacacgtgtgatgtggtgtggatgaccaggaacggcttgtgatctgtggccgccactggtccagtaccactggtcaagatgggagaatctctccaaaaacaatatgctgtta

SEQ ID NO: 242729 - DNA, 122 bp, Homo sapiens
ggaggagacagctgtcgggagccggcgtctgtagaagagcgatgctgcaagatggggacacgtgtctgtccagggagggagaacgcgccgaagccctgcactggcactgacgctccctgcct

SEQ ID NO: 242730 - DNA, 122 bp, Homo sapiens
ctacattaagcaccactttcacttacctgaaatattttgagttaaattcagcagtatgtacggttgttaatatcagaaattaagaataactgtgggtctcaagttcccttttgtggatacat

SEQ ID NO: 242731 - DNA, 122 bp, Homo sapiens
gccaaggacccggagcgcgcgtctgccctcacggaaggctctgtaattccttttccgcaacgggagctgcagatctaaaggcctctcccatccgtccggcaggcccacgctgccaggaaatt

SEQ ID NO: 242732 - DNA, 122 bp, Homo sapiens
tgtaccacccagtgcgttcccaggtgagactacatgtttactttacttagaatgagctcccggccacaaataaatcaggagaaacggaggtatcttcctacctccctattttcctttttttt

SEQ ID NO: 242733 - DNA, 122 bp, Homo sapiens
cgcgagcgggcttggccgcccactggctgtcaacaggtgctgcgcagacagggggtgctgcgggactcgctgtgggcaagaccccggtggcccaggagaggaacgcggccaaggcggcccct

SEQ ID NO: 242734 - DNA, 122 bp, Homo sapiens
tggacaccagagacacgctagaggactgaggaggccgagggggcagctgctgacccgcgtcgaccagaaccagacttgctggtgactgtgctgagttctgggcctgtccctgtgcgggcaga

SEQ ID NO: 242735 - DNA, 122 bp, Homo sapiens
taggcggtgaagtagaacaggataactgcatggactcctaggtacatttgtgtatctattcgtatttattagtaattaaacttctatgttggtctataagccataatgttgatgattgtctt

SEQ ID NO: 242736 - DNA, 122 bp, Homo sapiens
cgtcactgccgagcctcctctgtcatgcagcattggcttgtaattgtaatgcatgttgtccgggtaacctgtcacccatgggtcattacagccggcacaccacacggcggaggctgcaggaa

SEQ ID NO: 242737 - DNA, 122 bp, Homo sapiens
tcaggcaggaagcaaatggcaacttcaccgcggtgactgaggaatgcttaacgaaggcgccgcccttgacaacggtgtgggttggtaaaaggaaacagccgggagccctgcagcgccggtgc

SEQ ID NO: 242738 - DNA, 122 bp, Homo sapiens
tcgcaaacaaagaagtcagttgggcgccccgaagctgctggccttctgagtggcggaaggcgccaggctcggtgattgaaaccacatgtgctggaggtttcaagagcagcgacccagacacc

SEQ ID NO: 242739 - DNA, 122 bp, Homo sapiens
cgataggtgacattagtctttggagggagccattgctagtttttcaagcagggtggaatgcgaggagagctgggcttcagaggtgtatagaaccaattaggagttttgacccgccatggttt

SEQ ID NO: 242740 - DNA, 122 bp, Homo sapiens
ccctgagccacaacaggccacaccgctcacctctggcagcaccgcagccttggtcttccccggtaaaaccctgacaccaggaccgtgggaagcagatgaattcacatgcattccgcactttc

SEQ ID NO: 242741 - DNA, 122 bp, Homo sapiens
tgcctctggcttgaatccagcaccatcttttactaggattggtgtccttgcagggggttccgtccttagcaccttttttttggttagcgggctataaaaaggatcgccaagcagagcaggcc

SEQ ID NO: 242742 - DNA, 122 bp, Homo sapiens
aagccaaacagcagcatttcttcagacttggaaatgagttttgattgtttcttcataaaacggcataaagctcagataaccaactgcagttcttggaaataattaaaatgtgtactcagctc

SEQ ID NO: 242743 - DNA, 122 bp, Homo sapiens
gggacccaagggcgacgtggtacgcaccgctggtgtattcccctggcctcatgagggtggcgggtatctcagccttggttaattgcatttgctttcttcatagggagcaagaggcgtttctg

SEQ ID NO: 242744 - DNA, 122 bp, Homo sapiens
aggcagagatttctagcaccctgtcccacatcccggccggaggcacgtgcggtgcaatcacgggcctgttcccacaccaccaccaccgagtcgacggcttacctgagggttcactcttgggt

SEQ ID NO: 242745 - DNA, 122 bp, Homo sapiens
agagatcctggctgacatccgttttggggcagcgcatgagaatatggaaataggtgatttcgttgttttttatcaggccatcgttgacatatgtatgaattaaatagaagtgggctatatca

SEQ ID NO: 242746 - DNA, 122 bp, Homo sapiens
cagaaacggagccgagggcgcgaccgcggctcagtagtctggaatgtgggtcccagtatccgactagcttcccccgaaggggtcttggctgtgataccgaagcacctgagcaactgcgttgc

SEQ ID NO: 242747 - DNA, 122 bp, Homo sapiens
agtggtaaaagctgaacgcgggcgccctaaacctagcctgcctccgacttaatgcgctcccggaagcctgtctcacttaatcctggctgtcagcctgcaggtcctggctctggcatccgaga

SEQ ID NO: 242748 - DNA, 122 bp, Homo sapiens
ggggcttaaaaagcagcaggggttcctgcccttccccacactggccggtgtggtctggggcgggcctgatgagcacctggattttcacccggcgtgctggtaattcctacacttgtgggtgt

SEQ ID NO: 242749 - DNA, 122 bp, Homo sapiens
tcatacaatgaacactcattgagcttatactacatgccaggtgctggaggaggcatggggcgcccaggagaaagatgctcgctttgcggccacagcccagtgggagggagacccatacctac

SEQ ID NO: 242750 - DNA, 122 bp, Homo sapiens
ccccgcccacactcgctggtatataagtcggcgtggcgccgcggtgggtgttgagaggcccgcgaactgacgggccagtgagcgggcgtcgggagtgggcggatgcgttggggttcgggtcg

SEQ ID NO: 242751 - DNA, 122 bp, Homo sapiens
cctgtgactatgttatgctacacggcaaagtcaaaataaggccaaagatgaaatcaaggacgcaactcagccaaccttgagatgaggaagtcatcctggatcattaggggtggcaggaacaa

SEQ ID NO: 242752 - DNA, 122 bp, Homo sapiens
ctcaagcgatctgcccacctcggcctcccaaagtgttgggattacaggtgtgagccaccacgccaagcccagctgaacttttaaggaaaccagacatactgtccatatttatgggttttttt

SEQ ID NO: 242753 - DNA, 122 bp, Homo sapiens
acttagttgtatgtgagggatcagagaagttcagaggtagaagggactcacttaatagcacgctctattttgcagttagggaagtcgagtccagagagaagatgatgttcatggagagaacc

SEQ ID NO: 242754 - DNA, 122 bp, Homo sapiens
tcggggcgcagttgctggtggggagcggtgcctggcgggtgtcgtgtgtgagcagctgtgcgcagagcggggtggcggggtgggtgtgggtggtccagccccacgcccagagccccctgtcc

SEQ ID NO: 242755 - DNA, 122 bp, Homo sapiens
cggggagccaccgggagccccagcctgggtttcaatgagggtgctcctggccgccagagccgtggagcctgccgctgaccgcgcgtgtctccccagaggatgacggccgaggcgcaccggcg

SEQ ID NO: 242756 - DNA, 122 bp, Homo sapiens
cagcgggccctgccccgcaggtctcaggcgtctacacgatgcttgcagcctcgcctcctccgggatgctcgagaccttgatactaggccgtcgtgaatgccttcccaagttcagtcttagct

SEQ ID NO: 242757 - DNA, 122 bp, Homo sapiens
tgtggtttgtttcttgctgtttttactctgtcctctgtgcgtgcgtctcctactggtactcgtgggaagggttaggtggaaaagaagcaggccctgttctcacgtttgcttttgtgttccca

SEQ ID NO: 242758 - DNA, 122 bp, Homo sapiens
aaatctttaaacaggcatgtgctggaggtgctactatcaggtgtttcagtggcagcatcacggggaacctgtttctgcctgttgggaaattcatttttggctcagattttactcaggaggtt

SEQ ID NO: 242759 - DNA, 122 bp, Homo sapiens
cgtacaggttcatcttgtacttgtggtctggctccaggcccgagatggtgaccccatcctcgtgtcccggcacccgcaccgccttgggctgcccgtccccattcttaaactggaccaagaaa

SEQ ID NO: 242760 - DNA, 122 bp, Homo sapiens
cgcggcccttcagcagggtccctcgccgtcctccccgagcgtcggggtggcagcgcaggtcgttgtccagtggaagacaaagagaagggggagtctgaactagaactcgccggcaacgtaaa

SEQ ID NO: 242761 - DNA, 122 bp, Homo sapiens
tattagcacagttatcaaatagtttttcttaagtattaccttgagctatattaacagtgccgtagacagagtggtattactatccctaagaaatggtattctaatctgaagtcagttggcag

SEQ ID NO: 242762 - DNA, 122 bp, Homo sapiens
cagatgcagtggcagggggacgagggtgctgcttacccagggaaatgcaccccttgttcccggagctcacagagagccttccagcaacctgatgtcttcccactggggatgtcagggccact

SEQ ID NO: 242763 - DNA, 122 bp, Homo sapiens
cttcagggagaacctgtccggcacgtacatgcccagcattttcccgggcgcggcggccgccgcctctctcaacaccggcgcttagcgcccggcaggcggcacatcgaaatttggggtgccag

SEQ ID NO: 242764 - DNA, 122 bp, Homo sapiens
tctatttgtacaccttttcacattttagctggcagagttcaggacttgatggaaacataacgaagggctcagaatgtactcatcgcagactgagcccatatggtcacagtggggagagcacg

SEQ ID NO: 242765 - DNA, 122 bp, Homo sapiens
tggccttcatgcggagggccgcgatgctcgaggtcttgcggtccggctcgccgttgagctcgtagccattgaggcctgggctgaggctggctgctccaaacaggctgcccatgtgcgtctgg

SEQ ID NO: 242766 - DNA, 122 bp, Homo sapiens
cgccgagtgcgcgcgcccgtcccgcctgccttctgctcaccgctactctgtctgcgcctgcgtgctttggctccctggatctggtaggccgagttctgttctggggcctgagtttgcaaagc

SEQ ID NO: 242767 - DNA, 122 bp, Homo sapiens
cctgaggcccgcggcccggggccagccgttcgccagacgcgccgggcaggtgaagctcaccgtaggcatcgcacgtgccttgtgtgtgctgccgcggtctccctgcaccttcagagcaatct

SEQ ID NO: 242768 - DNA, 122 bp, Homo sapiens
taatgaaaatcaccactctgaacttcataaagtcattgttgagaatcaaagtcagaggcacggacatgcattagcagactttttctagaaagggccagataggaaatacttttgggtttgcc

SEQ ID NO: 242769 - DNA, 122 bp, Homo sapiens
tccgcggccgggccgggacacggcggtgtcgaaatacctcatggagtgggagcctgggggcgaggaggggctgagacccgcccgacccacctccctgcgcggctccccgggtcctgcgccct

SEQ ID NO: 242770 - DNA, 122 bp, Homo sapiens
ctttcttagctgccctggctggtgtttcatgtccaccagctctgcgttcagcacagcactcggacttgcctaggaattgtaagatttcttttcaaatttattgaggaccccaaagcacttca

SEQ ID NO: 242771 - DNA, 122 bp, Homo sapiens
cagcatggatcctgtccactgggtctgcacccaagcactgggacaccagccatggccatacggggtacagcacgtgggacctgctggatgtccccctcacagccctttccctctcccccagg

SEQ ID NO: 242772 - DNA, 122 bp, Homo sapiens
tacaaagtttgtatttgtcttcttgttatctctaactaggcaatgattgcctatcacccccgctttcaacaacattataatttcctcaaggacaggatattcttacatgtctttctatccct

SEQ ID NO: 242773 - DNA, 122 bp, Homo sapiens
ccctcctgctgtggagcagcagccgaggtggggctggcagctgggggaggcgcctgggtgcgccgtgacctgggagcagccctctccgccccagcccccgcagctctgaccgtatcccgcct

SEQ ID NO: 242774 - DNA, 122 bp, Homo sapiens
ttcgtaacaaccctagaaaccgaaaatgcttaagttcccggactttggtgttcgccgcaccggaaactgagcggagtccggccgcctgcgcagtgcgccgcgccccgggttccggaatgcac

SEQ ID NO: 242775 - DNA, 122 bp, Homo sapiens
gcacccatgaataattagaaaatacaagcgccgaagtgacgggggcgggagctaggagggcgaggggaaacagaacaatcttggaaaaatctcggttgttgcaaaaaaagaataaaatgtat

SEQ ID NO: 242776 - DNA, 122 bp, Homo sapiens
atcacgtgtgttcctgagagactgaggaacccactgaatggaaacgtgctatgctggtaccgagaaggtggcctccaagccagtgagctgagccaccagagcctcgagaagccagtgagctg

SEQ ID NO: 242777 - DNA, 122 bp, Homo sapiens
cgtagtatgctagggtgtgacagcagccagccacagctggatctgatgtcttgtctgccccgcccagctttgcatatccatgttctaccacaggaaggtggcctgccaagagtctgctcaaa

SEQ ID NO: 242778 - DNA, 122 bp, Homo sapiens
tggctcaagcaacagcaattgcagctcctgctggttctactaaggaggtaaaaataaaggcgactcgctttcaggtgggcaatgatctgttactgcataacaaaaaaaaaggcagtgttcta

SEQ ID NO: 242779 - DNA, 122 bp, Homo sapiens
gtgactctcgctagctcacctcattgtgacctggctcccttaccagcttgtagttatctccggggattggcatgagtgcagtgtgggttggggccgggggtggggggcagaggggggtggcc

SEQ ID NO: 242780 - DNA, 122 bp, Homo sapiens
cagcgcgcccagccgtttggggccactaccggtctctgcgtcttgatggtagtggtcgcccgggcccagctgttttctctttatctctttgtcttgtgtctttatttattacaatctctcat

SEQ ID NO: 242781 - DNA, 122 bp, Homo sapiens
gttgccacttttccggaggtcgcagtgttaacgaggtgcccgccctagggtcgcagtggtcgcggggtttctgccaccagtcacaaaccccggcctcgaaggtcccactccgtccctttcct

SEQ ID NO: 242782 - DNA, 122 bp, Homo sapiens
gccggcgcgagcgcgtttttgtggcgcctgccccgccccctcgctccaagcccgcctccccggccccgcccgccatggctcaaccttcatccgctcagaggcaaatcagcgcgccaaagtgg

SEQ ID NO: 242783 - DNA, 122 bp, Homo sapiens
tgtgtccattcccttagcctccagggacaacccggaaaccacatttcccagcgtgccgagcgcctctgcgcaggcgcaaagagtttccctcgttgccatgggaacctcgccccttctagagt

SEQ ID NO: 242784 - DNA, 122 bp, Homo sapiens
ccaggaaaagctgtagggtctcactcccaccccaaatttgttcttttgagggcctgaattcgtacaaagttctttgctgaatctttgcaatctttgtctgaagaatgaatttgttccctgag

SEQ ID NO: 242785 - DNA, 122 bp, Homo sapiens
ggaggagggaagtctcagggaactggattgctcgggggtgtttcccgactctttcccagtcgtggggctggtgggcggtattttcccaaaaggatgctgtccgaggtagctgatgccctagg

SEQ ID NO: 242786 - DNA, 122 bp, Homo sapiens
aacggcagatcctagagtccttgcctaacacagaggagagccttgagtcccagagagaggcggtaattagcccaggattacacagcctgcagtgggctcagtagccatttctggcctgcctt

SEQ ID NO: 242787 - DNA, 122 bp, Homo sapiens
cccgccatggctccctctgtgcactttgtgatcagtaaaggtggagacagtcacatcagacggcccccagacgaagtgacttttaaacacactcccggcatcccacggacggagtgcctcat

SEQ ID NO: 242788 - DNA, 122 bp, Homo sapiens
gtagagcccagagcactgcctgactcataatcagccctcaataagtttagatattattagcgttagtcatacatgcctcttccattttcatatttttgattgcttttgttgttctgccaaat

SEQ ID NO: 242789 - DNA, 122 bp, Homo sapiens
tttccctgggggtgagtgtctaaatacctgggccgtgctatggggcagacaagacatgcccgcatggagacacatctgtggacctggtgttatgacagcagggggcttgtaaccatgaggcc

SEQ ID NO: 242790 - DNA, 122 bp, Homo sapiens
aaagaaggggtcacagggtctctgatgcctgaaagttcggaatcccctcaagtctcttttcgtttgattgaagagacttgagggtgggcgggtctccgtcaaacatcagtatcaaccgtaca

SEQ ID NO: 242791 - DNA, 122 bp, Homo sapiens
atggcggctgaaggctgggcctcctgcggtctgcttaccctgagcagctatgcatgcgtgcgcacatgcctaccccacctgcctggggcgcgcgtggccacaggcacccttcccagaaccgc

SEQ ID NO: 242792 - DNA, 122 bp, Homo sapiens
gagaaccttatattgtcctgaagagaggtgatgacttaaaaatcatgctcaataggattacgctgaggcccagcctaggtgagaattttggaagaaggtgctgggatccggagttccctgga

SEQ ID NO: 242793 - DNA, 122 bp, Homo sapiens
cccaccctgatgtcaccatctgaccctagagacctaaagtagtgttacagtgagtaaggtcggagtatgacaagacaaccctctggaggtcatcccagttctgtagtttgtctccaggtcct

SEQ ID NO: 242794 - DNA, 122 bp, Homo sapiens
cagcgtgaaactcatcttttcgcgagaacttgtttttccgggatggaaatgacagtgtttcggaagagctgttggtttcaaactatttagagcttggaagttccaagaaagacacagattcg

SEQ ID NO: 242795 - DNA, 122 bp, Homo sapiens
ggcactgcaaacaggaacgggtctttcccgcttcccgcgtccagctccgtcagggtagtgcgaaaatgtgagaattaaattccccacctgggggagcagccccagccctgtgcccggggttg

SEQ ID NO: 242796 - DNA, 122 bp, Homo sapiens
caggctcatgacccttaaaggtggggtcagcctgggatcccctctttctcttggctcccacgaccagtcctttacaagcacctctctctcccacaggcccgacaacctgcgagaaatctcga

SEQ ID NO: 242797 - DNA, 122 bp, Homo sapiens
ggctgcgcagagagcgcgcttcccagctggagagcctaggaacggtggcgcgggcggaggcgacagcgaggacccaaggctggggtttcctgcttggatcaggagtgcctggggagtaagtt

SEQ ID NO: 242798 - DNA, 122 bp, Homo sapiens
agacttggcagaaggtggtgtaggatctgaggggagaaattaagagatctgttttgaatacgccaagctcaggatgcctttgagacactgaagtagaggtgttgagtagacagttgaataca

SEQ ID NO: 242799 - DNA, 122 bp, Homo sapiens
gcggcgtgcgcgtgtgccggagggggcgcgtgggggcgcgtgggggcgcgggaggggcctcggccctgccatgccggtctccgcccgcgggggaggagacgggggaggaggaggggagcagc

SEQ ID NO: 242800 - DNA, 122 bp, Homo sapiens
ggccctaggaacttctaaagacttgaactcgcagcgcggaactctgacgcaatccagggccgaggaaaaatgattaaaacccaacaagctcgagtgctggggtccaccaagcgggccgtctt

SEQ ID NO: 242801 - DNA, 122 bp, Homo sapiens
ggccctgcctgccaggaagagatgtggtagggcgtagcatctagtcaggacaaggcaccacgtcccctcctcggaaaccctcacggcctggctggtgaccctggcgccacagagacggcaca

SEQ ID NO: 242802 - DNA, 122 bp, Homo sapiens
gtgtgagacttaaaacatggtgcctatatctgagagacctgtgtgaactattgagaagatcggaacagctccttactctgaggaagttgattcttatttgatggtggtattgtgaccactga

SEQ ID NO: 242803 - DNA, 122 bp, Homo sapiens
gctgcctgaggacgtagccttccgcatctgcgccgtgcgggaggcctttgaggaggcgggcgtgctgctgctgcggcccaggacttccccaccaggcccagcacccgggcctggcctcgccc

SEQ ID NO: 242804 - DNA, 122 bp, Homo sapiens
cggcttcctgtgtgagcaactgggtcacagggaacaaaaaatttcagtatacacagcggacgtcagcagaggtgggcggcaggcgagcctcctgcaggagcaggcggtcccctgaagaaact

SEQ ID NO: 242805 - DNA, 122 bp, Homo sapiens
gaaaatattctctggtgaaaacactccaggcgaaagcaagccttagctcggaattccctccgcggccggcgcctcccctccgggggcctggctcgcagcccgtggggacgagggcctgcacg

SEQ ID NO: 242806 - DNA, 122 bp, Homo sapiens
atgtatcttgcctttgtttgctttcgttgcatgtgggatattgcggggtgggggagaaggcgagttcctgagccttcagtagaccagatgagaatgaggtatggaatgtggggaaacattca

SEQ ID NO: 242807 - DNA, 122 bp, Homo sapiens
gctgtgttgccatgccgtcatccggttgctatgacttgtgaggttgtggatgtgccagaacgtgaatctattaatttaacaggaactaggctcagcacatatattccttgttaggtcatttg

SEQ ID NO: 242808 - DNA, 122 bp, Homo sapiens
cctttgcgcctgcgcagtgtagccgtggcccgcgggtatttttggctgctggaacaagttcgaatctgagggttttgtccgagtggtttttcaaatgttctttaaatcattccactgatatt

SEQ ID NO: 242809 - DNA, 122 bp, Homo sapiens
gcagctttataaacagccgtggtgtgagcctcgaagggaaccatcagcgcctcctgtccacggagctccaggtctacaatggcagcggccgccagccccgcgttccttctgtgcctcccgct

SEQ ID NO: 242810 - DNA, 122 bp, Homo sapiens
tttttatgataattccccacaagttgtgaaaagcgaccatccttggtgaaattaatttaacgacctctcttccccaccctgtggtctctccctgcctcccctcctctcctctctccccgtct

SEQ ID NO: 242811 - DNA, 122 bp, Homo sapiens
ataaggaagaaaaacaatgacctcagctttagcattattttacaatataaattcagatcccgtgactgaaaactgttggacttaaaagaggacgctccaggagcgcaaaagcagttgggccg

SEQ ID NO: 242812 - DNA, 122 bp, Homo sapiens
gagaaaactcagacagggagggcgcagggccagaacggctccttaaggcaggcagggctgcggggaggctgggccagccagcctgagggggtaggcagggtcctgcagggcctggggcttcc

SEQ ID NO: 242813 - DNA, 122 bp, Homo sapiens
cggaccttcgcggtgagtgttagctcttaaggcggcgcgtctggagttgttcgttcctcccggtgggttcgtggtctcgctggctttaggagtgaagctgcagaccttcgcggtgagtgtta

SEQ ID NO: 242814 - DNA, 122 bp, Homo sapiens
caggacggaatggacccggggctggacagaagtcagaccaggtctgaacgcccctggcaacggcaggaacatgggaactaagaaggtgctgaacgcactgaccacatttggagacgctggga

SEQ ID NO: 242815 - DNA, 122 bp, Homo sapiens
atgcggcaccgcggcctcagcctggcgaaggccttccaggtgggcgggcctttaggggggcggtgtttcgagaggggcgtgtcttccggggacgagttttccgggcggggccggcttcggga

SEQ ID NO: 242816 - DNA, 122 bp, Homo sapiens
gctgcagcgccacctgcaggccaaggagtctttttctgggaggctggagctgcagcgcgacgtgcaggccaaggagtctttttctgggaggctggagctgcagttgcagtgaagtcacaggt

SEQ ID NO: 242817 - DNA, 122 bp, Homo sapiens
agtgggaataatctaagggcagcgccaacggggtgaagaggcaggcggtgcccgccagcacggccgtcttgtgcaggcagttgcccacggtgatccagcgggctgtctcgtcgccaatgcga

SEQ ID NO: 242818 - DNA, 122 bp, Homo sapiens
ggctgaggctttccccttgcagatcctctcagccatggcagaaagggtggagagggcaagcggaggactgggcagagctgcacggacacctggagttcttgtctggccacttcccatgttag

SEQ ID NO: 242819 - DNA, 122 bp, Homo sapiens
aaatctggagtaaattgctaagagggattttatctgacttaggtttgcaatatctttgagcgtattgtgttatcaccctattgcatatttggtggtaaggcaacagaacaccaacaaaatta

SEQ ID NO: 242820 - DNA, 122 bp, Homo sapiens
ttctcctccctcacaaggggcaagtttgcccaagaggatagcagctctgggaattagcagcggtggttggtgctggcaccaggccaagggcccccagacacacgggggcccagggatatgct

SEQ ID NO: 242821 - DNA, 122 bp, Homo sapiens
gataatctgtgtgccactatgaaaaggaaataggcagatagccaacacttctttatcaaacgggctggagctgagactgtcagacggagacatggacactacttggtcacagagactagccc

SEQ ID NO: 242822 - DNA, 122 bp, Homo sapiens
agaggacgggctcacccagccgtggggccgcgggctggacatccagtgggagtgggaagccgccgtctcaaggcagaattccctctctgggacacctcgggttttgctcttaaagctttcag

SEQ ID NO: 242823 - DNA, 122 bp, Homo sapiens
ttccaatcctattgctccacacctggcaatgatctctttgtactgagctgcaaaccctgtcgcccaacccccagaccactccaacttcccacaaccccaaaccaaagcacccacacagtgag

SEQ ID NO: 242824 - DNA, 122 bp, Homo sapiens
gccggggggcgcatcatcaccacgaatagctgtgctggctccaggagagaccctgaggtgcggccgctcggcgcttccagtagggaagagcctgaactcgcgtgcccatctgggagcccctc

SEQ ID NO: 242825 - DNA, 122 bp, Homo sapiens
ccgtggggtcctcagaataatctcccgagctaggctttactttagtccgtttcactgatacgaaaacagaggcagggatgagtgaaacagcctattctgggagctggtggcctccgggtcgc

SEQ ID NO: 242826 - DNA, 122 bp, Homo sapiens
ttcggtcctccctctgcatccgctcaggaactgcatgcccattgggtgcactggtagcagcgggcagcgaagcctcctgggtatgggaaaccgagagaggtcttcccggctggcctcttctc

SEQ ID NO: 242827 - DNA, 122 bp, Homo sapiens
ggccgggccggcggcgtctgcgctggggaaggctgtagacctggcccctgaagtgcaggccgatccggtgtgcgtggagcgaagcctcctcgccctcagcattccagtagcctgcggacggg

SEQ ID NO: 242828 - DNA, 122 bp, Homo sapiens
taaagaaagcaggaaacagggcaggggagttccttcatctagtaattccataataattgacgctagggaaactaggggagcagtgctctcacaggttttataaatgccagcatgtggtggaa

SEQ ID NO: 242829 - DNA, 122 bp, Homo sapiens
actgcgcctggcccttatgatctttttcaaccacttaaaaatgtaaaaaaagcggccgggcgacgtggctcacacctgtaaaaccagcacttgggcggatcacctgaggtcaggaattcgag

SEQ ID NO: 242830 - DNA, 122 bp, Homo sapiens
agaggacacatttcatcaagaacgacttaacacgcccagatatctcatattatgcccctgcggtaaggcaaatcaagtatgaagacacacactccctgttttcttcagcactgagatcactg

SEQ ID NO: 242831 - DNA, 122 bp, Homo sapiens
ttccaacctgttcggcacactttggggagagtcgaatgcaaaatccgctgtctggtgccccggcactgaagaggtgttctgaggcctactgactgggggacccccggtccctctccccgacc

SEQ ID NO: 242832 - DNA, 122 bp, Homo sapiens
gtccctgacgccggacatcccttcccccaactatcccagacgccccagccccgggggacgcggtgcagagaaagaccgcagcacccgccagccagccagcagcgtcctccagccgcgaatcc

SEQ ID NO: 242833 - DNA, 122 bp, Homo sapiens
acaagcctcagatggcttttatttcacagcagacaacaaacccatctttctgtcaaaggccgtaggttgaggtccggaaatgaatttttaaactatgtcttcaggccactaaattccaaggc

SEQ ID NO: 242834 - DNA, 122 bp, Homo sapiens
atgtcattgtttatcttggtgtctgacagacctatgaggagtttgatgtctttggccagtcggttcctgcttggctgacatcagctcttacagaggtggaagtacactcagcctgcatggga

SEQ ID NO: 242835 - DNA, 122 bp, Homo sapiens
aagttttttatacagccttctgcataaatcatgactctacctccattttaaaatattgaacgtaaagaaacgtaactcttttctaatgtaaatatcccacttgaattatcctttccccattc

SEQ ID NO: 242836 - DNA, 122 bp, Homo sapiens
tgccagcttcccagccgccccaccctcccgtgggcccggccccggagcctggcaggcgggcggcacccccactataggtgccaagcccgggaactggagcaaagggcgggaggggccggacc

SEQ ID NO: 242837 - DNA, 122 bp, Homo sapiens
ctgaccctctaaacctgctttagctgggcgttgatccgcagcaccaccagaaggcagtgacgaagagggaaaaataaagtgaactaggacctcctgtagaataactcctcctgtggaataac

SEQ ID NO: 242838 - DNA, 122 bp, Homo sapiens
gctgggcagcaggacgctcagggccttggcctcaggagaggtaattccccactcggagatcggtcttgttgctgcattttatagatgggaaaagtgaggctagaagagacgacaaacgacac

SEQ ID NO: 242839 - DNA, 122 bp, Homo sapiens
ggaaccaccatgggtgttttcaggacagtggttaaaatactaggatgagctgatgtgtcacgatgctctgatgaacaggaaagactgaaaaggatgccagctaatgagggttcaggaaagcc

SEQ ID NO: 242840 - DNA, 122 bp, Homo sapiens
cccgctccccccggtggtccacacctcctgacaggcaccgccttccgacgggcctgggcccgcatccttgtctgttcctttgttgagcagggagagtgtcccatggttagaccccacccagc

SEQ ID NO: 242841 - DNA, 122 bp, Homo sapiens
ctcaggcgggcgggcgtgtgcgaaccttttgcaaacctcccagctcggtcctctcaccgccgccccccaggtcaggttagggcgttggctggtgcccgaccctcctttgcaaaccagggggc

SEQ ID NO: 242842 - DNA, 122 bp, Homo sapiens
aagccagaataggcaaggaagtattctctcttacatgtttcagaggaagcgaagcccgggcggcaccttgattttgggcttctagcatccaggcctgtgagacaatacatttctgttgtttt

SEQ ID NO: 242843 - DNA, 122 bp, Homo sapiens
tgagcagatggagcggcggcgcgagcggcgtgagcggcgcttggagcggcaggagtccagcgaacaggagatgcccatcagaggagacctggtcaaggggtgaggtgcccgccttatgacca

SEQ ID NO: 242844 - DNA, 122 bp, Homo sapiens
acccaattcttgagggacccttgagtgagccagatgcagtgtgcaagggagaaggaagaacgttgctagaatgaatgtcaactttacagttgggctgtgcctcttggtcatgaccttgaggc

SEQ ID NO: 242845 - DNA, 122 bp, Homo sapiens
aagcggcaccccgggcgctggggagcagcgatccagagtccaggttctgagctgctgcaccggggccgcgatctccacccctcacgcccgagtccccggcacggccaccaccggcccctggg

SEQ ID NO: 242846 - DNA, 122 bp, Homo sapiens
ggaagacttcagagaagtctcacaaaggactcggctggctgcttttctcagtgccgaagccgcgccatgctcgttctcagaagcggcctgaccaaggcgcttgcctcacggacgctcgcgcc

SEQ ID NO: 242847 - DNA, 122 bp, Homo sapiens
tcttttataccagttgcacaacacttctcccataaacagcatgaatggcctggttaccttcgttccacgcagaagtggctcctccttatgtgttgtggaaacttctcccttgctctccagtg

SEQ ID NO: 242848 - DNA, 122 bp, Homo sapiens
ggggggcgaccactccatgatcaacctgtcggtgcagcaggtcctgagcctctgggcccacgggacggtgctgaggaacctcacgggtaattgacgcgcctgggctggggacggggatgcgg

SEQ ID NO: 242849 - DNA, 122 bp, Homo sapiens
ggtaaatcatttaacctctctggcctgcctagtcttatcttgtaatatgtgagggacaaacgagttgtaacagtccgtggagttcattttctatccatcttctcttaaatgtgtttagggtt

SEQ ID NO: 242850 - DNA, 122 bp, Homo sapiens
gcaatgtaagtgtttatatttgtgtatgtttataagcatatgaatataggcatgcatatgcgtgtgtgtatgtgctgtatatatacaattcaaaagttttcttggtttgtttgcttgctgaa

SEQ ID NO: 242851 - DNA, 122 bp, Homo sapiens
ttttttccttaatcagttttgcctgcactctccctggatgctggaggctggaggcagtgacgcagcaacagcgcgaggcgactttggagcggcctcatatagcgacctcgccttccgctgcg

SEQ ID NO: 242852 - DNA, 122 bp, Homo sapiens
ggagtgggtgggaagccagcttggcaagccgggtgtgaatgaacaggaatgagcaggagacgctcgctgatgccttctgtgatgtgtttcttccccagctccagaagaaaaggaagtcatta

SEQ ID NO: 242853 - DNA, 122 bp, Homo sapiens
ggggactgccatggcacctatggggcgcagcccggccctgacagccaacaggctcagaagcgtgatctagccatggccgggaagacaggcaccagcacctaacggcactgacttccacccac

SEQ ID NO: 242854 - DNA, 122 bp, Homo sapiens
cagcagagctggaaggggaactcaggtctcccaactcccagctcagtgttccttcgaatacggcagaaaagaaataagggagcctttagggcagccttgggagtctgcacgcccttgactct

SEQ ID NO: 242855 - DNA, 122 bp, Homo sapiens
tctttggctgtggtccccacaggcgaggagcaaatcctggagaagtgtccccgttggggccggaataggggtttcgacggcagcgcgggagtccccagagggcttgggagcggggagctcca

SEQ ID NO: 242856 - DNA, 122 bp, Homo sapiens
atcccatttgttgctacccgccagggcgagagcagtggtgacgtggcctgggaggaggtacggggtgtcttccgagtggccatcagccgtgaatgaccacgcccctgtgcagaccatcagcc

SEQ ID NO: 242857 - DNA, 122 bp, Homo sapiens
gtgacggaagccaggaggcaggcgcgcgtccaaatccagacgttctccgcgggtgcttcgcggacaaggtgcagccaaccacacgagcaatactgtgctggagagtgagaatgggggtgagc

SEQ ID NO: 242858 - DNA, 122 bp, Homo sapiens
cgtagcgcccccctacgtgggtgaccagctggagaaacatgatgtcggcagcggggaatgcggctgccgcatctgctttgatttaaccaactccgctgcgcaccaaaccccggacaagtggc

SEQ ID NO: 242859 - DNA, 122 bp, Homo sapiens
ccaatgcttctgggttaatttattcaactttattatccttactatagtagcctcccctagcgttctcccctacctctcaaaggtctcatctaagtgtgtataaagctgttaaatagaggaga

SEQ ID NO: 242860 - DNA, 122 bp, Homo sapiens
agccttctttcctgatgggattctttagcgaggacactaccgaggcgcgacttcctgacgcgcatccgatccgggaaggcgcacttccgctccccagttgccgcgggatggcaagccggcgt

SEQ ID NO: 242861 - DNA, 122 bp, Homo sapiens
actgtcagtcacatatcattttccaaaacactgttaggtggctcataactgtacttctcccgtgtcctttaggaccccaatccaacctcacagagaagcatctgcagctaagatagtaaatt

SEQ ID NO: 242862 - DNA, 122 bp, Homo sapiens
catcggccctacacctgcttccactggcacttcgtgaaccagcggcgccgccggtccatccgccgtcgggacggcaccttcaattacagccctgacgtctactgcaccaagtacgacgaggc

SEQ ID NO: 242863 - DNA, 122 bp, Homo sapiens
gcattcctgcaggggatgactgtgaatggcttcatcaacacagtcatcacctccctggagcgccgctatgacctgcacagctaccagagcgggctcatcgccagctcctacgacattgccgc

SEQ ID NO: 242864 - DNA, 122 bp, Homo sapiens
ggtgtcggcgtcccccgcccccacctccccccacactaacaagtgcggcttctgccccggcggctcctcccggtcgccgccaccgcctccatgccggatcacgtgactcttccgccccgccc

SEQ ID NO: 242865 - DNA, 122 bp, Homo sapiens
ccgcaaacatctcatgctgaaatcagtgcctttttaaaacttcaaggggcttgaaagctccgaacctgttcagaggtgaagtggctccaagagatcagctcagacgcaccctatttgcactt

SEQ ID NO: 242866 - DNA, 122 bp, Homo sapiens
cttaattgcaatagcctggattctttcttgggttattattcaaaatttttgtcgtaataccgtactaatttccaggaccaagaaaaatcggaaggcaataggcctttggtaaattgtagtat

SEQ ID NO: 242867 - DNA, 122 bp, Homo sapiens
ggagaggttgggctgggcgcagtgcctcaggcctgtaattccagtgctttgggaggcctccgccggaggattgcttgaggtcaggagtttgcaaccagcctgggcaacgtggtgagacccgt

SEQ ID NO: 242868 - DNA, 122 bp, Homo sapiens
tctgtacctccaagccccgcggccagtttgcgcgtgcgtgccaagtgccgcgcggaggcccgctcactcgggcccgccccccaatcccggctgcccatggcgctactcgctccgcgtccccg

SEQ ID NO: 242869 - DNA, 122 bp, Homo sapiens
ggctgcccttacaagacccaatcacaagcccggctccactcctcgggcctcgcccccttccgcacccaccccaccgcgctccgcctcacgataacgcactcaccgcagcgttctggaacttt

SEQ ID NO: 242870 - DNA, 122 bp, Homo sapiens
gccggcgggcccacccgcccagaaccgggaattcggcgagccccgcccctgccaccccagcgccggccgctcggtaacaaacacttccacttcctgagcgctagtcttcgcccgccgcgggg

SEQ ID NO: 242871 - DNA, 122 bp, Homo sapiens
gtccccagcctcctggacgagcaaagtcagtcaaagcgctggtgatccctgctccgcgtgcgtagcagtgtctgtgcctctcctgcccaggggctagagagcagtctccagtgcagggtccc

SEQ ID NO: 242872 - DNA, 122 bp, Homo sapiens
cgcctgtatcaggtaccacatgtgctccacaaacacggtgtgcctgtatcgggtaccacacgtgctccacaaacacgacgtgcctgcatcaggtaccacacgtgctccacaaacacggtgcg

SEQ ID NO: 242873 - DNA, 122 bp, Homo sapiens
agccgccgccgcctccgcccgcagtgcaggccccgccgccgcccccgaagccgccggccgcggcccagccaagggtcgcccaagcctcggagcagccctggccgccctccgccccctcctgc

SEQ ID NO: 242874 - DNA, 122 bp, Homo sapiens
cggcggcgggaacggtgcgggaggcggcggtgctggcggagcaggcggcggcggcggcggcggctccagggcccccccggaagagttgtccatgttccagctgcccaccctcaacttctcgc

SEQ ID NO: 242875 - DNA, 122 bp, Homo sapiens
ttccagaagcagaaaagtgtgaaacagtcctgccgtcccttgcttcttttctgtgggctacggaacctgtcgggactcccaacctttctgctgcaacttttgcagctctccttcgtaactgt

SEQ ID NO: 242876 - DNA, 122 bp, Homo sapiens
tcttcctcgcctgtgtacagtcaaggtgcctagcacataggagaggctcaatacaagactcgtggggagggtgcgaggttatttaggaaaataagggaagattcaagcacatggagaaccaa

SEQ ID NO: 242877 - DNA, 122 bp, Homo sapiens
aactacagtgtattgaccggagggcagcagagccctccagtggcgactggctaatgcacgcgctgccctcctcatgcagctgttgagctcccacttcggtcgacaaagtgaaggactaagct

SEQ ID NO: 242878 - DNA, 122 bp, Homo sapiens
tacagtgggactttgggcaccatagggtcatcctgagtttttcaccaaaatcaggaacagcggcaaaactggtttcactgaagaagacacacgtttggagacatgtgtagtctccaaggatt

SEQ ID NO: 242879 - DNA, 122 bp, Homo sapiens
acctcctgggttcaagcaattctcctgcctcagcctcctgagtagctgggactacaggcgcgtgtcaccatggcaggctagtttttgtatttttagcagggaccggttttcaccatgttggc

SEQ ID NO: 242880 - DNA, 122 bp, Homo sapiens
gccagcttgtcgtactccactttgaggctgcgagggcaggaggagccggctcaggcgtggcgcctggacagcctcctctgaggccccgacccaagggcctctagagccacttttccactttc

SEQ ID NO: 242881 - DNA, 122 bp, Homo sapiens
aaatggtcgggttcccttccttcactcaggatggtcgcctgctgggagctcatttcgaaccgagctgaacgctcattgctgagtcctgggagaaggtcgcgtttgtacagaaggctcctggc

SEQ ID NO: 242882 - DNA, 122 bp, Homo sapiens
ctacgggcagccaatctgtttctattcatagtgaaccatagatgtatgattgagtggggccgcaaaaatcatggcagttttgctcaacaacctcatctcttccaacttctacacataatcac

SEQ ID NO: 242883 - DNA, 122 bp, Homo sapiens
tctttacagcattctatcaaaatacagtgttttgggcgtccggcttccttctgcaacagacgtgggtcacgctctctctggctctctttctgccgccatcttgattccacgttccctccaca

SEQ ID NO: 242884 - DNA, 122 bp, Homo sapiens
ctgctgaggggccagggaggcggcgcagatggctagggtaaggggggcgcagagcgaacccgtccactcctcactgtacacccccagtacagtggaaggagtgcgctcagccccgcgcctgg

SEQ ID NO: 242885 - DNA, 122 bp, Homo sapiens
caactctgatcatggccattagcctcagcacagagcggtgtgtgatcgccaaccaccagacgggatgaaggcttacacttccttatctctgttgaaccccaaatctccaagcttccaactga

SEQ ID NO: 242886 - DNA, 122 bp, Homo sapiens
agacaccaacatgcacacagggaggacccgtgtggacatgagggcagaggttgggcgaggcggccgcaggccaacagacgccaaggatgatctcagcctgtggaagagggggcggcccagga

SEQ ID NO: 242887 - DNA, 122 bp, Homo sapiens
cttgctattgtggagctctgccatcatgtgaaagaagcccaggctggcctgctggagacacgtgtcccagctgactttcagcagcagccaccagacacatgagtgaggccatcttagcccca

SEQ ID NO: 242888 - DNA, 122 bp, Homo sapiens
ctactactgggccagtgtgtggccaggaggatggaatactacgaatgattagacctgcatcgcatgacaacttctatgatggtaagaatataaatgaaagcccagaactgcatggagtgaag

SEQ ID NO: 242889 - DNA, 122 bp, Homo sapiens
cgctctaacgcttcttcccatctgcgtcttggttaaggacttttatcgtatcctgtttatcgtggcctcctagcctcaacaccctcttggtcactgcaagctccccgctgctccctccctta

SEQ ID NO: 242890 - DNA, 122 bp, Homo sapiens
atgatttcaacccttggaaccttggtgtccccatctgttcagtggagacaacagtatactcgcctttcccaaagatctggtatcaattctaactcctaaagcctctctacctcctcctctcc

SEQ ID NO: 242891 - DNA, 122 bp, Homo sapiens
caatagaaactgtagcagaacccgctctgtgggtggtcagaggaacccacgtttccatatcgctatgagaggcacctgacaccagcctgcactcgggccagcctcacaaccataggaagagg

SEQ ID NO: 242892 - DNA, 122 bp, Homo sapiens
gtgcacaacccgaaggacgctgtccagctagagacgctggagctcccccccggctgtgtccgcagagccggggccggggacttcatgcgctaccactacaatggctccttgatggacggcac

SEQ ID NO: 242893 - DNA, 122 bp, Homo sapiens
tcggccgcagagccactggtgtggctcatcaggatgtagaggtccttgtgtgagccgtagcgctggccggcgacctggggcaaggtccacacctccgtgacttttgaggtggccctgtcaaa

SEQ ID NO: 242894 - DNA, 122 bp, Homo sapiens
gtccctccagagcagggtaggattgaaattcaccctctggggattggagttgatacccaacgaagctataaaatcattgccatggatccgatgcctggttgacagatgaggtgtgaaggttg

SEQ ID NO: 242895 - DNA, 122 bp, Homo sapiens
gagtagcctgtttcggggaggcggggcacggggactgggtcaggagaagccccagggggacgtggaaccgagagattttcgggatggaacctgatggaaacgtccgtggtcaggaggaggct

SEQ ID NO: 242896 - DNA, 122 bp, Homo sapiens
gccacacgcgacagtaaatcacatggggcaggcccttgcggtgggacacctgcagccgcccgtccagggagcggggaatcgtgacgcatttgctgggctgccccgggcagctgagagccctc

SEQ ID NO: 242897 - DNA, 122 bp, Homo sapiens
cggggattggtgcgccgggcggggcggggcggggcgggataaaggcgcggggtctggctgcgcggggtctgcgggcagctccaactctgggttcgtagtttgcgctgggtgcgcaggaaggt

SEQ ID NO: 242898 - DNA, 122 bp, Homo sapiens
ctccgcccccggccccgccggccgcgcgcccccaccccggctgagaccggccccgcgaggcgcgcagggtcctcacttgtggaaagaaacgggcttgtccttgtcgtagcggttcttgcagc

SEQ ID NO: 242899 - DNA, 122 bp, Homo sapiens
aagaggatgtggtcagcctgctccaccaggctgaggtgctgggtgatgagaagcactgagcgggagtaccgctcagggctttcgtacaggagctgctccacctgaggaaagacatcggaccg

SEQ ID NO: 242900 - DNA, 122 bp, Homo sapiens
ctatggggctcttgtgccctctgggggcctctggggagctgctactgggctgggccctctcggtccctgagcctagaccaggtgagttactagcagggacaggaggagaaatgggaaagcta

SEQ ID NO: 242901 - DNA, 122 bp, Homo sapiens
tgaacttgatcttcacatcaagctgacagcacgtaagaggcccatgccatgagcaatccccgagggaagaacggaagcacagtcaatgctgcagctcttatctacctgggcggcactggtgc

SEQ ID NO: 242902 - DNA, 122 bp, Homo sapiens
aggtgtccctcctgcctaaggctagtttgcctaggacccctcctcaccttccctgagtctcgccccgtattaatcccatctgtctcctccatctgcaccttcgcctctttactagtgatctc

SEQ ID NO: 242903 - DNA, 122 bp, Homo sapiens
aatctgcctttgcctgaaggagtccacgaggctcctggctggttgaaaaataatcacgtgcgaggtaggatagggagacgctcaggcaacagtgtgactgttcaggcttatttgacagatct

SEQ ID NO: 242904 - DNA, 122 bp, Homo sapiens
ctgcactgcgtcctgttcgccctggctcgcgcggccgagccgccaggcgcagctctgggccgagggcagcacagcgcccagggacccctaacccccgctgaccgcaaggcgatctccgactc

SEQ ID NO: 242905 - DNA, 122 bp, Homo sapiens
cgtgctttcgccgcctttgtccacaaggtggcagcctttgaactttcttccccgtaagaacgcgaaaggggggcagagaggaaggagagaaggcaaagcactgcccccaccaagaacaattt

SEQ ID NO: 242906 - DNA, 122 bp, Homo sapiens
aacccataaaatatccacgaccttgcagctgttaagaatccagacttttcagtcccagggcggggctgcctttccccccatcccgctccctttctttggactaaagggtactgactcgggac

SEQ ID NO: 242907 - DNA, 122 bp, Homo sapiens
tccctcagaacctccaaagactggagtgatcaggtttttcaacttttaacaaaggcccagcgtttctaaccaaatataatctccctaaaccctcagtttctcatgcacttcctctttgagga

SEQ ID NO: 242908 - DNA, 122 bp, Homo sapiens
aagcttccctccaggaacatgcccagcagctggtccgtggagagaggcctggggtggcggcggcgaggtcctgggagacgtgggggcggggctgtgtgggctccggccgctttgcatgccgc

SEQ ID NO: 242909 - DNA, 122 bp, Homo sapiens
cagttgtgtgtcattcccttttactgttgctaacaacaccgaaggataaaacattctggccgagctataactataaaattagcctaactaactttaacaaaatatgatgtgaacttaaaagt

SEQ ID NO: 242910 - DNA, 122 bp, Homo sapiens
agtcttactgcttggcaataggcgatagtcttactgcttggcgataggtgatagtcccttcgtggttgcaaaaatgtgtctggaattggtgggttcttggtctcgcagacttcaagaatgaa

SEQ ID NO: 242911 - DNA, 122 bp, Homo sapiens
gcgctgtttgaaaataaataaaattactccggcaacatattccgcattcctgtttgtactcggcaatctacatgctttagattctgcctgtggttaccttcactcaggtcttagctcacagt

SEQ ID NO: 242912 - DNA, 122 bp, Homo sapiens
gctaatattcactttcacaagtttttgcctttcctagatgacactgaatttcttcttatccgtcaaggattagcttatgcttgacatctgtagcttcggaaatagacattcactgcttcttt

SEQ ID NO: 242913 - DNA, 122 bp, Homo sapiens
tcttgggagcaaataaagccaagatttaaaatgccttttaatctaaaacatatgtttgcccgtgggcctggaaacaagcctaggcctttgcagttgtgaagtttcctcacgatagacagaca

SEQ ID NO: 242914 - DNA, 122 bp, Homo sapiens
cccgtgctacagaagcgtccaggtggcctagggggtgggggtgacctgctgaaggccatccggcctgggaagcacaaactaacacctgctctgacctcccctgcagcctcactatccccaga

SEQ ID NO: 242915 - DNA, 122 bp, Homo sapiens
taacccccgggttgccttcactcaggctgggaatccacgattgatttcctactacggaagcgggtggcgttcccagcctgctttcggagcagcacgggtttcgtgcagggtgttatcccgac

SEQ ID NO: 242916 - DNA, 122 bp, Homo sapiens
ttctctgttttctactgaatcttcaaacacagcttgtgtcttattttctgttggatgtatcgagaatagtattttcccacttctgaagagcttaaaaaataggccatacttctgtttttctg

SEQ ID NO: 242917 - DNA, 122 bp, Homo sapiens
tttttattcccctatctcacaggaggcagatgaaacagatgagctggattaccagcatagcgcacacaagctctttgtgagctgatcaagcagagagagggattcggccaaacagcccccat

SEQ ID NO: 242918 - DNA, 122 bp, Homo sapiens
gcttagattgcgcagtccagccccagccaatgggaacaggacacagaagcagcgactaaccgcattagggataaaaaccccttctctcttttgttcggtgtgctttcctgaagaccagatgt

SEQ ID NO: 242919 - DNA, 122 bp, Homo sapiens
ggtcttggtctgggtggacggtggctgaggctggcagcccacagagcgatgagggtgatgcgtctggcgaggtccctggctccccgtctcggcccggcttgcaggtgcccagtctcagtagg

SEQ ID NO: 242920 - DNA, 122 bp, Homo sapiens
taagacctgggtgggccatggcgctcgccagccaaacccccttcgaggccccccgtcctgcgcggactgctcgtcaatgtttgaaaaccctcatttcatgtgcttttctctggtttttattt

SEQ ID NO: 242921 - DNA, 122 bp, Homo sapiens
gatgctacctttccttgcgaccccgatgactgccagcagggctcgctgccgtcaatgagacgggatgcctggttcacggaggacgacacattcaggctcttcaccatgcgggaccagctgtc

SEQ ID NO: 242922 - DNA, 122 bp, Homo sapiens
ctgcagtgtgtccccgctcggggagggcccggccgagcgggcagggagagccagtcctgtcggctgggcccttggacggctgtcagttttgcacatgatgttcctattgtaactctcagaga

SEQ ID NO: 242923 - DNA, 122 bp, Homo sapiens
ctaagagtcaagggactgatccaatgaggacccaggaacactatattggccctaactactcgccgtccaccaagccctaaccgaagaaatttgattccggctgggaaactgtcacaccttca

SEQ ID NO: 242924 - DNA, 122 bp, Homo sapiens
agtttgtcagccctgacccagctgggtccttttgcccccactcctgggcgtggctccaagcgcctcctcatgggccaactgtttaaattgcagattacataattgggattaagtgaggtccc

SEQ ID NO: 242925 - DNA, 122 bp, Homo sapiens
cttgttccccgacaactcgtgggagtgcccgctccagcgtggtttctccttctccgggaacggccccagtgagcagaagagctgggtctggattgcatggctctgtctcccagccatggttg

SEQ ID NO: 242926 - DNA, 122 bp, Homo sapiens
atcctgcttgggatggcttccgggacccagtggcaagctcaggggcatctacacccctcccgtgagcaagaatggacggggtagacgtgggtggtctgccctctgcggtcctctgcggtgga

SEQ ID NO: 242927 - DNA, 122 bp, Homo sapiens
cgcctcccaaaagacccagtgggaaatgcactaaaagaaacaactcaccccgttcaaattcgcaggctccccctccccccaccccttctcccacaatgacaaaactgtaactcctcaggcag

SEQ ID NO: 242928 - DNA, 122 bp, Homo sapiens
aaaaagggagtctggcaggtgaggggcagctgggctgggctctcgctgggaaggccccatcgggctgccctcagccaagaggtcccaagaggcaggcaggtatctgggaacatgtggagggt

SEQ ID NO: 242929 - DNA, 122 bp, Homo sapiens
acaagcttcgggcccagaagagtgacccagagcacccgggaaggctggtggtggaggtggcgctgggtaacgcagcccgggctctggacctgctgcggaggcgcccagagcaggcaagctcc

SEQ ID NO: 242930 - DNA, 122 bp, Homo sapiens
agtttttcactgttggaagaaagaagttacaaataagcaagaatgaaaggttagaatacacgctgtgtgcaaaagtagattcagtgacatctctcaaaaaaggaaagcaccactccctggta

SEQ ID NO: 242931 - DNA, 122 bp, Homo sapiens
ggcagttggcccaacacattccccacccctttgagaggtctgaggcctgcagacctggctcggagcccacctggtagtcctcagactgtgtgtgtgtgtgtgtgtgtgtgtgtgtgtgtgtg

SEQ ID NO: 242932 - DNA, 122 bp, Homo sapiens
tccatcgtaaggaggcagctggtggcgagtcctgagcagggatgtgatccgacgggcaggcggcgcccgggacagaagctgacgtcacacaggtgagtcccccacctccccacaggcttcct

SEQ ID NO: 242933 - DNA, 122 bp, Homo sapiens
gccaagctgccactccagggcctgaggcaggagcctgcagacggacaccagctgtccaggcgcactccaccacccagggctgccccagaggatgttcgggaatcctgtctcctccttcggga

SEQ ID NO: 242934 - DNA, 122 bp, Homo sapiens
cctgtaactgatgaggcaggagcagcagagattaacctggtccagggagggagggccaggcgtgtgtatacatgccagaggcatgggtggggatccttggaagagtgcactggtcacagaat

SEQ ID NO: 242935 - DNA, 122 bp, Homo sapiens
ttgacaacgttgcttttggggaagacaattcacatggtcctgagtttccctgcacattctcgttgagtgtgccaagaatgcaaggccctggatggtgttcatctcaggcttgtgttttgtag

SEQ ID NO: 242936 - DNA, 122 bp, Homo sapiens
tcagaccgtcaaactgctggaggaaaacgtaggggaaaagcttcttggcactggtcttgacgataattttttggatatgacaccaaaagcaaaggcaacataaaccagaataaacaagcagg

SEQ ID NO: 242937 - DNA, 122 bp, Homo sapiens
ccctccctgggtctgagcccgccccaaagactcagcagcagcgatggtggggacaagaggcggccgctggtctcgcgggtgctgcggacagggtcccacacccccggaccgcctcccgagaa

SEQ ID NO: 242938 - DNA, 122 bp, Homo sapiens
cgggacccgcgccgcgcggctgggcaggaagcgccagacgcctggggcccacgccgtccgcgggaaaagggcaaggcgctgggttttccagcagcaacctttggaccccgcgatccagtagc

SEQ ID NO: 242939 - DNA, 122 bp, Homo sapiens
gaagctatctggcagctctctgcttcatccaacacatggatgataaaaatacacatatagcgattcttccagccaggcccatttcccaccacatgatcctgtcactatgctttttttttttt

SEQ ID NO: 242940 - DNA, 122 bp, Homo sapiens
gccagagggggtgtgggggagatgtcgcgaatgtggcgtctgccatgactcctgccaactcggcccctctccatcctggccccgcccacccccgtcttcctctcgcggtctcgctggcaccg

SEQ ID NO: 242941 - DNA, 122 bp, Homo sapiens
gagaagttgggaggaggcagctcgcctagagtctttacggaccgaattcggagtttatttcgaacactatgcatcaagccaaagaaaagcggggccagtttgggtttgcgcctaacttaatt

SEQ ID NO: 242942 - DNA, 122 bp, Homo sapiens
gacgggctgggaggagcgaggggccacggggggctcaggctgccctttcttttctttccccggccgcggcaaaccatccttccgcaatacccaccttcctgccaaactgagagtccagtttt

SEQ ID NO: 242943 - DNA, 122 bp, Homo sapiens
ggctttcaaccgagtatgtctgagaaggagcccaggatctgaattcttaacaaatcttaccgaaggaattctcatagacgatcagaagattggaaatagtaatatagtccaacgtttctcag

SEQ ID NO: 242944 - DNA, 122 bp, Homo sapiens
gaggaagcagctgtgttcgccaagtacctggcccatgggcttcctgccggcgccccactgcgccttgtcttcctgctgaacgtgctgctgctgggcctctggaacttcttgctgctctgtac

SEQ ID NO: 242945 - DNA, 122 bp, Homo sapiens
aaccagcatgatggcagtggcctctccagatgagccgctgctgctgtcactaagtttggccgtttgagatgtctttttaggttttcacatttctgatgactgtgactggacctgcaagccag

SEQ ID NO: 242946 - DNA, 122 bp, Homo sapiens
ggagtccgtgggagtcaggctaagagcatcttgtaattatggaggcaatggagtaggaggcgaacctgaagccagtggctgcccccagagagcagtggtcacttgttacgcttggggcaggg

SEQ ID NO: 242947 - DNA, 122 bp, Homo sapiens
tcactgagtaaaattagacacgtctgttgctaatgtgaggggatgaaacatgagacagggcgaaactcgtgagagccctttctccagggacagttgctgaagcttcatcctttgctctcatt

SEQ ID NO: 242948 - DNA, 122 bp, Homo sapiens
cataaaccacatgcacataattacatgagcctgaaagcggccttgctgacttcaaccatgcgggcgtggtgacgcgaaaccctccagaacgctgcctttggctggccgtttctgtttagcag

SEQ ID NO: 242949 - DNA, 122 bp, Homo sapiens
ctcaggtttgtacaaggtagggttggcacatgcacaaaccaaacagtgaggacctctgtacgctccgcaccccaggcagcttgcttgcctctgcggcattgccacatcctaggcaggatgcg

SEQ ID NO: 242950 - DNA, 122 bp, Homo sapiens
ttgcagggatgcctgggtccacagctgcagtttaggcagctgcagctgcatgggggatggcgggggcccccacctgctccatgaagcaggatcagctgtggtttggcagctgcagtggttcc

SEQ ID NO: 242951 - DNA, 122 bp, Homo sapiens
gaagtccaagtgtttgcaccctggggaatatgcagacagctgggtcactggacgccaggccgcagcgccggcctcgttctgcttttggctctaaatgcagtcgggggacgcgactggatctc

SEQ ID NO: 242952 - DNA, 122 bp, Homo sapiens
tctagttctcacaacactctcccctccacgcagacaggaaaccaaggctcagagatgccacgtgacttgtcttgaggtctcacagctggttaagggcagagtaagggatttgaaccttagtg

SEQ ID NO: 242953 - DNA, 122 bp, Homo sapiens
cctgcaccctcagacccgtccgtgttctgtgtgaacctgcctgtgaaaaatccatccctccgggcatcccttcctcctccggccgacccgtttaccccacacaagagaactcactttccagc

SEQ ID NO: 242954 - DNA, 122 bp, Homo sapiens
aaaactgagtccaatgagactcaaaacccagaatgcttcattaagcaaaaataatcctttcgatccatcattttatctcattggactttaagtactatgcaaggatttgctttttagtttgc

SEQ ID NO: 242955 - DNA, 122 bp, Homo sapiens
gcctgcgggcgggtgtgggggcaagaactgaagccgggggaaccagacgggctccgggtgcgggggctccgctggggccacgccagtccgcctgcagcagccggcagctccggaggcggcca

SEQ ID NO: 242956 - DNA, 122 bp, Homo sapiens
ggccaattctggatgaggtggtagagctggttgcctggagagagtgtacgctgcacatcccggtgtcctttgagcacatagttggacctcagggctccctgagccacaccgcaggccagtag

SEQ ID NO: 242957 - DNA, 122 bp, Homo sapiens
gaaatcgctctcgccctccgcctctctttcaaagcaccagccttcagtcctgcaagtcgccgacttccccggccactggaaccgccccttccatgttaaaacggtagaagacacaccccctc

SEQ ID NO: 242958 - DNA, 122 bp, Homo sapiens
ctggttgcccgtgagtccagccttagcccacgcagctttcagtcatggcctccgtaatcgcgcgcatggcatagcccgcccctgacttcaaggccaccgccgtggtggatggatagcgcttt

SEQ ID NO: 242959 - DNA, 122 bp, Homo sapiens
cccgtatgccgcaaaatagctcagagggtccttctcctccgctgccatgacggctgcgagcgacaacccagcactccgccggaagccggaaaccggaaaccggaagccaccccagggcccgc

SEQ ID NO: 242960 - DNA, 122 bp, Homo sapiens
attgattaagtgtctggctgagagaccaagaggaccagacacatgggaagtgctgtttctcgaagctctgccttcaggcagacaaggaaagacctggtcgttcaaagatgtataaaagccct

SEQ ID NO: 242961 - DNA, 122 bp, Homo sapiens
gttaagaaatgagaagataggccgggcatggtggcttactcccgtaatcccagcactttgcgaggctgaggcgcgcggatcatgaggtcaggagttcgagaccagcctgaccaacatggtga

SEQ ID NO: 242962 - DNA, 122 bp, Homo sapiens
gcccctccccccggggagcccctccgattggtctgtcttcctgccagtcaggcaggagggcgcggcgcccgccccgccccgcccccgcccccgccccgggcagatgccgggagctctcctgc

SEQ ID NO: 242963 - DNA, 122 bp, Homo sapiens
cctatttatccttcaagatgcagtttaaattttacctctgtgatgaagttttgcctaactcgattataccacattgttttgtaattatgtaagtccccagaaggcaggtctaagtgtttttc

SEQ ID NO: 242964 - DNA, 122 bp, Homo sapiens
caggagtacctgagctccaggtaaccgccctgcccgctgggcttgggacaagccggcgggcgaggtgcctcccaggccaacaagagaccctggcccaggggacagtcttctgttcccttttc

SEQ ID NO: 242965 - DNA, 122 bp, Homo sapiens
ctgagcccgggcgccgggcagtggcggcagctgcagcctcaggagcaggctgagggcgagcgcggcgaggctcgccatccgggcggcggcgggcagctcagccccttcccgcgggggccggg

SEQ ID NO: 242966 - DNA, 122 bp, Homo sapiens
tgctccgcagccgctccaccgtgcgctccaggatgtccttgtccatctttgtcccgcccacgggctttcggtccacgtcctccttgggcacctgggggtcacagagacagaggctggggctg

SEQ ID NO: 242967 - DNA, 122 bp, Homo sapiens
atctaagggaagtcaaattatccggcaggagtgaagacagaataaaactggaaatcagtccgtgaactttgagatcttcagcagagcatgcttcccagtggagctatttcggcagaagtgtg

SEQ ID NO: 242968 - DNA, 122 bp, Homo sapiens
cagcttctttcctccaggtcaccaaggtcctgggcaggaccggttctcagggacagtgcacgcaggtaatcgggtgggggcatttggccgactgccggcgacctaaaccctgatgtgacctc

SEQ ID NO: 242969 - DNA, 122 bp, Homo sapiens
acttctcagtcccttcctgccaagccaccagacagtgctcctactctgccacacgcagcccgcacccttctggcggctcccgcgaggccaactcagactctcagttccagttgcccgcgagc

SEQ ID NO: 242970 - DNA, 122 bp, Homo sapiens
tccgggccaagcctggctgtcgcgcggcttctctctgagtggtcggcgaggctgctgctccgcgcaagttgtggctcccggcccatctacattggaggaatcctgcactgacctggtggcag

SEQ ID NO: 242971 - DNA, 122 bp, Homo sapiens
ggcgtcaacggattacagtatctatagccaagctgcagtgcagcagggctacagtgcttacgctgcccagcctgctcaaggatatgcacagaccacccaggcatatgggcaacaaagctatg

SEQ ID NO: 242972 - DNA, 122 bp, Homo sapiens
gcgctggcggaggaggagagcccgtggatctgctcggactgcggcaagacgtttgggcgccgggccgcgctggccaagcaccagcgctaccacgcgggcgagcggccgcatcgctgcgccga

SEQ ID NO: 242973 - DNA, 122 bp, Homo sapiens
gcagtgggcgctttttctgagcctcccctcaagggaccctgctcagccctttacctgctgcgtcccggatctcctgttcacccctcagcactgcctggcccacagcggcccgccccctcccc

SEQ ID NO: 242974 - DNA, 122 bp, Homo sapiens
cattgccaaggtgcgagtcattccaggtggctggcacacctacatctgggggctgggggccggaagcacagatcctggtttgtgtggctttggcaagcctctgagtgttgatgtgtggtttt

SEQ ID NO: 242975 - DNA, 122 bp, Homo sapiens
gcttagagacagggtctcactgtgttgcgcaggctaaagtacaatggcacgatcctagctcgttgcagcctcaaacccctgggctcagactatcctctggcctcagcctcccaaccagcaag

SEQ ID NO: 242976 - DNA, 122 bp, Homo sapiens
cccccggcttctctgcattaaagacttgggttaaggtcttggggggtatcgcgtccccaccgtgcagcctccccccgccttccgaggcgcggcacccacctccagcgcccgagccgtccagg

SEQ ID NO: 242977 - DNA, 122 bp, Homo sapiens
ctgtaatctttatgtcttccagtaatatagtctcatttacctttggaagcattctatcaccgatcactctattttgctgtattaatcagctttgtgtatattgtgaatttttataagttggt

SEQ ID NO: 242978 - DNA, 122 bp, Homo sapiens
gtccagcctcctgggccgctggcgctgggtagcccgtgagcctcgtgagcctgggaggagcggtggagaactctctgagccgggagttctgctgctgccgagcgagctccacatttatgcgc

SEQ ID NO: 242979 - DNA, 122 bp, Homo sapiens
gagcacagctgtggctgcctcacattttgtccaagcctaagaatgttttctcatgttatgcgactaatgacatgatggtgactcatttctctgcatttaaacatacattcaaacacacatat

SEQ ID NO: 242980 - DNA, 122 bp, Homo sapiens
ccagagagtgtctgtgcctcgaccatgcaaagggtgccaggttgtggctagggatgcccccggggttcctctccctcctacctactcctcagcctctgcatgtgcccgtcatggcccctgtg

SEQ ID NO: 242981 - DNA, 122 bp, Homo sapiens
gcaccgacgccgtccctcttagccactgaatctccggtgatccgccagtcccctgcgggacgcgtcggggaccctcttgatcggatgcccggatctctgtagtctctccacccttcatcttc

SEQ ID NO: 242982 - DNA, 122 bp, Homo sapiens
gagaacaaagtcactcattgctttagcagtggactgaacatttcccgttattgctgttgccgcaacacacgtctgcatgccgtacaggtgccctgcgctccccattgttgggcagtcagtcc

SEQ ID NO: 242983 - DNA, 122 bp, Homo sapiens
aggatttgtaagggatgaagacccctgggccccattctgttggggtccatacatactctccgaagatagcaacttgcttcaggtcaaagtgaacccgagaaaagagaagaatcactcactac

SEQ ID NO: 242984 - DNA, 122 bp, Homo sapiens
aggggcggtgctttccgcctggcggtggcatggcaacagtcaggacaagccaaccagttacggatagaacctttattgctgaacataaaacacctgcctgggaggcctggccagtggcctct

SEQ ID NO: 242985 - DNA, 122 bp, Homo sapiens
gcgggggggcggtgcaggtgctttaagaattaccgcgggactcggtagggggagcgtaggcgcttctcgccaagatagaagcgttcagactacaactcccagcagccacgaggagccctagg

SEQ ID NO: 242986 - DNA, 122 bp, Homo sapiens
ttcaagggaaagatggtagttagaaaaataaaaatggaaagttttcctctaataggtggtcgttgaaactgtggaagtagattcatgtgtgaaagcccagtatgagaggaggtctaagattg

SEQ ID NO: 242987 - DNA, 122 bp, Homo sapiens
catagaaatgactgggaaagtagcggagacctaaaataatagaggaaaagccgtaactgtcggagaatgtatatggaatgcaagcccacagtgttttgttctagatttttggctcctagagt

SEQ ID NO: 242988 - DNA, 122 bp, Homo sapiens
aggaaagagttccttcttttcttctccagctagccaatgaaaaagtcaacagctaaggtacgtgttttaaaaacgatgaattgctttgctacccataaggaaccaaggaacaaaacaacagc

SEQ ID NO: 242989 - DNA, 122 bp, Homo sapiens
tgtgatccgcctgcctcggcctcccaaagtgctgggattacaggcatgagccaccgcgcccggtccaacaggaataactctaagaagtttggggacaggagactaagaacccctaagaaaag

SEQ ID NO: 242990 - DNA, 122 bp, Homo sapiens
acctggccctggaggaaggttctgggtcagctgcaatgagagactggtgattaagggcaccgtgggcaggacacagtcctcgccttacccaccccatccttcctgttacccacagtctgctg

SEQ ID NO: 242991 - DNA, 122 bp, Homo sapiens
gaaaagtcactcgttcaatttgtcactgtgtgacagctcagaataaaaccaatttgcggccgcccctcctcctcgcttcccggaggatctcctgggaggcacgaggcggacgcggtgctgag

SEQ ID NO: 242992 - DNA, 122 bp, Homo sapiens
cagccctcaggctctagctctctctgaaccggctgcccccgcgtccagcgggctccagcacgcgggccaagcgccgtggcccccggggaccccacacctgctgctccctctgcaggagagct

SEQ ID NO: 242993 - DNA, 122 bp, Homo sapiens
cagtagagaggattttgtgaatggctccccaggagcgctgcttacatgcggcttcctaaacggggaggcctgggggttgtagccggggtgaaaatgttgggcgtttgagatgcagcacttct

SEQ ID NO: 242994 - DNA, 122 bp, Homo sapiens
cagccaatttccaagaaaatgtgcatttttccttatcctcttcccataacatgcatatgacgttaatacttggggttatcactcttctttccattctcaatgccctcattacctttcaccta

SEQ ID NO: 242995 - DNA, 122 bp, Homo sapiens
taagtcttaatcaaagagggaaaagggcaaaaataagttctcaagtagagagagaaaaaacgcctagttaattaatgaggtcttgtgtccacttgcatatccttgtagtggagtcagatgta

SEQ ID NO: 242996 - DNA, 122 bp, Homo sapiens
agcactgggagggtgcacacttaggaggtatttgctgctcccagcacaccccagctcagccggccaagctcactccctcccccacaattcataggcccttgaacagcatggtttctcaaggg

SEQ ID NO: 242997 - DNA, 122 bp, Homo sapiens
tgcccctcactgctcgtggtcatgcacgtggcctaccgggaggttcaggagaagaggcaccgagaagcccatggggagaacagtgggcgcctctacctgaaccccggcaagaagcggggtgg

SEQ ID NO: 242998 - DNA, 122 bp, Homo sapiens
tttaaaaggtgcatacagaactctgtaaatgcaatgatgattactgtttgtcaaatgtgtcgttgcttcctgcatgagtcctgtctccagttagctgtggcagtttctgagatgagctggcc

SEQ ID NO: 242999 - DNA, 122 bp, Homo sapiens
tggccggcagcagttactcggggtttccggtgcgaggccagaggtggggaagccatcggacgtcggcggtgaggtacgtgcagcggcggccggtgggcgagactatttgagagtgtgcgggc

SEQ ID NO: 243000 - DNA, 122 bp, Homo sapiens
gtggctaggctaagcgttttgagctgcgttgctgcgtgcttgatacctgttccttttgatcgtggtgatttagagggtgactcactggggcggggatgcttgcatgtgtaatcctactaaga

SEQ ID NO: 243001 - DNA, 122 bp, Homo sapiens
agttcacatcagtgaggttctgcctgcaacacttttatccacaggctccctaaacctcaccggtcgtggcccaagagagcctgttggtccctgggttgctgtgtccacagcaggctgccatt

SEQ ID NO: 243002 - DNA, 122 bp, Homo sapiens
gctgctggtcaggcacaatgccctgagtgccaggggatagagcttaaaaggcccaagcagcgtgttccaggcctgattggaaacatgagctccactccaatccttgagctgggtttgtcgga

SEQ ID NO: 243003 - DNA, 122 bp, Homo sapiens
cacatttcctctgcctgaagcgggctcccgtcccacatgttcggctgcacatgctccaggcgccccacgggctccagtctccgtccacatgctccgggatgggcgtcttgctcacgcactcc

SEQ ID NO: 243004 - DNA, 122 bp, Homo sapiens
ttcccggcattactggatctccccatgggctcagatgcagtcaaggccagctgtggatcccggcacacagctgtggtgacacgtgagtggggctgggaggcactctgctccactcgagctgg

SEQ ID NO: 243005 - DNA, 122 bp, Homo sapiens
ggcagccgcccagccgcaaggggacgctgtgagggcagcgagcaggattccctaggccctcgccccctggtggcggcagcggctcctgctctgctcaccacgcccctcggtgatttctggcc

SEQ ID NO: 243006 - DNA, 122 bp, Homo sapiens
gagcagggagtgagctgactcccaaaggcagtgcatgtagtgtgactttcaggcccagcacgccgggcccaagttgatgagaagctggtctcactgaagtattttatcaagtctccagactg

SEQ ID NO: 243007 - DNA, 122 bp, Homo sapiens
acgcttgagtttggtagccaggagatggccaaggagttgaggcacaaattggccaccttccgggtgcattcgatctcgtttctctaagctactgtcttgccaaggagacttggactcaacgg

SEQ ID NO: 243008 - DNA, 122 bp, Homo sapiens
aatggaaggagggagcagggaactaatgctgtctgcaaagacaagagaacaaggagaccccggggaatgcagaaactggcagcgttttccttcaactaccatgaaaatggccagactgcctg

SEQ ID NO: 243009 - DNA, 122 bp, Homo sapiens
ggtgatcatcgccgactgtggggagtacgtgtgaggcggcactctctctgcttccccctccgctcttgaccctgcatatccaggaaggaactgccagcctcagaggaggcagcaccgagggt

SEQ ID NO: 243010 - DNA, 122 bp, Homo sapiens
tgaagacatggtaccagatgcgctgcagcagaacccgggcgccttcaggtacagggcgggcgccagggtcgtggaggggggggatggggtgaactgctctcttacccagcattggggctgtt

SEQ ID NO: 243011 - DNA, 122 bp, Homo sapiens
ggaggtggcccagtgccaacaggggcagcagaggggctgcaggagtgccttcatagatgccgcacagatgctgcacactgccagagcaaatctcagggaaggaaagatggggcgtcatacag

SEQ ID NO: 243012 - DNA, 122 bp, Homo sapiens
aggtcaaaataggcccttcatgaaggcttcctgagggtctttcaagttcccatccccattcggaccatgctatggggaatcttctttgagatggggtgaatgtgggaaggctggaggcagtc

SEQ ID NO: 243013 - DNA, 122 bp, Homo sapiens
ccgggacgaggagggaatgcctgtgagaagtgactcaggtctcagcccttatctcttccacgtcggaccttcaaccctaaaccaccctgtcttcccagtttccagtgaagaaacttcctggc

SEQ ID NO: 243014 - DNA, 122 bp, Homo sapiens
cagctcgattgggacgaacctgggcacttagccgtgcagaaacaatggcgagcctttagccggatcgggagcagtaatgggtgcctccatggacagcggacaccctgccggatccagagggg

SEQ ID NO: 243015 - DNA, 122 bp, Homo sapiens
ctttttccagggctcccgtgttaggcccccaccaggaggctttggggtggcgtttgggaacgccgtttggatcccttctcagtttgacatcctaggtggcagctccagttttgtttggtgaa

SEQ ID NO: 243016 - DNA, 122 bp, Homo sapiens
gggaatgggctcttaatgtgatgcaaaccacttacacatggaaccaggaaatacagcaagcgaatctcttcagttacaggcttgttatgcaactctgctttccaagagccaaatcttctgac

SEQ ID NO: 243017 - DNA, 122 bp, Homo sapiens
acacctgggaaaggcgggtttggtcccagccccagagggatctcagctgtcgctcggggccggacctatctcggtccatctaagggtccgaggcacagccccgccaagaggccacaagtgtc

SEQ ID NO: 243018 - DNA, 122 bp, Homo sapiens
gcccagcaacgcagggtgcctaggagccgcgggctgcgcagggaggcgggcagcggccctcgcgcgcttctgccgcccccggagccggcgcgcggcgagcgcagggcgagcgcgcgtcgggc

SEQ ID NO: 243019 - DNA, 122 bp, Homo sapiens
ttactccttgttctgttgcctttgtctaaggtcagcaggagagaagggagccaggaggctcggttcattgtttgaggcatgccagtgagtagcaaggtgaccttgtcaagtcatgtcacttt

SEQ ID NO: 243020 - DNA, 122 bp, Homo sapiens
tgccgagcccgaggtgtgaagtggccccttccaggccgcatcagcacatcaaagtgggctcggggcttggagggggcggagcctgaccctttgaatccacggcggggggccaaggtgccagc

SEQ ID NO: 243021 - DNA, 122 bp, Homo sapiens
ttcgattcggagggtcttcatcgctgaggttcccataataggtaagcgactccccttcctcgttcccgcgcccacgggttcctgccccgctctccacccacacactctttggggctccttcc

SEQ ID NO: 243022 - DNA, 122 bp, Homo sapiens
aaactgagtaggcagaggaaacaggggaaggaaaagctcacacacacacacacgcccacgcgcacacaaagcagggtacagagagaaaaaccaagacagagactgaggaatactcatgtaag

SEQ ID NO: 243023 - DNA, 122 bp, Homo sapiens
ctccagccagaagccaacagatcccaggggactggagccacaggggctgcacctgtttaccgggtatttttaggatggttgatgaacacataatacccaccctatagtcagagaaagacaat

SEQ ID NO: 243024 - DNA, 122 bp, Homo sapiens
ggaaaactgggggacagaggcgaaaactcggatccgaaagggggtctgtccatcagggcacgccggaagagtggcgctgagctgacggcgagcgccggcgggtcggggcgccaaggctcagg

SEQ ID NO: 243025 - DNA, 122 bp, Homo sapiens
ctgatttagtatgatggcgtccttttcttgatcattttgtatccccaggggctagcaccccgccctgcacgtggttagtgaaccttccgcatttaatgagttgaggaatgagatgttaaggt

SEQ ID NO: 243026 - DNA, 122 bp, Homo sapiens
ctaagcaatccctatcaaagtgctggggttacaggtgtgtgccacagtgctcaacccaaacgagggtatttttagagttatgagaccctggatagaaatagctttctagaggagctttttat

SEQ ID NO: 243027 - DNA, 122 bp, Homo sapiens
ctgtgtgatgggagcttggcacttcctaaatccaccccgaagacaataggtcacattcagcggggctcctgccccaccggctcccccaaggcggccctggaggagggggacgaggcagagga

SEQ ID NO: 243028 - DNA, 122 bp, Homo sapiens
gcgccgggctctgcctgggctagtggcaccgacttgggtatgtttcttatgaatattacacgcggagcagcgtctggtccgggggtgcggtggggggtgttggggcgggcgggaggggagac

SEQ ID NO: 243029 - DNA, 122 bp, Homo sapiens
tatggggcaaaggaacatcaagccatattgagtcccaaagaatatcaagtaagcatcttacggctgtacaagataaatgtgaataataaaatctcaatttgtgctattatttttcctttcaa

SEQ ID NO: 243030 - DNA, 122 bp, Homo sapiens
aagtggaacaagaggccctagcctctgcgtgggcttcctgctacgggcatcctccgccgccggcgtaccactccccaagcccaggaagtggcgtgcatacgctgggaccagccctctccagg

SEQ ID NO: 243031 - DNA, 122 bp, Homo sapiens
tcgcttttttttttttctttctgaatctgctcttctgctttgcgggcccctaatctctcccgaatctcgggcgcccggcccggcccaggcgagcgctcgcggttggggacgcgggtggggac

SEQ ID NO: 243032 - DNA, 122 bp, Homo sapiens
aggcatcagagtggggtctctactctgaaattaaatatctgccataaggtatgttgaagacgttagtctctttcccaggaggcacaaagtgcaagtcttttcctcatcgcttgagcaaatta

SEQ ID NO: 243033 - DNA, 122 bp, Homo sapiens
cctgttgggatttgcctaatgtttcttttcttttcttttcgagacagggtcttggtttgtcgccaaggctggagtgcagtggtgtgatcacagctcactgcagccttgacctcctgggctcc

SEQ ID NO: 243034 - DNA, 122 bp, Homo sapiens
gagcaaaaaaagtagagcagggagagcagtggttgaagcactagggagagctgacagaagcgcatctgggtgcactcaggctagcctggcccctacccaagctcccttggtccagcttggga

SEQ ID NO: 243035 - DNA, 122 bp, Homo sapiens
tgcattaaaaacttgttcctgtttgtaaaattataaccattctagtagatacgaagcaatcgtggattcttgctaaatgctgtttgactgattttaatagtagatttgatttctgtaggaat

SEQ ID NO: 243036 - DNA, 122 bp, Homo sapiens
ggagccctgcaggggggagggctctttgccgctgggtgcggtgctcacatctggatgacacgagtgtgtgcgagtccgcccggagctcgagggggcacccagctggaccagggcttcccctg

SEQ ID NO: 243037 - DNA, 122 bp, Homo sapiens
atctacccgccttggcctcccaaagtgctgagtttacaggcgtgagccaccgcgcctggccgagataagttattgtgactttttctatatatgtattagataggaaagcaaaacgtactgtg

SEQ ID NO: 243038 - DNA, 122 bp, Homo sapiens
ttcttttttgccttcttgggtactgctgaatgttaccttctctcctcaatggcccatgatcgctatgcagcgatctgcagtcctctacactacacagttattatgtccaaaaggctctgcct

SEQ ID NO: 243039 - DNA, 122 bp, Homo sapiens
ggccgcgttgctccctcttgggagcagcagtgctaaaatcgaagcaggcagctgcgggaccgctatagccggccctgcgctcgggcccttcccgggcaggaaacgcgtcgctgtccccggct

SEQ ID NO: 243040 - DNA, 122 bp, Homo sapiens
ggttaatctccagccatccgtggactggggtagactgtgagtggttaatctccagccatccgtgggcgggggtagactgtgagcggttaatctccagccatccgtggactggggtagactgt

SEQ ID NO: 243041 - DNA, 122 bp, Homo sapiens
ctctggactttgaatccagcaatccgagttcgaatctcggtgggacctttcaaaggtgaacgttttacagttcctggcttggcctctgaatgtgggaaaaattcgttcctccgcttcccatc

SEQ ID NO: 243042 - DNA, 122 bp, Homo sapiens
ctgtcccctcctcagtgtctttggccggctcgtcttcctctctgtgacctgagatgttggcgtgccccagagttcagcccttgtatttcttcatttttttattccacccactcccttggtga

SEQ ID NO: 243043 - DNA, 122 bp, Homo sapiens
aaatcccaggctccaagatgagtccccgttttccatgtggccagagtctttgtccaaggccgcagaatcctacccacattctttatggggcaggggcagggggtgaggggctcttccaccca

SEQ ID NO: 243044 - DNA, 122 bp, Homo sapiens
cctgtaatcccagctactccgggttgaacctggtaagcggaggttgtagtgagctgagatcgcaccactgcattccagtctaggcaacagagcgagactgtctctaaataaataaataaaca

SEQ ID NO: 243045 - DNA, 122 bp, Homo sapiens
catttgggtggtttccagcttggggctgttacaaataaagccgctgggaacctttgtgtacgagatttggggaggctgtgcactttaatctccctttggagaatacccaggagtggaatggc

SEQ ID NO: 243046 - DNA, 122 bp, Homo sapiens
atggccatcgcttgtatgccgggagaagcacacgctgggcccaatttatataggggctttcgtcctcagctcgagcagcctcagaaccccgacaacccacgccagcgctctgggcggattcc

SEQ ID NO: 243047 - DNA, 122 bp, Homo sapiens
agggccattcttcccggccttcgtgtctgcacacggaagacccacgtgctttctgcttaacgtgtgtgcattcctcttgtatgtgtcaggcgtgcacgaggcctctcaggacagaattcctt

SEQ ID NO: 243048 - DNA, 122 bp, Homo sapiens
agtgagcagcgggaaggacagtccaggccgggctgcaagcacagacatctgattctgtgccgggcaagggatggaggagcccagtgtgaccagagtagagtcaggcttgaagcacatctgat

SEQ ID NO: 243049 - DNA, 122 bp, Homo sapiens
gctctgaaagcagaaattatacaactgctgcccctaggtcttttcctcaatgtgagaaaacgtgaggctggcctctgcgagcaccaggtttagcacccagggaagagacagacctatgacct

SEQ ID NO: 243050 - DNA, 122 bp, Homo sapiens
ctgtgaaggagaagcacggcagtgaggaatgggaggaacagggaaggcttctctgaagaacgaacagaagtaaccagagaagagacagcccgccctgcaaagggacagcctgaggcagggcc

SEQ ID NO: 243051 - DNA, 122 bp, Homo sapiens
cgccgcgatgtggccgtggcggaggaagtgaggcaggcagtttgtgaggcccggcgtggccgcccctgggaggctcctgcccccatgaagacacccgaggctggcttggcggggaggcccag

SEQ ID NO: 243052 - DNA, 122 bp, Homo sapiens
atatcctgaatcagggagatcctcaggggaggcatgagtgagctggcatcagacttcctacgttctgaatcaagaagtattcctagaataaacaagttggtcatgtccaaagagatctgaat

SEQ ID NO: 243053 - DNA, 122 bp, Homo sapiens
accaaccaagggagggcacgagaccaaccaagggagggcgcgacaccaaccaagggagggcgcgagaccaaccaagggagggcgcgagaccaaccaagggagggcgcgagaccaaccaaggg

SEQ ID NO: 243054 - DNA, 122 bp, Homo sapiens
agcggggcctgggtcccctacagaagaaactgtcttcccatcagcgcttgcgctgcaccccggggaccctggtatccctggctcaagcccagggtgcgcctcggcctgctaggggtacccca

SEQ ID NO: 243055 - DNA, 122 bp, Homo sapiens
cgcggcccctctgcgctcaggtgactgatttacactcgcgccggggtcgcgctcgcgccccgagtcccagccggcacggttccccggctcctcctcgggacaaaaaaaaaaaaaaagggaac

SEQ ID NO: 243056 - DNA, 122 bp, Homo sapiens
tactatctgagatggcacactcctgccttgtgttcagctgtgagctcggcccagccgggacgtcaagatgctgtctccacctagtggctcatcattcattaatccagcccaagcttcctcac

SEQ ID NO: 243057 - DNA, 122 bp, Homo sapiens
ccgcggctcggactccggcgggacctgctcggaggaatggcgccgccgggtgaggagttgcgcgtggctttggggagagggctgtcgcccgcgggaggttactagtcgccgctcgagagccg

SEQ ID NO: 243058 - DNA, 122 bp, Homo sapiens
aagtaaaagggcggccggcagctgggcaattgctttgcgaggctgggtgttgagtcgagccgcgggaaaggcgcgtgtcggcctctcactggcgcagcctgcactgccgctgccgcctcgcc

SEQ ID NO: 243059 - DNA, 122 bp, Homo sapiens
ggccccgccgccgatttgaatagcatagagggctgcgcggattggccgcgccgcgggtcacgtgacgccacagccaggctcgggaaggagtcggcgagggccgctcggctgcgtcctggggc

SEQ ID NO: 243060 - DNA, 122 bp, Homo sapiens
ttgggggaagtcatatccacggtttaaatgaggtcatgacccatgaattgggctggagcgcgtgttactggggcgaggtgcacacagtgaacggtgtgtccaggtgtccgctgtcacatttg

SEQ ID NO: 243061 - DNA, 122 bp, Homo sapiens
tctaaagcagaggattgggaagaccttttgaaaacactttagcaatgcccgccctttcggcgggctaggttctgcccgccgaggctggctttcatgtgtatttaacaccttccgggatgata

SEQ ID NO: 243062 - DNA, 122 bp, Homo sapiens
acgaccggcggcgccggattccttgcttggcggcagggggcggaacaaggagccttggagcggggcaaaggtaccccttagtgccgttgatctccaggggcattgttagactcgcctgttat

SEQ ID NO: 243063 - DNA, 122 bp, Homo sapiens
ccgcggtgggaatggaaacatctgccccacgtgcaggaagccgggtggtggccacgacagcgcgccactccgcagcgtaacctcgcagatcccctgcgtgtgtcctcgcaagactagctcac

SEQ ID NO: 243064 - DNA, 122 bp, Homo sapiens
cccagactcagtgttcctctcctgccttatgattcgtgctgtttgacacgaagtggttgtcgttttgtgtctcatacgctgttgtgtatgatcccattctaatattgtgagggtaagtgcag

SEQ ID NO: 243065 - DNA, 122 bp, Homo sapiens
tgagcacagccctacagtgccaaagagctcatcccacccatacccagtccctaatcaccacgatacctgggagacctacagggagccagggaaaaatctcagaaccacaggggttttagggt

SEQ ID NO: 243066 - DNA, 122 bp, Homo sapiens
tttgcggcggggtggtaggaggtcagtaatagaggtgttcactagtcctttatttttattcgcagaagagcaggctattggagcaatccgaaccctgcgcagcaaaagaacgcccttgcccc

SEQ ID NO: 243067 - DNA, 122 bp, Homo sapiens
aggggagaggccgctaagctggaggctgcacttagctgtggcaccaaacgttagccaaggcgccgggctggcctctccaacccaagtctccccctggagccaggggtgcatggtacgtactc

SEQ ID NO: 243068 - DNA, 122 bp, Homo sapiens
ctgttcctatcctccccattcagtgtaaacaaaaccacgagactctctcggtttttgagccggatccaagcaaaatcggcaggaaaggaaaacacggggtgctggcaccgactattcaaacg

SEQ ID NO: 243069 - DNA, 122 bp, Homo sapiens
ccctcggccgacaggcagtcgggcagcatgtcaagtcctgcgcggccgggacactgagggcgcgggatcgggcgagggaagaggcggggcgaggcggggcggggcgctcagcccgggtccct

SEQ ID NO: 243070 - DNA, 122 bp, Homo sapiens
tagaagagtgaaaatatgtttggtttattgccatggcctgttagggagagtcaatactcacgggcatttctgactggttatcatataaaagacttcacgatacaggccatgatgtgctgaga

SEQ ID NO: 243071 - DNA, 122 bp, Homo sapiens
ccgggctggtctccagctcctaaccgcgagtgatccgccagcctcggcctcccgaggtgccgggattgcagacggagtctcattcactcattgctcaatggtgcccaggctggagtgcagtg

SEQ ID NO: 243072 - DNA, 122 bp, Homo sapiens
ccgaggctgggggtgtcccaccctgggtgccttcacctgggatttgcgtgtagagggaagcgaaagcaaacatgaagacggccgccacgccctggaggaagagctgccgcgggagccgggag

SEQ ID NO: 243073 - DNA, 122 bp, Homo sapiens
gcagcgactgtggcgcgcggagtccgaactgcagatcccgctgccgccggagccccgccccgcgtggggcgagctccccaagctccgcctccaggctccccggcctctccccacccttaagc

SEQ ID NO: 243074 - DNA, 122 bp, Homo sapiens
tgtgaatttttcatatatttagccatttctctatcggatcactaattgttttctcatcttcgtaagtgccacttatatagtaaggaaatgagccctttttctgtgacatgtattgcaaacaa

SEQ ID NO: 243075 - DNA, 122 bp, Homo sapiens
tgagctggacttcttttggtccttgttgcaagtgggccaccttcacctggaaggccaggtcgtatttctgcatctcattgggccccagggtgtaccattgctcgctcagcatctggctgatg

SEQ ID NO: 243076 - DNA, 122 bp, Homo sapiens
gagtgacacaggtaaggtatgaatgggtctttgaaggcatgtttctgggcgagtgagtgtcgggatggtgtccatggccctgggtcacttctggtcctcccagcagagtagtggtatgaata

SEQ ID NO: 243077 - DNA, 122 bp, Homo sapiens
ggccggagccgagggcgccgctgggcggcagtcggagctggagcccgtggtatcgttggtcgacgtccttgaggaggacgaggagctggagaatgaggcgtgcgctgtcctgggcggcagcg

SEQ ID NO: 243078 - DNA, 122 bp, Homo sapiens
agcatgtcagagccagcagggacctgagaatcaccgggtccagccctggaatcttagaaacgaggaggtgaagcccagagcggggatcgatttgcccgagatcacacaaccgcttggcgaca

SEQ ID NO: 243079 - DNA, 122 bp, Homo sapiens
accctgggagtcacaagctccgccttctgtaacacaggcatttctctcggaagagatttacgtgatcccagcctcacgacctgaaagccaggaatcaatctgctggcacagcgtgcagggac

SEQ ID NO: 243080 - DNA, 122 bp, Homo sapiens
cctccctcaaaaaggatttgtagtaagaaacgactgccactacaagtgaactagaagacacgagtcctgaaattctgctactcattagtacgacgaggcttgcattagaataagcacactaa

SEQ ID NO: 243081 - DNA, 122 bp, Homo sapiens
tagtgaccactgaccctgagcaatgttacagccccactgaggaatcagtttatccccaggcgcagctcccagagtgacaccctaaaagtgagtacttaaaaagcaaaggtctctgagatcca

SEQ ID NO: 243082 - DNA, 122 bp, Homo sapiens
atacatctactaggtacccataaaaattaaaaatcttctagaagacttcggtctgaaccacgtatctagagcactggccttctagaaggcagctttataaaatagctcatgggattatgtag

SEQ ID NO: 243083 - DNA, 122 bp, Homo sapiens
cacagaacagagggggcaagacagctccaccaggagtcaggagtgaatcccctctgggaacgaggcactaggaagaagaacttccagcccaggaggtaggtagcgttcagaagaagcctggg

SEQ ID NO: 243084 - DNA, 122 bp, Homo sapiens
gagacagctaaaatatctgtccagatcatgtacatacaaagagagcactttctcaaccaacggacctccctgaattattcaaagtaccttccattctccagtttcccatcatttttcttcct

SEQ ID NO: 243085 - DNA, 122 bp, Homo sapiens
ggaaccatcagccaggatgcgcagggagctgtcgctgcaggtgggaaccgcgagccaggacgggcagggagctgtcgctgcaggtgggaaccgtcagccaggacgggcagggagctgacgct

SEQ ID NO: 243086 - DNA, 122 bp, Homo sapiens
gccttcttaggcatctcggcgcaaagaagccgagcggagccccgagtattgggtgttgcccgaaggtgcctcagcccgctgcggagccgcagcatccccgcctgggaaggcgccggaagagc

SEQ ID NO: 243087 - DNA, 122 bp, Homo sapiens
cgtcggggcacaggtcctgcggggccgcgggggccgccagggagggcgcgaccgcctgaccgggcttcaggagcagtgtcctcagccggtgacctggccgctaccctcgctcagtgtccccg

SEQ ID NO: 243088 - DNA, 122 bp, Homo sapiens
ggcctcccacctcccttccccagaggctgatgcccacctccctgcccttcttgaattgggcgggggttaccatctccttcagctcgcccagatacttcttcagttcgtgtttctgggagagc

SEQ ID NO: 243089 - DNA, 122 bp, Homo sapiens
aaactttcaaaaaacagaccttaagagagtggcacaaaggagaagttctgaaaaataaaacgttggatcagcacggtgaattcaggaaggctattagaaaagtgatcactgctattatcatt

SEQ ID NO: 243090 - DNA, 122 bp, Homo sapiens
ccaatagttggccaatggaaaagctgtggctctagaaagccagcccgcgctccgttctgacgtcactataaatgctagactttattggaaatgtagtccttgtcctgccccgcgctattcat

SEQ ID NO: 243091 - DNA, 122 bp, Homo sapiens
ctggtaaggccccaccacgtaccccagtcacgtagtctctaaaactgaacagatttgggacgcttcctcttagagggcagccctctttgggactgttagtctggccacttttacacatttca

SEQ ID NO: 243092 - DNA, 122 bp, Homo sapiens
gtcactgagacgccgccactctggagtgcagcctggtggcttttaagaggagacacccggcgaaatgctctccagagccaaagaacgttccggctggagcgacctgggaggaagaacgagcc

SEQ ID NO: 243093 - DNA, 122 bp, Homo sapiens
ttctcttagtccaactgggctttagaaagctaaactgttggaggagtctgctcacagctccgtatttctgctgggctggaggtgagcagtctcccaccctcactgtcgctcttgggaagaaa

SEQ ID NO: 243094 - DNA, 122 bp, Homo sapiens
taaccaacaaagttgggacgataatcacttcatactgcttctcctggatgactgggtaggcgatcacacaggaagagaagagaatgaagaagcctaacctggtgttcatgcaatttccccta

SEQ ID NO: 243095 - DNA, 122 bp, Homo sapiens
acgtccaaggcagccatttcctcttgtttcacgggcttttcgggagctgcaggcacagcgcgggggggtgggggtggggaggaaggcgggtggcggagagggagggggcccgcgggccgaag

SEQ ID NO: 243096 - DNA, 122 bp, Homo sapiens
gagtgccggttacgtaacggcggctccgagcgcctggggtcctcccagagctcctgggctcgagctctttccatgagcacctcgggccttctcgtggctacctctgtgcttccctgagacct

SEQ ID NO: 243097 - DNA, 122 bp, Homo sapiens
gacaccgaggaaacaaagttcacccaagtgaatgcgtcctaattgctccaaggctctctccgcaaagtctacgactgcaagccgcaaagtcaaactacgtctccaaaacgcagtgggcagag

SEQ ID NO: 243098 - DNA, 122 bp, Homo sapiens
cctcaaaaatcctaaaaccttcccatgcgctccctctgctggtgaatgggcagtatcaaccgttagctaatgaacctccgtttggggtgagcctccgtctacattacgccccgtcctgaaat

SEQ ID NO: 243099 - DNA, 122 bp, Homo sapiens
gtaaaccaacaatgtgtttccagtagcctctacagatttccttgtattattctgaggaagcgattgtgctggagatattttcctacagcacaggagaatgtttccctcctattctcagttcc

SEQ ID NO: 243100 - DNA, 122 bp, Homo sapiens
tgctataggtgtttgtgtcagtgaagatgagcaatttttataccaaccaagtatgtgtgccgaaaaaatacttatctttgccagttttactgctgagccaaccattcagataacatcacatt

SEQ ID NO: 243101 - DNA, 122 bp, Homo sapiens
ccgcgtccgggccctggcggcgagcggggcgggcatttagcgtcccgggccccgccttcccgccctccacagtcttcgccttgatcgtgttctcctgcatctatggcgagggctacagcaac

SEQ ID NO: 243102 - DNA, 122 bp, Homo sapiens
ccgcctcgccccccgtggtgttcaccgttttcctgcaaggactcgggaatggttttccatcgctcttggttgctctgctgcccctggagccccagccgccactgcttccccaccccagggga

SEQ ID NO: 243103 - DNA, 122 bp, Homo sapiens
attctttctgttttagttctagactgcctcctcttctgtcattattactgtttaaaaatccgctatacagcctccaaagtgggagaggacatttgtaaacctgataaagagttaatgtctag

SEQ ID NO: 243104 - DNA, 122 bp, Homo sapiens
cagtcctgtgaggcagacacccccggaatcactgttcccggtttgcagagagggtctatccgtggaccccggtctttgactgctggggcctgtgactgtccatgggtgtccatgacccagtc

SEQ ID NO: 243105 - DNA, 122 bp, Homo sapiens
aacacctgaagacgaaaccctgctctcctcaccaggccaagtcggtctccattaaaaagtcgtcatggttgtcacagtcgccaaaatgacgtcaggttactatggtaaccgcgatgcgcagg

SEQ ID NO: 243106 - DNA, 122 bp, Homo sapiens
ctgagctttctctttaattaagagaaaattgtgacatcaactcaagggcatcaccttccccgatgtggtaaaggcagggatttaatcccaggccagccgcacatacccccagcaaatctgct

SEQ ID NO: 243107 - DNA, 122 bp, Homo sapiens
gctgctgcagcatttacagaggaattgtctgggatgtgccgggccgagcactgtagctctcgccggtgtctgcgtcagcacgctagtgacatggcaggtgaggaccacggcaccgcccctgc

SEQ ID NO: 243108 - DNA, 122 bp, Homo sapiens
tgagcatgcccagttcaactagtagcctccaggccacacaatcctgaagtttcattgtttcgctgctctctctttgagattgtaagaataagaacagtgtgtgtcttcataggaaggaaaaa

SEQ ID NO: 243109 - DNA, 122 bp, Homo sapiens
ggagggccggcctgagtgggcagatgcggcgcacggggatgaactgccctatgtctttggcgtgcccatggtgggtgccaccgacctcttcccctgtaacttctccaagaatgacgtcatgc

SEQ ID NO: 243110 - DNA, 122 bp, Homo sapiens
ggagttctggtaccaaaacccagtgattgggccttacctctgagtctgatgcaactggtccggagctgctgggtgattctaatgtgcacctagaggtgaggaccatgtactaagccaccctc

SEQ ID NO: 243111 - DNA, 122 bp, Homo sapiens
ggtgagagcctccttgctggtggggactccgtagagtcctgtggcagcagcaacacagggcgtcatgtggtgaagggactgcgtgtgctcgggtgtttgctcaggtctctcttcctcttctt

SEQ ID NO: 243112 - DNA, 122 bp, Homo sapiens
ggccagccccccgcgggacgcctgcgtctacagcagctgctactggtgagggggcgcgggcgcagcctctgggtctcccaggctcccgggcggcgagtcgcaaccgggccccgcctcttccc

SEQ ID NO: 243113 - DNA, 122 bp, Homo sapiens
ccccctatccccagcccatgcccgcatcttggacactcagccctttactcccagacatctcgagtattttaaatggtaagataaatcaaaactctctggggattacctctgctcaggccagc

SEQ ID NO: 243114 - DNA, 122 bp, Homo sapiens
gccttccttgtcgctctcggatgttcccgattaatgggctccaagtgaccactgccaggtcggggaacacagcggtagtttttaaggggagtgcaccacatcgcctgatccacttttctgtt

SEQ ID NO: 243115 - DNA, 122 bp, Homo sapiens
agaggctagcctacagtgagctatgccctgaatgacagacaccatattcacaggcaaaatcgaaactgcttagattttgaatcatggacaacattgttgctttgttgcagtgaataactcca

SEQ ID NO: 243116 - DNA, 122 bp, Homo sapiens
ctgggattacaactgtgagccaccatgcccagaccacataaaaatatccctagaggagtgcgtcccagccccgcgcctgccaggccgtctgtttcgtcccatcccatcctgccgcagcgcgc

SEQ ID NO: 243117 - DNA, 122 bp, Homo sapiens
actctgttcaattgctgttttgccctttgctggttgtaccaccttgggcaagctgattcacgtctctgagccttagttgtctcatctttaaagtggagatgcacctgtgcatggggtggtgt

SEQ ID NO: 243118 - DNA, 122 bp, Homo sapiens
ctttcctcatctcactccacacacgaacaggtttagcaaataatatgcacgctgctgggacgggcccaagcatttccctcccttgatagggcggaactaaaatgcaagccccacagttgtca

SEQ ID NO: 243119 - DNA, 122 bp, Homo sapiens
tccaaggcatctaagtctaggctgcctcggagttcctgggtcctaaagccagaaacgtcccggtttccctgaggtcctaaagaacgttgacagccaacagcgcgcctaacttggagcgaatc

SEQ ID NO: 243120 - DNA, 122 bp, Homo sapiens
agttggagagcgggtgcccgcacctctggaggctgaggcacaactgggctgggagttgagcgcataccgagtaggggctgcgggggagcgggggcagggccggcggggcggggccagaagcc

SEQ ID NO: 243121 - DNA, 122 bp, Homo sapiens
tgtgcggggaggggaggacgtcgggcaagcccgggcggcacggggagcggtgtggaagcccggcggggccagcgcagttgaggtctggggagcccggctggcatctgctccgggctgcggcg

SEQ ID NO: 243122 - DNA, 122 bp, Homo sapiens
gccgtggcggccgaactggcgctcaacagacgggcggggccgagcgtgaggcggagtctgcgcactgctgctttgcaaatgaaggtgggcggggtggagcgagcgtgagagacgtgcccccg

SEQ ID NO: 243123 - DNA, 122 bp, Homo sapiens
attttaaagtatctaaacatgagtctcttctgccgatcctctccaatgtggccaaattaacgtcatttcaatttttgcatttctgctaaatttcctcaatcagtagtaacagatgttatttt

SEQ ID NO: 243124 - DNA, 122 bp, Homo sapiens
aactgaacagccaacacttgtggctccttcctacaagtgctgggtctccacagctttcctcgcaaatcgaagctaacaggagccccgatttgcagaccaggaaatggagaccccgaacgaaa

SEQ ID NO: 243125 - DNA, 122 bp, Homo sapiens
cctccctgcccccacctaccccgagtaacagggtgaatccaggtgacagcagcgtggatccgcagggggcagccattgaagaccttggagaagcaggcgcccatctgcagaggaggcaagag

SEQ ID NO: 243126 - DNA, 122 bp, Homo sapiens
atgatgctccttatcagcagcacagcaaaagctgtgttaccacgtaaggatcaaccagggcgtggacgatgacgaaagaacacacctgaaagcaacaatgctcataagcacacacgcgtgct

SEQ ID NO: 243127 - DNA, 122 bp, Homo sapiens
ggccccgctgggctgatggggtcccctgattgctaccacgtgttctttccaacacagcaacgctttctcgctacccagtctgttcagattgccctctaggaattggaaacggcccccagatg

SEQ ID NO: 243128 - DNA, 122 bp, Homo sapiens
ctccccctgaggggacttgggcttctcttagcattggcaggcaggtataaacccccggctcggatggagctatgcccgatgctgccttaagccttatgaggtcgccacggaacggcaggtga

SEQ ID NO: 243129 - DNA, 122 bp, Homo sapiens
ctgcaagctctttcctacttcccttaggtgcccagacccaaagtcaagaggaccttgacccgtgggggtcgtggggaatgaaaaccgtcctgcgaacttgaacttcactagggaggcggcgc

SEQ ID NO: 243130 - DNA, 122 bp, Homo sapiens
attcactgggtgtggatccaagagttcgccggaaactcaaggcagttgtctattccttcacggttagtcagttggctcacttagctggagcaaagaaagacttcataggctgtgctgccaag

SEQ ID NO: 243131 - DNA, 122 bp, Homo sapiens
acctcgggcgatccaccggcctcggcctcccaaagtgctgggattacaggcatgagccaccgcgcccggccttaggttgatgatttcttacaaaagtaaacatattcttaccatatgatgta

SEQ ID NO: 243132 - DNA, 122 bp, Homo sapiens
atttattcaaattatgcttaaagttttcagagataaccaaagccaacagaattcaacgtgcgctcaggtctcgctttgccctcgctgtgccttctccgtaggccgctctctgggccaagcac

SEQ ID NO: 243133 - DNA, 122 bp, Homo sapiens
ggccccagagttcggggaccgctgcacagccagagggagcgcgcgggaagagccgcgtcccgccagccccgtcgcctcgtgggcccccccgggcctggcagtcccccaaccccctcatcacg

SEQ ID NO: 243134 - DNA, 122 bp, Homo sapiens
aggagactgctgacaaaacacacagagaccccgggaggcacaggagacaggagtgccgctcgccaccaaaccacacccaccgccggggcctgcttccctctctcaatcccgaagggagggga

SEQ ID NO: 243135 - DNA, 122 bp, Homo sapiens
aggagaggtggacagacagctttagctaggaggagctgtgcctccattaatgtaataggacgttttgtaagcactgtccagcgaatggtgtctttgaccagagtggccaaaagtatacacac

SEQ ID NO: 243136 - DNA, 122 bp, Homo sapiens
tgagtaaggcaaacaaactgacaaaaacaggatacattctcccacccacttcttgcttcccggacaaagatttggtctcccattagcagatgcacccaggctagtgtgggctgggatcacgg

SEQ ID NO: 243137 - DNA, 122 bp, Homo sapiens
tactaacaagcgataaaaggccttccgatggataccaaatgagaaccttccagagggccacgggcgcccagctggaaacccctgctaagagcatctgcagtctgaacccacagtgactgcgc

SEQ ID NO: 243138 - DNA, 122 bp, Homo sapiens
cagagtcagagggaactctcgaagttttgcccggagcaaacggaagggtggctttgccatcgcctaagatgggaaaatggcaggtgtcacaggttgcaggggaaggtcggagaccagctgag

SEQ ID NO: 243139 - DNA, 122 bp, Homo sapiens
caaaattgagttattcaaggatctcaggagacatgtgacgaaagagaggaggcagctctgcgtgcttctgggtcccagtgaaaatagaaacataatgttcctgtacacaaagtagttagaac

SEQ ID NO: 243140 - DNA, 122 bp, Homo sapiens
taaaataaaagacaccacagtgatgaagaaaaaatttgttctcattatctagaaaagggccgcttcttcctaataatggagagttctgctgaagccaaattgaatggcaagcagcactttct

SEQ ID NO: 243141 - DNA, 122 bp, Homo sapiens
gcgcgaggggcgcggccttgaggcacggtcccctctggaggcgggatctgggcgggcagtcgagagacgaggcccaatggaaaagaaaagcctgagcgctcgcgtccccacaggtcgccaga

SEQ ID NO: 243142 - DNA, 122 bp, Homo sapiens
tcctttatgcctcacgtccagcttggctcaaaaggactctaaagagccggagagctgctgcggaaaggcggagtcacagtacaatcggtgttaactacgtgtgcagccaccgtctccttagt

SEQ ID NO: 243143 - DNA, 122 bp, Homo sapiens
acctaattccctaactgcctttttcttgccaaactttcagaggttggcaggttgtcatggcgaccagaaaggacacagaggaggagcaggtagtcccaagcgaggaggacgaagccaacgtg

SEQ ID NO: 243144 - DNA, 122 bp, Homo sapiens
ttagctccgcccacactataaaaggctctttctaaaaaacgaaacatgattaagggcacacggctccagcgttaacaaagctctttgttagctgggaaatgcccccctccccgactcatctg

SEQ ID NO: 243145 - DNA, 122 bp, Homo sapiens
gaggtcaggtaggcagctgagtaatccccaactctgcctttttaaaagtggtttcagttgcgcatccttggaattgattctgggcagctgttaattgcaaaactcactgccaattatcgata

SEQ ID NO: 243146 - DNA, 122 bp, Homo sapiens
tggcgtcccgagccagctgtttcctgcgggagagcgtgcccggggcgggagggcgctggccgccgcctcgttggcctcccggtgcctgcgctggtgcccggctccccgcggagcggcgcgga

SEQ ID NO: 243147 - DNA, 122 bp, Homo sapiens
gctgcagcttcgcaagcatggtgcagccaaacttttccaacgtggaatttgcacctgccccggtgctcccggactgcctgctgggcccgagccgcgtcatgagcagcattctgaccaaaggc

SEQ ID NO: 243148 - DNA, 122 bp, Homo sapiens
acaattcagtagtgtctggaatagaacagtggtttgaaaagtagagggcttgttaaagcacgggatgctgattcagtaggccttgagtggggataatttacatatccaacaggccaggtgat

SEQ ID NO: 243149 - DNA, 122 bp, Homo sapiens
ctcgcccgcccgcccgcctctcccggactccgggacccgctgctgcgcgaggtcctagcccggctccttccggcaccacctggcgcctcccgagccggcatcgatgcaaagatgccgccgcc

SEQ ID NO: 243150 - DNA, 122 bp, Homo sapiens
tgagctctcagctgagtctgtcgccagggattgctctcagatgccgagagccacctcgcccgtcacatccccttcccaggggctgtgcatccaatgtcgagtcagtgcgggggattagaggg

SEQ ID NO: 243151 - DNA, 122 bp, Homo sapiens
tacaatgcagactttgacggggatgagatgaacttgcacctgccacagtctctggagacgcgagcagagatccaggagctggccatggttcctcgcatgattgtcaccccccagagcaatcg

SEQ ID NO: 243152 - DNA, 122 bp, Homo sapiens
ccggtcccgtccaactcctcactctggattattcagcccaggatcaactctgctgtgtgccggctcagagttcccacccagctttgggggtgtggggccgagagaaaaacacagaaatgcga

SEQ ID NO: 243153 - DNA, 122 bp, Homo sapiens
attatgaagattcaataaaaccatgtttattaagtgttaagcacagtgcctggcacataacgtgctgggcggggtctatggtccagacagggggaccaggcactttccagcgcctggatctg

SEQ ID NO: 243154 - DNA, 122 bp, Homo sapiens
gccgcaccccccgacttggctgcctggctctcttacctgtggtggtgaggatgctggcagcgaagagcagggctgagggaaggtcccaggtcctgccctctgagctgttgcccagggtggag

SEQ ID NO: 243155 - DNA, 122 bp, Homo sapiens
caggtgagtcctgactggccctcgtggcgggggcggctgggagtgtgcttaaatgcggggcgcccgggggcagtgccgggccccggtggaagccagaacgcaagcgccaggctgcgtcgggc

SEQ ID NO: 243156 - DNA, 122 bp, Homo sapiens
caagccaccagcggcggaagcacgcgggaggagcactcatgccggatctcaggcatgggccggagaggccgcagcgtagggctgggactggaggggcaggcagccgaaaaaagaggctgggc

SEQ ID NO: 243157 - DNA, 122 bp, Homo sapiens
gtttccccgctgggccggaggagcctgggcccgaggtatccgggcaggaggtggcggcctcgccgccctggtcaggcctccgggagggagcaggcgcgggagcgggaggaggaagtcgggaa

SEQ ID NO: 243158 - DNA, 122 bp, Homo sapiens
cggtagctggggaattgggtttagcactttccaacgcttggaactggacatccacggctccgagtcctttgaggtcttgctcgggactacgtttcccagaaggctaggcgataattgacagc

SEQ ID NO: 243159 - DNA, 122 bp, Homo sapiens
gcagggctgtttctttccatctttgtattcccaggggcctgcaaataaatgtttaatgaacgaacaagagagtgaattccaattccatgcaacaaggattgggctcctgggccctaggctat

SEQ ID NO: 243160 - DNA, 122 bp, Homo sapiens
aaacatctacttctagccttttttgtgtttctgctccagcctttggttcctctctttccccggctgcccgctctcacaatgctgcttccttgccttttgcctcatattgtcagatagctagt

SEQ ID NO: 243161 - DNA, 122 bp, Homo sapiens
acatccgagaacaatttaaactcaatttgtaaatatccattctaagcaaatatggatgggcgatggctcttctattttgtttgggattacaagactgaaaaagaggcaaatgtggccaggcg

SEQ ID NO: 243162 - DNA, 122 bp, Homo sapiens
cagtagaaaggagcacaagcactacagtggcatattcatacagctgcaagatttttatgacgctgctgacaaaacaaaaaataaaaagctcaacacaagaacatttctccaccttcagagac

SEQ ID NO: 243163 - DNA, 122 bp, Homo sapiens
tcaaatgccctactgtctcttgtccctatgctgggggcacatggtagcagtagtaaccatcgccttagtgcccttagtgaggtttgataaacctgcctgctgcctacagttccaaatttgac

SEQ ID NO: 243164 - DNA, 122 bp, Homo sapiens
ccacgccctcctcctgcatctcttaccagccgcattcttggcatcagctccaccttgggacgctgcttatgttccacggagagcttgtagttgatctgtggcagctccaggtagcccaagcc

SEQ ID NO: 243165 - DNA, 122 bp, Homo sapiens
gatgagaaaattaaagctcagaaagggtaagtgcattgtccaacatttccatccagtcaacgatgcagccaggagtggaatctggttctgttaagctctagagcccatcctcaagcactaca

SEQ ID NO: 243166 - DNA, 122 bp, Homo sapiens
ctggcaacgaaaccaaaacttcggggacagggtggagagttccccgtggtgcgggattcccgagtgtggccccggctgggggagggtcttgggcgctcattacaggccaggaggtccgctgc

SEQ ID NO: 243167 - DNA, 122 bp, Homo sapiens
gcgagggggtttaaatgtgtgcgtttgttgaatgacccacaaaaactgaaggagcgcggccggactgatcacactccttgagacaaagcgggtgggagacccagaggtgaggagggtggtcg

SEQ ID NO: 243168 - DNA, 122 bp, Homo sapiens
cttgccctctgctgcttcctcttgtgcggaggcacgggctccttctgctggatcagacttcgcggcaacctccgggactctgacggtgaccaacttattagaaaagggtaaagaattccggg

SEQ ID NO: 243169 - DNA, 122 bp, Homo sapiens
gggggcactacctgagaggctttcccatgctcctctgactcgttgtcaggccgggatgctcggggcccagggaggagacgctgcctgtggtggaacaagaataaaacatgagtcgttcatgt

SEQ ID NO: 243170 - DNA, 122 bp, Homo sapiens
gctgggacgcacctgcctgttcagtcccgcaggcagaggggctgcgcctgggcctacgctcgcgatacccagaatccactcgcacctgcgaaggcgcccctgccctgtgtgaatccagcggg

SEQ ID NO: 243171 - DNA, 122 bp, Homo sapiens
ctcccgcgcctttgtgtggtggcgtagctgtcacagtggcgtctgccaggaggtggcaggcgacacctccaaaaccaccccagtgctgaagggcggggctgcgattttttcctggatttaaa

SEQ ID NO: 243172 - DNA, 122 bp, Homo sapiens
cctgccctggagggacgctgccaggaacacgacccgcccctcggaaactccctcgctccccgcggactccccggcccctcgcgagcccacccggcccttcattccgtctcccgaacctgctc

SEQ ID NO: 243173 - DNA, 122 bp, Homo sapiens
tttgcctagcacgccagtttctgtccagtttcaccccaaatccccacctccccccacccccgaacctcacggccaccctgggaaggaggcttgacttgtgacatccacccctcttcacggct

SEQ ID NO: 243174 - DNA, 122 bp, Homo sapiens
tgaactcagtaaactcaccctttatttgtcctgtggagagaagggctaagggagcccaggcggctcagcaggacacagggacgcttttagaacagctcatttgcatgaggcagagcacgtcc

SEQ ID NO: 243175 - DNA, 122 bp, Homo sapiens
ccctcgcgcacggccctggagcaccctcctgtttcagaggatttttctttatctttcttgcgatcttaagtatttcatttcacaaaccaagcaagtctccaccgggcatctgccggccgaat

SEQ ID NO: 243176 - DNA, 122 bp, Homo sapiens
tgagtgctgtgtgtgcctgtgagacttgtgtgtgagtgtgtgaatgtgtgtgaacacgtgcgaatgtgtctctgtgacaatgtgtgtgaacctctgtgaacatgtgtctgaatggggcatgt

SEQ ID NO: 243177 - DNA, 122 bp, Homo sapiens
cacctgccgctgtgaaaatgcagacccacggggcaggaattccgagtcccggctggagcgcgatctggaatctgactcgcttgaaacagcaccgcggtggattcggagccgggtgagcaggg

SEQ ID NO: 243178 - DNA, 122 bp, Homo sapiens
cggtgggggtgagtaagtgggaaaaggactgaagacactcccacaattaaaggacaggagcgtaaagaaaaacagtggcagaaaccaagaagaaaccagaaatggaggaactaagctcccca

SEQ ID NO: 243179 - DNA, 122 bp, Homo sapiens
tgattatagacatgaaaacactcttctgtcagcgttcatagtgagctgggaggttgcctacgcattaagacctagcttcataaaatgactcaaagccctaggcagtttctgggaaggactgg

SEQ ID NO: 243180 - DNA, 122 bp, Homo sapiens
tactatgtgggctggtacgagtgtggggtctccatccctggaaagtggtaatcacaggaccgtcatgctgcaagcttgccctgcccagccccaccaactaagtcgcactaggggctgtgagc

SEQ ID NO: 243181 - DNA, 122 bp, Homo sapiens
ctcggattgctaggagccagcgcaggcagatgccggttccggggcttggagaacgtggctcggtggcacagagccgccgggcgaggcgggggcagggaggcgggcgacgggattggctggag

SEQ ID NO: 243182 - DNA, 122 bp, Homo sapiens
cctgcgcaagttacgcgaaagctaacagaatctgcggtgctctgctggcgactggcaggacgcggtgcagagagcggacttccgcgacgcgggtaagccgggcgaaggccggaagcggaggg

SEQ ID NO: 243183 - DNA, 122 bp, Homo sapiens
cttcctccatcaggcgagcctaagccagaaacagaaagggaaaagggcctggccctctcccgcagctcagaggtccctcagatctggccagagaagaccccggccactgcagcccgacaaat

SEQ ID NO: 243184 - DNA, 122 bp, Homo sapiens
gctgctggtcctccgcgtgcctgcccggccctggacgccacccgagcttcggggaaaccgcgccaggtgtgaaacaagttagagcaagtccctgcctcgcgggccgcctccggctccttagg

SEQ ID NO: 243185 - DNA, 122 bp, Homo sapiens
atggcacagctgccccctccaatggagatcctcttggagccccccaggccatacagactgcggctgccaaagccagctcctccacatgcgccacccaggccaccactgcccctggagcggga

SEQ ID NO: 243186 - DNA, 122 bp, Homo sapiens
ctcagtgctctattaatcctttttgtttctccctgaagggccatgccttacctgttgattcgaaaattcaaagagatattaaaaataatatatcaaggaatatattttactttctctttctt

SEQ ID NO: 243187 - DNA, 122 bp, Homo sapiens
actttcagtgtcatgactaatagcggctcttgccaaggctgactcttaaagcctctcctccgccttgtgatctgcagcgcacgtcttattatggggtgcattatgcagacgccagccctgtg

SEQ ID NO: 243188 - DNA, 122 bp, Homo sapiens
ctcttttgtctcaaagttttgtgtgagttcccatctcgtaatcagtggggttgagggtgacggggagcagaagtaactaatatcattgtgttttcttagttacattttggacaaatttttac

SEQ ID NO: 243189 - DNA, 122 bp, Homo sapiens
gggaatgaagaatggagagcagcgcttactccaagaatctgagagacgggggagtcaagccgctgctaggccttctctatgactgcgggggttcgaatacagtgagacccgacaaaagcgac

SEQ ID NO: 243190 - DNA, 122 bp, Homo sapiens
cattccgcaaacataggcctgagaagacaaatatttccatgtattccaattacaagcgttcggccccttccttagagagtccatatctcagcactcatgctggggtgaccccttcacaagag

SEQ ID NO: 243191 - DNA, 122 bp, Homo sapiens
cttccttctccttgtcctaaaatagccttatcttttggtctagcaaagggcttaatcatccgttttacggcacagttttaaacatggccgccccaggtaggagtcaagtgggcgtcgccatc

SEQ ID NO: 243192 - DNA, 122 bp, Homo sapiens
agattctgggggggctggggaggtggaaaaccgggagacctgctgagtgaatgggaaaggcgccgcccagacaccagggagagaaagaggaaccgcatccatgcggtcccccgcccccacgc

SEQ ID NO: 243193 - DNA, 122 bp, Homo sapiens
cctgggacgcggggtgtacggagggcgggggcgagctgaaacagccaatccggcaagccgcgcgtgaggccagacgccagtcccacggggattgaattatgtacacacacaacccccaggcc

SEQ ID NO: 243194 - DNA, 122 bp, Homo sapiens
agtaggtgctcaaaaaatacatttgttggcaaactgtaccttgagggagagagaaggctacggctcctactgccaatgggcaggccgagcactcccacccagctatcgctgcgctgaccctg

SEQ ID NO: 243195 - DNA, 122 bp, Homo sapiens
cactgtcccctcccctcggcatcccgtcgctttgcccacctaccctcagccggaagagctcgtgtggtacacgttaggatcgtgcatctcacccctcgccaagtgctctcagaatataaaat

SEQ ID NO: 243196 - DNA, 122 bp, Homo sapiens
cccacctcggcctcccaaagtactgggattacagacctgagccaccgcgcccggcctgcacgtgagcttttcatctggaaacttgtcccctcatggtcagtcctcacaccaccccacttaca

SEQ ID NO: 243197 - DNA, 122 bp, Homo sapiens
tgacccggcgccgcaggggtcccccagattcaattctagctctcgggctggtggggcggtcgcgggcgcctctccaagggagctgattcattgtctggtaggccctctgcagggcccagctg

SEQ ID NO: 243198 - DNA, 122 bp, Homo sapiens
acggctaactctaaagcccggagggaatgactatgcttgtttgaccacagtgacaagccccggaagacgctcaccatgactggcgaggaggccaccttcacagtggctgggagggtggtagt

SEQ ID NO: 243199 - DNA, 122 bp, Homo sapiens
cgggttttccgggccggggcagaacggcagatccggagactgcccggtgcggtgcctgggcgcggagtccgccgtgcaccgccctctgcgcccgatgccagtgcgggcggcggcccgaaacc

SEQ ID NO: 243200 - DNA, 122 bp, Homo sapiens
tacgccgctgattggctgttaaagtggcctaatgattggatggatgcaaagaggaatggacgaatcagagtttagcactaagcggcccttctgattggataaaatggagctatgtttggatc

SEQ ID NO: 243201 - DNA, 122 bp, Homo sapiens
ctcctccactctacacagatttccccagaaggaaccagaaggcacatgtaaattagaacccgaggaaaagtatggcaggctagcactgaggtcttaggtcaccagtaacgaattacaaatgt

SEQ ID NO: 243202 - DNA, 122 bp, Homo sapiens
ggggaactacagcagcggcgaagtcactgccgctcggtgcgcactccagcgagaagcgggcgcgtcctgtgacgtcacaggcaaccacccctagcagggcaccaatcccggagggcgggccc

SEQ ID NO: 243203 - DNA, 122 bp, Homo sapiens
catccaattcacttgaggctcggaggctcaggcctgccttcctggcggctactggggtggcgtttcccagcacccccgggaagctaccaaggtccagggctctcctgggcttctgcgacgcc

SEQ ID NO: 243204 - DNA, 122 bp, Homo sapiens
acggttgagggaccaacttacagaatcacctgggaagggtggctgactttttaaaaatgccgatacctgaaccccatccccaaattgggttgttaggtttggggtggaccccaaatagatca

SEQ ID NO: 243205 - DNA, 122 bp, Homo sapiens
agcaaagctttctcaatgcctcttaggttagacccgccgcagggatgaaggggttgctggcggattgcaggtgcctgcagcacagggcccagaactaagaaccgacaacacagattcttaag

SEQ ID NO: 243206 - DNA, 122 bp, Homo sapiens
aggacccccactcctcccacacgccgtgcactgcaaggaagcacgtggccggtggctgggcggcaccatggccccgcccaccaccggcgcctgcccatccgcccaccaatcaggagctccgc

SEQ ID NO: 243207 - DNA, 122 bp, Homo sapiens
tggccaacatggcgaaaccctgtctctaccaaaaatacaacagttagccgggcatggtggcgggtgcctgtactgattatcttctcatgtgtccatgttctctccaacttgtacgtaaatat

SEQ ID NO: 243208 - DNA, 122 bp, Homo sapiens
atataaattttcagaactgtgatcacagccctggctaaatagtgcccctggtcaaaccttcgtaggcaaaatgttttctccagctttctgctagttcttagaagccagtgtgaaggaaaagg

SEQ ID NO: 243209 - DNA, 122 bp, Homo sapiens
cgaggctcttgtcatttccgcttatttcctccacgggtgccgatttcatgtgtgtgttcccgagtgcctgagccggctcccgaaatgagtactcgtggtttccgcgtgggaaccaacctcga

SEQ ID NO: 243210 - DNA, 122 bp, Homo sapiens
gaggcccatcctaactcccactcctctctgctagtggagaatagctgacagagggctgaacggggcttggatcgccttcaccttctctccatcttcaggagcacagaatctccctaaatgca

SEQ ID NO: 243211 - DNA, 122 bp, Homo sapiens
atccgcgcccgcgtgagggattcgatccgagacataatcggacggggggaccagggaggacgcggcgcggaccccggcgtcctgtattgttgggggaaggcggggggaggggttcggcccgc

SEQ ID NO: 243212 - DNA, 122 bp, Homo sapiens
gctggagctggtggaggaagatgccaaggagataagaggcttcccctcccctccgctccccgcctcccacactgtctggtgacactggaggcagccaaggtggccactgatccccactgtga

SEQ ID NO: 243213 - DNA, 122 bp, Homo sapiens
gcagtgatgacgtccatggcgttcacagcactcgggaagtagcagccactgggctgtgagcgccacggtcctcagcccaccgcacccctgcagcccgtttcacaggtgaggaccctgaggct

SEQ ID NO: 243214 - DNA, 122 bp, Homo sapiens
ggctgggaggataaaagcgaggatgggctctagtcacttctcttttttctcctttccggccgctcttcttcccgctttagaaggggtgaagcctctttcttccacctccgggagccatgttg

SEQ ID NO: 243215 - DNA, 122 bp, Homo sapiens
cgtggccagctcttgcacactgccttagagctggtgtggcttgttgaaccccgttgcagacgcacacgcacgtgggtccccatggctcctcgggacatggaggctgcccacgctcagggaag

SEQ ID NO: 243216 - DNA, 122 bp, Homo sapiens
tggaggcggcagcgcgcggcacggggaggtcaaggcaccgacgaaagcgcacagcgagcgcgaaggccccgcggccccatctgcgacgtcccctcacggccgcctgaacctcggggctcgcg

SEQ ID NO: 243217 - DNA, 122 bp, Homo sapiens
gcattttttcctgaaatcaaatgtagctgtggtaggaaagacctggttctagtaccagtacgctatttagactgcaggcatagttcagtgtttaagagggagcacaaggtgggcttgtggcc

SEQ ID NO: 243218 - DNA, 122 bp, Homo sapiens
cgatctgcaattgtaccagcagccaaatggtcaagcgtacgctaacgtatactacacacacgaccgactcccaccaggagccttccttgagttgagccacgttagctgttgtttctggtact

SEQ ID NO: 243219 - DNA, 122 bp, Homo sapiens
aaaatgtggatctaaacatagaaggagggacacaaactttctttagtttgctcacttatgcgcttatttagaaagggctctaactaattccaaggcttgattacatgattgtttcacaaaga

SEQ ID NO: 243220 - DNA, 122 bp, Homo sapiens
ttgtatctgccacgcagtgggtgcctagtacacttaaggtgaagggtggaaggctagagccgttgctgaggtccaaaatgccacccaaattgagggcatcctttggatggggagctgcaaaa

SEQ ID NO: 243221 - DNA, 122 bp, Homo sapiens
gcgtccccacctcgcagactgcacgctccaaccgccccctccacctcctctttccaggcccggcagcttctggagaaggaattcagcaaccttatctccttaggcacagacaggcggctgga

SEQ ID NO: 243222 - DNA, 122 bp, Homo sapiens
gcgcggtgacgtcagggcgttggggcagctcctgtgacagacggagctggagcggcggggcggcggcggagtccggcggccgggagagcgagtgagcgagcggaggagcagcgacacgggag

SEQ ID NO: 243223 - DNA, 122 bp, Homo sapiens
ttagggtggaaactccctggagcccaaggctgtggccacactgtaactcagagccatctacgtccttcctcctcctctcacccacccctctccttccctggctccagtggatttcaggctca

SEQ ID NO: 243224 - DNA, 122 bp, Homo sapiens
catggagagtcactgaggagccctgaaggcacaggcaagagatgagggcagaggaaagatcgggggtaacctccagagaagggcagactgaactcggaaaatgcctgaatatagggagggac

SEQ ID NO: 243225 - DNA, 122 bp, Homo sapiens
cagcttcatgacctgcgcctcctccaggaaggccttcggggacatggtgcccggcttcagcgtcttcaccgccaccttagtgctgccgttccacgtgcctgctcggaggctgtcttgtcagg

SEQ ID NO: 243226 - DNA, 122 bp, Homo sapiens
aagtgccattttcatcaggtattgagggcgcatagtatccacatgatttatgactgtcagcgttaacctcggtcccctggctgaagcagtgattatcagctttctccactgtgaagttattc

SEQ ID NO: 243227 - DNA, 122 bp, Homo sapiens
cgcagcagccagcagccccaaggagcgcacctggctgcgcgcgctcgggtgtttacgcggcgtcttggcaacggtggagctgcgcgccctccgctcgaccaaaagtgacccacgcagaacgt

SEQ ID NO: 243228 - DNA, 122 bp, Homo sapiens
gggctagattaataaattaacaaagccttcttcggagcaactgtgctgaaattccgtacgcgtgacgttcccaccctctgccactcggtgacgtcacgatcaatcccaccactaagttccca

SEQ ID NO: 243229 - DNA, 122 bp, Homo sapiens
cctctattctccttgctcctttgctgaccctgttcctttgtttctggctgcgtgtcctggcggtggctgtgtgggcagccctcggagtacagcggccacctcaactccagctcccgcgcctc

SEQ ID NO: 243230 - DNA, 122 bp, Homo sapiens
tgggcggctgtggccacgcctccacgccggttgtcagaaaccgttccgcccaccggcctccgctcttatccaatcaacagcctcacaccgacaggtggggcaggaccaatcgtgaatgacca

SEQ ID NO: 243231 - DNA, 122 bp, Homo sapiens
atatagtaaaggtagggcgggcgcagccaattcctcggctcctggcgggagtgccggtggcgccccgcagtccgcttgtccgtccttccctctctgactctcctaccccgggcctgtctctg

SEQ ID NO: 243232 - DNA, 122 bp, Homo sapiens
ggccgagcccagcccgacgcgtgtggcggcatgcagccgcgaactaatccccgcgggccgcggcagacggctcccggccccagccgcgccgctctcagagggcaaccccctccctgccccgc

SEQ ID NO: 243233 - DNA, 122 bp, Homo sapiens
cgcggccgtcccgctgcgggccgtccacgccgccaccgccgccttctcccggagcggccgcgtcgccgacgcccgccatgttccgagcacaacaaactgtccccgccgcctccctccagcct

SEQ ID NO: 243234 - DNA, 122 bp, Homo sapiens
actctcctcctggggaaaaggcttttcacggagcaggctcggagcctacggggctggcctcggactggatgggggtaaggacgggtggcggcgctcgcgccgagcgaacggagggctcaggc

SEQ ID NO: 243235 - DNA, 122 bp, Homo sapiens
gaggacctgaagttctaggacttgagggcccccactctacgacccgcccccgcgcggggccgccctgactcctcgcaagtttccttcgcgtgcgaacgcctcgcttgcccctgtgccagcgg

SEQ ID NO: 243236 - DNA, 122 bp, Homo sapiens
actgggatgggagcggagggagccccggactttcttagctgccctcgagtgaggcgggtgcgggtcgtcacggaccaccgggcggaactctgggttgggagagcaggaatcgagggaggttc

SEQ ID NO: 243237 - DNA, 122 bp, Homo sapiens
ggccagaatcccacgagactggtcagtgcagttgtccccagagcccagcggggtggagggcggggctgccctttggcctgcactttttggttaagcctgtgctttcaacacccgcctcctgc

SEQ ID NO: 243238 - DNA, 122 bp, Homo sapiens
gccgcggggccatcgcccgcctcgtccgcccgcccgaccacttgttaaggctccgcccggcgctccccgcgcccacgccccatcccgcgcgctcctccacgccgcgcccccggacgcccacg

SEQ ID NO: 243239 - DNA, 122 bp, Homo sapiens
ccctggccgagacactgaggcagggtagagagcgcttgcgggcgccgggcggagctgctgcggatcaggacccgagccgattcccgatcccgacccagatcctaacccgcgcccccgccccg

SEQ ID NO: 243240 - DNA, 122 bp, Homo sapiens
ggaggtgttcccgggtcgcaatcgcttctactgcggcggccgcctcatgctggccggccacggcggcgtcttcgcgctcacgctgctgctcatcctcaccaccaccggcctcttcttcgtct

SEQ ID NO: 243241 - DNA, 122 bp, Homo sapiens
ggcattttgttcatgctctcagatgccgcctaccgccctagagcaggaaatagcggtcagcgccagctgtgaggagcacagcattgcggccaacacaggaggcactgaccacggggcaggcg

SEQ ID NO: 243242 - DNA, 122 bp, Homo sapiens
caggggcgccgccccgcctcgggagaggcgggccgggcggggctgggagtatttgaggctcggagccaccgccccgccggcgcccgcagcacctcctcgccagcagccgtccggagccagcc

SEQ ID NO: 243243 - DNA, 122 bp, Homo sapiens
ctccatccagcagaggttcccagggctcaggacatcccaaccatgccccttggaaggtcccggactgtacttccccacagcaaactgctgacatcaggggtgtcaccccatctgttggtaag

SEQ ID NO: 243244 - DNA, 122 bp, Homo sapiens
agtgcacattatcttagcaagctaatgcagaaacaggaaaccaaacactgaagtttttatcgtttcttaaaggccaagtgtgaactattgtgacagcttagtctgagagttccagatacata

SEQ ID NO: 243245 - DNA, 122 bp, Homo sapiens
ccatactactaacctgccaaaacaatgtttcctaagcgaaattttacataaattgcttctcgtgcaattttacttctcatgcacacacagactaaagagccctctaatttcctatactaatg

SEQ ID NO: 243246 - DNA, 122 bp, Homo sapiens
atctagagcgaggaccaggctggggcgagggcgccgtgttctcaactgcagggcctgaagcggggcgggagggtaagggcgcacactacccaggcagggacagggaccccgcagagcctgcc

SEQ ID NO: 243247 - DNA, 122 bp, Homo sapiens
tttgccacgaggcttgtcttggctgatatgtgagttcccagaggtcacaggcagaagcgccgtggaaatggaatatcggcacgggaacttaggtttctcctccgcctgtggcagcgctggag

SEQ ID NO: 243248 - DNA, 122 bp, Homo sapiens
ggtcccgagtgtgagttcacctgggcgtggtgcggatggatgtagagagccgagggatggcgcaagtctccacccaacatggatgagaaaagtggggcagaacgttaccttgtggtggtggt

SEQ ID NO: 243249 - DNA, 122 bp, Homo sapiens
caaggtcacgcaggatgccactctcaagccacacggcgtccagtctccgttccacccccacgggaggaacacccatcttcaagtcacagaacacggtcttcagcgaacacccttcctgcatg

SEQ ID NO: 243250 - DNA, 122 bp, Homo sapiens
cggcccacacggcccccgcagggcacagccttacgcagcccttgcgttgcactgattccccggccgcgcccactgcatagtggctctcctcgtcgtccgcatcctccccagaagagtctctg

SEQ ID NO: 243251 - DNA, 122 bp, Homo sapiens
gaaggcagacggtgtatcagaccttgcgtgctgggactcactttcagcctgcaggtccagcgccggggacaggccccaccaggacacggagccgaagccgctgccggagccggcaggtgtgg

SEQ ID NO: 243252 - DNA, 122 bp, Homo sapiens
cacacccagagatgggaagccaccacccacagccacacagctgcaagaggcagagccagccgacattcaaacccagaggcagcttcgacctgcctcgaccaggacaccatcaaccttcagct

SEQ ID NO: 243253 - DNA, 122 bp, Homo sapiens
ccagagccgggacaccagcagagccgggacaccaccagagccgcaacaccaccagagctgcgacaccagcagagccgcgacaccagcagagccgggacaccaccagagccgtgacaccagca

SEQ ID NO: 243254 - DNA, 122 bp, Homo sapiens
attgtcgtagcccaggaatactggtctaaactggtggcatgaaagtagcagggggaaatgcgctttgaggtggaagagctgtgtataaaggtttggcactaaaagggttcgtgccgaacact

SEQ ID NO: 243255 - DNA, 122 bp, Homo sapiens
ggcacctgcaccagaagcacatgctgtacatcccagctctctatggtgctgatgactcagcggtcctgttttcctgcttgattggacaaagcggccactgctgcattacattttctccctgc

SEQ ID NO: 243256 - DNA, 122 bp, Homo sapiens
gtgacctccccgtgattccgagggctgccacatcaccaccaaagtccagctctcctgcttcggcacaaggctgtgacttgtcattgatgttttgggtcacggaccttttccactcacggaat

SEQ ID NO: 243257 - DNA, 122 bp, Homo sapiens
cgtgatctgcccgcctcagcctcccaaagtgctggtattacaggtgtgagccaccgcgcccggccaacatccattattacgtttcagattcatgtccacttggagaaaaaggataatggtta

SEQ ID NO: 243258 - DNA, 122 bp, Homo sapiens
cacctgggcacagcgctggtgtgagaaggaggccatcaggacaggtcaagaacccaggcccgccctgctccgaaattcttcagacctgatgaagaggtgtcccagaagcgggtggtgctcca

SEQ ID NO: 243259 - DNA, 122 bp, Homo sapiens
cgtgtgtaaagtttgttccacgcagaaacaaaggacgcgtgggggccgcttctggggcctcggtcctttgttggaaccccgcaccgcagcccggcccgcagcctcgccccgcaaggggaagc

SEQ ID NO: 243260 - DNA, 122 bp, Homo sapiens
cgctgctgcatgggccacgtgagctcaggctgtgggagcggatggagctgctacagtcagcgcttggggctggcctcagcttgtagacccgagccctgcagaacaaccccccgtggcgcagg

SEQ ID NO: 243261 - DNA, 122 bp, Homo sapiens
caggcagggaggaaaggccacccgggacggcggcggacttggaacgatattatttatttgcgttgggcgtttttttaagggatgggaggagtgagtgtgggagggggaagctgtgagtttct

SEQ ID NO: 243262 - DNA, 122 bp, Homo sapiens
gggaatccagtagataacaacagaaaggactccgacccaggtacctgagacatctgagaccgccaaaattaacacaacaccctacgcgacagagaaaactctgggcggggagagagaaagag

SEQ ID NO: 243263 - DNA, 122 bp, Homo sapiens
catttcctcttccctgttttctttcgtcgtcgtgggtgggaattgtcgcctaagtggttccgggttggtggatgaccttgagccctcaggaacgagatggcggttctctggaggctgagtgc

SEQ ID NO: 243264 - DNA, 122 bp, Homo sapiens
cagcttaacatacccactggtgcctttttaattacagtactttccccagaactttttaatcgtattacttttatatctaataaggagactagttaaaacataagccacacataactattaca

SEQ ID NO: 243265 - DNA, 122 bp, Homo sapiens
cggctgcagccgggcctgtttaccgaggctgctggcattgcatgccaggtgcagagcccacgggcgactcagaaggccacgaacgctggggccaaggcggcctctgctctccctgcaacccg

SEQ ID NO: 243266 - DNA, 122 bp, Homo sapiens
agggcagagagcctggagccatctcagatgacttctgctcagggcgtgtgtggagccacccggtctctcaggtgtcttggctgtctcccagtctatttgcccacgtctttgggtgtctgggc

SEQ ID NO: 243267 - DNA, 122 bp, Homo sapiens
ggagcaggcatagagacataaactgagtgaaaatgggtggaggaagaacttctatacccacgaacaacatgtgaagagagagaaccaaacataaagtaaggagggtgagttttattgtatgt

SEQ ID NO: 243268 - DNA, 122 bp, Homo sapiens
ccatctatccaggggaacattatttagccacgagaaggaatgacgtgctatcacctgctacggcggaggctgaccttgaaaatgggacgctaggtgaaaggaaacagacacgaaggccacgt

SEQ ID NO: 243269 - DNA, 122 bp, Homo sapiens
gggcgtcggaggaaggggcgcggaggtcagtgccagccgcagggtctggccagcccacctcgcgtgctcgctctgcacccctagagggagagctgggcagctcctgcaggcgcagatcccgc

SEQ ID NO: 243270 - DNA, 122 bp, Homo sapiens
cctatgtttctgggcttctatgctctctctggaacacaattcctcctttctattcaagtccgagaataataactactcactcttatttatttatttagagacagaatctcaaccaggcagga

SEQ ID NO: 243271 - DNA, 122 bp, Homo sapiens
gctatgctgcccaggctggtcttggactcctggcctcaagcaatcctcccaccttggcaccgaagtgcaggtacagatgtgagccaccataccaggcctgaggatcttttctctgagcttta

SEQ ID NO: 243272 - DNA, 122 bp, Homo sapiens
ctggcaatgcggaagcgctcgtggccgcggtggaagatggactcgagcagcttcagctctcgcctcaggcagggccccggccccgggcccccccctgggccgcccccggcccccggcgccgc

SEQ ID NO: 243273 - DNA, 122 bp, Homo sapiens
gctggtgaagaaggacaaggtggtggtcttcctcaaggggacgccggagcagccccagtgcggcttcagcaacgccgtggtgcagatcctgcggctgcacggcgtccgcgattacgcggcct

SEQ ID NO: 243274 - DNA, 122 bp, Homo sapiens
gggcgaaggggaaggcggacagtagaggaagtgagctggcctgggagtgtggaaacttggcgtgttctcccagcttagtcttactaacgtgcttgggcaagccccttctgcactcccggcct

SEQ ID NO: 243275 - DNA, 122 bp, Homo sapiens
aaaactacaagcctttaccttttcaaacacactgacgcgggccagccccagccctacgcccgcaggggcacgcagaaaagacttagttaccacggccaagtacgaagccttcgagatagcgt

SEQ ID NO: 243276 - DNA, 122 bp, Homo sapiens
agagagagaaaggagagagagaacgcagagggagggaggcagggagggagaccaaacccccgctttactgcgttgaaagcttctgaatttcaagcagaaagtagaaggagctccaaaggcag

SEQ ID NO: 243277 - DNA, 122 bp, Homo sapiens
ggcttcagaggtggagggtgtgacccgcaggtccgggatcccggggtctgtgcagtcacacggcccttcccttcgctcaggaaagcccggggctgagtttcatgctcaaccgctgccaactt

SEQ ID NO: 243278 - DNA, 122 bp, Homo sapiens
aagtacgtggacctgaccgccctgggctgaggactttcctcaccggaagcgctccagggccgtttacagccaaaagctctgagccctccttggggagggccatggtctgtcccaccaagatt

SEQ ID NO: 243279 - DNA, 122 bp, Homo sapiens
ccagcaggcagcggtcgaggctgagggcggccagcaggaagaggccggaggagtaggacacgccccataggaagtagtagaagcggcaggcagctgtccccagcggccagtgtcccccatgc

SEQ ID NO: 243280 - DNA, 122 bp, Homo sapiens
ggtgatggcctagccatcttgtctggtttttaaaatgtgcttttctgcctcgtcctgtctcgtcttcctctaccccactcccgggcgtggaattccaacttggtagtgctggagccctgggg

SEQ ID NO: 243281 - DNA, 122 bp, Homo sapiens
aacaacaacgaccgatcgctcaatgtctttgtgaaggaggacgacaagctcatctttcaccggcatccggtggcccagagcacggacgctatcaggggcaaagtcgggtatacccgtgggct

SEQ ID NO: 243282 - DNA, 122 bp, Homo sapiens
ggtaggggagctagagcttttcctttgaagtggccccgccatggccccctcccacccagccgcccttccctggctggaaatgtcagcagggtttgcataattgagacaattggacataatgg

SEQ ID NO: 243283 - DNA, 122 bp, Homo sapiens
ttcctcaacagtactttgcactatttttctcaacttctccttccttacctgaagtcataccgttaagttgatgaatacaagcacttaaagaaaacaaatctagttcacatgaagagctcaat

SEQ ID NO: 243284 - DNA, 122 bp, Homo sapiens
ttcttctcgtcctcctcttcagttctcttccgttctcagacattccacttgtaaccgaaccgtgctgattttcagagtcacctgggggagttcttaaattacttacattcttgcccccaacc

SEQ ID NO: 243285 - DNA, 122 bp, Homo sapiens
taccgccccacccctcattttgcccttgccctacttcacccctgccacatgtttagtacccgcctggtcccccatcgcccctcgcgggccccctagatctctgcctcagcccccctgttttt

SEQ ID NO: 243286 - DNA, 122 bp, Homo sapiens
gccacaatcaaatgctgccagctccgcccggccagccggttatagactcaatagtggagtcgccgagggaggctcctacgcgctgattggctgcaagtcttgccttccaggcaaaacacgct

SEQ ID NO: 243287 - DNA, 122 bp, Homo sapiens
tctgtgttaatcaggtagtaggtgttcagcaaatattcagtgaatcgatttcaaggtcaccgctcttctcgtgctccctcaggggcacgtggggcctgagtgccagggttatgaagggcgtt

SEQ ID NO: 243288 - DNA, 122 bp, Homo sapiens
cggggccaagaaacccgaggggccactaagctgcagagaagggttcttcagggaaggggccgctctaactctctccagccccagccgcactttcccctggcgtctcacctccagaaggacag

SEQ ID NO: 243289 - DNA, 122 bp, Homo sapiens
ggtaaatatgtcttcttagatattctctcatcagaactacagataggataatcaactcatcgagtttgccagggctttgctgggtgtagcactgaaagtctcacatgccaggaaaacctcat

SEQ ID NO: 243290 - DNA, 122 bp, Homo sapiens
gttgcagcagcattctcatcgggggtgcgcacaccatcgttactgtcgggcagtaactgccgcttgccttgccgcagtaggagggaaatctcaccttccttccacatactgtcttgagcctt

SEQ ID NO: 243291 - DNA, 122 bp, Homo sapiens
ccaaagctccctctacaccaagctgctccctgtacggcaacagaactcctggaacttgtccgcagagaatgagcagggcccttgcttttttatggtcttggccaggtttagcctgccttgta

SEQ ID NO: 243292 - DNA, 122 bp, Homo sapiens
gcgcgtggagaggaaggcgccgcgcgacctctcctcacagacatcagctcgggtcaaccgcgggcctcgagcccgagtggctgagggctgttaccttcaaacctttgaatcccacgttttcc

SEQ ID NO: 243293 - DNA, 122 bp, Homo sapiens
cggctgggagtaaacgtcttccatactgggtcaggtcaccaccctaaagccctacaaagtcgttgacccccataattcaggaacattgcttgtcatcccgggacccaccgcaaggccgagcg

SEQ ID NO: 243294 - DNA, 122 bp, Homo sapiens
cgcgcaccctccctacccagatccaggatggctagaattaacgggttctttctgagacctcggctcaggcgccgaaaccggatagatcgcgaattcgctggacccggagacccgacccgcct

SEQ ID NO: 243295 - DNA, 122 bp, Homo sapiens
ggcgcttgtggaggggggcgcgaatgtgaacgtgtgaaagcgagaggcgtgccaggagagcgcgggaaagcttactggtgaggcaagtgtgcgtctatttccatggcgccctggctcgcggc

SEQ ID NO: 243296 - DNA, 122 bp, Homo sapiens
ggggcacaaggttcttgctgcctgggcctgttctgtagtgtggggctgtccctgactggccggctttcagaagcatgcagcattgtcattgacttattggggtttcatgccaccacggccaa

SEQ ID NO: 243297 - DNA, 122 bp, Homo sapiens
tgacctcatgatacgcccgcctcggcctcccaaagtgctgggattacaggtgtgagccaccgcgcccagcaattttttgtattattagtaggcatggggtttcgacatgttggccagactgg

SEQ ID NO: 243298 - DNA, 122 bp, Homo sapiens
cgggggaagggctgcatctgcctcaagcgaagggtacattttcctaatttgctcaagatgcgtggtgaaggccacgcaccagggatcttcacacatactgactgtgagcagagcatcttggc

SEQ ID NO: 243299 - DNA, 122 bp, Homo sapiens
gactccagatgggcccagaaggggtgtagggtgttctggctcctgctcaggcacaggcgacggcgcagcaggtggggacagacagagtggccggggatccgtctgggagcggctgggctgcc

SEQ ID NO: 243300 - DNA, 122 bp, Homo sapiens
cgagatggaagttttcctgctgcaacgcttaagctccggtgaacacaaggctggactgctcgccctgcagggctggctgagctctcccccactgctcacgtcactagactccgcctcccgga

SEQ ID NO: 243301 - DNA, 122 bp, Homo sapiens
ggaggagagggaagaaggttgtagggagcccggaagaaactacagcacccccgtagccgccgggcgctgcctgaggggcaaccggagctcgtggagcccgctgggaactgtagtcttcgtga

SEQ ID NO: 243302 - DNA, 122 bp, Homo sapiens
caccccacctcccccaaaagtttgaaaaccacaggacccagcgtgggcagtacagggagacgtcgtctccaaaaagttacaaaattagccgggcgttgtggcacacgcctgtagtcccagct

SEQ ID NO: 243303 - DNA, 122 bp, Homo sapiens
ctgatcatgaaaaccttgggcctcctctgcggagccccccggcctgtgtgtggcaccccgcgctccgtgctcctgctgcccaccccgtgggtgaaaccggccccagaagggtgaggggccag

SEQ ID NO: 243304 - DNA, 122 bp, Homo sapiens
caagatcgggttggggaggcccgggatccagtccagggggtggcagggcttacgggtcagcgctctggggagccgaggtcacttacaggataccatcttcccgggcctccccctttcatccc

SEQ ID NO: 243305 - DNA, 122 bp, Homo sapiens
ggggagataggattaccaacatatggaggggagagaacaacatatgcaaagagggtaacccgcaggacagataaagataattcaattagttgtactagagagtaactaggggctagcagtgg

SEQ ID NO: 243306 - DNA, 122 bp, Homo sapiens
tataagaacagacaaaactatcgtgttcagagatccatgcttaggtagtgaaactcgagacgtttatgatatcctaaaagccaaaacggtggtttacttgctgagggaatgaagtagtgatt

SEQ ID NO: 243307 - DNA, 122 bp, Homo sapiens
gtgccctagcctctcccgccaggctggctgcccacaatggttggcccctttgcaggtagtcggctgaccttacactcccgcaattgacccctcactcccgcaatgccgatacccgtcacccc

SEQ ID NO: 243308 - DNA, 122 bp, Homo sapiens
taagacgtcctgcgctgtcacgttctaggttgcgagtaaaacccgggacccgcacagtagcggactgccagtacaggggcctccctgggtgtccctggaaaccgaggaagtaaccgccccct

SEQ ID NO: 243309 - DNA, 122 bp, Homo sapiens
aggctgctaggaaaactagagataatacatgtaaagcccctggaataatagtgactggcacgtagtaggtgttcaagtcacttttcttattataaagttgacatacaaacagctttcattgt

SEQ ID NO: 243310 - DNA, 122 bp, Homo sapiens
tctgcccagaaatatccatcctaccacctatctaaaaacctctctatttccagaattccccgttacaaagggaaggacacaggggccatgtttaactatcttcagttaatccctcagagtag

SEQ ID NO: 243311 - DNA, 122 bp, Homo sapiens
tcgatgtcacaaggcaagtcgcaggggcccggggtttgtacacaggcagtgtttctccagcgtctgtgcacgtactcaccatatccctccttctttccgtgtggatgcatgctgcttttgag

SEQ ID NO: 243312 - DNA, 122 bp, Homo sapiens
ggaagggtggccaggctgaggcactccggagagctgctcaaagcctttctgtttcccagccggaagtaaagcccagaggcagggaccgtctcctgggacaaccccagttctcccgactctgg

SEQ ID NO: 243313 - DNA, 122 bp, Homo sapiens
tagttaagcagtacagtatgctgccaggtggcgttggccgatcagttcaaaatcaaactccggcgtggcccttatttaaaacgaggattccgggcccggcgctgtggctcacgcctgtaatc

SEQ ID NO: 243314 - DNA, 122 bp, Homo sapiens
gctggcctggaactcctgatctcaggtgatccgccagccccaaagtgccgggattacaggcgtgagccaccgcgcccggcctttaatttctatttctaagcctgtggatattcacttttgca

SEQ ID NO: 243315 - DNA, 122 bp, Homo sapiens
acctcatgatccacctgccttggcctccgaaagcgctgggattacaggcatgagccactgcgcctggccgagagatcacttttttactgtgatttgtgatttactggagggaggagctgtgc

SEQ ID NO: 243316 - DNA, 122 bp, Homo sapiens
ccctcgcccttcactcttaagcctgtcctgaaaatcccccccaaatctccaaggctagggcgaccggcacgaagagcggcaagaagcccagcctgccgctgcttctcggaaacgggcccacc

SEQ ID NO: 243317 - DNA, 122 bp, Homo sapiens
gctggaccggcccgccgccgccctcgtgatttatctggatttttaattggaaaaaatttgcgaattaattgatttcaggaacttgccaattaacattgtaattgggtgcgtgataaattccc

SEQ ID NO: 243318 - DNA, 122 bp, Homo sapiens
cgcgcgccgcctgctgcaggagcctgcgcgggaccccagcatcctgaggctgcccagggtcgtcggggtccccggaccccgcgggcgccgccaccggggcgagcaacagcagcagcgcgagc

SEQ ID NO: 243319 - DNA, 122 bp, Homo sapiens
tgcaccctttaaccatgagcgtgcggacgtcttgctgccatgctgctgccttgacgacggcggatgtctgacatgctcagacgcaaaagagctgacttggcagctgcccagcagatttttat

SEQ ID NO: 243320 - DNA, 122 bp, Homo sapiens
agaagtcaaggtcatggacacttacatgttcacccttgttccctttggtgcccttctgtccggggtcccccacctcaccctgggaggagaaggcagacaagatattagagaaaggtgatggg

SEQ ID NO: 243321 - DNA, 122 bp, Homo sapiens
ggggtggcggccgggcagaggcgcacctcacatcccagatgatgggcagccaggcgtaggcgctcctcacctcccaagacggggtggcggccgggcagaggcgcacctcacatcccagacaa

SEQ ID NO: 243322 - DNA, 122 bp, Homo sapiens
tgtcccctggcctcgcgctctgtcctgtcctcgtcctgctccggctgctctgcctccccacggcactgcctccaggcctcacgggcctcccgcctgtcctggcgccgccgtcgcatggccag

SEQ ID NO: 243323 - DNA, 122 bp, Homo sapiens
cattggctgtgatggccgggctgggacggggaggacgggggaggggggaggtctcagcggcgatgccgtcaattggcgagatttcctgtccatttcggccagggaaaagggggcggacccct

SEQ ID NO: 243324 - DNA, 122 bp, Homo sapiens
cactgactctcccctaaccctaggcactggtttgctgtttcattttcaaatatttgcctccggaaacagtcaaatcactcaggctacagccgaaaaatgctcctttggtttatggcaacgcc

SEQ ID NO: 243325 - DNA, 122 bp, Homo sapiens
cctttttagcttctccagaatcatgcaccagacggtgaaggaactgtcaccaaaatgtaacgtgtccttcctcctgtctgaggatggcagcggcaagggggccgccctcatcacggccgtgg

SEQ ID NO: 243326 - DNA, 122 bp, Homo sapiens
caattcagctgcttgctgatgggttttttttctttttctgctgccagaatcattgctccccgcactcaatactttttctgacatctagtttttcattcacattcccatgactttgtttagtt

SEQ ID NO: 243327 - DNA, 122 bp, Homo sapiens
ttctctcacatgctctcacctagatcattgaagccaaattgcttttgttctcaactaatccgtataatagccataatcctactgcatgctgagagtgtatagatacaaatataagcataaaa

SEQ ID NO: 243328 - DNA, 122 bp, Homo sapiens
gcttgtgtgcagtggtgaggctttgtggaagagatggacgtggaaagatgtctaaaacagcgcggaggtcaggagaccttgtcgctgccttcacagagttgggcaacgctcccggtcctggt

SEQ ID NO: 243329 - DNA, 122 bp, Homo sapiens
gctcatggctccgaccccggcttctgtggttggagggcagcaccttacttagactcccagcgcacgtggagcagtctgccggtcggttgtctggctgcgcgcgccacccgggcctctccagt

SEQ ID NO: 243330 - DNA, 122 bp, Homo sapiens
ctccacccccaacccccttcccccacccgtcctccctcccagacctgttttcttcttcggcgtttcctggtgctgctggagggtgtgtttctgctcatgtttcagcggctttggctgggcct

SEQ ID NO: 243331 - DNA, 122 bp, Homo sapiens
ccctgagggggcgttgcccggagtgctcgggccgccaagggggcgggctggcggtttgtgcgcatgcgccgggcttctgcgcatgcccagagcgtcgcgcttgcgagtcttttttccagagc

SEQ ID NO: 243332 - DNA, 122 bp, Homo sapiens
aggaggaggaggaggagtaggaggaggaggaggagaaagaggaggaggaggaggtggcagcggccgccgcggtggctgccagtccagagcagaatgatgggcaactctcaccacaagcaacc

SEQ ID NO: 243333 - DNA, 122 bp, Homo sapiens
ctgtgcgtggcgagtgagcattgcttttcttggcgccccttggagctgtggctgccctcgcgtgcctggcctctcccggggctgagcccttcgggttgaggcctggagcccccgggcgcagc

SEQ ID NO: 243334 - DNA, 122 bp, Homo sapiens
cttcctgatccccaaaagtgggcgcctgaagacaaggatggagcatgaagagagatcctccggctggagaccctgcagagaggccccagatacctggcagaggagtacatgggccaacagag

SEQ ID NO: 243335 - DNA, 122 bp, Homo sapiens
agggcgttcacaattgttccccttccccactgcctggggttcccggttctcaccggccggcgtgggctccaaggagtcacagtcactcagccactttatgggggagcacatcggttgagccc

SEQ ID NO: 243336 - DNA, 122 bp, Homo sapiens
gggcggggaggaaaggaacgactgtgctacgttgccagaaggggcgggacctgcaacgtccgacagaacgaggggacgtaacggaggcaggttggagccgctgccgtcgccatgacccgtga

SEQ ID NO: 243337 - DNA, 122 bp, Homo sapiens
gcgctaggcccccaggcagggtccccggccccgcccctccccgcaccctccccagccgcgcgtccaccccgcagggcctggcccgggtcccgccgctctcatcgcccccgccgcgcggcagg

SEQ ID NO: 243338 - DNA, 122 bp, Homo sapiens
atcttagcaaagggttgggcgcacatatggtgtggactctgctgttcctggcaagattcgcgacctctcatggttccaggctttaaatactgggttcttaaacaaaacaaaacaaaacaaaa

SEQ ID NO: 243339 - DNA, 122 bp, Homo sapiens
cttgcggcagcagctggacgagctgagctgggccactgcgctggcggagggcgagcgggacgctctgcggcgcgagctgcgggagctgcagcgcctggatgcggaggagcgcgccgcccgcg

SEQ ID NO: 243340 - DNA, 122 bp, Homo sapiens
cgccctctggacaattcccgtaaacacgggcagagcggggcggggctgggcggggcttggcgggggcccagcatttccggggacgccgcgccggactgaggctgtgcgcccgagactccggg

SEQ ID NO: 243341 - DNA, 122 bp, Homo sapiens
taccccttcgtaggccttctcgtagccatcggggttgagggaggggaggacgtgaatccgcgtctcctccaccaggtggacgatgcgcgcattccgggccaagtactcctgacacacgaact

SEQ ID NO: 243342 - DNA, 122 bp, Homo sapiens
ggcccctggggacccgagccctgttccaggcggaactggattcgggcagttctcaggggtcgcgctcccagcgccctcgtgttccagagaggggagtctgagcctccagctccaagatttgg

SEQ ID NO: 243343 - DNA, 122 bp, Homo sapiens
tcggcgggacagataacatgaatgtgccctttaaacgtcccaagttgcagggacagcccccggcccagcctcgctcccggaagcgccttcgcccccgatgccctctgcagctgggaggaggg

SEQ ID NO: 243344 - DNA, 122 bp, Homo sapiens
gatgggccccgtgaggccgccctggagggtcgggagatgctttcgctgtgctgcgactaacgagaggctggaccctctggatgaggtcctcgtggtcagtccctgatctcaccacccggctg

SEQ ID NO: 243345 - DNA, 122 bp, Homo sapiens
agacacattttgaagtggcaagggcaactgtaagagacagaggcggctggcagcccacctcggggaggcgggacggcacaggctccgaacgctggcacagcaatttggcaaagcgtttcagt

SEQ ID NO: 243346 - DNA, 122 bp, Homo sapiens
caccctccacagaaagcagcggcccctgagagaaacgacgtgtcccgctcagacagaaaccgcaggctgccaggactccccggccacatgccgctctcctctgggccactcctggcctttcc

SEQ ID NO: 243347 - DNA, 122 bp, Homo sapiens
gcgcggtctcctgggtgacgggaacgcggtagcctgcttggtggagaccgggtgcgcctgcgtacttcatagttcgcgtagcggctcgagcgtggagatgaaggtaaataacttacaaattc

SEQ ID NO: 243348 - DNA, 122 bp, Homo sapiens
ttcagggtctgagcctggaggagtgagccaggcagtgagactggctcgggcgggccgggacgcgtcgttgcagcagcggctcccagctcccagccaggattccgcgcgccccttcacgcgcc

SEQ ID NO: 243349 - DNA, 122 bp, Homo sapiens
tcacccgctgcccgcgcggctcggagcgcgccctctgctggaccggccacggccggcgggcggctgcctccaggctccaccacaggagggggagcacgcgccctgctgaccgcacgcccacg

SEQ ID NO: 243350 - DNA, 122 bp, Homo sapiens
tggcgccttaacacaagctatctaccgatgcacaagggaaggctggcttgggtccagattcggcgggagagtggaaacgcgacgctggccgacttcagccacaaaggcaatttctgcccagg

SEQ ID NO: 243351 - DNA, 122 bp, Homo sapiens
tcctttgagagggagccgggactgctgaatttgcttttcttgcagccacaagggaacctccgtttctcatttgttcaaatccttgtttgtctttggggaagtgaaatgcttgcatttgattg

SEQ ID NO: 243352 - DNA, 122 bp, Homo sapiens
gatcactggtcaccactctgtcagcatcattagcagctagggaggagttcccgattcacacgctctgccctgatttttttctttctttcattttctttttttctcttggttggagggttctg

SEQ ID NO: 243353 - DNA, 122 bp, Homo sapiens
tagggcataatttttggtttaggccattctttataacttatgatatgattgggagaaaaacgttattgggtggctaaaataactttggtgttaatcttggcaattcctttcctttaattatt

SEQ ID NO: 243354 - DNA, 122 bp, Homo sapiens
ccttctgggccaacgccgccagtgactattcccagggatccctcagagctgaggacgccgcggccgcatccccatttgggaccttgccccgactccgacctccggatctccagctccaccaa

SEQ ID NO: 243355 - DNA, 122 bp, Homo sapiens
tataggatactttcagtgcaagggacagaacccttggtgctcttcaaggaaggtgctgttcgtggtttagaggccttgcttgcagacccccagcagaaaattgaaactgttatctctgatga

SEQ ID NO: 243356 - DNA, 122 bp, Homo sapiens
aagtatgggctttgagaccgccaaggtgagcagagccggcctcctcccgcttgctgcccccgcatccctgtgagtgccgtgcgtgagcgcacacagaagcatccctgcgtgtgcgtgtctat

SEQ ID NO: 243357 - DNA, 122 bp, Homo sapiens
tttgcgaggcagctgagggcggcaggaggcagagtgagcagggaggccatctgagccgtccgctgttgtgtgacagacgactcggctatgatcaggcatctgtgagatttgagacagcgctg

SEQ ID NO: 243358 - DNA, 122 bp, Homo sapiens
cactgcctgtcttagatatcttctccctccaccttgaacagtacctggccgagggttaatcgatgcacagtgggtttatattgtgtcaacttcgcgaagctgaaaagacttttccttgcacc

SEQ ID NO: 243359 - DNA, 122 bp, Homo sapiens
acctgttcccttgtttagaagccagtctcgcctgcagggagtcctggatgtgccacctttcggggccaggccacaatgtgcaaggtgcaggcccagctccagggtcagccagatgaggcttg

SEQ ID NO: 243360 - DNA, 122 bp, Homo sapiens
aagaggctggggagaagcgggaatctctcaaaatgatttcatttccacctaacagcgctgcgcatcgtgccttcccatttatcggagttcaccgtattaatttaaactttgtgctgcttgca

SEQ ID NO: 243361 - DNA, 122 bp, Homo sapiens
gatcctgggaggggagtggggatcccccgaagtctcgcagcagtagtgtggtgcttaggccgtcgccccggccgccactgcgcctccccacccgcaggcctccgcagcgccacgggcggccg

SEQ ID NO: 243362 - DNA, 122 bp, Homo sapiens
tatcgcccgagagcacagggggagggaaaatgatcgggatataaatccaggcattcgagccgggaggggcaacctcgtctgggtccctcccattgtatgggagctctgttttcactctatta

SEQ ID NO: 243363 - DNA, 122 bp, Homo sapiens
cttttttaaaaataataacctggtttaataccgccagaagtacttatcatatgccttaaccgcagtgagaaatctgagccaaagccttggaatgtacaatgagcagtgaagttgtctccctc

SEQ ID NO: 243364 - DNA, 122 bp, Homo sapiens
aacttttttttcattttatttaatttgtgttctgctcaccttccccatggctggttgacacggatgatgcgagttcagtgtgatggggcctgcggctgcacagccagtctatatagcaggat

SEQ ID NO: 243365 - DNA, 122 bp, Homo sapiens
tcagcagaatttcattatttagctgcctaacagatcctaacaagagccaaatgaagcaggcggcgtccagccgcgctacagagggatcatcgcgctgttatgctctcatacatcactgtcaa

SEQ ID NO: 243366 - DNA, 122 bp, Homo sapiens
tgccctccgtacggcagaccaggtagaggcaggcagcaatcacgtgggccatcttccggccgcgggtcaggtgcctgctcacggccatcttgaagaagttgaaggcggtgtccaggcagtgc

SEQ ID NO: 243367 - DNA, 122 bp, Homo sapiens
gctgggacgtaagatactatgggaaatactggcttcaagaaacccaagaaaccctccccacggagcaccttggctgctggggctttgtccggccgcggtgggcgactagggacagctcgggt

SEQ ID NO: 243368 - DNA, 122 bp, Homo sapiens
attataaaagtctcagaacccaagcatttaggggtttttgtggaggctgcattacataagcgttattcattaaatcactggccatcagtgattagctcaatctccagcccctttgccctccc

SEQ ID NO: 243369 - DNA, 122 bp, Homo sapiens
gtacgccggggcaccgcggcggctgagggaagggggtgcttcgcctgtggtggttgccgccggggcgccactggcctagggctcttcattcattcaagccacgaataactggcgccgtcgtg

SEQ ID NO: 243370 - DNA, 122 bp, Homo sapiens
aacatacggaggagtcggcggcgcgtaaggacaggcaggcgtcggcaccgcggaattcagcgacgggctactcaggttgttcaagttattcaggctgttgagactggagcccgggacgcctg

SEQ ID NO: 243371 - DNA, 122 bp, Homo sapiens
agagtctttgtccatcaacacagcctggagatctacagaaagtaggcagcaaaggtcaaccggcctcactcaatcaacagacctctctgactacctttgcacagctactacctatcatgcac

SEQ ID NO: 243372 - DNA, 122 bp, Homo sapiens
tgcgcttgcggccctgcgccgcgatcttgtccaggttggtggggctgccgctggacgagtcggtctcctccagccacttgttgagcagcggcttgagcttgcacatgttcttgaagctcagc

SEQ ID NO: 243373 - DNA, 122 bp, Homo sapiens
tgggattacagacgtgagccaccgcgccaggcccccaatcacttttaatgtaggcaaattcgtaggagctctgaaatatacagtcaggtgttgcttcaccatggggttatgttgtgagaagt

SEQ ID NO: 243374 - DNA, 122 bp, Homo sapiens
tcgcgtccccggggggacgggcggcgggcgagtggggagccggggtctccggcgcctgggcgttcacggagcctgcgggcgctggtccgggcggccaggggtggggggcgcgggcggctggg

SEQ ID NO: 243375 - DNA, 122 bp, Homo sapiens
cccataatatcactgggcaaaaccactgcttactgcatcctttaaagcatgagtaaacatcgagaacatttctccttctaactcacttctgcttcaaaactggttctgtgagacatctgctg

SEQ ID NO: 243376 - DNA, 122 bp, Homo sapiens
cccgggctccaccttctgtaggggctccaccttctgtagaagctccgagtgccgctccaacgcgctcgcgaaaccgcctgcgcgcgtcttaggctccttggcattggaactaccactttcgg

SEQ ID NO: 243377 - DNA, 122 bp, Homo sapiens
ccagatttccctcggcctctagctcgcttgcgtcagaggggccccgaggggcggcccacccgctagccccgcccccaaccgctcaccgccccgcgagccccgccccctcggcctcctcctca

SEQ ID NO: 243378 - DNA, 122 bp, Homo sapiens
gcagaggggtgacagcatgtctcagaacacactgtgagcacagacctagaatcaccacgtcgttcagaatcgccacctcacagagaagcaaacccaaaggcagccagcgtaggagccttttc

SEQ ID NO: 243379 - DNA, 122 bp, Homo sapiens
acccaccccctgcacggcagtgatggggaacccgagacctgtccgtctctatcccctttccgctccactcctggcttcaacaggttctccctagaacccacacttgcgcgaagtttcaccca

SEQ ID NO: 243380 - DNA, 122 bp, Homo sapiens
cggctcggcttggggacaggggtcgggggcaggccggttaccgcagaggtggaggccgcgcggcacctggcctggagagctcaccacacagcgacacagacttcttctcagctgggtccacc

SEQ ID NO: 243381 - DNA, 122 bp, Homo sapiens
tcggttcctcggctcctcccagcctgggctcgaggggcggaaggagctgggttgagtgcacgatgctgagattgacccttttttaggtccccggtgttctgtgactgaaaatccggtcagct

SEQ ID NO: 243382 - DNA, 122 bp, Homo sapiens
atgggggagtaagggctttgaaaagctcctgtgcatactggggaatctagaaggccaccacgtactcagggctggacacatgcccatggaagacctgaggagaccccaagctttcacttctg

SEQ ID NO: 243383 - DNA, 122 bp, Homo sapiens
ttaaagccatgggcacgttgtcatgagaggctggggcatagctgtccacaggcccatctgcggacattggaggcttccctacaccacaggagcccaagagataaagcagcacaggagcacaa

SEQ ID NO: 243384 - DNA, 122 bp, Homo sapiens
acccatctgcacctccgggcgcggggcggggcccggggagtgacgggggcagtcgagatacggaaacgctggccctccaagacaggccagagcggccctatctggcctgcgtggcgcagtac

SEQ ID NO: 243385 - DNA, 122 bp, Homo sapiens
aaagcgccatacatgtgttgacttggtaccctaagatggggatggtccgccacatttgcgcgtctgttttgcatggtgtgtactgcacatcacaaatgccatgttggccttagggtgctggg

SEQ ID NO: 243386 - DNA, 122 bp, Homo sapiens
ggcccgtccgcggcggctgctgaggacctggggagacccagcctgtaggatccgcagctgcggtgcgcggccggcagtggcgctcgggcttcgtccccgggggcggggcttcgtccaggcgc

SEQ ID NO: 243387 - DNA, 122 bp, Homo sapiens
gggggtgctataggcaatcccggggaggacgaggaagccctgtagcaggaagctgtgatccgctctgacttgtagggggcctgttcacatctggggactggtgacaacgtgggtgcactcct

SEQ ID NO: 243388 - DNA, 122 bp, Homo sapiens
taaccccagagcaagctggcttctgcaagttgctagcctgaactgtgccccaggtttttccgtggatcctaatttcccagatcctggcagctgcttgagtcagccatggtgatggatctctg

SEQ ID NO: 243389 - DNA, 122 bp, Homo sapiens
ataatggcaggggcaggggctgagtgcggtggcttgactcaccttggcccgttccagctccgccctttccatggccatctgctgggccgtgaccttcctttgctcctctagggcgcgctgca

SEQ ID NO: 243390 - DNA, 122 bp, Homo sapiens
aaaaaaaaagccaacacagactccagggttctcgcttaagcagctgcagagaggagctgccgcttcaggaagcgggagaggtcgttccagaaggcagtttggggccattaaactttgacact

SEQ ID NO: 243391 - DNA, 122 bp, Homo sapiens
ttggtccaatcagggattgagaatgattaagcacctatttgcataaaagacctacaaaaacggccagctgtgctgttgagccttcactttggggtgtattcttactcctttatcttgttgca

SEQ ID NO: 243392 - DNA, 122 bp, Homo sapiens
atattagcctaaaccaaacaaaatgaaggtattaggatatagtggaaacacatagaaggccgagattcaccttggttcatctacctgccgggggccttgtcagctactcaggctatcatctg

SEQ ID NO: 243393 - DNA, 122 bp, Homo sapiens
tggctgcggcccaggctcctggcgtcccatggggtacacacagagcagtggaaggcctgccgggccttgcgatgaggtattgactatgggatggcccaggctcttctagatctggccttggc

SEQ ID NO: 243394 - DNA, 122 bp, Homo sapiens
cagggccatcaagtacctcaaccaggactacgaggcgctgcggaacgagtgcctggaggccgggacgctcttccaggacccgtccttcccggccatcccctcggccctgggcttcaaggagt

SEQ ID NO: 243395 - DNA, 122 bp, Homo sapiens
cgcagccgccatcgccgggctctcgctcctctttccggaaggcccctggcgctaccgttccgctccacggcaggaaaccaaaggttccggcgtccagagggcgcctcccagtcccgggcagc

SEQ ID NO: 243396 - DNA, 122 bp, Homo sapiens
ccccgccccactggagcccgtccccttaactcaggtcttctcaaatactgtaagcttgagcgccgcccctcggcgccgcgcctcctcatccagcctctcaaataccctgcgcaccgcgatag

SEQ ID NO: 243397 - DNA, 122 bp, Homo sapiens
aaaaattagccgggcgtagtggcgcatgcctctaatccaagctacttggtagactgaggccggataattgcttgaacctgggagggagaggttgcagtgagccgagatcatgccactgcact

SEQ ID NO: 243398 - DNA, 122 bp, Homo sapiens
gaaaattcacttcaggccaacttctgttgctaaccttgaggggacatggtaaatgaaatacgttcccctcctgcgagaagccaacattttaggggggaaaatgaaggccgactgtggtaggt

SEQ ID NO: 243399 - DNA, 122 bp, Homo sapiens
caaccactaaaatgtcaaggaaggacccatttatgacttaaaattcccatggctctctaacgaaagcaatgctaattttggccttgggaaagtggaaaaaatatataattatgaaaagtcct

SEQ ID NO: 243400 - DNA, 122 bp, Homo sapiens
tttaattgtgaaaaatatgacatcagcaattatctaatttccagtactgtcttctgagaacgacctaaccaccacaggagcccacaaaacaccacctctatcctttccaccttgagatgcaa

SEQ ID NO: 243401 - DNA, 122 bp, Homo sapiens
aaccgactggatgtgacccagatggcaaagagaggttctacagatagcggtatctgtgatcgtccactagaccatttacaacctgggcagaacttttgtgaaaactggataaagtcacctcc

SEQ ID NO: 243402 - DNA, 122 bp, Homo sapiens
cttctagaaacttccgggcctcggcttccttacccacccctaacattctgccgcctagggcgccaagccaagttcgcggcttaaccatttaggaaaccggtgcctgctttgcagcggcctcg

SEQ ID NO: 243403 - DNA, 122 bp, Homo sapiens
aagtgaaggagcctctcccaggcggctgcggaagatggcagaggtgcaggtcctggtgctcgatggtcaaggccatctcctgggccgcctggcggccatcgtggctaagtagttactgctgg

SEQ ID NO: 243404 - DNA, 122 bp, Homo sapiens
ttctatggttttgtggggagacggctgagggaaggtcggcttccggcgtcgcgctgcaaacgtctcgctgaggtcatcctttacggcaggcgtccgcgtcgctagctagtcgttctgaagcg

SEQ ID NO: 243405 - DNA, 122 bp, Homo sapiens
ccactgcttttcttccaaaggactcacctctcttctgccattttactaggacacaggaggcggctctctgctctcgctctccctctctttttctccctgcccccaactcagcctgggctttt

SEQ ID NO: 243406 - DNA, 122 bp, Homo sapiens
cccacgttgactgaagttgtggccccggggtttgggccccggggtgctgcgcgcccgacgcggggctggcctttcctgaggggcgcagccatatggccagacactccgaggcgcgcccgcgc

SEQ ID NO: 243407 - DNA, 122 bp, Homo sapiens
gggggcggggcaggctccttccccgcccccaggaggagtcaaggctcagagcctgagggacggtgcctggggcaccagagtccccacacccactggagacagaagaagaaaccgaggcacag

SEQ ID NO: 243408 - DNA, 122 bp, Homo sapiens
cccgcggagtggctgtgatgagcgggatgcggaaggtgtccactgagccgatctgtctcccgctcacccacagcagttgctccatggtcaccagcggctgcacctgtcatgggaggaggaag

SEQ ID NO: 243409 - DNA, 122 bp, Homo sapiens
tcatgcccacctggatccatcacgcccacctggatccatcacgcccacctggacccatcacgctcacctggatccatcacactcacctggacccctcacgcccacctggatccatcacgccc

SEQ ID NO: 243410 - DNA, 122 bp, Homo sapiens
ggacaatgcgctcctcaggccttgaccgcgtacttccccagcgggtacagccgctccttccgctgctgcttcttggtcttcgggttctcctcatgcttgttgagccggcggcgcatggcgcg

SEQ ID NO: 243411 - DNA, 122 bp, Homo sapiens
atccccgggagccagggggcaccaaggaagccctgcgtcttgagttgccgcagagagaggcgcggggagagcctgcctgcgttcggtgggtgtcctgggtcttgctgaggactccttagaaa

SEQ ID NO: 243412 - DNA, 122 bp, Homo sapiens
tctctgtgcccttagaaaatcctctcccctccggaaaaatctccaagtgttggtgccccccgccccactgcagtcgagaagctgtggggaggggcggcgtcggaggaagccgccagccctta

SEQ ID NO: 243413 - DNA, 122 bp, Homo sapiens
ctgcatccagcaggttggggcctgtatgcaccctagccaggatggagtgggaaggaagtgcgcaattctgactccacaaacacctttggtaagtaggaggctatttctactcatagatacct

SEQ ID NO: 243414 - DNA, 122 bp, Homo sapiens
gccaatagagggcgccaaaggacctttaaaagccctttcagcactgaagtgaggggagagcgctctggttgttcttttagagttttggtaaaaggtgactcaacctatgaaatcgtagttta

SEQ ID NO: 243415 - DNA, 122 bp, Homo sapiens
ctcggacttttcctctgatgggctcccggctgccaccttgctctccgccacctccaccagcgattgccccacttgacgccgccatcctgggcgaccgcactgggtacaattcccgctgccca

SEQ ID NO: 243416 - DNA, 122 bp, Homo sapiens
agtattaggctcattttatatttgtgtcagaagaaatgtctgactttggggcagatgacacggtggctgcggaccaggcatggctccctaggttgaaatcagggaaaagctaatagtatcag

SEQ ID NO: 243417 - DNA, 122 bp, Homo sapiens
gtgcgcggacggagggagggcgccttgggcggagggggctcggctcctctgccgtttcgccgcctgcgtctccctctccctccctccagctcccaactgactgctgcgaggaggaaaatggg

SEQ ID NO: 243418 - DNA, 122 bp, Homo sapiens
cagtgccgcatggagctcctcggacagcgcaacgtcaaatgtcttcgtatcctgagagctcgctccttgaccagaaatctcatcataagaggccaggagacatactggaaaagtgactttcc

SEQ ID NO: 243419 - DNA, 122 bp, Homo sapiens
catttgtccagccacggcatcgacagggagcaaagtctctccttaaaggtgttaacctctcgagaagttgctgaaagccggaaaggttttacgcaacaggaactcaagccccgtacactttg

SEQ ID NO: 243420 - DNA, 122 bp, Homo sapiens
ccctgtccagtgttagacaggagcatgcaggtgcgggcatgctggggctggcccgagaagcgcctgtcggaggactctctttgccccttccccctcctgtttgacatcttttctccccttac

SEQ ID NO: 243421 - DNA, 122 bp, Homo sapiens
attggagcatccagatcccttttgatcaagaacctgtctttgtttgggaaaattacttgacgggactatgggccccagggcagggtatgaaaggcaggagcagaaccaagggaggaccctgc

SEQ ID NO: 243422 - DNA, 122 bp, Homo sapiens
gcgcattagcggctgccttgcagtgcaacagaggctcgagtgacaggccacctgcctaagcgctggcgcccaggaaagccggggaggaaactaggaagggaggcgacagcagaaaagccaga

SEQ ID NO: 243423 - DNA, 122 bp, Homo sapiens
ggcacatcagccccggattcaggcccttctctgctggggaagtctgggcactcatactcacgctggtaaggaaacacacccaccatataatagtcactgagcttgccccgggggtgaagacg

SEQ ID NO: 243424 - DNA, 122 bp, Homo sapiens
aaataaatttatggggacaatgggaccgaataattgaaaccgggatgaaagccaaagtcacgcagctgccagagctgggcagagcactgggaagaggggacgagttctgacatttctatatc

SEQ ID NO: 243425 - DNA, 122 bp, Homo sapiens
atatatcgtagtgccgcaatgacttctgggtactgtagtccaacatgtggactggccactcggcttgaagcttccttgggattggatgttgggaccgtccaaacacggcgacttctcatttg

SEQ ID NO: 243426 - DNA, 122 bp, Homo sapiens
tcagcgtggccggtgagtgggcaggagtacgggccacccgagggactcgggacgggcgtccgggctcgggtagtggtcacactcttggtctcctttgtccctagttcgggaggcggaaaaag

SEQ ID NO: 243427 - DNA, 122 bp, Homo sapiens
aaggtaactgccaggagcagcagcgccaagcgcagcaccgacagcgccatcctcctcccgcgccggctgtcttgcccctgcggtctgttacctgcgccactcgcagggagcgctcgtgcgac

SEQ ID NO: 243428 - DNA, 122 bp, Homo sapiens
taggcctgctctgcaaggagcagtacctctgctgttgctgtaaactgttgcttcaataaacgttgctgtttaacaccaccagctcgcccttgaattctttcccatgcaaagccaagtagtct

SEQ ID NO: 243429 - DNA, 122 bp, Homo sapiens
agaagctaacattgactatgtcagtggccactctaccaaaatagagggtttggtaccgggcgtggtgactaacgcctgtaatcccagcactttgggaggccgagatgggcggatcacttgag

SEQ ID NO: 243430 - DNA, 122 bp, Homo sapiens
agctgtggaaactccacgcctggcgggaagatggcagcctgtggggctggggagggtccccgcagcacctgggtctgcggtctgagccgcctgtgctgtgatgtggccggccttccctgcca

SEQ ID NO: 243431 - DNA, 122 bp, Homo sapiens
cagagcctggtgtccacaagcttccaggttggggttggagcctgggatgagccccggcagcgccttggcccttctgtggtccctgccagcctctgacctgggccggtcagtcattgctggac

SEQ ID NO: 243432 - DNA, 122 bp, Homo sapiens
cgttgtggctccaaggcctgctggcctgaagtcacccccgggatgtgccccgtgtgggaccgtgcgggatgcagggaggagcgtggctctgggtgtggaggtggcgggctgctggcatcctg

SEQ ID NO: 243433 - DNA, 122 bp, Homo sapiens
gaggagagacaagtgtggttgtgggagcacttgatgtcgcggaagaacttctgggtctcgcgcaggttctgtcgcagccgtcccaggtagcggcggtagcggccgaagccccggcacagctc

SEQ ID NO: 243434 - DNA, 122 bp, Homo sapiens
atagtcagctctaatcctggattcaatatcagaatttagattttcagctttgtggatgttcgacattttaaaaacagttattgcaaagaggtgaaaattttgttctgaagtcttaaggaaac

SEQ ID NO: 243435 - DNA, 122 bp, Homo sapiens
cacctgtagtcccaactattcgggaggctgtggtgggagtatcacttgagtccaacaggtcgaatctgcagtgagtgatcgcaccactgcactccagcctaggcgacagaggtcaaaaacaa

SEQ ID NO: 243436 - DNA, 122 bp, Homo sapiens
caagaagtcgcgtgcttggtatccaaggtgaccacgcagctttacccgcgttgccccttccgtgcttcccattggccagtggactcccatgtaccgcccctccaatagccaatggtcttgag

SEQ ID NO: 243437 - DNA, 122 bp, Homo sapiens
atccgacttgacctgaagcaggccctcagacctcaaacgtgtctgcagggagggccatgacgtcggggctggggtcagggtcgggttggttccagctgacaagtgttcaatttccaccaagt

SEQ ID NO: 243438 - DNA, 122 bp, Homo sapiens
cttctcctggcggcgctgcggatccagggggtcggctgccaggtacaggtgaggacattgcgggaggccggctgggagccttttgtgcggccccagggacgcgcaaattctgaccagtcctc

SEQ ID NO: 243439 - DNA, 122 bp, Homo sapiens
ccccgccttccctgccgcctgcccacctccccgccgcagccaggtaacctccacccgccccggggtagaggacgttcgtcggattctacactccacctcgttatcgcagcctgaagtgcgtg

SEQ ID NO: 243440 - DNA, 122 bp, Homo sapiens
cagaaagacaaatgcagttcccaaagcaatgaagcagtaggtagcctttactgaaggtggcgctacagaggagggcttcccatgacacagtgctcagccacctcccagaaatcctccttgtg

SEQ ID NO: 243441 - DNA, 122 bp, Homo sapiens
tatcttgctggaagtcatggtggcgggccgggtgtccctagcccgcggcgtggggcagtgcgggctgtgcgcgcggtccgcggcccgggggcgcgctcgcctgtatataggcaggtgtcaag

SEQ ID NO: 243442 - DNA, 122 bp, Homo sapiens
aaacattattcctgggtgtgtcagtgcggggggcggggtggggggcatagtttttgaaagcgattggcatttccatcaggggacccagtaaagaagatccgctctcttccctgcgggtgggc

SEQ ID NO: 243443 - DNA, 122 bp, Homo sapiens
aacatcttccagtgggtgagcacagtggggcggggccgagggctgcggaggggcgcggcccgcgagacaccatgggacgggcgccccctcgtgaccacagccggcacagcctcggagcccag

SEQ ID NO: 243444 - DNA, 122 bp, Homo sapiens
gtgacttcaggggcttggggccgacaccccgcgggcctcggtgccagcctcccgcttacccggtcagcccctgggccgagtacccctgggagagaaagcgctaaattcccccaacactcccg

SEQ ID NO: 243445 - DNA, 122 bp, Homo sapiens
gacggggactccttaaatgcctaactaagcactcctctctgtctcagacttcaggcctttcgcggttgtccctttcctccgcccctccccacgcccggccttccgggccagcagggggcccg

SEQ ID NO: 243446 - DNA, 122 bp, Homo sapiens
gccgcgcagggggagctgggagctgggtgggcggggtggggcggacgccaccaggcgtggcgcggggaacagagcagaatgaaatgcagatgcaaaacgtgctcataagagtttcctctctc

SEQ ID NO: 243447 - DNA, 122 bp, Homo sapiens
agctaagcaaggatgagttctgccacagccaggccccacaggggagctctgggccatagccgccccacaatttgtctcatccggagacagaggccaaccttttgtatctctgtgtcaggcag

SEQ ID NO: 243448 - DNA, 122 bp, Homo sapiens
tcacgaaagggtctccagacagttccgctgctccgggagcagcccccggccccgcccccgcgtgcgcctggccccacccccaagcgctccatgaccagcctccacgtgcatccgccccagac

SEQ ID NO: 243449 - DNA, 122 bp, Homo sapiens
tgggcagcgctgtgccttcggctcccaggtgctgctttcggaagcaaggatttggggcatcgctgcgtttcctgcagcgccggcctggccggttctgctgtaacacactccagcctggaccc

SEQ ID NO: 243450 - DNA, 122 bp, Homo sapiens
agggcacgtgggctctggagggagcacaaggggctgctgggctggatgacgccgccccaacgtctgcagtagccttgagctgtatatttgctatgagcggacttttgcaggggtcagatttc

SEQ ID NO: 243451 - DNA, 122 bp, Homo sapiens
tgcgcaggcgcagaccatgaccgaccccggggcgggggcgcagcgtgacgctctgggcgccgctgggatccgagaagaaacccttttaaagcaagcatggcaatttcttctaaataagctgg

SEQ ID NO: 243452 - DNA, 122 bp, Homo sapiens
atgactcaccagtcttggccaccacagactcgggccccacacgctgcctgccacgaagcccgtagaggttcatcttatacttccggtcgggatccaggccggggacagtaacctcattctca

SEQ ID NO: 243453 - DNA, 122 bp, Homo sapiens
tttgtggtggggaacaatgttcaacaaaacagaagagttatgggtgctctagcttggcaacggagaatacttccttgtgctactaaatgccaatatttgacaattacggatgacacaattga

SEQ ID NO: 243454 - DNA, 122 bp, Homo sapiens
aaaaaattggatgaatgataaatactgttaggaaaacatggcagggaagttggggaggagcgctgggggactagggagaaaggctacaatttgacatagagtgtgcagaaaaggccttaaga

SEQ ID NO: 243455 - DNA, 122 bp, Homo sapiens
ctttttctctttgaaatgatgtgactctggaaggttttcttctttatttctgggaagaatcgcttaaagtttctcatttaagtaaagaactgctcgtttttagtttgcagagcttttaacta

SEQ ID NO: 243456 - DNA, 122 bp, Homo sapiens
ttttgccgctttccgcccctctcctgggattgcctctctcttcaaccagagtctcagtctcgtcaaatctctccaccacatcaggctttatagggagggaggaggctcccacgggaggtaaa

SEQ ID NO: 243457 - DNA, 122 bp, Homo sapiens
gagaaatccctctccttccaatgctttagggtccaactggggacctagccgtgtgaccttcgccataccccggaatctcctttgggacgtccccgaggccctccctgtccggggctcagcag

SEQ ID NO: 243458 - DNA, 122 bp, Homo sapiens
aggtccctccccagcttcctcataggctgagtactaggggatcacagtcttcctgcatgtcgcctattggttgttgggcaggggctgcagggtgcaggtccctccccaggttcctcataggc

SEQ ID NO: 243459 - DNA, 122 bp, Homo sapiens
ggaggagctaggagcagcccagacgcagcgggtgggctggggtggcctccagcagtgcaccggggctggggcttcaggggaaaggccctgttatgagaagagggacgtgtgagcttggatat

SEQ ID NO: 243460 - DNA, 122 bp, Homo sapiens
gtgtacttatctctggtgccaggaaaggtctgcctgaatcctttgtttactagtatttcacgttcaggtttccctgaagttaggattcagccttaagagagattctttctctcgtgacaacc

SEQ ID NO: 243461 - DNA, 122 bp, Homo sapiens
atttgtaatgggatgtgaagaactacgttttgaaatacacattggatatattaaacctttcgttaagactagtgattaaaaggaagggtgaaagccaaaagaaaaattccaaggatttgatg

SEQ ID NO: 243462 - DNA, 122 bp, Homo sapiens
tggtcgttcccgctacttggggattcagatgtccacctttcccagggttggaagtgagtgcggccattatggttccctactcagagcctttggggcttcgggtagcagattgtttcagccat

SEQ ID NO: 243463 - DNA, 122 bp, Homo sapiens
ccgattccacgatgtgaggacacagcgagaaggcaccatctttgaagcacagagtgagctcgcgaaagatattaaatctgctggtgccttgatcttggacttctcagactccagaattgtga

SEQ ID NO: 243464 - DNA, 122 bp, Homo sapiens
gaggctttgcttagcaggtaccttgtatggagtgagtagattgccccagcacagagggtacgtggaggccgaaatcaggctgaagcacaaagcatggaggcgcccgaagattgttctgacaa

SEQ ID NO: 243465 - DNA, 122 bp, Homo sapiens
gccccagcaccctctgttggagcttctggtcagcctggccaataagcatttcccatccatcgccccagcactaggacagctgagagaatttggttcagagtcaaatgcttctgaaaatgtac

SEQ ID NO: 243466 - DNA, 122 bp, Homo sapiens
actgtgaccgtgtagacgccctcatcttccttctctgccccctcgaccgtgaagatgctgcggtccttggtggtctccacgcggacccggccctcggtctcacacagcagctgggggggtgc

SEQ ID NO: 243467 - DNA, 122 bp, Homo sapiens
gggctcaggcgaggcacgcagcgcccctaagcctggctctatcctgaaagggcacctaagcgtgaacagagccggtgcctgcaaaacctccaggaagagctgggtgcgagtgggcgtttgat

SEQ ID NO: 243468 - DNA, 122 bp, Homo sapiens
ctacacgatgcttgcagcctcgcctcctccgggatgctcgagaccttgatactaggccgtcgtgaatgccttcccaagttcagtcttagctgcagtggggcacaagtgccatccctgagctg

SEQ ID NO: 243469 - DNA, 122 bp, Homo sapiens
caggatgtctggcatgtggtcggtgagcatcttcggacctatgagtattttgctgaattccgcttcgtgtgaccacttggcgctatagtgagcagcagagcagcagccaaacctgaagcaga

SEQ ID NO: 243470 - DNA, 122 bp, Homo sapiens
gaacacgtgcgcccacaatcccgggagctgtacaaatcccaagcggggaagcggaggcctcgacagttcatgatgcggacatgaatgggaatgcggccgcttgccacacctccttcttcatt

SEQ ID NO: 243471 - DNA, 122 bp, Homo sapiens
tcttgtttcgtgaaagagtttttttcttttttttgcctggtgatgttttccaattccctccgcgccactctgaagtatattactggcataagaaatttgaaagttaaccaaaagtcgggtcc

SEQ ID NO: 243472 - DNA, 122 bp, Homo sapiens
tttctttcagacattcttgccacaacagcatttttttttccctcacaattaggaaccaaccggtgagccctctcctaagagacccaggggaagacccaaaggcagcaaaaacaagagtccct

SEQ ID NO: 243473 - DNA, 122 bp, Homo sapiens
ggaggctgggaggaaaagccgtgtttggaaaacacaggaaaccgtgaggcttttctgctgcgtctgccccaccctacacaagctctggtgtgggacacgtccacgcagaggcccttctacgc

SEQ ID NO: 243474 - DNA, 122 bp, Homo sapiens
catcatgcttctgaaactgcttgttcaaaggtaacctacagggccagcctcacaggcatgcggctgacgaggtcccacaagacctcatgccctgtgctcacaagagctctgcacttggtttt

SEQ ID NO: 243475 - DNA, 122 bp, Homo sapiens
tgggcggcctgggagcgcccaggcgggcttggcgggcgggttacctgggggaggccgggccgggcgctagcgcgcggggtgggcgtggcgggcgcggggcctggagctcggcgccgggcgtg

SEQ ID NO: 243476 - DNA, 122 bp, Homo sapiens
ggagaggttctgggcccgcgggaccaacagccaggaggctggggagggagcgccctggctcgcaagagtctgaatgtctaaccccagtgaggaccctcctgacattgcccgctaaggggaca

SEQ ID NO: 243477 - DNA, 122 bp, Homo sapiens
atcctgaggaaaatggacagcgggtgctgcccgcaatgccagagaggactcttgcgatcacgcaggaacgtggtgatgccaggcagcgtccggaaccgctgcaacatctccatagagacaga

SEQ ID NO: 243478 - DNA, 122 bp, Homo sapiens
caccaccttcagggattggggccctctgcgagtagcgggggcaaagggtgctgctgggtccggaccctgactctgccaggccttgcaccagcccctttacatgggttgactccaaatccttg

SEQ ID NO: 243479 - DNA, 122 bp, Homo sapiens
ggaacactgtgcacggaccccctaggatgggcactgcggggatgggatggggcagccgcacggaatcagagcacggggtggcacccaagtaagatgggcccgagtttaccttcagggcaact

SEQ ID NO: 243480 - DNA, 122 bp, Homo sapiens
tttgatggaacagctgaggcacacatcgcccgtggcatggactccggggccgaacgctcacgaccaagacttttgcccttttgaaatgaaatagaaataggggagctgcaggaaaaccgaat

SEQ ID NO: 243481 - DNA, 122 bp, Homo sapiens
gaatgtggccatgttgaagcgctctcagcctgcttggtcagcttagccttctgaatcagccgtagatctactccatgacatgtggtgagctgtttgtagggccagggctgaggatgaaggga

SEQ ID NO: 243482 - DNA, 122 bp, Homo sapiens
tctcctggcccgggaccggcagaggggtgcggcggggcgggcccaggggtctctggcggccggaagaaccgggaccctgccaggcccctcccgcgggcagggcggcccctcgccggctcctc

SEQ ID NO: 243483 - DNA, 122 bp, Homo sapiens
tgcaccaaactgcctacttcaatttacctagtaaatctcagtaaagcttaacatgtacaccgaacattcaccatgcaagttttcacttgatattgagggatcagctggaaatctgtctcctc

SEQ ID NO: 243484 - DNA, 122 bp, Homo sapiens
gggctgcagcctgctgccggggatccagctttttacttgagagggcaggattcccctactcgggctcctctccccctcctttctgggaacccccaccccggtagagcgtcccgaggctggtg

SEQ ID NO: 243485 - DNA, 122 bp, Homo sapiens
gggcgggcccggggaggagcccagtcaggcgacctgtcaccagtaaccacagctgaggcccgcccgcgccccgcccccggctccggaaagccagctccagccctctcaggcccagaagcctg

SEQ ID NO: 243486 - DNA, 122 bp, Homo sapiens
ccccgccagcagtcgtggcttcctgctggctcccaccctgtgcctcagccgacgggccctcgggctcagcctcagagactgtgctggcagatgggcgagagtcttcactcaggccagactcg

SEQ ID NO: 243487 - DNA, 122 bp, Homo sapiens
cacctgtaatctcagctacttgggaggccgaggcaggagaattgcttgaaatccgggaggcggagggtacggtgagccaagattccgccactgcactccatcctgggcaacaacgtgagcgt

SEQ ID NO: 243488 - DNA, 122 bp, Homo sapiens
ctggaaggtggcatcaagtttggcactgcatctgtccagcgctgggggccctgtcccattcgagctgcacctcaggcccctgcaccttccctgtgtgcctcaacccccgctgcctggctgcc

SEQ ID NO: 243489 - DNA, 122 bp, Homo sapiens
gaagaggctttgagagatgaagaagagagagctggagcccggcccagagttgcagccaggcgtggcactacagccatgactagtgcgtattccagggccacatccagtagctcttcccaacc

SEQ ID NO: 243490 - DNA, 122 bp, Homo sapiens
gatgtgccctagtggttttcaagtcccgactcttcccctctctcccaagaacccaggcaacgcccaccccaaaacccccacctcatggtcagagcattcctgctgatgttactcagaatgtg

SEQ ID NO: 243491 - DNA, 122 bp, Homo sapiens
gcctgcttttattcccttatctgaccccacccacatcctgctgattggtccattttacagcgagcgattggtccgttttacagagagctgattggtcctttttgacagggtgctgattggtg

SEQ ID NO: 243492 - DNA, 122 bp, Homo sapiens
gggacagtacattttccattgggtagttgggctggctactgagtgaagtctattatgaatcgccttgcgaagtgaagggttcttctgtaatggggaggatcctccagtcttcgtgtatgtgt

SEQ ID NO: 243493 - DNA, 122 bp, Homo sapiens
cccaggcccagctccacctcctccctgtgtcctccccacagcagcatcaggcaagagtggcgacacagggccgaatcccaagccatggattttatagtctgggcctctgggtaggtcccacc

SEQ ID NO: 243494 - DNA, 122 bp, Homo sapiens
gcacagagctgctgggatagtgagcaaagtctgtgctggcaccaagctggtaaacacccccgctctcctccccagggctcctcacctggccccggggacggggcacctcctgccattgagtt

SEQ ID NO: 243495 - DNA, 122 bp, Homo sapiens
atgctgggattacaggcaagagccgcagcgccaggcctagactttttgtttaaacatcttcgttcatttgtttttatttatttatttatttagacatagggtcttactgtgttgcccaggct

SEQ ID NO: 243496 - DNA, 122 bp, Homo sapiens
gtcctcacagccagccgcaccacccccctcccccccacatcccgcaacctggcttctcctcgctctaaatctaggggaacaaaaacccggcgcgtctgggacagcctctagagagactgggg

SEQ ID NO: 243497 - DNA, 122 bp, Homo sapiens
aggtgcatcattgagcctgggtaatggctgaaagtcccccagatatccagtttgaagctgcgttgggcaggccatgggttttattacgtccaaggcgtgacaggcaaccattctataacaga

SEQ ID NO: 243498 - DNA, 122 bp, Homo sapiens
tctcatggctctgacactgaatgatccccctgcctcacagggatgtcctcccagcctctccggacacaccctaccccagaactgctcaaagccctcacccgaggtgaagcgacgctccttct

SEQ ID NO: 243499 - DNA, 122 bp, Homo sapiens
ggttaagtggatgaaggttaaaagctaataataaattagccaagaaatactacttcccaccgagccataaaataatttcggtcctacaatcctaaaaaaccagagaggtttctcgtttttgt

SEQ ID NO: 243500 - DNA, 122 bp, Homo sapiens
ggggctctgagtagcgaggccgggtctgaactatcaggcgcggcctctgcgagctgggggcggggttctgcaccggcgggggcggggttgtgagtggtgggggcggggtctggagcagcagg

SEQ ID NO: 243501 - DNA, 122 bp, Homo sapiens
tgtttggctgccaagcccggcttgcttgggtggaggcagcggggggtccttcctggcccacgctggcagcacagaccaagcctgtgggggcaagagcacggctgcggggagacgaggaccct

SEQ ID NO: 243502 - DNA, 122 bp, Homo sapiens
tgaggggagggtccagagcccagccctgcctggggaaggtcgcggccgtctggggagccgcgctcaggccccagcttgcggagacccttgccggtttctgtcacagcacacctgggagaaag

SEQ ID NO: 243503 - DNA, 122 bp, Homo sapiens
cttccttttaacagggacttcacctccataggggctgataaggagaagcttatctacccacggacctctgaggactggcagtgacagggaaaaaaagaaggttagggagcacatgaaaagcc

SEQ ID NO: 243504 - DNA, 122 bp, Homo sapiens
ttcagaagactcagataaaatgctgaggcctcagaagattcttttcaaggatgcccaaagcgtgtgactcttacagagacccaatggggaaaggcagtgtcgggactaagcaatgaatggct

SEQ ID NO: 243505 - DNA, 122 bp, Homo sapiens
atctaggctcactgcaacctccacctcctgagttcaagcgattctcctgtctcagcctcccgagtggctgggattatgagggcaccaccacgcccagctaatttttgtatttttagtagaga

SEQ ID NO: 243506 - DNA, 122 bp, Homo sapiens
cctttcctagtaaaagaaaggggtgacagagggcacctgggagatcgggtcactcccacccgaatactgcgcttttccgaagggcttataaaaacggtgcaccaagagattgtgtcccgcac

SEQ ID NO: 243507 - DNA, 122 bp, Homo sapiens
attaccgcctgagctcacctcctgtcagatcggcagcagcattagactctcacagaagcacgaaccctattgtgaactgtgcaagaaaggtatgtaggctgcccgctccttatgagatctaa

SEQ ID NO: 243508 - DNA, 122 bp, Homo sapiens
tgctgaagcctctgcgccaggtgtgggagtctgagcgcgcaccctgcagagctgtgcaggcgctcccccgcctgagcagacagccatccatcactccaggagaggcagcggtggggacgtga

SEQ ID NO: 243509 - DNA, 122 bp, Homo sapiens
gcccccaggccgccaaggcccaggatgtccaggtccttagaaggcaccgaggtgagtggccgcgcccagctctgtgcgtcgcccctagggtcgcccgaaccccggcgttcctccccgtgtac

SEQ ID NO: 243510 - DNA, 122 bp, Homo sapiens
gcgggaggcaacatcaatgcagttagctacacgggcctgaaaactggaggccgcgacaagcgtcgctgagtggaggcccagtaagtcccacccactaggccagcccgagcgcgtctgccacg

SEQ ID NO: 243511 - DNA, 122 bp, Homo sapiens
gtagaagcacctgccggactcttcgcccagagaagcagaagtcatcctggcgctgtccagcgggccgcagctgaaatcccgggaactaggcggggccacctgcaacctgcttttcccacagc

SEQ ID NO: 243512 - DNA, 122 bp, Homo sapiens
tgcaccaacacacccagctttatctgatatttttttagatcagtgttctaagttcttggtcgggctagtctgcagtcacttgatttctttctgttgactctagctggattgtttcttgtatg

SEQ ID NO: 243513 - DNA, 122 bp, Homo sapiens
tgaagggacttttgagttaatcagcgtaaggggatttctaaagcaggcaatccctgtagccgcagagaataaacgccttcccaaaatggcaacttcccacagccacatttcagacctgctga

SEQ ID NO: 243514 - DNA, 122 bp, Homo sapiens
ctcctcctgcagcccttcctccaccttgtccccacctccgaaagggaggaggccgaggggcgccctctgtaccctccaagatccggagggcgcaggttctgacgcatccgttagacgttctg

SEQ ID NO: 243515 - DNA, 122 bp, Homo sapiens
cctcagactgaggcggctgagggcagggtcctcaggctgatggctgtgggagtcgtgccacgcccctcgtgcccccgggaggcccggccggggctgggtggggggatccggtggttccacat

SEQ ID NO: 243516 - DNA, 122 bp, Homo sapiens
gctcttgtggacacctcggggctgcggacctagcgtggcctcggtttcccctgccgggttcgcctgtccgcgcagaaacagtcccccgttccttcgggacgcacccctgcaccgaaatcggg

SEQ ID NO: 243517 - DNA, 122 bp, Homo sapiens
tagaggtccccaagtcacaacctcaaatctcggaatggggttcaggagctgttggggtcccgtggaggtacaggcggaaacctagcactcactattctgctctggggagggggttggaggca

SEQ ID NO: 243518 - DNA, 122 bp, Homo sapiens
aaacctgacttctcatccttgaccagctgtgtttatgctagttactgaacttcactgtgccgcatttttgaaatggggcagctgtgttcccacacgttcctcgtatttctgtggtttcttgt

SEQ ID NO: 243519 - DNA, 122 bp, Homo sapiens
cctcccacctgccctcctgccctcctgcccggctactcacagcgctcctcctggtccacacggctccggccacctcgcctgctccggcccaggccactcattactcaggatgcttattacta

SEQ ID NO: 243520 - DNA, 122 bp, Homo sapiens
ctcatcccctcccgcccttgctaactcacagcattgcaacagtcatgagtccccacctgccgaaaggaagctcctgcagccccctacaacccccagggcagcctttctcgggaattttcaag

SEQ ID NO: 243521 - DNA, 122 bp, Homo sapiens
aaacgcagcggcgccgaccctgggtctcgcacattcttcacgtccgttcgcagcgtcacccggatcttcgccgctacccttgtgggccccccggcgacgcttcctgctccgcccctaagtcg

SEQ ID NO: 243522 - DNA, 122 bp, Homo sapiens
agcccaccatgcctgagcctcccacccactccatgggctcctgtgcggcccgagcctccccgacgagcaccaccctctgctccacgacgcccagtcccactgaccacccgagggctgaggaa

SEQ ID NO: 243523 - DNA, 122 bp, Homo sapiens
ggaaactaagtctcaaggggatcttaaaacccaagacgggggaatgggaacctcacaggacgtgggggcgcttttctggccatctctatataaaacctgccgggggcctcagaccctggctc

SEQ ID NO: 243524 - DNA, 122 bp, Homo sapiens
ggaggctggggagacccaggccggcctcacgcgtgcaggtagcagagggtggggcagcgccgcgctgcattggccccactgagtttcaccagcacactgagggccacagcgcgtaggacaga

SEQ ID NO: 243525 - DNA, 122 bp, Homo sapiens
ggttctgggagaatatggcaagctaggtccgaggtgcaatcctaaactcttgatgacctgcggatttcaaactctcacaggaattcatgcacatttggtctgttaccctcacagccctgcat

SEQ ID NO: 243526 - DNA, 122 bp, Homo sapiens
tgctgtcctctccggcttcctgtctgctctgttctcacaggcacaagggtcccctacctccgtgtctactgcacccagcggacaggaccagcggcagtgaccagcttgtgactccatcagaa

SEQ ID NO: 243527 - DNA, 122 bp, Homo sapiens
gtggtgctattgcagaagccattgcagccccaactactgattcggccttaggcccaaccccggctccatctgcctcttgggcctgactgcctgccccactctgagcctcagcgctggatgca

SEQ ID NO: 243528 - DNA, 122 bp, Homo sapiens
cgaggcgtgcagccacttctgtgaagaggccagacttgaagtggggcgcagttaggacctcggggcggaaagcctgtggagcctaaggggctcgcccgcgcctcagttctcccggtttctgg

SEQ ID NO: 243529 - DNA, 122 bp, Homo sapiens
ttccccaagagcttacaaactcctggtaggtgtcaaaggccagctggtgcagacgatgggcgcggagcatagcgttgtcaaaaagcctggataagggaatggttgggaaggcactgccctct

SEQ ID NO: 243530 - DNA, 122 bp, Homo sapiens
attaggagagtatcttctctgttttggccatgtgtgtactcacagcccctcacacatggccgaaacagagaagttactttcctaatatttgcctccttggagtgtctcaagtcctggaagca

SEQ ID NO: 243531 - DNA, 122 bp, Homo sapiens
ggcccaaggacacacatactgccctgctggagtgttagctggtgttaggactgcagcagccgctccttaatggagctccccaggagcccaacccgatcgcctgcctgcgttattaatgcatt

SEQ ID NO: 243532 - DNA, 122 bp, Homo sapiens
gtaggccccgcccccgcgccgcgcgggacccaaccagggctgccgggccgctgtgcgccacgcccacttccggaggggaagcccgcttcccaccccacgttccacgcctcgctacgccccct

SEQ ID NO: 243533 - DNA, 122 bp, Homo sapiens
ttgttgtctaattatgtcggaggcgcactatgtctcattcttttatctttaaggtgaggtcgtagtagttgaatagtgccttccccaaaaaacccacatgaccccatttggaaacagggtct

SEQ ID NO: 243534 - DNA, 122 bp, Homo sapiens
tcaatgcagatgcaattttttcctgaatattttccatctgaggttagttgaattcacggacgtggactgccccccatagggagagctgattgtattttactgttgttggttgcagtattcta

SEQ ID NO: 243535 - DNA, 122 bp, Homo sapiens
gacgtggagggagtatgcaggtggaagagcacaccgacagacgtcggcacagcagccagccgtccaccatcgaaaggtggcggagtttggctggagcgaccagagaagagtccggctgcaaa

SEQ ID NO: 243536 - DNA, 122 bp, Homo sapiens
cgggaatggaggctggacctgggaggtgtcgctgatgatcgtctctgactcgctaagtcgcggagtcacaaaagtggcggaaagcatgccctcactttttgggaagagtaggacgaggggcg

SEQ ID NO: 243537 - DNA, 122 bp, Homo sapiens
gtgaatcagtgcaaagctccagtgcgtaactgacctaactaacttctcacagcaactaagcgaaaagactgggactgaaacctgtattttttcggctgctaaagatggcaattgtagtgagc

SEQ ID NO: 243538 - DNA, 122 bp, Homo sapiens
cgtgtggctggccgaggacgacctcggctgcatcatctgccaggggctgctggactggcccgccacgctgccctgcggccacagcttctgccgccactgcctggaggccctgtggggcgccc

SEQ ID NO: 243539 - DNA, 122 bp, Homo sapiens
acggagcggcctacgttgtggcggttccctggtgaatgcgccctggggttgaggcgtctgcgggcgttcggacgatgccgtgacgcggcacggcgacactgttggcaatatgagcgcacccc

SEQ ID NO: 243540 - DNA, 122 bp, Homo sapiens
cctactccgcggttgcctctctcggtccttccgagagctgagagacactgcctctggttgcgagctgcagcccaagtgccgcctccccctcccttccactcttctccctccctcctcttctg

SEQ ID NO: 243541 - DNA, 122 bp, Homo sapiens
gttcaaagtgctgatgggacttgcctcccgcccccctgcacgttcccggggccggaggagcgagagcgaagcagggagctgccctgtaatctggggcagccgtttccagcccgcgacttgtt

SEQ ID NO: 243542 - DNA, 122 bp, Homo sapiens
tgtataattcatgaaaaacagttgtttcagtatttgtctacttgtcttgttgtccaatctcgtaacagttactcctttatgaaaagaagtgaaggtttgtgccttatgcatagttaatgttt

SEQ ID NO: 243543 - DNA, 122 bp, Homo sapiens
ttttgctgtaatagtcctttgagtcttttcttcctgcgttcccctgccatcttccactaccggctacaaaggggttacaatctggcggccctggaaagccagccggcagccatgccaactgc

SEQ ID NO: 243544 - DNA, 122 bp, Homo sapiens
ttgaccccacaccagcgcgctcccttcctggcctcgcctggggtctctggcagtggctgacgaggctttttgaccaaaggagaaagtttgaggctgcagatcacatgtccttaaaggatctg

SEQ ID NO: 243545 - DNA, 122 bp, Homo sapiens
ctcctgccgggctcccaggctgagcaggagggagccggagcctggctgtctgcgggggggcgggggacttcctgctgcccctggccctggtgctcggtgtcctgggcctgagtcttggctca

SEQ ID NO: 243546 - DNA, 122 bp, Homo sapiens
tagatagagagtaactacaaaaattccatacacagacaagagatctcagaaataagccagcgctccttttagagaaaatgcagtggcacccactcatatcatttatagaaactatttcacgg

SEQ ID NO: 243547 - DNA, 122 bp, Homo sapiens
atgtcccagtaagtcagactttccagcatccgtgctcttgctagttccctcccatattgacgttggtttggcttttgctttgccttttgacctcttctacatcccctcattcactctgctac

SEQ ID NO: 243548 - DNA, 122 bp, Homo sapiens
ccagagagcaaggagagagggtttagctgtgcccagagtcccttccaggcccagatgctccgcgattagcaccagcagagaaggaggccaaaggactgtagaacatgcaggatgaggggggc

SEQ ID NO: 243549 - DNA, 122 bp, Homo sapiens
attacaacacacatcactgctgttaagttctgtgtgtgtgtgtgtgtgtgtgtgcgcgcgcgcacatgtgcacactcgtgatggagagagcttgataaaggagagaggcctaggccaaagga

SEQ ID NO: 243550 - DNA, 122 bp, Homo sapiens
gggggcggggagatggcggtctccgagggtggggcgccggccggtcttgcggtctggaggcggggaaagaggcgtggaaacagggacgcagcgaaggggaaaggaaagctgccagagggcag

SEQ ID NO: 243551 - DNA, 122 bp, Homo sapiens
tggcggcgcgagtgctgcgcgcccgcggagcggcctgggccggcggcctcctgcagcgggcggccccctgcagcctcctgcccaggctccggtgagcagcgccgcccttcccgggaggtgcc

SEQ ID NO: 243552 - DNA, 122 bp, Homo sapiens
gcatatgaacagcatgtccagcacagactcggtttggtgagctattttacatgcaccaaacgaaaggcctggaaggaaatgtgagccgcggatttccatttccggactgcggcccggtcgat

SEQ ID NO: 243553 - DNA, 122 bp, Homo sapiens
taagcggaccacagggcggggtttccctcgagaggcgaacgccgggtaaaagatcgggagcggaagtgggcgagtcagagcacatccggtgttagaagcgctggtaggccttggagaggcgg

SEQ ID NO: 243554 - DNA, 122 bp, Homo sapiens
ctgggcagctctaggcaacacccatcgcgttcctacgtcaccagtcccactcctctccttcggcccactcagtcccccctgaatgtttcaacccccagtgccaggaagcgtggggagttcac

SEQ ID NO: 243555 - DNA, 122 bp, Homo sapiens
actccagatttacaccctctgtccagacctctcctgaaccccagactagtgttcgtgcaacgtcttccttggaggcctacttgtgtgtcaaactcaacaagtccaaaactgagcctctgagc

SEQ ID NO: 243556 - DNA, 122 bp, Homo sapiens
agttagggaagccattgtttctggtgcaaacctcctaattccaagaggcttattaaagtgcgtctatggcaataacagacaagtgttaatgggcctcagtgaagtgtgtcaggagaacgaag

SEQ ID NO: 243557 - DNA, 122 bp, Homo sapiens
ctggaattcagtggctcaatcatagctcattgtagccaccaaaagtgttgggattataggcgtgagccacccagcccggccacagtcgttcttctttctgatgctcaaattgccccatcttt

SEQ ID NO: 243558 - DNA, 122 bp, Homo sapiens
ggggtcccaggtcttcaaaggccttagctttccaccccgccgttaccgtggctatgaaatcgcttccgggttcacaccctttgcagcctcgcggttggcggtgaaagagcttccgggtcggc

SEQ ID NO: 243559 - DNA, 122 bp, Homo sapiens
tttgctaatcatcttcctgatctgtctgcatggtttaaactacaaaatgttaatgcctgacgtgatttcatgcctctttctcagacccatagagaagccttgggttttccctcacccttgcc

SEQ ID NO: 243560 - DNA, 122 bp, Homo sapiens
tggtggtctggtagtaaagaatgaaaggaaatggtgcacgtggaaacactttgcaaacagcgaaagactgtacaaaggtcagagagtctcatcaagtaaagagaccagggctggaggcagga

SEQ ID NO: 243561 - DNA, 122 bp, Homo sapiens
ttttcactctttttgcaaagatgcccccttaactttccaattcttctgtaaggaatggggcgccctggaggtggggatggcctctgctcaaaataccccttccccaagacctgttcccaaag

SEQ ID NO: 243562 - DNA, 122 bp, Homo sapiens
gctcctaaagcggcttgtgtgctctcaaccgtctccctctgttttaaactctctctctgacgtcaggctaggaggcgcccccagatctcaccagcccttttacgcaccattagcctcgcaaa

SEQ ID NO: 243563 - DNA, 122 bp, Homo sapiens
tttgctgacatggtgcaaagagccaattcctggttgcaaagaggcagctgggtgcagaggcggggtgcattcctgtaataataataacttgtgtttttataatactttacagtctaagtact

SEQ ID NO: 243564 - DNA, 122 bp, Homo sapiens
cggtctcccacctggagatccacggcccgggcgccccaggatggatccaagcgcagagtgcgcctcctgtgacagaggtcgacccctaagcccgggccgagggcaaagggcgcggattaaag

SEQ ID NO: 243565 - DNA, 122 bp, Homo sapiens
agagctgaccgtatcgccctactcgaaggcttcaatttccactggcgtgattggacttaccgggatgctgtgacaccccaggagcgctactcagaagagcagaaggcctacttctccactcc

SEQ ID NO: 243566 - DNA, 122 bp, Homo sapiens
ggatttaaacgaaaggcggtgacgccacacaaaagatttctataggctccagggaggttacggccgaggcggcggcggcggcgagcccgggggcgaggcgcggacgggaacaggaaaagcct

SEQ ID NO: 243567 - DNA, 122 bp, Homo sapiens
cagaggtctccctcagctccttgccacttgggcctctccaaaggctcacaatgtgacagccgagtttcatcagaataagcaaggagagagcaagggaatgagagcatggcagcgaccctaat

SEQ ID NO: 243568 - DNA, 122 bp, Homo sapiens
aatcaaatccccgacctcacgaggctgctactgctgcttcccgatcccagctctgaaagacgggctctgcagcccgacagggcattgtgcagcgcctgtccgtcaccatccttcacataggc

SEQ ID NO: 243569 - DNA, 122 bp, Homo sapiens
cacaggggacaggaacagacgcaccacccatatgtggcaaactctggccagagcagtattcgggagtctctgagttgagatgcctgaggctgcctgtttgtgtcactcctgcaggaatttca

SEQ ID NO: 243570 - DNA, 122 bp, Homo sapiens
gccgcctggagcggggaaactgctgacaacccttaaggcatttaagtttacaggaaattgcgcttttattgcgtcttctgtttctcacgcagtcctgagaagccggcagggcccggcttgta

SEQ ID NO: 243571 - DNA, 122 bp, Homo sapiens
ggccctctccttcctggggcccggcagcggggaggcggcgggggccgcggggctgagctccgtcctgttcaggctcagcctgtacctgagctgcgcggcggccgccttcctgctggggatcc

SEQ ID NO: 243572 - DNA, 122 bp, Homo sapiens
tccccctcgggatattcggaacaatatcacagggggtgtgtacagcccctgcgacgttgtcgctagtatcttcctctccctcccaggatataaggaacaatgtcacaagggggtgtacaccc

SEQ ID NO: 243573 - DNA, 122 bp, Homo sapiens
tcaggaatagagagcgtccctcagccaaagccacccggtgagagacggccccaggaggggcgcagagcagaagtggggtcaaccagagggacgactaaaggaagcagaagagctttcccagg

SEQ ID NO: 243574 - DNA, 122 bp, Homo sapiens
agccaaactctggatcctttctgcagagcaggcttagcttgagccctcccacagcgagctcgcccactgcccaccctgccctctcagcctctgtgacaactctgtgggcactgccaggggca

SEQ ID NO: 243575 - DNA, 122 bp, Homo sapiens
ctgctcgaggtctgtttttctctccttgcctctcaacccctgaaagcaaagcccggacatcggaaagggaaaggggccagctaagggcagctggaaaagaagggaactgctcaggggagagt

SEQ ID NO: 243576 - DNA, 122 bp, Homo sapiens
ttgctgggagttgtaagagtggggttgagatcacattcccctttgcatagtgaaatatcccgtttaatgaagttgtttcttttggagaaatgtccattgaactgctgcagactctgggtttg

SEQ ID NO: 243577 - DNA, 122 bp, Homo sapiens
ggttttgctgattttctgggacacaaacttcgcataaatttcctccatgccgaaagcggccgcagcaggtactgcaaaaagcaagcacagtacgcgcctctcagcaccgcctcttcccgcgg

SEQ ID NO: 243578 - DNA, 122 bp, Homo sapiens
attatagcccattttataaattaagagtctgaggcccagagttatttgtcccaagtttttcgggccagttattgaaagagatgggattgaaaccactaccttttgcatatgacttaattctt

SEQ ID NO: 243579 - DNA, 122 bp, Homo sapiens
cagccctgaaaaggagggacaggtgcctgtcacctccacgcagcaccggtgacaccatcgcgatccctggctttgctcccggcactccccacttgcacgcagcatctccagagccagaagag

SEQ ID NO: 243580 - DNA, 122 bp, Homo sapiens
atggttaattttctgtgatgcaaatttcacctcaattaaaaaaaaaacagtggcaaagtacgctttgcgcatctttatcttctgctaggacctctcctgtgtggcatccaacatttctttgc

SEQ ID NO: 243581 - DNA, 122 bp, Homo sapiens
cttcccatcttccagtctctttccattgcaagtcacaatctgggtctcagggattatacccgtcttagtctcgatcattgctttcacttgtgccactgagctggaccttcgcacctggagga

SEQ ID NO: 243582 - DNA, 122 bp, Homo sapiens
gggccatggcccttctgcccgggccctggccacaatgacctctttgccctgccccctccccggccgggacgcctccaaagctgtcttcccagacctcgcccctgtcccgtcggtagcggctg

SEQ ID NO: 243583 - DNA, 122 bp, Homo sapiens
aggaccaggacggcctccttggcaaggagctgggattcgatgcctccgaggtggagttgacgagaaacaatgaattgattgcagttggaaaaggcagctcactgaagcggctccctggtaag

SEQ ID NO: 243584 - DNA, 122 bp, Homo sapiens
agcaaaggtgtgcgaacaaaccaaattaggaaaactgcagagtaccttagcctttctagacgctgcaagagccttctctcctccctgtccaaatactaatcctgccgggagtgaggcctgga

SEQ ID NO: 243585 - DNA, 122 bp, Homo sapiens
ccctcccgcctgttaaagatcactgtgtctgtgttccgatgtgaggcacctctctgtacacgcgtgaacgttgaagctgctgagggacacactaacgttcaacataaacgaaacgcccgaag

SEQ ID NO: 243586 - DNA, 122 bp, Homo sapiens
tgggccgcaggaggagaggccataaagcgacaggcgcagaaaatggccaagccccgaccccgcttcaggcagatcttgcatctcccctgaccccaactcattttttctgtctttattattat

SEQ ID NO: 243587 - DNA, 122 bp, Homo sapiens
gaggggccggagtattgggacctacagacactgggcgccaaggcccaggcacagactgaccgagtgaacctgcggaccctgctccgctactacaaccagagcgaggcgggtgagtgaccccg

SEQ ID NO: 243588 - DNA, 122 bp, Homo sapiens
agtcctgcgccatgctttttctcaggatcagctaaggagggcgtttagttttcaagcgcccggaagcccgggaaaggggattgtgcttttgtttcttgacgggaggaagtttcgagagaagg

SEQ ID NO: 243589 - DNA, 122 bp, Homo sapiens
gggtgctccgagctcgtgctgcggtcccactgtgcgccctgtcgccgccaccgcggaaaacgtcttgcacgtgcgaggggcatttcaggagtttcctgtctgtcaggtgagaaggcggagat

SEQ ID NO: 243590 - DNA, 122 bp, Homo sapiens
cagtaactctgtacgcccggtgtgtccttgtttcagtggtctcggtagcctcctgtgcctcgagtccctgcctgtctcggtctctcgctccaccgggctttccgagaacctcagtttctcca

SEQ ID NO: 243591 - DNA, 122 bp, Homo sapiens
ttgacgttgtttattgtgcgacattgtgtacaaatgtcctttataaaagtaaaggccactcgcacccccttttacgctgtactctgaattttggctttcgtgagtttggggaggcattggca

SEQ ID NO: 243592 - DNA, 122 bp, Homo sapiens
ccggggctccaaagcagcacacctgctcacacagagctcacctctccagcacggctcactcgcctcagctgcaggcctggccctcttagctgcagggcacgtacaaggccccagggtagtgc

SEQ ID NO: 243593 - DNA, 122 bp, Homo sapiens
tttgggaaaacacgggctcttcctgcccaaatctcgccctctagggagcggctctccctccgccgcggtctacacagctgtgcttacagcctgcaccgctggctgggtgcccgccacgcaca

SEQ ID NO: 243594 - DNA, 122 bp, Homo sapiens
taagctaggccaggagggggttcagctccccataacaaggcaggggtggccctttgtgtccggcagcatggtagcccccccgcaggagctccggctaccctttgtgtttgaccttgtggaag

SEQ ID NO: 243595 - DNA, 122 bp, Homo sapiens
gctgcagctgatgaggacgagagagcagtctccaatctgtctcctcaactggctaaaattcggggtttatagagcagggaagaaatgtgactatgtgtgggaaaagaggaattagcgagggt

SEQ ID NO: 243596 - DNA, 122 bp, Homo sapiens
ggtcggcgtgaccgggcggggcctccgccagaggtagacggggtcgcccacggcagggcgcggagcctctgcagcccgaccctcccggcaggcgagccccgcagcctgccagccccggccca

SEQ ID NO: 243597 - DNA, 122 bp, Homo sapiens
cgggtggcccctacccctggcgacccctcacgcacacagcctctcccccacccccacccgcgcacgcacacatgcagataacagccccgacccccggccagagccgcagagtccctgggcca

SEQ ID NO: 243598 - DNA, 122 bp, Homo sapiens
acatgactattaggaaacatccttttctgaatatattgcatgtcattgtaacagaaaaatcggctgtgctggtggaaatggcttttatgcagatgagaattaatgagcctcattgtctccct

SEQ ID NO: 243599 - DNA, 122 bp, Homo sapiens
ggcaaggtggtcatcacagacttcgggctgtttgggatctcaggcgtggtccgagagggacggtgagttggtcttgagtgtctgggtgggttgtgggtgctggatggggaagagcagggctg

SEQ ID NO: 243600 - DNA, 122 bp, Homo sapiens
tcttttgttaagaaagaaacatctctgtgaaaactgaagtttgttctgcgctatccttttcgggcatcaaagatgaaaaagaaataaaattttacacatgaatcacacttaaagtttcgttt

SEQ ID NO: 243601 - DNA, 122 bp, Homo sapiens
tgggagtggaaattagggacccgagctcactggtgacgtagatctcatgtgaccaggagtcgacgtgtgcagaagtcctggtaatctggtccttgttcccgtctggataccagcttccttca

SEQ ID NO: 243602 - DNA, 122 bp, Homo sapiens
tgtgcgggccccggtggtccctcttagccccgtgaccacgcctgctccagcctcctctcccgtgcccgcccctgggatatctgagcaagctgaggatgcaacttgcagcctttctcccggat

SEQ ID NO: 243603 - DNA, 122 bp, Homo sapiens
agcggcgcgaggtccgcttggcatctacaacaatcgaggggctagtccagaagttcaaggcggggttacaggttggggaggaactgttaaactgtggactttttctcacctgttggaataag

SEQ ID NO: 243604 - DNA, 122 bp, Homo sapiens
gacacgacatcattagcagctgcagacagtccttgttccggctgaataagagagcacagacggacttggcactgggcgcacaccaggagggtccgaggcggggccgcggggacctgctcttg

SEQ ID NO: 243605 - DNA, 122 bp, Homo sapiens
tatcttgtccacatgacccctctgagaagtatatcagtgaccctgttttacaggttagaacgccaggactcacagtggttgaataccttgagcagttgacacttgaaaccaaatttgtccag

SEQ ID NO: 243606 - DNA, 122 bp, Homo sapiens
aggcgctcaccttttcggatggggttttctgccttcttcctgttggaccttgggactggccggtcccctctaggggaatcggaggcagaggcgcctcccggagtcccctgcggggcgctctg

SEQ ID NO: 243607 - DNA, 122 bp, Homo sapiens
cacgcggctgccccgcgcgcgcccccgcctcggtgcgcgctcctcgctttcgcggctgggcgcctcgcgcctgtcccgcccgactcgtgcctcttctgagccgcagccccagccccagcccc

SEQ ID NO: 243608 - DNA, 122 bp, Homo sapiens
gccagactactatgttccagcagcgctgacctcgtgcactgcaggtacacaccgagtgtccgctgaacagcatgctttccacagggcatgggagtaggggagtctgtaacctgaaaccaact

SEQ ID NO: 243609 - DNA, 122 bp, Homo sapiens
gaaaaaaaatggccaccagagggtgctgtaccaaaatccaatggaacttctgcgaattcccgacagagtgctcacgtgttgaagacgtagcatgggccagtctcaaagctttcctggttttc

SEQ ID NO: 243610 - DNA, 122 bp, Homo sapiens
cgcccttgctacactggctgattgttgtgcagccggcgccatgtctgtgagcgagatcttcgtggagctgcagggctttttggctgccgagcaggacatccgagaggcgagccccctccctt

SEQ ID NO: 243611 - DNA, 122 bp, Homo sapiens
gtccccatccctcccagaaagtcacaaagcctcaggaagtgagcgctgggtgggagtatacggctcattaagttcaccacccccaagtccctgctgcagagagggaaactaaggcccagcag

SEQ ID NO: 243612 - DNA, 122 bp, Homo sapiens
gcaaatcaatccgttacacgcagtagcgagttgactccatcagcccgtttatttggttagcgatggttatattgactctgagtattcccacctcctttcttttaacatttttttttttattt

SEQ ID NO: 243613 - DNA, 122 bp, Homo sapiens
tacctagagaaggtatttaggacttttgaataaattcaagactttgctcactagtcagaccgtaatttttagaaggaataggagcatcctgactagaagcgtgataaaacctggctatccag

SEQ ID NO: 243614 - DNA, 122 bp, Homo sapiens
tagcaccatgcaatgttgaggtgcctctgcagcctgactggcccccacgcaggggccctccgaagctggagtgcacacttgctaaagcttctgtactcttgaggggggacccctgcaaggga

SEQ ID NO: 243615 - DNA, 122 bp, Homo sapiens
gcgggtgacccttgtgcttcatcacctcccaccagacgtccaggaagaaggccacgtcttcggcagaagtgtcaacggtcacatgttccagaaagcgctctagttctgcatggcagatggtg

SEQ ID NO: 243616 - DNA, 122 bp, Homo sapiens
gctgcccccaccgacaggactcggagctggcccgggagcttctgacgtagcaggggggtgcgtgggaggggagggggggccacggtgcgtccccttcccagccccaccctccacccctcagc

SEQ ID NO: 243617 - DNA, 122 bp, Homo sapiens
ggagcgggggcagcaagttgggatgcgcgctacttaaggtcctgctgcgtgagccattgacgtgtttggagctggagacggcctgggtgctggcgaagcggaggccggaggtgagtggttcc

SEQ ID NO: 243618 - DNA, 122 bp, Homo sapiens
cccgggaaggagtagggaggccgggccgtgcgcggaggagtggccgctgggttggaaacccggcccggcagggagcggggaaggcgcgctttcccggaggtcggcgcggggccggggccggg

SEQ ID NO: 243619 - DNA, 122 bp, Homo sapiens
gcacatagtgtgtgtcatgagcacgtgtgttgcatgtgtacatgcatgtggtgtgtgtatcgggcacatgtgcataatgcatgtgcatgcacatagtgtgttgtgagcatgtgtgttgcatg

SEQ ID NO: 243620 - DNA, 122 bp, Homo sapiens
ttcctgcgggccaaagtcttcgtgaagcggtttgtgcgggccgtgctgagcgaggactctcgggcccgagtgggtgtggccacatacagcagggagctgctggtggcggtgcctgtggggga

SEQ ID NO: 243621 - DNA, 122 bp, Homo sapiens
ccggaagggaccaaggactgagggctgagcggcggcagcggagactccgttcgcagactccgtcccgccgccgccatttcccgccggttcggatgaggcctccccagccttgggacgccctg

SEQ ID NO: 243622 - DNA, 122 bp, Homo sapiens
agagagatacctggaacaggctgggttcttgtgggactgggaagagggtgtgtggccaagcgacgaataactttaaagagtgacgagcaggaagcaagatagtgggattctgatttatttaa

SEQ ID NO: 243623 - DNA, 122 bp, Homo sapiens
caataaaaaacgcctactgtgtcaggaactagccaataagaactggttctatagtaatgacgaatttttgatcagacattaggtggcactaaagaagtcaggacaacgactacgtagtgttc

SEQ ID NO: 243624 - DNA, 122 bp, Homo sapiens
ggcttttcccatgactcccacgagggcgttagcagaacctccctcatcttgagcaaatcacgtcctttcgcacaccagcacgcgggcacagatgaatcacgcagggggcttgagcaggccga

SEQ ID NO: 243625 - DNA, 122 bp, Homo sapiens
caaaaaaggcttttaacttctgcggtttaaagatatacaattcattttccacccctcaatcgaggcttgctgatgtgtctagctttatgaaactatttttgaaaaatgtttttaataaagtt

SEQ ID NO: 243626 - DNA, 122 bp, Homo sapiens
gtcagctgggcctgaattccaaaagggaggagggaataatgaggcatgtcctacctcccccgacaaggttccaaagttttcaggttaactttggagtgcagagtgtattcctttgtgtttcg

SEQ ID NO: 243627 - DNA, 122 bp, Homo sapiens
agctgaaacattgcctcattgtgttcccagattctgatactgcatcactggcttccagagcgcctgtgtgacgtcactggattccagtctctatatttgttcaccatcagtgcctcttactg

SEQ ID NO: 243628 - DNA, 122 bp, Homo sapiens
aggaagcccacgagcccaggcagggatctgtccttccacttgccctcctgaagggccctgcggctcccactggcccctgttatttacctgccagctggccaggccaggccaggtataccagg

SEQ ID NO: 243629 - DNA, 122 bp, Homo sapiens
tgaacaagaatgccctcgacatgtagatgtcacaattcaacagcattctaagggtttgctcgtgctcatgggtatctttaggacaggtggcttttaaggcctcaatatagatgtaacaccct

SEQ ID NO: 243630 - DNA, 122 bp, Homo sapiens
tccttctgtcactcctctgtggcctggagcggcctgctgtctcccggtcacgagccagcccgtgggcatcagcaccgcaagagcagggtccgtccatcttttgaggcacccccacccccgcc

SEQ ID NO: 243631 - DNA, 122 bp, Homo sapiens
cacgatcccggcgacctcatccatgagcttcatggtcacacctgcggagaaagggacatgcggcagatgagacacggaggcagaggagattatttcacaccctggaaacaagttacaactcg

SEQ ID NO: 243632 - DNA, 122 bp, Homo sapiens
tgcttttgcagttggggacaattgagcggacacacaagttaatcccgcactgatttgtttcggatccatctgcaggacgcctgatgcctcccccttggctgctgcagcggacacctgcctcc

SEQ ID NO: 243633 - DNA, 122 bp, Homo sapiens
gcatagcgactaggacctaacgcgcctgcgtaaagtttagagtttacctcacctcagacgcgactacgacctctctgcgcatgcccctttcgggaagcgcgttccaatcgaggtcgcaatcc

SEQ ID NO: 243634 - DNA, 122 bp, Homo sapiens
ggcagctcagcgggcgcgggcgggaggctcccggaacgcaggctgaggtcaggctgaccacgccgcctcctcagtcgccgtatcgcggggctggcggccagcgccttagaagagcctgctcc

SEQ ID NO: 243635 - DNA, 122 bp, Homo sapiens
cgcgcggcgtccggggagtggaaacgcccgggcgggctgactcagggtgagtttgcaggtcgcggggcgggaggggcgcgggtgacgcaccggccgggccgacttaggccgcgggggcgggg

SEQ ID NO: 243636 - DNA, 122 bp, Homo sapiens
aaagaaaagaaagaagggcttcttgcagctccgggctgtgttttttcctgcgcgccctggcgcagtccccggctcggaaaggcaggagcacgtgagcggtttgcagagcagcccggcccagc

SEQ ID NO: 243637 - DNA, 122 bp, Homo sapiens
ggcttaagacgctaagtgtatgacagttgtcacacagcacaggaaatgaatacatgtccccgatgtgtttttctggaaaacacgccttgcatttggcgtcctgtggccgctgcaaccagtga

SEQ ID NO: 243638 - DNA, 122 bp, Homo sapiens
tcccagagccgctttcccctggctcttggccggagacgggaagagcgatcagaggtgactcgcttttggggagcgcgtctagacgcagggttgtttgattcagcgctacctggcccgaggag

SEQ ID NO: 243639 - DNA, 122 bp, Homo sapiens
atagtcacagtattgttttattggtgaatagctgaaaaacagagggattaagtcatattccgggaaagagaattatagtttttatgcctcctgttgaataaatggtgtcctgattgcctggg

SEQ ID NO: 243640 - DNA, 122 bp, Homo sapiens
aactataattcagcccttctgtcgctctcctacataccaaaatattgctgtacacagctacgtttatggattctttatccatccttggctggaccgctaatgaaatacccacatgccattct

SEQ ID NO: 243641 - DNA, 122 bp, Homo sapiens
ggaagtcatgttgcactttgctttcctggcattttctctgaccagagcctagaagcaggacggccacagtctcaaggctcagtgaaggtgccccataaaagagctccgtgacagacatgggg

SEQ ID NO: 243642 - DNA, 122 bp, Homo sapiens
ctccctcgaggcttcatggctggcctggaatgtaagcacggatgaaaaaggggatgcaaacgagagaggcaagagttgtttcctttacagcttaggaaatttttcagagctctccttgtttc

SEQ ID NO: 243643 - DNA, 122 bp, Homo sapiens
gtaaatatggcatcaaaaaaatcacccagaaagaaagggattaatctgctcagcacgatgcggtcccctgctcaggtggtcagaccctgtgctcacgccaggtcactaccactaacacgcct

SEQ ID NO: 243644 - DNA, 122 bp, Homo sapiens
aaggcctctgtgttgtgtattacagtgaagctgagttagagctggactgcccggctctgccgcttaccagctgctgacctgtgctctatcttcctaatctgtgagatgggcatagtgatggg

SEQ ID NO: 243645 - DNA, 122 bp, Homo sapiens
cccgagataaagagtgggaggcccccaagcactgctttggtctccttagccttggtgcaccgccatcctatgctccccaatctctctgtaaggttcagattactgtctatcattaggataat

SEQ ID NO: 243646 - DNA, 122 bp, Homo sapiens
ccattctctcttcccaccgggaaagggaaagaatgcatgcacagatttctttcagggtggcggagacaccgagtggagcaatgacaggccctgttaggcccaggaatgaagaggaatggagt

SEQ ID NO: 243647 - DNA, 122 bp, Homo sapiens
ccaccatcacggccgcgtgcagtcggtccactgctgcgtgcgactgcgtgtccaccatcacggccgcgtgaagagtaggttcattccccaaaaatcctctgggtccgcctgcgcatccctct

SEQ ID NO: 243648 - DNA, 122 bp, Homo sapiens
cctagctaagcacttgtctgagtctggattcaaaccaggaggtcagaccctagagctgtgcgctaaccagtgcactgtcccgcctctgctggactttgtgtctcctgcctcctagtcctggc

SEQ ID NO: 243649 - DNA, 122 bp, Homo sapiens
ttcccccgttaccccccacccatcccaccccctccctcaccctgctcctcggtcctagcccgggctttttctaactggggtggccccgcccagaattcccgcccctgccctgccggccaatc

SEQ ID NO: 243650 - DNA, 122 bp, Homo sapiens
gcccggggagccccgcattctgcagtgtccgaaagattcgaaactccaaaagctccactgcgtgcctctgggaggggagggggcgcgccaggaaaggagtggaaaaaagtgggcgaggagga

SEQ ID NO: 243651 - DNA, 122 bp, Homo sapiens
aacgtcgtgatccggccgcctcggcctcccaagtgctgggattacaggcgttagccactgcgcccggccccagccaggcagttttaatcgagcgctcacaaccactgagacgcagtgaagca

SEQ ID NO: 243652 - DNA, 122 bp, Homo sapiens
aggacgcctgagagcttgaggccacacgaggctgtggagcggcgtgactcaaacgtggcgcgcatcagctcgcacacttccaaacctcgcgatagctactggccctgggcgagccgttggga

SEQ ID NO: 243653 - DNA, 122 bp, Homo sapiens
acacagagcaaagaacgagcttagtgaaatggagaagcagtagaggtaaataaaaatcctcgagctagaaagctctaagaaccgcttataaattcagttacctcctgaactccggccgatgg

SEQ ID NO: 243654 - DNA, 122 bp, Homo sapiens
aggctcttaagatgaagtgacttatccaaggtcacacagtgagtacaaacccaggtgtgccgccagagcctgaactgggaacccctgcgcggtaactgcctcgtggcgaaatcggggtgtcc

SEQ ID NO: 243655 - DNA, 122 bp, Homo sapiens
gcttaggctcagtgagggcaagttccaggcatttctggatgtgagccactttaccccagacgaggtgactgtgaggactgtggataacctgctggaggtgtctgcccggcacccccagcgcc

SEQ ID NO: 243656 - DNA, 122 bp, Homo sapiens
cctcccaaagtgctgggattacaggggtgagccgccgcgcccgaccatacattgcatttacgctcttgtacagagtagcatacagcacagagaagagctaaattccttacggtaacaagctc

SEQ ID NO: 243657 - DNA, 122 bp, Homo sapiens
gggacccctccaccgccagcaggcaggcggaacgtggcgtctggcgaatggcagggaagccgccctccatgacgctgagtcctcaggaccagtgcactagtggggacgttgtcgccccatct

SEQ ID NO: 243658 - DNA, 122 bp, Homo sapiens
gcctgcgtagccagcagtaccgaaccacgtagaaaagcagcagcagcaacagcaccaccccgaggacacccccgatcacagctcccagaacgaccccgtacctagttggcactaggaggggt

SEQ ID NO: 243659 - DNA, 122 bp, Homo sapiens
ggactaactgcaacctagcttaacaggaaaacaagactgaaaacccaacttaagagtatgcgcctgtaattatagctaagtcttggccaatcgcagtgtaacagaaactttgagaattacct

SEQ ID NO: 243660 - DNA, 122 bp, Homo sapiens
atgtttttctgaagggcaaccccggtgctcccgagatgggaggcaccctcccttctgacacgcatttattccatcttccggagataaggaggggacagggctggctcagcaaccccacaatc

SEQ ID NO: 243661 - DNA, 122 bp, Homo sapiens
gccccagagctctcagggaatcacctagatggaaaggccctggggagcagggccccaccccgactctccctctgaaagtaccccagtgctggtgggggtggggaggcacttcagccaccatc

SEQ ID NO: 243662 - DNA, 122 bp, Homo sapiens
cgcaaccccacctccgggaccaacgagaggactcttatgcccaaggcgcgtgagcgaagccggagactctagtactgagggggcaagaacggggcacagacactacgtcacgccggcggaaa

SEQ ID NO: 243663 - DNA, 122 bp, Homo sapiens
tttccactgtcatttctctttctggggtcagaaggatattaaaacaagattgggcactcccgcagccactggcttccttgcttccatctctctcacttccctttcccccctgcccccagcct

SEQ ID NO: 243664 - DNA, 122 bp, Homo sapiens
gtaatttttaattttttttcgtagaggcagggtctcacattatgttgcccagtctggcctcgagaactcctgggctcaagcaatcttcctgccttggcctcccaaagtggtgggattacagg

SEQ ID NO: 243665 - DNA, 122 bp, Homo sapiens
aaaacctaggcgcggctaaatgacgcaagaggcctcgcgcgcacgcgcagtgccgcaccacgtacaccccgcccccggggctctctcccgccgggttccggttcctttacaaggccccagtc

SEQ ID NO: 243666 - DNA, 122 bp, Homo sapiens
agcctttagagtttgtcatgaggccccaacctgtgcgcccacagataaaggcttcgtgtgcgtggcctggcctcggttctgtaatgacttttgcaccaacgtaatagctcctccgaactgag

SEQ ID NO: 243667 - DNA, 122 bp, Homo sapiens
ccgggagttgcggttcggcgccggcgcgagcgcgtttttgtggcgcctgccccgccccctcgctccaagcccgcctccccggccccgcccgccatggctcaaccttcatccgctcagaggca

SEQ ID NO: 243668 - DNA, 122 bp, Homo sapiens
atggggaaaatccagcattcatttctcacttactgtggtgggtctggactctggaaacaccgatgtctcctgctctcactggctgttgcatgtagtgtccttaagcttcttctgttatgctc

SEQ ID NO: 243669 - DNA, 122 bp, Homo sapiens
tcccagggttccgcccccgaatacgcagacctcgcgccgcagcctcttggattccggccgcgatgaggagcccgggttgtcgtcccaagcacttgcactgtcacccgcgcccatgggtacgc

SEQ ID NO: 243670 - DNA, 122 bp, Homo sapiens
atgccatctgcgatgccgaggaaggggctccagccaaagccacctgacagcaaatgctgacggcgagtagcagaggggcccaccaggaacgcgggatcttcggactccatgtccctcatgag

SEQ ID NO: 243671 - DNA, 122 bp, Homo sapiens
ctgattatacagacacacacacacaatccttctcttcatgtacatgtctgtgcacatgcacgcacaaatacatttgtaatctcactcattacctttacattttgtttatcagtatttaaaca

SEQ ID NO: 243672 - DNA, 122 bp, Homo sapiens
agggttcagaggtctcaaccccccggggtagaccactgcctttgttaaacattgcactttcggaaacagtagttcctccaataggcagaaccgcctccctctctgtatatctggatagccct

SEQ ID NO: 243673 - DNA, 122 bp, Homo sapiens
atacccatgtacctttgtgtattaagtacccacaacctccgaacttagccgtccctgtcccggcccgcccaactgctgccgccgcatctgcagaaaccactcgtgttgaggcctcggagcag

SEQ ID NO: 243674 - DNA, 122 bp, Homo sapiens
cgttaggtgagaggtcagcataaagtttactttcttatccatagcgaccatgtgggctgccgtttgggatataaaaacaatggcacgggcttatcttccagaaagtcctcttatgaatgtga

SEQ ID NO: 243675 - DNA, 122 bp, Homo sapiens
tcacaagctgcctggggaagaggcccgattgtcgccgcgcacatgcacccttccctcggccgcagctcccacctctgaggagctcagaccctgtggaacccagactagtgggtcgagggaaa

SEQ ID NO: 243676 - DNA, 122 bp, Homo sapiens
ggcaacgggggatgaggcctttctccaggacctcagaggtgctgccccggccaatggaagcgggtgggagagggcaggaccgggggtggggtggcttcgagtcaggtgcacacacctgctga

SEQ ID NO: 243677 - DNA, 122 bp, Homo sapiens
gtgtctgtgccagggacatgaggaccataacccagcagaaccagctgcccaaatgccatgcgacggtcaacactgaagacccaggacaacagcagctaacacctggaggcaacagggtgggc

SEQ ID NO: 243678 - DNA, 122 bp, Homo sapiens
agctccttcgctgtgaccgacggcctcacgcccagcagagccaccaccaacagctttctacgaatctcagtgcatagatctatggaagtcatctgacaaaagagcacacggagaggagtgag

SEQ ID NO: 243679 - DNA, 122 bp, Homo sapiens
cttaggtgatccacccgcctcggcctcccaaagtgctgggattacaggtgtaagccaccgcgcctggccgggaaatatctcttacagaaataaaggcagttggctgggtgtggtggctcacc

SEQ ID NO: 243680 - DNA, 122 bp, Homo sapiens
cgaaggcaagagagacagaaggaaccaatagtcgcccgagatggctcctggcggaagtcacgcccccaaactgtcaagcaaagcgcccggtggaaggggcccaggccggggggagggggctc

SEQ ID NO: 243681 - DNA, 122 bp, Homo sapiens
cctactctgacaagcgcggctgtaattaggctgcggggtcccgggctctccgcctcactccggcggataatgagataaagtgtcagagacacggcgagaacaaagagacagagactcgctgc

SEQ ID NO: 243682 - DNA, 122 bp, Homo sapiens
atttccagtgcagtggcccatgggtgccttcacaagtaatcaatatggaatgagcacctacggtgtgttgggccaggcaccaggcttgtcatgcacttattatctttctccattctttctgc

SEQ ID NO: 243683 - DNA, 122 bp, Homo sapiens
caaagatgactggaagtcagctctgccctttgtatcctcccagaaagcaggggagacagtcgtgtaaaccacaaacgattacagtgtgagatgtgctctactagaggtttgaatgaaaaagg

SEQ ID NO: 243684 - DNA, 122 bp, Homo sapiens
tgaggtgagagggaggtgaccgcggctgagggcagggggtcgctgcgaaccccggggttccgcggtggaggggtgctatactgggatgcaggcgcggcggggactggcagcaatcatgccct

SEQ ID NO: 243685 - DNA, 122 bp, Homo sapiens
gaggaagggaaagtaatacaaattcttgaacatcttttaactgctagccttttacatccacgactcattcagctgttgcaatacctctgaggtgagtgttactcttatccttaggatgagga

SEQ ID NO: 243686 - DNA, 122 bp, Homo sapiens
aagaagaagaaaccctcttcacagaaatggctgaaatggcagaaccaattaccaaaccctcggccttggattctgtctttggcactgccactctctctccctttgaaaacttcactcttgac

SEQ ID NO: 243687 - DNA, 122 bp, Homo sapiens
aaagcttctgagggaggaagaaaaggagaaatacgcagaaatggctcgagaatggagggccgctcagggaaaggaccctgggccctcagagaagcaggtaaagttaacgagagaagagccgc

SEQ ID NO: 243688 - DNA, 122 bp, Homo sapiens
caggtaaacagcctgatcaggaactgacgagcagttaaaagtgtgatccagagattgatgcggacaggcatttaccttaaatgtgaagtcttataatagccatttaaattgagaaagaaaga

SEQ ID NO: 243689 - DNA, 122 bp, Homo sapiens
gctcgccaggcaacttcaggcccagaatctcattgcttagagccctgggaaccaagaaggcgtctggggtctgcggtccagacccctccaactctccccaccccgggtcggtgtttctatgg

SEQ ID NO: 243690 - DNA, 122 bp, Homo sapiens
ggaatgtctttgatccttggtttcctcctctgtaaatggaatcctgtctggaagagtacccggaacatggcagcaccttttcattcaccgctttgtgccacttaggtgttggtgtttttccc

SEQ ID NO: 243691 - DNA, 122 bp, Homo sapiens
gtgttttcttgggaggagagagggcatggagtgtaggtggaaggcccagaaagagccaaacgatctagtcgtttttctaaagttctcagtaacaaccagttgtgacgtcttaagagagaaag

SEQ ID NO: 243692 - DNA, 122 bp, Homo sapiens
ttctaccctcacttcttcaacctgtgattcctaggtgattcctacaaggagacgtgatagcgtgcaagactcaactcccgtcttcaatgaacttacgtttcaatgagaatgtatgggtctat

SEQ ID NO: 243693 - DNA, 122 bp, Homo sapiens
caccctgttttcttccatatttactgaagctcagaagcagtattgggtctgcaactcatccgatgcaagtatttcatacacctactgtggtaagtaaaaccgcaaaacaaataattgtagca

SEQ ID NO: 243694 - DNA, 122 bp, Homo sapiens
gtctgaaatcacagtttgggcagagccacacttcccctgaaggctctaggggaggactttcgcttgctttttcatccaggcgttcattggcttgtggctgcctccctttaatctctgcctct

SEQ ID NO: 243695 - DNA, 122 bp, Homo sapiens
cctgcaatgtacatgtactcatgagaagtgactttcttagacacctattcaccaccataacgaacaatcgagaaattccaacactgtgaatttttcactgtggacccagaattcacatcaat

SEQ ID NO: 243696 - DNA, 122 bp, Homo sapiens
aatttcatgttcatcattgttctctccgtgcagctaggtatgccgcaaggtctcgggttccggagaactggttgcagatgctatgggaagatgggtccaggttggtagaggacacttcaggg

SEQ ID NO: 243697 - DNA, 122 bp, Homo sapiens
cgtgagaaccctccagggactgcaccacgcgcccacagtctctctgcgcatgctcacacgcgacctccccacaaagctactccgcgggcctgcctggctactgagtcgcgaaaatatatcgt

SEQ ID NO: 243698 - DNA, 122 bp, Homo sapiens
gcctgggcgggactagaggcccgggaggagtctgcgcagccgcagaagggcttgcagtggcgcctgccgggcgctgagggccgcgggagccgccgggttagccccaccccgaggggtcaggg

SEQ ID NO: 243699 - DNA, 122 bp, Homo sapiens
ccgcagcatctgcgtttacaaaacacactagggtactagggagccagtctgtgaccgcaacgcagacgtgcccactgaaatcggtgtcccacttatacctgggaccacggaatccccagatg

SEQ ID NO: 243700 - DNA, 122 bp, Homo sapiens
gagggtatctgggaagcccagggcagggtggctcctagaaatgaggtcatgcctgaggtacgcaggagccaggctcacctgccatgctctcctaacatcatgtttccctgggcaaagcaggt

SEQ ID NO: 243701 - DNA, 122 bp, Homo sapiens
ggatgccgcgcgaaaactcacgaggccacttaacacaggctgcgtgggaaacaggggctccgcgactgcgctcagattaacggaaaaagacacccctctagagtccggcagcagcgggcggg

SEQ ID NO: 243702 - DNA, 122 bp, Homo sapiens
acgggagttccccggagaaggatcctgcagcccgagtcccggtgagtgcgagaggacccgcgccccctgtcacccctcacttctcctgagtcccaagtaaggaacggagccaaccctgggga

SEQ ID NO: 243703 - DNA, 122 bp, Homo sapiens
ttcattgacacaattctacaaggaagtcgtgtatgaacttacatgaagactcctaagaagcgtcttaatgcggaaaacatttattgagaacgtgctgtgtgccaggcacatagtgaaaccca

SEQ ID NO: 243704 - DNA, 122 bp, Homo sapiens
cgccaggaagctcttcccataggaagcctcagggtgagtgggcgccctcggagataaacacggagcccaagcacacgagctccggcctaagtgaggataaatctccatgacaaatgtctcct

SEQ ID NO: 243705 - DNA, 122 bp, Homo sapiens
gcacctcgatgcaagacccggtgcgcgagggtcgcggcatcccgcccccgccgcagaccgcgccgcctcccccgcccgcgccctactacttcgactcggggccgcccccggccttctcgccg

SEQ ID NO: 243706 - DNA, 122 bp, Homo sapiens
ggaggcttctaaaatgccaaatatagcccagtttctgcaacttgcagggtccccagccctcgggagaaagtccaaacccctgacaaagcctgtgaagccccctgaggccctgtgggtctggg

SEQ ID NO: 243707 - DNA, 122 bp, Homo sapiens
ctgggcgcacctgggtccggctccagagtctgggtctccgtgcagccttaggcctccttgcgctgggcgcacccgggtccgggctccggagtctgggtctgcgtgaagccttaggtctccgt

SEQ ID NO: 243708 - DNA, 122 bp, Homo sapiens
aaccggatcgaacgggctcattcgcagccatagggtgagcggcaggcagatcttacaagccgtgcaggccggaaggaaaagggttgtggggctcattcttagtcatagggtgagcggcaggc

SEQ ID NO: 243709 - DNA, 122 bp, Homo sapiens
ccgttacctgtgggtctgcccttcctcccctgccggggctacaggggtcgaggggctgggcgggcgggccggtccagggcgcaggagccgcccattaattgcgcggggacggccctgagctc

SEQ ID NO: 243710 - DNA, 122 bp, Homo sapiens
gctggcagtgtgcatgctcacccataggtgatgccatctagggcagtgatacagccagctcgtctcccctcagtcctgaatgggggacagagttagtggatattgcagctggttggagaaag

SEQ ID NO: 243711 - DNA, 122 bp, Homo sapiens
ataaaggatagcctttggagggtgacgggcaaggacgtacgtaccgcgaacggaatggggcgggggccgaggacgccgagggaggggcgggcccaagtgtgaagggagtctgggcgatacca

SEQ ID NO: 243712 - DNA, 122 bp, Homo sapiens
ccttcacagaaccagcatcttcactcaccgtcggacgtcctaccgctcggcttaccttcccggctcatgcagcgatccacggaggccgggctaccgatgaaacctcacccaccccagagctc

SEQ ID NO: 243713 - DNA, 122 bp, Homo sapiens
gaaggtgactggatggtcccgttgcgtggcatctcgtcaaccaatcacagtgggcgtctgcgggcctaagcgccccttgtggcccagctcggagaaagttacacagatagatgcctcacggg

SEQ ID NO: 243714 - DNA, 122 bp, Homo sapiens
aaaaagtctttctgcgaaacatggacggagcctggaacatgcagggccacgcgtgagggacgggccgaagtcagggatgtggggccaggagccgccgtgtggggtggacccctgccagaaaa

SEQ ID NO: 243715 - DNA, 122 bp, Homo sapiens
gacacagtgaagggcctgcacgtttgtccccagcgcctggtttctcccttcccgcaggagcgcctccccatgaaggggtccatccccaggaggccactcacctggagaaatccctgtctccc

SEQ ID NO: 243716 - DNA, 122 bp, Homo sapiens
actgctggtctgcggggagctctaaatatgaatctgctacatcaccttcacttttgaattcggctctgatgttccaaatgttcttggccgttccttcgtgtttctcctgtacgaatttcagc

SEQ ID NO: 243717 - DNA, 122 bp, Homo sapiens
caccttgcccgggcctctgtcccctccagccgcgctccaccggcgccctcgccccgctcgcggctgctgggtggcttgctgcttcgttctggtagacttgcgattttgccttgtcctccctc

SEQ ID NO: 243718 - DNA, 122 bp, Homo sapiens
tgggcctgcacttctcaccactggccctgactcctcccttagccaactccaggacacagccggccaggcctagtgtggtttgcagaagccactgcctaatcagaatatggatgattttcctg

SEQ ID NO: 243719 - DNA, 122 bp, Homo sapiens
cctccgctgctttatcaggtattgcttccttctattttttgctctttgtggggtctgactcggaatagtggcacttccttctcggctagattatctgaaactgttgtcggttcttgagatga

SEQ ID NO: 243720 - DNA, 122 bp, Homo sapiens
tcagagacccagtgccagcctgggccgccggggcttgagatgagcgctcttcctccctcccgaccccagcctgatgccccaaagccctccagaggaaatcaaagctggcgagagccacgcgg

SEQ ID NO: 243721 - DNA, 122 bp, Homo sapiens
ttttaactttgggatgtggtgtgaggagtagggtgagtggggccggggcgggagtccaggcgaggcccaggcgctgcgtctctccaaggctggctgcccgttagctcccaggcatgctggcc

SEQ ID NO: 243722 - DNA, 122 bp, Homo sapiens
atatctgctgagttcctatcaagcaccattcttggcactaaggatataacagttaacaagcggaagctaccagcagctgaccctcaacatttccaggtgactttggtgtgtgcatatgtgag

SEQ ID NO: 243723 - DNA, 122 bp, Homo sapiens
ccgaagatgaaatagatgccaaattagatggacattgaagcaacactcagcgttgcctagcgttaaaggcactgcagagaaatgaggtgcagaggtggcccctctgagtatttatttgactc

SEQ ID NO: 243724 - DNA, 122 bp, Homo sapiens
tttctgcacacccctcctcccaccgggacacccctcctccttgctcccccattcctgctccggctgggggagggaagctggcatcacacagacacccgtgctccatttgttttgtgatctga

SEQ ID NO: 243725 - DNA, 122 bp, Homo sapiens
ccaaggcctgggagggagaggaggattggccgtaagtgcttcatggagttggctgtccttcggcgaaatattttggaaatagcagaatggtgcttgcacaacattgtaaatttactaaacgc

SEQ ID NO: 243726 - DNA, 122 bp, Homo sapiens
cctccttcactggcagctgtgacagtgacctgctcaagttcaaccagctcaaggtgaggccgggcttcacccagatcgccggggtggcggcaggacctgagaccggggctcacctctccccc

SEQ ID NO: 243727 - DNA, 122 bp, Homo sapiens
tgttctactccaagaagtcgcagcgacccgagcggaagaccttccaggtcaagctggagacgcgccagatcacgtggagccggggcgccgacaagatcgagggggccagtaagtgcgcccac

SEQ ID NO: 243728 - DNA, 122 bp, Homo sapiens
tttctaggtcgtaggcctgctggtctgagctccgacagcggcgccagcggtggcagcagtcgccgacaggggtggggcgcatgcgcacagttgctaggcaacggcggccgggcgccgcggcg

SEQ ID NO: 243729 - DNA, 122 bp, Homo sapiens
gggattggtccagtaaggatatgggttatttccataccagacctctccctaagggagccccgtggccccaaagacctaataaaaacaacaacaaaatcgaaggtacagtgctagtgattgga

SEQ ID NO: 243730 - DNA, 122 bp, Homo sapiens
cccccgcataccgcttctcatccctgtaacagaatttgccaactagaagcacctggtcagcgagatgacatgggaggggtcagggcaagggcaacctggagctagctccctatgaggggtcg

SEQ ID NO: 243731 - DNA, 122 bp, Homo sapiens
ccccagtcagcggctcccgctgcagcttgcttagcccagcctcccgctctcccgcccccccggctctaaaacgagccccccacgcctggcaggagctatataaggcggcgtgaggcaggcga

SEQ ID NO: 243732 - DNA, 122 bp, Homo sapiens
tgtgtctgtagcctccatagaaccacccagaatgccaggcacacaggtggttaataccctcgatggtaacgttgccagctctcagcttgagcacaaagaacacatcaagccttatgctaagt

SEQ ID NO: 243733 - DNA, 122 bp, Homo sapiens
aagccgacgctccctgaccgcgctgcgtctgtctgtcccgcgggtctggagatcttcaaacgatggaacaccggctttgcccttctgagggtctccatcccttggcattctgcctgcgcccc

SEQ ID NO: 243734 - DNA, 122 bp, Homo sapiens
gggagccaaccgacaaagggaacgatcatgcctaccgttccaattgttatgaggcttaaacggtatatcgcactaagcttgggacaaaacaggtgctcaatgaggtgcacgccccccacgtt

SEQ ID NO: 243735 - DNA, 122 bp, Homo sapiens
tctccctcttcaggcccccatcccacagcaggtcgacaagttctccctgcctggcgatggcggattttatcgtattcataaactggacggcatcttcatctgcccctctggtcatggaaggc

SEQ ID NO: 243736 - DNA, 122 bp, Homo sapiens
acggcatggcacctgcagcatggggttcacgttctggaaggttctggctgactcccaccccgcccttcactggccaagtaaacttgcagaagttacttaacccttgacctagaagagcctcc

SEQ ID NO: 243737 - DNA, 122 bp, Homo sapiens
cgcgcaggactcgagggcttctagccaccgtccccgccagcgccgcgccccgccacagggcggcatgagcccacccgcggccgcagccctagcgccctgctcctccgcctgggcggcccggc

SEQ ID NO: 243738 - DNA, 122 bp, Homo sapiens
tggctgccttcccgaggggcagggctcgggactgcagcctgccatgcctgagtcttcccccgcctccgtgggttcctgtgcagccctggcctccccgacaagccccgccccctgctccacgg

SEQ ID NO: 243739 - DNA, 122 bp, Homo sapiens
tttttaccacaacgatgatgttttgctgtcagggcctgcggtcatcctggtcatggtctccgggtgctcaccctcgacggctcgctctttccttgtcttcagttccaaaccaggcgacgtga

SEQ ID NO: 243740 - DNA, 122 bp, Homo sapiens
tctcctaactctaagcagactgcagtttcatgcacatcataagggcacagccactgtcaccgattctatcagcagaaaagcaaacaggcaggaaaccacaattaatccacaattcacaatgc

SEQ ID NO: 243741 - DNA, 122 bp, Homo sapiens
cagggcagttgggcagcgaggtagtcgggaaagagcagggggagcccagcggctccgttgcgccctctgtcggccgccagcctccattgcacgcggcgccgcccacctgcgcactgggaccc

SEQ ID NO: 243742 - DNA, 122 bp, Homo sapiens
agaatgaccacgtggatgtggggaggaggctgggggagctctgcgtcgatgggatgggaccgtcgaggccagctgggaagaggccccactcacatgactcattcatgtgggtcacagccttc

SEQ ID NO: 243743 - DNA, 122 bp, Homo sapiens
caatgggaactggtggggagggtggccaggaggagctgcgtgcacctctaccgagagggacgttgtaaccctgctccgcggtggagggagctgtggctccagctagaagggagtagctattc

SEQ ID NO: 243744 - DNA, 122 bp, Homo sapiens
tcgccgtcggggggtacgggccagaagccttggcctccctctgtccagcacaagccctgtcgtccgtgggccgtcttggctcaagcctcggtccggcctgtattcagtggcgaaactggccg

SEQ ID NO: 243745 - DNA, 122 bp, Homo sapiens
cctgatacctggatgaaaagagataaggatacatgacagttcttcaagtaggtcacagaacgtttgagttgggaggaaatggacaaagctttttacatcactgccatcccctcccagtcatc

SEQ ID NO: 243746 - DNA, 122 bp, Homo sapiens
ctcggttcacacgaccatccagaaacctcaaattcagtccatgcttcttgttttgggtctcggggctgggataaggcgggctgaccaccgcggggcatgtaggtagtttccgtggtgctggg

SEQ ID NO: 243747 - DNA, 122 bp, Homo sapiens
tacctggggtggaccaagcacaggtcagccccctccccttggcgtcgggtcctactcgagcgccccgccccacatccaccaagagaggctgagctcagcagagtcgtcccctcccccgccgc

SEQ ID NO: 243748 - DNA, 122 bp, Homo sapiens
ctgtatactctttttgtttcgatttctcagcttctcctcttttccagttgtgccagcagacgatccgtggatccattttattttccctgctaggagttgctgtacataacactgggtaagga

SEQ ID NO: 243749 - DNA, 122 bp, Homo sapiens
ggtcctctctttgcagggctggccattctaatgcctgacctcaggtgcagaccagtgttccgttgcgcgggactcctgacctcgaggaggtttagagaaaacaatggtgttctctgtgtacc

SEQ ID NO: 243750 - DNA, 122 bp, Homo sapiens
attcgagtgtgctgacctctaggggggttagtccagtgcatggtctagaattgctcaaatcggccttttgaaaaaatgaatcatgtacaatgataaaggtgtggacaggaccacaagtaacg

SEQ ID NO: 243751 - DNA, 122 bp, Homo sapiens
tcccctgcagcaggtctcagtcaaccttaatagatctattaatagaaagaggctggactgcgcaagggcagggggactagcctggctaaaagcaaaataaaacacatcaacagacacactct

SEQ ID NO: 243752 - DNA, 122 bp, Homo sapiens
cagctgtgcatgtttcacatacagtgtggggacattaacatgccctccaggactctcttacgtgtactcatggcaatgggtgtgatcagggttttcctatttaaaaagttaatcttatgttt

SEQ ID NO: 243753 - DNA, 122 bp, Homo sapiens
tccacacgcgcccacacacacacacacacacagacgtgtctcacaccacagcagccgcctcgggggagtcacagcccacgcatccccaacactgcggtcgcgctcacttctctttccacgcc

SEQ ID NO: 243754 - DNA, 122 bp, Homo sapiens
gattgctcatttcttcactaaggtacacatttatcgggcgtgtcctaatgtcaaggccttcgcactgaggatgaatgcggctcgctccagcattctcagcccggatgacgggggcgggggaa

SEQ ID NO: 243755 - DNA, 122 bp, Homo sapiens
tcttcgctgcctgcctggccgcccttggccgggcgcgatgacgttaacgctcttccttggcgttctcacactgtggacccagggatggctccagctccttagagttttgcccagagaggaaa

SEQ ID NO: 243756 - DNA, 122 bp, Homo sapiens
aatgaagtccagaaaggggaagtcaccattagattgtgaacttcttagtatctgttcggtcgacaagtatttaggtccttgcagtattctcaggactagggaaaaaatagcaaacagaaaga

SEQ ID NO: 243757 - DNA, 122 bp, Homo sapiens
cttccaaggaggccatggcggaactgagccagatgccggaagcggaattacgtaatgtggcgcggaaaaggacgggtcggaccgtaccaaattcggaagcgggggatgacctgtgtgattga

SEQ ID NO: 243758 - DNA, 122 bp, Homo sapiens
gcccctatctcaggtgagcctgtgagccagcagagagacctctgggagggagggaaggtgcggtcccctgaaccccaaccagcctgcctttgagtcccaagacacccccacccccatggaat

SEQ ID NO: 243759 - DNA, 122 bp, Homo sapiens
cccgccaggcccgtgagcccgcttcaggaggagcgcatacccggctccgacctgcagaaccgccaggggatagagtgcggtctgtgataattaacacagaaaattaacacatcttattctag

SEQ ID NO: 243760 - DNA, 122 bp, Homo sapiens
aatgtttgacaaatgcataaacaaatgaaggaataaatggcaagcattctttgcatttttcgatctattgcaccactataggagccgtgtaggacaatatgtctgtattaaaatatttcttc

SEQ ID NO: 243761 - DNA, 122 bp, Homo sapiens
ctcggccccgcccatccactgaggggtgtgggtaggggcgtggcccgttcccttgctggtcggcgcccggaaggcgtccgcgtcagccggagctcgacgcggtgacggtgtgcgtcgacgta

SEQ ID NO: 243762 - DNA, 122 bp, Homo sapiens
tctcatctctattttaggcattctccttcaaccagcctaaaagctaaaggtgcagctatacgcagaatagccaagagctccaaagtaatttgtcctggggcgtgtgtgtaaatctataaaat

SEQ ID NO: 243763 - DNA, 122 bp, Homo sapiens
gggacccggggtgccgtcccgggtccgacggggctggggtcggtggagctgggggtccggcggggcagcccagaggcccacaggcccttttgtgtcacctgcacgggccgcgggcggggaga

SEQ ID NO: 243764 - DNA, 122 bp, Homo sapiens
acatgttttcaaggttcatccaagttgtagcatggatcagtgcttcataccactgcacttcggcctgggcaacaatgtgagaccctgtctcaaaagtaaaaaaaagaaaagaaaaagtcagg

SEQ ID NO: 243765 - DNA, 122 bp, Homo sapiens
gccgccgccgccgccgccgccgccgccgccgccgctgccgggggaggggcggccgccgcccgcctgcgctcagagactcacgcagccccagtcccgccagtccgccaacacagtagtgccgg

SEQ ID NO: 243766 - DNA, 122 bp, Homo sapiens
tgattggcgcccaggttggggagtcgccgccccgcgcttatgtcagagtgcgtgcagtcccggcccacctcgcctttgaacttcgccgcttttggctctcgttcaccagcctccccgcattc

SEQ ID NO: 243767 - DNA, 122 bp, Homo sapiens
agaggcaaggatccgcttctggtcgccactggttctgtgtacagagcgtcccctgtggtccgcaccccacaagggctccaggggcagaaacggggaggggccaggtcggggttccccaccgg

SEQ ID NO: 243768 - DNA, 122 bp, Homo sapiens
gcgtctcctcctcctgtctcctccctctcccctcccggtcctcgcccgcggcctctgcggcgccagagacccagccgactcagccgctcgcgcccaggcccgcccaccgcgccgcgcgtggc

SEQ ID NO: 243769 - DNA, 122 bp, Homo sapiens
ttctgctaaatcaggagtgtgggaaatatgcccaccattgttgtgtcaggaattcaggatcgaaggaaaaaatagagaatgtccaagttttgtcatatgaagtgggtaattaaacctaaaag

SEQ ID NO: 243770 - DNA, 122 bp, Homo sapiens
aagtgagtccctgccgggacctggcgctcgctcgctccctccctccctccctccgcgggtcgccggctgctttgtctccaaaggctcttttcagggccacttaaccccgttagtgaaataag

SEQ ID NO: 243771 - DNA, 122 bp, Homo sapiens
cgagaggaggctgcggctcaaggccattttcaaatctcattggcttggttgtcatgtggtcggcagaggcatccacaattacacggggaatgttttcctagagatgtcagcctacaaaggac

SEQ ID NO: 243772 - DNA, 122 bp, Homo sapiens
gcaaggcaggcagacgagccagtcacatggggcagtcgagctgcctgcgtgaatgctaggcgcgggacaatggcaactccgggacaaagtgcagggagactcctgaagagataagagggaag

SEQ ID NO: 243773 - DNA, 122 bp, Homo sapiens
agggcaacaatttgtttcttgtactcattatcatttatgtatttacaccacacacaatgccgtgcgtgtatacacacgcaatgtttatccatgtgcatacacaacgcaacatatacatccac

SEQ ID NO: 243774 - DNA, 122 bp, Homo sapiens
agcaccgacaaggggcaccgacatggggatgctcactattccagcactgacaaggggcaccgatacggggacgcccactctaccagcaccgacacggggacgctcactattgcagcaccgac

SEQ ID NO: 243775 - DNA, 122 bp, Homo sapiens
caccgggctgacagctcctccaagtgatgcttgattcccagttctctagccgagccctgccggctgggccctggtgaccacactgttcctcgtgagcccctctgtcccctatcccagggctg

SEQ ID NO: 243776 - DNA, 122 bp, Homo sapiens
acagctgagcgtgtgcagagggagcccctcaggctttctctctgtctgcctccatcttaccgtatccagagaccacactaaaatggtggctgacgtggagacagaggaagctcctttctagt

SEQ ID NO: 243777 - DNA, 122 bp, Homo sapiens
aatccccaatagtaggaatttagtttgataaaattaaactaagataaacgagcaagcaggcgcaaatggcgaattccttaggacgaacttctcaaggcaaagacaattgcctgaaagtgaat

SEQ ID NO: 243778 - DNA, 122 bp, Homo sapiens
gacccgcggcagaggctgctcgggggtcagacctggcgctggcgtttctttctgctcttccgcctgtgttcgggtagccacaggcttcccagaggcctggagctggtcgcccatatgcgcgt

SEQ ID NO: 243779 - DNA, 122 bp, Homo sapiens
tgcgcaggcatgtgtgaggtgtctacaggcgtgtgtgaggtatctacacgtgcgcacaggcgtgtgtgggttctgcaggtggggggtctgcacgtgtgcacgcaggcatgtacggggtctgt

SEQ ID NO: 243780 - DNA, 122 bp, Homo sapiens
tgactttgtgatccgcccgcctcggcctcccaaagtgctgggattacaggcgtgagccaccgtttcaggccgagaaaagggatttaaaatgagaagcttgaatcttattgaacataattgta

SEQ ID NO: 243781 - DNA, 122 bp, Homo sapiens
tgtgaagaccacacccacctctttaacagggtggagtattgagaaaggtagaggataagacgattaggtttatgcagtatttagaacacacctttgcaccactgattaaattatcatcactc

SEQ ID NO: 243782 - DNA, 122 bp, Homo sapiens
tttgtggctgtgagcgtgtgtataagttagagtgtgagcgcttgatgcttggtgctaaagcgtggccgggattttataacccagttaaccttgcaaggggaagtaaatgaccttgacagctc

SEQ ID NO: 243783 - DNA, 122 bp, Homo sapiens
ggaaggagcccccttcttctgataaagtgctaaagaaattaccttttgcaaagatgattccggagagcagccttttcattactggctacttgtgcaaaacagtgtaatggttaaaagcccaa

SEQ ID NO: 243784 - DNA, 122 bp, Homo sapiens
gagcttaatattctccttgcaacatcacagtcacagtgctggttgagtagttacttgcctcgaaggactggtaagcctttgacaaggattggttacttgggaagttttcttgcttacctgta

SEQ ID NO: 243785 - DNA, 122 bp, Homo sapiens
aaagccgccacgcccggggctcctgcattcactgaacaaaagcttattcagtgcccagtacgtgccagcccatcccggatcgctctcccgcctgccctgcgcctgaatttcacatgacccgt

SEQ ID NO: 243786 - DNA, 122 bp, Homo sapiens
ccgcaggaagaggcgccgtgagccgggtgagggcgccgccgctcccggaatggttccagccggagacagcaggcccctcaccgccctactcgcttgcaacctgaaccccttttacctgctca

SEQ ID NO: 243787 - DNA, 122 bp, Homo sapiens
tgggggaacaggcaagccaggcatcaccgtggatgttgaagaagggggttactcaaacctcggcatcttcacttgctcgatctggaattacagctatttattacgaagcactctgtgtggct

SEQ ID NO: 243788 - DNA, 122 bp, Homo sapiens
tggccatggtgattctgacgtcacactcaggcaaggggtggggctttccgctctcaaacccgcccctcgtctcggctttggggctgggcccgcatctgattggacgtccgcgcctgtcaatc

SEQ ID NO: 243789 - DNA, 122 bp, Homo sapiens
ggctgggtaggtgggtaggggggatgtaagggaggacagggcctctgtgggcctgagaggcgggggctctggcaagagaagaatgccctgctgagctgatgctgcagtcaccacccacctgg

SEQ ID NO: 243790 - DNA, 122 bp, Homo sapiens
tcgctcgagggggggctgttggaacttggcggggctggaccagcccggccgtgggaggtgcgggccgcggcggctgcagcggcggggtggctgcgctgagcaaacagcggccccttccggcc

SEQ ID NO: 243791 - DNA, 122 bp, Homo sapiens
ggtggccgtccgcgtggcagggcgggggtcccagggcggctgtgcttggtgctgggaggccgcccgagggcagcgccggccccgagtcagcagccgcagggcaccctggagatgcggaacgc

SEQ ID NO: 243792 - DNA, 122 bp, Homo sapiens
gacctgcttcttcccctgagcttatttctttgacttcattggagcagctgctttgagccccgcctgactgcctttgttgctggggctcaggtgaaagggctggctggtgaagggagtcagct

SEQ ID NO: 243793 - DNA, 122 bp, Homo sapiens
ggctttctgtaggcctttatttcttcattctttattttttagaacctgctggttccattgcgttttcttttttcgtttttctttttcattttttatttttttttgagacagatctcactctg

SEQ ID NO: 243794 - DNA, 122 bp, Homo sapiens
agctctaaccaaagtccacgtgtcatcaggagccatgagtcactcaggtgccatccagggcggcggctgaggagtggtgactggccagatgggaaggcggggaagggtctggatttgaatga

SEQ ID NO: 243795 - DNA, 122 bp, Homo sapiens
ggcgctcctgctgttgttaagttaccgtagggtctcttggcgcggagggaacacgcgctgcgttgcctaggtgtctcattggacttggagaagaacacctgaggcacctctacgagccagag

SEQ ID NO: 243796 - DNA, 122 bp, Homo sapiens
gtaaggagatttaataaggctgagggtggtattaagtttctcagaacagactcatctttgcggatgcagttgcagaacaggaaacagacccagggagaagtttagtccccccagatctcatt

SEQ ID NO: 243797 - DNA, 122 bp, Homo sapiens
cagggtttcctggccacttccatgactggccccctgcggagcctttttaaaccttctcaccgttcccaccccatgacgctgcgaggctgtggaggtgctgtttgtgtctgtgtgccacgcat

SEQ ID NO: 243798 - DNA, 122 bp, Homo sapiens
tgggagcaggaagggacggaaaagatgccagtgtcccctcctgtcctggcccgtccagcccgtccccggggctggctgcaaagctcacagctgcccctcacacctgaactccacggcctctg

SEQ ID NO: 243799 - DNA, 122 bp, Homo sapiens
ggtgagcccatctgggttcctgtgatgcctgtgcggggagggggttgccctgggttgggtcgatgatgagaaacttatattgtctgaagagaggtgatgacttaaaaatcatgctcaatagg

SEQ ID NO: 243800 - DNA, 122 bp, Homo sapiens
tccctgaccctaaagagagatggaggaagagaggaatatggcaaggagtctatggaagagcgatgagaagacagaaaagctctgagagagaacattatcttggaagctgaagagagagtttt

SEQ ID NO: 243801 - DNA, 122 bp, Homo sapiens
caccagaggttgttaagagtcgcacagaccacagtctcctatagatgtgtttttttttttcgttgacttaataaggggaataagggtcaatttctatttgagatctgatatagtctctgatc

SEQ ID NO: 243802 - DNA, 122 bp, Homo sapiens
cagcctggtgacagggcctgaagctctgcaaacgaccagccttactacttgtctgtttgccgcgggctggcagacaggcgttctgtgcctggggcagggaaggctcggctccagccatcctc

SEQ ID NO: 243803 - DNA, 122 bp, Homo sapiens
agcggattggcaggccacttcctggatgatggccagttttgccgtttttgaacactggaacgagcaatgattgccacaaggatttcttctgaaaatccccgtttcctttcagggctttgttt

SEQ ID NO: 243804 - DNA, 122 bp, Homo sapiens
tgctgttccaccaatagcttgaagatttgactggggagtgacatcctgacagtccaatgacgcacaaccagcccacactcagcacttcggaggggataaatcaaggagccggcacgtatgga

SEQ ID NO: 243805 - DNA, 122 bp, Homo sapiens
actcattatagatggttgtgtagacagctgagtttgaatcctatcttctccattaactaacgtaatgaccttgagcacacaaactcctctaagcctttttcttcataagatggaaaatcctc

SEQ ID NO: 243806 - DNA, 122 bp, Homo sapiens
atgcccaaagaatgccccctgctttccccaccgtgggctcctgcatggcccgagcctccccgatgggtgccgccccctgctccgcagcgcctggtcccatcgaccacccaagggctgagaat

SEQ ID NO: 243807 - DNA, 122 bp, Homo sapiens
ggggttcctaaggggaagggggtcgtccggggccagtaggagggcatccgtgatcggggtcgtggtgggtcgcggggaggccaccggagactgaagcagttacacaggctgcagggaaggga

SEQ ID NO: 243808 - DNA, 122 bp, Homo sapiens
tgcgcgcgcgctcctgcaatatgctctcgatcaatcagatttgcataactaaactgtctgcgagcccgctcggctgcccaggtgcaaggccatttgcatatagaacagtgaggaggtcccag

SEQ ID NO: 243809 - DNA, 122 bp, Homo sapiens
cctttaaaaggcaagatatttgtgctggaaccacgcgtgctcatgtctgggccgtggtctcgctcagggagagcatagtggaaaagcgctctgggccgcatgagccaagaccagtgcttagg

SEQ ID NO: 243810 - DNA, 122 bp, Homo sapiens
ttcggcccgccccctggcaggcagcacaggtggctgagcaccgctacagcggcctctcaccggccgcttggtccagctcccggcgctgcccactgggtacggatcaacaacaagatggcggc

SEQ ID NO: 243811 - DNA, 122 bp, Homo sapiens
agcttcactctggactgtaaaaggtggcattcttcaccagggaattcctcacccagagcacgctggggccaaattgacttaaagcttaaggctacccagtgagtcgatgctggcaccaggac

SEQ ID NO: 243812 - DNA, 122 bp, Homo sapiens
aatctgcaaatctgcctgaaccagatatcctctctctctctttctctctctctctccctccgtcttcattatggttatgaggtaatagggtgaaaatgtaggcaaggaccattgcatatctg

SEQ ID NO: 243813 - DNA, 122 bp, Homo sapiens
agcaagaagcatcaggtggaaacagcttttgagaggctgcagcaggagctggagcagcagcgatgtctcctgctggccaggctgagggagctggagcagcagatttggaaggagagggatga

SEQ ID NO: 243814 - DNA, 122 bp, Homo sapiens
tgttccttttaatggatggttgaattaacttcagcatccaagtttatgaatcgtagttaacgtatattgctgttaatatagtttaggagtaagagtcttgttttttattcagattgggaaat

SEQ ID NO: 243815 - DNA, 122 bp, Homo sapiens
tggagctgccgcatggcagtggttattgtgtctgtgcctggaacccactaggaaggtgtccggcatcctctgggctctgaatagtggtgctggtggtgatggtggctacgtctgctgttgct

SEQ ID NO: 243816 - DNA, 122 bp, Homo sapiens
gcatccagcctgtggcaccaacgttaccgatttggctggggcctccctcccgctgcatgacgtccacaaggctcagcaaatgggctttctccgggaccacgttccatggcacgtcaatggtg

SEQ ID NO: 243817 - DNA, 122 bp, Homo sapiens
catggcaccgtggggcaagcggctggctggcgtgcgcggggtgctgcttgacatctcgggcgtgctgtacgacagcggcgcgggcggcggcacggccatcgccggctcggtggaggcggtgg

SEQ ID NO: 243818 - DNA, 122 bp, Homo sapiens
ttttgctgctctgtcctgattccccgtgttcgagtctcagcttctcagcatcacttgcctcgtttgtgtcagttttccttcttttcagcacttgtttatatcgaaggctcgattagcacctg

SEQ ID NO: 243819 - DNA, 122 bp, Homo sapiens
ccctgggggtcaggaggcaggaggttcgggaaaggggaggcagcggcgctgcacggggcccgcaggtggcttcccatctgtcaaggctgctgccgcgttttggatgaacacaggcgtggagg

SEQ ID NO: 243820 - DNA, 122 bp, Homo sapiens
ctcaacaccgatcccaaggcgctgggttccccagggcgcggcgcgggcccaccttgacggcgtactcctggctggtgatcaggttgatgcaggtctgcactcgggcatgagcgccctccccc

SEQ ID NO: 243821 - DNA, 122 bp, Homo sapiens
gttttccagcctccggcaggaaaacaaacaaaaggctgggtggcttctactggggacgaccggccgctttccctgggaaaagttaccctgcagctcccctcgctggccctgcgcgtccctgc

SEQ ID NO: 243822 - DNA, 122 bp, Homo sapiens
tgggtgatgaagggtcacgtagcctcatagcacgcggttctattttatttatttggcacacgcaggctaacgaggctgagagagctgtgggtggtatgcctagtgaaggatcaggacatctg

SEQ ID NO: 243823 - DNA, 122 bp, Homo sapiens
tgtgaaacttgagcaaacaactaccaaccaggccgggttttcacccctaagatgagtcaccgtcgagcagaaggccattgctaacgatgtcctctggatggagcaggacgcaggctgcagag

SEQ ID NO: 243824 - DNA, 122 bp, Homo sapiens
ccccgccgagcggtggctttccggaggggtggggcggccgcctcgggtcctgacgtcgggcgccctccggccgtcactcagcgctcggccccgccccgccgcggctgcagcagcagcgccgc

SEQ ID NO: 243825 - DNA, 122 bp, Homo sapiens
ctagcccgggcttgctgcccgctaggcggactcagagaccatcctcccctctcatccacccgcagacagacaacccacctggagaccccagcctctcgcgtcaccaccgccggatggccgcg

SEQ ID NO: 243826 - DNA, 122 bp, Homo sapiens
agggcgacttgggggagctccgggctccctatgcctactccggagcctggccgcgcaggacggtgtgctgcccctcgagggctccacttttcgcctttaggacttcacaggacagctaccgg

SEQ ID NO: 243827 - DNA, 122 bp, Homo sapiens
tcctttcctccctccctcgatccccccattttctctattctttccatgacacccaagggtcgcctatttttaaaaagtaccacattccatgacgcaggagctgtggaaatggtgagcgctgt

SEQ ID NO: 243828 - DNA, 122 bp, Homo sapiens
cgcgtgtcccccacgcgtggcaggcattgttgtgtggccactatgcatggcaggcattgtcgtgtgtcccccgtgcgtggcagcattgtcgcgtggcccccgttcgtggcaggcatgtgcag

SEQ ID NO: 243829 - DNA, 122 bp, Homo sapiens
ctatgtaagagcacttgtgaaaattctagaactctttctatacccctgaaactccagaaacgtaaagaattattttcattattattgcttttcagtacattgatctgggccccacatttcca

SEQ ID NO: 243830 - DNA, 122 bp, Homo sapiens
tgtaacaccctctctcaggcctcggggtcacgggcaccctcacctaggcagcgccacaagcggcaagatgagctgctaacacactgctgtctgcagacagcagaactaagagaataccgtaa

SEQ ID NO: 243831 - DNA, 122 bp, Homo sapiens
ccgtgtgcgaggatcctactgacccgctcccgctcttcggcagccatccagatggcgatccggctgcaggccgaggggaagacgtccctacacaaggacctgaagcagaaacggcgcgagca

SEQ ID NO: 243832 - DNA, 122 bp, Homo sapiens
tgatgtttaggaagacctcactgagaggtgcggaaggcagcctcccgccattgttctcaccggtcttcccttccccccttccccctcctttccagcccccaacaccccgtccccactgtttc

SEQ ID NO: 243833 - DNA, 122 bp, Homo sapiens
tctgcacagtgaccgtggatttttaaatctttcatccgctcccctaattccccagagtgccggggcgctcggttgaaatgcgagttgcgtttggctgcaggccgtgactgaagcctcagaac

SEQ ID NO: 243834 - DNA, 122 bp, Homo sapiens
gccctaatcctgaactgcttgtgagtgcagtgggtagggcggtgtcgccgggaccacagtcgtcagtgagaaagagcagcactggcacagagcaggagaagggagagtcccatgggatttgg

SEQ ID NO: 243835 - DNA, 122 bp, Homo sapiens
gtcccctgcggggctggggcccaggcccctctctgcagagctggagtcttcctgctcactcggctcaaactctgggatctggaacatgctctgggctgtgaggacaagatgttacgtagtca

SEQ ID NO: 243836 - DNA, 122 bp, Homo sapiens
cagatttgtttcttccaggtgaaaatgctctgcttcagttatcacaattgtgtcagtagtcggggctgtcacaaggcgaacctcaaaatttgggttcagcctgggaggtcacatgggtcgtt

SEQ ID NO: 243837 - DNA, 122 bp, Homo sapiens
aaatagtgagatcacacctgcattattacaaaagttatgaaataccgagattgcatttttcgcttcctttagtcaggcaaaatgttcctgcctccagctttgacttgagatctcagcacaat

SEQ ID NO: 243838 - DNA, 122 bp, Homo sapiens
gcgacggaggcggcggctccggcagaggctcccagctgggaggcagcagcaaggcgcatgcgtgccggggcggggctgtggcgtcagggcgtgcagggggcggggcgtgcagggggcggggc

SEQ ID NO: 243839 - DNA, 122 bp, Homo sapiens
gccccctccccttccaacaaggattagggaatcccccggtaattttaagactgatgacttcgttcttttcgcagccattgttcttagcagcgggcaggtgttaaacctttgttccgaaggtg

SEQ ID NO: 243840 - DNA, 122 bp, Homo sapiens
gtggccgcgagggtttgtcgggactccctggcgggccggggcagccctgggacgtggcggcggggcccaggctgttccaggagaggccagcctccggcttctgcttctcctccggctcctgc

SEQ ID NO: 243841 - DNA, 122 bp, Homo sapiens
agcaatacagagagtctaaaaaacatgactatcgattatcttccttgtgcaaaccactaacgaataaattaaaaagacaatactattttgtaaaaaacgttaaaacataacattcccataca

SEQ ID NO: 243842 - DNA, 122 bp, Homo sapiens
tgtagattcacatgcagttgtaagtctgggatcgtttgagacatatggtatcaccaattccgtggcatcctactcccgctgtctcccttcatggatagacaacctatcttgtagttttgccc

SEQ ID NO: 243843 - DNA, 122 bp, Homo sapiens
tggcgtaatcgttgttcactttcttctctcttcagggactttctgctttcttaagaccggcgtccgcgatggcccgaataaaggaaagagcttctacgtgtgccgggcagacacgtgcagct

SEQ ID NO: 243844 - DNA, 122 bp, Homo sapiens
ggtgatccgcccacctcggcctcccaaagtgctgggattacagacgtgagccaaaacacccggccaaagttagtgcctttaaaaaggaggccccccagagccccctcatgccttccaccctg

SEQ ID NO: 243845 - DNA, 122 bp, Homo sapiens
cagaagctactggaggctccatctgtgggcactcagagtaagggctgggcacagctgaatcgggccccaggtgatgggggaaggggagaagaagaagagaagggaggggaggagtgagaagc

SEQ ID NO: 243846 - DNA, 122 bp, Homo sapiens
tacccatcggccctggtattggacaaattaactcctctgagcctgtttcctcatctgcaacgtagactagctaatactacccattggaaagcgttgtttcttagctaatgcatgcaaggctt

SEQ ID NO: 243847 - DNA, 122 bp, Homo sapiens
acgacgaccggcttttgtcctggctgctccctcccagcgtgggccgcgtctcctcggggtcgacagggcgcgtggttttcacagcgaggcctcccctgatcacctccccgctcttcctgtcc

SEQ ID NO: 243848 - DNA, 122 bp, Homo sapiens
agactgtcttctacatgatgcaacctaactttgtggccagtggccaaaccatcagggaaacgaattgccctccaacgtttacctctcctcggcttccacacagaaagatgctaaaatgccca

SEQ ID NO: 243849 - DNA, 122 bp, Homo sapiens
ctgctttggtagtgtttacttcagtgcctttaacagagtgttatgtagcaaatttgataacgatatactatattttaggctactaaagtggaagaatacattgatgagtttgattattagtg

SEQ ID NO: 243850 - DNA, 122 bp, Homo sapiens
tctgtgtttctcagaggaatgaggcacgtcagaaatgggaggcggcagccagagggagcccgtagcttaattaagtctcacaggagacactgtgattgcatcttaagtgaggggaagaatga

SEQ ID NO: 243851 - DNA, 122 bp, Homo sapiens
tgtgggaactgttcagaacggcttaatctgggaggacacgacttccactgagaatgcatgcgctgaacgacaattcgttttcacctcaaaaacctgtactgcagttttgtctctccttccgt

SEQ ID NO: 243852 - DNA, 122 bp, Homo sapiens
gaaatagaacacaacactgactttaatggggcagccctgagccgtaaccttcaaaccttccgcctcagtaccccgtgcgcgaggagggaggggcgactgctacgggcacatcgtcgatgtcc

SEQ ID NO: 243853 - DNA, 122 bp, Homo sapiens
cccgcctctgggtggggcgaggggtggggccaggcggcgggagggatcatcttccgggagcgtggctaggggcggagcgactgccgcgcgatagtcagggagctgtgcgggtcctggttgca

SEQ ID NO: 243854 - DNA, 122 bp, Homo sapiens
gtaggaagaaagattgaagcctgtcaacacaactggacatacttttgtcacactcctctgcgggcccaacagactttatcccaggccattttatgttcaccaagctcattgaattccactaa

SEQ ID NO: 243855 - DNA, 122 bp, Homo sapiens
ggagtcagagcccctagccccgagagggctcccgtgccctccccagctcactccccgctccgtgcctagctctgcgctcccgcggcgcccccagaccgccccttacctgtcccgccgcggac

SEQ ID NO: 243856 - DNA, 122 bp, Homo sapiens
tcaaacagctggtctccatcaacagcagctgagaagcagcaggtgaggccagggtgggcgcggacccgaagacgcgggtctgatcgctgcagagagacagagaatacagagagaggggaggc

SEQ ID NO: 243857 - DNA, 122 bp, Homo sapiens
cacccaggctggagtgcaatgatgcatttgtgtccggaattggtgggttcttggtctctgcgacttcatgaagccgcggaccctccaggtgttacagttcttaaaggcggcgtgtttggagt

SEQ ID NO: 243858 - DNA, 122 bp, Homo sapiens
cacaccatgtgcacacacacagtcctgtctatgagaccttggacaagtcatttaaccttccggagcctactaaaaacaatcattttctcatgagtttgacttgaggagatcccacaggaagt

SEQ ID NO: 243859 - DNA, 122 bp, Homo sapiens
tgtgagcatccacgctccctcccacgaacacatggggttcttgacacaaactcgcaggaacgagaaggtaacatgggtcgggcccacccactgtgtctcaccacagatcagccttcttccca

SEQ ID NO: 243860 - DNA, 122 bp, Homo sapiens
accggggctgcgcgtggtgcttgcgggccagggcaagttccgggtgggtgtgggcacgggcggccccgcactcggagctgcccgccagccccccggccccgccgccccgccggcacgggcag

SEQ ID NO: 243861 - DNA, 122 bp, Homo sapiens
aggaaaggaccaggcagaagggggacctcaggccccttccagaaccaccacaaacacacacgcacatactggtcagcgcaaggctctgatggcagcagcttatcttcatcttctttgttaaa

SEQ ID NO: 243862 - DNA, 122 bp, Homo sapiens
gcgctgggaaaggaaacagagcggaatcgcccacattagcctcgctcttcggtgacccggcgcctctgggcttgtgtgagcgtctcctttctaatgccaatgacaacgacactgagggtgat

SEQ ID NO: 243863 - DNA, 122 bp, Homo sapiens
ccggaagagagccagaggcctccctggagtcccgaagacgatctgaaccaaggagcccagcgccctctagcgggagacaagctgcttcgcggccctggtctccggtcagaggcactgggctg

SEQ ID NO: 243864 - DNA, 122 bp, Homo sapiens
ggtaataaatggttaaatatatgtcttacaaaaaactcctttttaggttttatttctccccgttcctttttgttgcagattcaaccataatttctccagtcttcttccctactcagtttcac

SEQ ID NO: 243865 - DNA, 122 bp, Homo sapiens
ttcaaagtctggccccagagctgcaacaggcttccagcctctggcctctgcgtccgggaacgcacccaaaattgcccccaaaggagggttcagtgcacggcgctctggacccactagagccc

SEQ ID NO: 243866 - DNA, 122 bp, Homo sapiens
tgctcttcttgcccagggctgcagagcattcggagcgcacggaggcactgtggatgctggcgctgtcgaagtccgactcctccctctcatcttcttcactctgcaggggaagacagggtcct

SEQ ID NO: 243867 - DNA, 122 bp, Homo sapiens
cagggtgggcctcatgaaggtgccatttgagcagacttgaagaggagagaaactgagacacgcaggtatgtgcaaaggaagaaccttccagaatcaccctcatgtacacctatgctctgtac

SEQ ID NO: 243868 - DNA, 122 bp, Homo sapiens
cgctcacctatggttgacaccacggtgcccacgaagtagaaggcgccggggaagtcccagcgcgggcgcagcgcgtcggcgcggacgccggcggccagcgcggcctcgtagtgccggaggaa

SEQ ID NO: 243869 - DNA, 122 bp, Homo sapiens
ggtctccccaagcacaggataagcctgattcagaagccatggagggcaaggggaattcttcgctggtgcaaaatttcaatcgaacagatgatgctttaaatctgtgagccttcttttgtggg

SEQ ID NO: 243870 - DNA, 122 bp, Homo sapiens
gggttgggagaagcaggagaatccacaccctagataggaacttggatggcggggtggggacggggtgttatggggatggggtgtgaagtggggttaaggggcccaactcggctgcagagagc

SEQ ID NO: 243871 - DNA, 122 bp, Homo sapiens
acctgctcttcctgttagtttctttgtacgtcctggaggcgaggccagcgttggacttgacgttgcttcacctactcggttctattgtccctccatgtgcagtgtctatcctgttgtttatt

SEQ ID NO: 243872 - DNA, 122 bp, Homo sapiens
ggtgcccggggcccacccacagcctcgcatggatggtggcgccaaggcccaggtcaccggcgacgtggaggcctcccatgatgctgctttggagccggttgtccctgacccacaggtgggct

SEQ ID NO: 243873 - DNA, 122 bp, Homo sapiens
tcaacacacagaaaaccttctctgtggctttcacagggatctccagggaaggtgggaagccgttcttgagaacgagaaaaatacggtggcccagcaaggtcaactaattttccccaagttct

SEQ ID NO: 243874 - DNA, 122 bp, Homo sapiens
aggtcctaactcaattagtaaaacacagcttatgactcactcctgagttgccccaggtagcgccattcagagtcctgaatgagtccaaaatgctttacgctctaagcttttgggaacaaaag

SEQ ID NO: 243875 - DNA, 122 bp, Homo sapiens
gaaacctaaaagtttaagaactgctgattgctgggaaactctgcagtttcccgttcctctcgtaacctggtcatgtgtccttcttcctggatactcatgacgcagactcagttctcattccc

SEQ ID NO: 243876 - DNA, 122 bp, Homo sapiens
ggtgctgtgttttgacattaaaattaaccaatatattataaagaaatgcagtccttgctgcgcctgtcttgccaaagctatggagagaagtgaacaacagccactgatgggctgggaagatg

SEQ ID NO: 243877 - DNA, 122 bp, Homo sapiens
tagagccaaagcctgagcacttggtgtaactttgcgtgctgtcgccctgagaggcggcaccgtcgggccccgagtcagccgtgtgctcgaaccgccccactttaccattcctgttcctcacc

SEQ ID NO: 243878 - DNA, 122 bp, Homo sapiens
ggccagcagacgacccctccccttccctcctccccctttttatcttgcccgcggaggagacgccccaggacttcctgcagtatatattctgcctctgatctccgtacttaatagccaagtcc

SEQ ID NO: 243879 - DNA, 122 bp, Homo sapiens
gcatgctcggcgccgcccagaggcagaggaggtggacacggtggacgtctccggcgtgcccgcagaggtgctgtgcaacatcgaggccgacacctactggtgcatgagcaagctgctggatg

SEQ ID NO: 243880 - DNA, 122 bp, Homo sapiens
aaaataatggggacttagtaatacctccaccagcagcactgctgcctcctggcatcttcacgtgtgtccatgtccccgctattgcttgtgtcccctattgcagtcccacaaccccagcctgt

SEQ ID NO: 243881 - DNA, 122 bp, Homo sapiens
tgcagaatgggaatcacccgtgtctgtttcctgctctgtagaatggtaatcacgcgcgtccgtttcctgctctgcagaatggaaatcacacgtgtctgtttcctgctctgtagaatgggaat

SEQ ID NO: 243882 - DNA, 122 bp, Homo sapiens
gggcgttcagagtcatgtgtgtccgtgagaactccccgatgggtctgcctatcagctcgtcgaaggtggcgctccaggccctcgctacgcttgaagtacctgccacaaagcacacacaacag

SEQ ID NO: 243883 - DNA, 122 bp, Homo sapiens
ctcatatctccaggtccaggccccattttcctccgctgacagctcagcagcgtgcgcttccgctggattcaggccaggaccagcgaagccgcaccttacacccaccgaggaggaaacaagcc

SEQ ID NO: 243884 - DNA, 122 bp, Homo sapiens
tgagggcatggatgaaatggagttcaccgaggcggagagcaacatgaacgacctggtatccgagtaccagcagtaccaggatgccaccgccaatgacggggaggaagcttttgaggatgagg

SEQ ID NO: 243885 - DNA, 122 bp, Homo sapiens
tggacaggcctgtctcacccctgtctctcccgtccactcgtggcttggccactggacccacgcagcagtgccaacgtgtccctggatggcaacatgcctcagccatcgggtagggctgctgt

SEQ ID NO: 243886 - DNA, 122 bp, Homo sapiens
agcaggtagggaagaaggactcagagaagcgaggtgggtcagagctcggggtcaacttaccgggggtcctttcggtccaggaaacccgttgggaccctgaggtccagggaggccctagagac

SEQ ID NO: 243887 - DNA, 122 bp, Homo sapiens
tgtatgtctttgatttaggagctgacacttctgcccagtggctgcccagcatgggctctgcggccccgagaagggacggggagaatgatcacacgggggcagcggggcggcgggcttgttga

SEQ ID NO: 243888 - DNA, 122 bp, Homo sapiens
agtctctcagcttccgtttctttcttaaactttctctcagtctctgaggtctcgaaatcacgaggcttcgacccctgtggaccagatgcccagctagtggcctttctccagcccctcagatg

SEQ ID NO: 243889 - DNA, 122 bp, Homo sapiens
ctgataattaagtccataaatgtctccatctcaccagctccaaggggccatgcctagatacgtttggagaacaaacagctcctccaattgcagcatgttccaggccattctcagattcttcc

SEQ ID NO: 243890 - DNA, 122 bp, Homo sapiens
tgctgtgtttagcctcattttgccgcgccgctcggctccgagttaaaaagcaacaggtaccgtggtgtctctcccagaaacacaggaacggttttaaaatgcaattatgggggttggtggaa

SEQ ID NO: 243891 - DNA, 122 bp, Homo sapiens
ttccaggctggcgatctggaggacgagctcgctgtggtcttccctggggccgagctctggcgggaggcgctggccacaggcccattcatctgcttgtagaatttcctttctgtatcttcata

SEQ ID NO: 243892 - DNA, 122 bp, Homo sapiens
ctgagcagtgagaacccatatgccaccatccgggacctgcccagcttgccagggggcccccgggagagcagctacatggagatgaaaggccctccctcaggatctccccccaggcagcctcc

SEQ ID NO: 243893 - DNA, 122 bp, Homo sapiens
aagacctgcaggagcttctgagcctggtgacacttgctggggaccaagaccatcctactccgccccagccacgctgcatgacctcatctcagcccaaaaacagacattgggaacatctgacc

SEQ ID NO: 243894 - DNA, 122 bp, Homo sapiens
gcagaaaactcggccgcctgcaccggggattctccagaaacacaggcgtgcctgggtgtgcgctcaacttcccgggcgagggacgtttctgcacttgccctcggcttctgaactttgtactt

SEQ ID NO: 243895 - DNA, 122 bp, Homo sapiens
gggagcggcgcgcgcgggccgcggcggagccagaggctgcaggaagagcccgcgggggcccggagggtgcgattcctcggcccccgcaaaacaatgtgtgttgtgagccaggacgcaacttg

SEQ ID NO: 243896 - DNA, 122 bp, Homo sapiens
gaaagcacaccgtaagcactgaacatcagtacgtgtctataaaagtcattataaacatcacgaggcatgagagaaaaagcatctctatttacagtgtaggaaagaggaaagaacaaaaacaa

SEQ ID NO: 243897 - DNA, 122 bp, Homo sapiens
cccttcctgctggagaaatcgctgccaaagcctgctcacacagcccctgggcggcggaggcgaggtgaagccagtcagcctttctccgagacttccaactcaccgggcctggagctcgtccc

SEQ ID NO: 243898 - DNA, 122 bp, Homo sapiens
aaaaaaattgccatgcatggtggcacacacctgtagtctcagctaccagggaagctaagtcgggaggatcgtgattgaggctgcagtgagccatgatcatgccactgcactccagcctgggt

SEQ ID NO: 243899 - DNA, 122 bp, Homo sapiens
ttatgaaagagatggagtttgggtggtgatgggagggagggaaggagaagaaggaagcgccgtaactccatctgatgggcacagaagcagaggaagagtaacgcatatgctgtgcactcccc

SEQ ID NO: 243900 - DNA, 122 bp, Homo sapiens
agccgccacacagaaaacccaggaacaagcaagacactggagttaggcacatctaggctgcgccacccctaactgtgtgacctgagaaaggcacctaaaccaaactggtcttgtctcctaac

SEQ ID NO: 243901 - DNA, 122 bp, Homo sapiens
cgtcgacatcgaaaggaagccggacgtgggcgggcagagaggtcggcttgctgatgggtccgggtggggcgcgcgtggactatgggcccgggaggtcccttactgtccccgagccgcgggtt

SEQ ID NO: 243902 - DNA, 122 bp, Homo sapiens
gacggttcaggacttggtgggccggagcatcccttgcccaaggttctgaacttgggttcccgtcacctgcaagtcagtgccggcggcgcccctaagcgcgctcagcccacgccgcggtccct

SEQ ID NO: 243903 - DNA, 122 bp, Homo sapiens
aaatcgcaaaacgcggagactggaggttgggggtgagggcgttccaggcccgggctccggcgccctaacttctaccctcttcaagaaagagggagcgcctggctcctttttgcctcggcagc

SEQ ID NO: 243904 - DNA, 122 bp, Homo sapiens
acctattaagaaaagtaagacattttgatactaattgcaaataaattgtgatgtgttcaccgagtaattgatttaatgaagttcatatgaaactcctgagattggccaagtgaaaggccccc

SEQ ID NO: 243905 - DNA, 122 bp, Homo sapiens
aaggctcaggcctgtgctttatcctttttctctttccaccgatggttctaaccttcacatcggaggtttgtgagcatgcatgaagacctccagccaccaagtccaagctctgtcctagttcc

SEQ ID NO: 243906 - DNA, 122 bp, Homo sapiens
caaatactgcgcttttccgacaggcttaaaaaacggcgaagcacgagtttatatcccgcacgtggctgggagggtactatgcccacggagtctcgctgattgctagcacagcagtctgagat

SEQ ID NO: 243907 - DNA, 122 bp, Homo sapiens
gtgagggaggggccggcggcgggggcggacccctggcggtcctcctggctggggtccgcgcgctcgcggcagctccccgtggaggtcactgtccgtgccagtccctcccgctgtcccgccct

SEQ ID NO: 243908 - DNA, 122 bp, Homo sapiens
gaagacggtcccttccacgaaaaaatattccccaaccactagcctgtacaattcctggggcgtagggggaggggaggagaaaaaagaattctaaggttaattttattgcgatgggggaaata

SEQ ID NO: 243909 - DNA, 122 bp, Homo sapiens
ggggccgcagctagagcgtgggcacccctaaagggcagggcaacgccggcctcaaaaaagcgaatcccagctagggctccacttcttcaagcctctcgtattgtgcgaaacaaaagttctgt

SEQ ID NO: 243910 - DNA, 122 bp, Homo sapiens
gggaaggctgtgtgccttttctcatccgcttttgttgtgtgtgactccaaagaatgcccgcgctgaaatttggcgtgaattaaactgaagcccaggcctctaccttgtttgtctaagactga

SEQ ID NO: 243911 - DNA, 122 bp, Homo sapiens
ggccaaaacgatcttttaaaaaacacagatcgagttaacctgcttataactattcagtggcgtattactggtctctgcaaaagacccatatccttaacaaggacctaaaagcccacaatgat

SEQ ID NO: 243912 - DNA, 122 bp, Homo sapiens
tgcgctgggacagatcatgtgaacaacagcactctgaaatggaactcatatgcagaccagcgcagacccttcataaatggctgtgtccacactaaacagctcccagcagggcagagcatcaa

SEQ ID NO: 243913 - DNA, 122 bp, Homo sapiens
cctgactgtgtgttcgtcgagggctgcctgactgtgtgttcgtcgggggctgcctgactgcgtttgctgggagatgcctgactgtgtgttcgtcgagggctgcctgactgcgtttgctggga

SEQ ID NO: 243914 - DNA, 122 bp, Homo sapiens
ccccgaaaccatgattccattgccaagcacaaagcaatgcaagagcccaacgtcggtcgccgcaccgcgatcctgacaaagcctgtatggagccagaacaaataagatgttaattgcagcct

SEQ ID NO: 243915 - DNA, 122 bp, Homo sapiens
tggtagcctttgttttgtgctctttcttcaggactatccagtgtagccatgttttatccccgcttacaaatcttggaataaatatttctggatcttcttccacctgttttaaaactttaaag

SEQ ID NO: 243916 - DNA, 122 bp, Homo sapiens
ggtccaaagtaggcggcaaagaggtcatcagcaaggagtgttcgaccctggggagaatagcgggcgacggggctccagggaggccctttggattgactgttgcccaccttatctcagcaact

SEQ ID NO: 243917 - DNA, 122 bp, Homo sapiens
tcgtggggggaggagactcgtgggggcggggcccaagggaggcggggtggggcggggccgcggccagaggaagcccctcccggtttcccttgacagggtcacctgcctgcaagccacctgcg

SEQ ID NO: 243918 - DNA, 122 bp, Homo sapiens
ggaagtggaggccgaaatccattcccaaacagactcccttttttttccctgtcacctaggcgctcggcattgttgtcgaattgttttcccgggctcgcccgtcctcacagctcagtacattc

SEQ ID NO: 243919 - DNA, 122 bp, Homo sapiens
attgagaggaaattgtgtaagtgctactttattgacaggaccaattctgtactgaggtggcgtttgtctgaatttacctgtttgttccttgatatggcttttatccttccccagcatcctcc

SEQ ID NO: 243920 - DNA, 122 bp, Homo sapiens
cttggtgttttcagcccttcagcatgtctgccttcactgggtggtctttgccacctccagcgagctttctgccatctgtctgtctgtcctgctgtctgtctgcctgctctttttgtgtctct

SEQ ID NO: 243921 - DNA, 122 bp, Homo sapiens
ccaacggaaactcagtagcggcattttcaactggataaactggccttagtcccgccttctcgttccagagttttgtgcgaaggaaaccgatggggatcggaaccgtagcggttgagctgctg

SEQ ID NO: 243922 - DNA, 122 bp, Homo sapiens
gtcccacatgcgtagatggcagcaccagagccagacccaccaccacggagttcgcgctcacggaacccaggcctgctgggtgtcagcagcagctaagctggatgcaggtactacaaaatgac

SEQ ID NO: 243923 - DNA, 122 bp, Homo sapiens
ccaccaccaccaccacgcccaacccccggagcgcccggacgtggggggccgctcctccagcgcccccgcccccgagtttgcaggcaaagtttctcgtgaactttcctgtcgcccccgtccgt

SEQ ID NO: 243924 - DNA, 122 bp, Homo sapiens
tggtaaaagtccagcccggcggagcgcccctgcctccttccacgcccctggcctgccctgcgcagctacgcccagcccgcgtccatcccggaccatcctgttgaaggcagtcccctggcacg

SEQ ID NO: 243925 - DNA, 122 bp, Homo sapiens
ttagaaaggaaaggtgagagaaaagtgaactgattatgggtagcagattataactaccatcgtttagggttgtttatttttaaactgtggaactccctattagaatcacctaagatacttga

SEQ ID NO: 243926 - DNA, 122 bp, Homo sapiens
accactgtagcccacatttctgctccatttgaactagccaatcgggattagcttagattgcgcagtccagccccagccaatgggaacaggacacagaagcagcgactaaccgcattagggat

SEQ ID NO: 243927 - DNA, 122 bp, Homo sapiens
aaagtgtgggagaaaagttaaattggcacttaaatcttagttttcaaggaaaacgtgtcccgcacatactgcattatgatggactttgtctcaggtgaagtgaagaagtgaaagaatcaagt

SEQ ID NO: 243928 - DNA, 122 bp, Homo sapiens
gcaccccaatgctcgcaccatgttgaggtgcaagcaggggatagcccagcacatcatctccgaggaggacgagggcgagcagcagccgcagtggccaatccccaagttcgcagacccggccc

SEQ ID NO: 243929 - DNA, 122 bp, Homo sapiens
aactgtttcgtatttatgctactgttattaagttgtacatttgggaaaaagagtagtttccgttggctcattgttgatgtgggtgacatttcttaccaggcctgaaaagagtccaagcgttg

SEQ ID NO: 243930 - DNA, 122 bp, Homo sapiens
atggaatcagggcccttacccaggtgggccctgggagctgcgggaaatgcagcaagccggcgcccactgacctgcagccaagttgctggcgccgtggtcggacgccggcctccagaactgtg

SEQ ID NO: 243931 - DNA, 122 bp, Homo sapiens
ttcccgtgaacacgtgcagtccaaaccccgcccctgatatttatctcagtggacggtggccggaaaaggacaatggtttccatgtcagcggataaacgctctcccctcggctcccggacgcg

SEQ ID NO: 243932 - DNA, 122 bp, Homo sapiens
tgtgtttaaaggcccagtcaagcccactgccaaaagatctgtgaaagagcctagaaaacacggaggaataactgaaggaggatccactatgggcggccttggcaatgtgctattttctttct

SEQ ID NO: 243933 - DNA, 122 bp, Homo sapiens
ctcttgacctatcttccacatcatcaagctgttacgggcgaaaccttggtctgaaacatgcggccagagaaataaatctcaggatccggcaggtgtcaaagtgagtatcatttgttatgacc

SEQ ID NO: 243934 - DNA, 122 bp, Homo sapiens
atccacccaccttggcttcacaacgtgctgggattacaggtgtgagccaccacacctggccggcaacacattttttttggctgaatggacatggttattgctgagtaaacgtatggtgtatg

SEQ ID NO: 243935 - DNA, 122 bp, Homo sapiens
caggacccctgctgctggacccctgccgctggcatcctacagtttaatagccttaatagccggggaagattctctctctttctctggtcttctacccagtagagcatctcctcctttctcct

SEQ ID NO: 243936 - DNA, 122 bp, Homo sapiens
tgctaagcccctcactgccgggggctggcggggccggcctgctgttccgagtgtggggcccgccaggcccacacccatctggaactctagctggtccgcaagcacggcgcgcagccccggtt

SEQ ID NO: 243937 - DNA, 122 bp, Homo sapiens
tttcaacctacaatttcagttttcctcaccttttgcttacactctagtgaatgctatcaacggatctgccctgaacctaccctctgtgcctcttctcaagatcattctcacatcgcattatt

SEQ ID NO: 243938 - DNA, 122 bp, Homo sapiens
gagaagaagacaggcctggagagcataagtagcttgttctgaatgacaatagctggtgagcggcagggcaaagcaggcctgccagcccagtgcctctgatcttcccaggcaccgctgcattt

SEQ ID NO: 243939 - DNA, 122 bp, Homo sapiens
aaacttttattggcgcacagccatgctcatttactattgtctatgaccgctttcctattacgacagcaaagttaagaatttgcaatgggctgggcacggtggctcatgcctgtaatcccagc

SEQ ID NO: 243940 - DNA, 122 bp, Homo sapiens
cctagagaagagtgtaccttccaaaaagactactcctaaaaggattatccattttgttgacggagacatcatggaagaatatagcacagaggaggaggaggaagaggaaaaggaggagcaga

SEQ ID NO: 243941 - DNA, 122 bp, Homo sapiens
cagcctcctgctgcccaccgctgcccaccgcagggctggcacactgccgccacctgtccacggtgcggacccacctgtcggcgctggtgcaccatagcgttatcccacctgaccggcccccg

SEQ ID NO: 243942 - DNA, 122 bp, Homo sapiens
catccccaggaccaccccgggtggagagggccgagtgtggtgcctccgcgggtgctctgacgatcgtctcgagccacgggggtgacagtgacaaggacctgtgtgcacgttagtggggcagc

SEQ ID NO: 243943 - DNA, 122 bp, Homo sapiens
aggaactcggagatggagggtgtgagtgcaggggctccgagagacccctagcggctaagccgcccggatcccaaggcccaggggacctcatttcctctcgggttaatcggaatcttccgagc

SEQ ID NO: 243944 - DNA, 122 bp, Homo sapiens
gaaaggagtgtattctgaagattggtaaggttgtgatggcgtccagtcagtagctgggaccgtggagatcagaacctggtggtggaaggggagtgtggggagtaaaggcagtagtttaggat

SEQ ID NO: 243945 - DNA, 122 bp, Homo sapiens
catttgctgaattaaacaaaaatacaaggctttgggatattctttacaggatctaatgctcgaggcggttttcttcctattatcatgcaaacaaaccatttaaataccccaagccacaaaat

SEQ ID NO: 243946 - DNA, 122 bp, Homo sapiens
ttctctagccgccctttcctctttctttcgcgctctagccacccgggaaggcctgcccagcgtagctgggctctgattggctgctttgaaagtctacgggctacccgattggtgaatccggg

SEQ ID NO: 243947 - DNA, 122 bp, Homo sapiens
ttctttgacttggaaagggaactccctgaccccttgcgcttcccgagtgaggcaatgcctcgccctgcttcggctcgcgcacagtgcgcgcacccattgacctgcgaccactgtctggcact

SEQ ID NO: 243948 - DNA, 122 bp, Homo sapiens
gccctggcgaaggattggcaggcttgcccgtcacaggacccccgctggctgactcaggggcgcaggcctcttgcgggggagctggcctccccgcccccacggccacgggccgccctttcctg

SEQ ID NO: 243949 - DNA, 122 bp, Homo sapiens
ttatcagtcatccatgtaatagcagaaatgccaacgatagctaaggcttgtggtaaaccacgatttctttttctctcctgcataccttttgtttttcctactggtgtttttgttagcttgct

SEQ ID NO: 243950 - DNA, 122 bp, Homo sapiens
ttcgtccttcggcaggggtacaggagttgggcagaaggccggggtctcggccccagggctcgggccgagaagaggcacccgcggaagaggaggctgaggacccgagaacgcctggacgagca

SEQ ID NO: 243951 - DNA, 122 bp, Homo sapiens
agggaagggggcatttggttgggagagaatggctgtagctgagagggagtaatggggtggcgggtattctttgaacagtgaagacccagtctcaggaacaggactttccagcgggaagccag

SEQ ID NO: 243952 - DNA, 122 bp, Homo sapiens
aagggagctgcagactgatgctgctaaccatctcccaggcctcctgggccaaaccgcacccgaatcaacccagaccccgcctcacccgtcagttccccagtcaggtaagtggccattttgga

SEQ ID NO: 243953 - DNA, 122 bp, Homo sapiens
tttttccgcccggctcctttcctccactcccttcccgccactccccgcccttttcccgcccggatgttattctagttttgccggatgttgttgtatgtccgagagacacgtgaggttctgct

SEQ ID NO: 243954 - DNA, 122 bp, Homo sapiens
gtctgggccagggaggcgatcccctccgatgcgcgggacagaggaggctcggtgtcctctcggggaggggaaaactggtcctatccagtcctgtgggagtcctatgactcactctgggcgtt

SEQ ID NO: 243955 - DNA, 122 bp, Homo sapiens
gaataagaaacgcacctaacagaaatccacaggtcacaatacagaagttgctaactttagcgactcaatccttcgtggttagtgcctgttggtcttatttaagaaaacccttctctgccctg

SEQ ID NO: 243956 - DNA, 122 bp, Homo sapiens
caataattgagaaacagggtgtgtgtgcatcttcagaattctcctttgttgattagccctcgagactgaccatagcaagctcagtggtctggtgaaattttcctctaatttttatggacaga

SEQ ID NO: 243957 - DNA, 122 bp, Homo sapiens
accttccaccatccaggaagtgcagccccttctttcacaggcggcagctgcagccagaggcgtgcggggacttcccaaggtcacacagcaagaatcctaagaaacccggggtgtttcctctg

SEQ ID NO: 243958 - DNA, 122 bp, Homo sapiens
accgcgcccgcgcccaccccctcccgcttctcctttgctccccccgcccgggccgggttccgttcaggaaatggcccgggatgaggtccccagctgcttcccagccgggttagcgcttcctc

SEQ ID NO: 243959 - DNA, 122 bp, Homo sapiens
aattaatatacaccagtggttcctcctccctgttaaagactaatgctcagatgctgtttacggatatttatattctagtctcactctcttgtcccacccttcttctcttccccattcccaac

SEQ ID NO: 243960 - DNA, 122 bp, Homo sapiens
gctgtcgccggctctcagggggcacccggaggcgccgagggggcgtgtgggggcggccggcggtgtctctcctgaggaagaagcagagccccggctgtcttcagatttttccagcgcgactt

SEQ ID NO: 243961 - DNA, 122 bp, Homo sapiens
ttcctttctggagaaaggaggctacgccccagtacttcatcttgaacttggcagggtcctcggtgtctgtgaaggtgcccaccatgtctgcgcacacgtcccagttactgcaaaagccaagg

SEQ ID NO: 243962 - DNA, 122 bp, Homo sapiens
tcctaccctcctgccaggacatataaggaccagacccctgcccccgggcgcaacccacaccgcccctgccagccaccatggggctgccactagcccgcctggcggctgtgtgcctggccctg

SEQ ID NO: 243963 - DNA, 122 bp, Homo sapiens
ggaacgggtgcggagggtgggtctgtcacgtgacgggaggggcggggcaccggccgggggcgcgtgtgcggggcggggcccggcggtgagagggtgcggcgcctggctggcccgaggcgggg

SEQ ID NO: 243964 - DNA, 122 bp, Homo sapiens
cctctccagctgcctctgaactccctggagcaagcacctcctgctgggctgtgtgagctgcgactggttctcagtggcccctgccatggacatgcctgaggtcctcaagtccctgctggagc

SEQ ID NO: 243965 - DNA, 122 bp, Homo sapiens
tttcatccaggccaagagcacgggcacagagccccccggtgaggtccggcttgcggacagcgcagcctctaggtgcattgagcccctgggaaggcccggccctgagcctcaagtgccaggac

SEQ ID NO: 243966 - DNA, 122 bp, Homo sapiens
gtgagagtggcgtgggggctgctataaatagcagcaccctggctcctcttacagtccctgcggagggccacctgccagcagggaggtgtgaagtaatctttccagaggcctcagcaaaggat

SEQ ID NO: 243967 - DNA, 122 bp, Homo sapiens
gcccagaatggggacagtgtctggactctggggcactgggccctctctgcagggggtcagcgaatgacggaaccttgtctccaccagcgacggcaggtgtgcagcccagaccgtgtcaccct

SEQ ID NO: 243968 - DNA, 122 bp, Homo sapiens
agctacctcaccacagcccgtaattgtttatgaattaagcttttgccaaacaaatctacacgttgtctaaaccttccatccccagggtgcattccagcccacccacgaaagcgcagcgtggg

SEQ ID NO: 243969 - DNA, 122 bp, Homo sapiens
aaataatgattgccaaatactttgcagtaatactatttgttatccaggggtgtcctccgccgcgtatggccaccatctctatttttgccagggttgaggggggtcgcttacaggtgtggccg

SEQ ID NO: 243970 - DNA, 122 bp, Homo sapiens
cagggagttaatggaggccgcgtggtgctggttgggggtgtgggcgtgcgagagcggcggcggcggcgtccggagccgcgcgtggttctgcaggccgcccggatgatctagggcacaaacat

SEQ ID NO: 243971 - DNA, 122 bp, Homo sapiens
ctcaaggccttggtccagcgtcagtgcggggttcgtgcagcagccacatgggctgactgccgctggccctgggaagacagggcaggatgaggctgggcatccccctgggcttgggacacaga

SEQ ID NO: 243972 - DNA, 122 bp, Homo sapiens
cgaactgcccgttcacttccatctcgctcacctgcgggcagacacaggcgttgtgacactcgcctccacctggtggaggatcaacctctccaagcatctgcgaacttcaatccccagaagaa

SEQ ID NO: 243973 - DNA, 122 bp, Homo sapiens
cagatttggttaagagagtctaaaactatgttgtccaggttggcctcaaacacctgagctcgagtgatctctcatctcagtctcccgagtagctggtactacagccacatgccattgcacct

SEQ ID NO: 243974 - DNA, 122 bp, Homo sapiens
atctggttaagagtgtggcacctttccctcctctcttgctcccttttttgccatgtgatacgatagctcctccttccaccatgattgtaagtttcctgaagccctcactagaagcagacgcc

SEQ ID NO: 243975 - DNA, 122 bp, Homo sapiens
cccgcccctcgcccccccaccgaacctctacactggctggctggacactaagatggctgccgttgccatgacacccaaccctgtgcagacccttcaggaggaggcggtgtgcgccatctgcc

SEQ ID NO: 243976 - DNA, 122 bp, Homo sapiens
ggaagatattttaaggcgtgtctgagcagacggggaggcttttccaaacccaggcagcttcgtggcgtgtgcggtttcgacccggtcacacaaagcttcagcatgtcatgtggtaggtgagg

SEQ ID NO: 243977 - DNA, 122 bp, Homo sapiens
aaaggttaaactaaacataatcaattgatcctattaaaaaaatattgcacaagttcagtccgggcacggtggctcacgcctgtaatcctaacactttgggaggctgatgcaggtggattacc

SEQ ID NO: 243978 - DNA, 122 bp, Homo sapiens
gagacaggcacatctgccacacatggaaagaagaaagcaaactggagtttccaaagccgccggtccccgcaggcctgagcgcttgcagcttctgcctttgattcctctgattttatgagctc

SEQ ID NO: 243979 - DNA, 122 bp, Homo sapiens
agggctgccgttggtatttttggtctgggataggtgagggagaggaggcccagaaggggtcggctgcgacatgcagccccaacaggaactgccatttgcctttcctgcagcccccaccgcct

SEQ ID NO: 243980 - DNA, 122 bp, Homo sapiens
agttaccaggtcccagtactaagtaagcagcttcagggaagatgttcctttctgagcttccgtatctaggaaagggaaacaagccatactgatgggttgccatggtggcaattctagtcccc

SEQ ID NO: 243981 - DNA, 122 bp, Homo sapiens
gctcccgcctccaccccaccccttccccgcgctcgtgcccgggctccgggggcgcgcccgcgctcgggcacccacccaactggcacgcgcgggagctggacgtcatcccctcgttaacattc

SEQ ID NO: 243982 - DNA, 122 bp, Homo sapiens
tcctgggaaggcggggtcaggggccatcaagctcggctcctagttcatgtcttcccactccgcgtccccttgtttgacctcgaactgccgtcccgcgtgggagcggggagcggggcaccgag

SEQ ID NO: 243983 - DNA, 122 bp, Homo sapiens
ggggagcttccttcgtggtacccagggccgtcccggggcttccttcgtggttctcagggccgtcccggggcttccttcgtggttctcagggccgtactggggcttccttcatggggagcttc

SEQ ID NO: 243984 - DNA, 122 bp, Homo sapiens
cccagcctcagtctgggacatggggagtgagggagagaaaaactgcaacaaatgcgcatacgtgcaatgtaattgccatggaagcaacaaaaggggataaaagggtggtgactatgtgtgag

SEQ ID NO: 243985 - DNA, 122 bp, Homo sapiens
ctcggagttactgcattcacagcaatgagaggagctgctcccagacacattcatgaggctcggcggtgcctccctggtggctaatgatgctgcatctttgtgtgcccttattgaccactcct

SEQ ID NO: 243986 - DNA, 122 bp, Homo sapiens
tgtcctgcaatccaatgttcctcactctcacaagattttacagacgtggaaaccgaggcccgaggccccaaggggtaatcggcccgccttcccatgccaataaccggcagtggcgggaccca

SEQ ID NO: 243987 - DNA, 122 bp, Homo sapiens
ctaaagtttatcacaaggcagataatctgccacaaatgaagctactactctgttccctcacgggaagagaggtctaaaccctggggtggatagcaggttggccagggatctgatgcctcccc

SEQ ID NO: 243988 - DNA, 122 bp, Homo sapiens
tctcgcgagactagcggtcggggcgggcgggtcgagcctcccggaagtgggccagaggtacggtccgctcccacctggggcgagtgcgcgcacggccaggttgggtaccgggtgcgcccagg

SEQ ID NO: 243989 - DNA, 122 bp, Homo sapiens
ctccatcctccacaaggtgggacctgcccaccttcgagaagtcgcgggaggccggagcggcggtccttctactcgacccccttccgcagcctgccgggagatgtagttcgttccgcagcaaa

SEQ ID NO: 243990 - DNA, 122 bp, Homo sapiens
tctcagtctcatgctacactgcgattcttttatttatttgctattttaggcagtatccgccggctctctaccatggacactcagtgaggatttggttctcttaggtatgaaccctgtgcttc

SEQ ID NO: 243991 - DNA, 122 bp, Homo sapiens
aatgggtgaagaaataaagtactgggttcttcaggcgtgctgtaatcatttcaaatggtgcgctttagaaccaggtgggagttatattggggaagggctaccagccaaaggagagaggcttt

SEQ ID NO: 243992 - DNA, 122 bp, Homo sapiens
gagcgcgtctggctctccacgccaacccattctgcccgctgactgcttgagtcctaagcccgacgaccctgccccagaccctggagacgctggacgctggctcacctggatcccactcagac

SEQ ID NO: 243993 - DNA, 122 bp, Homo sapiens
ccaccactctccatctttcggggatgtggtgggagggtagactggcatggaccaagaagtcgctagtgtggcctaagcaagtcccttctggccctggcagctggcgttatgagcatggtcac

SEQ ID NO: 243994 - DNA, 122 bp, Homo sapiens
caatttaaaatcttgcggctttttactgaaacctgctatagagttgatgatttataacttcgagttatggttattttctatgcaaatgataaatccaagttgagatcaagccttcgaagtct

SEQ ID NO: 243995 - DNA, 122 bp, Homo sapiens
tgctctctttctggtcctctctagtcagcactgggctcagggtctgaagccaagcctccccggcccgttcggtgtgaggtgtctgcctcggggcgtggctgcatccaagggctgccaggtat

SEQ ID NO: 243996 - DNA, 122 bp, Homo sapiens
aggggggagatgactttactcccagcatttcagggggtgtaccaccttttagatgttgttcgtaatatccaaggagggagatgacgttacccccagtatcgcagaaagtgtgccccctctgt

SEQ ID NO: 243997 - DNA, 122 bp, Homo sapiens
ctgggcaagaaaggatgactcagcagaaacagcgtcctggccccacaggacaactggagccgctgccctgggggctggtaccaagtggcagagctgctgaattaatgacccctccacctcag

SEQ ID NO: 243998 - DNA, 122 bp, Homo sapiens
aaccaattcaggacaatcctcctccgcaggatcctcttcctcatccacagatccaacagccggtaacattccggcctacggcacgtccctacctcagctgaaccgctgggaccaacacgccg

SEQ ID NO: 243999 - DNA, 122 bp, Homo sapiens
aatgatttaaacaaacaacaacagctaaacaagagcagcggcctccaggtctcacgtcaccgctagatccctcttgacccccccgccagagaaggaggaccctcccgcgccctttcggagcg

SEQ ID NO: 244000 - DNA, 122 bp, Homo sapiens
cagccgatccctggcagcacagcgtggctttcctgcaggccggggctggggcgggttctgcgtcttcccttcttctttcccgcaggccggggctggggcgggttctgcgtcttcccttcttc

SEQ ID NO: 244001 - DNA, 122 bp, Homo sapiens
cggaggaacccctctagttccgccaggctgggtcggggtctcaggcccctcactcacccgcggatgcaagtctggccaacatagtcagggtcaaagccaaggccaggccgggggctggaagt

SEQ ID NO: 244002 - DNA, 122 bp, Homo sapiens
ctgtcacaaagtcctggttctgtgaatgtagagtgtgacaggtggtcaggaaaagccctgcgacatcttctagctgtgtcagcactgaagtgatgcccacatcttacacatggaaagtagat

SEQ ID NO: 244003 - DNA, 122 bp, Homo sapiens
tggagtcatgccgctggcttgggcaccattggtcatgcctggaacacgcagcagcgagtacgcacatctggcggctatcccgggcggctccggtcctgatatggagagagagggcgggctgg

SEQ ID NO: 244004 - DNA, 122 bp, Homo sapiens
ccgcgccttggggggctgtgtgtgcgcgggggccagggcggggggctcctgcggtgcagccgggccccgtccacaggtgtcccgaacaggtgtgtccccccgagtgcttctaagtgggcccg

SEQ ID NO: 244005 - DNA, 122 bp, Homo sapiens
ttacctgtcctgcatgcccgtttgggacacactcaaactgtaactcaaaaatagctaaaccgagtgcataagcggggtgaaaatcaatccatgtgtgtatgcgtatgtgcatggtacccctc

SEQ ID NO: 244006 - DNA, 122 bp, Homo sapiens
tgagggcggagggaagagtgagcgcagggctccgggacagaggtctcgtgtaactcctggcgccgcccaaggggttaaggcaagcagggagagctccggggctgaaggtcactttgtgcttt

SEQ ID NO: 244007 - DNA, 122 bp, Homo sapiens
tatcagccaaacttcacctaacctttggacttgttaagccagtgccttgcagcctaggcgcggggcttttccaccggttctcagttccgctttagtccagagagaagacactacgcttcggg

SEQ ID NO: 244008 - DNA, 122 bp, Homo sapiens
caccaccttaagagctgtaacactcaccgtgaaggtctgcagcttcactcctgaagccagcgagaccatgaacccgccagaaggaagaaactatgaacacgtccaaacatcagaaggaacaa

SEQ ID NO: 244009 - DNA, 122 bp, Homo sapiens
ctgtttgctttggtcttctcatcatgggtggatgtttttattaattagattaagtgatgccggatatttctatttgatggagggattgactggttcagccacatgatcaagtgagacagaga

SEQ ID NO: 244010 - DNA, 122 bp, Homo sapiens
ggatttgcagtccatgagcaacaagccctgcttacagacccctgggaggagcagattccacgaggggctggaccaagtctaccttccaaatgtggctggactctctgcagcccccacccaga

SEQ ID NO: 244011 - DNA, 122 bp, Homo sapiens
ccgcctggtgaggtgcccaggccagaggttgccaagcagaggcctgaggggagccgcggtcgtgctccagatgaaggggtgcgtgcaaagcggctaggaggaaagtggcagcggcaccctgg

SEQ ID NO: 244012 - DNA, 122 bp, Homo sapiens
cccctggactgtgagttctgtgaagtcagggaccttgtccatccattcacagctggggcccgtggcacccaccaccaggtacaaggtaagtagtcagcaaatattcactgagtgaatgaatg

SEQ ID NO: 244013 - DNA, 122 bp, Homo sapiens
attagagttgggggtggtggcccatgcttgtaaccccagcactttgggagcccaggcgggcggatcacctgaggtcaggagttcaagagcagcctagccaacatggtgaaaccccgtctcca

SEQ ID NO: 244014 - DNA, 122 bp, Homo sapiens
tctacatcaatctggcaagttcattcccctttaaaggaggctatgaccactgtatctaaccgacctcattttccccctcagagactttgggtccatgttcttatgaaatgtggagggctggg

SEQ ID NO: 244015 - DNA, 122 bp, Homo sapiens
tgcagagatgtgagaataagatgattatttataggcttcttaatgcctgttttgctggaccgaagaggtaaatttctagaactcgggcaaactggcaaagctcttgctctataattgaggag

SEQ ID NO: 244016 - DNA, 122 bp, Homo sapiens
ggatagatagatggatgccggaaaggagaagaatgagagacggatgtgagactagatgcacgcaggccagagcaccagcatacgctggaacagagcacgagcatacactcgaacacacgcgc

SEQ ID NO: 244017 - DNA, 122 bp, Homo sapiens
catcctcctccttaacccgcccagctctgggatgttgttgcctgggcgggactagaggcccgggaggagtctgcgcagccgcagaagggcttgcagtggcgcctgccgggcgctgagggccg

SEQ ID NO: 244018 - DNA, 122 bp, Homo sapiens
tcccaggctgtcgcgtctgccatcagacgcgcagatttagttgaaggcagcgtggaatggcgtctgcagggctgttgtgtacttgacataaacagattcggtgtggaactgcattgagttaa

SEQ ID NO: 244019 - DNA, 122 bp, Homo sapiens
cattggagtcagaatgggtgataaacgagtctgtggggcctgtggaggtcctcaaacagccgcacaatctgttggcgatatgacctcggtgctccccctcggcatcctcacccctcctctta

SEQ ID NO: 244020 - DNA, 122 bp, Homo sapiens
cgggcgctccggggccagaggcgccttcggctcgggccatggcgcccggcgccgggggcgcgaggagcggctcatctagtcagaccccccaccccgccaccgccaccagacaccaccatcgc

SEQ ID NO: 244021 - DNA, 122 bp, Homo sapiens
cacacatcgaatcctgccggctactttaacagcttcaggcagacccccatggtttcctcccggcgaggcactttgaagtcctgaagaaataagtgtgaggtggtatgagaggggctcctcgg

SEQ ID NO: 244022 - DNA, 122 bp, Homo sapiens
tgttaccatcacttgtcagtaggtggcagaaactcaccagctcgtccgtgccttcctgcccgtggagccagcacatttaaaaacagctttcaataataattagaacacaacaacccacttaa

SEQ ID NO: 244023 - DNA, 122 bp, Homo sapiens
tctctgtcctgcgcccagactggggctgggggacgggctcccggcggcaggcctgggcggcgctaaggtagctttctcctgggttgtgtttggccaacgcgtgtcttgactagattcagtgg

SEQ ID NO: 244024 - DNA, 122 bp, Homo sapiens
cctctgtcatggattgtgcctttggttttgtgtctacttttatgtggactgtaccagccacggcctcctgactcccgactcccgactcccctgcattgcttcatctcctgccctctccgctc

SEQ ID NO: 244025 - DNA, 122 bp, Homo sapiens
tgctctccattcagaaaggccccagcccctggcattcttccaggagggggcttgctttgccgccctgcagggggactctgcagagccggcctctgccatctcatgtccaggaccacaacctg

SEQ ID NO: 244026 - DNA, 122 bp, Homo sapiens
gcggctcggaacgcaaggggccggcgagccgacgctgctgcaggaggctgcggcgtggggcgaggttctcgctacggcttcgttcccgtcctcccgcggccgctctcccccggaagccctcg

SEQ ID NO: 244027 - DNA, 122 bp, Homo sapiens
agtttgcagcaagctgagatcacaccactgcactccagcctgggcaacagagtgagacttcgtctcaaaaaaaagtgctatgtgtgctttataaaaatgtagccatccatccatggcacttt

SEQ ID NO: 244028 - DNA, 122 bp, Homo sapiens
gaacttatatttgattatatttttctttgtgctgaaggattgatctccttgtctaacacacgttgaaaatctggagggggtttcattggaaaattgtagcatttcctttattagcgaccctt

SEQ ID NO: 244029 - DNA, 122 bp, Homo sapiens
gtgtccatcaggcaccagaacccaatgcacaaagccaggaacgtcccaaacagctgcagccgaggttgggataaggaaacgaggctttcctgtcaaactaaacctggccgccccggaccccg

SEQ ID NO: 244030 - DNA, 122 bp, Homo sapiens
gttttcttttaacactgtgatctgttggctggaaattggatgatatggtttcacttttagcgtgggacctgccagaatgagatctgcgtccgtcgccaataacttatagatgtgaactgttt

SEQ ID NO: 244031 - DNA, 122 bp, Homo sapiens
ctgcccagcctgtgagctccatcctcagccgccccccgcccagggcattccagcaggagccgccctctcagccctgactcgactctagctgccctggaaccaggctactccggttatggtct

SEQ ID NO: 244032 - DNA, 122 bp, Homo sapiens
cccaactccccaggatagccagtggggctggcagtgaatggcaggctgccttttttccttcggaactgccacctccaccttcagaactttctcctcttttttttggtttttagtcacagaac

SEQ ID NO: 244033 - DNA, 122 bp, Homo sapiens
cctccgacctgcaacctccagccgcccggccctaggacttgagcggctccctggccggtgcggaacctgcgggctaataatctagcgaccgggagaacgccaaacatccctggactagaagt

SEQ ID NO: 244034 - DNA, 122 bp, Homo sapiens
tttttgtttccttgaccttgtgacagacatgatgtagagagattttcccagaactcccctcggaaatgagtagctagccaactactttatgttcaaagtagtggtaaaaggatggactaggc

SEQ ID NO: 244035 - DNA, 122 bp, Homo sapiens
ggccatccagagagctggacgcgtgagccatgaggacaaagagcagtactcacaggcagccgggagtgacttgctctctgtcctctctctctcctctccacagtgacagttaagaggcacag

SEQ ID NO: 244036 - DNA, 122 bp, Homo sapiens
aagaacttcttagctgaaaataacagctcagctaaacaggcatttatttgcccacaagaccgcatctctgaacagtttcaacaagctaaaaaaactgacgtcctttccaaagaaaaggaagt

SEQ ID NO: 244037 - DNA, 122 bp, Homo sapiens
gctacaacccaaaggatccaagtggcattgtcagagcagtagacatggaagataaagttacgtggttacaagatggggtaatccaatgataagaatgtatacagttgagactgggcatgggg

SEQ ID NO: 244038 - DNA, 122 bp, Homo sapiens
tctcttcccccgaggccagcgatggctcgggtgcgggcgaggagctgggagggcggctctcgacgcaggtgtcagatccgctcggcagtgctcggcgcgctggcccggcccccagctcctcc

SEQ ID NO: 244039 - DNA, 122 bp, Homo sapiens
cttctcagatgagctaggagccgtcctgagggggtgaccggtgccttgggtccagagttccggacccccaggaaatcgcaggtcgcggggagcagcagagagaagggggtgggagaggggga

SEQ ID NO: 244040 - DNA, 122 bp, Homo sapiens
gaagcgcaagccctattcgaagttgcaactggcagagctggagggcgagtttctggtcaacgagttcatcacacgccagcgccggagggaactctcagaccgcttgaatcttagtgaccagc

SEQ ID NO: 244041 - DNA, 122 bp, Homo sapiens
actccttcaggcgtcggcagccactagtcgtggcgagaggggcggggtggccggggctggcgctccacttggcccccgctcccggcccgccccgccgccgcggccccccggatgagggtata

SEQ ID NO: 244042 - DNA, 122 bp, Homo sapiens
atgaagtcttcataaaagatccaagaagacagggtttgggggcttctggatagctgaacacgtggaggtttataagaaaccaaacaagaatttatccatgtgccgggagggtggtgcacccc

SEQ ID NO: 244043 - DNA, 122 bp, Homo sapiens
gcggtgcgctttttggtgggtcgagtctctctgggaagtctccgggtatctgcgcctttccgctggggcctgagcgaagggcagttggcttgtcgaagctcttttttcctgttccctttctc

SEQ ID NO: 244044 - DNA, 122 bp, Homo sapiens
gcggcggcagaggagtgggagcagcggccctagcggcttgcggggggacatgcggaccgacggcccctggataggcggtgagtgaccccccggccccccaccagccccctccgctcccgtcc

SEQ ID NO: 244045 - DNA, 122 bp, Homo sapiens
tgggaccaggccgggttgggcgtcgcgcttgtcaatcatctagaaccgggtgtgattgagcgagttgggatcccactgccgacagccgcgcggaggcggtcgggaaaccggaaaacgcttcc

SEQ ID NO: 244046 - DNA, 122 bp, Homo sapiens
cacaaaatagcacgaaagaatcacatctctaggagccacgccaaccgccacccaaagcttcgtggagtgaggtctttccactggccttgttttaaggcttcgagtatatgaaaagtgaataa

SEQ ID NO: 244047 - DNA, 122 bp, Homo sapiens
ggtacgcctggggcgagccggtgagggtagcccgaggcccggagaggtctttaagcatcgcgggtccgcctccctccctctcgagccctctttgttttccaaatactctaacgctgacgtca

SEQ ID NO: 244048 - DNA, 122 bp, Homo sapiens
ctctctatgttgcccaggctagtctcaaactgctgggctcaagtaatgctcccacctcagcgccccaaagtgctaaggatcaacactttgggtgagctacagtgccagccaaaaccaagtac

SEQ ID NO: 244049 - DNA, 122 bp, Homo sapiens
ctccatagaggcgttagcgcccaccagcggcagtgaccgcgcacagggaggtgaagaatgcgaccacggtgatacgtccaacctggaaaacgggcctgagaaccaaagggccaacttctggc

SEQ ID NO: 244050 - DNA, 122 bp, Homo sapiens
caggaaccaccggggctgcggcctctgccgccgagtatggtttccgcaaagagagggcggcgctggaacagttgcagggtcacagaaacatcggtaattgccgctgtctcctttctcttctt

SEQ ID NO: 244051 - DNA, 122 bp, Homo sapiens
aggaagcggaggtcccggtccccaagctcggagcacagggcacgggagcacaggcggcctcggtcccgtgagaagtggccgcagacccggtcccattccccagagaggaagggggctgtgag

SEQ ID NO: 244052 - DNA, 122 bp, Homo sapiens
cggtcactatgaaaccgccggggggcccgcaggctgctgtccctgtgaggcctccctccccgttttcagggtttcctgagaaaccaggggaaaaagcaaataaagataccgtggatttgtgg

SEQ ID NO: 244053 - DNA, 122 bp, Homo sapiens
ccgggttgtcctcgccgtctctgcccgcgctccagcgcgcacctgggctgctcggcggagcgctcagatactgtctctttggatctgacggtggtacccaccgtggcacagatttatgtcca

SEQ ID NO: 244054 - DNA, 122 bp, Homo sapiens
ctagtaaaacggtggtctcaatgcccacttagcctctgcctctgaatttgaccatagtggcgttcagctgatagagcgggaagaagaaatatgcattttttatgaaaaaataaatatccaag

SEQ ID NO: 244055 - DNA, 122 bp, Homo sapiens
gggtcccatagagtctcaatatgctaacggcctggtgttgcttaataatttagattctgacgggtcctctccagggaggggagcaaagggcaaattatcttaggggctgggagtgcagaagc

SEQ ID NO: 244056 - DNA, 122 bp, Homo sapiens
ctgtgagttcccagagtgtgagaggggagagattgcctccaggatatactcccctattggcgaacctggcaacccaggccactggggatggccttaactctacccagcattggagcagattt

SEQ ID NO: 244057 - DNA, 122 bp, Homo sapiens
tcccccttcgccctgtccctcggtctggtcgggggcgctcaccagcagccgtcgcagctgcgcaggcaccctcagcaaacaagcctctgagattacagacgtccgcggtctggtgcaggttc

SEQ ID NO: 244058 - DNA, 122 bp, Homo sapiens
gggctgttagactggagagtggtcggtaaagacagccaggcctggctgggcccatagtcccggcacctgcccaacctgcctacccgtttgttcctcagcttggcccctcttggtgtcactcc

SEQ ID NO: 244059 - DNA, 122 bp, Homo sapiens
ctgggcaggagacccaggggaaaattctgtaacttctctgggctggtttcaccaccgcagcggagccctccctctcgggcgacagagctgcgacgggtccctcagcctctgctgctgcagca

SEQ ID NO: 244060 - DNA, 122 bp, Homo sapiens
gcgtagcggcccagattgtcctcctccactgccgctccaccctgggaaatggtctcaaagcgatccctggcagctccgcccttcaatccactccagcctccggaggcgcccggaaagaggcg

SEQ ID NO: 244061 - DNA, 122 bp, Homo sapiens
cagtttcgccctctcttccgctaatgattgcattattatgctcccctctctggggggtctcgcccctcttgggtcgctccggagccccggcctcccctggctgcatttcttaaaaatttggg

SEQ ID NO: 244062 - DNA, 122 bp, Homo sapiens
ggagagcgcaaggatggctggagaagggccctcgccccgccctgcgcatctcccagggatcgcagtgaggaagtctctgacacgccacactgaggtcatgctggccccaagccccttcccag

SEQ ID NO: 244063 - DNA, 122 bp, Homo sapiens
ataggatttgcacatctgctcaacacactccatcccgcgagtcctgtgccggctgacaagcggtttcttaaggacagtaactgttccaggtgtattctgggatcagcgtgtgacactcatag

SEQ ID NO: 244064 - DNA, 122 bp, Homo sapiens
gtgtgacgtacccatggcgacgacaccacgattcacggcaggtgttcgagttgcccttcccgccagccactcacctgtccccgtcttccacgccctgagggccgcggctctggaaacgggga

SEQ ID NO: 244065 - DNA, 122 bp, Homo sapiens
tgggcactgtcagattaaaggtgcagtggttctaaatgctgtttgttccagccctgtcttcgattgcaacaatgtgagtgtcttgtctgtgctggtggattattaacagaggttattggtct

SEQ ID NO: 244066 - DNA, 122 bp, Homo sapiens
attacaggcacctgccaccacgcccggctaatttttgtattaaaaaatttatacaattttcgccacattggccaggctgatcttgaacgccggacctcaccttcgacctcccaaagtgctgg

SEQ ID NO: 244067 - DNA, 122 bp, Homo sapiens
tgtgattaagtctagctttttttttgctctttctggtttattatgagatagttttgttatcggtaggttgggttagtcatatgttactatggtattatgaaggaatattttcttgtttcttg

SEQ ID NO: 244068 - DNA, 122 bp, Homo sapiens
gcccccttcccctgtctcctgggtctctggaggagcccaggaaggaggctccgctggttccgctgggtcaggcgctgacgggaccgggctgcggcaatcgttagcgggtcatgtcggccgcc

SEQ ID NO: 244069 - DNA, 122 bp, Homo sapiens
gttccacctactcagaaggctgaggtgggaagatcgcttgagctcgggaggttgaggctgcgatgagctatgatcacacaactgtgctctagcctggacaacagagtgagaccctgtctcta

SEQ ID NO: 244070 - DNA, 122 bp, Homo sapiens
ggtctctgctcctggctcctctggccgggtggcccggcgccgggctgcggctgctgggggcgccgagccccccagaggagcagctgctgcccgtccgcctgtccccggtgggagcctattcg

SEQ ID NO: 244071 - DNA, 122 bp, Homo sapiens
gttgcccaggtcctcagcctgagtgttgaggctgcggtagacccagcttccgcgggtgcccgtgggggaaggtggtaagtgtgccagtctggctgatagatcagtttacaccaggatgccca

SEQ ID NO: 244072 - DNA, 122 bp, Homo sapiens
agacggcctgccccacagcctgccctttgctgaagataccctcgctttatacttgcatttcgcttttcagtaaaaacagtcaagttactgagttctcacataaagagctcttctcacacact

SEQ ID NO: 244073 - DNA, 122 bp, Homo sapiens
agaatggtatgtgtcactgccacctccctttctcagtcctctctctccccaggttgctagcgtcccccctgggggatcaaactggactgcttcccagcctcagacagagagcagtctgagtc

SEQ ID NO: 244074 - DNA, 122 bp, Homo sapiens
gaggagccgtgccgggcccaggtgcctggcgtctctggctgggctgaggcttacaggagccgggagctggccagaccctgagactccagccctcatgcctggggcctcacatctcattctga

SEQ ID NO: 244075 - DNA, 122 bp, Homo sapiens
ccgggatcaatacttgggagggggagagcagatgtgaatgcgatgcgggcacacgcacagcgtgctgctggaggcccagctcagaggagctgggccagcctcccccgccctctcctttctcc

SEQ ID NO: 244076 - DNA, 122 bp, Homo sapiens
atcccaggctcagaccagctcaatgtcatttcttgccaaggcctggcaccatcccagggccggcccggcctctcgctggtcaaggagaactatgcagagctgctggaggatgccttcctgaa

SEQ ID NO: 244077 - DNA, 122 bp, Homo sapiens
ggctggcaggtgggagcggcctggctcgggcgcccccagcctgctccgaggggcctgacccgcgcagattgccccccgccccgccctccaggagttcacccgtgtggacagggctgctgcag

SEQ ID NO: 244078 - DNA, 122 bp, Homo sapiens
gaaatgtgattatggatgctgatcaggttggcgtatcttgagtctcttttcttagagccacggcttgggacatgaattatctggataatttcttatgccttatggagccaactatatggcag

SEQ ID NO: 244079 - DNA, 122 bp, Homo sapiens
tgggcgcttgcatcacacatgtgccacatgacggattgctggacgttgacagcatggctccgctactaaaaacatatgactccatatggaacgccgtggtgtggggtggaaatcctggacgg

SEQ ID NO: 244080 - DNA, 122 bp, Homo sapiens
tgacctcatgatccacccacattggcctcccaaagtgctgggattacaggcgtgagccaccgcgcccggcgacagacaagtattttcatctgcagttaaagatatggggactgagacctgaa

SEQ ID NO: 244081 - DNA, 122 bp, Homo sapiens
ctcttagatgcttattattagacctgcagcctcgcttctttctggcttgcagcccaatttcgtacgggtcccttgggcccttgctctttttgggatgttttattctaattcccagtcccagc

SEQ ID NO: 244082 - DNA, 122 bp, Homo sapiens
tgtcctgcgctccagctgcaagctgggctcctgttacacactggacagaccacccactgccgccgctgccaagccctctcctccccaccagactgccagacgactacatcattctgcccaca

SEQ ID NO: 244083 - DNA, 122 bp, Homo sapiens
tgtatttatgctcatctctaatcccttctcagccttttggctgagatcaagtgtagtatacgcattcctacccactttcaatcacatgcaaattaaggggcaggctaatgcaaattaagggg

SEQ ID NO: 244084 - DNA, 122 bp, Homo sapiens
actggacataaaatgcccactacttaaataatgatttcccatacgtaacttttagtgacccgagttataaatgttttttaaggaggatttctatctatgcaatgaggggaatttttcaggtt

SEQ ID NO: 244085 - DNA, 122 bp, Homo sapiens
tctcactctattagttcactggggagctggttacttaaaagaagccttgcccctcctcctcgctgcctcagtatgtgacatgcctgctccctctttaccttgccatgattgtaaacttcctg

SEQ ID NO: 244086 - DNA, 122 bp, Homo sapiens
tgagcccttggtaaggggctggggatccccacactcagctgctctggttgtgtgggcaaccgttatgggccagccctgcctctcaagccctgggttaagcaagtcctgcctggggacccccc

SEQ ID NO: 244087 - DNA, 122 bp, Homo sapiens
aattggcacttatttcagggtggcccctcaggcatccaagagccagaggagcaggtgtcacgggatggcagcgagcgaggccaggccaggagaagcaaccgcagcctcctatggtcgcccct

SEQ ID NO: 244088 - DNA, 122 bp, Homo sapiens
cacttcctctcgcttccgcccgcctccctggctcgccggctggcgtcgccaccgcctcctcgtccccggccaccgctgtcgccgctgctgcaattcaaggcgcacactatcccactttcccg

SEQ ID NO: 244089 - DNA, 122 bp, Homo sapiens
acacttctgccttctggccacatcctcccagacaggataaatttgaaggtggttcccccacgccccgctaaagaaaggtagagggaaaagtggatgattaatgattgcctgggctgacttaa

SEQ ID NO: 244090 - DNA, 122 bp, Homo sapiens
ttaaaacataaggagcttagcattcgggtctaggaacttaaccctggtgccctcccagtgcgctgctaatggagctcgatttcagtttccagctggcttttcaaaaaagctgatgaggccag

SEQ ID NO: 244091 - DNA, 122 bp, Homo sapiens
tgaagtggggtagttatcctcattttttgttttgttttcagaccattcttctttcctcctcgctaaaacccccagctttgaacctcatggcatcagattacagcactatctacatgacccta

SEQ ID NO: 244092 - DNA, 122 bp, Homo sapiens
ctggcgccgcgcgcggcgcattgtgggagatgtagttcagctcctcagggcaagccggtacgcagaagggaagtctaggctgttggattcttgcattttagggaggaagggagaatggtcca

SEQ ID NO: 244093 - DNA, 122 bp, Homo sapiens
gcggaagagcagctgttttggcgtctgtttgctgcggtaggaacatggcggatcggctcacgcagcttcaggacgctgtgaattcggtgaggaatttcattcgattagcctctgtctttctc

SEQ ID NO: 244094 - DNA, 122 bp, Homo sapiens
aaataccaagtcacattttttgtcaattattatttgtcagatgccatttgctgcaaaacccggaattcaatcccagcttgaacacacagctaataccaaacggctcactaatagccgcggtc

SEQ ID NO: 244095 - DNA, 122 bp, Homo sapiens
ctatgtagattcgacttcgtgttgcctgtgacacacaggcagggcaaagccgcctcccagcgtctcagttgaacccttaccctcaacaccagtgcactcctgtgggtggcctgtagtcacct

SEQ ID NO: 244096 - DNA, 122 bp, Homo sapiens
gctccccttcacttccatgtctcttcctctctggagatgccctctccagagagtctggttcgcccatccggcacctcctcgggctccctgtcctccgggaaccccgtgggccttctcacccc

SEQ ID NO: 244097 - DNA, 122 bp, Homo sapiens
ccaatcagcaggagccctcggctcgcgctggggcggggggtcccccactcgccctccccgcggaactctggcacagtcagctgaccgcagacactcacgtgacagctcggggcccacgcccg

SEQ ID NO: 244098 - DNA, 122 bp, Homo sapiens
catagaaagcagcttttggggatgggggtcggtggccaagggagggaaagtaacgggatgcgtcgtgtaaatatttcacgttggaatcactactttttataacaggacgtagttgcgaataa

SEQ ID NO: 244099 - DNA, 122 bp, Homo sapiens
agtttgacagtgtgttcccagaagcttagcttggagtcggtatttactctggcaggcggacgggtgaagccgggctaggtagtaaatcagcctcctgcttctcgcgtcctcagagaccactt

SEQ ID NO: 244100 - DNA, 122 bp, Homo sapiens
acctcccgcccggtggatgctgctagttgccggggaacttggtttctgttctccccgcagcggccttaaagcgcgcagcgtccccggcacgctgattggctgccggcggcgcctatccgggg

SEQ ID NO: 244101 - DNA, 122 bp, Homo sapiens
tacatgccaggaacaccaataaggactgatgacatgaaattgctttgtcattatgagtcacgattttaaacatttttactactacagagtgtggtcaagaaactttcaaaccactgctccag

SEQ ID NO: 244102 - DNA, 122 bp, Homo sapiens
tgaacaaccagactgtaatgaaccaaaacaccataaagtctatgtagaaatataaatacacgcatggtgtatgcaagacaagcccacaggggcaatattattgtgattaaaatatggctagg

SEQ ID NO: 244103 - DNA, 122 bp, Homo sapiens
aatggcagagcgcacgtagacacatctgaaggtggatggctgtatctcccagtactggaccgggttgctgaaaagactcacacccgaataagaagcctttttggtgttgtgtccaggtgggc

SEQ ID NO: 244104 - DNA, 122 bp, Homo sapiens
aacttttgacttaattcctcatttttagtaaagcatctgattcccacctttggttgttcccgggccctttgagcttaggccctcctagattcagcctccacagaagagatatctcctgcttc

SEQ ID NO: 244105 - DNA, 122 bp, Homo sapiens
ttagtagcctatcacgtggtttctgtaaaatgcttgatagcacgtaaaacgctttcaggtcggcgtctcgtttcatcctcacaacagccaggtaaggaagataaccccctgataataactca

SEQ ID NO: 244106 - DNA, 122 bp, Homo sapiens
tgttggttctaatttgggtttatcctggcaggctctaggtagagaggctcagaaaacctgcgtccatccttcccatctttcctcccatttccgaaaccacggccccggtttcgagtccagaa

SEQ ID NO: 244107 - DNA, 122 bp, Homo sapiens
acactacataaaatagcttctaaccccttaaccagtatgctgcataaactagtacctccccgtaccgcataccccaggactttctctttctttctctctctctttctatgtgtacatatata

SEQ ID NO: 244108 - DNA, 122 bp, Homo sapiens
gggcgaacgtgggcgcctcgtgccctgattggccgacggggcgcgcgcggcctggaggggcggggcggacgcagagccgcgtttagtctatcgctgcggttgcgagcgctgtagggagcctg

SEQ ID NO: 244109 - DNA, 122 bp, Homo sapiens
tgacggatcacatgagctctatattccaccaccactacccctctgcctagtaactagtgacggtactggctcctcccttgcatgggtggtcccaaatgctaggcaagggtggggccgccacc

SEQ ID NO: 244110 - DNA, 122 bp, Homo sapiens
agtactggataaagaggtggccgatcgcaaacgctgagcacttcaaaactctgggcagagcgcttccgcgcctctcctgctatttcaccctggccacaggctagccgccgaggccggtcatc

SEQ ID NO: 244111 - DNA, 122 bp, Homo sapiens
atctcaagtgatccactcacctcggcctcccaaagtgcggggattacaggcgtgagccaccgtgcctgaccacattgcacttttagtttgcatttctgtagtaatgaatgatgttgagcatt

SEQ ID NO: 244112 - DNA, 122 bp, Homo sapiens
cttggatatcagcttatcaacagacttccaccaccaccaccagcatataaacagagtccgcgtaagaaaactacactgaataggaatggcagcttttaaaagtgggggaactacagtatagg

SEQ ID NO: 244113 - DNA, 122 bp, Homo sapiens
cggccgacgcctcgcgccgcccagactcccggcccgtgcgcagccccgcacgaggacgcacgctaccctggaatgcaggctacgccgagtgagtgcccctccccgacccccagctcaggccc

SEQ ID NO: 244114 - DNA, 122 bp, Homo sapiens
cttgccggccaaggagtggcactccttggacaagagattgaaaccttccgccttgacctccgccacccggttgggtcccggccaggggatgtggggaagtggccagtgggcagcactcctcg

SEQ ID NO: 244115 - DNA, 122 bp, Homo sapiens
ccaacagcgtgggacccacctgagcccaaactcctgcctcagaggcaggaggtcccgaagcgctcgacaggacgccgggtgggcggctaagattgccctctggcgcccttcgctggtgcgcc

SEQ ID NO: 244116 - DNA, 122 bp, Homo sapiens
tgaatttaagaggcaaaactaaaaactataaataggttagagtgtgaatgaaggtgtacccgcctcgatttctgctcactgtggagaagcctatggttaaagcactgatcttattttgtccg

SEQ ID NO: 244117 - DNA, 122 bp, Homo sapiens
agatacaattcaagttgagttttggcagggggacacagccaaaccatatcaactaccatccgtggactcatagaatgtcttatccactatcatggtattccatacagcattgcatctgacca

SEQ ID NO: 244118 - DNA, 122 bp, Homo sapiens
ctgctctgcggggtcctctggctggggtcttgcctggacgtggcagaaacccgcacccaacggcctttctctgcacaagttggggcaggacggccaggcagacacagagcatgcacagacct

SEQ ID NO: 244119 - DNA, 122 bp, Homo sapiens
ttcctcctcctgggacaatccactggtctgggtaccggctgctactcaccagcagcacctcgtcctcctgctcgctccggaagcacaggcacgccgcccgcttcttgaagccctcgcggtcg

SEQ ID NO: 244120 - DNA, 122 bp, Homo sapiens
gatgaagagtaaggaggcttgagtctccatttgtcacagcaagctttgtgaccttcggaacgtccctacatttacatgatccttatggttatgtattgagtgcacacatatggtatgtgctt

SEQ ID NO: 244121 - DNA, 122 bp, Homo sapiens
agatgtgggaacttcccctcatttcttcttctgtgccgctaacctctttcctcctccgcgcggcatctccagccccggcagtttgtaaattgcccgttttgcccaccctcctggtgggcgtt

SEQ ID NO: 244122 - DNA, 122 bp, Homo sapiens
gccgcctgctgccctggtgccgtggacttccccagcttgcgcctggacctcagggtggcccgcagcgtcctgcccctgtcggtggtcttcatcggcatgatcaccttcaataacctctgcct

SEQ ID NO: 244123 - DNA, 122 bp, Homo sapiens
cactctcgtctggccgccgcgctttcaggaggtgcttttggttctctccggtcttgtccacgctagggggtgcacgtactcccaactgtggtcgcgctctcaccccttctgctgctctcgtg

SEQ ID NO: 244124 - DNA, 122 bp, Homo sapiens
cagattttagtcccagcagataagcacacccaacatgtcattaaacccggccgaagccatcgccctggggatcccgtgtttgctgtgagtcactaagggctgtaaacactccagagagacag

SEQ ID NO: 244125 - DNA, 122 bp, Homo sapiens
ggatccagagcctggctcctcctctccaccccacacagaccctacctgatgccttcatcccgctaaccagattaggaaaggcccatggagccgaggcgagcctgcagccaccatggccaggc

SEQ ID NO: 244126 - DNA, 122 bp, Homo sapiens
aattgatatatggattcgatgcaacttcagttaaaaatcccactaaattttggctgggtgcggtggctcacacctgtaatcccagcactttgggaggctgaggcgggcggatcacaaggtca

SEQ ID NO: 244127 - DNA, 122 bp, Homo sapiens
cggtgtctcttccttgtgattggctgttgccatggatacgctttgtgtagcggctatgggcgctgtcttacaacaaagccaaggaatctcgctgctgaggggtgagccggggtcttaagact

SEQ ID NO: 244128 - DNA, 122 bp, Homo sapiens
tgcgcgccaccgcccgcgccccgcgctggggaatgcgccctcggcgcgccggccagggggcgcccgcagcccaccccaggggaggcggccccgagcgcccctgagccttcccatggcccggg

SEQ ID NO: 244129 - DNA, 122 bp, Homo sapiens
ggcctgggctcccaccagctcggcgtccacccaccggcggtggcgcgcccctcgaccgcgcggggacagcaggatttgcagaagttcagcttgaaagcctatgatatgttgccaagaaatac

SEQ ID NO: 244130 - DNA, 122 bp, Homo sapiens
ctaaagtattgccaaaggtataatcaagaaaggtgtctcaaaacttctcactttttattacgcagtagtttaaaaatgcagattacatcctaacaagacctctccagcataccataaatctt

SEQ ID NO: 244131 - DNA, 122 bp, Homo sapiens
gggcccctggctccgggaccagggctccggagggtgccgggcggggagcggaacagggaacgggctggtggcggccccaagcgggagggacggaccgacacgcggccccctggcggccttgc

SEQ ID NO: 244132 - DNA, 122 bp, Homo sapiens
ccgcccccatccttctcccccgaatggggctgggaaggggcacatctggcggacccctcccgggggacccaggagggtttagcaggtgcgcagtctggaacccccacacccaccttccaggg

SEQ ID NO: 244133 - DNA, 122 bp, Homo sapiens
ggcggccagcgggcgcgccgccatgttgggagtggccaagcgggtcacccttaaagggcccgcacggcctgagtccagggagaggccccgttaccatgacaacacccttgtcgtcccacacc

SEQ ID NO: 244134 - DNA, 122 bp, Homo sapiens
tctgtccactgttgaggttctctctctctttctctccacatctgtgggcctgtctcttctcgcaggccggggcggtgccctgaggccagggcgtttcccaggtaggacctgcactgtagttg

SEQ ID NO: 244135 - DNA, 122 bp, Homo sapiens
taggctctcctcttggccacggagacccaaagaaaccagaaaaaccagtttaggccatgacgggaagcagggagggtcagacatacctcatcacaccctcctccctttggagttcaggcaca

SEQ ID NO: 244136 - DNA, 122 bp, Homo sapiens
gaggtcagtgacgtggtgagcatttcatgctccttactgatgagcagagggccggtatcacgtgctgccttcctagggagggctgggtagtgcgtcaaggaaatgggcccagagctgtgtct

SEQ ID NO: 244137 - DNA, 122 bp, Homo sapiens
atccttcgtccccgttagcacgcctccctttcccaacaataaagatattttctccatctgcgcgtgtcgcctactgcggaggaaagctttggacatgaaacctatttttggcttcactttaa

SEQ ID NO: 244138 - DNA, 122 bp, Homo sapiens
ccgcctagctgaccaccttcttccctatgagttcccagtaacggagcccagtggaggagacgctacacttctctgtggggacagaggctaagggcgggggtctccatagaggcgttagcgcc

SEQ ID NO: 244139 - DNA, 122 bp, Homo sapiens
aaaaaaaaaaaaaaaaaaagcaaccaaagaaaaaaggtgggtggggggagactctcctggcgcgtagccccaagcccactatcacaggtgggtgagcttgggtgcttcctgaattcttccct

SEQ ID NO: 244140 - DNA, 122 bp, Homo sapiens
ctgggctcagccagagtcacagccctgctccccacagccttgttgaaatgtctggcctgacgactcagggaacccagcatagtgtctagattccaactgcctcattctcagccctcagctgc

SEQ ID NO: 244141 - DNA, 122 bp, Homo sapiens
aatatgcttttataattttattctatgtagccaatttgttatcactgttgtgtgtgtgggcgcatgtgtgtgtgcacatgttttgatggtttatatgtaaagttttttggctggcttactac

SEQ ID NO: 244142 - DNA, 122 bp, Homo sapiens
gatctttgtccctcagccgcgccggggacggcgcccccgacgccctttgaccccgccccgcgttcagggagagtccgttttcggctgtttattatatttgtagccattggtcgacctcattc

SEQ ID NO: 244143 - DNA, 122 bp, Homo sapiens
tcatccactcgctcactcactcacgtgtgtgctgagcacccactgtgtcaggcgtggttccgggagctggggagagcagtgaaccaaacgggaaagcatccgggccccaggggaatttctgt

SEQ ID NO: 244144 - DNA, 122 bp, Homo sapiens
agcgggagagagaagctgaacagtcaggcaagcctcggggaatgacagctccgcgggggacgcactggtaggcggtagacgtaagcggggtcggtgggaaagtagacggtggggcggcggca

SEQ ID NO: 244145 - DNA, 122 bp, Homo sapiens
ggcggctgcgggggtcaccgccccgcgggccgccgagtccgggcgtggcccgggagccgtcgtagtggacagctcaggcagatacctcagtgtcctcggagttttgggcagggcgttggggt

SEQ ID NO: 244146 - DNA, 122 bp, Homo sapiens
cagtctgaggacttgcactctctaacggagtagattccaataaacttgcttccttcactgcgctctgtgactcgcctccaattcttccctgaagtagacccaagaaccctctcttggggtct

SEQ ID NO: 244147 - DNA, 122 bp, Homo sapiens
gccctcgcccctctatccacaccctatcccaagaaatggtgcgtcccgccgcagggcgtacgcacagagaaggaagtgttcaagtcttccagtgcggagaaaagagactaggactcgcccct

SEQ ID NO: 244148 - DNA, 122 bp, Homo sapiens
ttttctttgaacgtgcatttgccaaaaaaaagtgagtaagtgagaaatagaagttgaagtcgaagtcttgtagttgagtttagactttgcggacttttagaaccacgtatacatgtttcatg

SEQ ID NO: 244149 - DNA, 122 bp, Homo sapiens
tgtgcctaattcgaaaccaaagcgcgggacggatgaaagtacgggtcgcgagaggttgttcgcgccttgagagttaagcgaagtgtggtggcttccaaggtaccgacacttgccgtaggctg

SEQ ID NO: 244150 - DNA, 122 bp, Homo sapiens
cgatgattaactgaatgtcttcgcttcttgttcgtgtgaagcacacatgtgtttgggcaccgcgtgtggaggctgtggaaggctcccagatgagggcacgtggcactcagggtttgcccact

SEQ ID NO: 244151 - DNA, 122 bp, Homo sapiens
ggaggagccgagcgggcgctggcaccgaggcctgaccatggacgaggaatacgatgtgatcgtgctggggaccggtctcaccgtaagtgcggccccggcgcccctggccctgcgtcgtgccc

SEQ ID NO: 244152 - DNA, 122 bp, Homo sapiens
ttcctctttgctgtccaattcctcttcttttttgaatatctgtgtttgtaaagtgtcactcgggtttatcactcacaaggaggcaacacaaccacacgcttctcttctataaataaactgaa

SEQ ID NO: 244153 - DNA, 122 bp, Homo sapiens
gggcgctacgcccgggagtcggggcggggtctgggatgcttccacttccttccgtcaggccgggcggcgcacgcgcggttgggagcctcgcccatgctttgtcgcgttaccggggctaccgt

SEQ ID NO: 244154 - DNA, 122 bp, Homo sapiens
ggccagaaagttttcctgctgtctgcctgaaggtcgcctgtgtcagggggaagttgcagccgtggggattgtgtttccctgaatggagacagtacacgtcagacctccaggctgggactttc

SEQ ID NO: 244155 - DNA, 122 bp, Homo sapiens
agaacacatcaattccggacacactcccatagcaaaagtgccttctcagcagctcctgcacgggtcccgggtatcctggcgtccctgcttcacacccatggtgcgtgtcgtgctcacgggga

SEQ ID NO: 244156 - DNA, 122 bp, Homo sapiens
catcccccaccctcccacctgtctccgggacccacgggataggggccagggagcctgggtcgggggtcccgggccctcctcgtgcctctcgctccccggtcccgctcacctcgctctgaagg

SEQ ID NO: 244157 - DNA, 122 bp, Homo sapiens
ccaactcaaggattccgggttgtctaaaactagaaaatggtactttttttggatttatgacgagaaatactgtgggtttaagaggcaactggaatgtgccagttaactcttcatagacgcat

SEQ ID NO: 244158 - DNA, 122 bp, Homo sapiens
tcacgtgcccactgcacgattaacgcgcattgcagcaatttccaggctggcgctcacgaacggtgccgctaagagcactttctggtgaacacacatgcccctgtctgtggtgcagacacccc

SEQ ID NO: 244159 - DNA, 122 bp, Homo sapiens
tagctggagttaaaaataatctaatcccacccccccaccccaataaaggaagtctttattcgactttattctgaagcatcaaatcattctatgattaggtgatggacccagggatagaatcc

SEQ ID NO: 244160 - DNA, 122 bp, Homo sapiens
agctggctgcctcgggagtgccttgctgacggtcgctggagttcgtccatcaggcgactgcggtggggcacggagagcaaccgctgcctggcggagactttgatgtgcggctgaggcctggc

SEQ ID NO: 244161 - DNA, 122 bp, Homo sapiens
tttggtctccgatggtgatttagtttcaccggcagctgtttatccagggggctattgctgcggaccacgccaggcccttagttcagactcctggtgccaccaacaatgcttattttttatgc

SEQ ID NO: 244162 - DNA, 122 bp, Homo sapiens
agacgctgttcatgtatttcttgcataattttaagtatctgattttaatggtatgagggacgggatagcaggggccttcctgaccctgtaattctctggaagcagtggtcagatcaggagtg

SEQ ID NO: 244163 - DNA, 122 bp, Homo sapiens
cggcgcccaagatcctcttccagcctcgagccgcttctgcgctcagcccccgcattctttcgctccagcccgcaaggctccgccccccggccccgcccctcaggatgcccttgccctcccag

SEQ ID NO: 244164 - DNA, 122 bp, Homo sapiens
cagacccaagcccaaacgccgactccagcacccgcttggccggcgcccccagccacaccgcgcttcctggccctcgcaaatggctccctgttggtgcccctcctgagtgccaaggaggcggg

SEQ ID NO: 244165 - DNA, 122 bp, Homo sapiens
ctgcacttcgcgggacgtgatggtggagcgcttgtttgtagtgcgccaggcgggaggcctcgctggcgatgcgctcgaagatgtcattgacgaaggagttcatgatgcccatggccttggac

SEQ ID NO: 244166 - DNA, 122 bp, Homo sapiens
atgctaacacgtaggcagggttaagtacaatttctctaagatctgagtgactgtttttgacgtgtgcacagatttataaatctaaataactacgaaaatgtcaaagctattctttctaccat

SEQ ID NO: 244167 - DNA, 122 bp, Homo sapiens
aagtacagtgcctggctcgtggcacatattcaaccagggtctgttcccttctccctccaccgaaacacatttccaattagaatggaagtcaatggaaaattcaggttgaaaattcggatgat

SEQ ID NO: 244168 - DNA, 122 bp, Homo sapiens
gccgcctgtcctggaaggctggcaggttcactggccaaggtcaggagaccgcaatggccacgtggtctcccggctgggctgggctgcggagcgtgcacctcacaggaagcgtcgggactgat

SEQ ID NO: 244169 - DNA, 122 bp, Homo sapiens
taaatctcaatctgagcgcagcgtgcatacagccgctgcatcccagtggaaaacaaaagccgggctaaggctgggggtgggggaagctcataaaggagaagtcatgaagtctggctttctgg

SEQ ID NO: 244170 - DNA, 122 bp, Homo sapiens
ctgttagacttggggttgatacccatcatcgctcttagactcggggttgatactcgtcatcgctgttacactcagggccgatacctgtcatcactcttagactcagggctgatatccatcat

SEQ ID NO: 244171 - DNA, 122 bp, Homo sapiens
ccaagctgggagttcgtggtcctctgtgctctggaatgtgacaggggcttgccagggcatcgtggagtggctcctctgcaagccactcactcctcaccctggacagagctgtgctggcagct

SEQ ID NO: 244172 - DNA, 122 bp, Homo sapiens
ctacaatgccactgtctttgcctatggccccacaggtaaggggaatgcccagactgtgggcgaggaccgcaatgcccctgtaatccccgtcaccctccaactagtctgaccccagctggagc

SEQ ID NO: 244173 - DNA, 122 bp, Homo sapiens
cttgcacaagaggtgatgtccgccagccagccgggcccctgtcagcacctgggctgtgcccgtcccacccacctcccaagccccagcgtccagccgtcctgctaggggtgactccgccccca

SEQ ID NO: 244174 - DNA, 122 bp, Homo sapiens
gaccttcctgaaggcggaggaactgtgagagtgcctacgttggcccaaggcctgacccgacgatcccggggaccctagccctaacggccccgcctcctgggccccaaacccggactcggccc

SEQ ID NO: 244175 - DNA, 122 bp, Homo sapiens
gcccgggtgaggcatctggaggcgctgagcgggaccaggagctgcgggacctgcagagggcgcccgcccgtgtgggcgcagcagcgcctggagggagacggccccggccgcccgcaggggtc

SEQ ID NO: 244176 - DNA, 122 bp, Homo sapiens
cgacagctggcaggcgcaggatgccgccgtggatttgtgccttcgcagggagctggccgccggggccccctgacgagtagacgtggggtcagcacccaccaagcctgctcagagtcctgccc

SEQ ID NO: 244177 - DNA, 122 bp, Homo sapiens
tctgtagtcggctaacagaggatgaccaagcccctcgcgggggcgggggcgggtcactcccggacagggcccccatgaagtttccctggggactgtgtgactccctaggggtcgggttacct

SEQ ID NO: 244178 - DNA, 122 bp, Homo sapiens
ccgcccgcgccagcaagaggatcgtcctgccggagcccaggtaccagctgccccggccggcgccggccccaagccgccgccccctgcggccgccagctaccccctgcttcctggagggtcgg

SEQ ID NO: 244179 - DNA, 122 bp, Homo sapiens
cggccccgagtgaagtggggggctagctgggggcccctgccccgggcccaggcaccagcccgcgcctgcccggccctgggcggcccctccctccctccctccctccctccggctccccccgc

SEQ ID NO: 244180 - DNA, 122 bp, Homo sapiens
attattataataaagcctggttcaggctactgcagacctatccacagccatgtgtactgacgctcctgctccatctccacagtctctgtagtcttcaaactcagctgagcattaattgctac

SEQ ID NO: 244181 - DNA, 122 bp, Homo sapiens
ctggggagaggccgcgcttcctgacccggtccctctgcaccagcgtggaggggggaggggcgcgcaccctttccgcccaggcttttgcgggctcctcgggccgaacccgaaggggctgttcc

SEQ ID NO: 244182 - DNA, 122 bp, Homo sapiens
ggtcagcagatcttggttccccgctttgggccattctctgaccctcacttttcaagtctgcggaatggaattgatgataccttcttcaggaggaggatgggagactccagtgacaacaaaac

SEQ ID NO: 244183 - DNA, 122 bp, Homo sapiens
cgggcctcgctgctggctgcggagctggaggagctgcgggctgccctggagcagggcgagcgcagccggcgactggcagagcaggagcttttggaggccaccgagcgcctcaaccttctgca

SEQ ID NO: 244184 - DNA, 122 bp, Homo sapiens
gacgccagtgggtgcctgaaacaagggaaaccagctgccttagccacaagacatccccctcgtccctgaagacagaggctttttctggatgtggtgactcagtggaaagcagccgggggcat

SEQ ID NO: 244185 - DNA, 122 bp, Homo sapiens
atctataggtgatgatagcatttgtgaaaactttttgctattcataagcaagaaaacaaccgtaattttcattcttccaatttcaagtaaaataaacacaatcctagttatatctcatttga

SEQ ID NO: 244186 - DNA, 122 bp, Homo sapiens
tactgcattgtgctgaaagtacttaccagtcttatcaagatccaataaggcttttttacacgtgactcttaagtgcatatgggacgagacggtaattcttgttagaaggaatgactcatctc

SEQ ID NO: 244187 - DNA, 122 bp, Homo sapiens
aacacggtgaatccccgtctctactaaacatacaaaaacaaaactagccgggcgtggtggcgggcgcctgtagtcccagctactccggaggctgaggcaggagaatggcgtgaacccgggag

SEQ ID NO: 244188 - DNA, 122 bp, Homo sapiens
agcacctggactctgccagtggtccaggcaccacctggcagccaggactggctctggctccgtgtagccctggcaatcccaagctggagaagggggctaagattatcctgggaggcaaggat

SEQ ID NO: 244189 - DNA, 122 bp, Homo sapiens
ctttcctttccacttagattctggcagcgaagaccagtgattctctgcgggctgtaggggcgggggcgggggtcttttttggtccgagagggtgcggggaagggggcacatccggcgtgagg

SEQ ID NO: 244190 - DNA, 122 bp, Homo sapiens
ttcgcacatgcgcgctagacgcccctccaacatctcagcgccgccaaaaaaagtttggagcgatttatcactttgatttggagatcttgtcagatggcaatcgccgaggaggcggagaaagg

SEQ ID NO: 244191 - DNA, 122 bp, Homo sapiens
tccctggaatagaccatcacaggctcttcacccttggcaggtggacaccattcaacctgccggggcaggtgtgtgcccatttcatggcatatggggacaaccggattctctgtccaggtccc

SEQ ID NO: 244192 - DNA, 122 bp, Homo sapiens
cgccgccgcccgagcgcacccttcagcccgcgcgccggccgtgagtcctcggtgctcgcccgccggccagacaaacagcccgcccgaccccgtcccgaccctggccgccccgagcggagcct

SEQ ID NO: 244193 - DNA, 122 bp, Homo sapiens
agcgccagtgcgaaggtgctgataacactgactggagctacactgactcccaagcactgccgcgtgaaacaatacgaagaggtgaggatctaggccaccgccctccactcccaatttccgtc

SEQ ID NO: 244194 - DNA, 122 bp, Homo sapiens
ggaggggaggggtgacagaaagaattccatctctccagtatcttagggagggatttgagccgagaagggcctcaggcttgacagggaccagcagaatagcacttgcctgcaaccaaacctag

SEQ ID NO: 244195 - DNA, 122 bp, Homo sapiens
cctgggccgcctggcggccatcgtggctaagtaggtactgctgggccggaaggtggaggtcgtacgctgtgagggcatcatcatttctggccatttctacagatacaagttgaagtacctgg

SEQ ID NO: 244196 - DNA, 122 bp, Homo sapiens
cttgcggggaggtgtggagtgagaggcactggcgggaaccagggctgcgcgcggcgcttgcgggccagcgcaagttccgggtgggcgtgggctcggcgggccgcacttggagcgggcggccg

SEQ ID NO: 244197 - DNA, 122 bp, Homo sapiens
ggggcccgaagggccaccgcgcccgcctcggacctgcgaaccgggcaggattgccccttgcgtcccacgtcctgaccggctgggcagcgactacctggtctaaagaaaccctctcctatgtt

SEQ ID NO: 244198 - DNA, 122 bp, Homo sapiens
gagagctcctgtgaggaaggccgggcccgtcggcccccgcacctgcggcccttccacccacgcactgtggccctggaccccgaccgcacgcctccctgcctgcccggtgaccccgattactc

SEQ ID NO: 244199 - DNA, 122 bp, Homo sapiens
cacacctcacagaccctgcgccccacctcacagacgccgcgccacacctcacagaccccgcgccccacctcacagaccccgcgccccacctcacagacgccgcgccacacctcacagacgcc

SEQ ID NO: 244200 - DNA, 122 bp, Homo sapiens
agcaggggcaccctgccccatgcctctgccacagtatctgtgcaatagggacagtaagagcgcacccggcgagggtggctgggatgcctgcagcgcccaggagaaggtgccacacagcccgg

SEQ ID NO: 244201 - DNA, 122 bp, Homo sapiens
cctccccctgccccacactcaaaggtccccaacacacggtgacttcacccaggcccttctcgctctgggcccgaaaatcccagacttaccctcctggggctccgcagcctctgccccccggc

SEQ ID NO: 244202 - DNA, 122 bp, Homo sapiens
cccacgctcgctccctagacggagctcatttgttcaatgagcagtgattcggagtgggaccggtcagcatgttctgtaagtggcccccgtgaggtgctctgccttccccctgccctgggcgg

SEQ ID NO: 244203 - DNA, 122 bp, Homo sapiens
cgtgcgggtgcgcggctccacgggcgtggcggccgccgcggggctgcaccgctacctgcgcgacttctgtggctgccacgtggcctggtccggctctcagctgcgcctgccgcggccactgc

SEQ ID NO: 244204 - DNA, 122 bp, Homo sapiens
ctacattactaacaaggaaaaatgcccaaagacagtgttcagccaaaaaacaaaagcgtccgttacaaaatatgtaaatataataattctgattttcaaattaataaatagactaatttttg

SEQ ID NO: 244205 - DNA, 122 bp, Homo sapiens
gaagttctaactggttttgtgtcaggaagatctttctcgccgctacccagcctggcgtgacggattaaacatcaactagttaaataaaaattaatatcaactgcctcctaacttctaatgtc

SEQ ID NO: 244206 - DNA, 122 bp, Homo sapiens
cccaacgccccggactgcgggcatccggcctggttccctctttctgagcccagcctggagcgtgtcggcgcgggcccgccccctcccggagccatctccccactgagaggggcgcgcgaggc

SEQ ID NO: 244207 - DNA, 122 bp, Homo sapiens
attactgttttggtgactcgaatgaatcatcaattcatttatttgtcttcaaatgtctgacggcacttaaggtctaaaaaagaaggtaagtttaaacagatagtttgatgttaaggtataaa

SEQ ID NO: 244208 - DNA, 122 bp, Homo sapiens
gtctgctctccttaggtagcatgagcaccaggattggtcctcgccttttccccaactaaccgcatccctgtaggtaagatcttccccaagttttttggccccagtagcaaaggggagtttga

SEQ ID NO: 244209 - DNA, 122 bp, Homo sapiens
ggggcggcgccctgccgtgtgctgcccgagggtggtgctcagtgcgagtgccccctggggcgtgagggcaccttctgccagacaggtcgggggcgtggggctctcggggcaggggggggggg

SEQ ID NO: 244210 - DNA, 122 bp, Homo sapiens
cctcccgcagctccccacgcgcgcgggcgccccccagcaccagtctcggcccgccccctccgcccgaccattggctgctgctcccgtcactttcaggccacagccaagtccctcctcagctc

SEQ ID NO: 244211 - DNA, 122 bp, Homo sapiens
ccctatcgctgcttcaaacgcaggttccctggcatctcacggtccacttattataattggcggcgaaaggccctccggaggaaccccagcttcaagccggcaccagccctctctgctgctgg

SEQ ID NO: 244212 - DNA, 122 bp, Homo sapiens
aacacctctgatagtcttgctctgtcacccaggctggagtgttgttggttcactggaacacgagtatttatgttttatttcttaagcttagtgatgtgtgtcagacctctgagcccaagcaa

SEQ ID NO: 244213 - DNA, 122 bp, Homo sapiens
gctccgcgctcggggctgggcagaaggggcggcccggacgggggagctttcccagagacccggggatggattggcctccagggcgcaggggagggtgcggcagggcaggagcttggcagaga

SEQ ID NO: 244214 - DNA, 122 bp, Homo sapiens
cgtcccgaggcgggtcagaaaggctctgcttctccccattcccactttgggaagcattaccgtatttaggaatgctaacgtggcctacagtgggatgccattagaaatcatgtatgagaatg

SEQ ID NO: 244215 - DNA, 122 bp, Homo sapiens
atttctaatcaactcctaaatgatattgatgctgatactgtcggtttcccaaccaagcaacgtagcaaggtacgaaactctaaagtccctaaagggcagggaccacgcctctcgcgttggca

SEQ ID NO: 244216 - DNA, 122 bp, Homo sapiens
gccctttcttacctaggctgtaccttggttcttttgatcttgagatagaaatttcagacacgaagggacagaggccattagagaatttcttatcacctttatcctcatcatacagtaccagg

SEQ ID NO: 244217 - DNA, 122 bp, Homo sapiens
atttggctttttaaaaagcaataatacaatttaaaacctgggtctctagaggtgttaggacgtggtgttgggtaggcgcaggcaggggaaaagggaggcgaggatgtgtccgattctcctgg

SEQ ID NO: 244218 - DNA, 122 bp, Homo sapiens
aggggtcagggagttccctttccaagtcaaagaaaggggtgacagactcccctggaaaatcgggtcactcccacccgaatattgcacttttcggaccggcttaaaaaacagcgcaccacgag

SEQ ID NO: 244219 - DNA, 122 bp, Homo sapiens
gcacccaggcaagggcggggtgggtggccgtacaccggaccgaatcggggactccggtggcgtgggcgcgggccgaaccccgaccgggccgagttgggtggcgaagtaggacgtggattcgg

SEQ ID NO: 244220 - DNA, 122 bp, Homo sapiens
ggacgggcactcccgcttatactgggctattttgcttacaacttctggagtcgctactctcggtttactaccaccgattgccctgggtctgatggagccagtctcgtaatacctgcccagaa

SEQ ID NO: 244221 - DNA, 122 bp, Homo sapiens
ccaggcaagtcttggtgaggccccagttccagctcgggggtaatggccaccccagaggaacgcatttcaatgggatttcagagccccggggaaaaggaatgcgattcagggaggaggagaag

SEQ ID NO: 244222 - DNA, 122 bp, Homo sapiens
cactaagtttgcatcctgaaaactcactggaagataggaaagcaagcatgaaaaagcagccgggtcagacaggcttctggattcagtgtgtggacatgactttgcctgcatgaattgcccct

SEQ ID NO: 244223 - DNA, 122 bp, Homo sapiens
tcatctcgtaagcgccaaggtggaggggggtcctaccgagggaggagctacaggccaccgcgaccagcagagagcgaaggcaggagggaccagcctggcccagccccttcattttactgtcg

SEQ ID NO: 244224 - DNA, 122 bp, Homo sapiens
gcgtcgacgagctgaggtgagggctgttgagacgcgaggtctcggcccagagagggcactcgggcgttgttagttctgtctttatgtcaaaaaacaatttttttttcttttcttattactta

SEQ ID NO: 244225 - DNA, 122 bp, Homo sapiens
tttgttttggccactgtagtgtcctgatgggtcagaacagtgcctgacatctagtggatgcgccttaaaagatgcattgaagtatctgttcaatgaatgaatgaataacagtattaacctgc

SEQ ID NO: 244226 - DNA, 122 bp, Homo sapiens
ccgggcccgccatcttgttcccaggggcagttggcggaagagatcgagctccctggctgccggctcgccttctgcgtggagttctcgcggtctgggtttcgctgtctgctcttggcccgggg

SEQ ID NO: 244227 - DNA, 122 bp, Homo sapiens
acacgtgcaatgcaacagcaatgcaccgcggggccgcccgcctctctcggcccccacacccgccaccggcccgggagcagctgtccagccctcctgatgcagggcctccaaagggatcctac

SEQ ID NO: 244228 - DNA, 122 bp, Homo sapiens
agccgccatccctcagggttccgggtcccgggtttccagggtcccgggtttccaaggccccgcgataaccccgggcgcacgcggcgcgatgcggcgaggcgaggcgaggcggtggggccagc

SEQ ID NO: 244229 - DNA, 122 bp, Homo sapiens
ctttcccttcaatattattaacttaatagtccacttgaagcttgccggcttttttccgggcgacgtggtgtaaacaaccacaacctcgttggtgctgcaacgagctggtggagcccagaaac

SEQ ID NO: 244230 - DNA, 122 bp, Homo sapiens
cactctcccagagcctcaagctccggggatgtgtggctcaggtgctgagcctgggatctccgcaccgaggctgcaggtggcccagggtccccagatgctgggaaacaggcacaggggagcag

SEQ ID NO: 244231 - DNA, 122 bp, Homo sapiens
ggatttcattccaattcaaatgtattgaacactgttagaacagaaataaagcgcttcctacggtcatgaggatccacagtgagtgcctctccagaagatgctggctcagggcccccctcatc

SEQ ID NO: 244232 - DNA, 122 bp, Homo sapiens
gaaagagggcgagcgggagcctgggggctggggggattaggaggcgaggcgggaggaggacgaattaccctcgactactgacggcttcagccccccggggacgagcgtttggaaaatgggca

SEQ ID NO: 244233 - DNA, 122 bp, Homo sapiens
aagctgaaaatgctcataaaaattaccagcccagagcttggatttccaccggatccaccacgtgagacaaaagagtctgtcacttcttcttgccaggtttgagggccttttctagaccttgg

SEQ ID NO: 244234 - DNA, 122 bp, Homo sapiens
agtaaggcttcaaaaaaccagtcaacaatgagtaagtcaatcttatagattcttcttcctcgaataaaatacaaagaattagttccaataagtattttaactttgttaacaactgaaatacc

SEQ ID NO: 244235 - DNA, 122 bp, Homo sapiens
tggaggaggagccccccggcacaaatctcgcccgtttgggcccacggacatggctggcctcgcaaggaggatccggttccaggcctcggccctaaatagtctccctgggctttcaagagaac

SEQ ID NO: 244236 - DNA, 122 bp, Homo sapiens
tgctcggagcctgtggtggccatgaagcccagcctcatgttcctggccaaggcaggcagccgcgacatcgccgcctactgcaactacacgcagtaccagccccgtgtgctggctgtcatcgg

SEQ ID NO: 244237 - DNA, 122 bp, Homo sapiens
gctgcaggagaagatggcggtctccacaggtcggttcccgggccgggctgcgtgattttccgctccgacccggctctgcccctccgtctgctgctggcgcccgagcgctgaccgtgcgggag

SEQ ID NO: 244238 - DNA, 122 bp, Homo sapiens
attactaataaaacagcagcaaccacaggacagcttcacttccggaaactccctctgtcacgtgctttgcatgaatcctcacaccgtctcactaggggcgctctccccgtttcaccagtgac

SEQ ID NO: 244239 - DNA, 122 bp, Homo sapiens
catcctcggaggatgatatagaccggcggcccatccggagagtgcgctccaagagcgacacgccgtacctcgcagaggccaggatctcctttaacctgggggcaggtaagaacgcccctggc

SEQ ID NO: 244240 - DNA, 122 bp, Homo sapiens
cacccccaccccgcccccggcccggccaccagccccgccccgcctcaccccggccgcgggcgggctcactggccttgtagggctgcagctcttgcacctgctgtgccatctgtgccgcgcgc

SEQ ID NO: 244241 - DNA, 122 bp, Homo sapiens
taatttaatgcttagtcgactcctccactactgagggagcaaggcggagaagttttgatgcggagcgttgcctgaaagatgtttttgtagaggcattttagaaatgcccctgggaggttaga

SEQ ID NO: 244242 - DNA, 122 bp, Homo sapiens
accctaggtctctcttccccgcgttgtgggcattctgtgtgtgcctcccaccctgcgccgcggatccctggactcgtggggtgtgggtgctccctgcccgtgccctctgtgtacgtggcttt

SEQ ID NO: 244243 - DNA, 122 bp, Homo sapiens
ggtcagtgcccacaagggggttgcctgctttgactgaactaacctgtgggtttagtccaacgaacagatgtgcctgatttcagggctgaatttttgcttgaccacaagcctcgggcagaaca

SEQ ID NO: 244244 - DNA, 122 bp, Homo sapiens
tctgttgttctaaaaagtagaaaatacatcaggtcattattgttgacccttaaacaataacgtttttggactgcatgggtccacttattcacatatatattttttttaaagggtcttgctct

SEQ ID NO: 244245 - DNA, 122 bp, Homo sapiens
acacccaagcgcaaatgtggaaagccgagcgctccagaaaagccacgcaaaacgggaggccggtgcaccccagtggggctgccgcgcgcccgccaccccggccactgggggctcgcaccctc

SEQ ID NO: 244246 - DNA, 122 bp, Homo sapiens
agacctccctcccacactcagggcggatggtgcgggggtggggggcagacggggtgggggcggggagacacaggcaacccaccctaggatcctaaaaatatgcctggagagtgcgcatgtac

SEQ ID NO: 244247 - DNA, 122 bp, Homo sapiens
ggccgggaaatggaaaaacagccaggcacgggacgagtggcaagcagttgcgaaacgatccgcactggagcaggaggagtagaagcagaggggagggagtccgagggggcggaggtggagtg

SEQ ID NO: 244248 - DNA, 122 bp, Homo sapiens
gatttgacggtgaccatggacaacgcaacgtcaggtgggcttttacagactatagactggcgatcttaaaccccaaatgtcccgtttactttccatcttctgatgacaatgatctgatgaga

SEQ ID NO: 244249 - DNA, 122 bp, Homo sapiens
catacccatatacatgcctgaatgtaggtaaatgtcatttttgctccccattgctgtttccgaacagtcttctccagtagaaactcctgttgtctttgaagcacatatgagactttactctg

SEQ ID NO: 244250 - DNA, 122 bp, Homo sapiens
ttgtcgcttgttggactgtgctggccttgccggcccactgtaatgtgaggctcccgctgccgctacagggtgcagactggctgccaaggccacacttttggctaaaagaggcactgccaggt

SEQ ID NO: 244251 - DNA, 122 bp, Homo sapiens
ggctggcaatctcttccggttcgtcttggcaacgtgtgtgaagggggcgtggccatggtacggaaagtgtaaatattttaccaatagcggaaagtaaaggctttcctagttgggacagcata

SEQ ID NO: 244252 - DNA, 122 bp, Homo sapiens
gcttgaggtcctagcggaaaaagcctggcttaaggagaagatgaattcccagtttagtcccgatgggtctgagataatgctgcaactcccacattcaggtgttggccaggtaagctgattca

SEQ ID NO: 244253 - DNA, 122 bp, Homo sapiens
cacctgccccttgctttcttgtgcagctcttcacggcagctggccccagccagcggaaggcgcctatgagccctgagcctgtggtcctcagcttgggcggccagcggcctctagcaggcccc

SEQ ID NO: 244254 - DNA, 122 bp, Homo sapiens
gcagatgacagtgtgcagcactgggccgcaggaccccagaaggttaggcctagtcacaggcgtcagcagggtaccccctcctgagagccctgcagtgttgcacttcctctcaggcttcaggt

SEQ ID NO: 244255 - DNA, 122 bp, Homo sapiens
ccgcgggaccgcggggtaggggccccggggcgggacgaggggcgggaggccgggcgggcccgcccatcaccggccacgcccacgggcggacaggtttcgcctccgctcccaagcttccgccg

SEQ ID NO: 244256 - DNA, 122 bp, Homo sapiens
ccaatccggaggcagctggaagagttcgcgcgtgggaaacctcagccctttctttcttcccggcacagcgttgtgctgccgcgcgtcggcgcaggcgggggcgcaaggcccgggtcgtcccc

SEQ ID NO: 244257 - DNA, 122 bp, Homo sapiens
agccgccacccctgggagactccgcacggaaaggactcggaaccgaaggctgagccaaggcgcagtcgggggccccccggctttgcgcaggacgcgcttccactaaggctttcgcctcgcgc

SEQ ID NO: 244258 - DNA, 122 bp, Homo sapiens
ctcccgagtcccggttgcggcgcttcctgggcggatggcttgaaattgctgcagcagctgcggttctgctgtgtcatgcaagaaggaggcggcggcggcggcggcggcggccggagctggag

SEQ ID NO: 244259 - DNA, 122 bp, Homo sapiens
tgtgctcatgaaggcgacatcttcctgggctgcttctcacgaggggcgcaggtgggctcccgagtggcctggaagctggggagaggcgtggatgcggatggcgtgttgctcttgggctggcc

SEQ ID NO: 244260 - DNA, 122 bp, Homo sapiens
ctcactagggagtgccaaacagtgggcgcaggtcagtgggtgcccgcaccacatgcaagccgaagcagggcgaggcattgcctcactcgggaagcgcaaggggtcagggagttccctttccg

SEQ ID NO: 244261 - DNA, 122 bp, Homo sapiens
aagatgcattagctccaaagctgcttcattcattcattgcacacatctttattgcatgcccgtgggttgctaggcattgttttggctgattccttgttccattgaatcatctccaggcatac

SEQ ID NO: 244262 - DNA, 122 bp, Homo sapiens
ctctctaattcaatgctgcaggatccaggccaagtgtctgccgacagcctacacgtgggacgggctgacacagcacagcttgccctgtgtctggcaggctcttgcccccacatgcctgctgc

SEQ ID NO: 244263 - DNA, 122 bp, Homo sapiens
gcttgacaagggcaagagcggggaatgaggagaggcacagacccctggttctcactcaggcggtggtgtctgcaaggtcattgtcctccgtagctgacagactcctggcagcaccaacctcc

SEQ ID NO: 244264 - DNA, 122 bp, Homo sapiens
tgttgaatcattttctgaagaaatggggagctgtccctcggggcactccatggcccacctcgttggggttgtaaaatggcttcctgtgtagtcatgtgacctggagggttccagaaccttcg

SEQ ID NO: 244265 - DNA, 122 bp, Homo sapiens
cagtctttctgaaaggaagctggttgggtgtttttcagtgttggagcagcccttcggaagcgaggcaggtgctggacccaccctgtccgtccctggtccccagccccatttcgccccctcat

SEQ ID NO: 244266 - DNA, 122 bp, Homo sapiens
ttattggctccttagaaatcagagtcagtaacaactgtacagaggcccccatcttccgtgcgcccacccttccccactcccgcccggtggccccggaaaaagcagcttcatgtgggcacagg

SEQ ID NO: 244267 - DNA, 122 bp, Homo sapiens
aggctctgaagccacagcagtctggtgtgaagacagacacaaatatatccactgagcctccgctgtgcagacaacttaagtggcactttaaacaagccccataacaatcttgctgagtattt

SEQ ID NO: 244268 - DNA, 122 bp, Homo sapiens
ctcctaggttcaagcgattctcctgtctcagcctcccaagtaggtgggattacaggcacacgccaccacgctctgctaattttgtgtatttttcattgagatggggtttcactgtgttcccc

SEQ ID NO: 244269 - DNA, 122 bp, Homo sapiens
aggaaccccaagtcaggggattcacatggggcaccagtccctctcaccaagagcctgggccgctccgtgacaccctggccacatggcagacgatgccactcacactcttcccagcagacaga

SEQ ID NO: 244270 - DNA, 122 bp, Homo sapiens
agcatatactgtctgctcacatttttaagggcaggaaacctgactcacccccagaccacgcgccccaaggaggggcacttgcattttccggcgggtgggggggcggcctctactagggttag

SEQ ID NO: 244271 - DNA, 122 bp, Homo sapiens
ggaaaattgaagccagatgctctctgggatcgccatttgaggtgggcgtggctattaggacgctcagagagcccagcgcggtgaggaaagcgacgaacttaggagccctggtctgggtccag

SEQ ID NO: 244272 - DNA, 122 bp, Homo sapiens
taaacatggctgctcttttaccccacgtccaccaccacgctgtgctgaaggcgcatccatcgaccttcctcagagacgaggaaagagccaatgaaagatgctagaaagctctaacaagtccc

SEQ ID NO: 244273 - DNA, 122 bp, Homo sapiens
gccccctaactctgctcccccttttactccgtcgcagcccgggacctcctggtgggggtccgccactgcagcaccaggcgccactgccataccaccctgaacgcgcccgatctcgtctgatc

SEQ ID NO: 244274 - DNA, 122 bp, Homo sapiens
gtgcccacattcctgcagtgcgtctgaggttttggatccccgtgcccacattcctgggagcggcactcagtggcagcagtaagatccaggccacctcgcggtcggttcccaggatgcccctc

SEQ ID NO: 244275 - DNA, 122 bp, Homo sapiens
acgacccacccgctgctctgctctcataggtatgacagcacagctctggagcaaatgccacgcacatttgcaaggtgcccatttccatgcagcaaaaataagtcaataagttattgacttac

SEQ ID NO: 244276 - DNA, 122 bp, Homo sapiens
cgccaccgccaccgacgccgcgagcttcctccaggtacccgcccacctctcctcatgtcacgtgacttaaaggcagccaccccgcgctcctcagccgccctccgtcacgtgatcccctccca

SEQ ID NO: 244277 - DNA, 122 bp, Homo sapiens
ctcccagctgcctcccccaccgaccacaggggttctaactaggtctttggtctctagtggcgtcaaacccctgccagtcaccctcactgcctccggacaagggcctgtctaggacagcctgc

SEQ ID NO: 244278 - DNA, 122 bp, Homo sapiens
ggctacctgggccccgccagcgcccccaggccccaatcttggccttactgcaaccaggtccgccactggtgggtcctaggtgctgagccccagcgccccagctcctccaaatgctcctggtt

SEQ ID NO: 244279 - DNA, 122 bp, Homo sapiens
agcacaaattgagaggcggccgggcacaagataatcggggaggaaggggcagagggagcgcgcgctgggaaggtgggagccacgctgtcctcccacgcaaagaggaactaggtgtggctgtg

SEQ ID NO: 244280 - DNA, 122 bp, Homo sapiens
tgtttcggaggtccaatctttcaaggagagttaacccagaaaatgagccattctgcagctcggatatcttattgttactcagaatcagggtgaccgtgcggttgggcagagtatctgggggc

SEQ ID NO: 244281 - DNA, 122 bp, Homo sapiens
agggcgggagcccggcgagggcgccggtgctttgttctgtctgaggccaggaagtttgaccgcgctgccatgccgaaccgtaaggccagccggaatgcttactatttcttcgtgcaggagaa

SEQ ID NO: 244282 - DNA, 122 bp, Homo sapiens
gagacagagcccctgctctcaaggagcttataatctggccaccagagtttctgcaaccatcgtaacagtaaaaacacagctgttaattctgttcaagttaattttccagagcaccagtgaat

SEQ ID NO: 244283 - DNA, 122 bp, Homo sapiens
cacctccccagaagccgggcttcccgccccaccggcccgcgaggtgccgcagggagggtgcggtttggcttgtcagcacccaggggcgtcacaaaccctttgttgaacaggggatttacccc

SEQ ID NO: 244284 - DNA, 122 bp, Homo sapiens
ccctaggcggggtgcagcttcctttgtcctcagactgaacatctccctccgccaccggtgcgggaggagcccaggacctcgccaactcggcttcacagcgcctcctgggggccgcgagggga

SEQ ID NO: 244285 - DNA, 122 bp, Homo sapiens
ccctctggcccctgaggatctggggccagaaagacactggcttagcatgggaggagtccccggcctgtaccagcctgacaaggggctgcagtggcccccgggtctcaaattaaagccagggt

SEQ ID NO: 244286 - DNA, 122 bp, Homo sapiens
gatttccctacctgcctgtctcgctttctcacctgcgttccctcctttcatcccggagcccggaacctccgcttccggctccacgtccgcccggaagaagatctgctgcacacttccgtttc

SEQ ID NO: 244287 - DNA, 122 bp, Homo sapiens
agatcaaaggggctgtacttggtatggaaaaaccacagaagggtggaagctaagcaccttcgccttgagagttgggtccatccatacctgaaatggacccctgtggacccttgacgaacagg

SEQ ID NO: 244288 - DNA, 122 bp, Homo sapiens
ctggcagaaagaataaaaacctgtggatgtttccgtgagtggcaggattggatggtccctcggaaaagaaccaatcagcactggagctgaaggacctcatctgtctctgggcagacattttt

SEQ ID NO: 244289 - DNA, 122 bp, Homo sapiens
gctccatgataatcccggccaagatgcacacgctgaagcctgtgaggacatcagacccagcgtgggggcagtcactgcaggcagggcctacgcccagcagaagcgtcaaggtcagagaaatc

SEQ ID NO: 244290 - DNA, 122 bp, Homo sapiens
ggatccgaatagggggcagccagcgtacggtgtgggaactcgggccggcgcgggagcctgcggtcaagggggctcagcactttgtaaacaaggagtgggaagcgttaaaaaaacgctcgtag

SEQ ID NO: 244291 - DNA, 122 bp, Homo sapiens
tggcccagtttgcagtcaatgcgcctgttcctcccactcggtacctcgcagccccatgagcgggacctggacagggacaatcaatgtaggcctttgggggtccagcccccaccttctccact

SEQ ID NO: 244292 - DNA, 122 bp, Homo sapiens
agtcccaggagccgtcaactgccagtttcaccaccgctctagaggtcacttccgggagggcgtcatctcaccgcgtcggcgtcgcggaacgatgacgtacagggctcggtcgcgctttgtga

SEQ ID NO: 244293 - DNA, 122 bp, Homo sapiens
aaaattaccccggaattttaaaatatttttcaaatcactccatgaagtgcttagaaagcacgacccttccctgaaagatgcataatcagctttcctctttacctacccgggcattctctact

SEQ ID NO: 244294 - DNA, 122 bp, Homo sapiens
gcttggaggaggtaacgagggtctcctgccgggtcctgggcttggctgggcatgggctgccggcttttcacggggaagcccttcgcggccctcactggcactgacccgctgatagctgactc

SEQ ID NO: 244295 - DNA, 122 bp, Homo sapiens
cagtgggtgcggcacagtatggaactggcccccacagagctagcctgtgcacaggttccccgtctccctatgggaaggaggaggcaccaggcctgctccagctccctctcctggattgggac

SEQ ID NO: 244296 - DNA, 122 bp, Homo sapiens
gctgacgaccctttgtaaatggccccagatgtgagcagctattttaaaccgtgccatcttcgggctgcgtggtggataaggagctggtcagaaaggtcgttccatcttaacaactaaaacct

SEQ ID NO: 244297 - DNA, 122 bp, Homo sapiens
tccccactcccaggcagtgccagggcctctcctggagggttgcggggacagaaggacagccggagtgcagagtcagcggttgagggattggggctatgccagcccgattagaagggttgggg

SEQ ID NO: 244298 - DNA, 122 bp, Homo sapiens
gtcgaggacctcaggaggagaacctgctcggtctgaactcggtttctcagcagcagtccacgaggcctccctcctcttcagcagcattcgttggggcatatatccttggaattttacttatt

SEQ ID NO: 244299 - DNA, 122 bp, Homo sapiens
gagaagggagagtgcgagaggtgggtggagacagcctttcctcttctggcccggagtcagcgccaggaggggggggacgcgggagctgggggagggcttggggccagggcggggcgcttagg

SEQ ID NO: 244300 - DNA, 122 bp, Homo sapiens
accaatcttttggatgttcagctgcctgtttggggtgacggactttccatcctagaaccacggcctaatttgtccgtaacctcacagaggtgactctggcgctagtgaacaatgctgctgtg

SEQ ID NO: 244301 - DNA, 122 bp, Homo sapiens
gcatcggcaaagctcgggaacggcgacagatgggaagacgcgtgggagcctgggggatctcgggagagccgcgcaaactcgcggcggacgcagccagcacccgcagccagcacccgcacact

SEQ ID NO: 244302 - DNA, 122 bp, Homo sapiens
ctgtgggaggcctgctccctctggggggcaccctgggcagggtgggggggccttgggaggcgcttcttgccaaatgcagacgaggggtgagcctgccagcgtttgcgacgtccccgcacgac

SEQ ID NO: 244303 - DNA, 122 bp, Homo sapiens
agaacgtgagaacacttgcagtcctcggggtggaaatgccttctagaaatactaagtatccgttctctcgttgagactttggcaaaccagggattttaggaagggtctggcactcaacgttc

SEQ ID NO: 244304 - DNA, 122 bp, Homo sapiens
caagctatgcaaaaggaggcctctgctgacccctggcggtcaccagccggagtctggctgcgcggtgacccaccacacgttgcccagccgtgtggctgggatggtcggtacccatggccgtg

SEQ ID NO: 244305 - DNA, 122 bp, Homo sapiens
cataagtaaatatgctttttcctctcacaccattgcttatttggaatgttatctttacatcggcagaggattagcaagatggaaaaatgtagggtatgcacaataagtatctgtcctaacat

SEQ ID NO: 244306 - DNA, 122 bp, Homo sapiens
accgcgatggtgggcacggtttggcggcgcagagaagatgcagccttccctgccggcggccggcaccgctgtgctgcagagctcaaaagcagagggggaaaaaggcatccgaagggtccctc

SEQ ID NO: 244307 - DNA, 122 bp, Homo sapiens
tcactaaaaatacctcggctctcctgtttgatcactctcccttttgacctgaatggatcgcgggagccgcgccgcccgccccaccttcggcccgttgccctttaaaggaaaagggcgtgggg

SEQ ID NO: 244308 - DNA, 122 bp, Homo sapiens
ttgcactgacattttgcagctgctgcttgaagccgcccagaagggcatcaggactgggggcgagggggagggcaggggccccccagccagagctcatgagtggcagatgcttctcccattct

SEQ ID NO: 244309 - DNA, 122 bp, Homo sapiens
tacaggtcctggccaatgctcagagttgcgtgtggcctatgagcctcacgttgcggcgggcgcgcgtccccgcacatctgcaggacggcgccatcctcctccttaacccgcccagctctggg

SEQ ID NO: 244310 - DNA, 122 bp, Homo sapiens
tgttttttttttttttttttttgccttagtgccttgactgagcatccaggcagggctcggcggcgcctgcgcgctggagcctccttgagctccagccgcgtcctcccctgtcgcagcggcac

SEQ ID NO: 244311 - DNA, 122 bp, Homo sapiens
tctggtgggagagacagacatggaataatatctgccaagcgcttcctctggattatctcacgaaatcttcacaatgactctgtgaagtgggtaccattgtcactcctctttagataggaaac

SEQ ID NO: 244312 - DNA, 122 bp, Homo sapiens
ctgagcgactggagaagtggctgcaactgatgctgatgtggcacccccgacagaggggcacggatcccacgtatgggcccaatggctgcttcaaggccctggatgacatcttaaacttaaag

SEQ ID NO: 244313 - DNA, 122 bp, Homo sapiens
tttcgcattttcttccctccagaacattctcccaagcattcggtaggagacctggggcatcgcagcctggagggtctcttcgatttcagcctcatcacagttcactgggatgccccagacta

SEQ ID NO: 244314 - DNA, 122 bp, Homo sapiens
ggagccggttcaaaccggtggcgcgagccagccgcgcgacccccatctcgggcgttcccccggcaactcgcccgtttccatggcctcggacccccgcgcctccattccccagcccgcatctg

SEQ ID NO: 244315 - DNA, 122 bp, Homo sapiens
gccccttagggccgagagcggcgtggtgaatcgatggggacagtgccgcggccacctgtccgcacccagccatcagtcaccccaggacccaaaccggagcaagcctggaggaccgctgaccc

SEQ ID NO: 244316 - DNA, 122 bp, Homo sapiens
ttcaggcatggctgttcgtgtttgccgtggcccgtgtttgccgtggctgttcatgtttgccgtggctcgtgtttgccgtggctcgtgtttgccgtggctcgtgtttgccgtggctcgtgttt

SEQ ID NO: 244317 - DNA, 122 bp, Homo sapiens
ccagggtggggtcggctgcgccctcagaccccgcacccgggacgggctgtgggcagcccgcgggagcccctctgtgcaccttcatgggtcgaggcagctttcagagcctttgagttcaggag

SEQ ID NO: 244318 - DNA, 122 bp, Homo sapiens
ggcatggagagctcaggcctccagcagagggagtgcagatgtggggaaagctgaccctggcgccagctggccagggccataggacggggcagtccacagcaggctcacaccctgcccttcag

SEQ ID NO: 244319 - DNA, 122 bp, Homo sapiens
cccagccccacttccgcccgcgtccccggccccgcgcaggccccgccgcctcaccgcggtcgagcccttcttgacggcctcctgcgcgtactccacttggaagaggtggccgtcgggcgaga

SEQ ID NO: 244320 - DNA, 122 bp, Homo sapiens
aattgcctcccgtttcccaaagtaaacactgaagtcttaacttgcattgcctggcctctgcgggctcctctaagttcatcacagatcatgaagccccttgcccttgacatccatgttagccc

SEQ ID NO: 244321 - DNA, 122 bp, Homo sapiens
tccctgctggtgctggccacaatgtccccactcccagggtttcggcgtcccagccccctgcgcccaccgcgcctgcccgccagaatccctgtgcccttggtgcgtgtggcctgccgagcctc

SEQ ID NO: 244322 - DNA, 122 bp, Homo sapiens
cgggcgagcgcacctggggccctgcctctgagccttttgtttcctcctttttaaaaacaccggatgaaagaccccagtgtgccttggatcgcagagcgccggccgcatgtctgctttgatcc

SEQ ID NO: 244323 - DNA, 122 bp, Homo sapiens
cagtgtgtgcactcgtgtgtgttcacggatcagtactgtgtgtgtgcacgtgtgtgttcacggatcattactgtgtgtgcgcccatgtgtgttcacggatcagtactgtgtgtgtgcacgtg

SEQ ID NO: 244324 - DNA, 122 bp, Homo sapiens
gttgcccccgaaccctgggcatggggcgagtggcccaagcccggacccttggaagtggcgcggcggggctgcctttcctcgggtgttcgcggctcggcgcgaccctctctcccgtctgctcc

SEQ ID NO: 244325 - DNA, 122 bp, Homo sapiens
cagagctgtggtccctgggcatccgcaaaggatcagagggtgttggtgaagcaatgtccccggggaggcctggtcccacccactcatcctgcatgaagcccccaccctcttctcccagcttc

SEQ ID NO: 244326 - DNA, 122 bp, Homo sapiens
gctgccagccgatcgctggtttctagttgagtattgaaaatcggcctcgaggttttgagtcgcttcttaagctgagaacctaggttttggagtcaggcctgtgactccaccacttaactggc

SEQ ID NO: 244327 - DNA, 122 bp, Homo sapiens
ccttgttagtgtcccttcctctcacccttgtattaagtaagaatttgttaggcctcaactcggccttctgctcttctctctgttctctttcttaattatgttaatttgctgaggagaaccca

SEQ ID NO: 244328 - DNA, 122 bp, Homo sapiens
ctggggaaacccgttggctggtatctgtttcctggctgaaaagaactgacaaactgttctcgttcaccttcctgtggctgcacaaaggcatttgggatctcagaccatgagcactagaagtg

SEQ ID NO: 244329 - DNA, 122 bp, Homo sapiens
ctttcgtgaggccataagaacaaactccttttctcgtcacagctacgccctgggcataaacggttggggcgtcaaagggagggagggaagggagcgggcgggaggagacggtcacgtggtcg

SEQ ID NO: 244330 - DNA, 122 bp, Homo sapiens
agcaaagtttgaggaaggtgaattaaccaaccggctccatgggctaaggaccgcagtgggcggcagaggccggagcgagcgcgaccctacctgggggcgtcgggacgcaggagcactgctgg

SEQ ID NO: 244331 - DNA, 122 bp, Homo sapiens
gacccgctctgaagctccgagcccggcctcggggaatgtgtccccgctggagggggtctccgtcttgtctctgctccaggcggagactggggtctcaggggctccttgcaagcccgctcctg

SEQ ID NO: 244332 - DNA, 122 bp, Homo sapiens
ttttcttctaccaattattaaaattttcttccctttcttcccaaatgttaactcctcaatcgatacacctttctaaatcttccttgtccatatcctaaacaaaatttatatggcatagctga

SEQ ID NO: 244333 - DNA, 122 bp, Homo sapiens
ggggttagcagacggctttctaaccttgccgttgtgtaacaatagaatgcatttgtcttgcggagtccccaaaattgagtgtcaaacagaggctgggtgacctcctgtccaggattgctctc

SEQ ID NO: 244334 - DNA, 122 bp, Homo sapiens
tccagcccatcttctctccaccattccacacacacacagccacatcatccctgcttcacccggcataccaggaggaggcaggaaggactttggaaaacttttatactgaatgcagaacttgg

SEQ ID NO: 244335 - DNA, 122 bp, Homo sapiens
aggggcgcccgcgaccgcctctctatagtgccaactagggagccctgtgagcgaggacggcgctgcgagtctgtccctggcgcgctcctgggtgggattctttcactgggtgtggctgttgg

SEQ ID NO: 244336 - DNA, 122 bp, Homo sapiens
cttcctcaggcagacaggtccacccctcagggagactaggataagaagacaccacacacccggacatcagcagagcatgtccagcacccagcacgcaaaggcctcctgcagctcatgaaccc

SEQ ID NO: 244337 - DNA, 122 bp, Homo sapiens
agtctgtggtggccctgggataaccagagaggggtgtgggtggggggtcccctagaccaccggccacctcggagccagtctacagacttggtgtctccgccagcgccagtgatctgagccga

SEQ ID NO: 244338 - DNA, 122 bp, Homo sapiens
cgtctgggggcctccagcgactgccaggggcccagcagggaaggcgcccgggaagggcagcgggtccacctctggcaccgcttgtactcccgcccaccccggacgcggtccaggcgcgctcc

SEQ ID NO: 244339 - DNA, 122 bp, Homo sapiens
tgcatgaaggctggagctgggcccaggatgaggaaaagcctcaggaaggaagggctgacacgaaataaggaataccatggcattcatgagatgtgcgtctgaatcctctctcttgcctgaga

SEQ ID NO: 244340 - DNA, 122 bp, Homo sapiens
cctctttcatagccgcaggactcgtggtcagaaggccgactccaagcctcagcggatccacgaaatggcctctttgaggctgtggtgaaatttaagataccctttccctgccattgttactg

SEQ ID NO: 244341 - DNA, 122 bp, Homo sapiens
tctctggaacctattcactctcagggtgcctccttcactgatctaatgaaccccataggccgactaggaagataaaaaaactagtgaaccaggtcagtttctcaagacatccttgctctttt

SEQ ID NO: 244342 - DNA, 122 bp, Homo sapiens
tctcaaggtcattgatcttacgcatttactgtttaccgaacaaatgtctgactgtgtactcgggtgtactccgcagcattgtcgactgcagtcccctgtgtttgccagagatactgtgctcg

SEQ ID NO: 244343 - DNA, 122 bp, Homo sapiens
ctctaagagtttcagtgaagagacgcaagatgcagaaatgaacctaattgtgtggtcttccgtgctggggaagccgaggagaaatggaagtatgagccggttccctgctccagaaatcgctc

SEQ ID NO: 244344 - DNA, 122 bp, Homo sapiens
ggcaatgacatcacctttcgcattggatcctttggccctggagaggaccttctgtacctgcgggcatccgagatggcccgggcagagggcattcccaaaatttacgtggcagccaacagtgg

SEQ ID NO: 244345 - DNA, 122 bp, Homo sapiens
gaggccggccatccacagggctgccggggctcccttgaggtggatgcggtgaggcgcgaacggagcgggtagaaatgagacggcgcaatggcggaaagcaaagcagaaatggcgtgacagcc

SEQ ID NO: 244346 - DNA, 122 bp, Homo sapiens
gggtcagtaggccggcaggcgcaggccacactgttatcgtcttgcccttcttcgcaggttcgagaaatggtagaaatcatcacaaaggagtttattttaatgggcggaaccgtggacacggt

SEQ ID NO: 244347 - DNA, 122 bp, Homo sapiens
tgagctcctgacctcaggtgatctgcccgcctcggcctcctgaagtgctgggattataggcgtgaaccatcacgcccagcccatagtgctcttcagtgtcagttataatgaccaaagttcta

SEQ ID NO: 244348 - DNA, 122 bp, Homo sapiens
cagtcctggacagtgggtggggacatactcaacgccaggttcattcgaaacctgcaggaacgtcgcagcaccaggccttggtgaccgcagccccgtcaaacatcttcaaagtattatttctc

SEQ ID NO: 244349 - DNA, 122 bp, Homo sapiens
cgacccaccccgcgattgtagtcctagaggcggagtcctcgccagagttcagcaaaggttcgctggccgaggcgggtcccagaccggcgaacccgacagtggagggcgtgaccagttgtgca

SEQ ID NO: 244350 - DNA, 122 bp, Homo sapiens
gggtggggaaacttggctcgggagtcgggccctggactctcattagcatttaaaggcgcccggtgcgctttctatggctccaatccgccgggacgcgagcgcgcgggtcgcgttgcagaacc

SEQ ID NO: 244351 - DNA, 122 bp, Homo sapiens
actttatgccaggctttgaaatttaaaagaagaaaaaacaaattattgagctgtatcttacgtgtgtaggaagaatagatatctattagacaatacatgtacttcttcctccaaggagtcag

SEQ ID NO: 244352 - DNA, 122 bp, Homo sapiens
gctccccaggtctccccaccgcagtcaccgcttaccctgagcccgcgttggggaggtgcccggggctgtcctatgacaccgggtgttcttgcctgccctgcaccagcccctggaaaatgcgc

SEQ ID NO: 244353 - DNA, 122 bp, Homo sapiens
tcggcgggggctgcacgtgcgcaggggtgtggaaacttaccggctgagccatggatacaccgttaaggcgcagccgacggctgggaggcctaaggcccgaatcccccgagagcctcacctca

SEQ ID NO: 244354 - DNA, 122 bp, Homo sapiens
tttcatttccactttcaaacatacatttgcgtaacctttcacgggttcaatacctgcctgcgttttccccaagtcgcctcgcagatcctgggccttgggacgcgcttcctcccaccctggag

SEQ ID NO: 244355 - DNA, 122 bp, Homo sapiens
ggcccgaggcgctgtagacagggctggaagggctgcggtgggtgactgcctttcagtgcccggagcctgagggccgggggaaacgagcacgaaatcttcggaggtctctccgtctgacgttc

SEQ ID NO: 244356 - DNA, 122 bp, Homo sapiens
tctagcccggtcctccatccctgcagatggaactgttttcccgcgttgagacgtgcggtccgcttgtgcttttagaactaaagactgctgcagagtccggaggaagaagtcacctagaaaaa

SEQ ID NO: 244357 - DNA, 122 bp, Homo sapiens
cagcaggccagtgattatcagaaggctggaaccaccgctggtagagatagtgctgtccagcgggcagggccccaggcctcccatcgtgaactctttccgttggtccccagcttaggtgcaga

SEQ ID NO: 244358 - DNA, 122 bp, Homo sapiens
cggggccccgggagcaggcgcccctgctctggcctggagagcagggcccgggggccaggacggcgggagcgggagcgtctcccgctggttgcgcagcgcgatctgcctctgcagccgcagca

SEQ ID NO: 244359 - DNA, 122 bp, Homo sapiens
tctttgcccatttaagagcttgatgtgcagaaccctttcctgatagcattgattctggctcggttttataatttcactgtatgtgggaggagtagttaggagggcagagaaagcagcaccaa

SEQ ID NO: 244360 - DNA, 122 bp, Homo sapiens
cacagcagcggcgcctcctccggggccgggggccccatcccgcggctcgcgcggccagaacgccccaggtcagagcctgcccccaccccgcacccggaggccagcagcccagtcccctaggc

SEQ ID NO: 244361 - DNA, 122 bp, Homo sapiens
gccaacagcaagagcgcccacacccacttcatcttgcccaggaatccgccctgcgggagacgcgcctccgtcagtgcccggcagccgacccccgccgccgtatcccacctcaccccacccca

SEQ ID NO: 244362 - DNA, 122 bp, Homo sapiens
aaaaaaaaaaattctagcaacagtcaaaacacagaaggtttctatagactccaatttgcccgtgagtttgtggggatggtgctaagttctgaagatgtagtggtctaggttctcatgaactc

SEQ ID NO: 244363 - DNA, 122 bp, Homo sapiens
gatcaggtgcaaggaagagaccggttacactttatggggtgggcggcagcgagagttccccgtcccatcatctcctccgccggacgcacagagaatgcagcgtctgtgagcacagctgccct

SEQ ID NO: 244364 - DNA, 122 bp, Homo sapiens
tgtgactgaccaggtcccgcccccatccggaaacctcaagtgcagcctaatgcgcagcctcggtgtccccatctcggccccgccctcgcccaggtggcctctaggccccgccctcacccagg

SEQ ID NO: 244365 - DNA, 122 bp, Homo sapiens
ccgtgagcttcaggcccagcatgaccatccgggccacccagaagaagaggatgtcatgaccggtctccagcagtgtcccggggtagaacacactcaggtcttctgactgagggcagaccagg

SEQ ID NO: 244366 - DNA, 122 bp, Homo sapiens
cacctaccttattttcttgaccagatgacatcttaagtggccaagtgagcaaaaaaatgtcgagcaaagtcgaaaacgcactcacacagcctgcaggacaaaatagaagcctgagatggtta

SEQ ID NO: 244367 - DNA, 122 bp, Homo sapiens
tgttaattattaacaagattaaaaaaattaaacggaagtatgttagttctacttgaaggccgtatgtctaaactgctcatggaaggtttttggcaactctaatcctcatatactttatttct

SEQ ID NO: 244368 - DNA, 122 bp, Homo sapiens
tttctcctcctcctgtagcttgatggagatacctctcactggacctctctgaatctggttcgtcagatgcgtgacgcagcctgctctcctgttgtggagcttcttgctgaggataatgggga

SEQ ID NO: 244369 - DNA, 122 bp, Homo sapiens
agccggctgctctgagccggcgtcccagcaacctgggagagttcacgacccccatgaccccgcccccacgaattccagccaatgaggaagccctcctcggcgtcccgttgccaagcaactgg

SEQ ID NO: 244370 - DNA, 122 bp, Homo sapiens
catacataaagttactgtgttttcaagcttgccaaaaactgaacttgaacttgtgtgcctcgccagatgaaatggtcagaatagacacgcttactggcctaatggctggcctgtccttccag

SEQ ID NO: 244371 - DNA, 122 bp, Homo sapiens
ctgcgtggccgccagccgcgcccgcacctctcgcattacgaacggctccaggccgcgacccgcagtgcagaagaatcgggcgccagcctcaggcccggaccctggctctccacgcgcctccg

SEQ ID NO: 244372 - DNA, 122 bp, Homo sapiens
cattcgtaccacttaaaactggggtcaggtggaagtctcacagagaccacgtctgtaccgcggttgccctgaaacagttaataggcttttaaagcctctcagatataacaaggttttaaaac

SEQ ID NO: 244373 - DNA, 122 bp, Homo sapiens
cgtgctgggcctcacgagcctcgtgcgtgctgcgcagtgccttgagctgctcgcggagctcgccagcctcagccacagccacatggtacttgcaggccaagatctcaggcccgttgatgtcc

SEQ ID NO: 244374 - DNA, 122 bp, Homo sapiens
ccgaaagttcagggcgggctgtgtgggtaacacctctgcccaggttcccggagggccctacgtggctgcccctggagtatcccagagcgctagggctgcgggaaggggcgggtgtgcttctg

SEQ ID NO: 244375 - DNA, 122 bp, Homo sapiens
ataagctgtttcattacagctgactctttcagttgcatcaagaagctataatcactgatacgtttaccactatgggctggtatatcaggagcttttcactctcacactgtccatttgcttgt

SEQ ID NO: 244376 - DNA, 122 bp, Homo sapiens
cgcctgcagcaaccctgacgatcgagcagggcccgcgggggagcgagcggaagcgggcagcgtgcgctgctgtcccgctacccagcccgctaggctgcgcagctgcgtctgcgggcggggag

SEQ ID NO: 244377 - DNA, 122 bp, Homo sapiens
tgacgatcgtctgggaaagtaagggggagaagtgggacttgctctcctcaggtgggtccccgacgctctcaaaggtccctcaggaggaaggggaggagccaggctttcccaagacccattct

SEQ ID NO: 244378 - DNA, 122 bp, Homo sapiens
agtgcccctccccgacccccagctcaggcccgggcctgaacccgcttcgggtcctgcgcccgcctagaaagcgggaggagctgagtgacagtccccacccacctgtggacagccccttcttg

SEQ ID NO: 244379 - DNA, 122 bp, Homo sapiens
ttctccaaagtcgagtttcccaaaatgcagggtttccagggtggcgcccactgtctcgcacgcctcccgcaagctctgcagggcctcgctctcggccaccaccagttgcccttggctcgctt

SEQ ID NO: 244380 - DNA, 122 bp, Homo sapiens
gacaaaggagttagaaagagacagaacaagcgtttaaaaggcaggtccaggggaccagagcgttggaggcttgctcacggcccagagctctgggctccacccaatttattggtttacaagct

SEQ ID NO: 244381 - DNA, 122 bp, Homo sapiens
gccgccaccgtgtcagtgggactgggtcccaggtgtccctcgcaccccttcggcactgatcgtgtaggaacaggaggaggggggcaggtggggggcagagagcacccgcagggtccgggctg

SEQ ID NO: 244382 - DNA, 122 bp, Homo sapiens
gctgcgcgcttagaagcccggaggcggtgagcgcgggggcgggcggggcgggatccgcgccgcaggagccggagaagggctggtttcctgatgaaatagaaacatttcttcgggaaggttca

SEQ ID NO: 244383 - DNA, 122 bp, Homo sapiens
cccaggcctgccgacgtctcccccgggagcctccctggcccgggccagacgttcggcacccgggagccccctcaggctgtcagtaccaaggaggctagctcgtcaaatctgcatgcgccgga

SEQ ID NO: 244384 - DNA, 122 bp, Homo sapiens
gccaggcgctggtgcagcctcgccgaccgcccctttatgcaggctgggggtggtccagggcggctccacgcctccacttcctgtggggccagcgcaggctgcggtccatccagggtggcaga

SEQ ID NO: 244385 - DNA, 122 bp, Homo sapiens
taggtggagcgcgcactgcctccgggcccgtctttctcaattgggaccggaaaacgttgtcgctcatcctatgacgcgaaagtaaccgagactatcaggatccggagacggaaatgtccgaa

SEQ ID NO: 244386 - DNA, 122 bp, Homo sapiens
ggcgaaatttcgcacactggccaacttggcctggtgccgccttaaccgggtgagaagcaacgagagctcctccagctgcagatgtgtagacacagcacaaggaagttagcaccgcaggagca

SEQ ID NO: 244387 - DNA, 122 bp, Homo sapiens
aggttaaatgaagctgttgagggttaagggacttaacgaatccccggcttccatccttcccggggtttctgtaggccgactctcacctgaggcccaggacactcccaaatgatgatggtcat

SEQ ID NO: 244388 - DNA, 122 bp, Homo sapiens
acaaattaccgctccgtgaagcctgggcagctcagcagcacgaaccgacacctcaatctccgcagcatttacaaatgggccgccacaatcgccgcctctgtcggagccccgcccccgtcccg

SEQ ID NO: 244389 - DNA, 122 bp, Homo sapiens
acttattatctgtggccactctcttgctacaagggcagggttgcaacagagactgtaacacgcacaagcctacaaaatttactatctggccctttgtggcaaaggttagccaacccctgccc

SEQ ID NO: 244390 - DNA, 122 bp, Homo sapiens
atctggtacctcagcaaatcctattaccatttttccccaaacttcttcagaatatgaccacgtctcatcatcccttctgccgcactcaggttcaagcctccatcatctctggctgggattat

SEQ ID NO: 244391 - DNA, 122 bp, Homo sapiens
tccggtctcagagcccagagcctggcagggctgcgcccgtttctatggtaactgcagatccgtgtcctgccgcctgtgtgattgtgttctgttctccttgtagatggaggagataaaattta

SEQ ID NO: 244392 - DNA, 122 bp, Homo sapiens
tgactgtgtgctcgtcagaggctgcctgactgtgcgttcgtcgggggctgcctgactgtgcgtttgctgggagatgcctgactgtgtgttcgtcgggggctgcctgactgtgcgtttgctgg

SEQ ID NO: 244393 - DNA, 122 bp, Homo sapiens
caggcatctcgtcgtccgacatcgagctggctggcttgtctctggcggagggggcggcaacggtgctgttggtgaacccctgagagctgggcttgggcgggagaagcttgacagggacagac

SEQ ID NO: 244394 - DNA, 122 bp, Homo sapiens
cacgctcgccctggggctgcagatcggcttgcgggacggggtcccagagaggccggtccacgcggcccgcacgcgcgagtgttagctctgcacacgacggaaggcggaggcgcgggtggctg

SEQ ID NO: 244395 - DNA, 122 bp, Homo sapiens
cttaacaagaaataaagtgtcatttgcaaatgcatcccttgtgtaatttgtaggtcaccacgccatgggaacacgctaccaggggaagggagctgtgagacgcgcagggaggctccagacag

SEQ ID NO: 244396 - DNA, 122 bp, Homo sapiens
gcagctcgtcggtggccttttcaaacagcgaaagggtcagggtcctgagatcgtccagggcggcctggtccagacgctcctgcagctcctccagggtggcaccgtgctcctccatcaggctc

SEQ ID NO: 244397 - DNA, 122 bp, Homo sapiens
gagcgcctagcgaggggggcggggcgtggggggggcttgcaatggctccaaccggaagggcggtgctcgagctgtggtgcgtgccgctaagttgtgcgttccagggtgcactcgccggcgag

SEQ ID NO: 244398 - DNA, 122 bp, Homo sapiens
catggcatccctgccagcagtttgaagtagacgcctcattgccagctgctgtcatggaaacgaagagatgggggaagtaggagaggtctggaggagtgaggaaggaccatcattccattgct

SEQ ID NO: 244399 - DNA, 122 bp, Homo sapiens
tcaacagaggagagagactgggtaggcatcacctgccccagtagcttccgtacaaaatggcgttgcccgttcccacacgccagctgggattacgtcctccaggcctgtcgcaggaacggaag

SEQ ID NO: 244400 - DNA, 122 bp, Homo sapiens
agcagggcagggcctgaggcagaaacccgcgtccccgcgccggcgctcacgagctctgcgcgccccgcccccaaccgcctttatgtgggcgccgggccccgcccctcggcctcccgcgcgcg

SEQ ID NO: 244401 - DNA, 122 bp, Homo sapiens
gggccggcaagtgcaggattggctgtggagaggcacaggctgaatttggcccagcgtaagcgttctgggaatgtgtggtgttgctactgggacttgggctgccttgggtgtggctgcatacc

SEQ ID NO: 244402 - DNA, 122 bp, Homo sapiens
cctgttgtatttcgttagtcttctctctgccttttgccatgattactgttctagactttccgtgtctttctcaaacgctgtacctcatgcttgcccttggcctttagaagctgccttaacag

SEQ ID NO: 244403 - DNA, 122 bp, Homo sapiens
cccaggggccactgcccagaaccatccctcccacacaaacgcacaaccctaaacccccaccgcccgcccttcgctccaaggcccccggggccagcaaccagggcgtccctggcacttcagac

SEQ ID NO: 244404 - DNA, 122 bp, Homo sapiens
agaagtataaggcgacacatttctgttattttaagccactcagtgtgtagcacttttttacggcagccctaggaaactgataccaaactgatgcatttatcctccctactttttcactgtta

SEQ ID NO: 244405 - DNA, 122 bp, Homo sapiens
ctgtggtcgcgtgttctgtggtgttggggggccaggctcacccaggctgacccctgcagccgtgcgtccctcctgcagcaccttgggatgctgggcgcctcggcggccccacgctgtccggt

SEQ ID NO: 244406 - DNA, 122 bp, Homo sapiens
tcgcgcagagtatctcggtgcattcttccaattgctggtctgagccaccggcaaatggctcgctccagctctgcaggggttttcacacctggtttgtggctcctccagccttctccgctccc

SEQ ID NO: 244407 - DNA, 122 bp, Homo sapiens
atcttctggcggcaataggagtacttctgcaggatctggcggaggtgctcctcctcctcccgctgcaggatacgtaggaagttatgtagttcaggcatgctgaaggcgtcccactgcaaggg

SEQ ID NO: 244408 - DNA, 122 bp, Homo sapiens
gctggtgatgacacttttgctgatgtgacaggagggcagcctgcaaaagattggctcccacgctgccctcgtttggggtctggagcaggatttgctgcctgtcttccctgctggcattttac

SEQ ID NO: 244409 - DNA, 122 bp, Homo sapiens
tcctaggtccccaaattctctaagcactaacagtttaaagacgtccttaccatacaccaccgtttgctctcatcattaccctgaacgcacttgtgtataatcacaaaggagtaacacggcac

SEQ ID NO: 244410 - DNA, 122 bp, Homo sapiens
accaagaacctagctcagtgccttcctttcagacgacaggcttaaaggaaaaaaaagttacgtgttgcacaacttcagtagttattcttggctttatggcggtccaggcatgttcttcacat

SEQ ID NO: 244411 - DNA, 122 bp, Homo sapiens
tcactgacctccttcctggtctgcctattctcaagagcatcacccccgaatcctgcaggacgcagacctgagcccagagcgccgcccaagagcgccttctcattccccaccctcgtctcccc

SEQ ID NO: 244412 - DNA, 122 bp, Homo sapiens
cgccgcggcctactggggccaggtgagtgcgggcgggagcaggtgggagggggcttccagcgcagcagtctgcagctccggcctgccgtccacaggtgcccctggtggagctgctcgtggcg

SEQ ID NO: 244413 - DNA, 122 bp, Homo sapiens
ggaggaaataatgagtttaaattttggacgtacaagtttgagaagcctatagtgcagtcacgttcatgtttagcaaaattattatgtgtaattggagctcagataaggggtgggggcttggg

SEQ ID NO: 244414 - DNA, 122 bp, Homo sapiens
ctctttccaggcctggccccaccactgctgctgaaccttgcagcccttcccataccaccccgcccccacccaataacatggcctccagagctgaaagcatttccagggcctcttccaacaag

SEQ ID NO: 244415 - DNA, 122 bp, Homo sapiens
aaataatcggcccgcggcagccgcagtcaggaaggcggcggacctaggatgcaaatgcgccgctttatccgccccgagcgcacgcagagcacgggctaacgtcctaaacatccacagcccct

SEQ ID NO: 244416 - DNA, 122 bp, Homo sapiens
tccaggcccgggcggctcacccctccggcccgacccctcccccgcgcggccgcccctccgcgtcagacaatggggcccgactcccggccgccagcctctcctgacccatcaccctcgcctca

SEQ ID NO: 244417 - DNA, 122 bp, Homo sapiens
ggggcgccgcaggttagagacgtgaggccgcgaggctgagggctgtgaaggcggtgggcacgcacggcgtgccggggccgcctggcttcgcggcgggggaggtaacactgcgacaccccgca

SEQ ID NO: 244418 - DNA, 122 bp, Homo sapiens
tcatgagcacagttctctgagtgtttggtgtgctcgttaagtcgatgatacgcaggtcagcgatgagcccaagagttcaaaaacaactctgtgaggttgcttgccagatgctctcaccttcc

SEQ ID NO: 244419 - DNA, 122 bp, Homo sapiens
aatgacagagccctggggctcgtctgaccacttctccacccccagattcctctcatcacccgatgcctttactttgggactcttccaggtcgttcctcacctcgtgcagcattgctgtgagt

SEQ ID NO: 244420 - DNA, 122 bp, Homo sapiens
gctggctttagtaggagagcgaggccgcggcgtggaacctgaagctagaactgagcgaaccggcggaccgagcgggaaggaggagagccgcgtaggaggaggggttcgggggcggagccgca

SEQ ID NO: 244421 - DNA, 122 bp, Homo sapiens
tcctggtgctccaggggcccaggcatgggggtggagtaaaactcgcccattcacctgtgccggcaggttctctgcaccagaaccaataagtggccacttggtaattacaagtttgccaagac

SEQ ID NO: 244422 - DNA, 122 bp, Homo sapiens
ccccagtcccccacttaggcgggctcacagatcccggggtgctggcgcgtgggccgggggcgcgtagggcgcctgcagacggcccctggaagggctctggtggggctgagcgctctgccgcg

SEQ ID NO: 244423 - DNA, 122 bp, Homo sapiens
aactggaaggtatgaggtttctttctggggtaatgaaaatagtctggaattagatagtggcgatggttgcccaatattgtgaatatactaaaaacaatggaattgtatactttaaaatggtt

SEQ ID NO: 244424 - DNA, 122 bp, Homo sapiens
atgcccatggccagttcctctttttgcttcaggaaaacgtcgttttcccctggaaaccagcgtttgattcaccaactcgcacagtaggcagcctggagacggccgtcttcttagctgggaca

SEQ ID NO: 244425 - DNA, 122 bp, Homo sapiens
atagtaatttgcagatggttcctggtagcgacagggtctctgaggcggagcctgggtcttcgcgtaggatctgccagcctgggttccccggcaggtcagagaagctttggggcggggccaag

SEQ ID NO: 244426 - DNA, 122 bp, Homo sapiens
tggtcaaaagcacccttagctccctgtggctgcgaacagctgaccttgacaggtgatctgcggaggtgggagggattcatcccacaccgcgcaggtctggggtgcggaggctttccctgatg

SEQ ID NO: 244427 - DNA, 122 bp, Homo sapiens
gcgaggaagaggagattgagctttgtattttatgacctcaaaggcaccagagacacagcccggggtctgcccacgttgtggagtatgttaaaagagagcgagattcccatcactgaatcatt

SEQ ID NO: 244428 - DNA, 122 bp, Homo sapiens
tgtttaaaactaatcctggcataacacagggattacctgttgttccttgttgctaaaatccggcttaatttagacactgacaattatattgctgaatggttttaatgtttatcacataaaca

SEQ ID NO: 244429 - DNA, 122 bp, Homo sapiens
gagcacaagacattaagggccacccagaagccagtacggcacgaggcggtgaaccccaaccgccccccggtcgcacctcccgcgcctgcccgcagaggcacgtggtgacgtcataaagcgat

SEQ ID NO: 244430 - DNA, 122 bp, Homo sapiens
tctaatagaggaggcaaactccacccctgccactaccagaagctgaggctccggggccaccggccgcccagggacctcccaggcctgtcacaggctgtgcaccctgcacactgcggggccac

SEQ ID NO: 244431 - DNA, 122 bp, Homo sapiens
ctgcgctggccccgccccatgggaccgggcggcgtgggcgtgagaggcggggcggggccgcgctctgcttgccaatgtctttataggtcacccggaaggcacgcggaacctcggcgcggtgc

SEQ ID NO: 244432 - DNA, 122 bp, Homo sapiens
cctacacctctgcggcgggagtcgcggtggagcctgaatggagagccggcctgggggcggcgttgctgtgactgacacctccggggtctgtcccgagagggggtgattccgccggctcccgg

SEQ ID NO: 244433 - DNA, 122 bp, Homo sapiens
gaggagacagctggcttcatgcttgcccccagggtacctgaacccacagagattcttaagcgggtggagaggtttgggtagggccaccttgtcgttgtgctaaggatcacctactctcttgc

SEQ ID NO: 244434 - DNA, 122 bp, Homo sapiens
agaccctacgtaggattgcatctttacgtcgtaggcttggtctcgtgtatttttattgagcgtgtttaattagctgaggttactcgctttggcaccccagtgatcgtttttgccaccaagct

SEQ ID NO: 244435 - DNA, 122 bp, Homo sapiens
ttaaggctgatcttagcaagacatagctgatgacattgtaccttggaggaaggccaggtacgtgagaaatgttgagttgtttaatcctagggcaaaagttccccaaaaaagtttatttctga

SEQ ID NO: 244436 - DNA, 122 bp, Homo sapiens
ttttctaatttgtccttgtttccacattctgttttgtgtgcttgtgtgtgggaagtttaacgccctacaaaaaacaccacagggctctggtactgccaacagttggacacagtgtttccagc

SEQ ID NO: 244437 - DNA, 122 bp, Homo sapiens
gccgccgcacgccgggtgccttctcaggtcccacccggagcctcgacgctcttccttctgcgtcggagcattgtacccgcctccgctgctaccacgcagtccccagggcccaaaaccctcct

SEQ ID NO: 244438 - DNA, 122 bp, Homo sapiens
gagtcagcctcaaattattaaccaggcattaggggatggggtcagcctcgagttactaaccgggcattaggggatggggtcagcctcgagttactaaccgggcattaggggatggggtcagc

SEQ ID NO: 244439 - DNA, 122 bp, Homo sapiens
cacgggcagagctgcctgccaggcgcctgcactcctcagcccttggagggtcaatgggaccgggcgccgcggagcagggggcagcgtccatcagggaggcttgggccgcgcgggagcccacc

SEQ ID NO: 244440 - DNA, 122 bp, Homo sapiens
cagactcgggctgagccgcacccccatctcctttctctttcctccgccgctaaacacagacgagcacgtgagcgtcgcagcccgtcccagctgtgcctcagctgaccgcctcctgattggct

SEQ ID NO: 244441 - DNA, 122 bp, Homo sapiens
gcccggctgatggggggcccggctgatggggacccggctgatggggggccgggaagacaacgggctgctgcgtcatgtggaatcaaggtgggtgtcctgggccagacgaagctttcagggag

SEQ ID NO: 244442 - DNA, 122 bp, Homo sapiens
tacacccgaaaagacgcgaccccacccgctccagcccgagccccgatcgccccaggaccccgcacccccatcctcgagcacaagctgagctctgctcctcacctgtgatgctggagccctcg

SEQ ID NO: 244443 - DNA, 122 bp, Homo sapiens
ctaccaggcacctgtatgtacaaccaatcacagcagcacacatacacccagaaatgggcacgtgtgggcccacacccctttagctatgaaacccaggcatggggcagcttgagccagatacc

SEQ ID NO: 244444 - DNA, 122 bp, Homo sapiens
gtttccctttggggtgcccttcgcggtttctgcgtttcccccgcgttgccagcagccactcgcgccgcgcccctagcccagaaccgcccctcccaagggcgataaccccgagggcaacggcc

SEQ ID NO: 244445 - DNA, 122 bp, Homo sapiens
atttagcaattcaaattttatggagatgaatgatcaaagtgaaacaatgtttggatgcaacgcagaataaaagaatataagaaatagctttttgttgcattaatgtatgatattttgaagga

SEQ ID NO: 244446 - DNA, 122 bp, Homo sapiens
actgtgctctgcagttccctgctttaaactgacccttgactgagcaataggaattcaccacgtggttctgtgcaagggaacggcattcagcaatcatgggtttcacacctcctatgcaccag

SEQ ID NO: 244447 - DNA, 122 bp, Homo sapiens
gtgagaaagaggaaaataaacagtttctatagtgatatatagagtgctagggaatcaaggcgaagtgaagcgctacctccaccagccagaagggggtagagaaggtgcatagaggtggtctc

SEQ ID NO: 244448 - DNA, 122 bp, Homo sapiens
ctgctcgggcccacctcgtcggagacgagcaggaaccgcctcctcttctttgcatatcggcgaagtgtagttctcaagagcattgtggggccggttgctgcccgaatctctctagggaatgg

SEQ ID NO: 244449 - DNA, 122 bp, Homo sapiens
ctgctggggagctgcagcaagacaatgggcgtctgaagtcgaggcctgcctgcccatctccggtcaaggatctgtcccttctgcctattccattcctagacctttgatgggtgctggttcat

SEQ ID NO: 244450 - DNA, 122 bp, Homo sapiens
ggggatctcggctcaagggggtcggacgcggcctcagtattgatctcacaaacagacacgcgcccgccgcccccccgccccccgatctgccaccgccaccgccaccgccaccgccgccgccg

SEQ ID NO: 244451 - DNA, 122 bp, Homo sapiens
cacagacactagaaagcgacgcctccggtgggacgactggaggtcacgtggtacactatacgccacctttcccttctggcggaaaaagccatagagtcaggttgacaaggcctgagagaaat

SEQ ID NO: 244452 - DNA, 122 bp, Homo sapiens
cctgggcgttattgtcaaagtggccagcatccgcgtggacacagtggaggacttcgcctacggagctaacatcctggtcaatcacctggacgagtccctccagaaaaaggcactgctcaacg

SEQ ID NO: 244453 - DNA, 122 bp, Homo sapiens
agggggtaaaacaggcgagaactggggaagcccccgcagagaaggagctttggagagatgcggttgtgcccgactcagacgcttagcaggaacagaagcagcagcagcagcagcagccccat

SEQ ID NO: 244454 - DNA, 122 bp, Homo sapiens
taaaaaagcttttgccaatatttaaaatatgacttgatgtgagagtcttaatttcttctacgcagtatacagatatatagcattcctgtcatttagcaggggtgatagtaaaacaaaaaaac

SEQ ID NO: 244455 - DNA, 122 bp, Homo sapiens
tcttcccataacgggggtgagcctcacgtcaccccgttcatctggggcccagggaaagcacggtggtctgtttcagcactggaggaaacaatgtctgtgttgacctcatggagagatggctg

SEQ ID NO: 244456 - DNA, 122 bp, Homo sapiens
ccgccgtctctgaattgcggctctagaatgcgtcctctcttcacacacatggactacagacgtgcttttgtacccacgcgaggagacagaaagggggaagaaaggaagctcctgtccctcca

SEQ ID NO: 244457 - DNA, 122 bp, Homo sapiens
ctttttcacaccagcgctttcatgggcagcttctctcacgctgtccgctcttatctcagccgtttgctccggctctgcggctcctgtcaccccgacatctgcagctgcatggcagactctgc

SEQ ID NO: 244458 - DNA, 122 bp, Homo sapiens
acgacgaactgggaggatccagccgggaccctttcgggaacacacccttcctggacttgacgttcggatgcctaacacgcaccttaacttgaccttgtccaggcagaactcgagggcttccc

SEQ ID NO: 244459 - DNA, 122 bp, Homo sapiens
ctgttctgcatccccatcctaataggtggaagggcatcaagcctactgtcacgattctctcgagaggaatttccgaccctgcaggcggctggcgaccaggacaaggctgccaaggaaaggga

SEQ ID NO: 244460 - DNA, 122 bp, Homo sapiens
gcaaatcgttagataggaacaggtgacatttcagcaaagaacacggcaggcggcggcctgcggctgctgatttagacattagtatttgtcaccagggcggcgggggcggaggagaactcggc

SEQ ID NO: 244461 - DNA, 122 bp, Homo sapiens
gatcagccagcgaacacgagaccagatcggctcagcctggcccccattccagccagggtgcggctctggcttgttctaggctagggtggacccttccaaaacatttcctcactttcggatga

SEQ ID NO: 244462 - DNA, 122 bp, Homo sapiens
agagggcctcgatgcttgctgggacctgtagtcttgacgcatgagagcaactggcgcaggcgcgctgctcggtggggaatgtacttgtggcactgagggggatcctctgtccccgctgggtc

SEQ ID NO: 244463 - DNA, 122 bp, Homo sapiens
gccgctgcatgcgcctctggaagcggcggcgactggccctgagcttctgcagcagctggtcgtcttccacgtcctcgccctccatggcgcgcagcgtacccagcatcggacccagccagtac

SEQ ID NO: 244464 - DNA, 122 bp, Homo sapiens
gctggttgtagcagactttaaggaaagaacttaattgcaaaaattcactctaagtgtgggcgtgactaagactcattgtgtcttgaatgtgcagagatggataggaggagctcgggggttag

SEQ ID NO: 244465 - DNA, 122 bp, Homo sapiens
ctcgagccttgatcttggccattgctgcacaggccgccgacgccgccgcgccgcccgctccgagggaaagagcgtagattcaaatataaacttacctaatgatacggcaagtacatgcccag

SEQ ID NO: 244466 - DNA, 122 bp, Homo sapiens
ggctgagctgcgcggccccggccaggcagacaggccagggcactgctgtgcacaatgcagcggtttagctgaatgtgattgctcaggcagctagccagtcaggccccactgcggagtcccgc

SEQ ID NO: 244467 - DNA, 122 bp, Homo sapiens
aatgtgctgctgtttctctaaagcatagttggcacaggcattgactctataatcttactgcgtttgcaaatgttgttaggagaccagcatatgtcatatcacattgtttttaatgcagtaaa

SEQ ID NO: 244468 - DNA, 122 bp, Homo sapiens
aaaggcacttaagcaggagagtgacaggatcagatgggcatttcagcacaattgttctggcggcagtgaggattagagaaaaggaggcaggaaactatttgtctctgtctcgggagaccagg

SEQ ID NO: 244469 - DNA, 122 bp, Homo sapiens
ataactgctgtgtggccgtgcagcccagagcatgtgacagccggtgatgagtgtcagagccgcattgccacccggcacaggcaggaggagatgaaacatttatggtgtgaattaaaacaaaa

SEQ ID NO: 244470 - DNA, 122 bp, Homo sapiens
ttcagtgcctccatcactcactttgaaacatcccactcttatcaccacttcctcttctctcgcaagcctcatgtggtacctccaacctcaatagtccattgatccaccaggtttttcagtcc

SEQ ID NO: 244471 - DNA, 122 bp, Homo sapiens
ctgcaggccgctcagggcagggctctggcctgacgggggttcctggacacgcctctgagccggcagcccctacccgcacccgtgcaccttccacgcccgtctccagcagcccctgcccccac

SEQ ID NO: 244472 - DNA, 122 bp, Homo sapiens
taagtgagtccaggtgtttgcataagaggcagggtcctaagcacctccttatttgagccccgaagcaatcatggcccagtgcttcaaatgagcctcaaatctgtttaataaatcatccttct

SEQ ID NO: 244473 - DNA, 122 bp, Homo sapiens
aatcatgaagacaggaaacaggagtctcattgtgagatgagtgggtcccaccagtgcagccgtggcagtgcatgtcaggaggctgacccggctttgcccctcccccttcacttgttggatgg

SEQ ID NO: 244474 - DNA, 122 bp, Homo sapiens
gtgcccgcgcctgggccgccggcggtgcggtcccgcaagggcgagggagggactgggcctcgggacccccatccccgggatgcctccgtgcctagcccggaccgcgccctggaagagatcgc

SEQ ID NO: 244475 - DNA, 122 bp, Homo sapiens
ggcaatccaggccagatttctcacttgcgagatataaatactaagacccagggtaaactgcgacctttcaaagaccaaccaattggttagtgatagagccaggatgacaagttagttttcat

SEQ ID NO: 244476 - DNA, 122 bp, Homo sapiens
ctgaagggagaaggcagagagtaaactgacaagcatcatagcataggctttaaacgcacccggcatatgtattggttaattaaacataataatcatgatttgatccaactttccaacaactt

SEQ ID NO: 244477 - DNA, 122 bp, Homo sapiens
gagccccgccgagctgctaatgccggcacagaactggaggcggcaactccgccaagcacccgtctgctcccaataatgcaggagccgcccagccccaaaagagcacggccgcccctgctggc

SEQ ID NO: 244478 - DNA, 122 bp, Homo sapiens
gataaccagcccaggaatgttggcaattttacaaagcgaaggcgtcagcaggaaggtttccggagaagcttcgagggtccgctgcagagttggagagtctagagatggggaaggctgcctca

SEQ ID NO: 244479 - DNA, 122 bp, Homo sapiens
tgcctctggattttaggtgttgatttctggatcacgggataccacttcctgtccacaccccgaccaggggctagaaaatttgtttgagatttttatatcatcttgtcaaattgcttcagttg

SEQ ID NO: 244480 - DNA, 122 bp, Homo sapiens
aatgctgaaaggaaaagccccgagaggacacagtgctctaggaactcggggcgccacgagcgcctcatcccctcccttccgcccggccgcggtgccctggtcgctgagggacgcggtcagta

SEQ ID NO: 244481 - DNA, 122 bp, Homo sapiens
gtggggttccggaatgagccggggaaagcaaggggaaggtttggggttggctcccggtttcgcgcatgcgtgcactgcacaaaccatttggcgggtttttccggccactcagttctgccacc

SEQ ID NO: 244482 - DNA, 122 bp, Homo sapiens
gctgccggaccctcagctctgtcgccggggggccgcagtctcggggcggcacagatggggcggctccaaggcttcagccacagacattggtttcctctgttgggggcgcggaggcccaaggt

SEQ ID NO: 244483 - DNA, 122 bp, Homo sapiens
catcagcgctatccctctggtgctggccgtgcgctggactgaggcctggctgctgggccccgttgcctgccacctgctcttctacgtgatgaccctgagcggcagcgtcaccatcctcacgc

SEQ ID NO: 244484 - DNA, 122 bp, Homo sapiens
ggatcctccgggcgcaggtgccaggcaggtgcaggcgggcggtcggccactgctgctgctcgtccctgccagtgtctgggcctgaaggggctccctccaagcggtgccttcctgcggcttag

SEQ ID NO: 244485 - DNA, 122 bp, Homo sapiens
cgcgaagtgggtcggggtgcccagctgggggccggcctcgcagcccgcgacccccggatgcgcagagtatgcagagtcacccaggacagagcggggagcctcagctcctcgtccccgggctg

SEQ ID NO: 244486 - DNA, 122 bp, Homo sapiens
tggagatggctgaactaggggcggagacactgggaagactgaaagcttgctcagcggggtcgcgcaccgctcctcctattgggcggcagcgaccaatagaatgtggggctcgcccgcgctgc

SEQ ID NO: 244487 - DNA, 122 bp, Homo sapiens
gcggtggggagaggcttacccagggtggtgagcgcagcctcagtggcagaaatccccgtgcgccccctcctgccgcagaggaagacagacccctacggagcctccagggcgcagtctccagg

SEQ ID NO: 244488 - DNA, 122 bp, Homo sapiens
tttctctgcctgacagtcctcaaacttgcaaatgccatcaggcatgagagggtctactcacgggtctctagttatttagaaaaggttggtgcatctctagaatatagtgtttttgttgttgt

SEQ ID NO: 244489 - DNA, 122 bp, Homo sapiens
tgatctgcaggtagccgaagtagagggacaggcagttggccgggaagcccaccaccagcacggtaacatagaccaccggggccagcgtctggtggatggtatggtcgatggtacagctcatc

SEQ ID NO: 244490 - DNA, 122 bp, Homo sapiens
agtggtaagcaggaggcgtaggaggtggcagccaggtaagaggcactcttacctacccaacgctggcttgggccgcaactttatttgggagtttctttttccggtgagacagagacccggca

SEQ ID NO: 244491 - DNA, 122 bp, Homo sapiens
cgagggcggagtggtggggtcgctgagtgtgactacttgggctggccttgctccagggaacgtagaaaattctcgagtttagggttttcttactgtgtgtttatacctcttttcctaaggaa

SEQ ID NO: 244492 - DNA, 122 bp, Homo sapiens
gcttaataatgattgtgtataagaaacttctgggaggccttgaaactgtgctgttatctacgtcgcaagggcagattcccatagtctagtgccactcagactgcctgagctcaaattctagt

SEQ ID NO: 244493 - DNA, 122 bp, Homo sapiens
ccattgcatgggtggaccatattttgttcatttatctgtcctgaacacttgagttgcttccgtgttttagctactgtgaataacgctgttgtggacatgggtggacaaatgggtcttcaaga

SEQ ID NO: 244494 - DNA, 122 bp, Homo sapiens
gagatagtttacttggtgcttctgatacccacgtgcagcagcaagtcagcaaacaagccccgagagaggctggaggctggcccagaggcttgtggctggggtcttttatcatcagccaaatc

SEQ ID NO: 244495 - DNA, 122 bp, Homo sapiens
gtcagggaggcagaggggtctcctagcaacagcatgggctcctccttcttgaaaagctttcgggatggggggctggtgctccgacgaggacggctggacctctgaaaaagaccctcccgtct

SEQ ID NO: 244496 - DNA, 122 bp, Homo sapiens
ctattctcacccctttctatattgcttatagccagtgatctccagctattcctcagagcccgctcattcacttcctaacctggttttactccccgttgctgacttcacagcttgttaacttt

SEQ ID NO: 244497 - DNA, 122 bp, Homo sapiens
agcccctccccgctccccttcagacgattttggtttggttgctcctgcttctggcggggtcgggtgtgtgtgtgtgtggtggagtggagggtggcatagcaacctgtcccaaccagagccgg

SEQ ID NO: 244498 - DNA, 122 bp, Homo sapiens
gaaaaaggatgactatatggagtcagggaccaagaaggataactccatcctggaaatccgcggccctgggctgcagatgctgcccatcaacccgtaccgcgccaaagaagagtacgtggtcc

SEQ ID NO: 244499 - DNA, 122 bp, Homo sapiens
gcaaggattcgggggaggagggagaagggaacgaggcgtgccattcctgttgcgcggctacgcttcaggagttcttgtgaacgatgggaatggcaactatcagagccaagggggaaaagaaa

SEQ ID NO: 244500 - DNA, 122 bp, Homo sapiens
gttttaccagccgtgatattccttggattaggatactgttgaatgctccactgtggtagtcgtagtagtcatggacccactggagcattgtttgttaatagacctggttcctaggtttgact

SEQ ID NO: 244501 - DNA, 122 bp, Homo sapiens
gggaatacgggttgtgtggagacttctgagcgctgttaactaaacatgttttagtgccctcgctctctatttcattccctgccctccaaccccttttcatattacggaggaattcgtacatg

SEQ ID NO: 244502 - DNA, 122 bp, Homo sapiens
acctcgtgatctgcccgcctaggcctcccaaagtcctgggactacaggcgtgagccactgcgcccggccgactagattcttttaatatcataaactgtgtttttgttttcccaatcagtaac

SEQ ID NO: 244503 - DNA, 122 bp, Homo sapiens
cgagtcctgattgcagtcggacctgccgccgcggcacttaacagtttgcagagtgcttcccgcccctgatctcattggagccttcggacagcccagcccatggccaccgatgcccccatttc

SEQ ID NO: 244504 - DNA, 122 bp, Homo sapiens
ccgcacgacgcgccggtcgcccagccgctcagagccgaaatgctccgcaccgcctccgcacgggctctaactctaccggatgtgacgcggcgctccttagccaggctcctcccctcccagaa

SEQ ID NO: 244505 - DNA, 122 bp, Homo sapiens
tcatttttctgcacaggaactcttcagttcagtacgaaacatatggtgtctgtccaggcacgagcctgcaaagctccaggcacgagcctgcaaagctctgtaaagcacaaggggcctcttca

SEQ ID NO: 244506 - DNA, 122 bp, Homo sapiens
ggctggcacacagcagacatcttgcaggccctcaccacagggacctccctgggcccggcccgggacccctgccttgacaactgattccagcctctgtccaccctgcggacctgcccggggag

SEQ ID NO: 244507 - DNA, 122 bp, Homo sapiens
gtattcacatgctattcctctcatcacagggtggagtcagtgcccctccccttgaaactacgctgctcgtgactggctttggcccaaagaatgagacagaggggtgctgttccagttctagg

SEQ ID NO: 244508 - DNA, 122 bp, Homo sapiens
cggggccgcgctgaccacactccacgttatgggcccagagtccgcgctctgaggagctgccggggccgcgctgaccacactccacgttacggtcccagagtcctcgccctgaggagctgccg

SEQ ID NO: 244509 - DNA, 122 bp, Homo sapiens
cacgaacccaccagaaggaagaaactccgaacacatccaaacatcagaaggaacaaactccggacacgccgccttctttaagaacggtaacactcaccgggagggtcccgggcttcattctt

SEQ ID NO: 244510 - DNA, 122 bp, Homo sapiens
aggtgcctggagtttcattcagcaggcgagaccatgcatggagggtgcagaatgattctgcgcagtaagcgtgtgggtgtgtcctcccacctgtgtgtactcctgccccacttgcaaccctg

SEQ ID NO: 244511 - DNA, 122 bp, Homo sapiens
tttttggtgacagagcacctaggataaagtgcagtgatgcaatcacagctcacctcagtgcggccttgaactcctggactcaatcgatcctcccacctctgcctcccaagtaactgggacta

SEQ ID NO: 244512 - DNA, 122 bp, Homo sapiens
tcggtgaaccggttactctcagagctgctttcgggcgcagctcctgctgcagccagggcccgttttaagagaggcttccaggtccagccctcccgctgcagcctgcagggagcgagccggcc

SEQ ID NO: 244513 - DNA, 122 bp, Homo sapiens
gagatcttcgttaaggagcaaagcgaggttggcagcatgggggccctgctcttctgagcccgtctcccggacaggttgaggaagctgctccagaagcgcctcggaaggggagctctcatcat

SEQ ID NO: 244514 - DNA, 122 bp, Homo sapiens
acgcggccggccggacaaatttcctgctaggctgcggacagcgggcggcaggagccggcgcgagcggcttcaggaacccacggcctctgcgcgtccccgcgacccttcttcgcgcccggcga

SEQ ID NO: 244515 - DNA, 122 bp, Homo sapiens
gcatgactggggaggcctcagggactgcgccatcatggcagaaggcagaggggaagcaggcgcatcccacacggctggagaaggaggaagacagcaaaggcgctgcgcactctcaaactacc

SEQ ID NO: 244516 - DNA, 122 bp, Homo sapiens
atggataaaccatggcagtctcaacacctcagtgaggacagagacgtggcggcccctcggcgaggacagagacgcggcggcccctcgtgaggacagagacgcggcggcccctcgtgaggaca

SEQ ID NO: 244517 - DNA, 122 bp, Homo sapiens
ggcgccgggaccgactagggcggggcgcggggtcggggggcggggcgcggggtcggggggcggggcgcggggtcggggggcggggcgcggggtcggggggcggggcgcggggtcggggggcg

SEQ ID NO: 244518 - DNA, 122 bp, Homo sapiens
tattcactaacgtcaaagagcagtgagtgctgttacgtgtatgggagccaccagggtctccgcctgcctgcagggccacgcgcgcactcgacgcttcgcgcctgcctcagtttctccgtgag

SEQ ID NO: 244519 - DNA, 122 bp, Homo sapiens
gtgaccatgaagatggccatctacaagccatagagggaggcctggaacatatcctgccttcgcagccctcagaaagaaccagccctactaacaccttgattccagacttctagactgcagaa

SEQ ID NO: 244520 - DNA, 122 bp, Homo sapiens
caggcagcttgggagcacataaacaaagcaaaggagattggatgctcctgggaggacaggcgtggtttggtacaaagcaggtgctcaagaaatgtctcaggaatggaacccaaccaggttcc

SEQ ID NO: 244521 - DNA, 122 bp, Homo sapiens
cgttcctgtgacgcgtttcctgttggccgagctgcgcacgtgcggccggaagggaagtaacgtcagcctgagaactgagtagctgtactgtgtggcgccttattctaggcacttgttgggca

SEQ ID NO: 244522 - DNA, 122 bp, Homo sapiens
gattttgatagtaatgattattaaaggaagacagagtactttgtacttttaacatttagccggcagcagcaattgcagcaatatccaaagtgtattgaatgtctttggtgtagaaaaaggca

SEQ ID NO: 244523 - DNA, 122 bp, Homo sapiens
cggaacgcggcgccgccgcgctgcagccgaagtccgagcctcccccggccccggcgcccccgccgccgccgccaccaccaccaccgccgccgccaccgccaccccgggaacccagggctgcg

SEQ ID NO: 244524 - DNA, 122 bp, Homo sapiens
accattggtcgctggtgccaagagctcagccaatcacagcctagggcagctgttgctaggcgacgaagaagcggcccgcggagctgagcccaaacaaagggcgggagtggggcccggctacc

SEQ ID NO: 244525 - DNA, 122 bp, Homo sapiens
aaaatctgattgccatgactctgaacataggaaggacagttcatttgaacaaagttattgcgtaccaatgttggattctctatatagggatactagagaattacagatttcctaattgctgt

SEQ ID NO: 244526 - DNA, 122 bp, Homo sapiens
gtgggtggcgggggagggagtcgtcgcagtccgggagccaggctctcggcgcgttgggtccgcctctcgtgacagcagagcgccccctgctgcccgagcccgggtggtgtcgcacagccagg

SEQ ID NO: 244527 - DNA, 122 bp, Homo sapiens
ctatgaccagggtgccaagctcagcctcatcctgggagcttttatatgcttcctccagtacggagagtgccaggccagcaggtggcagcaccgggcagggtgacaggaaagggcagctcctc

SEQ ID NO: 244528 - DNA, 122 bp, Homo sapiens
cttagtgaatggtttccgctaggcaaaagcaatcgagccatcgtaacatacttgtgcgtccgcccagaaatgtgggcgtcagcgtttttggttccgtaacgtcggcgtgcaattgggattta

SEQ ID NO: 244529 - DNA, 122 bp, Homo sapiens
aacattgctgacagatggccatttggtatgtgcctgaaatacatctagaggtgggaagcacgttagttagaggcaacctgttcactagatttgggacttgagtgttttagcaagatccttga

SEQ ID NO: 244530 - DNA, 122 bp, Homo sapiens
gatatcaattcgttttaaggaaaggggggaggaaaccccgcatttcccacagagtgcacacgagaggaattgaaaacagctggtaccggtctataaataattcagaaaaggtctggctatac

SEQ ID NO: 244531 - DNA, 122 bp, Homo sapiens
gtcattagtctgacccagtttgaatgacggttgaatttaggagaaaaaagtcccatctttcgacaaaagtgtaccagccctgtcagtttaagggagaaaacataaacagaggcagtgtaggg

SEQ ID NO: 244532 - DNA, 122 bp, Homo sapiens
ccagacagagaagtattggcttgtcagaccagctcgtcttctgcccccttacccaaagagcgaggtcgagttcagtgttaacattctggcccaaatgcttccttcattaattatttttactt

SEQ ID NO: 244533 - DNA, 122 bp, Homo sapiens
gcgtggtgtgtgcagcgggtgccactcagcaatggtgaaaacagcagacatcaggcgctgcgactcctaaaacacacctgtctacaaaaggcagcaacagcagcaacacagcaacacagctt

SEQ ID NO: 244534 - DNA, 122 bp, Homo sapiens
ccagaaccctgttcttaggggagtggacactgggcaatccagggccctcctcgagggaagcggggtttgcgccagggtccccagggctgtgcgaacaccggggagctgttttttggagaagg

SEQ ID NO: 244535 - DNA, 122 bp, Homo sapiens
cttagctcccatgcccatcggagtacgtgcgcagcaggcaagggcgaccccgtggaaggacgcgggctgagcttagaggggcacccagcgctgctggagccgcccatgctgcaaatgctgtg

SEQ ID NO: 244536 - DNA, 122 bp, Homo sapiens
ggggagagcagccctggtggtcggcgtctgtgcaggtccctgctggggagcttgacttcccgcgtggcctcccgcggcgctgatgccgggggccgggcggtattcaccgctgaagagccccg

SEQ ID NO: 244537 - DNA, 122 bp, Homo sapiens
gcttaagcaaaccacatggttaagcaaaccctgttctggatcacatcattagcagctagacgtctagctatagctattaaatcctaaggtttacaatttgatttctatcccatacgaattag

SEQ ID NO: 244538 - DNA, 122 bp, Homo sapiens
ctgagaaccgaaatgcttcctgaattaggatcattgagaacgccgagtgcagacacaaatcgaaaagcagccacccgcgccgccaaggcggggccagaactggcggcaggcggctggcccgc

SEQ ID NO: 244539 - DNA, 122 bp, Homo sapiens
cctgcaccatttctttctagaagatttacagtgtcagtcattacttcctctacactgtcccgtgagctccagacgttaaatatccaacagtctactttgacatctttacccaattgttccac

SEQ ID NO: 244540 - DNA, 122 bp, Homo sapiens
gtctcttctgtgatatatacatcccttcagtgcctaacactatctctagcacacagcagacgtataataatcactgaaaagaactgataacctcctttatttgtagacatgcaaagaatgtg

SEQ ID NO: 244541 - DNA, 122 bp, Homo sapiens
ttctttttggtaaagccgggaccttagacataacctctggccacctcatggggcctgtcgcgcacagccatgcaattagcaagcggggctgctgcagacttcaggcacagggaacgccagga

SEQ ID NO: 244542 - DNA, 122 bp, Homo sapiens
cccaacaattcagggtggagttatcagggcgccctgactcctgggggcatttttgtgtgacgggaaaagacaatgctcctggctgagtgagatggcagctggcttggcaaggggacagcacc

SEQ ID NO: 244543 - DNA, 122 bp, Homo sapiens
tgcctgtgatcacagcgctttaggaggctgaaggaagagaatcatttgaggccaagagttcgagaccagcctggtcaatgtaggcagacccagtctctacaaaaaatacaaaaattggctgg

SEQ ID NO: 244544 - DNA, 122 bp, Homo sapiens
ttgatgagaactgtttgctccaggtcacctcacaggatgatgactacatcacggattgtgcgctcttgggtcacgcgatcactcttaatttaaattagctgggctgggggtggggagggggt

SEQ ID NO: 244545 - DNA, 122 bp, Homo sapiens
ggagagatgtcccggctgtcgctgctgggtggccaaggaggttcacatcctagagtagggcgcacgggtgcgcgaaggcgctcgccaaggaggcgtagagggcgcagcacaactcctctggg

SEQ ID NO: 244546 - DNA, 122 bp, Homo sapiens
ctgtctcgtggtgcggtcccctgtgacggcctcagacctgcggggaacccaggactttgccgcctaccacggtctcagccttattctcgagcctctgggcgcctgcaaccggctgtctgtct

SEQ ID NO: 244547 - DNA, 122 bp, Homo sapiens
ccaatcggaaagattagcgtgtgggaagctgtaacaaaaaagcagggggagtgcgggggtcggcacacaaagaaaatctggactccagagtttaagcgacccttcactggcttttcccggtg

SEQ ID NO: 244548 - DNA, 122 bp, Homo sapiens
actggggggacgacacccctttcccctatccctccctgctggggtgtggcctgatgtctacgtggcaccaggcccctaaatcctttcaacatcctggcggagcggagaggctgggccctttt

SEQ ID NO: 244549 - DNA, 122 bp, Homo sapiens
ttggtgtattgttcccaacctcagggagaaggggggggttgtgcagtaggctccacccctcgcttgtgtgctccggaaaccctgtgctgaggcaagggggaccacacccccaacaccccttc

SEQ ID NO: 244550 - DNA, 122 bp, Homo sapiens
aatgatgctgcattctactgtgaggtcacaaatagccctacagttgctctttggaaccctcgctcttagatccccgagccaccgtataagaagtccagctaccctgaggccgtggactgcag

SEQ ID NO: 244551 - DNA, 122 bp, Homo sapiens
attagagaaacctttctagtgtaagaaatattaaccaaatacttgaaagtcagtaattggcgaaactgccttctttgatttagggggacatcctgcattttgttggcggtctagaaacaaag

SEQ ID NO: 244552 - DNA, 122 bp, Homo sapiens
tgttcctgcatctcacagctccagcagcaacctgggtctccctgaggacatgaccccctccgaagtcctcccacatgggggagtttccccagggacttgtacccctgggttcagaggtgagg

SEQ ID NO: 244553 - DNA, 122 bp, Homo sapiens
ctgtccctgctccagtatctgtaatgaattctcgtgttcctcccacagtgggacctgaaccgccaaaccgcacctacgagcaaacggtaggcgctccataaatacttgttgatgtgggtgcc

SEQ ID NO: 244554 - DNA, 122 bp, Homo sapiens
tatgaaaaaagccgagagaggctacagaacctgtttgatgtgatagctaattatggtccgcggagcctcaaaccgagtcgggcctgtgactccgagctgcgctgcctcgtattgattgtcat

SEQ ID NO: 244555 - DNA, 122 bp, Homo sapiens
ccgttccgccgcattcctgccctctcggcggccggtgccatcgcttagatccgcccagggcgcaatccgaaaattatgtgccaagagctataaaaccgttcatagagcccctttgacccagt

SEQ ID NO: 244556 - DNA, 122 bp, Homo sapiens
gagctgctgctgtaacgctctaacgttagagcagctaacggctctgctcagaatttctcccgacagaggccggagtgttcaagagcttggcgatacagaaatttctgctggtgttggggcgg

SEQ ID NO: 244557 - DNA, 122 bp, Homo sapiens
cagcctggtcggacgcaggctccgggctgcagggagctaatctgcatggccaggggccaccgggcgctgtctgtggaggccccacaccggggtcaggagggagccaggtctcaggagcacaa

SEQ ID NO: 244558 - DNA, 122 bp, Homo sapiens
ccccgggacctccacgtcgcgcgcaggccactaacctgtcagcaagaatgtgccagtggtcgcggggctcatcctgcgtgtcccccgaccctgtcccgtccaagcacaggggtctcccagct

SEQ ID NO: 244559 - DNA, 122 bp, Homo sapiens
ggtggtggagggcagagaaagagttggaaacacagagactgacttgctgaggcagccgcgcgctccgcagccgggagcttcaagctgcctggatcctcaccaagctaaattcctgcttgcta

SEQ ID NO: 244560 - DNA, 122 bp, Homo sapiens
tgggccacggcaccctcgagcgccagccccgcgccccacccgggagcagcgagccaccggcgcgctccccaggagcccctgcaggcgccgggtagggacgccccatcaccccatttcttaaa

SEQ ID NO: 244561 - DNA, 122 bp, Homo sapiens
aagaatgggtcatcttcaggcctgagatcccaatatgttatggtaaaattgtgggtgcaccgtcctctttggaaaaagggggtaaggaacagatctggctcaatccatgctaagaatctggt

SEQ ID NO: 244562 - DNA, 122 bp, Homo sapiens
taggtgtaaacacttgtaacgaacttggcactatttgacttacagccagtgctcaattaacgttaaccatcattacaactattgtcattcctatattgtgaggaaactatgccccttaaaga

SEQ ID NO: 244563 - DNA, 122 bp, Homo sapiens
gacaggcaggtgtgaactgggcccctagagtggggatgcgtaccccactcacgagggccacggaagggtggatgcgagctgggcccctacagtggggaatgtgtacctgctcacgagggccg

SEQ ID NO: 244564 - DNA, 122 bp, Homo sapiens
gagtgctacgtctctgagctggacagtggtgagctggccctgcccctgccaactcccttccgggctggggccttctggggaggggaaggatggaggctaagccaccaaccctttatccacag

SEQ ID NO: 244565 - DNA, 122 bp, Homo sapiens
aagcaggagcgtgacatgggacaaaagtgactccttgggcagaggccattcccaggccaccgctgaacactgatggctcccacccggccaacagcacacccagcagctggggatataagttc

SEQ ID NO: 244566 - DNA, 122 bp, Homo sapiens
ctagcatcatttcctgtgcgctggatgctgattggtccgacagtcggaagtgagggcgggcggtgggggccgttgccgcagtgacagtgctaggggagtccgaagatggcggcgtcgcgtcg

SEQ ID NO: 244567 - DNA, 122 bp, Homo sapiens
gtttaggtcaggggttgatattattatcacttttttttaactaccagggccaggtggtggcgccaaggtcttctggctatttctcttacttctgtttttttctaactttttgccttctctct

SEQ ID NO: 244568 - DNA, 122 bp, Homo sapiens
cctgagaatggagcccctgggcccccaatctctcgctttcctctggaggaaccagggccccgtccactcccctggcccccaggcagtgatgaagtggccaagatacaaactccaccacccaa

SEQ ID NO: 244569 - DNA, 122 bp, Homo sapiens
cgacaggtcgagggtagggaattgacccggcccacgcagatccccgcgtcgtcttctccccgcccaccgcagccattggccgactctcgactcgccctctgtcccctggggtcgctcactta

SEQ ID NO: 244570 - DNA, 122 bp, Homo sapiens
ggcacgaactacccccaccccgactgtgcgtgggtgccggagcctttgtccataaggatccgtgtgggcagtggcttaaggtggcttagggttccccagagacacagaaccagcaggacaca

SEQ ID NO: 244571 - DNA, 122 bp, Homo sapiens
tcagtggccagcaccttcccttccgcctgcaggctgctgatatgcaggaggaaatcctggcgggttcctgtgggggtgagctggcggggcctccgggctgcttttaaggccactgcccgccc

SEQ ID NO: 244572 - DNA, 122 bp, Homo sapiens
tcgccgggccccatagatctgcggtgcccaggccgtaggcggaggcgcgggcagaggcggcggcggcggcggcggcggctggaggacccggcgctgggggcgctgagcggcagcctcgcttc

SEQ ID NO: 244573 - DNA, 122 bp, Homo sapiens
ttctaacaaatttgcaatgtgtttcttcactcttgtcatcatgttgatagaacatctttacgtgcctccccaccccaagatgtcaccatctctttccttccctccccaggtaaacttcttga

SEQ ID NO: 244574 - DNA, 122 bp, Homo sapiens
actaagaaggatttgtttatggaaccctggcttggaaccagaaggccggtatgctcatgtcgatgtgtctaagtcaaaggcatgaagttgaacacgtgcgcacatgaggctggatgttacag

SEQ ID NO: 244575 - DNA, 122 bp, Homo sapiens
cgaatacgccggcagggtccgggtggcggggcgggcggggcggacgcagcgtccgctgggcggtgggaagaaccccaggcatctgagtcaagacgcctaagttctatttgtagtgtaaccac

SEQ ID NO: 244576 - DNA, 122 bp, Homo sapiens
gccatctaggccgcgctggctgcacccgcccaggcccgcacccgcccagtcccgagggcccggccctgtctgcccatgacttcactggtgtgagcttgtccgccatgctgtaccctgcaaca

SEQ ID NO: 244577 - DNA, 122 bp, Homo sapiens
agagagggagagggagaccgtggagagggagagggagcggagcgggagcgggagagggagcgggagcgggcgcccctgttttttcatagacgggtcctgcactcatttctttgtgtaggtcc

SEQ ID NO: 244578 - DNA, 122 bp, Homo sapiens
acctccatccgggatagtaaggtctgtatatccctgatcatgtgctgagccatcaccagccgtacccggggctcactctacaatgagagaaggtttatcagggtaggttacagatgaagcca

SEQ ID NO: 244579 - DNA, 122 bp, Homo sapiens
ggcgccggtgcgctcctgccggtcctcgtgcccgggactccgggtccccgcgggctgctgcgcacgatgaagctggccctgctcctgccctgggcgtgttgctgcctctgcgggtcggcgct

SEQ ID NO: 244580 - DNA, 122 bp, Homo sapiens
gtggcagcagcctccccaggcgccgggcacccgtcggctggcccagggacttaccacgagcgcgcagcacagcaagttgttcattgtggtccccggaaacctcaggggcttggaggcggcgg

SEQ ID NO: 244581 - DNA, 122 bp, Homo sapiens
cgacttactccctccttgtctccacccactcctccatgagaaccgagttgggaatttccacgggaagtcgggggtggcggggagagacagggtagaaataaagagcgcatccttgagagggg

SEQ ID NO: 244582 - DNA, 122 bp, Homo sapiens
ttttttacctgggtagagccataggcactgacatagaaaatgtctgtgacacggcggatccggaaacaggcaagatgcacaggcagtggagtgtctgaccccaggtttgttgctacaaatta

SEQ ID NO: 244583 - DNA, 122 bp, Homo sapiens
tctggtctaaagacactatgtaaatggcttatgctaaagaggaaaataccctttctcccccgacgagaagtgtagattcatccaaccccacaccgcttgtctttgctgctagaggcacagca

SEQ ID NO: 244584 - DNA, 122 bp, Homo sapiens
cggctgtctgaggacagtgggtgggcgggccgaggaaatggaattcaggaataaaggaaacggagtatgaagaaggggaagtctgtttcctgtcactggttgtaaaggaagacaccattttc

SEQ ID NO: 244585 - DNA, 122 bp, Homo sapiens
cgggcggcgcgagcgggaggcggcggcgcaggtactgcgcctgggggttgtgggggcgtgcggccagggtcccgtggccggaggtgtccgaccgggagcggctggagccggacgcgagcggg

SEQ ID NO: 244586 - DNA, 122 bp, Homo sapiens
cacacctggacggagaggggaggtaggaggggcaggaagcggttggtgcggacggggaggcgactgcgtggggtcttccgacatcacccttcagctgagtgtccggggtctcattcccagag

SEQ ID NO: 244587 - DNA, 122 bp, Homo sapiens
gcgctaaggcggtgggcggtcccaggcaggcccagaagctgggcagcctctgccgggttccgggaaaaggagctcctgctgccactgctcttccggagcctgcagcatggggcccctgccgc

SEQ ID NO: 244588 - DNA, 122 bp, Homo sapiens
gaattacagcgcttccttcccaggaaccctacctgcttttagtctggtgctcaatttgcacgaactgtcgccgctgtttgttgatatggcttccatattcagaaaccccacatactactcaa

SEQ ID NO: 244589 - DNA, 122 bp, Homo sapiens
cagacaccgagccgcggccacagggccagccgcacagtcggaggaagggccggagcgaggcggggcccggggctgtcaaggagaaaaacatcccaaggcctgcaaattgctgctctcagctt

SEQ ID NO: 244590 - DNA, 122 bp, Homo sapiens
gttccggcaagtgggccctgaggctggccccagcttccgggttggtcgcgcgccttcctgcggctaagatggcgacggagcatcccgagcctcccaaagcagaattgcagctgccgccgccg

SEQ ID NO: 244591 - DNA, 122 bp, Homo sapiens
ctgccttccagtctctgccttcaccgcctctccgaggacaggctgacccggccacttgcccgaaagcagcctccatgcctagctccaggaccctgcaaccctgcaccacagctctgccaccc

SEQ ID NO: 244592 - DNA, 122 bp, Homo sapiens
cttactttgaccacggtgactaacccgtcgttgctgtttgggtcggtctggatggcgaaccgtccagtaggatctccgccactgattctgtacactgcgttccaggctggtgtatggggttg

SEQ ID NO: 244593 - DNA, 122 bp, Homo sapiens
agcttcttacttctggagccacccattctctttgggcaaggatgctcaggggccagggatcggagtcgggtggtgcacggaagtggtgctggtggtgggtgtgcgtgcgcctgagccttatc

SEQ ID NO: 244594 - DNA, 122 bp, Homo sapiens
gctctcggatgttcccgattaatgggctccaagtgaccactgccaggtcggggaacacagcggtagtttttaaggggagtgcaccacatcgcctgatccacttttctgtttctcagccttcg

SEQ ID NO: 244595 - DNA, 122 bp, Homo sapiens
aagacccgtgtgactgaagaggagctcacagttcccagcgtctgctcccacggtgtccagcgcccagaatgcggcttctggtcctgctatggggttgcctgctgctcccaggtgagatgggg

SEQ ID NO: 244596 - DNA, 122 bp, Homo sapiens
tgtagatgtggttttctttgtatttatcctacttgggttcatgagtgcaatgggtgtatgcggagtcccttgcatttgtgggtttatatcttttaggaaattcttgatcactgtctcttctc

SEQ ID NO: 244597 - DNA, 122 bp, Homo sapiens
gagagtccttgttctccttctggatacagttgtgaacctggaggaagctgttatccctgtcggagttgtaggtggcggtgggcgtggtggcggccttcagggggtccctgctgagcgtgtac

SEQ ID NO: 244598 - DNA, 122 bp, Homo sapiens
gagctctgcccagttctgtgaaaatttggtggtccgataactgggcctggaagcccataacgctagccccctgcctgagtagcctaaggagccacctagtgacacaaactgacttcagtcca

SEQ ID NO: 244599 - DNA, 122 bp, Homo sapiens
aaaacacacagttgctaagtggtgacccggacttgaacccagtctggctgactcccgagccgttccccccgtggaggaggtctcggacaatgcctgactcccgagccgttccccccgtggag

SEQ ID NO: 244600 - DNA, 122 bp, Homo sapiens
aatatttttactcctataattcttcttttgtgttctcctctgccctcttccctttttacacgttaccaacaaaatgggcaatgaattggtagttttagcctctcaacccagaccctccttat

SEQ ID NO: 244601 - DNA, 122 bp, Homo sapiens
cagggggctgctccgtctttcggccactttctgctttagcctggaccgtaatttcagattcggttcagaagctgcacaaaaaggagatgtcattacagccaggcagacaccactggctcaag

SEQ ID NO: 244602 - DNA, 122 bp, Homo sapiens
cgctgggggcgggctcgtgcggcattctgggaactgtagtttcggcgacgctccaggccacgtggaggaagcgcccggtctggcgcatgcgctctccagcgcgctctccaggagctttggct

SEQ ID NO: 244603 - DNA, 122 bp, Homo sapiens
ggggagcagaggtgagctggcaccggaggctggaggggatccccgagcccgggatcggtgcgcggcagaggaggctcgcgggtgggagctggcgctggggccggggcttccctcgcggaggc

SEQ ID NO: 244604 - DNA, 122 bp, Homo sapiens
gcgctcactgttcggagccgagctgtcagcgcttgggtgaggggcggagcgcgcggggggcggggcccagcggacagggactttgaaccgcaggttgggagggaagggtgggctcccaggct

SEQ ID NO: 244605 - DNA, 122 bp, Homo sapiens
gcagggtgaggtgggtggaaggtgatgcccgccccacctcacaggaattacagagcggtgcgcttacctgcgggactgttatgtgcgctctggcacaggctgactcatgtgtgaagtttaaa

SEQ ID NO: 244606 - DNA, 122 bp, Homo sapiens
gaaggggctcctgagagatccagagttacagagagaagtatccagcatctagatatttgccgaaccaaaggaacaagcagccaaattagaaaagcatgtccaagtcagacattcctccctgc

SEQ ID NO: 244607 - DNA, 122 bp, Homo sapiens
acatcgtgcttgtcctacccttcgttcttgtccacttgacaccacaaggcaccatgaggccgttcctgggaggcagcacctgcagcctccatggctataggctaagcttgaatctctgccta

SEQ ID NO: 244608 - DNA, 122 bp, Homo sapiens
gccccacacgggacgaagaacctgcagtgccatgttccgtgagccaagggtgaacacggtcgcacctcacgcagtcgtgcagcaggtcctggcagatgatgcatgtcagcgtctcctccatc

SEQ ID NO: 244609 - DNA, 122 bp, Homo sapiens
atttaaggatgagtagctgctgatgaacccaatttgggatctggcaagaggaaatcagagcgtcaaatcaaggaggggtggcagcaaagaggaagcaaaagagaagacaagaggaaagagag

SEQ ID NO: 244610 - DNA, 122 bp, Homo sapiens
cagcggagaaacgcgattgaggtaggtgtcctgatgggcagctcagatggctggactgcacgtaaggaaggacaggccaggtgaggcgtcctcgcactgcgtgtgcgtcgctggcggacaga

SEQ ID NO: 244611 - DNA, 122 bp, Homo sapiens
ttgtaatggacttgatgaaagtaaggtggggtaaatgagaacaacataaaggacacagaacgcagtccctaggacacttagtaagtatcaggttttattattatcatttggaatggaggaaa

SEQ ID NO: 244612 - DNA, 122 bp, Homo sapiens
caggtgactctgctcttaagctgtgggctgtccccttccagggaagacaccttgggtcaccgcccccaaacagccaggtccctccttttaaagacacacacaactccctaagttgataaagg

SEQ ID NO: 244613 - DNA, 122 bp, Homo sapiens
tctgtgtcttcttccgcccagctgcctctgtgtcttcttccacccaagtgttcttcacgacgtccagccgcttgtatgtctacttactaaggtgtcccggggttttataggcacaggatggg

SEQ ID NO: 244614 - DNA, 122 bp, Homo sapiens
gaggcacgcgggggcatggctccaagcaggtatggggcaccaggccggcagacctggagacgcccccggcctcttgggagctcctgagggtccaggtcgggtggggcgcgccttgcggcaag

SEQ ID NO: 244615 - DNA, 122 bp, Homo sapiens
ctcctctctcaaaggccttccttcctatcccgttcccattcggatgttaccagggttaggcgtctccggcttacttctaaaccttgactttcttgccacccccgccctccgtcccgctactg

SEQ ID NO: 244616 - DNA, 122 bp, Homo sapiens
aggtttgagcgttaccctaaaggaagctctggaatccagccaggcctcttaggaagagaacggtattttaattgacttgccagtgtgaatattttcttggcagcccccattatctaggatgc

SEQ ID NO: 244617 - DNA, 122 bp, Homo sapiens
tttgctaaaaatcagatcagtacactcgtttgtttaattgataattgttctgaattatgccggctcctgccagccccctcacgctcacgaattcagtcccagggcaaattctaaaggtgaag

SEQ ID NO: 244618 - DNA, 122 bp, Homo sapiens
tttcgtgagtcggacaacgaccggaaggtgagcggggcctgtgactgggcaggtgacgcacggggcctgcgcaggactctgcagcttccttcagagccgccctgcctgcccggttcggtggg

SEQ ID NO: 244619 - DNA, 122 bp, Homo sapiens
gcatttttagacaagccaaagatggaaaagcataatgcccaggggcagggtaatgggttgcgatatgggctaagcagcatgcaaggctggcgtgttgaaatggaggatgcacatacggctgt

SEQ ID NO: 244620 - DNA, 122 bp, Homo sapiens
ctgaggggaaagaaagtggtttacctggctgagacaatgactgcgtcggcctcctcccagcgtagctggggcagccgctggagcgtgttcttggagaggaggaagagtccggggaacaccac

SEQ ID NO: 244621 - DNA, 122 bp, Homo sapiens
ctgcagaggcggttatggacggcaccatggaggactccgaggcggtgcagagggccacagcgctcatcgagcagcggctggcacaggaggaggagaatgaggtgcgagcaggggtggaggtg

SEQ ID NO: 244622 - DNA, 122 bp, Homo sapiens
ctacttgtgcctgaggttttgcctaaacacaatcaagtgtctggttctctgctttctgttcgattggaaagggcagttgggtaaacacaggctgagaaaaaaaggtttggttccagaaggca

SEQ ID NO: 244623 - DNA, 122 bp, Homo sapiens
aagaagtagatgggaaaaaaaaagaaacattcgcaagtccctaaatgtaggatttaagggcgcatgtctccccctgctggttgtggtggtaggaaaccgaacctagaccacaatggtactgg

SEQ ID NO: 244624 - DNA, 122 bp, Homo sapiens
cacaccccgcgtctcgcgtcactgagtcgcgtcacggctattggcttgttcctactgtggcgtcattagagcccggcctccggctggggccacccaggcaaccgatatacacagagaaccac

SEQ ID NO: 244625 - DNA, 122 bp, Homo sapiens
acccagactggaccaatgcacagtctaggtggattaacgcgccaccgcgagaagtgggcacgggaccacatgcggctggcaagacgtcccagggctcaagctccaggctcggtcaccaaaca

SEQ ID NO: 244626 - DNA, 122 bp, Homo sapiens
ctaacccaggctcagagtagctgctgtttctgagagaacgattcgtaggacagcccctgacgccattcccttttgcccttctttctgcgggcctttccggtacttgagcggtgtccagagcg

SEQ ID NO: 244627 - DNA, 122 bp, Homo sapiens
ccctgattttataagaggaggacctagagaaaggagcatgtaaaacccaggatgagtattcgagtcttcagatcattcagagcttttgggctccatacggaaagtgactgttagattaaatg

SEQ ID NO: 244628 - DNA, 122 bp, Homo sapiens
tcctgaaacctaacccaaaaggcatgctctcatagaaaactcttcttagtactttcagtgcggtgatagctgaggacatgtggtatatattacagtgccagggaatccaaacctctgcagtg

SEQ ID NO: 244629 - DNA, 122 bp, Homo sapiens
gcgagctgcggccgtggagggtgtgagcccaacctttgtccctcggagcaacgctgcctgcgcggtgcccgctccttctgcttggctgggcatgcaccttggcgcgggccacagccagccga

SEQ ID NO: 244630 - DNA, 122 bp, Homo sapiens
gaaagtgtcccgaaggccgcttcctttttgggggttgtggatctcagagccaggcgctcgcggggttcaggctgctgagaccctgccaagggttaggtttatttaccccacgaacattcgcc

SEQ ID NO: 244631 - DNA, 122 bp, Homo sapiens
atttagacgaaatgaaaaaaggctttcatcggcactaatgagccattcaggatgcctccccggtggattctctcccgctcccgcctccctgcccgcgccgccccgctatggcccctcttggg

SEQ ID NO: 244632 - DNA, 122 bp, Homo sapiens
taaactcaaccttagagtctaaattagagaggcaaacagtagccaaatcacatgaggcttcgtatgccatagtaaggagcttggattttattttaaatgcaatgggagccaatgaaaggttt

SEQ ID NO: 244633 - DNA, 122 bp, Homo sapiens
aaggcccgtgaccccgactctggaactttgtcctcacagggaggagctcctggtggtcaccgatcggctcagcagctcggagagaggttaggaaaatctctccggaacgcgttgggaggccc

SEQ ID NO: 244634 - DNA, 122 bp, Homo sapiens
gggatgtggggagtgcctctgccccgccaccccatctgagatgtgaagagcgcctcggcccggcagtgaccccgtctgggaactgagaagtgtctctgccccgccgccacccactctgggag

SEQ ID NO: 244635 - DNA, 122 bp, Homo sapiens
ccgcggagcgctggcgctggccagcggagcaggaggtgaggtcggcggagctgggaggaccgcgcctggcggctgcaatagccgcacctgtgcacgtgatcgcgagcggctcgggcgccagg

SEQ ID NO: 244636 - DNA, 122 bp, Homo sapiens
tggatggaggatgtggttgtgcttaccacgctccctggtcagtgggttaatgtcgtcaggcggggccaggctcgctaacagccgggcggggtcccttcccccgggccccgccccggccgacc

SEQ ID NO: 244637 - DNA, 122 bp, Homo sapiens
gccccaaagaccaggacttctgacctgttgggagctgagaaacaaaagtgggtctactagcgtttgattaatgcggacaagttaatgaagtagctggaaaatgcacaaagagaggatgcaaa

SEQ ID NO: 244638 - DNA, 122 bp, Homo sapiens
cctttcctttgaatgatagctgtgattcaccccaccccattttcttgtttctggtccatccgatgagacggatgctctgatgctctgaggcttctgggaggctgggccctggaggcaacgtg

SEQ ID NO: 244639 - DNA, 122 bp, Homo sapiens
cccggcctgggaaggaaggagaggacttggggcagatctaggaaggacttcccagttgggcgaaggaagggaccctccagttgcctgagttacatccattcttggggccgggttggggagca

SEQ ID NO: 244640 - DNA, 122 bp, Homo sapiens
ggcgactcccccctttgtgtctggtctgctcggagccactggaagtgcctcccggagggacgcagggtgtctcgccgcctccctgcccacccccttccccggctaccttcatccgccctccc

SEQ ID NO: 244641 - DNA, 122 bp, Homo sapiens
caagtttcaaaccctcaaggagttacaatcttatggaaataaaatctataaataagcgttcgtaatataagatataaaatcctaattttcctaagaaagtcacccacagattacttttgtag

SEQ ID NO: 244642 - DNA, 122 bp, Homo sapiens
catgccctgaactaactgcgggcgccctgagacttctggattgggatgtaatccggtctccgggttttgaccgcactcgagcggggaggtgggtacgacccgcgggaccctgccccgagaga

SEQ ID NO: 244643 - DNA, 122 bp, Homo sapiens
ccgcgaagagcgagacctcggagacagacacacaacccagaggtgcactaggttgccagacggtctgatcacaggattcttggggggatagacgctggcttttctccatcacacgtttcccc

SEQ ID NO: 244644 - DNA, 122 bp, Homo sapiens
tggtgaggaggagcggaagtcggaagctccagccgtcacagccacattcactgggcaagccgactgtgagccaggaagtgctcttggggagcccaggccaagccatccattcttgggtcctt

SEQ ID NO: 244645 - DNA, 122 bp, Homo sapiens
tggggctttcctccaccctctaccacagggcagcagcttttctccgggaaatcgggaaggcgggaggcgggaggcggttgacaagccaagcagacaactggcttcaatttggtgggagggaa

SEQ ID NO: 244646 - DNA, 122 bp, Homo sapiens
gagttatccctaaatatggtgtccctggaacaggtggctctccctgctggacctcttccacgtgggtgctttctgcagtgactttgttgccttgctattccactttacccagtgtcctcacc

SEQ ID NO: 244647 - DNA, 122 bp, Homo sapiens
actccccgttagaccccctagaaataatgtagccctaccaataccttgatttttaggcttcggacctccagaattgtaacaaatgtgtgttttaagtcaccaagtttgtggtaacttgctat

SEQ ID NO: 244648 - DNA, 122 bp, Homo sapiens
ttttttttctccagccctggcaccctggtgcctgtgatctttctgaagattcagggcacgcgctcttcattacggcttgggcaccagggacttgttttttttgcaagattaatgagcgccac

SEQ ID NO: 244649 - DNA, 122 bp, Homo sapiens
gcgcggactcgggatgccccctgctgggctgccctgggtttgcggctgcggcttgggcggcgcggtggggctgcgtgtacttgtgcgcgtacacgtggctgagtgtgggggtgttaggcctc

SEQ ID NO: 244650 - DNA, 122 bp, Homo sapiens
ttgcccccgccccctactcccttccctcaggccccaggaagttgcaagagtaccatttgtcgcacactcggggaccgcgggtggccggaggagatgaaaccgtcttggctgcagtgtcgtaa

SEQ ID NO: 244651 - DNA, 122 bp, Homo sapiens
tcacacacacacaccctccacacacacgcttcatgaatacactgtccctccactaacgcacgactcgctcctcacagcacaacttggatcagtctcagacccctaaaggtctctcgcatggg

SEQ ID NO: 244652 - DNA, 122 bp, Homo sapiens
atgggaggcaccctttgcttgtgatgtgcaacctaacttgaaagcacttgctttaagtatcgtttttcagcaataaaccacagattgatgagcactgttactttggatcatgtgacttttct

SEQ ID NO: 244653 - DNA, 122 bp, Homo sapiens
ttcctttacacgatttttccaaggggcggactggctcactgttgatttggtggggaaaagcgtgggtagtatagtctgcccagcacatcttagaaaagttcctgctccttgacagttgaacc

SEQ ID NO: 244654 - DNA, 122 bp, Homo sapiens
tactcgaagctgaaataatagtttattcccaagttaggaaaagaacagaaccacacagtacgcggtttagctccaatacatgctttcaaatatttaggtcgagttttcttctcaatcagccc

SEQ ID NO: 244655 - DNA, 122 bp, Homo sapiens
accgggtctatcacggtctcgggcagggagtctgaatcttttaggggagtgggcccaagccgggtgcaaagaacggggaagggccttccctggctccgtcccggccactttgaccgaatcag

SEQ ID NO: 244656 - DNA, 122 bp, Homo sapiens
gggtttccagagatgacggcgggtggctccggctgcccctgcacagtgccctctactggccgggctgggatttccaaccctccaagtgctgtttaaatgcctaggaaatagttctctttaaa

SEQ ID NO: 244657 - DNA, 122 bp, Homo sapiens
gcctggctgacaggtggtgtcccaaatcgaaaccgttttttcccccgaataaagtgtgcccgtgtagctgtacagatttcgtcccctgaaaattcatctgaaatctcaattctcctgagggg

SEQ ID NO: 244658 - DNA, 122 bp, Homo sapiens
gcgccgcggcagtagccgtgacaggtacccggcggggcggggggggagggggttggcccgcgagggtgtgcgcaggcacagacccgggtcctgtccccgccgccccctcctctgcaaggtgt

SEQ ID NO: 244659 - DNA, 122 bp, Homo sapiens
cccagcccagcaaccttgagtttctcctgcgggttgtgtccacacccctaccccatcccccgatcacccaagccctgagcccttttggagatgcaggaggaacacagcaggacagggtaagc

SEQ ID NO: 244660 - DNA, 122 bp, Homo sapiens
atctgcgcatgcgccaagactccccggctttggaaataacctcactggtttcgcggcaaccgtccaaagtacaggttctcattggctaaagtcctaagtatgggtggagcaaactcaaatgc

SEQ ID NO: 244661 - DNA, 122 bp, Homo sapiens
tctttgatgggtgtgggggggtctgaactgcctaccgggctcggaagcgcagaccctacccgcgcggaagaatgcgcggaatgcggcggcgggaggcggaggcgcagcgcggcggggggcgc

SEQ ID NO: 244662 - DNA, 122 bp, Homo sapiens
aatttctcactgaaaacctagaagaaactacaacaaaggtgactgttatggggccgggcacggtggctcatgcctgtaatgccagcactttgggaggcccatgtgggcagatcacctgaggt

SEQ ID NO: 244663 - DNA, 122 bp, Homo sapiens
ggtgtctggcttggggcagacaccgaaatagatgctgagaattaacatccaaagatgtaccgtgcaggctgggaaattagccattactggggaaaggctgtggccggcggccccaactgcta

SEQ ID NO: 244664 - DNA, 122 bp, Homo sapiens
ggagaaaactcatccagcacctacggtgtgccagaactgtgctaggcttgtcttgtccatcgtttcactccattctcacagaacgtagatattgttctatccccattttccagatatgaaaa

SEQ ID NO: 244665 - DNA, 122 bp, Homo sapiens
gtccctcctacgcagccagaaaccctattcgttgcggcagcgcagcagccaccggacaagcgctagcaacgtcacaaccgcccgccaaaatcgcacttcccacccagaaaactgcccaaggg

SEQ ID NO: 244666 - DNA, 122 bp, Homo sapiens
gggcttgttttcccttcacgccctcgggctccgtttttatgaagcacttccttctgttggcgctttgggaatattcattcttggctcgcaccgcgcacggttgacagttgggctgggaaatg

SEQ ID NO: 244667 - DNA, 122 bp, Homo sapiens
tttcctcccctggcaaggcccaggagcttttggatgtacatggaagcagggtccaaccaacgggtccccgcggggcagaccggatggctttccgcgggaagggtgacaacggggaagtcaca

SEQ ID NO: 244668 - DNA, 122 bp, Homo sapiens
cccacgggggctttaggggaaggtgctttgggcgttttttgcgccatgtctcctcggggccggcggttgcctcgggacggttctcgcctcctcccacagccccggtgtctgggacgcacccg

SEQ ID NO: 244669 - DNA, 122 bp, Homo sapiens
ggggcggcgtccacatggttacccttctgctgcgcgggtcaagtagcttcttctggagggcgcaaggcgcggcgggggtgatgagcccttgggttctcgctccgactgctaaattcgcttgg

SEQ ID NO: 244670 - DNA, 122 bp, Homo sapiens
gtgccccaggcggcgaggagagcggtgccttgcagggatgctgcgggcgggagcaccaaccggggacttaccccgggcgggagaagtccacaccggggtaatgggtctgggcttgagggttg

SEQ ID NO: 244671 - DNA, 122 bp, Homo sapiens
gggcaggacatgtgagatagtcacagttttccagagatcacgacaagatctaaccagtcgcgcgtggtccccggcgccggagcgggccagctcagcccggcccagcccggccccgcgcagag

SEQ ID NO: 244672 - DNA, 122 bp, Homo sapiens
ctgtgcgcgatgtgacttcatgagtggatgctgagaaaagcggcagagtacgactttaaccgcctagccacaacacgtcctgctagggcgaggagggagacagtgatacagcactgggcaag

SEQ ID NO: 244673 - DNA, 122 bp, Homo sapiens
cgatgttctcggtgaaaccatgccaggcacaggagcatgctcttcacccgattctgtacacggggccgcccgaaaacggtgatttcgactaggttccctgagtcaactatgtccactgtcag

SEQ ID NO: 244674 - DNA, 122 bp, Homo sapiens
gccttatagggggagggggctggtccgaagaagttcgaggaatgttggtgggggggtacgcgtctggttccaatcaactgggaaagccgcgagtcgagtccccaggtgggggatgggaggag

SEQ ID NO: 244675 - DNA, 122 bp, Homo sapiens
ccccaaatctgcccgctgtagcccacgggagtttgcagaactcagcgggcaccctccccccgatctccagacactgaaggaacagaatgtaaaagccacagttcttattcttaatttgtttc

SEQ ID NO: 244676 - DNA, 122 bp, Homo sapiens
gaataagccgcggagaagagcctctgggtcagctcaggactgagaaggtaggagggtgcccgccatttagcagccacgccaaacagcccccggagaaccgggtctatcccaccttccttgat

SEQ ID NO: 244677 - DNA, 122 bp, Homo sapiens
gtagcttgtattttcctttctctttctcgtctgttgttagccgctttgctgacactggctcgcgcccggagtcacggcgatacacaggctttcattgtgctccgataggagagggagagaaa

SEQ ID NO: 244678 - DNA, 122 bp, Homo sapiens
tcctccgaaacaccagccctctggcggaggggcggtggggggaccgagctcgggtcgagtcggggactccggcggcgcgcgcaggcgacggggggaggtaggggcggggacgcgagggggtt

SEQ ID NO: 244679 - DNA, 122 bp, Homo sapiens
tgttgtgaagccgcttccgtgatttgcttaaaaggctccttagaaacagtgaggaaaattcgattctacttgagtacctccgagatccctggagtctcacttatctaagcacgtcgcctctc

SEQ ID NO: 244680 - DNA, 122 bp, Homo sapiens
ctattgtccccagccaaaaggaaaagttttactgtagtaacccttccggactagggacctcgggcctcagcctcaggctacctaggtgctttagaaaggaggccacccaggcccatgactac

SEQ ID NO: 244681 - DNA, 122 bp, Homo sapiens
aaagcacggttcttcctagcgccttctttagggacagccacaaaagtgacctgtttgaggcggtcaggagcaggagagtgagcaggcgggaaggaggctggccagaccttgggctgcctctg

SEQ ID NO: 244682 - DNA, 122 bp, Homo sapiens
attagagggatgacattgggtaacaaagtcttcccagcctttggcattatagtaatttctcgcaatagaaattccatacagatattattgccagtgaagagagctattcttgtttattatca

SEQ ID NO: 244683 - DNA, 122 bp, Homo sapiens
ctcagaattacggccatttccacaagggccgtgcagtccgagggacacagcagtaaggaccgggaaactgcctgcacgtgcacctgtgggtcacaaaacggcctctcctgcctctcgcccaa

SEQ ID NO: 244684 - DNA, 122 bp, Homo sapiens
aagcagcaaacttggccctgtcaaatttagttttcatgtgcttgactctctcactggtagcgccaagggtgaagaggatgttatttcacatataacttaacactttacttgctctgtttccc

SEQ ID NO: 244685 - DNA, 122 bp, Homo sapiens
ccaggacccctgtgtctttccaagttgggggcactggccagggaaggatcctggttcttccggtgtctgggatgatgaggctggtcctcaggcagtgggaggctggaggagggggaatgtgt

SEQ ID NO: 244686 - DNA, 122 bp, Homo sapiens
tgtcccatttagaaacctaatagtctcaaagcagccgcacaatgagtcagcaacagagagcgcaccaagatgatcccttttaaaaggactggaaattccttacattttaatgttactgttta

SEQ ID NO: 244687 - DNA, 122 bp, Homo sapiens
ctcttcccttcctgcccaggtctcccctccatgtcctctcacccactgaacgaacgtggacgtgtggttactgtgtcccttccaggggtggtctaataacaccatttcaaaatgtcatttcc

SEQ ID NO: 244688 - DNA, 122 bp, Homo sapiens
agtgacggtactggctcctcccttgcatgggtggtcccaaatgctaggcaagggtggggccgccacccggattctcccctctggccagtcaagcactgagtaagcccagggctccccacctg

SEQ ID NO: 244689 - DNA, 122 bp, Homo sapiens
cccacggcctccatcaggaaccaggtgcttctccaaatcccggacttcaaggagcagcaacggcgtcaagctggctgacaccaggaacacccagaagtccccactcctgtccttccgcactc

SEQ ID NO: 244690 - DNA, 122 bp, Homo sapiens
gtataccctggtgagacagaagggctccttctggaatattctttagcctggctttgcttccgccttgcaaaaagttggggttaagtcagagatgggcgggtgctgggaaaactggccagttg

SEQ ID NO: 244691 - DNA, 122 bp, Homo sapiens
gggctgtgggcaaaagggcgggcggcacgggccaggcagaggcagcagcctgggaggaggcgggaagccagcgggcggcgtcctggaggacggggcaggagtgggagggagcagcagtggct

SEQ ID NO: 244692 - DNA, 122 bp, Homo sapiens
caggtggtaaagtaagaagcatttttgtacaatgtctttttctctgagtctgttttcattcgtaagggatacttacttgttaggtggtacaaggcatcctaaacctgcgaaaccaaacagtt

SEQ ID NO: 244693 - DNA, 122 bp, Homo sapiens
tgagacctaggaaactgggagacggactgcttttcacatgacggtgtccggtctccccgacggcagtgtgggtcactccctctctgtctgcaggctcctggtttaagggcaccttccctggg

SEQ ID NO: 244694 - DNA, 122 bp, Homo sapiens
ggaagctactctcccggctgcaaagcccaggccccagtttcctgaggatcaggtgcagaacgggaggtggctgactcctaggacggtcctcagtgatccccggttcttggtattcacaccct

SEQ ID NO: 244695 - DNA, 122 bp, Homo sapiens
ctttaatatgctctgagaaaatgatggcttctcattttccaaactatagtggctgttaaacgtcttgaacctctgcatggcagcccactaaatcctcatatttagcctgaagtttctctaca

SEQ ID NO: 244696 - DNA, 122 bp, Homo sapiens
tggcatgcagatcactctaggtaaagcaggactgacttttataactgtcaccaaaggagacgccacatctctggtgtcctggcgcctgcatctcaaacacacagcatcttagttaattctca

SEQ ID NO: 244697 - DNA, 122 bp, Homo sapiens
gcatgttcaatttcaatttacgaacttcagatatggtacgcatgctcactgtccaccgaacgctccagctgacaatgcgcatgctctagtcctccaagcgcgacttcggctggtgttttgcg

SEQ ID NO: 244698 - DNA, 122 bp, Homo sapiens
ctcacctccctgcctcccgcacccgccttgctaccggcttcaccaaaatccctcgtcacccgctctgctcacctggtaggggtagtctccccgtttttgcgttttcctgggaaactcccttc

SEQ ID NO: 244699 - DNA, 122 bp, Homo sapiens
ccggcgccatggccgagcgaggccgcctcggcctccccggcgcgcccggcgcgctcaacacgcccgtgcccatgaacctgttcgccacctgggaggtggacggctccagccccagctgcgtg

SEQ ID NO: 244700 - DNA, 122 bp, Homo sapiens
agacctaatccaatctcatgcttccaagcatatctctgtagacaaaacacattggcattacgacatattacttagttttcatgagggtcacatttcatttatttcccatattttttttcaga

SEQ ID NO: 244701 - DNA, 122 bp, Homo sapiens
ttgctgccttctctggtcggaagaacctccgccgtagcccagactctttgggcttgttgacgcggttgcccagcaaccgggagtcctgcccctccctcgaccaggtggggcgggtcgtggcg

SEQ ID NO: 244702 - DNA, 122 bp, Homo sapiens
catcattcatttttctttttcttttgggtaacagctctcagatttctttttgggtattcacgtctttgtcatgcggtccatgtaactctgtggaagctggagctatctacacttctatcctc

SEQ ID NO: 244703 - DNA, 122 bp, Homo sapiens
cgctccgaagaaggcatggtcactctagtccccgcgtctccacggtggggtcagaagcggcgtaatagcccgcttggcggcaatcgagtggaaaagtcacaaaacccttttcaactaaagca

SEQ ID NO: 244704 - DNA, 122 bp, Homo sapiens
caaggctgcagtgagctatgatcgcgccactacactgcagcctcagcgtgggctacagagcgagaccctgtctgaaaaaagagaaaatgctgaattcagttagggatgcttggaggagaccg

SEQ ID NO: 244705 - DNA, 122 bp, Homo sapiens
aagggctaggattcaaaccaagggcctgtgtgactccagcacccatgctttttcctgtcacgctgctctggccgtgtacccatcctaaagccttatctacgctctgtttcttccacatctcc

SEQ ID NO: 244706 - DNA, 122 bp, Homo sapiens
tatgatgagttttgaacacctatggtcaagtagagccagacctttgatggcagtagctcccgcctcacacagcctggcacccggaggcagccacgcacctgcacacctgtccacgtgcgacc

SEQ ID NO: 244707 - DNA, 122 bp, Homo sapiens
tcccgggataggtggcgcctggggctggggcgcatccacggccacccccaccccggacatcggccactgttggcattttctccaagaaggcccgtgaggggcttgaaaacagtttgtgtccc

SEQ ID NO: 244708 - DNA, 122 bp, Homo sapiens
tttcgcccttgataggcagtgtatggggtgcgcagctgcaatctgcaaacccttgcagggcgcggggtttcgtacacccgctcaaggacgcaaagaacctccattctctgccatacaaagca

SEQ ID NO: 244709 - DNA, 122 bp, Homo sapiens
gtgagggggccgggcagaggcactcctcacttcgcagacaggatggaggcgaggcagaggcgcttctcatttcccagacggtgagggggccgggcagaggcacttctcacttcgtagacatg

SEQ ID NO: 244710 - DNA, 122 bp, Homo sapiens
ccagctcccttggaggctacgaagaaaagggcggtccttccacccgatccggctgttctgcgacctcgtggcctctgagtgggagctcggactcaggagtgctgttgccagcgcctgcccag

SEQ ID NO: 244711 - DNA, 122 bp, Homo sapiens
cagacagaatgcactgggagctgagcttcctgggatggagatgctcccagccaccgtgctcggtgacagtggctcatctctgaatgcagtgcctcggatttgcagtataccaagcaccccac

SEQ ID NO: 244712 - DNA, 122 bp, Homo sapiens
tggaagaaggcggagatgcgagtgatctgcaggctcaggcacctggaggcgcagcgagcgcgctggacgctcccggcagacagcgactcgtccagccgccgcgcagcagccgcgccggggcc

SEQ ID NO: 244713 - DNA, 122 bp, Homo sapiens
aactcctcaggctgatgtggcaaaggagaaatagcaatcttgagttctgaaaagctaggccgcattttggtcctgaaaaatcacttgctgtgaacttgggccagtttttgattttttaaatg

SEQ ID NO: 244714 - DNA, 122 bp, Homo sapiens
ggtgtgttgagtggtaacgccagtgtgcgaattcattaatggaaatcacgggaccccgagcggttggagatctgccacacccctctgcctgcgttaagacagcctgacccgacctctggtaa

SEQ ID NO: 244715 - DNA, 122 bp, Homo sapiens
acacagtgaacactgaagggcaaaattcagtgtcctccaacacatcaagtattcattcagcgtattctatctattggcagaaaacagacccattgatttggaatgtatttttaataatagaa

SEQ ID NO: 244716 - DNA, 122 bp, Homo sapiens
gggggtggaacatgcgtattactaagcggtcgccgggctgatgacataaaaaccgggtgccggcaggcgccagtcgcaggtgtgctgctgaggcgtgagaatggcgtcccgcggccggcgtc

SEQ ID NO: 244717 - DNA, 122 bp, Homo sapiens
aatactttcacttttcttttccccatttgggcagaaatctgtgagggtgagtcagtctgtcggccgacttcctgctccgggtcagggcagccacactgcacgcaggctgggccgactgggga

SEQ ID NO: 244718 - DNA, 122 bp, Homo sapiens
agtgtggactttggactcaaccagacccatattctcatctgaggacaagctctgacaggtcggctgggggtcagcaaacctgaccttgggcaccctgtggtttgggccaaaatggagcgtga

SEQ ID NO: 244719 - DNA, 122 bp, Homo sapiens
gactgttctctttggcaaggctccagagacaaggccaagtgcctaatttctctttctcttcgcccccctcctctccacctttttcaccctcagggcagaggggaggcgggacgagcgatcca

SEQ ID NO: 244720 - DNA, 122 bp, Homo sapiens
ggccctggttctggggtcagcaccattccgtggttcctgaagagatggtagactatggaacgtaggcgttatgatttctgacctatgtaacatggtccactaactctcagtatccaatccat

SEQ ID NO: 244721 - DNA, 122 bp, Homo sapiens
gactctcctccctctaggaatgttctgatgagtttcagtctgaaggcagggagatggtctcggtgacctcctgggcccctgttctgcactgaactgtatgcccatacattcataggttgaga

SEQ ID NO: 244722 - DNA, 122 bp, Homo sapiens
gtggcacttggtgcaggcgtagagcgccgccatgtccggcccgggccgcgctcaccgacccgccagcccggcccgctgatttatctcgttgcaaggattttaaagataatgcacagagggcc

SEQ ID NO: 244723 - DNA, 122 bp, Homo sapiens
actgagcacactccatatgccaggcatgctccgtcacttaggatgcagttgtgaacaagacgatgaaaaccctgcctttgtgaaacacaggtgggagctgcagcctggggacccacaaggtt

SEQ ID NO: 244724 - DNA, 122 bp, Homo sapiens
ctccctgaccccttgcacttcccaggtgaggcaatgcctcgccctgcttcggctcccgcacggtgcgcgcacccactggcctgcgcccactgtctggcgctccctagtgagatgaacccagt

SEQ ID NO: 244725 - DNA, 122 bp, Homo sapiens
ggggctcggctcgcctgaaatggcttgtcatggtaggcgcgcaggcgcccagagaaagagcgagcgagtcagagctgtccgtctgagccaggacacagctcagctcactcactcccagagag

SEQ ID NO: 244726 - DNA, 122 bp, Homo sapiens
atacctactatcctgttcaaaaacctaagactggcctaagactacatttccattcaagaccgaacaccatcgtcaaatccgtggggaatatgtgtctctagacgcactaccctccgtcctac

SEQ ID NO: 244727 - DNA, 122 bp, Homo sapiens
gcatcagcaaacgctcagaggtgaggtctggtcatgctccaaaggccacactcgccatcacgacacggtgtggcctcagccagtgcggggaactgtggcctgcatcagcaaacgctcagagg

SEQ ID NO: 244728 - DNA, 122 bp, Homo sapiens
agttccgaagtcgcccgcagagagaagcgataccgacccagggttctgtgctgggcagggcgccggcctccccgtgcccttccgtccccggctgcctgctgctaagccgcgcacttgcgcgc

SEQ ID NO: 244729 - DNA, 122 bp, Homo sapiens
ctggtccaaccccctgcagagcgcgaaacagcggccctgggcaggatccccgcagcaaaccgcagcccctggacacacagcaagcttaatagtcactggatgaatgaaaagcgctgcctcct

SEQ ID NO: 244730 - DNA, 122 bp, Homo sapiens
ccgctaccgccgcggcgccagccctctcagcgcgcctgcgcaccagcccagccgccccggcgccctctgatggccggagtctgcgttgcactgacattgtccgcacagttgttgattgattt

SEQ ID NO: 244731 - DNA, 122 bp, Homo sapiens
cgagagtggaggtgagagtggagcgcgagctggcggcgactggggaacaggtgcaagcgccgcgtcggggctgcccggcacggggaggggccatcgtgggggaagacgagaggggaaattcc

SEQ ID NO: 244732 - DNA, 122 bp, Homo sapiens
gacgcaccttctccaggtagctggccaggcggtcgttcaggaactgcatagtctccttctcgctgccattgaaggagccctcacagaaccagttgcagttgctcacattggcggggatgttg

SEQ ID NO: 244733 - DNA, 122 bp, Homo sapiens
agtctcccctctggagctcccttggcctccaggcccagagaacgtaaatccagccttgtgcggagggcacttgcttctctgggagcaattttgatttccacgtatgctgagagcactgccct

SEQ ID NO: 244734 - DNA, 122 bp, Homo sapiens
agggcaaaaaatatattcattttcattttcctctcgctggggcacggtgagtttcctaaccgggccgcctatgaaaggatgagttgaggtttctttgtttggaaaaagagtttagggctttg

SEQ ID NO: 244735 - DNA, 122 bp, Homo sapiens
cccagctggagtcaggccccagcagcctcccggtccccaaacaccctgcactcggagggtcggggcagccccggagcttctcctaacccactgggggtaggatatgtaaacaagtcattagg

SEQ ID NO: 244736 - DNA, 122 bp, Homo sapiens
cccagggttgggggaccgtggctggctgaaggcatcatggcaggctggtaggtgtcaccccgcggcaggagcctccgggtactgggactctcgggcccggggcgcatggcgctggccaccac

SEQ ID NO: 244737 - DNA, 122 bp, Homo sapiens
ggatacagaaatgcataagacagtctaacaaatggaacacggtggaatctgtttttctgccgccatatggtgtcgacagaatgccactttgtttctctgggaaacagctcaccattaaaaaa

SEQ ID NO: 244738 - DNA, 122 bp, Homo sapiens
taccgccccgggactcctctcgagttgagggcgaggcgccccgggattactgtcctagggcggtgcatccttcaagctgggagccaggtccagtccaggcccgtgtcagcgaggtcgccgcc

SEQ ID NO: 244739 - DNA, 122 bp, Homo sapiens
cagagcaagactgtctccaaaacaaaacatactattgttatcactgcagtgtaaccatgacgtcctattattattttatttttcaaaatcaagaaatgcaagtggcgccattcttcttgagt

SEQ ID NO: 244740 - DNA, 122 bp, Homo sapiens
taaaaagccgagctcctcctcactctactttccaacaagagtgcgcccctggaggagccgcgcctcctgcctggggctcatggttccaccacgcattgcaatgggcactaaggggagtggaa

SEQ ID NO: 244741 - DNA, 122 bp, Homo sapiens
acaaaaccaaaaggcagaagcagcccgagggtccaccgacgggcgaattgatgaacccagcggggcccatccacgcagtggaaaatgactctgccttaaacaaggaaggagacccagacata

SEQ ID NO: 244742 - DNA, 122 bp, Homo sapiens
tcggatctaccttccagtagcagcggagtggccaatgggaccgggaccagggctgggggccggggggccgccgccgcggggaggttcccggctcaggtgcccagcgctcaccagcccagcgc

SEQ ID NO: 244743 - DNA, 122 bp, Homo sapiens
agccagtccctggctgcacgcctgccgggcgtctcccagcaacagccgccgccgcccgaacgttctgaactcggcggccccttagtcctcatcgtcaccttggcgacggccggtgggaacac

SEQ ID NO: 244744 - DNA, 122 bp, Homo sapiens
tcaactacgttctaattataaagaaaaatcccttcagggatggtatctgactcagtgaagcgtgcctgtgattttggtggacgagaactagaactgaacggtgcttcaaaacgtatttttct

SEQ ID NO: 244745 - DNA, 122 bp, Homo sapiens
ttcaccattcctcgccctcctccataacacacgcggagcgcccacgaggagcaccctctacgctagtcacactccgccgagcagtaggaagactctgtccccatagagcatagcacgacgaa

SEQ ID NO: 244746 - DNA, 122 bp, Homo sapiens
cggtccgcctgccattctgcggccacaaaaacatctgctcgctagccacgtgagtagagccggcgcctccgtcccccaccccgtgtgcctcaggccgaggggcccagtcctggcggcttgtg

SEQ ID NO: 244747 - DNA, 122 bp, Homo sapiens
actctataatagaagtgttgttgttgttttttaatggagtcatgctctgctgcccaggcccgagtgcagtggctatttgcaggtgcagttatagtgcactgcagcctcaaactcatggcctt

SEQ ID NO: 244748 - DNA, 122 bp, Homo sapiens
cagcgacctctgaggacccagccagtcagctgagcttggcctccaactcaaccaaatgaacgtcttttagttggcattccttcattacgtatagaaatctgctttaggtatatagcttcagc

SEQ ID NO: 244749 - DNA, 122 bp, Homo sapiens
aaagtcagatctgatttgcttacggccttcaccaaacaatcccagtggctcaatgtctttcgcagatcgcagacctcggccttgcctcctttaagatgtggagcaaactgaataatgaagag

SEQ ID NO: 244750 - DNA, 122 bp, Homo sapiens
tgcggtggggcccagtcatttgtattcctaaattctcaggtgacgctcatgctgctgaaccgggtaccacactaggagaatcactgctatgccattcattccccaccacccgctaactgtag

SEQ ID NO: 244751 - DNA, 122 bp, Homo sapiens
tgacttgcagcactgttgaagactagccaccctttgtgacctagccctcttgggaaatggcggaggatctcagggtatatcccttacctgtgggagccctatcagagggcttcctgttgagg

SEQ ID NO: 244752 - DNA, 122 bp, Homo sapiens
agagcatgcttaaaagcaatttttttaaaaaaatgatttattgaaaaggtagaaaaaaaacgggccttagaaagggatttgctctgctttttgcttaggggtgaagaggtgaaactgtcact

SEQ ID NO: 244753 - DNA, 122 bp, Homo sapiens
aaattaagccttttattttaacgcaatcgcaggtgacggccgtcgtgagggaacacgggacgcccacgtgccctccaccacctcctcccacggcaaccctcgcagagtagccaggaccacat

SEQ ID NO: 244754 - DNA, 122 bp, Homo sapiens
cggccgtgttatgtatgcctttagttgatgctggccaaaattagacaacttagtggcagacgtcgagctagaatttttgtttgagatcctttttccctggtcgtctttccaaactgcgtgag

SEQ ID NO: 244755 - DNA, 122 bp, Homo sapiens
ggatcctcagatggaccccaattttctcatcaaagagaaaatagcaaatacgtagaaagacgaccaaagaatgctgagctctcacttcacgactccaaataagaatgtgaaggatttaggga

SEQ ID NO: 244756 - DNA, 122 bp, Homo sapiens
tacagctggtggtcccttcggcctgatttccctgctgagtgccacagcgtccgagatccacgactggccaggtggagccaccgactctgaagagaaccagaggcggaccagccaggggagag

SEQ ID NO: 244757 - DNA, 122 bp, Homo sapiens
gattttcaaggaaataataggatcaagtcctttgaggtcctggtttgagaggccctttctcgagttatcacagtccagtgaattgcctatgagaattatctctcaagagggcctcatccatt

SEQ ID NO: 244758 - DNA, 122 bp, Homo sapiens
atcacataaacaaaaccaatgacaaaaaccacatgattatatcaatgcagaaaaggccttcgacaaaattcagcagcccttcatgctaaaagctcgcaataaactaggtattgatggaacgt

SEQ ID NO: 244759 - DNA, 122 bp, Homo sapiens
aatggagaggaagaccgccctttgggaggaggtgaaggccaccagcctgcaggaaatcgacggggacaggctcgccgacttgcccctaattttcgatgggccatacccaataggcagatcaa

SEQ ID NO: 244760 - DNA, 122 bp, Homo sapiens
ttaatttcagagactttatatgtcctcacaatagctggagaggaggaaatattaagctgacggcttagcaggcaaatatttattttaaaaaatgtcaccccctggcacgcaaactgagcatc

SEQ ID NO: 244761 - DNA, 122 bp, Homo sapiens
agcggtatcctgcgggcgaccatgggccgaacggccgggactccaagcttacctcggacacgaacgccgcgccagtctccaagccaagtacgccatcgccatcccttgggcggctctagggc

SEQ ID NO: 244762 - DNA, 122 bp, Homo sapiens
atgagaagacatagaaagggataggtccaactcttgggattgttgcaggttggtttccatcggaagcactctgagtctgagatttgtatgcagaaaattaatttgaatgtgcttttcagatc

SEQ ID NO: 244763 - DNA, 122 bp, Homo sapiens
tagggccctggtgttcgggatgggacgggccaccccgggctgagatggaagctcaggggacgggggtctgcacagggctggacagatgggagggtctgcagggataaagtgggagggggggc

SEQ ID NO: 244764 - DNA, 122 bp, Homo sapiens
gctgggacagccggacctcccagggaaggctgcttgctggtcaagaccctcccagacacacgagcagcagagggaagctgggtggaaggttgcgggtcaagggtcagcctctactcttccag

SEQ ID NO: 244765 - DNA, 122 bp, Homo sapiens
ccgagacggcgaccgctcggaggtctccgctcacaggcactgcctggggctgcccctgcgcgtccctgtactgtaccaggaaggagtcaaaggggccctgggccaccgtccatgagaggccc

SEQ ID NO: 244766 - DNA, 122 bp, Homo sapiens
atgttctgtgaagtggacaagagcctgctctgtttgccgtgctccaactctcaggagcaccggaatcacatacactgtcccattgagtgggctgctgaggaacgccgggtaagtgatgcctc

SEQ ID NO: 244767 - DNA, 122 bp, Homo sapiens
tctgtggtctgatgaagcctgcagtgctaggcacagctgtctcccagcccacctcctcagcgctcactgccagagagcggggcggccagccagcgcctgttactccaggaagccactgccca

SEQ ID NO: 244768 - DNA, 122 bp, Homo sapiens
acagagatgaccacacacacacagctggcagtcaaccagacagacagatattccctcattcgaggggcacagtccacttttgttgctcctggagcttgcagtctgggcgttctggggtttct

SEQ ID NO: 244769 - DNA, 122 bp, Homo sapiens
cttgtgggtggggtctcttgcaagtaggacttgtctccttccccagggtcagttccaccccggcctcgagggtacggaagacagaggaggtggccctgagaccccactctgcagataggttg

SEQ ID NO: 244770 - DNA, 122 bp, Homo sapiens
aatcacatcttcgattctctctccctctttctttaccttgcctttgctctctccatgtgacgtgcctgctcccccttcaccttccaccatgattgtaagattcctgaggactccctagaagc

SEQ ID NO: 244771 - DNA, 122 bp, Homo sapiens
tccactccggcccttcccttgacctttgcttctcagagccctccctggttgcgtggtaggcgcccgcatctgtgctgggcggctctgagtcccgggcggggccctgggtctgccccttcccc

SEQ ID NO: 244772 - DNA, 122 bp, Homo sapiens
ccccctcactcccagtctgacaagcaggtgtgtctgtctctttaggaacgactcaatcgccggagcaggaagctcagaaaggacattgcagaacttcagcggctcaaggctcagcaggagaa

SEQ ID NO: 244773 - DNA, 122 bp, Homo sapiens
gacacaggcagaggctgatcctgggcaagccgcgggccaccatgggctgcctctggggctcgtcgctgggcgtcattaaacctgtggctcgagggttctccgtggcgcagggggccagtgac

SEQ ID NO: 244774 - DNA, 122 bp, Homo sapiens
cccttgcccagcgcctgctcgcacattttggtgctggcggctggctggtaggtgatagtccgcaaaagctccatggtcgccttgccgccccgcactgcccgctgccaccccctaggcgcggt

SEQ ID NO: 244775 - DNA, 122 bp, Homo sapiens
ctctgccacttttcggagtcccccgccctcgtcactgcctccccggagctgcggggcagtcggacgcagagctgcctaaccgcaagaacgcctggccggagctgccctctgcagccgagccg

SEQ ID NO: 244776 - DNA, 122 bp, Homo sapiens
cctctgtgtggcttccgtctgggagcaggccgagggtgaatctcctggatcaatgtgcagcgtcatttggtagattgcgtgtccagccttgccgcgctgtagggtgggtgtgatcatccgtg

SEQ ID NO: 244777 - DNA, 122 bp, Homo sapiens
cccgcaggaacggtgagcaggcggctaagatgaccttgtggcctcgaaacttgaggctgtcggccacaatggtcacgtcgcagaaccactcctctgcccggagcttgttcatgttccgtagc

SEQ ID NO: 244778 - DNA, 122 bp, Homo sapiens
cctggccatttttgccaagtagaactttctggtttatttcttctaaatattctcctgcttcggccaggatgtctgagagcccagagtctgtgctgctatcctacaagccccagggacacatg

SEQ ID NO: 244779 - DNA, 122 bp, Homo sapiens
tctgtgaagatgttttgcttctgcaagaaaatggcctgaaatgtgtgtctgtatatcctgcgtgcaaatgtagccactctgggtatatctagcttgggtctgaaatggctgaagaaaggagt

SEQ ID NO: 244780 - DNA, 122 bp, Homo sapiens
ttctgtatttctgagacaattctgtctttgcctccgagaaatggctacttcacaaactcccgtaacggaaatttcacaggtgaaaggcggagctagccatgagcacagccaggatccattta

SEQ ID NO: 244781 - DNA, 122 bp, Homo sapiens
ctaagtaagtagccagcatccttattgtcaccatgaaatagttgcttagtttctttcattcgataagctcaaagcattaagtgattagcccagataacaaaaaaataattgtcccaattaaa

SEQ ID NO: 244782 - DNA, 122 bp, Homo sapiens
ctgaggttgcacaggcagccttgacctcacgtggctcccgcactgagcttctgtaggccacgcgggaggggctgccctccggccttcccatggcgagtcccaggctgaagaaacagccccac

SEQ ID NO: 244783 - DNA, 122 bp, Homo sapiens
cattctaggggtgactgggacctcagagacagaaagctatttggtccccagtcatactttcgatactttctatgagaaagaaaatgaaaattaatactggagcaaggcttcacaaaagaggc

SEQ ID NO: 244784 - DNA, 122 bp, Homo sapiens
ctgatgaggctgcccgcagccacaccagtcccatgaaagttagtggcatcagttccacctcgccttttctccagcacatggagtattgagacatgatgtatctttctgaattgtttggtaca

SEQ ID NO: 244785 - DNA, 122 bp, Homo sapiens
agagggcattatctctgtgagtcgcatctgttaggtggcttcttccactccactcagcagcgctgcctaatgcttacttcccaagtgaaccagaggacccacatggagggcagacagctgat

SEQ ID NO: 244786 - DNA, 122 bp, Homo sapiens
gcactctaccctggggaccagctgctcggttactgctcactcttcagggtggatggcttccggtcccgcccaccaggggtaagcttgggctggggtgtggtaggggggctagggtgaggtag

SEQ ID NO: 244787 - DNA, 122 bp, Homo sapiens
ttcaccaattgttagtagctttcgcttcataggtttcacatctcttccctccgtctcttacggtgctgcccacacactcacacacacacactcacacacacatacggatatatgtttactgt

SEQ ID NO: 244788 - DNA, 122 bp, Homo sapiens
actggcatcggatttgcagaagcgtgcgtgggatcagaggaccgccctccccacaacaaccggcccctgcatcttagcagccgttggaagccccagctcttttaccgccaagttcatccttg

SEQ ID NO: 244789 - DNA, 122 bp, Homo sapiens
ggccgcccctctggctttttaaggcggggcaaaaacttggaacagctaccacaaagcgaacgcctatctgtttggaatttcgcaaataaggaacgtttaaatgacgtagttcacatcctttg

SEQ ID NO: 244790 - DNA, 122 bp, Homo sapiens
tgacccctgtcaaatgctatgaggtcatgctactccctgacttaaactcccattgcctaacgcacacagatggagggggatgcagggtgatggaggctgggttttgtctctgtgctagggca

SEQ ID NO: 244791 - DNA, 122 bp, Homo sapiens
tcggtgcaggggacaaggggtcgtagctggaggggcctaggtgaggctgccgggaagggacgatgtggttggtggagtgcacaggcagggacctcactggactttcctgtctgctcagcatg

SEQ ID NO: 244792 - DNA, 122 bp, Homo sapiens
gactgtcagttggtgagtaggccaaagaactctactgtatcaaaagccacacaccctcctcgctcccgctgcctgaacttcagctccgcaatcgtcgtgcctgtcacaaactgaaggccaat

SEQ ID NO: 244793 - DNA, 122 bp, Homo sapiens
ttcccggccggccgctggagctgcgggaagcggaagtgctcgttgggggtgcacaaggcgcgttcgagcagcggcgaccgacgcggcgaaggagcgcgccatggagcatgtgacagagggct

SEQ ID NO: 244794 - DNA, 122 bp, Homo sapiens
ggaaacggcccctttcctgcctccttcccgcccggcgctgggccttgcgcagggcccggacgcccccaagcggccacctctctgcagctgacgcttccggctacaggctggcgtcactagcg

SEQ ID NO: 244795 - DNA, 122 bp, Homo sapiens
ccaccacagaagatcacagacccggaggggtggcctccctgcccagaagcaccacgggcccgctttcagaacaggcccccagcacaggtggagcctgtttccagccccatcctccatcctgg

SEQ ID NO: 244796 - DNA, 122 bp, Homo sapiens
cgcagaccccgcgtgttcgcagactctgccgccggcgaaactacatttcccagcgggccgcgcgccctccttccggcaggtacccctcaaaacccggaaacgccttgcggggcagtgtggga

SEQ ID NO: 244797 - DNA, 122 bp, Homo sapiens
tggaacttgaaaagcgtgaaaaaagaagcttattaaacaagaatttagaggagaaactgacggtaagacatgagatttagcacacacagatttataatgaaattgacagggtagtagagcaa

SEQ ID NO: 244798 - DNA, 122 bp, Homo sapiens
gaactcagtatgttccaaaaaatattctatctcccatattaccttgcccaattaatagtacgcatagccaccaagctgccttgtacattgcctctactagtgaactcaaaccaactgggctt

SEQ ID NO: 244799 - DNA, 122 bp, Homo sapiens
atgtcaagctaaaggcagttgttgggttactaacaggacccagcgccttgcaaacatatgcgctaagctgtgtatacagatggcaggcagaataatggagcaggcgccttttataaagctct

SEQ ID NO: 244800 - DNA, 122 bp, Homo sapiens
ccaggcccaacggcctctttggagcgcagcccggtcttggtcaccagaggtgcccccagtcgctcgtgtctctgccctttggccgggcaatgaggtgcagctcaggacttgccaggcggcgg

SEQ ID NO: 244801 - DNA, 122 bp, Homo sapiens
gaaaacaagacttttagcggctccggagacgcgccctgaaaatggcccgctcgggctctgcgcttgctgccctcctgcctgctcggcaaagggcattcgaggcttatttgtgtggcacgatc

SEQ ID NO: 244802 - DNA, 122 bp, Homo sapiens
attgtcagttacatggacatcaacactgggaaggaaatgccttcagtcaataagaactttcggacccattgcagactttccatattctaggaaaggtcacagctcattaaactctgagcact

SEQ ID NO: 244803 - DNA, 122 bp, Homo sapiens
tcattcactagcctaggatgccagtcaacttcattcttggaacctttattttccaatttgcgggcattttgcaataggctgattttaatcacattttatactttttttcctttgttgcagaa

SEQ ID NO: 244804 - DNA, 122 bp, Homo sapiens
gcaagatggagtcgattaaattagatctctttcactgtctcagtcatacttttgcaaaggcggtttcaagatttagacctatttctgtgacccgagggaagaggcttaagtcagtagcagga

SEQ ID NO: 244805 - DNA, 122 bp, Homo sapiens
ggcctgccaccgcctccacacctgggcaccgcgaggagagcttcccaggaacggtgacggcgacagccagggagcccacgcgactcctcagtaccagcaggccgcttctgctctgagatcca

SEQ ID NO: 244806 - DNA, 122 bp, Homo sapiens
ctatagaaagtttttgtaccagactgtaagagaacacagatttactcacactttcaacatcgtttgatatttgccaatataagtaagtgtcatcttattcttttaagttagcatttcctcaa

SEQ ID NO: 244807 - DNA, 122 bp, Homo sapiens
acaggctgtgagacagctggagcccagctctgcttgaacctattttaggtctctgatccccgcttcctctttagactcccctagagctcagccagtgctcaacctgaggctgggggtctctg

SEQ ID NO: 244808 - DNA, 122 bp, Homo sapiens
cacttctgaccacaagttcaaggctcccacagcctctctggggtccgtagttcactagaacgactcgcagaactcagaaaagctctgtcctcacaactgcagccctaccaccgaggccacgc

SEQ ID NO: 244809 - DNA, 122 bp, Homo sapiens
ggacagcgccacctaccgggcccgtgggagctgcaggggctcaagcgcaggcgctcaatgcgcaggcgcagggctgtggggccggcgtgaacccgggaacccatccaccaaccaaccagcaa

SEQ ID NO: 244810 - DNA, 122 bp, Homo sapiens
caggatggggcggggtttgtgggggtcttggtggcaagtgagggtcccgcgcaggcgctacgtcccggcctgacttgctccctggaacggtggcagctcctgggaacgcagacccggcccca

SEQ ID NO: 244811 - DNA, 122 bp, Homo sapiens
tccgaaaggggaggaattggactcaagggggtgctgtctaccgtggtttccgctgtccctcgcgccacagaagaggccggagggggaccggcctgacgcgggtgggcaaagagcgggcagag

SEQ ID NO: 244812 - DNA, 122 bp, Homo sapiens
cggcactcaggccgccacactggtgaggagccgggacggcgtgctgccaaaccacacgctcgggacctgggtcgccatgaggcccggccccactctcagcccagctctgctccagctatgcc

SEQ ID NO: 244813 - DNA, 122 bp, Homo sapiens
ctatccttcgctccattgttccccttcaaagcatccaaaagccaggcagcccgcagaaggcgcggacctgcccgcatggggacggaggctcagcggccgacaggcatcgggcccgccgggga

SEQ ID NO: 244814 - DNA, 122 bp, Homo sapiens
cttgttccaaaggaacaagggtgacatcccttccagggcctggccctctgaatggacccccgaggatgcagctgccaggcttgtttaggaaaaaacattatgccacattctaaccggagcag

SEQ ID NO: 244815 - DNA, 122 bp, Homo sapiens
tgtctgccagcatagcccatcactctgtggtccccagggccacagcctactggtagccaccgcaacatagagaatgtggtaggcagaatactaccaaaagtacccccaagataacagactct

SEQ ID NO: 244816 - DNA, 122 bp, Homo sapiens
gcaaaaaagaaaagggaaaccagcgcctgctcatcttctccttgcttcatggagaagtctcgggtgcattcgaagagaaagagacgagaatgcctcttgcgtgctgggaagcgagtcacttg

SEQ ID NO: 244817 - DNA, 122 bp, Homo sapiens
cagccccaatgcctatttccatattaatgtccatgatagcggggaggggaatatctatcccgaattggtgctgaatcaagtgctggatcgggaagagataccagagttcagtttaaccctca

SEQ ID NO: 244818 - DNA, 122 bp, Homo sapiens
gaaagccggggaaaccaggagaggctgggctgccgggactgccgggtgtggatgtgagtgcgcctgcccctccccgccatgccccactccccgctccgggtccctggaggagtccggcccta

SEQ ID NO: 244819 - DNA, 122 bp, Homo sapiens
agtcactgctttgctgaaatgattcttgtactctctgctacacgacaggaaaaatgttaacgctgctttgccattaaagcaagcatttcatttcctgcttgaaatgccaactgagcaagatt

SEQ ID NO: 244820 - DNA, 122 bp, Homo sapiens
tcctgccgcacccggctcggagaaaggccccttcaggaatggctgtctctggcctctggccgcggggccgggccgggggctcggtgctgcacccccgacccacaggcccaccctgaccctgg

SEQ ID NO: 244821 - DNA, 122 bp, Homo sapiens
tgataatttcagacatattcacaaaccctgctctgcatcagacagctgttacgtggttaccgagtgtttgtgtgagagtgtgtggctctgtgtctcctttcaagtttccacttgcatgtaag

SEQ ID NO: 244822 - DNA, 122 bp, Homo sapiens
gtcaggccttgcggaggtgcactcgcaccctcctgcgctacggtctcagaggcaggaggacgctttcagggagccagccgctgtggcacctgcagcagtttcagcagttgggcagctccagc

SEQ ID NO: 244823 - DNA, 122 bp, Homo sapiens
gctcagctgcgcaccggtaagaaggcttaggatctggtagtagatgtagagcagctcctgcgccagctcttgtgccgactgccgcgtacgagccaccgccactagcaccagcgggctccggc

SEQ ID NO: 244824 - DNA, 122 bp, Homo sapiens
gggggttccttcactaccggggcctttgtgctcccaggcgcatggaggagggcagccccacggtgctggagtctccccaacatggcctgcccaggcagcaccccggcatggtcccctggggc

SEQ ID NO: 244825 - DNA, 122 bp, Homo sapiens
tatatatctggtaataacaaacaccttaacctttccacaacttgaattttttacatacagcgataacttttggggttagtttttctgttgatcagtatggatgagttgcattgtaaagagga

SEQ ID NO: 244826 - DNA, 122 bp, Homo sapiens
ggatctgacgcctgacgtaattgcgtagacgccattttagccggtcagacaagcactggacgtggcggccattttgttttggacaccgagcaggagctggcggccgctgcagacgaaaggca

SEQ ID NO: 244827 - DNA, 122 bp, Homo sapiens
gtcctagccctgtactgggtcagtgtcagcatccttccacgcgtgctctctctctgccaccgcacacccaaagaccgcgcctctcgctgctctcacctgcggggcagcggagggcgcagagg

SEQ ID NO: 244828 - DNA, 122 bp, Homo sapiens
cgcttcctttccctgagctaaaacgactgggtcctgggatctggcctctagctcgcctgccgagctctttccaggcaaaggttggagaccgccgaagtgccggcctcgcggtgcgctgtctg

SEQ ID NO: 244829 - DNA, 122 bp, Homo sapiens
ggagtcttcttccatctccaagatcaaaactctcttttcttgggggtggtctcaggagttcgggttcagccagggagcctagtgggtggaggaacatgcaggcccggtcccttgggattctc

SEQ ID NO: 244830 - DNA, 122 bp, Homo sapiens
ctttgtagacattgcatgtggacattcaggagctctagagaaagagggggtgttgtttcacgaagccaccagcagaagaaaggtggaaaataagtttcaaccaactacaaaggcagaagtca

SEQ ID NO: 244831 - DNA, 122 bp, Homo sapiens
tagagctccaggttgatctggccgttgatggcggcctctgagtcctggtggtagttctggcgcacctgcgaggtggacgcagttgtcatggcagcaactaaggagaggtggcggcggtggct

SEQ ID NO: 244832 - DNA, 122 bp, Homo sapiens
tttgcagctcccgcccttgggcagcaaaggctcagcccgacataagcactccccacccagcgcaggccccagaagtgaggaaagaacggaggatcagcgtccctcgaccccttatctcgagg

SEQ ID NO: 244833 - DNA, 122 bp, Homo sapiens
gggcagcagaggctgaggaaaatctggtgagaccaggttgggggccttttcccgggcccacgagttactcccccccgcccacggagcaccttctgtccgggcgcctcccaggccgctgctgc

SEQ ID NO: 244834 - DNA, 122 bp, Homo sapiens
acacatgagcagaaagtcattaagcagctgcgtctaggagggctgtcaccttgcagccaccgagaggctcctcagagcactcaggaccactgggcggggtgagcgggcccagactctccatc

SEQ ID NO: 244835 - DNA, 122 bp, Homo sapiens
gacaccccgttccgctctggggcctctgggtgggtctggcctgttgggggctgaggagctcgagggtcagggcgcccagtgctggaccgcgcaccctcggcctgggctccttgccggtgctt

SEQ ID NO: 244836 - DNA, 122 bp, Homo sapiens
cacaagttgtacaacactgatcttgcttctccggcagggatgaatagttcatttgcctgacgatctcagcaaaaagttcatccaccattgatttactttttgccgatgtctccatgaaagga

SEQ ID NO: 244837 - DNA, 122 bp, Homo sapiens
ttcatacagtgggggaggggtacctatcttacggagttgtcctaagttctaaatgcaaagcgctcccatctggcatctatggcacagatatatgttggactcacaggagtgatgctgagtgg

SEQ ID NO: 244838 - DNA, 122 bp, Homo sapiens
attattatcctaatttagcaagtgaggaagccgaggctcagagaagcataatttatccaccgtcaaaaagtcaggaaaggtagaactagtctccaatcaggtgaaatgaaatgggtcgggag

SEQ ID NO: 244839 - DNA, 122 bp, Homo sapiens
ctcccctgtgctccagtaaccccattctgcccccaatctagcccctctgtcttcagcaaccgagccccagccctcagtaacccaccccttgcatgggtgacctggcctctgcctggtgcctg

SEQ ID NO: 244840 - DNA, 122 bp, Homo sapiens
aggcttccgggctggccctccaaagccggttgtacaggcggcagctcaggctgctcactgcgggccctatgaccctttctggggccctgcttgctctctccagtctgcttttgtatattttg

SEQ ID NO: 244841 - DNA, 122 bp, Homo sapiens
agaaggttcatttgcatacatcttcatttattgtccttccaaagcctttgataccgagcacgctaagatgggtatcctcattttacaaagatcaaggcagagagaagagaagggactcgcct

SEQ ID NO: 244842 - DNA, 122 bp, Homo sapiens
caaacccatcaactctttttaccctctttaccctcaaataagccgcatttcctgaaagcccggatttctggaagtatgaaagctttgccaagatgtggagaacagccctcctgctctgtctt

SEQ ID NO: 244843 - DNA, 122 bp, Homo sapiens
catactgttccgacaatttaccaccagggggatttcaagatagcgacgctctctttcaggcgctggtttgtcactatcttcttggccatcccctcatacctcctcaaatgctgacccccacc

SEQ ID NO: 244844 - DNA, 122 bp, Homo sapiens
cctgggattggtgagtggggagcctgggggccctggcgagcctcctggtggcggagaccccggtgggggtagcggggggttcccgggaggccgagggaagcaagacatcggggacattctgc

SEQ ID NO: 244845 - DNA, 122 bp, Homo sapiens
gtcctccctggtcctcacagcacccctgtgaggttggcctccattttgcagcaagagcaccggcacccaagatcacaggggaaggtgggtatgaggactcaggggtcctgcaacccagcccc

SEQ ID NO: 244846 - DNA, 122 bp, Homo sapiens
ggtcagtgctcaccagtctggcctctggctcagcagcctccgcactgggaggtgggggcccggcactgctcccagggcctcctgcaacagcagccccctcagcacgggggagctcctccagc

SEQ ID NO: 244847 - DNA, 122 bp, Homo sapiens
acggcgacctcttgccttccatagagtccatgctgaagtagttggagttcttgtcgtccccggactcgacaaactggatgatgggtcgccgccactcattgcccgcgaacagggcgctccta

SEQ ID NO: 244848 - DNA, 122 bp, Homo sapiens
gagtaccaggtggtgggtcgctgcctgcccgcccccaaatgccacacaccgcccctctaccgcatgcgaatctttgctcctaatcatgtcgtcgctaagtcccacttctggtacttcgtatc

SEQ ID NO: 244849 - DNA, 122 bp, Homo sapiens
ttggaaatggcagtgattgattggcaggtgctgggtggagagcagaggggaggctgggctcggttctgtcggatctacagagggaggccatgctgtgccagcagagcccccttcaaggaggc

SEQ ID NO: 244850 - DNA, 122 bp, Homo sapiens
aggcgcctgaggcctgtctctctcgctcaccctgcgtccctagtgggtctcatcgatccacgcatttattcccatttgtaacagatggctgccgtcaaggctccgtcacccctatttgctta

SEQ ID NO: 244851 - DNA, 122 bp, Homo sapiens
tggcatttttggataacattttctggttatattggatgtgagttactgtagagggagaatcggaggatggacctgagtttcacaccaagcagcagatctgaggcagcatgagaaaacatgga

SEQ ID NO: 244852 - DNA, 122 bp, Homo sapiens
ctgacccacggcgaccctctgtgaccaatcatactaccaacctcttaaacagagctccaccgacgcaatgcccaggcataaaaaggccaggccggagagaccgccaccagtcacggaccctg

SEQ ID NO: 244853 - DNA, 122 bp, Homo sapiens
atgggttaagtatctgctcttggtaacagcaaaggatctttcactttcaaaagaaaacaacgaaacaggcacacacaaaatttctgcctttctcatcctaaacagctgaatcattcacatat

SEQ ID NO: 244854 - DNA, 122 bp, Homo sapiens
agctgactgacaccggagctgcctgaagttagcttcctctctgggggccaacaggcctcccgtttcctgtctgtctgctctccagctccccacccccttctcatttcctgtctgagtctata

SEQ ID NO: 244855 - DNA, 122 bp, Homo sapiens
tctaaaagggcctcacatgccccgggagccacgtggatacagaacgagggttcccgctctcggagagttggtccccagttcccatgcagggagtggagcctctgagcactgccagaacaaca

SEQ ID NO: 244856 - DNA, 122 bp, Homo sapiens
gggtttatgatttcagtctacaaacagcacatttcatttctgcactgctctgcttctgctcgaaagcaatcacttcatgtcactatactggcccttcttcaatccagattctgattcgcgaa

SEQ ID NO: 244857 - DNA, 122 bp, Homo sapiens
acaggtggctctgagcacctgcttgccttttgacgggtgggaatctgggcttgactgtgtcgccgtccacagcaggttgctacagcgggttcagcaatggcacctggtccatcgttccccgc

SEQ ID NO: 244858 - DNA, 122 bp, Homo sapiens
aagaccccgcccacacgcagacaccatcccgccttccccggcgcggccaccgccccgccacgcccattggccagtcccgagctgagcatgcctatgaacatcgccgagtcctttcccccggt

SEQ ID NO: 244859 - DNA, 122 bp, Homo sapiens
cctgcctggatccgccctgcccgcagcctctcctccccttcctccccgccgccacggccccgtaggtgctcggggacccaccttccacctagcacgggttcgttcccctctcccggcctggc

SEQ ID NO: 244860 - DNA, 122 bp, Homo sapiens
caacagacaccacgtgagacagggaggagaaacgtggcatgcatgaacggagaaatgtggcgtgcatgaacggacaccacgcgagatagggaggattcaggatgtgatcttatttcagcatc

SEQ ID NO: 244861 - DNA, 122 bp, Homo sapiens
acagtgggaggacagggcgggacctcgggaagttcgcgttgtttgcagcggggaggatcccggcctctcctgtccctgggattcaatctgtgagatgaaggcctgttaacaggaacgcctct

SEQ ID NO: 244862 - DNA, 122 bp, Homo sapiens
tcttcccctccgaaagtaagtacttattttgacttccatcccctgaggtttagctctgcccggagctctcaaaaccgcagcagctcccgggatcgcccttccctctcgcggttcccgttcgc

SEQ ID NO: 244863 - DNA, 122 bp, Homo sapiens
gagagcaggggaggagggagcccgggccaggctgtccccatggatcctgggagccagtggcggcagaaaaggcccacaacccagggttaaaccagccaccactggatccctgccctgcattt

SEQ ID NO: 244864 - DNA, 122 bp, Homo sapiens
agccatgtgcacatcatcccattggtacccacagatggcactggccccttccttcaaacccgggccaagctccaaacacagactgtctttggaaggagggtaaagtgttgaaaggaagaaca

SEQ ID NO: 244865 - DNA, 122 bp, Homo sapiens
acagcatattcttcccattctcccctttttggcacttactttgctggagccttaagtgtgcgttggatcccccagctggataacagcactgtgcggggaagaggagaaacgaagacctggag

SEQ ID NO: 244866 - DNA, 122 bp, Homo sapiens
ggcccaccttcggcgctcgcaaacgtccgggtggctgcggcctggccaccatccaggcctcgcccaccggcagttgcccgggtccacacagggacaagctcggtctccgccgcgtcccgcct

SEQ ID NO: 244867 - DNA, 122 bp, Homo sapiens
gcccccactcccgctagaggcccagtcccgctggagaccacgcccccagcgctcggtctccgccccaggactccccgccgttacctcccgctagctcagggcgaggtcctggctcctccctg

SEQ ID NO: 244868 - DNA, 122 bp, Homo sapiens
tcctaactccagggactcgcaggagttaggattaggtcgtggaagccacaggcgcctgggcgccctcctctacaagtgggaccttgagacaaagtgcaaactctaccgggaggggggctcct

SEQ ID NO: 244869 - DNA, 122 bp, Homo sapiens
atttcatcatcaactctcactgtggtaggaaaatcaatattaaataaacagtttcagccccgtgattacatgcagtgattttaggaagcatcatgataactaaagtaggtacttgcagggaa

SEQ ID NO: 244870 - DNA, 122 bp, Homo sapiens
acccagatatttcaccctgcccactctgcccgacctcgcaaggtcgttaccggagctcaccggggtctagggaagccctgtgactgtgactcagtcacagatggagaaggtcagaccgccgg

SEQ ID NO: 244871 - DNA, 122 bp, Homo sapiens
cgcgccgccgccaggctcgccgcccaggccgaagaggctgaagcggccggccaagaagcccgagtagaggtggtagagcacgccgagccccagcaggcaaaacactgccacccccagtgggg

SEQ ID NO: 244872 - DNA, 122 bp, Homo sapiens
gaggcgaggtgtgggtggggcgggacgccgctgtggaggcggggcctgggcgcggacgggcgcggagcgaggcaccgcaccgccggggcggggagtgggcggggctcgggggcggggcgggg

SEQ ID NO: 244873 - DNA, 122 bp, Homo sapiens
tgggggggcggggcggggggaggaaaggggcacgggttcccggtctcgtagacgctgcagcggagcagagcctctaggcatgccctcatctagagcagctgctgcggaatccggggagcctg

SEQ ID NO: 244874 - DNA, 122 bp, Homo sapiens
gcacagcggccgcacttgtggctgatctctgggctgagggggctgagctggcctagcaggcgccaagtctcttccatgtgaataacaaatactcccaccggcggccgcgattggtctgcgcc

SEQ ID NO: 244875 - DNA, 122 bp, Homo sapiens
gaggtaattgaaccaagggaactggaaactacaaaaccatgggaagcgcggaggtgagtccgggcccagcaggtctctcttgcggagcaggggtggcgcagggagcatgcgcggcgcaggga

SEQ ID NO: 244876 - DNA, 122 bp, Homo sapiens
agactatgtatcttgaagtctgacagcaccaagaggaaatgacacaccaagagcgcaacacggatgagaggtggagatgctaacctgaccttgtcagaagccaaaaatgagaagaagggtcc

SEQ ID NO: 244877 - DNA, 122 bp, Homo sapiens
tcttatgatcaaactcatctttctctgccagttgattgacctccagccacgaaaggagctcgttgcatttatccaatattttatttttatcagactcactaatcttgcccttcaaaccttca

SEQ ID NO: 244878 - DNA, 122 bp, Homo sapiens
ctccgcggactagatcctgatttggggccttcctacatcttcctttacggggtccaagaccggcaatctgggagttccacaggctatctagggttatctggcctcccctccgttttccctcc

SEQ ID NO: 244879 - DNA, 122 bp, Homo sapiens
ttttctgtttcagatccagttctttgagtattgacacaccatcacagtcttactgtgacacgggcctgtcttgtaccagtgtatccagcagatggcattagaattcttaaatgtcagctcca

SEQ ID NO: 244880 - DNA, 122 bp, Homo sapiens
cagggacaggttgcctgggtcagcattctggtcccccgtggccttgatcccatctcgtcacgtctctgggggtatcgtggtctcggtaatctcaagtctcttgagatgccaaaagtctgaaa

SEQ ID NO: 244881 - DNA, 122 bp, Homo sapiens
tttctgtaaagcaagggttaaatcaggttttccgggctatttatccaccttaccttccttcgtaaccaataaatcctcttacaaacctgaggcggcaaactaaaaggccagcggatggcctg

SEQ ID NO: 244882 - DNA, 122 bp, Homo sapiens
gtaagcctgctcaacacattctcacagggcaactctaaagaggaccaggtaacacctgcacgtgcagtggattacattataggagagaaaccctggacttagggaatctgaacctttcataa

SEQ ID NO: 244883 - DNA, 122 bp, Homo sapiens
ctgcagtttctcctcggtctcgtgtgtctgtgtgtgccagtcccttgtgctgacacaggacgtcccttaaagtccagtcctggcgatttctgaatctcactctttccctctttaaagttcca

SEQ ID NO: 244884 - DNA, 122 bp, Homo sapiens
catatagttgggatttgatgagctaggacatgaaaaacccgtggcatagtggctggcattcggctgctgatcttaagagtggcacctggaggccaaagggctgcccagctcaggcaggcgat

SEQ ID NO: 244885 - DNA, 122 bp, Homo sapiens
gtatgagttcaccgacccggggcaccccagaggtaagtcctgctgccacgtgcctccccacgggcctgcgtctgcacctccctgcgcggtcactgcaacaccaccgggacagggggtgcttc

SEQ ID NO: 244886 - DNA, 122 bp, Homo sapiens
aaaaggaacgccaggcttgatgggcaaaggggagccaaggtaggtccctctgcaggttcccgacaggggagaggatggacagtagggagagcacattttgctacagttaagtcgagttgaac

SEQ ID NO: 244887 - DNA, 122 bp, Homo sapiens
cctgccctgctcttgctgcgggagccaggaaggtggggggccacccctttcccctccttccgcccagtcctgttctttgaaaccgccctgtgcaaagaccggattcttgttggggagaattc

SEQ ID NO: 244888 - DNA, 122 bp, Homo sapiens
taacacaatgactgcactaaaatgtcaagaagcgagtctgccagcggcgatgggcttcagcgtttcctccctccacacgcagtccctccatgtcaccaacatgctggagctacgtaggactg

SEQ ID NO: 244889 - DNA, 122 bp, Homo sapiens
gccgaatcctgcagtaccgtcttcggaaagccgagcagaaaagcctgaaagtggctgagacgggtcaggtggatggtgagcttattcgaagcctggagcaggacttgaaggtgagtgagggg

SEQ ID NO: 244890 - DNA, 122 bp, Homo sapiens
cacaacagaaaacaaggaggagacagggagaggaggcagggagaggttctggatggataccgggtggagagagactggagaacggatataaccaaaaaaccacccactcgaccagaaacact

SEQ ID NO: 244891 - DNA, 122 bp, Homo sapiens
ggttgtccctgggcccaaggctcatgcacacgctacctattgtggcacggagagtaaggacggaagcagctttggctggtggtggctggcatgcccaatactcttgcccatcctcgcttgct

SEQ ID NO: 244892 - DNA, 122 bp, Homo sapiens
tttgattccgctattgaggtagaggcgggacgggggaagcagctttcagtaagacccgcccgctcttgccctgtcagtttaccattgccatggcaacacccggaagttgccgccccctttcc

SEQ ID NO: 244893 - DNA, 122 bp, Homo sapiens
ggacatgaaggactggcagctctaatgatggcaggattaatgtgtatgaaggcacacggacgtcagaacctaggatggagaaactaggcatgctgactgcttttgggaacacatagccgaat

SEQ ID NO: 244894 - DNA, 122 bp, Homo sapiens
gcgctgcaggctaagttgtgaataatgagccctaaaaagctcgcgcgtattcttctgtgtcgctagacgcaatcaaaaacacacggaagaagcgttacaagcagtgcaggtttaccaacggc

SEQ ID NO: 244895 - DNA, 122 bp, Homo sapiens
cttctccttcctagacaaggacagcaggaagagccttgccaggacctgctcccagctccacgacgtgtttgaggaccccgcactctggtccctgctgcacttccgttccctcactgaactcc

SEQ ID NO: 244896 - DNA, 122 bp, Homo sapiens
agaattaaggcacccatacttaggtgcaaaaggagcctttttttcctgagtgctacttcacgtatttttttgtaggcacaaagaaacaaccatttagctaggtcaagtaatggttctaagtt

SEQ ID NO: 244897 - DNA, 122 bp, Homo sapiens
tctgtaaaaccaaggaatgaatccgggactcagcacagggggatgctccgcaagactctccggcgcctgcgcggctcttccccagctccccctgcagctacgtcacctcccacggcctcctc

SEQ ID NO: 244898 - DNA, 122 bp, Homo sapiens
acactgatgtgccgaactcaccacctcctcactcacgcagggtcacacatgcagtcaccccggacacactctcaagtcacatggtgcacagcggcctcagagtcacatggtcccatgtagtg

SEQ ID NO: 244899 - DNA, 122 bp, Homo sapiens
atttttgcctgaaccagttgctagtgtggtgttcgtcaaatggtaatttttaaattcttccgcttattccacttttgtagtttaagtcctactgtaaggaagagctttcccttctcattgac

SEQ ID NO: 244900 - DNA, 122 bp, Homo sapiens
gggagtagtttctctctatctctttgctctgtcatcattagctggcttctttctcaggctcgtaacgatatggtggctgcagctctgagcatcatatctggatgagacaagatagagaggaa

SEQ ID NO: 244901 - DNA, 122 bp, Homo sapiens
acctcaagtgatctgcccgccttggcctcccaaagtgctgggattacaggcttgagccaccgtgcccggcctggttaaatattttgtatgcctatatctgcatgtatgcatagataaaggtc

SEQ ID NO: 244902 - DNA, 122 bp, Homo sapiens
aattattaaagatgtattaaatgggatgtgtaccaatcagccatttcaaggccctttgcacgttttgttttggatgttattaccttttcagaagccctgtgaggtagttactgttataaata

SEQ ID NO: 244903 - DNA, 122 bp, Homo sapiens
tctgcgtgtttacagttgggcacgagaaggctcagcacgcacgcacagcaggtgggggcccgccctgcccacagcgtgaaaacaggagccccggccagccacggctgggcagggccagaagc

SEQ ID NO: 244904 - DNA, 122 bp, Homo sapiens
agttttgtcctctgaagataaggtccctccaaaatgggaattggtcaaaacaaaataatccggatgcttgagaacgttgggatgggaggaagatatagagctgataaagtgaggaatcatta

SEQ ID NO: 244905 - DNA, 122 bp, Homo sapiens
gactgagggttagcggtaggcgggagcggggagatagtacaagtacgcttcctaatgaggcggtgccgcaaaataaccaattttaataaagactgcagagaagaaaaccaggttctgctggc

SEQ ID NO: 244906 - DNA, 122 bp, Homo sapiens
atttttgtcttaggcttgccaaatgtaattgggcataatcagagctcatacatctcatagcgttttcatcttctgttcttttaaaaaaagaaaactggggggtgggggaggtgctcgaagtc

SEQ ID NO: 244907 - DNA, 122 bp, Homo sapiens
agccggcgccggaacgacgcgcctgcgcactcgcggcaccaacggaccgttgactgaccgcgcatgcgcataacgctgcgcgtgcaatcgacaaatctcctaggagggtgaagacgtccttt

SEQ ID NO: 244908 - DNA, 122 bp, Homo sapiens
gggtcgctggtatcaaagacggaatcaggagccaggccagtactggagtccgcgaggatgcgggagacacagcccacgtccccagccagcactgcctgccagaaggcaagggcaggtcctga

SEQ ID NO: 244909 - DNA, 122 bp, Homo sapiens
aggcttgttctttgggaataattccatatccttccaatcttgcatggcccagctctttatcgagcacattttcggtgggtcagaggtctttctcctgttggtgatggcctatgactgctatg

SEQ ID NO: 244910 - DNA, 122 bp, Homo sapiens
cctgtggtggggatgtgaatggaggacgtcctgctgcccgacctctgccgccctaggctacgagcctgccctagcaaggggcatccatggagaatgagaaggaatagtccaccccaactggt

SEQ ID NO: 244911 - DNA, 122 bp, Homo sapiens
ctttcagagtctcttacatttatacatgtatctgttaagggtaatgccttatgttaaaaccggtcctgtgttgcagtattctgaattctcaaaatgataaaaattttcatgagatgacctta

SEQ ID NO: 244912 - DNA, 122 bp, Homo sapiens
ttttctctgtattctgtactggtcaacttataaaagtgagagctaagtcatcttttcttgcgctttaagaatcttataagattgcttaagcagtctgtaaatctctaacaatttaacttaac

SEQ ID NO: 244913 - DNA, 122 bp, Homo sapiens
aaggatattagctctttcattctctcaagggtcagatgtaatcttccaacatctgactttcgcgtcacccatttaggaagagacgcggtccctttaaggccctggaaagggtctaagtgttg

SEQ ID NO: 244914 - DNA, 122 bp, Homo sapiens
gagaagagccagttctgtttctgtgggcatgtgctgaccatcacgcagaactttgggtcccgcctcggggtggcggcgcgcgtgtgggacgcggtgaggaatgggctgcgccgggtgagggt

SEQ ID NO: 244915 - DNA, 122 bp, Homo sapiens
acggacaaaggagtctttacaagaacagccaaaacaattccatctgcgaacaaaaactaacggcagaattaaaggctgcaagtccaaacacaatctggctattgtaaacagtgcctcagttt

SEQ ID NO: 244916 - DNA, 122 bp, Homo sapiens
agtttctgagtggccgcgagctggccgggaggctggagcccagcagcagcgcggcggcgccggcgtcgtcccaacttgcaggcgcggagggacccctgacatttcactaaaatgagcgtgct

SEQ ID NO: 244917 - DNA, 122 bp, Homo sapiens
atgcatctgtgccaacacgtgctagcatgtgctgacacggggccaacaggtgtgtgctaacgtgatgggagctgacaaaatgcatgagctttacttgtacatgtgctcaccgtgcacgcaac

SEQ ID NO: 244918 - DNA, 122 bp, Homo sapiens
gaccctcagccagcacgggccatgttcttcggagaggaggcctgcttgagatacagcttccgttacagtgcggtgggcaggtgggccggtcgtgcctgaaaggagggcagttgatgaaatgc

SEQ ID NO: 244919 - DNA, 122 bp, Homo sapiens
ccagcctgcaggagcaccaggatgcagagcccttccctgggacagccttgggcgaccctgcgtccgacgtgccatggctccagcgcaggcccggctgtgatgacccggccacaggctcccga

SEQ ID NO: 244920 - DNA, 122 bp, Homo sapiens
aaactttcctatcaaaatgtttcaattaagaagtagggtgtacgtgtgaggggaagaggacgctgggctccaacgtttcagtagaagcgcttaagacttgcaaacacccttggtggggacct

SEQ ID NO: 244921 - DNA, 122 bp, Homo sapiens
gtaacagggtgatttggatatttgtaggggaaatgggtagtaaatatcaagactggtgaccgtaggtcagcccagcacaaaggaagtggagatttttccatgcacaagaatctgatcactgt

SEQ ID NO: 244922 - DNA, 122 bp, Homo sapiens
acacctgacctcccagtctttggtggggagggtaccttggggaggtgtctcctaggagggcgtggggagctgggggctggctctgctggaaggcaggagtactgggcactttccccctctgc

SEQ ID NO: 244923 - DNA, 122 bp, Homo sapiens
atatttactgcagtaatcactgttaaaaaaatacaagactcttatgaactcctgtctttccggaacatgaagtaatttctttgaaataagcagttctcataccattatttcatatcatctta

SEQ ID NO: 244924 - DNA, 122 bp, Homo sapiens
aaaggaggcagagactgccctgagccgccaggcgggttctgccatctcgcagaaagtggccggacaggttgggtctgaagccacatagagttgggattgtttcctcataatcactgtgaggc

SEQ ID NO: 244925 - DNA, 122 bp, Homo sapiens
tccaagaatctcagatctgacaaggcctgggtcaccaccagagagtcctctctgcgtttccggatttccttcccagcaggcagcaccccaagtttcactcaccaaggccacaccccaaggtg

SEQ ID NO: 244926 - DNA, 122 bp, Homo sapiens
ctctttcctcatgccacacgctcagcacgcttccagggagcccttgatgggtgggcccagcgctgttcccacggcaccaagagagacaaggtctccaccaatacagcgtgagcagggagggg

SEQ ID NO: 244927 - DNA, 122 bp, Homo sapiens
agacacaagaacggactaatacacctgaggagccttcacgcacacacatgtccacgtccacgtccacgtccacatccacgtccacgtccacatcaaggcagtgctgctgagggccagaggac

SEQ ID NO: 244928 - DNA, 122 bp, Homo sapiens
ctgagcctccatttccttctctgtagaatggggatgacggcagcagtgacatcacagtttcggcgagaattccaagagatcgtgtgtgcgcgcgtgctagtcattcatcccatgcatatttg

SEQ ID NO: 244929 - DNA, 122 bp, Homo sapiens
ccggcggggctgaactacccctcgcccccgctcccgccaggtcaggcaccactgccctcgcggccagggtaaagaggaccacagatcagtcagccttggatttcggatgggcttggaattcg

SEQ ID NO: 244930 - DNA, 122 bp, Homo sapiens
ggtgaggcggcggccgaggctcccgccccaccgtcatgctactactcccagctccacccccgccccactcccagctccaccctgtgggaagccctggcacctgggagcgcgccccgctgcgc

SEQ ID NO: 244931 - DNA, 122 bp, Homo sapiens
tgctctgggtcatcaggctcaagtgcctgctctgggccaccttcggaagcctggtggagccgagtgttgcctggtgacgtggagcaggaggcggggcggaggctgcgggacacggggctgca

SEQ ID NO: 244932 - DNA, 122 bp, Homo sapiens
attgcagtgtaagagatttttttcaaatttactggtttaaaacaacaaacatgatttcaccgtttctctggactgagagccctggagccgtttagtggggtagttctgactcaggctctctc

SEQ ID NO: 244933 - DNA, 122 bp, Homo sapiens
agaggcccgaatctatgaggagacactcaacgtcctactctatgagactccccgcgtccccgacaactccttgttggaggccacaagccgtagccgcagccaggcttcccccagtgaagatg

SEQ ID NO: 244934 - DNA, 122 bp, Homo sapiens
cacgtacttgagtctgccctccacgaaggcagagttggaagaaaagggccactcggccaccggcaagagcatgcagagccttgggagctgcaccattagcaaggactccttccagatctcca

SEQ ID NO: 244935 - DNA, 122 bp, Homo sapiens
aagccaaaatttgggttgttgcgagctgagttctcagaggagaagatgctgagatggagtcggatgagcacaaggtgcgctgggaggacacctatgaaaatacagacatggctgcaggatgg

SEQ ID NO: 244936 - DNA, 122 bp, Homo sapiens
ccttttagaaagaggcaggagagctagctcatttgcttgccaccttgggaggatacaacacgaagttggcagtttgcaacctggaagagagtcctcgccagcacctgaccatgctggcaccc

SEQ ID NO: 244937 - DNA, 122 bp, Homo sapiens
tgtttcctttcatcatggccctttccatcttcgtcacactgttccctcgtcctagaatatcgtctccctttgttctcagcctcctccaaccttcctgcttctctacacatccaagtcctatt

SEQ ID NO: 244938 - DNA, 122 bp, Homo sapiens
cctgggtcgtcaatccccacacctgagagctctggagggcgggaatgggtcgtggagcctcggtcatcaatccccacagcacgctcctcactaatggttgtgactcagtaggtaaaacgctg

SEQ ID NO: 244939 - DNA, 122 bp, Homo sapiens
ctacgagctgtggcggggaaggcgggtggaatcccggagcccgagctggaaaccgttccccgctcagccatgacccgggctgtttattcgcatcaggaggcgcgggtggctcgcagagggcg

SEQ ID NO: 244940 - DNA, 122 bp, Homo sapiens
tgacaggtgtgtgtttcgttctgcttgctaggtactcagtatcacacgcaggtgagtcagcgctccccaacatgccccttgcgccatctgctccccacatgcaaacactcgttcccaacgct

SEQ ID NO: 244941 - DNA, 122 bp, Homo sapiens
aaaagaaataggttttcagcaggagacagcaggcacatcgatggcaccagaggaagatgccgtgaccttgaaggatcattgttggagtggttatcccaaggatggggccagtgctgcacctc

SEQ ID NO: 244942 - DNA, 122 bp, Homo sapiens
tgccactttctcgcacccctgatcctccgtgcctcttcccaagaccgccagacccttcaccggcccctgccactgccgggaacgctcccgcctgctccttaactcacacaggcaacaagttc

SEQ ID NO: 244943 - DNA, 122 bp, Homo sapiens
gggctggacgttgacttgcactgaatacgagctccgtcctgggcagcaagtcatgatccacgcaagtctaacatcctccctattaacacaatggtggaccacgaagaacgcactgaagctta

SEQ ID NO: 244944 - DNA, 122 bp, Homo sapiens
atcagaagaaaaattagttgaagatagcttttatctaaccaagagtaaagatttgagagccgttgattgctaatatccctagaatctggggaggaaacagtaagacagacttgttgactgaa

SEQ ID NO: 244945 - DNA, 122 bp, Homo sapiens
gagaagcccgcaaggcggccacactgccagagatgagcgcaggtgaggagagtagcagctcggactccgaccccgactccgcctcgccgcccagcactggacagaacccgtcagtgtccgtt

SEQ ID NO: 244946 - DNA, 122 bp, Homo sapiens
gggaaaggaagtggaggagaagggggtggcagtgacccacagctaggtgcccctccaccacggagtttgtcatttttgtaaagatgtcaacacagaacatttttaaagcagagacgcagcag

SEQ ID NO: 244947 - DNA, 122 bp, Homo sapiens
taaacaactctacagtttctaaatatttgcattccataattgtctttgggttgagtcacgcgaggggcacgttccccctctcctcagggatgagccgctgcatggttaacaggtttcatttc

SEQ ID NO: 244948 - DNA, 122 bp, Homo sapiens
aattttttattttcacaattcagggactcatgaaactagaaagtacctgagagttctgttcgagcctcattttttttgcagatgacaagcaagcctgagccccagagaagggcagggccttg

SEQ ID NO: 244949 - DNA, 122 bp, Homo sapiens
tactgggaggcttcaactgcataataaaacctaggtctcctggccaggtgcagtggctcacgcctgtaatcccagcactttgggaggccgggagcaggggggcgtggatgacttgaggtcag

SEQ ID NO: 244950 - DNA, 122 bp, Homo sapiens
tatacaatcatctgaaacttggtaaacacaacagcacctaaacaattaaactgtgcctttcgtagggcatcctggcagctacttaattgagatttttgatgctaaacatattcttaatactc

SEQ ID NO: 244951 - DNA, 122 bp, Homo sapiens
ggaccccgggcaggcggcaggacggggatcccaggctgcggggggactccgcggcagagccgctgggacctgacccgggagcgccttcgtccccgcgcgcacctccccgggtcgggcgactt

SEQ ID NO: 244952 - DNA, 122 bp, Homo sapiens
cctgatgaatatcatgcagaactggtattccttattcacaccagtggaggcggctaccatcgtggcagtgacgggcaccacacacgccactctgctgcgactgcagctggacacatcgcgga

SEQ ID NO: 244953 - DNA, 122 bp, Homo sapiens
gacctgcccatgcgcaacactgtggccctgctgcagcttctggatgcaggctgcctgcgccgcgtggacctgcgcttcaacaatctgggcctgcgcggcctgtctgtgatcatcccacacgt

SEQ ID NO: 244954 - DNA, 122 bp, Homo sapiens
acttcccaatacacctgctccaggatatcccctgtcatcccaaatgactcaagaatgtgacgctattccggagtgaagagtgtttctcgggatttcgcgagcttttttcctagatgcctcac

SEQ ID NO: 244955 - DNA, 122 bp, Homo sapiens
taccagaaattcctctcgtttacttccagacttcttcagtcaaccacgtttcttgcttcccggtgtgcttagattaactgcagttcctcagggggtttataaatcaatcaatagggagtcta

SEQ ID NO: 244956 - DNA, 122 bp, Homo sapiens
gagggtataagtggagcgttattttgaggtttaggggaagaaaaaccactctctagctttcgggtcccttcactgtagtgcatgagcccttccatagagcaggttcctggagtggtgccacc

SEQ ID NO: 244957 - DNA, 122 bp, Homo sapiens
caagaaggtagacagcttcctggccccggagtcacgcagtttgagatgcctggattctgccgcctccctatacatctcttcccttgtctgagcctttgctggcttcttacagcagctctgta

SEQ ID NO: 244958 - DNA, 122 bp, Homo sapiens
atggttccggaagccagagtccaagattgaggtgtaggcctgcgctccctcagagctgctcgctccagggagatccctcctcggcgcttctgcttctggtgactccgggtgtcctcagcatc

SEQ ID NO: 244959 - DNA, 122 bp, Homo sapiens
ctgtggccagggccacttgaagaaggacacagactggtatcaggtgaagcggatgcaggacgagaaaaagaagaagtctggctccgagaagaacacagggaggcctcctggtgaggcggcgg

SEQ ID NO: 244960 - DNA, 122 bp, Homo sapiens
ttctgcatgccgcgcgcggcacgtcgggactcgtagttccggcgcggaggacgtgcgtcgcggcactctcgcctgaccgtctccacgtgactctcgcacctccggaagtgacgtaagcagac

SEQ ID NO: 244961 - DNA, 122 bp, Homo sapiens
ctcacaggatgctaaaccattttcctcttatttagatgctctgaaaaacaagggtaacgtcgtatttggaaacaattttcgggactatggtagaaaaaaagtagaccatttcaaagtcagct

SEQ ID NO: 244962 - DNA, 122 bp, Homo sapiens
gtttcaaagcagagatgatgacctaagtgttactgcttcagtgggatggtaaccatagaacgttacagttggaagagaccttcaagagcatttaatctgagacttctgtattttagagcaga

SEQ ID NO: 244963 - DNA, 122 bp, Homo sapiens
ccgctctgtctgcagcgtccggggtgccgcagctggtggagccggtgctctgggactacacggccgacctggatgtgcacggcaagggtcagtgccaagttgtggggggtgtgttgtcctgg

SEQ ID NO: 244964 - DNA, 122 bp, Homo sapiens
ttcactccgccaggcttgctgagcagtcttcctgggcaggcaggcaggctctcgcatctgcgggccgcggggagaatattggtgggaaatgtggccaaggacttcacgtgcaaagtccgcat

SEQ ID NO: 244965 - DNA, 122 bp, Homo sapiens
ttatttctccgcaagccacatacgtgttttaccccacacgtcatgaggcctgtggcaccccgatggggactgagcattcactcttctgcccacgtgaggaaccaacaaaagctggcaaggac

SEQ ID NO: 244966 - DNA, 122 bp, Homo sapiens
ctctgaagttcatttcctctctgcctagggttttctatactattctagtctgctcgatgacgacaggctgataggccctgcggtttcttctgagtgtgtgttcttttttttctttttttttt

SEQ ID NO: 244967 - DNA, 122 bp, Homo sapiens
gaaaagggttgtggggctcattcttagtcatagggtgagcggcaggcagatcttacaagccgtgcaggccggagggaaaagggttgtggggctcattcttagtcatagggtgagcgggagac

SEQ ID NO: 244968 - DNA, 122 bp, Homo sapiens
tttctgtcctctgccagctctggcaaggctccgtgttggagccccctcaggagaccacttcgccgtccaacagacctccccgccaccgaggggcccggatggcagcctgtggcttcatgact

SEQ ID NO: 244969 - DNA, 122 bp, Homo sapiens
ctagtggccactataccagatagcacagacacagaacatttctgtcattgcatactattccgttggacagtgttggtggagctactaagagaatgttgatcctgttaacaaattatgtttct

SEQ ID NO: 244970 - DNA, 122 bp, Homo sapiens
tagtcaatgactgacagtaaactagaaagccaggactcttgttccatagtggaatggttacgagagtaaacatagcctttagataacttccatttgacaagaaatacaggggctagaacata

SEQ ID NO: 244971 - DNA, 122 bp, Homo sapiens
gccagcctgagtgacgcgatccaaagagcgctcccggttaggaaattgcccccattggaacgccttgccagagcagcacgtagcaggcccccgtggaggatccacacagtggctgaacactg

SEQ ID NO: 244972 - DNA, 122 bp, Homo sapiens
aattaaaatgtttttattgatttctaaagctatcatgagttttaggcgctgcgcctgatgcgcctagtgataactcagctgtaatcagggtttgataatttgtgtcttatatatgttacttt

SEQ ID NO: 244973 - DNA, 122 bp, Homo sapiens
cctgccgggcagcactgcacacagagccagattacgggttagtggcacctgggagcagggcgcaaggcgcatgcacagggccagccagggcgcgggcctctgcgcccctccgcagcactcac

SEQ ID NO: 244974 - DNA, 122 bp, Homo sapiens
aatgttttctgctctcatcttgcaaagtgaaagtgcccagcacaggcaatggtgttagtacgttgtagtcattcacaaactagggctgcccagaagagagacaggctgggactttcgagaga

SEQ ID NO: 244975 - DNA, 122 bp, Homo sapiens
cagcctggaagttggcattcacagtgagtataaccgacaaggaagtggtatccagaaaaacgtctttaaagctcctacaagtcagtaaaaataagaaaaactgctcaccaggaaaaactggg

SEQ ID NO: 244976 - DNA, 122 bp, Homo sapiens
tattgctgtggaattctcactttttagtagaacctttaaaaactcaagtgagctgtacaacgccccgattgctttaactccagtgaaccacggaggtataaagacgctagagttctttgtaa

SEQ ID NO: 244977 - DNA, 122 bp, Homo sapiens
tggttgtgggaccccgttctcagcactggtgtgagcgtgatcatgggagcccgttctcagcgctggtgcgagcgtgattacgggaaggggcagaggacctggagcagtgaggacgttagaac

SEQ ID NO: 244978 - DNA, 122 bp, Homo sapiens
agaactcctttctggcagagtgatagatgtccatagtgttagtggaacatcctcccttctcgataaacacctcttactgtgacttagccctctcctgtagtcccctgtcctcattagggtgg

SEQ ID NO: 244979 - DNA, 122 bp, Homo sapiens
cttttgcggctggggacaccggcctgtcggttccccctgccctacccagcctccaactaccggagctgcaagctggaggaatgcaaaataaataacaataaaacgcgcgggtgggattggtt

SEQ ID NO: 244980 - DNA, 122 bp, Homo sapiens
tgggactctctaggcactgggtttgttgaaactcgatggctctgtgtgcagagcttctgtcgtgtgcggagcttctgtcgtgtgcggaggagtttctgtcgtgtgcggaaggcgaggactgg

SEQ ID NO: 244981 - DNA, 122 bp, Homo sapiens
agacatgcacccaccgtgggccatgcatggactccggtgggatgaccagtgtggcatccacgtcggcattctcggcactccagggtaaacacctccacagcagccaggccgtgtgccttctg

SEQ ID NO: 244982 - DNA, 122 bp, Homo sapiens
accgcccctggctatgcttgcaggggcctggctgggtccacagggcatggctgtgtctctcggagcacggcccttctctccgggggcctggctgcgtctgcaaaggcgtcaatgtgtctccg

SEQ ID NO: 244983 - DNA, 122 bp, Homo sapiens
gttctcaacttgtgaccttgggtctgcgggggtctagatggacttcagctggcgccgtgtcgcatgtgagtttcctgggctgtagtaaccccaaaagggccgcgtcgtctacagaagtgcca

SEQ ID NO: 244984 - DNA, 122 bp, Homo sapiens
tttggtttgagcctgttgcttctaagaaaagcgaggaaaaatcctgagacctcctcccctcgcccttcatccacttcaggggaccgagtgtctccacggaacttcacaagggaggaaaagag

SEQ ID NO: 244985 - DNA, 122 bp, Homo sapiens
tcacgctgggagtgggcggggaaaatatgtcagactgtgcggtcacttccggcccgggagcgcgcgggttgattcgtccttcctcagccgcgggtgatcgtagctcggaaatggcgggtaag

SEQ ID NO: 244986 - DNA, 122 bp, Homo sapiens
cagggagggagcgcaaagccaccagcgcggcggagctggtgcgcctccggcccgcctctccggtaacgggtcgcgccgcactgagtccttgcagcaaacctgccgaatcccgcccgtggacc

SEQ ID NO: 244987 - DNA, 122 bp, Homo sapiens
tggcaatctccaggcagctcactttggcctctgttcctggatcccctttgctcttttctgcgcctgcattcgtaagtgatcacgggctgcccgtgtcctggtcattggtagtgcaggcagag

SEQ ID NO: 244988 - DNA, 122 bp, Homo sapiens
agagctgccctatcacagggaggacggtgggcagtgggaatatgaagtgatttcgtgcagcgaaagaaccacagagcccagagaagcacagaccccaggcttggagaatgaaacatcaaagc

SEQ ID NO: 244989 - DNA, 122 bp, Homo sapiens
ctgtcaagctgggagcgggtgtcacggctcatggaggaggaccctgccttccgtcgtggtcgtcttcgctggctcaagcaggagcagctacggctgcagggactgcagggctctgggggccg

SEQ ID NO: 244990 - DNA, 122 bp, Homo sapiens
gaccccggggctgtatgtggggcagggctgcgggtctgcaatgagtcgtgaccacggggtcgcacagatgtggtggattgtttgagagccggcgctcagctgctccgggtgctcagatggcc

SEQ ID NO: 244991 - DNA, 122 bp, Homo sapiens
ggtgagtgttacagctcttaaggtagtgcgtctggagttgttccttcctccggatgggctcgtggtctcgctggcttcgggagtgaagctgcagaccttcgcggtgagtgttacagctcata

SEQ ID NO: 244992 - DNA, 122 bp, Homo sapiens
gccccttgggctcgctgccttatgcagtcaccaaggttgaacatgcgcagagggtgcggacgcagtgtctcttgggaattatagtcccggagtcgtagtcacttttgacttggctgccaaag

SEQ ID NO: 244993 - DNA, 122 bp, Homo sapiens
gttgatgttctttagcttgccttgataagaagttctggtcacccaaaggtttttcccaaacgtggcttccttttgtgattgctgcttgctgtgctgagtggcagtccccggtgttccagttc

SEQ ID NO: 244994 - DNA, 122 bp, Homo sapiens
ggattgggataaagaagagtcttcaatagcaccagtctgcacttcctagtgactttgggtcgccaatagaaaatgacagaaatggtcatctagaggacccaggactctcccacccagccagg

SEQ ID NO: 244995 - DNA, 122 bp, Homo sapiens
aaggcacagacaaattttcagcagccccggggattgggagcggtggttacctctgcggaacgtgccccgacagccaagccctgcgcgcaggcgcactggtgggagggcgggaacgcgggagc

SEQ ID NO: 244996 - DNA, 122 bp, Homo sapiens
ggtcatgtctgactctctctggaccgcgctttctaatttctcgatgccctccttccccggcggcagtatgttccgccgcaccaagaggtagacccccgatcccctagacattgtcccggccc

SEQ ID NO: 244997 - DNA, 122 bp, Homo sapiens
ccaggacaggacgaggaaagcaggccaggccggttccggccgcacggtgacggcaggagacgcctgggtgcagtatgggtgagtgagggggaggcccacaggcacaggaagggttggcctct

SEQ ID NO: 244998 - DNA, 122 bp, Homo sapiens
ctgagatgcgtcagggcccaccgccggcgctgaggatggaacagtgaacacagcaagccacgtccttcctcctagggcccatattctgatggaaggagtcagacgaaaggcagagaaatgca

SEQ ID NO: 244999 - DNA, 122 bp, Homo sapiens
aaattttggattttcttctaagtgcaaggtaaaggagagttttaattttaagaagagtgacgtggtattataaacccatagtgaaagaatggatgtgaaagcaaaacagggcccaacaggta

SEQ ID NO: 245000 - DNA, 122 bp, Homo sapiens
cagagagcggccgcagcctgcggcgagagacacctgaggctgggaaacggctccgggagccgcgcgaggacacagcccctcggcaggaagaggcacatttcacgctctgcggaagaaaagtc

SEQ ID NO: 245001 - DNA, 122 bp, Homo sapiens
gttctggcttgagctgaacaacttaactccttgtctcataaaatttaagctgctattgatcgcctccttgcattgtgtgaggattaaacacgtgcgcgtgcacatccaggcacacgcgcgca

SEQ ID NO: 245002 - DNA, 122 bp, Homo sapiens
cccgcgtttagagtatgcctacggcgcctactaacgtctagacctaggagaggcgtctcccgcccctcgacccacagccagccgccacttgatagctaacgcgtcttccggccggtacacac

SEQ ID NO: 245003 - DNA, 122 bp, Homo sapiens
ctacttcccaggccccgggcagcgtcggaagagggcgtgagcataattggctcctgtaggcggagcctggctgggtgagaaacgaggctattttattatcgtgtactccgtcattatttatc

SEQ ID NO: 245004 - DNA, 122 bp, Homo sapiens
ctcttggttagcttcctttctgttggttcctttctcctttgcagaggcaaaaacagcacacgcttttagttggagtcttgctgcctcctgggatgttcttcaccaccatcctggggattcac

SEQ ID NO: 245005 - DNA, 122 bp, Homo sapiens
ggtatcaaaccagcaaaaatcctgagattttggtactttaaaattctacggtatgctggacgtcagcatactgagtgggggtattgtaattgtcaggcttaaggtgaaagttgtagtttact

SEQ ID NO: 245006 - DNA, 122 bp, Homo sapiens
gaggtcactgccggatctaaagaggagggggtttcggtggaggcgacagaggtaggggggcggcgagtccctagagactcaccgtgtacactgagatagagctcagggtcgaggtccggccg

SEQ ID NO: 245007 - DNA, 122 bp, Homo sapiens
cgctaacaacaacacaaacaccgccggcccggctcggtgctccgctgcccacagtgcgctcggcaccagggctggatttatagcaaggagccccgactgtaagaagtaattcatgagtcccc

SEQ ID NO: 245008 - DNA, 122 bp, Homo sapiens
aacctctaagtgacagagccaggatttgaacctagatctgccaggcccccaagataaccacgaagagagaaagaaacagaggctagagccccaggaggaaggagctggcagatcgtctctga

SEQ ID NO: 245009 - DNA, 122 bp, Homo sapiens
tggccctccctctgacactctccgcaacctttgttttggattttcctccctgtaagctgtcgctgtttcccgtgtctctgtcgccattccctcggtggccggtgcgcaggggataccaacgc

SEQ ID NO: 245010 - DNA, 122 bp, Homo sapiens
tgctcattccaaatattgatggagaagaggggtagtgaaatactgggttaggaaacagctcggacaaaggcatgtggaaaggagagagatgtcaagatgcattataatggcagcctcttgaa

SEQ ID NO: 245011 - DNA, 122 bp, Homo sapiens
cgatcccttaaaactgattgtcccaactcagaggccctcattttctgcaatggtgattatcggaccaagaggcccgggatcccagcgtctgctgctctcgcttctgctccttgcagcctggg

SEQ ID NO: 245012 - DNA, 122 bp, Homo sapiens
taacattcagctttgagccaaatgtcttttctacaacaaatcttcctttctagtaaccatcgtccgacctgcctggttcctcacctaacaatccatggaaaatgccaggttaactggcagtg

SEQ ID NO: 245013 - DNA, 122 bp, Homo sapiens
ttttgagtaacagggctaaggggagtgaagtcttcttaccctcggtgtggctcctggagacgccttcccgctctcagcccgggctctcctgctgggtcctcgccgcagggagcgactgtaat

SEQ ID NO: 245014 - DNA, 122 bp, Homo sapiens
tggaaaaggaaatttatatggagaagtaaacattaataggctgtgtatccacatgcaggccgaaggagcaattactgtggccagggtcatgagaacagcaataattagtgagtctccaaagg

SEQ ID NO: 245015 - DNA, 122 bp, Homo sapiens
ctgtaggctgccccgctgcccactgagagccctgcctgctcctggctccacagccagccccggacccttcgtcacagcaccacgtcccggggactgccgagagctgctgcaccaggcacgtt

SEQ ID NO: 245016 - DNA, 122 bp, Homo sapiens
tttttcttttttttttgagacggagtcctactctgtcgcccaggctggagtgcagtggtgcgatctcggctcactacaacctcggcgtcccaggttcaagtgattctcctgcctcagcctcc

SEQ ID NO: 245017 - DNA, 122 bp, Homo sapiens
agtgtgtgaatgagctcttaatccagatctcagaagtctgtgcactccccaagctttagccgggtgctaggaggtgggcaacctgggtgactctgtgtgtttagtgggagtggggtattcgt

SEQ ID NO: 245018 - DNA, 122 bp, Homo sapiens
tgtaaacatcccaaagatccgaaagaaaggagacagtttaaatgactcctgtcacacccacgtaagggtttactgtgcagtatttagggattaggtggagcaggctattcagcatgtttgta

SEQ ID NO: 245019 - DNA, 122 bp, Homo sapiens
aatcggcagcaagtgaagagctgcggccaccaatgagctggggcttgtgccagccgcggccgccgaggcccgtgccccgcggggggaacagatgaagcacatctggacagctgtgcggcctc

SEQ ID NO: 245020 - DNA, 122 bp, Homo sapiens
cctaatgaatcacagtcgatggcagattaagagattctaatgaatattcatccagacattcgcaaccagcttcacagtttataaactgaattatggttgatttgcccttttaaaaatgaata

SEQ ID NO: 245021 - DNA, 122 bp, Homo sapiens
ctttgaggcctattttgggctcaatgaactggctgagggcattccggcatttctccaccacgtgctccatctgcaggtaggaggcggctgtaaggtagttgacgatgtccctaacagcgaat

SEQ ID NO: 245022 - DNA, 122 bp, Homo sapiens
ggagctggcgcgtgctgcctggaggtgtacctgccccctaaggtcccctattgataggatcgcttttaaattggaagtgggaacgtaacggaaacgtccactctgttcttgccatcttcctt

SEQ ID NO: 245023 - DNA, 122 bp, Homo sapiens
ggttaattataaaatagattctggctgttgcgtgttagcgcgcgtcccggagtgcgcatgcgcagcggcgggggttgttccggcagcctttcactgaggccacccgccagtttcaaattcag

SEQ ID NO: 245024 - DNA, 122 bp, Homo sapiens
ggagatccaccaccgcttcaagaacttcctgcgcactcacgtcgacagccacggccacaacgtcttcaaggagcgcatcagcgacatgtgcaaaggtgtggcttccctacgcccccgcctca

SEQ ID NO: 245025 - DNA, 122 bp, Homo sapiens
ctctcccagccgtttcccagcgtgtcatgtgctgagaaatggtgggcttagccacgcaaacgtttactgagcatctactatttggtaggagctgttaggcaccatgctagcagtggagataa

SEQ ID NO: 245026 - DNA, 122 bp, Homo sapiens
tgggcgggcaggggcgggcctgagggacagggcctccccctacctctgctccgtaccctccgccccttcagtctggggctccgggtaaagtttcagcctccgcacgtgactcgctatggccg

SEQ ID NO: 245027 - DNA, 122 bp, Homo sapiens
ctgagctcatgattcttctcagtctgcctctcttgctttctctcttacttttccctaacacgtatagacactatgtgccgtcaagtctttgctgcttgctactccctgaatacttagtactt

SEQ ID NO: 245028 - DNA, 122 bp, Homo sapiens
tacggcattctacctcaccctctttgtgccctgccgcaaacccaaacaacaaaaatgaagcgtctggaaggcctctcagttagccttggacatgtccgacccctgtaggtgtcgactggatg

SEQ ID NO: 245029 - DNA, 122 bp, Homo sapiens
gaaatctagccccttcttcagggccgagagaattttgagctctagccatctctcggttgccggcagtaaaaggacacctgaattaaaaaaaagaaaaaaagaaaaagaaacttatgggatac

SEQ ID NO: 245030 - DNA, 122 bp, Homo sapiens
ttggcccggcagaaggacacagtgagccggtctgaggcagcctacggcaccaacactgcgcggcagggccgggccgcccccgccttcaaaggtacaggccctgcacagagagggaggcaggc

SEQ ID NO: 245031 - DNA, 122 bp, Homo sapiens
gtgagtggaagaaacggtgtccctgacaaggtgcctggtggcctcacccggaggaaagcacggtgcagaggaaacggttcagtctggtgcttgaagccccaggacccccgagagagccggac

SEQ ID NO: 245032 - DNA, 122 bp, Homo sapiens
ttctccaccgaaaaggcggtgctcagcccctgctcatgcttccccagaccctggccctcccggaagccgtacttctgtatgatcttgtgcgccaccgtgccccccaagttagcgaggaagga

SEQ ID NO: 245033 - DNA, 122 bp, Homo sapiens
gctccctgcccctgccggctcaagcagacactgtggctctgcctaccatctccaatccctcgcccggccaagccatccctcggggctcagctaaagtgtcacttgaattgtgcattcttgca

SEQ ID NO: 245034 - DNA, 122 bp, Homo sapiens
gcaaagtcagagcttagcaaaagtgataggcagcagagctgacgggctgaggggcagctgcgtaaacctctgctttgggcgccacaagccacaagccggaccaccacgtgcgtacaggggca

SEQ ID NO: 245035 - DNA, 122 bp, Homo sapiens
ccagatgatacctcagactctggctacggcactttgatcccaggcacccccacggggtcccgctccccactgagccgtctacgccaaagagcccttcggcgggaccctcgcctcaccttctc

SEQ ID NO: 245036 - DNA, 122 bp, Homo sapiens
tggccgcgggatgctgggcggcgtcaggtgagcggtggtcgctgggcctcaggtaaagggcgccaacagtggtgggccggctggggcgttggtgcggcctgggagctggcgagggactcgcc

SEQ ID NO: 245037 - DNA, 122 bp, Homo sapiens
acattaaaataccccagcagtgtgcttttgtgcttgtccatgctcacatcagctcagcctcgagctggctgttgaaaggcacattttatttagcagactgagatcataataggtttttgtta

SEQ ID NO: 245038 - DNA, 122 bp, Homo sapiens
ggtggatctgtgtttgggaccacaagccaggttctgcagtctcccggcttcccgtgtaatcgcatgcataagtttgtggtgaaaactcaatgggtcacagataagcaaaaggtcttccgaaa

SEQ ID NO: 245039 - DNA, 122 bp, Homo sapiens
cccactggaggtcgctgctgcacccaaactttgcaaggaattcggtccagaggattacggcgaagaggtaaaagcgaccctcagtttcccccagtcctgctcattttggtcacgcctctttg

SEQ ID NO: 245040 - DNA, 122 bp, Homo sapiens
ggtcagctcacgtgtcagtcagagtctgcctctcagggcctctgccgaaagcgtggggcacgtgactgtgacggcatgggttggcgcatgcgcttcgttcccggagtggctggcggcggagt

SEQ ID NO: 245041 - DNA, 122 bp, Homo sapiens
gcttccgtcgaaagtagagttaagaatggaatggaaaaagactgaggcctgcatagcgcacgcacggggatttcaaaatggattcgaaaacactccacaatgcaatcttgggagatcgcaac

SEQ ID NO: 245042 - DNA, 122 bp, Homo sapiens
ttggtctgtgccttggatgtttttccacagataagcccaaaagagaaccacatcttaaaacgcccgtgaccttgaatggtctttccggaggggcggctggatttgtgctctcatcgtctcag

SEQ ID NO: 245043 - DNA, 122 bp, Homo sapiens
agatactacacttgatcttagccaaaaggccgagaagcgatacctttacttcggtcgcctcggcggccttatccttcccatcttccaaccagttatggtaactatccaggcactaaatgtta

SEQ ID NO: 245044 - DNA, 122 bp, Homo sapiens
ctccctccctccctagtattgggactcgctggcgtagggatgctgcgctcaagggtgcgacgccaactgggctcgcgcaggcgcgcgccgtcgagcgggagcgggacacctgggctcctcct

SEQ ID NO: 245045 - DNA, 122 bp, Homo sapiens
ggggcgagccgcgttgggctggggtgaggccctggagggactggggctcccggatcacggcgcccttcccccgcccgcgtgtggtcgtgcaggctcgtacgtgccggggcgcatgcagctgg

SEQ ID NO: 245046 - DNA, 122 bp, Homo sapiens
gcggggcacaccgcccgcctccagatcccccattcacgttgagccggggcgcgctcggggcggtcgcctgcagtatcagtatcagcatcagcatcagcatcagcatctgcatgagcatcagc

SEQ ID NO: 245047 - DNA, 122 bp, Homo sapiens
agagaaagcctcaagggggcccgagggtacgctgtgctgcggagcatgcccaccaggtggcgatgccagcggcgggcgggcctggccggattggccgcgccgctcttgccgtgggtgccgac

SEQ ID NO: 245048 - DNA, 122 bp, Homo sapiens
aataaaaaaactcagcaagtttgcaggatacaagatcaacatataaaaatcaattgtagccgggcgctgtggctcacacctgtaatctcagcactttgggaggccaagtcgggcagatcacc

SEQ ID NO: 245049 - DNA, 122 bp, Homo sapiens
ccgccccgccgcgtgggggcgcgcgatctgccgtctgagttcaatgcgactccggaaggacgcaagggagccgcgcaggtggccagctccttaggcgtgtccgtcccagagcaccctggctt

SEQ ID NO: 245050 - DNA, 122 bp, Homo sapiens
ttcgcgccctccaggaaaatgcgcgatcgggaatgtctcgaagtcagtccaggaaagagtcggcccctagtcgtgggggattgggccagggaagggcagggcggggcggggccacgccgccg

SEQ ID NO: 245051 - DNA, 122 bp, Homo sapiens
tttaattaaagcagggagagttccttcatgatttggtgatgctactaacgcgggcgtgctcgcgaggcagagcccggctgccgcggaacctggaggcctgggagccacctactcgtccagac

SEQ ID NO: 245052 - DNA, 122 bp, Homo sapiens
gtgctcgcaatgaatacggcaaggttatgtgtgcttgcctgcatccggcatggttatctgcgcttgcaatgtgtccggcacggttatgtgtgattacagtgcctctggcatggttatcagcg

SEQ ID NO: 245053 - DNA, 122 bp, Homo sapiens
acttatttctcagcgagcccggacaggtgatacttgtgctaattctgtgatttcttcctccgagcctcacaggatcttctggtaggaggagctggttttctttcatgtcatacgtttctcat

SEQ ID NO: 245054 - DNA, 122 bp, Homo sapiens
cggggcacccgtgtgcgcgcgaggatttcttttgcagagaatgaaaccaccgttcctttccgtccgtggtctactccggggtccccatcccacgtaagtgctgtggaaccccggggtgatga

SEQ ID NO: 245055 - DNA, 122 bp, Homo sapiens
aggtctcgatggtccggggggtaaccaggaaccaggatgaatgtcctgctcacctctgcccggtgcccattcccatccacctgcaatgcttcctgcaaatccggaaacacagcctcatcccc

SEQ ID NO: 245056 - DNA, 122 bp, Homo sapiens
gaatggtacccagaagctcgggcgctggagggcggctgtggagtgaggggcacacgggcgcgtggaggcagttagcgacagacacacgtgcgccggcacatgcacacagaggcgggcacaca

SEQ ID NO: 245057 - DNA, 122 bp, Homo sapiens
gcggactgaggactgaggaccaagggggcccaggccctgccctcctacccggaggggctccgtttgcattccttggtgctctctgagtgcagctggtgtcccgccctgttctgggcggacgc

SEQ ID NO: 245058 - DNA, 122 bp, Homo sapiens
tctacctctccgaaggggttcggctagcttttccggggacccttccctctctaggtgccacgcacatgtggtgctggagtaaaggcctgcacaagccacaggctcccccttctcgctagtat

SEQ ID NO: 245059 - DNA, 122 bp, Homo sapiens
tccttcctcttctgccaccagccaggctgcttctgaggttcgactggctgcccagctgcccgccctccctcactcgccgggtccatgcatctttcccggccccagtccagccatacccggtt

SEQ ID NO: 245060 - DNA, 122 bp, Homo sapiens
aatattaaggctgacaggaggcgaattgaagcagaaggtgggccgcggctggagaggaggcgccacggtgagaattcctcaggccagcctccctcggtttccctcagtgactccaactcccc

SEQ ID NO: 245061 - DNA, 122 bp, Homo sapiens
ctggcctgtgcagctgaccccacggccaggtcctccttcacgttctcgccaccccaaatgcgggcaccgcggcgccaaacctgctcttcccactgttgtcaataaccgcagcctggccgaat

SEQ ID NO: 245062 - DNA, 122 bp, Homo sapiens
agtaggaagggggggcagacagagagaaaagtcacagttacaatgacaggaacagaaacacggacagtcaccaagggccagacacacagcgggggtcagggctgcaaaccgagaaggcagaa

SEQ ID NO: 245063 - DNA, 122 bp, Homo sapiens
gacagtcaggaacaggaagacccatgaggagggagcccacaggccaagtcagcacccgcccgcccctagtccccagcacaatgctaagttgcagtgcccgactgttctgctcagaactggaa

SEQ ID NO: 245064 - DNA, 122 bp, Homo sapiens
tgggagcttgcccatttttctctgaagtaagaagatttgggcccagcagtgaggatcagacgtcaggcagtgtggaagactgaagccatccacagttaattttctagcttgttgcagagttt

SEQ ID NO: 245065 - DNA, 122 bp, Homo sapiens
gggaacacacagtgtggctgcgtgattgccagtgtgtacagggggaacacacagtgtgaccgcgtgattgccagtgcgtacagggggaacacacagtgtggctgcgtgattgccagtgcata

SEQ ID NO: 245066 - DNA, 122 bp, Homo sapiens
ccggaactcagaacctgcagccgacgggagcctttggaggcttaatgactttaattatggcgagaaatatcttctcccggtggggaggggcgcggccggtggcgaggagggcactttcccgg

SEQ ID NO: 245067 - DNA, 122 bp, Homo sapiens
ggccgggtctgagggaggggctttgcggggacactcctgggtaccgatgggatgaacttccgctgggcctgaaggcctgggatgcttttgggccggccagtgcggggtcaggtggttggagc

SEQ ID NO: 245068 - DNA, 122 bp, Homo sapiens
cggggctgcagccggggcccggtctgggtttctcagcggtcgggggtcgtaccctgggtccgcacctcctcccagggctctgcgtagtgggctgcgtcagaccctggggagtgcgagcaccg

SEQ ID NO: 245069 - DNA, 122 bp, Homo sapiens
ctttatttattttgcttttgctttttcttttgagatgctttatttaaagtacactggggccgggtgcggtagctcatgcctatttgtaatcccggcactttgggaagccgaggcgggcggat

SEQ ID NO: 245070 - DNA, 122 bp, Homo sapiens
actgtttgcacacacacaaaagggccgaggagccagggttggtgttggatatgcccagtacgcgtgctgggtgttggaaggatggggccggcggtaacaagaatcgatatatatttaccgcg

SEQ ID NO: 245071 - DNA, 122 bp, Homo sapiens
accccgtctgggcaagtccctagcagatggcgtgcacagaaacgggctgcagagagaggacggtgcctccaatgcttggactttcctctgatgccagcctcagcccagcctctgccgccctg

SEQ ID NO: 245072 - DNA, 122 bp, Homo sapiens
ggctcacaaagctccacgcagacccacaagtgagcgaacacacatctctgagcagatctgcgggggcagaggagcgcgcttcgctctttcctgcacccccagcctcctcgcctccccacccc

SEQ ID NO: 245073 - DNA, 122 bp, Homo sapiens
cacacgccactagagacaagattaaaagcgagagcgagagagaaaatgcttaaaacaagtcgctgagcagctcggagcctgttaaccagcgcataatgccccatgttaaccatcctggggga

SEQ ID NO: 245074 - DNA, 122 bp, Homo sapiens
aaatgcagatacattaatatgcaaatgtgcttttcataagaacatatcacaggttgcacacgctcaaattacacttgggaaaatgatccaacataactgacacacactattacaactccgtt

SEQ ID NO: 245075 - DNA, 122 bp, Homo sapiens
gcctcaggtgatccacccacctcggcctcccaaagtgctgggattataggcgtgagccatcgcccccagccagcacctgtttttaggtcatcatttctgttggggtttaagagttgaatacc

SEQ ID NO: 245076 - DNA, 122 bp, Homo sapiens
gcaggaattccgagtcccggctggagcgcgatctggaatctgactcgcttgaaacagcaccgcggtggattcggagccgggtgagcagggaactgcgcctcagcccctcccacgggccgccc

SEQ ID NO: 245077 - DNA, 122 bp, Homo sapiens
tgcctcatagacctttgctgtaagcaggaaatgggccaaaggctgtaagcgcttagcacacggtctggcacatgagaggagctcagtaaatatttgctgctattatcgttattactgtgatc

SEQ ID NO: 245078 - DNA, 122 bp, Homo sapiens
taaaattacctaactcactgtgctgttgtgaggattcaatgagatggtaactgtaaagcacgtggcacagatcctaacaactaacaaattacaggaccatcaattcactctatccagtagca

SEQ ID NO: 245079 - DNA, 122 bp, Homo sapiens
ctccctagtgttgctcgagaggcctgggtcatgacgccttcccttactcatgcattctcacggcacttgctgatttatttgaagactcccctattcagaactcctcagaatattatttcagg

SEQ ID NO: 245080 - DNA, 122 bp, Homo sapiens
agccaggcagcctcccgaaaggaagtgccggcgagggatccagatgcaaacagcccaggccgcagggctggtccctctctcctccacaggaatttccaatgcaggccgccccacagagtaag

SEQ ID NO: 245081 - DNA, 122 bp, Homo sapiens
aaaccatgtttaagtcttcttgtccttgtctaacaaacttgttatacattctttcaacttcgcataccacattcagacctctcttcactgttgtgcatccaaacactctccatttctctctt

SEQ ID NO: 245082 - DNA, 122 bp, Homo sapiens
cagcagagattagagtgacagaacttttgtgacttgatatcacatattctttccactgtccgatgctcaggagacttctttagtgtctgaaagtttttgtctttggttttgcaagcttcctt

SEQ ID NO: 245083 - DNA, 122 bp, Homo sapiens
gggaaggctcttcctgattctgacctcccgccctctgctagccccagcctccctcaaccccgcccctgcggctcaaactcttaaagggaaacacaacttttggttctgctcctgctgagcca

SEQ ID NO: 245084 - DNA, 122 bp, Homo sapiens
gatggcacagttaccccaacatgggtaccccttattggctgcagctcttcaccacaggatcgctgggcacagggcttggtgctgagcagactaccttcctctttcataaatattctgtaccc

SEQ ID NO: 245085 - DNA, 122 bp, Homo sapiens
ccggcacttcctccacacctgcagacagggagggcatggctgtggggcctcagaggagcccgtcccggcccgcagcacgtggggtggccgtgctccggctggcgtgtccccgtcgcacgccc

SEQ ID NO: 245086 - DNA, 122 bp, Homo sapiens
acctgtgcccccagggcttcagagttcatcgagcccagccctatcttggcaagaccctgccggccccagcctgcaacaactgcacaacattcgaccttgactcatttccttatcgcctggcg

SEQ ID NO: 245087 - DNA, 122 bp, Homo sapiens
tgctggcatctgcaccattcttagcgtcggcactgctttgcaccccccggctggccagcgcgggatgtgggtggggaaatagccactacagtccggagtctccccactccctccccaggccc

SEQ ID NO: 245088 - DNA, 122 bp, Homo sapiens
ccagctgaactattctagaatttccattattttaaagcaactcttcagagtgtttagccccgagttgcaccccatttcagtttttgcaaccccatcctccagaagctcagggactactgaag

SEQ ID NO: 245089 - DNA, 122 bp, Homo sapiens
ccattgagagggcagccctctcaatcatcataaaccgaggctgaaccaagatagcaaatccgcatcctccatcccctgtcactggacaccctgtattcaatcacccacatattcatttcttc

SEQ ID NO: 245090 - DNA, 122 bp, Homo sapiens
caaaactcaagaacctctactaggctaactgattagtgaaaacgtcgtgttaacagcaaacgccttgagtgtagcgctcctactcctaacccccggctctctacacggcaatcacccgaacc

SEQ ID NO: 245091 - DNA, 122 bp, Homo sapiens
tacaatgaaagaaaataacacattcagtccctcagtgccactagctatatttccagtgctcggaagccacatgtggctgatggctgtcaaattggacagcacggtagggaacatgtccatca

SEQ ID NO: 245092 - DNA, 122 bp, Homo sapiens
actcgcctgcgcttcacctcacgtgaggattttccaggttcctcccagtctctgggtaggcggggagcgcttagcaggtatcacctataagaaaatgagaatgggttgggggccggtgcaag

SEQ ID NO: 245093 - DNA, 122 bp, Homo sapiens
catcccagacgatgggcggcggggcagagacactcctcacttcctagatgtgatggcggccgggaagaggcgctcctcacttcccagatgggatggcagccgggcagaggctgcaatctcgg

SEQ ID NO: 245094 - DNA, 122 bp, Homo sapiens
cacccgccttggcctcccaaagtgctgtgattataggcgtgaacccctgcttcttgaagccggggctgtttctagggacagcttccccaggatgcctttggctctgcagctgggagatccag

SEQ ID NO: 245095 - DNA, 122 bp, Homo sapiens
aattcctgacctgagtttcaccctttgatttctctttctttttcgagacagagcctccgtcgcccaggttggagtgcagtggcgcgatctcggctcactgcaacctacgccaccctggttca

SEQ ID NO: 245096 - DNA, 122 bp, Homo sapiens
ccggagagcacgagacggatgacgaaccagcaccagcgaaggggagggccccggagaccacgagacagatgaggaaccagcaccagctaaggggagggccccggagagcacgagacggatga

SEQ ID NO: 245097 - DNA, 122 bp, Homo sapiens
acgaagtattagtcatctattcactcatcacacatggagcatgcctagtgttaggaggcacgtggtggggttggcgggggtgtggtcattaacatggtgaatgagatcttcagaagcagtgt

SEQ ID NO: 245098 - DNA, 122 bp, Homo sapiens
actgccgcatctcgcgccgcctgcgacggccgccgcacgtgggtcgggcccggaggaactcgctgcgcatcatcttcgccatcgagagcacgtttgtgggctcctggctgcccttcagcgcc

SEQ ID NO: 245099 - DNA, 122 bp, Homo sapiens
gtctgtctgcgacgtggggtcggacgggcgcctactccgcgggtatcaccagcttgcttacgatggcaaggattacatcgtcctgaacgaggacctgtgctccttgacagccgcagacacgg

SEQ ID NO: 245100 - DNA, 122 bp, Homo sapiens
ttgctctatgggaaaaaaacgatttaccaattaatattactcagcacagagatgggggcccggtttccatattttttgcacagctagcaattgggctccctttgctgctgatgggcatcatt

SEQ ID NO: 245101 - DNA, 122 bp, Homo sapiens
agggagtttttagatggacccacagaggaggaagcaatgtgaaaatgaaagcagagatcacgtgatgcagccacaagctcaagaatgccagggccctcagaaactaagagacaaggaatgaa

SEQ ID NO: 245102 - DNA, 122 bp, Homo sapiens
ggccgacaccagtatcttttaaaaacgtttgtaggcaggtgcggtggctcatgcttgtaacgtcagcactttgggaggccaaggcaggaggatcgcttgaggccaggagttcgagaccggtt

SEQ ID NO: 245103 - DNA, 122 bp, Homo sapiens
ggtgtgcaaatgcagatgtggcctgggctgggagcacacaggcttgaccccgcaggcagccggtaggccagggtgtcaggtcccctgtgttagccggagccttctcatcttttatcctggta

SEQ ID NO: 245104 - DNA, 122 bp, Homo sapiens
agcacaccttgacgtcggctgagggagcgggacagggtcagcggcgaaggaggcaggccccgcgcggggatctcggaagccctgcggtgcatcatgaagttccagtacaaggaggaccatcc

SEQ ID NO: 245105 - DNA, 122 bp, Homo sapiens
ctcaccgcccaccaggcacacggcgtacatgaggccgcccaggaagaaggcgttccacagcgtgcccaccacggcaaagatcaggatggtgcccaggttttctgtgaactgccgcagtggca

SEQ ID NO: 245106 - DNA, 122 bp, Homo sapiens
cgcctccgctccctccggccgtagccgccaggggaagggcggctagaggcgcgcgccacgcggagacagttgcgaagacccgctcccactgagcagcagcaccacggcgactgtattttagc

SEQ ID NO: 245107 - DNA, 122 bp, Homo sapiens
aaggagagacactctaggaagcatcccattagtagcaattaagtcaggcaaaagacagcacggggctttttttctgtctttgtgtctcccctattgcatgtcagtctcatacactaaggctc

SEQ ID NO: 245108 - DNA, 122 bp, Homo sapiens
aaaacgctgcgtacgctttccctgcaagtgtgagggaaggtgcctggcaggtcctcggcacgggactccctgctgaaccgagctgagccagcccaggccatgacccatgcaggctctcaccc

SEQ ID NO: 245109 - DNA, 122 bp, Homo sapiens
ctgtgggaaatctggcccagtccaaacctctcaggctcctttgcactgtcaggggcaaaccgccaactaatggtggtcacccctccccccaggaacttagtcattccaggcacactccagac

SEQ ID NO: 245110 - DNA, 122 bp, Homo sapiens
ttttccaggcgctcaggaaagcatgtcaagcactcaagcactctgtgacaattccacccccggcccagtctttccctcttcaccccctctctgtgatgtcgaatcccatttcacagatggag

SEQ ID NO: 245111 - DNA, 122 bp, Homo sapiens
ggagggacttggcctcggctggcacaagctgggtattcatttattcatgcacttagcagccgcccatggggctcatgcctggtgcaggggaaagggggagcaccgcagactgcctcctcccc

SEQ ID NO: 245112 - DNA, 122 bp, Homo sapiens
ggcacggctgcctggaaccggagctgtgagtgaacatctgtccattcagcgcctaactgacgtgggtctgcgtgtgtgcaccagggtctggggtggagagctggggcgctgggatttgtatc

SEQ ID NO: 245113 - DNA, 122 bp, Homo sapiens
cacaagccgaggtggaaatgtgagcaagcggcagaatatgaaaacctctaagccgaaaagcgtttgggcattattctgagggcgctgggaaagaagtggcgggatcgtatcggtgtttcaga

SEQ ID NO: 245114 - DNA, 122 bp, Homo sapiens
gcccccgccttgttttgaaagccccttatttataacttttatactttgtgcaggtcgcggcgcttcctgcctcatcctcggctgcatggggcgggggcgctgtttttaacgtgcccgtttgt

SEQ ID NO: 245115 - DNA, 122 bp, Homo sapiens
aaagacttctggaatgaaagttgtgacctcagaatccctgttctagctggggcctcccggcgtcagaggcctcacacatcttccagggcaccttggcatacagtggtggtttcacgtatctg

SEQ ID NO: 245116 - DNA, 122 bp, Homo sapiens
ctgaagcagatgccctcttagggccccacagcctgacatgctgtagggcctgagaagcggcgtcgtggaggacgagatgtgtgagggcagcaaagagtgctatgtgtccagcagagggccct

SEQ ID NO: 245117 - DNA, 122 bp, Homo sapiens
agtcccgatgaaggtaaattcctcccagtaaagaccttctaaaaataataacttctcgagcgccgctccttcttcagctcgaaagagtaattgtcctcatttttatacaacataagaacaac

SEQ ID NO: 245118 - DNA, 122 bp, Homo sapiens
gctatcactactctgggccgttcctgtttggtgactcagggaccagtctggcatggccaccgctgggtccccagcattaagccctggagcatgagcccagtgaactttgaaattcaggaagg

SEQ ID NO: 245119 - DNA, 122 bp, Homo sapiens
tttggggattattcttattttctgccacttttaacttttagggattatttaggagtttcacggccgtctgcttttcgtccccccgattcagcgggccttcaggccgtgtggtcggtgctttt

SEQ ID NO: 245120 - DNA, 122 bp, Homo sapiens
ccagaaccgacccggaaaccaaagcgtgacagccaggggttgctagagcggccggcgcggcgcagcgaaccatcgagtttagccaggcgcggctagaagggcagggaggcggtgggagggga

SEQ ID NO: 245121 - DNA, 122 bp, Homo sapiens
gggacgagggaggcgcaacgtcacaggcgggagctgacaccacaatgctactgacactatcgctgggggaggcgattggcgcgcgccaggccgggggcgggaggaggccgcgggttgagcga

SEQ ID NO: 245122 - DNA, 122 bp, Homo sapiens
attcagcgacatccggctgcgactgtacagaattgcccctgtgaaaacactgcagtcattcgtgccggactggaggcctcccctaagctcagggaagagcagaggtctctggcctccctgca

SEQ ID NO: 245123 - DNA, 122 bp, Homo sapiens
tcgcaaccaatgcagctaagtcacagccaaaggctcgctgagagcagcgggggcagggtgcgctcgtcctcccgtccgcaagagcgggctcctgtctgaggctgccccagaccccccagccg

SEQ ID NO: 245124 - DNA, 122 bp, Homo sapiens
ctcgaactcctgacctcatgatccacccgccttagccttccaaagtgctgggattacaggcgtgagccaatgtgcccggcctatttgaattttttaatcatatactttcttttgctatctgt

SEQ ID NO: 245125 - DNA, 122 bp, Homo sapiens
tttccctgcacgtcgagaagtctgagacacatcatccaaaagtcacctttccctgcacgtcgagaagtctgagacacatcacccaaaagccacctttccctgcatgtcgagaagtctgagac

SEQ ID NO: 245126 - DNA, 122 bp, Homo sapiens
ggcccctgggcccactccacacatcacaggctagagacttcttgtctgcctcctttctcacgtctctccccctgagatagcatgctctcccctccctccttccctctcataatttgttccca

SEQ ID NO: 245127 - DNA, 122 bp, Homo sapiens
gcaagacgggcccacagaatgcattcgcgtagggagacaggaaaacgttagcggagggggcggaggtggcagagaggaaaacatgggcctggcgaataaaaaccacagtactacttctggat

SEQ ID NO: 245128 - DNA, 122 bp, Homo sapiens
gaagtagcccagagggtggagtccatatgctgcagtgagagttccatacttaggagtcttcgaattctgcactctggactcctacggaccaagatgatcaactctgaggaagaaaggtagta

SEQ ID NO: 245129 - DNA, 122 bp, Homo sapiens
gttttctgtcaggaacaagagaaatccaaataattgggaatattttgtcacttatttccccgtaatcctacctagccacaagataaaacaaaaataaaaagaattcagaagtaagaataaaa

SEQ ID NO: 245130 - DNA, 122 bp, Homo sapiens
tcatattgttgctcatagtgttgttcttcatggtatagctgctcacagtgtcgctgctcacgatgtcattgctcacggtgtagttcatggtgtagctgctcacggtgtagctgctcacagtg

SEQ ID NO: 245131 - DNA, 122 bp, Homo sapiens
tttctgataaaccacaactgcatgaatggtgagaagcttggatgctttttatttctgtggcgtcattaaagtcccacagtacccagcctttgctatgcacacccacccatgtccctatctgc

SEQ ID NO: 245132 - DNA, 122 bp, Homo sapiens
ccttcgaggctggattttagtggagggacacacgccaaagaccccctctctgctgagccccgtttgttgtctcggagcccacccgactctagccgctgaactctgacatgctgaggaaaact

SEQ ID NO: 245133 - DNA, 122 bp, Homo sapiens
agaggtgcgcttagctcacccacagtactttcagaacagttctttgttccctctctccttcgtgcaagaaacgtggcacccccgccggaacctggtgccccgcaggctgcggtgtggccatc

SEQ ID NO: 245134 - DNA, 122 bp, Homo sapiens
gggaactggaatctggacaagattgaatccccaggctttgcccaggaaaagtggaatcttcgtgaataggtcacttggaagaacaagacaagcgtcttgcttgaaatgacacccaataggtc

SEQ ID NO: 245135 - DNA, 122 bp, Homo sapiens
tcattcctgctgaggttcttcaagctgtgtatccaggctatgcaaacttttaaaaggaaacgtatgagctgcctaactctacaccaacactgtactccccaaaatattaagggaacgctttg

SEQ ID NO: 245136 - DNA, 122 bp, Homo sapiens
gctggcggcggggtcgggggctgccggagctgactccatgttttttcccaatgtagagatcgctggagatggcgagctccgagactccctctatcttctgttttcagagcaactctatggta

SEQ ID NO: 245137 - DNA, 122 bp, Homo sapiens
aagggttcatcaggatggagatatccggtgcaccatgagttctgtttccttaatcaacaccgttgtaacttgcccatccagttttgtgacattaattcaaacctgtgccctagtcctctttt

SEQ ID NO: 245138 - DNA, 122 bp, Homo sapiens
tggcgcgggcgcacgtccccagccgcgaccacagatccagcgcctcagtcccaaacccaccgctgcctccgccgggctcctttagcactgctgctcggggctgccccacccacccctaccct

SEQ ID NO: 245139 - DNA, 122 bp, Homo sapiens
gtgagcacatccgggtcccactggatgggtgtgtgtggtggggggtgccctgggttgggtcgatgatgagaaccttatattgtctgaagagaggtgatgacttaaaaatcatgctcaatagg

SEQ ID NO: 245140 - DNA, 122 bp, Homo sapiens
cgctcctgggaaccccgccacgcacaggcctcggcggagggggccgcagggggcagcgcccgcctggacccttggcacttaataaagaagttcagtttgatgagcatggtggtgggccagcc

SEQ ID NO: 245141 - DNA, 122 bp, Homo sapiens
ctttacttttgtggggcacgacgagaaagtccgcagccccaaacagtgagtttctgagggcgagtcgggccggggccggcctaggtgggagggagccgagcaccccgaggagccgccaccgc

SEQ ID NO: 245142 - DNA, 122 bp, Homo sapiens
ggagttccaggtgggcgtgggtttggcagccccgcactaggagctgccggctggccttgccggccggggcagtgaggggcttagcacctgggccagcagctactgtgctcgacttctcgccg

SEQ ID NO: 245143 - DNA, 122 bp, Homo sapiens
cgtcctggccagtggcatcgcgttcccaggaaacctcgcttcagatattgcccaccaccccgccctattcacggttcctgggtcttcctggaggaatgacatctcagagaatgcggactcct

SEQ ID NO: 245144 - DNA, 122 bp, Homo sapiens
cccacatgctacccctgcagacatccctgttgccccgcacccccatgcccgggctactcccgggcgcctgcctgcagctcctgcccgccccccttggattccaacaggccacccagccatgc

SEQ ID NO: 245145 - DNA, 122 bp, Homo sapiens
atctaattaagtgagaggggacacaaaccataaagccatttttaggtattcagggatgcacgaaagttccctctcatgaccccttcttaagaagggacttgcggatgtgcttctgcaaagta

SEQ ID NO: 245146 - DNA, 122 bp, Homo sapiens
gcgcgccgaggtcgctgcgggcgcgtccgtaggcgctctccaggtcggccgaagagaacgcgtcaagtttgaccttcttgaccaggaaggacctgggcatgattcctgcggggctccggcgc

SEQ ID NO: 245147 - DNA, 122 bp, Homo sapiens
cacacacacgattctctgatcgcagttttggattcaggctccctgctttcggcatctggacgccgcaggcggaagctagggtcagggtggaacgctgcctctggagggagcccgggcctaga

SEQ ID NO: 245148 - DNA, 122 bp, Homo sapiens
aggttgccacagttttgatgatcatctctctcccaaccaagatggtggaaaaagcaaaaacgtggtgaatcttggagcaatccgacaaggcatgaaacgcttccaatttctgttaaactgct

SEQ ID NO: 245149 - DNA, 122 bp, Homo sapiens
tcttgcgggttgaggttttggagtccacctctgggatcttccttggcctccagaattcttcgcctgcaccgaaggaaacttggatttgtgcccgctttgggggggtctcgctttccttcttg

SEQ ID NO: 245150 - DNA, 122 bp, Homo sapiens
ggcgctgcccgcgcgcgacggtctggcaccagcgacccatcccggggtggcagccgactgcgtctctccggaaggcgctcccagtgccgcccccacgacggcgccccctgttggccgcatgc

SEQ ID NO: 245151 - DNA, 122 bp, Homo sapiens
ctgcagtcggcggccgcggggcccagcgtgagcctctacctgagtgaggatgaggtgcaccggctgatcggtcttgatgcagaactttattatgtgacaaatgaccttattattcactacgc

SEQ ID NO: 245152 - DNA, 122 bp, Homo sapiens
tgagcatatgtcacgggcaacccagtgcccggcgcggagtacatgctggccgcacggatgcggggattaaaagttaacaagttttgttctcggggagatgaaattgggctttagaatcgcca

SEQ ID NO: 245153 - DNA, 122 bp, Homo sapiens
gttcctttggtgggtgtcggcaaatggggaccggaccccagagtccagaggcggggctagcgcgcgctcccaaactgttggctctttcctcccgtcccgccctttccctgcctttccgttcg

SEQ ID NO: 245154 - DNA, 122 bp, Homo sapiens
agagcaagctgtggcgtctcttataacttaatttcagaagtgacgtgtcatcacttctgccgtattctcttggacacactgacccaccctggcccaatatggaagggagttacacagggtat

SEQ ID NO: 245155 - DNA, 122 bp, Homo sapiens
aagtcgatttgatcacaaagtgaccctgcgtggttgttttgggagcgcagtggctgaaggcgaaggaggtgggggtgtgtcgagacttgtggaccaggtgactgctgagaaggagaaaataa

SEQ ID NO: 245156 - DNA, 122 bp, Homo sapiens
tttgacgtgacctttggtgccagcatctttcacgttcaaggtgactggtatcgtacagtgcgtgacctttagcatgacctttggtactgccatctttcacattcaaggtgagtggaatcgca

SEQ ID NO: 245157 - DNA, 122 bp, Homo sapiens
gttctgtttccatgtttcagtcaatctgtctagagaacaatggaactcctgaaccattcccgtgctcaaatgtaacgtaaaaaggacaatataaaatatcaggcttctgtgtttgaactgct

SEQ ID NO: 245158 - DNA, 122 bp, Homo sapiens
gaaccacccagaaggaatcaagccaaggttcaaagaaacggattagagaacatgttccctcgggtgtctgatgctgatagaaaaagatagcagcaaatccacatgcctgtatgtcagctaga

SEQ ID NO: 245159 - DNA, 122 bp, Homo sapiens
taccgctgtcttcagggtgaccctgaagagttaggtccttgccgtgagtataggtgaggccgaaacaagtgacccggaatctaatcacagcctgggcagagtgtaggaagggcgcaaggatg

SEQ ID NO: 245160 - DNA, 122 bp, Homo sapiens
cccccgggcgctcgggtctccctggtgctggtgggcagggacccggcccggggttccgggcgccgagccgcagccctccgcgtgcgctcgggccgccccccaaccccggctctggccacttc

SEQ ID NO: 245161 - DNA, 122 bp, Homo sapiens
cccagcgctccatctccgaaactgcgtgggggatggcgtagacctgtgccctccgagcaccgctccccggcagtcggggatcctttgtgctgcccggcgttcggcgcgggctgcaacgtttc

SEQ ID NO: 245162 - DNA, 122 bp, Homo sapiens
gccggatgacagatgctcctctccccatcccacaggcgacatttagtgccctccgtgccacgagataccgggatggctgcaggggcaccacaattagatcggcaggatgtgaaaagagtcaa

SEQ ID NO: 245163 - DNA, 122 bp, Homo sapiens
accggggaaaggcgcgagttgtgaagtttctagagcgcatttttccccgtttccccgagtcgctccgcaggagcgatgctgcctgcggctgggggtgtgggcaccggggttcgcgactggag

SEQ ID NO: 245164 - DNA, 122 bp, Homo sapiens
gacactacctgtagggggcaagcagaggaagaggaactcatgagacagttacaaaagcaacgtctggagaagtatgtggagacttaagaatcatgtcacaaatgccaagagagtagcgtttc

SEQ ID NO: 245165 - DNA, 122 bp, Homo sapiens
ggctcggcccctgctgaggttgtggccaggctctaaggaaatggatatcggagaggccttcgttgtggttccctagaagcagactctgaagcaaggatttgcgtgtaagtgaatgattgagg

SEQ ID NO: 245166 - DNA, 122 bp, Homo sapiens
tccttctgggaattgtggtctcagacgttccattcccagggtggcgccgctcggactccgcgtcccagcattccccgcacgagcccgggagcacttccgccctgttgtgaagtgggtgtctc

SEQ ID NO: 245167 - DNA, 122 bp, Homo sapiens
gggctgcgcggaccggccggaggagctactggagcagctgtacgggcgcctggcggccggcgtgctcagtgccttccaccacacgctgcagctggggccgcgtgagcaggcgcgcaacgcga

SEQ ID NO: 245168 - DNA, 122 bp, Homo sapiens
aaggggggaaaagcgatcctgaaagatacttgaaatcaacaggaaagagaggttcttgatcgctgcagcaaatggcaacttgtgcaggtagaaaaaaagatggtgtttagttttctcctgca

SEQ ID NO: 245169 - DNA, 122 bp, Homo sapiens
aatccatcacgatgcctgtggtccgtcctgaggcatagagggacagcacagcctggatggcgacatacatggctggtgtgttgaaagcctcgaacatgatctgagtcatcttttcccggttg

SEQ ID NO: 245170 - DNA, 122 bp, Homo sapiens
tacagggcacctaggagggaccccttcctggcccatccgcgccgcgcaggcgcacgcccacgcagcgcctagacgcccgagccgagcgtcccgtctcctagtaaccagccgctagccccctt

SEQ ID NO: 245171 - DNA, 122 bp, Homo sapiens
gcccgtgaggtcacaatgttgccagggcccagggggcagagcagacggagtgtgggccatcgtccccagtggtgaccagccctgccatgggaaactatagttcccacaaaaggaccaaagca

SEQ ID NO: 245172 - DNA, 122 bp, Homo sapiens
gggcggggcggggcggggcggggcggggcccgaagggccaccgcgcccgcctcggacctgcgaaccgggcaggattgccccttgcgtcccacgtcctgaccggctgggcagcgactacctgg

SEQ ID NO: 245173 - DNA, 122 bp, Homo sapiens
cccaagtgtggtcccagctttacctttttcagccttgttgcaaaattcgtttagccttcccgagcctcaattttcttatttataaaagaggcattcagaagagaggtttgctttgtgtttcc

SEQ ID NO: 245174 - DNA, 122 bp, Homo sapiens
taacgggctgcgcgcggaggctgctgggagggccgggcgcgctcacggagtgcgcaggcgcggccagtctcaagggtccgctcgctggtgcagcccctgctctgcgtgaacccggagccgga

SEQ ID NO: 245175 - DNA, 122 bp, Homo sapiens
gagtcggacggagtggtttattccacaggtttgaccagaggcaaatcctggctcgtctgccgaagtgaggagctggggagatgagtatatgaaggattgagtgctcggccacttagctgcta

SEQ ID NO: 245176 - DNA, 122 bp, Homo sapiens
tcccctgcctgacattcctatgctgctcccgcccccgcgtggctcctctgatgcccaaatcgccttttcccagatccaattaaaacagcgtttggagcaaggttgaaataatcacataataa

SEQ ID NO: 245177 - DNA, 122 bp, Homo sapiens
tcattgtcttaatgataaaatccaacttaattaaaaacttgcaaggccctcttgcaccctcgtcacctccctagccccaccgcttatgaatccaatgctgtcactccattccagacagaccg

SEQ ID NO: 245178 - DNA, 122 bp, Homo sapiens
ctgccgaaaatgaggtgcctggagcttgggacaagtcgaggcgtgcacttccccttgactcggacaggaaagagaatccctttctgtttgacacagaccatttctctgtgttgggaaatcct

SEQ ID NO: 245179 - DNA, 122 bp, Homo sapiens
ggggagcgcctctgcccagccgtgatcccatctgggaggtgaggagtgtctctgcttggccgcccagtctgagaagtaaggagcccctccacccagcagccgccccgtctgagaagtgagga

SEQ ID NO: 245180 - DNA, 122 bp, Homo sapiens
ggaggctgatgtaaaagtggcgcccgctgagattagggaagggggtgtgcgtgaggggatcgtgggacctggttctgccctgcactcccccacagaaagcggctgtattgcaaaggccgctc

SEQ ID NO: 245181 - DNA, 122 bp, Homo sapiens
cgcacggcgaggcatggacgctttcatgggtggttacgcgacagttgccaggaccgagggcgaaaccggctgcaaggcattgtgggacattggaggacttggaatatgcgctagaaggctca

SEQ ID NO: 245182 - DNA, 122 bp, Homo sapiens
cacaaaccacgtgccatccactcacctgcaactaatcagcagcaaagctaccgaataaatcggttccacaccctggggccgggcagcccagcacgtgaacccgggtgcccgggctcggacag

SEQ ID NO: 245183 - DNA, 122 bp, Homo sapiens
ttgtgcaaagaccctggttcacttggagaggaggtactataaaatttggaccccacaatgcgaatgaagggtatgtattgaattccctcagcccaccagcttaacacagagacagtgtgagg

SEQ ID NO: 245184 - DNA, 122 bp, Homo sapiens
tttctttttctctcgccatgcttcttcgggctgtgtacatgtgtggtggtgcctgagaggcgatacagggaatggctacactcttttactcccgcccctggccttcgtagtacccttgaagt

SEQ ID NO: 245185 - DNA, 122 bp, Homo sapiens
aaatcccctggactttcactaaccctctgacatactccccacacccagttgatggctttccgtaataaaaagattgggatttccttttgattgcgcgtttgtgtgtttctgtattagaaaag

SEQ ID NO: 245186 - DNA, 122 bp, Homo sapiens
catttgcaaatgcttattgtcaaggcagggagtgccagtacagatgaaagcaccccaatccgtctcctccagttctttaggtttaatcacatctctccaatcgccgagggaactggagattt

SEQ ID NO: 245187 - DNA, 122 bp, Homo sapiens
ggagaggccaatgggctagggcaacggttgcgacggttggattttgaaggagccaataggcgctcggagcggagagtttaagaggcgtaagccaggcgtgttaaagccggtcggaactgctc

SEQ ID NO: 245188 - DNA, 122 bp, Homo sapiens
cccaatgtgctgcaaggattctgcagctctgcagtcagtgggtgaagcccaaagctccagcgaaaacccaactgcccagatctgcaagctgtggggagggcaggccatttggccgtaaccca

SEQ ID NO: 245189 - DNA, 122 bp, Homo sapiens
ccagaaccttctcttcctgctgccctgggaggctgtgtctgcccaagccagccaccgggccgggtccactgcctggggatggctgtcccctgagctgctgctctgtccccaccacggaggct

SEQ ID NO: 245190 - DNA, 122 bp, Homo sapiens
gcagctgtcaacatctgggcctgcagttgaggccagacatggggatgggagcttggcccacgatgacttggctctctggggacgatgcagcatccgatggctccactgggcatattctaaaa

SEQ ID NO: 245191 - DNA, 122 bp, Homo sapiens
tacctgtgacagactgacatctatacatgacagtgattaaacttcactgaatacccaaaacggtaacttttttttagttcacaatctttgaattagacaactattcctgtttttatttaaaa

SEQ ID NO: 245192 - DNA, 122 bp, Homo sapiens
cctttgcacagacacggatgcaggcaaacacacacagtgcacaggcatcacttggaggtgcggccacagccttgcaggaacgggcactcacgcccacctctggctggtccaggagcgcacgg

SEQ ID NO: 245193 - DNA, 122 bp, Homo sapiens
tctaacatttgtgcattcagcaagtatttattaatgcctccttgtaccaagtctattctacgttctggggatgtagcagagagtaaaacaaagtccctgccctcagggggcttacattgtag

SEQ ID NO: 245194 - DNA, 122 bp, Homo sapiens
gggctgctctgtcatcccaggtttcagcactcggaaatcgcttgggcccccgcccagaggcggggcttgggtgggctgaccactcctctggcctccaatactgtcgctgacattctcgtcta

SEQ ID NO: 245195 - DNA, 122 bp, Homo sapiens
gatccatacagtggacaacccaagagtgaaccctaaactatggactttgggtggtaacgacgtgtccatgtacgttcatcagctgtcacaaatgcaccactgtagcgtgggagccagagagg

SEQ ID NO: 245196 - DNA, 122 bp, Homo sapiens
gtgccactccagttatttggcagtgtccagtaaaggtccaccacaatactactacacatccgctcggggatgaacaagggctgactgattggtaagctcttgaaaattcttaagctcgagcc

SEQ ID NO: 245197 - DNA, 122 bp, Homo sapiens
aagaagcttaggatccgacggtggccgcaagatctcatcatggatctgacccctgctcagcgcgcgccatttcgtcgttgccaaacgaaatcaagccccgcgtgcgctccaggggcgaagga

SEQ ID NO: 245198 - DNA, 122 bp, Homo sapiens
ggaatgagacattaacgaaatccctggggatgccaacttcctgaaagaggtccagatgcacgtaggatgggcataccccaggaagttcagccagatttctttgattcagggagaaaatcagg

SEQ ID NO: 245199 - DNA, 122 bp, Homo sapiens
aggctgggttactatgtgtacaattccccagctcagatgtgggaaattatgtttccacatcgaccctgtgctccctgggaagaaggttctccacatgctgagtagagtgtggttgctccatt

SEQ ID NO: 245200 - DNA, 122 bp, Homo sapiens
ctggtaaacaaggaccgggcagccaatgggagggatgtgcacgagggcagcacgagcctccgggccagcgctcgcgtggctcttctggcccgggctactatatagagacgtttccgcctcct

SEQ ID NO: 245201 - DNA, 122 bp, Homo sapiens
agctctgaccgggagtcagctcctcggggataccatcccccgacctcaccttctacctaccgcagcctgctagcctttccgggagaaaaggcatccttacctctggttgaaggtctcggggc

SEQ ID NO: 245202 - DNA, 122 bp, Homo sapiens
cagggtgcctcacatcggctgcgcctgcccgcgaggacaagaaggatggggtttcatcagcgggaatgacaccaaggaagatgtattttgtacagcagactgccataaagcagcagcagctc

SEQ ID NO: 245203 - DNA, 122 bp, Homo sapiens
ggggcagctccagccggggccgggggatgagggcagggggttcccggagctgggggcccacgtccagggcttcccaacaccgccgctcccgggcttcccgggaatccttgccccgggtggcg

SEQ ID NO: 245204 - DNA, 122 bp, Homo sapiens
catggcctgggtggccccgccccgcaggccctctggctaccaaacctcccagcgcccccgcgcccctttggagttctgaccccgcgggtgcacccgtgtctcctggacacagaggctgccct

SEQ ID NO: 245205 - DNA, 122 bp, Homo sapiens
gctcatgtgaagggctgggtgaggtggatcgctgtgtgcatgtttctatgtgtgtcatcacggtcctagcaatggcatccgctggcagggttgaatctgtcccagcttctctggggagccat

SEQ ID NO: 245206 - DNA, 122 bp, Homo sapiens
ctgaaccacagacagttctttaccctgaacctttgcatattttgttctcttagcttagagcggcccctctccctccgtctgcttggctaatttctacttgttcttcagattttatcttagat

SEQ ID NO: 245207 - DNA, 122 bp, Homo sapiens
accgccccacccatgcaaccgagcgggaagaaagctgtgattcgaggggccaggagaatacgggaaaagcttctgttctgcgcacagccagtgcggcctccattgctctttcagtttcccaa

SEQ ID NO: 245208 - DNA, 122 bp, Homo sapiens
gcaggtcccagcgaggcaggtgcaggtccccggagaggacctgggtgcggtccaggacagcgccgaggcctgcggacacctgcactcactcgcttccagcaaaccaaagggaaccacaggtg

SEQ ID NO: 245209 - DNA, 122 bp, Homo sapiens
tttcagcctggataagtatttcatagagacatttgagccaggtgctttatgtagtaggatcggtgattcagtgtgtggcatttaacaatgtgagtcagaattaaatgaatgtcttagtatta

SEQ ID NO: 245210 - DNA, 122 bp, Homo sapiens
ctggctcactacagcccatgagccacctggctgccctgagctgggcacctcaggcccacccgtcccaggtcacacccctggagttcagctctccctgagccacggagttccccatgggccat

SEQ ID NO: 245211 - DNA, 122 bp, Homo sapiens
gagttgtctcagagccaaacgtagtaagctacctgtcaccggatgtgcttgagctaagggcgctgaaccacctctgtcagagacggtgcatcccccaccggatgtgaccccgggatgcggag

SEQ ID NO: 245212 - DNA, 122 bp, Homo sapiens
ggctttctggaaatactgtccatagcttttatcacattttccctgccaaaagttaagagccgttgcaccacaacaaacccccttcccagagttcaggtctcgcctctgccagtgactccaca

SEQ ID NO: 245213 - DNA, 122 bp, Homo sapiens
tcagggtcctccgctgcctgaggcgtcaacatgcctgcctgcaatgtgtttgtgcatgtgcgtgcacatgtgtatgtgggtaaacacatctgtgcacgtgtgtgttgcttctctggccaggc

SEQ ID NO: 245214 - DNA, 122 bp, Homo sapiens
cccccggccccaggacctgaccccaaggaaacctccgggacctgtggctggagaggtgaccgccaggcatccggggagcctttggagatctcggcttcctttttcccccgctgcttgccggc

SEQ ID NO: 245215 - DNA, 122 bp, Homo sapiens
cctgaaagattagccgggtgactccgctgcagaaggcagggaagagagggaagctcgaggcggcggcccgggctctgcagaacagcgatgccggtgccttccagtaaccccgcggctggggg

SEQ ID NO: 245216 - DNA, 122 bp, Homo sapiens
ccacctgtggggctgcgctgctgagtgcgccctgcctggcacaacaggcttgagtcacggcgttgaggaactagccatgttggagcggaagggtgatccgtcaggcagtcggagctagcacg

SEQ ID NO: 245217 - DNA, 122 bp, Homo sapiens
ccactagggctgggcagaccacaaggcacattcccttgtgcagtggcagtgtcccctctccggcccctgctgccctttctaacaaaaggaagacattctgggtaggataatagagaaggtgg

SEQ ID NO: 245218 - DNA, 122 bp, Homo sapiens
ggggaccagtttcccctcctgggatatttggtgtgcgacatgcccttcccccagccccagcgcccgttccctttggaagcctgggtgctcctcagaccacttggggactccctgcttcacct

SEQ ID NO: 245219 - DNA, 122 bp, Homo sapiens
gggacgcgcgctcttggcccaggcccgggcgcggccccctccccggcctggcggttcctgcgcagcgccagccccgcgctcctctaggctgcaaagggggcctccgactcgggcccggcccg

SEQ ID NO: 245220 - DNA, 122 bp, Homo sapiens
gctggatgaggatccaattgatgccatatccctgttgtagccttttgtggtgagacaaggcgctcatcaggacagcagattcttcaaagccttccacaccaatgtgaaggacagtaagatgt

SEQ ID NO: 245221 - DNA, 122 bp, Homo sapiens
gactatgaggaatgttaacttgaattagaaccaactcggaagtataatatcaactataaacgcttttctattaccccatccctttagctttttctgtcctctttcttttaaccaagggacat

SEQ ID NO: 245222 - DNA, 122 bp, Homo sapiens
agttaaaagtaaaagttaatgaaaatgcggctgcagggacacggttagtgcttcccttcgcgcgggatgcggatgtgggtgtgaactctctccggagttaccagctcagctccaatctgcac

SEQ ID NO: 245223 - DNA, 122 bp, Homo sapiens
gccaatgactccagatttacaccctctgtccagacctctcctgaaccccagactagtgttcgtgcaacgtcttccttggaggcctacttgtgtgtcaaactcaacaagtccaaaactgagcc

SEQ ID NO: 245224 - DNA, 122 bp, Homo sapiens
ctgcacaagatcgtgggccggaagcaccttgggcatgccacgtactgctcacaaccaggacgggatgtgctcaggaagtcacctcaacgctaaagtaaactaaagcatttacaccacatccc

SEQ ID NO: 245225 - DNA, 122 bp, Homo sapiens
ccccaaagcaaccttcctgaatacataggtgccgggcatgaaactctacaaaagcaaccacgttcctgccactgtaaatgcatcttggtggccctagggtggcggtgaaccactgaaacaaa

SEQ ID NO: 245226 - DNA, 122 bp, Homo sapiens
cattctcaagaccactgcaaacctcgcgtctttgcgaaaacccttcctgactccctcccacgcatctccgacctccccttgggtccaggcaggctcggtctgcacacggcgttgttctgcac

SEQ ID NO: 245227 - DNA, 122 bp, Homo sapiens
ccagcaggggaatctgaggcttggggaggtgaggccacctgtcctattggccctgaaggccgcccttgatttccatggggcaggcatgagccagatgccttctgtgtgccgggctgggccca

SEQ ID NO: 245228 - DNA, 122 bp, Homo sapiens
cagtttgcgtgagtctaggacagtgaaagcagaaatcataacccaaaagctaaaggcccccgaagtttgcatgctgtccacctctatctgtaatgatcacaaatgttttccttcctgaagtt

SEQ ID NO: 245229 - DNA, 122 bp, Homo sapiens
ctcactgagaccccactgtcttccgcagcccacgccctctgtttgcatcagggcgttggccgtgtttcttagcaggtttgaggcagtgccggttctgctacccgcgtctacggtgtggaaag

SEQ ID NO: 245230 - DNA, 122 bp, Homo sapiens
caaactcctgagctcagatgatctgcctgcctcagcctcccaaagtgctgggattacaggcgtaagccaccgcacctggcctttgcaagattcttaatgaaacccacgtctgccccgtggcc

SEQ ID NO: 245231 - DNA, 122 bp, Homo sapiens
cccggcccagcttctggggtctggaggattcccgtttcggcctggcctggggtcgtggggcggcccaccctggagggccccgcggggtgacccctgtcccggccgccgcggccgtccccgcg

SEQ ID NO: 245232 - DNA, 122 bp, Homo sapiens
gtgtgtctgtctccctgcgtgtctgtgtgtgtgcgtgcatgtgtgctcacaagctctgggcgtgggccctagtgtctgagagcagggatgagattgttttgcctcagaaagcccagggcaga

SEQ ID NO: 245233 - DNA, 122 bp, Homo sapiens
agcacgaattcataatccaaactaaggcctaggaccatttaaaaaatttacatcaatcctcgaatgtgtccaaaaacacagaagaaaaagggacactacacagttcattctgtgaagccggg

SEQ ID NO: 245234 - DNA, 122 bp, Homo sapiens
agcttttttttgcagtgatgtgagtggagttgtgaaaacaattgaattgctttttaaaagcggcttatttcgaaataatttcggacttactcaaaagttgctgcagtattaccaagaattcc

SEQ ID NO: 245235 - DNA, 122 bp, Homo sapiens
tctttaattaagtgagtctgaagggcctattaatgcaatgttaaaaggaaccagtctcagcgggtcctcacagtgggaaaagtatctagggctttcaatttacaaggtcttgttacaaaagt

SEQ ID NO: 245236 - DNA, 122 bp, Homo sapiens
acagaaaatggactattttcctttcagatttactatatgctgtcactccagctttataaccgcatgtgcatacacaaacatttctttctctcttgcaggtggcacaaaccaggaaggggaaa

SEQ ID NO: 245237 - DNA, 122 bp, Homo sapiens
gggagcgctagcggcagccggatcgcagcctgcggggcccgccgcagccatgggcaaccgcggcatggaagatctcatcccgctggtcaaccggctgcaagacgccttctctgccatcggcc

SEQ ID NO: 245238 - DNA, 122 bp, Homo sapiens
gggccgggtttgtttctgtttctaaaacgcggggctcagtcgaccaggaggggcgaggtccggggagtcccggcctttcggcgtcctctgccggatcccgggtttatggtcacctctccctc

SEQ ID NO: 245239 - DNA, 122 bp, Homo sapiens
ggaccgaagtctggggcagctccctaattactagggtgctgaaggcgtgattgtgccagtcgactgcgagttccttccgcagcttgtatcgttacccactcctgcaggtgctgctgctgcct

SEQ ID NO: 245240 - DNA, 122 bp, Homo sapiens
ggtggagccgggaagggtcgtgcgtgagtgggggacagtgtgtctcgctcaaccgctgtccgcgcagctgggcccagatattgtgccccaccccggaattgcgtgaggggcccacaagtcag

SEQ ID NO: 245241 - DNA, 122 bp, Homo sapiens
tttcatcactgggctgcaagactggaacaaagcgagcgtgcagttgtgtctgatgttagtcgcctttctgacttggtgtttgtaagtgttcactggcgcacctgtgtattcattcagcaata

SEQ ID NO: 245242 - DNA, 122 bp, Homo sapiens
gcctgactcctctggcccccagggcaagggccgggccgtgagccgcctgctggaaagcttcgccgtggaggaagactttgagttcgacgacaacagcagcttctcggaagaggaggaggacg

SEQ ID NO: 245243 - DNA, 122 bp, Homo sapiens
ggcagttgtttcttcataactcgatagccattgaagacttcctgctgcgaagagcgagtccgcctccccgcccccccctcgtctttttcccccttcttgcacacaagacttttaaaggccct

SEQ ID NO: 245244 - DNA, 122 bp, Homo sapiens
ggaaagcccaagttgcctgcaggactcacagccagagtttctggttgagtgatggtcttacgggactaatttaagagatagagactgagttcatattatcaggtctcaatatttatatttaa

SEQ ID NO: 245245 - DNA, 122 bp, Homo sapiens
ctgccctctcccctgaatgcgacagcgagcatttcctgaaaccagcaggtgctgggctgccgatcctcgtctgtagcaggctcagccctcatggactgtcccagtggtgtcctgtaaacagc

SEQ ID NO: 245246 - DNA, 122 bp, Homo sapiens
ttcatctagaaagcgaagctagcgacagcatctgcatcccaggctgtcgcgagggtcaggcgagctgtgcttgtaagcgcttgccacggccgccggcacacgttaatcttgatcggtcttga

SEQ ID NO: 245247 - DNA, 122 bp, Homo sapiens
ggcattcgtctcagccgtgactctcgccaggccggggctggcgcgcccacgtctgaagagcgatgccccgggagatcatcaccctgcagctgggccagtgcggcaaccagagtgagcaagcg

SEQ ID NO: 245248 - DNA, 122 bp, Homo sapiens
agcatggtccctgccggcagctcggggccggagggttttgactgcaaggccagcccacgccgagggtccaagcatcgggatatgccgccagcacctggctgctgcagcaccgcgctggacat

SEQ ID NO: 245249 - DNA, 122 bp, Homo sapiens
gacggacctcatggccttcagcccctgccttcctcctgatctgggatcagttgatgtaggcgaagagcaagatttaaatgttgatcatggcctcaaagtaagtccatttaaatttagaactc

SEQ ID NO: 245250 - DNA, 122 bp, Homo sapiens
ttacaagtgagtgtagttctagtcatcctgctcacttacaagatacaggcttttatagaacgtccacgggcaccacctaacatactgctttgtcctgctgttattggctgtttccttgctaa

SEQ ID NO: 245251 - DNA, 122 bp, Homo sapiens
cattatttttacaaggacactcttcaaccttgaaaggcaaggtaccccgaggcaaggaaacgaaatgactgtagttgaacagcatgagagtccagcgccatctagtggtgctgaaaccgaca

SEQ ID NO: 245252 - DNA, 122 bp, Homo sapiens
caaagcagatgtaaatctcagtgggtttctcaccatcagctaagaaaataacaaaacatccgtgtcccacagaagcattttaaaaggttgaatacagacagggcaaggtttgtaccctgttt

SEQ ID NO: 245253 - DNA, 122 bp, Homo sapiens
tccagcagtcgcgccaaggggcagctgctactcctgccagatacaccagttatcacaggccgctcccaggcctgcgggggccctgagaattcgcaacaagccccgggcagcagggctcggct

SEQ ID NO: 245254 - DNA, 122 bp, Homo sapiens
tgccttctcaggctcctcaagtgcacctaagagcgggagtctggctgccctcagcactcgcgtcccgccctgcagcctgataagcttgacgccaaggcattctcccgagagccggcccagca

SEQ ID NO: 245255 - DNA, 122 bp, Homo sapiens
cttcacgtgtcccgtgtgcttagaggtgtacgagaagccggtacaggtgccctgcggacacgtgtaagcggcgagcccgggcctggtcggggggcgcttaactgggaagggaatggagccga

SEQ ID NO: 245256 - DNA, 122 bp, Homo sapiens
tagcgacggtcgtcgacgctaatccttggccggacggatccacatctgttttctggctaccgagagggcagccatgaacacccaaaagggttccctcaccataaacgtccacagaggttccc

SEQ ID NO: 245257 - DNA, 122 bp, Homo sapiens
tatgacaaaacacttgcacaccatgactgtatctgatcctcacaagacggagaattatcccgagggtagagacagtggggcagcctggagtagggcaggaccccttcccaggcacgttcggc

SEQ ID NO: 245258 - DNA, 122 bp, Homo sapiens
cctgcccaggtggggagggcgctgcagttcccgggacgggcccgcaatcgacggtccgggcgccacccactccccgctgccagctcgcgccccagctccagcccggggacctccggggcgcg

SEQ ID NO: 245259 - DNA, 122 bp, Homo sapiens
agcacagccggcgggctcgggggaacactcccgccgggcaaagtacagcggatacaggaccgcagccgtcgcgcatagcagggtggccagcatggcgaaggcggcggtgaagttgccccagg

SEQ ID NO: 245260 - DNA, 122 bp, Homo sapiens
cctgcgtgccgaggcaaagatccgcgtataaaatcccacgtcgcacgtatgtgctgggctcgtctgtgaacaggttacatggaccctctctagacccagcagatgggctttgaaatgtggcc

SEQ ID NO: 245261 - DNA, 122 bp, Homo sapiens
gttgcttcttgctattcatgtctttctctttcacatttgaccaaaaaatgagcaatttctcgcattgttggcactgataatgctacggtaggagtgggctctgatattaggaatttggggag

SEQ ID NO: 245262 - DNA, 122 bp, Homo sapiens
ctcccagagcccgacgggcgcccggctgtgctgcgaggtcttcccaccccttccctaccccgcccgccccctggccttcctgattggcgagaaacactacaacaggaacagcagtcctcgcc

SEQ ID NO: 245263 - DNA, 122 bp, Homo sapiens
tggaatggaaatacctgctttccagacaccagatctggcttctagggttgaactacatcccgtctcccctttcccaactgaccatgccttcagtgcacaatcacagatacacagttggtgga

SEQ ID NO: 245264 - DNA, 122 bp, Homo sapiens
cggttcgggggctccgggcagtagaccatgccctggagctcggggggcctccgggatgttcgccaataggggtcctccccagctccaagcgtcctgaagcgctggagttgcagacctgggtc

SEQ ID NO: 245265 - DNA, 122 bp, Homo sapiens
tcatgatgtctctagacttctacttctttatttttcctttgtaaactgtgtcacaccaggcgtatctcaccatgaaaacattgtgagtaatctcaccacactggggagaattcatattagta

SEQ ID NO: 245266 - DNA, 122 bp, Homo sapiens
ttggggggacgccctcctcgtgtcccccttctgggcggatgtggggctgggctctgtgagcgccctccccacacccgccatcgtgttcctttccggcacctgtacagcctccttccctagtt

SEQ ID NO: 245267 - DNA, 122 bp, Homo sapiens
atcaagcacttaggccttcttgttctttcttaaattaactcgtatcttaggtttcactcgcgtccctgtgaagagaccaccaaacaggctttgtgtaagcaataaggctgtttatttcacct

SEQ ID NO: 245268 - DNA, 122 bp, Homo sapiens
cctgcgcaaacgcgcgcgggaggcgggcctggccaacttctgaacaggaagcagttcgctcgcgcctaggttggcgcgggctgggaggtgttccagccctttaagatgttgcgcgtggtgag

SEQ ID NO: 245269 - DNA, 122 bp, Homo sapiens
ggcccggggagcccggccgcggtccgggcagcgctcagccggcgccccagcccgctcggccgcagctgcgcgcctgtaggtatggcctccttatacccagttcctcgctccctggtccttcc

SEQ ID NO: 245270 - DNA, 122 bp, Homo sapiens
ttgagaggatctacaggtctctgctagaccacctgtaattggagggatcatttacacctgcggttgattagcgaaagaatcctaaaagctcctttaatcaaaactattacagataccctttt

SEQ ID NO: 245271 - DNA, 122 bp, Homo sapiens
ctattgagtcacatgaccaaagcactaccacacggctgatatgacagcttagaacagctgcggaccccaggtctgctctgggcttcagtcagtcgctagtaaactgttccatgtggtattcc

SEQ ID NO: 245272 - DNA, 122 bp, Homo sapiens
ccctgtccttccctgctggtgtgtaacttgtgatctgaaccaccggggcgtcgccgttctcgtcacaggcagctgccccaccgtcctcgccgtgtctggaagcgcagcagagcccacgagct

SEQ ID NO: 245273 - DNA, 122 bp, Homo sapiens
ctgctgatatgcaggaggaaatcctggcgggttcctgtgggggtgagctggcggggcctccgggctgcttttaaggccactgcccgccccgtcccgcctgcctgtgctgtgcctgcctccta

SEQ ID NO: 245274 - DNA, 122 bp, Homo sapiens
ctaacctagagtagatagaaaattagcctaaatcatacaacagtgggataatagcattcccgtggtctttgcacctttgttgtacacaactagacactgttgaagtgagattgtgtaaataa

SEQ ID NO: 245275 - DNA, 122 bp, Homo sapiens
aagaaagaaagaaaaaaaaaaacactcgcagtgtttactcctaacgcgtggaacttgtgtcgacatccacccccggttactgcatactcagtcacacaagccatagcaggaaacagcgagct

SEQ ID NO: 245276 - DNA, 122 bp, Homo sapiens
tactggggagttgagatatgggtaagtaataggagtcccattcctgctttggctggggttcgggtctccaatttcactgccagtgtgtctctaaatctacacagtgggacagtggctacagc

SEQ ID NO: 245277 - DNA, 122 bp, Homo sapiens
ctgggcaggtctctgcatagaactgcagcagcctcttggtggcctcggtcttgcctgccccgctctccccagagatcatcacagcctggtcccgacgctccgtgcgcagtgctcggtacaca

SEQ ID NO: 245278 - DNA, 122 bp, Homo sapiens
ctcacagatataggacccagggtggagcgctgcgagcccattctcagcacagaaacaccacgaccataggaaggaaggcaggggcaaagcctgccctctctgggcacatttccctcctcatg

SEQ ID NO: 245279 - DNA, 122 bp, Homo sapiens
agagtgaacagagttggagaggtcgcttgactcgcaggacacagaagacccctcagctagcggcaggaagggtttcatgggatagcaatagtgcagaggcagcgtaggtggtagttaggaag

SEQ ID NO: 245280 - DNA, 122 bp, Homo sapiens
gctgcttgtgtatggcaaagatatggatcagccgcagcgtgaacaccatgaagtccatggcgaggactgtgcggccagcctcaaacgccgacggcagcatcctggaggatgggaggctgatg

SEQ ID NO: 245281 - DNA, 122 bp, Homo sapiens
ggcagctcgccggccactccccaaaagcagagcattccatcctttctctttttaaacccacgtcatcatctgatcataatggaaatcaatctcctcaaaccaccatgcaaaggcgtatccat

SEQ ID NO: 245282 - DNA, 122 bp, Homo sapiens
ggcgccccctcccgcactggcggaggacgcggccgttggaggcgacacctccacaagcagcgtggaggcgacacctccacaagcagcgttatctgacggaaccctcacaacaacccgtttta

SEQ ID NO: 245283 - DNA, 122 bp, Homo sapiens
cttatttatttatccaagctaatttcctacttcagatggacaccaaagaatcaaatcagccgtatcactgaacaatcacaaaatggcccatatatcaaccctcatgcttcctaacacagcat

SEQ ID NO: 245284 - DNA, 122 bp, Homo sapiens
tgcatgccaccatgcctggctaattttatttaaaaaatttgtacagatgatgcattagtccgttgtcacactgctataaagaaagaccaagattggataatttataaaggaaagaggttaaa

SEQ ID NO: 245285 - DNA, 122 bp, Homo sapiens
ccaattgttcccatatgaatacaggtgtggtctctattggatataaatgtgtcttttattcgattttacgtccaggacttggtttgctgtcccaactgcacataaatgtcccttttttgttt

SEQ ID NO: 245286 - DNA, 122 bp, Homo sapiens
ttttattccttatatccttatgagataagttctaaatgatctcttatattaaagatggggcgaatacagcacagagattgagtgatttgcccaatgtcatatggagctaagaggctgttaag

SEQ ID NO: 245287 - DNA, 122 bp, Homo sapiens
cctagacaaggagaagatgctggagggccgcaagtccaacatccgcaagtcagtacagatcgcctaccacagggctctgcagcaccgcagcaaggtgcaaggcgagcagagcagtgagacca

SEQ ID NO: 245288 - DNA, 122 bp, Homo sapiens
catatattttatcttctgtctatcttacactttagggttgggggcctggagtgtctggggcggggagactgctgaggtcatccgtccctttctccaatgacccaggctcaaaactttgtggc

SEQ ID NO: 245289 - DNA, 122 bp, Homo sapiens
aaccactctaggattttttttttttttaaataaactgtattaggagcttgtcagaaatcccgaagttggagaccactgtgaaactcctgggtcccaccggggctgagctcgtaccagtagcc

SEQ ID NO: 245290 - DNA, 122 bp, Homo sapiens
gttagaggttcatctccatctttccatccgtgctgaattctgcagcccacgatgttcccccgaggctgggaggtgggtcggctcctatgcttcttgtgtgcagccttcctctttatcatggt

SEQ ID NO: 245291 - DNA, 122 bp, Homo sapiens
tgcctccccacgcggcagggcttaggacctgcagctgccatgcctcccctccgccccccccgccaccagtgggcttccgcgcagccccagcgtccccaaagggccccgcccatcgaccgccc

SEQ ID NO: 245292 - DNA, 122 bp, Homo sapiens
ttgacctagggattttatagctctgtacataaggaaacaggaaaaaaaaaattgggggagcggggaggttaatccagatcagcaattttgtattatctttgaggaacaggtgggtaaataag

SEQ ID NO: 245293 - DNA, 122 bp, Homo sapiens
ccgcagaccggtggggcggggggcgggtctccccagattccggtgcagggcggctggagtcgcacaggtagcctcgggcggatttcggcgtgtctcgcgctccgcaggctgggacctgggct

SEQ ID NO: 245294 - DNA, 122 bp, Homo sapiens
catcttttccccatctgcctgtttcctccttccctttctgtttaaggaaagtctaaccaccgcacttctccccacctccccgcacctccccccaggcaaacgcaagcaactgaaccgcctat

SEQ ID NO: 245295 - DNA, 122 bp, Homo sapiens
agcttcatttccattttccttcaacctcagggagaaacacaagggtatttctgtctggggcggcaggacctcatgtggtctccacgtggcaggatcctagaatcacggggtggcagtacata

SEQ ID NO: 245296 - DNA, 122 bp, Homo sapiens
gggcggagggccgaaagtccagtatgtgggtccagggtcactcttctagagcttccgcaacggaaagtgtgaggtcagtagtagtttttgtggtacgtgcagtggtggccgcttcaaggact

SEQ ID NO: 245297 - DNA, 122 bp, Homo sapiens
aaaaatgcaacaaaacttcaagataaacaatctatgtagtaaggcagtgtcaaacacatccgttttacccaaacgacagaacaaataccaataagatgacagacatcaaaatcaaactttgc

SEQ ID NO: 245298 - DNA, 122 bp, Homo sapiens
cggtgggagccggagcctgcttgttgcagctgtgggtgaggacggctctagctaggtgagcggctccggccaggtgagcggggcgcataggtgacggagggccgagggcacgggtatgagtt

SEQ ID NO: 245299 - DNA, 122 bp, Homo sapiens
aagctagatgttcagataaaggagtaaagagagactaatggctcttgaggaaagtggagccgtcttgaaatatgtgctgctgggagttactggttggaaatcagcccggtttaaaggattgt

SEQ ID NO: 245300 - DNA, 122 bp, Homo sapiens
aaataaaagaacctgtgacgctcagcgataacccggtcctattttctaattctcccttctcgttgtagactttagtttgttgtttgtagcttatccatgccatctacagaatgaaaacatcc

SEQ ID NO: 245301 - DNA, 122 bp, Homo sapiens
taatctccctggtgatttgctgtgcctctgtttcccgctgtgccctctgtagacactggtcgcagttctcatgccctgccccccaacctccgcctttttcctgaggcctcagagcccttctc

SEQ ID NO: 245302 - DNA, 122 bp, Homo sapiens
gctgaattctcacaaaaattgcctacaatgtcactactgttctccactctttccaagaaccgcggtgaggactggtcacgcagcgtgaggggggcaggtgcagaagagcaagtgtagaagcc

SEQ ID NO: 245303 - DNA, 122 bp, Homo sapiens
gactcagtctgtgccagtgggctgtgtagggtcacctgttgatgctgagaggcaggaaagcgagaaaggaggaataggtggaacaaaaagagccagaacccgtgagcatcttcctgagacct

SEQ ID NO: 245304 - DNA, 122 bp, Homo sapiens
taacttaatgaaacaggtggcctgcgacctatttactcaatctagaacaatgaaaaaatacgaagagttctaaaaggcattgttattcattggaaaggtgtttgaacatatacataacagaa

SEQ ID NO: 245305 - DNA, 122 bp, Homo sapiens
atccccttaccctggctctagtccactagctccttcctagtcacaaccgaactcacggggcggaggcccttaaggagcactcgcatccttcaatcgccgactagaagctcgcccggtgggcg

SEQ ID NO: 245306 - DNA, 122 bp, Homo sapiens
actgcaggccaccaatgtgaggtcactggacgcagagttgggaggagcagggagggtcatcgtgggagcctctgctggagtgagctggccccaatgtctgtctttacttaatctgagttttg

SEQ ID NO: 245307 - DNA, 122 bp, Homo sapiens
acagctcttgagaggggccatatcactgggaggtaagtggtgatggcatggaggctgtaacgatggttacagttcttctgtacattgtggcagtcagacctgatccgaactgacaataagtc

SEQ ID NO: 245308 - DNA, 122 bp, Homo sapiens
ttaaataattatcctttgccactgctggagagacactgcagcagagttttgctttctggtcggtgtgtgcttgctcagcaggcttctttagcatacacgtgcttttcccagtgcctggctcc

SEQ ID NO: 245309 - DNA, 122 bp, Homo sapiens
cttcctccctatccaccactcctcagagacgccacatcacctctctacaagccttgtacccgctgctcctgccatgagatgctctcccccagatgtccatgtgagtatgtggtgggggctag

SEQ ID NO: 245310 - DNA, 122 bp, Homo sapiens
ctccccaccccgaaaagtggagagccccacggcttccccagaaaagcagtctgctccccgcgccccagcgcagctcgtttactatgggtcaggagaggaatcccgccttttttccgcagcga

SEQ ID NO: 245311 - DNA, 122 bp, Homo sapiens
ccaagagaacgtcttctaggtcggtagtaaaagtcataatcaggagaaggtgtacgccggcgggctggtctcactatctcaagatcatcttgggacagtttaggaatacgccatttaggtct

SEQ ID NO: 245312 - DNA, 122 bp, Homo sapiens
attctcacaattgaatctggaaggcagcttaagacaccataattttaagcaaaacttccccgaggtaggtaaaatgtgaagtttaggtctgtggaacagctggattaaaggggaaatgaact

SEQ ID NO: 245313 - DNA, 122 bp, Homo sapiens
ctgggcgggccagcgggattggcttcccctgctccagccttcccgtgccaggggcggagacgcagaagctggggacctgctcacccccaaacaaagggtccccgccaagaccccgtcccggg

SEQ ID NO: 245314 - DNA, 122 bp, Homo sapiens
ggcaaggccggcttccctccacatccccacggagcacgaggtcagatgcatgggttgttccggtccgtgggtgagaaacgggttctctgtgtcgcgtctcttcagagcgaagttgagtcttt

SEQ ID NO: 245315 - DNA, 122 bp, Homo sapiens
aagacaggggtggcaaaggagaaggctgggtatttccctctacctcagtgataactctgccggaactgaccctgtggatgcagcttccttgtaggttcaccatctgctcccttgtctctcca

SEQ ID NO: 245316 - DNA, 122 bp, Homo sapiens
gggattcttcccgagcgttttccgagttggcgcggggggtggaggcggggccatggagcgcgtcccggggaccgttgcatccggaggcggccgtcgtgcggctccttcccgcctcgagagtg

SEQ ID NO: 245317 - DNA, 122 bp, Homo sapiens
aagcagtccggacttctttgggagtggcggctcccatgttgttagcgaggccgggcaaaacgcggcagggttagccggagggcgagggcagaagcctttcagaggtaagggtgggaggattt

SEQ ID NO: 245318 - DNA, 122 bp, Homo sapiens
gaggcagacactgcggctcaaaaccccaagggtaggtacctattgtgcggagtctcggaacgcctgcctggaagaagagttccggcggctccccgaacgcttggagaaagcgcttggatgca

SEQ ID NO: 245319 - DNA, 122 bp, Homo sapiens
gctcaattaatgtaaattgattctgaatctcattcttatctcatttgggagttacacatccgagaatctggtttttaattatggttttgtatatagtatttttgcatataattttagggtgt

SEQ ID NO: 245320 - DNA, 122 bp, Homo sapiens
ggggcgcccaggacgcaggtggggttcctgccacacgacactgaggggtggggggacagacgctgcagagaccctgcgaaaggcccctcccgatgggtaaactcacacttggtacacgctgg

SEQ ID NO: 245321 - DNA, 122 bp, Homo sapiens
gaggcgcgaggcggtagctgggctagtcctgttccctggcgtctgggcctttctgctctccgcaaggagctgggtcgcgacctgtcactgccagccgtgcgctcgccctctgcgccccgtct

SEQ ID NO: 245322 - DNA, 122 bp, Homo sapiens
cactgaaggaaacgtagcaggcagcgtcaccggagcagggcacggcaggttcggtcagaacggccccggggcagctcttgaaaaacaccagcatctacagatcccacagagaccttgacgcc

SEQ ID NO: 245323 - DNA, 122 bp, Homo sapiens
gcaagggggtttggatatcagagtatgtgaaagggggaacagttttcaaattgggtggtccggaaagttcttgaggaaggtgacatttgcgaaaagatctgaaggaggtgggcattagggcc

SEQ ID NO: 245324 - DNA, 122 bp, Homo sapiens
ctccacagggctggcctgactccccacagcactcacctgggcaagtgcgggcccattccccggctgtcctcctgctgtcccccgcaggtctttctcagcatggtgaacatgggagccggggc

SEQ ID NO: 245325 - DNA, 122 bp, Homo sapiens
cgggaccgtccgctcttgcccagacccgtcggtaaacagacgccgtgatgtcacgggcgccgctgacctgtggctgaacccggagctgtaaatgagatgcaaggtgccagcagcctccggcc

SEQ ID NO: 245326 - DNA, 122 bp, Homo sapiens
catcacagcctggggcacatgatgcagggggctccccaccagacagccagccaccttgggcgggtcaccagccagatggcctgagtcactgtctgctgcattcacttggcccacagcacatc

SEQ ID NO: 245327 - DNA, 122 bp, Homo sapiens
gtcaaatgaagcatttcctagcactcagccaggaaactcataaagctaaaaacgtgaaagcgggcctctgctgtgagatagcaaatagctttgtaatcatttcacagtggaatctgcaaacc

SEQ ID NO: 245328 - DNA, 122 bp, Homo sapiens
aaattacaacagtttttcactcaatatctgacatctgcagctggaaaattaggggcctgtcgagcgatgttggaagaagaaacagatcaaacctatgagaatgtcctggctgagattcagtc

SEQ ID NO: 245329 - DNA, 122 bp, Homo sapiens
tcatgagctccgctgtcctgatgagtcactggatgcacccgtgagaaacacctcaccctccgctctccccaggcagcaacacttgccacaccccagctgttcctgtcctcatctgccacccc

SEQ ID NO: 245330 - DNA, 122 bp, Homo sapiens
cgctaccgccctctaagggtgaagcagggactccagccagtcctcaaaatcccagggcaccggaggctggcagccgggctgggggagggcggggaggggaaagccctggagccacagagcac

SEQ ID NO: 245331 - DNA, 122 bp, Homo sapiens
agacagttctgttagtctctctctgacaataccccaaaacacctctaacctccgtgtgtgcggatctgctgtaatcttggccctcactttgtaataacagcaaacattatggccggggtcag

SEQ ID NO: 245332 - DNA, 122 bp, Homo sapiens
gggcctcagccacagctgcagcaggtgcccagaggtcagaaccagagatcccagacctcccggaccagctcgtgccccaaacgaaatgccatctcgagctcctgcagctctacgggagacct

SEQ ID NO: 245333 - DNA, 122 bp, Homo sapiens
acgactgttgtgaacactgaatgggccaacaaacctaaacgttaaatgaactgataacgccgtcagcacggagcaggcgctgggtgtttgcgctcttgcgcgtgcgctctgtggggcgcagg

SEQ ID NO: 245334 - DNA, 122 bp, Homo sapiens
ttggggtcccacgtctggaacccaggccgcaggctgcgctggggggcgccctggccctcacgggggctctggacaccagcctgcttcgctgtcaggtggcagaagcagctcccacgcggtcc

SEQ ID NO: 245335 - DNA, 122 bp, Homo sapiens
gaggaaaggcaagggcagggttggcatctcctgctcttttgtgatccaagcctcctcccccgaaccatgtctaccccacagtatgacatcagcatggggcctggggctcctgttagcaaagt

SEQ ID NO: 245336 - DNA, 122 bp, Homo sapiens
cactcacattgaggcctatgggccttagattatccctacagcctggtgagccgggagctacgtgggatcatccgagggctgctggcgaaggcagcagggtctctggagctcttttttgacca

SEQ ID NO: 245337 - DNA, 122 bp, Homo sapiens
ctaggcggccgtggctctgagggacatttcctggcagcagccctacccgatggacttctacgctggcagctccttggggccctggacggtgaaccacggccaggaccgccgtccccacgccc

SEQ ID NO: 245338 - DNA, 122 bp, Homo sapiens
agtgatccacccgcctcggcctcccaaagtgctgggattacaggcgtgcaccaacgcgcccggccatttttaattttttaattgtagaggcaggggtcttgctatgttgcccaggctcatct

SEQ ID NO: 245339 - DNA, 122 bp, Homo sapiens
cacatgaggtcccggcgagaaggacctgcttccatcagattcacacttgggagaggggcccggcctccaggagcgccaggcagaaagggcacccattaggaagaagaacacagaggccatgg

SEQ ID NO: 245340 - DNA, 122 bp, Homo sapiens
atacctcacttttccgtgtacaaagttttgacaaagcccttgtatatccatcatcccattcgtgccttcaagccccataaggtggtttgataaagttatcacccccatactgcagataagaa

SEQ ID NO: 245341 - DNA, 122 bp, Homo sapiens
ttgacagctttaaactgagtacctcacggtagatatttgaaagtccccgcagtgagccgccgacctgccgttgtgaagaatgatcctgagtattgctcttggtgcctgtgagctcctgtgaa

SEQ ID NO: 245342 - DNA, 122 bp, Homo sapiens
acctgctagagattacgacctatcggggcatgcatagaattggatatgttccttgttattcgcgtcagcagtcactcatccaaagaccccaaagcttctagtgttctaaaggctcacacctt

SEQ ID NO: 245343 - DNA, 122 bp, Homo sapiens
ttgggcaggaaattccaggatccgggtactcaagtggtgttctaaacagtggttcttggccgggtgtggtggctcacacctgtaatcccagcactttgggaggccgaggctggcagatcact

SEQ ID NO: 245344 - DNA, 122 bp, Homo sapiens
acaaatgatttttgggcccgaatgtgattgtgaatagacagacatagcttctaagaaagccgttgggacccactgaattgtgactgtcagacaaaggcattttgtttagaaggcttgtccca

SEQ ID NO: 245345 - DNA, 122 bp, Homo sapiens
ataaacaaggaactggattcgaatgatttcttagtttctgagatttttttgtctaagcatcgtagacttcgtgcgttctcaacccaacaggaagcgtcacatctcagtgagcttcggctctc

SEQ ID NO: 245346 - DNA, 122 bp, Homo sapiens
atagaggctgggtgctaaaacatacgctagcctctctggctgaaaacattttttaattcacgctcacctccactaaaatccattctccacatagcagctagtgcaattatttaaaaatataa

SEQ ID NO: 245347 - DNA, 122 bp, Homo sapiens
atgatgttccagaattcttgtgcctcctttctgaagacagactggggaggaggcttttgccgatattaagtcatgagctatataaggcatacctcttgaatacttgctggcactgacttaat

SEQ ID NO: 245348 - DNA, 122 bp, Homo sapiens
taattgtgaccagcatagtgggtatgggcctttacctcccaccacaccatgccaaactgccggctatactttcaaaactcagggcccacatctggccaacacccactccttccccacccctc

SEQ ID NO: 245349 - DNA, 122 bp, Homo sapiens
cgcacacgcacgggctcgccctccaccccgccccgccgcctaccccccactcctgctccccgccctcctgccccacgcgccccgcgccctgagccccgcaccccgcgccccgccgccctcct

SEQ ID NO: 245350 - DNA, 122 bp, Homo sapiens
gctcagattgcctgaagaggcaaaaaccaacactgctaactccactatgccactgaggcacgacacaagtgcaaaaggagacacagtagacaagagaggtcaacaacattttctgaggaagc

SEQ ID NO: 245351 - DNA, 122 bp, Homo sapiens
gggccaatgagcgactcgctttccgtgcggtgcggcgagtgaggccccggtcttcctcctcgtcctgccgcagggccagaacccctgacggtattcagctgcgcgtaagtctggccggtgcc

SEQ ID NO: 245352 - DNA, 122 bp, Homo sapiens
taaatgaggtcaatgccaacagtccactccaatccacaatccactccccccacctttcttcgcatcaataaagtgctttgggctgaaggaagtccaagtgttcgtgctaccaccgttccttg

SEQ ID NO: 245353 - DNA, 122 bp, Homo sapiens
cctccagctggcacgcgcgctggatacttggcagggtttattccaggtcatgccctggggcgcgagcttctgctgcaacccctgtctctgatccaggcaaatattgtagggcggctttgggg

SEQ ID NO: 245354 - DNA, 122 bp, Homo sapiens
gtcgaaagccgacatggtgatcgggggccagcgggcgaactccgcgaacgctgctgcctccgggcacccagacccagcggcgcttcgtgtagaccctccacttccgggagcgaggcagcggt

SEQ ID NO: 245355 - DNA, 122 bp, Homo sapiens
atctgctctcctcagcctcccaaagtactgggattacaggcgtgagccaccactcccggccgtgaacatattttttgggttgctggagttcatctataagtcatttttgaggaataagattt

SEQ ID NO: 245356 - DNA, 122 bp, Homo sapiens
tcattagttttcagttataatacaaagattatgttggactaagctttcttggactgcccccgggtaacatgccctagagatctttttttaaacgcacgaggaccttcataaactcccattga

SEQ ID NO: 245357 - DNA, 122 bp, Homo sapiens
aggaaatataaatgattaaagtgtacaaaaagatcagaatgacagatagctaaataagtacgtacaagtcaggtataaacttagaagcaggttttcagggtggctaaacaccagaggaagct

SEQ ID NO: 245358 - DNA, 122 bp, Homo sapiens
tgagtgacagagcaagaccctgtctctctaaagagaaataaataagacagatggtgtagacggtgactcatctcaggtgatggaggcgtggctctaagagactgtggtcttgaataaatcgt

SEQ ID NO: 245359 - DNA, 122 bp, Homo sapiens
ggataactgcatgaccctgagagaaaacctccttagatttagcatcctaggttcctcacacgcctcaccctgaatcctggccctcccgcagccccagcgccatttgtcccatcagtgacaag

SEQ ID NO: 245360 - DNA, 122 bp, Homo sapiens
actgtgggctccaccgagttcatgggtggaaaggtgcttttgtaaacatgcgggagggggcgctgatagccaattaggcttggggacctgcatgcccagcccctgccttcctggagcccatg

SEQ ID NO: 245361 - DNA, 122 bp, Homo sapiens
cttcgcctcggtcccacagaagcgacggggaattttccccccattcccattacagtgactcggatgaggcaagttaggaaggtgacagaagcctgaaaactgagacagaaacaaaactgccc

SEQ ID NO: 245362 - DNA, 122 bp, Homo sapiens
ctcaatgtatttctttggaatccttctggcatggaaacaaccttcccctggtaggcagcccgtgtgtggtgcggcattgctcaacacagcacattccccttaatgtatgacttcagagggaa

SEQ ID NO: 245363 - DNA, 122 bp, Homo sapiens
ggcttctcagcaggatgcacagggccctccagggtttggccatggctgaacatgcagccgcgtcgagctcacccttccacaatcctcagttgcaaccatcctggatggattcctgagctctc

SEQ ID NO: 245364 - DNA, 122 bp, Homo sapiens
gcccgtgggaggaaggccaggctcgggggagcctcctccagcccggccgacccggactcccggtcacctgacccctcagcaagaacagcctgcctggtggccttctggggccaggacccctg

SEQ ID NO: 245365 - DNA, 122 bp, Homo sapiens
actggattgtaatttctccttttttccctgagaagctagaatcaactggatacacaaatgcgtttgttgaattgagggagtgggaggcatcctattgctgatgtttttaatctaatgaaccc

SEQ ID NO: 245366 - DNA, 122 bp, Homo sapiens
cagagtgaaaaaggttttaaagatgttcccggggcgttagctttggtgctggagttgtaacggctcattatgtgtatacagcatggaactggcaaagactgtcacaagcaaaaagaacacaa

SEQ ID NO: 245367 - DNA, 122 bp, Homo sapiens
ggtgccccccgccattccggaaagctctgcccttctggaagtgaagctggaggggcattccgggccctgaggcgcggctaagattcccttcccttttggcgaagaccaccgcatcccacgtt

SEQ ID NO: 245368 - DNA, 122 bp, Homo sapiens
cggcggtgctgattcatcaggaagaaagaagctcgcaggtcataggaaaataaactatctcggaagaggctccagtgtcctcagcagacatgctttatttggttaaagcataatgtgtaatg

SEQ ID NO: 245369 - DNA, 122 bp, Homo sapiens
agtctggtcccctcctgttttgggtccagcgtcccttgcccgaaccatttcaaagttgagcgctgggtttcagtggtgtcattctcagaacactgctccctcaattaccatggcaactgggg

SEQ ID NO: 245370 - DNA, 122 bp, Homo sapiens
acacctcgcccatttgcgccgcccactcttcagtctcgcgacacccacccctcagtctcgcgacactcactcctcagtctcgcgagtctgtggtggtgtctttacgtctttgttattttagc

SEQ ID NO: 245371 - DNA, 122 bp, Homo sapiens
tgcctgcagtgtttcctcccaagtgggtttggtgcccttccagcatattgagtggagaatcgtcggaaaggctgaggcttcagccgagtctccaggccactgcttgcggtgcagctaagctc

SEQ ID NO: 245372 - DNA, 122 bp, Homo sapiens
cgcgggcgcagggaggctcagcgatgccacctggcggctgcttctccccagattgggagccggctggctgcagacaaacccaggctctccccgggtgccgtgcctctgcctctagaatagaa

SEQ ID NO: 245373 - DNA, 122 bp, Homo sapiens
cccattgtatccgaagttgttctttaatcggcacacaagcacttgatacttactaaataacggcagacacaacggactgtaaactttggcaaggcctgaggcttaaacgctcaataagtaat

SEQ ID NO: 245374 - DNA, 122 bp, Homo sapiens
tgggaagctgaagccgcagcgcgaagttaggagccctaccgggctgggatctcttcgaggcgcttctgttgggtgttcattaaggggtgagttattgcggtgcgagccaaaggtcacttcaa

SEQ ID NO: 245375 - DNA, 122 bp, Homo sapiens
ctacgccccaactctgctcattgttgttctctcctggctttccttctggatcaacccggacgcgagtgctgccagagtgcccctgggtaaggtgttccatgcttttttgtcacatcaggaac

SEQ ID NO: 245376 - DNA, 122 bp, Homo sapiens
ctttaaatgaaccaagcttgaccaacaaacaagacagccatttgttcactcagatctagccgaggtaactcacaagtgcaccttgagatcctccatgtgtctgtcaacagcgataggcagga

SEQ ID NO: 245377 - DNA, 122 bp, Homo sapiens
cactcctaatgggtagttttttaaaaacacttttcaaaaccatgcaattatcagttattacgaagattagtaagattctcaggaatggtctgatggctaggaatcttcattgccagggaaac

SEQ ID NO: 245378 - DNA, 122 bp, Homo sapiens
gcaccgcggtgttcaagcgcttccccaccatagaccacgtggtggaggctggtgagtactcggccagaggcagggcagagaccgggcaaggaccaggtggaggggggcaaggggcgagctat

SEQ ID NO: 245379 - DNA, 122 bp, Homo sapiens
aacaccgcgagttcaccaggcggagacaagtcactgtgaagtgggcagcacaggaccccccggagggcaggcgccggaaactacatatcccggcgtgccccgctcgcgagcacagtggagcc

SEQ ID NO: 245380 - DNA, 122 bp, Homo sapiens
gctctcggcggcgcatctcccagagcccttcaaggagctcgcgcgtccccgagcgactcccggacacctggcagattcgaaacttcagccactagatgctttcctggactccctaaatactt

SEQ ID NO: 245381 - DNA, 122 bp, Homo sapiens
cgacctcccgggctcaagcgatcctcccacctcagcctcctgagtcgctgggataacagacgtgagccaccgggcccagctctatactcataatttgacaattatgtttttatttccccaga

SEQ ID NO: 245382 - DNA, 122 bp, Homo sapiens
gtttcattcatgcggtagtggcggggagggaatggtgagaacttagaggtagcactgagccggcaggattagagtcaagggtgtattttgtgttattagggagcaggtatttcttccttata

SEQ ID NO: 245383 - DNA, 122 bp, Homo sapiens
ggatagtacagtaattcatgttgatggtgaagtgtgcctcagccttccagagaaaatttacgtatattcactattttaaaataggcagagaacccgttttctattaccaggcaagcacttca

SEQ ID NO: 245384 - DNA, 122 bp, Homo sapiens
cccctactggccaggcgcagtggctcatgcctgtaatcccggcactttgggaggcagaggcgggcgggtcacctgaggtccggaattccagatactgtgaaaccccgtcttcactaaaaata

SEQ ID NO: 245385 - DNA, 122 bp, Homo sapiens
tacttcccgggctgcaggggcctccatttagagcccccaaggagtcagaatccacacctccgcaaatgggcccgctttcccaggggccccctgcccagactttccctgggctctgtgggttt

SEQ ID NO: 245386 - DNA, 122 bp, Homo sapiens
gtgcgagccctgtgagaagacacgggagcccagcaggcagggcgccgaggagaagcgttccgggttctccacctgcacgcggtagccatggttggtgacgctggtgaggtcgtcagacacgg

SEQ ID NO: 245387 - DNA, 122 bp, Homo sapiens
gcgccgcccagcgcgggccgccgttataaagcagccgccggcgccgggtgcctcacagcacgctgccacgccgacgcagacccctctctgcacgccagcccgcccgcacccaccatggccac

SEQ ID NO: 245388 - DNA, 122 bp, Homo sapiens
ctttaaaccttctcaggttcacccacatgaaacggctgtgctgagtgtgctgccggtgcccggggagcttctctgactgtgacccggcagaggcttctgtggcggtgcatgagcggccctac

SEQ ID NO: 245389 - DNA, 122 bp, Homo sapiens
ccaaagcagctgctgtgtaagagcggtgacggccggggaacacccaaatgacatattctccgcgtccttcctatactgtagtgatgtttactgaagtgctgagaaaacatgggaggagacac

SEQ ID NO: 245390 - DNA, 122 bp, Homo sapiens
ctgagttgaggtggtgaagtctcatcaactactgcagatgcactggcactcagtgaaacacggagctccagaaacggatcggggccaggtatggtggctcaggtctaaaatcctggcacttt

SEQ ID NO: 245391 - DNA, 122 bp, Homo sapiens
tgctgggtcacgcgaggaaaatggaattaagagtccgctgacccggagggctggttccggcgcactattgactggctccagggccttgagccggggatttaacctctcggcttctcgatttc

SEQ ID NO: 245392 - DNA, 122 bp, Homo sapiens
atccggcgtccaacttctctcccacacaccgggatcgctgcaggattctggggggttctgcgatgccggctgagtcgcccggcccatccactccctcttgctgctatcaccaatcaccacaa

SEQ ID NO: 245393 - DNA, 122 bp, Homo sapiens
atcattgagcagggggctctccttcctgatgtaggggatcacccactgcagggctggccccgtgaggcgggtgatgaggaacgtcaccttcagggcgtcgttggagaacgtgttctcgtcca

SEQ ID NO: 245394 - DNA, 122 bp, Homo sapiens
catgttcattagcgagctgctccctccattttgtccccagtctcctttaggcgaactgcgcggttctatgttaaagccacttagtaatgaaactataaaagggaggaagtggggtgggcgtg

SEQ ID NO: 245395 - DNA, 122 bp, Homo sapiens
ggcactcttccctgcagagctgcatacacacctgcaccatgattccaagtagctgaaagacgagatctggagagcactggaggagctgagggcctgggtgctgctgcaaaccaacagcatgt

SEQ ID NO: 245396 - DNA, 122 bp, Homo sapiens
gggctgaagtgtcacacccggtttcctgggaaaagtgcagtttgggactcagaaaggacacgttccagttttgaatcgtgatttcccccgccctcagtttgaacaagaagcttttcctcctg

SEQ ID NO: 245397 - DNA, 122 bp, Homo sapiens
atgccgatggctggtgtacacgccgttggctcatggggagaggcgacggccgtctgtctgcggattgcccacgggagggcccggttcctccctcggaaaccagagcacagccatccatcact

SEQ ID NO: 245398 - DNA, 122 bp, Homo sapiens
tcctgggctcctgaatccatgacctgaaagggaacagaaaaaggcctttggaaagcggaacgtgccttcaggcagcactagaatgggattagaaatccctcctggaaagtaggaggcgaagg

SEQ ID NO: 245399 - DNA, 122 bp, Homo sapiens
caaccaaaaattgctcaaacattgccacaagttccccaagggtgatgggagggaaaggagcggtggtgaacgatccctgggtaagaaccacaggtgtgaaccatctgaaaaaacctgtgttg

SEQ ID NO: 245400 - DNA, 122 bp, Homo sapiens
aggggcgggacgaagttgggggcggatggaggttcgcttctggggctactcctccttatacgtcgctgactgccccgccgcgattggagcttgcgcacccctggaaagcctccgcctgactt

SEQ ID NO: 245401 - DNA, 122 bp, Homo sapiens
caaggccaggccctcagctgtgggggcgtgtgctgagcaccaagcagagggagctgagcccggcgccagccttctccagttctgagcaggacacaggtaccagggtgacatcagagagcttc

SEQ ID NO: 245402 - DNA, 122 bp, Homo sapiens
tattactgtcctcacattcccgcccctgcccatttttagctcttacattggttctttggtcgtatactaagaacctcagatgctgtgtacccttggtttagagttggaaatctgacagattt

SEQ ID NO: 245403 - DNA, 122 bp, Homo sapiens
tcactgttttcctgcattcctggcgcgggactctagccagaggctccgaggactttgtagcgactgtcccaagcgtccagttcgatgcttctcagggcggcttgctttaagggcccacccct

SEQ ID NO: 245404 - DNA, 122 bp, Homo sapiens
tgagccaccgcacccagcttagctttgtggtttcttaaattcttttttaatttttttagacgagttaagtgcagaactgagaagggaaaaaaagtacaaggaattcaatctgtgactgtgaa

SEQ ID NO: 245405 - DNA, 122 bp, Homo sapiens
ggtcagaggccagcgctggaagcccagaccacagcacccgggtttaaacaggagcggaggcgccgggaagggccgggggggccggctagggccggccagcttggaagccgcaccctcgcggc

SEQ ID NO: 245406 - DNA, 122 bp, Homo sapiens
gatggggcagacaggctctggccaagagtggggccggggtctcccaggtggagcagaggccgggagacccagggttagcggtacgaactagggagtggactggaagtcgggaccagggcaga

SEQ ID NO: 245407 - DNA, 122 bp, Homo sapiens
agaaagctccctcaccggctcccctgctcctgctcaacaggccctggtggctgcagatgtcgtgccccccagttggttccatggtgaacacactccagtagcggattacttttgccctttgt

SEQ ID NO: 245408 - DNA, 122 bp, Homo sapiens
gcccccgcccgcagcccccggccggccccccgccgggacaatgtgacgccccctccccgccgcccccggcacgccgcctctgtcaccggctccggccctgcactctgcgcccaggcttccga

SEQ ID NO: 245409 - DNA, 122 bp, Homo sapiens
actgcctccagcccagccctaatcgccgatctcaggcggctgggctgcgctggggctgagcggctccagcccaggctggggttgtgtgagcagcaggagcattcttccaaggtaatgattaa

SEQ ID NO: 245410 - DNA, 122 bp, Homo sapiens
tcatggtcgacggaggctgcgaagggaaaccccagccggaagtagactcccaggatgcagcggaggcgcgaaggcatgcgccggtggacgctctgattggttcctcctgctgtttttaaagg

SEQ ID NO: 245411 - DNA, 122 bp, Homo sapiens
ggcggtcccgggagccctgggccgcctccccccgccccccagggctgtcacccgctggcgcgtggggctcctactgggaccccggtctttggacctggcccctgtggccccagtgcctgcgg

SEQ ID NO: 245412 - DNA, 122 bp, Homo sapiens
ttggtttgacacccaggactaaactcttctccggaccccaagatacatacccactgctcccgcccccaaaggagagggtattgttcaaccaaccttggaccacagaaatcgcttctgtcctg

SEQ ID NO: 245413 - DNA, 122 bp, Homo sapiens
atagaaaatggcatcgggacaaaagaagacctgaagaaattgggggcatcacacggttatcgtcacacggacattgtcacacagtcatcgccacatggtcgtcgtcacacggtcaccgccac

SEQ ID NO: 245414 - DNA, 122 bp, Homo sapiens
cttcctaaaacctctcctccccaaaagccactttgcaaaagcagcgattaccaccaaccacgagaaacacaggagcctgccttccactgtttaccactgggcaggaagtcgtttatggacca

SEQ ID NO: 245415 - DNA, 122 bp, Homo sapiens
ctatgtcaacgccagaccttgtcctttataagctaattagtcacagtgatgcacctgttgcgtgctgcaccctctgtctagaatgctctccctccaatatctgcatagctccctctggtgcc

SEQ ID NO: 245416 - DNA, 122 bp, Homo sapiens
agcctgtgtgagtagcggcgcccgggagagcggggatctgctgaggggcgctggagactccgcggctggaggcgcgcgggcgtgcgcacgcgcgcctgcgagtgtgagtgtatgggtgcgcg

SEQ ID NO: 245417 - DNA, 122 bp, Homo sapiens
tgttctgtgtgcaccaccccacggggtgcaaatccgcgatgactacgtcacaccagaagtcggccctgcggtcctccccgtaaccgcagtagcgcagaagcagcagctgcccgcacgtggta

SEQ ID NO: 245418 - DNA, 122 bp, Homo sapiens
ctgtcccagaaacattcagaataatacatcataccaaatacctgggccccatggcctaatcgagttggcatataaaattaaccatgacacctacttatagttcataggtttttaataatttg

SEQ ID NO: 245419 - DNA, 122 bp, Homo sapiens
ttataacctgtgtgaaaaatgcgctaactgaagggtctggttcaatatcctcgttttccccgctgcttctagatcttcatctggaggagaaaaccttttggcattttcttcccttttttcct

SEQ ID NO: 245420 - DNA, 122 bp, Homo sapiens
ggaaggcagaatcgtacctgattgggacaggtgaccttaccaggaaaacggacaatcttccgccaaacgaactttaccccggaggacccaggcagggcacctcgggagccttcgtcccgacc

SEQ ID NO: 245421 - DNA, 122 bp, Homo sapiens
cgctcttctcgcagctagtctcccgcggcctcccaattcttgcctaatttggaagagagccgcagcccttctgctgatgcgcgcgcgctggcgcctttttaaggcaactggcggagtggcgg

SEQ ID NO: 245422 - DNA, 122 bp, Homo sapiens
agcccccagccccataggaaggcgcttaagaagcttagatcccaggggaagttgagcctccgatcgggtggcagcgcgtggggaacccaggctgcactacagaggacgcaggacgccaaaac

SEQ ID NO: 245423 - DNA, 122 bp, Homo sapiens
agagccacaaggttcacggaatagagtgtgtccggaatcagccgctccagatgcaccatgcgcgtgtttcctggcactactatctgcaggagaggaaatgccaaattctgcctgacaacaac

SEQ ID NO: 245424 - DNA, 122 bp, Homo sapiens
acaataacgtggtaggtagcaacatttaatgaaatgaaaataaggaagaaatgggttgatcgggaaaattaaaaattggtatcaattgaacatgtcagttggtagtcacatacaaagatcca

SEQ ID NO: 245425 - DNA, 122 bp, Homo sapiens
tcccattccacagacaggcagatcaaggacttaaggagacaccatctccctatttctcatcgttctcacttgacttaaccttgcagaagtggagctggaagtgggtgaagaaggctccttgg

SEQ ID NO: 245426 - DNA, 122 bp, Homo sapiens
cactctcaaatgtctctaccaggcaactcacgccttgactttcctccctgtgtatccctgcgccagcagttcatctctctgagccttgagatggagattcctaaggaaaatgaagataatta

SEQ ID NO: 245427 - DNA, 122 bp, Homo sapiens
atatgatttgtcatttgacacccccaccattcaaaaatacaaataaccattcttaactttcgggctatataaaagctggtggtggaccggccgtggtggctcacgctgaggcagagaattgc

SEQ ID NO: 245428 - DNA, 122 bp, Homo sapiens
tatctgaatctaatccaacttccactttcacttttcaaagggataactgaggcctagttgcggaagagactggcaatctgcctactaaccaggagtttctcccaccacgctctcctgaccaa

SEQ ID NO: 245429 - DNA, 122 bp, Homo sapiens
gaacaggtcccgccaggggttctcgctcttctggttcaggtccagcagccacttctggcccgtgggccgcttggccgggcccttctcctggaggacacgggcgtcggcctcctgctgcggcc

SEQ ID NO: 245430 - DNA, 122 bp, Homo sapiens
tggaggaaatgggtgcgcccttgctcgacctttggtgattgccgccacaggccttcccgccggctaactcagcgtgcccaagtcccgtgacttagtgccaggacggtgctgtgacccgttat

SEQ ID NO: 245431 - DNA, 122 bp, Homo sapiens
gtccctccctgtgcactcccgtaccagcctggaggtggtccagggccggacagggccgcccgaccgcgccccagcaacctccccagaacctgcctcccggcaggttgcggacaagtctgtct

SEQ ID NO: 245432 - DNA, 122 bp, Homo sapiens
ggcggctcggtgctccggtgctgcagaggcactcaaggggctctccacgttcgccttccacgttccccttcgcagggaccgcagcgcctggggcacttcgccatgggcttggccgaagtggg

SEQ ID NO: 245433 - DNA, 122 bp, Homo sapiens
ggagctgacttagctggttcaggcatgctgtcagaaaacaataacagcagtgagaatgaacgcacttaaataaaagctcgtgtctagagtctctccttttataggcctttcatgcaaataaa

SEQ ID NO: 245434 - DNA, 122 bp, Homo sapiens
gcaggagagaggggtgcctgccacaggttgtcaccctcgccgcctcccccggcggcgccccgccccttactcagccctcattactgcagcgcctcgcgggggtctggcccggagtggagggc

SEQ ID NO: 245435 - DNA, 122 bp, Homo sapiens
tcctctaccaggccacaccggaggcagtgctcacacaggcaagctaccaggccacaacaacgacacccacctcacctctggcacctctgagtaagtactgggcccacggccccatgccagga

SEQ ID NO: 245436 - DNA, 122 bp, Homo sapiens
ctgagttctagaatgccttctgggcatgggctcctggctgcaagctgtccagcacggccccgtttgatccccacacagctgggagggtggaggggctcttcccatgttacggacggggaagc

SEQ ID NO: 245437 - DNA, 122 bp, Homo sapiens
gagggagggggcagagcgcttggaaagtttggtttgggggcctcctgtaatgagagcgtccggaatccttctgtgaccaggcaggagcagcattattggtgatgagcgctgggaaccggcgg

SEQ ID NO: 245438 - DNA, 122 bp, Homo sapiens
tgcccttgtgcaagttacttaacatctctgagctacagttccctcttctataaaagggatcgtctctataccacatgattggcctgtataataaatatggtagcctagctcagtaccttcct

SEQ ID NO: 245439 - DNA, 122 bp, Homo sapiens
atattctgccaaaagagttgaaggcactgggggtttacagcaagtattttctctttaaaacggtttattacttcaacaagcaaagagcaaaccaactggagaaatgtatgttttttcttttt

SEQ ID NO: 245440 - DNA, 122 bp, Homo sapiens
tggggccaacacgcaaagcgcgtcaccttccaaccggcggagagtgaaggaaaacaggtacggctcggcttgtaaccttcactggaaacagaaaccatcctcatcattgatacctggtgaac

SEQ ID NO: 245441 - DNA, 122 bp, Homo sapiens
tcggccctccgccccggggcatcctggcctgagcaacgacccgggctcccgggccacccccggctccagccacccgctccgcccggctgaaactcaggcgctttccgaggagaagtgcggcg

SEQ ID NO: 245442 - DNA, 122 bp, Homo sapiens
cagggagagggggcaggcggtgaaccgagcggaccgcggtgaagacaggcgaggcgggggcggggcggggcggggcggggagcgagtcccgccgggagggagggaggctggcggcggggaaa

SEQ ID NO: 245443 - DNA, 122 bp, Homo sapiens
acacactagcctgggagcccacaaataacctccagtagcgtgggacccatccccagggctcgactggtgatgtattgactggcttcacattctccattgcttgctctgtgctcctccctgaa

SEQ ID NO: 245444 - DNA, 122 bp, Homo sapiens
tttccggagaaccgagattgcgacgaacaaccaggaagcggctgggttgagagctgtccccggttctccgttctgctctcgggggcaccttccggggttcctaagccgcggggcccctcgct

SEQ ID NO: 245445 - DNA, 122 bp, Homo sapiens
gggcctgcaagaatcgccggactcaggggccttggatgtgtgttccctggactgaatgaacggggctgtgcacctctctgtctgcagccgtactctctaccctgtctcaacccctgctggaa

SEQ ID NO: 245446 - DNA, 122 bp, Homo sapiens
ccccctcacccgccatctgatgccattggtgagagcagtcagggagaggtcaccagactccgcgttccctcccagctcggcagtgcctgattccttgataggccagaaagcggctggatttg

SEQ ID NO: 245447 - DNA, 122 bp, Homo sapiens
agaggcgtttctgataagggaccgggaccttagggacggagggcgcagtctttgagttatcgttgtccctaataccgaggcccgttttattttccagaaattattcctacatgtgaaacacg

SEQ ID NO: 245448 - DNA, 122 bp, Homo sapiens
catcaggacaaagtacaactattgtgccttggcccaatcactactttctttgtctggggccgccgctggctcctggctgcctttcgcacttttctccacccccacccctttctccccttccc

SEQ ID NO: 245449 - DNA, 122 bp, Homo sapiens
ctaacttcagcttacacatcccactaattgaccactgagtcttacttattttaggcaaaacgaaaccaatagaaagttttgccttttctctatgtagaagggactaatgattctataagaat

SEQ ID NO: 245450 - DNA, 122 bp, Homo sapiens
gtcttataaaagatcaggagcagacttattgtgcagatcgtccacctcttcctaatggagcgcatcttgggtgcccgagaaagtcctggttgccccagctcccgcaccttctcttgatataa

SEQ ID NO: 245451 - DNA, 122 bp, Homo sapiens
cagggggttctgctgacatcacaaatcacacatggcttagtcgtttactaatggtcctgtcgttacttagtcgttacacatggtcctgtcgtgtcgtttacatagagactctccatccttac

SEQ ID NO: 245452 - DNA, 122 bp, Homo sapiens
aggggccctccgcagccaccggggatgggattaagtggcaggttctcggccctgtgtagccgccatcgggcagaccatctggcttggctctagccaccgggacatctgtccccggttctgag

SEQ ID NO: 245453 - DNA, 122 bp, Homo sapiens
attttgtctccttttcctgagtctgtcagtctctgggcatcttaacctaactagctatgtcgcctcagacactttatttatttaacctatttttttctttttgagacagagtctggctctgt

SEQ ID NO: 245454 - DNA, 122 bp, Homo sapiens
cgccggtggtggtcacccgggtgtgcgaggtggggcccaaggagccagcagcagccgtcgcggccacggccaccaccaccccagccactgccaccaccgcctctgcctccgcctcttccact

SEQ ID NO: 245455 - DNA, 122 bp, Homo sapiens
agcaggcgtggaggacgatcactgccccagggtcaagggccacactgctaccgtgacagacgcggagcccggcctggtctctgtgccgcctcgcgctgggcggaggccgtctctgggtgtcc

SEQ ID NO: 245456 - DNA, 122 bp, Homo sapiens
ggaacatattactgttgcaattcctgctgctttattaggtttgtttgtggagtttcctagcgggagaattaggaaagatatcatcaaaaggttccttctgaaaacattccagttccctttaa

SEQ ID NO: 245457 - DNA, 122 bp, Homo sapiens
tacagtttgtctacttcaaagctgggctcctctctagggcgacttttaactgcccctacccggtaggttccacagctattgttatattattcaaaccaaagctctagagggggtggggagaa

SEQ ID NO: 245458 - DNA, 122 bp, Homo sapiens
cgctctgcgcaggagttctcgagtgtgcgcagtctggcacgtgagtcagcgcggggtctacgcggattggtgcgggggaaggggagaaggatggtcccattccccctccatcctgctttccc

SEQ ID NO: 245459 - DNA, 122 bp, Homo sapiens
gaatgggagggaaggcctgctagagctattttctaaccaacctgccttgggcctgagtgacgactccagcctgggctcttggagtggaccgaattctactaatgaatatgggaatgccctag

SEQ ID NO: 245460 - DNA, 122 bp, Homo sapiens
aagttcccacgcacccaccgggactccgattcttcccagtcgccgaggatggtgtcatggcgccccgaaccctgcttctgctgctctcgggggccctggtcctgacccagacctgggcaggt

SEQ ID NO: 245461 - DNA, 122 bp, Homo sapiens
gagactgcaggcggccgtgctgtgttagcgggcacggggaggagctgggaaggagcgggccggcatctccctgctgtttgctctgaaggaaccgtcctggccagcacccactctcacccgct

SEQ ID NO: 245462 - DNA, 122 bp, Homo sapiens
aacacaatggatcagcgaggccccaaatgcagatgtgattagcacactggtcagtcagcccgcaaaacactttcaccaagtcctctaaagtgttgcataaggcaaagataacgttaagtctg

SEQ ID NO: 245463 - DNA, 122 bp, Homo sapiens
caagggtctggtttttattttgcttgaatataagttctgacaggaaagggcaccaggttgcggggtcattgaaaacaaagttgacagtttagattagcaggcactcaccatggtccctcccc

SEQ ID NO: 245464 - DNA, 122 bp, Homo sapiens
ttttcctctttccttctttcccccagtgtatcttttggattccttcactgcattggccaccgtgagaggggagtttacaacgacccggtaaacccctccctaagtgactgtggaccccctgc

SEQ ID NO: 245465 - DNA, 122 bp, Homo sapiens
accacacagccggccagtgctgcagccaggacaggagccaggtggttttcagccacaacccgggctcggcccgtgtctctgcacacttgtgggctcagtctaaagggaacacatttcttgct

SEQ ID NO: 245466 - DNA, 122 bp, Homo sapiens
ttttttgaatggtgtcagtttcctcacttgcagctttttttcagtcccggggtctcatctcggctggcacagagcgcttagttgtcacgtctcctaggcaactgcagtctgtacgggttctt

SEQ ID NO: 245467 - DNA, 122 bp, Homo sapiens
agtcatgtgtttcaattattttcaagaatccatttgtcaaataagtgaagcgatgtgggacgtcaagttcaagctcgggttagtgcctttctacatctgatatgatgtatcttctgtagcca

SEQ ID NO: 245468 - DNA, 122 bp, Homo sapiens
ttctctcactctgattggcctatattccccctgagggtgtggccaaatctcattggctctcgcgcccgaatgtatgacgtcatgcgccagcgcccgtcgcttttgctggacgtcatcctcgg

SEQ ID NO: 245469 - DNA, 122 bp, Homo sapiens
aaatatgtggtgttatattacatcagagcctgtaagaaaattttgaagagtctcttgactcgggggtagaaaggcagggttagttgcaaaaagcaagataagttacatttgaaggcattctt

SEQ ID NO: 245470 - DNA, 122 bp, Homo sapiens
ctatgaagaagacacagagagggtctggaattttttggtgactatgatcctgttaagcctcgctgcttgcttggctctagacatcagtcagctttcaactattattattattatcctttgaa

SEQ ID NO: 245471 - DNA, 122 bp, Homo sapiens
ccttcgcttgcctgggggtgactcgaagtgtcttgatgggaaagtagagacccagcctctcgcctgtctcacctaaaagaagaaagaccagggaccccggccccaagcaaaacaaccctctt

SEQ ID NO: 245472 - DNA, 122 bp, Homo sapiens
gcagttgtagggcccagagctagagcggacttccggtagaaaaacccgcctgccttctcgcgcacagacccctgggagttgtagtttcaccaaaggggccagcctgggtgaagatgggtgaa

SEQ ID NO: 245473 - DNA, 122 bp, Homo sapiens
tccctaccaaggtctgtgtgtgtctgtggcatggacctgtccgtggccttagcctattggcggcgtgggcctgtctgtggcgtgggcctgtccgtggccttagcctgtcagcagtgtgggcc

SEQ ID NO: 245474 - DNA, 122 bp, Homo sapiens
tttttgagattacctaccacttccagggtcagagcccttcacttcatattcatgaggagacggggaattggaatatacccgcagccgacaatctcagtgtgaaatactggtttactgtttgg

SEQ ID NO: 245475 - DNA, 122 bp, Homo sapiens
gatcctgggttggggcggagcggggctgggaagatcctgggttggggcggggcggggcaccgcagagcggacagccggattcaggcaccaggaacccaccggtcccactggccaggtgctcc

SEQ ID NO: 245476 - DNA, 122 bp, Homo sapiens
aaacctaatgggcatcctgctttgtaacaactcacttttgcagtaacaaatccatttctgcggaagctcatctagtcttatgagagcaagaactgactcactgccagggaaaatgaaactaa

SEQ ID NO: 245477 - DNA, 122 bp, Homo sapiens
caacaactcaattcaggcaggactactaatggaccagatccttcagaagtcgacagaagtcgacatttggatcaccgcaacaggaaaagaaccatgaccagctaccagctaaaggcaaagga

SEQ ID NO: 245478 - DNA, 122 bp, Homo sapiens
cagggacgattagtgacacagccaggaaggcacgctatccccattttacagatgaggaaacggaggctcaggttgggctggtgactaagggaagcagcatgtggcaggtggcttgaggcatg

SEQ ID NO: 245479 - DNA, 122 bp, Homo sapiens
gaagtgtacttcaggccagtcatggccttaccagggcagctccaaataggccccagaacccgggggtaagcaacttcttagagaatttacttctccactttgggaggccgaggcggatggat

SEQ ID NO: 245480 - DNA, 122 bp, Homo sapiens
aaaatagcgaaagacaggaggagtcaggatgtggcagtgctgccttcacactttccacttcgcaagttcttttaaaggttccaaagatctccagaccattctctgccaaaccctgccgcctc

SEQ ID NO: 245481 - DNA, 122 bp, Homo sapiens
catacttcttgaaagaaatacttctgggtcatgagtgtgaggtttttgacaaaagatgatcgaaacaataatgatgttatcttaggcttgtgggtccatttcaaaggatgttaaagcactct

SEQ ID NO: 245482 - DNA, 122 bp, Homo sapiens
ccgatcttcactgcaacgtcactatcacctcatcaccgctgtcactcttgtcttcaccatcgatgtcctcattgctgtccccatcactgcctccatgatcgtcactgccattgtcatcagat

SEQ ID NO: 245483 - DNA, 122 bp, Homo sapiens
aaactattgtgcactctgtgcttgtaaatgtccctcgtccaaaccgctactcctggagcccgtctggcagaggatgtggtctgtttttgatgtcccccctcccgcccccctggtgtgaacgt

SEQ ID NO: 245484 - DNA, 122 bp, Homo sapiens
aattcaggtatgaaagaaaacaggcaaggaggcactgagggagaaagacacagactttatcgctctgtggctcattgttactggaatattctaaaactcttgttcacatgctattatgactt

SEQ ID NO: 245485 - DNA, 122 bp, Homo sapiens
ccaaccttcccagacatgtgagaacagtaagaagaccctgcacacacaaaggagtttctccgtcacagagaaaataacaccaggttcagggaccccagggactctgcatggtgctgacagac

SEQ ID NO: 245486 - DNA, 122 bp, Homo sapiens
aagcaggtggtccctagcttctagatgtccccagggtatgtggatgaccctagggtctgtcgtgtattcttgtctaggcctatttgggtgtctcttctatgtcggacagcctgtgaacaagc

SEQ ID NO: 245487 - DNA, 122 bp, Homo sapiens
tgggaccgcctgtctgccatcaccatgcccagtgtggctcgccacaccatgcagaccatccgatccattggctactaccgcaacatatacaaccccccggaaagcaacgcctccatcatcac

SEQ ID NO: 245488 - DNA, 122 bp, Homo sapiens
tgaggggcaggtgagggcggggggccgggctggctgcagccatcagcagctctcctgagccgggaggggagaggtggcgggaggtgctcagacctgtcctgccttcctatctgtacacagat

SEQ ID NO: 245489 - DNA, 122 bp, Homo sapiens
tgaccttggtcagatcatgtaaccccctgcttcctcatctgtaaaatgggactagcaccacggttcacctggtcacctgcagttcagcactgatgggaggaacaaaaggacggcaggttatg

SEQ ID NO: 245490 - DNA, 122 bp, Homo sapiens
cctgaggcagaagagtcctcctgggtttctaaatcctataccagagagtgactgagggcccgccctgcactctgggacaattaacggatgaagtctctgcgggaaaggaggggaagacaatc

SEQ ID NO: 245491 - DNA, 122 bp, Homo sapiens
ggaagaagatcagaggaagacctatcgaggatgggtttctcctgcttctcctcgggttggcgctgcccaggatccgcttcctggcctcggtgtactcggcttcccactgtgccagggacttg

SEQ ID NO: 245492 - DNA, 122 bp, Homo sapiens
actgagggctgggtccgggggagaggagtggccagggaggaggggcgacccaaaggcctccggtgatgcgctgacagaaggtaaaaacaaggaacaaagcaaaaccacacacaggacggcag

SEQ ID NO: 245493 - DNA, 122 bp, Homo sapiens
tgactcggttagctattcttcactcagttcagtaaggggcaagtgctcattacaacatcccgtctcctccaaaatgtactaggtatgctgtacaaagattttactatgtgcttctttccaaa

SEQ ID NO: 245494 - DNA, 122 bp, Homo sapiens
gccagccgtcggcccggcccggtccggcccggcccggggctccggggaggggccgctccccgcccacaccgccgccccgcctgggacagcgcgggcacctcctgcctgcccgccctccgcgg

SEQ ID NO: 245495 - DNA, 122 bp, Homo sapiens
ggacagcttgaggggcaggaggcggacacaggtgcggcgggggacgcgggggtggctgcccgggaggcggacgcgggtgcggcgggggacgcgggggtggctgcccgggaggcggacgcggg

SEQ ID NO: 245496 - DNA, 122 bp, Homo sapiens
ctgcccgtcccttttccccccttatctggagaaatcagcagtttttttggcctccaggtgcgatttgtactgaatgatcacagttgggctttctctccggcgctggaagcctgaactggctt

SEQ ID NO: 245497 - DNA, 122 bp, Homo sapiens
ctgtcttacctgcagcagcctcagttatgtttttgacaactatagcaaccaactacctctcgcgagaacttacttttggccatcgcacgagcaagtttattccaagactcgcgataaccctc

SEQ ID NO: 245498 - DNA, 122 bp, Homo sapiens
ggagggaggcagacagttcagggcgctgagtaatgccggggtgaggggaggaatctcccccggaagagagaccggcccctcggcccccgccactcctcaaagccacggtgcagcgcggggac

SEQ ID NO: 245499 - DNA, 122 bp, Homo sapiens
aaggggtcatgggggactagatgctcttgttggtttggtcagaagctggtagagggttcacgggagtgatgagatggaatttgctgcatcagaagtgtgagagacagccaggctcattggct

SEQ ID NO: 245500 - DNA, 122 bp, Homo sapiens
catctgtaaaatagggactgtaaaaaaatacttctcaccacctctgtcaaggagatgccacgtatctatagggcccaccacaccggaagtgcttaatgaacaagagttgtgtttgttttttg

SEQ ID NO: 245501 - DNA, 122 bp, Homo sapiens
gagcggggcacaggctgaggcggcgccagcacaactgccgccgcgcgccccgaggagacccgggcacgaggaaacaaggagaaatcaggactccttccccggaaccgaccggcagctccgcg

SEQ ID NO: 245502 - DNA, 122 bp, Homo sapiens
ctaactgcctcgaaaagcctaggattcgactttgaatggtccgttaatgtggttacaaaacgtgactcggttcatcgggagccctccgtaagcaagacaagcacccacctgcggtcagagca

SEQ ID NO: 245503 - DNA, 122 bp, Homo sapiens
cacgcactctctgaaggtggcggggagggcgggcacccggccgccctggacctggaggagcgccgcccgggccccgtgggcaggcaggcaccggctctcaggaacagcgcctttggagggtg

SEQ ID NO: 245504 - DNA, 122 bp, Homo sapiens
cggaggccgaacccagaggaggcggcgtggcgccgggcggggacgcgagagggacgtggacgcggcgaccgaggacgcggggatcctgcgggaccagtggctccagtcgtagcctcctggga

SEQ ID NO: 245505 - DNA, 122 bp, Homo sapiens
ctgaacgcaaggctgtgttgaacgcatcgggcctgacaccctcagacacccgggacaatacggggctgcactgaatgcatgggacttcatacccaaggatacctacaagacaataaagccgc

SEQ ID NO: 245506 - DNA, 122 bp, Homo sapiens
gctgctcccctcggtcctcagccatgcccccagtccctctcccagcgcctccaaagtcggcgtccacctccttgagccagccacccgcgatggggcaccccagccacctccaccgccacccc

SEQ ID NO: 245507 - DNA, 122 bp, Homo sapiens
agaaagatcatccacactccctttgcggctgcgccccgggctgctccccgtgttgtagagcggtcagcacttcggagcagctgggaatcgcgtaccctgcgtatcagctttgaagctgctgc

SEQ ID NO: 245508 - DNA, 122 bp, Homo sapiens
cactctttgtgacgtaggtctttctcaccagtcaataaaatataatccgaaagcaacctccgggctggctttagctcagcggttacttcgacagttctttaattgaaacaagcaacctgtct

SEQ ID NO: 245509 - DNA, 122 bp, Homo sapiens
cggcgctttggaacccgaggtggggggaccctggcggtggggcctggtcctgctatatgccggcgcctcggctagagtgagcggcggcgacgcctctttcctccgtctctttccctgtcgct

SEQ ID NO: 245510 - DNA, 122 bp, Homo sapiens
tggggaaatcatccggcgccaggcgccatgccgcacaacactgtggagcagccctgccggcggggtgggtgcctcctatctaaggcactggaccaggggctctgccagcaaacatggttctt

SEQ ID NO: 245511 - DNA, 122 bp, Homo sapiens
aactgggcaacagctggcaccacaccaggcattgcaagaaaccacagctgaattccttggcgctcatttttataaatattccacaggaaggatgtcagaagcctggtttatccagcatagag

SEQ ID NO: 245512 - DNA, 122 bp, Homo sapiens
ttcagttccctttggtctcttgcattcccccttccctcagcacaattcctgggctcatagcggatgctcaataagtatttgtagaatgaaccaaagaaatcagacccttggtgacccagggc

SEQ ID NO: 245513 - DNA, 122 bp, Homo sapiens
ttgggtcctcgcctcccccttgtccctggcgctcccaagtccctggatgtgggttgggagcgggtctccccgcgcgccctctgctggacgacgaggaaggcacagcctgggtgtgcgctccg

SEQ ID NO: 245514 - DNA, 122 bp, Homo sapiens
taagggaggcccttttccaacaaggagcgttgcatgctgggacttgtggtcttgggagttcgtgcacgcaggcttccgggactcctggtcgcgttctgttgtttgtttgtttgtttgtttaa

SEQ ID NO: 245515 - DNA, 122 bp, Homo sapiens
tgcaattggaaatttcagtaacaagcctccagcaatgacagtttgcttggatctctttctcgtttgcatgtcgctagaggaatcttcagactgagcaatatgaccctaggatgccagggatg

SEQ ID NO: 245516 - DNA, 122 bp, Homo sapiens
gagatgaggccccttcctgcctagtgcacacgatcacggggatctataggcacacgatcacggggagagaagcagaaccactcggagagcacattgcaggggttcaacctcacgcagtgatg

SEQ ID NO: 245517 - DNA, 122 bp, Homo sapiens
ttctgttgaactctgcatttagagtctgttctattgcaccaagcaattctgagcatattgcggtgggtgttgcctttcaggttacctagtttctcatattgctgtaaatagaagtcccctga

SEQ ID NO: 245518 - DNA, 122 bp, Homo sapiens
ccaggtgcaggatataatctcgtggtgcgccatttttcaagcccggaaaagcgcagtattcgggtgggagtgacccgattttccaggtgctgtccatcacccctttctttgactcggaaagg

SEQ ID NO: 245519 - DNA, 122 bp, Homo sapiens
taaagggaggagtccaaacccctgaagaagttccatgatggaattgatgcctcatggctccgtcaaggagatggttgtccctcatctgaaggctgaagctaactgctgccttaggcaatgga

SEQ ID NO: 245520 - DNA, 122 bp, Homo sapiens
ctcggggacctgcagcccgccatgcctgagcctccccccatcccccgccgtggggtcctgcgcggcctgagcctccccaatgagctccgccccctgctctgcggcgctcgatcccatcgacc

SEQ ID NO: 245521 - DNA, 122 bp, Homo sapiens
gtccattctcaggtactgaaagttttccgggctcttccgcacccgcggatgtggcgaagccgcggggcagctccgctcgcgctccagtcgcaggatgtccttgaccgagaagggggtggagg

SEQ ID NO: 245522 - DNA, 122 bp, Homo sapiens
ggccggggcattgtcactcgcccctgggggttccagaaaacgcagtgcggccggggaggacgaccacacggaccccctgcgtgtttcggggggcacccaaaagaagccccgcgctggggaac

SEQ ID NO: 245523 - DNA, 122 bp, Homo sapiens
cccgaagcgcgcgaaccgctctccgccccaggtcccgccccccccgccgccggcgtcacacgcaccgccacttccggcatgcgcagggacgcaccttccggctcagctcctccgtggctgcc

SEQ ID NO: 245524 - DNA, 122 bp, Homo sapiens
gggcgggacatcagttcaggatctcaaaccgcattggtcgtctgcctcggctgagagaggcgatgcttgaagttcattggtctttgtgagacagggtaagaaaagcagcgcgagcttggcgg

SEQ ID NO: 245525 - DNA, 122 bp, Homo sapiens
accactcccaggggagaagagccacttttggaccccggcatcccccctggcacctgagtgcgggtgaaccgagcaaggagcaaaggctggcattctttgccaccgagggcaggcggggggcc

SEQ ID NO: 245526 - DNA, 122 bp, Homo sapiens
cgcctcgcggtcttccgagctgctgggccgggaggcgctgagggggcggggccttgaggtcgcggggcggggctccgcccacgctctcaggggctaccccagttaaggaggcgctgtcctgg

SEQ ID NO: 245527 - DNA, 122 bp, Homo sapiens
tggctttttgttttgcttttgagttccactagtttcaagggttgctagttaaccccatcacgggacacactcaaaggataggctttttaccattctggaccaaagcaagaacgcgtataaag

SEQ ID NO: 245528 - DNA, 122 bp, Homo sapiens
ctttaattcccttttctctctctttccaattatttaaccagttacttccacctggacatacgataggaaattcaaactcaaaatatgaaaattgatcttaataactctcccttcatatcttt

SEQ ID NO: 245529 - DNA, 122 bp, Homo sapiens
gaggcctaacctatcttttcctcactgattgcaaagctccctttaccatatggtagattccggtgtatcctgagctggactctgcactctctggtgcctttcccagcacttttctccatgct

SEQ ID NO: 245530 - DNA, 122 bp, Homo sapiens
tggcagcgtggcgggaacggctgcttctcctctgcccagggccctgttcttggtgggactcggctgcccctcctctgctgcctcacctttcggagtgagctgtgggctcaggcccttcaaac

SEQ ID NO: 245531 - DNA, 122 bp, Homo sapiens
aggtccgtggacagactgctttgctcgttgttgctcttcggaggcggcgatccccgaaggcgagctgaaatacggctgcaggctacaatttgcagccgacgattatggaagacggcaagcgg

SEQ ID NO: 245532 - DNA, 122 bp, Homo sapiens
tcaaagcttggtgtttgaaatgtctgttccggatgctggacttgtactctaagtctgggacggggaatgctagatgggccctttttttttgcttttattactattattattattattttgag

SEQ ID NO: 245533 - DNA, 122 bp, Homo sapiens
cgctccccttcctggggctgccaggagcctagagcgtgggaaacggctctgctgtgtgtccggggccaaagacacgcaggggcggtcgtgccagccaggctctcgggctcttgggcgctcgc

SEQ ID NO: 245534 - DNA, 122 bp, Homo sapiens
ggagtgggggccgcccccctgctcccgggccgcctctccgctcgggcgctcctggactctcggagggagtgagcctcaccgcgtactgccacccccagccggcgcccattcactttatggca

SEQ ID NO: 245535 - DNA, 122 bp, Homo sapiens
cagcccctgtccttggctccgttatgcttacaggctccaaatggcctttatctcggtcctcgcagcctgcgccagtgcagagagagaaacgggcgtcctaccagctgccgggaactcaggaa

SEQ ID NO: 245536 - DNA, 122 bp, Homo sapiens
ccttcctgccccctctagtagtctgcagtgtattgtttccatctttgtgtccctgtgtaccggatctttaagctcctgcttacaagtgagaagattcggtatgtggttttctgtttctgtgt

SEQ ID NO: 245537 - DNA, 122 bp, Homo sapiens
cgattgatggagaaatcagattaggaacctcattagcctttgaaatgcgtggctgtggggcgaggccagactgagggagattcagggaggccagtgagaaaaccaacagctgcaggaagcag

SEQ ID NO: 245538 - DNA, 122 bp, Homo sapiens
agggctttacgagtcgtgtgtgtgtgtgtgtgtgtgtgtgtgtgtgcacgcgcacgcgtgcgcgtcctgagaactcggcacaggtgtgggcgcctacagccgaaagcaaaacggcccgcact

SEQ ID NO: 245539 - DNA, 122 bp, Homo sapiens
tccctagggcgtgggtgtgcaggaacgccggacagggcagcggccggcactaccgtgccacgatttgcgcagagctgaagtagtccctgaccatcgaagaggtggcccccgccccgtcgggc

SEQ ID NO: 245540 - DNA, 122 bp, Homo sapiens
gaagaggaggctgcggcgggaggtgaggttgccggtggcgaggcgacggccccaggtgggcgcgcggcgtctgacgcgctgggggcgtccccgcgacgccaggtctgcccccgctgccccga

SEQ ID NO: 245541 - DNA, 122 bp, Homo sapiens
tttgagtccggtggcccaatcgctgttactacttctctgaagctcctctcggctgcttgccgagacaccctgccgccaagatgcctcgaattatgatcaaggggggcgtatggaggaatacc

SEQ ID NO: 245542 - DNA, 122 bp, Homo sapiens
gggagataaggaggcgagggtgacaggcagcccacccgccccctccccgctccgcagcatcgccacccagccccaggcccagcgcccatcaatcacaacctgcaaggatggggggcgcgcag

SEQ ID NO: 245543 - DNA, 122 bp, Homo sapiens
cctgcccacctggtcaccaccattcacagtgatcactcatctgtggcaagaggtgggcagcggaggaagctgactagagatacctgatgtataactttttggaggtttttacaaaagcagat

SEQ ID NO: 245544 - DNA, 122 bp, Homo sapiens
aaaaaaggaaggacaggaactagcctcaatccagcccaattagccttcccccaagtgcaacgaggccaatgacaaccaatgatgaaggcagtgtttacaaggaccaatctcttgacggatca

SEQ ID NO: 245545 - DNA, 122 bp, Homo sapiens
ttgttcctcagagggtgcgaggtggcacagccccgcagcgcccgatctgcccacgcagggcggatgaacggaaacccaccctggcctagcttggggacaccaatgcttctgctgttgcccac

SEQ ID NO: 245546 - DNA, 122 bp, Homo sapiens
agctgcagaacaacgcttataaagacatgtcacccacactgggagggcagcagcgaaatccgcggcagccgggttgttacagcctttgagggaagtcgcaagacccagctccgcccaacagc

SEQ ID NO: 245547 - DNA, 122 bp, Homo sapiens
ccgcgcggctgaggaggcgcggccaggaccatgtcggcgggcggccgtgacgaggagcggcggaagctggccgacatcatccaccactggaacgccaaccggctggacctgttcgagatcag

SEQ ID NO: 245548 - DNA, 122 bp, Homo sapiens
tggatggttagacaaccaggcggggtgagccctgcgtgcctgcgtggagacaatgggccccgcgagcgtgtgtgctgccagctgctctggaacaatggggccctttatgtcgctcgtgcacc

SEQ ID NO: 245549 - DNA, 122 bp, Homo sapiens
ggtttgtaatatttctgtaaatttattgtgatattttaaggttttcccccctttattttccgtagttgtattttaaaagattcggctctgtattatttgaatcagtctgccgagaatccatg

SEQ ID NO: 245550 - DNA, 122 bp, Homo sapiens
aacccagattacacctgagtaacctccttccgggacacactaacaacatccagcttgtgtcgttactgagagcaaagcacacttttatagctttagcacaattagtcctcttggcgcaattg

SEQ ID NO: 245551 - DNA, 122 bp, Homo sapiens
gcggcgtgggcctggggctggcacgtcaccgggagcgggcggggtggatactgacgtcatcgcgcggggcgggccgtgggccgggtcggagactactggagtgggccgggcaggcgcacgac

SEQ ID NO: 245552 - DNA, 122 bp, Homo sapiens
ccgccccacccaccccgcgccgctgctggaacgcgaggcggtcccggagcctcttccgttcgctgcacagcctcgccctgcgcccgccaccgccctgcggatcggtcctctcgcccgccacc

SEQ ID NO: 245553 - DNA, 122 bp, Homo sapiens
ctcatttcacactgtggatgaagccacctcccccgaggagattcagagctgaatgtcacacggggcccagcctgggaaagcacttcatgagcagctctcaggtggcccgggaccaactgcca

SEQ ID NO: 245554 - DNA, 122 bp, Homo sapiens
tcgccgccgcgcttgcctgcgcgcctgggccgcagccacccccgcagggcccgcgggccgcgcacttcggcaaccccgaggctgcgcaccccgcgccgctctacagtcccacgcggcccgtg

SEQ ID NO: 245555 - DNA, 122 bp, Homo sapiens
agacaacagaaggtcaatgaaaagctaatgcttggttcccccgcactgtgattcccatgtcgtcacttgctcacatgtcagacatttcctgcatagaggtataacgagtcttctaccacttc

SEQ ID NO: 245556 - DNA, 122 bp, Homo sapiens
tgttcagtatttgtggtgaatatgtctgcatggtatctggcactgaagtatatactaaagcgttatggttgacttagtggttctgtagtttatagttacatatagtcatactttgcacagct

SEQ ID NO: 245557 - DNA, 122 bp, Homo sapiens
acgggaggctctgtgcagtgcgactagcatttggggccagctacgctacttctccgacctcggcgttcagccaccccgtccagttgccctgaacaaaatgtgagagtcatcccttttccttg

SEQ ID NO: 245558 - DNA, 122 bp, Homo sapiens
tccttcctcaacagcctaaacgcctctattttttacatccaaacttaggccatatttctgcggcgccaagaaaacgcagtaaaagcaaaggcaagatgtccttaaaaaaaaaaaaggtcaca

SEQ ID NO: 245559 - DNA, 122 bp, Homo sapiens
cctccctcacccgcaggtttaccgagcagccccggagctctcagacatgctgcgctgcggcggccagaggaggggtgggggcattgccctctgcagcctagtgcccaaattgccactcatcc

SEQ ID NO: 245560 - DNA, 122 bp, Homo sapiens
aaggaaacaagcgccgcgtactccctgtcgctccattccgtattttcccgccttcaagctcgcaccctctgcgcatgcgccgaccccgcccctggccagctgcgctcccgcggacgagtgtg

SEQ ID NO: 245561 - DNA, 122 bp, Homo sapiens
ggcagcgccgctcctcctcgtccaccggcagtgagtaggggcaggttgaggggcgtggggcggcgctagccctgaaaggggagggaaatctagacaccgccccctccccagctgtcactgcc

SEQ ID NO: 245562 - DNA, 122 bp, Homo sapiens
cctttagcctatgtcccccccacataaagagagcttctcagagcctgactgaagagctgacgttttgctttttcatatgccaattaaacccggtctaaatccaaatgcttctccagccatcc

SEQ ID NO: 245563 - DNA, 122 bp, Homo sapiens
agaaggcaaaaggggaaaaccaggtgaatgagaggccatggtaaacccaaagggggggcacgggctggggatggaacagatgaatccattctaatgccaagtccagcccccgtctggcattc

SEQ ID NO: 245564 - DNA, 122 bp, Homo sapiens
tgatgaacactgacaggcacaccgccagagccaggtcctggggagcgtcctcttttttgccggcagcctgcacatcgcgggtgcttctaacactccttggcagccgtctctgcttcttcctg

SEQ ID NO: 245565 - DNA, 122 bp, Homo sapiens
ttcgagtaccacgccccctaccgcgcgctccctggtggccgggtaggttgaggcggagaccgggcattccagcgccctgctaggcaggcttgctaccgaggctccacgcctccctgggcctc

SEQ ID NO: 245566 - DNA, 122 bp, Homo sapiens
ccgggaataccgggacctgaccaccgcgggcgctgtcaccaagtgctatcgagacatgggcgcccggcaccgcgcccgggcccactccatccagatcaggaaggtggaggacatcgcagcca

SEQ ID NO: 245567 - DNA, 122 bp, Homo sapiens
gaagccgcgcggcgcttagggcaaggtgcagagggcggcgcggcggtgcagcgagaaagacgcggagagagggcgctgctctgtggctctgcaaccttccgccagctcccacgctttccccg

SEQ ID NO: 245568 - DNA, 122 bp, Homo sapiens
ctctctcatccttctgctactctcccactctggaaggtttcccagactcctggatctcttcgtctcccctatgtcttcctctctgctaccactaggtgctgcatgccccacccccattaaag

SEQ ID NO: 245569 - DNA, 122 bp, Homo sapiens
ggcttttaaaccaaacctgtcctgtcctgaggcagagctcgaatcagctgtcaaaggtagcgttatcaacctaagctcctcttcttcctcatcatcctttcagcatacctgtgatctcatac

SEQ ID NO: 245570 - DNA, 122 bp, Homo sapiens
actcctccattgttctgcaatctcggatctgagtgaagacaccccagcctctaaggggggcgcagtggacccaggaaggggcacctgcccggcagatgcgaggccacgggaaccactcgcgg

SEQ ID NO: 245571 - DNA, 122 bp, Homo sapiens
agaggtccaccaggccaggttaaggaaatctgcaacggtgggctgcagtggagagaggggcgtggactgccactgctgcccctcgccctaggtcacccccagctttatcaaatgtcagaggt

SEQ ID NO: 245572 - DNA, 122 bp, Homo sapiens
tttcaggccactccatgaagctggcaggatgtgcgaacaatatctgtttgctgctgaattcgtactacgaaagggtcggtcgatggggggatttcaagtgggcgccaaggcccatcagtctt

SEQ ID NO: 245573 - DNA, 122 bp, Homo sapiens
tgcctacagatactgcaaacgttcctacagcctagaggtgcgtatacacacccaagtacacgcagccaggcattcaggggtgtgtttgccacatggagcatcccttcctggtcttgccaggc

SEQ ID NO: 245574 - DNA, 122 bp, Homo sapiens
gccatcttccctccctcccagacataggcacggggctcttggaagccactctcaatagatcgcagaacgagcgagctgcctcgcaaccgagaacccacggcgaccacacggcccgggaggcc

SEQ ID NO: 245575 - DNA, 122 bp, Homo sapiens
aactcaaaggagaaagggtccaggccaccaaaaaactcccggaagatgtcctcagggttacggaaggtgtagccggtgtcgaaggggctgtggtagggcgtgctggccccgccaccagcccg

SEQ ID NO: 245576 - DNA, 122 bp, Homo sapiens
tgtcaggccctgaggggcttgaggggcgggggaacgacgccgctctccaaagttggaccccgtggcgagcggcggcgacagccgggtgctcgctgcctcccgaggtgctcccttttcccgcc

SEQ ID NO: 245577 - DNA, 122 bp, Homo sapiens
actgtcctcctggctcctggccagccaggtgccagccagtggtcaggcagtcctgcttcacgcttctggccgcagggcttcgccacagtccctacttcccagctaggggctctgcctggact

SEQ ID NO: 245578 - DNA, 122 bp, Homo sapiens
agacagtgtcaagaagatggacaggtctgaatggcctcgggctaggggatattccactgtcgcctctgactacgggtggtcctgtggctgaggcgcagcgggccctgggagttgtagttcat

SEQ ID NO: 245579 - DNA, 122 bp, Homo sapiens
gggggggcccgctccgagagacagacaggtcaggccggaagcgactgtccgtgaaggtgacgctcataccgtaaccttagcagcaggctgttgccacacagtcacaaaagtgggaggcagca

SEQ ID NO: 245580 - DNA, 122 bp, Homo sapiens
acgcccattttaccagcgggcaaactgtggcttagggatgctgggtgatttgcccgaggacgcacacagagggaagggccaagccgggattccaactcgggactccccgcttctggggagac

SEQ ID NO: 245581 - DNA, 122 bp, Homo sapiens
ccaccagcccccgaaaatactggagacaaaagctgacgtcggcagagcgctcctagtccccgtcttctggtcctccacccttcccgaaaggccaagcggcggagctggggcgccaacgagaa

SEQ ID NO: 245582 - DNA, 122 bp, Homo sapiens
attgaacacaagatcccaaagagtatactatgaaacaatagatgagtggtaaagtgacatcgactgaaggctcagcaacagaccatgatgtttgtgttaaccatgcatttctttgggcatga

SEQ ID NO: 245583 - DNA, 122 bp, Homo sapiens
gagatgatactaaaacctgggctgcaaagagccagacttccctctgaatctacaggatggcgaagtttaggaatggtgttgccctgggacggaggcgggatctctccatggtgttgatcgga

SEQ ID NO: 245584 - DNA, 122 bp, Homo sapiens
ggtatccaactcaaaactacttttagttttgtttcgttttgccttttttttttctttaaccgataacccaattctagacggaacataaggtgcaagagaaatccggggaggtggaggcagag

SEQ ID NO: 245585 - DNA, 122 bp, Homo sapiens
aaggaatggaatcttgggccatggggtgagtgttacagctctcttagaagccgtgggtcacggaagagaaccgtggaacccagtgactagtgttcagctcgattaggaagaaccgggcactt

SEQ ID NO: 245586 - DNA, 122 bp, Homo sapiens
catctcactagggagtgccagacagtgggcgcacgcaggtcagtgggtgcgtgcactgtgcgcgagctgaagcagggcgaggcattgcctcacttgggaagcgcaaggggtcagggagttcc

SEQ ID NO: 245587 - DNA, 122 bp, Homo sapiens
cgggagcagcctgcggccgagcctgtcccaccgagcccatccccgggagcagcctgcggccgagcctgtcccaccgagcccatccccggtgtccctggtgtgggcctttccttcctcccttg

SEQ ID NO: 245588 - DNA, 122 bp, Homo sapiens
ctccgacagaaaccccgacaaatggagatggcggtggccagggtcagcaagagaagcaggcggcctgggttgggggccccgggaccacacacggaaggcgccgcgttgccttctcacccggc

SEQ ID NO: 245589 - DNA, 122 bp, Homo sapiens
gcacacactgcgtctgcctccacggagcccccctcggctgggcagagctccacattttaacggccccccagcccaccctggccctgggcggccctcaaccagcccctgccccctgccaccca

SEQ ID NO: 245590 - DNA, 122 bp, Homo sapiens
gtttctctttgttaatggtagaattctggtacagctcaagttttcagtttagtagcagaacgtagaaagaaatttcaggaaatcatcaatcgcagtagcagtgaagcaaatcaggtggttcg

SEQ ID NO: 245591 - DNA, 122 bp, Homo sapiens
ggcactctatgttccagctctaggagatagtggacctgcctggcttctggattaattctccgtggtcaaacgtccactcaaagtccgatcagctggacctcagaagaggctggaaatgggct

SEQ ID NO: 245592 - DNA, 122 bp, Homo sapiens
gggaccagcccagcacacgattccggggaatcactttgatggccacctggagaagaaggccgtgataaggaggccagcaggtgatccccagacccctcccagtctagaccttctgcctacct

SEQ ID NO: 245593 - DNA, 122 bp, Homo sapiens
tcagattagattagaaatgtaaataagtgtatatttatatttatacacacagatttcaatcgagttctaatttacatttaatacaggcttataatatatcgtaggtggacagtttgataaat

SEQ ID NO: 245594 - DNA, 122 bp, Homo sapiens
aagacctggtcacacccacacattttaaattcacataaaactaaatatataggctgggcgcggtggctcacgcttgtaatcccagcactttgggaggctgaggcgggtagatcacctgagtt

SEQ ID NO: 245595 - DNA, 122 bp, Homo sapiens
ggctggggtgtttgttggcccgggaggaaatggaacattcctgctgtgagcatgagacgtcgctgtccgagcttggcgcctaagccaagggtttctttatttggttggttccgattgggttg

SEQ ID NO: 245596 - DNA, 122 bp, Homo sapiens
caggaagttacagcagagcagctgtggtatcagtcatggaggaccacggggctagtgacacgggggctcctcatcttccttccctgccgggggtgggggctaccccttcctgagagagcagc

SEQ ID NO: 245597 - DNA, 122 bp, Homo sapiens
tagaaaaattcgttagaagacaagcagtcccagaaggaatggagtcagcagttgtttttccggctcatggagcagcatgggtttcagccccaccctgcccactgacccttggccccacagag

SEQ ID NO: 245598 - DNA, 122 bp, Homo sapiens
gcggctggggcaggggtctgctgggggccggggactaagggctgtgggcccatccacacacgcctcatcccttctttccgggggcagcagagcagcagcgggagaccgggagcaggaggggt

SEQ ID NO: 245599 - DNA, 122 bp, Homo sapiens
caaggccccaccagagacggacgtcctcccaggtgacaggcaatgcgacatccggaggcacgtccagagtgacatgacacccccagcactgggcaacaagggatgttcattctgtagacgaa

SEQ ID NO: 245600 - DNA, 122 bp, Homo sapiens
aggcctgagtcaggggttccgccagggaaaaaggcagaccttgaaactgccctcttagggcgtgagggagaaaagcccggtttgtaaactgtaacgggaaacaaaggctgagggcaggaagg

SEQ ID NO: 245601 - DNA, 122 bp, Homo sapiens
gaggcggggagctgccactcccaaagcctccaccccttcctgaagacccagctatgaaaccgcagttcctgtgggttgggctgcccaggctggtcagagctcagcaccccaggtctggtgag

SEQ ID NO: 245602 - DNA, 122 bp, Homo sapiens
atagcacgtacagaatttttttaaagtttggtggaggaatcggcagcacaaggtaagctgcgctctgttcacagacctgggaatcagaactccggccgccgcggcctccaggcgcctctcag

SEQ ID NO: 245603 - DNA, 122 bp, Homo sapiens
agaagctgctcttcgagtgaccctggggctgtctgttagcaggtccctcagccgttggaacgtccttgggcttctgaactagtgcccatgtgtgcctcggcctttcccaagggccagcttct

SEQ ID NO: 245604 - DNA, 122 bp, Homo sapiens
aaagttacaaggcaccgagacaccagcttgactgctctgggagagaccacacatagctgccggctttttactatactatggggaccagggcttcgaggacagagtgggagggtaaagtcttt

SEQ ID NO: 245605 - DNA, 122 bp, Homo sapiens
aaaaacacagacctgtgagtaaaaatctatgccaaaaatgcttttcttgtctactggccacgactgtcttcaaagtcataaattgtccagaaaacactgacagtgactctgaaataccctca

SEQ ID NO: 245606 - DNA, 122 bp, Homo sapiens
aaggcggatggctgcggatagacagtagcggcacagaaagtacttactgtgcagggaacgcggaaccaagatggcggcagaaagaccgagcgagagcgtgacccacgcctgttgcagaagga

SEQ ID NO: 245607 - DNA, 122 bp, Homo sapiens
ctccgccacggccaccgtggaggagcctgcatgcgaggctgggtgggggaaccacagcaccgtttcgcggctgttttgtttttgtttttgttttttgttttgtgggttttttattttgtttt

SEQ ID NO: 245608 - DNA, 122 bp, Homo sapiens
tatagtcaatatatacatatttttacctaatatacatccgctttctaggtttctacttagcgctgctgagactgagtctaaatgaaaaaacattatcaatggattctaacaataaatcatat

SEQ ID NO: 245609 - DNA, 122 bp, Homo sapiens
ctactgggaatgggggtggactgcgccttacctggggcggggtggggcttaaggagtggtcgagactgaggcggggtgggaggttcaggttcccggggcgccttccccaacccgccccgctt

SEQ ID NO: 245610 - DNA, 122 bp, Homo sapiens
tggcttagctgggtgcctccatctctgggtttctcaggcagctacaatcaagatgtcagccgggctgtggtcaactccaggctcacctggggagaatctattaccaagttcactcacctgat

SEQ ID NO: 245611 - DNA, 122 bp, Homo sapiens
aggaaaggaaaggaagccttgacgcagcatcatttatggacttgaacactaggtgtcgctcgcgcacttgttttcagccgtaggattcagagacggtattttaggcttagacccaacacttg

SEQ ID NO: 245612 - DNA, 122 bp, Homo sapiens
attaccgcagggccgtataagtgattctttgtggcaagccaattaaaaagctacctctttcggggaactgttttgcttcaccgccgctctgcgcagggctggagccgagaggtggcggcggg

SEQ ID NO: 245613 - DNA, 122 bp, Homo sapiens
tgcagtcgcagccgggcatggtgagtgagtgaggtccagccgccgcgcgctctcccggctcgccgccggaccccagcctcaaccggctccgtcccagggagccagcctgcggcgggagcgcg

SEQ ID NO: 245614 - DNA, 122 bp, Homo sapiens
agggcagcctgggcaaccgcgagaccttgtctctgcaaaaaattaaatattagttgggcacggtggcatgtgcctgtagtcccagctacttgggaagctggggttgggaggatggctcgaac

SEQ ID NO: 245615 - DNA, 122 bp, Homo sapiens
aaatggtacattcggagctggaactcagctcgctgaccccaagcagtgttcccttcttttcgccaggtttgcatccaagagaggggaggacaggggcaaaaggatgcagggaggctgctgat

SEQ ID NO: 245616 - DNA, 122 bp, Homo sapiens
tcagcaagatgcatgaggagtatcccaactgcatcatgaacaccttcagcgtagtgccctcgcccaaggtgtcactgtggtggagccctacaaccccatgctgtccatccaccagctggtgg

SEQ ID NO: 245617 - DNA, 122 bp, Homo sapiens
atcattaaattatatgtatactttaatgtggcagaattttatagtatgtaaactatacctcgataaaactgttttttaaaaatcctgccagccaggcgcagtggctcacgcctataatccca

SEQ ID NO: 245618 - DNA, 122 bp, Homo sapiens
cgtcactccctctcccaagggggtgtgtcttggaaggccgacagcagagacccagcccttcgccgcgcctgcgcagaacggccgaagtgtgcacgcccctctttggcggcctcagggcctag

SEQ ID NO: 245619 - DNA, 122 bp, Homo sapiens
ctcggagagtgtcaaggagaaccacaaggcagacaggagaaaccccatgtccccgccgcccgccagacgcacaccctcctctgacagtgtgtgaagaaatgcgtttccccaggtgccccacg

SEQ ID NO: 245620 - DNA, 122 bp, Homo sapiens
gatactttaaggcgaggggtcggggctgtgtaatcatttacccggttcgtccgtgtacaccggcctctctagcttacaccaacacatgtttactgggttcgcacccaagccagagtcggttt

SEQ ID NO: 245621 - DNA, 122 bp, Homo sapiens
ggaggaggaggagaagaaactatttcgcgataccccattctgcgggtgctttgccgctgccgcttctgctgccgccgatccgagtccgcgggttcgaacaccgcagcggtggggacggtggg

SEQ ID NO: 245622 - DNA, 122 bp, Homo sapiens
gcgagagtgtgggcgcagcagcggggcctggggcagggccagagagagccaattggggtacgtgggccgcggtcgggaggcagagtcaggggcgttcgtgcgggtaccccagggctgaagcc

SEQ ID NO: 245623 - DNA, 122 bp, Homo sapiens
tgcactgcagtaatgaaatccacgacttcccacctctgccagtgaagagtcagcatgtaccgtgtgaaagccaggaaggctcatctgtctcgtgagtgatttcctttcctaaggaaggccct

SEQ ID NO: 245624 - DNA, 122 bp, Homo sapiens
gccccagcgccctggggccgtccccgcccacgggccgcggctgcccacacctggcgcccgcgtgctgcctaccttgctccttcagactggtaatgagctgcagctgcttctcttcgtccgag

SEQ ID NO: 245625 - DNA, 122 bp, Homo sapiens
gcgccccccgccgggccaggagggcggagctggagagtcggcgtgaacgcgcttcccaggcgcgcagcggttaccatggcagcgccggcgcagagcgtagaccgcagggcccagggcggagg

SEQ ID NO: 245626 - DNA, 122 bp, Homo sapiens
gggaagacatgattgaaggccattgtgaggaaggatgaggacctggactactttaataagcggtgggattttttcttagttggatagaaagagattgaaaatgattcaaaaaggccagttgc

SEQ ID NO: 245627 - DNA, 122 bp, Homo sapiens
gctgctcatctttttcctcttcatcggggtcatcctgttttctagtgcagtgtactttgccgaggcggaagaagctgagtcgcacttctccagtatccccgatgctttctggtgggcggtgg

SEQ ID NO: 245628 - DNA, 122 bp, Homo sapiens
gagaagccagcttgaaagccactgggagcttcagtttgccctgcaggcgtggggggaccgcggaggaatggcagggaaagatccaggtgttagaaagttcccactggggtccccgcagggga

SEQ ID NO: 245629 - DNA, 122 bp, Homo sapiens
ggaaggagataggcgctgggaccgatgttgctcgagggccccattcgccgcctctttgcacgagccaacccttcagagggtgctcagattccggcttgcacaaggacagaggagcacccgtg

SEQ ID NO: 245630 - DNA, 122 bp, Homo sapiens
ggttgccgggctccgcgggtgcgggatctatagcgcctagctccggtgagtgtgaggccccgctgcagcctcccattctgatttttgcatacaaggtgaaatcttgaatgtcttagcgtttc

SEQ ID NO: 245631 - DNA, 122 bp, Homo sapiens
ggccaggcaacatgatgagaaagtaataagaaggattccagaaaacaaaattagggtccacgcaatagtttcagacaactatttctgtaagccatttgcaatactgcatcattatttttaaa

SEQ ID NO: 245632 - DNA, 122 bp, Homo sapiens
gctcagaactggcgacggcgttcttgtgcctggcagctaacacgcccggggtggccacagcgccagcctcagactggagggcaaggggttcccttgagggctgcagttctactcaggctggt

SEQ ID NO: 245633 - DNA, 122 bp, Homo sapiens
agctgtgcttggcagcacttgggctagtcacttttgcttgctggggcagtaatcctgctgcgttcctcttagagcattctaatttggacgtgacgttcatcctgggttagtttactgggctg

SEQ ID NO: 245634 - DNA, 122 bp, Homo sapiens
tactgttttttgattttttgattatggtcattcttgcaggagtaaggtggtatcgcactgcggttttgatttgcgttttgctgatcattggtgatgttgagcattttttcatatgcttgttg

SEQ ID NO: 245635 - DNA, 122 bp, Homo sapiens
tggagccccacgcgctgctcaagaggctgcaggctggccttcaaggcctgggctagactgcggcggttgggggctggcggtgcggctcgggtggagtccgccgggcaccgccctccctctcc

SEQ ID NO: 245636 - DNA, 122 bp, Homo sapiens
tggggaagccaagggctgactggaggcagaaagctgttgtcccgaactcccggcagtagccggttgagatcatggcgcagccagaagtctctactcggcagtcgcccatgcgtgcgccctta

SEQ ID NO: 245637 - DNA, 122 bp, Homo sapiens
cctcgcgcttgggaaggggtggggtcctcttcaggaggtgtttacttggcgtccggggcgcggagaccctcggggccggcgcccggcacaggtccggggcggcgtggttgccgcccgcgccc

SEQ ID NO: 245638 - DNA, 122 bp, Homo sapiens
caggctggagtgcagtggcactatcttggctcactgcaatttctgcctccttcattcaagcgattatcctgtctcagcctcccaagtagctgaggactacaggcatgcgccaccgcgcacgg

SEQ ID NO: 245639 - DNA, 122 bp, Homo sapiens
ttctcattacataaacggaagaaaaacaacttgagggaacagcccccttaaagtggggcacgcatcttgcctttgtcaccagcaagctaaggggccccttggggcttcagtttctctgggcc

SEQ ID NO: 245640 - DNA, 122 bp, Homo sapiens
gggcgatccgaaagaggctggtgctggctgcatggggaggcggcggcagcgggtggaccccgcggctggggcccgggccggggccctgcctgaggccatcgccgcgttgagtcggtcgctgc

SEQ ID NO: 245641 - DNA, 122 bp, Homo sapiens
tatatgccttggaagtagcagggccgggggctcggggtaagagccattgctcggaagctgcgagctgctcagctctgggactgccaccgagtggatggagagctgaggcaaagatggagaaa

SEQ ID NO: 245642 - DNA, 122 bp, Homo sapiens
attattcatttcttcagatcagcatcattcaccatggcaaccagcaggcatctgtacgcacgatgctttcagggaccagcctggaaaggcttttgcccagtgagaggagctctcattccttt

SEQ ID NO: 245643 - DNA, 122 bp, Homo sapiens
gggagtaggaaggagccggggctgtagccggagtggagcggctgccagccgaggagcaggcgcggccgcggcgccatattgcggccctcagcggccgcgaccgagtcatggctgagacctac

SEQ ID NO: 245644 - DNA, 122 bp, Homo sapiens
accacacagacagaaaatccacattcagatgaaaggccacacctctgctcagatgacctgcgtgctaattaaaatcacaattaaaacaagcagaggggatggagagtggtgacttaacttgc

SEQ ID NO: 245645 - DNA, 122 bp, Homo sapiens
cctgtccactcttgcctcagtttccctgctggacacaaagggctgaagtccaggtcccttcgatggcccaaattacctgactgtcgatcctgactggggcggtggcgacatggcccccgcag

SEQ ID NO: 245646 - DNA, 122 bp, Homo sapiens
tggctcctggagcacggcctggcacacaacaggcgctccgtgtgtgtgtgtgtggcttttcgtacctgtcctgtgtgttgtggtaggggaatgtgttattctgtgtgacgttgtggaaccgg

SEQ ID NO: 245647 - DNA, 122 bp, Homo sapiens
gggccggagggtcccggccagcccaggcagtccgtgccaggtaatgcctgggtagggcaacgcctgggtgaggtctgagggcagcctagggagtagggggggcacagggactttaccagcct

SEQ ID NO: 245648 - DNA, 122 bp, Homo sapiens
ctggacagcaaataacaattggaggaccaagtcagtcactgcaactgaattcagccaacacgtactgagggtaccgagtctacgcgagtcctgtggctcggccctccacaacatacaaccgg

SEQ ID NO: 245649 - DNA, 122 bp, Homo sapiens
catagtcagaaagggccactgccgctaaactccttatttatttattgtgaggtggagtctcgctctgttgccaagctgtaatgcagaggcacaatctcagctcactgcaacctctgcttcct

SEQ ID NO: 245650 - DNA, 122 bp, Homo sapiens
ggagggtgtagttcgcggcatttgtgattccggctgggtctccggtgcggaaatgaaactcgccccctgctggcccgccccggcgctttcagagggaaggggagccaggacgcccgcgggga

SEQ ID NO: 245651 - DNA, 122 bp, Homo sapiens
gagatggaagctgactttctagaagagcaccggtgaccctcgagagcaaggtcaggacagcggttgagatggaagctgactttgtagaagagcattggtgaccttcgagatcagggtcagga

SEQ ID NO: 245652 - DNA, 122 bp, Homo sapiens
ccttggcacgctttgtttttcatctaaacaaaccctgtcgggaagccaccaggcaccaggcgtgtctcacagtgcatggaccactgcgtgagagcagcgtggatttcacgatcagacggttg

SEQ ID NO: 245653 - DNA, 122 bp, Homo sapiens
ataataaaggatctggctggcttttctccccaggttcctgggaagtaccctctaaatcctcggaatttccagagcgacaagagtgtctgttattcatgatgggtccctcaggccacatttga

SEQ ID NO: 245654 - DNA, 122 bp, Homo sapiens
ccccttctctgccgatgcactcttctcgcctagcaacgtttacacgcggttaacctgccgcgcggggcgacagcagacacgaacccaggccgaacctataaagaagacaccgtggcgttcag

SEQ ID NO: 245655 - DNA, 122 bp, Homo sapiens
cccacctcctgaacctatccagacaccttctcctgacccaggcaccacctgctttcggggcgatggccgtagcctcctcccaggcacctgtctgcatccctctggccagtgcatgctgagca

SEQ ID NO: 245656 - DNA, 122 bp, Homo sapiens
gctactgccctgatgttgtttgttttgttaggtttttaagaaaaagaaaggaaaagactacgctgtggaaaatacagtagattcacttgattgccaaacagttgttaaacaaataaaacaga

SEQ ID NO: 245657 - DNA, 122 bp, Homo sapiens
aatttcccattgttatctccttcaacccccacttagtgttggtggaaaatatttcaaacccgctcaataagcgagcaaataagctgaacatggtggcacatgcctgctatcccacctactca

SEQ ID NO: 245658 - DNA, 122 bp, Homo sapiens
ccggtatccacgtggggggcagtggccctcacacaaggattggtacccatctatctagtgcgttggttcgtgcattcacttgttcctttgtggtcgttgaacgcctgtaacgttccaggtgc

SEQ ID NO: 245659 - DNA, 122 bp, Homo sapiens
gtattgcgttttaaaaaatgataattaaaatttttaactccactgggtgccaaggattgccgagtttagccattgagtgatggctgttttgtacttagatgggctgagatgcgtccttcaga

SEQ ID NO: 245660 - DNA, 122 bp, Homo sapiens
cttcacaaaggcctcctgccgcaaaccttcagcggccaccaaagccccggctgccggcggcggaccacctctgctgccgcgcgcctaccggagccgcttggccctagtgctttccagcggat

SEQ ID NO: 245661 - DNA, 122 bp, Homo sapiens
ctctctctgaccttctttcacctgccttacctctagtctgattgtgggtcaaaagactctcgttccagagagggtcctgccctatgccctggaggagggcatttagcacccagaggccaaga

SEQ ID NO: 245662 - DNA, 122 bp, Homo sapiens
agagaggcagggcactgctggagtgcaaatcaggtcaattcatggagcacaggaaattagcgatgcaatgggtgtttagaggaagagaattctgacttaactctcctggaatatggtttgac

SEQ ID NO: 245663 - DNA, 122 bp, Homo sapiens
gtaaaaaatttccactcacaagcaggagactccacgaggccttggggtcacaggaaggctcggagtgccagagtacagagtccaatttgagcattgttcaggttcaactgaccacagggagc

SEQ ID NO: 245664 - DNA, 122 bp, Homo sapiens
gcagcacaaggcggtagccatggcggaggcggcggctgcagcgggtgggactggcttgggcgcgggcgcgagctacgggtctgcagcggaccgggaccgggacccggacccggaccgcgccg

SEQ ID NO: 245665 - DNA, 122 bp, Homo sapiens
ctgtgggcgctccagggtagtcggagtcacgggggctccctaatcaccatgtgtcaggggcgtggggacagtcctcctgaaagaaacactggaggagagaggtctggggaatcataacaagc

SEQ ID NO: 245666 - DNA, 122 bp, Homo sapiens
tgtcaaattgcacaaaatccactttcgaatttctcccgcgaaacaacgtgacgtcattaacgcgggacctcaccagatgaggacccaaaacttggcccgcccacctccgcctaagccaaaaa

SEQ ID NO: 245667 - DNA, 122 bp, Homo sapiens
cttcagagggtgattttcaacaatgattaaaaacactctgacacacactcttcaggcatacgcattaatcccacacctttgcatgcatgagtatcatgtgaataatgctacaagtattggac

SEQ ID NO: 245668 - DNA, 122 bp, Homo sapiens
gccgcgggcctgggactactttctacatctggcccttggtctgggccagggaggtcggcgcggccggcggagggagacgctgggagggggccagtggcggccgggtcggagccctgggggaa

SEQ ID NO: 245669 - DNA, 122 bp, Homo sapiens
ctaccatgttctcagatgtttatttttcttattttacaacagatacgcagactcagccaacgtgtttgtagggggaaaaccgtcatcaactcacaggatctttgttagcaggatacaattat

SEQ ID NO: 245670 - DNA, 122 bp, Homo sapiens
cagacgtgctcgtgtacaccttgttacagcccacctgcacaggacgggatggtggtcaggcgaacggaggccaggtgctcctgggccgaggtcgacaccactgtgtgtggctggggccactg

SEQ ID NO: 245671 - DNA, 122 bp, Homo sapiens
tgcccccacccgcagtgcatccggttgggggtggtggtaggagttggcgctggtttgtgccgggagggagcaatatgttctgacaactggtgctgggctgcgtttacccaacagccagcctg

SEQ ID NO: 245672 - DNA, 122 bp, Homo sapiens
ttcaaccactgaaaagcatcgttttctttcttctagtaactgtgtgtactgaatgcctcgcgtttgtccctactgcacttttcagtctgtcacaatcctgggtcgtcgggggactgtaccga

SEQ ID NO: 245673 - DNA, 122 bp, Homo sapiens
gtttctgtgtgtgtctgtgtgcgttcgtgcgcgcgtctgtgtgcccacttctatctcttacgtctctctctctctctccgcccccctcgctctttccgtcgccctctctttctatctctgtc

SEQ ID NO: 245674 - DNA, 122 bp, Homo sapiens
tcccgggcggtcgtggcgaggggattgcaggacacagccatgcacgtccaactctgtccccgcccggagaagtctgggatgctgggatagaaggggttgtgactttggggaccaggagcact

SEQ ID NO: 245675 - DNA, 122 bp, Homo sapiens
caggggcccaccaccacgcccggctaattttttgtgtattcagtagagacggggtttcaccgtgttagccaggaagcaatgcttcctattctagcgccttgctaaactatgtgtgctgcaga

SEQ ID NO: 245676 - DNA, 122 bp, Homo sapiens
gccgctccctcgcgaaagttggccccgtgcggccgcagcggaccgagggttcgttgagagcgttgtgcgcacgcgcagtttgccttccaggccgcgctttcagcctctccccctccagcctt

SEQ ID NO: 245677 - DNA, 122 bp, Homo sapiens
gaggtgaaggacagttgtcaggacaaatgagggaatatgtatgcacatactttgaaacagcgatccatttgagaggccttcttgttgctgttattacagctgctgctgcagcaaaacagctt

SEQ ID NO: 245678 - DNA, 122 bp, Homo sapiens
taaccgacacacagagtgcccgaaatcagacaggaagccaaataatccggggcgttgagtcgctttgccctgactgcgagagccgggtgtagggcggggagccaaggatctgaccgcgaggg

SEQ ID NO: 245679 - DNA, 122 bp, Homo sapiens
agcctgaatgactcagctctgtgccatgtggtctcatgtggaggatacctctaattcagtcgtgtagtcatagtgaccacagggaaggagtagaaacccacgaagcttcttgaggtctagac

SEQ ID NO: 245680 - DNA, 122 bp, Homo sapiens
aggaagaagagacagtaaatacatgtgctcggttagctagctttaatcaaaaatcctaaacgtaggttttaaaaaagataactggagcagggcaggaaataatattttttgccagtgtggtg

SEQ ID NO: 245681 - DNA, 122 bp, Homo sapiens
ggcctatttaaatgtctgagccagctgttccaggatttcaatgagtttctcctcttcggccggtgaggaggacgctgtagcgagaggcaagtgtgtagaaactggcttccgatctaaaagtg

SEQ ID NO: 245682 - DNA, 122 bp, Homo sapiens
agccggagctgccactcccctagaccgcagggttagtgttccccgccctggtttctgtctcgccctcagcaaacccggcagcccgagagctttgaaaacatcgaaatctccgagatttaaaa

SEQ ID NO: 245683 - DNA, 122 bp, Homo sapiens
gtgggcttgttaggaaggtgagttccgccccttttgtttgcggctcttgccacgggaggacgcagtaaggccctctccagggactgcctccacctcgacttcccagcctccaggacagtgag

SEQ ID NO: 245684 - DNA, 122 bp, Homo sapiens
tgaaaccgaggatggtgagggcgggagctcccttgcggggcacgcggaggcccctgttgacggagcaaaggcctgctctttgcctgagaaccataattatgtgtgttaacgtcaggagagct

SEQ ID NO: 245685 - DNA, 122 bp, Homo sapiens
cagaatgtaaatccagacgcattgttttgctgcgattaagttgaacgaaaatagcaaggacgaagtaaggagagagccagcctacccgcgggatgaggcgtcccgcggcggagtgggctggg

SEQ ID NO: 245686 - DNA, 122 bp, Homo sapiens
catgaccggatggccagacagtggaccaagcggtacgccacataggggcctgctgcctgccgccccgcgggacctgtgcaagcacattcaccaagtgcatcggtagccctgcccacccctcc

SEQ ID NO: 245687 - DNA, 122 bp, Homo sapiens
tctcgggagccaccgtggtgctcggtgtgtgtcgtgggtggatctgttccttcgaagcgccgtgccctctgcacagacgtgccaccacgagggtgcgttctcctgctgagggacatgcgagc

SEQ ID NO: 245688 - DNA, 122 bp, Homo sapiens
attggccagccaacacttagctatccaaaaagcaggtggtataatccctagttacttttgcgtgctttttttcatcccctctactaggatgatatataggatccaagaccctatatatctat

SEQ ID NO: 245689 - DNA, 122 bp, Homo sapiens
taagggcgccattatttgaccatatcaaatatggagcctttctgacttctctggcctcatcgtcccacttgcccttaaataaagccgcttcggctgctttttctagtgggggaggcggggtg

SEQ ID NO: 245690 - DNA, 122 bp, Homo sapiens
atcctggttggagaaaaaagcaccttaaacagacattaacaattggggaaacatgactatcgacaggacattagaaatattaaagaaaattaccgttactttgagaataatagctagacgat

SEQ ID NO: 245691 - DNA, 122 bp, Homo sapiens
gaagggacggtgtgagggcccgagtggaccctgcgatggtgggtatgagaggacggtctgcgggcgcgcggtggaagggcgacccggggatgggggatggggccggccgggggacccgggct

SEQ ID NO: 245692 - DNA, 122 bp, Homo sapiens
agaaaatctggataaaatatatatagttacacagaaatgcacaactatatacaatacatgcgtgtgtgtgttcaccgaatgaggatttcaactgtgtccactgtaggggaggtaggtattgc

SEQ ID NO: 245693 - DNA, 122 bp, Homo sapiens
tccttgtgcaaccaacgagcaggatgcgcagtttaggctgggattcctgcaatagaaaagcggagctcgacggtcaaggcgtcagattgcaagtgtccatcaccctgcctgtcccaagggct

SEQ ID NO: 245694 - DNA, 122 bp, Homo sapiens
gctgttgaccctgcttcctgaaggtgccccgagtctccataaggcacaggcttctctccccgcaccatgctccctgtttcttacggcaggtcccacaccactttgtccacctctggtcggac

SEQ ID NO: 245695 - DNA, 122 bp, Homo sapiens
gcggggagatgggtgttaaagaggggatatcaccaatcaacgtgcgcctccgggaaacagcgcttcgcactggctggttgggtctgacgacgtggccactgtccaatcctcatgctagaggc

SEQ ID NO: 245696 - DNA, 122 bp, Homo sapiens
ccgaagccgtacaacggagcccgaactgagtccagacacccggacgccacccgtccctaccgcaaccggcccagtcccaccacccccggcccgcgcctcacctggcccaccgggcccgcgcc

SEQ ID NO: 245697 - DNA, 122 bp, Homo sapiens
aaatcaagcttcaaggagcaggttgggattacaaggcagttgctgccacagagaccggggcgactgacttcctggcattttgggatgtaaattaaaattctagacatgccacccatcattgg

SEQ ID NO: 245698 - DNA, 122 bp, Homo sapiens
tatttatacgcttgtggtctgaacctcccacaagggcaggtggagttagggtgaggtctgcggcatccctccactgggacatgtctgcccaactcactcctgcacaaccctcaaaactcagc

SEQ ID NO: 245699 - DNA, 122 bp, Homo sapiens
ttcaacagttcggccaagcagaactgctgtacctctgaccacttgtgttaggaaaactatcggctccctgtataataaatcaagccaggtcctccaagtggtaattcatgaaaaatatcccc

SEQ ID NO: 245700 - DNA, 122 bp, Homo sapiens
cctccgcccgccgcccgggagccgcagccgccgccgccactgccactcccgctctctcagcgccgccgtcgccaccgccaccgccaccgccactaccaccgtctgagtctgcagtcccgagg

SEQ ID NO: 245701 - DNA, 122 bp, Homo sapiens
ctgccaggcctgcacactgccgggtgagcattcctccccaaacagcccagcccgcttccccggggctcttggagtaagtcccgcagactcttgccagccccacctggaaggacttaagctcc

SEQ ID NO: 245702 - DNA, 122 bp, Homo sapiens
gaactctagggctctttggttgcccttgctatcctcagcctcaatcccaacctggaccagcgagactctcaggtttggtatttcaggaagttataacttttgggggcttctgaaatacagat

SEQ ID NO: 245703 - DNA, 122 bp, Homo sapiens
cataattcaaattcacacacaaacggtgagatgtttgcttagcaagagctataatttaaacgtaacctctgtagaaagccattcagcagtgcctgtgtataaagtgcaatttagtctgtaga

SEQ ID NO: 245704 - DNA, 122 bp, Homo sapiens
gcccctgcccctgcccctgcccgagagctcttagtttttaaaaaggcctttgggatttgccggatccttgcatcctccgtgtcttcttgtgtgcagtcattgggggtgggggcgtgcttgga

SEQ ID NO: 245705 - DNA, 122 bp, Homo sapiens
tgcaaggaagcagcaaagggtagactagaacctgggcagcctgactccaggcactgcgttcgggccccagaaccacacccatcacacagagccaggatcccatcccgttgacacagctgggc

SEQ ID NO: 245706 - DNA, 122 bp, Homo sapiens
cccagtgcccccattgagactgaaccagagccagagcagggggctttcatacctcagggacgggcccaccccctccctgtagacctgcacacctggctgggactttccgcacacccctgctc

SEQ ID NO: 245707 - DNA, 122 bp, Homo sapiens
cccgcccccgcgcggcgctgggaggcgggagctgtctctgagaacctgcgggagagcgcccgggcttgctgcttcccggacccgcgcgtctctcgagcaccctcgtcccaccaccttgtgag

SEQ ID NO: 245708 - DNA, 122 bp, Homo sapiens
cagaacggcaagagggagggaaatagaagggaggtgaggggcgagcgggaagagcggcggcgcgccagcggctggagagagaaaaagtttttgcaaaagggaaaaaaaaagtttgcgcttct

SEQ ID NO: 245709 - DNA, 122 bp, Homo sapiens
ccacgaattactggcacagtaattcagaatttggttttttttctaagtctcatttttacccgtagcttctgtttttacagcaaaaggtaaagagtggctggaatgcttagaatagcccagtt

SEQ ID NO: 245710 - DNA, 122 bp, Homo sapiens
gggctgggaaggccagcgtgttgggggaggcgcctgggcctctgggactgggcctggctgcgtcaaggtggggctgacatgaagtccccttcatctgtccggggtggcccgtccttctggga

SEQ ID NO: 245711 - DNA, 122 bp, Homo sapiens
gattcgcccctaggggtgaagtcatctcgctcctcttctgagccgtgagctgggcagggccgcgctcacatcattcctctccccctgtcgccgggtgggaaatccgtaacaggctctgtggc

SEQ ID NO: 245712 - DNA, 122 bp, Homo sapiens
aagaaaacaaaaaaaggtaaaagacaagacagtgcagtggaggccggacgcagtggctcacgcctgtaatcccagcactttgggaggccgaggtgggaagatcacgaggtcaggagatcgag

SEQ ID NO: 245713 - DNA, 122 bp, Homo sapiens
ccctcccctctcccgccttcgccttccccgctcggcctccctaagtgctgggattacagtcgtgagccaccgcgcccggccaggaattaaaatttgagatgagatttgggtggagctacaga

SEQ ID NO: 245714 - DNA, 122 bp, Homo sapiens
gaaattgacttcgacaaaattttaccaagcacctcatcatgagcaaagctctgtgctacacgctggcatatggccaagtcctaacccctcaactgtaggctccgtgaagcggctctacttca

SEQ ID NO: 245715 - DNA, 122 bp, Homo sapiens
aactgtcagaatatggtgctgagtaggaatggcaccgcgttattcattcagtccctttatcgaggatctaccatgcacctacatttatctaaatctaattattagtacacattttcaaattt

SEQ ID NO: 245716 - DNA, 122 bp, Homo sapiens
gggggtgggcaggcatgggctggggccagaccgcggggtcgggcagggggacggtgggggcgcacggcggccgccaccccaattctcgatggtgcgagtggcgcggtccagggagctgctta

SEQ ID NO: 245717 - DNA, 122 bp, Homo sapiens
atttttatggaggtggattccaattgaaggtagtcaagaggtaacactttttaaaatacacgaaataaatacaatataatggaagaaaatgattactgctatgaagaaaataaacccaggtg

SEQ ID NO: 245718 - DNA, 122 bp, Homo sapiens
ttggggccgggtcgaggccttgaggatttctcagccctgggcctggggcttggtcctggtcgctggggctgggttcttacctcgcctccttggctcctttcttccttccccacggccggcca

SEQ ID NO: 245719 - DNA, 122 bp, Homo sapiens
aaagaacaagcagcagcaagatttactgcagcaagatttattacaaagggcaaaagaacacgactgccacagcacataaggagacccagtgaattgtctctacaggctccggccgcctgctt

SEQ ID NO: 245720 - DNA, 122 bp, Homo sapiens
tggccgccgcgcgccggacgtacctctccaccgcgaaggaactacctcgccagttcccggcgacagaggacagattatttccaggaccgctcccgccacccctcccgggcaacccactagac

SEQ ID NO: 245721 - DNA, 122 bp, Homo sapiens
ttttcatccaatgattcatttttgaaaaactgggattcataatttgagaaatatgactgtcgtcataagcataagggaggtatttcaaaaagaaggcaggctggcctagagagctaggttaa

SEQ ID NO: 245722 - DNA, 122 bp, Homo sapiens
cattggccagagagtggcaggctgcagtgcctgtggggtggcagggctggtccagacactcgtccacgtctccctcacagcgtagccccacaaagcctggagggcaggcacagtggaatcct

SEQ ID NO: 245723 - DNA, 122 bp, Homo sapiens
gggagggggcttcctgcccggaagccagggaggcccgagcaacgcccacaccccaggacgcggcccttcccggcccgggggtccccgtgcaagcctcgccctcctgcctgtcccggggtgct

SEQ ID NO: 245724 - DNA, 122 bp, Homo sapiens
agactgagatatgtcctcaggtataacaaaataccacaataggggtagtgttgatgaggacgtggctaattttagctaatagagcataggtggatggcagaaaaactgtatttcaaggagca

SEQ ID NO: 245725 - DNA, 122 bp, Homo sapiens
atttatataaataataatatgagaatataattattaatatgagaatttccttttctttggcgttcctgaaaccttgcctgccccatgcccggagaaatccgttgcacaccgtctcttggagc

SEQ ID NO: 245726 - DNA, 122 bp, Homo sapiens
ggagagtatggagctttgcacagagatgcagtgcaggtgggtgtgaggggaaacaggccacggctggcaggggtaagaattaaggttagtgacccagagaccaaggggatagggagaggcaa

SEQ ID NO: 245727 - DNA, 122 bp, Homo sapiens
gagagggtgctcatcggtggggacctcatggggactgcctcttagattttcagtgcctcccgccccctcccgtttccagcccccatttcccaggcctcattcccacccttcccagcttgtgc

SEQ ID NO: 245728 - DNA, 122 bp, Homo sapiens
caacaaactaccaacactgtagaggagcccctggatcttatcaggctcagcctagatgagcgaatttatgtgaaaatgagaaatgaccgagagcttcgaggcagattacatgtaagtaaatt

SEQ ID NO: 245729 - DNA, 122 bp, Homo sapiens
gccgcgtggtcgccctgccagagcggttgatgtcaggcagtgctgggaggcgttgctctccgggttcgcttctctcctgttgtcctaactctgcatctctcccgggtgaatcacagagctgt

SEQ ID NO: 245730 - DNA, 122 bp, Homo sapiens
gcggggagcccgggtagtttctgaggataacgaacaaggcttgcagcttgatctgcagaccgggcagttgatattaaatgagaagctggaccgggagaagctgtgtggccctactgagccct

SEQ ID NO: 245731 - DNA, 122 bp, Homo sapiens
caacacccgagaatggggacagggcgcatgcgcacaccgtggccgtggcgtctaagtgctcgcccagctgcggcagccgctaggtggcgcatgcgccctggaaggtgcgggccggtctctgg

SEQ ID NO: 245732 - DNA, 122 bp, Homo sapiens
tctatcatccaatcactgcactttacacactataaatagagcagctcatgggcgtatttgcgctagtgttgggtgttccgctgtgctgtttttccgtcatggctcgcactaagcaaactgct

SEQ ID NO: 245733 - DNA, 122 bp, Homo sapiens
atttttatgtcatttttcctatttcaatggttaattctaagttagtgattgacttttattcgtgagtgagagtaaatttgtttcatgtgattcaacataatttctattatttttaggaagta

SEQ ID NO: 245734 - DNA, 122 bp, Homo sapiens
actattcctgtaagttatgtattcagtgaaaggttaattagaaactcaaaagaatgcagtcgtacctatgacctggaaacccaggtcataggtatgtatcagtgaaaggctaattagaaact

SEQ ID NO: 245735 - DNA, 122 bp, Homo sapiens
gcaagtctaagattagcctgctgcaggggggccgtctccaggctgggcccaaggaatggccgctgcggcgttcagaggccagggttggatcactgtgcccctgatcacccccttgtctgtct

SEQ ID NO: 245736 - DNA, 122 bp, Homo sapiens
gatgaatgatgcctggatgcaggggcagggggttagagtgaccaaagggaaggccacagccgggatccaaggaagcatcagtcagaatagagatcaagtggatacatctggcaacattcccg

SEQ ID NO: 245737 - DNA, 122 bp, Homo sapiens
gagccagccctcgcggtcggggttgaagaaggtgtgggtcaggtcgttcccgtcgtcctccgggatcttaaatggctcgttcttaatgctctcatacaaattctgcaaggagggaaaacagc

SEQ ID NO: 245738 - DNA, 122 bp, Homo sapiens
tacttcgacgtggctctctaggcccagtgggaagtcctgcctcagctgaagtggaggggccgggccagggaggaggtcggactgggcttgggttcagcctcaggctcgtagcaccctccttc

SEQ ID NO: 245739 - DNA, 122 bp, Homo sapiens
ttaggttcaccgtcttatgtgggtgctgttcatggtgccccaaaccaatgacaatgatagcgtcaaagatcactgatcacagatcaccataacagatatagtaataattcaaatgtttgaaa

SEQ ID NO: 245740 - DNA, 122 bp, Homo sapiens
aacctgtgtttggtgcttagacagggggcccccgggtagagtggaaccccttaagctaagcgaacaggagcctaacaaagcaaatttttccgtctgccctttccccctcttctcgttggcag

SEQ ID NO: 245741 - DNA, 122 bp, Homo sapiens
ccccctgatcaggactgagggtcgtaagcttagtgggtgcctcctccccaagaaacaggacgcacagctgttgtgtcccctgggaaggacacctcagaggaaacctcgaggtgcctaaggaa

SEQ ID NO: 245742 - DNA, 122 bp, Homo sapiens
tctccaggctgttgaagctcaggtccaggtgggccagatgggccaggccactcagaccagcgggcaggttggtcagggcaccccggagacaggcacccagtgtgtcccggcgttgccctcct

SEQ ID NO: 245743 - DNA, 122 bp, Homo sapiens
cccgcgatagcttcaggcctggcggcggcttccaagctaaggaacggtttggggcagtgtcgttcccggaggtcggccgccgttacccgctcaccagctacgcggcgcgtcaggtccgcgga

SEQ ID NO: 245744 - DNA, 122 bp, Homo sapiens
aggaggtaatagagaaagcacatgttcttaacagttacagctaaaacattgacccttcatcgagaacagtgttgtcttaactctcccagtaaggctagtgatcagcatcaccttcaccccct

SEQ ID NO: 245745 - DNA, 122 bp, Homo sapiens
cttgctccggcttagctgtgcacgggcagaaccgtgaggctactggggctggcccacccccggcatctatcaagaccccatcctgcccctcccaagagtccacaccccttttaggtacaggc

SEQ ID NO: 245746 - DNA, 122 bp, Homo sapiens
tcccacacttggtttttcctcatctgtcaaatggggtgtcaattctaccccccggcaggccgtctcaggaggccagtgtgaaataacaaagctgcaggagccggcgcggtgccctgcacaca

SEQ ID NO: 245747 - DNA, 122 bp, Homo sapiens
agtctccgactctagctgggcccacaccaacaaacatctccagaaactcggatccactaacggtgatgaaagggacattggcttttccagctgtggccttagctagcagcgtcttcccagtg

SEQ ID NO: 245748 - DNA, 122 bp, Homo sapiens
ggtaggggtcggtggggtggggtcatggtttacttacctcagcgccacacagaaccactacgcaagctcgggatgggagcctccttaccccaactggagcttccagctcttgcagaacagag

SEQ ID NO: 245749 - DNA, 122 bp, Homo sapiens
tctctatgcgcctcggtctctgtgcgcctcggtcccgcctcaagcaccgggtggcgtctccgctgtagtgttctgagttcaagttgcctcggaagtcccagttggggatacgctctcgcgca

SEQ ID NO: 245750 - DNA, 122 bp, Homo sapiens
ggggaacgaccgttgggtcgcgggatggggagggacccggctggcggggcggggcggagccggctgttgcccagacccacggagtcaaggcctcgctgagtcctcaaccccggccgagaggc

SEQ ID NO: 245751 - DNA, 122 bp, Homo sapiens
tgccagagagaatgctccccgctcactccaggggctgcattttgtagcttgtggcttggccgcgagcccacttggtcatgtggtcatcgggagggctagagggggggcaggaagagggagag

SEQ ID NO: 245752 - DNA, 122 bp, Homo sapiens
ctgggaactgtcttgatttaaaggaagacatggaggactgctgtatgctaccgtattacacggcccaaagcagccccgcaatgggcatgtttaacacctccatggggaagctgcagcggcaa

SEQ ID NO: 245753 - DNA, 122 bp, Homo sapiens
cggacgaggtggctgctgggcggagatgctcctcacttctcaaatggggtggctgctgggcggaggggctcctcacttctcagacggggcggcttccgggcggaggggcgcctcacttctca

SEQ ID NO: 245754 - DNA, 122 bp, Homo sapiens
atatgcatcttagcaacaaaacaaaaaccaacctcgtatgccttccagttctttttaaaacgtgtacggcagttgtgaaagttttgtggtgcttgagactgttgacttatgcaactggggag

SEQ ID NO: 245755 - DNA, 122 bp, Homo sapiens
cagctgggtgctgtgagtaggtggatagttaaggaaactgtagatctgctgaaagctcctcgtggtctgtggtctcgtgtccacgctgacctttgaacctcgtaactcttcgggtctccagc

SEQ ID NO: 245756 - DNA, 122 bp, Homo sapiens
ccggaaagtgaggggcgggaccctcgcggctttctatccaatcctgttccccggcgaatgcggggcgggaccctagcggccttcagtccaattcccgcacctttgaggcccaagggggagcg

SEQ ID NO: 245757 - DNA, 122 bp, Homo sapiens
ggggtctcggcggagggctgcggctgaggtatctctgcagaaggctgcaggtgggggtctcggcagggtgtgcgggggacagccttcttgggccaggcaggcacctcgagggcaccctggct

SEQ ID NO: 245758 - DNA, 122 bp, Homo sapiens
acccgatccgcttccgggtttgcgttaatctgcgcgcgcaggacaaaagccaggcctgggcgggaagtgggaggtaggcggggcctgggcgaggtaggggcggggcgcgaggcggagagacc

SEQ ID NO: 245759 - DNA, 122 bp, Homo sapiens
gtatgaggaggctttgctttggcttttggaagtcatccacaggtgttggaatcccagcaccgaagagcccctgtgattaagccttctcataaagcttccctctccttccctctttcccctta

SEQ ID NO: 245760 - DNA, 122 bp, Homo sapiens
agagtcatgatagatccagaaagagacccttggtgcttcatgtggtatctttctttagtacgggtctcttttacattcagcaggtttcattagaaaaaagaatttcaaagtatttcattaac

SEQ ID NO: 245761 - DNA, 122 bp, Homo sapiens
accctgaggggagccgggggtggtggccagcagtgggcagggggcagtgcccaccaccatcgccaaggaccctgccccctcagctgaagctcagtgccagccttcctggcacagatcgggca

SEQ ID NO: 245762 - DNA, 122 bp, Homo sapiens
ggggccactagcggcatttagggggcagcctccggccccgacgggccttcttcccgcgcgcggccttggatccagtgggcgcctggcccttggcctcgcctgccctggcatgggccccggcg

SEQ ID NO: 245763 - DNA, 122 bp, Homo sapiens
ctggaaatccctccaaagccagcagccccggagggctcgggtccctggtatccacggcgtcgagtcttccagccggagagaaaaactcacctaggaccggacctgggcctcgccgcgctggg

SEQ ID NO: 245764 - DNA, 122 bp, Homo sapiens
ggaggtccggccactcccgccccgcgccccacgtcccgggtctcccttcgaggccagacgcgcccggacctctctcacctcgaacctcgcgcgtgtctggcagggcctctggacgcgcgggc

SEQ ID NO: 245765 - DNA, 122 bp, Homo sapiens
cggcctctgccgtgaggagcgaaaggtccacctggctggggcgcaggacccggggagccgcgccgggaggagggtcgggcgggtctcagcccctcctcgcccccaggctcccactccatgag

SEQ ID NO: 245766 - DNA, 122 bp, Homo sapiens
cccggggcccgaccctgtggagactcagctttcctcccattctctggccagggagctccacggtccatctgtggacagctctctttgcaggaaagctcttctctatgaggatgagcaccacc

SEQ ID NO: 245767 - DNA, 122 bp, Homo sapiens
attcagaagcatgggtgctcgcgcgctcaaacacaggcacactttcaatttacctaaaaacggggatcaccctttgtagctaaaatgcaatctttcttatttttaggttaccctgagaaaag

SEQ ID NO: 245768 - DNA, 122 bp, Homo sapiens
ggaagcctcttgagccccgccttgctgcttgcttcgcccgcttggcctggcagttcccggcgcggctctaatgtcttgctggcgcgactggttttgatcctgtccgtctgccctcctttttg

SEQ ID NO: 245769 - DNA, 122 bp, Homo sapiens
ctcagcacatgctacgtaacctcaaggagcctcagtttccccccacataaacagagcttacgaggtctgcctggcaaggcttccagcagaggtggcacttgtggctgttcctgtggaatccc

SEQ ID NO: 245770 - DNA, 122 bp, Homo sapiens
ctttagaacatttccacttcacaagtttctgatttgcttcactttcttacttggcgatggcgccctggcagcatcatccacacataccagtgcgtatggagaaatgggctgtaggcccttcc

SEQ ID NO: 245771 - DNA, 122 bp, Homo sapiens
agaggaacagatttctgtcccatgtttccaacgaaaccaaccacttaaaaagatacagggcgccattcagggttgttggagcagtagaagaacacgtagctgatctgcaatcaaatggccac

SEQ ID NO: 245772 - DNA, 122 bp, Homo sapiens
attgtgcctgtcgctttagactttttcttacttatttattttatttatttatttttaagacggggtcattcactctgtggcctgggctggaggacaatggtatgatcacagcccactgcagc

SEQ ID NO: 245773 - DNA, 122 bp, Homo sapiens
ccctgtggccgggggctggggtttgagtggggtccgctggagggggcctgcgttccacagcgaggttggagctaacagcttctgtcttgcggcccctcctctagccggccgctgtggaagag

SEQ ID NO: 245774 - DNA, 122 bp, Homo sapiens
gggaatgtgcagcatggaagttgcacgtgtgggccacgacacattgcgccaggccggcctcgctcatctgagaggggtctgagtgtggagccatcctccccacagcctgcgtgcacttgctg

SEQ ID NO: 245775 - DNA, 122 bp, Homo sapiens
acaagaaacatcaaagacggggataggaaagctggattctagtcctggctgggcctctgacgtgctgtttgagctctctgggcctcaaggaattgaaaagtaggggggttctataataggaa

SEQ ID NO: 245776 - DNA, 122 bp, Homo sapiens
tgggctcaggacctagcctgggggtgcaaaacttgttctcattttgtcttttagaacattcgctgccttctgcttaagcctagacacaggcaatttcaccaaggtaaatatacgagttgcta

SEQ ID NO: 245777 - DNA, 122 bp, Homo sapiens
tgcagttccccgtgagtactcaggttggcgtgggacaggggagccggctcccgggggccacgcaggaagcccctctccgagcgaggccgggcccccgggccgggaagctgcttcctgccaga

SEQ ID NO: 245778 - DNA, 122 bp, Homo sapiens
cccagggctgctttcaaaagtgtgtcttagtgtgacaccagaaacagcagacttaaaactcgagtgctcttgagatttaatggaggacatttcagtttcaaaaatcttttgcaacatataca

SEQ ID NO: 245779 - DNA, 122 bp, Homo sapiens
gggcatttaggaggcacggaggtgggcatgtgaggccacctccccgctacagaccacgtgcggcctcaggttcttctaagaggcaggatcccaagggcaacacgtggcagggaaggtggagg

SEQ ID NO: 245780 - DNA, 122 bp, Homo sapiens
tccgtctttcctttagggcttcatttaacttcgagactgtccttttggcctgtgagcacacgtagggcattaggacccagcgtttgttgtagtgagagtggttgaatctcgatctctcaatt

SEQ ID NO: 245781 - DNA, 122 bp, Homo sapiens
cattagtgaagaaaccatagcacagagaggattagtgacttgcctgaggtcacatgggtgcgggatggggtggagggggcggcagtgggactccctgcagtctgactccagagagtgtgccc

SEQ ID NO: 245782 - DNA, 122 bp, Homo sapiens
tcctctactcgctgcggggtgtgcttggttttaacagcactggccatggggtcgtgtgggcgcaggggcagtcttcagggaagacaggatgggggtacatacggagggacacttctgtcccc

SEQ ID NO: 245783 - DNA, 122 bp, Homo sapiens
aatccacagtggtggagcactgtgattgacattcagctgcaaagctcttgctgggaaacgcggtggccgagccgtcagcacaggcggcagctgcctcccacacttaagacaggacttctaaa

SEQ ID NO: 245784 - DNA, 122 bp, Homo sapiens
ttttgatgagggacccctttctagggcttctagagtcatggagaaggcctcctaccttaacgtttgaagtttattccctgccattagcctgctacaggaccgcttccttctcctcccctgat

SEQ ID NO: 245785 - DNA, 122 bp, Homo sapiens
gaaatctgggtttgctgccgcagatgtgggatttttgtggagggcagaggtgatttcggccggcagaagatggagtttaaactcttctttgccggattgtcctgggctgagccgctgaggag

SEQ ID NO: 245786 - DNA, 122 bp, Homo sapiens
accctacaggagcacagctagtacactgaacagtctggaaggtgttggcacctgccatttcgcgggacactggcaccattttataaaacagtgatagaaagatgcggaataaatcagtgttc

SEQ ID NO: 245787 - DNA, 122 bp, Homo sapiens
ttcctgttcatccttgggaccttcaccatccctgtgagctcctttaaccctgacctgtctcgttaaatagtccttccagtaaacccttgtcatgtagcctttgagtgtgctatttctctctt

SEQ ID NO: 245788 - DNA, 122 bp, Homo sapiens
ccaggagcagagtccagctgtcctcaggccccacggggacctcgctgtgtttacacgactcgtcatatggtaacctcttacagctcttgggcaggctgcactgttacctcatctgcagtccc

SEQ ID NO: 245789 - DNA, 122 bp, Homo sapiens
cgacaggagaattccgtgagccatgcttcctgggaagcggtctagcgagtccggacaacacgcgtccgcacggtgaccacaaacgtgtgctgcccctttcacagcccctacacacgaagcgc

SEQ ID NO: 245790 - DNA, 122 bp, Homo sapiens
tccttgtgaagacatacaagttgttttcgttgccatgtgagactgaaagagcaggtgccgcgccacctcggagccatggtcgcgggcgggggcacggtgaagcggctgtatcagcccggccc

SEQ ID NO: 245791 - DNA, 122 bp, Homo sapiens
tttttgcatgtgtccatgttgtagcgtgtgtccctgttgtagcgtgtgtccctgttgtagcgtgtgtccgtgttgtagcgtgtgtccgtgttgtggcatgcatccatgttatcatatgtatc

SEQ ID NO: 245792 - DNA, 122 bp, Homo sapiens
caggagtgcctttccctaccacaggctccctgcagcccaaggatgtgcctgagacacagccgggagtgcctcgccctcaaacaggctcgctgcagcccaaacatctgcctgagacacagcca

SEQ ID NO: 245793 - DNA, 122 bp, Homo sapiens
aatgaatgatagctttaattccagctcctcctttttgggtctactatgctcttggcactacgttaggtgcatggtactgacagatgcatgtcagtccgaaccctcaaggggttcacaatcta

SEQ ID NO: 245794 - DNA, 122 bp, Homo sapiens
gcatatgccgtgggaaacgcttttggaacaagttggattgctccgaatttcagtgcctatcgggcagccagtgaacatttgtccatctttaaggcattaaactgagaagaaccactgaggaa

SEQ ID NO: 245795 - DNA, 122 bp, Homo sapiens
ttctgtccgagtgtttggattttgtaatcctcctgtctttggccaactccccatccttggcggagcgctcgcccttggccgggctccgtgctgccagccttgcggaaccctaggcccgggcg

SEQ ID NO: 245796 - DNA, 122 bp, Homo sapiens
gtcttctttacacagcagccaaagtgagcatttaaaatgcattttaaatgcagatctaatcgcattatttccctgctgttaacacttcaaagccttcctgttgctctaggcgtaaaggcaaa

SEQ ID NO: 245797 - DNA, 122 bp, Homo sapiens
taggctctaacatgaacggcaaaatcagacatcaacagtagcacatcatgttactctatacgaaagcacagatttaggcactttatcaaagaaaaatgtttagaaacaaatgaggttattga

SEQ ID NO: 245798 - DNA, 122 bp, Homo sapiens
atatctagctttgccattttggggagcctgtgtacaaatatttattactataaatatggccgggcgcggtggctcatgcctgtaatcccagcactttgggaggccgaggtgggtggatcaga

SEQ ID NO: 245799 - DNA, 122 bp, Homo sapiens
ttttctgggccctgatagggaggagacccaagcaagcccctgctctgttgctctagggcgcgagttccccaggtatctgtaacatgaaaacacaaacacactcgtgcacacacacaggcaca

SEQ ID NO: 245800 - DNA, 122 bp, Homo sapiens
cctgcggacagggcacgagtccgggtctcggaggaggtcggcgactgccgcgtgggtccgcgactcaccaagtacagcggctgccagcgacgctgagtatccaactcttcgaactcccgctc

SEQ ID NO: 245801 - DNA, 122 bp, Homo sapiens
acaggtgaggaagcccctcccacagcggccggagtttcggactcggagcgcgagaaacgtcgggatagcgcctgcctcgcagagcttccgcttccggcccttcaggctctgtctctgtggag

SEQ ID NO: 245802 - DNA, 122 bp, Homo sapiens
ctgccacgtagggagggggcctgtgctggagttgctctgaatgtcctgtccgtttggctgcgaggtggctgtccctgcattctttcaccaggtttcaagactccttgcattcgcagtacccc

SEQ ID NO: 245803 - DNA, 122 bp, Homo sapiens
acctcaggtgatctgcctgcctcagcctcccaaagtgctgggattacaggcatgagccaccgcacctagctggtctcatgtttttaactagatctcgcagctgaccgtgtggaagacaggtt

SEQ ID NO: 245804 - DNA, 122 bp, Homo sapiens
tgtgtgtgtgtgtgtgtgtgtgtgtgtgtgtgtgtgtgtgtgtgtgtgtgtgtctgtgtacgcgctttggaaggctacaattgcgagaagcgcaggtctccgccaccgaagctttagactca

SEQ ID NO: 245805 - DNA, 122 bp, Homo sapiens
ctctgactcctaaatacatctagaatcttcctctttgttccgtcgctgcccaccctgccccggctccagcagtgcatgctcccatgcctggagctgtcttcccagtggtaccctggattcca

SEQ ID NO: 245806 - DNA, 122 bp, Homo sapiens
gtgcgcgcgggtccttggcgccctgtttgtgtaggtgtctgggtgtgagcggagggggtgcgtgtgcgtgtgcgcgccgcgcgccggccccgggccccagaggatccgtgtcggggattggc

SEQ ID NO: 245807 - DNA, 122 bp, Homo sapiens
actgcgttcgtggccgtgcttgcctagaggctgggcccaggtagggaagcgaagtggactcgtggtttttctccgagggacccaggctttgggatcccgggctccggggctctctgcccccc

SEQ ID NO: 245808 - DNA, 122 bp, Homo sapiens
cgccccctacgctccacaggcctctcccggtggggggcaggcttagaccctggcgagccccgtgcgaaaccacctcggctcttcctaggtccgctcccttgtgcgagactcaactcccaaaa

SEQ ID NO: 245809 - DNA, 122 bp, Homo sapiens
ttcccgggaaggggagggggttcccgccagtttcctgcctccccccgcgccacgccggggcggcgccgggaagccactccttctaggagcgcagagccttggccctccctgggagtctggtc

SEQ ID NO: 245810 - DNA, 122 bp, Homo sapiens
ctcaaacacgaagaagattgggagatgcatcagcaccaaggcggtgggcagtgactcccgcgtggacatcactgacctctacaagtatccggaaggtaagggccacatggcggcctttatta

SEQ ID NO: 245811 - DNA, 122 bp, Homo sapiens
cgtacaatgcagactttgacggggatgagatgaacttgcacctgccacagtctctggagacgcgagcagagatccaggagctggccatggttcctcgcatgattgtcaccccccagagcaat

SEQ ID NO: 245812 - DNA, 122 bp, Homo sapiens
gttgcatctacaataaataatactaagaaaattaaaagctggtttaaaaaataaacataccgctttcctgtagtttggggagtgcatttacgaccggtataaaacatgatagtaacagttca

SEQ ID NO: 245813 - DNA, 122 bp, Homo sapiens
agctgtgccttttaatatttaatgccattgctgcaaacgccgctccacgctgactgcatccgtgccaggctcattcctctcagggcgccaattcccggcttggagaccagctgacaaatctt

SEQ ID NO: 245814 - DNA, 122 bp, Homo sapiens
atagtagcccatgagcctgctgggagtacccggttccctctgggtgggggctgtccgtggcgaagacctcccccacctccggagggcagcccgtgagggtgctgggagcacccggttccctc

SEQ ID NO: 245815 - DNA, 122 bp, Homo sapiens
caccatgggcctcgggggtctgtccaagactacaaggcccgaagcgccgcgcgccgcgcacgcacagtaggcgagggtggtagggacttatagtttttaaactgtaacggtggagagattgc

SEQ ID NO: 245816 - DNA, 122 bp, Homo sapiens
agctagtgtgtcaactcagcgtttctcctctcgtccctggtgaggtgtagcggcggcacgcggctggagatcccctgtggcctccagtttaggaagggtccagcatcccaagggaggggtgt

SEQ ID NO: 245817 - DNA, 122 bp, Homo sapiens
cacccagggagctgcaccactgcgcacccggaggcccaggtgaggctgccccgcgccccacgccccaccttgctctgagtcgtccgtggagacagcagagcccgtgctatctgtgcgcacgc

SEQ ID NO: 245818 - DNA, 122 bp, Homo sapiens
tgaggtgccggggagcgcggcgcgggtcctcggcctagctctcgccggacgaaggccgcccgctgccgcttcaggcccgcctcacgcctaccggcctctcccgacttgtctttccccttctc

SEQ ID NO: 245819 - DNA, 122 bp, Homo sapiens
cggtgcccaccgctggcctcccccgcgtctgggctgcgggcggtcgcagcggtcacccagcgccttctgtgtgccatcaggcactggcccggtctcccgtttgcagagatttgaagccagtc

SEQ ID NO: 245820 - DNA, 122 bp, Homo sapiens
agcccaagaaggccaacatccgggacaatggggatggcacgtacactgtgtcctacctgccggacatgagtggccggtacaccatcaccatcaagtatggcggtgatgagatcccctactcg

SEQ ID NO: 245821 - DNA, 122 bp, Homo sapiens
ggttctccaaagcatgactgttggcagcctgaaaacctccaggacaggaaacaggagtggcgcagggaatgtaagatgatcccagcttcaagtcactgggcggcccttagacccaggctgcc

SEQ ID NO: 245822 - DNA, 122 bp, Homo sapiens
aggcaatgaagaggtaggaaagacagtcttgaatcaccacaccatgcctaccccatccgccggcagcagccatgtagtgtggagagatcatctctgtgctgttgagggagagggaacagtga

SEQ ID NO: 245823 - DNA, 122 bp, Homo sapiens
ctcttttgtgcctttttagcgcgaaaagtgtatgggaagactaggtgctcgttagcggctcggttagaactacattgcccacaatgccccagggaacatttgtagctctagaactacatgac

SEQ ID NO: 245824 - DNA, 122 bp, Homo sapiens
gggagggcaagacttttctccggagcctctggcaactcgtggagtctatataaggtggggcggtggggggcgcggaattctctactttggattggtttgtttgttttaaatctagggtggtg

SEQ ID NO: 245825 - DNA, 122 bp, Homo sapiens
gcccacaccgcccaagagtcagtgaaacctgagggatcttccccaaggctctgaaccacgcgggacgcctgggtcctcgcatggatgccgacggggccggctgagtgggagccccgcccgta

SEQ ID NO: 245826 - DNA, 122 bp, Homo sapiens
aagcaatggtgacgaaggcctttgtcttgttggccatctttgcagaagcctctgcaaaatcgtgtgctccaaataaagcaggtatgtcctcgccaagtccattttcctgggacgaaaagttt

SEQ ID NO: 245827 - DNA, 122 bp, Homo sapiens
cggcgtttgaaagtgtccgggttgcttaggatccctacaggtagcgcctctggatacatgcgtggtctgctgacccagagagaaacgaaaggtgggagggggtacctgggggtcgccagaag

SEQ ID NO: 245828 - DNA, 122 bp, Homo sapiens
cactgccccttcagggatgaggcacagttacttcctggggccaaatggaatcctgctgtgcgtgaacacaggaaagaagctgtgcttcttcctttcctcactccctcccctgaataaatcct

SEQ ID NO: 245829 - DNA, 122 bp, Homo sapiens
cttcctaccatcctgccccttgctcatggctccaccaccctggcctcctgcctcctgaaacgccttaagcacagtgtcctcagctcagggctatgctcttgttgtcaccttgtccctcttcc

SEQ ID NO: 245830 - DNA, 122 bp, Homo sapiens
ctacagcttctggccccaccatacctcttctgcctgaactcagctggtgggtgcagcttacgcttgtcctgggaaataactgtgtagcagggcagggcaagtggccccacccacctccactg

SEQ ID NO: 245831 - DNA, 122 bp, Homo sapiens
cccattggctgccagacagccccaaccccaacccgcgctcgccctaactttgggtccgcccggccctcatatttgcatacggggccttctaggccttcgattggcccctgcagtagctgcca

SEQ ID NO: 245832 - DNA, 122 bp, Homo sapiens
ctggcaccacccgtgggcactggccgtgccgcatccttgccacacgaggggaggtcaaggcgattgtgcagagtgggctcagggaggacgtcacaggaaaagtaacaaaagaaaccaaaata

SEQ ID NO: 245833 - DNA, 122 bp, Homo sapiens
cggcggggaccgggccgctggggaacttacggggtcgggtcggggccgggtggggggtggcggcggggcgctcctgcccggggggcggcatgagcccaggccgcggggcggaggtggcgggg

SEQ ID NO: 245834 - DNA, 122 bp, Homo sapiens
agcgggtgccggagctcccgaggtgagggggcaatgtattagggatcctgggggctcttccggcttggggtaggggtgggtggcggcacacggggtcctaggtctttgacgtcgagggagat

SEQ ID NO: 245835 - DNA, 122 bp, Homo sapiens
cacaaatccacacaccagcactgaaacaggatgttcacactgcaggtgcaaaaggcagcccgagacgtaaatgctacccaatgtcagggttccaacaggcgactgctgctcactccacacaa

SEQ ID NO: 245836 - DNA, 122 bp, Homo sapiens
atctgcagcatgtggggcggctcccactattccacctttgacggcacctcttacaccttccggggcaactgcacctatgtcctcatgagagagatccatgcacgctttgggaatctcagcct

SEQ ID NO: 245837 - DNA, 122 bp, Homo sapiens
tccgtttcctgcagccctgggacacttgcaagtgaggctctcagggagccttgttgactgcgttgggtgaaatgcacagggaatgcagggaatgtggcatggtgttctgtgttccttctcac

SEQ ID NO: 245838 - DNA, 122 bp, Homo sapiens
gcgcgcgcacggggagccataggcttcggggtccaagcgcgtgtcgttttgggggagcagcgccgcctctgcggctggagaaagaaaggggacggaatcaaagcacggagggcagggtctgg

SEQ ID NO: 245839 - DNA, 122 bp, Homo sapiens
tggctggtctagttttagctggatccgctgactttaaaactgaactaagtcaatctgatacgtttgatcagcggttacaatcgaaagttttaaaattagttgataggccgggcgtggtggct

SEQ ID NO: 245840 - DNA, 122 bp, Homo sapiens
tggcccggcaccgggtgccagtcgtgtccgggtgagtacatccctgtcgtgacgggaggccgtgggctgcaggagaatgttctttgcaggacgtacacacacgtactcggggtgacatgcac

SEQ ID NO: 245841 - DNA, 122 bp, Homo sapiens
ccttccaggtacaaacgctatctgggctaggccaaatgtggctcgcagcgggtccgggagcggggcacctaccggcagctcccgcagcggaggcgcgtcccccgggcgccgaggcagcgccc

SEQ ID NO: 245842 - DNA, 122 bp, Homo sapiens
gaaggcacaaagcaccctcattcaatccctctgatttaaacctctcttcctactgggtctcgctagtgactaattgtccttatctaaagtgtgtgtctgtccgcctttttcccccctttttt

SEQ ID NO: 245843 - DNA, 122 bp, Homo sapiens
gagtctcagccccctccccgtccaggccggggccagcacaggaaatggggctatggggcccgcacagggaaacagacgatccatcacatgggccagttgtgagagtgggggatgagggggtg

SEQ ID NO: 245844 - DNA, 122 bp, Homo sapiens
cgggcttaatccctcctttgcctttaaattgtgtgactaatcactcggggcctgggtccgcgcctcagcctccctcctcctcctccttcttaccggttgggggtggggggagatcctttcct

SEQ ID NO: 245845 - DNA, 122 bp, Homo sapiens
aatacaagaattgcatttttttctaacattacctggacgtgggaagcaagaccacactcgcgccaaaagcaagacctgctttgccacgcgggcctacagttgccagtagggctaatacaccg

SEQ ID NO: 245846 - DNA, 122 bp, Homo sapiens
aatgtgccgaggggcccgggctggctgggccagtcccagcggcgcagccacccatgcgcgcgcgctcgcaagaccaccagcgcccagagccccagtctgaggcttggcgccgggggtctgcg

SEQ ID NO: 245847 - DNA, 122 bp, Homo sapiens
gagcgcatcaggcagagggagccaggaaaagtggccgcactgaaagaaaagcagcaggcccggcgacaccaacctggggacttacaaaatgcagaggtgtcaggccctgcacaggtcagaat

SEQ ID NO: 245848 - DNA, 122 bp, Homo sapiens
gcaacccccagccaggtgccgccgcggagtagaggccactctgctctacagggccaaggtcggagcgccaggctcctcctggccgtcccgcaggctccaaagcctctctgagatgagctgcc

SEQ ID NO: 245849 - DNA, 122 bp, Homo sapiens
gtacggggccctgggcatgccacccaacctgcctaagcctcagtttccttatctgtgaaacgggaataaataatagtactcaccccatcgaatgatcatgagtatcaaattaaatgtaaaac

SEQ ID NO: 245850 - DNA, 122 bp, Homo sapiens
gtgctcagcttcatccaccaccagatcatcgagctggcccgggactgcctgaccaagtcccgtgacggcctcatcaccacggtctacttctatgaattgcaggagaacctggagaagctcct

SEQ ID NO: 245851 - DNA, 122 bp, Homo sapiens
tggcagttcatgtaaaaataattacagagaaccagtaaaacttgacaagatgctcaaactcgctaataaaaatcaaattgaaacaaagtaacattttttacccatcagactggcaaagaaag

SEQ ID NO: 245852 - DNA, 122 bp, Homo sapiens
cattagcaactgtagggaataggcaggcatcagtctaaatggacacaaacctcagggccacgatagcagccagggacctcttgtgtgtgtcaggagttaacccttcagtgtctggactatag

SEQ ID NO: 245853 - DNA, 122 bp, Homo sapiens
ggaggaggcggcggccgcggcgaggaggagactgggagtcgtgaagtctctgtctccggccggctgactgctggctgaggcgcagcacagccttggttaaatccttaattgcgcgcttacgc

SEQ ID NO: 245854 - DNA, 122 bp, Homo sapiens
ggtatacccccgagggggctggggaaagtaagagaatgaagcctttctgtttcctccaggcggtgagccagggaacaagcagtccagtgcccagagttttggtgaaagcagaggaagggagg

SEQ ID NO: 245855 - DNA, 122 bp, Homo sapiens
ccgagtagggaggacccagcccctcgtttttcccgatccggacccaggcggccggggccgcgggaccgccgcggctttgtctgaaagttccactcctaggctccccccgcccccgcccccgc

SEQ ID NO: 245856 - DNA, 122 bp, Homo sapiens
gtttgggatagacacagaacaggcgggtggtgtccagagctggccaggaacaacacgggccggcgagaaaacacagctgggtccctgccctccagcctgtgccctccagtctgttggtaggg

SEQ ID NO: 245857 - DNA, 122 bp, Homo sapiens
ccatctcttgtttgctgcagggagtattcactaggagaataaggttttccatcttcatcacgtagcatgctgaaaacttcgagatataaggtgctgagttgttttttcagtaggtgaaggct

SEQ ID NO: 245858 - DNA, 122 bp, Homo sapiens
tattggctgttagtattgttgatattatcaatgatagcatattacaactactactagcagcgatggggcaccattgaagggtgctaagcagacaactatagcagcagtttggctctgagtct

SEQ ID NO: 245859 - DNA, 122 bp, Homo sapiens
agagcctggtgcccgccggcttccaaggctctgctgccatctgctggccgcggcgaggcacgggcgtgcccggccacacacttgcttctgctgtctctcattaagggaacagttctcatttt

SEQ ID NO: 245860 - DNA, 122 bp, Homo sapiens
acaaaatcaaggtgagcttccggggggagggggaggggcgtgcagtgaggaaggaagccacgttcccagcaggtagggccataaaatgctatgtcaaaaagaaagtcacagtgacctttcca

SEQ ID NO: 245861 - DNA, 122 bp, Homo sapiens
ctgtggctgtttctgcccttgctcttaaccaccacaaggtgtcactcttcgctgctcctgcgcgttcccaccaaggcggtaactgctggccagagaggaagaatttcctctgtccccgcact

SEQ ID NO: 245862 - DNA, 122 bp, Homo sapiens
atccacactgatatgaataaacaaacaaaaaccacataaataatgaaggagaaaagacagcgcttctgcacagtggaacgccaatgaatacatgtagaagggaagaggacaggactccacag

SEQ ID NO: 245863 - DNA, 122 bp, Homo sapiens
tccctgactcctggaagaactttttcagagggaagaaaaaggaccccgaatgggataagccggtgtctgatatcaggtacatctccgatggagtggagtgttcaccaccagcctctccagca

SEQ ID NO: 245864 - DNA, 122 bp, Homo sapiens
aaaagcgcgcctctgttgggacgggaaatcagcctttctattggtcagggttagaaaccccgcctttgaggcattttcaaccaatggaagcgcggcattcttcatttaaactgtctataaat

SEQ ID NO: 245865 - DNA, 122 bp, Homo sapiens
aactagataattcattccaaatagttttaatactttctcaacttcaagttcaaaccatgtcgccaaaaaaaagaaagttgcaaaacagcaatgcacttacctgagggtatggggaagtcctg

SEQ ID NO: 245866 - DNA, 122 bp, Homo sapiens
catgaccctctgttcttcctcaaagactcttacagactacactgcagtataactatattacgtaatgttattatctgattacctctttaagaccataaaacaaacacctcaaaggccaggcc

SEQ ID NO: 245867 - DNA, 122 bp, Homo sapiens
ctgtcccggtacgacccgccccgccccggccccaccccatggccccgaatccttcccttccgaccctggaactcgacccaccccttgccaaccaagccacgcctagctctggccacgccctc

SEQ ID NO: 245868 - DNA, 122 bp, Homo sapiens
tggagtgaacacccacacggatgtctctggatagtggaatgcggaggatgcagggcacgccggtggagagctgcccagccgtgccagcaaggccccggcatccctcccacctgccgttagca

SEQ ID NO: 245869 - DNA, 122 bp, Homo sapiens
agaagatggggttccggaagatgccgtcaaagacattgcgctcgccgtggatcttgcgggcgttgatctcgttgaagagctgcatcatgacgaaggtgttgaagatgatggtgtaatgttct

SEQ ID NO: 245870 - DNA, 122 bp, Homo sapiens
ctgagcacttctctctgggactccccacctctgtcatagggttgtgtccctctgtgacaccggcgtctgagtctaacgtcccagccttccttcctccctctgcctagtctaatagcacccag

SEQ ID NO: 245871 - DNA, 122 bp, Homo sapiens
aatcttaagactccttcagggatggcagtcattcctaccgtgctgaacatcatgttgtcacggtcagaatcagaactaaattgattaagggtctgaaacagtttggcaactcttgggcactt

SEQ ID NO: 245872 - DNA, 122 bp, Homo sapiens
gggcagcgcagggtgccggggaagctcgggaatggaggtggtgcttcctttggatcctgccgtccccgccccgctgtgccctcacggtgggtcagagtctgggctcagcctaactgccgggc

SEQ ID NO: 245873 - DNA, 122 bp, Homo sapiens
tcctaatagctgttattacccaattctggcatttgcttcttacttcctcctgacattgtccgccttgcagattttcataagaaggttcaggcagttgcttccctgtgggatatacaacaatt

SEQ ID NO: 245874 - DNA, 122 bp, Homo sapiens
gcaggtttaaagggctgaccgcggacggggaaggctgcgtgggtcccacatggcacagggcggccgctcgccttgtcctgagaagaccacggtctgcagaggcccaaggggtgagggaggaa

SEQ ID NO: 245875 - DNA, 122 bp, Homo sapiens
tcaaggaagataagctttatgattcagggagaggaggaagtactccagggttggaaggtacgcttaggaaatgatacaatgtacttatttaatattgtcctttgagttttatggagtgcagc

SEQ ID NO: 245876 - DNA, 122 bp, Homo sapiens
tctcacccagctgaaaccccgggcccgtcaaacaccaaagccccacgcctcccccagccccgggcagcctccactctacatctgtctctgggactccgactactccagtggagtcacacact

SEQ ID NO: 245877 - DNA, 122 bp, Homo sapiens
gggagggtcggttggaatcccgccctagcgcctcctgctctgcccggtccccaccggggacggggaatgccagtcatttctgttgagtgctagcagggccggtgtcaccacctcgggtggcc

SEQ ID NO: 245878 - DNA, 122 bp, Homo sapiens
tcgttttaagcttattttctgaaacgtccaaatagcgtatttccacttctggagtgccaacgaagcaacagctagcaaggaaataggaaaataaatagagtccacagctccgcttccgaggg

SEQ ID NO: 245879 - DNA, 122 bp, Homo sapiens
aaagaaaaaaaaatagatgcggtaatcttcgagagctcgaagggccgagttgggccaggacgatttccgagcagagccctcggctcggatgctcgttagggatgttagtggttattggaagc

SEQ ID NO: 245880 - DNA, 122 bp, Homo sapiens
ggggccaggaagcaattctggaagcgcagcaacagcaagctcccgggcaggtgggtgtgccgcggagggccaggtcggggtcaggggtcagaggtcaggtggccgcgttggcctcctgggct

SEQ ID NO: 245881 - DNA, 122 bp, Homo sapiens
ggaactgccagctgcgcaacaacttccggttctggtggcgggtcggggcggggcccggaacgcggggacgttgccatggagaagagccgctgtggccgcgcacttgggacagggaaagagaa

SEQ ID NO: 245882 - DNA, 122 bp, Homo sapiens
ccccaggcccgcagcgaggagctgcagggaactacggtagcaatagtgtcacggtcactgcggccactgcaacacagtacggtaaatgcggctctaggctcagactaaagcatccgcgcctc

SEQ ID NO: 245883 - DNA, 122 bp, Homo sapiens
ccggcgagtcagggcgctgcgcgggtgacggtggtgttctacctgcggaggccgccagagcgcgaagccggaacagcagcggcaggtgggaagggacagtggcacccagagtggtcttttgg

SEQ ID NO: 245884 - DNA, 122 bp, Homo sapiens
cctcacctgtaaaaatgagggtagtccctacctcataagggatattgtgaggatggaaagcgaaagtgtgagaaaatacctcccaagtgcctggtacatagtgggtgctaaataaaccactt

SEQ ID NO: 245885 - DNA, 122 bp, Homo sapiens
ctgcctcctcctcctccttcttaacccacactagtgaacaagggcaagagggaagtcaaccggtcaaagatggctctaattagagggtaattttaaaagacgtgacgacagtcatttgatag

SEQ ID NO: 245886 - DNA, 122 bp, Homo sapiens
ctagttgcctgttgccctctgctggtgaaactgttgtcatcccaggaaactgaagactcacgagttctcaggtgcctttttatctgggggagaacctaggctccatctcctcaattggggaa

SEQ ID NO: 245887 - DNA, 122 bp, Homo sapiens
cagagggcacaggggtggacagaactggggacggtatctggcagaaagcctgtaacccagcgtgcggccaggccagcatcccagctccgctccggctctgcaccgaggccgcgacccaagga

SEQ ID NO: 245888 - DNA, 122 bp, Homo sapiens
gtcgtcatattcctcccggtcccgagtgtcagagcagactactgaccgagacactactttcggcatggtttccaggagcaacctgaaaaactctacgcaaagaagagggtcgcgccgaaatg

SEQ ID NO: 245889 - DNA, 122 bp, Homo sapiens
tagcattcatagcaaatgcttatgttgtatttacccagacactattcacattgttctacacgcatgaatgcatttcacccttagaacccccaagtagaggaaaaagaaattcaggagattat

SEQ ID NO: 245890 - DNA, 122 bp, Homo sapiens
aaataaataaattagccaggtgtgttggggcatgcctatagtcccagcttctgaggaggccgaagtgagaggatcccttgagcccagcagttcgaagctgcaatgagctgtgatcacgccac

SEQ ID NO: 245891 - DNA, 122 bp, Homo sapiens
tgactgaccctgccgtgcagcctgtgacctatcacaaatcaccttggctttgtttttcctcggtgcggccgaatcccacaggaatgcgtggaatccctgccctcacccatggcgaagctgcc

SEQ ID NO: 245892 - DNA, 122 bp, Homo sapiens
cctcggggaaggaggggatgagagttgggagcagcgggaggaggcggcggcggcggctagcgaggagacagagctgggtcctgcagtaggactcccgggagccaccattatggtgaagagga

SEQ ID NO: 245893 - DNA, 122 bp, Homo sapiens
tgccctcgtgatccgcccgcctcggcctcccaaagtgctgggattacaggtgtgagccaccgcgcccggcctatataatggttcttaactctgcctgcaaaagaatcatctaggaaccttaa

SEQ ID NO: 245894 - DNA, 122 bp, Homo sapiens
gcagccactgtgctcttcccagacccattgggtcccaccagcgccgtcacctcaccaggacgtagggtaaacgtcagcccctagaaaaccagaaaaagagttaagggcctgccccttctccc

SEQ ID NO: 245895 - DNA, 122 bp, Homo sapiens
gagcctttttcgaggttcttagagatgattttaacagcactggcttgacaggtaaacagacgtgcgtttgaatcccttcctggccacaacttctcagctgtaagaccttgggaaagttacaa

SEQ ID NO: 245896 - DNA, 122 bp, Homo sapiens
accgagtcagccttccactatgaggctgatggcgccaacgtgctggctggcatcatgagccgcaacgatgaacggtgccacctggacaccacgggcacctacacccagtacaggacacagga

SEQ ID NO: 245897 - DNA, 122 bp, Homo sapiens
ggcgctggacgggatggtgctgaagtcggtgaaggagccccggcaggtgagctcgcggcccgccagcccgctgcccacgcagtagtggaagaggccgaagtagccaggcttgggggtgctca

SEQ ID NO: 245898 - DNA, 122 bp, Homo sapiens
gggcgttgcaccggcatgatcgcattagcctcactggttatgggtagctgctgctgggagcgtggttacgggtgaggaaactgaggcccagagatggggagtcacctgcccgaggttacgca

SEQ ID NO: 245899 - DNA, 122 bp, Homo sapiens
tgcaggcatccagaagtcaccgttccccaggcggaaactgtgcgctgggtgcccttcgcacgtggagtctcggccgcattgccgcctctgctctgacaattcctcccgacctctcccagctc

SEQ ID NO: 245900 - DNA, 122 bp, Homo sapiens
aaacgtggatcaatgctgctctaacgtcctgccggagaaggaaaaggaacccaccagctccgctcaggaggcctcttgggggtctccagaatcatccccttcaagcatccaaggggacaagg

SEQ ID NO: 245901 - DNA, 122 bp, Homo sapiens
actgacctcaagagtgaagccacggactctcacggtgagtgttatggttcttaaaggcggcgtgtccggagtttgctccttctggtgtttggatgtgttcggagtttcttccttctggtggg

SEQ ID NO: 245902 - DNA, 122 bp, Homo sapiens
ctgctacagggagacgccggcgccagctctccccgcagagcccgcaaaacgctctgttcgcgcttcccagagtccagcgcatcgcaggaaccgcggcccctttgaaatgcacgttcccgggc

SEQ ID NO: 245903 - DNA, 122 bp, Homo sapiens
tacgatgtaactaaaacgccactctacagttaactccctctattccttagatttcattcccggggtcacctctttggcctaggtgcacacaccgcgggctccgctctaggtggggcacaggc

SEQ ID NO: 245904 - DNA, 122 bp, Homo sapiens
gggctagtggcaggcggggagccttgtttcacttgttacacttccacaaaggggaaacgccgccgcatccggagagtgggctgcgggcactgccggggcccagccctatccctccggccccc

SEQ ID NO: 245905 - DNA, 122 bp, Homo sapiens
ctctcctcacaggtctgttgcagggactccagaaaccattctgggagccgtggatgggggcggagctggggtttggtgcagtttccagggtgcagtacagcagggcctgaatactggccctg

SEQ ID NO: 245906 - DNA, 122 bp, Homo sapiens
agtggatgtagctcacgacttcttcttttgaccccagtattctaagacaaacaccacagccgaagctggaagtgagaggagaggggttcgtttcagagtcaggagcccaaggcgccccagca

SEQ ID NO: 245907 - DNA, 122 bp, Homo sapiens
aggccaaggtgggaggatggcttgaaaccttggagtctgagaccagcctgggcaacatagcgaaacggtctctacaaataatataaaaactagccaggtgtcgtggcacacacttgtagtct

SEQ ID NO: 245908 - DNA, 122 bp, Homo sapiens
cctaaccgggcctctccttagcaaagttgacaaattcttgagagtgtcagcccagggctgcgcgtgagggcgctgggaccggggaggaaagagcacctgccgcgctcagcccgactttgaat

SEQ ID NO: 245909 - DNA, 122 bp, Homo sapiens
cggcaagcctgcgcccgctcggccccggtctctttcgctcaccagaggctacggggcgcccggccccgcacacccaagaaacactgccaccgcgacgcgcctgcccccaggatcctctcgcg

SEQ ID NO: 245910 - DNA, 122 bp, Homo sapiens
cgcacggtgtcgagttgggcccgctcctccgcccaccctgcctcagcagcgtggaatccacgccatgaaaccataactcaactcaaggtgttggaggccttcctgcccttgttgagcactga

SEQ ID NO: 245911 - DNA, 122 bp, Homo sapiens
caaggcccggcgaggcccgggggttgagaagttaaggagcgggaggtggtgcgccggggccgcggccgcgccatttgcatttcaatgcgacccgcttgttgactcagtgcccggcgcttccg

SEQ ID NO: 245912 - DNA, 122 bp, Homo sapiens
atcaacggggaaacagaagcttcagttgtactttagtttttttcctcggaagtgtagaaacggccaatttttgttgagatgggcaagagcaaaggaaatctctaagcgccaccttgtggacg

SEQ ID NO: 245913 - DNA, 122 bp, Homo sapiens
cccctcccgctgcgcctctgggcgcacgcgcagccgctgcagcctcccttatttagtccgcgatggcttccctcgcgccccaccgtcctcttccggaaggcggctccctccctgcgcagccc

SEQ ID NO: 245914 - DNA, 122 bp, Homo sapiens
aaataattatacagggaatacgtaagtcccactcacgggcttgttaagttaaaatgtggtcggaagcattggggaaagctcctgaaaggtggtagttgcaaaatggttttggtaaaatctac

SEQ ID NO: 245915 - DNA, 122 bp, Homo sapiens
cagaaaaaagacagtcaatgatggtgataatgattgagagaagaaaattaaaaattaaaccgaaccttcaataaaaagataaataggccgggtgtggtagctcatgcctgtaatcccaacac

SEQ ID NO: 245916 - DNA, 122 bp, Homo sapiens
caacttgggtaataagcaggaaaatgcaaatccaaacaacaataaaataccaaacttggccgggcacagtggttcacacctgtaatcccagcagtttggaaggccaaggtgggtggatcact

SEQ ID NO: 245917 - DNA, 122 bp, Homo sapiens
cacaaggggctgtgtcctgcagctgcgctctggagaccttgccctttctcctgcctgctgcgtcccctccgcctccagcacgtgggcctttctgtcctgttgctgggctgtgcgtgcgtcca

SEQ ID NO: 245918 - DNA, 122 bp, Homo sapiens
gcctctctggagagctgggccaggccagtgggagggcagctggcacggccggggctggtgcggggtcctgaggccagaacctgccggagggccgtccccaaggaccaacaggcacgggagag

SEQ ID NO: 245919 - DNA, 122 bp, Homo sapiens
caggctattgtcaagtcccagaatctccttctaaaatatacttcatttctgtctatttctcgctgtttccttggagggtcaccttggaggattgagctattccatttcttgcccagacaact

SEQ ID NO: 245920 - DNA, 122 bp, Homo sapiens
ctcccaagcctaagtctgctaccatcaaggcttctgtataaaaggcaaatgaggaggcagcgcccccttctgctcccacccccttctgctcccacccccttcatgtcagcagcagccaatcg

SEQ ID NO: 245921 - DNA, 122 bp, Homo sapiens
ctgcgctgcaatcgtagaatcgcaaggtctgagacttgtgaaaacttcggttcatggtttcggccccggtcagcctcgccgtcgccctcgctcctcaggggccgcagaaagactcccggggg

SEQ ID NO: 245922 - DNA, 122 bp, Homo sapiens
acttgttctaagaccaggcccagtagtgcacgcaggtaatcccagcactttggggggccacggtgggaggagcccacgagtccaggagttaaagatgagcctgggcaacatagcaacatccc

SEQ ID NO: 245923 - DNA, 122 bp, Homo sapiens
ggggggggctgcctcaccccattgtaggtcagccggtatttaggagctgcctcaccccatcgtgggtatttaggagctgcctcaccccgtcgtgggtcagccggtatttaggggccgaggtc

SEQ ID NO: 245924 - DNA, 122 bp, Homo sapiens
gatgtgtctaacttacccaaagagaaaaagagactgagccccgtgaggctgaaggcagggcgaggtagccaggcatctctgtgcattttcagagactgagatgttagtcgggtgggctacgg

SEQ ID NO: 245925 - DNA, 122 bp, Homo sapiens
tctgcgtggtgagaaaacaggcctggagaggctctgcgacccgcttaggaccacagaactcggtactaggaaaactcctattttaaaatccagccctgggtgggaagatttgggaagaatcg

SEQ ID NO: 245926 - DNA, 122 bp, Homo sapiens
cttctggtccagacgcaggaaaaccttttccggtataaagcccaccttcctctaatgttgcgcatgcccactgtgcccagctgctccgctttcgtgcatcccagacttctgtcaccaggtaa

SEQ ID NO: 245927 - DNA, 122 bp, Homo sapiens
acacacacacgggactcaagagacagtacactcgggagatgagtacagcttgcttctctgcggtcacccgagcactgcaggctcactttacctctcgcccagggaggatgccggctgccgct

SEQ ID NO: 245928 - DNA, 122 bp, Homo sapiens
agagtcagagccacccgcgggtttggtcggggctcttcccagcccggcgtccacgccccgcgtcctgcgctcgcccttgcggctgcttatgctcaggtgtttcggaagaggcgccgcgcagc

SEQ ID NO: 245929 - DNA, 122 bp, Homo sapiens
ttgagactggggctgaggctgtggtccgtccccctttccaggtccttgtcttcctcccgtcggcctgggggcgcccgctcacgcggcctctctattgcagagctcttctctatggttttccc

SEQ ID NO: 245930 - DNA, 122 bp, Homo sapiens
gcacaggtaagcccttgggttctggagccagcttactggggtgtgagtcttccttagctccgtgtggatggtgagccctcctctctcaggtctcatgatagtagctaacccttattaagtgt

SEQ ID NO: 245931 - DNA, 122 bp, Homo sapiens
tgctgagggcggtcactccctggcactggggtccttgaagttatctactgggaaatctagcgcctgttgttcgaaggatgcagtctcgcaagcctgctgtgaaccaaacggcggactgccga

SEQ ID NO: 245932 - DNA, 122 bp, Homo sapiens
cctcctgcagctccagagcgcctgcagggtgagcagaggctgctctgttttcaagaaagccgcgcgccctcatggccccgcagggcccctcacggcctctgctgctctggggagaaggtagc

SEQ ID NO: 245933 - DNA, 122 bp, Homo sapiens
aacatgtgtggccccaagctcaacagaaaccagttgttcccaatctgccgttaccatcaacgcactgttgcatatgccagccactgcgcttggttcccattttctttgccaaggtgtattag

SEQ ID NO: 245934 - DNA, 122 bp, Homo sapiens
gcccgccgccttggccgtgcaagtgccaccgtaactggtgagagccgctggcaacccacccggagttgacaaccgcggagagacgcagacacccactgacctccaggaagctgagcgtggtg

SEQ ID NO: 245935 - DNA, 122 bp, Homo sapiens
cccaatgtcaaatccagaaagtaacccaaaagagaagaacatacgtgagcgctggagacccgggagggtgcatttcaacagcacgccaggaacttcaagggagttttgcaaaatgtttcatg

SEQ ID NO: 245936 - DNA, 122 bp, Homo sapiens
cctgcgctctctgctccgggtccgtgagcagccccgacatcccgatcccgcacgcctctccgctacagccgcctacccagagggcgcgctacaaatcccaatgctccagagtccccgggcgg

SEQ ID NO: 245937 - DNA, 122 bp, Homo sapiens
ggcacggagcattcgcttttgtctcgacatccggccttcagaggatgaccagcctggcgacgcactggacaaggaggtgtagagtggggatgcacactaggcggtcggaaatcattatgcgt

SEQ ID NO: 245938 - DNA, 122 bp, Homo sapiens
tcacatccgtatttcctgtaggtttttaggactctggactccacttctcagggttgcctgcggtcctgactgttccgtcttggactacatattccacgggcgacggagaaatcttgtacctc

SEQ ID NO: 245939 - DNA, 122 bp, Homo sapiens
agaaccctcgcctgcctccctaagcaggtgtgaggatgagattagagccccaaacccagccggccaggtctgcgcgggcggtgcgaggtttctcgctgggcctgcgagaggcaggtgttggg

SEQ ID NO: 245940 - DNA, 122 bp, Homo sapiens
gcgcgcgcatgcgccgtggtaaaaggccggtacctcgggcaagatggctatcaagagtatcgcttcccgcctccggggttcccgtcgttttctgagcggcttcgtggctggggctgtagtgg

SEQ ID NO: 245941 - DNA, 122 bp, Homo sapiens
tgttacacagaaaggggagcccttcctgttgaaagaaaaggcagactgcctttctccagacgtaggttctcggcccctgggttgtgactcctgcatcaagtctcccgggtgccccgaggcag

SEQ ID NO: 245942 - DNA, 122 bp, Homo sapiens
ttgtaatgataaagaagagaagaatgtgatttgtatacactactttggtgtcagcatagacgagttgggctattgtcattaaacagaccctgtccttaggggacactggcatttattttgca

SEQ ID NO: 245943 - DNA, 122 bp, Homo sapiens
ttccaagggctcaccttgtcccggagctcttcaatggtcttgtagtaggggctgtagtcccgctcagggctagctgggctctgcttcaggtgccagtcacggatcttcacctccaggtcagc

SEQ ID NO: 245944 - DNA, 122 bp, Homo sapiens
ccgcagctcgcccccctgaccgtaaagaggcccggctgtgtcgtgaaaggggccgcaacgcgcagagcgctggttgacggccgggactccattttgttcgccgttactctgcgcgtaagtcg

SEQ ID NO: 245945 - DNA, 122 bp, Homo sapiens
aaggtggaagcaacccaagtgaacatcggcagacaatggatgagccaagtgtggtatatacgtacaaggaaatattattcaatcttaaaaaggaagattttgacacaatgctacaacatcga

SEQ ID NO: 245946 - DNA, 122 bp, Homo sapiens
gcgtgggaaatcctctgggagtttgtggccacagccagccttcgcccaggggcacggcctcggttcaccgcctgtgtgaaaacagcagcaccaactccggctgacaatttaaagtggtcttg

SEQ ID NO: 245947 - DNA, 122 bp, Homo sapiens
ccacttccgtagcgccaggaggcaccatgatcatcgctgaggagacagaagactccgtcccgctccagcgtcccatggccacacacgatgaggcggcccttccgtggctcccgctgtttctg

SEQ ID NO: 245948 - DNA, 122 bp, Homo sapiens
agtgtgtctttcctgagcgattctttctccctttagctgctcggctgcagactaaacacccgtgattgctgactccagtctaaaatctgtacaacttcacttcaactcagacaaagctcttg

SEQ ID NO: 245949 - DNA, 122 bp, Homo sapiens
agtcagggaaaacaggtcagaaacttagaatcagtcgtgggttcaaattccgactcgtttcgtggctttcggcaagtgagtggtcctctctgagctggctcaatttctccatccataaaaag

SEQ ID NO: 245950 - DNA, 122 bp, Homo sapiens
atgccacatcaccgtgggactcactgcccgcgttcaagaacaaggatggcccagatacatcgcatgcacacgtcaccgtgacgacagccatgggctgagcacatgaaggcctcagatcctac

SEQ ID NO: 245951 - DNA, 122 bp, Homo sapiens
caaagtcactcagctcgccaggggcagagccagggtgctcacagggtggccaaccttccacgtctgccctggacacgggactttcagtactaaaatgtgcggacgtccttctcccggacgtc

SEQ ID NO: 245952 - DNA, 122 bp, Homo sapiens
ctccccccgccggcgccgaggcgcagtgcaccaagggttttgtagtccgtccgggaacagcggaaaagggaccgcatgaacctccggaactttgattcccagaaagccacaggctggcgcag

SEQ ID NO: 245953 - DNA, 122 bp, Homo sapiens
ctgagggctggcttcagacagcagcagcgaccacacgtgcttagtgactcaggacggaggcgactccttgagaagccacaccgttttcctccttagaatcacgcgtataaagacgggcgcca

SEQ ID NO: 245954 - DNA, 122 bp, Homo sapiens
gggcgcagcagggcccagtgcagacccgggcagagcacgcactgagccctggtgcacacccgggcagagcggtgttggcttctgcactccctggcccaacatctcaagccagtatttctcaa

SEQ ID NO: 245955 - DNA, 122 bp, Homo sapiens
tccccttcctccacccttttgtgtgattcaggtcctcagtgattggatgatacctgctcacgtggtggagaccatctgctttactcagtctactaatgcaaatgctaatctcttccagaaac

SEQ ID NO: 245956 - DNA, 122 bp, Homo sapiens
aatcttgtggcagggcaacacagcgagaccctttccatttcagcatcaagggtgatcgatcgaggcgactgggcatggtggctcacacctgtaatcccagcactttgggaggcagaggcagg

SEQ ID NO: 245957 - DNA, 122 bp, Homo sapiens
ccagaaaaacctttatttccaaggggtggcccatttggcctcctgcagttacccctcctccgggacattgagcttctccttcaccccacaggccaccacggcgaaaaagaactccgggaaga

SEQ ID NO: 245958 - DNA, 122 bp, Homo sapiens
gagaccgctgcttggggttgcacgtttgctttgcaaaagtcatagttgcctctgatggagcgcccagctgcttggggctgctcacagcaaaagcatgactcactctgagaggagacccttct

SEQ ID NO: 245959 - DNA, 122 bp, Homo sapiens
gtgtttatttttgaggtgttctgtgtatgtagttttaactctgttatgaaaatgttgaaacgtgctagtgaaaagtggcatacagttaccatggaaacaaaactgagccaaggacatcactt

SEQ ID NO: 245960 - DNA, 122 bp, Homo sapiens
ccacccttgcggccagagacagtacccgacgttacttccgtaaatgcgctcaatgaattgcggaaggctagagtcctgctagttactacctcttggaatagggtcccgccccctgccttggc

SEQ ID NO: 245961 - DNA, 122 bp, Homo sapiens
tttcctccgaggctccaagctacctgtaaaaccccggagccgcaggagagaaaaggaagccgtgagactagttgtcgccatgatatcaaatgcaatccgggctcagccaaataaatgagtca

SEQ ID NO: 245962 - DNA, 122 bp, Homo sapiens
tatagctgatgctgttaaacaatgactgttgttgttgttttactgttattatccccaaagcggcccattctgtctgttgctgtcagctatgactcagtcccctgattaacttacgcaccacc

SEQ ID NO: 245963 - DNA, 122 bp, Homo sapiens
ctcaagattaaccctctttgagattcaaaatgcttggttttgttacttgattttcatttgcgaacaaggtatattttcctatgagaacaagatttaatttgcctgaataatgcaagttcttc

SEQ ID NO: 245964 - DNA, 122 bp, Homo sapiens
cgcttgcgggccagcgcgagttccgggtgggcgtgggcttggcaggccccgcacagggagcggcgggccggccccgccgcccggggcaatgaggggcttagcacccgggccagcagctgtgg

SEQ ID NO: 245965 - DNA, 122 bp, Homo sapiens
gggcgactggagacccggatgtccagcctggaggtcaccgcgggctcaggggtcccgatccgctttgcgcgaccccagggcgccactgccatcctgagttgggtgcagtcccgggattccgc

SEQ ID NO: 245966 - DNA, 122 bp, Homo sapiens
ctgtcggagacaatgctctgcattgctcctgagactaagccaggcccaggattgggttcccgcctcatccctcctctagtgttcctgtgaaactcggtcttcctgtgctcctgccatgagcc

SEQ ID NO: 245967 - DNA, 122 bp, Homo sapiens
atcataatagaatactgcgaacaatgtacgccagcaaatcagcccacatgaaagggacagcgtcaatttcagagaattggcgccgggaggggcacgggatcaccgtgcacagtgagtgctgt

SEQ ID NO: 245968 - DNA, 122 bp, Homo sapiens
gggcactgtcaggccaaaaggctggtggatgagctgcaactgaggtaccactgctgcgggcgccacgggtacaaggattggtttggggtccagtgggtcagcagccgttacctggatcccgg

SEQ ID NO: 245969 - DNA, 122 bp, Homo sapiens
ggagggttggtggctagggaagaacggtgcggaaagcacgcggccccagctgggctacagcgccctctggcggccagaaggctcgcgggcgctgaggccgcagaccccaggaggggaggacc

SEQ ID NO: 245970 - DNA, 122 bp, Homo sapiens
ggttaaaacattctcccagggggcatctctctgtccttggccagatggtctcgacacgtgcgggcacctctaacccaggtcggtaattttgtaaaggtctgatcctgagttccaaacgaaag

SEQ ID NO: 245971 - DNA, 122 bp, Homo sapiens
cggctcactgcaacctccatctcccggcttcaagcaagcaattctcctgccccagccgcccgagtagctgggatttaagaataatgtgattaaataggccggatgccgtggttcacacctgt

SEQ ID NO: 245972 - DNA, 122 bp, Homo sapiens
accctccaatcacccttggtcacaagatcttcagatgggagactcagtcttcaattaaagcgacactagagaagaatccctacagtacccagagcaaataagataaatagggctgtgtccac

SEQ ID NO: 245973 - DNA, 122 bp, Homo sapiens
ggtccatggccttagcctgttggtggcgtgggccggtccacggcatgggcctgtctgtggcgtgggccggtccgtggtgcgggcctgtccgtggccttagcctgttggtggcgtgggccggt

SEQ ID NO: 245974 - DNA, 122 bp, Homo sapiens
caaggccgaggacgaataggttgtttgcaagcatctgggagtaccaaaagggggccgactcgggtcctgtttgaggaatagaagtctcagcctgtaaaacgcaggcccttagaaccaagcgg

SEQ ID NO: 245975 - DNA, 122 bp, Homo sapiens
aacccttgtagtttcctaaacagagtattttctgttaaaacacttgttcttagccaagtgcggtggctcacacctgtaatcccagcactttgagaggccaaggcaggcagatcatgaggtta

SEQ ID NO: 245976 - DNA, 122 bp, Homo sapiens
tatcgtgcatgccgtggacaagcaggacgggcacggtgagctcggcgtggtagacctcgtcgccctcgggccagtactggccgctcatcatggcccggagtacgaaggatgacacgttgaaa

SEQ ID NO: 245977 - DNA, 122 bp, Homo sapiens
ttctcaccgaaagcacgtaatcgccggtgtaactcatgttggctggggggcctcccggcgcgcgcggagaggctggggtgcgcccccatgcagcatgcttgtgctcaattgcagggtcctcg

SEQ ID NO: 245978 - DNA, 122 bp, Homo sapiens
gatatctagctgcccgagcgcgccccgcgggatgcgctcaaagccctcgcgcagcggcaccgtccccagcttcatcttgaacttcttgagctcctccggtgtcaggttctccagcaccttca

SEQ ID NO: 245979 - DNA, 122 bp, Homo sapiens
gcacagtccaggatcccagagtaggtgtcctcgttgacgcctcgctgaagtgactggagccgcgtcttcaccactgcaaggggcgctcgggtcagtgtgagcctggccaagggctcagtccc

SEQ ID NO: 245980 - DNA, 122 bp, Homo sapiens
agattactactttaagtaaccaatgcaaaataaaacacaaattatataatttgtccttagcgttaaggaaaatggcaaatccgggtaccttcccaattcatgtcacagactattattaggtt

SEQ ID NO: 245981 - DNA, 122 bp, Homo sapiens
attttttggtggagacggggtttcgccgtgttggccgggctggtctccagctcctgacctcgagtgatctgcccgcctcggcctcccgaggtgcctcgctcactcagtgctcaatgttgccc

SEQ ID NO: 245982 - DNA, 122 bp, Homo sapiens
caggtgggaaggctctggcaggctccaggaggagcagatagaacttgggtgatcagccaccgggcgtggtggctcatgcctgtaatctcagcactgtgggaatccgaggcgagcagatcact

SEQ ID NO: 245983 - DNA, 122 bp, Homo sapiens
gtagaacaggaagagtatgtatgcaagtgccaagactgttcttctcaacgctgaagcctgcggagaggggcgagctgaaggatgcagatgaaggccgggaacctgcactgctgagcaatcga

SEQ ID NO: 245984 - DNA, 122 bp, Homo sapiens
ctagtgacagcctcagctgacccaacagtgagttctgtagctagaatgaccattcagaggcgtcctgagctgagccatgatggccagggctttattaatctgcataattttgtttgggtgta

SEQ ID NO: 245985 - DNA, 122 bp, Homo sapiens
cccagacagcaagtggctgcatggccccaccgttgtgggcatggatatatctttataatccgggttccccacaggcttcagggtgagcaaaagctagcctgcaagcagatgaaggaaaactt

SEQ ID NO: 245986 - DNA, 122 bp, Homo sapiens
ccgggtcggcgttactattctagtccaacctcctacttacccggtaaacccacaaggctccgcccctttgccgaagctggccccgcctatgccctcttccacgcctgcgcgctccgtgcgcc

SEQ ID NO: 245987 - DNA, 122 bp, Homo sapiens
cgaggtccgaggcgcagccgctcttcgctgtgtccggcccggcgtgctcccgacagggggcgtcactgaacagcgaccgtctccgtcgcccactcggccctggtgtttgctttttggtgtgt

SEQ ID NO: 245988 - DNA, 122 bp, Homo sapiens
gggccgggggcgtctccccagcgctggaaaacgctgtgcagcgcccttcccagatttctgcgtccgcgcaacacaaacacacgcaacgctatctctacaaaagggtcaataataggtgttat

SEQ ID NO: 245989 - DNA, 122 bp, Homo sapiens
aaatcgagcgcagcgccggtgggctggcactgctgggggatccagtacaccctccgtagccgctggtccgggtgctaagtcactcattcccccgggccggcagagctggccggctgctccga

SEQ ID NO: 245990 - DNA, 122 bp, Homo sapiens
taccctcatttcacctgcgctgtggacactgagaacatccgccgtgtgttcaacgactgccgtgacatcattcagcgcatgcaccttcgtcagtacgagctgctctaagaagggaaccccca

SEQ ID NO: 245991 - DNA, 122 bp, Homo sapiens
ctcggcaagcggtaggcttgtcgggaagagctggagggcgcaagtgcggcgctggccggacgtgccgcaccgtcagcgcagggctcgccgggaaatgtggtttctccagccggcccggggcg

SEQ ID NO: 245992 - DNA, 122 bp, Homo sapiens
caatcaagtagccaatcccaactctgctatcttcgggggtgccaggcctagagaggaagtcgttcaaaaggagcaagaatgagcctgcggttgggagggaatggggcgtggggggttagagc

SEQ ID NO: 245993 - DNA, 122 bp, Homo sapiens
agaaaaattgggggcagggggcgcgggagcggggacacggcaggagaccgagggtcgccccgcgggggaatggaggaaaccaggcgagaaaggagcgggaagaccttggagccgcggtgttc

SEQ ID NO: 245994 - DNA, 122 bp, Homo sapiens
cacataagtactgtataactattaactactactattatttggataggttgaatgaaagtgcgttctcggagttacaaaacagggccacttccccaagaacagtcacacaaagagaatcatct

SEQ ID NO: 245995 - DNA, 122 bp, Homo sapiens
gagccttatggcccgggggtgcctgagaaacccctgctctccgtgtctggctgctgccctcggagagctcagtggaggcagcaatccccctggaagcacaatatgtgccttgcatctctgca

SEQ ID NO: 245996 - DNA, 122 bp, Homo sapiens
gaaacggaacctggagtgccccccgggctgcgagctgtgagcgtggcataaagggatacccggggcgcccgggtggggtggggaggaggagtgcaactgtgacgaggtgtgaagaaagggcc

SEQ ID NO: 245997 - DNA, 122 bp, Homo sapiens
gacgctgaccttgcgcaccttctccagcagcttgctcaccgtattgctcgtggtggcgtgcgccttgcccagcttgctcagctcgccctggatgctctgcactgcgccctccatctccgcct

SEQ ID NO: 245998 - DNA, 122 bp, Homo sapiens
tccgggaccttcgcatccgttcagtgtctgcgcgccctcgctggttctggtccagctccgcgtgccccccggccccattcggccctcgccgccctggcctgtgccctcttggtgcccgcgtg

SEQ ID NO: 245999 - DNA, 122 bp, Homo sapiens
agcccaaggagagcctgttcccagagtggcggctctggagagcagctgccctgcacttaccgggagagtctctgccctcagccagtagggagctcagcatcgccagcatcaaggtgacagtt

SEQ ID NO: 246000 - DNA, 122 bp, Homo sapiens
ggacggcggccccactccaacacacaaagggtgctgtgtagagcgctggcttgtccaccccggccagtggacacactcatcacagcccaacccggagccggggcagctgccaggtctcctca

SEQ ID NO: 246001 - DNA, 122 bp, Homo sapiens
caccctcggccccggggcatgcctcacccttgttctcctcgttctcggccaggcccttcacgctggacatgaggatgtcatcgtagcccaggaactcatccagcagcaggcggctgaagcgg

SEQ ID NO: 246002 - DNA, 122 bp, Homo sapiens
gcaggggtacaagtcgaactggctctgccttcaacttcaaatggattcttctttctggagcggggctggagctgtggggcgggggaggggggatttttccagggatggacttgttttcagca

SEQ ID NO: 246003 - DNA, 122 bp, Homo sapiens
agggctggccccattcagaggaaggagaagagaaatccagccacaccggaggggcagctccggacccgctcaggctgccccaagcggcgctcccttcactcagcaggacttgagcaaggcca

SEQ ID NO: 246004 - DNA, 122 bp, Homo sapiens
agggggaaaacaccttctggttcccaactccaggcagtcactctttacaatttattttgtcgtacatcatttgatcaccatgaattagcaacagcaagaaaatgtaggagagggagaaaaga

SEQ ID NO: 246005 - DNA, 122 bp, Homo sapiens
agccgcatttctctcgcgggtagtgggtcgaatgtggggtctttgcgggaaaatcgctctcggaatttctctaaccttcagactcgaattagaaaagtaagggagctccagtagtaaacgtc

SEQ ID NO: 246006 - DNA, 122 bp, Homo sapiens
ggcgccaggctttcaggggacagtggggcggggcggggtgggcacaggacgttaggcagccgttggccctccctaaggccacaccgtcctgccgtcctggatcctgcgccagctgcgcgggg

SEQ ID NO: 246007 - DNA, 122 bp, Homo sapiens
taatgaataaaatatggcacaagtaaaagtgtgcgatttcagagactaggtcataaagaacgcagtggcttcttccctgctctctctttcttaggtcattctctctgggtgaatccagctga

SEQ ID NO: 246008 - DNA, 122 bp, Homo sapiens
tgtcttcatcagacctagaagagtgcccgacacttactagctgctcaatacatatgtgaacgttgaatgaacaaatgtcaaaatagggttagtccttcaatccacatttcactgtgacccag

SEQ ID NO: 246009 - DNA, 122 bp, Homo sapiens
cgccctgaactccttccacaggaaaggctatgaagcccaccatccctgtctgaggtagaccgggcagaaaacacgcaggttttgttgcgaagtggaatgtgctagtgtgctgtctgctcaac

SEQ ID NO: 246010 - DNA, 122 bp, Homo sapiens
caaagctctttccatgaggagacctgtttagtcggtgacatctgtctagtctccaggttccgcgacgcccaggaccatgtggagaaggtcaggtgttattcactcacctgctcagcagcccc

SEQ ID NO: 246011 - DNA, 122 bp, Homo sapiens
ggcatacgtgagtcagaatgtcagcaccattaaaggaccagagcgccaagtttcttaatacgggtatctcgacaaacacttcaaagtcactgcagaggaagtgtgaatggcttattcctgaa

SEQ ID NO: 246012 - DNA, 122 bp, Homo sapiens
gcctgcatctggattcctacagcggtgagagtgaaatgtggtcggattgccctgggccgccgggctactgtgagctagttcaggaagcaaggcactaaaaggcattcctaatgttctttccc

SEQ ID NO: 246013 - DNA, 122 bp, Homo sapiens
tattcattttactactatagagacttagagcttgatttcataggtcaggcatctacaaaccgtgatctgaaagtagagattgctggagacagacctttaagtggagtggcagcgaaactgca

SEQ ID NO: 246014 - DNA, 122 bp, Homo sapiens
cgtccagtgctcgggtagaaaatccacccaggccccacagaagaataacttctcaggcttcgctactatgaaaaacccatacaacccattccagagcaacatgaggaccttgctgtgtgcaa

SEQ ID NO: 246015 - DNA, 122 bp, Homo sapiens
gatccttagggaaactgaggccgaagaattgggaatctgcatttagtccactctcctgtccgtaagaagaaaggggcgcgactaaggggaagggaaggagccacagggattcattcccagcc

SEQ ID NO: 246016 - DNA, 122 bp, Homo sapiens
ctggggcaggcctctgtcttgaaggccagtaggccacagaagacctgaaagcatggcactcgtggttgcaggccacagtcaaggcagctttgtgagaatgagaacaggaggcgagcctatag

SEQ ID NO: 246017 - DNA, 122 bp, Homo sapiens
tgcttgccctctccgggccttggtttcctcatctgtaaaacagtgataacacccctgtcccgggagttgtgaggattcagagatggcagacgcaccgaaagcctcggtaggatgtctgccca

SEQ ID NO: 246018 - DNA, 122 bp, Homo sapiens
ctcctagccccacctctgggggttggggtggagcaagaggggtcagctggccccacggcccgcactgaggatctgatcttggctgccattcctggtgactcggacattccaggcagcccgtc

SEQ ID NO: 246019 - DNA, 122 bp, Homo sapiens
gcgcctgccgcgggttccacgcacattccaagcgcgcgcattcgacccaaacttcagagacgcttctgtggaacggaaggatggtcgctgacacctcgccgttcaaatatcaggaagttaaa

SEQ ID NO: 246020 - DNA, 122 bp, Homo sapiens
gcaatccaccggcctcagcctctgaaaatgctgggataacaggcttgaagtcactgctgccggaaaaaacaacatattttcaaaatcccttaatatttatcagggttatttttatcttaaaa

SEQ ID NO: 246021 - DNA, 122 bp, Homo sapiens
ccagttggtagttgctagtattccagacacttcctaacgccagacaaatgccccaagcctcggcatgtctggcctagagatctattcaactgatagcagccgcctcttctggggagagcaga

SEQ ID NO: 246022 - DNA, 122 bp, Homo sapiens
caccaacaccgcccagtgagccccaggcgctggatgtgagggctctgggcgaggccagcgcggaactacatttcccaggcggccgcggcgggtgcgcctgcgcaatgcgcgcggtgatggag

SEQ ID NO: 246023 - DNA, 122 bp, Homo sapiens
gactctccccacctggtgaatgctgacctggggccaggccacaggcagggagagaaaggtcgccggcatgaacaccaggtgaccccgtgaagtgtgtgcttctgagagcaggggtcccccaa

SEQ ID NO: 246024 - DNA, 122 bp, Homo sapiens
ataagcaggtcactgagggggaaacagaagccagggacttgtaggacagactaaagtgctcgaaaattctttatggaggaaagacttcatggagttgaatgaagcaagaaataggagagtgg

SEQ ID NO: 246025 - DNA, 122 bp, Homo sapiens
gaaggccacctgcgccccaagagacccgggagcggcttaagtttgtcctcacccgcccgccgccccctgcccatgcaggggtacctgctccccgcctccaagaagagggtcggcgcttccct

SEQ ID NO: 246026 - DNA, 122 bp, Homo sapiens
ctccaggcgggttttgagcgattgcaaagtttgcccgagttggctgagcgtctcggcggccggtgtccgggacaggtcgcccatggtgttcttgcccgagccgggctgcttgcggccgccgc

SEQ ID NO: 246027 - DNA, 122 bp, Homo sapiens
tccgattccggtttaggaacagaacgatgaaagaacggtcacgtgatgggggtcgagcgccgcagagagttcccggggattgggcggcttgtctttctccacctcgtcctcagccaagtggc

SEQ ID NO: 246028 - DNA, 122 bp, Homo sapiens
gaattcaagaccagccggggcaatatggcgagaccccatctctaaaacaaataaactagccgggcatggtggcacacgcctgttttgaaaccctgagaaagcttctgaaaccctgaaaaact

SEQ ID NO: 246029 - DNA, 122 bp, Homo sapiens
gctggacgaaggggagccccaggtcaccctgagcgctggggccgcagtgggaacttgcggcgatgtcacccctgccctgcatgtcagcccaggcctggcgaaggcctgagccccgccccagg

SEQ ID NO: 246030 - DNA, 122 bp, Homo sapiens
aacattaaagcaagtgtggggactctctggagcacagggctctatgcaactgtaccaggccgtagactcaccaagccagtcctggctgtagaaagaacgtgggaactctgggccatgtggat

SEQ ID NO: 246031 - DNA, 122 bp, Homo sapiens
cctagagccaggtgcagatgcagcttccagtgtggacaaagcttgggaagctggtttacacgcgccctggggtacagtggccaaagctctttcaggcaggaagttggcccttggtgatctgg

SEQ ID NO: 246032 - DNA, 122 bp, Homo sapiens
tttctctttcatggtctcagtcatttacgtgacgatggacacgtcccccacgcaagaagccggtgtccttacgaatgcaaagggtgtccctccccacgccagcctgagtgcaggggacactc

SEQ ID NO: 246033 - DNA, 122 bp, Homo sapiens
ctcatctgaaaatggagatatttacataaatgaggccgttcttgtaaggagcctggcacacggaaagccctcaacgtcaactgtcacggtcttattatccttatcgtagaactcctcttagg

SEQ ID NO: 246034 - DNA, 122 bp, Homo sapiens
aaaaaaactgaatttgcctatagactcaacggattcattctgcaagcattcactacgtggcgaaatcggtgctgggcatgggtgcaaagacgacctagccctagttggtgtcttcaagaggc

SEQ ID NO: 246035 - DNA, 122 bp, Homo sapiens
gggaacccgtcatcgtccctctgctctccggacctcttattcgaaaaacatcctccaccacgtgcccctttgtcgccagagacagcgcctgcagtgcgtgagctgccccctgaactcctggc

SEQ ID NO: 246036 - DNA, 122 bp, Homo sapiens
tgccgtgcacctgcctgagttgctgtgatcagtgtcagtctctgcactgtttggcacaagcgtgcgcgctgtgcgcattccctgaaccccctgcactgtttggctcgagcgcgcacgcgctg

SEQ ID NO: 246037 - DNA, 122 bp, Homo sapiens
ttggcacagaaacctcgacctctgggcatttggcaagctactcacttcccaatgctgccacgggctcacaacggtaaggcccgtctttgctgctgtccctctgtctacggtcatccacctgc

SEQ ID NO: 246038 - DNA, 122 bp, Homo sapiens
ttgcggacgcctgggagcggttgctgggcaacagtgcgtgcggcctggcctctttgcgcccggcgggcagcgcgcgtctggggcaggctccgcgcggggctcgggcacaggtccccgctgcc

SEQ ID NO: 246039 - DNA, 122 bp, Homo sapiens
ttcgtcgtttcccatgcccccgcccccatttctaagcattcatatttggcttctgcgtcgcgctggcaccaagtcagtcatccacagctgcctggattatcacacgaagtccagtcttcccc

SEQ ID NO: 246040 - DNA, 122 bp, Homo sapiens
cacctcctgatcatcagccaaaggaagtgaaaaccaacccagatcccagccatgaacaaacgctcaagggcagaaaaacacataatgtcaggactgagacaactgtaactaaaaaagaaaag

SEQ ID NO: 246041 - DNA, 122 bp, Homo sapiens
agacgccgagggcaccgccccctccgccggacacccgggcctggcgtcccgcctgcgccccgcaccctccgcgcctccgtcgcctgcctcctggggcccagagcccggccactcccgctgcc

SEQ ID NO: 246042 - DNA, 122 bp, Homo sapiens
gaaggaaaaatacatgtggatggtggggtgcagagagaccttgggcacagggactccctccgaccccagattatagaagactgatttggtttctgaagtaaaatcaaggcaggatccttcct

SEQ ID NO: 246043 - DNA, 122 bp, Homo sapiens
ctcagcaaacaggtaggccctgttcttggggaggattcccaccaggcaaaggccagctcccgggccctcacctgccacgtgtccaagctaggatcctgtttgcctttcccttgggggctggg

SEQ ID NO: 246044 - DNA, 122 bp, Homo sapiens
cagcgggcggggacatggggtgcgcatgcgtgcgggggggtacgcgtgcgtgcaagtgcgcgtgcgcgcgcaggaccgctgaggcgggagccccgaatgcggttctcgcttgctgcgtggcg

SEQ ID NO: 246045 - DNA, 122 bp, Homo sapiens
ttaatgccgccgcgtccgcaagcgcgcgctctcaccctgcgccgcgttgcgacgtcaccacgctgtccagcccacggccttgcggggaagactttagggccaatcgtgtccatgctccccgc

SEQ ID NO: 246046 - DNA, 122 bp, Homo sapiens
tatctgtttgcacagacactggttctctaattttagcatgtgttagaatcacctggagggcggttaaagcagatttctggaccccacacccagagtttctgattcagtggggcctgagactt

SEQ ID NO: 246047 - DNA, 122 bp, Homo sapiens
gagccgcacagccctcccctcctgcgctggaaaccctccctgacccccaccctggccccccgtatccccagcccttggcaacactggagtgcacacgccgccacggttgcccagaaaaagtg

SEQ ID NO: 246048 - DNA, 122 bp, Homo sapiens
tagcctgagaccgattcccgtgctccagcttcaggtgctcccatgccgaggaggagggagcggctgctgcctgcactgacctcagttgctatgacgcactcatccttctcctcggatatgac

SEQ ID NO: 246049 - DNA, 122 bp, Homo sapiens
ccctcctgccaagcgtgagagcccccactcccaggggccctgtagaaacccaccaatcagcgtccaaaactcgaaatcagccctatttagatggcagcttctctgtgggtttagaagcacat

SEQ ID NO: 246050 - DNA, 122 bp, Homo sapiens
gcttgtcacacaggttgatgggctgatcctcggcggccgtggtgaagtccatgggggccacggcgccgttgccattcatctcggggaaggcagggtcgccctgcgtgctgctcgacgtggat

SEQ ID NO: 246051 - DNA, 122 bp, Homo sapiens
ccgagcttcctgccggactggggcagggccctaacgctctgttgttacactctccatccccgtgccattcagagcctcccagcactgagtaggcactgcacggcgagagggagggggaggag

SEQ ID NO: 246052 - DNA, 122 bp, Homo sapiens
atactccattaaattcctacagtccacagtgcagggaagtccctaggcccaggatacaatcgctcctgattttgagggcatgtatccaaacacatggcctactgaaaacaaatgcattttaa

SEQ ID NO: 246053 - DNA, 122 bp, Homo sapiens
agattcctgaaacataacacctttatcctgacatttactgcatcatgttgtccctcaggacgtcaaagcacaacaacggggtcagcttccaatgtcagagtaaatagctgccataaatggag

SEQ ID NO: 246054 - DNA, 122 bp, Homo sapiens
tatttcagcctatcaacttccttgccgacatccaatcagatttaaacttcttttagccgccggaggagttggaaaaagggggtcgaaagagggagcttaccgtctctcgcgatatcgctgtg

SEQ ID NO: 246055 - DNA, 122 bp, Homo sapiens
ctgcgtcgcctcgggtggcaggtggcggtgcgggcgggcgctgcaagccggagaggggcgcgggagggcgagtttcggctgtggccctgggactccgagccggggcgtctcaggggcagagc

SEQ ID NO: 246056 - DNA, 122 bp, Homo sapiens
cgtgtgtgtgtgtgtgtgtgtgtgtgtgtgtgtgtgtgtgtgtgtgtacgcgcgcgcgcgcggaggagcaggcgaagcgcacaccatcgcatgcccacaactcccgcgccccctccaaccct

SEQ ID NO: 246057 - DNA, 122 bp, Homo sapiens
tgtgcgctctggaaagctggagtatgggcccccagggcactgtttgtaaagactggtggccggcacaaaagacgggcacaaaagatgggcaggctgggagggagcgaggtagaggaaggagt

SEQ ID NO: 246058 - DNA, 122 bp, Homo sapiens
ccccagaagttttacagtctgctcagagagactggtcttcccaccagggttcatagcctacggggtactttgttaaaaacgagcagttactacgaagactacaatgggagaaatttttctgt

SEQ ID NO: 246059 - DNA, 122 bp, Homo sapiens
tcaagctggtctcgaactcctgacctcaggtgatctgcccaccttggcctcccaaggtgccgggattatacgcatgagccacctcacctggcctgagttcctctactttaagctgtgtgacc

SEQ ID NO: 246060 - DNA, 122 bp, Homo sapiens
aggacttttgtccctggtgaaaaagttaaatgactaacttttgaatgcctgctatggaaccggtagtctaaaaggatccaggtgttaacggtttggtatgggagatattgccagccaaaatt

SEQ ID NO: 246061 - DNA, 122 bp, Homo sapiens
cacaaagaggagaaggccgacctggaccccagtaagttgggagcaattttcctttacaaccggcgcgggaggggaggggaggacgggcgggggcagccgaattacagccctcccgaaccgtg

SEQ ID NO: 246062 - DNA, 122 bp, Homo sapiens
actgtggctgtgatgacggacacggaggagacgaacaggagcagaacagtttcactgccacgtccatttccgtgacagcacctgtgattgatgttgcgtggacgtgccacacttgcacttgg

SEQ ID NO: 246063 - DNA, 122 bp, Homo sapiens
acttggcaatgattttctcagctatcggctgaatcagctgcttggccgcctcggactctccgtcatcctcagaatctgtgattgggtcgggggtagaaaaagacggggagaaaaagcactgg

SEQ ID NO: 246064 - DNA, 122 bp, Homo sapiens
gcgcccgaggctgggcgaagttcctcctagcgcagcgaggaccggagggcaaggccagcgcgcgccgggcgacctgcgtcccgggcacagacgcgacgggcccgcacggggcggggaccgcg

SEQ ID NO: 246065 - DNA, 122 bp, Homo sapiens
tctgggccggggcaggcggttcggccaccggggtgcggggctgcggagaatcctagcggccgctacggaccgaagtttccaaagatgcggttccccgagtgtacaccgctcccggttgtaac

SEQ ID NO: 246066 - DNA, 122 bp, Homo sapiens
agccagccagggttcgtccgccagttcagcgcctcattccgtcaagaggaaagcgccggacgcagacgaccaagatgtcaagagagcgaaggccaccttggtgcctcaggtacagccctcca

SEQ ID NO: 246067 - DNA, 122 bp, Homo sapiens
ctcccctcaccgctccccttccggctcttcccctctgtgcagtgggaccgaggctcaggccggtgagacaatttcctgggttctagaactaccttggaacccaagccaagacctgtatgttc

SEQ ID NO: 246068 - DNA, 122 bp, Homo sapiens
gtcctgccaagttcccaccctgctcaaagtttcccctcctggtccccaggaatggtaggccggaccatgcccagcgagactccagcactcggcaacgtggccgagagacccacgggctccca

SEQ ID NO: 246069 - DNA, 122 bp, Homo sapiens
gctctggcaaagtgggggcgggtctgcgggggtggccgaaccccagcggttgccagagggcgtggtggctgcccagactccagttcggtgctcccaggctccctctggctttctttcccaaa

SEQ ID NO: 246070 - DNA, 122 bp, Homo sapiens
gtggcgcgtgcctgtaatcccagctacttgggaggctgaggcaggagaatcgcttgaacccgggagatgaaggttgcggtgacctgagatcgtgccacagcactctagcctgggcaacaaga

SEQ ID NO: 246071 - DNA, 122 bp, Homo sapiens
ctagcaggtggtttcacttgtgtttagaagtagtgatgcctgagtggcagatatttagaacgtggcttggaggttaagactgatgtaggttagacaccatttcagcaacttcctagccatgt

SEQ ID NO: 246072 - DNA, 122 bp, Homo sapiens
tcgcagtgccctgctcccattggccttttcgtacattgcccgccctgtcattggctaatccggagcgctcggcccgccccccaggcctggcaactctccggtcccttccgcgcgggcggggc

SEQ ID NO: 246073 - DNA, 122 bp, Homo sapiens
acctgctctggggtggggtgtgtggagccagccgtccaggtgtggcgcgagggctcagaccgtgtcccctgccgcagtgcacgtgccggaaggacatggtcaagatctccatggacgtgttc

SEQ ID NO: 246074 - DNA, 122 bp, Homo sapiens
aggttggactctagatgagggtcagggttcttggcttgccagggcatgctgaaaggtatccggggagcggcggcggcggcggttctgactcgtgcggttctcttcgtcctccttccttccgt

SEQ ID NO: 246075 - DNA, 122 bp, Homo sapiens
gcatgagcaacggtgccggctctaaatggttttaagggcacggtacctacctcaagctaacgtgcaggcaggcacgaggtagctggaattctagcctaggattctctcttcagcaattcttg

SEQ ID NO: 246076 - DNA, 122 bp, Homo sapiens
tgcgagaaggcgccagaagggacctgttgagatggcgcagggttgggggacccaagcgcgcggggaggggtgaactaagaatggagtcacgcggaggtgctgcgagggactggggcaaaggc

SEQ ID NO: 246077 - DNA, 122 bp, Homo sapiens
gcagtaacaccagcgtctgggaagacaactgttacttggctgaccttggtctagtggtagcgtcagtgcctagggaaggcacccgttacttagcagaccgggaaagggagtctccttttcca

SEQ ID NO: 246078 - DNA, 122 bp, Homo sapiens
gtgaccatgacaacgaatctaattgcacgttcatttcgaaacatttcataagaccacctacggatagaccgcatgcatttcactgctgcaatgccattgttagcaataagaacctgggaggg

SEQ ID NO: 246079 - DNA, 122 bp, Homo sapiens
aggaagtcctgcttgccaatttcagcacagggagtagtgcaggccttattccaacacacccggcccagccttaaccccagaactcagccagtttcttgcttccgtgcccctggttctcctcc

SEQ ID NO: 246080 - DNA, 122 bp, Homo sapiens
tagaaaaataaggtgggcgaagtggtctccacctatagtcccagctattcaggaggctgacgcaggaggataacttgagccctggcaactgaggctgctgtaagctatgatcctaccactgt

SEQ ID NO: 246081 - DNA, 122 bp, Homo sapiens
tttggggcctccaaacttctatgcaaaaatctcagaaagcttcctgttagcttttcagcacgcccccattgtaaaatgtctcgagttgtttatacaagcagagagagagagtcgaggtcagg

SEQ ID NO: 246082 - DNA, 122 bp, Homo sapiens
agccgcggcctcccattggccgccagggctggcaggcttcccggctggggctgtgattgccgcgctccagtgtcagtcccggagagaacgccggtggcggggctggtagcccggcagccgca

SEQ ID NO: 246083 - DNA, 122 bp, Homo sapiens
cttaaatctgacacagattttggcagaaaatgcagagaagtcttggctgtaatcctgttgcgtccctaccaatagcagggcagttttaagaactgactcaaatgttcagggctgccgttatt

SEQ ID NO: 246084 - DNA, 122 bp, Homo sapiens
accacctgggcttggaatccagagccccggaacaccttgcagtacttgcccgaagcaacgcgccaacagcgggagggagacgcagacgcgaagaccggcgagaggatgtgcggtgggagtag

SEQ ID NO: 246085 - DNA, 122 bp, Homo sapiens
gccctgcccttaggcatcagggattttccaagtttgattctcctgtcatcagaagcatcccgggaaggatgctcgttacactgcagattccagccaggcgcggaggctcacgcctgtaatcc

SEQ ID NO: 246086 - DNA, 122 bp, Homo sapiens
acgggaagtgaggcaggtttgagaaacacttggggaactggaactacaaggttcagagcccgatcaggtgtgggaggttattgcattgtgaagaaatagattgatgctatgacggaagaaca

SEQ ID NO: 246087 - DNA, 122 bp, Homo sapiens
aaaacatgtaatactgtatctgtatgtatgctcctcttccccacgctcattcacatttaccgtgattaatacacatgttaataaaaccctagacttagaactaggatatagaatccagtcgt

SEQ ID NO: 246088 - DNA, 122 bp, Homo sapiens
gattcctgtggaatttggaaggcccggctccattgtcttccggctccagcgttgttgaggcgaagtctgacgtccatgcagactctgattcccgtgtggggacagccctggggtcctgccgt

SEQ ID NO: 246089 - DNA, 122 bp, Homo sapiens
cctgatacatctagcttttcaattagaaacaaattactcaacacatttggccttctcttgcgccctcttctggattaaaaaaaactgttcctctttaggtttgtgagcaatggattaccaaa

SEQ ID NO: 246090 - DNA, 122 bp, Homo sapiens
tccgcaacgcctgcgctcaccaggagtaggagtcattacgtgagcccttcgcggccccagcgtcgccaggagagcttccagcctctctagaatcactactgcgcacttcctggacagcagtc

SEQ ID NO: 246091 - DNA, 122 bp, Homo sapiens
tttttattccctaatgtcttgggcagactttaccaatgaggtgcttcttccaacaaggaacggtttccaacatcttaggcttgaagacaggatgcaccaggaggctttgccctgagcccttc

SEQ ID NO: 246092 - DNA, 122 bp, Homo sapiens
cgcccccccacccgagcccgggctgctgggcggccgccgccgctgcgcccgccgcactcgcgcctgcctgacatcagcactcgcgcccgcagcccggctctggccaatgaataatgcatggc

SEQ ID NO: 246093 - DNA, 122 bp, Homo sapiens
tgggcaggtgggcacccccaccccgctgcgccggccacgccccttgccgctccctcgccccggggcccactttaaactcccgcccctcgtaataacgaccaatggccgaccgcgaagcgcgc

SEQ ID NO: 246094 - DNA, 122 bp, Homo sapiens
caaacatcatctcctccaagaagcctttcctccatgtaaatcatcacttccctttctgtgcgaacactgtctcaagaacataattccttatcatggcacagataccacattgcaatttgttt

SEQ ID NO: 246095 - DNA, 122 bp, Homo sapiens
tgtcccgagtcggtagtgcaccgacaatttagcagacaaaaaagacaggacgccagagcgcgcaggctgcattagcagagagcgggggtcgggcccgggcccgggagggaactagctgcccg

SEQ ID NO: 246096 - DNA, 122 bp, Homo sapiens
agtggctccggccggctgctccaagtgtagggcccacggagcctgcgcccacccggaactcgcactggcccatgagcgccacacgcagccccgattcccgccagcgcctctccctccacacc

SEQ ID NO: 246097 - DNA, 122 bp, Homo sapiens
ccaggccctggagagggattggaagggctgtgagaggcccccagaaggtgtcctcctccccgtgttgtcctttctgcctggaactgctcccacccaggaaatgtgagcgagaggacagggga

SEQ ID NO: 246098 - DNA, 122 bp, Homo sapiens
tggaccctttctttaactgagctcatgccccacggagacttagcaggttccaggagtgagcgagggcagcggaaaggagttcttccgggggacacgaattgcctggctgagtagcaagaaag

SEQ ID NO: 246099 - DNA, 122 bp, Homo sapiens
ccgtgtcctgtcctgggcagcagggccgcgagcaagcgccctcgggggtgctaggactagcgtggggagggcggggaaggcccagaggacgcggcacatacctgggccggggccgtcagctc

SEQ ID NO: 246100 - DNA, 122 bp, Homo sapiens
catttctgggcctccatagtgattgtagtaattcggtaaagatgattcatttctttagtccggtcttcggacttgacttcttagaagcaggtcttgtgcaatagttgcatattaaccacttg

SEQ ID NO: 246101 - DNA, 122 bp, Homo sapiens
cctggtggcaggagcaacaggctaagacaacagtccatgtttgctagtaggaaaagtgcccgagcctgggtaggcttgtattgttctcttgcgggaggttatgaatttgtcttactgcatct

SEQ ID NO: 246102 - DNA, 122 bp, Homo sapiens
tactcccacctcttgcctccctgagagctggcattacaggcatgagccaccgtgcccggccggctacctcattctagtactgccccaacactgcctgccatttttgggtgctgagctaatca

SEQ ID NO: 246103 - DNA, 122 bp, Homo sapiens
ggaagagctgctttcctgactctcgttccctgcctcaggcttcccttatcccaatcgcttcgaacccttggctcagcgtagaggagtcaagcctggattctagtcccaccttgcccattagc

SEQ ID NO: 246104 - DNA, 122 bp, Homo sapiens
ggggataaatccacagatgggcagcttggtgtgcagtgttggaacatgagctgagtggggcgggggcatttatatgcaggcattgtctggggtggaggtttgcactgtaaggcaattaggaa

SEQ ID NO: 246105 - DNA, 122 bp, Homo sapiens
tgctgtccggacccggggatgggggtgatttggttttgttgttctagtatcaagggggtccgggagagcccttggcataattgaaaagcaccttgatgaggcggggaaacgcgggaaagaag

SEQ ID NO: 246106 - DNA, 122 bp, Homo sapiens
aattaattgtataagaatttatgtatctgcttctagatacagtgtgtaaataaaaaatttcgttcacaagacctgccttgtagtctacttaataccctgagaggtgcctgattttaattagt

SEQ ID NO: 246107 - DNA, 122 bp, Homo sapiens
ggactggagatgtcaaatgggttggtttaaaaatatccctaaactgctttagaaactaaacgttggagttgaataaaagtgaatctggatttcctgaatagcaccgtggcttgagtgtgctg

SEQ ID NO: 246108 - DNA, 122 bp, Homo sapiens
ttttctttaacgatatcaactctgtggtgccaaaaggagacgcggcctcccgccagcactcgggggtgcagggccctgtggttggacttcacctctcagcactgaaaacccaaaacccagct

SEQ ID NO: 246109 - DNA, 122 bp, Homo sapiens
cttcaccagagctctgtgagcttttaagataatgaagcatcccggtgaggttagggaacacgtgagaggtggcagcaggactaatattcaacactcaaatctgtttcatttcctgccctgct

SEQ ID NO: 246110 - DNA, 122 bp, Homo sapiens
tttttagccatagctatggttaccacgtttctctccgcctcccgccacctaccaagaaaacgactgaccattggctgcctttcaccaaggcggtaagtcattggtctctggtgggaccgggc

SEQ ID NO: 246111 - DNA, 122 bp, Homo sapiens
agcccctctccacaccccactgggcctgcggtgctaccttctcaatggagctgatggtgacgccggccgcgcaggacaccacaatgtgtctgtcctcaatgtcggcgcctatttcatccagg

SEQ ID NO: 246112 - DNA, 122 bp, Homo sapiens
ttccctaaacaggcccctaccattgtctttcccgtcttagttaatgtgaactcattctcccggtttttcaggcccagaccttggagccatgcttgattccactttcccacatccttaactac

SEQ ID NO: 246113 - DNA, 122 bp, Homo sapiens
gcgccccgtcggcccatttttctttttacaaaacgggcccagtctctagtatccacctctcgccatcaaccaggcattccgggagatcagctcgcccgaaagcccctgcgccaccccgcggg

SEQ ID NO: 246114 - DNA, 122 bp, Homo sapiens
cttctgaaaggccggctccagcaggtgaggctggccacgcgcagtggacggggcctagggcgagggtgtgggagcctcgtgtgttggggcatgaggtaggcccagccgttaataaacccatc

SEQ ID NO: 246115 - DNA, 122 bp, Homo sapiens
ctgacttgggaccctcctcctccaggcccacacctcagcacccaggacatctgggccccccgcccccagcgctgtctagtttggttgcctggccgtcactcccagcctggttcccactcctg

SEQ ID NO: 246116 - DNA, 122 bp, Homo sapiens
gctgtccgtgggcaccgagttctgggtggagctcaacacctacaaggccaacggcagcgccgtgtgcgaagcggcccacctggggctgtggaaggcgtgcaccaagcggctgtggcaggcgg

SEQ ID NO: 246117 - DNA, 122 bp, Homo sapiens
ctccccaatattcaagtgaagtgaccagccaggggccacaggaaaggcatcagaactcctcggggacacgagaagttcaggcagggtcagggcgcttcctggagacggcgccaagctggagc

SEQ ID NO: 246118 - DNA, 122 bp, Homo sapiens
tctaggttgaggcgcttccgtagctccttgcggtcatacttgacggtgaccttcccttggcgcctcactgggccctcatcgtccgccccgcccgggccctctcctgcggccccgggggggct

SEQ ID NO: 246119 - DNA, 122 bp, Homo sapiens
gaatatagaaatagcgggcgggaaggacgacgtctgcttttagcccgggtccccatatttcgctcttctccgggctcagctgcctttctccgccggtctcggcgagtgctggaactgtcgcc

SEQ ID NO: 246120 - DNA, 122 bp, Homo sapiens
agagcagcaacacttggaggaagcgccacacaaaacagacctagacagttcacagtcgtgcgtctggtcttctctgcagtcaaccaaacgcactgcacagaccttggcctgacacagaagtc

SEQ ID NO: 246121 - DNA, 122 bp, Homo sapiens
accacttcagaggcggttcaaggagccgagccccagggtgggaggcctgggaccagcccccgggggacagcgacggccccaggcctggaggaccggatggagcggctggcgtgccctgcagg

SEQ ID NO: 246122 - DNA, 122 bp, Homo sapiens
accgccgaggagggaggaggcaggaggccgcgcaccgcctaggactctgcgagcgcggcccgggctgggcctgcggagcagctacaaagcccaacccaggccgctagcccgggcacactcac

SEQ ID NO: 246123 - DNA, 122 bp, Homo sapiens
atatcgattagggttcttcccattccaacatcatcatccaccaacttcccgaatatggtgcgttttctcctagccctgggaggttccaactcgaactcccctcgctgcatattcagggtggg

SEQ ID NO: 246124 - DNA, 122 bp, Homo sapiens
ctggcttcccaggggccttcctgagtcacggacccatggggtcctggctgactttgcctgcggcgtcaaagggcttgaatctccgtgtagccaccgaggcctccactcctggagaccccacc

SEQ ID NO: 246125 - DNA, 122 bp, Homo sapiens
cccctggaatgctcatcctgctgctttctgtttcctgcctggcaaatttcattcttccttcgaggctctgcacaggtaaactcaagggttaccctgtgctttgaaaccttcttgactctaat

SEQ ID NO: 246126 - DNA, 122 bp, Homo sapiens
tcacctcccccacccgggccgcggctgctaggagagttcagaacaaaaggcggcggggggcggggccgaggcgggccgggggtggggcggaagctataaggggcggcggcccggagcggccc

SEQ ID NO: 246127 - DNA, 122 bp, Homo sapiens
gcaagacaaggctgttttcccactccactcctgtccaacatggtgctggatgttctagaccgggcagttaagcaagaaaactaaaggaatccatattggaaaggaagaagtaaactgcctct

SEQ ID NO: 246128 - DNA, 122 bp, Homo sapiens
ggctcctgtcccagctcccagatacaactgcctagcaaagcacctgtcttctccagcagtcggcagcctccatcacacattctcatgctgcccctgtcagacattgcttaaacacataatta

SEQ ID NO: 246129 - DNA, 122 bp, Homo sapiens
agcagagaatggggaggaggccgaggccgcctggcccttgtttactaaccctccctcaaacgtttcctgggtggctccccagggacggcagggctgggggcttctctccagggagctgctgc

SEQ ID NO: 246130 - DNA, 122 bp, Homo sapiens
ggctggcccaccctctgtctgagcctttgggtagcctggcatgatgggtagggcatggggcgcaggaggttctgccactactcgagggtccccaggagggagggagaccgttcgatattgct

SEQ ID NO: 246131 - DNA, 122 bp, Homo sapiens
acctcgggtgatccactcgcctcagcctcccaaagtgctgggattacaggcgtgagccaccgggctttcccacactttgatgagcatcagaatggcctgaggagcttggtaagaactcagac

SEQ ID NO: 246132 - DNA, 122 bp, Homo sapiens
atcaatgaaaaaacgcccactctttgagcctcctgaaaaggaggccacaggacccccgggcgccagggcttgggaacccagcgcccctccttgtctgtgccatgacagacaggttcagtgtg

SEQ ID NO: 246133 - DNA, 122 bp, Homo sapiens
acccgatgccgacatccctctcttgttggctcccctcgttagcgggattcaataactaaacgtccatttctagcattgactgaagagctcaagcttgacactcgacctcaatccttagcagc

SEQ ID NO: 246134 - DNA, 122 bp, Homo sapiens
gtgaccatatgacttccagcctgttggccagttgtggaactggccatctgggattttttgcgtgccactcctcccttgctgtcccacctttctaggattttctctctccctttgccctggca

SEQ ID NO: 246135 - DNA, 122 bp, Homo sapiens
acggggcgtgcggctgaccatcccgtgcccgcaggctgaggatgcagcgctggaaggcggcggccttggcctcagtgctctgcagctccgtgctgtccatctggatgtgtcgagagggcctg

SEQ ID NO: 246136 - DNA, 122 bp, Homo sapiens
aggcgtgagccaccgtgccaggctgagggtagcgggtgggagactgccaggagtgtagtgcgcttgcgcagtttaccaccctgcatcccccccaccccgctcccctcccaatttttttcggg

SEQ ID NO: 246137 - DNA, 122 bp, Homo sapiens
gggcaaccaagtaagaccctgtaactataaaaaatttaaaaattgctctttctcagtgaccgggttctaggcttaggcgcagacgggttaggggagccaacatgccagtggcccggagctgg

SEQ ID NO: 246138 - DNA, 122 bp, Homo sapiens
cttcttgcctcactttgctagccttattcgcccactcttgccttgctcttccaggagggccgggggagggggtcctccggtctgggttcatgagtgtgggtgtgggtataaatctaggggtt

SEQ ID NO: 246139 - DNA, 122 bp, Homo sapiens
aaaagaattcccaaactgccacagcatgaattgaaaacataccatctgcagctgcttagccgcagctactgcccccaaatcaaatgaaaggctcaagaaatgctcagctgtgttcttattgc

SEQ ID NO: 246140 - DNA, 122 bp, Homo sapiens
cggcaggcgggcgccgaggactgagcggaaggtgctgggcagtgcggggtgcagaagccacgctagccggtaccgcattagccagcgcagtcgccgggatcaccgcaaacgcttcctgcttg

SEQ ID NO: 246141 - DNA, 122 bp, Homo sapiens
cttacaaatgacatttacagaagtgcttatgtggggctggggcaaggtacatctgattttcgttaggattgctaaagagcattttctaaatatttgagtgtaaaccactgcagttattaccc

SEQ ID NO: 246142 - DNA, 122 bp, Homo sapiens
tgctgaaagtttttatttttttttaagcggatagtaaaattaagcagttattagtattcacgaaaaatgctcgtggcaggcttcgcacacgtaatgagaagccacctgcagttcaaagcagt

SEQ ID NO: 246143 - DNA, 122 bp, Homo sapiens
ccgccggcgtggcgagcttcccagaggtgcccgagggcgtctgccctctgggtgtgcctccgggagggctagagagctctaggttggcaagatcccagtgaccattgggaggcgcgcgatcc

SEQ ID NO: 246144 - DNA, 122 bp, Homo sapiens
agggcagaggattgcagtaattatcactctctgctaatgaggaccaggccgtggttcactcgagccccgccccagtagcaatctaattccaaccgcggccctctcagaagtcggtccccgcc

SEQ ID NO: 246145 - DNA, 122 bp, Homo sapiens
tcaagactcaacccgcgctccgggaagagcctggcacacgaggaagccactgctgccccgcgcccactccagcgtgcggcccagcgggaccgggagcccagcccaacctggggcactgtcag

SEQ ID NO: 246146 - DNA, 122 bp, Homo sapiens
tttggcgccaaatccgtgcggggggctgggcggagcctgcaaaacccgcctctcaggttccgcccagcacgccggtcccgccttcggtcccacaatttccgccctactgaattcttcagagg

SEQ ID NO: 246147 - DNA, 122 bp, Homo sapiens
gaccagcatggccaacatggtgaaacccgcattctactaaaaataccaaagattagcgggcgtggtggtgtgcacctataatcccagctactctggaggctgaggcaggagaattgctcaaa

SEQ ID NO: 246148 - DNA, 122 bp, Homo sapiens
aacagccttgttatataggtgctattgtttatttccactttactgatgggtaaactgaggcgcagacaggttcggttacctgcaatagaatgcagccaacccgaatttgagccccgcgggcc

SEQ ID NO: 246149 - DNA, 122 bp, Homo sapiens
ccttgtccaacagcccagaggccgctgtccagcgggccaggaggcggatcactgcgtcggcgttgaaatttccactcgcgctccaccgcccttcccgcgggccccgagcgcgcgcctgggcg

SEQ ID NO: 246150 - DNA, 122 bp, Homo sapiens
gcaattaaggcagaaccattgaatagggcccaagcctatgcgctcgctttgtaacttctccggggaccctaacgcgcagctagagctgcggcgcccgctgaaggcgcatcacggacacctgg

SEQ ID NO: 246151 - DNA, 122 bp, Homo sapiens
aaaatccataattttgatgtatctttctttttctttttttgcttaacgcttttggtgtcacgtctaagaaaccattgcttaatccaaggtcacacagatttactcctctgttctttttagag

SEQ ID NO: 246152 - DNA, 122 bp, Homo sapiens
ggaccagcagtagacctggagaagcatctccagcaaaaccagattaaagccatggaaatacgaccacaactctgatgacagtagtaaaactatcctctagaaagtgtggaagtttacatcaa

SEQ ID NO: 246153 - DNA, 122 bp, Homo sapiens
aacaagatctgcctcgactttgtctccatccaaggacgctatggcaacgcagttttcaaacgtgctttgagaataaatggaacagggtcccctgtgtccccactcatttgcgttttcctttt

SEQ ID NO: 246154 - DNA, 122 bp, Homo sapiens
ctccaaccactcctcgaacatccacagctgttccaagatttgcgcccagcggagacgagacgcggcagtagacctgggcgccacctagtggattctattgacctgggggagtcgtcaacgcg

SEQ ID NO: 246155 - DNA, 122 bp, Homo sapiens
ccaacagagggctcaggagggcaaggcccaaccgggagccacgtggaacccagaggaagccgccccacccagcttggccacagccatcttccctcctgccggacagggtgggccggccaccg

SEQ ID NO: 246156 - DNA, 122 bp, Homo sapiens
aggagacacgaggtctgaaactggaatagcaagattgcatccccaacagcagattccggtcgggcaggaaacctgaaacagagcgctcaagttccaattttaaacaggacattgccgggaat

SEQ ID NO: 246157 - DNA, 122 bp, Homo sapiens
tggtggcctcataataatcaccaaggtttattaagccgctgtgcgcaaggcactgtgctgcgcacattgcatgtattatctcattggattttatatagtgctagcgtctgaatgtttgtgcc

SEQ ID NO: 246158 - DNA, 122 bp, Homo sapiens
ccatggtgggccttcaggaggatgacagcctctgtggcaacggtaggggcagctgaaacacgtgcctctttgtcatagagaaaaacacatctctatctgcccaaaccaccactggtggccat

SEQ ID NO: 246159 - DNA, 122 bp, Homo sapiens
tatctgtaagctctaagaactctgtttttcaggttttttggaggcttcagtatgcaagcacgattgattaaatcattagtcgctggagattaacttaaccttccgccttctccctcacctgc

SEQ ID NO: 246160 - DNA, 122 bp, Homo sapiens
tgcaattaaaaaaaaaaaaaaaaaagccaaagtcaggagccaaccagagctagcaggaatcgtgacacagatgttgccaggcagaagcattcacaaaagcctccaaaacaggctccagtctg

SEQ ID NO: 246161 - DNA, 122 bp, Homo sapiens
gcacccaaatgccccaggtctcccaggccacatgcccagtgaaggaagctagtttcggtgcgcacaggccgagggatgccgccacgtgacatcttggagaagacagtgctaccgtgttgggg

SEQ ID NO: 246162 - DNA, 122 bp, Homo sapiens
gcgtaacggcgggctgcatctgccccaccgaagtgggcctccaggtagcgctctagggtgcgccgctgctccaccaggtctggaaagtcgatgaagaagcgggagcacatgtagcgctgcag

SEQ ID NO: 246163 - DNA, 122 bp, Homo sapiens
gcatctcgcccctgtcgggggagggcagtgcagcacctctctacaaagcacgagccctgccgtgcccaggcaggaggtgtctggacaggaccaggagttggctgctgtcagcctttgcccca

SEQ ID NO: 246164 - DNA, 122 bp, Homo sapiens
caggtaatcaagacagatggagcaggtcacctcctcttccaggctccgtagtggggctgacgtggccatggtatccttagttcagagaggtctccgttcactggtgaggacttcttctcctt

SEQ ID NO: 246165 - DNA, 122 bp, Homo sapiens
ctcattagtaatgctccagctccccacagtgggcacgttgcttacatgcactttgataagcgtcagggactgacaccgaagtgttgagtgaatcccctgagtagccctaccctctacttctg

SEQ ID NO: 246166 - DNA, 122 bp, Homo sapiens
gatgggcacttggtgtacaaccgaggtagagtacacagtgggtgcatggctgaggtaggtcgcatagtgggtgctcggctgatgtcgagtgcataatgggtgctcggctgaggtagggcgta

SEQ ID NO: 246167 - DNA, 122 bp, Homo sapiens
ctgcaggatccccgggcgcggtcccccgcgcgagtcccggcgaatccctgcagccgcgcgcgaagctcagaagtccaggctcgcagaagaccaggttccacgcacacgccgcgcatcctgcg

SEQ ID NO: 246168 - DNA, 122 bp, Homo sapiens
tgcccgagttactaatgacggcgtgaggtcacacctggccactcaaaaccagctccttgacgcaggtgaccctccgcctcgcgcagctcacgcttcccatcccccggactccacccccagcg

SEQ ID NO: 246169 - DNA, 122 bp, Homo sapiens
aaacgagcgtgcaagcagagatgctgctccacaccgctcaggccgcgagcagcagcaaggcgcaccgccactgtcgccgctgcagccagggctgctccgaaggccggcgtggcggcaaccgg

SEQ ID NO: 246170 - DNA, 122 bp, Homo sapiens
gagaatgcttgcaggcatactctccacagctcataggctttgcatgcatttgcactgaggcgcgtgcccaggtcggggttggaagaaggagaggaggaaccaagcataagcatttcctttca

SEQ ID NO: 246171 - DNA, 122 bp, Homo sapiens
acgagtagaagggagcagcaccgacgcatgctggaggctggagcctgagcccctggggctcgccttgctgtgtttggtggtgacgtgggacactgcagctcggccagagtggtagaaatgtc

SEQ ID NO: 246172 - DNA, 122 bp, Homo sapiens
tctgaaaggtggggacaggtatgagatgttctgtgggtgaaatggacagaattcggtgagcgattggggctgaagtgagtgaggaatagaaaaatgaatcaaggttgggcatggtggctcat

SEQ ID NO: 246173 - DNA, 122 bp, Homo sapiens
tgatccatgccactaacattactaatgcaatgatatgccatggcaagcatattgtaaagacgtgtttcaggacaaatcaaagagcaggaaaacatttttcagtcttatttgcgctttttttt

SEQ ID NO: 246174 - DNA, 122 bp, Homo sapiens
cgaggatgtgaagagaaatgcgccgcgatgaggcggacggaaaggtgtggggccgccgcgcgcccaggtcaccaggggactcgggcccctcccaggccagccccgacgcccagggcttctcc

SEQ ID NO: 246175 - DNA, 122 bp, Homo sapiens
gcttcccaggctgagcccgggacccggagcaggcgggcacccagacagggcatcctcttccgctcactggccctgaaagggcctctgccatcagcctgtgccgctgtccgggagcccctggg

SEQ ID NO: 246176 - DNA, 122 bp, Homo sapiens
gcgtgggtgggaaccagggctgagcactgggcttgcaggccagtgcaagttccaggtgggcgtgggctcggcaggccccgcactcggagcggctggccggttccgcaggccccaggcagtga

SEQ ID NO: 246177 - DNA, 122 bp, Homo sapiens
gaactgctgtcctgtgccatattatgtcaccctggcttgctgccgtatgtcttgtgataccgtgatacaagtgtaagtttgaagaatttgttttagtaccttctcacatccctattgctaca

SEQ ID NO: 246178 - DNA, 122 bp, Homo sapiens
ggaagagggagagctgggtttcaaggtttccaagaatgcaagcctttattgtgtgtgcaccggctgcaatgcattctgggatctactgtccagactgtcccaccataaccaaaatgtgcaaa

SEQ ID NO: 246179 - DNA, 122 bp, Homo sapiens
taaactatgaacacacacaaaacatcatgtaatctcaaaaactttatgccgtaagaaggacgttacaaaaaaaaaaaaaaaaaagtgcaggctgggtgcggtggctcatgcctgtaatccca

SEQ ID NO: 246180 - DNA, 122 bp, Homo sapiens
tttggaaagcctgagtgacagctgtcacaatgcggctttgtgggcaccttccggaggagtcgctgctgcagggcaggaagaattatggctctggttgcgtcagccaccggaggggagaggtg

SEQ ID NO: 246181 - DNA, 122 bp, Homo sapiens
aaaaccgtgttctgaaaaataattgatctacttcagcagctcacaggcctgcattccagccgcccaaaggagccattttcgggcgaagccaggggcccacgtgggagggagctccaggagag

SEQ ID NO: 246182 - DNA, 122 bp, Homo sapiens
ccctgcgccctggggccccggggaccttctccaagccggcctgacctggtggaggctgtgcgctgcgctcggggaaggccgggctggtgccgggggcagcgggtcccagctctgaagtgcca

SEQ ID NO: 246183 - DNA, 122 bp, Homo sapiens
aacatatattcacagcatccatttcagtccgaggtctcagcaggaaagaccccacacctacgcaatggtggacatgctggtctctgcagagtctgaggaccaatgctctgacctgccgcatt

SEQ ID NO: 246184 - DNA, 122 bp, Homo sapiens
gctcaactcgccgagatgacctgggcacctctgcgttgaatcggcaaatactgatcaagccgcatttattctgctctcaggaactctaagtctagcagagaagatgaggcggtagaagttca

SEQ ID NO: 246185 - DNA, 122 bp, Homo sapiens
ctttctgtggggaccacagggggtcctggacctgaccctaggcggggtgtccaggccaagcgggacgtgtcctctcccttcacaggctccatccgcgaggagaacggcgtgcgctggcatgt

SEQ ID NO: 246186 - DNA, 122 bp, Homo sapiens
gccgggaggagtcttgggtcctccgatgccgggacgggggttgctgcggaacgcccgccgcgacagagccgcgctcacccaggtggccttggccaggctcccaccctctttccatggaatcc

SEQ ID NO: 246187 - DNA, 122 bp, Homo sapiens
gcttaccccctcccggagccgctgccacccaaatcgggaggctgagcggggagcgctggccggaaggcccagctgcgccgcctccagcagctgtgtggccttgagccagccactctgccttt

SEQ ID NO: 246188 - DNA, 122 bp, Homo sapiens
gctaatcgtcctgctgtgttaggaacccatgagacaatgctgtaacatttagctttctgacgtccaaagcatctagatcagtccccaattaaacaggtattaatcacaaagactctaaaagc

SEQ ID NO: 246189 - DNA, 122 bp, Homo sapiens
gctgcttttatgagctgtaagactcaccgcgaagatctgcagcttcactcctgagcccagcgagaccaagagcccaccgggagcaacgaacaactccagacacgctgccttaagagctgtaa

SEQ ID NO: 246190 - DNA, 122 bp, Homo sapiens
ggggccgcgggggcccacgctcccctggagcagtggctggagcgcgggcggagaaagaagcgctctggacttggagtgcagagctagttccctcaccctgctagctgaacttaggccaggga

SEQ ID NO: 246191 - DNA, 122 bp, Homo sapiens
ggattaaatgcctccctcctttctctatcttaccatatccccaagaggcaaccatgtggtcgccagcagagaatagctcagttgctcttgcagcacattttaaagcagatgagaaaagcctt

SEQ ID NO: 246192 - DNA, 122 bp, Homo sapiens
tgccttccccgccaggccctgagaaccaggtggggcggatctggtttgcggctctccacccgggaagctgacacctgccagggcgcatgctccacggttctgctgaatcaagcttcagccaa

SEQ ID NO: 246193 - DNA, 122 bp, Homo sapiens
ccacgtcaggttgatggctcgcctttccacggtgctgagagtggccactgggtgctcgggcgcgtggggcagttgcctggaaaagagacacgtggtcaggcatccctatgtggtctgcaggc

SEQ ID NO: 246194 - DNA, 122 bp, Homo sapiens
taagtgacaggccagaaaagccaaaaaaggaggtagcaatataaagtagaagggaagtgccgatatattttgtggttcaagcagctgctatggactatcagcatcaccaggagacctcactg

SEQ ID NO: 246195 - DNA, 122 bp, Homo sapiens
gataggctttctaaaaagaattatttttatttgggaataaagcattgcaatgggaatatgcgtgccaaggtaaactatgtgcttattcaggtaggtaaagtaagacaaagtttaaaaaaata

SEQ ID NO: 246196 - DNA, 122 bp, Homo sapiens
cctgactgcgccccgggcaacacagccccttgggaacctgcgaccaggtaatgtggcctccgccccgtcccgggtctggctgcatcccctctaacccctgcctgcccgggtccaagtgaggg

SEQ ID NO: 246197 - DNA, 122 bp, Homo sapiens
tgcaggcagcggcccggcagcctggggagggggccaccgcgcccgggcgcgcagggggagcggccaccgcgccgaggccccatttgaaagaaaaaagggcacgaaaaaggaggtggtggaga

SEQ ID NO: 246198 - DNA, 122 bp, Homo sapiens
tcttatgcattcaagtctgttcaaaataattttccttgaagctgccatgccattgggagacgaatctgtgcgcacatgctcacatcggctgcctctcggaagcttctgtttccagcctgagc

SEQ ID NO: 246199 - DNA, 122 bp, Homo sapiens
ctcacgacctccaagagcggcttccaaccttgccggaaatgacgaacgagtcaaccggatcggtgactgtggagggcgagctgagccctgtgcgtgagtggggtctggttgtgcagtgttcg

SEQ ID NO: 246200 - DNA, 122 bp, Homo sapiens
ctcctccatcttctccaccgggtagacggcttccacgtagtggcggatgagccgcagccgcgtggggtccagttgcttcttgttgcaagccccggaatggttgtactgcagccggaggttct

SEQ ID NO: 246201 - DNA, 122 bp, Homo sapiens
agctgtaggggagctgagctggggaggaaattcgtccccggtgactcctgctccactggacgcttcctccatcccggcagcagtcttggccggatctccccagggcctcgcgctcttggagc

SEQ ID NO: 246202 - DNA, 122 bp, Homo sapiens
gctgtcttcctggcaggtcctcgtgggagcggctgtcccttgttcaggggcccgggaccgcgtccccgtcccccgacatgtcccccaagcatgccttcagggcagggtgcagactggaaggc

SEQ ID NO: 246203 - DNA, 122 bp, Homo sapiens
ttgcctgtgtgtgtgtgggggggtagatctaaactggtggttggagccatctccgatgggcgacccatcctccagggacacaaagagcccagagccccagacaatgggacgcacgagctcca

SEQ ID NO: 246204 - DNA, 122 bp, Homo sapiens
gggaggagctgctgagcctctcactagcctccctgctcccagcccccgcctcaccggggccgcccctggccctgccccgcctcttgatccccaaccaggaagcttgcagtggtcccggggcc

SEQ ID NO: 246205 - DNA, 122 bp, Homo sapiens
tggaggaaaggctgaaaggactacaactcccaggggacgctgcgggccccgcccatggggcgcgcagtgtaggtcggggcctgaggtcccacggtcttctcgccgcgtgcggccgggagcaa

SEQ ID NO: 246206 - DNA, 122 bp, Homo sapiens
gtgctggtccagtgaaatgtcacaatcctccttgtgggcaagactcctggaaaagagtcacgtcacctggatgctggtttaagtgatatatgaaaatccaccctaaggacagagcttaggct

SEQ ID NO: 246207 - DNA, 122 bp, Homo sapiens
ggctgtggttgtccaaggcggcttccagcgggtgatggaatctgggctgggtaggagacacggtgctggggcttcccagtggaggatctctgctgcgcagcccgtgctcagctgtgtgtgcc

SEQ ID NO: 246208 - DNA, 122 bp, Homo sapiens
aggttcaccagtgtgtttacggggcgtaagggcactctgcttctcgcccaaagttttcatcgtcatccgtttcccgaggccgagcttgtcctaacaccaagcgaaagccactgccagcccgc

SEQ ID NO: 246209 - DNA, 122 bp, Homo sapiens
cactcccgagccataggatgccttttaaacgcggcgatcgggcctgtaatttgggcggcgcgggcagaaggagtttaaagaaaaataattgtcccgccctgatcgtgtcgtgtcgtgtggcg

SEQ ID NO: 246210 - DNA, 122 bp, Homo sapiens
agaaccaggagctgcggcaggtgcgcgagcatgagcagcataagaccgcggtcttgctcacggagctcaagacaaagctgcacgaggagaagatgaaggagctacaggctgtgcgtgagacg

SEQ ID NO: 246211 - DNA, 122 bp, Homo sapiens
tggttgggtcagaggtgaaatcataagaagtagaagctgtcctcttgcactgagttggttcgtggatccccaggttgatgagtcagggtggggccatccacttgtcagaaatgcaaaaacct

SEQ ID NO: 246212 - DNA, 122 bp, Homo sapiens
aacgggggaggggcagcgccatgcaaatgaagcgggtggcggggaaaccccggcagggggcggggcctgcagaagcggctcggagtgttctggaagtggcaggagcacgactcccttaactc

SEQ ID NO: 246213 - DNA, 122 bp, Homo sapiens
gccctctcagcttccgtttttctccccgctcccctggctctcctatctcggccccgtaaccgctgtccgcacggtggcgccacatacgtactcgtcaccccttggccctccctgaagagctg

SEQ ID NO: 246214 - DNA, 122 bp, Homo sapiens
ggggcggcgggaggctccgtggccggccctgggttaaagttggtaattgagcggcaactccggcgggcgcggagtgacagctcgtgacggcctccgagacgccagctgccccttctcggctg

SEQ ID NO: 246215 - DNA, 122 bp, Homo sapiens
ggactcgcaggttgttttccacacgcatgttatttccgtaaatgctgtccacagggaggacgcctcaggggcgcacccaggaagggaagtgcgtgtcaggaaagacacagcgcagggtctgc

SEQ ID NO: 246216 - DNA, 122 bp, Homo sapiens
gcgcacccgcacgagccttggaccctttggaaccgaaaggtgagttcagccgggttgggtcggaccagctcgggggttctgggcactggagcggatgccgggcgccagggcgtcggacgccg

SEQ ID NO: 246217 - DNA, 122 bp, Homo sapiens
cccgggcggaggaggagagccggcggtagcggcagtggcagcggcgagagcttgggcggccgccgccgcctcctcgcgagcgccgcgcgcccgggtcccgctcgcatgcaagtcacgtccgc

SEQ ID NO: 246218 - DNA, 122 bp, Homo sapiens
tgggggcattgttctagccatgcaaacgctgtggccattgtgtcagcatggaagagctgccggttcctttccagctcaacactgtaattttatcaactctggctcagagaaacctatattta

SEQ ID NO: 246219 - DNA, 122 bp, Homo sapiens
gggggacggcagcatcacaggcggctgcaggggccaagggcggccatcagactaggagcccgggacccctcagaggccgcaggcgctattcggtggtcaagcggtcaagggcagcctacccc

SEQ ID NO: 246220 - DNA, 122 bp, Homo sapiens
ggcttatagcagctgcactgggagcagccacaagaaccgcagccccccttggagcccccacgaaatccacagacccccttggaacccccacaggagccacagctggaggagcagcagacggg

SEQ ID NO: 246221 - DNA, 122 bp, Homo sapiens
cctcaccggacttgggcgggtagcggtacacggaattagacgggatgtccacctcctccacgcccgcgtgctgccggctcgtcagggcccccatggccgctgcggctgcagccccggcccgg

SEQ ID NO: 246222 - DNA, 122 bp, Homo sapiens
tttttctgtctgaggtatctacccacaatttcttacagacatctcctcatgcagtccactcgcaggaggaatctggaaagggaagattggttattttttctaattttcctagcaataataca

SEQ ID NO: 246223 - DNA, 122 bp, Homo sapiens
atcgagggctccacaggctgggcggggggcgtcgttggaggggggtaggggagaaatgcgcgcccaccaccctcacagagggcgagggacccccaaaagccactcgcggacgccgaggcagc

SEQ ID NO: 246224 - DNA, 122 bp, Homo sapiens
cagccgctgcccttccccggcatggacagtgagcgcggggcccgggcgggagggcaagagcgactcgaacccgggacccgctcctctgtgatcccgggactccctcgcctcggtcctgagac

SEQ ID NO: 246225 - DNA, 122 bp, Homo sapiens
gccagagagctaggaagttggcaggcaaaggtctgttccgaggtttctgaatggaagcagcggagtttgctctgcccgctagttctcaggaagaagactgtgtgcttgcagctggtgctctg

SEQ ID NO: 246226 - DNA, 122 bp, Homo sapiens
gccggtcctaagtcaacatggcctgggagcgttgccctggagcctcctgcctttgccagccgcctgccatctcgagctcagctatttctgggacttagctccctcccttgaaaaacaaaccg

SEQ ID NO: 246227 - DNA, 122 bp, Homo sapiens
agccaggcccagcatccttttggcgcctcttcccgacgtttggttgctacgtccgggcctcggcgcccacacaagatttccccggagagaaatgtgtcctgtaccttgttgactcgcacgtc

SEQ ID NO: 246228 - DNA, 122 bp, Homo sapiens
ggtgatccacccacctcagcctcccaaagtgctgggattacaggcgtgagccaccgtgcccggccggcctccgattttttagaacaaaaaggcaaatcacaagctggttacagacaaagagg

SEQ ID NO: 246229 - DNA, 122 bp, Homo sapiens
actaagcatccaataagttttggaaattccacatcttcgccagtccactcacgcggggggcgggacctgacaaggccgtgggcggggcggccgaagggcttagagtgcggcgggaggaaaag

SEQ ID NO: 246230 - DNA, 122 bp, Homo sapiens
tgctgttctgagtaaggtgatgaaatctcactctgtccagctcgagacacgagccccgtccggcacgttcgcgccgagcatgctcccgcccactcacctgtgctgtcttgatcgtcagctca

SEQ ID NO: 246231 - DNA, 122 bp, Homo sapiens
ctcactaagaagtacccagctaagacgcatgagggcctgagagattccgaacacgtgactcgaggcagccggaaacccgggcctgcaggtgacacgcagaactcatggctggacccactgga

SEQ ID NO: 246232 - DNA, 122 bp, Homo sapiens
gttattagtaagtgagtcccctgggaagatttactcccaaatatttagtcctttcaagtccgtttttctcctcctgagatggagttcagtgggttgtaaatgctggacttcatttttgacag

SEQ ID NO: 246233 - DNA, 122 bp, Homo sapiens
ctgcaagctccgtgccccttcccacatgctttgctctacgcatctcttcatccgcatcctcggtaatattctttgtaataaactgtagatgtaagtaagtgtttcccggagttctgtgagct

SEQ ID NO: 246234 - DNA, 122 bp, Homo sapiens
ggacggtcagcacgaggatgctcacgacatagaggacagcctggtgaacacggatggcagcgcaggccaggcgcaggacgggaggtacatcgcagaggaagtggttaatttcctggcggtag

SEQ ID NO: 246235 - DNA, 122 bp, Homo sapiens
tccaggctgagggaacagcctgggcaaaggccctggggcaggacagtgtctggtgtgtttcgggaacatggaggaggcatatgtggctggagtaaagccagcaagacagagagtagggggag

SEQ ID NO: 246236 - DNA, 122 bp, Homo sapiens
aacacttggattttctgtaaacatttgtggtgaagctgctgcccaggctcagcctaaacacggcccccacctctgtgcgagggagctcgccactccctgacatgactgttgcatcttgaaac

SEQ ID NO: 246237 - DNA, 122 bp, Homo sapiens
cgccaccgcccagcccactgctcgctcgcgccgcctcccggagctgcggcccggctgggccggccccagggcctttgcaccaccggtggctgtctcccggagagctcttcggccacaggtcg

SEQ ID NO: 246238 - DNA, 122 bp, Homo sapiens
catttttctatatggtttatttgaagtgcctttccaggaggcagatgaaaaaacatgggccgaaagctcaggaaagatatttcaggagaggcctgaaagtcttaagaaaagtaggcgaagac

SEQ ID NO: 246239 - DNA, 122 bp, Homo sapiens
gactatacatcgcaggtccccaaagcctatggaccttgggaaatgtggggcctcgagtcacgtcattgtacctgacagtctttttcaatagactaattcaattagtgctcgcggtttcggtc

SEQ ID NO: 246240 - DNA, 122 bp, Homo sapiens
actttgtaccaggtaatctactgaagtgctgaatgtgagttatctcatttaacctcaccacgactctgtgaggaaaagaaatattattatatacatacagtgtttcctccacttaacagaca

SEQ ID NO: 246241 - DNA, 122 bp, Homo sapiens
ggacctcagggcccccatgggggtccccccttcttgctgtccctgagaagcagatgtaggcgcagctgggaatggaaaggagggagtggtcacgcctcccttggctccagaggacagacccc

SEQ ID NO: 246242 - DNA, 122 bp, Homo sapiens
gtttcttcagtcgggcctttgtccaccttgtggtcaggtggttaggtaggatgtttctcacgacccgaaccactgtgaagtgtttcactttgactaaggtctgcaaaatagcagggagctta

SEQ ID NO: 246243 - DNA, 122 bp, Homo sapiens
taggtctgatggcgggcctatgctggtgtgggaataacaccgccggtctcagctggaggtcgccagccctttgcaagagcctgccggtccccgcgggctgcagcacaccccggcgcgatgtg

SEQ ID NO: 246244 - DNA, 122 bp, Homo sapiens
ccacatgggtgcctgctcatgtgccatgttgaaggagtccctgtccgcctctcagcagcccgcatgggctttactggttggccttacactcaaacaggaaatccctgggtctcaggtggaga

SEQ ID NO: 246245 - DNA, 122 bp, Homo sapiens
ataaaagtcattctctcatttctgggacttaaggacacgtctctgagcataacaaatgtgcgatcacaaatgaaggtgccttgagcttaatggaagaaaggtttatcttcaacactgacatt

SEQ ID NO: 246246 - DNA, 122 bp, Homo sapiens
tttgaactgaggaagcaggagatgcttattcaccacaaagacttgctaccctgtcctgcccggtttgaatcctgaagtgaaagaagtgagagtgcagaaaaactcctttgtcttctaccagt

SEQ ID NO: 246247 - DNA, 122 bp, Homo sapiens
gggcagttgcatcagaagggttaaggacagctgggaacacatcctgcctctagtgaacctcgtggttctgtcatctgcctgcccctcacccagcctaacccctctgaaccaggagcctgagc

SEQ ID NO: 246248 - DNA, 122 bp, Homo sapiens
tccatctgcaaagcacacgacagcccctgcggccactgggtgccggcgcccagcctgtcccgagagcctctgacagccaaggattggcccaggtgtggctgatggatgaaacaagactgtga

SEQ ID NO: 246249 - DNA, 122 bp, Homo sapiens
cctaggttcaagcggagggtagggaccagtccatcctggcacccatctgcagctccagtgcgaatcccaaccccgacgctcgtcgccgggctccgtgaatgtttgtcacatgtctgaagaac

SEQ ID NO: 246250 - DNA, 122 bp, Homo sapiens
cgacgttgcctgtgggtgcccgcgaaccaacggttagcggtggcaggggctgactgagagcgtctgcttggtaagcactgtaagctgggttgtcacctttccttgacagggtttttccttcc

SEQ ID NO: 246251 - DNA, 122 bp, Homo sapiens
tcccagagtccgcccgtccctcgggttcgccaggttggggatcttcatccaaagccatcccgggaggaacccccatcccaggcagtccccaggtcccgacaacccgtggactccccatgccc

SEQ ID NO: 246252 - DNA, 122 bp, Homo sapiens
tgtccatctcccctgctggagtgtaagctccgtgagggtcgagtccgtcctattcaccagcgaatccccggcatggcggcgatcagtgccggtgggtcgtggaggtgtttgctgcaggcggg

SEQ ID NO: 246253 - DNA, 122 bp, Homo sapiens
gagaggcgcgtctgatgttttgaagccacgcaagagggtttgagccgggggactcctcctcggtgcttgccggccacccccctggaccttcacgggtctggttttcctccttcggcaggtct

SEQ ID NO: 246254 - DNA, 122 bp, Homo sapiens
ggcataataattatttagcaaaatcatcagggtagtataatatcctaatatttggctattcggcaagatacatggcagtgtgccagggatataaaaacccacagaataaacatagcacatta

SEQ ID NO: 246255 - DNA, 122 bp, Homo sapiens
gggattgttttcattctcagccccagctgtgggagtgcgggtgggggtgtggccgagccccggcaggaagccccgcccagacggtgttcagggaacccggagcccaagcgctccggcggagc

SEQ ID NO: 246256 - DNA, 122 bp, Homo sapiens
gaaatacaaagagtcaatataaagaaaaatagaggtcaccatacttggccacagttagaccgctcataggcccatggctgctgcaaccatgggcaggacacagagggagtccagcctctact

SEQ ID NO: 246257 - DNA, 122 bp, Homo sapiens
tttgatcttttcccaggacagtaatcggtggtacgattctctctcggggccaggcagtgacgttgagccacggcttccagtcagccacatggtcacgaggcactctgatgccaggggactga

SEQ ID NO: 246258 - DNA, 122 bp, Homo sapiens
tggatttttgcttgttttaacgttcttcccttttttgtgtgaatccagctgctgtggaggcgggcgcgggcggcggggtaggaaggactgggataggatcgggtcagggaagaggagacagc

SEQ ID NO: 246259 - DNA, 122 bp, Homo sapiens
gcactttgggaggctgacacaggaggatgacttgaggccatgagttcaagactagcttgccgcacaacatagcaagattctgtctctacaaaaataaaaaaaaaattagcttattcatctct

SEQ ID NO: 246260 - DNA, 122 bp, Homo sapiens
gtgatggagcatcagagcccaacagacagatggggtttctcctttctaactacatgaggacgcccgacctcttcaggccctgttcccctgggaatcgataatatcacatcacagttttgctg

SEQ ID NO: 246261 - DNA, 122 bp, Homo sapiens
ggagacgcgcagcttggtttcctgtccccgtcctctgacaccgctaaaatggtcattttccgtggtcatagccacggatctatgccacgacctgggaccgggcataatttcggagccagaaa

SEQ ID NO: 246262 - DNA, 122 bp, Homo sapiens
cgcttttgttgtctgagcgcggccgcgggacaagggatgctggcgggcggcaggggcgagcgccgcgggcgagaggcggctcccgacgcgagtgcgcagcgcccggcccggcggcccctccg

SEQ ID NO: 246263 - DNA, 122 bp, Homo sapiens
ctgacgaggaagtaaaaccaaatctggagtcaaagaacctagctttggccctaacttggtcgttatttgctctctgactgtgcaccagttccttccctttcctgggtttgccatttgtgcaa

SEQ ID NO: 246264 - DNA, 122 bp, Homo sapiens
cagagacccgctgtcctcaaaggctatgaactacagtctcctagagctggtgaacatcgccgatcattggttctgattccaacccatttcaaagatggtaaaaactgagacacgggaaaatc

SEQ ID NO: 246265 - DNA, 122 bp, Homo sapiens
gttcagcaaaggttcgctggccgaggcgggtcccagaccggcgaacccgacagtggagggcgtgaccagttgtgcaaaaactacagatggtgccagtgagatcagtctcttctttaacagac

SEQ ID NO: 246266 - DNA, 122 bp, Homo sapiens
agaactagacaggcgacagcactcaggaccccggctgcggccggcgccgcggcagccacgcgctccagcccgcgtgcacctgcttcgctccgccgcgctcccggcttaagccggcggctccg

SEQ ID NO: 246267 - DNA, 122 bp, Homo sapiens
ctgttggccctaccctgctgaggaagtttatcagggtgggctcccttcctgcacttcctgcgcttggagacattggagagcccacattgaaaatctcttcagttaaccacatttaagtccct

SEQ ID NO: 246268 - DNA, 122 bp, Homo sapiens
tgtgaagcttgtctggccagtaccactttgtctctctttggggaaatgatctcctccacacgccatcatggtagttgcactggagatcaccaatcacagtacacatcctccttggccacaga

SEQ ID NO: 246269 - DNA, 122 bp, Homo sapiens
tgtgggccagctggagttccgggtgggagtgggcttggcaggccccacattcggagcgaccggctggccctgccagccccgggcagtgaggggcttagcacccaggccagcagctgcggagg

SEQ ID NO: 246270 - DNA, 122 bp, Homo sapiens
ctttgcaggtgtattccacgtggagaaaaatggtcgctacagcatctctcggacggaggccgctgacctctgcaaggctttcaatagcaccttgcccacaatggcccagatggagaaagctc

SEQ ID NO: 246271 - DNA, 122 bp, Homo sapiens
atgacaatgacacacgccagacacacacgaactgcggacataggggtgctcgtgggcacacgcagggcacccgcaccctgagactctggaaaccaaggtcagggctgtctgtcagggtctta

SEQ ID NO: 246272 - DNA, 122 bp, Homo sapiens
tcgtcaacttcctgtcggtacttgaagaagcggagccagggctgagatcccgaaggcgggcgaggtctgggatggggcggggcctatgggagcggggctgaagccctgggcccggcagagga

SEQ ID NO: 246273 - DNA, 122 bp, Homo sapiens
gctccaggcctgccaccggcttgtcctctgaagggataagcaagtgttctattcacagcccggagtgcccttctgccctcgcccgaggccactgcccgcctggggccagctccagcgctgcg

SEQ ID NO: 246274 - DNA, 122 bp, Homo sapiens
acccggctgcagaaagctctgggtgtgcggcaataccatgtggcctcagtcctgtgccaacgggccaagatggcgatgagccactttgagcccaatgagtacatccactatgacctgctaga

SEQ ID NO: 246275 - DNA, 122 bp, Homo sapiens
gcctcactgccagcaaaacccggaaaacagaggcactggaggcgtggcctagggaagccccgccccgtcccgtcccggtccgctctctatgctgcgcgcgcgcagttttttgcagacccgga

SEQ ID NO: 246276 - DNA, 122 bp, Homo sapiens
agcctagggaggtacgatgatttgggaccgggtgtggaggtgtgggcggggtggggggtgcggtgtcttccggagccctaagctggcgtcctcagccgctcctttccgttcctaccccccac

SEQ ID NO: 246277 - DNA, 122 bp, Homo sapiens
tctgagctttaagccagtcaagtaactacttgttctgaaaagtattaactgtcctattaacgttaaccttcacaacacaatgccttgtgttcaactggccttggcctcaaagcactttcctg

SEQ ID NO: 246278 - DNA, 122 bp, Homo sapiens
gtccaattctttgttcaaaacgccaaggacccgggcaacttacactcacggccttctttccggtaaccacttgggagccttagggatgcaggtgtgggaattgcaggaaaacccgaggcttt

SEQ ID NO: 246279 - DNA, 122 bp, Homo sapiens
gtccacttttcattactaacacgccatcacatgacctgctaatctgtcactttctgacagcggttagtgtgccaattgatttaattagcaatcaattagcttgttactattggaagtaatta

SEQ ID NO: 246280 - DNA, 122 bp, Homo sapiens
cccctacgcaggacgagctcagggccggctcccagcctcactgcgccccatttcccgccccgcccgacccccaggtttcggctcaccccgggacccggccctagcccctgcccccagcccag

SEQ ID NO: 246281 - DNA, 122 bp, Homo sapiens
tcagtcctttcccccagctctggtccccaaatgtcagggtgtgggcctcctttgacatcccgtatccctagcacatgaccacttataagaaagagtccctgtcagggctggaaactgcagag

SEQ ID NO: 246282 - DNA, 122 bp, Homo sapiens
cgctttgtgtccaataaggttttcgtcattacgcatgaaaacgccaccttaagcttatgtcgcctgtgaatatttaagggaaaaaaacatcccggcaaccaactgctaggcgacggacgcta

SEQ ID NO: 246283 - DNA, 122 bp, Homo sapiens
agacagtggcaccacatctggtcacccagggattccctgggttgaaagcaggagcagaaccgaattctgccagggtgtgggggggtgggagggtgaggaggagggtcaggggtggggaagat

SEQ ID NO: 246284 - DNA, 122 bp, Homo sapiens
cgagccggctacgctccctggcggagctctggacgccccacctactcccagcgttcagtgcggtgccctggccgccattgtttgaatttgaaaacggtaacatcgcagtgctgctcgcgggt

SEQ ID NO: 246285 - DNA, 122 bp, Homo sapiens
ctcagggagcttccagtcacggtggaaggcgaaagggaagcaatctcgtcccacggtgggcgtaggcgcaaggtgggaggggctacccaggtttaaacacacgggtctcagaaaactcacta

SEQ ID NO: 246286 - DNA, 122 bp, Homo sapiens
attaaaaacaaaacaaaaactacaaacaaagaagagagaaaaataatgaaataacacaaacgggctttggacatttactgtgtgccaggtgctatactagacattagaaattggcagagaac

SEQ ID NO: 246287 - DNA, 122 bp, Homo sapiens
aagtttccttactgtctgcctccacagtaatttttttctctggtacaccctcctcctgcgcgtatagccctttgatgggctctggctttatttgaggtctgatcaggtctgtcctgctgtgc

SEQ ID NO: 246288 - DNA, 122 bp, Homo sapiens
cagagcgcgtgggaccatctggtgccaaacgcctgcaacggagtgcagaaggtcacgaggcgctagagaccggttgggggcaggcggttgggccttgacgctctttgctgggcgtcgttttt

SEQ ID NO: 246289 - DNA, 122 bp, Homo sapiens
tccttgtcagggcttctccgcagaggcggggcttctgtgctagccaatcagcagcctcaccgccctctccgggccccctcaccacagccctgtgacgtgccaatcaggctgcggttgccaca

SEQ ID NO: 246290 - DNA, 122 bp, Homo sapiens
atccctgcacctggaatgacctgcattagctcagagataaaggagctcacccagaccacacggccactaagtaatgcgaccaggagctgaatccaagcctggttatgtccaaaggtcattct

SEQ ID NO: 246291 - DNA, 122 bp, Homo sapiens
gggtctcgcgggcctcttgttttggtctcgcgggctagtagggcgcacttggcggggaggcgcttgggcgcgagactaggcgtgaagagcagagctgcgcgcgcactcgggaaaggggggaa

SEQ ID NO: 246292 - DNA, 122 bp, Homo sapiens
agccatgatcatccaggccctcagcaatcagcacgtgattctcaactcaccccacctggacgcaccgtggtgagcccaagaaacaagagagaccaggatggggacagagcaggtgccacagc

SEQ ID NO: 246293 - DNA, 122 bp, Homo sapiens
taaagtgctgcctaatagattttcaagctcagatttgcttcccgctcccatataatacagcggatagtaacgagaaaacacctaatttctagacatgctctaaacctaattatgagtcagca

SEQ ID NO: 246294 - DNA, 122 bp, Homo sapiens
aaacaggggtgaccccatgtggcctgcctgcatcataggcatgttggctgaggtggtatgcgcacaggtggagggaatttgggacttgggtgttaggccatggaaacaaatatttggccctg

SEQ ID NO: 246295 - DNA, 122 bp, Homo sapiens
agactgagacctaagacggactgccacttacttctcagctgccacttacttctcagctggcgacataatgcatactttcctaccctaagcactttgagtccccccccccacccccgctaaga

SEQ ID NO: 246296 - DNA, 122 bp, Homo sapiens
agtcttccggggaaattttcccaccgctgggcacggcaaagttaacttttctccagctttcgagttcgttttattccctccgccccgggggccgtagtttgtttttttgttttgttttgttt

SEQ ID NO: 246297 - DNA, 122 bp, Homo sapiens
tctcatctgcataggcgcccgcccattgggccgcccacccgcgccttatctgcatggccacgcccccggcgaccgagcaacagccgcctattggcgaataagcttcctgacgaagactctcg

SEQ ID NO: 246298 - DNA, 122 bp, Homo sapiens
atttcatctgatattctattctgtagatgagggtagtggtactcaagactttgccagggtcgccaaagctagtaaatggcttcaagctggaattggaatgtagagtctgagtatgtgttctt

SEQ ID NO: 246299 - DNA, 122 bp, Homo sapiens
cattctcttcccaggcccagccatgtcccaggtctccgggtccccgggttctcctctccgcgtgccgggagagtctccagcttctcagactccagcaaccccagccaaacctcttcgctgcc

SEQ ID NO: 246300 - DNA, 122 bp, Homo sapiens
caaagggccgagtcatgtggccggtaactgggccggtgggggaaggtctaataatagtcccgttcttgctggctttgcacattttggcatcaaaatgtccccaccaggggttgcccctgggg

SEQ ID NO: 246301 - DNA, 122 bp, Homo sapiens
gcggcctgctttgaaaaccaagctgaaatgggaagtcagttccggtttctcagaccttctcgcaggttccccgtagtcctgtgggactcttggaagtgtcccccggcccaaaccgggcaata

SEQ ID NO: 246302 - DNA, 122 bp, Homo sapiens
tgggggccgttaagtgccgggagagttcggatacgatgttccctcgcaaagcccacgggacggaggaactctgaaaggaaggactcaaagttccaaggggcacgatggtgaagccgatgtca

SEQ ID NO: 246303 - DNA, 122 bp, Homo sapiens
cttgttcgtgtgccattagagcagttcttgcattatttatttacgttttagtctttgctgcgaaaccctcagctatttaatgtttggaagtgtttttgctcatctttcagcatctagcaaag

SEQ ID NO: 246304 - DNA, 122 bp, Homo sapiens
agcagagttacaaacaagttgattcttctacatgaatttagtctaagcatcaatattggccgctgatattatgagctttttcaagaagatgagacttttcctcaagtcttcattaccaggta

SEQ ID NO: 246305 - DNA, 122 bp, Homo sapiens
aggcccaggtcacctgtgcccctggaaccggcacagggtgcttgtgttggccgcaatgaacgtgggcaggggcgtgtgccgtgagtgcccctgccgggagctgctctgagctttattatctg

SEQ ID NO: 246306 - DNA, 122 bp, Homo sapiens
tgcgtggggacctcgtccgagctgtggacagtgtttcacatgtggtcatgtgtctgacgccgccgtgctggtgcctgggggacctgcaattcatgcccagctccccatcgacccctggccta

SEQ ID NO: 246307 - DNA, 122 bp, Homo sapiens
ctggccccgcacgtgtctatcttatcccggctgcccgaccaatcacggcccgaggatctgcgcctgcccctctcgcaggctggaccaatccagagcaacgatccggggaagctggcctggcc

SEQ ID NO: 246308 - DNA, 122 bp, Homo sapiens
ccggacacccggagccggggaactgtaatgttcagggaatttcaattggcattgctgtcccgttccagccaactggctaacggtgccgagtttgaatcagtgacccgcctcctggtccctcc

SEQ ID NO: 246309 - DNA, 122 bp, Homo sapiens
gtccctgacaacctttccttcaaattgttgttttcacaagaaaatgaaccctttccagatcgcgcaaacacatcccccgggaccagctctgctgttgccgctcccgagggaggccgccttgc

SEQ ID NO: 246310 - DNA, 122 bp, Homo sapiens
cgagggcctggttagcgggagcactggctgctgcctctgggtctcggaagtaggcggggccgccgacctcaccgcgggcgcggaggacagtctcaatgtcaccggcctggcggctccccctt

SEQ ID NO: 246311 - DNA, 122 bp, Homo sapiens
tctcctagacacttaacattggtgccctgagaagtcaagacttggagtctgggtgcctcccgtcgtatgacatttactaacaaccatttactaacagatttgcctcaggttaggggaaagtg

SEQ ID NO: 246312 - DNA, 122 bp, Homo sapiens
gaggacatgggccttcagcttgtccggccggttgaacaacttaccgcagcttgtgtgcgtcgataaagggcatttatatttcttgaagggctggtggatcaacatgtctctcttacagtttg

SEQ ID NO: 246313 - DNA, 122 bp, Homo sapiens
acccagggagcctcacggcccagacctgggcagcacgggtaggagctgagagcatcctcacggcagcaggcagaacaaacaagtgggcctggggctcacaaccctaaggcattgttgaattc

SEQ ID NO: 246314 - DNA, 122 bp, Homo sapiens
tttcctgccactctagtgcattgttaatgcctctgtatttttgcacacattgtttccttccgccttactgaatcccatgattctttcaagactcaactcttcgtgaagcctttttcaacttg

SEQ ID NO: 246315 - DNA, 122 bp, Homo sapiens
ataagggtggaaggctgagtcccgcagagccaataacgagagtccgagaggcgacggaggcggactctgtgaggaaacaagaagagaggcccaagatggagacggcggcggctgtagcggcg

SEQ ID NO: 246316 - DNA, 122 bp, Homo sapiens
caccggcactgaacagcgaacacgccctgtctcggcgccccgcgcaggcgcacacagcgccgctgccagctccacgcccgaccctacccatattaggagaacagctctccagacgtgtctcc

SEQ ID NO: 246317 - DNA, 122 bp, Homo sapiens
aagtagagctttcaggcacatgcaatcttaaggaggtgggcaaggcaacagtatctgaggcggagatggaaaaccagggatccgaaggaaaggaatagcaggtttataaaaggacaagtaaa

SEQ ID NO: 246318 - DNA, 122 bp, Homo sapiens
tcccccacacaggaacatggttaggaggggctgccgcccccggacacttggcagcatgggcgcaggcccacgcctcagatgccctggctccaaaacccgccaggcggccccgctgtgccctt

SEQ ID NO: 246319 - DNA, 122 bp, Homo sapiens
cttcctggaaaagacggatcttgagctattatttacagggcagtagggaaatgatgtggccgctagctgcagaaagagcaactcatatgaaaaagaatggcagaccggagaggccaaggctc

SEQ ID NO: 246320 - DNA, 122 bp, Homo sapiens
cgtagccgtcgaagttccctctatgtgtcaaaaataagttatgcgtaggagccagagtcccgtgcctggtgtcacctctctttcccaaaatcctctcccatcaagaaaaccatgcatgtgcg

SEQ ID NO: 246321 - DNA, 122 bp, Homo sapiens
ggtccaggacaccaaaggcttccacacagaggaggatatcggcggacttcacgccaccatcgagtgtgagcagccccagcccgacctctacaagtaagcgggagctttgggttctttagaaa

SEQ ID NO: 246322 - DNA, 122 bp, Homo sapiens
atggctgcagcacactggtggtagagcagatgtgcctgcctgaggccaaggtactgcactcgcccactttgtcttggagatgacagagaaacatcttttcccttaacactactgtcttctca

SEQ ID NO: 246323 - DNA, 122 bp, Homo sapiens
aggagtgggagggtagcgagccagctggattccgagccgcggagcgcgctggctttgctccgcctgatgactccagagcgcgggtccaagcgccgcccatgcagcacccctgagctccgggg

SEQ ID NO: 246324 - DNA, 122 bp, Homo sapiens
cacgacggccgcgtgcccggagcgccggggtctttcctgggctccaaagtcaagagctcacgttccgggaggatctgtccgcggaaattcggttctgagcgtcgccggactccgccgcgggg

SEQ ID NO: 246325 - DNA, 122 bp, Homo sapiens
aggacacagaagggcgaagacgagaccaggaactccggctgcagcgagagacaaagaccccgccacatcccggaagccgccctttccgctccaaccgcgtgcctgattggacagttcccagg

SEQ ID NO: 246326 - DNA, 122 bp, Homo sapiens
gtattcaggatgtacttctcccagccggacaagaaaaagggcaaagaaaactggaagagacgtctcgtctacacaaactgctctttggacacagcatcaacctgaccacacccgtgctggcc

SEQ ID NO: 246327 - DNA, 122 bp, Homo sapiens
cttgtccaaggttatacagagatactgaagggcaaagcctgggtcggtctcagtttgggtcgcctgaccccaggccaccactgcctttctccctttcacagatgtggatgctggacccagga

SEQ ID NO: 246328 - DNA, 122 bp, Homo sapiens
accagcctaagactgccgagttttgaattctggctccatcatttcttatctgtgtgacctcgggcaagtgttttaacttctctgtgccccattagacttatacatataaagggaataatagt

SEQ ID NO: 246329 - DNA, 122 bp, Homo sapiens
gaaagttctcttgggttgaaggacctagctcctcccctcctctctgctcaccttccccaccgccctccaagttagaaagcatgataggttttaggggaccaggaaacgacttaaggttggag

SEQ ID NO: 246330 - DNA, 122 bp, Homo sapiens
ctggtcccagtcttgcgcctggccctcttcctggggtgattttcctcggtggaggaggcccgtggggtcccaacacggaagagccatgggccgtgtgcatggtgtcgctctcctctagggtc

SEQ ID NO: 246331 - DNA, 122 bp, Homo sapiens
ttttactttgttgtttgatgcttaaacttcaaaattctctgtattcaaatttgattgtggcgaatctacttcaaaaaggaaaaataatccaactttgtggatattaaatggaaggtttgctg

SEQ ID NO: 246332 - DNA, 122 bp, Homo sapiens
gctggtggaagccttggtggattctggcaggccaattatagacgaatggcctggggaacccgtgcagcccttggctgagtggttctaagccccagcacgtctgcctctggcttcacccagcc

SEQ ID NO: 246333 - DNA, 122 bp, Homo sapiens
cctgaggccttctgggccagaacccgcactatcaggtcccttctgtgacctcagtgctgacgtcacagcctcacacagagaagattcttgagacttctctaaggagctcgggatccctggga

SEQ ID NO: 246334 - DNA, 122 bp, Homo sapiens
gggattcgcccgcctagacctcccaaaattctggaattacaggcgatagccactgcgcctcgtctctggctcttcacaggcaatttgtggatccttgttacaaatgaaacaagatgggacat

SEQ ID NO: 246335 - DNA, 122 bp, Homo sapiens
aacacaatgagacctctccccatcagacacttgatacatacctcagccaagagcgctcctcgcctggagtgggagacatctttgaaacaaaaagagtcggtttacagtaagttctcctgata

SEQ ID NO: 246336 - DNA, 122 bp, Homo sapiens
attaagctacagctacatctgacttttctgtctttattagtagcatttggcacaaaaccacggggtcatttatttcccaaatatttactgagtacctaatttgtgtaaagggctgtgctggt

SEQ ID NO: 246337 - DNA, 122 bp, Homo sapiens
cccgaggaggagccgctggctggcatcaccgtcggagtccggctccacggccctccgcatcgcccagaagcccgactcctctgtcaaagccctcgccacagttacagacacattgcctggtc

SEQ ID NO: 246338 - DNA, 122 bp, Homo sapiens
cccaaagaaggaccggggctttgggcagaattctggcagccaggcgggcgtcaggggagccggagaaggggctcgccagcaggcgtggggcggagtgccgggcgcagcccacctcgcaagcg

SEQ ID NO: 246339 - DNA, 122 bp, Homo sapiens
cagagagttgtgcctaggccatgattgaatttgagccacagactcagggctggaaggctgcggacttacctgccgctcactcctccaggccaggcttggcccctgggatccctggggggtca

SEQ ID NO: 246340 - DNA, 122 bp, Homo sapiens
ctccaccacaccactcacctgtcgtcgttttgccatccttggtcccctagcagcaaatctcgaaacctgtacctgggaggcagagggggcacttcgctctccaaatcaaccatccttcctca

SEQ ID NO: 246341 - DNA, 122 bp, Homo sapiens
acaccaacacatctctcaggagcacaacacagggcagaagcagccgggatgtggggaccgcgggctgtaaactattaatgcaagatgccaggggcagcacccaacctccagaggtttttccc

SEQ ID NO: 246342 - DNA, 122 bp, Homo sapiens
cggggccagcagggctggccagctgcttcgagtgcggagcccgccaagcccacgcccacccggaactccagctggccctcaagcgccgcgcacagcccaggtgcccgcaggcgcctctccct

SEQ ID NO: 246343 - DNA, 122 bp, Homo sapiens
caactgtagcctaatgtaagtgttctgagcacatttaaggtaagctaggataagctatgacgttcagtagattaggtgtattaaatgtgcttttgacctacaatattttcaatttaggatgg

SEQ ID NO: 246344 - DNA, 122 bp, Homo sapiens
gttccgatgaaccaggatccatgctgggcaccagaccgaggtcttagctcatgatcatctcgcttctcatggaggcaaatggaaggcagtgttttcagatgtcagctgacatcatggccaca

SEQ ID NO: 246345 - DNA, 122 bp, Homo sapiens
ggctatagggcaagggctgaccccatgggctagtacttggggtttctataggaatgaggacgggcttctaaagagacctgctcatacttgctacctccttccagtgggaatttggagacttt

SEQ ID NO: 246346 - DNA, 122 bp, Homo sapiens
cgatgaggctgagggagcgcggggacaccaagtcattgtaccggaattctgaaaggcaagcggcgaaagccgtgaggagggcgggcctgggagggcgcgggcaacttggaactccagatgct

SEQ ID NO: 246347 - DNA, 122 bp, Homo sapiens
gagaggggcaggtctcccgcccgaggggcgagcggtgggggtaggcgtggggcggcttcccggccctccccgagctcctggggaagccggctgtgccccagggttctaaaggcggtggtctc

SEQ ID NO: 246348 - DNA, 122 bp, Homo sapiens
cttttctcagaatgattcttcaaggcgaatgactcgaaatggagatttcttctaacaccgcgtgatcaccgacaacttttgcaggacgggatgaaactcctctgggtttccagtcagatgtg

SEQ ID NO: 246349 - DNA, 122 bp, Homo sapiens
aacatcgccgatcattggttctgattccaacccatttcaaagatggtaaaaactgagacacgggaaaatcataaaagggtgcttagggcactggcccaaaaagggtacttaaggatttctcc

SEQ ID NO: 246350 - DNA, 122 bp, Homo sapiens
ggaggagcacggggcgctggaagccttggcggaggcctttgacggtgtcctctctcacagcgttcggcgtagtccccttcctgccatccgtcctgagctccctgctgcccgtgctgggcgtg

SEQ ID NO: 246351 - DNA, 122 bp, Homo sapiens
cttacttgggcaaggccctcagggcacgcgcgagagacctggggcccggcagtatccgagcgactgtgctgggcacacggcgtggcactccataccctaaaacaggcactaggaaggagcaa

SEQ ID NO: 246352 - DNA, 122 bp, Homo sapiens
acacgcacaccccacacactgtgcacacatatcacgggcggtcagacttgccagcgtactcggcggcccgtgtgctaagatcacacagcccccacacagtgtacacatctgtttcatgtgct

SEQ ID NO: 246353 - DNA, 122 bp, Homo sapiens
gccccatgggcgggactcgaggctcggtggacggccttgcaggaggtacccggaactccacgagtgacctcgcgatctggcccggctcccgctcgtcgcaacagcgtgactacagggtatgg

SEQ ID NO: 246354 - DNA, 122 bp, Homo sapiens
tttcagcagttttgtctgccccacctcaggaagactgtctgtgttctttcctccatagcccgggcaccgaaggcacatgccgtgcatataagcttcctgtctcgtttgagactctacttgag

SEQ ID NO: 246355 - DNA, 122 bp, Homo sapiens
ttttgtccttggacaggagtctctgccatcgtctgatcctggggggtaccaactgctggacgatattctcagcaagaactcttgagtcctaaagctaactccctccaggtgaaatgcaagat

SEQ ID NO: 246356 - DNA, 122 bp, Homo sapiens
ccaaaaaaagggaggctgtggtccctgctttggttaccctgccgggtctgagcgccaaatcggatctcctacttctctctccctccctccctctgttcctggactgggggcaggcccttctg

SEQ ID NO: 246357 - DNA, 122 bp, Homo sapiens
ctgggggtggggtggggataccttgacaggaatctccgagctgacttggttctctgtgtgcgcctatctcctaggacacatcagtcaacacaggcttggagcctgtcagagctagaaggtgc

SEQ ID NO: 246358 - DNA, 122 bp, Homo sapiens
gcccagacccctgtttttcaggttcacccttccccaacccctactctgcttcctttcctccgactcccgtaccctgctcaggtctccagcagccctgacagctcttcacgttgatcattccc

SEQ ID NO: 246359 - DNA, 122 bp, Homo sapiens
ccgcactctgccgcgccgctcgcccttctctagtggcgccagcggctctcagatcggcctcgcccctttccggactcctggctactcattggctaccgctcgtatgacaggatgtcgccatt

SEQ ID NO: 246360 - DNA, 122 bp, Homo sapiens
cccctgagagtggtactcatgccaatggaattagtcattgctagtcgtcatcttaactgtcggattctttctgtgaaagccagtgttcttaaaaaagaccaggctatacttgctgtctcatt

SEQ ID NO: 246361 - DNA, 122 bp, Homo sapiens
atcagtgacgtatacacctaaatctggtcccccggccctcggcgacccgcagcccggcggcggcagctgtgcggcctcccgcctcaccctcgcttcgcgcccgccaaagcccgaggcggggg

SEQ ID NO: 246362 - DNA, 122 bp, Homo sapiens
gggaggctgagctgctgaagctgcggcgggagctggaagaggccgccctgcagagcgaggcgacggcctccacactgcgcaagaagcacgtggactccatggccgagctgacggagcatgtg

SEQ ID NO: 246363 - DNA, 122 bp, Homo sapiens
aagaagagggtaggaagtgggagaatcgtctcattcattccttctagccttcaaacctttcgcatttacttaaagatcgcctactagaaaccaaaccttaaatatgcgtccaacaaggcaga

SEQ ID NO: 246364 - DNA, 122 bp, Homo sapiens
tgcttcatttccaaaattctcagcaaaactccgcgggagaccctggtcacatgcctggaacgagaacaaaccggggcgtgtctgtgccggacggctgggaaccaaagctatttccatagaaa

SEQ ID NO: 246365 - DNA, 122 bp, Homo sapiens
aggattttttcccaacaagggatcgcctccgctcgaggcagccaccccctcgggccgcagcgccttgggagttttattggctttgagctttcccccaggttggagattctgccaagcggctc

SEQ ID NO: 246366 - DNA, 122 bp, Homo sapiens
ctttggatttaccagttaggaggtcatcagtgaccttttgatagtagcttaggaaagacacgggcatggaaccactgagcacctaatgaaggaaagagtattgaaatggtaatatgacgtat

SEQ ID NO: 246367 - DNA, 122 bp, Homo sapiens
ctgtcctatgggccagcatctctttggctctgcagaggtgagtggaaggcgctctaactgcggatgctcagagcctggctttgtaaagtagcttgccacccttactaactgcacaaccttgg

SEQ ID NO: 246368 - DNA, 122 bp, Homo sapiens
cttggggaagaaagtgagagcaatagggggaatttatagaatgagaactactaaatttaacgttggttcccagtcttcaattatgattcagatgagaattaaggaaggatctttagaaaaag

SEQ ID NO: 246369 - DNA, 122 bp, Homo sapiens
acaaaacctgccaggttatcaaaaggacaccacctccaatgcacagagctgcttccttcccgcacacacggaatcttcctgctccctgccccactcatcgtggtcgtggccagctgtgtcca

SEQ ID NO: 246370 - DNA, 122 bp, Homo sapiens
gagctgatgagggagaaggcgagcaccgcgatgggcagggcgcagtcggacaggatctctcgcacgcaggggtgcaggtaggggctggggacagcaggtgcatgagcacagcctttgaccca

SEQ ID NO: 246371 - DNA, 122 bp, Homo sapiens
ggcgggcaggtgaggtgggtgcagccacctgcacccctggtgaaaagccacccaaatgaccgtactgctcggcctctcctctgccctcctccgcctgctcttcccaactcccagcccaaggc

SEQ ID NO: 246372 - DNA, 122 bp, Homo sapiens
ttcttagctggcgtgtgctcactgaattaggaggcacacgatgtcgtcgttcttagctggcgtgtgctccctcagcacaggacacgcctaccggcagacccaggtagctccagttcctctat

SEQ ID NO: 246373 - DNA, 122 bp, Homo sapiens
gggggacaccttgagggattagttggcaactcgttagcgctttggacagggatggtattgcgccagtgctgtctggcctttgggcttggagaaggaacggagatgatattttccaagaataa

SEQ ID NO: 246374 - DNA, 122 bp, Homo sapiens
tccctcacatcatggagggtaagctgccttagttaaagccaactctttgtaaatgttaatcgcgtttacagataccttcacagcaacatatggactagggtttaccaagtagccttgcccag

SEQ ID NO: 246375 - DNA, 122 bp, Homo sapiens
gagcgggtgggacggggctgtgtggggccaagctgagtcggggggtgggatgcagctgggcgtggctgagtgggggcggagctgagtggggggcgggatgcagctggaccactcattgtagg

SEQ ID NO: 246376 - DNA, 122 bp, Homo sapiens
tgcgcggggggaatttgcagacgctccctgctggcggagatttcctgacctgtccttcggcgcgggactttcggcgggtcccggccgggcagacccaagtgccggcggcggagactgcagtg

SEQ ID NO: 246377 - DNA, 122 bp, Homo sapiens
tcttgcagtttgttcccaggttctaaccctcttctccatctctaaaaaataatctgtaggcgagacattgcaacatctttttctgtgaaccatgagtggtacatgaggtcacttcctgcagc

SEQ ID NO: 246378 - DNA, 122 bp, Homo sapiens
tagttttctggggcctgctgtaacaaatgcccacacactgcgaggtttaaaacaacagaacgtgattttctcacaattcaagagatcagaataatgaagtgaggttgtcagcacagttggct

SEQ ID NO: 246379 - DNA, 122 bp, Homo sapiens
tggcgggggtgcagatgtcccttcccctgctttccattgcttggtggacaatacatttgacgatggatcaagttcttgggtgaccttggaaaagtcattcagccactttcagcctcattttc

SEQ ID NO: 246380 - DNA, 122 bp, Homo sapiens
cggagagacacaagcaaaaatgtgctagtgccaaaatcggccaagcagatggcactggtgcgggctctctggggacacactggacgaggggccttgcatccctgcacccttggaagcagcct

SEQ ID NO: 246381 - DNA, 122 bp, Homo sapiens
ggcacgtgcggtttaggggagcgggcagtctcacacactactgagttgtttcccagcagccgtcaatacagaccttccactgcgtaagcccactgcattgccatttaataaaacagcaagaa

SEQ ID NO: 246382 - DNA, 122 bp, Homo sapiens
aatgggtgggggagcagccaaggggaggggcaggctgtggagctgctttgccggtggtcgcgcgggtgaacggcagttttgtcagctccttcaaggaccaggtcctgcgcatcagtactagg

SEQ ID NO: 246383 - DNA, 122 bp, Homo sapiens
aaggaggccggggacgccgagagccgggtcttctacctgaagatgaagggtgactactaccgctacctggccgaggtggccaccggtgacgacaagaagcgcatcattgactcagcccggtc

SEQ ID NO: 246384 - DNA, 122 bp, Homo sapiens
acttactttgctggagccttaagtgtgcgttggatcccccagctggataacagcactgtgcggggaagaggagaaacgaagacctggagggctccctgaaccgtcctacggggtcgagcgac

SEQ ID NO: 246385 - DNA, 122 bp, Homo sapiens
caaaagtcttccactcacagcagttcggagccgaaaagttgcggaaatgaggcccagcaacggtccctggctttgatttgccaaaatgctctggaagccgcagcgtcggcgcctgcccacga

SEQ ID NO: 246386 - DNA, 122 bp, Homo sapiens
ccgggctggccccgcacctgggtagagactgcccctcggcctgctccagccacgggcctacgggacagatgaccttagcattccaccagcggagaacttcctggaactggcagctggcgctg

SEQ ID NO: 246387 - DNA, 122 bp, Homo sapiens
ctgaatgggggaggctggttagcgtcgactcctgccggggcagcctcggcgctccgggcacggccctgagctcattctattaataatactggataatcgtcacccaacgaacatttccatat

SEQ ID NO: 246388 - DNA, 122 bp, Homo sapiens
cgcaccctgtggcatgaccctcgtcacataggctggaaagatttcaccgcctacagatggcgtctcagccacaggccaaagacgggtttcattaggtacgatcatactgattcactttcact

SEQ ID NO: 246389 - DNA, 122 bp, Homo sapiens
ttagctgctattcaaatccccctctagtcctagcatattggttctcctttgaaagtggctcggcatggggtagaatttttggccttgagtttagaactactgtgcataaaatcaaagcaagg

SEQ ID NO: 246390 - DNA, 122 bp, Homo sapiens
cgcgcggagcagctggaacacgggctgatgaaattacggggaattcaaagcagccggcgtcgcccgctgtctggcttcattacggggactggcctcgaagggaagtttattccaataattta

SEQ ID NO: 246391 - DNA, 122 bp, Homo sapiens
taaccatttgtctcttatctacctatgacctggaagccccctccccacttcaagttgtcccgcctttgcttcgagttgtcccgcctctctggaccaaaccattgttcatcttatatatgttg

SEQ ID NO: 246392 - DNA, 122 bp, Homo sapiens
acctaagtgatcacactttcctttctccctaggctgccaggaagctccgattaaaacagacgcccaacttcaccagcaccttcagcccttgtgggcagaacattcctggtttcccacacaca

SEQ ID NO: 246393 - DNA, 122 bp, Homo sapiens
tcttcagtgaagtgccacctctgggactccttgacactaaaagtcaactccccaggcgggcgtggaacccacccagtcatttgtcaccaaacttggtgctcagcctcatgcttgtgacccaa

SEQ ID NO: 246394 - DNA, 122 bp, Homo sapiens
gaggaaggctctgcagcccgagggggcgtgtgtaggggcggggctgcgggcggaggagcgcggacgctccgggtatcgcgagagttgggcgggccgagcaatcgcagcagtctattccctca

SEQ ID NO: 246395 - DNA, 122 bp, Homo sapiens
agaaggtgcaagtttgaagaatccagccaccatcacactttcctcttgttcgctgccatccgtgacttaagcatgggactggaatgttcatgagtcacaggctgggtttctgattggcattg

SEQ ID NO: 246396 - DNA, 122 bp, Homo sapiens
acctctgccacgcggatccacttctccaggagccgggccctctgtgggggacggagtggccgtatggtcacctccccaggtccctctccagtggaagtagcccccaggacagaactaaccac

SEQ ID NO: 246397 - DNA, 122 bp, Homo sapiens
ggcggccatggcgacccggagcccgctccccacccaccccgcctgctccgccctcccctccgccccgcgccacctttgatggctcggacctcagccggccaccgccagccctgctcgcgcgc

SEQ ID NO: 246398 - DNA, 122 bp, Homo sapiens
tagcagcccaaacggccaggagctgcctactgccttacaacactgttctggacagctacacgtccgtaccctagccagccacacatgcactgttcagaggccctgacaacacccctacagat

SEQ ID NO: 246399 - DNA, 122 bp, Homo sapiens
atcgatgagcacatgcacacgacgccctggagtactcaccctgcggagtatcgatgagcacgtgcacacaacaccctggagtactcgccctgcagtgtattgatcagtacatacacacaaca

SEQ ID NO: 246400 - DNA, 122 bp, Homo sapiens
atagaactgcatggtcataaatatcagaagccaagaagacgaaacccggaagtggaagggcgtgctatggaaagaaacaggtcagataaatgtaagtgcaaaaacattatagaataattaga

SEQ ID NO: 246401 - DNA, 122 bp, Homo sapiens
gttctttgaaaagatcaataaaattgctgccgatgacgcgcgggaggaggaggaggaggccgccccgccaccgctgccgcctcccgcccacctgcccgcagccccggcccccggcggcggcg

SEQ ID NO: 246402 - DNA, 122 bp, Homo sapiens
acgcgatgatctcggtggggcacacaaaagtgaagtccagagggtagaaaaagaggaccacgtacttccctggggaggagggacacagaggagttagggcccagcttctctcatgcacggcc

SEQ ID NO: 246403 - DNA, 122 bp, Homo sapiens
gctttcactaggaaaacacaagtccagcctgaaagaattcatgaagtgcctgtgacctgacgttgaggatcacatgggactgtcgtcatcatgatctcgtccccaggctgccccggcggaac

SEQ ID NO: 246404 - DNA, 122 bp, Homo sapiens
tacgggtagaggccagtgactgagactctcattgcgggagggggcgattagtcgcaaagccgcccattccaggatttggagatgcagctccagcacacccttctttctctgtctgcccttag

SEQ ID NO: 246405 - DNA, 122 bp, Homo sapiens
gcttgacagaaagaggaagaagccagcccccaggaatggcaaacacgttgcgaaaaggaccgcgtgcagggttggccgggtgcactggcagcagccaggcaatatcatctcaggtcaaggag

SEQ ID NO: 246406 - DNA, 122 bp, Homo sapiens
cagccatggcagaggaacctcagcttaaatagtgtggagcggccactggtttccgcggctcgtagtcgcgcccgcgaggaaacgccagggaggcttcctgccccgcccagcggtggcccagg

SEQ ID NO: 246407 - DNA, 122 bp, Homo sapiens
agctaaaccaaggaaactgccctcctcccttcccaggcttcgagagcaggcagcatgcttcggttccccacccagaggctgaaggcatgcctgagcagagagttaatctttcatatcctgcc

SEQ ID NO: 246408 - DNA, 122 bp, Homo sapiens
ggcgttggagcagctcagccggcgttgctggtcagggtctcccgtgaggctggagtcagccgtgggttgagctgctctcctctgaaggtttaactgggcttggggctcagcttccaaggtgc

SEQ ID NO: 246409 - DNA, 122 bp, Homo sapiens
tttctacaattaaaatcatgtaaggatctgcctcaaactagcctctgttcaggggcttttcgggtaggctagaacaaatgactttcaaggtctctgccaattctaaggctctacagtaatgt

SEQ ID NO: 246410 - DNA, 122 bp, Homo sapiens
tttatcagcacaaaatgtcacataaatcctaaatctggtttagtgtaaggaattgttattcgtcacgcacagggtagcatttggaattcatttatctgagttctgttgccttgttttcagaa

SEQ ID NO: 246411 - DNA, 122 bp, Homo sapiens
gcactgaaagccccaagtcctggaaaacacctcagtcccaggtacactgggacagttggtcgcctaggaagcttgttaaaaatgcgaattcctgagcggactcctggctcaattaatcaaaa

SEQ ID NO: 246412 - DNA, 122 bp, Homo sapiens
ggcgggcgctgccttcctggggtgacgcagcagcaggaagagtttccggatcctggaatccgtgggcggcccgtgggaggggctgaggctcatttctctactcacctgtctccgaatccgtc

SEQ ID NO: 246413 - DNA, 122 bp, Homo sapiens
gctgatgagtttctccagctctgagtaggcagtgacaccctgtgattataaataacctgccggcgcctgggtcagctgccaggccaaggcccagggaggctcctggggcgacagctgccacc

SEQ ID NO: 246414 - DNA, 122 bp, Homo sapiens
tgttctcatttaactgttggccggaaattgccggtaggctgccgtggcctgaccctactacgtgcacaactccgcaggcattaggggaggggtcatctgctctaattaggtaacaggggcaa

SEQ ID NO: 246415 - DNA, 122 bp, Homo sapiens
agggtgacatgagagcagtggaggcgcccgcctgttgcagggcccagcatcgagggctgccgctgtccgcatcattgttgtggatgatgctgttaccgttgccatcatcattttcacggtta

SEQ ID NO: 246416 - DNA, 122 bp, Homo sapiens
ggcttggacctacgtggttacctccaagtgaagtttcaaacacactgttatgtattgtaccgaatgtattgtcatggatgtattgaaagcgctcatttgtttcatgtacatctttactatac

SEQ ID NO: 246417 - DNA, 122 bp, Homo sapiens
agtgagactcagagtggtgaggtgacctgcataggtagggtgggagaaaagcctgcggagcgtgtactctggcttggcctccctcagctctgtccccagcaagcgggtcccacctttcccgg

SEQ ID NO: 246418 - DNA, 122 bp, Homo sapiens
ggctgcaggtcccgagccctgccctgcggggagtcagctaaggcccggcgagaaatcgagcgcagcgccagtgggctggcactgctgggtgacctgacgcaccctccgcagctgctggcctg

SEQ ID NO: 246419 - DNA, 122 bp, Homo sapiens
tggagacgtggaagatctggccctgatggaggatcagagggagcaggttgggtgaaagcccggttttaagcctcttgttctagggaccacgttgagtgacagggtgggaaaagatgcatcaa

SEQ ID NO: 246420 - DNA, 122 bp, Homo sapiens
tcatttcctggtggaatcaggacgtgccccttttgcggggagtggtggtggtgagggagccggtgtgcaatgaggtgtctgccaagagcacagggcaattccacaacacagcagagaggggt

SEQ ID NO: 246421 - DNA, 122 bp, Homo sapiens
atcattccctctgagctattaactcaggcatgaaatcttacgtacaattcatcagtatatcgccagtaccaaatacacagaagaggttcagtatttgttatgtgaatgataccattaatggg

SEQ ID NO: 246422 - DNA, 122 bp, Homo sapiens
gcgaggccatcctagggttcgggtgcagggacggctttggggggcacttttctgaccctgcgcttcttcgggacccagcctttgtccccatcagccgcctcccactttacggcagacgtacc

SEQ ID NO: 246423 - DNA, 122 bp, Homo sapiens
aattttgttgaacgtttcaaagtcagtggctagtttctcttgtcttttcccttctcttctcgtctttcccgtctgtctgtctgtcctgctggctttcttcacttcggggcagcaccctcagg

SEQ ID NO: 246424 - DNA, 122 bp, Homo sapiens
gcatagaagaaagaaatctctaagacaaagttcttgggagaacacatcagagtaaatgttcgaatctgtatttgctcccttacttttccttatcttttatcccattctctaaacttcccatt

SEQ ID NO: 246425 - DNA, 122 bp, Homo sapiens
gatcctcagtcagatcactcagtccatgatcctagacgcaacttggatacagagggtgaacgttgtgtctgctttaccaataaaatgtaaaacatttatttgtcaagcataacgtgtgattt

SEQ ID NO: 246426 - DNA, 122 bp, Homo sapiens
ccccgaggggtcgtgtacggggaggctggatgccgggacgggggggatccactccagactcgcgccaagccaatggaaagcctcctatccaatatcccccaggtagtcgcgctgcccacacc

SEQ ID NO: 246427 - DNA, 122 bp, Homo sapiens
caacaccaaagcgccacgcccggcggcccagctccagcaaacacagcaccacgttcttcacgttcttgcgcagcaccaagtcctccgtctcgaacatcagcacctctggagtggaggcgggg

SEQ ID NO: 246428 - DNA, 122 bp, Homo sapiens
tctgacccagtcagtctcttctgtgcaaccacggtaatcttttgaaagtgcaagtccaatcgtgttttcccgaattaaaaagcttttgctggctgtacatcttcacagaatataccgaatga

SEQ ID NO: 246429 - DNA, 122 bp, Homo sapiens
tttcaggcaaatcattatgcagttctaattagaacaatcttctaaacactctctccagagcgacgttcttccaaacacggtttaagcggcgagagacacctgcctaggaccctacgcgtctg

SEQ ID NO: 246430 - DNA, 122 bp, Homo sapiens
acgctccgggggggccagttcagcgacccacccctaggtgcgcattctctttctcagggacgttccatgctgagaaaaggaattcagtgatatttctcccatttccttttgaaagaagagaa

SEQ ID NO: 246431 - DNA, 122 bp, Homo sapiens
aggagtgccgcccccgacgtataagccaggcctgtacgtggaaaacagtctacacagggccgtagcgtcaagcatcggcagggggtctcaggacgggtccccgagggggagggcagctgtgc

SEQ ID NO: 246432 - DNA, 122 bp, Homo sapiens
acagcaggtaccgcacaagcccaagctctccttcccctgtcccgctacccttgaggatgacgccggcctacagctctgatgacagacgcacattaggggtataatgagcttcccgaggagct

SEQ ID NO: 246433 - DNA, 122 bp, Homo sapiens
gcactgcgtagaaccatcagaggacgtggacacgctgtcctgagagaacccctagaatcacggagaaactgacagcctggtaggaaagaaatggtcaagacactgaaatagtcatttcacaa

SEQ ID NO: 246434 - DNA, 122 bp, Homo sapiens
gctcagtgggtcgggcatggtggctcatgccattaatcccagcactttgggtggccaaggcgggacgatggcttgaggcctggagttcacgaccagcctgagcaacatagtgagacgccccc

SEQ ID NO: 246435 - DNA, 122 bp, Homo sapiens
acaggcctgggtctgacccagctcttctctgggacacaatcacgaagatgggaggatggacggatgtttcagaaggtcaggctaagacgtggtccagtagcctagcagaggtccatcaggtg

SEQ ID NO: 246436 - DNA, 122 bp, Homo sapiens
gtattaggttgggggaaaaaatcgtgtttttttgccattaaaagtaatagcaataactttcgccccaacgtaatagttgcttcattcctggagagtgggatctgcttggtttaccagccaga

SEQ ID NO: 246437 - DNA, 122 bp, Homo sapiens
gcttttccttttaagactccccttggtatacatagtaaactaaattcactctcatgaaaacggtgaagaggcagagatggaggctgccccctgcatattgaatgccattctcctacaagagt

SEQ ID NO: 246438 - DNA, 122 bp, Homo sapiens
ctgctccggctgcgaaggttctgctcggtacacgcgatagacacctgcatgctggctggccgaggcgggggagggggctccgaggggacgggaggggggagcagggaagcccgagggctgac

SEQ ID NO: 246439 - DNA, 122 bp, Homo sapiens
gagagaatgaatggggaaggcggtccggggggcggggcaaaggaggggccccgggatgggcggggcacagacccctttccaagtccgaacccctgccccgagagcccggagagaagcggctc

SEQ ID NO: 246440 - DNA, 122 bp, Homo sapiens
tctaatttagtattgtgagtgggtttttttgattttttgagtgagaagtcagcaggggaccggacttaagtatcacacccagaggcctcagccagcacccggccaccccgcccccaacaggc

SEQ ID NO: 246441 - DNA, 122 bp, Homo sapiens
cccccctcagagccgagctgctcgcctccctcgagacccagcgcagcctggaggagagaccgggtcctctcaggtggggcacttggtgactagagaccccatgagcccccaccctccagcct

SEQ ID NO: 246442 - DNA, 122 bp, Homo sapiens
cagaaggttacagcacattctcagtacttcggagaatgaagttctgagattctgattccacgccacattccaagttttgaatactggtaatttacgtctgattctacataaagttcttaata

SEQ ID NO: 246443 - DNA, 122 bp, Homo sapiens
ccagggtgtaccctgtgcttcgtgtatcgtttctgtgtatttttccttcttgagggtggccgcaacagactttcatcttattgactttttggttcaagcatcggaggccaggaggtgcaagc

SEQ ID NO: 246444 - DNA, 122 bp, Homo sapiens
ctccaggcccgggaggacctttctagggaggcacacacctggaatccaggtactatatttcgtggaatatacggtacccgggatttcgtgtgctgctgagaaggaaggcgatgctgatgtta

SEQ ID NO: 246445 - DNA, 122 bp, Homo sapiens
tgggggaccacagtcaagttgaggtgatccccgctccggggacggagtaaggcaaggaggcgggatcggaatgttggaggcagaaccgcaagctcccagggccacccaatcacagggccagt

SEQ ID NO: 246446 - DNA, 122 bp, Homo sapiens
gactccgtgtgaggcggccagctcgcgcctgcgcgctgaatgccgcgcggaggcgagccccggatcgcctgccctgcagagcagcctgccctgacgagccgcgctcctagcacgcacctgcg

SEQ ID NO: 246447 - DNA, 122 bp, Homo sapiens
gcctgaacgcacatgacatagcacttgccgatctgcgtgtgtccagaagtggcccttggccgagcgccgaactcgctcgccctctagatgtccaagtgccacgtgaactatgcaatttaaag

SEQ ID NO: 246448 - DNA, 122 bp, Homo sapiens
caaagttcttttggaggttatctagcttgaaacttaaataaccgaattggttggagcgatcgtggacactattaagtttgggaaaaattctgcttcggaaaacaaaagtaaatcataataaa

SEQ ID NO: 246449 - DNA, 122 bp, Homo sapiens
gagttaggcctgcccctctccaccctttgtaataacatccatagtagtaataagagttctcgacactgacggaccacttgttacgcaccaagccactctgcgaaatgctttgtatacattta

SEQ ID NO: 246450 - DNA, 122 bp, Homo sapiens
taccaggggagtgagagactgagcactctcctagtgccaactgctctgccaaatgccacacggccacatcccaggcatctgtgcatatttgcttccatttcagggaagggggtgacttgtgt

SEQ ID NO: 246451 - DNA, 122 bp, Homo sapiens
tgggtgtggacttggtgtctctatccagggtggaagcctggccttctgtaatagccctgccggccctcctaaaaccagacctctctgagccccagccctgctgtgtctgtcactggggagga

SEQ ID NO: 246452 - DNA, 122 bp, Homo sapiens
tgccacccctgtgggcagcaagaagctgggatcgctgcagccatgttttcccggccatgccggcgttgtaacctcaggaccttcccttgtaggaacagcctttctcgaatctgttttcagct

SEQ ID NO: 246453 - DNA, 122 bp, Homo sapiens
tattggatgcgaccagcggaaccccgccccggccagcgcggagtagggaggagtggagggcgttgggagtggctgcagtgagccgagatggagccactccactacagcccaggggacagagc

SEQ ID NO: 246454 - DNA, 122 bp, Homo sapiens
cgagggcgagggaggacgccgccgcggtccgcgtcggtgtagctttttggagaggcggggcgggggacaccagaacaccccgcgatgttcagcccctccaaacccgccagagccctcgtccc

SEQ ID NO: 246455 - DNA, 122 bp, Homo sapiens
cctcagcgtcgcgatgctgccggtaggtcatccagcagcaggcctccacgtcggtctcgtcgatgccccagaagccgagctcctcctcaaacaggggcccgcacacgtcggctgggcagtgc

SEQ ID NO: 246456 - DNA, 122 bp, Homo sapiens
aaactctctgagagcagaggagggggcatttatttagcctgagtgttggggagggcttcccggaagagttgtcatttgagctctgtcttaagaaacaagagtagacaatgtactcacaatgc

SEQ ID NO: 246457 - DNA, 122 bp, Homo sapiens
atccgcctgccttggcctcccaaagtgctggaattacaggtgttagccaccgtgcccagccgtgaattctgtttttcaagaagtttggtaaggtaggcacattaaatgcgaaacatccaagg

SEQ ID NO: 246458 - DNA, 122 bp, Homo sapiens
acacgcacagtaatacacagatggaggctcaaaagacacgagtttcgcgtcctgaaattccgcttccagggccaagctttcttttctgatactgtttgtccctcgcgaggcaccgttgggtc

SEQ ID NO: 246459 - DNA, 122 bp, Homo sapiens
agggcagggcctttccacacccagctgtcaggacacgtttgctgaacaacttgtcaaaggcgcacaggagacagggccagggctgggccagggcaccagcgatgggtttgttcccctgcatg

SEQ ID NO: 246460 - DNA, 122 bp, Homo sapiens
cctatgtggaatgcaactaatccttttaggttcctgtcaactgtttccacaaaaggaatccgatttttcaaatcaaagatccaaaagtctttggggagagatttattacatgccagagcttt

SEQ ID NO: 246461 - DNA, 122 bp, Homo sapiens
gcgcccggagagtcccccactccgcccgcccgctcgcctgcgcccgcctgaaggaggcggcggcggcagccctggcagctccagcccggagcaggagctaaagcagcctcagccgcctcggc

SEQ ID NO: 246462 - DNA, 122 bp, Homo sapiens
tctcctcccctgagacattgcccaggcagccgggggcctcccacggaagcctgagcagctcgtcttgcttgcccttccctctgtgctgtggtgcgtgttctccattacctggaggcctgtaa

SEQ ID NO: 246463 - DNA, 122 bp, Homo sapiens
ggcagcctgaactgattaagacttggagagctcattgtgctaagaaactttcatctccagcgaacaacctttgaggaacttgaggcctgcctacaaccacgtgagtgtgcttggaagaccgc

SEQ ID NO: 246464 - DNA, 122 bp, Homo sapiens
gggagagcgatggggctctcagcggtgggaaggacccgagctgagtctgggacagcagagcgggcagcaccggtttttgtcctgggcctccaggctgtgagcacagatacgcagtattttgg

SEQ ID NO: 246465 - DNA, 122 bp, Homo sapiens
aggcaaatgatggactgatatccacatttcttcagccccatggcaagattctaagacactcggttcactcacctttttctgtttgagagatgtttgactcatttttttacctgttgaaattc

SEQ ID NO: 246466 - DNA, 122 bp, Homo sapiens
gtggtggatgccgcacaccaccccctgcagcctgccaccccaccaacttccctactgctgcgggatccgaagcagccatttgaagaccggactgtgagacaagccgcagagagagagaaaat

SEQ ID NO: 246467 - DNA, 122 bp, Homo sapiens
aggaggaggaggggaagaaggagaaggaggagggcaagaaggaggaggaggaaggggaggcgaccggaggatgaataccagcaaagccaggaaaaaggatacctcttctcaccaaggggcta

SEQ ID NO: 246468 - DNA, 122 bp, Homo sapiens
agctggctgggaagaggccggcgcagccccacccccgcaagtcacatgatcacccctctccggccactagggcgttccaaccccggcccctgggccaataggagccgagtcttcggaaaggg

SEQ ID NO: 246469 - DNA, 122 bp, Homo sapiens
ccctcccgccgaccgcgtccctcttgctggcctcagccagccgccgcctcctccgagccccgcacccacctgctcagtccgagccgcctgaccacactctgagcaccaacagacccgggcgc

SEQ ID NO: 246470 - DNA, 122 bp, Homo sapiens
tctgcggggctcggggcctccgtcagcaccgcggacagcgcccgggctctcgccccgggccggcccgcgggccctcctgggccactcaccagttgttgacttgcaggatggtgagccccgtg

SEQ ID NO: 246471 - DNA, 122 bp, Homo sapiens
acctgctgggtgagctcaccaagtcaaaccccttagaagtccagattctacccactgcttcgtttcccactatgtgggtcttccctgactccaggctaacacctccaccccaccctacccca

SEQ ID NO: 246472 - DNA, 122 bp, Homo sapiens
tatcgagcaccttataagtaaggtgccaggcaaagacacaatatcttttcccagggggtacgggttccagcctatgggatagagacctgaaaacaagtaagtacagcgtgtcataagcatcc

SEQ ID NO: 246473 - DNA, 122 bp, Homo sapiens
tggtttaattttgtctccatccttccagacattaaaacatagccaatatttagcagttcccgccattcaccatgagcacctccacagcccccaactcctctctcccagttctgcccaggata

SEQ ID NO: 246474 - DNA, 122 bp, Homo sapiens
agggatgtagtgcaaaggctggactctgtttgctggttaaccacgaacgcgacggtgggacgaggcaggagggagccggctccctgcgcctggcttgaggttctggctgctcagagtctctc

SEQ ID NO: 246475 - DNA, 122 bp, Homo sapiens
caaacctcaaagagtcctcccaaaggaaaacgcaccagctaagccaggtgcctccaggctcgtataaaggggaaggtgaggtcaggaggccaacagccattttttagaagaatgacaccgca

SEQ ID NO: 246476 - DNA, 122 bp, Homo sapiens
ctgacagccccggagccgctcccgggttccgcgcgcggtggcagccaggccgtgcctccccgttcccctcccgcgccgcgctgcccctccgggacccaccaggcctggctgcgcctctttcc

SEQ ID NO: 246477 - DNA, 122 bp, Homo sapiens
gaccttcgcggtgagtgttatggctcttaaggtagcgcgtccggagttgttcgttcttcccggtgggctcgtggtcttgctgggctcaagagtgaagctgcaggtcttcgcggtgagtgtta

SEQ ID NO: 246478 - DNA, 122 bp, Homo sapiens
agcttcaaatgctgggctttaagaagctgggttgaagtatggatgaaggtctaaattttccgggtatgaggagttaaggcaaatcctacagagatattaacttgttcttttttacatcacct

SEQ ID NO: 246479 - DNA, 122 bp, Homo sapiens
gcagccgccagaggggagcacgggacctgcgctcgccagatcaggcggcacccttccccgcgtgggaggggcgcgtctcactcaaccgcctcgacccccacaccaacgagctccctcaggac

SEQ ID NO: 246480 - DNA, 122 bp, Homo sapiens
atctatttaatagtcagcttagaaacttttcaccctttggcttttctcccatcctggtgtcgtatgtcagtagcctttagcaggatttaactattagagttcaaacctgctgtttgttttcc

SEQ ID NO: 246481 - DNA, 122 bp, Homo sapiens
cttgagtgggggcacgtcgcagctctctggagtcacccagaaggggcagtcagaccttcgcgtccagaccaccatgatcttgcccttggtgtggttcatcaggcacaggggtacagggttgg

SEQ ID NO: 246482 - DNA, 122 bp, Homo sapiens
agccactgcggtttcagctgcatccgataggccccaagcgggaggcgattctgaggccagcgctggcccaaagaccagaggacctgagcaaaatgaaaagtcactttgttcctcacgccgtg

SEQ ID NO: 246483 - DNA, 122 bp, Homo sapiens
cgaaggccaacagaaaggggcagaggtaaatccaaacccaatcccagtagatttcagagccgttgcttttcccactgcaatgtcagccctgtaaaccggctgggtttctacagaggtatggg

SEQ ID NO: 246484 - DNA, 122 bp, Homo sapiens
aaagcattggcaccgcagcagcctcccccgcttcttccctactaggacgcccgcctgactcgccccattgcacaattcttaccgtggaacagccgcgtgactcggcgggagcccaaaagttt

SEQ ID NO: 246485 - DNA, 122 bp, Homo sapiens
atgagacgagcgtggcggccgcggctgctcggggccgcgctggttgcccattgacagcggcgtctgcagctcgcttcaagatggccgcttggctcgcattcattttctgctgaacgactttt

SEQ ID NO: 246486 - DNA, 122 bp, Homo sapiens
gcgggagatcatgtcagccgtggtagctcagacgctgcatgtttttggtcttcgatcccacgtggccaacaatatcttctacttcgatgaacagatcattatatttccttcaggaaatcact

SEQ ID NO: 246487 - DNA, 122 bp, Homo sapiens
attaaactactcctccaaagcaatgtgccctcactggcccctccccttgagaatcaacctcgagatctagcatctattttgcaaacgaagacagcaggaacgggcgggctaaccgtcgcagt

SEQ ID NO: 246488 - DNA, 122 bp, Homo sapiens
gccccctgctcagaccagtcaaaacaacctgctttccagccaagcccttcagttggagcacgaggctcactaaagcacgggaagggcgcggaaagtcctcagcgcaggccttgccctcccaa

SEQ ID NO: 246489 - DNA, 122 bp, Homo sapiens
tcgaagaccacgaaggcatcgtagggcagggcatcctcatctcgcccactttgccgcccccgccagggaagccaggccaggcacaggtggaagcagtaccagaggtcccagccacagaggtg

SEQ ID NO: 246490 - DNA, 122 bp, Homo sapiens
tagagtgtatttcggacaggggtggttctctctggctcctcgagggggaagttggggcggcgacgcagccaggaccctcggctttctccaaagctgcaggtgctcgggtgcccaggtggtcc

SEQ ID NO: 246491 - DNA, 122 bp, Homo sapiens
gagctgaggcgggagctgtatgggtgccatccgaagaagcatagatcaagatcccagtcccgggagcgtagttctcggtctagagaccatggcggtggcggtggtggaggcggcggcaggcg

SEQ ID NO: 246492 - DNA, 122 bp, Homo sapiens
ggcctcccgccgtcaagtttctctttcagtttctggccgtccccctcactagggaagctccggtggggcgaggggagaggaagacggggagggcacctgcctctgcagagcaccttcccctc

SEQ ID NO: 246493 - DNA, 122 bp, Homo sapiens
tatgtagtaattgtccggtgtggcgttcagtgccctcaagcatgggaatggagcccttgacgggcatctgtgactgaccctttcctgtactctgtacaagggggcctcgctcccctggcagt

SEQ ID NO: 246494 - DNA, 122 bp, Homo sapiens
taacactgtgatgcattttgggcttggagagaggaatgctaactgtttgacttccatcagcgcagggaagccctttagttttggggtctcgtactttccaaatgacttaatgagaatgacca

SEQ ID NO: 246495 - DNA, 122 bp, Homo sapiens
gaaccatacattcatcatattgttgcacagtaagactatacattcattattttgcttaaacgtatgagttaaaacacttggccaggcatggtggttcacacctgtaatcccagagctttggg

SEQ ID NO: 246496 - DNA, 122 bp, Homo sapiens
gcctgggccgtgtccgggcccacgccggacccgccggcacctcgatcttgcgcgtggccccgcacccagccctccccggagctcaggtgcactgggccgggagacaccgctgggctgcgcgg

SEQ ID NO: 246497 - DNA, 122 bp, Homo sapiens
cagagggcttcaggcacctcctggtcctacagcttgaaagacaaggcgtggggatttggacgtcggcatctggccccagggaccgcacagccactgggcttcacctctgccccctcctgtgc

SEQ ID NO: 246498 - DNA, 122 bp, Homo sapiens
tggaataaataattcaggttttgaaatcttgccaggcccacccctccggtgctgtgagggcgctattgggctgacatgagtgacgtcacccagctcttatcccagccccggcatcacgggac

SEQ ID NO: 246499 - DNA, 122 bp, Homo sapiens
gtaacccccgcctagccgggccatggcggaacgcggaggggcgggcggtggtcccggaggcgccgggggcggcagcggccagcggggatccggggtcgcccagtcccctcagcagccgccgc

SEQ ID NO: 246500 - DNA, 122 bp, Homo sapiens
gcggcagacgagacaaaagggagcgcactcaccagaaccactcgctaccgaagctgggcacggaaaacactccccagtggatgaagatgccgaacttggcctggtcaaaccacgcgggcagc

SEQ ID NO: 246501 - DNA, 122 bp, Homo sapiens
aaggcggcccgagcacctgctgttctcgcccctcagggctgaaattgggcatggagttggcgagggaggcctggcagggagggagggggtctagctgtgcgtttgctacagggccttcttcc

SEQ ID NO: 246502 - DNA, 122 bp, Homo sapiens
actttctctgcctcttagaggatttgtgcctctcatctatccagagtttcaatagtaacccgtaaattctttccttacatgctcagtttcctatccctgtcattactaagcaaatctatatg

SEQ ID NO: 246503 - DNA, 122 bp, Homo sapiens
tgcgtggtttctttagtaggcccggagggactgatctagcgtctccaagagagtggggcgcgtagctgctggagggggcggggacaccgcgactttctactgccccatcgcccttcctccta

SEQ ID NO: 246504 - DNA, 122 bp, Homo sapiens
taaacaaagaacataaattacaaactctggttatcaaatcccttaagcctttttcaaatgcgtcacaggatattcaaccccttcaattcttttaatcttcatcaccagggtactgtccatat

SEQ ID NO: 246505 - DNA, 122 bp, Homo sapiens
atatatttgggggttccttggaaggatcattaaaggcaggtgtttaccaactacagccaacgaactacagccaagctttgtagaaatgaacatttctttaacaactaaaaaccaaaaaaaag

SEQ ID NO: 246506 - DNA, 122 bp, Homo sapiens
tgtggaggacaggaaggcaacgggctgaagctgaaggacatagtcaaccatcctgctccccggctggacacccaccacacaccaagctctgtgctgaggatcattacattgtgccctcagaa

SEQ ID NO: 246507 - DNA, 122 bp, Homo sapiens
gagaaggtgaggggagagtaggaggagctgagatcagagagatttagggggcaggtcattcgagtcttgggattattgcaggatgttgggttttactctgagcgcaatgagaagagctatga

SEQ ID NO: 246508 - DNA, 122 bp, Homo sapiens
cctggaagtacatgcgatgcctccgctgacacgtcccccaccgctgtgtggccttttccccgagtgttcttgctgcaggcccgggtgccagcacctgcacacgaactctcggctgccctctt

SEQ ID NO: 246509 - DNA, 122 bp, Homo sapiens
caggagcaacagcagcagcagcagccgccaccaccccctcagctccagccgcagctgccgcggcactaccagctggaccagctgccagattattacgacacgccactatgacccagccgagc

SEQ ID NO: 246510 - DNA, 122 bp, Homo sapiens
ctgcaaaagatgttgtctataaatgtgaccttttttgcaaacagggtctttgtaaatgatcgaggtaagataaggtcattagggcaggtcccaattcaatatgattttttccttataaaaag

SEQ ID NO: 246511 - DNA, 122 bp, Homo sapiens
atatacataaaggagtatacagtgcatactttttcatttaatacatcttgaagtaatttccgtttcttttgttttttcttttctttctttcttgagacagagtctcactctgtcacccaggc

SEQ ID NO: 246512 - DNA, 122 bp, Homo sapiens
aaacccttgcgatgctgggcagcagcagtgagctgcagctcccagtcagctatatggtcacgagagtagataaccataccctacagtgtactgtgctgccagatgattttgcccaactgcag

SEQ ID NO: 246513 - DNA, 122 bp, Homo sapiens
actctgtgactgatcgggtgctcctgagaaacgggctccctgtgctgctcctggggtgtgcgtcattttcccgtgtcccgtgtcctacgggttccaggcactacaattcactggtccactct

SEQ ID NO: 246514 - DNA, 122 bp, Homo sapiens
cgtgactcgggcggcggcggcggcccaggatcaccccggcgtgaggagacgctcgcggtccgttcagttcatctgtttagagggccttttaaggtctctcgacttcctcaaatagaggaacg

SEQ ID NO: 246515 - DNA, 122 bp, Homo sapiens
ggggcggggccagaggtgggctgaggccggatcaggcggtgggggcggtccccgtagccccgtgaggctcgcgcctgcgcacgggcccgcggcggggcgggactgcgcgtgcgcggtgcgcc

SEQ ID NO: 246516 - DNA, 122 bp, Homo sapiens
aaccgggtgggaggcagagacacccagaaacagagacggggcgatacgaacagacaaagccggctcgagcgcggcccgagcggcggcgcagggaggcggcagcctggcggagcagcccccac

SEQ ID NO: 246517 - DNA, 122 bp, Homo sapiens
aacgtggcgcagtataacgccaaccatcccgacttccccatgcagatcgagcagctggagcgctacattcaggtcagggggcatcaggggcttcacagagctcaccactgcgccagaccaca

SEQ ID NO: 246518 - DNA, 122 bp, Homo sapiens
ttcttttcacccacagccttgtgttcctgtcaaccctcctttcagcaaaagtcctgttcccgttccctctgtccccacccactcctgttccccaagaaaataagctatcattgttgcatttg

SEQ ID NO: 246519 - DNA, 122 bp, Homo sapiens
ttcctatgacagtgtctgaacctttctttttcccaggagtaggaatggcccctgctcccgcgcagcctccaggctgcaccacgctcgccccgcctctctctccgctccttactccgcccacc

SEQ ID NO: 246520 - DNA, 122 bp, Homo sapiens
agcatcctgtttacaaagggaaatagtagaatcagcacttaaattaaggcagggccctagcggcttcaagtaaccctacctgaacccctgtctgaaatactgcagatgacctgggttcaaat

SEQ ID NO: 246521 - DNA, 122 bp, Homo sapiens
aaatgccttacttatcgcctagtgtgacctggcgcttgggtttactctccccagcaactgcgcctcaaacgcaaagaaaactgcaggtcctcggggaaggatcgatttcaccattcaagaga

SEQ ID NO: 246522 - DNA, 122 bp, Homo sapiens
cagagtccctgaatgccttaacccggaattctgctcaaggagcatgcgcagagcgtgggacgcgcgtgcaaccatttctgaagagggcaaaacacccgaacttcgtcttaaagaaacagaaa

SEQ ID NO: 246523 - DNA, 122 bp, Homo sapiens
agatgactgtagtgtcagggggccccagtgtggctggcgggaactctccggctgacctggcgcctcctaggggaggggcaggctccggctgcctgcgacagagctactctagcatcaccgtg

SEQ ID NO: 246524 - DNA, 122 bp, Homo sapiens
agttgtgatcgggccgctataagaggggcgggcaggcatggagccccgtaggaatcgcagcgccagcggttgcaaggtaaggccccggcgcgctccttcctccttctctgctggtctttctt

SEQ ID NO: 246525 - DNA, 122 bp, Homo sapiens
aaaagagaaaacaagggagcaggaaaactacgctagcactagactgccggtcgcaagcgccgggtacacacgcagttaaacctcaatggaacgcccccgggacttctccggggcgtaaagcg

SEQ ID NO: 246526 - DNA, 122 bp, Homo sapiens
ctctggggagcgctggagtccacagtggttttttcctggggagggcctcaaagctctcaccgccccctcttccctattcccactaggggagctggcatacagtaggcgctcaatacaggagc

SEQ ID NO: 246527 - DNA, 122 bp, Homo sapiens
agcggcgggtccggcaggatttaggtgcaggcccaagcagctttcactgctcctgctgcacgcgagctcctgctgctttccatcaggcccggccctgccgctaaccgctgttatctggggcg

SEQ ID NO: 246528 - DNA, 122 bp, Homo sapiens
agggtttcaccatattggtcaggctggtctggaactcctgacctcgcgatctgcccacctcggcctcccaaagtactggaattagtacaggcatgagccaccgcactagctgggttgtcctc

SEQ ID NO: 246529 - DNA, 122 bp, Homo sapiens
cccatttgcagatatagtaaaagatccataaccccaaactttcaccagataccacatcatcgaaggagggcggaccaatagcattagtccgttttcatgctgctgataaagacatacccaag

SEQ ID NO: 246530 - DNA, 122 bp, Homo sapiens
atagacctcactcccgaagaagccggggactgaagtgctgcagcacccgctgctcctggccgggctggagcctctcttcagaagggcagcagctcgcttgtcacagaccctggactgcagaa

SEQ ID NO: 246531 - DNA, 122 bp, Homo sapiens
tgggcgcggtggccggtgagccagcgcgggggatggcttgatttgccctcgtctgctttacgggttcaaatagaatatatttttttaatcaccatcaaaagaataaagcccctgaatcgcta

SEQ ID NO: 246532 - DNA, 122 bp, Homo sapiens
gcagccagaagtagcactgtaccactgtgttttcaacctgcctctatcccaggaaagggccgaaaaagaaaggcagcccccaataattcctggtgctgggctatgccttgtcattccaatct

SEQ ID NO: 246533 - DNA, 122 bp, Homo sapiens
atagaatatttcattcatgctctgtctgaagaacaatttttcccatagaaaagctgggcacgtgaattctcaaccagatgaggggcctattcataacaatctcaaatgactaatgacaaagc

SEQ ID NO: 246534 - DNA, 122 bp, Homo sapiens
gcaaagcttttgtgcggccctcccaggcccgctgcagctgaacagctgctgggagggctccggagcgagatgctaacaggaggggaactttaattatcccaccgaatggcatcttgggcaga

SEQ ID NO: 246535 - DNA, 122 bp, Homo sapiens
ttgcaggggccgctcggcccggggaagcccgcgccccgctcagccttgcagccccgcgcccggagcatctccctggaggaacggagacaaaggaggattcatgtccaaaggtagggcggccg

SEQ ID NO: 246536 - DNA, 122 bp, Homo sapiens
gaaataagaagtctccaaacacgcgggcaatcagttgcacacagtacccccagaaatgtgcgtatggcctcttctaagatgggagaccctcctccgcatctggacctggagtcgccatttcc

SEQ ID NO: 246537 - DNA, 122 bp, Homo sapiens
gtgggagtgacggggggcagaaatcagctcggcagcatgcaagcagtagtggtcattcgccgtatgaatgggaccgctaaaaactgaacagtttcgagattgccagggtgctcagaaaaaca

SEQ ID NO: 246538 - DNA, 122 bp, Homo sapiens
cgaaaaaggaggcaacataatggccagcgatcgcctcgaaagaacaaaccagctgaaaatcgtggagatttctgctgaagcagtgtcagagactgtatgtggtaacaagccagctgaaagcg

SEQ ID NO: 246539 - DNA, 122 bp, Homo sapiens
tctactatactccggactcccgccgccccccgaacgcctggcacaagcacaacaccgacgcggggctcctcacgaccgtgggcagcctgctgcctggcatcacctacagcctgcgcgtgctt

SEQ ID NO: 246540 - DNA, 122 bp, Homo sapiens
atagacagctgctcatgcgcacttccagcccgcggccatgttggtgaggggcggaagtgtcgctctcgccccgcccataaactcaaactcagaactgccccacttccgctcactccatcttg

SEQ ID NO: 246541 - DNA, 122 bp, Homo sapiens
ggggactccaggaaaagccgttgagaggaccatcacaacctgagcagcacaggtaggttccgctcggcctcccaaggcgccggctccggctgagtggagtccccagccccaccccccggccg

SEQ ID NO: 246542 - DNA, 122 bp, Homo sapiens
gtgacaggctgggaccaaggccaggcctgtctgcctcctagactaggcctgagtgaggaccggcctgagtacggcccacctgcttcctcctccgtttagagcttgggctggagctgtcctgg

SEQ ID NO: 246543 - DNA, 122 bp, Homo sapiens
actcccttgcccaggaaagccgccagagtccggcttgtacctggggaagaatccttaagacggtctggcccaacactcctttgctcacagagaaaggggagaagactcccgagggtgaaaat

SEQ ID NO: 246544 - DNA, 122 bp, Homo sapiens
acaactacagtgacggagaacataccagtggttgcctggggctgggtttgggggagtgtgcgagtacaaggggatagcacaaagaaatttttttgaggtgatggaactatattctgactgtg

SEQ ID NO: 246545 - DNA, 122 bp, Homo sapiens
agatatttccttttccaccgcaggcctgaaagcgctcaaaatgtccacttgcagaccctacgaaaggaatgtttcaaaactgctctatgaaaagcaatgttctactctgggagttgaacaca

SEQ ID NO: 246546 - DNA, 122 bp, Homo sapiens
atgtcggtggccgggaagacctttgagatcagtgtgggagtaatggcccacgtcggtggccgggaagacctttgagatcagtgtgggagtgatggtccatgttggtggccgggaagaccttt

SEQ ID NO: 246547 - DNA, 122 bp, Homo sapiens
cccgtggaccctcccacctcgcgggtagaggaagtccttcagttcaggcacaaccctgagcgtcccccgcagtctccaactccggcgccagtcaggttgtggggtgggggcggcggagggcg

SEQ ID NO: 246548 - DNA, 122 bp, Homo sapiens
gggctcaggccttgtaaggagtgggctggggcggctgccagctccctgctccctcttccccgggggccgctagagcaggaagcagtggggtggggggctctaaggttgggggcggaggaggg

SEQ ID NO: 246549 - DNA, 122 bp, Homo sapiens
gcagcagaaccctccccggcactggggtagttgctggtaaagccctgagggtcccgccagcgcgtgagttggaagctgaattaccgcgagaagtacagtcttgccgaggagacctctgggaa

SEQ ID NO: 246550 - DNA, 122 bp, Homo sapiens
ctgcttagtgacgcgcggcgtcccggaagttgacagatacagggcgagaggcagtggaggcgggacttggataggggcggaacctgagactacctttctgcgatcacaggattcccggcggt

SEQ ID NO: 246551 - DNA, 122 bp, Homo sapiens
ggccagggggccttccggaccccacaatttggggccggtctgcagcaacgagggcagcatcgggaatgcgagcctcctcgcccggccgggtaaacataagcccagagcccggcggggcctgc

SEQ ID NO: 246552 - DNA, 122 bp, Homo sapiens
atggagggaccccagaaggggtggtggtgctggtggtggtcatggcctctggggccctggcgagagcaccgcgggggtcgagaggccagccacgccgatggaagggatgtgcacctgggcgc

SEQ ID NO: 246553 - DNA, 122 bp, Homo sapiens
ggtggaactctgactccatggttcactttcatgatggccacatgcctcctgcccagagcccggcagccactgtgcagtgggaaggggggccgatacactgtacgagagtgagtagcaggtct

SEQ ID NO: 246554 - DNA, 122 bp, Homo sapiens
cgaagggcttgccagtgagccttaatgactgattgatcaagtgggagggcactgcactggcggtcagagaactgttctgtcactgacttgctcttgtgataatggtaggctagtgcatttct

SEQ ID NO: 246555 - DNA, 122 bp, Homo sapiens
ttatgtttgcaagccttctcaacaggagccaccagacatagccacttggatataatcttacgcatgccattcccagcacattgaaatactacattcaggagacagaaaaatgacaatgtttc

SEQ ID NO: 246556 - DNA, 122 bp, Homo sapiens
ttaaagatacaaaaattagccaggcggaagaagtcacttagctcttcgctggttgtcacacgtccggaggccgagccgtcgcgtacctaggatacctggaagccgaagccacacctcccgca

SEQ ID NO: 246557 - DNA, 122 bp, Homo sapiens
gagtcttttttttgaaaaccagccgctgggataagaacacaagctatttaggcaatgcaacgccacttgtttctcaaagtcactcctcaactcagacatattcaaagagagacaaacggaca

SEQ ID NO: 246558 - DNA, 122 bp, Homo sapiens
aacaccggtgggattcgtcagcccccacagaggccgcggggaaaaaacaccggtgggattcgtcagcccccacagaggccgcaggggaaaaacaccggtgggattcatcagcccccacagag

SEQ ID NO: 246559 - DNA, 122 bp, Homo sapiens
aaggtagacttgtgcttaagttaatcagaaatgatcagcacacccgttagtagagtatcacgcaatgtcacatggatggtagtagtgagatttgagatcatatgatctcaactatagaagtc

SEQ ID NO: 246560 - DNA, 122 bp, Homo sapiens
aactaaatctgcttttataagcttatcaagcctttcaaatttacagttaatggagaacaccgtaatttgagatgtcagaaaatgcatctcagatggagaagggaacttgcagagtccttctc

SEQ ID NO: 246561 - DNA, 122 bp, Homo sapiens
actccggacacactaggaagtggtggcaggggtgtaatcataggcagtctggctctaaagcggtggcctctcaaccacagtgtccatccagttccttgcctttccggcagggtgacacaagg

SEQ ID NO: 246562 - DNA, 122 bp, Homo sapiens
acaagcacaaaagagctgaccgctatgaatggaggaccagttcattatggtcagccatgtcgcttctgatgttcttcctttcgggacttgctgtgcttcagagaatctgaaacgacaggtct

SEQ ID NO: 246563 - DNA, 122 bp, Homo sapiens
tgggaggaggagagattggagggaggctcacaggccccacctgctctgatgcccggcccccgtgctcctgcccacaggactgcgtcgatccctgctgtgattctttgacctgccagctgagg

SEQ ID NO: 246564 - DNA, 122 bp, Homo sapiens
gacgggtggaaggggtggagaggagagaaagcaggaattgtagcaaaaagctccagcgggcgttcccttggcttgctagaggacaaagaagagaagcctgtccacttcatctccactttaat

SEQ ID NO: 246565 - DNA, 122 bp, Homo sapiens
ttgtgggagcccctctcagctgtgacactggaaatccatgacttattccccacattataacgcagacacttgtaattctgtctgggaataggattacgcattcctaaattatttatttattt

SEQ ID NO: 246566 - DNA, 122 bp, Homo sapiens
ccaaagtgagggtcatgggaaccccaacttgaatccttttggtctcaagtttggaaaccccgaacttacaactagtgccttgagtggacagtctcagagactgagccctcagcctgtgggat

SEQ ID NO: 246567 - DNA, 122 bp, Homo sapiens
gatgtgtggcccctccaaatctcatgttgaaatgtgatcagggttgaaaatcggcctggtcggaggtgtctgggtcatgggtgtggatcccccaggaatggcttggtgccccgcccttggta

SEQ ID NO: 246568 - DNA, 122 bp, Homo sapiens
agataggaggaaaacaaggaagccaggccaaacgtcttggttaactctccgctgaaaggacgccacatgagatgatctaagaagccagccagccagccagacgcagggaaatcacagcaact

SEQ ID NO: 246569 - DNA, 122 bp, Homo sapiens
attgcttgctttcactctaatgccttacagagctgggagctgtttttgatatgcatatgccgatcattagcagtaaatgaccttaataatggcattcatcacttacatttgcagaacactct

SEQ ID NO: 246570 - DNA, 122 bp, Homo sapiens
cggaaagtctatgaaataggaagagaggttagaaaactggatcagtcaagggactttttacgcccaagtttcatgatgtgactggtgctttctgtcctagaataatgtttcctgattcctct

SEQ ID NO: 246571 - DNA, 122 bp, Homo sapiens
gagggggaggttgggagggagccgccgccgcgcgcgtgcggccggcgccgccgccgttgccgctccgctcactccagcctgtttgggggcactttgtttgtgtcccacaatgctctgcgccg

SEQ ID NO: 246572 - DNA, 122 bp, Homo sapiens
caggtccgaaatggagttgcctccgaggtggggtcgcagggactggtctggctgctgctgcgccgcacgcggagagacgtccgggatcctggctcgcgtcgagctcgacgagggccggagtt

SEQ ID NO: 246573 - DNA, 122 bp, Homo sapiens
cggtactccaggactcaggccaagcccgcacagagtgaaataagcgctcccagatgctttcgtgaagtgaccaggcagacctgtctgcgggttgtggttctctgtggttaaacaagtgcctt

SEQ ID NO: 246574 - DNA, 122 bp, Homo sapiens
ttataccgaatccaaacccaggcgagaactacggactcttgaaatggtcggtgaaaggggcgaaagcaccaggaaatcgtgcttcaacagtccatgactgaaaggagggcctgaaactgtgg

SEQ ID NO: 246575 - DNA, 122 bp, Homo sapiens
cacgccgcaggaagtactggtggccctggtagttggggcgctcatagatcatccagcagccgctctccaccctgatggagttgcagcggctgaaatagggttgtaggttggggcagtcagtg

SEQ ID NO: 246576 - DNA, 122 bp, Homo sapiens
tcattcacatcagctcacactgcagggtaacttgacatggaagtacaatgagtgggagatcgtggctctctttcatgcattcctgtagagtgacaagagccatccaacagagcatcctcagt

SEQ ID NO: 246577 - DNA, 122 bp, Homo sapiens
tctcactatggaaaaagagagatataagtatggaatgggggaaggggaaaaagaatctttcggggtttttttgtatatcttgtgggtctgtccactgaaaggactgtggaaaggaacacacc

SEQ ID NO: 246578 - DNA, 122 bp, Homo sapiens
atgatgtatatgaacaggacgggcttgctgctgagtgcttaatggtgcataagattaagccgaggctctcagctgcgcagcgactcccctccggttcccatgttgtcgaggcatgctgggag

SEQ ID NO: 246579 - DNA, 122 bp, Homo sapiens
ggggtcagggttcagggcctggggaacagctctcagaacttacagagaggccttgactcacgtgtgtaaaagctgtttgcttgttgaacatccgtaaaagaggcctaagttaacacctgaaa

SEQ ID NO: 246580 - DNA, 122 bp, Homo sapiens
ctccaagggcagagaaggccatgcatgcttagtagaagctccccgggcaaacaaagcaggcgagacctacggtaattttatggtgggcatgtgagacacttgttgattcctccagagccttt

SEQ ID NO: 246581 - DNA, 122 bp, Homo sapiens
ggaaaaggcaccgcggcgggaggcagagcctgagtgacagacaggaaggggcactgcaggcgagagggcaacaagacagcctcccaacagacaggaaagggcactgcaggcgagtgggcagc

SEQ ID NO: 246582 - DNA, 122 bp, Homo sapiens
gcaggcagccgaggccggttcgccggtcacagcgaggcgggtggcggcagtggtgacaggcgacgggcggggccagagaagaggcccaagtcttccagggagggctcagggggtccccagga

SEQ ID NO: 246583 - DNA, 122 bp, Homo sapiens
cgcgccacaagcactgagagtggggtctgcgggatgggggtgaggcagccacggcatcgccgccccccacgaggactgggctccatgctgacggagggccgggatcagggccggagaactca

SEQ ID NO: 246584 - DNA, 122 bp, Homo sapiens
gggcctgtcggaggaggctgagcagagacttccgtctgggccccgagctttggcagtgcacgggaaggcgccccctccctctggcccgaggctcccttgctggtaggggcagcgggcagccc

SEQ ID NO: 246585 - DNA, 122 bp, Homo sapiens
cgcgacggtccgtggcgtccaccctcgcagcttctttcttgaagtcgccgagaccaagagcgcaccgaaaggaaccaattgtggacacatccgttttgtgagttatttcttcttcccttttt

SEQ ID NO: 246586 - DNA, 122 bp, Homo sapiens
taataatatgttagaaacatacagtgtggcatttagtatatacactcccttgctcgcaagcgaaaaatcctaatcgcttctgtataacatgctttattttaaagcctaacctttaaaaacac

SEQ ID NO: 246587 - DNA, 122 bp, Homo sapiens
gtattttaagctttggaagccatttggtctctgtcacaactgctaaccctgctgagccaccgtaggtaatacaagagtgaattagcctggctgtgttccaataaaacttgattgcagaaaca

SEQ ID NO: 246588 - DNA, 122 bp, Homo sapiens
ccgctcaggaagctggagcacgtgagggaaaagccctgtccccacagggctgaggctggacgaggtccaaggaggggcttctgcccgagcccaggccttccttggggtgtgctccagtagca

SEQ ID NO: 246589 - DNA, 122 bp, Homo sapiens
caatccgtccctgggccagcgtgctgcgcaagtctgttcccgcgcagaagtacacaccggcgacgggacagcgctatccctgctctggaactgagcccccagaggcagactccacaacccag

SEQ ID NO: 246590 - DNA, 122 bp, Homo sapiens
gcctgtacgctttaccccacctcaggaggcttggtctccagcggttgaggctggaagcaccggggtgcggtggaaagggctctgtccaggaagaccggatccgcagagccgggagtccgggc

SEQ ID NO: 246591 - DNA, 122 bp, Homo sapiens
gctgctgacagaaggaagagtaatactgcagagtaatgctgggactgtttgccaattgatcgaactagctaaatgattaatggggagatggcccattgagcactctagccttactataagaa

SEQ ID NO: 246592 - DNA, 122 bp, Homo sapiens
ccgggcgggggaagtgggcggagcgaggcctgggtagggtgagcggcctccgaagcggagcggggctctgaggagacactttttcttcctccctccttccctcctctcctcctgccttccct

SEQ ID NO: 246593 - DNA, 122 bp, Homo sapiens
gtgtgcgtggtaggttacaaacaagctcagacactgtccgaggtactcatccctggaggacgagaaaggcctttttacccagtaagatgggaacagtagttaagtggttcatcaaaaaagtc

SEQ ID NO: 246594 - DNA, 122 bp, Homo sapiens
ttagcattaaaaagaaaaaaagcaagcaagcaaacttttctgtgagccatggttctataccgttcactagaaatataaagggttcctgggatgtgcatggaggctggctcgggttcccctcc

SEQ ID NO: 246595 - DNA, 122 bp, Homo sapiens
caggataaagtcacacactttgtaattccttagctgacagagggcgctggatgtgatatgcggagggaaagactgactcctttttcagcagactgctctctgtcccctcccaagggggtggg

SEQ ID NO: 246596 - DNA, 122 bp, Homo sapiens
gttcatctctttgagcagttcctttaaggcattgcggactgtggcatggttccactgctccgcaggcaagtcttccaactttgaacaactgcaaaacagagcaataatgaacaatacacaaa

SEQ ID NO: 246597 - DNA, 122 bp, Homo sapiens
tttctaaaacgccttctgttccgcatgcgtttattctcttcttctgcacagaatttgctccgtggtgagcctggagatgtctctggatggggacagctccattcccagctacttctgcgggg

SEQ ID NO: 246598 - DNA, 122 bp, Homo sapiens
gtattgcctggggatgccgcgcaagctgaaagtctgtggctgggagaggatgccacggggcgcctgcggagaaatggggaaagtaaggaaggtttaaaagtaaagccattcacccaggaata

SEQ ID NO: 246599 - DNA, 122 bp, Homo sapiens
cccctcttcccctagatttcacagcagctccccgaatgtgcctgtgaatacctgtcagcccggggtgattaccattagaggtgtcgctgctgggtggcctgcagggaacggatacctgtgtg

SEQ ID NO: 246600 - DNA, 122 bp, Homo sapiens
cgccttcagacgccacagaaggactgcgagttggcaggcagtgtccaggacctcctggcccgggtgaagaagctggaggaagagatggtggagatgaaggaacagtgtagtgcccagcgctg

SEQ ID NO: 246601 - DNA, 122 bp, Homo sapiens
ggtgtgggatataatctcttggttcgccgttttttaagccagtctgaaaagcgcaatattcgggtgggagtgacccgattttccaggtgcgtccgttacccctttctttgactcggaaaggg

SEQ ID NO: 246602 - DNA, 122 bp, Homo sapiens
tctgaaacccagaggttccagctcccagctcagaattctttcagttgtaacacagtgatccggagagtgcagagccaaacataccatgccctgaactcagttgaaccattcagataatcgtc

SEQ ID NO: 246603 - DNA, 122 bp, Homo sapiens
ggcaggaggcggcgcgggctggctggtctctcccgagaaggttctctcccgagaagggtgcgtctcagggcttgtcagtggacccctggaacatggggaagacgcacagacaagggtttcgc

SEQ ID NO: 246604 - DNA, 122 bp, Homo sapiens
accaagtgtgtatgtattcaaaaaacagttgttttgtgattttaaaatgtaaatgaatggcgttatgctccatgtattctgcaacttttcatcatacattaggttttggcgatttagccata

SEQ ID NO: 246605 - DNA, 122 bp, Homo sapiens
tgttctggaggcagaagcctgacactcagcaggcatggcttctggtgaggagcctcctcccgggttgctgacggcacctgctcacggtgtcctcacgtggaaggaaggaaggtctggcctct

SEQ ID NO: 246606 - DNA, 122 bp, Homo sapiens
aggtacgcgtccagcaacttcagacgctgcggagtggagctcaagtactcttctaagaaccgcgaaatgacagacactaccgacgccgacataactgcacgcaaggtactccagtccgcgcc

SEQ ID NO: 246607 - DNA, 122 bp, Homo sapiens
gctaatgaactcgaactcggcaggctgggtttctgcgcgggcgtggagctggagcgcatgcgctcgtccgttaccataacgaccagaagacgctgcagccactagggaggagagcaaagtaa

SEQ ID NO: 246608 - DNA, 122 bp, Homo sapiens
ggaggaggagccaggagacattgggaatggacccaggagttccggacgcccgtcttccagcgcagcctcggtgggagggcggggcataaagtcccgccacgcccccacaatatttacatatt

SEQ ID NO: 246609 - DNA, 122 bp, Homo sapiens
aaaaaaagaaaaagaaaagaaaagaaaaaacgtgtcttattagcagccagagagtaaagacgattctggctttgaaggccaggtcgcttgcgtcataaccacgcaactccgctgctgctatt

SEQ ID NO: 246610 - DNA, 122 bp, Homo sapiens
aaccgggagggaggggaaaagaaaggccactccccagaagcggcgcctgaccgccgcctccgctaccgcggaatccaagatggcggcttcagcagcccccagcatcccagcccctgcggcgg

SEQ ID NO: 246611 - DNA, 122 bp, Homo sapiens
aggtgggcggaccaccggaggccaggagtttgagaccagcctggccaacatggtggaacccgtctctactaagaatacaaaaaaatagctgggcataatggcaggcacctgtaatcccagct

SEQ ID NO: 246612 - DNA, 122 bp, Homo sapiens
ctcaagtcatccgcccgccttggcctcccaaagtgctgggatgacaggcgtgcgccgccgcgcccggcctgcctagcataatgttttcaaggtccagctgtgctgtagcatgcgcatgcttc

SEQ ID NO: 246613 - DNA, 122 bp, Homo sapiens
gatttgtcttgtcaggagctgaccaggcctcgctgcttggtctttgccttcagtgtgccccgtcttcagtcccgctcgggcacctgcagctgagcttctcttgggacctgggacctggccca

SEQ ID NO: 246614 - DNA, 122 bp, Homo sapiens
ctggtaggttcctgggccaggagaggatagggcccagggcagctgagctctcacaaggtccggggctgtagtctaagaggatggcctcagcaaggtacaaaaggctcattgtcaaccctatc

SEQ ID NO: 246615 - DNA, 122 bp, Homo sapiens
tcagtgagggtctggtgtctgtgccgtgaatctcctgtgagtctggttctgggtgggatccgcagaggaggtcttgaagaggtaatgtttggaagagctggaaagcaaggctgtggttgatg

SEQ ID NO: 246616 - DNA, 122 bp, Homo sapiens
gttcaaatgattctgctgcctcagcctcccaggtagctgggattacagggattacaggcgcgtgccaccacgtccatctaatctttgtatttttagtggagaggggatttcgctaggctggt

SEQ ID NO: 246617 - DNA, 122 bp, Homo sapiens
tttctgttctttctttttgtggcattgtggcgtatttattcaacaggtgcctactgcgtgcgggcctgttgcaggagctgggatgtggcgggcaagggccctgctctccggaacaggcgttc

SEQ ID NO: 246618 - DNA, 122 bp, Homo sapiens
cgacacgcagttgatgcatggtgagtgtgccttcagcgctccatcgcggttctgctgacacgcagttgatatgtggtcagtgctccagcaggcagctgccaactgtgcctttgccttcactt

SEQ ID NO: 246619 - DNA, 122 bp, Homo sapiens
tgtcctgctttatttttctccaaagcatttatcatcgctgggtttatatttatttctcttcgggcttttctcactggatcgtaaactccatgaggacagggctttgtcgatttcactcaata

SEQ ID NO: 246620 - DNA, 122 bp, Homo sapiens
atgttgctctcccggccgcccccgccagtgtctgcgctgaacgactgctccatggcgaagcgcaggaagagcagtttgatgtcatggatgttgagctgatacgtgggctcccgctggcctgt

SEQ ID NO: 246621 - DNA, 122 bp, Homo sapiens
tgtttctagaacctgtgtgtggggcatggcaggggtgtggcaagtggctctggctggacacggagctaaggagggcagcctgcacttaggtccaacgcaccttgggacaggggacagctatc

SEQ ID NO: 246622 - DNA, 122 bp, Homo sapiens
cccctctgccatccggacttcggcagtctcaacttacaagtcaagcctctcggtccctggcggatcccgccaggccccgcccacccgtcctaggcccgcctccccgcctttttaagcgagcc

SEQ ID NO: 246623 - DNA, 122 bp, Homo sapiens
cttccgttaaatatctgctcctcgcgctcgagcctccctgcctattgtcggggccggaggcgagccgacgcagcatcagctcgtcaacgggaaggaagatgcctccctgcacgcccgccgcg

SEQ ID NO: 246624 - DNA, 122 bp, Homo sapiens
agagaagagccagtgctggtgaaagtatcattgagtctgagatttgcggagatttgctgacgctgctggaagggtctgaacgaatgggaaacagctcagaggctgaacccagaccccgcagg

SEQ ID NO: 246625 - DNA, 122 bp, Homo sapiens
caaaaggttaagccatatgacaatttcaaaatgcatgtgattggcagcttcaaaacagaacgggttctcccatgggggctccagacattgtattttactttgtgcaatatgaggggactgca

SEQ ID NO: 246626 - DNA, 122 bp, Homo sapiens
tgtcagcagcagccatgctgaggcggccagtgtaagcggaggctaggacagtctcaaaggcgcctgggtccatgacactgggcagcgagatggaggtcatgcctttgagtaggacctgatca

SEQ ID NO: 246627 - DNA, 122 bp, Homo sapiens
agaaagagaaaatattcctagatgtgtttgctgtccagttttccccttcaccaattcacacgaggtcacgagcctggcagctgtccgggaaagctgattctgagcatcatccaacagcaagg

SEQ ID NO: 246628 - DNA, 122 bp, Homo sapiens
gggcctgggagttggagggacctggctctgcccgtaggtaggaggtaccccttttccagccgggatttcctcccccatatggagggtgggggccccacccgctttcacctcacagaacagtt

SEQ ID NO: 246629 - DNA, 122 bp, Homo sapiens
ccaccagcgctgcactgggctgagtgggggtgaagcctgcggggcagagtctgcttctgtcggtggatcagcttctgtcaggtccaggacttagggctccgtggggcagagcctgaccccgt

SEQ ID NO: 246630 - DNA, 122 bp, Homo sapiens
gggagcgaaccagcgatccccgaaatggcacgcagagctgagcaggggggcttgggacgccgagaggaggggccgagggccgcgaggggacgcggcggacgattgtggggagggtctctggc

SEQ ID NO: 246631 - DNA, 122 bp, Homo sapiens
cacaaaagcacagggatcctcctcacctgcggcgtcatccaaaggcgtgtggcacccagacgttgagcagagtctgaggcttcagggaagacaggctgccactgccgtgtatgttcccagtg

SEQ ID NO: 246632 - DNA, 122 bp, Homo sapiens
ggaaccgaagaaaggcaggtcttctagggtcagaaaccagagggtggatcaggccccgcccgctgtcccctgagaggtccgggatctgggagggcaggtttgggaggcactgtgacctggtt

SEQ ID NO: 246633 - DNA, 122 bp, Homo sapiens
gcctttttgctgctttagcctcatctggcctctctgtggtttcgtctccagggtggccaacgtggatgtcttcatctgccagagtcaaagaaaaggtcagtgatactatgctcccttcaccc

SEQ ID NO: 246634 - DNA, 122 bp, Homo sapiens
gagacgtcggttactgtgaaacgaaaacgggcagacccggactttaaagtgcaaattctccggtccgcgtatcgcaaccacccccctccaggctccgcccaagtcggagccacggctcaagt

SEQ ID NO: 246635 - DNA, 122 bp, Homo sapiens
atgggaagacggttgggagagatggcctttgccaagggtggaccgagagcgaccgccgcgcgtgggaatttcacggcacagcctacgactctctagagcaatgggaggatcagctaggtggg

SEQ ID NO: 246636 - DNA, 122 bp, Homo sapiens
gggcaggcagcacccacgactgcccagcggggccgtggagccagcatggctaagtcctgccgtctgtgtccctgcagagctgatgcagacagaggtgcaccacgtgcggacgctcaagatca

SEQ ID NO: 246637 - DNA, 122 bp, Homo sapiens
ctcctccccaggctcagcgggcgtgcaggttggtcgtgtgtccgctggaggccgctttgccgcggggccctcagggaaggcctccagccacctgcgctcaccgggatgggctccggaggcga

SEQ ID NO: 246638 - DNA, 122 bp, Homo sapiens
ttattcttttctcttgtatggtaatagtttagaacatcaaaaactgggttgcaccatttgcgattaagcagggcccctattcggtgaccgctgcgccgccagcctggcgcgggcctcctgca

SEQ ID NO: 246639 - DNA, 122 bp, Homo sapiens
tggtatcttatcaagttcaagctctgcaaaggcagggcttgggccacattcttctttatacggcctggcagcatcttgaatgcagaaaaatgctcagctaacgcctttggattggcctggat

SEQ ID NO: 246640 - DNA, 122 bp, Homo sapiens
aaaaatgctgaatctgctctctgaattcaagtctatttgatcttagagatgtttccaactcgtttctacaagaaaaggggttacagcttgcatagaatgttccacctaggcctttgggatga

SEQ ID NO: 246641 - DNA, 122 bp, Homo sapiens
acctcaggtgatccacccaccttagcctcccaaagtgctgagattacaggcatgaaccaccgtgcccagctttgtttttgatttttgagataggatctcactctgtggcccaggctggattg

SEQ ID NO: 246642 - DNA, 122 bp, Homo sapiens
aggtcagccaggtccgcgagcaacctgtgctcaggccagcggaagcctgactccaggattcggtggtgccacagacagttactgaacgccaattttgtgcctgctttaagcgaacaggacag

SEQ ID NO: 246643 - DNA, 122 bp, Homo sapiens
cccccactgtcatggtcccgctgtttgtcttctcccttccgacctcccgtggccccagcgcggccagctcacagtaggtgctcgggcagcgtttcttcagggacctagacggcctggagagg

SEQ ID NO: 246644 - DNA, 122 bp, Homo sapiens
ctttcttctacccaatagaaggccagaaagccaatccggaccgttagggagcccaatgggcgtcgccgccaggccccgttgcagagcgcgtctagccaataggcagcggcggcgggcgggcg

SEQ ID NO: 246645 - DNA, 122 bp, Homo sapiens
cccagggagaactggggccaagagagcagcctttgtggggagggtcagacctgccccttccggccgctggcccctctgcccattcacttcccaaaccccaagggcacaaggaaacgtgaggt

SEQ ID NO: 246646 - DNA, 122 bp, Homo sapiens
ggtcctctctccttgagactgaagtgattttctctgagttctgtgttagtgccctggggccgccatcacaaatgaccaggaactggcttagaactgggtgtggctcttctgtcacagccctg

SEQ ID NO: 246647 - DNA, 122 bp, Homo sapiens
ggttagcatttgacctacatgtcagttagactctggaaattaacaacaacgggaagtccacgcatgaagacttctggctgcagccaaatctgctcagacaaaacccatgacagagtttattt

SEQ ID NO: 246648 - DNA, 122 bp, Homo sapiens
cggccacctccggaagggtccgccggctgtgctggtgaggtgggtttcgggggtgttctccgtcctgatccaggctggagaggggcacagcaggtccagaagccgcgaacctctggggcggc

SEQ ID NO: 246649 - DNA, 122 bp, Homo sapiens
gggtggggcgagggccagtcatggcggagtcctggtctgggcaggccttgcaggctctgccggccacggtgctgggcgcgctgggcagcgagttcttgcgggagtgggaggcgcaggacatg

SEQ ID NO: 246650 - DNA, 122 bp, Homo sapiens
gggggtgggggctaccaggaaacctttgcctcctggggctgtgcaggaccggctagccagcgctgggaaccagggctgagttcagcccagctctgtccaccccaaccccagggctaggggaa

SEQ ID NO: 246651 - DNA, 122 bp, Homo sapiens
ggtgggggccgggatctttgtcctgcggatcaaacagttggcccctctggactgcatctccgtgccccccggccctgcggggtaatatacgtgtgtgggggaggttccggggtagtcggcta

SEQ ID NO: 246652 - DNA, 122 bp, Homo sapiens
ccttttggaggcggcggggacaaggtcgccggggctccgggtggcctgggagagctgctgcggccctaccgctgcgcgtcgtgcgacaagagctacaaggacccggccacgctgcggcagca

SEQ ID NO: 246653 - DNA, 122 bp, Homo sapiens
ctgcaaggagagaccaggaaagaccagaaggaagaggaggaagagagaggcaggagcaggcgtagggaagaaagaggacagaaaataacaggtttcagagatgaaaggtgagcacacaggca

SEQ ID NO: 246654 - DNA, 122 bp, Homo sapiens
gctgtgactgcagttttcaaatgtgctctggcctccaaggaccaggggggcggtggggggcgggggtgtcctctgtataaaaagtgctgtcctgcgagcttcccgacggacactttggggca

SEQ ID NO: 246655 - DNA, 122 bp, Homo sapiens
tagatttaagcctcacgttagatttcagatttgcacatcgagtcccgcccctatccaatccggggacgtcaccgccctagtcttcggctgttttaaaagcaagcggtttttaaaacccccaa

SEQ ID NO: 246656 - DNA, 122 bp, Homo sapiens
cagccatggcccagacgagtggtaggaaggcccggcgtcatcgcacaggtgtttatggagcgcctgctgagtcgctgtcacttcctctcttccggaggtctgcggatgaccgctgagcagac

SEQ ID NO: 246657 - DNA, 122 bp, Homo sapiens
taacccaatctgtttgggattgagggcgggactccagggtccctgggaggccccggcagccgcgcatgctcagagcacagggaccgctccacctcgtccgtggccctgcccacccaggccgc

SEQ ID NO: 246658 - DNA, 122 bp, Homo sapiens
gagcttctggcggaaggcgatatccgagaacatggtggcaaacgtgcgcgccacctccatcgcagtcttagtgcttttctaggggtggaggatgggagtcacccctagaaacagaggaggcc

SEQ ID NO: 246659 - DNA, 122 bp, Homo sapiens
cagtgttgtcgctgcacagggagatcagtgctcacctcctgctccatgccgccatgcagccgtaggaattttaatcgcatggaggcagatggcaactgccctgatgccggcgcccctgagct

SEQ ID NO: 246660 - DNA, 122 bp, Homo sapiens
gaggtgctgggctgccctttgcagctggctgcctagggctagaagctcttcgggaggaggcggagaaaggggggttgagcatagaaggtgcccacctcctgctctcagcaatgtggggatag

SEQ ID NO: 246661 - DNA, 122 bp, Homo sapiens
acacacgaacaaaagaactagaagacttcaataagaaaaacaactaaaggtaggaaaatacgcagttaggaaaagtatgggcagaactgatgcagcacatcccccagttgtttgtcagaagg

SEQ ID NO: 246662 - DNA, 122 bp, Homo sapiens
tgcctgggaccactacaggcaggcactagtttccctgtccaccactgcccgaaatggagtcgggcccggttctcctgagctgagcaggccaaagcagggagtccgtgagtggaccgggcata

SEQ ID NO: 246663 - DNA, 122 bp, Homo sapiens
tacccccaacccaatcccctctccaccccacctcacccctcccttagacaaggatgggaccgtgtaagaactactactgggtttcagccatgtctctggcagcctcgtagcctggagactaa

SEQ ID NO: 246664 - DNA, 122 bp, Homo sapiens
cctttctccaacttcttaaatagatactgcttttaacatcccgtgagggccaggatgttccgcacgagtctctctgctttcctgttctttctgacttaacgggattctggctctctgattat

SEQ ID NO: 246665 - DNA, 122 bp, Homo sapiens
gtcaagtgtggggagattggcacttccctagggaggtcttctaggcagaatgagcagaaacgttaatcattaactccaatgcaaacccgtgtgttaagagttcatatttgtaaatgtttttt

SEQ ID NO: 246666 - DNA, 122 bp, Homo sapiens
gggaaaggtgtgtgagtgggagaggatggggatgaagtgaggttagacaatgggtacaaacgtacagttggatagaaagtttaagttctaatgtttggtagcagagtatggtgactatattt

SEQ ID NO: 246667 - DNA, 122 bp, Homo sapiens
gggtcttgctctgtggctcagggtggagtgtagtggcacgttcatagctcattgcagcctcgaactcctggacctaagcaatcctcctgcctcagcctccatagtagctggaccacaggtgc

SEQ ID NO: 246668 - DNA, 122 bp, Homo sapiens
ctctccttcaaagcagggataagcacaggtgtggtctttctccaggaaggtggcagctggcgtgcgggtagcagagtgagggaaagaattcctcgcacaggaaggcagggagaagccctggg

SEQ ID NO: 246669 - DNA, 122 bp, Homo sapiens
ccgggattccgcaaaggagttggcggggccagatgcctccagccctgagctcagtacattcggtgtcctggatgctcccttcctttccttatcactgcgagctctcctgggacggcctagat

SEQ ID NO: 246670 - DNA, 122 bp, Homo sapiens
aaattctcatggtgcccccagagccggcctctgccccagccctgctgccagctgccccggcgccctggtgctgtgcggcccatggtgcctgcacccacttgcttgtccagttactttctcct

SEQ ID NO: 246671 - DNA, 122 bp, Homo sapiens
gattctaagaagactaggagtaactgggtgcagtggcgtgtgcctataggcccaggcactcgagaggctaaggtgggaggatcccatgagcttaggagttcgaggctgcagtgagctatgat

SEQ ID NO: 246672 - DNA, 122 bp, Homo sapiens
gttaggttgtactgtaaacacccgacagaaaccacaaaggggaatgcacaactcactatgcgccaggtaagggctttgcatctgtctcatttaatcctcccccaagctctgtgaggtaggta

SEQ ID NO: 246673 - DNA, 122 bp, Homo sapiens
tggcagcttcttttccttccttcctggttctttcccatcagtgtctgcgtatgctcccatcgcgactcacttccctccagttctgtttctagtttttccttcacagcagagcttcatcgaag

SEQ ID NO: 246674 - DNA, 122 bp, Homo sapiens
gccctattcaccggtctctgcatgctcaaccaaagtgacacaatgtgcatggctggagctcgcacgacactccctgtacttgaacatcggccaggaagttgagtgagagtgtgacacttcag

SEQ ID NO: 246675 - DNA, 122 bp, Homo sapiens
cttagatgttggcctgggagcaagggctgtgggagaagcaaacccttgagtgccacagggcgttcctgggggctctcccagcagcggcagtggcagtggcaggtagcacttgggcaccggga

SEQ ID NO: 246676 - DNA, 122 bp, Homo sapiens
atttcatctttgctccgggacgatgagagtatttcccatgctggagtcggcgagaagggccgaggcggggcctgggcagactgtggtccggtccagtccctaccggtgttgtttccatgctc

SEQ ID NO: 246677 - DNA, 122 bp, Homo sapiens
ctaggcagataggccccacagtcccctcccctcagactccgcaggccctccagtctgcatcggcaggctgctggcagagtctggggcaaaacatcaccccatcctgaccccacctctcagcc

SEQ ID NO: 246678 - DNA, 122 bp, Homo sapiens
aggaggccgaggcctggaaggccagcaccctgatggcattgcggtagcggaaggcgtcctcgttatggttgaaaacgcagtacctctgcttagacttgctgtagcccttgtcatagatgcag

SEQ ID NO: 246679 - DNA, 122 bp, Homo sapiens
aaggcctcctaatcagacggtgctcgtgggtgtgggcatgggcccaccggtgcctgtgtgcgtgcatgaatgcacatgcatgggtttcctcatgggcacaggtgcacacacacggatgcatg

SEQ ID NO: 246680 - DNA, 122 bp, Homo sapiens
agagcgcggccaggggccggaagcgcggaccccagctgctgagataggcgaagtcctgctcggagcccgacgagccgctgtgcagggagctgagcgaggcggccggcgagtccgcgccctcg

SEQ ID NO: 246681 - DNA, 122 bp, Homo sapiens
tggcaagaaagaccacaaatgttgacttggtgactatatagaccagaaaagctcatggagcgatgggcctgtgacacacagtgcatccttcaggagctcctccttccagcccattagagtca

SEQ ID NO: 246682 - DNA, 122 bp, Homo sapiens
gcgctcggcgctcacctgtggccgagtccctgtcctcaggtggagccgccagagggagctcggaccccggtgtcgaaagacgcctctccgtgcccgtccgcggctggaagaacctaagcaag

SEQ ID NO: 246683 - DNA, 122 bp, Homo sapiens
cttcacccccaggctccctttcccccactttctctttatcccaaatttgagggtagagatcgggagatattggaaagaagagctttggggatggtggtcccactcacgatatactccctaga

SEQ ID NO: 246684 - DNA, 122 bp, Homo sapiens
tcggctctgagagctcaccgaaaccacaaagctttcagaaaacaaacaggatctcggaaccggaagcggaacttgcaggactgacctttgacctctcgcttgagccgtgacggaggcggcac

SEQ ID NO: 246685 - DNA, 122 bp, Homo sapiens
agaggccaggcctgagcgcaattccgcgggagcaggtggaagagtcgggcgcctggacagcggtgccagtcccctttcataggttaaaaaaaaaaaaaaaaaagcttttatatattgaagat

SEQ ID NO: 246686 - DNA, 122 bp, Homo sapiens
ggcggcgaggcaagatggcggcaaccaagaggaaacggcgtggaggctttgcagttcaggcgaagaagccaaaaagaaacgaaatagatgcggagccgccagctaagcggcacgccacagca

SEQ ID NO: 246687 - DNA, 122 bp, Homo sapiens
ccaattcctcccgaaattcacacacacagcctgctcacaggcgcaactattaaaaacgaacgtagtgtccagatagactgacgataaattcacgagcatttggctgtggggacgtaataagg

SEQ ID NO: 246688 - DNA, 122 bp, Homo sapiens
ttcagccatcctggagttcagagactctcctcacacaaaacttttcccagagtccaggctcggccttttactacgatttgtgccctggattctgcagcctgtcttataacacatcatcagag

SEQ ID NO: 246689 - DNA, 122 bp, Homo sapiens
aagccactgggcctgcgacagccagggagcccctcagctcgctggtatccttcgggggcgcggggggcacacagagcggacttccctcagccacacgcccagggctgcacgcacccaggaca

SEQ ID NO: 246690 - DNA, 122 bp, Homo sapiens
gcggggcgccaggcctagccaagagccaggcaaagcgaaaccaagccctggaagcagatccggtgcgggtgacagccggcgccacccctgcccccatccctgtgaaaaagaggcgactgcgc

SEQ ID NO: 246691 - DNA, 122 bp, Homo sapiens
tctcggagttggagttggacatcagctggggctggagtcacctgcaggctggcctggggtcgggcagggggatctgcttccaaggctctgcttcagaggcggctccctcccacggtaggcgc

SEQ ID NO: 246692 - DNA, 122 bp, Homo sapiens
gaaaaagaagacagattagtatttttcatgctgacaaaaaatagctgctatgacttttcccgcaacgtggacaggggccaagtgaagctgaactggtcatggtctgtcgcccagtgttccct

SEQ ID NO: 246693 - DNA, 122 bp, Homo sapiens
cccacctgttgacaactccccaccccagccaagactgctccctgcgcagccatgagtgttcggcctaaattcagcgtggctcgtggaatcaggcagcctcctgtgtcttgtttcttcagccc

SEQ ID NO: 246694 - DNA, 122 bp, Homo sapiens
ggccacatccctgccgccccagtcaccgcccttcttgagccgggaatcccgcccacgccgcgccacgctccgcccccgggtgagggacttgacctccgcctggcaccctggcgtaagggtga

SEQ ID NO: 246695 - DNA, 122 bp, Homo sapiens
taactggaaagtgcactgagctaggagtggagggagggcggtccctcctcggccattgctcgtgcctgttaacatggctaattcagaatggggggcaggtcatttaacttctatgaccatag

SEQ ID NO: 246696 - DNA, 122 bp, Homo sapiens
ggttcggatactaaatctgcaaacagtgagcatccctgttgtttacagaagcacatgtcccggatgcaggtcaaaagcctagagcaagctagatctgagctgtgcatacattggcagacacg

SEQ ID NO: 246697 - DNA, 122 bp, Homo sapiens
cttcattccgtctcccgaacctgctcgggttcccgcgccccacgcttgctgcagaggcaccgcctcctacgcccgagccgcgggccctttaagtgctgacggcccactccggccccgacccc

SEQ ID NO: 246698 - DNA, 122 bp, Homo sapiens
aaatgtctctcagaacccctaaggaaacaaatgaagggtctgggaaaagcctgagggtggcgaggggtgtatcagtatttcttgagagtgcagctcattggggacttccctgatcctggatt

SEQ ID NO: 246699 - DNA, 122 bp, Homo sapiens
tttgcagatagagattgggccgctgccgagtgtcccacgcaccctcgcctacctcattcacggggctctgcctgtcccatatcagagaacatggtctgaccctgagctcttttcaagcctct

SEQ ID NO: 246700 - DNA, 122 bp, Homo sapiens
cctgtggctctccaagcctatgcattatgtcccatctatactgcaggatgggctgcctaacgcggaaccgcctacggtttcctctaggcacacagtattcactaacattcaaaggtagggcc

SEQ ID NO: 246701 - DNA, 122 bp, Homo sapiens
taggaccctccgagccaggtgcgggatataatcttgtggtgcgccggttttcaagcccgtcggaaaagtgcagtattcgggtgggagtgacccgattttccaggtgccgtccgtcacccctt

SEQ ID NO: 246702 - DNA, 122 bp, Homo sapiens
cgggctggaccgaacggggacagggtggacaggactgccacgcgtgggctgtaaatactgcgggaggcgttgctgctcattaatatatatggcataatatatggctttgtaaccagctaagg

SEQ ID NO: 246703 - DNA, 122 bp, Homo sapiens
gccagccagtgggaacagacaacagcctgggagaggaatttccagcctctcttcagtgtgcgtgtctggaaatggggaccttgccttgagcctccagagttgaaaccccagacacccaggaa

SEQ ID NO: 246704 - DNA, 122 bp, Homo sapiens
agggtagaatgcagcagctattgagcagcacaagccctactaccggtcagtttggggcctcgcaaggggaagagtgcaaatccatttccaaaaaaaagggaagaaattgacagccaatggaa

SEQ ID NO: 246705 - DNA, 122 bp, Homo sapiens
gtctcaggcatggcgggctgtaggtcccgagccttaccccgcggggagacagctaaggcccggcgagaagtcgagaacagcagctgctggcacaggtgctaagcctcttactgctcggggct

SEQ ID NO: 246706 - DNA, 122 bp, Homo sapiens
cggcgccgggctgggggctcaggaccagggctggcgcagccgccccgccccgccccgccccggggctatcagagcggtcaaagcctcggaaatccctccgtccacgctcccgtggtacagag

SEQ ID NO: 246707 - DNA, 122 bp, Homo sapiens
tcgtcaccgcgttccctagtttctgtccttgtgggccgcagccggacactcccgccgcggcgctcaccccttcaagtttcctcccgggatccaaagccccaggggtcggaatacagaccttt

SEQ ID NO: 246708 - DNA, 122 bp, Homo sapiens
gggctggtcttcgcctggagaggtagcaaccatctctttgttcccacccacatgagtagccgttgcagaagataaacccctccctgagccaggctgtggccagaggctaacccggcccctgg

SEQ ID NO: 246709 - DNA, 122 bp, Homo sapiens
taagtcacctaattgtcaccagccaaccaatggagcaggcatacactttctgcatgtctacgcattacatataaatgcactaccataatgtggcaatatgggatttttagtactttcaagac

SEQ ID NO: 246710 - DNA, 122 bp, Homo sapiens
aagttgatcggtcaaatctattctcctgtgttctggtttaagtggaaaattgaaggagaccggatgttttaatttggaagactgcttggctaatgactggaattctaggcaattgaattagc

SEQ ID NO: 246711 - DNA, 122 bp, Homo sapiens
tgctgcatttttgcccatggccttgattgaactccttagtcatttataacgtggttgggccggaaggcctgagaagatacgtaggtacaatcctcttttaaaaagaccacagaattagccaa

SEQ ID NO: 246712 - DNA, 122 bp, Homo sapiens
cctatagtcagaggagagaactcaggtggctctgggtccagaacacagttcacagaggggcgaggtgaagcagctctgggtgggcagcacaggctgaggcttggggctcactatcattagat

SEQ ID NO: 246713 - DNA, 122 bp, Homo sapiens
cgctggcctcgcagtctgctccggcttccggctccccgcgctgcgcccagctgcgcgtcccgccacccgccccggcagcaccgacgctccccatggactcttctcctggagtcaggacgtgt

SEQ ID NO: 246714 - DNA, 122 bp, Homo sapiens
gtctgcgggaggccgaaggatcccgggtgacatgctttctttgggtgcgaggcagcgtctcggcagaaagaatattgcgagtattactgagggtacatgaaggagagaagcccctttggttc

SEQ ID NO: 246715 - DNA, 122 bp, Homo sapiens
aggacattttggaatatgttgagagtcccgaaatccccatgaagaagtcagcatcagtagcgtacggcatgtggacaggcattccttggggcagccgatggcccgtgaaagccatagatgat

SEQ ID NO: 246716 - DNA, 122 bp, Homo sapiens
agatgtgggttagacataaaggctgggtcggctacagtgctgctgccccacgtaaggcaccggtgctatgagctgatgggtgcagagacgtctgggaaggaaggggaatgcagggagggagg

SEQ ID NO: 246717 - DNA, 122 bp, Homo sapiens
cctcggatgtggacacccagggtgggctgcagaccgcggccgggccgcactctctgggggcgagggccaggtcaggtggctgcactgtcgcccagcagcgagtaaagactcgaaactgaggg

SEQ ID NO: 246718 - DNA, 122 bp, Homo sapiens
aacgcggctcggattcccgggggaaggccaagcggggcggaccccatctccgggaagtgacgccatggggacgagcggcaccagagccggggccagtcggagcggggcgcgcgccgcatggc

SEQ ID NO: 246719 - DNA, 122 bp, Homo sapiens
tccctgctttggtggagcttaaaacaataaaaaaatatagagagtgtcggtgggcatacccggtctggagaaaaataaagcgtgggtgcggggcatgcttgttattttctatggggtggcca

SEQ ID NO: 246720 - DNA, 122 bp, Homo sapiens
accccggagttcggcccagtcccgtcgccccctctgggaccttaaccccttcctcccccgcgacaccaagggccttggccttgccaccctaagggagaagggtgaggagtcccagctctcct

SEQ ID NO: 246721 - DNA, 122 bp, Homo sapiens
accccacacactgcccctggccagacaccctcaagagcaaaccccaaggccgcgttagaacgaaatcccaccagctggaaccccggcccggttaccacgaccaccaatgccccggccgcacc

SEQ ID NO: 246722 - DNA, 122 bp, Homo sapiens
tgaggtgggggaggtgggagaggcataatctgggtcttgaggacgtttcagccctcagcccggggtggctgagatatggccctgggtaggctctgtcctccagaggtggaaagaaggacaaa

SEQ ID NO: 246723 - DNA, 122 bp, Homo sapiens
ctgtcagctgcttatttgcttgtcacagcagccctgaatccttccacctccagcagtcaccgagccttctggatactctgatttattcttcaaactggactgactccccataccttctgctg

SEQ ID NO: 246724 - DNA, 122 bp, Homo sapiens
atccgcctgcctcggcctcccaaagttctgggattacaggcgtaaaccaccgctccaggccggtcacatctctttcaatatgtgcagcccacatccagtgactggttggtgtgaaggtataa

SEQ ID NO: 246725 - DNA, 122 bp, Homo sapiens
ttcgctgggcagggatttgcagtatagacgtagagttgttctggcctctgatgctgcgcccgggccttaaatggaatcgcggtctgtgataacttttgacaagagctggcaagctgagcctt

SEQ ID NO: 246726 - DNA, 122 bp, Homo sapiens
gctgagctgccacacaccaggtccctgggcagggccagaggggagatgagaccctcctcccggcctacagagagaagtggtgctctccaacaccctcgatttgaacagcaagctggcgtact

SEQ ID NO: 246727 - DNA, 122 bp, Homo sapiens
gccaggaaggagcccaggaactgccccagcacatagactggaaacttcctccagggcacacggcccagtgcacagttagtgaagctcacagctgcgttcatgtgggctcctgcgggcagcag

SEQ ID NO: 246728 - DNA, 122 bp, Homo sapiens
ggtcctgggccccgggcggcggtcgccaggtctcagggccgggggtacccgaggtaagatcgcttcccgggcgttgggtcctttcggctcagcacgcacggacgcctttagggaaggtggct

SEQ ID NO: 246729 - DNA, 122 bp, Homo sapiens
aaccgcagtgctgggccggggggagtcgctggtttgcagcccctcgggggccgagtgttccgggctctgatttttgctggctgagacacagggacccctgggtgtgcgggaccgtgccggga

SEQ ID NO: 246730 - DNA, 122 bp, Homo sapiens
atggcgctgaatggcatcaacctggcactggcctggagcggccaggaggccatctggcagcgggtgcgtgcccactgtcccttccccaccctcctctatggcgggagccaccgtaggtgttt

SEQ ID NO: 246731 - DNA, 122 bp, Homo sapiens
atgaatagaggataaaagatggtttacttttatacagcatgcaggaaccatgatttcacacgcagcaaaatgaatcattctgcttcttcctcactctttttaaattgaaagttagaaccagc

SEQ ID NO: 246732 - DNA, 122 bp, Homo sapiens
ggcctagtgccgggacagggaccgagcgtgccccataggcggccgggctggaggacgcggcggcagagcagacgagccctggcgcgcacctctagggcctccgctacctggactgcgctcgc

SEQ ID NO: 246733 - DNA, 122 bp, Homo sapiens
ctgtggacatcttcttttttcaggactctcatcgtctaactcagtgccccctgtccaatccgggatcatctcttcttgagatccttcacttaatgtcatgcacaaagacccttttccaagtt

SEQ ID NO: 246734 - DNA, 122 bp, Homo sapiens
cgaatgcaggcgtgcgcttgctgtctctgcctgggctgctcctgtggggctgggtgcacccgctccagcagttcaggtcttcactggataggagtctctatccacagtaacatgcccttctc

SEQ ID NO: 246735 - DNA, 122 bp, Homo sapiens
ttcttaaaatccataaaactctggagtttctcactgttctcactgggaggtccagaaagccgagcattctagagtgaatgattctgctgggaccctcactttggtttattctgacatggctt

SEQ ID NO: 246736 - DNA, 122 bp, Homo sapiens
ggaggggcttgggcgcagaccttccaggtggacctgggctgcctaatgctgtcatcatggcgatggtggcaggcaaacaatggcagattttgtgccaagactcgtgtcctgcccttctctcc

SEQ ID NO: 246737 - DNA, 122 bp, Homo sapiens
actgcataatttacaaatgctaaataaccaatttgctcaggtttttacctctcatacatacgtcttatgtattcagagccttgcgtcttcatgtttctttaatatatttgagcacgaagcag

SEQ ID NO: 246738 - DNA, 122 bp, Homo sapiens
taaaaaattagcacccttgtggcatttctgacatgagatatgtggctcattgtttgcttacggagactgatgtcatagggtaagctctatgggtacataagaaaagaatttcaggaagccac

SEQ ID NO: 246739 - DNA, 122 bp, Homo sapiens
acctgcgatccctcaggtaagaagactgctgatcgcaataggcccggtctgagggttccccgcttgctcccgaaatgaagacactggagacccataaccgggctacaggatccggattcttc

SEQ ID NO: 246740 - DNA, 122 bp, Homo sapiens
cggcctttcccttccggcatcagccagagccaagtgttctgaacactacccccgcccccacgaaaagtgaggaccagatggcgccccaccctctgaatacctctcagcacggagtgtgaatc

SEQ ID NO: 246741 - DNA, 122 bp, Homo sapiens
tcctaatagtctccctgattcagctcctgtgctcctgcatccaaatagatgtctccctcacggctcatgcctttccctccttgcccaggtcactggtcactggcttatcttttatttattta

SEQ ID NO: 246742 - DNA, 122 bp, Homo sapiens
ggtcagcaggctcgggggcctctgctccagcggacaacaagcgcaccgggcgggaacggccgcctccccaggcgctgcagcctagctctcatgtgacccacggaacttagcccctctgttct

SEQ ID NO: 246743 - DNA, 122 bp, Homo sapiens
gagttcttccagtctccacggcaggtctagcctccaaaacgagacgagctgggagcgaggcggagggaagcgcaggctccgcccaatcccacccgggcctggcctcgcctcgcctctcagct

SEQ ID NO: 246744 - DNA, 122 bp, Homo sapiens
cacacttatgagtgaaaacatacgaaaaacatacaataataatctttaattacaaacttccgatatgatgtaggacaagattttagaaagtgcaacacttaggaagcagcatatttgtgtaa

SEQ ID NO: 246745 - DNA, 122 bp, Homo sapiens
ccttcttaaggaggcgggcagggagtaccgcatcggcggcgggcgagacctgcggaaggacgtgatagttggccaatcagagttcatcacggtagcccagttagccagtaggacgctgtgaa

SEQ ID NO: 246746 - DNA, 122 bp, Homo sapiens
ggaatagaggaggatgacagttgaagaggcctgtaggcccccgatgtttaagaggacaggcggagggagagatggggagccgggaggggtgaggcagaagccagaagttttaggggtgagcc

SEQ ID NO: 246747 - DNA, 122 bp, Homo sapiens
ttgcgccccggagccgggcacggcgtcgcgggggtggggaggcggctcgtccccgagctgcgctccctcgcgtacagcctcggctctgggtgcgaagatcctctctgcctccgctcacccag

SEQ ID NO: 246748 - DNA, 122 bp, Homo sapiens
acctccacttcctcctcagccagatccctccggaggtggctgtggaggaagccactgaggcggctgcgcgtagcggagccgccccggcaggttgcaggccggctcctcagcctcttaccgcg

SEQ ID NO: 246749 - DNA, 122 bp, Homo sapiens
gatatcacttgcctgaaatatttgacagtcatacaagagagcaatcggctacttaaacaacgcagtcatgttgggagctgttggggaaggggtaagggcggggaggattgtttttgaatgaa

SEQ ID NO: 246750 - DNA, 122 bp, Homo sapiens
cctcggtcactgagactcacagctgcactgcatcctccgagagggagcttaattgagtctcgcacagacacacctagcgctggctccactctgtctcgcctgctaagatttactggctctga

SEQ ID NO: 246751 - DNA, 122 bp, Homo sapiens
tgatgctaaacttcacagaaacaaacaaaaccagccagaataacagactctctggagcgtcgtgtctccatcacttagttgtgaaaggaaaaccaagccccactttttattttcctaagtaa

SEQ ID NO: 246752 - DNA, 122 bp, Homo sapiens
actcccccgccccttgcgagtgagtcacgggcgagcaggaggccacaaccgtgccagagccgcccgcggcccgcccagctcacgagaccggcccgggaaggcccctcagcaagcgccgcacc

SEQ ID NO: 246753 - DNA, 122 bp, Homo sapiens
tttcggaaggtcaggaaggctcagcgccgtgaggagggtgtggcagggctgctctgaggccggcgtggagccggcggatggagggggagggcacgtaggtgtgcacacactgcctgcgcccc

SEQ ID NO: 246754 - DNA, 122 bp, Homo sapiens
cggggaagggggtcccaaggccaccccagcaccgcaccacccccgcctgggcatataggacgctcagtcaacatccgctgaacaagggaatgtctagtgaatcagccatttgcacctaacca

SEQ ID NO: 246755 - DNA, 122 bp, Homo sapiens
cagggcgaggggaggggaacctgcggctgctccagtgagaggaacgggcaggacacggaccggcgtaaggacagaagaccccaccccaccccagcccggtcagacccatttcctcagcaggg

SEQ ID NO: 246756 - DNA, 122 bp, Homo sapiens
agcaaggaagatgtttcttaaccacaaatgtgccatgtgtttgcgccctttcttggctcccgtcgcgtacagggtggagtccagactccttggcctgacgcaggaagtcctcccacatctgg

SEQ ID NO: 246757 - DNA, 122 bp, Homo sapiens
gcactgttttaaatagccagaaccaacttcctaatcaatgcacctggggtggatacggcgcgggggtgggggtcacagtaacaccacaaagtagcatttttctggttcggctccacctggag

SEQ ID NO: 246758 - DNA, 122 bp, Homo sapiens
cagtcgcgggaatggctttccgggtgacatctgccagtttggtccccatggcgctcatcccgcgggctcggaccccagcctctcttacatcttccccttgtatgggaaggggtcgcagcagc

SEQ ID NO: 246759 - DNA, 122 bp, Homo sapiens
gcagagaatccttgcgggttttttgggctccctaaaagcgccctgacctattttttgaaacgtttttttccttattcgtcaaaatacattctcagtgaattgcagtcaagtttcctgcaatt

SEQ ID NO: 246760 - DNA, 122 bp, Homo sapiens
tgacccaagtctgctctgccccaggtcatccctagcactggggacagcgagcatctcttccggatcctggccaatggctccatagtcctcaatggcagcctcagctacaacaacaagagcgc

SEQ ID NO: 246761 - DNA, 122 bp, Homo sapiens
ctcagcgccgtcctgggcctgctgctgctgaggtggcagtttcctgcacactacaggtaccgcccccgccaggcaggagactggcggtggaccaggtggagccgaaggcctgtaaacaggca

SEQ ID NO: 246762 - DNA, 122 bp, Homo sapiens
gcgaagctcccgcccaagccgaccacgtgccgcgagcccggcggggagagcccactcccgcgccccttccgggcccactaccccgccgggctgtggcccatcgccccagtgcctggtagcct

SEQ ID NO: 246763 - DNA, 122 bp, Homo sapiens
ctttccggcggcggctgcaatgaattccagatgtgaccggccggctggccggggcgcacgcgggggccgacaggagctgcacggagggccctttgtccgccccccccacccgatctctcact

SEQ ID NO: 246764 - DNA, 122 bp, Homo sapiens
tggtaggccagtgaaaagatgcccacgtccagaacaagcctgtccagcagggcagagggtcgggcagcctcctgaacttgctgaccctctcgggggcatcctggccggagctcagggtggag

SEQ ID NO: 246765 - DNA, 122 bp, Homo sapiens
agccaatgtatcacatggacttggccccatgcttagcagataataagcgctcattctctccgcatcatgatttattctgcaatgagttccttgctaggctgctctgagcctttcaccaaatg

SEQ ID NO: 246766 - DNA, 122 bp, Homo sapiens
agagaccgcgtgactcccgccccctccctcccgcctgggccggactccccgagttcccagcgcaggaggcagctgggccccggccacctgcccacctgcctgcccgcccacccggcttctgc

SEQ ID NO: 246767 - DNA, 122 bp, Homo sapiens
ttattagatctttgatatttgttttctgtgcctcgtgtcaactgaattcggcagctcggccgcctgttgccacaggctcctttcttccacggcgtcccttgcgggacccgccagagtgtgct

SEQ ID NO: 246768 - DNA, 122 bp, Homo sapiens
gagatggtcacagacatttaggcactttgatcctaagaagaatggaaagaaaccatgtggcgcggcagtcttacaggaatttcaagagggagggacctgagcaacaatcggaggggttatta

SEQ ID NO: 246769 - DNA, 122 bp, Homo sapiens
gacggaactgcagttttacctggttgtggccttggccttgatctcagtgctctttctcctcgcggtgattctagcgatcgccctgcgcctgcgacgttcctccagcctcgacactgagggct

SEQ ID NO: 246770 - DNA, 122 bp, Homo sapiens
gggccgaaccggatatgccggttctggggctcaggtgacaaacccaggccttccgcccctcgcctctggtggggatccggcccaacccggagcttcctagacttgcttccaggtgtcgaagc

SEQ ID NO: 246771 - DNA, 122 bp, Homo sapiens
cctctttcaagcaaaggaaagccatgtaaaacagcgctgctgtcagccttaacttccagacgatcgagttaatttactaacttctcagtgacctgttttttttttttttttaatctcagtta

SEQ ID NO: 246772 - DNA, 122 bp, Homo sapiens
ctgcaatcgtgaaaggggtggagtgatacccgcccaagccccgcctcctgccccgcctcccgactgcaacctgaatccagtagaggcagcatagcagccattctggaagtggtgtcggtggc

SEQ ID NO: 246773 - DNA, 122 bp, Homo sapiens
cttccggagcctcctcccccgggctggctaggggtgagcgcaggggttagtcagtacgcacgtgacgcgcgatgcccacatgacacgaccgtgagcgggggagggggacacggagtgaagaa

SEQ ID NO: 246774 - DNA, 122 bp, Homo sapiens
taatgatgctgacgaatcagaaatcctgcgctaacatggatggagtgctagctctatgtccggcacatgctgtatgctttatatttaatccttacagcaacccaatactgtagataaaatca

SEQ ID NO: 246775 - DNA, 122 bp, Homo sapiens
tggtttatggcatctgggaagatcgctgaccattcccgaggggaaggaggctgcagccggcgctcccagacaccagcagagcagaacacacttcaggaacgtgaaacgctcacgtgctttta

SEQ ID NO: 246776 - DNA, 122 bp, Homo sapiens
gcggaggagcgccaaccgtttgtcagttcactttttctgccctcttttccggggtaatgccgggcggcttcgctgcctggctagatgaaggttaattcgggtcattggagaggatccgggag

SEQ ID NO: 246777 - DNA, 122 bp, Homo sapiens
tggcccttcacctgccttcctctagggtccctgatgaagtcatgtaatctagagatctttcgagctgtgctggaggggcttgatgcactgcttgcccagaaggttcgccccaggtgaggtga

SEQ ID NO: 246778 - DNA, 122 bp, Homo sapiens
tgtagtagcggatgcagtccttccccaggaagtcaaattccaccacgtgttggcagccatcggcctccgggtgcagctggacgtgctccacgcggagggaacagcagcccacggtgtcggcc

SEQ ID NO: 246779 - DNA, 122 bp, Homo sapiens
taaaaataaaaaattaaattaaaaaactccctttcaagctaagcaaagcaaaactgtattcgactccgttccttctcacaagatcattggcaagtaaggcaggcaagtggaatgacaaatta

SEQ ID NO: 246780 - DNA, 122 bp, Homo sapiens
aaatgcagtggaaaataatcaggctgactttgatgggagctttggtggggactccgagggcgacactgtgcggcgacccttggcaggtgctttgtttgccgtcggggccagcctcactgaca

SEQ ID NO: 246781 - DNA, 122 bp, Homo sapiens
ttgcccggaggagtcgcccaccccgggcgcaagcgtccaaccggccgcagacaccctgcgcggcttgcggggaccttcgcctcgacgcgttccactccccgggttttcctgctctccgggaa

SEQ ID NO: 246782 - DNA, 122 bp, Homo sapiens
cttcccagaaaaatcccagtaatattccagcatctctcagtatcttccaaggagcccggacgccctccccaggcccgctctcataagcaccccaggaatgtgcccacccacctcctggtttt

SEQ ID NO: 246783 - DNA, 122 bp, Homo sapiens
gctctgaagagtttgtagacgtccagcaaggaccacgcatgcgcaagacagcaagtccggcgcatctgagagcagcagaacagggccacgcgaaaagctccttcggatctaccagaaagctc

SEQ ID NO: 246784 - DNA, 122 bp, Homo sapiens
ctgttacagctaatggtttccatgtgtgcctcccctgttccactaagtggtccttgaaagcgtgcagcatggctctttatatctccagtcacagccacagtctccctacagatgttcaacaa

SEQ ID NO: 246785 - DNA, 122 bp, Homo sapiens
gcatgggcgagagccttagttaccgacttctgagcttcgacctcatcctgtgggcgctggcggaccacgggggttttccgggttttccaggggccagtcgaaccagatcttgtgcagggagc

SEQ ID NO: 246786 - DNA, 122 bp, Homo sapiens
aaaaaaaaaaaaaagaaatgtgcaagtcacatcaccttcttatgcctcagttgtctcatccgaaaaatgaagaggcttgagctttctgctattgaatgttgcctttggttctaccatacttt

SEQ ID NO: 246787 - DNA, 122 bp, Homo sapiens
caggggctgctgccttgcgttcctttcctcttcattgtgggcacatgagacaagatcttacgtgtagtggatgagaagtagataattgtttaatgaatgggcatgaggaaaaattactaaca

SEQ ID NO: 246788 - DNA, 122 bp, Homo sapiens
cgaactcctgacctcaggtgatctgcccacctcggacttccaaagtgctgggatgacaggcgtgagccaccgtgcccagcctctccagctgttttacatttggggaaactgagatcacagtt

SEQ ID NO: 246789 - DNA, 122 bp, Homo sapiens
cttgttaaaacctcaaggaatcaagacatgttactctgtatttaagggtaagccccacagcgggcagcacaaacagcctgggagccactgtgcctgtgcttctctgtccttctccctttgct

SEQ ID NO: 246790 - DNA, 122 bp, Homo sapiens
gtcctgtccttcaagttcagttctccaacgtgtgcttctgctcctgctccatggggcctccgctgcagcttgtgggagatacagagcccagcagcttggccatcagggactcctgcccagca

SEQ ID NO: 246791 - DNA, 122 bp, Homo sapiens
gacttcagacgctgaaactgctgcctttcaggaaagcaccaccaacgctggaggaggagccggccctcacgcccgccccgcgccacgctgtggaacggggctccggcaagtgaaacccagag

SEQ ID NO: 246792 - DNA, 122 bp, Homo sapiens
ggcggtgagggtgcagcgggggggcgggccccgcaggatgaggtgtccgtgtgcggctagcgccacaggcaagaccgggctccttgcggggcggaggtgaggccgtgagcatagctctcaaa

SEQ ID NO: 246793 - DNA, 122 bp, Homo sapiens
ctggcccgggcccggggccaggagggccctggagacgtggacagggcagcccaaggggagcgggtgaagggtgtgggtgcctcagaaggtggagaagaggaagaggaagaagaggagacaga

SEQ ID NO: 246794 - DNA, 122 bp, Homo sapiens
cacagagcatgcccatgtgggccggcggtgtggggagccctcggcggggcatggcccctgcgtccacagatgacctctttgcccgcaagctgcgccagccagcaaggcccccgctgacaccg

SEQ ID NO: 246795 - DNA, 122 bp, Homo sapiens
cacaccttcttcggtggtctcctctccagctaagggaatgctgaagccatcctcatactccgcagtcacattgaccaaatacaaggtctctggcttcaggctgctgagaacaacactggtgc

SEQ ID NO: 246796 - DNA, 122 bp, Homo sapiens
acaacgcagcaacgcgcggaccaacggggtaccagcgcctgcgcgacctctgactgttggcgtggctccgccccctgtctggggaagattgtgattggcccacagtaatccaccgggaaaga

SEQ ID NO: 246797 - DNA, 122 bp, Homo sapiens
aaaaccatctctttaatctcttaacactgctttatcttttttccctatacttatcactaccgctgtgatatttataattatttcctgatgctctgtcttcccttctaaattgtaaactacat

SEQ ID NO: 246798 - DNA, 122 bp, Homo sapiens
cgcggcgcagctcctcagcatggctccgggccgcggggccgcgcttgctctagccctggacggcgcactctacctccgccacaagagcgcgcgtgcgagttaacccctggggtggacgcagg

SEQ ID NO: 246799 - DNA, 122 bp, Homo sapiens
tggggacagatgttccgtcttcagaaaatactcaacgctggtttgaatatgtgtgctgtgcgtttggagtgcctctgtgtggcttccgtctgggagcaggccgagggtgaatctcctggatc

SEQ ID NO: 246800 - DNA, 122 bp, Homo sapiens
gcttgaacctcattctcttgactcaaaggccagcatgtgttctattgcacatgcagagtccgttagtttcttccgatactagaaaccatttacagagccccttctatttattgccagcaatg

SEQ ID NO: 246801 - DNA, 122 bp, Homo sapiens
gcccaggcttagtgtgctggtctcctgctccgtgaaaagtgctcccagggaagacctgggcgatgggaacaatccccagggcctggaaggaagctcacgttagggcaaaggaggggggtgat

SEQ ID NO: 246802 - DNA, 122 bp, Homo sapiens
tcttgtcactgcccgcgccgtgaaggttgacggagagctgctctcgtccacgcctttacccgcttgttggtttgggttttaacctcttgacctctgagcgtccctggctctctggttaatgt

SEQ ID NO: 246803 - DNA, 122 bp, Homo sapiens
atggagaagagtggactgggcagactggggagcaaactcagcaactcagcagacactggccgggaatgcagacactagctggcaatactggtccagaatactggcaaaggctgggccagaat

SEQ ID NO: 246804 - DNA, 122 bp, Homo sapiens
gacgccgggaccccacaaactggcagccaggaggcgggccagccgaggatcgggggggctcggactccccctgcacccagtccactgttcggagggacttagagcagggtcccttccctgag

SEQ ID NO: 246805 - DNA, 122 bp, Homo sapiens
ctgcacagtgtcttcctctgtgcactgaaaaacattaccactgcttgatgctgagcctcacggtctctagattccagagggggacttattctttcttattgtttgaaaaatcccaagagaag

SEQ ID NO: 246806 - DNA, 122 bp, Homo sapiens
caagtcacacacatcttttagatcaaataccttcagcagtatttttagctacagtaaaaacggaaggagctgggaatgatggtgtacccgtggttgagccccagagtataaaaactctctag

SEQ ID NO: 246807 - DNA, 122 bp, Homo sapiens
aatgacctcagaaggaccttccctccatttctttattcttccaaaagcatgaatgaagcacgcattatgcaccagacatggtgttagaggctagagatacagctgtgaggaagacagacagt

SEQ ID NO: 246808 - DNA, 122 bp, Homo sapiens
ggtaagagtttctagcaggaaggtcgagccacttactgtaggtcaagaagttgctagttgcggagttttttcttgcagttagactttacctagtggtagcagggccaccaaagctctgtgtc

SEQ ID NO: 246809 - DNA, 122 bp, Homo sapiens
catgcgctcccatctgtttacctggctcttcgtgtcttccgcatgtggctgagctcccagcgcagtggaaggctctcagtaaagatctgtgggatggtaggggcggaagggcggtggccctc

SEQ ID NO: 246810 - DNA, 122 bp, Homo sapiens
tttccaaaactatgtatttttctgaagtgttcatttcctctttgtttagcaaatcactgtcgattgtctattatttgtccctaccaaaataatggtagatattttgctaccattttttaaac

SEQ ID NO: 246811 - DNA, 122 bp, Homo sapiens
tactccggctggtacgtgggcttcaccaagaaggggcggccgcggaagggccccaagacccgggagaaccagcaggacgtgcatttcatgaagcgctaccccaaggggcagccggagcttca

SEQ ID NO: 246812 - DNA, 122 bp, Homo sapiens
aactgcctctggagatggaactcagcggaattctcgaaaagaagagggacattaaaaagacgggtgcatgcactgatttccaagcgcagtttgtccatgttagtcttgtacatgcttgactc

SEQ ID NO: 246813 - DNA, 122 bp, Homo sapiens
gagcggggaccaatcagagagtagctttgcctctataacggcgcgagagtgagacgtcatcggtgagcgactaacgctagaaacagtggtgcgcggagaggagaggtgagtgtgatggagac

SEQ ID NO: 246814 - DNA, 122 bp, Homo sapiens
gaaagaaacgtggaaaggtcgcccaggagggagcctgtcccccagggtttccaggggcaacggtggcccgtgtccctggaggacatgcgccagggcagcagggagtggtccccgcaggctcc

SEQ ID NO: 246815 - DNA, 122 bp, Homo sapiens
ccagcctccagcggtctcacatagcaggcaggcagtgcagcctggagcccagccaggggacgcaggaatcctttctgctttttaaggacagactttgctttaccacagcagtcgctcttggg

SEQ ID NO: 246816 - DNA, 122 bp, Homo sapiens
aaaaaaaaaatggttaaacctgtttaaaagcaaaacaaaaaacttctaccactcacttcccgtatcagaaaataaagcccaagagccttaatttaaccataataatgtatctttccatgatt

SEQ ID NO: 246817 - DNA, 122 bp, Homo sapiens
gcttgcgcgaggcttgctgggagctgtaggccaggcctaccggggtggaatgtcactccgcgggtgttggcctcaattatttatagtgacactccagtcgccagcaggaggctcctgcgtct

SEQ ID NO: 246818 - DNA, 122 bp, Homo sapiens
ccaggttgtagactgtgacctctcgctggtctgccgccaccggcaccacctggggctgcccgtccttgtccttgtactggactatgaaggagtcaaactggccctcggggactgtccaggag

SEQ ID NO: 246819 - DNA, 122 bp, Homo sapiens
tatgttggctcttatgtgtctattgggagaaatccattcttgaaagttgggttgggaaaccgtttcagttgtggcttatgtatatttatagtgcttgcatttattcttttgctgttcccctg

SEQ ID NO: 246820 - DNA, 122 bp, Homo sapiens
gtcagttttgctggccgctccggcgctggctctcctgtccgggaccacaacgagaaacagcgacagattcgacgcagagctccggaagtgcctgaggagcagtggttcttggaaatcgcccg

SEQ ID NO: 246821 - DNA, 122 bp, Homo sapiens
ccccgccccgaccccgccccggcgttcgccccacgcctcggccctccccgtacagccccgcgcttagggccactccccgcgcctcgcggcccaggaactgtccagagagtgcaatgcggccc

SEQ ID NO: 246822 - DNA, 122 bp, Homo sapiens
gtatctggagcaagcagaccgattttcagaaacgcacattgggtaggttacccgtggtgacgcaaaccagacttacttgatctaaatctcctttctccgttgccagttcctccatctctggt

SEQ ID NO: 246823 - DNA, 122 bp, Homo sapiens
aggacagcctgcagggcaggaggggcacagacaggccccagctgggtgccgcaggaaggacgtcaccctcaagccctcactggtagatgaccttcacgcaaaatgcctcttcgtttttgtcc

SEQ ID NO: 246824 - DNA, 122 bp, Homo sapiens
aggtgaggtgacttgggaagccttggccccacccccaggctggccccacccccagtccagcgtctcctgggcctagattccccagctgctgttctctggaggggtaggtgttctgggggaat

SEQ ID NO: 246825 - DNA, 122 bp, Homo sapiens
ggagctgggaaagaaagatgcttattacaagcagagggccaggtttcctgcgaaggcttccgtgtcccaaaatctcacaagccgcttctcactttcctctcaccgctcctcattaactgaag

SEQ ID NO: 246826 - DNA, 122 bp, Homo sapiens
ccacctctcgagacccctcactgcccaactctggccttatgctggatcagggtccgagggcgctttgaggcgaaggtggcgctcgccaggtgctcaacatcaaatacgaagtccccgcccct

SEQ ID NO: 246827 - DNA, 122 bp, Homo sapiens
actgcactccagcctgggcgacagagcgagactccgtctcaaaaaaaaaaaaaaaaaaatcgctcgtctacaaagaaaaggtaacgtttgaggtaatggatatttcagtcaccctgattcgt

SEQ ID NO: 246828 - DNA, 122 bp, Homo sapiens
tcttgaggccaccattgctctctgagcctcagtttctatctgtaaagcaggataatcactcgctcggccattcccaggcccagtgcttcctgagggcctgttggggggtgtccactgttgat

SEQ ID NO: 246829 - DNA, 122 bp, Homo sapiens
tgcctgttgactaatggtagaatggttagttgattaatattttgggataggtaaggatttcggtattccaatggtagcatttctactgtatgtttgaatgctataaaggtgttgtgttggta

SEQ ID NO: 246830 - DNA, 122 bp, Homo sapiens
gacgaagaatccatggcaaccaaagaggagatgatgtataaggttatggatgccagtgggcggggggaccagtggtgctgagaaaaaatagacacaggcagagagctgctgggagggaagcg

SEQ ID NO: 246831 - DNA, 122 bp, Homo sapiens
caacccaaagtgcagctggtgtcttgacgctaccgtctatgcacaagccggcggcggcggcggagcttggaggaggcagggagattccaaataaatccactaattctgggctgagcgctccg

SEQ ID NO: 246832 - DNA, 122 bp, Homo sapiens
gggcggagcttccgaaccaggcgggattccaccgggtatttgcctgcggaggcgggacttcgggcttgatgggcgttgggggtggccttcctgcgggcaggctctctgtgtcgcaacactgg

SEQ ID NO: 246833 - DNA, 122 bp, Homo sapiens
aaggcagaaatttaaagaaattcctgaaacaaatgaaaatagaaacataacataccaaaacgtctgggatacagaaaaaacaatgttaaaaggagagtttataacactaaatgcctacataa

SEQ ID NO: 246834 - DNA, 122 bp, Homo sapiens
atgcactcaagcatgaatttcagttatcaatgaaagcaggggaatcctgccatgtgacatcgaggattcacactgagaaccctggaaaggtctttgtggcagattgcaaaatggccacaaat

SEQ ID NO: 246835 - DNA, 122 bp, Homo sapiens
tctggggagaaaggcaactcttgaaataaatgggaactgcatttggaagaagaggcagggcgggaactaatgtcaggtccctaagtcccgtgcccgtgaagggccatgtgattcaaggggaa

SEQ ID NO: 246836 - DNA, 122 bp, Homo sapiens
cttaccatgagacagggcagcctcatttgtcctctttggcactgatggtgcggggagaggcgagtcctgctgtggtcaccaggccaggcctgatcagggctgtacatggaaatgagtccatt

SEQ ID NO: 246837 - DNA, 122 bp, Homo sapiens
cggcccgggccggagccggccggggacgcgggcccgagggtgtggcggcctaggctggcccggtccccaagcgggcaagggctttgtcccgaggcctaggaatggcctctgcctgacccact

SEQ ID NO: 246838 - DNA, 122 bp, Homo sapiens
ggggacgtcgaggctcagcccccttcaggtgggaagaccgccctcccagggcctcgattgcggccacagccctgacctctttggccatcagaagaccccaggcagagcctcaccctgaggct

SEQ ID NO: 246839 - DNA, 122 bp, Homo sapiens
ttgacgaacttgctgctgtacttaaggttgtctccgcagcccccccactgccaggcctcacggttctccaggtcgggtgcctcatcgcaggtacagcgctccatgcggcccgcgctgcacgc

SEQ ID NO: 246840 - DNA, 122 bp, Homo sapiens
cctgctattggccaggtggggctgtcggctgccagcagtgcttatgctttaagtgcggagcgggtggctgcggagccaggcgcggcgcaggatggtggacagcgtgtaccggacccgctccc

SEQ ID NO: 246841 - DNA, 122 bp, Homo sapiens
catgcgcagaatctctcctacgcccctgcccactcctcagccctctcgtccctcaggaaacgtatggactacaagtcccgaaatgcctccggcacttagctacgactgcacgtgcgcgcaca

SEQ ID NO: 246842 - DNA, 122 bp, Homo sapiens
atgataccccaccatgaaggcttcagaagcaaaagtttctctttctcctgccttcttgtccgtggcccctcattcttccccgcagttagccatagaaattagaatccctcttccccaaggtg

SEQ ID NO: 246843 - DNA, 122 bp, Homo sapiens
tgcctcagtctctctgtagagcctggggctgggtgcagaggaggcgagcgcactcctccgcggaagcgtattaaacgtcacccctcctctcccaagcccctgccaaagatcactgacaagct

SEQ ID NO: 246844 - DNA, 122 bp, Homo sapiens
cacagggtgaggggtgtcccagcctgggagtgccaggtagtggacccgcctattacatctcggtgctctttctccaccttccagatttctgcgccaggagatgaggggcggtagagccctgg

SEQ ID NO: 246845 - DNA, 122 bp, Homo sapiens
accctagctggcctgccctccggtagggcgggttggagcctcagcgttcgcgaagctccgcggggtggagaagcaagaccacccttcgaggtggtgcaccaatcacagaaatgttagcaatc

SEQ ID NO: 246846 - DNA, 122 bp, Homo sapiens
ccgagccggaagtgggcccgaggcagggtggagggcgccgggcgcccaggtaggactcaccgtccggaggcagggctgctcgcccgggcccacgccgccaggcacgaggagctgctgtaggc

SEQ ID NO: 246847 - DNA, 122 bp, Homo sapiens
tcctccttaccagtcccacgaatttaagaaattgagctttgggctgggcgcgttggctcacgcctcaatcccagcactttggcaggccgaggtgggtgtatcacctgaggtagggggttctg

SEQ ID NO: 246848 - DNA, 122 bp, Homo sapiens
ggtaggtgtcagtgagcagtgggcacaggtggctgagaggatgggggcccaggagcacagcgaaggcaggaaatggggaaatggcaactgcccagcctgccccagcacagccctcacccccc

SEQ ID NO: 246849 - DNA, 122 bp, Homo sapiens
gcatccaagattcccgcggacccgttgcaccgtatgcccgcgccagagacgctctgcgcccgcgctgggttccacccgccccggccacctgctgctttccgctcggcccctcccgggaaaca

SEQ ID NO: 246850 - DNA, 122 bp, Homo sapiens
gctcctcagccaggttccctaacgggccgctggtcttctcccccgcagcagggaggaagccggtggcctcactgccttcgtcctgcctcccgaagcggaatctgcagccagcatgctctctg

SEQ ID NO: 246851 - DNA, 122 bp, Homo sapiens
ctacacctctgtaagagcatagttaagaccatggactctgaagccagactgcctggcttccgtgccagctccactcctcctgagctttgtgaccttaggcaagttattgagctttcctgtaa

SEQ ID NO: 246852 - DNA, 122 bp, Homo sapiens
ttgcttgtcaagagtttatgttctctcggttccatttggtggatatggcaggaggccaaccgtgcaagtcagttcaaagcagtaagggaggagcttcactgtgttcagtcaagacaaacggg

SEQ ID NO: 246853 - DNA, 122 bp, Homo sapiens
agctgctgatgaactggcgggtgtagcactggccccagcccttcacaaagctgatctgcacggtaaagcccgtccacggctgctgcataaactcgtggtcattgggccgctgcaggctgtac

SEQ ID NO: 246854 - DNA, 122 bp, Homo sapiens
aggccaggagttcaagaccagcctgggcaacatagcgagaccccatctctacaaaaaacacgttaaacaaaaacgttaattgggcgttccgtgttgtatccagcaatcctaaccgccctccg

SEQ ID NO: 246855 - DNA, 122 bp, Homo sapiens
cgctttcaaactcttcgtatttctcctgagcatggtggtcatagtcctggtaagcctcgacgcactgcctgcaagtggtcatctcgccgccttccttgagcaccacatccagactgcagttc

SEQ ID NO: 246856 - DNA, 122 bp, Homo sapiens
catgctgcacgggaggggactgctgacctgggggcggaggaggagaaggtctgagagctccggaactccaggccctgccgagcacactggcctcgacatccgtgcctccgatcgcctctgct

SEQ ID NO: 246857 - DNA, 122 bp, Homo sapiens
gcgcacgtgggaggaggcagccttaccttggggcttggaggcttcggtggcattgggcggcgtcatggcgatgcagacgtccccctcggggaacttgtcacacttaagcatctcgggccagt

SEQ ID NO: 246858 - DNA, 122 bp, Homo sapiens
gacggccctcggcaccaccgagacccgcctcatgagccccaggtcccgccatcaggaccccgaggtgacctcagccacaaacctaacgccagggccacgttgctcgtttctcatccatcctc

SEQ ID NO: 246859 - DNA, 122 bp, Homo sapiens
aagccagccgacttggcggcagtctccagcactttgagacgtttgtccccctcctgcccccgtccagctatgacaagtgggctttcagtagatatgacagcctctggtggggggtccctggc

SEQ ID NO: 246860 - DNA, 122 bp, Homo sapiens
ctgtttctgtctcctctctgctccctctggcctcaaaatttcacaagcactcaggttggtcgcccttgcagggcctctgcatttgcgtttcttctgcctgcagtgctctccctccaagtctc

SEQ ID NO: 246861 - DNA, 122 bp, Homo sapiens
catcctcgccagtaaccaaagaagcgcaaattagcgcaaaaagcaacgccgctttgctgccggagcagcaaaatattaaacactaaagcccccgtgctggtgaggatttggagaaaccagga

SEQ ID NO: 246862 - DNA, 122 bp, Homo sapiens
ccttactcccattttctgtacatcacttttatctttctctccataaatcttcttccaccacgtggctatgctgtggtctccctgagcctactctagctggaaaggtaatttgcatttgaaaa

SEQ ID NO: 246863 - DNA, 122 bp, Homo sapiens
tacttctgcttctcgaagcgtttctccaggcccatcagctgcagctcggtgaacacagtgcggctccgacgccccttcttggctttggtgcctggctccccagggcctgccgcctccagctt

SEQ ID NO: 246864 - DNA, 122 bp, Homo sapiens
gcagggagagtgagtacagcctgctgagggccacaagtgttggtctaaaatgctggtccccgagtttcctgttttcaaagatatgaaatgccaaacccacactacccttctccttgggccag

SEQ ID NO: 246865 - DNA, 122 bp, Homo sapiens
gcaagggtgctcacgtgttcttgtacttgagcggagtagcccttccttcaaagtcagccccggtccccttgcactgtgcagccctctctgccggacccagcccttaacttctaaaatgctca

SEQ ID NO: 246866 - DNA, 122 bp, Homo sapiens
gcaccaccttcggggtctgcccagcggccgaagccaaggcccggggcccttgcagcatagcgagtaaggcgccccctacccaaaagggcttggcgcgcccgcggacacctgcgggttccggt

SEQ ID NO: 246867 - DNA, 122 bp, Homo sapiens
cacgtgcacgccggagcctcccgattggccaacactccctgatcacgcacggccttcctgcgcccacccacgcgtgggagcgccaatgaaatgactcagtgaccatctacaacaaatcagca

SEQ ID NO: 246868 - DNA, 122 bp, Homo sapiens
ggcgcaggtgcgagagaagctgccaatctctcctggagcgggtgggactaaggagggccccgggagctggggggttgttgtgtccttcctgcagaacccgattggcctgggtgagctgaggg

SEQ ID NO: 246869 - DNA, 122 bp, Homo sapiens
caatgctcaggttcatcctggacaccgctccatccgacaggggaacacttttgatccagacgctttgacaacctcgttcagtctcctctggagagagccgccaaaccctttgctgatgagct

SEQ ID NO: 246870 - DNA, 122 bp, Homo sapiens
aggggggacaaagaagaaatgagcaaagctaacagattcacgggacacgtgggggtagagcgtgctaaagcgcctcactgggacccactactggatctgacaagaggcaggcggggcgcccc

SEQ ID NO: 246871 - DNA, 122 bp, Homo sapiens
gacggcgctcgcgggggcaggatacatgcgtcatatcttcgaaaatcaggattagggggtcgggcgccgtggctcacgctcgtaatcccagcactttgggagaccgaggtgggcggatcaca

SEQ ID NO: 246872 - DNA, 122 bp, Homo sapiens
ttgttttcaagacgattcaaatgtgcctcatttttaaaacatgtagtatttattcttctgcgaaaatagttaatgcaagcccacgatttaaaaaaaaaaccaaaagtcctaaaaggtatgtg

SEQ ID NO: 246873 - DNA, 122 bp, Homo sapiens
ttaccagatgtgtggcttgagtgtccattcccgcaacaaaaacgctctgcagtaaagctccgagatggctgtgtttgtgttggactgctctagatggtaactttgaactgtgtctttctgct

SEQ ID NO: 246874 - DNA, 122 bp, Homo sapiens
ctctgttgtttaggagaaagctgcgtgactattcttgacccaaagatagatagatagaggcgaaactgcttccgtgaggtctcacagggaggacacagccacgtagttattggctctaaggc

SEQ ID NO: 246875 - DNA, 122 bp, Homo sapiens
tctgcagtcgccctaggtctgcgaggagatcgcggctcaggctggggagcccaggagggccgagtgcccgggcccctggccctccacccaccgctcccgtccactccgccctagcaccagcc

SEQ ID NO: 246876 - DNA, 122 bp, Homo sapiens
ctgtacatctactccacctgaaagtttaacgaaactcttcaagttgggtcacccagggaccgaacttctactctaagagacccaatccagcctacaaatcaaagaacatccccaaatggttt

SEQ ID NO: 246877 - DNA, 122 bp, Homo sapiens
ccgccaggaaggagcccaggaactgccccagcacatagaccggaaacttcctccagggcacgcggcccagcgcacagttagcaaaggtcacagctgcgttcatgtgggctcctgcgggcagc

SEQ ID NO: 246878 - DNA, 122 bp, Homo sapiens
cccgcccctggctggaacttcacgccctccggacggattgcccctatttctccattttcccgcttctcccagtcaagttctgaacttgtgaggcatctgggcctccccagaagacatttaac

SEQ ID NO: 246879 - DNA, 122 bp, Homo sapiens
ctgttctgtagttggacagacagagccctctagctgctttctggaagactgaagggcaggcgatgttggagggagggagtgcaggcaggggctgtgagggagttcaggtcagaaacaggtgg

SEQ ID NO: 246880 - DNA, 122 bp, Homo sapiens
cgccgctggctgggatgaccaggctccggggaggccctgacatgggaagggggtggtccccgggccagagactctggggtttgagatccagcccctcagcatctgatgttgacctggtttcg

SEQ ID NO: 246881 - DNA, 122 bp, Homo sapiens
tccgcctaccgcttcgtggacgcgcttgttgattggctccgaatgtcgaccaatggtcggcgaagcgggttgcttgccgcacggtcaatggccgcaaaccgggaggaaggcgggaagagagg

SEQ ID NO: 246882 - DNA, 122 bp, Homo sapiens
cccctcttccatcctctaccctgtaagccagtggtttctctttgctcttacaataaagagcgaatcttctccttggcctccaaggtccttcgctgcctggcccctgctgccgcttcaggtgc

SEQ ID NO: 246883 - DNA, 122 bp, Homo sapiens
acctttccctgcaggtcgagaagtctgagacacatcacccaaaagtcacctttccctgcacgtcgagaagtctgagacacatcatccaaaagtcacctttccctgcacgtcgagaagtctga

SEQ ID NO: 246884 - DNA, 122 bp, Homo sapiens
ccgccctgactcctcgcaagtttccttcgcgtgcgaacgcctcgcttgcccctgtgccagcggtccccagggctgtgaggatgagcgctgccaaacccctacacgaaagtttggttctgttc

SEQ ID NO: 246885 - DNA, 122 bp, Homo sapiens
tgcctataccctcagtaaggaaactgaaacccagaaaggctaaaaggcacttgcctcggccgagccagagccatgacccacagcgtcccctgggtttctaggaaattttctgattccagaac

SEQ ID NO: 246886 - DNA, 122 bp, Homo sapiens
caacacaaagagaaacagaaagagaaactctctgttagagaggaaggcgcgggttccaggcgggcattttgctcttggctacaaactgcaccgccctgggaggggagggtagtgggagggga

SEQ ID NO: 246887 - DNA, 122 bp, Homo sapiens
ggagagaggactggatgctctggggcgggtcattaggatatagctgtgtatggactcgcgcgaggcgaacgccgtccttcttcctggcgcagggtggcctcgcgcgcggggttgtggggagg

SEQ ID NO: 246888 - DNA, 122 bp, Homo sapiens
ttcttcgcctgctcggtgtcaagaccccgcaggagatggcggattcattcaggaagcagccgctccgggaagccttagccaagggtcttccggaaagacaccagtcttgatcctggagcctc

SEQ ID NO: 246889 - DNA, 122 bp, Homo sapiens
aggactataatcttctctgatggctcttcttattttccagtcatcaaagccatctgcatacgaattggaggtgctgaggtttaaactttctgatcgttgtgatggtgatgctgatgtcagtc

SEQ ID NO: 246890 - DNA, 122 bp, Homo sapiens
aaaaggcactgggactccggcacttggatcgacacgccgaggttagcctcccagccaatccgagtccagatagtgagatcctctggtccccgattggctgactgatctcgttcccgccccct

SEQ ID NO: 246891 - DNA, 122 bp, Homo sapiens
aagctccgctggggcgctccattagtgagcggtgatggttgccgcccacttgtattgaagcgtcctttgtcactaacaagttaaattagagatgttatttatttaagaagaaggaaaaaaaa

SEQ ID NO: 246892 - DNA, 122 bp, Homo sapiens
ccagcagcacccgccctaggaccggccccgcccccaagtcccggtccctagggccgggcacgccactccaggccccgcccagaacctccccgcccagtcaagccccgcccccaaactctgtc

SEQ ID NO: 246893 - DNA, 122 bp, Homo sapiens
gtttagaaggtcccaggcttctcggctgcaggagagatttcgcaggagacaggagtgaggcgttcgagtgctgcgtcccccactgaccgccagggggcgactgggccccaccgcggcctcca

SEQ ID NO: 246894 - DNA, 122 bp, Homo sapiens
gatggcctgccgcagtctgccggcgcctgtcgctgtgctcttccaccgatgtgttcctctcgacgcccggccacttgtgtgttcttcggctggtgtgtttctcttgacgcccagctgcttgt

SEQ ID NO: 246895 - DNA, 122 bp, Homo sapiens
ctggggaaccaccgcgcctgcagttcgtgcacctcttcccggagctgcgccagggaattacggacgaactggaaggggtcgagaagggtcttggccaccacctttagctccaagccttttcg

SEQ ID NO: 246896 - DNA, 122 bp, Homo sapiens
tagctcaaaaggttggtgtactgagaatgcctctgaaggagaaaaaaggctatttatttacggagtcacacatcatcaataagaagggaaaatcaagagcaaaaagaaaaacatagtagaag

SEQ ID NO: 246897 - DNA, 122 bp, Homo sapiens
ggctcaagtgatcctcttgcctcagcgtcccagtgttgggattacgggcatgagccactgcgcccagcctctgtgactttttaaattccacatctgcatacagggctctaactaccatttgt

SEQ ID NO: 246898 - DNA, 122 bp, Homo sapiens
gggcacatggccttacataggctgtcccaggcaatgcccagcctcatcctgtaaggaagtcggaagtctccgctttggaaactagttagctcacactcttttcgggtttgttctcttctggg

SEQ ID NO: 246899 - DNA, 122 bp, Homo sapiens
atctgtccctgaggctccaccacgctgaagggtgcattgtcctctccgctgttcacctcccggctgcatcttgggggtttctctggctgtgctgagcctcaaataacagaatcccgaggaac

SEQ ID NO: 246900 - DNA, 122 bp, Homo sapiens
taaatattgtatttcttgtattaagcaagaaagctgaggctaaactgaattgaagaagatcgaatgcaagtggtaatgggaaatacatgcccgttagttctttaggcctacttggggctggt

SEQ ID NO: 246901 - DNA, 122 bp, Homo sapiens
ctgagctcaagtggaaggcaaagtctgaagaccttagacaccgaggcctgaaggcacaggcggagattaagggctcaacccagcaggtgcatcctccccgcccccaacttcaactttagcat

SEQ ID NO: 246902 - DNA, 122 bp, Homo sapiens
cgcgtgctgcagtcctcgcctgtgtacccgggccagcacacgcagcggccgtccacgcagcgcccgccctcgccacagtcccaggggcagctccgcgtaccacagtcctcgccagtgtagcc

SEQ ID NO: 246903 - DNA, 122 bp, Homo sapiens
cccggccgcccccagctggtttgcggtcgtggcgggggcctgtgggtttctgggccccgacggcggcgagacgggcgccttcccagcggcgcaggaagcggcctcggccggaaggggggccc

SEQ ID NO: 246904 - DNA, 122 bp, Homo sapiens
agggttctccaaggggaggagacccgggggctggagagctggtttccaccctgaggataccgggtggctgagtgcattgctggactttgcccatgctcctaatccttctctttgggatggtt

SEQ ID NO: 246905 - DNA, 122 bp, Homo sapiens
cagactcccagaagaaagcaggtgttcagcataaaccacactgtgtattctttaagcactcggaactactcttaatcagttccaggaatggtgggatccttcctgaaatctaatttcccaga

SEQ ID NO: 246906 - DNA, 122 bp, Homo sapiens
ggattgggggcgtgggtgttagcccctgctccccgtggcggggtggccagaggcctggagcgcggctctcagcctggtggacccgcgcgcggtgcgcccgcttggtgcccggacctggcgcg

SEQ ID NO: 246907 - DNA, 122 bp, Homo sapiens
tcagttattctctggataagtatggtggcagctgaagcttctgggcttgtatacagcctgcggtatatctcatctgtgctgtagacagtctgtaaatctgggtttggccatgaaagtatatt

SEQ ID NO: 246908 - DNA, 122 bp, Homo sapiens
atacatgccatttataactctgaaaatttaattgatggttctcactttgtttctgttacccgtaaagatttatgccatttgaaacaacaacaacaacaacaacaaaaactcctttgcttttg

SEQ ID NO: 246909 - DNA, 122 bp, Homo sapiens
gagaaatcatggccgcatcagtgaaatccttagtgacagtgtggtgccagacattccgtccgctgtcacaacagctagcatgcaggtcctcaagcgacaggtccagtccttaatggttcatc

SEQ ID NO: 246910 - DNA, 122 bp, Homo sapiens
tcttagcaacgtccagtccaagtgtggctcaaaggataatatcaaacacgtcccgggaggcggcagtgtgagtaccttcacacgtcccatgcgccgtgctgtggcttgaattattaggaagt

SEQ ID NO: 246911 - DNA, 122 bp, Homo sapiens
ccgcggagtgcaaagcactttctcctagcgcgcagagcatatatctgaaagcttctcgcccgtcctccgcccaacacccccgcaggactggcagggtcctcctttttttctccttgtgtacc

SEQ ID NO: 246912 - DNA, 122 bp, Homo sapiens
ttctgttttacagaggaggaaatggaagctcagaaagctcaagtaacttgcccagcattacgcagcaagatgtggcagagtcgggactgaaacccaggcctctggctataaactctccatgt

SEQ ID NO: 246913 - DNA, 122 bp, Homo sapiens
gcctcagtcctgttacggtggcggactcgcgaggttttccagcagctcattccgggacggcggtgtctagtccagtccagggtaactgggctctctgagagtccgacctccatcggtctggg

SEQ ID NO: 246914 - DNA, 122 bp, Homo sapiens
agggtttaacacgcctgctccaggagctgcgccacacacccgccttcagattcagcccggcgtgcctgggcttctgaagtcccagagcactcagcccggcccatccacggatggctgggaca

SEQ ID NO: 246915 - DNA, 122 bp, Homo sapiens
ttaatgatctttttctttgagacagggtcttgctctgttgcccaggctggagtgcagtgacgtgatcatggctcactacaacctctgcctccgggggctcaagcgatcctcccacctcagcc

SEQ ID NO: 246916 - DNA, 122 bp, Homo sapiens
caacaataaagcagaaattcattcatttactttctagttcttgctgtaataggtctaaaccgtatgtcaggcaagaaaaagaaaacctgaatataaaatgctgtgctgtgttagctcatctg

SEQ ID NO: 246917 - DNA, 122 bp, Homo sapiens
ttgacttgacgtcgctgagcaacggaagagtgggcagcatttgctctgaacgctcgtgcgcgctaccgcccagacggaagcggaagtgccggtggagcgcgagtaggaagtggtgagttcgg

SEQ ID NO: 246918 - DNA, 122 bp, Homo sapiens
cggcccctgctcaaagggaatcagatgggctcattgtgggccagaaagaactgactgccccgagacttccggggtggggaggggggtgcacttcctgcccggggcacccaggatgggggagc

SEQ ID NO: 246919 - DNA, 122 bp, Homo sapiens
gatggggaaggcaggcggagacgccggacgggattcttgggggtctaggagaccatcctccgccatcctcttccgcgctcacctaggggaatgtaggcggcagctcggaggcgggggtctgc

SEQ ID NO: 246920 - DNA, 122 bp, Homo sapiens
tcggcctcgagctctgcctggcggggccccggcctggaggcatccccgacccgcacctggcggcgcgacccacctacctgcccgtccccaaggcgccgccaggagcaacagcagcagcggcg

SEQ ID NO: 246921 - DNA, 122 bp, Homo sapiens
tgggtgccaggctgcttgttagacggcccttggagagatgccgggacagcctgactctttcgggcagtggtggtgacattccttgtggtgggactttcctgccttaggccaggcctcttcag

SEQ ID NO: 246922 - DNA, 122 bp, Homo sapiens
ggcctgggggtcgatctccatgctgctgccctggctgctcttgccgctgctgctggtggacggctccttcacgatgatggtcgggatagggatggagcacgtcttctcggggctgtcctcca

SEQ ID NO: 246923 - DNA, 122 bp, Homo sapiens
gggtgactgggtccccctcccacactagcctccttccccaccccctccccgcaaagatcacggactagcccgcctcgcccacccccgcggctcactgacgctcgcccttcctagcgccctct

SEQ ID NO: 246924 - DNA, 122 bp, Homo sapiens
ggtgtggagggagaggtgcgggcgggaactggggctgcatgtggcacttgcaggccagcgcgagttccgggtgggcatgggcttggcagaccatgcctgcccgagcagtgaggggcttagca

SEQ ID NO: 246925 - DNA, 122 bp, Homo sapiens
tgcttcgttcagaaccttacctttagtcactgctttggaaacacacattatccacagtcacgctgctcccagtgcaatctccgggacaatatatctctattagtttgcatttgtagctatcc

SEQ ID NO: 246926 - DNA, 122 bp, Homo sapiens
gagaccaactggtcagtattgctcactaaaggcctcttaaccaccagctgggccaccaggcggagagactaactgaaccggctacagtaaaaatcaaactgtttctgtcactgacccaacat

SEQ ID NO: 246927 - DNA, 122 bp, Homo sapiens
actggttcctcttcagagcctcagctcagcggagctgccgtttgctggtgaagcccgtgacgtgcaaagcatcctgcctataggatttgaggatttctcagtgcagtttttttctacccact

SEQ ID NO: 246928 - DNA, 122 bp, Homo sapiens
ataaccatgaaaaagtctaaagtagggcagttccggagcagccttttcccataaagcaagcgggtacctcacaaaactccaggcaaaagaatgaatgatagagcactcaccaatagcgagtg

SEQ ID NO: 246929 - DNA, 122 bp, Homo sapiens
gcagcggcgggtccgggccccggggggtccagggtgagtcctgggacggggggcgggggccgggatggagagggcccggcaagggcgaggcctcgagccgcggccgctggactacagcgcgc

SEQ ID NO: 246930 - DNA, 122 bp, Homo sapiens
tggtggtcgtggagcccggatgggagccatccctgctgcccctgctgtgccttcctctatcgcaggttccctcagcactaagggttcagttgcctgatctgagtctggtctttggagatgta

SEQ ID NO: 246931 - DNA, 122 bp, Homo sapiens
tagggtgagtgtttccagctcgcgaagccccagtgggcgtgtgttacagtgcgctctttccgttttgcggtctgtagttggcttgtgttgatcagcgcaactagaccctctgccttatcgaa

SEQ ID NO: 246932 - DNA, 122 bp, Homo sapiens
attcgcctggctgcattttacatttctttctccggcagctggggtcacgaaggctgctctcgccggcggtgttggaacgtggacacgtgcgctttggtaatagggcagcctcccccgcgggc

SEQ ID NO: 246933 - DNA, 122 bp, Homo sapiens
gctcagtctccacctggacagtggcagcatggcagcctcagaaaggaaacattttgctgtcggggatcatcatgggcagatcacaggctaaggggaaagaagctccctgtgtatccctggat

SEQ ID NO: 246934 - DNA, 122 bp, Homo sapiens
acagccggaggattcagggtctggacgatagttttcccagccggaggattcttcgaagagcgcttagtaaaggacggaagttccacgtgtttgtgttgagcaactgcaggtggtgggcggag

SEQ ID NO: 246935 - DNA, 122 bp, Homo sapiens
ggcgcgggcgtccctggtggggccagttgtacgctgcggcggtcggcggagatgagcaggcggcggtgtgcggtcccagggtccagggtcaggtcggctggagacggggaggcagggagagg

SEQ ID NO: 246936 - DNA, 122 bp, Homo sapiens
ggtcctgcggcgagtgcgggcggcggcgccggttcggggaggcagactgggagctgcgagcggcggggctgcgaggggcggagggggaggggagggagagaggagggagggcaccggggagg

SEQ ID NO: 246937 - DNA, 122 bp, Homo sapiens
cgtgtgccagcccgatcacccactgggtcttctccgccaccaccacctcccagtagtggacgccactactgaaggcttcagaacccagcaccgacacctccacatcgaagcgctttggcgag

SEQ ID NO: 246938 - DNA, 122 bp, Homo sapiens
gcactggaacccgatcggagtgtatctgtggggctgcggcgatggctggggccctaacgtcgccgaggacgcccgcctcgggagcaggagctgcggcgtggccctggcgcttccggacaccc

SEQ ID NO: 246939 - DNA, 122 bp, Homo sapiens
ctttagggttagacaggttggagatgagaaattggaccatgcaggaagtactgtcggaggcgtgttcctgactttactaccctgagccgcccacggctggggcagtccccgaggttccacct

SEQ ID NO: 246940 - DNA, 122 bp, Homo sapiens
tagctgggattacaggcgcctgtcactaagcccagccaatttttgtattcttagtagagacgggcttccccatgttggccaggctggtcttgaactcgtgacctcagatgatccatacacct

SEQ ID NO: 246941 - DNA, 122 bp, Homo sapiens
cgcgccgggccgtccaggctgaagagcgcggcgctcatggcggcgtcgggccgggctctgcgtccaagcgaggctgtcacctcgctgggcccagccccgccgccttttctagccccggctga

SEQ ID NO: 246942 - DNA, 122 bp, Homo sapiens
agaaagccagtgtggctgggcagcaggtcctgctccccccggcccgtggccaggcaggtgcgcaggggccgagtcctgcccgtggctccacccagctccagctccgggacccgcgcggggag

SEQ ID NO: 246943 - DNA, 122 bp, Homo sapiens
tactctccccacccagcagatcaaactcctaacccagcatgaaagataaactacaactcccggcaggccttgcttccgaactgcgtcttataacctcggctcaggcccaggcccagaccgct

SEQ ID NO: 246944 - DNA, 122 bp, Homo sapiens
ttgagctcgatctcgcggatgcggctgtacttgtagaacaggtcctgcggctccttctcgcgcacgtgggtcggaaggtttccccacgtagatgcacccgtcgccctcccagccgcgctcgt

SEQ ID NO: 246945 - DNA, 122 bp, Homo sapiens
atgttggaaaaaaagcgagaaacatgcttgggggctctgttttacggctgcacttgaagtcggaatctgcgatcgtaacccaatgctggcctcgccaacgtgttttcggtattgtcgggata

SEQ ID NO: 246946 - DNA, 122 bp, Homo sapiens
atgttctggaacaagggcaggcaagtcctccctgtctcgccacccgggctgtgtgcagtgcgggtgcagccatgcctggggctgagactggcagtcttgtcctgcaccccgaggggcttctc

SEQ ID NO: 246947 - DNA, 122 bp, Homo sapiens
tgccacacaaacgagccggaggcttctggaggacagtgtgcctagatgaaggaaccaggacgcagtggcgcttttccatctgtaccccaacatgtcagggtatatcaacacccatatgtcac

SEQ ID NO: 246948 - DNA, 122 bp, Homo sapiens
aaggctggctgggcacagagtcaagcatcaggacacagagtcatgcatcaggttgttttccgcggggaaaggtgtaaggaggaaagggctgcctgtttttttgcccctttacacacatgcat

SEQ ID NO: 246949 - DNA, 122 bp, Homo sapiens
actgtgtggtgttgggtgtctgcgcctcgttgctgggggactgtgtggtgttggggtgtccgtgcctcgttactggggggctgtgtggttttggggtgtccgcgcctcattactggggggct

SEQ ID NO: 246950 - DNA, 122 bp, Homo sapiens
atgaaaagactcgcctcttcttccccacatttgttgagaatctggtcacagtggcattgtcgagggtattgaaggtgaacaaaggagatgtggtccctgccctcagggaatgcctagtctaa

SEQ ID NO: 246951 - DNA, 122 bp, Homo sapiens
tcactccgcagaccgtggggcggagcctgatggagtttcgtttccgcggtgcccgagggacgccggggtaacggaaaccttggccaccttctacgaagactagagagggtcaaacctatcag

SEQ ID NO: 246952 - DNA, 122 bp, Homo sapiens
cgctttgcaatctgcaccgagaggtgtgcgcggaggggcggaggagggggcaggaggaggcggccgccttgaggcgtggccaaagcaaacttctttcgcggaaaaaaaaatccaaaccaaaa

SEQ ID NO: 246953 - DNA, 122 bp, Homo sapiens
cgcagcaccgcagcctctggggtccccttatacttggccttcagggtcttggcattcctgcggtccagcttcacgccgaactgcttctcgacggcctccagggccgtggcgtccagcatctg

SEQ ID NO: 246954 - DNA, 122 bp, Homo sapiens
agatggggaacagggcctccggtctaggtggtttatctctgtgctctgcacagccctggacggggaacaaagcctctggcccagggtttatctctgggctttgcacagccctggaggaggag

SEQ ID NO: 246955 - DNA, 122 bp, Homo sapiens
ttttgggagatgatatgatccaggctgtatgatctcatgagcaaagcctatgagatgtggcggacaaactcactcaaaggcttcagttcagttgttttttttttttaattttccttcttttt

SEQ ID NO: 246956 - DNA, 122 bp, Homo sapiens
cgtaccgctccagcgcctccttcaccagctcacgggcgctggaggtgccggtggccaggacgctcttgtagtgggttcctgtgcagacactgtccccaaacaccttcaggacaccaggggcc

SEQ ID NO: 246957 - DNA, 122 bp, Homo sapiens
aaaataacaaatatactgtgatgggggagggggttgttcttactagaaaaattaagaagtcgttacttattttgagtccctaacttggtttcgaaatataacacgggactaagaaattcagg

SEQ ID NO: 246958 - DNA, 122 bp, Homo sapiens
agtgcccgcagctgcctcatcctgcaggcctgagctgccttcatgggccagccagggtcccggctccctcagccctctcagactctgcccgtctcattgttgagaagacagtgaagcagagg

SEQ ID NO: 246959 - DNA, 122 bp, Homo sapiens
gcaagtatttattcaatattgaaaatggtggaaagacagatatacatcagcacatactaacggctaagcataaaagatgtgtgatttttgtaccaaaggaatggataaaatgacaaatttta

SEQ ID NO: 246960 - DNA, 122 bp, Homo sapiens
ggagttcgggaaccagctggagggcaagtgggccgtgctggggaccttgctgcaggagtacgggctgctgcagaggcggctggagaatgtggagaacttgctgcgcaacaggaacttctgga

SEQ ID NO: 246961 - DNA, 122 bp, Homo sapiens
aagttgtcatttaggcgcgccaaaagtggtctggcctctcgtgcttcttgagatcccttccgggctctggtctatcttgtctccttagctgggggcctacagtcatctagagtaaaagggat

SEQ ID NO: 246962 - DNA, 122 bp, Homo sapiens
tgtctcccagaccaccacccatcaccaagaggaccggctctgaggaccggagggagacttcgaaatgtggaacccacgtttcagcaaaccacgaagacccagcacccccagggtgagctctt

SEQ ID NO: 246963 - DNA, 122 bp, Homo sapiens
cctaagccaggtggagcccggcctcaggcctcttgctgaaccggcatcccacccgaaacccgcctgagtcccagaggagtgcactccaggacattcagccaggtccacccgtgtcttagccc

SEQ ID NO: 246964 - DNA, 122 bp, Homo sapiens
ttggcctttactgttcatccagggtcacccgaggacaccttccctgctcacctccaaggccgagtaggagctcattttctgggtgcccacggccccttgtgaccatttatcacgaccacgga

SEQ ID NO: 246965 - DNA, 122 bp, Homo sapiens
cctggcccctgaacctgccgttcccaactcagacaaagccgtctccaactcggacaatggcgcctccaactcgaacaatgccacctccaacttggacaatgtcgcctccacctcagacaatg

SEQ ID NO: 246966 - DNA, 122 bp, Homo sapiens
atggaactggaggaaagacatcaaaataacaaagagcaagactagccgcgtggtggctcacgcccgtaatcccagcactttgggaggccaaggtgggcagatcatttaaggtcatgagttca

SEQ ID NO: 246967 - DNA, 122 bp, Homo sapiens
ctccaggctgctgtacgatgtgttcaactgagtcaggctggactggggggggtggcactgcgttgggggacagctctctatctaaagagtcaagtgtttggagctggcagggtcctcctgga

SEQ ID NO: 246968 - DNA, 122 bp, Homo sapiens
agacttcttaataaggtaacgggcatcctaaaatatcaaaacagctttcctaagtcatttcgcctaaactttcacatctatagcacccttgaaaggaagttttttggcttttacttaaaaac

SEQ ID NO: 246969 - DNA, 122 bp, Homo sapiens
tcacggcgaccacagggctggtcgcagccaggacggggtgaggagctgcagccccagcctcgccttcccttcaagccgagcagcttccagtgggaggaaacgccagcgaccgggcccccgtc

SEQ ID NO: 246970 - DNA, 122 bp, Homo sapiens
ggcacagattccttgtttgtgataatcagaatgccattctatttagcagtttccagttctcgattaaaagggcttttgtatcgtgtaacagagcctatgcttaggatattgtaagaaggaaa

SEQ ID NO: 246971 - DNA, 122 bp, Homo sapiens
ccccggccgacccgtgcgcccccggctcctacctgcagttctacgagggcccgccgggggcgccccggcccctggggtccccactgtgcggcctgaacatcccggtgcctgtggcatcctcc

SEQ ID NO: 246972 - DNA, 122 bp, Homo sapiens
ccagcccactgagctctaccaagctatgttagagcgttgcaaactagaaaccagcacccacggggttgtaggatgccttaggatttataagttggtgtcggaaagagggtttctgtgaattt

SEQ ID NO: 246973 - DNA, 122 bp, Homo sapiens
cagcagtaccaagaacaccttgtactctttttcagactgaattttacggggctctaactacgcagtaggctctgtagtatgcaaggtcagagcctagcttctttattcctgtcctcctcaaa

SEQ ID NO: 246974 - DNA, 122 bp, Homo sapiens
tccggcgtggcccaaagaatcaagacccggtcagcaatggagcccagaacctctggcccccgccagtccagtgccgtttcttctacaccgaagtggtgttccaagacccacgctaggagtcc

SEQ ID NO: 246975 - DNA, 122 bp, Homo sapiens
gtgcagcccgcctgctgctgggggtcaccccttcttcgaggtcagtggcgggaagggtcacgtcccgaggttggaaagccccctcatgagggacctgtcctgggaatttgttgcccaggctg

SEQ ID NO: 246976 - DNA, 122 bp, Homo sapiens
taaggcccggcgagaagtcgagcacagctgctggcccgggtgctaagcccttcactgccacgggccgggcgggcggggccggccgagccgacgcccacccggaactcgcgctggcccgcaag

SEQ ID NO: 246977 - DNA, 122 bp, Homo sapiens
accccaccgcagggactcgcaagaagctgcgcctgtaccagttcctgctggggctactgacgcgcggggacatgcgtgagtgcgtgtggtgggtggagccaggcgccggcgtcttccagttc

SEQ ID NO: 246978 - DNA, 122 bp, Homo sapiens
gctgaaacgtggagccccagctcccgagctcccgagctggaggcgcgccgtccttggggacgtcacagcgctggaatccgaggaatgccgggctgcaggagctccttctgcaggcccggaga

SEQ ID NO: 246979 - DNA, 122 bp, Homo sapiens
caagccggggcccgtgggcacgctcggggccactgctcccaccacagggacgggcgcactcgacaactttcaggacccacagcaccaagaggacagggaggagccagcaaaggaatgacgct

SEQ ID NO: 246980 - DNA, 122 bp, Homo sapiens
aattcacccggtgggccctgcagcttcaggagagtgagaaaggtccactcagccccatcccggttgctgcatattgcccagctcccaggacctcacactctgtgcgtgggacaaaaaaagag

SEQ ID NO: 246981 - DNA, 122 bp, Homo sapiens
ttacttcaatagggcctgtgtggcattggggtttaaaggagaggcagtttgcagggagagcggcatggcaagaacaacagagctggggaaggaggaccctggtctcatctcagccataggcg

SEQ ID NO: 246982 - DNA, 122 bp, Homo sapiens
atggtcctgggaagatcccttgtgacaaggcacctcccccgccccccaggatcctttccccggtgctgcctccccagcgtggtcccagctgctctgagatagggggcaaagcttcagattgg

SEQ ID NO: 246983 - DNA, 122 bp, Homo sapiens
ccccggccccgctagcagcagcagcaggggcagcgcccgcacgggtggcggtggcggtggcggcgacatcgggcgacggcggcggcggcggccacgggcccccggccccatggcggccggcc

SEQ ID NO: 246984 - DNA, 122 bp, Homo sapiens
attctggagtgtcagtggtgtcctccagcctggttctgagtctggaatctggctgggatccgggatgtgccaagacttctgtattctcatatattttctgagcctgattatatagcctctcc

SEQ ID NO: 246985 - DNA, 122 bp, Homo sapiens
accgctgggagccctgcccccggcctgcggcggccctagacgctgcaccgcgtcgccccacggcgcccgaagagcccccagaaacacgatggtttctgctcgaggatcacattctatccctc

SEQ ID NO: 246986 - DNA, 122 bp, Homo sapiens
ttgtatgaggagaaagtgaaccaaatcgagaacattattaaagacacaggtaataatatgcgctgtagagccttctagtatgctgagtctcatttggtcctccttttgtggcaagcatagcc

SEQ ID NO: 246987 - DNA, 122 bp, Homo sapiens
ctctccttccccccgctctgggtcctcagtcatcagtgcagacatggaggtgcaggtgcacgccgtacaccctcacctggggcccctggcccatgcctccccaccctccctaccctgatctc

SEQ ID NO: 246988 - DNA, 122 bp, Homo sapiens
agcgggcctccctgctgttgcctaggatatgtcccgaggtgcctcccatcggacatcttacgtgggtgtttttgctgatgcgtttttgaagctcagttaggtcaaggaagtgcctatctgtg

SEQ ID NO: 246989 - DNA, 122 bp, Homo sapiens
cttatagaaaaggtaaaggaaatcccaacatgcatgcactgccttagtgaccagggaattcgccccatggctatggggaaattagcctgaggcttagttttcattatcactgtctcccaggg

SEQ ID NO: 246990 - DNA, 122 bp, Homo sapiens
tttctggaggatcctggggttatgaaagctcagaagtcagggttattcctggtcccaacacggaacgaaacaggctcggatgtctcgcccaaccctcatatctcagggtttataacctttct

SEQ ID NO: 246991 - DNA, 122 bp, Homo sapiens
cagcccccgtcttacagggtttcttggcatctttgatcttcatggcgtcggcccgaggggcgatggacggcctccgatccggggcactgagagcagaggcggcgactccggaggtggctggg

SEQ ID NO: 246992 - DNA, 122 bp, Homo sapiens
atctgaacgccatatgcagcacctccctcctggcccttgagacatcactagtccccagaacggacccctccgtcctacacctctaggagtcttgccacgtggccaggacgttctaggcggtt

SEQ ID NO: 246993 - DNA, 122 bp, Homo sapiens
ctgcctttctttccacatcttgctctgggtccattttgcatatccaaactcatcaaggtacgcagcagattcaaagggtttcttatttatgaagagctgctctccatggaaggcaattgtgg

SEQ ID NO: 246994 - DNA, 122 bp, Homo sapiens
tgcaaaggattcagatgaagagctgtatagggcgaggtaggggtagtggtgcagagctttcgtgccctctgggcaccaccctctgggagcctccatgtgtttgtgaaccccgaaactttcag

SEQ ID NO: 246995 - DNA, 122 bp, Homo sapiens
cggaggtcgggaagctccctcccagcccggagcttgaacttgaacgcggccggccgctcgcgcaggaccacaccgccacctcccggcgcggccccagaacccagataatccgtttaaagcac

SEQ ID NO: 246996 - DNA, 122 bp, Homo sapiens
ttaatatcattaaacatctagtcagtctccaagctttcacagttagtgctcttgttcattcgccctctttatctccttttctcacccaccctacccccagtatttacaattctttgttttga

SEQ ID NO: 246997 - DNA, 122 bp, Homo sapiens
ttcatcccagtccagggattatggcagtgaccccatcaagactgggcactggaatcagagcgatctggcagccagtgcaatgaagtaataacaatggctgtcctttcctgaacgcctgctgt

SEQ ID NO: 246998 - DNA, 122 bp, Homo sapiens
ggccagcagcccagaaagtccctccccgcaggcggagacagccccaagaagtcgacgccccggtcccgccgcccggccactacccagagggctgccgccgcctctccaagttcttgtggccc

SEQ ID NO: 246999 - DNA, 122 bp, Homo sapiens
ggcccccatagcggctccgggccctcggatggcgtgacggcttgtggggcctgcggggtgcgctgcccccggacctgcggggggaggcggctgagctggcggcgctcgcgggcccagtggtg

SEQ ID NO: 247000 - DNA, 122 bp, Homo sapiens
aggacggggacaagcaggtatgaggaccgcactcctgcagcggctgcaagggtgctggaccgacattccagagacccatgggtgcccctagacttctgcccgcagaagcgagcacagcgacg

SEQ ID NO: 247001 - DNA, 122 bp, Homo sapiens
ctgctgtctcctccaggcggcgctgggcaccgcaggcctctgcgttttgaccacccgcgccggttcgcggaatggccacatcctggcgactggcaccagagagatgcaaccgtctgagggcc

SEQ ID NO: 247002 - DNA, 122 bp, Homo sapiens
cttcccatgtttattacccagagtcgccctcccacaacacagaacttaagggctgcagagcgctgcatgttctgagtctgtctgcctcacccctgcaaacgacctaattattctctcaaata

SEQ ID NO: 247003 - DNA, 122 bp, Homo sapiens
gtccacgttcacgtaaacctccctacgaggggaaactacaggcgcgctgccggagggcgccgccagtgggcactcacgcacagctgctttggccaccacaggcgccccgggccactctcttc

SEQ ID NO: 247004 - DNA, 122 bp, Homo sapiens
gcgttgttttaagattgatttaaaatgtagaataaaagggaaggttatgggagggtgggacgtctaatgtaaacccagcccagtgattacattggctgggcgctgattaggttaggatgttg

SEQ ID NO: 247005 - DNA, 122 bp, Homo sapiens
agcaaactgaggagattagatagattagcaatttgagaccttgagttatctaaattagaacgtggcagaatcaaggactagaagtcacttttctgggttctttctatgaaacgatgattcta

SEQ ID NO: 247006 - DNA, 122 bp, Homo sapiens
tcagagtcctcaacgtgggtgtggccgaggtgaagaaatccttcctggggcccttgtccccgtcctgtaagatggtgcagatgatgaggcagtttctgtaccgggtcctgcccgaggactcc

SEQ ID NO: 247007 - DNA, 122 bp, Homo sapiens
cagagctggtctgtgtgcccgctcaggcgtgtcaccttctgctcaggcatgtcaccttcccgggctgtctagagctggtccgtgtgtccactcaggtacgtcaccttcccaggctgtctaga

SEQ ID NO: 247008 - DNA, 122 bp, Homo sapiens
cacaaaacaggcacaactcttgatggttgcacaaaagctgctggctgaggactctgtccacggccttgactggggctgagagcgaggggctgcagaggaggaggctctccactgcgtctgcc

SEQ ID NO: 247009 - DNA, 122 bp, Homo sapiens
tccgcccccgataatgtcccatacacgctcctggctgtgggcagtgcagcccatgggtagcgcccccaaccagcccccagccatggggagtgatgcctcggataacacacccaacaagttcc

SEQ ID NO: 247010 - DNA, 122 bp, Homo sapiens
ctgtgtcatggccacggggctcctggggaggctgctggagagagcacaagaggaaagacccgagcaggctgagcctcgctgcttccagcccaggctttattgagctgcagatgaaggcagtg

SEQ ID NO: 247011 - DNA, 122 bp, Homo sapiens
gggacgcagccgggacgcggctgggcgctgggggcctgcgggcggagagctcgtctggtgcgcccgccccaggccggcaggtccctgccccgccccgcccgcccggagtcagcccccagctc

SEQ ID NO: 247012 - DNA, 122 bp, Homo sapiens
tcctggtccccgtggaagggactgtggtcaccgctggtcctggtccaggtggaaacagaccgcggctaccctggtgatggaccccacggggcacacccgcgccaccccgcacccagggctcg

SEQ ID NO: 247013 - DNA, 122 bp, Homo sapiens
cttgggcagccgcgggtcgctgctgcgtcggaagtctccgtcgccagggagccccttgggcgccaggtcctgggcccctgggcgaagtcgacgccagaacatgcttggccccgcactcagct

SEQ ID NO: 247014 - DNA, 122 bp, Homo sapiens
ggcgctgattggtgcgtttacaatccctgagctagacacaaaggtcctccacgtccacatcggattagttagatacagagtattgacacaaaggttctccaaggccccaccagagtagctag

SEQ ID NO: 247015 - DNA, 122 bp, Homo sapiens
tatattgttaagttgaaaagcaaaatgcaaaagtagacttacagcagggtttctcaacaacggcactttggcttattgaaccagataattctttattgtcgagggctaccctgtgtacagta

SEQ ID NO: 247016 - DNA, 122 bp, Homo sapiens
ctcatacattccttctaaaatgtgggctttctgtgtacatgggcgcgcattcccaggactcggttccctgggtggaattcacccaggaatacaatcgattttctgaacctgcgtaaggccac

SEQ ID NO: 247017 - DNA, 122 bp, Homo sapiens
atgagtccgcggtgccttgtgtggtgggactaggtgagtgctgtatccacaggctgtggacgttcagatgcagagcataacccggaggggccctgatggggagccccagcctgggctggaga

SEQ ID NO: 247018 - DNA, 122 bp, Homo sapiens
ctgaaggtgagagccgtgcctgtcccctgctggacaaatattccatacatgggggccacacgtgcaaaggccctgaggttgatgtgtttataagtggccagagaacagcgggagcggagggg

SEQ ID NO: 247019 - DNA, 122 bp, Homo sapiens
gcttaggtgcccgagctactgagggtctaagtccgggcagccgaagagtgtggtaggtaacggtcctcagcgcaagggtcatttcgtcgctgggaagggacggccctcgcccgcggtgatgg

SEQ ID NO: 247020 - DNA, 122 bp, Homo sapiens
aaggcgcgtttgaaacagatgctttgcctggccccgggcctgcagccactcccggctgagcgtgggctctccccggggcagagaagttgttttccgaatgttccttgctcttaggaaacctg

SEQ ID NO: 247021 - DNA, 122 bp, Homo sapiens
taagtgaattgggtcaccaaccagtctctccctgtaaaagctcaatgagtaatccttggccgtttctctatctctcccttggccacttgaaatccggctcattgtacataataaacactctt

SEQ ID NO: 247022 - DNA, 122 bp, Homo sapiens
gcctcggtatggatctcttggcagagggggctacaggtgtgactgcaggtgtggccggcgcgcacacatgaagtcacaggtgttgaaccagtgtccaggcctggcgggaaggcgcaggccgg

SEQ ID NO: 247023 - DNA, 122 bp, Homo sapiens
ctcatgatagtgagttcacacaaaatctcatagttttacaaggggcctcctcatttcctccgccctcattctctctcctgccgccctttgaagaggtgccttctgccgtaactataagtttc

SEQ ID NO: 247024 - DNA, 122 bp, Homo sapiens
agatgttgctatagaatggaatatagtagtgagacctatgagatgtactactagaaagttcgtaagactgaaatgcaatgaatggaatgcagagaaagcacatttcaaggagatactgaggt

SEQ ID NO: 247025 - DNA, 122 bp, Homo sapiens
aaggaggacttttttttgtttttctcttttgaggcaattcctgaggggctggctcagactcgagtgtcacagaaccaagaaaacaggagctgccttgatccttaggtggtctctcctggctg

SEQ ID NO: 247026 - DNA, 122 bp, Homo sapiens
cagaaatagcccgcccagccttggtgagccttcgctcccacaggagcccaacacccagcccgccacagtccggtgagcagcaggctgtcggtgttcctaagtcagggaaatctttggaagaa

SEQ ID NO: 247027 - DNA, 122 bp, Homo sapiens
gttctttttaaccgatgcgaggtcttttatcatatttctctctcccacactgcactcacccgtttcccccgatgggcatttatgttaccgtcactcatgattcagtgactgggcttgaatgt

SEQ ID NO: 247028 - DNA, 122 bp, Homo sapiens
cgcggcctcccctcccgggtctccccctacagtccccccactcccgcccacgggtcccctcgctccccgccgtcgggtcagccctgtcccggccttctggaattgctgaaccctgcgggggg

SEQ ID NO: 247029 - DNA, 122 bp, Homo sapiens
agtttcagcctctctttggacccaaggcagattcctaaccccgcccccgcagttcgaccccgccccacaccccgggcccgcccaccttcctgcaggctgaggctcctggcggcgggtgagtc

SEQ ID NO: 247030 - DNA, 122 bp, Homo sapiens
aagctgcaaagagccatgacggcacctgtgagtggtcacacaggggccaccgagaacttgcgaggggcgttcagaggcagcactgcagaaccgcagacgcctagccagccaggtccaggaca

SEQ ID NO: 247031 - DNA, 122 bp, Homo sapiens
cagtgccaaggatttgtgtttttgttgttgcggttgtcagcagtatacccagtggccagccgtgttcagggatggcaccgttttctgtatggagttcacaagcacgaggtttagtacaacac

SEQ ID NO: 247032 - DNA, 122 bp, Homo sapiens
tcgggttctggctacacacgctgcgcctccatacagtttgtcccaggtttggcagcaggccggctaccttcaggaattctttgctttggcttctgtctgttcctgtctgttgggcaagtttc

SEQ ID NO: 247033 - DNA, 122 bp, Homo sapiens
gctggcctctgagctgagcttgggagataccaggtaggtttcagcctcaggacctttgcacgtgctgttcccagagaaccatgtcactgaatccctcaccttcttcagatcttcactgaagt

SEQ ID NO: 247034 - DNA, 122 bp, Homo sapiens
gttcataactgtgactgatagacagcaaaagggtaagcagccaacatagccaatgaggaccgcatgctaattaggttcctggcacaatttcggaatataagaagggcagacagattatcctg

SEQ ID NO: 247035 - DNA, 122 bp, Homo sapiens
tcctgcggagggaggtggctcgcagcaggaggaccggacaaaggacccgaagtgaggccacggcttcccgtcgctctgcaccagccccaccccagggctcccagcagagctgaatgtccttg

SEQ ID NO: 247036 - DNA, 122 bp, Homo sapiens
tatatctggaatctattttaaattggattaataatatttaactcatctgcccacccacctcgatctcacacacaatactaacaaaacgacaacaacaaaaaaatggttacgtattaatatca

SEQ ID NO: 247037 - DNA, 122 bp, Homo sapiens
cgggaggggggagcagggaagcccgagggctgacgaccgggggcgtagtggggcgaaccccggcagagcgggaaggctgaggaggctgcggcgggagccgccaggcaggatcgggcccgcgg

SEQ ID NO: 247038 - DNA, 122 bp, Homo sapiens
gcctgcgccgcagtgccgccgctcacagccgccgccacccagagcccggagcccggaacccgccgctcctcacatcccagcccaggccgctgcgccggctacgaaccagcggcgggggcccg

SEQ ID NO: 247039 - DNA, 122 bp, Homo sapiens
ccaccagaattttccttggcctgttgccttcccccagggccttggctaggaggttacactcggagcgccctctgccgggcactgtcctcccaaccttgtgggcagttgcagatgggacctgc

SEQ ID NO: 247040 - DNA, 122 bp, Homo sapiens
cgggctgccacccacgcccgcggccggggccgagccagccacgcagggcagccgaggctccggagctcctgtcccggccccagtccgggtaaaaggagggttgtccccagcggaggcgcaca

SEQ ID NO: 247041 - DNA, 122 bp, Homo sapiens
gtgggcagaaagcccataaggggaaggcgaggcacctggggcagagaaaaaaaaaaacttcgctgcagagaagagcggcctgattccccacggacgaaagtgtcttcccatcagtccctgca

SEQ ID NO: 247042 - DNA, 122 bp, Homo sapiens
aatcaaaatcggtttggagatgaaatgggaaagacaagagcagctccaaggagagaagaacgtccagaaaaccaagaaataggactggtaaagggtgctgaccaggtccctggagctgcacc

SEQ ID NO: 247043 - DNA, 122 bp, Homo sapiens
tctctgctgaggccttggtgttctgtggggtgtggacagccttgtacgtcggcactcacccgctgaaggacactgggcatttttactttagagctgctcggggcatttacgtacacgttttg

SEQ ID NO: 247044 - DNA, 122 bp, Homo sapiens
atgtgtaatttaagattaatgtgtaatcttgtaattcccataatcctcatgtgtcaagggcgggaccagatggacatgattgaatcatagaggtggttttctccatgctgttctcgtgatag

SEQ ID NO: 247045 - DNA, 122 bp, Homo sapiens
caggaaaataatgtctatcccgcatacacagcactagtattttcagtcacccgccagtgccgttagagttaataaaatacgtcatcattttaaaactttgccggactcacagcttccgccca

SEQ ID NO: 247046 - DNA, 122 bp, Homo sapiens
gcaccggcatgctagaggttaacgaggaggttccctccttccagcgtggatgagcctttccgtgagggtgaccggaaaggcgcctgggctggtgacggtgtcaagtgtaggcaagaaatacg

SEQ ID NO: 247047 - DNA, 122 bp, Homo sapiens
tgcctgctcaccccacctgcacccccatctctcatggccccaagtcccacctctgagctacgcagatatccacagcctctgactcaggggtctggccagatgggactcattttcaccctgca

SEQ ID NO: 247048 - DNA, 122 bp, Homo sapiens
tgcctgtcggtccagctgccggctgcagccagcccccagcaggccggcggataaggacatcggcctcacgtcataaataaagccggggacccgctgacaggccctggcacggccccggcccc

SEQ ID NO: 247049 - DNA, 122 bp, Homo sapiens
atttttttctagcacacaagagcaacctgaaaggctgctcctggccagaggactctgtcccgggggaccgtgtcctcccccatgtcctgcctaggccctcagaggaccaggggatcatgtct

SEQ ID NO: 247050 - DNA, 122 bp, Homo sapiens
gggatttctctcgttgacaattcagagacaatgtgacctccatggccatggaggcccctgcgaagcatgcctttcctttgtctaactcttagtgctcagacttccaaaatacgggctagaac

SEQ ID NO: 247051 - DNA, 122 bp, Homo sapiens
acatcctcatacatcagtgttcgtagcagccacattcaaaaaaaaaaaggaaggacgttccgacacaggctacgtcgtgaataaacccttacgacacgccgagtgaaagatgccagatacaa

SEQ ID NO: 247052 - DNA, 122 bp, Homo sapiens
gtgcattgtcccgggtgaggtggcggccgccctgctctgctgggaagatcctgagtccagcgtttgccggcagcctcatcccctccttccctcgggccggggagcggtgtccccctcctctc

SEQ ID NO: 247053 - DNA, 122 bp, Homo sapiens
ccagcgctttccggatgaagcgcgcatattccgccagttccgagtccgggagtgcctgctcggtcctgggttaggaggaacccagggatcaatactccaagggctttcttctccccctccct

SEQ ID NO: 247054 - DNA, 122 bp, Homo sapiens
tgctgtctgtagctgctcatcctgggagacactgtgggggaggctgtggcttccttcttccgccctctggggatgccctggcggcctgtcccttgggtgttgggaggaggtggcttggctga

SEQ ID NO: 247055 - DNA, 122 bp, Homo sapiens
gagagggattctgcacaaagccatacagagtttcctgcagtccccaggtttccttgctgccgccagggggcgcgtcgtttccggaggatctggctggggaggcctcgccgctcaccgtggcc

SEQ ID NO: 247056 - DNA, 122 bp, Homo sapiens
ctccgcagtgcgccgcagtgccgggaaggagccgcagctaccgggcgctccccgggggaccgaggagatgaggcgtcttttaaggctcatgagagccttaaggagatgagaccgggatgccg

SEQ ID NO: 247057 - DNA, 122 bp, Homo sapiens
ttttttgctcccagcctgcccagatttcaggaaggaaagaagatcttttgcttcttcggtcgctgggtcggctctccagtgtctgatgtttactgaaatcttgatcgtggttagcctccccc

SEQ ID NO: 247058 - DNA, 122 bp, Homo sapiens
aagctctacaaagtgcaaaaatcactttcaaatgtggtgacttaaaacagcagctagagccgacctgtccgggaggtgaggggcgcctctgcccggccgcccctaccgggaagtgaggagcc

SEQ ID NO: 247059 - DNA, 122 bp, Homo sapiens
ccacctcctgaccaccactaaagggagcctcttgtcgcatgcgcactgtgtgaatggcagcgtggggacgcagagctaagagtaaacgacgtggtgtggaccatgacgttcgctctcctcgg

SEQ ID NO: 247060 - DNA, 122 bp, Homo sapiens
aaaaaaacatggctataattattttctgtgtacaggaagagtccactggttctctgccaccgttgtgccttagaaaagccaccttgttaaaagaaatgatttctcttccagcatctatgact

SEQ ID NO: 247061 - DNA, 122 bp, Homo sapiens
ggagcgtctggccaaaggagagtctgggattttggggaaagacggacttaaagcagggatcgaagctggaaatattaatataacctctggtaagatgcaaattgtgagcccatctttacctc

SEQ ID NO: 247062 - DNA, 122 bp, Homo sapiens
ggggttcactgttttcttttctgaaacctaggctcctggtttgggcagggggtggtggtgcgtgcaaagaaggaaaggtcatgaaagctaggtagagtctttcaaatagaaggtgagaatat

SEQ ID NO: 247063 - DNA, 122 bp, Homo sapiens
acagggtgagtgcaaggtggagaaaaactgttgtccacagcaacactacattagggctgccgggatgccttgctgcattgagcaaggattgcttctcacataatgtatagcaattcagttta

SEQ ID NO: 247064 - DNA, 122 bp, Homo sapiens
aggtgctccctcctttggcagcagtgggagagtcaacactggcaaggccctgaccacctgcgtcctgaccccacccctaaaacttaataaaacctggtctcttcctggctcattcagccgtt

SEQ ID NO: 247065 - DNA, 122 bp, Homo sapiens
tctaatcatcctatattacatggcaaagaagaatcgaaagtttatcattttaattaagcacgttgcttactcacttaaatgcctttgaaaacagtgcttgagctgaccttgagtttgtatac

SEQ ID NO: 247066 - DNA, 122 bp, Homo sapiens
tggagatgcctgccttgcccttttcttcctgcagtagccaggcctttaccatttactaggcgctttcagaatgttcatttctccgtaatttccactgcttgaaggctgctcgaggaacagga

SEQ ID NO: 247067 - DNA, 122 bp, Homo sapiens
tcctgttgaatagggaacaaaacaggcctaaagactgaaaggaaaagctgctgtggggagcggtctctccagatggaagttttctggcagattgtgatttgtgactcagaatgagcccagat

SEQ ID NO: 247068 - DNA, 122 bp, Homo sapiens
taccttttaaaaatgttttttttttcagtgatttatacattcacttaaagtcaggtgattcgctgagacctgctattaggaaaaaacagtagggacggccacttttaatttttttccactag

SEQ ID NO: 247069 - DNA, 122 bp, Homo sapiens
gagactctcggaagtcaggtggctggcccaggtccctcagctcatgagtacttggttgggcgacagtttctgtttcttgattcccatgttagtactctttctattttgttgccatttttatt

SEQ ID NO: 247070 - DNA, 122 bp, Homo sapiens
cagggtagccaccagtgtccaggcactgagatggcacaaggcaagtggacttagatgcctcgacgcctgctcccaaggggaggtccacagagtggagctgtcactcacagtgagcctcggag

SEQ ID NO: 247071 - DNA, 122 bp, Homo sapiens
tcaatccttatacagaaacacgtgcacagctgctaactcatacacgcacataagcacagccgctaacgtgtttaactgccaaacttactgtgcgtgcccaaggatgccgccaatccaacatc

SEQ ID NO: 247072 - DNA, 122 bp, Homo sapiens
tctcaaacagatgggctcaatgaagcagaaggcatccctgggccagggccagaggggccacggaggggacgctgaggtccagaacacaggggtaggggatgggcctgtccccatgtcctccc

SEQ ID NO: 247073 - DNA, 122 bp, Homo sapiens
tactttcttttctcctaagagagaacacccttgtgagctaggcagggcaagtggagcaatcgcaatttgcagatgagttaattgatgctcaagcaatgagatgacttctcagggcccttggc

SEQ ID NO: 247074 - DNA, 122 bp, Homo sapiens
gagccaccatgcccagccgataagtattgtcttacaatatctaagagttctgttgatcagcgatgaagtctaggctagagatacaaatcaaagtcatggttttggaggagattaccaggtta

SEQ ID NO: 247075 - DNA, 122 bp, Homo sapiens
tgaaaggtggaaaacagggcaaataaataaatcgggtttgccgccggagcgtttgccggccggtgcgagcaccctttgtaatgcaggcctcccggggcgatcgcctgcgctaattgctccag

SEQ ID NO: 247076 - DNA, 122 bp, Homo sapiens
gactgtgtatgtgtgtgcgtatatgtatttagtgcaagaaaggaggcacctaatacttttcgtggtttctatggcatcatttgaaacttacaagcaaatcatatcaaatgtcttatttaggc

SEQ ID NO: 247077 - DNA, 122 bp, Homo sapiens
ttttcccgggcagcttacctgctcggcctgggtctttctggacagcaggcgctggaggtgcgcgtcactgtccgccgccgtgtccgcggctgcgccagacagtgtagaacctgcggcctcga

SEQ ID NO: 247078 - DNA, 122 bp, Homo sapiens
acttggccttgacacggacggggggggcggtcccaggccgaggccgccccgcccccgccccgctatacccggcgccgcctcccggcgtctgagctgacacctccttagcgctggccgcgggc

SEQ ID NO: 247079 - DNA, 122 bp, Homo sapiens
ccatcacacccggctaatttttgtatttttagtagagacggggtttcactatgttggccacgctggtctccagctgaccttaagtgatccaccgcacgcggccaagatctcattgctaaaag

SEQ ID NO: 247080 - DNA, 122 bp, Homo sapiens
gccctggctgggggctgctccgagcctgaggtgctcagggcgctcagggcagcaagtgtccgccacttcggtttgtcatttttggcaggagcgtttttctgtctgggtggagaatggagttt

SEQ ID NO: 247081 - DNA, 122 bp, Homo sapiens
gtgcagaggagcctggctcgcagaattgcagagtcgtcgcccctttttacaacctggtcccgttttattctgccgtacccagtttttggatttttgtcttccccttcttctctttgctaaac

SEQ ID NO: 247082 - DNA, 122 bp, Homo sapiens
gcccagggcaggcctggagacccacggccccctccgcggccaggactcgggctctccgctcgccttcctcgcctagctctgcgccgcttttgccagccgagtcccggagttagcgcgcgacc

SEQ ID NO: 247083 - DNA, 122 bp, Homo sapiens
gccgtaatatcatacttctttacctttttactttctgtttatcgtaaaaagttttacgatcgaaatggaaatgtaaaattccaaggatcacgatttaaataaaaatatactcttcaattaat

SEQ ID NO: 247084 - DNA, 122 bp, Homo sapiens
cgcgcggcgcgcgccctgcgttcctccgcctctttaaatggggcggggcaaggtggagaccgcgtgtgtggttccggggggtcccgggtccccgctcccgggaccttccccgggtggcacca

SEQ ID NO: 247085 - DNA, 122 bp, Homo sapiens
cccaccccaccccttgctcccccgacgccccctcgggggcctgcgcgtgcacacaggcaccgaggtgcgactcgctgagtctcaggctcaagctttaatctctgcgaagttgggcggctcca

SEQ ID NO: 247086 - DNA, 122 bp, Homo sapiens
ctcctcctctggaggctgctgcccaaactccttcctgccccgccccttccctgctgtgatcgaggatgcgccaaattcattacagatcatctcccgagggatgggtggctgggggtgcagag

SEQ ID NO: 247087 - DNA, 122 bp, Homo sapiens
gctggggctgcagggtaggatctatcagaaagccgaggctgcacagcctggggagtggagcgggcaggcgtctcacgccccggacctccccctgccctgcctctcctactcttgttgcaggc

SEQ ID NO: 247088 - DNA, 122 bp, Homo sapiens
ttccacattttcgggtaagcattagccgtcctggcgctgcacgagcgtattctacaattccgaaaactactaacttttccgtctgcaacctttaataattgagagggtatgcgcaactcaga

SEQ ID NO: 247089 - DNA, 122 bp, Homo sapiens
catgcggtgagcattatggctctattcagctcgattaggacgaacccccggcacttagcccgcacaggaacaatggcgagcctctagaccgattgggagcggcaatgggcacctcctcacta

SEQ ID NO: 247090 - DNA, 122 bp, Homo sapiens
ccgtggaattagtgtggggcctgacatcagccggttacagagcagcaggaaaggcttctgcgggtaatgctgcccacagccatcactgtaaacatgccggccccatggttttgtttgttttt

SEQ ID NO: 247091 - DNA, 122 bp, Homo sapiens
tgtcctctcgaagcagcttcccctgttgcctgctttgctttttccctggaggcctggaaacgctggggttcttgccgccctcggagcaggcacgttgtactggcaagagtttgacttgtgtg

SEQ ID NO: 247092 - DNA, 122 bp, Homo sapiens
ggcattacaccattagcattacaggggccacctacacctcgtatttcgattccacagctccggagaacctgcggtgctgcggccactctgtgggtgtccccccacccccatctccactgcga

SEQ ID NO: 247093 - DNA, 122 bp, Homo sapiens
gctcggtgcaatggctttacggctctccagcatagtaagccccgagaggcaggcggctgtcgatgtttacaatcgcgggagcttcgggtgcaagagtcctttcctgacacaatcgcattcaa

SEQ ID NO: 247094 - DNA, 122 bp, Homo sapiens
agctgggtccccagtgaaaccccaccttcaagccagggatgacccaaaggctaggggccacgctaccagttccgggtggagtccgctacccggatggtgctttttccaggcccgcccatggc

SEQ ID NO: 247095 - DNA, 122 bp, Homo sapiens
catccctccaccccagcattcccaaacctccaactccagggatgggggtcaaatgaagcacgttattttatttcacaaagactgtacaaaattccttataaaacatggggtagatgccacct

SEQ ID NO: 247096 - DNA, 122 bp, Homo sapiens
aataaagcagtggactgcaaattgccacaaagcggtcataggccatggcagccagaaggacgcattcgactgttgcaaagaaagccgctgaaccaagctggatggcacatccaaggtaggag

SEQ ID NO: 247097 - DNA, 122 bp, Homo sapiens
aaggagagcggcggggctgggctgtcaatcaaagtaacgtggggctggctagagagcgcgcgggcgcgcgctagcgggagggactggcgagcgtgcagccggggaagctgagggctcgagtt

SEQ ID NO: 247098 - DNA, 122 bp, Homo sapiens
gctgtggctcaggagatgtgcgccgtggcagcgatgggaaagtggcccagagtcagggctcgggagatgcactgtggctcgggagatgagcgccatgacagagatgggaaggtggcccagag

SEQ ID NO: 247099 - DNA, 122 bp, Homo sapiens
acttccctctcctacccattgctcaatgcggattttctccaattgagtaatacatctgaccggtcaagaaacggggtagaaggcttggaaagtccagagtgggggcagctggggacctggag

SEQ ID NO: 247100 - DNA, 122 bp, Homo sapiens
aactaatgcctgatgatctgtcactgtctcccgtcacccacccccccacccccgccccaccgccgatgacacggtctagttgcaggaaaacaagctcagggctcccacgaattctaaattat

SEQ ID NO: 247101 - DNA, 122 bp, Homo sapiens
gaaagtccttccgcccttccggagcggaggcctccgcgccccaagtccccgtttggggctcggtgggacagaagctgtatcaggtccacgagcccccccacctcacatgatcgtgtgtcatg

SEQ ID NO: 247102 - DNA, 122 bp, Homo sapiens
gcccatagttgacctgcacagtatgagtcatgacccatgtgctggggctctagccatgggcggtgcctcttgccatttccagcttcctcctgcagagggtgggtgttaacggtcttcattgc

SEQ ID NO: 247103 - DNA, 122 bp, Homo sapiens
ggagcaggtaggagtggtttgccatctggcggggtgcgcgctcaggtctggctcccctttcgagaggtgaattttacaacccaagaagcattactcagcagggaggtatttcctatcctggt

SEQ ID NO: 247104 - DNA, 122 bp, Homo sapiens
actttttgaaaaaagtcaaagtgttctacagtcagtcctgccagttatcttcaaaggcaacgagcagaaatcacgcagtcaccacgtgctggggcactcttcccattcctctcctcttgggc

SEQ ID NO: 247105 - DNA, 122 bp, Homo sapiens
ttttttcttccaagaagcccatctaccagttgctgtgtcctcgctcaacaataattacctcgtccgagaattaattataataaatgttttcttgataaactaacgagataatccgaggggca

SEQ ID NO: 247106 - DNA, 122 bp, Homo sapiens
tggctttcctaaactttctgtacgtccagagaatcccatgccttgtcttggcctccgcagcgccaggctggggtgacagcactcctcctccaccggcccgggcttctcctccggaccgcgag

SEQ ID NO: 247107 - DNA, 122 bp, Homo sapiens
taacaagaaccttggatgcatgttaagagttcgagaaacaccgttctattgcgcttaacccgacacacctaagccctcctcaatcttctccactgagctgggcgtccagcagctagcacagt

SEQ ID NO: 247108 - DNA, 122 bp, Homo sapiens
tacaaagttccttgaccgttcttagtaaaggttgtgtcttagtcactttcttctttcttccgtaggctcccttctgttgccacatttgggccaaggaatggagagatttcttcgtctggaaa

SEQ ID NO: 247109 - DNA, 122 bp, Homo sapiens
cctcacatcaaggatttatacccaggcccttgggcaccggcttctgggcggtggcagaaccggccgtgtgagtcaggaacgtggtaaagggcccagtggggaggcagctggcaggaacatgg

SEQ ID NO: 247110 - DNA, 122 bp, Homo sapiens
ttaacatggaaacacacacacaggagctacagtacatattggcaggaaaaggtaaactttcgtaatctcattggaattacaacagggaaatggagttcaatgaggactttcagttctttgct

SEQ ID NO: 247111 - DNA, 122 bp, Homo sapiens
gtcctgtgccctgcggagcgttcaacagcatctccggcctccgcccacgatgtccaggagcgctctccagtctagacagcccaaatggtctccagacatcgtcacactcccgtggggccctg

SEQ ID NO: 247112 - DNA, 122 bp, Homo sapiens
cacacattgccgtggggagggcactagccattcatgacggatccacccttatgacccaaacgcttctgaccaggccccgcctccaacactgggggtcacatttcaacatgaaatttggaggg

SEQ ID NO: 247113 - DNA, 122 bp, Homo sapiens
accagcaagctcttctcttcttcacagaaagccccttccacatgctgttccttccactgacgtgctctttcccaaactcttcactttgctaaatcccgctttccagaacccattagagttct

SEQ ID NO: 247114 - DNA, 122 bp, Homo sapiens
ccgctgtgtcgaggcactgtgcccgtgccccgggctcccctcgttttacagactcgctcacggaggctcagggcgtctctgagggcacgaagctcatgtcagccagcagaatggggatgtag

SEQ ID NO: 247115 - DNA, 122 bp, Homo sapiens
aaaccaggaaaaaaaataagtcaaaacgattaagagccagagaagcagtcttcatacacgcggccagccagcagacagaggactctcattaaggaaggtaagagcgttgccttctcgccata

SEQ ID NO: 247116 - DNA, 122 bp, Homo sapiens
cccggagccgctcgggacccgggaggaggggacgccgggtcaggcccacgggggcacctgcgctccttaatgagttttctccgtttcagagagtgggactccccggcccccccggcccccca

SEQ ID NO: 247117 - DNA, 122 bp, Homo sapiens
agggaaccttgaaggacaagcaggatcctgaggcaacgcagatggggcggtagggtgtcccgggctctggcaagggttctcaccttccgctggcttggatttcctgatgtttctgtcctgag

SEQ ID NO: 247118 - DNA, 122 bp, Homo sapiens
tcggcggctgcctccggcggaggtgcctcgcggcgcccgggccggcccgcgcctcggcggcgtgctccatgcatccggagcccgccccgcccccgagccgcagcagtcccgagcttccccca

SEQ ID NO: 247119 - DNA, 122 bp, Homo sapiens
aggccgctgcctccttggtggggggccccggctggccactgggtcgggcatggggccttacggggccctcacgggtcccgccgccgccctcctgaggcctggtccttggcgccgcagttacc

SEQ ID NO: 247120 - DNA, 122 bp, Homo sapiens
agaggcgctcctcacatcccagatggggcggcggggcagaggctcttcccatatcccagacgatgggcagccgggcagagacgctcctcacttcctagacgggatgatggccgggaagaggc

SEQ ID NO: 247121 - DNA, 122 bp, Homo sapiens
ttctatcactgagaaaaaccccaacagcgagctgcggtagcgcaccccgtggcgccctcccggttactcctggccatcgggccgcgctgacttaacatttaggctgcagtttccatgacagg

SEQ ID NO: 247122 - DNA, 122 bp, Homo sapiens
gcagcagacaaaattaagccctggaaagaatttagcccagtagccagtcatatgccatgtcgtatagcatacccagccaatggggagagcgaggtgtggctgtggaaaaagacagggttaag

SEQ ID NO: 247123 - DNA, 122 bp, Homo sapiens
gccttccagattcctataatatttatttggtgagaaggatgacattatggtatagtggggcgagagagtactagaagtttgagccctggattttagttctgaaagcaactcacttagctgga

SEQ ID NO: 247124 - DNA, 122 bp, Homo sapiens
ggggagcgcgcagccgggctcggggcagcgccgggctggttcggcttctcgtctccagagcgctgatgcttcctgcccacatcacctgctctggcttagggactgcagctcttttggcacct

SEQ ID NO: 247125 - DNA, 122 bp, Homo sapiens
gaattatcttccacggcaaaatctaaagcccacttctttggcaaaagagatattagaagtcggtttatttctcactcctcctcctctagctgggggatggctagaggaagtatttttaaagc

SEQ ID NO: 247126 - DNA, 122 bp, Homo sapiens
gggccgaggatgtgaggcgggccgggcgtccccacaccgggcccgggcgccgggagtgggcgtctgggcagcgccaggcgatggccctgctgctggtgctcctcgcctcttggggcctgggg

SEQ ID NO: 247127 - DNA, 122 bp, Homo sapiens
ggcgagagaggaaagggcctaggtactgtgctggggtcgcacagccggccgagacagtgccgggacggggagccaggcttccgagtgcgcccggtcactgactcctccgcgctttcctcgtg

SEQ ID NO: 247128 - DNA, 122 bp, Homo sapiens
agcaggctggatgaggcgccttctctctggggctcccgcggtgtcctgggcctatctgtgcgtctctgcgcgctcaccccaggagatcacgcgtttcggttcatttctccgcacgggagctt

SEQ ID NO: 247129 - DNA, 122 bp, Homo sapiens
tttttacatgggctgaaatgttttcaagggctggaagacggcgtggtgacaggaagacaacgtggtgtgcagagagaagattgaactgtacatgaagaaatctgagttcaaactgcagttcc

SEQ ID NO: 247130 - DNA, 122 bp, Homo sapiens
agatgaagattttggaatagactcatgcaggagccgctcccattttctctacaggaggggcgcagggcagccatctggctgtaagtggtcctggaagctgcactcacatagcagcttacata

SEQ ID NO: 247131 - DNA, 122 bp, Homo sapiens
cgcccagcacgcccccagcgcgcctgggctacacacccccggccgcccgtagacagtcggcgctcaataagtgcccgagcgactcctcgcgcacatgcgcacttgaacctgaccgagtggtg

SEQ ID NO: 247132 - DNA, 122 bp, Homo sapiens
ctccccgccgggaaatgacctgcgaggctgcagtgcaggaagttccggcccccaccgtggcggccgggagagttgccctctcccgtactgtcattggcctggcgccagccgctggtgcacag

SEQ ID NO: 247133 - DNA, 122 bp, Homo sapiens
gggcaaagcattcacctctcaggggttggattatccggataaactccccccggctccctgcggcattcccacacacccggtggatgtcaacaccgagagccagccgtatgaggggggcctct

SEQ ID NO: 247134 - DNA, 122 bp, Homo sapiens
aaaaggaatgagttgtggctcctaactagcttgccgaggagagcgtagagtgacacgggacgggggcccagggcactgaggccaagagttcccgagtcacgccagtgctcgcccctttggcc

SEQ ID NO: 247135 - DNA, 122 bp, Homo sapiens
ttttttttttgtgactgagtctggctctgtcacccaggctggagtgccagatctcagtggcgagatcttggctcagtgcaacctttgactctagggttcaagcgattcttccatctcagcct

SEQ ID NO: 247136 - DNA, 122 bp, Homo sapiens
ccctagtgagatgaacccggtacctcagatggaaatgtagaaatcatctgtcttctgcgtcgctcacgctgggagctgtagcagactgtttcaatgttcataaatcgcgtggtactccagag

SEQ ID NO: 247137 - DNA, 122 bp, Homo sapiens
gccggggaaggggtggaggcagcatgttccctgctgtggccaaactaggccgctgggccccgggtgctggcctgccaggtgctgtggggtctgccccgtgcatcttgtgcagaggccctccc

SEQ ID NO: 247138 - DNA, 122 bp, Homo sapiens
gacgggcacagcggggccttgggccaggcctgcagcctgcaagtgctcacctggatgatgcggtctccctcacggatccggccgtctttggctgcaatgctgttgggatttacctgcaggac

SEQ ID NO: 247139 - DNA, 122 bp, Homo sapiens
ggtgccagacgccttctgcaccggctgccaggtcactggagctggtcagaagctggctggcggagccttccctttcggaagagctgtcctctcccttacccccctcgccctggctccgtgcc

SEQ ID NO: 247140 - DNA, 122 bp, Homo sapiens
attttaactttcttctttgtcacataatgttaggccagagccagtttggaaagtaagtcacgatatatagggttaaatgaaagccatctgatgagaatttatggtttgtagggcatgactct

SEQ ID NO: 247141 - DNA, 122 bp, Homo sapiens
ctccgtacatgcccggctccagcacccggagcagtgaaagctcaggcactacccgccgcccgccagcccgagggccgctcacccaggttctgccctcgcagcaccgcgtacggccggctccg

SEQ ID NO: 247142 - DNA, 122 bp, Homo sapiens
tctccgccccaagatcttctgggcggtgactcgggtttgaggccttggtctgtcacccaccgacacgggccccctcttcggcactgaccccttcgcttgcctctgctgcttgtcagaaaagg

SEQ ID NO: 247143 - DNA, 122 bp, Homo sapiens
tgctcctcggcatgctggtgacgcaggacgtgcagctcgggctcttcatggccgtcatgccgactctcatacaggcgggcgccagtgcatcttctaggtaaacgctttgtgtacgcaatttg

SEQ ID NO: 247144 - DNA, 122 bp, Homo sapiens
gggcagcacgcacgtccgcacctcggctcccagcgcacaggctcactggcgatccgggcccgacttgcttagggagagagagacttggatggagaagtcagatgagcagatcccgcttgata

SEQ ID NO: 247145 - DNA, 122 bp, Homo sapiens
caacccagttctcctggcttcaccccaccttcggctcaacccagaggctgcacctgggggcgcgccttggcccagccttgctcaaggccccgccttcttggggatagggagccccctggata

SEQ ID NO: 247146 - DNA, 122 bp, Homo sapiens
gtccagggcttgctggggagttggcgcagtgactgagcagcccccatcttcctaccagggcgtgggtttgcccagatgtacaggtggtcccctagctatgccctcccgttagccctcttctc

SEQ ID NO: 247147 - DNA, 122 bp, Homo sapiens
tttaaaaaactatatttagggagcgatgcagtaagtgatactttggcaagagtactgaaacgtaaagtgccttgtgcatttataaacttgggggtatttgctctggcgctaggccagtgtgt

SEQ ID NO: 247148 - DNA, 122 bp, Homo sapiens
gctgcggaggggtgggctgtccacagggcagggcgctggaggcctgtgggaacaagcagacggaggctcctccaggaaggctcacccgaggctcgcaggcactcccctctaggaatctacaa

SEQ ID NO: 247149 - DNA, 122 bp, Homo sapiens
gattcaactgggccccatgcatcagaatcagagagtcagcaaagcaaagcatggggtggacgaagaaacgaaatgaccccagctcctggcatagctagacatcacctgagtttatgggtacc

SEQ ID NO: 247150 - DNA, 122 bp, Homo sapiens
gcattccccacacgtgattccgtgttattgcaaagagggctttggagcgcgagcgcggggcgcgcgcacctataaatacggacacccggccccggagcccgcgagccagcggccaggcgacc

SEQ ID NO: 247151 - DNA, 122 bp, Homo sapiens
cccctctgcttcccgggcctctcctcggcggcagggtcgggctgcacttgcctgaacccccgcagtggtcagcccaaacccccgcagtggtcagcccgaaccaccgcagtggtcagcccgcg

SEQ ID NO: 247152 - DNA, 122 bp, Homo sapiens
tgcggctgcaggcaccggcgcgtcgagtttccggcgtccggaaggaccgagctcttctcgcggatccagtgttccgtttccagcccccaatctcagagcggagccgacagagagcagggaac

SEQ ID NO: 247153 - DNA, 122 bp, Homo sapiens
gctcaggcccaccctgtgctgtgcaggttgggaaaccgagggcagacggttcaagccttgcgcagggtcacatgctgggccctggcccccatccagaccttgttgctttcaccagagggcag

SEQ ID NO: 247154 - DNA, 122 bp, Homo sapiens
gccgtgagaaaatatggggcaaggcagagagcacagaggggctttagggcagcgagcccgcgctatgtgatgctgtaatggtgggtgcgcatcggtacacgtttgtcaaagcccacggagtg

SEQ ID NO: 247155 - DNA, 122 bp, Homo sapiens
agaagaatatccggaagccacaagaggtatatccggaagccacaagaggtgtggaaaccccgtttccaaggctgggcccagtagctcgtgcctgtaatcccagcattttggtaggctgaggc

SEQ ID NO: 247156 - DNA, 122 bp, Homo sapiens
tttcatcacaaaatatttgacctccccattcatcatcttggattaagtcacttcatgtttcgtaattctcttttgtcatctaagacataacaatatgagtaacctacctattctgtgaacta

SEQ ID NO: 247157 - DNA, 122 bp, Homo sapiens
cgtagctaggcctttgctttcttttcctcacttccttcgcgtggctgcaatcgggaagggcggagctagtttgttccttttggtcaggtttgtttacagcagttattcctccctttttcttt

SEQ ID NO: 247158 - DNA, 122 bp, Homo sapiens
ccctgcacaattagggcgaagatgacggctgcaaagttgttgcgtaacacgactgggaaacgaggctcgctgaggtccatctacccacccccgccacgcgggtgcggcgttcctcggaggat

SEQ ID NO: 247159 - DNA, 122 bp, Homo sapiens
gtcaaagggcacgaagttgtgcctgcagctgttaccatagtaaccgaggaccggatgtggcgatcttacggtgcgacagtcctcttctcaggccctctggcccgagagcctgttgactctgt

SEQ ID NO: 247160 - DNA, 122 bp, Homo sapiens
ccgggaagaaaagccgcagcacctgccgcggggtctcacagagatgatctccggagagagcgcgctcaggattcaggggctcgccagtcctgtcaacgactctctccggctgggtccgggca

SEQ ID NO: 247161 - DNA, 122 bp, Homo sapiens
cctctgggcttccccgcgatcccagagcccgcgttccaacagaattgggagggtttattgcgctagaggagtcttcaggatcttcgctcccgccctccgaggtgaggctagaggggagggtt

SEQ ID NO: 247162 - DNA, 122 bp, Homo sapiens
gtaagatctgatgtgactcaacatgctgttcgcataagagaaactaatctccaggcagaacggcctgtaactgatgcctgtgttctgtcattgaaagcctcttggcattgctttgttgcatt

SEQ ID NO: 247163 - DNA, 122 bp, Homo sapiens
gtccttctgggctgccccttttctctcagatccgggacacccacagcttgaggaccacagcgttccatgggcagcaggtgctctactgggagtcagagagcagccaggctgagatggagttc

SEQ ID NO: 247164 - DNA, 122 bp, Homo sapiens
gctccgcgggccccgatagggtgggcgtggccgccgcgcgccggacgtacctctccaccgcgaaggaactacctcgccagttcccggcgacagaggacagattatttccaggaccgctcccg

SEQ ID NO: 247165 - DNA, 122 bp, Homo sapiens
gcccctgtttgcctgtctcattgggaagcagatgaaggctctgcgggacggtgactggtacgttcctatccagagcgtcttccttcacgttctgcacagaggcaggtggtctgcgttggttc

SEQ ID NO: 247166 - DNA, 122 bp, Homo sapiens
tgaccgctctccctggcaacggtttgttcctagcaaccagcctgaggtctggaggtggtgcggagggagccgcctagggaccagggactcctgccatgaatccgccggggtccctagaggcc

SEQ ID NO: 247167 - DNA, 122 bp, Homo sapiens
gaatgtggtttagtaccagaagactgatttctctttcgctgtatgcagaccaactgttgacgaggtgatggtccaggaagccgtggttggaaggaggtacagcaaatattgctcagtgctta

SEQ ID NO: 247168 - DNA, 122 bp, Homo sapiens
gctggcgcggaccccaacggaagccggcaccatcgcagcacccctgtctaccacgcctctcgcgtgggccgggcagacatcctgaaggccctcatcaggccagtactgtggagctcgcctgg

SEQ ID NO: 247169 - DNA, 122 bp, Homo sapiens
gctgggtccaattcacaagaaccagaaggatgatgtcgctcagactgacttgctgcagatcgaccccaattttggctccaaggaagattttgacagtctcttgcaatcggctaaaaaaaaga

SEQ ID NO: 247170 - DNA, 122 bp, Homo sapiens
ctttaatattaaggggaaaatggccctatgagggaaacctaaaaaggcagttttagagtacgcagaaatgacccagtcctgatgtactccaggacatcttactaccagtgggaacccttgta

SEQ ID NO: 247171 - DNA, 122 bp, Homo sapiens
gagttctgcctaaagacattcaaatttgggctgaccaaaccttgccaatgggctggattccgtagacaggacccagtgaggacttttgagcaggcactcgtgacaacgtggagagaagctaa

SEQ ID NO: 247172 - DNA, 122 bp, Homo sapiens
gccccatctctgtctgccacaccgggaagtgggtttctacagcccgggtcatctgggccgcgtgtgatcattagctgtcgcgggctgcccggaggaggatggcctgtcctttctgggcgtct

SEQ ID NO: 247173 - DNA, 122 bp, Homo sapiens
aagccatgtttctatttttaatgcttaatcggtaacttgagagagccacagtgctattaacgaatgctgatatgtttggacagcagcagcccacataattgctattgtcttttaccaaagtg

SEQ ID NO: 247174 - DNA, 122 bp, Homo sapiens
ttcctccgaggacttcccgtgtctcccagaataaagaccgaggtcttcgctgtgctctatcggcctctgcatgacctggcccctctcacaccacagctccgctgcaccactagccctctacc

SEQ ID NO: 247175 - DNA, 122 bp, Homo sapiens
aatggggatcaatggaccccaagggtgttacagtaatccccctcttcctgttaagagttccgctaggcatagctttaattttagtgcatatctctgtttggggaagcacccttagttctttg

SEQ ID NO: 247176 - DNA, 122 bp, Homo sapiens
tgtccacgccaaattccggtaccttaggcattcgagtctgttgacactgagtgtctaggacgaggctgtaaaggtggataaagccggctttacagtctgcacctcctgtgtgagccgtggaa

SEQ ID NO: 247177 - DNA, 122 bp, Homo sapiens
ggaggcgcagagcgaatacgtggtgtttgggtgtggccgccccgcccctggcggtttcctcgttcccctttggttaatgcgcaactgtttcagattgcaggaggagatgcttcagagagagg

SEQ ID NO: 247178 - DNA, 122 bp, Homo sapiens
gacagcgaaatacacaagagctgaaaaggacaaaacagaagccagagccgcgaagagaagcgacctctgagaaccatccagctaccttctaatgcccgcctcatgctgactctgagtcggta

SEQ ID NO: 247179 - DNA, 122 bp, Homo sapiens
gaattcagccgctgctttaataacctctgaccagaggagctgattttgccaccgagttatcggtcagtgctgcgaggtcagtggcctgtgatcatgtttatagcaggtttggcttggatttg

SEQ ID NO: 247180 - DNA, 122 bp, Homo sapiens
ccatggctaccggaaggctgtgctcactcccaaccacgtggagttcagcagactgtatgacgctgtggtgagtcagtggaccccctggagggtagatgcaagccctgttcgtcctgaagagg

SEQ ID NO: 247181 - DNA, 122 bp, Homo sapiens
acatgtttactatagcttattgaaccctgctaagaaaattatagatcatgattcccaaatcggcggaatgaccattatggtctcatcctcaattctgtttgaatttggggcatggtagtccc

SEQ ID NO: 247182 - DNA, 122 bp, Homo sapiens
tctggcgcggggatctcagagtttcccgggcactcaccgtgtgtagttggcatctccgcgcgtccggacacccgatcccagcatccctgcctgcaggactgttcgtgttcagctcgcgtcct

SEQ ID NO: 247183 - DNA, 122 bp, Homo sapiens
aaaattggaatgatacaaagaaaatgatcatggtccctgtgcaaagacaacaggcacgttcgcgaagcattccattaaaacacacacacacacacacaaacacacagggaaataaaaaattt

SEQ ID NO: 247184 - DNA, 122 bp, Homo sapiens
cagactgctgtgctagcaatcagcgagactccgtgggcctaggacgctcggagccaggtgcggggtataatctcgtggtgcgccgttttttaagccggttggaaaagcgcagtattcgggtg

SEQ ID NO: 247185 - DNA, 122 bp, Homo sapiens
cgccgtgggctgtcagggtcagtggcttctttctagatgaaaggagcagaggcgagccgacgccaccgtcacagagaaccagccgagaaggaaaggccccacgatgctcctgctgcgctgcc

SEQ ID NO: 247186 - DNA, 122 bp, Homo sapiens
gtgtccccatgatcggccccgccgcatacccgttgaggctgtcccggcaggccccgtggacgcaggggttgctgttgcactcattgacctcagacaggcaggtggggtcgtggtagccctcg

SEQ ID NO: 247187 - DNA, 122 bp, Homo sapiens
ccgcgatacggcgcagttcctatattcatgttatttattgtgtactgactccatctgccccgtcaaataaaaaaccacaaggttcgagccgccgggcccgacaaactccgggtcggcgaaac

SEQ ID NO: 247188 - DNA, 122 bp, Homo sapiens
gccaggagctatttgtaggggacacttccttggcagcaggagagacacacagatgaacagcgtcctctgctgtcatataacaggtatttaatgagacatgtagccaacactaaaatctgtag

SEQ ID NO: 247189 - DNA, 122 bp, Homo sapiens
tcagatcagcgcagcattagattctcacaggagcgtgaaccctcctgggaacgccgcatgcgagggatctaggttgagcactccttgaggatctaaagcctgatgatctgtcactgtctccc

SEQ ID NO: 247190 - DNA, 122 bp, Homo sapiens
ttcaccgtaacccggccagcagacagtgtggggtaatggcgtcccggcctctggtggccacgggaagcattggcaagacggggtaacccggccagcagacagcgtggggtaacggcgtcccg

SEQ ID NO: 247191 - DNA, 122 bp, Homo sapiens
taagatcagggagatacaagaggtaggagccaaggtaagtaataggacatcagaggctggcggaatcagagtgaaaccaagaagacaagctgagtgacctgaacatgagaggcagcccagca

SEQ ID NO: 247192 - DNA, 122 bp, Homo sapiens
ctaactggccaagtgacatcatgcaattgctaccgagaacaaaaccagttcccctccttgcggccccatcagcgaaaaggaggggagggccagaagccacatcctctgcttcaggcctcttc

SEQ ID NO: 247193 - DNA, 122 bp, Homo sapiens
gccatctgagaagtgctgtgaaacacaagtgcaggccagcaagctttcacaggatggtcacgcaaggaaaggaagaaagtctgcagcctatggatgatgtgcaattctccccaatgtcaaaa

SEQ ID NO: 247194 - DNA, 122 bp, Homo sapiens
gctcacttatgtgcatagatgtatacatttatgtgcttgtgtaggtgtaaacggtttgtgcgtgtgtgcccacgtgtaggaatgtgtgctcctgtgtacatgtgaatgctcacatacatatc

SEQ ID NO: 247195 - DNA, 122 bp, Homo sapiens
ccttcctcctgtctaaccggaatctttcttgttgcaatttcagcctgctggctctccatgcggccggtggggaaacagcaaagctggttcccacattgataatgacacctaatcctgcaatc

SEQ ID NO: 247196 - DNA, 122 bp, Homo sapiens
ccccatggtgggcccagccgggttcagcacgtgggcctcctgggagccgccccacacctgcgcttctcaggggcgcccgctgtgggtcctgctgtgggtctgcagaccacactttgagagca

SEQ ID NO: 247197 - DNA, 122 bp, Homo sapiens
gctctaacaagtgctaccgtcatgggagcaagaacagtgaccttgtgtttcctgagctgccgcttcctttgctcctgtcacatgcactctcacgatgaggggctcattccttgtgccttatg

SEQ ID NO: 247198 - DNA, 122 bp, Homo sapiens
ctgagacagaggctggaacagccaccttcctgaggctctgaaagccctggcgtgccccctcggcacccaaactgctcctcccaggtgacttcacctctggccatgggaaggtgggggtctca

SEQ ID NO: 247199 - DNA, 122 bp, Homo sapiens
ggtgacttctgctggcacctgctgccctcggcatcacctccctcatccccctggagggcacgctggaaagctgcaactccccaccctccgcacaggagcgccccgtagacgcgcagatgggc

SEQ ID NO: 247200 - DNA, 122 bp, Homo sapiens
gctgcgggtctcagaaccgagtgaggtgtacattgccgtcctgcagagatccaggctgcacgcggcggactgggcaggccgggcccgggcactggtgggtgacagtcatacttcgtggagcc

SEQ ID NO: 247201 - DNA, 122 bp, Homo sapiens
ggaggctgtcccgcggcctgcgcgctcggggattctccagacccaccgctggctcgggagcgctccctacttttgggttccccgaaagccatgtgcttcatacttaagggtcccttagcttg

SEQ ID NO: 247202 - DNA, 122 bp, Homo sapiens
atatataaatccctggtaaagttgattcagatagcaggagagtgaaaatatgattgagaacgagaaaggcaaaccaataacataattagaagagattacaaaatacacaagaacattgggtg

SEQ ID NO: 247203 - DNA, 122 bp, Homo sapiens
ggcctgtggttttgcttctgtccgggctgaagactgagtaaggtagggcccctccttctgcggatgggtttctctctcattccaccctccacccacctccggttccgcgtgcacgcgcgaga

SEQ ID NO: 247204 - DNA, 122 bp, Homo sapiens
aagagaggtaaggcaggcaaccatagttccccttccatctggacaagactcttccattcccgttctgtaagtgctgggaatgatttcatctgcacagcctggaggtgggcagggtttctgga

SEQ ID NO: 247205 - DNA, 122 bp, Homo sapiens
agaaactgcctccagcgaggctgtgtcctcaaagactcagggagacctgcggacaaaacacgggttttgttagttgacatcgcatgtatgcagtttggcatgacgacaccgacatgcaggaa

SEQ ID NO: 247206 - DNA, 122 bp, Homo sapiens
tgcccggctcacggtccacacatggggatgtgtcaggtcgggagagtgctgtccggctcacggtccacacatggggacgcgtcaggttgggagggtgctgcccggctcacggtccacacatg

SEQ ID NO: 247207 - DNA, 122 bp, Homo sapiens
aaaaatcagcatgctcagggtactgcagaatttcagaaaggtgttccaaggtgggaatgccgcaggagtgtgagcctctcaccacagcccttcagctcctgcttggacaggcacaacctggc

SEQ ID NO: 247208 - DNA, 122 bp, Homo sapiens
tcggggcgggctgctgggcacatgaggttcctgggccagggggacacagtggattgctttcgggaaggtcagagccacccagccctggctcacatgccactgcggtactccatcaggggtcc

SEQ ID NO: 247209 - DNA, 122 bp, Homo sapiens
tcagtctttgtccctaattcagtcaccctaaacccactgcattgctttatctgccttttccgttcttttattctatcctcttaattcagttcttccctgtggtcttaacaattctagtctct

SEQ ID NO: 247210 - DNA, 122 bp, Homo sapiens
agcgcaggggcggcgatgaccagtcccgaaaggggctcagagggcagcgaggaggtttcacgccggtgcggggcgccgtcgaggtgggggcaccgcgaaggtggaggcggggccgcgccgga

SEQ ID NO: 247211 - DNA, 122 bp, Homo sapiens
gtgagtttacagcaacctgtccactcggttttctgtttctttgagattattttctactaacgaggtttcagcattctggcattgaaatctataagtgctttattgtaaagaatttggaaaat

SEQ ID NO: 247212 - DNA, 122 bp, Homo sapiens
gccggctcagcttgcaggcgaggaaccaaacgaaaggcaaactcctggcccctgcagcctcgcaggtcccctatccctcctccctgccttcctttccgccccgctgacaccacggtctgcaa

SEQ ID NO: 247213 - DNA, 122 bp, Homo sapiens
tctgcaagcccgggtgttatctgcgggccgggtccgcggcttctctggtggcactaggaccgcggcggcgcggccctcgcagccaccgcctcgggcgtgaggcggagcgtagctgttcctgg

SEQ ID NO: 247214 - DNA, 122 bp, Homo sapiens
cacgccggatagcgggaaacaaaaaaagcccgagctggaaacttcagagaggtttagtttcgtttcccagaagcatcagttcggtcccaaaacgctgcaaacgcgcgctgcctgcagtagga

SEQ ID NO: 247215 - DNA, 122 bp, Homo sapiens
tctgtttcaggagcaggcctcaaattcctcaggggttaaagtgggaagaacccgtgtgtgcgcattttttgtgcttttccagaactgggtaccatttggcagttgatcacgcaatctccccc

SEQ ID NO: 247216 - DNA, 122 bp, Homo sapiens
accgcctctcactaggcggaaagttttgaaacttttgcgcgctaaaaatgatgagccagacgcatgcgcaaacgtgcactcccggggtggcgcttctcctcaggcagatctcgcgtggtttg

SEQ ID NO: 247217 - DNA, 122 bp, Homo sapiens
aggcaggaggatcactggagcccagaagttcaggccagcctgagcagtgtagcaatacctcgtccctatttaaaaaagaaattaaagagaatatcaggaagaatagctaatgcatgctgggc

SEQ ID NO: 247218 - DNA, 122 bp, Homo sapiens
gcaatgaatttagaggattccctgggatttaggagcccgtccattctgccctttgggacccggcgggccaaactcttcccgccctaggcgggtcaaggtccactctgcgccttgcgctacta

SEQ ID NO: 247219 - DNA, 122 bp, Homo sapiens
ttataagttgcatgaggaggcaaacaggattaaatacttgattagttacagtgatgctgtcgccgtatgtggacttgtcaacctgaaataaaagaatcagattccagttttttaaagtttac

SEQ ID NO: 247220 - DNA, 122 bp, Homo sapiens
caatgaggggtggtcccagctctgctattgactcggtatgcctttaggacattctcttaccgctcatgggcctcagtttcctaaagtgtgaaatgtcaggcacttccctctaactggcatgc

SEQ ID NO: 247221 - DNA, 122 bp, Homo sapiens
acagaacaacacttccgtgtgctaaatagtaaagcaccaaggtactcgatccaggggcggcgtgcagtggggaggtgagctttgggtcggccgtcgcccctcggctaccggcgggatccaga

SEQ ID NO: 247222 - DNA, 122 bp, Homo sapiens
ccagggccacgcagctcccgcctgccctgacctcagtcccctggaatgcagaattctccacggtcagccatccatcaccaccgctccctcatggccagcgctgaaagaaggggcgtttccgt

SEQ ID NO: 247223 - DNA, 122 bp, Homo sapiens
atttagaatacaaatctgctctattgaacgaatgtaacaagcaaggaggcttaagactggcgcaggcaagagcactcatcaagatagatgtgaacaaaacccggaaaatctatgatttcctc

SEQ ID NO: 247224 - DNA, 122 bp, Homo sapiens
tcctggtcattgtaaagatgcccggcagcagggtgggcttccccgatcctcggctgccgtcgctcctgctgtggtctggggcaggcgcctctcctggcagacacacctgagggtgccgtggt

SEQ ID NO: 247225 - DNA, 122 bp, Homo sapiens
agaacatggggctctcaactttatttttccttgataaattaaagccagtttcccgaatgccgtcttctaaataatttatatttttctcattgatctgtggtaccacctttgtgtaaatggag

SEQ ID NO: 247226 - DNA, 122 bp, Homo sapiens
ctgcggctgcggtcccggctatagctccggctccgttgccagctgtgggctgtggtgctacggcttctccgcttgcttcgactacgactacaactgctgctgcggctgcggccccgggatct

SEQ ID NO: 247227 - DNA, 122 bp, Homo sapiens
gatgcctggcctgaggagttgaccaatcccaggcctgggggcggagtctgactcggagcgcgttcccggactcgcggggggcgcagagccgaggcctgggggcgcggctcgctgtagaggcg

SEQ ID NO: 247228 - DNA, 122 bp, Homo sapiens
tttaaaatgaaaagataacgaagaaatgtttgctaacgatgtgctacttttgattaggaacgtgtaaatatcctccattgaaaacaaatgcccgaaggttatatgcttttatataatatatc

SEQ ID NO: 247229 - DNA, 122 bp, Homo sapiens
tctgtctgtcgcagcccaggtgagccaggagggggacgccgacctccaaccccggcatggcgtctgcaacacaaaggctgttcctcctgagcgtgtgggagcagcattcgagccagagtttg

SEQ ID NO: 247230 - DNA, 122 bp, Homo sapiens
aaagggctggcgcggggctcggcggcgccatttcgtgctggagtggagcagcctctagaacgagctggaggattctgcctaccgatacagagccttcgagtcgtccggggccgccattacaa

SEQ ID NO: 247231 - DNA, 122 bp, Homo sapiens
ggacctggaagtagatcccatggcttggtgcccacagctattaggatttttcttgtcagtcgtggtagattttggttcttccataaagaggaacccatttaggtgttttttagaaatacctc

SEQ ID NO: 247232 - DNA, 122 bp, Homo sapiens
ttcctgggaatccaaagccactctgaacctcttaccttcttctggagctcctcgatggtccggaagtaggactggtagtcagggcacatgtaggggacctgctgctcacaccactcacggat

SEQ ID NO: 247233 - DNA, 122 bp, Homo sapiens
tctgccccaaggctctcactgttttcctgctccaggaggcaggttctaactgctcctcctcggactccgatgtcatctcggactctgatgagctactgctggaatcgctgccctcatcagag

SEQ ID NO: 247234 - DNA, 122 bp, Homo sapiens
ggtcaaggtgcagaagaaggcggcagacctccccgaccgggacacgtggaagggccgcttcgacttcctcatgtcctgtgtgggctatgccatcggcctgggcaacgtctggaggttcccct

SEQ ID NO: 247235 - DNA, 122 bp, Homo sapiens
tggtggtgtctgggtgccaacctgggctttctggtgagggtgggagtctttccccagcggcgcctcagccccttccccatccccagaccagctgtggacagccccggagctgcttagggacc

SEQ ID NO: 247236 - DNA, 122 bp, Homo sapiens
gcttggggagcctcggtgacaagtgttcagtgaggtgtgccgcacgctgcctgtgcccgccgtaatttgtttatctgtccaaagattatgcagttgaaaatccacaattttatgctgccttt

SEQ ID NO: 247237 - DNA, 122 bp, Homo sapiens
ttctggcactgggcatgcagcagggagcaaagcacaggaagtccttactttcatggagttcgcatgccagtgggagacgatgggcagtaaacacagaccagtgaatgtatcatatgtcaggg

SEQ ID NO: 247238 - DNA, 122 bp, Homo sapiens
ccccaaatattgcggccgagggggacctagaaggtcaaagtgcgcctcagcattttctctcgccctgcacaagccgcatttcgccccgagaactacgcttcccggcaggctgcgcgccgcgc

SEQ ID NO: 247239 - DNA, 122 bp, Homo sapiens
ccaggcacttgaccagtccagatagtcgatctggacctgtgggtctgcataattcatcctcgccccattgcccctgatgctggtgaggtgcttcctgcagctatggagagcggatggactga

SEQ ID NO: 247240 - DNA, 122 bp, Homo sapiens
ggttgcgcttgcgctgtagccgcccagcgacctgtgcgcggcgtctgagcgagctgcagccggaagaacattcggttgttgatattgcctcagccttttggagcattcttttgcgctgcttg

SEQ ID NO: 247241 - DNA, 122 bp, Homo sapiens
accttcctctccaggaatgatgcgatcaggccaaagttcttgggatgctgcatgaacctgcgggacgagaagggtgggcgtgagacctggccgaggggggctttcctgcggggcagccgatc

SEQ ID NO: 247242 - DNA, 122 bp, Homo sapiens
tattgagaaaaaggttgcctgcatgaccctaaaagtctcaaacttattgccccatcgggtcgtcttggtggtggagttctggtggaagaggaggtatttagaagctatgaggtggtcactgg

SEQ ID NO: 247243 - DNA, 122 bp, Homo sapiens
tgcacatggttgagctctgaggccagcctcccgctgtcggcctccacgcactcggcctcccgccgcagagtctcgatgtagccactgaacagtggctccaggttgctctcgcagcagcgctg

SEQ ID NO: 247244 - DNA, 122 bp, Homo sapiens
ttactgtttaacacaaggctgaatacataacactggaattaaagttggttgaaagaaaaccgtcaggtgactcatagtgaggtggcacagacatggccaaaaacttggagaccggatgaaca

SEQ ID NO: 247245 - DNA, 122 bp, Homo sapiens
ctaccttcacttggcttacaaaaggcttctgtgctccttagtggctggaatacatgctctcgctgttctcaatggagcttccaggttactcagcagctctgtgatttacaaggccccctggg

SEQ ID NO: 247246 - DNA, 122 bp, Homo sapiens
aggatctgccaaaaaaggtcaagactaccagcaacatgggcgagggggcctctggggtcacgttgagttagtcgctgcatagaaagagggctcaaatctaaaaaatgcaagagggtaggtca

SEQ ID NO: 247247 - DNA, 122 bp, Homo sapiens
accacagtataaaatagagaaatcactttatagatacccagggaggaacttgaacttggccgaacataaatcaagaaaagagtcccatacaggatggagacagccgcaaggtgagaaaaaca

SEQ ID NO: 247248 - DNA, 122 bp, Homo sapiens
tctgtatgtggtggagaggattctaaggatgtcattagggaaaagaagacacagcacccccgtgggagtgattagggaggccctggctccagctctggctcagcctcaaagctctgctgacc

SEQ ID NO: 247249 - DNA, 122 bp, Homo sapiens
gacaggaggaaacgcttccgaattttccagacgtgttgacgtttgagggtgctgactacacgttaaggaactttattgtcacgcctttgggaatatactgccaggctcttcctagatatatt

SEQ ID NO: 247250 - DNA, 122 bp, Homo sapiens
catgagccactgcacccggccatagttgctattttatttgtgtgattgattaccgtatgacgcttttattgaagtgcagtgaaggcaggaaacatgaccggtttttacaatattttcaacac

SEQ ID NO: 247251 - DNA, 122 bp, Homo sapiens
ccaatttacacaccatctgtccctatccttttcgaaagctgtgcggaccctcgcggaagacgcctttgtctcccgcctgcctagcgccccacagcccggcatgtggggtgtacccccgggcc

SEQ ID NO: 247252 - DNA, 122 bp, Homo sapiens
gagaggtggagtgggggcggagaccgacccagtcttcgcaactctatttgcatacggaggcgactcgcttccttcccgcccctccgccgcgctcttcttccttccttctccagtcccttcca

SEQ ID NO: 247253 - DNA, 122 bp, Homo sapiens
aaaaagatggccaagaactaagtaacgatctggatgcccaggtaacctatcccctcccctcgcaaaggaccgggtcacgggagggagagcaagaggggggacccgacccgttcatggtgact

SEQ ID NO: 247254 - DNA, 122 bp, Homo sapiens
cggaggctgcgggaattgggctggcctgcaccgccccgggctcccattggctggtagggccgccagtcattctattccggcacctcccttaggcgccagggacagccgagcgttacctggtc

SEQ ID NO: 247255 - DNA, 122 bp, Homo sapiens
atgggatgcgcaagcactttgtctcttgctttgttttcagtcgccatatttaatctacgtcgaaacttcaaaataacattagggggaaaaatgtagcgtcatgtttatcagacgaggacctg

SEQ ID NO: 247256 - DNA, 122 bp, Homo sapiens
gtcagtttgtaaatgtcctgcttgttttttccatggacagtggacatttcaccttgcttccggggtgcttaacaggcctcaatttctggaaagagaaactgaggtcaaaggaaggcagggag

SEQ ID NO: 247257 - DNA, 122 bp, Homo sapiens
ctccttgtcccagatgggcagccccgcgggagaccccgaggaagaggagcccgtgtacatcgagatggtggggaacattctcagagacttcaggaaggaggacgatgaccagagcgaggccg

SEQ ID NO: 247258 - DNA, 122 bp, Homo sapiens
aattctgttagtaaagcctgagggctcccagaaagcgacgatggtgctgtgctggcagaccgaatgttttttaaaacacaaagcttgcagtcctgctgctgtgctcaaaatccttgcatggc

SEQ ID NO: 247259 - DNA, 122 bp, Homo sapiens
attccggcttggccccgcctccgtttcttaggggtaggttctgttgctgtgggaagggggcggagagaaggaaaccttatttcagccgtgcgctagattagacacagctagaatgtctccat

SEQ ID NO: 247260 - DNA, 122 bp, Homo sapiens
catcccagatcaccaatactttcttctaaaaaaagccaaagagcctcagtcacaactaaacggccacctctttcttccctaggaccaaggtcgtgcacactcttgcaatcaaaagttcttcg

SEQ ID NO: 247261 - DNA, 122 bp, Homo sapiens
ctgcgggtcggggaagccaaagcttcggaccccaggctctgggggcccacagttaggatgcgggtgaaccacagggtagcggacgctaccatctgccagccagccagcgtcgcagcggtcca

SEQ ID NO: 247262 - DNA, 122 bp, Homo sapiens
ggcccgcctcattgagcagctgcatcaggtagttggtgaggtcacccccagcgtagtcggcgcggctggtcaggcccggcagcacgtcgccctcggatatgggcaccacgtgcgagacgccg

SEQ ID NO: 247263 - DNA, 122 bp, Homo sapiens
tgggacctggtctgagtcatgacttgggctgccctgcaggccagaggcccgggagctttccggccactccccagagaggtccgtggcgctgagggggtgaggaagtgccttggctgcttcca

SEQ ID NO: 247264 - DNA, 122 bp, Homo sapiens
ctcaatcatcccagttatgacctccccctgcccctccttgcagcatccctcttcattcctcgtggagaagtgtgggctccatagaatgaactggcaagtgtgcactgtgtggatggctctga

SEQ ID NO: 247265 - DNA, 122 bp, Homo sapiens
cctgggagaagaattcagaatagtggggcctgaggccagggccagcctgggaggcagagacgcgactggcgccccggatgagaaggggcttcggccctcccgagcccagcggggacacagag

SEQ ID NO: 247266 - DNA, 122 bp, Homo sapiens
ggctttttcgcccgcctggtggagctgttctgtagccgggaggacagctctcgcccaagccgagcatgccccgggcccccgcctccttcccaggagcccctggccctggccatggagctgag

SEQ ID NO: 247267 - DNA, 122 bp, Homo sapiens
atcgtcccggcctgtggctgtgtcctctccatgggtgggatcggccagggccttcccttccgcccatcccgcaggcagtcgctgctgcccggcgcccatggagagtaaagaaagggctaaga

SEQ ID NO: 247268 - DNA, 122 bp, Homo sapiens
catgactccaataccacccagcaacctacacctgcgtgtggtttgctacatgccaggttccgtggacaatcttatgcacaattctctgaggtacatgtcatagtgacctctaatgcatacaa

SEQ ID NO: 247269 - DNA, 122 bp, Homo sapiens
acttgataggccacagaaaaacccacaaaagcaaggacgagcaggcttttatgataatgtcgtcatcagctcccagcttcaaacgcttctgcggcttttgagttgtcatttataacttggaa

SEQ ID NO: 247270 - DNA, 122 bp, Homo sapiens
cattagacaatcagagaacttttataagaaaaccaatgcatgttaaatatcgccgtcctgcgtgcagagcctcggctcccaccttgcccgaggaaaatgagcagccggggtaccagggaggc

SEQ ID NO: 247271 - DNA, 122 bp, Homo sapiens
cccactatccccatttgctctaaggccagccagcaaatctgtgggagtgattttaacccacgggggagcggcaggcctagggctccggttgactgcagattcagcccaagaatgctcgggca

SEQ ID NO: 247272 - DNA, 122 bp, Homo sapiens
agactccctgaaccatctgatattgagggcttgagaacccaaccccatcgtctcgttgcccggagagaccctttcccacctatcctcagttagaggctgaggccatgccctggtgctcccca

SEQ ID NO: 247273 - DNA, 122 bp, Homo sapiens
atgacatcacacaagggcagaaaggagctgaagggggaacgtgaaaggcagaaagggagccgtggttgccaggcaaccagccctagcccacctttgtttgtttggtgacagcaactaaggtc

SEQ ID NO: 247274 - DNA, 122 bp, Homo sapiens
ttttccaccccgaggcctgttttcctcacctgttgtcgctctggcagaacctaggcccctcggagaccagccagcatctatctgcccgctgttcccacccaccacactccctccccagttct

SEQ ID NO: 247275 - DNA, 122 bp, Homo sapiens
ggcttcaaaaccaggctgctggggacgctgcacagcagtgcttcctggctggcctctgaccgcagcctgctgtgccctccgccggccctgccatttacagggggctctcacacccattccat

SEQ ID NO: 247276 - DNA, 122 bp, Homo sapiens
ggaagaaataggttggaaacccaaagatggtgatgctatagctagcagagtggaaggaatcggaagcaggcagcaggaagaaacttagatcacccaattaagaaaagatagtcatgcaaccg

SEQ ID NO: 247277 - DNA, 122 bp, Homo sapiens
ctgtagcccctggagccccacactggaagagctggcctgcaggaggcaccatgggggagtcgcatgacttattcgggattgacttgcgatgtggatggtgttcccggagtcccctgtggcca

SEQ ID NO: 247278 - DNA, 122 bp, Homo sapiens
agagtgagtgctcctcaagggagactcacacagttccttacaacataaataagaaatagacgtaatggcttcactcagtagaaaactagcagcatcattctgggccatggggcattccccag

SEQ ID NO: 247279 - DNA, 122 bp, Homo sapiens
gcccccagcttggacaagctactgcagatccaacccattccgtattttaaaagctctttacgaaaaaaaaaaaagcatatgcataataggaattagaactacattcactgatacctaatgca

SEQ ID NO: 247280 - DNA, 122 bp, Homo sapiens
ccggaggagcgagagcgaagcagggagctgccctgtaatctggggcagccgtttccagcccgcgacttgttcagacggcgattcctgggcctcacccccagagattctgattcagcagggct

SEQ ID NO: 247281 - DNA, 122 bp, Homo sapiens
gtcgttgctgccgggattttggaggccggggccgcgctgagggcgcccagctggtgagtgcgcgagctcacgggccccgggcggcgaggccgggcgccgccccgctgcggggtccaggggga

SEQ ID NO: 247282 - DNA, 122 bp, Homo sapiens
ctaattccagaacatttccatcatctcaaaaagaaatcttatacccattagtagtcaccacgacccgcacatcccccaccttcccagcccacggcaaccactaatctactttttatctctat

SEQ ID NO: 247283 - DNA, 122 bp, Homo sapiens
gaacctgagctatcgctgaagcgacgagtcggggctcgggtgggcggggctgcggctgggcggccccctccccgggggacccgccgcctcagctcggggaagcagggtcccacccagggcgg

SEQ ID NO: 247284 - DNA, 122 bp, Homo sapiens
ttaagcgaggctccggatggctgggatgtctttaggttagtagtcccgggaggacgcgaacgccggttcaggcagacacggaagaaagcaagcgggccgcaaagagagaaatcacaaatgtt

SEQ ID NO: 247285 - DNA, 122 bp, Homo sapiens
gggccgcagcctctccggcctgctccccgcgcagacctcgctagagtacgccctgctcgacgccgttacccagcaggagaaggacagcctggtctaccagtatctgcagaaggtggacggct

SEQ ID NO: 247286 - DNA, 122 bp, Homo sapiens
gacagccctggcttcctgttgggccttctctgacattaccccggtgggggtgttgggttacgttgttactgtctcatgcggttggatgttgaggctctccacttggccttagctgctgtggg

SEQ ID NO: 247287 - DNA, 122 bp, Homo sapiens
ctgtgtaccctctgcaagcagcactttcctctctagcaaagagagtgatgttgcctacctcgcaggggtcttacagaggaggagtccatgggcaaataaagcccagagcttgctatgtgggc

SEQ ID NO: 247288 - DNA, 122 bp, Homo sapiens
ctgtacgaggaggagcctcccaccggggtgagcttaaatttgcggaaatatagaaagtcccgccccacccaactctgaccctggggcctcttgcagcagtatcaagggctgcttagagcctc

SEQ ID NO: 247289 - DNA, 122 bp, Homo sapiens
gcgtcagtcctaggggccctgcctgagtccggcgtccccggctggccctggcagcactgccggcctggcccacctgtctaggccgtgtgtttgttgacattgctcctgcggccggcattggc

SEQ ID NO: 247290 - DNA, 122 bp, Homo sapiens
ccctgcccccaggagctgcctctgtgtctcccctgtgtggcccggcctcttgccacctgccgctgtctcagaaaataggctgggtgctttctggaggccataatgacagctcatggttcagg

SEQ ID NO: 247291 - DNA, 122 bp, Homo sapiens
ccgcgttaccccaaattttgtaggcagactgtcagagttcgaagccagctgtgtcctctgcgggccgtgtgaccctaggctatctgggctgctcggagccttagtttccctagttgtgaaga

SEQ ID NO: 247292 - DNA, 122 bp, Homo sapiens
ttcgctgttggtgccgacggatagagccaatgattgtggatgacagcggcacagaatgggcggagtctggaggggcgggatttggagaagagaaagcggtgatgcgaagagggggcgggacc

SEQ ID NO: 247293 - DNA, 122 bp, Homo sapiens
cgccaccccaggccagcctccagagcaccggcctcggtctaacccagggagagttggggccgtgccccgggggggtccagacaaagtccttcctaatctgcagcagggtggtgcctgagcag

SEQ ID NO: 247294 - DNA, 122 bp, Homo sapiens
gactcggagtcattttcagccggtccctcgcatgactggatcacatgagggacccaagcccggccagctgccacctttcggaccacatgcgtgctcagggaccgctctccaactcggcatgg

SEQ ID NO: 247295 - DNA, 122 bp, Homo sapiens
caaaagcttagaggccttctccacccctcacccccctccccggaaaactcatccctgaatcgcacaatttcgtgcgtagactcactccagtatttaagggaagcacctactatgcgccactc

SEQ ID NO: 247296 - DNA, 122 bp, Homo sapiens
ttttcacacagagagaggacttctgtcctgacaaaggagcgcagagctggccggggcattcgtgcgtgttcacgaccgagaacttttcacagagagaggacttctgtcctgatagacgtcgg

SEQ ID NO: 247297 - DNA, 122 bp, Homo sapiens
tcacagagccccccgttcctgacagcccccaccccagagcgcagcccccaccccagagcccggcttcctcagcctgcacccgtcacccagcggaagcttagatcctgtgattccttccggac

SEQ ID NO: 247298 - DNA, 122 bp, Homo sapiens
ctcagggctcgggggaggttcggccttgccttcaaagagctccctctcctgcagggcgagcgcagagcggcgggcgagaccacactgcgtgtgctgagggcgcactggtcttagcgggaggg

SEQ ID NO: 247299 - DNA, 122 bp, Homo sapiens
ccactgcccgccccgtcccgcctgcctgtgctgtgcctgcctcctagagctcattccctacgccccgactctgtcctggacagcgtgcccaccagccatggcggggccccggggcctcctcc

SEQ ID NO: 247300 - DNA, 122 bp, Homo sapiens
ccaccggagctcacacagccggttaccgcccggtgcagaagcgtggcgagtagcggtagacggcagccagagacactagagggcagcacgcccccacccaatactcctagtcctgcgacgtc

SEQ ID NO: 247301 - DNA, 122 bp, Homo sapiens
gggaggcttcgctctttggccgcgcgactcgggcactcacgttccgcgcagcgtcgcggtcggctccgcgcagcagcatcacccgcaccacctcgctgtggcccatctgggacgcgatccac

SEQ ID NO: 247302 - DNA, 122 bp, Homo sapiens
ctgcaaatccaggatcgctgccgttgtatctcagtctgatgtcggtggtcttgcgctggccggtgttctgaaactttgtcggcagtaacatgcactccagtcagtctcttcagtccaggaca

SEQ ID NO: 247303 - DNA, 122 bp, Homo sapiens
tgtgcatgtgttttaagttaaggttaacttcaaataataattaaacaccagttgctggatcgtctacttagtgcttatcaagagagtttatttactgatctgctgagaccaaaagcagcagt

SEQ ID NO: 247304 - DNA, 122 bp, Homo sapiens
gaggagcgcctctgccaggcccccaccctctctgggaagtgacgagtgcctctgcctggccgcctcacagcccgggaagtgaggagtgcctctgcccagccgccgccctgtctgggaagtaa

SEQ ID NO: 247305 - DNA, 122 bp, Homo sapiens
taaatattatttaaaactgtttctagacaaatcggagtgactatgggacaagcatatggtcgcaggactttggacgcaggcagtgaggacacctatgagcgatcagtggggtcctacggcag

SEQ ID NO: 247306 - DNA, 122 bp, Homo sapiens
cttgagggagaaaacgacccagacattcgcgtcaaaggaagtgtcgtctatttccctcaacgcagggcacccgttctaggaatgtttgtataaacaccgtaaacctgcctggtaccaccatg

SEQ ID NO: 247307 - DNA, 122 bp, Homo sapiens
aagaccaggcaggggcgcccttccgcaagctcccagctctagccggtgcctctggccccgcgcgcattaggtcgctgccagaaaattacccgggcaacgacaccgccggagtcccggatgtg

SEQ ID NO: 247308 - DNA, 122 bp, Homo sapiens
ccgggcccctctcatcctcgtggagacgttggaaggctatcaggaggctgtaatccagcacgttgagctcccggaggaaggtggtatccagttccatctggcggaggaaccagctccgctgg

SEQ ID NO: 247309 - DNA, 122 bp, Homo sapiens
tctaaacgaaagagccacgacgctctgcgcatgtgcgctcttcgcaagctgaaaatcttgcggggagctctttagcaagttccgccttccagcctgaagcgcatgcgcagcctcggttccgt

SEQ ID NO: 247310 - DNA, 122 bp, Homo sapiens
cggcgcactcagggaccaggaggccatcccaggtgagccccgccagccccagccggagcccgagctgcagctgccacctgcaagtggtgctctggctgcagcggtggcaaccccggatccag

SEQ ID NO: 247311 - DNA, 122 bp, Homo sapiens
tctgggcgtctgcacctggggcctagggaactgacacgtgggaagcgcagtgagccggggcgggggcggaatcccccgctgcagggacacccacgcccttctctccagaagccgggcaggca

SEQ ID NO: 247312 - DNA, 122 bp, Homo sapiens
agggtctaggactgggcataactggcctttctgcacctattttctgcacacattctctgtcgccatcaactctggcttacgtccctgtcttttcacgttatccctttctactctcaagctcc

SEQ ID NO: 247313 - DNA, 122 bp, Homo sapiens
tattcatcttgctctgctcctttgcagagctggcctgcagtccttgatggatctggtgtgcggccaggtcaaagaggtccagataatcttccacgggatagcggtctcgcagcccatctctt

SEQ ID NO: 247314 - DNA, 122 bp, Homo sapiens
cctcggtgaggtctgaagactccagagccttcagctcgagcatggccttgctcacctgctcgatgtaagggattcgagatccgtccgggcctgttggggaaaagagatgagatccccgggcc

SEQ ID NO: 247315 - DNA, 122 bp, Homo sapiens
ttgtgagaagagcgtttcgcccagcacgtggatttgtttcccaggcagggaaatcgggagcgggagagatggacagcgagctggtgaggatccgggctgcgatgtcgggagcggtgagagcg

SEQ ID NO: 247316 - DNA, 122 bp, Homo sapiens
ggtgcccgtgacctcccgcatcagggagctggccgccaccctcgactcccggggagcaggcgtcccgcgaccccctcatctaccaggccatctgagctgggcggcgcctcacctccgctccc

SEQ ID NO: 247317 - DNA, 122 bp, Homo sapiens
aaagacaagaggcgagagtgccgggagctcctcgggggcccggcccggggctctgaaacgcgaggctgcaggacctgcaaaagcaccgaggccgcgtttgtcctgggccctgggccccttgg

SEQ ID NO: 247318 - DNA, 122 bp, Homo sapiens
caagctcggcgatggcgtcgtcgaacgcggtcttggccaagtggcacgcttgctctggggcgttctggatctcatagtagaagacggagtagttaagagccaggcctaatcggatggggtgg

SEQ ID NO: 247319 - DNA, 122 bp, Homo sapiens
ggttgggaaggtatcttcacttaaaatctgccaggatccattggaagacctaagaaacatcgcttttcctctacgtgcacagagatcacctctgtaaaacagactctgtctcccaaagcata

SEQ ID NO: 247320 - DNA, 122 bp, Homo sapiens
gtggagacaatggtgctatggtgctcatggtcaaaggtggcactgccaaagtctaccacccgcacagctgtgctcttcacactgcgctcatctcgcttctaggagcagaggagaaagaggat

SEQ ID NO: 247321 - DNA, 122 bp, Homo sapiens
aggagaacagagaggcacaataagagaatggccttggcttttcctaaagtctttttgatacgactagctagatagaagatggggagagagatgcaccttatttctctagtgtttatactgat

SEQ ID NO: 247322 - DNA, 122 bp, Homo sapiens
ccacgcaggctgcacagagaagctagagcgtcacctgggggcagagcagcgaccgttcctcgttcctgctttcctgggcacgtgtggaagctttgcccccaccccacagatgctggacctgc

SEQ ID NO: 247323 - DNA, 122 bp, Homo sapiens
taatattaacttcaccactcagtactgaaacagttgttatggaggcctccgttagtgagacgtggcctgccacaggaggactgcttgagcccaggagttagaatcaagcctgggcaacagag

SEQ ID NO: 247324 - DNA, 122 bp, Homo sapiens
tgaactcttgggctcaagtgatcctctcaccttgacctcccaaagtgctgggattacaggcgtgagccactgtgcccaggctcggtagagatttgtttcacattttagtgtttcctgagaac

SEQ ID NO: 247325 - DNA, 122 bp, Homo sapiens
gcgtggcagggcaaggtgcagctgggacaagggcagcagtcacctggcccggcccccacccggcgtcccacctcagggagcagatggagattgaaaagcagtttcctggggtccctcctcat

SEQ ID NO: 247326 - DNA, 122 bp, Homo sapiens
cacccatgagaaatcccatgaactggcagtagcagctgagcctgggagatgaggcagctccgggggcttaaaaggaaatagtgtgaatgaaatcatcacccagcaggagtcttcctggctcc

SEQ ID NO: 247327 - DNA, 122 bp, Homo sapiens
aggacatttcacctttgttctaccgagtgggaaactgggggtctggaagcacaggtgactcgtataaactcgcagttcccttgactcctgacctcacacctggacacttaatggcggcacag

SEQ ID NO: 247328 - DNA, 122 bp, Homo sapiens
cgaccggtgcaacgagaccggcttctgcgagtgccgcgagggcgcggcgggccccaagtgcgacgactgcctccccacgcactactggcgccagggctgctaccgtgagtgcgcgccgtccc

SEQ ID NO: 247329 - DNA, 122 bp, Homo sapiens
tggctatgcatattgtgctatttgactagagtgataggattagcaattgtatagaagggacgtgtgaagaaatattttagttcaggcagcatctattgaacaacaggtgtgttcaaaaaaca

SEQ ID NO: 247330 - DNA, 122 bp, Homo sapiens
ccctgttgtccacacaggatgtcccgcctctaggcgccgtgatgtgggtggctggaagagcggagagccagcgaccgccgatctgttagctcgtgcgacccagcggcgggggtcctccactg

SEQ ID NO: 247331 - DNA, 122 bp, Homo sapiens
ctggactcctcccagaacttcctcttcataactaatctttgctagtttagaagttagaaacgtggcatctcacggttgcttttctttaccgactggtgaggttgggcatttgttccttttaa

SEQ ID NO: 247332 - DNA, 122 bp, Homo sapiens
actgtaacccagacctcctcctccccttcagagccacatatttacatgcttactggacatcgcttcttggatgtcttccaggtacctatcattagcatgtcctaactcatagtctttcccca

SEQ ID NO: 247333 - DNA, 122 bp, Homo sapiens
gtcgggcacgcagttgcagggctcagggcagagcgcctcgcgcagcgctcgtggcagcggcggctgcagcagcagcagcagcttcagcagctgcagcgccgagaaccgctgcttcatggccg

SEQ ID NO: 247334 - DNA, 122 bp, Homo sapiens
tgcgtcgtctccgctgcaaaccagtaggtggccggcctagagcccccaagacccctcaggcgccgccatcttgcttatcgtatccgtatggtggccgaatccatatgttcgccgggaacatg

SEQ ID NO: 247335 - DNA, 122 bp, Homo sapiens
aatgcccgattctggacactcgcgtttaatttctgcggcccttgcagctgccggcgcaggcgctgcacccagcgctgctccgcgcgcccagccccgctgggtcctggaccccgccggcagcc

SEQ ID NO: 247336 - DNA, 122 bp, Homo sapiens
gggctgcgctggcaggagtgggggcctggcacacccccaggtagatgccctgcccgttaacgcccaagggcaggggcttgagtgactcatgtgggcctagcgtgaatcagcacagtctgccc

SEQ ID NO: 247337 - DNA, 122 bp, Homo sapiens
gtggtccaggagccgcttttttccactcgggaagacttcagagaagtctcacaaaggactcggctggctgcttttctcagtgccgaagccgcgccatgctcgttctcagaagcggcctgacc

SEQ ID NO: 247338 - DNA, 122 bp, Homo sapiens
tctaaatactaaagccattataatgtcctgagagctttagccaaactaactcctgcccttcggttgctgtgaaaagaagtgtgacacttgtgttataacttatgaaactcagaaatatttct

SEQ ID NO: 247339 - DNA, 122 bp, Homo sapiens
tcacagggcccagccggagcggcctgctggggatcaaggtggtgttgccgtgggaaggaacgctgtccagggaagccagtctctagcaagatttgtggaacagagaggaggccgggcttata

SEQ ID NO: 247340 - DNA, 122 bp, Homo sapiens
ctttctcttccctgatcccttctgctcgcttttctgcacatactggcacaaactgccctgcgtgtttgtggagagacaaaccctgccagattctgcattcaaaagttttaggttttattaga

SEQ ID NO: 247341 - DNA, 122 bp, Homo sapiens
agcgattggctttaggggctgcccatctgcttcatactcgccaatcactgtcgcttccagcgctgactggccagggagcagccaatcggggcgtggcgtggacccctcccgtggcgcgctct

SEQ ID NO: 247342 - DNA, 122 bp, Homo sapiens
aggggaataagacctataattccttctagccttctgtaccatgttccctccttatgtacacgactcactcatgttttttgtctatctaaaattatgtaacagttaaatttgtctctttttct

SEQ ID NO: 247343 - DNA, 122 bp, Homo sapiens
ggctagggggcaggcggcgcggtgaggaccaggcccagggcgccctcccgcctgggcacccgaccccctgaccccgcttcaccttcgtcctgcgcgggcaccgggttcttgatgaacgcgga

SEQ ID NO: 247344 - DNA, 122 bp, Homo sapiens
tccccatcctggggccgagagagcaggtggagttttctttgtagctgggcccggaggtagcggaggtcttgctgatcaagcccgtgagccaggcccaggtagagggtaaggaggaaagcaag

SEQ ID NO: 247345 - DNA, 122 bp, Homo sapiens
ccttcggggcagagatccagagatcctgcctgagtcactttggcgggtttaatgcccagccgcgccaggcacacagtaggtgctcagtaagtgaaacagtgccgggaagaattcgggccggg

SEQ ID NO: 247346 - DNA, 122 bp, Homo sapiens
gtgtcaaaattaattggttggctccatggtaacttagctttttttctactatagggatttcgccagggaataaaaatgttcttcaaatgtttcttgaggatagaagattgatagttggggga

SEQ ID NO: 247347 - DNA, 122 bp, Homo sapiens
aggctggtgttctcaatgacaggacagagaagaggaagttgcagggattgggggtggtgtcgatttacttctcagctctggtgtcctttcgcacagaaagcatgctggtgagtcaggtcttc

SEQ ID NO: 247348 - DNA, 122 bp, Homo sapiens
aggcatctgcttacagctctccctgttcaatatctgctttttgctgttgtgccactcacccgctctctgagaagttcctggtgtggaatgggcagggagctgggttcagggccagggatgac

SEQ ID NO: 247349 - DNA, 122 bp, Homo sapiens
cttacagttgaggagcctcacctggtgagatccctcttgctggtgggtcctgaggcgacgcgggacctcacctggcgaggggagagtgagccagcccagggctgcccccgctgcttacaaag

SEQ ID NO: 247350 - DNA, 122 bp, Homo sapiens
atccagctgtaaacggagcaggggttccccaaagaagccgtgggttctgtagaggagagtcggcttcttgggaagtagcatgagccggaagacagcgagactgtggctctctctgggagggc

SEQ ID NO: 247351 - DNA, 122 bp, Homo sapiens
cccccaggtcccacagctgtgccctatcagggcagaacacatggcgcctttccagggtcgcgtccaaggacctggcaccgtaacagtgccaggatcagcgccaggactgtgcgactcccttc

SEQ ID NO: 247352 - DNA, 122 bp, Homo sapiens
aactccgcccgggtcccctccaggacttccttctggctgttccagtactcggcatcaggccgcccctgcggcgtcaccgcgcggtacacccccacgtcgctgtcgaagcgcgcgtactcctc

SEQ ID NO: 247353 - DNA, 122 bp, Homo sapiens
tcgggcgggtcccggcgccggctggggcggggaccagggactcggagaacgcggggacgccgggacccagccctgaattggggacagtggcccagcaatctcctggcgccccacgatggacg

SEQ ID NO: 247354 - DNA, 122 bp, Homo sapiens
tgcgttttggagaggcaaaaggcaacgctgagtctgcccagaccacgcccacgacgggcccggcgctccagcgtctcctggagcctggccaccgttccttttcgtggtagctaatcccagcc

SEQ ID NO: 247355 - DNA, 122 bp, Homo sapiens
ctgaccgcccaggatgcgacttggacacatccgaaagggcctagcgggaggctagagaagcggcacttggggagcgaagaccttccctccccttgcctctcaggcggcagaaagaccccaga

SEQ ID NO: 247356 - DNA, 122 bp, Homo sapiens
cgcgcttgccggagatagcattgagggcccttccgcggcccggcgtttcgtctcttgggacgattttgtgcgttccctcggtccccgtggggcccatagtcctcacttctgccaccccagag

SEQ ID NO: 247357 - DNA, 122 bp, Homo sapiens
gctggggacgctgggagactcacagcccggaaaacaagggtgacgcacccactcccacctcgacccccgctccgcctcctggtgccctttgccctgagcagtggaggggaggggccccgtct

SEQ ID NO: 247358 - DNA, 122 bp, Homo sapiens
ctgctgctgtatatataacaggggcgtgtctccaaccacactattttgatagtacataagcgtgactctgagaagttttatctacagtcagctatacgtttgtcaatgtgaagaggtggttt

SEQ ID NO: 247359 - DNA, 122 bp, Homo sapiens
gagcagcaagcccctgccaccctttggcacagccacttctcccggacctcagataaccctcgcagttcctctgaggtagggagaggtgcggcccacacctgaggacccccacatctgagggt

SEQ ID NO: 247360 - DNA, 122 bp, Homo sapiens
tcgggacagccagacaggcggctattgttcaaaagtcagggccggtttgatgggctctcccgcccccagtagatgagctaggaagatgtcacttttaattacaacggtgagggaataggtat

SEQ ID NO: 247361 - DNA, 122 bp, Homo sapiens
tgggacctgatctgtcggacagtaggggcggggcttttcgcgatgccccgcccctaggagcgctggcgtcacgcccccgtccccgcctctccggaacccggaagcgggagcgcgcgggggag

SEQ ID NO: 247362 - DNA, 122 bp, Homo sapiens
gttgcgtaagacaaatcattttaaaattaatgccaaaaccacaaaatcactaacctgatacgaaattccagaatgcggcaagaatattacaagctaaattagaaataagaatcctctataca

SEQ ID NO: 247363 - DNA, 122 bp, Homo sapiens
agcttggcgcgtgattcactccaaaaacagcagacaactaaaaccaccatggaatgaaatcgtcatcgcgctgtaggacctctaaatccattcacaggcgtctgccgactgtgaagaggtgg

SEQ ID NO: 247364 - DNA, 122 bp, Homo sapiens
ggccgagttggcggctggacgaggacgcagagcccagctctcgagagttcaagcaaccgacggttccccagggctcccaggagcggttacctgggcactctgtgcccctccttcctgttcgg

SEQ ID NO: 247365 - DNA, 122 bp, Homo sapiens
tattcattggacatgctctggaaacatataacaaagtatctgatctagttcttggtcaggcgcagcttccttaaggaattgacattcctgccaaatgctcaaagttaagtagaaggtgatga

SEQ ID NO: 247366 - DNA, 122 bp, Homo sapiens
gggccggaacctcttgccacctgcacccggcaactcccgactcaactacacggtgctcatcggctccacaccctgtaccctcaccgtgtcggagacgcaactgctgtgcgaggcgcccaacc

SEQ ID NO: 247367 - DNA, 122 bp, Homo sapiens
gagcccgggcctgagctgggacttgggccccggggcgctgctcctccgcaaccgatccaccgcatcctggcaactgagcaggctccgccacccctagagcacaggggccaggtctgtaggga

SEQ ID NO: 247368 - DNA, 122 bp, Homo sapiens
cgcgtacagctgcttcacgttctgtgtggccgaggaagacaagctgggtgggggctcccccggccctcctcgccgggccccacctcccgaccccacccgggcccgtccgaccccaccccggg

SEQ ID NO: 247369 - DNA, 122 bp, Homo sapiens
ttttcagggttcttgccttggagttcttcctagggcaaactcttgcactcccatggcttccgttacctacttcatgctgaccattcacaacccaggcagctacatggacgagatctccagct

SEQ ID NO: 247370 - DNA, 122 bp, Homo sapiens
ggtgtggtctctttatggcatgttatctccgccccaagcccggggccctagaccctgagccgggaaaaccagaagctagaaagagggcatccgggttgtgcaaatttcagacacacggatat

SEQ ID NO: 247371 - DNA, 122 bp, Homo sapiens
gcggggctcctgcctgctccatggtgcaggctgggtctgcaggcgcggtttgggcacctgcggagctcccgctcccactcagaaggggtggggctcccacctgctccatgaaatctgcagtc

SEQ ID NO: 247372 - DNA, 122 bp, Homo sapiens
tggtcccttgtaaatagcttgccgttactagtgctgggaaacagaagcccataagagaatcggtggtttagttctggaaaattcagcctctggacatgtctaacctcacctgcaagcaccaa

SEQ ID NO: 247373 - DNA, 122 bp, Homo sapiens
acacaggtgctctgcttggcagacctgcaaggaagtctgaaaaagcagtttgtggttttccgtctgtgcagctcaggaaggtacacctgatgggagttagctgggctttggctagccaacct

SEQ ID NO: 247374 - DNA, 122 bp, Homo sapiens
ctgacagccgggtcctcggccaacccttgggaggggctcctaaaataccccctttgacagcggagaatgcagggtccagagaggcgccacgggtctgccacgaggtgctgagccaggatctg

SEQ ID NO: 247375 - DNA, 122 bp, Homo sapiens
ggccccagcggtgggagtgcaaaagacccaacgccaacacctggtgccttctgcagccagcgcccacccatccgtgcccggacccttgggaatgcccgcggctccagaggaaaaagcccagg

SEQ ID NO: 247376 - DNA, 122 bp, Homo sapiens
tcgggctctggcatgaggtacgggagtttgctcttggtggatgggctcgggtcagcatcccgggttccctcctggtagccagaagtctctcctcctttgccgaaatctgccccttcactcaa

SEQ ID NO: 247377 - DNA, 122 bp, Homo sapiens
ccctgtgctcctgatctagcaaggcacccactgccattccggatcgggctaaattaggctcgccattgttcctgcatggctaagtgcctgggttcgtcctaatcgagctgaacactagtcac

SEQ ID NO: 247378 - DNA, 122 bp, Homo sapiens
agtcccctcctctagctcgctgacattcagctaagattgcagtgggtccacgttggcgcccgtgagtctgttctgggtagcatcctactgtatacgtatgcctcagtttatatacttactta

SEQ ID NO: 247379 - DNA, 122 bp, Homo sapiens
cgcaatgtgcaggcaggtggtgctctcgctccaccacggcacctctgcggtctctgcagccgtttgcatttcctgaaaccggatcttagtgtcagagccgcccccagccgggcgggcgcctc

SEQ ID NO: 247380 - DNA, 122 bp, Homo sapiens
gacacttttttattttagccattctgataggggtatagtgacacatcactggttttaattcgcatgtcctaacagtgagtggtgttgagcatctttctggacttatttgccatctgtgtatc

SEQ ID NO: 247381 - DNA, 122 bp, Homo sapiens
ttctgatactcttttattattttcttggttagagtcagacacttgaaaaaaattaatgtccgatgacaaaaatattttggcaatcacaatactagaatgtgattgcatttccagaattctga

SEQ ID NO: 247382 - DNA, 122 bp, Homo sapiens
atgaggctccccgatgtgagctggaacagcttgctccttcacactaaataaaaccaaaagcggcacaggagtgcggcgtctgtgagcgcctcgtgcgtacaaatgaccatcataaatctttc

SEQ ID NO: 247383 - DNA, 122 bp, Homo sapiens
ggctgatggggtcgctgctctggcgtcatagttaatgttaacttccactcacactgtgttcgtctgggtgataaaagtgtgtggggcgcctctttgcaggcttcctgtcctcttgggagatg

SEQ ID NO: 247384 - DNA, 122 bp, Homo sapiens
tagctttaaagtaaaaaatgacaattttctgagtaaattttcctaaattccccttcttttcgtctatatttacctttggtgcaattcaactcaactttcctcttttaaaagtctttatgata

SEQ ID NO: 247385 - DNA, 122 bp, Homo sapiens
gttcagggcactcctcggcgctcaagctgcccacaggtcttccgacctaactttaggggtcgtgccagtcttcgtagagacggccacactggcccacagaccccagttcctggggtgacgca

SEQ ID NO: 247386 - DNA, 122 bp, Homo sapiens
gaaggcgcgggagcggacgcgggggttctgtgaacttggaacctggcggtgcgaggttctcgccggggatgcggcggcggcagctgcttcctggtttgaagctcgccgagtgggggagagcg

SEQ ID NO: 247387 - DNA, 122 bp, Homo sapiens
agcagcctacaaagtgaatggaatttcagcagagcatgcagcatgaaggagcgatctcagcggggaagggaataaagtagggagtgcttcgaaggtgaatctgggttttatggaaggtagag

SEQ ID NO: 247388 - DNA, 122 bp, Homo sapiens
cgaccccttcggagtcgggcggcgccccggacccagcctgggggaccggacggggacgtgcggaagagtttgttattgtttgcagacatgtgacaggcgtgcgagcctctctgcggggaacc

SEQ ID NO: 247389 - DNA, 122 bp, Homo sapiens
gtggatacaggaagtgctcagcaacgattacgccccgagggccaatcacagggctgcggccgagaaagaagccttaatagagctttctcaacctgcagccctcatctccgccggcgagtagg

SEQ ID NO: 247390 - DNA, 122 bp, Homo sapiens
agggccctggaaccaggcaggacaggagaaacggccacccgtagctggagccatccttcccggagcctcgggcagatgcccagcaggatccactcgattcctgcaccaagagctctggacag

SEQ ID NO: 247391 - DNA, 122 bp, Homo sapiens
cagcaatactgcctgtagccattgggtggcagcagagtcccagaatatgagaccgttactcggatgttgaaagttggaaactatcccattgcaagtttctctccaaataaatgcatctaaag

SEQ ID NO: 247392 - DNA, 122 bp, Homo sapiens
cacaggcaaccgcgtccccaagacacacaggcaaccgcgtccccaagacacacaggcaaccgcgtccccaagacacactggcacccgcgtccccaagacacacaggcacccgcgtccccaag

SEQ ID NO: 247393 - DNA, 122 bp, Homo sapiens
ctgacctcgtgatcctcccacctcggcctcccaaagtgctgggattacaggcatgagccacggtgcccagcccgaatcttgtgtattttttagagacagggtctcactctgtctcccaggct

SEQ ID NO: 247394 - DNA, 122 bp, Homo sapiens
gagctgagaaagaaaagcgagcctgggactccgggagatgggggacctttatccctttcccgtgtggaagccccccacatctcccaggcaggcacagcgctcctcaccgcgcccctccgcct

SEQ ID NO: 247395 - DNA, 122 bp, Homo sapiens
ctggagctgggtggggctgcggcgcggactacaaatcccaggggcgtggggcgggagaggcggaaggggcgtcctggggcggggcggcacggggcgaggcggagcgaggctggaggcgcggg

SEQ ID NO: 247396 - DNA, 122 bp, Homo sapiens
cgccccgtccccgctctcatgaagccgtgacagagccggccgtctccaccccgctgtagccgcacagactgacaatctcggcacaaagaggagacagccaaggtccgggccagggacgggag

SEQ ID NO: 247397 - DNA, 122 bp, Homo sapiens
ccaacacctcgaaggactcggcgtccacatcgtgcatggtcacgctggcctgctggctctcgtacatgccacctgtgaacatgctcttgaagtagggacacgcagctgctagcacgttgcga

SEQ ID NO: 247398 - DNA, 122 bp, Homo sapiens
cagaccgaagtcgttctcagccttggaccaggaggctgccagagacagcagcaggaagatcgcggcaaacacccaaaccctacagcctccccagaagcccagaatccgcggcccccagcgtc

SEQ ID NO: 247399 - DNA, 122 bp, Homo sapiens
gctgtcccttgcggggtccctgactgggccgcctccaccctagagcataagggtccacaacgccacctgcctctccgacgccgactgcgtggctggggagctggacatgctgggaaacggtc

SEQ ID NO: 247400 - DNA, 122 bp, Homo sapiens
ccgccggcgctcgctcacctggggagggggtccagtcagggtgtaggtcttcccagagcccgtctggccaaaggtgaaaacagtgcaggagaaactgcgggcggcaagggcgtggctggact

SEQ ID NO: 247401 - DNA, 122 bp, Homo sapiens
tagcctgctatcttgttgtggagcttctcgctggggataatggcgatctcctcgcacacgcgcttatccgtgtggaagtcattgcccaggcgcgtgtagtacttttctgtgacgacctgggc

SEQ ID NO: 247402 - DNA, 122 bp, Homo sapiens
ttgctggtgcggttttccttcagctgtggtggagggctggggccaggtacagagacactccggcagccctcaaccctggagatggatccagggccaggtccgccccaggagggatggcggaa

SEQ ID NO: 247403 - DNA, 122 bp, Homo sapiens
gcgcgggccgaggcctgggacagctaccgcagcatgagcgaaagctacacgctggaggtgcgctcgcgggcggaggggcgcttccggcctagttggcgtgaaccggtgccttccgagccgcg

SEQ ID NO: 247404 - DNA, 122 bp, Homo sapiens
ctctaagtccttccagttctgggatcccacctccgggttaattccgcttcccttgaggagcgcatgcgcaatgggaccactcgctcaaagaacccacccgacccgagacggcgcgaatgtgc

SEQ ID NO: 247405 - DNA, 122 bp, Homo sapiens
agggagaggtttctatgggccaggctgaaggtgggcgcatcacttctgtgtaagttccctcggccagaatgagccacagagccatgcttatctgcaaggggagttgagaagtatctagctgt

SEQ ID NO: 247406 - DNA, 122 bp, Homo sapiens
cttgcacccagacccttagacactgcccagagaccagaggcccagccctcaggccccctgcggaggggcttgctctccagccgcctccaccatgcttgacgtttgcagaggacacagcctgt

SEQ ID NO: 247407 - DNA, 122 bp, Homo sapiens
tgactaatttggcaagaggctcttgaccagggattcctaactcatctgtggcctctccagcgccccaaactggaagtctataggattataggaagagtatgaatatgcacatcttccacatg

SEQ ID NO: 247408 - DNA, 122 bp, Homo sapiens
tgcgggtgcccgcagacctgggcgccgaggctggcttgcagcccgctgcttggggccttgcgtcagctccccaggaccgaggagctgcagcaactgctcttcatcaacaacgcgggctctcc

SEQ ID NO: 247409 - DNA, 122 bp, Homo sapiens
ccgccgggcccagcaacgcagggtgcctaggagccgcgggctgcgcagggaggcgggcagcggccctcgcgcgcttctgccgcccccggagccggcgcgcggcgagcgcagggcgagcgcgc

SEQ ID NO: 247410 - DNA, 122 bp, Homo sapiens
cagtcacccccccagcccatcggagagcttggaaagcaaagcttggcgtccgctgggtcccgccacccagggacgtccctgaggccagacgcctgccctccacgcgtcatgcatccccataa

SEQ ID NO: 247411 - DNA, 122 bp, Homo sapiens
aggcgggagatcttggggcgctgtccaatggcgcggaagagaacacatgagctggccaatcgggaacggcacgggggcgggctcgctcggcgcgaagttcgggcccgggaattccgaaggag

SEQ ID NO: 247412 - DNA, 122 bp, Homo sapiens
ctggatgacaccaagatgcagaagtcactgtccctcctggacgccgagaaccggggtgggcgaccctacacggagcgcccctcccgtggcctgaccccagatcccaacatcctcctccagcc

SEQ ID NO: 247413 - DNA, 122 bp, Homo sapiens
ggccactccctgacctctgccacttaagctacccattgactgttaagatgtcacagccaccgggcctctgcacatctggccagaaaggcacgaagccgcacccccgagcgcacactgcggcc

SEQ ID NO: 247414 - DNA, 122 bp, Homo sapiens
cttccgttatccctccctctggaaatgcgtgtgtcagggtgcctcctagtggaactgcagcgtttcctcgaaagccattccgtccaggagttaaggtggccgctgcccgcccgggacacttt

SEQ ID NO: 247415 - DNA, 122 bp, Homo sapiens
acacccgggagcctggcctcgaagctcaggcccgtgaacagactccaactacaacagcaccggcgacttccaaagagcagttcagcattttgagatgagcttccggaagccgacaggcggcg

SEQ ID NO: 247416 - DNA, 122 bp, Homo sapiens
ccacggcaccgccgcgactgcagggagctcagcgcagggtaccagagccagcatcgggggcgttggtgggcggtcctgtccaagcaggcctcctgaccccagcccagggctcctccctgccg

SEQ ID NO: 247417 - DNA, 122 bp, Homo sapiens
tcccatggactggagattcaacaccctccccagtacatctgctggtcccctgggaggactcgtagtctcctggtctttttacctctcaaaactctggcctcctctcacatcccttctgtccc

SEQ ID NO: 247418 - DNA, 122 bp, Homo sapiens
actgtagtccctgctgaccccatccctcacccccaccccacatgccagggttcacttacccgtaggaatggccaatgagcacatttcgcttcttggcatagcgcttgaagattgctcgcatg

SEQ ID NO: 247419 - DNA, 122 bp, Homo sapiens
ccgagtccagcctcttcctggtggctttcagctcactgatgagctggtctttggaggtggcgtcgcgccggtaggcctccaccatcacctgccaaagacagaggctgtgagcggacgctggg

SEQ ID NO: 247420 - DNA, 122 bp, Homo sapiens
ttaatgaggtaggtgtgtttagtgattaagaaatattaacatggccttttagttgttttccgtctttgctgactcataaaaccaggggaaatcatagatttaaagcaggaaacaattctgag

SEQ ID NO: 247421 - DNA, 122 bp, Homo sapiens
ccgaggacgcggtgctcttgggagctcagcctctgcccctctgcattcccgtcagcatcccggcccccaatccatggctggcacggtggggcctccatcccgcacctgcacctacagagcca

SEQ ID NO: 247422 - DNA, 122 bp, Homo sapiens
gtgcatctcacggagcataaccagggggaccgccaggcacccaggcctcctccttaggaccggcagatatgacccaagcctctgtgcaactgccagaggcccggctgatggggggccctgct

SEQ ID NO: 247423 - DNA, 122 bp, Homo sapiens
cttttcatgttgaaaatggtgactctttgccggctggctttgccttcttaaaaggaagcgcgagcacctcgagctcagcagagcagccgctggggattacccaaatgccaaaggctgaagtg

SEQ ID NO: 247424 - DNA, 122 bp, Homo sapiens
tgtcatttcaaacaaaaatagccctgaagcaaccctagttttcctgtggaacagttaatgcgtgccaaagtactgatgtggtagctctcccaaaattccctcatgttattcatgaaccttaa

SEQ ID NO: 247425 - DNA, 122 bp, Homo sapiens
gtgctgtctccatggagaccttagcgaccggaaatcagtttcacagccgccgaatcctggcgataccaaaggatgggaattggtgtggctcgccaggcagccctagcaaaactggccgagcc

SEQ ID NO: 247426 - DNA, 122 bp, Homo sapiens
ccctccccacccccagagcgataaggcatctgtaaacactctctgaagctccttccccagcgttcttgggtttgccactttgaagtaaaactgcaggaagacctctgtatgagatgaaaatg

SEQ ID NO: 247427 - DNA, 122 bp, Homo sapiens
ctgactgactcatgagtcagggacttaaaaaataaataaataagggaggccatcggtgcccgctgagcaaaacacgtcaggctgccgacaaaatgggcccctgctgctttccgggtggtttc

SEQ ID NO: 247428 - DNA, 122 bp, Homo sapiens
ccatgttgctttaatgacgccccctgacatgggcacagaactgccatctgccagccgggccgggctgtgtcttccgacctgcagggcgcacctgcccagaggctccccctctccctcatcac

SEQ ID NO: 247429 - DNA, 122 bp, Homo sapiens
ggcccctctgcctgccgccctgcctggcccccggcagagaaagactcctccagcagagcccgcctctgtttatttgtgcatcagggggaactctgggcgggccaccctggctgccttcgtcc

SEQ ID NO: 247430 - DNA, 122 bp, Homo sapiens
ccccacagtggtggcatcatgagtgctggagagctttctctgcctcagcactcttggcctcgcctctgggcgtcctctgagattgctgtcaccaccaggccggctatggactctctataaga

SEQ ID NO: 247431 - DNA, 122 bp, Homo sapiens
tctaaggcctgggcacaacccaaatttccatctaatggaagcaaggtgacagcttcaatacgagcaagcagcctcagttaacggtgggggcaccatgttcagtcatggaagctgcatttatc

SEQ ID NO: 247432 - DNA, 122 bp, Homo sapiens
ttgcataaaggaggtcctcgcttcggcgaagggagcttttgtgcccggcttcaggctctgcgccctgccccagatttacaggactctaacagccacctgaatgaaccaaagtttctcacaat

SEQ ID NO: 247433 - DNA, 122 bp, Homo sapiens
ctgcggctccatccagacgccgctgtggcggcgggacggcaccggccactacctgtgcaacgcctgcgggctctacagcaagatgaacggcctcagccggcccctcatcaagccgcagaagc

SEQ ID NO: 247434 - DNA, 122 bp, Homo sapiens
agtcgcctaacctctttgagccccagcttcctcatgtgtaaaacaggataatagcagtgtcgcgggggatggccctgggcgtggggtgagggccatttctgccctgtggtcactcgggagga

SEQ ID NO: 247435 - DNA, 122 bp, Homo sapiens
ggagaaaccgaggcaccgacaggttaagcacctttccacagtctgtcacacagcagtgagcggagcagctgagcgccgaacataatgtggctccattgtctgtgctcttagccgctgagctt

SEQ ID NO: 247436 - DNA, 122 bp, Homo sapiens
ctcgcccccacgggccatgagctcctgagtttatttacatttccctgattgctagtcaggcgcaacacctttccacatgctcatcagccttttggattcctcttttgtgatgtgctactttg

SEQ ID NO: 247437 - DNA, 122 bp, Homo sapiens
tcagggccttggcccaggggtcagcagagcttcagaggtggccccacctgagcccccacccgggagcagtgtcctgtgctttctgcatgcttagagcatgttcttggaacatggaattttat

SEQ ID NO: 247438 - DNA, 122 bp, Homo sapiens
caccatccttccagttacaatcggatcacaccatctggggttctggcttggctctctgagcgtgctttcctgggttgtttaggctaggaattctcagccctactgccccacgttccttcctc

SEQ ID NO: 247439 - DNA, 122 bp, Homo sapiens
ttttataatcctggtggggtccgataccccgtggcttagtcccaggaaacagtcagtctacgcggctccgtgccccggggtgtaatatgcccgggaggggcagcgcttggctaccccaaccc

SEQ ID NO: 247440 - DNA, 122 bp, Homo sapiens
aaggaaatattcttcaaggtctccaacagcatcctgaaagggatcactgaagcgattatgcgcataactcttcagcttccacatgctgtccggaggaatgctccaggtattttggtttgaat

SEQ ID NO: 247441 - DNA, 122 bp, Homo sapiens
gtttatggaagttttcaatgtatgctatgattatttccattttattgtatgggtgactcacggttatgagaatttacctaagttcacttcgtgggtatgtggaagaagagggctagaactca

SEQ ID NO: 247442 - DNA, 122 bp, Homo sapiens
ttgcgaagttactttcatgcatagatcatgttcaaatttatgtttctgtggggagtcaatcgctggagagtcttattcagccatcttgactctgcctcttctccaaattctctttatcagat

SEQ ID NO: 247443 - DNA, 122 bp, Homo sapiens
cttcaggctgtgttctgtaggcagtaggatggcatgcccagagctttgtgtgtgcacgtgcgtgcatgtttaatcactattgcacctcagcttaggctggtttagaaagagaaggcactacc

SEQ ID NO: 247444 - DNA, 122 bp, Homo sapiens
caacagaaatgctgaaactcataatgtgcagaatggagagaaacttgcaaagggaaaacacgctctggacacaaaggcagagatgcagagaagaaaagaaaggaaacgggcatgtgtgggca

SEQ ID NO: 247445 - DNA, 122 bp, Homo sapiens
cccaggatcggggagggccgctgggcatctgaaggcgcagggctgggggagcggcgactccgggaagagcggggccgcagacaatggacgcggcggtaggaggggcggcggctgtgggaaca

SEQ ID NO: 247446 - DNA, 122 bp, Homo sapiens
agaaagctttgcgctcaggcgggctcctgtccgtagaagcccgtgacatttcaaggttcgcgcgctcgtttggtattggttctcaaggagacgtggccacgggaggcccatggcgataattg

SEQ ID NO: 247447 - DNA, 122 bp, Homo sapiens
cgcttccttctacgattgctacacatcgcaggtcctttagtaaactctgcctctgttagacgatttattctcaaatggatttactcgagccaccgattcataggtgtttaatggctccacag

SEQ ID NO: 247448 - DNA, 122 bp, Homo sapiens
gatttgagtgcacaaggacaggcaggcatcctagctcctgaccttgggccaatattttctcgctatgggtctcagttgcctcatcacagaccacctgatttcaaagcccttgtcaccctgaa

SEQ ID NO: 247449 - DNA, 122 bp, Homo sapiens
cttttcatttcctgtacactttaaaagtgtggcttcctttcaccaataaaaacctgctggcgttttaaaactagcgttgcatggaatcactgtgttaatgtggagatgattgacatctgtcc

SEQ ID NO: 247450 - DNA, 122 bp, Homo sapiens
tgtatctgggattttcagtgctttaccggggctcttgtgcagagtgcacggtgaaggctgcgaggtaagactgtgcgaaccaattagtaaaggatgctagggagactgaaatttattctgga

SEQ ID NO: 247451 - DNA, 122 bp, Homo sapiens
cctcaaaacggcaaccgatgtggtagccgcgcaatcttccgaaacccaaaggctagagggcgtgcccagtggccaggtgcaggcggtggggcaagtaacggcttttggtagccccgcccctc

SEQ ID NO: 247452 - DNA, 122 bp, Homo sapiens
ccccctcggcctctgggggagcttggccaggaagaggcgtgtctatggtcgggtcttctgcgtgttcaattagccactccatggcctgaggcaccgacatgctgcaaggcaagagactcttt

SEQ ID NO: 247453 - DNA, 122 bp, Homo sapiens
aggccagagttgccgagccctgagcgggctgatgggtgggagcctcttccagacggagcgcgcccgccccgtgacgccactcagtggccgccatggcaagcgacagcccgtgccgggctcgg

SEQ ID NO: 247454 - DNA, 122 bp, Homo sapiens
cttgaaatgcaacctgctggagaaagacagtggggctgggtggttgcacgtggaaggcaccggaggcaaacggaaggaaggggtttgccatcactgggaacacctggccttttctaattctc

SEQ ID NO: 247455 - DNA, 122 bp, Homo sapiens
tgatctggagacatgtggttctgaattcaccagtcaaaggtttacttttgaaagaaaccacgatctcatctaagtctaagacagagaccttggttagctggagtctgtggtgcagagagacc

SEQ ID NO: 247456 - DNA, 122 bp, Homo sapiens
tgcggctgcactcgcttctccctcctgcagacattcttgctgctttccggtcccacgggacggctcccaggctcccgcctcacggcaagaaaaataaaggcctccccgcacagccagccagc

SEQ ID NO: 247457 - DNA, 122 bp, Homo sapiens
aaaattatgagagttgggatccaaactcagtctgagtccagttcagcaaatgaactcacacggtggctgtctgctgtttgtagcagcctatgagttgaacatccttccttgcctgggaaaat

SEQ ID NO: 247458 - DNA, 122 bp, Homo sapiens
aaagtcctgagagaggattgagtcatatggcctccattttccttgcccgccccaatcctccgcaattccaagtaaatgatataatgttatattcctgcccctcaaagcgatcctagcctagg

SEQ ID NO: 247459 - DNA, 122 bp, Homo sapiens
ttaacggtgcacaacattctgcctcattttccttggcgcgaggcgtgggttttcctaagccgagaggtgagacgtgaacgccgagtggaagcccatggcacgcttgggctgcacagccggca

SEQ ID NO: 247460 - DNA, 122 bp, Homo sapiens
caattaaggactcattaactgatgaaacaaatttgtccccacgggctagtttacctgtgtcgtgagaaggacattgtgaaactcttgttaatttggtttgcacttttcataacatggatagt

SEQ ID NO: 247461 - DNA, 122 bp, Homo sapiens
cctttttcatctggttgctaaatccagagaatgaaatctaggagatgattgcaccgtccccgcccctcaacatgaaggatgccccactgcccatcggggaggggagcagggagagctggaga

SEQ ID NO: 247462 - DNA, 122 bp, Homo sapiens
gggagcagcagctcctgaaggttccatggcagggaacaagacactccttctggaaggcaccgattttcctagccccactcccattacacgcacacacacacacacacatacagagtgattca

SEQ ID NO: 247463 - DNA, 122 bp, Homo sapiens
gtgcggtgcccgccgtgttgggcagcgcggggctcgtgttcctggtgggagaggtggtgccggccgccgtgagcgggcgctggacgctggcgctggcgccgcgagcgctcggcctcagccgc

SEQ ID NO: 247464 - DNA, 122 bp, Homo sapiens
gcacggtactcgcggcaaactagcgtgggcgagtcctgattgcagtcggacctgccgccgcggcacttaacagtttgcagagtgcttcccgcccctgatctcattggagccttcggacagcc

SEQ ID NO: 247465 - DNA, 122 bp, Homo sapiens
actgcaacaccgggcaaacacttcttccgccagggatgcggttaggacaatgccacgtggcgtcacagtatgctgttatttattccaataaagacctcgtgagcatgggcctgtccaccgtc

SEQ ID NO: 247466 - DNA, 122 bp, Homo sapiens
ctttggttccctgcgttaaatcataggttgtgagctctaagcggtcgtctggtggcactccgccctgtgcccagcgggcacttaccgcacactcaacagtggggatagctgtggtttgggga

SEQ ID NO: 247467 - DNA, 122 bp, Homo sapiens
cactagtaaatcttaaggtacttgtgttctctggtgtgaattgtctctctctctaggtatcgcttctgaccatttgtttccatttctgtgttaactgggtctaaacattgtacaaagattta

SEQ ID NO: 247468 - DNA, 122 bp, Homo sapiens
aatgagcctggcattaggaggctgagtgtattcggcagctggtactaacctgtgcttgggcggcattttatacttctcagaactgtttcatgtctgttacctctttgagcctcatgacaacc

SEQ ID NO: 247469 - DNA, 122 bp, Homo sapiens
cggcggctctgggagaagtgacctgaggagtctgcagatcccagcccgggacggaggcgccgcgagaggagctactaagccctccaagccgccctttccctcttgcctccccagcccagttc

SEQ ID NO: 247470 - DNA, 122 bp, Homo sapiens
gaataatgctattcgcttaacagtggaaaacgtgtcaatgacctgaaacaccctggctcccgggatcctacccccttaagttaaacaaatgaaataacttccactgtctttcctaatgtctt

SEQ ID NO: 247471 - DNA, 122 bp, Homo sapiens
ctcaagcaatccgccctcctcagcctcccaaagtgctgagattacaggcgtgagccaccacgcctggcctgtgcacacattacttttgcaattagacaaaatgttcagtggttgcctagatt

SEQ ID NO: 247472 - DNA, 122 bp, Homo sapiens
gctaggtagtcagtacaatgtggctttctgtggaagggcaaaagcgtgtgcatctaatgtcgtgggaattcacctcaagccacaccttgaacaggaaaactgattttggactctggctagag

SEQ ID NO: 247473 - DNA, 122 bp, Homo sapiens
ccactccgccaccagcgtgtgcgtctctcccagcagtgtatgggagctccagttccactccgccaccagcgtgtggtgtcctcagtctgtaactttagctgtgcttgtgggtgtgtggtgga

SEQ ID NO: 247474 - DNA, 122 bp, Homo sapiens
tcccgcgccacgccctggtggggtgggcgggtgggtgtggggcgcccaggcaggaccggccggacctgtgggacccggggccctggctgtctagggaggctgtcaccccgaggcgaccggct

SEQ ID NO: 247475 - DNA, 122 bp, Homo sapiens
tcaaagctgtcctgggctgtgggttgaacaagctagccttagaagttctggtgatgactccgggcacagtggctcacacctgtaatcccagcactttgggaggccgacacaggcggatcact

SEQ ID NO: 247476 - DNA, 122 bp, Homo sapiens
agctcaagtgatcctcccacctcggcctcccagagtgctgggattacaggtgtgagccaccgcacctggcctcagaagtcttaatcataactgtgtgacgtgagatgtggagtccaatggac

SEQ ID NO: 247477 - DNA, 122 bp, Homo sapiens
ttgaatgtatttgttctgactctgaaactacacatcatctttggtaaagtgattcagcctcgacattatgccactgtctaatacatagataatataaaacacagactaccatttctcctgct

SEQ ID NO: 247478 - DNA, 122 bp, Homo sapiens
gagtagaagtgagggtggtgggggcggctgcagtttccaggattagatgataggtgggtgcgtgtgccccaccccaagtaagtggctgtctgccactcgctgggggaagtggggaggtggca

SEQ ID NO: 247479 - DNA, 122 bp, Homo sapiens
ccgcagcccgggaaagcgcagccccgcgggcggggcgcagcgtgggcgcctggccggatccggctcaatgggtggccgcccccacccagctcccaggcttccccgtcctgcacttctccatt

SEQ ID NO: 247480 - DNA, 122 bp, Homo sapiens
cgctgtctggagctctcaccagcactgtttggttgctaggtgaatcggcagtagtatgcacgaagtggagaaggactggagggaaacaagataggattgttttgaaagcggcacagtgccac

SEQ ID NO: 247481 - DNA, 122 bp, Homo sapiens
aagcccttggcgacccccatcagcagtgtccacaccgacctgccctcccagcctcagcttcgggacaaagatcagccgcacagcaaaaaccaggcgctgaactccaccaatggggagctgaa

SEQ ID NO: 247482 - DNA, 122 bp, Homo sapiens
cacattatacctgttccctgctctgtaaatgtcagggctggccatcagccaagaccaatacggacctgccctgaggtctacatggcactgtgtgttcatgttgttgtttaaggatagtgacc

SEQ ID NO: 247483 - DNA, 122 bp, Homo sapiens
gctgaatggctgcgccgctacctatattggcctccgattgggtgcacggcgcctccccggcgtgataggtcaggaccaccgcccccctggctccccattggctgctcgaagaagcccggtct

SEQ ID NO: 247484 - DNA, 122 bp, Homo sapiens
cgcggaggctggggcccccttccgggcggggcctactagtgggcggggcctgtcagtgagcggcccctgcccggaaggagccagtccggggcggagccgatggccttacaggggccggaagt

SEQ ID NO: 247485 - DNA, 122 bp, Homo sapiens
ttttcccctcaggagaagtcgggaaggtggcggcggcggcggcggttgtcccggctgtgccggttggtgtggcccgtcagcccgcgtaccacagcgcccgggccgcgtcgagcccagtacag

SEQ ID NO: 247486 - DNA, 122 bp, Homo sapiens
tgaggaaaatgaaccttaagggcagaatcaggactgaaatccaagtctggttctgtctgacgctaaggtgcattttttaggtacatttttcatacagtaaaatgtatagatcacgtgtccag

SEQ ID NO: 247487 - DNA, 122 bp, Homo sapiens
acattctgtactgactctgtaccacacattgttctaggcatttaaaatgcactaagtggccgggcgcggtggcttatgcctgtaatccagcactttaggacggtggcttacgcctgtaatcc

SEQ ID NO: 247488 - DNA, 122 bp, Homo sapiens
ctttccccgggaggaggagccgggggccgctgcgaaactgatcacgcagatccgggtgggcggcctggagcccttgagctacagggcctgggtgcttccccgccatgaccgtggccaaggcc

SEQ ID NO: 247489 - DNA, 122 bp, Homo sapiens
cgctcttccctggtccagtccaccctggcggggtcgcagggttgggatggcggctggaggcgatcatggttcgcccgacagctaccgctcacctcttgcctcccgctatgccagcccggaga

SEQ ID NO: 247490 - DNA, 122 bp, Homo sapiens
tcccacctctgcctcctaaaatgctggcattacagccctgagccaccgcgcccggcccagcgccccgtctcaaaacaagatattacttccgctccaaacaaagatgggccagctaacgagcg

SEQ ID NO: 247491 - DNA, 122 bp, Homo sapiens
tctgggtaatgggctgcttttgttttccccccacaaacctggactttgatttttgataggcgacctactgccttggagattcccagcctgagctccccaggtccctcagaggacccgagagg

SEQ ID NO: 247492 - DNA, 122 bp, Homo sapiens
gctttcactcagggcttacggaatatttggtgctgtgatgatgccttaatattgtggtttcgactcactgagagtaaaatgaggacctacaattccttggctgtgtctgagcacccaaagta

SEQ ID NO: 247493 - DNA, 122 bp, Homo sapiens
gctctggagttaggaaatctctggcgcagacacccgctggattcctgtgctgggaactgacgtctgtggctgacagcccctcctcccggcaccagcagcctgggaactccccgaaaggctct

SEQ ID NO: 247494 - DNA, 122 bp, Homo sapiens
agcgagtggccatttgtaggtactggtatgagatgttcctagctacccgcatgtcagccccgggaaacggcaacatttcccacccttcttaccctgggtcctgagtaggaataaaagttagt

SEQ ID NO: 247495 - DNA, 122 bp, Homo sapiens
gctgcactctgctgcctctgtcattctgccactcaaatctctggcctgacactgtgcaggcggaaacaagtggggggcccctaggttttcccccacaaatctgaatgctgaaaggcgcgcca

SEQ ID NO: 247496 - DNA, 122 bp, Homo sapiens
cttggggtgggggtgagtgctgcagaagccaggatgagcagaggctggctgggtcagggacggtcccccgaggtggacatgcaggaggtgagcagaggcacattccccagtgcaaatcccag

SEQ ID NO: 247497 - DNA, 122 bp, Homo sapiens
ccggcccgctcccccttcttgctagcagtagcttcggggccggaggctgtgcggcgaggccgccccctcgccccgctgattggccgcgtcgcccggcccgtcacgctcttttgtctcagtcg

SEQ ID NO: 247498 - DNA, 122 bp, Homo sapiens
atctgtaagggccagcctctgccaagaaacacaatgtctctctgtcatcaatgatgcaaccgtgagtaagaggcactgaatcctgtttccgacataaaaatgaaagtgatataagacacaga

SEQ ID NO: 247499 - DNA, 122 bp, Homo sapiens
ggaggtggaggctgcagtgagccataactgcaccactgtactccagccagagcaaaagtgcgagaccttgtctcaaggaaaaaaaaaaaaggccgggcacagtggctcacacctgtaatctc

SEQ ID NO: 247500 - DNA, 122 bp, Homo sapiens
accgcctcccctttcgagaggccgttgtaaagctttagcattctgtgcgccttccgccgacgctccgtgagcctccccctcgggcccttctggggagtccccaggtccacactccgggctag

SEQ ID NO: 247501 - DNA, 122 bp, Homo sapiens
tcgggggctgaaagcagctggacgagtgaagagaggaggccattgagatcacgatcaccgcgctctgggtgataaagaggaagaagggacaaagaagaggggtccaagaaactagggcagaa

SEQ ID NO: 247502 - DNA, 122 bp, Homo sapiens
ataaaggaattggaagggtgcccggggtcgggggatagaggaggtgggcagaaaaggagacgctacagttgaactggaacctgggtgaacagatctcaggaaagagcactgcaagcagagat

SEQ ID NO: 247503 - DNA, 122 bp, Homo sapiens
tatggtgaaacgccgtctctactaaaaacacaaaaattagccggcgtagtggcgcgcgcgcgctctcagctactcgagaagctaaggcaggagaatcacttaaacccaggaggcggaggttg

SEQ ID NO: 247504 - DNA, 122 bp, Homo sapiens
aaatgaacatggcatcccctgtggaataccgttaagcagcgaaatgcaaagagctggcaccgtgcagacccgcatgcatactcttagcgcagagctcgagaagttttagagcacccgctaga

SEQ ID NO: 247505 - DNA, 122 bp, Homo sapiens
ttgaagatatggagaagttcagagctggagagaagggaaaattagagtgttcataagccacggcttctaatttcttggtgaaatcagaggtaagaccatttgccaggaggtgggggtgggaa

SEQ ID NO: 247506 - DNA, 122 bp, Homo sapiens
gtcatcctggccaaagccctgtttctcctgccctgcatcagccgcagactcgccaggatccggagaggctgggagagggagagcaccatcaagttcacgctgcccacagaccacgccctggc

SEQ ID NO: 247507 - DNA, 122 bp, Homo sapiens
tttccccacatcgatgcgctctcccaaacaccctgcattagatcctaataatgatccatgcgtgcctattttttaaaagtctgaaaaagaaaattctgcccatcgaaatgaacttcatgaat

SEQ ID NO: 247508 - DNA, 122 bp, Homo sapiens
gacctgccagggttgtatttccacaagccattatcctatgatgtgaataaactcacaacacgaaaatcagtgattacgtgtttctctgcagctctacctgtgtcttcaaaagcatcccactc

SEQ ID NO: 247509 - DNA, 122 bp, Homo sapiens
tcacaggggaattccacaaaggcagggccctggaaatcatttcacaggaagagtctcgtacgctccaaggacctcagtttcaggacgaactgccgagatcatgcagtgaacccgctttgttt

SEQ ID NO: 247510 - DNA, 122 bp, Homo sapiens
cacgtcagccaaaccagggcagggaaggtgtcttcgccctgggcaaggccaagagggacacgtgcagtcttgctggtcccacagccggcggcacgcctcactcctcccaagggctcatgtca

SEQ ID NO: 247511 - DNA, 122 bp, Homo sapiens
cagatgagaggctggcgggacccactggtgtaatgaatgaccttcactgcacgcctgcagcggaggagacgtctccaccctgctgtgttctgcaatgctccttccaggcccgcttctccatg

SEQ ID NO: 247512 - DNA, 122 bp, Homo sapiens
agcagcaggggccacgtgcgaccgggataagaaccccttcccatcccttgtccaagtgtgcgctcaccattgctctgtctgtaagggcacacccttctatagaagtaccttgccttgctgag

SEQ ID NO: 247513 - DNA, 122 bp, Homo sapiens
tgttttagctcttgcattgctttgatgctttaaaatccacacataaatactacatctagccgggcaaggatgggatgcctcccctaagcgagccagattgagcagtaggacgccaggtcaat

SEQ ID NO: 247514 - DNA, 122 bp, Homo sapiens
tgttgctgccttacatgggggccggcagggtagtcttggaaatgcccaagattgcttccgcgcgcgtcagttcagcggacgtgtctgcctggcacgaggaccgttctacaaactcgttcctg

SEQ ID NO: 247515 - DNA, 122 bp, Homo sapiens
ctcaggtgatccgcccgccttggcctcccagactgctgggattacaggcgtgagccacggcgcctggccggaaatttgttatttagaacgatggaaacgggtaggaaaaagagcatataggg

SEQ ID NO: 247516 - DNA, 122 bp, Homo sapiens
ctggctttggaggatccaagttcacaggattcctaagggactcacaaaggtccaactgcccgctccaccacaggaaactctgtctcccccagtttcccaacacccccacgatgtggctccat

SEQ ID NO: 247517 - DNA, 122 bp, Homo sapiens
ctttggtctgtcttgcaaacaaatcagagctgagcggatcccaccaaagataacaatgttcgtaaaccaaacccacagatgggcctaagcctctgagtcattggcactggaccagtcatcaa

SEQ ID NO: 247518 - DNA, 122 bp, Homo sapiens
cacccatccttttaaatgttgtctgtcaagattctgtccttggcctttgatatttccaaacgctctgtatcttccctagatgatctcatcaatgtctaagacctcaaatatcacccatgtgt

SEQ ID NO: 247519 - DNA, 122 bp, Homo sapiens
taacgcccaactgtgtacaaagcagaaatctaaatgccagggcggactgggagaggttcccgtgacctctgacccggcctctaaattctcccattccctccccactgtcctgccgcgccccg

SEQ ID NO: 247520 - DNA, 122 bp, Homo sapiens
ggcggccgtcgtgcccctcatgggtgagcaggcaggacagaggcctcgggaacgggggctcgggctggggtcctgtggtgactcccagttcccccaggggtcggggtgatcagtctggaccg

SEQ ID NO: 247521 - DNA, 122 bp, Homo sapiens
agtaagccaccgcgcccggctggattcactttcttaccgagaactctaagaaggagccaccgcctaataacgtatttctgaaggcaaaagtccggatagcagctttatttctgacactgcca

SEQ ID NO: 247522 - DNA, 122 bp, Homo sapiens
gtgtggacatttgggagaatcagtatagttaggcatgaaacacaggtaacatttccacaccgctattaacttgaataacacagtgcactcttttccaccagaagtagcacaagaagcgttca

SEQ ID NO: 247523 - DNA, 122 bp, Homo sapiens
tgctgtgaatctgcactgtcacaacagtgcggtgaggacgcaccccaggaccgatgaggccggccccgcatgcccagcaggcctgggagaccgaagcactccacacaggaaacagtaagcgc

SEQ ID NO: 247524 - DNA, 122 bp, Homo sapiens
tcagggaatggggagagaaaagagcagagtcctaagaaatgcagatcatttagaaagcagcgttagaggagtccaggaggagagagatcaaagagctgagtaactggtctggtctcaaaagc

SEQ ID NO: 247525 - DNA, 122 bp, Homo sapiens
gcctgggggaccactgccatcaagatgcggagaccggtagtggccccgaacggctgggcgcgctgagtacaagaccagggggcagggtaaggagggtgaatcttctaagtgattgacaaggt

SEQ ID NO: 247526 - DNA, 122 bp, Homo sapiens
ctgggtgacagagcaagactccgtctgaaaaaaaaaaaaaaaaaacaaaaattagctgtgcgtggtagtgggtgcctggaatcccagctactcggaggcagagaaccgcttgaacctgggag

SEQ ID NO: 247527 - DNA, 122 bp, Homo sapiens
aggtctggtgaggtctagccaccgaggacccagtgggccactgctagccataggccagtccgcctagactgcggcttggacaggctgggcttccggcatccaccacctaccgccccactctc

SEQ ID NO: 247528 - DNA, 122 bp, Homo sapiens
aaaatctaacctctgatcttcagatggtagactattagggctgggctgatgttacacagccgcttggtgtgggggccagggttttaggtaaggcacatgcccttgaaggccttaaaacatag

SEQ ID NO: 247529 - DNA, 122 bp, Homo sapiens
gacctggtgccaccaattcccgattcccttgcaggcttagaagtcgcttttggctgggctcggtggcttatacctgtaatcccagcactttgggaggccaaggtgggtggatcacgaggttg

SEQ ID NO: 247530 - DNA, 122 bp, Homo sapiens
cacggcccggcgcaggccggaggcttcccccagcctggaaatggtctgccctgtaggaaacgcacactccactattgtctcatcagcacaaagttctgccacactgaggggacagtctggag

SEQ ID NO: 247531 - DNA, 122 bp, Homo sapiens
acctaggtaaaaattagaagattaagggcacaataggagagtagtgcaaaggcagactagcggtaatcaccatcacaaaggctgggccaccagcagactgcagtgtttactcaaagcctgga

SEQ ID NO: 247532 - DNA, 122 bp, Homo sapiens
cactgagcaggaacaacgcgtattaaacttgtatttacagagctgattcacaaatgtagccgcagcagctgcggctggaaaaaatttcactttctagatcaggttgttcctctctgagtggc

SEQ ID NO: 247533 - DNA, 122 bp, Homo sapiens
gctcatcccaggaaaaaggggcgcacagaggacaggatgccaaccccaaaaccgcagcgacgtctctctgccttggggctcacagcagcgggccgcgacctcccactaacgcctgccgcaac

SEQ ID NO: 247534 - DNA, 122 bp, Homo sapiens
gccaatgagcacaggagagaggctgtccttagtcgccacggaaacacaaggaaaacccaacgcgggccccctccatccccccggacagccagggagagggacagcagcgaggcctggcaagg

SEQ ID NO: 247535 - DNA, 122 bp, Homo sapiens
agtttctgagaatgcttctgtctattttttatgggaagatatttcctttttcaccataggcgtcaaagcgctcgaaatgtccacttccacatactacaaaaagagtgtttcaaaccttctct

SEQ ID NO: 247536 - DNA, 122 bp, Homo sapiens
ttttaagatgttcattacttcccacggtggtggcagcacttaattctgtgttgtgtcttgcggctgtttagaaaaacaggatgtctagctataactttaccggagaggctgtccagttttac

SEQ ID NO: 247537 - DNA, 122 bp, Homo sapiens
ttgctcaggcttgtgagggcgtttcatgtgattccttgctacagggaattgccatggggtcgggggattcgggaagaatcataggcttacactgttttccacatagtccgtgtctgtgcttg

SEQ ID NO: 247538 - DNA, 122 bp, Homo sapiens
tgcagaggacctgtcccctctcaaaagtcccctggcctagggtggggacccccaaacctacggcaaagccagcaacagtagcagcctgctcccatttgctggggaggagatcatcttgttcc

SEQ ID NO: 247539 - DNA, 122 bp, Homo sapiens
cacacgtgccagctttgatgcaaggagtgttccatatacctgagcactggttcattcctgcgggctgccatggggggctcactttcctgatgccagggctcctccaggatgccccctctgac

SEQ ID NO: 247540 - DNA, 122 bp, Homo sapiens
gcacagagcaggggaacattgaacaggaagctttcttaaaatacatccttcttggcctagcgcggtggctcacgcctgtaatcccagcactttgggaggccgaggcgggcggatcacctgag

SEQ ID NO: 247541 - DNA, 122 bp, Homo sapiens
taactcacacacagatctttcagtctgtcttcaggaaagccacaaaaatttgttgcaacacgtttattactatcaacaaggataccttttctttagaaagagaatacttataacactgtcaa

SEQ ID NO: 247542 - DNA, 122 bp, Homo sapiens
ggcggcgggcgaggagcgcagggcgctcgggccgggggccgccggcgccatgggcaaccgcgggatggaagagctgatcccgctggtcaacaaactgcaggacgccttcagctccatcggcc

SEQ ID NO: 247543 - DNA, 122 bp, Homo sapiens
gcgctgcgattggccggcagcggccgggggcggggccaggagagccggtgtcgcacggaccgcctcaaaagagcccaggatattgcagagcgcactggagccctggccagcgcgcagccttc

SEQ ID NO: 247544 - DNA, 122 bp, Homo sapiens
cttggccagcgccagcgccaggcgccgagcgcttagcagccgcgacaggctccggacccccgatacgtctgcagtcgcctccgcgcagtcccgccagtccctgcgcagactgcgcctgcgca

SEQ ID NO: 247545 - DNA, 122 bp, Homo sapiens
tggaccagcaggctggagcagtcgccatcttggcagggatcattgaccctgatctatcatcgggaggaagaagagctgatcttatgcagggagggcaggtggactatgtgtggactctggtg

SEQ ID NO: 247546 - DNA, 122 bp, Homo sapiens
acccctcctttactctcggcggtgctaccatggcaactggtgatgtcagggcggtagcgtcgtaacatcgcgcgagaactctctgcgcggttgactacgcttatcaatccatcgtattcctt

SEQ ID NO: 247547 - DNA, 122 bp, Homo sapiens
tggaggtactccctcttccccttaagggcccagctcagagctgcacagcactgcttctgccggataccactggactctgggctgtgccagaggctgcaagatggagaagcaaagagaaactg

SEQ ID NO: 247548 - DNA, 122 bp, Homo sapiens
gtccccgcctcccctttctcctttctaagcgcctcgcgcccaggccgccgcccggggtggcgcagcccgcagccctcccgctccgggcgccctccgccgctccgagaccccctgggggcgcg

SEQ ID NO: 247549 - DNA, 122 bp, Homo sapiens
gattttgctgatagatgtgattctggcgttcttcatggttgctgtcagtgtccgtggagtcgtggccactattgttgggagagaggcctctctcagaaggcacgctcttctctggaaggtgg

SEQ ID NO: 247550 - DNA, 122 bp, Homo sapiens
ttgtctagctgctgcctggccacggtacttagcacacagcgtgacttaatactggataaacgaggaaaggattcgtacgccctggcggggccagaggctcacagcttgggttcccgcgagca

SEQ ID NO: 247551 - DNA, 122 bp, Homo sapiens
gacgccgccacacatgctcctagcactccccggccgcccacccttcaaaaagatggcagccgcctcatccggtttgaaggctgaacgaacagagccacgcggtatccaaatcccacgggagc

SEQ ID NO: 247552 - DNA, 122 bp, Homo sapiens
ttcctggccctgtgaccatctgtcctcaaccctttcctcacccttacccccagcaactgacgaaccacatccgggacacactgccggggctgcggaacaagctgcagagccagctactgtcc

SEQ ID NO: 247553 - DNA, 122 bp, Homo sapiens
aagtcttgcagtgttttctttgcatcataaaagatgctgaaagcaaaaacctgggaaatacggaaaattgccttgtgagttagtaaaagtcatttataagctgctgaggggcttttgggaac

SEQ ID NO: 247554 - DNA, 122 bp, Homo sapiens
cagctcagctgccagggagtctttaggtggtgtggctcctatgccatgtgtgagataggtcgccatgattctgcctgtacgcataatacaggcagcccttcttgaagtttttgccacatgta

SEQ ID NO: 247555 - DNA, 122 bp, Homo sapiens
atgaataccattcctttgtcaactgtgagactgtcacagctaaaaatgggcttcacttcccgtgaacaacagcacccaagtttctgcaggctgctgaggcttagacctaccacgctggatag

SEQ ID NO: 247556 - DNA, 122 bp, Homo sapiens
ctcggggggctctgattttgagtccctcagaccttgatgaatagagacgacccgagccctcgcggtccctcccctcatacattcctggtaggtggatttcaaggaaggataaggacagaatg

SEQ ID NO: 247557 - DNA, 122 bp, Homo sapiens
ttgattcacattattcctgcattaaagaccttctatgaccccgaatatcagttggttactcgctaaaactgactgtagagcaatttcgccttaagcagatttacttaacgaaacactaatat

SEQ ID NO: 247558 - DNA, 122 bp, Homo sapiens
acctaaggaaggggtatatttcgttgctttctttaaacctcagcacgatcacagtggctccgagccgcgggcggctgaccgcgggcctcgcgggctactcctggtaggggcctgcgcgagcc

SEQ ID NO: 247559 - DNA, 122 bp, Homo sapiens
gcggcctgtgcattctgggtattgtagtctggggcccggccaccgctggggctggttccacgtggtgcatttggcggcagctttgggcagtggctcccctgctccctccacacggtcctcag

SEQ ID NO: 247560 - DNA, 122 bp, Homo sapiens
agtggaaagaggtccccaggaccaggcgcctcagagcgccgcaggctttttgcagcgctgcgcttgcagaataggactgaaattttcggctatatagcctctgtctttatagctgatgaaaa

SEQ ID NO: 247561 - DNA, 122 bp, Homo sapiens
agctgcttccagcgaatctacacagggagcgctctgggcaggttttgttcaagtggtacccgaggggacgcaccatttaaataagcaggcgaccggtggaggaatgtgggacaaagggcaat

SEQ ID NO: 247562 - DNA, 122 bp, Homo sapiens
gcacgggctcaggcaaatgagccagagcacacgcagatatagaggcatgtgcactggctgcgctctgcttccactctggtgcctgccagcatggaggacagcctaaagcagctcagcctggg

SEQ ID NO: 247563 - DNA, 122 bp, Homo sapiens
ggctctgcagggctccaggcttggtgccagccactccccaggctccagctgtgaacgtcccggcaccccccctggggcttggatcaccagtccgaaagccagtgccttggagaaagtttccc

SEQ ID NO: 247564 - DNA, 122 bp, Homo sapiens
tgaacaggcctccaagcagctgctgacataatcattgtgggggcactcccctcactgtcacgtggcctaagctttcctgaacaatgagggaagggtgaaggggagggctctgtggaaaagct

SEQ ID NO: 247565 - DNA, 122 bp, Homo sapiens
gtggtgcggagccgggacccgcggggcttcagcgtcccccgtggccgttcccaccgccgtcggtccgcggagatcccaggtgtttttagggcacccaggttcacaccccgttgggccaagac

SEQ ID NO: 247566 - DNA, 122 bp, Homo sapiens
gctaaagatacatcctgaaagccatgagagtttcaagcaccttcccgttgatgctcactgcgatttcaaatacagcactggaaatgagcataattatcctgatatgtgtggacagttcagtg

SEQ ID NO: 247567 - DNA, 122 bp, Homo sapiens
tagaaaaccacattctggccagtggctctgtccggattcctaggttcatgcttcttgaatcggggggtctacagatcgcgcccgtcttcatccaggatgccggcaactacacctgctatgcg

SEQ ID NO: 247568 - DNA, 122 bp, Homo sapiens
ctcttttgcatttccacatctatgaagtcaagttgggcctcttgagacttttgttctatacggtcatgactgttttaagcaactttattatgaaggtaaaacagagtagcagtatggttata

SEQ ID NO: 247569 - DNA, 122 bp, Homo sapiens
tggatcaacagctttctggtccttgttctgaggtgctggcgcctcagatccaccgatctccggtaccggacccagtgtcacatcgagcctttcaacccattccagatcccgcttgaattctg

SEQ ID NO: 247570 - DNA, 122 bp, Homo sapiens
ataaagcttacagcatcttaagatgagttgtttggatttcactgataaaaactttgtctccgtttatcttatgtaacattctttccacttaaaaactaactcccattttacggctgacgaaa

SEQ ID NO: 247571 - DNA, 122 bp, Homo sapiens
acttctttgtcaacttttaacattatcacagattttcagaagtagtatttaatttctccacgtacttaatgaatctccatagagtcctaatgatctcagtaattagtatagtcatctagtac

SEQ ID NO: 247572 - DNA, 122 bp, Homo sapiens
accccctttcctaccccggcctgtgcttagacatggggaaagctgcctgagaccctggggcgccccccgtgtatctccggaaggaggaaaaggtcactgcactttcacaagcttttatttta

SEQ ID NO: 247573 - DNA, 122 bp, Homo sapiens
caaagttaattgtgctggctgtgtgttcaatgcttggggaaagggagattggacaaaggccgttaagtaggctcttgcaacagtccaggtgagagttgataagggtttgaatagtcactgtg

SEQ ID NO: 247574 - DNA, 122 bp, Homo sapiens
ctccccgcttaggtgggtgaggagaccgaggtgtgttgggcccccgctaaacaccagcaccgacctgagccccgcccagacccctccagccggctttccctgtcctctgctcgtgtgccaat

SEQ ID NO: 247575 - DNA, 122 bp, Homo sapiens
agttgtagggccaagggcggttgtaggacccggagcagccggacatggaacaaccgtggccgcctccgggaccctggagcctccctcgggccgagggtgaggctgaggaagagagtgacttc

SEQ ID NO: 247576 - DNA, 122 bp, Homo sapiens
ccataccgaccatcgtccagccctcctacgcagatgctgtcactggcagagcacagcccacggggatcacagcgtttcaggaacgttgccacaccaatcagagagcctagaacatccctggg

SEQ ID NO: 247577 - DNA, 122 bp, Homo sapiens
cgctcaggctcgaatcttgcggagcagggggcgggacaatagcggccgcggcgccccactcggcagaactccgccaccaggcgcgatgccggaactacatgtcccatgacgctctgggaggc

SEQ ID NO: 247578 - DNA, 122 bp, Homo sapiens
cctggagtactcgccctgtggcgtatcgacgagcacatgcacacgacgccctggagtactcgccctgcagtgtattgacgagcacatgcacacaacgccctggagtattcgctctgcagtac

SEQ ID NO: 247579 - DNA, 122 bp, Homo sapiens
gcatctccacccgccgagcctagttattagagcgcctcgagaggcagagtctggagttagcgcgtctcgaggggcggggctgggttgttagagcgtctcgaggggcagaacccggaggtaga

SEQ ID NO: 247580 - DNA, 122 bp, Homo sapiens
ttggaagccagaggggcctccagatgcagacatcattccaagtgtgggtgctgggagacccggggcctccccagaagccgaagcgtgatgcccccagctcagaggggctctgtcctcaaacc

SEQ ID NO: 247581 - DNA, 122 bp, Homo sapiens
atggcacagtcctgttggtacacaagcgatagacgagtggtggctgctgcagtctgtgaccgagttctgtggtattaaggtttgaaggccttagctgaagacaaaaaagtctaaaataatta

SEQ ID NO: 247582 - DNA, 122 bp, Homo sapiens
tgaggcagaggctgcagtgagccgagatcgcgccactgcactccggtctgggcgacagagcgagactgtctccaaaaaaattaagaattcaaatgtgaacccggctttcatggcgccccggc

SEQ ID NO: 247583 - DNA, 122 bp, Homo sapiens
gcagtggaggggcctccgctcccctcggtggtgtgtgggtcctgggggtgcctgccggcccggccgaggaggcccacgcccaccatggtcccctgctggaaccatggcaacatcacccgctc

SEQ ID NO: 247584 - DNA, 122 bp, Homo sapiens
cttcccccacccagtgctcaagcccaccgcccactcacccgcgtccctcacgcctccccgcgttctggtcccgaggcccctgcccacctggccccatcgcctcctcctgtcttggcctggcc

SEQ ID NO: 247585 - DNA, 122 bp, Homo sapiens
tgttctcggccatgcccttgccccagaagtcgttggtgaagatgccccagcggagcggggcgccgggccgcacgtcggggttgttcacgatcgcccacacgtcgtcgtgcacgaactcgccc

SEQ ID NO: 247586 - DNA, 122 bp, Homo sapiens
cttaatgtgtgggaaaaacaaagttcagagaagtgaagagacttgcccaaggtcacacagcgagaagaggccaagctgggatcagattttgatctgaatgaagcaaaaacccccattttgcc

SEQ ID NO: 247587 - DNA, 122 bp, Homo sapiens
ccacgagcccctgaccgagtcccgggggtcgctgaagacgcccacgggtgctcgaacgcccgttggtgccaggctgcccggcctttagggccttggctgaggacacccctttcctccccacc

SEQ ID NO: 247588 - DNA, 122 bp, Homo sapiens
gtctgatttttgtaaggaatattgagagccttaatagtggagttgggcttctctgagtcccgctctctggcaacaaaaaaaagcagtgcttgtgggattcgcttttgcctgcatcagagcca

SEQ ID NO: 247589 - DNA, 122 bp, Homo sapiens
cgtccaggacgcggccgaagctgtggtagaaggcgtgcccctcagccaggcagttgaggtcgcactggttgggcgctgagggcaggaggagtcggtgggccggggacccctgttcgagctcc

SEQ ID NO: 247590 - DNA, 122 bp, Homo sapiens
cccggcttttggcctgtgtccaatagccccagaagagaggggtctggagccttcctcccacgcgtagtgacgctcaggtgtcctcgggttgttagtcttgacccaggagagtgcaagacagg

SEQ ID NO: 247591 - DNA, 122 bp, Homo sapiens
aaactcctggaatcaagtgatcctctcacctgggcctccacgtagtattggaattgcaggcgtgagctcccgcccctggccacacattattttagactatgaatttgttcctctccggtgca

SEQ ID NO: 247592 - DNA, 122 bp, Homo sapiens
tcgtgcagcctctgctgtgaggctccttccgggacctcggggaggctcgcactgggggctcgggaaacacccgcctcctggggctccattctccaaagggacgtcccgccagtgagcctggg

SEQ ID NO: 247593 - DNA, 122 bp, Homo sapiens
tgagacgtggacttactttctggagggaccctatctttgtgcgggcatccggacaggctgcggtgatgtgggtacagcccagttacgtggccggttccatcacacccgggggttggacactt

SEQ ID NO: 247594 - DNA, 122 bp, Homo sapiens
ccactgtgagacaaaccccagccacatctccagcacacaagaacttccaaacgcctgaaccgcagcagccaggcgttcctccagaacctcctcccacaggagcttgcgacacatgccagaaa

SEQ ID NO: 247595 - DNA, 122 bp, Homo sapiens
tgcctttggagcatttgagagattgaggagagaacaggaatcacccagaaaacagactgacgaatattttgagttagaatcctgccacccatgacaagtcagctcccacccctccagagtct

SEQ ID NO: 247596 - DNA, 122 bp, Homo sapiens
ggagggagcagggcggtcccagggaccggagagccgggcggggcgtttgggccttgtggccggctggggcaggcttggagttttggggagtctcggagaaagttctctggggcccagttctc

SEQ ID NO: 247597 - DNA, 122 bp, Homo sapiens
cggctttccccagattattgaataattgcataattccgagcgcgggttgggaggcaatgccgggtccctaccccgggtgtcaggtaacgtttcgggggtcctgcgctgcgcgactgtgtccc

SEQ ID NO: 247598 - DNA, 122 bp, Homo sapiens
tttctggactaatggtgtacttggtggacttcacttttaaatgatcaaccacttgggaggcggaggggagtggatcacaaggtcaggaatttgagaccagcctggccaacatagtgaaaccc

SEQ ID NO: 247599 - DNA, 122 bp, Homo sapiens
agttctagctctagtgagttctagctctagcgagttctagctctcatgagttctagctttcgtgagttctagccctagtgagttctagccctagtgagttctatctgtagttaagttggcag

SEQ ID NO: 247600 - DNA, 122 bp, Homo sapiens
ctaatgggaaatgttgcttggatcactggttatggccatcattcacggagatactgaacccggagttttctttaacatagcctttaccctgtagaaacatttaaacttcatttcagaagaga

SEQ ID NO: 247601 - DNA, 122 bp, Homo sapiens
cacagggaaggctgggaggagcatatcctgctgggggcggggcttgaggacacacatcttcgttggttggggtatgaaggatctctgttcagatttgttgaggtggttttagagcgtggctc

SEQ ID NO: 247602 - DNA, 122 bp, Homo sapiens
taatggtagctcttagtaattgttaattttggtgaaatacccagtaagttattttagttacgtacttaggtgcagatgaggtctaactatttccagcatagctagggcaggccctaccaaac

SEQ ID NO: 247603 - DNA, 122 bp, Homo sapiens
ccagggcctagtacagtgccctccccccaaccaatcattaaatatctgtgggtggttgcacgcatgcccggtgactttaaaatgagccacatagacttcttggagtttcttataaaagttga

SEQ ID NO: 247604 - DNA, 122 bp, Homo sapiens
acgattattggctccaagaataatcactatgagctacaaaaactagctgaaagccgggcacgggggcttgtgcctgtaattccagcactgtgggaggctaaggcaggaggactgcctgagcc

SEQ ID NO: 247605 - DNA, 122 bp, Homo sapiens
cgagatagcgcggcgacatggccacacaatggagcccgcaggcgggagtgcggggcggggcgcggcgccctggccttgcgcgcttacggggtcctctccagggccctctggggcctctgact

SEQ ID NO: 247606 - DNA, 122 bp, Homo sapiens
tttgtgcatagcctcgcctggctgggctgtgcaggatggatggatgagagctttgatccgcgattttgaagatgagttttatattgaatgctatatcctattaggtagaggctgttgggtag

SEQ ID NO: 247607 - DNA, 122 bp, Homo sapiens
ctcccctctgtccctgtcacctccacccatcgccggccgccgctaggggttccggccccgcgccctcccccgacccttccccggcggaggtcctggggcagccaagcccaccgcccggccct

SEQ ID NO: 247608 - DNA, 122 bp, Homo sapiens
ctactccctggctggctgagctacagctcccgcagcgcgcccaggagtgcgccggagattcggaaacccgcagagacttctcaagtcagcaggaacttggaaaccgctgttccctccaaacg

SEQ ID NO: 247609 - DNA, 122 bp, Homo sapiens
aaataaataaataaataaataaataaataaaaataaaaaataataataataaaaaaagcccgcacgaactaggaaagaaaatacacaaccggccctccgtgcgatcacccatctccctcacc

SEQ ID NO: 247610 - DNA, 122 bp, Homo sapiens
cataaatctcacttcccacttctcttgagacgtcggaagctctggctgtgccaggtgttacgtgctgcggcaacaatgggcagaagctgagcaggggccgccccaggcgtgaggcctgccgg

SEQ ID NO: 247611 - DNA, 122 bp, Homo sapiens
gttgaatgccagctcagccacagttcaatagaacaccaggtacaagtctaaggtttttgacgccagtacctgggtccctgatggcacctctggacccaccctcaggcctgggggaacttgcc

SEQ ID NO: 247612 - DNA, 122 bp, Homo sapiens
aaacaactttgaggtatggggccctcccaacaccctccccccacccgccccgcccaggaacgtctggaccctggcaggttggctttctgggacaattccatgggcttcatttatcagttttt

SEQ ID NO: 247613 - DNA, 122 bp, Homo sapiens
gtactcgtttgagtcgatccgtgaggagagcagctacagcgacatccccgacgtcaagaacgacttcgccttcatgctgcacctcattgaccaatacgacccgctctactccaagcgcttcg

SEQ ID NO: 247614 - DNA, 122 bp, Homo sapiens
cctctcttggccttcgctgatccccatgacccccttcctggcataggcgctgctccgccccgtcctcgttcctgctcttggcgactctgactgttcttgcctctgggctgcaacgccttttc

SEQ ID NO: 247615 - DNA, 122 bp, Homo sapiens
ccctgaagttgtaaaggtctttcagtctctctaaaagtgtgagttaaatctgttttctcacggccagcttttaaaggtcagtgaaggacggcactttgaaagaaatggataatatgcatcct

SEQ ID NO: 247616 - DNA, 122 bp, Homo sapiens
ctcgctcaggagctgtatttgtttagcgattagcctagagctttgattttagggcaaaagcgagccagacagtgcggcagacgtaaggatcaaaaaggccacctatcattcgccggggacgc

SEQ ID NO: 247617 - DNA, 122 bp, Homo sapiens
tctcaaggaatagaagtctgtgacaaacgtatagaaatgagtttcatgttgaacaagatccgtttctgcgttcctccctcatccagccttgattctccagatgcttaccaacttcttaatat

SEQ ID NO: 247618 - DNA, 122 bp, Homo sapiens
tgtttcgagctggggcagagggagcagagaaggagccctcaccgcggccggaatgcagagcggaccctggcccaggactgggtttccctttaggctcgggcctaccctggccctcgctgttg

SEQ ID NO: 247619 - DNA, 122 bp, Homo sapiens
ttagacaaattttaaatgtccctgtccccttccccccaattaaagtagattgggggaaagcgagtagggacatttaaaatttgttgtccttactgtatgcgggacacttcatttagggcgtg

SEQ ID NO: 247620 - DNA, 122 bp, Homo sapiens
cctcggtagctgtgtgtagcttcaggagtggagagccgagacacaccgacggcgccggagcgtcgcaagaacaatggttgctgcagtgggttgggagagaggacccggacaagttcctaaag

SEQ ID NO: 247621 - DNA, 122 bp, Homo sapiens
ccggtgttccccacctcgcagcggggagggagggtggcctcccaagtcgcacgcgggacccgggcatgggtggccctgctccatacagccccggccaccccacccctggccggtcccacagc

SEQ ID NO: 247622 - DNA, 122 bp, Homo sapiens
aaataaattgcattcagaccatagtgccagccttttgaagccaatacttttttggtcgttcgtgcatcttttgaattggttttatttcgattttgccgtttctcttctctctggaagttaca

SEQ ID NO: 247623 - DNA, 122 bp, Homo sapiens
agtagcagtgctgtcggctcggccctgcgcgcgtccttttggttaatcccggccagtccccggtgttgtcgtccactttgcctccctggtggtggagatgcctccccgtctcggatcccacc

SEQ ID NO: 247624 - DNA, 122 bp, Homo sapiens
tccgtgtgtacatcacatcggttacatgcagatccatgtgtaaatcacatcggttacatgcggatccgtgtgtacctcacaccggttacatgcagatccgtgtgtatatcacatcggttaca

SEQ ID NO: 247625 - DNA, 122 bp, Homo sapiens
tgtggacagaaaggcatgttgggaccagctcacagcaggctttatatgatacactaagcgcgggagcatcaattttattctgtaggtgatgggaaccactgaaaagtcttaagcagaagaat

SEQ ID NO: 247626 - DNA, 122 bp, Homo sapiens
tcctgtgaacactgggagagccactcagaatcctggcttcggacaccgccctgtgcacctcgaggaagaagctgcagctgatggcacaggtgagcaagcgggaactccacaggctccctgcc

SEQ ID NO: 247627 - DNA, 122 bp, Homo sapiens
agtttctttactgcaagacttctcaaagcttttactacacggatcaatttcctgactctccgagaggggaagcatgtgatgccgtccccctattgacttggtaatgccaccctttgttcatg

SEQ ID NO: 247628 - DNA, 122 bp, Homo sapiens
tatcactacgaatctcaagggataatctgccaatcaaactatacaagacacttttttaaccgccccccccccaaactaaaatcaccaaaggaatcctaaacaacagagctgtcccggccaaa

SEQ ID NO: 247629 - DNA, 122 bp, Homo sapiens
ccgcctcccgggttcacgtcattctcctggctcagcctctagagtagctgagactacaggcgcccgccaccacgccccgctaattttttggtagagacagggtttcaccgtgttagccagga

SEQ ID NO: 247630 - DNA, 122 bp, Homo sapiens
caccagtgccaggcgacacagcagaaaaccaggatgccctgcccctcaccgcactgtttccgggctcggcaggcacacaccctgaatgaaaggctccaacctggcgcggagccacggcctgc

SEQ ID NO: 247631 - DNA, 122 bp, Homo sapiens
gtatctactgctgcttctcagagccaggagctctgagcaggagcagtcaagaggggttgccggtctgccctcctctgctcttgtgctacactacagagggataggcaaagggagctaacagc

SEQ ID NO: 247632 - DNA, 122 bp, Homo sapiens
actcaagggccctttctcatttaggggcaaccctgtcactacatcataaacttttaaatccgtgatccccacgttacaaaagcagaagtcccttttagacttttagcgaaaactgaactttg

SEQ ID NO: 247633 - DNA, 122 bp, Homo sapiens
ctacccgataccttcctcgttctaccacgccctgcccaggcgtcttgcacagcggcagcgcggacttcgagtctgtggatgacctggtggaagctgtaggggaactattgcaagaggtgtcc

SEQ ID NO: 247634 - DNA, 122 bp, Homo sapiens
tggtgttggggagagaaatgctgaagatgaggttcctgctcccaagaggctgagacatcccgacaaatatgtactacaggattaagaaaaagatgagtgtgataagggatctggcagagttc

SEQ ID NO: 247635 - DNA, 122 bp, Homo sapiens
aatgagcgtttgtgtggcgttggccggcggttctgaagatgcgctgacctggagggagggcgcgaaaggtcaggcgcatgccgggcccaacttgggctcctcccaggcccacgctgctccga

SEQ ID NO: 247636 - DNA, 122 bp, Homo sapiens
cggaaccggaagggcagccctggccggacaaagacaacttccaggtcccatggtcctctccgccaatcggaaggctcggaggacaacaggggccccgagagggaatttctgcgttgtgggcg

SEQ ID NO: 247637 - DNA, 122 bp, Homo sapiens
accactccgtggacaagactggagtcagcattgacatcccattttcacaggtgagaaaaccgagggacaggggcacggatgaaattgtcctaggaaacagcagggtcccaacagggttgggg

SEQ ID NO: 247638 - DNA, 122 bp, Homo sapiens
gtgacatcttgtgaaattgttcagcaagagaacaccaaagctcaccaggccagctcacagcggcaccagcgcctggaagacagggcctgggcagctctgctcttctcaatgggcgcctgcaa

SEQ ID NO: 247639 - DNA, 122 bp, Homo sapiens
atcattaccatctcccgcgtggagttctcctcaggtcgtgcgaaacacccccagattcttcgcacagtgtctagatccgaccgcccaacgtttgcctcccagcctgactccctcggccctta

SEQ ID NO: 247640 - DNA, 122 bp, Homo sapiens
gggagaacggggtcaaaattcttctgggcaaccgtgtcatgtaccatgagcacagcctgccgggaaagccagagaaaaggaaggctggcccgccgctcacagggtcagcaggccgcagctgg

SEQ ID NO: 247641 - DNA, 122 bp, Homo sapiens
agacagtgtagagtagtggtttgaatgcctaaactggaatgtcaatgttaccacagaggtcggtccctggaaacaatgacttaacctaaggtctttgtttcttcatttgaaaacaggcagaa

SEQ ID NO: 247642 - DNA, 122 bp, Homo sapiens
cacaaccactctcaaacaccaatatgaagggacaatctgctcgttaggggtccggagcagcgtttggggccggtggggtgcggatactcacgggcggagcggtaggatgaagatggatttca

SEQ ID NO: 247643 - DNA, 122 bp, Homo sapiens
tgtgtgcatgcacgtgtgagcatgtgcgagtgtgtacactctcgagggcacacacatgcacgcacacacagcagctgaggtgatcgtgggtccctgaatgcccagggccccctaggatacag

SEQ ID NO: 247644 - DNA, 122 bp, Homo sapiens
cccccagtttttctcttggcagtgactgcttttcattgaccaaccgatgaagacagcacacgggcagctgtgccagttactccctcccttatgttccacctcaaacccattttgttttcaag

SEQ ID NO: 247645 - DNA, 122 bp, Homo sapiens
atgggctcgggtcagcatcccgggttccctcctggtagccagaagtctctcctcctttgccgaaatctgccccttcactcaaagaggtccacgaaggaaagaccagcagtgagtccgagtca

SEQ ID NO: 247646 - DNA, 122 bp, Homo sapiens
gcacagtagcgaagccgggacagataaagttcttctagtcactgccctcttggagtataccgttgaatccgggaagtagatcaatgaaataaacacagaatggttgtaaaatacagaacgct

SEQ ID NO: 247647 - DNA, 122 bp, Homo sapiens
atgtcttgggagcttaccctgctacgctgcggttaggagtaaagcggtaatggagacagacgtggaccctgccatgtcaggactgacagtgcagtggcaggtgaggggtggtaacccggtgt

SEQ ID NO: 247648 - DNA, 122 bp, Homo sapiens
aatggattatccaacgtaattatctaatatttgcaggctaaaatacttccattgcaaaagcgaggttcagtgtatgaaccgaacagtggagtatgtagttgttctttggtttctatttatta

SEQ ID NO: 247649 - DNA, 122 bp, Homo sapiens
gcctccggggcgggcagcaggagctgccagctgcacgcgtgctgctcggggctgaggaagcgacccgaggagccgccagtgggcccggggaccggctccgccacgttgctagccgccccttt

SEQ ID NO: 247650 - DNA, 122 bp, Homo sapiens
agggaactccctgaccccttgtgcttcctcagtgaggcaatgcctcgccctgctttggctcgcacatggtgcgcgcacccactgacctgcgcccgctgtctggcactccctagtgagatgaa

SEQ ID NO: 247651 - DNA, 122 bp, Homo sapiens
gggaagggaagactggggaaatggaaggaagtgtggcctgaaacgcttggggttttcccacggagccgcagcatttggttggggttgttcacattaaaggtttgaccccagtggtcccaaac

SEQ ID NO: 247652 - DNA, 122 bp, Homo sapiens
tccttccccgggaggtgggcgcgcgtagcacaccgcaccggcagcgcctctgctagcgaacgctcctttaggtctgcacctccgccagctcctagtggccaaaagcctgcccccacgcccga

SEQ ID NO: 247653 - DNA, 122 bp, Homo sapiens
tggtggccccgatgtagttctgccgcctttgcgggagaaggaaaggagaaaagaggtcagcgggagcacctcggcagcaatcctccattgccagacagcacagctgagctctacatacagca

SEQ ID NO: 247654 - DNA, 122 bp, Homo sapiens
gtccgcctgtccgtctgtctggctgccgggtccctggagggcgcgtgggagggccgggcccgtgcgccctcttcgatcctggggtgctccggtccctcctccccgccacttcctcccggccg

SEQ ID NO: 247655 - DNA, 122 bp, Homo sapiens
gcacaacgcgggagcaagaaatcttaagcgctaattcagcgtctctccattccccattcccggctccggctccggggagagcagatttagatagtgtctaaccaggcgggaggcagcgcgtt

SEQ ID NO: 247656 - DNA, 122 bp, Homo sapiens
tcctcatctaatccaatctattccaaaaagaatttcttgttttaactctaatacaagggacgtatcacaacagagcatgtgtgaaatgattatttttttcaaagtgccaacattagtttttg

SEQ ID NO: 247657 - DNA, 122 bp, Homo sapiens
gtggagggtcctggggctgcattcgctgccccggagcgggggcaggggcagtggctccctcggggcgtaggtctcgaggcaactaggccggcgacgtgccagagttacaggctctggaatct

SEQ ID NO: 247658 - DNA, 122 bp, Homo sapiens
tgaggatgccaatcgcccggcaggccaccatcttgagctgaagaggacagcagtggagagcgcctctaacgggtgcggccgagcggaggacttttctcccgtagcctggcagccaggcgcct

SEQ ID NO: 247659 - DNA, 122 bp, Homo sapiens
agactggatcctggcgttggaggcttcccctgcttcaagccttctggtgctgccccccagcggtacctggatgaggccgagagagagaagcagcagtacatgaaggagctgcgggcgtacca

SEQ ID NO: 247660 - DNA, 122 bp, Homo sapiens
gctgggagccgcgtgtgcgccggggtgtgcgcccggccgggtgtgcggagagcgagggagcgcgctccctcccgacgcgcgggccgcagcggccaagcccgagggtgcgtggcgcccccgcc

SEQ ID NO: 247661 - DNA, 122 bp, Homo sapiens
acccaaaactccggcgctggtcacagacttgggaagacagtcttccttggtgtttaattacgctgggatgcctgcctgattattcacccgcgcttcaggggtgtctgaccacatggggacac

SEQ ID NO: 247662 - DNA, 122 bp, Homo sapiens
ctgtttcttaaggtaattaataaaagtgcatgctattgctaatctgatcaagcactattacgttaactagtcaatggaactgaaacgttcccaaacatatttcaaatatttgcatgttagat

SEQ ID NO: 247663 - DNA, 122 bp, Homo sapiens
cctcctgcgaggcggtgctcacagtgctggaggtcggaggtaaagggcaggtgggggccgcgcccggcaggggcggggtgctcagaggtagaaaagggctgcccaggccacgcgggtaaggt

SEQ ID NO: 247664 - DNA, 122 bp, Homo sapiens
ccactgcacgccgcggcagaggctggacacgtggacatctgccacatgctggttcaggtgcggcggcacggcgccctcctagggctcttcacctgctctcttttatttttaccaaagtaaaa

SEQ ID NO: 247665 - DNA, 122 bp, Homo sapiens
ccagaggagagcaggctgtccttttagggagccggcattggtaaatgctctgtggttatgcgactattgatttgcctcaccctgaggactccagtggcaaagtgaccctccctcctgcctgt

SEQ ID NO: 247666 - DNA, 122 bp, Homo sapiens
ccacgaattctgttttcttttagaggtcactggagagcccggtggggtgtaagtacactgcgcttataaaactctagcaggaagctagcagctgtctccaaacccagagaaggggaaacagg

SEQ ID NO: 247667 - DNA, 122 bp, Homo sapiens
gaaggagggaatgaggacttaacgcccacccctgccccccaccataccgctctcgccgcccgggaaaatcccgccgcgggccccaccagccaagcgccgccttcgccccacgcggcctcttc

SEQ ID NO: 247668 - DNA, 122 bp, Homo sapiens
cgggcctcagggtagctgctaaggcccaggaggtaggcaggtgggtcgggccagccgagacgctgacactcgctgcagctttgcagttctcctggagttcgctgaggagcagctgcgagccg

SEQ ID NO: 247669 - DNA, 122 bp, Homo sapiens
caatacctggtaacctctgggtgtctttaggcgtgtggctgccggcccatcttccgagggcgctcggaggcgaagcatccaagcgggtcctcgtatccagcgggcgggactctggcgggctc

SEQ ID NO: 247670 - DNA, 122 bp, Homo sapiens
aggcatcgccattttggcacttgtcaagaagctcactttctattggctgggagtaacaaacgccaaccaatagaaatgcagcaaggaacgccccgctgtcttctgggaatggtagttccttg

SEQ ID NO: 247671 - DNA, 122 bp, Homo sapiens
cattctctgaccctactctaggcccatgacattcttcctaagagccagtgaccaggcatgcgttcagttacaaggctttatgcaagggtgggaaaaggttctgtcttttgtttccaatcacc

SEQ ID NO: 247672 - DNA, 122 bp, Homo sapiens
ccagcaccgcctcctcggaagggaggcctctaccgtccggcggcggacctgcagccgccgcgggagacgctgccccgccccccggccccgcccttcggcccatccccgccccgctggcctcc

SEQ ID NO: 247673 - DNA, 122 bp, Homo sapiens
gcccggctcggagccccgcccccggcgccccgcgccccgcgccccgcccgcccgcgcctgcgcctgcgcccgccccctgcccccggcccgaggccccgcccctcgcccgaggccccgccttc

SEQ ID NO: 247674 - DNA, 122 bp, Homo sapiens
ttagattctcacagaagcacgaaccctactgtgaactgcccatgggagggatctaggttgcgtgctccttaggagactaatgcctgatgatctgaggtggagcagtttcatcctgaaaccat

SEQ ID NO: 247675 - DNA, 122 bp, Homo sapiens
cacgtgtgatattgctcctaatgtccagggagggagagagcatgatattacgttcaatatcgcagtaggtgtacacacaggcggtgatattgatccgaatataatctccaggggttggagta

SEQ ID NO: 247676 - DNA, 122 bp, Homo sapiens
tgcagtcggagcgcttcaaagacgtctgccacgagggctcgggagccagaactttgtgcccgtgcacagacttgtcactggatgtggggtgcggctttctccaacagcaggcaactctctga

SEQ ID NO: 247677 - DNA, 122 bp, Homo sapiens
tcacttttctctctgattctctttccatctgccttttatcacccccagattggaggacctcggggcgagaaaggccaaaagggagaaccagcgattatcgagccggtgaggacattttctca

SEQ ID NO: 247678 - DNA, 122 bp, Homo sapiens
caactctggacaattgcactctgggcggctttggttaaaggaggcgaagggtggaagcgacgggttgcacccacccccaagttagtctgatcagattaaactgccagaacgtatattcaact

SEQ ID NO: 247679 - DNA, 122 bp, Homo sapiens
tgtcccttccgggtcccgggcgattccggctccggcctagcaacaacaagccccgcccagcgttgcatagcaacgtccctggagcctagcaaccgtcagtcacgccccctagcaacgtcatg

SEQ ID NO: 247680 - DNA, 122 bp, Homo sapiens
gccacggtccagctgtccgggccggtgtccgcggcggctcgcgtcgcccgccacccagcgcgttggtttctgcgcacgcagcttacagtaacgtccctggcgcgcttctgctccgcgagccc

SEQ ID NO: 247681 - DNA, 122 bp, Homo sapiens
agtagaaaaattgaaggccacttgttcttgatcctacaaaagaattgcagagcactaactcgtaaggcctctgatatcccctcccccaccattaagtatctgttgtcattcgttacagatta

SEQ ID NO: 247682 - DNA, 122 bp, Homo sapiens
ccacataagtttgctgagtgtgctagaagttcaggcccagttctcaaagcctgccagtcacgccagccatgttaggtcacacggctccactacggtcttttttgacgaggcccagatcctcc

SEQ ID NO: 247683 - DNA, 122 bp, Homo sapiens
ggccatactcactgccccccttgggcacccactcaccctagaataaacttaacagtgtcccgtggtaacctgagggcctcagctttgcttatgagggagggactgggaaccagcagctcagg

SEQ ID NO: 247684 - DNA, 122 bp, Homo sapiens
ccaatgggtgctgtgaagggcgtggcccgcgggggcaggagcgaggtggcgggggcttctcgcgtcttttcccccagccccgctccaccagatccgcgggagccccactgctctccgggtcc

SEQ ID NO: 247685 - DNA, 122 bp, Homo sapiens
aagcggacgctcacagaaactgaagattctaactgcccacagacactgttttgtcggaaacgtaaaagaaagggacaggaagtgaatgagagtactggaagtgcccggacgaagccgacgct

SEQ ID NO: 247686 - DNA, 122 bp, Homo sapiens
cactggagaagccttgggcctaagggtaaggagcaggacccggagctctgggctgtagagcgaggtgctcccggacaggctggctgagctgcagcctgcatcctctgtgctgccacaaattc

SEQ ID NO: 247687 - DNA, 122 bp, Homo sapiens
agcggcgcgggctggaaggagagcactccttcctgtgtgccctggggctcctttagtgtgcgggagcctacgctggaactcgcccaccacccactgctgcgagctctcaccctgccgaggag

SEQ ID NO: 247688 - DNA, 122 bp, Homo sapiens
cctctccgacctgatctcagggctaggtttctccaacttgaggtccctggacctgcggggcgtgggtggaagtgttcccaggtctggtgataacttaagacggtaacagcgcgcccgacgac

SEQ ID NO: 247689 - DNA, 122 bp, Homo sapiens
cgcacccgctggccactctgcgcacgcgcgccgggtgccccggcctaaggccgttgacctcgggttctccccggcacagtcgaatccacgccagggccctcaggccggtagctgtcctgcag

SEQ ID NO: 247690 - DNA, 122 bp, Homo sapiens
cgcggagatggaggatttgctcgacttggacgaggagcttcgctacagcttggctacctccgtgaggaccaattcgggggccttgggggccaggatttggcgggtggggaggagcgaccccg

SEQ ID NO: 247691 - DNA, 122 bp, Homo sapiens
cctgcagaactgggtctacaacgtgctggagcggccccgcggctgggccttcgtctaccacgtcttcatgtgagtttgcgaccccgcgcccttccgcgtttccccgcgcaagcctggcctcc

SEQ ID NO: 247692 - DNA, 122 bp, Homo sapiens
gggccagggaatctgtcttcggagagctcagttcttgagacacgggtctgccgatgctcccggccgaataaagccaaatccttccttaacccggtgtctgaggggttttgtccgcggctcgc

SEQ ID NO: 247693 - DNA, 122 bp, Homo sapiens
gccaagaccattgcccctgcctaggttgggaggctatgtgtgactggaaagatgtcctgccgggtggcgagaagcagagaatcggcatggcccgcatgttctaccacaggtgagcactccgg

SEQ ID NO: 247694 - DNA, 122 bp, Homo sapiens
gcccggccgggcggcgctccagcctcggggcaggtgcgcggagaggaagtgagagcattccggcccccccaccccaaccccggccgctggccctctggtgagtcacagccgacccccgccgc

SEQ ID NO: 247695 - DNA, 122 bp, Homo sapiens
gctgtgtctcctggagcacttgctctcaggaccccctctctcagagcccaggcaccacgccgtgagagagccccagccacagagacaggctacgtgtaggtgctttcatcaaagtgccacct

SEQ ID NO: 247696 - DNA, 122 bp, Homo sapiens
gaagtcacccaaggctgtccagggagctgggggtggggctgtttctggaacctaagcacacgtaccacctccccttcctctgacctaatgagggctcgagttggaaaccacaaaccctcgtt

SEQ ID NO: 247697 - DNA, 122 bp, Homo sapiens
tgccctcctgctggggaagaggggctcggtgggaatccctgccccaaggcctggcagcaacgctcctacgctgccttgggccgcaggcctgctaagccctccgctctcgcttccctgcgcgc

SEQ ID NO: 247698 - DNA, 122 bp, Homo sapiens
tagtctcatcttgcaaccacaggactaaagatttcagccaggatttggcagtgggtttcacgtctgcttgaaagcaccatctttgaaagctacaaccagacagaaactcacacggctggttt

SEQ ID NO: 247699 - DNA, 122 bp, Homo sapiens
aagcaatcctcctacctcggcctcctaaagtgctgaaattaaccaggaatgagccattgccgcacctgccattgtggcttgttttgttttgtttttgagacagaatcttgctctgtcgtcca

SEQ ID NO: 247700 - DNA, 122 bp, Homo sapiens
gaaatctaaatgttaagtactagtaagtgtccctttagtattacatttccttggcattcacgtagcacacaccagacaataaattaacaacaggtaagctgagtaccaaggaatctggggtt

SEQ ID NO: 247701 - DNA, 122 bp, Homo sapiens
ctcaccttcatcgtgggccaggatgatggcctgtgctagccgtccttgaaaaggcgaggccgggctgagggtgcactgggtttagacatagcaagtgtctcctgtcacttgtgcctagttcc

SEQ ID NO: 247702 - DNA, 122 bp, Homo sapiens
atagccagacatttcaagaatggtattaattgtctacaacacaagagaaagattatttatcgtcaaagctgtgcgggacttggggagcagcactcatgttcttccaggtaaggacactgaac

SEQ ID NO: 247703 - DNA, 122 bp, Homo sapiens
gcatggttcacactcaggagagacgggccggcacagggcacgggcccctgggtggtatctcgcgcttaaaccggatggagggtgagtgagcatttgctctagcgcggttaaaggatcatgtc

SEQ ID NO: 247704 - DNA, 122 bp, Homo sapiens
aagacgccgacgctcacaggaactgaagattccaactacccacagacactgatgttttgccggaaacgtaaaagacagggaccggaactgaatgggagtaccggaagtgcccagacgaagcg

SEQ ID NO: 247705 - DNA, 122 bp, Homo sapiens
gccgtcaggctggtgtcaatgaggccctgacgaaggagccatgtgctaacagtcagtctccgagtattgggtcctgtgttgaacatgagatagaagtaggccaacccagcaaagaagtctgc

SEQ ID NO: 247706 - DNA, 122 bp, Homo sapiens
tgttccccgaggctaaggccagcgggctcggcgctatttttaccttttccatctgccaggcgctgcggctgcaggagcgcgcgcggccagcagagggcgcccgcgccacacctcgcggaggc

SEQ ID NO: 247707 - DNA, 122 bp, Homo sapiens
tctgaacctagggctccaggtggtacaccaaatgatcactggttagccagcacaaggatacggaggaatagcagcatatccatctttaaaaaataataataatactcaaagcaactgaccaa

SEQ ID NO: 247708 - DNA, 122 bp, Homo sapiens
gaaaggggcagcaagtgtccaaggctggcctctaaggcagggagcggccgcaacgggagacgcctggagtatccgaagcgagcagtgtggacgagtcaccagcaccgtctggccacgcaggg

SEQ ID NO: 247709 - DNA, 122 bp, Homo sapiens
aggggtgacccctgcccccacacccccctcctgccgctatcgccgtttaactggcgactccggtattaagctctgcccttgtcctgcctccggtgagggtgagccagtcaaggaggtgaggg

SEQ ID NO: 247710 - DNA, 122 bp, Homo sapiens
gggatactccaacccccttccggccccggccctcagtactgctgcccacccttcgcttcccggcccggcccaaccaggtgcttcctttgggtcctgccctcagtgccctctccctggcccgg

SEQ ID NO: 247711 - DNA, 122 bp, Homo sapiens
gggagcacacactgctgagcactgtgggaggcggggccgtggaggcaggaggctctctggcgtgcacgtgtgggtgcgtgtacgtgtgggggtgtgtgtgtgtgggtgcgggtacgtgtggg

SEQ ID NO: 247712 - DNA, 122 bp, Homo sapiens
taaagggaacaaccactttttggatttgattcccaggcctcgctttcaccgggaaattatcgttgcttgtaaaacagaagaagccgggaaggcaggcagggggagctgctactttacactct

SEQ ID NO: 247713 - DNA, 122 bp, Homo sapiens
attaaacaacaagatgctgcttgacccttactaggctggccaaaatacgctcctgggtgccgggtggtggaggtggaatgtaggaatcccggaggcgcgctctgggcgccccgagtcactgc

SEQ ID NO: 247714 - DNA, 122 bp, Homo sapiens
agccccaaagccgagtgaacaatgggcaaagtgaccagaagcagggggcccagagaaacacggcaggaagacaaagacaaaagaacagcggcccggacagacagagaaatggatgaagaaaa

SEQ ID NO: 247715 - DNA, 122 bp, Homo sapiens
agtcctgggtgggggactggttcacttgggcaccactggccatgggtggcgtagacccctcggaccatggccagcgtgccgcaggagccggcctgggctcgtgcagtgaagtgagtggccgt

SEQ ID NO: 247716 - DNA, 122 bp, Homo sapiens
tggtagggagcacatcatcagctgagctaacgtgagaacaggggttggagcacttgccaccggcagtgaagtaatcggacagctgacagtcttttccagagggtcggggattgggagctgac

SEQ ID NO: 247717 - DNA, 122 bp, Homo sapiens
ccttcccgggtcgacacggaggagtctggaatccgtcctcggtcgagggttccagggactcggatacctgccccagcacccccagcactcgccccattttcacctgacccctctcaactacg

SEQ ID NO: 247718 - DNA, 122 bp, Homo sapiens
ctccggacctcttattcgaaaaacatcctccaccacgtgcccctttgtcgccagagacagcgcctgcagtgcgtgagctgccccctgaactcctggcgcctggttgcctgggcaaccctctt

SEQ ID NO: 247719 - DNA, 122 bp, Homo sapiens
cccaggtgccgccggcctttgtgctggacgcccggtgcggggggctaattccctgggagccggggctgagggccccagggcggcggcgcaggccggggcggagcgggaggaggccggggcgg

SEQ ID NO: 247720 - DNA, 122 bp, Homo sapiens
gctggccgaaccgtctctctcagtctgactctctttaaagaagggatgtgggctggggcgcggggacagtcctggtggagcacggaaaatgcggctgtaaagttgtaattaccctattgtgc

SEQ ID NO: 247721 - DNA, 122 bp, Homo sapiens
aagtgcgagaagaaccagaaggtgggagttggcgcgcggaaggccaggggtcagctcaaccggagagagggaggaggtaggggctcgtccctatcagcggcgatacctcattgtcccaagat

SEQ ID NO: 247722 - DNA, 122 bp, Homo sapiens
gcgtgcatgccaaaacggagcccacgtggaggcagagggcgggcacggccgcggggacagcgttctggtttccccatcaagccaggctggagggacgatctactttcctaaatcccctccgt

SEQ ID NO: 247723 - DNA, 122 bp, Homo sapiens
gacaccctgacaccccccggccctggaaaaatggcaaaggaccacggtgccctgcccagccgcctgctgcagggagagcagctccctcagacccggagtgctctgctgtgccggctggttca

SEQ ID NO: 247724 - DNA, 122 bp, Homo sapiens
ggtaacggctcggaagcctaggaggctgggccggagggaggcggaggaaccggtgttcgccgccgccgctgcttcagcttattccttgtggcctctgcgggtcctgcctcagccatgatgat

SEQ ID NO: 247725 - DNA, 122 bp, Homo sapiens
tgagcaaaagtgatgagtttgtgttcattaactcgaggccatctggtgcagacacgctgccgtctgtgaatcaaacgtgcatcaaactccagggatcagaacgcgtgccagagccagtgttt

SEQ ID NO: 247726 - DNA, 122 bp, Homo sapiens
actgcactccagcctgggcggcagagtgagactccatctcaaaaaaaaaaaaaaaagccacgtccaaatagcatcatattggattagagtttcagtgtatgaattttgggaggtgacacaga

SEQ ID NO: 247727 - DNA, 122 bp, Homo sapiens
atgtatgtgtagtaaaagtggcaaaatgttactaattggtgaatctgggaagaatagaaccgaagttgttggtactatttttgcaacttttccgttggtttggagttttcactatttttcac

SEQ ID NO: 247728 - DNA, 122 bp, Homo sapiens
ccggccaactttggtagttttagtagagacgaggtctcaccatgttggccaggttggtctcgaactcctgactgtcatacatgtccatatagaagaccacctaaacaggctttgtgtaagca

SEQ ID NO: 247729 - DNA, 122 bp, Homo sapiens
gtggaaaggaaccagctgaccagtggctcactgtgtctggctggaccagcaagactctgacgtcatcacagaagccttcttggtcccattggtcctttgactgctgtgtacaggatgccacc

SEQ ID NO: 247730 - DNA, 122 bp, Homo sapiens
caactttaagtgcacgcaaacccagctgatttcttcacaggctcttttgtgcgcagctgccgggaaggtgcagcgtttgacaacaggagagccgtgtctttcaatgtggcaggccctgggga

SEQ ID NO: 247731 - DNA, 122 bp, Homo sapiens
gtaaataaagagagaacgcccagggattttttcagagcagaaagccggtccccagcgtgacgcggaagccaggttgcctcctcaagtgactcttcccttacatttggaggtgaaggctgagg

SEQ ID NO: 247732 - DNA, 122 bp, Homo sapiens
ctcttgctaattcatcctctagagtcagttcagacttccagcacgatacatgaacaatagcgattaatactgtggtacaaaggtaaatatagacaagagtttggtgtgctagcatacagagt

SEQ ID NO: 247733 - DNA, 122 bp, Homo sapiens
tactaagggagttaactccaaataaaccctaatactgttttttagtaaactttattgtaccgaacaaaaaaaatgattttgcaatgattttctctcccacaaaagcgtgggtgaaaaccagt

SEQ ID NO: 247734 - DNA, 122 bp, Homo sapiens
tgtctataccacagaccctaagtctgactagttttttgagcttttcccctcgatactccacgttttccagtccattttccaagggctcttaaagttcaagctcacaattctgtttatagggc

SEQ ID NO: 247735 - DNA, 122 bp, Homo sapiens
gcaccggatcgacttttcggtgccccaggggcttggctttgtccagtggaggccgcttcccggctgtgccgtggcctccgggggctggaggactcctgcccgtgtctgcagtcctcgcagaa

SEQ ID NO: 247736 - DNA, 122 bp, Homo sapiens
ctttgatatagggctatttggtggggttgctttttgtcctagttgtagcttttataatttcgagattcacattttgcaatagaaatatacaggcataccttggaggcattacagctttggtc

SEQ ID NO: 247737 - DNA, 122 bp, Homo sapiens
tagagtgaagggttaggtttatgcgctttaagtttatacactttgaagtaagatagggtgcggtggaggtcttagctctaccacctacaagctgaatgtccttggatgaattaatcaatcgg

SEQ ID NO: 247738 - DNA, 122 bp, Homo sapiens
aggagcagagggagagtcccgcctgcctgaggagagtagcttggagtgcagaacgagtgccgagcaggagagcagcagtaggcacagtgagccctcttcccagtccccagtgaaatctaagg

SEQ ID NO: 247739 - DNA, 122 bp, Homo sapiens
gaagaaacgtccgccacccatcccccttgctgcctgggggttcagacttgattgtgagtccgtgttatatcatctggtctcattgataggcgggatagggagggggattccagcccccctgg

SEQ ID NO: 247740 - DNA, 122 bp, Homo sapiens
aggggaagtttccttgaaagttagagagctgcaaatctctaagtatcaatgtaaagaagccgatgacccaattcggaaggtggttcaagtgttctgtttgtttacaaaggcacagaccacga

SEQ ID NO: 247741 - DNA, 122 bp, Homo sapiens
ccacctgacctagtactgtgcgtgcagcgcgcgccctgctgcccgcgagagattcagccgcgacagacgcaggttcggccatcgcgggctccaccaaacaccgtttccggtacccgccttcc

SEQ ID NO: 247742 - DNA, 122 bp, Homo sapiens
tgctgctacgcggggtgggggtttctgggccgccgctgaggtgtggtccctgcgctgcagcgactggaggtcccagggtggttgggccctgggagggtgtgggcgaggtgggccgtcctggg

SEQ ID NO: 247743 - DNA, 122 bp, Homo sapiens
gggcggaccccgccgcccgggtgcctaggcacgattccagggatccagggtaaagcggttcgcgcgggaacaggaggatatgtcaggcacaggctattccccatcactatagccacagagga

SEQ ID NO: 247744 - DNA, 122 bp, Homo sapiens
gggcagaaggggaggcggccgcgggagcacctggagtcagggacaccgtcatacggaagacgaggggaagccctgagctgggctcgggccggttcacaagaggctgcagatcttggtgcaga

SEQ ID NO: 247745 - DNA, 122 bp, Homo sapiens
gaagtgcccagcctgagcctgcttgctgttgggattatgggatgggaccacagggcaggtcgggctgtggcctgcctttctcagggactggagcggctaagcctgcccgccgacggccacgg

SEQ ID NO: 247746 - DNA, 122 bp, Homo sapiens
gggaccggaagaggggcagggatcgcggcacacgtggagacgcgccgaattgccttttcgcggagtggagtttgccgggagaggggcattgccccatcccacctagaaaggtgtagacccgg

SEQ ID NO: 247747 - DNA, 122 bp, Homo sapiens
ggctcttacaaactagcctttgtacaaagtgcgtttaaaacacactaaacccttgctccccgctgcggtgccttatctggggcctgaggggtagcggccacacaggttggggtttggaaaca

SEQ ID NO: 247748 - DNA, 122 bp, Homo sapiens
tcccctctgctccgtcagccaagttccaagaagttgagcagagaccctctgggagcctggcggggtgcagcggcctcccctgcggggcctgtcacccggccggcgcgtgcaaacgcctctgg

SEQ ID NO: 247749 - DNA, 122 bp, Homo sapiens
agaactgaattccataggctgtgagctctagcaatgccctgtggactcagttctggtgcccggcagtgctacaacatcaatgccaaggccgtggggcagctgatggtttgggctcccaactt

SEQ ID NO: 247750 - DNA, 122 bp, Homo sapiens
acacacacacctcattctccttaccttattttgaagccctcattgccaactgacattatacgtttacttatttttctttgacaatttccctgcttctccaaaatgtagactccatgggggca

SEQ ID NO: 247751 - DNA, 122 bp, Homo sapiens
taggaccctccgatccaggtgcgggatataatctcgcggtgtgccgttttttaagccagtcggaaaagcgcagtattcgggtgggagtgacccgattttccaggtgcgtcatcacccctttc

SEQ ID NO: 247752 - DNA, 122 bp, Homo sapiens
ctctgcctgtccgagcgttcggctcttttgcgtttgctgattggccagcccaggtgacagcgcccacccccaccccccctgacacgcccctggagccttgggggtacgcggtggggggcggg

SEQ ID NO: 247753 - DNA, 122 bp, Homo sapiens
gggcctctgcagatgggattaagtcacgggcctcgagatgggagatcctcctggagcatccggcaggttcacgccgtcagggtccttctagggagaggccagaggtccccatccggtgggaa

SEQ ID NO: 247754 - DNA, 122 bp, Homo sapiens
tgcatgaatttgggagattgtataaaacaaaactagcagaatgtttttaaaactttttgccgtgtatgaggagtgctagaaaatgcaaagtgcaatattttccctaaccttcaaatgtggga

SEQ ID NO: 247755 - DNA, 122 bp, Homo sapiens
atcactcgattggctacagctctgcatctgctttatttgggcataatgtgatgagctggccgcctgtgattggctgaaacctggctattacaaaaaatacactgttgagttagttttctgtt

SEQ ID NO: 247756 - DNA, 122 bp, Homo sapiens
ttagaaatcagatgcatttgaatgatatattggatgaagctaccattttaccctgggtcccgaactcttatttacttctgttttgcaagtgaaatggaggaatacaacataaaatggtatat

SEQ ID NO: 247757 - DNA, 122 bp, Homo sapiens
ctactcccagggagggaagctcctctgtagacctgactgccagtcagtcacagagggattcgaagttgaaaagcacttaaaaatgggtacatgacactcaagtgtttacgagtgaaaatgtt

SEQ ID NO: 247758 - DNA, 122 bp, Homo sapiens
agaccagtttgggaactacagcgccaggcaccgtgtcacagcgcgataagagagaacgttcggaaaagccctttatagattaagagactgaggctggctgggaggacgccacggcgccgctc

SEQ ID NO: 247759 - DNA, 122 bp, Homo sapiens
ccaggacaaaggcattttgggggacctagacaggtgccgagtactggggggactcaacagcgtcctccagccctcttccctgttgggcccgaggctcccggggtagatgtccagagggcccc

SEQ ID NO: 247760 - DNA, 122 bp, Homo sapiens
agtgccataccttctcccaggcctctgccccaagagcaggaggtgcctgaaagctgggagcgtgggctcagcagggctggtcacctcccatcccgtaagaccaccttcccttcctcagcagg

SEQ ID NO: 247761 - DNA, 122 bp, Homo sapiens
cttttgctcttgcaacgttctctacagtcctgttaatttccaggccagctcttcccccaccggccccgcaagccttcagggtgcctcccgctccgtggcccaccccgctgcctgcctccttc

SEQ ID NO: 247762 - DNA, 122 bp, Homo sapiens
tctaacagcaaggcagagagagggtctcagagcgtgtttattgatacagaatgttggagacggacagacaggcctttgcctatgatcaagcgactttctgtgcaaatcttatggaatgcggc

SEQ ID NO: 247763 - DNA, 122 bp, Homo sapiens
gggcagggtcacggtgtacgaggtgcgcatgctggggggcgggcggcgggctttggccctcgcttaacgttggcagcgggggcgcggggggagtccccgcgcggtgccacagtccggacgcc

SEQ ID NO: 247764 - DNA, 122 bp, Homo sapiens
ttgctgtctcgctgtcccctctctgccccgcgcacctcgctccccctcccggccggcgctcgcagtggcgcgcctgctcgctctcccgctaagcgacgagtcttcaacaagttggaggaagg

SEQ ID NO: 247765 - DNA, 122 bp, Homo sapiens
gcatgtaaataaacaagcagtcaccaaaagtgggaggcgacttcggggacttagggagaccgggcggacgatttcccacaccggggctgtctgatcgccgccccgattattatcagcctcag

SEQ ID NO: 247766 - DNA, 122 bp, Homo sapiens
cctgggtcctgggtcctgcatcctgcgtcctgcgtcctgggtcctgggtcctgggtcctgcgtcctgcatcctgcgtcctgggtcctggattgagacagaagaccctgggccgctcaagcag

SEQ ID NO: 247767 - DNA, 122 bp, Homo sapiens
gccacgggcggtcagtcaactacatcacggccgtagattggctgatatcgagtctgtaggcgtgtcgcgaggctccagacccgcctctgggagccccgctgtggagcatgcgcggagggagg

SEQ ID NO: 247768 - DNA, 122 bp, Homo sapiens
tcagcaaagatgagtcagaatggagtgcacagctgcagcagcaagaatgccccactgggccgagctcttcacccgccagggagcctacggagccacgtgatgccccaaggcccagcctccgt

SEQ ID NO: 247769 - DNA, 122 bp, Homo sapiens
agcacagcacaaaatgtttctgacacactgatgacaactacagcacaaactggggttgcacgatgatagcaagtttcaataataagtggctctgagtgcaggtccttattggaaggggagct

SEQ ID NO: 247770 - DNA, 122 bp, Homo sapiens
cagaccacattaccctacagttggcaaaatcacctgacgcaagcctattttacaataaagcgttgaacatctcatggggtttactgaacaccatgctgaaaacgcaaaacagaagggttaca

SEQ ID NO: 247771 - DNA, 122 bp, Homo sapiens
gccatgatgaaggcggctttcgggacttgtaattacagagccatgggtggcctctgtcctcgcagccgggaaggtcagcacaggtcctgggtgctgccagccctgagctccactcctgcaaa

SEQ ID NO: 247772 - DNA, 122 bp, Homo sapiens
aatactgaaaaattaacttatttttaaggagtgatgtgaaccagactgttctgaggtttacgactgcattgtatgggaacaaaaagaagcaacggtgtcattgctgtggcaagctgtattta

SEQ ID NO: 247773 - DNA, 122 bp, Homo sapiens
ccgagcatcgccgatggacaaagccttgtactgccctgaggctcccctgcatccgagcatcgccctgtgagctgtgaactcttctggacacttcactcatcatcgtctcccacccaccacgc

SEQ ID NO: 247774 - DNA, 122 bp, Homo sapiens
ccaggtttcctgtccggagattctggaattccgagcaggggtggcccacatttcccagcacgatgcggattttgctgagggaggatggggagagaaagagggtgagggaggaagggcgggca

SEQ ID NO: 247775 - DNA, 122 bp, Homo sapiens
ggtgtcgaagagcctaacaatactcaaaattcacatgataaaataattgatcctgaaaaacgtgttcctactcaaggaatgtttgataaaaatgggataaagggaggtttgaaaagtgtttc

SEQ ID NO: 247776 - DNA, 122 bp, Homo sapiens
gtctggcgtccaccagggcgcgcccgcagcccagaaacccgcgggcgctccccacgtgcgcgctcacacgtgcatccgcggctaccccagtgcctcgcggctcgggctttttttaattttta

SEQ ID NO: 247777 - DNA, 122 bp, Homo sapiens
ttggggttctgaccctctcgggtggccccatttagctaatttgcatcaagattcagcagccgatgatgtctgtatgtgtgtgtgtgtctgtggacacgtcaacaccttggttaattaattag

SEQ ID NO: 247778 - DNA, 122 bp, Homo sapiens
gcgggggcgcgcacagaccttagcctcggcgtccaaaatggaccaggggcaaggcgcggacgccgtccccgcccccacgcccccagcacttgcctgctgtgactcgaagctgcagctactac

SEQ ID NO: 247779 - DNA, 122 bp, Homo sapiens
ggtacttggatccgtgcctctgggagggtctcttctgtgacgccatcacatccaggctctcggaggtggctgcactgtcttcttggatggtctggagctcgtcggactcagagggcctgtct

SEQ ID NO: 247780 - DNA, 122 bp, Homo sapiens
gcccggaaaatcgatcccccaaagagcctcccaggcctggctccagccagcagggagcatcgccaattgtcccccgcgtgtgtaagcatgttttatgagtgctacaggtttgagcacagcag

SEQ ID NO: 247781 - DNA, 122 bp, Homo sapiens
tattcaactaatttccacaacaacagtaagaggtcagtgttgtggctgtgccagaccacacgtgcaccatcgtactgtggacagcgtcctgatgggacctgagcccagacccctgcctctga

SEQ ID NO: 247782 - DNA, 122 bp, Homo sapiens
cttcggaggatatttcctgtgcatccatcgccacctaatggaaagagtgaaaaatgaggccgaccaaactccatttgtgaaaagacactgccgggacaccaggcacaatgcttttattttac

SEQ ID NO: 247783 - DNA, 122 bp, Homo sapiens
tcgaaccaagtaaaatagaacttgaatgtagcggctgccgttgcctccttgtaccggtagcggggttggggacggaagccttcggtcggtggagaggagaaagggagaggccttcgggcggt

SEQ ID NO: 247784 - DNA, 122 bp, Homo sapiens
gcttccatccggctcttcctgagttctggcccttgtagtaaacctgcagtcttgtaagtacgccattttcccgagttctccgatctgatctagcgaactaatgaatgtgaggggcggtcgtg

SEQ ID NO: 247785 - DNA, 122 bp, Homo sapiens
cctctcccaatcgcacaagtgtaggggcggggcattctttggggggcccaatgaggaacgcggccgaagctggcctgtcaagagaaggggctgggggcggggagatggtgagtcggggataa

SEQ ID NO: 247786 - DNA, 122 bp, Homo sapiens
gcagcatgcatccctgtttgctatgatgtcttctccttctgttgcttcttttcttgctgccgttgaagttggaatgctatatcttgaaatccacgtctcagagtacaaggagtcaaatagta

SEQ ID NO: 247787 - DNA, 122 bp, Homo sapiens
gccatggtaggtgggtgttgctagccacatgaggatatgtgagccggtcaccagggactgcggctgactccccgagcacaaggacagtaagaataaacctccgattattcccctgcccccaa

SEQ ID NO: 247788 - DNA, 122 bp, Homo sapiens
cacccctgtgtccttcagcacctcctacagactccctccccttgcccttctgattcacagcgcccacctccctgcacctaccctattcgatctacaggggagcggagtcgcttcgtggccgc

SEQ ID NO: 247789 - DNA, 122 bp, Homo sapiens
gactggccaccattgtgggagaagagtccagtttaccagtggtggagtcatactatccctcgctcccactgccaccatctttgggcgataaagaaaaatagaggtgaaaacaagttttagtg

SEQ ID NO: 247790 - DNA, 122 bp, Homo sapiens
cagagcttgcgccatgttcctccccccacccccccgccagctttctgcgcagacgcagctcgcgcctcctggcagtattaaggtcggaccaaaccactggccaggaatggagggggtagaac

SEQ ID NO: 247791 - DNA, 122 bp, Homo sapiens
aaggagggggacttggggcacatgatcagtaggaagggatctgggtgagcatcgataatacgtctcaccagtgtttgttgaaagaatgactgaatgaaggaagaagtatataggtgaatgaa

SEQ ID NO: 247792 - DNA, 122 bp, Homo sapiens
gagtgtctacaaagcccgggaacactttgccacgctgtctagaaggcctggcgggaggctcgcgcctatgaaatcccagcactttgggaggcctaagcgggttcatcgcttgagccaagaag

SEQ ID NO: 247793 - DNA, 122 bp, Homo sapiens
tgcccaccagccccactgagatcgaatggggagcctgtaaatcctgatgtcacccagtctcggggccgggagaagctctgagccaggcccccaaacctggcagggtccagggctgggggcag

SEQ ID NO: 247794 - DNA, 122 bp, Homo sapiens
tggtacggtaaggtgcctcgcaggcacgtgagggcctctctaatcgttagctattgtcaccgattgtattgttatgacttctaccaccaccactccccctcctcctgggatggtgattccag

SEQ ID NO: 247795 - DNA, 122 bp, Homo sapiens
gtgacacatcccgcccccctccccgtcccacggaaggccaagccggccctgcgccgcccgcgataggatcagaacagggaagctgctcccgcctcctccggaccgaaagccgggaaggggag

SEQ ID NO: 247796 - DNA, 122 bp, Homo sapiens
agtccatcatcagtttctccaggctggacaggctcgactggccctcactacttgaggcctcgctgttggcacgccgaaaccccccgccaccaaccggctgattgaactgggtgctgtcggag

SEQ ID NO: 247797 - DNA, 122 bp, Homo sapiens
tgcaggacacacctcccagctctgcagcctcacccacaggaagctcgggttgggggcaggcgaagagggaggtgccacgctgggctccccgccctgcaccggcactgaccccgctgtaccac

SEQ ID NO: 247798 - DNA, 122 bp, Homo sapiens
gtgagtgagacagctgtcagggacgcccaatttgttgtggaaacactcaggctgtcttggcgctgccgtgtgatggggttgggggtgcggggaggacctggcccaggctctgggtacatccc

SEQ ID NO: 247799 - DNA, 122 bp, Homo sapiens
tggggcctacacgcgccaactgtgctgtgcagcccccgggccttcaggacaacacagccacgcagggcatcctcaagaacatcagtgatttgtccaagatcctagagctgagagagaatcgt

SEQ ID NO: 247800 - DNA, 122 bp, Homo sapiens
tccgacctctcactttgggaggaaggattccagttccttagagtttacatgcaggtagcgcggggatgaatgtggtcctcatatgtgttctgtttgggcagtgtggtgttatcatcttttaa

SEQ ID NO: 247801 - DNA, 122 bp, Homo sapiens
ggcgggcggcgcgggcaggggcgggcgcgggcgcggcggggctgggccggggggagtgagcgcggcgctctcgcgcgcccggtgtctccctctcgctgcctctgcagaaacagctcctgcca

SEQ ID NO: 247802 - DNA, 122 bp, Homo sapiens
acatgctacatggatgggccttgaaacatatgcaagtgaaagaagtcagacacaaaagaccgtatgttgtatgaaatgcccacaacaggcatttggaattatcaacatctctacaagattgt

SEQ ID NO: 247803 - DNA, 122 bp, Homo sapiens
ccctaaatagccaacccccaaaataattaaatcacctcaagggactctaggtccaatatccgcagcacgccacacaaacatctctcagctcagccacgcagggccgatgcctgcgcgaccca

SEQ ID NO: 247804 - DNA, 122 bp, Homo sapiens
caggttcccatttccacggcttattcggctgacccagccccttcccctgcaagggcggcgcgctccttgccgctgtccagcagctgtttctactgccaggtgctgcgtcccgcgatcgttat

SEQ ID NO: 247805 - DNA, 122 bp, Homo sapiens
gaaagcgcgcgggtctcagatcccagctccaatatccacgccttttcccttttcatctcccggaaggaagccttcacaggtggggaaaatgctcacccagtgactctaaagtagtgcacaaa

SEQ ID NO: 247806 - DNA, 122 bp, Homo sapiens
agacccccatttccgtggcggcccctgacgccggctgtcctccaggaataatctggggtccgctggtgccgccgtggctgccgttgcatttatttatgtcttcagcactgtggggagaagtg

SEQ ID NO: 247807 - DNA, 122 bp, Homo sapiens
gtctcaacaaaactgaatcctgattgcatccatcctagggttaattctagggtgggcacccgcaggatcctatcccacactgcctgggaagtgagagtgtggcctctgcccagggcccctct

SEQ ID NO: 247808 - DNA, 122 bp, Homo sapiens
ttgcctcttttctgccaggagactacagttaggaagtgactcctgtaagaaaatccgtcacgattcaatatggtcctcgtcctcgtaggacactccaggcacctgcctagagtaagatggcg

SEQ ID NO: 247809 - DNA, 122 bp, Homo sapiens
gatccaccagcctcggccccctaaagggctaggattacaggcatgagccaccacgccaagcgttgatttctttatctataaaatagagatcgaaatgctgtgatgattaaataaaataagga

SEQ ID NO: 247810 - DNA, 122 bp, Homo sapiens
tttagtcctgtttatgtgatgaatcacttttattgatttgtgtatgttgaatcaatcttgcgtcctggagatgatgcttacttgatcatggtggatttgctttttggtgagctgctggattc

SEQ ID NO: 247811 - DNA, 122 bp, Homo sapiens
ggctggcaagtccctcaggcctccctcgttgccccagcctcgcgggccgcctaactgccccgttccaagggtgccaccggaccccgctggagaggaacttctccgttggctggatttcatca

SEQ ID NO: 247812 - DNA, 122 bp, Homo sapiens
tcttcacagacacactccccgtccacgcagagcccccgggagctgcagtctgttgggcaccggagttcggaacagtcatccccgctgtactcgctgtcacagatgcactggccatccacaca

SEQ ID NO: 247813 - DNA, 122 bp, Homo sapiens
catggcccggtgggacggccatggtgggctcagagggccgcaggggagcgaggcctggagcgggagcccggccggggggcgccttcttgcatcctgcacctcggctgccaccgccgctgaga

SEQ ID NO: 247814 - DNA, 122 bp, Homo sapiens
aagggagacagggaactgtgaatttggactcttgtgtcataagacaaattctagataacacgaccagaccttcaattgacatattgtgtttttgctaataaggtggaattctatgatgcgaa

SEQ ID NO: 247815 - DNA, 122 bp, Homo sapiens
gaatgaaagggctgtgcctctgtgcttgggtaacgtttcatccttacttctattgtagtccggtttctatacacccttgactggagaatccattaagactttgggcaaaggcatggggaagg

SEQ ID NO: 247816 - DNA, 122 bp, Homo sapiens
tcagagggtaggtagatggcacttctgtgcaggtcagcccaggctaggtgcggtggctcacgcctgtaaggccaacactttgggaggctgaggcgggcggatcacctgaggtcaggagttca

SEQ ID NO: 247817 - DNA, 122 bp, Homo sapiens
cacttggcattctaagctaaagctttagcttcccaattcgtgatgtgctaggccaagattcgggagctgttgccagcctcgtcaaatatggaagagaaacaacctgcggtcaaaagggagtg

SEQ ID NO: 247818 - DNA, 122 bp, Homo sapiens
tcagaagtcatttcttagacaactaacagtaatgaaaggctgttagtagcttgaaacctgcggcagacaggtcagcctgtgagcatcctttttagaggtgggatttgtccattttatactag

SEQ ID NO: 247819 - DNA, 122 bp, Homo sapiens
caaataaacagttctcaacattaagccaaagccaactccgtatagctcaatacatttctccgtactaagatattttgagttttctccatcccacaaaaattcttctcccttcccagtttctc

SEQ ID NO: 247820 - DNA, 122 bp, Homo sapiens
agagccatctgcccctccctcggataccagcttgtaagccgctctaactcattgttctctcgtagcctggtcacccttggctcaggggtgaggttacaggcaatagtcactggcacagaagg

SEQ ID NO: 247821 - DNA, 122 bp, Homo sapiens
tgcagaggaccgaggcagaccccagacccccagagtgtgtgaggtgtgtgtcctgcctaccgcgtgactcagacaagtgcataatgacaagtgcataaacgactcaattatgtgggacgggt

SEQ ID NO: 247822 - DNA, 122 bp, Homo sapiens
ggaggccctcctgtgctcttggtgaagatgccgctgataaacttgagcatcttgcggtcacgagtggatgctcggcccccctcccggccccgtttcagccccggagctggaggctccagagt

SEQ ID NO: 247823 - DNA, 122 bp, Homo sapiens
tattattctaattttgcaaaatgcacagcagctaattaagtcaaggagcccctcggctttcgagttcttttgcatgtgaatgggggttggtaaatccccagctctggctctggtggggggtg

SEQ ID NO: 247824 - DNA, 122 bp, Homo sapiens
gctggtggggcctgggaagtgcagcgtctccctgacgcttggaggagcggcgtaaagttccgggacagcgattggtgtagagcgcggtcactcaggcccagaaagtgcttcctgtgccgggg

SEQ ID NO: 247825 - DNA, 122 bp, Homo sapiens
gttctgtctcagatgtgcaaactgccaaccaaaatgatgcctttcagagcgtcttaataacgacagccagagctcagcaaaatttcagctaaaatccaaacataaagcagaaaaacacttaa

SEQ ID NO: 247826 - DNA, 122 bp, Homo sapiens
aggagggggagaagcgagagacaggccatcggtacccccggcaccggcaagggtggaggacgctgcagggaaccgacgggacccggccgagagccccgactgtgaggaggcggctcacggcg

SEQ ID NO: 247827 - DNA, 122 bp, Homo sapiens
gtgagaaaagggacctcagcgaatgagtaacggacccttcaccagggtccctgcacagaccgtgctgggccgggctggccgtcagggtgtctgtgtgtcgggtggagttgggtgcctgggac

SEQ ID NO: 247828 - DNA, 122 bp, Homo sapiens
caaagggtagaaagacaccgcctggcagaagccacgcctcgcaccaggaagcccggctgacggcttaattgagattaacataaactccaatcagagaggaaaacgcggacaggattacctaa

SEQ ID NO: 247829 - DNA, 122 bp, Homo sapiens
agagaaatgatgttgtcactggtggctcattcagggaagctcatcaaagcccactttgttcgcagtgtagctgaaatactgtctatctctaataaaaacaggaggaaacaagatgatggaat

SEQ ID NO: 247830 - DNA, 122 bp, Homo sapiens
ctcttcaccagatcccagaggctgaacacctcgaccttctctgcacagcaggtgagtctccgcattaggaacaccttaatattctccaatagtttctttattttgattgagatctctttgct

SEQ ID NO: 247831 - DNA, 122 bp, Homo sapiens
gccattctcctgcctcagcctcccgagtaagctgggactacaagcgcccgccaccgtgcccggccccagccaagcatatctaagtttcttaaggaaaggaaatgttggcctggcacggtggc

SEQ ID NO: 247832 - DNA, 122 bp, Homo sapiens
tccgggcaaaggcagccagatccacccaggacacattctttgtccttatccctctgtgctcgtcccacagcaagccagtcgcggtccaaggctccagaggctgtgcaggaggccgagctggg

SEQ ID NO: 247833 - DNA, 122 bp, Homo sapiens
aataattcattaactggtacagcaatttcagaaccctttcacatagattcttaaggggaccgtttcccttgaagaatggggtacaccagaggacttaggaagagaagcgcccactggggctt

SEQ ID NO: 247834 - DNA, 122 bp, Homo sapiens
tagaactaggccatgggcgatgatgcttggcctccatctctagccctggctgccttgacacgcttgcctctgcaagctctcacagaagccttttgcccatggggtcagaaatgccatcatca

SEQ ID NO: 247835 - DNA, 122 bp, Homo sapiens
agtgaactctaaaacatacctccaacctttgtcactgtacatagtcatttttaaatatatcgtaagcagtgtgtccctactttttctaatttttaatttcaactgcaggtggcaaatctttt

SEQ ID NO: 247836 - DNA, 122 bp, Homo sapiens
gagccgcagccctttctcacctcccgtgttgctgcgcttggtgcagaccacctcggggggcgtttcgaggggcctcttgcgggaatccggggcctcgggctccatggggggggcctggggcg

SEQ ID NO: 247837 - DNA, 122 bp, Homo sapiens
gcggctgcagtcaggcccacattcctcttacttcccgccattgtcctgggttcctgtggccgcgtctccacactcgctcccggccgccccacggtcccagggagtgatgactcatttccttt

SEQ ID NO: 247838 - DNA, 122 bp, Homo sapiens
ggcgtcacttgatcaatagttcagtttcagtgtggctaatagtgttaaaaactggccgggcgcggtggctcacgcctgtaatcccaacactttgggaggccgaggcgggcggatcacctcag

SEQ ID NO: 247839 - DNA, 122 bp, Homo sapiens
cactgaagatcagcaggggccgtgaaagttcggggaggtggtccatgggaggagtaagaccgtcacaggcactcattgccatggtccatgctcagtgccagcaacgggaccggggccgccag

SEQ ID NO: 247840 - DNA, 122 bp, Homo sapiens
aatgtgaagcggcggcgcggctccagcgaggccggcgcctgaggtctctaaggctgcgcccgcccccgccgggcttctaagctgtccagagcggggagcctcagacccagccgagccccact

SEQ ID NO: 247841 - DNA, 122 bp, Homo sapiens
cctaccgcccaagcctttgttgcgcgtgcgtcggaaggcgactagggacgcatgcgcttgcgatttcctagcactcccaactccagcatacggcctcccttgataggcagaagcacgtgtct

SEQ ID NO: 247842 - DNA, 122 bp, Homo sapiens
agattctcaggcctgtttctgaaacctccctcgcctcactctgtctctcagcctttccaccgtctgttagagagaatttcagagttcaaatgagaaaaaaatcaccacatcgacacgtccaa

SEQ ID NO: 247843 - DNA, 122 bp, Homo sapiens
cagcctctgttaatttcaaacaactctctccgccttgaggaacaaaatgccatagagaagcggggtgagaatctggctgaattaaatttatatgccctcagagacataatctacttcacttt

SEQ ID NO: 247844 - DNA, 122 bp, Homo sapiens
ttatggagcagaacacactgcagaaacacacgcggtggaagcatccatgagccgggctgccgggtgccccaggtaccacaggactttgcagggagcctggactcctgtccagacacctggtg

SEQ ID NO: 247845 - DNA, 122 bp, Homo sapiens
ccggcgcctgattgctaaagccctctcagagctgctcgggatatccttctgttcgtagtgcgagtgtacttacttttttttttttttttttttttttttttttttttttttgagacggagtc

SEQ ID NO: 247846 - DNA, 122 bp, Homo sapiens
gtctgggcaccttagacggctgtcttgcgggttctgtggtacctgggttctttctgggggcgccttagacagctgtcttcagggttctgtggtacctgagttctgtctgggcgccttagacg

SEQ ID NO: 247847 - DNA, 122 bp, Homo sapiens
ctcccacacattctccaactacccgcccggcgtccgctacatctggtttcagcacggcggcgtggacactcattactgggccggctggtacggcccgagggtcaccaacagcagcatcacca

SEQ ID NO: 247848 - DNA, 122 bp, Homo sapiens
accctatcaaaaaaaaaattcgtagaagtctaagccctttttttctagtaacccaaaccgcgtgagttcctaagttctttttgttatttctcttctcttgaaacttaaactcttgcctgagc

SEQ ID NO: 247849 - DNA, 122 bp, Homo sapiens
caccccctttctttctgggttttgatgtggatgtctttctatttgttcaggaaattgtgacgtgtgttctgggcagggtttgaggttttggaacattttctaaaagggacagagagcaccct

SEQ ID NO: 247850 - DNA, 122 bp, Homo sapiens
ccggtttaatttcagtttaggccaaaatccccgcgggttggtcggggcgggagcggggctcggtgttcggggctgacggcgggggcgaggccatggttctcacaccatccagaggaagcatg

SEQ ID NO: 247851 - DNA, 122 bp, Homo sapiens
ttaactgtgcgcagaaccaccgtgtggccctgcggagaatgcctctgcaggctcaggccacgtggcaacctttcatgctcttctgggagatgttactggttcaacctgtttgttgtgctaga

SEQ ID NO: 247852 - DNA, 122 bp, Homo sapiens
tgcaggccgggatcggggcttgggagccgagctatttgttagacccggggagagagctggcgatccccagagggaagggagccccaaacgcctttgtatgtagttgccagacaaagagaact

SEQ ID NO: 247853 - DNA, 122 bp, Homo sapiens
ctcctgcctttcgtgtctctgcagcgtggagactggaaccggcaatttcaaaggacgccacgttcaatcgcagcgctggcgcgggcggaggctaaaacacgggggtcctgagactgaggaaa

SEQ ID NO: 247854 - DNA, 122 bp, Homo sapiens
ccctgcctgggcggcgacatgctggcggtgggcacgctgcggggcaggtaggcggggggtcggctgatgcggatcagatcctccaccaggaagctggagtggccggaaaatgccgactgcaa

SEQ ID NO: 247855 - DNA, 122 bp, Homo sapiens
cccaggccagactgctgggaagtgagtggccgggactggcacatggggccaggcagcagccgcagccctgactcctggggctgcagacacagagagagccaaggacaaaagggtgccctggg

SEQ ID NO: 247856 - DNA, 122 bp, Homo sapiens
ggggtctgtgtgagtatcctggggggtctgtgtgagtatcttggggtccaggcaagtatccggggtctgtgtgagcctcctggtattggcaccaggtggaccacagcagttatgccatgctg

SEQ ID NO: 247857 - DNA, 122 bp, Homo sapiens
gaggacataattcacacccaggagaggggatgctgccgggcgatggctctcacagcacgacgccttcatctctgtctcgctgcctctttgagtgtcactgtgcatctctgtggtgcctttgt

SEQ ID NO: 247858 - DNA, 122 bp, Homo sapiens
ttgtacaaccccgaagcgtcctctgcgtgtgcgtgctgtacgtgtgtgtgtgtgtgtgagcgagtgtgaactcttcaagaaacatgcattttggcacaagactcgtgacatcacacacttca

SEQ ID NO: 247859 - DNA, 122 bp, Homo sapiens
tcattccaagtaaaggaaagtgacaacgtgtttgtcatgaaagcgggtgccattggttttcgatggggttggaaaccacagctctgggggacactgccctgctttgccgcacgttcagatga

SEQ ID NO: 247860 - DNA, 122 bp, Homo sapiens
ttacatctgtaaggtttctctccagtatgaatgatcagatgttgtacaaggtaggaattgcgactgaacaccttgccacatttgttacattcgtaaggtttttctccagtatgaattgtccg

SEQ ID NO: 247861 - DNA, 122 bp, Homo sapiens
agggagctgtgggcggggcccacactcccggctgtagaggaggcctccgccggtgttgcccggtccaacgccccgatgcccctggcctgcatggctagtcaaagcggccggtggccggtgcg

SEQ ID NO: 247862 - DNA, 122 bp, Homo sapiens
tgtggccgcccgccgccggtccacggacaccgacttcctcttacacaccttacacgcccacggcaggcactggcctggacagtgctcgggggtccccagccccttgtcctcaaggggccctg

SEQ ID NO: 247863 - DNA, 122 bp, Homo sapiens
gcagctgagcatttgtcttgtctaacaggattactgttggctatgaattaaaaaacagaacgtggaggaattgccttgttaactactaatactatttcgtggtttagtatagatgggttaat

SEQ ID NO: 247864 - DNA, 122 bp, Homo sapiens
cgggagcgtgcggggcggtgggcgcagggtcacgttgggcggcgcagacaaaggcgggcgcgcgcacgtcctgacgcagcttgggcccgcggcggcggcaagggcgggagggagcggtcgcc

SEQ ID NO: 247865 - DNA, 122 bp, Homo sapiens
ggagaactgcacccagctgggggagcagtgctggaccgcgcgcatccgtgagtggggggacgacagccgccaggcctaggtctctgccactgaactattaatctttctggccatctgtccgc

SEQ ID NO: 247866 - DNA, 122 bp, Homo sapiens
gaggctttgaggtggcctctctctgcaaccgtggacatagcaagagcccacaccaccccccgacccccgctgccctctacggtgcttggggacacgcccgccctagccaggctgcccggctg

SEQ ID NO: 247867 - DNA, 122 bp, Homo sapiens
gtgaagacttcagaaagatctaaagtgatgcctcaaagagctattcaatccaaaggctctcgacggattttctaggcatgcctcgcagatcctcttttcaacagcagggtttctaagaatgt

SEQ ID NO: 247868 - DNA, 122 bp, Homo sapiens
gccgctggccttgctgtggcgatgtggtggcccaggaggcggcaggacggccaagaccagcgcgagggccctgggcaaggcccgacaggtgagcggggaggcgctctccgccggtgccgggc

SEQ ID NO: 247869 - DNA, 122 bp, Homo sapiens
ggcccctcctccgctcggcaacaccgggttcgggtccctctagagccgggacgcggccggcgggacacacccttgccctgggagacgcgagggtccatggcctcttagtgtcggtccagctc

SEQ ID NO: 247870 - DNA, 122 bp, Homo sapiens
ccatggcaaccactgtctctgggaagtcagctataactacatccccaacagcaaagagcacgccaggccatcatgttcaatcatccgggtccatggcaaccactgtctctgggaagtcagct

SEQ ID NO: 247871 - DNA, 122 bp, Homo sapiens
aatcagtctcttttttcagctaatccatatccttttaaaagtaatcattttggctgggtgcggtggctcacccctgtaattccagccctttgggaggctgaggcaggcaaatcacatgaagc

SEQ ID NO: 247872 - DNA, 122 bp, Homo sapiens
gtgtcacaaaaccaacactactaagaggtgggaatcagctgaagaagtgagttggctcctcgcaccccctagcttctggcatattgaccttgaacttgcctatgaaaggtctaagcactgtt

SEQ ID NO: 247873 - DNA, 122 bp, Homo sapiens
ggggtacatgaaggtggccttcggtcacctaggaaggctccttgctgaccgtttcctggacgtggaggtacagaacgacctgggccgagtgaaagcgaccagcgaaggtcacgccggcccag

SEQ ID NO: 247874 - DNA, 122 bp, Homo sapiens
cccgacattaaatttagggggtgtggaagcgtagactgggttcaaccgggaaattttccccgagacgccaaaggcattccgcgttatgtttcccatgcgggtttctgctttttgatagcgaa

SEQ ID NO: 247875 - DNA, 122 bp, Homo sapiens
cgggactcacggggcgccccggggccgggaatctagctacggaatccggtcggtaggtggcgccgcgaggctgcagttgggtttccgtcgcccaggccgagggtggtgcggagccgggaccc

SEQ ID NO: 247876 - DNA, 122 bp, Homo sapiens
ccgtggcggctcagggcagctgcggtcttgcacaccttggcgcagtgggggcaggtaaagcgggtggagggcctccgtccggcccgggagctgtgggagcccccaccgtgggcctcttggtg

SEQ ID NO: 247877 - DNA, 122 bp, Homo sapiens
gcctgaatgagtgaaagcatacaaaccaccaccgtgcggctctctacactagcaagtttccgaagttcgccccagccggtttccctgaacaagttcccaaccgcatcacgtttagtttatct

SEQ ID NO: 247878 - DNA, 122 bp, Homo sapiens
ggcggctgagcactgccccaggcgaaccccgcaacttggggctggacagagcttctctttcggtttccctaatgtgtttgaaagagagtaacagaggtacatttgaaaagaaaaacagaggg

SEQ ID NO: 247879 - DNA, 122 bp, Homo sapiens
ctgccaagaattggaaataatccacttgtaatgttggtgatgagtggtggctcacccaggcggtgtaaggcaggcaaatgaaagatgaggactcaccccagacagctcccctagaaatcctg

SEQ ID NO: 247880 - DNA, 122 bp, Homo sapiens
acaggcgtgcctgggtgtgcgctcaacttcccgggcgagggacgtttctgcacttgccctcggcttctgaactttgtactttgcgagtgtactttgtactttggtcctgtgtccctgcagcc

SEQ ID NO: 247881 - DNA, 122 bp, Homo sapiens
agtagtgcagtttcctttctaagtgatgggagctgctggctgttgtttttggcttgaggccgcatagaccagccagccgttgtgtaagcatggtctgtctgaattgctttggggctgtcttc

SEQ ID NO: 247882 - DNA, 122 bp, Homo sapiens
gccaacacgaggtatggccagcgtggggcatgcagggcatgtggggtgtgcgctcacaggcgggcggtggccatggcaccggggaccgggagcggcccctcgctcctgtgctggctgtggca

SEQ ID NO: 247883 - DNA, 122 bp, Homo sapiens
tcccgcagagccactacccgccggatggacttgggcgggttctcggttaggtagacgagccggtcgcttagcaccacatacttgaggatgtggttctcagagttggacaccacgatgcatgg

SEQ ID NO: 247884 - DNA, 122 bp, Homo sapiens
ctgtcaagggcgagtcaggtgtgaaatggtgaggggtgtgtgagcaagtggtgtggggtccggccactgtgtatagtcaaacatgccgactgctacagtggggcacacagcgccgggtactg

SEQ ID NO: 247885 - DNA, 122 bp, Homo sapiens
cgtcccttggggtgtgggtggagcggcgtttcgggggagccttggccctttttgcaaggccgctggccttcctgctctccagtggcggcaccagacccctccccagcctgagccctcggcga

SEQ ID NO: 247886 - DNA, 122 bp, Homo sapiens
ttaattaagaggagagtctcgctatgttgcccaggctggtctcaaactcctgggctcaagcgatcctcagcctcccagagtgctgtgattactggcgtgagccaccgcgcccggccaatgtc

SEQ ID NO: 247887 - DNA, 122 bp, Homo sapiens
cagcctggaaaggagagtcgtgcctgtgggacctgcccatctgctgggccacgtatagcacggctgccccacccctccccggcattgcagtggggctgtcttccaaggcctggtgggatccc

SEQ ID NO: 247888 - DNA, 122 bp, Homo sapiens
cagagctcatgggacttccaaggagtgagatgctcagggccaggcaaacccctgcatccacgttcccactctcgctttaacaccagggcagcagcctagtcttgcagtgactcctgatgggc

SEQ ID NO: 247889 - DNA, 122 bp, Homo sapiens
ctagacagtttggaaatcaagaggaatctctcagctttggtattacttgaagcatattgacgttttgaaaagacttggcaaagcggctctcttctgtgccgaaaacctgcttgtcttttacc

SEQ ID NO: 247890 - DNA, 122 bp, Homo sapiens
ctgcacttacggctcagaccagatgagtgttttcctcacaaagtgatgcggatggcctgccgctgtgggctccgtcttcagcatggtctcatcccttcttaaaacaagtcaaccatttgtaa

SEQ ID NO: 247891 - DNA, 122 bp, Homo sapiens
aaacaaacaaactcaaccatcatagttttctttcttttccttttttttttctttttttctcgagatggagtcttgctctgttgcccaggctgaagtgcagtggggcaatctcggcttactgc

SEQ ID NO: 247892 - DNA, 122 bp, Homo sapiens
ctgctctttccttctctaaggctgtgctagtccattattcattaaaagacaaaatgaggccgggtgcagtggatcacgcctgtaatcccagcactttgggaggccaaggcgggcggatcatg

SEQ ID NO: 247893 - DNA, 122 bp, Homo sapiens
gcattgcaaaacttccggcatggaaggtgtctttgactctatactctgacctctttaaatcgtgctaggccatgcaggtatgttgtttgtctcccagaaggcagcggtggggctaaggcagc

SEQ ID NO: 247894 - DNA, 122 bp, Homo sapiens
agacagaatcctgggcctctgccagctccacccgacctgctgactcagagtctctgagagcggggtgcagggtttgcattattagcactcaagtttgagacccacaggttaagtaatgggaa

SEQ ID NO: 247895 - DNA, 122 bp, Homo sapiens
gaacagccaccctgctcagctgctcggatctgctcccaaacatcagagagtcaagcagctcggccccgacaggcttgtttttttgtgtcactcgatatgagtggaaggaaaaaactacagct

SEQ ID NO: 247896 - DNA, 122 bp, Homo sapiens
ctaaggcctgaagaaagggagggatgttaacactttaaacactgatagtcgaatgtgaagcggaggcagggtggtcagtgggatggaggccactctaaacaaaatgtatggtttttgctatt

SEQ ID NO: 247897 - DNA, 122 bp, Homo sapiens
gccacagctggaggcggactagtgcgggtcctgtgcacctgcctggcgtctggctctgcgcgccccaccacggaccagtgacgtcaagtgggaggcggcttgcttgcaggggcaggaggatt

SEQ ID NO: 247898 - DNA, 122 bp, Homo sapiens
ctgcgagacgaagatcgtggccgccgaggaccatgaggcgctgccgggggccaagaaggacgcgctgctcgccgccgccggcgccatgtggcccccgctgcccgccgcgcccgggccggccg

SEQ ID NO: 247899 - DNA, 122 bp, Homo sapiens
agagtcagggtagtgttcagactagcccacgctccggttctgagccgcgacggcggtctccgcacgcaacgaaatcaggcaggaccgaaccttgcgtcctccagtgcagcgagttcggaagc

SEQ ID NO: 247900 - DNA, 122 bp, Homo sapiens
aaaggaacttgagggaggatggtcccctggttgcataaggctttgcagagccttggccttcgctctgagtgagtctggggctttcggaaaccaaggcatagcttctcacaggaccctgcagc

SEQ ID NO: 247901 - DNA, 122 bp, Homo sapiens
acaaatgtcagttacgtttgcaaaggagtgtatggttctaggtatttgcctactgttaaccgttgagaaaaacattgtcaggttagcaagtctattgaaatagagacctccttagtttacag

SEQ ID NO: 247902 - DNA, 122 bp, Homo sapiens
cccacctgtgtccacctagcctgtaagtgccccctgagggtatcaaagcacgcggacttccgcctgaagcaaagccaccgggcggcaagtttccccgttaacaacaacgaagacagagagga

SEQ ID NO: 247903 - DNA, 122 bp, Homo sapiens
ctgcgagtttgggttagtgtgtcaacagggtcagtccccgtatctactttgcgaaagcttcgaggcgagcgtgaagtcaagggctgcggtggatgggggtaaaaggcctcctcgtcccactg

SEQ ID NO: 247904 - DNA, 122 bp, Homo sapiens
acagagggacacaggcagcacaccccaaccggggcaggagggaagacggtaggtgggggccgccgtgcgatgtgtgtgcggcaaacatcacttggttaagtcacactggtactgcccattta

SEQ ID NO: 247905 - DNA, 122 bp, Homo sapiens
aatagggacatggctggaccggggaggggtgtgcctgtggggccagcaggtcgggttgggcgcagggagaaatgaagggaaggaacatctcgcttcggttctggctgaagacgtggggccac

SEQ ID NO: 247906 - DNA, 122 bp, Homo sapiens
aagattttcaaaaggagcacacacatttagtaaagcactctagctaatgcaggatacacacgatgtgcgttttcttattccttgctctaaccactggtctctcagatccctgcagagcagta

SEQ ID NO: 247907 - DNA, 122 bp, Homo sapiens
aaaagtgtcgtaactagcctctctctctactattaagctggcttaccatcttatgtcattcgctgtgctggtttcttcttgcctgcagaatttcagacttttttacctgacgtacaagcccc

SEQ ID NO: 247908 - DNA, 122 bp, Homo sapiens
agacctgtccactgcctcacacgtttccatttgggttcatgcgagcatcaccgctgccaccgggtaccacaaaccatgcttcagccacatagttgacccgggagccccaagggctgaagatc

SEQ ID NO: 247909 - DNA, 122 bp, Homo sapiens
ccgtggagtatgtggttgcaacttctgtcactcaaggtctgatggcggggagattggagccgtatccaatcagcgcactggagtgaaaactgcccaatcaggcacgcagccagagaggaggc

SEQ ID NO: 247910 - DNA, 122 bp, Homo sapiens
tcgcgccagcccgggcaggcagctttgcaagtccgcgttatatatcgcagtggctgcgcccgggatagctggctgcgccgccgcgcacatgcctaggttcgacgccctcctccctttgccca

SEQ ID NO: 247911 - DNA, 122 bp, Homo sapiens
atttgagtgtgggaactaccctagcatctctgcacttacaggagaaccaggggattcacccgtcatgagagcagagctcctataccctggcatcctgcgccccaggcacccgagggatcctg

SEQ ID NO: 247912 - DNA, 122 bp, Homo sapiens
aggcgctttagtcagtttctccatctgcaaaatgggcccgagagcaagaatgaggcagcccgcaggcggacgctgcggaggggcgctcgggggctgcagccgggggcgggtccgggggcggg

SEQ ID NO: 247913 - DNA, 122 bp, Homo sapiens
gagtgaatggcagcgcgcctctgtagtgctgtctgtgcttttacaattttgtattcctgccgggcaaagtacttttttgtctcttctattcattttccatagctccccaaaatgtgttagaa

SEQ ID NO: 247914 - DNA, 122 bp, Homo sapiens
atgaagattttatcgcagcctccaaaacccagcagtaataggagctttcaacctgaaatacgattgttattttcccggtgcagagcttgacagaaaaagtcagctttttattaaagacaaag

SEQ ID NO: 247915 - DNA, 122 bp, Homo sapiens
tcagaagctggctgcgcctcccccatgagacacctctgcgccctccccgaatgagccgcacgtctgcttctccaaacggccgctgtgcccggtgctcagcgcatctcaactcgcggcaggcc

SEQ ID NO: 247916 - DNA, 122 bp, Homo sapiens
ggctggccagcctggcacaaggctctgcggacgactaaacggacctgtgatagaagtgaccgtggagtggctacagcaagaagaaacaggtcatgaggagcaattatcagcaaaattctccc

SEQ ID NO: 247917 - DNA, 122 bp, Homo sapiens
ttgcctcggtttccctggccagggctccaaaacagggaaggagggtgggagagcgtgaggcggataaacgcaggggtaagtctcaccccggcctgaggcctccaagcgtcgtccttggctgg

SEQ ID NO: 247918 - DNA, 122 bp, Homo sapiens
gagcaggggctacaaggagggtcgacccaggtgccactgccccctcagcactcaccatggcgactccccagagcctgcagcaagcagcacccgccccgcgcgtagcctcccgcggtcatgtg

SEQ ID NO: 247919 - DNA, 122 bp, Homo sapiens
gccctcctcccgacgccggcggccgccatctttgttcggtacaaagccctgttttgcttccggaaactcggttctgctccgcccctgttggccacgtgtttttgtttatggacgttattttt

SEQ ID NO: 247920 - DNA, 122 bp, Homo sapiens
ctgtgtgacttgaggcaagttatttaacctctccaagccttcattccctcaagtgtcaagcggtattaacaattgctctacaccatggggttgtcacaagagctaaaggacaaagtatgtaa

SEQ ID NO: 247921 - DNA, 122 bp, Homo sapiens
cccactcttctcctctccatccctttttgcattcattctcgaatatttactgagcatctccgtgccagagccgtgctaggagctgggaagacagctgtgtgtaaaccccacgcaggccctgc

SEQ ID NO: 247922 - DNA, 122 bp, Homo sapiens
tatcttatgtgtgcttagtggcatctagcatgtgcttagcggcatctcgcatgtgcctagcggcatctcgcatatgtctaatggcatctcatgtgtgactagcagcatctcacgtgtgctta

SEQ ID NO: 247923 - DNA, 122 bp, Homo sapiens
cccggcgcatcggtcctccggggcggctcggagctgccctcgttctccgcagcacccgagcggatgccctactctggccggtcgctccgggctctctgccctgcgctggtgctctccgtcgc

SEQ ID NO: 247924 - DNA, 122 bp, Homo sapiens
aacaacacaagtcattttacaatgctgaaaacaatgcagaaaggtcttgcctctaaagcccgctatattttaaccagccttcagccttctccttttccccacttatttcctttgaaagacct

SEQ ID NO: 247925 - DNA, 122 bp, Homo sapiens
gaggagagggatcaggtggaccagtgggagagctggcgggtttgcggctgccaggcctaacgagggcaggcggaagcagatggccacagaggcctgggcctgagccagcctcagagcaggcg

SEQ ID NO: 247926 - DNA, 122 bp, Homo sapiens
tgagtagcacgtgcagagccaccatccacaacgcccacataagtgcagatgtaggcagcacgtgtgcacacacacgacacacatacacagaaccatgtgtgcacacagactcaggcacatga

SEQ ID NO: 247927 - DNA, 122 bp, Homo sapiens
cggcggtggcggcagccgggccgagagacggactcgggctgactccagccgctgggagcgcgaggccatgtaacccgctcggctccaggctgcgaggtgcgtaatccccagccggcccctcg

SEQ ID NO: 247928 - DNA, 122 bp, Homo sapiens
ggcggaacctttctcctccacccctggcaacactgctgggcaagcacaccacatcctgctcgtcctactggaagatgcctccctctgcattggggaagggatgagacttccgggccaggcca

SEQ ID NO: 247929 - DNA, 122 bp, Homo sapiens
ttgctactccaagtttgacctcaccttcttgttagaaatgcagactcttgcggtggctcacgtctgtaatcccagcactttgggaggccaaggtgggcggatcacctgaggtcgggagtttg

SEQ ID NO: 247930 - DNA, 122 bp, Homo sapiens
cgcatctcattcggaaaatacggtaggtgcgggcagccggggctctaattgcaggcggcgcggatcagcgttagtcaggctgtaatgctcgccccgcttcggagacttccctccccctcatc

SEQ ID NO: 247931 - DNA, 122 bp, Homo sapiens
gaatatatgaagggaagttgggaaaacccttccctttttgtgcactcccagggcagcagccgcaaccccagaatgaggagaggacttaagagcaggcacaaggttcgctgccatgactgatg

SEQ ID NO: 247932 - DNA, 122 bp, Homo sapiens
gatgacacaggaaaaattagcaaggaaggatagaatggtggatgaatacatacatacatacgtgtataaatggctgtggcttgagggatttttctgaattttcctgaaatacaagtggatca

SEQ ID NO: 247933 - DNA, 122 bp, Homo sapiens
tgcactatagtgactgaaatttgcacttcagaaaactcatgttagggtgctcgtgagtaacggaaagggacagggagggagaaggggattgcccccgtaactaaactgtctccgtaactaaa

SEQ ID NO: 247934 - DNA, 122 bp, Homo sapiens
ccaaagcctccgtggcagtagcggccgggggtgggctctccgccgatgaagtcctggggccggcccaggtacaggtgggcggcggaggccaggctgaggtggccagttaggcgtgccaggcc

SEQ ID NO: 247935 - DNA, 122 bp, Homo sapiens
ggccggcgggcggtgatggtggcagggagacagtcacgccctagccccaagccagctccccgcagcgaggaggcgcccccagatcctaggcccacccgcccccaccttcctcctccctggtt

SEQ ID NO: 247936 - DNA, 122 bp, Homo sapiens
ccatttggcccctgacctcggctttagagggcgccggtgctcggaggtctctgctggctacgaagaagtggggttggggggctgcctctgcctcctacctgtcccccggccaccttcctatg

SEQ ID NO: 247937 - DNA, 122 bp, Homo sapiens
tgccgggtgcggccgaatctgagccgtgtgtgtgtgtgtgtgtgtgtgtgtgtgcgcgcgcgcgccggcacagaacgagaaaaactgctcgttacagaaatcggggtagaaactgctcaggt

SEQ ID NO: 247938 - DNA, 122 bp, Homo sapiens
ctggggccagctcatgaagagtcttgtaaatcataactgggctacctagacatcatcctccggtcactggggaaccactgaagggttaagagcaggggaatggtggttccctaataagatct

SEQ ID NO: 247939 - DNA, 122 bp, Homo sapiens
tgtgagagccgggtgtccagcgtcagtagtaacttggagctgacaagctgcaggctcaaacgctcggcgcacacctgacccagacacaccccccgcccctcgtcctccacgcaggagcaact

SEQ ID NO: 247940 - DNA, 122 bp, Homo sapiens
gcaatattccttgctctgagtctactttgtctgataggcacttcagctttcttttgatcacgcttgcataatacaccttttcccatccttttactcgtagcctgcccgtgtcattgccccag

SEQ ID NO: 247941 - DNA, 122 bp, Homo sapiens
tggaatttaaatagttctatgagatctttgaaagaagtgatcatataagtgagaacagaacgggaatagaatcctgttctatagtcactgggtggtaacttccctaaggctagagacagagt

SEQ ID NO: 247942 - DNA, 122 bp, Homo sapiens
agaggctaaatgccagggggatggagtgagctacgaggaaaccactattccccgacccagcgcctaccacaatctgtttggattaccactgattagtcgtcgagatgctgaggtggtactga

SEQ ID NO: 247943 - DNA, 122 bp, Homo sapiens
gctgcaaaaccacttcgggcaccccaaagcatttccaggcctacatgcgtgagcaaacaccggtccagaccaggaacagcaggagattctttgacccaagagcccattcctccaacagtggc

SEQ ID NO: 247944 - DNA, 122 bp, Homo sapiens
cccttattgatctgaggttttgccttcacataaagtgataaaacatttctgagtctctcccgaccggaactttcagtcaaaccatgtgagggtaacagggagggtgggggcgggggctgcag

SEQ ID NO: 247945 - DNA, 122 bp, Homo sapiens
ctttaaataggcattgagtttgaagatagagcacatgatgaaggaaagtcagaccccagtcggctatttagctttcagttctgaggaacctgtcattgcttgcttctgtaaacccagctaat

SEQ ID NO: 247946 - DNA, 122 bp, Homo sapiens
tggtgtggggtctccggagagggtccaggcgtgagggaagctgggtcaggacctcggagacgtggcctttggaggaggagactggaaccgggtggacccggcagcaggcgggggcgggcgga

SEQ ID NO: 247947 - DNA, 122 bp, Homo sapiens
aaactgccagcctgcgtctgggaccatgtttccttccccgccaccctcagcagatgagggcgggccagccccagggcttacttttatgtccctgtgcacgatgtggttgtcgtgcaagtagc

SEQ ID NO: 247948 - DNA, 122 bp, Homo sapiens
aggctgtggccactacacccacaatcttctgggggccgggtttctcctacaccatagagacgggtccggaaacgggacagaaggcccaccttcctccctccgacgccaccaatgaggccaac

SEQ ID NO: 247949 - DNA, 122 bp, Homo sapiens
tctttagcctgttggtcgctgcaggaagttattccgagcatggagaaggccaggtgtggccgagggtattcggaactacgcaatgatttggagaacctgagctgctgcccaccgcaggccgg

SEQ ID NO: 247950 - DNA, 122 bp, Homo sapiens
taagcaggggtgtttggaaggcgcccgttgcgctgtttgactgcgtggcttcacttggcccgcgtgcatcagcctctctggcgggggattctccccggactccggccagcgccaatcaggtc

SEQ ID NO: 247951 - DNA, 122 bp, Homo sapiens
gcactcctgcttccaaatcacagaactacaactccttcagcagaaattttctaagcttcccgcaccagccagagaccaagattctgcggtgcacatagtcaagggttgctatggagtccaac

SEQ ID NO: 247952 - DNA, 122 bp, Homo sapiens
tatttccctgacgaggacacgcagaaggcaaacgtgcacaggaacagatgttcgacaccacgcaccctcagcgttccgacactagaaccacggtgaggctgcagcgatggctcactcatgtc

SEQ ID NO: 247953 - DNA, 122 bp, Homo sapiens
cttcccgctcagtttctggctctggtaaggaactgaagaggccagccggggtgcctctgacgcctggagagggcaagattcccctggcctctctacgcccggtgcctgatcccccagcccga

SEQ ID NO: 247954 - DNA, 122 bp, Homo sapiens
cagcgcgcgctgctccttgggggcgccctcgcagctggggtgagggcgggtccgagggagcgtccctctcggagacaccctcctcttcaacccaacacgcgctctcagctggccggtgtggc

SEQ ID NO: 247955 - DNA, 122 bp, Homo sapiens
cctagtaacacaacgattataagtaacttgggtaattacggcagacacacaactaccatccgtgccttgatctgccctgctggccccctgggctgagcaagtcaaggtttgggtggggacag

SEQ ID NO: 247956 - DNA, 122 bp, Homo sapiens
ctggtagtatttttctcccagtgctttgttgacaaatgaacaagatttgacactaactagcggtgaaatatggctcccagtactgaggtgactggtcctctctgtttcgatgacacatatta

SEQ ID NO: 247957 - DNA, 122 bp, Homo sapiens
ctttaaacccggcctaagattctcccatcttctttgcaactttgaggaagttacttaccccgctatgccttgttgaaattcacccatatcctcaatccaagcaatttaatagaattaattgg

SEQ ID NO: 247958 - DNA, 122 bp, Homo sapiens
tttaattggaaaaaggctatctcagaagagcagcagtgacactgtctgctcactgaatgtcgtgcgagccgggcgctcggtgtgggccatcgtctcatctggaacaggcagtgagatgtgcg

SEQ ID NO: 247959 - DNA, 122 bp, Homo sapiens
ccagcgggaggagggcggggctttcctttgtcaggggatttgcgccgcgcagcccagactcgcgcgggttccgttcctctccttgcgccctctccgggggcggggcgttcccctctggcccc

SEQ ID NO: 247960 - DNA, 122 bp, Homo sapiens
ttgtttttttgagacgatgtctcactctgtcacccaggttggagtgcagtggcaccatctcggctcactgcaaactctgcctccggattcaagtgatttccagctaatttttgtacttttag

SEQ ID NO: 247961 - DNA, 122 bp, Homo sapiens
agttcactaccacctgattggtttgtgtgactactgaaattagtgcgtgaagcgttagctcgaggaatgccagctgctcccccaattccatttcttaaccttcccaatgttgagaaagatcc

SEQ ID NO: 247962 - DNA, 122 bp, Homo sapiens
tagcaggctctgccttgctggcggactcgtccctccaccggccgcctgtgcgggcctccccgcgtcctgcctctgctggggaccgctgacccctttcaaaactgacccaggctgcctgcacc

SEQ ID NO: 247963 - DNA, 122 bp, Homo sapiens
aaacttgctcatgggacaggcaatgagagtgcagattgcttgccaagtaaaacaaaaatccggtgccaggcacactgtaaaacaaaacaccagtccaaacgcctatcattccctgacagggc

SEQ ID NO: 247964 - DNA, 122 bp, Homo sapiens
catgaagacacgcactctccccctagcaatcccaccccggaattgaggacacagggtccccgcgctcagcccttggtgccagcacttcttggacacctcaaccccctcagctaaacctgaga

SEQ ID NO: 247965 - DNA, 122 bp, Homo sapiens
ggtcccagaaagcaggttcccccaaaactggcttccctagcacggagttaaggctgcagccggctgcctagagagaagggtgggcagggagacaacgcggtgagagcgactgctctgacgca

SEQ ID NO: 247966 - DNA, 122 bp, Homo sapiens
gttggcagcctctttctcagaggcagtggtaccgaaaatattaagaatctgcatatccagcgctatctgaattgggtaactcatcctaaggaaataaatggctaaacatttatgcataagga

SEQ ID NO: 247967 - DNA, 122 bp, Homo sapiens
gctcttggacgttagaaccccgcgaggcagggtgaggggcgccaccgaggaagcgcccaccgggctcccggggctgccaggccccaaattgaggaagttgactgccagatcacactctgttg

SEQ ID NO: 247968 - DNA, 122 bp, Homo sapiens
catgcagctggagagaacaggacgcctccgtaattttaccgggccttttgtgtttctctgcgtccagagctccagttcttctcttcactgctctgcgtcctctgctcttagaggtcaagcca

SEQ ID NO: 247969 - DNA, 122 bp, Homo sapiens
aagcctaagcgctgcggggcgcggggcgggaacgggaggcggtgcctggggccacggggtcgtcccccaggatgagggcgtgtcccagcgcgcgggaccctcggaagtccgcgctgggccgg

SEQ ID NO: 247970 - DNA, 122 bp, Homo sapiens
aggggccccacatccagcatcttccaagtcaacaaggagcagttatattttgcaagaactcgcagtcaagcctcaatccaagttcatgctttttttaagaaaacacctgttgctggaccatt

SEQ ID NO: 247971 - DNA, 122 bp, Homo sapiens
gggcagagctgacttagatggctgagcgaggctgagctgaaaccgccacccggagggccgcgcggggaaggggccgctgccgggaaggcgcgccccagaccactggccctttaggctgaaag

SEQ ID NO: 247972 - DNA, 122 bp, Homo sapiens
aggacccagcttcctcccttccctgagaggtggtttgggcagaggtgggcagcatggaggcggtggcccagggagtccctgtggttgcccgggtggagtgcggggctggcctgccccggtgg

SEQ ID NO: 247973 - DNA, 122 bp, Homo sapiens
ggtcctcgcggcgcatctcccaggtgtcctcgggagagacggaatacaaccctactgaggcgcgctgaacctggccagtccggctgctcgggccccgcccccggcaggcctggcccgggagg

SEQ ID NO: 247974 - DNA, 122 bp, Homo sapiens
cttttcccctctgctaaataaacccaacagggacggtggaagctgctgcttgtcttgccccgctgcctgactttgcccgcccagccacatgcttgaaatcgacacgatttcagccggtggat

SEQ ID NO: 247975 - DNA, 122 bp, Homo sapiens
gaagatgctgtggcttcttcccaaaataccgaacgggaggctctgggtggggatgggagacgtggtcagtgggaagcgtccttccaccctaaggtgcgttgctccgggtggccgctggccaa

SEQ ID NO: 247976 - DNA, 122 bp, Homo sapiens
ccgccaggcctggaatccccgctgctgcgcttcccgccgcagacagctcccggccggccccgcctcccggcatggccccgcctcccagcatggccccgcccccaggcggagccggcgccggg

SEQ ID NO: 247977 - DNA, 122 bp, Homo sapiens
tatgccgcgaggctccctgggaagcgtagttctggaaatgcattaaaaacgccataggctcggaccggaagactactattcccggcgagcattgtgattcgaagcctgccggaaccccgcgg

SEQ ID NO: 247978 - DNA, 122 bp, Homo sapiens
ttcctattttggatttcagctcagcaaaggctttcctgaattaatcactgaagaagcacacggcaccatatttccttcatctggtcactgcagaaagcaaaaatgtttataccagatggtgc

SEQ ID NO: 247979 - DNA, 122 bp, Homo sapiens
tcacggccaccggaggcggggacagggagtccggcgcgggccgggtcgggggatctgcagcggcggcgcgaaggtaactcccccgccagagccgggaaagagccccgagcagaggaggaagg

SEQ ID NO: 247980 - DNA, 122 bp, Homo sapiens
gtctccctccgctgctgtagtaacccggtccgggatctcggtggtgctcctgatgcccctcgcgcacccctgatgccggtcgcccacccctgaagattccgggtgggcgagggaatcgtcag

SEQ ID NO: 247981 - DNA, 122 bp, Homo sapiens
aaagcgcaggcgcaggctgttttgcggttgcctcccggcgcctcttgtgcaggccggggtcgccctctgccgacccagggcgggagcgcgctgagtgaacgtttccaggcctgagggcgggc

SEQ ID NO: 247982 - DNA, 122 bp, Homo sapiens
gtttgtgtattgaatgcagagcctcatcgaagcgttgtgacgaggagagcgatgcactgacggccttaggagtctccctgatataagcaaaagtcagctgggaagagtggatttcaactttg

SEQ ID NO: 247983 - DNA, 122 bp, Homo sapiens
ccgtgctggccagcgcatcaggttcaaggcatttgttgctattggggactacaatggccacgtcggtctgggtgttaagtgctccaaggaggtggccactgccatccgtggagccatcatcc

SEQ ID NO: 247984 - DNA, 122 bp, Homo sapiens
ggtagaaccgctccccggcctgacagacccagggagctgcagctggagcccgttcccgtgcgtgttagtttggacacgaatttagtctaaaaagctgtctggttgtataaacggtgcaaaca

SEQ ID NO: 247985 - DNA, 122 bp, Homo sapiens
ctacagaatctacagtaacacattttcgttcataatgctagtttcgcttttctttttccccgttcactagtcttgctaagaatttatattttactagtgttttcaaacgacgaacttttggc

SEQ ID NO: 247986 - DNA, 122 bp, Homo sapiens
ggaagcccaagtcgatgctgatgttgatgctggtggcggctgtgaccatgtggctccgaccgctggtcacagctcagctctgtcggtggggctgccaggactcctggggctggggtgctgcc

SEQ ID NO: 247987 - DNA, 122 bp, Homo sapiens
tagcaagattgagtatgcccagtaaatgctagatattattatcccactagacactgaaaacggtcccctttcctgggttgtgttgctggccttgccacaggcaatgccgagggcagctgcct

SEQ ID NO: 247988 - DNA, 122 bp, Homo sapiens
acagtgcacatacacatggaaaggcactcagaagtcccaaagtgaaaaactatgtcatggcggaccccattggtatcttctgaataactgtttctcctttttttgcgatcagaactatgatt

SEQ ID NO: 247989 - DNA, 122 bp, Homo sapiens
ggcaacgggatcattagaaacccaaaccttagcaccatgcagtatatccatgtaataaaccggcacacataccccccgaatttaaattaaaaaaaaattacattaaaagataggagtacctc

SEQ ID NO: 247990 - DNA, 122 bp, Homo sapiens
aggggttctcctaggtctatatttctaccaagctccccagggatacaaatgttgttagtccgtgaaccccatttaaagaagcaagtcaaggctcacagactgccatgagcaaagaggtataa

SEQ ID NO: 247991 - DNA, 122 bp, Homo sapiens
gcaaataggaacaaagctttggcctaatgaatttcagacttaatccctagttcccctcaacgtaacttctgaggttataacgtctgcaggcaaagatttccactataccctaaaatctagcc

SEQ ID NO: 247992 - DNA, 122 bp, Homo sapiens
cagggccggcagctgcctaacgggcaaatcttcagtggtatccctgacctacagccccctcggggccagcccaggctggcagggagcctgtatcttgctgtcctgtaccctgccctgtgcta

SEQ ID NO: 247993 - DNA, 122 bp, Homo sapiens
aacccaccagaaggaagaaactcctaacacatccgaacatcagaaggaacagactccagacgtgccaccttaagagctgtaacactcaccacgaggatccgcggcttcattcttgaagtcag

SEQ ID NO: 247994 - DNA, 122 bp, Homo sapiens
gcaaactgtgctctacactaatgacaaagctgttatttctctattttaaaaatttatttacggcagcaataaatgaaagcctatcatatctctctagttttccaataggtatccagtaagta

SEQ ID NO: 247995 - DNA, 122 bp, Homo sapiens
ttcccatgagctcaaagctttggattctgtcacttgcaaagggtcaggcctgatcccttgcgggttcttgagaagtgagtaagacttccagcgccccggcccagactgcgacgacccagact

SEQ ID NO: 247996 - DNA, 122 bp, Homo sapiens
aagatgctgtgtgagggaaaataatactccaatcctccaaagatgaaattagggttaaaacgctggaaaaataccttttctgtgtaacttaacctgagatagttttccatttacaattctct

SEQ ID NO: 247997 - DNA, 122 bp, Homo sapiens
gggagaggcggagcttgggtccctgtagaagccagaggcgcagtctggactgtagtttcccgggagagacgaaagcaggaacgagagcggagcggagcacagtccgccgagcacaagctcca

SEQ ID NO: 247998 - DNA, 122 bp, Homo sapiens
tttaagggttaaaggacaaaaatgcatgggagccctgctttgggcctggcatgtagtaaccgctcaacaaatcatagctgcaggccgggtgcggtggctcacgcctgtaatcccagcacttt

SEQ ID NO: 247999 - DNA, 122 bp, Homo sapiens
aacgatgattgggttcaggaggtgagactcggagcagagcccaggagacaggtcttagggcggggctaaggtcagaccctgagaagggctcaggaggcggggccagggtggggcgttgatat

SEQ ID NO: 248000 - DNA, 122 bp, Homo sapiens
acaagtcaaacagagtcacccaaacaagcgtggcacgcaaacctttagagttcagcaaaccgagggctgagttaccaaaccgtgtcctttcagggcatgcaaaaggcttttcctgctctgct

SEQ ID NO: 248001 - DNA, 122 bp, Homo sapiens
tcctttatccgtcgccatccatggcaggccgagcctgcgggggctacttcgcccgcagcccgaggaatatggagcccgcaatgcctgctggcccaaaactagcagagccgttcgagccaagg

SEQ ID NO: 248002 - DNA, 122 bp, Homo sapiens
atgagaaaagatgagaaaacgtacactatgttgacacaaatgtgccttcccctctagaaccgacatctcctgaaagcttttctgttaaacttccctccagttccccaccattaagcacaaaa

SEQ ID NO: 248003 - DNA, 122 bp, Homo sapiens
gcattcatggcagcagtgcccgagagaggggtggctgttctggatgccagggggaagcggcgggacttttaaagagggcaggttactgagtaacctggaagcctctgtcagtctcatctgct

SEQ ID NO: 248004 - DNA, 122 bp, Homo sapiens
cgacggggcggccccaagagggcgcaggggcggcaggcgcggtggcctcggggtggggggcgcggacggccttacccccgggcccggtggagacggtgacctgcgcgtaggtggttcccgcg

SEQ ID NO: 248005 - DNA, 122 bp, Homo sapiens
ggacagggaagcctgcatccagctgagagaccttgagcaaccacgtcctcctctgagctccgcgtttgccgtgtgcaaagtgaaggggtaggccgaccccgcagggcccttcttgcgctcct

SEQ ID NO: 248006 - DNA, 122 bp, Homo sapiens
ccgggagccacgtccggggaggggccaggtgagcggcagacccggcacgcaggtgggggccggcggggtccgtggccaggtaaggcgggcggcggcgggagggagcgcgcagggaggaggcc

SEQ ID NO: 248007 - DNA, 122 bp, Homo sapiens
tcccaaatccctccccctttcctacctcggcccctgtggtcactgaccaccgtggttctgcgcccttccaccagaccctgggcttggggaccagatgaccccagccttgcgcacagcattta

SEQ ID NO: 248008 - DNA, 122 bp, Homo sapiens
tggtttgagttcctcctctgcggcttatgccgggtgcatggaggggggcgggggtgcacgcgcgagggacagagaagtcccttcccggtgtaacgggctcttcaacgcccacttgcaggcgc

SEQ ID NO: 248009 - DNA, 122 bp, Homo sapiens
cacggatacacaccctacacaattagtaactcccttctactaagcatccagagaaatacacggttctaaagactgattacaaaatcgtctttcccttttcccacccctttctcaactcctcc

SEQ ID NO: 248010 - DNA, 122 bp, Homo sapiens
cccggtgggtctttgccaggaaaacctgcatggaaaaggaggcttggccttcgaggaagacggcctgtgtcctggcagactgggtgtgtctgctccaggctggcctctcctcatggctgctg

SEQ ID NO: 248011 - DNA, 122 bp, Homo sapiens
agattgagcgtggatttctgttctccaccaactctgcagcaagggccctgccagaggcgtcgcttcctgtcatctcctcttcccgctcccaagtagaggcacctaaacagagattagatttc

SEQ ID NO: 248012 - DNA, 122 bp, Homo sapiens
actccaaagcatcctgcaaaaggcatttcagggaccttggtgggttatcggcggcgctcacgtgacatgagtcaagacaggccatgtgtcctcacgcagcagcagatacacaaacaacccaa

SEQ ID NO: 248013 - DNA, 122 bp, Homo sapiens
agcacgcggggtttcccggaactgcttccagggactccgagctacggggcaatcgcttggcgaggcggcctgacaggcagctcagacgaccagtagtatccaggcaaaacggaccacgccgg

SEQ ID NO: 248014 - DNA, 122 bp, Homo sapiens
gactccagggagggcggccagtttctacctagtcctgaaagcagcactaagttaaatgctcgcgggggtggggcaggagggtgggaaacccaaggctgagaatactgtttgtttagagcgtg

SEQ ID NO: 248015 - DNA, 122 bp, Homo sapiens
cgtggcaggttgtcctcacagctggggaaatcttcagctctcctgcacccagtgtgctgacggcaggttcagctcaatgcattctcatttcatttctgtgtgtcactaaatgagagtcttaa

SEQ ID NO: 248016 - DNA, 122 bp, Homo sapiens
actaacttgcattcccatcagcagtgtataactgttctcttttcaccacatccacaccaacgtctgttgtcttttgatttttaatagtggccattatggctgcagtgaggtgatatctcatt

SEQ ID NO: 248017 - DNA, 122 bp, Homo sapiens
tcactctatgatttccataaactacagcaaaggccatttttgaacttcttttactgcacacgttaacagtaggaattaaaatattttttgaataaatgaaagaatggaatacctgaatttgt

SEQ ID NO: 248018 - DNA, 122 bp, Homo sapiens
cttggcttggccttaaaggtcaaggtctttgattatcagagaagagtgttaagggtgttacgaactggagaaattgtgtgagcaaaatcacagaggtggcaaagtaaatgatgtgttcagga

SEQ ID NO: 248019 - DNA, 122 bp, Homo sapiens
gaatttttgtaaatatacttaaatgccttacgttccctaaaggggactatttcaaacagacgcaaatacttgactgtgtcttctaaaggacttgtttactcaattcgagagatgaagagaga

SEQ ID NO: 248020 - DNA, 122 bp, Homo sapiens
cgggggagccctagagctcacggtcaattcacaggcagaaggaagagtcagagagaggggcggccccaaggcttcactttatgtaggcattgaagggctaacaaatacatggccaataaagc

SEQ ID NO: 248021 - DNA, 122 bp, Homo sapiens
tccgcgtgagttctcatcctcagtggcacccacgttgtgtccctgcggtgacagcagccacgtagacctgacgaccgaaagagcagtcaggagaaagaaaggtcactttggccgttgatggc

SEQ ID NO: 248022 - DNA, 122 bp, Homo sapiens
tgataagctatttctgtaacgaatactgtaatatattattctaagtcatcataccattttcggttacagagcaaaatataatgcttaccatagacttcttcgtattcttgtaatatgggttc

SEQ ID NO: 248023 - DNA, 122 bp, Homo sapiens
aagctccctgagcatgaggcggtggcatactttctgcgccccggctctcccagatgcatgcgaggcactgcgagccgactctttactatgtaaactccccgaacttatccgagccgcagttt

SEQ ID NO: 248024 - DNA, 122 bp, Homo sapiens
ttatctctgccatgaggtccgaggtctacaaccccgcgggtagcttctcaacagcgaacacgagcaggaagctcccggtttcaggttcggagacccagccctaccaccgacgcgtccggacg

SEQ ID NO: 248025 - DNA, 122 bp, Homo sapiens
aaaagccaaaacaacacagccaaatgcccccagcaggggagcgccgcaggaggctaacgacgccagcattttcacacaccaacgctgcacccagcaaagcagctgacagcgaggggactccc

SEQ ID NO: 248026 - DNA, 122 bp, Homo sapiens
gaggactttttctgaatttccaggctgtgttttccaaacctccagggatggggcagagagcgtgttcctgatgacaaggccacagcaactccctcaatatgcttggagggagctccctctga

SEQ ID NO: 248027 - DNA, 122 bp, Homo sapiens
acctgaacagcacataagttcattttcctaagacactcacaagttgctccttctttctcacgacctgcagtaccactggtagttttgtgctaagctagtgaaggaaagcataccaaagcttt

SEQ ID NO: 248028 - DNA, 122 bp, Homo sapiens
tttgcaaactgtgaagtgaggtcaggggttagggtctttctgcttctcctgcaggccctccggacccgggcgcctcccagccgctgctggcctggctgctactgccgctgctgctcctcctc

SEQ ID NO: 248029 - DNA, 122 bp, Homo sapiens
agttgacaatctgcacaatccttctgcccaaagccatgaatgtcttctcgtgtaagtgcgcgtgggtgggtgcgtgcgtgcgtgccacgcctgcagagacttaagctttgggatacagagtg

SEQ ID NO: 248030 - DNA, 122 bp, Homo sapiens
aattggcaacttagttatttttccaattggtaactgaattatcctggcagttattgttaccgtgtaacccacagtgaagttttcagtgcctgaactgcagcatctaacccaagataagattg

SEQ ID NO: 248031 - DNA, 122 bp, Homo sapiens
ttgagagaaaagaacatttctagtttgttcactactccttgcccagtgtctcagataaagcgtaacacttcatagatgttaaaaaaatacaatgaataaataaataaatgggtaaaattagg

SEQ ID NO: 248032 - DNA, 122 bp, Homo sapiens
ccgcctaatttttgtatttttagtagagatggggtttcaccatatcggccaggctggtctcgaactcctgacctcgtgatccgtttgaactaactgttgcctctgccctagagtgcttttcc

SEQ ID NO: 248033 - DNA, 122 bp, Homo sapiens
ggttgaggtggggcccgtctcctgtacacccctgcggaaaagcctgctgggccccagagccggcgtccgctgcctctgcagctgcgttacctcgttcctgcctgttctgctgggccccaaag

SEQ ID NO: 248034 - DNA, 122 bp, Homo sapiens
taattaggcaggagtctctggctcggcccccaacggcggttttcaggtggctgagagacccgccgccttccgagcgcgagtgatgaaaaggggagggaggccgcgccgggcgggccggccgc

SEQ ID NO: 248035 - DNA, 122 bp, Homo sapiens
cccatcctctcaatctcgcactcttcttaaataggagatggaccaccctgcctcgtggcacggagtggtgtttacattgcaatacttgactgtgtaatacatctggcatttttgggcaggat

SEQ ID NO: 248036 - DNA, 122 bp, Homo sapiens
actcgataacagaaccacttactggcgattcacaggaggggaccgggcggcagggcggggcggggcctgcggggcgcggggccgcggcgcggagccggcgcagcgattgggttcacccgggg

SEQ ID NO: 248037 - DNA, 122 bp, Homo sapiens
acacttggatatttacacagaaatttgtcaggcagttgtttggtaagaggaccagagaaacgcactgggctggagtctgtgacagagtacagccttgagagaagtacgtggggcatggcaag

SEQ ID NO: 248038 - DNA, 122 bp, Homo sapiens
tgatactcagattcccaaacatttctgttactttccaccaccaccaccccccccaccccccggcttctgacagcctctgcaaaagcaccagcactgcaaatgcctgtttggcttccatcctt

SEQ ID NO: 248039 - DNA, 122 bp, Homo sapiens
cttcttttttttgtggctgtggacacctttcaacattgcctttttggcctttaaagccttcgctttgtcttcggctttagaaggggcaggagcttccttcttcgctttcggcgccatcttgt

SEQ ID NO: 248040 - DNA, 122 bp, Homo sapiens
acagacccccgtgcagttctctggggctgaggtcctcggtaccccaggaggggaggcaggcgattttaacaagtcattctaaggacagcacggctggcaagaggtggccactgctgttgccc

SEQ ID NO: 248041 - DNA, 122 bp, Homo sapiens
ccctgaaagtagcccgggggcattcgaacatggctctagacccctgaatagggtttggagcggagatgtgcctggggagaagagatcgcagtgctgtgtatgaagctttgggcacgtgctca

SEQ ID NO: 248042 - DNA, 122 bp, Homo sapiens
aaaaatgacccctcatcctcacaggacatcacctctgagctggcccagcagatgtatcttcgtaggctgtcccattattctggactggacgcttctgatggtgtgatgtgtggtgagattag

SEQ ID NO: 248043 - DNA, 122 bp, Homo sapiens
taagggctgtttcctgtaaggcggagataaaaccaataagcgcggtttacttcttaggcgcgagcatcaatctcagccgcccatccttcctttagagctaatttagagttattgcacctcga

SEQ ID NO: 248044 - DNA, 122 bp, Homo sapiens
gtctagaccagggctgctctttccacttgccctgtgttctttccccaggggcatgactgtcgccacacgcctctgtgtacatgtgtgcagagcagacaggctacaaagcagagatcgacaga

SEQ ID NO: 248045 - DNA, 122 bp, Homo sapiens
gcggagcgctgagaaaatgcgaggttggggtggctaagacagactgtctgtcagcaactccgcccggaggagagtgagccggggaagggggcggagagcgggctgcggggcgggttgccagc

SEQ ID NO: 248046 - DNA, 122 bp, Homo sapiens
ggtagctaagtcaagaaaagagtccagtccacttggctgctcccgcggttgcgcgcatctcggcctctgcctcaggacaggtccacaggcccaagaatgggggagaaagcagtgaagcaaag

SEQ ID NO: 248047 - DNA, 122 bp, Homo sapiens
cctgcccttgtcctcaaagccacaggacgcctaattgctatttttgggtttcagctgaaacgccacgggtctgggggaatagcgagggtgtgttacattttcggtcttccggtcagccggaa

SEQ ID NO: 248048 - DNA, 122 bp, Homo sapiens
cctgagggctgagcaggagttctccaggtagagggatggagggggcttgctggggatagacgaacagtgtttttaaagttcccaggcaagagagaggccctggaaccttgaaaacagtatgt

SEQ ID NO: 248049 - DNA, 122 bp, Homo sapiens
ggaaaacatctgaggaagtgaggatttgtctgccctgaccacatcctgtgcagccaggcccggctccctccagggctggtgcaatgcagtggcgcccaccagcggccgccctccggggcccg

SEQ ID NO: 248050 - DNA, 122 bp, Homo sapiens
tttctagtgattaggtgggtggctctgaaaagagcctttggagtcaagcagccggcgactcgagcgagcgagcgccaggtcccggcagggactcacttggagctggtgtacttggtgaccgc

SEQ ID NO: 248051 - DNA, 122 bp, Homo sapiens
agattcggggtctcagttggaagttgaggaagggcaacgtctccttccttacagttttcccggaactgtaggaagtcagagggaattttatcctgcacatctgttgcttgacaaagaacttc

SEQ ID NO: 248052 - DNA, 122 bp, Homo sapiens
tctgattggctgaaaggacgctacgctagcctgggataggcattgggccaaggatgcgcccggcccactcgtgggggaggagaccaaggcgccgcactctgggtttgtttacacaggctctt

SEQ ID NO: 248053 - DNA, 122 bp, Homo sapiens
ttccagctgtctgactttttatgtcagacaatgtgttaaatatgccctttccttatttaccgcacctctaaaagaataggcagctccattgtgagtgtgtctattattttaggaaattatag

SEQ ID NO: 248054 - DNA, 122 bp, Homo sapiens
actgccggtcgccctggcccttcccaaacgttgtcaccccgcctcccaacttcgcaattgcgattcccagcccaggaggtgtacagattgaatgactcgctacttggtgggtggaggggttg

SEQ ID NO: 248055 - DNA, 122 bp, Homo sapiens
tgttccgagatgggctggtccacaacgtacggaagttggcatcaatgaagatgggctctgcgcctgtgattctggccatagcttccaggtctcgataatgccagtggttcctttctggattg

SEQ ID NO: 248056 - DNA, 122 bp, Homo sapiens
gaatcctcagagtataaacccgaggcatcagttcgtagtccaggttttctgacgtactcacggcaccagtgaaatggtcaatcgcaaacggcacatgatttaaatttgcgatactgtatgtc

SEQ ID NO: 248057 - DNA, 122 bp, Homo sapiens
ggcggagggggagcgccccaggctgttgctgggcacacaggtgtacttccccgagtcctccggcttcacccggaagatgatcagggtcccatcgattaggatgcgcaccctcagcttcaggt

SEQ ID NO: 248058 - DNA, 122 bp, Homo sapiens
cacgggggacacactgaggtcaagacgggtggacaagcccaaaaggcaggttcatctgaccgcagctctgtgggtaaacgcctgtgcccactgtcgctgtgcagtacgataacacgacttct

SEQ ID NO: 248059 - DNA, 122 bp, Homo sapiens
tcctaagtctctgagtttctctctcctcctgccatcctgagttctgccatccttaggggccgccaagacctctcttttcgttcctctcccgcctcagaccagcagccttttattttagatca

SEQ ID NO: 248060 - DNA, 122 bp, Homo sapiens
ggctgcaagaggacaggacccacacctaaggcggggcaggacagatggagcctgggacttcgaaggggcattgggtggttcaagccctcaaggaagattgctattttttttttttttttttt

SEQ ID NO: 248061 - DNA, 122 bp, Homo sapiens
ggggcctctgacgcggtccccgccccaccgtagcgacgccgcggtccgccggatctccagcgctcagtccgcgccgcaggtggtgcttgtctgcagagtcatgacctgtaagtggcgcggcc

SEQ ID NO: 248062 - DNA, 122 bp, Homo sapiens
actcctcttttcttccctcattccttttttctggcaggctgtgcccatgtccccttgcatcgggtatgactgacatatttctctcattcaccgccggtctttgtccttctttctcataacca

SEQ ID NO: 248063 - DNA, 122 bp, Homo sapiens
acctctaagagcttctgggcaaagaagggagacagaccagtgcatcagtcattcagataccgcaagataaatgcaatgaaaatgctgcaggctcctgcttacagcccttttcccttctctga

SEQ ID NO: 248064 - DNA, 122 bp, Homo sapiens
atggaaaacagagcccataatggtgagcaggcatcaaaatgagagcactccgcaccccagcgttttgctttggaggtgccccgctgattgttgcaggctgtttcgtgaggatcaatgagcgg

SEQ ID NO: 248065 - DNA, 122 bp, Homo sapiens
gtggcctacgaggcggtggacggcgaggaccgcgggcggcatgtggtggatggcatcagccgtgagcactccagctgggacctggtgggcctggagaagtggacggagtaccgggtgtgggt

SEQ ID NO: 248066 - DNA, 122 bp, Homo sapiens
gcagatggctccggcctcttttaaaaactctatttggtgcgtgcccacggtgctgcgtcccgtcagacatacctgtatagatctctctatttatatatatatatatataaaaggttctttag

SEQ ID NO: 248067 - DNA, 122 bp, Homo sapiens
aggagctatgcatacacaccatgctgaatatgaaagatccagaaagtatgtgagacacatcgacaatgtaaactatacacagttaaggggtaggacggcacagtggcagaaatatacactga

SEQ ID NO: 248068 - DNA, 122 bp, Homo sapiens
gctaccagggggaacagtgtcacaggcagagggaacagcaagtgtgaagtccctgaggcacgtgatctaaactgaattattccttctccccatcctctgaaagccccaggaaagagttggtc

SEQ ID NO: 248069 - DNA, 122 bp, Homo sapiens
gcatagagatccatagacatttgtaatgcgaaccctacgtggatctgctcattctaacttcgcccaaccctcttcgttcttagcctgtgatcctgcactattcttgtcccagcaggtagctc

SEQ ID NO: 248070 - DNA, 122 bp, Homo sapiens
caaactgtgagcgtccttggaattctgtggcttcccgaggccaagaggctgtccgctgctcggctctctcaagtgtctcagcggacaaaaatcgcgcagaaactcctatggcaggaggaaag

SEQ ID NO: 248071 - DNA, 122 bp, Homo sapiens
tggagaaggtagaggagcgagactatgccaaacaatgcaaaataaataggagattttactcgtcacccagttgtatggtagtgaaaacctaaatgaattgcagtcagccaaaaattgctttt

SEQ ID NO: 248072 - DNA, 122 bp, Homo sapiens
tcgctggatgcaggctcgggggagcccccgatggactaccacgaggatgacaagcgcttccgcagggaggagtacgagggcaacctcctggaggcgggcctggagctggagcgggacgagga

SEQ ID NO: 248073 - DNA, 122 bp, Homo sapiens
gctcctggggcctcatgggggcagagcctcccctgggcctgcagagagtcctgttagcagcgacgtccccccgccgcggggtcctgtcagcccggcagtgtcttctcagtgtcttcacctga

SEQ ID NO: 248074 - DNA, 122 bp, Homo sapiens
tccctcgtgctggaagccaaccagtggtgatgactctgtgtgccactccgcctcctacagcgcggatcctctgcgtgtgtcctcgcaagacaagctcgatgaaatggccgagtccagtcaag

SEQ ID NO: 248075 - DNA, 122 bp, Homo sapiens
cctctccgcttccgcttccttgccttgctccgcccccgggccgctttttttcatcttccgcggcggatcagggactaagaggtggagcttcccagagaatacaaaaattcggaatttctatt

SEQ ID NO: 248076 - DNA, 122 bp, Homo sapiens
tgttctcaacgcagcactgagtgcaggccgtctggctggagggacggggagtctgcggcacgtgtgggcagcctggggcctcctgcgggagggagccggcaactcgggtggtccaggggcag

SEQ ID NO: 248077 - DNA, 122 bp, Homo sapiens
ggtggcggtgaggatgggaggatctgccttgtgatggtccttgtaacagacatttgatcccgagcaatatcttctagacctctcggcattcatggacactttatcggtgctatctcattctt

SEQ ID NO: 248078 - DNA, 122 bp, Homo sapiens
ggctctgccccgatgtcgttattacggccgtttgcagcctccgtgccagggccgggggtgcggttcgggacgcgggatcctaggtcgggtcctgccccgcccatgtggcgccggcgtctgtg

SEQ ID NO: 248079 - DNA, 122 bp, Homo sapiens
cggcttcagccctgagactctgcaggtgaaggctcggggggtgtggacgggaccccacaccgcgccgcccgccgactcacttcttgcggacttcttccagcaactgctgtttcaggcggttg

SEQ ID NO: 248080 - DNA, 122 bp, Homo sapiens
tctgggcgcctcatcctcatccgccgtccacaagcggtccctgccacaaaggacacagggcgcgcttgttgctcagatccctggccccactggttggaccttgccctacacacacgtgtacc

SEQ ID NO: 248081 - DNA, 122 bp, Homo sapiens
cagttgtaaaccgagatgctagtagaacctggctctacttggtattgtttgaactcaatacgatgatgtgtcagggttcctggtaggtgcctgcatggagtgagcactcaccaagacatgca

SEQ ID NO: 248082 - DNA, 122 bp, Homo sapiens
ccacccccaccttggcggtcttgatgatctcggtgaagttgtccatgatggacttaatgtcgtccttcagccgcttgttgtaggactgcagcagcgtctccttgctctggggcagggctctc

SEQ ID NO: 248083 - DNA, 122 bp, Homo sapiens
atatagacagtagacctataacatgtcaggaggcgataaatactgtgaagaaattaactccggttatgggaacagcgagtggtagtggtcagggtgagggctgtttgagatgaggtggtcaa

SEQ ID NO: 248084 - DNA, 122 bp, Homo sapiens
tacccacaaaaataaaaaaataaaatgacacttgtaatacttcttcccagctgtgaccaccggggctgggtgtgcatgtctgtcaagtcctttcttgcacactcacacgtacatgtggctat

SEQ ID NO: 248085 - DNA, 122 bp, Homo sapiens
ggcctgcgggcctaaccttgccaccttggcacagctgccactccagagagatggctatgccggtccgcgtggcgcgcagggccggatggtttggcgctctctgcgaggcccgcaaggctgca

SEQ ID NO: 248086 - DNA, 122 bp, Homo sapiens
tggcaggggacatggttaggaaggcccctgatccacagtgggatttgccctgttggctcccgggggttaacttggggaaggggtccataggcaaaaaactgtattggggtgttgtgttggag

SEQ ID NO: 248087 - DNA, 122 bp, Homo sapiens
tgcaaaggggctttctccctcagaattgccagagtcccagccaggtagccccataaagaacgcctagctttcctaaggctcttcatgatgaatccagttacatcgtcctatcatagctaagg

SEQ ID NO: 248088 - DNA, 122 bp, Homo sapiens
acgcccacccccgggatcccctccggcccgcacgcggttgccgcgcggcctgacgggaaacgtagtttccggggccaagagagcagccccgcccgggacttgtttatcgttgcaaagagggg

SEQ ID NO: 248089 - DNA, 122 bp, Homo sapiens
gctcagaaatgccagcttgctaattgaagggatgtggatccatgaggctcatttgaattccgaagcctctaagagtccatggatttttattttattgggccccaacaggttttgtcttgcat

SEQ ID NO: 248090 - DNA, 122 bp, Homo sapiens
aatctcatttttccactttcattccactttccatttccccattgtgatgcagaaagctgccgtggcgtgccaagacacatccagggtgggctgtttggggggaatggttttaattttaagcc

SEQ ID NO: 248091 - DNA, 122 bp, Homo sapiens
ggtttctgtgttgtcagagcagaccacaccccagcccaccaaccacagtcatctcgtccacgtacgcttcgtcaggcccagggccggtcctgggaccttgagcacagaccccgagcgccagc

SEQ ID NO: 248092 - DNA, 122 bp, Homo sapiens
tatctccttcaacatgtcaaaggtccactgaaaactcttgctaagaacaccacaaaatcacgttttgtcatcctcatccgatggcaacaaatacaggttggatcaagtggtggatgagccgg

SEQ ID NO: 248093 - DNA, 122 bp, Homo sapiens
tcgtttagagctgctgttttccttttgtcagattcctcctccccgatcagtctgagtacacgatcagaactgctcagagagcaggaagcacattgatttcagcttgttctgtccacagacag

SEQ ID NO: 248094 - DNA, 122 bp, Homo sapiens
agggtgggcggggtcctctgggtcaggtctggggccggggccggggctggggtctggggccgcccggccgcgtcctccccgcccggcgtccttgccggaacgcggcccagcctccgcggcgg

SEQ ID NO: 248095 - DNA, 122 bp, Homo sapiens
gaggaccccgtctgtcctaatcccggcatgacccttaccagcgcagcccggaagctgacgcgtcctccctggcctcacagcagcatagagcgcggcaatcccctctggcagcacccacaggc

SEQ ID NO: 248096 - DNA, 122 bp, Homo sapiens
tttccgtgtgtgtgttttcccctttttttgtatttaaataaatagtcttgatggcctgtacgttcccaggctgctcttaacagggtagtggagacatgtttgaactgtaacatgctacggcc

SEQ ID NO: 248097 - DNA, 122 bp, Homo sapiens
gcgtgctcggctccccccgccctccccagtcgctgcccggggctcagcgaccgccgaccccgagagctgcagccttcacccagtggaaagctctagggcccggctcccacgctccccacttt

SEQ ID NO: 248098 - DNA, 122 bp, Homo sapiens
ggtttggagattctgatgtcatttcctgtggatacagacccagcagtgggcttgctggaccgtcgggcagctctgtttttagcactggaggaaactgctctcccttgcggctggacggactc

SEQ ID NO: 248099 - DNA, 122 bp, Homo sapiens
gaaaaatcagcaaagcaaaaacaagaggatacctatgagagaggatggtggagggagtgtcgcacagggagagcccacacagcagggcacaggtgagccgctggccctgcaccagaagcagg

SEQ ID NO: 248100 - DNA, 122 bp, Homo sapiens
agcgcgcaggatccaggcactcgtgcgtgtaacggcacggcccgcacacgccccctacgccgacacctgtggcccccgcgctcacctgcctctgcccaggcggtgctggagggctggcccgc

SEQ ID NO: 248101 - DNA, 122 bp, Homo sapiens
gctcgccgagaggcggccagtctggtccaggatcctggtggagctgcggcgaggccgcctcgtcagcacccgcgtcctctgagcacgtccagtgtccccagcctggcgatcaggtagcgaac

SEQ ID NO: 248102 - DNA, 122 bp, Homo sapiens
ccagggagtgtgctttatcacactggaggtatcaatatagagcataattctctaacctggcgtattaaaagctatttaacaccaactttcagctgtgaaaaaacaccatgcagctaaaaatg

SEQ ID NO: 248103 - DNA, 122 bp, Homo sapiens
ccgtgcaggcgcggagacccccgcagggcccgcggctcccccagcctcacaggccacacccgcgggctccagcccaggcccgcccctgcacaccgaatgcggtgaccttgtggctatttggg

SEQ ID NO: 248104 - DNA, 122 bp, Homo sapiens
ggaaattagaaatgaacacaatgaagaaagtaacatcatttataaccccaccacctagaccgaaatacccacgaccactttggagcacactcttctaagctttcttccaaaatggacaactt

SEQ ID NO: 248105 - DNA, 122 bp, Homo sapiens
ccttcactcttagtgcctacttgacattcgagcctttcttgtttctttcttctgtccccccgcgataaatccactgggacagaaaggagaaaaacgtgaactttctggctgccctgcttggg

SEQ ID NO: 248106 - DNA, 122 bp, Homo sapiens
cagctggcctgtaattggcgcagtcggcccaaggggcggctgttcaggcgcgggtgcgcgcgcagctgctgtggccctgcttggtgcgcccgctgtcaccgccatggctgccccgtgtttgc

SEQ ID NO: 248107 - DNA, 122 bp, Homo sapiens
ggccgccatccagtggtcctgtggactcctctgtgtgcctctagatggcagcacagagatcggagtttgactcttagaggcaggtccacttccaaggaaagaactttccttttttttttttt

SEQ ID NO: 248108 - DNA, 122 bp, Homo sapiens
caccctgctcccggaaagtcctgcctccacagacaccccgtgcaggccgggacctgcacccgaggaggcacacaccgagcagtccctggtttctgctgctgccctgggggcggggccggagt

SEQ ID NO: 248109 - DNA, 122 bp, Homo sapiens
gttgcatagggcctcaacaaggagaaacaagtgtccattctgtcatcacaggtggtatcacgatctgtctgtgcagacagaattgtgagtttctggttctggggattctagtagagaaccat

SEQ ID NO: 248110 - DNA, 122 bp, Homo sapiens
aaaattgagaattgatataaagtaaaaggccaggaccgggggtgcctcctgactcacactcgggacctgtttttctccgggtttctagtttcgtgagtgtagggaccatgtctgtcctgttc

SEQ ID NO: 248111 - DNA, 122 bp, Homo sapiens
cagagtggggaggggaaacaagctgaggagaccacacaggtggagtaaataatgttaatacgggagcattatcactagggcatttcctcatggataaatgtctcaaataccaaaggatgcct

SEQ ID NO: 248112 - DNA, 122 bp, Homo sapiens
tttggtgactcacctgtgaaagaatgaacggaactgttttcctcctggctctaccacaaacgagggatccccggaaactcactgaacctttcatgcccaatgtctttaaagctttcaaaaga

SEQ ID NO: 248113 - DNA, 122 bp, Homo sapiens
agggcccatgcctgccatgcacgaagagctgctttaggccgcggggcccagcagccgacccggccccacagctgcaagcagcagcgagccatggccaccgcagtggccctcttggcccggga

SEQ ID NO: 248114 - DNA, 122 bp, Homo sapiens
gcaagaccttttcccccttctccatggacttgatctggctaggggtcagcgactggaactcggcctcaggcccctcccctcgggaccgctcagcattgatcttccagaatgacgcttcctcc

SEQ ID NO: 248115 - DNA, 122 bp, Homo sapiens
gtgtgtgtgcttgcatctgcaaaccgtgcgtcccgtgcacagaatacgtccggtgcaaaacgtgtcctgtgcacttgtcctatgtaaacgtgtgtgtccgtgtgcaaaacatgcatcctgtg

SEQ ID NO: 248116 - DNA, 122 bp, Homo sapiens
ctgtggatgaaccacacttggaattccgactcctgcggtgctcccaggtggaggaagtggcgaagggggcactgaatgtagccttgggacattccaaacgggcgatcaccacagagaaagtc

SEQ ID NO: 248117 - DNA, 122 bp, Homo sapiens
cctgcaaggggagaaggaaggttagtgggaggcgaccccaaggaacatcctgagggcccccgagtgcctgccatgtgcctacaataggctctcagtaagtgcacacgactgagagcgccacg

SEQ ID NO: 248118 - DNA, 122 bp, Homo sapiens
ttccaaagcatattgtcttcattgctcagctcaaatgctgccttctccaggaaggctctccgaggagctctgtgcaagcagacaaaaacacggatacaggggcaccagaaggggcatctctc

SEQ ID NO: 248119 - DNA, 122 bp, Homo sapiens
ggggcgtgagccattgggcagcttcggggtcctggggccgggaccccaattcgtgagccccggaggaaacctctcccggcctttccagttcggtccactggggagggtggtgcaccgcgcac

SEQ ID NO: 248120 - DNA, 122 bp, Homo sapiens
cggcgcggctcccccggcccgcctctgcgtcagggacgcggaaaccccgtaggagcagggcgggcggggaaagcgaggtttaactaactccgcagctatattcttccgccgcgaggtaaaga

SEQ ID NO: 248121 - DNA, 122 bp, Homo sapiens
gcaaccatcaccgtaatctaactttgagcattttcatcaccccaaaaagaaattctgagccgggcacagtggctcatgccagtcatccaagcactttgggaggccgaagtgggagtgagagg

SEQ ID NO: 248122 - DNA, 122 bp, Homo sapiens
ctaggctgccccccaagatgtatcctccgaagaagccggtcaggtagaggggatgcctgccgtggttgtaggcggggaaggagatgctgctcaggttgagcgttttgttcacctgccaggcg

SEQ ID NO: 248123 - DNA, 122 bp, Homo sapiens
ttgtccagctgcagttggtcaagtccctgcagttcttcagacaagcggtggttactctgccgaagctcctggatataatcacaagctttggatagaatcccacctttactctgcaagataag

SEQ ID NO: 248124 - DNA, 122 bp, Homo sapiens
atgagggagtgtgcagataggggcccctgggtgtgtttgtgcctgtagtccttctaggcccgtttgctcagggctctgactgaccaccatgcccgaattgtctgacagcatctacttacctg

SEQ ID NO: 248125 - DNA, 122 bp, Homo sapiens
cccccggagctgggcgccgaagcccgggagccagcagcgccccgtccgcccgccctcgcgcgctttctggccgccctcggccccggggcatccactgcgtccccccggacgccgccggagtc

SEQ ID NO: 248126 - DNA, 122 bp, Homo sapiens
aactgtgacctctgcattttttcaaaagaggctaccgcaaggggctgtccttggagaagtcgttcctggcaccccagggctgccatatctgggctcggcaagacttctaaggccctcgggtc

SEQ ID NO: 248127 - DNA, 122 bp, Homo sapiens
ccagaggctaccagggcttctaattcaggcggttggcaggacagctgcaagaagggaacccgcagctgcaggaagagaacctggcggccacacagttcccagcgcccacgacccggggctca

SEQ ID NO: 248128 - DNA, 122 bp, Homo sapiens
gggccgcggcgcccttccggtcccgccagtggtgccacccggccgccccgccgtcgcgtgcgcgggtcgccatggcatgctgcaggcgcctccttcccggcacctgctcagctgctcctccc

SEQ ID NO: 248129 - DNA, 122 bp, Homo sapiens
tgtgctccacctgtgagcactttacaacacgactgggcaggccagggcagacgctggcctcgctccttcccggacagctgcgggggagaacgcccctgtgtggtgcaggctgctgcggggga

SEQ ID NO: 248130 - DNA, 122 bp, Homo sapiens
tccccaggaatgcgagcgcccctttaaaagcgcgcggctcctccgccttgccagccgctgcgcccgagctggcctgcgagttcagggctcctgtcgctctccaggagcaacctctactccgg

SEQ ID NO: 248131 - DNA, 122 bp, Homo sapiens
tgactgatttctatccactgaggaaggttaggattcaacctcagcctcactttgtgcagccgccatgttagacatgccgccacagaccacggcaccgttgtccctcccgaaagtgctgtcct

SEQ ID NO: 248132 - DNA, 122 bp, Homo sapiens
tccgtacctattggctacgatcaagcgcgcagttaattttgataggtccaggagggtgtacgtcccggagaaatgattttgaatcccagtaccccccctacttttctttatgtagttggcgc

SEQ ID NO: 248133 - DNA, 122 bp, Homo sapiens
atcagataacaggcctggcggggagatcagataagaggtccatttattttggggccttttcgaatcctggccgcccccaccccgcagacgagaatggggagacaggagggagtgtgacgcct

SEQ ID NO: 248134 - DNA, 122 bp, Homo sapiens
cgacggaccagatctgcggctccgcgcttccctgttggcctaacatcttaaaaccagaggcgggcttcctggtgccgagacgtcactccgccgcggccctccccagccctctccgcctccgc

SEQ ID NO: 248135 - DNA, 122 bp, Homo sapiens
tgcgcgccgcgtgggttaatatggggaggggtcccccgctggtccaggactctgctgggacgcgcagggaatctcggcgccgctcgcgtgcccgcgggccctcgcgctgggcgtgcacagcc

SEQ ID NO: 248136 - DNA, 122 bp, Homo sapiens
tgggggattctcccaggaactgggagcctcttgggacttgcgccttctgggctttgagagcgggtctttccccatggaaaccccacttgggagtgaaatgctcctcacccctgggcccccat

SEQ ID NO: 248137 - DNA, 122 bp, Homo sapiens
gaaggaagcgtgtggtttatatgcgcgcaggaagcgtgtggtttatatgcgcgcaggaagcgtgtggtgtatatgcgcgcaggaagcgtgtggtgtatatgcgtgcaggaagcgtgtggttt

SEQ ID NO: 248138 - DNA, 122 bp, Homo sapiens
ggcatgtgtgttagcgtgtgcatgtgggccatggggcctcacagcatgtgtgtgcacgcccgggcgtgtgcgtgtgtgtgtcccccacccccaggccggccccacccgtgcgtgtgaactgc

SEQ ID NO: 248139 - DNA, 122 bp, Homo sapiens
ccatatctaaaatgacctttgagcacagtaagaggcagcagagaatgttggaccgagccccgacccctggctgtctgcccctgcttgggagtcaggagaccaatcccagcccctgttgcttt

SEQ ID NO: 248140 - DNA, 122 bp, Homo sapiens
aattaattggagagcttaacctaagcaacctctaaagcagggcgtgaccctgaggaaaagcgaatggaaattctgtgaggggaccagttccaagaaccaaccacagcccttccatgaaaagg

SEQ ID NO: 248141 - DNA, 122 bp, Homo sapiens
cgcagcctgactcgcagccgcagccatagccccagccccagccagagccgcagccgcagccgcagccgcagccagagcccctcgccatcacccgcaagagagaagctgaccaggccggccgc

SEQ ID NO: 248142 - DNA, 122 bp, Homo sapiens
acaaagcagcggctgccgtctggtcccttgcgggtgggtctgacaggtagtggccagaggcgacctctgggggccgggctgtgtccccatgctgacctgggtgggctattatcctattatct

SEQ ID NO: 248143 - DNA, 122 bp, Homo sapiens
cactgcaaaggagatgcacatggtgactgggatcagggtgtagagggggttaatgtgcagcgtttcagactagaagagagaattcacagaaacattcacgagattaggcttgcatttcctgt

SEQ ID NO: 248144 - DNA, 122 bp, Homo sapiens
attattatttagctctcaccactggctgcttgatatggatggcctactgtttatcaatgccgataaccagagttttggtggttgttgataccatatatgtcccccttaatcttgtaatcttg

SEQ ID NO: 248145 - DNA, 122 bp, Homo sapiens
ggcctcacactcagggaatcgctgggtgtgtacagcgtggccgaggtgcggacttcaacacgctgtctccatcacccaccacagccaaggtctgtttctggagctctgcaacgtgagtatct

SEQ ID NO: 248146 - DNA, 122 bp, Homo sapiens
gatggagcgaaagagaacgtagtccacggagcgcacggagccctgcagctccagcaggcacgagtcctccgacgggctagagcccccagggaggtcaccaatggctgacagcaccagagacc

SEQ ID NO: 248147 - DNA, 122 bp, Homo sapiens
gtttctaagacaaccctgggaaccactgtgatgggagaaaccgctcccgcctcgcgcatgcgcattggctgagccgactggcgctccactcctgacagataggctgcgtcccctttaaatat

SEQ ID NO: 248148 - DNA, 122 bp, Homo sapiens
tcagtgtggtccagcgtgggtgcgagattcccaaggaaatgctcagcaccgctggcaaagcgaaactcgttccacaaagcaacgtgttttaccaggtcaagctgaacctcaggggaatttga

SEQ ID NO: 248149 - DNA, 122 bp, Homo sapiens
tcggagcctccgggttcttctctggaaaacgggcttgctgggggctgatgacatcagatgcgcgctgcgcaggcccccgcagacaccgccaaaaagcggggacggtagccttcgtcttcaac

SEQ ID NO: 248150 - DNA, 122 bp, Homo sapiens
ccggggctaacagtaccctctacgactcccacaggtctctctttgtgtccagatggatggcgactgtgagtcagcaacgccagccaagacttcctcgcctttaccgtggcattggggcagtt

SEQ ID NO: 248151 - DNA, 122 bp, Homo sapiens
atggcccagcctgcacccttgagcctcgacaccctcctgtctggcttagcttgttgtgtgcggttttggaccacataggggaggaagggaggagccgcgttgtctctgggggtgtgggttgc

SEQ ID NO: 248152 - DNA, 122 bp, Homo sapiens
ctccctctctttttggggttttagcggttaatccctgcagtggcaggtccacctaggagccgggatcttgggtcctttgtctttcaggtgatgcagatcgtgctggggatcttgagtgcagt

SEQ ID NO: 248153 - DNA, 122 bp, Homo sapiens
gcggctcgctggacgcctccatgggcagcgtctgggacttgcggcccggactcgagagaacgcccccagaccagcgcttccgcttccacgtcctgcccctagcggcctggcgcatggggcgg

SEQ ID NO: 248154 - DNA, 122 bp, Homo sapiens
tttacaacatggaggcaggtgccgtctctagtgaggctgctacagtccgacagaaactgacgtcagcagtaaataataaaatttagaatacataattaactatagagtttattggaacacaa

SEQ ID NO: 248155 - DNA, 122 bp, Homo sapiens
cgggaccggggtggggtccagacccgggcaggggagccgagcccaaggcaagcaggcgggcgggcattacctgctgcggggggcgcctctccgccgtcaccgggcgcgccggagccccgggc

SEQ ID NO: 248156 - DNA, 122 bp, Homo sapiens
tgtttctactatgagccaggcactgcctgagcacctgggtcccaccagtgaacaaatagacgacagtccccgccccgggggactagccttttcctagcaggacacagaaccccaaacactca

SEQ ID NO: 248157 - DNA, 122 bp, Homo sapiens
ggtcccgggccggctggagccaagcgcgggttttcgtcactcggagcccggattgaacagcgcgcgtgggtttcccgcagccctggcgcagacgcgtgggctccgtggcgatgcggggtgag

SEQ ID NO: 248158 - DNA, 122 bp, Homo sapiens
ccttcattttttcttaatgctgccaagcctggtgtccttatctttacaatgggctaataacgcccgcctgagggttggtgtcctggggattaaatgaggtcatactgggaacataaagtgac

SEQ ID NO: 248159 - DNA, 122 bp, Homo sapiens
gaaacaacggagatggtggtgaagaaggctctgggttcaaattccagttctcctttagggcgaaggggtgactgtggctaggtttgtcagttaccttatctataaaatgcacaggaccaggc

SEQ ID NO: 248160 - DNA, 122 bp, Homo sapiens
gagggagtgagggacgcggtgctgagcgatggggaagagaagcatgccaggaaggcgcagcgtctctgggcacccagcatggggcctggtatatgcacacatttcccctcattgaactctca

SEQ ID NO: 248161 - DNA, 122 bp, Homo sapiens
tgaccttgtgatccacccgcctcggcctcccaaagtgctgggattacaggcgtgagccaccgcacccggcccaaaattaggctttctaaaggactgatggcatcctgctgccagatgccaca

SEQ ID NO: 248162 - DNA, 122 bp, Homo sapiens
tggccaacatagtgaagccctgtctctagtaaaaatacaaaaattagctaggcgtggtggcgtgcgcctataatcccagatactaggaggccaaggcacaacaatcacttgaacccaggagg

SEQ ID NO: 248163 - DNA, 122 bp, Homo sapiens
gcctgggctgccatcttgccccccgacgcaggggctggcccagcggcccagttcccggggcgctttcctgaacctcgcgagatctgatcacagcctccttgtccctgagatggctatggggc

SEQ ID NO: 248164 - DNA, 122 bp, Homo sapiens
ggcagatgaaagggcttcagtgggaacctctgagagcattttcctgttccccctatcaaccgcccccagtgataacatctgtgaagccagccattactcaataaactgcaaacttgtctact

SEQ ID NO: 248165 - DNA, 122 bp, Homo sapiens
ctcaggtggggagggcattgctacgaggaagagaagggctctgaaagcgcggcagtgttccgctgcaggcctaggggtgagccgcttttgatgactcactgaacctcgtctaatgggcgcaa

SEQ ID NO: 248166 - DNA, 122 bp, Homo sapiens
gtgtccaaagtcatgcagctggcaaatggcagaacacggatatgttaagcactcggtcatcgagtgtctctgagcctcatatcaaccccaaggtgtaggcatcattattcctactttgccaa

SEQ ID NO: 248167 - DNA, 122 bp, Homo sapiens
gggaagcaggcaggggctgagcctgccaggcctgcccgagggagggggctgtgggcccctcgccattcactgctaagcctggatccgggcgcctttgtgccaagaacaaaacccgggggatc

SEQ ID NO: 248168 - DNA, 122 bp, Homo sapiens
gcgagcgctgaagccattcatgattttggtgacgttattccaggagtgggcgagggagggcggggcctctcggggccaagccccgcccccgcccctataaatacggcttcccgggctctttg

SEQ ID NO: 248169 - DNA, 122 bp, Homo sapiens
ggctgctgggaccatgacttggcagctggttcccattcttgaccattcttttgtgtacgtcgtatgtatgtgtgttttagataattttgaacatgagtcagggaaatgactacagcaagtaa

SEQ ID NO: 248170 - DNA, 122 bp, Homo sapiens
cctgcacagaatgctgctgcaccagagagtcctgggccattagcagggccctcccggagccggagaagtgaggggccaagtccactccaggccaggcgcaagcccgggagcagagctcgggc

SEQ ID NO: 248171 - DNA, 122 bp, Homo sapiens
gttgatccagcaaattggtcatttggtgaattgattttcagcccactggccagctgggtgcgtgatattacaacaaatcaatcttggaagccagatgtcattcaaatgaggagaagaaatga

SEQ ID NO: 248172 - DNA, 122 bp, Homo sapiens
ttcaacagctttgtccaggagacacttgagaatttgcatttctaacaaactcccaggtgacgctaacgctgctggtcagaggaccacgttacagtagctatgtatgttacttaatccttaca

SEQ ID NO: 248173 - DNA, 122 bp, Homo sapiens
atctctcaccttgctactttctcggtagccgtttctgttgtccctggattgggggctcggcgttcgctgtccctgggcaccaacccttttaaagacagtaacgttgtaggaaatcaaattag

SEQ ID NO: 248174 - DNA, 122 bp, Homo sapiens
ggggacagaggtggcgctggcagagctcacgggggacagaggtggcgctggcagagttcacgggggacagaggtggcgctggcagagttcacgggggacagaggtggcgctggcagagttca

SEQ ID NO: 248175 - DNA, 122 bp, Homo sapiens
ggacttttttgaaatatctgtgctgatttctcttaaactctcctgcataaagaaaattaccgagcaagtgttctttttctttcatgggtggtcataaaagtgcctacacatcagtattcaca

SEQ ID NO: 248176 - DNA, 122 bp, Homo sapiens
tgaacccagaaggcagaggttgcagtgagccaagatcgtaccactgcactccagcctgggcgacagagcaagactccatctcggaaaaagaaagtaaagaaagaaaagaaagggaaagggaa

SEQ ID NO: 248177 - DNA, 122 bp, Homo sapiens
gaggcggggtgcctcagtttcttcactctaccacaggggcgtggccgaaggcgtcagggacgtggggtgcgggcggggctgtcccagcccctctcagctgttggcggactggctggctggtg

SEQ ID NO: 248178 - DNA, 122 bp, Homo sapiens
ccttcccttatttctaaactcttgactctcgggcattagacatcaagctgtgaggaagtacgtgaaatcacagcattgaattctcttgctgggaggaggaaatctttaatgtccaactgggt

SEQ ID NO: 248179 - DNA, 122 bp, Homo sapiens
agctgcagctgccgagaggaggagaacgctgaggtcggtcggaccaacggacgcgctgaccgctgccaactgcagctcgcgctgcctcctgctcgcgccgtgccactaaggtagtccgcctt

SEQ ID NO: 248180 - DNA, 122 bp, Homo sapiens
cttttcctaactcccactctaggctattgtttgcatgtctacctacttttagccattatgcgagaaaagaaaaaaatgaccatagaaaatgccaccatgaggtgcccaaatttcaaataata

SEQ ID NO: 248181 - DNA, 122 bp, Homo sapiens
gggctgtttaggggctggagtggaagggggcagattgggacggggttggggagagctaggcgatacaagacaggagagcaagaacaagctgtgtgtttgtcctgtgtgtccacttgcctcct

SEQ ID NO: 248182 - DNA, 122 bp, Homo sapiens
cactcacggtcattcgtcctcagtcacttgaccctctaggccccaccttccaagcccacacgccctaagagtctcccatggcagaacgggtaggggaagggatgcagagagggaagaaaagc

SEQ ID NO: 248183 - DNA, 122 bp, Homo sapiens
cccgaccccagggcaaaccagcagataaaccccttttaggcgaaaattacacaaaaacggcggcggcggcggggcctcctctgctcaggcactgccgcgttggcggccgaaaaaagagggtc

SEQ ID NO: 248184 - DNA, 122 bp, Homo sapiens
gcacgtgctgccggcactgtcttcttgggagcacctgttcctttggaggtgaagggttaacgtgaggattctttcagaagaggcagcctcaccacgtgctggtcagccccacccgagaccag

SEQ ID NO: 248185 - DNA, 122 bp, Homo sapiens
gctccgggggatgcggcacctctaacctgcaccagcagggctccttctacaactacgggccgaaagccaggaccaaagcgtgtgtctcactagaaatgaaaagaaggtggaaggagaaaaga

SEQ ID NO: 248186 - DNA, 122 bp, Homo sapiens
cgctgtacggagcgcgcccgccggagtcacagccccctcctgccgcgacctcgcctgacccggctgtccgggcacccggaggcaactaaggccgccccctgcccagatgccggcctgcctct

SEQ ID NO: 248187 - DNA, 122 bp, Homo sapiens
tcctgtttttcttttgagacgcagtctcccaggctgcagtgcagtggctcactgcaacctcggcttcccgggttcaagcgattctcctgcctcagcctcccgagtacctgggattacaggcg

SEQ ID NO: 248188 - DNA, 122 bp, Homo sapiens
agtgcttgaaagaggaaccctgatatttctgggcgggaacaaccccggctgagaggagagcgctgggattccagctgccaggtttccagctgggggctctaattcaggctaagtttcctcat

SEQ ID NO: 248189 - DNA, 122 bp, Homo sapiens
caaaccaccgcctaccccgttcgtggaaaaatcgtcttccacgaaacctcttcctggtgccgaaaaggttggagtaccgctgctctagtccatttccccgggttcagacccaagacgtgtcc

SEQ ID NO: 248190 - DNA, 122 bp, Homo sapiens
tcttttttgaagatcttaaggtagatttcttcatcaggccttttaatcagcagctcctggcggggtgggggtacatgatacaacccctccatccctgaactcagctctccaactcattttac

SEQ ID NO: 248191 - DNA, 122 bp, Homo sapiens
gagccaggagcgctgggccttggaaaggggcgcatgtctccgaggcttacgctgagggtgcgctggtcgggtttcacggagctggcacccttcagcccggtgcactgtgctgtgtattactc

SEQ ID NO: 248192 - DNA, 122 bp, Homo sapiens
accacaaacctccgggagcagccaggccttcctgcccgtggttttgcccttcccgccttccggccgccccagcatcccaggcaaatcagccaaggcacctgctggtgtccagcccccacccc

SEQ ID NO: 248193 - DNA, 122 bp, Homo sapiens
ggtgaggggcccctgcttggtggaggtgccagggagccgccatggaggtgtgcaggtgagcgtgagcgggcccgggtgcctggtgtgggtgttgcaggcagggcgggtgctgcggggcacgt

SEQ ID NO: 248194 - DNA, 122 bp, Homo sapiens
tggacacgaggagggacagagcaggcagatgggggctctgcttccttcggacagggacttcgtccaacaggcgagagctttgggtattcatccactgcagaaagtgagaagtccaactgagg

SEQ ID NO: 248195 - DNA, 122 bp, Homo sapiens
ctctcttctctcgggtctcgcccatccctggcctcagctgcgcgcggtttcctggaaacccggaagtgaatcatggggcgtgaactcgcaagcgcagtttcctgaagacccggaagccgatc

SEQ ID NO: 248196 - DNA, 122 bp, Homo sapiens
ttcagtggctgcgacgccacaggacctgtgaggagagactgcaccctgaaggtctggcggcgagcggatcctaaacaaagtgaggcctaggagcgccgtcctgaaggcactgctctccccag

SEQ ID NO: 248197 - DNA, 122 bp, Homo sapiens
cacttttcccactgcagcgcacccacacaatccagacagttttggcgcatgtgaagggcgcgatggtcccttcattatctggaaggacacccagagtggcaaatgccagataaccacgaata

SEQ ID NO: 248198 - DNA, 122 bp, Homo sapiens
ccgcccgcggcgctccagctggcgcttatccccttcttgcacgaacagcagttccacagacgccccacaggactccgggagccccacgccagccaggaatctgtccgagtctgcgggcaccc

SEQ ID NO: 248199 - DNA, 122 bp, Homo sapiens
ctgcggggccgagaggggcaggtgctggaagtcctctcagatttggaaggtgtcatcacccgcgggagccccgcgcagcccaggcttcctggaaagtggaggaggaggagccttgggggtcc

SEQ ID NO: 248200 - DNA, 122 bp, Homo sapiens
ataaaccctgacaaactaccttgtgcagaagctggtatacagtaagtccttgataaatgccggtactgctctccaacagccttcctgtaagcatgctgaggtcgctgtgcctaaatctctcc

SEQ ID NO: 248201 - DNA, 122 bp, Homo sapiens
ggtgcccaactcggcaccaagtcctcatctggcttctgcaagtggggaagttgcaatgaacgatgtgtgggagtgtgggtgaatgtgggcgtgcataggagcgcctgcccctgtgaatgtgt

SEQ ID NO: 248202 - DNA, 122 bp, Homo sapiens
gggcgaccccgcgccgcttggtcaaaggaggtccgaggccctgcaggaacagcccacagccggagcgagctgcaggtcactccactgcctgtgtccacctgcgacaggtgcgcccgcgcaag

SEQ ID NO: 248203 - DNA, 122 bp, Homo sapiens
cacccacagctcaacgcctcggtgagcgccttccagagacgctttgtggttgatgttcggcgctgtgaggagctggagaagaccttcagtgagttggtcccaggcctacattccaggcaggc

SEQ ID NO: 248204 - DNA, 122 bp, Homo sapiens
aacattaagacactttttcacatttttttaaacctcattggctatcattagtgtattttacgcaggcccagcactgcttcaggccaacaatgtgaaccaacagattcacaattgtgtgtgct

SEQ ID NO: 248205 - DNA, 122 bp, Homo sapiens
ggaggtcgggggaagcccagctcctctgtgtgatttggtgtaactctgtcaacctcccagcgtcagtgttttaatcctgtaaaatggggataatagtgactaccccgtggtggtgtgaagat

SEQ ID NO: 248206 - DNA, 122 bp, Homo sapiens
cctttattcctgtaggagacatctccctgggagcctctagtcaactactccaaatgtggacgagctgctatctcagtttgctgcccagttatcatcttaagattcttttgacctctttcctg

SEQ ID NO: 248207 - DNA, 122 bp, Homo sapiens
cagggaccggggtgagtcagcaaagctctgggcaggctccaaaatgggcctgactgggtacgcaccagcagcagacgcgcctcgagggagcgcataaaacctggcaaagccaaagtgcttta

SEQ ID NO: 248208 - DNA, 122 bp, Homo sapiens
acccaagaatttggattcccggtcccacaggaatgtctagccacaaattctcaacagaagcgtatgcagagtgtatcattagatggcgggaaggggctttcggcagccagggtggaggagct

SEQ ID NO: 248209 - DNA, 122 bp, Homo sapiens
ctttccttaacttcaagctactcttaaatttgagggtctggaccaaaagaagaggaatatcgggttgaagtcaagataactgataaggagagagtaatgactaactccaaagatggcttcat

SEQ ID NO: 248210 - DNA, 122 bp, Homo sapiens
cctttgctggcttcctggtgctggaggcagaggccagctgcccgcatgctatctcccgtgcgtgttccctacctcttcacacctcccacctgcaatgaggatggggctgggactggcaagac

SEQ ID NO: 248211 - DNA, 122 bp, Homo sapiens
agacggagtttcgctcttgttgcctaggctgaagtgcaaaatggcgtgatctcggctcaccgcaacctctgcctcccaggttcaagcgattctcctgcctcagcctcccaagtagtgggatt

SEQ ID NO: 248212 - DNA, 122 bp, Homo sapiens
cagcagacgacccaggaccagacacacacacgctctgtttgtgcagcttctgtgttttgtcgtggtggctctgctgggtctcggggtggccttgggatgggggtgaccctggtgcactgtgg

SEQ ID NO: 248213 - DNA, 122 bp, Homo sapiens
cctgaagttaccacccctctggtcaaattcctgtactcaaatattaaattgagacagaatcggagtcagagtccagaaattctttggagtgcaaactttttttttttttttttttaaactca

SEQ ID NO: 248214 - DNA, 122 bp, Homo sapiens
ctgcaatggtaggttaaaaagaaataggcccatttaaacccacatctcattaaatggcgccggttttcaactggccttggtttacacctggccccctggcatgagatacatgcatttaaaag

SEQ ID NO: 248215 - DNA, 122 bp, Homo sapiens
catgctccaccacctgggcgcccagctacaggcgccgggcaacttccaagctggctggcgcgcccagcctcgcagaaccagggctagatgtcgccgtgactgaggccaagtcaggcggtctg

SEQ ID NO: 248216 - DNA, 122 bp, Homo sapiens
tccagatgagaatggcatcttcagggacccgctggtagtggggccaggtctccacagggccggtccagtccttcctacccacccgggccctgcggccaggcggggccgggaggggcggatgc

SEQ ID NO: 248217 - DNA, 122 bp, Homo sapiens
ccggggtcgcgcgcttggctgtgaacagggtcttgaggttcagagtccgctttccaggcgcgtcttgatcttctccccttcccaggggcacctgccccttctgttctctccttctctcttct

SEQ ID NO: 248218 - DNA, 122 bp, Homo sapiens
aaagatgctacttttgaaatatacttgagagagctcagtaaaatatgcttagccactcttcgtggcagatttgctggtatgatgtggaaattacagtggacccttgaaacttgaggatctga

SEQ ID NO: 248219 - DNA, 122 bp, Homo sapiens
caacccgcgaaattggccccacagctccggaggcccgctacggggtgggggcggggggcgcggttagtgggaggtatctccagaccgctgatgaataccatccccaccgtctcaaggcctga

SEQ ID NO: 248220 - DNA, 122 bp, Homo sapiens
ggaggaaggggctcgaaacctccatcatcgcagagtctgaatagcagtggccccgccatgcgcccacgtagcggcgcctacgtagccacgcccccacaccccgtcctggccactctccctcc

SEQ ID NO: 248221 - DNA, 122 bp, Homo sapiens
acggccaccatggcgtattaggggcagcagtgcctgcggcagcattggcctttgcagcggcggcagcagcaccaggctctgcagcggcaacccccagcggcttaagccatggcgtgagtacc

SEQ ID NO: 248222 - DNA, 122 bp, Homo sapiens
gacgttgaggagtgagtgggccctgtcccccggggaggctcctgggcggggccaggggggcgtgtgtctgggagaaaggagggtggagaagagcaaagaggacccccggctgcctgactgca

SEQ ID NO: 248223 - DNA, 122 bp, Homo sapiens
cgctccggcgctggaaggggctgtcggcgaagactggtgggggccgggcggggcgcggggcgatgcggagaaggcggggcccgcgggggcagccccgggcacgggccagcatcgccacctgc

SEQ ID NO: 248224 - DNA, 122 bp, Homo sapiens
gccctgagcgtggcctctgcgggtgtctccagacccggccttgcaacaactggctggggtcgagcgcccccacccgctctgtgaaatccatccgggggtctgcacaccgaggccggggagtg

SEQ ID NO: 248225 - DNA, 122 bp, Homo sapiens
cacagaatgcatctccatctgaattgtcgtgtgatttttgtgatagagaagagaatgaggcgcaagcgagagtccatgttcctgttaagccctggccatccttctcatccacggtgctgcct

SEQ ID NO: 248226 - DNA, 122 bp, Homo sapiens
gcctaccaattttattatggcagcaaccggtgcacaaatcccacttatactctcatcatccggggcaagatccgcctccgccaggcctcctggatcatccgagggggcacggaagccgacta

SEQ ID NO: 248227 - DNA, 122 bp, Homo sapiens
gggactgtttgaccatctgtaaaataaaaggagctggacttggttcacaggtctccacagcgcaggactgtgatcaggaaagagttaatggaggccaggatctgcctcaggaaggcgagggt

SEQ ID NO: 248228 - DNA, 122 bp, Homo sapiens
gcagctctagagatgtcagcagaagggaattctgaacccctgtttatccttgagcattcccgttggtagtcttcacattgcactcctgatctttatatgtctcttctaaatgttaagcctct

SEQ ID NO: 248229 - DNA, 122 bp, Homo sapiens
gcaactctacggggaaagcccagctgcggacaagccagacttgtggtcttctgccaggggcggcaggccctatcccctctctgggcctcagttccactccccgcaccccgtaaaaagattgg

SEQ ID NO: 248230 - DNA, 122 bp, Homo sapiens
gaagtcatgctatctaactacctttgccttgtatgattccccacctcaaaaagaagataccgtgaagcctacttttgttattccttaaccctgtagccaataagctcactcaacttagacaa

SEQ ID NO: 248231 - DNA, 122 bp, Homo sapiens
tgattaagagccgacccctaccctgaggtgccagatgcaggtggctaggaaggtgccaggcgaggggcacctggggcgaaggctgttcccagcgcatgaaagcgtttcagcgccagatgtct

SEQ ID NO: 248232 - DNA, 122 bp, Homo sapiens
acaggagcagggccagactcctagggtctccagggagggaccaggctgcccagagggtgacggacaggttggtcactggaccctgggcttgtcaggtgtgcacacccgtacacatatacatg

SEQ ID NO: 248233 - DNA, 122 bp, Homo sapiens
acaaaaaacttcaagagccaatttaaaaagctattcagggatcacagaaaagggaagagacgctggtcctcttggaatcttgagagccatccttgaggggctgcaatttggggaactagact

SEQ ID NO: 248234 - DNA, 122 bp, Homo sapiens
aaaaaaaaaaaaagtgcagtgtagctgaatggattttgaaaaaataaagatccaactatacgttgtctacaagagactcactttacctaaaaagatatgcacagactaaaagtgaagggttg

SEQ ID NO: 248235 - DNA, 122 bp, Homo sapiens
ggcagccaggccggccttgccctcgccctaaatgacccttcccgtctcctacacacgctgcgtctttcagaggcgggggtgcctgcgtggtaactaattggcttcctctttctttctttctt

SEQ ID NO: 248236 - DNA, 122 bp, Homo sapiens
gagagaaagggaagctgaggccctagtgggcagggctttgcccagggtggccctgggtagcgagcgcggccgggcgggcgccgtggcctcaggggccctccccgggctgggcacccccacgc

SEQ ID NO: 248237 - DNA, 122 bp, Homo sapiens
aataactttctagtattgacattatagtgattcctgttaccctgtaacattaccacaaagcgtttttaagcaaagatcttttttttttcttatttgcttcagaaatgtctagggtcaccacc

SEQ ID NO: 248238 - DNA, 122 bp, Homo sapiens
gctcgcccaggatgctctcctcgtcgaacatcttgccctggtagcggtgctcgtagtagtcgtggatgcgctgccgggtgtcgggcgggagcttgtgaaaggacatgtactgctccacctgc

SEQ ID NO: 248239 - DNA, 122 bp, Homo sapiens
ctcggggcagggccagggtagtgatgggggctgtggcttctctataaggacatgccccaacgtgacaacagcttggagaggggtgggtactggagaagaccagccccttcgccaaacagcct

SEQ ID NO: 248240 - DNA, 122 bp, Homo sapiens
gcaggtgcccatgaagtcgaagcggcggccatcgaaggtggtgtagtggggatctcccgacgcctggcaggtggtagagcccacggccacgcagcccaagctgccaccggatggccggcagg

SEQ ID NO: 248241 - DNA, 122 bp, Homo sapiens
ccttaaaccaaactgcaatcgaagagacagcatcggcccgtcctgacacaccctgcttctcggaaggacggattgggtcagagccaggccaggacatcacaattccaatcccagccctgact

SEQ ID NO: 248242 - DNA, 122 bp, Homo sapiens
aggacccagcaggcggcggcaggcggcagttgtgtagatcgctgagagactacgagggtccggttcagttttaattctgtctctaatctctgcaacagccgcgcttcccgggtcccgcggct

SEQ ID NO: 248243 - DNA, 122 bp, Homo sapiens
tggggtcaccaggaaagcaaagacaccatggtggctgggccggggctgtccagtgggcaccgagaagctgaagtgctgcagcagggaggtgaagaagaggaagagctccatgcgggccaggg

SEQ ID NO: 248244 - DNA, 122 bp, Homo sapiens
aataaagtagctggtctttaaaaagagaaactcagatacttccttggttttctgtttgaacggttaatgaacaaaactaattgagatgagttgtataggacaatacaatattcctcagcagc

SEQ ID NO: 248245 - DNA, 122 bp, Homo sapiens
agccaggaccctgggaatcagagaaggcctcctggagaaaaagcggctgtacttgagaggcgccttagtggtggtggaaggagatgaatccaaccagaaggcacagcatcagcaacaaaggc

SEQ ID NO: 248246 - DNA, 122 bp, Homo sapiens
ctccatgctgtcataagagccgttgagctaaagcacagaggcccgccctgggcgcagattcgggcttgcggcaggctcttggtatttggcagctgttgcgagcttgctttgagtggtttttg

SEQ ID NO: 248247 - DNA, 122 bp, Homo sapiens
gaagactctggagccagatggttctgcaaattctccaaacaggagtcacgttaagaagcacgagtgggcacaaaaactgtttttcaagacacaatttcaatttggcttgtggaaactggata

SEQ ID NO: 248248 - DNA, 122 bp, Homo sapiens
tcatcagagtaaaaaaaggaactatgaaaacctcgaccaactgtcctatgacaacaagcgcggacccaaggtatatatgcatggacgtgcacgccacccacggctagggagccctggcctcg

SEQ ID NO: 248249 - DNA, 122 bp, Homo sapiens
ccaggcgttttacaaacactgtaaagtttccttctcacaggtaatcagtccaaaaaccagcgtgccaaagcgtttccccagggctctgtccggactctgaagcactgcataaaggggtctgt

SEQ ID NO: 248250 - DNA, 122 bp, Homo sapiens
gccaacggccggaaagggggagcctggctgtggcctgtggtcgggaggccccaccagcaacgcctggagcccaggcgggcgtttctgagaaatcgatggtctcaggtggtggctggtaataa

SEQ ID NO: 248251 - DNA, 122 bp, Homo sapiens
acccgcatttgccctcaccccctcctcaagaggctcagcaactcagggcctggccgggcacggtcacgcctcctcacaagcagtcagtgaaggatggtcctttcagtctgtgccctggactt

SEQ ID NO: 248252 - DNA, 122 bp, Homo sapiens
gccaggagcagcaagggatggcttgggactctaagggtgaataggcatggccaaaggccccggcagaggacctgcccatgaccacggtcaccaatactgtctgttcactacaccgtggcctc

SEQ ID NO: 248253 - DNA, 122 bp, Homo sapiens
cttcagcatgttagcctgggggcacaaaactccgcccgagataagggggtgcctttgttgcgtgtgggaacctgccgggacctggctgtgctctgggcattccccaggtttagaacagaggc

SEQ ID NO: 248254 - DNA, 122 bp, Homo sapiens
accctggcgaggttctgggagctccggtagggtagggctggatgacgcctcctagagtctcggagcagccgctcccgcaccctcccggcacgcctgcccatgggaatgcgagcggggtctac

SEQ ID NO: 248255 - DNA, 122 bp, Homo sapiens
cagacgttccacactccgggtctgtttcccatctagccctgagggcagatataatccacccgggacccagcgaggccaggaaagcaagacagacaggcttaattttactgcagaaacgggtt

SEQ ID NO: 248256 - DNA, 122 bp, Homo sapiens
ctccccctcccctcacgcccgcgacctgcgagctcccggagctggggaaggagcggacgccgcagagtccccgtccctggccatgcaagccggcctggcgaccccttcctccgctcccggat

SEQ ID NO: 248257 - DNA, 122 bp, Homo sapiens
ggagagtttggaaggagcttctgtgggggccgcagagaccccaagactgcttccctcacacggccagtgggtggggcctgctcaagtccaccccagcagccccaggcctggcgttcagaggt

SEQ ID NO: 248258 - DNA, 122 bp, Homo sapiens
tcagttccctctaagaacatctgacccctgagtgtccatgtcgggagggttacggtggcccgaggtgtcagggcccagcaataggaaccccggacccaccctctgcccctcccaaccctgag

SEQ ID NO: 248259 - DNA, 122 bp, Homo sapiens
agcgcgggggcgggacgcggggcctccgacctcgggtccagtcctctgacctcggcctcacgtctgtggagtgaagatttgagaccgtgggacagtactgctggaagtagagaggaggagtc

SEQ ID NO: 248260 - DNA, 122 bp, Homo sapiens
ccgcaggtgggggcggagtgccattcagaaaattccagaaaagccctaccccaactcggacggcaacgctcacacccgtgggtagcaactggcacaaacagccagcgtgtctggggcacggg

SEQ ID NO: 248261 - DNA, 122 bp, Homo sapiens
caaacaggcagcgtggcgctgaggggcacaggtttgctggggggcgtgagccgggagcatcgccagcagcaggctcgcccccctgcgagggcgcgcacggattcgctcgccaccaagagcag

SEQ ID NO: 248262 - DNA, 122 bp, Homo sapiens
gagagagggaaatgcttcgccttgtatcagtacctttttatagctggaagaaaagaacatcgacgagtcattttgtcaaggtttcaggagagcagaccaaagaaaacatcgtctggagcctc

SEQ ID NO: 248263 - DNA, 122 bp, Homo sapiens
ggacacatttcgaaggtctttcatttcctgtttgaggaacagaaagatttattggctacacgaggaccataatgaactctcttttggctgggaaaagtataacttttgtgtcacctcctcgt

SEQ ID NO: 248264 - DNA, 122 bp, Homo sapiens
tggaggcgtcctcccctcctcgggcctgtttctcgtggggcggtgcagccccgcacgtcccgtgctgtggctctgactgctggccttgtcctgcaggtggcctgtgagtacggcatggtgca

SEQ ID NO: 248265 - DNA, 122 bp, Homo sapiens
gcgcggacggcagctcgggactcacaaggactccaggtgcttgagctgctgcagctgctgcgcgtcgtgtcgccgccgcttctgctcccgacgtcgctgcagctcctgctccggcggctcac

SEQ ID NO: 248266 - DNA, 122 bp, Homo sapiens
ccaccggtgtctctttccaaggcttgtttgatttctcctggactctggctcttggctgaccgagctgtgtgattcagctcatggccctagaccacatcctcccagtaaacagtgaacacgga

SEQ ID NO: 248267 - DNA, 122 bp, Homo sapiens
ctcccaggcctccagggggtttgagccggtgtgccacctccagggccgactccaccttgacgatgcagatgtcagacacgtcctcatcctcatcctcatcctcttcctcggctttcagctcc

SEQ ID NO: 248268 - DNA, 122 bp, Homo sapiens
ccttttggctgttgtgaataatgctgctaggaacatgggtgtgccaatgcctgttccaaacgctgcttttaatgatctcgggtggatacgcagaagcggcactgacagagcatccccttttc

SEQ ID NO: 248269 - DNA, 122 bp, Homo sapiens
gagacgccgccgggaggttttcgggcaagtctgcgagaagacggcgggccctgaactgggcgggtacccgcgctgttgcgcgtgggtcccgggagcggcctccggcgccctctggcgggcgg

SEQ ID NO: 248270 - DNA, 122 bp, Homo sapiens
gctggcaggcacagaagggcttccgggctcccccaggaactggagccttaaagaggacgccgcggccaccccgccctgcaggcccacctgcagctgggctgcatctgggagaggcaagcgag

SEQ ID NO: 248271 - DNA, 122 bp, Homo sapiens
aacatggggaaaccctgtctctacccaaaacacaaaaaattaggtgggtgtggtggcatgcgccagtggtcccagctactagggaggctgaggtgggaggatcgtctgagcccaggaggcag

SEQ ID NO: 248272 - DNA, 122 bp, Homo sapiens
gctctccggcagtcacggccctccaaatagaataggtttatcagagtggcaccgaggcctcgctgtggaatttggcttaaggcatggacactgtgtgagttgagcatctctgtcttcctctg

SEQ ID NO: 248273 - DNA, 122 bp, Homo sapiens
gcctaagagtcagcaggctaacccagaaggaacagaactcccccaaaagtcaaagcaagccggaaacagagttataagtgtagcggctaaggatgcaatcttgggccagatccttctcccct

SEQ ID NO: 248274 - DNA, 122 bp, Homo sapiens
gagtggctttttactcattcgggacagtaaacaaaacagccgcacaaaaggcaggcaatgcgcagagctgagaagacaggccctccccagatgaaaatctctaactgcagaaaacaggcttt

SEQ ID NO: 248275 - DNA, 122 bp, Homo sapiens
ttaaccctcagcagagtcgcgggccttctccagtcagcttctacagcgcgcctaggagaccgtgtcctctcccgccagacacgggcgcccccctgggggtcctgcctgctgtgggctgcggg

SEQ ID NO: 248276 - DNA, 122 bp, Homo sapiens
aggctggagtactctggcaccctctggggtcccgaagtgcctgagtacctgtttgagccgcgtgtaggtgactgcgcacctgtttgaactgcgtgtaggtgaccgcgcacctgtttgagctg

SEQ ID NO: 248277 - DNA, 122 bp, Homo sapiens
ttctccctgtaactggttgcagaaataaaacctctcttcctccccatttgatctgcatctcgttattgggcctagagaaatagcagccggaccctcagtttggtccgggaagttcttccatc

SEQ ID NO: 248278 - DNA, 122 bp, Homo sapiens
cagtcctacctgcaggtcggccccgtagaaggcagccatggacgcatcggccaccagcagcgtctccacgaagcgcgcctcagacacaaaccgcttggtcctactcgtggcccccaggggcg

SEQ ID NO: 248279 - DNA, 122 bp, Homo sapiens
gggctgtccaccctgggggcggtgggctgccatcccccaatctgtcaggcccgggttgcccgagggtccccggccccagctgaagcttgagctgcttctctggagttctgcccccacggtgc

SEQ ID NO: 248280 - DNA, 122 bp, Homo sapiens
tggccgtgttccagtgaaactgtttacacaggcaggtggaagtgactgtggtgatggttgcgtaactctgtgaacacactggaaaccattgaatgtgtgtacttgatctgaattgcgtggca

SEQ ID NO: 248281 - DNA, 122 bp, Homo sapiens
gtggcctgggcgcagcatctataaaggcgggcggcggcagaggcgccattttgcgaacggcgagcagcggcggcggcgcggagagacgcagcggaggttttcctggtttcggaccccagcgg

SEQ ID NO: 248282 - DNA, 122 bp, Homo sapiens
cttggaactgatgctaaggcacatcagaaggatctcagggtggaaaggctcctatacagccgtctgaaaacaaaaacaaaacagaggggagctcctatggttgagggtcagaaggagaccct

SEQ ID NO: 248283 - DNA, 122 bp, Homo sapiens
gtctaggatgcgcgggggctcaggagacaggccggggatgaaggcggcgtgcagggggtgcgcccgaggtctggggaaaagtctttgcgggaggccgggtcggcgactcccgagggctggtc

SEQ ID NO: 248284 - DNA, 122 bp, Homo sapiens
aagggatggagacatgaccctcctctacctcatcagagaacagcacagaccctctccccccgccgcccccctgccaaggggaaaatatggtgctcctcaatgaacctcaccctgatcctaca

SEQ ID NO: 248285 - DNA, 122 bp, Homo sapiens
cggcccagagcagcggccgcaggaaggcctccaggatgaagtagaccagcaccgcggcgccgcagcacaggcacacgaacagcacggccccggtgttgtagaaggcctgcttaatgggcttg

SEQ ID NO: 248286 - DNA, 122 bp, Homo sapiens
gcaacgtctaacctgtgaggccataacttccatcaaagcaggaatcaatggaatcactaccgcagcccttccctttcactggtgcccggcacttcagctgcatcaagatcaatggagggctc

SEQ ID NO: 248287 - DNA, 122 bp, Homo sapiens
ttcttcgctgctctccgctccccgccaatggagagcgagctgatgacaaatagcgggccgcggagtccgcgggactcgcaccaggagtaataaaacagacccagagatcaaggagctgggga

SEQ ID NO: 248288 - DNA, 122 bp, Homo sapiens
cctgaaccctcagctccgaacgccttgcattagaagctagagctttggaggttctgaggacggtccctggggagcaagtggtaggtttcgaggcgcccgcttcccctctgattcctgcagta

SEQ ID NO: 248289 - DNA, 122 bp, Homo sapiens
gccagggccactccccctaggcggagctgctgtctgtggtgtctgtcacgtgtgaagccccgggagggcctttgtctgcgcctggctttgccgctgatctgctgcccccaccccggccccat

SEQ ID NO: 248290 - DNA, 122 bp, Homo sapiens
cccactgccagctctgtttctcttccagtccccacacctcccaggttgggagtacatgtccgcctcaccaggtgacctctggccctggccatcctgtcctgagactccctgctgctcctaca

SEQ ID NO: 248291 - DNA, 122 bp, Homo sapiens
tggagccgccccatgttccccggaagccgcccctgcaggacgtgaagcacgccctgggtacggccttctgaccaccccaaggggccgtgggagggcctctgctgccaagaggcctggctgtg

SEQ ID NO: 248292 - DNA, 122 bp, Homo sapiens
ggtgccttaacgatcaacatgactgttaatggtgtagggtactacagccacgaggtgggacgccccgtcctcagaacatccaagatcctcggctcccgggacttcgacatctgcgtgaggga

SEQ ID NO: 248293 - DNA, 122 bp, Homo sapiens
ctcagcaaaccttacaataacaagatttagcttggggaatgatggtcgttgacatacctgcggtgaagtaatctaaaacagagctagtcaattgctgtaaagaaacttgcaaacaatatcaa

SEQ ID NO: 248294 - DNA, 122 bp, Homo sapiens
ccacctcccagaaggcagcgagaaccgcacatgtggctaatctttcagcggaaaaggtgtcgcgcacgcgcagagagcgcggctccggcgcagactcggcgcctctcctcaaggccccgctc

SEQ ID NO: 248295 - DNA, 122 bp, Homo sapiens
gtcacctgccggtcggggcgccgacttcgcgcctacgcactccacgtgggcgccccggggcgcgcctttgtctctcccgagccttgaaagctaattacattgggaggggacaggggtggggt

SEQ ID NO: 248296 - DNA, 122 bp, Homo sapiens
ccacgtccaaggcagccatttcctcttgtttcacgggcttttcgggagctgcaggcacagcgcgggggggtgggggtggggaggaaggcgggtggcggagagggagggggcccgcgggccga

SEQ ID NO: 248297 - DNA, 122 bp, Homo sapiens
caacctgtggctggaagtatgaatacaggtggtggggaatgggatagaaacggctgggcacgtgaccttgaaccatcagggctcaaacaaaagggcagtggggagggagggggctcataggg

SEQ ID NO: 248298 - DNA, 122 bp, Homo sapiens
gtattttgagttctgtacttgaataacagttcaatgagtgagagtgctgtataatgccttcggcacttagcagagtgatctcaaattaggatcctggtgaatattgagggactgacaagttt

SEQ ID NO: 248299 - DNA, 122 bp, Homo sapiens
ctcctggagtggtgtcctcctccaggaggcatgccagagctccttggagcttcttaaaagcgcaggggcctgggctttactccacaattctgatgtcattggatgcagtggacatttgctga

SEQ ID NO: 248300 - DNA, 122 bp, Homo sapiens
atccaaataactgttctatttttatcacagagtagactggactaacgccgaaagccggggcgtggtgaaccagccgccctacctgcaatgtgcggcctggtaggatactgttccagaagtag

SEQ ID NO: 248301 - DNA, 122 bp, Homo sapiens
ccctaaaattaaatttctgcagcatccctttagctttcaatctccccagccccctgaacccggaaaaagcactcgctgcgcgatacacccagaagaacctcacagccgagggtgcccctcct

SEQ ID NO: 248302 - DNA, 122 bp, Homo sapiens
tgttctccagttgcccctcgccatggcctgcagagtctcgggaaagttgccattgcccggcgtatgccacctccagccaaccttccaagcctgaaagccgagaacaaaggcaatgaccccaa

SEQ ID NO: 248303 - DNA, 122 bp, Homo sapiens
gtgcacttacggacttcgcttaagaaaacaccaacaataaacggcagaaggtatagtgttcggatctttgccatctccaccagtacccagccttcgccattacaccctgaagcggtctgtta

SEQ ID NO: 248304 - DNA, 122 bp, Homo sapiens
cggcgccatttcgtgctggagtggagcagcctctagaacgagctggaggattctgcctaccgatacagagccttcgagtcgtccggggccgccattacaatccacctccatccgcttggaaa

SEQ ID NO: 248305 - DNA, 122 bp, Homo sapiens
gggcgggggaggagggaagggcgcgactcgtgggtcgcgctggttccttcactggatggacgtccgacgctgcctccggggcggagacagctccggccaccatgcgcccgttgcggcgattc

SEQ ID NO: 248306 - DNA, 122 bp, Homo sapiens
gagggttgggggcagtgtgtgtgtatttgtgatgaacctaactcctcatgccagttctctcgagatttcttcgcgggggctgccgcgaggaagcagccctcgcccctgtcggtggaaagaag

SEQ ID NO: 248307 - DNA, 122 bp, Homo sapiens
aaacagttttatgggcgtggtggctcacacctgcaatcccaacactttgggaggccaaggcggacagattgcttttcagcacaagagtctgagaccagcctgggcaacatggtaaaattttg

SEQ ID NO: 248308 - DNA, 122 bp, Homo sapiens
gttccgcatgatcaccgattgcagatgcgcagacatggcggcagctcctctcacagcgaacgccggagacggaaggagctggatactcttcttgcttgttcctatcccaacttcatcaaaat

SEQ ID NO: 248309 - DNA, 122 bp, Homo sapiens
attaaatatcctgcacttgttaggaatacgcatatcccttctttgttgagtttaacggaacgggacagcggcgtgcccccggcggctggactgctccggccgcgggtctccccgggcgcccc

SEQ ID NO: 248310 - DNA, 122 bp, Homo sapiens
gagtagggtcgacctgggcgcgcctgcggcgaggcggggccgagtcgtccgggggcggggcggggcggctccgggtctcctgtccccgcctgccctgactcaccctcgcggcccgcccggga

SEQ ID NO: 248311 - DNA, 122 bp, Homo sapiens
gtacattcattccgtcctttggagtggggggcctcaggtctcaggcggacacagactgagcgcctggcacgtggcaggccctaggttcagtcctaggggacacaagcagtgtgtcacacaca

SEQ ID NO: 248312 - DNA, 122 bp, Homo sapiens
gcggctggtgatccgaaaggtgcagttcgccccggagaaacccggcccccagccttcagccgaaaccacacgccacttcctcatgtctgaccggtccctgcacctcgaggcttccctggaca

SEQ ID NO: 248313 - DNA, 122 bp, Homo sapiens
atgtgtcattctgatggtggcaggaggcagacaggttcctaggtgggaaggggcaggtcccgggtgaaacctcaacttcaagccagtgacaagccagctgggcctgggcttccagctccggg

SEQ ID NO: 248314 - DNA, 122 bp, Homo sapiens
ctgccaaccactagtctgtgtgcttgggcaggtttttaacctcggtttccccgtgtgaaccgagtcgaacaatcatggagtgttctgaacattaaaagagttaaaatgtgcaaaggcttcag

SEQ ID NO: 248315 - DNA, 122 bp, Homo sapiens
acccgcggaaatgggggccccaaaccagcaggctctgttctaggcttctcagcgctggtgcggctcttggagaaggctcggcaggggcgggtggggcatgggggggttcacaggtggagaca

SEQ ID NO: 248316 - DNA, 122 bp, Homo sapiens
ggagtttggcaacgagacgtggggcgtaacaaaggtgaggcctggtcctggtcctgatgtcgggggcgggcagggctggcagggggcaaggccctgaggtgtgtgctctgcctgcaggcagc

SEQ ID NO: 248317 - DNA, 122 bp, Homo sapiens
tagggtggagataagggactaacatcccgcaggtccagtcctccagacaccacgtgcagtcggtgcccaggcacttctgcctggaggcagaggtagagaataaggaccacggaccccaaact

SEQ ID NO: 248318 - DNA, 122 bp, Homo sapiens
caggccaagagcaggagagacacagagtccggcattggtcccaggcagcagttagcccgccgcccgcctgtgtgtccccagagccatggagagagccagtctgatccagaaggccaagctgg

SEQ ID NO: 248319 - DNA, 122 bp, Homo sapiens
ttgcctagcctcccgtagctccgcgggcgcttcgagggtaccacgcactgaaatgatgggcggggcctgccccgaccctcccggcctccacaggcaggccagcctccaggtttcccggcaag

SEQ ID NO: 248320 - DNA, 122 bp, Homo sapiens
ggccccaggaatcccccgcaggtacctccagccatggtgcgcgtagcaaccgcgagtctccggagtgcggccctggcccgccctctcggcgcctgcaacatctcccgttccctcccagagct

SEQ ID NO: 248321 - DNA, 122 bp, Homo sapiens
aaggttgaatgggctggaaaatgtggcctttagaaaaggcaaaaaggccacatccagcaccgtcacctgccaggccagcgggacaggtgggcagagccagctccttggcccattctgcgtca

SEQ ID NO: 248322 - DNA, 122 bp, Homo sapiens
cggagagggatttgggtgtggtggaactcagagttgggtgctggggtctcacagcagcatcggtccgcctcgcctctcccccatctcctcgcagagcccccaactcccatcgcgcccccaca

SEQ ID NO: 248323 - DNA, 122 bp, Homo sapiens
ccccaccgccttcttccctcggagaaaaaagccacttcagagctccttgggcgccgttctcggctggaataaaagcgttaagaaacaggtggaaagcacttcacttctctaggcttcatatt

SEQ ID NO: 248324 - DNA, 122 bp, Homo sapiens
taggaatatagctcagcctggacaaatgggcacattaaaaagccattgcaccgtggtggccgcacttcctgccatccccactgcaaaggtgttgttatggactgaatgtttgtgtcccctcc

SEQ ID NO: 248325 - DNA, 122 bp, Homo sapiens
tgcaccggctgcaaagcccaggctgccagggaaaacacacacaggccaactcccaggaggcgcccagagatgcttcctacctgaagaaaaggcggagggagcgcatgtggcccaggtccacg

SEQ ID NO: 248326 - DNA, 122 bp, Homo sapiens
caagccaggtcctggggagtgcgggagcccggggtgcgggtggagggcgcgcgggcggagcgccccggcgcggtttccggggaacccggggggaaggcgagcccgagggaggcccccgccgg

SEQ ID NO: 248327 - DNA, 122 bp, Homo sapiens
tgttcatatccatatttcagcacactcacagcaatcatttattgactgcttactatgcaccgagcaccattctaaacaactgatctggagtatctttttttttttttttttggacaggaagt

SEQ ID NO: 248328 - DNA, 122 bp, Homo sapiens
ggttactttttttggcctagcttctgctcagcggcttttgcatttatctgttctcctgtgcgtccatgcttgggttatctccagttgggggctactgtcaataaagcagctatcagcattct

SEQ ID NO: 248329 - DNA, 122 bp, Homo sapiens
ggcacattgagccgaatttgataaaaatcctcttgtacatccttggcgggcagagcagagcgccggccgtggagtttgggcattttcactcttaactccaaaagtctcctttttccccatgt

SEQ ID NO: 248330 - DNA, 122 bp, Homo sapiens
aatatggtggagagaccctcattcaaaatccagcaccccatcatgatacttgttgctcttcggctgtcaggaaatttcttctccctcacctgtgtctggatgttgggtcgttagtaagggct

SEQ ID NO: 248331 - DNA, 122 bp, Homo sapiens
ttggttgacttcggtaatgtgtatttccatgacatcctcttgtcccctggtcatgcatgccggagtcccaaaaagcatggatgttcctaaacagccccctgagccctgccttcatgaatgtc

SEQ ID NO: 248332 - DNA, 122 bp, Homo sapiens
tcaaagatctctgagggagacattgcacctggccactgcagcccagagcaggtctggccacggccatgagcatgctgagccatcatgcccaccgtggatgacattctggagcaggttgggga

SEQ ID NO: 248333 - DNA, 122 bp, Homo sapiens
gcgtcttggaggggtccccgcggggccttcggcctgggccgagccggggagcgagggcgccgcagatctttcatcgggataggaccccggggactaggcttttcccgggccgctcgttcctg

SEQ ID NO: 248334 - DNA, 122 bp, Homo sapiens
ggaccccactgccatcttctggcgcaaggaggactcggatgccatagattggaatgaggccgacgccctggagtttggggagcgcctgtcggacctggccaagatccgcaaggtcatgtact

SEQ ID NO: 248335 - DNA, 122 bp, Homo sapiens
ggagtcgccaaccatggactggttctggcccgtatacagaggctgagcattgagtgccttcgtgtccttggctttaccttttgacaacagggcctaattgtaatgcatttaaattgttcagt

SEQ ID NO: 248336 - DNA, 122 bp, Homo sapiens
agaaagaaagaaaaagaaagaaagaaagaaagaaagagtaatacctcctcacactgttctcgagagcaccactttaaataatggatgtggtagcactttgtaaagtgctattcagatttagc

SEQ ID NO: 248337 - DNA, 122 bp, Homo sapiens
ggaatcccaaacaaatccctggaaatctttgccatttgggcgccaatctactaaagaaatcggccccagggtgtgaggtttctcacatgtgcgtgaaaacgcttcgagaggggtgcagccgc

SEQ ID NO: 248338 - DNA, 122 bp, Homo sapiens
agtggacggtggccggaaaaggacaatggtttccatgtcagcggataaacgctctcccctcggctcccggacgcgacggaggtcgtagtagtagtgagtacgtgctgaggagcaaaggagta

SEQ ID NO: 248339 - DNA, 122 bp, Homo sapiens
cctgaccgacagttgaaccatatcattaaggcgtgtaatacagctcgagtcttgtactgccgccaatgagtgcatatccacagggcaaaagtttataaagagtcgaggctgtcctgtttaac

SEQ ID NO: 248340 - DNA, 122 bp, Homo sapiens
gcagtgagctgagatggagccattgcactcaagcctgggggacaacagcgagacttccttcgaaaataaaataaaaataaaaagggtgattcagagggacagtgggggtctaaaaaaaggag

SEQ ID NO: 248341 - DNA, 122 bp, Homo sapiens
ctctgttgcccaggctggtctcaaaactcctgggttcaaacgatcctcctgccttggcctcgcaaagtgcgattacaggcacgagtcaccaaacccggctgggctcctgcttttaacagtaa

SEQ ID NO: 248342 - DNA, 122 bp, Homo sapiens
cttggggcgccctggccgcgggacttgtggagctccctagtcctcctaggctgcttaccccgccgctccctcccgtccaagagcggaaacctaaacagaccccccttctccacagacattgt

SEQ ID NO: 248343 - DNA, 122 bp, Homo sapiens
ttaataactacccccaagaggttgcagcgcaaccactactggaacgtgaagtccccggcacgccccaacaacaggaccattggccacgcccctaggggcggggcactgcatggaaagccccg

SEQ ID NO: 248344 - DNA, 122 bp, Homo sapiens
catccccgcctcccgcgcccctcgcagcccggcacacgcgctcgggctctaggtactgggcgttttattggagattctgagttgttctgcttgtagtttattttctccaccttggaggcccg

SEQ ID NO: 248345 - DNA, 122 bp, Homo sapiens
tctgtggctggggtgccccgtgcctgctctgcccacatgccctgccttatgtttgggcaccgagacctcacctggcctcttaagtgaactacaggtgctcctagccccctcagaggtactta

SEQ ID NO: 248346 - DNA, 122 bp, Homo sapiens
cggggcctgcggcaccgtgtgtcggtgcagactcccaccaggaccccaggccggccccaccgtctggaaccacctagaggtgtcccgccatcctcagtcctggggccttctccttacccagc

SEQ ID NO: 248347 - DNA, 122 bp, Homo sapiens
gactcgggcgcgtgccatgggaccacaactcccggcacgcaccgcggactgcgccgaacacggttggctgggagatccaaccctactgctcccaccggccaatgggacggaggaaagaggcc

SEQ ID NO: 248348 - DNA, 122 bp, Homo sapiens
tggttcgtagtctgatgcgcgcgcaaccagggtggtggcggagtgcgcatgcgtggttcccgggcgaagggaacgcgcgctcaccgtgcgcgctcgcggccgggtggtagtggcggaggaga

SEQ ID NO: 248349 - DNA, 122 bp, Homo sapiens
gagcatggccaagctgtactcagggctgctgggggtgggcgatgagatcctcgaggtgaacggggccaaggtggcagggctgggcttggctcacattaaggagctcctggcccactcagaga

SEQ ID NO: 248350 - DNA, 122 bp, Homo sapiens
aaccactgtgcccagtcaaggtttgttttttcttttcaccttctcaacccagcttttccccgactccaggaagaactgggaagagaaggccccatggaggtattttcttttcttttcatttt

SEQ ID NO: 248351 - DNA, 122 bp, Homo sapiens
ttttgtcccttggcgactttttctttgtaagatgtacgccaaaggatccgatttgcatagcggagctccagctgttgtgggaagagaggaccagccggcaacttttatccagctctaaactt

SEQ ID NO: 248352 - DNA, 122 bp, Homo sapiens
agcgccgtccctaccccagcaagacctgaggacgttgcgcaagtgactggctgtgcctcacggtgggtttgcgctgttgtgctcagcctgaaagggcagaagaggaacagcctttgggtgct

SEQ ID NO: 248353 - DNA, 122 bp, Homo sapiens
aagaggctgggcatcttgggcacgttagttaacctgtctgtgcttcactttcctcagcagcgaaatgaagatgatactagagcagctaactcacaggatattttttagggttaaataagtta

SEQ ID NO: 248354 - DNA, 122 bp, Homo sapiens
ccctgggcggggctgggagccaggtttgcgggcaggttccttctgagctcagagctcaagcgagggagaggggcggcgcgtgggccccaagagggaggtgcagggggcccagagcaggggga

SEQ ID NO: 248355 - DNA, 122 bp, Homo sapiens
agcagtggggccgtcacaggcaggacagggctgaggcgccgatgtcaacagcagtggggccgtcacaggcggggcaggggctgaggcggcgatgtcaacggcagtggggccgtcacaggcgg

SEQ ID NO: 248356 - DNA, 122 bp, Homo sapiens
agcgcgcccgccgcgctggagagctgggagtccacccagctcggcgccttttcagcccggcggtaactgctgtcatttcctaggaaacccgacttttaccgcgcggggagctggggatggag

SEQ ID NO: 248357 - DNA, 122 bp, Homo sapiens
cgggaatttgcacgtgaccacggactttttttcatatccgccgaccatgctgtaacgaggcgtacgcgttactggcgtgcacgtactcagaagactagctgacagccttgtttgtggcagac

SEQ ID NO: 248358 - DNA, 122 bp, Homo sapiens
tgtctaatttggggatgcagtcagacgtgacttagttcataaacacacacattcatctggcgctaaacctcacataaggaaccttaccagcttccttgataaaacaacaccccaacacttca

SEQ ID NO: 248359 - DNA, 122 bp, Homo sapiens
ctggccgtgccgagggtgagggggtactgaggggccagggccatgagctgtccacccagacgccggggaggaggcaatgaggctgagctggctctcaagggcactggccctggggaggggaa

SEQ ID NO: 248360 - DNA, 122 bp, Homo sapiens
gcgagctttctggggctcaatggaggcggggcccggccgctgtcaccgggcaggagagaacgttgcttacgtgcgcccggagtccattggccaaggcgggccacactcccgggtctggattg

SEQ ID NO: 248361 - DNA, 122 bp, Homo sapiens
tctcaaactcctggactcaaacaatctccccatctcagcctcccaaagtgctgggattaccggcgtgagccaccatgcctagccataatatattaactatagtcaccatgatttacaatagt

SEQ ID NO: 248362 - DNA, 122 bp, Homo sapiens
cggccccgccccgaccctggcggagccttaagggcagaatcccactggagagcaggagcgcgcgggatggcagcggtgctggtgagcactggcctgcttagccctggccaaggttctcaatg

SEQ ID NO: 248363 - DNA, 122 bp, Homo sapiens
cattgagtgaaatatacataactgtctgaatcactgcgttcttgggagagttagagcaaccgtcaaagccccccaagtatccatttttattggttttgatgttgatttgatgttgttagaga

SEQ ID NO: 248364 - DNA, 122 bp, Homo sapiens
tctttttcattttcagctctggtaagggcagggaccaccctgcaggaagtgtcaatgatacgctgataagcttcttacttctctcctgtcagttggtgctccccctgtgatgagaaaagggt

SEQ ID NO: 248365 - DNA, 122 bp, Homo sapiens
gggcgccagagcagggaccggacgcgagttggagatgttggactcgctgttggccttgggcggcctggtgctgcttcggggtgagagccagaggcacggtggcggggcggggggtgcggttc

SEQ ID NO: 248366 - DNA, 122 bp, Homo sapiens
gagagaagaaacgggagaggccatttcacaccacctgagcaaacgtgaggtcaccacctacgcaatccagtcacacttgtgaaaatgctgaagacggtggttacggaagcctaagacaccaa

SEQ ID NO: 248367 - DNA, 122 bp, Homo sapiens
tcccaagcccacagctcccttctcagtgctcatgaaggtggttctgttgagaatctattacgtgctactccctgagggtactatatgaacaaggcaaagactggtgaacctttctgcctaac

SEQ ID NO: 248368 - DNA, 122 bp, Homo sapiens
attggccaagtctgaacggccccacgtcgaggctccttatgggaaatgtagttcacgtcccgcttcaggagctagcggcgccctcccttatcgccttggcaacgacccagccgcgccgcgag

SEQ ID NO: 248369 - DNA, 122 bp, Homo sapiens
agccccggccacgttcctttgcaggatcagctccagcaagtccacctgcgagaaccaaggcggccgctgcagactgagctgagccctgcgaggtaaaccgtgagaacggcagctgcggtaag

SEQ ID NO: 248370 - DNA, 122 bp, Homo sapiens
gctcagaaagccacccctggcgagggtaaagcccagcggaacggggagctgggggacaggcgtgggcagcccgcgggggcccacatgggctgggagtggcaccgacggcttcggggaggttg

SEQ ID NO: 248371 - DNA, 122 bp, Homo sapiens
aagaaacgtggcgatcaaggaagacagcgaaggctccatcctcgtcgggggaggataattcgaatctcagcctgtgagtttactcagcacacctgtttaatctcttggtccttcagtttcca

SEQ ID NO: 248372 - DNA, 122 bp, Homo sapiens
ctgcgtttccctgacgacgacaggtagtccaatggaaatgtggcacctctttctcctgcgcgcggccccgccttttccggccccaaaacttgcgctctcattggtcagtggcctccggaact

SEQ ID NO: 248373 - DNA, 122 bp, Homo sapiens
gttgatgcctcttgaaggagccctcatctctagcccagcccctaaaggatccgtctttgccggccgcgggggtctcattcattccagaaatgctcctgaacaccgctcagtgcaggccacgg

SEQ ID NO: 248374 - DNA, 122 bp, Homo sapiens
tggcattctgggagcttcatctggacctgggtcttcagtgaaccattgttcaatatcgtccggggacagcatcaaatcatccattgcttgggacggcaagggggactgtagatgggtgaaaa

SEQ ID NO: 248375 - DNA, 122 bp, Homo sapiens
gtcgggttcggcgagtccaaaggaggctcccgggctgcagaggccccggcaggctgtctccgccccacgagccccttctcctgcggtctcctggactgcggcgacgaagcgtcggggctggg

SEQ ID NO: 248376 - DNA, 122 bp, Homo sapiens
gaaatacatatcagaccgcatacctctctgctcttcctctaaggattccccttttgtcctcgggatggtttccaagctccttagcaagctaaacaaggccccttgaaggctgccgtctccac

SEQ ID NO: 248377 - DNA, 122 bp, Homo sapiens
gtcctcagaagggactgctggccgggctgggggctgggctcggctcgcaggggctgggggcgctctccagcatgtctcggaagtgggtggcaacacgacccaggtgggagccgtcccagaag

SEQ ID NO: 248378 - DNA, 122 bp, Homo sapiens
gcatctcggggtgggaagggttcaggaaacacagaccagcttatcttaaggaagcctggtcgggaatctttcaaaaacacatctgttacaagggggaaagacacctccaggacaacagtgat

SEQ ID NO: 248379 - DNA, 122 bp, Homo sapiens
gggacagaaggtgaggtccaggtgacggtgacacagcagtggcagcagcagcgttccccacgccaggctgtgtgccccgccatgactgccgcccaggagggtagggctgggtctgaggggcg

SEQ ID NO: 248380 - DNA, 122 bp, Homo sapiens
agtggggttaggggagtggggatactcatccagccccggcttccttacagtttgatattacgggtctgagaattccagatggcagggcctggaaggtggggatctaagctaactccctccag

SEQ ID NO: 248381 - DNA, 122 bp, Homo sapiens
cctcagatgagtttcccacgtaactcttcctatatccctcattttgtaactgcatcaccccggtactataatcttgaacacttttggtgctaaagctgccaattttcctgattttgtgtaat

SEQ ID NO: 248382 - DNA, 122 bp, Homo sapiens
agcttctggtcggggagggagtcggggaactttttggggagcttttctgagccagggagtcggctgattggcaggttcgcccctgcccgggcacctggacccagggtttctgtgcggaagct

SEQ ID NO: 248383 - DNA, 122 bp, Homo sapiens
gaaatgggtctgtcagcccttccaatgaattaaggctgatgcgaagatctaatggaatctcgcaacgggaggcccattggaaattgtgaatataattaggtgagttactactgctgtgccga

SEQ ID NO: 248384 - DNA, 122 bp, Homo sapiens
tggtggtctagcttcttgtttagtagctgtggggaaagagaccgtgcaagtgtttggtgccggcacccttgccactggccatgtgcttgtcccaaggcattaagacaaaactgtaccaagcc

SEQ ID NO: 248385 - DNA, 122 bp, Homo sapiens
tactgctcgccagcagcccagctcccggaccggctccgtcccagtggccggcctcacgggcgcagacggccgcgtgtttgctctctgttccccggcatgggccacacagaaactcctttctc

SEQ ID NO: 248386 - DNA, 122 bp, Homo sapiens
gtcctcatctgctcacattttcccaagaaccttttttaacagtacgtaacggctattgagcgcttaatatgtgctgagcaccacagccatctcttactcctcgaagccccatgaaaccagca

SEQ ID NO: 248387 - DNA, 122 bp, Homo sapiens
atattgtcccgttctggctttgccggccaggattagaattgcacgcggcgcagcatctggcgcccgctggacgctcagtaaggacaagacggctctcctcctcctgccacccagagccccag

SEQ ID NO: 248388 - DNA, 122 bp, Homo sapiens
gtgagcgcttcgctcaacaggcggccagggtgcgagcagtgaagctgcggcacgccggagcgtttaatggccatcaaattggcctctctaggaggtagctgcagccggagaccgcgtggcct

SEQ ID NO: 248389 - DNA, 122 bp, Homo sapiens
actagacacgattatgtcccttgctccctgtcagcaagtggcatgtgctctctggtggcccgttcctggctgatcctgtgattggtatcaccaccaaattccagtcacctagggccgtaaag

SEQ ID NO: 248390 - DNA, 122 bp, Homo sapiens
gccagttagaggatatcaattgtggcaattccccagagccctcatcagatggcattagcccgtcatgtgctgcagtggcacccagtttggaggaaattcggaaccagaagagtgtgacaggt

SEQ ID NO: 248391 - DNA, 122 bp, Homo sapiens
aactgggggcgcctgcagggcgcagagaggcgacggcaccggtgtcagggagaacgcatccgttaccgcccgcctcccgcaggtctgcgtcaaactagatcctggcttctgggttcctgacc

SEQ ID NO: 248392 - DNA, 122 bp, Homo sapiens
ccacatccttgggccgccagtgggagctgagctctttgccactgttgttatagaagaagccgatggtctcgttgtagtagcactggcccatgatgaccatctggggacacaagagatcagtg

SEQ ID NO: 248393 - DNA, 122 bp, Homo sapiens
gtcgcttccggggattccggaagtgtcggggtggcggaaatgaagtccgaggtcctacgtcgaggatacgggtgaggtcatggccgaatcgggaagacgagagatggggccgattgatctag

SEQ ID NO: 248394 - DNA, 122 bp, Homo sapiens
ttgagagatgtacagttttaagtgtgctgactcccaaatattttcttggctcaggctctgcggagtgtctttgtgtcaggtccctggggagaggatataaaccaaaagcacttgattgtctt

SEQ ID NO: 248395 - DNA, 122 bp, Homo sapiens
gcccctcacacactgacacacacacaggccggcccctcacacactgacacacacccaggccggcccctcacacactgacacacacacaggccggccgcctggctcagctgcagccctgcatg

SEQ ID NO: 248396 - DNA, 122 bp, Homo sapiens
ctggggcatagttgagctgcaaggcgcaaaccgatgaggggcgtctgcttttcaccagggcgccgtcgcttttgtcgggaaaccggcagcgtaggcgcgcagaccgggaagcggcaagaaga

SEQ ID NO: 248397 - DNA, 122 bp, Homo sapiens
gtgctgccacagtccctggcgctggaaacacgggcagtgaataagctgctggcactggggcgggaaagggcacggctgggcagctggactgggacgtgtctgagggtgaccaggctgtggcg

SEQ ID NO: 248398 - DNA, 122 bp, Homo sapiens
ggcggggcgaggcctggcagggcgaggcctggcgggggcggggcctggcgggggcggggccggcggcacctgggtgaggtcgctcggccccgccccctcgcacttccgtgtgccgcggcgcc

SEQ ID NO: 248399 - DNA, 122 bp, Homo sapiens
gctctgcatggagctggccaacgggaagccgcagacgcgcagtggccccgagtgcgggctcgccaagaagcctcccgaggagagcacgtgtttcgagaggccctgcttcaagtggtacacca

SEQ ID NO: 248400 - DNA, 122 bp, Homo sapiens
ttgttagactagctaaccgcctccccccaccaaaaaaaacctaatccaaattcagagtttcgataactaaaactagcttgatatattacctagctaacttggggcatttgtatttctacgag

SEQ ID NO: 248401 - DNA, 122 bp, Homo sapiens
ggcagctcccagcccttctcagatggccgggctgctcttggccggggttgagcggtcctgcgccagctccttcagtgtggaggctttcagggagcacgggggagatcagctctgcctgtcgg

SEQ ID NO: 248402 - DNA, 122 bp, Homo sapiens
ccatcctgccgcagagtattccagagtgtggccgctgggggttactcacccatcctctcccgatgccgctgggggtcgctcacccatcttctcctgatgcccctgggggtcgctcacccatc

SEQ ID NO: 248403 - DNA, 122 bp, Homo sapiens
gcggccgcaccccaccctgggaagaaaccggccaggtgtggcctaggcgcccagtgccagcggggaggagactcgctccgccgccgaccaacaccaacacccagctccgacgcagctcctct

SEQ ID NO: 248404 - DNA, 122 bp, Homo sapiens
acaagaggactgaggttgtctgcacgatgcgggctaacctacgcagcactgcacgagactcggatactgaacaggagaaacacaaaactctccacgcctggacacgtcgcagccgaggcacc

SEQ ID NO: 248405 - DNA, 122 bp, Homo sapiens
actatgataactcaaaaacgttgttcaaaaatatcctgcaaaatttgcattatagagaaacgactctgcaggcgtctgtgtcgataatgaggctacacttaggaggcgtgagggtactgact

SEQ ID NO: 248406 - DNA, 122 bp, Homo sapiens
ccctcttgccggcactgaaggaaccggcgaggtgcgacaaggtggggcggggcaaggaagcggatcttcatccatgtccctggatggagtaaggcacactctggaggtagcagcgagtttga

SEQ ID NO: 248407 - DNA, 122 bp, Homo sapiens
tgtaaatggccccctttgcgtcgaccctcttccccaaaaacccggtcttttccgtctcggcggtacctgagcctcagtttccctatctgattagtgaggataagagccgctcctggcctccc

SEQ ID NO: 248408 - DNA, 122 bp, Homo sapiens
ctagaggcgttactgctgctcccggctgcctagggcggcgcgggtaggccccgttgttctcgtgcgttaatagggaaagctgccttgattatcttgtaattctctaccaaaccaagaataaa

SEQ ID NO: 248409 - DNA, 122 bp, Homo sapiens
cggcgcgcggcgggggcggggctccgaactttgtctctaagtttccggttctgtgctcagcggctccaccctcggtgcgcatgcgcgccttgccagccctctgttccagctccacacccggc

SEQ ID NO: 248410 - DNA, 122 bp, Homo sapiens
aaaatttctggccttgtggtgtatacgttctagatgcaagcttgtccaacctgcagctctcgggctgcgtgtggcccgggacagctttgaatgtaagaagtttttttgcttatctgtggtag

SEQ ID NO: 248411 - DNA, 122 bp, Homo sapiens
aatattctgggaagtcggcagagtcggaagcaccaggcatctgttttcccacctagacaacgatggcactggcagaatctgtctgatgtaactattatgaaactttgcagtcatttgaaagc

SEQ ID NO: 248412 - DNA, 122 bp, Homo sapiens
acttccaaccccttccctctcctgttctgaagtttctgcaagagcgacccttcctcatctcgccctctcccgcgttctctccttccctcctgtccgctgccgcctggtcagctggtaaaccc

SEQ ID NO: 248413 - DNA, 122 bp, Homo sapiens
gataaaagaaaggcgagaaaaagagaaagcacaaaaatatcgggaaaagaggagagataccggtatttatcttggcctaagtgtaatctcctgagtctgtctcatcattatggagaatcgta

SEQ ID NO: 248414 - DNA, 122 bp, Homo sapiens
ggctcccccgacttgcctacattccctggcagcctcgcagcttcgggcagatggagcttccggcctgcgcgcagtggtcgcctgtcgtccgcccgcgctcccttcggccggaggtcggcggc

SEQ ID NO: 248415 - DNA, 122 bp, Homo sapiens
agggccctgtgttcctttgagtgtatgtgcttctcaggcccacagaggtcctttgtgtttcgtatgtgaactgctctctaggaaacccatgtaactgtctgtgtcctggggcacatacatga

SEQ ID NO: 248416 - DNA, 122 bp, Homo sapiens
ctcttcggcctctcaaagtgctgagattacaggcctgagccaccgcgcccagcctacggccgggaactttttaaggctaaccctgccatccgcgtcaccgccggttccggacgccccgaggg

SEQ ID NO: 248417 - DNA, 122 bp, Homo sapiens
caaggacagcaggagaacactgacatagttacactcttgtcaccagcacttttattaagacgtgaaaagacaaagacaacagaggagagcagagaataatatctctgtttcagctattccag

SEQ ID NO: 248418 - DNA, 122 bp, Homo sapiens
ttatggactggtgatgaaatcacacacgactgggctgtgtgccagcagggcaggtggggccggtgggcttccctgagttgggaatgcagagtggagaccagggtaagggatgccatgtggaa

SEQ ID NO: 248419 - DNA, 122 bp, Homo sapiens
accccatgtcgcccatgggctaggtcagggcgggggtgctcagcatctgaaagctggtgtcgagccccaagaggacccctgacaaggccaagaaaaaggtacacccatgtccaagggggttg

SEQ ID NO: 248420 - DNA, 122 bp, Homo sapiens
gggaagagtagttgcctctagagaaggacacttggagactgtgagaccaacttttctgcacgtactcctgtgcacctttagaattggagttctgtaccatgtaaatgcattacttgtcctaa

SEQ ID NO: 248421 - DNA, 122 bp, Homo sapiens
ccatttgttcctctcagtattcctattttgtggtacggttggcatttgaagcccatcgtacggacaaggaaagcccagctcagaggtgagatgtccagcctgcctcatgaagctatggcata

SEQ ID NO: 248422 - DNA, 122 bp, Homo sapiens
tctggctcggcaggctggggtggggcccgaatggcaccgacgcaactggtccaggccacacgtggacggtgaggcccgggacgggaacatccgagcaacgatccatgcccaggcaccatcgc

SEQ ID NO: 248423 - DNA, 122 bp, Homo sapiens
ggaggacttttaagctagattgtttggtcccatcccagggattctgaatcaacaggtttgcgatgggtccagatagtttacttttccaagtttactaacaagtttgccaagttcccccagtt

SEQ ID NO: 248424 - DNA, 122 bp, Homo sapiens
tctgcaggcgcagctcgccaagccaggtaagagcgtctgaggtgcgggagtttggccgggcgcgggggcaacttcggagtgccagctgcagctccacttgggaggactggaggcaaagtttt

SEQ ID NO: 248425 - DNA, 122 bp, Homo sapiens
cagactgccaggaatatgtctctttggccccaaggcttgagccacaaaatccagctgcagcgaactgccatctcttaagacataaaaacatacacaaccgccactgttaaaaatacatttat

SEQ ID NO: 248426 - DNA, 122 bp, Homo sapiens
gcaggatggtggctggcagcagcaacaggatctgtttccattttgaaccttataaattaccgagggtgcagaagtaacaggaattgtttggctggtcctcgttaagcaggagagggtctggg

SEQ ID NO: 248427 - DNA, 122 bp, Homo sapiens
gagatggctgaactaggggcggagacactgggaagactgaaagcttgctcagcggggtcgcgcaccgctcctcctattgggcggcagcgaccaatagaatgtggggctcgcccgcgctgcta

SEQ ID NO: 248428 - DNA, 122 bp, Homo sapiens
tggtcaggttgacccatcttggacccctcacaacaggctctcgagactcagggatggggtcgggggagaaagctcggcactaggcacagaggcagcaagagggtctcgggactcagcagggt

SEQ ID NO: 248429 - DNA, 122 bp, Homo sapiens
aaaacagctcactggggagaaaaacccgagtctccctcccaggtcagtaattagtgcggccggaggaagagcagcccctggcacagtcgggtccttaacagctcccgccccagaagctgcct

SEQ ID NO: 248430 - DNA, 122 bp, Homo sapiens
ttgcaaacagaccaaatggatgagaggcggggaccgtgcagctgtcggctgatgaggaggcggccgccccagtgctgatggagatgccactttcgtgtgactgcgaacattaaagcacaaaa

SEQ ID NO: 248431 - DNA, 122 bp, Homo sapiens
cccccgccgccgtcgggctggccgagcgagctgggcatggcgggagctagcgctggggcccgcgctcctgccgcccgcgccgccgccgccgcccgcgccgccctccgcctctgcgagctggg

SEQ ID NO: 248432 - DNA, 122 bp, Homo sapiens
gatggtggtgagtcaggacagtgaaacaggtcggctcttcactccaggagtgtgcgcgggcgccgggccgcgcaggcgcattactgctcccctcccccgaccttggctgatcgcgcctgcgc

SEQ ID NO: 248433 - DNA, 122 bp, Homo sapiens
ctttccactggtcagaataattaaccataggttaggaagttaagaaaacaataggatagacgtcagtgaagttcaagtgctttaattggattcctttgggtacagtttgtttccctttttct

SEQ ID NO: 248434 - DNA, 122 bp, Homo sapiens
tgctgaagaatactgtttttcaaaatactccagtttttaacccgtttgtgccagaggttgcgaattttttgtgtgaaaaatcaggccttggcaatgaccttgagcagtagaatataaatccc

SEQ ID NO: 248435 - DNA, 122 bp, Homo sapiens
gagaaaagctgggggggcagaggtgggataggtaggggtggagtgaggaggaaacaagctcgagagacttaggagagcaacattctgggactttgttccatggtggtgtggctaaaaggaag

SEQ ID NO: 248436 - DNA, 122 bp, Homo sapiens
ttgagaaggtcaaagtgattcttcgattaaatgccttacttatcgcctagtgtgacctggcgcttgggtttactctccccagcaactgcgcctcaaacgcaaagaaaactgcaggtcctcgg

SEQ ID NO: 248437 - DNA, 122 bp, Homo sapiens
tggtggaggctgcgagggtgcacggccggccctgggcaggcggtagccatggagctgtggcgccaatgcacccactggctcatccagtgccgggtgctgccgcccagccaccgcgtgacctg

SEQ ID NO: 248438 - DNA, 122 bp, Homo sapiens
aacagatcagggagggactcctacagtttaaacaacccacctgaggttatccagctgatacgtgtggtctctgtctggaccaggccttctaatgccctctaagaaggccaacagccacttct

SEQ ID NO: 248439 - DNA, 122 bp, Homo sapiens
cagtctggatggcgtgagcgagccactgtccggagagctcgcacttcacctcccagcctccgtactgcttggcttccccatcccggatgctgaggggaagcagggctccgcgggtaagcttc

SEQ ID NO: 248440 - DNA, 122 bp, Homo sapiens
cttaacacccagaccgacgtggccattgtagtccccgatagcaacgaatgccttgaacctcgtgcgctggccggcacgggtctgcttctgcactggcataatcttcaaaacctcatccttga

SEQ ID NO: 248441 - DNA, 122 bp, Homo sapiens
ttttaaaagtccacccaggtagacgtgtttgggaagttttttcgggtgggaaatgggcttcgcccgtacgaacaatccggggaaatcgcctcaaggaggatccttacgcagcatgtggaaaa

SEQ ID NO: 248442 - DNA, 122 bp, Homo sapiens
aagcgatttctctcccgccgccgcaagggacgtggcgcctccacggccggcgccttcctacggaagccgatggggcccaaaacgaactctccgggaagccccgcctccatctggctaagaac

SEQ ID NO: 248443 - DNA, 122 bp, Homo sapiens
gctcctaatataggttctgtctcatgctataaacagctacagacacatcttcagtagtaacgcactggagtgtggaaatcaattgtgaattaaactcctccctattgcaatattctgacatc

SEQ ID NO: 248444 - DNA, 122 bp, Homo sapiens
aatgtacctggcaacaaaattcatgccaatatgacacctgtctgcttaggaaattcctgacgaaacacagaagggcaggcttgggatcttaatagtgttgtgactgtgatttccccaggagc

SEQ ID NO: 248445 - DNA, 122 bp, Homo sapiens
aatggtttttgcatttttcagtggttcaaaataaatcaagagaccagttgcaagggctcacgcttataatcccagcactttgagacgccgaggcaggcagatcacttgagcccaggagttca

SEQ ID NO: 248446 - DNA, 122 bp, Homo sapiens
gtgacaggagggggcacggaggcagcaccagatggatgtgtgccgaggggatgctgcagccgggctggcgagggaggtcacaggaacgggcgcaggcatctccctccagccgcacttgacag

SEQ ID NO: 248447 - DNA, 122 bp, Homo sapiens
tccacagtgcgagcgactcctgaggggaacagcgcggagttcaggagtccaagcacaaagcggtcttttacattccaacctgttgcctgccagccctttctggattactgatagaaaatcat

SEQ ID NO: 248448 - DNA, 122 bp, Homo sapiens
gatccctgggctcggttgctggtttgctgtgtgacctttgcccagtcacatcccctctggcgacaggggatgcctatctgtaaaatgagggggttgaatgagacgacgtctgaaggctcctt

SEQ ID NO: 248449 - DNA, 122 bp, Homo sapiens
aggaacagggtgccacgagctcttggtaacggagcagcgagacctgcagctacatctggtcgggcaggaagagtgggaagttgggctgggtggcacagaagcccaggggagcagcagcacag

SEQ ID NO: 248450 - DNA, 122 bp, Homo sapiens
ggaggatcgcagcgcatttcggccaagacaggtgagactgcggttttgacctgcgggcctcgatgaattgcgttaggacacctgggctccgggagagccgttccactccgcaaagtaagcgt

SEQ ID NO: 248451 - DNA, 122 bp, Homo sapiens
ctcccctggttaccccaagggcactcgtggggatgaagcccgcgggatgcaggattcccacgagacctgtgctggccactgtgcggggtggggggctgccagggaagaggtgcagcccctgc

SEQ ID NO: 248452 - DNA, 122 bp, Homo sapiens
gcgcggagacggcggcgcaaacaggcctgagacagccgcacaaagaggaggcccctcggtcgctcccgccttccattgatcctggtcctttgtggctcggacaacgggggcgcgggaggcgc

SEQ ID NO: 248453 - DNA, 122 bp, Homo sapiens
tgcagcgcctggacaggagctggcaggggactcccagtcatcactgccaccagggcgcagcgcctgatcaggagctggcaggggactcccagtcagggcccagtgggcagccgctccagctc

SEQ ID NO: 248454 - DNA, 122 bp, Homo sapiens
cacggatctaaggcctatgtgctccagtagtcaaattgttaagaaataagcagccgggcacggtgactcatgcctgtaatcccagcagtttgggaggcagaggcaggcggatcacctggggt

SEQ ID NO: 248455 - DNA, 122 bp, Homo sapiens
ctgaccatgccctgccccaaaccctgccttcccgggtcccaggactccagctgctcctcgcgtgacaacacttgcccgctttgaaagccctcctgccccgcccgccgggtcctcaccgtgtg

SEQ ID NO: 248456 - DNA, 122 bp, Homo sapiens
aagtcatcctcatatcttcaggggaaagaactcaggcagaaccaggggccatgcagtcctcgggcctcccgagtttgcccttgcactgagtaccttagctttcggaacagctcggccaggcc

SEQ ID NO: 248457 - DNA, 122 bp, Homo sapiens
cccctttacccaatcccttaccagatctgatgctgcaggagcatctccagcatggcttcacgcttccctgtgagagagttggggggtgggcaaggtggggtctggttaagaaggaggcccag

SEQ ID NO: 248458 - DNA, 122 bp, Homo sapiens
gcagacccaaccgacatccttcaccctcagttagtgcgcaggagggaccgggacgccagccgactgcgctccagaactattcccattgggccagagaatgagtgacgcactaggccccgccc

SEQ ID NO: 248459 - DNA, 122 bp, Homo sapiens
ggacgtggcagccagaacagggatttgaaccctggcctgttgggacccacccaggcctggcgctgcctctgccatggtctcaggcttggagcagagtccagccccttgtggcacagatgtgg

SEQ ID NO: 248460 - DNA, 122 bp, Homo sapiens
tttgttacacagtttaaaaataatttggtcaggctctcatctacattggggtaatcttgacggtctggatgtggtaattcatgctcattagacttcaaaggtaggaagtcaaagttgggaaa

SEQ ID NO: 248461 - DNA, 122 bp, Homo sapiens
attgtacaaatggaaagagttttaaaaggacacacacatgcgcattcaaatacaaaacagcgaattgtgttcttctcaaggctttggtctgctgaggaagcccaggtttctattgacagttt

SEQ ID NO: 248462 - DNA, 122 bp, Homo sapiens
ggtagacccttgaggggaaaaaaacatggagggaggaggtatagatctggatttgtgcctcggcactgccacatcctaactgcgtaaactagacatagttgttttgcctctgtgagcctcag

SEQ ID NO: 248463 - DNA, 122 bp, Homo sapiens
catgcgcgccgagcgcagccgggtcattagccgcgggtgtgagcggcggggcaggcttatcgcccatccaggcctggcgggcgggcgagtccccgacgcggctgccgccgccgcccgcggca

SEQ ID NO: 248464 - DNA, 122 bp, Homo sapiens
ccgaggtaacacagcgagtgggccaagtagagactggaacccgagtgcgcacctccgagtcgctgccgggcagggagcgcgcctcgccgtctctcttgtcttctggcccccagccctcggcc

SEQ ID NO: 248465 - DNA, 122 bp, Homo sapiens
cttcttttcctcaagtcatccagactcactgcacgtcattttggagggcgccttcctttccggattccaacctctgcggcgctggcctcaggctccaggtcccggctgctggggctgctcct

SEQ ID NO: 248466 - DNA, 122 bp, Homo sapiens
cggccatgctggaagagagtcctgaaggctgagccactgtctgggagacaagtcactctgcgcagagactgggttttatatgcgtagccaggtggtcccgcccacttttttaaaccatttac

SEQ ID NO: 248467 - DNA, 122 bp, Homo sapiens
gagatgattaggacagagacgtgcatagagagatgatgccatgaggacgcggggaggagacggcatcttcaggcctaggagagaggctcaggaggaaccaggcctgcccgcaccttggcctc

SEQ ID NO: 248468 - DNA, 122 bp, Homo sapiens
gtcatgtgggattaactggactcaactgtccagcataccttaggtatgaacatgaaggtgcgcaagatcatgcccaaaggttcactagtagtagatggcttataaaatacctgctcataggc

SEQ ID NO: 248469 - DNA, 122 bp, Homo sapiens
gcagtggcaacccttgaccctgtccccgccaccagcagcgtggacagcagggacagatagcgccgcggcgcctaagaccttaggccacgcagctacaggaggacgtgaaactggcgctgact

SEQ ID NO: 248470 - DNA, 122 bp, Homo sapiens
cgaatacaacgattcaggaagacacatccggtcaccgtcccaggcacaccccacgccgctcgcaaccccgtcagctctgatccagggcctacacccggcattcccaacccacacacgggcgc

SEQ ID NO: 248471 - DNA, 122 bp, Homo sapiens
gtggtaaattactgtttcctggaaaggtggcacttgcagtaagggaccacaataagttgtcgtgttttggggtggaatattcaagccccatccagttaggggttgttgctggagggcaacat

SEQ ID NO: 248472 - DNA, 122 bp, Homo sapiens
cttccagaaggcagggacctctcagtcctctgagctcctatgacccacacaaaaagcatccgtgtctggccacccttcaccccaattaggctttctgggtgcaaggaccctgtctcatttcc

SEQ ID NO: 248473 - DNA, 122 bp, Homo sapiens
atcatatttgtcttctcagcatctgactctgtgtttgctaagtgaatgaatgatgcacttcggaccaaatgacgtctgtttaacttgcaactggaaaccaccacaaactgcctgttgactac

SEQ ID NO: 248474 - DNA, 122 bp, Homo sapiens
caagcgttctgcctttgttttcatgaagctatgtctcttacctggtaagaaaaatggaaccgcatgcagctgctgaaaactttaaccagaaacccaaagatattggcacaaagaaaggaggc

SEQ ID NO: 248475 - DNA, 122 bp, Homo sapiens
gggaggcgccggcccagcgaggccgctgggactgtgcactgaggggcgctgaccgttggacgcgcgctccccgcagaccctcgctgaaggagcagggggcggcgcgcgtgcgcggggcgccg

SEQ ID NO: 248476 - DNA, 122 bp, Homo sapiens
tttctgtactgtttctctctttaagaaggctcctattctgctcctaaactcaggaagagacgccagatctccccacaggcaaaaccgcgagggctaactaacactagaaaatgatcagagtc

SEQ ID NO: 248477 - DNA, 122 bp, Homo sapiens
tctccctccccctgcccctgattgtggctgaactgccaccgcttgatagcaaaccacactcggcacaggaaggagaacagcgcccgcggccccgggcctccatgaaatcagcaagggcgcgc

SEQ ID NO: 248478 - DNA, 122 bp, Homo sapiens
caacaacaaggtggtcagccccggcttccggaaaaacggcatcgtggtctcgcgcatcggcgtcaagatgtacgcgaccatcccggagctgggagtccaggtcatgttctccggcctcatct

SEQ ID NO: 248479 - DNA, 122 bp, Homo sapiens
gccaacctctgcgcgaagcaacgggccacgctgcaggaccacgaagccaggcagccgcgtcgactcctgcagggtgttctctccggagtgactcccgagctttcccgcttcccaggcccctt

SEQ ID NO: 248480 - DNA, 122 bp, Homo sapiens
ttgtttcctgaacacatttaatgcattctcaagaccctcagggactttgcagcagctgctcgctaaggctggaatgctcttccccaccatcttcatatggctgtttcctttctttcactcac

SEQ ID NO: 248481 - DNA, 122 bp, Homo sapiens
agacgaggctgagtcttcacccaccaccatttcttgagaagaaagggcaggctgagataccgattgcacaaaatcttaactgaagaggctcccactccttggatctgtctcccttgcatttt

SEQ ID NO: 248482 - DNA, 122 bp, Homo sapiens
taccaacgctgttgagtaattgaaaatttctaaatctccccagtataccagtcccactaccgagtccttgttaaaatgcttccttttactgtagtcctagtatttataggagttttaataag

SEQ ID NO: 248483 - DNA, 122 bp, Homo sapiens
gagaccttggcaccctgctcacaaggcctccgcccagagcatggggtgaggtcgtggagtcgccactgtcctcagctgtgctgctcccaggcctcacctcaacatgctcctgcccgtggcga

SEQ ID NO: 248484 - DNA, 122 bp, Homo sapiens
caaaaaagcttgagttgggatccttgctcccctctctctttgaagtttcttgagttaatccgaggttatagaaacaggcacccccaaacctaggcagcccaagctggagtgaaacacagctg

SEQ ID NO: 248485 - DNA, 122 bp, Homo sapiens
actgtgatagccaatgaggataagtaaaataatggtcaaaagctttaggaaaagaacttacgtgaattccttacttaaatgccataacttaagagacttcaggtgtgcagtatttattacat

SEQ ID NO: 248486 - DNA, 122 bp, Homo sapiens
tgaaggaagccgaggtggccctacgtgtagcggggtgggtggcaggcaggacccagtctccggcagtggcggctgcaactttccagagtatgagcttcccgagctaaatacgcgcgctttcc

SEQ ID NO: 248487 - DNA, 122 bp, Homo sapiens
ccagtgactcaggcagcagccacagctccaaagtcctggagccggccccgcccaacacaccggatgccacaaagcaccacctacctgagcatactgttccttgagtggaccagagagccgga

SEQ ID NO: 248488 - DNA, 122 bp, Homo sapiens
ccaccaggacttgcagcacggtcgcgggatgcttgccctttgcccgtggtttgacacttacgctccccgggcagggagaggtcagggaagctaaggtccgagcaggatcagcaggaataccc

SEQ ID NO: 248489 - DNA, 122 bp, Homo sapiens
gaatgtttttagtggctgtcttatcccacacattgtaataagcctccaaaggcttccccacggtggtagcaatcaagacatcattctgggccagtccaggaactatccccatgcctttagtg

SEQ ID NO: 248490 - DNA, 122 bp, Homo sapiens
ataagcgcttccttgtccttgtccacggcggggcccagctcctgagaggcaatgcgctggcgtgacagctccgtggtgcggtccacggctgcctgcaggtgcttgatctggtcacggatgat

SEQ ID NO: 248491 - DNA, 122 bp, Homo sapiens
cctgattgacaatcctgctgacatcctagtcattgctgcatatttcctgctggtcattggcgttggcttgtgggtgagaagttggggggtgtgctgctggtggctgctggctttgggggcct

SEQ ID NO: 248492 - DNA, 122 bp, Homo sapiens
gcgctgcgggctgccgggaactgttctccgctcggggtgctgaaagcggacgcgggagagcgcgcagagaaggcgaggagccgggtcggccaggctctcctgcaggcgcgggtcctgctcgc

SEQ ID NO: 248493 - DNA, 122 bp, Homo sapiens
ggagagaacatggggcattgctattgggttcacagctgtcttgggctaatcagggcaaagcgtagcactatgacctatgcagagttagctcgccagggacagtagctattctagagaacctt

SEQ ID NO: 248494 - DNA, 122 bp, Homo sapiens
gtcctctggactaaaatggggaacacattgggcctggcaccaatggggactttgccccgccggagcccccgccgagaggaacccctgcccaaccctgggagcttcgatgagctgcaccgtct

SEQ ID NO: 248495 - DNA, 122 bp, Homo sapiens
taacttctctcttttcttcttccattcagattcccaaagctgtgaggagcagacctatttcgaagcatcacagccagctgatgtcacttgcagtattatgcattaagacatcaacccagaaa

SEQ ID NO: 248496 - DNA, 122 bp, Homo sapiens
gccgagggcccgctcccagccccggccgccgctgcagccatcccggccgggtccccacctcgggagcctcccacagccagcccagagaaagcagccacctgctagaacaccgcacttccgcc

SEQ ID NO: 248497 - DNA, 122 bp, Homo sapiens
cctggccgtatctggaggccaaggccatctgtcctggcatggtcagttggtcagaactcccgtggggagccctcagatcggtggttccacataggttggccagtagctcttagtacagataa

SEQ ID NO: 248498 - DNA, 122 bp, Homo sapiens
aaataaaaccatatacgcattcagggtgtaagtgatttcttggctgagtaaggaaaaagacgtgaccacaaggcggcagtagcacacaagcttcatttgggatgtgctttgacaggtaagga

SEQ ID NO: 248499 - DNA, 122 bp, Homo sapiens
taagacccctagaggctttcagtcctgccacagcatgaagttggctcatatcagagccagcgagccagctggaaagaaaggacatgggtcaaggcaagcccagtctagctctgtggaggcca

SEQ ID NO: 248500 - DNA, 122 bp, Homo sapiens
gctggaatgagggaggcagccacctaggccggtcaagtcagaggcccagcaaggagaaagcgagccaaggcaaacgccgacagaagagaacgataaatccgcggcgcactcggcagaacgta

SEQ ID NO: 248501 - DNA, 122 bp, Homo sapiens
acctcgtcttccgcgagcttttcctggaggttctaggagggatgcccctcaatgccacgacgccatttcctactacgacttccatcatgctccgcgccgctccgggggcggtgacccctctt

SEQ ID NO: 248502 - DNA, 122 bp, Homo sapiens
gcgcagtggctgtgctgtgtgtaaacacttatagaaggtggggctgcggcctgacgcacacggcatgaaacggtccttcagcctcggtgtctctgggctccctctctgactgaatgcatcat

SEQ ID NO: 248503 - DNA, 122 bp, Homo sapiens
caagcctgccccgcgcccatagggaccgtattttgcttctcgatgctttctttgtgctaacgttctgggcgaacgcaggcagcagcgctgaaaagggccagagtggcctgcagctctgggct

SEQ ID NO: 248504 - DNA, 122 bp, Homo sapiens
gccccccgaccctgcccctgaagccggttggcctgaaatgcagagtcgatgacctggagccggcccctggcctctgagaagctgagctgcggctgacttggcctttcctccatcggaggctg

SEQ ID NO: 248505 - DNA, 122 bp, Homo sapiens
ccccacctggcttccaggccctgccctgagaacaatgattgaccaccaggcttcctggcacggatttatatccaggtctgcagtgtattgatctcatcagcagacaccagattctcgatggc

SEQ ID NO: 248506 - DNA, 122 bp, Homo sapiens
gaccctaggttataggtactactattatcacccatactttgcacatgaggacatgaaaaccgtaccatggttcagaaggtggcgtcagctgaagcaatccctgtgaacatttaggcaactct

SEQ ID NO: 248507 - DNA, 122 bp, Homo sapiens
tgggaatgcagcccaaagcgggtggtaaactccatttaaggctaaataccggcacgagaccgatagtcaacaagtaccgtaagggaaagttgaaaagaactttgaagagagagtacaagagg

SEQ ID NO: 248508 - DNA, 122 bp, Homo sapiens
agccagtgctctttgatgctgttctaaactctgcactgtgaagttcagaagtcagaagagcgcacctgaggcagacactgggcaggaagatagacctttactcctttctgggcctctgtact

SEQ ID NO: 248509 - DNA, 122 bp, Homo sapiens
ttatcacagctgcaaatgaatgtctttgtattctgtttatagagagtaccttctctgcagcggacaatgatcagatatttcgcatctaatccagcctcaaaagccctttcttttccaatgtt

SEQ ID NO: 248510 - DNA, 122 bp, Homo sapiens
tttctcttctatttgaaaacccagccgatgggggcccgccctgctgccacagtagaaacccgcacccacctcggggagcgctggaagcgctgcagcctgaatccggcagagccgcgggagaa

SEQ ID NO: 248511 - DNA, 122 bp, Homo sapiens
ccagcctggaagaccgcttggcagcccttctggccacggctgtttcttctttgtgcttcccgtgtgcctccccagtagccctcacctgcataccaacccctcctttacccacgttggggctg

SEQ ID NO: 248512 - DNA, 122 bp, Homo sapiens
gcttggagttcccggggctgtggtggatgtactgcaagagaggaaacacgaggcggtgagcggctggagaaggtggctgctacccgtgcttcacaactgtgagtattaacccacaagcctgg

SEQ ID NO: 248513 - DNA, 122 bp, Homo sapiens
aattaaaacacacgattattgtatttcttttgtattgccaacatgttcccgtgctccagtcgaagcaaaagattaaacatccttatatttttgttgtgattttactgccaaatgcaaatatc

SEQ ID NO: 248514 - DNA, 122 bp, Homo sapiens
tgaacttctggcggtgaggatgcgacaagagtcacaggaaagccgaggctggggctggaccgtgggaacgtcccagcaggaaccaagccagcctccgccgctcagcacttgacggcggcttt

SEQ ID NO: 248515 - DNA, 122 bp, Homo sapiens
gtcccatcgcgataagaaagataatctcctatcctcttgccgctcacactggccgaggtccgatgcagcaggctccgaagatcatacagacgccattaccactcttggctcccagaaacctc

SEQ ID NO: 248516 - DNA, 122 bp, Homo sapiens
ccgttgccccgccccttgcaaccccgccccgcgccggccccgcccctgctctcgcgccggcgtcggctgcgtctccggcgtttgaattgcgcttccgccatctttccagcctcagtcggacg

SEQ ID NO: 248517 - DNA, 122 bp, Homo sapiens
ttcctaaacactatctaagtcaaattagatttaccttcaaacaattacacatggtgcagccgtgcagcagaaaaagcagtagatggggagttaggagacatatgttctagatccagctttgc

SEQ ID NO: 248518 - DNA, 122 bp, Homo sapiens
ggctggtacccaaaaacacgcctctccaccacgtgaccatcctcatctatcccagtctaccgctgctctctcaggggcatttgtgtccccgtttagggtcctaaacgagctgccgagggagg

SEQ ID NO: 248519 - DNA, 122 bp, Homo sapiens
agaaggctgggcgagcgaatgtgtagtggtttctgcggctccattgttagtgatgacttacggatggaaaagggagttttgtagctgagtgaaaactgttagaaaaccaaatgccgctgtca

SEQ ID NO: 248520 - DNA, 122 bp, Homo sapiens
tatctcaagaagaggaaatgctcagaaattgctttaccaatgcaagcctgccatgaggctcgcaaaagcaaatttgggaggtgatagttacgcctgcccaaggccagctgagggtgtcgagg

SEQ ID NO: 248521 - DNA, 122 bp, Homo sapiens
cacaccttccgtgcagaatctgagctgatggccacctgcgtgggggggcttcgggtcacacgccctccaggtgacccctctatgccttggttccttgctctggtaggcttttcacttacaat

SEQ ID NO: 248522 - DNA, 122 bp, Homo sapiens
tcttgatccttaacctccatacctccttcccaggtagaacagcggctggagccggccaagcgggcagcccacaacatccacaagcggctgcaggcctgtctgcagggccagagcggggcaga

SEQ ID NO: 248523 - DNA, 122 bp, Homo sapiens
ctcccatcctctgcatcctccaggagttgagacctgaagggtcagaggggacttgcccaccgtgagccataggcgtcactgcattagcagctgagtggtacacggaccttccattctgctcc

SEQ ID NO: 248524 - DNA, 122 bp, Homo sapiens
cgtgagagtgggggctagggattcctccctgggtgcgggtgtaaccaatttctggtctgccgatggccttgggaaagggcctcccatctgcttccaacaacccccttacaatgtcagaaaat

SEQ ID NO: 248525 - DNA, 122 bp, Homo sapiens
aggacggagggtctctacaccctttctttgggatggagagaggagaagggaaagggaacgcgatggtctagggggcagtagagccaattacctgttggggttaataagaacaggcaatgcat

SEQ ID NO: 248526 - DNA, 122 bp, Homo sapiens
tcttagatgggaaataacctgaaaaacgtcctcgtctgtcctcttcacttctcctacccacgtaataacgagtggattattctggacagtagttttcatactaccttctctggatctctttc

SEQ ID NO: 248527 - DNA, 122 bp, Homo sapiens
ctgagaactgtgactttaccaggagccctatcttggaataagagttacacctctggaccacgtttctcactagtactttgcttgactggaggaagtgggtgacttttggctgcttcggtgac

SEQ ID NO: 248528 - DNA, 122 bp, Homo sapiens
gcggacgggaagccgaggcggggagccgcaggccgggcatggcgggcgcctcctcctctgcgtcctgcctgccccgggcgcccgcggcacacgcacctgcaaggttaagagcgaaagcagct

SEQ ID NO: 248529 - DNA, 122 bp, Homo sapiens
tgagaattggcccctgtggttagagatgagtaaagccttggagatgggaagtgacttgttcgaatctacacaacttgtttcctgactaagtggataccaggctcctgatcctaaacttatca

SEQ ID NO: 248530 - DNA, 122 bp, Homo sapiens
aagcgcttcccgggctacacattgcgtaacttcggcagccgggcggagcctgcacagaggcggagccgcggcagccggagagaacgccccagcaatagtcgctaggaggaagccccaggagc

SEQ ID NO: 248531 - DNA, 122 bp, Homo sapiens
gtgcccatgttagttctcccttcacctcatgtactccccatcactcctataatccataaacgattctgatcctgacacctcctcaaaatcctccagcaccagactggtggagtcctcaccca

SEQ ID NO: 248532 - DNA, 122 bp, Homo sapiens
cgttgctgttcgcatcactcccctaaaatacgcccagatttgcctctggattcacgggaacgatgccaattgtgcttacggctaacagagacctgaaacagggcggtgtatcatctaaatca

SEQ ID NO: 248533 - DNA, 122 bp, Homo sapiens
aagacgcggtcactactaggcggagttaaactatggagccggtacccccaataccctgcccggcaaggccgcctcgtgacgtccccgtctgacagagtccctccccatagggccgcgacaga

SEQ ID NO: 248534 - DNA, 122 bp, Homo sapiens
gccagggcacgtgggaccttgggacatatggccccagatgtaggagccaacaggaggtcacgcctttggatgtcccatccggagctcttaggtcacaggctggggtgggagtgaggggcaga

SEQ ID NO: 248535 - DNA, 122 bp, Homo sapiens
accataaatatttaaagacatcagtgccgggcacattgggaacctcaacaaagttgtttccgttatccatctccgaccagaattcaggaagaactttgcctgtcttgttcccgctataacca

SEQ ID NO: 248536 - DNA, 122 bp, Homo sapiens
ccatcctcgagaatgggctcctttcctgctccctctccgctcctgctggcgagtggagaccggcacctaggtccagacgcggctgcgctgcctctcctagccatcgagacaggatgtgactc

SEQ ID NO: 248537 - DNA, 122 bp, Homo sapiens
ctcctcccacctgtggtttgtgtgagccttccgtttcctgctagaaccctgactgcatcacgggctggatcctaagtgctctatgcaaatcccatcacctcctcccacaccacccctctcca

SEQ ID NO: 248538 - DNA, 122 bp, Homo sapiens
cttgggctggtctgcgttctatgtgattgttggagtactccacaatgagcaatgcacggccggcagccagaattcttttttatcaagtactcctacactcatcagtatgcagctccatgctc

SEQ ID NO: 248539 - DNA, 122 bp, Homo sapiens
caaattagtgactgacactcggaaaagttgatgctgtaaaggagagcaagcagggcgccacgcacgcggtgtgaaccaccaggaccgagtttactgtggctccccaccccctgcatttttca

SEQ ID NO: 248540 - DNA, 122 bp, Homo sapiens
agaactcagtcctctgatggctaccacaccatttcttcattatgccctgggttccttggccgcctcctgcctcacatagaagttagacaaaaaggcaacttttagaaaaaggcaagatgtgg

SEQ ID NO: 248541 - DNA, 122 bp, Homo sapiens
ccctccacactgagcaggctttcatctcctcctttaccatccatcaggaactcatttcgccggccccctccccctcccacccccagtccccattcagccgagcccctcgctccaaaagcccg

SEQ ID NO: 248542 - DNA, 122 bp, Homo sapiens
ccacttggaagaggtggccgtcgggcgagaagacggtgatggcgcggtcgtagctcatgccggcgggcggcggccgggctccttccgccgcgactctcaaaagcgcacactcacggcccgcg

SEQ ID NO: 248543 - DNA, 122 bp, Homo sapiens
agtctggctcctggctgcctcaatttccaaataatgaataaagcccatgggcggaggcaccggtcactacagccaccaggctcctgcctgcaggccagcctaagggtgatccacagctgggg

SEQ ID NO: 248544 - DNA, 122 bp, Homo sapiens
acgcccaggcagagcctcagtttccccatctgctaggcggtaaggtcggtctccaaatagcgccagcagcgagagaggacttacccggaaggtgccgggttcgagcccggaacggcccctct

SEQ ID NO: 248545 - DNA, 122 bp, Homo sapiens
cagaagcaaccccaccccgctcaggactggagctgaggccctgcaggagaatctagtgcacgtgtgccctccctcactgaaaccaaggcccagcacatcacgcatgagcaggatgtgcagtt

SEQ ID NO: 248546 - DNA, 122 bp, Homo sapiens
aaaaatgaaagaaagaagccctctttgaaaatccttactgtttcccactatctcctacagcgattgccctttcattagtgtggaaatccaacaatgtggaaatcgagtgttttttttttttt

SEQ ID NO: 248547 - DNA, 122 bp, Homo sapiens
aacaaggatcacaaggtttttctgctgggactgcaggttgcagaaagacgctatctcttccgagagagtcttcaaataacgagttctctggccaaatcagcccttacataactcacccgcac

SEQ ID NO: 248548 - DNA, 122 bp, Homo sapiens
caaagtgctgcttccaaagctcattgacttttctgctcaggtaacatattcaaaaagccccgtgtgcacgtgcatttgcaaagacttccctgcgtcaaattcatgaaggagttattgttcca

SEQ ID NO: 248549 - DNA, 122 bp, Homo sapiens
cagtttgatctcagactgctgtgctagcaatcagggagactccgtgggcgtacgaccctccgagccaggtgtgggttataatctgctgctgcgccattttttaagctcgtcagaaaagcgca

SEQ ID NO: 248550 - DNA, 122 bp, Homo sapiens
tacagcgtaaacagtaatgtacagccacgaacaggagccggcaggagtggcggggagacccgcagtcccactgtgcggcacccacatgctgctcactgtggccggagcgtcggactttaagg

SEQ ID NO: 248551 - DNA, 122 bp, Homo sapiens
aagcatcggttgcgtttgctggagttgttgtcagcatgtttgccgctttgatttagaggccgggataaagggcgattatcaaaggactgcatgttcccggcatggccacgatgggccccggc

SEQ ID NO: 248552 - DNA, 122 bp, Homo sapiens
ggcacaattctaggcactggaaacatctgtgaacaagataaccatcctcctaccaagactcgggggatagggactttaatgagcgtggcactgtggtggggctagaggaaatcagggaaggt

SEQ ID NO: 248553 - DNA, 122 bp, Homo sapiens
gtggttggtcccatggtgtaatggttagcactctggactttgaatccagcaatccgagttcgaatctcggtgggacctttcaaaggtgaacgttttacagttcctggcttggcctctgaatg

SEQ ID NO: 248554 - DNA, 122 bp, Homo sapiens
cagacctaacagggctggtaaacagtaaagggaggggctggttaatggataatgagacaacgaacttgagactgagaaagacggaccaggctccatcagcagaagctgatagacagacacac

SEQ ID NO: 248555 - DNA, 122 bp, Homo sapiens
ctcttgtgtggagggaggcgacccagtctaggaaagtcaactacagaaagaggtgacctccgaaaggattgtcttagcgctattagaatacatgtgaccacaccaaaagcccaggcggacac

SEQ ID NO: 248556 - DNA, 122 bp, Homo sapiens
aaggacacagttaccgttgctgggttccggtgaagggacacgtctgccattgctcggttccggtgaaggggcacagttaccgttgctcggttccggtgaaggggcacgtttaccgttgctca

SEQ ID NO: 248557 - DNA, 122 bp, Homo sapiens
gcggtgcagatcgtgtggccgcagcgggcgcgcgccgttccgggcaggcggcggggcgcgcggcacccgaggttgaaaggacggtagcagatgttgcagtccagctcgccccgctccggaag

SEQ ID NO: 248558 - DNA, 122 bp, Homo sapiens
tcagctgggagcagccacccggaccccgtcccggtcagccagccccagacaccagcccctcgcagaccagcccccgccctcaggcagcctgtggcaccttgaccagcgtccccaagccgtag

SEQ ID NO: 248559 - DNA, 122 bp, Homo sapiens
gtgggggtgtcaaccatgccgcgccttggggttgtgagtgatgtgagaggatggccacggcgggcagggagcaccgaggggactcacggatggggaccagtgcccggacgcaggctcgctcc

SEQ ID NO: 248560 - DNA, 122 bp, Homo sapiens
gtggggcctctcaccagacctccaggagcctccgctgtcaggggcgtggaggtgggcagacgtatttcctggcatccgtcttgtttccgcacgtcgagacccttccttttctcgacagacat

SEQ ID NO: 248561 - DNA, 122 bp, Homo sapiens
gtgtcggtgcagggctggccaggaagcctgggatggcagcagctgtggccttagctgagccgggctaacccaggtggccttcgaccattgcctttctcctccaggcccaggcttgggcaggg

SEQ ID NO: 248562 - DNA, 122 bp, Homo sapiens
ctcctccccggacctgcaggcttcagactccaggagagagagctgggagcagggagggggcggggcgggtggttaacagccacctccttggggcactccaagcagcaggcaagtgccagtgg

SEQ ID NO: 248563 - DNA, 122 bp, Homo sapiens
gctgtacaacccaagcaggcctgtgccaatgggtggtaacatgtggcagaacttccacagcgcagagagaaaaatatagaatggatataatttcttagccacccctggctaagggtaacata

SEQ ID NO: 248564 - DNA, 122 bp, Homo sapiens
ggaggcaacgaccaatggggtggcagccacggcttctgctgaatgaaaacaaacgcagcacgtgggcccggctctagagccatgtgagccctcccggcggccggagccctgtaggtgccctc

SEQ ID NO: 248565 - DNA, 122 bp, Homo sapiens
aggctgaggcaggagaatcgcttgaacccaggaggcggaggttgcagtgagctgagattgcgccactgactccagcctgtgtgatggaacaagactctgtctttaaaaaaaattatgcatag

SEQ ID NO: 248566 - DNA, 122 bp, Homo sapiens
catctacggtcacactgccacctacggttgtactgccacccacggccacactgccacccacggccacactgccatctacagccacactgccatctacagccacactgccatctacggccacg

SEQ ID NO: 248567 - DNA, 122 bp, Homo sapiens
aggacctcattcaggtggtgccggcatttatctcccaacatcgggcctggcctctagagacgattaagcctgtgctttgcaggtgcatcttttgtccccagtaaagctctccacttgagctg

SEQ ID NO: 248568 - DNA, 122 bp, Homo sapiens
aggaagccatggagatcagaggataaggctaggatccagcctcagaggaagaggatttttcggaagagtacaggtgagaggctcagctccaagacctggtcccatggtcctgcctactttga

SEQ ID NO: 248569 - DNA, 122 bp, Homo sapiens
ctcgggtgcggggccggggggaggggtcccgctctgttccccagcctgggtcttcgcactcggaacccggtccggtccgggaccccacagccatctccacgcgttcacccagccctggaggc

SEQ ID NO: 248570 - DNA, 122 bp, Homo sapiens
cgcccgcctgcccgcgaccctcaccgcgatgcacttctcgaaggccgtgatcttatcatgcgccacctcctctcggatcgccacgtacatgtagggcacgtagctcaggaagtagatgatgc

SEQ ID NO: 248571 - DNA, 122 bp, Homo sapiens
ctgcaaatgccagtcacagtttcactggtgctcaggttgcctgaaatgagggagaagtaacgagttctcctactaggagccatactgggacaagaggtaacaaaataaagagtcctgttttg

SEQ ID NO: 248572 - DNA, 122 bp, Homo sapiens
gtcggatctctaaattatctaatctggcggctgcgtacgactcagggaaagccctggccgcgagctttttcaccaggcttgagctcagcagccgggcccgcagtgttgccgccagtggggag

SEQ ID NO: 248573 - DNA, 122 bp, Homo sapiens
gacaaattatgctaccaagaaacaacacatcattatccttgggcctggggctcagtgagtcgtaacgagagtaataggaaatccacggttggggagagaaacggtcgtgcttggccagtaga

SEQ ID NO: 248574 - DNA, 122 bp, Homo sapiens
cctgaaattctgcatttctcacaagctctcagacgatgctgatgctgcgagtccatggaccgcatgtggagaagcaaaggtcctcatccccaggcccacaggtcccttgaactgggctactt

SEQ ID NO: 248575 - DNA, 122 bp, Homo sapiens
tgcttactctaaaagggcacaggagggaagatgggtgggtaatggagcctagaagagtgacgctccctggtcggccctaatcctgccgatcggggcatatgctggaacatcccagtcccact

SEQ ID NO: 248576 - DNA, 122 bp, Homo sapiens
tcaaaatgttcatacagactgccaacagattaattagtagcctctttggaagcatgatcacggtctaagaatagccttaaatcctgttcaagactagcttctttccccaaatcattatagtg

SEQ ID NO: 248577 - DNA, 122 bp, Homo sapiens
cccgagtgaagctatcccaattgttttcatcatgagtctttgctttagttgacacagcttcgcactagcacccaccgcgccagtgggggccgccttgcctcaggcaagaaagcccctggctt

SEQ ID NO: 248578 - DNA, 122 bp, Homo sapiens
tctgccatgtgactgagactctgttggacttctccaaattcagagttcagcctggcatgccggccaggagccccttggagagattcggcgtgaggaaacaggaggcctcacgcttccttcgg

SEQ ID NO: 248579 - DNA, 122 bp, Homo sapiens
atgcgcacatcgctgtgccggtatcgccaacagatggaagcacgcatgcgcgcaccgctgcgtacctagcactccgacagatgtacgcatgcgcacaacgctctgttctcgagatccccgac

SEQ ID NO: 248580 - DNA, 122 bp, Homo sapiens
tggggaaatattcacgttaaaaagattttcatataaaggcagtttgtaagcttcaggtgacgttagattaaacccaggctttgttttggaggactgttttaacttcaccccatcacagatgt

SEQ ID NO: 248581 - DNA, 122 bp, Homo sapiens
cgcacgcgccacgctcccagcgccatgtgcggccgatctcacgtgtccgtccgccccagccgcctgctcagtactccccaccccgctaggacctagggccaacctcgccccagccaggcggg

SEQ ID NO: 248582 - DNA, 122 bp, Homo sapiens
gcataaatagcagaactacatttaccacaaaggcccgacattcatggtcatggatccttgcgcatgttttctaagagcaaactgtacaaacacataaactctgaaacactgacgcacaagcg

SEQ ID NO: 248583 - DNA, 122 bp, Homo sapiens
gaccaacaaggagatgcgtcgggccttcatccggatcatgtcctgctgcaagtgcccgagcggagactctgctggcaaattcaagcgacccatcatcgccggcatggaattcagccgcagca

SEQ ID NO: 248584 - DNA, 122 bp, Homo sapiens
ctgtgggggatccctacactggttagagttctagacccagagcagggttatggtcaacggcgctctggccacagaatgcagcagagcaaggactgtggaacaaagacgcggcttacatgaat

SEQ ID NO: 248585 - DNA, 122 bp, Homo sapiens
ggtcgtagcaatcgaaggaggcggagtcctcaatgttgcagtccgtggtcagccgccgcccgcccgtcacgtagagtttgtttcccatcactgtggccccatggtgcatcctccggtctttc

SEQ ID NO: 248586 - DNA, 122 bp, Homo sapiens
tcatcctcaccccatgcccacccgcttgcagcccagatgacctgtggtgtggacgagttccgctgcaaggattcgggccgctgcatcccagcgcgttggaagtgtgacggagaggatgactg

SEQ ID NO: 248587 - DNA, 122 bp, Homo sapiens
tcaaagttactacttcaagctctgagcctactattaagaagtgccttctttctggtccggcgcggtggctcacgcctgtaatcacagcactttgggaggccgaggcgggcggatcgcctgag

SEQ ID NO: 248588 - DNA, 122 bp, Homo sapiens
taaggcagcacagcagggtcccccaagtccggagacaggctggttgcccactgagggccccgtgggacaccggggagtgtcctgcccccacctgatgtggtgtgggagagctcaaggtacag

SEQ ID NO: 248589 - DNA, 122 bp, Homo sapiens
ctcccactgagcgatggttttgttccgctggggtgaaaggcagctcccccttctactgtgcgtttaaagcacccccaccagggcctgacaggccggggcgagggagcctccaggtgccgctg

SEQ ID NO: 248590 - DNA, 122 bp, Homo sapiens
ggcacagatgcccgaagacctacaggcaggtgcaatgggggagctggcagaggagagagacgtctcagcctgtccccagatggatgggctgggcctgggttggggcttctcccagaccccag

SEQ ID NO: 248591 - DNA, 122 bp, Homo sapiens
ctcctcctcgagctgccggtagcctggagggacccagcggacagccgggcctggccgcatcgctccaaacggtgtcagaaagactccggctttcaatgccaagtcatttttaagccccgatc

SEQ ID NO: 248592 - DNA, 122 bp, Homo sapiens
aaggtttgggccgaatattatgcttgtgttcaaagtagttcccgtcctgtgaaaacaaagcgttaaaaaggccctcagtggaaggcggacactgttgcagataagattaaacgaacgatagt

SEQ ID NO: 248593 - DNA, 122 bp, Homo sapiens
ccgcccccaaaggctgctggcaaccaattctcggtggcgaagtcgtgacgtcagctgttgcgggtcagattgggagagcttcctggtccttacctagcaagattctgccgctaggtggcgaa

SEQ ID NO: 248594 - DNA, 122 bp, Homo sapiens
gtgctcccatctcctcataacattatgcgctcaggttcaggccgcacgtgggaacaccggcgcaggacaactccgggacacccggagcatgcgcacaagtgaggggaagccccgccgcgggc

SEQ ID NO: 248595 - DNA, 122 bp, Homo sapiens
gagtgcccacgctgggggtgggatgtgtccacaccgcgtgggggtgcgggggaccctggccggcagcagccgtcactcacacggttctcagcccagagctttgcacttcctcatcccagcct

SEQ ID NO: 248596 - DNA, 122 bp, Homo sapiens
taacactcaccgcgaaggtctgcagcttcactcctgaagccagcgagaccacgagcccaccgagaggaacgaactccagaggcgccgccttaagagctgtaacactcaccgtgaaggtctgc

SEQ ID NO: 248597 - DNA, 122 bp, Homo sapiens
tctagctggcgcatgcgctttccagcctcaacctgaagggaagcggtcggggagggcttgcgcctgcgccctcccttccctcccgcggtctccacagccgataccgaacgcggcaaggaagc

SEQ ID NO: 248598 - DNA, 122 bp, Homo sapiens
ccaggagaagcacgcgagatctcggagggcagggctgggcttcagagggtctgtgagacacggggagcccatgggacatgctgggtatgtgtgcatttatgcacttggcgtttttctgggga

SEQ ID NO: 248599 - DNA, 122 bp, Homo sapiens
tggcccccggccgggcgcctgcatcgggactggtgggaggcggcgcgcgggggtggaggccggcgccggcgcgagcggcgcggaagggcgcgaaggaacgcgcggagctcgcagcagcctcc

SEQ ID NO: 248600 - DNA, 122 bp, Homo sapiens
tatggggcaggggaggggcagcgaggggccagctctcacctgcgtgacgtcatccctaggcgtcacacaggtctcaccccctgctgtgaagttgcagaaaactcggaaggcatcccgagcac

SEQ ID NO: 248601 - DNA, 122 bp, Homo sapiens
ggccctcaggcagagtccagagatacaggcacagaggccctgacccctcacatctggaaccgtttacatactggtgagtaaagctgagtgaaaggactatggtagaagggttaagaatgaga

SEQ ID NO: 248602 - DNA, 122 bp, Homo sapiens
ggacccccctcatgccatctgtgtccccaggtacaagtatgagttctgcccgttccacaacgtgacccagcacgagcagaccttccgctggaacgcctacagtgggatcctcgggtgagtgg

SEQ ID NO: 248603 - DNA, 122 bp, Homo sapiens
tcctctatcaggaaaactccagccacaattggattgcactttgcttctgaaatcctgaaacgtttcaatttggtaaaaataaagagggtacaataaattctgtgctttgaaaggtttgagag

SEQ ID NO: 248604 - DNA, 122 bp, Homo sapiens
catctggaggacatttttttccacccaaagtgttatttctgtgtgtcgtcaatgctgggacgcatgttctctttttttcacgttttagcatctccaacatggggggacatcttacaatcgta

SEQ ID NO: 248605 - DNA, 122 bp, Homo sapiens
tcttttccttgatttacaaagatagtcaatacattttcctaccaaaaagaactggccagccgtggtggctcatgcctgtaatcctagcagtttaggaagccgaggtgggcggatcacttgag

SEQ ID NO: 248606 - DNA, 122 bp, Homo sapiens
caccgcctcctacagtcctatggcccactgtacccttggcgctggagccctggaggtgggcggtgagggccgcgggccagggaaagctcgggtccgcaagagcagggctctgtttctgcgcc

SEQ ID NO: 248607 - DNA, 122 bp, Homo sapiens
gtgactgcctacgggttggggtacgttccctcccccgccctgccacttcgtggcaggcttcgtgtctctcaaagccacgcagggacattgcccaggttcctgcacccacccaaattctagga

SEQ ID NO: 248608 - DNA, 122 bp, Homo sapiens
acagtgagaacaatgttcaatttcccattactttgggagggggcactagttttcccaaggcgatctctgacccctcaattgatttcacatgaacttttttccagacctgttttgtctagctc

SEQ ID NO: 248609 - DNA, 122 bp, Homo sapiens
ataaaaccttccctacttaaccatgaaagagtcttttctcatcataaaataagccttctccgatttccatcctgtaccccacttgttttagacaaatctatttgggtttgcaatttcagcta

SEQ ID NO: 248610 - DNA, 122 bp, Homo sapiens
gcagctgccacaaggggatccgtttgctgtccctgctggttctggtttggggtcaaaggacgttggctggctcctccacggagaacctgggaaaggaagacagaaataactcaaccactttc

SEQ ID NO: 248611 - DNA, 122 bp, Homo sapiens
tgtgaacaaaagtcattctaacaattgccttcagcgtcacgtgcattgccactgcgctttcggcacgagggatgctgagccctggtgtcagagtcgtaatttaaagcgtgtgtgtatatgga

SEQ ID NO: 248612 - DNA, 122 bp, Homo sapiens
caggccccggaccctcggcccaggctggggctccgccgccgcagccagccgcatcctagtcgctcaacccgcagcaacccccagcaacccccgagcgtcccgccgagctgggggagaggccc

SEQ ID NO: 248613 - DNA, 122 bp, Homo sapiens
ggcattattgtaattgtctgtttttgaagttgctatttaaagactgtaaaggcttttggtcgatagaaaagtcaataaatgcagactgctccatggtgaaatctcttccattccgacagctt

SEQ ID NO: 248614 - DNA, 122 bp, Homo sapiens
tacccttcagcaataaaaacatggccctttctccccgctctcgggcggttaattttaacccgcagatcgcagtttcagcggactaacattcctcgcagaccaagcctcgtctctgccttctt

SEQ ID NO: 248615 - DNA, 122 bp, Homo sapiens
acgcctggaaggcactggccaaggcttttggtctctcctatcatgtcccgggctccccgacgcccccagttcaaaccggaaggagctctcctagaatccagcctccctgtcccacacccgga

SEQ ID NO: 248616 - DNA, 122 bp, Homo sapiens
gagaccaacagaaaacctaatgtcagccttaaaatcaggtggcttagaaactccattttccggccattcggtggtacttcttatcaactcgtcaacataatgatggtattaaaagcaaggtt

SEQ ID NO: 248617 - DNA, 122 bp, Homo sapiens
cagcgttcaggagagaagtcctgaacacacaggtagtggatcaacgagctccaggggtcacgtggcagcacggaagggctcctgtgctgatgctgaacccgaaacacactggccgttctggg

SEQ ID NO: 248618 - DNA, 122 bp, Homo sapiens
ctggcgctggcgctggcactgcgcggcggatccccagcccgcccgccgcccgcgcgcgcgcgccgcttccctgacaggcgccccgcccctcgcgacgatgtagcaaccgtggaatgctcgga

SEQ ID NO: 248619 - DNA, 122 bp, Homo sapiens
tcccgccggcggagaaggcccagacaaaatgtgcgccaatcaggatacagacttggaggacgtttaccctcaggaccaataagagggagggcggaccgggccaagggtgccggttcgctctc

SEQ ID NO: 248620 - DNA, 122 bp, Homo sapiens
attttcagcagtataagccaaaggagtagacttttctggctaccctttcagaaactgctccgtattctgataagcagttttgccaggacatttctgctttgaaatttctcaatatggatgtc

SEQ ID NO: 248621 - DNA, 122 bp, Homo sapiens
aagtcccgcagcgccttgagagggcagccacagtcccaggggttaccctccagccacaggcgctccaggcccgggggctgcggcgtgaaggtccgcagtgagttgttcctgaggctgaggta

SEQ ID NO: 248622 - DNA, 122 bp, Homo sapiens
cttccttcgccatgaatgaggcctgttttcgggcgtttggccgcaacagcgcactctaaacgctgctcacctgctccttgtgactggtcagtgttttctgcattgccgtgaaaggtatcttt

SEQ ID NO: 248623 - DNA, 122 bp, Homo sapiens
gtcaaatgccaggggaaaccattagctggaatccacaggaaaagaatgcaacacggagcacgaagcccaagcacagaagatcaaagacgccaggagaggacccctcgcaccttttccaaacc

SEQ ID NO: 248624 - DNA, 122 bp, Homo sapiens
gcagcacccagactgccgagctggtgtgagccgtgtggggccaaggacatgtgggcaaaccgggctggctggtgctggcgacgtgttgacacaggtcctcgcggcatgctggccggatactc

SEQ ID NO: 248625 - DNA, 122 bp, Homo sapiens
tattcagttttgattccctgacttttcctgctggtagtaactgtgggcttctacctgtcgcgacatggtaatgtagagcctcctagttgtcgtgacgttccagcaatcatgactttaattga

SEQ ID NO: 248626 - DNA, 122 bp, Homo sapiens
gcccaaaggggacagcactgctctctcttatcaaaacagggccttcttggagcttactaacgaccttaaagcccacaacaagcagctcaaatatatgggttaggcagcatggggctgacacc

SEQ ID NO: 248627 - DNA, 122 bp, Homo sapiens
ttctctcattctttttttctttgtcctcctcctctctgtaccccctcatgaaaaactaggcggtgaagtggggcaggaaatggtttcattcagatcactctcctttcctgcagtaaacaggg

SEQ ID NO: 248628 - DNA, 122 bp, Homo sapiens
acatgttcagctgggaaatagatctgtggttagaaacgggaagtttgagttgcaggcttgcgatccgggcaggtccctcagatggaggggctgcacctccactgccccccccaccgccgccc

SEQ ID NO: 248629 - DNA, 122 bp, Homo sapiens
agctatttacaggacgactcccttcatctggtgcggagcagtaaccccctcgtctggctccggcagcacaccgtgtgcgctctcacctttgagctgaggtgttcacgtccgaggtggaggaa

SEQ ID NO: 248630 - DNA, 122 bp, Homo sapiens
caggcctctcagctggggcctctaccgaccggcgggtgttgcagtacaggtcgtgttcagcgttcacgtagctgttcaggcgctccgcatccagctgttgccgccgcagtagttcttctctg

SEQ ID NO: 248631 - DNA, 122 bp, Homo sapiens
cgccgtagctccgcccctctcccctcagcccgcccctctctgttactggctctcgctcagcgttctcggtggaagtggtttttccgggagagaccacgcttcccctcaagctccccaacggc

SEQ ID NO: 248632 - DNA, 122 bp, Homo sapiens
ggcctcagagaagggtgtcccagatgtaggcaaagcgtcctccatgtgttcctggaggaccgtcccaagtccttctccattctcccaacctcttgggcctggtaagtctggatgcgagcgca

SEQ ID NO: 248633 - DNA, 122 bp, Homo sapiens
catctggctttctgtccaccggcacagatggcaatgttgtttctcgactcctccgtccatcgcctgcaagctgagccgcgtgatggagctcagcctgcagcagccgtcttcacctcaacttc

SEQ ID NO: 248634 - DNA, 122 bp, Homo sapiens
gcaaaaggacttggaagctaataaagctggccgctgcttcggaaatgcaaaggcttgacacgtgttcatctggcaaagctggactgaaaccacactccccgcagcaatgagtggcgacggcc

SEQ ID NO: 248635 - DNA, 122 bp, Homo sapiens
caatcagagcacttggcacctgcgacggcgctctccccccacctcacccgcaaggcggcacgagccggaatcttccagtctcaggctgtttgttcccccgcggggcaatgcgactgcgcgtc

SEQ ID NO: 248636 - DNA, 122 bp, Homo sapiens
cccgtatctcaataaagagaatctgctctcttcagccctgtgtctgtgcttgagtgggggcgagcacggggctgagactagaggtcggcctctgcctggaaagtcccgatgtctgagcggaa

SEQ ID NO: 248637 - DNA, 122 bp, Homo sapiens
tggagtcgttgaacacaatgctattttgctcctcagagagtatccggcagtctctggagacgtttttggtagtcacaacagggagagtagggaaccactggcatctagtgggtggaggccag

SEQ ID NO: 248638 - DNA, 122 bp, Homo sapiens
aaaggagggcttcgggcgtctccgtgacgagctgtggttgcaggctggcctggctcccagcgtggccccccaaatcacgggcctcccagctcaccctggacactggggcaccgggcccagag

SEQ ID NO: 248639 - DNA, 122 bp, Homo sapiens
ccttctagctatctgcacagccctcatggccatctcaacccctaaagagctaccttgctccggagttcttagcaatcatctctgcacagaacctgggaggacataaaactgccaggcgacag

SEQ ID NO: 248640 - DNA, 122 bp, Homo sapiens
gccccagtgagaaacgccaccaggcgagagccaggcttgctccggccccccccggaagaacggccggattgtagtgggggcgccacttgaaaaaaaattttcaggtccctgaaaggtgaccg

SEQ ID NO: 248641 - DNA, 122 bp, Homo sapiens
acctgaggtcacgcacgcaggcgttgcccacgccgggaaaggcgtttcaggagagcatgccggcctcctggtgcacagaactgccgtcaggacattccctggagaagggaacagagggagac

SEQ ID NO: 248642 - DNA, 122 bp, Homo sapiens
cgggagggggtctccggaggagggcgcgggatgctcggagctgcggagtcttccagagcccgacttggggcgcggaggcggagggcggcctggccttccggtgtctgctcccaacccccagc

SEQ ID NO: 248643 - DNA, 122 bp, Homo sapiens
atctcccacgtagcatggccagccttgtgtctattaaacacttcctttactgcaatgctgcggtctttctctatgcactgggcaggaggaacccctctggtggttacattagccggtggaga

SEQ ID NO: 248644 - DNA, 122 bp, Homo sapiens
gcctgctgctgcacatggctgctctcctggttggcggcagcctgcggggagaccaaaggacggtcagtcagggtgacaatggtttccagtgggggatcttagtctggccctaggtgagaaga

SEQ ID NO: 248645 - DNA, 122 bp, Homo sapiens
ccacagccccttcctcctcggcgtgcagggctgacatcaccgactgcgtttctggtttggcgggtggggagatggttccccgcagggttctggtacacctttgcccccagggctagcgccat

SEQ ID NO: 248646 - DNA, 122 bp, Homo sapiens
ctcttggtgcccacggatatacacaaagtgccttttgcacattctgattcagcaggggcccgcatacgtcccaaggagcacatagaaacatgcacacgcaaaacacacgtgcacaggcaaaa

SEQ ID NO: 248647 - DNA, 122 bp, Homo sapiens
gcgacgaggaggtgcacgccggcgtgggcgagccgctgcgttcactcagcaactccaccgcgcgcaacgtgacctggaagctgtgcagtcgcctgtagggacccagctcagtgagtttcgct

SEQ ID NO: 248648 - DNA, 122 bp, Homo sapiens
tcctgcccaccgacctctcccagaccctggccttctccttcccctccccttcccatccggcgtctggctcaccttgcgtccgaagacctgcacagactgcagcgggcccttggacggcatgg

SEQ ID NO: 248649 - DNA, 122 bp, Homo sapiens
cactgtgcgaaagctctcccaagccagcaagcaccacgctctccccgcggcaggaaagtacgttggtgtcatcctagagccccagagggctgagggaagactcgagctctaaaattagccgc

SEQ ID NO: 248650 - DNA, 122 bp, Homo sapiens
ccttgcgctgggccccagggacccgggcatccctggttcacgcccagggtgtgcctcaggcgactaggggtaccccaacttggacagaaggcccgtgagtggaagttgaagtttgtgggagg

SEQ ID NO: 248651 - DNA, 122 bp, Homo sapiens
tagggcagccaggccacccagtgtgcctcctttcacactcctctggggctcgtgacattacgagccctaacccgggccctggcctaggctgtgtgtttccagtctcacctctcttcacacct

SEQ ID NO: 248652 - DNA, 122 bp, Homo sapiens
ctctgctctggggcaaaggagtgctgtgaaaagggagacgagtagtttctgcaccagtcccgcacaggccacctgcaagacaagaggagtttggaaggctggttagttactcctgtaattcc

SEQ ID NO: 248653 - DNA, 122 bp, Homo sapiens
ggatgcctcccccaccccatcgaagtcacctatttaatatcaaagtggaaccccatgagccggtcccctggagcggcggccgccagcgcctacccccaagccccacacagcgtgtgtgcatg

SEQ ID NO: 248654 - DNA, 122 bp, Homo sapiens
cgccccgccctcggcacagcgtcagaggcggggacgcgcgctggtctatttttgggcatccggatggcgactgcgggaaatcgagttctcatgctggggcgaaaggtgtgtctgcaggagcc

SEQ ID NO: 248655 - DNA, 122 bp, Homo sapiens
ctccccactacctgcaggaccagcagggctgtctgcagccgtgcgccccgccccaccacccgggtctggagcagctgccaccctccctgaacggcctctgcccgttccccgggatccggctg

SEQ ID NO: 248656 - DNA, 122 bp, Homo sapiens
aaatcacaggggaaaaaaataatttccccctgtttctcccaaagacttctttgaaatacacgatttcaaatacgtttctggatcctaaaactttttagaatgaataaagtgtctaggatagg

SEQ ID NO: 248657 - DNA, 122 bp, Homo sapiens
ttatgcatgagaaatgcaactggctcaacttctggtgccctggtaatcctggggtgcctccgaatcacagacccatagaatgttagtgctggagagggccttagagatcatcaggtaagtcc

SEQ ID NO: 248658 - DNA, 122 bp, Homo sapiens
ttaccagcagagccaagcagtgtggatgtgaggagcttttgcactcctggaaggtcctcacgggtaacaggcagtgggagctgcttgatgtgatatgatgatgctctttcctttgatttggt

SEQ ID NO: 248659 - DNA, 122 bp, Homo sapiens
gctcccccgcggaatgaaggaatgaactgtttcttcccctgtgcgtccccgcccctcctccgccttgcacactcctccagggttttgcctctgtgtatcactccacatgtagttaattgata

SEQ ID NO: 248660 - DNA, 122 bp, Homo sapiens
ttgaggtcatccagccaacgaagagtcgaagccatatctcgactccaggtagtcagacaccgatgctcatatttcacatcttcagtagtcactgagttttgtcatttgcttactgtatgtct

SEQ ID NO: 248661 - DNA, 122 bp, Homo sapiens
gctcctggctgttgctcaggcctgggccggcatcgggagcccccttctcctcttcgtttccgggctagagcagaaaggtaagtaccgctcagttaggtcccacggacagggatgtcacggga

SEQ ID NO: 248662 - DNA, 122 bp, Homo sapiens
aagatgttgccgccatctttattgaggacgtgagcgttgctcctggtgctgaacagagcgcgaaggttcgccgtcgttgggtccgccctccccactttcggtcgccgccttcacccacctcc

SEQ ID NO: 248663 - DNA, 122 bp, Homo sapiens
ctccttccttcctactggtgcttccacctgccttggtctgagttgcagtccatggggcagcgcctaagtgtctgagcacacttaagaatctctagtggtttatgacccagactttgccctac

SEQ ID NO: 248664 - DNA, 122 bp, Homo sapiens
ttgtgcagtgcagtaatccaaagccgtcgagtagatatgcctgctttaaaatctgcatctcgtaagaaatgccttaattttccatattaggagctgagaaaccaagtcccctgagcccttca

SEQ ID NO: 248665 - DNA, 122 bp, Homo sapiens
gctgcgcgggcctctcttaccttcgtctctcttgcgcttgttggtgtcggcgctgggggacgtgatgcccaggatgccgctgatggagtacgacgagccggccgaatccgtgctcaccgagg

SEQ ID NO: 248666 - DNA, 122 bp, Homo sapiens
gtggagactgctcggcggcgaccagcagctgaaggcaaacgtagaatagcggccccaattcggacataagagagtacaatgagggcacaggggcccagcataaggaagccaccctcaaagaa

SEQ ID NO: 248667 - DNA, 122 bp, Homo sapiens
tcccaactttgaaaagccccaaacagatctcattaacactcctatttattatactcctctcgcccttaaccctagtccattaattctcttttatgcttctcctctatgaataacacaaatat

SEQ ID NO: 248668 - DNA, 122 bp, Homo sapiens
tgatacaatcaatctagtgggtttccctaagaatctgggttggaaaccagtggagttcttcgtaaattacaacccttgggacacttgagatttttccagcatttgagggttgttattactat

SEQ ID NO: 248669 - DNA, 122 bp, Homo sapiens
tgaggatttactcgtctcttggcaaccattcacccgaagagccaatcagagggcagccctcgccccgcccctgccgtcagggccgggcggaagggtcccgaggggactggctccgccacgcc

SEQ ID NO: 248670 - DNA, 122 bp, Homo sapiens
caccagcaagaggaaagtcaaggccagatgccatcgctcacacctgtaattctaacacctcggaggctgagctgggaagatctcttgaggccaagagtttgagaccagcctgagcaacatgg

SEQ ID NO: 248671 - DNA, 122 bp, Homo sapiens
agtgattctcttgcttcagcctcgagagtagctgggattacaggcgcccgccaccacacccggctaattttttatattgtttttagtagagacggggtgttaccacattgcccgggcaggtc

SEQ ID NO: 248672 - DNA, 122 bp, Homo sapiens
agagaagcaagaaggcagtgtcctgttccccctccaccgtgcttggtggcccgggtggggcgcagctgcgggaaatgcacccggagctgtgccccctcccggcgaacagcctgcgccacccg

SEQ ID NO: 248673 - DNA, 122 bp, Homo sapiens
ggagtctgcaaagttgtgatttgttttccctttctgcttctctgacacagacatcttcctcgcggcagctcccgaacctgggaggctggtggctcaaaaccgctcccgccagctgcttttcg

SEQ ID NO: 248674 - DNA, 122 bp, Homo sapiens
caattcccggggaagcgggctggtgccgcgccatggaccaggccacacagcaggagtgagcggcggccgggcgagcgtcacggcctgagctgcccctcctgtcagagcagcggctgcattag

SEQ ID NO: 248675 - DNA, 122 bp, Homo sapiens
gggtccctctcctgagcatcagtgagcgcccggagccgtggccgctgggggttgcggcggcgctgagccagcggggccggtgagtactagccgcgccgccagcccgcccgccggccggctct

SEQ ID NO: 248676 - DNA, 122 bp, Homo sapiens
tgccatcggaatccgctgccccccaaagctctgggctggccatgaaggggccagtgcttccgggctgcctgcttcgaggacaccagcactcctgccacgggccattcgtccatcgctgccag

SEQ ID NO: 248677 - DNA, 122 bp, Homo sapiens
agcctcggctgagcgttaaacatggacctacctgtgtgactggcttactgttgaggccaccggagatctcttcacgtaaaggagcccagtgcgagcgaagaaggactcaggcagctgaagcc

SEQ ID NO: 248678 - DNA, 122 bp, Homo sapiens
actctgtggtagggataagacaggcctccagataacatcatagcttggctcaacagttagcgagaagtgcaatgagagaagcacagcagagaaaaggagaaaaagtggccatgagccccact

SEQ ID NO: 248679 - DNA, 122 bp, Homo sapiens
ctcaatgagcaatcaaaaccacactgagatgcaggtgctgggcaattagctgggctctcacgccacagttcattcctgcttaagcctccaggcttttgctactcacatctgtgtcccacaac

SEQ ID NO: 248680 - DNA, 122 bp, Homo sapiens
gagtgcagtggtgttatctcggctcactgcaacctctgcctcccaggttcaagtgattctcgtgcctcagcttgctgagtagctggctggaactacaggtgtgcaccagcacacctggctaa

SEQ ID NO: 248681 - DNA, 122 bp, Homo sapiens
gcttcggcggcggagcgcacctgtcccagctcaggtttctggctggtggttttcgtggcacgccctttgcactgggagctttctgcccgcatcccaccgaaggccttccaaagtgatcgtag

SEQ ID NO: 248682 - DNA, 122 bp, Homo sapiens
gcgagtccggggaattctgggaagtggagtccacacgctctgtggaggctcgagcacttccggtccccaactgtgacgttgctatttcatttaccacagtagtttgagtcatttccacatct

SEQ ID NO: 248683 - DNA, 122 bp, Homo sapiens
tcctcgcagcggactgggagcgactgggaggtgcgggcgccagccagcattattttcttacgaggggtggggaggtgggatgggaggtggagaggacgggggagggggcgacgggcggagca

SEQ ID NO: 248684 - DNA, 122 bp, Homo sapiens
cacctggaaaatcgggtcactcccacccgaatattgcgcttttcagaccggcttaaaaaacggcgcaccacgagattatatcctgcacctggctcagagggtcgtacgcccacagagtctca

SEQ ID NO: 248685 - DNA, 122 bp, Homo sapiens
aaagacaatcaatctgaggctttcaaagcagggctaaaaatgcacacaaatctcccccctcgcagctgcttcttgtttaacattgtcaaattttcttaattaaaatttgagattttatgctt

SEQ ID NO: 248686 - DNA, 122 bp, Homo sapiens
gttgcatgaacctaggagccggaggttgtagtgagtcaagatcgcaccactgcactggtgcgacagagcaagaccctgtctcaaaaaaaaaaaaaaaacttaactttccctgaaaaaaacga

SEQ ID NO: 248687 - DNA, 122 bp, Homo sapiens
actgtttttaaacttgcctaatacctttcttgggtattgtttgtaatgtgacttatttaacgccttttttgtttgtttaagttgctgctttaggttaacagcgtgttttagaagatttaaat

SEQ ID NO: 248688 - DNA, 122 bp, Homo sapiens
gttgccgaggaacttgggtccttaaaaagtgtattttatccccaagcccagagcttaaaccggagcctttgcttccaacctgttcggcacactttggggagagtcgaatgcaaaatccgctg

SEQ ID NO: 248689 - DNA, 122 bp, Homo sapiens
gtgtgagtgtgtgtgtgtgaatctggtttgacagatgcaggacccaggacctggagcctgcggtgtccctgcgtgccccatcagttttctgccgatgcggaaaaccgaggaccagctgcaga

SEQ ID NO: 248690 - DNA, 122 bp, Homo sapiens
ttccaagggtattaattttagattttcactggtgctatatcaggatgtgcattgtgacaacgatggcagaaaatttaaaatgtaaaaatgaaaaagttgtaacaaagagtcaataactaata

SEQ ID NO: 248691 - DNA, 122 bp, Homo sapiens
ctgggtactcgtcagcctttgctaaactaatgctcctctgcccggcacatattggttaagcgcctactgagtcccccgtgctgaagatgtgcttcgtcgagctctgcacctgtttctgtgaa

SEQ ID NO: 248692 - DNA, 122 bp, Homo sapiens
ccgcctcccacggggcctctcctctgcaggaggccatacaaggactgcacggaaggggagcggccccgcagggagggggcgcctggcagcccgcccgccgcagcagcctgcaaccccgcccc

SEQ ID NO: 248693 - DNA, 122 bp, Homo sapiens
aaggaagggcgattggtagggagaagtcatttctcgtgcactgaccatgtattcagagtccggggttttgatctggcccctctgcacatggatccccagtgcagacgcagtgcatggaactg

SEQ ID NO: 248694 - DNA, 122 bp, Homo sapiens
cgcctcctgggttcaagcgattcttctgttcagcctcccgagtagctgggattataggtgcgtgccactatgcctggctcattttttgtatttttagtagagacagggctttcaccatattg

SEQ ID NO: 248695 - DNA, 122 bp, Homo sapiens
gggctgtggggcggggccttggaggggcgggtcaagggtgcagggcagggggcgggccctcgggggggcgggtcacgggaggtgctgctaggaacctcgggtggggcgagttttccgggcag

SEQ ID NO: 248696 - DNA, 122 bp, Homo sapiens
caggggagtgtctgatttgcaaaaggaaagtgcaaagacagctcctcccttctgaggaaacgaaaccaacagcagtccaagctcagtcagcagaagagataaaagcaaacaggtctgggagg

SEQ ID NO: 248697 - DNA, 122 bp, Homo sapiens
tactaaactacctccattcacaggcagaacagtgtacatggtacttagagagtggactctcgagccaatctgttttgatttaaatcccagcttccccactttctactgtgtaattttggcaa

SEQ ID NO: 248698 - DNA, 122 bp, Homo sapiens
ttttgcttcctgaaaactggttccgttttcaacaaaatttgggtctgttgaaaaagaacacgcagatgccagccttgatgtcaaacgggcccaaacttggacagtggtaaactaatgagcaa

SEQ ID NO: 248699 - DNA, 122 bp, Homo sapiens
tccctccagaaatggccgggaagaccgtggcttcgccagtgactcagaacaaaccagggtcgcgggttccttcctcgccagtcaaacgctgagggctgcaccaggcacgttaggaaaacaaa

SEQ ID NO: 248700 - DNA, 122 bp, Homo sapiens
tccaggagtgctcacacggacacgcacacatccctgcacatgtgcacacagctgtggccgcgaggacatcctcagacagacggcctgggtcacaccgacacacatggccatacaatcagatg

SEQ ID NO: 248701 - DNA, 122 bp, Homo sapiens
acactgcgccgctcatcccttctgcggcaagcggaagggtcagagtcggtctgcaaagaacgagcctttggcctcaaaatcctacattgaggctttctcaccccttcgcccggtgggataaa

SEQ ID NO: 248702 - DNA, 122 bp, Homo sapiens
ccgtctgcttgctttgccaccagcaagcttttttattctatgtctcatccccaatatagtcgggaatacttacttacatttgtctgtgcctaatagtaattttctacattcttctgtgtcct

SEQ ID NO: 248703 - DNA, 122 bp, Homo sapiens
ctttttgactcgtgtgctcttcatgttttgtattctcatctctgattgcatatccttacccgccagtaagatgtggccaagccttctacagtctgtaccacaaagataaaagtgtagggaat

SEQ ID NO: 248704 - DNA, 122 bp, Homo sapiens
cagctgggtgaatcacatatattcccaagtgagaggtagctacagatcccacgtactcaccgagtacctactatgtactgtgcacggtgccaggaaccacaggatctggagagtaagttacg

SEQ ID NO: 248705 - DNA, 122 bp, Homo sapiens
attaaacattgtgaggacagttgcagaaactcataacttccatcctacatggtttactcacgtacccatctatcctctcccggtgcatctgccacacgctgttgggtttttgctcttcgtgc

SEQ ID NO: 248706 - DNA, 122 bp, Homo sapiens
ccccccgatctgtgggctgagggtggcggtgactagcgctgggaccagctccttctctctcgctcccaagcccacaagaattcggggagaaagggtgaggtagggggctccgggagagcgga

SEQ ID NO: 248707 - DNA, 122 bp, Homo sapiens
gccggtcccgattttgcctgccaggcagagccagcctgcctgccccctgggaggttgtcccgcagcggcccagccctttcccgcacacaactcggagccagtgcgtggctcgccgcgtctat

SEQ ID NO: 248708 - DNA, 122 bp, Homo sapiens
tcacaaacatgtctataggaggtccctagtgtaattctcagtctcttaattacatagactcgtctttggagtctgaataaaataggtgaatggattttcttcctgtaaacactgcactcagg

SEQ ID NO: 248709 - DNA, 122 bp, Homo sapiens
cggctcattcggttgttgaacaaatgttgattgaacctccgctgcctggtctgccaggtgcgggcatggagattagacatggtttctgctcattagcttgtgtccagcatgggagctcatta

SEQ ID NO: 248710 - DNA, 122 bp, Homo sapiens
tcagcctcccaagtagctgggactacaggcgcccagcttagtttgaacacaacctttacacgcttagtttgaacacaaccacatttgtagttgcccaaaaccaggcgcccctggttagcctt

SEQ ID NO: 248711 - DNA, 122 bp, Homo sapiens
gctcagctgtcgttgggtcgtctccagaggcttctagcaggcgaggctgcaggcactgaccgtccccggccccacacccctgccgtcagccgggtgagccagggcggggtacccagggcacg

SEQ ID NO: 248712 - DNA, 122 bp, Homo sapiens
agtaaatggaaccctaaaacaactcatcttaaccactcaacactgaatatgatgctatatcgtatcctgctgtagttgacagggacatgtcttgggtactttattttaaagtgatagtaaga

SEQ ID NO: 248713 - DNA, 122 bp, Homo sapiens
gagggaagggggacggcagggaccactcggggtccatgaagaacgcgaggggatgggcagcggggagggaaggaaacccaccccgactccccattctcctacccccactccccatccctccc

SEQ ID NO: 248714 - DNA, 122 bp, Homo sapiens
gtgccatcatggccaacctgtcagacacggagatccagcgcgagatcggcatcagcaacccgctgcaccgactcaagctacgcctcgccatccaggagatggtctcgctcacctcgccctca

SEQ ID NO: 248715 - DNA, 122 bp, Homo sapiens
attggcgcctatgactacgatgaacttcagagcagagtgtccaatcttgaagaaaggctccgtgcatgcatgcaaaaactaggtaggcccagtaccctgcgggacgtggcgctgcactgccc

SEQ ID NO: 248716 - DNA, 122 bp, Homo sapiens
ccccgagggcgcccccgccggccggttcggcgtctccggggagtggcgcggcgctccttccggctccctcccggctcaggacgcagggctcgccccaagacccaggctgcgccgggggcagt

SEQ ID NO: 248717 - DNA, 122 bp, Homo sapiens
tccaatttaaagccagggcgagcaattaacttttctatcatcttgtcaggggagaaggttcgtgtttaatttgagacaaagtgacagaaatatatatacactgtatgtattactccaattta

SEQ ID NO: 248718 - DNA, 122 bp, Homo sapiens
aggcttccggcggtgagtcagcgggcactgggtgctgactcacccgctgggcatgccagccggctgcctacagcttaaaggggcgatgcctgccagcctggtgggtggggagggggttacgt

SEQ ID NO: 248719 - DNA, 122 bp, Homo sapiens
ggtgcggctgctccggaaaacaatttggcagttccccaaaaagtattatcctcttagatacgcacccgagagggttgaagacatgtattcacaaaaacttctacaaaggtgaggtagaaggc

SEQ ID NO: 248720 - DNA, 122 bp, Homo sapiens
gcattatctaggctctgaaaaagtcttcagtggtcctacctaaagattaatgggaaaagccgaaactctgagttggcctatttgcagaaacaattttaaagatttactgatggttgacaaat

SEQ ID NO: 248721 - DNA, 122 bp, Homo sapiens
aaggaggatgcaggccagccacggttatttttaggagaggccacataaaatgtaagcttccgggacaagcccaggacatggcaaggtccacgggcccgggccgggtccatccgacaccgcgg

SEQ ID NO: 248722 - DNA, 122 bp, Homo sapiens
ttctctggtgctctatcaagttgagggtcctgcctttggtctctgaggctcacaggcatccgaagtgccatagtcacagttcttgctccagattagtcctccatgttgggtaagacaaaatc

SEQ ID NO: 248723 - DNA, 122 bp, Homo sapiens
cccccgaacgcccccgtgcacagcctcagccggccgcgcctcgagcagccagctggcccgcgtcccgtcacccgcccggtccatgtccctgcagaccgtcccgcccgcgcacagcggcggga

SEQ ID NO: 248724 - DNA, 122 bp, Homo sapiens
ctgtcaggctaggaaagcttggcccgccggtcctcctctgctttctccgcctacttgggtcggcgaacacttccgccttggtgccgcctcgccccgacttcccagtatgccccgcgccgtct

SEQ ID NO: 248725 - DNA, 122 bp, Homo sapiens
ttgaagacaggtctacctcatgagaaattccacactgcaagacactgttccttgccacttcgcacatatcacaggtgctcagcttgaagacttgtgcagcaatagcatattcttccattagg

SEQ ID NO: 248726 - DNA, 122 bp, Homo sapiens
gttagatgtaccatgaaccttctggtctttcttaagaatcgtgggatttttggccaggcgcggtggctcacgcctgtaatgccaacattttgggaggccgaggctggtggatcacgcggtca

SEQ ID NO: 248727 - DNA, 122 bp, Homo sapiens
ggcgaaccgcccctgggaattcagataaacgtagggtcgcttcctttcgggggcccactccgcattccagaattccttcttctaaaagaagagccggttctaagggcgttttcagcagccat

SEQ ID NO: 248728 - DNA, 122 bp, Homo sapiens
agctcagagctaagcagcctcagcaagcacagcatccctggcccggcctcctgcacagcccggcagaaacgccaccaccagtctagaggccggtcccggctctcacccacagcagaaagagc

SEQ ID NO: 248729 - DNA, 122 bp, Homo sapiens
cacaggaagaactcaagtgctcataggcagtgagtcatttccttaggcattgtggtgacccgggatcatgtgcctccccgaagcctgcacatgcactctaatgatgcaagctaccaccaggc

SEQ ID NO: 248730 - DNA, 122 bp, Homo sapiens
gtgcttcacgatcataagttggtgtgtatatgtgtgtgtgtatgggcacgcgcgtgcacgcgtgtgtacgttcaggacagggcatgtgcacttccttttattggattcatctggaaccccat

SEQ ID NO: 248731 - DNA, 122 bp, Homo sapiens
ctccccccccgccttgccctctggcccactaagcgtgatcggctgtgttgctgtggctggcgcgcccgtgccgccatcctgcccctccccgcctctgctgccaaccctcccagcgccgtgtg

SEQ ID NO: 248732 - DNA, 122 bp, Homo sapiens
cccagtgtgtttccattggcttccctttggcagacaatggtgagcagaatggggtcctgccggtgctggggactgtgtgagaatgcagtgtgcttcagccttccatcccatgtctgtctgcc

SEQ ID NO: 248733 - DNA, 122 bp, Homo sapiens
gtcagttccaggaatcccggggcacctatacagatggttggagcaggtcctccatatcctcgaagacttgaaatgctctgtggtcctcactgccaagtcaggccatacccaaggaccgtctc

SEQ ID NO: 248734 - DNA, 122 bp, Homo sapiens
tactttcaatgagaaacaaacaaaagtgactttaaaatgaggcccgcctggcaaagccctcggggatctgggccaccgtggcctcccatcttctgccatgccgcctccttcacgctcatctg

SEQ ID NO: 248735 - DNA, 122 bp, Homo sapiens
attgttcagtgagtaggactgagagacttagtggacatgggggctggggtgcagaaagtacgggcaagagcatggaagaatgttgaaaacagaattggtttgcaaaccatgcctagagaaac

SEQ ID NO: 248736 - DNA, 122 bp, Homo sapiens
ttcggattaagggactagatgaggatgtggacatcccattgaaacatggtgtaggccagccgaagtgggtttgctccttcagctgggggagccccagggaacgtgtgagcgggtttacaata

SEQ ID NO: 248737 - DNA, 122 bp, Homo sapiens
cgggcgcacagcgggcaggcctgcgccctagcctggctgccggcctccgtgcgctacccacgcaagtcagggtcccactcggaaagaacttctcccagagggaaccccaaaagcccagaaaa

SEQ ID NO: 248738 - DNA, 122 bp, Homo sapiens
cctggggttgagctctccgggagggcactggccagggaagggcctctgtccaaggaggggcgggtccgctggcagctgcgctagttctccctcccctgctctcgtcccgccactcgcagctc

SEQ ID NO: 248739 - DNA, 122 bp, Homo sapiens
gcctttctgggagagtgggccttgttgacctaaggggggcgagggcagttggcacgcgcacgcgccgacagaaactaacagacattaaccaacagcgattccgtcgcgtttacttgggagga

SEQ ID NO: 248740 - DNA, 122 bp, Homo sapiens
acgttctaatgagagttaattgttctttatcagcgtgagaggaagcaggtgtgtgttccccgctgacatctgatttatttctttgagatcttggaacagacacttaatcagccacccaagca

SEQ ID NO: 248741 - DNA, 122 bp, Homo sapiens
tattgccgtgtaattctctcttggtgcgctctcagtggctcgttctgtccctgcggaagtcggcctggaggagttatggttttagctattgattccctccctgccccctgcccccaacacca

SEQ ID NO: 248742 - DNA, 122 bp, Homo sapiens
cggctgtggcaggtacagagccgtctgggtagcggctcctccgcctcggtgtatcgggttcgctgctgcggcaaccctggctcgccccccggcgccctcaagcagttcttgccgccaggaac

SEQ ID NO: 248743 - DNA, 122 bp, Homo sapiens
agccccgttaagtgcaccccggcctggagggggtggttctgggtagaagcacgtccgggccgcgccggatgcctcctggaaggcgcctggacccacgccaggtttcccagtttaattcctca

SEQ ID NO: 248744 - DNA, 122 bp, Homo sapiens
ttttccctacacataattacattcctctccctgctatataaacccctgattttagttcgtcgaaaagacagatttgagactgatctcccttctcctcacctgacatcacccgaatttaaaaa

SEQ ID NO: 248745 - DNA, 122 bp, Homo sapiens
gggttccatccactcctctttctagtctccttcccgggcggtcagggagtgttgtctacacggatctctgccttgggggattgagatcttcttgcttgttcacttgggtgcagattttccag

SEQ ID NO: 248746 - DNA, 122 bp, Homo sapiens
ttcttggagaaggaggatatacatacataatatgaaatgtgtttgttcttcacagtcacccgattttactgatatttatttgcattttaccaataaaaagaaaatgcaagctcaaaggtatt

SEQ ID NO: 248747 - DNA, 122 bp, Homo sapiens
ttaaggatcccggaagcggaggacacgtgggttgctgtaaccagattgcgttaaagcacccgcgcgcgccggcgcagccagattttccccgcaggaacctattgagagctgagtattcgccc

SEQ ID NO: 248748 - DNA, 122 bp, Homo sapiens
ccaggcatgctcttcccggcgtgtgtgtgtgtgtgagagcccatccaggcatgctcttcccggcatgtgtgtgtgtgagcccatccaggcatgctcttcccggcgtgtgtgtgagcccatcc

SEQ ID NO: 248749 - DNA, 122 bp, Homo sapiens
agtatgctgcctctctgtgtgacctgagcaagatctggccctttctgggccttgtgtccgcgtccggaaaatgggggttcagattcactcgtgtgggttcacttcccccattcggctggcga

SEQ ID NO: 248750 - DNA, 122 bp, Homo sapiens
taaaatggtgaagatctgacgaccagactgctccctgaagattcactttacagatcatttcgaaaacaccaactgtgttcagaaagagtcccgcctttcaggcgcctgtagtcccagctact

SEQ ID NO: 248751 - DNA, 122 bp, Homo sapiens
cagacacgttattgcacattcccacttaatggttacatgaccttgtcccgtctattttcacgttagccaaagggaagcctagaagtccacagtccccgggagctggaagccaggcagtgaca

SEQ ID NO: 248752 - DNA, 122 bp, Homo sapiens
tcctccccgcatctccccacctcccaagtgtgtgaacacgaaaacaatacgtggaaagcccgatcggggggagctaggacccgccgggagccccagtgtgcgggagacgggggtcagaacgt

SEQ ID NO: 248753 - DNA, 122 bp, Homo sapiens
ggggcgggacccccggccgcaggtacccagccctgggcccagatcgccgggcccgctcgccggcctgccaacgagccgggcagcctcaaccccgggcagagccacgcactgcaagcggccac

SEQ ID NO: 248754 - DNA, 122 bp, Homo sapiens
gaagccataactttgggcttccctgagtgtagtgacccatgtatttggtcatattccttacgggatccctgcaggtaatgtgtatggggttcttataggagattttagttcctggtggatct

SEQ ID NO: 248755 - DNA, 122 bp, Homo sapiens
acctttcggtgatagggagggcttctcacttggctgttacctggaagtccacagtggccccggcgggcaggcgggcgggcagagcgcgggtccgaacgcccttcgcgctcgcggcggcgcac

SEQ ID NO: 248756 - DNA, 122 bp, Homo sapiens
ctaccacgcagaggacaaatgaggagccagagcggttgggggtcgggccaaccgaactcccggccccggctgcgcagctcccagacgcccaccaagaactcgtgcgctgcctggacctctag

SEQ ID NO: 248757 - DNA, 122 bp, Homo sapiens
aagtgaaaaacaaccacgtgcagtggccgggaattgaacccgggtctcccgcatgggaggcgagaattctaccactaaaccaccaacgcctctctggaactaccccctggaggataacagaa

SEQ ID NO: 248758 - DNA, 122 bp, Homo sapiens
aagaatatctactcaatttaaacttttacctgcgatctctcttcctcagacccagggtcacgaacttgccgtctaacctggcaggtcagtaaaaccttaccccatcaggtcttcatctgtaa

SEQ ID NO: 248759 - DNA, 122 bp, Homo sapiens
cagagacgccccgagggtggggtcgggccaagagccgcagccaggggatgccctgacctgcgctggagaacgattcgcggagttccagaagggacagaaaggcacagaaacaatattcgaag

SEQ ID NO: 248760 - DNA, 122 bp, Homo sapiens
tccgttttgcggtctgtagttggcttgtgttgatcagcgcaactagaccctctgccttatcgaaaggacacagggccttctgtatccccggttcttgccctagtgtaccagaaaaatcggat

SEQ ID NO: 248761 - DNA, 122 bp, Homo sapiens
tcagagtggaagacacgcacgaagggcgcacctgcagctctccgggattcaggcgggggtcgctgtgctctcttaaaagtgagcggcggtttcagcctgccaccgcttcgcctcgccagctc

SEQ ID NO: 248762 - DNA, 122 bp, Homo sapiens
gccacagaaggtccatactcgcaggttctggggatccaggtgtggactctggggaggatgcgtcgggagggcatcaccaccagggcaggaccctgtggcgccaggatctgcagcctggggcc

SEQ ID NO: 248763 - DNA, 122 bp, Homo sapiens
ggcatggcttctttgctcctgggttccaagaattccatcttctcttcatataagtaataccgttcccatgtttgcagtgggtgcccaccaagggctgggcactcacctggccctggacatgg

SEQ ID NO: 248764 - DNA, 122 bp, Homo sapiens
gcggggtctgtcctgggacgtccgcctccctcgcgggtggggcggacgttgagaaagcagcgtttagcagtcatgtggcctgtggtactccaccttcctgatactttcccttcctgcttcca

SEQ ID NO: 248765 - DNA, 122 bp, Homo sapiens
cactgcccacttcccagcagctcctgaggagcaatggcatcttgggagaggctggggagccgcctggaaagctgtccctacacaagcacacgctccccaccacgtcactggatggcgtagag

SEQ ID NO: 248766 - DNA, 122 bp, Homo sapiens
tctgtgttttgttgtctctttctgcctcttcgatttccttttcctgttctctgctgcttgcgttttttctgttctctgcagaaagaacagaattagtgtcagcagtggtactacagaattca

SEQ ID NO: 248767 - DNA, 122 bp, Homo sapiens
gtacttcctgaaggacaggaacccttgagggagcaaatttgagtgtcttttttgatgcttcgggaatctttgagttcaatgaagagagacaccatgggtgggccacataatcatgcagactc

SEQ ID NO: 248768 - DNA, 122 bp, Homo sapiens
ttgcgctgcccccagctcagcgcctcttcctcctgcgggacaagcggcgcttatcgcatacggctaggccccctcgccagggcccctaacctctgcacagtctgggattcctggacgtggat

SEQ ID NO: 248769 - DNA, 122 bp, Homo sapiens
gctctcctgcttcggggtgtggtggggagaggatacgctggtgctgtagggtgcacatgccgccagaggtttgctgtcgcccaagatgtccttaattaaaaaagaagacgtggaagtcctgg

SEQ ID NO: 248770 - DNA, 122 bp, Homo sapiens
ggattgtattaatacttatctttgaaacagactgtgcctacttgtgcctgatggataagtcgaccctgctcaaagcttttcgggtgaagagaggagcggtgttctggtcccctaacctgcct

SEQ ID NO: 248771 - DNA, 122 bp, Homo sapiens
taacatggtgaaaccccatctctactaacaatataaaattagcccggccatggtggcaggcgcctgtagtcccagctactcgggaggctgaggcaggagaatggcgcgaacccgggaggcgg

SEQ ID NO: 248772 - DNA, 122 bp, Homo sapiens
agggagtggaatgaccccaggggcagccggcttctctcccagtgctgcgtcagatgccagcggcttcagcccaggttactcccctgcctggtctcccacaccgggctccccggggtccccag

SEQ ID NO: 248773 - DNA, 122 bp, Homo sapiens
gccgtcgttaatgagctgggtattcttcttgtggaagttctcgtgggtcatcacgtcagacgtgctcgtgtacaccttgttacagcccacctgcacaggacgggatggtggtcaggcgaacg

SEQ ID NO: 248774 - DNA, 122 bp, Homo sapiens
agagtggctcaggtcaccccaggcagccccgtgggtatccctgagactgaccatgtgtctcgttctctcagcagaatgggtgcgcacagcctcgggaccgcgactcagaattcacccctctt

SEQ ID NO: 248775 - DNA, 122 bp, Homo sapiens
aggctgaggcaggagaatcgctagaacccgagacgtggaggttgcagtgagctgacattgcgccactgcactccaacctgggcaacagagcgagactccatctcaaaaaaaaaaaaaaaatt

SEQ ID NO: 248776 - DNA, 122 bp, Homo sapiens
ccccgggcctctccacctgcaggatcgccttcctacaccttcccccgcccgcttccttcgcgcgggctcctcccaatgaccaccagcagaactgcagcctcctgccttagctgacctggagc

SEQ ID NO: 248777 - DNA, 122 bp, Homo sapiens
gagccgtcagaggaaggacagccctgccgccaccttcatttcagactcggcttccagaaccgcaggaggacacagttctgtggctatgaaccacccgatttgtggtgcttggttatggcagc

SEQ ID NO: 248778 - DNA, 122 bp, Homo sapiens
gccttaagcaagagctctgaattcaccttcctcaatgtctgctctctgggaataaaccggcggctgcagtttcccatcacagtagcacgcatcaatcagtgctaaacccaccgttactttct

SEQ ID NO: 248779 - DNA, 122 bp, Homo sapiens
agactcaacatttccagttcttcagttacatctgccagtagagccatgggatgagcctttcgggctgcagtgctcaggcacaaatgcaaatgtatgtgtggtacacatcttgtgactcagtt

SEQ ID NO: 248780 - DNA, 122 bp, Homo sapiens
tgcaggtggaggccccggcggggcaaagtggcaggaacctcttaaagggcgagagcggcgcggagccagaacgcggtcggcccggtccccgccgcacccagcccaggtgagcctggaccacc

SEQ ID NO: 248781 - DNA, 122 bp, Homo sapiens
gcggggcccagtcccgccgaatggtggggagtgggtccctgccagccccaactggaggtgcgccgcgcggggtcagaagtgagggcgtccggagcgcaaatatctcgccgtttgtatttggt

SEQ ID NO: 248782 - DNA, 122 bp, Homo sapiens
atacacacaggagagaaaccttataagtgtgagaagtgcgacaaaagtttcagtcaacagcgcagtcttgtcaaccatcagaagatccatgcagaggtgaaaacccaagaaacccatgaatg

SEQ ID NO: 248783 - DNA, 122 bp, Homo sapiens
agccccttcccgggccccactccgcgctgccctccccggctctcccgcttccccgcgcggcgccccagccgagcctcggcctcgcagcccctgccagcttccccaacaactcacttttgttc

SEQ ID NO: 248784 - DNA, 122 bp, Homo sapiens
caagttctcccaggagaaagccatgttcagttcgagcgccaagattgtgaagcccaatggcgagaagccggacgagttcgagtccggcatctcccaggctcttctggagctggagatgaact

SEQ ID NO: 248785 - DNA, 122 bp, Homo sapiens
ggcggctactttcaaggggccaagtggagctgcattgtgagctcggcaggcggaggatgccgacgcggtcgcggttaggggagggcggtcggggtggcggtcggaaccgcatcctcttccca

SEQ ID NO: 248786 - DNA, 122 bp, Homo sapiens
cctctgacaagctctccaagacaccccacttacagtccccacagtgccccttgggtaggacggccccgctggaggtgtctactcaaagcagagctagagagctgcaaagtatgaagtctgtc

SEQ ID NO: 248787 - DNA, 122 bp, Homo sapiens
ccgaaccaaggcactgagcgctcaggagcccagaggaagcctggtggctgtgagccgggccggctggctcattcagcccaggccccacccgccctgggatgatctggaccccggccctgctc

SEQ ID NO: 248788 - DNA, 122 bp, Homo sapiens
caggtcagtgggtgggtgcaggtcagtgggtgcgcacaccgtgcgcaagccgaaccagggcgaggcattgcctcactcgggaagcgcaaggggtcagggagttccctttcctagtcaaagaa

SEQ ID NO: 248789 - DNA, 122 bp, Homo sapiens
gacgtgaagctgcacagggtagacactgagagaggctctgggagtgtcagcggccagtcacggggccacagggtagacactgagagaggttctgggagtgtcagcggccagtcacggggccg

SEQ ID NO: 248790 - DNA, 122 bp, Homo sapiens
gggaggcggaggttgcagtgagccgaaatcacaccactgtagtccagcctggtgacagagcgagactctgtttcatacacacacaaagtctggagggctggaggactacttgaacccaagag

SEQ ID NO: 248791 - DNA, 122 bp, Homo sapiens
agcgtttccttccccatccccgccccgcagattcatgctgatcctggccagctgccaccccgagcagttcgactgggccatcaatgcctgcatcgacgtgatggtccacttcgacctgccag

SEQ ID NO: 248792 - DNA, 122 bp, Homo sapiens
ctaagcagaactgagtaaaaggggttatcatttgctgaaattgtcccagagaccccctaacgccactgaattgcaagtaacataaacattcaactgtagaggattctggtaacctaacctta

SEQ ID NO: 248793 - DNA, 122 bp, Homo sapiens
gatctaggcgttgggcggggccggactgggtcagggaggctgcctattggatggcatctgcggccgaatggaccctcaagccaacaggtgcctgaagaggctgagggtggggccggcgcgcg

SEQ ID NO: 248794 - DNA, 122 bp, Homo sapiens
ctagatttgctgagaagaggtagttttcatggatataggaatagaaaggatagttttagccgtgtgtctgggtactcagaatgtaagcagagttggcctagagaaaggcaaggttttattct

SEQ ID NO: 248795 - DNA, 122 bp, Homo sapiens
atggaaactgccctgggagaggaagggagtccagatcccatgaatagcccacacaggtaccggctctcagagggtccgtgcattcctgctctccggacccccaaagggcccagcattggtgg

SEQ ID NO: 248796 - DNA, 122 bp, Homo sapiens
cactggcaggaccctctctgcatacacaggctgggcgagcggaggctgtggtgggcccctcggccgggcacccgaggacgtgtgttttcctaaatatcctccaggctctcctgtctttgttc

SEQ ID NO: 248797 - DNA, 122 bp, Homo sapiens
agacgtggcaagacagcttcctggatggggaagcgcactgccgtcatttcctagtgtcaacgtgtctgaggaaggcccggcctcgccgagtatgctctccagcagcgtgaagacaaggggcc

SEQ ID NO: 248798 - DNA, 122 bp, Homo sapiens
gctggcttgtacacatgctggaaagaaagttggttgtttttctgtttgcattttacttttcgttaaagtgatatatggacaacatttaaaatctgcggaaagcccgctcatgtgaagttaat

SEQ ID NO: 248799 - DNA, 122 bp, Homo sapiens
ccccagccccctcactgccgccggtaccctcctcactgccttcctcactgcccgtccagccgctgccatcgtccagggcggccccagcccggggttcccccatctgggcctggaggaacaca

SEQ ID NO: 248800 - DNA, 122 bp, Homo sapiens
gcaaagagaaaccccagagaaatagtcatgtcagggcacaattgaaactagatggttatacgctttgacaaaaatggcaaagctaaggtcacagacccaaccagtatttgttgaacgctgta

SEQ ID NO: 248801 - DNA, 122 bp, Homo sapiens
gtcaggacaccacccagaggcctgactcttactctcagcctctgaatagttcccccagttcgcttcactgcagctccagtcaccagcattgacagtgagtcactggcaaagccagttattgg

SEQ ID NO: 248802 - DNA, 122 bp, Homo sapiens
cagttcaaatctcttggttttaaaaaaatactttccctctgcgcgactggcgcgtcacgtcgcgcgcgaccagtccgcagggctcctcccgcgctgctgataggcccgcagacggcggccca

SEQ ID NO: 248803 - DNA, 122 bp, Homo sapiens
ggcggcgggattggctggggcgggcgggtgcgcagtccgctgggcagaggcttgggccgccgagctggacccggaccggttttgggtactgtactgggggcagggcagagaggtgggcggca

SEQ ID NO: 248804 - DNA, 122 bp, Homo sapiens
cgggggacattccccacagtgtcccagagccttcctggctgcagccggctcacctgggcgcgttgcaggtattggtggagtgagttggtgccagcttccacacagcacttctgagtgcccgg

SEQ ID NO: 248805 - DNA, 122 bp, Homo sapiens
gagcccagccctgctccatccatttgtgctcatgtttctttgcattaccccagccccccccgcccaactccagatagttggaggatgacagacaggagactctttgggtgactctcagatgc

SEQ ID NO: 248806 - DNA, 122 bp, Homo sapiens
gatctgggggagcctccagaacttgacagcctcactactgatttattttggctctgtggtcgatgtaaaggaagagaaaagtgtgagatgacctggaaggagttgagaaggcatcctggggg

SEQ ID NO: 248807 - DNA, 122 bp, Homo sapiens
gccagctgtgaacttgaccagatgtcagaagtgaaactgaccacaggcaagtcagaggctcgccaggagggccaggtcacaaccccacagctcccagccacccacgtggcctgggagacaca

SEQ ID NO: 248808 - DNA, 122 bp, Homo sapiens
agatagctccaagatttgtgggagagacctatctaaaccacaataaaatttaatgtgatacgggtgaaatatatatgaagcattatgggaaaagacactggagaagacttgaaaaagaaaat

SEQ ID NO: 248809 - DNA, 122 bp, Homo sapiens
cccggtagattttgtagagccgggggcctaggacgcagctcagcagcttcgccatggccccggctcgggccgctgctcttccagcagcaggtccccctgccggccccgccctccctgcctct

SEQ ID NO: 248810 - DNA, 122 bp, Homo sapiens
cagcgtgggagaagagatggggtcagcgccttccccagagatggggtagggggcggagaccgggctcaccaggaaggctgtggtctcacgggctctgccccagctgcccactgagccctgaa

SEQ ID NO: 248811 - DNA, 122 bp, Homo sapiens
ttatcagcccagagaggccctggaataagagcggccgccctccctgccttagagaccgaccgacaccaagtagcaataaatgagcctgacatgccccacgccaggccgtcactcagacccca

SEQ ID NO: 248812 - DNA, 122 bp, Homo sapiens
aattcaccttttcagttacaatcctctaaagtcttctaaaaggcattttccagcagattacgaacgtcgtcctttctgagtattgtgtcatcgccgctcccttcccgttcactgcagagcct

SEQ ID NO: 248813 - DNA, 122 bp, Homo sapiens
ccaggatgatgtggccgcagggcccggggcgcccggctgccaagcgcacatgcggcggcacggtccagcttttcaggctgaagctggaaacgatgactctgctactcgctccccggctctct

SEQ ID NO: 248814 - DNA, 122 bp, Homo sapiens
ctgccaggagtgcttcagtcaattcaaagttaggtcctgtcaagtctcgtaaccactgaacgatgtatgggcattttaaaaagagactccttgcttgaggagttcagctccgtcccagcgca

SEQ ID NO: 248815 - DNA, 122 bp, Homo sapiens
ctctggaaccgtggattttctcggaattgccgttccacgcccggtgagtcccggaggctccggaacacggtttctaacgcgcaggctgatgatttctaacactcacgtgcgtggtatttctt

SEQ ID NO: 248816 - DNA, 122 bp, Homo sapiens
cgtggggggtggacccgggagcgcggccggagaggggagtcagggtcagctccccgcaggcgccccgacccccgcctccgcgcccatcccgcgcgtccccgccgccccaagagcgtcctaag

SEQ ID NO: 248817 - DNA, 122 bp, Homo sapiens
ccgatccggaccccaagagaggttcatggatctcgcacaagaaagaattcagggcgagtccgcaatgcaaagtgagagcaagtttattaaagtacaagaataaaagaatggatagtccatag

SEQ ID NO: 248818 - DNA, 122 bp, Homo sapiens
ccactgaagttaaaaatccttcactgtctcatgaaacagtctttgtggcccctttgtgtgcgttgatgactcacagaggcactcgtggtctttgtattcggaggtaaggccgtcctgtggtc

SEQ ID NO: 248819 - DNA, 122 bp, Homo sapiens
cagagaggggacctcaccctcccccggaacaccccaagacccctggaaatgcagtattaacgtagaaaagatgttttacttccatgttttggctaggaaggtaataaggtcgagacaaaata

SEQ ID NO: 248820 - DNA, 122 bp, Homo sapiens
ggcttgcggagccgtcctgtaaagccggggatggcaggacgcattgtcaccccctcctgccgctcttacgaaacactcttaattgagtccgattcttggtgaatcagccttccaagaaccgc

SEQ ID NO: 248821 - DNA, 122 bp, Homo sapiens
ggggagcgatgcacaatcccgaagcgaccgctggggcctggggactggggattgaagcctcgggcttccatgccccacaaaggtgggggcatggaagagacactctcattgacctggggata

SEQ ID NO: 248822 - DNA, 122 bp, Homo sapiens
ccccgggagccccaggcgagccaagggggcgatggtggcggccgcggcggccgcggcgggcggctgagctttgttatgaatagatgaaagaggccacctacacagtaacccaaattacgaga

SEQ ID NO: 248823 - DNA, 122 bp, Homo sapiens
tcctcagcccttgggcggtcgatgggaccggacaccgtggagcagggggcggtgctcgtccgggaggctcaggccgtgcaggagcccatggcagggtggggtggggaggcttaggcatggcg

SEQ ID NO: 248824 - DNA, 122 bp, Homo sapiens
ttttgcagaaagcacattgggcatttcatcacgtagaaagctactgaaactgacactacacgccctcagccagggagtcccgctaagggattatgaaaggcaggctgataccaaaactacaa

SEQ ID NO: 248825 - DNA, 122 bp, Homo sapiens
ggcaaacaccatgtggagccaccatagtgccagcaatatcatctctgtggagacaggactcgggccccaccctaagatccagggactcccaagggaggctggaaaccctggggttttccaaa

SEQ ID NO: 248826 - DNA, 122 bp, Homo sapiens
agtgagacaagaatagaaatagaggtcagttagaaggcaatggtaatactccagataagacgtggtgactgcttgaactatggtggtagctgtggatatggaaagaaatagataaacttgag

SEQ ID NO: 248827 - DNA, 122 bp, Homo sapiens
acctacctagacaaaggccttaacataccgacaaaggccttaaggggcctgggaggtgagcgaagtcccgaaaaacgggtggaaggttaggggccatggggcggctggtcttccttctacca

SEQ ID NO: 248828 - DNA, 122 bp, Homo sapiens
ggaacaccggcatttcccggcctagtgtcacagcggcgtctctcccgcccccaggacgtgcgcagtgcttggcacaagggtggcagcaatgccagcttcagcagcacagtatggccacacag

SEQ ID NO: 248829 - DNA, 122 bp, Homo sapiens
cagatgccgcagtagcacgttcgctgcccaggggcgggacttgcgctggcgtgctagccgcgaccgccaatcagagcctcaaggctcccaagcaagctcgctctccccagaccggcgagagt

SEQ ID NO: 248830 - DNA, 122 bp, Homo sapiens
ttgtcagtttggttgcttaggtacctactaagagttgccagcaggtggccccagagcacgcggttatgtttgtctttttgggtcccatgtttaattagtaatttagtagggacgtattgaat

SEQ ID NO: 248831 - DNA, 122 bp, Homo sapiens
caggacagccccttggaaagcaatggccttaaagggaatttgacactgcattgtgcacctcgtacaaacaagcaataataaaaagcctcagcttagttccatctgccaagtcagacctcgct

SEQ ID NO: 248832 - DNA, 122 bp, Homo sapiens
atgtgagttgagagcctgcccctgtggtcccagctacttgagaggctgagatgggaggatcgcttaagcccaggagctggacgctgcaggcagctatgatggggccactgcactccagcctg

SEQ ID NO: 248833 - DNA, 122 bp, Homo sapiens
atgggtatgttcattccagcactatccaccatagtgcctaaatgcccatcaatggtagaccggataaagaaaatgtggtacatttacaccatggaatactacacagctataaaaagaatgag

SEQ ID NO: 248834 - DNA, 122 bp, Homo sapiens
aaactatgcttggtttaatgctctgctattatcatcctggaattcttaataatccttgaacgaggggccccacattttcgttttgcactgggcaagtaaatgacgtagttagcctagttagt

SEQ ID NO: 248835 - DNA, 122 bp, Homo sapiens
tctttcagggaagcagtgtttgaaatagatagcgggtaccttccctggatggagtcagggcgggggcactgtcctccactgctagacacccccagaatgcctggcgctctgcagagcacagt

SEQ ID NO: 248836 - DNA, 122 bp, Homo sapiens
gacaatgacaactgcttggacaagtgtgcacagctccgcaaaggtgagatttggggggaccggaaaggagaagttcaggtacaagctcataatcccacttgaggagaaagagtgaattataa

SEQ ID NO: 248837 - DNA, 122 bp, Homo sapiens
ctggagtgcagtggcctgatcatagctcaaccgtgttagccaggatggtcttgatctgcccgcctgggcctcccaaagtgctgggattacaggtgtgagctaccacacccggccacatttaa

SEQ ID NO: 248838 - DNA, 122 bp, Homo sapiens
tttcccataaaaaagatggcgccattgcttccgcgttccggttgcggatggtgagtgtgtcggggggcttggcggcttttctcctcagttttctggagtgctttggaggagaggtaagcgcg

SEQ ID NO: 248839 - DNA, 122 bp, Homo sapiens
tgctgcacggagcacactcagggcttcaggggacagctggacacggggttcgtgtacgtgcggctgcgtctgatttggggtcagcccatgaggaggatggtggtttagggggctctggaggc

SEQ ID NO: 248840 - DNA, 122 bp, Homo sapiens
gaaagcgtcttccttgggggaggtcaggagtcattggtattaaactagacaagctggtagcggagtgttaatggccaccgcaagcagatgttctgtaattaggggagatgtgaatgacaagg

SEQ ID NO: 248841 - DNA, 122 bp, Homo sapiens
cagaggagcctcccagggacccaatcccatcagccccccgctgggccgcggcgggggtgacggtgccactcacgtcgcccactttgatccgactgtgctcctccagcagccgccctttgatc

SEQ ID NO: 248842 - DNA, 122 bp, Homo sapiens
acatgcctgtacttaagggtatccatggtagcaatgatgcaacgtgcctacctagttcaccgtgcctacacaagtgggagagaggggaggcggatgatgaaaaaaatttcacttggaaaggt

SEQ ID NO: 248843 - DNA, 122 bp, Homo sapiens
tacagaatgcttttctgttttctctttttctatagtaaggaagcgctttcctttctcccccgtttattcatttgcttacttctggttcccgtgtccttttaacatgtccccccgtcattctc

SEQ ID NO: 248844 - DNA, 122 bp, Homo sapiens
attaccgcccccgttgctgtggttgggggaggcgagcaaagggcagcggctgcgagcgcccgcccccgccccaccctcccagccccggacagcgcaggctgcggcttttcgtcctccactga

SEQ ID NO: 248845 - DNA, 122 bp, Homo sapiens
cccagtgaccgtcgagactgctacaagtaccaggtgcggctgcagaagctagtggtgggccgagggccctacaccttgtggaggtcagggctgggatgaggtagccaggctcgggcaggact

SEQ ID NO: 248846 - DNA, 122 bp, Homo sapiens
attagtggtggtagaaaaattatgtgtggtgaaagattttgtcatatgcattcttttttccgttaaaaagcagggacatgggaacaattaaccaaatgaacttcaaaagaaacagcaaagta

SEQ ID NO: 248847 - DNA, 122 bp, Homo sapiens
gtatggtgcctgggctcctgtatataagagttcttttgatgacgtcacgacgcacgctcccggcagcgtccgcttcggctcctccccctaacctccctcaatcttcctctcatccagtatca

SEQ ID NO: 248848 - DNA, 122 bp, Homo sapiens
tgatattattataattagggttttaaataaaatagttttggcttttaaagcaatcaaaatcgagtcgtattgagaggttaacttcaactgcataaagtcatccttacacaatttatttagct

SEQ ID NO: 248849 - DNA, 122 bp, Homo sapiens
cttcagcccagggctctaaccgtttcccttcccgatgttgccagagcctgcggcaggggacgcagcccttagaggtcccagtgccacctgagtgtgctcagggcccaatcccctgtgggcca

SEQ ID NO: 248850 - DNA, 122 bp, Homo sapiens
gaggaaggggggaaaacgctaacccatgtctttttgacaagtgtgagttttacaacatggcgacaggtgccatctctagtgaggctcctacaatccgacagaaaccgacatcagcagtaaat

SEQ ID NO: 248851 - DNA, 122 bp, Homo sapiens
tattctgggtaacatagtgagaccccatctctatttcaaaaaaataaaaaaaaaatttggcgggggggtcagagagcaagctgacctaataattaatgctgaatgtgcagcaagctttgttt

SEQ ID NO: 248852 - DNA, 122 bp, Homo sapiens
cccgcacccctcttgctgcaatgtgggatccatctcacagtcagggtacccctttccattcggcgtaacatgattttaccaagattaaaattggggaacatgtaattacagcttgtgtaatt

SEQ ID NO: 248853 - DNA, 122 bp, Homo sapiens
tatacatggcattcttattaaatatttcaaaggggggaggggaaggaggaggaggagttacgtgtctggtgcatattttttaagagttaaagctggtgttgttagcagaggcttggttatta

SEQ ID NO: 248854 - DNA, 122 bp, Homo sapiens
aactgggggataagttagaaaatttattccaattttttctttaatcttcaaaaatgcatgcgttgtttttaacaacgagatctaggaattctactttactctgtgtgtgtgtgtgtgtgtgt

SEQ ID NO: 248855 - DNA, 122 bp, Homo sapiens
cggccctgcagctcaggggcgagtgtttcctctggaagatgggagcttctcagggaaactcgagcctccgtgaggtcgccctcggatcagacgggctgtggaactgagttttcgggctcctg

SEQ ID NO: 248856 - DNA, 122 bp, Homo sapiens
gttgatgcgatgaagtcagagagggcctggaacacaagatcaacaggaccttatcgaccacggtgtggacagggaaatgaggggccacagaagggtttgagcacagcacaggcagggactca

SEQ ID NO: 248857 - DNA, 122 bp, Homo sapiens
ttggccagggacacgtcaaagactctccgcgcaccgcgatcttcctgtcccgcgagtccccgacgcccgagtccgttctgcgcctacacaggtaggtcagtcacagtgtcctcatacccttg

SEQ ID NO: 248858 - DNA, 122 bp, Homo sapiens
gagcctagcactccaacaccatttatccaaccacttcccaacccactgggttattttccccggagcctccagagcagtgtcaagagaagatgcagagattagtcatttcctcctaatcgggc

SEQ ID NO: 248859 - DNA, 122 bp, Homo sapiens
aggtggtcagcatattctctcccctgccgtgttaactaagtgtgaccaaatttatagctccgaggaactggagaccattgacactcagagtcgccctataggatgtgggggtgcaccaggga

SEQ ID NO: 248860 - DNA, 122 bp, Homo sapiens
ctgttggtagacaataccagtaaagacacagtgaattggcaaaaacggacccctaagcgacggtgccctgaggagtcacggaagttcgggtgaagagtgcggggcctgggcaggaagttcct

SEQ ID NO: 248861 - DNA, 122 bp, Homo sapiens
gagggcggagggaggaggagaggcgcggagaggagggaggggagaggggagggaggaaggcgagagaaagggagctgcttccatcccggacttcccagagcctgcctggagcgcgtactcag

SEQ ID NO: 248862 - DNA, 122 bp, Homo sapiens
taacctctggtagggatttcttgcaccttctacacctggaagggttgtacaccccacatccgagaaaggccaaggcctctgcatttccacatgtgaggaaaccacccctctgtatctgggag

SEQ ID NO: 248863 - DNA, 122 bp, Homo sapiens
atgggtgtgagggtgatgggtactccaggactggcctatgctgtgttgtgggctttggttcggctttatcaggggccaggcatatgggttctagagtacctaccatgacctagaagcattta

SEQ ID NO: 248864 - DNA, 122 bp, Homo sapiens
cgtgtgcatggaggcatgtgtgcgcacttgtgtacctatgtgtgcgtagagacgagtgtgcgagctcatgtacctacctgtgtgtgtgcgtggaggcgtgtgtgcgcacttgtgtacctacc

SEQ ID NO: 248865 - DNA, 122 bp, Homo sapiens
tgcgcgcgcgtgaggggcggggccggccgaaggctggctgtaggcaggcggctgagccggcggcgggtggcctgcccaacgtgtgctgggtgggagaaggcgaggcgtcagcgatgctgtct

SEQ ID NO: 248866 - DNA, 122 bp, Homo sapiens
ctgtgaatccagctgtcctcacaaactgtctcttcgggacacaagcccatcagaggcttccgttttcctttcataagatctcataaccgtcagctgatacctgggacaggcacagcacacat

SEQ ID NO: 248867 - DNA, 122 bp, Homo sapiens
gcgagggcccgcggggccatgcccttcagtgggcacacttctgggagcccgtcctgagctcggtcactgacgtcgacggccgcctggcggcgctcgagccgctggccgagagtgacgtcatc

SEQ ID NO: 248868 - DNA, 122 bp, Homo sapiens
gctggatgagggcacgtaggtgaagctcagtgcttggcacgaggtgctcatcagcagcatcgcccttgctttgggctggcctgttagtaattcgtttttagtggaatcgaatacaacacttg

SEQ ID NO: 248869 - DNA, 122 bp, Homo sapiens
agaacatttcccggtctggaatactagtgcatccttgaactcccaagctctttatttgtacgtctcacatatttttagtttagttcagtagtacacaaagtgtggtcctcagaccagcagca

SEQ ID NO: 248870 - DNA, 122 bp, Homo sapiens
aagtgggcggcaggtcccgtcaggagatactgtaaccctccttggagtccaattcctacacggacactttcatcaagactaaactcctatccaaaaatgctcccacatcaaaatagttttac

SEQ ID NO: 248871 - DNA, 122 bp, Homo sapiens
aacattcatagtgtctgttatcagtggagtagataggtaaaatatgctggatgcacagcacggagtacaatgcagcaatcagaagcaatagatttagcaacatggacagaacttgaaaacag

SEQ ID NO: 248872 - DNA, 122 bp, Homo sapiens
ctatttaatgcctccatttgtaatagctatattgtgcatttaatgtatatttccattgatcgtcatttaaaaatcatttactaaattaaaaattaaattcatcagttatggtagatactttt

SEQ ID NO: 248873 - DNA, 122 bp, Homo sapiens
caacagcagaggctgctttccaaacagagagggcagcggaaatggcagcccgcttcagcacgtgtgtcaggacaaacagccgccaagagctgcctgagcccaccaggtggcctcttcctgtt

SEQ ID NO: 248874 - DNA, 122 bp, Homo sapiens
aaaaaaaaaaaaaaaaaaaaaccaaaacaaacaaaacaaaagtgacagcaacagacagcccgcagtctcagaacacccacactctgtgacgactcagaatttcttccagacttcacggatca

SEQ ID NO: 248875 - DNA, 122 bp, Homo sapiens
gtgcgcaagggaggggcagaggcagcatttggccccatcgggcaaaagccaacattgaaacgggcaaacactcactggccgtcattccagcgaggctgcccagcagacagcccctgccggct

SEQ ID NO: 248876 - DNA, 122 bp, Homo sapiens
ggccgaggttctgtggagggtggaatgcgctcgggggagctaggcctccgcacccgccttcgccgcgtctctagcgtcgacctgatagccgcacccaccctccgctgcactgtctggggcaa

SEQ ID NO: 248877 - DNA, 122 bp, Homo sapiens
ctctcagtccggcctggttttgaaccctcgccccactccacccctggtttcacgatttggcggaaagggtccaggattgtagggactcttccaactctgatcccagacccctgcccaagtga

SEQ ID NO: 248878 - DNA, 122 bp, Homo sapiens
tcacccgggcggagcgcacctgacctggcttccacacctggtggagcgcctgggaggcctcgcggataaagccccgggcagcgcgtgacccgccccagcccagtagtggagtccccgccgcg

SEQ ID NO: 248879 - DNA, 122 bp, Homo sapiens
tccgctggtcccaggtggaagggacgcgcgggcttttcgtgccacccgggaagaccgcagcgacccaggcagaggcctccccagcctcgccgggtctccactgcccttctctggaagatcga

SEQ ID NO: 248880 - DNA, 122 bp, Homo sapiens
gtgggagttgaacaatgagaacacttggacacatggcagggaacatcacacaaaggggcccgggggagggatagcattaggagaaatacctaatgtaaatgacgagttaatgggtgctgcaa

SEQ ID NO: 248881 - DNA, 122 bp, Homo sapiens
tatcccctgcctgggatctgttttgtgcatgcagccttgccatctgtattcaataggattcgagacttccaggcactggcctttgtctacttattgtagccagcacctgtccctgcctgggt

SEQ ID NO: 248882 - DNA, 122 bp, Homo sapiens
gcacatagcgtttgagttaattgagaaaagaaaagagttctctagacagagaaggagggacgaacattatagacagaacagcagagtgaagcctggaagttcaagatcgtgtgcccaaaatg

SEQ ID NO: 248883 - DNA, 122 bp, Homo sapiens
cgcgtgcagtgcccggagtgacctcttcaggccccgcgggcgcctcctgggtgggccccgcggcccctccaaccctgcccagcgtgtgtgcgcggcctagccatctttctccccagcctggg

SEQ ID NO: 248884 - DNA, 122 bp, Homo sapiens
tggcagacccaggcgcccggggcgggcctgtttgctctcttcccagaggtcccttcagcccgatctgctcgggtggcctcgaaaccaaccagggctaatttgtgtcttctggaaaaagatac

SEQ ID NO: 248885 - DNA, 122 bp, Homo sapiens
cccatctgcagcagccccggggaaagagccctagtccaggactcaggcccctgttcccagcgcggtttagctgccaaccggatctccttctgcaagaggggaaacagaaggaaactttattc

SEQ ID NO: 248886 - DNA, 122 bp, Homo sapiens
cttgccgattggggagggagcggcgcttacgtgtttattggcttaactctcccgtgtccgcggcgtaaagggctgctgcagagggctggaggggggagagcgcggagcgtcctcagagcctc

SEQ ID NO: 248887 - DNA, 122 bp, Homo sapiens
tcagctggcactaaaacaagagaatgagttgtgcgttttttggtggaggtgcctcctgatcgagtctacacactggcttgtgaacatgttgtctgtactgaagaacttatcccaaaaaggtg

SEQ ID NO: 248888 - DNA, 122 bp, Homo sapiens
agggtgtaggtagggaataatttatacaggccacgttgtcctggttttcttgccctttggcggtggatttggtcgtgccctggggtggtggaagaactgaatgggcttaattcacaaaggtc

SEQ ID NO: 248889 - DNA, 122 bp, Homo sapiens
atcagtgttgagtttttctaaccaaactgtaggttcgctcacattcgggaagcatttattcgttttctgtgcggtttgtacgggctttcgttgtgatttgttatcttcaaaaacataaaggt

SEQ ID NO: 248890 - DNA, 122 bp, Homo sapiens
gctatttcaggaagcctccagtctcctcctccttatgtaaataaacatgacagatcccatcggctgtaccagcgcgggaggtggggaggctggagtgggtgggagcggggaggcggcggccg

SEQ ID NO: 248891 - DNA, 122 bp, Homo sapiens
cacagggtcagtcagggtcctccggaggtgtcctgaactgccccaccccagtctccaggccgcacccatggggccacctgcacttaccacttggtctctggctctgagcactgctggggagt

SEQ ID NO: 248892 - DNA, 122 bp, Homo sapiens
ggtctgggcagctcggcgtggcgtccacggccccaccaggcctctgcctcctgcaggtcccgctacttcgtcaccaaagcgcccgccgcgctcgcatctgctgtgaggctgtgctcgggccg

SEQ ID NO: 248893 - DNA, 122 bp, Homo sapiens
tgcacaaacaaaaaactgaaggaattactccatcatctcccacatccaatcattccttaacgtctatgttttcccttatatccattctttgctgttagtccactatgactatttaagtttta

SEQ ID NO: 248894 - DNA, 122 bp, Homo sapiens
ttttacccagtttgcctgaataaacaccaggggttgctctatctctccacttttcttccacgggaattatactagggacccctttgcataagtaatcacaggagaattaaaaacagaaaagt

SEQ ID NO: 248895 - DNA, 122 bp, Homo sapiens
cattgcaaaaacttgggtcatctcacaccagtcgacttttatgtgattggcaacagacgccggactgctggaaaggggaactaagtctaccaggtgatcaacaggtatacaaatgagccaaa

SEQ ID NO: 248896 - DNA, 122 bp, Homo sapiens
caatatactttcgcttatgctgtctcagaacttctcacaaagttcccctgctccaggccccgccggatggcgggaagggagggcgaggggacttccgggattggcctcgcaggaatgttgaa

SEQ ID NO: 248897 - DNA, 122 bp, Homo sapiens
gcaatacagggtagtatttgatccacattatggtagaaagagctgcccaaactctgaactcgtactagttcttatttatcaaagtaacacccaagattctaaaagctttggagggacttctt

SEQ ID NO: 248898 - DNA, 122 bp, Homo sapiens
gaccctgtttgaaaacacatacacttgggcagaatcgcacactaaataagtagtgaatttcgaatgttttgagagtatctctgatgagtcagaagtgcgctagtgaaacagtctggccaatc

SEQ ID NO: 248899 - DNA, 122 bp, Homo sapiens
tctgaacatattagatgatctggctcttaagaagttataaaggtgaactttttaaggttacggtggtgtgtcataactgtcatcccacctgaagccaccggaaccatgctcctcccccaccc

SEQ ID NO: 248900 - DNA, 122 bp, Homo sapiens
ctgcttcagaatctgactcgagacttgattctgagatctccacgtgggagcccgaggagccgggatccaaaatcctttccagctccttgatctcctgtgttatcttctctctttcagcatct

SEQ ID NO: 248901 - DNA, 122 bp, Homo sapiens
gagcgaagcagtgtggccgaggtgggaggcagccggcacttggctccagcttggtcctcgcgactccccaaaaccgtatataaatatatctcttataaaagccgagaggaagcaaatcagat

SEQ ID NO: 248902 - DNA, 122 bp, Homo sapiens
agggctctgtttctgcgcctgcaggccgcccgggagtcctggatgcgcctcctttgaccacgttttctctcaggctccagctgtgcctcgccccgatctccacaggtctgacccaggcgagt

SEQ ID NO: 248903 - DNA, 122 bp, Homo sapiens
ttgcttctcactgtgatgctttctgtcactaggaccccaagagctcccctctgcttcctccggacctgttaaagagtctggctgccttggaggaagaggaagagctgattttttctaaccct

SEQ ID NO: 248904 - DNA, 122 bp, Homo sapiens
aagggggtggggccggggcgcttgttttcgagagctcgcgctggcggtgctgcccgtctgcgaaagccggagctagacacttcaaagcttcaattttccacaggaaatggtagaaacgtaac

SEQ ID NO: 248905 - DNA, 122 bp, Homo sapiens
actgccgtgctgtccaacaagcaggtgaatgacagcagctggcacttcctcatggtgagccgtgaccgcctgcgcacggtgctgatgcttgatggcgagggccagtctggggagctgcagcc

SEQ ID NO: 248906 - DNA, 122 bp, Homo sapiens
aaatcatttctgggaggctgcatcatgctgcctgagttctactatctcagtgcccagccacgcccagaccagtgaggttctgggaggtagggatgggccagggggttggggtctcccagagc

SEQ ID NO: 248907 - DNA, 122 bp, Homo sapiens
cttcctacccaggggtgcgttcaggaggccttcctgtccctcctcctctgaaggctgagacgtgcggccttgcctcggctttgcctgcttgtaagacacagtccgcactctctacctccaag

SEQ ID NO: 248908 - DNA, 122 bp, Homo sapiens
gttgctcctctgtgggttggaatgtggaaccccagagtcatgagggttggggtggagcttcggggaactccagaattcgaataccccagccttctgtagttctggccccgctctggcaggga

SEQ ID NO: 248909 - DNA, 122 bp, Homo sapiens
ccggatcggaccctgcgaatggttttggctatatcttcatgtaggacctactccctatcccgtcggccgcggtgaatcccacctgcggtgctttaacttgtgtaacagagatgctgcctctg

SEQ ID NO: 248910 - DNA, 122 bp, Homo sapiens
tacacctgacagctcaaacaggacgtctctggtgggaggtgggaggagatgctattcgctcggctcctcaggtccctgtcctttgccctgaatggtcagcggtctctgcacaggactcgaca

SEQ ID NO: 248911 - DNA, 122 bp, Homo sapiens
tggagttttccagagcttgcgaaaatcttctgcctatgaagaaaaaaaaatgtattgagccgtgtcaggcactgcgcccctcagctgcggaaacctgaagagccgtcgtcatcgcagtagct

SEQ ID NO: 248912 - DNA, 122 bp, Homo sapiens
tctccatagaaaaaacattttaggccaggtgcagtgactcatgggagcacttcagaacgtcgaggtgggcggattgcctgagctcaggagttggggaccagcctgggcaacacagtgagacc

SEQ ID NO: 248913 - DNA, 122 bp, Homo sapiens
gatatcacattacagggctgagggcacaagcagctctaggaagcactagactcccagaggcgaggacgagaagcttttcaatgcaaaagcctctttctaaaacaccgtgttttaggcagcat

SEQ ID NO: 248914 - DNA, 122 bp, Homo sapiens
ttattgctttagaagcaatgccccaggtggagcgagagcttgctccagttgtgtcaaaggcgcagcttggatggagaatgtgaaaaccaaccccaccaccaggaggggcaaagcaattatct

SEQ ID NO: 248915 - DNA, 122 bp, Homo sapiens
ggtagtggcacatctcttctccgtagggaatccttttccgcccagcgagctcaccccccacggtgaaatgacttggacatacttgttggttttctgtgttcttacaagatcttaaagggaac

SEQ ID NO: 248916 - DNA, 122 bp, Homo sapiens
actggggccctggggagagataggagaaatgagccctgccttccaacacacacaggtgtgcgaacatatacatgcagcagggaaattacaatgagaggagggagtcgagtacatttatgcaa

SEQ ID NO: 248917 - DNA, 122 bp, Homo sapiens
tctgcacggccatggtctgttccggagtgctgtgcaggccgctgtgggagccgctgtccccgaggctgtccgtcttctgggctggccggtacctaggccaggaacacgcataccatcatgag

SEQ ID NO: 248918 - DNA, 122 bp, Homo sapiens
ttattagctgtgatataatggtatcaggaaatagctagctctttggctgtttatttccctcgtggtggatggaaagagtaagtatagcaatgtttcagttgctatggataccaagtctttga

SEQ ID NO: 248919 - DNA, 122 bp, Homo sapiens
ttgtgcaataaagcagggccagaaattcaaatatttcttcctactcgtcctcttatttgccgtctatgcaggctgcggacctccgcaaatgcactgttgtcctccactccccctactccaaa

SEQ ID NO: 248920 - DNA, 122 bp, Homo sapiens
acttgaactgtttagagagttatgcaaaataaatatatttgagactcctgattcatcactcgtgagaggcaaggactctacataatacctttgaccatatgtggaatcacccttagtgactc

SEQ ID NO: 248921 - DNA, 122 bp, Homo sapiens
cacacttcaaccatgccgacgtggcagcggcggccgctgcagccgcggcggccaagagcgcggggctgggcgcagcaggggccaaccctctgggtcttccctactacaatggcgtgggcact

SEQ ID NO: 248922 - DNA, 122 bp, Homo sapiens
tgccccgccccgccgccggcaggcaggatgccctgtgatcagctgggcagggagtcctgccgctgcatgtggtgggcacgaccggagagcagggaggagccagcaccaaggcccaccctgcc

SEQ ID NO: 248923 - DNA, 122 bp, Homo sapiens
ctctaggaaatgtcatagtcaagaggtttgtatgcagaatgtgggggttgaagagctgtgcggctcctggtgagaggcacacttatctgggatgcagtctggggagtcctggcgaggcagct

SEQ ID NO: 248924 - DNA, 122 bp, Homo sapiens
gctgggggtggctgatttcgagctgaaggcatggcaattttcacactgcattttaggcaacggtcatgcaatattagccccttctttctgatgttccacagccacccaagtcctgtgtgtct

SEQ ID NO: 248925 - DNA, 122 bp, Homo sapiens
cttacctgcgctccaagatgagccaagtagcccccagcctgtcagccctaattggggaagcggtgcgtcacaggggactcaaaaatgggagaataaggactgttgccatgtgcacctgcact

SEQ ID NO: 248926 - DNA, 122 bp, Homo sapiens
gggtgcccactcccattagtggggcttcccagccctgcccctccctctgggcagagactgcgtttaaaatgccccagctgtcctcaccaggttgcctgggtgctctgcaggccccagcctcc

SEQ ID NO: 248927 - DNA, 122 bp, Homo sapiens
ctgtgaacaattatttcctagagtttcacgaaagctggagtgctcaacaacaaagatctccgatgcttgccaagggcagaaatcaataattcattgacaggcgaggttggcagacaggcagt

SEQ ID NO: 248928 - DNA, 122 bp, Homo sapiens
gcctgttatgtaacagatgagtgtcacctggtttcctagtttcagccctgaacacgtctccgagtcacgctggaggcgtaaacaatggatagggcaggcaggtgaaacccatcttcccgccg

SEQ ID NO: 248929 - DNA, 122 bp, Homo sapiens
gggactgtacccacagcttgctgagggctgctcttcttgggccagggaaagcagggcagccgggacctgcggctgtgcctggactgaagctgtcccgcaggtccccaccctccaacacgtgc

SEQ ID NO: 248930 - DNA, 122 bp, Homo sapiens
cgggatcaggcctattatttctctaagaaagccccctcttggctctgccagtgactataccgagggctcacctcaggcaatgaaaagtggtgggtaacgaatggggaaaacccaaaaggcgg

SEQ ID NO: 248931 - DNA, 122 bp, Homo sapiens
gtgagggactgagagaaccaggcagagagcccagattgacacagcaggtgacaaaagaggcgcgcctaccttggggaatacggaggaacagaggaaagtgagaccaggagaaagagcagggg

SEQ ID NO: 248932 - DNA, 122 bp, Homo sapiens
taaagttcaagggcggcgcagacgtgaaggacagcactatcacagcttaaacttggtactcggtaaactggtgtcgaaccagaacgaccaaagaaaggcttaaaaaaaatactagattaacg

SEQ ID NO: 248933 - DNA, 122 bp, Homo sapiens
gtcacaagacctatgtgggtgtcgggaggcaggtcctctcatgcccaggctctgtctcaccgctggaggcagcacccaaggacagaataaaagggctcagggccagagcatcccatccactc

SEQ ID NO: 248934 - DNA, 122 bp, Homo sapiens
tgttaaaagaaaatgagagtttattgattgttttaagccaggcatgttctagcagcgagccgctattcagattcagcaagcggcaatagataactgatttcaataagaagacagagaggaat

SEQ ID NO: 248935 - DNA, 122 bp, Homo sapiens
ccccggagccgtgcttcttttcgtactccaggtacttgaaacccgaggataggccccggccgaagtccttcatgcagtcctgatacatctgcttggccacaccagatgcactggagtacacg

SEQ ID NO: 248936 - DNA, 122 bp, Homo sapiens
tacaggggttgaagggagaccattttctgggtgggaataagtagagatttatgaaagagccgatattcacacgtggccacaggattttgacagagtggtggcaggacctccaggtggaagga

SEQ ID NO: 248937 - DNA, 122 bp, Homo sapiens
ccctgcggcgcgggagtaagttcatcaaatgggacgaggtaagcgcgcgggcccctgctccgcccaaatcccgggactctttcagtcaagctcgaccagacgctggggacccccaccccagc

SEQ ID NO: 248938 - DNA, 122 bp, Homo sapiens
tcctagacttttttttttttttttaaatgcagtgcttcagaaatttgtgtgtcgtctttgcgcaggggccattctgatctctgtatcattccagttttagtgtatgtgctgccaaagtgagc

SEQ ID NO: 248939 - DNA, 122 bp, Homo sapiens
gcattaaagaatgacaagggggtagcgggcagggagcactggtcccctgggcctggcctccgcagaggtcgcagaagacctccctgaagagggtgcctgaggaccagggtggctgacgaggg

SEQ ID NO: 248940 - DNA, 122 bp, Homo sapiens
gcgtcgagccatctcccctcccgttctgctccggcctgcctgtgggcctaatggtggcaccgtttaagcacctgctgtgtgctcagcctggggcctgaggctttccatacgtgatcactggt

SEQ ID NO: 248941 - DNA, 122 bp, Homo sapiens
gcggccgcacctgctgcctcggaaaggggtaccggagcggttgtcaagacacaatgaccccgacgccagactcaagcggggaaaagcgggcctagagctccagggcgggagcgacgccgacg

SEQ ID NO: 248942 - DNA, 122 bp, Homo sapiens
atatactgggattacaggcatgagacaccatgcccagccaaagtttgttttttaaaaatccggattggaaatctaaaaatcttgacttctgatttctcttggtgctgactagatacggcaaa

SEQ ID NO: 248943 - DNA, 122 bp, Homo sapiens
attcgtaagccccggtgttggtaagggggcggcatacaggcacatctccggcgaggaccgcggatgcctctcgggcgggccgtgaggacacctccaccccggcgttcccatgagcccagcaa

SEQ ID NO: 248944 - DNA, 122 bp, Homo sapiens
cccgcagaccccgctgcgcctgctggtggacgccgacaactgcctgcaccgcctctacggcggcttctacaccgactgggtcagcggcggccagtggaaccacatgcttggctacctggcgg

SEQ ID NO: 248945 - DNA, 122 bp, Homo sapiens
tctccatgacgtaggccatggggttgcattcgtacagcagtctcagctggaaaacaagaccgggtagcggcctccttgtatcagaaggtattgcgtaaaaaagagacttttctgcagcaaaa

SEQ ID NO: 248946 - DNA, 122 bp, Homo sapiens
cagcccaccatgcctgagcctccgccccctccgtgggctcctgtgcctcccgagcctccccgactagtgtcgccccctgctccacggcgcccagtcccatcgacggcccaagggctgaggag

SEQ ID NO: 248947 - DNA, 122 bp, Homo sapiens
gacttggaggtggtgttggaaaagaaaggcaacatggactaggcgcacatagaccaggggcgaaaggccttgcaagaagagactgatcgccagtcaggcaaaacggaagcttctgaaaccag

SEQ ID NO: 248948 - DNA, 122 bp, Homo sapiens
attagaaagaaatagagaacatggtcctaatttccccctactatctgtaagtggaaagtacgtctgaaatggtttgaagtaagcatatcactacaagggcttccttgtgccattcaagtaga

SEQ ID NO: 248949 - DNA, 122 bp, Homo sapiens
actgggcagtgttcgagttggatttaagaagaggcagagtggtaccaccagtttgccccacgtgggtaagggagagattttctggcaagactgaagacattctgataccctcctctccccta

SEQ ID NO: 248950 - DNA, 122 bp, Homo sapiens
tggcaccgacgcaactggtccaggccacacgtggacggtgaggcccgggacgggaacatccgagcaacgatccatgcccaggcaccatcgcccgcccccatggctgccggcatggggcgggg

SEQ ID NO: 248951 - DNA, 122 bp, Homo sapiens
aaaaaagcattgtttataggacgcttaaaaatttttacaaatctcacacaaggttttcagcgtttgtcagtcataagggaaatgcacataaaaaccagataccacttcatacctaataggat

SEQ ID NO: 248952 - DNA, 122 bp, Homo sapiens
cgctcggcgcctggagaaggctgtgcgggcggggacggctgcagcccttgccggagagggcgggccggggtcagctgcggcgggcgggccggcgcggggagctgtgggcggcagctgcgtct

SEQ ID NO: 248953 - DNA, 122 bp, Homo sapiens
cttggctagtctagcggccaaggcttcccgctttcggggaaggcctgcaaagtgaggcctcgggctagggttggcgggcgcgtggtgggaaccgcgtggaaccgaagggctcccacgggaac

SEQ ID NO: 248954 - DNA, 122 bp, Homo sapiens
gtgaaagcctgctctctggccagcatagacagtgcgtgtcacagggagtatccggaaaggcgtttgctccagagaggtcaagcacaccagctccagagagaaaatggaacgtttcccagtgt

SEQ ID NO: 248955 - DNA, 122 bp, Homo sapiens
gcaggctgttagtcgtgttaatggcaggaagcagaatggagacctggcccctgcctctgacgccgtgggtgctccccgcataggggccctacgtacatcccctgttcccaacacacagacca

SEQ ID NO: 248956 - DNA, 122 bp, Homo sapiens
gaaagactctacccgcagtttgacgaaaatggtcgtttccagatgcttgtaggatttcctcgctaagctccaccctctgcggcgccttcttctgattggctctgagtaatcagagccaaagc

SEQ ID NO: 248957 - DNA, 122 bp, Homo sapiens
gtcccgggcctgggtcacaggtcatgtctaatcaacgcttactgaaggcgcctgtgtgcccggacgctggaggggctacaatgagaacaaataatagtcattttgggctgttggtgttgagt

SEQ ID NO: 248958 - DNA, 122 bp, Homo sapiens
ggcggctgctgccaagctgggaagtttcagcactgccgcggaggagctggctcggcggcccggtgagctggcacggcgacagatgtcactgactgaaaaaggcgggcagcccacggtgccac

SEQ ID NO: 248959 - DNA, 122 bp, Homo sapiens
accgggcctccgcaggtgcagctgggagccctgtctgggcgtggccctcttttttggggccgcggcatagccttgagtgagacgggtggggtaggcaggtttgggtggggtggggggttctc

SEQ ID NO: 248960 - DNA, 122 bp, Homo sapiens
aacgtttgcaaacaaggcccaaaactcgagcaggagagccagcgtggcaccggtgaccaacggggccactcctctccccgtcgagtccttccccccatcccgccccgcaacacaaccgcctt

SEQ ID NO: 248961 - DNA, 122 bp, Homo sapiens
cctggcagcctccctgaggacatgtcatgggaccaacccagttccctggtgagggacaggcggcaggtgtgggtgaggggtgcccttgactgaagcctacctggcatgcttgaaagtaaccc

SEQ ID NO: 248962 - DNA, 122 bp, Homo sapiens
cttcttttctgaagttttctgcagctaattgattcaattcagacattcctcctccccgcccggccctggcctcgtgtttctgagatgtgcacagccccatttccccatctgctctggcctct

SEQ ID NO: 248963 - DNA, 122 bp, Homo sapiens
gcatgatgtctggcagagcctggacgctgccctctcctaagcagcccttccctgatcacacgagctctgacttcagagtccccagtggtttaagcagcaagggggctgggggtggcccagcc

SEQ ID NO: 248964 - DNA, 122 bp, Homo sapiens
tccaccttcctcctcccagttcatcctcgatccctcccgctcacccggaccaccagactccgggatccctccaagaagtggccgaagggaggtaaagcgcacgaactccactccggtgccaa

SEQ ID NO: 248965 - DNA, 122 bp, Homo sapiens
ggactcggccacattgtcatagagggctttggccagcacattcaggtggttcatggtgtccggcgggcctggggccccggctcccgtgggggcacacaccgagctgcccgggccgcgtgccc

SEQ ID NO: 248966 - DNA, 122 bp, Homo sapiens
aaagtgagcaagagagggaggagacgttgccagctcaggcaggggtccatggtgagagggcgtggtgtgtgtgatgcaagcagtgaccccaaagaggcagggacctggaacagcggccgggc

SEQ ID NO: 248967 - DNA, 122 bp, Homo sapiens
ttcactgttatgagaacagcatggggaaatctgcctccatgattcgattacctcccaccacgtccctcccatgacatgcgggggttgtggaattacaattcaagaagagatttgggtgggca

SEQ ID NO: 248968 - DNA, 122 bp, Homo sapiens
tgcctggatgtgcctgcagagaacacagccagctgtcagtgctgtcatggctcaggacctcgccaggctgctcgactctctcactctccagggaggctgaagccacgcctgaaagatgggcc

SEQ ID NO: 248969 - DNA, 122 bp, Homo sapiens
ggccagggcaggcggggcagggctacccgaagcgcatagaggctgctggtgtcaacgtgacgtcttctggggcgcctggcatccctaggagtggaagccgctgatgaagtcaaagctgcctc

SEQ ID NO: 248970 - DNA, 122 bp, Homo sapiens
ttaacaatatctcaagatgctttttttttttttaacctcagaactttataagaaaacaaacgggctatttgaaaagaatgaatttcataccatacggaatgaactaaaccacatttactaaa

SEQ ID NO: 248971 - DNA, 122 bp, Homo sapiens
ggagttctcctttctgggcgttcttatagaacaaagtagaaccctgagttttgagtctggcgtacgtaacttccgatggcctttgctcgctggcgtgtgaagtttttctcagactgcctctt

SEQ ID NO: 248972 - DNA, 122 bp, Homo sapiens
gcgggttacccttgtgtctgcagatgctgagccttgacgcctcggccatggtctacccgccgcgggaggtgtgtggtgccggcactgcggccatcttgcagttcctctgcaaaggtaaagcc

SEQ ID NO: 248973 - DNA, 122 bp, Homo sapiens
cggttttcagaatcgtttcatggtttttgctgttgttgtttgagtgaacgcattgcaaaccggccgagcagccaagtacatcttcccatcactgccacagtccccgccctggttttgggcag

SEQ ID NO: 248974 - DNA, 122 bp, Homo sapiens
aggaatgcggtgtttttcactgctttttaaaataagtaattttcctctggattaaagcaccgaaggcttaaccctgaccttgtgttaagaaggaagttggggtgggaactggaattgaatgc

SEQ ID NO: 248975 - DNA, 122 bp, Homo sapiens
gcggcagggccaagatcgggaaggctttggactgcagagctgcgtctttccccaacattccgctctcctaacagaggagctgtggggaccacgggcaagcaggagagcgcacctcctccctc

SEQ ID NO: 248976 - DNA, 122 bp, Homo sapiens
caagaacctgagagaaatgaatgcttcttgcaacacaaagatgacaacccaaacctcccccgattggtgagaccagaggttgatgtgatgtgcactgcttttcatgacaatgaagagacatt

SEQ ID NO: 248977 - DNA, 122 bp, Homo sapiens
tggccaggcagcagctgcgctgggcgatgagggaccgttgggtaattgggggcataggaccgggcttcgctgggttcggggcagaagcgccgaagctccgacccggaacgcggtgacttcat

SEQ ID NO: 248978 - DNA, 122 bp, Homo sapiens
tcctttttcactgttaggggatattggctgactaggaaaatagtagaaggtttgaggcttcggacctgagagtcatggagggaaagaaagttttccctagtattgatatttcctttttccag

SEQ ID NO: 248979 - DNA, 122 bp, Homo sapiens
gatatgggtagtatgacggcgggggagttgtaacagcacactgcattccgggccggtgctcgtagggaggtacacatctggagaaggaggaagccgcgagcatggaggggttgggccttttg

SEQ ID NO: 248980 - DNA, 122 bp, Homo sapiens
ggcttggccgcgccgggctgtgggcactgcaggaggcccctgtgcaggtggagatcgccgcggccctggcgggactccttgctggctcttgggcgcgctgatgcccatcatctccctgagtt

SEQ ID NO: 248981 - DNA, 122 bp, Homo sapiens
gacctgaactctctgaggcactttagaaaggggcagaccagaacacatcccatcccatcccggagcagcctgggaagcctctaacttccccagacaagccccagacaaccgggataaattca

SEQ ID NO: 248982 - DNA, 122 bp, Homo sapiens
ctgtgagttttggacacttaagtaactgcatgccacctcagtttcccaatctataaacaacgaaatgataccttctgtaatttacaaggctgttctgaagctcaaatgaagggaactcccta

SEQ ID NO: 248983 - DNA, 122 bp, Homo sapiens
cctaaaaactcgttttacagcagggagtccccttgctttgtggttgaaagtggagctgttcgtcctgggagaggctctgtttatccaaacatccacagtatgcacatcataaaatctctgaa

SEQ ID NO: 248984 - DNA, 122 bp, Homo sapiens
cttccccgccccctctttttttcggaccatgacgtcaaggtgggctggtggcggcaggtgcggggttgacaatcatactcctttaaggcggagggatctacaggagggcggctgtactgtgc

SEQ ID NO: 248985 - DNA, 122 bp, Homo sapiens
atttccgcccgtagtaggcatggcggcggcacctcaccactgattcgttgaattccttcccggtaatcttgggcactagcgggcggagttgaagggcgcttggaccccagcggcgatctgtg

SEQ ID NO: 248986 - DNA, 122 bp, Homo sapiens
atagatgtcggacgtattcgctcaagtatacgtggcggggccggggtcccgaccgtctgtcggagcgagctgtgccgcaaagcccagctactccgatctcacagggatggtggcaggaaatg

SEQ ID NO: 248987 - DNA, 122 bp, Homo sapiens
cctgagattccgggagagggccacccctggccctttttctgtatcttgaaaggttcagcccgtggacacgttttgcatcttgttttgggtgatgacgactcgggtttacacataaatcaagt

SEQ ID NO: 248988 - DNA, 122 bp, Homo sapiens
ggccttgcggggtccaagtaactcgctcgcagtccaaaactctgcaacgctccacataaccgtcctgtagacccacaactctcccaggagcacagccccaggacctaacccaccgggttctg

SEQ ID NO: 248989 - DNA, 122 bp, Homo sapiens
atggatcggaaaaaaccaagcgtgcattggccggtaatcggacgcgggcctcccgcgttgcgggcgagaagtctaccactacaccaccaatgctaatgtcgatgaaagagctgcagtgtcat

SEQ ID NO: 248990 - DNA, 122 bp, Homo sapiens
gaccgttggtgccttcttcctttgctggacggtgatctgtggctgtttctccggtgtgttcgcagtggttgcctggcttggtaacaaacactcttcagagccacagcctgtgctcgggctcc

SEQ ID NO: 248991 - DNA, 122 bp, Homo sapiens
gctgatttttcactcacctagaaccatctctgaaccaacagattcttcagccaggttccccgatggggtgggcaaaacatcatcatcaaagctgatgagatcgatgtccaccaagggcttgc

SEQ ID NO: 248992 - DNA, 122 bp, Homo sapiens
cgtgcagtcaaaaggaaacgatttggcccgctaggaggacgtatttacatctctgagtgccggctggacggcagcagggcggccgactcaaaacagacgtccaggcagttcttttttggatc

SEQ ID NO: 248993 - DNA, 122 bp, Homo sapiens
tgaaaaaggaagctatgtcaaatcagcaaagtattaaaaccatatctatttgataaattacgggcatgaaaggaaagaagacagaggtctgtagaggaaaaaagacaaaatacagcttatga

SEQ ID NO: 248994 - DNA, 122 bp, Homo sapiens
cacagaacgcagttaaacactgtggaaagcctgaatgagtgaaagcatacaaaccaccaccgtgcggctctctacactagcaagtttccgaagttcgccccagccggtttccctgaacaagt

SEQ ID NO: 248995 - DNA, 122 bp, Homo sapiens
accacagagattgggcgtaacgatttacaaagcgctttgcagtaataggctgaggagtgccgaaatatttgttggtccatttttgccaaaatcaaagtccctgtttttctttattcaagagg

SEQ ID NO: 248996 - DNA, 122 bp, Homo sapiens
tttacaaacgactgcttgggagcagtcatgtcacccagtccagagggagccggtcagctgcgttccgcgaacttgggaggcgactgctggggtagcggcggggccctcactgcgcgtcgtca

SEQ ID NO: 248997 - DNA, 122 bp, Homo sapiens
acaaagaattcatcgggaagtcctttccttcctatggctgtggctcctggccttcagcagcgcagggaaactctggaggtgtggccttcttggaggggcacttctgctgtccacagctgggc

SEQ ID NO: 248998 - DNA, 122 bp, Homo sapiens
ggccctgtctccaaatatagtcacattctgaggtgtgaggggtcggggcttcaacaaacacgtgaattttagggggacaaaattcagaccataacagcaaacttcattacctggctaacttc

SEQ ID NO: 248999 - DNA, 122 bp, Homo sapiens
ttaaagtgaactaaatttgtgttctttgattcagtttttgtattgcttcatcctaatactcgtctccgtagagcggagcattgtccttttctcttcaaaaacttgtttacaatatttaagaa

SEQ ID NO: 249000 - DNA, 122 bp, Homo sapiens
ggagaagacacaaaaagccaactcagtgggaagcgccctcaaagccaaaggtgtggcgctcggagctgtggccgccctcgcccgggagtcggggccaggagaacgggccctggaggcagggc

SEQ ID NO: 249001 - DNA, 122 bp, Homo sapiens
tcgtgagctgcaaacagtggaaagttgggaacctcagtcgctggcccaggcggagagcagcggcggcggcgagggcagcgggattcgggccgcggcgccgcaggctcagagctgcccccggg

SEQ ID NO: 249002 - DNA, 122 bp, Homo sapiens
gcctccagttctgcgtcggtttcaaggctcctccctcctggtgaaagacagactacggggcgcctggaaaccggtccgagggcgcgcgaggcagaggagagggagcgagttgagggattgac

SEQ ID NO: 249003 - DNA, 122 bp, Homo sapiens
tttgctttgtcactttccttatgctttttctttaggtcaaaatgcaacttcattggggaccggaggttactatggccacagtccaggatattatggtcagcatattgccgctaatcccaaac

SEQ ID NO: 249004 - DNA, 122 bp, Homo sapiens
ctgattctggaatactctatattcatcttaaaagcctttctgaaacaaatggggttgagacgattggttattttctctttttttagagacaggttctaactatgttgcctaggctggacttg

SEQ ID NO: 249005 - DNA, 122 bp, Homo sapiens
ggcctgaagcgatccacccgcctcagcctcccaaagtgctgggattacaggcgtgagccacggtgcttagccagtacgccaccttttgtgggctggcctgttctgaccaacttggtagcaaa

SEQ ID NO: 249006 - DNA, 122 bp, Homo sapiens
cactgcccagcgtcctccgagtcccacccgaagccatccagcccccggcaggagagcacacgcgtgatccagctgatgcccagccccatcatgcaccctctgatcctgaacccccggcactc

SEQ ID NO: 249007 - DNA, 122 bp, Homo sapiens
tggtaccaagtgagtggcttcttagcccatcagtaaagttatcacaccataggctgggtgcggtggctcacacctgtaatcccaacactttgggaggctgaggtgggcagatcacttaaggc

SEQ ID NO: 249008 - DNA, 122 bp, Homo sapiens
ctcccctctgggttgaagtcctggtgtggcccccagaagcagcagtgcgtgtcactgggacgtctccagtagcccttcccaggcagacgctcctggcgggacgccatggggcccacctgagg

SEQ ID NO: 249009 - DNA, 122 bp, Homo sapiens
gatatgcagatgtgggattccttctgccaagggtcagcccttagaaggaggcttgcttcccggggagggcgcttcaaggcggggactgtctgcgtccctgcctgggttctcgagggttcaac

SEQ ID NO: 249010 - DNA, 122 bp, Homo sapiens
gtgggcggcagcgcagcgggccgtggggagtggccgtggcaggtgagcctgtggctgcggcgccgggaacaccgttgcggggccgtgctggtggcagagaggtggctgctgtcggcggcgca

SEQ ID NO: 249011 - DNA, 122 bp, Homo sapiens
caacctagagtctgaggctaggcggaggacaccctccccaccagctgccagggtcactggcggtcaaaggcagctggtggggaaggcattggactccagccttgggggacggatgtagtgat

SEQ ID NO: 249012 - DNA, 122 bp, Homo sapiens
ttggtgcaggcatgtggctggcacatgggagaactcaatagtgagcagcaggtatctgcccggggcaggagtgcttcctcatgcccgggatggctttccttctttcaccccagcctcccgcc

SEQ ID NO: 249013 - DNA, 122 bp, Homo sapiens
cgaaatctcgttatggtccagatccctggggagaggacagaaagcagctcaccgagcagtcggggcgtgaagggaaagcaaactctcacccagcctgctgctcggaagctgaagtcccctgg

SEQ ID NO: 249014 - DNA, 122 bp, Homo sapiens
cattttgcaagttccacttgctcccattcgtgttgctaacactttaccctttccactgctcgcagtgttaagaatgaattctcaagccataacacagtactgtaaagttccgcagggcttcg

SEQ ID NO: 249015 - DNA, 122 bp, Homo sapiens
ctcctctgcctgttttctataaataataaagcctagatgacagcacatctgtttacagcacggtttagtttaagcccaccattgagatctactgcttagaaaagaaaagattccttcaaaat

SEQ ID NO: 249016 - DNA, 122 bp, Homo sapiens
tggaaaaataaaaggaacgaagtcttggctaggagctgaagtgtccccagcaggatatgacgccaggagtgttgtaaagactgtctgtccttagagaaggtaccattgtgcatagcctttta

SEQ ID NO: 249017 - DNA, 122 bp, Homo sapiens
tcagaaccccctcactccccgaaaacccgcaaggctgagctttgggaagtaaacaagtcccggcgctttacgcaggcgctgggggcccagccaggccgccacactcgcttcgctggtgacgg

SEQ ID NO: 249018 - DNA, 122 bp, Homo sapiens
ccatgctctgcctgaggacatcgacgtctggacagtcagtgacagaggcttttacacacacgtactgtcgagcacaagcctggaagagctgctgaaatggtttaaaagtttttgtgtggaat

SEQ ID NO: 249019 - DNA, 122 bp, Homo sapiens
ccaccacgacgtggcccgcctcaccgccttctccgaggtcggcgtccccgccaaccgcaccgagctcagcatgctggagcccgacccccgcagccccttcgcgctgcgtccgctgcgcgcgg

SEQ ID NO: 249020 - DNA, 122 bp, Homo sapiens
gcttaacagaggtgctggtgatgctgatgtgcacccactctccacgctgcatcacaccttcgggatgtccagaatattcatgcctaccagaacatatggatcttctttgggacaatattaaa

SEQ ID NO: 249021 - DNA, 122 bp, Homo sapiens
tagcttttgctagagtttatatttatttcataatcaaagaaactttacatgaggaaagttcggtctcacacacacgcacacatgtgtgcacaaatgaatgaaagatattccaccatattttt

SEQ ID NO: 249022 - DNA, 122 bp, Homo sapiens
caattattgatctgtaagggaaggtaataatagtacccaccttttgaagttataaggagccgtaaatatgaagcgcttttttgagtgcccatggaagtaagcactagcaatcaatactctta

SEQ ID NO: 249023 - DNA, 122 bp, Homo sapiens
agccaatcagcaacattagtctggttagacgctctctttgcttttccccacgagtgaccacggctagataggccgccggccagatgtggcgggggagagccggggctttgctccgggtgtgg

SEQ ID NO: 249024 - DNA, 122 bp, Homo sapiens
tcttattttcttccttcctcttcccctctggaaataaaagtaggttgtgtttctcctgcccgcccctagagatcagggaaacgggagctggaagggcatcttggattacctcgtcaaattct

SEQ ID NO: 249025 - DNA, 122 bp, Homo sapiens
agatcgccgggatctagctcttgtctcattggggcaggaacgccggggcggggacacgcacgcttcgcccccaggaatgacctcatcgctccggagctccactcacagaccccacctaccac

SEQ ID NO: 249026 - DNA, 122 bp, Homo sapiens
cctggagccccaatcaggatggactttgctaagtctctttgggacttagagacccatgaccgaagctgcagggatgatatgttctcctggatcgacatgctttcagtgtgggcctggggctg

SEQ ID NO: 249027 - DNA, 122 bp, Homo sapiens
cccatctacaacatcagctccctgctgcggggctgctgcactgtggccttgcactccatccgcaggatcagctgccgctcgctgagccagccgagtcccagcccagcgggcggcggctccca

SEQ ID NO: 249028 - DNA, 122 bp, Homo sapiens
cctgaccgccaagctgacaataaacagatgacccaacgttgcctaagttagaacatgcaccgctgctgcccaggctccaataagggcagggttggcgcgtgtgggcttctctaaagggaaac

SEQ ID NO: 249029 - DNA, 122 bp, Homo sapiens
ggggcgcgggggagaaggccacttacaccaccagcctggagatgatccatgacaccatggcgggcaggcgggcgggcgaggcccgggcggcgcggctcggctaggctgcgggcggcgcgggc

SEQ ID NO: 249030 - DNA, 122 bp, Homo sapiens
tactagcaatcacttttaagattgtcatgaggattaaatgagataaaaatgaaatctacacggaattccttgcctaggagggagcagttttgcctgaccatgatgtttgttccatacctgtg

SEQ ID NO: 249031 - DNA, 122 bp, Homo sapiens
aagtgtgggaacggggtgggggatgggcagcgccctgctccgggagccgagggttttccccgccagggtcaggcctgggggcggggcggggcgggggcgggggccaggccgtgtgctctgcc

SEQ ID NO: 249032 - DNA, 122 bp, Homo sapiens
aagagtgaagaggcaaaccgcagccaacacccagctaccgcgagcagtgggactaaaatgcgcaaccgcagtggacatctaggcctcagctccgcttctggtggcttacgtcattactcagc

SEQ ID NO: 249033 - DNA, 122 bp, Homo sapiens
cggagccagccccgccaagcaagatgagctggtcatctcagcacgctagcaccccagttgcgtggccagccgggcccaggcaggagcaggtggccctgtgggcacctggtgcctgccccctg

SEQ ID NO: 249034 - DNA, 122 bp, Homo sapiens
gaggggccggaatattgggaagaggagacagggaccgccaaggccaaagcacagttttaccgagtgaacctgcggaccctgagcggctactacaaccagagtgaggcctgtgagtgacaccg

SEQ ID NO: 249035 - DNA, 122 bp, Homo sapiens
tttcaattaaacgttaattcacataaaaggtctgctttgcctcttgctgctggcgtctgccgcccagtgatgcctctcctttgcccgtttctgctcagcagactccgcgtggacggtggtgc

SEQ ID NO: 249036 - DNA, 122 bp, Homo sapiens
gcgcgttttcgtggcgcctgccccgccccctcactccaagcccgcctccccggccccgcccgccatggcccaaccttcatccgctcagagataaatcagcgcgcgaaagtgggagcgaatgt

SEQ ID NO: 249037 - DNA, 122 bp, Homo sapiens
tccccgcagacgccaggcgcggcgctgccccaggaggtggggtgtttagaacccgctccccgggctcgcccaggagctttgtgtttagtaaaggcagcagtcagttccctggtaggctcagg

SEQ ID NO: 249038 - DNA, 122 bp, Homo sapiens
aaagcctatgtggcaggtgttgaaattcaggagtaaaatcagaacttgcttcctcatttccgaccttgaaaactacctgtttttcttgccatcaaaggaagaggaggggcacttggggtgaa

SEQ ID NO: 249039 - DNA, 122 bp, Homo sapiens
atgcattcttccagggtgagggcagccgcagcacacaccagcctcagtccccagggtggtcgtcatctcgcgagaaagggttggcggggagggtatccaggacgaggagagggaggagtcgc

SEQ ID NO: 249040 - DNA, 122 bp, Homo sapiens
agtggatcccacacaggggctgcaggtggagctgcctgccagtcccgcgccgtgcgcctgcgctcctcagcccttgggtggtttcatgggactgggcgccatggagcagggggcggtgcttg

SEQ ID NO: 249041 - DNA, 122 bp, Homo sapiens
atcttcaaagcaggatgaagacctagacttacctgaaggatcttcacaggaggataaagacgtagaattacctgaaggatcttcacaggaggatgaagacctagagaaaaagcgatcatcta

SEQ ID NO: 249042 - DNA, 122 bp, Homo sapiens
gggctccaggctgtggcctcaccatagcagtgatctcgttaaaggactgcaggttctccacgatgcgggacttgtgtgcgggctccacgcgggcgaagcagcgggcggtgcggcaggcctgg

SEQ ID NO: 249043 - DNA, 122 bp, Homo sapiens
gagacggtggttgtgcccaggccctgaagtgggtgagcagacactcgccaaaggagcacacgggtctcccagccacgtcaaagacgctcatcttttaacggcattacttactggaatgattc

SEQ ID NO: 249044 - DNA, 122 bp, Homo sapiens
tcactttgcttagagtagtgcccggaacatattaagcacttaatataaatgatagctgtgcgataactttgttgcttaatttgccattaaatgtgaggcccagtgtgtttatctacatgagg

SEQ ID NO: 249045 - DNA, 122 bp, Homo sapiens
tgaaaggctcagaaacggcgagggcgtcctcggccgtgcacacgccatcaacacgcaagccgctgctgagagccccggtgctgtccttcatcctggaaagcctttcctaaccggagacttcc

SEQ ID NO: 249046 - DNA, 122 bp, Homo sapiens
gggagagtggtctctaagctttccccaaagaaagggaacaggtctgacttcagagcgcgacgaggagttacccctgctgtggcctacagcgttcacaccgccgagcttctgtttcagttcct

SEQ ID NO: 249047 - DNA, 122 bp, Homo sapiens
cgctccccctccgagccagccgtccttccgggggagcctggagcaagaccggctcttgcccggtggcattaatatctcactggggcccccaaatgttgtacttgagtgagttagagaaaacg

SEQ ID NO: 249048 - DNA, 122 bp, Homo sapiens
agctcgctagccggggcgcgggctgcctccttgttctggtgtgatccgaatgtaacggagcggactttgggatccagaaccccggactgaggttgtgcttggcttgaggggcgggctggtag

SEQ ID NO: 249049 - DNA, 122 bp, Homo sapiens
ctatgccaggtcctcagcccgttttcatccatctacattatctctggcatggagagagaccgggctgcctcccagaccacggacagaagctgctgactcctgtaacctcgcccacttcctgt

SEQ ID NO: 249050 - DNA, 122 bp, Homo sapiens
gatggaagtgtggttcctgtgatgtcactaggtggtcacaaagtatactgattgacagcacggtctgggtctgggtttgaatcttactacttactagctgtgtgatcttgggcaagttattt

SEQ ID NO: 249051 - DNA, 122 bp, Homo sapiens
tggtcctatagagccgatcctaattcccatggcctgacagtacaaccgcatggagatgcacgtctctaagacgcctcaccactgcctaagaagcaatcaaggtgacgcgcccaccggaaacg

SEQ ID NO: 249052 - DNA, 122 bp, Homo sapiens
cgggcgccaggcgccgccgtgtgggcggagccgggcagcctcccctgtcggcgccagccacggctcccggccccaagctccgcccccggcgcgcatctcccagcagcggcccggcacctggc

SEQ ID NO: 249053 - DNA, 122 bp, Homo sapiens
ttcatctcactagggagtgccagacattgggcgcaggtcagtcggtgcgtgcaccatgcacgagccaaagcagggcgaggcattgccacacttgggaagcgcaaggggtcagggagttccct

SEQ ID NO: 249054 - DNA, 122 bp, Homo sapiens
acagacataccatagcgattgcaggtttggttctagaccaacacaatacagcaaatatctcgataaagcaagccatgcaatttttttttggtttctccgtgcatataaaagttgtttatact

SEQ ID NO: 249055 - DNA, 122 bp, Homo sapiens
gctcctccacaaagcaggtttggagacggcaagttagtgacagagccgtaggtttgaagccgcctctgcaaaatttctatcactgagaaaaaccccaacagcgagctgcggtagcgcacccc

SEQ ID NO: 249056 - DNA, 122 bp, Homo sapiens
atccgattcgcggctggcgcggtcgccggtctgaagataaatttagcactctagagcacccgaaccctacaatcttcacgagcgactctgccgccgcccaatcagcgccagatttgcgtccc

SEQ ID NO: 249057 - DNA, 122 bp, Homo sapiens
tgcttgtactgtgtttccaaataactgctttcagttgctgaactgttgtagtggaggctgcgctaatgagacaaaggtgagcactgaagacccaggtagaaatgagcatgaagcaacaaaaa

SEQ ID NO: 249058 - DNA, 122 bp, Homo sapiens
tgaagaataagatcaatgcttcaatttcatttcttatgtggtactgaacgttgtcattaccggaaaaaaatcatttctgaatgcatcctccccaaattctaatctcagaggacagaggaggc

SEQ ID NO: 249059 - DNA, 122 bp, Homo sapiens
aacccgaagtgatcaaacctcggggcccctctgcactggttcttggagcatggccaggtgcgggcacctggggtgggaacagtggggggaccagggtgggcccctgggctccgaggccgccc

SEQ ID NO: 249060 - DNA, 122 bp, Homo sapiens
ccacccctgggcttggcctcaaagcctcctcagttgtcggccctggaaggtgcccagcggcggcagcgccagacgcgccccgttagctcagcgtcgctgagcatccgcagccgccaccaggc

SEQ ID NO: 249061 - DNA, 122 bp, Homo sapiens
tctccaggtccctctaacatcatgagccagtggggcaccccctggcaacccctatatacacgctgggcaaccgtaagtatttagggagacagaggtgcctcttctgcagagtcacccatggc

SEQ ID NO: 249062 - DNA, 122 bp, Homo sapiens
aaccaagactcctttgagaaacggatgattctggcgctggggcatagaaaataaaagactcgggcatcttgtagtatcaaaaaataaaatgtgctcaacaaaaaaggtggagggtaacaagt

SEQ ID NO: 249063 - DNA, 122 bp, Homo sapiens
cggaccggagccaggagcgcccagagccccagcagcaagaggggggtcctaagggtgacccgcgcctctgcccgcctcatgtcccagcccagcgatagtcatccaaagacaatgggaaagga

SEQ ID NO: 249064 - DNA, 122 bp, Homo sapiens
tttttattgctctttaaaaaaatatatccaatcaaggtattagttccttccaacctctcacgttcgccttttgtcaaaacgctgcgcgtttccccctcattcccctaaacatgctgttgagt

SEQ ID NO: 249065 - DNA, 122 bp, Homo sapiens
tgcgccgggaggcgggccccgcgctgcggaaagttcaccgcggcgggcggggggaggccccggccccgctcgccggcgtccccctgcagattccaccattaattagtcctaaggactgtcta

SEQ ID NO: 249066 - DNA, 122 bp, Homo sapiens
ttataattacattattattaaatatttattcttcaagtactttttgcagttgtcctctgacggtctagaatcacttaaatgcttgttgaatgagtgagatgtttagaactacgacttgctct

SEQ ID NO: 249067 - DNA, 122 bp, Homo sapiens
gtgctcggaaacagtgtcttttaaggaggtgtgttatttgccaggctagacttttctacccgagccactttctgatttattccaggtcaggacaaatttgaatcttgggttaggcacttaat

SEQ ID NO: 249068 - DNA, 122 bp, Homo sapiens
cggtctttccggtcaccttgtccgagttgttcttgagctgcacaaacttgccctccaggtcgatctcctcgatgctgacgctacccgaggccgaggcctgctgggccaggtggaagccaccg

SEQ ID NO: 249069 - DNA, 122 bp, Homo sapiens
agcttgaggttcaagtctgagacttagtttctgaaagcagaaatctgcctgctgtcgaggcggcaaatcaatttttctgatttgccgtaacaatcctaattgatgttggctcattattattc

SEQ ID NO: 249070 - DNA, 122 bp, Homo sapiens
tcccctcccgggtctccccctacagtccccccactcccgcccacgggtcccctcgctccccgccgtcgggtcagccctgtcccggccttctggaattgctgaaccctgcggggggcccggct

SEQ ID NO: 249071 - DNA, 122 bp, Homo sapiens
gttctcgtgaatatatccacgggagtagagctgaaaattctcctgagcggggacaggggacgcatgtgtggtgataagtgtgtgaattcggccgattctagtgaattccctaatgaagacgt

SEQ ID NO: 249072 - DNA, 122 bp, Homo sapiens
gggattacaggcgtgagccaccgcgcctggcccgtatgtttgtttttaatgatggggcctcgctctgtcacccaggctggattgcagtgacctgactatagctcttcacagcctcaaattgt

SEQ ID NO: 249073 - DNA, 122 bp, Homo sapiens
attgagttctttgaggtactttgttacatgggtacagatgagagcatgtttgttgtgtagcgaacttgtggtagagtacggtttataagtagaccttccaagcattgttgagatcaagagat

SEQ ID NO: 249074 - DNA, 122 bp, Homo sapiens
ctgcggggcacagggcgggggtcacggagaggcccggacgggtgggggttgtcccacttccgaaagaccccaggttctaggtgtgggggcgaggcctgtaacccctactcgaagggcattag

SEQ ID NO: 249075 - DNA, 122 bp, Homo sapiens
gagagagatgaaaaaaatggcaaaagcccccctgagctgcaagttcaagtgcggacgtgacgtccctgcgaacttgaacgtcaggagtctggatggacagagacacacaaaacatgggcagg

SEQ ID NO: 249076 - DNA, 122 bp, Homo sapiens
gcagttttccacagaaccaagagaataaacgatttgaaaaaataaactcaggcccacctccgtctcacctcccactccccacccaagaatcaaggggaaagatcatctttaccaggtttgag

SEQ ID NO: 249077 - DNA, 122 bp, Homo sapiens
agtagggaaggttgacaaacaccggcgcattatcattttggtcttctacaatgaccttcacgacaacgtgggccactgcagaaggcttatgttcctctgtcacttctacaaccacatcaaac

SEQ ID NO: 249078 - DNA, 122 bp, Homo sapiens
gcggcggtgccggtcacgtgacgggaaggcggccgcccctgtcgccttcgccagcgctagcgggcccgcagcagaggcagtagcggggcttgaaatgctgacctgcacccctggcttgcgct

SEQ ID NO: 249079 - DNA, 122 bp, Homo sapiens
tgcgagggcaccccatgcacagggcgacacgcagcccctcggagtagcacagggaagcagcgtctcctcgggctggcggggggtggctctgggtgcgggcgggcagcccgtcactgcacgcg

SEQ ID NO: 249080 - DNA, 122 bp, Homo sapiens
cgaactcctgggctgaagtgatcttcctccctcagccttccaaggtgctgggattgcagacgtcagccaccgtaccaggccaacgggctcggtttctatggttttgtggggagacggctgag

SEQ ID NO: 249081 - DNA, 122 bp, Homo sapiens
cacagagcccagactgctctgggaatttgtgggccaggacgcagcctcgggcagggctcccggagccgtgcccccatttctttcccatcctttgtccggaaattacacacatggccgcactt

SEQ ID NO: 249082 - DNA, 122 bp, Homo sapiens
cagagcgaggctctgtttaaaaaaaaaaaaaaaaaaaaaaaaaaaagagggctgggattacgggtatgagctacagtgcccggccacaggactaactttgaatcaaactctgccataaatcc

SEQ ID NO: 249083 - DNA, 122 bp, Homo sapiens
ccagccgccaagcggtcacaccaaacccaggaccttcagacaggatgaatggtggggccccgcaatggggctactgagaaagcaggacttgacgctcatacgctccactgaaacgcaggact

SEQ ID NO: 249084 - DNA, 122 bp, Homo sapiens
gtaggttttggtaatttaacaactttatatattttagaacaaatgtttgaattcactacccgactgacaccctagtcaccttcaggataagaacccgtgcctctctacttccaccaagtggt

SEQ ID NO: 249085 - DNA, 122 bp, Homo sapiens
cttctcctccccacagcttccgccccgaagcggcccccacctgagccgtcaccatcctcccgcattaatgggggcattcgtgcagacaaagacagcccccagagtcaggcctggattttaat

SEQ ID NO: 249086 - DNA, 122 bp, Homo sapiens
ttaaacttattcctaagtgttttatagtttttggttcaaagaggcccctagcaatgcatccggaagctaatgggtttcctatgttaattaacatgtggccaccttgctctccttaagtttca

SEQ ID NO: 249087 - DNA, 122 bp, Homo sapiens
gacgtttttgtttaaattccacccgcgtttgtcttttcctaccacctgtggccaggtgctcgctggccatcacagttgcgattccatgagtagctgctttatgactgctttttgtactatct

SEQ ID NO: 249088 - DNA, 122 bp, Homo sapiens
tgaggggtccggcatggggtgaataggagactgggcagagtggctcaagggagtcggggacgttgttggggtccagacggaatgagtgagtgcacaggccagagtcattagtggggtggtct

SEQ ID NO: 249089 - DNA, 122 bp, Homo sapiens
gcggccagaggacttccacccggcggactcggcggctggccccgcgggccgcatgcgatgcgtcatctgccaccgcggcttcaactcgcgcagcaacctgcgctcgcacatgcgcatccaca

SEQ ID NO: 249090 - DNA, 122 bp, Homo sapiens
gggcagggtgacagtggtgaaggactcacctggtaagccacagctctgcaggcatcacagcgcaggtgagcgggcatgtgggctgagtacatctcctcatcatccagttgtggggctgtggc

SEQ ID NO: 249091 - DNA, 122 bp, Homo sapiens
gcttctttcttccccttctgccatgactgagttttctgaggcctctccagacatgtggaacggtgagtcaattacacctctttccgttataaattacccagtcttggattttttttttatag

SEQ ID NO: 249092 - DNA, 122 bp, Homo sapiens
cagctgagtccgtgtgaacttccagctgctgacgtcggtgggctctcagcagcgcttggtcgtggaaagggaaagaaaccaaacccggactgctggttcagggcagctgccggccggggaac

SEQ ID NO: 249093 - DNA, 122 bp, Homo sapiens
ccacaaaacaattgacatgttagtattcatgctagtcccagagtgggcctcgagctgagacgcccttttgcaaatcttaataaaattgcagtccctaccaggtttgctcaacatacttcctc

SEQ ID NO: 249094 - DNA, 122 bp, Homo sapiens
ggctcccacctcactaggaataaaagccaaagtagttacaccgcccatataggaactgctcgcctccatttgcctttcagacctcatctcctttcctctgcacccttctcgcctccatttgc

SEQ ID NO: 249095 - DNA, 122 bp, Homo sapiens
ggggggtgattcctagggttggaagccacctggcccgactccccggccccagtagcctctcgggcagcgccctttccggtcagtcccgccacgtccacctgtagcttccgcccccgtccctg

SEQ ID NO: 249096 - DNA, 122 bp, Homo sapiens
cttacctgtctgtacctcaacgttgtctcctgtggccaagctagtctcccgggtatcactcgggtccgctccgtcccgcccccgcaggccctgccgaaggccccgtcccggctgcagcccca

SEQ ID NO: 249097 - DNA, 122 bp, Homo sapiens
aacttgcagagtaagctggagagcttgaatacctcggagaagttcatggccgccgcctgccgcgggcgccaccctgcgcccgaaaacccgcgggacccctgggcgcgcagcaggctgcaaca

SEQ ID NO: 249098 - DNA, 122 bp, Homo sapiens
gcggcgagcgcgtttccatggcaccggggctgcgggggctgctgggccactgggctcactcggtttcagttgctcccggcggagcaggggcatgcagctcagcggccaccgagcctctgggg

SEQ ID NO: 249099 - DNA, 122 bp, Homo sapiens
aacccccagagctacacttatgcagtgcatgcaccaggccaggcttggttgtcaacagcacgtgtgcacgcgtgcatgcacacacacacacacacacaatcttaattttagtttttgagact

SEQ ID NO: 249100 - DNA, 122 bp, Homo sapiens
agcccggtagccggctgaactcgtgaataggttgttacgaacaaagtctagagcagagcccgtgtacagggccgagccgtccaggggcttcattttccgcacagcggttatgacttcccttt

SEQ ID NO: 249101 - DNA, 122 bp, Homo sapiens
ttcaggtgatcctcccacctcggcctcccaaagtgttgggattacaggcatgagccaccacgcccggccaagaccagcgaattttttaatttttttgtagagacggcgtcttgccacgttgc

SEQ ID NO: 249102 - DNA, 122 bp, Homo sapiens
aacactgacatataggtgcttggagataaaagtttattcgatttggccaaagcgagaaggcgggagggcaagatctctcaaatccgccctaacaaaaagaagaagcagagagtgtttatgcg

SEQ ID NO: 249103 - DNA, 122 bp, Homo sapiens
gcccggctttgctccaagccgcgtccctacctgaggtctccacgggaggagcggtttggacgcgccccaccggatgggaggaggtgcttggggaagccgggccgtaccgccggtctgactcc

SEQ ID NO: 249104 - DNA, 122 bp, Homo sapiens
tcacaccacgagggagcagcggcttgctcggctcccgggggcagagccaaggcgcgggcgcggcggcccggggccacctgcccgccctcccgctcgctccccacttggcccgagaagccggc

SEQ ID NO: 249105 - DNA, 122 bp, Homo sapiens
cccgccccacggtacattcaggacgtggagggagcacacagcaggtccgctcagcagccacgcacgtccacagacactcccgactcacgcccaccgtgggacacattagtgcaaaatgctcg

SEQ ID NO: 249106 - DNA, 122 bp, Homo sapiens
cggggccacgcagcagtcggacgccggggacgcgccacgagccggttttgctgtgttgaacgtattccagaatacagtgtgcaatggtcagtgccgttgacctcagaaggacacccgtcacc

SEQ ID NO: 249107 - DNA, 122 bp, Homo sapiens
gaaatagccccaaacaacaaattgcgtagagacacagtgcacagaaatacatggtacaatcgcaaatatataccacacgcacaacatgtcatgtaaataaagggcacacaatgaaagacaac

SEQ ID NO: 249108 - DNA, 122 bp, Homo sapiens
gtaagtattttgtcctttatgcagaaatgggcacatttattttaatagcaatttatgccacgactacacaaatgccagcatgccacatgccataggcagtcttgcatttggcatgttgcacg

SEQ ID NO: 249109 - DNA, 122 bp, Homo sapiens
gcttccaacacatgtcaattccaactaggcacaggtcaagtgctgactagccacaggtgacgagtggctactgtattgaacaacacagatctagaaacagagtgtggacctggagggaccca

SEQ ID NO: 249110 - DNA, 122 bp, Homo sapiens
ttctgcctctttgtttttcagttcatgatattcctgtggactggctttactcctaatttccgaccccaataagatcctggtctagttcttggtatctagacctaattccccatttgcataaa

SEQ ID NO: 249111 - DNA, 122 bp, Homo sapiens
gagcagtgtttcctctgaaatcacggagatagcccagatttagtcatccagtccttcttgcgaatattcaacccatatcaggaggtacagaggtttttagggtttagggtatttttaaccaa

SEQ ID NO: 249112 - DNA, 122 bp, Homo sapiens
gggcaaggcgtaccatcccgatgccttaggtgagataaatgcgtttccttggctttgaagcgcctctggtccgtgcagccaccagcagtacaaaaataattgcgagtcctgatcgcactttg

SEQ ID NO: 249113 - DNA, 122 bp, Homo sapiens
caaataccccttttccatgaatcactaacaatcgcctgggctcgcacgaaggaaaggactcgctcaaggcttctgtttaataagaaaggggtggggttacacacattccgcgctgtttaaaa

SEQ ID NO: 249114 - DNA, 122 bp, Homo sapiens
gaggtgtggagggagaggcacttgcgggacctggggctgcatgcggcgctcgcgggccagcgcaagctccgggtgggtgtgggctaggcatgcggcgcactgggagtggccggccggagcct

SEQ ID NO: 249115 - DNA, 122 bp, Homo sapiens
gcggtaacaccagcgtctgggaagacgcccgttgccaagcggaccgtggtctagtggtagcgtcagtgtcaaggaaaaacacccattacttagagaccgggaaagggagtcaccctttcccc

SEQ ID NO: 249116 - DNA, 122 bp, Homo sapiens
ccgcccccgaacgaggcgggcagggagaggacgcgtggcccccacccactcagctcccagcgcggagtcccgggaccaccttgcggagaaaagtccgccccgcacctgccacggaggagaag

SEQ ID NO: 249117 - DNA, 122 bp, Homo sapiens
cctgcaaaggccgactggagatcaagttctgcgcctgaagaggctgccaaaactcaaaagcggggcctgggaaggccgccgagagccatgagctgggctgggccgaaagaggccactgggag

SEQ ID NO: 249118 - DNA, 122 bp, Homo sapiens
gcctgtgtggccggtggcgggcgggccgttacctcccgcgcatgctctatggggtagagacgctaggccggcactgcctaggtgggccgggcggtgcgagggtcgcctttcagcctttacct

SEQ ID NO: 249119 - DNA, 122 bp, Homo sapiens
ccggcccagccgggctccctcagcgcatgggagaggccgtgggagccgaaagcagcgcggcgcagccagcacccggtccagccacccagctcggccttcggctgcctccttcctgccttccc

SEQ ID NO: 249120 - DNA, 122 bp, Homo sapiens
tcccatcggagtcaccaatcctggtcccagtcctgggcgagcctcccggccccctgcaatcggaggcccggaccccgcagccagcgtcccagcaaccgaacaagtccccatcccctctcagg

SEQ ID NO: 249121 - DNA, 122 bp, Homo sapiens
atcccaaagagcaggaacttgtacttgcgggagggttccaggtcagggatagtgacctcccgctgatctgcagccacgggcaccacctggggctgcccgtccctgtccttgtactgaaccac

SEQ ID NO: 249122 - DNA, 122 bp, Homo sapiens
atttatgtgtgccagacaagtacccccacagaacttgagatgctcaggcaaagacgagggcgataggaatgtcattcggaaatgatttcacaccgggttagccctgcacagccagccagctt

SEQ ID NO: 249123 - DNA, 122 bp, Homo sapiens
tagctttacagtcagacgcctgacagggctttctggcctaaaattagcgttggaaggctacgtttccttctggaggctctaggggagcacgcgcttcctcaccttttccggtttctagaggc

SEQ ID NO: 249124 - DNA, 122 bp, Homo sapiens
ctctagaaatcgtttgctgtacacctggataacaaatataccccgtggttctaatatcagcgtcctattcctcctcccaaggaactagtgatagcgcctaaccagtgggcgttgttcctctt

SEQ ID NO: 249125 - DNA, 122 bp, Homo sapiens
tttagagcctgggaagtcggctgctgttcagtccttcctagcctcctcaggcgggagccgcggcccactcagtcagttgcggcccactcagtcagttccggccccagccccgactacctgtc

SEQ ID NO: 249126 - DNA, 122 bp, Homo sapiens
acacccagcattcagctgctttggagagcagtttgtcgatagcagattaacttgaaaatgcgcaaatcttgtggcctgccgatttcacattgacgtgtctagacagggagtgtaactctggc

SEQ ID NO: 249127 - DNA, 122 bp, Homo sapiens
ccctcagctgtcacagcaacagggtcacctggagggctgtggaaacagactgttgggcctcgcctcctgggtttctgattcaggaggtctggggtggggccaagaatttgcatttctcctcc

SEQ ID NO: 249128 - DNA, 122 bp, Homo sapiens
aggtttgcatcagtcactgcactgtcagggactctagtgaccaaacaagcccgggccagccggcccccaccttgccacctcccgccactcgcacccgtgtggacggaggcggccagcatcgg

SEQ ID NO: 249129 - DNA, 122 bp, Homo sapiens
ctcctccagggaagccttgtgcctgcctgggccgctgcggggttcgggtgccagcatcttcgcggatgttggcatcttcgtaatcacagcggtcacgtcgccgtcattcaaccctttctgtc

SEQ ID NO: 249130 - DNA, 122 bp, Homo sapiens
gtgttttcatttggaaacaggaataatgatccccgaccttccagccgtgtcaggatgtcacgatggccacgtgaggccgtgtctgtgagaagcgtctgccggtggtggaggacgtgcacttt

SEQ ID NO: 249131 - DNA, 122 bp, Homo sapiens
atccacccgcctcggcctcccaaagtgctgggattacaggtgtaagccaccgcgcctggccgggaaatatctcttacagaaataaaggcagttggctgggtgtggtggctcacctgtaatcc

SEQ ID NO: 249132 - DNA, 122 bp, Homo sapiens
ttgccgctgctggctgccatggccagcttttactcctttatttatcctctcccccatgttcgatttccgtcgtatcagagtgcccttttttcaatcctcctgcgattggctacttttagaat

SEQ ID NO: 249133 - DNA, 122 bp, Homo sapiens
actgacagctggtggctccggcaggtggggtcttccagcagctgagacggctgcaggaggcgatgctccatctctcctcaacctcctcccctctgtctctgtgcaggtgcagctgccttggc

SEQ ID NO: 249134 - DNA, 122 bp, Homo sapiens
aacagcactcagggccaagtgtggacagggctgcctgtgtctctagagctgggcccaccccggagataaggagatcgtcaggtggtctcatgaggcagcagggcacactaaagtaaactttc

SEQ ID NO: 249135 - DNA, 122 bp, Homo sapiens
gtatggtggcagaacaggcagcagctaaggtggcctcggttttccccaggatgaggtgatcgggcgggagctggaggcctcaggccagatgggcggctgcacagccctggtggctgtgtccc

SEQ ID NO: 249136 - DNA, 122 bp, Homo sapiens
aacaggaataatggagtagtactactaatgcatggtcagaaggggcttttctgtctagaacgcaggcggcgggagttgcaccgccacagcccgggagaccaaagagtctccactccccgctc

SEQ ID NO: 249137 - DNA, 122 bp, Homo sapiens
ctaataagcatcagaacctgggtttgaattgagggagtctgactccactatgcttggcttcgccattggttagccaccctattgtagcatttttctttgctattgtgttttagctttttggg

SEQ ID NO: 249138 - DNA, 122 bp, Homo sapiens
tcacatgaattgtaaaaacgcacttacatgccattcgttctttcatttgtttagtagaatcgtttgaacccgggaggcgttctttcatttctacgttctaaagagcttaatgtagccattgg

SEQ ID NO: 249139 - DNA, 122 bp, Homo sapiens
cccccagtattaggatttccatttgggtctcttaaatatttagttggatcaaacctggcccgatatttgaaagtagcaaagatattatttttaaaagtatctgttcagtatgtttttgggga

SEQ ID NO: 249140 - DNA, 122 bp, Homo sapiens
gagcgtcgctcctttacaccttcactaattaattcccgtggacgagacactcacaggtggcgtcacggtttcagagggcagcagcatgttgtacggccgagtcggtgcactgtgttactagc

SEQ ID NO: 249141 - DNA, 122 bp, Homo sapiens
aattcccgtatgaaatgtgtcgtctcaagaaatcaagtagaggcgaggactgtgttcctccggccagcaggtggcaccatactcgtttggtgcgttccgctggagaattctggcccttccgc

SEQ ID NO: 249142 - DNA, 122 bp, Homo sapiens
tttcctttccaccctcgtgctttccagccgtagaatttgcatcgtaggtgatggaagatccgggtgtctctttgagggtgttttctggagcctgcggccaaacagaaagcagctgctggggg

SEQ ID NO: 249143 - DNA, 122 bp, Homo sapiens
cgtgccttcccaggccatgcgtcctggtgcgaggctctgagaacgcgatttatgtcaccgcgttggcgacttacatgtgctccctgatcattgaagacacggttttgtctctgcctgggatc

SEQ ID NO: 249144 - DNA, 122 bp, Homo sapiens
tgagtacatttcatctttggtaaaacaaatagaatcttgtttccaagtagatcaacagttcgtatgtgtcgtggctactgtctctaagaaacttctatttactgaggcctgtcatacgctca

SEQ ID NO: 249145 - DNA, 122 bp, Homo sapiens
tcaaacaggcatcacatcagaatgccatcattatatataatatgtatgcatgtacttacacgcacacacatacacacacacacaacccatgagagcagataaaagctttctgacaataaatc

SEQ ID NO: 249146 - DNA, 122 bp, Homo sapiens
gaattattgagcctaaatgactggaccattagataccctcctgaatcagtcattggatgtcgttcatcctgggacgtgacatgaccttggtcaaggcgaccctgcagctgaggcagtctcca

SEQ ID NO: 249147 - DNA, 122 bp, Homo sapiens
caaaaataaaactctacaactcattctaacattgcttacttaaaagctacatagccctatcgaaatgcgaggattaatgctttaatgcttttagagacagggtctcactgtgttgcccaggc

SEQ ID NO: 249148 - DNA, 122 bp, Homo sapiens
gaggggtgcggagagcgggcctgtgattcaccagagggttgcagagagaggcccaagaatcgcgggaggggtgcggagaggggcctgtgaatcacgggaggggtgcggagaggggcccgtga

SEQ ID NO: 249149 - DNA, 122 bp, Homo sapiens
aattaacaagtctttttagcctcttggattgggattaggatgacagtttttcagtgagggcgcagaaaaacagtgcatttcagcaccaaggacagacacaatcttcatggttcctgggctct

SEQ ID NO: 249150 - DNA, 122 bp, Homo sapiens
tcagctgtactcctgtgttattcttccttggctcctctctgcaaggccagtttactgtcccgggagggtgctgacccctgcctgcctggttcttcttgttctgttttgcagttcattaccag

SEQ ID NO: 249151 - DNA, 122 bp, Homo sapiens
tcagcatccccaggacatgcagtaagtggggtcctcaaaggctctttgatctccaatccacgggagtgccaggccataaatattatgttactacccccgtcaccagccctccaatgcgacaa

SEQ ID NO: 249152 - DNA, 122 bp, Homo sapiens
tcccacccgccttctccgagctgatgccaaggccggacggacgcgacaaaggcctgctgccgaacgtgacctgtccgcagagtagacagacgggccccctgaccgccagactgaggagaccc

SEQ ID NO: 249153 - DNA, 122 bp, Homo sapiens
tttacagggccaaatgcaagctcttgaggcatataaagtggattaataaggttggctcagcgttaagctatgccagagccgagtccaaattttattccggtacagggatgactttctatgtg

SEQ ID NO: 249154 - DNA, 122 bp, Homo sapiens
ctcctcctttttctttaattttctcctttctccccaagcttctacagttgtttctgtgttcgctcaatcatggcctttggcattgattgaaaatttggcagttccttctctcggaattctgt

SEQ ID NO: 249155 - DNA, 122 bp, Homo sapiens
atgtgtaatggatactttggaaagcataaccttttttcctattcgtgaccattttattggcggaaccatctgaatatattagttttaatatttaaacttgctgagaacactttttcatggag

SEQ ID NO: 249156 - DNA, 122 bp, Homo sapiens
ggggcggagccgagcgggcggggagggtgctgggtcgcgcctggcctggggccgaggcggcgcgcggcgctgacagctgagtcggctcgcggcctcccggccccctcggcgcccggcccgac

SEQ ID NO: 249157 - DNA, 122 bp, Homo sapiens
gagggcaaaagatagtatctctgggaataaaaggcaggcaagcagtaacgctttgaagtccgggtgcctgaagcgtcaccgctgcagctccagctgtgctgtgggtctccacagggccggga

SEQ ID NO: 249158 - DNA, 122 bp, Homo sapiens
gacagtcgctggtcataggatcctgaatcattaggtcatttacattcaaaaagccccctgcgctgcctggcagaatctagatgaggggccatttactgattcaacaaatatttatagcatga

SEQ ID NO: 249159 - DNA, 122 bp, Homo sapiens
accttgtgattcacccgcctcagcctcccagagtgctgggattacaggcttgtgctatcgcgcccagctgaaaacttagttcttaggctaaatttagggtgcttttttcagacaaaggtgtt

SEQ ID NO: 249160 - DNA, 122 bp, Homo sapiens
ggcccggcgcggggtccggagagggcgcggcgcggaggcgcagccaggggtccgggaaggcgccgtccgctgcgctgggggctcggtctatgacgagcagcggggtctgccatgggtcgggg

SEQ ID NO: 249161 - DNA, 122 bp, Homo sapiens
taagactgcctattctccataccgcattgacatgctgcagccactagggcgaaaatgggccgtttcttagaaaaatgggctcagagtatgggagtgtgagagaaatgtgggtgattacgcac

SEQ ID NO: 249162 - DNA, 122 bp, Homo sapiens
tcacggccatactccacagggcagaacccatctgcggggactcctgttaaacggtggcctcggaagataaagcgacttggcaagacgacactgaaacccagacatgcacaggacactgcatg

SEQ ID NO: 249163 - DNA, 122 bp, Homo sapiens
acctccctgcacgtgtgcatctgcgcctacgtgcacctgccccacctcggcttcccagagcgctgtccctgcccgtccccactcacggtcgcctccggtcgcaggcctcctggcttcggtgg

SEQ ID NO: 249164 - DNA, 122 bp, Homo sapiens
agacagatcacgcgggttctctgctgccggacggagcgcccctagctgccactgagcccacggtgaagggcacggtgccacccagagctcctggcgcgtgccctgccacagccctggaccag

SEQ ID NO: 249165 - DNA, 122 bp, Homo sapiens
agtaattgggttttatttcacatatttatatatttacatataggttggtgcaaaagtaatcgtggttaaaagtaatggcaaaaattatgattgcttttgcacaaacctaataatttcaggat

SEQ ID NO: 249166 - DNA, 122 bp, Homo sapiens
gctcttctaagcgcagcgaccgtggcaggaataacgagctacagaggccacacccgcacacgggaaacgcatttcccatcgccccaaacacaaaccctgcacctctggcctgtaaaggaagt

SEQ ID NO: 249167 - DNA, 122 bp, Homo sapiens
tcggagagcaggagcaggcagacgagtaagagagcacgcgcgcaagagagggctcacatccgtcctggaggaagaacggcacagacggagggaggctggggttggcagagactgggacggaa

SEQ ID NO: 249168 - DNA, 122 bp, Homo sapiens
aagaagaaatgatatgaattctacacaaactcgtaaaactgaagaggagggaacagctgccggttcactctataaggccagcattacaagcattgcatggattcctacgccagaaagaggct

SEQ ID NO: 249169 - DNA, 122 bp, Homo sapiens
gtgctgacgcatccagagccaccgctgcctcagggcccctacacggagggggtgttggggcgccgggtacctgtgccgggcagtaccagtggtggcaggggatccgagattttcgtgtgccc

SEQ ID NO: 249170 - DNA, 122 bp, Homo sapiens
tggtgggtgttcccagggtgctgtggggctctgctctcaatgggcgttcccagggtgctgcggggctgctcctggtgggtgttcccagggtgctgtggggctctcctagctgcagcgcagtg

SEQ ID NO: 249171 - DNA, 122 bp, Homo sapiens
aagaaagaaatcagtttgtccaatgaggtgctggcaaatgtttaacaaccagctccagtgcggggggtgtgtgtgtgtgtatgtgtgtgtgtgtgtttgctaacttgtagcatttgctgatt

SEQ ID NO: 249172 - DNA, 122 bp, Homo sapiens
ggtttccacgtgggtaaaatgatcgtgaaaaaaagcaccgaggagtactttgagctcgaacggaggccatccgtgtaaagggccagattctgtcaatggatcgatccccccgatattgatgg

SEQ ID NO: 249173 - DNA, 122 bp, Homo sapiens
ccagcaggcactgcgagggctcagggctgggccacaggccccccgggaggttccagagtccgaaactggggcctggaatctcgggaccttggacagtctggcaaggaaagacagactcccga

SEQ ID NO: 249174 - DNA, 122 bp, Homo sapiens
atgaaattctgatgcataaagcagcacacatgcaccttgaggacatggtgctcagtgacacgggccagacacctggacaaatcctgtgtggctccactcatgcggtccctagagcagtgact

SEQ ID NO: 249175 - DNA, 122 bp, Homo sapiens
tgcatctctctgtttcctggctgtggaggccaaggggagcccagggggacgcattggcttcgtggtcttgccaggcagctgcagaggcccaaggcccagaggtccagctgcaccaggtccac

SEQ ID NO: 249176 - DNA, 122 bp, Homo sapiens
acatgtttgttcttcaggatattttaaatgccagatagaggtgctatattgtcttcattgcgggccaggtctctgttatttctcagttcaagataggtcaagggaaaattcgttgattcact

SEQ ID NO: 249177 - DNA, 122 bp, Homo sapiens
atgtcgctcagttcacgagaaaaccgaaccagcaggagtccaagccacagcagggacaagcggaggagccgcggcatccctgtgaccccaggctagtcctccgcgttgtgcaatggcggtcg

SEQ ID NO: 249178 - DNA, 122 bp, Homo sapiens
gaagagactgtccactgctgacatgcttcagggcctagccttggaggccccagattacttcggcccctgctaactttccaggctctctcctccctgccctagtgctcctcaaacaccatgat

SEQ ID NO: 249179 - DNA, 122 bp, Homo sapiens
aatgtttttataagataggaatatatgtcttcaccatggggggggtctcgatttcactaacgttgtatatgaaaatgtctgcaataaaaagtacttttaaactttgtaaccctccttttgta

SEQ ID NO: 249180 - DNA, 122 bp, Homo sapiens
ggtccccttgtccagatgcgacaggggcctcggcactcggcgtatttcggaggcctggggcgcggcttgacctccgggcacctctgcccctgcgcagggccaggcgcgaccttgcgcggaaa

SEQ ID NO: 249181 - DNA, 122 bp, Homo sapiens
ggaccggggaaaagtgtgtggtaggcgcgcgcggcgcaccgtggggttgggaccgggcggcgctgcgggccgcggtggggccggaaatgtcaggcggtccccactccgctctcggcgcctcg

SEQ ID NO: 249182 - DNA, 122 bp, Homo sapiens
ttggccgacaggctgtccatttgtggtcaagagcaggactttggagacatcacacagacccgggtttgaatcctgataagtaatttacaactttatttggacaaggcagtttaatttctggg

SEQ ID NO: 249183 - DNA, 122 bp, Homo sapiens
tgcccttttccttttgattctctgattctcgagcccttgccattgttcaagggctgggcccgggccttggcaggaagtcccacaggaggcctggctgccccggcactgctctgcggacttcc

SEQ ID NO: 249184 - DNA, 122 bp, Homo sapiens
cgtagggcgaggggagctctgggaacggggcctgtgcgcacgcgcatctgacggttgtctcggttactcatgtaagcggaaattcggtgggctcttaggatagtttctgctttctagtgttc

SEQ ID NO: 249185 - DNA, 122 bp, Homo sapiens
agggacagcctgccctgtgtcctcagagctccgcgtggccggcaggctgcgccgcgtggccggcagcgtcctcaaggcctgcgggctcctcggcagcctgtacttcttcatctgctctctgg

SEQ ID NO: 249186 - DNA, 122 bp, Homo sapiens
tctgcattttcatccacaagagctgggaccaggcccgctcctgtgggccagctgctgcctcgtctgccctcttgttccagaagcccagggctatgctgttcctgaggcagggctgcctagtg

SEQ ID NO: 249187 - DNA, 122 bp, Homo sapiens
cgagcaagtgaccgcttgcagctgcacgatttccccaccggtaggtagggacggtcaacacgcaccccgtccgacagacttggtggaggcgctgcgtccggtgagccatgctgttgaattga

SEQ ID NO: 249188 - DNA, 122 bp, Homo sapiens
cgccatcacgacacggtgtggcctcagccagtgcggggaactgtggcctgcatcagcaaacgctcagaggacaaggaagctttcctcccacttgtttcataccaaggcccttcattttcagg

SEQ ID NO: 249189 - DNA, 122 bp, Homo sapiens
gccgacgacgcgcgaagggcacacatcttaggacccggaggacgtccggcctctgtgagccgcaacctttccaagggagtggttgtgtgatcgccatcttagggagtgagtgtggccgggcc

SEQ ID NO: 249190 - DNA, 122 bp, Homo sapiens
gcagtggtgagaagcatggggaccgacacagggatgaggggttactggggccgcggcttgcggcctgcagaccccggaagcggcgcagaggatcccgcctcctattccttctcatcctatcg

SEQ ID NO: 249191 - DNA, 122 bp, Homo sapiens
ctgctgtaccgggagaactaaggaaaaggattttgtctcatttttccatttcatctctgccggtgctgggaccagacagaagggtagaaacaaactcagaggaaaaagtacccttccttcaa

SEQ ID NO: 249192 - DNA, 122 bp, Homo sapiens
tctggggagtcgaatgacaggcttatgccgctagcagggcgggcgtgccagggactaggccgcttcgcaggttcgcttttctcctttccattgcgctgaactcaaggaggagaagggaaagt

SEQ ID NO: 249193 - DNA, 122 bp, Homo sapiens
gctagatccaatcagtgtttgacctggccgcgcggagggggcgggcccatgatacgcaatcgaaccccgcccgtctctcgggcaacgcctcctcccccccctccccagctcccaaacggaaa

SEQ ID NO: 249194 - DNA, 122 bp, Homo sapiens
ccttgagttatctttgtttattctttggtcctaggaagcatagacgttccagagtgctgacgcagacccctaagttccaagggctttgcaaaatcggcttctgttgtgaatgtcatttgtat

SEQ ID NO: 249195 - DNA, 122 bp, Homo sapiens
gtattagtactgcaagtccgcagtgtgtctcccctctatgtttcagagccttttatctatcgagcacaatatgaaatccaaaaaaaggtccagaatttttacatctatgttgtaaatttaaa

SEQ ID NO: 249196 - DNA, 122 bp, Homo sapiens
ccgctgatgtgggtgggctgagttaagccctcattcgctgcagtccggcccagctgttctcggcctcccgccgccgccgccgcgcacccggggagggcgggcgcacctccccatcgtcaggg

SEQ ID NO: 249197 - DNA, 122 bp, Homo sapiens
accacgctggacagcacaggtcaccggtagcactgcttttccccatgtggcgcgtgcacacgctcacacagagggacagacagtgcggcgggtggcaggttgtgtgtttcctctactttcgc

SEQ ID NO: 249198 - DNA, 122 bp, Homo sapiens
gctgtttggttttggagagagaaagaaattgtctttgtcaaccgttagccattgctgccccggtgtggtggctgtcaggtaccagtcacaggtgagggaattgttacattttttccaggggg

SEQ ID NO: 249199 - DNA, 122 bp, Homo sapiens
tctgcggccggggccaagtgtgctgagcttggtgaccgttggaatcaggacgccagaaagcgcgcaaagcatcgcaagctggcaccctctggccatagggttccgcacgggccaggccggtg

SEQ ID NO: 249200 - DNA, 122 bp, Homo sapiens
gaatctcaccagacgggtttgcctgcctccacggggggcagtgcctgcacacggggcctgcgccgggaccagccccctgctctgggagtgggggtgccggatcctttcagcaccaaagcgca

SEQ ID NO: 249201 - DNA, 122 bp, Homo sapiens
cttggtgttggtgccctgtgatgctgccctggtattctgtgccttctgctctgaggccaccgcagtgtccgtggctactacagagacagaagcagtgctgggcactgatgggccgtgacatt

SEQ ID NO: 249202 - DNA, 122 bp, Homo sapiens
actggaactgagctctggatttttttaattccatgccgagtgagggcctttgagaaaggccgcaaggagagtgttgtgtagggaaggaattggggatgggaatcttagtgtggtttctgtgg

SEQ ID NO: 249203 - DNA, 122 bp, Homo sapiens
agcagtcatttctatgcaaggtactgcttgggcctgcctccctcaaaggggtaggggatgcgggctggacaaagggctcgtgatcaagtaaagcactgtgatgacagctgctatttctatat

SEQ ID NO: 249204 - DNA, 122 bp, Homo sapiens
gtgtgtgtgcgtgcgtgtgtgtgtgtgtgtgtgtgttacctccatgctaagctgcttctgcggtagctctagagagcctcataaaagagctaaataaataaaaggggtacgggatatcctta

SEQ ID NO: 249205 - DNA, 122 bp, Homo sapiens
aaagcacacagtgagagccgggaacacgggtgcccccaaaccttacaaccgccaggccctcgtctctgaggcatcctctttgccatcgcccctgccccggggctaccgctcattgttccact

SEQ ID NO: 249206 - DNA, 122 bp, Homo sapiens
cacgccgcccccagtgccggccctccctgagtttagcaggagtgcgtgcctggccgaatgcgtgtgagttctaggtgaaaggtcgcaggagcagctccagagtttaaagagttttcacttgt

SEQ ID NO: 249207 - DNA, 122 bp, Homo sapiens
tcgcgcctaggctggggctcccctggccccaggttagggggactccgatgtgtcctggggcgcttcctgcccatccagcctccgccaggcagcctggccctgaatggctttgagggcagcct

SEQ ID NO: 249208 - DNA, 122 bp, Homo sapiens
tggaaatagttctgtgagctctaggagacagggagggacagttcagaaaggagttggtcccgtaaaagcatttgcgtgataatgggccaggcgtggctcacatccataatgccagccctttg

SEQ ID NO: 249209 - DNA, 122 bp, Homo sapiens
cccgctctcaccaggacccggggaccccggagacgagccccccgccaggccgcgccaccgcgcccatcctccctgcgggtcccaggcacccacagcgcggccaagcccacctgcccgccggc

SEQ ID NO: 249210 - DNA, 122 bp, Homo sapiens
ggtaggtgtaaccgtggccagagctgcgctcagggactggacgactgccagtccgtcgcccgcacaatcctgctccaaaccgcaggcctcacacttcaccgcgccgcagccacccctaccac

SEQ ID NO: 249211 - DNA, 122 bp, Homo sapiens
tttctatctctatccacagtctggaatcgttaggattattttaagccttcataacatttgcggacagcttggagtgttttgtacatgtagtggggcagtgcctggcctcctgtgagagattg

SEQ ID NO: 249212 - DNA, 122 bp, Homo sapiens
ataattgttgagcaaacggccgattttcttctaacaccgacattgctgcagaagaatctgcggcggtctttagttggatccaagtctcaaatgtgcctggctctcgtccgggatgctcctga

SEQ ID NO: 249213 - DNA, 122 bp, Homo sapiens
tggtctcggcatgttagttgcacacacgtatggtgtacggttcccgctgggagccgcgtgcgtgtgcatgttcccgtgtgtgtggtgggcggtgtgccaggtccactgcaaggcgtgtgcgc

SEQ ID NO: 249214 - DNA, 122 bp, Homo sapiens
caggctggagtacaatggcgtgatcttggctcacttcaatctccagctcccgagttcaagcgattctcctgcctcagactcctgagtagctgggattacaggcgcctgccaccatgcccagc

SEQ ID NO: 249215 - DNA, 122 bp, Homo sapiens
atgcctcaaaggggcaagtcaggaatgtgctgtgtgtcaaaacagcaacaagaaatccagcgtggctaaggtgaaatgagtactgaggcaagaggatggaggctcagagaaacacagggttg

SEQ ID NO: 249216 - DNA, 122 bp, Homo sapiens
tcagagatggatagcatgcacaggaagaagtacatgggggtgtgaagatgatggtccaggcgaataatggtcatgataatcacattgccagagagagtcagcaggtacaaagttaggaagac

SEQ ID NO: 249217 - DNA, 122 bp, Homo sapiens
taaaatcttaggaaacccactgtgtttgcatatgaaagccaggttctataatccatgctacgccttctgtctgtctcatttgcttctgaagtctgagggaaagatgggtgttattttgcact

SEQ ID NO: 249218 - DNA, 122 bp, Homo sapiens
tctgccactgcaattttaagcacgcaatacccatgacaggccagatgatgtggtggctcacgccagtaatgccagcactgtgggaggctgagatgggtagatcagatcagttaagcccagtt

SEQ ID NO: 249219 - DNA, 122 bp, Homo sapiens
agcagaggcccaggactggcatttggatatgcagctgaccggcaaggtggtgctgtcagccgctgccctgctcctggtgactgtggcctacaggctgtacaagtcgaggcctgccccagccc

SEQ ID NO: 249220 - DNA, 122 bp, Homo sapiens
tcacattacataggcatcaaatagatgattcaagagggaacaggtttctttcaattggtacgtcatgtcatggggctttgaaaggagatacacttaataatctagaaagctcttaagagaag

SEQ ID NO: 249221 - DNA, 122 bp, Homo sapiens
tttcttttttttttcctttggacggagtctcgctctgttgcccaggctggagtgcagtggcgccatctcggctcaccgaaacctcccggtctcggattcaagcgattctcctgcctcagcct

SEQ ID NO: 249222 - DNA, 122 bp, Homo sapiens
tgtttccctccgttcctgtcacttgtgacaggatgagaagaaacgcctttaccaggaactcggttctgtttttgtctaaatgtagatcttgggctattaaaaagggagctgcctgattgctt

SEQ ID NO: 249223 - DNA, 122 bp, Homo sapiens
tgtgttgcccaggctgaagtgcagtggcacgatcttggcttcttggctcactacaatccccgccttccgggttcaagcagttctcctgcctcagcctccggagtagctgggactacaggtac

SEQ ID NO: 249224 - DNA, 122 bp, Homo sapiens
ccgattctgccggcatcctccctagagctctccatcccccgatgtggatctccggattatcgggtagacactgtcgtcatccccatgttacagacacaaagcctgggtggctgaggccggca

SEQ ID NO: 249225 - DNA, 122 bp, Homo sapiens
tacggttcctgactacatggagattataatctcattaggaaaacaggtcatgtgaaatatcgagaggatgaaaaataaaatgaaggcaatttggctctgactcatccatacaaagaaagcaa

SEQ ID NO: 249226 - DNA, 122 bp, Homo sapiens
agtcagctgtaatcagcaggcaaaaggagaactcttcaatcacgcacaccactgagctgacgtctgctacactgctctcaattacactgcagaaaaaatggtcataaggaagagctaatatg

SEQ ID NO: 249227 - DNA, 122 bp, Homo sapiens
gagcccccactgcgtactagcgctgaactactgggcgagggtcggccagcggcaggaaaacggggaaacaggtgcgcccgtttgtgcgcgggggaagctcgcagccacgagcgaagggacct

SEQ ID NO: 249228 - DNA, 122 bp, Homo sapiens
gcagagtcaggaaggggctgctatgcgaatggcgtagaggagtagacctctcttccaccacgtgcctcacgtctccctcctgggcctgcagctccactgtgtgtaccaggcactgtgtcatg

SEQ ID NO: 249229 - DNA, 122 bp, Homo sapiens
ggggaaggttaagcggggctgctggcttggggaatttggggccgtccgcggggctctcctcgggctccaagctttcaccccagaaaacagccctgaaccccaaatttgctccagccccaggg

SEQ ID NO: 249230 - DNA, 122 bp, Homo sapiens
tatgccaggtgttggggatgcatagtaaatctgaaggtcccggtgctggctgtgtgcacacgatggggttattaggagaatacattagttcattgtaagcgttatttatgcaacacacaaga

SEQ ID NO: 249231 - DNA, 122 bp, Homo sapiens
gctgtgcccggatcccaagtgcagcggcacccagcgtgggcctggggttgccggttgacccggtcctcagcctggtagcagaggccaggccagtgccacaaggtcaggctccactgggccct

SEQ ID NO: 249232 - DNA, 122 bp, Homo sapiens
gaggctgggagggttcaggcatgccgcagccacagaccatgagcttgggggtcaggcgggcgggggccaagggcagggccacgtcccagccctccccacccaggtccgggcgcctgcccgcc

SEQ ID NO: 249233 - DNA, 122 bp, Homo sapiens
cgttgtccgcgcggtgctggggcctcccgggacccgggagccgcggcggattaggccgcccgccccaacctgggctttgatcttatctgagacttgtgagtccaaaagggcttagcaaccgc

SEQ ID NO: 249234 - DNA, 122 bp, Homo sapiens
agggagtgtggacgcctggggggttatatagggggctggggcgggcgggcggggggcaggcggcaggggagggcggcctgacacatcctgactcaccctccctgcctgccttttccattcag

SEQ ID NO: 249235 - DNA, 122 bp, Homo sapiens
catccactcagttggagacccggggtaccatccagtgcagcagcccctgggtgatgcgtccgttcccgtgctgggtgcctctgctctcctcgccagctggagggtgtgagcagaggcagccc

SEQ ID NO: 249236 - DNA, 122 bp, Homo sapiens
gagagatcgaagggctagtgggcgtgggggccgcagccgaggcccgggtggaggggtccccgccgtccctcggccccctcccccgccgcccgccccggcccggcccggccccgccccgcccc

SEQ ID NO: 249237 - DNA, 122 bp, Homo sapiens
tgcacaccaccttgctgaactggttactgcacgagcagacggaggggcagttctggggcccggctgaggcggcagcagcgatggctgcacacagaatccacacttgcgccgtgaggtagacg

SEQ ID NO: 249238 - DNA, 122 bp, Homo sapiens
tcccggaccaggcttcctgacgcacgtgttctgcgcgctctcgtgggaacccagcgtttccgactcccagatcccattctgatggcgccgggtatccctctgaccctcgagtaaaacctcca

SEQ ID NO: 249239 - DNA, 122 bp, Homo sapiens
atttctggggatgtctgtgaagcccatagctgggcagcccagaccgccccacacaggaggcgctgggctcaccagctaagggtgggagctccacctggtcagatcttgctccaggtcacttt

SEQ ID NO: 249240 - DNA, 122 bp, Homo sapiens
gttgtagattactccccagttacccctatttgcaaaatgagtaagattacccttggtttgcgttatgttcagttgaggaaggcagagatactgcaggaggtagaagcataaagcaagggctc

SEQ ID NO: 249241 - DNA, 122 bp, Homo sapiens
ccttctgggagcggggtggcaggtgtccgtaacttcttgttgtgaggaccagaggagcagcgcccacacagcgctcagtgaggccggcgctgcgcgcctttccccgggtggccgtgatcgga

SEQ ID NO: 249242 - DNA, 122 bp, Homo sapiens
gattatggttgggccaaggggacatgagcaaagggacttgtatggctggcaggtggagcacgaaaggacggggtgcatctccccctcctcaggccaggctggaacagatggagactgcacac

SEQ ID NO: 249243 - DNA, 122 bp, Homo sapiens
aagatccagattctctcagactatgagatccagattctctcagactatgagattcatgtccgtagaaagcaatcttcattagtatataatcagtgggtattcattacaattcaataattctt

SEQ ID NO: 249244 - DNA, 122 bp, Homo sapiens
ggaatcatcttgtcctgggatcctcaggaggaaggcatgtttagtttgaaaaagtatattcggtattattactttaacaagtggggaaattgaggccccaaggagaatgagacttgaccagg

SEQ ID NO: 249245 - DNA, 122 bp, Homo sapiens
aagaaagaaggcagccgcccgctgcccacccgcctgccggcacagacacagccaggacaacggaagccaggaacagaaaggagcgaccctggagccctcaccacagagcacggcgtggggga

SEQ ID NO: 249246 - DNA, 122 bp, Homo sapiens
agctttaagtcaaagaaagatgacctggacttaaagtgccttatggtatggttggaagcacggccccagattctctttgtgtaagtgtctgtttattaattcattcaatgtgcaaatatttg

SEQ ID NO: 249247 - DNA, 122 bp, Homo sapiens
ctgtctctccaccctgtccaccaatcagcacctggaggtgggctgggagctgcctgtgaccgcttcagcatcttttgggagtggtgacagagccacagagggctgtgagcttgcccggcccc

SEQ ID NO: 249248 - DNA, 122 bp, Homo sapiens
ggcttggtggacccagcaagcagcctgatggagaaggtggcaccagacgcagacccctaccgtccaggaccgcaagccctcgccggctctgcgtgcttttaggttttgtctccacctctgca

SEQ ID NO: 249249 - DNA, 122 bp, Homo sapiens
cgcggcctcgcgcattcctgcgctcgccacagccggcgggaggcggggaagggagcagcccgggtggcttggagaacactgaacctttaattgggctataaatcagacaggggagtgcggtg

SEQ ID NO: 249250 - DNA, 122 bp, Homo sapiens
ctgtgcggatccccgggcgttctactgcgacgggcccctgcctgggccccgggactacgccgagcgccgcagtctgcccttcaccaccccgccgggccccacccagttcttctatacagagg

SEQ ID NO: 249251 - DNA, 122 bp, Homo sapiens
gacggtaactaggccggcggcggcggtggggctgctcagggctctctggggtccgctctccgctcccgctaccgatcgaactgaatgcttaaagtttttatgtcctaccggttatgacaact

SEQ ID NO: 249252 - DNA, 122 bp, Homo sapiens
agaaacataactactgttccaggtaacgtctgtatcatacagttagtgttgccagtgaaacgttcccagatacaaagaattgtgcttttaattccatttcacaatctgttttgttttttttt

SEQ ID NO: 249253 - DNA, 122 bp, Homo sapiens
gaatgagaaagcctagggtggagttgctggggcctcagaaccccactacccacgcaggcacgcagctggcaatggccccagagccggtctgaactgactccgaccagcggctgtgacctcaa

SEQ ID NO: 249254 - DNA, 122 bp, Homo sapiens
ggggccagggagcccttctccctgtccccccggcaccacagcgctgtagaagtgaaatcccggctccaaggtcaccctctcccgagcctggagctggaaagccacggggactccggggactc

SEQ ID NO: 249255 - DNA, 122 bp, Homo sapiens
ggcacttggagaatcgagcagcgggatccaggctgagccgcggaaggggtgggtggggagcgagggaagcggagcttcagtcaagtgagcctgactcccggctggcactctctccactcacg

SEQ ID NO: 249256 - DNA, 122 bp, Homo sapiens
ctggacaggacagttcttttcactaaccctggatctgataacaaccaacatatatcaagccgtattttatctcactgaaccttcacaacaaccttttaagataagtattgttttaacttcat

SEQ ID NO: 249257 - DNA, 122 bp, Homo sapiens
attcccccagttactcaaaagatccagcctctcctcaggtgtagcccgctctagaaaggccgcctcgggagtaccacccactcctgacggggcggggagttctctccgaccccacccgttcc

SEQ ID NO: 249258 - DNA, 122 bp, Homo sapiens
gctcaggcccagcttgcgcaagttcagcagccggaaaaaaggctgtgggcagggaggacacggactctgtggcagagaccactgcagagcagagaagagctcctggacacgtgagtgtcaca

SEQ ID NO: 249259 - DNA, 122 bp, Homo sapiens
tgcattctctccttggtcttaggtgttctttcagccaggaccagggccttcctgctccagcgaagctcatccacctgtgggtcaagcaactccatctgtcctcaggacgctttttgaacact

SEQ ID NO: 249260 - DNA, 122 bp, Homo sapiens
cttagttctgaatgtgtccacacctcattgacttctatgagatgcccctgtcacgttcctcgattccttctagtccttaatagagtctttccttttcttgaaagaaatttgcccagttgaca

SEQ ID NO: 249261 - DNA, 122 bp, Homo sapiens
ggccagctggagttccgggtgggcgtgggcttggagggccctgcattccgagcagcaggccggccctgctggccccgggcaaggagggacttagcacccgggccagcggctgtggagggtgt

SEQ ID NO: 249262 - DNA, 122 bp, Homo sapiens
atcgtcgatctacctggggaggcacctacaaagccagcagactgacacccgtgtcctagccgtcggcggcctgcgaagcgatagtcaaaggaaccaggacccaggaccccggcgctctgctt

SEQ ID NO: 249263 - DNA, 122 bp, Homo sapiens
attgctgttacggcgaattccgattacgccgctgtgtttgatttctctcttggggccgggcgtcctgcttcctgccttggagtttccagagggggccaggagattgtctggaaagcctcagc

SEQ ID NO: 249264 - DNA, 122 bp, Homo sapiens
gtggctcccgtgctcctgcgtggaccgcatgccctcagttctggcttctcctggccgcctcgagtcccacagccgagagggaagactcccgagagagctccacccagaggcgctactgaggg

SEQ ID NO: 249265 - DNA, 122 bp, Homo sapiens
aaaaaaaaaaaaaaaacagcactagcgcgaagctgaaaggtcagcgcgttttcgcgcatgcgtcgggggggagggggggggcaaaagaaatgggaagcctcgagggtcaaactaggcgaaag

SEQ ID NO: 249266 - DNA, 122 bp, Homo sapiens
tggctaggaccagaaggcgctctggtaacgatgcagagaaccgtgcagccgcctcctgggcggagccaccccacccagcccccactacaccacaaggtgctctgaacggctcagaggaagag

SEQ ID NO: 249267 - DNA, 122 bp, Homo sapiens
ttcgtctaggaaatcaaagttaacaacgcagtccgaccctccacgtcaagtttgtggaaacggggagatggcaatttgtccaagaaaatcaaagccccggtctttctaatggccgggggtgg

SEQ ID NO: 249268 - DNA, 122 bp, Homo sapiens
acccttgagaggggcaagaggggtggtcaagccgccgccgccgcgacggcccccgcggtgcgggttgcgccagcctcctcggagctcgacgcagaaacttgttgcaacaaacaggcgaccgc

SEQ ID NO: 249269 - DNA, 122 bp, Homo sapiens
cggtccgggttcgcttgcctcgtcagcgtccgcgtttttcccggccccccccaacccccccggacaggacccccttgagcttgtccctcagctgccaccatgagcggtaaggatgagtccac

SEQ ID NO: 249270 - DNA, 122 bp, Homo sapiens
ccgccgcgcttcccggactctaattggtcttcaagtagctcatctcctcccacgtgatcacgcagcatctcgaagcttgcccttccgattggccctcttggaggccctcttggaggcccgga

SEQ ID NO: 249271 - DNA, 122 bp, Homo sapiens
tggggttcggggttgggggacagccagggatcgcgtctgatatgctgttggggtcgtgaccgtctgggggccgaggcaggcactggccagacccagccagggatcctcgtattcgtcgagcc

SEQ ID NO: 249272 - DNA, 122 bp, Homo sapiens
gcacctcccggcggtggagaagctgctgtccgggaagcggctctcctcaggctttgggggcggcggcggcggtggctctgggggcggcggcggcggcagcggcggcggcggcggcggcctcg

SEQ ID NO: 249273 - DNA, 122 bp, Homo sapiens
ttttgagaatgttcacccttcaaaaaataaaacaaaacacaaacaaagcacatcagggatcggccaggttgaagctgatgcctctcaatgcatgtcctttactccatgatcctgatgagtgg

SEQ ID NO: 249274 - DNA, 122 bp, Homo sapiens
tccccacgaggttggccttaaatgaagtgcgacaccaatccttctccaggaaagtcaaaacggccccggaggaatcgcttggagaaatcgcttgccgtttgatggaatgactcccgaaaagg

SEQ ID NO: 249275 - DNA, 122 bp, Homo sapiens
cctaagatatgaaggtgaatgtatttgtctcatgggatcgttaagaggcaaatgagttaacgtaggtaaaagtcctcagcatcttaattggcatcgcacaggtgggacattacaaaggtcag

SEQ ID NO: 249276 - DNA, 122 bp, Homo sapiens
gggaaggaaggccttatacgtcacaacgcaccatcaggacatggcggatgaagtcgggggcgggggggggtgacatctaatgaggaaggcagggtgctctaattggagaaagggagatttgg

SEQ ID NO: 249277 - DNA, 122 bp, Homo sapiens
gccctgtggtcctgccttggtccctgcctctccctgtgggcagcttaggcgccatttgcccgggagccccctgtgtgagtgcaaggctattggatggcttctcgccctctccccacccggag

SEQ ID NO: 249278 - DNA, 122 bp, Homo sapiens
acactctctgagcctcagtttcctcagctgtcaacctctcagggcttgttctagtggctccgaaagccagtgggagcgagcgcgctttgcaaagccttgggcgccgggccttggcgcgcctt

SEQ ID NO: 249279 - DNA, 122 bp, Homo sapiens
actcatcacataataggattctctaacctgggcctctgggtactcatctgtccaaaacagcggtcaaacgacaaggacgatgaagacttcgtgggccctgctgaggtccttgggagcagggc

SEQ ID NO: 249280 - DNA, 122 bp, Homo sapiens
ttgccaggtgagaaaagtaccttaccccaaacctattcttggccaggtaattccaccccccgccccagggctagaggattacgcaatatggtggaagaaggtgcctcactcatcatgcagtc

SEQ ID NO: 249281 - DNA, 122 bp, Homo sapiens
gtttccatggagtagggttactgtggggggcacagaatgctgtgaagtgggcctggacaccggaccccactcagtccccatggaaggacagcttgagctggtgaaactgtggaatgagaact

SEQ ID NO: 249282 - DNA, 122 bp, Homo sapiens
tgtccctccacagtccccgggcaccctgccaccaaggaagcgcatgagaaagaacacacgcgcacacagaagccaccacggcagacactggacacattcttcatagctgcttgtatttatag

SEQ ID NO: 249283 - DNA, 122 bp, Homo sapiens
tgcagctggacgctctgcacttctcgactttcgaggacagcgccctgacagcgatgatggcgcaaaagaatttgtctccttctctccccgggagcatcttgcagccagtgcaggaggaaaac

SEQ ID NO: 249284 - DNA, 122 bp, Homo sapiens
tagcaagacttcgtttctacaaataatttttaaaaattagctgggtgtactgacaggcggcggtggtcccaggtacttgggagactgaggcacaaggactgcttgagcccagaaggtcaagg

SEQ ID NO: 249285 - DNA, 122 bp, Homo sapiens
gccaggctctgctgacactgggcgagcagctcccggcgctggggctccatggtggcgggccgcgccgccccgccccgccggacgcctcccgggccccccgaggccggcgggcgggcaggcga

SEQ ID NO: 249286 - DNA, 122 bp, Homo sapiens
cgcggcgctccggaggcgcccggggacgctcacctaagctgggagaggcggatacccgcccggcctagccccgctacctcccaagagaccaacacgacaagcgcgcgcccaccgcattgcca

SEQ ID NO: 249287 - DNA, 122 bp, Homo sapiens
tgtcaccaggcacagtgcctggcatacagcgagacctccataaatgttagttcttctccccgccttgaatgagtcatatctggttggagagaaaaggccacttaaataaaataggaccagat

SEQ ID NO: 249288 - DNA, 122 bp, Homo sapiens
gatactgccacctggggaccccaggccgctgacatggggacgcgctagagctttcgaacacgtctctgcatctggacatgccctcggtgcacgtgtattgctttaagttcagagacgtcaaa

SEQ ID NO: 249289 - DNA, 122 bp, Homo sapiens
gaagagagtagataaggggaagcgtattctaagcagagggcatcacccacttcgcaggctcgcagagagagagagtgggcattcaagggacagatgaggctcagttggactccacagcaggt

SEQ ID NO: 249290 - DNA, 122 bp, Homo sapiens
tgttgtcacgtacgtggtgtgaaataaagcccaagcactgggtgcccgtttcctgtgtttcgaattataccaattcaaaacagaactatttaaaaatattggccaggcacggtggctcacac

SEQ ID NO: 249291 - DNA, 122 bp, Homo sapiens
gtgtgcagtcctgttttggggaccgggcaggaagcacaggaagagtacggtgccccttcccgcagtccacatcacagccctccctgaggccggcggggaccgcggggtgccaggcgcgggcc

SEQ ID NO: 249292 - DNA, 122 bp, Homo sapiens
atcaccatcctccacctctacatcttgtcctactggaaggccttcaggggcaatgtcacacgtggagctgtcatctcctctgataacaatgccttcttctggaatacctcctaaaggaccta

SEQ ID NO: 249293 - DNA, 122 bp, Homo sapiens
tgtgctaaagtggcaaaactggggcccaagtcctgagtctgccaccgtccagcaatataacgttgggctagtcaatttgtgtctttttcttttttttgagactgggtctcactctgtcaccg

SEQ ID NO: 249294 - DNA, 122 bp, Homo sapiens
ctgcgcctcggccgccggccgcgaccctcaccgccgcgaacccggacgcatggtccggctcgcgctcatccccagccgctccgcccgactcctggatacctcggccccggcagcaggcggcc

SEQ ID NO: 249295 - DNA, 122 bp, Homo sapiens
accttcactgcttctgcccacacttctctgggcttggctgaagtggccacctctggcaaacgctgggaacagagcccagcgcccccattcgccgggctgcagaaggagggagcctgctacca

SEQ ID NO: 249296 - DNA, 122 bp, Homo sapiens
tggcagggacaatgagcccagcaggctgtcacactgatatctggccaacagcctgctccgcgtctccctgctctgggtctggctgagtcacgtggctcacatgactcagagttgttcaaggt

SEQ ID NO: 249297 - DNA, 122 bp, Homo sapiens
ggagtcgagggtcactcagtaatcactcacctgggttttcccaaattgtcctgatacgaacgcttgtcaaaaccgtttctgcccaggcactccctttcctagcccctgcccccaaattaagt

SEQ ID NO: 249298 - DNA, 122 bp, Homo sapiens
acaaacggcgcttcagggacgttcacaaggccctgcacaagtcacctgggaactgggggacggctgcgtggtcccgacctcttctgtccgctgtaagggaactaagatgcctcctcccctct

SEQ ID NO: 249299 - DNA, 122 bp, Homo sapiens
gcaccaccaactgctctgagatgaggcgtgaggttccctttggaggtaactctggggaaacgagagtggcggccggtgtcacagggccacctgcacatgccctgaggatcaccgcacctgcc

SEQ ID NO: 249300 - DNA, 122 bp, Homo sapiens
tatgtggcgtctttaattaggaagaataacccacctgggatttttttatgactgggtatccgtttgaactccactgggcagggatcatctttcaaagcctttaacactctctccagaatagc

SEQ ID NO: 249301 - DNA, 122 bp, Homo sapiens
gctcaataaatgttagctcttgtgattggtcaatgtgagctgtcactgtgttgtgaggcacgggctgttctacatgaatgcatttcccagaagagtcgtgtcttgagcctctctcacatgct

SEQ ID NO: 249302 - DNA, 122 bp, Homo sapiens
cgcgccagggggcggggccggctgtcgctcgacctttcacccgcacgtctctgacgccgccggaagccggcgccgagtctgtcaccgggcatccctctgttgccttgactacggcgggcgct

SEQ ID NO: 249303 - DNA, 122 bp, Homo sapiens
cagcaatggaagcttcaagggttggggctgaaccaagggtgggtgggatcgcgtctgatgcgcccacccttcacggggaccgcgtgcccctcactgggagggcagcccgcctggagccctac

SEQ ID NO: 249304 - DNA, 122 bp, Homo sapiens
gcgcggggactggagctggaagggaggagaaaggagggggagggaagagggggccggccccggtgtgagtgcagatttaggggagacctctaggctttctcgccttaagcgaggtccgcgtg

SEQ ID NO: 249305 - DNA, 122 bp, Homo sapiens
gcagcagcagctacaattacggctctgtttttgcgagcgcatgagggacagtgtccctgccgctcttaaatgacaggcgtctattaaagatagcttttgtgtagtgtttctccaaggcgagg

SEQ ID NO: 249306 - DNA, 122 bp, Homo sapiens
aggccagagagtaagtattttagcatttgctggaaacatatgaccattgctaccttttgccgtccccagtgcttctcattgcctcctttgtcctcttctccctcccactcctcttctttttc

SEQ ID NO: 249307 - DNA, 122 bp, Homo sapiens
aggacatcagcaaataattaatgatcttcataataaaatccttctagttgtttttagcttcgcagagtctttttacatacttcatttgatttctagatttgacctgtagtagttgagggggg

SEQ ID NO: 249308 - DNA, 122 bp, Homo sapiens
ttgaggggacagcggcatgggacagagggcagctaagaaggcttggagggccctctgaaccgcagttaggtctgggggcttggtactcactgaggtgggaagctgggctgctctgggcgcta

SEQ ID NO: 249309 - DNA, 122 bp, Homo sapiens
ctgcacctcggagaaccaggaaaacgaggagaatgagcagacggaggaggggcggccaagcgctgttgaaggtgagccaggccaggaaggcaggagcccatctcccatctcgcccgcgtctc

SEQ ID NO: 249310 - DNA, 122 bp, Homo sapiens
aggcggggtcagctcgccgggccgcgggtctcgcggacaccctgcagcccttcccgacagcggcgaccgggaaagcaagaccgtctttttcgtccagcccaaattgcgaaaacggccacagt

SEQ ID NO: 249311 - DNA, 122 bp, Homo sapiens
caagggttttaaaaggctgacctagggcctgaatcacatggtttgacttttgctaagccccggggatggcgcgtgtcaggcccagagtgctgatgccagcgtggatccgagccaggcctcag

SEQ ID NO: 249312 - DNA, 122 bp, Homo sapiens
gccctggtgcagagttccagcacgtcctcctccatcgtggtcagcatggtggctgctaagcgtgggtgcacactccctccccgggtggtggggggggcagggtgggccgcaggctgactcag

SEQ ID NO: 249313 - DNA, 122 bp, Homo sapiens
aacaaatactgtcaatattagtcaacgagagggtggggctgcttgagttattgtgctgatcggatggaagcccttcccaggtcagatctgggccaggatgtaagaaaggaaggatgtgattg

SEQ ID NO: 249314 - DNA, 122 bp, Homo sapiens
gtattgagctgagctggcccttccctgggagaagaggtttcttagagaaatgctcatcctcgaattattccaatgaggaggaacctaagcccagaagggctctacctcccagagttacaggc

SEQ ID NO: 249315 - DNA, 122 bp, Homo sapiens
ccgctttccagctatcaaaggagagcgatacagtgattccccccaacaacccacaactgacgtcatcgcatgctatttttcctttttttttttcctccgggaagaagaaggagactgaactc

SEQ ID NO: 249316 - DNA, 122 bp, Homo sapiens
gaacaaagcaccctccccactgggctcctggttgcagagctccaagtcctcacacagatacgcctgtttgagaagcagcgggcaagaaagacgcaagcccagaggtaaggtggtcagactcg

SEQ ID NO: 249317 - DNA, 122 bp, Homo sapiens
ctgcctcactccctcccacaccccaggagcccctctgtccaggtgcaactgcctgggcctcgtggcagttggctttgcccttgcacctgcctctggctggagccttctcagagggctcgagg

SEQ ID NO: 249318 - DNA, 122 bp, Homo sapiens
acccaggagggcccactctgatgcttgcattggagacaaagacagaacccagctctgagccgcctccctttccacatggggagagcagagatgaggcccaatggatttcaatggccccggct

SEQ ID NO: 249319 - DNA, 122 bp, Homo sapiens
cgtggctgtgctggagtctctgagtgcactgtggctcagagggctgccggattcatgaatcgttcattgctcatttaaactcctttaaatttaatttggctgaagttgttctttcatcaagg

SEQ ID NO: 249320 - DNA, 122 bp, Homo sapiens
agtgagaaatcgcagaactgccatggtaatggagagtgcagtgacagagatggggagagacggctgtttctctgttatgaaacatgttttcataggtaattctgatgtacagtaggtattaa

SEQ ID NO: 249321 - DNA, 122 bp, Homo sapiens
gcgagactccctagagggatggggcggggtagggctcccgcgcgcagtccgccaacggcgcgcagtccaacgttcgccgaggccacgccccggctcgtgtcagctcctgagtaggcggaaag

SEQ ID NO: 249322 - DNA, 122 bp, Homo sapiens
actttgtgcctcgcctgtcctgttcatcctcgtcctgggccggggaatgcttctgggggccgaccccgggatgctggctaattgctgccggcgggttccgtcgccggtgtgaccctggacgg

SEQ ID NO: 249323 - DNA, 122 bp, Homo sapiens
gggttcaagcgattcttctgtctcaccctcccaaggaactgcaattacaggcgcatgctacgacacctggctaatttttgtttgttagtttgtttttgggacagagcctcagtctgtcgccc

SEQ ID NO: 249324 - DNA, 122 bp, Homo sapiens
gggaggctggccgggggggacaggcaattgcatgcttgggtgctggggacggtggctggccgggccaggggactgagaggtcacagggagccccaggcggaaggcagcccgctcctctgagt

SEQ ID NO: 249325 - DNA, 122 bp, Homo sapiens
gcccgccccctgtgtatgcagatgatggatggatggtaggctaccaactgagatggagaacgtagaagaaaaagcagatttgggaggtgtggtggctcttgtcttgtctatctgggaccttg

SEQ ID NO: 249326 - DNA, 122 bp, Homo sapiens
ttactttcttcaagagtttgtgcaatcattgtgtttagccgttttcctgccatttccaaacgcggggtggtgtccttttcgagtaggagcaaggtttgaagagttggaggaaactcccgcct

SEQ ID NO: 249327 - DNA, 122 bp, Homo sapiens
acgagtcctgggaggggtcaggcgcggagagcagataatagcagccacggtgcttcttcccgactgtttgagatccgggccccgaaggcgggcccagaggcgagcgcttcgctaacgtcatt

SEQ ID NO: 249328 - DNA, 122 bp, Homo sapiens
tgttcttgagttgcttcagctccacgggcagcccgttgctggtcagccggttgttgctgacgttgaggtagagcaggctggtcatctggccaatggactcaggcagcttgtctatgtagttg

SEQ ID NO: 249329 - DNA, 122 bp, Homo sapiens
gccgccaacttgctcaagttggagcagagttcgccaggcgattgaagggggattcggcagcgttggcaggaataggggggcttcgaaaccgcgtccctagggtgagggtcttcagacctggg

SEQ ID NO: 249330 - DNA, 122 bp, Homo sapiens
tcgaaagagcccgtgaggtaggcactgtgatgacctgcgcttgttacgagggagacaccacggccggcccagagggcttcaggcacctcctggtcctacagcttgaaagacaaggcgtgggg

SEQ ID NO: 249331 - DNA, 122 bp, Homo sapiens
cccaccagtactgctgacacccaaggctgtgggaactcctgggggaggtggaggtggagccgtaccaggtatttcagccatgtcccgcggagatctgagccagagagccaaggatttgagta

SEQ ID NO: 249332 - DNA, 122 bp, Homo sapiens
acaaacattagcattacgagttgaatcatgtccccacaagacatgctggagccctagactcgggacctcagagtgtgaccttctgtggacacagggtcttttcagaggtcacgactgtggga

SEQ ID NO: 249333 - DNA, 122 bp, Homo sapiens
gatagtagaatttactggggaggaaaaacacaaagtgaaaccaccaccaccatttaccagcgtcactcctaagcctggactgtggctctgtgctcttcataatttgaaatcagagcttctga

SEQ ID NO: 249334 - DNA, 122 bp, Homo sapiens
cgggcagccgcgggaagctggtgatgctcatgtagtccactggcgagtaggcgcccagggcgctctcctggctggcctcgttctccgccgccatcctcgcccgcgccccccagcagcgcagc

SEQ ID NO: 249335 - DNA, 122 bp, Homo sapiens
agggtggaagggaggcgtgttccccgggaaaatgggacacggagccctgcaggggccgggcgccggaccttagggagcgggcagggctgggcggggaaggtcgcttcccggccccagggctc

SEQ ID NO: 249336 - DNA, 122 bp, Homo sapiens
agttcctggctagtgtgggcagaacttctgtgattaattgattgattggagacagagtttcgctcttgttgcccaggctgggtgcagtctccagatctcagctcaccgcaacctgctcagac

SEQ ID NO: 249337 - DNA, 122 bp, Homo sapiens
ctgggtcccgcacaaaggccttcagcgccttcaccaccagcgccttggccagatgctggccggccaggtgctgagccaggtcacactccagacctagggccacaggaggatggtgaggacac

SEQ ID NO: 249338 - DNA, 122 bp, Homo sapiens
cctgctcctcctcgccagctgcgccgccagctcccattgttcaccccgcccgcctggcgacgtccgggtgctgctccctgggcctcccaggcgcacctaccttctgctgccggcgagccatg

SEQ ID NO: 249339 - DNA, 122 bp, Homo sapiens
gagtgcggagttcggcctggctgggggcggcaggacatccctcctgtccccgggcgcccccgctacagcacaccctccatgaagctggtgtccaggtgctggatgagcacccgcaggaagga

SEQ ID NO: 249340 - DNA, 122 bp, Homo sapiens
ggcgcgctcggccgacagcagcttcacgtaggtttctttcccgaacattcctgctttgaacgcctcctccacggtcagcttccggttctccacggggtcgatgatgaagccggtagctgcct

SEQ ID NO: 249341 - DNA, 122 bp, Homo sapiens
tctgcacccgtgtgcctggggcctgtcactctccagccccaaggccttcagcgcattccccgcagagctccaggttacagtttcctcagccgcacagcaagcatgtacctcacatttttaac

SEQ ID NO: 249342 - DNA, 122 bp, Homo sapiens
caccccggcctataaatcaccagggcgcagcctcagtgcctgggggtcggcagcagccagcgtcaggcggctcccgcacgcttcttcctaggcggcaggccgtggctgccacgtgactcccg

SEQ ID NO: 249343 - DNA, 122 bp, Homo sapiens
agtccttccccccacctcccacattcctgatgagctctgtgactcagctgcttctcgggacgtctgagcagctgtttttttctagggatagaagcacagtcaggagatgtaacctgaatgct

SEQ ID NO: 249344 - DNA, 122 bp, Homo sapiens
ggtgggaccaaagcctgtgagagacttcccagctgtctggcttgtggactgagcaatctgcggcccggtctcgaggggaaaataggtctgtggtccgcaaggccccagtggagcccttgggt

SEQ ID NO: 249345 - DNA, 122 bp, Homo sapiens
gaatcaaatttaattacagactttggttacataaaacaactactaataaccccttgtgctcggaagaggaggggctagagaggactaggctcaggaatcctggcaagcctgcgggccacaag

SEQ ID NO: 249346 - DNA, 122 bp, Homo sapiens
cgctggctttcgtcggcgtccgggtgggcggcggggaaaccgcgagaccttgaggatcagcgcggagcggagccgagcgggcgtccctgtcccgtgtggacggtctgcgcctccagggtttt

SEQ ID NO: 249347 - DNA, 122 bp, Homo sapiens
gcatagagacatttactccttagagtttgtcagctgaaaaaggtagactttaattgaaggcgatagaagcaggacagttaggaaacggaaaagcccggctgccaggggttacggacacaggc

SEQ ID NO: 249348 - DNA, 122 bp, Homo sapiens
tcatcctgccaggggcaccgaggggggcccgcaggggtggggctgggtggctctgcatcccggaggcagctcatatagcggggcgtgcagaagccacctgcccgagtgccacggcgccgcga

SEQ ID NO: 249349 - DNA, 122 bp, Homo sapiens
gcagagccttatttacaggccgcccccgagagcaaaggataatggtgcattatctgttgacgtgaccctggagagctctaactgaactgcacaaatgggagaatcctcccctaccggcccct

SEQ ID NO: 249350 - DNA, 122 bp, Homo sapiens
gtcaggcgggggctgggggtgagcccttggggtcccctgggacatgttctggtcccagggcgagggtccggggttccgcgattgacggagaccctgggtgtgtggggtgtcactcctcaggc

SEQ ID NO: 249351 - DNA, 122 bp, Homo sapiens
tctccccttcttcctttgtaatagaattctaggcaaactgtccagctgaaaagtctatttcgcagcatcctttgcccctaggagtgacctgttattcaattttggccaattagatatagcaa

SEQ ID NO: 249352 - DNA, 122 bp, Homo sapiens
tctttaacgagtgcaagttactaagagataccatttaaaccacttcagaataggttgcaacgtgagaaactgcatcctcacttctttgaaaaatatatgccttttagaaagctgaacattag

SEQ ID NO: 249353 - DNA, 122 bp, Homo sapiens
tctctctctttttctctctgtggttggttgaatctgtggatgtggaacccgtggatatggcgactgactgtacagtcaaatatcatatggagaaagaatagtcaccctgcccttgaagaata

SEQ ID NO: 249354 - DNA, 122 bp, Homo sapiens
atgggcacgcggttcactggcgtccctggtggggagcgggctgccgtcaggacactgagacgaagaccctgtctgcagcatccccagggactgatacaggacgggagccccggggagggcgg

SEQ ID NO: 249355 - DNA, 122 bp, Homo sapiens
tcatcctcctgacattcattcacttagtatttttgcgtactttcggtgtgcagtgaaccccgttctaggtacttgggtgacagccaagtactacccaaaatcacaggatccctagtaacaga

SEQ ID NO: 249356 - DNA, 122 bp, Homo sapiens
ccactaatctgattggttctgacgattattcaaacccagatagtccccgcccccttgccacggaggctaacgattggtcagtgtcttaccagacccgccctccacgccccagcctagcaggt

SEQ ID NO: 249357 - DNA, 122 bp, Homo sapiens
atgtttttgaaaaaataaattaaaccgacagtttcatttgtaggattgactttaataacacgcctctactgaacaaatggcgattaactggggaaaacggaattatggtaaccgaggtaacg

SEQ ID NO: 249358 - DNA, 122 bp, Homo sapiens
gggtctgccttgctttacatctgcgcagggctcggggcccgaagtgctgggtgcgacagtcgttttaggcacattttagagtttgcggagggacgaggaatcccaccacctgcggcctcgca

SEQ ID NO: 249359 - DNA, 122 bp, Homo sapiens
caccatattctgcccatcccacacagcaaggggccttctgctgtgacagacatgcaacaccgtcggctctgtgcagacctcccacagacagctgtcctgtggctgccccatgcctgggtgca

SEQ ID NO: 249360 - DNA, 122 bp, Homo sapiens
gccctctgcctgagctggcagcgctgaccgcgtgtactcacgtgcagtgggactgtgcctcgcccgaccccgcagcgctcttctccgttgccgcgcccgcgctgcccaacgcgctgcagctg

SEQ ID NO: 249361 - DNA, 122 bp, Homo sapiens
tacaaaatgaataaattctggagatctaatgtacagcatggtgactatagttaataattacgttttgtatacttgaaatttgctacgagagtagatctaaaatgttctcaccacacacacac

SEQ ID NO: 249362 - DNA, 122 bp, Homo sapiens
cacaccccatgtgcacaacgtcccaatatcaccctttccacccgggagcactgacacaggcgtccatcacctttgatgaatttaaagagtgcagacacagatactttttctgggtcagactg

SEQ ID NO: 249363 - DNA, 122 bp, Homo sapiens
tgagaaagccagcctgagccttgacatgggagaaacctccgccatacatctccgaagaaacggccgcgtgtctcaggggagcgcaaacacccgtacccaggaaacaggacagcttctgccac

SEQ ID NO: 249364 - DNA, 122 bp, Homo sapiens
tgaccactcccgccatccgtaacactcttccccacctcccgggggagcgggagctgacctcgcaagatccaggaacgaatcgagcacctccttgctgggggcattttcggcactgcccgcgg

SEQ ID NO: 249365 - DNA, 122 bp, Homo sapiens
tctccatttatctatcttttttgtttgtttttaatttggttgattgatatgcacccaggccgtcttatttttacttgttaaatgtctgtctaggaagaactgtgattggaaaggaattaatt

SEQ ID NO: 249366 - DNA, 122 bp, Homo sapiens
atgcccacggtcccctgttaggcactgggggcctcctgccccgactctgccctcccgggccgctgtggccgtggctcctgacccctcaggtccctggggcaaagtgcagatccctgggtctc

SEQ ID NO: 249367 - DNA, 122 bp, Homo sapiens
cggatggcacaaaggcgaggaggcccggcgcgtcgcacagcttgctgggagaaaaaggggcggtaacaaaagtttctataacaacgcaattcgaggcggtgattgggtgttctttcataggg

SEQ ID NO: 249368 - DNA, 122 bp, Homo sapiens
ggggtcagggcgaagtcccagggccccaggcgtggctctcagggtctcaggccccgaaggcggtgtatggattggggatgccccgccttagggattcgccacctccgcagtttctcttcttc

SEQ ID NO: 249369 - DNA, 122 bp, Homo sapiens
tgggagcccttttagtacacagccagccactcagcaagggcttaataaatattattaagccggcgaggtggctcacacctgtaatctcagtgcttagggaggccaaggcaagaggactgctt

SEQ ID NO: 249370 - DNA, 122 bp, Homo sapiens
atgagacaggtattgtagaggaaatgcgacaccacctgtcctggaagacaaggccagtcacggtcgcctagcactgattctaggcaatccacccacccatgaggggaaacgtggagaagaag

SEQ ID NO: 249371 - DNA, 122 bp, Homo sapiens
gtaacataagtgagtgaaaggaggccagctttaagaagagtcagtcaatattaccattctcgatttctggtagtgccgtagatacattgcatgtgggaggcaactgacacagcctcactgct

SEQ ID NO: 249372 - DNA, 122 bp, Homo sapiens
cttggatgaaagctacctgtaaaatgccaggtggtgtccaggaagtatcattggttttatcgttgttgctggaaaatgtaactaagatatgtctccgatctaacaatgggtaagaatatcct

SEQ ID NO: 249373 - DNA, 122 bp, Homo sapiens
cctccatgaggatgagctcaaaaagcttctcatggtcctggttgtagaagggcaggcgaccgcacatcatctcgtacatgaccacgcccagcccccaccagtccactgcacggccgtagtca

SEQ ID NO: 249374 - DNA, 122 bp, Homo sapiens
cccaagattgcacacgtcagggagtctggggccatgcatttaaagaaacggaattaaaaacgcactcgggcagttgaaagttaacggacgaggctgatagacaacccaggccagggtctttt

SEQ ID NO: 249375 - DNA, 122 bp, Homo sapiens
gcaagcccccgggtcgttgtctggaggatggagcagcacttcctgctccacaggctgtcccgagaagctgaattactcttaagagtggaaactcacatgcatgtagagctttagacctctcc

SEQ ID NO: 249376 - DNA, 122 bp, Homo sapiens
gtctaccgctggtcttcaaggtgcttaatttcgtgcccgctctacaggaaataacgtgcgcggcggaggagccctgtcctggagaataacgcgtgaagaagacagtggactgggcatttcgt

SEQ ID NO: 249377 - DNA, 122 bp, Homo sapiens
ccaccattatttagagataacttctcgtcggtgcagcagctctgaaaatcagccaatcagcgatagcctcactccggtaactatgcttcttagtaaatcaatgacaaccccacgcttctgaa

SEQ ID NO: 249378 - DNA, 122 bp, Homo sapiens
gcctcagtttccccacctgccagcgggctcggccctgtcctcctcacaggctggtgtggccgtcagggtgggtggggttattgttagtaggcgcagcctcattcccaccacgatctgttccg

SEQ ID NO: 249379 - DNA, 122 bp, Homo sapiens
cggttctgccccagcctttcctgggtgggtctctaggtatagccggcgttaatcttgccacgtgtcagaagtgtgttaagtgaatccattgcgtggtctcacgtaattctcctagtaagtgg

SEQ ID NO: 249380 - DNA, 122 bp, Homo sapiens
agattggatggggtctgggatgtgaacatggtgtcggagcaggctggctgtggatgccatcgttagggctgccttgggcagacagcctctgtggtcttgctggctcagtgctccatgctgtc

SEQ ID NO: 249381 - DNA, 122 bp, Homo sapiens
tcctgcccgcacccatgaagggcagaggattaggccaagcatcacgaatcgtaggttcgccgtgctccgccgcttcgcgctctggacgctcgagaccagcgggaaacaaatgtggttcccga

SEQ ID NO: 249382 - DNA, 122 bp, Homo sapiens
tagtgtgttcctggagctcagatacccctgcacagggccaagccagggaatgttccttcccgcccccacccaccccctacatcatggccaggtacagccatcaaatctgctttggattcctc

SEQ ID NO: 249383 - DNA, 122 bp, Homo sapiens
cgcagggtccaatttccggcccagccttcccttggaggagcaagttccccaatgtgtttgcggctcgggagtccctgggctccgcagctaaggtggccagtgcggagctgacggaggatgaa

SEQ ID NO: 249384 - DNA, 122 bp, Homo sapiens
tgggaggtactcttagctggtaagctgtcatatcctctgatcagtcaggatatattctagcgggattctgggccttcagctcagcccaggaaagctcagaaatgcatcaagcaaatgagcag

SEQ ID NO: 249385 - DNA, 122 bp, Homo sapiens
atgggggcttgagcgggcagctggggccaccccaggcccccagctctaagataagcgaggcgagcacctggttggtagggcactctgctgcattgccctgggtgatgatcacctccttttta

SEQ ID NO: 249386 - DNA, 122 bp, Homo sapiens
ccttctagcgtgaaacctcaaccaaacaaaaagtaaagaacactcggtctggacgaccaccgccgactccgaagcaggaaccctcacaacccgagcctccacgaaattcaaacttgccgcac

SEQ ID NO: 249387 - DNA, 122 bp, Homo sapiens
aaaaaaaaccaaaatcctggcatgtccatatgcttttcaaaagattgaattcactcagtgcgttttaaacatcaagcaaaacagcaaaagatccgttttcatctttcttagagaataggagg

SEQ ID NO: 249388 - DNA, 122 bp, Homo sapiens
agggacgccctggccacgtcctggctccggtcggcttagtttttacgtttcttgaatttgcgcccggcctcccagcccgtggcccctcaggtgcgcgcatctcgttctgggtacgcggtgtc

SEQ ID NO: 249389 - DNA, 122 bp, Homo sapiens
actagcgccagcggatcgcctcacatccgggtatcaggagacactcagctgcttctgctgcggccgccgcctcccccgcggcgcaaacaccaaacttccggcgacgacggcgacgcctcgct

SEQ ID NO: 249390 - DNA, 122 bp, Homo sapiens
agagcaggagattctggccgcgtcctgcctggcctggggtgactgtctccttctcattcccggtgactcactcagatcatgtccacttataatgcaaaggcttatgggtgagcagggcctgt

SEQ ID NO: 249391 - DNA, 122 bp, Homo sapiens
cgtaaaagggtacaacgcagtttctcttccggggttcaggacccaaaaagaacgcacggacgttgcccggcctgagcgcgcaagaccggaagctgctgggtatccgcgccggaaccgcgagg

SEQ ID NO: 249392 - DNA, 122 bp, Homo sapiens
accggggacagcaggcggccaggtgctcagagggcaccaaggtgccacaactccctgcagcgttgacaccgcacgagcggcaccaccagccccctcccgcctcccgtcccaccttcaccctc

SEQ ID NO: 249393 - DNA, 122 bp, Homo sapiens
actcagtgtccccagctgtccacacaggcgacactcgccggcagtcactggggaaggacacggggccacacgtgtagcacaagggcgctcaggagcaatccatgttcacacggaccacctga

SEQ ID NO: 249394 - DNA, 122 bp, Homo sapiens
cctgccctgagggtctgagggtgccactgactcccatcttggtcttgcagatcatccccccgaaggagtggaagccgcggcagacgtatgatgacatcgacgacgtggtgatcccggcgccc

SEQ ID NO: 249395 - DNA, 122 bp, Homo sapiens
tagacggcattctctttgtgtgcggatgtcccgtcgtcctggcatcacgtcaccttgcttcgctactttgggaaccatcagctgcctctgtgggggtcgggggagggctcagctctggaact

SEQ ID NO: 249396 - DNA, 122 bp, Homo sapiens
ctcaggtgatcctcccatcacggcctcctaaagtgctggaattagaggtgtgagccgccacgccccacctgtacttgtgtatctctgttcaaatgttactgaggagcttttacagcgtaacc

SEQ ID NO: 249397 - DNA, 122 bp, Homo sapiens
ggcagcatcggcggcccctggggacacgcgctggctcagtccccacctccgccagggaagcggtctgatgatacccatttcgcagatgggcaaatccacaagccaagtcgtgccgcccagaa

SEQ ID NO: 249398 - DNA, 122 bp, Homo sapiens
aggcagcccaggtcttatctgcacacccggcagagtgagacccagacacgggagaggaagcgagaggcccaggccaagctgaagtccgaggctcagtcgccctccggaaacctacttccacc

SEQ ID NO: 249399 - DNA, 122 bp, Homo sapiens
aggattcctatttcccgtacataatatggatgtttgtttgtttttgtaagttaacgggaccggtggtttaacttgttattgaaacatgctcgaaaaaatcaggtagcttattttgtaattgc

SEQ ID NO: 249400 - DNA, 122 bp, Homo sapiens
tcgggtgtttttctggtaggtcctttggaaggcagagagtccctgggaacccagcacccgcgccggtctcctctgactcctttgcaggggtctgggagtctcagtagggggttgactccagg

SEQ ID NO: 249401 - DNA, 122 bp, Homo sapiens
tacttcattcagacttcctaatttccctttccacgccagtgttaatagttctccttggatcgcaaactcttaatagatattcctaaggccaaaagtatcactgagaagttggagccaaaatc

SEQ ID NO: 249402 - DNA, 122 bp, Homo sapiens
ctgacttgctcttttggctcccaggagcctttaggtaccggccttgcgccaggtttagggcgcggccacacctctagccccgccccaccgcaggcccaacccagaggctgctttcggttacc

SEQ ID NO: 249403 - DNA, 122 bp, Homo sapiens
ggccggcccggctgtgggaggtcaaggatactgcctgggcacgctctgagctctggtccgcgctgggcactgtgcaccgagaatctgcggtaacgtgtgaaaaggaacacaaacttttgtat

SEQ ID NO: 249404 - DNA, 122 bp, Homo sapiens
agtgtgaggttagagggcgtcactctgagcctcaaaacttaattggatcatagcgacgtccgttggacagggtaatcagaggaactacgtttaggaaaggggccgagttcctgttgaaagtg

SEQ ID NO: 249405 - DNA, 122 bp, Homo sapiens
cagccaggacaggctggggatttaggcctcaaggttgtccttgaggcccaggatgtccagcggcagcaggctcccctcccgggccagcctctgccctgcagatgggtgtcccctctcccagc

SEQ ID NO: 249406 - DNA, 122 bp, Homo sapiens
gcagcacgtaggcagagccagtgaggtccccgttagtcccattgaaagctctaaaaccagcgaaccctcagtccagcctcaggtcaggcatccaggacggcctcagccctcatgggtgagcc

SEQ ID NO: 249407 - DNA, 122 bp, Homo sapiens
tgagtaaaaacatgactatcacttttggtctttaatatcttgaattaaagatagcgcactcgagtccccagcctggtgtctggcaggcagcacactgccatttctgctagattgcctcaact

SEQ ID NO: 249408 - DNA, 122 bp, Homo sapiens
caccgccgagcctcgcgccgcgccggctggagccgccgcctccgctgccgccgccgccgccgcccgctctgcaccggctcttcagcgctcggcggctttaacccccccatcctcctccctcc

SEQ ID NO: 249409 - DNA, 122 bp, Homo sapiens
ccttttccgaacccccatgtcacacaacttcctcatcatggaaacttccactgggttcggcgctgaggatgccaaactccatttcacaaggaacatgtcaacagctgggcttggggtttgag

SEQ ID NO: 249410 - DNA, 122 bp, Homo sapiens
atccacgaactgctcttggctctgagcgggtaccctgggtccattttcacctggaacaagcggagtggcctgcaggtactgtccggcgcagagcgcgggaaccagggagcgcaggagggggg

SEQ ID NO: 249411 - DNA, 122 bp, Homo sapiens
tggctagaccacagatgtgtcagagggaccacggcctttctgtaagctcatggtcagaggcggaggggagttgtgaacgttctgatgaaagcagtcaacgtgaaagcgctctggtgatgggc

SEQ ID NO: 249412 - DNA, 122 bp, Homo sapiens
cggcaccacgttgtctcctccttactgtacacaaggctggcagagaaggaaagatggaatcgccctcttgaacatgtctagtccctagtttctgctggcattcacccctgcaagctcccagc

SEQ ID NO: 249413 - DNA, 122 bp, Homo sapiens
aggcgccctgagcaggtgtctgctccttggacgtcccgcgcgggagctcagctgggaagccgggctctgaagaccgatgctctagcgccccctgctggcgcctggccttgattccgctgctt

SEQ ID NO: 249414 - DNA, 122 bp, Homo sapiens
agcacacttcaggattgtcataggattaaacacagggaattctggaaatgtttaacacgccgtatttcgcaaaaagaaaaaagtttcttcaatgactttgccattttgtctctgcatagggt

SEQ ID NO: 249415 - DNA, 122 bp, Homo sapiens
ccagttccagagtgtcagtcctctggccgatctaaaagccctggggctccaagctgcccacggctgtggagcctgggctggagcccacagcggacggcagtgttagtattattataataaat

SEQ ID NO: 249416 - DNA, 122 bp, Homo sapiens
tcccctcctcacccagcacacccacagaaacactattttgtttttctgttgttccttacacgctaagagctatcgtcccgccagaccttaggctcattttactgtccctttgggattgagtt

SEQ ID NO: 249417 - DNA, 122 bp, Homo sapiens
aagtcctacgctgtgcatactccagaatcacacacacactgtgtcacttatcaatcctgccgtccctgatttcagttgatgatttttgtctattactaatgtagattatctgattctaccat

SEQ ID NO: 249418 - DNA, 122 bp, Homo sapiens
agggtggaggcttcatgagtgggattagtgccgtcataacagaggctctcacgagacccccgtccctttcaccgcgtgaggacacagtgggaagacggccatccataagccggaaaacgagc

SEQ ID NO: 249419 - DNA, 122 bp, Homo sapiens
agtaaatggcaaaaccaggatctgaatccaagcagtgtggctccagagcctatgttcttacggactatcttggtttcctctctgtagtcacatggctgagcactctctggatagtatcaagt

SEQ ID NO: 249420 - DNA, 122 bp, Homo sapiens
caagctcgcaccctctgcgcatgcgccgaccccgcccctggccagctgcgctcccgcggacgagtgtgttgtgacgcgtgctcccggccccgccctctttgagaacttgcgcggccaactgg

SEQ ID NO: 249421 - DNA, 122 bp, Homo sapiens
tttgaggaactgccaaaccgtcttccgtagcggctgtgtcattttacattccactagcagcgtatgaaggttccaatttctccacttctcccaacacttactttctgataaaaatttaaaaa

SEQ ID NO: 249422 - DNA, 122 bp, Homo sapiens
gaccgagacatgtacctgagtgagacagatgggagaatacatcatgacttcgccttaaaacgcactttccgggagatgcccaagaaaatcttcgagaagcaagaatttcatctattcatttt

SEQ ID NO: 249423 - DNA, 122 bp, Homo sapiens
ttttttcagttatttagggaccatttgtttcttgaattcttactataaaacagggttctgcgtaaagtcttggcaggggatggtgataaccactatgtaaatgacatcatctctgccctcaa

SEQ ID NO: 249424 - DNA, 122 bp, Homo sapiens
agattaacaaggttccttatgactcattctgtgagtcagacaggggaagaaaaacaagcacgtcaaagtctaactttcggatgtgtaaagacttagcagtctgatctgtgaccaaaactgtt

SEQ ID NO: 249425 - DNA, 122 bp, Homo sapiens
tcatgtcaaccttctgccttaactgggaattcctgtggccagtctgttctaagggtatcccgtgagcccctagggatggagaacagaaggccacttttcctaaacacacacgtggttctgtc

SEQ ID NO: 249426 - DNA, 122 bp, Homo sapiens
gggtgcccgcggcgctcgggaaccggctgctggctgggcggggagtgctcagggagggggcgcggagggctggggccgagggtctgggggctagggccgaggaaacgggaactgacggggtc

SEQ ID NO: 249427 - DNA, 122 bp, Homo sapiens
gtaagacactgtcacaaaaaataataaccaaatcaaatcaaatcttcaggagaacattcacgctcaacctcatcatatgccccgccggcagaactccgacattcctattccctcccctttac

SEQ ID NO: 249428 - DNA, 122 bp, Homo sapiens
agatgtggcaggtcttagattagaacccacagtttgctttagagctgttactcctaataccgaggccagagcttctcaaaccttaccgtcatcacaaatcaccaggggatcttgttatacag

SEQ ID NO: 249429 - DNA, 122 bp, Homo sapiens
agctgcactccctaccttccacctggacattagcctggcattcaaggctctctaaaaaaccgctcacaagtacctcccagacttaccttctacctcctctctaggctgaattcttctctaac

SEQ ID NO: 249430 - DNA, 122 bp, Homo sapiens
gcttccgctccccgtcggtgtcccgcgagaacttctccacgaggccccgccccgcccccgcgagacttcccccggcggaaaaggcccagagcgcaagcgctcctcctcagccgggcccctgc

SEQ ID NO: 249431 - DNA, 122 bp, Homo sapiens
ccctagtaacaaaagcctgagcttcatccctccgagtagcaggctctgcgctggactggtcgggtctaacagggagaatcttgtgtcctaccttggctgggacaggaagtaagagaagcaaa

SEQ ID NO: 249432 - DNA, 122 bp, Homo sapiens
atggcctgcgacagccgccccgtccggaattcggcgccctccccggggcagaggccgcggcgtcctcaggctgtagcgccggcctgcgacccccacgcctggcttgggacccagaggaggag

SEQ ID NO: 249433 - DNA, 122 bp, Homo sapiens
gtccaaaaagacaggtgttaaccggtggagctgggtctaaatccacaattttctcagtgccgctacaatggtagcagaattaagcaggattttctagtccttacaaataggttcaaggcagc

SEQ ID NO: 249434 - DNA, 122 bp, Homo sapiens
atatataaatacatatacgcgtgcccaagggcctggttttcgtctctcctccccacgaaacggaatgttttggagccgatggataacaagaacactattaacattcttttgagcctgttttt

SEQ ID NO: 249435 - DNA, 122 bp, Homo sapiens
tcttcaaataggttgtaggagggattattacaagcagggccattcctgcttctgccccttcgttcctggacctatataggtatacaggttaacatttctatttgatctaccaggggcagaac

SEQ ID NO: 249436 - DNA, 122 bp, Homo sapiens
acctcctacccggactacactccaggcccagtggcgagacagagacacctgcagggctcccggattgggggcggtgaaaacctgcacggtgcacgccccagcagaccatagtcctcatgcca

SEQ ID NO: 249437 - DNA, 122 bp, Homo sapiens
gttgtaaagacacctagcatccagtcttcattccatcctgattctaccattaataagtttcgtgtgtaatcccagccctttgggaggccaaggcaggcagatcatgaagtcaggagttcgag

SEQ ID NO: 249438 - DNA, 122 bp, Homo sapiens
tgcaagtgggtggtgccgttagatctagtttcaaggctttgtggctgaaacgggagcccacgcccgccacagctggccacctgcctctctcctgactcccgtgcaaggccagtaatgcaacc

SEQ ID NO: 249439 - DNA, 122 bp, Homo sapiens
gcagacccggaagaacttgtcccagtgttgaccacaccccctggctaggggcagggcttccggcctcgaactttaacttccgcttccggttcctagcgttaactgcgaccggggttcagcgc

SEQ ID NO: 249440 - DNA, 122 bp, Homo sapiens
caagccttcaccccatgactcaccgcttccccatccgtctgaaccagaaatagagactcccgactgctccccagtccccactactaggattcagggccccagtattgaatcttgaggcactg

SEQ ID NO: 249441 - DNA, 122 bp, Homo sapiens
tacatgtaaatctagacctctgacatcatggtgttttcttaatgcctcacattgctggcacggggatgtgccctgcctgccagcacctaggacttcgagttgggttgcagcttatgacatgc

SEQ ID NO: 249442 - DNA, 122 bp, Homo sapiens
atccataaactgtcgaagatacagatgaaaatccactaaagcatgcttgaagcggttacacgaaggccaaataagatgggaatggaaatgcctgatgttaagggaagatactacctaaaatg

SEQ ID NO: 249443 - DNA, 122 bp, Homo sapiens
aactggcagtcctcatcgatgcaggacccatcctactgaaacccggcgctgcaggtcacccgcgtcagccgcattagcagtggccacaagctcaaacagccaccctggagctgtccctgcca

SEQ ID NO: 249444 - DNA, 122 bp, Homo sapiens
agaacaggaaactgaagctcagaaagttgaaatagcggcccaagcccttgggccagaaagcggggcaggaccaggctctcacccacctgtgcctgaatccaatcccaggcctcctatccaga

SEQ ID NO: 249445 - DNA, 122 bp, Homo sapiens
agcggcctctctgggctgacagccacccctgcgggtcctcaaaccccactcgaaaccctccgaacccctgtgtctgggagcagtagggtgggatgactgcaggatcccttgaagaagtgact

SEQ ID NO: 249446 - DNA, 122 bp, Homo sapiens
ggaagccctcagcttagtgttgtcttgtgatctgaacattggcctggaaggagagagaaacggccagaggcttggatttgccagtgatgccacatgacaagccactgcctagtctaacacct

SEQ ID NO: 249447 - DNA, 122 bp, Homo sapiens
aattgatcccacaacagcaaacccaggaccctggcctactttgagccatatatgtcctggcgagatgcagcaacttcctagggccacccagctttgcctgcccttataagctcagcttgccc

SEQ ID NO: 249448 - DNA, 122 bp, Homo sapiens
cctgtgacgacaaaatgggtacggtgaaacgtcctaaagtggtggtggggtgctattagccgttggaattaatttttcattctgaattgaggacctgtaaaaaggcctcggcttggggacac

SEQ ID NO: 249449 - DNA, 122 bp, Homo sapiens
gaatcaatagggaaactgcccagtccttgtgttcagggctgagggcctcggtgacggagacgaggtaagaaaacggaacggctgtacaggagaagacagagaatccgggctgggggacggaa

SEQ ID NO: 249450 - DNA, 122 bp, Homo sapiens
actgaggccgaccccggaggattgcatgagcccaagagtttgaaattagcctgagcaacacggtgaagctccatcgctacaaaaaaatatgaattaaaaggccgggcgcggtggctcatgcc

SEQ ID NO: 249451 - DNA, 122 bp, Homo sapiens
atatttccaaacaaatctgatgtgtggaattcaggtgaaactgccacaccaaaaagtccacggattgagacaagcccaggtgggtagcacatagattttaaattgccaaatatcatcttaca

SEQ ID NO: 249452 - DNA, 122 bp, Homo sapiens
catccggggcggggcggggtgaggcggggcctggggcgcaggggcggggcgaggtgccggcggccgagatactcacgggcgcgggacctggccgggagactgacagcaccgggaccgaccac

SEQ ID NO: 249453 - DNA, 122 bp, Homo sapiens
tgatcaccacctcatccccgcgctcccaggactcgcgctgcctccaggcgctcccctccacgccagtgctgccttttcaaagaagtctttcagactttaagtccgaaggatgcccctcctcc

SEQ ID NO: 249454 - DNA, 122 bp, Homo sapiens
gcgcactctgcaggcttggggagggacttgcggcggaagaggccggctcggaggcgcgtgcgcgggggctctgcgctcgctgtccggaaacgcctcgtacctgttagccacctggtgtgtac

SEQ ID NO: 249455 - DNA, 122 bp, Homo sapiens
tccgtgaaagggggggctggacccctttactaacttctaaccgggcaaggtggtgagtgccgggtgctgaatgaaaaatccttcttttgatgtccccaacaccttctcctccagggggaccc

SEQ ID NO: 249456 - DNA, 122 bp, Homo sapiens
cggtgggtatttgtccggctgctgggcgacctttcccgcgaaggaggttgtgccttcattcggtcgcgccccgggctggggaggcacctccctggtgcgcaggaaccgcaggggcgggtagg

SEQ ID NO: 249457 - DNA, 122 bp, Homo sapiens
gcagccaggattcctctccagatcgcgcccccgccgcatttcattgcctgaaacggcccacgccccgcgatggcccagcagacacccggcacagcacagcgtcactgcgcggcccccgcagc

SEQ ID NO: 249458 - DNA, 122 bp, Homo sapiens
agtgggcagtggaggaggttggggtgccggttgtcttgtaccccagtaccggcccttcctcggatctgttttcaattcagtctgctccttggcccagacttatgacctttgcagcatgcggc

SEQ ID NO: 249459 - DNA, 122 bp, Homo sapiens
ccaagcaggaaaacattgatttgctgtacactcaaagggcatctcatgccttcagtccaccgcctcctcgggccacagcccgtgccctcgcgccggctcagactagctctggccctgctgct

SEQ ID NO: 249460 - DNA, 122 bp, Homo sapiens
ctgtgccaaagctcccagcagcctaggacacgcacggttccgactccaccgtctccctctcggccaggtagttgtggggcacatagccctgggccacggccccacccgcctcgtccagcagc

SEQ ID NO: 249461 - DNA, 122 bp, Homo sapiens
actgcaaagtggcaactttttgctaaattcataatttagtctacacacaagctatgtacccgtatgtgactgccaagagttatatctttgcttattaaaagcaaagtgcagttcatacctga

SEQ ID NO: 249462 - DNA, 122 bp, Homo sapiens
ggcgtgtggggccgcgtcctggacgatgcctgggacctgcgcggcgcgggcgtggtgtgccggcaactcgggtgcagaggggcccagcaagcctatgacgcacctgcccccagccgcggatc

SEQ ID NO: 249463 - DNA, 122 bp, Homo sapiens
ggcagtagtgggtaactcacaggtggtggtgagggttagagggttggtagtaaatgaccccgtcattggtagattaatcactgcaggtgagagcgctccttaaaaggagaaaggggaagcca

SEQ ID NO: 249464 - DNA, 122 bp, Homo sapiens
tgctctcggcacttggtcattctgcatagaatttggctccaaggcctggcctgacaccttcgcaccaaggtgccgtaaatgaaacctttactcctgagacttcctcacctctgcgttcccag

SEQ ID NO: 249465 - DNA, 122 bp, Homo sapiens
taccaggattcatgttttgcactagcctccatgcttcctggctcttatttctgggttcttcggagatgaagaagtaccgcatgctgccaaaggtagcgtcgtgacttccaggggcacatgag

SEQ ID NO: 249466 - DNA, 122 bp, Homo sapiens
caaggaacaacaggccctgtgcaccctgctgtggaaagacacaaaacccccattaagcgtcgtgttgaaaaaaactgtgctgaacgtgatcaggcatctcgagatcaaatcaattcgtggtt

SEQ ID NO: 249467 - DNA, 122 bp, Homo sapiens
cggaagccgggaacctgctgtcggcgtgggcggtggcggtgccagcgcgcgtgcgtcgaacggctagggcgggtggctagaattctgcggtgaatcagaaaagctgtcctgatttcctctcg

SEQ ID NO: 249468 - DNA, 122 bp, Homo sapiens
cctaaacctcggtcggtaggagcccactcaccaacagcagccgctaagatggccggggaacgagaaaggaaagacttcccacaatgcaaagctcttcacggcagagccggaactgcgggacc

SEQ ID NO: 249469 - DNA, 122 bp, Homo sapiens
ttactaccttgtccctgtttttctcattttgctgcaaaccagacattggaagccatcagacgcatccaacacacccgtctgacaagtggaaagactgagccccagagagagcagggacttgc

SEQ ID NO: 249470 - DNA, 122 bp, Homo sapiens
cccagtgtggatcggctgccgggctgcggggaatcccacgtgtgtgggggagggcgtgtccgcagaccgtgggcaccagctggccttggagagcgctcggccggtcacctccctccttctcc

SEQ ID NO: 249471 - DNA, 122 bp, Homo sapiens
tccaatctgcataaagcagattcctgctgagaaaatgacggcagcaaaaactgattcactcgccgctttggggagaactccaggcctcccttccttcgaggttacataaccctctgtcaaca

SEQ ID NO: 249472 - DNA, 122 bp, Homo sapiens
gggaggaccacagtggcagatgtgcagtgtggggcatgtggcgtgcagggacgccgtgggcgtggtgtggggcacgtggcgtgcggggacgccgtgggcgtggtgtgaggtatgtggcgtgc

SEQ ID NO: 249473 - DNA, 122 bp, Homo sapiens
aggcttccgcccctgccttagtgtctgtgactcagtgggagcccccaaggccctcgctgtcgagggctgggacagtgaggacaccggtgtgccggctctgcacatcgtgtggggggccgtgg

SEQ ID NO: 249474 - DNA, 122 bp, Homo sapiens
agcgccgtttctcctccatggcttctcgccgacgccctcgctgcggccttccgggcccctcggttgataaaaggactaaatagtgacggacatttttaaggctacttaagaaatggcaaaaa

SEQ ID NO: 249475 - DNA, 122 bp, Homo sapiens
cttcttttatgccaaatggtgttaatggcttcccactgttgctaacccaaggatgcttcacgatcccatgttggtttccattaattttgcccgtatctttgtaaatagtgcttttattcttt

SEQ ID NO: 249476 - DNA, 122 bp, Homo sapiens
ggccacgggctgggaggtggtggaggacccggggctttcggcagaaactcgggagggcggcggcggccggggctgcgggaggaccctacgccccgctcgccccgcagcgttcctcggtcccg

SEQ ID NO: 249477 - DNA, 122 bp, Homo sapiens
agggaggagagaggagttccttccctttcaacgagggcttccacgccctctaaggggtggcggggaagggaggaggctgagaagatgcagattaaataaaggtatggaatggaaggcctgtg

SEQ ID NO: 249478 - DNA, 122 bp, Homo sapiens
cccaggcccacagcagcttcacaaacagcggggagcctggaggggcaagggtggccagggcgtcatgtcccggcccctgacctgctgggatctgagctgctgccgggggagctttgctctct

SEQ ID NO: 249479 - DNA, 122 bp, Homo sapiens
agacatgtgttgggattgccctgattatttacatttaatcttgattattataactcctctcgatttataatcacttcctaatttttcccactgggccagagctacatctttagatgataagc

SEQ ID NO: 249480 - DNA, 122 bp, Homo sapiens
ataacaccctagcaaaaggcccctagttttcatcttcatccctgcttagggcaggagccccgggacacaaggacgggcactccgggacagggccagtcccagcccagcaggaggctgtgcag

SEQ ID NO: 249481 - DNA, 122 bp, Homo sapiens
tggctaaagagctgctgctgcagaacgttgttgagggcgtggacagcacacagctccaggcgctgccgttcgtggtacacggtgggtgggctcggctgtgctcccggggcctgggacatgcc

SEQ ID NO: 249482 - DNA, 122 bp, Homo sapiens
gctctggttcttatcaggaaaaaaagtccattataatcattttaggcacgaaactttctacgcattagaattcttccgaggtgaaaagtatattattaagggaattcattttgcaaagagga

SEQ ID NO: 249483 - DNA, 122 bp, Homo sapiens
gtatgaggaagcacacgctggtcacccagaagaccttttagaaatcagcctgaagagcatcgcagatcctacaagagctgggaaagagatgtctggccaagtaataaagtggacttgctcgt

SEQ ID NO: 249484 - DNA, 122 bp, Homo sapiens
cgcccagaaaggggctgttgactgcagcgggctgcgcgcccagaactgggactgggatcgcggcggggcggggcgggcgcgggcccagggagaggcggggccgggggcggggcgggcacggg

SEQ ID NO: 249485 - DNA, 122 bp, Homo sapiens
ccgaaaactttgctgtgtgacctggggaagcccctgcccctctctgggtatctctgtttccgctcccaaaccagtgccttaggagcctagatctgagcaacgtggacactgggcttgcggag

SEQ ID NO: 249486 - DNA, 122 bp, Homo sapiens
catcccctgtccccagctccatgataggatctcaggcaggagtgcagtgggagcctcatccgcttcctcagttgggctttgccgccgcaggttagcattcaatgacagcatttcttggatct

SEQ ID NO: 249487 - DNA, 122 bp, Homo sapiens
cctcgtgatctgcccccgcttgggctcccaaagtgctgggattacaggtgtgagccactgcgcccagccacagtcagcccagattcaaggggtgcgtcaatagactctacctcttcgtggaa

SEQ ID NO: 249488 - DNA, 122 bp, Homo sapiens
gtggcgagggcggtgcctgggggcaggggcctcctcggagggcggcggggacagacccgtcgccccggctccgcagccccgccccggccccgcctccgctccggccgccgaaggctataaga

SEQ ID NO: 249489 - DNA, 122 bp, Homo sapiens
gtaggggccttggggtgatctcagggatgagcccatcagctccctctttctcattgtaaccgcttttctaagaggcaagcagagctttggtcatgggctcatctctgccgtcaaatcgctct

SEQ ID NO: 249490 - DNA, 122 bp, Homo sapiens
agcaaggcccccgtaaaggagccacagctggatcggggcatggggctcggggcccagcggcgtgggagctccgggaccgaggtgcagtcaggagagaccctgggggccagtggcagtccaag

SEQ ID NO: 249491 - DNA, 122 bp, Homo sapiens
atgcggcctccctcctccctctctcgctccctgccggcccttctctgggtcaccttctctcggcccacaatcggcttaggggccacccagagctggacctttgggaccaaggctggtgtggc

SEQ ID NO: 249492 - DNA, 122 bp, Homo sapiens
gcaaaattttgtttgtttttttgaggagtctacagctttcctcagaagggtaaaaattagcgtttggcaaacatgagtgattgacctatttccttgggatggctttcctgaatcttaccaaa

SEQ ID NO: 249493 - DNA, 122 bp, Homo sapiens
gcagaggaagcaagctctgctctccaggggctaatgaggaaaaccccctccgcccccctccggtcctgggaggccaccctcagcagaatggccacggtagtcataacaataacgtccaccgc

SEQ ID NO: 249494 - DNA, 122 bp, Homo sapiens
caccgtgactgcccatgtgggctgaggagaagccgctaagcgtgttgcgtcccgacgcgtcggcgtagcggggcatggagctgaccacagcctgcaggtacttctcctgctccaggctactc

SEQ ID NO: 249495 - DNA, 122 bp, Homo sapiens
aatatccaataatcagagtacaggaagcacctcgcccttagagaagctgtggctagaatccgtcaagtcagtctggctctgccgggcctgatacccaaggcttccgctgtcactcagaagtg

SEQ ID NO: 249496 - DNA, 122 bp, Homo sapiens
cggttacttttttaaaggctgacctacttactgaagattatgggacaacctggcaacattcgtactgcacaaaaatggtatctgcccgagttggaagaattatttcttaacaaaagagctat

SEQ ID NO: 249497 - DNA, 122 bp, Homo sapiens
gaaaaggggaaacaggaggaaacatagccctggaagaggcctggaaatgtgcctgccgtacgagactgcttccgtgagagaatcccagtttgttccatgaattctgttttatgcctaactgg

SEQ ID NO: 249498 - DNA, 122 bp, Homo sapiens
gcggaccgtgggggaggtggcgggggcgaggccggcaagaggcggccgcgggccgggctgcgtcgggaaacggcggccagacttccccgggaaggggcgagcgagagccgggccgggccggg

SEQ ID NO: 249499 - DNA, 122 bp, Homo sapiens
gggcctctcatccaccccggggctgcaacccagtccccggatcccggccccgttccaccgcgggctgctttgtggtccccgcggagcccctcaattaagctccccggcgcgggggtccctcg

SEQ ID NO: 249500 - DNA, 122 bp, Homo sapiens
gcaggctccagggttgcctgtcccttcaactgtgaggttctgggggaggctcagcgggggcgtggcgtggacacagggtgactcatacagcgggcccagggccagtgtggtctggtagccgc

SEQ ID NO: 249501 - DNA, 122 bp, Homo sapiens
cctccctcctccccatgccaacaataatctgaggagcaggatgagctgggactgagacttcgggagccccgtcagcctcctcgtcacggctccgacatccaccaaagtcctggcagctgctg

SEQ ID NO: 249502 - DNA, 122 bp, Homo sapiens
tgttgctatcacacgtgaccgcttgacattgctctgaggagcagaggtgtggctacgcggcgggcacgtgactggctgccacaacccccgctgcagggggggagcggtgagggggacaagag

SEQ ID NO: 249503 - DNA, 122 bp, Homo sapiens
ttaacccctggggaccccggggccctcacgaatacccttatcccaatcccctctgggcttcggatcccccgaaaagaccccagtgaggacccgggacccaggctcatgatatctgctctgct

SEQ ID NO: 249504 - DNA, 122 bp, Homo sapiens
acatataaattaaatttcaacgccatggttcccgttgcttctctgttacctgttctttctcgccatgatccggagagcacgccacatcctcctccaaccccttcaccctcactggcagagaa

SEQ ID NO: 249505 - DNA, 122 bp, Homo sapiens
gcggctgccgcgcaccggggccacagcgccccctggcggccccaggggagcagacggcggcgcgtacccaagcctgaaagtgatggcctaggcgggagggacaattacaggcctgcgctccg

SEQ ID NO: 249506 - DNA, 122 bp, Homo sapiens
tgggtgttgatgttgcaccagccctgataaaaaccagtacgttttcctacttgattgtaacgttattttcacaattaagagtaacccagtgcacgctcccttctcctctccaatgtcttccg

SEQ ID NO: 249507 - DNA, 122 bp, Homo sapiens
gaagttgaggaatagagctgccctgagaaagcatctcctcattcatggtccccgagaccacgtctgtgcggaatgtgggaaagcgttcgttgagagctcaaaactaaagagacatttcctgg

SEQ ID NO: 249508 - DNA, 122 bp, Homo sapiens
aatcactgcagacccagccggagtcgccccgggtggccgcctccgccccctggctcccaccgggccgtcacctggagtccctccccgggttggtcttgccggcagcctcctcgcctgacgaa

SEQ ID NO: 249509 - DNA, 122 bp, Homo sapiens
tgtcttacccttcatcacacttattgtaagattttatcattttgaaagcagctgttaggccgggtgcagtggctgacgcctgtaatccgagcacttggaaggctgaggtgggcattgcttga

SEQ ID NO: 249510 - DNA, 122 bp, Homo sapiens
aacgtgcagggcgctattattgggtaacagtcgcccttttgccccgttctcctgggagagcgggccggggcatgcgcgcagggatgctagcccggcggccgaaccggacagagccccccggc

SEQ ID NO: 249511 - DNA, 122 bp, Homo sapiens
cctggtaccgcccacagccccgctcaagagctagttccgcccccaaccctgccacagacccgcgccaggacgaccctgcctccgcggctgtccctagccagggcccaacctggttctattaa

SEQ ID NO: 249512 - DNA, 122 bp, Homo sapiens
cgcttccctcttactagaactgaagtcaaatctgacctacctgaccttggggtcagaagtcgaggactcagaggtggaatttttatggtcacccacacggtagtcgatccgctctcctctgg

SEQ ID NO: 249513 - DNA, 122 bp, Homo sapiens
ggcgcgtcggctccctccacccctgctgagatgatgcactgcgaaaacattcgctctccccgggacgcctctcggtggttcagagcagggaaaatgttgcctcaggtttaaaataatctgcc

SEQ ID NO: 249514 - DNA, 122 bp, Homo sapiens
tggccagtgggattattagataaaatcaggcctcatgttgcgaaactttgtattcaaatacgggaaaaaaaaaaaacaaatcaaaccctccacatttttccctttcacacaacttcccccag

SEQ ID NO: 249515 - DNA, 122 bp, Homo sapiens
cgctgcttgaaacctcgcatttcctcagcgccttttgggcataatcagacgtgctctgcacggtgggagaaggtgctaatgtgagtcttcaaatctgggctgaattctgttgagttgataag

SEQ ID NO: 249516 - DNA, 122 bp, Homo sapiens
taagtctcacccaggtcaccagagggcagttatactttccaattctgcctagaacctccacgcttcagtgcaggacttttaaaaattaaaattatatggagagtctgataaagatttgactt

SEQ ID NO: 249517 - DNA, 122 bp, Homo sapiens
atttcccacgaagcctgtcaggtccccgggtggggtcagagctccatctgcagggatccccgcccttgtctctgattcctgcaggacgctgggtgatcccggacgcttctgacctcttttta

SEQ ID NO: 249518 - DNA, 122 bp, Homo sapiens
agttccctccctcctcccatcaccccaagtgagtgcaaaggagcaaatcatagattgtgccgtggcctcattgtggttggtagaagttttcatctttctcttagctggtaacctgtgctcct

SEQ ID NO: 249519 - DNA, 122 bp, Homo sapiens
agataagcagtggtcctccacttaatgaacatcatcagttcttaccttaattgacctcctcgaaattccatgttgttggcctctccctctttcctgaagtttgttctttccttggctttttg

SEQ ID NO: 249520 - DNA, 122 bp, Homo sapiens
atgggcgcgggaatggccggcccacgggtcgcaggagacgggacgccagtcctttggctccgttccgctggctccttcgtcagtactgacacctcgggcttgtagagcacttcacgcagtgc

SEQ ID NO: 249521 - DNA, 122 bp, Homo sapiens
tctccccggtctgttgtttgtttaagcaccagtcattttttttctaacccagttttttctcgccaaattaaatggtgattgtagtcttccaagtgaattagccagagcttgtttttgacctg

SEQ ID NO: 249522 - DNA, 122 bp, Homo sapiens
gcagacgcctcctctgcagaacgcatcagtttctattctgcagttgcagagccagccccgcgtgagaacgtgcataatgagtgcacaccatcatgtcaaggtgcatacttagtgagcgccat

SEQ ID NO: 249523 - DNA, 122 bp, Homo sapiens
agagacttacaaagcggctggaattgttgttgcgcacagtcttggcgttgccgaaggcctcgagcagcgggttggactgcaggatgatatctttgacgtgctggggcagaggcaggtggagt

SEQ ID NO: 249524 - DNA, 122 bp, Homo sapiens
cagcatggaaagaggaaggacgtttgtcagagaagtcactcagcatggaaagaggaaggacgtttgtcagagaagtcactcagcatggaaagaagaaggacgtttgtcagagaagtcactga

SEQ ID NO: 249525 - DNA, 122 bp, Homo sapiens
gagcacctttctccctcccctgcccacctcagtccagaatctcgcccacccgccagaagtcgtgttgacagatttccagaccctggatggaagccagtacaacccggtcaaacagcagctag

SEQ ID NO: 249526 - DNA, 122 bp, Homo sapiens
tattaatattttggtgtacttccaaacctgggtttagataaagaggaagaacttaggggtcgacagcattgtgccatggatcaagaggttcccgtcttgtttccaagcttgccctcctgtat

SEQ ID NO: 249527 - DNA, 122 bp, Homo sapiens
gccccgggagccgctgagcgaggtgggtggacactggccgaggtcacaggaccctgtgggcgccatccctactggggacgcagcactcactgaaaaccaagaggagtgtgagggggcccagc

SEQ ID NO: 249528 - DNA, 122 bp, Homo sapiens
caagggacacctggactcttccagagccaagctgaggcctggagggaggcagcaggcattcgccaccatggtcagcagcccggccctaccacagccccttggcctcctgccctgggggcctc

SEQ ID NO: 249529 - DNA, 122 bp, Homo sapiens
gccccttgttgcctccgtggtgcagctgcaccttgcgcagggagatggagtagatgactccgttgatcagctcctcaccgatctcctgcgtggagctctgtgaagacaacgcccggcagccg

SEQ ID NO: 249530 - DNA, 122 bp, Homo sapiens
agtaattcattcactttactagtattacatttatgaaattcacctttgtggaaaaaggagcgggagagggataagaaaatgcctgtttctagaaaaccgcgagatgcttccacgtgcagctt

SEQ ID NO: 249531 - DNA, 122 bp, Homo sapiens
ggggctggcgggacagacggagcggatggatgtggttactcactcaccgttcacacagcccggggcatcaagggcacaacgcaccggaggaaggatccgagagctctcccgacgccacctgc

SEQ ID NO: 249532 - DNA, 122 bp, Homo sapiens
gacattgttagcacagccagcgggctcctgctgggctgagtttgtgggtaatccaagcctcggcaggtacagttcctccctcaggtgagtgttccacccccaagtgagcatcctgctgccct

SEQ ID NO: 249533 - DNA, 122 bp, Homo sapiens
cgtcgatcatctcatcctgcccaaacacttggttcacaggtacctgctgctcaagcctctcgcgggcccagtccagcttctcggccacagtgcctccgttcacctggatctccatcaggtgg

SEQ ID NO: 249534 - DNA, 122 bp, Homo sapiens
agtacaggggctgcagtacaattaaaaataatgagaccctactgggccaatgtccctgcacgcaataaaagggtgtggactaattgcaggagcagagattcccgccccaactcccccccgcc

SEQ ID NO: 249535 - DNA, 122 bp, Homo sapiens
tggcctggggaccggtgctcaccagagaggcctccttccctcagactgcggggacggggtcgccgccgagtgtccgaagtggaggaggagaaggagcctgtgcctcagcccctgccgtcgga

SEQ ID NO: 249536 - DNA, 122 bp, Homo sapiens
ttgacatcaggttgatgaaatcacacatgtagtggcccaggtgtacacgggcttgttccccggagcatggctgaagtctctttatgaataataaaattgttgtattttgtgcagcagggagg

SEQ ID NO: 249537 - DNA, 122 bp, Homo sapiens
cgaggcgccggcggggatgggcggggtgcttctccctcctctgcccagaaactctagctgcgctctggcaggctgcgagctaggttttggagagaggtgagagccgtgtggaggccaatggc

SEQ ID NO: 249538 - DNA, 122 bp, Homo sapiens
tcccggaggggtgtttcctcaccctccagggtctggctgcgcattcctgagctctgatctcgggcgatggctggaggccctaagggcggggtggacccctcccctcccctcccctcggcgcg

SEQ ID NO: 249539 - DNA, 122 bp, Homo sapiens
attaactgccccgcaacagggaatttcgcaggatttcagtattttcgactccccaggtgacgccaagagggtgggttccactgtgcacggtggggaaactgaggctcggaggggacaaggaa

SEQ ID NO: 249540 - DNA, 122 bp, Homo sapiens
gttactgagcccagattgtccgctgttcttaaaccttataacaatgctgaatggtagttacggataattattttattagtgaggaaattgagactcagggagttaagtcctttggctaaggt

SEQ ID NO: 249541 - DNA, 122 bp, Homo sapiens
caagggctttagcaagagaagcgccacaggcaacggccgggagagcgcctcccagcctggcgagcagtgggagccagtccaggagagcagcgacagcccgtccaccagcccgggctcagcct

SEQ ID NO: 249542 - DNA, 122 bp, Homo sapiens
cacacacacacacccagaccgcaggctcctcctctgctccataggctcttggcactaccccgggatgagcgactgtctccactgccactggtcttgccagccattcacttgcccttgccttg

SEQ ID NO: 249543 - DNA, 122 bp, Homo sapiens
tgccaggcgctgcgcccagcgctgggccgacctgggctgcaggtacaggggtcacgggagcgggagggaagttggccctactatgcaccaggggcatgtgcggtctgtcttcacaacatccc

SEQ ID NO: 249544 - DNA, 122 bp, Homo sapiens
cggcggaggaggctgtgaggagtgtgtggaacaggacccgggacagaggaaccatggctccgcagaacctgagcaccttttgcctgttgctgctatacctcatcggggcggtgattgccggg

SEQ ID NO: 249545 - DNA, 122 bp, Homo sapiens
ttatctgtagtttgggtttattctgtccaaagccattcttctaagttaggagaatcttaacgctttcagggaaaagagcagtatagaacactgtagctggtgataatggcccactttttctt

SEQ ID NO: 249546 - DNA, 122 bp, Homo sapiens
atttcccagcacctttgcagctaggtgtggtcatgtgagcgagttatgtggtcatgtgaccgagttccagtcagtgcaatcgggcatctgtggggagcaccgcttccaagagtggctcctag

SEQ ID NO: 249547 - DNA, 122 bp, Homo sapiens
accaagatcacacttaaatcaaactgaagtgaagctgtccccagctagtgatccccaaggcgatgtccagatgaacgttgaggagaggaccagagaaaagcagccttaggaagtagctgtag

SEQ ID NO: 249548 - DNA, 122 bp, Homo sapiens
attaacttgagaacctgcttctgcctctcacacaatttacgaaaacaacagccatgccagcgaccaagagttgggtcattcaagttacaccaaggaaccttaaaatggatggagctgtccat

SEQ ID NO: 249549 - DNA, 122 bp, Homo sapiens
acctttgtccacttgagccggacgccgtcgtgaccgtgggcggctgcctcatagtggtagcggcagggcaagacgatggtgccaccacggtggcttaccacctgcccaggcgctgtctgtac

SEQ ID NO: 249550 - DNA, 122 bp, Homo sapiens
ctttgactttcactcttcgccaagggcttgcagaacaccttaaaggaaaaaagatggaggcgcttagagttcagatgttcatgccatgctcctttgaaagcttgtatctgtaagtgaagttt

SEQ ID NO: 249551 - DNA, 122 bp, Homo sapiens
ggagcgctgcgccccctggcggcggggcccatccctctccgctcccggccgccgccgccgcgggccggcctcgctccatttgcagcctccggaggcttcgttcctccgagcggctgctcccc

SEQ ID NO: 249552 - DNA, 122 bp, Homo sapiens
cccatgataaaatgaacactccatttctaaagggaggctcttgtgcacgctgtgaggagacgttccccaggaaagttcaagtgagcatgtgatttccactctcttctctgttctccattccc

SEQ ID NO: 249553 - DNA, 122 bp, Homo sapiens
tcaggagtctgtgggaaaaccaaagtgtaagaggtgcaggatgcaggccgggagcgcccacgcctccacatttccttttcagctggagcccacctcctccggagcctccagtgagaagtttt

SEQ ID NO: 249554 - DNA, 122 bp, Homo sapiens
ctccgccgccgcgcgtggcccgcgcgcagcgtctgccgccggctccgcctcccggacgcccggagcgcgccccaccccagccgcacaccgaccgggctggctctgcctctccctccctgacc

SEQ ID NO: 249555 - DNA, 122 bp, Homo sapiens
aaccgcgagggggcggagcttcgggttaggtcccggcgaggttcttcccgcagccaataacgagccgtaaatccccagcccattgttgtttattgctgacccctcagcgctccgctaggaga

SEQ ID NO: 249556 - DNA, 122 bp, Homo sapiens
agacaggcctgagtgcctgggtttggctatgccagttcctgttgattactgatataacaacgttggatcaggagtattttagtgggcagatgttgaattttctgccttccacccactaaaag

SEQ ID NO: 249557 - DNA, 122 bp, Homo sapiens
ttccgtctaccaggaacggcaggaatgctatgcgttcaatgggactcagcgcgttgtggacgggctcatctacaaccgggaggaatacgtgcattttgacagcgcagtgggggagttcctag

SEQ ID NO: 249558 - DNA, 122 bp, Homo sapiens
tctattcctcacagccatgttggacatgtaaaccaaaaataaaattctaagccccctaatcgacagaatggacccctcctcttgaacaaggggattctgaagaaacctaaaaaattagttca

SEQ ID NO: 249559 - DNA, 122 bp, Homo sapiens
acagccagcagtcctctttatatggtgccatcaagcacggcaaagtggcttatccacctccgcaacactcccagtgcaactgtctgaacgcacacatgctccattgtccgggactgtggctg

SEQ ID NO: 249560 - DNA, 122 bp, Homo sapiens
tttacctgcttcatgatttggcccaaggctcgttaagacttttagcatattttttaatctcgtgtttaagggacttaagccaccatcaaatagagcaatttcatcaagccatccactataca

SEQ ID NO: 249561 - DNA, 122 bp, Homo sapiens
catggggagatccccatctcttttaaaaaatacaaaaaaattagcccggccggtggtgtgcgcctgtagtcccagctactccggaggctgaggcaggagaatcctttgagcccaggaagtca

SEQ ID NO: 249562 - DNA, 122 bp, Homo sapiens
tggagaccccaaagctcagagagggcttccggcttagcagaggtcacacagcactgtgaccgccatctgatcccttccctgtggaatcaggtcagccccggggctcaccaggcggtatccaa

SEQ ID NO: 249563 - DNA, 122 bp, Homo sapiens
gccggaggagcaagagcgagaaaggggagttgccatgcactttaaaacaacccgatcttgcgagaactagcaccaaggggctgggggtaaaacattctgccccatgatccaatcacttccac

SEQ ID NO: 249564 - DNA, 122 bp, Homo sapiens
ggcccgggggtgggcccggggggatggtgcaaggggccgcgcacgcgactcttgggcctgcgccccggcgcaccgtccccgctgccagccacgctggagagtgcgctccaggatgtggtttg

SEQ ID NO: 249565 - DNA, 122 bp, Homo sapiens
tttcttccttttcttggggagtatgtaaaataatgcaagaatgctttctaaatgagtccacgtttattctttggatatttgaatatggtatgtaactctggatacgatctcaaagcaaaaat

SEQ ID NO: 249566 - DNA, 122 bp, Homo sapiens
tgttccgtcccccagctccgccgcagagttcggcgaagccgacgctccctgaccgcgctgcgtctgtctgtcccgcgggtctggagatcttcaaacgatggaacaccggctttgcccttctg

SEQ ID NO: 249567 - DNA, 122 bp, Homo sapiens
aattctccagactgttttagtaggatctaaatgcactggtccctgtgatttacaatcttccgacacagtgtagatacatgttacctcctgggctctgggatccctctgagttttttcaatgg

SEQ ID NO: 249568 - DNA, 122 bp, Homo sapiens
tgctccagaaggcacgagactggggcgaaggcgagagcgggctgggcttctagcggagaccgcagagggagacatatctcagaactaggggcaataacgtgggtttctctttgtatttgttt

SEQ ID NO: 249569 - DNA, 122 bp, Homo sapiens
cactcgggaaaccttcagaggagtctcagaaaggacacggctggctgcttttctcagcgccgaagccgcgccatgctcgtcctcagaagcgccctgactcgggcgctggcctcacggacgct

SEQ ID NO: 249570 - DNA, 122 bp, Homo sapiens
gctccgccccgctcgaagttccaagcatgcgcagtagcggctcctgcgcctctaaggatccgcctctttccttctttctcagcctgggttccaccccgggaggcccgctgtatgagatggag

SEQ ID NO: 249571 - DNA, 122 bp, Homo sapiens
gcccacagccaggcaccagggctgtgtctaggacattcatccatgctgggcgcatcagcccgctctggcgagcagatgtcaatctgaggccggccgccctcttcccggagactcccgtgccg

SEQ ID NO: 249572 - DNA, 122 bp, Homo sapiens
cctcagaccttttacccacccctaggctggaggttcgggaccatccacgggcgcgtgggccgcttcccttcggagctggtgcagcccgctgctgcccccgacttcctgcagctgccaacgga

SEQ ID NO: 249573 - DNA, 122 bp, Homo sapiens
tctgctcctccttcgagggcccaggcatctggttttggagctccccaaacgcagcggccccgggctccgaatgcggctgctgccccagcagatctttggaatacgtctggctcttgacgttc

SEQ ID NO: 249574 - DNA, 122 bp, Homo sapiens
acttccgccaccagcaaccaagggaaccagatcccaagggaaccagcacccctgggcgctcgcggcccgaagcctgaggttcccgccccgccccggcagggcggccccgccgacacccgtag

SEQ ID NO: 249575 - DNA, 122 bp, Homo sapiens
acggagaacgggctctggctcaaggtggagccgctgcctccgcgggcctgagcgtgggcgcgcccctgcggctcccgagggtccaggccccgcccccaaaggaccaggactcgccccaaaga

SEQ ID NO: 249576 - DNA, 122 bp, Homo sapiens
gagaggaaagaaaaaaggggaggatacggtcaccttctcgcgaagctctgatgagggctccgtaaatccatatgctgccatggaaagaacggggcagacggacggtcacctatgcgttcctc

SEQ ID NO: 249577 - DNA, 122 bp, Homo sapiens
tcttttctttcttccttacggttgtcatccggtttgtagcctgacttcttcggcctgtcacgtacccctttccttttcctggaagtggttttgttgtaggacagccacaggtggacggctgg

SEQ ID NO: 249578 - DNA, 122 bp, Homo sapiens
gcatccgtgagaggagatgccacctagcgcagatcacatctgctctgaatccttgacaaccgcagcccaaagaatgataaactacaaaggccggaaatgcgtcaccgcggcccgctctccgc

SEQ ID NO: 249579 - DNA, 122 bp, Homo sapiens
acctggagtggcgggacagagcccacacatggctcaccgcagggccggggtcggggtcagcgtctatccccagtctgtgtcagcgtggggctgccccagcactgtgctccttgacagccaca

SEQ ID NO: 249580 - DNA, 122 bp, Homo sapiens
atgacagtaactgctacatctgccttctccaaccccactgccatctgtggtcttgggtttcgacgaagtaagtggtttggacacctgtgtgccttcagatatgtttctgaaggagctgttgt

SEQ ID NO: 249581 - DNA, 122 bp, Homo sapiens
ggaagctgcggccgcagccgcaacccgtcccggaggtgtcctgtctcctgtcgccgccgccgccgccaccaccgctgccactgccgccctgccggggccatgttcgctctgggcttgccctt

SEQ ID NO: 249582 - DNA, 122 bp, Homo sapiens
cctgcttctggcctgctgcttgagggggaagggctggtcctttttggccatcctgacctacggattaagtgcatgtcgaaattttaacaagtggcggcttgcaggattagccaactcgggca

SEQ ID NO: 249583 - DNA, 122 bp, Homo sapiens
tgctccccgcccggccccggctccccgggcccgacgcccgactccgctcccgctcggccccgctcccggccccggccagcacagcgctctccgcgcccccagcaccagcccgctccgctcca

SEQ ID NO: 249584 - DNA, 122 bp, Homo sapiens
cggtgcattcgccacatgcagagaaaaatcaaaacagccggagctgccactcccctagaccgcagggttagtgttccccgccctggtttctgtctcgccctcagcaaacccggcagcccgag

SEQ ID NO: 249585 - DNA, 122 bp, Homo sapiens
tatggactgagtgtcatttcccctgtcagatagcaaatacacccccttcctcttgtaacccggtcaggcctagggttcctccctgagttccagaataggccacccagttggggcggaccctt

SEQ ID NO: 249586 - DNA, 122 bp, Homo sapiens
cagccaccttgaacagtttcccgggagttagtcagatttcctaccgccaagcagacatctcgccggttactaactggcatgaacaccctctactccccactcttgctccagccctggctcta

SEQ ID NO: 249587 - DNA, 122 bp, Homo sapiens
cctttagccgctggggaccggggctgcagcctctgcagctgggtttcccactctgacaggcgccattttaccgtccaaaggactccctcttcctgtctttccccctcctcttcccctttgac

SEQ ID NO: 249588 - DNA, 122 bp, Homo sapiens
ggctgcagggaccgaggaataaggttagggacaaatgacactcctaccattaagcacgcacgcctttggttctggaggcccacaaagctgcgtcagagcactccccaaaagccaaacattgt

SEQ ID NO: 249589 - DNA, 122 bp, Homo sapiens
gggtgatttgcagggattgacttatgtttacacatagataaaggtcaacgaagcaaactgcggaacttcttttccagtttctacttttctagcttcagtggagctgcctctaccatacctta

SEQ ID NO: 249590 - DNA, 122 bp, Homo sapiens
gtcacaacaaaacaaaacaaacaaaccaaatttaagagggtggctttcatgttaagtgttcgtaccacaacaaacaaaataataaaaggaataaggtcctaatacatactataacacggatg

SEQ ID NO: 249591 - DNA, 122 bp, Homo sapiens
aaagtgttactatgataaactatacttgaaagtcatatttagttatctgtaggttaataacgttactgtagaataatgtagctgtgtgtgtgaaagagtggctgattagactggcatggtta

SEQ ID NO: 249592 - DNA, 122 bp, Homo sapiens
tgggagagagtgtggctgactatatttcccaaaacgaccactatggtatctgccataccacgtgttcttctacatagtgaccttgccaccaggagatattctaactcccctccccttaaatc

SEQ ID NO: 249593 - DNA, 122 bp, Homo sapiens
tcacagagccagaaataatttagcctgtagagcttattaagaagtgcaatgttcgttatgcgtaacttcagttctgttagagccaagaaaataaaagtcaaggctgaaatataaggaaatga

SEQ ID NO: 249594 - DNA, 122 bp, Homo sapiens
agaagtactcgttgtccacggggttggcatcgtcgcaaagctccagagggctgggcacggcggccagggccccggggcggcggtaggaagccaccaccacggccagcttgccaaggcgcgtg

SEQ ID NO: 249595 - DNA, 122 bp, Homo sapiens
ttaatcaacttgtaaattatttagagagtcatgcgctgtcttcagcgagtacaaacacaccgcatgcaaaggcttgctggaaacgggcagagggtccctcagggtctcccctccacgggaag

SEQ ID NO: 249596 - DNA, 122 bp, Homo sapiens
ctctgtgtcacggatacccagctcaccagatggatgcagtatggtgggtgccctggtagccgaagctggctctgatgcaaagatctggtgcagaatttataaagcaatatctcatttctggt

SEQ ID NO: 249597 - DNA, 122 bp, Homo sapiens
gatcctggatgttggctaccttttcaagtcatcttggcatgtctctagtgttttgtaagccgctttccagctagctgcgtgtgtgtgtgcgcgcgcgtgtgtacgcgcgcgcctatctgatg

SEQ ID NO: 249598 - DNA, 122 bp, Homo sapiens
cttacagctcaaatgccttttattaaccgaagtgcctccagacccctcccctcctcaccacgtgaagtcccgcttacagctcaaatgccttttattaaccgaaggtcagcttttgtgactct

SEQ ID NO: 249599 - DNA, 122 bp, Homo sapiens
ttctagactctcaggtggcccatccgggcagaggcgggtgaaaaccaatgctcgtccagccgggaacagaacaggatgtacctcgagacttgcttcccggctggccaggaaggccctgccca

SEQ ID NO: 249600 - DNA, 122 bp, Homo sapiens
gtacagtaggatatcaacaacagtcataatataacagttataacactatgccagcagggccgggtgtggtggcttacgcctgtaatcccagcactttgggaagctgaggagggtggatcacg

SEQ ID NO: 249601 - DNA, 122 bp, Homo sapiens
caagctcttcccgccccttcagtagaatctgctgttccgcctcgggcccagggcttccctcggtgttatcattgactcagactgtgaaggggcctctctccacagctcctgcacccccaggg

SEQ ID NO: 249602 - DNA, 122 bp, Homo sapiens
gcagtctgtttcacatatgtgtgttctggcaaaaggcctatgttggagtttccttcacctcgttggggagctgtatcccattccagaaagaggtaccctcaggtttcacatcatgccccgtg

SEQ ID NO: 249603 - DNA, 122 bp, Homo sapiens
gagttgcctctccttgagccagggaggaccccgtccggtgctggcagttctcttcttccacgcctcctgggcctggcccctcatccagggccgagccggggcgttttgctagcagatttctc

SEQ ID NO: 249604 - DNA, 122 bp, Homo sapiens
cgggcagggaagacgccaagcccagggagagctgcggagagctgcggagagctggggccccgcgtgcagcctcacacccgcccgccgcctccacgtgcgactgtcatcgaggaaaacctcag

SEQ ID NO: 249605 - DNA, 122 bp, Homo sapiens
tagcatcgccccccaattcactcctagttaaccctgttgtcgccaacttagtgaaaacctcgcctatgtctccatcacacatctgccacctccaagtgatggttaagccggtgtgcaggccg

SEQ ID NO: 249606 - DNA, 122 bp, Homo sapiens
tctgcagttggtgttgggccccaccctgccctgggcgcctctcttcctgaggcttggggacggtcctctgccctcatagtttgactaactccagatatgttgagagaggagagaacccgtga

SEQ ID NO: 249607 - DNA, 122 bp, Homo sapiens
ctgtgtggagtagaggccatacgggaggcccttgtggacaaggctgaggccttctctggccggggaaaaatcgccatggtcgacccattcttccggggatatggtgagagcctcagaggcac

SEQ ID NO: 249608 - DNA, 122 bp, Homo sapiens
cggctcaggacagcctgggcagctggatcaactcttcccctgacagcagtgagaacctgtcggagatccccttgtcccacaaaggtatgtgtgccctctgctgcccggccacctcacctggc

SEQ ID NO: 249609 - DNA, 122 bp, Homo sapiens
tgtctatttcattttcttgatgctaatgaaaatggtattgggcttttaatttcaaattctcgttgttcattgctggatgtaggacagcaattgattttgtatattaaccttataccgtgcaa

SEQ ID NO: 249610 - DNA, 122 bp, Homo sapiens
cataatcagtattacttattggctctcaaccatccggctgtgctcctgggattccacagtcgggcagagagattcttcataaatgagagaaggtagtagtcggtttcgtttgcattaagaga

SEQ ID NO: 249611 - DNA, 122 bp, Homo sapiens
cgcgctcagctgtgaccggggacaccgggtctcctgaggccagttgggcggcttcagccccgggcctccaaccatgtccatgctgagaaggcagctttcccgctctgggtaccttacgtcct

SEQ ID NO: 249612 - DNA, 122 bp, Homo sapiens
gtcccgttgggaagttgagatagtttggcaggcccagcgtgttgattgggtctgccagcacggtgtgttgcatttaccttcggagttacgagattcacctgtcaccaccactgggacagctt

SEQ ID NO: 249613 - DNA, 122 bp, Homo sapiens
gccctttcatgaccgtgagatgctccgggccttcctggtcagcatgagctgcagcctccacgctggggcctcctgccaagtcccgggctttggtgacttaagtgccttttgcagtctcacca

SEQ ID NO: 249614 - DNA, 122 bp, Homo sapiens
ctctggcagctgcacacagagggcacggtgacaccgtgtgacaaggacaggtgcccggcacgggcaagaggaaaggaaagagcctcgggcctgatcccgtgcactcagcccagccgggggag

SEQ ID NO: 249615 - DNA, 122 bp, Homo sapiens
taggcagctctctgctggctagaagccaatgcaccagaagatgcagtgaatgctcaggtacgtgctcagagtcagttcccagaccaagatcccaactgggacctggtggatgcaacacaact

SEQ ID NO: 249616 - DNA, 122 bp, Homo sapiens
taacagtggacttcctgttagaaacatcctagtgttaaccacacctgggacagaagctcccggcagcacgcagcccctgatgttcagctgcacagtgaacgcagagctccggcgccacacgc

SEQ ID NO: 249617 - DNA, 122 bp, Homo sapiens
ccaacggcaggccgctcccgcaagccgcgccctccaatcccaggccgctcccgcaggccgcgccctccaatcccaggccgcgctcgtggattactacgcacccggtggttggctgggccggc

SEQ ID NO: 249618 - DNA, 122 bp, Homo sapiens
cggcgccgaccgcatgaggagggcgcggccccctccctgttgggcctggactggggactgcggagcccggcctccttggtgcaggggacccggcccgccgccctcgcccgcccgcccgcggc

SEQ ID NO: 249619 - DNA, 122 bp, Homo sapiens
aaagcccccgctctccccgccttcaccaatgtcggccaccctgtctgggatgcccctggccgtgttttctccaagcttaatgccatatgtcctgtaactgcaagtcccgcttccaggaatcg

SEQ ID NO: 249620 - DNA, 122 bp, Homo sapiens
agggccctgccctgactcctgggtttgcaaccaggtggagcatgttctggaagaacgccgcgtctgctcgctctcatccactgcctccctggggctgcacacggcctgtgaggtcggtcagc

SEQ ID NO: 249621 - DNA, 122 bp, Homo sapiens
tgagctcgggtgatcatgcacagattggggccagaagtcgagattctgcgcgtcctctcccgccaccccactcccggtcccctagagtggcccagactcaggctaaagtctagggcttcttt

SEQ ID NO: 249622 - DNA, 122 bp, Homo sapiens
ccacgtgccggttgcagcgccacagcgggatgcacttgagcatggtgcgggtgggcggcgcgggctccggcggcggcgctcggcgggctcggggccggggggcggggctcagtccgcatggg

SEQ ID NO: 249623 - DNA, 122 bp, Homo sapiens
cctccgggcctgcgactttgctcagcccctccggggagtggaatcgggtgtgcaacaggccgtgaggtccggctttgcgaggaactcccattggtcagtcaaacaggagtcccaccctcctg

SEQ ID NO: 249624 - DNA, 122 bp, Homo sapiens
cgcttgggggggcgggggaggctgtaacttgcgcaagcgcactcaggcagtctccgagcccgcgggcgcaggcgcgcttacagccgacagagcgcttcagccgcttccctcgagcctgcagt

SEQ ID NO: 249625 - DNA, 122 bp, Homo sapiens
cgcacgacccgcccgcccctgtcaccggcaagccggagcggcgacacctcccgtccccgccgcgcatccactagcccgccccgactctccatcgggcctggaggtccctgaccgcggggccg

SEQ ID NO: 249626 - DNA, 122 bp, Homo sapiens
aggaaggaaggaagagaggaaggaaaggggaggggaggggaggggagggggggatggttacgggtctaaaaataatttgggtcatgaaagagacttgaaaagaaaatgcccatttaggccaa

SEQ ID NO: 249627 - DNA, 122 bp, Homo sapiens
ttaagtaacaagggcatgaccccttctttgacacccataacccaaggcactgtaaacattcgctattattaacgctgtgttggactcaaacttgaatgcctgcctgttccatttagtgtcac

SEQ ID NO: 249628 - DNA, 122 bp, Homo sapiens
ggcgtgacagtttatcatgaccgtgttcaggcaggaaaacgtggatgattactacgacaccggcgaggaacttggcaggtaaagggggtaccagaagcgtaccctcctggattgtggaaatg

SEQ ID NO: 249629 - DNA, 122 bp, Homo sapiens
caagccaatgacgctgcaacgatggaatttacagcccggtagagccgggcagctgccaagcggcggatcatcccttgtggtcctagagcccggtggatttcagcattcaaccagcgtggatt

SEQ ID NO: 249630 - DNA, 122 bp, Homo sapiens
atggggatcaaatgagattctcagatagagctctgagcccagcacttggcacacatgagtcggtaaatgcgtgctccctcttctgttgggactgccatattcttcattacgaccccagcccc

SEQ ID NO: 249631 - DNA, 122 bp, Homo sapiens
caccgccttacagtgttcctggctcctcagcaagcacggtcgctgctccagcgggtccggcgagccaacaccttcttggaggaggtgcgcaagggcaacctggagcgagagtgcgtggagga

SEQ ID NO: 249632 - DNA, 122 bp, Homo sapiens
ttccggtggggaacgaggatggcgaccctctgtaaagctttacattcctgagggcgataccggcctctggacactttgggattttctgcctgtacctcttccaaagtgagatctggtttgaa

SEQ ID NO: 249633 - DNA, 122 bp, Homo sapiens
gttcattacgaactcaaatgtcttccccacccgtctgaaaatgtacgtcggacaggagtccgtgcgtgtcaacatgcatgcttcggcgacctcacctcgtagtctggaagggaagatcagct

SEQ ID NO: 249634 - DNA, 122 bp, Homo sapiens
tattttgggccagtctccagcaagcatttggagagcgcctcagaactgcagatgaagccccggattgactttattgggtgatttcagcacggccaaatatttgtagtgtaaagaaatcataa

SEQ ID NO: 249635 - DNA, 122 bp, Homo sapiens
acattccaccttaaaagatcaggtcccctcctccgctgggagctcaggacttggttcggccgaagcatttattcccctttaaagctataagcctgccttttcccattggcgatgggtccagg

SEQ ID NO: 249636 - DNA, 122 bp, Homo sapiens
acctctgagcacacaggccggcctcagggaagggttgttctggctgtgggaacctgaactcgaaatggcctccgttcgctgcagacactgcccgcctgcaccggggactcagcccaggcagc

SEQ ID NO: 249637 - DNA, 122 bp, Homo sapiens
gccacagccacggacactgcaaagaaccagcccctgcacagccacacacagggttgggggcggccctcagtgggcttgaagcggcaacgggcagtagtgtcttcagacctgaaaattaaaga

SEQ ID NO: 249638 - DNA, 122 bp, Homo sapiens
tctggacacattttggcgacccagatgggacatttgcctatcaccaagcggtgagacaatcgccaagcggtgagaccatcgccgagcaatgagaccatcacctatcgccaagcagtgagtac

SEQ ID NO: 249639 - DNA, 122 bp, Homo sapiens
gcggaagaccgctggggggctggctctgcactgcacacctgctgggggctttctggataccgtgaaactttgtctcagattatgaggtctcagtatttgcatttggttggggattttgatgt

SEQ ID NO: 249640 - DNA, 122 bp, Homo sapiens
ggtgataattggatgtgttctcggaaacctggttgtttaatagtttgtggcacctcccctcgattttgctcccgctcactccatgtgacgtgcctgctccccctttgccttctgccatgatt

SEQ ID NO: 249641 - DNA, 122 bp, Homo sapiens
gagagctcctcatcttaacttctctgctatactgcctcttatatacagatacacagtacacgtggaataaatattagttgaaacaatggctggatgcatagctctagaagaacaaatacatc

SEQ ID NO: 249642 - DNA, 122 bp, Homo sapiens
aggaaaaggaacaaattaacctgggtgggacagtcattaaatgccaagcctagagttgggcgtgtcttatcattcctctcaatatcccttagaagatagacattatttttcctattttacag

SEQ ID NO: 249643 - DNA, 122 bp, Homo sapiens
ctttcaaagctgatcttcagaacctcaagactggcagaaagcaggctcccagctgcagctcggccacaatactttgcaacaggcaaagttcccacataggtgcaaatgatgctttaagagtt

SEQ ID NO: 249644 - DNA, 122 bp, Homo sapiens
accaaattaagaattgtgtttagaagtttgaagtcagtccaagtgttgtaaagattaaaacgttgttttgaagatatgctgtgtcaataaacaaatatggagccagagcaacacaatgtgac

SEQ ID NO: 249645 - DNA, 122 bp, Homo sapiens
gtgaataaggagctgaggggcggaggaagcgggagcgagggagggaggaaaggagggagtcgccaccttaaatccacgccggaccgggaacctgcagcccacaacctgatccctgccctccc

SEQ ID NO: 249646 - DNA, 122 bp, Homo sapiens
gtgccacgggggagtgcctggagcaggacaggctgggcgctgcacagcctgggccctgagcgactgcatggacctaagcagcgctcccctatgccgagcatgaggccgggatgtgactccac

SEQ ID NO: 249647 - DNA, 122 bp, Homo sapiens
taaataaaaaaaacacaaacattagcaactagttggctagccataattcctcccttgtttcgattgccagttagaagcaatttttatttcactggttatttgcaagagaaggggtaaaaaaa

SEQ ID NO: 249648 - DNA, 122 bp, Homo sapiens
caggtgccgcgcgcaggaggggacacgcgtgcgcaaaagggcggtgggtggggcgcgactcgtcacggggagggcggggcgcgcgagggaggagggcgtggtgggggcatcgagaagggtga

SEQ ID NO: 249649 - DNA, 122 bp, Homo sapiens
acctctgtcctcagctcatcaagaagacaactttgcaccctgagaaggcagaggcgtgaccgggccccaacactgaccccacctctgaatgtcttgtcttctcgactggcctgttcgtgatg

SEQ ID NO: 249650 - DNA, 122 bp, Homo sapiens
cgaaccgacctggagcccgaggggaaagatgctcgactctcttgggggcaccggagcgggcgcaggagaggcctgcggggtgcgtcccactcacagggatcctctttcagttcatttagata

SEQ ID NO: 249651 - DNA, 122 bp, Homo sapiens
gaagcacgggactggagggaccaaagttccccgatggcggcccaggggtgcgcggcatcgcggctgctccagctgctgctgcagcttctgcttctactgttgctgctggcggcgggcggggc

SEQ ID NO: 249652 - DNA, 122 bp, Homo sapiens
gtgggaacttccttgtaacttaggtgggtcaatttctccacctggttgcccatcacgctgcggacacacgttcacaccgccgcaaggggagaaagcgaaaccaactccagggtcatttgcac

SEQ ID NO: 249653 - DNA, 122 bp, Homo sapiens
ctgatccccgagatgaactcctgcacccccgaggagggatcatggccgttctgctgcattcgaagttctagcagccgccgcctcagctcagccctgtgcttctcaggggggtccacggccca

SEQ ID NO: 249654 - DNA, 122 bp, Homo sapiens
cctgcaacggctcgcgcccgccggtgtctaacaggatccggacctagctcatattgctgccgcaaaacgcaaggctagcttccgccagtactgccgcaacaccttcttatttcacgacgtat

SEQ ID NO: 249655 - DNA, 122 bp, Homo sapiens
ccaacacatgcgtggctcttgcaatgatgtgaatctctcactgaattcaaccttgaagtgcgaatccatgagctttttaaccctgagcaattgttacaagctaactgaaatttgctgctttt

SEQ ID NO: 249656 - DNA, 122 bp, Homo sapiens
ctgacccccgagcagtacgaggtctacatgtaccaggaggtggacaccatcgagctcacccggcaggttaaggaaaagctggccaagaacggcatctgccagagaatcttcggggagaaggt

SEQ ID NO: 249657 - DNA, 122 bp, Homo sapiens
attgtcacaagctatgtcaccatgcagaggacccccccccacccatcccaggaagctgatcgagggtctttaaagggctctcttttgagggaaggggacacctcagagcacctggcacttga

SEQ ID NO: 249658 - DNA, 122 bp, Homo sapiens
atcctggtccctgccagtggaatctggaacaccagccagttgtgcgcactatgccctcagcgaggccgcagctcaaagacgagtgagacaagacccaccacccctgaagagctcactgccac

SEQ ID NO: 249659 - DNA, 122 bp, Homo sapiens
cattaatctgaccacaagctgactggcaggtgctttaaccacaaggtgggcatcctaacgcgagcgaccgttttgaggcagaagcccgatggggcccgtgtccgagcttagggaggggccgg

SEQ ID NO: 249660 - DNA, 122 bp, Homo sapiens
ggttccagttgtggaaaaggaatcaacgatcctgcaagagaaagagacacgaggactccgcgctacaaagcccgctgtaaaccttaggtgtggagctgggcggcgtcccagccgttggggtg

SEQ ID NO: 249661 - DNA, 122 bp, Homo sapiens
gagtcccagcgccgactgcctcacaaataatggcccccagcttctccgcgaggagaggcgcgtctgatgttttgaagccacgcaagagggtttgagccgggggactcctcctcggtgcttgc

SEQ ID NO: 249662 - DNA, 122 bp, Homo sapiens
atgtggttggtgtgtgtcaggatgagagggccacgactggacccacgtgtggctgcttcccgggtctgccatgtgctttgctagctgcaaagcgtttcctctagaacagctaatcctgcatg

SEQ ID NO: 249663 - DNA, 122 bp, Homo sapiens
ctctccagttcacctctctgctgagagtcatttctactgcttaataaaattctcgcctggcgcggtggctcacacctgtaatcccagcactttgggaggccgaggcgggcagatcatgaggt

SEQ ID NO: 249664 - DNA, 122 bp, Homo sapiens
cagttgggtgagcctggactagtcattcttgctggaaactcaatttccccaggtggaaaacgggcccctcccggaggctggaaaaatattttgtgtgggtaagagtgtaggttctggaatca

SEQ ID NO: 249665 - DNA, 122 bp, Homo sapiens
ataatatattttccttttcagtataataccctctgataaaacacagtgttttggctgtggcggttcattgagctagaaattaagtcctgtaagtctatgtacacatcccagcagggttcttt

SEQ ID NO: 249666 - DNA, 122 bp, Homo sapiens
cacacggaggccgtttcccatgtgtctcatatttaaaagtcatcaatcaagctagcaaatcgttaaatgaaatatgctccatcctcctaccttgttaaatacatcttcgaaacaacctggaa

SEQ ID NO: 249667 - DNA, 122 bp, Homo sapiens
tcggccagggagtccatggtcgctcccgaggatgctgggggtcagccacccactagcctccggcgctccaacaccactcgaaattccccgcgctaccgcattacgtcagcagcccgcgacgc

SEQ ID NO: 249668 - DNA, 122 bp, Homo sapiens
tactgggagccactgcgcctgttcccctgctttaaataaagctcagtttgtggacccgaacgtctgaggaatggtaaaaacttgctgtcggaaggtgaacttgggtgcctagtttcctggag

SEQ ID NO: 249669 - DNA, 122 bp, Homo sapiens
ctcctaccggaagtgaaaccgaagaaaacgccacgtcgaaggcgtgggttgccgtaagtgcgccgtcgtcacgcgcctagcttccggcgatgggtggtcctgggatccggaggggaggcggg

SEQ ID NO: 249670 - DNA, 122 bp, Homo sapiens
caagggcgacgtcatgggggggcctgtacaccccgggcaggaggcgggccggtcacaccgcggcacgcatgctctcctggcccgacttttgggaaaaccggaagcagggcaaggccgtccca

SEQ ID NO: 249671 - DNA, 122 bp, Homo sapiens
ccgctggggctgctgggaagtgtagtccgctcgcgggggcggggccgtggccggtgggggcggggcgggagcgcggtcacccgcacgtctcccagggcgcgggccccggaggactctggcgt

SEQ ID NO: 249672 - DNA, 122 bp, Homo sapiens
gctgacgtcacaggcagcctgtagccctgacatggggacaaatagctcccccagcctgaacgacttcagcatcacccatgtgtggaagagctgttcaacggtcgccaccacagataattcaa

SEQ ID NO: 249673 - DNA, 122 bp, Homo sapiens
tccaggcctcgcccttccgcaccgccccaaagtctgacttgcaggctcgggccgcagacccgcaggcttcagaaggcagccccagctcccccgagaggtggccttaggtcactcgcaaaaac

SEQ ID NO: 249674 - DNA, 122 bp, Homo sapiens
catccgtaccgaacactgccgcgccccgccccctcacacagcccggcgcccgcctacccccgcaacgagagtagagggcgcatgcgcaatgacgttcgcccttaatttctcgccccttaccc

SEQ ID NO: 249675 - DNA, 122 bp, Homo sapiens
cagcggcgcccggtgcccgcagaccctcgcacaggctcttcgaactcacccgggtttcgccgactccaaagaaagcgcgctccctccgagagcgctcccccggctctcccgccgcgcgctcc

SEQ ID NO: 249676 - DNA, 122 bp, Homo sapiens
agggtatatgggtgtctgcttttcggggatgagtagagggccaggtgcctgccccatgtgcggctgagtgccttgcatatgtgtgtccctgtgtactcatgtcaccatgcagcctgtgtaag

SEQ ID NO: 249677 - DNA, 122 bp, Homo sapiens
ggtccgcgtcgccctggggtccggaaggacgcggagggaggtgtgagggacggcgggacccggatccctaggactccccctgccaatctggtaatgacttcttagtgaccactgtctgctcg

SEQ ID NO: 249678 - DNA, 122 bp, Homo sapiens
cttccaaactggaagcgtcaacaaaggcgtgggaggtctaaccgcgcaggcgtgcagcttcggcaagctttacaattccaacagcgcgtccaaaacgtggtccctgactgagacttatttta

SEQ ID NO: 249679 - DNA, 122 bp, Homo sapiens
ccgtgctacgttcggagctcgcctccggacctgaccaaacgatgcggcccaaacaagcctcggggcccaccccggggctccctgctgactgcccctgactctgggtaggactgcccagacga

SEQ ID NO: 249680 - DNA, 122 bp, Homo sapiens
ctgtctgtctgtaggtggaccaggtgctctgaggctggcgtacagacacagcacgtgcgacggagtggtgttggtccgacaccacggggcatggggatacgtgtgcaaccaggagtggacgc

SEQ ID NO: 249681 - DNA, 122 bp, Homo sapiens
aacttttgtcactctgccatgaaaagcatccaggcgtccttgatttcgacattgcgtgcacgctcagccgagctcatcagacgggcggttgtccccagagcccgcgggtagcttgttcccgg

SEQ ID NO: 249682 - DNA, 122 bp, Homo sapiens
ggcccagcagtgccggtgcctgcctagaattcaggatggagattctgagaaccctgaccacggcataggggcttggggtacaaaggaaagaagaggcactaggttctcagagatgctggtgc

SEQ ID NO: 249683 - DNA, 122 bp, Homo sapiens
acttaaaaggtgtttcaaagaaagaatctgggcgctttgctctttatagtcacctgcctccgagggagggagctctcgggcttgaatgtgcccaaggttcaacctctacggtaggaaatgcg

SEQ ID NO: 249684 - DNA, 122 bp, Homo sapiens
gcagaagcaaagatcccgggtgctggttaataagcttttccaggagcgtggttgtctgctcggccgtcattaatttgaatgctcattaccataatgtagaagccaagctggggtcctgcgcc

SEQ ID NO: 249685 - DNA, 122 bp, Homo sapiens
agaacagaaggtatgtatagtgtaccatttgtcggagagagaacctgaataattagtatacgaatagaaaaaaaatctggatagcaaaatgttaatagtggttatttctgggagatgagtgg

SEQ ID NO: 249686 - DNA, 122 bp, Homo sapiens
ctttgtgggccttcttggaaaacaaagtggtcaatgatgattcctacacccagtcaaccccgcacacccctggagaaactcagaaccctccagcctccttttcttctctctagaattaaaga

SEQ ID NO: 249687 - DNA, 122 bp, Homo sapiens
cagcacgcacacctaccgcccccgcatccctaccctgtacgcgcagccacagcactcgcccgcgtccgcattccacaccctaccccgcgcgcacgtccatgcctagcgcctgcatccccatc

SEQ ID NO: 249688 - DNA, 122 bp, Homo sapiens
gtccggggaggagatgtagcacgggatcatggggcagcgcgtgatctggggaggggcacacggagggggacggagtcagggacccaggaaggggtgggcagaggctgctctgggggcatgtc

SEQ ID NO: 249689 - DNA, 122 bp, Homo sapiens
gggcacccttttaaatgtctgttttcgatatatatcttacacttggggtcactgttgattcgtgctcccatgggagaaaatatagaaattatgatgaagataaggggcagttttcattttca

SEQ ID NO: 249690 - DNA, 122 bp, Homo sapiens
accccagcaacgcggcgcggccagaaccagaatgcaataaatagaggcagggccaggaggcggagggccgggatggtgctagctttctgacgccgtctgcggcactgtgggttggtccacac

SEQ ID NO: 249691 - DNA, 122 bp, Homo sapiens
atcgggcggcgggggctgcagagccttcatctcttcctccgtcccgggatgtcggagagacggcagcccagcctccgccaccgcaaagctgcttaacgggcagcgcgagtccctcgggcacc

SEQ ID NO: 249692 - DNA, 122 bp, Homo sapiens
tatgggaagtcattgatttggactgagctcctgcactaggctgtttacttgtaaggtctgcgttccaggaaatcaggagagatgatagccaaatccattaagccaaatggcgtctgcttttc

SEQ ID NO: 249693 - DNA, 122 bp, Homo sapiens
aagtatttcctgaccttgaccaaagtaattcagcttcctgagcctcagtttctctacctacgaagttgggatgaaggtatctctctcattggagaggctgaagcattaaacacagggatgcc

SEQ ID NO: 249694 - DNA, 122 bp, Homo sapiens
ccttttcatgcagcctgcggagtgtacctctatagctgtcatttcactcctgtgttttctcggccttgggcgaggatcccatgctgctggtaatgaaagctgcctgttccctcggttgtttt

SEQ ID NO: 249695 - DNA, 122 bp, Homo sapiens
ggagcggggcccagcccctcatcagggcagatgtggtccctgttttcatcctacctccagcgtgttttcttctgcagtccctgagggacacagtccccaggcgccatctctttgaggctttg

SEQ ID NO: 249696 - DNA, 122 bp, Homo sapiens
tagatgtaccttgcttccccttcgccttccaccctgatggtaagtttcctgaggcctccccggccatgtggaactgtgagccaattaatcctcctgatatggcttggctgtgtccccaccca

SEQ ID NO: 249697 - DNA, 122 bp, Homo sapiens
aaggagcagcccggggaagtccagagggcgcccggcatggcctcgaaggctggacacctgcggggccctttccgcattgcgtgtaaaggggaaattcggaacccagccgtgggcctttccgc

SEQ ID NO: 249698 - DNA, 122 bp, Homo sapiens
gtggcttgggatctctccgggttcttccttgcgccgtccacgccgcactgcccacgagggcgtccccgcccgagggacaactcaccgcccggggcctccctgagcgttcccttccaccatct

SEQ ID NO: 249699 - DNA, 122 bp, Homo sapiens
tccatcatatttctcctcttagactttctgtgttcatgactcattttcatccatttctgtcggagaactgctttgggaggagcagagcgaataagtgccatactccggtatgggcctgtgtg

SEQ ID NO: 249700 - DNA, 122 bp, Homo sapiens
gcgttgtctgccccagcgggccccgttacgcgctaccttgtgacgtcaccagggaagaggcggattctctcctactacagaaagacgtctgctgttttgattggctaggaaagacgtccgtt

SEQ ID NO: 249701 - DNA, 122 bp, Homo sapiens
ccccgcactcggggtcccctgctcaccgccagtgccccggagggcgtcgatgaggaagcccgcctcctcctggatgcgctcctcgatgcctcgcttgcccaccccgaagtcccgcagggtgg

SEQ ID NO: 249702 - DNA, 122 bp, Homo sapiens
tggtcctctctttacgaacaaagaaacaggttaagcactttccggaaggctggtgacccacgagccctgtgtcacacttctcagtctgcctggggccctagctctcagcctggacacttggc

SEQ ID NO: 249703 - DNA, 122 bp, Homo sapiens
cctggaggtgctgggaggccctgtcggaggaccaaacacaagcaatttttaaaagctatgcgtgctgggactttcaggtgtctacaggaatagaaactactcctgggttttttggatgattc

SEQ ID NO: 249704 - DNA, 122 bp, Homo sapiens
atttgaaataactaatattgaaagaagacagggaactttcttttaatgccatggcaaagacgaagcgaagagccacacttcacaccttgtaaaaagaatagccctgttcaacaacgctgcgc

SEQ ID NO: 249705 - DNA, 122 bp, Homo sapiens
tcatggctttgcagccttcactctttagggaaggtctcccagctccccctgtcctagggccgccgcccccacctctactccacgttattattaatactggcgatttacagtggatgacacgg

SEQ ID NO: 249706 - DNA, 122 bp, Homo sapiens
tctatacagaatcaacaattataacaccacctaaaagatgctctgtccctgtcttccttacgttaacttttcatttcaatgtcaatttctgaacagcttcttccctcccaggtggggacaga

SEQ ID NO: 249707 - DNA, 122 bp, Homo sapiens
accaaactccttatcctgcaccaggccgtctcggtcatcctgaatttggagcagcaagtgcgagagcggaacctgaatcccaaaacagcctgtttgaaacggcgagaagagaaggtgtcgcg

SEQ ID NO: 249708 - DNA, 122 bp, Homo sapiens
gctttccaagtttacccacctctaactcggaagaaggcaatttaaactaatttggtttaccggaattcaaatacgtacaattcaacataatgaattgaactgaaattgaacacctgcttgcg

SEQ ID NO: 249709 - DNA, 122 bp, Homo sapiens
acggccgggaagtcgtaggcctggaagccttgattgctgagcctcacagcctctgtcaggcggctgcggatccagcggtccaccaggctctcatggcctccgggcttggggagagagggtgt

SEQ ID NO: 249710 - DNA, 122 bp, Homo sapiens
cgccagtgtttggtgtgtaacgttcttccgtctccatgggaacgtcaggcggccaaacaccgggccccagcaacaggcttctgattggcccgaggcttccaaaggcggagcttcgtctcccg

SEQ ID NO: 249711 - DNA, 122 bp, Homo sapiens
cccgttgtcctcaaggctctgtttacaggagacgggagccctggttacaggagaggaacccgagtgtccgggctgaacctcctcgtcacggcttccaggaagcccccactcccccgcccctt

SEQ ID NO: 249712 - DNA, 122 bp, Homo sapiens
ggtctgatgaaggcaggggaccaggggtgctgagctctgcggtctgagatgcctggttcccgtgatgcctggaaaagttccccgctctgtggctttggccggccctgccatgctgaccacgg

SEQ ID NO: 249713 - DNA, 122 bp, Homo sapiens
tgaggtaccaagacctgctcaaggttccaggtttagtaagtgttagggcagaggcaagcccgggcagcctaactccagagcaggagcctttaaacactgcactattcccccatagccaaagg

SEQ ID NO: 249714 - DNA, 122 bp, Homo sapiens
caactgggcactgacctgaggattctatttatctgctgtggttcctttactggggttctccgctgtgggttctctagtccggatgcactagctcttccctgagtcttgtttgcccctttttc

SEQ ID NO: 249715 - DNA, 122 bp, Homo sapiens
ctccctgcagccgtcccagaatttaacccttcgatgtccttatccaccagccttagggcccgtgccttgtccacctcctatcccgaaaaccctggccctccttggcacataatacacgctca

SEQ ID NO: 249716 - DNA, 122 bp, Homo sapiens
gtgcttttacttcgttgtgtggtttccagcagcatcacataaatgcacaagcgcactctccgtagcttggaattgtaaaggttgcattttccccctttcaagtattttcctgccaacgtact

SEQ ID NO: 249717 - DNA, 122 bp, Homo sapiens
agagcaagactccgtcacaaaaaaaaaaagaaaaaagaaacaccagttttctgatttcaccgaagacctactgcctcagaaactatgagggcagaacccagcaatctgtgctttctttcaca

SEQ ID NO: 249718 - DNA, 122 bp, Homo sapiens
cctgcggaaggggctttcggagctgcagtcgaatcgcagggaaagagaaagtgttcgaaacgctgctttgacacagtgaccttgtgtgagccctagctgcacacaccccccccacccacgcc

SEQ ID NO: 249719 - DNA, 122 bp, Homo sapiens
atgccgaggcgaatggggtggggggaagcgcccgcggggcggggagggaccctgcaggcgcggactccacacccagcctctggccagcgtcactcggcttgctgtgtcctcgcaggtcgcag

SEQ ID NO: 249720 - DNA, 122 bp, Homo sapiens
ttctcttctttacagtgaaaattccagaacagatggaacacatcttttcccacttcagagcgcgaggggggacgaggagaagcatcctctgtgtctcaggaagctgcgtcattagttcgggg

SEQ ID NO: 249721 - DNA, 122 bp, Homo sapiens
cacaccagtggaaggctctgagaacatagcttgccagtggctctgaaccctcccagaagccgcctcctgccacagccctgtccttgaccaggaagggaactcttgctaaatacctcataggc

SEQ ID NO: 249722 - DNA, 122 bp, Homo sapiens
tgatgtaaaacctgcacgtcactgagcaaatctagcatctgctctcgtccagcttttgctcgcgagcaaggccttcctctcccagcactgcctgccacgccatgagcacagtgtgctgcgca

SEQ ID NO: 249723 - DNA, 122 bp, Homo sapiens
aaagatattgtgtaggcatctaggggtcgatctggaggaggaacgcagcgcatggaggggcgctggcggaaggtgccctgtcttgtcccttgttgacatttgtccctaaagagacccatcac

SEQ ID NO: 249724 - DNA, 122 bp, Homo sapiens
tctgtccccaggccttttcgcagtcacggcttctccggatcctgtgttgggggaggtggccgggacctatctcagggcacccagtgttcttccgtcccaaattcctcccattggaaactgtg

SEQ ID NO: 249725 - DNA, 122 bp, Homo sapiens
gcccacatggatgtgtgcacaaacaagcacagaggtcctcagtggctcactcctggtggccgtgtgctgtgggctgggaatggccatactcatttctcagagcttttgagttgtgtgtgttt

SEQ ID NO: 249726 - DNA, 122 bp, Homo sapiens
ttacattcctcttgacacttgtcatttagcatcctaagtatgtaaacatgtctctcttcacgattcacaaagtggctttggaagaactttagtaccttcccatcttctctgccatggaaagt

SEQ ID NO: 249727 - DNA, 122 bp, Homo sapiens
cctaactagctgagtgaccttgagcgagttgcttaagctctgatcctgtttgtgcatgcgcgtaatgaagatagcaacaccttaagcccagtggtgcttaaggcacgtgagggggtgggtat

SEQ ID NO: 249728 - DNA, 122 bp, Homo sapiens
tgacctcgagctcggagtagagtcaaggtggaagacagactcaggcaagaagcccggcaccgtctgcttctcagctgcagccagcaaatgacaaagctggcaaaatcacggcacgacaagtg

SEQ ID NO: 249729 - DNA, 122 bp, Homo sapiens
tgctctgaatgatcttgatactcattttgatatgtttttggtccccattgattttgaaaacgctaaacaccacaaatacttgacattcggaagggcaagcgagggattaaaactcaatctct

SEQ ID NO: 249730 - DNA, 122 bp, Homo sapiens
ccgcctcagcctccccgagtgctgggtttacagggtgagccaccatgcccggcccgcctgcgtctcttaaaggcttccaggatgtggctgcgttgggctcctagggccccgttctccaaacc

SEQ ID NO: 249731 - DNA, 122 bp, Homo sapiens
tataacaggcacataagaagctggactacaaggaagcatgagctaacaaatgccagacttcggaaggcagcgtagtttgagaacatgggattcagagtcacaaaacccacatcctagtccca

SEQ ID NO: 249732 - DNA, 122 bp, Homo sapiens
tgggatatttttattactctgtgagactcctaccccactttacgtctgtttgatagggatcggctgggggataaatattttcggtgccaaagctgacctgtatttcattcacttcatgttta

SEQ ID NO: 249733 - DNA, 122 bp, Homo sapiens
cagacagacccctcgctggggactaggagacacacggacggggagtgcggggcaggcggacggggagcgcgaggcaggcgcacggcgcggcgcgcggcgttaggcggcaggtgcacgggcgg

SEQ ID NO: 249734 - DNA, 122 bp, Homo sapiens
aattcatgtttgataatacagcaaatctgaaatttttgtcagttgccacaatttggataacgatcgctggagtttaccctacacagtgatctgaatcagattattttggatgctttcctttt

SEQ ID NO: 249735 - DNA, 122 bp, Homo sapiens
ttcccgaggcctcgaagacactgtgtgggagcccttcgtccaacacaaggtattaatatccgaggggacccttagcaacagctctgacatctgctctgttactatgacacgggaaacacgag

SEQ ID NO: 249736 - DNA, 122 bp, Homo sapiens
acccggagcgggaccggaccgcggcgggctgtgcggatgccaccagggagacgccgcgagcggccacgccgccccgctgaccggtctccacagagaagctgcgaagagcaccccgccaccct

SEQ ID NO: 249737 - DNA, 122 bp, Homo sapiens
ggcggtggggggggggtggaagacccccttcgccccgcagtgcaccactcctccccaccgcgcttccgaaggagacccttgactagcgcccgcatactgtcgagggtatggagatgaagggt

SEQ ID NO: 249738 - DNA, 122 bp, Homo sapiens
cccagagaagcttttcattgggggcctcaacctcaaaaccgacgagaaagccctcaaagccgagtttggcaagtatggccacatcatcaaggtgttcctgatgaaagaccgaaaaaccaaca

SEQ ID NO: 249739 - DNA, 122 bp, Homo sapiens
gagcctgtaagtccctgtgagggctccggactttgtgccgttctccgcacccctcaggcccggtggagtgcgtgacccctacgccgggcccgcatcattttggctccacagctgcctttact

SEQ ID NO: 249740 - DNA, 122 bp, Homo sapiens
gggacccaggcccacgggagacgtccgcggcagtggcttaccagtcggtgtgcggctcgtcgatgaccagcagcaccctggaggcggctcccccgcggcctgcgcccccagagccgccgccc

SEQ ID NO: 249741 - DNA, 122 bp, Homo sapiens
ctcaccactctcagtctctgtggtacacagctggctctgtggaaactccttaccgacatccgtgaggtaacagacacaagacgttacaaggatcacaccctgccagccttgtggttgactgg

SEQ ID NO: 249742 - DNA, 122 bp, Homo sapiens
ttgctgtgcatccagttttgggctcctcaatcatctgcattactcagctaggcagagaaacggaatttttaattaagggcttttcaaaactgctgtattatttttacaatttgacttagcag

SEQ ID NO: 249743 - DNA, 122 bp, Homo sapiens
acgggcacacaagagaactacagccaagagaatcttggccctgacttcagcattcagcaccgtggggacctagccttggaagcctgacagagaatctataccaagagtcttgtctgatgagg

SEQ ID NO: 249744 - DNA, 122 bp, Homo sapiens
caggccccgtcctcccacccctcctcactcggcaaattcatactcatgccaggcatggcccggcgcccactccaggcatctctctgaccccgcatgcctgccctgggacccctccctaccgc

SEQ ID NO: 249745 - DNA, 122 bp, Homo sapiens
gttggaatactggaggtaggggagatagaaaaaggaagaagcctcccgcatctccagcggcgaagcacctggaaaggtgagggcgcacgtccccgcccaccagagcccgctcccggcgcggg

SEQ ID NO: 249746 - DNA, 122 bp, Homo sapiens
ggatcatccaaaaacacgttgacacttccaagacactggcacggggtccacggagttttgcgcgtaaaattttaaaaacccttcctacggtgatgtttaaggccaggagcattcatttctca

SEQ ID NO: 249747 - DNA, 122 bp, Homo sapiens
cctcctcgaccagcagacccgcgctgcgctccgccgctgacatgtgtgccgctcagatgccgcccctggcgcacatcttccgagggacgttcgtccactccacctggacctgccccatggag

SEQ ID NO: 249748 - DNA, 122 bp, Homo sapiens
ggtgttgtccacagggaacaccatgaccgtgtcctacatgtcagggctgacgctggggtccgccgtggcctactgcacctacagcctcacccgcgacgctcacggcagctgcctgcacgcct

SEQ ID NO: 249749 - DNA, 122 bp, Homo sapiens
gatgattgtaggaagtgatgtgcttgctcttcctcaacgggaaagggggtctgagccaagcggtggctcccagcaaccacactgtgaccataagaacagccagctgcaaaacaaagacaaga

SEQ ID NO: 249750 - DNA, 122 bp, Homo sapiens
tttctatgtctatacatgtttagctaacattaactcagctagccgccccgtggcattttccgtgctagtcttcattttttccctctatattttttctcgtctcgcttttttagaaatgttat

SEQ ID NO: 249751 - DNA, 122 bp, Homo sapiens
ctaagtaagttggattttgagttttttagagaagggctctgggactcctttgcgtagttccggggcatggcatctagatattttttgaatattcatgttgttcacatagttacgtgttttgt

SEQ ID NO: 249752 - DNA, 122 bp, Homo sapiens
ttaggtctggcctgtgcttatcagccattcctggtttttcacaaagccaggctctggcagcgctctcacatttcagcaaggcagctttatgccatcctagccctctgccttagccaggtgta

SEQ ID NO: 249753 - DNA, 122 bp, Homo sapiens
aggaaaatctgtcaaaagtgccattccgctggtgggaagtcctggaagacggttttctcgcgccctcgttctccctccaggtccgtccccccggtcccccagtacatctcccctaacgctca

SEQ ID NO: 249754 - DNA, 122 bp, Homo sapiens
tcagaagggcagggaaggaggagccggcgcggcgccgcgacacgtcccacagcctcagagcgccgggaccacaactcccggcatgccctgctttagcccgcgcgcggcctgcgcctcccgcc

SEQ ID NO: 249755 - DNA, 122 bp, Homo sapiens
ctgaggtgacctgcctgcctcggcctcccgaagtgctgggattacagtcgtgagccactgcgcccggccttacaaagcactttcatgggtgctgctcattcagtggtgtggtttagatgtct

SEQ ID NO: 249756 - DNA, 122 bp, Homo sapiens
gggataatggctaccacttctagggtgtctactatgtgccgggcactgtactagaaacttcgcattgctcattcctagtcctcacagcagccctgcaaggtgggtgggcactctgaccttat

SEQ ID NO: 249757 - DNA, 122 bp, Homo sapiens
ctgtgaggcacacacgtgcgtacacatacacacacacatacagctgccaccgagaggaaacgctcccacccaccgcccacatcagccctcccacctcgcccctcgcccagccttacccagta

SEQ ID NO: 249758 - DNA, 122 bp, Homo sapiens
caagaatggctacccacgcccacaaacagagccactcacgtaactaaaaatggttggctccgggttccaccactggagtcactttctgcccaacttcaaaatggcgcccactagcttcacca

SEQ ID NO: 249759 - DNA, 122 bp, Homo sapiens
agaagaagcaccttgctccaccatgtgaagaaagactccagtaaaagagaacatgtgagccggctctttgaagcaggagaaagggctgactgagctagttgactaagtggagggagaaacac

SEQ ID NO: 249760 - DNA, 122 bp, Homo sapiens
gaaggaagcaggatgtgtttggacactttcatcttttaagctatgccatcttttcagtggcgctttgggagaagtatgtacaggcctttttgagccatttaacgccatttctctacactgcc

SEQ ID NO: 249761 - DNA, 122 bp, Homo sapiens
ccacttattccagttaactttcaagatatctaccatactctctttggttttcatctccctcgctggctgctccttctctaaaccatgaactagaccatgcagatatattattttcatttata

SEQ ID NO: 249762 - DNA, 122 bp, Homo sapiens
gggcactcagctgaaggggagaaaggggcgaatctccagtccccatcctttctccctccccgccatcacgtgccaggcactgcctttgcccaggggctccttgtgattgtaacagaaggccg

SEQ ID NO: 249763 - DNA, 122 bp, Homo sapiens
cccctgtcacttggtgactggtggtctcttgttaatttcccacgaagcctgtcaggtccccgggtggggtgaaactccagctgcaggggcaccggcccttctccctgattcctgcaagacgc

SEQ ID NO: 249764 - DNA, 122 bp, Homo sapiens
cgcgcggggaggcgcgggcgccgctgtcaccgccgccgccgccgcgcccgccccgcccgccgccccctgcacgcgccttccccgcgccctgcacacgctgctcctgcacccgcacccgcagg

SEQ ID NO: 249765 - DNA, 122 bp, Homo sapiens
taaaaaaaaaaaaaagccaactgtacagagtggttgggcgcgatgggtgggtgggctacccggaaagcagcgacgatagaaattagcgggagctctagttcttgtaagtgactttgttggtt

SEQ ID NO: 249766 - DNA, 122 bp, Homo sapiens
cgggagccagtgtctgtaaactccaccatcgcgggggccggtccccgtaaactccaccgtcgcgggggccggtgtccgtaaactccacagtgcactcacagtgcacgcccagagagcagcag

SEQ ID NO: 249767 - DNA, 122 bp, Homo sapiens
attccttagaactatagctcctctataggtcattcaacatgtgatgcaattttttacaagcggtaatttttttttttttttttgagatggagtctcactctgtcacccaggctggagtgcag

SEQ ID NO: 249768 - DNA, 122 bp, Homo sapiens
atccaaacatctgagaataaaagtaccatactctttgccaagtgacttgaaatattgatacgtataatttcaacatgtaaactggagacagtttttctaggagaacatctaagctaaaagca

SEQ ID NO: 249769 - DNA, 122 bp, Homo sapiens
tggcggcggctgcgcgggctcggccggccccaccatcaattaagcgaccgcggggtccggcgagcggcagcgtgtgtggaaattaccttttgatttcttaattacattgtcctcacctgcag

SEQ ID NO: 249770 - DNA, 122 bp, Homo sapiens
ccaagggccactccagggccaagggccctgcgtcctccctgcatgctgcactaagaccctcgcccacctctacatgggaactccactccagccttcgaggattccgactccccgccctgagg

SEQ ID NO: 249771 - DNA, 122 bp, Homo sapiens
gcggtgtcaccagctgagcggggctcacctccctgactgggggtatcggcaactggagatcgtcggggagaagctgtcccggggctaccacgggagcacggtgtggaacgtggaggagcacc

SEQ ID NO: 249772 - DNA, 122 bp, Homo sapiens
taagggggatatggggcttctctggggccaactgacccatgccctagcctgcagacactgcggcagcagctgcttccagagtccaggaaatctggtgacactattcttattcgtggtttggc

SEQ ID NO: 249773 - DNA, 122 bp, Homo sapiens
ctgtgccgtcgggacgggaagatgtcagcgggcgttgtcctgccactcgggcgctctgggcgtgggccttgggtggggcacgtgcctggaaatccccattgatagaggaatagaaaatctcc

SEQ ID NO: 249774 - DNA, 122 bp, Homo sapiens
tgcctagccacaagccacgtatgactgactgactgactgactgtctgtcgtccgtccgtccgtccgtccgtccgtccgtccgtccgtccatccgtccatccatccatccatatatctatctt

SEQ ID NO: 249775 - DNA, 122 bp, Homo sapiens
acgaaggggctgagtgcctctaaaggtactttttggtccccaccaactggctttgtgttgcgctcatatttacttatttggcagcaattttgtagcgctcatcgtgaccatatcggtaaagt

SEQ ID NO: 249776 - DNA, 122 bp, Homo sapiens
tgtgcgggatataatctcgtggtgcgcggttttttaagccggtcggaaaagcacaatattcgggtgggagtgacccgattttccaggtgcgtccatcacccctttctttgactcggaaaggg

SEQ ID NO: 249777 - DNA, 122 bp, Homo sapiens
gcaggggtgctgctcctggcagatgtgtgggcacaggcaaggcaggaggcctgggtgggccgagggagagggggcacccaccacgcccggcagcagcgtgtgcgcaggaggggcagggaggg

SEQ ID NO: 249778 - DNA, 122 bp, Homo sapiens
gcaaccccacccgggaggacacactcactgctgcagctggctgtgcctgccccactcccccggcccctcatgcccacacacgggtgcacactcccacacacacgggtgcacgctcccacaca

SEQ ID NO: 249779 - DNA, 122 bp, Homo sapiens
gaaagaaacattacatatgcccgtcgagatttggtgggggagggtctgacgccccaggaccgaaaaacaaaatctacctctcaagtggggaccccacacgatcacgtctgccaatgcagggc

SEQ ID NO: 249780 - DNA, 122 bp, Homo sapiens
gccggggcggggagtgggcggggctcgggggcggggcggggtgtgggcggggctcacgggcggggcgggtgagtgggcggggcctcggcgtggtaggcgcgctgcgtaaagaggcctgcagt

SEQ ID NO: 249781 - DNA, 122 bp, Homo sapiens
attaaagagaagataacccgaacagtacgaatgatttctaaaaagttaacttggggtggccgctcgggccacctgcctagtcatccttttggcttttctacctctttcctcctaaccttttg

SEQ ID NO: 249782 - DNA, 122 bp, Homo sapiens
aaatctgtctctcacttccctccctgccttttactttttctttatgttgtaaaagacacacgagcgtagaaaaatgctcaattttttaatagatgttaatatttttagtttcctgatttaaa

SEQ ID NO: 249783 - DNA, 122 bp, Homo sapiens
tgggttccgtctctctgtggagaagcagctccacctctgggggggctcggggcagaggggcggtgtcttgtagcgggcggcagcgccagcgcccctctgtcaggctggggcaatcttggttt

SEQ ID NO: 249784 - DNA, 122 bp, Homo sapiens
ggaggcaggaaaaagcgactcttcctctaacagtctccggaaaacggtgcgaagagaaggcgccaagacgccttccctccaatacactacaatacccaggacgctttgctacaatacctctc

SEQ ID NO: 249785 - DNA, 122 bp, Homo sapiens
aggtgggatgggaaaactttattaggtttggtttccagcttcggccacgcgggctccgcccgccccgagctcgggtcacggggcgcccccgccgccctcctcgtcgtcctccacgtcgaggc

SEQ ID NO: 249786 - DNA, 122 bp, Homo sapiens
agtgatccacgctccttggtctccccaccgctggatattacaatccacatcgcagggggtcgggcgccccccgcgatgcggggagtaacatctcccccctctcccccactggatattacgat

SEQ ID NO: 249787 - DNA, 122 bp, Homo sapiens
caagagcccacatctgctccaaataccaagaaatgctccttatgtttgaagttcccggcacggtggcccacccctgtaatctgagcacctagggaggctgaggatggaggatcccttgagct

SEQ ID NO: 249788 - DNA, 122 bp, Homo sapiens
ccttcctgcgcacgtcccgggcccacccccgcctagagccctcggggtttccccccaccccggcctcggggtctctccacgtctccccgccgacgtgctcacctgctcagggggcgcccccg

SEQ ID NO: 249789 - DNA, 122 bp, Homo sapiens
ccctgcctgaaagtacctggagacacgagtctgtcagtcttgcctcattaagtgtatggtcgaatttctgtcactcgaattctgtcactcaaagcttgagggcgtagagctagtagttgtat

SEQ ID NO: 249790 - DNA, 122 bp, Homo sapiens
ggtccccaatgtggtggcctgacccaagccaggcctgctctctaggtgggtaggggtgagcggtcgtgggcgctgcgaggtggcctggggcggcgggggtggggaacccgcgcaggggtctg

SEQ ID NO: 249791 - DNA, 122 bp, Homo sapiens
cgtctttcctctcccccaggagccccaggcttgtcacagtgcagatgggaaagcccagcccgggctgctgcaggtctctcagatgccatggacacacatccttcactcgtgcctcccaccgc

SEQ ID NO: 249792 - DNA, 122 bp, Homo sapiens
caagagaagggctgtcccattacacaccagatggtttgagttctgattcttaaaaagaaacgatgttcttaggggcaagaagaaaaaaatactcagaaatttaggaaaaagaaacacttaaa

SEQ ID NO: 249793 - DNA, 122 bp, Homo sapiens
tgaagaaacggaagctcacataggtaattttaccagggtcacgcggtcagaaagtgagggcgcttaaattcagacctagggctatccgactcctaagcctggacttttaaccaccactctgt

SEQ ID NO: 249794 - DNA, 122 bp, Homo sapiens
gtgaaaccccaccaggaccttgaacctgccatttctctgctctacagaggatgagccctacgtcgcaggtggccaacagttctggcgtgggggagacagctctgcccccacagaacgtcctc

SEQ ID NO: 249795 - DNA, 122 bp, Homo sapiens
aggaggcatccacaccccattccctcagtcttccagaatgccactgtgaccacatagctgcgggcttctctgccttgtagacacgggcaaccatcaaggccaaggcatttggcgggaagctc

SEQ ID NO: 249796 - DNA, 122 bp, Homo sapiens
gttcctggagcccgacactgtgtgttttctggcctaggagctgataaccaccctgtacatcggcttcctgggcctcatcttctcctcgtactttgtgtacctggctgagaaggacgcggtga

SEQ ID NO: 249797 - DNA, 122 bp, Homo sapiens
gtctaggggtagatgaatgaacagaggtgggaagacaatgaaatgaagtttgctttgacccgggccgcaaagaccagagctgccgcccgcagttcatccagcacctggatcaaccaggaaag

SEQ ID NO: 249798 - DNA, 122 bp, Homo sapiens
ctcacagattcttagcataaggttttgtcagcatttccttcctcaagtcctgtgtcaactcgctgacctcttgccttcttgggttactgccatctttttgtataaaaatatgctagcccttg

SEQ ID NO: 249799 - DNA, 122 bp, Homo sapiens
ccagcaagcaaacagggacatcagatctacaagaacaaggaattgaactcttcccacaaccggtgagcctggaggagaacccagagcctcagaagagataggagccccggctgattccttaa

SEQ ID NO: 249800 - DNA, 122 bp, Homo sapiens
gacttctgaagcggttgcggctactaaaactcctaatccttgtcagcggtgcaagagaggcggggagagagttttaaaagaacatcaatgaaacatcaattcaagttccacgttttgcgacc

SEQ ID NO: 249801 - DNA, 122 bp, Homo sapiens
agcagcacgagtgggatgtgaggtcgcccagagtcctgcgctagtcctgaatagccggcacgcgcagctactaggtttgcaatcccatttcctgtttctgctcctggaccgagggggcgggg

SEQ ID NO: 249802 - DNA, 122 bp, Homo sapiens
acccacagggtccggaggtttcaggcccctagtaaacctggcaaggatttttagaagagccggagtgggatgctatcgggtcagagattcattccagactacagttctagggaggaggctgc

SEQ ID NO: 249803 - DNA, 122 bp, Homo sapiens
ggctcagccccgttttcgcaagctctgcgtggtcttgggtggcgagttcgagccttagaacggccgagtgccctggaaccggtttcggctctggcgtcctcgcgtgtcctccggctccaggt

SEQ ID NO: 249804 - DNA, 122 bp, Homo sapiens
ctgactccctccctgctgcctgtgtgctcttgggcaagttgcttaatcattctgggtttacgtgcttgttaaggactctttcagtgcaaatattttataattataaacactgagaagatcct

SEQ ID NO: 249805 - DNA, 122 bp, Homo sapiens
acccctgggaggggctgtcactactgcccagagttgttaaagagcactcaagttagtaggcgagaagggctcagtagaggactgctacattgtacgtggagtagcagtggctcggaatgccg

SEQ ID NO: 249806 - DNA, 122 bp, Homo sapiens
ttgttgaggtcggccttgggggcctcccctttgggtccctgttgagactccttcatggctcggtcccttgcggagagtgccagggccagcggggagctgggatcaagcagccgccctgtgag

SEQ ID NO: 249807 - DNA, 122 bp, Homo sapiens
ccacagaggggtgcagtgagccagtctccagaggacgtgccgggggtggctgcgtgccctcgtggcgggttcccagcccaccgtcgccggccccggcgcgctgcggctgtgggcgcggggtg

SEQ ID NO: 249808 - DNA, 122 bp, Homo sapiens
ctcccccaccccacctggacactcaggtctgagcctgagtggatttgaggatctgggggacggggaatacggagtccttcttcctgcctcggtgtctgcagagcccagccctcaggcagcgt

SEQ ID NO: 249809 - DNA, 122 bp, Homo sapiens
ctaatttggcacttatcatatagtattttgtcttatggttttttcccagtcataattggccgggcacagtggctctcccctgtaatcccagcactttgggaggtgggggagctgggtagatc

SEQ ID NO: 249810 - DNA, 122 bp, Homo sapiens
atcgcgcacgggactattaacctggaaccccaagagggggagaaaagcggacaagggacacgtttcctgcttcgagatgaaggtcttgttggctgggtgccctggcctgcccgggcggacgc

SEQ ID NO: 249811 - DNA, 122 bp, Homo sapiens
tgacataacgtggggtgcaggcgcaggagtagtatcacccccgctttacagacccagaaacggacaccgagaggttgcgaagccagacaaggggcagagctgggtattgacgcagatttttg

SEQ ID NO: 249812 - DNA, 122 bp, Homo sapiens
agaaagaaatattgcttaaagggatgcatgaatagtaaagagccaattttaattgttgatcgctgtcatcattaattttgttaggctgggtccaggttctctggttaagaaaggcctcagcc

SEQ ID NO: 249813 - DNA, 122 bp, Homo sapiens
cgagttgttttgtgtatgaacggccaggcgacggtgtctgaacatctttccttaattttgcgaacggaaacagggcacgatgaacctgggaactcacaaaaatgatgagcatagagctctgc

SEQ ID NO: 249814 - DNA, 122 bp, Homo sapiens
agaaccattgttatgagcaccttacagatgagggaactgaggatcagagaggtcaagtgacgtgccctggtcacagggctaacgagtggcaaggcttgaagtgacagcaggcagccggatgt

SEQ ID NO: 249815 - DNA, 122 bp, Homo sapiens
ggaggaaaaagtggggccgggcctgagttgggctgacctgtgaaagtctgggaaggtctgcgagagaagcggagtgttttcagctccggaagtggcagttgtaaacttcacctcccgggggc

SEQ ID NO: 249816 - DNA, 122 bp, Homo sapiens
ctgagggaagagacctgccccaggctgccggtgccgcccagcagcccacagaggccagcccgtctgcactgaccaaccacccaccccgccaggaccaccagaccatcctgcgcgcctgggcc

SEQ ID NO: 249817 - DNA, 122 bp, Homo sapiens
ggccttgcaggttggcagaaaggccccaagggcagccggccaggcctgtgctgttccacgcggggctcagccccggagcctggtggccctcagaggccaccagagggctgtcagcactcaga

SEQ ID NO: 249818 - DNA, 122 bp, Homo sapiens
ttcctccgctcagccattgttttcccattaaaacagagtgacaatcagcccctgccagctcggaggagtctttgtaggtttgaagttaaggagaagcaaagcgcttgggtcacttgacttcc

SEQ ID NO: 249819 - DNA, 122 bp, Homo sapiens
taaacttctgcctcaactccgccccttacttccgcttgttttctcagaaacccgtcacaacgcgtttccatggcaacctaccgcttgctcttcggaaaaggttaacactccctgacttctag

SEQ ID NO: 249820 - DNA, 122 bp, Homo sapiens
cgtcacggacgcggcgactcctgacgtcataggaaggcgccggtttcggcgggggctgcacgtgcgcaggggtgtggaaacttaccggctgagccatggatacaccgttaaggcgcagccga

SEQ ID NO: 249821 - DNA, 122 bp, Homo sapiens
ttcttctgaattttcaaagcaaaatgatgcccatagtccatcaatttgattttggtgagtcgctccttttgaaagcccctcaccccagcgaactctactggcccaagtgccgggccgaacga

SEQ ID NO: 249822 - DNA, 122 bp, Homo sapiens
ccacccccttctgtctgtctccttgtgcaacccgagtgttcaggtgacaagagactgacgcgcttgctttatccgcaggctgaacgagcgcgaccgcctgatcaagaggctgggccggaaga

SEQ ID NO: 249823 - DNA, 122 bp, Homo sapiens
ctcccttcctgcttccactccctagtccatggggcccaggcccactgggtggggtggaggcgggtgggagactgggaagactgtgtctgggccaggagcgtgttttggctctgcttgaatat

SEQ ID NO: 249824 - DNA, 122 bp, Homo sapiens
ccacctctgggtgcttcatgagcagcaagaagccatagcgcagggtggtgctgacggtctcggtgcccccaatgaagaggttcaacgtggtcatcaccaggtttttcaagtagaactccgtg

SEQ ID NO: 249825 - DNA, 122 bp, Homo sapiens
tagtgcttatcctagaatcagcccttgctgcctatgatcttcttgatccagtccaggtagcggcagatgttggtatagacgccaggtttgtcggacctcccacaggggtctgagccccagga

SEQ ID NO: 249826 - DNA, 122 bp, Homo sapiens
gcacccctgcacctaccgcagggcacttgcagatgaacccgcgggcggtgttggaggccacggcgcaggtgcccccattcttgcagggcttgcctttgcagccattgatgacggactcgcag

SEQ ID NO: 249827 - DNA, 122 bp, Homo sapiens
agggtgaaagaataagcagttcccaaactcagctgaccttaatgtccttctagctccttacgcccatctcggacaaaagcagaaatgtatgtctcagttgtgtttctaccccttgctgccca

SEQ ID NO: 249828 - DNA, 122 bp, Homo sapiens
cgagcagctctcctattagtaacaagagcacaaaggcagtgcttgaatgtgagcctgcgtcggagcccagcagcttcacagtcactcccgtcatcgaggaggacgagtgagcagtgcctgct

SEQ ID NO: 249829 - DNA, 122 bp, Homo sapiens
aaaagttatgacagataaaaagtaaataaaggagtaaatgatgtaacaggatgaagaaaacgtggcctagaagagagatggctctagaagagaggaatgcaatgaattttgaggcagaactc

SEQ ID NO: 249830 - DNA, 122 bp, Homo sapiens
aaacacccactgactaggttgttctcttcccacatggcacttggaaaggtacagccaatgcgtgtctcactggtatatctctcaatgataaaacatcctctctttctggcaggcaagttttt

SEQ ID NO: 249831 - DNA, 122 bp, Homo sapiens
ggagaaggtaggcgaagggctgccctccattgggctggagggcagcagggaggcccccaacgcccacccaggcgttgacgcctctgtatcttgcgtcgcctgggcggtggacgcaggagacc

SEQ ID NO: 249832 - DNA, 122 bp, Homo sapiens
gcatgcacccgcagctgctggagctgctcaaccagctggacgagcgcaggcgtaggtgcccgcgccacggggcctcggctcaggggcagccaggtgttgtgagcgccatcctgggccagggc

SEQ ID NO: 249833 - DNA, 122 bp, Homo sapiens
ggggccgcagtgcccagcacagagcagcgtttatcgggtgacgtctaggctgagtaattccgtgtgctgacctcagcccagtagtttgagctgaattttcgctttcagcagccgcatttgta

SEQ ID NO: 249834 - DNA, 122 bp, Homo sapiens
cccgtcctttccgcggtgcccgaggctttggtcacctgtcttccctccgagcgagtcccccgcccccaactttttaacagactttgtatcacagggggaactggagcaggtggggtgtgtgt

SEQ ID NO: 249835 - DNA, 122 bp, Homo sapiens
tctctctgctgtatccgaaagtctggcgccttgcgggtcagcccccgagggccatcgagccgccgtctcccaatactaagttcacttcgtgtctctcatgacagggaggaaacttagcattc

SEQ ID NO: 249836 - DNA, 122 bp, Homo sapiens
attctgacctatcgtgtaggtaaaaattaatcttcagagtattacagacatgcgtgcccacgcgctaggcgaaagtgcgagtcggaagcacttcattccctctcttcgctagccggaagtcg

SEQ ID NO: 249837 - DNA, 122 bp, Homo sapiens
ggtctctgtttctccatatgttcattcctcagcactttgcccatctgggggcctgggggtcgagagcatgtggcggccaccctgggaggccaggggagttcatcctgaccacagcatagtca

SEQ ID NO: 249838 - DNA, 122 bp, Homo sapiens
gatcccgggcaccgcgcagagcccagaggctgcgaaattggctgcgagcgtcaggggctgcggctgcaaattctaaacacaggcaagtaaggaggaaagccgggccagccgggcgcaagttc

SEQ ID NO: 249839 - DNA, 122 bp, Homo sapiens
gtttttgaaatacaaatagaaaatcctgaaataatttttgtgatacagagcaaaataacacggcatgggagtaaggttatccttagaaatttaaaataactccacagtaaaataggtagaat

SEQ ID NO: 249840 - DNA, 122 bp, Homo sapiens
ctttttaaaggattttccggaagccttggcgggaacttcctgccaagcgtgagaacgctgcgaacttcccggaggccaaaagttgagggggctgagcggagcgtgattggggaggggcgggc

SEQ ID NO: 249841 - DNA, 122 bp, Homo sapiens
gacccgacacaagttgggagaagaagtgaaactcaggggagtggggaatccccaacgctgcgcctccccattgcagacgcggccctcggagcctgagaccctgagagccccgtccgggacct

SEQ ID NO: 249842 - DNA, 122 bp, Homo sapiens
tgggagagaagagacagccaggcggcgagggacttgtcctgtggaggcctccccaggaggcgagggtggggggactcctgctggaggcggccggcagatcagccttccttatccacgtcctc

SEQ ID NO: 249843 - DNA, 122 bp, Homo sapiens
aattggttcccagtttgaaacctgtaatcccttttcctgccttcattattgcacttaacacgcctgtattaatttgtgcctcatctaggcagagttatttaggacagtggcttactgatctt

SEQ ID NO: 249844 - DNA, 122 bp, Homo sapiens
tatgtttgaagttcacctttgagacatcactagcatgcagagggatctgggagctcttaccggctttacagctgtgaggactctgtatgcaacagtgaagtctgggatccacagtgtctggc

SEQ ID NO: 249845 - DNA, 122 bp, Homo sapiens
aggaaaaaaaaaaaaaaaccctgttcctgatagacgagaaactgctcaggggaaagaggacgtcgctttccatgtcattattcctcagccagggttgtgcggatgggagcgctggtcactta

SEQ ID NO: 249846 - DNA, 122 bp, Homo sapiens
aggcgattctcctgcctcagcctcctgagtagctgggattacaggcgtgagccacagcgccggccccaggtagtatatttttattggcacaactgccggtatttgcctgtgcaagctttcag

SEQ ID NO: 249847 - DNA, 122 bp, Homo sapiens
caataaataaattaataaataaaattaaaatattggatgccacaacttgttatttaacttcgcagtcctacaaaccgcagtataattaagggtagccctttggaatgaaagctaagttaccg

SEQ ID NO: 249848 - DNA, 122 bp, Homo sapiens
tgtattctaaccacagtcaacagtagagtctcacaagggatttcacaaaagacttcaaaccgactgtatatttttcagagagttgagctatagacagccatggaaagtagtagttttttttt

SEQ ID NO: 249849 - DNA, 122 bp, Homo sapiens
cgccccccaccagcgcagcagcgggctgaagggctcctcgagcttggcgagagcggatgccgaggccgaggatgcgccagaggggatgccgacgccgagaaggtgccgcgagccagcgaggg

SEQ ID NO: 249850 - DNA, 122 bp, Homo sapiens
tggctggtgaggactgtggcctcaggagtcaacgcctcgctgtgcacctctcccctgcctcggtctcccgacctgccatgccctgaaaggatggcgcctctcagcgtggcgacgcggaccga

SEQ ID NO: 249851 - DNA, 122 bp, Homo sapiens
actcttaagtagctcgacagttattttggacgaatgactgaaaccagaaacgccgcccctcgccttcggagctgcaggctgctgcgttccttgccgcggacggggcgagctccgggaagggt

SEQ ID NO: 249852 - DNA, 122 bp, Homo sapiens
aagtgcagtttctttctctcgggcccggggcggggccatggctcctcctctaggaagccgcgcgagcgcagtcccacggcagccatttccctagcgcgcatgcactgggtcccaggaccacg

SEQ ID NO: 249853 - DNA, 122 bp, Homo sapiens
aagactggacgcactgcgggacatggtgatgtcctgggttggggctgaggaaggcctatgcgcggagggtgcggccttcggctaaggcagaggaccagggttgggtccgtggcggcgggagg

SEQ ID NO: 249854 - DNA, 122 bp, Homo sapiens
tggacaggcccgctctggcaatgccctgcacctcctccccgccccggccaggttgcaccccgatggtctccctgctcaaggaggagagaagagaagggacgccactagagggtggacatcgg

SEQ ID NO: 249855 - DNA, 122 bp, Homo sapiens
aagttcataaggtagacgatgtcaggaaagggcatcatagacaactagcactcaactagacggtcacaagccttcccacgcaagtatatgtagtaggcagacgagataaatatgaaatttta

SEQ ID NO: 249856 - DNA, 122 bp, Homo sapiens
gcgccgcgccgcgcagacacaatgggcgcggagccggctcttcctccccagcggctgacgcgtttgcaaaaatagctctcggctcccggaatccccgcccgggtcctagcccgccccctgcc

SEQ ID NO: 249857 - DNA, 122 bp, Homo sapiens
agcggccgagacgtgcagggccttcccgggggatcggaaggttgcggatgccttgggagccgggggcccttgcgcgggattgcaacccccgcgaagactctggcgcctcctgcaggcgtccc

SEQ ID NO: 249858 - DNA, 122 bp, Homo sapiens
ggtggtctcgctgcccctgctcaagccccaggtgcgctacagctgcatccgccgggaggacgtcagtggcatcgcctcctgcgtcttcaccaaatatggccaaggtgtttgagccgggctgg

SEQ ID NO: 249859 - DNA, 122 bp, Homo sapiens
gctgggggtggtgctgcccggagggcgggcgtctagggccggagggtggagctgggggttcgggggtgtacccgggggcgggaggctggacaaggacggctctaaattggctggaggggccc

SEQ ID NO: 249860 - DNA, 122 bp, Homo sapiens
gggcagccccaaaatgtgtgctttttctcctctttcccactttcccccaggctacgggcacgcggcacccagcacggatggcggcaaggtgttctgcatgttctacgcgctgctgggcatcc

SEQ ID NO: 249861 - DNA, 122 bp, Homo sapiens
gggtgaagggagagagaggacctgcgctcaggagggagcgtggtctagtggcgggaaccacgggtcccgcagcgggcgtggccgactgtgcgggaggccccggatccaccgtgggcgaggcc

SEQ ID NO: 249862 - DNA, 122 bp, Homo sapiens
cccagcggcatgtagaaatgggtggagtcaggccttgctctggaccccagacttagggaccggacttgaaaccaaattgcaaggcagccagagattgggttccctggaaagatgcgtcttta

SEQ ID NO: 249863 - DNA, 122 bp, Homo sapiens
ttttgttttaatggtttaaaaatcctacaggaattctgattggtcccactaacaatccatcgaggctcaccagccggttgactcctgaccttccatgcttctcatcctaattaatgcaaggt

SEQ ID NO: 249864 - DNA, 122 bp, Homo sapiens
cccaccagggccagcaggctgtcaggctcacagaggcccgagggtctcccagcgacttgtcgactctggtgtgagtctggcaggaggtaacccagtcccggggagggcggaggctgggcggg

SEQ ID NO: 249865 - DNA, 122 bp, Homo sapiens
gttgggccttgccccttaagccccgaaggttaatttcctagtatttagtggcattgaacccgccaaagaaaatgctgtttcatctgggggaagataatttctgcatgtgtatttttttcatg

SEQ ID NO: 249866 - DNA, 122 bp, Homo sapiens
ctggcaatcagggccccaagcctggagacttctggacaagcggaggcaagccgaccatgacggcttgggtgcagggagcaggtgtctgagcctttgacgtagacttcccgagcccccactgc

SEQ ID NO: 249867 - DNA, 122 bp, Homo sapiens
gagccctgccgccccagggtccacgtggccgagcggggacggggaggccccctcctccagcggggtccttcaacagctccagcatcgccactctcgggagctccggacttaagcggggcttc

SEQ ID NO: 249868 - DNA, 122 bp, Homo sapiens
agcagctaggcgctgggatcggggtcggctctcggctcggctcgcgggctgtaaggtctccgcggaccccaccgcctcttctgcgcgctaagggtgagcgccaagcaatttcgcgagcaata

SEQ ID NO: 249869 - DNA, 122 bp, Homo sapiens
ttacaaatcagtaacataaaattattccatgaacaatgctggacttattggctttcagcacggaaaaagacaaaattagttttcccatttcatcatatacaaaaataaatacctgtaaaaca

SEQ ID NO: 249870 - DNA, 122 bp, Homo sapiens
agttttcctgactaaattggtgggtgctcaacaaacccatcactgcaacacagggcgctccgaacgtggctttcttcttaacctggaagaaggtccgtaactccattcgcccggatagcaaa

SEQ ID NO: 249871 - DNA, 122 bp, Homo sapiens
gctccgtggacagcgatgacagcatcgagcaggaaatccggacatttttggccctaaaggcgcagtcagggagtttgctggccagaggtgagagctgcccgcaggctgcccagggtccactt

SEQ ID NO: 249872 - DNA, 122 bp, Homo sapiens
ctgcccagcccgccccagcccaacctgacggaagcttgtcagggaagagtccatagaaggcgtcacctttaggagacatcctctgtcatagtgctcgcagccccgctgacctcgctcttgac

SEQ ID NO: 249873 - DNA, 122 bp, Homo sapiens
cactcacccacacgctgcctgtccccactgctgtcagtaaactctgagttccccagacctcgtttatggcatggatactagtataacatctacccatgaaatgtgtgtgttgggaggctaat

SEQ ID NO: 249874 - DNA, 122 bp, Homo sapiens
ctctttaggaaaaagagcgaatgctttgccagccctattatcctctgactggtgttaaagcgcatttagtgggaatgtcattaactttttcatgggaaagatgaaattggccagcaccctgt

SEQ ID NO: 249875 - DNA, 122 bp, Homo sapiens
ctgttgtccatctccgtaagtgaccagacgtctcagtaaaataagggccaggaaactggacgtgtaatccggagtatgaattaacttgtctaacatgggatgtgtggtcacccacggtacct

SEQ ID NO: 249876 - DNA, 122 bp, Homo sapiens
gacggaagcgccgctggcggcgggtccggaaggcgggccccagagacctgctgccctccgcgccaaccccggacccgccggggcccgccccgtcccccaaggatctggacctgggcgcacag

SEQ ID NO: 249877 - DNA, 122 bp, Homo sapiens
aatggcgggcctgggggggcggggacttcccacagtgggagctggggcccctcctgggggcgcaggggagagcccagccagcagggagcagggccggtggtgcagggtgtgggggatcccgg

SEQ ID NO: 249878 - DNA, 122 bp, Homo sapiens
tgatctttataatcagcctcgtcagctccatcttctgtggacatctgggcaaggtcgagccggacgctgtcacgctcgccgtcacggtgggtgcctgatttcgcccctgtaggagccgacgg

SEQ ID NO: 249879 - DNA, 122 bp, Homo sapiens
agtgtttgcagttgcttgaaaagataccacctgaggacagcttggcctgctgggatgacccgagaccagatgtattggaatcactgctttgtccctctccaccctctggctttgggggattg

SEQ ID NO: 249880 - DNA, 122 bp, Homo sapiens
aacgtggagcgtgacttggaaatgcaaaaatccaattgagattttaaagtgctgagcattcggaacactatgggaagcaggagaatggcctgaactttctacatatatgggatcttagagca

SEQ ID NO: 249881 - DNA, 122 bp, Homo sapiens
tgccgggctcaagcaggcgcctgcatcacggaacgagaaggccccggtggacttcggctacgtggggattgactccatcctggagcagatgcgccggaaggccatgaagcagggcttcgagt

SEQ ID NO: 249882 - DNA, 122 bp, Homo sapiens
agctgcctgatgaattttatccacctccatttcagcatgtggctcgcgtggacaggtggacggacgctgtggccgcatggaaccttgagaacccagggacgagccagtgccgggaaggaact

SEQ ID NO: 249883 - DNA, 122 bp, Homo sapiens
gggcttctcaccaggtgggctcggcgaagctgtgctctggggcgggttgagtctagaggccgaggctggacaccacaggctccgccccaccagcctgggaccgcctccaacccaccttcctg

SEQ ID NO: 249884 - DNA, 122 bp, Homo sapiens
tgagacacagggctttggaatgacatggtgtgttcctgggggctaggggtcctgggaacacggggcagccgggggtcctacccaaagccaagcctgtgtgtggtaggggctgctttcattct

SEQ ID NO: 249885 - DNA, 122 bp, Homo sapiens
taccacaaagagaaagctaaggcctttaattccctgggttctcgagacgtcactctgcggcgtatgtccaggcgagctgtgcgtcagttccgttcctctgcttgtgcctcaagagtctggca

SEQ ID NO: 249886 - DNA, 122 bp, Homo sapiens
agtcttgtcctagattccacagcttgttaagcagcacaactgttatgaaaaccttatttccgtacccatgttctcttccacgaggctaccctgcttccccacctcaaccctgctctccccat

SEQ ID NO: 249887 - DNA, 122 bp, Homo sapiens
caccctcccagcacagggatgagttactgtttacctttcttagaacttccacaagttcagcggtccaaaggctctttgtatcccatcctcttgggccttttatggagtcttcattgggcaga

SEQ ID NO: 249888 - DNA, 122 bp, Homo sapiens
tctttttcctaagttgactcctctactaacaggtcaatgaggccaggaaaacatgaaatgcgtaaattaaaatcccttttcctaccatcagccaaactattccattgctacagctaaacaga

SEQ ID NO: 249889 - DNA, 122 bp, Homo sapiens
taatgattcatcaatcactaagcctcagattaatccagaatgtgaaacagaagtcacattcgttgacaaaagccaccccatcgattctcaatcactgagccccactggggagtgacccgcga

SEQ ID NO: 249890 - DNA, 122 bp, Homo sapiens
aaagcgtatgcggtctgaaaggaaccattctattctcctgtccctaaatctaccagcccacgttcttatctaaaagccgtctacatcacctcggctctgaattctaccccattccctttccc

SEQ ID NO: 249891 - DNA, 122 bp, Homo sapiens
aggcacagcccgttttcccgctgctctctaatcctccagcagcagctccagctcctccagcggcaggcgcacccggagctccttctcagtcatcaggtccaggatctcctgcatctcatcgg

SEQ ID NO: 249892 - DNA, 122 bp, Homo sapiens
cagccaaggtgaggctgggcctgctgctcctccgcacgtgtagagtgccccccgcggccccgtcagacgccagccctcagcacagctctgcccagccctggccagtgtgctcagaacagcac

SEQ ID NO: 249893 - DNA, 122 bp, Homo sapiens
gcattgcaagtgcaggcacgggaccctcccccttgccgtataggcagggaaactgaggcacggtatgtggcagggagatgttcacagataggatccccatccctttgcgcagcgttcattca

SEQ ID NO: 249894 - DNA, 122 bp, Homo sapiens
gaagcacagtgtcagcggtgctctcgcaagacggggcagtgggtctgaaccagccacgggcggggggggtgtgcgctgaaccccgcattcggacccccagcggaggagaatccagccccaca

SEQ ID NO: 249895 - DNA, 122 bp, Homo sapiens
ccctcctcgttctctctcaactcccacccatgccgttttcttggctcccacctcttgccccgggtcccagtccatctcacccgtggtgaggaagcctgtgagaggctcactctcctcaaagc

SEQ ID NO: 249896 - DNA, 122 bp, Homo sapiens
gctgcatgctgagagggtagcgagcagagggcacagctcccactgcagacctaagggcttcgtcacaactggaggcccactgcttccaggggctttgtcttttcatcagaaatctggtcgaa

SEQ ID NO: 249897 - DNA, 122 bp, Homo sapiens
cacacccatgcatgtgctcgcacacgtatgtgcatgcatacacataagagcactcgtgcacggccccaaggtcagtccggcggagaccacgtttctggacttgaaaggataactacttgaga

SEQ ID NO: 249898 - DNA, 122 bp, Homo sapiens
cacagaaactcttgcctttcagaagtccccacgagaagaagaagaagaggcggtcccggtcgcggaccaagtccaaggccaggtctcagtcggtgtcacccagcaagcaggcagcgccccgg

SEQ ID NO: 249899 - DNA, 122 bp, Homo sapiens
gagacccagaagtcccagtcccaatatagtccagactgaagaatcttgggctgaccccctcgttttgcagaggagggaaactgaggcccagagaaccacccagcaagttcgtggctcggggc

SEQ ID NO: 249900 - DNA, 122 bp, Homo sapiens
ggcctgcctggacggtgttggttggggtgagtctccccaaaagtcatgacgtggtgatctcgaggacaggacggcctgcgtgccgctggggtgctctctcaccgaagggtcgttctcgttga

SEQ ID NO: 249901 - DNA, 122 bp, Homo sapiens
cctacattcttgtgtcagactttggaagaaaaataaagtgttaccacagactttgttctccgtgaaacccctgagcagcaggattgagttctgacgtgaatgctgggaggtgtttctcagtg

SEQ ID NO: 249902 - DNA, 122 bp, Homo sapiens
gacctcggggaggaagcccgggtcctgggaccctcggggcacatctgcggactcgggtcccgggcccagggcgggtactcacattcacactcgcactcccactcgcgaccctcgggaagcgc

SEQ ID NO: 249903 - DNA, 122 bp, Homo sapiens
cttctaggccagcttagttggggcttctaggccagccctgtgggcagctccctctgagggcggcagagcagggttgtgaaccccatgccccattacccgtaggcgacctggcagtcaccctt

SEQ ID NO: 249904 - DNA, 122 bp, Homo sapiens
gacagggtttcaccatgttggccaggctggtctcaaatccctgacctcaagtgatccacccgccttggcctaccaaagtgctgagattacgggcataagccaccacacctgccctgagactc

SEQ ID NO: 249905 - DNA, 122 bp, Homo sapiens
atgtaccacaggtggtgacttccatttgtttgtttttgctattttgtttttgagacagggcgcaatgccaggatctccctgcaacatccaccgtcagggctcaagtggtctttccacctcag

SEQ ID NO: 249906 - DNA, 122 bp, Homo sapiens
ccactgtcagacagaggacacgcgtgtgcacacggaaaccccacgagtccacagaaacaccgccatggccaaggcgggagtttagggcacaggattaaagcaccacgcacaggtgacaaatg

SEQ ID NO: 249907 - DNA, 122 bp, Homo sapiens
catctttccaggttcccaggtacaagttcgtggcattgtcctggattccttgaccgtcctcgccacgcccccatcgaccaggatgccaggagccaggatgattctgctttcaatgcttgtgc

SEQ ID NO: 249908 - DNA, 122 bp, Homo sapiens
gggacgcagcctgcctgactgccaggagccaagcgcgagtcggcccagccaaagcgcatgcgcgagccgcgcgccgctttttgcttcacagtgcttcccacggttgtcttaggaaccagtcc

SEQ ID NO: 249909 - DNA, 122 bp, Homo sapiens
caactcccgacagctctcggctgttctgtgtgaggggggacggggccgagtgtgggtcggcgcagtgctgaggtgtcccacgtaccccagcactgtgctgaatgcattgaaatcactgccca

SEQ ID NO: 249910 - DNA, 122 bp, Homo sapiens
cattgcagcacggaaaggatttctctttacgcaagagtactgggctgggtccacttattacgaaacacatgctcactggggcttaaaaaacagcttctatttcattcctttcaagaaagcac

SEQ ID NO: 249911 - DNA, 122 bp, Homo sapiens
ccggctgggggtggatctggacgtcattttggcggttgtgcaacatggcagagccgctgacggtatcaaaggtcacggtcaggattgagttgtccagctgtaactggcgttcaggggtggta

SEQ ID NO: 249912 - DNA, 122 bp, Homo sapiens
gcctgcagcaggatccacagtgcaggctcccagggcctggcacagactgactgattccaacgcccagtgccactcctgggagtatgcattttatttttaaaaatttattattattatttttc

SEQ ID NO: 249913 - DNA, 122 bp, Homo sapiens
aaacggcggcgccggggagcccccgggccagctcctgctgcagcagcagcgcctgggccgcgcgctatggcaccttcgcctggcccaccactcccagaggtgcgcagtgggccggcttgggc

SEQ ID NO: 249914 - DNA, 122 bp, Homo sapiens
tggaagctgcgtgacttagtgggagaaccccggccttcttccaggctgcaggggcagagccggtcccacctgctccggcgccccgtggctgctgtcttcttcctttcgaaacaccctggagg

SEQ ID NO: 249915 - DNA, 122 bp, Homo sapiens
tgccgggctccgggagcgcttgatttattaagctaatgttctagcacattttctccatcccgtaatgagctgtttccaccagggggtgtctgcagagcgactgcggcttccggctgctccag

SEQ ID NO: 249916 - DNA, 122 bp, Homo sapiens
agcttgtccagctcctccgggctccggcaggtgaacaccttctagagcagctgcagctaccgttgcgggcggcgtcgtacaccgcggtgcggaggtacatagtctgggcgccgcgggacacg

SEQ ID NO: 249917 - DNA, 122 bp, Homo sapiens
ctacactacagataatgcccgggttcaaattccgactccggattccccactcactggatgcgtgaccttggaaaaatgatcaacctcttcaagctacacaaagttaaatggggatcgtcttg

SEQ ID NO: 249918 - DNA, 122 bp, Homo sapiens
ctcctgatgcgccattttttaagctcgttggaaaagtgcagtattcgggtgggagcgacccgattttccaggtgccgtctgtcacccctttctttgactcggaaagggaactccctgacccc

SEQ ID NO: 249919 - DNA, 122 bp, Homo sapiens
taccaactcagcttttacacaataaagctctactgtctctggtttgctttgggctgtttccgatgaatgccattagcggggggtgggctgagtgatggtcttttcatataagcaattgggtg

SEQ ID NO: 249920 - DNA, 122 bp, Homo sapiens
ctccctggcagcggcacatggggtcctgcgccagtagatccgccacctcccctttgccttcgtcgccccactgcacaccgagcaccaccgtcacccagtttcctctgggccgcgccctgggg

SEQ ID NO: 249921 - DNA, 122 bp, Homo sapiens
cccgcggctgcggcgacggtggccgcggtggagccacggggcgggcttggcttggtgtgacggcggctgcggcggcggtggcggccgcgaccaggtgagtcctgactggccctcgtggcggg

SEQ ID NO: 249922 - DNA, 122 bp, Homo sapiens
tgtgctagattaggagtgtgtgaacacacgtcaaactggactgtaggccttcccagtgtacgtgtgcagggtgtgtataaagccatgggagagacgtggagtgtgtttctggaatatattat

SEQ ID NO: 249923 - DNA, 122 bp, Homo sapiens
gaggcctccaccctcccgggttaatggggagtggagacgcacggctgtccggctccgcagcgccacctggaggcttctaggtcctagctcggtgagcgtctttgctccgatcccagggtcgt

SEQ ID NO: 249924 - DNA, 122 bp, Homo sapiens
atccactggcctggcagaatccacctggatggcagactccacctggatggcagaccccaccgggctggcagggtcctccagactggcaaggtcctcctgactggccgctaccacccgactgg

SEQ ID NO: 249925 - DNA, 122 bp, Homo sapiens
cgtgaagttgtctgtctacatgaccctgtacacgctcacccatgtggtgctgctcatctacgaggcggaagtgagtccgactggcccctggccgggccctgccttcccctgcttttggcgcc

SEQ ID NO: 249926 - DNA, 122 bp, Homo sapiens
tgacgaggcctggcgtcctacccgcccgcccgcgatccggatccgtccggctggctttcacgctggttgtctagcgacacctggcggtcacctttatatatagcaagctctaccagcggggg

SEQ ID NO: 249927 - DNA, 122 bp, Homo sapiens
ctggagagcagcagctgcacacagccggaaagggcgcgcaggcgacgacactcggatccacgtcgacaccgttgtacaaagatacgcggacccgtacgtacacctgtacctgtgctggcgca

SEQ ID NO: 249928 - DNA, 122 bp, Homo sapiens
tcccctcaccctgtacccttccaagtttccagtgtctctcattccacacatctgtgtggacgtgtgagttagctcccgcttacgggtgagaatgtgcggtgtttgtctttctgtgtccgagt

SEQ ID NO: 249929 - DNA, 122 bp, Homo sapiens
cgcggcgcacaaaggcgagctgggggcgccgggccggaccccgaccctaggccaggcccgcgtacctgctcaacgcgcgccaagccgcggcccgggcccccaccccagccggtgccccacgc

SEQ ID NO: 249930 - DNA, 122 bp, Homo sapiens
ccaggcccctgaaagcccaagtcaagtctgtcctcagagccgcacggggcagggcgggggcgtcgcgaacacagacagagccagggtcagccatagacacatctctatatttatatattaga

SEQ ID NO: 249931 - DNA, 122 bp, Homo sapiens
tgaagggaatgacaaaatatgaagaaggactccaagagacaagatcagaaaaattgtgaacgtgattgcttaaatcagaagaaatgagacaagcaaaagacatgtgaggaaacaaatagtga

SEQ ID NO: 249932 - DNA, 122 bp, Homo sapiens
tgcaggcgcgcgccgccccgcctgactggttttcgtatttttttggtggagacggggttccgctgtgttggccgggctggtctccagctcctaaccgcgagtgatccgccagcctcggcctc

SEQ ID NO: 249933 - DNA, 122 bp, Homo sapiens
tcaaagagcaaccagccacctctgcaagggtgtgccaagagctgatagaccagccaccaacgtcactccctgccagccagggtaaatcagttactctgccctggaggtagagccccagtgcc

SEQ ID NO: 249934 - DNA, 122 bp, Homo sapiens
gacttcactggatgcttggcatttgctacactagttcccattttagtgttctgcttgtctcgtagactggactgtaaacaacttgagcaccagggacctgaagcccccggattccacagcag

SEQ ID NO: 249935 - DNA, 122 bp, Homo sapiens
tccatcttaaaaaaaaaataaataaaagaaatctgtaacctctgaagactcacttgttgccgaggtgaggaatggcagcctggggccaccatgattttaatgtctgaaacctccctggagct

SEQ ID NO: 249936 - DNA, 122 bp, Homo sapiens
cactggtcagacataacactacgagactgaggccgagagctgctgtcatagttgtaatagcggcctggagtcgaggaagagaaaaataaggctcctggtgtcctctcagctgccttaagact

SEQ ID NO: 249937 - DNA, 122 bp, Homo sapiens
gctggaaggagaaagatgaagaacccagcagggcctcctttcgaggttggccaggtggcacgtgggtttccggaagagaggagagagaggaaacagccctgacctccacaggctgcaggtgg

SEQ ID NO: 249938 - DNA, 122 bp, Homo sapiens
ccccgcccggcccctccctgcctcctggcccccgcgtcctgcggcccagcccctccctggcgctcacctccctacagccttccgggagctggacggggcctccccagctttgggcagcttgg

SEQ ID NO: 249939 - DNA, 122 bp, Homo sapiens
ccttgcagcacaaacccatgatgaaagcttttgtgaatttgtgctctggccaactatggacgggctacccgatacacaatatcgatggcatttaacacttggtaggcaggttaaggaaaagt

SEQ ID NO: 249940 - DNA, 122 bp, Homo sapiens
accgagtctggccgagactgctttgaagtaactttcctgtccaggcctggaggaaatcatcgaaggcaaaggccaccacgtgtcgaatgtcataggaaatacaagctcagggactctcttat

SEQ ID NO: 249941 - DNA, 122 bp, Homo sapiens
tcagaggagtaacagcagagggcacagtggggccccagggacgagacctgttcctttcaccgtcttcctgactggggcactaacacctgctgctggatgagtccctccctcagaggccccac

SEQ ID NO: 249942 - DNA, 122 bp, Homo sapiens
attgaatgctactttagaaaaacatgctcaaatctagggaaaaaatttgatacaaaactccgtatcaattatctagctagctagctagctagctagctagagacatgctttcattctattgc

SEQ ID NO: 249943 - DNA, 122 bp, Homo sapiens
gtggaggcgcgggcttcccatgatgccccgcgagacctttattctaaccgcaaggagtagcggaggggaggtcgtgatggcggcgccggaggcggaggttctgtcctcagccgcagtccctg

SEQ ID NO: 249944 - DNA, 122 bp, Homo sapiens
aaagagaacggtgtgtagcgaggggggcctcatcatatccttccaggacaataggtggcccgcgcttaccatactaaggtggccactcaagtgactgttcaaacacttaaagtgcatcctac

SEQ ID NO: 249945 - DNA, 122 bp, Homo sapiens
gggttccccactcagtctatcagcattggatcagagccttttagtccaatcacattcctacgcggctgtctagactttattgaatctaagcataaaaatagacaatttcccctgtatctctg

SEQ ID NO: 249946 - DNA, 122 bp, Homo sapiens
gttctcacttttaacgggctctatttggctggtacattgagattcaaagaacaatccactcgtacacttgctcccagcccctttcattctcaaagtacttgctttctctttcaattatactt

SEQ ID NO: 249947 - DNA, 122 bp, Homo sapiens
cgggcgccgctaggggatgcagtggctcaaaggaccgagcgggcggtgcaggttggaacccgcggggcggaccaatcgcggctcggccacagcctcgcccgctgattggtccctccaggccc

SEQ ID NO: 249948 - DNA, 122 bp, Homo sapiens
atagggagtgtttgccccagagagtgtttacctagaggttaggtgggagtttagattcagcgttggttattatttgggggatgatagaaccaatcttggttttttttacccccctgtgtttt

SEQ ID NO: 249949 - DNA, 122 bp, Homo sapiens
gagcggggtcgcgaggatggggcttgcggttgggaatgggccctatggagccctatggaccgaggcgagtgaggccagatttgccgcggccagaagcgctcacccgcgcggcccggatggga

SEQ ID NO: 249950 - DNA, 122 bp, Homo sapiens
caggaaggaaatgcatcttaaaagatccagtttgggacagtgatatgttctaaagccaatcggtgagaacaatgagactaccttgatgaacataaaaaaatctgacatcacactgtcccagg

SEQ ID NO: 249951 - DNA, 122 bp, Homo sapiens
cgtgccttgggaaagatttttagagattcactttttcctttgatagacttgcttattgggcggttttctgcagtctgaggaatagggccaatttgactgtcagtcttttgttgattaagtga

SEQ ID NO: 249952 - DNA, 122 bp, Homo sapiens
cagaacaagggagcgggacacttaggcctggagccttcaggagggagccgtggctgctcgcggtaatcccagcacttcaggaggctgaggcgggaggatcacttgagtccaggagtttgaga

SEQ ID NO: 249953 - DNA, 122 bp, Homo sapiens
ctcctgagatcccagagtacactgaggattattacctctgtatcacagctcctgttacaacgggctgtaatagtcttcttactgtcttgctttcattagactaaggaaccacatcttcacca

SEQ ID NO: 249954 - DNA, 122 bp, Homo sapiens
aataaatacattttctattatttcctcaaataagggcgcattttattctttctcactgggcgagggacgtatatggcttagaaacagcaacagtaggccaggcacggtggcctgtaattcca

SEQ ID NO: 249955 - DNA, 122 bp, Homo sapiens
cctggagctgcctccgggtacgggcgggagcccggcggagggcggtggcagcggcggcggcgggggcctcaggaggtctaacagcgcccccctgatccacggcctcagtgacacttcgccgg

SEQ ID NO: 249956 - DNA, 122 bp, Homo sapiens
ctccggaccaccctgctggccggtgacattgagcacccaagggcaatcgcactggatccccgggatgggtgaggaccttgcccagccttctcctggccccatggcccccctgaagtcccatt

SEQ ID NO: 249957 - DNA, 122 bp, Homo sapiens
ggttcagtcaggctggccaaacagcttccaaccaggccaagacaaatggtctcgggctttcgcacccccttatccctccaagtccttcttctggatggcagttcacctctgagagtccctgc

SEQ ID NO: 249958 - DNA, 122 bp, Homo sapiens
gcgccactccttctgacccctgtggcgtgcgtcctggcgcgccgcacccgcctggtgcctcggccctctctgctgttccctggctgattctgagcaaggccagcagcccacggccccacccg

SEQ ID NO: 249959 - DNA, 122 bp, Homo sapiens
ctcctagagagcccctgcctgtaataggtcaaagcagagagctgggtgttgcatcctgggcgccacatgctcatggccagaatcttaaacctatttggtaggaaagggtcagtttctcactt

SEQ ID NO: 249960 - DNA, 122 bp, Homo sapiens
gtgcactgaggagtgtgtgcactgaggaggcgtgtgtgcactgaggaggcgtgtgtgcaccgaggagtgtgtgcactgagtgcatgcactgaggagtgtgtgcacacgcatgccgcaggacc

SEQ ID NO: 249961 - DNA, 122 bp, Homo sapiens
cagcttcacttgaactatcacactcatattctaatatatctaataattcataaattccagcgtaaaataaaatacaattgccaagtcaattattttttccaggaagacaatttttagtgcag

SEQ ID NO: 249962 - DNA, 122 bp, Homo sapiens
ctaccacctgctcccgaggagggggcggcaaggagagggagggggcgcagcggggaggaacgccggggtgaacgttgaaggagtgttagagatccaagcttggaaacctggcaaggttagtt

SEQ ID NO: 249963 - DNA, 122 bp, Homo sapiens
tgtgatccgcccacctcggcctcccaaagtgctgggattacaggcgtgagccaccgcgcccggccaataagttgttttaaatggccatccaggccaggcgtggtggctcatgcctgtaatcc

SEQ ID NO: 249964 - DNA, 122 bp, Homo sapiens
cgattgcagaggctgttgctaattggagaagccccactaagcagcggcagcttcctgcttcggatcctctctctgctgcttgcatttaaagagcaaactcgtcttgtctacccaccctccct

SEQ ID NO: 249965 - DNA, 122 bp, Homo sapiens
aatcaaggtcaggttcagacccagcctctgaggagggacctgaactggcctggggagctacgccttgggggctttctcaggagccagcaggggttacaatttggtcgggtccagtgtgtccc

SEQ ID NO: 249966 - DNA, 122 bp, Homo sapiens
agtcccacagcttcctatcatcagcagccactttagcggctggggcagcttgagtttaggcgacgaattgggaagaggggaaaggatcaggttgggcagagaatgtgaggatgaggctgtgg

SEQ ID NO: 249967 - DNA, 122 bp, Homo sapiens
tcagacgtttacgcagtgggatgacagaggggccgacggtgctgagtcacgtgaaggtcccgttgcagactgggagagaacggccagacatggacccagggagagcacagacctcggttaag

SEQ ID NO: 249968 - DNA, 122 bp, Homo sapiens
tgtcatcgcagctgcatttgccaagctggaccgcagtggggacggcgtcgtgacggtggacgacctccgcggggtgtacagtggccgtgcccaccccaaggtgcgcagtggggagtggaccg

SEQ ID NO: 249969 - DNA, 122 bp, Homo sapiens
atggatcccatatccaccaccaccacacctccctcgagcataacacacagaacccactgccggactcccaccaccagagcctgcagaagagctggtactataaacccgcctgctcattgaac

SEQ ID NO: 249970 - DNA, 122 bp, Homo sapiens
gcttctggacctgtcgatgatggatcttgctgtcccctggccccggctgagtggctgcaacgcttggtgtccaagggcaatgctgagagcacccacctggcagtagtcagcagatcaggaaa

SEQ ID NO: 249971 - DNA, 122 bp, Homo sapiens
ctctcctttccatctccttacttccgcccctccggtgtctctccgagaggtgtccccccacgccccgcgccctccgcaccgcgggcctcgcttcccggtcccccctggcttcctcgccacgt

SEQ ID NO: 249972 - DNA, 122 bp, Homo sapiens
aggtcatgagcccctccaagggtggcccctcatggcccaatttcgaagtacagggggaagcgataaagcgacaagttccggcggggatggcccatgatttatttgctggtctccagttagca

SEQ ID NO: 249973 - DNA, 122 bp, Homo sapiens
aagaagtctgatggctgggttggcttaggctgctgtgaactggctattgccttggagtgtcgacaggcatgcaagcaggtaacactgggtagtcaggctctcaaacatcatggagtgcagtt

SEQ ID NO: 249974 - DNA, 122 bp, Homo sapiens
agcatcttttggggggagggaattcagcggatcagtcttaagaggagcttttttttggagcgagaaatcatataaaataaaatgaaataaaacaaggaggaaggcaaccagctgttagggga

SEQ ID NO: 249975 - DNA, 122 bp, Homo sapiens
atctgctggaaggtggacagcgaggccaggatggagccgccgatccacacggagtacttgcgctcaggaggagcaatgatctgaggagggaaggggacaggcagtgaggaccctggatgtga

SEQ ID NO: 249976 - DNA, 122 bp, Homo sapiens
gatgagtgtgtggcaggtggggactcagagtgacagtggccatgcggtgtgtcccgtggtcgccccagaggcggatgggccaggccgctgcacataccctgggaggaggcaggtggggaggg

SEQ ID NO: 249977 - DNA, 122 bp, Homo sapiens
aggcacagaaggaagttttctttttcaggactaggtctctgtatgaaggacttgtatctacggaggagtccagggcctcaccttgtgtgtcttctctttctgcttcccccatttcccaggct

SEQ ID NO: 249978 - DNA, 122 bp, Homo sapiens
ttcattcgggtataaaaggaagcccctgagaagctttaagcaaaaaggagtaaaaggtagcgaaaagatcccatgtgtcttccaaacataactctagctgttctgtggagaatggactggaa

SEQ ID NO: 249979 - DNA, 122 bp, Homo sapiens
ccctccctcgactctcctccccccactcacctgagagcggcggcgacagctgctggtccccgtccccctgcgcttgcctcatactgtccgcaacatccgggacctgcgggaccgccgataca

SEQ ID NO: 249980 - DNA, 122 bp, Homo sapiens
ctcagcctcccggttataagcatgagctatctcacctagctatgtaagtatttatttccccgagttatcaccaaagaggaagacatgacatagggtttggttctcaccttagtcttgtcctg

SEQ ID NO: 249981 - DNA, 122 bp, Homo sapiens
cccctgcccggtccccttgcaaatggctcatggtttggagggggtcaggttcgggaatcccggccagtgtgccaggcgagagaccgaataaagagggatacatctccgctgcccccagttgc

SEQ ID NO: 249982 - DNA, 122 bp, Homo sapiens
ccctttagcagaagagggatgctgacaaaatcaggtttagctgaaaggatcaagactaaacgtttcatttccaaagtgagggaatgtgagtcgttgaacctaaacttccatacaataaattg

SEQ ID NO: 249983 - DNA, 122 bp, Homo sapiens
ctatgtatatgtaaagtccagggttatgagaaggcagaagtaaacttgctgggtagaaggcgtcatggtatcatgtgatgtggcttagattaatatgggccagaacactttctctttagaca

SEQ ID NO: 249984 - DNA, 122 bp, Homo sapiens
aataatgcttcaagagacccttctgcatctctgaagctggaaaatcagtttcagcgattgcgccagatataagacagtggtccacaaatagataaccagacaggggtctctgcactcacctc

SEQ ID NO: 249985 - DNA, 122 bp, Homo sapiens
acataagggaatcagagagatgagggatgaacgtgggactccaaaaaagataaattgatccgctgtcagtgcagtggaatgaaaatgaaatcagtgtaggcagtgcccatttccctcctcat

SEQ ID NO: 249986 - DNA, 122 bp, Homo sapiens
ggcggcggcgcgggagccggggcggtgggcgtggagctgtccccgtggggacggtcctggcggccgcggcggcgctgcagcctctttgtctgcaacccccgacaggccccgggccggggcgc

SEQ ID NO: 249987 - DNA, 122 bp, Homo sapiens
gaggaaaggggagaaggcgggtagtcatcaattccaggtccagcctaagttctgggtccccggccccagcgagagcctcgcctcgcctcgcgcgcctgcgcggagcgggctggcttcctgaa

SEQ ID NO: 249988 - DNA, 122 bp, Homo sapiens
catagagtttcatactgagaagtggtcaaggggaagagcattgtgtttgaagagatgctacgctggaagaaagtgtgtaagcaattcctggggttcagtttctggaacagccaaggtttggc

SEQ ID NO: 249989 - DNA, 122 bp, Homo sapiens
cgctggctccccgtccgtcccaccagccttgctgtcctgggcaggccggggaattcctcccggttcctggaaaaaacaactggggccgagagaaaggccctcagtctccccaggcacccgcc

SEQ ID NO: 249990 - DNA, 122 bp, Homo sapiens
gaatttgggcctgaatctcatctttacagggctttcccagtcccctctcatctgaactcacgaatgtcttcagcctgtagggtcaggtccctgcctgtcccatgtccattctgaccgtgcct

SEQ ID NO: 249991 - DNA, 122 bp, Homo sapiens
acctttcggggtttcttggcctagtggtgctcagcggtgcctactgaagggagggcggggcgtttctccatcaacgtcattgttttttgagggcgctgtgaaacatccattttcccccaaca

SEQ ID NO: 249992 - DNA, 122 bp, Homo sapiens
ggccggggcgggagcctggagtgggcaggggacagcggagtctggaaacccgccgcgcaccgctcctcagctcccgagcccccagcgtctagagagtgggcaggtcgcagactggctccagg

SEQ ID NO: 249993 - DNA, 122 bp, Homo sapiens
tagcaaggaaactgctggggacaacaaagcagtgtggattaaaaaataaaaaagtaatggcgactgtttatgctttctacttctgcctgtatctgcagggctgatcaaaaggcagcagtgag

SEQ ID NO: 249994 - DNA, 122 bp, Homo sapiens
tcagtgtgtcaatgtatcctgcattgcacattaattcccacagctagctgcattcttcatcgacacacaagccaagcaatccaccactaagagtcataaaaagcactttgaacaacacagaa

SEQ ID NO: 249995 - DNA, 122 bp, Homo sapiens
ttgagccaccctttggtacttaaagagaggataccctttgtatgttcacttgattaatggcgaatatacagggggagactctcatttgcgtatcaaactgtcggagaagacactcataccct

SEQ ID NO: 249996 - DNA, 122 bp, Homo sapiens
tccggctccttctctctcaacttcgaacaatacaaagtgtgctaggagaagacaagatggcgcccagcaggaggagcggagaaaggcaggggtgtaaatctggcttccaaactggaagcgtc

SEQ ID NO: 249997 - DNA, 122 bp, Homo sapiens
cattgtcggtgggcaggcccatggtccagttgagggatccactcggggatggcagcagctcggcagtgcccgcggccgcacctgaagccacagtgctcggtgaaactcatgtgaggagccag

SEQ ID NO: 249998 - DNA, 122 bp, Homo sapiens
agccgggagctatttaacgaggtttagggtaggctcctaggtcactgcgcaggactgctccgttacaggtgggcaggggaggcggctgcgttacaggtgggcaggggaggcggctgcgttac

SEQ ID NO: 249999 - DNA, 122 bp, Homo sapiens
acctggcagctgaagctcctcctactgccaggacctctgaaatttggtctttatcacccacgatccatgttcatctcacatctcaaggtctctcctgtacagcgtggaattgctcttgtctg

SEQ ID NO: 250000 - DNA, 122 bp, Homo sapiens
gaccgacgagcaaccgtctgaggccaggagcgctgcgacggagccttgaccgccgttgcccggccctctcccgcgcagccccgggcttccgcaggtacctgtgctcgcccccgggaaggggc

SEQ ID NO: 250001 - DNA, 122 bp, Homo sapiens
gcactccgtccctcccttgcaggaaatcgggcctatggcggggctgggtcggcggcagggcggaggtgagccgcatctgagtaaccgagtgatcggggaggctggggcgcggtcctccgggg

SEQ ID NO: 250002 - DNA, 122 bp, Homo sapiens
acaggacctgcgtgagcctggacgatggcctctatgaatgctcctgtgcccccgggtactcgggaaaggactgccagaaaaaggacgggccctgtgtgatcaacgggtaaatatccttcctg

SEQ ID NO: 250003 - DNA, 122 bp, Homo sapiens
tgacaagatccctattcaacagatctcctggactctcattttgagaatcacgtttctctccgcgtgagttgcaccaaaccattcagctattattaagtgtctcattgtctgtctgtttacct

SEQ ID NO: 250004 - DNA, 122 bp, Homo sapiens
gcggcaccgtggctgccgcagcgcgcagaggctgtggaggggcttacggctcccagcccacgggtctcagacccaggggctgggcccccagcccccagtcccgatcccagctgggtcgagcc

SEQ ID NO: 250005 - DNA, 122 bp, Homo sapiens
tgttgatgcacatgattaaaaagccaggggcatgctcagagcaggagtacaaaaagcagacgtttctccctcaagggagctgtctccagtgacccaagactgccatcatgctgggatctgtg

SEQ ID NO: 250006 - DNA, 122 bp, Homo sapiens
cacgagcctctgatctccttttctcatctgaaagtgggtgtcacgcggcccccaccccaccggcctccacgtgctgttaagggcagtgagcacacccgtgcgcaagtccttggcaaacagaa

SEQ ID NO: 250007 - DNA, 122 bp, Homo sapiens
gcagtgcatcgagctggagcagcagtttgacttcttgaaggacctggtggcatctgttcccgacatgcagggggacggggaagacaaccacatggatggggacaagggcgcccgcaggtggg

SEQ ID NO: 250008 - DNA, 122 bp, Homo sapiens
ccaggcctgctcgcattcctgcttgtggcccgcgcaggggcggggtcggaaggtctaggccgggcgcggagcgaggaagcgggtggcgctgggacgcatgctctgggggagatgagtataat

SEQ ID NO: 250009 - DNA, 122 bp, Homo sapiens
ccggccggcactaacccccatggccgcgcttcagtctcaggctggctcgaaggcggcggccgagcccatccatggcccctggagtgcccggctcccgctcccagctccgcgctggccccgcc

SEQ ID NO: 250010 - DNA, 122 bp, Homo sapiens
ccctccggccggccaggcgccccgcgtgccccgggagagccgcggagtcggcccgccagccgcagctgagcagtagccctgacccaaggccccgcccgcaaccgcaggtcaccgcccccgcc

SEQ ID NO: 250011 - DNA, 122 bp, Homo sapiens
tctccaggagatgttttgcttggggtgcaggacacagtatgtaaacaaccctttggactccgtgtgtccttgaggttgccccagtctggcctaccgttcctgccctgcacaaagcttcagta

SEQ ID NO: 250012 - DNA, 122 bp, Homo sapiens
gagccatttcctagagatgggggcctaggcccaggcggagtcctccacggtggcgagccccgaggccacagctggcccactctgcaccaggatccccaacgtgcctccacccacacccatcc

SEQ ID NO: 250013 - DNA, 122 bp, Homo sapiens
tttcagaagtgcgtcactgatcccagccaatgaggtttcgcttcattgtgcgtgtgcgtgcgcaggggttagggggtggggagagaggagttcattgtggtcgcctttgttttaaataacgc

SEQ ID NO: 250014 - DNA, 122 bp, Homo sapiens
accccatgggcgctgacctaatcctctccccatggcctccccaggttctgccccagcgtccgcacaggctccacacttccacctgaggtgggcccaggaacatttcccacggaagcctggtt

SEQ ID NO: 250015 - DNA, 122 bp, Homo sapiens
cggctggagcgcgatctggaatctgactcgcttgaaacagcaccgcggtggattcggagccgggtgagcagggaactgcgcctcagcccctcccacgggccgcccactgattccaggatccg

SEQ ID NO: 250016 - DNA, 122 bp, Homo sapiens
ccggcctgtcgggcgggtctcccaggtgcctgaagtcgctgggaaagggtttgcttagagcgtctggccccatcgtgccccagcggccagcctggacccacagtgtagctagcgcggggttc

SEQ ID NO: 250017 - DNA, 122 bp, Homo sapiens
cagagggcaggcgggggaaaggagaggagttgtatattatagccaaatatgtcttctgaacgtgttaaggcaaattttctggattacttagagcaacagatgtctttctgtccaattttttt

SEQ ID NO: 250018 - DNA, 122 bp, Homo sapiens
ggggagccaggcggatactcagccgctcgcggtagaagggcgcgcaaagctgcggagccgcgtgtgtggagctccccagtgcactcactgctggctccccctcggtgctctgggcccttccc

SEQ ID NO: 250019 - DNA, 122 bp, Homo sapiens
ccccctcccggagtcgaaatttcccgggattatgtttcggaaaggtaggtaagcgccgggcgcggcgcccgctttcccgcagtccggagccggagagccagcgaggcggcgaggcagccccc

SEQ ID NO: 250020 - DNA, 122 bp, Homo sapiens
ctgttacgtgagcgctgcgatctcttgagtccaaactgaacaaaagcgatgcttcttgggcgggttcaaaataaatggctagaatgctggcaaataaaactagggcatgaaagtgagttttt

SEQ ID NO: 250021 - DNA, 122 bp, Homo sapiens
agaaaaatttggagaagtctaatttccagaggctgactgtcttgcctcctttttaaagcgcgtgtggctccggagacgaggcacagcgctcagggcgcaggcctggggctgaccaggtgaac

SEQ ID NO: 250022 - DNA, 122 bp, Homo sapiens
agtagagaccgggactgggacacgcccccctcccggggcactcagagaagttgtctaacccgggggcagggagccccgaatttgagggtgacctgacataacctggcaccaggatgattgtt

SEQ ID NO: 250023 - DNA, 122 bp, Homo sapiens
tcagctggggcccacgtagagtaatttcatcctcctggctcatcattcccccacataaagcgaactgctagggaagctatattcaggcccaacttgacagtggtctctctttacctcagctg

SEQ ID NO: 250024 - DNA, 122 bp, Homo sapiens
aacataaccctttcagtaaggagctcactgtctgatggaggagagacacccctcagcaaccgattagaattagcacctgaaaagtctgatgatggagggaaaaggcctataaccaagcagca

SEQ ID NO: 250025 - DNA, 122 bp, Homo sapiens
aatgaaagaaagttatggccggggtgacacatctgtgcctgtgatcccccggctcccagccgcgcctgcacacgctcattacacatggcctgcaccggccagccgggctctaacatgtcctc

SEQ ID NO: 250026 - DNA, 122 bp, Homo sapiens
tggaggaaatgtcatcattggtaaaggaggacttggagaagaaactgtttaagccactctcgcagaatctgtacgagtttattgaaatagagttctccgtccaggacaggtattacctctgt

SEQ ID NO: 250027 - DNA, 122 bp, Homo sapiens
cagcagcttgcaggccccacactccctgcctacccttcccagaggatctgagcatgaaagcggtaatgttagatccatgggcttaggaataatgcctagctgtgctgactggggcttgcctt

SEQ ID NO: 250028 - DNA, 122 bp, Homo sapiens
tctgtgcgctccccagcctctgatgtcatgcggggcccgcggggctgcggggctggggggcgtgcgcccgcccacccgagcccgcacccgggcaggagagaacctcctcgccgtacccctga

SEQ ID NO: 250029 - DNA, 122 bp, Homo sapiens
cacaattagccctgtggaacccatagatacaaaaaattggtcctccacatcctcaggcttcgcattctatgaatacagtattttagatctgcatttggctgtggacgtgaaacttgccagat

SEQ ID NO: 250030 - DNA, 122 bp, Homo sapiens
ccccaaagccagccgctcgttaaagctgctggtatttcctcctcagcccggggaaagatccggaaagttctggatatgcctgcacatgaaggtgaaagctgacgccagcctgcctcagatcc

SEQ ID NO: 250031 - DNA, 122 bp, Homo sapiens
tccgcccaccgccggggtcaaactgggtccatcggcccggagggcggggatgctcgctttcgattggcctcaaaggtgcccgccccgcctactccccgccccttccttggcagggaagaggc

SEQ ID NO: 250032 - DNA, 122 bp, Homo sapiens
tcaatgaagcctactctgagaatcctatttaaaattgcaacgtactttgggagtccagggcggacagatcacctgaaatcaagagtacaagaccagcctggccaacatggtgaaactccatc

SEQ ID NO: 250033 - DNA, 122 bp, Homo sapiens
ttaacccacaaatgaagcgtttccctctcaattcaattatctgttaaggagagatggctgcggtatagtgaaaacaggcctggaccttcagccagagaactagggtttgaaccctaactctc

SEQ ID NO: 250034 - DNA, 122 bp, Homo sapiens
tcgcttgaacccaggaggcggaggttgcagttttccgagatcgggccactgcactctgaccgggacaacagagcaaggctccgcctcacaaaaaaaaaaaaaaaaaaaaaaatcaaaaacaa

SEQ ID NO: 250035 - DNA, 122 bp, Homo sapiens
aaccccagctccccccccgccctctgcccggtgcagacggggctctccccagacaccccacggcatctgaggaagccgatctgcatgcacctgctctgccccgcgggtgccgggaacctcca

SEQ ID NO: 250036 - DNA, 122 bp, Homo sapiens
taaatagatcgctttgtatctagcacggtagcacctgcttctaagcttccaacggcagctcgagcaacgcgatcattcagaagcggccgctttccattcacgtctataattagcgcgcaggc

SEQ ID NO: 250037 - DNA, 122 bp, Homo sapiens
ccctgtccgtggtactgaggatgctcgggcctagaagttcagggctggaggcccagggaccgtcgagggaggggcatcatccccgccatggggccgccgcaactgcccagagcacaggccaa

SEQ ID NO: 250038 - DNA, 122 bp, Homo sapiens
aggccgctcaaaggcctgggctttctcctctgactgccccagccaaacttctcatccttccgcttctgccggtcctgtctcctagtacctgtgggtccattcccgtcaacatccagccgcct

SEQ ID NO: 250039 - DNA, 122 bp, Homo sapiens
tgacctgttacatgccacacgcgctcccgcccccacgagcacgcggccgcgccaagcacacggtatgggtgtagactggacccgccccctaaatccaggagaccatcaactatggaaaggag

SEQ ID NO: 250040 - DNA, 122 bp, Homo sapiens
ttttctgaagcagaatatttccacagattttggctgaaaaacgtttttctgctgtgggtacgtgagcaggaaacatggagaagaatcctttggcagccccattactaatcctctggtttcat

SEQ ID NO: 250041 - DNA, 122 bp, Homo sapiens
tgcacaacccaaacactctgccccaactatttctagagcctcatatctctctcttccctgcgagcccctggtccactcctatgattcattcagctatgtgaacattatgctcttattaccac

SEQ ID NO: 250042 - DNA, 122 bp, Homo sapiens
attcagcacagcgtattgtaattgtctgtgtacttacctacacccagacaagactgtgaacgccctgaggagactagcatgatcttattctttctcctagctttggctgccagcacctaagt

SEQ ID NO: 250043 - DNA, 122 bp, Homo sapiens
ttcagcttgaaatattagctacactttggtaaaaatacttttgaactttatcttcacagtcgcggcaaggaaaacaaaaggtataaacattcattggttgaaaaacaatgtcataaagttgt

SEQ ID NO: 250044 - DNA, 122 bp, Homo sapiens
tcctacatggggaaactgagacccgggacccaggagccccgacacccgcacgtccttccccgcttcccagagcccctcatcccaggcgcccggggagcttccaggaggaggcggcccgagtc

SEQ ID NO: 250045 - DNA, 122 bp, Homo sapiens
ttaagatccttcatcaactctgggatatgaagttgaagatgataaggataatgatgatgacggtgatgatgactgcaactgtcataccattttataggtgaagaaactgaggcagagttgac

SEQ ID NO: 250046 - DNA, 122 bp, Homo sapiens
aggttaggtgtattaaaagcattttcagttcatgacgttttcaatttatgctgggtttatcgggatgtaaccccatcataagtcaaggaacatttgtgtactgcatctgtgccttcctctga

SEQ ID NO: 250047 - DNA, 122 bp, Homo sapiens
ggctgccccaggagaatgagggggaaagcatcaagacagagaactgtatgtgttagaacccgggggaccactggggtcattaattatatcgactggtggctgtgatctctaggttggaggtt

SEQ ID NO: 250048 - DNA, 122 bp, Homo sapiens
cgacgtccctcgcacgcacagctgaggagctgagcagcaatacggggcggggtgcagctccgctttccccagagtgcgcaagtgcgctaaggcgcccgcccacgcagtgggcgggctacggg

SEQ ID NO: 250049 - DNA, 122 bp, Homo sapiens
ccacttccagaatgtccatcaggttgatcatgatgtttttgtgtgtcttcttgtacttcccgacacgtagtgagacagtgagccagccagggcgccccgtgcacatgaaggtcttgctaccc

SEQ ID NO: 250050 - DNA, 122 bp, Homo sapiens
gacttcatgcggaaggtggctccgggtgacctgggctgctgccccctgccatataccccacgaacctggctctacgttgtcccctctgcaggcccaggcccagctacaggagtcctctcaga

SEQ ID NO: 250051 - DNA, 122 bp, Homo sapiens
gtggcaggctgtggcatccccgacagcggccggtggcggaggtatgggggcgggtggcaccgctcactcgagattcacagaacatggcaagcccgcctgactggcatggcagtgaatcgtcc

SEQ ID NO: 250052 - DNA, 122 bp, Homo sapiens
gaaatgatgggaaagggtgagggtgggcaggtggtgggggtggggtcgaacaaatggccccgataaaggcagagcagctggaatgagtgctgggcagccccacacggctgggagccagggtg

SEQ ID NO: 250053 - DNA, 122 bp, Homo sapiens
tgagctgcttaaggtatgggtcagctatctcaaaaatactcccacaaacacccccaccctcgctcccaccccacaaatctgcaaataatttcatggggttcatggacttgctaaagcccatc

SEQ ID NO: 250054 - DNA, 122 bp, Homo sapiens
ccctgttcctgcctgattccacctgtctcttgatcctgtgtgtggaatggggccacaggccggggctgctctcaaagaccccgtatttgtccattcttgtactgctgtaaacacctgagatg

SEQ ID NO: 250055 - DNA, 122 bp, Homo sapiens
aacactgcatgctgggcactgtcccgagtacatgaccaccctcacaatactcctgcagagcgcacgcgtttatttccccacgccaaaggtgaggcctcagaggctgaggaatcggcccagcg

SEQ ID NO: 250056 - DNA, 122 bp, Homo sapiens
ggtgattcccatagagaagacaactctgtgctgcctctccaagagctgccgctcggctcgcgctcaccactgccaccacaacgacagccgctcggtggtgactcccccaacaccccacttcc

SEQ ID NO: 250057 - DNA, 122 bp, Homo sapiens
tcatcgcgctgggctgcgccttcaagctctactcactgcgcacgcaggaatacaggtgggcgctgtgcccgcagccaggggaccgggcttcttcatcacccaggcttgctgtccccgtagct

SEQ ID NO: 250058 - DNA, 122 bp, Homo sapiens
cctcaatcagaccatgctcggcccccagggacggaagctgcaggtggccgggagcacccccgcggcccacccagtcctcctcaggctgggatctgaacccagccccggccccacccacccga

SEQ ID NO: 250059 - DNA, 122 bp, Homo sapiens
tgcttctcttcccttgctgtgctctaaaacgagaagtacaagtgagttcccccaaggggtcggccgcgcctcttcctgtccccgccctgccggctgccccaggccagtggagtggcagcccc

SEQ ID NO: 250060 - DNA, 122 bp, Homo sapiens
ttcagctccatgacattgggtgagttgtctaaatgctctgtgctttggtgtccttgtctgcgtgtgacatgaagccgcagatctcaaagatctctttcattccgtgaaagcgctctcaatgt

SEQ ID NO: 250061 - DNA, 122 bp, Homo sapiens
gcaccggggttgtgagcgggggagcctcgggccttgggcccgcttggcacggggcgggggcgcctcctccaactcctggagatcaggcccagaccccgggtgttctcaggggacacactgtg

SEQ ID NO: 250062 - DNA, 122 bp, Homo sapiens
tccatgcttgtatccattcatcatccatctaccatccttccatttgtccatgtatgcttccgtccgtccttgttttcatctattcacccatcctcctatctgacatgcatccatctacccac

SEQ ID NO: 250063 - DNA, 122 bp, Homo sapiens
tacttgggagggacgtgacccggacaggtttccctcagccagacgaagtgtggaaagtcacgttctatcgtgtgtacccttctagaattagcccaagtcatgagtatgctacattttctaac

SEQ ID NO: 250064 - DNA, 122 bp, Homo sapiens
ttcctctcagcctgtgtctgtctcaaaggccccacctcacctcccctaaaggtagtcttgcgccagggctcacgtgcctgggcagggctgattgccaaggggcccaatggcctcgtgactgg

SEQ ID NO: 250065 - DNA, 122 bp, Homo sapiens
aggagaacctctcccacccccgcctgcacagatccctctggataaagttaagagttcccacggctgacagcggatgagcccagagaaaggcaccccgccctccgtccctggtggctgccggg

SEQ ID NO: 250066 - DNA, 122 bp, Homo sapiens
tgataagggctttaggccaggcacggtggctcacgcctgtaatcccacactttaggaggccgaggcaggtggctggcttgagttccagaccagcctggccaacatagtgaaaccccgtctcc

SEQ ID NO: 250067 - DNA, 122 bp, Homo sapiens
gaaagtgttggtgcagctcgtggttacttttaccgtttcagttctcaaatgtttccccttcgctttccccctctccggtctctgtgtgtcttgttggaggtggcttcagttcattgcccctt

SEQ ID NO: 250068 - DNA, 122 bp, Homo sapiens
gcgcgctcgctgggggaagctagaactcaggtgcccacgacaccaggatctcagtctcgccgtcgcagccgccgtcgctgccttacaccgaaaaacagggcacggccatcttcctcttgctc

SEQ ID NO: 250069 - DNA, 122 bp, Homo sapiens
gctagagtgaacttgggccactgtgaagagaaccatatcaagactctttggacactcacacggacactcaaaagctgggcaggttggtgggggcctcggtgtggagaagcggctggcagccc

SEQ ID NO: 250070 - DNA, 122 bp, Homo sapiens
ggaaagctgcaggcaggctggggaggaaggtggagcaaagaaaagacatcctgcgctagacgactgtgcgcatggccggcagctgggttcctccagggagacgcacacatccaggaaaccag

SEQ ID NO: 250071 - DNA, 122 bp, Homo sapiens
ataagatgaggaaactgaggctcaaagaaatgattttactccccaaagtcatacaattatcggctgagcctggatgtgaagccagaataaaaaactccaaattgagacctctttccattata

SEQ ID NO: 250072 - DNA, 122 bp, Homo sapiens
tcacgtctgacggactctgctgacaggtgtggtccttttccccaaagacagggttccatccgtgggcgttccgccgcctccgaaacttcccccggacgttcaggctcccccctcttttttgg

SEQ ID NO: 250073 - DNA, 122 bp, Homo sapiens
caggagaagcctttgtcttaacccccaagcccctcctgctagtcctcgctgggtcagtagcgctgggagtaattaatattacgaacattagcctttccttcacctccgcaccagccaacact

SEQ ID NO: 250074 - DNA, 122 bp, Homo sapiens
agcggcgcgatcctagctcactgcaaccctcgaactctcagtttgaggctgaagctcaaacgttccccccgcctcagcctcccaagtaggcgcgcgactagaggcgccaccaattcccggtt

SEQ ID NO: 250075 - DNA, 122 bp, Homo sapiens
cctgggggcgggggcacgtgccaggtgggcgccgggcgccaggccccaggagggcagccccgcccctagccccgcacgcacctggaaggcattgttgagccacagcaccgagcaggaggtga

SEQ ID NO: 250076 - DNA, 122 bp, Homo sapiens
tggacaggggttttcatagccttgctaagtatgcagcaaatcctaagtggaacctcaacacgtaaaacacatagaaacagagccattttggttgaactgggcaaatggatcttgcattctgt

SEQ ID NO: 250077 - DNA, 122 bp, Homo sapiens
gtaatttttaaattagcaacagcgttagactacttcggggaaacctggctctgtgtgccacgaagcagggaagggcttgttcccaggcgcagcagcacttgggcatcccgtggtgaagtcag

SEQ ID NO: 250078 - DNA, 122 bp, Homo sapiens
ggcaaattggtcaacactcctgactgccaaattatctagtatagactatctctaactgcacggaaactggcgtttccttatcctcatctgtataatggcaacatttctctgctgcttcaaaa

SEQ ID NO: 250079 - DNA, 122 bp, Homo sapiens
cattccctgaggggtcatgtgtacctgaatgcctcctccaggcagcctggagaactcagacgcaggtcatgtgcatcaggcaggaaacaagtgggttgaagggtggaatctaggagctggcc

SEQ ID NO: 250080 - DNA, 122 bp, Homo sapiens
gcaggcctccagcaggtcctaatcctgtgtgccagggcaggcagtgccccaggggcaccacgcctgactctccatcacccaggccttgatgccgagcgggagtagagtgtttcctctgctca

SEQ ID NO: 250081 - DNA, 122 bp, Homo sapiens
tcacttccgcccccaacgttcttacgcacagcctcttccggtcgtggggccgagcggttccggtgaaaatgtcgattccgattggactctcgatgatttaaaggcatctggcgtttctgagg

SEQ ID NO: 250082 - DNA, 122 bp, Homo sapiens
aaaccccagtcctcggccttgctatgtggtcttgggcaccttactagcggtgtcagggcccgagtttctcctgtccaaggttgcctggtgaggattaaaggtggttccggccaggcgcggtg

SEQ ID NO: 250083 - DNA, 122 bp, Homo sapiens
gcctgcacaccaagggcgcccttcccctggatacggtcactttctacaaggtaaccggggcgggggacgtcgcgcgcaggtgccgccggggcgcccggaagagcgcgcgcccgtggggagac

SEQ ID NO: 250084 - DNA, 122 bp, Homo sapiens
cgtgggcaggagtgagggccccaggccctctgagcgctcaccccagctggggacaggccccgtggttttcaggcacaagacggtagcccggcctccagcaaccctaaacagctgggctgctg

SEQ ID NO: 250085 - DNA, 122 bp, Homo sapiens
tttataccatggcccaggattgtcatggattctattgattaaggaaaccaaagttgtacacgggcagaaaagagaagtccttttatttgtgcacggagctccatacactcagtggatttgaa

SEQ ID NO: 250086 - DNA, 122 bp, Homo sapiens
tccgccagaaaacagccggcgggcggcgagacttcgtgcagagtgcgggctcctctccggcgccaggcccgtcccgtctccctgggagtgcgcagcctacacgcaccagtttctctttagaa

SEQ ID NO: 250087 - DNA, 122 bp, Homo sapiens
gaagatcctgcactgtagctgccaggcctgcggcaaggagcctagtcacgaggggctgagcgtctatgtgcagggcgaggacgggccgggatcccagcccggcacccaccctcacccccatc

SEQ ID NO: 250088 - DNA, 122 bp, Homo sapiens
gaaggccttggagtgggaaatctaaaggaggggacacactacatgtcccagcacaccttgcgacgcccagcgaccacaattcccagaacgcactgctcgtcgcacgcaggttttccttgttg

SEQ ID NO: 250089 - DNA, 122 bp, Homo sapiens
gaaattatgtgctaatacctcaatatggcaaactcaagacagtaatttgtacactagattcgagcacctacatttaccatgtaaaggtcaaatgatacatccactgagaagctttcgaatct

SEQ ID NO: 250090 - DNA, 122 bp, Homo sapiens
agagccgtggcaggaccacacctgcagtctgcgtcctcgccccgtttccccgtgtcccagcgtgtgctgattccgaccatcagctccaaccagcagcgggctagtgtgccaggagggatcac

SEQ ID NO: 250091 - DNA, 122 bp, Homo sapiens
ccagattacagtctctaagtcttaaagaggccagccccacttagaggttttcctgagctgcgtatcaggacatgagttccttccactatttctaggagtactacactagagcagtatgagac

SEQ ID NO: 250092 - DNA, 122 bp, Homo sapiens
ttttccaggcacacagggtttatatggtagagccaggagcatttcatttgtccttcttaccggcacccacctgggtcacacagtacctggccattcagcacaggaggagcaaagggtgaatt

SEQ ID NO: 250093 - DNA, 122 bp, Homo sapiens
ttccctctaccaggagtgtgaagacacagagacttattgcgctggcgaagatggctgaggcgaaggcgtgtccgacttgtcctcggagttctgagggtttcagtgaccccagaaggctgaga

SEQ ID NO: 250094 - DNA, 122 bp, Homo sapiens
tagatctgagaaaaaaaaaaaaaaggcagcaagctaagccatgcgtctgggacactggctcgcctccaggatttcaggagagttgggtttcagcatgcacagagagaaagtgctccatttct

SEQ ID NO: 250095 - DNA, 122 bp, Homo sapiens
agctttatttttattttgaagtggcttccccctttctgaaaagggacttggcaagagttccgttctgtcacagtgaattagacaccaacttcccttgtcaacagaagttggcctgttgggct

SEQ ID NO: 250096 - DNA, 122 bp, Homo sapiens
cctgctgtaggcgtacgagctgccgatgttgaggtttcgcagcgagtggctctgccgttccgcatgcaccaggcccctgttgagctgcttcatcacagtctcatagtctggggtggggcggt

SEQ ID NO: 250097 - DNA, 122 bp, Homo sapiens
ttttaagcagccaaggacctgtttgccaccatggcctgccaaggtgtaagatgtatgcggcgataacagagtcacacacaggactttctaatccatcagtgtcagctctccctgacagagcg

SEQ ID NO: 250098 - DNA, 122 bp, Homo sapiens
attttctctgttgttcctcctcccgtgtatgcgtctctcgtggtcccagacagtccccaccgtgcttaaagcaggttagggatgcaaaggaagagtcaacccagcctctaatattagcaggc

SEQ ID NO: 250099 - DNA, 122 bp, Homo sapiens
cccctccagtcggaagcccctcactctccattttgctgcttatcaagaccttcgtgtgtgcgccgttgctagttccggaattgcattctgcacgaggaggggtcgcctatagattcttagtc

SEQ ID NO: 250100 - DNA, 122 bp, Homo sapiens
cgcggcccccacgcctggctaatttttgtattttgtggggtagagatggggtctccgtgccgccctggctcgtcggtctggaactcctgagctcgcgtgatcctcccgcctcggcctcccaa

SEQ ID NO: 250101 - DNA, 122 bp, Homo sapiens
gccctcctctccctcgcggctccgccccctgcccgcctctgactgtaccccgcccccaggcgccagccccgcctatctgggcttctggtcccgcccaggttcttgtccctcgggccccagcc

SEQ ID NO: 250102 - DNA, 122 bp, Homo sapiens
agcagaggggggcacctgcagacccagccggggagaaggggcagccatggccgagggtgacgctcccctggccccgccctggcccacagggagggacaggagtctccggagcagtggcagcg

SEQ ID NO: 250103 - DNA, 122 bp, Homo sapiens
ccaaataaggaaggggttcgggtcgcagattggaacaggcggtttgggttgtttacggagcgggtgtctaggtacaaagaggtacaaaaaagttggtcctaagaacaaggaacaagaaagtt

SEQ ID NO: 250104 - DNA, 122 bp, Homo sapiens
actccctccctggagccatctcagatgttatgctagaatggatgtacctgcagtctaacccgttgtgtgaattttgcatattattatgcaaaaactagtagtgtctctaagagctgtcttga

SEQ ID NO: 250105 - DNA, 122 bp, Homo sapiens
ctgaccacactgtatcgtgagtgtccgttgacgtgaccaattgccctgccaggctgtcagcgcctcaagggtagggtctgcgtgtgatttgtctctgagccccctgtgcccacccagggccc

SEQ ID NO: 250106 - DNA, 122 bp, Homo sapiens
agatgtcagtactgcccaaggtggtctactgattcattgcaatccctattacaatcacaacgagcaagagaaactcattctaaaatttatatggaactcaagaaaccccaaatagcctaaac

SEQ ID NO: 250107 - DNA, 122 bp, Homo sapiens
gggtggggagcaaggggctttgatcactcagcggggccttgccctttctggaagggtgtgcggtctgggtgggcgagtctcagaccgcagaggatccggcgcctgccccactctggagccgg

SEQ ID NO: 250108 - DNA, 122 bp, Homo sapiens
accctgcgcccgcggttgagcaatgatctgcgtggtcagagtttgtgactgcggtggtctcgggggcgcagggctgtccgccatgtgaggcatggctcttcttcccaagaaagccagtcacg

SEQ ID NO: 250109 - DNA, 122 bp, Homo sapiens
tgagtagctagtgtctgcggagactgccagcctcagccctaggcaaaagcgtgtttccctcgagtgggcactccgcaccgggcttccctccaaggccaaggcagtgcgtgtgggtggcagca

SEQ ID NO: 250110 - DNA, 122 bp, Homo sapiens
ttttactgaggcacacagcattttagacaggagaaccctgatggcagaggctgggtctcacgggaccctgtctccttaagggcttagtctggggctggagcctctacagatgtttgagcaaa

SEQ ID NO: 250111 - DNA, 122 bp, Homo sapiens
gagtctctcacactgttctctgctcctccagaaaatgcagctgtgatttgttgctgggagcggcggcagcgagtccctgcaacagcaataaacttccttctcctcgggccacctggatcctt

SEQ ID NO: 250112 - DNA, 122 bp, Homo sapiens
tgggaccgggtgaaagaggcccgggaacgttggagaaagttaggcactagaattagcaaacgggaccccagccgcagggcagtgtggccttgcctcttggcttcccagcaatgtggcctggg

SEQ ID NO: 250113 - DNA, 122 bp, Homo sapiens
gaggcggaagttgcagtgagccgagatcacgccactgcgctccaacctgggtgacaagagcgaaactctgtttcaaaaaaaaggaaaacgtatgtggatgaaaggcccgtacttaagagcta

SEQ ID NO: 250114 - DNA, 122 bp, Homo sapiens
cctggtgtttagatctaggaattcctttcagcaggtttgaagagcaagagctgagaaatgcgccctccagtggcagtggaatgaggggtgtctagtaaccctttttaccaccaaacaaagcc

SEQ ID NO: 250115 - DNA, 122 bp, Homo sapiens
tgctgggattgggatagaaacatgaaaaaggcatcccagaggtgcctgggaaccaggactcgtgacaaaagtgaagtggatgtgtctgtctaggcccttcccattggaagcacgtgttggaa

SEQ ID NO: 250116 - DNA, 122 bp, Homo sapiens
tggtgcagctcctgccattcagacccccagccctcccccagatgtccgtcccctggccgtcgccttccccaaagtcttcgcagtgggcaaggaggcctcccccaagctctggtcccggccaa

SEQ ID NO: 250117 - DNA, 122 bp, Homo sapiens
accaagagcctggtactgcacggcaccagctggtaagaattaggcttttttggccgggcgcggtggcttatgcctgtaatcccagcactttgcgaggccaaggcgggcggatcacgaggtca

SEQ ID NO: 250118 - DNA, 122 bp, Homo sapiens
caacgcgccgcagctctgacggtcgcttccggtccttgagcccgatgtaggcgtgggagccgtcgtggtactccaccacagccacgcggacccacttctaggagatgcgcagccgctccatc

SEQ ID NO: 250119 - DNA, 122 bp, Homo sapiens
gtgcggccagcgtggagtgtgttttccacccgagggaggccctccccaggctccactcttcgcccgggctccactctcccgggttccactctgcctgggcaccactctccgcccgggctcca

SEQ ID NO: 250120 - DNA, 122 bp, Homo sapiens
gcgggtggcagtgtctgtcgcccgtgtgtgcacatgtgtgcctgctcctgtacagggccccggcacgcgtctcagacgggctgccggctttgttgttggaggcgcaggcttctccagattgg

SEQ ID NO: 250121 - DNA, 122 bp, Homo sapiens
tatgctataaattgagaaataatggaaaatgtcttaagtctcaacagaatgggattcttacggtcagggcaattcagacaaaggtttgctttggggaatttttaatttgtatcacatttctc

SEQ ID NO: 250122 - DNA, 122 bp, Homo sapiens
gtcggttctgggatctcctcgggggctgggtcggttctgggatctccacgggggctgggtcggttgtgggttctcctcgggggctgggtcggttctgggatctcctcgggggctgggtcggt

SEQ ID NO: 250123 - DNA, 122 bp, Homo sapiens
tctcaaagtgctgggattacaggtgagccactgcgcccggcccatgcccagctaatttttcgcatttttagtagggacggagtttcaccatattggccaggctggtcttgaactcctgacct

SEQ ID NO: 250124 - DNA, 122 bp, Homo sapiens
tccaaagacagcagcctctctagctgaggcaaagctggctgtgcaaagagccttttacagcgtggcccacagacaatgtgaaattctctctcctctgcagccttggtctgcagtgacactgg

SEQ ID NO: 250125 - DNA, 122 bp, Homo sapiens
attcacatccgaccaggtcaagtgactggagttcaccggtctcgggtataccgcatctcgcgccaggcttcaaactctagatccccgagtctcgagctccagctgggtgtcgagacgggtac

SEQ ID NO: 250126 - DNA, 122 bp, Homo sapiens
caggagagaggagccgggtggggcacagggacagcccagggtccctcagagcttcgaggccgggcgccctctgcgttgggagcttggggtccccctgacagaaaacctggggggggcgttgc

SEQ ID NO: 250127 - DNA, 122 bp, Homo sapiens
gcgcgagcgcgcgcagggagggggcggggcccggagggggcggggctcacaagccaactccgcgctgctgcccgacccacgcagtccggcctcgccccgccccacccgcaccctccaaccaa

SEQ ID NO: 250128 - DNA, 122 bp, Homo sapiens
tctccctccagggtctccaaagccggcattggccccaggtacaaggaaggccctgaggcccgtatttaggagtgaactggtcacacagttagtagatgggaaagctggaatccagcctacat

SEQ ID NO: 250129 - DNA, 122 bp, Homo sapiens
aggtcaaggagtatttatggacagcctacttttgcccccggaccttaagaagtcctgctccgggatcagccgccgaccggaaagtcaaattagcagtgcccagcgcgagcttagagcagcct

SEQ ID NO: 250130 - DNA, 122 bp, Homo sapiens
tgattttttttatcaagtcgtattttattgtacaggagccacgccctgatttcttaaaggcgccttgcactctggccatgtgttatctctgcagccggtgtgtgggaggcctcttgtgagcc

SEQ ID NO: 250131 - DNA, 122 bp, Homo sapiens
tgtacatctcctcggagccttcctcgctgtcgttctcctctgactcggtcagcagctcctcgtccttatattcagccacgtccaccgcggagcccaggtgctctttcagcttcccgtggtgc

SEQ ID NO: 250132 - DNA, 122 bp, Homo sapiens
cgcggcctgggctcaccatggcccagaagtaggtggccatctcgtggcggttctgcagcacggcccacaggaacaggtcccgccaggggttctcgctcttctggttcaggtccagcagccac

SEQ ID NO: 250133 - DNA, 122 bp, Homo sapiens
cgaggagggagacagtgatacagcactgggcaagtgctgaagcgacaattacttctagggcggggtaaaagccccagagtatttttgctggaaggaggtatttatttgagcagggttctgga

SEQ ID NO: 250134 - DNA, 122 bp, Homo sapiens
cagggctcggtgctggccctgatgccccgtgcctccccatctcccgaggggccactcattcggcaaacctttattaagcccctccaggacccccgacgccgcctaggcgcccagcgacgcgc

SEQ ID NO: 250135 - DNA, 122 bp, Homo sapiens
tgagccctgcctctgctcatctgtctttgtccattcatccaagaacagttgtgtgtacagcgcctggcatctctctcagcacctccatctcccacccaggtccctccatgcttctgccgcct

SEQ ID NO: 250136 - DNA, 122 bp, Homo sapiens
tttagaaattactcaagtatatgagagcgaacctgaaaaacaagacttttctctttgttacgctcccgctacgggtctggccgccgcgccccattctccgggattccggggccgcgggcgcg

SEQ ID NO: 250137 - DNA, 122 bp, Homo sapiens
ctgcccatatgtagactgtacttagaaatatcttgcactattttagatttcgcagcccaacgctggatggatgattaaccaagtaggagggtattaggatacaagaggttgccattttaatg

SEQ ID NO: 250138 - DNA, 122 bp, Homo sapiens
aatggaaagtgggtggaggggacagtgcagctctgggccctcttacacctgtgtcaccaccgtgatacacacgcccaaagcgagaagagagatgtgaagcctgacacctcctaaccgcgggc

SEQ ID NO: 250139 - DNA, 122 bp, Homo sapiens
tctaaagggttcactgataacaggctgcgagcacaaaggggaacgtttggtcaccctattcgtatgaagctgaaatgggaagcattgggtagaagagtctgcataggcccgtgcttggagtc

SEQ ID NO: 250140 - DNA, 122 bp, Homo sapiens
tctatcagtcggtcagtcagtcaacaaatatttacagagcacctaacatgttccaggaaccgtgctgggcagagagacagatgagatgaccctggggggcccaaggacccagaagggggccc

SEQ ID NO: 250141 - DNA, 122 bp, Homo sapiens
atctcaggtgatctgcccacctgggcctcccaaagtgctgggattacaggtgtgagccaccgcacccggcagttttgtgaacttgaactatgggcgttatctgtcctgactgtgtttctcat

SEQ ID NO: 250142 - DNA, 122 bp, Homo sapiens
tttggaccccctgcccggtcctattgacctctgctctctccctgcagcacttcctggaggcgtttgaccgggacctgggagggcagctgagaagtgcctgaccattctcaaggagctgcgtg

SEQ ID NO: 250143 - DNA, 122 bp, Homo sapiens
ccttctgatcccggtttgtttgcttgcgtttctcagggacctgatgcccagaaccctggacgggcagatcaccatggagaagacgcccagttacttcgtcacgcgggaggcccctgcgcgca

SEQ ID NO: 250144 - DNA, 122 bp, Homo sapiens
gatgcttgcttcctggcggggttctgaaagcgaacaccgcggggcaagatggcggtagtgcgtcggctgctgccccgggtctggcagaactcgggtgttttgggctgagacagtggcagctg

SEQ ID NO: 250145 - DNA, 122 bp, Homo sapiens
gtacccttcctcagtgccatgggtactggaatcccactgcatgattcatgagtctaggcacgtggatgggctcatggatgagcatggtctaggcacatggatggcctgtggtcatactgcct

SEQ ID NO: 250146 - DNA, 122 bp, Homo sapiens
tcctcgtctgcagtagccaatcaacacgaggcttgtaggctgccgttcctcgattggctacggctctagctccgcccgccgcacttggcgacggtgtccggcggggaggcggcggcttccgg

SEQ ID NO: 250147 - DNA, 122 bp, Homo sapiens
tgagagccaactccttcctttcaataaattcttattttctatcataatattgctttgtaccgcacaaaatacaattataatttttaatagtcaaagaaattttaagttatcaaacattagtt

SEQ ID NO: 250148 - DNA, 122 bp, Homo sapiens
tctgacgctttcatgtctgggcctcgctgacttgggagggatggcttttcctgggctggccggttcctggggacagtgagcggctcgcctgtggtcgtgcctgtacatgaagccgacttcca

SEQ ID NO: 250149 - DNA, 122 bp, Homo sapiens
cagttttgtatcagaaaacagactgtagattgtttcttcacttgatcttagccaaaagtccgagaagcgatatagattatttattgaagacatttttgcattgtgtttctgggaccaaaaat

SEQ ID NO: 250150 - DNA, 122 bp, Homo sapiens
cactgcctcagctgtttctgacttctgctgcttacccagacaggtcccttaatagctcagcgcctcagcttcctcatctatcaaatggcaatagtaatagtactaccatagagggtgccaga

SEQ ID NO: 250151 - DNA, 122 bp, Homo sapiens
ggagagtagagcatagagcagggcgatctctgtacaactctctatggttctggaggaccgcggaggtcgtgggaggagagagatgtggcctgaggatctggctcccaaactgttaagtttca

SEQ ID NO: 250152 - DNA, 122 bp, Homo sapiens
agaaagttatcctggctgggtgcagtggctcacacctgtaattgtaacactttggtaggccgaggccggcagatcacttcagcccaggatttccagaccagcttgggcaacatggcgaaacc

SEQ ID NO: 250153 - DNA, 122 bp, Homo sapiens
gaactttcaaatatatttcgggaaagcctggaaactttgatatatctaatgaaatcctcccgtttattattcaaagagatcaacagggatatttaaaaagcaatttcaccatggttaacatc

SEQ ID NO: 250154 - DNA, 122 bp, Homo sapiens
ttttaaagactggaaaatggtgtaggcactttctgtctgtcccccgtgactgccagtgatcgagctgcctgtgtccacatttaattgaaggtgtgatgacctagtcagcaaccagtggcttt

SEQ ID NO: 250155 - DNA, 122 bp, Homo sapiens
tgccgattggattctttcgcgtgtgtgtagaagcggccgccgccgccgccgcggcggagacgacaacaacttgctggttttcaggttgggttaacggcatggagaacagtcaccccccccac

SEQ ID NO: 250156 - DNA, 122 bp, Homo sapiens
aatttttgtatttttactagagacggggtttcacctgagctctgtcgggagttcaccagacggggtcttgaactcctgacctcaagtgatccactcaccttagcctcccaaagtgctgggat

SEQ ID NO: 250157 - DNA, 122 bp, Homo sapiens
tggggttcatctctaaggaggttctgttgaattgaaggtgctgacctcaccctcctgtcccgggacaggcactgtggggacgtgcactgactggtaccagcgacaggatgagacctgaagtg

SEQ ID NO: 250158 - DNA, 122 bp, Homo sapiens
atagaagagccagccgtttgtgttcgcttggtaggtgtaagtaatagcagcccttagccacggagtctttatgtggtttattcctgcaaggttgttttaaactgaaatagaactgctagtgt

SEQ ID NO: 250159 - DNA, 122 bp, Homo sapiens
gaacttcagtccaagtctgtgtgactcccaaaaccatcagctattttttttttatttttgcgacagggtctcactctatggccaaggctggagtgaaatggcgtgatcatggctcactgtgg

SEQ ID NO: 250160 - DNA, 122 bp, Homo sapiens
tgttttgtaaactaatgaggtttcattgataagtggccaaatattactaagaggggatttcgatattgggtgagataattgagtggtgacatttactattgtttccataattctaaatgttg

SEQ ID NO: 250161 - DNA, 122 bp, Homo sapiens
cgtccctgctgcaggctcccagtgtcctgccccggcgtcgagtgcgccctgctggctccccgacctctcccgcgatctgttcttgttaggattttgtttcgcgttgagcggagccacgcttg

SEQ ID NO: 250162 - DNA, 122 bp, Homo sapiens
gctgcagcagcgccgaggccgagactcagacctgctacaccagcgtgaaggtaaatgccccgcgctggcacacgccgtgggggccgtccgccccgtcggcggggctcgcacgggtagggggc

SEQ ID NO: 250163 - DNA, 122 bp, Homo sapiens
ggcgcctgaaggggcagtacccaagcgagccatttaacatggcggaggatgtttcctcagcggccccgagcccgcggggctgtgcggatggtagggatgccgaccctactgaggagcagatg

SEQ ID NO: 250164 - DNA, 122 bp, Homo sapiens
tgtccaggcagctgtacagccaggagcaggagggaggcagcacccatctgctaagcctcccgggacagctgaaaagaactgtccattcagaagtgattcatccacaacagagctgcgcgcag

SEQ ID NO: 250165 - DNA, 122 bp, Homo sapiens
ggtctgggtgggctcccttggcttctagatggtgggaagaggagccaagaagggatttcccgttgaatctcatgtggtcattttgcccacatcttgccccttgtggccccgcacctggcctg

SEQ ID NO: 250166 - DNA, 122 bp, Homo sapiens
ggatcgtccccaggtgggtggtcggccggccccgagagggaaaagcgcccactaaaggaccgctagtacccacaagcctcacggagccatacctcggagctccgtattagaacgcagtccct

SEQ ID NO: 250167 - DNA, 122 bp, Homo sapiens
ttcaaggcgggcgttggggatttgatgtaggatttggggacagacatcctctgacctcagcgttgcccgctgcggagctttgccaggagctggcgtccgtgacttaagtgaaaagctgggtc

SEQ ID NO: 250168 - DNA, 122 bp, Homo sapiens
caacattgccttaattttgcttggggagccagccctcctccacctctgcccatgtacttccggtgacagtgatggccctggagggagcacagggcctgagctcagacactcagcactcttcc

SEQ ID NO: 250169 - DNA, 122 bp, Homo sapiens
ggggtctggtctctggtctcagagcatcagtcaggttccagaagcactcacgggttagagcgcttcttggcttcatcagcataggccagctgatggcactccttcacatggacaaccagact

SEQ ID NO: 250170 - DNA, 122 bp, Homo sapiens
agagaggaagggctgggctggggcagcccggaggcagagagaccgagagtgcggggcgggcgagggacgccagggccgcgtcaccccagcccgttcctagctccgctcccggcagggggcgc

SEQ ID NO: 250171 - DNA, 122 bp, Homo sapiens
caggtgctggttctcagccctgtctgcagtaaggccggcagcggaaactctggagccagacgccccgggctggagccccagcccactgcttggtgtgcggctgctacaaaataggaatcact

SEQ ID NO: 250172 - DNA, 122 bp, Homo sapiens
gtccagcaccctcccgtaaggagccctgtgttttgacacaggctagggcttgggaaccgccggcctaggacagacaccatgaaataagcatagcaacggtcacatgtcacccaccgtcaggg

SEQ ID NO: 250173 - DNA, 122 bp, Homo sapiens
attatctgaaaccaatccaaatgcaaattattttattaaaaaaacacttctagctgggcgcggtggctcacacctgcaatcccagcattttgggaggccaaggcaggcagaccacaaggtca

SEQ ID NO: 250174 - DNA, 122 bp, Homo sapiens
tttgaaactgctcgcacttggcttcaaagctggctcttggaaattgagcggagagcgacgcggttgttgtagctgccgctgcggccgccgcggaataataagccgggtacagtggctggggt

SEQ ID NO: 250175 - DNA, 122 bp, Homo sapiens
cgcccccctcctgactcacggccaacgctgcggccgccccgcggccgcccgagccccccgcggctccattgagaaactgagcgtctcattcacaagctggcggcgaggagggcccggcggag

SEQ ID NO: 250176 - DNA, 122 bp, Homo sapiens
tggggcagaaaatgaaaaatccaagtaacaagcaggaagaaacctacaacagtgggtagtcgtctgacaggcgcatataggtggatggaggatgctgttatgtgaacctagcagcaaggtac

SEQ ID NO: 250177 - DNA, 122 bp, Homo sapiens
gtggcgcgcagaatcgccgattgttctgcccgacttgcaggcggttgcggggagccgggtcgccctgggtcacgcacacgcggaagtcaactgtgtccaggaagcccaggaaggcccgggat

SEQ ID NO: 250178 - DNA, 122 bp, Homo sapiens
gctgtgttttttctctgtctttaaaaaacaccccaagctggggccggccactgtggctcacgcctgtaatcccagcactttgggaggccaaggcaggtggatcacttgaggttagggattca

SEQ ID NO: 250179 - DNA, 122 bp, Homo sapiens
tcctgtttttcctccgtatttaattcggtatcacaggagcaccaataaatagtttcttcccgcccctgcaatcttcctcctgccccgggcagggccttaggggccggcgatcccgtcggggg

SEQ ID NO: 250180 - DNA, 122 bp, Homo sapiens
cacgatctctctccaataacataccccccagaatctgagaacatgagaaaatatcccactcggaagttggaaagacaatatgtaaagaatgattttaaatgccagatgactgatcctaagct

SEQ ID NO: 250181 - DNA, 122 bp, Homo sapiens
ctgatcgcctgcctctgggagcagagctctgaaggcgtgaggcaggctcgtcatgagcaacgccgcccgcttttccagctgctgtgggatgcaggggcacgtggcgggtgggcgttgtcctg

SEQ ID NO: 250182 - DNA, 122 bp, Homo sapiens
ccaggagcgcgcctccagcttagcgcactaccgggtgacccggccagagtctcctgctcccggctcctcgcagctgcgccgcaggctccagccctgcccccgctgcgctaatgaccggaaag

SEQ ID NO: 250183 - DNA, 122 bp, Homo sapiens
ctcaggacgcagggctcgccccaagacccaggctgcgccgggggcagtttcggtggggtgcgccccctgcgggcccccgaggtctgggtccaggtcccggggcaagtgcgcccagctgtggg

SEQ ID NO: 250184 - DNA, 122 bp, Homo sapiens
agtgatccaactgccttggcctcccaaagtgctgggattacaggtgtgaaccactgcgcccggccacacctggactatatgttaatttggagtggcctttcaggggccggagatggagcatc

SEQ ID NO: 250185 - DNA, 122 bp, Homo sapiens
cacaccatctttagagcttgaatttttagactcacaaaccctttatatctgcagcctttgcgtatctggtcctcactgaatcatgcctaagagcccgccaactgaacactcaccttttgttt

SEQ ID NO: 250186 - DNA, 122 bp, Homo sapiens
ctgtgctgagaatgaggcatcttgtggtttctgcattgtcttgtagtttctgggtgctggcgtcagtccttgttgggcactgtgtgactcactgtctattctggtgaagggccacagtttaa

SEQ ID NO: 250187 - DNA, 122 bp, Homo sapiens
gtgaacagtcacccactccacgcaggctttccacatgcaaaccctgcgatccggagcccacgcccgcctccgcctctgtgggctcagactccaggccgctgccctagtcaccctggggcaag

SEQ ID NO: 250188 - DNA, 122 bp, Homo sapiens
ggcgaggaaaggatgcgagtggaagcgcttcctgaagaataactgggtgttgctgtccaccgtggccgcggtggtgctaggtgagcggcgcggcgggtgggcgatgcgcgcaccctcacgcg

SEQ ID NO: 250189 - DNA, 122 bp, Homo sapiens
gtaatttttgttagaacacgtctaatgtggtacttctcagcctggagtgagttttctccccgggggacatttggtaacatctggagatatttttggttgtctcaaatggtggtggtgggggg

SEQ ID NO: 250190 - DNA, 122 bp, Homo sapiens
tcctctccaggagaacccgccttgctgggctgtactgagggtgaaacctgaaaactcaggcgcagtcagcctcgctggccctcactgggaccctgttgctgctgtccacagttggcactctc

SEQ ID NO: 250191 - DNA, 122 bp, Homo sapiens
tccctcacaggcagagaggtgcccactgtgaagggctgggacctggagagatgaagacaacgactgggacccccagtggataggaagggaacccaggtcccgacctcagggtgggagacctc

SEQ ID NO: 250192 - DNA, 122 bp, Homo sapiens
cccctcccgccgcccggaggtcatgtgagcgcagtgccggagcggggcggggcgaggcggcggcgcgcagtgcctactagcaattgtagtccttgccccaccttggcctggcgaagatcccg

SEQ ID NO: 250193 - DNA, 122 bp, Homo sapiens
ggcagagtggataaggatcaggaccccgagccctcctggccctccaaggcagggggacaccggctgcacccaggctgtgacctcagctgacgccgatgatccacatgggatgcagggtctaa

SEQ ID NO: 250194 - DNA, 122 bp, Homo sapiens
gctacagttgttcccctctaggagtgatcagttctcacttgcaagtcaacacatagtcagcggaaataaatactctagtgtgttttgacttgaactaggatataatggaattgtcttgaaaa

SEQ ID NO: 250195 - DNA, 122 bp, Homo sapiens
gaaaaatgaagcagttggaaaaaataattactaatatttttgggtctaaacttgtatcaccgtcttattttacaaaataaagaaatatttgcaaaattggaggcttgcttagttagtgggtt

SEQ ID NO: 250196 - DNA, 122 bp, Homo sapiens
tcctcctcagaaatacattgtatgtgagtttggtatgtgtccttcaggagtatttttgtgcgtgttcatagataattgagctgtgtgctattgtttttgtgagtatgtactttttaacatta

SEQ ID NO: 250197 - DNA, 122 bp, Homo sapiens
ttactaagtgccactttatgataattattttattattgtaacaactctttgaggttattgcgtggttattggtgcctattttacagatgggaagactgatgctcagctcaagtaattggcct

SEQ ID NO: 250198 - DNA, 122 bp, Homo sapiens
gccccagtcaggcggaaggtagctggctgcggggcggggcgactggcgggcggcgggaggcgccaaccgccacagacgactcccagctggccgagggcgggaagggggcaggcagggaagcg

SEQ ID NO: 250199 - DNA, 122 bp, Homo sapiens
tactgcaacagcagcgtgccagacctggagcactgccatacgtgacagccagaggcccagcgttatcaaggcggacaattagactcttgagaacacactcgtgtgtgcacataaagacacgc

SEQ ID NO: 250200 - DNA, 122 bp, Homo sapiens
atgacagagactgctgctgctctcaggcgggcaagggaggccctgatggcgccagtaccgcggggcagagcaccagctgcggggctgctaaggcgtcacctgcgtacctttccgggcctgct

SEQ ID NO: 250201 - DNA, 122 bp, Homo sapiens
gtggccggtggacgtttggaggtttttcttaaggtctttttcacttcaagaatggagacgcgcttggttccgaaatacaatgaagactcttggaacaaaggtgtctgcaggtttctgaacct

SEQ ID NO: 250202 - DNA, 122 bp, Homo sapiens
aggaaaatccagaaccaaatctctggcacacctctagcaaatggaacagggcttacgagacgcattttgagtcctaacttcaccctttgttacatcccactttcccttctcctattccccca

SEQ ID NO: 250203 - DNA, 122 bp, Homo sapiens
ccccctcccgccgtcgccccgctaagagccccggccgctgtccccgcctgacaacccgcacgggaaggaagaagccccaggactcacgtcgctctccacctcgatgtcatcgttatcgctca

SEQ ID NO: 250204 - DNA, 122 bp, Homo sapiens
tttgtgcaaatttctgacagtgctattttcccttcccataggcaatgtgaagtattcatccggccaaccaatgtttcctgacgtacagtgttgcccttttcagcaaatgccaattccaagtt

SEQ ID NO: 250205 - DNA, 122 bp, Homo sapiens
gcttctgcctgtacccggtgacagaagcaaactctcttatttcccagctcgtctgcatctcgttactgggctgagagaataaggagcgaataagcgcccggccgtcggttgagtctggggac

SEQ ID NO: 250206 - DNA, 122 bp, Homo sapiens
ggttctggggcttggggtggtggaggagaggcgccttgcggaaagccctcttcaggcactcgaaggcctcttgctcctcgactccccagtagaactggtaggagctcagcagctgccgcacc

SEQ ID NO: 250207 - DNA, 122 bp, Homo sapiens
cgccccggtccgccccgccgtcctcgcgccactgccgggcagcggcctccggcccccgtgcgtgacccctgcctatctcagaaatacgggtgcaaacccgagtggccgcggggcccagcggg

SEQ ID NO: 250208 - DNA, 122 bp, Homo sapiens
ggcccggtaagggaagtgactctgccccatgcctggggcacctgaggggtgcacctggcccggcggaggctctgacctccccagggctggagccctccccagcaatgcgccagcgctgcccc

SEQ ID NO: 250209 - DNA, 122 bp, Homo sapiens
agcccttcatgcacccatgtacttcctgctggcccacctgtcctttgctgacctctgcttcgcctccgtcactgtgcccaagatgttggccaacttgttggcccatgaccactccatctcgc

SEQ ID NO: 250210 - DNA, 122 bp, Homo sapiens
ggaagtccttcaggaaacttacaatcatggcagaagggcaggtccgacttccatggtggccgcacagagagtgggaacatgtgaaggagcaactgtcaaacatgtataaaaccatcagatct

SEQ ID NO: 250211 - DNA, 122 bp, Homo sapiens
gttcccctcccaggtagagacacatctggaagtcgttagttctggggcattttggcacctcgctcagcaatcccctgggtccagagcagccctggcccaggcctggtattcttatcagctcc

SEQ ID NO: 250212 - DNA, 122 bp, Homo sapiens
ggaatgatgtttcatttacttgtgcatgatcaagaggcataatcatataggtggaaacctcgcttcttctcccaaataagtaagagttaggaaaacaaaccctggacccaattgcctggtat

SEQ ID NO: 250213 - DNA, 122 bp, Homo sapiens
caggctagagtgcaatggcaccatctctactcagtgcaatctctgcctcccaggttcaagcgattctcctgcgtcagcctcctgagtagccggggttacaggggcatgccaccacacccagc

SEQ ID NO: 250214 - DNA, 122 bp, Homo sapiens
caagaagatttgtgttcagaagtgtgcccagtgccacactgtggaaaagggaggcaagcacgagactgggcctaatctccatgtctctttgggtggaagacaggtcaggccactggattctc

SEQ ID NO: 250215 - DNA, 122 bp, Homo sapiens
taaatagtaattacaacataatcttctggaatagaaatgctcacaaaatcatccagcagtcgatgacctcctttagccagggaagatattgctattcgcctcttacagaggaggaaaccatg

SEQ ID NO: 250216 - DNA, 122 bp, Homo sapiens
ctaaggtgcagcaaatgtcaaagaccaggacttggtgacgccaggtccctggctgggctgcggtcaagactgcatgacctgctgaaatctccccagactggttagcgcggaaagagcacctc

SEQ ID NO: 250217 - DNA, 122 bp, Homo sapiens
ggcaaaggggtgaggcaggctgtctcagcctcgatgaatttgaggggccagtgggactcccgggtggaagagccctggaggcagctggagctggcagaattcaggagggaggtgaagtctgg

SEQ ID NO: 250218 - DNA, 122 bp, Homo sapiens
acctcaatgctgaacattcgttttcaaaaacctgatcaagtcatccctctgctaacaatgcgcttcatcagtttttatttcttcaggctaaggccaacatcctgcataaggccccaaataga

SEQ ID NO: 250219 - DNA, 122 bp, Homo sapiens
ttccttgggctgacactgagccagcgcttatctgaatgcagtgctggcgcgtggggaatacgctcctgagtaattcacacgcaggaccggccggccgtggacggcgggcagtgtttggaggc

SEQ ID NO: 250220 - DNA, 122 bp, Homo sapiens
ctccggacccccaaccctcccagccccaccccgctctcttcttcgtgtccaatcggccgccgagttacaagccactccctgatccgacttggctcccaccgcccggacccccgcccagcttc

SEQ ID NO: 250221 - DNA, 122 bp, Homo sapiens
ggggtggggccggaggtcggcgtgaggcgaagcccagccttcggagacctgtctgggggtcgggaccctctctcgagggcaggcggacaggcggggagctttaagccgatctgtgtcatggg

SEQ ID NO: 250222 - DNA, 122 bp, Homo sapiens
tgcaccatggaaacacactcggacagatttgcataacgtaaccttaaggctcagggaatccgaaagagtcccttaatatttaacagaatgagattatggtatttctaaaaccctgaacaatt

SEQ ID NO: 250223 - DNA, 122 bp, Homo sapiens
ctcctggatctgaaaaaccccttctttaggtaggaggggccccttgcctgcacaggggggcgccccggccctgcaacccccttgcccctgcccatggctctgtctctgccatagatacacgg

SEQ ID NO: 250224 - DNA, 122 bp, Homo sapiens
gcccggggaaagtccgggcagagcccgagcagcggccagggtaacgctgtcttgtggacccgcacttcccacccgagacctctcactgagcccgagccgcgcgcgacatgagccacgggaag

SEQ ID NO: 250225 - DNA, 122 bp, Homo sapiens
aatttttagccaactgttctagtaaatattacgggaaacccttttatagagtgctaattccggcttagtgttttcgctaagctttagttcttactcaaacatgcacacgggcccccaaagat

SEQ ID NO: 250226 - DNA, 122 bp, Homo sapiens
gtatcgtggctggagaccgtctgccttgcgcccctccacggccactcgccgcggagactccgccccttggaagtgccccctaattaggaatatctcctccactggactgcgcgggcacagag

SEQ ID NO: 250227 - DNA, 122 bp, Homo sapiens
ctgcgggctgcctccacaattcgaccgtctcggcgggccacgagatcctggccacggatgcggtggccgcgcctctgctcgcacgttcccccggcctctggactccctccctccctcaatcc

SEQ ID NO: 250228 - DNA, 122 bp, Homo sapiens
caatcgatcgcccagctcaaaataccggctggtgtgtaggtgggagaggccgccgctccccgtgtgctcgttgtctctgttcccaggccctctagagcaagatactaactatctctttaaga

SEQ ID NO: 250229 - DNA, 122 bp, Homo sapiens
gaggatttggactctgggaaggaacctctgcagggcagcttgagctttacaagtgccttccgttgctacctgagaactggagggattcaaataaaagtctaaatgaaatgtttgtatttttc

SEQ ID NO: 250230 - DNA, 122 bp, Homo sapiens
gcagtgccgtccctaggaggcagaggccgttccgcgatccaccccacgcctgcgctgcaccgcctgattgttaactgcacgtctaaattgcagttaatggtggtgttgggcggcaaaaacac

SEQ ID NO: 250231 - DNA, 122 bp, Homo sapiens
cgccggaacgagatgggcgggatctaggggttggaagatagttctctggtgtttcccggccgccgccaggccattttcaacggttgtttggctactgctggatggaagtggacgagctgggg

SEQ ID NO: 250232 - DNA, 122 bp, Homo sapiens
gctgcaaattaaaatacactcccacaggcaagcaaggatgggaggcagtcaagtggagggcgttaattaccagaagaacagtgggctccagtcatcataataggcagcagggtggaaaacac

SEQ ID NO: 250233 - DNA, 122 bp, Homo sapiens
ccccatcccctccctctgttcgtcccgtttgatgagaggctgtttactggggtggggtggcgagatgggcttgagggggctcagagcataaggcttcagggcccaagttgggagaagtgacc

SEQ ID NO: 250234 - DNA, 122 bp, Homo sapiens
cctcaatcaagggcagagcagcagccgcggggccagctcctgacgcacatcttaacatggcggcaggtgagagagaacaagcgtgagaaggaggaactatcagacacttacaaaaccaaatc

SEQ ID NO: 250235 - DNA, 122 bp, Homo sapiens
ggagacgggcagaggggtgcgaggagccccaggatcccgctagggggcgccgcggacttgcgtcctgaggaggcgggaggggaaggggggtggctggctatgtgggggggttagacttccgg

SEQ ID NO: 250236 - DNA, 122 bp, Homo sapiens
acaggggtgcgccgcctcgtccggctaacttttgtatttctagtagagacacggtttcgccgtcttggacaggttggtctgtaactcctggcttcaggcgatccgcccgcccgcctcggcct

SEQ ID NO: 250237 - DNA, 122 bp, Homo sapiens
tttctggccctgtcagctgctgtggcatgacagatttatacagcatttgcaaaaaaccagcggctgctttttctttaacaatttttcttaaaaactccagttcctattctccagcttctttg

SEQ ID NO: 250238 - DNA, 122 bp, Homo sapiens
tggggctagcagaaggagttagtcctgtacctgtgcggagactgtaaaactgccatcccgcgccgcaacactgacgcggctgtggtgccaggccgctcctgctcctgccagggccgcgccgg

SEQ ID NO: 250239 - DNA, 122 bp, Homo sapiens
gaacaatgggggagacacttttgcatttagacacagcctcagtgatcccagggagtgagtcggtgagagatgactcagatgtgaattccccgctgactcccattttcatccccttgggcagt

SEQ ID NO: 250240 - DNA, 122 bp, Homo sapiens
aaatgtgggtctcactagtaaggtccaaagcacattaatgaggctgggctcggtggctcacgcctgcaatccaagcactttgggaggcctaagtcatggggatcacttgaggtcaggagttc

SEQ ID NO: 250241 - DNA, 122 bp, Homo sapiens
gccggggagcagcgagcatttgcaagtgctaactcgttcctgctgtgtgcagacagcacccgcagacagaccaggcccgccccgccagcgtctaggcgagggatgaatcctgcagaatgaag

SEQ ID NO: 250242 - DNA, 122 bp, Homo sapiens
tccccggtttggactgcacaccagcagggagatcatcgctagggaccgttgcccagagagcgtagagaagtgggaggaaatcatttcaatttctctttgggagcataaatgcttttttaatt

SEQ ID NO: 250243 - DNA, 122 bp, Homo sapiens
gaaaaaaaacccctctttttctagccggaaataccctctttcaggaaggcgcgcctgtgccgcatacgcacactcagttacttagcaaagtctgggctaaaccacccaaggcggagcccagg

SEQ ID NO: 250244 - DNA, 122 bp, Homo sapiens
agtagtgctgaggaagggtgcgctggggctaactccagaggcagcattgtagcgaacactcgtgacagaccagccagtgcgtggaggaggccgtggccctggcctgcacggggggctcttgc

SEQ ID NO: 250245 - DNA, 122 bp, Homo sapiens
cccagcaggtgctcggccatgatgccgtcctcgggcagcagctgccagtgctgagcctcgcggaagtaggagccctcctgggcctcgcagaagtagtggccgtactgctgcgccgtgaggtt

SEQ ID NO: 250246 - DNA, 122 bp, Homo sapiens
tgggacctagatctagatcgggagggcgatctggaagcagacctggatctagacttggaccgagatcgggtttttgaagctgactttgatctggagcgtgattctgatggaaggtttggttt

SEQ ID NO: 250247 - DNA, 122 bp, Homo sapiens
gcggcgggaacatggaggagctcctgaggcgcgagctgggctgcagctctgtcagggccacgggccactcggggggcgggtgcatcagccagggccggagctacgacacggatcaaggacga

SEQ ID NO: 250248 - DNA, 122 bp, Homo sapiens
aaggtttattaggtacttcttaaaactaaccatccattcaacaaatgtgtattaagcttccgtagcccttgtgcttcttgccagaaatacaaatctaaatacgatctggctctcaggagctt

SEQ ID NO: 250249 - DNA, 122 bp, Homo sapiens
tgagtaactggcttcagtgaaagcaactactgcgagagctggatgtgcacagttctagaacgtttaacgttctatcaaaatcaatacctacttaaaaaaaaaaaaaaactttgtgatgcctt

SEQ ID NO: 250250 - DNA, 122 bp, Homo sapiens
gccgacactccgttcttccaattgcagataatgccatttccaccgcttcacaataacccgcggactatagtccttccagtacccactcccgtgagcaatcttcggggttccctctgggtgaa

SEQ ID NO: 250251 - DNA, 122 bp, Homo sapiens
gtggcctctggggcgtattgatcagatgctgagtctgagagatgccgggcaccctcagtccggggctggttccagattgtaccccagcgacttgggtgtgacgtggtgatgtcacctctccc

SEQ ID NO: 250252 - DNA, 122 bp, Homo sapiens
cctgccctctgaggcctgggcacccgggttcccgagcgccgggtcccagccccgcgggggcgcctccgcaccccatctccgcgcccggcgcagagccgccagtctccgccgcggggccccgt

SEQ ID NO: 250253 - DNA, 122 bp, Homo sapiens
gcgggaggagcggctggggtctcagatcgccgtgcgtgacttggtgctgcgccaggtgggcgccatcgccgcggcctgctgggggaggcggcctttgaggagcgggcgcgaggcggggccag

SEQ ID NO: 250254 - DNA, 122 bp, Homo sapiens
ggcggggctcagtgacggacagggagctctgcgaattggcgcccggcaaggggtgctcaacggcgcgtgcgcagagggaggcaggcgggtgggctgccggcggtggactcgtcggagccgcg

SEQ ID NO: 250255 - DNA, 122 bp, Homo sapiens
acagagaaataaaaaacaaaactatatcagaaataaagactgaatcacaaagtacacaagcgatgacaggttgtaataaaaatttaataaaggcactgaagaaaatcaggaaagccaccatg

SEQ ID NO: 250256 - DNA, 122 bp, Homo sapiens
ccagttgtcttagaaatggtcaattggattcaactttagtcctctccttccccctaaaagcgaatgtttgtgtgtgcagacaatcttagcatgaaaatggtttaaataggctggtcctacat

SEQ ID NO: 250257 - DNA, 122 bp, Homo sapiens
catagtttccggtctgtgctctgtgagggcagcgcccggcagccgagtccaggcagaggccgcctccctgcgcctggaatcccgaaggagcctgcgccccgtgtgtcccgcaggtcacggcc

SEQ ID NO: 250258 - DNA, 122 bp, Homo sapiens
acaactcattttggccagtcaaaagggaggtggagcttggaagtgaattgtgaattacaccgatattaagaaaagcagctaattctgaagtagtattaagtggcagtgactattctaatcac

SEQ ID NO: 250259 - DNA, 122 bp, Homo sapiens
cccctgcaacactgtctggcacacactaggcgctcaaacattatttgttgaatatgtgaacgaagggatgcagagatggttggaaccctccagtcgggcctgggtgccaggtcctgggggca

SEQ ID NO: 250260 - DNA, 122 bp, Homo sapiens
gcagtgccaaccgcccagggaccgccccgagctcacaggactttctcccccagcaggttacgggcaggacttgagtggcttcggacagggcttctcagaccccagccagcagcctccttcct

SEQ ID NO: 250261 - DNA, 122 bp, Homo sapiens
gccgcctgccctttgttttggagccgtagcccggcccagacgccgttaacagccttggagcgcggcgccggccaatcagcgcgccatgtcgccagcgccccgcccccatcctgcctccgttc

SEQ ID NO: 250262 - DNA, 122 bp, Homo sapiens
cagacagggccctgtgatggtacccaacaatgaactacaaactaggccctttctgagccccggtggaccatactccaatagaggagaggtcagatgggtgtataggtgctgagaactattaa

SEQ ID NO: 250263 - DNA, 122 bp, Homo sapiens
gatgagccttcgccagccccgggagggcgcctccaaatgcaggtgcctgggctgggaatgcggagactcagcacagaaggtcggctggaggcctgggctgcaggtgcctgggttgggaaagc

SEQ ID NO: 250264 - DNA, 122 bp, Homo sapiens
gccacacccagaggaaaagtggcatttggagccagttaccgtcacagggcacggaacattcgggctgggcggccaccttccaacagctacccaagtacgttcagggagaggaaaagtacccc

SEQ ID NO: 250265 - DNA, 122 bp, Homo sapiens
gcgctcctggtcaggcgcggggaggtggcgggcaggtgtggggaaccgcgctatattttgcggtttccttgaccactcccaccctgggcggggtgagtgccagcaggaaaaggctgagcggt

SEQ ID NO: 250266 - DNA, 122 bp, Homo sapiens
cttggacttgggcgacctcgatagtggtgtgttcctttgtttggtgttcaaagtagagagcggtccattaactagctccctagagaagcagtggcggctcaggccagcccagcccctgggaa

SEQ ID NO: 250267 - DNA, 122 bp, Homo sapiens
aggactgacggcgtctacccttacaactcacagcgtgctgctcctgactgggccccagggcgctggcaagccgcaggaactgcacagacatctccaggaccgaggccatgtcctcccgccgg

SEQ ID NO: 250268 - DNA, 122 bp, Homo sapiens
gttttgtgaataaacatttcccaagaaaaaagcagagaaaggaggtgggaaattaagtcacggaggggaacatggtagcttatgagcatgaccgccacacaaccaggaccacagttagtggt

SEQ ID NO: 250269 - DNA, 122 bp, Homo sapiens
aaggagaataatttaaatgaggccagggagcttctgctccctcaattaaacggtgatagacggcctgacaccaccagccctcgaagcctgagatccacaggaaatgttaaaaactggcttgg

SEQ ID NO: 250270 - DNA, 122 bp, Homo sapiens
gcgggcgccctggaaggcgtgtggctggcggtgcgcaatggctcgctggcggggggcgtgcgcggaggccatggcctgcccggcgctgtgctgcccataccggggccgcgcgtggccgatgg

SEQ ID NO: 250271 - DNA, 122 bp, Homo sapiens
cacgctgttttcccctctgatgcttcagggagcgcgcgagcagggagcggcgtgagtgcccgtctgtctgttgccgggcggaactgagcctgaaccccggcggctggagcgctggccaggag

SEQ ID NO: 250272 - DNA, 122 bp, Homo sapiens
atatgctggagcacatgctgccggtgcctgcgtgtgcatgtacacgcgtgtgcatgttctcggagctctgatgccagcctgacattttcccttggcatactctaaggaaaacgtgttccagc

SEQ ID NO: 250273 - DNA, 122 bp, Homo sapiens
atgcccgagcagagcttcttcgacatcctgaacgagttccgcagcgagcagcccgacgcccgagggtgccaggccctcaccgagctcctccgggcagatcctggcccacacctcatgggggg

SEQ ID NO: 250274 - DNA, 122 bp, Homo sapiens
tcatgcacatgtgtgcacaaataataaatttatatgattttctcctattaatttgcttttcgtcagttgattttcatcatatctatagagggcaaagggaaggtttccctacacttttggtg

SEQ ID NO: 250275 - DNA, 122 bp, Homo sapiens
ttccccttgtttctaagtttgttaaagaaatgactccatagcctcccaaaaaaccatgtgcgaagctttggaattcccagcccctgagcgcaagagaagttggcagagagcagcctgggagc

SEQ ID NO: 250276 - DNA, 122 bp, Homo sapiens
gcattgcggacgggcgcgcgcagacgccagcgtggtgaagacgcgggggcgcgcgcgcggcgacgagactgccaggggacgcttcgcaacaccgagagtctcagcgtttctcgagataggtg

SEQ ID NO: 250277 - DNA, 122 bp, Homo sapiens
tcctagtggagcacttccaactgccacatatgattcagcccacaggcaccgaagtgaccacgaaagggggagaggagggcacccacatggtggccgcacacgccgtcccgagccggaatatt

SEQ ID NO: 250278 - DNA, 122 bp, Homo sapiens
gctcaagcaatcaagctgctcagacacgggtaagggcagcatggctcagaaatgggatggcgctcagaagcgggaagggtggcacggctcagacatgggagggtgcactggatgagttccct

SEQ ID NO: 250279 - DNA, 122 bp, Homo sapiens
accggccttttaagggctgtctcacccatcttgtctggctctgcctccctgtttcctttccgtcctctctcccaccacagccagctccccacttttttcgcgggggccccctccagcctgtc

SEQ ID NO: 250280 - DNA, 122 bp, Homo sapiens
cgccgaagcgctggtcaaagaggcgtccgggcgccgaaagtccgggcaacggggccgaggcgcggcgcagccaagacggctgcacaggcacagggatctccatcctgctcctccgcgttgca

SEQ ID NO: 250281 - DNA, 122 bp, Homo sapiens
tctggaggccaaggttgggttctcctcttccacgatggcccttgcacgtcgcatcctcaccggctggagggtgggtctgccccacaagcccttttcatggtggctttagtcacaagggctct

SEQ ID NO: 250282 - DNA, 122 bp, Homo sapiens
aaatgtagggcccttgcgtcccagcctcgaatatttctgtttcactgcagctgcgagctgcgagcccagaaggcggctctgatcaatgtgggctgaattcacgccccctacccaccctaccc

SEQ ID NO: 250283 - DNA, 122 bp, Homo sapiens
ctcattattaagagatggaatggggctcgtttatcaagcagggggagaaattaattgacacggctttaatatcatgatgtctggcgtgtctggtcacattccttcattttctggaaaggcat

SEQ ID NO: 250284 - DNA, 122 bp, Homo sapiens
aaatgctgcgtaactcatctgaagtcacagcagagctagtctcgaccccagccccatctgcgtccagaccctgtgtcacagctgggacacagctatgcagctgcctcagggcccacactgcc

SEQ ID NO: 250285 - DNA, 122 bp, Homo sapiens
cagtgtgaattctttgatgcactctgagggttgatgtccgggcaaaagttttcccacattcgttacatttgaatggtttctctcccgtgtgagttttctgatgttgaatgagatgatctttt

SEQ ID NO: 250286 - DNA, 122 bp, Homo sapiens
aattagctgtggaaaaagctgggagttacctcgtaccgctgttgtttgagtgtgtgtgagcgtccagaaccaactgtatgagtgtctccgagggcaccgccccacacatctctggtcccaaa

SEQ ID NO: 250287 - DNA, 122 bp, Homo sapiens
cccggccgccgtccccgctcaggctggggccggcgccaaaaatgtctcagggcgcagacacggaagcacccccagggctagtgcgcctgcgcaccttgggccagccatgccgcccgcctccg

SEQ ID NO: 250288 - DNA, 122 bp, Homo sapiens
acgtgcagaaactgcccatgatcggccgtaccagccgccccgcccgccggtgggcgctctcggactactcgctgtacttgccgctctgagtcagtggccccttcgttccttgtaaataaatc

SEQ ID NO: 250289 - DNA, 122 bp, Homo sapiens
ggcaaacagtgaacagaggaatgggacagtgttcttagttaggactctgaccctaacttccgggaaagtaaaccaacattcaggacgtaccggccatcggaccgcaacattcaggacgtacc

SEQ ID NO: 250290 - DNA, 122 bp, Homo sapiens
ccatgagctgctgtttccctcggagctcacactccctgtgtctctgtcccgtggcacacgcggctcctgccgccccgtcccgcccgtcatcccacctggtgtcagtcggcttcccatctcca

SEQ ID NO: 250291 - DNA, 122 bp, Homo sapiens
cggcggctgccgggcggagcggctgcacggacaagagcggaggcctgggtgagcgcggcccgcgacggcacgggctaggacagacggacgcagacggcccgacgacctgggcgttcgggcgg

SEQ ID NO: 250292 - DNA, 122 bp, Homo sapiens
cctttctctttttagggactcctcctcctcatcttttctccctctccccgccctccattccgttcttcccgatacaaactgttgtctcagattccgaccgagggaatgttttcctcctgttt

SEQ ID NO: 250293 - DNA, 122 bp, Homo sapiens
cacagaggccacagcatgccctgtccgtcctcaccagctgcaagcaggaggcggcctggccgtaacaccggcctgggaaggccgagcacatttgagcagcctcatggaaagttctggggttt

SEQ ID NO: 250294 - DNA, 122 bp, Homo sapiens
caggcgcgcgatctggggcagccggtaagtgctgaccaggaggtcgagcggcacggccaccgagctccacttcacatccttgaggctgcagcccagcgagggcgccgggtccatcttccccg

SEQ ID NO: 250295 - DNA, 122 bp, Homo sapiens
catggagcagaggggacacagggttcagccttttgaactaggaattgagaagcttggatccgatccctatttcaccacttcctgtattagcttgatgaccttggacaagttacttaccctct

SEQ ID NO: 250296 - DNA, 122 bp, Homo sapiens
gtgagctgaataacatggcacaggaagtgtactgagacttaatatctctctagtcttatacgtacgtacatactctttcagctacagcatacactcaaaaaatatttgattgatgaagtgag

SEQ ID NO: 250297 - DNA, 122 bp, Homo sapiens
aggcaacctgctaatcactttacttgcatgagctcatttgatcctcacaacctccccgcgcggaggtaatacagttatcacccctttggtgcagatgaaggaggcacagcgaggtcctgtca

SEQ ID NO: 250298 - DNA, 122 bp, Homo sapiens
ggccgccgagcgcagctcttttttaaagggccagcggggcacgtggctcgggacgcagttcgctgccgcccggcagtagctctcaggttaggcgggtcccgctccgcttccgccgtcgctgc

SEQ ID NO: 250299 - DNA, 122 bp, Homo sapiens
aaccgccacagctcctgcggccgcagctagaacgagaacgcacaccatgcagagaaacggcgcatgcgtccaacttccggggaccagccgctgtcaaagttcacaactacgggtgccgaagc

SEQ ID NO: 250300 - DNA, 122 bp, Homo sapiens
taaattgttacagatatgtcttgcttaaatttctgtttattggccgggcgtggtggctcacgcctgtaatccctgcactttgggaggccgaggcgggcagatcacaaggtcaggagttcaag

SEQ ID NO: 250301 - DNA, 122 bp, Homo sapiens
tgcctttgagcccaggagctgccttttccaagctctgactacagctcaaaattaggcagccgggagtcagaacactctccaatcattcgctgaagccaggatgggaggcaggagatcacctc

SEQ ID NO: 250302 - DNA, 122 bp, Homo sapiens
ctcaagttcgttgatgaatgttcagacattttcatggattgaaaaaataataaaaagttacgggtgttgtttaattttagctgcattctcacaatttgcttatgtttttcacagacctggta

SEQ ID NO: 250303 - DNA, 122 bp, Homo sapiens
ttccagcgagaagagagccaggagccccgggcacaggcccacggtgatgaggctcctgaccgagctcccagagctcattatggaaaaccgtggggtccgctgggacctctctgctggtcggg

SEQ ID NO: 250304 - DNA, 122 bp, Homo sapiens
ccgttgattggcctgggcggggagggcggccgttgattggttcgggcccactcgcgcgggcgccactctctttgtctgacaagagagtcgtgaagcctccgcggtcctagaggggccgctgg

SEQ ID NO: 250305 - DNA, 122 bp, Homo sapiens
ggcctctcttggcggctgtgcgtgttcagttgccttcattgaaacccaagcatccgtcctcggctgccaccgacacaggtcaaggccacccaggaggagacactgtggggccctgcccagtt

SEQ ID NO: 250306 - DNA, 122 bp, Homo sapiens
aacttggaacagctaccacaaagcgaacgcctatctgtttggaatttcgcaaataaggaacgtttaaatgacgtagttcacatcctttgagtgctggctttctcttaaagggtgagtgcgtg

SEQ ID NO: 250307 - DNA, 122 bp, Homo sapiens
caaggacttcatagcaaggccaagaacagcgtaaagctgcccgcgcatgaaaagcagccgcgttgaccgggcgcggtgtcacgcctgtaatcccagcactttgggagggcgaggtggactga

SEQ ID NO: 250308 - DNA, 122 bp, Homo sapiens
acctcatctctctagcggagcaaacagctgggctccagctggccctggcttctgcaactgcgcagtcggcgctgtgacgcccggcgcggctctgtgacgtcacgaatcggtcctctgtaaga

SEQ ID NO: 250309 - DNA, 122 bp, Homo sapiens
ttttcaaaattggaagtatttggttactgcttcaatctccttcctcattattgatctgttcggtatttctttttttttataatttaatcttggtgggtttgtttctaataattatttcttga

SEQ ID NO: 250310 - DNA, 122 bp, Homo sapiens
tgatggctgggaggccgggttctcaagagcaaagcaaggataggggcaccggtagcctcccgccgccgtctcaacggcctctgggcccatcccctgagggggcggggccgtctcctccacct

SEQ ID NO: 250311 - DNA, 122 bp, Homo sapiens
gccccgcgcgcgaaggggctgccgaggtgggtccgctccgcggggaagcccaggacagagcgcggcggaggctcgcgccgtggtgcggggccctgaggccgggcggcacccacccgccagcg

SEQ ID NO: 250312 - DNA, 122 bp, Homo sapiens
ttgccgtttccacgaagggacctgcaggaatgggagatggagaccggtgtacactgctcacggagtggacaatggaagtagacatttgccaaacaggttattgacagcacagaagaaaagac

SEQ ID NO: 250313 - DNA, 122 bp, Homo sapiens
caaagctgataatagagagagccaaccccgcatgcagaataactgagcgagggggggtggcgcaagctactagagggagcccaggcttttacaatagcggccccagaacagcaaaggaaggt

SEQ ID NO: 250314 - DNA, 122 bp, Homo sapiens
tccccgcccccacctcattggaatgccttgtccaggacttggccttcaggagggctggtccgaatcctgtcccctccattgtcctcctccctaccgtgccacacctgtgtacctgtgtgcct

SEQ ID NO: 250315 - DNA, 122 bp, Homo sapiens
cttttccagccctctgtaggacggagattgccaaatgtaaagacacctaaaaacccaaaacgagaaaaatgagagatcgcttttgaaagaacacacaaggctcttacagtgcatcaggcaga

SEQ ID NO: 250316 - DNA, 122 bp, Homo sapiens
gtccctctggctgcaaaccaagagaggcgcccaaatatgaaagtcaagtcgaattgaaagcgtatggcttgtgcgctcccaacgccctcccctgtttttaaaattgtgtttcaaaacaacat

SEQ ID NO: 250317 - DNA, 122 bp, Homo sapiens
aaagcccaaagtacaggctggaaacagcccttgacaatgctggcaaaaggctcagggtaccggcaacacccttttggttaaacacagggaggcagtgctcaagacaccggggtctgaagtcc

SEQ ID NO: 250318 - DNA, 122 bp, Homo sapiens
aagagaaaggggaaaagtgtctgctgttccccgatgaagggtaggaggtgtcccctggcacgcaaagcccaagcgtccctgaaatgtctgctgggccccaacaaaaggtaggtgcccctggc

SEQ ID NO: 250319 - DNA, 122 bp, Homo sapiens
cttaacatctggcaaactactgaggcaagtgaatactgaagggacagcttctggattcttcgttgtcgggcactgagcaaagtagccatccatcagcagcctcttgggaggcagggctcaca

SEQ ID NO: 250320 - DNA, 122 bp, Homo sapiens
gtgtagaacacggcctcggcgatgacagagaaccaggtgaggaggtggcagaggcacagccgcatcagctccctgggcatcttcagcatggagagccacagcaggcgcaccgtggtctcgcc

SEQ ID NO: 250321 - DNA, 122 bp, Homo sapiens
tgactcccgactcttccctcccaccaccatgacagctggctggcgggaggaacatgacaacgttgttggttgcaattgggaccctatatttccttttgacaggagcacagatttcccctctc

SEQ ID NO: 250322 - DNA, 122 bp, Homo sapiens
tctttgcgctcggaccttcgccagaggggccgggacatcatgacggtgggagccaggctccgaagcaaggcggagagcagcctcctgcgccgcgggccccgagggcgagggcgaaccgaggg

SEQ ID NO: 250323 - DNA, 122 bp, Homo sapiens
ttttattttagacgagtacaccagccgcttctgagcagtgggagcgcgcctggccttcctcgttgttaagtcacttgctcttccaggtgccaccctgcgggaagtttgggcagcacggagtc

SEQ ID NO: 250324 - DNA, 122 bp, Homo sapiens
cgccgctccccaggctgcggccagtttggcgcttgccccgcgcgtgaccccgtgttttcccgacccgagtccctaaagctcctggtctggagcattcttgaacaggagttggaggagtacag

SEQ ID NO: 250325 - DNA, 122 bp, Homo sapiens
gctcacacagcagggccccaccagccacctctgcggccaggacactcacccagtctgagccgctctcctgcactggcaaaaccggaatatagcagcacctaccttacagattattccaagga

SEQ ID NO: 250326 - DNA, 122 bp, Homo sapiens
attctgcaggccacccagaatgaaagtccaagctcacgttaagacactcatccggccgggcgcggtggctcacgcctgtaatccaagcactttgggaggctgaggggcggatcagttgtcaa

SEQ ID NO: 250327 - DNA, 122 bp, Homo sapiens
acagcttaggacccagcagtcagggctgattcctccggagacacagaaccttcctgctcacgctccccggcacagttcctcttccccagcaatgcccctccagagcctcttggaagctcagg

SEQ ID NO: 250328 - DNA, 122 bp, Homo sapiens
gcaaagggtataaggagccaaagagctgccacgttggtacagaagttggaaaacaccatacgcttcaactgctggttaatttttgctctaaaaacttgatggaggccaggcgcggtgactca

SEQ ID NO: 250329 - DNA, 122 bp, Homo sapiens
gcgcggcctcgggctgagggcgggcgcgtggggtgggctcaccgggctccggcgtttgagcgtcacgttcttccagagcagcagctgcagctggtgcaggaagcccatggcggggccacgct

SEQ ID NO: 250330 - DNA, 122 bp, Homo sapiens
tcagtttttcccagtcttccctgctaccctaaggacaacacctggaaaaaggtgttctcccgcaaaagcagcagttctgaaaagtgggtgcctccatagaggcttttctctggggctccaac

SEQ ID NO: 250331 - DNA, 122 bp, Homo sapiens
aggtatgaattttacaaactttaattatattagcggtaacggtggagctggagagtattgcgccttctctaagctgcccggcgagaaccaccaacagtgtggtggaacttatggccctttcc

SEQ ID NO: 250332 - DNA, 122 bp, Homo sapiens
aaaaaaaaaaaaaaaaaaaaaacttgattctcttccaagatctcatagatcaacaaatgtcgtgaaatatagtacagtatagtgggaaaacttagacatgggagctgggacacataactaga

SEQ ID NO: 250333 - DNA, 122 bp, Homo sapiens
gagggggctccccaagacccagggcagggcacacagcatcccccccgctgaggccagctccgtctccaccctgtcccaggccgaacccagacccccagggctgagttaaaggagaaattcac

SEQ ID NO: 250334 - DNA, 122 bp, Homo sapiens
ggaaatgccttaatgtcaaccacaagaccaggggtgtggctgtgagagccgccactgcagcggaagtgctggctggagcaataagactagaaaaagagaaaggaatgaagactgaaaagaaa

SEQ ID NO: 250335 - DNA, 122 bp, Homo sapiens
cagttccaggacgggcctccagggggaggttggggccgcccttcctgctcagcctgcaaccgactcctcccgccagacaggctgtggtcagagacacaacaggaaaatcaaatttgttgatt

SEQ ID NO: 250336 - DNA, 122 bp, Homo sapiens
caactacggcgtgggggagcggaactgcgagaaggcggcagccaaagtgccattaaagctcggggcggagaggatgcgttacctgggtcccgtctgctgcgagaggcagggcaagctggagg

SEQ ID NO: 250337 - DNA, 122 bp, Homo sapiens
taattctttaccttttattaaagccatctttactgaagaaatattcaacattttgattgtcggtaccgtcaattctctgggaatagcaaggtcatggcccaggcttgagaagcagaacctga

SEQ ID NO: 250338 - DNA, 122 bp, Homo sapiens
tgaccttgtgatccgcccaccggggcctcccaaagtgctgggattacaggcatgagccaccgtgcccggtttgttttgttttattggtttctgctctgaagtatttcctttctgttacttat

SEQ ID NO: 250339 - DNA, 122 bp, Homo sapiens
ggctcgcgggtgtctgggcgcgggtggcgggcgggtcgggggcttgcgggcgtgtctgtgcgagagctgccccgcgagcggcgcagagacatccgggcgagctgagagcctcactttgctcc

SEQ ID NO: 250340 - DNA, 122 bp, Homo sapiens
acagcacgtagtaggtgtggagtgtggctcgtcagcaagcgctctggcaggtggtgctttcgccatcttcatccctacttactgtgcttccgctcccttgggtcccaggatcccactccttc

SEQ ID NO: 250341 - DNA, 122 bp, Homo sapiens
aataattcctgccctggcccttcccaggttaccggagctggcttatctggtgacaggtgtcgactgcacagagtcatgatggggcaggatggaacccggatccaggcccagcttggccccta

SEQ ID NO: 250342 - DNA, 122 bp, Homo sapiens
tcagccaggctcccaggactcaaaggcccccgtttctctccattattcatgacctctgatcgtcttacggagcaggcggggttctcgctggatccttctcgttctctctctctgcttccatc

SEQ ID NO: 250343 - DNA, 122 bp, Homo sapiens
ctgaaatgtccggaccaaatctcatggcctcgcatgttaatcttttaatagtctgggccacgacaggcatctcactactgccatggtgtatgacagcacgtgtatgcggggggtgcagggac

SEQ ID NO: 250344 - DNA, 122 bp, Homo sapiens
attttgttagacctgctcatgacttcagtggtatcagaaatgggcgaatggcgtctgggacgatcttctccccggtgttggcatagaaagggaaaaagaggtttaagccagccagagtgatt

SEQ ID NO: 250345 - DNA, 122 bp, Homo sapiens
tctcctggaagcaggtgactgagttaggcaaccgagatgcccacatatctgtgcggcgttcgccccaagaggccagccggctccgctcagctccccgcggcgtggccgcatccccgccgccc

SEQ ID NO: 250346 - DNA, 122 bp, Homo sapiens
catccgcagagactctcgtcctttccagtcatctcccaaggccgccttcccagcgggctccgcctgcctccctgctgactcctgcccgtgtctcttgtttcaagcttgcgcgatctctggcc

SEQ ID NO: 250347 - DNA, 122 bp, Homo sapiens
caaggcaacgaagggagggagtgagaaatccgttccataaaacccacgatataagtaaagcggcctgtgaattccgaccactgctgaccgccaggccacacaccggtttttttcaggaggtc

SEQ ID NO: 250348 - DNA, 122 bp, Homo sapiens
aggcggcggcttccggtctgggacggagctgtagcggcactgtaactgcgagggcagcgccgcgtgtgtaacggcgggggcgtgtcggcgggaaggacaatcgggccgggactcgcggtgtc

SEQ ID NO: 250349 - DNA, 122 bp, Homo sapiens
acctcgtgatccacctcccttggcctcccaaagtgctgggattacaggcgtgagccaccgcgcccggccaaggttctgttctcttgtggctgactgacctcacttggcatggtgtcttcaaa

SEQ ID NO: 250350 - DNA, 122 bp, Homo sapiens
gctgagggaggggtcgaggcagccctccctataaaagagaaaatattcaaacactgctgtcgctattgtagccctaattgcagggctgtgtgggcagcttcctgggcacccatcccagggta

SEQ ID NO: 250351 - DNA, 122 bp, Homo sapiens
gtccactcttgcacacggaagcatccatgttccagaccatcccccgccctccaaccggcacgagaagacgggcctggccccgcccccgaggccccactcacttgatggatttcatccactcc

SEQ ID NO: 250352 - DNA, 122 bp, Homo sapiens
gaactaatggaggttaaggattattttactgagacccgtttctgcagactcatctagggccgactgcatctccagtgataaaaggtctccttatcctggtgcaggagagggggccaccttcc

SEQ ID NO: 250353 - DNA, 122 bp, Homo sapiens
agtccctcttttcggagccttggtgttctcagctgcaaaggagctctgacatctgcctgtcggagtggcagtgaggaatgccgtcaccgtgagtatgtgagggcccctggacagagcctggc

SEQ ID NO: 250354 - DNA, 122 bp, Homo sapiens
aaacaaacagattcagataactgtctaatctggtcctactcagagcaacaaatagaagcacgaaactcaaaatcaagccttttaattccgtgttcctggtaaaatgacagttacagatactt

SEQ ID NO: 250355 - DNA, 122 bp, Homo sapiens
atctctaatttttcagaggctggggtgggcctagaaaacaagacccctgagttccaggctcgggtgccattggaacacccagattatggacggggcggccttgaagtggacgtgaggatgag

SEQ ID NO: 250356 - DNA, 122 bp, Homo sapiens
tgactttaaacacacaatcttcggagccgctcacaacgtccgtagaagcagactcctccccgctcctggggaaaaccctgcctaatatttataacgttatgacatactgtaatactcacaag

SEQ ID NO: 250357 - DNA, 122 bp, Homo sapiens
tccctcactcactcaacaattcatatcctgcttgcctgatgagcacagaaggtactaaaccgcctaccttaggacacttgcatttcagcagggagctcttacacccccaaggtaatgctcct

SEQ ID NO: 250358 - DNA, 122 bp, Homo sapiens
aataactccagacatgcggcgtttaagagctataacactcctagcgaaagtctgtagcttcgctcgtgaggttagtgtaggccacgaacccaccagaaggaagacacttcggaaacatctga

SEQ ID NO: 250359 - DNA, 122 bp, Homo sapiens
tgagtcagaggcagttggagatgtactgtgtaacctgtgacactcctgggccctaattctcggcctgttgccacagactccttcctcatctaggatagccatttcccatgtgctcctaagct

SEQ ID NO: 250360 - DNA, 122 bp, Homo sapiens
cgaccccaactgactagtgtgtgacaggactgggacttgcaggccgggacagcacccccacgtgatcttgctcacctcttacttcaagcctgggcagggactaacagtgaggtcactctgcc

SEQ ID NO: 250361 - DNA, 122 bp, Homo sapiens
ctccggcgtcggcgggggcagcagcagctgaggcagcagctgaggcagccgcgacggccgcgcccccccccgctgacctggattaggcccagcagctccgtggccgccgccgccccgcgggg

SEQ ID NO: 250362 - DNA, 122 bp, Homo sapiens
ctacctcgcggtgtgctgtgggaaggtcatgtgggcggggaggccttcggctacgggggtcgggccaggagcttccgctcagcgctggtgaggcggagccaggaggagcggctgcgctcctg

SEQ ID NO: 250363 - DNA, 122 bp, Homo sapiens
ctgctgctgtgcgtgagcctagcgggcaacgtgctgttcgcgctgctgatcgtgcgggagcgcagcctgcaccgcgccccgtactacctgctgctcgacctgtgcctggccgacgggctgcg

SEQ ID NO: 250364 - DNA, 122 bp, Homo sapiens
ggcctcccccaccctcaggcccatccagaactccaagtcttcagagggtatttcctgctccgtcacccagccctgggcgccacgtcgctcaccagcacttgcccggggtactcccggcgcac

SEQ ID NO: 250365 - DNA, 122 bp, Homo sapiens
acacattataccacacacacagcatacacagatacacaccactcatcacacacacagatgcgtaccacacaccatacccttcacacagacataccccccacaccatgcacgcgcacacacac

SEQ ID NO: 250366 - DNA, 122 bp, Homo sapiens
cttttctgctcaaggcaagcatgttcccctttttccatcttaaaaatggcaatctgactgcgttatcagttagaccaggcttcatacatagatgattcttctctttaattctattctctttc

SEQ ID NO: 250367 - DNA, 122 bp, Homo sapiens
tcctccagggccgtggggtccagctccaggtcgtacaggcggaggctgggccaggcggagcggacaaagttcccgagcaggggccggctgctcctgcaccgaagctgcaccgtgcggttgta

SEQ ID NO: 250368 - DNA, 122 bp, Homo sapiens
gtggcgagagcaggttcgggggtccggagggtcggagggtgggctgcgcgcgggaatggccgccgcgaaggaggggcggcttcctcgggcatcccgggcgcccggccccgtgcatgcaacag

SEQ ID NO: 250369 - DNA, 122 bp, Homo sapiens
cagcccccgcccctccctcgggacagcgcccccgaagctgtctctagaggatcccggggtcggaggcagggttcaaggcagcacttacaggaggatctcctgcttcgtcaggaacgtcaagt

SEQ ID NO: 250370 - DNA, 122 bp, Homo sapiens
caaggtcaacgctaacgaggctggcccggctggttcccctcggagcctcccaggttgcatcgcacatgctctgctctgcctttgatttttccagagctgggcctcacccgtgtcaggggagg

SEQ ID NO: 250371 - DNA, 122 bp, Homo sapiens
ttgaaaagtcctaaagagaaggagacctagaaatacttttgcaatgaaatgttttgcagtcgttatgggcttgtttcttaggaactgagtgacttggggaaagatgtagttcttgtctgggt

SEQ ID NO: 250372 - DNA, 122 bp, Homo sapiens
tatttttgcttgagaagccatcccttcaaagcagttacatagtgaggctgttcacttattcgtagaggtgctgctgcaatattttctaagtgtctttgtaactggagaaaagctctcaagcc

SEQ ID NO: 250373 - DNA, 122 bp, Homo sapiens
ggtagatgcttgggagagtaaagtggctatgattacctgtacattttcctctttcctcaacgagttttgggcacatggtcagtgtgtgagaaatatttataggatggtcaatgccatctatg

SEQ ID NO: 250374 - DNA, 122 bp, Homo sapiens
tgacccctcccttcctgctgcttccacttcagggcaaggagctgctggcgcagaagctgccgctgtggcaacaggcctgtgccgaccccagcaagatcccggagcgcgcggtgcagctcatg

SEQ ID NO: 250375 - DNA, 122 bp, Homo sapiens
cctctcttccattcttctctatttcccctaatctaatctagaaagggggaaacctactaacgtttcctaagcacatgcagcatggttttcagacttagcataaaacccctgcagagcttgtg

SEQ ID NO: 250376 - DNA, 122 bp, Homo sapiens
ctctagaaaagtgttatataagcccatatctttccaggtgtgttagggagatcagtctaacgaaaaaaaaaagaaaatctggaagagtggggatggaaaagtccaagggaaggaaaaaaaaa

SEQ ID NO: 250377 - DNA, 122 bp, Homo sapiens
tatgacccaagtttagccgacaggtattgagggtccgctgtgttcccggtgctgagagcgcggcagggtcggaggaacgcttgccccgccgggatgacagggaggggccgcctgggaagctt

SEQ ID NO: 250378 - DNA, 122 bp, Homo sapiens
gtgcatgatgaagaaaatcagtggttaggtacagttacgtagtttctcaacttgtatgatcgaggtgaaaatttcctgataatgtaatcagcggttaattggcagtttatagttgcctaaat

SEQ ID NO: 250379 - DNA, 122 bp, Homo sapiens
gcggggctccatgtgtgtcaccctctgtgtggatggctggcaggatgcataccaggtgtgcggacggcatgtggggcctggctgtgtccgtgcgcaggttgcggtttgtgagtcagctggtg

SEQ ID NO: 250380 - DNA, 122 bp, Homo sapiens
tctggggaacgggatccgagcaggcctcaggtgggcaggcgagggcagcccagaccagcccgggcacagagggagcggcggaggcagcgtggggaggcccagtgaggccgcctgtgtggaac

SEQ ID NO: 250381 - DNA, 122 bp, Homo sapiens
ttgccacactgtctaaggtggctttgaactggaacccaagtgcaaataaaggttggtattcgctcctgactttgtgtagagaaaacagtcctttggttactccaggccacagcagtcggtca

SEQ ID NO: 250382 - DNA, 122 bp, Homo sapiens
ggacaaacctgggcacctagctgtgcaggaacaatggcaagcctttagccggatcgggagcggcaatgggtgcctcattggatcaggagcacagtggacaccctgccggatccagacggatg

SEQ ID NO: 250383 - DNA, 122 bp, Homo sapiens
atttcaaagtccagcaggaaatcctgccctctgggttgcacttcctggatgagcctctgacgtctcaagcagcattgttttaatgctttgatgaagctcagcacgctgccgaaatctcggca

SEQ ID NO: 250384 - DNA, 122 bp, Homo sapiens
acagaatgtttcatttatcctgccctcgtacgtgaatctttaggatagcaggaaagaaaacgcctgaagaaggaagattctgtaaagctctgtcatgtcaaaataaaggtggggtgctcact

SEQ ID NO: 250385 - DNA, 122 bp, Homo sapiens
agaggactgtcttttggtctcccagatgtggagcaattctgtgcaacctctaaatctaaacgttccccgtgggtatcatttatgggaagttctcagtctagagcatctcccgtggggctcag

SEQ ID NO: 250386 - DNA, 122 bp, Homo sapiens
gctcaggcatggcgggctgcgggtcccaagccctgacccagggggaggcagatgaggcagcgagaattcgagcacagtgctggcccagcgcaccctctgtagctgctggcccgggtgctacg

SEQ ID NO: 250387 - DNA, 122 bp, Homo sapiens
ctgctccttctcctgggctccaggagggctcagaacagcccacagtgaccagctgagccccgcagccccgtaccccaccagcagccagctccaaggggctgaagcgactctggctgggggag

SEQ ID NO: 250388 - DNA, 122 bp, Homo sapiens
ttctctcatgggaatcggttcttcagcctttcttttctccccagagagggtctgtctactcgttgtaagagggaacaagtccacattgcagctgtacactttgcacccatgatgaaaagcgt

SEQ ID NO: 250389 - DNA, 122 bp, Homo sapiens
gaggattcagtcaaaatttctgtagcctaaaatgtcaaaaattttaatgtgcagtaattccggggaaataccttaaaataaagaagaagagtgcagataacagctgggctctaatgatgaaa

SEQ ID NO: 250390 - DNA, 122 bp, Homo sapiens
acagttttgggagtgggagagatgtttctcaaagcagaacctggggcaaccacggagcagcggatgcgcgctgaagggcgcgtgggcagcggggtggttccgcggcctgcggggcgcagcgc

SEQ ID NO: 250391 - DNA, 122 bp, Homo sapiens
acctgtttccccttaaacttctccccttccctcctaaggcgcatttctccattagggttgcggagcccaattgcgtccagctttctttaggagcttctttctgcctttctcttgccctttgt

SEQ ID NO: 250392 - DNA, 122 bp, Homo sapiens
gttactttctcatcacaggagcggtcccggggcccacctgagaggctgcgttgagaaagacgcacactcacttctgggctgctcaatcagcagcgcgaggcctcagtctcatcacaggaagc

SEQ ID NO: 250393 - DNA, 122 bp, Homo sapiens
gcgcggccgggactacgctacccagcatcctcggcgcggcccggaggctatgcgaccctgcgcgtcgcatcccctcggtggactacactccccagagtcctcgggagtcgtccaggtacacg

SEQ ID NO: 250394 - DNA, 122 bp, Homo sapiens
ggcctgcgggagctgcggaggccggaggcgggcgctgtgcggtgccaggagaggcggggtcggcgggagccagcgagccacgggagcgagccaggtgaggcggccggggtcggggacccgcc

SEQ ID NO: 250395 - DNA, 122 bp, Homo sapiens
ataaggatttgtcttttcaaagagcaggagagcagtagctcatgaggcagtgttgattgacggttcatgctcgaagaaaggtatgagtgctgcactcaattttaacttaaaaaaaaatctga

SEQ ID NO: 250396 - DNA, 122 bp, Homo sapiens
acctgcagtgaggctagtttaaggtaactcttatttggttggctagcttcttttggacttcgctgttctatctgtgaggtaaagtccctggatgtgtcagttcacattgcagctgtggcaat

SEQ ID NO: 250397 - DNA, 122 bp, Homo sapiens
gggcaggggcgtggcaggagccctgcctggccgcccctggtgggaaaagcccctaggggtcgaggccgagcgtggagcggagctggggtgcggcgaggggcagcaggagccgccgccgcaga

SEQ ID NO: 250398 - DNA, 122 bp, Homo sapiens
cgcagtgtcgccggccatcgggtggctcctgttgcagcttccggaatgtggggggcactgcgtttcctcgcggaggccgtggtgctgtgcatagtcagccggggtttggctctccctctttg

SEQ ID NO: 250399 - DNA, 122 bp, Homo sapiens
cttgctgatgccaaccttgtttttttaatgacaaagctgaacatagacgctccaccattccgttctttgcatcattaatgattagctgaactgtttcacccactgaccaatgtggacagaat

SEQ ID NO: 250400 - DNA, 122 bp, Homo sapiens
ttacatacacgaggatgaggggcagacaaagaactgctgtccagactgacccccatttcacggtggcaaagtgttctccttccaaaaactggaactttgaaaacagattgataatattctat

SEQ ID NO: 250401 - DNA, 122 bp, Homo sapiens
cgttcacaaacgacaagaaaaacagcaacacccatcgtcaccaatctggacatagtcattcggcactagatttgcaggcccccgatgctgggggacagggacggggaggggcagcgggtgga

SEQ ID NO: 250402 - DNA, 122 bp, Homo sapiens
ctcgggcgggagagggagaggagagagcgggagagagcttctccacggcccaggcccaggcgaggagtcaagagggtttgaggccgccaatcactggggtttactcgcaacccttaaataga

SEQ ID NO: 250403 - DNA, 122 bp, Homo sapiens
gcagatgacttcccgaaccccttctaatgtttggtttaacgtgtcgccggttagcgcgcgcgtgtgacagtggtgacaggcgaggctgttcctttttaaataccatgtcagagacacggcgt

SEQ ID NO: 250404 - DNA, 122 bp, Homo sapiens
tagggactgttcatccattggtgtttgtgtgcaaactaagacgactctgttctgcgcaggcgtgttgggggtgctcccccttcctctccataacacagacgcctcccgcgcaggcgtattgc

SEQ ID NO: 250405 - DNA, 122 bp, Homo sapiens
gcgggcggcgggcactggggagccgggcgcaagggcaggccaggccgggagggcggatggcggtggggacggcggtggcctcgggccgggcgggcgcccagatatagcggctcagggccaat

SEQ ID NO: 250406 - DNA, 122 bp, Homo sapiens
gctaatgtctaatttgcatatatgagtcctttttaggagatggcaaatcaccagagaaaacgcaggatcaatacagagtattaggcacgttctattctactctaattctctgcaaattggta

SEQ ID NO: 250407 - DNA, 122 bp, Homo sapiens
tattctcattccactcctgagtgttccgtctttaggtggaagtttctaaatacacttgtccgcaagtgttggtggggatgttgtaacgtgagggcatccatcatccatcaccttaaagataa

SEQ ID NO: 250408 - DNA, 122 bp, Homo sapiens
ccaactcttgactgagtgcctggtgctctcgtggagcatcgcatctggccccttcctgtacgtcccgagcgcgctcgagccagccccggccccaaccctacctccaagccccgcatccctct

SEQ ID NO: 250409 - DNA, 122 bp, Homo sapiens
gctgaagccttgtctcagaggttagtgctcctttgctgaatcatctccagcaagaaatcacgtgactcagggtctactcaggtgaagtcggcacccttgtctttgagctcacacaggtggct

SEQ ID NO: 250410 - DNA, 122 bp, Homo sapiens
gcaaagctcagcattttagtccaacggcctgaggaaacagataccccttgatctggaaaacgctgtttcttgctcttagggctcaatatcgctctctatagttgttttgaaaatagcatcac

SEQ ID NO: 250411 - DNA, 122 bp, Homo sapiens
atattccatacagctgtacccccctcaatcttaaaataagttcaatttattcctacgaaacgaaagaaaggaagcttatgtagacacagaaaaggcagggagtacctcaactgaaagacaca

SEQ ID NO: 250412 - DNA, 122 bp, Homo sapiens
ggttaggatgatcgtccctgctttaccaggtggggaaactgaggctcggcctggcagttacgggcctcccctgtaccagctgctgcaggtccggtctcatttcaccagggaaggatgtgtgc

SEQ ID NO: 250413 - DNA, 122 bp, Homo sapiens
ggtcaccggagcgcgctcccctcgccagggacctacactcttcccgctgctacattaggccgcattaacaaggatctggattcactttaatttaaaaggtaaaagatcttaggtctgatggg

SEQ ID NO: 250414 - DNA, 122 bp, Homo sapiens
ggataataatacctccccctaggagattttgtgctggttaatgagataatgatgtataaacggagcacacagccaggcacttaggaagtggaccacaattgccagccattatcattcaaggc

SEQ ID NO: 250415 - DNA, 122 bp, Homo sapiens
cccagggagaccaagtgccccttacctgagagacaacgccaaagcaggaagactgcgccgcgccaacctcacgcactgagccgccatgactgccactgcccgtcgcagtcgccgcgcacgca

SEQ ID NO: 250416 - DNA, 122 bp, Homo sapiens
gaggagcacctcttcccggccgtcatcccgtctaggaagtgaggagtgtctctgcccggccgcccatcatctgggatgtggggagcacctctgccccgctgcccggtctgagatgtgaagag

SEQ ID NO: 250417 - DNA, 122 bp, Homo sapiens
agcaaagataggccgggcaacgcctcgccgtcacagcttcacttcctattaaatctattccggaatggagccattttgactgctggcaagcacgcctccaaaaagaagggccagatgcgaaa

SEQ ID NO: 250418 - DNA, 122 bp, Homo sapiens
gggtgacagagtgagactgtctcaaaaggaaaaaataaagtataacggtaatgttttctccgctaaccttaaagattgatttgagcacctcactttgaggaccatagttccaaaacgctgtt

SEQ ID NO: 250419 - DNA, 122 bp, Homo sapiens
gactcttgagagatccagaccccggtacagtcgagggacctggggcccaaaaagggaaagcggctacctctaccacacagttgggaagcgcagtcctaaaggagacgcaggttggagactcc

SEQ ID NO: 250420 - DNA, 122 bp, Homo sapiens
tctactttacaacaattcaaaccagactattttctactgcagccacagaaaaacaatcctcgtggccagcccccatccttcctccctcctgacagatatcttttgttctcaaaatacaggtt

SEQ ID NO: 250421 - DNA, 122 bp, Homo sapiens
tgcgagagtaggccgctgcgtcggcttgaggcacgcagtcgtgcgaagttgaggtatgggcggggacccagagtcccgggcgggtccctgcatcgggggctcccgggccgggatcctgtggg

SEQ ID NO: 250422 - DNA, 122 bp, Homo sapiens
attttttttttttgacatttaggttttcattaaaacctaatcatcaaaaaaattattaaccgtatctgttttaggaaagtaatacatctgttggaaacatctgattgaatcctatctcaaaa

SEQ ID NO: 250423 - DNA, 122 bp, Homo sapiens
cacggctttcggggggacagctccccaaggctgcctgggcaccggatggggactgagaggcggtaaaggggacactcccgggtgcgctctccgtggtgctgaaaggacagctccttgcgagg

SEQ ID NO: 250424 - DNA, 122 bp, Homo sapiens
ggcccaccccacgtgcttctcgttgcagacggtggagcatggcttcccgcaccagcccagcgccctcggctacagcccgtccctgcgcatcctggccatcggcacccgttctggagccatca

SEQ ID NO: 250425 - DNA, 122 bp, Homo sapiens
ggtaggcgaggcatggcgcgtcaggtgagataaagccaggcaagccaatgggagggaccgcgtgagtgggttgaggccaagcggcgcgagctccagagctggtgaggcagctggtttgcgct

SEQ ID NO: 250426 - DNA, 122 bp, Homo sapiens
tgggaagggtcagggcagttccaggcagagcacagacgtcagctcagacatcctaccccccgccaaccccccgcccccggggtttccagagcaaccaacaccaccaagctccaggacactgg

SEQ ID NO: 250427 - DNA, 122 bp, Homo sapiens
tcttttcatctcattggctgcttctaccaacgcgaggacaattttccattccattggtttcgtcttctagtccgtgtgaacgttcttttcccattggatccccttactagtttctctgtgag

SEQ ID NO: 250428 - DNA, 122 bp, Homo sapiens
tccagatctagcagggaaagatgtgtgctcatcccctaccccgcactcagacatgggacacgcaggcagctaggcacacgtggatacatggaaccacaaccacatacacagaaactcaaaac

SEQ ID NO: 250429 - DNA, 122 bp, Homo sapiens
tcctgcctctttcggactcagcttacccggcccccccaccctccccaggaggagcatggacgctctgggtagaatcccaggcttttcagtgctgtctggtgctactccccaccccaaagttc

SEQ ID NO: 250430 - DNA, 122 bp, Homo sapiens
aagtgccctctgcccagctccatccaaggggctgaggaagtggaaaggtgggacagaggccggagataggcagagtgttcccactgcctaagcccctgggcctttccttaaacccctgtggt

SEQ ID NO: 250431 - DNA, 122 bp, Homo sapiens
tcggccggggaccgctgctcctccggggcgtggctgctgccgagcatctcccagctcagccgagcccgtgcccaggccacgctttgttccagccgccgcctcctctaccctacggcgtccgg

SEQ ID NO: 250432 - DNA, 122 bp, Homo sapiens
cacaaacccaccagaaggaagaaactccgaatacatctgaacatcagaaggaacaaactgcggacacgccgccttcaagaactgtaacagtcaccgcgagggtccccggcttcattcttgaa

SEQ ID NO: 250433 - DNA, 122 bp, Homo sapiens
gtcagtgatccccagaagggctgggtgtgtgtggcacaattctgaagcccattgcgcaagcgctgcatcagggtgtctttttggttgaggtgctgtgagaggacattcgccaagctattcag

SEQ ID NO: 250434 - DNA, 122 bp, Homo sapiens
tccagagctaaatgttgcaagttatcctacttttttctctaatatcaacaatacctgatacgatgaaaaataacaaaaagaccttactaattatccaatcaaagtcatcatctttgggtaaa

SEQ ID NO: 250435 - DNA, 122 bp, Homo sapiens
ttgtatctctttatatggggggaagggtcgggggatccctccgccgccagcgcgtggtcccggccccctccacccgccgtctcggccgcggccagcagcccctgccccccgggggacgctga

SEQ ID NO: 250436 - DNA, 122 bp, Homo sapiens
aaagtctctgacccagaaatgtcacctgcaggaatctgtccccagttaataattaaggaacgggacacagacatagccagttgtgcaaacagtgtgtttcagaaaaagagacagtttagaca

SEQ ID NO: 250437 - DNA, 122 bp, Homo sapiens
ttctccccggcctcaggcgaggcccgtctccatgctgcatcctgccaccgccaccatccccggtccgctacatccacctgctttcaccatagttacatgaaggggaccgggggacagggaac

SEQ ID NO: 250438 - DNA, 122 bp, Homo sapiens
actctgctttgagcccaccagccaccaagccttggacaggctgtgaagtcaaccctttggcgtttgcttgctccctcgctcgcgctctctctttcctacttcacctaagttcgatgagttga

SEQ ID NO: 250439 - DNA, 122 bp, Homo sapiens
cgcccggggtggtgacgttcccggctgtggggtctgatgacccgggccaggcaaaggacccgcccgagcggtataggcctgagcctctgggcactgcggccgcgtccggcagggctgccacg

SEQ ID NO: 250440 - DNA, 122 bp, Homo sapiens
tttcaggacagcgagcccggtttccaggcaggtgcttgtcgaaggcctggctggctgtaccgacaggcgggcactcagtcagcagcctggacgccccaactgccatcctcatcgccactctt

SEQ ID NO: 250441 - DNA, 122 bp, Homo sapiens
agtgacgggcgcccggaggcgggcaggggcggggcctggggctgcgcggcggggcgggggcgcccacctcccggctgccgggaacgaacgcggaaacccaggcgcgcggggaggggatccag

SEQ ID NO: 250442 - DNA, 122 bp, Homo sapiens
cctggccacgcaggagctggggcgcctcaagctgtgcgagggcgcgggcagcctgcacttcgtggacgcctttctctggaacggcagcatctacttcccctactacccctacaactacacga

SEQ ID NO: 250443 - DNA, 122 bp, Homo sapiens
cccgggacagcccattcacacccttacagggatcccaggccctgcagactccgtccagcccgggacagcccattcacacccttacagggagcccaggccctgcagactccgtccagcctgga

SEQ ID NO: 250444 - DNA, 122 bp, Homo sapiens
agcagggtcttctggggtgtaccacctctgccctcacccaggctccaccacgaccagcttcgtccaccccccaggagaccatgaaggcccacgtctgaaatcctcactaagcccaccctccc

SEQ ID NO: 250445 - DNA, 122 bp, Homo sapiens
cggcttcctacctaccgcttctgttttcactttgacagaatggcttctctatctttaaagcgtagactttggtctgtagcagttgagagcggcatttgtccagccacggcatcgacagggag

SEQ ID NO: 250446 - DNA, 122 bp, Homo sapiens
cccctcccacccaggccgggacctgggggctcctgccggatccatgggggcggccagctgcgaggatgaggagctggaatttaagctggtgttcggggaggaaaaggaggcccccccgctgg

SEQ ID NO: 250447 - DNA, 122 bp, Homo sapiens
gctcggacagcctgggccccccgcgtcccgcgccggccaggacccccacccagccacccccggagcctggtgacctgcccaccatcgaggaagctctgcagatcatccacagtgccgagccc

SEQ ID NO: 250448 - DNA, 122 bp, Homo sapiens
cctcccaccctcatggtacagctccaccttccccaggctggcttctgataattgtgctttcggaatcttgcattggaggccagttatcctaatgtgttgggattttggaaaaaagcctcagc

SEQ ID NO: 250449 - DNA, 122 bp, Homo sapiens
gattacccacagccggttactgccaacagatctgtgctcaccaggctcatgggcaggaggcgcatccaagtactgaggcaggattctcccagatctgttatttgggatcctagactccctgc

SEQ ID NO: 250450 - DNA, 122 bp, Homo sapiens
ggccgagtgtagggctgccgtgaggtgcgtggcgtaacgtgcgtggcgtaacgtgcgtggcgtaacgtgcgtggcgtaacgtgcgtggcgtaacgtgcgtggcgtaacgtgcgtggcgtaac

SEQ ID NO: 250451 - DNA, 122 bp, Homo sapiens
ctgaccctcacctactcctgatccctttcagcaatgatgtatctctgtcatatccaaactcgcctccagctggttcaggaacattcatgatgtccgcatggaagccagcaggacaacttgga

SEQ ID NO: 250452 - DNA, 122 bp, Homo sapiens
ccctgtcatcaatcttggttatgcagttcatttattcagtagaccccaggttcccatccacgtttggtgcacaggagaactcccctgctcaggaattctgaattaaggaggctttgaatgaa

SEQ ID NO: 250453 - DNA, 122 bp, Homo sapiens
aaatagatctcatattgcactgctatttgatgtcaaccactacgctaaatgctttacattcgtgacttaatttaatctccgcaaacatctcattagttaatatgtgcccattttacagataa

SEQ ID NO: 250454 - DNA, 122 bp, Homo sapiens
gtcatctgtgaggctaaatagacttaggcacttccacataatgctgcaaaaagcaacagccgtaaaggtactacctgctcaacatgtcattccaaacaaatacactatgattagcagctgaa

SEQ ID NO: 250455 - DNA, 122 bp, Homo sapiens
taaaaaaagaacatgtgtaacaaggagcccccgtggtgggcgtttccagtgggctcctggcgagcctggcagccagggaagaagggtcttcggcccatacagaggcctttccacgcagcagc

SEQ ID NO: 250456 - DNA, 122 bp, Homo sapiens
ctgtagatgactctgggaaaacaggagggagggaaactgaagcgcgaatgaggccggatccgccctaacaaagaggcagaaactgtgtctcaacagccaccaaatccagttcagggcggttt

SEQ ID NO: 250457 - DNA, 122 bp, Homo sapiens
aaacaggcccgtagaggggtcacacggccaagtagcggcactccaggcactgggggccctcgaggggaaggggcagacttctgggagtcagagccagcagctgggctgggaagcttcgagtg

SEQ ID NO: 250458 - DNA, 122 bp, Homo sapiens
ctggtgcggctgtgacccagacacagcagccactgtctacccagcagcagggtggggcgccgggcccgaggccggctctgcggcctgtcaggagatttacacccgactcttaacagcctcgc

SEQ ID NO: 250459 - DNA, 122 bp, Homo sapiens
tgagttcctgggttcaagtgaccctcctgcctcagtctcatgagtagctaggactacaggcgtgtagtgccacagttggctaagttttaaatcttttgtagagaaggtggttttacttgccc

SEQ ID NO: 250460 - DNA, 122 bp, Homo sapiens
ccatgagtcagcaggccccatgggtcccggcacctgacttcagtgtgccaggccgtctgtcgccccggcttgcacacacagatacagtcctcactccaggtgcagcccctccacctcccttc

SEQ ID NO: 250461 - DNA, 122 bp, Homo sapiens
gggctgcgggcgccgagagcgcgtcgtctgccgcctccgtgcgccgccgccgcctctgcgcgacgcccctcggccaggcctgggaaagcgcccgccccgctccacaccttcttaaagccccg

SEQ ID NO: 250462 - DNA, 122 bp, Homo sapiens
gagcgacacgccgtacctcgcagaggccaggatctcctttaacctgggggcaggtaagaacgcccctggcgccgcgcccccgcccccgccctgctccctccctccccggctgttgagccccc

SEQ ID NO: 250463 - DNA, 122 bp, Homo sapiens
aaattatcactactttacatttagaaagctcttttaaaacaatagcttttacaacaatcccgcccatcttaagtttgcatagatgttcaagtcagctatttgttcaactaacagagtcaata

SEQ ID NO: 250464 - DNA, 122 bp, Homo sapiens
tgcggccggattgctgggtgaacagagcttcgcggaggggaccccctgctgccatcctgccgggggccagtgcccggggcttgggggaggagcagccgggcaggttcgcgggcaccgagggc

SEQ ID NO: 250465 - DNA, 122 bp, Homo sapiens
acagtgcctcaggtttaaaagagcaggaagctgagtgagaggttgcagaaaaagtgtcttcgctcggcagaggttacaggtggcatctcagaaagagctttgaggctacaggctgtagtcgg

SEQ ID NO: 250466 - DNA, 122 bp, Homo sapiens
gaaagtaaggaagaaaggcaggaagcaggggtcgggggggggcggggagggagggaaactcggagatactttcagtatctaaagttgtgaaactagacaatcaggaacgcacaatcagaggg

SEQ ID NO: 250467 - DNA, 122 bp, Homo sapiens
tcgggcagaccaatcacaggccggaaggggcgggacctcccacgccgaggatagattgagcgcagaactaaccgcgctctgaaaggttctaaatgtctgcggggctcagagccggatgtcac

SEQ ID NO: 250468 - DNA, 122 bp, Homo sapiens
gctccagcccctgccccacgttctctcccttcagggtgagacctttctgtgccctttctacgtcacctggagcccgtgacgcccgctcatctgtctggctggaatcgccgcctggcccctca

SEQ ID NO: 250469 - DNA, 122 bp, Homo sapiens
actacagctcttatttgcagtgactctcaagaatgcaaatgcaaatgccattcctgacctcgagttaattcagctttgtcccctgagcatgggggaaaggcaggctgggggctggaactttc

SEQ ID NO: 250470 - DNA, 122 bp, Homo sapiens
atctgagacctggccggaaaagccaggggcgtgggtccctcgccccatccagggctgtggcgtggagtgaggaatggaggacccgttgtggttccagtttggagctgggagcctccctctcc

SEQ ID NO: 250471 - DNA, 122 bp, Homo sapiens
ttgctgatgaattggatctgaggcataaaagagaattcaaggatgacaagagatttttggcgcaagcaattggaagtatggagttgccattgactcagtttgggagcatggtaaagtagcaa

SEQ ID NO: 250472 - DNA, 122 bp, Homo sapiens
gccccaggcccagacccagataacctgtttcctgaaccactcctgcccctccaggacccacggatccaggatccaaagcccagccaccctgggggcagaggccctttcacgctgcccagggt

SEQ ID NO: 250473 - DNA, 122 bp, Homo sapiens
cagtttcctctcttgcggaagggcagtggccaactctgcttccttctggcttcaggcaatcggtggggacagaaccagcaagtcacaccaaaggggaggaccccgggcatcagctcttctgc

SEQ ID NO: 250474 - DNA, 122 bp, Homo sapiens
tcgaagagtatcagagaggattgggttcatccccccataacatctcttcactctctcagtcgcccaggaggctccactccccaggtcctcaaatgtctgagactcagaccacttgacttgct

SEQ ID NO: 250475 - DNA, 122 bp, Homo sapiens
gaggatttcccatgactttcccagctttaggggctagtgggtgacctccaacagcagcatcgtcagaacagggtggctgcacctagagaggtggtgttgggtggcagaaagagccagggttt

SEQ ID NO: 250476 - DNA, 122 bp, Homo sapiens
tccctttctatcttggaaacaggggtccgactggcagcggagtgggggcagtccaagctccggggtacctgcaggaggagactcgaccagcgagaggggccagcgagggtgaccaggtgccc

SEQ ID NO: 250477 - DNA, 122 bp, Homo sapiens
agacttcctctatcactttggctgtgggcttccccgccccgtggcccgccttggtgtccacgtggataagcagggggttgctttgcttcctgctgcggcccacgatgtactgaagggtggca

SEQ ID NO: 250478 - DNA, 122 bp, Homo sapiens
ggccagccgggacccaggaactcaatgacacaacggggctagtccctgccatgtgggggacgggggatgccaggtcgccctgcaccagttcccaactgcagtcagcccatggaaatagcagt

SEQ ID NO: 250479 - DNA, 122 bp, Homo sapiens
gctgggcccacgaacctctgccttccccttagggtctggtgcttcctgctccccagatcgcgcctcgggcagcctgttttcccgctaccaaccaacgctggcggcacctggggtcagttctc

SEQ ID NO: 250480 - DNA, 122 bp, Homo sapiens
agaatcacatccagtttatacctccctgtgcacacttgtataaaacaactataagacacacgagagatctggaagccagttcctcataagtaagaattggtaagagctcttaagcagcatgt

SEQ ID NO: 250481 - DNA, 122 bp, Homo sapiens
cggcggcagagaggatatcttgggcgggggatgtgagcgctgagcccttggcaggtactgcgtggccaggaccacgggcggcaagggtaggggaggagaagtcggtgggggagttaagggct

SEQ ID NO: 250482 - DNA, 122 bp, Homo sapiens
ctctccttgcaggtccggcccacgatttccactcatctctttcccccgggcgcggggcggcggcaggcggggtcaccagatccccctagcccgggcccctccaggcgccagggacgctgacg

SEQ ID NO: 250483 - DNA, 122 bp, Homo sapiens
gatcccgcgcggcgtgagagtcgccctggactacgaggcggggcaggtgaccctccacaacgcccagacccaggagcccatcttcaccttcactgcctctttctccggcaaagtcttccctt

SEQ ID NO: 250484 - DNA, 122 bp, Homo sapiens
gcctcggcgcactggcgcctttccccacaggagctgcctcagattggcccaggagactgtcgcgtcaggagacgaattccgcaccttcagcaggtgacggccccctgattggttggtgttcc

SEQ ID NO: 250485 - DNA, 122 bp, Homo sapiens
cggcggactgagttctatcccttttctgccctgccgggtgtgggttcatccacttcctcgcgccgctcgcaccccattggcagtattgggtcacatggccagccgtggccgcaaaggacgtt

SEQ ID NO: 250486 - DNA, 122 bp, Homo sapiens
atgtttcaaaaactggatgactacctgagaaaacatatattttacagcctcacctgccaacgtatatttaaaatttcctcccagtcttcataccactttagtgattattgctttattttcta

SEQ ID NO: 250487 - DNA, 122 bp, Homo sapiens
atagtttacgccttttttgcctgtgttttttattggtttgtttaaagcaaaatctcataccgtgtgctacctggaagcactgtaacctagtgacaagatcataggctctagggacacactgc

SEQ ID NO: 250488 - DNA, 122 bp, Homo sapiens
aactcttctgccaagtcccagtagatctacccggtaaacttccggtgagtttccaacttccgtgcggggcagcagcttcggctggtcctaagcggaccggaagttcgtcaagtttcacgctc

SEQ ID NO: 250489 - DNA, 122 bp, Homo sapiens
cttggggcactgcaggtcccgggccaggttcacaagcaggtcatgggagatggggtcgaccgggttgaggaaggccacatctctgtagaggatatcaggaaggagggtcctctcaaggccca

SEQ ID NO: 250490 - DNA, 122 bp, Homo sapiens
ttcagccacataggacagggactgctgagcatgtttggataatacagcatcttggcactgcgagttcagttgctgtagctttcattgtaataaaaatctgcttctgtccctgacaggtaaaa

SEQ ID NO: 250491 - DNA, 122 bp, Homo sapiens
ccttccttctccgcttttctgagtccttctcttcctttaacgcgagcctcaggaactacacgctccttcaccatcattccatgtctacatgacagtgcccttctctaaatgccagtaatact

SEQ ID NO: 250492 - DNA, 122 bp, Homo sapiens
gcctgtgcgagctcagctcccggctccagggcctgccgaggcacgctgcacccccaggcccggcgcctcactcactcccagagccagaaacctgttctcccgggaatgccagggagttctca

SEQ ID NO: 250493 - DNA, 122 bp, Homo sapiens
ctccgcaccctactaccagccaggctccgtgtggggtccactggggctgttgctggggggcggcctgctctgtgccctgctcactctgcgctggccccgcccactcaccaccctggccaccg

SEQ ID NO: 250494 - DNA, 122 bp, Homo sapiens
acccagagcctctgccactaggcccttggctcctcccaatggtgggaacttagctccattcgacagatggggaaagtgaacttcagagcagcactgcctgcccaaagaggtgaaacagagca

SEQ ID NO: 250495 - DNA, 122 bp, Homo sapiens
cgcgctttgggggcgttaaaattctgcgtaagagttggggatctcagcgctattaagaaacgggtttctccctgttgttgatcaaatcgtaatctcacagtaagaactgtctagttttttgc

SEQ ID NO: 250496 - DNA, 122 bp, Homo sapiens
cctgccccactgcccaggcttggcccacccaccgtggtgcccgccccgcctcccttagggcgcatgtctgttcccaccagagggcgctcctggacagacactctccctccctccctacagga

SEQ ID NO: 250497 - DNA, 122 bp, Homo sapiens
ggagagttttggccgcccagcaggctggcaggcgggggcagaagaattgcgggcggggggcgggacaaagtatgtgcctgtccgacctgtcgggattagcctgtctgtcggagccaagccag

SEQ ID NO: 250498 - DNA, 122 bp, Homo sapiens
cttcctcaagataaatttctagtttattaagatgcaaacagctctcatagatggctactacgaagaaaatcttatttttctgaacattttcatgaatccaggggacttgaaaatatggaaga

SEQ ID NO: 250499 - DNA, 122 bp, Homo sapiens
acttggcttccttggaccgccaaggaagggtctggtaggagccaagaagggtcggcaccacggaccttcagtaggcaaggattagttagcttccttgggtgctaatagttgctgatttattt

SEQ ID NO: 250500 - DNA, 122 bp, Homo sapiens
cctcgttgggcctaactctgcccagctgtaaaatggatgagaccgcccccccccccgccccgccaggaactccgaggtttcttctggctctgacgttctgggctctgtgcctacctcccagc

SEQ ID NO: 250501 - DNA, 122 bp, Homo sapiens
tacacggcaggcaaggaggtggtctactttgtggctggggtcggggtggtttacaacacccgcgagcacagccaaaaattcttcctgggacacaacgacgacattatcaggtaagggggtgg

SEQ ID NO: 250502 - DNA, 122 bp, Homo sapiens
tgcaagatggccgtggagtatgaccgcttcatcgagtccggcaggaagtgagtgtggccccgggggacccccatctccctgcccgagcctggcagcgcccgccccggcatgccctcccccga

SEQ ID NO: 250503 - DNA, 122 bp, Homo sapiens
gggcacaggtgggagatggatggggctgcacggtgggcacggagcgcctctgccggaaaccgcctcttccttcccaaactcagttttaaagggcacagcaagtaaggtgctgctggttttaa

SEQ ID NO: 250504 - DNA, 122 bp, Homo sapiens
tgccaggcgccttccgcccttaacatgcggtggctggcccaggcggtgcaggagctggagcggggcccgagtggggcgccagagccccagcgcgagcaggagaggggccggagcgcggatcc

SEQ ID NO: 250505 - DNA, 122 bp, Homo sapiens
acatcaacaaactttgctgctaaaaaacgaaagtgcagtttctttctctcgggcccggggcggggccatggctcctcctctaggaagccgcgcgagcgcagtcccacggcagccatttccct

SEQ ID NO: 250506 - DNA, 122 bp, Homo sapiens
aaaacaagcatttccctccaagcagagccatcatgttttcagccaccatcaagtttttcccgaaaacaaaggcaaaccaatcttcccttctataagcttagtagtattattaaccccttatt

SEQ ID NO: 250507 - DNA, 122 bp, Homo sapiens
tataaaaacacagagcccctcaaaatctgagtctgacctgaaggagcccagctttcaaatcgatccttgttttcccacaaagttgttatttgagtctgatgctactatttagaattgtaggt

SEQ ID NO: 250508 - DNA, 122 bp, Homo sapiens
ctcctaaaggttcacccaccccttcattctaaatgcattcacggagaactcacggtgtgccgggtactcagatgtcttaatgctagaggaaccatagtgagtacaaagcaggtccggctgcg

SEQ ID NO: 250509 - DNA, 122 bp, Homo sapiens
aaggggcagctggcgtctcggaggccgtcaccagctgtcactccgtgccgccggagttgccgctcagtaaccaacttcaacccggaaccggccacggagcctcccgccgcctctaccccgcg

SEQ ID NO: 250510 - DNA, 122 bp, Homo sapiens
cagagggtgggagccccggcgagcgaccagttggggcttggtaggaaccccctaaaaatgcgccccacttgtgcattcgtgcatgggcgcattttgggagtaaacaatacataaccttcttc

SEQ ID NO: 250511 - DNA, 122 bp, Homo sapiens
caaatccctcctccagctcctcaaagaatgatctctaactttttttccacagagagcactcgctaacgtgatagataagagagttagaagcatctttattctatcttctctccagcccggca

SEQ ID NO: 250512 - DNA, 122 bp, Homo sapiens
gtacctgggctttgagaggctacgtctgtagccagggaggtcacttgaggaggcgacgaccgggctgaatataaagaaagaggaagagttaagcaggtgaagatggaggaaagatggtaggt

SEQ ID NO: 250513 - DNA, 122 bp, Homo sapiens
cacctcagcctcccagagtgctgggattacaaggtgtgagccaccatgccccgcctgttgcgtggtccttatgataatgtaactaatgcctgatgatatgaggtagaacagtttcatcccaa

SEQ ID NO: 250514 - DNA, 122 bp, Homo sapiens
tgagcaccagtgttggctggggtgaaagccgggtaattttcctctaagctgtcctccctccgctcccctccctgcctgctggtgctggctgtgagcacgtctgcattccagagcttaggaga

SEQ ID NO: 250515 - DNA, 122 bp, Homo sapiens
gccggctgtgggttgtggatgttcctgccatccctcagcaactctggtccagggctactccgggctgctgactgtgctcggctgggaggagcagaccctgggccagaagcgcaggctttgtg

SEQ ID NO: 250516 - DNA, 122 bp, Homo sapiens
ttcccattcagtcactcatggatcactgggcacaaagtcaggggtggaaagtgccccccacgtaggagccaagttagaccagacccagaggaccttagcacctgtctcaaatatctgaagat

SEQ ID NO: 250517 - DNA, 122 bp, Homo sapiens
tagcagaggatggtttcgatccatcgacctctgggttatgggcccagcacgcttccgctgcgccactctgctacgcgagtcacaggtcccagagttaatagtcaccttttttctagcgtgtc

SEQ ID NO: 250518 - DNA, 122 bp, Homo sapiens
atcctccctccctccacaagctacagtgatgcatgtagcagacacggcacctacagagtacgtggtccaagccaataaagctcaacaaaacccaagcaaagatggagcttatggcccttacc

SEQ ID NO: 250519 - DNA, 122 bp, Homo sapiens
tccctggggccaacactatggcaagttttaacaagatgccccggatgacagtttcgctgtcgccttgtgagtgaccctaagccggaacctcccagctaagccaccaggagtaatttgttatg

SEQ ID NO: 250520 - DNA, 122 bp, Homo sapiens
ctttgagcaagtctagacatattttagctttaggtatgcaagaaagggtagtaaaagagacgttatacattcattcgagagatatttctagtgtgccttttatgtgggaggattgattctat

SEQ ID NO: 250521 - DNA, 122 bp, Homo sapiens
tcggccacgattggtcggtgactgggaggaggacgctgggtgggagggctgggagccaggcgttgcagtggcaactctctgccgctagatgccgctccctcccaacgggagccgggcgcggg

SEQ ID NO: 250522 - DNA, 122 bp, Homo sapiens
tttattctaagaatttacaaggcttgtcgttgctttctatcatgttggctttctgaagcacggggagttaacaactatttgatgtaatcaggaacccggggaaaatctttagttggttccct

SEQ ID NO: 250523 - DNA, 122 bp, Homo sapiens
gcgagggcggcgcgtacacggatggcgagggctacacagacggcgagggggggccctacacggatgtggatgatgagcccccggctccagccctggcccggtcctcggagcccgtgcaggca

SEQ ID NO: 250524 - DNA, 122 bp, Homo sapiens
gaggcagaggttgcagtgtgccaagatcacgtcatttcactacagcctgggtgacaagagcgaaactccgtctcaaaaacaaaacaaaacaaaacaaactataaagtaccgcttcatactca

SEQ ID NO: 250525 - DNA, 122 bp, Homo sapiens
agggtgggggtgggacgcgtgcgattgcgggtgggtgtgtgcgggtaggagtgtgggctccgtgcctgtgattctgaatgagtgcgccaggctgggcgtgactctgggtctggggacagtgg

SEQ ID NO: 250526 - DNA, 122 bp, Homo sapiens
gctgagagcgtccgggcagctcacagggaggccttccggccagccaaaagggctttggcccgtccagcggcggcctggaaaggcctcttccccggccccccgccagctcccgcctggtccgc

SEQ ID NO: 250527 - DNA, 122 bp, Homo sapiens
cccctgtctcttcatgcacttgggtgtgtgattctgtgcatatgtatgtgccagtgcgtgcgtgcgtgtgtgtgtgtgtgtgtgtgcgcatgtgccacacagagggcatcacattcagctct

SEQ ID NO: 250528 - DNA, 122 bp, Homo sapiens
tcgtgctattataaatcaaacagcaacagggcatgattaaacacacggagcctgaccacacgtgggcacaatcaaggtctcttattccctccgtgacattcatgtccaaccactaccatttt

SEQ ID NO: 250529 - DNA, 122 bp, Homo sapiens
cagcccggatctgcagttgccaggtcagtgcggggcccggagtggattcgcggggcggggcggggcactgcccgcgcccggagctcagcagcagctgcccaggggcgggggcggcaagacgc

SEQ ID NO: 250530 - DNA, 122 bp, Homo sapiens
cctgaaataaattctagctattctgaaacgtgttttgcccgaggcctggggtgcaggcaccgctgtacctggggtgaggggagctgccgggcctttcagcccggtggtctccacgatgctcc

SEQ ID NO: 250531 - DNA, 122 bp, Homo sapiens
ataatggcaaaaaatgtggaaactacttgctggtgttttccagcaggagaatggatagaccggggcttctacaataatagaatactgtacagcaggtagaataatgaacaatatttataggc

SEQ ID NO: 250532 - DNA, 122 bp, Homo sapiens
gggagcatcccacgggaccacgcagcaagaagctgcatgtgggctgccactgcagcgtcccggggagacctgacgcccaaacacaccgatcctactgaggcagggcttaaccttaaagccag

SEQ ID NO: 250533 - DNA, 122 bp, Homo sapiens
tgctgtatacttagtttaactaacactgttaattagaaacactgtattcatcatgactctcgactgtacataagaaaaacccaattcaagctggcttaagtataaaggagaattgatgagcc

SEQ ID NO: 250534 - DNA, 122 bp, Homo sapiens
caaggaacttgtggcagggatcccaaggtgaggcagcaacagatgtctgtgaacattgtgcgttaacagtggctcagagcctctagattcacagctctgcatggtgggcttctgccttcaac

SEQ ID NO: 250535 - DNA, 122 bp, Homo sapiens
tgcttcccggccatgttctgcaaccaggtcagccgaaggtccggtgagccctggtagccccgggcaattctggagtccaggtgaggggggatgtgaggaggggactcacctggtcctcccca

SEQ ID NO: 250536 - DNA, 122 bp, Homo sapiens
ggcacgtggatagaaggcgggggcggcgggaaaggcagacgcacacttggccggtgaaggcgcgcggcccagctctgcgcgcagctctgggaggcccggcgcagccgcctcgggcccagcgt

SEQ ID NO: 250537 - DNA, 122 bp, Homo sapiens
ccaccgcgcagtcggctcctctgtcacctcgccctcccaaccatggggtcacggggctcccgcccctccactgtctgcgggcggcctccagaggttactctcaaacccaccagctccagggg

SEQ ID NO: 250538 - DNA, 122 bp, Homo sapiens
ggcggtccagtttgagctggaggacctgaacctgcggcctgacccagagccacttctcaccgagatgattcatgaagtaaaatgtcaaactcgagaatgcccccgcatctcgaacagtggtc

SEQ ID NO: 250539 - DNA, 122 bp, Homo sapiens
cgcaggagtgactcgttgcggatctgctcgatggccagttccacggcggggagcacaccgcgcccgatgctgcccttggccacctccttggtgagcggcatgaggcccatgatggagagcgg

SEQ ID NO: 250540 - DNA, 122 bp, Homo sapiens
aatggacgctccggtttccttattggtgcaatttcactgttgcatatcacaaaccaagcacgtgaagcagctctcctctcactcttgaatgtgtttctttttatatttcctgccagttagca

SEQ ID NO: 250541 - DNA, 122 bp, Homo sapiens
ctccctgcagcatcccagctcccctccccatctcagctcttacccagggagtcctgggcccggatgtcagctccatgctcaatgagcagccgcacgatctcctcactgttcacacaggcagc

SEQ ID NO: 250542 - DNA, 122 bp, Homo sapiens
gcagcctcgggcgcacaggttggcatctgccaaagcggatgtccaagggcagaagctttgcgcgcgctcctgtttcatcgggcttcagtagttgccatcctttctgggtctggcaggcgccc

SEQ ID NO: 250543 - DNA, 122 bp, Homo sapiens
gacaggaaaccttcctttgccatactgcattgcactgcccgtggcttggccagcatcccccggatcagggccctgtggtttgcgtgttacccatctgtgtccccatgcccagttcagggtct

SEQ ID NO: 250544 - DNA, 122 bp, Homo sapiens
cacgacacgaagccccagtgccatttggcatggcctagctgcctgcctccgacgctgtcccgccctccggaaccttcctgttacagggtttccaggaaaaaaaaagttgtatttgcgtgcct

SEQ ID NO: 250545 - DNA, 122 bp, Homo sapiens
tcaaatgtactcactattgtgctaggcaattgaaagtaaaaagtataaagctgcattttgcgctctcagtgaggtttaagtcagggaaatgaggcatgcacacaaaataacgagaaagtagt

SEQ ID NO: 250546 - DNA, 122 bp, Homo sapiens
aacagatggagcctcctggatctgcaaacctcatacgattctaggcctctgagcctctggcgcagcaataattctgcagccgagcccactagccgcttcccagtgaccatgcgcaacaggca

SEQ ID NO: 250547 - DNA, 122 bp, Homo sapiens
cccgcgggcggagcgctctcagaccccggagcgcacaccgcggggccatcggtgccatcgcggatctccaggctcctcatcagtccgccggggccgcagcagcgcttctgggaagacgggcg

SEQ ID NO: 250548 - DNA, 122 bp, Homo sapiens
cttttgagatggagtcttgctctgtcgcacagtggcgcgatctctgctcactgcaatgtccgcctcccagattcaagcggttttcctgccccagcctcccaagtagctgggattacaggtgc

SEQ ID NO: 250549 - DNA, 122 bp, Homo sapiens
acagttctgaagatgactacttagccttggcttaggatgtttcctagaactgatgatatgcgtttcctaagaaacatctctttctttggaagctatgactaatttaccctctctcctcctct

SEQ ID NO: 250550 - DNA, 122 bp, Homo sapiens
ccagggctggatccatgactttctgattccaggtttgccctccacatcacatcctaccagcggagctcccttcctgtcccatgcctgcgtctagggtccggaattcatcacctgggaacgaa

SEQ ID NO: 250551 - DNA, 122 bp, Homo sapiens
tgtgaagaccgggccccaagtggcaagggctggcctggggcgggcagcttgggtcctggacgttgataggaagcggaaggggaatcgcgggaagctggcccaggtcaggtccgcaaaggctt

SEQ ID NO: 250552 - DNA, 122 bp, Homo sapiens
cccgcgtgacgtcatggcggctagagttgggcacagctctgcgccgactagttttccggccgggcgggagcctgcttctccccacccagggtccggccggctccaacccctgctttggcctt

SEQ ID NO: 250553 - DNA, 122 bp, Homo sapiens
gcggcgggcagcgatctgggcccggggcagtcgcctttgattatcgagggcgctggcgttcggggaaggttggcagcaccttacgagacccacacacgtccccggggcggcacgggccacct

SEQ ID NO: 250554 - DNA, 122 bp, Homo sapiens
ataattttagactatctgatccctctgcttggactgccattccacttacttagcttgatccgctcaagcttgattttcaagactcaggtcaatcaccatttctttagaaagtcttctctaac

SEQ ID NO: 250555 - DNA, 122 bp, Homo sapiens
tttccccagggccacacagcaggggagcagcgggcccaggtctggtctgcgtttgggtgccgggtggcatcagccctgtgctctttgtgcctgtgtcggagccactgacctgggccctgagt

SEQ ID NO: 250556 - DNA, 122 bp, Homo sapiens
atgtcactgcctattgaaaacaaagaatcccctgatgccttttattatctacaaaattaacgcatttccagcagagatctgtctctaggacaccccatctcaggctatggatgtacagatct

SEQ ID NO: 250557 - DNA, 122 bp, Homo sapiens
acagtgcctcgacggtccatgctggcttttatgcgcagggctgagaatggggtttgcagccgggctttcccgtccagggcaagctttcccaacatcagagctggccccaggcctctgggatc

SEQ ID NO: 250558 - DNA, 122 bp, Homo sapiens
gccaccaaccaaattaatttctctgaaagacatctttaagcaattatttcagcctaacctcgcttcatatggactcactcagatggctcatgttttattagggacttgaaggtttaaaaata

SEQ ID NO: 250559 - DNA, 122 bp, Homo sapiens
acccgccagccctgggttccgaagccgcccctggctctccattccctcgcgggcgcgccccgggcccccagtggcggccagctcccaccggtcgctcctgcactgccctgccctgccctccc

SEQ ID NO: 250560 - DNA, 122 bp, Homo sapiens
cgcaccgtcgacgctgagcgcgcggtcagaaacccgggtctgcggactagaggtgctgggcgcgcgcttcccgccccttttctgagcgcgttcacctccccctttcccccacgttcctcagc

SEQ ID NO: 250561 - DNA, 122 bp, Homo sapiens
agctcctgccagggcctcggcgtcagactgagcctgcggcgggggagagaaggagaggagcgctgatccgggcacccagagttggggctgccttggagacaaatctggggcccccgagcacc

SEQ ID NO: 250562 - DNA, 122 bp, Homo sapiens
tgctctgcgtcctctgctcttagaggtcaagccactgtggccttgtgtcctgcaggtatccgcagatttatggctaaaagaccgggaccccctggaagccgagaaatggtgagtgctgggtc

SEQ ID NO: 250563 - DNA, 122 bp, Homo sapiens
gcggtctccgatcttactgctgtcattgattctgggacgccacacactatgctcctcagacggcaaaagcttcaccgaccaacgctgcttgtgtctggctgcttcactgaccagccatctcc

SEQ ID NO: 250564 - DNA, 122 bp, Homo sapiens
ttaggcaaacttcagtaatattgagttatatagacagaataaattgagcaagatttacatcgctagagaaatgattcactgctacccctctatggctagctcctagttattcctcatgacag

SEQ ID NO: 250565 - DNA, 122 bp, Homo sapiens
cgtggggtggaggtggctccgtttcccagagtggggtgattcacgtcttgaggtctcggccggtgtgagagcccagcctgttcccctttctgcgcccatccccggctcggccgccaccccgc

SEQ ID NO: 250566 - DNA, 122 bp, Homo sapiens
aactggccagtttcaccggcggcggcttccgcaggaacgcggaggagggagacaagggggcgggggaacacttcctgttgggcaggaatgggtgttacatagctagatctttaagcatcaga

SEQ ID NO: 250567 - DNA, 122 bp, Homo sapiens
gccccgcgcacactggtagtcagcgcacaggacagtctcgtcgttcgagaagcgattcctcgggatacatccagagctttaaaacgatcagacccttcgaccaataatccgactggtaaaca

SEQ ID NO: 250568 - DNA, 122 bp, Homo sapiens
ccaggaggcggagccaagatcgggcgattgaactccagccagggcaacacagccagaccccgtctcaaaaaaaaaaggggggcgacagactggagaaatgtttaggacagagcagctggact

SEQ ID NO: 250569 - DNA, 122 bp, Homo sapiens
ctcctgtctgcccattccctgcatctcccccgtcaccaccccgggccagtccccgttacccgcacctggaggtctgcaccagccccacctgcactccggcgtccactctcgcccccattgct

SEQ ID NO: 250570 - DNA, 122 bp, Homo sapiens
gcgttttctaaagggaattgagaaatgcaattatcaagcatcttagtatgggcctcacaccgctttttggccacttgatcgacgataaataaatacatttgttagatttgtagaatttcata

SEQ ID NO: 250571 - DNA, 122 bp, Homo sapiens
tttccgttcttatttttagctctcattcgcctacacagttacacggcatttatccgagaacgtcacagcgcccgcatgctgcaccgggagggcgcgcgggccgccgggcgagccgggagctg

SEQ ID NO: 250572 - DNA, 122 bp, Homo sapiens
atttccatatatcctttatccagattccctaaattattactgcatttgctttatccttctcgatcagtggacagatagatgatatagacagatagatagacaaatatatattttttgaactc

SEQ ID NO: 250573 - DNA, 122 bp, Homo sapiens
ttgcccctgcttccagctctgggccaatcagagaaagccaaatgtgctcctcacaccaatcgcgtaagaagccctgcttctagtatagccctcctccaacttcccgatgccaacatcctcca

SEQ ID NO: 250574 - DNA, 122 bp, Homo sapiens
tgggtcacgcgcacttgtagtagcttgcatttaccaagacagtgagacagtggcctggcgcggtgtctcatgcctataatcccagcactttgggaggctgagacgggacgattgcttgagcc

SEQ ID NO: 250575 - DNA, 122 bp, Homo sapiens
caaggcggacttcaactttcagcgagcaggctgaccagatgggaatgtagacagggtgtgcggggaagggggaccgcatgcttcaaacctccttcctgccaccatcgcctagcagcctgagc

SEQ ID NO: 250576 - DNA, 122 bp, Homo sapiens
ctaaactcccgaggtcccgcccccgaccgtgggctaaggtccggcccccgtatttccgggcgagaagtgaccacgtggttgtcgcctataacaatccggccctgctcccatccactggctaa

SEQ ID NO: 250577 - DNA, 122 bp, Homo sapiens
ctttcccccatcccactccatggctggcttggctctgaggtctaacccgtgggcgctcagcgtctccctatgctggaacacgcccctcagtgtgcgcacacctcttcgtaagcagccacggg

SEQ ID NO: 250578 - DNA, 122 bp, Homo sapiens
cagaatccagggtaggtctctgcccgcaagcaccggggaggcatgggcgggtggtaaggccgctgccctcagcacctgcacaccccctggatggggctcccagcccggaggtgcctggggac

SEQ ID NO: 250579 - DNA, 122 bp, Homo sapiens
cagagttcagtattttccttcactttaatttttattgcttctccagttcagataattcagcgcttcctctttcttcttcctcaccttgttcatggctggctgttccatcagcagaactacaa

SEQ ID NO: 250580 - DNA, 122 bp, Homo sapiens
aagatggattttttacttacaaacataaagtgcattgaaaagggggaaaggtggactaaacggaaagtcatgccagccccaacatgtggctccaagaagagaaccctgcaccagaagggaag

SEQ ID NO: 250581 - DNA, 122 bp, Homo sapiens
gtctgagctgcctgaggctggctgggaaacacttccaggacacgtagagcaccaggaccacgatgaggaaggagaagatgagggccatggtgcccgtgaccaccttgtggatctgcacggcg

SEQ ID NO: 250582 - DNA, 122 bp, Homo sapiens
tgtacatgacctctcggtggtgcacgatgaccgcgtctgcctgtggatacaccttgcggtcggcagtgatgttgcagtcagccgtgccaggcaccatctctgagcagcggggcagagctatg

SEQ ID NO: 250583 - DNA, 122 bp, Homo sapiens
cccatggctcccagaggggacgaggccgcccttaattcccagagccaagcccagccccaccgcccacctatccccaggcttgggtttcgcacacgtacaggcagcgagcccgaggcccagga

SEQ ID NO: 250584 - DNA, 122 bp, Homo sapiens
aaagccaggcggggctctcctggggttgagggtcagggtggcagagcgtgcagccacctccgagctgactctgtggttgggtttggggcctggggcccgcggggcaacactgacccactttc

SEQ ID NO: 250585 - DNA, 122 bp, Homo sapiens
agagcgcccacctcctcctgcgtacggcgtctgtgccagcaggaaagccggggaactgtgcggctctggctttgggggacggtggcaggtccacatgacaccccacatacatgaccccggtg

SEQ ID NO: 250586 - DNA, 122 bp, Homo sapiens
attccccctccacgccgttctcatcgcggataggcccaatcttgctttctgcggaagtcccgcccccttgtcaagagaccaaacagaagaccgctgccggtctccccgcgagcgagcgctaa

SEQ ID NO: 250587 - DNA, 122 bp, Homo sapiens
tcaatatgaaaaagatcataaatctgacttgtatttcataacagcaatctgagtagtccccgtaaaaaatgtgctgcatcagtttgaatctcaatctattaggatataggcaccttggtcca

SEQ ID NO: 250588 - DNA, 122 bp, Homo sapiens
aaggatcaaggtgaataattgattcatcggcttttctttcatcttttaagctattttgctcgttaaaaggaaattgtggaatttgtcaggagcccaaacactgacacacacttctgacagca

SEQ ID NO: 250589 - DNA, 122 bp, Homo sapiens
ctcattttgatgcctggcccgtttggggttgccgcccctttactacgccgggaccctcctcggcctcaggctcccaggcactgcaggatgctggctgggcactcagcagtcgaggcgctggg

SEQ ID NO: 250590 - DNA, 122 bp, Homo sapiens
tggtccctctgcctccactgccaggctgaccctgggcaagccccttggggagggctgcttcggccaggtggtcatggcggaggccatcggcattgacaaggaccgggccgccaagcctgtca

SEQ ID NO: 250591 - DNA, 122 bp, Homo sapiens
aggctaaggctaagatcctctcacttccatgaatggcaaagttaccaactttgctcatcccgtgcagacagtggatgatgcctccccagtcttactttaagccatttgtccccaaataaccc

SEQ ID NO: 250592 - DNA, 122 bp, Homo sapiens
gtcacttcgtcttgggacacgtggcgctaatgccacttttcaaccccccaccccattcagcgacattaacccgggcgacagtccagggctaaacagttgctgaaacagttaaatgtgtgttt

SEQ ID NO: 250593 - DNA, 122 bp, Homo sapiens
cgaggccatgtccttcctgaaggtggaccctcggaagaagcaggtgatcctctacgatcccgccgccggtcccccaggcagcgcaggcccccggcgagccgccactgctgcagttcccaaga

SEQ ID NO: 250594 - DNA, 122 bp, Homo sapiens
taagcgctcagcgggcagcagctctctcccgcctcttccttatggccactcgcactgactcgattcctggccgccccgtccctctgaccaccttgggctgtccctggcggcagctcctctcc

SEQ ID NO: 250595 - DNA, 122 bp, Homo sapiens
atccttgccagatttttaattctacaaccagagaggatcagttccaggccacctgacttgcgtgaatccagctgctgggccagttgagtgagattaagtaacttgctgagccagagtatgtg

SEQ ID NO: 250596 - DNA, 122 bp, Homo sapiens
gtactctgcaggccaaaggacacaattgcagttcagagggggcctatcggctcccaagttcgttcttacctggggctcctggaggtcaagcccttcccttcactgctcctgccttttggcac

SEQ ID NO: 250597 - DNA, 122 bp, Homo sapiens
ggatcccagggaggaggcgcggccggagccaaagcgcagaggcctccctccctcgcgcgccgggtcgcacttcattcctgcacaggcagaatcatctggcttctgcaaagcagtcgcgcagc

SEQ ID NO: 250598 - DNA, 122 bp, Homo sapiens
taatgctgctgcttcttccagttccaggcccgagcagggaggtggatccagagtttcgcccgtctcagttcgacgcacgggactcctggcggcggggagggcgttaaagccgtatctagcgc

SEQ ID NO: 250599 - DNA, 122 bp, Homo sapiens
gactagagaggtaaagtaacttgcaggaggtcacaccgcttgcaatgataggaaccctagcgatcctgctccagagatgaatataagctatagcgccagctgtacagaagtgcagtttctta

SEQ ID NO: 250600 - DNA, 122 bp, Homo sapiens
ttctgcgaaggattctcagttacacggatgttatcattgaacattagatactttgctttccgaatggctgcctcattaagaatcgcaatttagctggatgtgtcctcatcggacttccccag

SEQ ID NO: 250601 - DNA, 122 bp, Homo sapiens
tctgaaacaatagcgcgggctgctggagtcagtctgatgatataatccttaaggcattcacgggcagaccaagggccaagctatcaaagggttcagctttttcttctttttaaaagctgttt

SEQ ID NO: 250602 - DNA, 122 bp, Homo sapiens
agcctgtgtcgctgctgctgcagcactggcaggggccttaaaacccgaggaagcacccaccgactcctctagcatttccctgcgggacggcgccggtgaggggtgcagatgagtccacacag

SEQ ID NO: 250603 - DNA, 122 bp, Homo sapiens
tgcggagggtgtactaggtcccccagcagtgccagccctctggcactgtgctcgatttctcgctgggccttagctgccttcccgtggggcagggctccggacctgcagcccgccacgcctga

SEQ ID NO: 250604 - DNA, 122 bp, Homo sapiens
attccttttcttcccaaagtggaacatgattggatctttgtttctgttaattctacaaaccgccttagagtccagctcgatggtcttttccctcctcctttattttgttctcttttccccca

SEQ ID NO: 250605 - DNA, 122 bp, Homo sapiens
tgcaggaatacttatcagggctttaatggtaagtatcctctttcagcttttctcttcatgcgcataaaaatatagtatcaatgtaaaaggccagttctacctatttcagtccttgttttggt

SEQ ID NO: 250606 - DNA, 122 bp, Homo sapiens
ggtaagggtgaatgaggcattccaagcagacagaacagtatgagcaaagccccagagtcacgactttccaggaaatgctcggaggaatgggacgttcaagatttgtgggaagcaggattgag

SEQ ID NO: 250607 - DNA, 122 bp, Homo sapiens
tgaggacaccaaccaaggccagggccaggagggctccaactgcaatccccgtcagctggccgagagtggaaacacggcgcccatcagcaaagccacaaacctaaccctagccctaagcctgc

SEQ ID NO: 250608 - DNA, 122 bp, Homo sapiens
agaagcccctgtgaagccagagagggaaagggacctgtccagggtcacacaggaatcatgcgtcaagcctccccagccacggacttgtctccatccagggcatttcagcccctgcagggcag

SEQ ID NO: 250609 - DNA, 122 bp, Homo sapiens
agaagctggaaattcggtggtggaaactggatgcgtgcgccggatttctcttaggcttaacgtttcaatgcctaggctgtaccctagattattagatgggaatttctgggttggtaggggcc

SEQ ID NO: 250610 - DNA, 122 bp, Homo sapiens
ccggaggcggttccgatgccgccctgtgtggaccgtcggtgatgggtccggaggtggttccgatgccgccctgtgtggaccgtcggtgatgggtccggaggcggttccgatgctgcccctcg

SEQ ID NO: 250611 - DNA, 122 bp, Homo sapiens
agtagtgccctgccgatagagatgacgccagagtcagcccccagtccaaaactaggtggccgcttgggctggcctctggatccatcgccagagggggtctacagaaccggggcaggtagcac

SEQ ID NO: 250612 - DNA, 122 bp, Homo sapiens
ctaaaatctatgactttgtttattttttacataaactatatcatagtgtacatttcctctcgcagcagcttgtgtttcttccttcaagagtctgcttagagataataaagatcaacactatt

SEQ ID NO: 250613 - DNA, 122 bp, Homo sapiens
agtccctccatgtcaccaacatgctggagctacgtaggactgagccttccctggtattcccggaatctcaaagatcacagcctgtgcacagaggctgcacatattaatttacaacaggggca

SEQ ID NO: 250614 - DNA, 122 bp, Homo sapiens
ccccctgtgcccatcttccttcccagattgtgcacccctggggcaggaaagccagagacccgaatcacttctctgcccaggcaccctctatatgcagaggttacccaggaggctagagaagg

SEQ ID NO: 250615 - DNA, 122 bp, Homo sapiens
acatggtgccccagcaagacacagcagtgggggcacatggtcctggagctttggaaaccccgggctgcgaaaagagccggtttctttctcgcggaacttctcagagcctttgctatgcaggt

SEQ ID NO: 250616 - DNA, 122 bp, Homo sapiens
gggaggggaaaccaggcaccaaagcaaattccttcatttcataatttcatctggcgcccccgttcaatcagcctgcattgtcgaggctttaggagaggcagttaggaaaggagagatactga

SEQ ID NO: 250617 - DNA, 122 bp, Homo sapiens
cagcttcatcctgagatgaattctcagagttctcctttgaggttttctttcagtctcatccgtaaccgttttttcccctgtctatgctgagcaacttctgttgcccaccaacaaccaatagc

SEQ ID NO: 250618 - DNA, 122 bp, Homo sapiens
agaaggaattctagaaaaggagcggagtctgagaggtcgctggagtggtaagggcagtggcgcatgctcggctgaggaatcagcaggactgcagttagggcctaggcttcagcttccttcct

SEQ ID NO: 250619 - DNA, 122 bp, Homo sapiens
cgccgggtggacgcagggcagccagctacgaattttgagctctggggcgcgctcacctggcggcccgcccaggccctggaggctgaagctggcgggtcccgtgcctggctcccggacccgcg

SEQ ID NO: 250620 - DNA, 122 bp, Homo sapiens
ctgagatgcactttacagagaaaacacacattggataagcttcattcgtgcaagagttagcgctgttggccatgagttcaatgttagtgatacaatacatattaagtaaggtgcccttaaac

SEQ ID NO: 250621 - DNA, 122 bp, Homo sapiens
ctctagacggtcctcatgggatgagcttcgatagctgtgctgaggccccgctagcccgcccgggtctctccggagcagacctcactcaagtggaactaagccatggggggttgtgggccctg

SEQ ID NO: 250622 - DNA, 122 bp, Homo sapiens
agtatctgtttaaaggaatttagtctaagcctctattattaccaataaggaaacaaggcccgaaagaagctaaatgactcgcctaaggtcactcatctaatgagtggctaagtgaagaatag

SEQ ID NO: 250623 - DNA, 122 bp, Homo sapiens
ccacctcacatgggttcctggcctgtgggttgggcccctccctcctccacccaccaccctcgcagagttgcttcttgccacatactccaacttcacatgggattgcagattcaagtgatgtg

SEQ ID NO: 250624 - DNA, 122 bp, Homo sapiens
tacagaggcatggttcacccctgacctgtgggtaggaaaatgaaaacataatttgccttccgtgaggtaactgcaagagtcttttatatctcagtgttcttccataggcgtgtggtgtgcag

SEQ ID NO: 250625 - DNA, 122 bp, Homo sapiens
gtgccccacccagctctgacgtgggtggcatttgacctcagggtgggacgtgggtcaccccgttccctccttgctcctctggacctcgtcccatgcgatgtccccaggctggtctctctccc

SEQ ID NO: 250626 - DNA, 122 bp, Homo sapiens
gccccgaacaggcccgggcacaccgagtcccgttactggtcttcaggcgaaattccaggacgggtgtgcattcatcaacctgggagtctctaggagccagagatgactggctctacatttta

SEQ ID NO: 250627 - DNA, 122 bp, Homo sapiens
caagttcttgaccctattcggccttatacatctggtcttacaaagaccaaagggatcctgcgcttgatcaactgaaccagtatgccaaaaccaggcatccaatttgtaaaccaattatgata

SEQ ID NO: 250628 - DNA, 122 bp, Homo sapiens
aaggggtgacggacggcagctggaaaatcgggtcactcccacccgaatactgtgcttttccgacggccttaaaaaacggcgcaccacgagattatatccggcacctggctcggagggtccta

SEQ ID NO: 250629 - DNA, 122 bp, Homo sapiens
caatctggtggatgttataactggttcaaaggagaaaccaaagcagcacaatttacatgacgtgaagagtactgaaatggaatatgcaactagacaaaaaactggtctctctacagggggac

SEQ ID NO: 250630 - DNA, 122 bp, Homo sapiens
cggcgggctaaaagccctggcgccggggggcacaaagcagcggcgggcaaaaagcctaggcggggtggggggaataagccgcggcggcggggggggcgggaaaaagccgcggcggcgggggg

SEQ ID NO: 250631 - DNA, 122 bp, Homo sapiens
ccctcaagacttccctgcatgagaaaaaaaaatgaaccatgtggggaaacctacttcagacgatggaaaggcaagaggttgttaacatagggacaggcagataaacttgtagtcctgtgtcc

SEQ ID NO: 250632 - DNA, 122 bp, Homo sapiens
gagccccagggcaccgggaggagtaaggaccccgagcgggagggagacgactggggggcgcgcggcacaaagagctttttattcaaatttgtttagagtttcgcgaatttgcatgaaaaatg

SEQ ID NO: 250633 - DNA, 122 bp, Homo sapiens
tcacccctccgctgtcatggttcttggagtaggtctgggacaccttcagctgctcagccacgtggtaggggatgatgttcctcagcagccagtctgcctggtcccgcatgctctggatcttg

SEQ ID NO: 250634 - DNA, 122 bp, Homo sapiens
gccaggagtagccctatcaggcctgtccggatgcacccctgtgccctctgcagcgcgtaccgcctccaaaagcacccacaacccgggacccgcccacacaagcaaggccccacccacaaacc

SEQ ID NO: 250635 - DNA, 122 bp, Homo sapiens
ttaggtaagtgtccagatgtcactcagctgaaggtggctcggctgggttggaatctaagccggcttgactccacagcctctgcttttctccagaggggacgtgagaggcaggcggccatgac

SEQ ID NO: 250636 - DNA, 122 bp, Homo sapiens
gccgaggcggcggtggtctttgtccgcctcgctgcccacgctgcctggagtctttgtgtgcgtgtcaagccccgagcgcaccgacgcgcgccttgggccagcgccggggagaaatgaaccgt

SEQ ID NO: 250637 - DNA, 122 bp, Homo sapiens
cttagcggctgaagactgacactgcccgatcgcctcggaagccccctagaccatcacagacgccgagcttccggtaactctcacagtgcaaggtaggcccgtccccttcttaatcaatacgg

SEQ ID NO: 250638 - DNA, 122 bp, Homo sapiens
ccagctggagagaaagggacctctcatgtgttttccccgtgtccccccaccaaggttgtgcgggccgccctggccctcggtcgcctttccctcgttattggcccacgtgtgcatggaggggg

SEQ ID NO: 250639 - DNA, 122 bp, Homo sapiens
ttccctacgtcagcgcagctaggcgatgtcgggagcgagctcggaccgagggctcagttgcgtcagtgccgcgcgcgtgctcgtcgggcgcgcgtgctcgtcgggcgcgcgcgcttcccggc

SEQ ID NO: 250640 - DNA, 122 bp, Homo sapiens
ccgcattcccaccacggcgcaggcatcgggtgccctgctcatcgcccctccagccggggccgggcctgcctctggaagccccacgggttctctggggcctttggttccagcgggacccagga

SEQ ID NO: 250641 - DNA, 122 bp, Homo sapiens
cctctcttcccatcaccactccagcctctcaacttggttgacaccaaccatccttccagccgtagtttaaatatcatttctggctgggtgccctggctcatgcttgtaatcccggcactttg

SEQ ID NO: 250642 - DNA, 122 bp, Homo sapiens
gccctgccctgcacctcagtcccccgccggcacccacgtctgtgcagagattagtgggtgcgaggggcctctgggcaggccccgccatcctcgctaggattaaatccgctcctgcccacagt

SEQ ID NO: 250643 - DNA, 122 bp, Homo sapiens
gcccaggtaagaaggggcctgaggggcagggggctgtccggggccgggggacccctctgtcgccgctgcgggatcggagggtccccgcccctaggggaggcagggaagaggatgctctctgg

SEQ ID NO: 250644 - DNA, 122 bp, Homo sapiens
ccccgcaaggaggtggagaagcctgttgtggccggggacccgccactgcaccaggcggcacggccagcgcccagcgatgaagagcgcccggcggtcctggtagcgggccttgaggcggtggc

SEQ ID NO: 250645 - DNA, 122 bp, Homo sapiens
gagggccctccctcagctgccctggtctggcctggggagctgctccctgattgcagcagccggggtcctcgctctccgacttctccttgggtccagcccgtgggggtcaccggcaggatgga

SEQ ID NO: 250646 - DNA, 122 bp, Homo sapiens
tcaaaactgtgccatctggatgttgcagtatacccattttgtccttcccatacctgtgcccggccacctgatgcaagatgggcacacagccactgaggaagcggagtctgccgcctgccggc

SEQ ID NO: 250647 - DNA, 122 bp, Homo sapiens
gcaggtgggtttactgaaacggtcgccactatacgaagttcgttcttcccgtgtaactaacgagagcccataccaacgtgcaacgcagccgtgcacactgccgcagcggtcgctgcgatcac

SEQ ID NO: 250648 - DNA, 122 bp, Homo sapiens
gactttgatatagcaaaggttaatgttctgtcatctcaaagatccatttccccaggctgtcggaatgtaaatgttaaggtgatgaaaatagtgaagcctaggttccggctcatttgagtcag

SEQ ID NO: 250649 - DNA, 122 bp, Homo sapiens
gtatctcctgtaaagacagccttgactcaagcatgcgttagagcacgtgtcagggccgaccgtgctggcggcgacttcaccgcagtcggctcccagggagaaagcctggcgagtgaggcgcg

SEQ ID NO: 250650 - DNA, 122 bp, Homo sapiens
tcacatcctgcccctgaaaagggcagctgcccacacgtacatgtgtagacacacatcacgcgcacacacgtgtagacacacgtcatgcacacacgcacgtgtagacacacgtcacacgcaca

SEQ ID NO: 250651 - DNA, 122 bp, Homo sapiens
cgggggaggtctggtcgtcccctcccccttccgccccttcctgtcgtcccttcgagctggcgctgctctgagttaatctccttgcccgtcagggggtgacaggaggtgtctgtcattcgaag

SEQ ID NO: 250652 - DNA, 122 bp, Homo sapiens
acaggaccgtggtgagggccttgcccactcctgcctgtctgctccccctaacacctggatcgccagggaaacgccaggcctgagccagcagaaaccagcgcagcaggcaggccctcacccca

SEQ ID NO: 250653 - DNA, 122 bp, Homo sapiens
accaggaagcgctgagggaaggtcttgttgccgaagcgctcgaagttgaagtggtccagacgctgctggaagaagcgctcctggaagccggggtccggggccctgcgggctgtggggggacg

SEQ ID NO: 250654 - DNA, 122 bp, Homo sapiens
ccgagggtgagctcgctggcagaggaacttgcgccttccaactcttaggtttgttgcgttcgggtcgcagtcgactttaatgggaaccaagcaaagcacccaatggcccctgccatcaggtg

SEQ ID NO: 250655 - DNA, 122 bp, Homo sapiens
agagtgggggcggtccccagatccccgcaccagtacattctgagagccacacagacccggcggcgggcagattagctcccacctcctgccagagccggttctttgccctcggcctcaaccgc

SEQ ID NO: 250656 - DNA, 122 bp, Homo sapiens
tgtagaaccctttaactgccaggactttgtactgtttcccaagtgttaccagagccaggccgccagccttatgcagtctgtttaccttagctggaaccagggtgctgtgctgtgggttctat

SEQ ID NO: 250657 - DNA, 122 bp, Homo sapiens
gatactgttagaatttttttttttcttttttgattcacaatgtccctggacctggtgcaacgtttgggaagcattttaagctctatggatggagggaacaagacagccgcattattagacaa

SEQ ID NO: 250658 - DNA, 122 bp, Homo sapiens
gaccccacaggacctgacccggagccaccactagaagccggagctcccaggccagggctgcgggaatggccccgggtcctctgcccagggcctgcaggtgctccaggtcagcgggcgacttt

SEQ ID NO: 250659 - DNA, 122 bp, Homo sapiens
tgagcggtcatcggccatgttttccacctctccctgaggaaacacggcgccgcccagctgcgagtcaccgcttactgaaccccttcggcaagcaggggaaagaccctcccgcctttccgtac

SEQ ID NO: 250660 - DNA, 122 bp, Homo sapiens
cttaaaccttcagtattgtcatatctttttgggacaatcctcaaaaatctccaaactcaacgtgattactttcctttgaacaaaagccatatttccaagacaaaaacacattctacttcctt

SEQ ID NO: 250661 - DNA, 122 bp, Homo sapiens
gaaatacacaggcatactttttttctctccccgatcccccactccctacccccgttctcgcggccttgtgacagacaactctgatcgctctgggggccgcgatctcccctccgtaatcttcc

SEQ ID NO: 250662 - DNA, 122 bp, Homo sapiens
gctttctttttatctttcaggaaagaaaccaaagagacagactctccagcaggcagggggcgccagtgagtgagctaggcatagagtcttgtggagagaattatggtgtcatagaggcttag

SEQ ID NO: 250663 - DNA, 122 bp, Homo sapiens
ggagtggggccctgcgctagaggcagaggcagttctttgttcaagcgttcctctggggaccggcagcagaggcaccgtgttctctcagccctggatacgtcttgtaatctttcacactttat

SEQ ID NO: 250664 - DNA, 122 bp, Homo sapiens
tcctcccggcactggggtgaccgccgagctagacgcgcctgagggctgagccccagggctcgtgatctgctcccggaggcgccccccaggcagggccgtgagccgggcgagggagagtcctg

SEQ ID NO: 250665 - DNA, 122 bp, Homo sapiens
ccctcggtaggcccccccacaccgtgtgttcccccactgtacacccccccccgagtcatgcgagccctggcgccccccacctcgagtcggcccccggaggttttgtttatggttgggttcgc

SEQ ID NO: 250666 - DNA, 122 bp, Homo sapiens
tgccatggcaccgagcctctgtgtctagatgagttctgggcgctgattttccaggtcactcggaagctgctctctgggcccgcctgtttcccttccctttgcctccttgtcccgcttccctc

SEQ ID NO: 250667 - DNA, 122 bp, Homo sapiens
gaatgttccatttttctgtggaataacggggtcatgaactggagcccgggtgctgcccgccgcccgctgcccccgccctcccttctcgccagggcgcctgcggcctctcttcgcggccttcc

SEQ ID NO: 250668 - DNA, 122 bp, Homo sapiens
acaaaaagagccgagcacttccggcgtcgctggcaacgggggctgaaggggcggggcaaacgccgcactagaacgattgatcttagagattctggttcctagagaggccagagatgtttgaa

SEQ ID NO: 250669 - DNA, 122 bp, Homo sapiens
tggaaacccgcggcagctgcgctactccatttccaggcgcccagcgcggcggcgcttagccgttgccatggagactggtaatggccccgcctccgcgccgaaaaacaggcaggaaccacata

SEQ ID NO: 250670 - DNA, 122 bp, Homo sapiens
gcccaaacatacatgtaagaagaatagtaagcttaccaatccagcaacatggaagaaggacgtgcaagggcttcctctgttatgtgctcctttaccacacagcgtatgtgtccttttaacac

SEQ ID NO: 250671 - DNA, 122 bp, Homo sapiens
agtgggcggggttccactagcatcggtggttggactctctgtgtgagctcagtgtttcctcgttcgcttagaccagcagatcctttaaccaccagagtggccagcctgggactagttcagag

SEQ ID NO: 250672 - DNA, 122 bp, Homo sapiens
aactggagtgggggccttgcggagcggtgctgagtggagtcatgtggcaggtatagctgccgtgcctgagtgtgatcagcagagggcgtgtggagcttggagaatccactcctggcccttag

SEQ ID NO: 250673 - DNA, 122 bp, Homo sapiens
ggcgtctgggcagccttgtaaactcagagtgacttctcatatcgtgctatgttttcccagcgatgcgctttcctctgcgctgaagccctgggaatcatttcagcccaaggtgagcctttcag

SEQ ID NO: 250674 - DNA, 122 bp, Homo sapiens
ctcaccccaggaaggcatgcgcccctctgcgggcggccccagccctgggccccctgcccccggaattgcccaagatgccgggtgactcctccccggggactctcccactctgggacgcgtca

SEQ ID NO: 250675 - DNA, 122 bp, Homo sapiens
ttccccatgggccctgaaccatgccaggcctggaaccccgggggtggcccgggtgggcctcggcggatgctgctgcctgaggactcctgccagcccccagctgctcccgatgagagcctggg

SEQ ID NO: 250676 - DNA, 122 bp, Homo sapiens
cttgcgggccagcgagagttccgggtgggcgagggctcggcgggccgcatttagagcagccggcaggcctgcaagccccgggcagtgaggggcttagcacctgggccagcagctgctgtgct

SEQ ID NO: 250677 - DNA, 122 bp, Homo sapiens
ctcctgcagctgggcagcgaggcagctgggccgcttcactacacggggaacggggtctggcggctccgtggagcctccgttcccctcatcaatacggtgggcgcgacgcccggctcacaggg

SEQ ID NO: 250678 - DNA, 122 bp, Homo sapiens
atcctgacccgagtagatcatccattcatttagtgatcagtgtcttaatatttagaaactcgccaatcctccaacccatcttaataatatatttgctctcttcagcctttttccagttagta

SEQ ID NO: 250679 - DNA, 122 bp, Homo sapiens
tcaatcccaagtagacccagaactcaccgaaatcaggtgttgagctgggccagggcaggccggatccgccaggtccatggccgcggcttgggggcggggggcagagaaaggggggtgccgga

SEQ ID NO: 250680 - DNA, 122 bp, Homo sapiens
atgatgaaatgagataatgcgtgtcaagggcctagcacagcgcctggtgtaggagccacacgtcccagagggctgcctgctggggaagaccgcataatttgaagcctcctgacataaaacag

SEQ ID NO: 250681 - DNA, 122 bp, Homo sapiens
acattattaacctgtctgagcctcccttccccttctgtgtagaggtaataacacccatttcgcaaggatggtgtgagggttggaagagataatatttgtaaagtactgtggcaggcacacag

SEQ ID NO: 250682 - DNA, 122 bp, Homo sapiens
tttcgcccaccatctcctggggacagggtggagtcgatatccgggacgggggggaggttgcggtgcccctcagggctacctctcaagagtgctatcatttccgcaggccagatcagaaaagg

SEQ ID NO: 250683 - DNA, 122 bp, Homo sapiens
actcgagcccctcctcccggcaggaagtaggcgtaggcgactccccagcaggaagagcgacggccgttcggccaatagctacgaaggttggctggccgcctcaccaatcacagagcggcatt

SEQ ID NO: 250684 - DNA, 122 bp, Homo sapiens
gaacccactggagagtttggagaagaagagaggcatggtctaccctgtgtcttcatactgcggctactgtgtgaagatcagactgaagacagtgccctccaggttactaggagatagtgagc

SEQ ID NO: 250685 - DNA, 122 bp, Homo sapiens
gcgtctctcgaagccgggacccgcgcggggaggctgcactggctggaaacagcgcctgggcgctcccgcggctcccacctcagagatgtccccaggtgccccacgccccccgcgcgagcccc

SEQ ID NO: 250686 - DNA, 122 bp, Homo sapiens
cttttcctgacttgcactcaccctcctaccatgatgccagggctaaagactatgggtttgcgaagggggccccagtttggctcttgaacccctgaccaagacagtcagcaggaaatgacagc

SEQ ID NO: 250687 - DNA, 122 bp, Homo sapiens
gttccccgaggtcctgggtgagggcttttgggtgcagcaggagggactgttggcttccaccgcccttgaggggcaagtgcccagggaccccgggccaagctcagacccggccatggcatgac

SEQ ID NO: 250688 - DNA, 122 bp, Homo sapiens
ttttgtagggctaattaactgtggcgcgtatgtttgtcttctccagttgatgctggtgcacgtgtatagtctgaggtttgtttttccccagcctcacccccatggtgcctaatacaccacat

SEQ ID NO: 250689 - DNA, 122 bp, Homo sapiens
acctgcaacagccactgttttgcatttatcaacaggttcctttaaaagtattctcaggtacgcttgctgaggcaggttctcgtcttctatttcatgtttcccaaccagacactttcgggcat

SEQ ID NO: 250690 - DNA, 122 bp, Homo sapiens
cgaacccacagggctgcgagaggaccaggcagctcgcggtcaaacccctgagccgccaggcggaggatgggaggatgtcatgtgtgatgtcatcttaaattggggtatcaaatgaggtcaag

SEQ ID NO: 250691 - DNA, 122 bp, Homo sapiens
ctctaggccacctccaacttggtcaagccacaggtgcccatgccatagatggctgagggacggcagctgacacgtagttccaactaaacctctgggtggcagcccataggttgtgggactgg

SEQ ID NO: 250692 - DNA, 122 bp, Homo sapiens
gcctggccgcacggtggacagcagccaccagagcaggaaggatgcgccgagtgaaatgtacgtccacacgaacagggcccaaaaccaggggtcccggatgggcctgcgcacctctgagaaga

SEQ ID NO: 250693 - DNA, 122 bp, Homo sapiens
cggtgcaggccgcggggccgcctctgatggcctgggcaccccccactcccgccccgttcacgaccaccgcggctgcctgagctgctcacacctaggggatcacatccctgcctctgcaggac

SEQ ID NO: 250694 - DNA, 122 bp, Homo sapiens
ttcctgagtgcaaggtaaactccctgagggagtttgccttattcacttctggttcagttccgtggctttgcacagatctggcacaaggtgggtgcttggtgaaggtttgctgaatgaatgag

SEQ ID NO: 250695 - DNA, 122 bp, Homo sapiens
ccgcgcccggccttggctctctttaaaaggcatttttaggctagccgcagtgtggtctcccgcctgtagtagtcccagctactcggcttgagcccaggagttcgaggttatagtgagctagg

SEQ ID NO: 250696 - DNA, 122 bp, Homo sapiens
gttagaccttgtggagaactaatgtgcaatcttcgctttccttgaaccgagtcgacatcacggcgttgtctttggcacgtacagtctttgaataatagttgacgatcttgccgtccagttta

SEQ ID NO: 250697 - DNA, 122 bp, Homo sapiens
gatgcatattacatttgtttcgtttcatcaaagatataaatcttgatgcctagtaacctgcgaggcctggatagaccctctgccacatatgtttacatgatgtctcttgcttatggcctctc

SEQ ID NO: 250698 - DNA, 122 bp, Homo sapiens
ttaaaaacatataaattacatttaagctctgtacatgattcttaacaaaaataacaataccgtgttctgtacaatactgcttcctctgaacattccaaacccaagaaacactttcccttgaa

SEQ ID NO: 250699 - DNA, 122 bp, Homo sapiens
gaggacgtcgaagtgcgcactagccctccatggaagacgggagcagaggacggtggagtgcgcaccagtcctccgtggtagacaggagcagagaatgcctggagtgtgtactagccctccat

SEQ ID NO: 250700 - DNA, 122 bp, Homo sapiens
aggataagagctaactaggctgctgggaaaggtagtcagcaacccagcctgcaagtgatgcgttgacaaaggtgagtcgacaaaggtgtggcgctctccctccccacctcccacccccagat

SEQ ID NO: 250701 - DNA, 122 bp, Homo sapiens
tggtggtggtggtaggcccagctcttaggtgaatttgcagcccaagccccctgagggaagcgagaccccccatgacacagttaaggaaccagagcccagcagccatgcagatggcaggccag

SEQ ID NO: 250702 - DNA, 122 bp, Homo sapiens
tctagctgaggacgcgccttggaagaagatccagcagaacacgttcacacgctggtgcaacgagcacctcaagtgcgtgaacaaacgcatcggcaacctgcagaccgacctgagcgacgggc

SEQ ID NO: 250703 - DNA, 122 bp, Homo sapiens
gcgggctgcgcgctgctatctccctgcagcgctggctccaagcgctctgagcgcccggcccgggacctgcgctcaaatagcagccgccgccaacctgccggcaccgccctcttctctccctc

SEQ ID NO: 250704 - DNA, 122 bp, Homo sapiens
tggctgcgccgcggccccgcccccgcacgcgccctccccccacggccctcccccggctcacgttctcgtgcttcaggtgcttgagcagccgcagctcccggtacgttctgcgcgcgtggatc

SEQ ID NO: 250705 - DNA, 122 bp, Homo sapiens
tcccagggttagcactcgaatgctagagcttcttgtccacactctaccaggtcagtgtcccgcgatccccacctcccggacgcgtatgaaacgggaacagctaagggcttcaagggaaacac

SEQ ID NO: 250706 - DNA, 122 bp, Homo sapiens
ctgcaaggcgagctggagcctagtgaccaggtctggttcacctccaaactgtgtgaccttcggcaagtcgattaatggcccatgcctcagtttccttatcctcagagtgaaagggttcttaa

SEQ ID NO: 250707 - DNA, 122 bp, Homo sapiens
gttccagtgtggtaagtggggcgagatggacaggtgggcctggggctcccctagaaggatcgttaaactgatctgcctctgcctttcccacagctgtgctggccctcaagttccctgaggca

SEQ ID NO: 250708 - DNA, 122 bp, Homo sapiens
atcctcctgcctcggcctcccaaagtgctgggattacaggcgtgagccaccacgcccggccgagtcctgggtttttaacagatgttgaggggaaacagggaccatagccttaggcctgagca

SEQ ID NO: 250709 - DNA, 122 bp, Homo sapiens
aagccacaaaggagcagagcagctgctgctgcacccgtgatgcaagtgcaggatgagccccgggccgccaccgccgcctcggctcctccgtgacgtccgggaagggtatccccggcactcag

SEQ ID NO: 250710 - DNA, 122 bp, Homo sapiens
aaaagaaatggagtagaaaaataggcttgactattctaaagctgcttcagaaagaatctccggaagaccacggaggaaccccgcaggggagccaggcggatactcagccgctcgcggtagaa

SEQ ID NO: 250711 - DNA, 122 bp, Homo sapiens
taccccttgcacaaggttgccgggggaagaacatattgaacactttggatctcagtccctcgcctcaaggtcctgtgctaaatccagacctgtaaatatagcagtgaaggatctgcccccgc

SEQ ID NO: 250712 - DNA, 122 bp, Homo sapiens
gggagcttctgcgcttgctacagtccgggcgtcgggtaaggatgccccggggcagagcaccgggatgctgccctgacccagtgaaccaggccccaggacagctcgtgctaggggtatcagca

SEQ ID NO: 250713 - DNA, 122 bp, Homo sapiens
ctcatcttcacctaaacacatcaatcatcttcacatgaattctgaccactcccaagtcaccggactgcaggtgcagtgtctgacttcttaagccagtctccccatagctacttacagctatg

SEQ ID NO: 250714 - DNA, 122 bp, Homo sapiens
ctaagcaactgctgccatttgcttaccatttcctccctctctgggaattgacagaccttccggctccatttggggtggtttgggttcctgagcaatctctagaggcttggcttccctcctgg

SEQ ID NO: 250715 - DNA, 122 bp, Homo sapiens
atgactatttccttttctttggaacccgccctctgtttgtggagtccacaactgagcaagcgcaaaggtgattctcttgcgagggtctttgagagttgcggtgttagccaatagcgtaagat

SEQ ID NO: 250716 - DNA, 122 bp, Homo sapiens
ttttaaagtgccttatacatcaggcctgtgagtgctagaatcataagaaataggttgccccgaacttcaagaccatcctctggtatctaaaacttaatggaatcacaattcctctattataa

SEQ ID NO: 250717 - DNA, 122 bp, Homo sapiens
tccccaactcccaagtcagtttctgtgccacaaaggccccgcccctgcccttccctgacacgcccctccaatgaggccttgttccgcctggccacgcccgtcggttggcgccccgcccctcc

SEQ ID NO: 250718 - DNA, 122 bp, Homo sapiens
tttgatctccaaacctaattctgtgtagtgtagccacttcacaggtgaccatttgggattcgggagggaaagagatttgtgaaagtaacatagccagtgaaggaaacaagccaaagtagaag

SEQ ID NO: 250719 - DNA, 122 bp, Homo sapiens
aatccgcccttctccttaggtcagggtgctgacgggagccccgggatgggggtagggcagcgtgccctggagccagagcaggcattcttctgttccttcgtaaccgccccgggaggtgtagg

SEQ ID NO: 250720 - DNA, 122 bp, Homo sapiens
gcccctcccgagtgctggcaggccactgcgcatgcggacagaccaccccaagggaagaatcggggaaagttaacgcaagccccggaaggatgccaacgtatcaaacgccaagtccaaggtca

SEQ ID NO: 250721 - DNA, 122 bp, Homo sapiens
ataactcaccatcagatgagaaaaagaccttggctttttatttttgatatgtggctggaacggtttggcgtgtgacaggtgctctgcctgtgttgcgtacttatgctcccaggatacacagg

SEQ ID NO: 250722 - DNA, 122 bp, Homo sapiens
aacagggagaagccggaaagtggggttgactgcacatgcgcagacgaaaacgcgcatatccgttcccagcatgctgcgcggtaacccataacatgcaagactacgtttcacatgcagtacgg

SEQ ID NO: 250723 - DNA, 122 bp, Homo sapiens
ctactgtatatagtcactgagtacctaggaaaagcacgtttttagaatattatgtaagtgcggtacccctaccaactgttaggcttcatcttttgtggtcagcctaccctatacttttcaga

SEQ ID NO: 250724 - DNA, 122 bp, Homo sapiens
ggtggagccccacccctggaacttcctcttttggggttcttcctttctctctcagctctccgtctctctttctctctcagcctctttctttctccctgtctcccccactgtcagcacctctt

SEQ ID NO: 250725 - DNA, 122 bp, Homo sapiens
gtatctcctcgcaagtattaaaagagccactcagaaacccataaacttgtctaagaccaccgaagttgtccaaaggcccgataagtcaccaagaacgttttagagcgcctccaggaggctta

SEQ ID NO: 250726 - DNA, 122 bp, Homo sapiens
gggagagggacttggacttgccagcccaggagtaggtgtggccaaatctccgcagatactcgggtgggtgactccaggaggcgcccctgacaatcacagcaacctggaagtcacaccccgcc

SEQ ID NO: 250727 - DNA, 122 bp, Homo sapiens
gtcgccacgggctcttcccgccagtgtagccacattcctgcccctttccagttagcccttcgcgttcggcttagtctgcggtcctcttgcattgcgactccgagtttaacttccaacacaca

SEQ ID NO: 250728 - DNA, 122 bp, Homo sapiens
cgggcggtgagcgggggttgcgggggtgggccccaggcgagctgacaaaagggcggcgcgcgtctgaaccgccattggggcccacagctcccttaggactagctctggatcctcccggcggg

SEQ ID NO: 250729 - DNA, 122 bp, Homo sapiens
cgcatttttaccccggccgggaggcaaggaaactggggacacgcgggagaagggttacgccgccagttcagtgagagcagcttcctagcagctgtgttggagcaactttggcaagctggtct

SEQ ID NO: 250730 - DNA, 122 bp, Homo sapiens
ccaccaccacgcccaacccccggagcgcccggacgtggggggccgctcctccagcgcccccgcccccgagtttgcaggcaaagtttctcgtgaactttcctgtcgcccccgtccgtgggccc

SEQ ID NO: 250731 - DNA, 122 bp, Homo sapiens
gctgcaggtttctgagccggctcctcccctcccagccctgagcctcggggtcctcatgcgcgcagtagggcccttcctgcctgccgcctcggttgctgaaattcggtcagggatgggtacag

SEQ ID NO: 250732 - DNA, 122 bp, Homo sapiens
tcacccattttcccctccagccctatgccggggtgttggttttgagagttacagtttgggcggggaaggattggccaagcctgtctggatcctgggacctcagagaaatcagaatccaaagg

SEQ ID NO: 250733 - DNA, 122 bp, Homo sapiens
ggggctcggttggacctttagcctcaaactcccgtggtggaaacagttaggattggtggacgctgcacccagcatcctgcaaacagaattctgaaaactgatatctcatgcaaacaggatat

SEQ ID NO: 250734 - DNA, 122 bp, Homo sapiens
tattccgagggagaatactgagctttggaattcactttgcagacatctgcgaggatgttccgggagccaggcttgttatagctggcattgctggaattccacacccccccatgcctccctta

SEQ ID NO: 250735 - DNA, 122 bp, Homo sapiens
agtggaaccgccaggcggaaggggcggagtcgaaacaagtgcaggggaggcggacaggggcgtgatgcctgggttactctcagaggcatggtgggagtttgccaggcctgaaccctccttaa

SEQ ID NO: 250736 - DNA, 122 bp, Homo sapiens
cacttggctgccccacagagaagggactaaggaggcaagaggaacatggggaggttggtccggaggcttttgccgtggaccaggggagagctaaagatggcctgaactaaggtggtggcagt

SEQ ID NO: 250737 - DNA, 122 bp, Homo sapiens
cagacagaaaacccaaggaggtgtcgcacaggaagtgtccagaatggaataggaattgtgcggaatggaaaaggaagcatccagcatggaacaggaagcatccagaatggaactggaagcat

SEQ ID NO: 250738 - DNA, 122 bp, Homo sapiens
agcgtgtcccgcttgaggctgctgcccttgttcaccaccttgatcctgagggccagtttccggacgctggcgggccccaggccgtcgaagaagaaatcctcgttgaagacggggcggcggct

SEQ ID NO: 250739 - DNA, 122 bp, Homo sapiens
accatcccggccaacaggccactagtgtgttctccctctttcaaacggggcggcgaccctcgtctgacaggcggctgttctgagagcggtggctgtcccagggaagccctcggtgagcgtag

SEQ ID NO: 250740 - DNA, 122 bp, Homo sapiens
ttctgtgtggcagtcttctcgctctacctcatgctggaccgagtgcaacacgatcccacccgacaccagaatggtgggaacttcccccgggtgagtcgtgcctggttgctaatttctttgta

SEQ ID NO: 250741 - DNA, 122 bp, Homo sapiens
cttcattaggactataatactgtattatagactgaaaatttgctgagagtagattttaggcggtttcacaacaaaaaaggggggaggtaactgcaaaatgataggccaatttgatacctatt

SEQ ID NO: 250742 - DNA, 122 bp, Homo sapiens
ccaagtagcatcagggtcagtcatcaatggtgggcaaccagaaggccatgttggtacacccgctggcaaaagtcacaaacttggggttgaattgcaaacaggtaattgggcctgtgtgttta

SEQ ID NO: 250743 - DNA, 122 bp, Homo sapiens
gcaccagcagctcctcctccttctggtcggcctgggaggccatgccggagtcgctctcgtcgtcactgtcaatgagcaccatgttgtcccggtcctgaggccgctcctcctcaatgacagag

SEQ ID NO: 250744 - DNA, 122 bp, Homo sapiens
gcgcgggggtacacacgcgacgcgggaaccgctggcggcggcgggccgctggagcgggttcgggccgctgctcctgcagcagaccctgtgcctcagcaccgcctgcagcacctgggaagact

SEQ ID NO: 250745 - DNA, 122 bp, Homo sapiens
cgtgcttgtgcctgaatgctgagtgtgagcgcgcagtgatgccctagagtgcagtcatcccgggcttggcgcccagcgggtggaaatacggccgcagggtggaaatgcggcggcggggctgc

SEQ ID NO: 250746 - DNA, 122 bp, Homo sapiens
atccattatttttttaaaaaattaataaaatacacacttacagcatgctttagcatggcacgtaagaccattcataacctagtccctgcccacctgaagtcttctagttcattgctccctct

SEQ ID NO: 250747 - DNA, 122 bp, Homo sapiens
ggagaaaggagacttgcaccccaggcaggaaggcaaaggcccgggtcagctgggccagagcgccaaaaagacccagcttccccatcaaggtggcagctcttggcttcctagtctccatcaat

SEQ ID NO: 250748 - DNA, 122 bp, Homo sapiens
ggcggcgaggagaggagccaatatatataaggaaggcccccagcgcgcaggtttcagtagcggcgctgcgcgcaggccgggaacacgaggccaagagccgcagccccagccgccttggtgca

SEQ ID NO: 250749 - DNA, 122 bp, Homo sapiens
cggccctcagcacccacctctgtgtgagaacagcacgagcccgccgtccagctgggcctgcgtgaagctgcgcacctcagtgcccggcgccccccgcagcactacccgcccgttgctgggct

SEQ ID NO: 250750 - DNA, 122 bp, Homo sapiens
ataactgaagacttatctttggaatgagctttcacattacatgggcgggcttttacatcacgtgggctgatgaagactgatgattcagtcttcatgcctgaaccacgggtttacttttacat

SEQ ID NO: 250751 - DNA, 122 bp, Homo sapiens
gtggtcctggacaccatccccgccatgatgagtgccctgcggatggtgtggatcatctcccgacactacaacaaagacgagaggatgattccgctcatggagcgcatcgcctgggaaatcgc

SEQ ID NO: 250752 - DNA, 122 bp, Homo sapiens
gggcgggaactcggagtacgtgcgttgtgacgcaccgacggcgacgtcggggtttgtgtgcgcgagaggccgccgataaaggttgggtgcctcgcgccgggggccgttgggagggagtgcgc

SEQ ID NO: 250753 - DNA, 122 bp, Homo sapiens
gggtaaaaccccaaacacaatgcttggtacagaacaagtgcttggtaaacatggtgatgccgctgcctttgtgaagtgcctcgcctatggcagggactcaattctctgtggcttccctttgg

SEQ ID NO: 250754 - DNA, 122 bp, Homo sapiens
gaagtacacagcgcaaagccacgtcacagccaccgcggctgcaggccagagtcttcaaggcggagacaaagctgtcactagactcctcctggcccagagaggggcctcggcgggggaggtgg

SEQ ID NO: 250755 - DNA, 122 bp, Homo sapiens
aaagagccggggcaaaaatccgtaaccaagacaacagggcgcgattccaatcaagatggccgccagcgcctctagacgccctctacgaggccgtccccggaagtggcgttacgcgcagcttc

SEQ ID NO: 250756 - DNA, 122 bp, Homo sapiens
tggcccgccccgaggcgcgggcggggtcgagcggaaacctcctccttctccccatgccctcgaggccatgttggagaagggaaagtgaagctgcgctggttctactgccctttcactttgat

SEQ ID NO: 250757 - DNA, 122 bp, Homo sapiens
ggtgtgggatatagtctcgtggtgcgccgctttttaaaccggtctgaaaagcacaatattcgggtgggagtgacccgattttccaggtgcgtccatcacccctttctttgactcggaaaggg

SEQ ID NO: 250758 - DNA, 122 bp, Homo sapiens
cccacgtggtgggcttggatgaaagacagaactcgatgcccaggcctcctcacctggcagcgctgctttgctctgtctgcttgccctggcggtggtggcctgggaagagctgagttacagaa

SEQ ID NO: 250759 - DNA, 122 bp, Homo sapiens
gttccccgtggtggttttgcacaggctatttaggcacatctcggccgccgtggcggggcacggctcagctgttgcggggcggggccttcgcagagcatggcggcgggcgagcttgagggtgg

SEQ ID NO: 250760 - DNA, 122 bp, Homo sapiens
cttgcgcaggcggcgcaacatgaggcccgggatggccaggttgatggccgtctcgatgtgcgacgactcgaagagctcgtgcggccggcagtcgagcagcagcaaggacgcgccgccgcgcg

SEQ ID NO: 250761 - DNA, 122 bp, Homo sapiens
attttccatgcttcttttaaaaaaatgtggtggctacttacctgtttgagcttgcaggagcgtattttaaaaacgtggctactaaaatatgtaaggtcacatatgaggctcacgtgtgtgct

SEQ ID NO: 250762 - DNA, 122 bp, Homo sapiens
gagaggcgtgataggcccagcctttgacatgtggggaaacacaggcctgtgattggctaccgcatgacacccaagggacaagttgctatggcaacgcgtgggcgcgctgtgggctcgtagaa

SEQ ID NO: 250763 - DNA, 122 bp, Homo sapiens
aggaaagcagcaggtgcgtaaaagaaagagcctgcggcccctgcccgaggcccctccccacgtgcccagccctgagcagcagcagcgctgagtgacccaggtgtgggaaatgcctgctgagg

SEQ ID NO: 250764 - DNA, 122 bp, Homo sapiens
ggatacatccacaaaaggaatttcatgggaagacttgcagctgatggggtctgattatatcgaccaagaaagtagatggaattataagggacattgaaatgagccctgctgtgtatccctgg

SEQ ID NO: 250765 - DNA, 122 bp, Homo sapiens
atgttggcaccagatcctctttgagccctccagtgaagcctcggactcaccactagatggcgtccgagctcgcgctctccaccgcggggcagcaaggcggcaggaagcggtccagaggtgcc

SEQ ID NO: 250766 - DNA, 122 bp, Homo sapiens
agcctgccacaccatcagggccacacctacggatgaggtagagacccaggcggcgcggagcgagcccttcggttcgcagccccggccgcggcgatcgcaagcaaccggactaactcagggag

SEQ ID NO: 250767 - DNA, 122 bp, Homo sapiens
tgaaaccctcgccctcctgaagctgctcctgtggagtcctgtgggcgggtgtggccctgccgagttcagagtctgtcgcttcgtctgtctggaaactgcaggagtcatgagcagccttcacg

SEQ ID NO: 250768 - DNA, 122 bp, Homo sapiens
aggctgaggtgggaggatcacctgaggtaagaagttcaaggttgctgtgagccgagagtgcgtccctgcactccagcctgggcaacagacagaaaccctatctcaaaaataaataataaata

SEQ ID NO: 250769 - DNA, 122 bp, Homo sapiens
ggatattaggcttaacatctgggtgatgaaataatctgtacaaccaacccccatgacgcacgtttacctagaaaacaaacctgcacatcctgcacatataccccttaacttaaaataaaagt

SEQ ID NO: 250770 - DNA, 122 bp, Homo sapiens
gagggggtacccaggtctcctctacggaaatccctgggaagtgtccccaggaggcagcagcgatgccccacgtctcagggtaaggctggttgggggctgctgtgagggtttggaggcaccct

SEQ ID NO: 250771 - DNA, 122 bp, Homo sapiens
ctggtgagcttgcccataaactatcctaggaattcctttctcacccctattagatgcttacgaccattgcccagaatcttcctccagcttcccggagaattaccacgccaactcctattctg

SEQ ID NO: 250772 - DNA, 122 bp, Homo sapiens
cagcccctctgtacagtcttgagttaggtctaggcccacacacttccccactctgagctgcggtctcttcctctgtaaaatgtgatgattcagaacctctcctggccccaagcgcagttcca

SEQ ID NO: 250773 - DNA, 122 bp, Homo sapiens
taagttctgggtccccggccccagcgagagcctcgcctcgcctcgcgcgcctgcgcggagcgggctggcttcctgaacggccctcgcctcttcaccaccagggccgtccaccagaagtttct

SEQ ID NO: 250774 - DNA, 122 bp, Homo sapiens
ttacaccggctgctttaatgagggcattgatcttatcctccgtgactgtcacctcatcgtcgtgcagaatgagggccgagtagatgcaggcgagcttggagacggaggccatggcacgggcg

SEQ ID NO: 250775 - DNA, 122 bp, Homo sapiens
gattacaggtgtgagccattgcacccagcctagattcaaattcttgcatgttaagcagttcgccatagtatcaggattctgtaaggaagcatgggtgctcccatcaccaagtgcagagcctg

SEQ ID NO: 250776 - DNA, 122 bp, Homo sapiens
aacctcatctgggccaattggggtctggcttcttcaggggagctacttaaccatagagcacgtgacgaaaaacgattgaaagatcaggttcaatcacatgggctgaagtccatctcacctcc

SEQ ID NO: 250777 - DNA, 122 bp, Homo sapiens
tgtaccaaaggcttcaagaagccactgggagcacagagcactcccaggctctgctgtccccgcccagctggcctctatccaggtagggacactggccttccccatgtgatcagtggcagcag

SEQ ID NO: 250778 - DNA, 122 bp, Homo sapiens
ttgactgagacttcttcccacgatttctgtttttgcttctccaaggaaaatggcagctcccgagcagccgcttgcgatatcaaggggatgcacgagctcctcctcgctttccccgcctcggg

SEQ ID NO: 250779 - DNA, 122 bp, Homo sapiens
cttagctggtgctccttaagcttctccttagctggtgctcacatgcccatctgaccaagtcgcttccctgtctgggcctgtctccagatccctgtcccccagaataaagcccacacacctaa

SEQ ID NO: 250780 - DNA, 122 bp, Homo sapiens
ctcagggtcccggagaagtcccgtcccaggcgggggaccccagggcgaggaaggcccagtcggggggaggggaggaatcccgggagcggccgagaccgaggcagcggcggcgcgcggcgcgg

SEQ ID NO: 250781 - DNA, 122 bp, Homo sapiens
agacctaagaaatttgctttttagtgatggtttctatcttgtctccatatctgtttcaaccggaaaaacttttgcaacatattcctgagatgaaactagcataggtggttctgaagccagtg

SEQ ID NO: 250782 - DNA, 122 bp, Homo sapiens
ccccaggtcctctgcagagggacgtggccgcccatttaggaccctaatgcccctctgagccgggctttctatgggagtctcagccacgagcgccagtcagcctgaaatgtttcccctgcagc

SEQ ID NO: 250783 - DNA, 122 bp, Homo sapiens
ggagttaaagagtctatgcctgtcgtggaagctggcctggcccccggagctccctggagtcggtactgggggcttcgttttgtacgcaccggtaggtacgctctttgtggtccctggccttt

SEQ ID NO: 250784 - DNA, 122 bp, Homo sapiens
ctcttaagtacagaaggcctgaaatacaaaaggaaataaggaagaagtccaggaggcaaacgctaatgcaatttcaaactggaattacatcagcagctttaaacagatggcagaatgggaat

SEQ ID NO: 250785 - DNA, 122 bp, Homo sapiens
ccccgggcaaggcgggcatgactctgtgctcttgccagggtggatttcccgggtgagcttcgggactctggcattggcctcaatgttcttctggctggtactgcaggctttccatttaccct

SEQ ID NO: 250786 - DNA, 122 bp, Homo sapiens
cacagagccaagtgggagggaagccagggtaaatgatccgagcccgtctatgaaacagcccgcctcagcttgcgcgctgggtgcttactcagtgaagcaataacaactctgtcatggctgac

SEQ ID NO: 250787 - DNA, 122 bp, Homo sapiens
ttcactttctccactagaggcagcagcgcaccgtgaccctggcttactacggtaagaaagcggagaccttttgcttcgaggcggttggtggccagtagtcttgatcgacaagctcaggcctc

SEQ ID NO: 250788 - DNA, 122 bp, Homo sapiens
gccagcttgggaagaacctccatgacctgtgtcctgagaagtcagagagcaagggccccacggccatggcagggtggagccgtgtagagggtggccaggtggccagctcgcggattccatcc

SEQ ID NO: 250789 - DNA, 122 bp, Homo sapiens
cacagaggcccagcagcaggagcggcagtgagcagcctgaggaggaagccatgagagggacgtggggccattcacacagcatcctgggaactgcaggataactggacagctgagggttcagg

SEQ ID NO: 250790 - DNA, 122 bp, Homo sapiens
ggttttatgagccaggtataatctctcttggagttactttgttctattgtcccagtttgccgatgacacaatggagactcagaggagtggatgacttgcccagggtcatttgcaaggtagag

SEQ ID NO: 250791 - DNA, 122 bp, Homo sapiens
gggccagacccagggccggcctcggtgcgcctctagccagaaataaccagcactgggttccgctcaccggcaacgccaggtgggggccatctgaccactcaacagttttgctttttcttcaa

SEQ ID NO: 250792 - DNA, 122 bp, Homo sapiens
catagtattatctccagtggtagaaagtgcctggtgctggatttcaagggacagcctacacgcacacacccacagatgtgcacacacacatacactaaaaagcactcctcttcctcccctgg

SEQ ID NO: 250793 - DNA, 122 bp, Homo sapiens
catcccacaaattgttcaatgaatcaacaggaggtgcaatggccagaggaacaatttatacgtatgtaaggctatgtaaaggcacgtaaagccaaaccgctgtgaaaaccgccttcagaagt

SEQ ID NO: 250794 - DNA, 122 bp, Homo sapiens
tgcaagggtagggaaattgtttggaaatcaaaacgtggaagttcgttcatcctcccaactcgtggagttctaaggcagagactggctaagcttttgtgggacctaaaagttatataatcagg

SEQ ID NO: 250795 - DNA, 122 bp, Homo sapiens
aacaagttcccgtggaggaactgcgaggggcggatctgggtaccgtccccgagcacccagcgcacgctgggcaggggcgcagccttggcagtgcagtgaatgtgaatgctgagccccggggg

SEQ ID NO: 250796 - DNA, 122 bp, Homo sapiens
gtggcccagtgcctggcccagcgctccgcgctctcggctttgcctcctggtgctgggggtcggaggggagaccacctggttcctgccctagaactcgcaatccagtagggaggtgatgtgca

SEQ ID NO: 250797 - DNA, 122 bp, Homo sapiens
gggctgtgagtgttagttgtccaggtccttggtgttttgaacaaagaattgaaaaaatcgcgcaaagtaatgaaggaagcagcgaaagcagggatttattaaaacgatgaaagaactccata

SEQ ID NO: 250798 - DNA, 122 bp, Homo sapiens
ggaggctgattggtaggcaggcctttaggcaaaggggctgccagggggctgcgccccgggcgctgcggacgtccctgcctctggtacctggcggcagcgcaggctcgggtgttaaagttcgg

SEQ ID NO: 250799 - DNA, 122 bp, Homo sapiens
tacaggccgccagggaggaagaaacttggaactttcaaagacgtaaagaaaaattcggagcgagtctcactcgctgtggtccaacaggcaagtcctggcgggtggcaatatatgtgaaaaaa

SEQ ID NO: 250800 - DNA, 122 bp, Homo sapiens
ggtgatgtcccaggcagagcacagcactgggcggccgatggaggttcatggcacagcccacgtttgcactctgcgtcctgtcctcggtgactgtccttccctaagagaaagaatttctaacc

SEQ ID NO: 250801 - DNA, 122 bp, Homo sapiens
tcgcatccgactgttgaagaacctacagcacactcttgtcattctctgctcccatctccgcgtctcccaccgcgcaccagggcgcctcctgagaggtgcgtcacccaacactgtgtcctcac

SEQ ID NO: 250802 - DNA, 122 bp, Homo sapiens
gcttccgagatggcgcctgtcaagtgagcccccagagcactaggcctagtactcagcgagcgatccccgagtgctcttcattgctagagagttatctacttccacgttcctgggatttccct

SEQ ID NO: 250803 - DNA, 122 bp, Homo sapiens
gaacgcggaggggcccgaccccagtctggtggcgtaggtgtgtgacaaagtatgagggcgcgccaagctctccagttccacatctgctgtcgagtccagcgcctgccacgctcccgtgcggg

SEQ ID NO: 250804 - DNA, 122 bp, Homo sapiens
cctcacagactctcccaggcccgcgtggggcaccacggttgggagtggagtggagactggcgagtttcgactcccccagccaccccgctgtgggtccgtcggtcaccaccttggcctttggt

SEQ ID NO: 250805 - DNA, 122 bp, Homo sapiens
gttttctttagtccttagtttacggagtgcagatacaatacaaggaaaagaggttcacaccgggtgggtacaggagctgccctggcgtaaaacttcacaccccaggggctggaatctcttgt

SEQ ID NO: 250806 - DNA, 122 bp, Homo sapiens
tccgtcctcccagggggcgctgcaggcacgtctgcttgggcaggggcccggcggaagcgccgctctaggctgcagccgcgcccccagccgtatttccgcgggcgctgagcactagagagagc

SEQ ID NO: 250807 - DNA, 122 bp, Homo sapiens
gggtttccagggcccctgccccccagtatttgcatgaaatcgtgggggcgcactggctttcgtcctagcactccccttcaaggctctgcacccctatcacgggagccccacccagccagccg

SEQ ID NO: 250808 - DNA, 122 bp, Homo sapiens
aatgttcagaggctgtggcaaagccaggaccgctaagcacagtggccaggtaggagccgccgggtgctgtccagttggcgaagggccttggttatctccatgtgaacttagggatgtgtctc

SEQ ID NO: 250809 - DNA, 122 bp, Homo sapiens
caagtattttttcaagtgatttgtaccattttgcatgatcatggcagcgtaagcagttaccgctgccgcacacctttacccacagtattgtcagttttggtttttaaaatgtggccattcta

SEQ ID NO: 250810 - DNA, 122 bp, Homo sapiens
cggggccctgagaagcgcgcgccgcggctcccaccgctctggagctccgggcaggggacacggcaacctggatggctggggcagggatcctctcccagaacttcgtgcccagcaatgtccgc

SEQ ID NO: 250811 - DNA, 122 bp, Homo sapiens
ctttgagaccaaggcctcaagccaccaaggaaaatgaagggcctctaccaggctgctggccggattcttgttactctggggatcctcagtgtatgctctggagttattgctttctttcctgt

SEQ ID NO: 250812 - DNA, 122 bp, Homo sapiens
gcaggcctcggcgagggctcgatcccgctccgcccccggccgccgctgcctgcaaagtcccggccacttttacgcgccaaatcctttttgccgcgaaagagccacgagccgccgagcgccgc

SEQ ID NO: 250813 - DNA, 122 bp, Homo sapiens
tggggcccgctccctctgctccagggctcagctgtgagctctggggcttcctgagcagggcgtactgactagtgggtccttgaagctagaggcccctttggtatggagccctttgcctagaa

SEQ ID NO: 250814 - DNA, 122 bp, Homo sapiens
gccactcccgacgccgttcccctcggctctgcctccctccccagtctcttctcctccgcgcgccgggaaagtttggcccctgcccgccggcctggaaccccgcactcaccgcacagggagcg

SEQ ID NO: 250815 - DNA, 122 bp, Homo sapiens
gcagtgccggacaggatgtgcagacacaactacgagctgggcgggcccatgaccctgcagcgccgaggtgagtgagggctttgggccggcggtcccagggcagccccgcgggcccgtgccca

SEQ ID NO: 250816 - DNA, 122 bp, Homo sapiens
cttccatatcctgctttcccacccacacgttcccgtaaagagcagccttccaataactgacgtgtacccaaagccttaaggtgcctccgctccattttacagatgtggaatctgaggcttgc

SEQ ID NO: 250817 - DNA, 122 bp, Homo sapiens
gcgcaggcagagatgaggcatggtggtgactaagaaagccagcaggggccagggaggaggcggcccccctcgggctttgagccagccagcagggccaccaggaagagccagagtcccaggcg

SEQ ID NO: 250818 - DNA, 122 bp, Homo sapiens
gtcccggaacgcgcctgagcagtccctgtctcggaactgtaagtcccggtaccttaaacgcggcatcgcagctggactacatttcccagaaaccattgaggctcttgctcctcccggcctaa

SEQ ID NO: 250819 - DNA, 122 bp, Homo sapiens
cccgggtaaggcccgcaataagcagcagttgctttttaatttcccgcaaatctgagaaatcgctgtttatggacaggacaggcgccactgccgccgtcacagccaccgggaccatggaggta

SEQ ID NO: 250820 - DNA, 122 bp, Homo sapiens
gagtacagctcttctcattgctttcattttcttgtgaaccatccaccaataattgtacttcgaggccagggtccacctgcaggacctttggtatttgcagccattgtcagtttgttaagctg

SEQ ID NO: 250821 - DNA, 122 bp, Homo sapiens
tctcctggacgggtcctgctgcagcccggcctgcccccgtcggtcctgggcggcggccggcgagcaaggatatttttaagccagcgatgggtgactcacctgccccgtcctgcccactccca

SEQ ID NO: 250822 - DNA, 122 bp, Homo sapiens
aagccactaaaaaacaccgtatgccagagagccagactggatgcatttggcaggctctgccgcaccagcttgtggcctctgcaccccacttcccctgctgtcaactgggggtttgacagcag

SEQ ID NO: 250823 - DNA, 122 bp, Homo sapiens
tcgtttattctcttccctgtcagagaagttgttttgcttcctggggacgagagaggcccgcgttcacgggagcgcgcccgcaggccccatccaggcaggtcggcggccacggaattcatttg

SEQ ID NO: 250824 - DNA, 122 bp, Homo sapiens
gggtctgggcagagtcctctcaactaaggaccgagccacttcggatggaaggtgggggtccgcggaggaagctcgaattggctagaggagggatgaggtgacatttggtctctgaatgcgtc

SEQ ID NO: 250825 - DNA, 122 bp, Homo sapiens
taccaatgaggcctttgaacagaaggagatgtgaggctcagaaggcgtgtcccaaggagacgctgatgtaatcaacatcacgttgatcaatctatgttatcacagagttcctggcaggcagg

SEQ ID NO: 250826 - DNA, 122 bp, Homo sapiens
tggcctgcagagaaaggacagcagagtcaccccgggctctgtaactatctgcccatcccacgtccacagtggctggctggtgctcgtgtgtggcagcttagggctgcatggagattttacga

SEQ ID NO: 250827 - DNA, 122 bp, Homo sapiens
gacccgcgataggaacccgggttcctggcctcagcccctctccagagtcggctccaaccccgctcgttttggtactcaccgtgtggagacgccaccgcagctccgtcagtcgcgagtgaaga

SEQ ID NO: 250828 - DNA, 122 bp, Homo sapiens
gtgtgagcactggaatagcctacatcaaatcttaagtctctcagagtcgcataaaacaaccgaattctttaattcaaagccacgttttcaattctgagcagcccagagacctgccatcgctt

SEQ ID NO: 250829 - DNA, 122 bp, Homo sapiens
ctccagcctgggtgacaagaacaaaactccatgtaaaaacaaatcaagaaacctcaaatccgtcgacccccactgctgccctgcagaaggtcctattaccgtcctcacccgcctttacaggt

SEQ ID NO: 250830 - DNA, 122 bp, Homo sapiens
gcagcgcattagcggatttcatggcaagttgcttctgtgacatgagatcaggttcgcgttcgaggatttgccccctaggagggaaggaaaggagagtcaatctgcataatttcaaatgagaa

SEQ ID NO: 250831 - DNA, 122 bp, Homo sapiens
ctccgggaggctgcgccccggttagggcgcggagcggcagggaagctgcccctttgccgtcgccctgcccccaaacagttgctgggcagcagctgtcaggggtttagtgggagctgccccca

SEQ ID NO: 250832 - DNA, 122 bp, Homo sapiens
cagggtcatttgatgtgagagccgaagagttcagtgaaactaatgggtacagcttcctaccggagggggcgaggttgctgacatcagcgcccggccccctggactaacccccttcccatttc

SEQ ID NO: 250833 - DNA, 122 bp, Homo sapiens
cgcagtcgctgcttgggtaagtcctttgacagggcactccctccttcccttttccctccccgcagaatcagcttagtatgtttttagaacaaacacattggtataaaaaaacaaatgaggga

SEQ ID NO: 250834 - DNA, 122 bp, Homo sapiens
gcctcaatatggcatacatattactttttttctcatttttgagacggagtctggctctgtcgcccaggctggagtgcagtggctgctatcttggctcactgcaacttccacctcccgggttc

SEQ ID NO: 250835 - DNA, 122 bp, Homo sapiens
tccccgaaccccttacctccagggtccgtatctcctgctgggtgaggccgttggacacagcgcacttggtgcgcagcccgtgcaggctgccgatggagatgccgatgagcttctgtagctgc

SEQ ID NO: 250836 - DNA, 122 bp, Homo sapiens
tgaatgagagcatacgaggctcctgggatgtagtaatgttccatttctcagtctgagcaacgggcacctggacatttattattgttcttctaaatatacattttcatttgtgtattgtatat

SEQ ID NO: 250837 - DNA, 122 bp, Homo sapiens
tggatacagccctactgggaagatagggagagaatgagaagagccaagattttctgcgcacgaaggtaacctggtaaagcagacaagtatccaaacttatttaaacctcagtgtttttctta

SEQ ID NO: 250838 - DNA, 122 bp, Homo sapiens
tgacatcagcagtgaggggccctcggacacgcttactcacaacaccactgcgtaggattccgctacaaacacacgacctaacactgaggaaaccagtggcaatcacaagatcgtcagaaaat

SEQ ID NO: 250839 - DNA, 122 bp, Homo sapiens
agcgctttgcagagacatgaacgcgagtgtttgctgtgcgtgtggggctgctggcaccgacgggagctcaggctttgttacttcctgcaccgcaaattacctgcacctggttaacggaagca

SEQ ID NO: 250840 - DNA, 122 bp, Homo sapiens
agccgtggagctacctcaaggcggaactggggagtccagggcttcggcagcctgaacacccggtgtgaaaggaaggtggcagacgtggagcggcgcgcatgcgcagcagctcactctgctga

SEQ ID NO: 250841 - DNA, 122 bp, Homo sapiens
acgttttagaagtgtccgtgggtgaataaaaaaggaggggggggtgcaaaactggggttgcggatgcttaaagcaaaaaaagagaaaaggaagcgtcttgaatcctggaacaagaattaccg

SEQ ID NO: 250842 - DNA, 122 bp, Homo sapiens
cgttagccacatcagaggtgcaaatttaccccgggcccaggggaaaatggcgacagcgttcgcggctccacccggggcgcgtgtcagcgttggagagcctgcccggcctgcagagggcgtaa

SEQ ID NO: 250843 - DNA, 122 bp, Homo sapiens
ttcggcttcttctccctctttgacacagaggactagtttcaattgtacaaataggctggacgcttcagcgattatcttccgaccactccctgtgtgctcgcgcgggcggagtagggggcgct

SEQ ID NO: 250844 - DNA, 122 bp, Homo sapiens
gcttattcaatatggcggcctcggctaactctgtcagccgggcctggagaacggaaagcccggagggactagaatccttgcattcgacaagtttgtcggcaatttccgtcagccgaccagag

SEQ ID NO: 250845 - DNA, 122 bp, Homo sapiens
acagctcaaggactctggcatcagggtaggcccttggctgactttctcaggaggtgctgtcggggctggtcttcccgccggccaccacatacatcttaaaattacagagggtgtgagtgacc

SEQ ID NO: 250846 - DNA, 122 bp, Homo sapiens
tcacagttgcaatgactgttcccagttgctttcagctcactccgtcatttttgcctcttccgggtctgtttctgttgacggcttcttcgtaggatgacgggacacattcacgtggtgttgct

SEQ ID NO: 250847 - DNA, 122 bp, Homo sapiens
cgttagagatcccgccgccatgttgtgtccctgtcaccctagcaaccgtcaggccctgaacgccatgagctgtcgcctgcgcatgcgcaagatgccccgcccatgtacgcgtgcgcagtgca

SEQ ID NO: 250848 - DNA, 122 bp, Homo sapiens
ggaatccagggccgtcaattgaggggcgtggcacccgggaaatttaagaggttggaagaacgtcccttcggccttacagaattgcgcttgggtagtcattttgccctccacgcttacttatg

SEQ ID NO: 250849 - DNA, 122 bp, Homo sapiens
ggcgcccgaagaaattttgatactgcttcccctccccacaaaaagtaaaacggtgtcgatcgactggtctagggttccctgctgcccatttcggccagctgcccggcgtctcgcccaggcga

SEQ ID NO: 250850 - DNA, 122 bp, Homo sapiens
accggtgcggcggccgcagggaaggagcccttcactgtggctcagacactttccagctgacggggcttttcttcttctgctgtttttcactgcaaacaaatgcctttctccattccagagaa

SEQ ID NO: 250851 - DNA, 122 bp, Homo sapiens
tagttacctaggcagctgtttgtctaggaaacagcttattgttttcatttgtcatcaccgcggctcactaggtatcaggaagctcggctccagccgctacctggtgacgctaatgacgtgcg

SEQ ID NO: 250852 - DNA, 122 bp, Homo sapiens
caggctggtctggaattcctgcctcaagcaatcctcctgccttggcctcccagagtgctgcgattacaagcaagagccactgcacctggccctgtccatgctttcaatgcctaggaatggaa

SEQ ID NO: 250853 - DNA, 122 bp, Homo sapiens
ttttgccctgaatacctgctctcggagtgctgggaagagcacgccccccgcaggtccccgcggctggggtcactcccaccaggcagacttgccccacccccaagaacatgcctataatggtc

SEQ ID NO: 250854 - DNA, 122 bp, Homo sapiens
tcccgcccctggggtggggcagggggcagagcgaaagctagtgcctttctccttgactagcgtttcctgagcacctgccgcagccagattaggtgttgctgggcattgaggatgttagggaa

SEQ ID NO: 250855 - DNA, 122 bp, Homo sapiens
gcggggaaaaaacaccggtgggattcgtcagcccccacagaggccgcaggggaaaaacaccggtgggattcatcagcccccacagaggccgcagggaaatgcagcctggtgatttccgagaa

SEQ ID NO: 250856 - DNA, 122 bp, Homo sapiens
cctggcccagtcgcccccacctatcaacgcggcctcagcgggccggcacgtgatggcggacggcaaaaggcgcggctcaaaattagacagaatgcgatcgcctgattttttttttttttttt

SEQ ID NO: 250857 - DNA, 122 bp, Homo sapiens
caaagtgtttaaattagagtttaatggaaagtatgaagtaatttacttatccagcttctacggccaaaatggaatgtgctaattttattaatctgaacaatggtggcttgcatttgaaaagc

SEQ ID NO: 250858 - DNA, 122 bp, Homo sapiens
ggctggtgagaaaagctgctttcccactaatagatgcagaggttatggggttctccagcacggtcaggtacagatgcctcatttccacgtgtgaccgggtgagtgagtgtgtgtgagtgtgt

SEQ ID NO: 250859 - DNA, 122 bp, Homo sapiens
ctgccagctaataggatgaaaattgcatataccatccaaataaaaaagacttgcatgtttcgatagattagttgataattaggcttcaaattactaattaattcagtttgaaacatagtcga

SEQ ID NO: 250860 - DNA, 122 bp, Homo sapiens
gctcaggggtttctttctgtttcctcatgtggagcctttcctggctctcaatcagttcctcgctgggcaagctgcctcaaaccctctcctctcctctttttttttcttttttttttttgtct

SEQ ID NO: 250861 - DNA, 122 bp, Homo sapiens
gctgcgctccactgaccgtgtggatgaagggcaggcagcacctgggtgcatttgtgccagcgcatggcagtgaggccgctggcagtgcatttcctgttatccgtgaccccgtgcgcccgggg

SEQ ID NO: 250862 - DNA, 122 bp, Homo sapiens
cttgtcaccgtgatatttatttaacttaaaaagttttctgttcccgccgactagaagattcgcctgtgcagtcattgcggcgtcctcagcgccgacagcagcctctggtgctcagtgaatgc

SEQ ID NO: 250863 - DNA, 122 bp, Homo sapiens
agaataacaaagttggacacagaaactacacaatttcaagacttcctgtcaaaaatgcaccgaaataccgagcccagaaacaggcgcgcacgactgcaggcagccgatccttgacaaaggaa

SEQ ID NO: 250864 - DNA, 122 bp, Homo sapiens
accaggtagaacctccgtttcgagtttatcctttttgaacaatttaatttaggagtaattcgaagcagatagtgatcaaaagagcacacatttcgtcagaatgaagtgctgctgatggaaaa

SEQ ID NO: 250865 - DNA, 122 bp, Homo sapiens
gcccctcccctcccggctggctccctggttatccacagcctcgcgggctcagccctggaccgcagcctccgtccttccatcatgcaccggggccctgcaggactcatgctcagcgctggctg

SEQ ID NO: 250866 - DNA, 122 bp, Homo sapiens
acagaagaatctaaagccagtaatctcctggactttccagttaagtctgtttgagtctatcgccacatccagtgcccagcatagggcttggcacagagcaggcactctgtgaatgttgaatg

SEQ ID NO: 250867 - DNA, 122 bp, Homo sapiens
tctgacgctgtttcttctcctactccaccccctgcctccacagcagctctgcgtgaaaaacgcagaggggaaacaattgcccagttgagcccacctggctatgccacagttacttttcgcca

SEQ ID NO: 250868 - DNA, 122 bp, Homo sapiens
ggggggcgggggaggctgtaacttgcgcaagcgcactcaggcagtctccgagcccgcgggcgcaggcgcgcttacagccgacagagcgcttcagccgcttccctcgagcctgcagtgcgcaa

SEQ ID NO: 250869 - DNA, 122 bp, Homo sapiens
agacacgtgggccgcttctccacgcgtcgctcctccgcgcgccactagcagtatgcgccgcgcccgcctccgcacgcctctttaaccagcgcccggcgcgctctgcccccttgctccgggct

SEQ ID NO: 250870 - DNA, 122 bp, Homo sapiens
ggctctggctgaccacgctgcccctcatcaaccacactggcctctttgctgttcctccaacgtgcttggcaaattacaccgcagggcctctttgcactggctgttccccctgcttggaatgc

SEQ ID NO: 250871 - DNA, 122 bp, Homo sapiens
gagaaagcgatgccggccaggaggggagaggggagtgggaagcgagtgtgccccgaaacccgtgataagtaacctgggcttcgaggctctagggatgcaagaacttttccccccagctcaat

SEQ ID NO: 250872 - DNA, 122 bp, Homo sapiens
aatctcccctgctttgcatgcagcctatgtcactcttcgagggctttgcctcctgaagtccgttctctccagggctgaaatctgcctccgctggtgctagttgagcattgctcgcttgcccg

SEQ ID NO: 250873 - DNA, 122 bp, Homo sapiens
aacaggctcagaaaaatgcaacaaccgtctagagccactgggagaggtgagatgccctcccgggtcctgcagtgaccccaggaccatgactggcacagtgctctccagctgtgctgaggctc

SEQ ID NO: 250874 - DNA, 122 bp, Homo sapiens
ggccctgaggggaggcccagagcagggacaggttctgaactctgcagcggcgctcctccccggcccctctggcctctgaaccagctgccattgtaagctctgggccccgctggcactcccat

SEQ ID NO: 250875 - DNA, 122 bp, Homo sapiens
tcgggcttcacctggagggagctgggcggctccccggcctcgctgcgcgtcttgacgcagcgcaagtctatgggttcatccaggtctgagtctagcaggatgacctcgggctgcgggagggc

SEQ ID NO: 250876 - DNA, 122 bp, Homo sapiens
atatagccagtccttaggaagtgaggccaagctgaactgttgacacagtctatgtctttacgagtctgggagctgggtgattttacctctgatgctagacttatttttactggttttgaagc

SEQ ID NO: 250877 - DNA, 122 bp, Homo sapiens
gaagagcacaacatcagttctgtggttgttcttgccaacaatgcataacctcaacttaaccgtaaagaaacatcagaaaaatccaaactggggcaatgctccacaaaataacagtactcttt

SEQ ID NO: 250878 - DNA, 122 bp, Homo sapiens
tcttgggaaggcggagtctttgggcatccgcccggggtgaggggacccgaagtcctgaggcgcgccggaagggctagcggtcccagcataccccgcggccccttgggccgtctcacaactcg

SEQ ID NO: 250879 - DNA, 122 bp, Homo sapiens
ggaccgaggcggagagagctcccggtagaaccgacgcaaccatcccgggatggtgaccaacgcgcggctgctgcgggcagagggactgaagagaaccggtggtcccgacgctggccccgagc

SEQ ID NO: 250880 - DNA, 122 bp, Homo sapiens
gtcgttgagctcctcgatgcgccggatggtgtcttcatccacctccacgccgcccgcccgcgtgctattgtactgcatgaagggccggatgaacttgaggttgaacgtccgctcgaacaggt

SEQ ID NO: 250881 - DNA, 122 bp, Homo sapiens
ccattctggggctgggcaagctggccatgaagggatggcgaccttgctcctgagaaggggcgtcctgctctgctctgtccgggcctccaggcccagaagcgagggttgaggggggagccgcg

SEQ ID NO: 250882 - DNA, 122 bp, Homo sapiens
ctctgaacagacacggaacagaaataagttagtcttctcctcgcaggggacagtgaacggcgcaaacttctcaaaggccagaacccattattaccacaaaggcgcggcatcccttcttagcg

SEQ ID NO: 250883 - DNA, 122 bp, Homo sapiens
gctgacccgccaccctgagaactggaccctgcaagcccggtggcggcttgtggggctgcccgtccacttgctctttttgcggttctacaagcgtgacaaagacgagcattaccggtaagaga

SEQ ID NO: 250884 - DNA, 122 bp, Homo sapiens
ctcgtcttcctatgtgacgtgagctaaaccaaaaggctcaggttcaaattgaaagctccccgttctacaagagctaaaaaataaccccactgccccctaacttgaatctcaataaaaacaga

SEQ ID NO: 250885 - DNA, 122 bp, Homo sapiens
tcagtctgcatcctgcacacagccagggtccagcctaaggcaggcagctaacagattctgcgaggcccggcaaggggcagacttgaagagtcacaagggctccacgtgacaagatcctgaat

SEQ ID NO: 250886 - DNA, 122 bp, Homo sapiens
agagacagaaaggagagagggcgaggaagggggtggcgattgtctccagaaaatcaacctcgcattctgtcttagtcatgtcttaggtgtcaggctgaagtagcaaaggaaaagtgtgtagt

SEQ ID NO: 250887 - DNA, 122 bp, Homo sapiens
gctatttagttcctcatctgttgctttttcattttgtatactgcaagttcccaggcaactcgaatttgcaaacacagccatggatacactatttaccttacagtagtttcctgggaatctaa

SEQ ID NO: 250888 - DNA, 122 bp, Homo sapiens
ctttcatcctctgtaggtgaggacaacaggtctggaccaaggttaataccttaaatggttcgaaataactgactttgggcagggtgcagtgcctcatgcctgtaatcccagcactttgggag

SEQ ID NO: 250889 - DNA, 122 bp, Homo sapiens
gctgggactacaggcatgcaccaccacgacatttatgagtaatgtgacataaatgagccacgacagcatgagtaaagtgagatctgaaatattagcattattctgtgttagattaccacagt

SEQ ID NO: 250890 - DNA, 122 bp, Homo sapiens
ctaagtatgtattagcacaaacacagattgctaccttagaaggaaaaagacatccacattcgcagatttgaacttgaaccatagcacacttgataacattgctttaggagaactttgtttct

SEQ ID NO: 250891 - DNA, 122 bp, Homo sapiens
tagacaccaccattcataaaatccaaggaaaataatggcagtaatcaacattgacctgaccgtcgttcatcaatatatcacacatttactttcttttccttatatctagattaaattttggg

SEQ ID NO: 250892 - DNA, 122 bp, Homo sapiens
cttcgcctgctggtgtcagaagatgattctcaattagcgccaaccctccctcccatcacccggccaggcagagagcaggaatggagagccacagcccggccatttaagagcagcgccaactc

SEQ ID NO: 250893 - DNA, 122 bp, Homo sapiens
gtaacaccagaatttatggatgaaaaggtgaaatgtcaacaaaatgaaggaaaaaataaacggaactaggtgatctaaaaagagttttggtttagttttggttgtttttcctagatcagaga

SEQ ID NO: 250894 - DNA, 122 bp, Homo sapiens
ccatccctgaaggtaaagcagccgttgctgtggccctcctcccatgacaggaggagggaacgtctaggcacaggtgagcgtggctccgtggacccagcctgagccacagtggatcctcggga

SEQ ID NO: 250895 - DNA, 122 bp, Homo sapiens
agtgcaggggcatcatgatttctccccacagtgatgcattctcggcctcttgagctcaagcgatcctcccgcctcagcctcctggtagctgggactacaggcgtgcgccaccatgcccggct

SEQ ID NO: 250896 - DNA, 122 bp, Homo sapiens
ggtgacttcaggacggggcttctaaaggaaacgcatttttaaaggaaagttggggaaggacgcccctggactttcccgtcgccgtgaatattgatcatattgacgacctctcagtcctcacc

SEQ ID NO: 250897 - DNA, 122 bp, Homo sapiens
gaccatgaagtcttactttgccattaaccacaaccccgacgccaaggacttgaagcagctcgcgcaaaagacgggcctcaccaagcgggtcctccaggtcagccagggccaggggtgagggc

SEQ ID NO: 250898 - DNA, 122 bp, Homo sapiens
cttccaccagcaacactgattgctcttcatacagggggccctggagtggaagcaggcctgcgttgatgcctctgagcaggctctggagaaacaaagacaagccacagaaagtggcagacctg

SEQ ID NO: 250899 - DNA, 122 bp, Homo sapiens
ctgctctgtgtgtctgtgaattaggaccaggctttggtgtgtgtttccccaggcttgcttcgaagggaaggctcagtgtccaaccacagctcttctgggaagtcattagttggggtgactca

SEQ ID NO: 250900 - DNA, 122 bp, Homo sapiens
agaaattttgaatttttttactatataatttgaagcctgctttaatgtcatcatcataaacggaagggtgggttgatgagtttactcagattagagtggtacaacctttggggcggagcctc

SEQ ID NO: 250901 - DNA, 122 bp, Homo sapiens
gaagataccagggaaaagtcttgtcaagtagcaggccaccggtgtctagtgtagaggagacgatttctgtcgatagagagcaaagccagccaggcaaacgaacccgtaagccgcctgaggga

SEQ ID NO: 250902 - DNA, 122 bp, Homo sapiens
gcagcaagaagaaacaagaagtctgtgggaaagtctccactcctggcagaagacaagcctcgtgacccaaacaggtgtttccagtgactgatgctggtctttgtccaaaaatgaatgagcat

SEQ ID NO: 250903 - DNA, 122 bp, Homo sapiens
gaattaggattgtgagggttctggtgcctagcatcaatgctacataaatgtagggttcagcgtcactactgcgctttcccccacacttcaccctgtctgcaaatgagtgaccactgctgtca

SEQ ID NO: 250904 - DNA, 122 bp, Homo sapiens
ccccctggaagtccccccttccccgtggctggaagtcatcccttcccaaggggcaagtgtcgggaatggttgcctcctgaggttgcaaggcctgctatctagggtcttgtctttggaatatg

SEQ ID NO: 250905 - DNA, 122 bp, Homo sapiens
ggatttggcccttttgcctctgagtatccagggaatggccagggctcctggggaactcagcgactggactttcgggcccagaacccaggagggcaggcgtagggacgggatggcatcaggga

SEQ ID NO: 250906 - DNA, 122 bp, Homo sapiens
gctcccggcactgctccctcctcggtggctgccgcttctgtgtgtccccggccaccctggcgcccagagcccccacctcgcccccgcccccggcccggcccccgcctccagccgcccgccca

SEQ ID NO: 250907 - DNA, 122 bp, Homo sapiens
gcacaattgcctctcccagcaggtggtgtgcgccatgcgttgtgcttgtcctgacgtgcacggcgtgtgccacacagtagggccctttgccaacaaggaagctgagcttagaagcagcatga

SEQ ID NO: 250908 - DNA, 122 bp, Homo sapiens
gtctcctccaaaattagagacacggtgttaactctgggctccacagagctggccgtggcccggggctcggaggcaggggtgcagagggagctggtgggcgcccatcccttcctccccgagca

SEQ ID NO: 250909 - DNA, 122 bp, Homo sapiens
agtttctttcttcctgaattccccaaagcgcagagacagacaggatctgccaggacagcgcgcagggcggggcggggacaggcgcgccaggagcggggcgggcttccagccgctggttttgc

SEQ ID NO: 250910 - DNA, 122 bp, Homo sapiens
gtggtcaggtccggaccaggcagaggccttgcacctgtgcttcccagccccccagttttgcgcgggaactgcaggtgccaaacccggaggcagcaaaagtgctgcccaaacggggatggagc

SEQ ID NO: 250911 - DNA, 122 bp, Homo sapiens
atggaagggcaggagaaactcacccttcggaaagagacaacataaaatgtgtcttcccgtcggtcaattgcatccaagaatgctggctgcgaacggtctgggtggcgatatagttgcagctg

SEQ ID NO: 250912 - DNA, 122 bp, Homo sapiens
tgttgcctgcttgcgtttttaagtgttgtccctggagtgaatcagagcctgcaggcggaccgcaccacaggctgtggtggaaccacctccaggcctatggcagctggacccacagacagttg

SEQ ID NO: 250913 - DNA, 122 bp, Homo sapiens
tggcccagggtcctgccaggcctccctccctgcccttcccaccacccgtcccttgcagttcggcccagataacatcctgcttctgcaggcccctgcgcacgtgttcccctctgccggttccc

SEQ ID NO: 250914 - DNA, 122 bp, Homo sapiens
tttccagaagcaaaaaggatggatgttaaagttttttttctgatttgtacttttgattcacgatctgatttttcataaagaagcctcgacagggtttgttttcctattgaagatctcacatt

SEQ ID NO: 250915 - DNA, 122 bp, Homo sapiens
gccctgaggtggagccaagcccgaggcacagcccactcagtggcacaagccacaaagggccggcctcaccccaacctgggtgctcgtgattgacagcctcttgttacgtgagggaagcagca

SEQ ID NO: 250916 - DNA, 122 bp, Homo sapiens
ccacagggctcagcacagtgctgtgtgtgccacgtaaatgccggcacaggcagagatccacgtgcacttaagggcacccacttgaacacgcacacacgtaaatgcctgcgtgcacacttgaa

SEQ ID NO: 250917 - DNA, 122 bp, Homo sapiens
ctgagtgtcttgaggttcagagcagccattgcccccacactccctttgtctaacagggcacgggcacgtttctgtcacttgccagtagccctgaacctgctagaaacccaccaggtgttttg

SEQ ID NO: 250918 - DNA, 122 bp, Homo sapiens
cataagagccctagggagaccttagggaacaagcattaaactgacactcgattctgtagccggctctgccaagagacatggcgttgcggtgatatgagggcaggggtcatggaagaaagcct

SEQ ID NO: 250919 - DNA, 122 bp, Homo sapiens
tgcccatgatcctgacctccaccagccccagggcaccctcccggcagtccagcacagccacgagctccagctccacaggcggctccatccgcaggttctcctttgccagggctgagccgggc

SEQ ID NO: 250920 - DNA, 122 bp, Homo sapiens
tgtatggtgatactaatatgatggctagtgtgattattctatagctagttggagcagtcacgatacacacacccaaagaatgagaagttggattgatccaaggaaggattttgccagacagg

SEQ ID NO: 250921 - DNA, 122 bp, Homo sapiens
cgagcggggaccaaggtctcaaggtggagccggcagggcacgtggcctgtggcaggagtccggtgctgggtggggggctggctgctgtgtggctctctctggagccaccctcctggtccagg

SEQ ID NO: 250922 - DNA, 122 bp, Homo sapiens
agacatgtaagtggacagacatataggtagacccagcagagcacagacggggatgggaaccgacattcccagacaaaagactcggagccacagggaagccgctcaagtgcctgggcagaatg

SEQ ID NO: 250923 - DNA, 122 bp, Homo sapiens
ccagcaggagcagcccggcacccccggagagcgatagagaggcgggggcctgggtggggtcgccaagatcagccccatggggtcacaagaaaaggcctcattgtgaggctctagctgaggct

SEQ ID NO: 250924 - DNA, 122 bp, Homo sapiens
ttttttttttttttttgagacggagtcttgctctgtcacccaggctggagtacagcagagcgatctcggctcactgcaagctcctgcaagctccgcctcctggcttcacgccattctccccc

SEQ ID NO: 250925 - DNA, 122 bp, Homo sapiens
tgcggggcggggccggagcctgggacaggcgggacctgaggtggtggggcggggccggaacgtggagtgggcggggcctgaggctgtggggcgggaccggagcgcgggatgactggggccac

SEQ ID NO: 250926 - DNA, 122 bp, Homo sapiens
acctgcctgggtgcaggaccccagagggaccccaggccacccctggcctgcccatgcccacgggaatcccgaccttgggctgcctgtctattgcaccagaaccgtcccagggctgactcaga

SEQ ID NO: 250927 - DNA, 122 bp, Homo sapiens
ccctcctctccccctctcttgtactgtactcggccctagatgcagcgtgatccatctttgcgcagggaatctttgctgcaggtgaaatggagcggtggccacacctgttctctgcaaagtgg

SEQ ID NO: 250928 - DNA, 122 bp, Homo sapiens
gtcagcgtgcacgcggggcaggccgggagcgccgcgccgggccgccacacttcgcgcctgcgcgctcccgtcttacgggatggatttcgctctcaggtcccagtctcgtgcggcggggcggg

SEQ ID NO: 250929 - DNA, 122 bp, Homo sapiens
aagtcggggcagggaggggcaggcctgggggcctgtgaagcaaacagcacctgacctctgcgagtgcctcatctctgttatctccctgtcctcatccacgagcatggcagaaacagtaatgg

SEQ ID NO: 250930 - DNA, 122 bp, Homo sapiens
tttgtggccagatccagtttctggcaggactggttagtccaggtggcctggatggatggccgagataaggtctgtgcagattggccaggctgggcaggagacccaagcgggacaaagacagg

SEQ ID NO: 250931 - DNA, 122 bp, Homo sapiens
acacaaaacagtaaaatcagtaaaccaaactccactcctgctggctaaataatattcctccgtaagaattggtggttgttgggacaatttcttggatttattgcctttcccgcttgcttctg

SEQ ID NO: 250932 - DNA, 122 bp, Homo sapiens
ctggtcggaggtttggaagttctgaggccagggccagagggccgtcgcccgtcctgcgaacgctgccgccagcagcagcgaaaaccaaagcctggagcttgtcatggcccgctggtctcccc

SEQ ID NO: 250933 - DNA, 122 bp, Homo sapiens
agcaaccatgtgcccaggggacagctgggcttctacacctctggccctgagcctgagagccgggaaagagtcttttctccatttaaccccgggtgactcactccctggccagtcctcacccc

SEQ ID NO: 250934 - DNA, 122 bp, Homo sapiens
agtcccatctcctccgagtctgggcaccagaagaaccactggacagtgttcacttgcgaccgcccaactactaaagcaaaagctgttgtcttaaaaaacatgcaagtgcaagcatgcacggg

SEQ ID NO: 250935 - DNA, 122 bp, Homo sapiens
accacccactcttggccttctgctgactaactgcagaggggcctcttcccaaacctctgccgccaggaccagctgttgtgtatgttggtgggaaggggtggtggggaggtgtaactctgtgc

SEQ ID NO: 250936 - DNA, 122 bp, Homo sapiens
gggctgcccctgcagccgacagccccatcctgcagccaccaatggcatgacccagggccccggcactgcctgtgtgaggggctggcagctttccaactgcagcaagtggaggcccctgccag

SEQ ID NO: 250937 - DNA, 122 bp, Homo sapiens
ggtgaggaccttcccgcaggacttgcatttaaagcaccccaagtgccactgcttatccagcgccagcagcgcctgcccattcttgatatctcttccgcagccggcacaatctgaaaaagagc

SEQ ID NO: 250938 - DNA, 122 bp, Homo sapiens
cgctggacaggagctcgccagttaccgaaagaattgtctgagaaaggctctgatctgacccgaaaggcccttggttcccacggcaacgcctcagcgtctggcagtaacaggctctgtgcccg

SEQ ID NO: 250939 - DNA, 122 bp, Homo sapiens
cacctcgccgcacaccgtgttcacaccatccatgcaccaggtgcgccacacgagagcccacggctccagaggatggcccctgggggcggccaccgcagaccactcaccatttttatgggtgc

SEQ ID NO: 250940 - DNA, 122 bp, Homo sapiens
gccagggcccatggggtcccgccgtcgccctccatcgcgcacgtctagccagcgccgcggcggctgcccaggtgcccaggtgcgcgctccgccctgttacgtcacttccgtaggtcgtcccg

SEQ ID NO: 250941 - DNA, 122 bp, Homo sapiens
caccttggtgtgtggccaggggaacaggacgagctccaggcctgagtctgcccgctggctcgccgcctgtccccacctccctcaccccagtctgtctgagactaggccctgggaggacaaaa

SEQ ID NO: 250942 - DNA, 122 bp, Homo sapiens
gccagcccctcgccccctggtgcccactctccttctccccccattcccgtcacctccgcccgctatttctctcacagactacggacatgcagggccatctacttgtgctcaggaaaaacaaa

SEQ ID NO: 250943 - DNA, 122 bp, Homo sapiens
tggccggtgagagggtgcctgggaagtggggaatctgctacaaaacgcaggggaagctcgcgggggccctaggataaagaccaagaaccgcacaacaccgactctctcctaacacaaaactg

SEQ ID NO: 250944 - DNA, 122 bp, Homo sapiens
gtctcaaaaaaaaaaaaaaaaaatgattggtctgtaaatgggcggggcacacatcacatccgagcagaaactttaaatgcaatggtgtgtgcagcctggccacagaacggacatgttccaca

SEQ ID NO: 250945 - DNA, 122 bp, Homo sapiens
ggcgtctcgtgcgtacgcggcctgctccaggttcagcgggctcaggagctgtggacgcagcgtgagacaaggagatgaatgccacagagcctgtgcatcccacctgctcccaggctcaggca

SEQ ID NO: 250946 - DNA, 122 bp, Homo sapiens
ttttttctcctgatctggttctatttcaaagcacataaatgaggcaggaaggacacagggcggtaaggttaattttattatactcctccacgggccctctacaatgagttttgtttttaata

SEQ ID NO: 250947 - DNA, 122 bp, Homo sapiens
cagggccaggtacctgctgtcagtcagagaggtgcccgatgctcagtggtcattctgctgcgctgaagattaagtaggagttgtttgcccttggccaatatgaaaaacctgagtgttctccc

SEQ ID NO: 250948 - DNA, 122 bp, Homo sapiens
tttttttttttttaaatttcctagtagacttttgagctgtttttcttagctgaagaagctcgacaagggagattacaacataagtttataaaggctctggattctgctctatctatggctta

SEQ ID NO: 250949 - DNA, 122 bp, Homo sapiens
gaccccagccccaacagagtgagtcatgttcttctactttccctcttcatttaggagccacggccgaccactcaacctctattttcttaaaagctttttttttttcttttttattaaaaaaa

SEQ ID NO: 250950 - DNA, 122 bp, Homo sapiens
cggagcgtccttccccctcggaaggacacagccagactcctctgcaggccgggagaaggtcgcgttgtccattggctcacacctggctcgaggctccgcgggtcccttcctccatctccccg

SEQ ID NO: 250951 - DNA, 122 bp, Homo sapiens
atgttaattctcagctgcctgctcctcgtccttcattgtaccctgtgtcttagctgggcacgctcctgattccctgctatatccagacggtccatgtaaatagtgtttatgttaaggaagtc

SEQ ID NO: 250952 - DNA, 122 bp, Homo sapiens
ggctctcacacaccggagcccagagcccggacacaggggcaaagacgaattggtctgaaacgaaaatccaccaggatgtgaacctgttttcccgaagttgatggaggaagccacggagcaag

SEQ ID NO: 250953 - DNA, 122 bp, Homo sapiens
acgactcacttcaaggctgaaccaagaaaacacagtaaaggaacttgccggcggccgcgacggtagcgtcagttagaaatcaggtctccagtgttcccagttcccaccagtccaactgcgag

SEQ ID NO: 250954 - DNA, 122 bp, Homo sapiens
ctgatttgttgcagggaccagagatcatagatggtgaagttaactaagggcctccaaatccgtgtcctttgtgccaacaggtgtgccaggctgctcacaagacaccatggtacgagaaagga

SEQ ID NO: 250955 - DNA, 122 bp, Homo sapiens
gccagtgagcggagagggacgggaagcggcgtgcgaggctggcgggctcgggcgtcagcgcgccccgctgggtccctgccagtcccagccaactgcggagccccgggtgcggcctggagttc

SEQ ID NO: 250956 - DNA, 122 bp, Homo sapiens
tgccagccgcggctgccgctggagccggtgtccgggctggtgatggggttaattccctttcgtaagactcttacttgcacccacccagccccgccgtcgccccgccgcgccgcgctccaacc

SEQ ID NO: 250957 - DNA, 122 bp, Homo sapiens
cccgggtgctcttgtgagctgctgctcctgcggttggtgagattacctgggtctagagtgcggagctgctccgtggccacgaggacgtcaccatggtgggccccctcctgctcccccgaacc

SEQ ID NO: 250958 - DNA, 122 bp, Homo sapiens
aaaaagatgtctgcctggaccctagtttaaagtcacccagcaactgactttccaacaacgcggagcagtaataattgactgaaggttgcttagaaagaagagcagccctggaaaaatctgaa

SEQ ID NO: 250959 - DNA, 122 bp, Homo sapiens
cattttctccttctctggaaacaatgacatctgcaaaaacccagaggggggggggggagtcggttattgtttaggtctctgcggctgttttctaagactagtgagcactgttcttatcacca

SEQ ID NO: 250960 - DNA, 122 bp, Homo sapiens
agcaggcatctgagatctcccccgtgaggcttcctgcaaaaacgtgccctgcctcagaatcgctgctcagtaacagtggtttcattgccgtgtacaaatggtgcctccctcaccagtgcccc

SEQ ID NO: 250961 - DNA, 122 bp, Homo sapiens
taagctctagcagattaggaaaattcacctgtgccaagcacctggattattccaactaaacgaaggataacttgagcaacagcagggtagactgaagtgaatagtaattgatctgataataa

SEQ ID NO: 250962 - DNA, 122 bp, Homo sapiens
gttaggtacataggccatgtccaaattcaggttccatccagcaagctcctatttcttggacgcaggcactgcgtgggaagcggaccggccgggattgcagagctgggcgcgcacctcttgca

SEQ ID NO: 250963 - DNA, 122 bp, Homo sapiens
gcaccgacagtaaagcggggagcaagagaatttgaaaagagacatccgctccctctcacacgctgagggggaggcattcgcgtttccccaaatgagaaagaaccacaagaaatcatgaagta

SEQ ID NO: 250964 - DNA, 122 bp, Homo sapiens
gccggctgaggagttaacagtgtgtgctctggagtcacgtggattcctgcttgccagtagcgcgccttggaaagtcaccccgcctggctctgccatttccttctctgtacatacagtgttgt

SEQ ID NO: 250965 - DNA, 122 bp, Homo sapiens
cttagcttcagggggtacacgtgcatatttgtgacatgggtatattactggtggggattgcgcttctggggttcccgttacctaaagggtgaaccgcgtaccccgtaggtcatctttcaccc

SEQ ID NO: 250966 - DNA, 122 bp, Homo sapiens
ggtggttcgggggccgggggaaggaaaagccaaatcgttccttgtttgcctttggaaagccgccctgccattgttccgggcggattccttggtttccaggcgctgtaggccaggagaggagg

SEQ ID NO: 250967 - DNA, 122 bp, Homo sapiens
cgcctctgccggtcctcctagaaatcccgccctgcctacccgcggcgcgagacgcaacgacgctttcaggggtcaaagacctggcagaaatgacttcccaaccccagatgcccccagcagca

SEQ ID NO: 250968 - DNA, 122 bp, Homo sapiens
tgcgtggctgggggctgatgctggctgccggccgccctgggtggcgtgggagcaggagcgcgtggaagacccagcctctctgagagccccccacgtaatcacacagtgagaggtccgctgtg

SEQ ID NO: 250969 - DNA, 122 bp, Homo sapiens
tgtataatgaatgttcaggtacttacagatgctgatcgagtttctcctcaacctttccttcgagagaccttgcatcatttggtgtagaaacactttaggaagcacttaggaagatggtgtaa

SEQ ID NO: 250970 - DNA, 122 bp, Homo sapiens
ggtgcccagggtcttgctgctctgctcccctccacatccagtggcgaccccgcagcgtggcgcagcccctcctgtggcactgcatgctttgctgctttagcatactccccgtctctgagtga

SEQ ID NO: 250971 - DNA, 122 bp, Homo sapiens
ccccctcccttccaacaaatttggaataaagttctaaggctaggatttactatgtcccatcgtcttttatcagcctcaaggttgtattctgcttttggtttcactaatccacaaattcacca

SEQ ID NO: 250972 - DNA, 122 bp, Homo sapiens
aggctgaggtgggagaatcacctgtgcccgggaagtccaggcagcagtgagctgtgatagcgctgctgcattccagcctgggtgacagtgagatcctgtctccaaaaaaaaggaaaataaaa

SEQ ID NO: 250973 - DNA, 122 bp, Homo sapiens
actgggctgcggcggccgacacctccccacggaccccgtgtcggggagcagagttagctgcgggaacgatgccaaggcagagaagcaaggcgataaaataattgcaaatgaaagggagatta

SEQ ID NO: 250974 - DNA, 122 bp, Homo sapiens
acttataactctagtataaagcctaaaagacaaatcaaaaactttaatagctacagtaatcgtcaagagttaggcaatataaaaatatattaattgagacaatataaagtcaaaatgtggtg

SEQ ID NO: 250975 - DNA, 122 bp, Homo sapiens
atccattgaataattaaaaggactccaccaaaagatgaacagacctcaaggggttttggacgcacagaactcatttccacattaatccacctaaatgaccgcattccaattgtcaagccctg

SEQ ID NO: 250976 - DNA, 122 bp, Homo sapiens
agtctgcaggtcctgtccctgtccttaccggggaactggagctaggatttgggggcctctcgggagtctagagcgtgaccgcgggcccgtgctcctccacgccgcctggcggcagcgccagg

SEQ ID NO: 250977 - DNA, 122 bp, Homo sapiens
cgctggcccgaattacctggtccccctgacagccaagtggacggcggctgccgggagcgtcggtgtgaagtgtgtgcacgctggggaacaagacacatcggcagcttccactgatgggaaaa

SEQ ID NO: 250978 - DNA, 122 bp, Homo sapiens
ttggcttcccgttctgtctgtcatgaataacgctgtgacgcgcacttgtgtgccggtctgcgtgtggccgccttttcctcggctttcccacccggaagagtgctgaggagtgtgcaccttca

SEQ ID NO: 250979 - DNA, 122 bp, Homo sapiens
gtcgcttcccagggagaagccaggagctgcaacttttcttctgatcatgccatgctaagccggggatgggactatggagagcaactgccgcatattttccagttggcttccatgaggctgtt

SEQ ID NO: 250980 - DNA, 122 bp, Homo sapiens
tcccgccttgccctgcggccctcgcctccccgtcggcagggacagcgtgggtccccccatcgccacattggagacacagcctgttgcgccccccactttgttaactacgcttggtagtcagg

SEQ ID NO: 250981 - DNA, 122 bp, Homo sapiens
tacaggccttacggctctctgttgtttctcatcctctacaactaacacatcttggttggtcgctgggcctatgtatacattcaagtttggtttatccagactaactggctgagctgccctgc

SEQ ID NO: 250982 - DNA, 122 bp, Homo sapiens
aatagggcccagaccctcattgctacaaagcaaaacactgggagggggcagcatggcccacgtgactggccctgcactgggcattaggccaacctgggcttgaatttcagctcttcctctgg

SEQ ID NO: 250983 - DNA, 122 bp, Homo sapiens
tgcgccgactgcagccctcctggacgggagcctctgggcccagcttagggtggcgtccagcgtgacctactcgggaatggcagccttcagtgtcctgcggcctcgggttccgggaagctcgg

SEQ ID NO: 250984 - DNA, 122 bp, Homo sapiens
agggagggagtgccgtggtggaggcaccaggatccccatccttgccttgacacagatcaacggagggggactgcagtttcgctggtggccccacagccccctgcctccagccaggggacaaa

SEQ ID NO: 250985 - DNA, 122 bp, Homo sapiens
tgtgagagacaaaggaaaagaagagatcagggatgtctccaagtttttctcttgggaaaccgactgagtattggtaccatcaacagacaagagaaattcagttagagaaatcaggtttaggg

SEQ ID NO: 250986 - DNA, 122 bp, Homo sapiens
tgtgaagtctcaagctgttcattttgtgcaggtgtaaacattacgtgcacctgatactgtcggccattttaaagatgattgtaggtagaagcattttatacctgcagaattgaatcctaatt

SEQ ID NO: 250987 - DNA, 122 bp, Homo sapiens
cagtattattactggtcagacccttggtatagttctatgatcagttgaaaagcacatggacgtaactagaaaatacacaagagaagaatctccatcctttatatcatagaatgctgaactgt

SEQ ID NO: 250988 - DNA, 122 bp, Homo sapiens
gctcagcggcctgactcttctccgaccactcgggccaaactctgcagttctgccagtcaccggcctgctggcctgccggttcctgtcggaatactcttccgcagcgcactattgtgaccagc

SEQ ID NO: 250989 - DNA, 122 bp, Homo sapiens
aaccaagtctcggtagttaggaagatcttggctccaaagtttaacttgcagcgtcccggccgggttcacagcgcatgggacagggggggcggggcgatgcggaggcggagcggggcgatgcg

SEQ ID NO: 250990 - DNA, 122 bp, Homo sapiens
ggatcccgagccagatcagaagccggtctagaaaggtgacagcctgggacagccaaccatcgctggaaaagggaggagatggacagcgctgtacttaccaccaccaccaccaccacagggcc

SEQ ID NO: 250991 - DNA, 122 bp, Homo sapiens
agggcaaggtccgcacagggagcagacagacgcagcctgcaattcggcgcttatccccaccggagcggaggcacaccaaagccaaaggacacgcagctggcctcaaagcagaagctgcatcg

SEQ ID NO: 250992 - DNA, 122 bp, Homo sapiens
gtcaggactgaaaaaagcaagtatatctatgtttcttgtggaagagtaggggtgaggagtcggagttggggctgagtttcattttttgttagcccacattttcactttgccctggactacac

SEQ ID NO: 250993 - DNA, 122 bp, Homo sapiens
taggcagtggacagatgcggtctgagttggtgtgggaactgcccgcagccctggctctcccggggcgacccaaagggatgcactgcaggggaggtctgtgtgcagcaagtgtgcaggttaga

SEQ ID NO: 250994 - DNA, 122 bp, Homo sapiens
ccaggggggggcacagagactgggggggacacagagaccagggggagagacacagagacacgggagagacacagagactggcaaaaacacagagaccaggggagagactcagagacaggaaa

SEQ ID NO: 250995 - DNA, 122 bp, Homo sapiens
ccaaatctttactaaaatatattttatgcaaaaatctacaaggttaaagagaatgggagacgactgggcaggaacgaaattttgaaagctggaaagcagaaagaagaattgaatttgagttt

SEQ ID NO: 250996 - DNA, 122 bp, Homo sapiens
cccggcgcttctcacatccccgcggcctcccccctggacggcagtttacactgaactcggcgccctcccctgacttctgaaggaggagtcctgggtggccccgaagcctccccggcagccgc

SEQ ID NO: 250997 - DNA, 122 bp, Homo sapiens
agccgcatctgtgtaactccctgcaggcagcatctctggggctccagcccgggagtcctgcgcacacagatgagagggcagcagggactggcagctggcgtcctggactggatgcctgggag

SEQ ID NO: 250998 - DNA, 122 bp, Homo sapiens
ggaatactgtgtctacctattccagtttcgttttctcatcccaggagctcgggacctcaccgtctctcaccagaactacaactgtcccctaactttgatcctattttccccagattttggca

SEQ ID NO: 250999 - DNA, 122 bp, Homo sapiens
tggactagtgacatttcaagtctccaaaggcacatgtgactaggggcagcacagggtgcacggtgcaggacgcagggcgcgctctagagtgaaggagtgacgagcaaagggaaggaatgggc

SEQ ID NO: 251000 - DNA, 122 bp, Homo sapiens
tgcgctgcacagatgctccgggcagcaacacggctggtgccacggcccggggaaggcgtgcggctgcagcagctcccagcaatgtcaggggaaacgcagtgagaggctgttgttttgcgggt

SEQ ID NO: 251001 - DNA, 122 bp, Homo sapiens
aggctagtattatgtggcctatatttcacaatattagcaactcagattaaacacattgagcgcttattttctaggaacttatttaaaacaaccggcttcttcacaaacagcaaataaatata

SEQ ID NO: 251002 - DNA, 122 bp, Homo sapiens
cttgattgatggcccttctggcatgttgtgctgctgggatgtcttttgaagtttctcctccgggcctgaggtttgcccctgtgaggtgttaatgggcttcctgctggggctttatttgtgag

SEQ ID NO: 251003 - DNA, 122 bp, Homo sapiens
ccagcatgggggccgatgcctgcagcgctctgacccggccctctacgggggtgtccaggccgccttccctggcgccttcagcttccgccatgctgcgggtttcctgtgccactgccctcctg

SEQ ID NO: 251004 - DNA, 122 bp, Homo sapiens
ccggcccaggctcttccctgatagccctggtgactcaacgcgtgggtcttttgtccttcacggataggaaccggcgtgtttgggcttcttagtttcctgtggctgccgaaattcattccatc

SEQ ID NO: 251005 - DNA, 122 bp, Homo sapiens
gctccttctctagctgaagccgctcatgttccatgtctaaatgccgcagcctctctttctcgatttgtaggcgttccttttctacctgcagcctttcggcctcgatatccagtcgtcgtttt

SEQ ID NO: 251006 - DNA, 122 bp, Homo sapiens
gggctagtcccctgtggaggggtgtcgctcctcaacttggggaccaggtgcacggagcaccggggctctcggagtcagcgggcgtcgcttctccgcgccgagtgagccgagggaatggggtt

SEQ ID NO: 251007 - DNA, 122 bp, Homo sapiens
tctgcttccttggaaagctaacagggcaggccgttaggtgcccacaacgccgggatcatgcgccgattctggaagcggggaatcggagcagtggtacaggaaacagtttccccagcagctat

SEQ ID NO: 251008 - DNA, 122 bp, Homo sapiens
atgctaagcactgggaggaatcgggtgcagctagtagcgctgggctccttttgtccttggcggtgggtgcagcggcccgcgagtcggcctgcgaaagtagaggcggcgcgtcaggaccgcag

SEQ ID NO: 251009 - DNA, 122 bp, Homo sapiens
gaaaggtggggctggtgtaggggtgaagtcaggatgctttgggagagcatggaaggtcaccgaatccagtgctgaggaactaatgaagggtttctgaagaacgtgatgagatcaatgctgat

SEQ ID NO: 251010 - DNA, 122 bp, Homo sapiens
tgttgcttccttagcaggtatcgcgttgcggtggagcctgagtcgctgcctaggtggcctcgggaggagagggagctcagagagccggagctcaggtctcctaggcccagtgggtcgaagcc

SEQ ID NO: 251011 - DNA, 122 bp, Homo sapiens
gccggcgacgacacgcgccccccactcaccgtcagagccgcagcctcacgcgcgaaggaacggcatcccgcagcaccttcagacaaagggctgccccgccccgtctgcgcagccgccaatcc

SEQ ID NO: 251012 - DNA, 122 bp, Homo sapiens
tgcctgtccctttctcggagaggcctcacggccgaggcgtgcgttcttttttcccggcaccgtcaccacccgtgttgtcctcacttgaaaggtggccatttgagatctacaggaccgtgcct

SEQ ID NO: 251013 - DNA, 122 bp, Homo sapiens
tcagcagcagtcagctgccacaaccagcgtttgttggtgttctctcccagctaaggagtccgcctggtgccgcgggtgcagtttccaaaaacaccagcaggtggcgccccgaccccaaaaga

SEQ ID NO: 251014 - DNA, 122 bp, Homo sapiens
ccaggatgctgccctcatggagcctgccccggaccccggaggccaggacatgcaggcgtccgtgactctaccccaggggagccaggccgggtagattctggaaccaacgcgcctttgtgagc

SEQ ID NO: 251015 - DNA, 122 bp, Homo sapiens
cctttaagggagagtgggcggggtcctgcctttaactccgcccacggctaaggagatgcacggcctacgagaggggtagtgtgggactgagccaatgcgtacggcgtgacgccatcccgctg

SEQ ID NO: 251016 - DNA, 122 bp, Homo sapiens
atctaggcacacctggggatggggaagggagggaattaatctgagccgcctattatactacgaagcagttatcggggtgcctacatcagccacttaccaagagagaagcttctgcacgccag

SEQ ID NO: 251017 - DNA, 122 bp, Homo sapiens
ggacgagggggagccccaggccgcagggagaactcgtgacaacgtcacccctgccccagtcgtaggcccgggcccagtgaggacatgaagcccccgcctcaggctgcaaggaggcgccacca

SEQ ID NO: 251018 - DNA, 122 bp, Homo sapiens
tcagagaatgttaattgtaacattaattggggtcaaacataattaggaaaataagtctgtcgatgttgccaaaaacaaaagaaaaaccccaaatacagaatatgttgtgaagtcaaacataa

SEQ ID NO: 251019 - DNA, 122 bp, Homo sapiens
ccggtccccctccatgctcgctcggccgtgcgcttacccgctgcacaacgcgtcccgccccggcctccagcccactctccgcgccgcgccagcctcgaacctggatctccgcgggcgcctgg

SEQ ID NO: 251020 - DNA, 122 bp, Homo sapiens
ggatgactttttatgttgaattaatttggtttgcaagaaaaagacatggaatccaacagccggctggatcaggggcgcgtcttcaacagtatctctctccggaaagtgttgctctcctttct

SEQ ID NO: 251021 - DNA, 122 bp, Homo sapiens
tcccttgctctgagcacatacgtacacacatgctctttctttgtatacatgctgactacacgggcaggatgcaaatcctggctgcagaaaggaggcaggtcaaatcagaaccccatccttaa

SEQ ID NO: 251022 - DNA, 122 bp, Homo sapiens
caccgccatggacgtggtctacgcgctcaagcgccagggccgcaccctctatggcttcggcggctaaatggcattttgaagcccagtcattctctaaaaaggccctttttagggcccctaag

SEQ ID NO: 251023 - DNA, 122 bp, Homo sapiens
ggcctgaggctccagggctggctctggtgtttacaagctggactcagggatcctcctggccgccccgcagggggcttggagggctggacggcaagtccgtctagctcacgggcccctccagt

SEQ ID NO: 251024 - DNA, 122 bp, Homo sapiens
cgatgatctcattgagtagccgcaggcactcgacaccctcgttgttggcctccagctcaacgtagaactcggagaagttggcgatggaggcgaacatgaccgccacacactcacaggactga

SEQ ID NO: 251025 - DNA, 122 bp, Homo sapiens
ttggggccccctcccccttgatgaggtcctgaccaaatgcaggaggagcaattccagcaccgaggggcgagcagagccgcctgttagcactcctgggagggcccggagtggtccctgaatga

SEQ ID NO: 251026 - DNA, 122 bp, Homo sapiens
gcccaggtgctaagcccctcactgcccggggcgggggggccagccactccgagtgcagcccgctgagcccatgcccacccggaactcacgctggccggcaagtacagcgcgcagccccagtt

SEQ ID NO: 251027 - DNA, 122 bp, Homo sapiens
gataaaaaatagatataagaaataggacagaaaatgtcagatcgtatgtgcgttctagaccgctgattcgtcgatttgtaaaacaagagaaggataagatggtttccagatgtagctgcctg

SEQ ID NO: 251028 - DNA, 122 bp, Homo sapiens
tccccacccgtgtctccgggttcctaaactgcctggaggggatgtctggcctttcctgcccgggatggtgggttaggaaggatctggggtctggcaccggacttgtccctggacagacctca

SEQ ID NO: 251029 - DNA, 122 bp, Homo sapiens
gttttagttttttattttgtttttgtttgagacagggtctcactgtgtagtccaggctggcgtgctgtggggcgaaactcatgggctcacgccatcatcccgcctcagcctcccgagtagct

SEQ ID NO: 251030 - DNA, 122 bp, Homo sapiens
gtggaggcacagtctcagtgacctgatacttatgcatttatttctcagttgtttattaatcgtggatcattagttcttccatctgaggtaggtcatatatcattatcctagtgtggaagaga

SEQ ID NO: 251031 - DNA, 122 bp, Homo sapiens
aaggtgcaggtaatgatacattttgccaggcgcaggcggtgataatggatcacgttttggcgaggaggataatggatgggtgcccagcggaggtgcgtgcaggagtgggcggtgtccgtcca

SEQ ID NO: 251032 - DNA, 122 bp, Homo sapiens
acctgaggagcactaatgccatgtcacctggaggttcatggccaatccttctgcttaagacgattaatttctttaaaagcatcataatgattattcatcctataaaccacatagtaacaaca

SEQ ID NO: 251033 - DNA, 122 bp, Homo sapiens
tcggagcatccaacgtgagtagatcctgacagaagcagaacgccatgtcatctgcctgggcgtgcttcctaccagggtctctgggtcgtttgttataaaatattgcagcagcagcagcagca

SEQ ID NO: 251034 - DNA, 122 bp, Homo sapiens
tgccccggaagtttttctctcagttgaagcgcgcacattgagtcggcttttctactgcttcggctagggtaccttgtgaccatgtcttccaagaagaatagaaagcggttgaaccaaagcgc

SEQ ID NO: 251035 - DNA, 122 bp, Homo sapiens
aatgtatgttctggaagggtgtcccagggtttctcagggtgcagcctccattccttccttcgatttgacccgggaccagcctagatgagggggcctgtggagagctggaactggaaacaggt

SEQ ID NO: 251036 - DNA, 122 bp, Homo sapiens
aacagaaagtactgggtcaaactcccaccccaagaacatgggattaagaagacgcagtgccggctgtattgccagctccgcgccgcgtgtcaataaaactctgaggttcatcacgtttcatt

SEQ ID NO: 251037 - DNA, 122 bp, Homo sapiens
tggggccatgctgccacggactggggagcgcctgggccaacatgccccggtgcccaggcccgctgtgtgccctcacccaggagggagagacgcctgagcctgacatgccaagggggcagcag

SEQ ID NO: 251038 - DNA, 122 bp, Homo sapiens
ctggggcgttcacgactgtcagctgtgctccgagcgcctgggtaagccccaggacgtccccgaagtgctcggagctggggagtggtgacaacctcaccgttcctcctactctgccctagata

SEQ ID NO: 251039 - DNA, 122 bp, Homo sapiens
cggtggagctcccgccgtcgtcgccgggctccgtcacacgccccgcgccggtgtctgcgccgaaggcaggtcccagcctcagtacccccagagccgacagcttggggctagcgggcactgag

SEQ ID NO: 251040 - DNA, 122 bp, Homo sapiens
gctctccaccactgcctgcacctccaccccccagcctggcggagcctggggggcctggggcgcaaatgaggcccaaagatgtttttattcagattgcaagattcctccccctcctccctccc

SEQ ID NO: 251041 - DNA, 122 bp, Homo sapiens
tgtgccagcactttgtattatgtcctttaatcctcacaacaacgctataggctaattactcgctttttttaaaattgtggttaagcatacatagcataaaatttggtattttaaccatttaa

SEQ ID NO: 251042 - DNA, 122 bp, Homo sapiens
ccccccatccccagctcactgtgacagagtcccctgcacagtcctgggacggctccaggtcgaagtcctggaagacgagcctcacagcaaagccctctggagccttgatgtccgtgctgctc

SEQ ID NO: 251043 - DNA, 122 bp, Homo sapiens
gtgtatccataaacctcccacaatctgatatgtttggcagagaaaatcagggaaaaggcacgttgattgtgctgaaagaaaaaaaacaagcaaaaacaaaatatggatctgccaattacatg

SEQ ID NO: 251044 - DNA, 122 bp, Homo sapiens
ttacagcagactcataaacgtgggcagctgacagagcaggagagtatttagaggtcaatacggtggaaggaagagcagcacgaatctgaggaggctgtttgaaggccccacattatcacaaa

SEQ ID NO: 251045 - DNA, 122 bp, Homo sapiens
gacgtgaggcaccgcccccactcctcccggcagtcccgcagccccctgggaaatgtagtccgcttgctctgaggcaatcggagaagctatcgctctgaccaaagcaaggacttcatctaccg

SEQ ID NO: 251046 - DNA, 122 bp, Homo sapiens
gggatgggccctggctgggctcaccaggatgaggtgctggagcagaatggtcaggaaggccggaaagactcagctcatcctggagcccccacacctctgggcccctgcagagctgggagggg

SEQ ID NO: 251047 - DNA, 122 bp, Homo sapiens
tgtggcgggccctgtcagagcagaactgagcaggcggtggagctgggtctggtccgggcacggagtgggggcttcgaagggaaaaggcggggctcctgggggcggagccatacctgtgggcg

SEQ ID NO: 251048 - DNA, 122 bp, Homo sapiens
cagtttccccatccaacttaaaactcacacaggagtctagataatcttctttgagcctcacggccatctaaaaaaatgtcattgttcccatttttgagatgggaagaatggaggtttataga

SEQ ID NO: 251049 - DNA, 122 bp, Homo sapiens
cagggaaatgacggcctagaggacagcacagccgttagctcgctgggggcggcaggaggccgaggaaccagtgacctgcgtgcagaggggcccgctccccgcaccctagcggagggtgctcc

SEQ ID NO: 251050 - DNA, 122 bp, Homo sapiens
caagaaaagtggatcggactttgggcgacagcttgccaattccatgaaggctttaagcgccgctgagaacgctgaggactgttctgtatgaggcccgagcgaggcctgcattgcgcacgttg

SEQ ID NO: 251051 - DNA, 122 bp, Homo sapiens
gctagacccatggaaagctgtatggagattccacttctccggggtttggtagtgattgggcggggatacctgagagggtgccaggaaagggtccagcagtcaaagagaaggggccaaggagt

SEQ ID NO: 251052 - DNA, 122 bp, Homo sapiens
cgctgggtactggcgacaggaagggttggcccaaagtggctggcggagcttaatctggggcggcccagggagcctcctggctggtggagggacagagcaccatcatccgggctggcctccgc

SEQ ID NO: 251053 - DNA, 122 bp, Homo sapiens
ggaacgtcacaccctcctctctgcctcgcgcctgattgacaattctcaggaacccgcccacgactttgattgggtagccctccaggtcccgcctcctgggcactgagtgacagaagaagcga

SEQ ID NO: 251054 - DNA, 122 bp, Homo sapiens
caaattaaccgatcacagggcaaacaattgatctccttcaaaaataaagctctacatatacgtatagagaaatatacacataggaaatttttttccagatttttttttggtggaaaaacagt

SEQ ID NO: 251055 - DNA, 122 bp, Homo sapiens
ctgcagcctctgcagctttgaaggggaaagacggaggaagcagcaggagcctagtaccaccggcacagtgacactcacacagccccagcaaaacgcactgcgtccacacgccgtcccggtcc

SEQ ID NO: 251056 - DNA, 122 bp, Homo sapiens
gcgcagggatagctggtgtgcgtgcagcggaaggcgctaactgccctggatgtggagacccgcggactggacgtgagaggcgggcaggggcagttggggcagctgcccctacaacactgaag

SEQ ID NO: 251057 - DNA, 122 bp, Homo sapiens
agaatacctagctatcatgtgcaagatcctaaacagcatgttgtacgacagcacagcagccgaattcaagtcattctgcctgctgtgtgtaaagccagacagcacaggaagcgccccaccac

SEQ ID NO: 251058 - DNA, 122 bp, Homo sapiens
gcctccctggactctgcatggatgccacagcacattagaggcagactcagggataccactcggggtccccatgtgtcctcccacaatcccattccctttggaccgtttctttttggatcttt

SEQ ID NO: 251059 - DNA, 122 bp, Homo sapiens
ggaacaaagctaaaacagacaccagacctcactgcctacagcaggatgacatccagggaccggcttccagagagacattcaaatacacaactcgagggttctcttttctgactaacgcattc

SEQ ID NO: 251060 - DNA, 122 bp, Homo sapiens
cagtgactccatcttgggctattgactccatgctgagctgctgctaaactttgaggcccacgaagaaactgtgaaaaatatttccttcacaaacaactgttataaataaagttttggtgttg

SEQ ID NO: 251061 - DNA, 122 bp, Homo sapiens
ggctcgctgtagaggcgggggcggtcgtggggcggagcgggtcgtggggcggggctggagcggcccgcggcctcagctctctctgcttccccaggatgcgggctccgggtgcgggcgcggcc

SEQ ID NO: 251062 - DNA, 122 bp, Homo sapiens
tcatacctgggggaatgttctgggctctttctgtcccttcttctacagtcaatccaagatcgaatcactttgtctgcccctggaagtttaggaggaggaaggatcttccaaatggaaatcaa

SEQ ID NO: 251063 - DNA, 122 bp, Homo sapiens
tatcttgttacagagaaaacagtgttctgtctcctctggagaagcagccgcagctcagcccggtcaggcagcatgagggcccctccgctcagcacctgggcagttgagaaatctgtctccta

SEQ ID NO: 251064 - DNA, 122 bp, Homo sapiens
tgcgcttttccgacgggcttaaaaaacggtgcactaggagattatatcccacaactggctcggagggtcctacaaccacagagtctcgctgattgctagcacagcggtctgagatcaaactg

SEQ ID NO: 251065 - DNA, 122 bp, Homo sapiens
catgcaggtccgtgttccctctgctctcctggactgatggcagggcctgggactcacttgcgtccagtgcccagctcagagaggttggcacatagaagacactgagctgctggatgtagtaa

SEQ ID NO: 251066 - DNA, 122 bp, Homo sapiens
aacaagtccgggggatggccgtcagggaattaaatatgaatcttttgtcctgtcccaccacgacccccggcctgcctctcttcaccccagccccaagtacagcttctccgaccactcagcct

SEQ ID NO: 251067 - DNA, 122 bp, Homo sapiens
cccaggcctcctgctgcggcacgaacagtaccacggtgtttcggggcaatccagaggaggcgcggcgcggagcgcggccagaagccagtagagagccctgaaggaaagaagagggtgagcag

SEQ ID NO: 251068 - DNA, 122 bp, Homo sapiens
ccagcagcaggtcggctgtgctgtgcggggggaacagctcctgcaaccttgccaggtccccggtgtagagggcattctgcagggccatgtcttggcagagcagtggtgatggccgagggggc

SEQ ID NO: 251069 - DNA, 122 bp, Homo sapiens
taccctaggtgagaccagtagaagaacccagctcagattacaaaactatgagcaaacaaacggttgttattcaagtaaagctcactaaagctcttcatgacaaacgggtatagtcatggggg

SEQ ID NO: 251070 - DNA, 122 bp, Homo sapiens
aatgtttgactgagagagcaggcacaggccctcggaaaaattatctgacgtccctcctgccgcacatgtatttgagaaagtcaaataatgatgtgatcagacttcaaaaaaatccatgagac

SEQ ID NO: 251071 - DNA, 122 bp, Homo sapiens
gtgcgagcgcgcccccgcggcagacgacaggtcgggggcacgtaccgagcgccatttccacgcacgctcttccgctcctagctttcgttcagaagttgacgtcagcttcggagacagaaatt

SEQ ID NO: 251072 - DNA, 122 bp, Homo sapiens
aaggacacacagcctatatgtaatggctgagattttatcccaggtagtctgactccatagcgtgtgctcttgagatgaaaaaaaaaaaaaaaaaatccatgggggctgggggacaaggaatt

SEQ ID NO: 251073 - DNA, 122 bp, Homo sapiens
tggcatggcggccggtctttggtgagcctctttctgcgcctctgcctgggtcatgagggccggttgtcaatcgttttcaccgccccggatccgctttgtgtgtgtgaagacctggcccacgt

SEQ ID NO: 251074 - DNA, 122 bp, Homo sapiens
cgcggaacattccgggcaaggaatccgagaatccgaagtgatcctgccccagggagtccccgagagggactctgcatagctggagccagtggctctgggacctcatgttctcaccaattctc

SEQ ID NO: 251075 - DNA, 122 bp, Homo sapiens
ttgctggtgtccaggccaggacccaatctggggtcatagacctcagccagcttagagaaccgagacctctctccctcagccagggccaccccctcctggcacataacaccatcgctgtgata

SEQ ID NO: 251076 - DNA, 122 bp, Homo sapiens
tagtacatgaactgtttccttcttaagcagaagaaatcactatgtgatagtctccttcaacgcttcgttgctaaatacacacggcctggcacataacagatatttcaaaaagcatctgcaga

SEQ ID NO: 251077 - DNA, 122 bp, Homo sapiens
gaaaatacagggaaaagccacttgagtgtagactccgtgcgtgtcaaggccaggcagaggcgcacttgataggcaaggaaaagcggacggtggtggtcttgggaggaagagaggagaggcga

SEQ ID NO: 251078 - DNA, 122 bp, Homo sapiens
atttagcccagccttcctcagcactgcgtgggcattgatggatgccaggcgaggctgtgccgggcagtctctgggagccacttggttttggagctgacacctgaaatagaacagtgcacctg

SEQ ID NO: 251079 - DNA, 122 bp, Homo sapiens
cctgcatcacaggggagtctttcaacctggctgggccagggcctgcggagcagtgagggtcgtttctcagcccagcgagcctggggcaggaacggaccctaattgaaggtgaccgtccccaa

SEQ ID NO: 251080 - DNA, 122 bp, Homo sapiens
aggtgagggtttcctaagaagctcttgtgccaccatcgtgctgaaaagaagagaaagaagcgagtatatttctgacctcttgtgtggcgactgaattgtcggcctcggtctgcacccaggca

SEQ ID NO: 251081 - DNA, 122 bp, Homo sapiens
atcatttgtaatcgttgcatcgggctgcactttgaggagacattaggagtaaatccgtggcgtggtaggcttatgctttatcttctgatatttactgagtttactggtgcatgaaaagcttt

SEQ ID NO: 251082 - DNA, 122 bp, Homo sapiens
ttcctcctgttcataacaatccggaagccaaagtgagacgctctttagctccttggcaaccgctgggttgaacgtcaggcatcgctcgttccgttcgctctttaagtatttattaaagctcc

SEQ ID NO: 251083 - DNA, 122 bp, Homo sapiens
gggacccttgcagctgtccgtccagtcccgttccccggaaagtgaggggcgggaccctcgcggctttctatccaatcctgttccccggcgaatgcggggcgggaccctagcggccttcagtc

SEQ ID NO: 251084 - DNA, 122 bp, Homo sapiens
tttgggatctcggattccacacattttcttttctgctttaaagagtttgtatggggttgccgggcacggtggctcacgcctgtaatcccagcactttgggaggccaaggcaggtggatcacg

SEQ ID NO: 251085 - DNA, 122 bp, Homo sapiens
tgcgtcggtcagctcgtggcttggggtctctggtgcctccagctcctactacagccgccccgccccacctcaagaagaggtggagcctctcccggcccctctcggacgagctatttttaggt

SEQ ID NO: 251086 - DNA, 122 bp, Homo sapiens
aaatgaaaaccaccttttaagtcctcatgctgccattacgcaggatctgaaccacctacacgtacagtggtctcattccagtataagccacaacctcaagtctcaggaaagccagtctgctg

SEQ ID NO: 251087 - DNA, 122 bp, Homo sapiens
gtttggctgcaaggttcttgagggaatttctggttttagttccacctctgagctttcacacgtgttatcccaaccccagtaacattctccattctcatcactgagtcattacctgtgtatcc

SEQ ID NO: 251088 - DNA, 122 bp, Homo sapiens
agctgccttcccgcccagtgcatcccgcttctcccccgggaagacccaggagcgtacggccgctgctaggcttccttcgacctggccggcatgcggcacgttcagagttaggccgggaaggc

SEQ ID NO: 251089 - DNA, 122 bp, Homo sapiens
tacaggaaggtggccattcggtctaggaccttcactgagtgaacgagctgctggaggcgacgggagttgatgaggccaccaaacaccgtagacacggagatgggaagggaaaactaggttac

SEQ ID NO: 251090 - DNA, 122 bp, Homo sapiens
aaggggaagagtagcaatgaggttaacctgtgcagtgtagtcatttcacgagtttgagaacgcctagcacgatgccttaacggagcgtcgggcacagagtcatttgggaggatttctttttc

SEQ ID NO: 251091 - DNA, 122 bp, Homo sapiens
gcttaccctgagcagctatgcatgcgtgcgcacatgcctaccccacctgcctggggcgcgcgtggccacaggcacccttcccagaaccgcagctcatgtcaggtttggcacataaattttat

SEQ ID NO: 251092 - DNA, 122 bp, Homo sapiens
gacgtacgacctgcttttcaagctgctcctgatcggggattccggagtggggaagacctgcgtcctttttcgtttttcggatgatgccttcaatactacctttatttccaccataggtaaga

SEQ ID NO: 251093 - DNA, 122 bp, Homo sapiens
aatgtgatgaatgagcgtgtgctgaagaccaaacgcctccagaaaaaagaacaggatgcacgtgccccgtgcaattctgtgaggttggcctgcctccaccggctgtggaaggattgcgaatg

SEQ ID NO: 251094 - DNA, 122 bp, Homo sapiens
ctgagtgtggccttccccagagggtggttttccaaaggcaggtggggactggggaggcctcggggggctgcttgtcattacctgaatcacagatgctcttttgtcatacacagccagcattc

SEQ ID NO: 251095 - DNA, 122 bp, Homo sapiens
tgcttggtgctccctgggtgggcgcagttctgagccccttgcaaacgctctgtgcgtctccgcagcggcgctgtgtgcagatgtgctgttatctccagcctggaactgaggaaatgaccacg

SEQ ID NO: 251096 - DNA, 122 bp, Homo sapiens
cctcccttccccggaggaattccttaactctccagtacccataccataacaaaggaggctcggtccaccaatgcgcgatcgtagcctacagggacccccaacgaaccccggcccagagaatg

SEQ ID NO: 251097 - DNA, 122 bp, Homo sapiens
caggaagcgtgcccgcagtgccttctggaaaatgtagtccgggggcactacctgcagactcggggtgggaggtcgccgagcttctgccggttttgctgtcacgggtcggtcggcaagttatg

SEQ ID NO: 251098 - DNA, 122 bp, Homo sapiens
cggtagtccccgtcagaccctccaccgccgggatgcagtgactgcccaaggctgggcaggcgccctgagtggattcgtcaccaggagagaggcccccaccccgggcaccttgagcagcacag

SEQ ID NO: 251099 - DNA, 122 bp, Homo sapiens
agtggtcggggacgctcagtcatgcctctgtgcagccgggcctgagatgtgagggccaggcgccgcaggagccaggaaggggctcctctgggaagctccatctctgttctggaaagcccctc

SEQ ID NO: 251100 - DNA, 122 bp, Homo sapiens
cagggacttctcgcctgcttctcgagacacacttcagaaaattcactgggaatggccaggcgcggtggctcatgcctgtaatcccagcactttgggaggcagaggcaggtggatccctgagg

SEQ ID NO: 251101 - DNA, 122 bp, Homo sapiens
agtcggtcggcggccgggccagcgcgggcgtcgcgagtccctgtgtcctcccctgaccctcgggtccgcgcaccccgagcccgaagtcccagaaagaccagaggcacttactgttctgcatg

SEQ ID NO: 251102 - DNA, 122 bp, Homo sapiens
tgaacacggcgtgcgctggggccgagggcccaggtagctgcaggcgacaccaggctgcggcgcgccggctcctggaggctggagctgatgcccgggcggccgggcgcaagcgccacacgccg

SEQ ID NO: 251103 - DNA, 122 bp, Homo sapiens
cctgccttcctagtgacaaaccctgttcagagagaatccaaacacgggggccttccatctcggctctcgtttccctcagtctggccagaggccccgcgtggaattcccttagaaaagaggtt

SEQ ID NO: 251104 - DNA, 122 bp, Homo sapiens
gaggtgaggccgtcgtccaccagggcaatcagctggggcttgaagagcgcctgagggtcacgcaggaggggctggtgaggccagggggtgcggatgtggttcccggaaggctcagagtgccc

SEQ ID NO: 251105 - DNA, 122 bp, Homo sapiens
taagggctggggacggactgacatttgtggaaaataatgacagcaagcacatagagcttacgatatgtcagacactaagtactttagttacctttgctaatttccaccttggaatcacatgc

SEQ ID NO: 251106 - DNA, 122 bp, Homo sapiens
ggtgtaagcacacatgcacgattaaagaggagacgccgggaccccctgcccgatcgcgcgcggcctccgcccaccgcctcctgccgcaaggggcctggactgcaggcctgacctgctccctg

SEQ ID NO: 251107 - DNA, 122 bp, Homo sapiens
aggttcagggccgtagaggctgtccacgggcctcacaggaacgcaccaaaaccaggacatcgcaagcacaggcgcacagacccagaccccggccccggcccggcccggctgcagggccgggc

SEQ ID NO: 251108 - DNA, 122 bp, Homo sapiens
ccggtccgaggctccggttgcagcccgtggcccagcacacagaactctgggggagatgcacgcctggtgccgccctgcagttcaggggaacaggggctgctccccggctctgtgtccttctt

SEQ ID NO: 251109 - DNA, 122 bp, Homo sapiens
gaaatctctatttgacaaacttccgagactgctttctttgtgatgcttctaatcctcatgcgtggtgaggaagatggcaggtaggggaaaagcttaggagcttagttcctgtttatccatgt

SEQ ID NO: 251110 - DNA, 122 bp, Homo sapiens
agcctcagtttaccctggacagatgggcatggtggccctggctcccttccctgcagggggcggcagccacctggccctccccggtggggctggcggcctcgcggcggggtttcctgctggcc

SEQ ID NO: 251111 - DNA, 122 bp, Homo sapiens
gagataggggtgggggcatcccaaagagaacacaagcagggcagaaatgtcagtgggggtcgtcctggcacagctgtgccatgctgagctcactcatgcctggagagatgctcctcccatga

SEQ ID NO: 251112 - DNA, 122 bp, Homo sapiens
aaaggagggcttgaggctacaagaggcttccttggtgttactctaggtgctagagagtcacggtagccatctgagggatcccagggcctcagacacatgcttcccatttagagacagtattg

SEQ ID NO: 251113 - DNA, 122 bp, Homo sapiens
aaccttcttttgccccctccgcagcagtcgcctccgggctttattgcaagtttacggtaacgagttcatctatttaattcgcggttgcagctcggggatttctattagacaggacgggttgg

SEQ ID NO: 251114 - DNA, 122 bp, Homo sapiens
cactcctggcactgttccaggccccactgggtgtccacaggcctagcctcacttgcagcccgctcacctgcaaagctgcaggaacttcagagacctgggccctccagcatcaacactgacct

SEQ ID NO: 251115 - DNA, 122 bp, Homo sapiens
gtttaagaagcactgatctagtctattatgcttattttatttgatgagggaactgagtcacgaaaagataacttttcaaaatgacatcacgaattagtggcagtggtggtttggactggaat

SEQ ID NO: 251116 - DNA, 122 bp, Homo sapiens
aatatttcatcacccacaacgaacataccaaacacattcaataattaccatacatgtggccgggcatggtggctcacacctgtaatcctagcactttgggaggccaaggcgggtggaccacc

SEQ ID NO: 251117 - DNA, 122 bp, Homo sapiens
tttgcatatctctttttgtttgtttgtttgtttgcatatctctaccagctagcttgaaatcggccaacggcatgaatattacaccattggaaatccaatataaatcagtgtcgatgaaaaga

SEQ ID NO: 251118 - DNA, 122 bp, Homo sapiens
accccggccccccgccccgccgccccccagggtgtcaggaccccagccggacctaccggtcgttgacgaaggagaacatgagcagcctctgctcgatgaaccacttccactcggggttctcg

SEQ ID NO: 251119 - DNA, 122 bp, Homo sapiens
gagagtcgctgggaggcgggacggtggctcccacagccaatcgcggccggtagagttgcccggcagcgcccgccccccagtccggcttctaccaatcaaaaggaaactagaggcgatgactc

SEQ ID NO: 251120 - DNA, 122 bp, Homo sapiens
ttagcattgagctgtaagcgccttctaattatcttgatgagctcactcatgttgacgtctcgaacgtcaggtacaaggaacttcgttttatccaggacaggaagctgcttctcaccttggta

SEQ ID NO: 251121 - DNA, 122 bp, Homo sapiens
gtggcttgggccagaggcctgagagtccttcttgacttctctgtgttcctgtaagcggcacgttcagtctgccggcaggtccacgtggctccccagacacatcctgaatccggccctctctc

SEQ ID NO: 251122 - DNA, 122 bp, Homo sapiens
tctatgcttcactaaggacattacatttctccccagagtaggagtcctgtgaccctcgatcgttttagtgccaatacagtgcctttgtgtggtggcttcaccatcgctagcaaggccatatc

SEQ ID NO: 251123 - DNA, 122 bp, Homo sapiens
ggtctcgaacttctggcctcaagttccgcctgtcttggcctccaaaagcatgagccactgcgcctagccttttctttttttgagacaaggtctcactctgtcacccaggctggagtgagtgc

SEQ ID NO: 251124 - DNA, 122 bp, Homo sapiens
cacggtgcacgcacccactgacctgcacccactgtctggcactccctagtgagatgaacccgctacctcagatggaaatggagaaatcacccgtcttctgcgtcgctcacgctgggagatgt

SEQ ID NO: 251125 - DNA, 122 bp, Homo sapiens
agcctccagagccaacacccccgcccccagctcagggcccgccactcactccacttcgtgcgtgatcttgttgacatagatgcagctgttgtcggcctcctgctggtaatcacagttccggc

SEQ ID NO: 251126 - DNA, 122 bp, Homo sapiens
ggcctgtcccgtggccggggctccccgagcagcgcagagagcgggactgcccttggccgacgctgcgatcacggcctcagaggcctccagggctccggcgcttgtccacttctctttttcat

SEQ ID NO: 251127 - DNA, 122 bp, Homo sapiens
aggttaaatgtggataaacacaaaacaaggcttcagaaaagccacactattattatgcagcgtttctcggactatagtccccgagacgcacttcataaagccaataaagcgcgcactggtgg

SEQ ID NO: 251128 - DNA, 122 bp, Homo sapiens
tgcacggtttatcgtgaagacagggtcctttgctgccgtcttaagttttgggcccaagaacgtgccccaccctaggcccgggcctgctggcttcatagctctcatcattcccacggaacctt

SEQ ID NO: 251129 - DNA, 122 bp, Homo sapiens
ctctgccctgtctggcatttcaactccctagctcttttcttgaagccagttacaccccctcgacacccagcgagaggccaccagactaaagatgagccccgttcccatcgccaccctccagg

SEQ ID NO: 251130 - DNA, 122 bp, Homo sapiens
actctatggcacaaggaataaagatgctgggactgatgaattcaaaatacactgacttgtcgtaaagacagtgcctagggttacagtggagccagttcccaggctgacagctcctcaggaca

SEQ ID NO: 251131 - DNA, 122 bp, Homo sapiens
gcatcaagaagaagctgagccttctgtgcatcgacttcaacaagaacctgaacgaggacacgaccttcctgcccttcacgctccaggagctaggtaggggccgagcagtggggcacgggtgg

SEQ ID NO: 251132 - DNA, 122 bp, Homo sapiens
ctccatgttgtggagggaggggatacccccccagccacaggaacaaagaaaggaggagggcggccgggggggtctctgggaagaaaaagagaaaagaataatgataacatctcataacgaca

SEQ ID NO: 251133 - DNA, 122 bp, Homo sapiens
tgagcacgcaattcctggggcgcgatttgctcttcctaatgctagggatccagatgtgggcgtgaactccctccagagctaccagctcagccctaataattacttttccttgcaactgcggg

SEQ ID NO: 251134 - DNA, 122 bp, Homo sapiens
ggctcctgccgtgtgccaggcactgctggggccctcactggcaccaagaccgctgagccgcgtccagcagctgataggtgaggaacggggagcccaggagtgagccacatgggatgagcttt

SEQ ID NO: 251135 - DNA, 122 bp, Homo sapiens
caacttggatgtgagtgtaaaaattacctgctctgtaaacaaataattacaggctgggcacggtggctcatgcctgtaatcccagcactttgggagtctgaggcgggcagaccacttgaggt

SEQ ID NO: 251136 - DNA, 122 bp, Homo sapiens
gggaggggaggggggaggggagggagggaaaaaggaaggaaggaaggacggaaggaaggacggaagactggcacgaggtcacaacatgagttagtggcgggaacaggacttctgcaggcccg

SEQ ID NO: 251137 - DNA, 122 bp, Homo sapiens
taagtgctttgtatgtacaaactcatgtaatattcacagcaaccctgtaaggaagatatccgtaagagccgattgttacactttcaggaattttgtgagcctgttattggtagcttgaaatc

SEQ ID NO: 251138 - DNA, 122 bp, Homo sapiens
gagggctgggggcttgggtctagagaatttctctctgagaaactacgcccccgggggaatcggcccccccagccctgcgccagaatcccctgcagcaagtttcggagcaaggcctcctccat

SEQ ID NO: 251139 - DNA, 122 bp, Homo sapiens
ttctcctccagccacacgcggcgctcctcggcgaagctggcaccctggcgctcccgggcccgccgctcagccgccagctcggcctgcagccgccccacctcccgccgcagggcccgcgtccc

SEQ ID NO: 251140 - DNA, 122 bp, Homo sapiens
gcgaatgagtgagtctcgccagatctgatggttttataagcgtctgacatttcccgtttgcgcgcattctctctcctgtcgccatgcgagaaggtgctttccaccatgattgtcagtttcct

SEQ ID NO: 251141 - DNA, 122 bp, Homo sapiens
ctggacatcccccgatagcagcagcagcagcaggacgggaaagaagccccacagagcggccgccatgacagcagctctgcactcagaccggcagccccggaagccctcccagtctcccggcc

SEQ ID NO: 251142 - DNA, 122 bp, Homo sapiens
ggtgagcgcgagctggctgggtctgggagatcccaaagctggtagcggatgggcttgcaacgcttctgggcggggacagccaagggtgggcagcaggctgcgacccctgccccagctcggcc

SEQ ID NO: 251143 - DNA, 122 bp, Homo sapiens
taaatggcagggcctggtgtaagaccatcaaagcaaagcaagctggagcttgcagagcatcggatcttaggaaggcaccaaaataagtgatgaaaggtgaggccaattgtccgagaatttgt

SEQ ID NO: 251144 - DNA, 122 bp, Homo sapiens
ctgagccccaaaagaagagacggttccgatgcgctgcaaagaactatcccaggtgacagccggcttcgccccaacttcaacccttcccgccgccttccctcggataccttcccacctccccg

SEQ ID NO: 251145 - DNA, 122 bp, Homo sapiens
gtaagaagaaaatgagtgttgtatctcagctgcgcccatcagctctattccccgaatgaccgtgagcttgaaggaaagccatttaacgcacacggtgccgatgggtgtcttctgcttggcga

SEQ ID NO: 251146 - DNA, 122 bp, Homo sapiens
gagctctgtgtgagtggtgctctttgtgatgtcaggtgaggagcattacaactgcatctccgccctgcacaagtccatgcggggctcagaccagaacgcctccctctactggctggctcgca

SEQ ID NO: 251147 - DNA, 122 bp, Homo sapiens
ccagcccagtgcctggtgcacaggcatcttcaaggcacctggcaccttctcctccaggtgcgctgcctaggcccatgggtggctgctttactctggttgcattatctgcacccttaggagca

SEQ ID NO: 251148 - DNA, 122 bp, Homo sapiens
ggccccccgccggctggtcactgttggctgaggacagagcagctctgtggctggagcagacgagggaagggcttggacggggcttccagacatcagaaaggcctggccacctgctctgccca

SEQ ID NO: 251149 - DNA, 122 bp, Homo sapiens
gcaggtttcttttagggtatttcctcacttctctaacaggctgatttctttaacagtgcacgttgaaatgaggcaactagtgagtaagaaatgtctgaatcttacagaacagcagctggaaa

SEQ ID NO: 251150 - DNA, 122 bp, Homo sapiens
aggcggcgggaagaaaccccaccctcttgcgcaaacgcccagtagcggaatccgcggggtcgagggctttagtgtgcgcatgtgcaaccagagcggcggcgggaagtgttgcgcaggcgcat

SEQ ID NO: 251151 - DNA, 122 bp, Homo sapiens
ggtgcaggatataatctcctggtgcgcccttttttaagcccttcggaaaagcgcagtattcgggtgggagtgacctgattttccaggtgccgtccgtcacccccttctttgactcagaaagg

SEQ ID NO: 251152 - DNA, 122 bp, Homo sapiens
ccatcccccgtggagactcactgaggcgagcttgctgctctgggggccaaaagcagggggcgagtgggcctccctttaaaggagccatgtctacttaggagactgctttctaaatcctcgcc

SEQ ID NO: 251153 - DNA, 122 bp, Homo sapiens
gggagagatacgagcgtgtccgctgcgtggggagtgcggaggggatccgagggaggtggccggccagagcgccctaggacacagtgttcccaatgtccgtttagagctactctccagcctcc

SEQ ID NO: 251154 - DNA, 122 bp, Homo sapiens
tgcgccccagaaacgctgcttcccagacagtcgtgtctggtcttgcgggaaaggaggaggcgtcccgccaaggaaccaggcgctcagaagctgaaccggggtcacagagccgcgaagccaga

SEQ ID NO: 251155 - DNA, 122 bp, Homo sapiens
gatgtatgtgtgcatgctttatctccacgatagaatttggatagattgtgctagcatttgcggactctgaaagtgaaactaggaaaacccagcttgccttggcagggcagatctggatccgc

SEQ ID NO: 251156 - DNA, 122 bp, Homo sapiens
gagggcagacggcagaggaagacgactgacgcttggctccatcttgccgagacttaggggcggtggactgtgtctgtcaccggctctcaatgctgagggacagccagagagggatctggtgt

SEQ ID NO: 251157 - DNA, 122 bp, Homo sapiens
gcaccccaagcaaattgcacacacggctttcccggagtggacaccagagggcgctgagctcggccgctctcagctccggatcaggattcgcgcctgggtccttaggacgacgccgcgtggtg

SEQ ID NO: 251158 - DNA, 122 bp, Homo sapiens
ccggcgccaaaaatgtctcagggcgcagacacggaagcacccccagggctagtgcgcctgcgcaccttgggccagccatgccgcccgcctccgctgcgtggcgctggcgacccgtggctgct

SEQ ID NO: 251159 - DNA, 122 bp, Homo sapiens
ctcctcctgggcgaaagctgagaggcctaggtgtgcccagctctcagttaactgaagtcacgtggtggtggaccccgcccccagggcccggttggctgtggccccgcccccgagccctgggg

SEQ ID NO: 251160 - DNA, 122 bp, Homo sapiens
tccaaaccccaccccacaatcccgcccaggctcaggactcagttcccttcgcccccaccgcgccctcccccggccctctgcacctgccgcgtcccgtacccggcctgctcttcttcaccatt

SEQ ID NO: 251161 - DNA, 122 bp, Homo sapiens
tcggcctcattcagcccattggctgccgtcgccgcggccccgcccctcccagccaggccccgccccaccccgcgcccccggcccgcctgtcgcgtccgcagaattaactttggactcccgcc

SEQ ID NO: 251162 - DNA, 122 bp, Homo sapiens
caattctctgggaatagcaaggtcatggcccaggcttgagaagcagaacctgagataatacgcactcgaaatattgagtggtcctctctctcttgctctgatctttggcttacatattgcct

SEQ ID NO: 251163 - DNA, 122 bp, Homo sapiens
ttttcacaatctttacctttcttagttctgggagtggccttaccaggtgggcctggcctgcgtactcccagaagggcagttattcctagcagcctttggctttgggaacctctccataattc

SEQ ID NO: 251164 - DNA, 122 bp, Homo sapiens
cattcagctccacgcccagtccaccaggaaatcctgccgctccgccgtcagaatcctctccgcatgtccaccccgtccccaaagtggggccaccctcgtgtctccagtggagcagaggagcc

SEQ ID NO: 251165 - DNA, 122 bp, Homo sapiens
cgagcagctgagccagaggacacaggaggcttgcgtgcaccaggacacacaggcccatcacgctctgctgcagaagctgaaggaggagaagtcccgggtggtggacttgcaagcgatgcttg

SEQ ID NO: 251166 - DNA, 122 bp, Homo sapiens
taaagtttaatgataagccttctgtgttgactccttccaaatcactcaaagggcagctcacgtttttggggctgtgtcatctgagaagagtgaaggacctcacagggtaaagccccgcccct

SEQ ID NO: 251167 - DNA, 122 bp, Homo sapiens
gtggctctctctgcactgttttccatctgcctctgtgcatcagggcctttaatgttttaccgggtattttgagcctcacagtgactgttccgggtccaggggagtaaagagtgctctgctcc

SEQ ID NO: 251168 - DNA, 122 bp, Homo sapiens
tgttggctttgtatttaaagtatttatgactcactataaagtgtaggatccaagaaaacgcgctagtttcacttggcccccgtggctgtcccggggagctctccaaggaaggactggttcct

SEQ ID NO: 251169 - DNA, 122 bp, Homo sapiens
tgtcagcgtgtgtacgcacacatacacacacgcacatgcacacatgctgaccccatcttacgtggaatcaaagcctgaataattcaatgaaacaaatgcctggcacacagtaggtgcctagt

SEQ ID NO: 251170 - DNA, 122 bp, Homo sapiens
gggaagcgccgggtggggtgggccctcgtccatctggagttcccacccgcagggaaagggcggcctgaggagggggccacccggcagcagcagtcgccctgcccccgtccccgtagcccgcc

SEQ ID NO: 251171 - DNA, 122 bp, Homo sapiens
cgcacccacctaaaaaattaaaaagagcaaaccaacaaacagcacctgaaaaatctctcacgggctttgaagatatggcctggcgtccacaaaaagaatggagggaagacactggcctctgc

SEQ ID NO: 251172 - DNA, 122 bp, Homo sapiens
tgggcacgctggaggtgctgggtcctcgtgagtcctgtgtgcagccgggttgggcttggccgttgcgtggggctgggagcgagtttaccaggctctgtcttcagacaaatacaagccaagca

SEQ ID NO: 251173 - DNA, 122 bp, Homo sapiens
aaactacaacatccttttgcactatgtaaatgtatcaagttgaatcatgaaattaacgatcgctcaccatttttggcctagaaaaacggcagtttcatgtggttcgacataatagctatggc

SEQ ID NO: 251174 - DNA, 122 bp, Homo sapiens
gtttgtgtatataacaatgtacattttcaacattttagattccattttggatgctcccatcgggactgtgtgtccctgtgctggaactcgagtgaacacttggctcaaaatccattgctgtt

SEQ ID NO: 251175 - DNA, 122 bp, Homo sapiens
attgtctaagaaaaatagttggaatgcattcgagataagcagaagccgtgcaggcactagcgccgggggaatgaattaggtaatgggagccccatcacatgcaggggatcagggtgcctgga

SEQ ID NO: 251176 - DNA, 122 bp, Homo sapiens
ggaattggatattaaaaattgatctctctccctagctttcagaagagaatacattgctctcgtccctactagagtgtttctgcctgaagtaggaggacccacgaacaggagtagctatctgt

SEQ ID NO: 251177 - DNA, 122 bp, Homo sapiens
ggctgggctgctgattgcaaaactgggtgaaagttctccctgacccttatctgtgggcatcgattgttactcttcctgcaattaactctcttagatctttgcctagtcttttaaaggactga

SEQ ID NO: 251178 - DNA, 122 bp, Homo sapiens
gactgaccaccacgtccccgctgcggactcccggcctagacttcacagtgcctttgtgaacgcttcagggccacacgtggcattcaggtttccaaatctgttttagtttgcaacatctttta

SEQ ID NO: 251179 - DNA, 122 bp, Homo sapiens
gcgcttgtgactgcccgggcagtaacagaagccgtagctcgccgcatcgtctccagtgtccggcctccgggccgagcccctggccctggcaccctgttcctgctgggcaagggctcgcctcg

SEQ ID NO: 251180 - DNA, 122 bp, Homo sapiens
ggactcttagcgtgtagccagaaaccccaataacctttaagctgttaacccttgaggatacggctcaatggtgtacccacgtggagttcattatttatctccgaaagccctgtctgtctctc

SEQ ID NO: 251181 - DNA, 122 bp, Homo sapiens
ttcagggacgtgagcatctagctgcactgatttgttgttcaggaacaggaaatgaaaccccgcagctttgaacacaataacccacgccagcctcaggctcatgaatattcagcaggctgctt

SEQ ID NO: 251182 - DNA, 122 bp, Homo sapiens
cccgcggccccgcagtggggcggcctcacttactggcggggaagcgcgggtctgggttggcgccgtaccatccggggccagaggcgctgttcctcatggtgtcctggtacggcggcagctcg

SEQ ID NO: 251183 - DNA, 122 bp, Homo sapiens
tcattacgatttatcagaaaagtgagacaaattcaggattctcaaatgctgaggcagccccggaattggggggatctttctgttgttagtccacccatattttcaagcaggcattaaaggaa

SEQ ID NO: 251184 - DNA, 122 bp, Homo sapiens
ggttttccgcttcacggtattgacttcaaccggcagtggtactgcgctgggattggtgaacgtcgcctggcggtgtgtatgctttggaattcgtggtttcctctgggcctcgatacgccatc

SEQ ID NO: 251185 - DNA, 122 bp, Homo sapiens
acctttacccctgcagtgccttcctggctccgggctgccggtgcagcaattcagggcaggcgttgtctggcctttgaagggacggctgtctgagtgtgtcactttgaactgcaaaggggcct

SEQ ID NO: 251186 - DNA, 122 bp, Homo sapiens
aagtgtggtgcccctggtcccagacttggcttttttcttcatttcttttatatgggaggtcggtgttttggcattgcaaggttcaagtgtaataaaacttaaatgtagtgaataaataccat

SEQ ID NO: 251187 - DNA, 122 bp, Homo sapiens
cctgggctcctttcacaaccactctggtatcttaccctccttacgagcaggtacaaggcgcgttccaggtctctccgccaatacagctgccgacattgttcaagggcctctttatagcgaca

SEQ ID NO: 251188 - DNA, 122 bp, Homo sapiens
actgttaaatacgtgcataaacccaagctcagaaatgctggtgatcctgaacaggaaacacgagaacccattttgtactagtcagagagatagtctttcctgattatgttccatttcccaat

SEQ ID NO: 251189 - DNA, 122 bp, Homo sapiens
ggcacgcgcacctgccgtagagtgctgaaggtcctgccaacggctctcttggcgtctcaacgttcggatcagcagcttttttccattctctctctccacttcttcagtgagcagccatgagt

SEQ ID NO: 251190 - DNA, 122 bp, Homo sapiens
cacgctcaccccggacaagccgcgctgggactccgggttcttccattctcggggtttcttcgggacctgaggcttcttagagatccgagacttctttaagatgtaagcattttttggtctct

SEQ ID NO: 251191 - DNA, 122 bp, Homo sapiens
ggcctgggttcctcgtccaggaaactagagtcatcacagtgctcctcttacagcgggtgccgaagggtgggggctcacgggcacgagcctagaacatgcccacgcctgtgtgggagacagca

SEQ ID NO: 251192 - DNA, 122 bp, Homo sapiens
ccgtttgaaaccgcttgggccgccgcacaccccgcagtgtcctcgttctttattggtcctcgacggaccgcccatcggacttttattggtccatttgaaaggcctgtgggcacgcgccgccc

SEQ ID NO: 251193 - DNA, 122 bp, Homo sapiens
tctccacccccactttgagaaggttgtgtccctggagccgggactgatagaagccacatccgcttcgcttgttccgcctactgttctgacttctaattggccagatggagttcactaactgc

SEQ ID NO: 251194 - DNA, 122 bp, Homo sapiens
cctccattctcctttcctgtctaaaacccatcagtttagaatcttatgtcttgagactaccgccttgctattcttctctgttgctgtcatttatccaccctggatgccatattccaacccct

SEQ ID NO: 251195 - DNA, 122 bp, Homo sapiens
cgggctcgcggggcctgctctctccggggaccaaaggctttcggcgggtggtaggccggacggcagactggcgccccaaagccccggggcgccgcgccggcggagtgggccggaagacctgg

SEQ ID NO: 251196 - DNA, 122 bp, Homo sapiens
ctcagggcaatgggctgaggtcttgtgtccaaaactgctcttgcatctccctggggagcccgggtgggcaggaacaacaaggtcctgtggccatgccctcgccccatgctcacccacactgc

SEQ ID NO: 251197 - DNA, 122 bp, Homo sapiens
atgacaacgcccctgaactcaccatgtctacgctctccagccctaccccagaaaatgccccggaaactgtagttgccgttttcagtgtttctgatccagactccggggacaacggtaggatg

SEQ ID NO: 251198 - DNA, 122 bp, Homo sapiens
gtgccctggtggctccttggtgaggggcctttggagaaagtcttgggaaatcagatttcccgagggtgttgttgaggacattgctgacgaggtgtgggatttacggggaggacagcctgtct

SEQ ID NO: 251199 - DNA, 122 bp, Homo sapiens
ctgggggacccttggcgagagggtgacgcagtctgacaggcggagcccctccggcagggccgttagacaacgagtgtctaactctgtcctcggcctctacttttcaactggcctcctccccc

SEQ ID NO: 251200 - DNA, 122 bp, Homo sapiens
atctgggcagccccgcggggacccggctctgcgcgcagcccattgtacagctggcgcagccgcgcaaatgacatctgagcctcctttcaagccgccggctgctttcaaaaggggcctttgaa

SEQ ID NO: 251201 - DNA, 122 bp, Homo sapiens
agaaggtagggaagtgtgtgtgtgtgtgtgtgtgtgtgtgtgtgtgtgtgtgcacgtgcgcgcacatgtgcaactggaattgtttatttgccctaattagaaatgagggtggtgaaaatcca

SEQ ID NO: 251202 - DNA, 122 bp, Homo sapiens
cccgcggaacacactgagagccggaagtgttgccttagctccggacgaccggatggggaacggcgcggcccatcgggcaaccggaagcatagcgttcctgtccggaagtcctgagagggaaa

SEQ ID NO: 251203 - DNA, 122 bp, Homo sapiens
acaatgaatttatagcggcatgccatcctgcaatggcaatttcaacagttcgtcactgcacgctgcctcttaaagggagagcttcccccaccactcccacccttcccagtccgcgcctaatc

SEQ ID NO: 251204 - DNA, 122 bp, Homo sapiens
catcctcctagccaagcccctgcggctgagaccagggtgaattcctttcccggcgtccagcgtgcttgccctaactacaatcccagccccgagagcgggacagtctatgaagtagatgggga

SEQ ID NO: 251205 - DNA, 122 bp, Homo sapiens
ctggctctccaggtccccctccggcctctgttactctcatttgtctcccttgcctgcactcgctggattctcacaattcatcccacacggagcacctgatggccttcctgccagcgtcaggg

SEQ ID NO: 251206 - DNA, 122 bp, Homo sapiens
tgagcctccagagccgctgctgatgtccacaccagaggaggatgtgggcgtgaagttctccgtcatggcatgggacccaaggtctggcagagcctggctccatgtgagctcccagaggcctg

SEQ ID NO: 251207 - DNA, 122 bp, Homo sapiens
cgtcaggactggagatctcacggtatcgcgagaacttgctgagcccgggattggttccgccgctccctgccagccaaccggattctctgggctttatttctgtgaatttacccatagcaaca

SEQ ID NO: 251208 - DNA, 122 bp, Homo sapiens
aagacctttattacttttaggaattaaagacactgctcagattccacccctgggtttcaccgccatagggctccatttcacgccaaggctggtccccttgtttctcggggtgtttgtccatg

SEQ ID NO: 251209 - DNA, 122 bp, Homo sapiens
tctcaaaggtctgtggccagtccttggccgagaagcagtctgtgatggtgatgaggcccacgactttgcggtgggtctggaagtcaccccactcgttgttctcgggtgggtagtggtgcctg

SEQ ID NO: 251210 - DNA, 122 bp, Homo sapiens
tacattatttgaggataattatattaaaagcccagacttcaccactacacaaaatatccacgtaataaaatttcacttgcgctccttaaatttatacaaataaacaaaaaagtataataaaa

SEQ ID NO: 251211 - DNA, 122 bp, Homo sapiens
ggtggggtcggcaggggcagagaggacagttcgggaggctggtgtggagaagagctgcggcgggagctgggggatccactccacccagaggggtcagtgatgcctgacctttggctggaagg

SEQ ID NO: 251212 - DNA, 122 bp, Homo sapiens
cctggcagaggcaggggtggggggtgcaccaggaagaacccagcaccgcccctgggattccgaacagtctgatcctgagggaacgtcagacaagcccaagttcagggacttcctacaagata

SEQ ID NO: 251213 - DNA, 122 bp, Homo sapiens
ctctttgtctccccctgcaccgcccacctctgcctgcctccgggtccccccacagctgttcgttctgtgccacagcctgctgcagctggcgcagctcatgatctccggctacctaaagagct

SEQ ID NO: 251214 - DNA, 122 bp, Homo sapiens
tcctgctgaagcacctcgtccccggcgctgactatgacctctgcctgctggccttgtcaccggccgctgggccctctgacctcacggccaccaggctgctgggctgtgcccatttctccacg

SEQ ID NO: 251215 - DNA, 122 bp, Homo sapiens
atcccctgctcccgctgcagaccctctacccacctggatcggcctccgaccgtaactattcggtgcgttgggcagcgcccccgcctccagcagcgcccgcacctcctctacccgaccccggg

SEQ ID NO: 251216 - DNA, 122 bp, Homo sapiens
ggcctgccaggtacaatattatcatggaggctcggagacccctggcccttggctgggtttcgcagctgcccaggcttctctgcactcctgcagggggatgtctacacgcactcacaaatgca

SEQ ID NO: 251217 - DNA, 122 bp, Homo sapiens
acgtcctctgactacctcgcgccagcaagacccaaactacggatcccgattgactccgcgcggcgcgtcacgctgtcagctccagccaatcggcttcagacaagtcggaggggagggagacg

SEQ ID NO: 251218 - DNA, 122 bp, Homo sapiens
tcgcccgctgcagagtctatccgctggactgtctccaggattagagaggcccgttgacttcgtgtacaaacgctcagccacaacactgacctagtagacaccgttctgcccattgtatagat

SEQ ID NO: 251219 - DNA, 122 bp, Homo sapiens
acaaaggggccctgtgtgagctcggtgtgggaacgcggggccccgccacgggcgtgaaatcggcagcggcccctggcgagggccaggcggtgcgggcgccccggcaggcacagtgaggctgg

SEQ ID NO: 251220 - DNA, 122 bp, Homo sapiens
cagattcctgctgctctttatttagagtgtgtgcagcacctcattatagttccctttcctcggccactgctttctttctttatatctttctcagagcctttcccatagaggatactacaata

SEQ ID NO: 251221 - DNA, 122 bp, Homo sapiens
cactcacctcctaagaccagtgtaaataaactcaggcatggtgtgctggaggtcacagcccgctggcacatgctgagtggggcacacactattcttatttaaatgaatggatttcagggaag

SEQ ID NO: 251222 - DNA, 122 bp, Homo sapiens
accaatcccttagcccttttattttttttttgcctaattttaagtcctcgtcctggcattcgcatccctgcttggcctgacccttgcccacatttcgcaccataccccgtccctcacctgct

SEQ ID NO: 251223 - DNA, 122 bp, Homo sapiens
atcccggcgcagggataccggccgcggggttcaaatgtcaggaagtttcgggaggtgaggcggcccgtatccctccgccgccagccccagctctaaacccggcggctcagcgggcgcaccat

SEQ ID NO: 251224 - DNA, 122 bp, Homo sapiens
aatattcatctctccatgtcctgggggacgtgtgtgagatacggagccttggccatcccacggctgcatcgccaggcctgtgggcttaactgtattcacgagagcacagacggagcggacag

SEQ ID NO: 251225 - DNA, 122 bp, Homo sapiens
ggataggccgcgcctcctggcctctgagccattggcaggagggcgtgggcggggcatcgtcgtctggcactggccactcagaacttaggaactgaacctggccattggcggagtggaccccg

SEQ ID NO: 251226 - DNA, 122 bp, Homo sapiens
gcctcttatcctcaggccacctccagtacagcaaatccaagccctcccgtctaaacttggcgccctgagtaccaagggtcacctcggcctttcaggctgaagggagggaggctgagtctcag

SEQ ID NO: 251227 - DNA, 122 bp, Homo sapiens
cacctccactcgtttgcgcctcccttgtgccctcttccgtcttttctctcctttctaccccgtgggtccaaggctgataggaagtccagactcagtgcggtgctcccagcagatgccagctg

SEQ ID NO: 251228 - DNA, 122 bp, Homo sapiens
tttcagttgcagaagcttccatggaagcctgatcttccttgtatgcccccataatcacagcgagagtggctgtttatataggaaggggtgcaggcggggacttgggactacactcagcttcc

SEQ ID NO: 251229 - DNA, 122 bp, Homo sapiens
aattctcgtccgtgtgcagtggctcacacctataatcccagcactttgggaggccgaggccggcaggtcactagttcaggagttcgagacaggcctggcaaatatcgtgaaaccccgtctct

SEQ ID NO: 251230 - DNA, 122 bp, Homo sapiens
caggagggaggggaggcagggctgcggagggacaccgaggcggcggaggtagtgcgcacgcgcagcacagaacgagttccggtctggccgaggcttgtctcctaaaaatagccccggtgtgg

SEQ ID NO: 251231 - DNA, 122 bp, Homo sapiens
acgttccacaaaatctgtctattctgtttaataaagttaatcctcaaattgctgtatagccgggagactcaagttcattgtaactacgcagcaatactgggctctatgatgctgatatacca

SEQ ID NO: 251232 - DNA, 122 bp, Homo sapiens
agccaagccttgttcccttccccttcttgccccgaccaggaccaaaggctcatcttggagcggttgcaggtcatgtacactgtcggctactccctgtctctcgccacactgctgctagccct

SEQ ID NO: 251233 - DNA, 122 bp, Homo sapiens
ctcttgcacccctggaatgtgaggatcttcagcagaggaggacctgcaccttcctaggcacgtctgtctctgaagagggccctactggtaccagaggaagtggggctgtgccctcttctccc

SEQ ID NO: 251234 - DNA, 122 bp, Homo sapiens
agacgctgaggtggtggctgcggcctttgaacaagtaagtgagccaccctcggagacccccgcgctggggacgggaggccggcgagcctcgggacctctgaaagccttgaggaggcgcgggg

SEQ ID NO: 251235 - DNA, 122 bp, Homo sapiens
ccacactcggcattctgtggaactgtgtgttttgctgtcaagtccgggggtgccccatggcgaggtcctttaggacagcgtttctcaaaggccagtcatgaccacgcctatcagaattgtct

SEQ ID NO: 251236 - DNA, 122 bp, Homo sapiens
gatttgtgggagaaaccacctggggataaacctctccccaccaagaacctagaattcggccgggtggctggggaaaagtgggcggggcgtagtcgccccggcgctggcaggtccagtctctg

SEQ ID NO: 251237 - DNA, 122 bp, Homo sapiens
gactgcccagtctctaggaacggctgtgccgcgcctcctgagagagttcgtctcgggctccggggactgagctccccgagattggctgtggtcctggcttgatgttcctgctagacctgctg

SEQ ID NO: 251238 - DNA, 122 bp, Homo sapiens
gggatcttggtagccgagggccttcctctgagagctgcaacgcaaagagactcaaaacaacggagaaaaaactcagggcaaggttggccttggctcataagaccttttcaaactttattgag

SEQ ID NO: 251239 - DNA, 122 bp, Homo sapiens
cctgaggtcacccacctacaggaaaaaccagtgtgagacccgaaccatgctgctgcagcccgcggggtccctcggctcctacagctaccggagtccccgtgagtggggcctccaccggcccc

SEQ ID NO: 251240 - DNA, 122 bp, Homo sapiens
cagacggggcggcccggcattggcgctcctcactttccagacggggcggccatgcagaggcgctcctcacctcccagacggggcggcccagcagtggcgcccctcacctcccagacggggcg

SEQ ID NO: 251241 - DNA, 122 bp, Homo sapiens
acgcctctaaaccccgcctcttcttgcaacctgtgttggcctcatctacccagcaactgtcgacgtcacacgacctgggcctccctgaatgggagatatttactaggcaatcccgcctactg

SEQ ID NO: 251242 - DNA, 122 bp, Homo sapiens
cccagttccccaaatggcttgtggttttctgtcctctctgcctccgtgctggcaaatattcgtccaggaggcagtgactgggagagaaagactaacttcttattcaccagatcggatttctt

SEQ ID NO: 251243 - DNA, 122 bp, Homo sapiens
tctcatttcgcagtagggtaggtagccgagtccgactacgtaggtagatgtggaccgtctcgaaaaatgttttccaccgattgcccagcaaaagagtccagttgtagcactggctgttttgg

SEQ ID NO: 251244 - DNA, 122 bp, Homo sapiens
ctcaccaggacttctggcaaccagtgagcctttttgtgatatgcagcaaggtaaagaagtcgttaagtggatctcccacatgttcctctgtgacttcattcatagaaatgcgctgataactg

SEQ ID NO: 251245 - DNA, 122 bp, Homo sapiens
tcagtttggaaggcctgcttacgactccctgtggccgttctctgagctttcctgtcacatcgtttccttccacgctctttggttcattgtggtcctgctgcttctgctgtcagaggagcaga

SEQ ID NO: 251246 - DNA, 122 bp, Homo sapiens
tgagcaaagggggtagtctggggtgcgatgcacagaaaggcccgtccagggtaaccttcacgtctccgtatccgttgctgtcgactttccagagcctttgttcccagtgacgtccctattgc

SEQ ID NO: 251247 - DNA, 122 bp, Homo sapiens
taaaggacctagtgggatcaggatcatggtgagatgtatgcctttcccaggaatgctagccggcttgctcccgcctgtggccctggcccacctgcacacggtcacggtgacccccaggagtg

SEQ ID NO: 251248 - DNA, 122 bp, Homo sapiens
aaagtcctaccaattcttcctgaaatatgtttccttatcaaaaagtcctgcaaagccgtgcgtggttgctcatgcctataatcccagcactttggaggctgggaggatcgcttgagtccagg

SEQ ID NO: 251249 - DNA, 122 bp, Homo sapiens
tctctttctttcagtgcttttcatattggacctcaagtgagattctccttaatctgtcctcggcaatccagactccagtacccttgatattttccaagcaagccatggctgttcttgactct

SEQ ID NO: 251250 - DNA, 122 bp, Homo sapiens
gttaggacagtgaaaactacagcagagctgctggaactgtgggattgttttggagatggtcggctacctcaggaagtgaagactgtgatgttcaaacaaaaaattgggggaggggttgatta

SEQ ID NO: 251251 - DNA, 122 bp, Homo sapiens
ctttcccactagattctgggctccttcttaggggaagaaactccagtctttcatcccggtcgttttagggctgagcccatagttggtagtcaataaatatttgatgaatgtatacataaatg

SEQ ID NO: 251252 - DNA, 122 bp, Homo sapiens
gtggccgggatggcagcgctcagctggttcaagtccccgatgcccgcagtgctgttgtagcggctgtccatattgggaggaggcgccttggacttgtccggcgcccacaaccacagctcggg

SEQ ID NO: 251253 - DNA, 122 bp, Homo sapiens
ccgtttgcgcctgagccgggaaagagcaacccatcccgtcgccccagcccgcaaggactccgacaccccagactttccactacgtctgcaaatgtggaccgcgtgattgactccagtgggat

SEQ ID NO: 251254 - DNA, 122 bp, Homo sapiens
atcagacagacctaaggaattcaatgcaattcaggttacacaaaacagtttcacttcttacggggagatctgctgattgaagattaacctgcagcaaaaaaggaaaagtgaaaagcttggag

SEQ ID NO: 251255 - DNA, 122 bp, Homo sapiens
aacagatcgtggcattgcatggctcgtcacagagaagccaaggcaaattcttgtggaaggcggcacttgtctggaaacagactcaggacaagtgtgctgcacagccagcttcctcaaaccca

SEQ ID NO: 251256 - DNA, 122 bp, Homo sapiens
tgacctcgtgatccgcccgcctcggcctcccaaagtgctgggattacaggcgtgagccaccgcgcccggcctactgctcactctttgggtccactctgctttcatgagctgtaacactcacc

SEQ ID NO: 251257 - DNA, 122 bp, Homo sapiens
ttccgttttaccgatgtggaaactgacttcagagatgcagcatggtgcggcagttaagagcgtgggctcctctaaccatatcctgtcgagagttcaatctccaaacctcttttctctgcacc

SEQ ID NO: 251258 - DNA, 122 bp, Homo sapiens
agttctcctgatctggcctcttgggtcacagccagatgtgtgtgtacgggaacctacttgcgcagttctgggctgctttggtgctctcgcttctcccagggaccccagctctggttgctgaa

SEQ ID NO: 251259 - DNA, 122 bp, Homo sapiens
aacgattcaacccgggggagctcaggtaaggaacgctgccctccttcacatctctgctcacgagagccccagaggctagacgctagacctgccatgtggagatccggggcggacggtgggta

SEQ ID NO: 251260 - DNA, 122 bp, Homo sapiens
ggaggagaaagaggaaaggcgtttggcctgccaaggccgccgtagcgagggggcggggcccggaagagcaggatggcggcgcgggacagtgacagcgaagaagatctggtcagctatgggac

SEQ ID NO: 251261 - DNA, 122 bp, Homo sapiens
tgactcccaccccgagtatcctgtactgagctgccccgagctgggcagcatgaagggcctcggggcagctcagtacaggatgccccagggaggatggagatcagagccggccgctgaagccc

SEQ ID NO: 251262 - DNA, 122 bp, Homo sapiens
tgtcttattatcctccgggtccctcgctggctagtaggagagactggtgcttgccccgcccggtggactaactcgcttaattttaaataaaaagtcgaggacacggcggtcgttttcccgaa

SEQ ID NO: 251263 - DNA, 122 bp, Homo sapiens
gcgccatttcctttccgttgcctttcgctgctctgtctccggcagccatgatggaagagccgtgtccctttctttccggagtttgtgaggtggcgatgtcccttccaggttaaagtgccctc

SEQ ID NO: 251264 - DNA, 122 bp, Homo sapiens
ggctgggtgcggggcccagtcgccaggccacactgcacgcttccacatcctcagagggcccgggacttgggtcctggccccgccccctgcggacccggcactctgtcagttccgtccccggt

SEQ ID NO: 251265 - DNA, 122 bp, Homo sapiens
ccgtccgtcgacatcagctctgagacgggcaaggcctagtccaggaggcagcacggggtgcggggggggacccacagagaggcagcacggggtccaggaggcagcacggggtgtggggggta

SEQ ID NO: 251266 - DNA, 122 bp, Homo sapiens
agcctctgtcttggaagagccacctacgctccagtccatcctgctccagcgaccctggcccgcttggagctctgggcagcactttctctgtgaagcctcagggagagtgaattactctgctt

SEQ ID NO: 251267 - DNA, 122 bp, Homo sapiens
tgtctgtcccaacatccgaggcctctccagaagcagagctcctgtcctttgccctataagcggtaagtatgatttttttagtacacagagataacagtgggcagggaataatgaccctcagt

SEQ ID NO: 251268 - DNA, 122 bp, Homo sapiens
ctcttggccttggatttctggctgcgcagttcgcgtccccgcggctccccgccggccgcgcgtttccgagccatgttgcttgtctgggcaaattccacttcgcgagtgacgcacccggccgc

SEQ ID NO: 251269 - DNA, 122 bp, Homo sapiens
gccaccgcggacgcccgcgctcccgtcccgactgcttgccagccctgcgcctacggagagcgtcgcgtttccctggagacagccccgccccatgcccgctgccactctccggctccgccaat

SEQ ID NO: 251270 - DNA, 122 bp, Homo sapiens
ccccagctcgactctccttaggagctcctctctgccaggctcggggttggctggtgtgcccgacacgcggccggtgcctgtgctcctgcggtaactcacggccacgttccaggttccagaac

SEQ ID NO: 251271 - DNA, 122 bp, Homo sapiens
gggcggtaggtctcgggagggcgactggggaaagtgacttgccgcggcttcgagtagagacgttggtgcgggacccaactcctggggaaggcggggagcgctgggcggatgcctggccctag

SEQ ID NO: 251272 - DNA, 122 bp, Homo sapiens
tctaacctctgttttttctacttaactgagggcagagattgtgtctgacttgttccctgccgtcctcctagtacctacctcagtgcttggagaatgcatgaatgtatgcgtgccccagtcct

SEQ ID NO: 251273 - DNA, 122 bp, Homo sapiens
ctcaggtgattcacccaccttggcctctcaaagtgctgggattacaggcatgagccaccacgcctggacaagagtttttaaaaaatcaacatcccgtggccaggtgtggtaactcatgcctg

SEQ ID NO: 251274 - DNA, 122 bp, Homo sapiens
gtcaccgaggcagtgaccccggtcctgcctctccagctgctgtttatgtaatgagtgtcccggtgccgctgctgtggctgacatgatccatgatgctggcataccaatgaggaagtaaacaa

SEQ ID NO: 251275 - DNA, 122 bp, Homo sapiens
ccgcaccctgcagcctgcccggcctgtgaagtttttagattgttcggccaggctgactcacgcagctaaggcaggaaaatgtgcccgaggcgattgctggtggtattcaaacaatcctattt

SEQ ID NO: 251276 - DNA, 122 bp, Homo sapiens
gtaaggcttcggctgttcaggtcactcaccgcttcgctgtttgaggagcagcagtgtccccgcgcgcccctgcagccgagccatcacagcgccaggctccccacagcatggggctggccctc

SEQ ID NO: 251277 - DNA, 122 bp, Homo sapiens
ggagggagggaagtggtggtaactgggacccctggtcttatagaagacggtgattaattccggactttaagtgagataacttcggtctgctttaaccttttaaaaacgccgccataaaactg

SEQ ID NO: 251278 - DNA, 122 bp, Homo sapiens
ggctgctgtgtggcaccatgctggccctccaggataggacctgattggatttctccacatcggtgggtggtcactggggccctgggtggattgtaattggcgggtgagggggtggagctgac

SEQ ID NO: 251279 - DNA, 122 bp, Homo sapiens
ctgcgccgccgcctcccccgcctcgccggcggccgggattccgccccacccccgccccctcgctcgctccgagtctttgttgcgggctccgccccccgccccgcccccagctcctcttcggg

SEQ ID NO: 251280 - DNA, 122 bp, Homo sapiens
aggtagagggcaggggccaagggggcgatcctggtggctgcgctttttgctatttgctgccgacggcatgcagacgagatgcaaataagcttatgaaactgtccgtcctaccccctcgctcc

SEQ ID NO: 251281 - DNA, 122 bp, Homo sapiens
cgcccacggattccaggatccgaaaacgcttccagctgctccgccaccccaggaaggcagcgcctgcctctgggcggttctgacggaaactggctcctccgcctgcaggaaaactcacaact

SEQ ID NO: 251282 - DNA, 122 bp, Homo sapiens
gcaggtcacagagccacagaggctggacctctagcagcagaggacacagaagaacgaagacgagacgcagagctccaactgcagccagagacaaaggccccgccacatcccggaagccgccc

SEQ ID NO: 251283 - DNA, 122 bp, Homo sapiens
acacagcaatctctgccacattcagaatactaacttaaaaatagctgccaggctgggcaccgtggctcacgtgtgtaatcccaacaatttgggaggctgaggcaggaggatcacctgaggtc

SEQ ID NO: 251284 - DNA, 122 bp, Homo sapiens
tcaactatggggtagccacgtggcttgttttaaccagtaaatatgagccagagtcttatgcgttacttctgagaagaagctctcagaagcagctattgctttttcacttttcttttcccttt

SEQ ID NO: 251285 - DNA, 122 bp, Homo sapiens
gccggtcccaactgcctccaactgccaccaacctctggtcgggctgtggggcgggaaactcggtcccggccgccgagtggggaaggcgggagctcgggatgcagagtgcactctccctaggc

SEQ ID NO: 251286 - DNA, 122 bp, Homo sapiens
gcgcactactgctgtaaacgcttcctgaagctgcgtagcctttaaggagcgtgagtgtagcgtattacctgctttatgcttcagccacaacctgagagttatattagtggggattaaaaaaa

SEQ ID NO: 251287 - DNA, 122 bp, Homo sapiens
ggcgctcctcacatcccagacagggcggccaggtgctccccacttcccagatggggtggccgggcagaggtgctcctcacctcccagataatgggcagcccacttcccagatggggtggcag

SEQ ID NO: 251288 - DNA, 122 bp, Homo sapiens
ataccaggcactgggctgtgtggacgggacaggactagctccaggaggccagaaggaccccgtttgccctgtagtgaaactgtccctctgtgctcagagatgtccctcccagcctgagctgc

SEQ ID NO: 251289 - DNA, 122 bp, Homo sapiens
cattggaacacagggtctgcaaaatagctctagcattaatctgagtttttacaacagtgacgttagccccaggagcagtttggggaggttccaaatcttgcagcccctggctgcgtgactcc

SEQ ID NO: 251290 - DNA, 122 bp, Homo sapiens
ctagtctggctccggccgctgcgtggagggatccggagcgggagaggcggctgcgaggagcggggctcgggcgggtgcagcgacaccgggttgggtccctgcgcccgcgacagactacttct

SEQ ID NO: 251291 - DNA, 122 bp, Homo sapiens
cgggtaccttaacagcatcaactcagaacttaaaaaatcaactagagatcatccaaggaacgtaagtataattctacaaaaaaccatctcatccccattgcagcaggccccaaactccagtg

SEQ ID NO: 251292 - DNA, 122 bp, Homo sapiens
caggcaaaggccgcccatttctggggccgcagcggtttgctgtgcaggtccagacctgtgcgcccctgcagcctctgcttcctaacaacctcagtgccccagaagcagtttcctgccagggg

SEQ ID NO: 251293 - DNA, 122 bp, Homo sapiens
gatgactgacttgaatatttgcttggttggggtggagtggcttatgtgactgcagatagacggtttgtattatttaaaagtcagatcatacctacattactgtgggattgttttgttttgtt

SEQ ID NO: 251294 - DNA, 122 bp, Homo sapiens
catccctttcctgggggtttgctttctcactggtttctgctggtggctcaagaaactgaacgcctcgggggacatcatatgcgtcgttctgagagcccactgactgtccgagttgcgggggt

SEQ ID NO: 251295 - DNA, 122 bp, Homo sapiens
agaatgggaccctgtctccaaaaccaaaagattccagctcgaaaaataattgtggggtggcggcaaaagctcctgactggccttgactttagagtgaatcaatgaattaattaagggcctgc

SEQ ID NO: 251296 - DNA, 122 bp, Homo sapiens
ccagtagccccgggtgcctctcactccttgggcgcaatgctactatcctggcagaaccctcgccgaaccctcgcaggacgccccatcgggtccgccagcggctaggaagcccgattgtgtcg

SEQ ID NO: 251297 - DNA, 122 bp, Homo sapiens
aatcacccaccatagggcatgattaacaaagcaacctttcccttcccccgagtgattttgcgaaacccccttttcccttcagcttgcttagatgttccaaatttagaaagcttaaggcggcc

SEQ ID NO: 251298 - DNA, 122 bp, Homo sapiens
gccagggaggctctgtatatacgtagaggtcacccaggcgtgtgtgtgtgcgcgcccccacgcccctgcccacaggcctgcattgaaggcgcttccgctccccggagagccctgtcctgatg

SEQ ID NO: 251299 - DNA, 122 bp, Homo sapiens
aaaaccttcccaggaggaccaaagatacctcctgcagtgaaacccagaacgctttgggttcgcagctgcccaccccaccaggctgtgaggcccaaacagcaacaagatgcgcatttcacaaa

SEQ ID NO: 251300 - DNA, 122 bp, Homo sapiens
tgtgtgtgtgagtgtgtgcttgtcaacacgagccagtgtgggggttctcgtgactcaacacgtgaagataaatgtgtgaatgtgtatggatgagtgtgtgtcggtgcttgtgtgtacttgtc

SEQ ID NO: 251301 - DNA, 122 bp, Homo sapiens
acagtagtaccggggtctgccagctccgcagaggtccctccaatcccccctcctcctctgcgcccccccacccatgcccagcaatcccagcagctccagcgcaaacctagcgacgcagttcc

SEQ ID NO: 251302 - DNA, 122 bp, Homo sapiens
ctgaaggctcctgtgagtcgccctctccccctggccccccaacccgcggggaaaggctggcgggacgccacacagcacctcgattacgccatttcatttgccactgcaccatctatcggaca

SEQ ID NO: 251303 - DNA, 122 bp, Homo sapiens
ctcttaaatttgcagtgttaaccaagcctgatgtggttccctagatcccctggctgccaccgctctgtgaagcaaaggaaaaactaattccttgctagcataacacttctattgagcattcc

SEQ ID NO: 251304 - DNA, 122 bp, Homo sapiens
agcagaaactggctgatgggaccatggactgctgtccactgcaaaccaggctcccagggacgaggtattgggggctgagggtcagtgtccagaggccttcccatgcccaccctgaaagattt

SEQ ID NO: 251305 - DNA, 122 bp, Homo sapiens
ttagagtagaggttgcacaggtgaactcagttgctgccacacctcatggtctgaggaagccggcccttctactcagagacagtgcctgagaggagactgctgaagcctcagctcagcagtat

SEQ ID NO: 251306 - DNA, 122 bp, Homo sapiens
acttgttcctctattaatggggtccttcaaaatccagcctcagattccctggtcccgcagcggtggcctcacctctggcgtggccgagctcacgtggtccggcttgtgcaagtcccaggtcc

SEQ ID NO: 251307 - DNA, 122 bp, Homo sapiens
ctggcagagggctctcggctgagtggagctatgtgtgaaaggaaaccaggcactgcctgccggctttacatctgttgatctgacctgactggaagcgtccaaagagggacggctgtcagccc

SEQ ID NO: 251308 - DNA, 122 bp, Homo sapiens
atgccgaggtaaaagttctttttgctctaaaagaaaaaggaactaggtcaaaaatctgtccgtgacctatcagttattaatttttaaggatgttgccactggcaaatgtaactgtgccagtt

SEQ ID NO: 251309 - DNA, 122 bp, Homo sapiens
caacaaaaaatcagagcagaaaaaaggattagatcggctgagcgcgaactgaatccctctcgattctgacatttcagcctattagcatttctccacggagccttctgaaacctattaaagtg

SEQ ID NO: 251310 - DNA, 122 bp, Homo sapiens
gagcattgcctgccgtgtttaccttgctccaggtgtttatttctaagtcatcatcaccttcgtcatctacagtcagtcacatcagtcacccacacacaactcacagtcacccatccattggt

SEQ ID NO: 251311 - DNA, 122 bp, Homo sapiens
gtggccgtgggcaccacggggaagtcggacagcagcttgcggacgaacatgagctcgctgcggaagttgacttcgcccacgctggacgaatcatccaccaggaagacaagctccaggcgctc

SEQ ID NO: 251312 - DNA, 122 bp, Homo sapiens
gttcagttggtatcctcaaaacatctgctttacttgtttatgatttgctcccacccccaccgcatgttgtcagctttttggaggcaggaaatccagtgtgtattcctctgagctccctgggg

SEQ ID NO: 251313 - DNA, 122 bp, Homo sapiens
ctggacgccctccccacgcctggccttgtccatctctcagactcggcaatgattggcttccgcggcgccaatctccacccgcagtctccgcctcccgcacctgtggtccgggcctcacggtt

SEQ ID NO: 251314 - DNA, 122 bp, Homo sapiens
gctgagatagaggtgctgaggcaaaggctgtccaccccagtgtagccccggctggccttccgggtctccaagcctgaggtgaaggctgcccacctcagttcagccccagctggcccctcctg

SEQ ID NO: 251315 - DNA, 122 bp, Homo sapiens
tcattgcccggggctggcagggccggccggctgctccgagtgcggagcccgccaagcccacgcggaactccagctggcccgcaagcgacgcacgcagccccagttccctctcgcgcctctcc

SEQ ID NO: 251316 - DNA, 122 bp, Homo sapiens
aatttatagtgaactcctttgacctcattcctgacgtaaaagcattaccagtaagttacacgtacctatgtgcaccgcccccgcttccaatccacagcctgccccataagatagtaacaaca

SEQ ID NO: 251317 - DNA, 122 bp, Homo sapiens
ccagggaggtccgtgggcgggctttgaggcaccagcacatgcagctgcctggccccttgccgggtgctctcctcctgcttcaggtactcagacatgaagtggtgagcccctggggtctgcgc

SEQ ID NO: 251318 - DNA, 122 bp, Homo sapiens
aggcggactggccccagcctggagcagggcttgagggaaggccctagctgaatgggtgggcgtgaggtctggaccccggggacctggcctcagggaagggggcggggaaagcaggttggagc

SEQ ID NO: 251319 - DNA, 122 bp, Homo sapiens
gtcaaggtgtgggtggcatccactgttgtgagctggcggtggatgctagccttgggcctgcggctgtttctccagctggggacagggaggcctgtgcggatgctgtggctctgcagatgccg

SEQ ID NO: 251320 - DNA, 122 bp, Homo sapiens
ccgcacctggggaagaaagaactactccataatcacagcctcctgggaagaaccaggctccgcaccccagccagagagggaatactgcacctcccagaatgtggcctgggatgctgcctttt

SEQ ID NO: 251321 - DNA, 122 bp, Homo sapiens
ggggggcaggagaagctgtaaagatttcctggtggactctgccctcgagctgcccgtggccgcgtgctggatgctgacacagcaggaggaggagcgccacgggtttcccgcgtaggaagcga

SEQ ID NO: 251322 - DNA, 122 bp, Homo sapiens
acagagcagcagtatgaagaaggaacaatgttctcagtcttctgacattccacctggcaacgaagagaggtgctttgtaattttacaatagggagaaaacacttgaatcagagaaattaatt

SEQ ID NO: 251323 - DNA, 122 bp, Homo sapiens
ctccttcatggacgtcaacagcacctggagaaccgtggaccgcctctccgccaccgcctgcggctgcctgggctgagggctcgctccagggctttgcagactggacccttaccggtggctct

SEQ ID NO: 251324 - DNA, 122 bp, Homo sapiens
gctgtttagagacccgagccggcctgaaatggcagcgcggggttactgaccacagatcagcgccccggtcgagctgcgacccagcttcagcctctgaaccccgagcccgccaccacctctcc

SEQ ID NO: 251325 - DNA, 122 bp, Homo sapiens
aatatataatacgtcaaacaaagttccattctctgagaacaatgccaaagttccattctccgagaacaatgccatctaatagaacttcctgcggtaatggagatattctgtctgtgctatcc

SEQ ID NO: 251326 - DNA, 122 bp, Homo sapiens
ccagtgaggtaggtcctattattatcccatttttacacctgaagaaactgcagctgagagcggttaagtaatttgcctaagtcacacttcaaaccccatatttaaatttgattactccagga

SEQ ID NO: 251327 - DNA, 122 bp, Homo sapiens
gggggcctccttgggctggattctaggaaagaaaaacaaccagagactttgagatccggccgtctgttagggcacagccactccaggttctctggcagagactgcggccactttgccaggtc

SEQ ID NO: 251328 - DNA, 122 bp, Homo sapiens
ggtggtggcggcggggccgcggtcagcagcaccagctccgtgccagtccgggcccggaagcgctcagcggcccccaccacggcctcccacagctcctcggggcgccccgacgccatccgcgc

SEQ ID NO: 251329 - DNA, 122 bp, Homo sapiens
ccctgagctttccaggagcatcacgtgggaaatgcctgggaaatgatgcctgccccctcccgtgtctcccccgcgacacacaaacacacacacacacacacactcacacacagcctttgcaa

SEQ ID NO: 251330 - DNA, 122 bp, Homo sapiens
cagcccctaggctgtggaataactctttagtagaattatgtagaaaggaatccaaacattcgatttcagagtgtgcgcttctgtgcccagtgtggcagcaattcactcagagagttgctgtg

SEQ ID NO: 251331 - DNA, 122 bp, Homo sapiens
cagcttactaaactttccattctacgtgggaaattagcactcagggagcaaaccaggacacgcgcgcgcgcacacacacacacacacacacacgatgaaaccaaaccgccattgtgcaatgc

SEQ ID NO: 251332 - DNA, 122 bp, Homo sapiens
cacacaaatctatctgcaaaagttctttaaaactgagaccagcgtgtgtgaaatgtgtttcgaggggggtgtattagccttattcagatttcatgatgatataattttaaacaaaggagtga

SEQ ID NO: 251333 - DNA, 122 bp, Homo sapiens
ggggcctggctgatccccctcgaacccccccaactcccaggagactgggggagggggaggcgcccacacttgcctgccgcctcactaactgggcgctgggcctggaggcggtggggaaggcc

SEQ ID NO: 251334 - DNA, 122 bp, Homo sapiens
agttcccttactaggcagtgccacataaagttatttagttaacattatgatcatggcttacgattaaattccatatgacaaacacttatatatagcagccgtcattttggatgttggttatg

SEQ ID NO: 251335 - DNA, 122 bp, Homo sapiens
agttccttttctcagaagattttacgagaacgcaactgttgcgaagaaggaacagacattcgaggttctgagtccaatgggaactcatttaactttttattttgcagcagatttcaaagtct

SEQ ID NO: 251336 - DNA, 122 bp, Homo sapiens
gtcctgcttcaagagtatttatttatgtgttgcttgtttatttacttaccttttatgagacgaggcatagcatgcaaggatgatactgttgtgtaaaattaccacttgtgaaaggatgcaag

SEQ ID NO: 251337 - DNA, 122 bp, Homo sapiens
cgcaagtggtcaattcactaaatccaaccacagtcacaggccgctgctttgaatttaccacgcggaaagcagcttttcctgtgcttcctgcttcccccggaagtgccttgctacgggaagtg

SEQ ID NO: 251338 - DNA, 122 bp, Homo sapiens
ggggtgaggggtcctctccgccgccaggcggagttgggagccggacgatcccgcacgcagcgcgaggcgggaccccggactgactacatttcccagtctccgtcgctccgcgcggcccaccc

SEQ ID NO: 251339 - DNA, 122 bp, Homo sapiens
tgttgggttcctagatcagccaatcagtgtcgccgcggttcctggttctaaagtcctcgccggcccaccgggactcagattctccccagacgccaaggttgcgggtcatggagtcccgaacc

SEQ ID NO: 251340 - DNA, 122 bp, Homo sapiens
agcccggctccgcggcgcgcgccctcccctggccacgcgagggcctgctcctagctcccgcgtgcagcgagcgcccgccctccgccccgcttcccaaccccagccaaaaaaaaaaaaaaaga

SEQ ID NO: 251341 - DNA, 122 bp, Homo sapiens
ctgtccacccaccgcgcgtccccgtgcccccacccacggtcatgtcgcgcgccccgcaggcggctgcactgcacgcgcaactacatccacatgcacctgttcctgtccttcatgctgcgcgc

SEQ ID NO: 251342 - DNA, 122 bp, Homo sapiens
tggagggagtggggcaggacgctgagcgccgggaggggtgtggccctcctgtcctgcccgcggccccacaccggccccagtcccgcccgcctcggtccctgccccgcgcgccgacgtcaccg

SEQ ID NO: 251343 - DNA, 122 bp, Homo sapiens
tgggggcctccagggaggactgggattccgaggacttggggcgacttgcatccatggttgcgggacgccaggtgagggggcttttcctctggggttggggttgtggggagaagaggttgagg

SEQ ID NO: 251344 - DNA, 122 bp, Homo sapiens
ttgggttgcttgtgaaaaatagatcccccagcttccagcctgacctactatattggaaatcgggattggggggtggggtgtgtgtgttaaagacaggggggttctagcataaaaatgtatat

SEQ ID NO: 251345 - DNA, 122 bp, Homo sapiens
ttatcaattctgttgaagaaaactactgttgggcagctggtcatatttgggaggataaatcgggttcgtattactttctcagtgccgcagtttagcacagggcttaacaaatgcagcattta

SEQ ID NO: 251346 - DNA, 122 bp, Homo sapiens
caaggccgaagttgtttattctctcgggatgaagtctcggatgggccgccacacccctggcggcccgtgggggcccctctccctttgtgcctgggtcggctcccattcagctcccccgaccc

SEQ ID NO: 251347 - DNA, 122 bp, Homo sapiens
atgagggctgcagaactgggccagccggaaagtgtgatctagtccttgatacacacaggccggcagcatggggacacgcgtggtttccacaccagccatcgctgagaccaccgggaagaact

SEQ ID NO: 251348 - DNA, 122 bp, Homo sapiens
aggagagagaaatcggcgggagggctggtgtgaacacccagaggagggagccggagtggacgtctgccccagcggcaactggacccctctggggcaccaggtgtcgggactctcctcctggg

SEQ ID NO: 251349 - DNA, 122 bp, Homo sapiens
caactgccgcgtactctgttcccgcatgttgtgatgttgaggattggcctggggaggccccggctcaggattgtgtgaggatgaggagcggccggggagacggaggaaggtaatttggtgtt

SEQ ID NO: 251350 - DNA, 122 bp, Homo sapiens
ctgcgcttgacgcggaggcctccggggtcacgagctcgggaggtgaaggtgccccgtcttcgggttcccatgccgccctggcgacctggggctccagccccaccacggactccggtgggacg

SEQ ID NO: 251351 - DNA, 122 bp, Homo sapiens
cagcatggggcagcaggatggagccaagagtgccacagtatggtggggcctaatggacagcgaggacacaggctttgggtgcccattctccaaccaccagctgaacagtcttggatgaagta

SEQ ID NO: 251352 - DNA, 122 bp, Homo sapiens
ataacaatattaaaacttcccagataaacaaaagctgggaagaccaccctagacaacatacgaagaccaatccctacaaaattaaaaaacagatattctaaaaaataaacggcaagtaacgc

SEQ ID NO: 251353 - DNA, 122 bp, Homo sapiens
ctgggctgcagctggcgtgacctccgctgtgctcctgttttcggcgagaccaatgactcacgcgagcaaaatgataagaaccacaaacagggaacgcggacgggagtgggagggagcagaag

SEQ ID NO: 251354 - DNA, 122 bp, Homo sapiens
gtgggggaggaacaaaggaatggggccgtcattagaatttaacgattttctgccattgggcgctagatggcaggagaactctagtttagggcagtggggagtttgactcaacccaagcttct

SEQ ID NO: 251355 - DNA, 122 bp, Homo sapiens
agaaactgctctaaagatagagcagaattctagttagttctctctccttctaccctgttgcgggttgaattgtctctccccatgagataggttgaagtcctaactcccactacctgtgaatg

SEQ ID NO: 251356 - DNA, 122 bp, Homo sapiens
acagcctcagacaaagctgcgccgtgtatcaattaccgagaggctgcgtgctcctctgggcggagggagccggagcgagcggccagggctgctgccccagctgataagggcccgcattgttc

SEQ ID NO: 251357 - DNA, 122 bp, Homo sapiens
gctggatccacgtgaagcccgagcgcttagaacaggcttgcgagggcatggatgtgcacgcgacctacgacgagcaccaggtcacagagtccatcaacaccgtgcagacagagcacacggtg

SEQ ID NO: 251358 - DNA, 122 bp, Homo sapiens
taggcattcaaatggtggaagtcctaagtatattatcacttcaatttacagatgaaaaaacgactcaggtgaatttcttagggtggcacaggggcagaacagagacaggaactttgattttc

SEQ ID NO: 251359 - DNA, 122 bp, Homo sapiens
ctcaggtgatctgcccacatcagcctcccaaagtgctgggattacaggagtgagccactgcgcccagccaaggaatttttaacgttagttaccttgtctgcttttgcttagcctttggacga

SEQ ID NO: 251360 - DNA, 122 bp, Homo sapiens
aggctctgtttaggcagtcaggatagctagattctctaatgcagtctcccactgcactcacgggaaagtagtagattctccaagaaccacacatccactccacccaaaaaggaacaaaccat

SEQ ID NO: 251361 - DNA, 122 bp, Homo sapiens
gaagggggtccgcatggcatcccctcggaggagacatcgtgtagctctgagctgtcctcacgtagcgtgggtgattgctttagctgtaggtagtttccgggagtcctggctgggcacctatg

SEQ ID NO: 251362 - DNA, 122 bp, Homo sapiens
gtcaagcagacccactaggaaagaggacgagacacaaggttaactgccccctcacctccgcgccactatttagaagcccaggaggtgcctcatccctgaagtcaacaggcttgaccccccta

SEQ ID NO: 251363 - DNA, 122 bp, Homo sapiens
taattagaagagtgtttgacaagagctaaaaattataaacagcagagatgcataggcaggcggccaatggaccatgtcagcattgtaatgaaatctgaactgctctgagccaaggattgcct

SEQ ID NO: 251364 - DNA, 122 bp, Homo sapiens
gccccgggcttggcatagaattccgtccttaaaggtttcctggaggtgccagctgggctgcgtctctctgctcctgtctacagataaacacagatacaggacaagcacagatgttcacacac

SEQ ID NO: 251365 - DNA, 122 bp, Homo sapiens
ggagcagtccattctttcagaaccacagcagaaagggttcccaggacccagaggcttccacggacagcactctgtgcctctcagatttgcctacatatgagaatcacctgggagcatttaaa

SEQ ID NO: 251366 - DNA, 122 bp, Homo sapiens
caggtcagattccacacatgggcacttagagctcttggatgtgagaagacacacgcacaacgttagaagctggcaacacacacagcaagcgtgtgtgcggcgcccaggctgaggcgagccct

SEQ ID NO: 251367 - DNA, 122 bp, Homo sapiens
cagcacagttttactattgcctcccactgcacgcggcactgcccagaatactgctgcaggcggctccgggaggctggtggtgcatccctaactaggtcaccaagggcccgctgctctgggtg

SEQ ID NO: 251368 - DNA, 122 bp, Homo sapiens
ttagtgtggagtttggaactgaagaagcatttaataattaacattttaaagtgtagactacggtatatcagacctttctggaacactccctagacactgaaatgcggcaaagacactgcatt

SEQ ID NO: 251369 - DNA, 122 bp, Homo sapiens
gttggttggggtgactggcattgagcagtgtctgctttcacgtctgaggggccctgccttcgccctcaggctttctgtgcgggtctctacttagatatagagacctgtttccatcctgaacg

SEQ ID NO: 251370 - DNA, 122 bp, Homo sapiens
gccccattttacagaagaggaaacggaggcgcagagagaagaaataacttgctgagggtccgaaccaggctcagaacccaggtttcctggctcctcagctgatcccttctctcctccccatg

SEQ ID NO: 251371 - DNA, 122 bp, Homo sapiens
cttcccctccccaaacagctccgtttccaggcggtgttaattaatatggatgtgtaacagcgctgcagcaatcaataagtctcactgtgggcagatctcagcctcaaaatccgattactctg

SEQ ID NO: 251372 - DNA, 122 bp, Homo sapiens
cttctttcttttaaaaaaagaacctgtactttgggtgagatgccgctgggaagccagctccgttgcctctctggcatctgtccatggtgcttgaacggcaggcaatgatactctgaaaacta

SEQ ID NO: 251373 - DNA, 122 bp, Homo sapiens
ggcacccaggccggcgagcccaagacagcatcgcagtttatttacaagcccggtgccagccgccctcccgcccgccagccacacgcgccgccgccgccgcctcctccctcctccgcgctccc

SEQ ID NO: 251374 - DNA, 122 bp, Homo sapiens
ctggggactgaaaggggtcatttttgggtggcctgacagaaatgtgtcacagagcagtgtcgccaaatagtgccccactctagttttgctcagaaggggccacatcagctgggcagggtgtg

SEQ ID NO: 251375 - DNA, 122 bp, Homo sapiens
tgcagtcgcgccggcttctgagccccagggagcggagggcacggagccgggcgagtcctgcggtgtcagaatcctgcgccgccctgacgctggggctcagggttcattccgggggcgcgcgc

SEQ ID NO: 251376 - DNA, 122 bp, Homo sapiens
ggtgccgctaagagcactttctggtgaacacacatgcccctgtctgtggtgcagacaccccggagtggaactgctgggtcggggtaagtggatcttcagctctgggcgacgctgccgggctg

SEQ ID NO: 251377 - DNA, 122 bp, Homo sapiens
catgtggccccttctctcagccctgcagcggcctctccccacccggcattgctctctgtccgccaactcacgtttcttgaacagtctttggaaaacatttctgggcagtggaaggggtgtat

SEQ ID NO: 251378 - DNA, 122 bp, Homo sapiens
atcctcttgagccctgaagttggggggaaaatggtgggagaagctgaggggcgtaggaagcgactccccagggagaaatgataaatgacagctgagctcatgcagttggggacagaaaggga

SEQ ID NO: 251379 - DNA, 122 bp, Homo sapiens
catttaaaaggtcgtgccgggccgggctttcgcaggcagtgggaccagagccgggaggggcggcggtgtcccgggaaagcggctcttggggcatccgggtcccctcgaggcgggctccggac

SEQ ID NO: 251380 - DNA, 122 bp, Homo sapiens
tggaaatgagaacaaattgctcttggcaagctagaattctaacactgaaggttttatccacgtaattaacagggtccttcaggctaccattactccctccatctagcccatccatctacatt

SEQ ID NO: 251381 - DNA, 122 bp, Homo sapiens
ctgtcacgaaagggtcgcggcctgtagccctgtgggcagccgtgccgcgatgaaccccagcgcccccagctaccacatggcctcgctgtatgtgggggacctgcaccccgacgtgactgaat

SEQ ID NO: 251382 - DNA, 122 bp, Homo sapiens
cttgatcccggactgcggtgtgttgtcaggtttctccaccgtaagatcctttttccacaccgcgctcctgggaagaaagtcagaaagtgcagcccttccttaggcaagcgggagtttcgctc

SEQ ID NO: 251383 - DNA, 122 bp, Homo sapiens
tacgtcaccacctatcttcatagcttctctctgaagggtatagggtaggagctcatccctcggtattgcaaccagagaaaggaccatcacagttggcattgactaagcatgtgctacttaaa

SEQ ID NO: 251384 - DNA, 122 bp, Homo sapiens
gacctgaggtaatcacctgcctcagcctcccaaagtgctaggattacaggtgtgagccaccgcacccagccaggaatatctttagaatagttctatagttaggaacgttgagaccaggtaac

SEQ ID NO: 251385 - DNA, 122 bp, Homo sapiens
ttggccgcggccccgcctcctgctttcgcggcacttgactggcttcccactatcagctgacggccgtgtgctcatactgcaccagattcctcctgttgctaccctgacatcttctgggccct

SEQ ID NO: 251386 - DNA, 122 bp, Homo sapiens
ggggatgggcggaagtgcccatctttcttaggacgcatgcgttaggggtttacacttgagcggaagaaggggcggaaactggaggcgggtccaaggcgcagaaagacacatgtgttactcaa

SEQ ID NO: 251387 - DNA, 122 bp, Homo sapiens
atcagtaattaaaaaaatacgttctctttacttgaaaataaccatcattgcttttgccaacgtgacatagaactgcaacagtagaactggcttcaacttatcacaacaaaaataagactagg

SEQ ID NO: 251388 - DNA, 122 bp, Homo sapiens
gagaccagttaggctactgagccaggtgagggccagcggtggcagagcaggctctggagccgtgttcttgacggtctatctgagtgattctccatgagcaacgcttagtggaccgatgtttg

SEQ ID NO: 251389 - DNA, 122 bp, Homo sapiens
cttgtacttagcatgcactcaataaatggttgcttaaaatatgaatgaactaaagaatcgcggaacagagagaaacacagaggggaatcggtctgggagtttcaaagttcgggaggggacac

SEQ ID NO: 251390 - DNA, 122 bp, Homo sapiens
attactccattgctgtgtgtgcattgtggcctccctggagagcggcgggcgggcggcagacggggccgcgctcaccgccagtctccccgcagcaggcagcagaactcggccaaggcgcgctc

SEQ ID NO: 251391 - DNA, 122 bp, Homo sapiens
aggaagagaaacactgcacgaaacagtaggggccaggctctgccagccaatgtgtgacctcggctccggctgtcactgcaggcctccagcaccttctcttctgtcctgggtcactgtatgaa

SEQ ID NO: 251392 - DNA, 122 bp, Homo sapiens
aggaggtaggcagaggccctctgtgccactgtcattactgccctcagcccagcaaagctgcggggcttgcgctggggcagggctggcttagagaaggtggatttcctgaggaaatctcagag

SEQ ID NO: 251393 - DNA, 122 bp, Homo sapiens
tttttgctttgggcaactaggtggctcatggtgccattaattgaaaaatggggccgggtgcggtggctcacacctataatcccagcactttgagaggccaaagcgggcagatgacctgaact

SEQ ID NO: 251394 - DNA, 122 bp, Homo sapiens
aggatgactcagagcccaaggggagctctgtaagccccaccgtgattcacacagtggagtcgcagagttcgaggaaaagagggtgtcacatgtccctgtgggcctcagtggaagagcaagca

SEQ ID NO: 251395 - DNA, 122 bp, Homo sapiens
ctgcaggccacgcgggctcgggagcggtttccggagtccgagctggcgctgagctgcaggcgcgagcctaaaggcttagccggggcccacgctgtctgagagatcggagcgttcagctacag

SEQ ID NO: 251396 - DNA, 122 bp, Homo sapiens
cctcagcgaggcgcgcgttcaggtgagcgctcagtcccgggcctcccgtgggagcgtgcgcgtgggagcgcacagccactgttcacccgggattacacagttgcccaggaggggtgtttgag

SEQ ID NO: 251397 - DNA, 122 bp, Homo sapiens
gtaggctggaggcgggggccctgaatatggatatccagatggactggcatcttctgcggccggtgaagctttatatctcacgggactatctacagaaactgcagggaggccatggtcctgaa

SEQ ID NO: 251398 - DNA, 122 bp, Homo sapiens
tgagataactacaagagaaaaataccgtaccgaggttcatgtagcaacttcctaaatgatcgtgtaagtcttctctggagctccattcatactcgcagcccacagtcttttgcatttggtcc

SEQ ID NO: 251399 - DNA, 122 bp, Homo sapiens
gtctgccaacctgctgtcatccatccctttcactgcccccgtattagtcctttgcagtaacgaatggagctgaaggccattatcctaagcagactaacacaggaacagaaaaccaaatacca

SEQ ID NO: 251400 - DNA, 122 bp, Homo sapiens
aggaacagtcgaacagcctgcagcctggtggccagggctcagaggtctctcttcctgttacgtgctctccccaagtcaggcctagaaagaccgtgggacagggacacactcccagctctgtg

SEQ ID NO: 251401 - DNA, 122 bp, Homo sapiens
gacgcctgagatagggctcccaaccggtcccaggccacccgcagtgcagcctggatagcgcgcttaccccaacgcctttctacgctctggctggctgcagtgtccatcgctgccaccaacca

SEQ ID NO: 251402 - DNA, 122 bp, Homo sapiens
gagtgatccatcaaggaaccaaatgcacaacctcactcaccatacagatccggccgattccgcagatggtgccgcacaaagttgtggccaggccggggcagcagtgagcctttgatccggtc

SEQ ID NO: 251403 - DNA, 122 bp, Homo sapiens
aagcttcctgtgccatggctgtgctgcgtgctaactggcccaccgtggccgagcatgaggcgtggctccctcaaatgccccttcctgtcttcattttcccacagggtcatccaggcctgatc

SEQ ID NO: 251404 - DNA, 122 bp, Homo sapiens
ggaagtgtcgtaaagccaggcccaggaaactttacccggcctaacagctgaggcgctttacggcgacggcggctgagtgagaaccttggcggctgtggaggctgccgcggctgcgaaggagg

SEQ ID NO: 251405 - DNA, 122 bp, Homo sapiens
ggccaggatgaggggctgttaggtgggcactggcccagattggccctgcctctaagcacacggaggcctgttcctgggacagagccgcaggaaggacagggcggatgcctgagtgcttaagg

SEQ ID NO: 251406 - DNA, 122 bp, Homo sapiens
gctctcagctcatgcccggaaaccaggtcccgacgccgcggtcagacggacctctagacgcgtccgcctcaatgccgccagctgccaggccgcccgtgacgcgttaagcctgcgccgcctcc

SEQ ID NO: 251407 - DNA, 122 bp, Homo sapiens
cagcctcctcctcgcctcccccgacctgcaggcgcgctaagcgctccgggcgccgcgctccgcgagggggagcagtgctcccaacccgcgaccctccgcctcagacatcacagttgccgcgg

SEQ ID NO: 251408 - DNA, 122 bp, Homo sapiens
tcttggaagtatccaaagtgaggtaccaaggcagctaaggtttggtggtcagtgaccctccgggtcaggacagcagctctttaccaactgctatggagtagttcaatagcagtgcacatctg

SEQ ID NO: 251409 - DNA, 122 bp, Homo sapiens
cacagaagattggttaataggatggtgtgtcccagctttttactgcacttgtacttgcttcgaatatttaggacccctatataaaattatcttctccaaagtcataatttccaagaagatct

SEQ ID NO: 251410 - DNA, 122 bp, Homo sapiens
ccccaggaaatcgccagcagtgaaaataagacaaccccaaactgttgcaaactgtgcttccgcttacgaagcactcctgagcggcagggcggatggggagagggcggctgcaggcgcgaggg

SEQ ID NO: 251411 - DNA, 122 bp, Homo sapiens
aactgggctctagagacggcccaggaagtcgggatgaacgggtggagtgggacaccagggcgttccaccgggctgaagaccgtctgagagctctacctcagagaggctgcccaaaagagctg

SEQ ID NO: 251412 - DNA, 122 bp, Homo sapiens
aggaagaggtgtcactggagaatccctcccagaacatgcagtcttgtcaggactgggaatcgaactccccagctgcgggtttaacggaaatcagagggatgaaaatcatctaaactcttcaa

SEQ ID NO: 251413 - DNA, 122 bp, Homo sapiens
cagctacctttcgggaatcaccttgggcagaaggcctttttgcaaaaagactcggcagcccgggccccgtaggttcggcgcatgcgcagcgcgctcggcgcccgggttccttcctccgcgcc

SEQ ID NO: 251414 - DNA, 122 bp, Homo sapiens
accgcagcggtcacaccgttgatttgatccagaaataagacggatagtaccgagcgttggcgctaggggttgtctatgtcaaaggcgaaggttggctgggaagttctgtccgtttctcttgc

SEQ ID NO: 251415 - DNA, 122 bp, Homo sapiens
gcacttcattccctctcttcgctagccggaagtcgcgagatctgaatgagtcaaagccggcggcctcggctcctcagctccacctgacagtaggccgctgatcggccgcgggtcttgtcgac

SEQ ID NO: 251416 - DNA, 122 bp, Homo sapiens
ctcccctcccgcaggccgcccattgtgtccttgcccaggaccccgagaaccaggcgctggcgaggttttactgctacactgagaggaccattgcgaagcggctcgtcttgcggcggtgagac

SEQ ID NO: 251417 - DNA, 122 bp, Homo sapiens
ctccgaaaattctcattgtagggactaagtcctctcactctgaactcacacccgtctgttcgcagcctgacctcatatcctggtctggatgtgcggcctcaccggggtgtcgtgcgcacgtg

SEQ ID NO: 251418 - DNA, 122 bp, Homo sapiens
cctgtcgcgaaggacctggcgtctagagatgtggtgtctcggtccatgactctggagatccgagaaggaaggtgcgtgtgatttaccaccagcactgtctgagcgggcacacgggccggggt

SEQ ID NO: 251419 - DNA, 122 bp, Homo sapiens
gatgagttgggtgccactccagagatagtaaaccctggaaaagattcacaaataaaaaaccgtgtgtgtgagatgttccaaaataatacatggacgtgtgagatagaggattactcagatag

SEQ ID NO: 251420 - DNA, 122 bp, Homo sapiens
aacagctccccgtcgatttccccggtctgggcgtagcggagccttttgcgctcggctttgcggaggcggtactgcaggatccggcagtttttgttggctctctccaactcgtggcgcatttc

SEQ ID NO: 251421 - DNA, 122 bp, Homo sapiens
tttttttctcatacatattcccaaccagaggctcactcggcagaggtttttcctaaatctcgcctctaactgcggcttttagagagaggcgagaggcggaaatacaaagaaaagaacggatg

SEQ ID NO: 251422 - DNA, 122 bp, Homo sapiens
actcccaaccccacgggtgggtaatgccgctggacagacctagggcgcagactgggaacccgatcagaccagcaaacctgggatccagcagcacgttacgtaaaacaggatcgcccaaaact

SEQ ID NO: 251423 - DNA, 122 bp, Homo sapiens
cagccgccaggcccaggcgcgggcgcgtcccgtccgggtgactcagcccgtgccaggaagcgggagttggctcagctctccagagctcccggacagcagccggatcccggccggctcctggg

SEQ ID NO: 251424 - DNA, 122 bp, Homo sapiens
tcacgtggccccagccccaaccccaagcccaaccccagccctaaccctaactccactgtccgctcatgagggaatgggatgaccaaggcaaatgccgtctcggcatcattacaggaagagtt

SEQ ID NO: 251425 - DNA, 122 bp, Homo sapiens
aagagtgccccaaaatgcagcagcctgaacacggagggcttctcgtgacaatgctaaacccgagcagattaggaggcaggaaatgagccccattttcgttaccttcgatcgcctgccccccc

SEQ ID NO: 251426 - DNA, 122 bp, Homo sapiens
atggtaaaacagggagattccaaactagcttttaagccttttgcagtcaccagctctcttcggtcctttacctgctcaggaagttgtttcttacttcagatgagtaagacatttttaggaaa

SEQ ID NO: 251427 - DNA, 122 bp, Homo sapiens
accctctctacttttctttttgcacttttttcccccaagaagaccagctccccacttaaacgaaatccgggtagattcaatcgcctctctctttggggactgattcctcaagactacatatc

SEQ ID NO: 251428 - DNA, 122 bp, Homo sapiens
gtgttgctttcatttttgtctgggggtggagggaatcattcctggcccatctttttagagcgcgttgccagaaaaaagtaagatttcaatgaagggtagctctttcctgagagagtgggatg

SEQ ID NO: 251429 - DNA, 122 bp, Homo sapiens
gggaaggggcgggggcggagcagggggcgtggcggagcgggagcgcggtcacgtgacgtgcgtggcgacgtgtcggccatcttgtgttgttgaggctgaggactgactggggttctgagact

SEQ ID NO: 251430 - DNA, 122 bp, Homo sapiens
gggccgctgggctcgcggagctggctttggctggtagctggaagggcaaactggggaacccgccggtgccttggcgcgcaggggcgcggcgaaggatcagcaccgcggacagcgcccaggcc

SEQ ID NO: 251431 - DNA, 122 bp, Homo sapiens
ttgtctggcctgcggccgcgctgctgtcaaccagccggataactgcgctgcctcccgacgcgccgccagccaggccacggcctcctagacacaagcgagcatgcgcagtcgccaacaacaag

SEQ ID NO: 251432 - DNA, 122 bp, Homo sapiens
aatgtctcccggcgatgaagcatggagagcccaagacacagggaaacagattgaacctctcggggttgtcaggcaggtcctgttggaggtaactgtaccgcacttgccgcagattatcagag

SEQ ID NO: 251433 - DNA, 122 bp, Homo sapiens
caatccccaaagtcaacgccttggaaaggttcgccctgggtctcagtactccggggcatgcgcgtcctgccgctcgctctcggggagctcccaccaacaccgccctcatccccagccccagg

SEQ ID NO: 251434 - DNA, 122 bp, Homo sapiens
ttagttttctttgtgattaggaagtcacattataatggatcatccactcttagcacactccgtggcacacagtagacacttaatatttgatgggggaaggagtggatggatgacaagtgctc

SEQ ID NO: 251435 - DNA, 122 bp, Homo sapiens
ggtgaccgcaaaatgaaagccagtagacgcagattttgtggccatgtcactttgaggggtcggaattctactcctgactgtggtgtgtgtcttcagccttcagaatagacacgtactcccca

SEQ ID NO: 251436 - DNA, 122 bp, Homo sapiens
tttcccccagagtgagttatcagagagagtgtgcaaccagtaatctgttagaatatgtcacgtctgtcatatttgattggtcactcagaccaaccctaatagatgcgagagtgactatgcaa

SEQ ID NO: 251437 - DNA, 122 bp, Homo sapiens
agcagatcctcgtgcgcccccgccccctggccgtgaaactcagcctctatccagcagcgacgacaagtaaagtaaagttcagggaagctgctctttgggatcgctccaaatcgagttgtgcc

SEQ ID NO: 251438 - DNA, 122 bp, Homo sapiens
cacgtgccagccaggcagacggtgctgagaggggcccttctgcagagcggaggcagagcccggagtggaggggtgagcactgcctcagggcattggcaggggctgcgccagcccaggcacag

SEQ ID NO: 251439 - DNA, 122 bp, Homo sapiens
ggggaggaccacggtaaataccagtaaaggaatcactgcctacacggtgtcacccagacacgcacagacatcaacatttttgccctaaagaaaaaaactgggggagaagaaaggggagaact

SEQ ID NO: 251440 - DNA, 122 bp, Homo sapiens
gagtaattttgatgctagcactggaaaaacatatctgttcttttgggaccagaactctaacgtgattggtgctccagggatgtaggaaacccatgtaatggtttgcctttgcatgataaagc

SEQ ID NO: 251441 - DNA, 122 bp, Homo sapiens
atacgtagggcaaccaggccagaaggcgttgtaactgcctaagattgaccaaccctaacgcgggaggcgggacgacggtcactgatttgccagcgtgacgccggtctgcgactggccagtgc

SEQ ID NO: 251442 - DNA, 122 bp, Homo sapiens
tgttcagcctttaccgatggggcaggctcggggcagctttgagacaggcagcgccaaggtcgcccagattcccgacaagctccgcgcgggggcttcctcggctccttgctgttgccgccgcc

SEQ ID NO: 251443 - DNA, 122 bp, Homo sapiens
tttttacaatgcgaacccacccagttaaccagcaaccagatcaaagaaataggacagtgccggctcccagcctccagcatgcccacctctgcttactgccccctgccccaataatcactgtc

SEQ ID NO: 251444 - DNA, 122 bp, Homo sapiens
agctgggctcccggctccttcctatccttgggggtgctcggcagccccggctgagaatgacgttaatcagggtttcctcctggctggttccaggaagattcagggtgaggagggaggggctg

SEQ ID NO: 251445 - DNA, 122 bp, Homo sapiens
gcgagagcaggatgccaaggctcctaggcctggaaacgggaaggaatataaatactgccccgagattgaccagactggtgagcagccaaagacctcttcaaagggtgtgtgtgggtcaggga

SEQ ID NO: 251446 - DNA, 122 bp, Homo sapiens
agtatggtataaaaggtaaaaatgccacacctgcctggggtgcccatcacgagtgggtctcgcgggactggaggttgctctggcgaggcagtgggtgagcgtgaggggttgcgaaggcctag

SEQ ID NO: 251447 - DNA, 122 bp, Homo sapiens
ttccctctcatggctctgtgagagagatgtgctagaggaaatgctctttctctatcccaccgctactttccccgccccctcccaagggaggaatgggtaacctaactggccagaggttgagt

SEQ ID NO: 251448 - DNA, 122 bp, Homo sapiens
ccctactttgctcggcccccacctgccccggccgcgtcctagtactcgcgccgggacgcgcggagccccaacgtcctctgcccgccccgccccagccccgcctggctggcgccgaccgcggc

SEQ ID NO: 251449 - DNA, 122 bp, Homo sapiens
gcctccgtttgcctctggatgcagcttctcctaacaggcaggtgatgctggtggagcggccgggctggcttggggttgggtgggcgtcggggaaagggcgcggcctggacgccccaggagct

SEQ ID NO: 251450 - DNA, 122 bp, Homo sapiens
acctgctgtggctgggctgtggtgcccggctggagggggtcctggggactacagacggatcgctcctggagggctggccagacccagccagagaaggactttaaaccttcagaggtcaaagg

SEQ ID NO: 251451 - DNA, 122 bp, Homo sapiens
cttctttcaggaaggcttctcagggccccaagctggatcagggcccctcctggcattctccgagcttgcctccaccacagcatttatcagaataaggagtcaaaggcatcagctctgcctga

SEQ ID NO: 251452 - DNA, 122 bp, Homo sapiens
taactgtggaggacagtgagataataaatgactttgttttctttcagatctttgatgatgcgtacaaatcccagctcagttgtgtggttgtggatgacattgagagattgcttggtgagtcc

SEQ ID NO: 251453 - DNA, 122 bp, Homo sapiens
cccttcgccattcagaaggcatcattttggggaaggcagcagccggtttttcagagccagcgagtggccctgccagctgctgagcagggcaagctgagaagggtggtggtgtgcaagtgtta

SEQ ID NO: 251454 - DNA, 122 bp, Homo sapiens
agttatcaggccccggtcgggattccacagaaccttgagtccctaaaaatgccccaagagcggacagtatgttctcttccaggacagtggcgaagcctatgaacacgtaagcaccattttcc

SEQ ID NO: 251455 - DNA, 122 bp, Homo sapiens
gttatgacctgccgaacatcccaaacataaagtatggaaccaaaacagaatcagatctaccggtcagtactctttggtggctgacatccattctgcctgcaacaaggctaacctgcacgcaa

SEQ ID NO: 251456 - DNA, 122 bp, Homo sapiens
gacaaagtgcaggggatatagaccaaccgcttgtgaaggctgctggttctgttagaagcccgctttcgattgtcagtggctttgaggcaaaggattttggaagggaaagcaaagtgattgtc

SEQ ID NO: 251457 - DNA, 122 bp, Homo sapiens
tggttaatttagacatctctttggaaagccgggagcccagctcctttattgtgttgaggtcgtcatccatggaggcggagaggtccatgaggtaatacaaatccaccgggtagtcctcagtc

SEQ ID NO: 251458 - DNA, 122 bp, Homo sapiens
cccgggacaggattggcaaactccgccctccacttactattttgcttatttttctttgtgcgcgcctgttagtttgttaaaccagatctagtccgagtcttttctcctcccttctcctccct

SEQ ID NO: 251459 - DNA, 122 bp, Homo sapiens
gcggtgcgctagcagtcaggccgcgggcgggtcggcgctcgttcccgcttgttcttcccacgccactcggcatcttccaaatgactgttgtgttgggaagatgaatgtaaataaggcgtgga

SEQ ID NO: 251460 - DNA, 122 bp, Homo sapiens
gaggctgcgtgagaaaatgccctgaagaccctgagagagacgcctgcctgtctgaggcatcgcccgtccatctgctgtccccaccaaggcctggccggctccctggcctccttcttcagacc

SEQ ID NO: 251461 - DNA, 122 bp, Homo sapiens
taaagtgtggaactcagagctggaggctgatggggccttggagtttacagatggccctgacgagactttagaaggtcaagctgctataaaagacttaaaaaaaatccaccttgtcttgcatt

SEQ ID NO: 251462 - DNA, 122 bp, Homo sapiens
tccggggtcagaaacgggctcacgcaactggggcttcgggatgcacaagtcccggcttggcgcccaaaatcagagaaagtctccagtgggacagatgtgcgtcctctgacgcccaccccacg

SEQ ID NO: 251463 - DNA, 122 bp, Homo sapiens
cccaccactgccagccccggcgggaggatgaacgccaacaactagctgccgagctgcacccgtgcacccgctggggcctggagtcagggcccactccaggagggacccactgccttcccggg

SEQ ID NO: 251464 - DNA, 122 bp, Homo sapiens
caccctgctcccaagcagcttctctaaccccgccctattctttaacctcgcccgcggccacgcccctcgccttgagcccgccctctcgccgccctgtccagtgctgaacctgaccctggtgg

SEQ ID NO: 251465 - DNA, 122 bp, Homo sapiens
aacaagtgacccatccagagcccccatgctggcctcgtagagcgagcggcagccccgatgcgtcctctcatctgggaagaatcagagccccaaagctgaaatccccgtttctctatgggcat

SEQ ID NO: 251466 - DNA, 122 bp, Homo sapiens
cggacggggggctggcagcggggagggggcgcaggtcacgtgccggcgggcgggtgggcgcgtacagtagggcgccctgctactgtactggggagtcagtgccctgttaccgggtctcgtct

SEQ ID NO: 251467 - DNA, 122 bp, Homo sapiens
tagtttttaacatttcctgagatgattatgtttttaattgattattcttctttgtggtggcgtaaattaggaataatgcaagatatctttggaaaagaataccacctgctataaaatctgta

SEQ ID NO: 251468 - DNA, 122 bp, Homo sapiens
caggcccagaaggatgggcacaagaaaccacagtccctccctcctagctcccagcaggtccgatgtgtccgttttgagcagtggcccatgcagccagctttctgccccttcactttgcacag

SEQ ID NO: 251469 - DNA, 122 bp, Homo sapiens
gggcgggggctcgtcctccaagcgcggctctgctgtccttctcccgatcctgcgaagccgcgagctccagtattcaggaagtggtgactcagataggattattccggccccggcttcccttt

SEQ ID NO: 251470 - DNA, 122 bp, Homo sapiens
ggtgcttctggccatgatctgctgtagacattgcttcacaaaaccctctgagctccataccggctggaattctgctcctactacctctctaagcagctctccctgccaactcaagtgtccat

SEQ ID NO: 251471 - DNA, 122 bp, Homo sapiens
gtagcatgggggggcagcagtaccccttcccagggcagcagggaagataagatgagggagcgcaggtaaaaggtgggcagcccaccccagcacacagccgatcccggcacacagccgatccc

SEQ ID NO: 251472 - DNA, 122 bp, Homo sapiens
caggactgagaccatggaggcggtggcggtggccgcggcggtgggggtccttctcctggccggggccgggggcgcggcaggcgacgaggcccgggaggcggcggccgtgcgggcgctcgtgg

SEQ ID NO: 251473 - DNA, 122 bp, Homo sapiens
acaaaatggggattctaatagtacctgatagtaaatataaatggtttgcaccatgcctggcgcagcaaactccataaatagtggctattgttatcctcacctcccccattaactcctccagc

SEQ ID NO: 251474 - DNA, 122 bp, Homo sapiens
tcgacgcagtagtttcttcccataataaaccccttctagataaagtcaggctggcgggagcgccctggaccgtagttcaggcccccgcgctccgcggtgggaacagttcaggactcccccaa

SEQ ID NO: 251475 - DNA, 122 bp, Homo sapiens
gatgcctcacgcaatgtcctattcccagtgcacgtctcagcctaggtgcgttgctcacaacgaccacctcctgctttctgcgcatgcttcccaccactgtgctcttccccaccctgcaagac

SEQ ID NO: 251476 - DNA, 122 bp, Homo sapiens
cggcaaccactgcggaagtcagtcagccaccgcgcagctgtgcgacggagccagaggaggcgtaaccagggcgatactggagcgcagaatgggggcgtggcctcaaagatcaaagcccattg

SEQ ID NO: 251477 - DNA, 122 bp, Homo sapiens
ggtctcagtctgtgtgtctggttcaggtgaccatggtgttcagttcagttcctcctgcctcgtgtgtaggccactgagagctccctagtctaagccggaggaggttctggtaagtgctaggc

SEQ ID NO: 251478 - DNA, 122 bp, Homo sapiens
cccatcctcctgccaaactgaattttcagcaacattgtgccccttccatttctgcatatgcgattcctccttcctggaatcccttttttccttccctccctccctctccgcttccccttctc

SEQ ID NO: 251479 - DNA, 122 bp, Homo sapiens
gccaggttaagcctcctgcgtggccagcaccccttggcaggggcagaactccctggaacccgatccttgtctccatggcgacgcgtcacaaagcagcccgcggctcccgcaagcgctgagat

SEQ ID NO: 251480 - DNA, 122 bp, Homo sapiens
tcacacccttcacctcagtcacatgggccgggaggtttcacacgcttcacctcagtcacacgggccgaaaggtttcagacccttcacctcagtcacatgggctggaaggtttcacacgcttc

SEQ ID NO: 251481 - DNA, 122 bp, Homo sapiens
ccctctctcgtgacgtcagcacccaaggaccgtggggcatcctgggtgggaagagggagacgaatcccccttgcgggctcccaggcactttgcgcatgcgccttgccgctctggacctgggg

SEQ ID NO: 251482 - DNA, 122 bp, Homo sapiens
gtggggactgtccgctgtgggtactgtctggtgtggaagctgtctggtgtgggtactgtccggtgtggggactgtctggtgtggggactgtctggtgtagggactgtctggtgtggggactg

SEQ ID NO: 251483 - DNA, 122 bp, Homo sapiens
ctcggaaccatgtccacatttaggtcaaggctggaaggccttcccttatttgctgatacacgaagatctttctctccagcctaatgcatcacaggccaacatcagaagcacagatttggccc

SEQ ID NO: 251484 - DNA, 122 bp, Homo sapiens
tataatcccagcactttgggatgggtgctgaggtaggcggatcacctgagttcagaaattcgtgaccagcctgcccaacatggtgaaaccctgtctctacaaaaaatagaaaaagtagcagg

SEQ ID NO: 251485 - DNA, 122 bp, Homo sapiens
cctgggaggctgtgctgtggctctatagcgactggggcacaagggcactgctaccccacccggagggtgcgccccaggttgtcccccgccctctgacgcagcgtcctgagccgtctgctccc

SEQ ID NO: 251486 - DNA, 122 bp, Homo sapiens
atcccagcttccccacttactgtgtaccctcggccaatttaattaatcattctgggatttcgtttactcatctgtaaaacagggctagtaattcctattaatggaattgtgggaattaaata

SEQ ID NO: 251487 - DNA, 122 bp, Homo sapiens
ggaaggaggccatccctagatcaccccaacatgaatggcccacctggtcccaggaagtaacgtggcatggcgcccaggtcttgggtggaggagatgagatggaagaagatgctgcctctgcc

SEQ ID NO: 251488 - DNA, 122 bp, Homo sapiens
gtactccctgcctctaactggtggcgcgttggcggaggccgacgaaagcctcgggtggggcgtgagcgccgcggggcattctggacctgctttgccttaggctgtgcctaattcgaaaccaa

SEQ ID NO: 251489 - DNA, 122 bp, Homo sapiens
tttaagcgataatttaaacatttgcctaattttttgaataggttgaagaccaccagtaaacgacgtgtgtaatttttttgggtcgtagcctttggttgtgacccattggtggccatagcaac

SEQ ID NO: 251490 - DNA, 122 bp, Homo sapiens
ccaccttgcgcccagtgtggccagagcttcggccagaaggagctcagtgcgccgcaccagcgcgtgcatcgtggcccccggcctttcgctggtgctcagtgtcccaagagcttcacgcagcg

SEQ ID NO: 251491 - DNA, 122 bp, Homo sapiens
agcctaaggtgctgggcgacgtgtggggcgagatcggaggctagccgggcttcacgcctgcgcccccaggtagccacggtctctgctgccccctcgcggctgcttcttgcctcgcaggccct

SEQ ID NO: 251492 - DNA, 122 bp, Homo sapiens
gcccccaggcacgtgccagatgcggacgctgtgggcatttccgctcagctgcaagaacagcgccactgaggcatccagaggctgcaacctccaccagcaacagtcacgtccgtggtgtttgt

SEQ ID NO: 251493 - DNA, 122 bp, Homo sapiens
ttgcccctcaccattcagcccttcccagcaaaagatcctactgtgcagctcaacctagctcgcagccggtaccgcgggattttaatgtgcaactgtgagctcgcaggctgttaaaggaaggc

SEQ ID NO: 251494 - DNA, 122 bp, Homo sapiens
gtactgtgatagaaagcgcccgcggcaaatgcttcttggacccacaggctgctgcgcgagcgaggatctccagtagtctctgtgtggctgcctctgcgggaacttccagcggcagtgtggac

SEQ ID NO: 251495 - DNA, 122 bp, Homo sapiens
cacatgtatgtatgtataatggtgtctttatacacatacttttaatcatgtttaagatatcgttttccagtgcatctggtgctctggagttattcttcaatatcactattcttcttggcact

SEQ ID NO: 251496 - DNA, 122 bp, Homo sapiens
aggcacagatccccagcgcccggggaacacagccacgcaaacacacacggatcacaaccacggatacacagccgcacagcccccagggagccccgcaccagcacgcccccgccctcccccgg

SEQ ID NO: 251497 - DNA, 122 bp, Homo sapiens
cccatcgcgcggatggggccgacgactgcggccgcaggggcagggacggaacgtttacagcgccccctggcgccggggaggcccggggatcgtggaggctaattcagcgggccgagttgggc

SEQ ID NO: 251498 - DNA, 122 bp, Homo sapiens
tctatgtccagctgagggagtgcgctgtagccctcgcgcgcatactcgtacaggaggttccggtttcgtttctctgtagtgaaacttctccttggactatcgttggagatgcagcctccccg

SEQ ID NO: 251499 - DNA, 122 bp, Homo sapiens
cgagcgggcagctgtatcgccgcgccccgtccgccctccaagccgcgcttgccggggtcgcgcccagtcacagggaaccgcgtgtgaggaccatcagtcagacagacagacgcaaagacgca

SEQ ID NO: 251500 - DNA, 122 bp, Homo sapiens
tcattgctggcaggaatgtaaaagagtacagccactgtggaaaccagtatggcagttcctcgaaaatgaaacacaggattatcctatgatccagcagttaagcaggtctcaatagggatttt

SEQ ID NO: 251501 - DNA, 122 bp, Homo sapiens
gttgccacaataaacttgggctgtgggcggcagagaacacgcagccttcagtctggaacccgaatccgcacgtggcaaacggagcggaccattgtggagccggctgcggggcgagctgcgga

SEQ ID NO: 251502 - DNA, 122 bp, Homo sapiens
agttttgctggaggacaaagccagccaattccagggagtaagtgagaaacagcctgttcccgtactgctgcccagtcttggccctgctgggagcagttggggtcagctggcaaataggttgt

SEQ ID NO: 251503 - DNA, 122 bp, Homo sapiens
ccccgccccgctgcacgggagccggggagagggcgctctgtccttccccagtccgcgcgccgctgtcacacatgcagatgaggagatgaagtgaacagcaggaaggagaagcggagccgccg

SEQ ID NO: 251504 - DNA, 122 bp, Homo sapiens
ctacttaagagggcaagctcagacatacataatctggagtggatcttccatgggaaaacacgtatataacagaaattattggcaaaactataagtatggtctacagagtaagtaataatatt

SEQ ID NO: 251505 - DNA, 122 bp, Homo sapiens
ttcctgaagggacatgtggaagtaatagcgagcggtgcagtcacccaagctgaagatgcacgagagcgggtcgcgtagaagaactgcggcaatgggacccccagcgcagccccaggcgccct

SEQ ID NO: 251506 - DNA, 122 bp, Homo sapiens
gtccatttaaaatggagtacctgtatgtatttggattcagctttaacttggagataatcccgagtcatgctttaaagaagttccttctgagatcaggagctcaggtgtttggtgaactctgg

SEQ ID NO: 251507 - DNA, 122 bp, Homo sapiens
ttgggctaagggggtagcccacatcctattgagggtaacccattctccgagtttgagtaacggttaacagtggcattctgaggtgggaaggcccactgtctagggtcctatactgggaattt

SEQ ID NO: 251508 - DNA, 122 bp, Homo sapiens
gccgccagagccccggcggcggcgccacccagaacccgcgccgccacccagaacccgcgccgccccgcccggattcccccgggtcagcgccctcaacccgcggcaaccctggtcccacagac

SEQ ID NO: 251509 - DNA, 122 bp, Homo sapiens
atgctggtgcacaaaccgggctgtcatatcctgtcccatcctggagggagcgcgagggcccggctcctctgggagtggcggcgacagggcgtcgtgcaatggacgccagcaccaggggcggg

SEQ ID NO: 251510 - DNA, 122 bp, Homo sapiens
gagcgccaagagagagtccgggaggcagatggcggagctgcagttggaagactggggaagcgggtcctccgagcaaagcgcagcgggcgccttccgtgcttagtttatacccggctcagcag

SEQ ID NO: 251511 - DNA, 122 bp, Homo sapiens
cagatgcttgcacaccttgtttacagctcccggtaacgacacaggtaacaccggaagtgacgtcagagcaggaggccgagagacaacttaaatggcgatccgaagttaccataggaacctgg

SEQ ID NO: 251512 - DNA, 122 bp, Homo sapiens
acgattactcaataccctacaggatatacatggttaaccatttgcatttgggcaaataggcgttacttttcaataggaagtggcaatccagaacttgcttttgggcaattctagtagctcac

SEQ ID NO: 251513 - DNA, 122 bp, Homo sapiens
ggaggaaagctcttcaaatcctgatcactaagcatttacctatagcttatcaatatcttacgaaccaaaagccagtttatcttctcatgtcaccccactttcttttttgcttccccacatca

SEQ ID NO: 251514 - DNA, 122 bp, Homo sapiens
ctcactggtcctccggccagcctctccagacgggcactgtcataaccacattttacagaccgggacactgaggctcagtgacacaagctccgaggtcacaccatgggaaatcacaaacaggg

SEQ ID NO: 251515 - DNA, 122 bp, Homo sapiens
tataaggggctcattgggtgtagaggaagatgaaatactgagagcggagcaggctgggggcggcctggatctcctggtgctttgtatatggatgcgacgcacacgcatgcctacgggcgacc

SEQ ID NO: 251516 - DNA, 122 bp, Homo sapiens
gatggatttcatcctcaccagtgtgtgtggcctagtgctcctcttcctattgctcctctacgtccacagtgacccaccctcacccccgcccgggaggaagaggagcagcagggaggtaagga

SEQ ID NO: 251517 - DNA, 122 bp, Homo sapiens
tgggcggccaaggaagagaaggcggaggagtaggggaggttctggacacggaacggccggcgcactcagtagcctttaaggccttgctgcctccgacctcccgcccggtggatgctgctagt

SEQ ID NO: 251518 - DNA, 122 bp, Homo sapiens
caaagtttatgacgcgccgtggtttttgattctggcggaagccttcccgagtcgagagaacgtgcaggtgattagcaccggaggggccttccatgtttaattggttttctgtgttggtactg

SEQ ID NO: 251519 - DNA, 122 bp, Homo sapiens
ttactctccatttgaaatctgtgtgtgttccaattaaaagtattctttcagaccaatatacgtgaaaagtggagcatagtgcagtattatgtaggagaagccaaacaagcaaacaagtaaac

SEQ ID NO: 251520 - DNA, 122 bp, Homo sapiens
tttaaagttattctaacacataaaaaccttccaccaagctctttgacacacacaaatcctcgaaggaatgattttttgtgtgaaatggttatagctgtcaatcacttattctctgtgtcatg

SEQ ID NO: 251521 - DNA, 122 bp, Homo sapiens
taacaagatcccaatgcgtccgaagcagacaccggccctcccgccgaggccgcctcgaggcggaagccacaagctgctctcaggacgacacccctgggtcctgacactctgtcccccacctc

SEQ ID NO: 251522 - DNA, 122 bp, Homo sapiens
cattgctgcgagacatggcagatacacacaccagtcccagccctccaccggagactgctgcggcctgtcagcaagtacacaaagcctgcatgaatcaggtgattcacggccagtgtccccca

SEQ ID NO: 251523 - DNA, 122 bp, Homo sapiens
ctgggacagagccagcgtcaaggactcagagggtgtcctggagtctcctaggacggaagacggcggccccaggtgggaaagactcagaccaggcctgcgcgctccaggtcctgcggcaggat

SEQ ID NO: 251524 - DNA, 122 bp, Homo sapiens
gcaaagcttcttctactagttcttctggtaggcttcacttaactgggacttttactctagcgtgaggagggggcctcctaaggaaagtcatgctgggtaaactgtgcgatgttacagagcac

SEQ ID NO: 251525 - DNA, 122 bp, Homo sapiens
ccagttctccatcctggttccccaaattagcttccgagtgacacccccaggttcagacgtcggggagacttcagcaccatggagcccttgatctgtgtagagcccagggaggctcacagtgt

SEQ ID NO: 251526 - DNA, 122 bp, Homo sapiens
tgcggaaaaggctgtgattgacttgaacaaccgttggtttaacggacagccgatccacgccgagctgtcacctgtgacggacttcaggggagcctgctgccgtcagtatgagatgggagaat

SEQ ID NO: 251527 - DNA, 122 bp, Homo sapiens
gcacgcgcacttcgcgcgcctctgttcccggacggcccccagagcgggaacgccaggctgcgagctgctggcacctgtctgcctgccagacagaccctgggctccggcctcgtgccggcacg

SEQ ID NO: 251528 - DNA, 122 bp, Homo sapiens
gggctgcggagggggaaggggccacgcgggccacggggtttaacccctgactccccgcgacgccaagaatgcaggagggcagagttgagggagacctcaggtggaactttcaggtggggaag

SEQ ID NO: 251529 - DNA, 122 bp, Homo sapiens
tgtaggagttgagccctcggggcgtagagatgcacctgatattcctcctgcccgcagctacgattcatgtgtttgcacccaccgagctgctgcgggcagcctccccagcactggacccagca

SEQ ID NO: 251530 - DNA, 122 bp, Homo sapiens
ttcacacacgggaccagacgcttgctttagttgacgcatgaagaccggtccggtcttttgcggagaaaagtggttaaaagctgacttgtgggccgagaaactgtggcaccctaatgagctag

SEQ ID NO: 251531 - DNA, 122 bp, Homo sapiens
ggtggatgcactccggttgcccgagctctgcacacgatgccgagtctccacgcctgccgccgtctaagtgactgacagcccggagcatcccggacatgccaccgtgagccgggctttattcc

SEQ ID NO: 251532 - DNA, 122 bp, Homo sapiens
tcaaacctgggatgcagctgggacagtgtcagctactaccccagcctccccactcacccccgcactgaaagctccccctggggcttcgtgctttcctgggcacttcccttcccccatgggat

SEQ ID NO: 251533 - DNA, 122 bp, Homo sapiens
ctgtccctggctgtggtgttgtttctctagtcagttcccctttctgtatttgagttctaccgtcagtcctggcattatttctctctctacaaggagccttaggaggtacggggagctcgcaa

SEQ ID NO: 251534 - DNA, 122 bp, Homo sapiens
ggctccacgcatgtgcggtggggagaccctttcggccgtgtttgtggacctctgccgcatcgcttgtgtttttcttccccaacacaggtgcctccacctcacatttcaagcattcctgccgc

SEQ ID NO: 251535 - DNA, 122 bp, Homo sapiens
aagtggcggaggatcatctacgtttgcttgggcagttttctctccttttccctgtcttttcgggttttgccttccccgcgagccccgggcattctagtggctgggggaagctgtcagctccg

SEQ ID NO: 251536 - DNA, 122 bp, Homo sapiens
agggagaccctgtcttaaaaaaacaaaaaaagaagaagaagaaaaagctgtgtgttgtaacgtcctgttcacgaattcttatgcaaatgaggtgattaataaaatagtgtgtaggactggtg

SEQ ID NO: 251537 - DNA, 122 bp, Homo sapiens
atgtgaacagaaaatgacaagtcacagatgggaaatagctcacagccaacagccaaggatcgaaaccaacaagaagcaattcttgtagctcccactggtagtcaagaatgaaagagaagctc

SEQ ID NO: 251538 - DNA, 122 bp, Homo sapiens
ctgccgcagcaccctggggccatcagcccacagacttgagccctgtgctttagagggcagcgctcctggaccagggagacatttccagctggagccatgggccccttgaccatgatctggca

SEQ ID NO: 251539 - DNA, 122 bp, Homo sapiens
gagggattgtgggtgttccccaggcgcgtgtcctggaaccgggtgttaaatattcagatccgtgcgccccgcgtgaagggtggaaaggcacggcccccaggctctggggcttggagattggt

SEQ ID NO: 251540 - DNA, 122 bp, Homo sapiens
catcaggaggcttggtgatgaaaacgctctggccacagaggaagaccacaaaagcaaggccgacgcagacagtggggatcgcataaccagtgacaaagctgacgttctgctgaatataggca

SEQ ID NO: 251541 - DNA, 122 bp, Homo sapiens
aacgtgtctccagtatccagcccagcatgcacagtggtccgcgtgggtggcctcacatcccgcctagaatccctcctccacagacacagagacccaggctcagggcggggctgtgacacacc

SEQ ID NO: 251542 - DNA, 122 bp, Homo sapiens
tcctgacttcacattacagcaggggtccccaacctccaggccatagaccaatacacagaccgataccggtctgtggcctgttaggaagtgggctgcacagcaggtgactggcaggtgagcaa

SEQ ID NO: 251543 - DNA, 122 bp, Homo sapiens
gcaatccaactatcactcatcttcaaaaacttgggtccgaaataaggtttccattttccccgcatatttgatgagtcaggatgatcactcacagtagaaggaggaggggtaagtgtgcacag

SEQ ID NO: 251544 - DNA, 122 bp, Homo sapiens
tttcagcttcagcccatgttgttggagatggaaagatggaagcaggacagagaaactggtcgcttttcaaggccctgtgagtgccttgttgtttgtgtggccccagacctcagagaaaggat

SEQ ID NO: 251545 - DNA, 122 bp, Homo sapiens
agttttagagctggttcttaccatctgccagcctttgatggcactccacttgcttcatgtcgtgggaaagatgctttccaaagtgttgagttcagtccagggcagcttccctgttctgttaa

SEQ ID NO: 251546 - DNA, 122 bp, Homo sapiens
cagaggcggtgccaaggtggcccgagtcctgattggtaggcgcaggcgggcgggcacgggcgaagcgcactgggctggccattggctgcgtgggtctcggctgaagtcaggtattggctgcg

SEQ ID NO: 251547 - DNA, 122 bp, Homo sapiens
gcccagcactccagctgtccccccggccctcactggggcctgctttgtggcacccggcagcgctaaggcgggtgggcaggaaacccaagctgagaggacatcaattatttatggggctgctt

SEQ ID NO: 251548 - DNA, 122 bp, Homo sapiens
ttccacgcctgccacaccggggaagttacctccggggcgctcacagacagggcgccctgccgggaatcccaggttcaaccagaattgtccctttagatggcgcgggcaccgccggcctggcc

SEQ ID NO: 251549 - DNA, 122 bp, Homo sapiens
taacaaaatattagcaagtggaatttaccaacatataaaaagaattatatacaatgaccacgtgagagttatcccagggatgcaaagctggttggatattcacaattaattaatgtaatcca

SEQ ID NO: 251550 - DNA, 122 bp, Homo sapiens
catgagtcagacagtccagaggatgttggtggctgcgtcctgggcttgtgccttcaccaacgcactgacccacactgtggccatgtccacgctcaacttctgtggccccaatgaggtcaatc

SEQ ID NO: 251551 - DNA, 122 bp, Homo sapiens
gggcactccagatttcccaagggcctgcttattaacaccccagccttgcgcttctcagagcgtatgtcctgtctttcctctagatggcactgtggagcagaggcgactgtcttagggacccg

SEQ ID NO: 251552 - DNA, 122 bp, Homo sapiens
aggtggaaggggacttcggttccgcacgtcgtcatgttgttggatggcaccagtatgtgacgttcctaggaacttagctctgaggaaaaaacaaagcaaaccggggaagtacgtagccttga

SEQ ID NO: 251553 - DNA, 122 bp, Homo sapiens
gtccccttggcaaggccactgtctggagtctggaacacagaaaaccattcctggaccctccgcactgccaagtctgtaaaagagcaggcgcctagcctctctccttggaggctcaggccatg

SEQ ID NO: 251554 - DNA, 122 bp, Homo sapiens
aggactcttcacaaactggaagcttgacatcctgattctagactggtggttatttgtagacgttcttattgctggcagacaatggaatgaggtgtgaaaggttgccccgcctacgtacaata

SEQ ID NO: 251555 - DNA, 122 bp, Homo sapiens
gcgcgctgggcactggcgggcgggaggggaggggaggggcgggcggagccgttaccagggcgcccggccctgccccgggcagtgccactgtccgattccaggatgccgagtggctgccggtg

SEQ ID NO: 251556 - DNA, 122 bp, Homo sapiens
gtctctaacggccgtttcttggttaatcttaaatcctctttattattgcgagcttcagaccgcttgggggtctggatctattaataagattattcggggcctagtgtcctgtagtatctgtc

SEQ ID NO: 251557 - DNA, 122 bp, Homo sapiens
aactcttctacaggtgcagcctccttgtctcaatcccttcacaatgggcatgttagttcacgctcaaagctgcactgtctgtacccatgagatgaagcaaaaggtttaaggatagtaaatgc

SEQ ID NO: 251558 - DNA, 122 bp, Homo sapiens
tgagggaaggtgagaggtgggtaaaccatgcctgttgttaacaaagaacagggcccaaaacgcccccaaatggctgtcttcctctccctcctgccctcagccctctttggtatgtgcatgta

SEQ ID NO: 251559 - DNA, 122 bp, Homo sapiens
tgttgggattacaggcatgagccacaacatccggccttagtaactgagttttaactgcaacgaaaaataaaccaaattagaatgagtatccctattgggtagcctccaggagcgcaagccac

SEQ ID NO: 251560 - DNA, 122 bp, Homo sapiens
gtcaggcatggtggtgtgtgcctgtaaactcagctactagggaggctgaggcacgagaatcgcttaaacccgggaggcggaggttgcagtgagctgagatcgcaccgctgcccgctctccag

SEQ ID NO: 251561 - DNA, 122 bp, Homo sapiens
actgactccccacacactggaactgtttctactccctctgcagcccaggcagacttcctacgttaagaaaagagactccaggtctttaaaaatgcgtaacagagaaaagcacaagaaggaca

SEQ ID NO: 251562 - DNA, 122 bp, Homo sapiens
ggggtccagccccaccccccacgcctgtggattctcatctgcgctcgggtcccgcgttggcggaactgtggaagcttcaggccacccatccgagtcacgcggactaggatgccccgccccag

SEQ ID NO: 251563 - DNA, 122 bp, Homo sapiens
cgggccaggctgccccccgtttcccttcgtctataccaccctccacctcggaagcgaggtcgcagtcgcccactggacagtttgaaggagaccgcagatttgcacccgtttcccatgggccc

SEQ ID NO: 251564 - DNA, 122 bp, Homo sapiens
tggctgcaaagggaccttcctcggcgggctgcaaatctccacccagctccgcactggaggcgtccccttgggctggttacttttctctaaggctcggtttactcttggatatattgaaatag

SEQ ID NO: 251565 - DNA, 122 bp, Homo sapiens
agcccttccgctgtgccccgccctgagagcagagtttcggacgctgggaagcgtgctgtgcgaagcgctctcggggtctttcctcagcctcgaaaactgggctctggaatgcctttgtacat

SEQ ID NO: 251566 - DNA, 122 bp, Homo sapiens
tctcttacatggggagcccacgaggggctgacaggccaccaggatgtacagatccctgcccgccttcccaagttctgtggtaaatagagggggttgagggagtcaggttccagggcaaacct

SEQ ID NO: 251567 - DNA, 122 bp, Homo sapiens
ccttccgctcgcggccgtggaacgaggtagaggaccggcttcgggccattgtggccgacccgcgggtgccccgtgccattaagagggcctgtacctggagcgctttggcgctgagtgtgcaa

SEQ ID NO: 251568 - DNA, 122 bp, Homo sapiens
aatgcattaggaactgatggtgactgattcttatccaatcagttcctgatgcagtatctgcgacatcaaaaactatgtaataattatactaaatatcatttatttccaaatgcaacaacttt

SEQ ID NO: 251569 - DNA, 122 bp, Homo sapiens
gttcgcttaagggcgaaagctaagaacctgcaaccttcccgtctctttcctaccacccgccgccgttaggaatcttcagatcccgctgtaaagaatggaggaaggaggagccatttatcctt

SEQ ID NO: 251570 - DNA, 122 bp, Homo sapiens
tggggccgcggagctctcctgcgcagaccaaaagcccagagccgcagcggtggaaggcttcgcgtccgaacgtagcagtgcttccttgttgtcactagagggcgaccgcgcgtaacaggaaa

SEQ ID NO: 251571 - DNA, 122 bp, Homo sapiens
acagtagccacagactatgacaacattgagatccagcagcagtacagtgatgtcaacaaccgctgggatgtcgacgactgggacaatgagaacagctctgcgcggctttttgagcggtcccg

SEQ ID NO: 251572 - DNA, 122 bp, Homo sapiens
ggtaacatggtgagatctcaactctacaaaaaatgcaaaacacttaggcatgctggtgctcgcctgtagactcagctacctggcagactgaggtaggaggctgtagtgagctgagaccacac

SEQ ID NO: 251573 - DNA, 122 bp, Homo sapiens
tgcacgtgtggcggtgaccatcaaggtttctgacggatcttgtcaagagacttaagtcatcgtcacagtatttcagacgaacgcagtgatgtggccaggtgcacatgctcacccaccatagt

SEQ ID NO: 251574 - DNA, 122 bp, Homo sapiens
tggaaagccggctgcaagatggcatgaaccagaggtcagcggccaccactgagagttcatcgtattcgcctctgtaaagaataagcctcaagcagtggttctgcaggagcggttcagcatca

SEQ ID NO: 251575 - DNA, 122 bp, Homo sapiens
agggacccccccagacattttttccaattgtcgggaatgatagaggaggatctggggatccggatgagaccaagaagtggacccccggagcctccagaatatttttattgattttttgaaaa

SEQ ID NO: 251576 - DNA, 122 bp, Homo sapiens
ttcaagttccacatttgtcctttaaataatcgaccctccctaaccctgtccccaaaggctcgtggaaattagggagggggttggggagacggttccagaaacaaaacgctttcctccagcac

SEQ ID NO: 251577 - DNA, 122 bp, Homo sapiens
catctccctaatttacaaagaggaaactgagccacattcccaaggtcacataactagcaacgagtgaagaagccaagattagtgtccagactgaatcattccagacacctgtgacatagtca

SEQ ID NO: 251578 - DNA, 122 bp, Homo sapiens
gagtcatcttttaaactctgaactggataacgtgactccctgtgcattcctgggctctcccgctcctcccccgccgctgtcccctgggaccggcctgtctctttcactctccccagggccct

SEQ ID NO: 251579 - DNA, 122 bp, Homo sapiens
cgggccggcggcgagagttgagggtctggtgcgtggaagtgagcgtgcgggcgcgggagccgccgccgggcgccgcccgccggactcggcctccctcccggcgccgtcccggcctgagcggg

SEQ ID NO: 251580 - DNA, 122 bp, Homo sapiens
gatggaggctcagagctgtgtgctgccaggtcaggagaagtggcgggcagagcgatgggacggtgggctcagcgaacgtctggaccagcccgccgcctgccagcaagaatgcttctctctgc

SEQ ID NO: 251581 - DNA, 122 bp, Homo sapiens
ttcttataaagtgattcctgccagccagggctttataaggatgaatatcaattcctgactcgagtttctctctctctgccttaaggttagacttcttcccctaaaaggggctggcagtagat

SEQ ID NO: 251582 - DNA, 122 bp, Homo sapiens
ttggctgagacaaaggggcctgagaggtgtatccgtgcacagagctccgcaccctgaaaccgctcagggcatggaccgcggtgacgtgccgcctccctcccagtgcccactgaagcgtcctg

SEQ ID NO: 251583 - DNA, 122 bp, Homo sapiens
gagtgccccacagacccgctggaccagcctgctgcgggtcctggccaggggtctggctaacggtgagggctgactctgaactgtctctcagtctccagaaagtgttcaagcctgttgtgttc

SEQ ID NO: 251584 - DNA, 122 bp, Homo sapiens
cttttaagtctggctctggcgttgccctttgccaagcccctcctcctcccccgccggggccgcgggcaggtcgccgggctagcagctcattcgccaccaccctgtcctgccaggccggctcg

SEQ ID NO: 251585 - DNA, 122 bp, Homo sapiens
ctcctctgccaggcaaacagctctgccctcagcccacctcctgtaggggagcacgggtcccgtctttcttgtccaatttctcagccggggcactgagacgtctttgttccctcaccctaagc

SEQ ID NO: 251586 - DNA, 122 bp, Homo sapiens
cgcgctgggggcgggctgcagcgggtgccgccgcgcggcctttctgtgcttccaccccttcgcagtgcccaggcgacaacccactgggcttggaaccgaaaagacttccccagctctgtgtg

SEQ ID NO: 251587 - DNA, 122 bp, Homo sapiens
tttagtaaaggactttgctctctgcgctcatcacggctcggtgagttcctagtacaacgtcgtgaattagagagcacagtgtttctcctccgaggtgctagatgtgcggtgagagggtgtag

SEQ ID NO: 251588 - DNA, 122 bp, Homo sapiens
tcctcaggcacatctccctaacacttcctgccaccttccgaggcaggaacagcacccggacggactacgagtaccagcactccaatttgtatgccatatcaggtatgtggagccaccgctgc

SEQ ID NO: 251589 - DNA, 122 bp, Homo sapiens
tgggggggaccgcccctgcacctcggggacgtgaccccccccccaggctgacccgttcctcgctctgtcgtccccaggtggaggaggagctgacgcacctccagaagaaactaaaagggaca

SEQ ID NO: 251590 - DNA, 122 bp, Homo sapiens
ctctgctccctcctccctcccctgagagtgaggacctcatccgaccatgtaattaccattcgcttgctattaaagagcctttcaaactctggtggtgtttgcctctttttttctgcctccac

SEQ ID NO: 251591 - DNA, 122 bp, Homo sapiens
taaagatcaaataggatgggcactggccccagcctcacatcgggcccccttccccagacacgggcccatgagatagagaccagggaactttctgggttttgggactctgtgttcaattcata

SEQ ID NO: 251592 - DNA, 122 bp, Homo sapiens
tatctataggaagggctaaagtaacattttggactttgggtgacatgtgtttcctgaaaacgagggagcaagaattctgttgccctaaaacttggcaggaatagttttaatctgtgagtttc

SEQ ID NO: 251593 - DNA, 122 bp, Homo sapiens
caagcccccgcattaaactggtttgggcaaaacgacaggcattgctgagagccgccaggccgcccgccagctgcgggtcccctgtaggcagagccctgggtcacacgcggacgcggtcccga

SEQ ID NO: 251594 - DNA, 122 bp, Homo sapiens
ctcatccctcttaaaccatctgtacccacacaaattccgcttgataagctacaactgccccgtctgataaacgtaactcagaaatgattaagtttctccccagaacaatgtgcattaaaaat

SEQ ID NO: 251595 - DNA, 122 bp, Homo sapiens
acagctttcctaaaaccacatgctagttaagtgccaataatatcattcagacccaaagaacgtgtgctggctctgcagagtttttgtttattcccttgttttcgttcttgccgttcttttgg

SEQ ID NO: 251596 - DNA, 122 bp, Homo sapiens
tgagacgcagaagtagtcaagaaatatcactcgggtctcaaggaaggcgggagatgaagccggtaccacagaaagccgagcttcccggtgaaaacagctctccccagagaagacccagctct

SEQ ID NO: 251597 - DNA, 122 bp, Homo sapiens
atctcggctcactgcagcttcctcctctcaggctcaggtgatcctcccacctcagtcttccgagtagctgggattaaggcgcacgacaccatgcccagctaatttttatattttttgtagag

SEQ ID NO: 251598 - DNA, 122 bp, Homo sapiens
attctggaaggattacaagcatccccattcacagcccccattcctatgtaaattctagtccgaggactggccctccagttcccagccttctggctgctttgccctgtttctttcctttaggc

SEQ ID NO: 251599 - DNA, 122 bp, Homo sapiens
aaagtgacaatttggtttatccaataatcagattaataaaggtataccatttctaaggcacgagagcaggaatcttaagctgaggtagccctgggactaaatatgccatcctcttgtatcaa

SEQ ID NO: 251600 - DNA, 122 bp, Homo sapiens
cttccttgctctggaccccttaggtataccctggaagagctggggtgggggaggagggagcgtgaaggtagtgactcctgaacacacccaggtggaaccatctttggggaggagaggcccgt

SEQ ID NO: 251601 - DNA, 122 bp, Homo sapiens
ggcctcccgccactcgccttcttagagttttattcctttccttttttgagattttttttccgtgtgtttattttttattatttttcaagataaggagaaagaaagtacccagcaaatgggca

SEQ ID NO: 251602 - DNA, 122 bp, Homo sapiens
cggtgctgcttctgctgtggccggcgcccgaggcggacggaacgtccttttttcttgagacgtggttaattgcatcaggttggatgtgaataatccggtacctgtctgaggaaattttgcgt

SEQ ID NO: 251603 - DNA, 122 bp, Homo sapiens
gtgggccacggctagagtgtccgtggaggtggccgacgtgaacgacaatgcgcctgcgttcgcgcagcccgagtacacagtgttcgtgaaggagaacaacccgccgggctgccacatcttca

SEQ ID NO: 251604 - DNA, 122 bp, Homo sapiens
ttggccggggagccggaggggcgggcaatttgggatcgacagtgactcgcgactggtcggcgcggcgaaagcagagcggcgcgccggttccttggttcctgagggcgatggcgcggggtggc

SEQ ID NO: 251605 - DNA, 122 bp, Homo sapiens
aagcaaatccattaagatcttcctgcaaaaaaaaaatgtgttattgagaaagccctggtgcgataggaaggaggggaacctgcactagctctgggacatttgtggcatcagttcccctctct

SEQ ID NO: 251606 - DNA, 122 bp, Homo sapiens
caggtgagtcctgggctggccggtttagccctggggaggctgcaccttgcacggagctggcgggagccaagaagggggcctggctcctctttgtgaaatgatgtgtctggaataacaaaggg

SEQ ID NO: 251607 - DNA, 122 bp, Homo sapiens
ccctcttggttccgagccggggtccttgctttttggctggtgtgttggggggagtgtctgcgcctccccgcccacagggctcccaggactgctatctgggtctcgtccccgcccaacaggcc

SEQ ID NO: 251608 - DNA, 122 bp, Homo sapiens
actgcaggtccaggaggcccccaagccaaaattagcagaaggaggtggggcacattttcacggggctggtggatgttgagatggagtcagtcattttcactgtaattcccttagaggaaggg

SEQ ID NO: 251609 - DNA, 122 bp, Homo sapiens
cctccctacgaagcagacaggcttgtcgatgaattgagctagcatgccggcgttgatgcgcgacctgggcaagtccatcatgtccaccatgattatggtccaagactgcggctggcgggaaa

SEQ ID NO: 251610 - DNA, 122 bp, Homo sapiens
cccttggctctctggctccgctccggactgctctccaagtctgtgctccggctgctaggtcggatgcttcaagcctgagccgtgagaaactgcctgcagccgcccggccaacagcagcggcg

SEQ ID NO: 251611 - DNA, 122 bp, Homo sapiens
ctgaaagtctgtggctcttttacagagaagcagcgttccagggactccgttcccgccacccgttcagcaaccctctacacctggacccgacctcctcgccttggaggaagaatataagtaag

SEQ ID NO: 251612 - DNA, 122 bp, Homo sapiens
gtaaagaaatgcaagtacaagctatgcagagatgcagtttctcacatatcagactggcagcgattcaaaagcgcgactgcggtggaggaggccgtgggaaactggctccctcagacactagg

SEQ ID NO: 251613 - DNA, 122 bp, Homo sapiens
ttatggacggagctgaagacagcgccacttcccgagctgctgaaaccgcttttgggttaccgcgggcaacagccgtgttttctttttgatgtcctttacaatggattacagccacttgttga

SEQ ID NO: 251614 - DNA, 122 bp, Homo sapiens
tgcctccccatctttaatttctcacatttatttgtgtgcttggggcaactgggcagaactcgtcttgcagtgagcggggagaagtgggacaccccagtgtgctggtgatttggccctggctg

SEQ ID NO: 251615 - DNA, 122 bp, Homo sapiens
taccaacgtctcctcctaaactggagcgccaggtcgtgtataaggagtcaatataggaaacgcagggctggaacctgaatgcaaatccatcagccgcccccaaatcgcgcaccaagggagcg

SEQ ID NO: 251616 - DNA, 122 bp, Homo sapiens
ccacgacggtgcgggtctcgggcgttctggagatacgtaggggtgaatttatgtttccgacgattgcatctggaggggtgtgtaagactctgtggctgaagaaagctattacgcttcttatg

SEQ ID NO: 251617 - DNA, 122 bp, Homo sapiens
tgccctcgatgagcaggagtttgttacatggcattgtgtatcgttacctaggtccctgagcgagcgcctgcttgtcacctctaggtgtcgcttggtgaggggagggcctaggcctaagggga

SEQ ID NO: 251618 - DNA, 122 bp, Homo sapiens
aaaaagaacgtgagatattagagagaaacgattgtctcaaaccgaaacagctctcctacgcgaaccccagatattcctgacttggagtagctaagattttatcagcattctgggaatttgca

SEQ ID NO: 251619 - DNA, 122 bp, Homo sapiens
ttctgttttttgcatgcaaatggtccgttcatctcctttgactagttatcaacttaccttcggatatattaactttatgtagcagttctttctatattgatggtgatgttctcttttccaat

SEQ ID NO: 251620 - DNA, 122 bp, Homo sapiens
tgtgacgcaacccctctggaccctagcgctttaacagaaaagtggggccaatggtgccctcgaggcggggcgctgtggaggttggcccagggaactgcacaaaagtgcccagcacctgcctg

SEQ ID NO: 251621 - DNA, 122 bp, Homo sapiens
gaccgatcaccgctcctgcagcctcatttgtttccggagagacacccacaagccagcccacggagagtctggactcgcccgccccagcacccacgcctcccccgcgcccggttccagcgccg

SEQ ID NO: 251622 - DNA, 122 bp, Homo sapiens
tgtgcacgcttcggggataattacgaggtgccgggaggtgcccacccaccagcctggcgtcggggtgcccctcacctctgcggttgggctgcatggactccccgcggcggctggccccgtcg

SEQ ID NO: 251623 - DNA, 122 bp, Homo sapiens
tccagctggaccctgggatggtgcggggctgtggctctgggaagtatcttggcctgcacgcggtttacatcattgggagcacaggcctcgccctccgaactacgaggcccagagcccttcgc

SEQ ID NO: 251624 - DNA, 122 bp, Homo sapiens
ccgccccgcaggaacccccccacagcaatcccccacacggggaccccatgcacccgccgccgctctgggctgacactcacgtctctcatgttggtctggaccgcggcccggtccatgttgta

SEQ ID NO: 251625 - DNA, 122 bp, Homo sapiens
ctgttggcgggtgctggaaggccgggctatggaagtggatgtccatggcctgctgagcctcgtgtatcatctcaaggaagggctggaacatggcgtggaagttcaggggctcgtacggagag

SEQ ID NO: 251626 - DNA, 122 bp, Homo sapiens
cactgaattagaaaatgttgcacattatatctcctcttagatatacacaaagcattttagcgaataaaagacttggagaaatcgggcagaaaaagatatcagatgcttttctcagtgttcac

SEQ ID NO: 251627 - DNA, 122 bp, Homo sapiens
caggctagaccggggcctccctgagctgtcataagcaggacaggacgtgggggcgcgccacggagccgcctccctcccctgcccatcctgcctgctacaggaagggcacacccggagaaagg

SEQ ID NO: 251628 - DNA, 122 bp, Homo sapiens
ccagccaccttgtatgaggtggaagagctggagacggccactgagcgctacctgcacgtacgcccccagcctttggctggagaggatccccctgcttaccaggcccgcttgttacaggtata

SEQ ID NO: 251629 - DNA, 122 bp, Homo sapiens
gacgtggcctctctgtttgtgtttcttcctgctgtttcccctaagcccatcagacgtatgcgtgtgtctgaactccagcaataaacaggcattaggatcttttccctgagagccgcgggcac

SEQ ID NO: 251630 - DNA, 122 bp, Homo sapiens
agcgatcgtcctccttagacctcccaaagtgcttggattacaggcctcagccaccgcgtccggcccccaaaggctttcattcgcagcttgagccctgcgggcgccaggaggtgggaggactg

SEQ ID NO: 251631 - DNA, 122 bp, Homo sapiens
ttttcttgattgttcttctttctcttgaatggcaagagaagaaacactttctctaacccacggccaggaaggaaatggggagagagctacttcttagttcaacctggttgccacataaagga

SEQ ID NO: 251632 - DNA, 122 bp, Homo sapiens
gaaaaacctgtacagaaacccaaagtattgtttctccacacaggttacaggcactgttttcggcagatgaatttacaacagcaattgagttttacaggtattcttgggccaggacgttttcc

SEQ ID NO: 251633 - DNA, 122 bp, Homo sapiens
gcagcgggacggccgcctgctcgtcagctgtcactctgacggcagctactgccagtggcccgtgtccagcgaagcccagcaaccagagcccctccgcagcctcgtgccttacggtcagtgtt

SEQ ID NO: 251634 - DNA, 122 bp, Homo sapiens
aaaacccattggtagttccttcttgtcccagagtaaattcctgactttcaacacagcctccgggttgttggcggcctggctcctgcttcctccagccttaccagcacaagatccagtaaaca

SEQ ID NO: 251635 - DNA, 122 bp, Homo sapiens
ctgagtgcccgcagccgaatgcggctgcttccttgcaggcggacacccaccgctgggcaccgtctggtaccctgcccctgcggcccccgcccccgcgctccgcccctgtgctctcccttgct

SEQ ID NO: 251636 - DNA, 122 bp, Homo sapiens
gctgctcctgctggtgactggcgtcccacaggaggcctggggcctggcgatgatgcttgccggagcctgagggcccgtcccctgcggggctggggcccaggcccctctctgcagagctggag

SEQ ID NO: 251637 - DNA, 122 bp, Homo sapiens
ccatgcccccacaatcagtagatcacaaagaatttgactgagaaccttcagattaagccacgttaataaatcacgggcccgtaagaagattatgctctctgattctcagatgagaggatgta

SEQ ID NO: 251638 - DNA, 122 bp, Homo sapiens
actaatttttggttagagcatccttgaaaccccggctcaggtctggagatggcggcggggcgtccttgctcctggtaacacccatgggcgggccgcaaagcgcccggagccctcgccgccag

SEQ ID NO: 251639 - DNA, 122 bp, Homo sapiens
gccatcttcccagccatggggaaacagatttgggacagaaacctttctaacatcaagctacgcttaaattcagagcacttaagcataacctcctcaccctctccatccctgttacattgaaa

SEQ ID NO: 251640 - DNA, 122 bp, Homo sapiens
ccgcgggcccctgatccttcccttgatgaatgagccgcccggcccggccccgtccgtcaccgtcaccctcgcctcggcccgggccgctgccgcccccagccctcggcccctccgccaaacgc

SEQ ID NO: 251641 - DNA, 122 bp, Homo sapiens
taatcagacaatgggccgaatgagacagcaaggacaggtgctggccgcgatcttttggagcggggcttcctgcctgcgctgtccggccccacctagaggatatttacatttcatcttgtgac

SEQ ID NO: 251642 - DNA, 122 bp, Homo sapiens
catttcctagagagaaaaacagaggctcagccaggatgtcattagtctgaggtcgcacctcggggaatggcgatgtctagattcagactgcagtgagatgcagtgcagttcttgctctgccc

SEQ ID NO: 251643 - DNA, 122 bp, Homo sapiens
ggagtatgtgtctcagctctccttctcttcagctctctctttgttttcctggggaaatcccgggccttgttgaaaggacctgcagcagctctgacttcccgaacactcacaggtgcccgtgt

SEQ ID NO: 251644 - DNA, 122 bp, Homo sapiens
caggcttccgttaaccccacaaaacgcccacctaaccctgctgctctccctctggatccccgcaacccagctgtcccctcagagcccccggccctactgacagccaggctcgcattgctctc

SEQ ID NO: 251645 - DNA, 122 bp, Homo sapiens
tctgtggttttgtgctgaaaagacaagaactcacacccaaacaaacttacttaaagagagcgagagaaatgccatcctgcaaaaaacgagcatgaaaatagcaatgactgaggctgttctaa

SEQ ID NO: 251646 - DNA, 122 bp, Homo sapiens
cattgttatatgagaaactcaccctggaaaataatcttctgctgtcagattactatgaatcgcacagagtgaaaatacggtacaaggtgcttttccacccagctgtcacttctttgtttccc

SEQ ID NO: 251647 - DNA, 122 bp, Homo sapiens
ggagcctcggagacggcctggaagacatggaggacctggcgcggttgcggttagcgggcgcggtgccaaagctgccatccccggctcacagctcctcatatccaccctgccctcatctttat

SEQ ID NO: 251648 - DNA, 122 bp, Homo sapiens
gtccatctccacactgcagggagcgtctttgcagaggtggggagagctgctgggcatctgcgtggaaaaggaagaaggaaccgaaccattaatgctaatggccagttagggcttggagcttc

SEQ ID NO: 251649 - DNA, 122 bp, Homo sapiens
gcaagcaaacaaaccaataagcagaatgaaaccaacaaaacccaatagcaaaaggatcttcgtgtttaataaccctatctgcaaattttaaacaattttgtgcccctgggagaaagaatgcc

SEQ ID NO: 251650 - DNA, 122 bp, Homo sapiens
aggaatagacttgcgacttttaagcgcaaacaatgggtggaaatggacagaaactgcctccgtgcccacttgcagcggactacgtagccctggcagacaggcaattgcttcaaacaagcgcc

SEQ ID NO: 251651 - DNA, 122 bp, Homo sapiens
tggcattattagatgggaaaaggaggaaagtcaccagtctcgttgctctgttttaggatccgtgaggttcatctatctgtagtgcttctggccagagaaaaggccgaagagagaaaaccctg

SEQ ID NO: 251652 - DNA, 122 bp, Homo sapiens
ctctgagaagacaggtggagggaggcctggttaggggaagaaggagacgaagggacatggcgcaggggacttgcccagggggcctctgcaggggcaactgcccgaaatcctgttaccccttc

SEQ ID NO: 251653 - DNA, 122 bp, Homo sapiens
aggcaggatgaagagggagacagaaacatttctattttctggtcttataggaagttaagtcgcagcagaactctggcttgtgaggacatctgagtattttaggagaccttttgaccccaaag

SEQ ID NO: 251654 - DNA, 122 bp, Homo sapiens
cctgcgctctgggggctggggacaggggggcgggcaaaggcaaaagaaaaagaagggagccggcgcgaagtctcagttatgaaaaaacgcattgagctcctcgtacatggggccccggtcgt

SEQ ID NO: 251655 - DNA, 122 bp, Homo sapiens
tgaaaatctaatttcttgagtctaagaactgctgatcttggcaccgagatgcccgtccgtcgggcaaacagacccagagccgttggattattcatagcacggcatctgcagatcaggctgca

SEQ ID NO: 251656 - DNA, 122 bp, Homo sapiens
caggggctggggcagcccacaggacctgagcccacaagattcgagccctgggtatgtgtccgccttgctgacagcgagggcagcagctgcggggggatccgtcccgaatggccatatgctgt

SEQ ID NO: 251657 - DNA, 122 bp, Homo sapiens
gccctctggggggaagccaggccaggggccgggggcatctctggggtcccaggtgagatgcgggtcgagggagccaggccacggttctccagactcgcgtggaggccacgagcgtcttctgg

SEQ ID NO: 251658 - DNA, 122 bp, Homo sapiens
ccacttcctgggttcacgccattctcctgcttcagcctcccgagtagctgggactacaggcgcctgccaccacacccggctatatttttagcagagacgggatttcaccatgttagccagga

SEQ ID NO: 251659 - DNA, 122 bp, Homo sapiens
cacctcgcggcccggcctgacctgttaatcacgtccccacggctctcctagcggggacaccgccgtctgcaggctccgtccccacagtgcccagaccccgggaagtttgtcagtcagcaccc

SEQ ID NO: 251660 - DNA, 122 bp, Homo sapiens
tttacttcgtagatagttgggtacaagtgacgctaggatgataggcggagtcaacaggttcgccagatacccatgagtatttacaagggggcggggcgaaagcgacttgccctcaaaggggc

SEQ ID NO: 251661 - DNA, 122 bp, Homo sapiens
gtgcccgcactcctcagcgcttgggtgtcgatgggactgggcccatggagtagggggcggcgctcgtctgggaggctcgggccacacaggagcccacggaggttgggggaggctcaggcatg

SEQ ID NO: 251662 - DNA, 122 bp, Homo sapiens
acgctctcgagccgtctcatccaggactctccgggcatcggccagctccgactcgtacagcgccttgatgccactcacctggggagacccaggacagggtgaagcgagagggacccttcccc

SEQ ID NO: 251663 - DNA, 122 bp, Homo sapiens
cttgactaaaaaacaatccgtacagaatgtgcgggagagctgtaggaactcctacggtggcgacagagagggaaacaggcttgttggaagaagcgcctggtcagcgttatcctcgaggatca

SEQ ID NO: 251664 - DNA, 122 bp, Homo sapiens
catcgggtgtggggtgtgcagggtgcggagaaggctaggattcctcccaatcctctgctgcgccctcccccagccgcctccccaggttgaggggaggccccggcccaggactgggctcttcc

SEQ ID NO: 251665 - DNA, 122 bp, Homo sapiens
cgggcggcaggaaataaacacgatgttctcaggcttttcccggtgggcgcgtggaggccccggcagcagatcctaacactcggcttcctctccacagctccgggccttgggatcgattgtgt

SEQ ID NO: 251666 - DNA, 122 bp, Homo sapiens
aaacaagaacgcttggcctgtgcctgggtttgaacccggagacacatgcgcaaaacgggccgcgccgtccaataggaagcaagccgttagtgggctcgccccttcatgctccaggccaacgg

SEQ ID NO: 251667 - DNA, 122 bp, Homo sapiens
cctgagccccagggggtgccgagattgcggcgaggagagccgcagcacaaggcaaatccacgcggttggtccccgctacgcccccgtagtcacccgcagcccctcgccaaagggcgctccgc

SEQ ID NO: 251668 - DNA, 122 bp, Homo sapiens
cgggggtcagagaggaaacagaggcgtgtccaacagggcccctggcctgggctccagacccgggagccccctggtcttagtctgaggcccgtgaccttctctgggtgatgtgcaccttagcc

SEQ ID NO: 251669 - DNA, 122 bp, Homo sapiens
tcagtgctttggtggagacgccagtgctgggcgaatgttcttccgagagcgccttatctgcgttgctgcagtcctgcagaatgtcgagtggtaagtctcatcaaagcaggagctgtgtgaag

SEQ ID NO: 251670 - DNA, 122 bp, Homo sapiens
cccgggccggcaggcgggtcctcaggaagcgcaaatttcaccttccctgactcctctcaccgctagattaaaactgcgcccctcggtggctcaagcctgtaattccagcactttgggaggca

SEQ ID NO: 251671 - DNA, 122 bp, Homo sapiens
gattaatctgggagctggggaaagtttgctaatcaatcacatggtagaagcagcaacactcgctcttggaacagaggtgggaagagccatgtgaaaacccgcagggggtgggaggccaccca

SEQ ID NO: 251672 - DNA, 122 bp, Homo sapiens
caagagggggccttgcaggaggggcggcgagggatccaaaacaatttttctgcggcaagacgaaggaccggaggggatcccaggacagttggccctgggccctgacgcctcggagcacaccc

SEQ ID NO: 251673 - DNA, 122 bp, Homo sapiens
gtcagacccgccatcgctactaccgacccacctcggccaggaaacagccagagggcgggacgtcagtccaaataagaaggctagccaatccgagtgcacgagcggccctttatgcaggaagt

SEQ ID NO: 251674 - DNA, 122 bp, Homo sapiens
aagggggcggacccaagcaggctccgacttccctgggcccagggagagggaatggctgcccgagaaacccaagcagaagggagagggagacacaggcagagacacacaaagatgagagaaac

SEQ ID NO: 251675 - DNA, 122 bp, Homo sapiens
gaataaggcttttttctccattatctgagtaatttgtgactaagcctctttctctatcaccgggtttatcatgtattaatgactgaatacttcattatgtgatcagtctttctcttcatttg

SEQ ID NO: 251676 - DNA, 122 bp, Homo sapiens
tgagacccgcactctcagccgcataaacgccgcaccacctcaccagtgggcagtccacagcgacctcagactccgctcactgacaattcagtctgggaaccggaagcggatgctccgcaggg

SEQ ID NO: 251677 - DNA, 122 bp, Homo sapiens
aataggataataatagtacctaccacataggatgttgtgaggactacctgggttgatacacgtaaagcacttaaggtaggacccagcatgcagtcattactcaataacattagctgttataa

SEQ ID NO: 251678 - DNA, 122 bp, Homo sapiens
ccctacctcccacactggtgtttgcgttgtaactgggagaaagggcggcctggccccagccggcccctacctgtacgtggggatgatctgcaggctggagtccggctttatctgaaacttca

SEQ ID NO: 251679 - DNA, 122 bp, Homo sapiens
cttctgttttccagggctgaagaagatgcagagcagcctgaagctggtggactgtatcatcgaggtccacgatgcccggatatcctttcacagagcaggggaggcccctctgcctgaagtca

SEQ ID NO: 251680 - DNA, 122 bp, Homo sapiens
tctattagagaaagaagccctaaagcagaaagctctataccaagaagtccaaacccagcacgcaacagcccaacataacctagaatgtcaagacactcaagataaagaccaacaagaccttc

SEQ ID NO: 251681 - DNA, 122 bp, Homo sapiens
cctgggtgtgggggtcagacatgggtggggctgcccaaccttggatgctcaggacttccgcgcgcgctccgcccccgggctccgaccctggcctgccccaccttgcggaagcatcggttgga

SEQ ID NO: 251682 - DNA, 122 bp, Homo sapiens
ggggacaggtgtgggagcttggaatccaacagcaaagccctgcaggtgctcattcctccccgagtctttagaacgcgcctcctcacacttgagcgtcagttataggcttccttgcaaggtaa

SEQ ID NO: 251683 - DNA, 122 bp, Homo sapiens
acaggtctgcagtaactgggaacttgggtgagttacccaactgctgagccttggttttctcgcctaaaagaaatgtctccaatacttagcatggaacctggtatgtagtaataggtctttag

SEQ ID NO: 251684 - DNA, 122 bp, Homo sapiens
gtagcctgggtctctcttggccaaagagcccagggatgcctctaactccttttctaaagccggccacggaggccccgccctctgcagggaggctccggatcatgccccctgctcctcccact

SEQ ID NO: 251685 - DNA, 122 bp, Homo sapiens
ttgttttttttttcttttctttttttttttttttttttttttttgcttcaatacttctgccgctttggaaattgtaacagttaattactttgaatgttgctaaaaggacattttgtgtaggg

SEQ ID NO: 251686 - DNA, 122 bp, Homo sapiens
ttaccggcttctggccatgtcgtcttcccagtcccagatggcggttccgggtttgggctccgaggcccttcgcagcactagggcggcgcgagtagggccgccctccgagccatgctgcggtc

SEQ ID NO: 251687 - DNA, 122 bp, Homo sapiens
cggggggccgggggcatgcaccgcgcgggggaccccggggggccggggcccggggcgctgcgccacttcattgcaagatttgcaaaatgcaaagtgcctgggcacgtttgcgggctttttgt

SEQ ID NO: 251688 - DNA, 122 bp, Homo sapiens
caatggcagcaccctctccaacattttccccaccagagaggcaagtgtcctacatttgtacgtaaaggtccctgagtggctaggtggagaggctcggatgtcttttcctggagcgggcctcg

SEQ ID NO: 251689 - DNA, 122 bp, Homo sapiens
tggggcctagggaactgacacgtgggaagcgcagtgagccggggcgggggcggaatcccccgctgcagggacacccacgcccttctctccagaagccgggcaggcagaatccggccagacga

SEQ ID NO: 251690 - DNA, 122 bp, Homo sapiens
catggccgatgggacttctatgaaaaggatgagcacacacactcggagggctgagcagcacgctggaaactgtgacttggtgatgcccagctgcacacgaaattacacatgactcaccttat

SEQ ID NO: 251691 - DNA, 122 bp, Homo sapiens
ccattggccgcccaggcggcggcccgcctcttcattggccgtcgggctgcgggggcggagcgtcttgattctctggcggccaatcccagaccggaaggcttgcgcaactccgcggtgggggc

SEQ ID NO: 251692 - DNA, 122 bp, Homo sapiens
tttaataagcgggttaaaccgcatgcgctctgtctagtctgtgaaggtcagccagccattcggattttatcttcccatttctagactgctgacagagttcttgtgcaaagttaggaatcttt

SEQ ID NO: 251693 - DNA, 122 bp, Homo sapiens
tcgcaagtcggcccgcccaggtcgcgtcacgaccgaggccgccaatcccgcgggccaaggcgccgcattggctgcggagctttatttctagaggtgccagcttattccccgtggggcggcca

SEQ ID NO: 251694 - DNA, 122 bp, Homo sapiens
tcctgctgatctgagcatgtgggtcctagaggcagagcactgacctgggaggctgatgaccgaccccttctcctcagtgaggacggggttgtggaccaagcaggacacagactctgcagagg

SEQ ID NO: 251695 - DNA, 122 bp, Homo sapiens
agaaaggaggaagggcaagggagaaaggcagagaggctgggcggccaagggtggccgctccggcatctccctcggctgtgctgggccaaacccgctcccagattcccggcctgccagccact

SEQ ID NO: 251696 - DNA, 122 bp, Homo sapiens
aaaaaatagtatctttgatccttttatagttcataagcatgatgattgggtttttgcacacgtgtaatatgtgcctccctcaaaccatgttatgacctcagcatattacctgtctgatataa

SEQ ID NO: 251697 - DNA, 122 bp, Homo sapiens
ttacaatctcatttcagatactagacacaaaagatagcattctatgttcacatgcagtcacgatttctagcactttcttatattatgttcacctgtttgtgggcttgcaattggcaaggatt

SEQ ID NO: 251698 - DNA, 122 bp, Homo sapiens
ccgaggcatccataacttagagcaccccgcaccccccagcgaaaagccccacgcgatcggcgaggccagtcgaaccgagcccccgcaacacactttcaagagcccaagtggctccaaagtat

SEQ ID NO: 251699 - DNA, 122 bp, Homo sapiens
ctcttctacaatttactcaacgtgtgatcccaatcaggcagggcaatattccaggatcggcgctgaggactggtggaatgaattgtctctgccatggattcccgcggcttggccactgagtg

SEQ ID NO: 251700 - DNA, 122 bp, Homo sapiens
tggcggccaggagagtggctgccagcggcgggtgctcctacctgacttccgcgtggggctcgcccctccctcctcctcctccagcgtcctgcagctgccgcgcctgggtgtagtcggggcgg

SEQ ID NO: 251701 - DNA, 122 bp, Homo sapiens
ccgcgctctccccctccgcccggcgccgctgccgagtgaactggaaccagtcctcgcggccggcttcccacaatgcacagcgcgccgctcgtcacatcccttcgcggccccgagcgtccggc

SEQ ID NO: 251702 - DNA, 122 bp, Homo sapiens
gagggatcgagagagagcggggagagagaggctgcaatctcctccctgaatcgcgcacagcgctgcagatcccactgctccgacatgcgggccgaatgcaggtgagaaaaggcacggactct

SEQ ID NO: 251703 - DNA, 122 bp, Homo sapiens
ctgtctcaaaaaaaaaaaaagaaaaaaaaggaaaagttagcctgtattttgcctgagggacgtgatttccccgttaatacctgtgcctgctttgttgttctggctgtaggttgacatgctcc

SEQ ID NO: 251704 - DNA, 122 bp, Homo sapiens
atatgaggagcgcctctgcccggccgcgaccccgtctgggaggggaagagcgtctctgcccggcagccctgagaagtgaggagaccctctgcctggcaaccgacccgtctgagaagtgagga

SEQ ID NO: 251705 - DNA, 122 bp, Homo sapiens
gagattacaggcgtgagccaccagccagcttctttacagatgtagatttctccccataagcgacgacgttgcaggaccatttcaaaatataacaaagaaacatattttgggaaaaaatattt

SEQ ID NO: 251706 - DNA, 122 bp, Homo sapiens
taaaagtataaataagactctttcaatctaaccacaagttagatttgcagtaaattcctccgtcttagatcactttcttttttacagttcccagacaaactgactttgatttagctagtaat

SEQ ID NO: 251707 - DNA, 122 bp, Homo sapiens
agggcaggccagacagctcatctgtgtttactgaaagcatccagcatatcttatgagacacgtggtgccaaacagatgggtggccgccctccctcatctgcctgcctgaggcttgcccaact

SEQ ID NO: 251708 - DNA, 122 bp, Homo sapiens
cttttgccttccaactaaatagagtaatataaataaataaataactgctcaggcaaatagcgtaagagaaagaatgatgtgaatcagatgaggaggaaactcaggcattgtggcaggtaggc

SEQ ID NO: 251709 - DNA, 122 bp, Homo sapiens
ggggcatgggtgatccagcttacattgccgggtaagggctaggttttactcccccctcaacggcgcctactgtcttaacagggtccactttgctaaacaccgagttggaaaagcagcttcct

SEQ ID NO: 251710 - DNA, 122 bp, Homo sapiens
ccccgcgccctgcacccgcccgcccggggaccgcccgcccctcctctccgcgccgccgctcgctgactcccccggcagggattgcttctgcctcgctgccaggttttctcccgcccaccttc

SEQ ID NO: 251711 - DNA, 122 bp, Homo sapiens
caggacaaccagataaaccacattcctttgacagccttctcaaatctgcgtaagctggaacggctggatatatccaacaaccaactgcggatgctgactcaaggggtttttgataatctctc

SEQ ID NO: 251712 - DNA, 122 bp, Homo sapiens
ccctgcagcagctccaggcctgggtctggaaactcactcatttagtgaatatctgtcgaacggaactggatttgggtttccttgtgggtaagaagagggcaggtggtgcgaagttagaggat

SEQ ID NO: 251713 - DNA, 122 bp, Homo sapiens
ttcccccagctctgtggggccgaagccatccacagggggctttccccaccggatgtggtgcgggccgtggttaatctcacttgagttagtcacccaggacaaacagctaaccgacacaattc

SEQ ID NO: 251714 - DNA, 122 bp, Homo sapiens
tcatatcgcgagagtagcacatgctagggcgtaggatagtggctcggaagggccaagccccgcgcatcgtgcgtacgaagatctgtgtcttcttggactagatggtgaagcccagtagctgg

SEQ ID NO: 251715 - DNA, 122 bp, Homo sapiens
aggcttgcgaccactgggccctgtacagctgcggcgacgaggctttgcggcaggttcccacgatccggcaactgaggtcccactgcctgacttaggcgcagtggcggtgtccgaccctgggg

SEQ ID NO: 251716 - DNA, 122 bp, Homo sapiens
cactcactcaccgactcagaaaactagagtcaaggattccgcggcagcgtctgcccaagccggaagatggacttagcctggaagaaaacacatccggtgccaaccagctttattctttactg

SEQ ID NO: 251717 - DNA, 122 bp, Homo sapiens
ttctggttctaagcatggaattcctggaacagggaagctagcttccaatacattgaagtccggaagttgttttcctgctcaaggaggtcacatttctaccaagagaaatgtgaattctaagg

SEQ ID NO: 251718 - DNA, 122 bp, Homo sapiens
caacgtgcggggccaagtgagcgagggcgggcaactgcggagcatcaacggggagctgtacgcgccgctgcagcatgtgagcgccgtgctgcccgggggggcggccgatcgggccggggtgc

SEQ ID NO: 251719 - DNA, 122 bp, Homo sapiens
caggaaatgccaagtctaggttgccttcttgtggcagctagggcccataagatgccattccgctgtgctattcctcctgactagtgtcccacaccagttttccttgttcttatcacctttca

SEQ ID NO: 251720 - DNA, 122 bp, Homo sapiens
tagtttgagaagttgaccacagaaaagtacagaaaataactcaggcacggagctgaccgacgggcattgtctgtgttccgtgagtgtgtactgggcctaaagagcaagcattgcagagccct

SEQ ID NO: 251721 - DNA, 122 bp, Homo sapiens
tctgagttaaggtgagcaaaatcttgaaagattatttatcactcaaactcatgggcctctcgtagacatgacctgacaaggccaccaaggcaacccagtgcaggacttcttagggcctggcc

SEQ ID NO: 251722 - DNA, 122 bp, Homo sapiens
tccatgctgaagtagttggagttcttgtcgtccccggactcgacaaactggatgatgggtcgccgccactcattgcccgcgaacagggcgctcctaccttcccctggcttcagggcgctgcc

SEQ ID NO: 251723 - DNA, 122 bp, Homo sapiens
acgctgggcactgcagacacgtcgtgggaattgcccgtacactcttctgagagcacctcgcgggcagggcttgtgctgttcatccctgtgttcctcgtgcctagcccggtccttgacacaca

SEQ ID NO: 251724 - DNA, 122 bp, Homo sapiens
ctggctagagccttaacaagaggtggcagatggacatctgagacccagagagactctggacgccccacgcgcccagccttggagaggcacagggtgtgtcgccagcctccacatcccatgcc

SEQ ID NO: 251725 - DNA, 122 bp, Homo sapiens
cgtgaagctccgagaggtgtcccagaggcgctgtcaggcaagcatggagacacatgggtccggagctcagaggaggatagggctggggatgcacttaggagtcgtgagcatgctggaggtat

SEQ ID NO: 251726 - DNA, 122 bp, Homo sapiens
ttttgcccagtttttactgcagaagtgaaataacctgacacaatctttgggagctacaggcgagcagacatccaccaggattaggaccagagagaagaactctaccaactccaaaaggaaac

SEQ ID NO: 251727 - DNA, 122 bp, Homo sapiens
actgccacacagtgagagctcagaaaatgtacctacgagtattgtcatatactcgaaaggcgactgttttcctcctatgcaaagcaggtgggtgtgcagcaaagctgggaggtttctaatat

SEQ ID NO: 251728 - DNA, 122 bp, Homo sapiens
atggcggcggctcggcgcctgctgcaggggacgatagagggggttgccgggagggggagccgccatcttggaggcggtgtctggagagaaaattccgctacagcccgtgagggggggtggga

SEQ ID NO: 251729 - DNA, 122 bp, Homo sapiens
gaaacatgttttgacacacctaaaatagctactaggtattttcctttgtatttctctcctcgttctcaccctctgcccaacttcttttccaaaggtgaaatatttttaaagtaatgtaactg

SEQ ID NO: 251730 - DNA, 122 bp, Homo sapiens
actgggaagtggggcaaaggtgaggctattccccggggaccttcgagtaagcccgggccgcggagcggcagagacaaagctggccacccgctgatgaccgagctcagactgtactgtctcac

SEQ ID NO: 251731 - DNA, 122 bp, Homo sapiens
cccaaccgtcccctcaaggaagctggggctgaagaggagtaaaagatggtaatcatcatacgagacttggttctccaagttcctttcgttaacaacgtagaggaacagcagggacaattaca

SEQ ID NO: 251732 - DNA, 122 bp, Homo sapiens
ggaatgagacccacggccgggcgtgggcagcgctggaggacaggctctcccagtgtgctgcgggggagggcagcccctgcagtgtgcgtgttgagtgctgggaaacccccaagtaacacttc

SEQ ID NO: 251733 - DNA, 122 bp, Homo sapiens
ttgtctatatgacacggcgcacacatgatgtaactgcttgtctatatgacacggtgcacacgtgatgtctgtagctgcttgtctgtgacacggtgcacacgtgatgtctgtaactgtctata

SEQ ID NO: 251734 - DNA, 122 bp, Homo sapiens
cggctgccggctttatatgggacgcaggctggagatcaggtggtcccctagcaatggaaccgctcggcgctctaatccatcaaatgtcccccaggacaatcgctccgcacacgttcccctga

SEQ ID NO: 251735 - DNA, 122 bp, Homo sapiens
ctacttgggaggatgaggcaggagaatcacttgaactcgggaggcggaggttgcagtgagcggagatcacactccagcctgggcaagaaaagcgaaactccgtctcaaaaaaaaaaaaaaaa

SEQ ID NO: 251736 - DNA, 122 bp, Homo sapiens
ccaagcttcgggcccaaggcaggtaggggactcctccttaccttcaaagaattttcatggcgggaggtggtggcgaggggacaagtagtgagatgagcaaataaaagctatttctgtgcatt

SEQ ID NO: 251737 - DNA, 122 bp, Homo sapiens
ttccatggattcctttctgttggccccagaacgtgggaagtgggaggtccctctctgcgccgcgctgtttgaggaagaagctggaagaaatccgcactgaatatggccctttagtttcttgg

SEQ ID NO: 251738 - DNA, 122 bp, Homo sapiens
cagggcttccgcgaggttttctggtttggggaggagtgtgtgtctgctcctaaacaaacacgtggtcccaggagaggaaccgggagcagctgggctgtcttctcaacatgcgttgagagaat

SEQ ID NO: 251739 - DNA, 122 bp, Homo sapiens
agccccacacacaaaagggcaggcgacaaagacattttccgggatggcaggtgttggtgtcggattcctccccgagtgcacgggcagaagaaaggcaaggctgggcttccccgggcagcgca

SEQ ID NO: 251740 - DNA, 122 bp, Homo sapiens
gtggggcgtggcgggcctctggtggcaccgcgcccagcacttcgggctcttggtggcggccgagctgcgggaccagagatccccccactcggcacccctgctcctgccgagtgaacaggact

SEQ ID NO: 251741 - DNA, 122 bp, Homo sapiens
ggtcgaggggcagcccctctgagcagctggtgtgtgtgcagggaagacccccggatccatcgacacctggccagggcggcgaagtggcagcatgatcgtcattacctccatcctctcttctc

SEQ ID NO: 251742 - DNA, 122 bp, Homo sapiens
gagggaggctttattcaaggggccttggccataggtatggggaccactgcgatggggcctcgcagtgtgggagagagattgggctctaccctgattccaacaaggacaagtggggatttata

SEQ ID NO: 251743 - DNA, 122 bp, Homo sapiens
ttgcatagaaaatactttcagaatttgtggttttcaaaaaggactttgtctaatgaatagcgatggcaacacagatttaggggtggaattcttggggagcttctattgccttctggcagttg

SEQ ID NO: 251744 - DNA, 122 bp, Homo sapiens
cgcactggcccgcctggatgtgcacgatctcgcgcatggtgccggctgcggagcgggtggcgctggccctcggagcggtgcgcggcgtggaccggcgggctgggctgcgcagagacctgccg

SEQ ID NO: 251745 - DNA, 122 bp, Homo sapiens
ggccaaaggggcattggttccccaagggccaaacgagcttcctccaggagtttcccgtcgcgtgcagtggaccaccgtgggcctgactgaggcctggtccttgccagggttttttggcaacg

SEQ ID NO: 251746 - DNA, 122 bp, Homo sapiens
cgatccacccgcctcgacctccccagtgctgggattacgggagtgcccggcgcagctcagcgcagagacttacaatgcgccacagatagtcctgaaggcaattctgatgcacgtcagaggac

SEQ ID NO: 251747 - DNA, 122 bp, Homo sapiens
cagggccacattgttggctccccaaccctgactgtttcaacttgattctgtctatttgcacgctgggctgatgtcatttgcatggtagcggctggatttcaaaatgctcagaaatccccttc

SEQ ID NO: 251748 - DNA, 122 bp, Homo sapiens
cagggcccagtgcggggaccagagggatgtgggatcctgaggatcactgtggggcacggacgctcaatcctcagtccccagtaagggaaagccgagggggtggcagaaaagtgtgtgtgtgt

SEQ ID NO: 251749 - DNA, 122 bp, Homo sapiens
ggctgtaggacagaagcctgtggtgcccagccccttggaagggctcagatgtgcccagaacgaatgccttgcctgcccatcctcctggggctccctagaccccaagccaaagcagagatacc

SEQ ID NO: 251750 - DNA, 122 bp, Homo sapiens
tggggttcagggtccccggaaagctggggttccagggtaaacaccagtacacaaacaaagcggtgggggaggggaaagaaaaagtttttccgtttggtgttggggctaaaagggtcatgtca

SEQ ID NO: 251751 - DNA, 122 bp, Homo sapiens
cagtaaagacaggcatcctttggcgagcaagcatctagcccagggtttagaggctctttacgttagtgtgggaagggggcccggtaactttgtgccacagcttgactactgttaaggcagtt

SEQ ID NO: 251752 - DNA, 122 bp, Homo sapiens
ttggagccccaggatgcagccattaccacttagtagctttaaccaactccctgctggggccggtgtaactaaatgcagctgctatgaccgtccttggattcaaacctagaagcacccttact

SEQ ID NO: 251753 - DNA, 122 bp, Homo sapiens
agcttagatccaggagtaactatgcactgtaaagaaattggtcccggcctactaagtaatcgacttcaggtgacaagaatttttcagaccacacctgttgatgaggccagggctaccaaggc

SEQ ID NO: 251754 - DNA, 122 bp, Homo sapiens
tcagcaaccatcgagacgcatccgccgagacctccgagcatcctagagaggacacggaagcgagtctttccttacgcacctgtctaacagcgtccgcagctcacttccggaccgcggatagc

SEQ ID NO: 251755 - DNA, 122 bp, Homo sapiens
gtcttccctgcattcccatccctgccccctgcccttccccactctgatattcagggcctccggtggaaagaggtggggctcttccagtccaagactgagagtagctttgagctagtcctcct

SEQ ID NO: 251756 - DNA, 122 bp, Homo sapiens
gcgcgtccgcgtcgtttggagctgcgacgccaaacatggcgtgttcctagaagccgctttcggcatcagtaggcggcggcgtggggtctggcagcgtggggagagggaccaaccgacgccac

SEQ ID NO: 251757 - DNA, 122 bp, Homo sapiens
cttcctcccctgcagagctgtggcggggttcagaccccgattccgggagaggacacctgtcggggaagggcggggctgggggactgcggggccgcggcgaggctcagccgggaactacgctt

SEQ ID NO: 251758 - DNA, 122 bp, Homo sapiens
ttttgtgcttagcagtttaaggtatatggctgcatatgcaaaactctttcccaattcagtcgctacttttacttctgccctttctatccatcgtcttcattttgtgtgtacagtgctgtgtg

SEQ ID NO: 251759 - DNA, 122 bp, Homo sapiens
catcgcggcagcgctgggagctgaacaggggctgctgctgcggcggcggcagtgggaagacggggctttatcctctcccaacccatttcccaagggttttatgacacgcacgtgtggaatat

SEQ ID NO: 251760 - DNA, 122 bp, Homo sapiens
ccggccagcaggtggcaccatactcgtttggtgcgttccgctggagaattctggcccttccgccgcgccgtaggtttgttgcctcaccagtgcgcccgccggagggtgtttatcgcggctag

SEQ ID NO: 251761 - DNA, 122 bp, Homo sapiens
gaggagactggcaggcgggaccgctcaagcagtgtgaggcggacccaggccattcggagacgccacaatgcaggcagcaaccccacccctccagcctctgtcatgggctcgccgcccaggtg

SEQ ID NO: 251762 - DNA, 122 bp, Homo sapiens
tccctgaccatcatcttaaagcacgcctatggtggatcgctctagaatgaaccataaacccgaagttctctttaagctttagtgaaacgaaatagtaaaagcttttcacggaaagagaaggg

SEQ ID NO: 251763 - DNA, 122 bp, Homo sapiens
gacatagtgaaaagatctagttatggcacaactatgtgtgaccttggccaaaaaaatggtcgcatgtccagccgccccgtccgggagggaggtgggggggtcagccccccgcctggccagcc

SEQ ID NO: 251764 - DNA, 122 bp, Homo sapiens
aaacctcattttatagctgcttaaaaaccctgagaatagttgtacatggatctcagcaaacgtacaaaagaacacgcgttatcaaggcagagatctgcacacttgctagggaagacaagggt

SEQ ID NO: 251765 - DNA, 122 bp, Homo sapiens
ctctcaacagacttcccacaaataaggcttttgctgattacttctgacttaatgcttaaacgttttcaacggaagagagttgtctggttttacttcttgcacataaaataatgcacttatca

SEQ ID NO: 251766 - DNA, 122 bp, Homo sapiens
agaattactgggaagttatccttctaccacttactagctataagtcattgggcaagttaccgaccactgtgaagctgttttctcatttgtgcttgacattaggatgtccctcacagattgta

SEQ ID NO: 251767 - DNA, 122 bp, Homo sapiens
tggcgtttgagggtggaggacgtgtgagccccccgggagctgcatgtggtgcttcagttacgtttctcttcacctcagtttattgattcagatcataacaccagatgtggcttttactgttg

SEQ ID NO: 251768 - DNA, 122 bp, Homo sapiens
gagggcttaggcgggagactcgcttgagcccgggaggcagttgttgctaggagccgagatcgcgccactgcactccagccggggccggcagacagaacaagagacccggagaccccgtctgg

SEQ ID NO: 251769 - DNA, 122 bp, Homo sapiens
tccaagaccggccaccgggagggcgggcggactgggttctcccagctaggtcgcagtgggcgatggggatccccaagggtgggccgagagctgacggatcggcagcgctggttaaggccccg

SEQ ID NO: 251770 - DNA, 122 bp, Homo sapiens
agggccactccctgcagacggcggccagcggacacctgcaagatcctgggatgcacacggcgccgtggcagcactgcgggtaagagcctgtgaacggggaacatggctcggagaaccagcgc

SEQ ID NO: 251771 - DNA, 122 bp, Homo sapiens
cccggggcgagtggggccaaggaggcagccgggagcggcgggcgcaggtgttactggttgcgtcgggtcacgtgggcgcgcaggcgcagcgcggtgcagcccgttcgctcacacaaagccca

SEQ ID NO: 251772 - DNA, 122 bp, Homo sapiens
gtcaactgggacctattcagtcctgagctcccagcaacctcatggactccagggcagacgcgatggtctggggttcccgtggtcccttagacgtcagtcctgcctctcctcctccatttcag

SEQ ID NO: 251773 - DNA, 122 bp, Homo sapiens
gaagcccaacaatgtttgcacagcaacagtggacacagcctctcagcctctttacggaaacgatagcaccccttgtgcaaaaaccttaatttgagcatttggaaatcctagaagtgaggtca

SEQ ID NO: 251774 - DNA, 122 bp, Homo sapiens
ctcccctgcgggggaggtgcagggccagggcctcagtttcctcgcctggaaaatgggtgtcgcgatccccggatagagcggcagacggtctttggagagggctctagttggaatcggctccg

SEQ ID NO: 251775 - DNA, 122 bp, Homo sapiens
cgtctccactgcttctcagccagccaacgcctcttctgattggctctgacgtgcgtggtgcgtgaaaacgtcacgagacgccggcgttactataagagcgcagccgtggcgcttgcgcgcct

SEQ ID NO: 251776 - DNA, 122 bp, Homo sapiens
tcccatctagcctatagctcgagaaggcagtggggggaccgcaggctggagccccgggggcgtgaaccccacgcgagaagttcgggcccggatgctctgcctgcccgccctctgcccggctc

SEQ ID NO: 251777 - DNA, 122 bp, Homo sapiens
tactgcaaccgatttcgctcatcctttggttccgcattgaggctcgccagggtctaaatccgcacagagactaggtcttccttaggcttctacttgaaataactgaagggcaggacgagagt

SEQ ID NO: 251778 - DNA, 122 bp, Homo sapiens
gtccacgagtttggccacgccattgggttaagccatgtggccgctgcacactccatcatgcggccgtactaccagggcccggtgggtgacccgctgcgctacgggctcccctacgaggacaa

SEQ ID NO: 251779 - DNA, 122 bp, Homo sapiens
gccgggcccctcccatcgactcgatgggcagggctctgcgaggctcggggaccggggacgcgcggccttcctgacaaggagcccgagggtctgcacagcctggggcaccacccggcctggtg

SEQ ID NO: 251780 - DNA, 122 bp, Homo sapiens
gtgtaaccagcatagatctgggacgcaccacgccaagggaagtcaaacagcttcaccaggcggcggaccatctcgtccttctgctctgcgtggccgagccggccatagccaccgaagcccca

SEQ ID NO: 251781 - DNA, 122 bp, Homo sapiens
aaatacttcagggtctgcagatctgtaggatctttagcaactacctactctgttgtaaggcgaaagcaggcagagaagccaggtaaacgcgtgggcgtgtctgtgtgctaataaaactttat

SEQ ID NO: 251782 - DNA, 122 bp, Homo sapiens
acatcaaaagcaactaaatcctggggaataaatttacaaaagaagtgaagatgtttacaccgaaactgcaaaaacattgctgagagaaattaaagaggatccaaataattggagagacattc

SEQ ID NO: 251783 - DNA, 122 bp, Homo sapiens
ctcgcggaggaggaaggcggggccgtgaaataaggcccgacgggccccggggcgcgtgcgcggaccgacactgtcagctcctaacgccgcaggttcctcctggtccccgaggcccccggtcg

SEQ ID NO: 251784 - DNA, 122 bp, Homo sapiens
taattgctctgagtggacatcagacgtgcccaacgggctttggattgggtgttcgggggacggggcgtgacgagaagtgccaggtgtacagaaagattctcccttggttcccagattgggtc

SEQ ID NO: 251785 - DNA, 122 bp, Homo sapiens
gggacccagcctccgatcaagcccagcaggcacaggccagctgcactgagtgcagggccgcggagcccgcacccacccggaacccacgcctgcccgtgagcgctgtgcacagccccggctcc

SEQ ID NO: 251786 - DNA, 122 bp, Homo sapiens
atctgtagcttcttttcctccttatccagtgtttcaccaggctctctgattcaatgaattcgggaaacacagtaccctgtgtcctcttgcacattcgtgatacacactaactataaagcagt

SEQ ID NO: 251787 - DNA, 122 bp, Homo sapiens
ccctcctacgccagcagctctggcggacagaggcggacagcggcctggacacgcagcccacgaaggtcgggaaggtcccgcctggtcttccatcctcggcgtacctgcccagctcaggtgag

SEQ ID NO: 251788 - DNA, 122 bp, Homo sapiens
atctaataatgcacaaaacttggcagcggggttgcaggacccctcctgggctccaattttcggggcgagtgcgcgctagtgcgtaagaagggggcggagggggtgcgcgatccgaggccgcg

SEQ ID NO: 251789 - DNA, 122 bp, Homo sapiens
agatcaggaaggtggccgagtgtgtcgccgcggccatcagggtaagggtacctggacttgcggctttttaggtcggcctggctccgctccttccgcggtgacgaggtcccccggcctcctag

SEQ ID NO: 251790 - DNA, 122 bp, Homo sapiens
tgtgtatccaccaggccacttccttctacttgtttgagactccacctgttggaatgtagacgtcacctacaggtgtcttccttttccaccctgggcagccaagaacaggtgtaccaactctg

SEQ ID NO: 251791 - DNA, 122 bp, Homo sapiens
cattctagcaggggaaatggacaggaagcaggaagcagaaccaggaagcggtggcgtagacgggcctgcaaaggggcagccagtgccctagaaagcagagaagcagggctgagccctgagct

SEQ ID NO: 251792 - DNA, 122 bp, Homo sapiens
tcctgacatcaccacgagcggagaacgcacatcccacccgaccaccccccaagggctccacgctccgggctggggctgcgatgacccttcgcttaggcccagcctggtctccacaagcaggc

SEQ ID NO: 251793 - DNA, 122 bp, Homo sapiens
ggggaggaacggggcctgccggaggccgcccaacggggaggggcggaaggcgccaccccgcggaggaggccccagtgccacagcccagggcccccgagagctctgggagcccggggcaaatg

SEQ ID NO: 251794 - DNA, 122 bp, Homo sapiens
ctcaccggtaagccgcgggcgtagcaacgccgggacccccagggttccagccgcccccaccgattgcccaacttcagtggcccctcctgtggccctccgattctcggggtctctccctccaa

SEQ ID NO: 251795 - DNA, 122 bp, Homo sapiens
cgctgggggtggtgggtgccctcgatgtgtggtgccccggctggcactggaccctggcgccgggcagggcaaggcagcccttgggcacttgttccctgcttgcctgcccccgcctggctcaa

SEQ ID NO: 251796 - DNA, 122 bp, Homo sapiens
tggaaagaaccccgtccccttccctgccgtccggaccttccagtgtctcctggccccttccgaggaaaaccagaagaggaaaggagctggactccagaggcagggcttctccttgcgtctca

SEQ ID NO: 251797 - DNA, 122 bp, Homo sapiens
aaaaaggggacaagagtcatccggtgaaactgggcagaagacattgtctcagaccaagatcggatttcatatggaggctgcacctttgtcaggaatgttcttgcaccacagagtggctgtcc

SEQ ID NO: 251798 - DNA, 122 bp, Homo sapiens
tctctcacggtaactgtggacttttactttacccctccaacgtcctggggcttcctccaacgtccaggctctgtcaatgtcagagacctgacgagagacaagaaaaagaggtaacctctgca

SEQ ID NO: 251799 - DNA, 122 bp, Homo sapiens
ctggcctccataggggacagtctactggtggcctcatcttgccctaaccagtcgactcatcgttcaagtccccagggaaaatcctggctgaagcctcctcaagaaagcaggtgtttctttct

SEQ ID NO: 251800 - DNA, 122 bp, Homo sapiens
gaagtgggtcgggggcttggcctctgcccggccacagagccggagctggaggtgctgtcccgtctggcggcgatccccgggcagggcccggggccggggtttgaagatgctgaacgtccctt

SEQ ID NO: 251801 - DNA, 122 bp, Homo sapiens
gtggatgctcgccgcgccaggcacgtccacaggaacgcagccccgagtcaccgtgtccttcgtcctttacccgcctgtgtcaagcctcccaaaatgacccgcagttcagctcgtccttcgcc

SEQ ID NO: 251802 - DNA, 122 bp, Homo sapiens
taaaacctctggtacacagcaaaagcagtgctaagcggaaagtttatagcattaattaaacgcctacatcagaaagacagaaagacctcaaattaacaacctaacatcacaactcaaggaac

SEQ ID NO: 251803 - DNA, 122 bp, Homo sapiens
gggccctcccccggccgcccccgggcctggccccctccagcccaggctcctcttggccatcgaggcctccggactgtccggacgcctcccaccccacccgctgctggagccgtcggggcgcc

SEQ ID NO: 251804 - DNA, 122 bp, Homo sapiens
gtccggaggaaatagacgtgacctcagatgattaaaaacataaacctaaccccacagaaacggacaacatggagcaaaagagacagggagaggtggagaaggaaaaaaccctacaaaacaaa

SEQ ID NO: 251805 - DNA, 122 bp, Homo sapiens
gacccagatgacaaggccgatcaggaagacaagggtcacacctttcaatggattgaggcccggcacacaggaagcgtggcacaaatgttcccacaccactgcacgcacacgaccaaggtgtc

SEQ ID NO: 251806 - DNA, 122 bp, Homo sapiens
cctcagctcccgcacagcctctcttggcagggagggtgtgggcagccgttccagcttcagcgtctggagcttgtggctcttctgcctgccgaggcagagctctagggccatggcgggaggcc

SEQ ID NO: 251807 - DNA, 122 bp, Homo sapiens
tgcatccatgatagacgaggctgctatttctgggtgtccgcccccatcattacccatgcccggggctttacaaaatagctgggttgaatcacactgacagaatcttttagtcactttcaatt

SEQ ID NO: 251808 - DNA, 122 bp, Homo sapiens
gaacccactgtatgcatggccttagaaccaaagttttgcacttcaagtgagctttgttcacgttcgccccattttgttctgccattaggtcttgcgggtgcgctagcctgctcttcattagt

SEQ ID NO: 251809 - DNA, 122 bp, Homo sapiens
tggtcacagtaaatctcacccagaccacaggcaggatgccacgtggctacaggcagctggcggaaatggagatcatctgttctggtgctcatggccactctgggcagaaagcaaaggtgcct

SEQ ID NO: 251810 - DNA, 122 bp, Homo sapiens
ctttgaaagggttctaggaacacagataaaaatatatgatccttaccttaaagacactggcgatttcatgggcacagaaacaaacatgtgtgaagtactgggatagcttaggaagccgatcc

SEQ ID NO: 251811 - DNA, 122 bp, Homo sapiens
tccgaccacccccaggctcaagagttccctctaaggactcacggaagtgagtaaagctgtcggacacacggctacaattatgagagtgaacggacactgatgaaaatcagcaacaggacaag

SEQ ID NO: 251812 - DNA, 122 bp, Homo sapiens
tcttggaagtccccaggagacaggcgtttcctcttggtcactgactctctgggtcactgacgctccttgaacagcagggccaccgtgtctccctttgaagcaagtgatccttaaggaatttt

SEQ ID NO: 251813 - DNA, 122 bp, Homo sapiens
gatcaggttttcctgcggcagctgagataccgggagggtctgagcccgtggctcgagctccgttatcggcgacgtggtaagcagtcgtctccggttactgctttaatggagacacacacaaa

SEQ ID NO: 251814 - DNA, 122 bp, Homo sapiens
gagtggcgggcagcaatggagcctcgagctcacagctctggagtctgccagatcggggtccggtcccagctccactctgactgcaggacatctgtgatgtcccctttctaatccttgggtcc

SEQ ID NO: 251815 - DNA, 122 bp, Homo sapiens
ctgggcttggcagaagggccatagttcatccagctcctcccctagagcaatgctgaggagcgggggcatggtagcagggctgtctggttttaaataaagttggaacacttcacagtgcttgt

SEQ ID NO: 251816 - DNA, 122 bp, Homo sapiens
caggcagacttgcttgtgaaccgagaccctgccactcaccatatccgagtgaccgtgggccggctacagagccctgagtcttctctgtaaaatggagttaccggcgtctccctggcagggtg

SEQ ID NO: 251817 - DNA, 122 bp, Homo sapiens
aaacatactcagggcgggtcagttcctcaacaccattcttctggccctggcagcccaggacgattctctctaaacccaagattcatctttccagaaacccacattcttatgcaaagtagggt

SEQ ID NO: 251818 - DNA, 122 bp, Homo sapiens
tgacacggacgcgaagtacttgccgaaggcgagcggtagcacgtagcgcgggtagaagcgcggcggcagcagcgggccggacgacggatgcggactgggtccggggcccgagacgggcggcg

SEQ ID NO: 251819 - DNA, 122 bp, Homo sapiens
tgtctatcttattcatccctctatttccaggtttcaggacacataggagaccctccacaacgcccttgggaaaaaagcagaagaggacaaacatgggaaaagaagggagggaagggggagat

SEQ ID NO: 251820 - DNA, 122 bp, Homo sapiens
ccagaatgcctggaacaacctggagaaatatagccgcagcttgacccgcagctaccaaaacgtctatgtctgcacagggccactcttcctgcccaggtaaggtggaaaccaggggggcggca

SEQ ID NO: 251821 - DNA, 122 bp, Homo sapiens
tccagggaagggatcgcctagctgagtgctaattcctgcaaagtgctctgcagccagccccggcctggccagggcagaggtggagccagctgggccctccctctccgaggccaggctgccgc

SEQ ID NO: 251822 - DNA, 122 bp, Homo sapiens
ctctgatggagaatcaggtctccctgtgggaggagtcagacgaggagtgatccgctgctccgtccttatgggtttagttgtgatgagctggtgaggtctggttttccacactgaactaaaat

SEQ ID NO: 251823 - DNA, 122 bp, Homo sapiens
ttctgcgtgccagcccttgggatctggacttctggctcctggaaacattcaaaaggaaaccggtgggccatggaaccgctgacaggattggatggtaaaacagtgtcttagatccaccctcg

SEQ ID NO: 251824 - DNA, 122 bp, Homo sapiens
tttttttttttttttggagatggagcagtctcgttcggtcgccaggctggaatgcagaggcgcgatctcggctcactgcaacccctgactccctggttcaagcgattttcctgcctcagctt

SEQ ID NO: 251825 - DNA, 122 bp, Homo sapiens
aaacccatgaatcatgatgtttatacaagtttttcttccttgtaaaaaggcaagaggcaacgctatagaccacagacggaaggaatgttttgttttttgaaactgagtcttattctgtggcc

SEQ ID NO: 251826 - DNA, 122 bp, Homo sapiens
tcgccgccccgccactccaggtcccagcttggagcaagggctttgtgactgccagggcttcggcaggatttttacacagccttgcctttatgagcaactgcgaccagcatgaggaactgagt

SEQ ID NO: 251827 - DNA, 122 bp, Homo sapiens
gccagggctcgccaactggggagggtgctcttggctggagaaccagcgctcgcccaggcacggaaaggaaacgagctccagctacaaggcaggggctcccgcaaagcgcagttaccccgctg

SEQ ID NO: 251828 - DNA, 122 bp, Homo sapiens
tgttgcattttctgagtctccacgttaatgaaagagcagccatccagtttcctgcagtgccgagagtcctcggggcctgtcattgttctaaaggacagaggacactgttcagatgtgacgtc

SEQ ID NO: 251829 - DNA, 122 bp, Homo sapiens
tgtatgctgtatatacatacacgcacacacacatacatgaaacaaatggttcctgcccatcgtagcttaatttgggggcagtccctatcatacagtagacatgtgatacatgaataaaagca

SEQ ID NO: 251830 - DNA, 122 bp, Homo sapiens
aaattcggcctatggtggccccagcaacactgacattgtcctcaggatgttcttaattcccgccgggcggggcccgaacctctccgtagtcgccggcagggggcggcgtccgccctctaagc

SEQ ID NO: 251831 - DNA, 122 bp, Homo sapiens
tctttcccaccacttctctctactctccctccctcttcccacagtcccccctccctccaacggcaataattgtgctttagaaagctctgaaaggcctgctctgtttctggccagggcctcct

SEQ ID NO: 251832 - DNA, 122 bp, Homo sapiens
tgtgtgtgtgtgtctctgtgtgtgagagagcgagcgagcgtgtatgttctcattaggggacgatctatgatttgacagcctcactgctgctgctcctgctgctgcttctgcttctgccgcgg

SEQ ID NO: 251833 - DNA, 122 bp, Homo sapiens
tgaagaggcgggccatgatctccccagccccgagccccggggctggctagggccgggcgccgggttacctccttcggcccggcgggccccacctgagcttttctcacccgctcaaagccgct

SEQ ID NO: 251834 - DNA, 122 bp, Homo sapiens
gagtttggatgaacgtaggatgccatgtatccaccgttatagtgtcacacagaatagtgtcgctgccctaaaaatcccctgagctcacttgtcatctctccctccccctgagcccttggcac

SEQ ID NO: 251835 - DNA, 122 bp, Homo sapiens
aaaagaacagcatcaacgaagacacatagtaaagtgctgcatgaccgaccacatatatgacggtggtcccatgaaattttaatggcactgaaaagttcatgttatagctgtcataacactgc

SEQ ID NO: 251836 - DNA, 122 bp, Homo sapiens
ggacgttggacgtcagcaaggcctgggtggtgctggtgaacggtgatgcttgcggccacacgcggggtggctaagccagggacccgaactcatatgaggtctggaaggtgtgttgagacact

SEQ ID NO: 251837 - DNA, 122 bp, Homo sapiens
gctcgcacactcagctcgctatccccgtctccgcccccggccagcgacccgggatcagggcgtcaagccccgaggggctggttcctcaggaagcagcctgcctctgtttgaaacaggctcac

SEQ ID NO: 251838 - DNA, 122 bp, Homo sapiens
ctgagagacacaagagttggctgctggagcccggaggtggcggagactgctgctggagtccggggggcgcggggtcagcagctacattctggagggcacggagacgacgggtggctggagtt

SEQ ID NO: 251839 - DNA, 122 bp, Homo sapiens
gggctcgcacttccgctggcgtcaggcgggtgggctgctgcgatcacttcccggttggggcgccgagctccggagtcggccgccagcctttgggccccacgctccgggtctggtgcgcggtc

SEQ ID NO: 251840 - DNA, 122 bp, Homo sapiens
ccctcggccctcgcccctcgcccctcacccctcggccctcgcccctcgcccctcggccctcgcccctcactccagccaagcggagcctcgctgactctgcactctacgtttcatttcttcca

SEQ ID NO: 251841 - DNA, 122 bp, Homo sapiens
ccgggctcgtgggcctgcgggtctctcgctgagccatactcacccgggagagcaggaatgcggcggagacttggtagcggccaccgagccaattcggtgggaagaccgggggactttccgcg

SEQ ID NO: 251842 - DNA, 122 bp, Homo sapiens
ttaaagataggtgtcagatcacagagggagtttgtattcgcgtgcttcaccatccaatcccgcacggagcagtccaaggcggccaactgcttgtgataggcatttccgacacaagctttact

SEQ ID NO: 251843 - DNA, 122 bp, Homo sapiens
tggagtcatctccctccagctccagtcttggtcgtgtggcgtcatctctccctccggctccggtcttggtctcatgtggtgtcatctcccctgggctcccatcttggccgtgtggcctcatc

SEQ ID NO: 251844 - DNA, 122 bp, Homo sapiens
cctcaggcggctgaggaggcagctttcctgccttccggagtatagcctagcaggaggagccgcaggaccggggaggagtaaagagctaggaatgtggtttccggagcaccaggaagaaagct

SEQ ID NO: 251845 - DNA, 122 bp, Homo sapiens
agcacacttccgttctctgaataaacccctctgacgagctgtttcgggaggctacatccacgcccaggacagccgggagggcaagctgcagcctctgcacggcctctgctgtgtctgtgcac

SEQ ID NO: 251846 - DNA, 122 bp, Homo sapiens
gccgcgccgcctggctagtaccccgcgcgcagcgccctgcggggatgttgcggtgagaggcgtgcagggacctggattggccagtccagactagccctgccaaaaagggggcctcggagttg

SEQ ID NO: 251847 - DNA, 122 bp, Homo sapiens
tcagcgacggccgccagagcacccacgggtccctcgcaggaccagagtcacgttttccagcggggaagggtgtaaactcagcaacggccgccagagcacccacgggtccctcgcaggaccag

SEQ ID NO: 251848 - DNA, 122 bp, Homo sapiens
tgcaaggtcactgactcacccttaacccttcttgtaacatgtcttcttaggcaatcctatcggacagaacccaggataagtcatgcataatttaaagaaatttcataggaattaaaagagat

SEQ ID NO: 251849 - DNA, 122 bp, Homo sapiens
gctcgggcgggaagaggcgctgggcggccggactcgcagaggggcgtgcgcggagctgggcgcggggcagcggccaagagcctcagcgccctttcatctgacactggggacagacacaatcc

SEQ ID NO: 251850 - DNA, 122 bp, Homo sapiens
gaggtgccctatggtgaggcctgcaggacattgggcgagagccgggtccagtgtgggcctcggggcgcggtggggtggaaagcggccggggaggggaggcctggggcaggaggccgggggag

SEQ ID NO: 251851 - DNA, 122 bp, Homo sapiens
agacatcagagactccacgccggagagtaactaggaacatggtagaagtggagagagtcccggacatgccgactcaggacaggtgggtgaggatctgagaaatgctaaaggcttgaaagcat

SEQ ID NO: 251852 - DNA, 122 bp, Homo sapiens
tgcggacctcgctggtcttggggacaaggcggcagatttcctttagaaaaacttccctctcgcgtctccctggccccgcggcgaccgaagagttggggttcggctttcttctcctgggattt

SEQ ID NO: 251853 - DNA, 122 bp, Homo sapiens
gcctgttttgaaaagtccctcgctcagaaatgccagcttgcagatggctaatcaaagagacgtggatccaggaggctcatttgagtaccggagcctctgagagtccatggatttttatttta

SEQ ID NO: 251854 - DNA, 122 bp, Homo sapiens
aagtagaaaaaaatatatatgccagctcctcaccccaaactcccctcccctgcccaactccgatatactcaggatatatgctttgaatctgaaacagcccaaatgcactggcatgttttctc

SEQ ID NO: 251855 - DNA, 122 bp, Homo sapiens
caccatcagaggctgatagactgtgaagacaataaagtttaagcttcagttcccctctctcgtatgagccccttctaaggtcctgggggaaaccctagaaatatgtctatatggtctagcta

SEQ ID NO: 251856 - DNA, 122 bp, Homo sapiens
cttacaatgttctagccatcccatcaacttcatttgttcttcattgttcaccttcttcaacggtaaatctgtcatggactattacatgcagctgtttttgtactgtgcaattcacacgatgt

SEQ ID NO: 251857 - DNA, 122 bp, Homo sapiens
tctcaggcctatttttccaactaggaaatgggaatgataacatctactttccaagggagccgtgaagagccaaagagatcacagaggtgggagggcctagtgaagagtcaagcgctctgctc

SEQ ID NO: 251858 - DNA, 122 bp, Homo sapiens
gagtcggagacgaggggtcgctcctctcaaatcctgtcaaattggggagccagtgggcagcgcggagagcggacaggcctcgccctgcgccgaggctgcgagagccgcctggacccggcgcc

SEQ ID NO: 251859 - DNA, 122 bp, Homo sapiens
tctgagatgtgttttgtagggaaagaaacctatcttaggaatgatgtccggtcacttgtacgagtccccaggacaatcaagctgacttacttgtcaagtcttaaacatcacctcttcgggga

SEQ ID NO: 251860 - DNA, 122 bp, Homo sapiens
gcggggcctcggtgcagtggcggggcctggacaccagcctgggcgcggtgcagtcggacacgggccgcagcgtcctcaccgtgcgcaacgcctcgctgtcggcggccgggacccgcgtgtgc

SEQ ID NO: 251861 - DNA, 122 bp, Homo sapiens
tccccagggactagaacagtggccagtaaacacttgctaatgaataaagtgcttaacaaacgtgtcttgatcagtctatctcgcgttttccccacgacccctctccattcattcacaggaac

SEQ ID NO: 251862 - DNA, 122 bp, Homo sapiens
tctccaaagcaaatgttcccactataccaaatcaaggtctccttccctaagccctgccaacgacccctcacacgcaggagcagggcagactagctcacagtctggcctctgaggtcctctct

SEQ ID NO: 251863 - DNA, 122 bp, Homo sapiens
gcggcctggagggttgaggctcagaccctaggatgtcactctgttgatctctaagcaaagcgcaatagacctgtaatcaccagaggttacaacacacaggactctacaagccaggccacatg

SEQ ID NO: 251864 - DNA, 122 bp, Homo sapiens
cgctacccgcgtttctggagaaaggtggagctcagtctgggatggcgtccccgacccaggcgcagggatggctctggttctgactgtgtctttgttttcagatgtcgtgatctcaacagctt

SEQ ID NO: 251865 - DNA, 122 bp, Homo sapiens
aaggccatgctaaaaagaacaatggagttacacagtgagactcaggtggagctggctcagcggctccagctgcccctcccatcccacaacccttcatcacccatggaagccagaagcaggaa

SEQ ID NO: 251866 - DNA, 122 bp, Homo sapiens
ccggagagcacaggccagagtggggtgacgtcatcgaaggcacgtcccagccttgcagagcggtgggcggggcctgcgaagaaggtgtgccgggggctggttggaggcgcgggcggcggggc

SEQ ID NO: 251867 - DNA, 122 bp, Homo sapiens
gcacgaaccagccgatgatgctgcaggggaggccaccatgaacacgggtcccacagatcccgcagccgaggctggggcgcgaaggcctgggggtggggtgtggaggaggctggggaggggcc

SEQ ID NO: 251868 - DNA, 122 bp, Homo sapiens
aggtcatctgaccacagaccgaagagggggtattattttcccattttacagacaaggaatcggggcccaggtagttttcgtaaacaggtgacgagcatacaagtgtcattcactgagctggt

SEQ ID NO: 251869 - DNA, 122 bp, Homo sapiens
gaggctacacagccaaagccggggggctggcctagccaaaaggggcgggcgagcacggcccgcgggcggcgttcgctggagctggtggaccgggcggctgaccgaggggcggacgcgcggcg

SEQ ID NO: 251870 - DNA, 122 bp, Homo sapiens
tcagggaaagcagacatccggccccagggcaagacctcaaaactcaagggtcctgagaatcgggccctcccacccctgacgcttgccccccccaagaaccccattccaagagtttctcatct

SEQ ID NO: 251871 - DNA, 122 bp, Homo sapiens
agtcatctttatgtccccatctctgaccacaatacttgaacagagggacaacttgataaacggtttaactaagttccataaagtcagggactggatttttcttgaacactgctgtatcctca

SEQ ID NO: 251872 - DNA, 122 bp, Homo sapiens
gactgttggagacagcaatttttgatccatagctcctcccaccaaaagcttcacacggctcgctaccctggcagccactccaccttcccacccaccggtggcgcaacagtatatttaaatac

SEQ ID NO: 251873 - DNA, 122 bp, Homo sapiens
aggacgataagtggaactcagtgttccaccatcctcatcctcatcctccatattcaagcacgtacttgataacccagctcacactttcttccatgagaaaccggaaaggaaagattcccagc

SEQ ID NO: 251874 - DNA, 122 bp, Homo sapiens
agccaagagtgaatgagtgggctcctgtgagcacgtgcacgtgggtgcctccagccaggccgccctattcctaggtcaggaggcaggaccagtatggggcagagagtcttggagttggcctt

SEQ ID NO: 251875 - DNA, 122 bp, Homo sapiens
tgttaacacaaccccccttctcccttcaaaccctcagcaggaaacactagcttaaaccttcggttcatctcccaatccaccccgatattcggcgcaagcttcagaagcttgatgacggccct

SEQ ID NO: 251876 - DNA, 122 bp, Homo sapiens
tgtggttagagccctctgtggtgcttccagagtggccacagttgtgctgtaaggtgcttccgtggaggtctgtgttgtgatggctgggcacacagacctcctttgttttaatgttgaaacac

SEQ ID NO: 251877 - DNA, 122 bp, Homo sapiens
ggtcttcaggtactgggggtttccagagccagacccccatgacattgctagcttactttgcgggcagggacgtggcaccatgagcatgacaaaggctgaggacaaagctgcccagggaggag

SEQ ID NO: 251878 - DNA, 122 bp, Homo sapiens
agtgaaccagactccgtctgcaatctccgcacctcgggaggccgaggccggcggatcactcgcagttaggagctggagaccagcccgaccaacacagcgaaacccgtctccaccaaaaaaat

SEQ ID NO: 251879 - DNA, 122 bp, Homo sapiens
gcctgcgctcaagtgccggcttcgccgcctcaggcagagtctagcaggcgggcgaccaggcgtagctgagttctgtggcctggggaaaggggacgccctatccccacagccctgtttcgcag

SEQ ID NO: 251880 - DNA, 122 bp, Homo sapiens
agattgctattaataaaacagttatttatttcaggactggtttgccatgtcccaggcacccggctaagcggtttactggcacaatttcattttctatttcatttcctctccagggggaggcg

SEQ ID NO: 251881 - DNA, 122 bp, Homo sapiens
cacctagtccttactctgaaaccaaatatcctgccatctggggactttcaccagccctgtcggttatcttaccgcaacaccaaagaggaggctcagccttccccagttccctgagttcacat

SEQ ID NO: 251882 - DNA, 122 bp, Homo sapiens
acaatacatgggctaggatgtgatttaaaaaccaaattattttactctgcctgatcaactcgccaaccggtctcggcagtttctttctaagggtcccctgggcgccattgctaacccttccc

SEQ ID NO: 251883 - DNA, 122 bp, Homo sapiens
aggggcctccgcctcgaggaggcggcgggacctgaggggccgtggtcgctgcactttgtccgagacccctagattggccaataggagaccggaaaggtgcagggagggccagtggggccgat

SEQ ID NO: 251884 - DNA, 122 bp, Homo sapiens
tcctccatcactaacatgggctgcgcatgcgccccccggcggcgggcggagaggcggggtcggctcagcccccggagccagaggtcacgtggcgtcctcagcttccaatcgcccccgcccac

SEQ ID NO: 251885 - DNA, 122 bp, Homo sapiens
gggtttggtgggaggccgtccaggtgggggtcgccaggtttagcgtgaggcgctccaggtcgagggttgcaaggtgccccttctgctcccgggctcaccctcctcccttgcgcgcaggctcc

SEQ ID NO: 251886 - DNA, 122 bp, Homo sapiens
agtaccaaaaactatcttaaaaggagtgtcttcaactttatttagggacatatctaaagacgatagagtgagaaacacaggtaatacatagggtggcattactttgagcattctttgcaagg

SEQ ID NO: 251887 - DNA, 122 bp, Homo sapiens
gtcaaaacacttaatgagatggctctttccagaaatcaaactatgaagaggagaggaacacgtgaaactagggagagttgtttatgttgctccttattgtaagattgaaatgatgagagtgt

SEQ ID NO: 251888 - DNA, 122 bp, Homo sapiens
ctgagccccctccccaaagactctccagtgccggccgtcccttcagccccctgcccccgacggcctccggggccagttgccggggcctccctgccaggccgtacccttcttcccagcgtctc

SEQ ID NO: 251889 - DNA, 122 bp, Homo sapiens
atcaagaataactaaagcctttcaatgttacactatgcaatccctagccaaaggaatgtgcgttcttactactccatgcatatgtcaaatgttcagaaaactttggataaaagaaatctgaa

SEQ ID NO: 251890 - DNA, 122 bp, Homo sapiens
ggactagggtggggaacaccggggccctgcggtcccctccctttcctgtatttaagaagccgccggcggcgcagaggcccaggcgggctggcgcgggggcgaggcggcccggtggcagcagc

SEQ ID NO: 251891 - DNA, 122 bp, Homo sapiens
tctacaaaccggcatgcccagcttgggcctctcccaggaggtccagatccacccagcccccggggtctgctgctagttacacctctcagaacgcaggtcctgctctgaaaccttcaatggct

SEQ ID NO: 251892 - DNA, 122 bp, Homo sapiens
aagctgctcatgaaaacctcacggctggtcagccagaaaacacaaagcttagggacgaaacgtcaacagagtagacatcagttcaggtcagccggcaacgagggaccgaaggatgacatcgc

SEQ ID NO: 251893 - DNA, 122 bp, Homo sapiens
ggctgtaaatgctgggcatggtagaaggatgcacacccctaaccacagcggctgtctctccgagtcaccacatacgctgttgcctgcctttttcctttcattcagctcattacctagtcttg

SEQ ID NO: 251894 - DNA, 122 bp, Homo sapiens
cgcgtgcgggctgcagagactggccgggtgcgggcggcggtggggccacctggggccccacgtggggccgggcgccgtcccaattgtcaagccgctgtgcttttctcttttgtgttcccact

SEQ ID NO: 251895 - DNA, 122 bp, Homo sapiens
aggagctgccccaaagcagcacagtccagcaagcaggacgcctggaccctttaaacaacccgactgctgcgccgtattcaccgcaataggcgggcaggagcgggacgcactgcttccagagt

SEQ ID NO: 251896 - DNA, 122 bp, Homo sapiens
gcatgggggtgctcgtggaaggcaggtgtgcgtgtcctgtgctacggaccaggaccagggcgctcacaccatccctgcctgggagggacggccagcaggtgacaaacgccagcgtcccaggg

SEQ ID NO: 251897 - DNA, 122 bp, Homo sapiens
gccaccgtgcccagcctaattcctgacttctctatacagagtcttcacttgataggcactcgtctgtagtaactcagtttgaatatctttagaaaatgtttagaatttatttgtaacaagat

SEQ ID NO: 251898 - DNA, 122 bp, Homo sapiens
gggaagcagcttgatccgatttgtattttagaaagatccccctggctcctgtgtgtgtgacggttcctgtgtgggctggggtttgaaggattgaaggggccaggagcccagagaggggacca

SEQ ID NO: 251899 - DNA, 122 bp, Homo sapiens
cctggaaggagccacaactgtggactgaccgaggctgcccggtggcaggaccctgggcgtcgggcactccgggtgggagatcagtggtcaaagccgcacggcgtggcctccctgtggggagg

SEQ ID NO: 251900 - DNA, 122 bp, Homo sapiens
ctattgaatgcaacttacaatgcttaataaaaatctttattcttttagtataaagtatggcgtggcttttaaattcacttgtaaaagctaattttatagaggtttaattcaaatcgaaacaa

SEQ ID NO: 251901 - DNA, 122 bp, Homo sapiens
aaaactgtatcagatattctaaattgataattggagaacagagatgctgtttcataatgccgcagtcacaaataggagatacataatggactcttactgctaaggatctaacatgaatgtat

SEQ ID NO: 251902 - DNA, 122 bp, Homo sapiens
ttcggtccaagttgaggtcgtgctggtgagtggctgaagtgagtgattgcaaactgaaatcggctttctgtaacagatccgaacacacttgtcatcagtctgacaagtgactgacaccacgc

SEQ ID NO: 251903 - DNA, 122 bp, Homo sapiens
tgccctggccaggcccaggcacacagagccatcaagaaagacttaaggaatgagcgtttgcgaggtttgaattccatactgccttctaaagaagctcagactcttcaaaaggaaagaggccc

SEQ ID NO: 251904 - DNA, 122 bp, Homo sapiens
acatcagctttgcttatcccgcctactgttctgacttctgattggccagatggagttcaccgactgccctgattggtccatcatccttgcgcagtgacattgcacaatattgtctcctcctc

SEQ ID NO: 251905 - DNA, 122 bp, Homo sapiens
ccggggtcctgccttaaggccgagcctgagagcctggatggtggagcttctggtcacctccgacggggcggacgtccgatatctgggagaggttggttcatccgacgggggagggctgggat

SEQ ID NO: 251906 - DNA, 122 bp, Homo sapiens
cggcgcggagctcgccgtgcggggtcctcgggcgggaggcggaggctccgccgcccaccccgccacggggacagagtccaggccccgccggacaccagggcacctgcacccccaccggcctg

SEQ ID NO: 251907 - DNA, 122 bp, Homo sapiens
cctacggccgggccagtctgcagccctacgaccccttctcctcccagccgatcccggccgcgcagcactcaccagccgtcgcgatcggcctccgccggattaggttatcaatcaggccggag

SEQ ID NO: 251908 - DNA, 122 bp, Homo sapiens
gcctcacatattccaagacctcctttctgcttcgctgaacctccatcttctttcaaatcacgctggggaccaaaacgcacaccccaggccacagagaaaggtgcctgggaccagcccctcaa

SEQ ID NO: 251909 - DNA, 122 bp, Homo sapiens
ccctccctcccctccccagggtgatcagccgggcgcaggggctgaagctggtggtggagacgctgatgtcctcactgaaacccatcggcaacattgtagtcatctgctgtgccttcttcatc

SEQ ID NO: 251910 - DNA, 122 bp, Homo sapiens
gtgtgttttgtgggtgagcttctcatttagagactcaattcctattttgttgttttgctacgctgtttggttgcctgtttggaagctatcagatgtatgaacacttatttagaaatggcata

SEQ ID NO: 251911 - DNA, 122 bp, Homo sapiens
tgaaaagtacaatgtgcttctctcactccagattcacgcaggggaactacttgcagattccgaggtcctgtccctagagattcaaattctattgatctggacaggggtcaggcatctgcatt

SEQ ID NO: 251912 - DNA, 122 bp, Homo sapiens
tgaccctcgcggtgacctcggtggccgggtccccggcccgctgctcgcgcatcagccacacggacagcagctccgacctctctgactgcccctccgaacccctgtccgacgagcagcgcctg

SEQ ID NO: 251913 - DNA, 122 bp, Homo sapiens
tgactacgtagctttggaatttgaggatttctttacctcatgacccaaatgactaattttcgtggaagaaatcacaggcatttggcaggcctcagagtagacatcatggttgctcgggcttt

SEQ ID NO: 251914 - DNA, 122 bp, Homo sapiens
gaaagggtcccttcatgtgccaagatctgtggctctgcaatggacacctcggccccgtgccgtccgtggtgaagaccctcgcgcgggctcccatcccctgccacacttggatggtgcccagc

SEQ ID NO: 251915 - DNA, 122 bp, Homo sapiens
agggggcgctataggccggagtttgggcacccagttccttccctgaggcctgctgagctgcgctttcagctacaaagtttcgctgaggctgtgggctgagacgctggtcccggagctgcgct

SEQ ID NO: 251916 - DNA, 122 bp, Homo sapiens
aagtctgaagtccagttaacagtaatgtacttttaccataaaatccccgacatggtgactcgcagcactgcagtttacaaagaacggctccccgtggagaaatcctggttaagggcagtctg

SEQ ID NO: 251917 - DNA, 122 bp, Homo sapiens
aggttgcatgaagaggcggggcctcgcggggcggagctgggggtggtctgtgggtccgcgcgggcttcgggtagttcctgggtccggggagcagacgatccgctagccacattaggcgctcg

SEQ ID NO: 251918 - DNA, 122 bp, Homo sapiens
tgtgcacaatgcttttgcctatccctgtttctgcatagattttagtcttcccaccagggacgcaactgtcagtttcctccgtctctctcggttctattccaatctgctcatctcccctcccg

SEQ ID NO: 251919 - DNA, 122 bp, Homo sapiens
ttcgtgatcgtaaattccagaatccgatgcggtggagagcctaggccggggttggcccctcggttccacgtgtctctgggaaatttttttcccctttcttcctaataagcctgcgtggaacg

SEQ ID NO: 251920 - DNA, 122 bp, Homo sapiens
ggtccgggagaacagctgccccgtgggagcgcacatcgccatcctctcctataactcccacgccaggcaccttgtgcgcttctcagacgcctacaagaagagtcaacttctcagagaaattg

SEQ ID NO: 251921 - DNA, 122 bp, Homo sapiens
cctacgtcccatcctgcctctccttaactggaaggtgggagaccaggccatcctacgtcccgtcccacccatccttagctggaaggtggcggccaggccatcacacgtcccgtcctgccctc

SEQ ID NO: 251922 - DNA, 122 bp, Homo sapiens
cctgcgtcctgcgtcctgggtcctgtgtcctgggtcctgcgtcctgggtcctgggtcctgcgtcctgcgtcctgggtcctgggtcctgggtcctgcgtcctgggtcctgggtcctgcatcct

SEQ ID NO: 251923 - DNA, 122 bp, Homo sapiens
gtatttatccgcccttcgcaaaaaatcagcttctctagggcgagcctttccaaccttttccgtcagggcacacagaaaatgacctgatttcaagagcatttggggtaaaactggaggggatt

SEQ ID NO: 251924 - DNA, 122 bp, Homo sapiens
tggcaggcagagaacggctggggaggggccgctgggaggggtggagaggtgagtagggcccgtgggaagcacctggcgaagagtgtttctgatccccaaatccagtatgcgtgccgggttct

SEQ ID NO: 251925 - DNA, 122 bp, Homo sapiens
ggagcccgggaaaaaggccccagaaggagtctggttttggacgtctgaccccacccctcccgcttagggcttctgatcccccagggtgatttcactggcccggggttgggagggcagggggc

SEQ ID NO: 251926 - DNA, 122 bp, Homo sapiens
ggtcccactgtgaacatcagggaagatactcctgaccggtgcttatttggggagctccatcgtgacggaatcccctgttctgaaatgcttcggaacgccgctggtgcatctgtttctcccta

SEQ ID NO: 251927 - DNA, 122 bp, Homo sapiens
aagtcggaagaaagccaccttaagcgctgcccatgtctgggaactacattacccagaatccgccctgcgaaatggtaacgtggctgagccaatgaagcttcagagaagccgtgccattgccg

SEQ ID NO: 251928 - DNA, 122 bp, Homo sapiens
gtccctttaccccagacttgggtgctgagggccggagctccatgctggagcccgcctgctcgctacagccaggcccgagccacagcgcgcccgggcgggacgcggggcccctgccgtggggc

SEQ ID NO: 251929 - DNA, 122 bp, Homo sapiens
aatcaagttataatgaggaaatcttgggcttgatggatcctgctttgcaaatggcaaatacggtattgataacctttttttaagtagaaaatcttgaggtgtttccagggttcttttctttt

SEQ ID NO: 251930 - DNA, 122 bp, Homo sapiens
gagtcgtcttaggagcccagtgcgggccaaacccatcccgggtcagaaaacatctgaagccgacgatgcggcgggggcagccgctgcagcagcccggccggcgcccagagaggcccaggtgt

SEQ ID NO: 251931 - DNA, 122 bp, Homo sapiens
ggccccctcaggggcctgtagggtccggtggtcaggcaggggaggctgcggtggcagcagcgggcatgcaggggccaatggccccaccccctgggccagccgagctgcctgctgcttctgca

SEQ ID NO: 251932 - DNA, 122 bp, Homo sapiens
agtggctggtgcatgctgtgagacttgtgcatgaagactcatcctgagtgaagagccacacggttccaccagggggaagactgatttttgcatatcatgcagaaactcaaccacctgttaga

SEQ ID NO: 251933 - DNA, 122 bp, Homo sapiens
cgcctgggagaagggaacgtcctggtcctggtcagcgggtggaggtcttcacagggccgccggtagctgacgcagctgcagccccaagcacagggccagggcatcctgcaggccacgtggac

SEQ ID NO: 251934 - DNA, 122 bp, Homo sapiens
ggtttgactccgctggctttctcaggcgggcagggcgggggtaggcagctgggaagatgacgtaatgtgctcccagccaggcctggaggcggccagcggtcgcaggtggagggtggcctgtt

SEQ ID NO: 251935 - DNA, 122 bp, Homo sapiens
ttaccttggatgggaaatcgaatcgtggattcaccaggccggtgctggcacactcaccctcgccctttccctccggttcagtacctattgtttctcctttcaaatatgtgattgtactagct

SEQ ID NO: 251936 - DNA, 122 bp, Homo sapiens
ttgtagggatggggggtgagccggcactcactgccaccccagccaactgccctgagtacccggcaaagcccagcagcatcagcagcagtaacagagtcaggtccagtagtaacagtaacagg

SEQ ID NO: 251937 - DNA, 122 bp, Homo sapiens
gtgtggaagctgaggtggaagaagggcttcatggaaaccctctctgatgaaatcatccctcgtttttgaacagcaattttggcttttccagtttctgtgtgcgctgttggtgcaggtgtgtt

SEQ ID NO: 251938 - DNA, 122 bp, Homo sapiens
tactcaggagactgaggcaggagaattgcatgaacctgggaggtgaatgttgcagtgaaccgagatcacatcactgcactccaacgtgggcgacagagcaagattccatcttaaaaataaat

SEQ ID NO: 251939 - DNA, 122 bp, Homo sapiens
caagagcttcgcctgccttcagattcagcctggggccctgccgtggggacctggccagggcggaggagggaggggccggggccgcctgaccctcccgtgcccgcaggggcccgacctcgccc

SEQ ID NO: 251940 - DNA, 122 bp, Homo sapiens
ttcctgctcttcctggaactcctaccaagctacagtgacccctgcctgatgctcggtttccgtacctttgtgctcctggtgtccatgcctgatacccgccctgcgcagtcggcctgctggga

SEQ ID NO: 251941 - DNA, 122 bp, Homo sapiens
atcagagctccctggcccagatgagggagcgcctgtcaacctgatcgctgagtgacagcccggccacctttcctggccgcccccacactccgcaaacacaaacacacacacgcacagacaca

SEQ ID NO: 251942 - DNA, 122 bp, Homo sapiens
ctaggaaggtccccagggccacgggtcactgcccagattgtggcatcctcataagacttgcgactcttcccagaggaaagaaaacccctctcagatgctccaaggactcccctagtctagct

SEQ ID NO: 251943 - DNA, 122 bp, Homo sapiens
ggacctacggataccacacacagacaggcgaaggggacgagcacgaggtctgaactgccgcgagagcagttccaaatagggactgaaaagtaacaaaataatgtggcagcttcgtccggcgc

SEQ ID NO: 251944 - DNA, 122 bp, Homo sapiens
tggagtaagcagagaggtggcattggattctctatgaatggttctgtgaaacagatgattcgttggcatttgaagacaaggagcatcttggtttatagagagaaggggagaacagcatcagg

SEQ ID NO: 251945 - DNA, 122 bp, Homo sapiens
ggcccagaccttgagtcctcagggacactgtgttgctgagcagggcagctctggagtggccgtggaggggagggagtgatggtttctagtggagaccagggaaggcttcttggaggaggcat

SEQ ID NO: 251946 - DNA, 122 bp, Homo sapiens
ccgtgatttgtcctgccttgtgggtatagggactaataatgttcccaaacaatgcttttccgttccagagggattatactatttaaacaaaaagcagaaacacagggttgatggtgtgaagg

SEQ ID NO: 251947 - DNA, 122 bp, Homo sapiens
tcgacctctttgcagtatctaatcccgccttgcaagctttcctggagctaacatcaactgcgggggtgggggccactaggtctgcgctcagtgtgacccagcggggtttgtgatgtgtttgt

SEQ ID NO: 251948 - DNA, 122 bp, Homo sapiens
ctccatctcctgatctcgtgatccacccgcctcggcctcccaaagttctgggattacaggcgtgagccaccgctcccggtcgctttgtttgctttttaacaatttagtaaatttttgtaatt

SEQ ID NO: 251949 - DNA, 122 bp, Homo sapiens
tcctagggtggtgactgtcaggactctcctataccacgtgtggtgctgcgggccctgtcacgccctctacccttgtggagattcaggcaatgtggcctgaatccagagtctcacctagactg

SEQ ID NO: 251950 - DNA, 122 bp, Homo sapiens
gttttagcccccgcttctgcggtccggctcggacaactttcctcggaactagtgacaggtcggggcagctggtgggtgaaaaggagctttagccaccagtcctgaacccccagttctcacac

SEQ ID NO: 251951 - DNA, 122 bp, Homo sapiens
ttgcacatctgccaagctggtcccagcctcttagacccctcatttctcaaagtgacagctcgccgctgcccctcctcccgcgcccaggccccgctgcgcctcccgcagcaaggctgcccggc

SEQ ID NO: 251952 - DNA, 122 bp, Homo sapiens
atccaatctccagccgcgtccatccgcccactcgagcccacctgtttgcggaccacagagcggcagcacatccctacacggggctgtcaggcaaggtcaacgcgctagagtgcaagagcctt

SEQ ID NO: 251953 - DNA, 122 bp, Homo sapiens
aatgggtggttctgccttggggtttcccaagaggctgcggccagatgttggccagagctgcgtcatctgaatgtcggccagggctggaggagccacttccaaggtggcacaccacgaggctg

SEQ ID NO: 251954 - DNA, 122 bp, Homo sapiens
aaaaaggaaaaaaaaaggtttctccagtccgcgcgcctcaggcgttagaaatagaaggggcgcatccctgcacctctctagaaactcccgggaaggagaaccttagatgcgagagccaggcc

SEQ ID NO: 251955 - DNA, 122 bp, Homo sapiens
aaaaaaaaagagagatttctttaagctctttgcctagggtcacaggtctttccacaggaccgtagactagagtcagatgtgttcctcaatcaattaggaaagggtggtgctggaatttgcat

SEQ ID NO: 251956 - DNA, 122 bp, Homo sapiens
ccgagtagggggaacgagtggtgattgacgcgccaggttactggccactgctcacctaggcgctagcaaacttctgccaagatcggaactgagtactaaacagcctccacagttctccctgg

SEQ ID NO: 251957 - DNA, 122 bp, Homo sapiens
cgcctggcaggccaggagggagggatggcgggattggagccctcggggaggagccggggccgtgccctggacagcttggtcaccagcaatggaaggacgaagcccaagtcaggaccgctgaa

SEQ ID NO: 251958 - DNA, 122 bp, Homo sapiens
ctggaagcacgctcagactccaggtcttcctggagttcagagatctgagattccagctcccggatcttcttgagggccatgttcttctgggcagcttcctcttccactctgccaaagcgacc

SEQ ID NO: 251959 - DNA, 122 bp, Homo sapiens
aacgcgagcttcttcttctttctgaaaacagaaggtcggcgtctgcctctgacaaacaggcgggctgcccgggtctcccagggggtgcccagaggtgggggcgaggtggcggatggagaagg

SEQ ID NO: 251960 - DNA, 122 bp, Homo sapiens
cccaatcagggaagcggccgctggcggcaggttggtgggggtaggggcttggtcccccaacgctggcactcagtttagctgtcacttgcagctgtcttaggaagtgcggctctcctctctgc

SEQ ID NO: 251961 - DNA, 122 bp, Homo sapiens
ccttaaagcacggacacaatgcagttgcaacctttgctaggggttaacaagggtgatcttcgctccagtccccagtaagttcctcatttctatcagagacctcatcagcatggcctctattg

SEQ ID NO: 251962 - DNA, 122 bp, Homo sapiens
gataggtgacaacgtgctagcagccctctctcgctctcgtgcctcctaggcctcgctgtccgctctggcagtgctcgaggagcctttcagcccacctctgcgctgtgagggcccctctctgg

SEQ ID NO: 251963 - DNA, 122 bp, Homo sapiens
tggtgagaggtcctcctttgcaggacagacctagactcagattgagcagaggcagactctcgttgcccttctcttcctgccatctccactgtgtggagctccatgttaagaaagcctctgaa

SEQ ID NO: 251964 - DNA, 122 bp, Homo sapiens
gagaggctaggaccgttcctttcaaggggcacacgtcacttctgcttattgctccacccccgccccccgccccgtggcacccaccctggtgggtatcattcttgctgtgttgtaaatgaaga

SEQ ID NO: 251965 - DNA, 122 bp, Homo sapiens
tgtgtggtgggggtggggggcaagttctccatctatctgccccacatggaactttctgtacgatatggccccatgtccatgggggagggggttgagaaagaatgaggagacagtgcctgggg

SEQ ID NO: 251966 - DNA, 122 bp, Homo sapiens
gaaattaaaagcaaataactaaataatgtgcctactgtgtgtcaggcaaagagcccagaacgtctctttcttattaagttctcaccctgaggaaagaattgctttttatactatattatgtc

SEQ ID NO: 251967 - DNA, 122 bp, Homo sapiens
gaggatggcccgttgagggcttggcacggatacctgacggtcggaggaaggggggagagccggtaaaggaggctgacccaaaactgaggcccggtgcatcatccctcatgagaggcaagccc

SEQ ID NO: 251968 - DNA, 122 bp, Homo sapiens
gccacgcagctcaagggcggaagcctggggcctgctgctggtgccctgggctgctggggccggggccgggggctgctgctgccgccacaggctggtgcgcaccacaagaagcaggtcacaca

SEQ ID NO: 251969 - DNA, 122 bp, Homo sapiens
caattttactaagaaaattgtgggaatcagtaaacccacaagttcatggcatcatttactcgcctacttgcctccctcccgtaactacgtataaactgcctactaagaccaattcctacatt

SEQ ID NO: 251970 - DNA, 122 bp, Homo sapiens
aggcggcaggaggcgggtgggtcaaggtaactctgggctacagagtccttgctgggggttcggggagcgcttggaccccggcttctgggacgcgtcaggtacgtctccgagtccggcgtcgc

SEQ ID NO: 251971 - DNA, 122 bp, Homo sapiens
gtccaagggctgtgtgaaggcccccgcgcggagcagctggaacacgggctgatgaaattacggggaattcaaagcagccggcgtcgcccgctgtctggcttcattacggggactggcctcga

SEQ ID NO: 251972 - DNA, 122 bp, Homo sapiens
gctcctgccatcctcctgggcctggggagatgcccagctacgatagtgccctcggccttgcgaaatcgggcagattttgtgtaatctggactttctttctcacttttctctctgattctctt

SEQ ID NO: 251973 - DNA, 122 bp, Homo sapiens
aggatctaagtaggtgctgtggctccaggccgggaagttgagtcaggaggggtgggcgtccgaggaggtggaaggaatatctcattcttatgtactctgtttcggttttaggcttatgggtt

SEQ ID NO: 251974 - DNA, 122 bp, Homo sapiens
gggggttctgaacacgaatgccgtgtgggggttccttaaagagaccagagaccggcccggcgcggtggctcacgcctgtaatcccagcactttgggaggccgaggcgggcggatcacggggt

SEQ ID NO: 251975 - DNA, 122 bp, Homo sapiens
gagagatggcgcctgagccccgatggaagctgtcagtgggccctggcacacattctcccacgggggcggacttaggtcccaaagtgacccccagcctcgcggcggccagggcgggccgagtc

SEQ ID NO: 251976 - DNA, 122 bp, Homo sapiens
gattccacgtttcctttaagcggggctggcggagccgcaaggcggcaaggaactggattgcgattggtcagcacgtgcctcggtcggcggtacaattggctgaggcgctgggccttgggaag

SEQ ID NO: 251977 - DNA, 122 bp, Homo sapiens
agtaccatcctgtcctatttttagaagagacaaataataacatcaattagtaaacatttacgtgaataaataaatgaaagttggaaagccattgtcaatggagagaatgtctcaacttttta

SEQ ID NO: 251978 - DNA, 122 bp, Homo sapiens
gtggctcttggccagagttttggagagcacagccctggcccatgagcctgctgggtcctccgagcgccgccccacccaggcctgcgcggcgtctggtggccatcaggtaaggctgggtcatg

SEQ ID NO: 251979 - DNA, 122 bp, Homo sapiens
cacccagaaggccagccccagcggcttccccagcctccggaagtgggaccacagcctgcccgcaaggtgacgctgaccagggggggcctccagcagcccccacatctgccagcggggcccca

SEQ ID NO: 251980 - DNA, 122 bp, Homo sapiens
acccgagttctgaggcctcctctcagagaacgactccgcttgaaaggccctcagggaatgcgggacgggaatgcgggcacccactgaaggggcgggtgggggattgctggagacccccattg

SEQ ID NO: 251981 - DNA, 122 bp, Homo sapiens
ggaccatccagttctggccccgtgcaggaggacaggacgccgtctggtcgctgccctgggcgctcaacatgggagctgccagaggagagcgccctgtgagtgcctgacaaatggaggtattt

SEQ ID NO: 251982 - DNA, 122 bp, Homo sapiens
ttttaggtgtctttgggtgtccagggaaagccgggctaattctggggctggaaatgtctccggggaacctgcggcgacggccttggccctcttattccccggggtgatactggccccatgtg

SEQ ID NO: 251983 - DNA, 122 bp, Homo sapiens
gggggatgacataatcctcacgtgatcaggagctgacgtgaaccgaagtccttatattcccgggcttctttctcctctgggtaccagctccttactgccctgcagacaagcgtgccgtgcgt

SEQ ID NO: 251984 - DNA, 122 bp, Homo sapiens
tacttaatttaaaataaaaacacacttgtgaggtgaggacagtgcttgcttattacttttcggcacaagtcattatagggaaagataaaatgaaatagacacacacctggcctttggcataa

SEQ ID NO: 251985 - DNA, 122 bp, Homo sapiens
tgccggagcccggtgcccccgggagcatctcctctacctgagcgccacatggcgaccacgcgcagttttcccaccttgcggatggagagatttgtctcagccagagagatccagattcagcc

SEQ ID NO: 251986 - DNA, 122 bp, Homo sapiens
ccaaagcccacacagtctttctcaaaaatgtggatattcaggttaacctgcgattttgttcgaaagtggctaaactgcattatccgaataatttacttttccactccttgggtataactaaa

SEQ ID NO: 251987 - DNA, 122 bp, Homo sapiens
aggaatccccggacctcttagagctttgctttggggcaagggccaaggaggctttgcctgcgccaagtgcagttgactgtctgggtttacaaaataaacccagaagcagcctgacgtctccg

SEQ ID NO: 251988 - DNA, 122 bp, Homo sapiens
ccagggccaggcaggcggcgggttccacttcactctccgacgttgtgagtatgcatttgccggtgtccttactgaccatggttcctgcattcagaaacagcaacagaggtgtcagtgggaca

SEQ ID NO: 251989 - DNA, 122 bp, Homo sapiens
cagaaaacttaccacaggcttactctcctgcagccctacaggaaattattgcaaagaatacgcattagcagccaacacacggaattggactagagaactggctggtgtgcaagcggaatgga

SEQ ID NO: 251990 - DNA, 122 bp, Homo sapiens
gaggacacacagtgaccctgaattgtggacccgcaaatgagctccatccaccctcctacacggggcaaaagccagatcattgtgaccacttgaaaatcaacattccataaccataaacacat

SEQ ID NO: 251991 - DNA, 122 bp, Homo sapiens
aggtatgctgtttctttttgatattgttgatttctttaggtgtaatagtggcatttacaacgttgagagaaacatactgaaatactaagaagttaactgatcttatggccaggatgtgcttc

SEQ ID NO: 251992 - DNA, 122 bp, Homo sapiens
cacatatcagttaagaagttttgcagtgaagcaaaattttcctagtggcctaatattaatcgaggagggtgctggagcttatctagtgctgataaaaaggccaaatattaaatcccaaatta

SEQ ID NO: 251993 - DNA, 122 bp, Homo sapiens
ccggcgcaggcgccaatcacagggtcctgaggtcgcctgacgttcagggcagccggaagacggggaggtctggacctgaaccgagacaaggaggtaccacactattcactgctgcgtcgcag

SEQ ID NO: 251994 - DNA, 122 bp, Homo sapiens
gccccgggccgcctgcagggcgcgccgcgtcccgtccggtcccgtcccgttccgtcccgtcgggtcccagccccgccaactctcaccctgcccggcccttccagcggatccacttgcagccc

SEQ ID NO: 251995 - DNA, 122 bp, Homo sapiens
acaggaacctgcttctgcctggctctaggacaacacttcttgctgggctcctgccaagtgcggctgggctgggcctggagcgaccaatccactgatccaccaatccggagggcagcccagga

SEQ ID NO: 251996 - DNA, 122 bp, Homo sapiens
cgactggcatgcagcagtgggaggatcgcgccacagaaggtagaaatcctaaaagcacaccggttccctattactctgcttggtactatgagggggaaaagacatacacatatcagcactcc

SEQ ID NO: 251997 - DNA, 122 bp, Homo sapiens
gtcccgggggcagggagggagtccagctgtgtgccgcgtggcctcagcaggctctgcttccggtcccctcccctgccgcaggtatttaaggtctgagaggggccagctgggagctgttgagg

SEQ ID NO: 251998 - DNA, 122 bp, Homo sapiens
aggggggaaagccgagaccccagagggagagcagcccctatggccagaagccctcggatccggacgtcgggggctctaaactgagtaaatacataggaaacttctccgctaggttttgcagg

SEQ ID NO: 251999 - DNA, 122 bp, Homo sapiens
acaacgccgaaccccgttctcggaaacgccgcccggccggctcccccgacgcgctgctcccgtaccaaaggcaggcccgtcgccaccacattcctcggaggcctccccgcggcctgagcccc

SEQ ID NO: 252000 - DNA, 122 bp, Homo sapiens
ctggaaggcaacgagacgggcctcgtcaaccacggctgggaaccagggcaacatctgtggcggcccaggacaacactgcggatcccggtcacggagatgatggcctgagaagacgtgtctgt

SEQ ID NO: 252001 - DNA, 122 bp, Homo sapiens
ggggggctgctggtggccatcgcggtggaacactggaacctgcataaacgcatcgccctccgtgtcctcctcatcgttggggtgcggcctgccccgtgagttcctcctgcaaaccagcacgg

SEQ ID NO: 252002 - DNA, 122 bp, Homo sapiens
cgtagactctgcgggaacactgcctggccacgtagactctgcgggaacactgcctggccacgtagactctgcaggaacactgcctggccacttagactctgcaggaacactgctgttacctc

SEQ ID NO: 252003 - DNA, 122 bp, Homo sapiens
accccgacctttctgagatgaggcagcgccgcccctcccggaccccaccctgatcccggccggggcaacagtggcgcagactcacccatgagcccactgaggaagacgccgtagagggacag

SEQ ID NO: 252004 - DNA, 122 bp, Homo sapiens
gtccgcccggcgctccccggcctctcacagatgtgctgcgatggcgcacgcgggatgcgccgctggaaccacacgctcaggccgtcctcctgcagccggtacagccgctccttgtgccacgt

SEQ ID NO: 252005 - DNA, 122 bp, Homo sapiens
aagaatcttccttttctctagagccaagagaacaggctcaaaccaaataaactagccatacgatcttctaaatgccccagtgtgttcacagtgaacacattactttcatatgccaaaaagtc

SEQ ID NO: 252006 - DNA, 122 bp, Homo sapiens
gaaggcagaactggagcagccgacccgccctggatgtgcggaaggggcctccagagccaccgggcaggaggcagcggggctgtttccacaaccaggccctacaggtccagactccagctgtc

SEQ ID NO: 252007 - DNA, 122 bp, Homo sapiens
gtcctcctgtgctacctcctgaccttgacgggcaactcggcgctggtgctgctggcggtgcgcgacccgcgcctgcacacgcccatgtactacttcctctgccacctggccttggtagacgc

SEQ ID NO: 252008 - DNA, 122 bp, Homo sapiens
cgggggcgggctcaggccgagacagagcggcgaaccaatgactacccttccagcttaaaccggtcccaaaaccaatcggaaagggagggcacagtacaagcaggataattggacagggtttc

SEQ ID NO: 252009 - DNA, 122 bp, Homo sapiens
accaaaagaaaaacaatgtccctccctagcccagtttacagcctgtcagaggagaggatccggttacttcttccaaattgtatacgttgggttgtttgatatactaggttttttttcttttt

SEQ ID NO: 252010 - DNA, 122 bp, Homo sapiens
ctttcaaaattttgaacttgtatttggttcttggatgaatttattatcatttggacattacggttgagtagtaacttctgattatggctgggcatggtggcttacgcctgtaatcccagcac

SEQ ID NO: 252011 - DNA, 122 bp, Homo sapiens
gcggcgcccggagtcgggactgcgtcgggcgtcgccgccggacgtgccggcagcttggtgcgacgtgtcttgccattggcctgcttcggtagccccactgccgtacgccgcccccattggcc

SEQ ID NO: 252012 - DNA, 122 bp, Homo sapiens
tgtgtctgtgtgaatcagatctgcctgtcgccgtgagctttgtgtctgcctggattggtgcgggggtgtgtgtgtttgtgtaccggcgtgtgattgttttggtttgctgtgatgagtgtggg

SEQ ID NO: 252013 - DNA, 122 bp, Homo sapiens
gacccttgagatcgtgagcgcttggagtgtacccctcctttcctggggtagagggtcagtcgagagtagccttcgttaaccttaattgaaactggtaaactcctccctcggcccctttaaaa

SEQ ID NO: 252014 - DNA, 122 bp, Homo sapiens
agaagaaaactttgtatacattttgtgcagtgaataaagtggatgttagtaaatatttggcgtattgtgggccacctagctctcaaacttacttattggttagaggttatcatgcattgtat

SEQ ID NO: 252015 - DNA, 122 bp, Homo sapiens
tggattggtgccgagggatatatagtggcttaagtgtacagctgaatgctatatgagtgccgagtatgctatttacatctttctgggggtgtcaaccttgaattcttggaaggcagcctata

SEQ ID NO: 252016 - DNA, 122 bp, Homo sapiens
gagaggagtgaggacagaaaaagtgtcagtgattcatcagagaagtgagctcatttgggccgtgactattgtgagtcacttgttatctgcagagtacaaatgctatgagaggccttggtgtt

SEQ ID NO: 252017 - DNA, 122 bp, Homo sapiens
aggcctctctggggtccccttgtgtcctgcccttgtgctggtggccagaggctgttgccacgtcttccttccagcaggctttacagagaggcatggcatgaataatgaccaggcccactcta

SEQ ID NO: 252018 - DNA, 122 bp, Homo sapiens
cggggccataggtgcagattaccggccccccactcccccgcccaccgtgcctggcccctccggatgcactcacgttctgataaggccccaccagaaagcggtcgtgcacgtagcgctccacc

SEQ ID NO: 252019 - DNA, 122 bp, Homo sapiens
gcctgtgtgagagcaaacctcgggcagggctagtggccttctaggcaggggtttgggaagcgccacacttgggtgcggggggggggggaggggagcatgggggtggtgccgggatgtggcac

SEQ ID NO: 252020 - DNA, 122 bp, Homo sapiens
gacctagtagtacaagctggaggatgtgcaggccttggaatgcctccaggacattttgaacggagagaagaccagcccctccagggaatgatcctgtgatatgaagaaccctagggtggctc

SEQ ID NO: 252021 - DNA, 122 bp, Homo sapiens
aaagggtcgtaagcttaatagccttcaagaaaatggctgccctcttgccgcgggagtgtgcggaccaaacctctctcacgtgaccctgaccgggcgcagtcccgtcaacgccggcgcgcgca

SEQ ID NO: 252022 - DNA, 122 bp, Homo sapiens
aaaaggcaaacgagaagcagcaggaacccaagtagctttgtgcttcgtgtccaaccctcccgccctttgcctgagtgcctggagccagtcccaccatgcccacgtctcctcctgcagggccc

SEQ ID NO: 252023 - DNA, 122 bp, Homo sapiens
tgcccactggcctggggctgggcttacacctttgctgaacatttgttctgtgcctgaccacgtccagggccctggagcagacaaagaaagacgtgggtcagcattagtctctgccctgaggg

SEQ ID NO: 252024 - DNA, 122 bp, Homo sapiens
agagaatcgagtggccaaggtagcgcctttcccacggttagtcccggcccgggaggggagcgcaaccttgaccgtgcgctaagaggcgagacgcgctctgtgccctcctcccccgccggcgg

SEQ ID NO: 252025 - DNA, 122 bp, Homo sapiens
gttttttcctaacatttctcaaacaaggcaattagggccgtcagaatcggtgctggaagacgaagtccccacagtgcaataatgaggttcccacggaaaatcagtacgttgtgttcgtaact

SEQ ID NO: 252026 - DNA, 122 bp, Homo sapiens
gaaaaaagaaaatctttaagccagacttagtaggacctcccatagcagtgattctttaatcgtggctcttcagtcatcacctgagaatcacctggggcctattcctagcttcatctcagacc

SEQ ID NO: 252027 - DNA, 122 bp, Homo sapiens
gcccctgaagcggacagagtcccgggcccggctcacccacctggacggctgccctgcctccgtctccccagcaacagaggaaaacccagagcctctggaactcggatgctaggagcatggga

SEQ ID NO: 252028 - DNA, 122 bp, Homo sapiens
agggaaccctttcccgtgcgaggtggaccccaccgtgtttgaagtgcccaacgggtacagcgtgctgggcatggagcgcaacgagcccctccgggacgaggacgatgacctcctgcagttcg

SEQ ID NO: 252029 - DNA, 122 bp, Homo sapiens
tgggcaacatggcaagaccctgtatgtaccaaaaaacattttttatttacctgggtatggcggcacgtgcctgtggtcccagctacttgggaggctgaggcaaaaggatcatttgaccctgg

SEQ ID NO: 252030 - DNA, 122 bp, Homo sapiens
tgcagtcatgtgacgagcgccgctccaaagctctggactggctctgcggcagatgggcggcggctgaggagcctaactcaacctggactagtcgtggaagagctaggacttagaggcgcgaa

SEQ ID NO: 252031 - DNA, 122 bp, Homo sapiens
atgttcttgggatcacatttaaactcagggaccaccactcacccagcctgggaagggtcacggctttatcagtcacatacttgaatcagaatcaaaatagttttcctcttagcttagccttt

SEQ ID NO: 252032 - DNA, 122 bp, Homo sapiens
gtgattctgttttgtttttaggctgaacagatacctcttggaatcacctactgttgcattcgcatctcagactttgagaaacaatgacatagatctttggttctcaaactgtagcgtgcatc

SEQ ID NO: 252033 - DNA, 122 bp, Homo sapiens
gggtgaattatgcgcaagtttctaggaaaagtaatgcagacgtttctaggaaaacaaccccggtcgtagggtcgttaccaggaaaggggtggcaacttctgggtgttgccatggcaatggta

SEQ ID NO: 252034 - DNA, 122 bp, Homo sapiens
gagcagcggcgggtccaggaaacccctggggcgtacgggtggccccgggggggccgggggcggggaggcgggcggccggcaccgccccggccgacaaaagtcccttcagttcagccggctgc

SEQ ID NO: 252035 - DNA, 122 bp, Homo sapiens
ttgagaccagcctaaccaacatagtgagattcccatctctgcaaaaaattaaaaaattagcgaggcatgggggcatgtgtgcctgtagtcacagctacttaagaggctgaagtgggaagatt

SEQ ID NO: 252036 - DNA, 122 bp, Homo sapiens
caaacaaaaaaaatagtttgtgggaccaattccaatccagtccaggggagcacacactggcgaccaacatcccccatcaggccccttctgggtcgagagaatgcgcctggaacagactggga

SEQ ID NO: 252037 - DNA, 122 bp, Homo sapiens
aaggggtgacagacggcacctggaaaatcgggtcactcccacccaaatactgcgcttttccgacgggcttaaaaaatggcgcgccacgagattatatcctgcacctggctcggagggtccta

SEQ ID NO: 252038 - DNA, 122 bp, Homo sapiens
atgtagccgtctgctagaattgaaagccaggtatggtgggcttctaccccaccccaatcacgacgtcctaatgagggctaccaactaccaattaccacacctcccccctggcctagggccct

SEQ ID NO: 252039 - DNA, 122 bp, Homo sapiens
ttctctcaagatgaggagaatttcaatgaagccagtgttctttttgatgcaaatccgctccgcttctcccaggaggtctggccaatgggctcagggcttctgggcccccagaaaacctcctc

SEQ ID NO: 252040 - DNA, 122 bp, Homo sapiens
atcaccatgcgtagctttagtgatctgagattttatctccagttgtcaataataacgacacgctaggaaaagactgtgttcacttcaaactaaataaaagtgaaggaatctgaatgcttttc

SEQ ID NO: 252041 - DNA, 122 bp, Homo sapiens
aattatctttaacaatacttaaaaggaaatatctttgttcccattttataacctgagaaacgtagagataacagatgaagaatgtaaatctaatttcatgggctcccaaaacagcattctgt

SEQ ID NO: 252042 - DNA, 122 bp, Homo sapiens
ggtttttctgaagctcttcctgagcccatggcagacgaagctcatccaccagagaccctccgaatcctccacaacacagggttctaagcagctactagcaggcgatcaggagtggcagggaa

SEQ ID NO: 252043 - DNA, 122 bp, Homo sapiens
gatgtggacactgtgctgaaagcccaaggaagctttaatcaattctcaagttgctaggatcgtccactcaagtttattttgccagctctgcctggtatgaaactgtcaatagatataacaca

SEQ ID NO: 252044 - DNA, 122 bp, Homo sapiens
agccctgaactgaccaggatgacccacctacgcgggcggcccgtttcagccctgaactgacgaggatgccccgcctgccccgcatatttcaaccctgaactgaccaggatgccccgcctact

SEQ ID NO: 252045 - DNA, 122 bp, Homo sapiens
gtggtgcatgtattgaatcaaagatgtctctatagtgctgtgtttacagaaggaagaatacgtgggtccaaaaaccaagaagtagaagcaggtgtggctccatatctaaacccttatattca

SEQ ID NO: 252046 - DNA, 122 bp, Homo sapiens
cccccaaaaaagaaccaccatccttacaaacaaatgaaaatcggctgggtctttagggcccggccacgatgtgtgactgcagcagtgactctcaggaggaggcacaaccagacaccgggtcc

SEQ ID NO: 252047 - DNA, 122 bp, Homo sapiens
gtgctaagtcccccattgcctggggccagcagggctggccggctgctccgagtgcggggccggccaagcccacgcccacccagaactccagctagcccgcaagcgccgcaggcagccccggt

SEQ ID NO: 252048 - DNA, 122 bp, Homo sapiens
ccaaatcttccaaccttcaaaggctcatactttgtcttacttcttgccatttctgaatgccgcgccagtcgtccgggctgaaaaccgtgttgtacacccggagatctgaccccatcattcac

SEQ ID NO: 252049 - DNA, 122 bp, Homo sapiens
ccgggggcagtgggtcagcatgtgccccagtcactgcttgcctaggtacctgcatggagacgaagggctggcccagagttgcagtgtctcctcctcagtcccctgaccccttttcttttttg

SEQ ID NO: 252050 - DNA, 122 bp, Homo sapiens
tttctcttttgtttacacttcctcgggggctttctaaatgactttgttcacgctgcctctcgtcttcattggctggggtgtggggttatatgcattggaaggcagggaggcaggcctctgag

SEQ ID NO: 252051 - DNA, 122 bp, Homo sapiens
gcagggcctagcaccgacagcagcggttgttggctgcgccgggtggctgtgcccgtgagacgagccttcatggcactgaactggagtattgttttgcagtgttatatttgtgaataattttg

SEQ ID NO: 252052 - DNA, 122 bp, Homo sapiens
atcccttcccgcgccgtgcccgcggcggaaggcgcccctgcagcgcgtgcatccgcggagcggtggcgacctcagcctgagcagaggagttgcagtgattcctgcctcgctttcagcggact

SEQ ID NO: 252053 - DNA, 122 bp, Homo sapiens
atgaagtgtgtggtttttctccgttcagggagtttcatcaggaccgcagaacccataacacgtaagcgaacataggcaggaaggacttgagaaaggaactggcttatgattataagaccacg

SEQ ID NO: 252054 - DNA, 122 bp, Homo sapiens
cttatcaggatcctgaacccctgaaatcactcgggagatgaggagagcttcggtgtccgccgcccagcgccgcagtctgcaatctccctggttgcggggctctgccctgccgtggccgaacg

SEQ ID NO: 252055 - DNA, 122 bp, Homo sapiens
cagtgttgtcgtctcgtaggcttgaaaggtaggtgcccgacattagggactgtcgcagcccggggaattgtccccatctgctggcttaccttgtgggcgtggatcccctctaactttcctaa

SEQ ID NO: 252056 - DNA, 122 bp, Homo sapiens
atgagcgcgtcctcagcgagcgtgcctaggcccggctcacacctctgctctgctgatcaccgaaaacactgctgacttctggtaccagcaacgtttctgaagcgcattcccacgcagctctc

SEQ ID NO: 252057 - DNA, 122 bp, Homo sapiens
tcgaggatggattgttttatgctgatgcaatgtgctatcacgtcagggctccggcggccacgtaacctcagccccagctaccggccgcccggtccccccctcccgctgcaggaaggggggca

SEQ ID NO: 252058 - DNA, 122 bp, Homo sapiens
ttccacacaacagccctaagtatctccacagcttcacacacagccccttagagacctatacgctaagacctaagcaactgtgcatcatatactttcaactttactgttaggttacacataaa

SEQ ID NO: 252059 - DNA, 122 bp, Homo sapiens
agatggtgtgagtgaggggaacttttagagtggaactgggcatgtcctccgcctaccccccgagcctgtatttatttttgtataattctctggatgagggagagtggtcgtgagctggtctt

SEQ ID NO: 252060 - DNA, 122 bp, Homo sapiens
aggttttgtgagcgtctctccgtgcctggccgcctgtggaggctgtggtttgcatcttaccgtctgggctgggaccaggacgggggctgggtgctgggaggacgaagcgctcagcccggtgc

SEQ ID NO: 252061 - DNA, 122 bp, Homo sapiens
acccgtcccaaagttgagagaaacctggacgtttcataaacaaaacccgccctccagcagcgtgtttatgtggaggcggcctcgcgtgtctgaggctggggtgtgtgtgctcgtgtgtgtgt

SEQ ID NO: 252062 - DNA, 122 bp, Homo sapiens
cgaatgtcgcagactggtgaagccctaggtgtgacaagactgggctcccggagtgggagtcgtaacctcccgtgcaactcaaccctctacccccaaaagcccgcacgctgcgcccagccctc

SEQ ID NO: 252063 - DNA, 122 bp, Homo sapiens
caagaactctccgcactccctggacctctcagagcctctcctcatttactctttccaatgcgctggctcaaaagagcctagataagaacaccaagttctggctgtccttccagcaaagagtt

SEQ ID NO: 252064 - DNA, 122 bp, Homo sapiens
gcagcttcaccagctcgtctcctgccgtggcctccaggatgggtcctttgagccactcgacgctgatgaagggattttctgccggacaggagaagtcactgtaaatccaggactgacccgtc

SEQ ID NO: 252065 - DNA, 122 bp, Homo sapiens
ctcactacctcgggcagctatgtatgtcccccaggcgtgtgtccagtgtcctgctgggggcgctggcccccaatgtgccccttttgctttcagacagccaggacgttgggctgcaacagcct

SEQ ID NO: 252066 - DNA, 122 bp, Homo sapiens
cccggcagggggcgccggagagcaggggcgtttgcaccacctgcacggggagcaggggtccggaatattatggggctggggggaaaatgaggctaggagttggggtatcggatgcaaaccca

SEQ ID NO: 252067 - DNA, 122 bp, Homo sapiens
ctggccatgcgatgcggacgccggacccgcttggggagcggtggagggtggggctgaactcggtgacgcctccctcacacccagcttcagtggcgccaacgccgcttccccgcaccctcagg

SEQ ID NO: 252068 - DNA, 122 bp, Homo sapiens
gtcgggagcgccaggctgaacagtcactccgacgtggggtggatcctggggttgcagcgtcggtggcccgggctgagcctccagctgaggtgcaggaacttggagccgccagcagggtgggt

SEQ ID NO: 252069 - DNA, 122 bp, Homo sapiens
cgtgagccgccgtgcccggcccaagagccacatttctaacaagctccccggtaataatggcgctggtccaggctccgaactttgagtactgagagatgccactcctgctattcccccgctag

SEQ ID NO: 252070 - DNA, 122 bp, Homo sapiens
ggcctcatccgtggctggggccaaggccgaggggtctgaggatggactcggggtggcttacgctccatcttgctctctcgatgctgccaggcgtagttgagcagctctttttggctgcgctt

SEQ ID NO: 252071 - DNA, 122 bp, Homo sapiens
catggtgaaaccccatctctactactaataataaaaaaattagccgggcgtcatggctcacgtctgtaattccagctactcaggaggctcaagcaggagaatcccttgaacccgggaggcag

SEQ ID NO: 252072 - DNA, 122 bp, Homo sapiens
ggagtgcgctggcctgcctgctaccctccggtgtttgtgactttttaccagctgtcctgacgaagcacagggtggagcgagcgctggtgtgctgggtggattctcatcccccgatagctgga

SEQ ID NO: 252073 - DNA, 122 bp, Homo sapiens
tttctttgtgcctctctcgctcatggtctgacctgtcatcatagtaactggagtcgtggccggatcctgagagttcagtcacttcacttcctccgaccttcaggactagctttagaggcttc

SEQ ID NO: 252074 - DNA, 122 bp, Homo sapiens
ctgaacttctcggggtctccgttttctcccgtgcctcagctacggctggagtaacagcagcgcaagcacatccctgcgggaaccacaacccatcgaggtcgccagctcctttcccacagtga

SEQ ID NO: 252075 - DNA, 122 bp, Homo sapiens
gagcagcttggttgtgtggcattgaggcgaggaggcggggagtggccgcccacggagggtcgggctcctcggaagcagtttcctgacttgcatggtagtccctgcgggctctgttctcatag

SEQ ID NO: 252076 - DNA, 122 bp, Homo sapiens
tgcccttaggtcccaatgggcacttacctgatgtcatagccatgcatgtccttctccgggcgcccatggatgatccagtgggccagctcctgcccacagccaccacccagcatcattcctgg

SEQ ID NO: 252077 - DNA, 122 bp, Homo sapiens
gggtcgccggggggcggggggtcagcagcagacgctgagctgtgaagactagggtggccccgaaaggccgaggaaaggagaaagggccatgagaagagtctggcgagcgctcgaggccgggg

SEQ ID NO: 252078 - DNA, 122 bp, Homo sapiens
gccgcatatggtgcccggcatgtaatgccattttcattcaataatcaattgtcggctaagcgcagtggctcacgcctgtaatcccaccactttgggaggccaaggcaggcggatcacttgag

SEQ ID NO: 252079 - DNA, 122 bp, Homo sapiens
aataataagggagtgtaaatctcaccatatagatggtggcccaagtgaacaaacacataccgagagtttttctagataccagtggttttatttgtttctgattttaggtaccaaaaataaac

SEQ ID NO: 252080 - DNA, 122 bp, Homo sapiens
cccaggcctgttcctggcagctgtggctgcagctgtgctcctgctccctcctggaatgtgcgacaagcccaaatgttccggggaggcggccggggcagggggcttagaagtgctaatatggt

SEQ ID NO: 252081 - DNA, 122 bp, Homo sapiens
aacgagcctcctcggacaggaacaccgtggatggccccacatgaagccaggaaagtcccacggaacctggcagcttccagcaacgattgggccaatagcacatatcacgagccttggaaaag

SEQ ID NO: 252082 - DNA, 122 bp, Homo sapiens
agaagacaataggtcctcacatcttcacttacttgggcttctctctcagaggcagagaatcgactgggattccagtctgcagggccttgggcagtctttagtctgggtctcagctccttcat

SEQ ID NO: 252083 - DNA, 122 bp, Homo sapiens
cgcaatacgccagaatcttccggcgtctttccggtggtggtcgtttttgctgcctgcgagcgcgtccgcgggctgggcgtttccggctcgctgggtccgggccaggtaactggagccggaaa

SEQ ID NO: 252084 - DNA, 122 bp, Homo sapiens
cagccatgtggctcccaagctcccttagcaaaagggtggttctcagaactgctccattcacgagtcctgcaaccagaggcctgggctcaactcacacaaagttctgagcaatggccagcacc

SEQ ID NO: 252085 - DNA, 122 bp, Homo sapiens
gctccacccagttggagcttccaggctgctttgtttacctaagcaagcctgggcactggccggcgtccctctcccagcctcgttgccgccttgcagtttgatctcagactgctgtgctagca

SEQ ID NO: 252086 - DNA, 122 bp, Homo sapiens
tgccggggcagtactgctggtgttggcccaggcccagcaggggcagcgcgcagaagaggacgcagaaggcgtagatggctggcagcgccaggcgggcgcagcggggcccgtccagctgcgcg

SEQ ID NO: 252087 - DNA, 122 bp, Homo sapiens
ccttcaccccctgcctagggctggctggacctgggtgaggccagatgtgtgagtgtgaggcggtctcgaagtaggctgggctgagggggaagttccattgttttcttttgttttacttttta

SEQ ID NO: 252088 - DNA, 122 bp, Homo sapiens
ctgccccctgagacccgcccactcaacggcctagggccccctagcaccccgctcgatcaccgagggtaccagtccctgtcagacagccccccggggtcccgagtcttcactgagtcagagaa

SEQ ID NO: 252089 - DNA, 122 bp, Homo sapiens
gcggcgcccgggagagcggggatctgctgaggggcgctggagactccgcggctggaggcgcgcgggcgtgcgcacgcgcgcctgcgagtgtgagtgtatgggtgcgcgcgcgcccacggggt

SEQ ID NO: 252090 - DNA, 122 bp, Homo sapiens
cggcgcggcctgggcgggggtcgggagagggagtcgggctgctggaggggctggggcctccggggccaccgctcttggaagggggccatctctcatgccagggatgtgcaagatccggggtg

SEQ ID NO: 252091 - DNA, 122 bp, Homo sapiens
tggagactccctcggagacctctgcgcacatggagacccgcgcgcacgtggagactcgcgcgcaaaaggagaccccagtgcacatggagacttccacgcactggtctctccaaggaatacct

SEQ ID NO: 252092 - DNA, 122 bp, Homo sapiens
actaagtgcacaataaatgattgctgctctgcataaggttgctgttgtcatcatcagcatcgttattatttttattatagatcatgctgagtgtaattctgaactctgtgggtaataagctc

SEQ ID NO: 252093 - DNA, 122 bp, Homo sapiens
gcgcatctcctcgattggagagcgcgctgctagcaagggggtgggcttgcttggcgaacgcgcagtggcaccagttgcatgttaggcgtcagacagctgctggttacttggcacgccatggg

SEQ ID NO: 252094 - DNA, 122 bp, Homo sapiens
tccccaaatgcctggggagactgatttgagtaataataaaagtccagtctcccgcaccaccgtctctgtgtgagttactctttctctattgcaattcccctgtcttgataaatcggccctgt

SEQ ID NO: 252095 - DNA, 122 bp, Homo sapiens
aggtgtgggcacgcggagggtgggggctggcgaaggcggggcctcacaaagccgcctgcccgctgtagtaaaaggagagctcggcaggggcgcgccgacgtcagccgccggttggcaaaacc

SEQ ID NO: 252096 - DNA, 122 bp, Homo sapiens
aagtgctagcaattgttgcaggtagttggtagtaacagctgatgaacacctactactatgcgaagcacctgctgcacattagtatttctgagcctcagtttcctcacgtggaaaggtgcagc

SEQ ID NO: 252097 - DNA, 122 bp, Homo sapiens
ccgaggaaacgctgagcacttgcaggcgccggggcgggggcgggggcgggcactgggcagcggggcgggcgccgggcgggggcgggggcgcagaacccgcagccgggggaggtgctgcctcg

SEQ ID NO: 252098 - DNA, 122 bp, Homo sapiens
acgtcggtgcggttctcatagacgtcgtgcagcgtgatgacattgtggtgcagcacctgccgcaggatgctcacctcccgctcgatctcctcccggctcacaccgcgccggctcgcccggct

SEQ ID NO: 252099 - DNA, 122 bp, Homo sapiens
tattccgaattctggcaacatactgggccccaagtctttcggatttaactctgcctcggccgttttattcagttaaggaaactgagtcactccatcccaaagccagattcccgcggttctaa

SEQ ID NO: 252100 - DNA, 122 bp, Homo sapiens
ctggatcaggcttcggctccggctccggctctggatcaggatctgggagtggcttcctaacggaaatggaacaggattaccaactagtagacgaaagtgatgctttccatgacaaccttagg

SEQ ID NO: 252101 - DNA, 122 bp, Homo sapiens
gagctgcagggcggcttgaacgaacccgattcggatctgtgtggtgacttgatggagaaacggccggtgcaggtgcttctgagcagtttgctgaggaagaagatgctcccggaggcctccct

SEQ ID NO: 252102 - DNA, 122 bp, Homo sapiens
ctcggggaggcctggagttgcaaagacggaataggaattgcatagcagttttcctccagacgtgattgaatcgtgcgtgtgccactgttgcatttcaccctccacagaggggtttcggggtg

SEQ ID NO: 252103 - DNA, 122 bp, Homo sapiens
tctccagctgaaattctcatgggccaggggcagaggagctgtgggttcagagctacagcacgattctggccttcgctggcagtccaggctggcaggtcgccatctttgggatcctacaggtc

SEQ ID NO: 252104 - DNA, 122 bp, Homo sapiens
ttgcagggtgacacagattcagatgcagaagctcctgaagtctgaagtcgagaagcaagccggataagagactgaatttccctttttaagttttcaagggaaacaacttgatccctagaggc

SEQ ID NO: 252105 - DNA, 122 bp, Homo sapiens
ctagcagtgcctgcatgaaatctgtactcttgatcagggaaccagccagctcactggtgacgtggagcaacgaattgcaggagcccataggaggcctcggcggtccccgggcgccgcagttt

SEQ ID NO: 252106 - DNA, 122 bp, Homo sapiens
agcgggcgcctgcatggtggggagggagggagctggctaagaccccgcccctctagaccccgccctcagggagtcagacgccgtcaggagcgggacaacgcctcaactcagttccttcccct

SEQ ID NO: 252107 - DNA, 122 bp, Homo sapiens
tagaacccggtcccggagaaaactccactaggaaagttactttccctgcgcgaaagccaccgggaccaggtttccgactccaggagcgcgctacgctggctacgggcggggttccttccccg

SEQ ID NO: 252108 - DNA, 122 bp, Homo sapiens
tggcgccttttcttttgcacctgttgatgaaaccagtgattgccctttggtttgtgttggcggctccactcctggaggggatggggacaaaagccccaaaacataggctctggagaaaccgc

SEQ ID NO: 252109 - DNA, 122 bp, Homo sapiens
cacccagccctctcgctacggcctcctctcgcccccgcccccgccccgctccgaggggcgcgcaggccagccgcccgagccgccggctcccccggctgtccagccctacctcctccgctgcc

SEQ ID NO: 252110 - DNA, 122 bp, Homo sapiens
aacggtctccttagaaaaagaattttcagcactgcacacggctgcacattccccaggctgcgtaaagccccggggttggggggggggcagcactctggaagccagttattcccacgagacca

SEQ ID NO: 252111 - DNA, 122 bp, Homo sapiens
caccccagggctgtatgacctcagggtggaaagggaccacccggaccatgctgcccagtccgtcatctcggcattaaagggaagtgaatttcccaagatcacgcagagagcttgttgcagag

SEQ ID NO: 252112 - DNA, 122 bp, Homo sapiens
cctttgcccctgagggctgtgtctgcgttaacatcgccagcaaacagttgtataaaccaccgtgcaaatttcgttccaggacacattggcgtgagacctgggagtacgttgtgccaaatcat

SEQ ID NO: 252113 - DNA, 122 bp, Homo sapiens
ttcctatatacgggcggaaaggcggcttcctccgctgagaaagctgaaggtccttacctgcggcgtacggactgctctggtggtccctgagggtgcccaggctgcaggatcccggcgtgagg

SEQ ID NO: 252114 - DNA, 122 bp, Homo sapiens
ggacactccagtcttggaaggctccgcgtggagactggacccccgacgagtcttgggaggcgctaggcggagacgggacactccagtctcggaaggctccgagcggagactggacccccgac

SEQ ID NO: 252115 - DNA, 122 bp, Homo sapiens
cccgtcctgtcacctgcttgggtggtgtccgtcaggtcgtagccgctgcccgggaagtctcggagtttccgaccactgaggctcaggatgccggagctgcccgcctcttccagggcccggtc

SEQ ID NO: 252116 - DNA, 122 bp, Homo sapiens
ctcccgtcagcctgtgcatcctgacgctgaggctgcggggtctggggcatatcccagccccgggttgggaggccggggaggaaggcccgaggcggggctgaccgttcggccctcggaggcgc

SEQ ID NO: 252117 - DNA, 122 bp, Homo sapiens
aaactgatggaatgatcacttactgggtgaaccggcgtcacacctgatactgaatcctcacgtcccttttggaggtggacatgagtaaactgaggcccagagatataaagtgtcttgcccca

SEQ ID NO: 252118 - DNA, 122 bp, Homo sapiens
tgctatcatcaaccacttgatgacggagcttgcatccctaccatgaccactggcattgaacgctgtctttgcttttggccactgctaccctgaaaactcagatagctgcctcttcaactgca

SEQ ID NO: 252119 - DNA, 122 bp, Homo sapiens
tggcaaagccttcaacaagtcctcaattcttaccagacataagataattctggctgggtgcggtggctcacacctgtaatcccagcactttgggaggctgagacgggtgaattacatgaggt

SEQ ID NO: 252120 - DNA, 122 bp, Homo sapiens
tgtggccgcggtgctcgcgggagcggtcgcacaccacgcagatgggcatctggtcctcctcgcagtacagcttcaggggctcgcggtgcttctcgcacacgcccatctcgccgccgggcccc

SEQ ID NO: 252121 - DNA, 122 bp, Homo sapiens
ttcgacctcaggagctgggcccccggtgtaattctgtcccgactgtggggtgtaaacacacgatgccacgcaggtgtagcaggagccatcgttagcgggcaatgtaatgacaacggaacgca

SEQ ID NO: 252122 - DNA, 122 bp, Homo sapiens
ggtacaaggactttgagtcatgttggcttcctcctctcaagacacttaaaaatctagtttcgaagacaagacaaatttacgtgaatcaagagccaatggcttatttcaaataatttgatgta

SEQ ID NO: 252123 - DNA, 122 bp, Homo sapiens
aaggtgtctcactgagggtcccggttgccttctgcaaaggtgaaggtcgtgccggccacgcgaggaaatctgcctcgctcacaactcacaggcacacatcaacactgccaaccgagggagcc

SEQ ID NO: 252124 - DNA, 122 bp, Homo sapiens
acgcgccttcgccgggttgctgtctacaatcaggcttggctgcgctctcagtaggggtctcggtcaacctctgcccacccgaacccggcgccgtggacctggtgtgaggctggggagcccgt

SEQ ID NO: 252125 - DNA, 122 bp, Homo sapiens
ccggggactgtcccatcctagccacccctgaaagccccccgccactggcccctgagaccccggacgaggcagcctcagtagctgctgactcagatgtccaagtgcctggccctgcagcaagc

SEQ ID NO: 252126 - DNA, 122 bp, Homo sapiens
aggaggagctccaggacagcagggtctacgtcagcagcctgtagtgggcgctgccagatgcgggcttttttttatttgtttcaatgttcctaatgggttcgtttcagaagtgcctcactgtt

SEQ ID NO: 252127 - DNA, 122 bp, Homo sapiens
gcccctcatccccggtcctccccagagttaatttgcctgtatttcctccctcgttgagtgcgctcacaggcagcctcacaatgacctgtttagttggcagtggaaaattatgtcatttgcaa

SEQ ID NO: 252128 - DNA, 122 bp, Homo sapiens
caccgcctaccaagacgggcggttaagacactaggataggctcctctccaccggaaaaggcgggatttagatcacgtcccgcaggccggcggaagtagctgatactctcattggttgcaaaa

SEQ ID NO: 252129 - DNA, 122 bp, Homo sapiens
actctgaggcggtgttgggggccccctagtgctgatcctgatccgctcaaggctcccgggcggcatcccagacctctgcgggccctcgcccacctcaaactttcggcctcaaacattccggc

SEQ ID NO: 252130 - DNA, 122 bp, Homo sapiens
cccttttacttttttatagcttaactaatttgaatgtggttacttcctactgtagggtagcggaaaagttgtcttaaaaggtatggtggggatatttttaaaaactccttttggtttacctg

SEQ ID NO: 252131 - DNA, 122 bp, Homo sapiens
aaatatttccatactgattcaactacttcagtgctgtgagacaaatgagctattacaacacgaatgaaagcgctggcgactccgcagcgccggccggtccccagccatcacccgcgccgtcc

SEQ ID NO: 252132 - DNA, 122 bp, Homo sapiens
ctgggggaagcctactccgcatccttggcctccgagcttacagcggcatgaagagatctgcgggaggaagtagtgactgcatcagaactgggtctgggcaggccttgaaccaggttagaact

SEQ ID NO: 252133 - DNA, 122 bp, Homo sapiens
actcccgtcagcagatccggaagctcatcaaagacgggctgatcatccgcaagcctgtgacggtccattcccgggctcgatgccggaaaaacaccttggcccgccggaagggcaggcacgtg

SEQ ID NO: 252134 - DNA, 122 bp, Homo sapiens
acctttgatctgtagcgtttcccaatttccatgggtaaatgctcccaccacatcagatttcgagccacgggctggcagtgcgaaaacgtggagttggttagagaagcccaggagcgcgccgt

SEQ ID NO: 252135 - DNA, 122 bp, Homo sapiens
tgtgaaattcctgaaaagggtgtgaggtagagacctactattctgtctgtccttggctcccgggtcttttagatcctctgcccaagtcccagagaacgggagtgctcaccaattcttcacct

SEQ ID NO: 252136 - DNA, 122 bp, Homo sapiens
acctcgtgatccgcccatcttggcctccccaagtgctgggactacaggcgtgagccaccgcgcccggccgcatccctcaattcttaaccactttttgaggcaagggatatttggtcactcag

SEQ ID NO: 252137 - DNA, 122 bp, Homo sapiens
aagcagctcagagctggtatgaggtgagggtggggggcagccggccagcctggctgttgacggcaactccagggcttgtttcgcgcagccttgccagcattacccatcctcatcagaaactg

SEQ ID NO: 252138 - DNA, 122 bp, Homo sapiens
cctcttccgctcggtgggaggaacccggggctttgcgcccctaaccagcagcgtgaccctcgcagtcagggaacttctcatctgtgaagaaagcttaagaatgacacccctgacaggagcat

SEQ ID NO: 252139 - DNA, 122 bp, Homo sapiens
cggcccacgccgcttactcccctgaggaggcggggaggtcctacccagacctcttcagtacgggtccccagagctcagtcgagggatctatttggggatttttggggtctgtcttttctttt

SEQ ID NO: 252140 - DNA, 122 bp, Homo sapiens
actcaccctggcgacccacgatctcggcgacgtgctcggagctgggcaccgggacgcactcggtcatgttgacgcttttcttgcggctgccgatcacgctcatctggtcggccagcagcgtc

SEQ ID NO: 252141 - DNA, 122 bp, Homo sapiens
gcatgactgaacagtccaatgcgctccagctgttccaattccgggagccgatcttctatgcgttcctgaattatctctgccatgaggtccgaggtctacaaccccgcgggtagcttctcaac

SEQ ID NO: 252142 - DNA, 122 bp, Homo sapiens
tgagaaatagtatttgagtgcttaataaatagtgacattggccacgactttaaaagtaagcgaggatgtaagtttaagaggaggagaatattggttatagaatcaaatataggtatagattg

SEQ ID NO: 252143 - DNA, 122 bp, Homo sapiens
gcgccgagccccagagacgtggcggcgggtcccgactgcgctgccgcccgtgagaggcaccggacctgccctccagggcggggaaagggaggactctgatcccatgagaacccagacagttc

SEQ ID NO: 252144 - DNA, 122 bp, Homo sapiens
ctttaagccgggtacgtagtagctccccacacccacacataagtgccagaaatgacgcgccgctgcctcagcatgctttatatactgaggttaggagaccctggactacatgttctgattgg

SEQ ID NO: 252145 - DNA, 122 bp, Homo sapiens
tgttccatgaccacggcaagcattgttaatcgatcatggcattcttaactggagttagaacgggccttcagaatcctcatcacagtgtcccagggagccgctactgatcaatcaggattggc

SEQ ID NO: 252146 - DNA, 122 bp, Homo sapiens
aggtgcccggcccggctcgagctgagctcctccactggagacccggggctggctgtgcgccgacaggcaagcgcatctgctaccctagagccggccacctgggtcccccgggaggagagtga

SEQ ID NO: 252147 - DNA, 122 bp, Homo sapiens
cctccaccccatcccggcctggtaccttggccccgaggcgtagctggtcaatggtgttctcggcctcagcgtacttggtgaggagcctgtggtagtcttcctgcagaaagcgggagcaacac

SEQ ID NO: 252148 - DNA, 122 bp, Homo sapiens
cattctgtgaaaaattaaggaaagattttcatccttgacaggaaagggattgcagagtagcggccctgggaaaatgggctctattctacctggagctagcctggaggagaggccttgagtgg

SEQ ID NO: 252149 - DNA, 122 bp, Homo sapiens
ttgctcgggtaactcccaggggctggctagagacccagaggcgcagagcggagaggcctgcggcgaggatggagggcctggcagtgcggttgctgcgcggcagcaggctggtgagtgcgttc

SEQ ID NO: 252150 - DNA, 122 bp, Homo sapiens
caaggccctggcccctccgcctgcacccggcaggacccgcctcttagaacccgacacctccgcctgcgcaggcccgctccccggtcctgtctctcaggccccgcccccaggtcgcgtctcca

SEQ ID NO: 252151 - DNA, 122 bp, Homo sapiens
acattttatgccataccatgtaacatgtattcactctttcagatgtatagggatcccacccgtctgtgatcttcagcgtgtagaaaagagcctggcacatagcaggtgctcgatatatattt

SEQ ID NO: 252152 - DNA, 122 bp, Homo sapiens
ttccagatactcgggaggctgaggcaggagattcgcttgaatccagaagacagaggttgccgtgagtcaagactgtgccattatagtccagcctggatgataagagtgaaactctgtctcaa

SEQ ID NO: 252153 - DNA, 122 bp, Homo sapiens
ggtagcaggtggacatggccgtgggtcgggtcaccctgcttcatgggaaggcttgtttgtcgttcccaccactgatccagaccacagaacccttccatgcttcacgagagcatcagcagcaa

SEQ ID NO: 252154 - DNA, 122 bp, Homo sapiens
gggccgcgtccactccccgcacccccgacagcgcacctgagccccgcctcggccgcacagcgctcgccgctacccacccggacccccagaaacgccccgccgctgccgctccgccgaggacc

SEQ ID NO: 252155 - DNA, 122 bp, Homo sapiens
cgccctgccgctggagccccgctcggttcaagatgagtcatgcgtgaccaatcccctccccgccaagggagagcaagacacacacgacgaggcagagacccagagagagagacacacacaca

SEQ ID NO: 252156 - DNA, 122 bp, Homo sapiens
cgggctggggacgacatctgagaagccctggtgtcctcggttcttctccacgcggttcgccggccatcctctcgcatcagggctgtgtctcactgtgcgtctggcgttccggggcccctgat

SEQ ID NO: 252157 - DNA, 122 bp, Homo sapiens
gcgagtcatgggagccgcagcagccttcctctggcctgtccctgccaggcctccacacctcgatatgcagagagtctcacaccacagagcagtccagcagcacaaagactggaacgtgttta

SEQ ID NO: 252158 - DNA, 122 bp, Homo sapiens
actgctcttcctccctggtctttccaccttcaaccttgcccaacccagagctgttttccacgctgtagtcataatggttgtctaaagggtagatatgatcatgacacagaagagagctcacg

SEQ ID NO: 252159 - DNA, 122 bp, Homo sapiens
ggcattggtccagtggccgcctgtcgacgagggggcgggactccgaggggtagcgattcccgtaacgcggctcttcgcgtcccggattccggtggctgcgtccgcgtcgcctctcccagact

SEQ ID NO: 252160 - DNA, 122 bp, Homo sapiens
agccgccatcttggcaaaggaagagatactcgccacctcggaaaagaagagggaaccaaccgtatgccaacgtagaaccctcagccagaagaatttttatgaagggcgctgagcaactccat

SEQ ID NO: 252161 - DNA, 122 bp, Homo sapiens
tcctcaccacaaccacaggaggcaggtactaccatcatcccctgttcacagatgaggaaacgacagaggaagatgaagtttcctgcccaaggtcacaccccaaagtgttggaggagccgggc

SEQ ID NO: 252162 - DNA, 122 bp, Homo sapiens
caccaagctcggggatgagcgcaggacgcagtgaggactgggccacccccgacaaggagacggcacccccaccaagctccagacacctcaggggccgagccccacctcagccctgggaggca

SEQ ID NO: 252163 - DNA, 122 bp, Homo sapiens
cgcacctgccgggagcccgtgtttgtaaacaaaccgcgcgcctaattagcctggcgggagcgcgcgcgcggggcggggggcggggcgtcggtgcgcgcgggcaggtcggccccgcccgggga

SEQ ID NO: 252164 - DNA, 122 bp, Homo sapiens
tggagaaaggattcagtttcttttttccttgaacatgattgctcaaaggaaactgaccctcgagacgctcagacagtgggccttgtcttcccttggcaatgtgaactttaaaaattacatta

SEQ ID NO: 252165 - DNA, 122 bp, Homo sapiens
ccatgctactggtgcttttgtacttctttaaggactcgctgaatttctccccgtggtccccgaccacatacatggaactgcttcgaatcagcttcactgcggggctggctccttcgtagaag

SEQ ID NO: 252166 - DNA, 122 bp, Homo sapiens
gcattacgcggtccaggacaccaaaggcttccacacagaggaggatatcggcggacttcacgccaccatcgagtgtgagcagccccagcccgacctctacaagtaagcgggagctttgggtt

SEQ ID NO: 252167 - DNA, 122 bp, Homo sapiens
tgcacggcacacctggtggctcctgccaagtcgctgccagctgggaccaagttagagaggcgccgcttagagagctgcccactgtgacgcttcatccgttccctcttcagcagcccttccca

SEQ ID NO: 252168 - DNA, 122 bp, Homo sapiens
gtaatagttatctgttcaggctcgataaaaagtaaaaactcggccaggcgtggtggctcacgcctgtaatcccagcactttgggaggccaaggcaggtggatgacctgaggtcaggagttca

SEQ ID NO: 252169 - DNA, 122 bp, Homo sapiens
cgcgcagtcgtcgggggatgccgggagcggcctggggagctgtccctggtgctgacggctcgtccgctctcgcccgggacgcgcgacctcctggaggcctgggggtgcccccaccctggccg

SEQ ID NO: 252170 - DNA, 122 bp, Homo sapiens
aaaatgcagagatcaaaatacttaactgtcctttcatcaagcttttacaaacacagtcttcgctgtctgagcaaatcaattttagtttcttcatggtcctccatctgtcttttaacatgaca

SEQ ID NO: 252171 - DNA, 122 bp, Homo sapiens
tacaggcgtgagccatcgtctgcgcttctatttcgatcaccaagatgtggctccggaatgcggggcttacttcttccatgaattggccaaggagaagcgcaagggtgttgagcgtctcctga

SEQ ID NO: 252172 - DNA, 122 bp, Homo sapiens
tacgcctcggcaccacggggtgtgggaccccagcccggagagaacagagggaaggagccgcgcccccacctggagctgaatcacatgacctagctgcaccccagcgcctgggcccgccccac

SEQ ID NO: 252173 - DNA, 122 bp, Homo sapiens
gcacgcagctgcgcagcggcctattgaaggtgacagatcccgttaagttatgcagccaggcgcgcacagaggagccaggcccctgtaaatcaacaacaggcccacatctttgggaaggcttc

SEQ ID NO: 252174 - DNA, 122 bp, Homo sapiens
gggcgggccactccccacccaggcaggccgaggcagagctcagcgggcatcggatgaattcgcccctttgaccactagagggtgatgtggatctttctgtaaaatatctgctgctcatcaag

SEQ ID NO: 252175 - DNA, 122 bp, Homo sapiens
ggaaattctgattcagcaagtctagagcaagggctatggtatctaaatgtttctgtttaacgagtgataccatgctaagtaaaatacaacttgtttaaaataagggagttcctgaattatgt

SEQ ID NO: 252176 - DNA, 122 bp, Homo sapiens
ggagcggttgcaggaccaatgcgagggaacggggcagaggaaacctctcggcatcagccccgcccctggcgcctctgcctccgagccgctttcctggtgcctccgggtgctctgggatggtt

SEQ ID NO: 252177 - DNA, 122 bp, Homo sapiens
cgcaggggagcgtgtgtctgtgtgtgatgtgccttcatgcgtcactctatttatgttgttcgcagcccaacggtagcggccagggcaaagtcccggggtcatttttgctaccgccgccgcct

SEQ ID NO: 252178 - DNA, 122 bp, Homo sapiens
tccctatggctcagaacagctcagaaagccctggccagggtgccccccagctggcctgggcggtgctgcagtccagccttcctgaccacctcgaggcagccatgcaggggcctggactccag

SEQ ID NO: 252179 - DNA, 122 bp, Homo sapiens
gaaccaagctgagtggaaccagaggcggctcgctagcaatgttatccacaggagcacagccgcaacggaggtgaaacctcacaccctggcccctcggccccagacaatcctgtctccaggtc

SEQ ID NO: 252180 - DNA, 122 bp, Homo sapiens
ggacgcccagcgtgctcaaccggcaccacctgggccccgtggcccactgctaccccgacgcgctgcagagccccttcggggacctgtccctcaagacctccaagagcaacaacgacgtcaag

SEQ ID NO: 252181 - DNA, 122 bp, Homo sapiens
aggtgggaggatcccttgaggataggagttcgaggctgcaatgagccatgataacgccagcgcactccaacctgagcaacacagtttatttatgataaataaataaacatacctaaataaaa

SEQ ID NO: 252182 - DNA, 122 bp, Homo sapiens
ctcctttccggccgctcttcttcccgctttagaaggggtgaagcctctttcttccacctccgggagccatgttgcctcgtcttctcggtggtacacgctttctagctggaggaaggggagcg

SEQ ID NO: 252183 - DNA, 122 bp, Homo sapiens
tttgccccacagggtctttgctgagtgccacaaccttgtgcccccgggcccattcttcaacgcctgcatcagcgaccactgcaggggccgccttgaggtgccctgccagagcctggaggctt

SEQ ID NO: 252184 - DNA, 122 bp, Homo sapiens
gccagtgctgagagggtccccagggacggcccctgcctcccccagggtttctgggaaggtcgtgctgtccaccccaccacagccctggggcaggaggcaaagcccctggccgggctgcggat

SEQ ID NO: 252185 - DNA, 122 bp, Homo sapiens
agagtttcaaattaaaagggaatattagtaaaatcaccaccattcttcgcacactcaccacgcaccaggtgctttccataaatcagtattcacagatgaggaaactgttaacttgcccaagt

SEQ ID NO: 252186 - DNA, 122 bp, Homo sapiens
ggtggcagggcctctcggggatggcagcagagcatgagcccttcccctgcccatgcagaacgcggacacagccaagcagctgacggtgacgcagcaaagccaggaggaggtggcgcgggtga

SEQ ID NO: 252187 - DNA, 122 bp, Homo sapiens
ggaccgggtcaaggtaagactcttctgctgcctccctggcactaaggccaaatcccagggcgcctctcccctgccctgcaggatttcttctaaattaccctttccctccatggcccccaggg

SEQ ID NO: 252188 - DNA, 122 bp, Homo sapiens
cctcgcatagcagggttccgtttgtttgcttttaacctttatgctaactgagttgtccagcgtgagttcctttgtgtctgcttccgtcagtcaggaaaacaagggagtgtagaaaagggaca

SEQ ID NO: 252189 - DNA, 122 bp, Homo sapiens
gggcacggagaagaagtgggagatcctacggctgtcgtgacaacctcgtcggtgctcctgcgtgtgggccctggaggccacccgacctcgtgggtgttcagggcagacgctgccacgtactg

SEQ ID NO: 252190 - DNA, 122 bp, Homo sapiens
agctcccgtactcatttttagccactgctgccggtttttatatccttctccatcatgcatcgtgagcctgcgaaaaagaaggcagaaaagcggctgtttgacgcctcatccttcgggaagga

SEQ ID NO: 252191 - DNA, 122 bp, Homo sapiens
gcctcctccctgctctgaagcctgcacctctccattaaacacagaacagctgccagaggacgccgggtactgccctctctctagaatcacccagccttgggtttatcaaatcactgcatgac

SEQ ID NO: 252192 - DNA, 122 bp, Homo sapiens
ccagactgccgcctcaggacccagagaacgcagcacactttagttgggcccatctatccccggcgaggcttggactacgtttcccaggagaccctgcggtccagtatgtctcccgaggaggg

SEQ ID NO: 252193 - DNA, 122 bp, Homo sapiens
ggaaccaagctgacagaactcttccgtggagaagtacccatcactgtggcagagggaaaccgagcacagcaaaatggcacaaagtcttttaaagcttccacccagagtgaaacatcgactcc

SEQ ID NO: 252194 - DNA, 122 bp, Homo sapiens
tggcgcagcgagcagcggcctccagcgctggtggctccctttataggagcgctggagacacgggccccgcccgccctgcagccccgccctgcagtcccggagcgccgaggagtgcgcgcccc

SEQ ID NO: 252195 - DNA, 122 bp, Homo sapiens
ccacctcctcgttagggttgtctagggccagagacagcgtccgtgaggctcccaggagaacgtccccgaagcaaaggaaaggagacctgcagaagtggctgagagacaggaccggcggggaa

SEQ ID NO: 252196 - DNA, 122 bp, Homo sapiens
tagcagcttgcaggcggaggacccggctgtggtaggcggggttatccaggagaaggaaggcgacccgggtggcctccgcataaaggcaggccttgtacagggcctgggcctggtacaggcgg

SEQ ID NO: 252197 - DNA, 122 bp, Homo sapiens
aagtcacgtggcctggggcagggcttctcagagccctgtcccctcctgtgtagggcgggacgtcagaggggagcctgcagacccagtctcatgtcttgggggtcaaggggtggcttccagaa

SEQ ID NO: 252198 - DNA, 122 bp, Homo sapiens
ctaaaaaaaaaaaaattaagatcctaattaaagttaaacccactattttgcactgagtcacgtagattttcaaagtcaaggcttcattggtcgattgtctgctcagtctttttaaatcaaat

SEQ ID NO: 252199 - DNA, 122 bp, Homo sapiens
caaagctttgcgcagccgcttacaggaggaggggcactcagaccgcgggagcagtgggagcgtttctgaatatgagattcagatagagggagaccatgagcaaggagacctattggtgaggg

SEQ ID NO: 252200 - DNA, 122 bp, Homo sapiens
ccagaacgacaatacgcctgagatcctgtaccccgccctccccacagacggttccacgggcgtggagctggcgcctcgctccgcagaacctggctacctggtgaccaaggtggtagcggtgg

SEQ ID NO: 252201 - DNA, 122 bp, Homo sapiens
ggaagagtctgtatctgcatttctgaagccccagccttggggttagaggccacacccggtcgccacgtcccgcacctgtccatgttggtgccagccacctcctttcttagtgacacccatgt

SEQ ID NO: 252202 - DNA, 122 bp, Homo sapiens
ttttccacgccccgcatctctctccagctcagttccaagatcaggacgcagatcaggcggcgcagggccatgcctgcacccgcgccggggccccagctggaattcacacgctgctccacgct

SEQ ID NO: 252203 - DNA, 122 bp, Homo sapiens
aggatttgtttaactttatcaaactgttaaccatttcctagctcctccccctcacacccacgtggaactgaaaaactttccggactagaatcaaagttgagcatgacttggctgtagtctgc

SEQ ID NO: 252204 - DNA, 122 bp, Homo sapiens
agattcagttacactctgatgttcattgtatatgcaataagacagcagttgcatgttagccgatgccattcacatattcaaccagctaacaatacactgccagctcatcacacacaggtatc

SEQ ID NO: 252205 - DNA, 122 bp, Homo sapiens
acagactctagtgttaacatgtgaccctctgacctgcattcataagacatcttagagacccgaatcccgcttcctgtgtaattcgtagagcgatcccaggctgctcagcaaaaaaagtcaca

SEQ ID NO: 252206 - DNA, 122 bp, Homo sapiens
ggaaacccttctccaagcagggtggggatttcaggctgagatggttcctctgcccacccccgcctgctccttccttttccttgctccaccccaagacacagaacccaaaagactgctgttgt

SEQ ID NO: 252207 - DNA, 122 bp, Homo sapiens
gacctcagcgtaaaagctcatatggttgcacacaatgcagctgcactgttttctgggattcgcactttttcacaagggctcagccacatacccttctctctgctccaattccatctccgcga

SEQ ID NO: 252208 - DNA, 122 bp, Homo sapiens
gtgccctgtggcagcaggccagatgggcaggagcaggtcagcggaaggctataaccttagcgagaaggtgacagccacagcacccctccctctgagggaaggcgccccatgtgatcaagcac

SEQ ID NO: 252209 - DNA, 122 bp, Homo sapiens
cgtgtctctggccgtgtcagaccttttcgtggcgctgctggtcatgccctggaaggcagtcgccgaggtggccggttactggccctttggagcgttctgcgacgtctgggtggccttcgaca

SEQ ID NO: 252210 - DNA, 122 bp, Homo sapiens
caacaaccttatggggtggacatcattcagattctcaggtagggaaactgaggcacagagcgatcaaacagctccctggcagtcacgcagcacgtgagtgatacagacagagctgagatttg

SEQ ID NO: 252211 - DNA, 122 bp, Homo sapiens
tggcgatgggctaaattaattatgttaattccaaggcagatggctggacctggtagcacacgcctgaatcttaacactttgggagcccgaggtggaagtattgcttgagctcaggagttcaa

SEQ ID NO: 252212 - DNA, 122 bp, Homo sapiens
gtcacagaagggaatgttagaatcccgagagagagctgttaagggtagcggctctgcagccgctcacgtgggttgaatctcagctcgtctagttttcccatctaaaatgaaaagttactgtt

SEQ ID NO: 252213 - DNA, 122 bp, Homo sapiens
ctgggagagggagagacggttaaacgaaaaaacatcccaagaatgcacatggctcgtctccggccctggcagcccgccccgccggtgcctgcagcagagggtcccgtgatttggggctccgc

SEQ ID NO: 252214 - DNA, 122 bp, Homo sapiens
agcagggctgtggagttagggttcaccccaatgggaccaccctcctgggtcccctggtgccgtttttccttagaaatcagagaaatgggaaagggggggaaactgattttacacttaaataa

SEQ ID NO: 252215 - DNA, 122 bp, Homo sapiens
ctctgcggatgtcaggggacgctctgagtggtgattgtcgtcactgcccctcaagcacagcgtttcttccacttcactctctgctttacagctgggaggatgcttcctgctgttctgggcat

SEQ ID NO: 252216 - DNA, 122 bp, Homo sapiens
gagagaggagagagagaggagagagagagagagagagagggagagagagagaaccaataacgaggcaaggaagggagggcaggcaccctctctggtgacacctccacactgtaccgaatgcc

SEQ ID NO: 252217 - DNA, 122 bp, Homo sapiens
gaagacaactaaggccagctcctacccaatgtatcaatggtgaagttgatctctaaggcccgtctcagagctggcactctgactcagagccaaggggttgctaggaaacaagggtctagagc

SEQ ID NO: 252218 - DNA, 122 bp, Homo sapiens
gttaaaaatatcccggctttgcctttatgaaacctttgcccttggctgggtgtggtagctcgtggctgtaatcccagcactttaggaagccaaggcagtaggatcgtttgagcccaggagtt

SEQ ID NO: 252219 - DNA, 122 bp, Homo sapiens
gaatgagttcattatgtctcagcgcgccctggccgccaggctggcagttcttcgggctggcggggctcgggagctgtcagcctgccaaatccagttgtttgacttcatgtttcaaggccaaa

SEQ ID NO: 252220 - DNA, 122 bp, Homo sapiens
gcggtcatggcgatgtcgtagaaggtgagccaggcggtggccaagacccccaggcgcctccgctcgccgggagcctcccggtcctcgccggcctccgaggcgccgccgttggtgccgtcctc

SEQ ID NO: 252221 - DNA, 122 bp, Homo sapiens
ctgacctcgtgatctacccgcttctgcctcccaaagtgctggcattacaggcgtgagccacgggccggccaacattctttagagtttccattagcctttccaactggaggcaatcagatacg

SEQ ID NO: 252222 - DNA, 122 bp, Homo sapiens
aggtcacaaagcagagtcagaaatcgaacacaactgtctcatttctgagcctgaactctacgtaacgcctgagtcggagggggacacacacacctgagtcggaggagggaggggagaagaaa

SEQ ID NO: 252223 - DNA, 122 bp, Homo sapiens
ttttctcctccgctcctaaaagctcaatgtatgaatagccccgggatttccaaattccgtcggatcgggaggccggggacacggcccgatcggcctacccaccatccctacagagcttcatc

SEQ ID NO: 252224 - DNA, 122 bp, Homo sapiens
agccacccaccctcactctgcagcctaagagtcgcagattcttcctaaaccggattcttccgaggtaggctttgctgtcaccgttgagccggatgttcgctgggtccattgacccgcccacc

SEQ ID NO: 252225 - DNA, 122 bp, Homo sapiens
cggggacaagggctgccccctctgcatccactgcacgaagacgtccgcgggagagaagcccgtcaccaggcacgtgatggtggccgactcccgcaggttcagctgctcccgggctggtggca

SEQ ID NO: 252226 - DNA, 122 bp, Homo sapiens
gtaggaatgtgtatatattatctacagccacaggaaatgtatagttacgatttttacatacgtgtatgtatattattgtacaacttgctatttctacttgggagttttttattttggtacat

SEQ ID NO: 252227 - DNA, 122 bp, Homo sapiens
gccaaaaagtcttcctacaggatgcccccgcgacctcaccggggaaacaccgcggacagtcgggccagcagcgcccggagctcactccaggtctccaaacttgcagcacttcccagagcgcg

SEQ ID NO: 252228 - DNA, 122 bp, Homo sapiens
gtttatatccttaagaatgtatgcatgcacgcacgcgtgaagaatgaatgaatgaggggtcgtccctttgcacacacggaggtctacgggccgcagagtacctacagcatggccaccgcaag

SEQ ID NO: 252229 - DNA, 122 bp, Homo sapiens
tctgcagcgcgccagcaggatggcccacaagcagatctactactcggacaagtacttcgacgaacactacgagtaccggtgggcgcctttcttagaccccgagccggctccctcagccgggg

SEQ ID NO: 252230 - DNA, 122 bp, Homo sapiens
actgcttcaaaaggcaggtcttggtctgaggagagggcagtcagggcatgaagctgcagccgccaccgctgcttctacaaaatctaagcactgggctgcagccatgtcctactgccagcagg

SEQ ID NO: 252231 - DNA, 122 bp, Homo sapiens
ggccgtgctggtggaataaccctctctgcaaagggcctgggagttgaagaagggtgcagtcgggtggtggttatgaatctcagaaatcctgccacggagcctccttttgtgccctattactt

SEQ ID NO: 252232 - DNA, 122 bp, Homo sapiens
ggttctgaccagctctgagagctgccacctccaggccccaaagaaaagttaacattcactcgctaagacgctatagctactgagtgtgcatttgaaaggaataacaacaaaaagttcttgct

SEQ ID NO: 252233 - DNA, 122 bp, Homo sapiens
gcatttgatcacttcagccgagagtgccaggagatttgagacagatgttttcagacatgccgcatgcctaaaacatttccaggggtcgggctgcaaatagtgacttaataagtggagaaaca

SEQ ID NO: 252234 - DNA, 122 bp, Homo sapiens
aaggtctgcagctatgcagaagcatcttggtgaagggaggcaggacccctgctgagcaatcgtgtatccaccacaaaagtgctggtggcgccagcttagtaaacttagagttacatctttct

SEQ ID NO: 252235 - DNA, 122 bp, Homo sapiens
gttgctggaggtggggtgtgagggacggcttgcgataccctgggactgcggggtagaaagcgcagttctaggggaggtcggggtcagaggtgaagctcgtggggagggcgagacccgggcgc

SEQ ID NO: 252236 - DNA, 122 bp, Homo sapiens
cctccctggcctcctccccacaggcagcggcccctctccgtcagggcacggcgtgaaccccggaccctcccaccggtgtgcacggctgccaaggcaaccccgtcctgctccttccttgcagg

SEQ ID NO: 252237 - DNA, 122 bp, Homo sapiens
aaattatcactttcttcagcccccttacaattttggttggacccaatggggcgggaaagacggtaagtcttcagtagccgccttcagtttacaggtcgctacatctttcggagaataaaatg

SEQ ID NO: 252238 - DNA, 122 bp, Homo sapiens
ttttgttcccatccagttatgtaaccgtggggacttgtttctttgctttcaggatttgtacgaaacacattaaagttaaacaatagcggaggcttaggagtaaccctcgagctgcgccttgg

SEQ ID NO: 252239 - DNA, 122 bp, Homo sapiens
ggaaggtacatagcagtcaatgttcatagcagttctgaaacgcagccaggaataagttgtcgattacccagactgcagggacagggactgtccatggattagggcccaggtctgttatctgg

SEQ ID NO: 252240 - DNA, 122 bp, Homo sapiens
ctgctgctagccctgctcatcttgagtttgttcaggtgggaccttaaccctgagtggtggcggcagagatgtgagctcggcctcagtttgtccagtaagatggggtggtctgtttccaccag

SEQ ID NO: 252241 - DNA, 122 bp, Homo sapiens
ggaggacccttggactctctgaagcagacagcagagctctcccagaggcaaaggcaggtccgggattctgcagtgagcaaagtgtggccacacacaaagtcatgagctgggagcagctgatt

SEQ ID NO: 252242 - DNA, 122 bp, Homo sapiens
tcttcgaaataacttttttctcacctaggtgtaccccaattaccgctggttgtgctttttcggcacttcctctcctactgctaatttttccgtcctctttgccgggagcagcggaaagggac

SEQ ID NO: 252243 - DNA, 122 bp, Homo sapiens
agcaagacacacaacgctttttgtttgaaggactacccaggcgttagtgcccttccagaccggctctagtgactggcggggaagaaggggaaaaagaattagtgtatctggacacaacaccc

SEQ ID NO: 252244 - DNA, 122 bp, Homo sapiens
ccgcggcggtggagtcccgagattggggtgagcgcgtgcgtgcgtatgtgcacgcgggcgcgcgccgagtggataacgcgcttccctgctagcccccaaacccggcggacactcacagcacc

SEQ ID NO: 252245 - DNA, 122 bp, Homo sapiens
ttttatgggagtattagctatgtctatttgcagcctttgtccagctatactgtcaaggaccgaatagcaacaatcaactacactgtgttgacatcagtgttgaacccatttatctacagttt

SEQ ID NO: 252246 - DNA, 122 bp, Homo sapiens
agggcgaatcccggcttccgcctccgggaggccccgcccctcctcagggctggtccaatacgatcttcccagctggccccgcccacgttgactccttgggaccactcctgggccacttcccc

SEQ ID NO: 252247 - DNA, 122 bp, Homo sapiens
attgggcactcggattcctcaattgctgcactatggggcaaataattggggactttgagtcgcccaggcggcatccttacaaattgcacagctccagcccgccccctgcctccacggcccga

SEQ ID NO: 252248 - DNA, 122 bp, Homo sapiens
ctgtatttaatgcaaaagttgctcccccatcctgatttcttagctcactgggccaatcggcggaaggacaggtggggctcaaattaggagaaaaaaaccacacttcccgtcatgcctctggg

SEQ ID NO: 252249 - DNA, 122 bp, Homo sapiens
caaggggcaggtggaatgcatggggcacttaagctagcccccttctctgctgggagactccgtgtgcagtgctaaaccttggagattctcaggtttgttttgttaagggaggcagtattccc

SEQ ID NO: 252250 - DNA, 122 bp, Homo sapiens
ccctgaactgctcgtgtgccctcaccccactgccaggaggggtttggttaggttggggcccgtcacagagaagggttgggtcgggaaggccggggctgaggctccgtgctcccctggccctg

SEQ ID NO: 252251 - DNA, 122 bp, Homo sapiens
ccggatctcggatcccggatctccgccagctgcctccggctccgggaagggcggtgtagtcggtctcagggattgagatgagactccgtcaagaaaaggcagctggggcagcagggatttcg

SEQ ID NO: 252252 - DNA, 122 bp, Homo sapiens
atgcccaccctggagcgcttccccatcagcttcaagacctacttctcagggaactacttccgccacatcgtgctgggggtgaacttcgcgggccgctacggtgcgctgggcatgagtcggcg

SEQ ID NO: 252253 - DNA, 122 bp, Homo sapiens
gagaccagtctggccaacgaggtgaaaccccgtcactactaaaaatatttttaggccgggcgcagtggctcacgcctgtaatcccagcactttgggaggccaaggtgggcggatcacgaggt

SEQ ID NO: 252254 - DNA, 122 bp, Homo sapiens
gcagggagttctgctcctggaaatattcctcctcttcatcgaagaagccgttctccagagcgtaagtgcagtctgggctggaggctgcctggcatgcccccttgtactcctgaatcgactcg

SEQ ID NO: 252255 - DNA, 122 bp, Homo sapiens
ataattccgttaccatgtccttcatctgggccacgccagacaacaggccctggaaagggtcgccgtcacccggcgcctcacaggacacccgcagcttctgcggcttcccttcctgcccgacg

SEQ ID NO: 252256 - DNA, 122 bp, Homo sapiens
aagcggccactcccggccggcgccgtcccctggcggagccgccgcgctccctgccgtccgcgcagtctggcctcgctcggggccactcctcgtagcgctggagctttacaaaatattaataa

SEQ ID NO: 252257 - DNA, 122 bp, Homo sapiens
tacaggagtgagccaccacgcccggctgcaggaaggtctctactgaaatccggcatggcccggccccagccccgctggtctcccatgctgctccctgctcacgccatcttgctcagcttggt

SEQ ID NO: 252258 - DNA, 122 bp, Homo sapiens
tagcaacttatgacttgaaaatactttttctcagctgcatttgactacctaaaatcctaccgagcacgctgtttggcatgtcttactcctctgaaatcatcatctactttctaaaaaccaga

SEQ ID NO: 252259 - DNA, 122 bp, Homo sapiens
gcggacacaaagagagcaccggtggctttgatcttgggcgagcaggctccgcatccgcgtcgccgggcggcctctcagtcctagggcccggccagcgccccggccgcccgcgccgggctcgg

SEQ ID NO: 252260 - DNA, 122 bp, Homo sapiens
ggctcctgtttccaggctgccttgtagatcttctaggagcaggtgcaccgctctcctcaccgccctgctgggaatggctgttcaggcctcctggcgtcttcaaattgaacccgagaaggatc

SEQ ID NO: 252261 - DNA, 122 bp, Homo sapiens
taaagggaatctgtgagggaagaggggacataaacgctgggaggctggaagagccccttacgtgttatccacttgtccagacgccatattcatagttgagaaagatgaggcagagacggtag

SEQ ID NO: 252262 - DNA, 122 bp, Homo sapiens
taagcacgaatctgttggcttgaatcttggctaggaatggtctgcacaaattcaaactgacgctggggggagacggctggttgccgtggcaaccagagagccgtttttaattccgcacggtg

SEQ ID NO: 252263 - DNA, 122 bp, Homo sapiens
cgcccagcgggcagctagggaactggcccaagagggtcggccggccctgccggtggagggcgttccccacccggtagcggggaggtgcccagcagggagccgcctgatgaggaccgaagggg

SEQ ID NO: 252264 - DNA, 122 bp, Homo sapiens
gccgaggtcatacagctaacaagtttaagagtcaagatctgaaccaaggcagtctcgttgcgtagtccaaatattagcagagaaaatctcttctttaagtcaaatggactcatgttaaacat

SEQ ID NO: 252265 - DNA, 122 bp, Homo sapiens
agcgcgccggggccggggaggagccacatgaaaagcgctaatggcgtaacgcatgcgcgccgcggagagccggtgcagagccggcgcaggcgccgaggtctgcggggcgggtgttctcttcc

SEQ ID NO: 252266 - DNA, 122 bp, Homo sapiens
taatactaggtatgggtagggatgtggggaactaatacccttgtacaaagttccagggaccgtagagtgacacagccaatctggaaaataatgtgcttatacctcatcatattcaatattag

SEQ ID NO: 252267 - DNA, 122 bp, Homo sapiens
ctggagtttacagctgttcagcaacggaacagtagggtctgcacgagactaattttgtggcgtcattctgctgtgatcttggactctgcctaccctaacttactcctgttctactttccaaa

SEQ ID NO: 252268 - DNA, 122 bp, Homo sapiens
ggccctgcgccttcccccgcgcctgtagccacccgagggcagtcggggcaggtggcattccggacacctgggcttaccagggcatacgggaccccaggaaatgttatttttgcttaagtcaa

SEQ ID NO: 252269 - DNA, 122 bp, Homo sapiens
cttctcaaatgtttttatctgaggactccttcatactcttaaaggtcactgagggccaggcgcagtggctcatgcctgtaatcccagcactttgggaggccgaggcgggaggatcacttgag

SEQ ID NO: 252270 - DNA, 122 bp, Homo sapiens
tgcgccggggagggaagccaagcccagtcctgaagccagcgaaggtctgaggtcacaggtcgcagcccaaccctttcttggccttctgtgaatcccttccacagctaaagggtccgagtgct

SEQ ID NO: 252271 - DNA, 122 bp, Homo sapiens
cttcagccttgggccgccagccccacggcaccagttgcaggttgtccaggcgattgtccacggtcacagcgttgaggtgcaccacctggaagcccggggccacgcccccccggtgccgctcc

SEQ ID NO: 252272 - DNA, 122 bp, Homo sapiens
gcagccagagtgactgacatttcaatccagaagctgccacggggacctggtgattcccaccgttagcgggagagaagcttccacagctcaccgggatggtcagagggttccggagcaggaca

SEQ ID NO: 252273 - DNA, 122 bp, Homo sapiens
tcatctagccggcccttctcaaagtagtggtaaggcactgaggggtggctcttctccctgcggggtggggaacagggctggggtgggacagaacccactcgcctccggccacaccctgccgc

SEQ ID NO: 252274 - DNA, 122 bp, Homo sapiens
gcagccattccctttgttgctggtgcttctgcagctattttccttgctcacctatacccacgctggccccagtttcaaccacagggccggctgacccatttatttagcagataggtgttaag

SEQ ID NO: 252275 - DNA, 122 bp, Homo sapiens
acaagactttgcagcagccactataaagtggcttcaagaatttacttgaacagtgtccatcgaaatgtgaatgtataccaaacagccagtgtggacttagactggaggacttagactggatt

SEQ ID NO: 252276 - DNA, 122 bp, Homo sapiens
tcagtcttggctccgactccaaaacaaatgattcctcaccagccagatctccatcattggcgttagtctctggtcacctgacttgttcaagccaatgagagggggccgaattagtacttccg

SEQ ID NO: 252277 - DNA, 122 bp, Homo sapiens
atctcagctgctgttgactactccgctgcctgaacaccggcatttactcaccgatgctctcgtcttgtctgactttatgcaaacactgccaccgccagcgtactccggacctctgtgtgccc

SEQ ID NO: 252278 - DNA, 122 bp, Homo sapiens
tccatgtggccgagggcaaaggcacacatgggcttttgcgtgggtgtccccgtgtgtgtccgtgtgtctgggtgtgtgtggctgtttttttcctggctttgatggggaggatgaagtcagca

SEQ ID NO: 252279 - DNA, 122 bp, Homo sapiens
aggcggtgaggggcttccggttggggtggcagggtggtggatctgtcggtcccgttttcccgtcgcacgtggtggccactgttggcttctgaatggtttgcaaggcggatatccacgccaag

SEQ ID NO: 252280 - DNA, 122 bp, Homo sapiens
tcccacgtggggcccaggtctgggaatcagcgctcgggggtggctggggacaaccgagaacgagcttcttccccggcacgcgggcggaatggctgagcccagcctggaagcccccgtcaggt

SEQ ID NO: 252281 - DNA, 122 bp, Homo sapiens
aaggtcagcgaaactgggggaggtacttggataacattttgcggtggaaagctccctcaccgcctgttgccggagtctgaatgaaggctggcggctccacggtctcacgtagttcggaaatc

SEQ ID NO: 252282 - DNA, 122 bp, Homo sapiens
agccagagaaaagaaaacaatattgaaactaaacataagaaagtgagggctgtaagttatcgtaaaaaggagcatctaggtaggtctttgtagccaatgttacccgattgtcctacagcttt

SEQ ID NO: 252283 - DNA, 122 bp, Homo sapiens
tttctcagaaaacttggattctgccctctggttgccacagacttgctgtgggaccttaggcgacttacttcgcttctctgggcctcagttactctctacacagaaagtgctgaggaaaaaac

SEQ ID NO: 252284 - DNA, 122 bp, Homo sapiens
accttccaatccactggcctctccgaaattagcacagaccattttcccacgaccctttctcgctgagcgtgtgattccaaaactgtccacaagaaggtgctcgggagccagaattcaggcgt

SEQ ID NO: 252285 - DNA, 122 bp, Homo sapiens
tctccggtctacctggacattctaggctagggcccttttccccagaccgatccttcccaacgtactcctcagacgggctgagaggatgaacatcttttaactgccgctggaggccaccaagc

SEQ ID NO: 252286 - DNA, 122 bp, Homo sapiens
ttctccagcccagtttagaacaagggaaaggggagcgcgcggtaccggctgtccactccgcggtcctcctggctcaagtcaccctgagtcttcccccagctgacaaaggcgatcggacgcac

SEQ ID NO: 252287 - DNA, 122 bp, Homo sapiens
aacttaaggaaatggcacatgctattcaaacttaagtaagatggatttataagaatatcacgaatgcctgtgtgtataccatgagtgcatatatatatgtgtgtgtgcgtatgtgtgtgtgt

SEQ ID NO: 252288 - DNA, 122 bp, Homo sapiens
cggagctgaactcggtcacctgacgcttcagcaagcaggggcttgtcctgaagctggggccgcgggcggcagggtgctcagagccagttcatcctgccctaggatgccaccttggtcctcag

SEQ ID NO: 252289 - DNA, 122 bp, Homo sapiens
tgtggacctacgctgtggcccttctactcgccgttcttccaacgcagatgagcccaccctcgtgtttctgtgctgtcatgagacggacagtcttcccgtcacagttgcagtgctggcttgtc

SEQ ID NO: 252290 - DNA, 122 bp, Homo sapiens
atgtgtgtgtgcatgtgtgtgtggagtccttttgttcttacagcttttggggaggacatgcggagagatttagatttggacagttgccattatcttccagacccagaagctcatctcattta

SEQ ID NO: 252291 - DNA, 122 bp, Homo sapiens
cgtaagacaggaggatgaccagcagagggagcaggtaggtgaccagcagcagcccccaggcgtagagctggcgctggcgctcctgggagccccagaactcctcgcagaggcgcacgtcgtgc

SEQ ID NO: 252292 - DNA, 122 bp, Homo sapiens
tatttcaggaattttttgcctctcactaggctgatcccattaccccttcaaaagaatctccgataagcgttcctaacttttagctaaatgtctaaatgcagttaatagaaagtcccttctct

SEQ ID NO: 252293 - DNA, 122 bp, Homo sapiens
ttctcgttgttgatagaaacagggacataaagaaagcttcttctcttctaagaggagctgcggccgaagcacaaggatgaacagctgcggatactcggctttggtgccaggaagaccgcggg

SEQ ID NO: 252294 - DNA, 122 bp, Homo sapiens
cacagagtcccagcttctcctgggtcatcatccttttctctggcctctgcctgagagcagcgtgcaccggagactgagggaggttggctgtaatcagcacagacccttggctctcagctgag

SEQ ID NO: 252295 - DNA, 122 bp, Homo sapiens
gcatttcctcacataaccctgacaatataattagagcataatcatggtgaccatccttatcgccactttacagaggaggaattgaccaccagctggattaattgcaaagtcacgctgctgtg

SEQ ID NO: 252296 - DNA, 122 bp, Homo sapiens
ccctctctgaataccattttacagaagtgttctcagctagtctgtgatacaggctatctccggagctcagcttgcatgatccctctggtcatatgggacagggtgtaagagaggaatgttga

SEQ ID NO: 252297 - DNA, 122 bp, Homo sapiens
atagttattgtctttgagaaacgagtgaataaatatagctggcactaggcaggaactttccgaactgtgtcaaggttaatagtaagtaaaatgttataagtggaaacaggacagcaacagct

SEQ ID NO: 252298 - DNA, 122 bp, Homo sapiens
gccccgcgcatccggtaccccaggattactacttcttcttggcgagcaattggcgaagcgcgggcggcgtgtccatagaaatggacagctacgaaaagatctacaacctcgagtccgcgtac

SEQ ID NO: 252299 - DNA, 122 bp, Homo sapiens
atgccagctgcgatggcttcgctcaccagattcttggcttcctcctcctgagaaacagaacggcggcaataatgtccccggccaaactagggcctgctctgacatccgcaatgtacgtccac

SEQ ID NO: 252300 - DNA, 122 bp, Homo sapiens
ggaaagggccgggaagggcgcatgcgcagtggcagcgactaaggtttagtgaggcggcaccgcgcggcccgaggcgggtcttgaagcactcgttttcccactcgttttccggggttcccccg

SEQ ID NO: 252301 - DNA, 122 bp, Homo sapiens
atgcccacccactcagccaccacgtgtggaagcaacacgtggatgtcggcgcaggcaatgcggctgtgtggggcacgtgcagcgtgcagtggagacttaggtgcatggcacagacacgcatg

SEQ ID NO: 252302 - DNA, 122 bp, Homo sapiens
atgcattttcattactaaatgcattcattttcatcctcaagaaaagtgtatgcccccttccgcctgctttacataatatggcttgagcgcttgtaaaaatggatgggctgtagctctgagtt

SEQ ID NO: 252303 - DNA, 122 bp, Homo sapiens
ggggtcacatggttagaaaacccagaattcaatcattgctttgtctggcttccaaattcacgcttttccctttatttctatcagcagatttcagcaaatatttgccaattgatctcttagtt

SEQ ID NO: 252304 - DNA, 122 bp, Homo sapiens
accgaagccggaagcgggtgtctgagaagaacaagcgtgacttctctgccttcaaggatgcggacaatgagctcaaagtgaaaatctccccgcagctcctcctggccgctcatcgcttccta

SEQ ID NO: 252305 - DNA, 122 bp, Homo sapiens
gctggggctgggtcgtggtgatggagccccatgggcctgcaggcaggaggtggcagcagacggcccccacctctgctgcgctagccctgctcagagactctgagaactcacagtttgacagg

SEQ ID NO: 252306 - DNA, 122 bp, Homo sapiens
cacaacacgatcttatgtatggatgacagcaccactaataacaaatgccagtgacctaaacggggaataacttcaaatgaaacaaaaagcacctcatatcatatttatcctgaaagacacaa

SEQ ID NO: 252307 - DNA, 122 bp, Homo sapiens
gctggctctccagcatcaggagtactggggattgcctgggggacgactcctagggctgggcgcccgtgggccctcccctgctgccactgcggcccacgcaagccgggcctgaagggcgcgag

SEQ ID NO: 252308 - DNA, 122 bp, Homo sapiens
acccgctgtgagttcaggggtgggcacaggccgtgccccctgaaattcagcacacagccccgagaacagaagagacctctctttctctagaaaggtacacagcacgaccacaactgcagacg

SEQ ID NO: 252309 - DNA, 122 bp, Homo sapiens
gcgcgtttttgtggcgcctgccccgccccctcgctccaagcccgcctccccggccccgcccgccatggctcaaccttcatccgctcagaggcaaatcagcgcgccaaagtgggagtgaatgt

SEQ ID NO: 252310 - DNA, 122 bp, Homo sapiens
tgcggccgccgccccccggggatcaggtgcatccagcggcgggggctgcgcgcccgctcgcgggtcccgaaccggcaaggggccaccagccagtggctgaggatgaacttctcgttgaaatc

SEQ ID NO: 252311 - DNA, 122 bp, Homo sapiens
ggggcaggtgtgcaggggtcaggggattggtccttcggcattagtactttttaaagtccccgtataattctaatgcatagacaacattgagcatgactggaccgaaagcgaacatatactgt

SEQ ID NO: 252312 - DNA, 122 bp, Homo sapiens
gggctgtgccccaagtcgaggacaccctctccagcctgaaaggggactctgctgcagggccggggagatgggatctcctaggggaagaggcgcggtgcggccgcgggtcggggaggggccag

SEQ ID NO: 252313 - DNA, 122 bp, Homo sapiens
cacgcaggactcgcggccgcgcacccctccgcctcccggcaacgcccgccccgccggggccggggccgactcccagggaagggtccccagcccaagagaccaccaagggtcggcggctacgc

SEQ ID NO: 252314 - DNA, 122 bp, Homo sapiens
ccccctggccactgccaagctacaaccttctcaaggccctgagtcacagaagacagtctgcgggtggcagtgtctgtcgcccgtgtgtgcacatgtgtgcctgctcctgtacagggccccgg

SEQ ID NO: 252315 - DNA, 122 bp, Homo sapiens
accacacactcggcgggcagcgtggtcgacctgcccagtgccaggacagtgactgctggccgcgaatttcacaacacaggtggcttcctcacaggaagctcctctgtataccacaccctgtt

SEQ ID NO: 252316 - DNA, 122 bp, Homo sapiens
cgtgggaaagcgcgctggtttctgccaaatgcagttagctttgcttcgcttccctaagtgcgttcccccaggggcccggcagtgtgctaggggcaccctgcttcgtaagtgaggcagacagc

SEQ ID NO: 252317 - DNA, 122 bp, Homo sapiens
gtccccacatttctccaggatgtaattagagctaagaacagccgccatccctcagggttccgggtcccgggtttccagggtcccgggtttccaaggccccgcgataaccccgggcgcacgcg

SEQ ID NO: 252318 - DNA, 122 bp, Homo sapiens
ggggcccggccccaaggaggtgggggaaagggaaacaagccctccttcagagtgagcttgcgtgtcctggagccagctccccgcaaagcacatgccatttctggcccttgaaggggttaaag

SEQ ID NO: 252319 - DNA, 122 bp, Homo sapiens
gggtcgctgggggcaggccccgggggacgagcctgagacggggtgggccggggcagggggcgggcgcaggctggagacccccgcccagtccccgcgcggccggggcacggcgggagggggcg

SEQ ID NO: 252320 - DNA, 122 bp, Homo sapiens
ctcatgtgatccacacacctcagcctcccaaagtgctgggattacaagcatgagctaccacgcccagctattattatttttgtaaatacagatggagatcttgctaggttgcccaggctggt

SEQ ID NO: 252321 - DNA, 122 bp, Homo sapiens
tgccatattcatgagaatcaaattcctaggcccagctaaaatcaagtagacgggattacacgaaggtaggaatatcaggagttgggaaccatcaggtgctattttagaagcagccttccagc

SEQ ID NO: 252322 - DNA, 122 bp, Homo sapiens
tcgacagctcgaaacgctggggatattcataagtgcccagctgagggtatgaggcctgctcgctattttatcaatttcggagagagcgcatcgatactgcctgcctggaggctttgctggga

SEQ ID NO: 252323 - DNA, 122 bp, Homo sapiens
ggaaaccacccagctaagcaaaaatctggaagaactcaatatctcttcagcacagtgaagcgggagtggaagaaggatctaaagggaaaaactgacatgtttatgttatggaaaaagaaatt

SEQ ID NO: 252324 - DNA, 122 bp, Homo sapiens
cagcgagggaagagccgaggacttgggcacagaagcccggggggagggagggaagatgaccggaatgtcctgctgaaaactcagctgagttcctggcagtgcgtgacgtcaaggcactttaa

SEQ ID NO: 252325 - DNA, 122 bp, Homo sapiens
catctcaagagaacacgtctcgtatcatctgggggaaagcagggtggggagaccgtgctccgtgctgcaagtcaaccggcaatttcaagaatgccgtaaattggattaaggatttcgcatca

SEQ ID NO: 252326 - DNA, 122 bp, Homo sapiens
gacacaggcacagagggagacaagatgagcagatatgcaggtgcacgcggagacagacaccgggacccacgcacagccgaccgtgtcagacagactggtgaacacagcgcccagtcagaggc

SEQ ID NO: 252327 - DNA, 122 bp, Homo sapiens
agtccagaaaggcccagcctgaatcactgtgaggttgccaggggcttggtttcagttactcggaaaccacccatcctccaggccagcacccaggagctgcgtgggccttgggcagtgcccct

SEQ ID NO: 252328 - DNA, 122 bp, Homo sapiens
gagattcgcgggcccgtaggtgtggagcggggcgcggagggatccgtgggagccgcagtgcggcggcgcgcgggccgggtggggcggggccgagcgaggcggggcgcgcgcggcggccgttg

SEQ ID NO: 252329 - DNA, 122 bp, Homo sapiens
gcaggcagcgggacccagccctgcacacacccggcccacatctgatcacacacatgcagacgcttggtccggtttcccttgctgaatagaaacacaatcccaatggtaagttccacatggga

SEQ ID NO: 252330 - DNA, 122 bp, Homo sapiens
gtctcccccagaaaacgctgaatcagcactcacagcactgccagggcccgcgccctcctccgatcgcacgctggaggggacaggcccttccaagatcacggagcatcaatatcaccatcgac

SEQ ID NO: 252331 - DNA, 122 bp, Homo sapiens
cccatccgggattgaggagcatcccaattctgggaccatctcggggtccctgacccggggcgaatggctctcccatcttgggacccccatgcagggctgcagacccccaggcgcccccaccc

SEQ ID NO: 252332 - DNA, 122 bp, Homo sapiens
agctcagcacctctcacactccctgcctctcgaggactctgcttgttcctcatcacagcacggttgctctcgcacccaaggcggtgtccccccagcgcctcaccacgatcgcggcagagatc

SEQ ID NO: 252333 - DNA, 122 bp, Homo sapiens
gctgacggttccagtccgaagtcgtgggcccaccaggatgctcacctgtccttggagaaccgctgggcaggttgagactgcagagacagggcttaaggctgagcctgcaaccagtccccagt

SEQ ID NO: 252334 - DNA, 122 bp, Homo sapiens
acactaagatggctgccgttgccatgacacccaaccctgtgcagacccttcaggaggaggcggtgtgcgccatctgcctcgattacttcacggaccccgtgtccatcggctgcgggcacaac

SEQ ID NO: 252335 - DNA, 122 bp, Homo sapiens
caggaagtggtcaaactgtccctcgggaaccgtccaggacaggctgagggagtcaggggtcgcatctgtcacggtcagctcctccaggcgaggcttgatggggggttcaggggtgggaggtt

SEQ ID NO: 252336 - DNA, 122 bp, Homo sapiens
gtgcctccagccctcaccgtgacgacggggataccaccacctgtccctgggtgggaaacccgggctcccaggcacgggaccatgtctgaagctccgatctctggggcagcctacagcctagg

SEQ ID NO: 252337 - DNA, 122 bp, Homo sapiens
gccggcgctgcagcggctcctcccactcagaggtcctccacttactgtaaagttcttcatcgagagccttgactttcccccttttcttgaccagctgaatgtgtctttctttgacttcgtga

SEQ ID NO: 252338 - DNA, 122 bp, Homo sapiens
tctggacctacccttgccaccagcgcctgaaggctaatgtcctgacaccatgtccacactcgtgcttggtggcaggtccactgaccaggatggctgtagccttgagtgtgcccctctaccca

SEQ ID NO: 252339 - DNA, 122 bp, Homo sapiens
cgggggccctcctccgtgtcccagcccggcccctgggattgcgtcgcggcctctgcttgtcgacctgggtgctggctgtcctattttactactattgaccctgaaggccatcgaggagggca

SEQ ID NO: 252340 - DNA, 122 bp, Homo sapiens
tttgggaacagtgactgcctctcaggcccagggtgaggatcccaaaaggtggccactccccgaccacaggccctgccgatcccttcctgagaagagagacgagaaacagaaaccaccaacgt

SEQ ID NO: 252341 - DNA, 122 bp, Homo sapiens
caggcctgagagtgactcctgcccctgcccccgagcttcctgaccatccccgtgacctggcgcctccctgagctgtgggtcctgctgccaactctagctgttcattgcacgttggccagata

SEQ ID NO: 252342 - DNA, 122 bp, Homo sapiens
gtttggggcacctgctcccaccttggttttaatcccacccccagccccacgagctactgacgtctctaattctgcccctccgagctctgcctggaagtccacatccggaggggccgcctatc

SEQ ID NO: 252343 - DNA, 122 bp, Homo sapiens
ttaggcgaccttgggcaaggtcacacagccggaggctgaatgagaagctaggcagttctccgctacatcaggggctcccgaagtgtggtccctggacaaacggtgttagcatcacctgggga

SEQ ID NO: 252344 - DNA, 122 bp, Homo sapiens
tttaaggggcatttaagccaatgctctttgttaaggaaattgatggctttgtaagtactgcgtctgaagggagtacttgagctgaaggtccccatctcgcctcgtaaatttcctaatggact

SEQ ID NO: 252345 - DNA, 122 bp, Homo sapiens
ttacaaattcaaatttgttctcttttccctatatcaccatttaattgaacaacaatacaacgaaaactggtcgccttaaaaccaatttgaaacaggttgttcaggagcaacaatacaaaaac

SEQ ID NO: 252346 - DNA, 122 bp, Homo sapiens
gtgtggctgtaggggggtttgtcctctggaaaggcatccagcgccgccgaaggagtaaaacgagtcctgtgacccaacagccacagcagaaagtgctgggcagtagagagctgccccctcca

SEQ ID NO: 252347 - DNA, 122 bp, Homo sapiens
cctgtaagcaatgaagtggaatgatcaccaaaaagtggtgtaagaaaagaaaagtagacccgcagcggggtgtattcgtgctactgtttgtgtaaaacacagaaaaaagaaaggggtggtct

SEQ ID NO: 252348 - DNA, 122 bp, Homo sapiens
gaactcctaggctcaaagccatccacccgcctcagcctcccaaagtgctgagattacagtcgtgagccactgtgcctggactactctgtgctatttgaaccaatatattatttctaagtcct

SEQ ID NO: 252349 - DNA, 122 bp, Homo sapiens
tccaaaattctgggttctatgaaccagatttttgtgagggggactgagccctatttctctcgcttttcccatctcttgaataatgtatcgttcttttccaaaggagaagtgtccagggacat

SEQ ID NO: 252350 - DNA, 122 bp, Homo sapiens
tctggctctgttccgcccagttcagttcttgggcctgatatctgttctaacatcaggctgcgtgtgggttggatggagccctcagtcatcacgtaaaccctttgacatcagtaaaaccctgg

SEQ ID NO: 252351 - DNA, 122 bp, Homo sapiens
actgtggcccaaaagaattaaaatctgttaatataaatagagaacatatttatcattcctcgatagttaattatagactttggtacctttgtgcctcagggaagccacgtgatataactggt

SEQ ID NO: 252352 - DNA, 122 bp, Homo sapiens
ggatacacaacctggtccaaaaacagcagcgtcaagccagtgcactgtggatcacacaaacggcctcctcaggccacttaagagctaacaaaactgtttcagggaaaaacaaaaaacaaaaa

SEQ ID NO: 252353 - DNA, 122 bp, Homo sapiens
ccaacagttactgatcacgcacctcctggggatgcagcgggcagtacttgagccatgctgcgctgctcacagcccagccctctccccgtagattctgatacagagcgtctgtgagacgatgg

SEQ ID NO: 252354 - DNA, 122 bp, Homo sapiens
ctgccggaaacgtgtgttttcctatctaggagtcagtctgtcgcagaccgattcctggatcgccgaggtcgcccactctccccagaagcctgctccctcccgacccgaccggtgggaggccg

SEQ ID NO: 252355 - DNA, 122 bp, Homo sapiens
cggtggaggcaggacccagctgcccagggcaggtcctggggtctggatggggctgaaccccgtaaagcctgcgcttccggaagaagcttgcgctggaggcagggaagggtcccagccaggcc

SEQ ID NO: 252356 - DNA, 122 bp, Homo sapiens
tataaataactggaagcacaaaggcgacgtgactcctagaatctgtccagaacccatggtcgcagacatggggccccgtctctgccagaccctggtggctcccaggctgtgggggcggtgga

SEQ ID NO: 252357 - DNA, 122 bp, Homo sapiens
ttaacatggtgactctgcagatgccttctgtggcagctcagacctcattaactaacagtgcgttccaagcagagagcaaagtagccattgtgagccagcctgttgccagaagttcagtctca

SEQ ID NO: 252358 - DNA, 122 bp, Homo sapiens
cgccagtgccgtgatggacttgacgctggggatgagccacgcagccaggtggaagtactgcgcgtagcccgcgatggcctcgttgccccacttcatgccggcggccaggaaccaggtgagcg

SEQ ID NO: 252359 - DNA, 122 bp, Homo sapiens
cattatgtgctcattaacatactaagtcacacacccactgtgacagctctggggaacacccgtatttagtataaaaatgtgtggcaccgcagtaccaagaaatgtttacctttttccaagaa

SEQ ID NO: 252360 - DNA, 122 bp, Homo sapiens
taaaataattgtgattatattgtttccgtttgtgaacaagtgtgtctgtgtgtgcgtgcgcgtgcgtgcacaatttataaacggacgtaacctcacacaacagaagtttaaaaatgaacccc

SEQ ID NO: 252361 - DNA, 122 bp, Homo sapiens
tgggtgcccaaagaccatcaaaaaaagcaacaggacagaccagtatgaattcccagggttcgaggactgcggcaaccagacccataaggaaaggaaatgaggaaaacccacatgaatcccca

SEQ ID NO: 252362 - DNA, 122 bp, Homo sapiens
gggacgggggctggggcttggggagggccaaggttggggtctcacagcggcgcctctgagcgcgactcgaaacttcgaggccagcagtctccacccccggcccttttcccactgtggcgagt

SEQ ID NO: 252363 - DNA, 122 bp, Homo sapiens
tgggggcatttactgtatataccgctgtatgcttcgtatataccggtcctgtccaacaaacgtcggaggcacgcatccccattgtatccatggagaaactgaggctcaggttggtcaactct

SEQ ID NO: 252364 - DNA, 122 bp, Homo sapiens
tccagtctctgcttccacacttggccttgacattgcaggcatcattctgggcacacaccacgagaagggggctttcaccttctggtcctacgccattgggctgccgctgcccagcagctcca

SEQ ID NO: 252365 - DNA, 122 bp, Homo sapiens
aatccctctcctctgccttcatctctgttttccttggtgcaccttcatgtgcctcttccccggtccacgtgcatcttcatcaacacttgatttgtttgtttctgtgtctcttcccatctgca

SEQ ID NO: 252366 - DNA, 122 bp, Homo sapiens
ccttccccgcagggatcactgaccacagccacttcatgcccctgctcaatccctccccaacggatgccaccagctctgtggacacccaggctggcaactgcaagccccttcagaaggacaag

SEQ ID NO: 252367 - DNA, 122 bp, Homo sapiens
actccagcagttcccggggagaacatactgacacagcgaagggttcaggagccgcaggttcgtactcattctttggctggggtgtgggaatattaaaaagaaattgaatacttgcagttagc

SEQ ID NO: 252368 - DNA, 122 bp, Homo sapiens
cgctgctgcggtcgggggctgcgacgccaccagccccagggtggagagcggctttctgggcgtccgggcaagtccatgctccgggtggggaggccgaggggccgaggaagtcgagggtctgg

SEQ ID NO: 252369 - DNA, 122 bp, Homo sapiens
actgtgaaaacgattagcgaataaggaagagtgtgcggtggagaccatcttccccgtccccgcccccagcacaatactgactctctagctgtctgcagagcacgtttgcagacccctgatct

SEQ ID NO: 252370 - DNA, 122 bp, Homo sapiens
tctgcccctcccacttcacacaggtagtcgtgacgatcagctccgccgcactttgtaaagcgccaagccttcaaggttattattattctctccaaacctgccgggagcagcggtgttgtttt

SEQ ID NO: 252371 - DNA, 122 bp, Homo sapiens
aggaaaggaacgtgaaggagaccacatgtgtgaggagccagagtgctgggccctcggtcccgtgtcccgggggcttcgctggagcgcgaaggccggatttcaaggggcggccggccacacgc

SEQ ID NO: 252372 - DNA, 122 bp, Homo sapiens
cgcctcacgctccccgagcgcaggagatccctccgccccggccccgcccgccggcgccggcgctcatttctcgggcgcggaaactcgagcccactttccccggctgccggctctgggaccgc

SEQ ID NO: 252373 - DNA, 122 bp, Homo sapiens
tctgtctgcctgtctctctccagggctctgatttcctctcatctgtttctcctgctggcgcgtgcgtgcgtgcgctttctctgcttgtctctcacactgtctctggctccggggagttttgg

SEQ ID NO: 252374 - DNA, 122 bp, Homo sapiens
gctgcttagggataagctttgcacagatgagccgccccatgggtgacctgcgggtgcctccgtcctctaggatggttggccccacacacgtaccatagcccattgcttctctgcagcccaga

SEQ ID NO: 252375 - DNA, 122 bp, Homo sapiens
gtgtactgaacgagatgtactgaacgagggctgcagagctgcagcaccggcaggagtaggcgctcggtaggacggggcctgcacaacctccccggtagtcagcagagcggaatctaggaagg

SEQ ID NO: 252376 - DNA, 122 bp, Homo sapiens
cggcggcgggagggggtggagctggccggggcccagctcggggagggcgcgcggggcgggcgcggcagcgggaggtcacccctcccccaggcggcccagggctggaagcggcccagcgcagt

SEQ ID NO: 252377 - DNA, 122 bp, Homo sapiens
ccctgacaacccaggccaggggccctgcaacaaatacaggctgaggcgcccaggcgcggacgttccggggtcctcgcgcccactcccgcccagatcctctagctcctgccagcctccgcggc

SEQ ID NO: 252378 - DNA, 122 bp, Homo sapiens
cggagactacacaccgagcgagcgcctgggcccgaagggagcgatgctgtggttccagggcgccattccggccgccatcgcgacggccaaaaggagcggcgcggtcttcgtggtgttcgtgg

SEQ ID NO: 252379 - DNA, 122 bp, Homo sapiens
tgcgcagctgctgcatggacacgaaggggtggcgcagggcagcactggggctgatgcgttcgtgtgactcccaggtcagcatgcgcttgatcagctccaccatgctcttgaggtcggcgtgc

SEQ ID NO: 252380 - DNA, 122 bp, Homo sapiens
gtgggtcacagctgccgcgtctgaacggaggccgccaggagaatttgcttccctaggctccgcctcccgacgcgtcagcggctgtgcggccggccgcaaagcgccagcactgtcgtaaatac

SEQ ID NO: 252381 - DNA, 122 bp, Homo sapiens
cgggcatgtttcactgaggggacgaaggccaacatgagtcctggaacagtgctgggcccccggagctcccccagcacacgcctaggaaacgccattcctaccccaggtgacagcccacccag

SEQ ID NO: 252382 - DNA, 122 bp, Homo sapiens
gtccctgctgcaggggctggggcctccggagctgctgcgggctcccctcaggctctgcttcgtgacccgtgacccatgacccacagtgctggcctcctgtggggccactatagcagccacca

SEQ ID NO: 252383 - DNA, 122 bp, Homo sapiens
ggaggcggagacagggctgatgcttccacaggccaagaaatgcccaggacaagcggcagccgtgggagctgggggggcggtgtgggagggagtctccttcagagcttccagaggaaccagcc

SEQ ID NO: 252384 - DNA, 122 bp, Homo sapiens
acttacttctcttgagacagggtctacttctatcaggccatgttctgaaccaatgagcaccgtcccctgttcagttcggagagagaagcactgaggattccctggaccttgaatatccctga

SEQ ID NO: 252385 - DNA, 122 bp, Homo sapiens
ttaatcgcccttacaactgtcccaagttaagagcgccaacatacacgctaattccaagtacgcattcatgatagttcacgcccacagagctatctggagggaaggagggtggctaagagcgg

SEQ ID NO: 252386 - DNA, 122 bp, Homo sapiens
ttcattcctgagctagcgagaccgggaaccccaccagaaggaagaaactctgaacacatccgaacatgagaaggaacaaactccggacgtgcagcctttaagaactgtaacactcaccgcgg

SEQ ID NO: 252387 - DNA, 122 bp, Homo sapiens
ttgacttgtctctcttgttccagctgtcacctgccctccaaacagccattacgagagctgcgtgagtgtctgccagccccgctgcgccgccatccgcctgaagagtgactgcagccactact

SEQ ID NO: 252388 - DNA, 122 bp, Homo sapiens
tggagggagggcagtggtggcctctcaggatgagccccaggggtggtgagaggcactggccgtaaaaggccctgcaacatgctgtgggccacacctgcaccccctttccatttgttctagaa

SEQ ID NO: 252389 - DNA, 122 bp, Homo sapiens
ctgtgacaccggggtctgccggggtccaccagctgcagccctttaggaaacagattgggtcgaccccctcaactgcacactgtggcccctcgtggaattccaccggttgtttcccttcttgc

SEQ ID NO: 252390 - DNA, 122 bp, Homo sapiens
cagcatctaggagggaaggaagacagaagagctggatagagggaggaactgggtagacctcgcaatacaggctgttgcaacagaggccttggctgatcccatggttagctctggatgacctc

SEQ ID NO: 252391 - DNA, 122 bp, Homo sapiens
cttctcagtcgatgagtctgatgcgcctgccagtggggaagcggtcacacggggggttcccgtgagcaggcctttgctgacaggagtttctgtttgacttttcaggagaccccaaccaaaga

SEQ ID NO: 252392 - DNA, 122 bp, Homo sapiens
taaaaataaaagaaaacttgcagtactgtgagtttactcaggtaaaggaatgagtacagacgggccaacattaagcgctgactgtataatatgaactcccaccaggaggtcgtactatttcc

SEQ ID NO: 252393 - DNA, 122 bp, Homo sapiens
ggcacctgttgggagggcagacgtggttcccactgcatgcagatccagttacaggctggccggtccccgaggtggagcggccgctgggaacccgtggagtgcacaggctgggctgggctggg

SEQ ID NO: 252394 - DNA, 122 bp, Homo sapiens
ctggaggtgccttttggctgggagcccaggactctgctgaaagttgtgccagggggttggcggagggagtcgggggtgatgccgaaggctccaccctgggcacccgctgttgatgccaggaa

SEQ ID NO: 252395 - DNA, 122 bp, Homo sapiens
tgacctgcgtgagatagctagcgacccatcccactggggagatggcgggcagccgcctggcgcttgttgaattaagaagtgtgactacagtaattagcagcaagtatccaccacaggataga

SEQ ID NO: 252396 - DNA, 122 bp, Homo sapiens
gcccaaagtgggaaaccgcgccggccgtcacgtgactccagctccccccggcaaccggcccgcccccaccgagaccccgccaatccggaagggaggtccaatttggccaggccagggcgtgt

SEQ ID NO: 252397 - DNA, 122 bp, Homo sapiens
cgtccaggtgaaggtggcaccagaggcatctctcaggccggtcagtgtgcacgtgaggttcgcttctgaacctaagagcaggtcctcgagggccggtcggtgcagcgacagtcgggggtggc

SEQ ID NO: 252398 - DNA, 122 bp, Homo sapiens
tgtccttgcccatacagtcataaatgcaagtctgagttatgctaaccaatcttctatatgcgcttgcaaattttggccaaagaatttagtttttcagggtggatggagcaggaggcatgagg

SEQ ID NO: 252399 - DNA, 122 bp, Homo sapiens
tgcaatctgcccatcttggcctcccaaagtgttgggattacaggcgtgagccaccgcacccggcctgtggattttaattgaaaaaagatagtggtttttagcaaattacaactactggctca

SEQ ID NO: 252400 - DNA, 122 bp, Homo sapiens
aaataaagaggcttgcaaaagaagctcatgtaatcccactccttaaataccactaagacacgtgagatattgtttagattgtggactcttactttgacatgccagcataggtagatggacag

SEQ ID NO: 252401 - DNA, 122 bp, Homo sapiens
acggcctcctccccacaagggctccgggaggccacaccagagggtgggaggcaggggtgacgctcagcactgcaggcaccgaggacagcctcctcccaggaggaaaaaacaaagacgggaaa

SEQ ID NO: 252402 - DNA, 122 bp, Homo sapiens
cagccgggctctgcagggctccgttacccagggcttaccctgtcactcagggctgaggggcggagcctggaaccccatccaatcaggggccctgggacggggccctgccaactgtcaatccg

SEQ ID NO: 252403 - DNA, 122 bp, Homo sapiens
gagatgatggcctggctttactaaaaaactgtgtgatcaaaatcccaactataggaaagacgtaactgagaacgactgggccccatgttctgggaggagccccgctaaccacaacctcctct

SEQ ID NO: 252404 - DNA, 122 bp, Homo sapiens
ctgggcacgggctggaaagctgtcttgagtaactttttctccacttccaaggcactacagcgatctaagggaagcgggggaagaaaaaggagggcctttagagcgctcggtgccggcgccca

SEQ ID NO: 252405 - DNA, 122 bp, Homo sapiens
gcggagcacccagtggagaccgcgcctggctcaggtgtgggaccccatccttcctgtcttcgcagaggagtcctcgcgtggtgagtatgcggtgaggacgttttttttttaaagatcacgtt

SEQ ID NO: 252406 - DNA, 122 bp, Homo sapiens
ctgaccagaggagtaatgctgagagtctctgagcagaggctggagctataggcctgtctccgtgacacttgtcccatgagggagcacagatgtgactgttgacctctgagtctttgccctcc

SEQ ID NO: 252407 - DNA, 122 bp, Homo sapiens
tgatgtcctgccttttagatagctgatctagcctcacagatgtgcttctccagaagtggccggatctctggtcctcctccctccgcagcactggggtcagccgcatgttactgatgctgggt

SEQ ID NO: 252408 - DNA, 122 bp, Homo sapiens
gaacatataaattatacaaagactacgatgaataaaaaacatcctgcctcaggcggggcgcggtggctcacgcctgtaatcccagcactttgggaggccgaggtgggcagatcacgaggtca

SEQ ID NO: 252409 - DNA, 122 bp, Homo sapiens
acaggagacccaaatctgcttgttatctacagaactcaaagttgtcaatacgtagaggtacgcttttttcctcaggcttaaacctttgccactgatattaataataaaagtattagatgatt

SEQ ID NO: 252410 - DNA, 122 bp, Homo sapiens
catcaagaaaagggtgtgggcgcacatccgcgccaagaggaagcgggaggagcaaagcaacgtcctggccgccatgaggaaagccgctgccaagaaagactgagcccccttccctgccctct

SEQ ID NO: 252411 - DNA, 122 bp, Homo sapiens
aggcgggaatcccaggggtcatccgggcgcggggtcgctcgtccacgcactgtggtgccacgtggaggaaaagtttccaactctgccagttggtgctcccactgcgcccaggcggagcaaag

SEQ ID NO: 252412 - DNA, 122 bp, Homo sapiens
ggctgccgaggtctgaggggtcaaagggactcgagtcgggtttgggtcggctacacagggcgccccgagagttattaactcgccagcgaggcctatgccgtgccacctgggcgagacggtgg

SEQ ID NO: 252413 - DNA, 122 bp, Homo sapiens
ggagagtgtcatggaggcctacgagcaggtccaaaagggacccctgaagctgaaaggcgtcgcagagctgggagtgaccaagcggtgaggcccgagggcccgcgggattccgtcttcatccc

SEQ ID NO: 252414 - DNA, 122 bp, Homo sapiens
atttcgagttaccctcgtatcctttctttgtatcttcgccttgcatcaggggccatggaacgtatatgggagaagagaagctcattgcatctgttgctggctctgtggagagagtaaacaag

SEQ ID NO: 252415 - DNA, 122 bp, Homo sapiens
ccgtgcaggattgcagaacctgacactcacacaatccgagggcgatggcatttggagcctcgactcctcaatcagggacccgctgccctcagattctggggttttgggcctggcttgcccct

SEQ ID NO: 252416 - DNA, 122 bp, Homo sapiens
ggtcacagtccagcaaaaagagggactgccactctaacccaccagtgacaccactcttcccggctggatggtcaattagctctggcatgagagaatgtcactgccggtgagcgccagcttca

SEQ ID NO: 252417 - DNA, 122 bp, Homo sapiens
gagttcgccgctcacattcggcggtgggaaaccgatccgaagatgcttttgtaggcgaaacgctcagctcgcgcggctctgaaccaccggggagcagcggctgctgctagtcggactacgcc

SEQ ID NO: 252418 - DNA, 122 bp, Homo sapiens
tcaacgccaccttttatgatgaaagtgtccttgaatgagagagtggtgggcagtgacgcacggctttgtgaatagcctgtcaagcaccgagctgcaaactttaacatggagaattttacggc

SEQ ID NO: 252419 - DNA, 122 bp, Homo sapiens
tagctgtgactacaggcacacgccaccatgcccagctaatttttgtatttttagtagagacggggtttcgccaaattgaccagactggtattgaactcctgacctcgtgatttgcccgcctc

SEQ ID NO: 252420 - DNA, 122 bp, Homo sapiens
ctgtccctgccccgctccgcccctgctgggctcctggctgccgaacctgaagtcagggtccgccgcagaacacgtcttcccgctgagccctgcagcccctcaagcagctggctgcctccgag

SEQ ID NO: 252421 - DNA, 122 bp, Homo sapiens
gtccgagctctgcccatcagccaccacgcgctgggagccacggccgagctctttccattccggttcacacccagaccctccgagctctgcccatcagccaccacgcgctgggagccatggct

SEQ ID NO: 252422 - DNA, 122 bp, Homo sapiens
ctcccctcccagcagctgggcccgggctcagctggggcccctggcctggccagccagggccgaggggcccatctttgttccgagcagagctcagactgcagagtggctgggtaaatagtcgc

SEQ ID NO: 252423 - DNA, 122 bp, Homo sapiens
tttcttcttctcctaaaagaaaaaaaatacccctatctatctgggggctgagggtgggggcggaggccaaggcactgcagaggccttggccagctggctgttccaggcccgctgtgggagcc

SEQ ID NO: 252424 - DNA, 122 bp, Homo sapiens
ttctgtttagagtggggttcctaacctccttccagaatagctcaaggtccccagtgcagccgctttgaaacaaaaccacttggtaacaggagcgcaggactatggcgaaaccgccaggaaag

SEQ ID NO: 252425 - DNA, 122 bp, Homo sapiens
ggtgactgagcaccgtgtgctgcccgaatttctcaccaacctcagacgctctcgttttcacgtgccacggagctacacaaagataaagcagcccaataaagacccggctgaaggcttttgtg

SEQ ID NO: 252426 - DNA, 122 bp, Homo sapiens
cggagctgctcctgcacagggtcctgggtctccagtgcgtgctgcccagtgcctggctgtcggtggagcctggctccctgcactttgcttccttgtgcagagcctgctggctgaatacacag

SEQ ID NO: 252427 - DNA, 122 bp, Homo sapiens
ggggctcctgggggaggcggctgcgggagccgagggcggaggttccccacggggcagcaccgcgcccccgagccggccaagggtggggatggcgagccaggggaggcagggacccgacgcca

SEQ ID NO: 252428 - DNA, 122 bp, Homo sapiens
tgtttgatctgtgccagtaggtgaacttttagagagcataggagtccatttcacataaatcgcacttttagcaaatgcagaagcaggatcctgctgaggacaaaggaaaaattcatgatgca

SEQ ID NO: 252429 - DNA, 122 bp, Homo sapiens
ggtgcatctgtcgtgtattgagtgctacgctttaggtggaaactcaacctggcactccatcgtccaccattattgttttaaatcttatttcctctatgatcctgtttgttgtcttattcctt

SEQ ID NO: 252430 - DNA, 122 bp, Homo sapiens
cccagccttctcggtcggagactgctgttgactgtgaccgccacacacatttatgggcaccgtgtcttccaagtaggggtttgggatgttctgcgggggcgatctgtatgagggcggaggca

SEQ ID NO: 252431 - DNA, 122 bp, Homo sapiens
ggtccttgtggctttcctggaggaggtgggggacgttggggctggtttcctccttgtgggcgtcgtccttctggctttcctggaggaggtgggggacatacggcattcactgaatagttgcc

SEQ ID NO: 252432 - DNA, 122 bp, Homo sapiens
ttttcctaggttctttcctaggcaagtagatcccgggagcggtggaggggcgggactccacgtctcctaggaaccgctgcgcgctcactgattggctgatcgctgctcagccgccattttca

SEQ ID NO: 252433 - DNA, 122 bp, Homo sapiens
ctggctgaaaccagctatgtgaaagtcctggagcatgtggtcagggtcaatgcaagagttcgcattgcctacccatccctgcgtgaagcagctttgttagaggaggaagagggagtctgagc

SEQ ID NO: 252434 - DNA, 122 bp, Homo sapiens
gcccggagaagcgggggcggggcacggggtgtggcgaggcgcggggcggggcataaattgcgccaggggcgagggcggggcacgaggtcgtgccgagagactgggagaggcgtgagtcgcgc

SEQ ID NO: 252435 - DNA, 122 bp, Homo sapiens
ccatgtctgagatgcccgctctggccccaagagaatgaaccagccgcagaggatggcatccgtggacacggacaaggagctcagtaacctggacttcagcatgatgttcccgctgcccgttg

SEQ ID NO: 252436 - DNA, 122 bp, Homo sapiens
aagcagttctcaggcgccgcgatcccccgccgctgccatcggcgatttccagggattctgcggaaagggaaaccaacaagagacacacgcacagttggaggtggaggggtccgagcggggtt

SEQ ID NO: 252437 - DNA, 122 bp, Homo sapiens
tatgaaggcccctcccatcatcccaaccatgcagggtaaggcaggctcagtgttcaaatgcgacccaggaactggtggatggcacataggttaggtgcttactagaaaggtttcttagaaaa

SEQ ID NO: 252438 - DNA, 122 bp, Homo sapiens
tccaccatgagtaaaagcttccagaatcccccaacagaagcagatgctagtgccatgtttcgcgtacagcctgcagatctgtgagccatttaaagctcttttcttcgtaaattaggtaactt

SEQ ID NO: 252439 - DNA, 122 bp, Homo sapiens
tctgtgaatagttgagactattttttaaattacttttatgttccccatagaaattatcctcgcattctaccttaagctgaagctgaaactaaataataatcccatgggcttatttaggtggt

SEQ ID NO: 252440 - DNA, 122 bp, Homo sapiens
gtgctagtgcactcctaggggacccggcgggcgtggggagaccagcggggtgagagacgccgggcccggaaccgcccaaaccacccgacggggagagggcgccctggtcaggccgggcagag

SEQ ID NO: 252441 - DNA, 122 bp, Homo sapiens
ggtgcaggatctgcgtgtggcgcggggaaacggaagccagatccagtaccagcaggtgtgcgcgaggtacagggtgctctgcgtgccccccaacccgctcctgtacgcctggcaggtggaca

SEQ ID NO: 252442 - DNA, 122 bp, Homo sapiens
ccaagtctcagtgaaagtgaaaattgctgaacatttcaagattgttctaatggccaaagccgtaggactgacaggtgtcactcagcatttctagtcaatggaactctaacagaaatgaaggc

SEQ ID NO: 252443 - DNA, 122 bp, Homo sapiens
taataaacacactgcagttaagagttttgtttttagagtgttctagacagatgaaatgagcgacaccatcgtcttcattacaaagcttgccaaacattgctgtttggggcaagagagctcaa

SEQ ID NO: 252444 - DNA, 122 bp, Homo sapiens
agtctttttcaaaacaaggccccaagaatctccaaattcaattatgtccctgggcttggccgactggtgcaggagtcttagggagccttgtacaaatgctagagttactcacttaccgacat

SEQ ID NO: 252445 - DNA, 122 bp, Homo sapiens
aggctgtagagctgagaggttggctgtggctcctaaagacccgatcccgggcactgtcctcggtgctgaaaagccagatgccggtacagaggcgagttgctctgggtcctagaggctactga

SEQ ID NO: 252446 - DNA, 122 bp, Homo sapiens
ggagaggagacaaggcaggcaagaaccacaggggacggcggacagacgggcgacatcctgcggaggacgccgtcagtaccaggaagtgcaggcgatgaggaagcgcacgtcgtccagcggcc

SEQ ID NO: 252447 - DNA, 122 bp, Homo sapiens
tcctgaggctgtgccgtggcctttctggggtttagccacaatcctggcctgactccagggcgaggcaggccaagggggtctgctactgtgtcctcccacccctacctgggctcccatcccca

SEQ ID NO: 252448 - DNA, 122 bp, Homo sapiens
gcgggcggcatgtaccgggcccgggcggcgcgggcggggccggagcccggcagcccggggcgctttgggatcctcagcaccgggcagctccgggacctgcttcaggatgagcccaagctgga

SEQ ID NO: 252449 - DNA, 122 bp, Homo sapiens
tgttcctctggaaggctctcctccaccggaggtttctcacaggtggcagagctcggccgccgtcttgttctggcagctccatgacgtcaaagttgaagtgggagaagaagaagacccaatgc

SEQ ID NO: 252450 - DNA, 122 bp, Homo sapiens
gttagcgagcactctgctccaccagttcttgtggggggcctgacattccccaggcctgcccgcagtcattggaggcttcaacgtctccctgtggtgctgtgcttcagtggtcacgctccttg

SEQ ID NO: 252451 - DNA, 122 bp, Homo sapiens
gcctcctggttaatgccaagactggaaaggcccctgagtcccacgccccaccccctgcttcgggaccaggggccataacacacacataggctggatttacctacttgggccagggtacagag

SEQ ID NO: 252452 - DNA, 122 bp, Homo sapiens
ctctctaaatcatgatcaaatcagcctgttctgaaatgctaggagatcttgcctccccagcgacattttcaggtttattgtggctttgtacacacatgcatctgatgatatttggtttaatt

SEQ ID NO: 252453 - DNA, 122 bp, Homo sapiens
gaatattatgggtgtgtgctcggatgaggacagctctggcatggtacatcttttctctcacgattccccaatctgctcagagataacacaaaccgctctcagggacgcacacacaacagaga

SEQ ID NO: 252454 - DNA, 122 bp, Homo sapiens
ataaaatttaaaattcagaactgcaatcacactcgtcacatttcaagcgctcagtagtcacgtgtggctaagggtcaccatcttggacagcacagaacaaccccatccctgcagaaagttct

SEQ ID NO: 252455 - DNA, 122 bp, Homo sapiens
gaagttttggaaatactgctaccaaggccacccccagagattctggcttcactggtgtggcgatgcggcagagagaagagtgttccaagcaggaattcagaatttgtttcttccggatgcta

SEQ ID NO: 252456 - DNA, 122 bp, Homo sapiens
ggacttggtcagccagctgctgcctgcccaggctctcagaagctgcctctgctactgctgcgttttgccggaaggggctgcccagatacactgagcaatgctttggcagagttttaaaactt

SEQ ID NO: 252457 - DNA, 122 bp, Homo sapiens
tagtcttcacccagaccctggcagcaaccattctactttctgtctctatgaatctggtaccgcatataaatgaaatcacacagcagttgtctttgtgttggcttccttcacttagcataata

SEQ ID NO: 252458 - DNA, 122 bp, Homo sapiens
gaacatcatcaagtacgacctacggcagcgcttcgtggcctcctgggcgctgctgcccgacgtggtatatgaggacaccacaccttggaagtggcgcggacactcggacattgactttgccg

SEQ ID NO: 252459 - DNA, 122 bp, Homo sapiens
tcaggccgtccgcagcagcctcatttgaactcccaactcctttgtggagcctttacatgccgccagaggaaactgtgagcacagcctgaccctggttggctgcaggcgcttctctccaccca

SEQ ID NO: 252460 - DNA, 122 bp, Homo sapiens
atgagtgagctcagcgcccggctggaggagaaacgcagagccatcgaggctcagaagcgacggattgaggccatattcgccaagcaccgccagcggctgggcaaaagcgccttcctgcaggt

SEQ ID NO: 252461 - DNA, 122 bp, Homo sapiens
cgggatataatctcgtcgtgcgccgttttttaagcccattggaaaagcgcagtattcgggcgggagtgacccgattttccaggtgctgtccatcacccctttctttgactaggaaagggaac

SEQ ID NO: 252462 - DNA, 122 bp, Homo sapiens
aattgtccctttatgtaagctcctgggatagccaggactgcaaatggctggagctgatcacggggcctccttaccagaagggtgggcaggtctttcccgttcctttttcctcatcctggccc

SEQ ID NO: 252463 - DNA, 122 bp, Homo sapiens
agggaaggacaagaggcgaagctccaagcccagggaagagaagcaggagcccaagaagcccgcacagcggaccatccagtagccaacgcgggctaaaaccgaccggacatctagcgggcagg

SEQ ID NO: 252464 - DNA, 122 bp, Homo sapiens
ccggagacgcttgtctgcagggctgcattgcatccccgggcgcacgtggagctggagcagcgcaggctggggaagagcagagagggtcgggcttctccgggcgcgccatggggcggggccga

SEQ ID NO: 252465 - DNA, 122 bp, Homo sapiens
caaaatttgacttctatcagtggcataaaaggttcagatatagtgaggttcaggacaaggcggggaggtgtgcctcactcaagggaaattataatatacatgcagacactggtttatctggg

SEQ ID NO: 252466 - DNA, 122 bp, Homo sapiens
gccaaggctctgtccctgggagaatcgtagcagctcttgaattttccattaaatattttgcgggtgtgagtttgggctctccagtcagggtgatctggcagttggccaagctggccttcacc

SEQ ID NO: 252467 - DNA, 122 bp, Homo sapiens
gctcccttgtttgccatcatggaggatgctgggagctccagctccctgtcctgtcctccccggcgctcactaaggctcggtcctctccacgtggtcctgacctgtcctctgtgagcaagaga

SEQ ID NO: 252468 - DNA, 122 bp, Homo sapiens
agtagcggaagtggtccgttctcttcctctcccggcccaagcttctgggtatttctattgcgcgaggcattgtgggttgctgggcggcccggtctcggagaagaggggagagtggcgggccg

SEQ ID NO: 252469 - DNA, 122 bp, Homo sapiens
acgtcggcccagccgccgtcggaggaggagcgggagccgtgggagccgtggacgcagctgcgcctgtcgggccacctgaagccgctgcactacaatctgatgctcaccgccttcatggagaa

SEQ ID NO: 252470 - DNA, 122 bp, Homo sapiens
tgttccttacggcttctctcctgacctctggttacctccactccgcctctctagaccccacgccctccccagagaaggacccaacccctcggcacagcagtggccgcctcactcagggccct

SEQ ID NO: 252471 - DNA, 122 bp, Homo sapiens
gagccgccagcagcccagctcgggacgcgggggtgagcacgactggctggcccagttctgcgccaacgccgccgcagcgtgcgcgcaccgcagccggggctcacgggagcccctgcctgtct

SEQ ID NO: 252472 - DNA, 122 bp, Homo sapiens
agacagttgcttaatctcatgtttgcatgagggaatttgctgaggaggaggtgaggctctcgtgaaacaagatccatgtgaaaatcacaagcatataggatattactcataaagccaccaat

SEQ ID NO: 252473 - DNA, 122 bp, Homo sapiens
ggttctctgaggttcgagaatatggttagaaggtgccctcagatgaatgttggtagcccacggctcgtctgacgcttttccctggatttttaagcggcgcgacagtgagaccatgttccttg

SEQ ID NO: 252474 - DNA, 122 bp, Homo sapiens
cctctccagctgcactgaacctctccccatcatttatttatttatttcgagacagagtctcgctgtgtgcccaggctggagtgcagtggcgcgatctcggctcactgcaacctctgcctccc

SEQ ID NO: 252475 - DNA, 122 bp, Homo sapiens
ttctcctcgtcgcccacaaagtggcgagcggtgggcatgtttcagccctgtttgtgttaccgctctttcagtcccaccattcactgggtcccagggtcttgttccacgacaagaatgaggta

SEQ ID NO: 252476 - DNA, 122 bp, Homo sapiens
ttgtccccagtcccttggctgggcctctgcagccccctttcccccagccaccccggtacccgctgatgctgaggaatactttggcgagaagccagtcgagcccctttttgcccaatgatgtc

SEQ ID NO: 252477 - DNA, 122 bp, Homo sapiens
actgcaacctctgcctcccgggttcaagcgattctcccacctcggccttccaagtagctgcgattacaggtgcctgccaccacacctggctacgcttgcaaatatgaaagactacatttccc

SEQ ID NO: 252478 - DNA, 122 bp, Homo sapiens
taggggcagggaaggtagggctgcgctggcggccggtgcccagttaccggcgatcggggacgctcggagacacctggtctcccggaagcgcccttcggaaatgggattcgacccggcttgcg

SEQ ID NO: 252479 - DNA, 122 bp, Homo sapiens
cgtcattactgatggctagcagggaggagggaacgggttgtcacctcggcctcataaggccgtgagtgagtagtccagggcctcttcaggcatttttgaaactggattaactaggggggaaa

SEQ ID NO: 252480 - DNA, 122 bp, Homo sapiens
gagaggcgtgcagggacctggattggccagtccagactagccctgccaaaaagggggcctcggagttgggggtaatgtgcccaggagcagaaatctggcgaccgtggcgctgcaatcacagc

SEQ ID NO: 252481 - DNA, 122 bp, Homo sapiens
gaactccttaccccagctgcctggctgccctcagcttcccaaagctcaaataagaggggccggcggcgcggggaagaggaggagccaggaggctcggccgctccattcactcagcagcccaa

SEQ ID NO: 252482 - DNA, 122 bp, Homo sapiens
tttctactagataggaggatggtagaagtttggctgctgtcataacatccagagctttgtcgtatttggcacacagcagaggcccagatattagaaaggctctattccaataaactatgagg

SEQ ID NO: 252483 - DNA, 122 bp, Homo sapiens
atatcttgggcccgcaagatcttcacaaaagaagccttttgttttgtttctctcggaaatcgagagacaaggcatgttttgctcccagtgcctagttgggggaaaatatctctatatctgtg

SEQ ID NO: 252484 - DNA, 122 bp, Homo sapiens
tgaggaagacgaaggacgaggccagcaggtagccgcagttccaggtggtgtcgatgtagtcgcgctgctcgctccactggaaccacatacggatgccgtcctccaggaaggtgctgatcaga

SEQ ID NO: 252485 - DNA, 122 bp, Homo sapiens
aggagagagaagaaagggcacaccaagggcttaggtagaaattcacaggaagcccattggcgaggtcttctttgcatctcttctgagggatgacccagactgaaactagcatattccctgtg

SEQ ID NO: 252486 - DNA, 122 bp, Homo sapiens
tgagcaaggatgttaagggagccgggggcaacctagaatccaccagtggggagagtaaggcgactcggagaaaggcgaggggctaatgcatccgttctaataactctgactttaactcgggg

SEQ ID NO: 252487 - DNA, 122 bp, Homo sapiens
cagtgaagaaagtgctaggtaagttgatctctcagtttgaggaagcccctagggctattgcgttctgttaactctgcattcaactttttttgtcatttcagaaaaaaaaagtaggctccttt

SEQ ID NO: 252488 - DNA, 122 bp, Homo sapiens
tggttttgaaacatatagattttcaggatggaagtttgattcttcagattgtgactcatccgtggaaaataaatggtttagcacctaaatctgtatattcccatcagtggcttggctgactc

SEQ ID NO: 252489 - DNA, 122 bp, Homo sapiens
aggagcaggctgcctgggctcaaatttcagctctttccttcctagcagtgtggcgttgggcgagttactcaacccctctgtgcctcagtttcctcctctgtacaatggagacaaggatagta

SEQ ID NO: 252490 - DNA, 122 bp, Homo sapiens
gtggggtttacaagctcattccattgtccagaatccttgtgggcatatttctcctagggacgctggccctggatcgctggccttgcctgaaagaggctgcctcctactgcgtttttgttcaa

SEQ ID NO: 252491 - DNA, 122 bp, Homo sapiens
atcactattatcacttctaataccgcacagggtctacacacaactgcgatagaccctgtgcggtattagaagggagggagagcatgctattcgtttcaatatcgcagtaggtgtacacccac

SEQ ID NO: 252492 - DNA, 122 bp, Homo sapiens
cgggaggagcgactaggagcttctgggagaaaggacctcccctggggtggcagaagcgctcgcctgttcacagccaacggagggtacggtataaaagtcaagccaggtttcaaataaattca

SEQ ID NO: 252493 - DNA, 122 bp, Homo sapiens
gatgtggtgcccaggtcaatgccgagggtgatcggccgcgcagccattatctccctgacccgcgcagctccagtctgcagccagcggccccacaagtccgcgctcttcgcccaggggggcgg

SEQ ID NO: 252494 - DNA, 122 bp, Homo sapiens
ctacgcagggtgcaacttcttgcgccaacgtctggtcctgtctaccctgagcgggcgccccgtcaaaatccgaaagattcgggccagagacgacaacccgggcctccgaggtaacttggtgt

SEQ ID NO: 252495 - DNA, 122 bp, Homo sapiens
gcgggctccgctcacgcccccacaccccctggctgggggctgggttcctgcgatgtcttccgactccccgctgctcccctagtccccgtaggcacgcgggtacccggcctttgggaggggga

SEQ ID NO: 252496 - DNA, 122 bp, Homo sapiens
ctctgaaccaggacctggacccggacccaaagtgccatgtctttaatgtgagtaagtagacgaactggtaaacaggcttggtttggtttgggggagtggtaatcttttttgcttcccctgct

SEQ ID NO: 252497 - DNA, 122 bp, Homo sapiens
ctcgatttcctgaccttgtgatccacctgccttggcctcccaaagtgctgggattacaggcgtgagcgaccgcgcccggccaaaaacaatttcatatggtccaaccaaatacatatctcgct

SEQ ID NO: 252498 - DNA, 122 bp, Homo sapiens
ataggagagcgtgaccccatacgcaagcccgccttccagcgtcagcatggccaatcggaacgtcagaattgggcgccgacctaatgacatgcggggttaaaaactcaccggccggaagtgtt

SEQ ID NO: 252499 - DNA, 122 bp, Homo sapiens
aaagagatgacttgtggagcattttgattgagaggctgtaggttcatccggcatgcaggccggggactctgggtgtagaggaacaatgtgaaggaaaccagagatacgcctgatggtctaac

SEQ ID NO: 252500 - DNA, 122 bp, Homo sapiens
agccaattactttctttttagccccattttctttctctctaaaataggattttatttcctcgtaagcggcaatgttaggagaacaatttaaataacaaatgggccgggcgcggtgggtcatg

SEQ ID NO: 252501 - DNA, 122 bp, Homo sapiens
tcttcccagaaatgggatcaagaactttttggagggagcacagccatggctcactgaatacgagagatgtctctgtgggtgctgtaccagtacaacttgctggaaaaccacctttggtaact

SEQ ID NO: 252502 - DNA, 122 bp, Homo sapiens
cagccttatgtgtgtctgatccggacctcccgtcagggccccacgctgacctctggatcccggtggctgtgctagatcacacagcaccaacccagaaggagaggcacacagagagtctgggg

SEQ ID NO: 252503 - DNA, 122 bp, Homo sapiens
tccgatcctgtgaacaggcaccactctgcgcagctgcatcgatgcctgactgcacgtgtgcgtgcttccattacactgtcggcggtcagaggcgtcctcgtccttgcagcaaccctggtgcc

SEQ ID NO: 252504 - DNA, 122 bp, Homo sapiens
tagtaaataaataaatgtggtaagacagtgcagcagtacaggtgcagaagcttcagaagccgtcctttctcctctcctcatcctcttccttccctctcagccctaaactgaggcagagcgaa

SEQ ID NO: 252505 - DNA, 122 bp, Homo sapiens
ctgttctccgaggcggacctgtggagctttaagctcccaccttcggttttgtactgggcgcgggaattgcaaaatgccagaatatcgcaaccatccccgcggcccggcgggtttgcaaaggg

SEQ ID NO: 252506 - DNA, 122 bp, Homo sapiens
aatgagatggaaagccactggttaggtctcagcagagagtgaaagtctgactggctgctgcgtggagaaccctccacacaagatgcatgcgtgaagatcagttagggggccattgcaatagt

SEQ ID NO: 252507 - DNA, 122 bp, Homo sapiens
gtgtgcacaccctcctggcccccccacccctttcccctcttggacaccacagtgggcagccgatgtgggttcatgaatgatcgtggctctgatgtgaaattccttccgtctgagggttaggt

SEQ ID NO: 252508 - DNA, 122 bp, Homo sapiens
gatccggcagcctctgtccgcgggccggcgaaactccaccccctcctggcacccgctgtccgttcttggctagaaaacctctccaaggtgcccattccaggatttgatacccttagcagtga

SEQ ID NO: 252509 - DNA, 122 bp, Homo sapiens
agatctcctgcagggcgtccgggccttgggaaggcatcgccatctcccgcagcgccctcccggactagcgcagcaggctggcatcgcttcctgaggtttggccccaagttttacggcttaat

SEQ ID NO: 252510 - DNA, 122 bp, Homo sapiens
gtggacagtgggtctggggttttgtctctacagagccacatcggccgggcctcacagatgcgttttccagagattcctgagctgccatacttctttggtcccatacgaccttttcctcccct

SEQ ID NO: 252511 - DNA, 122 bp, Homo sapiens
gagatgccacttggcggccatggcagctgtagtatcggcgactccgggtcaaggcccggtcgagtgcagtaccatgggcagcaccgggtatagggcagagacagctttgtgtcaactttgct

SEQ ID NO: 252512 - DNA, 122 bp, Homo sapiens
accggcaggggttcgtcgggactgcggaccgtgaggccccgtcgcggcgccaggagcaaccgagtcacgagggaaaagagccgcaccggccgcgttagagccatgtttcccttagtgcggga

SEQ ID NO: 252513 - DNA, 122 bp, Homo sapiens
cgtggctgccgccaagcgcctcaagctgcttctgtttgcgccggtggcctgcacctccctcgagtacaacatccgggtctactgcctgcatgacacccacgatgcactcaaggtatctcccg

SEQ ID NO: 252514 - DNA, 122 bp, Homo sapiens
aggagaagaagagaaggagggttaggctgccaggcgggcgaggcagttggccgcggcgaccgttcgggcgggagaaagaaagttcttttgcggccaccgggcccagcagagaggttccgcct

SEQ ID NO: 252515 - DNA, 122 bp, Homo sapiens
agggggcggggccccacaaccaccgcagcctcttaggtttctccattgtgattggaaatccgagtaccgcctacccctcccctcggctcgctcaatccccttcaaggacaagggctcaagta

SEQ ID NO: 252516 - DNA, 122 bp, Homo sapiens
agcctctgcctgcagttaacaactgcaaatccttaaaattaatgttctcccggccaggcacggtggctcaagcctgtaatcccagcactttgggaggccgaggtgggtgcatcacaaggtca

SEQ ID NO: 252517 - DNA, 122 bp, Homo sapiens
gcatgcaaccttccaccttgaagaacagcaccacatcatctctttgctaagcctgattcccgttttctggataggaaactgacacacaaagtatctccagaatcatatcagaggtaagtagc

SEQ ID NO: 252518 - DNA, 122 bp, Homo sapiens
agcggccgggcgccgattggtgtctttgagtctagtctttgttcggggctgtccaaaggacgctagctgttgcacctgttcctccctgcgcgtaaggtgagtgtctcccggctcccaggtgg

SEQ ID NO: 252519 - DNA, 122 bp, Homo sapiens
aactctcccaggtcctctagagcctctggaggcccccagatctggagtgaaagccacgggcgcacagatgcctctctgtgtcctgagggggaatgaattgtgccagccgggacttggaggag

SEQ ID NO: 252520 - DNA, 122 bp, Homo sapiens
accagagcttcctgctcccacgggatcccggctggagattccaaaaggaggctcctggcccgggcaccgtgcccgcccagcctatatagtgctgccagaggcttatataggacctcagcaag

SEQ ID NO: 252521 - DNA, 122 bp, Homo sapiens
gaactatgacaacacacgtgggacacgtgtgaggctggggaaagagctgcctctctcacacgcaacagggggacttggcaaaacctaacacaagtgcacacgcaccaacccctcaattcagc

SEQ ID NO: 252522 - DNA, 122 bp, Homo sapiens
ccacccctcggctccgagtcagggaggagggaggaggatgggaaccactactgagtccagcgccattcccagcattatgcaggtgaggacactgaggtcccggggatgaagcggcttgtcca

SEQ ID NO: 252523 - DNA, 122 bp, Homo sapiens
caaggaacgaagaagggacagcatgggggtgaccaggggcccgaccgcaggaccgggaggcgagtcggccagaaagaggtgcagtggctgctggtggtaactacgccgacgtgcgagctctg

SEQ ID NO: 252524 - DNA, 122 bp, Homo sapiens
agtggagaaagaacaaagaaatctgtaacaggttgtgatcaattagttgtaaacaccaggcggctttattggtagcattgcaatctgggggtggagcagctttactctgaccacactcaccc

SEQ ID NO: 252525 - DNA, 122 bp, Homo sapiens
gatagaggggtataatcctactttacaatggtatgaaaggcaagggccaggaatgttaaacgtcctgctgctatatgcaggccagtcatacatgatgaagatttatcccgcaacctgaatga

SEQ ID NO: 252526 - DNA, 122 bp, Homo sapiens
ggcgttcttaggttccgtggctcgcggattccgggagcaccccagggagtggcacttgcacgccgcggaccgcagggatccccaagccctgcacccagattcttccccgccacggagagaca

SEQ ID NO: 252527 - DNA, 122 bp, Homo sapiens
aaggtgagtagagcttgcctctcttgctgttaaaatttcttttatggagacttgttctgtcgccaaggctggagtgcagtggcctgattttggctcattgcaacctccacctccggagttca

SEQ ID NO: 252528 - DNA, 122 bp, Homo sapiens
gggttttgttgaaactgcgaccctccttattggctgtagatttaaatgttgacataccagcggggaaggctggaggctggccacagtcccaagagcacagcagaaatggggacaggtttaca

SEQ ID NO: 252529 - DNA, 122 bp, Homo sapiens
agtagaggcaaccaggatgcagtccaaagattgggatatcccactcgcttttcctggagccggatgcagtcttcccgacttccggtggagatccgggggtggggggggggcgggaggggggc

SEQ ID NO: 252530 - DNA, 122 bp, Homo sapiens
tttttatgtaacaaagttgtgagttgtttttcagcggccgtggacccccaggttaaagttcgcataccttgagcatgcccaggtgaacaaagcatgccaccatagggaggacctaagtgctc

SEQ ID NO: 252531 - DNA, 122 bp, Homo sapiens
aggaagcacttctcaatgcatcatttaacctgattccccagaagagtcctgagggctccacgggcagaaatgtgtcccatttacagaggaggaaacctaatggaaatgccacaagaacggga

SEQ ID NO: 252532 - DNA, 122 bp, Homo sapiens
taaaatatgcctactgcctttatgctgcaccttttataagtgttattccaagaaaagcagcggaaactatgcatgctgtttgttatttcacggcataggatatttgctgttaccagagtctc

SEQ ID NO: 252533 - DNA, 122 bp, Homo sapiens
agtgatgaggcagtgctgcccttattttccttgccttacaggagaagtgtcaagagaatccgtctaaaacagctctttaaataaaattcagaatgttctaacataatgccccaaataagcag

SEQ ID NO: 252534 - DNA, 122 bp, Homo sapiens
ttaacagaggtgctgggatccggcaggggagcaacaaatgtggttcggcaaattgctaaacgaaaagcggacacccgcccacgacgcctgctctgatctgacctcccggcctacagccctct

SEQ ID NO: 252535 - DNA, 122 bp, Homo sapiens
gaccgtctctgctttccttctcttaaggaatggtaaagaaaaagaatcaggagacaggaacgttagtgtcctgcccttgtcttgcctcacagcaggttagtagaggggctgagggaaaagcc

SEQ ID NO: 252536 - DNA, 122 bp, Homo sapiens
accatacaatgcactgaatgaggcaagagtgacagactagtacctccaggcactttcaggcggcgcttaatctctgtgctaggcttggctctgcacagggttcattttaaccttctggtgtg

SEQ ID NO: 252537 - DNA, 122 bp, Homo sapiens
gcatagtgcctggtccataggaggtgttccatatttatctccagcccgtggaccttctttcgggaagtttaaatttcttttccactctcaaaatggcctcttggttttgaacttgaagctgt

SEQ ID NO: 252538 - DNA, 122 bp, Homo sapiens
tcttaccgcccggatctgcagctccaccaccacctccagaggcatcgttccctgcgtgggcgaaaggactggaatgagaagatccttttgtgccgagccttggaccaatttttcttagttta

SEQ ID NO: 252539 - DNA, 122 bp, Homo sapiens
gacctgtaggccaacagtgggtcacgaaagtagacatgagaagcccactgtccctctccacgtgtcttgaaacatgacagaaactaacagtggtcctctgttgttaccactgacagccaatc

SEQ ID NO: 252540 - DNA, 122 bp, Homo sapiens
ctgccggagctggagtctccccactagcaaacagtctccaatcccagaaatatctagaaccgagaagccccatcctccacggtcactctgtgaccctcctctccctatttccttccttccct

SEQ ID NO: 252541 - DNA, 122 bp, Homo sapiens
cccattactcagacgggaacagagaggccgggagaagcgaaatcacccaggggctggggtcgtcgcagccaggagagactccggccctcaccaccacctgggcgagatcacgctgcaaacgg

SEQ ID NO: 252542 - DNA, 122 bp, Homo sapiens
ccctgacccgcagggaggaggccgaggcctggagagaattccagcgccgcgcgggtgggccggcagtgctggggcaccggggcgcaccctccgcagctgctggcccgggtgctaagcccttc

SEQ ID NO: 252543 - DNA, 122 bp, Homo sapiens
atacaggtatctgattccagtttcaatggggaaacttctgtcgtgccagaggagggcatgcgctgatttccccactctgatggttgctctagtaatcttggtgttgtggcatgtttcccagt

SEQ ID NO: 252544 - DNA, 122 bp, Homo sapiens
cttcacaagagtcttgaattgcatatctccatggctccccaggctccagcctttaatcatcggccatgtgtccattcagcaaaaccctaaacatacaacagagtacaacgtataggaagctc

SEQ ID NO: 252545 - DNA, 122 bp, Homo sapiens
aggggatggggcggggggcttgcctctgggcatggagaagcaaggcccaaaggcaggctccgaataccccaagggtagaagctctatggggaagggggtgggggctgggctggggacagact

SEQ ID NO: 252546 - DNA, 122 bp, Homo sapiens
acgcacccagtaaatgatgcggggaggggggattagcctgggcgcagaggaccggagcaacgtaaacagctttagaacctatgcaagaggaaagtgcagctgcacctcagggcgtcttcggg

SEQ ID NO: 252547 - DNA, 122 bp, Homo sapiens
agcccctattcccccagtggctcttacgacccccatcgcagggggaggaggcaccccccgcgaggcggggactgagagccagcccctctaagccttctggctcttcggacccccatcacagg

SEQ ID NO: 252548 - DNA, 122 bp, Homo sapiens
ccccttttggcatcttggtacttgtagttttgtccactctatctttacccgaaaagccagcgctgagaccacaactcccatcaccctgcgagcaccagcgccttcagagcgcatcctccgag

SEQ ID NO: 252549 - DNA, 122 bp, Homo sapiens
ttgagaggcagacagagtatcctattgtcatccattcttagtgtaagttttttccagtggcgtggagtgttgtaaacattcttgcatatcataagtgacattcatattagacattgaatgac

SEQ ID NO: 252550 - DNA, 122 bp, Homo sapiens
gacttcccagagctttagtacctgagactggggactcgggaaaagttcggactgctcatccggattcagcctctcatcctcttcagcccagagtttcagtgatgtgcctttaggtccagctc

SEQ ID NO: 252551 - DNA, 122 bp, Homo sapiens
aggcttcctcctccctcccgttccgcagagctgttctggcaggggcctggagtccagagccgcagcttcgtccctttcggggggcctcagatcgctctgctgctgcccttttcctctggaga

SEQ ID NO: 252552 - DNA, 122 bp, Homo sapiens
ttttgcagagtcactacttgcaaggggagggaagcaagggactcctagcccagagggggacggaagagggggcctccatgtctaggtgatgctgctcagcagcacagcagatcctctgggtc

SEQ ID NO: 252553 - DNA, 122 bp, Homo sapiens
ctagaaaatgtgtgaacttaaaacaactatgagtccctgagccacaatctctttctccttcgaggccagcttctcccgtggccttgcttctctctctctcactttgcccatgctgttcgctg

SEQ ID NO: 252554 - DNA, 122 bp, Homo sapiens
gtcagggccctgtcccgagagaggctgggcaaaggccccggcacccctggagatggccagcgcgtcacaggcctcaccgctcggggctgaagctgaactggtgcagcaggcggtcggccagc

SEQ ID NO: 252555 - DNA, 122 bp, Homo sapiens
gtcggaagagctctcagcctctgggtttgaggcggcccgggggtccagccagcccaccctcgctccgccggtgctcgctctatttgaaaacgctgactgttggtcccccaagcagcagtctg

SEQ ID NO: 252556 - DNA, 122 bp, Homo sapiens
gaccccacagccctggctcccaccctcgatgtgctcctgcctttgccttcttgctggtaacgctgccattggtgctggtaacgctgccattggtgaagaacacgggagcccatccagcccat

SEQ ID NO: 252557 - DNA, 122 bp, Homo sapiens
ctgcggctgggctatgacgactacgtgcaggtatacgagggcctgggcgagcgcggggaccgcctgctgcagacgctgtcctaccgcagcaaccaccggcccgtgagcctggaggccgccca

SEQ ID NO: 252558 - DNA, 122 bp, Homo sapiens
atctaagtatctctgagctttgtaggaaatgaatatgctacagcacatttttaagtcatgcgtttaaggtatgacagaatggcacaagctggtagagatctaatgggaaggaaattcagttc

SEQ ID NO: 252559 - DNA, 122 bp, Homo sapiens
agcccagagggagctagtccctgatcaagtccagcaggcgccggctggccgagccgagtgcgggtcccactgagcctgcgccaacccagaacccgcgcctgcccgcgaacgcggcgcgcagt

SEQ ID NO: 252560 - DNA, 122 bp, Homo sapiens
agggtggcgacagaccatacctatgaagcggtgattttctttaattgcccccagaatatccgtagaggtagtagggactcaataaagaaacacaaaggagacgaacacggcacgatcgccgg

SEQ ID NO: 252561 - DNA, 122 bp, Homo sapiens
atattaggccctgtgctagacactggggttcccaggaacaataatctatggtgtcattcacgagggtcctgagtctaatggggaagacgtatgtatctacagatattacctagagtatccca

SEQ ID NO: 252562 - DNA, 122 bp, Homo sapiens
tcagccccgagggggaggggttgcgggacagggtgacagctgcgccgaagacgccctttccgctcgggcgccgggatccccgtgcaacccccacggaggtctgagtgccagccgggatgcgg

SEQ ID NO: 252563 - DNA, 122 bp, Homo sapiens
ggcggagggggtgcggggcgcgccccggccctgacccccctgccgcccctcccgctcagccgagaaggtgagctccctggggaaggactggcacaagttctgcctcaagtgcgagcgctgca

SEQ ID NO: 252564 - DNA, 122 bp, Homo sapiens
gatagtgtggttgccataccaacagcagagtgggttcccccctcccagatggactggggccgtccaatccgaggggctctgggatcctggcatctccactagggctggggctgcccaccaga

SEQ ID NO: 252565 - DNA, 122 bp, Homo sapiens
gctggccaccagacaggggcatacaatattggaagcagaaaaatgcttgttggcaagagacggacatgaacagaagtgactttatatacaaccccctaagcacacacagggtcgccttctcc

SEQ ID NO: 252566 - DNA, 122 bp, Homo sapiens
agttgcgcctgtgctcccaagggctcgccttaaatacctgtgggtatctcctcatcatatcggtgccattcatgtttctcagagatctaactgccaaaggacttaaactctctaagcctccc

SEQ ID NO: 252567 - DNA, 122 bp, Homo sapiens
cgagggctgtaacactcactgcaaaggtctgcagcttcattcgtgaagtcagcgagaccacgaacccacaggcaggaacaaacaactccggacgggccacctttaagagctgtaacactcac

SEQ ID NO: 252568 - DNA, 122 bp, Homo sapiens
cacagacacacagaattacacagacacaagcatatttacaaacatgctcaggcagatacccgccacgaataggaagagacacagacctagagtcaagtgacacaaatactcaagagacatgt

SEQ ID NO: 252569 - DNA, 122 bp, Homo sapiens
atggttctgcagggccacatcaatcgtgtaaagtgagccgcatgtgctcccactgacgagcgcgttggcagctctcctccatcggcttggaatgcacacaagcctcgggtctgctctccccg

SEQ ID NO: 252570 - DNA, 122 bp, Homo sapiens
tctgcaaagcacaaaagcaatggagtcaggggtggatgcaaacaccctccttggcagtgtcgctggaaaattcaccaccatcatccccttgactagctgcacgagagctccaaatcttgggg

SEQ ID NO: 252571 - DNA, 122 bp, Homo sapiens
gatagtaggagctgtgatgccggtgattcagtcacatctattccattcgcctatgctgagcgcctccaggccagcacggaggggccagcacgatgcttttcatagccgctgacccaccagta

SEQ ID NO: 252572 - DNA, 122 bp, Homo sapiens
gactattttaacgcttgccatctgcagaaggtaaaaatctgctagaggccaagttccaatcgctatccagcccaccactgaccctctttgatttcattctccatcaacaaggaggacatgga

SEQ ID NO: 252573 - DNA, 122 bp, Homo sapiens
gcatcccgggagcaagggccgggccaggcctgggcgcggggcattgtgggaggtggacgccgctccggggcgggtaggtgagtggggaggggcgggaagggtgcacatcttggggaggggag

SEQ ID NO: 252574 - DNA, 122 bp, Homo sapiens
cctgcctccaactactaactcactaacaagtccactaggcccgagtgcaggttagggactcgccagctcggaaggaagcctctgacctttctcgtagatctgctgcctgtctccgggggaca

SEQ ID NO: 252575 - DNA, 122 bp, Homo sapiens
gtaaccctgtgatgggactgtgtgtatgatgtgacacttttagcaatgtgaaaacgtgggcgacctctgactggaatggtgtgtgtgtagaattggattgctggtagcactttacgaccaag

SEQ ID NO: 252576 - DNA, 122 bp, Homo sapiens
gtcagcccacagagaggtagggcagatgcccagcagcaggaggggagcaggcagagccagcggtgctcctctaactaaccactgaggaggagagtcctaaggtgtccttggaccctgcagcc

SEQ ID NO: 252577 - DNA, 122 bp, Homo sapiens
gaaggccatgtggcatgggggcactggaccatctttcctcaatgacacctcacagaccaccgtgatgtacttcttcatcttatggacagtgaaaccgactctcagcgagggcaatcacgtgg

SEQ ID NO: 252578 - DNA, 122 bp, Homo sapiens
tccctctataatcaccatcaaacttgcaaaccagtttcttcaggcttttattacctctcacgtagaccacctcaataacctcctccttactggcctttctgacctctgtcatctccaaagta

SEQ ID NO: 252579 - DNA, 122 bp, Homo sapiens
gcttgattactgagcagggacaggaagtgctcggtgactggggaggcggggctcaggcctcgctccccacggtgccccacggtggctcctcctccgcgctaagccagggcgtggcttcagca

SEQ ID NO: 252580 - DNA, 122 bp, Homo sapiens
agctccagcgcctctcacctcacaaaccgcagaaacacacccaacattaaccaaaatggtcgctaccagagaacgctgagaatcccgccactacgttacgtgcgcacacagaaacgccttta

SEQ ID NO: 252581 - DNA, 122 bp, Homo sapiens
ggaactggagtgtctagcttcccagaggacattgtagcataaactaatttcctaggtttacgcataaccataaataacatgaccatatctaaacaatttcacttactgatagtaactgcttg

SEQ ID NO: 252582 - DNA, 122 bp, Homo sapiens
tcctcgtcggacaaacaggaagcaagcggcctcggggccgcggagatttctacggggcggcggaggggtcgccgcagcgcccccagtgggccgtcggcggaggcgcaagccgcgtggcaggg

SEQ ID NO: 252583 - DNA, 122 bp, Homo sapiens
gcgggactggagggcacagttgaggaaggagggtggttaagaaatacagtggggccctctcgctgtcccttgcccagggcacttgcattccagcctcgctgcatttgctctctcgattcccc

SEQ ID NO: 252584 - DNA, 122 bp, Homo sapiens
gcagctcctaagagtgaccatctaacctataggtgtcattgagttcagccatggccaattcgtagtcctcttctgtgagcttccagttgtgcacgtcccccttaacgaagccagagatcatg

SEQ ID NO: 252585 - DNA, 122 bp, Homo sapiens
gctgcactccgtagcccaggggttccccaggcaccagcaggtgcggccgcccgtagtgcgcgccctgcagcgggaagtgtgcccctgctgcctctacgctggcaccgtagcccttgggtggg

SEQ ID NO: 252586 - DNA, 122 bp, Homo sapiens
tcatctttgctgtagtaattcatggggaagaactatttattttccccatgtgaagttacacggatgccccgtggcttgctgctgtggtgatgctaggttccttcctgaggctggggggtgga

SEQ ID NO: 252587 - DNA, 122 bp, Homo sapiens
tttgggcttgtgtgcttgtgctgcccctcaagccagcctgggtgaccgcctcactgctcacgccccagactgaatgccaatgcccttatcatgtttcactgacctgctcctcaggactgatc

SEQ ID NO: 252588 - DNA, 122 bp, Homo sapiens
gccccccacagcccctccctgggaagcccgaggccgggctcttcccctggactccctagccgtggtgggttattttaattgcagtaacgttgctgcagtaaaccccatggctgcctggcctt

SEQ ID NO: 252589 - DNA, 122 bp, Homo sapiens
tagcagcgcctatgtgaagttaggtaggtctgatgtcgtataaagcgcggagagggtgcccgccaatggctgggtgggtaaagccgactgtgaatggagaagattcccaagtcccgagcttg

SEQ ID NO: 252590 - DNA, 122 bp, Homo sapiens
ccaggaaaacgtcctgtcagtgaaggtttggttcaggaagaacagccaaatccccgacaccgttgagaacaccagggtggtgctgactctggtgtggctgctcggaacccttagaaggccct

SEQ ID NO: 252591 - DNA, 122 bp, Homo sapiens
tacctgcacatcatgaagaacgaggaggaggtggtgatcttgttcgcgcaggtgggcgaccgcagcatcatgcaaagccagagcctgatgctggagctgcgagagcaggaccaggtgtgggt

SEQ ID NO: 252592 - DNA, 122 bp, Homo sapiens
ctgggcaggtatagtcaccaggggtcctgcttctttcatcattgtctctccccgcccccacgccacccacagagtagctgccttttccatccacaggcaggatggctctgtgctctgagcca

SEQ ID NO: 252593 - DNA, 122 bp, Homo sapiens
tcagcagcacaaccaagcgagatcaacacaactagtgtgtggtggctaagtgcaccacagcggcgatacggctagaagaaactaagagaccaacattgtaccactgaggcactaaagacgcg

SEQ ID NO: 252594 - DNA, 122 bp, Homo sapiens
taaagtattttgagaggggaagtgaggcaggatagttagtcaaggaagtgaccatgttctcgggatgcagcattggtggtgacctcacagccaacacaataagccttggcattcacatcata

SEQ ID NO: 252595 - DNA, 122 bp, Homo sapiens
tatggtttttgccaaacttggtttttccgagaccgtcttttctcagaggctcagttttaccgtcctatctgcagtcggctactttcagtggcagaagaggccacatctgcttcctgtaggcc

SEQ ID NO: 252596 - DNA, 122 bp, Homo sapiens
gcgtgatgcactgcacccggcctcagacccgtatcgtttcttaaactgaacatttacaggcgtgatgcactgcacccggcctcagacccacatcgtttcttaaactgaacaccacatgctca

SEQ ID NO: 252597 - DNA, 122 bp, Homo sapiens
actaggggaaacacactaaagggtataaactgcttcatgattggttagttcactttgatccgatggaattaagttttgaagtatttgggccaggtgtgatggctcatgcctgtaatctcagc

SEQ ID NO: 252598 - DNA, 122 bp, Homo sapiens
aatgctgcctctactccttgcctgcgcaggccctgaagtcccaggtcctctcggaacctccgtctcttttaccataaagtggggagagtactgcttgccatggcgccggccgtgaggggcag

SEQ ID NO: 252599 - DNA, 122 bp, Homo sapiens
cacgtctgacatgctccatcctcctgtcccccccacactgaaccgtctccaagaaccttccggagagcccacagtgtgaacagtaatgaatgctccatagctggccgccttgcactctagtg

SEQ ID NO: 252600 - DNA, 122 bp, Homo sapiens
tgttaatagttttggaaaacatcttagcttcaattacacctgaatgcaaattcccaaccacgtgggccttacacatttttgaggtgttgctcactgcagtcctagccctatctacaacactc

SEQ ID NO: 252601 - DNA, 122 bp, Homo sapiens
ggagcagaggagtgagctgaggacgcggaggagcgcgtgggaggccggcggggagcttggcgccagcacagcacggctgggccgcgagagggacgatggggtgccgcctccggccggcccca

SEQ ID NO: 252602 - DNA, 122 bp, Homo sapiens
ataaccacgaagagagaaagaaacagaggctagagccccaggaggaaggagctggcagatcgtctctgagggtggggctgtggcttctctgatctcaggcccccatcctccgcccaggcccc

SEQ ID NO: 252603 - DNA, 122 bp, Homo sapiens
tgctctgccagggggaagggagagggaggtgctggctggtgccggcggagtgggagagtacggacagtttctgaggccattgcgttccacgcccaggaacccggggacaccccccgcccctc

SEQ ID NO: 252604 - DNA, 122 bp, Homo sapiens
ctttttcgcgcccaaaaagcccagggcgcctgcgtcacaagcactgaaggggcgtggccacgccgcgcatccgcgctttacggcggccgcaaaatgaggtgtggcgagtcaggcgcgggccc

SEQ ID NO: 252605 - DNA, 122 bp, Homo sapiens
ttaagcacccccagtcctgggaaggagagcagctgtattctctctcagccctcccctagccgcaggaagcatacttcactgctgagtagacatccagcaatcacccagccacatctcttaaa

SEQ ID NO: 252606 - DNA, 122 bp, Homo sapiens
ggcgggccaggagcagcgcggacccgagccgggcagggggcgcccgccacggcacccgcgcgctcctagcgccccagacccgcctgcgggcccggatcctccttgccactgtcccacccgcc

SEQ ID NO: 252607 - DNA, 122 bp, Homo sapiens
ctcaggaaaaataattcccgttcccgcagcctgtgccactgggtgggtcatgcctgttcccgaacgcctcgggcgtcttgattcattcttatgtatccagttggtgcgctacgttagagtgc

SEQ ID NO: 252608 - DNA, 122 bp, Homo sapiens
cgagcctggctcttgcaaaatctgcagctctcgcaacggaaggcgctttgcaatctgcaccgagaggtgtgcgcggaggggcggaggagggggcaggaggaggcggccgccttgaggcgtgg

SEQ ID NO: 252609 - DNA, 122 bp, Homo sapiens
cagggtggaggaggtggtctgcagggagaccagagtgtcagggcccccggctgctccccacgctgccctgcaccccctgtgtgcaccggggggtggagatcgtgaccagctgcagcttggga

SEQ ID NO: 252610 - DNA, 122 bp, Homo sapiens
ctgggagagggcactgcctaaaggtcacagggtctcaaagggcgaggcgagaacttctaacgaacgctacaccgcggcggactgcagattggaggaccgagggtagatgaggactggtgagg

SEQ ID NO: 252611 - DNA, 122 bp, Homo sapiens
ataagcattaaatgaatatgaatgaataaactaaagaaaacgtgctgtccctaacagggtcgtatctgattcctgtggccaaggaagtgcaagagtctgtgggaggtaataccaaatgttgc

SEQ ID NO: 252612 - DNA, 122 bp, Homo sapiens
ggctgattgtaggcacgcgggggcgggaagacagcttcttgcttctggctgcgatggaggcggatctgggcggggccgaaacgggggcggggccaagtgtgggggcgtagtcaggcgtgggg

SEQ ID NO: 252613 - DNA, 122 bp, Homo sapiens
ggtaggtacctgaaaaatgctgaatatgatagctgtgaggggccggttcccacttagctccgccaccttgaacacatcaagtccccacttgttggtgtcttctagctcctaagatatgaagg

SEQ ID NO: 252614 - DNA, 122 bp, Homo sapiens
gacaacacagcgagaccctgtctcacaaaataaagtaagcccggactgagtgcggaaaggcgggcctggcgggtctggtctccccatgcgggccaccagaggccctgcagccttcagtcgct

SEQ ID NO: 252615 - DNA, 122 bp, Homo sapiens
tcgactaccggcgtagtagtgagccgagtcaatgggagcgagcctggacggcgcagacgccgtaagagatgccgccatcgggcgaaataagtggaacccgggggagaaagggaaggatcctg

SEQ ID NO: 252616 - DNA, 122 bp, Homo sapiens
acttgaggtgcatctggcacatgcgccccagctcccggaaggcctcgttaatatcccgcacgcgcacccgctcccgcgcgttattggccatgcgcctctcccggtccctcaggtctttctcc

SEQ ID NO: 252617 - DNA, 122 bp, Homo sapiens
cgctcagcacggggcttccgaggtcactcagcatagtgcttccgaggtcgctcagcacagcgcttccaaagttatttacctggtagcgagtgtcagacttccttcatttttctggctgaatc

SEQ ID NO: 252618 - DNA, 122 bp, Homo sapiens
atttatggtattttctttgctatatttgcattccagaaattaagtccccctgccattattcggtgagcctttcatacattagaatgatgaattgaaagcagaaatgggaaaaagactgcaat

SEQ ID NO: 252619 - DNA, 122 bp, Homo sapiens
cgcgagctttgccgccctgcttgccacgtcccgacatgacgtaaaaaattcaatcagtaacgttcctgagactgacgtaacgctaaagctccgctacttatagtcaacagaggcacgaaaac

SEQ ID NO: 252620 - DNA, 122 bp, Homo sapiens
ccctgcctcccccgccaggcccaggaacagccttaaaagaaagatggtggttttccttttcgagaggcgaggaaacatccgctcagtctttatggaccttgagaaatggtgaggcttcccct

SEQ ID NO: 252621 - DNA, 122 bp, Homo sapiens
caccggggactggggggccctgaggcaatgttggggagcctgcctcctctcggtcctctgcgggtgggtgagaggggtggccctcgctgcctgagatgcctgtaaaggaggaaggagaaagg

SEQ ID NO: 252622 - DNA, 122 bp, Homo sapiens
gcggtatgcaactgaaggcttattcctccactgagtaactgtctcttgctgtgtggaagacggtggcttggttgcagaaagcctaaagatgtctcccaactgccccttcgaaacttgggctg

SEQ ID NO: 252623 - DNA, 122 bp, Homo sapiens
gcccgccggatacccctctgggtgtccaggagcggaaggaaggatgcatgcgactgactgcggacgcgttgagagccaggggaggcatgtttacccacagcatctcatgtcaaggctcgccg

SEQ ID NO: 252624 - DNA, 122 bp, Homo sapiens
ctgagagagctagttgttaaaatgagcctggaatctgcccccttctcttgcttcctctgtcgctatgtgatctctgcacacatcatcaccccttcactttctgtcatgagtggaggcagcct

SEQ ID NO: 252625 - DNA, 122 bp, Homo sapiens
ggcgaggaagcggacaagcccgggtggcccggcgtgtagagggaagggggcggggctagacgcggcctggacaactactagagcgcctcgggctgtgctgctcgagactacatttcccagag

SEQ ID NO: 252626 - DNA, 122 bp, Homo sapiens
gaagacttaacctcagagcctgtctggcttccatcctggtggggttcatgccttccctgccggctgtctgggtcctcccctcctgcccgagctgagaaaggccagctgggtctcctcttctg

SEQ ID NO: 252627 - DNA, 122 bp, Homo sapiens
gttgtgtatcacatttttctttcaaagatctggttgacataacatgcatttctgcagccccgcaagagtaaatgatcactgtcggtgcattgtatgtaagtttgaaagatcagtgagtttaa

SEQ ID NO: 252628 - DNA, 122 bp, Homo sapiens
aataaatttaagaagggttagtgcttgccgggcttccacccggagggaggccaggctccccgcgcatgcacgcccggtgcctggctttgctgcgtgatcgatccacgggagcctctgatgtc

SEQ ID NO: 252629 - DNA, 122 bp, Homo sapiens
agaggatcttcaggggcaaactgcagactatctgaatgacggcactgaccatcagcaaaccgcagagctgcctgaccaagaaattgcgagacagaagcaatgcttgcaggcgaagaagaagg

SEQ ID NO: 252630 - DNA, 122 bp, Homo sapiens
ggatctggacaatagagggaaatgtaacaggacagggcaggagggcggatgagctggaggcgtagtcattccacatagggtgctcagggcagccacgctggaggaggtctatgagtgagtcc

SEQ ID NO: 252631 - DNA, 122 bp, Homo sapiens
tttccctggggatcttcccggactgggttcctctcatcatccaggtctgggctcagaagtcgcctccttagagaggccctccgggattgcccatccgcctgtgcccacgctttgtcccgttc

SEQ ID NO: 252632 - DNA, 122 bp, Homo sapiens
gacgttcaccgtgaggatcgtcaccatggacgccgagatggagttcaattgcgaggtaaccggccggcagccccgactgctgcggtgacagtcgaggtggaagctcgagaggttctctttat

SEQ ID NO: 252633 - DNA, 122 bp, Homo sapiens
acccaactgactcccagaaggtcatgaattagcgagtcttctaattcaccatcagctcttcgggagttctagaactgccctctttctgctctacaccaaataatttcacatttatttattta

SEQ ID NO: 252634 - DNA, 122 bp, Homo sapiens
cagtgattactcagccaaatgcctgcagggccagcaggtaacacccatgactgaaggtggcggggcaaatattacaacagggagaggtggaacaaatttgggctcatatgccctagataaga

SEQ ID NO: 252635 - DNA, 122 bp, Homo sapiens
gcccaatcctgtgggagagaaccacatgacggtggagccacacgtccaccagagcctaagcgttggggccccgagtgaccacacggaaccacgctgccccaggcacaggagcactcaactct

SEQ ID NO: 252636 - DNA, 122 bp, Homo sapiens
gagggcgaggaagggctggagattgttagaggacagatggggcgggactggggagaggggcgaaggcgacgcgccgaggcactcctccgccccatgagcacagacagtaactccgaaacgcg

SEQ ID NO: 252637 - DNA, 122 bp, Homo sapiens
ggccagtgagagcgcagaaaccgtggcacgggcgctcccggaactggcgattgcaaagcgcgagggctggaactcagacccagaggggcggtccctgttgcaagtcatctcccgaaagggcg

SEQ ID NO: 252638 - DNA, 122 bp, Homo sapiens
gagggtatcttctaaagacagccagaaagtttcgacagtgtttggcgacccagccaaggccggggtgacgcacactcctactgcaggggccaatttggaattccatcttttagcatttctta

SEQ ID NO: 252639 - DNA, 122 bp, Homo sapiens
ggggcgtagcccactcggtgagaaccagccctagacccccgcagccctgtccaaacccctcggctccgaggcgtccctgtttccaggctccagcctccggagccccacgcagtgccactccc

SEQ ID NO: 252640 - DNA, 122 bp, Homo sapiens
ttcaccagcttctgaagtggttttcttgactcagcactgtcaattaagatctgttcactgcggcagggttgatgttcttgaaacagtactgtcatcacttcatcaacatactcggacctctt

SEQ ID NO: 252641 - DNA, 122 bp, Homo sapiens
ggagaagagctgggggcagtgaatggctgaggctttcttggggagctgggccatcttcttcggttttacttcctgaggaattcacaggcttccaggagggctgtgggacacaacagagcaag

SEQ ID NO: 252642 - DNA, 122 bp, Homo sapiens
acctcgtgatccgcctgcctcggcctcccaaagtgctgggattacaggcgtgagccaccgcgccggaccctggtcctgtcttaatctctagcgtctggccacagctgcctccccctcctcca

SEQ ID NO: 252643 - DNA, 122 bp, Homo sapiens
tccacccccggcacaaggccgtggatcatggctaaggcgatggtaattatttattcccttcgccggaagggagtcttcagaaggaacagcgtgaagagaagagaaaaaattatctctctcgt

SEQ ID NO: 252644 - DNA, 122 bp, Homo sapiens
cgaactgcgcctcttcccgccggagtgagtatcgtccaccatcactgttcctgctaacgccgcctcagcctgggcctaacacacacaatttccttaggcccctgtcgctgcttccccgggcc

SEQ ID NO: 252645 - DNA, 122 bp, Homo sapiens
atcccggcaccgctccctccaccccgagtaaattcagacatcctttgagagtctgggagtcgctttctgcgtgttaaaatcgcttggaggctggtcgtgtgcccggtctttttgtcatttac

SEQ ID NO: 252646 - DNA, 122 bp, Homo sapiens
cctagtcatattaaaagttcctttttctccattaatcagtctgccccaaagaagcttttccgtatttcacaggatccttagaagaggccagctaactgtgatacctagcacccttatctttt

SEQ ID NO: 252647 - DNA, 122 bp, Homo sapiens
caggacgctggccgataccccccacacagtggcgcaggacgctggccaatacccaccaggcgatggtgctggacgctggccgataccccccacacagtggctcaggacgctggccgataccc

SEQ ID NO: 252648 - DNA, 122 bp, Homo sapiens
ccaagactctgtgatttcacgaattcacagcacaggcattgagacctttttatttcccagcgtccctagtgaaggaaacaccttgagtctctttctatactttgccaagtaaaatgaaaaat

SEQ ID NO: 252649 - DNA, 122 bp, Homo sapiens
ttgatatttgaccagtgtcttaaccttgtgtctaaagggctaactgggagaaagaaaaggcggtaaaattggaggagagcaattaagcaatgtcaaggagtttatacacatacagtaaactg

SEQ ID NO: 252650 - DNA, 122 bp, Homo sapiens
ggccgccgcctcctcagtgcgcggccgcttgctcaggccgggatcggctccgtctcctcccgctccgggcaccggcagctccagctccgactcccgcttcatgccccgggcggcggcgccgg

SEQ ID NO: 252651 - DNA, 122 bp, Homo sapiens
agaggggaataaagaggcatgttttatgggcttccatcaaatacagaattataacaaagacgaggctggctgatgccccgggtaaacaggagtttagcagacaacctcgaaactgctaatgc

SEQ ID NO: 252652 - DNA, 122 bp, Homo sapiens
gcatacttagttggctgtcaggacagtgcctcccaggtatgcggcaaagagatctccaaccgcttggtcatttccagccactgcgtctccttcacgccaaagggccaaaaacttgagcgtga

SEQ ID NO: 252653 - DNA, 122 bp, Homo sapiens
tcaggtgatccgcctgccttaggcctcccaaagtgctgggattacaggcgtgagccacagcggctggtgctttcaactatttatttgacatggcttcaagcttccttgccaccctagtgccg

SEQ ID NO: 252654 - DNA, 122 bp, Homo sapiens
tttataggcaagaaaactgaggtacagagagccgggaaatatgcccacgtcacactgctacgagggcactgtggctccagaagcttcatcctgaatcacaatatcataatgaagacattaga

SEQ ID NO: 252655 - DNA, 122 bp, Homo sapiens
ctaatgttcctgatctgatggatgagtttatagcagaatgacttcgaagtggtaatgcctcgactatgacaagaagaggaagtagtccaggcagcctggaaattcccaaagacctccctgat

SEQ ID NO: 252656 - DNA, 122 bp, Homo sapiens
ataacccggacgttccgtaaacccggatccggagccgaaagtggtgcccagatcccgtctcggaattcatttgttcagcatttaccttttgaacgccggtttcctgtaggaagtgtcgccta

SEQ ID NO: 252657 - DNA, 122 bp, Homo sapiens
ccattgcatcttgtccagcgtccatccatgcattcatctacccgaggataccacggcgagcgccgtgaacccaggcgtcgccctcccccagtgcacagccaggtggcatgaccctgccctcc

SEQ ID NO: 252658 - DNA, 122 bp, Homo sapiens
ccatgcacctttcagcaaggtacctaacctttacgaactctggttttctcatcccagaaacgcaggttggcgtgaggatttagtgagcgcatgcatgtagctgtggttagtaaaccgccaag

SEQ ID NO: 252659 - DNA, 122 bp, Homo sapiens
aggagggtggactccaggggttgactcctaggtcatttgtgcccatccctggaaaaattccggcaggggggtaccaaacaggaggtcgtgagcatgtggaaaagaatgcacccatccccagg

SEQ ID NO: 252660 - DNA, 122 bp, Homo sapiens
gcgccctgaccctgctgagcagcgtgtttggtgcgtgtggcctgctcctggtaggcatcgcggtcagcactgactactggctgtacatggaagaaggcacagtgctaccgcagaaccagacc

SEQ ID NO: 252661 - DNA, 122 bp, Homo sapiens
tgtagtgcttagaatacctgaacagccccctcctctctcacccccatttagcaggttatgcggaagcccagccccagaagcctcaggcagtcccctggcagagcccatctctgcaatctgga

SEQ ID NO: 252662 - DNA, 122 bp, Homo sapiens
ggcccggaggaactgggcgccgaggaggagatggaggccgggcggccgcggcccgtgctgcgctcggtgaactcgcgcgagccctcccaggtcatcttctgcaatcgcagtccgcgcgtcgt

SEQ ID NO: 252663 - DNA, 122 bp, Homo sapiens
ggtagtaggaggaagaaggattgcagcgcagcagtcctcgggacaccaccagggggtgaacgaaggagggacgggggagctgtgcaggtgccccagctccttgggttgcacagggttgaaga

SEQ ID NO: 252664 - DNA, 122 bp, Homo sapiens
caccctttctgggccatgctccagttaaaaccacatgtaaaagcacaggctgtggtggcccggcagagagatggagaagggggctggtgacctccctcccagagcccatgggcaggccacag

SEQ ID NO: 252665 - DNA, 122 bp, Homo sapiens
ggcgaagcacgggcgagctgtcgttagggcccaggaaaggcccgttgcggggcgcacaggcgggcaggggaactcgcgccccgcgccgcgcgcccggcctcctgacgccagggccggcttct

SEQ ID NO: 252666 - DNA, 122 bp, Homo sapiens
tgagagcgaactttaaagcatgtggtcaaggagcctgtcgggcagcgcctggggtttttacgtctccgaatgcccctgccctttggttgccactgtccggagcgtgtgaactgggactggcc

SEQ ID NO: 252667 - DNA, 122 bp, Homo sapiens
attcgtttttacagagaaaaacttctacagagataacaattattttgcttttcagaaggacgcatgctgtttcttagggacacggctgacttccagatatgaccatgtatttgtggcttaaa

SEQ ID NO: 252668 - DNA, 122 bp, Homo sapiens
agccaggcagcattgtgcgcaaaagagtcaggcgcttccttcgagccggaattgaaccagcgacctaaggatgtccacaaacgtttccgcagtctacagtcctccgctctaccagctgagct

SEQ ID NO: 252669 - DNA, 122 bp, Homo sapiens
gcgctcgccgcgccagcatgtcctcgaccgagagcgccggccgcacggcggacaagtcgccgcgccagcaggtagtccctgcgcgcccaggactctcacccgcccctctccacctagatgtc

SEQ ID NO: 252670 - DNA, 122 bp, Homo sapiens
ttgggactccagttgaaatattgggtgcatttgaagatgtcccagatcatcttagaccaccggccatttttctcaggacatggcagagatttgccaaggttgggagtcacccaggacctaga

SEQ ID NO: 252671 - DNA, 122 bp, Homo sapiens
aacatcgtctccagaagacatttcaccattttctttgatggtaaacaggctcacttataccgaatccaaacccaggcgagaactacggactcttgaaatggtcggtgaaaggggcgaaagca

SEQ ID NO: 252672 - DNA, 122 bp, Homo sapiens
tgcaaaacggaaactgtccccatgaaacactaacatcccattccctgctcccccagctcccggcagctggcagccaccattcatgtttctgtctctatgaatttgttgtttgtttgttttaa

SEQ ID NO: 252673 - DNA, 122 bp, Homo sapiens
gcccacctttccgggtccccatgacagcgcttctcatgctaggtcccagcatacagcaggcgctcaataaacacggacagtgcatgcctggatcctacggcactggagcctgtctttcctgg

SEQ ID NO: 252674 - DNA, 122 bp, Homo sapiens
ctgtgtccacaggtttaaaattctctcttctgagtaatagtgttcatgtgctcccattctcgaccctgttgttgaaattcaaacttaaatagcctgacttcttgttgggtaacttgccctgc

SEQ ID NO: 252675 - DNA, 122 bp, Homo sapiens
cttccaaatctggtcccttaatttccctcctcttgaaatggcttgtctcctacctacccccgtcacctgccagtctctctggttacattataggaactgcgcacgcagtggggtagcatcag

SEQ ID NO: 252676 - DNA, 122 bp, Homo sapiens
agaggtccggggaggcggggtgggggggggaaggagagaggagggggaggggcggccgggcggccttaacccttcggaccccggcccggccgcctcccggaaggggcacctgctggcctcgg

SEQ ID NO: 252677 - DNA, 122 bp, Homo sapiens
gggccgcctgctccccgttcagggcggccgccgccgccccacaaccgccggggccgtaggcgtgggacagcatcgccgccatcatgccctgggcatcgtcccctccgtacagcacccccgcc

SEQ ID NO: 252678 - DNA, 122 bp, Homo sapiens
tgactatgtcccactataggtaactctggaagggactggcagcttccagtgtggttctcccgcctgtcgattggaccttgcaggaagccccgcctcatcaactcagtcaagggctttagttg

SEQ ID NO: 252679 - DNA, 122 bp, Homo sapiens
aagtgagaggggctggggtgggtgtgtccagcccagcccccacacccaccggagagctagcgcggccctgggctcctgtcgggcgctggtcctcacctgttccggccaccctgggcctcgac

SEQ ID NO: 252680 - DNA, 122 bp, Homo sapiens
cccgacgccccgggcgggttcccacgctctgcgtcccgcgcccccgccgaccggtcgggccggttccagccccagcccgcgccccgccccacggcctaagctttgggggagacggagggggg

SEQ ID NO: 252681 - DNA, 122 bp, Homo sapiens
atcctggagctcgccataccggctcccaggcctcaccctaggctctagggtgttgggcgccgcctcttcagggacctctggcccaggctccagttccctgcggatctgatgtggaggaaaca

SEQ ID NO: 252682 - DNA, 122 bp, Homo sapiens
cggcgcgctaccaagcacctcacaccgctctcaacagtactgctcagcctcccggcccgccgatgcgcaggcgacagcagccaacttgtaagtcaccgctggtcgcagccaactggaaggca

SEQ ID NO: 252683 - DNA, 122 bp, Homo sapiens
ttaagagaagaagcctattaatatggattgcactatggagtaactgttcactgagtactccgctccactgggatgatagtttgaaaagggcttcatactcctttaagaaaatagcacatcca

SEQ ID NO: 252684 - DNA, 122 bp, Homo sapiens
gcgcctaacttaattccgatacgcgcgtcaaaatgttgtgtaggctggggcctggggaggcgttcaggagggccaaccaggaagatgacatccagcccacatttgtctctgtggctgacgct

SEQ ID NO: 252685 - DNA, 122 bp, Homo sapiens
cgtctggcagcagcggccggggctggccacctctacccagcacgccgggcagggcgcatgcgcgcttattaatattcatgagagggcgtgctcaccctgggcacgcccctccccttcacgtt

SEQ ID NO: 252686 - DNA, 122 bp, Homo sapiens
taagcatttatgaaaactcacggaatggcaaccatatgcatttcactgctgccaaaattacgtcaaaaaaacgtaaaaaatgaagttgaacttaggcaaataagttcacaatgctgaagtga

SEQ ID NO: 252687 - DNA, 122 bp, Homo sapiens
cggggagctaggggccagagtccgcggtccctccgtgcctgcctccctcccctcgtgcctcggtcttttgttgcctctactcctcggcacggcgcagcctgggctctcttccccctcccgct

SEQ ID NO: 252688 - DNA, 122 bp, Homo sapiens
agacaagttagcaatttccgccgggaagccgtgaacatcggcagccactggcgtttcctccgagtcctcggaactccggaaactctgggagcttttagcccgcccaccaggggaaagcggcc

SEQ ID NO: 252689 - DNA, 122 bp, Homo sapiens
agcagaaatggggcagttaaagcacgacagccaccaaagcacgaaaggggctctgcacatcgggcaccacgagctcaactgcgtgagccgggctctgtgaaggaggcgctaagctgtgtttg

SEQ ID NO: 252690 - DNA, 122 bp, Homo sapiens
agacagagattgtaataaataaagcacaagacaaagagataaagagaaaacagctgggcccgcgggaccactaccaccaagacacggagaccggtagtggccccgaattgccaggcgcgctg

SEQ ID NO: 252691 - DNA, 122 bp, Homo sapiens
aatcagaaccctttgtgggccaccgagcacagccctcagagtcaggtttaaaagaggcagcgcagtgtgggggaaggaggcgaggggctggtgggcagagaggtgatatctgggatctgtgg

SEQ ID NO: 252692 - DNA, 122 bp, Homo sapiens
cctcccatctcccacatcatctgacctccacaagttcacgtacacaattccccagaatcacgtaggacaactaggaaattctttttaaggatttcatgctagactgttaatagcttagtgag

SEQ ID NO: 252693 - DNA, 122 bp, Homo sapiens
tagaacacacccactttgcctggtaactgggaaccggggcagaacttgacaattgagatccggagctgctttgaattgttaatcatggctatcagcaaacagttggaagacattttagaagc

SEQ ID NO: 252694 - DNA, 122 bp, Homo sapiens
cctgcacagatgacgagctctcagtagtcctggtgcctgtgttcaggattcagacagaggcgcctacaaagtttcagacatccaagctagctgcattcccacttaaatgtgggccaagggct

SEQ ID NO: 252695 - DNA, 122 bp, Homo sapiens
tccgcccgaaatgcggccggcgaaggggtgcggtccgggcggggtcgcgcgcccccagcacgctgcctgggctctggaatctgggagaagcctccagcacgggctcccgagcgcacaaactc

SEQ ID NO: 252696 - DNA, 122 bp, Homo sapiens
ctatcagctctgtgagggtggcaagagtccaggcaaggctttcagggcgcaaccaagtcccgggctccagcacagaaaccctctggaaacacctccaggccccagcaaggcggcgcggcgcg

SEQ ID NO: 252697 - DNA, 122 bp, Homo sapiens
atgatggaggcaagtgttacaggtgggctttgtccccaggagatgcaagaacagaattcccggccccaaacccactttatcttggtctctttatgaacaagggtcgtttgttagcctctatc

SEQ ID NO: 252698 - DNA, 122 bp, Homo sapiens
cgtttcccgagagtatttctttacaagtaaaagaccgactcaaaatcacccctctcaaaacgcgtctctttggaactgcagagttagggagtaagactttctgcctgaccccacctacgtcg

SEQ ID NO: 252699 - DNA, 122 bp, Homo sapiens
agaggggcaagaggggtggtcaagccgccgccgccgcgacggcccccgcggtgcgggttgcgccagcctcctcggagctcgacgcagaaacttgttgcaacaaacaggcgaccgcgggtgcc

SEQ ID NO: 252700 - DNA, 122 bp, Homo sapiens
gtggagggggatgtctacctggtggtggagcaccccttcgagtatacccgcaaggactggcgccgcgtggccatctggcccaatgagcgctactggctgctgcggcgcagcacggagcactg

SEQ ID NO: 252701 - DNA, 122 bp, Homo sapiens
gggggtgtacactcactgcgatattgggaatgttatcatccactttccccgtgcatattgcgaacagtattacaggggctgtacagcccctgcgataggaagtaatatcattctccccctga

SEQ ID NO: 252702 - DNA, 122 bp, Homo sapiens
agagcgggcggtcagggggctgctcggccagctccaggaggttgtccagcaccacctggccgatgaggtcgtgccgcgagaagcggtcaaagtcatagacgctgaagtgcagtttgcgttgg

SEQ ID NO: 252703 - DNA, 122 bp, Homo sapiens
acttcagggaacgaaggactgtggggaggcattgggaagtggtcatgtccatgcaaggaccgtagaccacaaagggaaagtaagaaaaggctggaagaatagacccactcatgaactagctg

SEQ ID NO: 252704 - DNA, 122 bp, Homo sapiens
atccctgaattcagagtgataattttataagtgtgaaacttaattatgtagggctccccccgtctgaatagaattaattccttaaagtctagttagggtcctgctgtctgtcatgttgcctt

SEQ ID NO: 252705 - DNA, 122 bp, Homo sapiens
gttgctcgagcgccgtcacccagggccagggggcgtggcctgaatggggcgtggccagggcgggatctgcggtcgcatcccgcccccactctcagtcccagcggccgccagacccgccggag

SEQ ID NO: 252706 - DNA, 122 bp, Homo sapiens
gcaacaaagtctttctcaataagtatttccacttaacatttcctctcagggaacctgtgccgttgaagatatttacaagttgctttcagcttaaaaataaatcacctctaattcctctaagc

SEQ ID NO: 252707 - DNA, 122 bp, Homo sapiens
aaataccctagggcaccctgggaaattgggaagtaggtgtcataaatgtcttggctgtcccgagccttcctgacttatctctagcaatgatttcggagcctggcagatctgggcttgaatct

SEQ ID NO: 252708 - DNA, 122 bp, Homo sapiens
ggactgctgcgcaactgcagggtagttgggagcactacagcgccagaggagcgtcccgcccggcagggacttagcaggttgctggaatcctaacctcccgcctctttctggcatgcagagca

SEQ ID NO: 252709 - DNA, 122 bp, Homo sapiens
ggcttgaggggagaatgtgtcctttgactcttccagcttctggtgactataagcattcctcggcttgcggttacatcactccaatctccgcctccatgagcacactgcttcctccttttctg

SEQ ID NO: 252710 - DNA, 122 bp, Homo sapiens
ggatggaccatgatcctaagatgagttttaattttgtgtttacagtcatctcttgtacaacgtggagaagaaaagatatacttactactttgcttcaggtacacataagaaaacctcttttt

SEQ ID NO: 252711 - DNA, 122 bp, Homo sapiens
gttcattcctcccggttggcttgtggtcttgctgggctcaggagtgaagctgcagatcttcgcggtgggcgttacagctcataaaagcagcgtggacccaaagagtgagcagtagcaagatt

SEQ ID NO: 252712 - DNA, 122 bp, Homo sapiens
gctgtgagctcccaaggaggcaggagcttcatcagtttttctcattactaatccccattacgcaggagagtgcctggaacagagttgtttccaaatatttgctgaatccatgaatgaatgaa

SEQ ID NO: 252713 - DNA, 122 bp, Homo sapiens
agggggtctgggaatgaagtggggttcccataatgtgtgcgcgcagctcggtgcgacaggcgggggctgtgtgtaggtttggagggacctatttggggaaaagacacagggctgaaggctgc

SEQ ID NO: 252714 - DNA, 122 bp, Homo sapiens
tcgtgtatcccctggatttcaccagaacccgcctggcagccgacgtgggaaagtcaggcacggagcgcgagttccgaggcctgggagactgcctagtgaagatcagcaagtccgacggcatc

SEQ ID NO: 252715 - DNA, 122 bp, Homo sapiens
gagacagagggggagtgggggacgcgagggaggcggctgttgccggggcgactggaagcgcgcttccggtgcggaacacgtggcgtggcgcggcgcgccggaagtccccccctgtgtcgcgg

SEQ ID NO: 252716 - DNA, 122 bp, Homo sapiens
gcacccgggccagtggctgcggagggtgtactgggtcccgcagcagtgccagcccaccggcgctgcgctcaatttctcacagagccttaggtgccttcccgccgggcagggctcgggacctg

SEQ ID NO: 252717 - DNA, 122 bp, Homo sapiens
tgcccttagggacagagtggctgtccctcttccttaaagggacagactccggttcagccccgtgcgccaggtcttcggaggaatctttatgctaatgagtgtattagcagtccagatgacgg

SEQ ID NO: 252718 - DNA, 122 bp, Homo sapiens
gcactgcttcccctggccgcaggccgcccccctgcccctctgctgcgcacttcctagggtcgcctcgccaagccgttgccttggagaccgaggttagcctgaatctctgcaggggcctcgcg

SEQ ID NO: 252719 - DNA, 122 bp, Homo sapiens
ggataaaagtagaggcctgacctgcttgaacgtccgcagcagcgagcccagcatgaaggccgccatgttgtccgctacaaactacaaaccgctgaaactttattgacactgccgaatagcgc

SEQ ID NO: 252720 - DNA, 122 bp, Homo sapiens
ggaggagtgggacatcttaagccagtcgtaggtgcttaaagggccgggagaggtgggctacggaaagtcaggtgggaaatctttcatcttggccagttgctcggtagaatctatttctttcc

SEQ ID NO: 252721 - DNA, 122 bp, Homo sapiens
gctggaccggcctggccgtagagtagcccgacacgtgggatctcccgggattttcggggtcgggaccccctctcccagcggttctactgagcaaggcgggaggacgatcgtggagacgaggg

SEQ ID NO: 252722 - DNA, 122 bp, Homo sapiens
ctccatctcccgaccttgtgatccgcccgcctcggcctcccaaagtgttgggattacaggcgtgagccatcgcgcctggccccacagcatctattttagcagccaccgcaagggctgggtga

SEQ ID NO: 252723 - DNA, 122 bp, Homo sapiens
gtggcagcaccgggatgtaggtgtgctgccaggcgaaggggtagatcagcgccaccatcgcgtggcagcacttggacaggatgctgcagccggggagagaacagggagagaggccgactcag

SEQ ID NO: 252724 - DNA, 122 bp, Homo sapiens
agctaccaaggctaactaagaaggatttgtttatggaaccctggcttggaaccagaaggccggtatgctcatgtcgatgtgtctaagtcaaaggcatgaagttgaacacgtgcgcacatgag

SEQ ID NO: 252725 - DNA, 122 bp, Homo sapiens
caaatactatgttatgtgtattttagtacaatgaaatatacatatattttttaaaagatccggtttctttaagatgacaaggaaaaagggacaagggtcattacagttcagaagagacttaa

SEQ ID NO: 252726 - DNA, 122 bp, Homo sapiens
cactgcattaccgtggcttcaggatgtgggggctgctacagtgttctagtagcctgacatcgactctctcaacccaagtccagcccatttccctgttcttgcttctgacaaagtgaggccca

SEQ ID NO: 252727 - DNA, 122 bp, Homo sapiens
aatctgctttaccacttttactagtgtctagctttatcttctacagttaatacaaatatacgcacatacacatgcatatatatgcacacataataatatatacatacacacatacacgtata

SEQ ID NO: 252728 - DNA, 122 bp, Homo sapiens
agttaggtgagctttctgagcctcagttcctaacctgtgaaattggggtaacggctatgccgtctcacgggagcatctgtaaagcatgtgtcacaagtactcaatcactgccgatcctcctt

SEQ ID NO: 252729 - DNA, 122 bp, Homo sapiens
cttgtggttcggtatagcaggagtgaccatgaagcccttaaaagatgattaatggcattccgcaaaagatgccaagctctttcttctagccaagatttcagcttagtaacaggacccagtct

SEQ ID NO: 252730 - DNA, 122 bp, Homo sapiens
tttctccagccgggcgaggacaccaggttcacaagtcatggccgctctcgatctcagactcggacagtgggctggaccccggccctggcgcaggtgagggaggctctctggcgggctggggt

SEQ ID NO: 252731 - DNA, 122 bp, Homo sapiens
tggcctcgtactgctccctcatctctgccagcacacgggtcaggtccacacccggtgctgcgtccatctccacattgacctggccggccagctggctgctgaactccttcatctcctgcagg

SEQ ID NO: 252732 - DNA, 122 bp, Homo sapiens
cgcggactagcggagctaggggaaggtgccagggtggccgccgcctcagtagcacgcggacggctggaaagtcagcccccgtttccgcctcacccaggattgctccactcggggcctttccg

SEQ ID NO: 252733 - DNA, 122 bp, Homo sapiens
ataggcaaagcaaggggctgtgccatcctagctggggctgttttcaactcaccaaggaagcgagctggccccgctcccatggggtgtggggaattgtctctgggctcaaggctctctctcat

SEQ ID NO: 252734 - DNA, 122 bp, Homo sapiens
caagctgcggtggttcaccaccttgatgctgtgtgcctccttcctggggctggtgagagccggggctgcaacactcccaggccggggcgttcgagtcttgccttcgccacttgcaaactgac

SEQ ID NO: 252735 - DNA, 122 bp, Homo sapiens
gatcggatgtgggtcgcgggtggatgggcgggtcttctatgacatcatcactgttcgccgcgaagagggcgcgcgtcatcagatcaagtcgactcgctcctctccttccaggccctggtgaa

SEQ ID NO: 252736 - DNA, 122 bp, Homo sapiens
gttgtctaccagttgtctaccagttaattgtaattcttagccacaagttagctgacccaccgtctctcaaacaggtgaagttaagctcaatatttggcatatcttgatatactttgtacagt

SEQ ID NO: 252737 - DNA, 122 bp, Homo sapiens
gcgacaggttactgatggtatttgctttttatgtctgcacgcgtgccatcggggcagggccgtggggagcgttccgcacgccaccttggtaatatttcaagtctcctccggcagtcgaaaac

SEQ ID NO: 252738 - DNA, 122 bp, Homo sapiens
ataacattacttgtcgatgaaattgccatggataccttctttgcccatcagcaggcctagcgtcttggcagtcatggtgacaatgacgttgaaggtgggggctccaccgatgctcttcatac

SEQ ID NO: 252739 - DNA, 122 bp, Homo sapiens
gccccggcaccctcacctgctgctgcctgtgtgagtcctctccccaccccttctacagtccggctgagcccctccacagtcctggtaaccaagtagggatcatccctctggggctgggcttc

SEQ ID NO: 252740 - DNA, 122 bp, Homo sapiens
actgacagaataaatgaatgaataaatgaataaatgtacataaaaataaatgtcaccaaacgacagtgattctggctggaattttatttcaggtttccagtgcccataatcaggttgggaaa

SEQ ID NO: 252741 - DNA, 122 bp, Homo sapiens
tgactttatgagattctgagtttctgttcccagcacctgcctttgaaggagaccagactccggctccgcccggcccgtgccgggtggtctgcggccccgagtccgtgaccaagccctccgag

SEQ ID NO: 252742 - DNA, 122 bp, Homo sapiens
tgataaagagccatttgcagctggcacttcccctgtcccctccagtcttgaacatggatgcgatgcctggagctatggcagccatcttgcagctgtgaggctcagagagtcccagagataac

SEQ ID NO: 252743 - DNA, 122 bp, Homo sapiens
aacttaagaacaacctctgccccaccaccccccaagcacacccagagctgcaggctctagcgcatcccagccagtgtctcctgcagctcagcaggtaaagggccccggtgagggaggcagag

SEQ ID NO: 252744 - DNA, 122 bp, Homo sapiens
ccagggggtttcacggacacctcttgatccttgtgtgcctgtgaacaggcagttcctttacgtgcgtctagctggaatcttccgtccactatctcctcgcacgcatcagcggcgtcagcaga

SEQ ID NO: 252745 - DNA, 122 bp, Homo sapiens
agctgtgggccaggtagtccttgcgaccgatgttgctgacctgcttggtctgcatagcctcgagtttggggcagtcagtgatccgatgacccaggcccccgcagaaggcacagccgcgctct

SEQ ID NO: 252746 - DNA, 122 bp, Homo sapiens
ttctcggtcaccgctttcgggggacagataaacaccacagatgcccatcaaaggggcgcacgggtctggaggcgcagctcaggtttttgcgttggtcaccctgccctccgcacgtggagagg

SEQ ID NO: 252747 - DNA, 122 bp, Homo sapiens
aaagtgctgggactacaggcgtgagccaccgtgcccagcctaagatacgaaaatttagagcgctaaatgcttactttgaaaaggaaaaaagtttcaactcaataatctaagcactcacctca

SEQ ID NO: 252748 - DNA, 122 bp, Homo sapiens
ctaccatctgtgtcgttttgaaagattgtgttgtgtggcttatgtacgcctattagggatcgcaagagtgggaatgttgctgtttgaaggaaaaccttaacagggtgtgtttatggtctatg

SEQ ID NO: 252749 - DNA, 122 bp, Homo sapiens
cccagcagtgcagccagctgacaaggtctggccaatgagaggccagcggaaattcctgggcgggacttccgggaattcccataaactgggctgagtttccactctccaagatggtggcccag

SEQ ID NO: 252750 - DNA, 122 bp, Homo sapiens
ggggggcctaggtccccccacggatgaaagttcctacccagcagccactgtgcggtgccccggggaacctggcatcccttgttcacacccatggtgcatgtcctgcctgtggggggcaccca

SEQ ID NO: 252751 - DNA, 122 bp, Homo sapiens
ggtcttactttctactcacagataaatactgtctggtgatatctgcctctgtgactctctcggtctactagcttatctgtatattttccatgtttatcttttttcccagatctagttgtgtt

SEQ ID NO: 252752 - DNA, 122 bp, Homo sapiens
agcccgcgggccgggagagaggagctcagcccagcccggagggcccagccatgccctccccgtgaccctgtccccactcctggccacagagactgggacagcggcacagggtccccacgaca

SEQ ID NO: 252753 - DNA, 122 bp, Homo sapiens
gtttcgggttcccgcctgggtcacgtgtacggaggctgccagtgcgcactcagcccggcccgccggtcgccacagcaacaccaatcccgggttcaagcccgcctaggaagtgcggtccccgc

SEQ ID NO: 252754 - DNA, 122 bp, Homo sapiens
tcatcaggtgagctgtgggccactgtaactggaaacaccaaaaaatcatcatagaaatgtcgaaaattgttgaggatcctgaaacaaggaagtaaccaactccagagccaatgtgtagggca

SEQ ID NO: 252755 - DNA, 122 bp, Homo sapiens
ctctgtcaaggggagtcactgggacggtgtaggatcagccttcagagcctgctgcctgaccgtagaggaggaacctgcacacaccctgctgttttagttcacgagcagctatcaaagcctgt

SEQ ID NO: 252756 - DNA, 122 bp, Homo sapiens
acctaatattaatatagggacgtttatgtgccccttaaaaggaaatgaggcagtgtggcgcgttctggccgatgagcgccaaggtactttgtcgaatgaaaaagcagagtgcccaacagaat

SEQ ID NO: 252757 - DNA, 122 bp, Homo sapiens
tggaagccctgatcccccagagagctacaggtctgctcccgacgggcctcgggcctgacccgtccacacagggccgtgtcaacagcagcgactcaagggacgtgtgtacatatgtaaatgag

SEQ ID NO: 252758 - DNA, 122 bp, Homo sapiens
gcgcaaaattccactcaagaacctggtgggaggggcgggggaaggaaattcagaaaaaaacgagaacctggcaccaccacacgcaagctttccgctcggccgctgccgccaacgccgccgcc

SEQ ID NO: 252759 - DNA, 122 bp, Homo sapiens
ccctcgaggctcgatgcctgtgccaaggccaggggcagccagagggcagctggatggccacgtgcaggggtcaaggctgggccctgcagtggggcgggccgccagccccagcagtttacaga

SEQ ID NO: 252760 - DNA, 122 bp, Homo sapiens
agctgaaggagtcagtaggatctcaatgtggactccctgggattagcattaggctctctccgcctaggggcaggcaggggtgcctttttctagtacatacagagactggtactggtagtggt

SEQ ID NO: 252761 - DNA, 122 bp, Homo sapiens
ccaattaatgccgtgatcattttgctaattccctcagctaactgattctggaaccttttccggttgggcactgggtctcggagctgggagggaacctggagacccttttcaatgtcctcatt

SEQ ID NO: 252762 - DNA, 122 bp, Homo sapiens
caagacgagcaggttgctgatggtatggcggggacctgtggtggaaccaggaacaaaatacgcttagaagagcacgttgccaatcgcgtggccggaacctgcggcggaaccaggaacaaaat

SEQ ID NO: 252763 - DNA, 122 bp, Homo sapiens
ctagaaaggcgtctgggcaggggaaagtcgatgcgagggcgggccagggacctttcgtcgcgtccccaccttggcatttcccgtggcgtgagcggccccggcatccgtgtcgaaagtgcggc

SEQ ID NO: 252764 - DNA, 122 bp, Homo sapiens
ctccgccaggggcgttacggagacaaggccccaggaccaatcgtattggccagtggggggcggggcctcgttgccagctccagaccggcgctatgggcactccttttgtcaaatgagagacg

SEQ ID NO: 252765 - DNA, 122 bp, Homo sapiens
ctgggaggcgttgctctccgggttcgcttctctcctgttgtcctaactctgcatctctcccgggtgaatcacagagctgtaaactaaaaatcaaattctaagctcccagccaactgaatgga

SEQ ID NO: 252766 - DNA, 122 bp, Homo sapiens
ggcggcagtggtgggggcggctcgcaaggcaccctggcgtgcagcgccagtgaccagatgcgtcgttaccgcaccgccttcacccgagagcagattgcgcggctggagaaggaattctaccg

SEQ ID NO: 252767 - DNA, 122 bp, Homo sapiens
gaacaactgttcgagcccgcttgtccactcattactctggaatccgagtcccagcaggggcgcgggaaaccgctgctctgagaaaaggtacctcccccagaaagactgcgcgggaagtcccg

SEQ ID NO: 252768 - DNA, 122 bp, Homo sapiens
caaggtgctggacatcttccctttgccttactgacactctctccactctgttttgtgccccgggaggctgactgtgcagactgtatcactcaatcttctcaacaaccctgttcaggtggtgc

SEQ ID NO: 252769 - DNA, 122 bp, Homo sapiens
ctgggtgggggttgggcgcctgggccggtcgcagttgtctgggggccctggggctctctgcgtcgagagcgctcgaagacccgggattcctggcccgatcgcgggcggggggagaccccagc

SEQ ID NO: 252770 - DNA, 122 bp, Homo sapiens
tgggacgggggcggaggcaagccacccgggactggggccactatagattccagaaaggggcggttgggtcgagggcgctggcggcgagaaccgggacagctgcggggaggggaggagtgtga

SEQ ID NO: 252771 - DNA, 122 bp, Homo sapiens
ctccgcagggggcccgaacatctcagggaagcaccttcatggggcccctggggaccctcccgatcgccctcaggttttccacccgccaaaacaggcacatgtgactaggacaccctgaatgt

SEQ ID NO: 252772 - DNA, 122 bp, Homo sapiens
aagtttgtgtcattcagtgccatgggggttcttcagtttcaggagatgtcccccaccccccggcagggtgctaaccatggagggcaaccactgatgcctccagcagcttctggacagaagat

SEQ ID NO: 252773 - DNA, 122 bp, Homo sapiens
cacgtgggcgcgcggcgccgcggccattggcccgaggcacgtgtccaggagaccggcctgcgacgtcactcgagggggctctgttaaaaataagaacaaaaatccagagtgaaagtgtctca

SEQ ID NO: 252774 - DNA, 122 bp, Homo sapiens
tgtgctcggtgttcaggaacacgggcaggtagtcttctaggcccaccaccgagactgtgacggtgcccagcgtggacagcggtattggggtgcccaggtcagaggcacggaccgtgagctcc

SEQ ID NO: 252775 - DNA, 122 bp, Homo sapiens
ggggacctagagagggacagaagtggctgcagggacaagctctaccatcagggggagtgccgagtgagtggccccggtccaaaagtgcagataaagaaaggatggggtggagcgtttagggg

SEQ ID NO: 252776 - DNA, 122 bp, Homo sapiens
gcatccgtcaagtttaaaggctgaggactgccacacagagatgctgcagtgaatgtgcaccgtggagtcactcggatcacgcgtcgaggaaagcactaaggtaacacccagcatgacgcgtg

SEQ ID NO: 252777 - DNA, 122 bp, Homo sapiens
cacctcctagtcactgagacagcaacgccagaggtactgggaaaaagcctgaactgtaatcgttcggtagttttcaagttctgccaaacaatacaaactattaataagcagataatctacaa

SEQ ID NO: 252778 - DNA, 122 bp, Homo sapiens
caaaagaacaaaaaaaaaaaaacacaaaaaaactcagtcagcttcttaaccaattgcttccgtgtcatccagggccccattctgtgcagattgagtgtgggcaccacacaggtggttgctgc

SEQ ID NO: 252779 - DNA, 122 bp, Homo sapiens
ggtgggtctcggcagttgccccgcccactcacaagcccctcttcctcccgcccacagactcgcacctccccagtggaagtggtttcctggctcgctgtccccaacccactcactggcctttc

SEQ ID NO: 252780 - DNA, 122 bp, Homo sapiens
catcgacgtgatcaccatgcagacgctggtgctgctggtggacctgcaccccaggtgagccgagcgcagctaaggctctgggaacagccgcgcgggatctcggcgggagtgggaggtcccta

SEQ ID NO: 252781 - DNA, 122 bp, Homo sapiens
ggctgaggtgtgctcatcagcgctttttttttttgatgcttgggtgttcatgatccagctcgcagtccccaggctgaatctgtaagaatggtttgcttctatttgtcatttgtgattgccca

SEQ ID NO: 252782 - DNA, 122 bp, Homo sapiens
cggccccgcatggccaggcctgcccccggcctgcccgtctctcgggccccccacccaccgcgggacatcctaggtgtggacatctcttgggcactgagcgcccaggtggggtgggccagggt

SEQ ID NO: 252783 - DNA, 122 bp, Homo sapiens
ctgatttgatctttacacattatatgaatgtatcaaaatattacaggtacccccaaaatacgtacatctactatacatcaattgttttaaagttaatgaaattgcccagagaatacaataaa

SEQ ID NO: 252784 - DNA, 122 bp, Homo sapiens
ctcaggtgatccgcccgccttggcctcccaaagggctgggattacaggcgtgagccaccacgcctggccgaatacgttcttttaaatggtccatctctttggattagtaaaatgggtggagt

SEQ ID NO: 252785 - DNA, 122 bp, Homo sapiens
acgcgaggcaaactcctaaaattgctgctctgagtagcgatccgggctgcttgatgagaacggtaatgctaaggtgtgctttgggctgtttaattctatacgatttaatttaaggaaagttt

SEQ ID NO: 252786 - DNA, 122 bp, Homo sapiens
aactaggaatggcgcgatggcgccgcgggcgggagaccgctgacttccagccaatcgctgcgcggagagcaagttgactctctgctgattgggtcccagtgagtcagcgcctccacccacag

SEQ ID NO: 252787 - DNA, 122 bp, Homo sapiens
cgagatcagccgcaagatccgggtgaggcccgtgccggtcgggggtgggaagccaggtctcggcgagcgggcggttgtcaggagtaacggggactgtgggcccgggtggacgccgcggcctg

SEQ ID NO: 252788 - DNA, 122 bp, Homo sapiens
gaggatcaagctgtcttgccctgccaggcagtgggtgtccagccttgcaagttcctgcctcgcaggtgtgggagggtttactttgtggtcataggttggggaggacacttctaggagtggcg

SEQ ID NO: 252789 - DNA, 122 bp, Homo sapiens
gccccccgggcccgctgcggctggtcccctaggcctggggtggggggaggcgggggtccccggagagggccccggcctcccggcagcactaacttctcagccagcagctcctctattctcct

SEQ ID NO: 252790 - DNA, 122 bp, Homo sapiens
ggagcccacctgtgagcaaggccaaatgatgtcttcccaataaatgggaggcctcagcggcgagccgaggactgagctagtggaggaggtgaaatcaggaaggcttcttgtaagaggcagca

SEQ ID NO: 252791 - DNA, 122 bp, Homo sapiens
cccaacccccgctccgggccgcgggcgccgccgctacccccacccctcctcctcggccggcggccgtgaccctggcaagcgtctgcccaaagcccagccgcctgcagcccgacccctggcgg

SEQ ID NO: 252792 - DNA, 122 bp, Homo sapiens
ccccacgtagcgggcgttgctcacattgctcactgggctggtgctcagggagctggtctgcgtggtgttgctggcccccgaggtctgcgccgagctgttgtagttggaaaggttgccccagg

SEQ ID NO: 252793 - DNA, 122 bp, Homo sapiens
ccgttcggctatgttcagggaccatatggtttggggacagccccagtagttagtaggggacgggtgcgttcgcccagtccccggatgcgtagggaggcccagtggcaggcagctgtcccaag

SEQ ID NO: 252794 - DNA, 122 bp, Homo sapiens
tcccagcattttgtgttgtctcgccattcttctctacctgcctcaacgtccctctgagtccgtgcagcccgcccacgccaccccacgtcctcaattttgcttctgtaagccttttgggagag

SEQ ID NO: 252795 - DNA, 122 bp, Homo sapiens
gcaggcgccgacggtaagaggttcgcctggcctcactcagcggggctcctgagcgcaggacgcccactccttggtgcgctgggcccgtcggcagagtcggggagcccatcaggggctgcccg

SEQ ID NO: 252796 - DNA, 122 bp, Homo sapiens
tgccaagaacatgatggctgcctgcgacccccgccatggccgctacctgacggttgccgccgtgttcaggggccgcatgtccatgaaggaggtggatgagcaaatgcttaatgtccaaaaca

SEQ ID NO: 252797 - DNA, 122 bp, Homo sapiens
gcggcccaagaacgcagcgtgcaagaatccagcgttaatgcgcagggtgatcccggagggcggctacacactctggctggtgttcaccatgaataagctctggctggtgttcaccatgaata

SEQ ID NO: 252798 - DNA, 122 bp, Homo sapiens
caccgtgctaagccctttccattcatcatctcaatccccacaacagcctggttagatagacgttcttatccccattgtacagaggaggaaactgaagcttagagagcttaagagacgggctc

SEQ ID NO: 252799 - DNA, 122 bp, Homo sapiens
tttgggtactaacagccacactgctgagcatgtgaaatcaggacccaggctgcacaccgccgtcggggtgagacgcccgtggccttgcatgatgaaactgggacccaggcctcactgctgtc

SEQ ID NO: 252800 - DNA, 122 bp, Homo sapiens
tgccagctgaccgcgggagataatgccttgtgcgcacgcgcttgctcagaaggcgccgttcgccggctacctgttggtgtgtatgcagagcatccctgtgccccgcggatatagactggcgc

SEQ ID NO: 252801 - DNA, 122 bp, Homo sapiens
tggggtccaaggcactgctactctcccggccgcccgcaaacaactgaatctgccacgccgcgccctggccaaggacttttcaaatctcccgccccggccccattgggcaagctcgtcgccca

SEQ ID NO: 252802 - DNA, 122 bp, Homo sapiens
aggcaggcgtgacagtgttcggcagaggacaatctgttcgagaataattagattccccctcgcttcttgcgttggtggcggaagcacccggagtatttacaatacaccattttgcttccatc

SEQ ID NO: 252803 - DNA, 122 bp, Homo sapiens
tacccgatgaacgcagccgcgctggccactcgcctggcctctgatgttcttgccagggaccgggtgcaccccctggaggactaggtagctccagaagtggtctgagctgttctctgctgtgg

SEQ ID NO: 252804 - DNA, 122 bp, Homo sapiens
cgggcgcgcccccagattccgggctcctcaccgcctcctacgcgccgccactgccgctaccgccgccatcttgtgcagagtttgctccttgaccccaaacctcccgccccatcgcgcgcgct

SEQ ID NO: 252805 - DNA, 122 bp, Homo sapiens
ctcgggccggatcgcccggcggggaagatgcgcctcaagaaccaggtagaagcgcctcggcgcaggccccgcacccccgactctgcccgccctctgttacggacacccgctgggccacgtgg

SEQ ID NO: 252806 - DNA, 122 bp, Homo sapiens
gctgggggcgggggcgcgggggtgggggtgattggcgccgaggtgaggaggacgcagggacgtggacacctactgatgattggctgcaaattacacggggaacaagaggcgcacgcgggcca

SEQ ID NO: 252807 - DNA, 122 bp, Homo sapiens
tatgggacgtgcttatcctgaagtcagtcctcattctgtctggcggctctctgccagagacgcacgaagtgagaaagagcggccacaagagggcacccgcgagtcagcccagctgcgagcct

SEQ ID NO: 252808 - DNA, 122 bp, Homo sapiens
catgcgtggttgcgatcatggctggcggtaacttcgcgtttctgttacccatttttaaaacgcatcttcaggtgttccttccttctcatggaaggaacattaattaaattcagagggactgg

SEQ ID NO: 252809 - DNA, 122 bp, Homo sapiens
aaaaaacaaacaaacaaacaaaaaacaaacaacaaacctgatcacctactgagtagctcccgactgcactctcagctattttctatcctactaccttatccttttccttgatttctttgcta

SEQ ID NO: 252810 - DNA, 122 bp, Homo sapiens
tccgcagcccacagctaagtcactctgaagagcatctcgctggcctgcgcttctgcttcccgttgccttctaggcggttctgaccgtgacatccctttgctcctccgcttgtgcccttgaat

SEQ ID NO: 252811 - DNA, 122 bp, Homo sapiens
cctcaagggctcagatctactgactatcccgacttactgcgctgagcgggtggtttacagcgagctctgtgtggtatttcagtccctactttaacttagtcctagagtttttggtgaaaatc

SEQ ID NO: 252812 - DNA, 122 bp, Homo sapiens
ctgagtgctgggtggtcccgcggaaagtgcctggggctctgcagggctctcaagagaccgcgtgcggcctgggggcctggctctgggggctgccatccgggatcagaaaatgtcccagagga

SEQ ID NO: 252813 - DNA, 122 bp, Homo sapiens
gttcaagcgattctcctgcctcagcttctccagtagctgggagtacaggcgcccctgctacgtatcaactttgatttctcagcagtttagagcaggtgaacatgatgggtagaaggaatgac

SEQ ID NO: 252814 - DNA, 122 bp, Homo sapiens
gctgagacccgctgcaccagaacccaggagaggggggagacggcagagactccgcgggcgcggggcgatcccagctgggctctctccacagggatgccgatccctctggagacacagagccg

SEQ ID NO: 252815 - DNA, 122 bp, Homo sapiens
gcacgtgaaatccgtacgctcctagagtcttactacctaatgcatttctgcaatctgggacgcctgtccttagcgtcttcaatagttttgggcacgaggtggaccgcggaagtattgtattg

SEQ ID NO: 252816 - DNA, 122 bp, Homo sapiens
ccttgtttttctaaacatctgtcccatctgtcccaggcctcagctcaccctttcgtggctcgagccagttaaacgtgaatttgacaaggaagcacttctgaaggctggtttgtgagtggaaa

SEQ ID NO: 252817 - DNA, 122 bp, Homo sapiens
gggagcggagggaatgaaggtcagggaggcggcggggaccccctgagctggcacaggccccgggaacgtctgtggaacaggggacgggatggggcgtgggggaaggaggtgcgggctgcagg

SEQ ID NO: 252818 - DNA, 122 bp, Homo sapiens
tcctgcctgggatctcgtctgatggctgggccatcatttatttaatgagttccttcctgacggccgtggaggtcacccgcaatcttttgctaaagcaaacaaggctgccaccaggatccctg

SEQ ID NO: 252819 - DNA, 122 bp, Homo sapiens
aaggctttgtatttcttcttattcacagagactctagtggttcaaccactaaaacattcccgctttggattcaagagcaaacttgaattacagaaactcaagtctgaggaatggtggacctt

SEQ ID NO: 252820 - DNA, 122 bp, Homo sapiens
gtggctctccacccagactcagacacagctctctgctagggaagaaagtgagggctggcccggcaggacaagcccacatccagcagagactggtgtgatcccacagcttcgcctgttcccgg

SEQ ID NO: 252821 - DNA, 122 bp, Homo sapiens
ctgctgaggatctgccacaacagagtgaggaggcacaacgaaaggaagcagcatcaactccgtgaacaccactttacgttttaaggacaagcagggcctcccacgatgggcaactctcagga

SEQ ID NO: 252822 - DNA, 122 bp, Homo sapiens
gcctgcaacagaggaagaaacttttgcggggtgcgccgcgcttttgcggggggcacctcccgcggcccgcttccccgcgcccggagcccgtcggcggggagtggggggaggcagcatggccc

SEQ ID NO: 252823 - DNA, 122 bp, Homo sapiens
gaatgtcagattattgtccagaaagttggcaacattagtattcgccattcccccacccatcgtgtaagagactcctataccagacggagcccaggctgggaatcaccattccttttaacttt

SEQ ID NO: 252824 - DNA, 122 bp, Homo sapiens
aattcaatatgtagacattttttttgaaaagggaagaaataagcaggtggaccaatccaacgattgaatttcctttaaaaaagtaactgtaactgtaataggtttgttgcctaattcatggc

SEQ ID NO: 252825 - DNA, 122 bp, Homo sapiens
gcccctcccgaggctctggggccgcagtgggctcgggggtgggagacgaggtccaagcgccggcgagacccctgccagcccgggacctgggctcggaggctcccttccggatttccaaaatc

SEQ ID NO: 252826 - DNA, 122 bp, Homo sapiens
atgcaataccatcctgtcatctcaaactagggactcatgattggactccacagttgttaacgggcttgatcttggactcccagccctgggtaactttgagcaaagttccttcatcttgctaa

SEQ ID NO: 252827 - DNA, 122 bp, Homo sapiens
tccgccgctccctcatccagcgaagcctccttcccagcttccccggcggcggcgccgtgacgtcacttccgttctccagcgcgcacgtgggaggaagtgctggtgccctctgccgctgctcc

SEQ ID NO: 252828 - DNA, 122 bp, Homo sapiens
gattggtgagtcttgacatcagtttattattggcacctagggattctcctgtatcctctacgtgactccctccaacatttcaaaagacagtattctgaaatgtcttggagaataaaccaaat

SEQ ID NO: 252829 - DNA, 122 bp, Homo sapiens
aaacaaaacaagaaaagcagcagtgattatagagaggtcacactctaagtggggtcgcggcgtggccacgcttcacggtcacgctcgtccgtcctgcagtggcgtgtttacatggtcacacg

SEQ ID NO: 252830 - DNA, 122 bp, Homo sapiens
cctcgctttcgcggctgggcgcctcgcgcctgtcccgcccgactcgtgcctcttctgagccgcagccccagccccagccccaatctcaatctctccggccggcagaggttggaagacaggaa

SEQ ID NO: 252831 - DNA, 122 bp, Homo sapiens
ctccttccccatgcagctccctctgaatgatgatcagtgaggccctgcaagacagcctcccgaggccgagccaccgagctacaggacgaagatgatctttctgggctcctgatgtccagacc

SEQ ID NO: 252832 - DNA, 122 bp, Homo sapiens
cccacggcctcgctcgcgcccacagacccactcacaattccttgatcagcaccatcttcccggaaccccctcacagctgccgccgataccaccgccgccgccgccgctaccgcctctcacag

SEQ ID NO: 252833 - DNA, 122 bp, Homo sapiens
ttcaaagaaatgtaagaaaataataagccctttatctagctattggaattttggaacttccgaggcaactgtgaatctcaagttagccagagaaaagggggcacagagtctttaagcaagag

SEQ ID NO: 252834 - DNA, 122 bp, Homo sapiens
accgtcacagacgaaagggagctgcccaaaggcggggtgctgagaggtcggcacccagcccggctccttcgcctccgcaccagctcctggcgaccgagactttcgtcagtggaaggaaggaa

SEQ ID NO: 252835 - DNA, 122 bp, Homo sapiens
cctgagaatccccaggagttggccacgatcccatggggggtttccttctacccagccccgcgtcctggcctcgtccttaacccccgggttgccttcactcaggctgggaatccacgattgat

SEQ ID NO: 252836 - DNA, 122 bp, Homo sapiens
ttctctctcctctcctcagtcccatgggcaatgggaacatcgtgctgtggtgtgtgcacccggccaggaacgtcaaacagtggataaatagccccttctcctacagtcttttcacaaagagc

SEQ ID NO: 252837 - DNA, 122 bp, Homo sapiens
gatgtgcatcctctccggcagcatgatttttccaggaccagaatgtgacaggagcggccccgcaatagaattgcaggctcacaggccggctgcagcacttggctgtattgcgaggctccttt

SEQ ID NO: 252838 - DNA, 122 bp, Homo sapiens
cacacgccccaagagtttattaagctcctcgtcattgcggatggccaattgcaggtggcgcgggatgatgcgggtcttcttgttgtcgcgggccgcattgcccgccagctccaggatctcgg

SEQ ID NO: 252839 - DNA, 122 bp, Homo sapiens
gacaaggaacccgggttagtcctggaagtaggccactgggaagaccctggcagcaccactcgtgaggctgggtgacctgggccagtgactgggggaacaggaggaaggcagaaggaggccag

SEQ ID NO: 252840 - DNA, 122 bp, Homo sapiens
cagagaagccgacagataaaggaggagagaaggaagccggctctgggaatgggaggagcacggggaaacataggagcctttattggccgagcataaaagaagcaacaggagtcgcagctgag

SEQ ID NO: 252841 - DNA, 122 bp, Homo sapiens
aagtggaggctccaaccagtccagaagttcctttctatggggaagctgtggcagcaaggccgtgaagagagtctgacttaattgcaagtaagtcacaagtttattcccctacagcccatcaa

SEQ ID NO: 252842 - DNA, 122 bp, Homo sapiens
cactagtttgtaattactagctggttggcacagtcctgttccctttcttaaacttggattcgattgaaaatttaaccttgagttgcttcagcttccatttcaaaaggggagttggagtcaag

SEQ ID NO: 252843 - DNA, 122 bp, Homo sapiens
cccagctaggtcatgcctcacccacccgtccaccctgctgctctcccttcccggctctctcgggatggctttctgctcaaggacgctcccgcagatcccagagcatcctctgcgccacgcgt

SEQ ID NO: 252844 - DNA, 122 bp, Homo sapiens
caccagaaagggtggaataagaaagctcagctgggaggacaagaaagagactcaagagatcgtttatgactgtttctgagaaagctcctggcatggccatgagtggccttccgggagtcctg

SEQ ID NO: 252845 - DNA, 122 bp, Homo sapiens
gcagggcgggcaggaggccaactgctgggatccctgggtcaatcaagctgcttctctcctcgggggcgatggctcatccctgtaatccccacgcaggtggatcgcctgaggtcgagagtttg

SEQ ID NO: 252846 - DNA, 122 bp, Homo sapiens
gcctctgtccggcggcagtctgcttccatcccgagtcagcctccgtctccttgagggccccggccactgtcagccctggagtctgaaaacaaaacgtgtccatcccggagtccctccgtcac

SEQ ID NO: 252847 - DNA, 122 bp, Homo sapiens
ggcagatttagggtgtgatcgccagatcctatcccaagtccgccttcctgacggggaggacgtctgaacccgcctgccacggaaacggcccgttcggtagccttatttggccaacaaggcta

SEQ ID NO: 252848 - DNA, 122 bp, Homo sapiens
ggccagaggaggacactctggcggcagaggcgctggcgcagccgcacgtagcgggagcggcggccgtcagggctcaggatcaccagcaccacgacgtccttgcggtcctccagcaggcgctg

SEQ ID NO: 252849 - DNA, 122 bp, Homo sapiens
accgatggggcaggctcggggcagctttgagacaggcagcgccaaggtcgcccagattcccgacaagctccgcgcgggggcttcctcggctccttgctgttgccgccgccgcagctgctgcc

SEQ ID NO: 252850 - DNA, 122 bp, Homo sapiens
ggacatctatgttatatggtgtgtgcagcccacataggcctggtttcccacttaactaaacgctttgtatcaagaatggacttgtttgggaagggaatattttgtaagatgatgcctagtat

SEQ ID NO: 252851 - DNA, 122 bp, Homo sapiens
gcgggcggccagcggcccccgggccatgctctgaggaggttggagcaaagcccggcggcgcggctttatggggccccgcccaccacaggacacacccaccacatgacacgcccacagaacgc

SEQ ID NO: 252852 - DNA, 122 bp, Homo sapiens
atttacactgtatggggacaaaacaacctaatgtatgtcccagacctattttatagaagccgagaggcagcctctgagtctccggttcccagaactctagccctgggagaaagcatatccat

SEQ ID NO: 252853 - DNA, 122 bp, Homo sapiens
cagattctcctccttctcaaaacagacattcctgactgggtcctagggcagggagaggggcgttggacccctactgccctctgggttctccgagcaccaggacttgttgctccggcgggaac

SEQ ID NO: 252854 - DNA, 122 bp, Homo sapiens
acacacacacacacacacacacacacgaaggatgtatcaaagttgttagcccaccaaaaacgtaatgcatgttaattacaatactttaaaatatattctagccattgaagagttaaagaatt

SEQ ID NO: 252855 - DNA, 122 bp, Homo sapiens
gaaatagagaatatttgaagcaaaaggttcacttcacctctttatttctaagcctttacccgcccccccccgcccccacccctcttgggcattctcagagggagcagtgcctctccaacggc

SEQ ID NO: 252856 - DNA, 122 bp, Homo sapiens
aatgggtgcattatatatgggtgttccataatttaattctgctgttagtggacatttaggcgatttctcattattgcaacactagcaaggctgtggtagatataatgtatctgtatcactga

SEQ ID NO: 252857 - DNA, 122 bp, Homo sapiens
ggaggcaaagcttgcagtgagcagagattgtgccactgcactctggcctgggcaacagagcgagactcggtctcaaaaaaaagaaaaagagggttacagatcattgcacatggaaaatattc

SEQ ID NO: 252858 - DNA, 122 bp, Homo sapiens
aggtgggtggatcacttgaggccaggagttggagaccagcctggccaacatggtgaaacccggtctctactaataatacacaaaaattagccggggatggtggcaagtgcctataatcctag

SEQ ID NO: 252859 - DNA, 122 bp, Homo sapiens
ctccccctccaagcccttgccttttgcccacctcctcggctgctttgtggacattcacatcgtcttaaccttgaactgcctacaccccaagcggtgatttctcccaatggccctccagaaag

SEQ ID NO: 252860 - DNA, 122 bp, Homo sapiens
gggaagaggctgtggctttggtcagttcctcaggctgtgcctgactctgcttccttctcccggcctgcctcaccagcagccagcagcccatccgttcctcctagcctcctcccctgcctcct

SEQ ID NO: 252861 - DNA, 122 bp, Homo sapiens
tgcagcctcagtgcctagttctgctccgagagccaaacaagggatctgtctcccaagactcgccaaacaccccccacttagggacccacaaggacactcgatcacactgacttggtatcatc

SEQ ID NO: 252862 - DNA, 122 bp, Homo sapiens
ctggtctcccaatcactgtggaagtggaggaaccaccacactatgactccaagaggaaggcgaaaggcattcaggggccacacaagaacaaaccaaccacaaaatgggcaacaaacttcagc

SEQ ID NO: 252863 - DNA, 122 bp, Homo sapiens
gggcggggtgcccaggacacaggcatgcactgggactacagcccttccatctaaaggacacgcctgctcgcgggaaggtggcctcgggtgaactcacttcccgaaccctctgtcacgtggct

SEQ ID NO: 252864 - DNA, 122 bp, Homo sapiens
ccaggccccgagcgctctggcccgggggcagatactttcggtttgcagctctcagggcagcgctgccctgggacgcccagtgggttttcacggctcccctgggtctgggatcagggcagctc

SEQ ID NO: 252865 - DNA, 122 bp, Homo sapiens
ctctgggggaaaattgcaattgaggttttggatatattgaataggtaagtaagtcacctccgtaaaacttagtgattggagctgtcaccattgcaaatttctaaactttgcaagacagcagc

SEQ ID NO: 252866 - DNA, 122 bp, Homo sapiens
ataccatagaaacactgggaagatccttaaaaggccagttatgctaacctcttcatttcacgggtggggaaaccgagatccagagagtaagtagtgagtcggtgacaaggccaaggcccaaa

SEQ ID NO: 252867 - DNA, 122 bp, Homo sapiens
cctaagtgccagatagcgggtgtacagtgacttcattaggcatacgcagctttcctggcacgtacacggggagaactggaggagaagagctgggagcagccagccctcccagtcctggattt

SEQ ID NO: 252868 - DNA, 122 bp, Homo sapiens
tctgtgggcggcggcgatgcagaggctgccagggcggagagacggagaagctgcgctgaccgagggaacaaaccccgcagacacacagcgccttcgtcacatgaccccggccccggcagtca

SEQ ID NO: 252869 - DNA, 122 bp, Homo sapiens
ccaggggtcttgaacacatcaagagaggcaatggcctatttggaagtctccgactgggcccgggcccctccgctgtccacccccagtccgtctgccaccgtgtgctgtgctcaccgtcccgg

SEQ ID NO: 252870 - DNA, 122 bp, Homo sapiens
ccgtaggttcaaagagaaaatcaatctactggtcagctgttgaggtttttactaagcacccgttatagaggaagcaaaaggagaaagtggtccctgagttcaggggttgacagcctaggatg

SEQ ID NO: 252871 - DNA, 122 bp, Homo sapiens
caagcatgcttcccagggtgctaccaggatccaccgccatggtcacggctccttcttgctcgttccaggaaataatcctgggagaataaggtggcccttgactcatttggtttgggaaagct

SEQ ID NO: 252872 - DNA, 122 bp, Homo sapiens
ctcttgttaccagttctctccgggcttgtggaaagagttccccaacccgggatatatacccgagaggaggttaggacacaggtgtcctattcccttgcatcctccatcttctcctactctgt

SEQ ID NO: 252873 - DNA, 122 bp, Homo sapiens
gctcggctgctcctggggtccctgctgaccccttcggggccagcgctccatttcctttctcgtgggaacttttcagtgcatttcagagaagtcgtgatggattaaacaccatttgcttcgcg

SEQ ID NO: 252874 - DNA, 122 bp, Homo sapiens
catccccaaagaggacacccctccttccgcccggcccgctccccacccccgccgcggcaccgcctccccagccgcccgcccttgcccagcgcctcccaggcagccagcgagcgaagggagcg

SEQ ID NO: 252875 - DNA, 122 bp, Homo sapiens
taatcctttttccacaaattagaacttgctttatcctcagagcatagtttgatatgcgtgcgtacatacttacgatttgtttcacaaagtgttcattagactggtattgcagtgcaggacgt

SEQ ID NO: 252876 - DNA, 122 bp, Homo sapiens
ccaccactcccctcccgccaaaggccaaaggaggtcccacctgctcccaggagccgggctcgccgtttctgctttctgcagccctgctttacccgggctcggttacataagaacgtgtgtgt

SEQ ID NO: 252877 - DNA, 122 bp, Homo sapiens
gcggctggtgcgttgccgggggctgcgattggtccgcccaggcggagcgctggggtttgccgggcggtgcggcgaggaggggaggggtccgcgcgggggcggagccgccggggattggccgg

SEQ ID NO: 252878 - DNA, 122 bp, Homo sapiens
agttactgggagtaaccctgttcattttatctcttgtgccaggaggcccaggcaggaatacgcctggcagccctgggggagggggtgggatggggaagacctgccaactagagaagcctaga

SEQ ID NO: 252879 - DNA, 122 bp, Homo sapiens
cctagtcccacagattgcccgatccccagcatgtcagtgtcggtggggatggggaggaggcggctaacaggaagttttgaggagggggtaggcatgctgccccttcaagactggcgcggtac

SEQ ID NO: 252880 - DNA, 122 bp, Homo sapiens
gtggggagcttcctctctcctctaaacagtccatttctgattgttccaaactcagagactcggtgactacaacaaggaaattgaacagcagttattttgcttaaataaatattacataacga

SEQ ID NO: 252881 - DNA, 122 bp, Homo sapiens
ttcagtgccgaccccacccactgtgggcggggctccggggtcctcagagagtggcttctccgtctctcccgggcctcggtttccccctccctcctagtgggtcacaggctgtggagcttttg

SEQ ID NO: 252882 - DNA, 122 bp, Homo sapiens
acaaaggagacagcaaactttatactgcccgggaacgaggctgaaggacccggatggaaacggagcttagaatttgaaacgcaaagggaggggggaagtagttcccagtctccccattggct

SEQ ID NO: 252883 - DNA, 122 bp, Homo sapiens
tgacccattaataaataaataagcaaacaaatcaaatcactgacaagtgaatgctctggccgggtatgtgtggtgtaaatgtagcatttcacaatttgcaaagcatttgtgcttcaattaaa

SEQ ID NO: 252884 - DNA, 122 bp, Homo sapiens
cgcacaggcagatttatgtgggctgatacgagacaattaaaaaccggctggaaatgtaatcgcggctgctcagatgctggagaagaccaaggagctccggtaaaacaaagggcactgctcca

SEQ ID NO: 252885 - DNA, 122 bp, Homo sapiens
acagtgcatctctaaatctgattgttaccatttaaaacatttgatttctcttcctagattcgaacagcattttcaggcaggtttggatgggttgtttcttttttaaggaagcttgaattttg

SEQ ID NO: 252886 - DNA, 122 bp, Homo sapiens
gtggtagagtcagaccttagagggccacgtgttcagagatggccttttgaattccagctccgccacttccttactggctatgagtccctgggcacattcctcaccctgaattgatgttcgaa

SEQ ID NO: 252887 - DNA, 122 bp, Homo sapiens
cgctgtcgccgtcccccggctccgccgccgaccagtcccggactctatatacccgtccggcggaagcttccagagcccgccagccccctccagaaccttccgccccgcccgcccccgcggcg

SEQ ID NO: 252888 - DNA, 122 bp, Homo sapiens
ctacccgggcacccgggaaaagcgcgcgccccgcgccaccctcggccccgcctctgcggccgctgcccgtcgcacaaccactctccagcctggcagggcggtctccggcctcgcacgccgga

SEQ ID NO: 252889 - DNA, 122 bp, Homo sapiens
aagggtttcaccgtaagaaaaaacgcgagtaagtatgcgtcctgctcgcttggaggtaaccgtttagggttgcgacggccttggagattaaccacaccgcactttgctgcagacaggaaaag

SEQ ID NO: 252890 - DNA, 122 bp, Homo sapiens
ttgtttttttagagatggggtctgtgttgcccaggttgctttcaaaatcctaggctcaggcgatcctcccacctcagcctcccaaagtgctgggattacatgcgtgagccaccatgctcagc

SEQ ID NO: 252891 - DNA, 122 bp, Homo sapiens
gccgcggcggcggtttgttcccgccgggtccctcagcggaggcgctacgcccgcccctgtcgcctcgccccaccccgcccagggagctccgccctagcccgcagctcttccgccttaggcag

SEQ ID NO: 252892 - DNA, 122 bp, Homo sapiens
ggcggtggaacgcgcaggctagtggctgtgtttcccgccggaggcttttgcgcagagccccgcgtccctggggggcggcggcggcggcggcagcgcaggcggcagaggcgcaggcggcggag

SEQ ID NO: 252893 - DNA, 122 bp, Homo sapiens
agtggttgggaccctgtgagaaccggaactgcgaaaaccggagaagggaattgttgaccgcgaaagggactaaggaaattgggattccagttcgacccctaaattcacaccatccttgctaa

SEQ ID NO: 252894 - DNA, 122 bp, Homo sapiens
tctgggagcctaggagaactctgtgctgaataaacagaaagcttctgccaaacaagcatccgtgtgtgtgcgcgcgcacgcagtttgctagagcagctaatgcaaatgaatagtttgactct

SEQ ID NO: 252895 - DNA, 122 bp, Homo sapiens
ctgttagtcagatttaaatccacaatgaaagtttctgggttttgattccttagtcttctgcggagttatcaaatcagaaaggcaactaaggaatgcatgaaatatacttctgtggcagaatg

SEQ ID NO: 252896 - DNA, 122 bp, Homo sapiens
ggtgtcttggacagggcagttcagagtgataggaccaagacaccctatccgggctctggtcggggatgaagtggaattgccatgtcgcatatctcctgggaagaacgctacaggcatggagg

SEQ ID NO: 252897 - DNA, 122 bp, Homo sapiens
agggtgcttgggaaacctgttggtgcttgggctgccctcaaattgctgctcgttaaggcacgcaactttttgtcagcagcatgtttagagatgattggaggagaagtcctgctaactctgtg

SEQ ID NO: 252898 - DNA, 122 bp, Homo sapiens
ccgtgtccctaccccgagatttgatttttggccatctccgagtgctcgactctttccctccgcagcccagccccagcccaggcttcccgccctcccgcctcgcccgcgccgggaggcagcgc

SEQ ID NO: 252899 - DNA, 122 bp, Homo sapiens
gaattaagaccgggagagattaaatacccgattattctcctggggagggcggggcggggccgggaagtgggcacccacaccaaacattccttgaagtaggcttgtcctgatccagccgcgcc

SEQ ID NO: 252900 - DNA, 122 bp, Homo sapiens
ccaggtgaataaagctccttaagatgcattcaactgagttccctgagcccattcaacaggcgggaagaggatactcccggaccagggctcacgctttctccatcccaccccggactccaggc

SEQ ID NO: 252901 - DNA, 122 bp, Homo sapiens
atcagtttttattacatcaggtcaaggaaacaaatggaatctatccacatggtcctgcctcgttgggcatatattctaaacatacatccattttcatacccaatgagaaagaactcaattcc

SEQ ID NO: 252902 - DNA, 122 bp, Homo sapiens
tgggggtagggaaggagatgaagtgggggaggaagtccttggaaacagcccgcgcccgaacgtttgtcaaacaagcacacacacccacttcggaaatcaagtcggtgcgagggggccggtgg

SEQ ID NO: 252903 - DNA, 122 bp, Homo sapiens
acgtgcggcagcagcgacttggctcttctcattggagcctgggtcatctcccgcaggtcacgggagaagctgagcatgcggtccctgcccgaggtggacagaaggtgaacgctcttgagaaa

SEQ ID NO: 252904 - DNA, 122 bp, Homo sapiens
tgggctcggtccagcggggactgagcccgccctagtttgtaaaagccagactggccggaccgggctgggagtggggccccagccggtgggctccggagctcctgcccgcgcctgcattccca

SEQ ID NO: 252905 - DNA, 122 bp, Homo sapiens
ggtaagccgctgacccagaggatggaactgcggctctggagattagaaagaggaggacttcgccgcgttcactagcccaggaggaaagccagaaccctaggccggaacccagcgtcaagacg

SEQ ID NO: 252906 - DNA, 122 bp, Homo sapiens
aaaagaaaaaagctaaagactagaaccaatcactgctgtctgagtagagaaccattactgcgaagaccctgacctttgtagcagcaagcaaacaaaaaaggtcacctctttcctcttatcta

SEQ ID NO: 252907 - DNA, 122 bp, Homo sapiens
gatgctgaaagaagtaaactccggaagctcagatccagtacttatgcctgctgctcctcacgggtgggggtgagggcttctcttcactttgagatgacaggttggggagtctctctgctgct

SEQ ID NO: 252908 - DNA, 122 bp, Homo sapiens
gctgcattcccagaggacaggccatgggaggtgattccaggggggcctgagctctcctcccgagaccgtccacggggcatccatgtcccgggtacctgcttgtgggctgctctggtcactct

SEQ ID NO: 252909 - DNA, 122 bp, Homo sapiens
cgcagccgccgcgccggcgcctccccagcaaagctccgctaagtgcggccggcgggggtgcggggcgttgggcacctgaccattttctatcataccaccctgtttgtttcctcaggaacttc

SEQ ID NO: 252910 - DNA, 122 bp, Homo sapiens
aaagcggcaggagctggttagccggatagaatgtgggtgccgagggccggtgggggccaccgcagacttctttctgtccctgctcttcagcgtctctgaaacccctggcagcctgcggagaa

SEQ ID NO: 252911 - DNA, 122 bp, Homo sapiens
catgcttccaaaggagcttgcattgcacacaccccggagcaaaccggcaagtagagaagacggacacttcccaatgaaagcgaaatgttcctgcctgccctgcgccgctcggttctccttcc

SEQ ID NO: 252912 - DNA, 122 bp, Homo sapiens
gcggcgcacgagtctctgatcccgattggctgggcagggcaggcggcgggacgcagggcgcgcccgggcggtgctgattggccggaggaggccagccgggggaaacttccgggaatgtccgc

SEQ ID NO: 252913 - DNA, 122 bp, Homo sapiens
cgcagctgcctttcaagggcctggagtctcctgacaccaccggaaggcccaggatgctgtcgggggcaggacagaacccggggaggccggctgtgggcctcgctggctgcggagaacccccc

SEQ ID NO: 252914 - DNA, 122 bp, Homo sapiens
atcactgtgcagcgggctcttcctgctgcatttgtaaacaccagccgggccacagtgctccggccccggttctggtttgaattaaagccccggctcagggagcaacccagctatgctttcct

SEQ ID NO: 252915 - DNA, 122 bp, Homo sapiens
cactgaccagagccaaggaaccacgtgtgtggacgccatcaacagcttcatcctgaaacccgggtgcggagctgtgggagggtgtggtctgtccctggatgcccttcttccacatgtcccat

SEQ ID NO: 252916 - DNA, 122 bp, Homo sapiens
cccttttttttccctgtcacctaggcgctcggcattgttgtcgaattgttttcccgggctcgcccgtcctcacagctcagtacattccctccgagtgatctcttggcacctctgaagcccga

SEQ ID NO: 252917 - DNA, 122 bp, Homo sapiens
tattccctttttacagaagaggaaactggttcagaactgtgggcagccagcccaagagcacgcagctgtccaggggcagagtccacgtctggcttctttgtctggagttgaaagccagatca

SEQ ID NO: 252918 - DNA, 122 bp, Homo sapiens
gctgtttggtcaaacaccagcctagatgttgctgtgagggtactttttagctgtgattaacgttaacaatcagttgtctttgagtgaagattaacatgaaatcagtagactttaagtatgca

SEQ ID NO: 252919 - DNA, 122 bp, Homo sapiens
tgtgggccttgcggacctgggagctggcgggcgttgggaaccgggcttaagctactgaggcgtttgctgatttcgtccatccaggttggcgcctggctctcgggcgtttgttccctgcagca

SEQ ID NO: 252920 - DNA, 122 bp, Homo sapiens
ggggcggcctgtgccaaccagggctcctccagtgcccaaacgctccgcagaggggacatgcgtcagaggccagcgggcctgcagagggaagagtctgggaaagctccttagcgattaaagga

SEQ ID NO: 252921 - DNA, 122 bp, Homo sapiens
ctaaggtgatttgcctgccttggcctctgaaagtgctgggattacagatgtgaaccaccgcgcccagccacaattccacatatctgagggactggagtcatcaaattcgtagaaatagagag

SEQ ID NO: 252922 - DNA, 122 bp, Homo sapiens
tgggcctcccagtcgccttggggcgtggcaccacccctacctttggtggtctcgctttcccgaatgagaaaggccccctgggggttgcctggtgaaagcagctgcctctctgcatcctttct

SEQ ID NO: 252923 - DNA, 122 bp, Homo sapiens
ccccaccctgcgtgcacctcttgggccccacggaacctcggcggcggcgtccagggatcgcgtccggagctcccaaccggataccccccccaagcccgaaacggcgctgcccatcctcatac

SEQ ID NO: 252924 - DNA, 122 bp, Homo sapiens
ccttgatattaagcaaaaatcttaaaacaaatccagctattaaaagcagtcaaaccacatcgtggccaggttttttttaccctaggaagagaaggttggcttaataataggaatccagttca

SEQ ID NO: 252925 - DNA, 122 bp, Homo sapiens
gcccatggttgggtaaccgcaggtccgcttgaccctctgccacctaggactgtgtctatacggcgtctgggctacagtgtgtttgagttgccgtgtgcgtttccgttgcggggtgtgggttg

SEQ ID NO: 252926 - DNA, 122 bp, Homo sapiens
ctgggcgagccaaactgcgttcctggtgcagggcttcgggtctccctaacagaccttatacgctgaccggcggccgccatggcagtgtctctttgctcagacatccagggacgaccacattc

SEQ ID NO: 252927 - DNA, 122 bp, Homo sapiens
agtgctgctgttgaggaagcggaagtagtagtgcgtcgccttccggccccctcggcgtcacgctgccatggtaacacggctgccgctaggccttggaggcgcgcacatttgcctacccattt

SEQ ID NO: 252928 - DNA, 122 bp, Homo sapiens
tcttgagaatcttaggattcttccaaagtgagaaaacgtgacctacgaattgttttcatgcgcagtgatgcattttgaaatactaaatttaacaatggatgaaactgacataaagttatatt

SEQ ID NO: 252929 - DNA, 122 bp, Homo sapiens
ttaaagcatactttgggcttgctaacttaaaaggcaaatgggtggtgtcgcgtccacagccgttctatttgaccacattgcagaggtacacacgtgcaggacggtgattctgcagctaaggg

SEQ ID NO: 252930 - DNA, 122 bp, Homo sapiens
ttattttgcacatgagaacactgcagcttagaacgtcggggtgtcttgcccaagtggccccgctgggctgatggggtcccctgattgctaccacgtgttctttccaacacagcaacgctttc

SEQ ID NO: 252931 - DNA, 122 bp, Homo sapiens
ccggcgctggccgacttcctgtctcctgggtcagatgctgctccgcactgcagctatggtcgcatgcagtgcctgccgaagcccgcagcaggaatgctgccttcggtgattttaatttcact

SEQ ID NO: 252932 - DNA, 122 bp, Homo sapiens
aaaaaaaaaaaatgtctccagatttttgtcaaatgtcatcttggggggcaatatctccctcgattgagaaccactgctttaggtaaaagcaaaatcttaggctgggcgcaatggctcacacc

SEQ ID NO: 252933 - DNA, 122 bp, Homo sapiens
ttccaatacattgaacacatttcctttaccctccacacacttcttccaaaaggaagcacccgttgagtccttttgagggtgatttgtcttacaactgactgacttagcaggaatttaattag

SEQ ID NO: 252934 - DNA, 122 bp, Homo sapiens
cctgcgcggtgggcgtgatccgggcacttagggcaggatgaacgctgctttccaagatggcgacggagggaggagggaaggagatgaacgagattaagacccaattcaccacccgggaaggt

SEQ ID NO: 252935 - DNA, 122 bp, Homo sapiens
cttgggctgctcagcctgactttgctgctcagaggggccaactgcacaaaagcagggctgcggcccccgggctcccgtgccatgctcggcccaaggagtgggccggccgagcacggggcccc

SEQ ID NO: 252936 - DNA, 122 bp, Homo sapiens
ctggtttccctcggcgtgccactgtgtgctcagtccagcaccatggggaagcgggacaatcgggtggcctatatgcacccaatagcaatggcgagatcaaggggtccaatccagtcttcagg

SEQ ID NO: 252937 - DNA, 122 bp, Homo sapiens
tcctgcaaggactgagtatatacttcacacagtgcagtcagaaatgcccatcgactctgccggcaaaagtgcattccttcttgaagctgtgtgcttccagctgctccagtgccttctccaca

SEQ ID NO: 252938 - DNA, 122 bp, Homo sapiens
agccagctgccccgacagctaacagctcagggccaggccagcctgcctccagttcagtggcggacccgggtccacgctggcttctggggttccagactaggagcctggtcctccacaacaga

SEQ ID NO: 252939 - DNA, 122 bp, Homo sapiens
agccaaaaggggaaggaagtgaggacaggagccagggccgcggactaggggagcgctggacgctcagggaccaggacccaggcgcccgagtccccagctccactgtcctccgcctctacact

SEQ ID NO: 252940 - DNA, 122 bp, Homo sapiens
cgctccattttggatcactcctggaggaactgaaaaagcaaaggggagaaagacaccgcacgtgaattcaactgtgaagatttccgttccaagtcagaaattctggatagaccaataagaga

SEQ ID NO: 252941 - DNA, 122 bp, Homo sapiens
gaagagctgggtctgaatgactccttgaaagataatccttcatgtattcactctaaaacacgaatctagcacttactatgtgttctggtaccattctagcactggggatgcaataaaaatca

SEQ ID NO: 252942 - DNA, 122 bp, Homo sapiens
tccagtccctctcccctccccacaggctgagggtggggccggcagttccagccctcaaatcgcctggcaaccagagcccctttccaaaggcctctcacagcgtaaacgcaggtgtggttgag

SEQ ID NO: 252943 - DNA, 122 bp, Homo sapiens
tctgcaatcgcatctttgtaataatctcctttctgagacggttcagtggactcaatgttccgccaaagggccaaggcagccctggtgagtgttttcagctctcttctgtagcttgtttggtc

SEQ ID NO: 252944 - DNA, 122 bp, Homo sapiens
cattgctggctctctagtcctggaacctacagttggtccaattcattatgccaaagggtccgtctaggaggttcttgttccaagtattgagattcccgagagaagtaggtccccttagatag

SEQ ID NO: 252945 - DNA, 122 bp, Homo sapiens
gatgcgacattgatgtgttatgtagctatttaattgacccctgattggaatacatgctcacgagacagtcaaacaatgaagaagtataaaaaatgaaaaataaagtcttctagtaccaattc

SEQ ID NO: 252946 - DNA, 122 bp, Homo sapiens
agggaggtcagggtcagggtcagacgtggagccccgtggagtgcggagtggtgaccccttcgttcgggggcggagggatgactgagcatttataacttttgtgtatctccccgtgggtgcag

SEQ ID NO: 252947 - DNA, 122 bp, Homo sapiens
cacatcctcgacagttgctccaaggacacacatgcgctggagcaggcactggactttgtgcgtgcctcactcagccgtggtgctgatggctcacgccacatctgccccgacggctcttatgc

SEQ ID NO: 252948 - DNA, 122 bp, Homo sapiens
gtttctggggcggcaggtgtttccacggccgcgtggatccatcgagtgtgggttttgtctcgggagttgcccgtgtgggtccgtttgtgtctgcgcgtctctctgtgagtgtttgacactgt

SEQ ID NO: 252949 - DNA, 122 bp, Homo sapiens
cgacgggaacgaggctcaaggctgattggctctgacgcctgctcatgtagccacactttccgcctctgcgccttagcctacttcctattggtcgagagaagtggagccgggggctgattggc

SEQ ID NO: 252950 - DNA, 122 bp, Homo sapiens
aaacattaaaagctttcttcttagaggcgccacggcttccatagcgatggcagctccagccgggcgatgcttagcacctccccaggagaccgttgcagtcagccagcccccttctccatggg

SEQ ID NO: 252951 - DNA, 122 bp, Homo sapiens
agcccatggggggcatgtcctttgtgcaggcattgatgaggttctggttcctctcccactcgcggctgccgcggctgggcttccgcttctgctgcagcgttggggttgactctggggtgggg

SEQ ID NO: 252952 - DNA, 122 bp, Homo sapiens
tgcagctttgttcattaacacagggcctgtttggaaatcctacttttagtcattaaaccacgcctacccaggacttcttcacagaagtgctggattccgcctgtagtactgagtcacaggca

SEQ ID NO: 252953 - DNA, 122 bp, Homo sapiens
tgatagagcatacattgctcctgcatgctagcttctaagggaggtgctaacctctggcgccgcactgtggtgcagaagagctactgccactaatgagcagttcccttcctctgtgtcagctt

SEQ ID NO: 252954 - DNA, 122 bp, Homo sapiens
cccgaggggtgcgggccctgctgtgctgccccatgcagcaagggaggggcgtgcaggcaccgggaggacaggggacctgcagctccaagaaaggaacagatgtcacaaaacccgaacccagc

SEQ ID NO: 252955 - DNA, 122 bp, Homo sapiens
caggggagagtagacgaagccactgagccctaggcagggcctgggctccgctcgtagcagcggctcccagagtggaaccgttaggaatgtgtgctctcaggccctccccaggttcgtggggt

SEQ ID NO: 252956 - DNA, 122 bp, Homo sapiens
ggcagctgaccactggggcggttcctgtaggcgacgtcaccaggagaacggaagctgcgtcgagtcaggggtgacagctccgggccccactgcgccttttcctagccctccgctgtcacgca

SEQ ID NO: 252957 - DNA, 122 bp, Homo sapiens
gttagatgggcactgccaccctccgcccaccccctgccccctgccctgggtcctaccatacgctcgtgctggtgcaggccaccaaacgtgctgctgcttccactgctgcccaccgggccgct

SEQ ID NO: 252958 - DNA, 122 bp, Homo sapiens
ttcagtctctttccttcatgtggagggtatatttctctgtgtcatgctgtgtgagcttggcgggagtggggcggctaatgttggtattgtggaactatccttcctaccctttattgtgtctt

SEQ ID NO: 252959 - DNA, 122 bp, Homo sapiens
ctggcttcgggcttcagggagctctggtgcagtctccgcctgtcagtgccggcagtcgtccgcggcgcccgccccggtcccgcactggtgcagccatgtcctcttccccgtgggagcctgcg

SEQ ID NO: 252960 - DNA, 122 bp, Homo sapiens
ccgagcgtcacccctgccctccccgccgcgtcccagcccagggaagggggtgctgcagagcgtcccccggccccagcccatttaacacatggaaagaccgaggcctccagatgggtaggaag

SEQ ID NO: 252961 - DNA, 122 bp, Homo sapiens
acctgccgtgcgctccgaggtcagtggcaggtctgcaggcagccgagggagcggtgaagccggaagacctgtctctgcccatgtgcaaggcagtgatttcgggtgagagagcgggtgggtga

SEQ ID NO: 252962 - DNA, 122 bp, Homo sapiens
tgcatgcgaggggctggagggcgagtgcacagcagactgggcccccgccgggcaaagctgcggggaggaggccgcgtggggagggccagggccacgccgcaccttgctttggcgcagctccc

SEQ ID NO: 252963 - DNA, 122 bp, Homo sapiens
aagcccctccctaccccaattaccggtaggatctgaaactctggagttggcatttccacccgttattctgaatgctactctcaatagcaggttctttgggatggaacctcataagcatatta

SEQ ID NO: 252964 - DNA, 122 bp, Homo sapiens
tgacacagaaagcttgggtttaattaattagtatttagaaagcaacttaagactccggaacgcaactcatctatgcagtcaagagatcattaacatttttgtgacacaggtgtttttcacaa

SEQ ID NO: 252965 - DNA, 122 bp, Homo sapiens
ctggggatcgggtccccagactcctcgtcccccgcccctctctgtccagcgggagaaaggcgggagaagcctaggcgctgcctaccgggccccccaaactagaagtcagaggaggcgcaggg

SEQ ID NO: 252966 - DNA, 122 bp, Homo sapiens
ttaaagcaaggcatcgatttaaccaattagtggcttctggatattgttgacgaaacttctcggcacttacagatttactcttcctatgctttattcttattcattctcgtttcacataggac

SEQ ID NO: 252967 - DNA, 122 bp, Homo sapiens
gtgggaaggaaggaagaccagaaggcggctggggccatcggagactgctccctctggcctcggctggcccttctcacctcacttctccctcccccggctgggccgaggacgcctcccacttg

SEQ ID NO: 252968 - DNA, 122 bp, Homo sapiens
tgctgccccgccttccctgccgcctgcccacctccccgccgcagccaggtaacctccacccgccccggggtagaggacgttcgtcggattctacactccacctcgttatcgcagcctgaagt

SEQ ID NO: 252969 - DNA, 122 bp, Homo sapiens
gagagagcctggatacgaagcaggcgggcttcagagtgggttggaaaaatggaggtgccgcgcctggatcatgccctcaacagccccaccagcccctgtgaggaggtgatcaaaaacctcag

SEQ ID NO: 252970 - DNA, 122 bp, Homo sapiens
gacgctaggggccaagctccgacgcggggctgggtgcacctggacgcacctcacacgccgcgagctaagcagaaaagggaggcaggctgccccgacaccccactactcaccgctaggtttcc

SEQ ID NO: 252971 - DNA, 122 bp, Homo sapiens
agagtgtgaaccccatggaccgggaggagtatgtgtcccacaggacagcactggggttcacgcttctgcagagtccccagcctggggtccgtctcaatcattctcccacctctgctgggaaa

SEQ ID NO: 252972 - DNA, 122 bp, Homo sapiens
gtggaaccttgtgtgggcggaacgcgagtgcagcggtgggaggcttccgggggagctgcacgggcgacgggtcggcggagacagaaaagcgccggacgccggggtgatcatggacgcttgac

SEQ ID NO: 252973 - DNA, 122 bp, Homo sapiens
ttcagatatttttaaatgggaaaacaacttactttcaacaacttaatttttccagtaacacgttactatgttaaaaagatgcgacagtatattcatttaatctggcaattttaatttcaaca

SEQ ID NO: 252974 - DNA, 122 bp, Homo sapiens
gcggcccgggctgagcctagggggcaggcgcctgcgggcagcggcggtacctgcggaagacgaggatgtcctggtagcgcgagcgccggtggtggagcagctgctccacctgcagtgacagg

SEQ ID NO: 252975 - DNA, 122 bp, Homo sapiens
gccctcagctgtcttcgtggtttaaaggaatacaaaaaatctgatcccccaccacccatccgtttccatccaggcctcctgagcttggcaggcctgagttgagtctcttagtctctctcttc

SEQ ID NO: 252976 - DNA, 122 bp, Homo sapiens
cttgtagccaaagaagcagttccactcctcgccctcctggaactggcgtcggcagcgctccgggaccaccccgttccagtacctggagccacagccacaggttaggctgccgtgggtctcgt

SEQ ID NO: 252977 - DNA, 122 bp, Homo sapiens
tgggggaagacgacggagtagttcttggcgtaggactcatggcttcgctctcggatccagcgggggtggtccgtgagcgagtgatggaagcgcctgccgcagacagggggacgggtcactgc

SEQ ID NO: 252978 - DNA, 122 bp, Homo sapiens
ggggcggagcgggggaggcgcgaacccggggacccccgcgctggacaaacccgcggccgccgcccgttcctgtcgtgtccagcttgagacacacctggcgcgtcgtaaagtgatttacgaag

SEQ ID NO: 252979 - DNA, 122 bp, Homo sapiens
ccgccgcacggagtcctgcgccttgaggctcaagcggcggcgtgcaaggcgtgtgaggcgcgtagagagccgcgcgcgccgtctgcgatgccccgggacggcgttcctgccgggaataccac

SEQ ID NO: 252980 - DNA, 122 bp, Homo sapiens
acgcaaggccggagttaatcatcacctcccgggcgtctggaaaactacgggccggaggggcgggggagcagcccaggggaaagtgaaactccctcagggcccaccagccccgtgagccggag

SEQ ID NO: 252981 - DNA, 122 bp, Homo sapiens
gagggagaggcacgggcgggaactggggctgcgccagcgatcgcagtccagtgtgagttccgggtgggcacgggctccgcgcccggaactcagagcgcccgctggtgccgcaccaggcagtg

SEQ ID NO: 252982 - DNA, 122 bp, Homo sapiens
acatacatatatatattatatacagagatgcggccctcccgacggctgggcaggggtggccgctggcccaagcagcccgaagcggccccgcccacccggttccgccccctccatctgccggg

SEQ ID NO: 252983 - DNA, 122 bp, Homo sapiens
tccagcgggattcagatgcacacgccctgaatgggccgcgcaaggtgaagtgagcagctgcgggtcgctccccactcccacctggctctaggagggccctgcggagttggccagggaactgg

SEQ ID NO: 252984 - DNA, 122 bp, Homo sapiens
ctgtggtaggcatttttatgctgtccagatcccccttcaagaaatgacttttagtcccagcggcttggagtattgtcatcggccttcaacttctgatcctccccagtgcagagagctgcctc

SEQ ID NO: 252985 - DNA, 122 bp, Homo sapiens
ggatgggagtctttttgtataataaatgctcccaaccctgacatagagccagacacccaacgcatgcttcctctggcccagatttaacatgcactggccgctccccatgcacctggcaccct

SEQ ID NO: 252986 - DNA, 122 bp, Homo sapiens
ataagaatgtaactccttggccctaaaaacaggacaaggagtgaagtgtgtcataaggaacgctgaaaacagcctcctaagaatgtggtttgagagcttttgcaaggccgcaggtgtctcat

SEQ ID NO: 252987 - DNA, 122 bp, Homo sapiens
atccactgtgggctcccagtgaaatttcagaatatctcggaggctcactttgggatgcatcgtcctaattttcttttagaggcttccataagctgctccccaaatagatttttattgtggtt

SEQ ID NO: 252988 - DNA, 122 bp, Homo sapiens
tgctgtgttttggggcagatcgaggagtccgtgcgctacatggttatgcgctacggcagccggctgtggaaactccgtgtgctacaggctgaggtcaagatcaacatccgccagaccaccac

SEQ ID NO: 252989 - DNA, 122 bp, Homo sapiens
ctgtttctctgccagctgcccctcctttgctgtgagaggtgttttctgtgacccgcaaagcgtggtttaatttacagggtgagttggaaatgattcaagcatctgctcctttcaaatgttgg

SEQ ID NO: 252990 - DNA, 122 bp, Homo sapiens
tgcagccaggcacatcctccacagtctcagggctaggcatagactgttgcctccatctcccgctggcagcgtcacagcacgtttgatgagctcctcagcagggccaagcccctcatgaaccc

SEQ ID NO: 252991 - DNA, 122 bp, Homo sapiens
cccctcatttgctgatcacgggggttaattataagcggcattaaattatacacacacagacgcgccaacctcgcttccccagaacccctgaatttccgcaaactctcaattacccacgtgac

SEQ ID NO: 252992 - DNA, 122 bp, Homo sapiens
cagcttgtccagcggatccagacactgtcccagctgctcctgaaccttcaggtacaggggcggggtggggccggccacgcgtgccctttcctggttggctggggcgcaggtgcggctctcac

SEQ ID NO: 252993 - DNA, 122 bp, Homo sapiens
cctccacgtggttctgagacacaggacggagctatcagggcacccgtcgaggtcaggaggcgtccggggcatcaggagaaactaccggcaaatacccaagaatccaggaagacccgggatga

SEQ ID NO: 252994 - DNA, 122 bp, Homo sapiens
tgtccatatcgccccctttcccccaggtttccgcatgggccggaccgtggtcgtgctgggcggaggcatcagcggcttggccgccagttaccacctgagccgggccccctgcccccctaagg

SEQ ID NO: 252995 - DNA, 122 bp, Homo sapiens
ggggcctggaggagtggggagtgtgagcgcctctccttttctgctgcacaagagaggccccgggcgcaggttgctgcatggggtcccccgggccaggtgcgggggacacctggggacttgtc

SEQ ID NO: 252996 - DNA, 122 bp, Homo sapiens
ggaggaggaggaggaggagggcagcatcccgcctggggcctggggtgcccccacagaacacggggacatgggatgagaggcgtacccactgtgctccccgacatccctgctgctcgctggcc

SEQ ID NO: 252997 - DNA, 122 bp, Homo sapiens
cgttatccagtaaagccacaaccctatgaagaacaaatgcggatccatgctgaagtgtcccgagcacggcatgagagaaggcatagtgatgtttctttggcaaatgctgatctggaagattc

SEQ ID NO: 252998 - DNA, 122 bp, Homo sapiens
acccgcagagcaccgggaccacattttgcagaatccttcggcagtcccgcgatgccttcgcggtcagcagatctcattggtttacagagaaacttgtcaacgtcacttgggcatcttaagag

SEQ ID NO: 252999 - DNA, 122 bp, Homo sapiens
cactcccgtccctgctccatcttcacgcggcctcccccaacctgtgcgtctctgttttcacgtggccttcttgcagagacgtcaatcacattggattggggcccatcctactccgttatgac

SEQ ID NO: 253000 - DNA, 122 bp, Homo sapiens
actatagaactcctaacgctgggccagctgcttacttatccactgctggagtttgcagatcgaatcaaccaggtggggccctcagtacaggggcgagggaggtggtccaaagccaggacctg

SEQ ID NO: 253001 - DNA, 122 bp, Homo sapiens
ctctgggcctgtttcctcctctacaaactggggactgataatgcccaccgtgtgaacttacgggaggggggcagtgaaagccttctgtatactgtaaagtgctgtgcacatgacaacgggaa

SEQ ID NO: 253002 - DNA, 122 bp, Homo sapiens
gaactcacctccaagcaacccattcgggcttctctgatgccattggcctccttgtgcatccgtcagtaggactgggctcctctgcagctggctgtcctctgttccctctcttaagcccctgg

SEQ ID NO: 253003 - DNA, 122 bp, Homo sapiens
ggtggggacacagagccacaccacatcacaaggtttagtagttacgtaaatttaagccagcgtttccagcaaggtttcagcataagtagctagcatgatacagatgttctcaaagtccaagc

SEQ ID NO: 253004 - DNA, 122 bp, Homo sapiens
caaaccctcacttcccgcatccacttcctcacagagcccgcggagccggcgggagccgcgcgcgccgcccagccgtgcgtcatgggcaacatccagaagaagctgactggcaaagccgaagg

SEQ ID NO: 253005 - DNA, 122 bp, Homo sapiens
aatgattattgaatgcggacggtgtgcatggctcggatcacatttccgctgccttcacagcgcttacagtttaaaggcacgagcaggtagtaaacaaatgcacgacagtggacgactcaggg

SEQ ID NO: 253006 - DNA, 122 bp, Homo sapiens
actatgcacaaaagagttccttcccacaaggccggcaggttcgggaagtcctcccgtattcgaggtaccaggagccataaatccatatttaattagctttgaacgaaatgcaagagatgata

SEQ ID NO: 253007 - DNA, 122 bp, Homo sapiens
ttccgaaactgcccttcttgggactgggaagcagatcctgggcctccctggggcctgtggcgctggcagcagctccacgttgaggtcgcctgcagcccgcactgcggagcgctggaggtacc

SEQ ID NO: 253008 - DNA, 122 bp, Homo sapiens
caccagttactaatagagtaacaatgatatgcctaacccttttctagatataatgaggcacgtgaaagatgcagaagacacagcttctctcagaagtttttttgggcaacaaggtgtaagta

SEQ ID NO: 253009 - DNA, 122 bp, Homo sapiens
ctttcttcatgccagtgcctggtgaatcttttatagcctctgccaggataaggtcaccttcgaggacttaagatagagatgaggacgataatgggaaaaagccatatatgaaccaaaatccc

SEQ ID NO: 253010 - DNA, 122 bp, Homo sapiens
tgtgggccgcctccatgtcgtgcgtgtagtcgaagctgctcttgctgcacgtgctgctggcgctgctgcccccgccgcagctcaggttgctgctgctgctgggcgcgtagctgctggtgctg

SEQ ID NO: 253011 - DNA, 122 bp, Homo sapiens
gcggcaaacagattggacagaagcggcttcaggacacggggcagtcacagcttgatcagccgcccctgtaaccgggtggggcatccccgccctccgctgccctggaaggagccctcggctgg

SEQ ID NO: 253012 - DNA, 122 bp, Homo sapiens
aagatccgtccggctctctgagcagagggtagcgtgtgggggcgggataccgacgcggctcggctgccgattggtcagaagaggatagaaaggggcgggaagccggcgcggctcgactcccg

SEQ ID NO: 253013 - DNA, 122 bp, Homo sapiens
acggaagactccgccagtcaatgcaaagttctctattatgcctgcctggcagaaattttccgatggtggcacggagacctccaaacagagcacggaagctgaaagcatacgaaaaagaccca

SEQ ID NO: 253014 - DNA, 122 bp, Homo sapiens
cgtatgcaagtctaatggaaagtgaaaaccaagaaaaaaacctcaagccgttgaaactatcgctccacctagcttaaaactggttagtgtgaaatggaacattctgattggataacaagact

SEQ ID NO: 253015 - DNA, 122 bp, Homo sapiens
gttacagctggagcactgtgcctgtgttaggtcaaaagtggagctatagcttgggattctcgtgaacagtctgggaaaagagtatacaaggatatcagaccaaaaggagtataataagaagt

SEQ ID NO: 253016 - DNA, 122 bp, Homo sapiens
gacttttagaaggtgattctgtcagaggcatttgaaccatagtgactccatcttgaatagcggctgggtaaaatgaggctgagacctactgggctgcattcccaggaggttaggcattctca

SEQ ID NO: 253017 - DNA, 122 bp, Homo sapiens
ctcccagcccctccctgtaatttgctaaattgctgacatacagaaatgttccagactttccgtaattctccagagaaggctttataagagcgcggagactcaggggattaggtggtttttat

SEQ ID NO: 253018 - DNA, 122 bp, Homo sapiens
gtgaactccccacaaggctgggctggggagccctggaaccgggcccagcatagcctgccccgggcggcagccctggagcggacagaaccctcgccacccccttcagctccccgggagcccga

SEQ ID NO: 253019 - DNA, 122 bp, Homo sapiens
tggtgtgtggagatgggagacaaaggacagatctaggagccttgaaggatcaccagccaccgaccctccatcagggccaactgggcaggaaagggaacattgcagacctgatttcccgacga

SEQ ID NO: 253020 - DNA, 122 bp, Homo sapiens
gcctagggaggtaaggattgtggggattcgaggctgcagcctgggcagcgccgaggtcctcgggagtgagcagaaccctcataacactgggcggagtgtgacggtggagaagtcggcgtgag

SEQ ID NO: 253021 - DNA, 122 bp, Homo sapiens
ttggaatgcctgggcaaaatgctcagcatgaatgaaaaatgccacagaaaatgttacaaacgcaaacaaacaaaccccaccgcagattgaagaaaccattgtcattctaacaagtaaaataa

SEQ ID NO: 253022 - DNA, 122 bp, Homo sapiens
cagcgcctcaagtgtgtgcatctgggaccagggggcgggggagggggacctgcggccccgcggccaacccggttggtgcagacttggggatcccagaagggacagtgcccgcccagtcgcgg

SEQ ID NO: 253023 - DNA, 122 bp, Homo sapiens
gtctggaaggtgtgttgagacacttctcgccggctggtagacgcttccaacgccagagaccgcagaattgtaaggtgttccttgttttgaaagctgcattaggtctatggtcaggcaccttt

SEQ ID NO: 253024 - DNA, 122 bp, Homo sapiens
gggttcgtgcttgctcgtcgcgatttcgcggggtaatatgggaactgtaggcgcaggcctcgtgatcgctgcaacccgccaggccttccccgccaggccttccccgcccactctctgctcac

SEQ ID NO: 253025 - DNA, 122 bp, Homo sapiens
aagcaacaggatattccaggcacaaggaacaggataaaaaggatacagcttgtggagagacgatcagtagcttagctagtgctgaagtgtagaatgatgtctggtggaagtagcggagaaaa

SEQ ID NO: 253026 - DNA, 122 bp, Homo sapiens
tcggggctgggtccttcccatcggggaggcctttcctgagcactgtgggaggctgagccgcgtccctggcttccacccacgagatgccgggagtccctcccaagtcccaagtaaagatgtct

SEQ ID NO: 253027 - DNA, 122 bp, Homo sapiens
ttctcgggaaactcctttctgttctcttacagtctacgctataggagacaaaacgccagccgagaaaagctcgctgagtttggagctgaggctactgctttctcccaagggttctcttcgag

SEQ ID NO: 253028 - DNA, 122 bp, Homo sapiens
gcactcacaaagggcgtgtcccccccaactacctgcacgcagcaggggcctctcagtgcacgcagggtaataagggtaacaacaacgccagcctccccagggtctgcgccagtcacccaggc

SEQ ID NO: 253029 - DNA, 122 bp, Homo sapiens
ggaagagcttcgcagggtttgttcaaatggtggagtgtgtgagctcctcaccactgagcccgaggggcaggcgtccggctcttgcttcctcccaggcccacttcctgacctgtggcgggaag

SEQ ID NO: 253030 - DNA, 122 bp, Homo sapiens
ccggcgaacacccggcaaacaccgacatcctgccctggcccagagtctgtgcaaagcaaccgggctgagtcgcaccagggcagaacaccatgccctgattctggagaacatatggcgggaga

SEQ ID NO: 253031 - DNA, 122 bp, Homo sapiens
ggagggaaacggcgtctgtggggagtagctaggggcctgcccggcgggggcgcaggaacccggttgcggtgccgggaggagggtcgggagggtctcagccccctccttgctcccaggcttcc

SEQ ID NO: 253032 - DNA, 122 bp, Homo sapiens
gtccttaacagggactctccttcagtaaggcgttccactttgtccaaggaaaaggactggcgttacagtagacacctcatagcgcaggagtagaggggagggtgcttcagcattaatattct

SEQ ID NO: 253033 - DNA, 122 bp, Homo sapiens
tgtttggtcccaccacctatggacagtttggcctcgccagggctcagggaaggcagggagcgctacacaccagccacccaaggtgaggccccctacacagacctgagcagctgttcctcatc

SEQ ID NO: 253034 - DNA, 122 bp, Homo sapiens
aagcttttaggggcatggatctgtgtctgtctaaacacataacccttgttttttttgacccgaggtgcatgaagtggatgtattatacacagctgccatgtttctataggataaggaattag

SEQ ID NO: 253035 - DNA, 122 bp, Homo sapiens
gtgagtgtcttgtctgtgctggtggattattaacagaggttattggtctccatggcaaaacgattgaatgattgctctgaacgtaatctcatttatgggggtgcaaaaaacaaagcacttca

SEQ ID NO: 253036 - DNA, 122 bp, Homo sapiens
tcctctgcctctcttttagaaggacccttgtgattacatttaagatccatctgaataatccgggataatctccccactcaagggctttcagtcacaccagcaaagtccgttttgccatgtag

SEQ ID NO: 253037 - DNA, 122 bp, Homo sapiens
gagtcgcgggagcccgagggccgggagctgcgggactccttcgcccccacctctgccgcccgccgaacccgaccccgggaaatcctcctagccgccgcctcccagcgccgggtctccccgag

SEQ ID NO: 253038 - DNA, 122 bp, Homo sapiens
ctcctggcccgtcagtgcacggccctcacggccgccgtgttctgtttgacccagaagttccgggcatccacggccctgtaaacaggtcaacggcccaagggcctcctgccctgtcctgcctt

SEQ ID NO: 253039 - DNA, 122 bp, Homo sapiens
tagacaacggaaggacagggggtcgcagcggccgggtccagcgcgcaggaaggcaacaggcggccgccagccgtcgaggggtgctcccgcccccgcaccgagggaagcggccgagcccgcgc

SEQ ID NO: 253040 - DNA, 122 bp, Homo sapiens
cctaacgccccccaaccctctgcacccagacccaagagccggccttcgacgcaccacatgcgtggagcccgggtcccagccctgaggaccaggtttcagggctcagaagactccagcgaggt

SEQ ID NO: 253041 - DNA, 122 bp, Homo sapiens
ccagccaaggcttcctgctggagggactgtctgggcagtgttcctgagactgccacacagcggcgccagaggcctccctttgctgcccctggaccccagctgcccaatgcagtgcccctggc

SEQ ID NO: 253042 - DNA, 122 bp, Homo sapiens
caccgaccagccacgcctcttcaaggcgcacgcatttttcacagatggggtgagcacatgcgctcccgagaagctgagcgacatcacggtttccgtgtactccggtgattgcagagttctcc

SEQ ID NO: 253043 - DNA, 122 bp, Homo sapiens
ggaactcctagatctagtttgcatggggtttataaggacaccagcaaaatcctgccttcacgcccaagctgagctttggtctctgcagtgctgcctcacacacagggttcattcttgaaagt

SEQ ID NO: 253044 - DNA, 122 bp, Homo sapiens
ggccggggccacccaaatgtgtacacctgcggggccacccatcgtccaccccagtgtgcacgcctgcaggctggagactggaccgctgactgcaccagcgcccccagaacatacactgtgaa

SEQ ID NO: 253045 - DNA, 122 bp, Homo sapiens
ccagctgctcggaggctctggcatggtaacatccccgcgcgggggtggaggggctcggggcggtcccacagcgccccctgcggcccgggccgtggccgatggggcggggaggccgctgggga

SEQ ID NO: 253046 - DNA, 122 bp, Homo sapiens
aatagatcatggaaataaaaacaccggacaaagagatagtagaaaagacagctgggcccacgggaacactaccacgaaaactcggagaccggtagtggccctgaaggcctagctacgctgtt

SEQ ID NO: 253047 - DNA, 122 bp, Homo sapiens
cgctgaggagccgggagctccgagaaacgcgccaggagctccaagaacgcaggagcagcccgcggtcggcagcaagtttgcatttctaagtgaccacatctaataaaatgaaaaacgggttt

SEQ ID NO: 253048 - DNA, 122 bp, Homo sapiens
tcttctgatttagaaagctagattggttgaggatcgggatcagggaccacaactcaaccccgaaactttgggcttccagaactgcaggggaaactgattctgagatcagacaacggaccctg

SEQ ID NO: 253049 - DNA, 122 bp, Homo sapiens
cagctttcaggccccgcctggctgtgagggcccccagacgcctgccctgggaggagcccacgcacagggcctggagcggggctgggtggacctcagaccctgaacacctctgggagctcctc

SEQ ID NO: 253050 - DNA, 122 bp, Homo sapiens
cgggcatatatgtatttgtttcactggggttcatggttctggggacagtcttctagcccccgagatcttgggaaaggcatgagctcaagccacataaccaaaaagtagcaaaactcaaaatt

SEQ ID NO: 253051 - DNA, 122 bp, Homo sapiens
actgtaggtatgtatgcttcctggccacagaagatcatcaggctctggtctcccactcagcggttccttagctgctctgggcctcagtttcctcatctgtactctggtgacaataagtctca

SEQ ID NO: 253052 - DNA, 122 bp, Homo sapiens
accagaaaggttggggacccctgagttaagataccaaagtacaagatcctcttaaaggatcgttgggaggctggcctaacctggaggaaggggaagacatacagatataaatctgtggttga

SEQ ID NO: 253053 - DNA, 122 bp, Homo sapiens
ggtgcgggagccgggcgggggtgactgtggccttgcctctcccgtccctgtagtggctgtcgctgggcgcggactccaacgggagcggcgtctctgtgctgctggagctggcacgcctcttc

SEQ ID NO: 253054 - DNA, 122 bp, Homo sapiens
ccgcagctcgaccccgcaccctgtatccccctccggggtaatcggtctccccgccgcccgcgttcgcccctcctgggggatcggcctcctcgccgcctaagttcacccctcctgaaggatcc

SEQ ID NO: 253055 - DNA, 122 bp, Homo sapiens
tggggaattacaaagattcaccaaaacatcaatttctcttgcaaggtggagaatttgtgacggtgaataactgttctgtttcctgttattggaacttagcagattctaaatcttagggaaca

SEQ ID NO: 253056 - DNA, 122 bp, Homo sapiens
taaaggcttcataaaaggaaggggaggcagaaccagtcaaggaggtttccattcactgggcgcttttctgacaccaagtaccaggaagacacttgatatcctctaattttcacagccatcct

SEQ ID NO: 253057 - DNA, 122 bp, Homo sapiens
aatcaatcaatcaatcaatcatcaatccaggaatgttccttctctgcctaacatggacctcgtaatgttacaaacatcggggaggggcaggggataagaaaacaaagcctccccccgtaact

SEQ ID NO: 253058 - DNA, 122 bp, Homo sapiens
ctcctcggggcccgcagactgaggcctttcattggccaatgcggcgtgacgtcacggagacggggcctttctacaggcaggtactcggtgacgccataaagaaaactctgagggcttccgcc

SEQ ID NO: 253059 - DNA, 122 bp, Homo sapiens
tccagctgggcctcggtttccccagctgtacccggggccagggctgggggtgatgggtgtcggcgcagactgctgccgtgcgtgcggggtctggagcctctggcgctgaggggaggggagag

SEQ ID NO: 253060 - DNA, 122 bp, Homo sapiens
aggctactgcagtccgcctaaacaatccggagcagcagccaaggcagcacaagaaaacgccggtgccacggaacgcgatgcctaagccccccagccgaggctcctatggagccggccgccag

SEQ ID NO: 253061 - DNA, 122 bp, Homo sapiens
agaactgctgccccacagtgagggtgggagcagcggaacagggaatgccagacacaggctcgctgctgctggaaggcggggtgggacttccttcctctgtccggagaggcacaggtgtcacc

SEQ ID NO: 253062 - DNA, 122 bp, Homo sapiens
aggggcggagtcatggtccttaaggcggggccatccccggaccaagggactgggcggaaccgattagggcggagcggagggaatgtgaggcaaggggcggagccctgggaatcggggccgga

SEQ ID NO: 253063 - DNA, 122 bp, Homo sapiens
gggtggagcccagcagttgctttaacaagtcctccacgtgaatttgattcatgctgatgtcgagaactgctggtttaatcttaaccttggctacacgtgagaatcacctggggagcttttaa

SEQ ID NO: 253064 - DNA, 122 bp, Homo sapiens
ggatgtctttgatgctgtggttttccgaagcttgctggctgcatgcttgttgcctttgttcgtgacacaggtaattacttgataaaatgaagtgcatcgctgtgaacaattgaccctttgga

SEQ ID NO: 253065 - DNA, 122 bp, Homo sapiens
agaggcatcctttccattgtggctgaaccactaaataagtctgaactggcaagtgctttacgtaaatgtgctccagagtaaagaaaaagggacagtaattcattctacgttaagtaaaaaat

SEQ ID NO: 253066 - DNA, 122 bp, Homo sapiens
tatgtaagaggaggggcgtcaaagaccaccccacagtttaatgtccttattcaagctggtcgacaacacactgaggtcattaaaaaagaaaaatttaactttcggccagtcttattaatgtt

SEQ ID NO: 253067 - DNA, 122 bp, Homo sapiens
ggggcgggccggaaagtttgtccggcggcagcggcgttggggactccggcgggggatgcgcgcccggcccctcagcgcccccagcacgccgccgagtcccgctcgccatgggtaagtcccga

SEQ ID NO: 253068 - DNA, 122 bp, Homo sapiens
gaacagcaacagcgacggcggggagggcggggagggcaccaagaaggcagtgccgccggccgtgcccactgatgatggctgggacaaccagaactggtagggcccactgcgcccccgtcccc

SEQ ID NO: 253069 - DNA, 122 bp, Homo sapiens
ctctctagagtagggactgacaagactggggtcaagtcagagggctctacctgagaaggacggcaaggctgaggtggctaagggggaccatggggaggtggcactagggatcaaagaagatg

SEQ ID NO: 253070 - DNA, 122 bp, Homo sapiens
ggggtgactcagactataagcttatttttagggaaagctaagaattcagtcagagccactcggattccctattgcctgccatacagaatgtgctgttggtggagagattgatgggcagaaat

SEQ ID NO: 253071 - DNA, 122 bp, Homo sapiens
tcccactgcctgacggagccttcgctctgagcagcagctgcagcagcagtgagctcacggcgctggccggccgggccgaggtgctgtgagccacacaggccggcccacgtcacccgtgcagc

SEQ ID NO: 253072 - DNA, 122 bp, Homo sapiens
cggcggcggcggcaggaagcgggacgccccgagaggaggagggacctgctggggaggcagcggcctcgcagccccaggccccaacgagtgtgcctggggctcgtctctcgaggttgcctctg

SEQ ID NO: 253073 - DNA, 122 bp, Homo sapiens
aagagatgggaaccggctccttcccccaacataactcacccctccagcctttctggaatacgggtgattccaggagctatgcaaatccagcacattggaactttagtaccaacaataaggaa

SEQ ID NO: 253074 - DNA, 122 bp, Homo sapiens
gcccggtagggggtgcgctttccctggcctcccgaggcgggatcggggccgggctccactcggtgagaggatcctgccagccagctgggtgaaagacccacagaaatcccgaactggctgca

SEQ ID NO: 253075 - DNA, 122 bp, Homo sapiens
accttatatatgtggagtgcttttagctttccaatgtgcttttgcctctgttttaacctacgcattaatcttatctcataagcagggcaagcattatgatcctcttttggcagaggaggaaa

SEQ ID NO: 253076 - DNA, 122 bp, Homo sapiens
tctcagcgtgggtggcgcgctgcagagactctgggctcctgccagatgagggagccccggcggaggccaggagggcttgcgttgcacaatctggagcggatccccgggggcggctgagggcc

SEQ ID NO: 253077 - DNA, 122 bp, Homo sapiens
ccaataatttcaaatataaaaatttattcatgaaaattataggttataaaattaaatgtccgtcttagtcgatggttgcccatattttgatgaacgagtcattcctagcctatctttgttca

SEQ ID NO: 253078 - DNA, 122 bp, Homo sapiens
cctcacaataccgcccagtggttgccaaaggacgaccaagggctccctgctgtgcccccacgtggtaaggacagggttctgtatctagcatctctcacagccataggtgctcaggcactaag

SEQ ID NO: 253079 - DNA, 122 bp, Homo sapiens
acaggacatggagatcagtccagacccacagtagaaccaatcgagcggaggaaaccgcggcgttagcgtgacccggatgcgcatcgctaggaaccggaagtaagcggccagagtcacctcac

SEQ ID NO: 253080 - DNA, 122 bp, Homo sapiens
gtgcaagcaaactgctcccggcacacctggttcatgatggagacatcagctgcatgggtccggtaacagtcgtgcacagagacgaaggtcaggcccttcctgtagcagtgcagggtggtgag

SEQ ID NO: 253081 - DNA, 122 bp, Homo sapiens
caattcacacccatgcactcagcccccatatgggcatggtgaggaggtacagaataaaaccggtttcccagtgggttacccccaaatgacctacccaggaagacatttctccaagaagaaaa

SEQ ID NO: 253082 - DNA, 122 bp, Homo sapiens
gtgcgtgagtgccgccgccggggagttttgttccatttcccggatcctggggtctggaggcgaaatatgctctgggcgaggaccaccgggtgtgggaagagggttctgagcgtctcctgacg

SEQ ID NO: 253083 - DNA, 122 bp, Homo sapiens
atctgcccacctcagcctcccaaagtgctaggattacaggtgtgagccaccatgcctggccgcaattgtgggttttattcacagtagttggtagtctcttaattaattgaagtcataatctc

SEQ ID NO: 253084 - DNA, 122 bp, Homo sapiens
cactggaccatgcaaactttggttttttctttttgatacacagcaacagcaatttatttacggattacctactcagttggtgccaagcctggttctagatgctgaagacagagcctagatca

SEQ ID NO: 253085 - DNA, 122 bp, Homo sapiens
tgcacgaaagagctttcgaagaggaagctgggccgcgcggagctggctgttccgccctcgcggcaaccgcaccaacaggaaccgaaacggcctcggcaagggcagctacagcctctcagtcc

SEQ ID NO: 253086 - DNA, 122 bp, Homo sapiens
ttgagggagggcagcctttgtgaggaagggcacctgggcctgggatcctggcctctgtttcgattctgcctctggctgccgtgtgacctcaggtgagttcccctctgagtctccataacccc

SEQ ID NO: 253087 - DNA, 122 bp, Homo sapiens
cccccactctgcccccagctaggaggggtccttgaacatcttttcttcaatttgcaattgcgttggagggcattccaggtggaggatatgagcaggttcgatacctgcagtcaggagacagc

SEQ ID NO: 253088 - DNA, 122 bp, Homo sapiens
acaagacgcacgtgggtcagtgagctagattcaaacttatcatagtccctagcacaggaccggcttcagacccatcctcattccttatccccacagagcccagtgatggggtcctggtggac

SEQ ID NO: 253089 - DNA, 122 bp, Homo sapiens
agggggcgtggcctgcgcagaggctggtgggggtgcgggcgccgcgggacttgggtgacgcgtccctttccagctcagcggtgtgtgaggtgtcgcggccccgccggcgattggctgttgag

SEQ ID NO: 253090 - DNA, 122 bp, Homo sapiens
ttggacacgcgttagccacttctctcttccaccggtcggtgcgctcctccgttactcacgcgtaaaaaccacggtccaggatgtctgcagcactcgattccagcgtgcttttcctgcacgcc

SEQ ID NO: 253091 - DNA, 122 bp, Homo sapiens
aactagtagcaaaggacgtgccggagctggcagttccccctgagaaggtgagcgagccgacgcctggccagaccagctgaatcgcagtgtccttgaaactcgagttgtttgggctcctaaac

SEQ ID NO: 253092 - DNA, 122 bp, Homo sapiens
aacacacacttccttggtggcaaattggaaatcatcactgcttttctgtagacatttagccgcagatttgattcaaaatcctgttagtaggtggtgactgaaatagtttagtgggggcaggg

SEQ ID NO: 253093 - DNA, 122 bp, Homo sapiens
aactcaggtgatgctggtggcctcaaaagaatattgccagtgaaaaaaaaaggattcgggcgagttcctcaaacatgacagctgagaatcaaattaactgggtaccatccccaaactcccca

SEQ ID NO: 253094 - DNA, 122 bp, Homo sapiens
tctgctgcacagagggttctgtgcaggcgggtggaggggtttccattatttccaggagggcgaggaggggaatttctgtgaaaactggaaccctgtatctgctacaggtgctcccccagctt

SEQ ID NO: 253095 - DNA, 122 bp, Homo sapiens
caacaagagaacagcaggcccttgtagtctcaggtgtgcccacaggggtgggcagggagccgtgctgagcaggattaaggggagggagagccctggtttccgggtgaccatctctcccgtaa

SEQ ID NO: 253096 - DNA, 122 bp, Homo sapiens
cctgcagtcactagtccccaggcctcaaaaatccgctaagtatgtgctccactggccgagcgccaacgcgccctcccctccccgcctcccggcaccgagatcaaaaacagccgggtaacagg

SEQ ID NO: 253097 - DNA, 122 bp, Homo sapiens
ttgggagaaggggaggataaatcacggcagcagctttacggtcccggaggagaggcgagccgcagacaggcacaccccggccggcgataaaaaccgccgctgaaagcccacggagcaatttc

SEQ ID NO: 253098 - DNA, 122 bp, Homo sapiens
ctagaacatgttgaagttcagagatccctgattcttcagtgatagtaatcattccttacacgtataaaagaggttaatgcttacaagctgtagaaagaagacagaaaggagtgctttgttca

SEQ ID NO: 253099 - DNA, 122 bp, Homo sapiens
gtgcgagccttccgttatgcccggacagggccaccagagggctccttggtctagcggtgacgccagcgtctgggaagacgcccgtggccaggcagacagactgtggtctagcggtagcgtta

SEQ ID NO: 253100 - DNA, 122 bp, Homo sapiens
agtgacaaggcatctctgagttacagctactcgcctctgctgtaagacaacccacaaccacgtctccagcacacaaaaacttcagaacatccaagccacagttcccaggggctccttcaaaa

SEQ ID NO: 253101 - DNA, 122 bp, Homo sapiens
gccactgcaagtgaggtgcaaaacatgtgaataaagccatcttgtattctctagctctagcgaaactatcccagcttcctcaggagtcacgaagcagccaccccatgaagcacagacaagcc

SEQ ID NO: 253102 - DNA, 122 bp, Homo sapiens
cattatcataattattgctatctttagcatcatcatcctcaccaccaccatcattatcctcggagcatttctaaaaaggatatttgagaaatgcttcagtttgctgggacctacaaatgcat

SEQ ID NO: 253103 - DNA, 122 bp, Homo sapiens
gctttgttcctttataggctttacaatggtctcttccagggaatggtctcttgtcctctccgaaaactaaatctccacatttcatcccagtgtgtgcataattacattcccaagtgtcattg

SEQ ID NO: 253104 - DNA, 122 bp, Homo sapiens
cagtcagaccagggcaagcttgccagggcttcacacttcaccaaagggaaccctttctgccgcgactaccgagctgccagggccgggacaggcagaagcctgccccgaggtctcacctctgg

SEQ ID NO: 253105 - DNA, 122 bp, Homo sapiens
agacgtccctcctcttctctctttctctgctacgtcgttttgccgtcagtcggcttgcctcgtatctcctcacctgctggtatgctctggaggttggggtttggggtttatatgggggcagg

SEQ ID NO: 253106 - DNA, 122 bp, Homo sapiens
agaagctatcggccgtctctttcacaaagaagcttctgtacagtgtctccccagacccgccgaagtctctccaaaagtgcctcttcctacgtaactgctgagacggcagaaaccctacacgt

SEQ ID NO: 253107 - DNA, 122 bp, Homo sapiens
tgttcttgggatgactatccctttctgtgtctagttacagtattcacttgacaaatagttcgaaggaagttgcactaattctcaactctggttgagagggttcataaatttcatgaaaatat

SEQ ID NO: 253108 - DNA, 122 bp, Homo sapiens
aacatcgtggtggtgagggacacgtgctttcccgccggcgggggcgtggacgtcgtctttcgtgggcagccctagagaagtactcttcaaggcgagtgtccctggggcatgggggcggtttc

SEQ ID NO: 253109 - DNA, 122 bp, Homo sapiens
acagtctcctgggagaggctattcttgtctgtcaaaccctctccgcttgtgaactggagtcggcagagccggtccctggtggagaaggtgggccgggtgggccctgtgggccaaatgccgct

SEQ ID NO: 253110 - DNA, 122 bp, Homo sapiens
gcatcaccaagaagcccatcacaaagagctctccctcactcctgatcgagagcgactccccggacaagtacaagaagaagaagtcatcctttaagcgcttcctggcactgacgtttaagaag

SEQ ID NO: 253111 - DNA, 122 bp, Homo sapiens
ctggcagacaaaagttcctgttttttgtatagaagacttccccaacagtctgtgagaactcgttttttcccacagtccatgggtcctccgggcaggaggacacacacacctgggtgcagaga

SEQ ID NO: 253112 - DNA, 122 bp, Homo sapiens
gtcgcttgtccagcactgcgggctctggctgccctggaatgtgaaggtgctaacccttcacgtagcccagcatttcatagtccaccagtgtgttcaagtcacctgcgttatctcctaggagt

SEQ ID NO: 253113 - DNA, 122 bp, Homo sapiens
ccgcttggagctcgtgtggggtctccggtccaggtgagtctgtcggattggggcgggcgccgcgcgcggccaggggcggggctggccgggttcccggggccgcgactacccgctctctcctc

SEQ ID NO: 253114 - DNA, 122 bp, Homo sapiens
ctcacagacacttccctccatgtctactcccacgtgatctgtcatatgtgtggatgtgtgcgcccacaactgccatccagacacaggcctgtcctgacaccggaaggctcgccccgctgtcc

SEQ ID NO: 253115 - DNA, 122 bp, Homo sapiens
gcgtcgttcatcgacagattgagcttctgcataaggtaagccacagtcacagtgactgagcggctaatgccagccaagcaatgtaccaagacaccacagttcttgccccgggcttcatctgt

SEQ ID NO: 253116 - DNA, 122 bp, Homo sapiens
ctccgccatagtcccagcgtttctacggagactggaataacggcactgcactgctgtatgcgagacctgcgcatgcgcgagtctcagtgagcgcgtaaacgctgtgcgtgccagagtgtgcg

SEQ ID NO: 253117 - DNA, 122 bp, Homo sapiens
tttgcaggccccgcgtgcctactggtcccagcctgttgtctgccccagcttgcctttctacgtggaaacttgcccagtgcaatctcactgatttttgaaaatatatttgatgcgtttcagtc

SEQ ID NO: 253118 - DNA, 122 bp, Homo sapiens
cacggggacgtctgtccggggtgccccagtctcctgtggagaaggcgcggctctgggcctcgggctggcatcctggactttgggccaaagatgggtgaagggtgtttggagcagagggaggt

SEQ ID NO: 253119 - DNA, 122 bp, Homo sapiens
ctcctgacctcaagtgatccacctgctgtgcatggcctcccaaagtgctgggattatgggcgtgagccaccccacgtggctcccaagaactctttaaatgaacctagtgtcacaagaacaga

SEQ ID NO: 253120 - DNA, 122 bp, Homo sapiens
tagactacaatagagtgttaacataacttttatatgcactgagaagccaaaacattcatgcgactggcttgattgtgatattcactttattgcggtggtctggaaccaaacccataatatct

SEQ ID NO: 253121 - DNA, 122 bp, Homo sapiens
ggaaagaaagcacacagccacttaaccaattggccgacatcaaggacttggccttccgagcgggttcttgtgaatatgctaactttgtaaagcgggcgcaccacgctgtgcttgctattcac

SEQ ID NO: 253122 - DNA, 122 bp, Homo sapiens
ggggggccggggccggacgcttgtctccctgtgcatggctcgggagggcgagggtggttgcgctgagcaacaggccaagtgcccgccctggtccggggatggctgcggagctgcacctgagg

SEQ ID NO: 253123 - DNA, 122 bp, Homo sapiens
caggacaggatggtaccttttccccacactggtcacagggtcagccccacttctgctggccggcgtcctccttcgtgacagcttcctggcactggcgctatgctcgggctgtgcatcctccc

SEQ ID NO: 253124 - DNA, 122 bp, Homo sapiens
agaggctctccctggatgatggttaagacgaagaagaggctgtccctggaagatggttaacgtgcagaagaggctgtccctggatgatggttaacacgcagaagaggctgtccctggaagat

SEQ ID NO: 253125 - DNA, 122 bp, Homo sapiens
ccagcccctgagaagctccgaggaagagcagtatttagtttctcgtaactgtttcctaagcgtaaatagaaatgtctaattatgttgcagtctccttcatctactctccttgccaatctctt

SEQ ID NO: 253126 - DNA, 122 bp, Homo sapiens
gcaaggatctccgagttgcgagtgtgctgaggctgggactgtcactcattctccgatcagcgcgtgaacgcagctcggctgccgctggcaggaaacaattctgcaaaaataatcatactcag

SEQ ID NO: 253127 - DNA, 122 bp, Homo sapiens
ggaaacctgcggttggattaatcgttatattcccgagatgagcgtcgctgcaatccgcagcgaacgcgggtagggacctggagacgcctcccgggcgctggcggggccggtgtgggccagct

SEQ ID NO: 253128 - DNA, 122 bp, Homo sapiens
cagtgcgatccccgtgaacacacccgtgaagctttgcttcccagcaactttcctgggggccgcgggcgaaggaacacccccagatgccgctgcgcagggacaggggacgcgcccagacgtag

SEQ ID NO: 253129 - DNA, 122 bp, Homo sapiens
aaaagctgggaaatttcccgggccaatggggaagcagtggagccggcagggaattactgccgggtaggagttcgcagaggagcaccttacttttggagtaggaggccatgctgcaaacccag

SEQ ID NO: 253130 - DNA, 122 bp, Homo sapiens
gtcatgaggggccagcctggagtctgtgcagagcttgggacccgcttaggcaggactgcccggggagcacatcgagggggccaggccgatgcctgggggtggagattacttgctgcagctgg

SEQ ID NO: 253131 - DNA, 122 bp, Homo sapiens
tatctaatgtgatttatgattggagtggtgggggcagacgtctttgtctaaaatgagaaacgaagctcgttctggatcttgtgtctggaaaggagaaatggagaaaggacaggcatttattt

SEQ ID NO: 253132 - DNA, 122 bp, Homo sapiens
ttttgactataaatggactatgctatttgctgtccccactgaacccagtggggaagcagccgacaatgggagcacagagttactactttttctgctggaacctcccaacatctacccagaga

SEQ ID NO: 253133 - DNA, 122 bp, Homo sapiens
accatggttcattccgacttttccaatggaaactcagatcccaaaagtccctaaagcagtcgtagagtctcaccatctccaaggattggtcttgagaacactgttcagtgacggccatgcag

SEQ ID NO: 253134 - DNA, 122 bp, Homo sapiens
catccctgagctgcacaaagcaccctttgtgccacgtcccggcgtgcaccggggccagtgcgcctgacatgaaaggacattgttgtccgtgacacagatgcattgttccctgggaaacaagg

SEQ ID NO: 253135 - DNA, 122 bp, Homo sapiens
tctctgcctcacaccggtccttctctgcctctctacagctggtcggactctgcctcacaccggtcagcctctgcttccctgtgtccggtgggcctctgccgccatctctacactgtactggc

SEQ ID NO: 253136 - DNA, 122 bp, Homo sapiens
agcgaccctcccgccttggcctcccaaagtgttggaattacaggtgtgagccactgcacccggctggtttccctttaagtgacactttcttgccataatgactgcctgggaggaaatcgttg

SEQ ID NO: 253137 - DNA, 122 bp, Homo sapiens
gttcgcaatctgacaggagtaagaaaaagttgctacgagaagaatgactcagctcccagccgagccttggtttcaccagaactgggcctttcctggacccagtaatcctgtttttcagacct

SEQ ID NO: 253138 - DNA, 122 bp, Homo sapiens
tttagggtaggctcctaggtcactgcgcaggactgctccgttacaggtgggcaggggaggcggctgcgttacaggtgggcaggggaggcggctgcgttacaggtgggcaggggaggcggctg

SEQ ID NO: 253139 - DNA, 122 bp, Homo sapiens
ggggaacaaatggggagctgagaaaaaacattgcctgtgactaacattcctgcctttggtcgatgagcgcctctgccttaaatttgcaaagctaaaagaaactgcctgggtgattgtttcca

SEQ ID NO: 253140 - DNA, 122 bp, Homo sapiens
cttctggcatcccctggcactcaccattgtctcaggatctcagcactagaaaataggtatcgttgagacaggaagacaccaccaccaccaccatcatacggttactcaggcaacaaagcccc

SEQ ID NO: 253141 - DNA, 122 bp, Homo sapiens
cggaaaggaggccaagagcgcgggcggcgaggcaagatggcggcaaccaagaggaaacggcgtggaggctttgcagttcaggcgaagaagccaaaaagaaacgaaatagatgcggagccgcc

SEQ ID NO: 253142 - DNA, 122 bp, Homo sapiens
taacatcttgcaaaaatgttgtgaagcatacaccaggatactgacagagtcagggtattgcgcatttccaccttcacaagaatccagactttccctttcacagccacatccacttccctcca

SEQ ID NO: 253143 - DNA, 122 bp, Homo sapiens
tgggatttagggtgcgggtagcggtcgaggcttcgaggaccggaaggggcggggcggggccggtcactcaccactccgccgagcaggaccgcgggagcccgccccccactcatgcggcctac

SEQ ID NO: 253144 - DNA, 122 bp, Homo sapiens
ttggataatacagttagcttaatattcgccatctttaagggtagcagttaattttgtgaacgttatctctgcctgcgtggagggttgcagtgagagaggccagggctcctggatgttgaggt

SEQ ID NO: 253145 - DNA, 122 bp, Homo sapiens
ctgctgcccatcaacaagcacccaaaacagatagacgtacagtaggaagtacaggagggccggtgtgtttctaagcatgagtggctctctgcgtgaatgtggaaaatttctctgttggattc

SEQ ID NO: 253146 - DNA, 122 bp, Homo sapiens
cgggtgggtgggagcacacagcagggacccagtgccttctagaacacagctagcagttcccgtgaaaatcaaaacaccccattttacaggtaaggaggctctgggaggagtggcttgccaca

SEQ ID NO: 253147 - DNA, 122 bp, Homo sapiens
ccggggcggggctgcgctctcggtcctgcggctcccgcgccaggcacggcagccgcagcccggccttcccagttcagcccgctccgcgccccagcctgcaagcagaagggagggagggagta

SEQ ID NO: 253148 - DNA, 122 bp, Homo sapiens
ttggcttcaagatcttgcagctggatcagaatgctgagttcatcgttgctggtgggccgccgtcacctctccttagcccccctgttgaaggatggccggcccctcctgggaaaattgctaca

SEQ ID NO: 253149 - DNA, 122 bp, Homo sapiens
attttcctactgtatgtgatgacactgtttttttttcttacaccactttgaaaactaccacgtcctgttgctgtggtgttaaagtttttcaccgtaggtttgcttattctttaagaagcagt

SEQ ID NO: 253150 - DNA, 122 bp, Homo sapiens
aaggaagtgcaaacaatgtgtcccctcttcctgtgacctagcctcacctgtctgcagaatcgggatgtgggccttattcacaaccacctctatgcacttgccaacgctgcctctctgtttca

SEQ ID NO: 253151 - DNA, 122 bp, Homo sapiens
gcataagacaatatgaggggtggtctcccttcaagctatctgcgtctgtctttgtgtgtccgtgtgtgtgtgcccgggtgtggtgtgtgtgtgtgtgtgtctgcccgcgtgcacccgtgtgt

SEQ ID NO: 253152 - DNA, 122 bp, Homo sapiens
gagagcagggacagaccgtttcctaaatgctacactcccctccccagaaatgttccgagacggggccacagcagggaagagtcacaggttttgcttgctgtggacctctgacgctgtgaata

SEQ ID NO: 253153 - DNA, 122 bp, Homo sapiens
tctggcagcgctgcatccccggggttgcttcgggttcgggcccaatagcagagtcagagccgagacgcatgtcccctgcaccggccaagggtgccgctggggctcgcgccaaggaggcaaag

SEQ ID NO: 253154 - DNA, 122 bp, Homo sapiens
cactgtgcccccagtggtaactgtggatcatcaatggccacaacgactgcccacagaagccgggttgccaaggaaacagcctagtacttgctccttaattcctggcttcagtgtaactgttg

SEQ ID NO: 253155 - DNA, 122 bp, Homo sapiens
caacgggcgctacgtgtgcatgaagaagaatgggcagctggcggctatcagcgattttgtcggtgagcactctgcctgccaggtactggggcaggggctgtctccacccagggaaaggacct

SEQ ID NO: 253156 - DNA, 122 bp, Homo sapiens
agaagcacccacaaaactagcatcctcctggaggagctcgggtaagaaaacagacacccacgtatagacgttatcgtgggaatgtaccgggatctttcaagtagggttgagtgtgaggtgga

SEQ ID NO: 253157 - DNA, 122 bp, Homo sapiens
gtgaagggggcttgctggagaacctggtgtcaccagcatgtgccagggccaagggctggccggaggggcggcactctccacagactccaaccacgccagccccaggcagagacgccacggct

SEQ ID NO: 253158 - DNA, 122 bp, Homo sapiens
cagggctcgggatgtgtcgagctgctggagtccaaagtcaggcatttccctgcctctgcccggtaaagctatgggtcccaggctcccgttctaagggaaggggatgtctgcgtctcattggg

SEQ ID NO: 253159 - DNA, 122 bp, Homo sapiens
gggagtaatatcacccgcttctcccccgcgccggatattacgatccaaatcgcaggggggcgaggctccccccgcgaagctgggagtaaaagccagcccctcttgcccgcctggctcttagg

SEQ ID NO: 253160 - DNA, 122 bp, Homo sapiens
tggcagaggaacctcagcttaaatagtgtggagcggccactggtttccgcggctcgtagtcgcgcccgcgaggaaacgccagggaggcttcctgccccgcccagcggtggcccagggcacag

SEQ ID NO: 253161 - DNA, 122 bp, Homo sapiens
tttaaatcatatctgaatcgcactaaaacgacctttaatattctgcgtaagtgaaagggccgtgaagcactgcctcactcggtctcatgacagcagcagacctcacagaggcgggtcatgga

SEQ ID NO: 253162 - DNA, 122 bp, Homo sapiens
cagcgggcaccgcctggaggcgccttcaccacttggcggttccgggtccgcgccccaccgcgccacaagactcacgcccgaaccacgtgatcagggccgtggctccgccccgctcccgcgcc

SEQ ID NO: 253163 - DNA, 122 bp, Homo sapiens
cgaagggcacgggcatgagaaggcgacagaggaggtcctcggctcgccctgggcgcggagcgaggactctggtcagaggtaattatgtcaccgcgttttctcgccgtgacagccgaataaac

SEQ ID NO: 253164 - DNA, 122 bp, Homo sapiens
caggttctggtgtggctgccagcatgtgctctgctcccaggccggggcgggcagggggaacgcttggttctgtcctcaccgcacaccacccagcatctgcgggatgtgcacacagagacgca

SEQ ID NO: 253165 - DNA, 122 bp, Homo sapiens
gcttggctgtggggctgtgaggatgagctggaggcaggtggaagcttgatttttgagtgtcgcaaatactggactgatgactcggaacttgacttggtagtggggggcagtggtagtcttgt

SEQ ID NO: 253166 - DNA, 122 bp, Homo sapiens
tctgtggggctcagggacaaatacgagctgctggccctcaccattaggagccatgggacccgactaggtcggctgaaaaatgattatcttaaagtataggtggaaggatacaaatgctagaa

SEQ ID NO: 253167 - DNA, 122 bp, Homo sapiens
cggagccccagccatcctccgtagaagggtccctgccgcagtgcggggcctgagggaagtcggctctggcgtccgtgctccaacgctgggagcagccctgaaactccagtgaccctcagccg

SEQ ID NO: 253168 - DNA, 122 bp, Homo sapiens
gtgaattttcttccgtggattccgatttgctccgtctgaccagcctaggcaatccagcatcgcgtggtaccagtgccgctgggcacactggcttcacgccggctccgcctcaccagcaagcg

SEQ ID NO: 253169 - DNA, 122 bp, Homo sapiens
acctccggcggggggtctccgtagatcatgggtaggttcttgccagcctccaagtcacttcgtggcttccgttcgggctcctcaatctccatctgcttattccgctgcagccgggcctcctc

SEQ ID NO: 253170 - DNA, 122 bp, Homo sapiens
cactctaagatgggagagctagagaagccctgtggggtgtccagggtcctttctgaatcccggagcacggtctttcgagcctcagcgggcgggcggggatccgtggcgaaagtgcagctcag

SEQ ID NO: 253171 - DNA, 122 bp, Homo sapiens
gtgcattagaagggcctgcaccagtcaaattcggggattaaagcttttaagcgggaagcgcgcgccccgtgctgtccctttaaagcgttgggccggcccgaggcattctggccgctgtcgct

SEQ ID NO: 253172 - DNA, 122 bp, Homo sapiens
accagggacaggagagccataactttgtctttcgtgaggggaatgggatgcagccgggatcgagcaccagtgagccgccagtgtacagacctccgagcgtgcccaggaccaccaaggaaggt

SEQ ID NO: 253173 - DNA, 122 bp, Homo sapiens
aggcgcgatgaaggagaagtccaagaatgcggccaagaccaggagggagaaggaaaatggcgagttttacgagcttgccaagctgctcccgctgccgtcggccatcacttcgcagctggaca

SEQ ID NO: 253174 - DNA, 122 bp, Homo sapiens
gcccctccagcttgacaggtggggggtctagctttctccatccaacctaccatttggtttcgtcaggatttggtctgcccttggccttgtggctctttgtgtctggggcatgacatttattt

SEQ ID NO: 253175 - DNA, 122 bp, Homo sapiens
actgacggttgcacacgcgggaccgagagactgggctctgttggggccccctttgttcctcgagcttccttcctgttctgggaggcggcttgggaggccgcgacaaggccgggctccagctc

SEQ ID NO: 253176 - DNA, 122 bp, Homo sapiens
ccgccctcggggtgcgaggcggcagcagggccgtcccctacatttgcatagcccctgggacgtggcgctgcacccaagcctcttctcagttggagggaactccaagtcccacagtgccacgg

SEQ ID NO: 253177 - DNA, 122 bp, Homo sapiens
gtaaagggaagggtgggcttaatgggagctttgcctgggacctgaacctggagcacttaccgcattaggaagaaaggagctccccgtaatcgttcctgacccttgtgtctcatataccctat

SEQ ID NO: 253178 - DNA, 122 bp, Homo sapiens
catccataagcaccacagtttttgaactttgtgtgatgaaatcatacattatgtacccctcggtgtctggcttcttcgctcaacattatgtttgtgagacgttcatctgtgttgcttcccaa

SEQ ID NO: 253179 - DNA, 122 bp, Homo sapiens
tcaactgtctcctggccgaggactgcttcaagcttaattaacatggatactgcttactaccgcccactcctcccaaccctccaaaaaaaaacccccaaattcagaaaacaaaacaaaaaata

SEQ ID NO: 253180 - DNA, 122 bp, Homo sapiens
gagtagctgggattacaggtgtgtgccaccacacccagctaacttctgtgtttttagtagcgacagggtttcaccatgttggccaggctggtgtggaactcctgacctcaggtgatccaccc

SEQ ID NO: 253181 - DNA, 122 bp, Homo sapiens
ggagctctgcccagctcccaaaagagcctcctcacaaagccagtcactgagcccgagcagcgcggtcgcccctgacgcggcaccttccttccaggctcctacctggctcagggcgtccagcg

SEQ ID NO: 253182 - DNA, 122 bp, Homo sapiens
ccttctgattgaaactcttccccatactggccccaggctctgcccagccccagactgctccgcctccaaagcgcatctctgaaagggctgagggacaacaggtagctggaaaataccaggga

SEQ ID NO: 253183 - DNA, 122 bp, Homo sapiens
tcgaactcctgatctcaagtgatccgcccgcctcgcctcccaaagtgctgggattacaggcgtgagccacggcacccagcctgcttagctttttggtaaagcattatgagactaaaccaggg

SEQ ID NO: 253184 - DNA, 122 bp, Homo sapiens
agacccgcagggacaggacagccagccagaagttccaggcaggaacagggcaggttcctgcgggcaggtcctgagtcacactgacagagaaccacggagacgccaggactccccgcagcaga

SEQ ID NO: 253185 - DNA, 122 bp, Homo sapiens
ctgggaataagcgagatctgaaagacccccaagaggagcttgtttgggagtgggggcagacggcgttttgcgcccaactggtaagtggcagcattaaatctatgcagacatggaggaaataa

SEQ ID NO: 253186 - DNA, 122 bp, Homo sapiens
cgggctccaatcagctagagcgtgatgtaagtgtttagcagctgccgggctctgaattagcgtgctgaagtagaggtagtacagcatggctagactgttgtgagaggctcagagaaagcaga

SEQ ID NO: 253187 - DNA, 122 bp, Homo sapiens
cactcttcccggctggatggtcaattagctctggcatgagagaatgtcactgccggtgagcgccagcttcagggtcccacccccccatgcctggctcttggctgaacatttcttcccagcgc

SEQ ID NO: 253188 - DNA, 122 bp, Homo sapiens
cacccatttgggtgaacaatctggattacctccttggcaggccaggttcccaacaggaggcgggcctgatgaagggctggtgggcgtgttcccgcccaaggtccgtgttggcccgcgcggtg

SEQ ID NO: 253189 - DNA, 122 bp, Homo sapiens
ctgagcagtgttgggtaaacagaccgaagcccaagatgctggacgtgcctccagtactttcgtagtaggctctagaagctttcccaccacagtgacaaattacgcagaaacaaaacacgagg

SEQ ID NO: 253190 - DNA, 122 bp, Homo sapiens
aagaggttctgaaaaaactatagtaacgggaggcgaggcggaggcagcgctggcgcgtcccgctggaattcctctcgcctgccgcgccagccccgaccgcgcccgcagccccacccgccccg

SEQ ID NO: 253191 - DNA, 122 bp, Homo sapiens
cgtatcacgcaccacgcaccacgcaccgcgcacagccgctcgcgcttgcgcgactgcgggcgagattccgaatccatcgcttccggaaaactcaccaataagaaacctctgtccacccccac

SEQ ID NO: 253192 - DNA, 122 bp, Homo sapiens
ttaccgaacagcgccctctgtagcccagtgctcagaacgggccttttcatgatgttcctgcgttgtgtttacagcctccctgtgagggggttgcgcgcacaggtggacctcgttttattgcg

SEQ ID NO: 253193 - DNA, 122 bp, Homo sapiens
ataggaggagacacccctacagctactgtaagtttatgatggagaacatgcaaggatcctcgcagctttcaagaggagggctgggaaacctttctctccacacacacacatacatacataca

SEQ ID NO: 253194 - DNA, 122 bp, Homo sapiens
cctcccactccgcacaaactacctatacggcaagatcaagaagacgctgcctgagctgtacgccttcaccatctgcctgtggctgcggtccagcgcctcaccaggcattggcacccccttct

SEQ ID NO: 253195 - DNA, 122 bp, Homo sapiens
agcctgggtaacatagcgagaccccctctctacaaataataatttaaaaattaggtgatgcgcacctggtggtcccagctacttgggagactgaggttggaggattacttgagcctgggaag

SEQ ID NO: 253196 - DNA, 122 bp, Homo sapiens
ccccaggggcttgtagtggttgggagctgggcctggctactggctacgtggcagccccagcgcacatgtgggatgagacactttggcaaaggccatgtttgcagggaaaacacttgcaacca

SEQ ID NO: 253197 - DNA, 122 bp, Homo sapiens
acaccagcactaagagaaaggctggcctggtcctcgtcaagagccactgtgtccttcccacggacacgacctgcatctgctgcttgcagagagagggactcacaaggaagagccttcacaga

SEQ ID NO: 253198 - DNA, 122 bp, Homo sapiens
cccatggcagctacataattaattcgcccataaataactgattggggtcgcgcacgcgcccggtgtccctaggactgggatccccgttagggttaggggcgtggggggtcgggggccgcggg

SEQ ID NO: 253199 - DNA, 122 bp, Homo sapiens
aggatgtcagacagtgatacaattcccttgaccacatcattttcatccaccactacaagtcggtgaacctggcacagagcaacaagggagaaagggaatgtttagtgctggcctcaggggaa

SEQ ID NO: 253200 - DNA, 122 bp, Homo sapiens
ttgaatgttctcagtaggagaactagatgctccattagatttgtcctcacatggaggccccggggaaagtgtgtcttggagttccttcagccactaggtagggctgggtctagtcttaattt

SEQ ID NO: 253201 - DNA, 122 bp, Homo sapiens
tgtgccagctctcccagggcatctacctgaccaacaggtacatgagcatcagcctggtcacggccatcgccgtggaccgctatgtggccgtgcggcacccgctgcgtgcccgcgggctgcgg

SEQ ID NO: 253202 - DNA, 122 bp, Homo sapiens
gccaaacagaacgctctttccgtttgcagtttttttagtgtcattttaagttgcagcttccggccaatcagcgagcttcatgcctgctgacatcacgaaccagccagttccctccagctgca

SEQ ID NO: 253203 - DNA, 122 bp, Homo sapiens
aactcttccctctcaaatgggcaagagtaactcttcagcaccatggagaggtccgggcagcgtgttacaacgtgggactgtgaccagggcaagcactctgacagtgtaagttttacaaatgt

SEQ ID NO: 253204 - DNA, 122 bp, Homo sapiens
gagcttctgaggcaagaagtggctcccaggccggctctgcgggttcccggcccgggtggacgtacaaagttgccccttgtcaactccggccaggtcccccgtaattgaaaataacagccacc

SEQ ID NO: 253205 - DNA, 122 bp, Homo sapiens
catcccagcctgggcgacagatcgagactccagagtttgagaccagcctgggcgacagatcgagactccagagtttgagaccagcctgggcaatgtagtgaaaccttgtttctacaaaacac

SEQ ID NO: 253206 - DNA, 122 bp, Homo sapiens
agccgcgggctgggccagcgccggccccgcccctttaacccgcccgcgcccgccgcattccgcggggaagtgtaggctttaggcctcttagggcctcagtttccccgtctgttcgaagactg

SEQ ID NO: 253207 - DNA, 122 bp, Homo sapiens
ggctaaaggcggcgtcggaaaaggcagtcagggggctgagcgtcaggcgtcccggccacacgcagagcaccgtctcggcctctgtgggacacagacaaaggcgcggcgtcaggtggcggctg

SEQ ID NO: 253208 - DNA, 122 bp, Homo sapiens
caggcgtggtggctcgcacctgtagtcccagctactcaggaggctgaggctgaaggactgcgtcagcctaggtcaaggctgcagtgagccctgattacaccactgtactactccagcctggg

SEQ ID NO: 253209 - DNA, 122 bp, Homo sapiens
ctgtagctccaactcctgagagctggtgacacgcccagcccgtagccacctttcgccctgcgtgaacttggcaggggagtcgaccattaaatactgagcagaggctcaaaccgagagagaag

SEQ ID NO: 253210 - DNA, 122 bp, Homo sapiens
gctggcggccccgggcagtgagaggcttagcaccgaggccagcagctgcggagggtgcgccgggtctccctagcagtactggcccactggcgctgcgctcaatttctcgccgggccttagct

SEQ ID NO: 253211 - DNA, 122 bp, Homo sapiens
ataaggtattcagctcttagtaattgtgcattaaatgtttgtttactaactgcctagcaacgtaataaggctgttggatttgacagaacttgcagaaaataagtgctgattgtttctcagag

SEQ ID NO: 253212 - DNA, 122 bp, Homo sapiens
caggaaaacaggaccttggctgaattaacctgcaggtccagcctctgttctcacggtgttcgccagcacccagacagcactgcagatcgcagagcagacggcaccccttctgttactcaccg

SEQ ID NO: 253213 - DNA, 122 bp, Homo sapiens
ccatataactatttaaattaaatacaatgacataaaatttaaaaatctgttctttagttgcgctagctacatttcaacggctcaatagccacatggagccagtggcttctgtattggacaga

SEQ ID NO: 253214 - DNA, 122 bp, Homo sapiens
aatgccttaagtgccaacggaaagactggtttggccagtgctgacgttttcacgcatgcccgcatgcacacatgaggatgtaggaacattatgtgtaagttgttttctggggaacagcagct

SEQ ID NO: 253215 - DNA, 122 bp, Homo sapiens
cgatttcctccggggctgcccagttatctctggagtcgcagaactgctctcgggagaacgcgttctctaccccaaccccgtgctcctcaacccacccacctacttcctctagctccacacac

SEQ ID NO: 253216 - DNA, 122 bp, Homo sapiens
actggctctgatattccagaagcctttaactacggtttgaaagtcccaggtggaagttgccgcccatccctgaggttcctcctgagctctgggcccagggctttaggtcctgctagggtatg

SEQ ID NO: 253217 - DNA, 122 bp, Homo sapiens
tccaaattgtggggaatcagtttcagccttccatgtgctgccggaactcgggcctttttacgcggttcgtcctctagtgcctttaactgcgttactacaataaaaggctgcggcagcgcctt

SEQ ID NO: 253218 - DNA, 122 bp, Homo sapiens
cccttgtgcctagaaagcagcctcactccagcacaagcctgggcaggtgcagcctcggtgcgcagtttggaaggggtgacgcgcaggtctgagaatgggtgggcagtgggggtggagttcac

SEQ ID NO: 253219 - DNA, 122 bp, Homo sapiens
cacttccgtaagagatgtgggcaatggaaagggatacttatggaagtacaacagggtttacgtaaaagttcattaggcttcaggagggtagcatttgccttatggaagagagtgggtctctt

SEQ ID NO: 253220 - DNA, 122 bp, Homo sapiens
acacggcatcccctggctgctgggcaccctctactgcctgtgcaggagcgacagctgggccgggcgcgaggtgctgatgaacctgctcttcgccctgctgttggacctgctgctggtggcct

SEQ ID NO: 253221 - DNA, 122 bp, Homo sapiens
agacagatatgttccatgtatccagtggctcagcctcaaggaaagggagagttgggactacgtcatttcataggaggggaggcgtgccatgaattatacaccctggcttctctgggattaga

SEQ ID NO: 253222 - DNA, 122 bp, Homo sapiens
ccgctccaaaatagaagccccttcccacccactgccgcggccgctcttccaaacactgctcgcccccacgctggctcccgacaagccccggcccccggagtcaggccgcccggggtccgaat

SEQ ID NO: 253223 - DNA, 122 bp, Homo sapiens
acgcctcgcaacctctgaaccagagcataaccccgaggggtggacggagaaatacggcttcggagcagggagcgatgggccggggctggggcgccgccctgcctcgcgcaaagaagggggac

SEQ ID NO: 253224 - DNA, 122 bp, Homo sapiens
aagtgtgtttagcagtgctcccttatgttaatagaagaattgtcctgccttctttagccacgctcacatattggatggttaaagttgctaggtaccagccccatgaggatagtctgtggtct

SEQ ID NO: 253225 - DNA, 122 bp, Homo sapiens
tggcttccggccccatgctgacagggcccggacccgctgtgctcaggctcagagaaccatcgccaacagcacaggctgacgggaactggcaaggggaagggactcggactccacttgctctt

SEQ ID NO: 253226 - DNA, 122 bp, Homo sapiens
actccccaagggccaaatcggaccgcctctcactaggcggaaagttttgaaacttttgcgcgctaaaaatgatgagccagacgcatgcgcaaacgtgcactcccggggtggcgcttctcctc

SEQ ID NO: 253227 - DNA, 122 bp, Homo sapiens
cttagtcaggtagtaatagaggacgcactcagccactgtctgtgggacagagaaagaggacgctgagcagggtacagcacaggcattcagggcaggagccaggagctcacatcctgggctca

SEQ ID NO: 253228 - DNA, 122 bp, Homo sapiens
catagaagacatctgtgacgaaatgtggggtgtagttttccctacacaccaagtggtagacgccagctagatgtccttcaattcaattccgaacctgtctacctggtgataatgtcagatcc

SEQ ID NO: 253229 - DNA, 122 bp, Homo sapiens
actttccaccttcatgcgtggggcaggactgagagggccctcaaaccaacacgctcaggccgcagagagtgacaaaaagtttattctgtgcttctcgcagcattaggcaggggataaaactg

SEQ ID NO: 253230 - DNA, 122 bp, Homo sapiens
actcatgacggaagttgccgctcgcccacttgtgcagcagcgtacttttccccacaccagcggtgccgactaccacgacgcggtaatctctgatcttcctgtggggcttgaaggcgcggagg

SEQ ID NO: 253231 - DNA, 122 bp, Homo sapiens
cctgagcctataaaagacatattcagctccagcacctcatctgctctgacttccccaggacgtgtctgtgctcctgtgtgtgaccagggtgagtggcaacctgggagccagagggcacaggg

SEQ ID NO: 253232 - DNA, 122 bp, Homo sapiens
aggctccgcgcgcaggagcctacggctgcggggaggctccggcatggcgggctgcaggtccggtgccctgctctgcagggaggcagctgaggcccggcgagaattccagcgcagtgccggcg

SEQ ID NO: 253233 - DNA, 122 bp, Homo sapiens
ggggcagggagagaggtcctggcccctgagtgaccgaggataggtgacctggcttctggccgagctaagggagagagagagaccccactttttggtgcacacgcccatgtgtatctgtagga

SEQ ID NO: 253234 - DNA, 122 bp, Homo sapiens
gtataaggcgtgcaagcttaaatttttaaggcgttaaatagctactttgactcttcggggcgcctttggaacacaaaaggaagaacggaggggagaatggaatggttggaggctggagaggt

SEQ ID NO: 253235 - DNA, 122 bp, Homo sapiens
cttggaataatatgagaaccggcaagactatctttgatttagattttgtatggagtcctgcgaagagtcatttcactaagacgttaatgctcatccgatgacactacttgaaaagtgtatta

SEQ ID NO: 253236 - DNA, 122 bp, Homo sapiens
tcgtctgtgctgaagcaggcagcgcccagctgacgactgtcaatgcagccctagcaaacacggccacgctgccctccatccagggtcctgtccagtgctgtgctaagcacttcacgtggtga

SEQ ID NO: 253237 - DNA, 122 bp, Homo sapiens
gcagagcctggggatcacagcaaagcagccgcggggagtccccccaatggaggcagagcccggggctcacagcaaagcggctgcggggcatcactactaccatccactcctggggcttttgc

SEQ ID NO: 253238 - DNA, 122 bp, Homo sapiens
tcggctgcaggctcgggtccccgctcccgagcgccctggccggggagggagggcgcaccccgccccctgcgcccgccagcctactcctgccggcggaaaacaacaggagcgggatccctccc

SEQ ID NO: 253239 - DNA, 122 bp, Homo sapiens
cagtgcatgcaccgcccaggttccggtcagttttgctcccacagtcatcaccctggagggcgtttcatgttgttgctgtgagaatttgccgttgcttgagtgagtcatgctgacgtggcccc

SEQ ID NO: 253240 - DNA, 122 bp, Homo sapiens
gaatttgccctcagacctggaccctaccagggaacagcgggattgtctgatggaattccacgtgcaaaccgagagaggttttgccataaattctagtccggccccgggaggagggccacgcc

SEQ ID NO: 253241 - DNA, 122 bp, Homo sapiens
agaattcacagtggaaagtgaagatttttaattccaaacagcatgttcagaatactaccacgctcatggtagtaggctgtcagccttcgcatctgtgtagtaataaagcccaactaatttgg

SEQ ID NO: 253242 - DNA, 122 bp, Homo sapiens
cagtagtaagctcttcaaatttagattttgggcttgctcatttagcgttctttccattcacgtcctcacagttggggtgcataccccctcaagaatagagccacagactgagagtctgatct

SEQ ID NO: 253243 - DNA, 122 bp, Homo sapiens
ccgcctgctccgggatgtggggaataccttgcgcaggtggttctgcctgtgtccagagggcggccagggctggcatcggactcttccactgtgtccggagatttgaagagggtgggagtggg

SEQ ID NO: 253244 - DNA, 122 bp, Homo sapiens
tcctgtcatcggctgcttgctgctccttgagacaatccaacctgctctgcatcatgaactcgcgccgccgccgctgctccttggccttcaccaggtgctgcttcctctcctccttgctccag

SEQ ID NO: 253245 - DNA, 122 bp, Homo sapiens
gtgaatttattttctttgtatctccagcactgactagaaattcagaaaaaatttttaaaacggaaataaaacaagttatgtgaaaatacagaaggataccttaaagaacaggtttttttaac

SEQ ID NO: 253246 - DNA, 122 bp, Homo sapiens
tcgatgagacttcatcctctcctgttgcttctccaggtacccagagagtgagcagctccacgcgggactgtgcacggtggccgacacccgcagggacgcccgccggacgagcacgcggaggg

SEQ ID NO: 253247 - DNA, 122 bp, Homo sapiens
atgacacaatgtagccactggcagaatggcataagctcagaatgtgaactcagtgtccagcggagagagagagaaaaaagaaacttggaaacatgtgcctagactaatagatcctggcttaa

SEQ ID NO: 253248 - DNA, 122 bp, Homo sapiens
atgaattttggaacattacatgtgaggagtcgaagggaatgaagactgttgcgacctgaacgtggaaacacaggagactagaacttgagcaggccacactgccacggtgcagccaagagacc

SEQ ID NO: 253249 - DNA, 122 bp, Homo sapiens
agtcactgcatcccgaggactcgtagatgttccttccacagcccgagtctcttctggaaacgtggccagggcaggaaggctctgcagatccatctctctaagtggccatgtctttagtcaga

SEQ ID NO: 253250 - DNA, 122 bp, Homo sapiens
aggggcagctccgcgtaccacagtcctcgccagtgtagccggggtcacacacgcagcgcccgtccttgcagcgtccccgctggctgcagccccgagggcagctcctcaccccacagtcctcg

SEQ ID NO: 253251 - DNA, 122 bp, Homo sapiens
caggcacaggagcaaggggctctagctgcgtccactccccagggttaaaaattaactgtccggccttgctggcatctctgttgacaacgcgatcattcctgctgggagcgagtgcgccacag

SEQ ID NO: 253252 - DNA, 122 bp, Homo sapiens
agttgctgggagtaggttcacagctagagcccagcctgcggggtatgttcatgtcccttccggtttcaaaggaattcagtctatcaggtacaatatctctccctcaggtctgaacaaggaat

SEQ ID NO: 253253 - DNA, 122 bp, Homo sapiens
ctggtcacacccctgtgtgatatgtgatgccctcggcaaagaatctactggaatagattccgaggagcaggagtgctcaataaaatgttggtttccagcagtctctggtcctctctgggggg

SEQ ID NO: 253254 - DNA, 122 bp, Homo sapiens
taaatgactcccaggagctcttccagctgtgctccagaattccttaagcagtgccaacctcgctgttcctccgaccgcttcttccctttccagcccttccctccagcggcttctgttctcta

SEQ ID NO: 253255 - DNA, 122 bp, Homo sapiens
tgaaagggacctcaacaatgactccactggggctgatatggccagagaggggaagggacccgtccagggccactcagggagccagcggcagcacagatgcacccccagccagctctgtcctc

SEQ ID NO: 253256 - DNA, 122 bp, Homo sapiens
cagggatcactggggccatctggaagctggctaccacatatataaaacaatattttgtagcgcttttaaaaaatatatttgtattaaaaatataaaaacacatgctatattatgccccctct

SEQ ID NO: 253257 - DNA, 122 bp, Homo sapiens
gcttagttccacgttctccaaccgtcgctccggtgacccttcgacctggattcgagcccccgtgatggacgccacttgccaagaccagctcagtgctaacccagtggtgctagaggaattaa

SEQ ID NO: 253258 - DNA, 122 bp, Homo sapiens
ggggaaccgaaggccccgccccgcgggaggtgccggccggccccttgggcgctacgcacgcgcacacaggccgaactctcctggcgggacactagcccgtccgcgccaaaacctagcgggga

SEQ ID NO: 253259 - DNA, 122 bp, Homo sapiens
tggaatgatcctaatagatatagccagaccggttttgcggaaacgctttgtgctgagaaccgcaagctggtgcaccctgtgtcatatctgcccccagccagctggaattgtctgcaacacgc

SEQ ID NO: 253260 - DNA, 122 bp, Homo sapiens
acactttccacattcctggggccaggagattgacaggggccttagagggtatggagctcgcggcatcccgcttagtttgaagttgcagccttcgcaccccaagacttcccccttccccaggg

SEQ ID NO: 253261 - DNA, 122 bp, Homo sapiens
ccttatatattctcattgaggaaatgaaatctgagccaagacttcaaagaagggaggggccggccagtggatatttgggtgaagagcatcaaagcacatatcaagaccctgaagggattttt

SEQ ID NO: 253262 - DNA, 122 bp, Homo sapiens
cagctggagagagacggagtcaggatttgaacccaaagagtccggttccaggcactcacgcgtgaggctgctgttgctgtgctattggaagagctgctgcttcctatgctgagcctccacgc

SEQ ID NO: 253263 - DNA, 122 bp, Homo sapiens
ttcggggatcccaagaagctgctcacccaatatttcgtgcaggaaaactacctggagtaccggcaggtccccggcagtgatcctgcatgctatgagttcctgtggggtccaagggccctcat

SEQ ID NO: 253264 - DNA, 122 bp, Homo sapiens
ggctctgctgtccgctcgccgggcccccacgtgacctactgcgcgggccgccgcctccaccgcgcccaggccccgcccccgtgacgtctcatcgccctctgcctgtccgagcgttcggctct

SEQ ID NO: 253265 - DNA, 122 bp, Homo sapiens
ttggggaccttgtcatttactccctgcaagcccgtgtttccctgtgctgacctcgggacccgttgtccttgctcgatgcctgcggtccctgctgagctgaggctccatcctccacctgcgcc

SEQ ID NO: 253266 - DNA, 122 bp, Homo sapiens
gaggggcaggacgaggctgcatgggccagcgagggggtcgacaccgagccagagtgagcgcggggcctggggcgcagagcccgcccagggagccgggagacgccgcgcaagctccccggaca

SEQ ID NO: 253267 - DNA, 122 bp, Homo sapiens
ttttccttatatatcttttaactgtcatcactcctaacctagacctagagtggctttttccggtcctagctctgccggacacacgctctgcccagagacccgatccacccaaggccaggcgg

SEQ ID NO: 253268 - DNA, 122 bp, Homo sapiens
gcgggaggagatgactttgcaggaattgcgctcccagagtttgccggcagatctctcccgcgatggcccggccaaggggttaggaaacattcctgccattccgtgctctcccctaccccaca

SEQ ID NO: 253269 - DNA, 122 bp, Homo sapiens
cgccctctccggggacaatgggcgggtgcttcgcaggctgcagtcagggccgacttcacccggcgaggacagggcgaggcgctgggcccagaggtatgtttgaaacgattcgcgtatgtgaa

SEQ ID NO: 253270 - DNA, 122 bp, Homo sapiens
gaatcgaggctgtggacgaccacccaacacaagaactggactaagtccaagtaacactgacgcacagcgcctccctcgtttgccctcattctcgaccttgactttggctggtagacatgatg

SEQ ID NO: 253271 - DNA, 122 bp, Homo sapiens
ggcatcacagaggagctgctacggagccagctatatccagaggtgccacccgaggagttccgcccctttctggcaaagatgagggggattcttaaggtactgctcttttctgtagtctccgg

SEQ ID NO: 253272 - DNA, 122 bp, Homo sapiens
atccatggtagccattgttaggcgcgcttcagtcgcgtgtctccaggcctttgcacaggccgttccctctgccaggaatccccaggccacctcttcagggagtcctccgggcctactgctcc

SEQ ID NO: 253273 - DNA, 122 bp, Homo sapiens
gagagcctcccagcccgccccgtgccccgcccgcccggctgcttccgcggcggcgctgcccgcacatgggctaggctgccaggatgttcagcttcgaaggcgacttcaagacgcggcccaag

SEQ ID NO: 253274 - DNA, 122 bp, Homo sapiens
ggtctccaactgcaccacaggccgcacccacgaacctggtccggcacagttactaccgcccgggcctccaggcctcagggctgcagaagctcagtcccgggaaaaaaagcacaccggcctga

SEQ ID NO: 253275 - DNA, 122 bp, Homo sapiens
ttaacataagtgctctgggggtgagtgtggcacggccagccacagagaaatcacactgctcgcccacaattcggatgtctcagagggagggggaaaaaagatggttaaaaagtcgagcttac

SEQ ID NO: 253276 - DNA, 122 bp, Homo sapiens
accgatgactcacagctcacagaagtcaaccaaaaaatagtagaatgaaaggaaagccatcggtagacagccagtaagtacatcatgataacaactgctgtacgagcacacacacaggcaca

SEQ ID NO: 253277 - DNA, 122 bp, Homo sapiens
ctaacacacaaaacgtccttctgcgggaagccagcactaggaaagaaaaaaaaaaaaatccgaagtgaaattatgacacagggttttgtaacccgcggtggcgcgcttctgaaacccgagcc

SEQ ID NO: 253278 - DNA, 122 bp, Homo sapiens
ttggcaggatacgggggaacaggatttgagcccggccaggctgactgcagagcttgaggacggtgctactaccctgccaatggaccccgctgtaggctgcttcccagacgaagttccctaag

SEQ ID NO: 253279 - DNA, 122 bp, Homo sapiens
tactatgaattattgtattaacttcatttattttttttcaataattatttgcaattaattcggctgatgggctaaactctccagaagatacaaatatgtgaacaacactgtctagtcttgca

SEQ ID NO: 253280 - DNA, 122 bp, Homo sapiens
ccacgtcgcccacctaagcgtgaacagctgcgtcgcggacgccgccttccggcagggacccgcgccccaggtaagcgttagtcccgccttcaggagtgcggagcctcccattggacgaggtc

SEQ ID NO: 253281 - DNA, 122 bp, Homo sapiens
gcaggcttcacgttaaagttacaagtgagttggacccagaaggcagaattacagccagaacgtagctgtgcatcatgtcttgaaaataaacgagcacatgtaataaaggtaatcaagattgt

SEQ ID NO: 253282 - DNA, 122 bp, Homo sapiens
aatccgggagtggctgaaatccaagctgagggtaatgaaaggtgctgctcctaagccgcacgtctctgatccgccctccccgcccgccctctgctgcccgcgggccctctaagagctgccca

SEQ ID NO: 253283 - DNA, 122 bp, Homo sapiens
cagatagtgaatttaacccctccacaactcagggcttgttttttctttgtggttctttatcgctcatttgcatgcattctcacagtagatactgaaaacaaaagttctcttctcagttccca

SEQ ID NO: 253284 - DNA, 122 bp, Homo sapiens
gtgaccaatgcagccttggggcggccgactccttctcactcgctcccccatccatacccacgatctcacctctgggctacagacccctgggtccgagcctgggcatgacttcccaatagtca

SEQ ID NO: 253285 - DNA, 122 bp, Homo sapiens
tgtcgtggacccattctggtcggtgtggccggatgttggcctgggaggcagcatacgcgacggggtcgttgctgacccaagccgtcaggtagatgtagaaagcgctgggattaatgatgcca

SEQ ID NO: 253286 - DNA, 122 bp, Homo sapiens
cactcagctaaggccaccagggtatattcacaaagccgtggtagcaggcgacatcaaggccggtctagccattgtggtcagtctcctgcgtcttctcaacgctcaccccccgccgcaccaac

SEQ ID NO: 253287 - DNA, 122 bp, Homo sapiens
attcctcagaggaatccagggggctcccagttcccaacactcttcgagatgaccatttttcgggatttgactggggaacattttacatattcagtctttctcaaaaatttttatttattttc

SEQ ID NO: 253288 - DNA, 122 bp, Homo sapiens
aaaccggcggggagaattgaaaggggaggttgaggcacacgtggaaggaaaaaataccggcgcggcagagcaagggccttggcccctggccaaccccacacaccccctgccgcgcatgcgca

SEQ ID NO: 253289 - DNA, 122 bp, Homo sapiens
aactgtctcccgaggccgggattggccagagcggaagcggagacgcacttcctaggggcgcgtctggcacgcactgcgcagccgcggtgggaggaggcaccggccgcgcggcgggaggaggt

SEQ ID NO: 253290 - DNA, 122 bp, Homo sapiens
tgggattacaggtgtgaacgcctggcctggcctcagatatctgtatatccatgttcacagcgttatttgcaacagccaagaggtggaggcaacccaagtgtccaccaacagatgagtgatta

SEQ ID NO: 253291 - DNA, 122 bp, Homo sapiens
gagaagacggcatcatcctgcatcatgtctacacacacagggccttctacagatttcaaccgagttcaaaatccttagcttggcattcaaggaccttttcaaccatccccccactccctcat

SEQ ID NO: 253292 - DNA, 122 bp, Homo sapiens
tgtggcgcacctagtggtgaatcctcagaattggagaagggagtaatgggaagaatatgacgtcaagagaaggagttgttatctctggaaccttgaagcagggcccaaataaaacgagaata

SEQ ID NO: 253293 - DNA, 122 bp, Homo sapiens
aaggactgggcgaaaatagctcggcctgccgcaagttccccctgcggtttgcggagtggtcgggcccggcccgcccctgctggcttctctgcgtgtgtgtatttgtatgtgtactgtatgta

SEQ ID NO: 253294 - DNA, 122 bp, Homo sapiens
cttttccatttttcatcgtagctgtaagtaatatcggtaaatgttagtgttacgtgcgtccgtataggagaccacctgagcaggctaagtgtgagcaacacgcctgtttattcacttgggtg

SEQ ID NO: 253295 - DNA, 122 bp, Homo sapiens
gagcgaatcctcttcgggctttccagagtgcgggggatagataaagagtagctggggagacgccccctgaccttgctgggtcccagaacccggctgctcacccccaaggggtcctctccagc

SEQ ID NO: 253296 - DNA, 122 bp, Homo sapiens
atcccatttgaaccgctcagctgtcggcattgcacggtgtttgtactgagcaaacagaggcgtgggcaggtggcggccctgcccaggtggcacggggtgggggcatgacgtaaacacaggcc

SEQ ID NO: 253297 - DNA, 122 bp, Homo sapiens
ggagggggacgcgccgaccccagctgggaggggtggctggctgcgtagatccgtttgggccgcctgcctggaaaggcccaggtccgggcctcgtcctcctcttcacactctcccccgatctc

SEQ ID NO: 253298 - DNA, 122 bp, Homo sapiens
gccacaagatggcgacagtccagctggaaacgcctgccggggtccctcggtttccagctccggaaggactgcccccgccgacacaaagaaggaatcttccgaacgggaaaggagcgtgcggt

SEQ ID NO: 253299 - DNA, 122 bp, Homo sapiens
ctcaggcttgcctccatgcagctccagcgccacacacacacctggacacgtactcaggtgcgctcctcacacacacacctggacacgcacaggtgcgctcctcacacacacacctggacaca

SEQ ID NO: 253300 - DNA, 122 bp, Homo sapiens
gtccctttttctggtcagatgtgcttgattcttttctgctctacaacccacctctctagtcgtgtcttcccatctccctactcattccctcccgcgccgctgcgggtgagagccttcagcgg

SEQ ID NO: 253301 - DNA, 122 bp, Homo sapiens
tttaccctgctgcaatccccctcaccccaacgtccgccggcctggcccaggacaagcatgcgctcctggatgtgaccccctccgccatcgagcgcctcaactatgtgcagtactaccccatt

SEQ ID NO: 253302 - DNA, 122 bp, Homo sapiens
tcccaaaagccatttaatctgcttcataaacataatctgcttcataaacattaccctgagcgagtggttcgatggatctcctacaccgagtcctaaccgggaaacacaatcaaccgaaccgt

SEQ ID NO: 253303 - DNA, 122 bp, Homo sapiens
tcttgtgtactctaactcatatatagggtgatgttatttatttactggttatttatttaccggttatttatcgtttggcaaaaaaatccagcaaagactcacaagtgacctttacacttgac

SEQ ID NO: 253304 - DNA, 122 bp, Homo sapiens
ccaggcctcctgcgatcagggctgcgtggggtccatctcaggtgtggccgcaggtgatgccggcaggccctggaagatgtggctgcacctgctcccgtccgtgccgcagaggaggacgcagt

SEQ ID NO: 253305 - DNA, 122 bp, Homo sapiens
tctgagtggtgccagctgatccatcaagtgcaggttctgcaaaatatctcaagcaccggccgggcacgggggctcacgcctgtaatcccagcactttggaaggctgaggcaggtggatcacc

SEQ ID NO: 253306 - DNA, 122 bp, Homo sapiens
gcgggggttcagcgcccaggtggaggtctctcaggtagctggctagtgatctggaagacccggggctggcgtctccgggggtgggggaggatgtggctggggtcccgcgacacaggggttcc

SEQ ID NO: 253307 - DNA, 122 bp, Homo sapiens
tcttcaagatgaggataataatattttccttgtgggtctatgtaaagtttaatgataggacgtgtagggattcctagcacagagcctggcatataggtgatacctgacacaaggcagctgct

SEQ ID NO: 253308 - DNA, 122 bp, Homo sapiens
cagcttccatcttgggatctgctaaggccaaagcagaggacacctgcccacgactgaccccgcaccagggtggggggaggggtgggtttggggtgggaatggggatgggagccgccactgca

SEQ ID NO: 253309 - DNA, 122 bp, Homo sapiens
gggacatccaccggggttaaatgcatgctctgatcagccatatttcctccaacacttgcccgggcaagcgcagccctgggtaggagacaggacaccagcctgggttttggagccagacagat

SEQ ID NO: 253310 - DNA, 122 bp, Homo sapiens
gaaccttgccctttgctttctattacttgtgcatttgcctcacctgacaatgttttaaatcgcctttgtatctccttagctgctcaataaatatttgaatgcatcaattaagaatgtatgtg

SEQ ID NO: 253311 - DNA, 122 bp, Homo sapiens
atggggtcttgctgtgtaggtccagactagtctcaaactcctcagctcaagcaatcctcccgtctcagcgtgggaaagtgcagggattacagatgtgagctaccatgcccggccaacaatca

SEQ ID NO: 253312 - DNA, 122 bp, Homo sapiens
caagcgctttcctggcacagcgcgcaggcggcctgcgccaaagctctggcttcctccaggcgcccagaccccgccctccccgcaggcgccagggcgttgcctggcaacttagctgcgagggg

SEQ ID NO: 253313 - DNA, 122 bp, Homo sapiens
tcactaatcactgtaagccccagctgcctgatctgtaaaataggtttgaaccagtggtaacgaccttcccagctttaagcagtcggagactgcaagcaattttagcgtcccattccactatg

SEQ ID NO: 253314 - DNA, 122 bp, Homo sapiens
cctggaccccgggattccttcctgactgggacccgctgacactcttgctcttctgcattgcgctttccacccagcacccagggaactccacacctcacatctgattctatcactccccagtg

SEQ ID NO: 253315 - DNA, 122 bp, Homo sapiens
caagtcacggcctgaggaatcaaagcaacaaatcacagggtgagcatcttcgcggccagccgctcatgtccacagctccctggacgcttctgcacatttgtcacgtttggacgctgaacggc

SEQ ID NO: 253316 - DNA, 122 bp, Homo sapiens
cacacactcacagacatatacagcgagacaacacagagatagaggacacacagacacactcgcagacacacatggagatagagacagaggcacagacacagacatacaccaacacagacaca

SEQ ID NO: 253317 - DNA, 122 bp, Homo sapiens
gcgggcaaccagccctccgcagcttcagcgcacctctcttgccggtgtaggcaaagtggccggagacatcttcaaggacaacgtggtgctgtccaaccctgtggctggactggtcattggcg

SEQ ID NO: 253318 - DNA, 122 bp, Homo sapiens
ggccttgtcgaaggaagaggctgcagacgttaatgaggttagctgctggattccagtattcgtcgcataaggatccttctttgtctgcgaaggaaaaacacactgattatcataatgaggtg

SEQ ID NO: 253319 - DNA, 122 bp, Homo sapiens
gttcttctatactacttcttgacatactttggtatgtcctgaccgcataacacagtatcccgcacatggagataattataattctaagtagtgtttatgaacaatagagtcttatcactgtt

SEQ ID NO: 253320 - DNA, 122 bp, Homo sapiens
cgggagctggagcactctgctgggtcctggggacgcggcgcagcgtggttccaagcgctccgcagtcgccgggcaaccacaatggggctgccttgccgtgagaccctcccccgcgactgcca

SEQ ID NO: 253321 - DNA, 122 bp, Homo sapiens
ggggcgccttggttgcgaattgccaggagggccctgaggtgagctttctgcccccaaatccgcagcgcaacccccggggccctgaacgttacgactttccactgttgggaatgacgccaggg

SEQ ID NO: 253322 - DNA, 122 bp, Homo sapiens
gaaactggacagtggtatgggtatgagatttgttacagaaaagtatggtgacagaatgaccgccatgtataatctgaagaaacagaaggataaattgaagatctatgctaaaagcgataaac

SEQ ID NO: 253323 - DNA, 122 bp, Homo sapiens
cttctcagttcttattttatttgaactggcaaagcaaacagaacgggccagcatcagcctcggaggcttcagaaaagcagaaacaagggccctgtggctagtccttgtttgacccttccctc

SEQ ID NO: 253324 - DNA, 122 bp, Homo sapiens
ctgctgcatcttgtggggcctccagcaggaccccctcctgggaaggctggacagcacagtcggagccggcaggaccagccagccgagggcagggagccgtggggcgccggggagaggttcac

SEQ ID NO: 253325 - DNA, 122 bp, Homo sapiens
gaatttagtgcatcttctcttcagatgagcagccacaggcgaagactggatggtgtgagtcggtgtctcatattagaatttagtgcatcttctcttcagatgagcagctacaggcgaagacc

SEQ ID NO: 253326 - DNA, 122 bp, Homo sapiens
tggggcctgcttccccagagacgctaatgagtttcaatcttagaagaaaacactgaggcccgctgttccattcctgttttacaggtggagaaacgtgacctgagagaagaaaagattggccc

SEQ ID NO: 253327 - DNA, 122 bp, Homo sapiens
tcttttttctacaggttggtactaagaagtgcctttcctgacgtctctgctgcttggaaccgcttctagagcagtctctgcttttgccttgcttgctgccagctagactgtgacgacagcac

SEQ ID NO: 253328 - DNA, 122 bp, Homo sapiens
ttatagacagtatcccttgtcctcaagatttttagtttggcccaagtgtggccccattagcgacaccctcctctaccagcaatgcctgctaaatgccaccacctcagttcaagccctgaagc

SEQ ID NO: 253329 - DNA, 122 bp, Homo sapiens
agaagaggcatggttggggtcttactaactttatctctatttcccatcatcggaaaaattcgtgaagcccaacgctctaaaacatagattaagaagttgctttgagtctggtaacgtgtcct

SEQ ID NO: 253330 - DNA, 122 bp, Homo sapiens
aaagtaattttcccacaaagtggccacactttgcatttcctacattccttttccctgctccgaccccttccgcccggcctcagagctgacagctggggctggccagagccaagcaagaggca

SEQ ID NO: 253331 - DNA, 122 bp, Homo sapiens
aaaaaaaaaaaaaaattagttgccagatgaaaaactgaggccccaaagggtcaaaggactcgcccagcatgaagaaggaattaatgaaatcaactataacctaatagtagtagtaacagaaa

SEQ ID NO: 253332 - DNA, 122 bp, Homo sapiens
ggtgggggaatgatgccggggacctccaagccccttccaggcctgagattgggacttctccgcagcacctagaagaaccagcgctgatgggagagatcagacctcagaaaccaggatgtggg

SEQ ID NO: 253333 - DNA, 122 bp, Homo sapiens
agagaggggaggctttgctctgcagctcctccgggccatttcctgtgccgaaaaataccgcgctcaaaaattggaggagtctgcggagagaaaagttctaatcacgatacttgatggatgtt

SEQ ID NO: 253334 - DNA, 122 bp, Homo sapiens
agtgggggtctgggggttaaatggagccaggggcacccccaggccgtgctcctaacaggccgaaggtcgagagggaggggtagggccggagacagggactcaagacaggggctcgagaaacg

SEQ ID NO: 253335 - DNA, 122 bp, Homo sapiens
tctccgcaggcctgaagttcattggaagagcaggacgtcacggggacgcctcgtccttcgcggtcaacgccctgaacttggcgccaggatctttaaaacccggaagttcctgtggttcatcc

SEQ ID NO: 253336 - DNA, 122 bp, Homo sapiens
gcgtcccaaagtgctgggattacaggcgtgagccaccgtgcccggccccctttctcttaacgtgtctgttgggtgtcttgccttcaccctgcagcctagtctgactgcactctctctccctc

SEQ ID NO: 253337 - DNA, 122 bp, Homo sapiens
gacagcacagaaagaggaagtggaagaggtgagaggagcatcatttccttccttttgtgccgtcaatggagcatgttaggaagatctgaggttctggcataacagcaaataaaagtgagtaa

SEQ ID NO: 253338 - DNA, 122 bp, Homo sapiens
ggccggggacgcacccggcgcccagactccgcggccgcacccgggctcccggggccccagcggccccaagacagcctctgggcctcaccctaaatacatcaattatgacctgagcaaaaagt

SEQ ID NO: 253339 - DNA, 122 bp, Homo sapiens
aagtcgagagctcagtggtgtctcctcttatcagaacaccagcctgatgggaccatgccccgcccggtgacctccttctaccctgatgatctccttattggagccaccaccaaatacagtcc

SEQ ID NO: 253340 - DNA, 122 bp, Homo sapiens
tgttaaaacaagcgtggctcccagagtcagcgtggacagcactggtgtgggttcctcccccgtctgtctgcaccggtgaagcctggcctcgtgtttccctcctcactgccccacatgtggtg

SEQ ID NO: 253341 - DNA, 122 bp, Homo sapiens
gaactcggtggagcagggctcttagggtcttgtggccacctcaccgggtcagactctccccgaggtgggaggacaagctaataggagaaacagggccatttcttcacccaaccactcaggct

SEQ ID NO: 253342 - DNA, 122 bp, Homo sapiens
cctcatccacacccagcgagagcgtatcgacgagctggagcggcggctggacgagctgagcgctgagaaccgcagcctgtgggagcaccagcagctgctgcaagcccagcctccgcccgggc

SEQ ID NO: 253343 - DNA, 122 bp, Homo sapiens
aattccgagttcatttttcccccatcacattagcaacaagttaaaaaaactgataatatccggtttggtccaaggtatattgaaacctgttgtgtgccctcgcagcgctatcacagtggaac

SEQ ID NO: 253344 - DNA, 122 bp, Homo sapiens
ggcaagaccggggcgcgtctagccacaggtctatgggcgagggcccgtagccgtgcgccccgggacctagacccccgccaccgccaccgctgcccggcgacgctgcctcattgcgcttgccg

SEQ ID NO: 253345 - DNA, 122 bp, Homo sapiens
tgtcccccctccctctcataacgttccccgcacaccggcgcaaacctccggctcaggaaccgcagcagcttcgctgtccacggcagacgcagaaacgccgttcacaagccttttcccagaag

SEQ ID NO: 253346 - DNA, 122 bp, Homo sapiens
cccgctcagctgttcaacacgtgtgtgtttgttttacacacagagtagtttctgctgcagcgcgcgtgtgcatgatggatgtgcacttcgctgggttataacgtgtccagttaagaaaccca

SEQ ID NO: 253347 - DNA, 122 bp, Homo sapiens
ctgaccacggcccgggcatgggctgcaagggagacgcgagcggtgcgtgtgccgcgggtgcgctgccggtgacaggtacccaggggtggcgtgaggaggcctcgtggacaaagagagggttt

SEQ ID NO: 253348 - DNA, 122 bp, Homo sapiens
tttatttccatgctgggcgcccgggaagtatgtacacggggtacgtgccaagcatcctcgcgcgaccccgagagcccggggagcgggggcttgccggccctggcactcatttacccagagac

SEQ ID NO: 253349 - DNA, 122 bp, Homo sapiens
caatatggtgaaacccagtctctactaaaaatacaaaaactagctgggcatggtggtgtgcgcctgtagtccgagctactcgggagactgatacaggagaatcgcttgaacccaggaggcag

SEQ ID NO: 253350 - DNA, 122 bp, Homo sapiens
gactggcgtgtcgtcctgacccttcctgcctccccagccgtgcagaacgagcgccagccgcgaagcacagcccaggtccacctggacagcatggagtccaacactgagtcccggccggagtc

SEQ ID NO: 253351 - DNA, 122 bp, Homo sapiens
ctggggtcgggagcacagtgggaccacgccccggatttgatctagggctggggcgttgcacgaggcagtggcccccgggtaccactcctaatccttccgtcctatccattagcacatttgaa

SEQ ID NO: 253352 - DNA, 122 bp, Homo sapiens
tgctctgcatgtggaactcaagaactgcggagctttctgatgcctggcagggttttgtcccggtcagtggttgagtgagccacacctccctcccctgaccaggcaaacttagacaagaaaag

SEQ ID NO: 253353 - DNA, 122 bp, Homo sapiens
cctgaggccagaatctggctggggagcggcctcgggcttaggccatggcgagggagcgcccgcggccaccggggccggcgccaccccggaacccggcgggccgctcagcccccggccccctg

SEQ ID NO: 253354 - DNA, 122 bp, Homo sapiens
gactccgagggggagcctggctttggagagaaccggagtgtcttagtgagacgaattccgcgcactcggaccccctggtgacagctggtgcccaccgtgcggctccggaggcgcatgtcccc

SEQ ID NO: 253355 - DNA, 122 bp, Homo sapiens
ctcgaaagcccggcggggcgcgggggcaccctggagggccagccaggaagcagggcgaggcgagaggggacggagaagccgcggagatgctgtcacagccgcagcgggcgagcagggaccca

SEQ ID NO: 253356 - DNA, 122 bp, Homo sapiens
tcttgggaaacctaacgcttttctgttccaggtccaacacaacgcctcacaaaacgatcacgagattgaaaggctgatgtcagtgaaccatccccttccagggcacgcagtgccagaccctc

SEQ ID NO: 253357 - DNA, 122 bp, Homo sapiens
ctgaacgcgcggcgcgctcggccggactcggagggaaaccgcggcagagctcggctgcagcgtggtaaaggatggcgcgggctcagcagaaaggaaatcaaaacgctcccttccttccgcgg

SEQ ID NO: 253358 - DNA, 122 bp, Homo sapiens
tatcccagagatatcgacagaaaggccataagacacacacgcctcacccatcaacattggcgtctaccatccccacaccagcaatgactggaccgggctggccctggccatcttcagctctt

SEQ ID NO: 253359 - DNA, 122 bp, Homo sapiens
cgaatgagttctcgcgacttgcgagaagacacgtgcgcggaaggagcttgcagtagcgggcggcagagctggagtgaagggagctagtggtaaagggagctggtggaggggtggcggcaggg

SEQ ID NO: 253360 - DNA, 122 bp, Homo sapiens
aaggctgctcagggtggcggtggcccaagctggagggcagacaagcctcaggctggagagcgaaggagaagggagagcacgcttgctctgtgtacgccacacgcacaaccagccctggggtc

SEQ ID NO: 253361 - DNA, 122 bp, Homo sapiens
ggttggagtacccgcagtagggctgcaggccgtagctgaagacctcccacaggaccacaccgtaggaccagatgtctgagtcgatggagaacttgccgtacatgatggcctctggggccatc

SEQ ID NO: 253362 - DNA, 122 bp, Homo sapiens
gggcgcccacctcagcctcccaaagtgctgggattacaggcgtgagcccccgcgcccggccggaagcgcttgtttaatgcacgatcttttttaacgtggaccctgtgctggctctgagccaa

SEQ ID NO: 253363 - DNA, 122 bp, Homo sapiens
gggcgaatccgccaaatgtgcgagctgggcagcccacccctttcagctgctggccggaagcggaagtgggcgtccgtcgcctcgccatctcccatagctgtcgcctgcagctgagaaagggt

SEQ ID NO: 253364 - DNA, 122 bp, Homo sapiens
gacctcagtctgaaactgaaataaacctggacgcagcgtacccttgaatcgcaagaacgccgccttcagtgtttctccggagaaaagcattcacgccaggttgtgacgaaaacattttttga

SEQ ID NO: 253365 - DNA, 122 bp, Homo sapiens
agcctctctgctagctgcctgctccctgcagctggtggagtatctgaagctgaaggcggacgggctcatctactgcctgaaggaggcctgccccaacagcagtgccagcaacgcctcaggtg

SEQ ID NO: 253366 - DNA, 122 bp, Homo sapiens
tccctggccccagtgtgcgggccccggtggccgtctggcccgagggagggcgggggcaggcgagagggagccatggaggaggggagcagtactagcccggctccaatttctccggtcagctg

SEQ ID NO: 253367 - DNA, 122 bp, Homo sapiens
ctagcactttgggaggccgacacaggcagatcatttgagcccaggacatcaagaccagcccgggcaacatggtgaaatcccatctctactaaaaatacaaaaattagccaggtatggtggca

SEQ ID NO: 253368 - DNA, 122 bp, Homo sapiens
accctgactgccccagagaaggcgcatctggaactccgtgctgaacacctccaggagctccggccgggcctggaaccctgcagtgttggggcatagggtcagggcagaggctggggttcctg

SEQ ID NO: 253369 - DNA, 122 bp, Homo sapiens
atgaactccctccagcttagctttcacccggtggtgttcccgggaggagagggcggagggcggagggaacttgcaccgaagcatcactcgagaccccaaacctccaggtcagtagccccctg

SEQ ID NO: 253370 - DNA, 122 bp, Homo sapiens
caatgggaggctggagtacatggggacctctgtcagtcttcactgggctgtcagtgtgatcgggtggggtgctggacaaagaagaagcttgatttgtgtctctgttgcttccaccccatcct

SEQ ID NO: 253371 - DNA, 122 bp, Homo sapiens
gggcgctgctggtgggcggatctgggggctggcggggcggggcctgctaagggtcgcagccgtgccccgtcgatgagcggggctgggggcgggccctgtgatcgggcggggcggggcctgct

SEQ ID NO: 253372 - DNA, 122 bp, Homo sapiens
gccttttgagcctcagctctcttcctcttgttctcctagggtgggagtacagcagccaaacgctgaacttagtcccatccacttccatcttatcctttgtgcccttcatccccctgcatctt

SEQ ID NO: 253373 - DNA, 122 bp, Homo sapiens
gcgcaatgtccgatcgctcggggccgactgccaagggaaaggatggaaagaagtattcctcgctcaacctgtttgatacgtataagggcaagtccttagagatccagaaacccgctggtgag

SEQ ID NO: 253374 - DNA, 122 bp, Homo sapiens
cattaggatctgttgattggattaaaatgacagactcgtttcttggcttcctgcagctctcgtcattgcccaccatctatttttagcagatcttgccctgctgactcagagtgggaacagtt

SEQ ID NO: 253375 - DNA, 122 bp, Homo sapiens
agagcccgccccgcgaaagccaccgacaccgcagctacccgccccgccgatgccacgccgcgaccatggcacgcactgcggacacgacaggagcactcccaacacacacacacacacacaca

SEQ ID NO: 253376 - DNA, 122 bp, Homo sapiens
cccttttcttgatgaacttgagggcccatttctccttgaagaccttcagtgactccatggcgcgcagctcgtacgaagcgaagccacacacctcccggatcatgtcccgctacaaacttggt

SEQ ID NO: 253377 - DNA, 122 bp, Homo sapiens
tctctaagcggtggaggggagctgaacggctccagcttgggatttgggactcaggacggccgaggaacccgtgaaggccgcgaccgtggccttcaccctgctaggcctcctcagtaccaaca

SEQ ID NO: 253378 - DNA, 122 bp, Homo sapiens
tggtataagttgctaagtaatcattaattcaactcgataaacctggtgggttttgtgtttcgttcgtgtcatttgtgaagcccgacaggaagagtggagccctgcgctgtgtgcgtgcgttt

SEQ ID NO: 253379 - DNA, 122 bp, Homo sapiens
ccttctatgtctgctcctgggcctgctggctttgacgtgtcttcctcctttcacttcccccggtggtcatggcatgaggaatggaacctcatggaccatacataaggccccccaggccttac

SEQ ID NO: 253380 - DNA, 122 bp, Homo sapiens
ggaattcttcgacctcatcgccagctcccagagccgccggctggacgaccagcgggccagcgtgggcagcctgccggggctgcgaatcacccacagcaatgcagggcacctccgaggccacg

SEQ ID NO: 253381 - DNA, 122 bp, Homo sapiens
agtttgactgtctaaagctgtgagtgatctatagtagagatttgttaagttccatgtatacggtgagttaattctacttcaatcccacagggaaagagtaggggatattaaaaggagaaaaa

SEQ ID NO: 253382 - DNA, 122 bp, Homo sapiens
acagccagcacctcgtcatcagtcagcagcctctgggccaggtcctgaatgaggggccgccggctctcccaggcctgaacctgctcatccacattaggcagctggctggagggactcccaga

SEQ ID NO: 253383 - DNA, 122 bp, Homo sapiens
tgttgcaggattcaatatgatgatgcaggggaagcacctggagtagtctggtatggaggacgtgcagagatgggtcctggtggccgcagtcttattgtgtgacagacagcacacatctaccc

SEQ ID NO: 253384 - DNA, 122 bp, Homo sapiens
cgcgcggcgggggcgtggcccggggcgagtggggccaaggaggcagccgggagcggcgggcgcaggtgttactggttgcgtcgggtcacgtgggcgcgcaggcgcagcgcggtgcagcccgt

SEQ ID NO: 253385 - DNA, 122 bp, Homo sapiens
agccaccccttggcggctggaccaaatcttgggctgccgcctggatctgcagctggaaagcgccgtgaccaccggtgtccccagctggagcagggcgggctgcacgactcgcgaggacgccc

SEQ ID NO: 253386 - DNA, 122 bp, Homo sapiens
cctggtcttccctgatctttcactgtgtgcccttcaggcactcaagctgttaatatcacacgagcttaataggctcccctgagatggtcctcatgtgaaaggattgctctgtaaggtgtacg

SEQ ID NO: 253387 - DNA, 122 bp, Homo sapiens
gcatgcggggcaaggtagcgcagccgggtgggggtgccccggcagcagggccgggaggggcgtggtgggggggcctcggcagcgtggcagaggaggagggaccgcgctgagcggtggccgcg

SEQ ID NO: 253388 - DNA, 122 bp, Homo sapiens
ggctgccctgtgtgaccgctgcccgcccagcagtgcggggcgagaccgggcctccctcagcgtcccctcagcacttggacaagctgcagaacccacagggaatggaatgtcttcctcccagg

SEQ ID NO: 253389 - DNA, 122 bp, Homo sapiens
gctcaggcaggctctgacgccgacgggcttgagccaggccccacaagggaggcatggtgtcggtccagccggacccaaagcccagggccctcagcgcggggcctgagctgccaggcgacaca

SEQ ID NO: 253390 - DNA, 122 bp, Homo sapiens
ctcatgcgcctcatggacgcatcttgccccggtttccaggtgcggtggagcggggagctccggggctggcagagtgagcagggcctgggtcctgagggagaaggcggctcgtaggctgctgt

SEQ ID NO: 253391 - DNA, 122 bp, Homo sapiens
agtggcaagtggaggactcctgtaatgcacacgatcctcacgacgatggtcccgacttcgcgactcactaccatgtcgacgatcccagctacggctacggtgacgacactgccgacctggac

SEQ ID NO: 253392 - DNA, 122 bp, Homo sapiens
cccggcgggactgacggagctgctgcagggcttcacggtggaggtgctgaggcaccagcccgcggacctgctggagttcgcgctgcagcacttcacccgcctgcagcaggagaacgagcgca

SEQ ID NO: 253393 - DNA, 122 bp, Homo sapiens
gaaaggaaaattttgcaacgggttagctggagatccattaccaacacctggacaggctgtcggaggctgcgttcagtccagaagcctttgaataacaccagggtgtgccctggccagaaatt

SEQ ID NO: 253394 - DNA, 122 bp, Homo sapiens
ggaggcaggggaatgtgaggaatgacccagcacgtgcctggttgtgcaagagccacttcccgctcttcccagagccaagcctgagcctataaaagacatattcagctccagcacctcatctg

SEQ ID NO: 253395 - DNA, 122 bp, Homo sapiens
aatagacggagatcccacagcagaaaaggccaagggccacatgtctgaggaggcggcagtcgtagagaaaccagtcagacctggaatgaaggggagcaggaagataaagggttcaggaagtg

SEQ ID NO: 253396 - DNA, 122 bp, Homo sapiens
aatttttgtattttttataaagacagggtttttccatgttgcccaggctggtttcgaactcggctcaagtgatctacctgcctctgcctcccaaagtgctaggattacaggcgtgagccacc

SEQ ID NO: 253397 - DNA, 122 bp, Homo sapiens
tcctccttcctcctcgtgtcctagccctgagtcgaacccctcccgacctgatgccagcagcgccctgtctgagtgcttccacctgctgctgctcactccctgttgttgggccagcccagtct

SEQ ID NO: 253398 - DNA, 122 bp, Homo sapiens
ttgcatctgctcagctcccagtcctgctcccagcatactgagccttttttgttggcttctcgccttccagttgcaatttagtggtcgaattgatgggttagggtcaggggctgtgtcctgca

SEQ ID NO: 253399 - DNA, 122 bp, Homo sapiens
agactggggggttaagctcagggctccagtggtttgggcctcagcctcatgggtggaatgcgcctgccacccccaggctagacgagggggcagagggtcagggtgggcattcgttgtgccgc

SEQ ID NO: 253400 - DNA, 122 bp, Homo sapiens
acctggtggtgcagtcgctggagaggtggctggttccccagaacccccgctagagctgcccggcagcctccaaccccacgcaggtcgggaggtctgcggcccggctcccacgctgcaccggg

SEQ ID NO: 253401 - DNA, 122 bp, Homo sapiens
gccactggacatgtggccctgctgatgactgcagaaccaacttcttcccttggagcaaaccgttctggggtcaggaaactccaagaagtgaccagagacccatgggggaccacatgatgtct

SEQ ID NO: 253402 - DNA, 122 bp, Homo sapiens
caagcaaaaggcatgtcactgtgagggcaggaagaagcctgggctgctccatgtgggcaacgggtgggtcgtcatgtccaccgaggtgaatgagttcagtcttcatccctctgcctgtgagg

SEQ ID NO: 253403 - DNA, 122 bp, Homo sapiens
cgctccgagccgccgtccgccatggtccccgcctgagcgtcccttgctgtccccctgcttcggccaccactcgtcacccacaccggaagttgcccgcgcacccgctcaggcagcccatcggg

SEQ ID NO: 253404 - DNA, 122 bp, Homo sapiens
ttcacagcagaaggcgccattggtccgcttcctctcgcagcaattaattacacagagcggcgtgttttgacgcggaccacagcaaacgcgtcaggtcacgggcatttacgcgtatctgagag

SEQ ID NO: 253405 - DNA, 122 bp, Homo sapiens
tcggggacggagacgcgtgcaccctgaagacagtaactaggcctgctctacagagggaaacgcaggctctgagagcctacatgtcttcgccgggagtgcttgtcccggagctgctcgcagac

SEQ ID NO: 253406 - DNA, 122 bp, Homo sapiens
atatctttgatatctttaatttcaaaaaattaaacctttgaatttcacggtcttaggtaccgaggtgagggtaaatgttagtgccatcaactattgtcaatctagggtatattttctaactg

SEQ ID NO: 253407 - DNA, 122 bp, Homo sapiens
accacgcagctgtggtcaattattacagcagccacggggaaggaacgcactgcccgtgggcgacggggaaggaacgcactgcccgtgggtgacggggaaggaacgcactgcccgtgggcggc

SEQ ID NO: 253408 - DNA, 122 bp, Homo sapiens
atggttcttatttagatatgaagagatgattttagagaaaccctctcacttccgttaatgcgtttggccagaatttgtttatgtgtctgtttctgatcatgcagtagcaaatggtttacaat

SEQ ID NO: 253409 - DNA, 122 bp, Homo sapiens
gccggccagtcgtccgcgcgcggctttttcttcaggacagcggaggcacaccgtgctttgcggttcccggaagtccttcaggcctcagacctgtcagcccgccacactccagccagtccctt

SEQ ID NO: 253410 - DNA, 122 bp, Homo sapiens
ccggaactgagtaataaattaccactgtgcgtgcatccctaaatgctattgcgatgtttccgggttaaattctaacaggtcagtgatgatgcaattgaaacgctcatcttaagcagcatcta

SEQ ID NO: 253411 - DNA, 122 bp, Homo sapiens
aggttgcagtgagccgagatcacggcactgtactccagcctgggctacagagcaagactccgtgtcaagaaaaaaaaatagtaataaataaaaagtggaagctttttaggtcacctaataca

SEQ ID NO: 253412 - DNA, 122 bp, Homo sapiens
gcggccccccagctcaccacaagtgtgacctcgaggcccttgggtagggcaacaaaaggccggggaaggtgggggtgtcctccccaactcccgagcctccttccacgtggagaaaactgact

SEQ ID NO: 253413 - DNA, 122 bp, Homo sapiens
ccaatctgggaagtgaggagcgcctcttcccggctgccatcccgtctaggaagtgaggagcgtctctgcctggccgcccatcatctgagatgtggggcgcgcctctgccccgccgccccgtc

SEQ ID NO: 253414 - DNA, 122 bp, Homo sapiens
ggaggaggaggagggggagaatgcccggagccgccgccgctgccgccgccgccgccgccgcgatgctcccggctcaggaggctgccaagctgtaccacaccaactatgtgcggaactcgcgg

SEQ ID NO: 253415 - DNA, 122 bp, Homo sapiens
ccacccccctcccccccccaccacacacacacacaacgctctcattaaatttgagatgaacggtcaagaaaggcaaagcttagcaaagcctctggctcctccaatggtataatgaattgcag

SEQ ID NO: 253416 - DNA, 122 bp, Homo sapiens
catctcagccatcctgaggatccagtcagcagcaggcaggcagaaggccttctccacctgcgcatcccacctcatggctgtaactatcttttatgggtctctgattttcacctatttgcaac

SEQ ID NO: 253417 - DNA, 122 bp, Homo sapiens
tttgggaagattgcagaggcaggaggtccagttacttgtgaggagccgtggggcgtggcccgctcacctccctgctgttctcaagcgccccccacaaggaagccttctgggacccctgacac

SEQ ID NO: 253418 - DNA, 122 bp, Homo sapiens
atccttcagtgtttcttctgctcagtcaggataaaggacaaatttctgacaatggcttcacggccttcctttgctctcacccgattccttcttcatccccatcttctagtctcttctgctac

SEQ ID NO: 253419 - DNA, 122 bp, Homo sapiens
accccggcagctccctcgagggagtcgggccctgagatccctccacaccctgctttctttcggcatctgcctcaatggctctgtgacccaccagctacaggttttctccgcagcttaaaccc

SEQ ID NO: 253420 - DNA, 122 bp, Homo sapiens
aaggaagggcggtgagcaggcgcacagaacagacgccacagtgcggcacgcatgcctccacgcctaaaggacaaaactagcatggagatcccctagaggtcggattttcaacataatctcag

SEQ ID NO: 253421 - DNA, 122 bp, Homo sapiens
tgacctcatgatccgtccgcctcggcctcccaaagtgctgggattacaggcgtgagccaccgcgcccggccgataatatacttctcaaacgcagtagtgtcttatatatgtaatcaatccct

SEQ ID NO: 253422 - DNA, 122 bp, Homo sapiens
attccttaggagaacaggagcacggcagcggaaccacagtcagacggcagtgatctcctgcgcttgatccccgtgtgacaggaactctcaaaatgaaatccagctgctggaaaccccttggc

SEQ ID NO: 253423 - DNA, 122 bp, Homo sapiens
gcctcaggacacacgctgccagaagcaagagtgcttccactcaaggaagcgcgcacacgccggagacagaggcagggcgagggcagccaaaagtaggaaacacccacctttaggatcccagt

SEQ ID NO: 253424 - DNA, 122 bp, Homo sapiens
ttgttccttctgatgttcggatgtgttcggagtttcctccttcttgggggtgcgtggtctcgctggctcaggattgaagctgcagaccttcgcggtgagtgttacagctcttaaggcggcgc

SEQ ID NO: 253425 - DNA, 122 bp, Homo sapiens
ggcttcgaagcgggagggctgcaagtcccatgatacaccggaagaatctggcgtcgaggccggccagctccaaagggcaaacgctgtctcccccacccaaggtagcctcggcccgcgcccaa

SEQ ID NO: 253426 - DNA, 122 bp, Homo sapiens
actccagcctgggcaacagagcgagactccgtctcaaaaaaaataaaaaataaaactcttcggagtagcattttttcaataacaggaaatgctggagataatcagatgcaattggaaacatt

SEQ ID NO: 253427 - DNA, 122 bp, Homo sapiens
acaggaaaggcaatatttcagccctccacagagctgaaactcagacctcagagtcagcttcgcacaggacagggctaaggaagcctggtaatttttggcttaaagtccagtcagaatgaacc

SEQ ID NO: 253428 - DNA, 122 bp, Homo sapiens
caaagcagagtaaattgcattagcttttaattaactgctggagaagtactaaaacatttccgccaagttgcaataagaaaatttagtgggaacgtctatcactactgaaagttactaggttg

SEQ ID NO: 253429 - DNA, 122 bp, Homo sapiens
gtggtatctggggtctgtactgagtttgatatgccccgcactgaaatcattctgagtttccgactcatcccaaaggaacatgtgtaaataacaaccctcccttgttactgaaatcaattatc

SEQ ID NO: 253430 - DNA, 122 bp, Homo sapiens
cgagtgaggcgtcgggacagtggggcataaccaagagcaaaacgcaaactgagacttcagcgccggtttctcgggccagcccacgcctcctgcctcagctcaatgccactccctccccgcca

SEQ ID NO: 253431 - DNA, 122 bp, Homo sapiens
ggcacagcaaaacaggagagccttttttaccttggaaatgctccagctgattcccttgcccgggggtcacagcagtcaggaccctaccctggagccggggccccatcctcaggatgcgcaca

SEQ ID NO: 253432 - DNA, 122 bp, Homo sapiens
tacagggtctcaataataggattcctactatgtccaaatcgagccccggcttttcgtatacgatgtcaccaaggcaggaaggactatgggctcacataaccagaggccaaggggcgacccga

SEQ ID NO: 253433 - DNA, 122 bp, Homo sapiens
gattcctaactgctttgcctactggtaattttcacagagacagaggagggtgtaaaagtccggaaaatgttgagcaatatttatctggaagggaacttataaaagtagtgaatacagcaaat

SEQ ID NO: 253434 - DNA, 122 bp, Homo sapiens
cgcactgtggtcgcgactgcctgaagcccagtgttctagagaagcacatccggtcccacacgggtgagaggcccttcccgtgtgccacctgcggcatcgcctttaagacccagagcaatctc

SEQ ID NO: 253435 - DNA, 122 bp, Homo sapiens
agcaggagagttcgatctggagctggtttacatttggaaaaaaccaccatgtagaaacaccgcccacccacttcccaaagttgagcagaatgaacagttagtgggaggctgggcctctcccc

SEQ ID NO: 253436 - DNA, 122 bp, Homo sapiens
ccccctgacccctgagttcatcaagcccaccatggacctggccagccccgaggcagcccccgctgcccccactgccctgcccagcttcagcaccttcatggacggctacacaggagagtttg

SEQ ID NO: 253437 - DNA, 122 bp, Homo sapiens
gagaggacaccactggcatttattaataacaacagctggagcggccagctgggatggccacgagggcccaagaaggaggctttcatccctccagtgagaagtgtgaatgggacccagagttc

SEQ ID NO: 253438 - DNA, 122 bp, Homo sapiens
catgggactattgtggacagagaagctccaggcttcctttggttttgatttacggccccacggaactggagcgaggccctgcagcaggcttatctctcggggctcagcctcactggttctgg

SEQ ID NO: 253439 - DNA, 122 bp, Homo sapiens
tgtaagtttgtagtattctaacgtaggcgcttccaaggaagtcgctgaatatacttgtgccggcgcttccccgacgcagccctgcagggaaggatccggtccaaggtctctctgcgatttct

SEQ ID NO: 253440 - DNA, 122 bp, Homo sapiens
acttccaggtttttcctggggtgcggcatcccatcgcagcattttctctggttaccctcacgagtttcctcctgcgtttggttcttgatctccagggccatctcccacgtcttccttggaaa

SEQ ID NO: 253441 - DNA, 122 bp, Homo sapiens
cgtttgtggccttaagttagcagtgtgtgtgtgtgtgtgtgtgtgtgtgtgtgtgtgttgcgcaccctccccacgggcacacccgcctgcaagcctggtgtgtgtgtgcgcgcgcgcggctg

SEQ ID NO: 253442 - DNA, 122 bp, Homo sapiens
aaagttaattaattggtggttccggaggtggcgggctccacgcccggccagtcttgctgacgtcagtgctgacccactggagacgtgcagcttccgggcaagctgggcagagggaccccggt

SEQ ID NO: 253443 - DNA, 122 bp, Homo sapiens
ataagctaaattctacagaggaatttcagatcaacttcttttgcaaaagcacaagttacacgttgcacggttggggatgctgagtgaatgcattccaggaagagttccgcaagcaagtgctg

SEQ ID NO: 253444 - DNA, 122 bp, Homo sapiens
cgctgcctccgcgccgccgctgcctccgcgccgccgctgcctccgcgccgccgctgcctccgcgccatggccggcctcagctacctggaggcagtgaaacgccagatctaggccctgcagca

SEQ ID NO: 253445 - DNA, 122 bp, Homo sapiens
ccctgcaccaggcattgctggaggtgaccttgtgaactgtgggaaaccaccgaacctgtccgtgccctcactgccccaggctcccaggtgaggtggtggtgtccacacagcctgacagatgg

SEQ ID NO: 253446 - DNA, 122 bp, Homo sapiens
aacctgccctatgacctcagggcgtccttctgccgcctcatgcttcacatgcatgtggaccgagatccccaggaacaagtcacccccgtgaaatatgcccgcctctggtcggagattccctc

SEQ ID NO: 253447 - DNA, 122 bp, Homo sapiens
ggattttcctgcaggttccttaactggaacaaaacaagttcttttcaagttctccgccttcggtcggcctttgttggtttggtcgtggcagtccccagcttggcagacttttcccttccagg

SEQ ID NO: 253448 - DNA, 122 bp, Homo sapiens
aacaggacgcggcccgctcacttcggggctcattgtcctggacacacagtcagggctggacgcctccagcagccccacgcttcaccccaaggtccgcaaacctgacaacttcggaggtaggg

SEQ ID NO: 253449 - DNA, 122 bp, Homo sapiens
gaagatgggggggctaccagtgttagcttaactcctgcggtctcgcagactaattgctcacggtggaaacacgcctcaaagtgctttggcctcgtcaataatagggtatcagatgctttcca

SEQ ID NO: 253450 - DNA, 122 bp, Homo sapiens
ctatgaactctgaccccagctcccacactgtcgcctatcaccggcccactctccgtgccgcgtgtcccttaaaagctggggcctgggacaggaacgacagacaatgcagccaatggcgtcac

SEQ ID NO: 253451 - DNA, 122 bp, Homo sapiens
cagtccagagcacaggaaggaaatgtagcttctcagtgctggggtgcaaggctgaggggccgatgggggacaatggccaccaccaggaggcagcccgggctcacagaccatcttttgccagc

SEQ ID NO: 253452 - DNA, 122 bp, Homo sapiens
gctcccggagttttgcttccgaggtcaaggcgagtagcatgtgcgggagactcacgttgccggcgaagtgggagagagaaaagtggtaacctggggctgggggccggcgcggcggagctcgg

SEQ ID NO: 253453 - DNA, 122 bp, Homo sapiens
ttgttttttctccattttcctccccttttgtggggttgttcagatctctgaggcgtcaatcgtttgcaagaggaaggagaaggcacgccactgatatggcgttatttatcagcatgcattgc

SEQ ID NO: 253454 - DNA, 122 bp, Homo sapiens
ttgccaggtggaggcctgggcactggcagggttctgccctcccgactgagcaggggctcccgaggtgactaagcaggctctctgggtagtgctcccgccctcacctattgtccgggtggagg

SEQ ID NO: 253455 - DNA, 122 bp, Homo sapiens
ggcccggctaggcacagagcaactggtcgccagggaagggcgggggggcggcctcccagccggagacaaacaagcaattaattccggagctgagttcccatctgccaggcctgctgacaaca

SEQ ID NO: 253456 - DNA, 122 bp, Homo sapiens
gcatgcgcacttaggtggcgggcgggtacttaaggcgcggccaccgcggctgcggcagtgcgcccaacagcggactccgagaccagcggatctcggcaaaccctctttctcgaccacccacc

SEQ ID NO: 253457 - DNA, 122 bp, Homo sapiens
cccgctgcctagcaaccccatcggaggggtgtagttgacagcacaggacgcaggctgtcacgaagacaggcgcgggctgcggagctggcaatggggtggtcaaagtcccgactctgggctcc

SEQ ID NO: 253458 - DNA, 122 bp, Homo sapiens
ccgggctgggcggccgcacgggagggcacagcgccacctgctggtgctgccgccagagcgcgccaagctgaggagcaggcgggctccgctcacgcccccacaccccctggctgggggctggg

SEQ ID NO: 253459 - DNA, 122 bp, Homo sapiens
cattggctccctcccccgctgcagcacctggtccccccccctcccagtcacctgattggccggcggccccatcaatcgttgcccggctgtgctgacgtcatcctgcagtagcggggttgggg

SEQ ID NO: 253460 - DNA, 122 bp, Homo sapiens
aacaggacacatcggcagggcaggcaggtgctctgggagcttgaggcagacaggtggggtcggaggaacagagctcccacctcagtccgtctgccctgccctgtccccgctgcacagaggct

SEQ ID NO: 253461 - DNA, 122 bp, Homo sapiens
acaaagggcttttgtacatacacaacaatctttccttggccatgggttgcctctggaaaacgaatatcatattgggagaagcagctcccctatgccaagaggactcagttgtgtgctgtggg

SEQ ID NO: 253462 - DNA, 122 bp, Homo sapiens
gaaaggctctgtgactacagccaatcagaatcgaggccgggctttggcgggaggtgggaacgctgtggccattcggatttggcgcgagcgcggctggagtttgctgctgccgctgtgcagtt

SEQ ID NO: 253463 - DNA, 122 bp, Homo sapiens
attgtttcctgtggtggtcttttaattatagtggaagggtgaggttgggcccaaggtttgcggtcatcaccaggagtgaaggagttgactctgatggcaacctttccttggggaagaatgaa

SEQ ID NO: 253464 - DNA, 122 bp, Homo sapiens
tgtgagccgcactggggcaggagccactcggtctgggcagcagaaatccctccctaccttcggggtgggggtggggctgccttggcctctctctgcagggacaggtgtcggccacctctcca

SEQ ID NO: 253465 - DNA, 122 bp, Homo sapiens
gcagctcggccccacccccttttccgagggcgggagaggagtcgggcttaactctgtcctcgctggagccctgcagctcctcctcgcgccccaaagactcgcgcgccttagcgcttcgccag

SEQ ID NO: 253466 - DNA, 122 bp, Homo sapiens
cccacccccttcctctggaggtccctccgcctgttccagacgtagcttgtacacattttccgatttcctgcggggctccgccctgcagcggcagctgggtgactcaggaccccggtggccgg

SEQ ID NO: 253467 - DNA, 122 bp, Homo sapiens
gatctttgagtcagaaagtctggccgagtttaaaatgttaatccaggccctaatccgccccgttggcgggggtggaagtgctgcaccacaaggagagattgtgttttcttcccctgctctta

SEQ ID NO: 253468 - DNA, 122 bp, Homo sapiens
ggagccaatccgcggccggcgtggggcccggcctggcggaggtgatgctggtatgtgcgtcgccaccgcccctcccagcactgacgggcctgagggacgacaagttgacgctcctttcgtca

SEQ ID NO: 253469 - DNA, 122 bp, Homo sapiens
tataacggcgcgagagtgagacgtcatcggtgagcgactaacgctagaaacagtggtgcgcggagaggagaggtgagtgtgatggagaccacggggagcgggaggctgggctcctgggtctg

SEQ ID NO: 253470 - DNA, 122 bp, Homo sapiens
taggggcccacagagagggagggcctggacctcagcctcccagcgcggagggagcagagccgggattcaaacccgtggtgctttgtaggaaacccgtaatttccacggtctttttccttggg

SEQ ID NO: 253471 - DNA, 122 bp, Homo sapiens
tcgtggcggtcggtcagcggggcgttctcccacctgtagcgactcaggttactgaaaaggcgggaaaacgctgcgatggcggcagctgggggaggaggaagataagcgcgtgaggctggggt

SEQ ID NO: 253472 - DNA, 122 bp, Homo sapiens
gggcggacagcgggcggtgagtgtatgggaggctgcacccagctggtcaagtcccacagccggacgcccgcccggggaccctcccccctcccgccccaggccgaacccgtgcccccttccct

SEQ ID NO: 253473 - DNA, 122 bp, Homo sapiens
tagaaatcttgctcaccagatcacttttttatttgtgcttcctgctcatgagattgctagcggttactgccctcccacttccaaactaagagatagggatctgctcctaacggtcaactcgg

SEQ ID NO: 253474 - DNA, 122 bp, Homo sapiens
ccgcgtccagtgtcaccaaggcatcccggggattcgcttcccgcggagggggaaaacacgcgaccctttgaggtggattctggagccagacacgtctacacaactaggctttttatttaaaa

SEQ ID NO: 253475 - DNA, 122 bp, Homo sapiens
ggcctggaaaagctttttggatccctttctccctgccctcccttaaccactaggtggaaacggagggtgctttattgtacagatgtactaaaggatgagtttaaggtttctctgttattagt

SEQ ID NO: 253476 - DNA, 122 bp, Homo sapiens
cacaattaaagaacctgcaacaggttccccacagcagaagaggtctgaggatcccagagccgttcttccacaatctgcttcttcaaatttcagttaagacacaggaattctattattgcaga

SEQ ID NO: 253477 - DNA, 122 bp, Homo sapiens
cctctgaagttctcaagaagacaactttaacctcgcatgtccttagtcacggagaaagtccgagaacctcttcttctccaccgtcctccagtgcttctctgaagtcgaattcggcctcgtac

SEQ ID NO: 253478 - DNA, 122 bp, Homo sapiens
gcgaccacaatggggcgtcacccagggagcccctgcaagcgcagtcttttgatcagagagcggccggcaccgcagtcaggcagactcagggtgaaccctagaccacgtgagaacataagtca

SEQ ID NO: 253479 - DNA, 122 bp, Homo sapiens
gctctctagccatggaaagatcagctgttacaatctttcagtgatgcttctggaagcacacggcatttgtggtggccaccctggaggagataagtcattccagcttaggctcagaggctcac

SEQ ID NO: 253480 - DNA, 122 bp, Homo sapiens
ttggatgtgctagtggatgtgaggttgcaagtacctctgcctgccttgccaacagccacacgccactgtggcccctggcctcagtgctcttgtgcagcctgtgaccacacagcacatgctac

SEQ ID NO: 253481 - DNA, 122 bp, Homo sapiens
caggcctcaaagtggcaaccactgggcacagccctccagccctccattagtcaggaggggcgatggtgccaggacgagggacgagggagtgggcgggggctggctggagcagccccgtcgat

SEQ ID NO: 253482 - DNA, 122 bp, Homo sapiens
atgctgaggacgcgtcaggcaggcactggagcagctcacctgtggcccctgcgaagacgtcgccctgggccggactctctgatatgacagcagtggcctctaccgtggacgctcggtcaaag

SEQ ID NO: 253483 - DNA, 122 bp, Homo sapiens
cactgaaggatgttaggaagtagggattccttgtgcaacttaagagttttgtaaataagacggcttggccttgtgtcaagatacatcaattggttatagcttagtgcttggaggcccacatt

SEQ ID NO: 253484 - DNA, 122 bp, Homo sapiens
cagtgctgttcccttttgccaggtgggaaaatagaggcacaacgatgcttgaagctgcgccgtggcagagccaggatgtgaaactctggccacctggcttaatttttttaaaaaggttaaaa

SEQ ID NO: 253485 - DNA, 122 bp, Homo sapiens
catcctgtagacccataaaatgatcggattccagcttcacgcaaaagctttgttgaaatccgcaagcacacggagcatccagggcgccagcactaaggcatgcgaactgttcatttgcatct

SEQ ID NO: 253486 - DNA, 122 bp, Homo sapiens
gacagcagttacaacacggtaacagacagagcaaacacgtgctacacagctgcaagggcccgtcctggaagagcaggagcctgccccgtccccactgaccctgctttgtgttgcagttcgtg

SEQ ID NO: 253487 - DNA, 122 bp, Homo sapiens
agctgacccgctgcacagatgacttcaacggggcccagtgcaaggctgtgtctgtggaggcgggtatgatcgcactgcgcaggggtgccacggagctcacccacgaggactacatggaaggc

SEQ ID NO: 253488 - DNA, 122 bp, Homo sapiens
gagtccctggctgggaggtcccccgagtgttccgctgtgggctggaggtggcgtttctgtcgtgatttatgtggagtggttcaaaacagaagttaatcactcgggaagcggacgggaggggc

SEQ ID NO: 253489 - DNA, 122 bp, Homo sapiens
tcctgcccgcccacgcgtccgcaggtgaggtgcatcctgacaggtcacgagctgccctgccgcctgccggagctccaggtctacacccgcggcaaaaagtaccagcggctggtccgcgcctc

SEQ ID NO: 253490 - DNA, 122 bp, Homo sapiens
ccaggtggagcaagttggcaaacaggctcctctctccccaggtatgggcgtcctcagcggcggggtccccgggtgaaggaggaagctgctggtgcatgggtgccggctgccctccacccaca

SEQ ID NO: 253491 - DNA, 122 bp, Homo sapiens
caccagttcacttcttctgtagcgttattgacctgtcattagttatccgtccaaggtcgacgggcctggcccagccataaatcacggcggctggaggtgggctacaggcggagcgatggtcc

SEQ ID NO: 253492 - DNA, 122 bp, Homo sapiens
gggggattgacttgattttctatacagatatgcaaagtgcagggcagattcctgaatggtcgaagcttatagtgttcccgggctggaggttttgggatttctatgctaagcgatgggtgact

SEQ ID NO: 253493 - DNA, 122 bp, Homo sapiens
ccaccacgtctcatgccagcctcggcgcagctccggagagcgggaggcggaggctcagagcggtgcagccccaccgggccccagcccgttgcctccgcccccacctcaccccatccccagca

SEQ ID NO: 253494 - DNA, 122 bp, Homo sapiens
ctcgcagaagcaaagagtaggcgctgaggactggggcaccgaggactttgtcaaagtctccgggtcgggtgggcgcgtctgtcagatggggcagggctgaagtgagtttccgcaccggacgg

SEQ ID NO: 253495 - DNA, 122 bp, Homo sapiens
agaaacccgacaccccgcccccattaccctccggggaggggccccggctcccccgagcgccggccctgctgagacccaggagcccctgcaccaaggcctgggcccgcttagctgcagtgggg

SEQ ID NO: 253496 - DNA, 122 bp, Homo sapiens
tcctgggcgccatctgaggccgtgggctcctggcaggagaacctggagctttcagattcccgggaaggatgcatttcccccactcttgggcacaagctgccctttgctggcgttgggcacgg

SEQ ID NO: 253497 - DNA, 122 bp, Homo sapiens
gaaattctcatctccccaaaagtccgtttctctgggggagaggagcagatggggacaccccgggagcaagcacctggctctgccctggcacgccccgtgactgacagatgcaaatgtcccgc

SEQ ID NO: 253498 - DNA, 122 bp, Homo sapiens
ctcagctaaagcctgattctttcttcctgtgggggtgagccacagttggcaatgattcaccgaaatttccaccagctaacaataaaaaattatgtcccattctgaagaaacaaaagaaaaat

SEQ ID NO: 253499 - DNA, 122 bp, Homo sapiens
gtcttgcggagccccatcccgagggccctgcagagggcgaggtgtggggtcttcaggcggcggtgtggccatggggcgccggcgggtgtgaagcagacgagaactggccggatcccaacagg

SEQ ID NO: 253500 - DNA, 122 bp, Homo sapiens
atgcctcagccttcctgtccggtctcgcctccaaagctcgaaaacaagaggcgctgggagcgaggttgagagacgcacgggtcccaccccggccccgccttctgccaattctaaaggggaag

SEQ ID NO: 253501 - DNA, 122 bp, Homo sapiens
atgtgcacgaagtcccattgtagaagcttggatctgccatccctgcagacactgtgggttcgaggactgtgtcatctgtccggaaattcacagttaggtgactgcttcccccagcccactgc

SEQ ID NO: 253502 - DNA, 122 bp, Homo sapiens
agtgtctgtttatatgtggtgcacacgcagccaccctgtgccctgtgctggaatgagtgacggtcttccttatcaggtatagccagggggtgcctgtgaggaacagctgtccgaccctgcct

SEQ ID NO: 253503 - DNA, 122 bp, Homo sapiens
ctaacagcaactggatcggaaagcagagaaagcagagatgcaacctcggccctgtggctccggccaggctctgctccagtgagaccactcgctgggaaactgagtttccccctcgatttcag

SEQ ID NO: 253504 - DNA, 122 bp, Homo sapiens
agaccttgcagccccatcttctccggttcctccagggctaggctgaagatcagcatgtgtcgggccacagcttccagattattctccagcacaaagaactagaaggatggacagggcagaat

SEQ ID NO: 253505 - DNA, 122 bp, Homo sapiens
ttaattggccatacacggtggtgcatgtcccagctactagggaggtagaggaaggaggatcgctggaccctgaaaggtcaaggctgcaatgagccacgtttgcaacacggtactccagccag

SEQ ID NO: 253506 - DNA, 122 bp, Homo sapiens
cagggcggggcggctgattggcggagctggccgaggggcgcgctgctgattggctggggacgaggaagcaggaaggagggcggcggaggctccgctctcggggagtttgtgggggaaccgcg

SEQ ID NO: 253507 - DNA, 122 bp, Homo sapiens
ctacgttgtatctgtatcttgtattgtattcccccttcctgctgatgcgaaatgcctctacgttgtatctgtatcttgtattgtgttcctgtttttagatgaaagtcttgtggctttttttt

SEQ ID NO: 253508 - DNA, 122 bp, Homo sapiens
cgctctcgcagccactttcccgcctcattggctcccaaatgtattttaaatatcactctgcgcagagacaattactgaaaacgctgagctcacactgttgataggcccgggcggccgggctc

SEQ ID NO: 253509 - DNA, 122 bp, Homo sapiens
atcggctcctcacactcagtgtttaggaggtatcatcatatcatgggctgacaggaatgacgggagagaaaccttaacgcagagtgagtccccatggaaaccgcgccaaccccgaccggggg

SEQ ID NO: 253510 - DNA, 122 bp, Homo sapiens
tgaccaatcagcactccccacttcctaagcccctaccagccaaattattggtaaaaactccgatccgcaaatgctcgggacaactgatttaagtaacaataaaacttcagtcttccgcacag

SEQ ID NO: 253511 - DNA, 122 bp, Homo sapiens
cttggattacagtctttattacagaaataaacagaatgactggcctcttatctgtttaggcgaaggtggaatgcattatgatgaaagttgtagcttttgctaggaagactaatttcagaact

SEQ ID NO: 253512 - DNA, 122 bp, Homo sapiens
gcggggctggggcggggccagtgctggggcggagccggagctgggggcggagccaagacgcggcaggggcggagccagcagctgcggcacagcggggcctgtgcggcccaagtcgtccctgt

SEQ ID NO: 253513 - DNA, 122 bp, Homo sapiens
gcccgggatgcagagagatctaccaacacccgagaatggggacagggcgcatgcgcacaccgtggccgtggcgtctaagtgctcgcccagctgcggcagccgctaggtggcgcatgcgccct

SEQ ID NO: 253514 - DNA, 122 bp, Homo sapiens
atgtgctcaaggtcccacagttggcaggcagtgaggccaggaggccaccatgaaccactgcgttctattgccttcccagaagtgactccatggtggcctccctcccttgatggagtatcagg

SEQ ID NO: 253515 - DNA, 122 bp, Homo sapiens
gaggggagcctgagtgggtgtgggtcgggggtgggagctgacgcaggcggcgggtgcagccgccagactcggagccggggaggcccatgccagcagcccggcagctgggcttccggaagcag

SEQ ID NO: 253516 - DNA, 122 bp, Homo sapiens
tgtttcaaattgagagaaacgagcatacccacccctgcacataacttaagtatatcactgcgaattctacatgtatgaaacaagcataagccatgaatcctccacttggtgtgttacttttt

SEQ ID NO: 253517 - DNA, 122 bp, Homo sapiens
ggagctcttagtttagtaaacaatcacactgcaatatggtataagtgtacaaccaaggcacggaatatggtattactggtgctgtaaagagaagcggatagtggcaacggacttcctaggag

SEQ ID NO: 253518 - DNA, 122 bp, Homo sapiens
tttgttttgccaacatgaaaactgttataaggaaacaattatgtaaaactgtttaattcacgtttgggaatattgaatgaatccattttaacataagcactgtggtgccatcttttttctca

SEQ ID NO: 253519 - DNA, 122 bp, Homo sapiens
ggctgagacaaggggactgtgctctgtgtgcttctgtgccctgtgtttatatggttcatacgctgcctgtccaccatgtttttcccgagagcctcggcagcgcaggcatcatgggaatgact

SEQ ID NO: 253520 - DNA, 122 bp, Homo sapiens
gcccgcgggcggcgtagaggcagcgggcgggggcgcgcgcggcgggaggaggggagcgcgcgtttcccggaacagcccgcgcggaggaaagggaggaaaaaaagccaccctgcggccggggc

SEQ ID NO: 253521 - DNA, 122 bp, Homo sapiens
aataaggcgcccgacagaaggcgtttgtctttgttgtggagcatcagcgttaaggacagccggctgctgtgggaggtcagtgaaggaggctcagttcatggtaattacttaagtctgtctct

SEQ ID NO: 253522 - DNA, 122 bp, Homo sapiens
gccattgtgctgttgggactggtgacagaactcttggattgagaatgccgagatggtgcacggaagattctgtgtgctctttcagaccaggaggaggatgaggaggaggaaagtttatatga

SEQ ID NO: 253523 - DNA, 122 bp, Homo sapiens
gtgacagtggtgtgctggagccagctggcactggccctcaagggctgattttaaccttgacgatcaagatgcaatcatccatccgttctggactctgcattcattgatgtcttgtagtttga

SEQ ID NO: 253524 - DNA, 122 bp, Homo sapiens
gaaatcagatgaaaaggggtgtacaaaggaccaggtctcgtgagcgcagccaatcttgtccgctcccaagcgactcaggctcttggcaggacttgctgtagagtcccagacggagttagcca

SEQ ID NO: 253525 - DNA, 122 bp, Homo sapiens
ctcaccacctctaattggttggttgcaaaatagggagacctactgcgggggaagcagccccgctctggatagaaaggctggtgggtgctagcttccacggtgaaaagggtgtacttaacttt

SEQ ID NO: 253526 - DNA, 122 bp, Homo sapiens
tctctgcagcccagtctctgcagccccgcccccgcagccccacctccgaacccacagccccgcctccgactctgcaaccccgccccgcaggcctgccggcaggtgcctaacagtgacctcgc

SEQ ID NO: 253527 - DNA, 122 bp, Homo sapiens
tgcgcaggcgcgggcggagggcgggctgaagcagctgaagcggcggtagcggcggcggctcgggcagaggggcgggagctgaggcgggagcggacaggctggtgggcgagcgagaggcggcg

SEQ ID NO: 253528 - DNA, 122 bp, Homo sapiens
aacactgggggaaacctaatttcctaggcccttaccaaaaacttctggctatgtactccccgccttaaaagacaagctcattttaaagagacagcccccctcattacgccagcccatggttc

SEQ ID NO: 253529 - DNA, 122 bp, Homo sapiens
accaagtatttctataaatagttacatataatcaaatactgtgataccttttaaaagtcacgtataatctgaatttactaagagagataccagggactgttgtggcaaattactcaaaaggt

SEQ ID NO: 253530 - DNA, 122 bp, Homo sapiens
ttggaggaggaggtgcccgagaaacagagctttaacaccacacaggccagggcaaaggggcgagttccctcaaggactgaaaggggcaggcagctagttcccagctgccctgaggagaggca

SEQ ID NO: 253531 - DNA, 122 bp, Homo sapiens
ggggacccctgctgggcagcccagccacatcctgctcctctgcctcccctccccaggtctcggtccttcctgagggcggtgagaccccactgttcaagcagttcttcaagaactggcgggac

SEQ ID NO: 253532 - DNA, 122 bp, Homo sapiens
tggccactgtattggacaacagctctaaactcactagccttcagactttcattaaaagctcgaactaacatacttttttcccttcttggaagcttcatacatattctctgctttgcatggaa

SEQ ID NO: 253533 - DNA, 122 bp, Homo sapiens
gtaagagcaccaggagccccaggcagccccgcctcccactctggctgcccgggaccgtcccggagccacgtccctccccaaaggaggccccttacctgtggtggcacctcccgggcgcctcg

SEQ ID NO: 253534 - DNA, 122 bp, Homo sapiens
aacaatcagtgaggaaactgagacacaggagggttcaggaactggcagctggccacatagcgagtggtagagccaagttttatgcccatgttcttcccaaaataccacaaaagcaaccacta

SEQ ID NO: 253535 - DNA, 122 bp, Homo sapiens
tgtgggtgctgtgcaagataattagaaccaaaatcatttaattggaagatatcctaccttcgctgctatggcttcttgtctaagaacaaacaacagttggtcctaaaatgtgaatcgtgata

SEQ ID NO: 253536 - DNA, 122 bp, Homo sapiens
aggggcagcctagataggaggaaggaggtgcagacgccccctccctcttgtttccagagccgatgtatgcaggcctgccgtcctaatcctggttgttcccagtccctcctccccttccacct

SEQ ID NO: 253537 - DNA, 122 bp, Homo sapiens
aattgctagctgtatgtaagtgttttggttatagaacctaacaatcccctagggattaagcggtgggcgcctgctgcttcaacaaccctgcagcaagggaataaaggaacaactgtatttct

SEQ ID NO: 253538 - DNA, 122 bp, Homo sapiens
ccagccctggtcatggggcatcccagttccagcgagacatccctggcgtcatccccacaccgggttcaacgccccactggctttgcctccaaaacaaactcccgatgcgcccttccttccac

SEQ ID NO: 253539 - DNA, 122 bp, Homo sapiens
tttttcaagcgcgaagagggcggcacctggatggtttttccttctggaagttctgggaaacgtattccagaactctgtccggaaacaattgggccgcaggagcgcgggccttctgggaaggg

SEQ ID NO: 253540 - DNA, 122 bp, Homo sapiens
ccaggcctgctgtacttgtgtgggcccaggatgtgcctgtccctggtgccccacgggagccgatgcaccgtcctggtagagtgagatgactgctggtgtccacaggctgctggaagactacg

SEQ ID NO: 253541 - DNA, 122 bp, Homo sapiens
tcagagccatcatgagcacccggctgtgtcctaaaccctgctgcgtcagcccctgttgtgcgagcatcttaggtatgtgatgaacacaggcatggataaggagggttcccacaaagaacagt

SEQ ID NO: 253542 - DNA, 122 bp, Homo sapiens
ggtcatatcctcagtctcagtcactcagctggtgagtggcagaagcaggatttcaacagacgggtgcaaagcagagccctgctcctagtctctgagctgagtgccgacttagggaggcaatg

SEQ ID NO: 253543 - DNA, 122 bp, Homo sapiens
tataggcaaagcattcagtcttttgaagctttcatgtttaaggtgagtgttttttcatgccgttaatcaggatgagaaagttcagtctgttcataatttgttgagattttattatgattggg

SEQ ID NO: 253544 - DNA, 122 bp, Homo sapiens
atgggcttttgtcatatcagattagtcagtcatgggtttgggggagcaacttgcctgggtcggggtgtacccacccttcaaactttgtggagcaggcccgggggtcttgggaaacacgaagg

SEQ ID NO: 253545 - DNA, 122 bp, Homo sapiens
aggggaatccttaggaaagctgagtgcaaggcttgagttcaacgtggtccgcatccacctcggaacctgtcaccctgctgtcccaacccttttaacatgtcctcctggaactgggccagata

SEQ ID NO: 253546 - DNA, 122 bp, Homo sapiens
agggcagccaccaggatccaacccaggccctgagctgtggtcaccactcccaagggaacccgagggcacctccactcccagcacctgacagcagggactctgggaaccagcacaagccaggc

SEQ ID NO: 253547 - DNA, 122 bp, Homo sapiens
ttactgtattagcatttgctcacagtgcaaatggtacaacattacaccatttcaatatttcggtttttaaaaatgctgttttcattaactatattatattggcattacaatatgacaaagga

SEQ ID NO: 253548 - DNA, 122 bp, Homo sapiens
gaacaagaatgtaaacaagcgtggggtctgtggtctcccagcacttaggaacgggtctggcgactcacgggacacccccaggacctccctctttcctaccagggacacgccggctggagtcc

SEQ ID NO: 253549 - DNA, 122 bp, Homo sapiens
gttctggtgcttttggttttacaaagctctggatccaatcagtgttgccaaagattggatcgtatcttctctagaagctttttgtaagtttcttatgttcattatgtcacttccccctccct

SEQ ID NO: 253550 - DNA, 122 bp, Homo sapiens
ggagacgaaagggcttggccacctgtggcagccatgataaaacctagggaaaacggagctcgaagtagcttattttatttattttttatttatttatttatttattaaggagtcttgctctg

SEQ ID NO: 253551 - DNA, 122 bp, Homo sapiens
tattatagatctctgaaagattcatcagcatcaggaatcagagtagtgagggaggctcagcgaccaggcccagtccaggcctgctgtgctcaggcagtgaagctctgaccacacagtctcct

SEQ ID NO: 253552 - DNA, 122 bp, Homo sapiens
ggagttgagcctgcacacattacttagaaaaaacctctgcaaacgggtaagtacatcgcccgcgtgggccgtggctggaggcttgtcacctgcttcagggacttcctcgggagcctctcgcc

SEQ ID NO: 253553 - DNA, 122 bp, Homo sapiens
ctccctcccaggcagtcccgggaatgttctgaaaagtatccgaaagttctgagtcgcgcgcgcgccaaaagaaaaggcacaaccccccaccactccgggcgtggcgtgcccagacctcgcca

SEQ ID NO: 253554 - DNA, 122 bp, Homo sapiens
caccaacttatcaggagactgacactgtccatctcctccaaaaaaaaaaactgacctgcccggcactttgatgtccaccagttgagctttatgtttatcaagaatagttgtgtaaacttcca

SEQ ID NO: 253555 - DNA, 122 bp, Homo sapiens
tcccttcctgcgtattgtccacatttcctgagccaacagcaattagttgcgctgctgaagcgcatgggtgctgggatcccgaggtgaagggggcgtggtcctgatcgccgacagggcgcagt

SEQ ID NO: 253556 - DNA, 122 bp, Homo sapiens
tgtccgcgccgccatcttgccggtcccgacctctcaggattgcttccggggttacagcggcgtcctcagaccatagagttccgcaaaagaagagagtacatcctcatgttccggcgctggaa

SEQ ID NO: 253557 - DNA, 122 bp, Homo sapiens
ccgcagccgtgcacaggggaggacacccaggtaggtctcagtgcgcagctacagcattcccgcgatccacaaagtaacaacgtccgcccagatcctccacagccgtgcacaggggaggacac

SEQ ID NO: 253558 - DNA, 122 bp, Homo sapiens
aagaagtgtgacagcaagggtcttggggatcagcggctgtaggttgtgcctgtaccccctcgaagaatggtggatgcgaaagacacagtgaactggctcgctcacggaggagggagggatga

SEQ ID NO: 253559 - DNA, 122 bp, Homo sapiens
tgcaaacaaatagctcacttaggtgacaatattttcaccagggacttgctaactaatggacgccagtagactgagtacttggaattgtccaacctttgtataacttggatccaaatggaaat

SEQ ID NO: 253560 - DNA, 122 bp, Homo sapiens
aaccagcaatggcaggttgagtcattcccatgtcacctgatggtgactctttcctgcttccgtcttctactcacggggacccctgtgatgactttgggagcacctggatgatccaggaaact

SEQ ID NO: 253561 - DNA, 122 bp, Homo sapiens
catgcctgcgtatgcaaaggagcgtgcaagcatgcgtgtccacaggggtgtgagtgtgtgcgtgaacacctggagccgggagaaaacaggcctatctggagggggagcaaagtacaggcatc

SEQ ID NO: 253562 - DNA, 122 bp, Homo sapiens
cccctgcatcgaatcaccggcatgccccaccatgtcagacgcagctgtagacaggagctccgaaatcgccaccaaggacttaaaggagaagaaggaagttgtggaataggcagaaaatggaa

SEQ ID NO: 253563 - DNA, 122 bp, Homo sapiens
gggaggcttggtgcatccctctcccccatcaaagactctagtggattcttctggggctggcgttgtgttgagttcagatctgccccttctggcttgggatgtgcttcctcatatgtaaagtg

SEQ ID NO: 253564 - DNA, 122 bp, Homo sapiens
gcgtgtggggtcgaagtccggagagcccttaagtgtgcggcacgcagagctcctcagcagcggcctgacagcggtgcaggagaccccagcttcctgggctgggacagggctgttgtctcacg

SEQ ID NO: 253565 - DNA, 122 bp, Homo sapiens
ggcggaccccagatggcctgatggatggactgaccaccaatggagtcctggtgatgcacccggcaggcggcttctccgaggactcagccccgggtgtctggcgggagatctcggtctgtggg

SEQ ID NO: 253566 - DNA, 122 bp, Homo sapiens
acagcttagattctgcccaacagccaggattgtaaagtttattcgcgtgcacagtggtctcgaaagcacttccgtataattaggagtgattgtactcacttgtcaaatctgaccaatagatt

SEQ ID NO: 253567 - DNA, 122 bp, Homo sapiens
tgcgtggacccaggcgagcgtgccagggactgggggctctggaagattcacactgtcagccgtaggcgttctttcctgcccccccagcctcccgcaacggatgtactccgagcccttcgaac

SEQ ID NO: 253568 - DNA, 122 bp, Homo sapiens
tatgcccttgcatgcacctggcccttgaactagttccccagtgccaagtgagggccttcccggttttcagttgtgaggccagctctgcgttaggggtgggggctgcttttgctgtaagccag

SEQ ID NO: 253569 - DNA, 122 bp, Homo sapiens
tccccacgcagctctgcaaaggttgcgttcctggctgcaggcttctcctgcgggcctcttcggcttcctttcagtcttcctttcagtccaggagttctcagcccatctggggaaggggggcc

SEQ ID NO: 253570 - DNA, 122 bp, Homo sapiens
gccaccttcggccttcaggagcaggtgaaacgcaatcttcccatgggccaggaatggcgacgtccgcactgcgcaggcccagcgtggcgccgctcacatcttttcagctgaggtcctgattg

SEQ ID NO: 253571 - DNA, 122 bp, Homo sapiens
gccgctttgtccgccgcccgcagcccccaacaccctggccgcccacccgagctgtcccctcgctgggaccccgcgcagcctgcccagtcccccgcccaagacctcgaggccgaaacctcagg

SEQ ID NO: 253572 - DNA, 122 bp, Homo sapiens
caaacatcccaaagaagtttctgagaatgcttctgtttagcttttatgtgaagatgatcccgtttccagtgaaatcttcaaagaggtccaaatatccacttgcggatcccacagaaagagtg

SEQ ID NO: 253573 - DNA, 122 bp, Homo sapiens
ctgacaactggcttcagactgtcctacgctctgactgacaactggcttcagcctgtcctacgctctgactgacaactggctttagactgtcctacgctctaacttgtcaactggcttcagac

SEQ ID NO: 253574 - DNA, 122 bp, Homo sapiens
ctgaggtaccaggttcatctcactagcgagtgccagaaagtgggcccaggtcagtgggtgcgcacaccgtgtgcgagccgaagcagggtgaggcattgcctcactcaggaagcgcaaggggt

SEQ ID NO: 253575 - DNA, 122 bp, Homo sapiens
gacaaacatgccccaggaccatgttacatgccaggcctcatgcgggtcatcagggcacagcggtgtcagggggcctacattccggtgggggactggcgtggaggcacatatggtatagcgtg

SEQ ID NO: 253576 - DNA, 122 bp, Homo sapiens
gtctggctcccgctctggagatagagtgaacgaagagtaggggcgaggttcgcgtaggggcggagccctcaggggctgtcagagggcggagtttatgcccctgccccagagaaatacgcatc

SEQ ID NO: 253577 - DNA, 122 bp, Homo sapiens
tgcctccccgcctttcctggtcaccgttattccttggcatccaattcacgtgcgagtccccggaataatcccagtccccagcactgtctggtcccttgcctcgcactcttatttcgaacacc

SEQ ID NO: 253578 - DNA, 122 bp, Homo sapiens
ggacagcacgccgcagccgccggtaccgcagcagttgcctacgtggctggggaagcggggcgccggttgtactcacctcagctcagggtcctagagacctgcgggttttgctggtcgctgag

SEQ ID NO: 253579 - DNA, 122 bp, Homo sapiens
ctcacctaccagtcatttccagtggctttccaaagcatgggcatggcatggtactgaccacgcattctgtctccctggaaactggttcttaggacatgcctgagaaaattagttcacttgtc

SEQ ID NO: 253580 - DNA, 122 bp, Homo sapiens
aagaaatggtcactttagagtagaaggcgacctgaagtaagaacaaaagctaagatttatcgagcacttcttatgtgtccagactctgattaaatgcttatgtacatcatctcgtttaattc

SEQ ID NO: 253581 - DNA, 122 bp, Homo sapiens
tccaggtcaaggcaccggtttcggtccccagtgcggctcctgtctcctgacccagccccccggcccagcccccagaagcccggcacggtgtctctcgggacccaggacacgcaggtcagcgc

SEQ ID NO: 253582 - DNA, 122 bp, Homo sapiens
gaaaacttaaggccgcaactaagtaacggatcgctgcgaaggccaaactagccacgccaacgcccccactggagcctccccagcgctccgcccccgctcgcgagaacagcggcgacggcgcg

SEQ ID NO: 253583 - DNA, 122 bp, Homo sapiens
agatcttacagtcatgcatcatttaagatgacaggattacctcctgagaaatgtcttaggcgagtttcttgtgtgaacatcttagagtgtactcacacctatatggtatagcctcttacacg

SEQ ID NO: 253584 - DNA, 122 bp, Homo sapiens
ggccctggctgcagaacgtgggtaggggccccacacgccactgacctgggtgtcggggcacgtcgcgggccacctggtagtagcggtagaactgctccctccacaggaactcgtcccgcgac

SEQ ID NO: 253585 - DNA, 122 bp, Homo sapiens
aatatgtctttacaacattcttacgtgtatcatttgcagggcatgtaaatcttactaatacgtgcaccaaaaagtttgatattaattttttaaaattctgttaaagtccttaatgactaaaa

SEQ ID NO: 253586 - DNA, 122 bp, Homo sapiens
cagcctggcgcatgtggagcacctgctgagggacctggccagcttcgaggagaaatcaggcgtaaggcggggtcccggcgggggcggcgggagagtgtgggcagcatcatcaagtgctgctc

SEQ ID NO: 253587 - DNA, 122 bp, Homo sapiens
tctaccgcggcgtgagccgggtcacgctcttcacccacccgcccaaggacgagaaggcgccgcacctcaagcaggtggtcaggcagatgatccaacaggcccagaaggtaggcccccgcctt

SEQ ID NO: 253588 - DNA, 122 bp, Homo sapiens
ggggcccagcagatgccaggcagtgagcagcgtaccaacacccaccctctagatttttgccgggaagagaaggcttgcaaaggcacttggaggtttggtgtgcccgcagcagacctttgcgt

SEQ ID NO: 253589 - DNA, 122 bp, Homo sapiens
aaagtgtttggctttccttgctacaagaaatagttaaacatatgtctggcagtctgtgaccgtagcagtgtgtttcctttaaagaaagtagattacattgccacagatgctgtcaccactag

SEQ ID NO: 253590 - DNA, 122 bp, Homo sapiens
ctgtgtgccatggtggtttgctgcacctactgacccctcctctaagttccctcccctcatcgtaaactttcaaatgacgtcctttgtaagttggtggcatgttgatctcctggactattagt

SEQ ID NO: 253591 - DNA, 122 bp, Homo sapiens
ctagagagggctttcaaatgtgcaagtctccctttggcccaggcacagctaatctgagcacgtcaatgccacacatccttgccttcaaagagtaattgggccaggggtgggcccatgactta

SEQ ID NO: 253592 - DNA, 122 bp, Homo sapiens
tttttataaagccagccataaaacataaaaatactactctaggccaggcaaggtggctcacgcctgtaatcccaccactttgggaggccaaggcaggcggatcacgaggtcaggagatcgag

SEQ ID NO: 253593 - DNA, 122 bp, Homo sapiens
aatccccctacatcccagaccacatatatcagaatttctgatattctgatgatttccatgcgtcagtagttcttaaagtttcccaggtgattctggtgtgcatccatgattaagaatcacaa

SEQ ID NO: 253594 - DNA, 122 bp, Homo sapiens
caggccttggatccggtgcccttcctgagacgagattgtgtgtcccgtaacaaagatgcgcgtggtcttctctgaacaatttttacctctcacgcgggggttctcaccgctctcccctgaga

SEQ ID NO: 253595 - DNA, 122 bp, Homo sapiens
tctcatctcccaatattctcaaacccagtcccttcatctcttgactggattatgcagtctcggagctggtttatctgaactcactttctccccctttgatctgttctccacacaacagccag

SEQ ID NO: 253596 - DNA, 122 bp, Homo sapiens
gccaggtcttgctcgcccagtgccctctctgcctacccttccctttgcgctctggaagcccgggagccgggcacgggccagcatctgcaagatgccactactctggaagcccactccgattc

SEQ ID NO: 253597 - DNA, 122 bp, Homo sapiens
ggcctcatgaagggtgccgcggtggctgagccagcgccgcccgggggaggccagtgcgtccgctgccaggcccgtctggtaggaaaaccatggacgtgggtctgtgctctgcacccgcgttg

SEQ ID NO: 253598 - DNA, 122 bp, Homo sapiens
tggtctaacttcacaaacatacccgcggacctttgcggcaagtgttacagctcttaaagacggtgcgtccggatgctccggtgagtttgtagtctcactgacttcacgaataaacccgcgga

SEQ ID NO: 253599 - DNA, 122 bp, Homo sapiens
aagagggagggaaatgtccctgggaggaaggggaataatagggtcaggcaggtggcaaagcgttccaggcagagagtggatgtgaggtgaagtactgtagtaatagaagtgaggtggcagtg

SEQ ID NO: 253600 - DNA, 122 bp, Homo sapiens
cagtgtttggatgagcatttgagacacaaagctttggagacattaaaacactgaccattacgggcaattttatgaacaagaagaaggatacacaaaacgtacccttatctgtttccccttcc

SEQ ID NO: 253601 - DNA, 122 bp, Homo sapiens
ttttgtgggcaagtcgtggcaggcccctcagcctgtgactttgctcctctgcctggggagcggggaaaggaggccttcggcagcattgcgcaggtcaggaagcgccctggggagacttctat

SEQ ID NO: 253602 - DNA, 122 bp, Homo sapiens
ttttctggagaccagcagaaatgtggttgtatttatattagtggggacagaaattatgatcgctctggggccgctgcagcctttctgctgacaagttgcatgccactgttccgtagtgactg

SEQ ID NO: 253603 - DNA, 122 bp, Homo sapiens
gaatggtgggagagtgaagttctgcttgtgggtctaagctttggagggctgcagcagaggcggcccgggagccctctgcgcgggtgcccttaggcgcgcaccccttgctcacccgcacgcgc

SEQ ID NO: 253604 - DNA, 122 bp, Homo sapiens
tctactgctgtcctcagtacagccgcttttcataaaagtgcagaccatggacgccaccctcgatctgggccgacatgatccgcttctcaaacttgagctctcctgagtacatcatggaccga

SEQ ID NO: 253605 - DNA, 122 bp, Homo sapiens
cgtccagcaccgccctctctgcgcgccacttagactggaaggcggggccacagaaggccacgcctccacatagcaacaaatagagtggacggagccgagataacttgtcactcagcgccctg

SEQ ID NO: 253606 - DNA, 122 bp, Homo sapiens
ctgtcaggtcttcccgctttccgtcgcttcctgttccgtcttggtcccgcctgccgctggcgccgttgtttccggctcaactggggagctgctggagctcttctggcctctggttttccgac

SEQ ID NO: 253607 - DNA, 122 bp, Homo sapiens
gaggaatgttgccctgagcgtgggtacactcacttctccaggcttcattctgagtatacgcgcggctctcccggaagcgaagagggcacttccttacagaggcttgaaagtgtggtcatcca

SEQ ID NO: 253608 - DNA, 122 bp, Homo sapiens
ggccttggcgggcagggcgcggcgggtgacgggacggcgtgcagggtgcagagcagggcccgcacgctccgcaccactcacagcgccatgttcgctgctgttgttgttttttgagacggagt

SEQ ID NO: 253609 - DNA, 122 bp, Homo sapiens
caggttcatctcattagggagtgccagacagtgggtgcaggtcagtgggtgagcacaccacgtgcaagctgaagcatggtgaggcattgcctcactcgggaagcgcaaggggtcagggagtt

SEQ ID NO: 253610 - DNA, 122 bp, Homo sapiens
taattgaaagcccccgaaaagcaccccttttttgagctatgttgcataactggggataaccgtatatcgatgaatctccatatgagaagagaaatcaatggcagttcgccatcttggagaat

SEQ ID NO: 253611 - DNA, 122 bp, Homo sapiens
taatcgcatcaccatcgttgctcacccaggagctgaccgtgtggcgcgttccccggagtgcgtgacctgctccgaggccttgcagcggtagatacgttctgcgaaaacgcttccaaatgagg

SEQ ID NO: 253612 - DNA, 122 bp, Homo sapiens
gctcataacctaggggagtcacagtgaaattacttgctttaaaattctttaatcactctgcgagttgttaggaaaagctgacacatctgatttggaaactcccactccagtggactgttgtg

SEQ ID NO: 253613 - DNA, 122 bp, Homo sapiens
tggccagcatgatgaaaccccatctctactaaaaatacaaaaattagccaggcgtggtggcgtgcgactgtagtcccagctactccaaaggcaagagaatcgcttaaacccaggaggcagag

SEQ ID NO: 253614 - DNA, 122 bp, Homo sapiens
ccaggaagatctcacttccccacagaagctcttggcctggcctcctgcagtgccacgctccgtgtatttgacaagctgagttggacactccatgtggtagagtgtcagtttgtcaaataccc

SEQ ID NO: 253615 - DNA, 122 bp, Homo sapiens
cactgagcagcaacgccagaacccagaagcacttactgccaggaacagggtactccagtgcgccatagcgtcgcggccgctgggcgaggggtgggactgcaggcaccgtgcagccgcggacc

SEQ ID NO: 253616 - DNA, 122 bp, Homo sapiens
gcgggcagtggctccctcctaccactaggtggggatctggagtcgttcaaaccaggagtccggggcttgggttcaggcctggagcccctcgccctcctgccgccagccagggtttcccagcc

SEQ ID NO: 253617 - DNA, 122 bp, Homo sapiens
ctgaggtaccgagttcatgtcattagggagtgccagacagtgggtgcagcccaccatgcacgagccgaaccagggcgaggcactgcctcactcgggaagtgcaaggggtcagggagttccct

SEQ ID NO: 253618 - DNA, 122 bp, Homo sapiens
gaggagacggggtctcttggcaggaggcacaggcagagccaggtcggaaggtgcttcccccgcaggtcccccttgagggcagcagtgatgcagtcagtgctcgggggtgctgggctggactg

SEQ ID NO: 253619 - DNA, 122 bp, Homo sapiens
tctggaacccgaatccgcacgtggcaaacggagcggaccattgtggagccggctgcggggcgagctgcggacacgggcaaccaaaggtctcagaggcccacgctgcccaccccagccccctt

SEQ ID NO: 253620 - DNA, 122 bp, Homo sapiens
atgttcaacttggctttacccccaacatgcactgcacagatgcctgcaggtctacaatgccgagaccaagtttggggggcatttccgcagctctgtctattgtcctcctttcctcttctgtg

SEQ ID NO: 253621 - DNA, 122 bp, Homo sapiens
ggcaagtcttccagcgagtggagtcactcttaactacatttcccaggattccaagggagccgcgcgctctgcgctcatcttcctaccagaaatcggcaagtcactgaccctcgtcccgcccc

SEQ ID NO: 253622 - DNA, 122 bp, Homo sapiens
tttggcaaaatcacagagggagcagtgctctgggcacccgcagctcattaacaggcctttcgccatatggattctgggcgtgcttcccactggcaatatggtgtccattcgtgacgcaatag

SEQ ID NO: 253623 - DNA, 122 bp, Homo sapiens
gctgcaccgcggtggggttggggtccagccacatagattgagttgcaaggccctttgggacgggaaactgcatgttacaaatggggaaactgaggccaagatcgaaaaacgctgggagggac

SEQ ID NO: 253624 - DNA, 122 bp, Homo sapiens
ccacaagccttttctgcctaacccacagcatgtagaatctccatgagacgtttaagtacccgacaaactcctcagtgggaaaccatttgagggcagactggccagaaagcacagatgggaat

SEQ ID NO: 253625 - DNA, 122 bp, Homo sapiens
ttcctcgcctcagcaaaggcgagaagagtgccccgcggagtggctgtgatgagcgggatgcggaaggtgtccactgagccgatctgtctcccgctcacccacagcagttgctccatggtcac

SEQ ID NO: 253626 - DNA, 122 bp, Homo sapiens
aaaggaatttcctaaagaatcgccccccaaggggcctcctacccgaacctggcatcccagcgctgtgcacacctcagggttccagatccttgatctcgtgacctctgacctgcagtgacctc

SEQ ID NO: 253627 - DNA, 122 bp, Homo sapiens
tcagttcgtcctgctggtggactttgccccaggatccttcccctaccccgaccctatcaccggaggtggttgctgcggtgtctgggaaaggagtcctgccaattcctcttcctggcactcgt

SEQ ID NO: 253628 - DNA, 122 bp, Homo sapiens
acattgcgtagaggtcactgaagacactggcacgtgctatcctgcccatcatggaagggtcgtctacgatccggtaaacgtaatctgtagtttgaaccaaggaaagcccaccgtgcctcaaa

SEQ ID NO: 253629 - DNA, 122 bp, Homo sapiens
ataggacagcagccggctctttttttcatcaggatgtggagagtgggcgccttgggaagacgaaattgagtatgtgcgggggaggggtcatatgaaacaaggtcgggaagggggcggggaga

SEQ ID NO: 253630 - DNA, 122 bp, Homo sapiens
ccgaaacagaaagggctctgtttttatgctgtagggccaaaggggccaccctgagtgcagcgagaggaccacagaaacgggcagggcggggacagcagggccagggcttggcctcgggggac

SEQ ID NO: 253631 - DNA, 122 bp, Homo sapiens
gctcgcccgccgcgccggggcgccttttaccttctttatatttgcataacaatggcagcccgtgacgcgcgcgccggcggccccgggattgggccgcgcccacatgggggcggggcgtgggc

SEQ ID NO: 253632 - DNA, 122 bp, Homo sapiens
atagccggggagtgaggggctggtgctggccaaggcgcctctgactgacctctgctctctcgccaagtacccaggagatgtcccagaaagaacggcagctccactgagatcttgaacctcag

SEQ ID NO: 253633 - DNA, 122 bp, Homo sapiens
ggtcatgtattggatgattccagcatatgaagtgacctgaacaggcaaatccatagagaccgaaacagcttagtggttgccaaggctggtgggaggagatgaggaagggctgtttactgggg

SEQ ID NO: 253634 - DNA, 122 bp, Homo sapiens
ctcccaggcaggtcaaatgagggcaggcttgcaagtagggttctccagggaaccgccagacggcgaaataacgacagttctcaggattaagccttcgaaggagctccaaccccgatctgcca

SEQ ID NO: 253635 - DNA, 122 bp, Homo sapiens
tcccgccatggttgcctcaagccacctcctcctcacgtgccttaccccagcaactaactccgaacgggcaacgacagcagcctatcctctacgaaacccgcccctatcaaccaatgggatgg

SEQ ID NO: 253636 - DNA, 122 bp, Homo sapiens
gtgtgctgagcggaggagccggggtgggggcggtgcaagcggaagaaagagccaagagagcggaaaatcggctggtgctgtcgccgcccgagttttgtgtttccacagctttccagttgggt

SEQ ID NO: 253637 - DNA, 122 bp, Homo sapiens
agtcgaaggtgctctggttccagtccacctcgtagcgcctacactgtcttggggaggcttcgcccgcaggtcctgggcccggcaccgtgtagttcagttcctctgcaggactccagccgcag

SEQ ID NO: 253638 - DNA, 122 bp, Homo sapiens
agcttcactcctgaagccagcgagaccacgagcccaccgggaggaacgaacaactccagacgtgccgccttaagagctgttaacactcacctggaaggtctgcagcttcactcctgagccag

SEQ ID NO: 253639 - DNA, 122 bp, Homo sapiens
gtgagcggcgggcgggcgcgagtgtggccgccgcggagcgcgagcaggacccggcgggcgcgctccccagcctccgtctccccgccggaaccatgtcgggcaggtcggttcgagccgagacg

SEQ ID NO: 253640 - DNA, 122 bp, Homo sapiens
tcggggagatggtggaaatgaacggtttattcccttcagaactggctacagaacccagtgcgggacccagtggggaccttgctcaaagaccatgaagagtctcaaggcactgacagcacagc

SEQ ID NO: 253641 - DNA, 122 bp, Homo sapiens
ggctgtgggaagaccatgttggcaaaggcggtggcacatcacacaacaggtgagccctttcgcccctgccccgagctctcatcttctggcctcttcgccttgctccctgctcgctcactggc

SEQ ID NO: 253642 - DNA, 122 bp, Homo sapiens
tacatgacttaaccctcgcctggcacgaccttaggtcctatttataatttggtattgtatcgccacaaagaatctgttctgccagttttatgatttctgttttaacatcaatgccggtcagt

SEQ ID NO: 253643 - DNA, 122 bp, Homo sapiens
ggatgagacagggtgctggccttcaggtgctcagagaaggcctggctgcatgagggtgcccggggctgacgcctcttctcttgcccgggtttattgggcatctgtcatagaatgccgtgggg

SEQ ID NO: 253644 - DNA, 122 bp, Homo sapiens
ggcgttgggcggggctgctctgtggagaggcggagcccttgaagttactcagaactggagcggggatgccgaggggaggccttggcggcgctggactcggccggaacagggaacctcgaagc

SEQ ID NO: 253645 - DNA, 122 bp, Homo sapiens
tcttcccaccctccctgctgtctgggagactgatcacccgataggcattcctgttccagtcggataactagacggtgtgagaaaggccggcagccgagcctggggtggaaggaaaccaccgt

SEQ ID NO: 253646 - DNA, 122 bp, Homo sapiens
gcccggcagaacttcctcccggactggggctgggctgcggttgcgagagacaatccccggcgtcctggcttcctgtcgcctctgggccaggcccgcgcctgaagaggaaagatgccaccccc

SEQ ID NO: 253647 - DNA, 122 bp, Homo sapiens
cccaacctcaggaaatccgcccgcctcggcctcccaaagtgttgggattacaggcgtgagcgaccgcgcccagccagattagccaatcttattgtcagtgcaaagacagtatccactttgca

SEQ ID NO: 253648 - DNA, 122 bp, Homo sapiens
ggactcgccactgaccctttgtctcttacccctggcagggtcctcgaggtgtgcaaggcccgcctggtccggccgggaagcccggaagacgggtgagtggtgcgagtgtgtgtggtttagtg

SEQ ID NO: 253649 - DNA, 122 bp, Homo sapiens
tagtttgagagctgaagcagaaggccgaggcccattgcctcgtttcacctccgctgggaacgtgcgcgtctggctgctcagactttatgccgctttgcgcacctccgtgaaagacgagcact

SEQ ID NO: 253650 - DNA, 122 bp, Homo sapiens
gcccaccccagccatcagccagctgagaaggacaggctgcaacatggtgccttcacgcaacgctgactttccaacactgtgaggggctggcagtttcacagcagatcctggtcctggagaat

SEQ ID NO: 253651 - DNA, 122 bp, Homo sapiens
cctttccgagtcaaagaaaggggtgactgagggcacctggaaaatcgggtcactcccacccgaatactgtgcttttccgacgggcttaaaaaacggcccaccacgagagtatatcccgcacc

SEQ ID NO: 253652 - DNA, 122 bp, Homo sapiens
ctccccatttcccctctccaccgcccctggtgcccgccatcctttcagtctctatgaatccgactcctctagggacctcacataagtcgagtcttgccgtatctgtcctttcgtgtctggct

SEQ ID NO: 253653 - DNA, 122 bp, Homo sapiens
ttcgggctcatgtaggaatagatctttgactgcccggtaaatacgctctccccatcggtgcggggcctccccgggcccctccgctccaccatctccaggcccggggccgtcgctgccgccgc

SEQ ID NO: 253654 - DNA, 122 bp, Homo sapiens
gtgaaataaacagccatgttgctcacacaaagcctgtttggtggtctcttcacacggacgcgcatgaaagtggaaaaacaagagcctatcatagggttgatatcagaagaaaatgtaaatct

SEQ ID NO: 253655 - DNA, 122 bp, Homo sapiens
tggcacatctcccagccgtagtagagtttataagctcaattgtcagccaccttgtaagatcgaagagtatcggcctatgtgacctgtagccagaagagggagctctttgcctatccttagca

SEQ ID NO: 253656 - DNA, 122 bp, Homo sapiens
ggggggccgaaggagcaggtgggcgacgctcgcaggggcgcgggagggtgccgctgggaccgtcatcaggagcctggggttctgccacctttcggagggatcagcgacctcttcgccctgcg

SEQ ID NO: 253657 - DNA, 122 bp, Homo sapiens
ggaacattcaggatcccccgcctgcccccgtctggaccttgagatgaggaaggactttgtcgtttttgtcactttaaccgaatcttggacaatcaccgcccaaagcgtgcactctgtgggct

SEQ ID NO: 253658 - DNA, 122 bp, Homo sapiens
actgtctcagtgctggagggacctatctccactctaccttgacaatctcaacaaaggctacgacaatctcaacaaaggctacgtcattctcatcagtgatgaggtaaaaacagggactccct

SEQ ID NO: 253659 - DNA, 122 bp, Homo sapiens
gagacgcatgccacccgataggagtctcgaaatcactagtcggctcagccataccactggcgggtccggagtctagcacgcgactgtggagcaagcattaggcgtcacttcctttaccgtga

SEQ ID NO: 253660 - DNA, 122 bp, Homo sapiens
gacccagcagaccacccggtcccctttgacgttctgggggcagggggtcagacagtagctcggagtcactgtcatcactgctgctgttacaatcataaccctcagacagaagaaggtggccg

SEQ ID NO: 253661 - DNA, 122 bp, Homo sapiens
ctggccttctctgaggctgccctgcctgcctccagggattgaagggcgctggcgtgatgccgggggtggggggcaggggtgtatgaactgtaaagtggccctggggacaggctgctgagttg

SEQ ID NO: 253662 - DNA, 122 bp, Homo sapiens
ccagggaagtgggacattttgctaggtctatgcctctaaagaaactctcctcctcacacccgcgagcaggatgcagccacttcagcaacactagtgctagaagattcgagaagcacagcatt

SEQ ID NO: 253663 - DNA, 122 bp, Homo sapiens
tgctttagttttacctctacctcctatgtgtcaggcactgtcacctcatggatctcattccgtccttatcacaatagtgatttaagcactattctttccaccacacaggaaaagccaaggct

SEQ ID NO: 253664 - DNA, 122 bp, Homo sapiens
cgacccagggctgtaggaagccataggagagtgaccacgggattccctgagaaacagggccggccccccaacttcagggacccaccgcccattccccgagagctgtcggaaccagatgcaac

SEQ ID NO: 253665 - DNA, 122 bp, Homo sapiens
ttagttctgccttcaaaatcagtctacaattctaccagttctcacaatcctctttcaccacgcatgtccaaggcactgttatgtcttacttacatattgtattaatattagcatcccaactt

SEQ ID NO: 253666 - DNA, 122 bp, Homo sapiens
gcctttaccccagctgggccaggcatgccatggcaatgcccccacctccaaggttggccacgggtgagcctcttccaggaagtttcccgagtccccaggcgagaggaactcccttccctcgc

SEQ ID NO: 253667 - DNA, 122 bp, Homo sapiens
aacatggtgaaatcctatctctaccaaaaatataaaaaatcagctgggcgtgatggtgggcgcctgtaattccagctactcgggaggctgaggcaggagaatcgcttgaacccaggagatgg

SEQ ID NO: 253668 - DNA, 122 bp, Homo sapiens
ctgggttggactttggccgggcgagcaaggctgctgctgccagctgatctgctcgggatccgccggtcggatctgggtgcttaaggccgaccctgcctttcgcgcaacgctaaggagcagct

SEQ ID NO: 253669 - DNA, 122 bp, Homo sapiens
ccctccagagctaccagctcagccctaataattacttttccttgcaactgcggggcagaacggatggggccaagaatccagagctagtactggagggaagcctggaccgagagaaagaggct

SEQ ID NO: 253670 - DNA, 122 bp, Homo sapiens
agcggagaagtcagcctggtgggccctggggcatggggagtggggtggagtgtgtgtctgcggggcacacagggaagggccagcacacgctctttatcccagaggccccacctgcttccttt

SEQ ID NO: 253671 - DNA, 122 bp, Homo sapiens
ggctgcgagggagggggcggggccgtgggcggccgtcccgaggcagggcggggctgcagacgtgggggcggagctgcgggcgcgaggcggggcggggctgcgggggtgggggcggggctacg

SEQ ID NO: 253672 - DNA, 122 bp, Homo sapiens
ctggcgcgctcgggaggaatgctaatcgcccgggcctggcccggctttgtgggccggctgcgataagggggatcgggcccagccgctccccaccagggccccatcctgtccgtgccagcgcg

SEQ ID NO: 253673 - DNA, 122 bp, Homo sapiens
aatgccaaactggccataaaacaacataagcaacacctgctctcaggtttttcaaactgacgccgtcccagcgcccctggtaaagagaatgattaagcttccactctggggccgcagctcat

SEQ ID NO: 253674 - DNA, 122 bp, Homo sapiens
gtcttccaaatggtctgtgggatcagcctttcgagtcccagacacgttgaggttttctgccgactctagcaacgttgtccccagtcccttggctgggcctctgcagccccctttcccccagc

SEQ ID NO: 253675 - DNA, 122 bp, Homo sapiens
gcggggtggcggcggggggagtccctggagggcccgggccgcgctgacctcgcgtccctccgcaggagattccccggagcacgctggactcgttcatgcagccgttccagagcacactgtgg

SEQ ID NO: 253676 - DNA, 122 bp, Homo sapiens
ctgtgccaatcctaagggggcaggcgctgttcctggggtgttcccaggttaaagtgaattcggggggggacagcagaagttgatacggtgactgcccccctcccgggctctcccaagggatg

SEQ ID NO: 253677 - DNA, 122 bp, Homo sapiens
gcatatatgcagagctggtaggactggctctgcgggggtcggcggtgcccaggaggcctacggtccgtggccaggcttttatctagctgcaccttcgcagtgggagggggctgatgcttaga

SEQ ID NO: 253678 - DNA, 122 bp, Homo sapiens
actcgttgctactgggctctgacagcttggccacaacaatgtactgaagagtgacccatgcgtggacagccacggtgcgggcccaacacagccaggggaagtggggccggcacaacacggac

SEQ ID NO: 253679 - DNA, 122 bp, Homo sapiens
gtctgtcataaggaaggagttcctacccctgcacatgctaggcaggtaaaggcttgttcccgcttacctgagccagggattcaacaccatgattggaacccagggccttaggtgattgttct

SEQ ID NO: 253680 - DNA, 122 bp, Homo sapiens
gccactacagcactggtgcccaaacctggcacactaggaacaaagtccttgttacttcttcgtgggcgttttcaccaagtagacttggaggttaacaaaggacgcaaaggagaggttctaat

SEQ ID NO: 253681 - DNA, 122 bp, Homo sapiens
attgacctcatggccgtcagcaatgcgctttttgccaagctccgggacttcatcaccctgcgtctgcctcctggcttcccagttaagattggtgagaccgcacggccatttctcctgagccc

SEQ ID NO: 253682 - DNA, 122 bp, Homo sapiens
caccagcagcagccaccgcctccttttcctgctcacctgctccttctgtccaatcccctccggcagtggccaggcctggaaacactgtagcctggccctgtccctggggaggtgccagctcc

SEQ ID NO: 253683 - DNA, 122 bp, Homo sapiens
caggtgtgagccaccgggtctggcccactcctgtattttaaaagttgaattgaaaaacaccgagttaaaagatgcattttttcccatgaattgtgtgaatgaaataaagctaaattcacaaa

SEQ ID NO: 253684 - DNA, 122 bp, Homo sapiens
gagtcctcgcagacgccaggctctaggattcacccagtacgcgggcgagttaggaacggacggtgcgggatctttgactttcggtctgaagcgtattctttgtctcattcatttttctgtag

SEQ ID NO: 253685 - DNA, 122 bp, Homo sapiens
gtggacgtaaaggtgaactgccgatgaaacggagagcaggaacagggaacttgtgttcatcgaaacagcttgcggtaggatagtgcttcagactcgcacttctgcttctaactgcagttgag

SEQ ID NO: 253686 - DNA, 122 bp, Homo sapiens
tttgtgtgatggagtgggaccaggctctctgatccaaccctctgctagcaactcggctgtcggtggggtggcgcgcgcgtattctcacggagtgactaggagagggggacgagggagggggt

SEQ ID NO: 253687 - DNA, 122 bp, Homo sapiens
aatttctaatatatcactgtgtattaatctgtctgttaatttatttcttgcctgtatccccgctggactaatttcagaattgtaatgcaagttttgctttcaacattacttattaattacaa

SEQ ID NO: 253688 - DNA, 122 bp, Homo sapiens
tttcatttccctcatcagcagtcccttccccctctagagtttctccccggtgtctggaggcgtgggtgggacaaaacacgtctgtgtagagtcttgcatggtcgagagatgcttgagcagcc

SEQ ID NO: 253689 - DNA, 122 bp, Homo sapiens
gagaattgcttgaacctgggaggcagagtttgtggcgagctgacattgtgtgccactgcacgccagcctgggcaacagagcgagactctatctcaaaaaaaaaaaaaaaaaagaaagaaaag

SEQ ID NO: 253690 - DNA, 122 bp, Homo sapiens
gtagggtgagggaggtggaggcttcctcagacatattacctgtcctggaacttcctacctcgaaaaagcaaagcagaaaaaaaaggcagcacagcaggagaaactactttaatttttttaaa

SEQ ID NO: 253691 - DNA, 122 bp, Homo sapiens
acgggagtgtgtggaagtgaagcacacaccaccgccacccaggtgggcgctgctcacagacgcaggcccagcactcaaggccgggcagctatgaggctgacccgagcccccggtgtgtgact

SEQ ID NO: 253692 - DNA, 122 bp, Homo sapiens
ttccccttagcttctatgcgcacaagtgctgggccgctgcagcgtcaccctcgggaatggcggtgtcttttcgtagaggacccccaacagtatctgtctggagcttctgtcattaactaggc

SEQ ID NO: 253693 - DNA, 122 bp, Homo sapiens
aacttgatagccacatacaaaatgatggagtggaccttatggtggttgaagtgtgtactccgaaaggtttgtctaagacctgaccaccagtacctgtgaacgtgaacttatttagaaatggt

SEQ ID NO: 253694 - DNA, 122 bp, Homo sapiens
ttggtgataacaattccttcagaaacatagtaggcttcatctttagtcagttccttgagccgtgaccacatccaaagttcctttcttgacagagttatgaagtctatcttccatacccttct

SEQ ID NO: 253695 - DNA, 122 bp, Homo sapiens
ctgtggttaacaagtcgcgaacttgtgggaattcgtcgaccagggtttacctggtgtgctcgacattttaaatccttgctctctagtctttgaggtcaccactaacgcggggcgggccgggc

SEQ ID NO: 253696 - DNA, 122 bp, Homo sapiens
agaaagtcctgtttgtgtctttcacctctcccaagtgtacaaagcacgaatgctaagctccgaagtttgttgattggagcagaagtgcgttagcactttaaacctttttgtttctacttaca

SEQ ID NO: 253697 - DNA, 122 bp, Homo sapiens
ggcctcgtgacgtgagccctgagggcagggggctgcaacccctcgcgcgggctccccggccgtggaggacacaaggacaaacacgaagggtccccgacctgccgaccccctcctcccggaca

SEQ ID NO: 253698 - DNA, 122 bp, Homo sapiens
cctgaccgtctagtctgggttctcaaagatggttgggacagtgggcaggcttgcaaagaccgaagaggctggtggacctggtggctgaggcctaggccaggcagggatcgcggtggggaggt

SEQ ID NO: 253699 - DNA, 122 bp, Homo sapiens
ggaacccagccagacgcaggctttgaaagccatatgaccaagggaatgtaaaagtgttttcgatgttggaagcagcagacatcgaaggtctcaatttcaccgttacattttatctttttaat

SEQ ID NO: 253700 - DNA, 122 bp, Homo sapiens
cctgacaacctgtgaggtagacagagctagagtggcatttgaccactagtgggcagacctcgaagtcagacagctggggctcagttcttgctagctcagcacttggcatatgatagggtgtc

SEQ ID NO: 253701 - DNA, 122 bp, Homo sapiens
agaggcaaatgagcactctggtcctctgagccaccagggcttaagaacaacagtgtagatcggagacttagaaccttgcccctgctctggggaactctatctttccagtgcctggtgcaaat

SEQ ID NO: 253702 - DNA, 122 bp, Homo sapiens
tgctatcctctcttttttccccaggaagcattttattgaaaacattcgaactggcttgcccgtggcgggcttgtccaaagcacaggggcctccgccttcggtgcgcgttgttctcaggatta

SEQ ID NO: 253703 - DNA, 122 bp, Homo sapiens
taacagtcctggaaggaggaacaagagagacttgaaggagagaagtgggacaggaatacgcggtagacagttatagacagagacaaacagagccagacagccagccccagagacagaaccca

SEQ ID NO: 253704 - DNA, 122 bp, Homo sapiens
caaggttccaagtatccaagttgccaggccagttgcctgtacctggaacagcctttccaccgaataagaagagtccctacttaaacagcttaagctaatttccatcatactatttatcacag

SEQ ID NO: 253705 - DNA, 122 bp, Homo sapiens
tggacctggggactccccagaagggcctgagggggaggctcacggagcgtcggtggaaggcgcacagaatggtaaagctttactaaggcctctcggaaggggaggcagcgggactccccgcg

SEQ ID NO: 253706 - DNA, 122 bp, Homo sapiens
ggtgatccgcccacctcagccccccaaagtgctgggattacaggtatgagccaccatccccggctttcctgagattcttaacagaatccaaaacccaaagaaaggttgtctgctacaggtat

SEQ ID NO: 253707 - DNA, 122 bp, Homo sapiens
gggagggggtgcagttggggacccccgcaaggaccgactggtcaaggtaggaaggcagcccgaagagtctccaggctagaaggacaagatgaaggaaatgctggccaccatcttgggctgct

SEQ ID NO: 253708 - DNA, 122 bp, Homo sapiens
ccgggaccccgcgctccttctccgggctccagcagaggctccggcccggcacccgcctcccgcctggtggatcaggcttcaatctcaggcagtggctctgcctttgcgccactaagtctcca

SEQ ID NO: 253709 - DNA, 122 bp, Homo sapiens
gttccagccgtgtttgtttttcttcttttcccttttacatttcaagtttgtctcctcgcgcgctcactaacaactttctctgttaaatgcaaaagcgaaggagggaggcggccaaactttcc

SEQ ID NO: 253710 - DNA, 122 bp, Homo sapiens
tctccaaacgcctctccgaccccacagcttctgcacccagctgcgtccgccagcacgaggcgcagtaggaaacgccccagtgcagagtgggtgacggcagtgtgatccctgaggagggagct

SEQ ID NO: 253711 - DNA, 122 bp, Homo sapiens
gctcggcgcgtagggatcacgcagcttccttcctttttctgggagctgtaaagacgcctccgcggccaaggccgaaaggggaagcgaggaggccgccggggtgagtgccctcgggtgtagag

SEQ ID NO: 253712 - DNA, 122 bp, Homo sapiens
cctgggcaaccgagcagctgcagtgcctctgcacctgctctgtccccaaccccgggagggcggcgtctcagggcaggacagggaagtctccctcacttgtcccctgcaacaggggctgagcc

SEQ ID NO: 253713 - DNA, 122 bp, Homo sapiens
gcagaggtcctctcttttcttcactgtgatctcaaagtcccagcgtggctcagctgcaagcgtggctcagctgcaccctgatctggaaggctttcacagtgcctgagcctctcaagccagag

SEQ ID NO: 253714 - DNA, 122 bp, Homo sapiens
tttcttttcgacaaaactgccatcgtcatcatggcccgttctcgatggtcgctgtctcttcggagctgttgggtacacttcccagacggggcagcctggcagaggcacacctcacttcccag

SEQ ID NO: 253715 - DNA, 122 bp, Homo sapiens
gcccaggctattttgggtcaggctgcgaggactgctgtgtcagcaggtgggcgtgagtggcggtttccacctccccacgctgggcggggcacagctccaggccgggccgactcaggctgcgc

SEQ ID NO: 253716 - DNA, 122 bp, Homo sapiens
ttcactttcagggtcagccagtctgtgctttgattcaccacggggatgagcaggaatcgtcggtgcaattttacctgcgtaaacaagcgaaccttcttccactgagcttctgccttgagacg

SEQ ID NO: 253717 - DNA, 122 bp, Homo sapiens
tgttgacgtgaccctggagagctctaactgaactgcacaaatgggagaatcctcccctaccggcccctgctgctcacagacagtacgctcagctcagcaggggctgctcttacaaatgccat

SEQ ID NO: 253718 - DNA, 122 bp, Homo sapiens
tgacctccctcaggcccctaggctggccaggtcgcctcagtgccacgcctccctggcccgcgattcagcctgcacgttacgctttgttcccagaagcaggttttcgaaacgcggttccctct

SEQ ID NO: 253719 - DNA, 122 bp, Homo sapiens
cccagtggctccgctgtggcccactaacaagaacagcaaacgtttatcgagcatttgctacgggctcatttgctattgagcgctgttattaacggcttcatgtgtattttcttgtttaatca

SEQ ID NO: 253720 - DNA, 122 bp, Homo sapiens
ctagtgagacccctgtctctacaaagtttttaaaaaaataattagccaggcctggtggtgcgcacttgtattcctagctacttgggagggtgaggtgggagactgagcccaggagtgagcta

SEQ ID NO: 253721 - DNA, 122 bp, Homo sapiens
cggcctcagccttgcacctctctgtcccacaaggtggcttgaagtttgggtcagcaagcacgcagccaacacgctcctgcccgccttcccgccaggcagccatcgccaatcacccacgctcc

SEQ ID NO: 253722 - DNA, 122 bp, Homo sapiens
agtgaagacgttgagctgactacaagggcgctgggatagcaggaggccaagccaggttcccgtggccgacccggggacctcaaccaccacccgtacaccagtgcaaggctgaggaaccgtgt

SEQ ID NO: 253723 - DNA, 122 bp, Homo sapiens
tttataattttaaggaaaatgagcaagttgtctctttatgaaattatatttttacaattacggagtttactacagcattatgattatgtattggtgagatggcctgcctctcttagaacagt

SEQ ID NO: 253724 - DNA, 122 bp, Homo sapiens
ccagccctcggtttcctgcaagccaaaaggatccgctaggttgggaaatgccgcctggtgcgattccagaaagggccatctctttaaggataacggacttggagggcctcttcaccctctca

SEQ ID NO: 253725 - DNA, 122 bp, Homo sapiens
gtcccgaaaacccaccccggccccgccgctgccttctcctcccacccatctcgccgaggacgagggaagcaggactcctgcggcacagctgtgttaccaagaagtgttttatttttcttgca

SEQ ID NO: 253726 - DNA, 122 bp, Homo sapiens
ccacctctgcctaaatcataaaaagatcgaggagtgcaatgaacttcaggaatcatgcaccgtttccctgaagcctgtccaggaacctaacttctggacccagaaacttctgcaaagacaga

SEQ ID NO: 253727 - DNA, 122 bp, Homo sapiens
ttttgaggttatcatttccttgaccatcataagcagcctggtatctatttcatctttgttcgtaatcacagcacacctttgaacacataccaaaatgatgatggaatgagagcaaagtatgt

SEQ ID NO: 253728 - DNA, 122 bp, Homo sapiens
aggtgaagtaatgtgcccaaggtcactctactgggcggaggagtccaggttaggacacggcggtgttgggttgcaagatccatgcgctctctactgcataattctggcctgcttcctgctgt

SEQ ID NO: 253729 - DNA, 122 bp, Homo sapiens
caggaaggcaagcagtaacgctccagcagccgggctgtgctgcctgggcccaggcttctgcgaggtggtttacaggcgggaaccattgctcccacaaccaccaaaggaggtgggagtgctgt

SEQ ID NO: 253730 - DNA, 122 bp, Homo sapiens
cctgtcagcctcctcctcgcctcccccgacctgcaggcgcgctaagcgctccgggcgccgcgctccgcgagggggagcagtgctcccaacccgcgaccctccgcctcagacatcacagttgc

SEQ ID NO: 253731 - DNA, 122 bp, Homo sapiens
taccgcgcgccgccttcttcctcccgcaccgtgaccttaactcggcacgtgctggcccctcgggctccccagtctccgtacattgtcccactcagctctgattgtggggagggggcggaccg

SEQ ID NO: 253732 - DNA, 122 bp, Homo sapiens
atgatcaaaatctatacaattcaggatggcaacaaaaatctatacaattcagtatggtgacgagagtgtaaatatagattaggagacaacctacaaccttcgtttaaagcatttaaaaagtc

SEQ ID NO: 253733 - DNA, 122 bp, Homo sapiens
attctcagcattcaaatgtcagcacctgtcacttctcagggatggcttccttgacccacccgttgtaaaagcccccagcctgaggccaggggtttttatcttctttattgcacttgtcactc

SEQ ID NO: 253734 - DNA, 122 bp, Homo sapiens
aaaagctaaatttccaatatctaaatgctaggtggttactgatcaccaacggtgaccgcacgtgggacaccacccaagctggccaagtgtaaggaaaagaccaccacccgacttcccaaagc

SEQ ID NO: 253735 - DNA, 122 bp, Homo sapiens
gggcctacctttctgccccgttggtccctggagcccaggaatccggcaggtttctgagcccgaccctcaacggacagtaacccagggaggagaggggactccctgggcagctaagcttcgca

SEQ ID NO: 253736 - DNA, 122 bp, Homo sapiens
gtgacagtggtcccaccgcccaggcgcatgagcatctgctgacagtcgtgcagcagccggcgatcgccaagcttctcgagtgtgcgcgccgcctcagccagcatgcccacgcgctgcccggg

SEQ ID NO: 253737 - DNA, 122 bp, Homo sapiens
ttcccgactgcaccgggcgcctccaagcggcccggcgcggcctcgcgcaggcggaagcaccgcccagccccgccgccccatgccccacgacgaccttgattgacgggcgcacggcggcgcct

SEQ ID NO: 253738 - DNA, 122 bp, Homo sapiens
ccatgtctgcaggacagagatcttctcaggcaagtctgtggcccatgaggacatcaagtacgagcaggcctgtattctctacaaccttggtgagctgcctgatcccttcccccggccctact

SEQ ID NO: 253739 - DNA, 122 bp, Homo sapiens
gtgagttgtgcaattcacagcaaagtagtcaggaatcgatctcgtgaagtccgcaaggaccgaacacccccaccccgatttagacctgcgggtgctgccccacgtcccccaccaaagcccat

SEQ ID NO: 253740 - DNA, 122 bp, Homo sapiens
gcagaaaacctacggccgcgaggggtcgggcctcctcctgctcctactcccgagaggctccggcaatgagaataggccccgcccccccgcgcagccaagtctacggaccaagtccgagcctg

SEQ ID NO: 253741 - DNA, 122 bp, Homo sapiens
gaagtaacagtagcaactcctttgcagttccgaggggcttagcaaagccctctcatatcacgatatcatttgatctccaggacaattatgaatgaagtcacaagaataggtggtggtgtttt

SEQ ID NO: 253742 - DNA, 122 bp, Homo sapiens
gcccagcaagtgcaaaggcccggaggtgggaagcgatgcagatatggctggaggggagggcggacttcaagggccttggaggttgggagccactttcaggctgagcctcccggcttctctcc

SEQ ID NO: 253743 - DNA, 122 bp, Homo sapiens
acctggctggtggcctgcctcctggaggcagcgatggggaagtgcctctggagaaggggccgcgtgtcccgcccttcctgtagcagctgtgctggtgctgcagcaggggccagctcccaggg

SEQ ID NO: 253744 - DNA, 122 bp, Homo sapiens
aggaggcagatagggggcagttgctcctaagcagtgggatgcagacactgctgttaggtacgagaaaatttcatttagggaaacagaattatctctcaagagggctttagtgagaacaaaga

SEQ ID NO: 253745 - DNA, 122 bp, Homo sapiens
gattcttggactgtatctctctcaatcctttagctctcagtggtttttgtgcctctatttcgacactcaccacattggattgcaggaatagtcattaactctttttttttttttttagacgg

SEQ ID NO: 253746 - DNA, 122 bp, Homo sapiens
tgcccctcagcgtccttctgggaattaaaaagcatgcgaagggcccaacacggcgcctaacgcacactgagtgctccagagatgctgggtgtgggcgtcactgtctctgacccaccagatct

SEQ ID NO: 253747 - DNA, 122 bp, Homo sapiens
agccatagaagctaaatgtaaaagagcatgtactgtacgcttctgtctgtgtgaagttcacgaacagacagcgtgaatctagggtgatagaagtcgtcattgcaatttgcggggagggaggc

SEQ ID NO: 253748 - DNA, 122 bp, Homo sapiens
ggtcctctgatgacaaggttgtgatttttctctgtcttttgtcagcagcatctagctcaccgctgccaacacgacttccactgtactcttgatcaatttaccttgatgcactaccggtgaag

SEQ ID NO: 253749 - DNA, 122 bp, Homo sapiens
acgctgggcacaggtgaaggagcctggaaatggccctttctccaaattgaccttagggtccgcctggccctctccgttccctcccaccctgcccgcgctgttccctggggcctgcagtttta

SEQ ID NO: 253750 - DNA, 122 bp, Homo sapiens
atcccattttatatatacataaaaattaagttctgagtgagttctagctaaatataagtgcgactgtaaacgcagccaatttttttaagcagaatatgagaacacctaagtattctcttcat

SEQ ID NO: 253751 - DNA, 122 bp, Homo sapiens
cgctccgagcctggacgccgacccccgaggcgcaggacccggccctgctgctgcgctcgccgcggactcccgctagggcctctgcaggcaccgcttttataccgcagggtcgggcgcctccc

SEQ ID NO: 253752 - DNA, 122 bp, Homo sapiens
tctgcgcatgcccgagacggttacgtagttacggagcttgcgctctcagcagttgagtcccgactccaagtggcgattccgcctcagagccgtcgccttacgttcccttaaacttaattttt

SEQ ID NO: 253753 - DNA, 122 bp, Homo sapiens
tcctctcgatgctattggatagccaggagaaccggaagtggcgaacttgctggaacttctcgtgtttgtgggagctgaggtaggtaggtgaaagacctgtcgggtcacgcgccgctaccgga

SEQ ID NO: 253754 - DNA, 122 bp, Homo sapiens
cagtaccaccagctctctgctctccacagggatccccgccccacccagcccaataaagcacgctactgggctacagccaagcaaggttatgttacatataagcgccacggtggctgaaaatc

SEQ ID NO: 253755 - DNA, 122 bp, Homo sapiens
ctttccgggcttagtcttccttcccaagtctgagaatgatgaggtctttttctccagagtcgcgaaggtcgcccatagaggaagccagtctaccttcccttttctgtcgaggagacaaaggc

SEQ ID NO: 253756 - DNA, 122 bp, Homo sapiens
tattctaattaaactcgtccaaccgctgaggatctaaagcggggcaactcgccaataatccggtcccgtagtgtcactccatttgtagtcctgccctgcgccgtacctccctattctgcaga

SEQ ID NO: 253757 - DNA, 122 bp, Homo sapiens
cgctcgcttcctcctcagccggccgacccccgcccggtgctagccacaagccccaagttccgtgtcccggttctgtcttctgtgcagcaaggcctgcggagactctgggcttgccctgcagc

SEQ ID NO: 253758 - DNA, 122 bp, Homo sapiens
tcagcctactgcgccgcctaccccgcccccagccttgctgccctttggcttctcctgtcccgcatcattaccccggcccacagccccatttgcctgcagtcgctgcctttgctcctgagaag

SEQ ID NO: 253759 - DNA, 122 bp, Homo sapiens
tgaggcgggaggttcagcagacccatgcagtgtgctgccagggctggaagaagcggcacccgggggcgctcacctgtgaaggtgaggctgggtcttccgggccttgcgggaggcgcgcccca

SEQ ID NO: 253760 - DNA, 122 bp, Homo sapiens
cgcgtgcccggaactcctcccccgtgcccgggaccccgcccgccgcgcgtcacaaagcgccgccgcctcaccctcgtaggacgagcgccactcggccttgtgcttcttgtgcttcttgccca

SEQ ID NO: 253761 - DNA, 122 bp, Homo sapiens
caggttccctgtggggttgccacgagcctccacccgcccgcctgctggcgggctccatggcggccccctacgcaaccacgagtgggcggtgcccttcccgacccaggtggtgcgggagaagc

SEQ ID NO: 253762 - DNA, 122 bp, Homo sapiens
tggcgatgctaagctctcgcgccgccgggccctccccttctgcgagcctcctggagtccacgccaactcagactcgcactggcgcgggaggccccacactctgaggtagaccggtgagagcg

SEQ ID NO: 253763 - DNA, 122 bp, Homo sapiens
cgggagaatgggaccgtctccagatacggtgagggccagccctcaggcaggagggttcaccgtgggaacagggcaggccagcataaggtgggggctggatgtagagccctggaggctttggg

SEQ ID NO: 253764 - DNA, 122 bp, Homo sapiens
cacttaattaatggtacaagagataatgtttttagtttcttgacttccagttagcagttacgggatcaagaggcacacttggctggaaacaagaaaaacacaattctatcaagtatctgaca

SEQ ID NO: 253765 - DNA, 122 bp, Homo sapiens
aggcggcggcggcggctcccggaattgggttggagcaggagcctcgctggctgcttcgctcgcgctctacgcgctcagtccccggcggtagcaggagcctggacccaggcgccgccggcggg

SEQ ID NO: 253766 - DNA, 122 bp, Homo sapiens
tgaagggccttggaggtttccttttatcctttcatcctgcagccctgcctccagttctcccgggtcagaggagggggcgcagaatcaggtcctagaggagtgcgatgcgcgcccttggtcac

SEQ ID NO: 253767 - DNA, 122 bp, Homo sapiens
ggaaatcctgtccaaacggctacataaacccccctgcaacgctgagcaggagagcaggagcgtctacaccgccccagccagggcgacttctgtcatttggatccagcagcagcgtgtttcag

SEQ ID NO: 253768 - DNA, 122 bp, Homo sapiens
ttgtcctttttacttccatttattacactgcacagtaggaatcaatgccctcattgtgtgcgttcagtccaacagtccctaaactaaatctgacaaaggctggcagcatattaaacattctg

SEQ ID NO: 253769 - DNA, 122 bp, Homo sapiens
tgccaagcggtgtggatggggcaggcaggacaagctctgaaaattgactgctggattcaccgtggagacctggggtgcagattcctgtgcccagggttgtcagatgcggcggcgttgaatga

SEQ ID NO: 253770 - DNA, 122 bp, Homo sapiens
ccagtggaactcccattcccctctgccctcccatgccctggccaagctcctctgtagcagcggagtccagggcaggtcaccctagccatggccttggctgtcccgtgtgtgacctggatgtc

SEQ ID NO: 253771 - DNA, 122 bp, Homo sapiens
tcactggcttggttgtccgtccatcttactctcgtcaccgcctccgggctgtcgcccacccgcccctcctgaaaggtcgctgtcaccacagccaatggaggcccggagacggggcaggggcg

SEQ ID NO: 253772 - DNA, 122 bp, Homo sapiens
gtccaagtagacagctattatcagcagagaggactcacaagactcacttcaaagcctaaccgcccagatatgctctggggtgtgtctggtctatggagagggcaggatacagaggcggcaac

SEQ ID NO: 253773 - DNA, 122 bp, Homo sapiens
aggtgccgacagatgaagctgcgccgcagagcccactgccagtcactttcgtggctatagcgccactgctccagcactggctcgggcgggggcggcgggaggggcggcagcggcggcggcgg

SEQ ID NO: 253774 - DNA, 122 bp, Homo sapiens
acctgtgcgagctgtgcctggacgatgtgctctatgcccgcaccacgggcaagctcaagacggacaatgttttctggggcgagcacttcgagttccacaacttgccgcctctgcgcacggtc

SEQ ID NO: 253775 - DNA, 122 bp, Homo sapiens
aggagaggacctctgcccgaggaggtccagaggagcaaactgtgcgctccggtgcccgggcgccgggctcgcggaaacgcgagcgtgtcgctctggctcgggaggcgccggcagccggagcc

SEQ ID NO: 253776 - DNA, 122 bp, Homo sapiens
cggaactccatcctaccaggcatggcagaggtagagcagacctcagcggtcacacggagccgtgagcaagccagtatttactcaccaaccccgtcaccgtttggcccgcattgactccctgg

SEQ ID NO: 253777 - DNA, 122 bp, Homo sapiens
ggtctgcagaatggggataatagcagcacctgcctctctgcagccgtgaaacggcatcaccgcatcaccgctggtagagagagcacttagcctgccttgcagtgttcaaagcgtggaactgt

SEQ ID NO: 253778 - DNA, 122 bp, Homo sapiens
tacagaaaagtacatgtatcataaaggtaccaagtgaacactccccaccagaccagcccccggtcaagacacagagcatcgccagtggccaagccacttgtcccatttctcagtcacaaccc

SEQ ID NO: 253779 - DNA, 122 bp, Homo sapiens
agacctcagagatcgccagtgaaggggtgttgcggtcaggtgactgtcagccttaacaaacgtgtgggtgaagagctggaccccccacagaagcctgcccgtgtcctctgccacagccatgg

SEQ ID NO: 253780 - DNA, 122 bp, Homo sapiens
gccgcttgcttcctcggaggagcaacgcgactggccagcaaagggtggctctgctccgagcgccaaagttctccccgcctcagccggcgcctccctgttgctgagccctggcgcctgcctgt

SEQ ID NO: 253781 - DNA, 122 bp, Homo sapiens
caagaccattctgggcaacatagggagacccctgtctctacaaaaaaatttaaaaattagcgaggtgtggtagcctacacctgtagactgggctactcaggaagttgaggcgggaggattgc

SEQ ID NO: 253782 - DNA, 122 bp, Homo sapiens
catatgatgactactcagaaaataaactgctcaatcacccaaacacagtaataaaattctcgtagaacagcagttctactattaacttcagtaattaaattctcatagggcaaagtatagtc

SEQ ID NO: 253783 - DNA, 122 bp, Homo sapiens
ctcccctcaactaccggctcctggttgcctgtgcgcgttcacacctagggctccaggccccgcccacagcagacgaaccggaaacgaaccccatttccggcctgggggcagggcctcgggtt

SEQ ID NO: 253784 - DNA, 122 bp, Homo sapiens
ctcaccgcggctgcctggctgctctggctgaggatagccatgagtgtttgtccccagagccggcctttgtctccaaattgggctcccttattgaggtcctcggggtccaatgggtgccagga

SEQ ID NO: 253785 - DNA, 122 bp, Homo sapiens
acaatttctaaaagcctttatttcaatattttaagaagttatttcccctggcaaagaagccgccctgttgcccggtgtggagctcgatgacaaagctcatcagcctgagtggaagctcattc

SEQ ID NO: 253786 - DNA, 122 bp, Homo sapiens
ttcacgctggcccgagagcccccaaggccccagcttttcacagccctcccggctcccagacgccccttgctgtgggggtgctgcattcccagagctcaaggctgtctttccctcccggtccc

SEQ ID NO: 253787 - DNA, 122 bp, Homo sapiens
accaaaaatgggtgctcatctcagatgcagggcagggactatgtaactccatcctcgactcgcagcaggaagttaactcctcctgagagccaggcggtcggaggaccaggcggggaggttac

SEQ ID NO: 253788 - DNA, 122 bp, Homo sapiens
ccccaacccaagaggactatacatggagtgcagggacagagtgaccaggaggcctttgtccggcaccctgcccacaggctgagctcagccccaggccctttcaggcatctagacactcccat

SEQ ID NO: 253789 - DNA, 122 bp, Homo sapiens
gtcagccaaggtccttattcacgttaatgaagatggaaggcactaactgtccttggaaagcgatgagtcaaacttgaccgcgcttcaaactcgttcccagattcgtttccagtccgaacaga

SEQ ID NO: 253790 - DNA, 122 bp, Homo sapiens
gctgtgccgccaggacatcgcccagcgcctccgcatctaccacagcagctgagtgctgcccgcccacctgggcctggtcctagccctgcctcggccactgtgagccccgggctcctgctcag

SEQ ID NO: 253791 - DNA, 122 bp, Homo sapiens
gggtcttgtctgaaacacttagttaggatcccagacttgacactctttccactggctgtgcgtgcctccttctttaaacaaacctcccaccatcaccttttgaaagattctgagaatttaaa

SEQ ID NO: 253792 - DNA, 122 bp, Homo sapiens
cgatgcggagcacctactgcaggagatcgggggcctgggacgcgctggccgaggtgtgatcggaccccaggctagccacaaagggcacttggccccagggctaggagagcgaggggagagca

SEQ ID NO: 253793 - DNA, 122 bp, Homo sapiens
accctttcaccatggtctgactaagtcacactcacccttcaaaaatttagctggatatttcggatatttcctcctcgagcaagccttatttggacacatcccccaaccctaacctccctact

SEQ ID NO: 253794 - DNA, 122 bp, Homo sapiens
ctggcaacactgaaaggaaggaaatttctctcctaagagatgggggaatttcagaatatacgaggtagcccagggctgcaggcaatacctggcaccactcagagaggatacagaacctggtt

SEQ ID NO: 253795 - DNA, 122 bp, Homo sapiens
catacactcaaactcagcaaaggattaaattgcatacacctaaactcagtggacttcagacgttcactgatttagatttagagtggacctgagcagtctcgagtttttaaaagaaccccaga

SEQ ID NO: 253796 - DNA, 122 bp, Homo sapiens
gcgccgggtcgttacctggttcccgcccgccccgtctcggctaggagccgcggcccgccgcgggtcgcaatccaggccccaggcccgatccccagcgctggcccaggccccaccccctcgac

SEQ ID NO: 253797 - DNA, 122 bp, Homo sapiens
agagccctcgcggcccctttataagcactgaggcggcgctggggccagcggagcgcagggcgcaggggctggacccggcgcggagctggctgagtcggagcgcagcgtcctttgtgcccggc

SEQ ID NO: 253798 - DNA, 122 bp, Homo sapiens
ccaataattatagagcagctttctttcatggctcacagttccttcttaggcctctataagcgtcacaaggaaaagagaccatgcctttctgtgggcacagcataccttcgttttattaccca

SEQ ID NO: 253799 - DNA, 122 bp, Homo sapiens
ggggccgggcgcgggggagcgggtggagtacgggatggggactcggggcgcggcccctcccgcggtggctccgggggcgcctccctcgccgcggctcctgggagaggggcccaggcccgccc

SEQ ID NO: 253800 - DNA, 122 bp, Homo sapiens
tgtgagtaacgcggctgtctgtctccagtgcccgcgtggatttccaaagtgtccttcctgcggtggtgttttgaagggctgatgaagattcagttcagcagaagaacttataaaatgcctct

SEQ ID NO: 253801 - DNA, 122 bp, Homo sapiens
ccgcctgccccccgaagcctctccccagctcctgcccccaatgtcctccaacacctgccccgagccccgagccctccgtcccggaagacctcccggcaccgcgtcccccaaccctgcccacg

SEQ ID NO: 253802 - DNA, 122 bp, Homo sapiens
ctcatgatttccattctcaaggctcttcaaaggactaaaagctaaaaggatggattcattcgacaagtcctagtcctgcgccctggtgagtgccagaccctgctccccacgagggggaccca

SEQ ID NO: 253803 - DNA, 122 bp, Homo sapiens
gcaccagagagcgcttagctttctggttggatgttttgggtgagtttcttggcgcgcatgcgtgttgtgtctcaagggcgggtttgaagggaagtgggtgttgacctgcgggcaactgacgc

SEQ ID NO: 253804 - DNA, 122 bp, Homo sapiens
gtgccaatagaagaccacttctcgcagggtacaaagtctgttcaacaagtatttgctgggcgtccactctgggcagggccttggcaagacccaggagaggagacgctgtggggggtctggag

SEQ ID NO: 253805 - DNA, 122 bp, Homo sapiens
caggaggttgatgatgtgctacgttagccttgtaagatacacccccaccaaatgtgcagccggtgttcccagtgtatatttcattctcttgtatataaaggaagcaatgtgtgtcaggcctc

SEQ ID NO: 253806 - DNA, 122 bp, Homo sapiens
gaaaatgaagactgaaaacagagcactggaggtcgttcatacgcaaaaatgctttcccctcggaattgtctccagctccttcacctcttggttgtaggtacagacagcagagacaagaagag

SEQ ID NO: 253807 - DNA, 122 bp, Homo sapiens
ttgctccttttttcagccttggccttggtctgcgcccctgaccgggcaggctgtacaatacgcccttagcttgttcattctttccagctcctgccggctttgcccttgtggaactggctctt

SEQ ID NO: 253808 - DNA, 122 bp, Homo sapiens
cgggagccctgaagacgcggtggcggggcggcggggagcagggcgggaggtaagtgctcgcggcccctttaagcagatacaaaggctcggcttgttttgttacagttcattctattccgcgc

SEQ ID NO: 253809 - DNA, 122 bp, Homo sapiens
cttataaaagatttagtgtttctcattattttctgtcaagcttcacaagcgatggcgcggcggttatcatttgcatcctggggtgtgtgtgtgcagggtgtgtgttgggtgcgtgtgttgga

SEQ ID NO: 253810 - DNA, 122 bp, Homo sapiens
cccatcaggccttgcgctggacctcgcggacactggggaccctggttcgagcccagggtgcgccttgggcccgctaggggtacccagaagcgggcagaaggcccatgaggggtaggtgaggc

SEQ ID NO: 253811 - DNA, 122 bp, Homo sapiens
acccggatttgggacccaacggcagagtctcctactctattctggccagtgacctggagccgcgggagctgttgtcctacgtgtccgtgagcccgcagagcggggtggtgttcgcgcagcgc

SEQ ID NO: 253812 - DNA, 122 bp, Homo sapiens
ggtgcccgcagcagtcccgccccacaacccggccctcctgacccgtcagtaccaggtgtgcggggcacatgccctcagcgcatctctgccttgcccggggccagcaggtgcacgccggaatg

SEQ ID NO: 253813 - DNA, 122 bp, Homo sapiens
acttcccaagtccccagcttccccaggaacacagggcttgggctccaggccctgggcagacgaacccacagacagggctcctggttgtcacagcttgttccttggagctctcaggctgccaa

SEQ ID NO: 253814 - DNA, 122 bp, Homo sapiens
ctcttaaacagagctccaccgacgcaatgcccaggcataaaaaggccaggccggagagaccgccaccagtcacggaccctggacccagcgcacccgcaccatggccggccccagcctcgctt

SEQ ID NO: 253815 - DNA, 122 bp, Homo sapiens
agatgtagctccctcacacacacgttgaatttggatttgcttgtctggcttctgctggggcgcaggatgtggggatggaaggaccaagacacacgacagagaacagcgtcacggggtcaccg

SEQ ID NO: 253816 - DNA, 122 bp, Homo sapiens
gtgggcacaggcatgcaggcatgcagcacaccctctcccagtggagtcggacgacatgcccgctgctcccaggacacagcaaccggccacggggccgtcgggtgccaggtgtgcagccaggg

SEQ ID NO: 253817 - DNA, 122 bp, Homo sapiens
attaagtgcttaaaagctccatttgttcttaaaacaaatctcttcctctccaattgcagccgaagagaagacatagactgtgcggctgcaccaacaagctgagcagacagacaatagggcca

SEQ ID NO: 253818 - DNA, 122 bp, Homo sapiens
tacaagatgaccatatatacttggacgtatctggacttcaaatttgctggaacttaattgcgtcccaagctggctaatacctagagattcatcatttctgtttggagggtaagaatgctcat

SEQ ID NO: 253819 - DNA, 122 bp, Homo sapiens
ggacagagggcggcgcccccggctgcccgggcgcgtagaacaagcagctgccgccagggccgacaaagttgctccccgaggggctgagatccaactttcgcttcccgatttagccaggggag

SEQ ID NO: 253820 - DNA, 122 bp, Homo sapiens
attaggagctcatcactagcctccaagcaaggagcacactgttgggtcctcagtcacctgcggggtaaagcataaggccgccccctctggtgagcaagtgggacctgctgcctggcacccca

SEQ ID NO: 253821 - DNA, 122 bp, Homo sapiens
ctgggcaggaagccctacactctgccctcctcactgggtgatgtggatgcctctgagctgcggctttctcccttctagtggaataacaattgctgacctcacagagttgctctgaggatgaa

SEQ ID NO: 253822 - DNA, 122 bp, Homo sapiens
tttgactttttatttgctgaggtacaaaagagggtgttggaatgagtaggctgtggaatccgtttattcagtgtaatccacagatccgaaaactgagataggagtttagaaggaaatgattt

SEQ ID NO: 253823 - DNA, 122 bp, Homo sapiens
tcccccgactggacgagagagctgccctgtccaccaagccacccagctctcgggctcccacggaggagacccaacccacgccaggtgtgcccccgtggactccccttccgtgcgtccctctt

SEQ ID NO: 253824 - DNA, 122 bp, Homo sapiens
tgagatgtgtggtgatgacgctgggatatgcggtgatgatgctgagatgtgtggtcatgacgctggaatgtgtggtgatgacggcagtcgatgtttcacctgtgctgatcgcagcagctgtg

SEQ ID NO: 253825 - DNA, 122 bp, Homo sapiens
cagaggcactggggtagggctcggcagggcgggtccgggcggagcgcggggtgcggagggcggaggcggctccggcgcccgctctgcccgccgctgggtccgaccgcgctcgccttccttgc

SEQ ID NO: 253826 - DNA, 122 bp, Homo sapiens
ggctaaggagtgcctggctttgtggaaagacagtggggttactttgtgagcagagcggggcgaggcagatgccagggctggaatccagatgcaaatgaggtgctgctggcgagctccaaggc

SEQ ID NO: 253827 - DNA, 122 bp, Homo sapiens
aggcctgagtcagcatctgagggtccacagcagagagaagccctttgattgcgaggaatgcgggcggtcgttcaaagtcaacacccacctcttccgacatcagaaacttcacacttcggaaa

SEQ ID NO: 253828 - DNA, 122 bp, Homo sapiens
tgctgtgcttgtgtcatcctgcgatgctggggttgacctgtttgtagtccactctggttgcggttaacaggaggggctgccttggagggttggcgtctggtgggtgtactaacttggtcaga

SEQ ID NO: 253829 - DNA, 122 bp, Homo sapiens
acaggagccaggctgactgggtttttataacactcactgggtttttacaacactgtggcacgttactcacagctcctcccagccacgcccctccgagggagccggttcctgcagggaaagtg

SEQ ID NO: 253830 - DNA, 122 bp, Homo sapiens
ttctgcacgaccaagaactccaattatctgagtaaatgacgtttagtgatcttgcttccgcgacccccaccaccccccatctttactgccacctgtccatacttttgagcgcgcgcgcgcac

SEQ ID NO: 253831 - DNA, 122 bp, Homo sapiens
caaaagagagcttttcctctgtgggcctggcctaattaggtgagccccttcaaagagggtcggaggctgttcctgaagacagagattctttggttgggttttgaagaagcaaagggctgtgt

SEQ ID NO: 253832 - DNA, 122 bp, Homo sapiens
ctttctgggactgtgcgtctgtgagatctcggggtgccagccccacaggctgcgagtgtgcgtctgtgttgacctcctgcagaaggtgtgtgtcccagatgccccaccggcttcgagcatgg

SEQ ID NO: 253833 - DNA, 122 bp, Homo sapiens
gccccctgcgcagcggcccctccgcagcggccccagcccgcgtccccgcagcgccccttccgaagcgccccctccgaagcgcccacagcccgcgttcccgcccgcaccccagcccgcgcccc

SEQ ID NO: 253834 - DNA, 122 bp, Homo sapiens
gataatgtagggtccacccctaccgggtctctgggttttctcttcgcgtgtgtgcggagacgagagatcgaagagataaagacagaagacaaagagataggaagaaagacagctgggcccgg

SEQ ID NO: 253835 - DNA, 122 bp, Homo sapiens
ctcgaaattttagcacagaaggtggaattcagggcagtaaaaggttattttttcaggcctcggtagtacatcccagctgcccagacattgaatcaggaaatttttctgagaaaggcaggtgg

SEQ ID NO: 253836 - DNA, 122 bp, Homo sapiens
gtcaggggcctcagaggcaaagccatgatggtgcggggagccgggaaccagcgctgtcctcgctccctttcctggggcctggggtcacctcccctctctgggccaatcacctgttgagtctg

SEQ ID NO: 253837 - DNA, 122 bp, Homo sapiens
ggtgcagcgtctacactgggtccgggaaccgtgtgggggtgcagcgtctacactgggtcccggaaccgtgtgggtacagcgtctacactgggtccgggaaccgtgtgggggtgcagcatcta

SEQ ID NO: 253838 - DNA, 122 bp, Homo sapiens
ttgaatccaggaggcagtggttgcagtaacctgagatagcgccgagcctgggcgacagaacgagaccctgtctcaaaaaaaaaaaaaaaaaaaaggaaggaaagaaagacagaaagaaagag

SEQ ID NO: 253839 - DNA, 122 bp, Homo sapiens
caattaaagccgtcttccctggtaatgctcttcgtctcagtcagtcattggctttctgtgcggccagcagcaggacgtagaccaaacccttggtatttcggtaacaggcacacccccaggaa

SEQ ID NO: 253840 - DNA, 122 bp, Homo sapiens
tttactgaaacgcagcccacgtgtgactgggctcacaggtgaatgcggcccatgaaggcccggccagtcctcacctgagcagccccctgtccactcactgacacagaatctatttatcctgc

SEQ ID NO: 253841 - DNA, 122 bp, Homo sapiens
tgctcggggagactgatttcagtaataataaaactccagtctcccatacagccggctttgcgtgactaagtctttatttgcaatccccctgtcttgtatcagttctggctagtcagcgggca

SEQ ID NO: 253842 - DNA, 122 bp, Homo sapiens
aaagtcattagaggtcatataaaaatgcaaatttcaaacttctctcagaaaatcaggagccgtgacaacactgggctcacctccccatgtggcaaatggcttgggttgaatgtgaacatcct

SEQ ID NO: 253843 - DNA, 122 bp, Homo sapiens
cacggaacgcgccaatgcaggaggcccccaggacatcctgagcgctcgggagacgccaggcgcggcagcgggcacggatagcggaaaggggcgcgaccccgcggaatcctccggcagggcag

SEQ ID NO: 253844 - DNA, 122 bp, Homo sapiens
aggctcctccagggttccggctggtgggaatctagggaggtccaggagacggggagacaacgaacaagcacgccggccaatcaagaagtgcctgccaggacaagtagccaatcaggaaaccc

SEQ ID NO: 253845 - DNA, 122 bp, Homo sapiens
aaatgggctgtgtgtacgtgagggggtcgccttgttgtacaggagctgggagtagatctgcgtggtatctgttttgcaatgcagggtcctgaggccagcatgggcaggatgggcaaggaagg

SEQ ID NO: 253846 - DNA, 122 bp, Homo sapiens
agatgaagaaagtgaggcacgtagtgattaaatcttccccagccccactaaggtcaaggtcggaattcagacgcaccagccttgctctgagcatttagccactatgttagcgtctctttcag

SEQ ID NO: 253847 - DNA, 122 bp, Homo sapiens
agctaagctcctgaccctcacactgagaaaggggtcagcagtctccccctcgagcccacacggtatcttgggaatttgcaaagaaagaaacatctctgaaatagagatgagctctgtagcct

SEQ ID NO: 253848 - DNA, 122 bp, Homo sapiens
ccctttctactctgacattggagatgccccggcctcgaattcaggcccatctccccagggcgtccagagtgtggcagagaggcccccggtggcccctctgcaccacccatcaggccaggctg

SEQ ID NO: 253849 - DNA, 122 bp, Homo sapiens
aactgagcagagcccgctgaggcaagatggcctcctgcagtcatggagggcccaggcgcccgggcagtgagtgctttgaaaggccaggctcattgccgccctgcacgtgtggccacagccac

SEQ ID NO: 253850 - DNA, 122 bp, Homo sapiens
ggccttcacctccttgcaggacctggcctcagtttccctgtgcataaaaccgctcgctgccgttggctcattaattcttaaacttatccggggcagaggatggaagaagttgcgaatgcttt

SEQ ID NO: 253851 - DNA, 122 bp, Homo sapiens
aggccaggccagaggtaggtagcgtcaacgttcctcacacaaaatggcgagtaaacacctcgcccatttgcgccgcccactcttcagtctcgcgacacccacccctcagtctcgcgacactc

SEQ ID NO: 253852 - DNA, 122 bp, Homo sapiens
gaccccgaggcgcgggcagaggctggtgagcagccaggcacagctgagcgggccctgctccgagatcagcccaggggccgtggccagagaggggctcgccagagaaggaggacacctcggcc

SEQ ID NO: 253853 - DNA, 122 bp, Homo sapiens
ggccggggggtgtgtgcggagatgttccctgtgtccagtttggagccgggggtctgtgtccggagatgttccctgtgtccagttcagagccgggggtctgtgtccagggacactcccctctg

SEQ ID NO: 253854 - DNA, 122 bp, Homo sapiens
ggtgacccaggttccgaatgggaaagcctaccagcagatcttccaggctgaggtaggagccgccctctgtcccgcttttctccatcccccttcccttgctttcttccaaacttccctccctc

SEQ ID NO: 253855 - DNA, 122 bp, Homo sapiens
ggggtgggcgcaggagggttcgcgtgagagccgggcccgccctgggcgcaggagggttcgcgtgagagccgggtccacccggtacccctgcaccagcccaggtgagccgggaaggaggtggg

SEQ ID NO: 253856 - DNA, 122 bp, Homo sapiens
cggggccaggagcgcggcaccacccccgtaccgccggccgctctttgtgtctggaggccgcgacgcaacactcctcccggcctcgaggcaccgccccctcggtgtcccggcgcagtgggcga

SEQ ID NO: 253857 - DNA, 122 bp, Homo sapiens
aaaacatccctgggaggaaggccgctgccttttgctcttcatcttctatctggaaagttccgtgccctcttccctggggggatgagtaagacggcacacagggcttgggaatttttaataag

SEQ ID NO: 253858 - DNA, 122 bp, Homo sapiens
ctgcagctgggtagcagcgcgcggcgcggcgcggcggtggcgggcagcgcgcggcaatgccggccccggggctggactgctgaacccacaccgcttcaccaccggactccaactgggagggg

SEQ ID NO: 253859 - DNA, 122 bp, Homo sapiens
gatttgaaacaggctttcatgtttatttgtacaatttaatatatcagtaacactttaaaacgtgttcctttataagtcattctagatggggttattatgagttgtgctaaggttttacggca

SEQ ID NO: 253860 - DNA, 122 bp, Homo sapiens
aggcccagctgcagagagtgcagacctctgcctgatttattcaggtccgcttctcagaagcgtagaggtcacccaggctgtttggggggggatgtccccccaccgaaaccccgtccgctgcc

SEQ ID NO: 253861 - DNA, 122 bp, Homo sapiens
ctctcatggaggtggcctgaggcatctgactctttcccctcaaggagtctctgagtctcccggagtcagcgccggctgttgtggcttttccccgggtgataactgagccgaatttccgcgcc

SEQ ID NO: 253862 - DNA, 122 bp, Homo sapiens
tgactccagagaaacaccggggagtagcttcctccctcgtcctgaggagttcggaagcttcgcccctgaggcatcttgtgagaagtgagaaaccaggtcctcagagtgacaatctggtggcc

SEQ ID NO: 253863 - DNA, 122 bp, Homo sapiens
agtgagaggagaaattgctacagctatgactgcctttgttctcaaagccatttgaattgccggctgtgttggggctggtttgtaccttgttgaagtgctgagatgagaacttctcattagag

SEQ ID NO: 253864 - DNA, 122 bp, Homo sapiens
taagttggctttttggatctcccaagagctggcctcaggctgcatttccaatctatttcccgttttgccccttcaggtcaaagtctactacttggtaggagcaccatgatttctcactttcc

SEQ ID NO: 253865 - DNA, 122 bp, Homo sapiens
aggtcgccgcggggctggccgccatgcacaagctgcacttcctgcacaggtgggtacctgcgtcagcggtgcacgccccacacagcaccggcgggacagtccagagaggctgccgagtttgt

SEQ ID NO: 253866 - DNA, 122 bp, Homo sapiens
tctttccggggctgagtggcctaggaaagtttggcagaaactgagtagagtctcccgagtcggtcttcgcagcacccctcctccccagccccggcctgcagggtgggagtctcagctggaag

SEQ ID NO: 253867 - DNA, 122 bp, Homo sapiens
ctggcttgagcacctcaatccctttgagaatgtccagttacacattcaagaggccagtaacgagaattacaccccatcctggcaatgaggtcagataccatcaatgggaggagagcttggag

SEQ ID NO: 253868 - DNA, 122 bp, Homo sapiens
atcctgcttttcatttcttaataggctatgcttcacttgggtttatctgttctttccttacgattagattaagattgtgcaatcttggctggaatataacataagtgatgtgtgtttttcag

SEQ ID NO: 253869 - DNA, 122 bp, Homo sapiens
gacaaatgagggcaagagaaaaaaataccatgaaatatatggggacgcaccccccaaaaacgctcagcagtcagtcagaaattcttagaaagtggaaacaactgcgaagccctaccccaacc

SEQ ID NO: 253870 - DNA, 122 bp, Homo sapiens
gcagatgacaccacacttcttcctaatacttcattttttttttcttccgaaacagagtctcgctctgttgtccaggctggagtacaatggtatgatcttggctcactgcaacctccgcctcc

SEQ ID NO: 253871 - DNA, 122 bp, Homo sapiens
tgacctcatgatctgcccacctcggcctcccaaagtgctaggattataggtgggagccaccgcacccggccaagtctgtgcttttaaggggagcttagtcaagcccagctctgcactgctgc

SEQ ID NO: 253872 - DNA, 122 bp, Homo sapiens
cgttggagacgagggacaggcggcgcttgttctggggggccggctgcatctcgggggacccgtcgtggccagagtaggcatcagccagcaggtgatctaggagagacactgagtgagcctgc

SEQ ID NO: 253873 - DNA, 122 bp, Homo sapiens
tttccacttctgacttccatgctgcaatgagagtcagctatgaaaaacaaacctaaacatcgaactttccttagcttcttcagtggcttccaactgcttttggaataaagtcctaaattcaa

SEQ ID NO: 253874 - DNA, 122 bp, Homo sapiens
gaggggccggcggcgggggcggacccctggcggtcctcctggctggggtccgcgcgctcgcggcagctccccgtggaggtcactgtccgtgccagtccctcccgctgtcccgccctctcccg

SEQ ID NO: 253875 - DNA, 122 bp, Homo sapiens
aaaagaaagttgatgtccgaaccaagggccgtattggcttttcttatactctagaacatacgacgacaaagaagattttgatgaagttcaaattagagtcagcgtgctcatcagaaagaaag

SEQ ID NO: 253876 - DNA, 122 bp, Homo sapiens
atgagcctgcaggctctggtagtagcgcaccctggctgagtccggcttccagttggacaccgcccaggccaccagctcggtcttggccgagaggttgagcggtgggtgggcaggctggccgg

SEQ ID NO: 253877 - DNA, 122 bp, Homo sapiens
gcgtaaggagaatgggggtcgggtggcttcagcaatgtgtgccccctccccattaaactccgagatttgcgctagagcggatggaaaccgaggcacgcagccctcgaccccggccaggcgtg

SEQ ID NO: 253878 - DNA, 122 bp, Homo sapiens
actgagaagccctggtggcaggcatggtctggagtgctgggcagatgctgtttctgggcccgtctgcctggtgggggtgctgtcctcccccctgtgcacacgtgagcatcgtgcatgtggcc

SEQ ID NO: 253879 - DNA, 122 bp, Homo sapiens
cttagttctctttcaagcttgcaaagaaccatccagggtgcaggtactttttccctcctccgttttcaaaaataaccgcctatcagtcccgggagagctgaggatagcaggattttccttgc

SEQ ID NO: 253880 - DNA, 122 bp, Homo sapiens
cagagacaatggatagatgcggctaacttcagacggtgcggcttcagagagggacctggccggagactgccgggcttcagagaaagctcacgttcccatctgctttccagcctccctttccg

SEQ ID NO: 253881 - DNA, 122 bp, Homo sapiens
ttcaccagcttgagaggcgcctccgtgttgagcagctcatggcccactaaagtccacttgcgggtgtcgccagcgtcggccgcctcggggcagcgtttgcccacggtggaggagatgaagta

SEQ ID NO: 253882 - DNA, 122 bp, Homo sapiens
cacccccacctcagatacttccaagtgtatacagtcctttgtccaggtctctgcttttgccgctactgctggtgtttccgcattcagaaagtccatctccgcctcgctaccgacccctggcg

SEQ ID NO: 253883 - DNA, 122 bp, Homo sapiens
catagtgaaggacactaggtgtcaaattctagcgagaacaatttccaggaagccgtgttccgctcttgagcgagcacccactgggcctcatgcaaggtagaaagagcctgcgtacgtcaccc

SEQ ID NO: 253884 - DNA, 122 bp, Homo sapiens
gatgttgtttagtccaactagctgtggggaggggtaaacacacactgctggatggtgggacgtgcagaacgtcaggggaacataaccaaacagagttaagcatgtgctgtgactaatagagg

SEQ ID NO: 253885 - DNA, 122 bp, Homo sapiens
taatttgtgttgatccaggacacgggaggagacctgggcagcggcggactcattgcaggtcgctctgcggtgaggacgccacaggcaccagcgtgcttctcctcaggacatgcacttgtaac

SEQ ID NO: 253886 - DNA, 122 bp, Homo sapiens
tgtgtttgaacaaccagtcatcacagatgtagtagtgaggtagtattgttgtcccctcctcgggactgatgtttttatatgctgcccttccagaaaaggtccaggttttaaaaaataacatt

SEQ ID NO: 253887 - DNA, 122 bp, Homo sapiens
tgtctgctgtccctgtaggtgctaggactcctcacctggctttgtcacctcctggccagccgaggactccacagcagggacagagcaggtgtttctgggtattatagctcagattaatttga

SEQ ID NO: 253888 - DNA, 122 bp, Homo sapiens
agttcatcaaattctgagaaaatagtgatgcgctcttgattggcggcgattccctttacccgtgtgtttggagaagggactgttagaccctcaggaagaagacctccgtcttccgccagcga

SEQ ID NO: 253889 - DNA, 122 bp, Homo sapiens
cacttctagaaaatatctcctcagagagccaattaaccacagggaaaaattattcggaggcgatatttaaaataatttggaaaaaactattagaaagcaccattagcataataatcacaact

SEQ ID NO: 253890 - DNA, 122 bp, Homo sapiens
cccaaccaaaatcccctttaacccttccctagaacagcaggacctgcgaaactctgaggccgctttgtgaggtcctcctctgcgcagcacgccccccacccctctcttggtgccgccgcagc

SEQ ID NO: 253891 - DNA, 122 bp, Homo sapiens
agagcaagactctgtcccaaaaaaaaaaaaaaaaaaacccagcatggtacaatataattccgcttgtgtaagaagccaagtttaaatgtgtatctgtatgtatttttgtatatgcatctgta

SEQ ID NO: 253892 - DNA, 122 bp, Homo sapiens
ggcaacacgaatgactctcagaagtgatatagcgtgaagccaggcacaagggccgacaggcgtatgatccgtggagaaatgcagacagggcgcctttggggagatgaagcgcatggtaattg

SEQ ID NO: 253893 - DNA, 122 bp, Homo sapiens
tgtatatcttacatatgttgatttatggttttggcctgtaacatctgtctctgtaaaatccgtaaaaccaggccgggcatggtgactgttgcctataatcccagcatactcggaggccaagg

SEQ ID NO: 253894 - DNA, 122 bp, Homo sapiens
gctaaccttcaccgagggcctctgctgcctcagacactgtccacagtcttcagatattgtcggatttattctcacagcaactctgcaagagtgggatgggcatcctcattccttatgtggaa

SEQ ID NO: 253895 - DNA, 122 bp, Homo sapiens
atatatatggcttgaggtcccaggctagggaaaggttaacaaccagtagtcagcaaagaccggtctaggaacataactgagcattccaagagattgaaaagttttcaacattcatagacatc

SEQ ID NO: 253896 - DNA, 122 bp, Homo sapiens
gccactgcacagtgagactctgtccgaaaaaaaaaaaaaagttgattcagtgtttgcttacgtacaaggtggaaactccctactacagggctcttcattccaatcatgttctgaatgcattc

SEQ ID NO: 253897 - DNA, 122 bp, Homo sapiens
ccggcttcctcctctctgtcagtgccaccaccagggttgccaggctgcgaatcccattcccgcagacggggacctggttcctggccctccgctccctgtgcggggtggggcctcggtgagcg

SEQ ID NO: 253898 - DNA, 122 bp, Homo sapiens
ggaggcaggagccgaacttccatgggcggcgggcagcaaatcacaccggcttcaaccgcccggcccgcccactttttgcagcgtctgacttccccgctcgcccgcgccgcttcctcctcctc

SEQ ID NO: 253899 - DNA, 122 bp, Homo sapiens
taccgcgctccccacaatttcgccgtccctccgcccccatccggggctttggcccctccccgtctccagcttttcgggctccccaccgggccccccggccctgttcctagccctctccggcc

SEQ ID NO: 253900 - DNA, 122 bp, Homo sapiens
gggagggtcttgtagtgcacactcagcatctctgttccctggagcgcatggggtgtgaaacgcctgatgccagccagctccccagtcttgagaggctggttgaatggcacatctccctagga

SEQ ID NO: 253901 - DNA, 122 bp, Homo sapiens
ttttagcactcaaaagggctgcatgacaactgttcaccctcaaagtgtgcaaaccgcaatcgcagctgtgcaggtcaggactccgagtcggaggtgagtgtgcgaggcatagacaagatagg

SEQ ID NO: 253902 - DNA, 122 bp, Homo sapiens
aggatcccaggctgtgggcctgaatggtgaccacgcggagtcggagtcagctcgcgtccgcgccgtcccagctccccgcctgaacccggcgcccctccgcgaggaaaggccggccctggccc

SEQ ID NO: 253903 - DNA, 122 bp, Homo sapiens
acagctgttttctattagacactattgtgttctttagcagcaaattatatagattggaaacgtacggctaacagtttctccaagtgaggttgtaaatgagcctgttgtcctctgaacaaaga

SEQ ID NO: 253904 - DNA, 122 bp, Homo sapiens
ggtccttagtgaatggtttccgctaggcaaaagcaatcgagccatcgtaacatacttgtgcgtccgcccagaaatgtgggcgtcagcgtttttggttccgtaacgtcggcgtgcaattggga

SEQ ID NO: 253905 - DNA, 122 bp, Homo sapiens
gacttttggacaagggatcccgagtacatctgtcaattactatggatgccagtgaaaccgcgtcttaagtggaaccatctggaaagacaaggaagctttgtcagagtctcctcccactctgt

SEQ ID NO: 253906 - DNA, 122 bp, Homo sapiens
aaatctccatcctccatctccactcttggaaaatgcagctgccctgcacacccacagccccgcccccgccccaccacggaggcctatggacgccaccacgacaccacatggcagttactcgg

SEQ ID NO: 253907 - DNA, 122 bp, Homo sapiens
gggtgacagagcaagatccctctcaaaaaaaaaaaaaaaaaagtaatagctttagcatatcgttctataaatgatgcttgttcttggagtttatggttaataatttttaccatatttaaatc

SEQ ID NO: 253908 - DNA, 122 bp, Homo sapiens
ggcccgcccctcggccgcgcagtgcggcgccgcacgccccggacgctgtccagcgttggccgcctgagcagaggctgccgcggagctaagacacccgccgtttcacccagccagcgggccca

SEQ ID NO: 253909 - DNA, 122 bp, Homo sapiens
aacgtctatgtgtacagatgaatgataaactctctgcttctccctctgcccctctccaggcgccggcgggcgggccggtttcgaagttgatgcaatcggtttaaacatggctgaacgcgtgt

SEQ ID NO: 253910 - DNA, 122 bp, Homo sapiens
gggctgaagaggtttgtgggcgcagcgcatcctgaataacctgccttcctcgctcccctacgcccctcaccctacgcagtgcaaaggacgtcaggaactgggagtggtgaaagacatccggg

SEQ ID NO: 253911 - DNA, 122 bp, Homo sapiens
ttatatggcgtcaaggagaaactgacaggtaatttgggaaactaaaggttccttggactccgtagttaatggagagtttagcaccaattcctgcgtaatttgcacttctgagaagcagaatt

SEQ ID NO: 253912 - DNA, 122 bp, Homo sapiens
gactctgatcccagccatggccttcctctcctgcgtgagaccagaaagctgggagccctgcgtggaggtatgtggctggagtcagctcctctgaactttccctcacttctgcccagaacttc

SEQ ID NO: 253913 - DNA, 122 bp, Homo sapiens
ggaaaccaaaacttcgttcccttcccacctgtatccagggacacctctgctgggggacagcgcttgccaccgccgaggctggcgcgaggaacgggggcacggacccgcttccactccgtccc

SEQ ID NO: 253914 - DNA, 122 bp, Homo sapiens
aatgctgtcctcacagaacataccctcctctcctcttcctcccctgcccatctgcatagacgtgtagttggccagcttacctgaatagatcttttaaatcaaaccagtctaaatatttgtaa

SEQ ID NO: 253915 - DNA, 122 bp, Homo sapiens
agagaaatatgggaaaataccaggccaacaatttgctatggaaatagtttgctggagctccgctctctttagactgtgtacattcctttgccatagtacttatttctcttattatctgccag

SEQ ID NO: 253916 - DNA, 122 bp, Homo sapiens
tcagatccaactccacctcacaaaaaactttccgggcttcagtctcatagaaaagtcccacgatgattcgggcatcctggcgctacaacagagaaagaaacagctcctgagggatgcccggg

SEQ ID NO: 253917 - DNA, 122 bp, Homo sapiens
gcacagccgtggctccaaagaggcatccaaagaggacgccgactgcccctttgacagctgcgggaaggcagggctcagggccaggcagtggctcaacgacaaggtcgacaatttaacactgg

SEQ ID NO: 253918 - DNA, 122 bp, Homo sapiens
taacaaacctgcacttataaccctgaacttaaaagttaaataaaagaatttagggccgagcgcggtggccactcctgaaatccaagcactttcggaggccaaggcaggtggatcgcctgaag

SEQ ID NO: 253919 - DNA, 122 bp, Homo sapiens
acaggccccggaactggggcccgggctgcaggcgggtggctggaacacaggtcggggtggcgccggctcccatcccaccgggacatcctggagggacagcggggctacagggtgcatcagtt

SEQ ID NO: 253920 - DNA, 122 bp, Homo sapiens
taggagcgcgggggcggctcctgctcttcctggactcctgagcagaggtgtgtgagtgtgcgggagtttctgtgcgagggtgatagggaagcggcggcggggggaggggcagcgcttcccgc

SEQ ID NO: 253921 - DNA, 122 bp, Homo sapiens
tccctgatactcccctacccaaccttagcatgtagaaaagccatggaccctgtcaccagacgcctagcatgatacctcacacatagaaacctctcaacagattagactagattagttgattg

SEQ ID NO: 253922 - DNA, 122 bp, Homo sapiens
gattttaaggagtggggaattgtgaagcccacagatgcgcacgcaatgaccagcaggaaccggaagccctgggtcacccccactctgcctcatttctgcctccaggatgccactgcctctgc

SEQ ID NO: 253923 - DNA, 122 bp, Homo sapiens
ccaatctttcccttatggtttctgttttcctgtctttactgaaaagatcattccctccctcgatcataaacctggcttcctattttcttctaaaagtgtaaagctcgcctctcacctggagg

SEQ ID NO: 253924 - DNA, 122 bp, Homo sapiens
cgcccccgcgggcggagacagagttgcaggcctcgttccgggaagtgctgcgctgggcgccgcgggatgccgagctgatcgagccctggaggcccagcctgggcgagctgctggccaggccc

SEQ ID NO: 253925 - DNA, 122 bp, Homo sapiens
actctctccaatgtaggcccaactgtggtttctaccatcagctttctttgtaggcctgggcggtgtggaagctgaaatgtgtgtagaaatgagtcccagctcatcggctcatccacgtgttc

SEQ ID NO: 253926 - DNA, 122 bp, Homo sapiens
attatggctcccggacatggtgtagggaaaggtgtcccacagggatcaagcctagaatatcgctggatcttgtacagtttagtaaagggcaggactggatttaacataacgtccaccaaact

SEQ ID NO: 253927 - DNA, 122 bp, Homo sapiens
accaggacacactggcccctttgccgcacccgggggccgccccttggcccatggctttcccgtaccagtacccgccacccccgcacccatacaacccgcacccgggcttcccggagctgggc

SEQ ID NO: 253928 - DNA, 122 bp, Homo sapiens
cacaaaccactgaccctggtctaaggagcttccattgtagacgtccctggaaccacctggcgggatacatgtgatagtaacaagtttgacaacagagtctgacatgattcacaaaaatatac

SEQ ID NO: 253929 - DNA, 122 bp, Homo sapiens
tgaagtgcgggccaccagccccaagtcccttaagctcccaggtccctaagccccgccccacgctgtcagtttccccggtcccgcccccttaggccccgcctctcgactccgccttcactccc

SEQ ID NO: 253930 - DNA, 122 bp, Homo sapiens
aagtccgcttgcgcggctctggaaagcccggcctggcagggcgcccggcccgcaggctcgcggttacattttccacgggccagactgggaatcacgtagggagagtctgtactcttcccagc

SEQ ID NO: 253931 - DNA, 122 bp, Homo sapiens
tctgggcaccagtgatcctcctgcttcagcctcccaagtagctaggactgcaggcacatgcgaccacacccagtgaattttgctattgtttgtagagactgggtttcactgtgtggcccaag

SEQ ID NO: 253932 - DNA, 122 bp, Homo sapiens
gcaccgaagggcaggacgcgaaagggcaggccggtgggcggggacgcccggctcagaccccgtccccagcctggacctgggccccaccctgcccacaccgcgaccctccccatccgtctcgc

SEQ ID NO: 253933 - DNA, 122 bp, Homo sapiens
tcggtgccaggcctgccaggccaagccccgattctcaggggcggcaggaggtgggaggcacgtttgggcggatctttcaaatggcacctttcaaatggatcctttcatctctccttccccca

SEQ ID NO: 253934 - DNA, 122 bp, Homo sapiens
gcaggggcggccccggcgaggcgcagcgcgggcgggagcccgaatgtggtctcaggactgcggcaaacacctgtcggactgtctgggacgcacgacctagggacacggacccagtgcacggt

SEQ ID NO: 253935 - DNA, 122 bp, Homo sapiens
cgggctccgggattggcggttgcttggcgggcggtgtcaggctctcggtggcggcggaggcggcggaggccagggaggaagatgtcgtaatgagcggtgggtcccggccgctgccggcgggg

SEQ ID NO: 253936 - DNA, 122 bp, Homo sapiens
agtaggtggggagtgagccgcgggcagagctctccttggctgagccggcaggctgctgagcgcatgcgcctgagggcttttacccctcccttctctccctgcttccaaccggcgcgcggctg

SEQ ID NO: 253937 - DNA, 122 bp, Homo sapiens
ccggaccgggccgggtcgggacgcgggggaggctgcagttgggaacaaaggcagctctcgcgggcgcgcagcgtggctgaggacgcgcccctccctccaggccgagcccagcccggcgtgtg

SEQ ID NO: 253938 - DNA, 122 bp, Homo sapiens
gtgggtggggagaagtattctgtgttgattcttgagtgagagaacaggaaaaggacactgcgcttttcccctagatcctcagggtggctgaatatacatatggaatacgctgtaggaggagt

SEQ ID NO: 253939 - DNA, 122 bp, Homo sapiens
ttgggcggagctgcagctgcacaagttgtggctgcagatccgagcctccctgcgctctttcggggctgggagcaggcaggatccctgtcctccagggcacagctgcagccaccaaaactgca

SEQ ID NO: 253940 - DNA, 122 bp, Homo sapiens
gttccgcctgacggcctccccaaaaacaagtaagtctgaaatctcaaccttctcaaggtccgagggatctacctggcctttgccactctactacctgaggccgcctggctggggggaggtcg

SEQ ID NO: 253941 - DNA, 122 bp, Homo sapiens
caggcgacactggtgctgacaccacagaagtgctggtgtggacctgtgggtcgcttggttcgtggagagacagccacagcatcttcccagcatcgcggccggcacctggcacctgcactttg

SEQ ID NO: 253942 - DNA, 122 bp, Homo sapiens
gccaccagctttggaaataacagctgggattttctgcttaaaccagcatcccagagcacacgggtactaactagcagaagccctaagtaaaatgaaacgggctctgaaggaagtcctggagc

SEQ ID NO: 253943 - DNA, 122 bp, Homo sapiens
tcagaaggttcaagaataagaatgtgtatttacagtgagaaagaaaatgtgaggcaggtgcggtggtacatgccatagtcctggctactcaggaggctaaggttgaagctcacttgaggcaa

SEQ ID NO: 253944 - DNA, 122 bp, Homo sapiens
ggggcacagtgaggggggctgtggtcagacctggtctctggagggccagccgggggttcccgtccacctgtcagggggttcgacgccactttgagatgacaagtgaggccacctgggcacag

SEQ ID NO: 253945 - DNA, 122 bp, Homo sapiens
cacaaacacgattaccaaggcaaaaggcttcagggctaccaatgtgataggcaactgatacgaacttagtacttctttttctcaacccccatttaaaagcaaatcaattatgacagcggcca

SEQ ID NO: 253946 - DNA, 122 bp, Homo sapiens
cgataggtgacatttactgagcacttactatgagtcagcctctatcctaagggctttatccgtactctaatcctatgataatagtattgttttacagatgagaaagcagagtcttagaatag

SEQ ID NO: 253947 - DNA, 122 bp, Homo sapiens
ctctgcaggacatgctggtctccaacttccccttccaaagcgacggctaacggcacagcacgattcggctctttgcagttcttacttaaccgacgccccctaaacagcaaaatcgattgcgt

SEQ ID NO: 253948 - DNA, 122 bp, Homo sapiens
gctgccgggggctctgccgagttgacagcatcgaggacatccgctaagcaagaaagctctcgggagccttcgatggtgggagggagatcggagcccaggaactggagacggcccagctgccg

SEQ ID NO: 253949 - DNA, 122 bp, Homo sapiens
caattagcgcggaccccacagcgcagcacctcaccagctccccgcaccaacgccccggcgcgctctttgaggaaaaagcagagggcgacttaggtacccacgccgtctcagcgccgaccaat

SEQ ID NO: 253950 - DNA, 122 bp, Homo sapiens
gcatgcaggccatgcacaggtgtgagggtcaggagagaagcagaactgatgggatgggtccgtgggtcagtccttgttgcctgctagcttctaagcctcagcatcctaggagctgaccacag

SEQ ID NO: 253951 - DNA, 122 bp, Homo sapiens
catccttaagactcacatgaactctcacgcagggcagaaactgtacgggtgcggtctctgcgggaaagccttcagcgggagctcaagcctcactgcacacaggaagatacacacacaagaga

SEQ ID NO: 253952 - DNA, 122 bp, Homo sapiens
ggaggtgtggagggagacgcgtgggcgggaaccggggctgcccacgggcttgctagccaccgcaagttccaggtggacgtgggctcagcagaccccacactcggagctgctgaccggccctg

SEQ ID NO: 253953 - DNA, 122 bp, Homo sapiens
ccctgaatggcttttcctgccctggctcctcccatcatattttaaatgccgtcttcctcccgctccaaggaaaccttctcttgacgtcaggtactctccagccacggacctatcaacattct

SEQ ID NO: 253954 - DNA, 122 bp, Homo sapiens
ggcccgtggctcccgtgctcctgcgtggaccgcatgccctcagttctggcttctcctggccgcctcgagtcccacagccgagagggaagactcccgagagagctccacccagaggcgctact

SEQ ID NO: 253955 - DNA, 122 bp, Homo sapiens
taatttggtaaaggaaagctaggcatgcgtgattcgctttaccactcaagcaacaactgacgccctgtgtccaactagctaagatgagttatctgaagataaggtttacaaggcacagtact

SEQ ID NO: 253956 - DNA, 122 bp, Homo sapiens
ccagccacgctcctgttgggcccagatgaccatggaggcatccccagggaatgtgggggacgggggtctggcagctcctggcagcggccccattggtggggacactgacattcttccagggt

SEQ ID NO: 253957 - DNA, 122 bp, Homo sapiens
ccccgtgcattttagatcgctagtggataaaacaccctcaagtttctatccgtaaagcctcgaaattttctgcagtatttagaaaatgaatttaaatcttaaaaccctctaatattttatta

SEQ ID NO: 253958 - DNA, 122 bp, Homo sapiens
tagactaggcacacacatccctattctcctctctggtctagaaattaggcttgggctgggcgtggtggctcacacctgtaatcccagcactctgggaggccgagacaggtggatcacttgag

SEQ ID NO: 253959 - DNA, 122 bp, Homo sapiens
tgacactgcccttagctttctatgtgcaaagacagtattaaccttcccaggccaaacttacgactacaccttttccacacgaaatgcaaggcatttctaactccccagattacctcacattc

SEQ ID NO: 253960 - DNA, 122 bp, Homo sapiens
tcatggccagggcctggggagggacctgccccgtgtcccctccctgcctggggaagggcccggaccaccttcacacagtcaccctagggcactagtggggagtgaaggagccgccccccaga

SEQ ID NO: 253961 - DNA, 122 bp, Homo sapiens
agctcccccacgcgcctggctgtgattccctggggggtgcgcaagctgctgcggtgggtccggaggaactacggcgacatggacatttacatcaccgccagtggcatcgacgaccaggctct

SEQ ID NO: 253962 - DNA, 122 bp, Homo sapiens
aattaattcggtgtctcttttaatcaaactgaaagggaatcgggcagcggcttgcggagccgtgacatcacccccaaaatcggccagagccaatcagcgtcatcactccggggacacgtggg

SEQ ID NO: 253963 - DNA, 122 bp, Homo sapiens
gtaaactcctgcagagttgtgagcgttccacccagaagttctaagtctcccagaggtgaccggatcccctcagtgacagacagcctgcttctctgcctttcatttgtttgttacctgcactg

SEQ ID NO: 253964 - DNA, 122 bp, Homo sapiens
cagggacaaatctcggagactcggcgggcagcttcccaaagggagacacctgggcgggggcggggccgacggcgaacccgcccccaggaagccacagagtcgggaccgggtgcggtgcgcgc

SEQ ID NO: 253965 - DNA, 122 bp, Homo sapiens
aaatgaattcaagttactgacatgtaaaacgccagactgacatctgtacacttagctactcgctcagccgcggtggcggggcccgcgcggtccctccgcagactcgcgggccgggggaggcc

SEQ ID NO: 253966 - DNA, 122 bp, Homo sapiens
agatgcactccttgcatcttggccaaaaatctctttacattgtatatcatggttattacacgtcttttcatagcagaaggcattcacattacaggagatcccgtcctgcacatacacatcat

SEQ ID NO: 253967 - DNA, 122 bp, Homo sapiens
gccttcgctctcctcagccgctgtctccgggtggctgtgaagatccaaagagataatccccggagggcgaagttctttcatatgtaaggtgggcgcattgttattacttcccgaccacttaa

SEQ ID NO: 253968 - DNA, 122 bp, Homo sapiens
aaaaaccgcaaggtttttccttggaggagggagcagatgagcgggtaagaccggcaaatccgtcacataccctcaggacgcagggagcgcggctggaatcagcagttatgcagaaaacgcag

SEQ ID NO: 253969 - DNA, 122 bp, Homo sapiens
taatgacatgtatccatcattatagtatcacacaggttactttcagggcactgaaaataacgctatcctctgcctattcatcaatctctctggaccaacccctgcaactattgatattttta

SEQ ID NO: 253970 - DNA, 122 bp, Homo sapiens
gatctttcaggagacaaagcaagttttaatcagttgtttggttaataagtatggggtgttcgctgtgatagggccccgccagcttctggctcttgtggacctcaaaagtatcaggtggtttt

SEQ ID NO: 253971 - DNA, 122 bp, Homo sapiens
gtgctttgaaagaagtattaagctgccattgactctatcgtgtctcatcttaaggttctgcgtaaaagatggtgacaatatactatttgttaatgtaggggaatgacatcactagtagtctc

SEQ ID NO: 253972 - DNA, 122 bp, Homo sapiens
gagcataggcgctctcatccactaagggctgactacagtcttttcccctcagatttcaaacgctgcagggtgttgctagggactcttggcactccccagcagttggtttttccagtaaggag

SEQ ID NO: 253973 - DNA, 122 bp, Homo sapiens
acagaagtctaagatccctatctgatttgatgttttgcgacccttttaaggcgcagggcgcgaaagaacagaaacagaagtgtccgttcaagtaggtcggccggggtgtcactcgtataaaa

SEQ ID NO: 253974 - DNA, 122 bp, Homo sapiens
tagtgtgcggggtcctcgcacgcggacgtgttggctactaaataaagcgtgaagagggatcgctgggtagctgagcgccgccggcggccgccgggagcagcgagctgagccaggttgggtgg

SEQ ID NO: 253975 - DNA, 122 bp, Homo sapiens
cggagaaaacggaacagcacgaatgttcagtcagctccaggaacatgaataaatcatgttcgttaaattgcatttaatgaaatactatattcagctgtaatatttaatgaatgacagctaca

SEQ ID NO: 253976 - DNA, 122 bp, Homo sapiens
gaggtttaggcggggtgctagaatttgcatagctaattgatagtggccctgttgctgggtcgggcctcacacgtggagtacccaaaccgtatataggaagtgtttagcatttggtaatgctc

SEQ ID NO: 253977 - DNA, 122 bp, Homo sapiens
cccctcgggcctcctttcttggattttctcagtctgttgctgcttggaacagggaagctccgcgtcctcgttctggggtgcacccagtcctttcgtgggatagagccttcgcgtaatccgtc

SEQ ID NO: 253978 - DNA, 122 bp, Homo sapiens
gcccccttgggcttccactgcaggaatgcaaggcgggtaaccttcaaagccaggtggaaacgtccggtttgaaccgcacatatgctagggtggagagtgagaacgaatgcaaagagaggcta

SEQ ID NO: 253979 - DNA, 122 bp, Homo sapiens
tcgaggccaggactgcaccgttcatctcggaattcgcttgttcctaacttaggggagtggcgccgagacaccgtgtagcgcccatgccaaggaggaagcgagacagcaggagcggaggaaag

SEQ ID NO: 253980 - DNA, 122 bp, Homo sapiens
tgagagcccagagctctgtgctcggctctttcctgtcctcccgggctggccttgtgctttcgtgactgggtcaggctcctgggctctgtgtctgatgcaatcagtgccacctgaatgcctgg

SEQ ID NO: 253981 - DNA, 122 bp, Homo sapiens
acagagacagtgaggagggaggggtaaacaatggtcactgtgcggtgcggtgtgacactgcgggaacatgttcggaggtgttgatgggcacagcctgattgatcatggcactggagtagcgc

SEQ ID NO: 253982 - DNA, 122 bp, Homo sapiens
accactgcactccagcctgggtgacacagctctggagtcagactgtctgagctcatggcccgacaccccacactgcttgctggtgacagtgggtaagttatgtatgtccttggtgcctcata

SEQ ID NO: 253983 - DNA, 122 bp, Homo sapiens
ctgcgactttagcagccgcatcttgctagaatatggaagataatgtcccagggtgggaaccgagggtggcagtacagaaaggatcctaggaaaaatcggggactaaagtcacccgacttctg

SEQ ID NO: 253984 - DNA, 122 bp, Homo sapiens
tgcagcacactcggcgatcatcgcgagggcagcctgcccggcctgcttcctcagcgctgccggagcctgaattgccccagaatcacacagaccttgctccaagaccctagttcccctaagag

SEQ ID NO: 253985 - DNA, 122 bp, Homo sapiens
gcggggcccgggggagcgaggagagtgcgtcccgcggggaggtggcggcacgcgggactccgctccgggagttcgcagacgcactcggcgggagttggcagctgcactcaggctggttcccc

SEQ ID NO: 253986 - DNA, 122 bp, Homo sapiens
agtgctgggattacaggcgtgagcccccgcacccggccaaaggcaggattatttgttaagcgggttgcagtgttctaccagaccccccaccctcaacccaagcccctggtctcactgggact

SEQ ID NO: 253987 - DNA, 122 bp, Homo sapiens
gagcagaggatcctcccgtgcaggctgtggatgtcactcacttcccagctggtgaagcctcgctgcagagatgcatctgctcccagccctggcaggggtcctggccacactcgtcctcgccc

SEQ ID NO: 253988 - DNA, 122 bp, Homo sapiens
aatctgcccctatttttcacaccgctacgcacatcctataacaagccaatatatgtttgtcgaatggatacatgcgtgaacgaattgggtagggagtaaagtgaactaaatgatgccacatg

SEQ ID NO: 253989 - DNA, 122 bp, Homo sapiens
actctccacccagcccctccccgagcctcccgcctccccgctcacctttcaacatcttcacggccacggtgaccgcctccttgggcttgtctttgtcaattcccactgcttccgccatgacc

SEQ ID NO: 253990 - DNA, 122 bp, Homo sapiens
cttgaacgtcgccatcaaatcataacccccaaatatgtattttcccattttaggggagggcgccggcagccagccgttaattagcatacttcccatgctcgtcatgaagtcacgggctaatc

SEQ ID NO: 253991 - DNA, 122 bp, Homo sapiens
ttctgaggcctttccaatggagtcaggtcacttagcctatcgacacagactctctttccacgtggtaccttttctccctcacggaaccaatgtctttcttccttgaagccagaactgagaag

SEQ ID NO: 253992 - DNA, 122 bp, Homo sapiens
tgaggccagagacccttctgttcccctttttttcagagttgacccgtgcactgaacaaggcggcaactgaagaaaaggggacactaatagaaatgcagagataatgagatatactcgtgtag

SEQ ID NO: 253993 - DNA, 122 bp, Homo sapiens
tacattgactacagagtgttatttgtgaaagatgaaaggacataaggcagttggagcatgcgagcacagtgcttctgcataataagcactcaatacaatttagcctttattcttagtgaccc

SEQ ID NO: 253994 - DNA, 122 bp, Homo sapiens
tgtgccgtgaaaattagcctaggagtcccatgtccacctgtctacgtggagccccaggagcgtgaacagtggcatgcagcgagatgaggagggagagagaactggaaaagaaggagagagaa

SEQ ID NO: 253995 - DNA, 122 bp, Homo sapiens
taattcaaaagtcatttaaaagatttatcttcttaatgatgttttgattaggttaccactcggattattttgtatttcctaaatacaacagctgagagttggccagagtagactaagtgaca

SEQ ID NO: 253996 - DNA, 122 bp, Homo sapiens
ctcaactcttccgaaatttgccatctcctaaagttctttaatctctagccacgggggttccggatttcctccgggtctacggggactcagggactgcagaggcagctgtggggggtggcatg

SEQ ID NO: 253997 - DNA, 122 bp, Homo sapiens
ggagctgcataactcggagcccgtggagccacgcggagcggcagggccaggcctagccaccgaagctctagacttcttggccaaacttgttgaacttggtcttggcgggggtggggccactg

SEQ ID NO: 253998 - DNA, 122 bp, Homo sapiens
gcggccgaactctggcccggagacccctttgcctggatcccgccatcttggattctggaacgcggaggagggcgggagagggaggggcgcggatggctgcggatggccaacagggcgctcgc

SEQ ID NO: 253999 - DNA, 122 bp, Homo sapiens
aattaagtttattcacactatatagacttattgcaaggcaagaatgagaccttagactttcgtgctcaatcttgaagacaatgtttttcaacccttttcaacagattctctctcaaaaccta

SEQ ID NO: 254000 - DNA, 122 bp, Homo sapiens
ctgggccaccttgccagccctcactccttgatttagagaatgtttatggaacagctgcctcgtgttaggccctgcggatgctggggccacagggcaggctggctggctggatttctggccct

SEQ ID NO: 254001 - DNA, 122 bp, Homo sapiens
ttcttagctggtagaaagcaagtttcagcaaacgaagtggagactagggcgctggagctccgggtcgcaccgccctgggagagaagttctctcccagtgaagggaggatttctcccagggca

SEQ ID NO: 254002 - DNA, 122 bp, Homo sapiens
tccatcccaccatgacccagccccgacgccgctggggctgtcccagcccctctccttagccgcttgtgccgccatcagaggggcctgtctcgctcccccagacacagagcctctgttttcct

SEQ ID NO: 254003 - DNA, 122 bp, Homo sapiens
acatgagatgaaaaattatcaaaacataacagtgtttgtgttacctctccaggaagttagcgcttttccagaggacgtttgatcactgagaattaaaatgcatgggagtaaattatgcatgg

SEQ ID NO: 254004 - DNA, 122 bp, Homo sapiens
gctgctcaggtcgtgcagggaccactcgtgggacctggcgtctggttgccggggcccgggcgtgggagtggggtgggggcagcccggttggcactgaccgtctatgatcagcgaagccctct

SEQ ID NO: 254005 - DNA, 122 bp, Homo sapiens
gggctcggcccggctgcgcagctctgggagccggggacggtaggagtcctctccagggagcgccgatggggaagtcgcccagggtttggggactccgagtgcttccaagtgcagctgagctt

SEQ ID NO: 254006 - DNA, 122 bp, Homo sapiens
tgctgaccagacaagggagctcggcagctggagcctctccaggcagtctctggggggagacgggattggactgagtcctggaacagagttggggtgagcgccctgtcactggccttggatga

SEQ ID NO: 254007 - DNA, 122 bp, Homo sapiens
cgtccagctgtaacagcttgccggtattcctagctaaacaaggtgcagcccggggtcactcgtacttgaggtggtcggcaaatgcagcaggctgctttgtagatgcctctagccttcttttc

SEQ ID NO: 254008 - DNA, 122 bp, Homo sapiens
aggttgcgggtcaggcctcggtcgaaggggttgctggggcgctggcggagataggcgatgcggtgtgaggagatgaattcccaggtggtggtgttgctggccaccaggtagaggtgcgagac

SEQ ID NO: 254009 - DNA, 122 bp, Homo sapiens
cccggcccgctcgggtgccgcccagagtccggcccgctaggtgcctggtgctccgctctgcgctcagctgctccgcacagccccgcctggcacgcagctccagcggctggtcgggtagtagt

SEQ ID NO: 254010 - DNA, 122 bp, Homo sapiens
ccgtagctccgcgggcgcttcgagggtaccacgcactgaaatgatgggcggggcctgccccgaccctcccggcctccacaggcaggccagcctccaggtttcccggcaagctccgaaaccca

SEQ ID NO: 254011 - DNA, 122 bp, Homo sapiens
ccccaagagcccacgtacaaacttctccaaactcgcagcggtgactggagggggtggtgacgtccccctaatgaaaatgcgagccctcgccccacaacacacacacgtgtggcgccccaccc

SEQ ID NO: 254012 - DNA, 122 bp, Homo sapiens
tcgaggaaggaggggaagcccaggccctcttcccggggtggcgggaacaggaggtgcgctcgtttagggaaggagaagggggttggcgccccgaccccagggacgcccacgagaggcccggc

SEQ ID NO: 254013 - DNA, 122 bp, Homo sapiens
ttccaaggctggcttctacctggccttccaggaccagggcgcctgcatgtcgctcatctccgtgcgcgccttctacaagaagtgtgcatccaccaccgcaggcttcgcactcttccccgaga

SEQ ID NO: 254014 - DNA, 122 bp, Homo sapiens
taatttgacatttgactgagagaacagcccagctccttagtggctctggtgtattgatcccgtgctgtgggcgggcgtgggtctgcggcttcctgtctgagggaatgcagtgccacggacag

SEQ ID NO: 254015 - DNA, 122 bp, Homo sapiens
gccacacttgaagaggctgagggaggcggtgtcgccgccgcggcgctgtcatggagctagcgcaggaagcgcgggaactgggttgctgggcggtcgaagagatgggggtgcccgtggcggcc

SEQ ID NO: 254016 - DNA, 122 bp, Homo sapiens
agctgttgctgcacatcaaggcgtttacagtggattagatgtgattccccttctttctcccgcatggcccccaccccaccctgccagcctgcccctggcccaggcgggctcctgtgcacggg

SEQ ID NO: 254017 - DNA, 122 bp, Homo sapiens
atttggctaaaagggctccctcttctttgttgttttggtcactgcttctacctaactcttcgcactgtcagtagctataagaagcaaaactattggctcaattgttctactgtctacagttt

SEQ ID NO: 254018 - DNA, 122 bp, Homo sapiens
gccttccccgaccttacatcctcgcccctccagggccttctcgggctcccggcccttccgcgaagctcgggctccaggcgcccgcccgccctcagccgcacatttggagcagatgcgctccc

SEQ ID NO: 254019 - DNA, 122 bp, Homo sapiens
gccaaatagagatgttcaataagcttcaggaggagtcatgaatattcatgaaaggagaagcgtgtactggtccagctgagcaaattctccatggactgcccagaaccaatctctgatctctt

SEQ ID NO: 254020 - DNA, 122 bp, Homo sapiens
ggcctgcgggggcaagtgcgcgctgcgctgtggtcactggctctgtgccgcccccttccccgggcgcaggggacaagagacaggcctgtgccctgaacccggctctctctgcctgcctgtgc

SEQ ID NO: 254021 - DNA, 122 bp, Homo sapiens
ctacgtcacaggacagcggcaagggcaacacccgctcagcagggcacccggcagcatccacgtgaaaaggcaccatgccagcccccagcagtgcctgcgcttgggtcccggctgtgcccccg

SEQ ID NO: 254022 - DNA, 122 bp, Homo sapiens
gggcacaggcgggtgggggaagggaacctggacgtccagctgccggcgcctgccgagccccgccctccattgcctccggggccgcgagtctgagctccaggcccggaacacccctcccccac

SEQ ID NO: 254023 - DNA, 122 bp, Homo sapiens
actctggttcacaggcagcatgtctttggttttctgactacttcttgtcctgtgaagcagcgttgctgcctgcctattttaagttaatgtttcaaaatttaaggttaaagcttaaagttgtg

SEQ ID NO: 254024 - DNA, 122 bp, Homo sapiens
ctcttttatgaatttaaggtgccagtagctgtctacttgaacggcatgcttaatctggaacgccatgtcgaccttcatcccccagttctttctccccaaattaaaaacacaaatacacacac

SEQ ID NO: 254025 - DNA, 122 bp, Homo sapiens
gacagcaagcggaactgcagcaagctcccagtaattccgggtgctgcacttccggtcaggcggtcgggctgcggggccctggggccagctcaccgccggaagtctccgcgtcccccccaccc

SEQ ID NO: 254026 - DNA, 122 bp, Homo sapiens
ctcagctctaggcttctgtaaaaacctcccccactgcatggatttggctgtttaatcagccgagattacagcccgggaagatttgcaaacctgattctccctccagctgctgtgacaacttc

SEQ ID NO: 254027 - DNA, 122 bp, Homo sapiens
taaaccctttcaaaatgcagtacagtacttttaaaacaaaagccatccaagttgaataagcgatggcagtttgggggcctgatatggctgttatttataaggtggccatttttacatcctaa

SEQ ID NO: 254028 - DNA, 122 bp, Homo sapiens
gtactagtggtggcgcctaagcagtctctcatcttcctgaaatggagagcaaagacaactcggtcaggaccaggaagaatcctgggcaagtcgagagtcacaacccagacgacaaacctgat

SEQ ID NO: 254029 - DNA, 122 bp, Homo sapiens
cgaggcagatgtccatgcggtccgacggcagggagcccgagctgtagggggcgctggaggcgcacgaagagacgctggagctgctctcagaggccggggacagctgctgcagcaccccgttg

SEQ ID NO: 254030 - DNA, 122 bp, Homo sapiens
acactggacctgagcactagataggttgcctgactccactcagaggcagaacctgccccacggggcaattgtggactgagctccagctgggcatggctagaccctgctcttccttctagcca

SEQ ID NO: 254031 - DNA, 122 bp, Homo sapiens
tagcatgacaatggccccgttgtgtgtggtgggggtcggggttggggggcatggtgcagtcggccttcacgtaaactaagtaggcaggtaggatctgaagaaggcacaggtgcaagtaaaat

SEQ ID NO: 254032 - DNA, 122 bp, Homo sapiens
gactccccaggccagaaagcaaagtccccagcccccgctgactgacctctgcaagcagtgcgcagccgtgaggacccactggtggtggatgagggagccactgcagatgtacgtgcccagga

SEQ ID NO: 254033 - DNA, 122 bp, Homo sapiens
gagttgccccatccggcaaggtcctaggatcccggcgctgtgggtgcggctcacacgggccggtccactgcatactggcaagcactcaggttggaggccgggttctgcacgctggcgtagcc

SEQ ID NO: 254034 - DNA, 122 bp, Homo sapiens
gcccagagccgttagggtggaactccactcgggcggggcgggcggagtgatacagctggacgccagttggtggagcccccgcgggaaacgactgagcgcgaggagcgtgcgcgctcccgtcg

SEQ ID NO: 254035 - DNA, 122 bp, Homo sapiens
atcattaaagcaaaaggaccagaaagagcgcactttgacttatattgataggtagtcacgcgaatatcaaaaaaatagatcagtaatttagaagtgggtgaaacaaccaacaccaaagagat

SEQ ID NO: 254036 - DNA, 122 bp, Homo sapiens
tcagttttcaactacaagagtcttgcggatctggagcagcggtggatacacctctgcctgcgcggagggagcggagctaaaatactgtaatttttcggacctttataaaatagaatcagtaa

SEQ ID NO: 254037 - DNA, 122 bp, Homo sapiens
actggcccctgaggaaggaaaattttaagtacggggaaggggccggagggcaaggagattcgtgagaatatcgcagggcctgtaatgctgaaaccagtgcgtcgccactattattggtatcc

SEQ ID NO: 254038 - DNA, 122 bp, Homo sapiens
actggccccagcgctgtggtggggagtggtttgcccttcctgctaactctattacccccacgattcttcaccgctgctgaccacccacactcaacctccctctgacctcataacctaatggc

SEQ ID NO: 254039 - DNA, 122 bp, Homo sapiens
cctcgggtgtgggcagctccgaaactcacaccggggaggcgtggagagagccccgtcgcccgctaacccaggccaatggggcgaaacgcccggagacaagccttaccctagggcgtgcgggc

SEQ ID NO: 254040 - DNA, 122 bp, Homo sapiens
gcactgcttggtcattcttaatcatttacaggaaaaagcagaagttgtaactgcatgctacgtgactcaggctacatagcaacattcctctcaaggcttggaataatttaaagttccaacag

SEQ ID NO: 254041 - DNA, 122 bp, Homo sapiens
acgtggacgttttcttggccctttaatggttagcgttttccaacggccaccaattcgctacggattcgttagttaatggcagcatcatctaccaatcggttgtcagaagcgggattctgccg

SEQ ID NO: 254042 - DNA, 122 bp, Homo sapiens
aagacagttcctcttcttaaatccggctctgtgcctatgaagacggaagcagcagcattccgcttgcaggtttttgaaaaaacaaatggggcaagagaggccaggaccacgcctgactcagg

SEQ ID NO: 254043 - DNA, 122 bp, Homo sapiens
tgtcagcaaacatctcactggagaactacagggcagcagccattctaattactcctcacccgtgcctggcaacctccaacacacaaaaaaatccataggcccagtgaccatctggcttccct

SEQ ID NO: 254044 - DNA, 122 bp, Homo sapiens
ctgcctggagctgcgggcgcggagcggaggacctgccaaggagggtattaccgggggcagcgggatcgggtggggacccatgggccagcgaggggaggttctgcctcccccactcgccgcac

SEQ ID NO: 254045 - DNA, 122 bp, Homo sapiens
gaccgcactccaggacaggcacagtcagggcgtcgcgtgggcctactgtggcaaaggagacgtccgcgcgaatccggtcctggggaaagggcagttccaacaacctttcatccagaagcctg

SEQ ID NO: 254046 - DNA, 122 bp, Homo sapiens
gattgggatgctttgtatctggagaggcgctcctgattggcctgaggggccccccagctccggggagttgtcctccattcagcccactcaagggttgcacaactgcttccagccggacggag

SEQ ID NO: 254047 - DNA, 122 bp, Homo sapiens
cagtctgcaaggggctggtgcgtagccagctttgcatcccacagcctctggctgactggtcgtggattctggcacattgtttgggtaggataagggcatacacctgctatttaataacaatg

SEQ ID NO: 254048 - DNA, 122 bp, Homo sapiens
gccacagcccctgacgacacctgccgcggagtctgggggctgagggggcgggggtgcccacggagcctagtatggtgcctggcgtatgaccggcgctcaatatttgttaaatgatttgttac

SEQ ID NO: 254049 - DNA, 122 bp, Homo sapiens
cggagcgcgcctggggctggaggggaggaagaggcggcgggagccgagagactcgcggctcggccagcctcccgcgcctggtgcaaatcacgctgcagaactggaactagtgcgacttaggg

SEQ ID NO: 254050 - DNA, 122 bp, Homo sapiens
ttaccattgtatcgttgtcgttattattaggagcagttgctgttagctgagtactaactccgcgtcaggtactgggaaggctgggaggcaggtgctttgtcccattttacaagagaatactg

SEQ ID NO: 254051 - DNA, 122 bp, Homo sapiens
tcaaagttatatccaagacaagactcaggggctatgtctagaagttctttccttcccccccgccccccaataaatagagatggggtcttgctgtgttacccaggctgctctcaaactcctgg

SEQ ID NO: 254052 - DNA, 122 bp, Homo sapiens
gtgtgtgtcgctttattcgttcattgaacaaatgctggccagcggagcgtcgctctgggccgggcaccccgatggtcttgggaaccccaagcatccgtgttgattcctcatttcatttgacc

SEQ ID NO: 254053 - DNA, 122 bp, Homo sapiens
tggtctccaactccagatggtatgcaaatcaggaacctttactcagccaaaaatacccagcgtgaagagcatgaaggcttcattttctacaaagcaattttggagcaataaagaaaacaaaa

SEQ ID NO: 254054 - DNA, 122 bp, Homo sapiens
tgccccagggcgcccctgacctccgggcattggggcccggctccccgcagcctcccaccccgccccgctcccgagctagcaaagcccacatggccccgccgtctaccccggcgcccgccccg

SEQ ID NO: 254055 - DNA, 122 bp, Homo sapiens
tcgggtgggactctgcagctgcttcgcagcgcaactctctcaccaaactccgcgcccttgcgctagcggtgccaaaaggctcccgccccgattgaaaaggcgcagtgcatgcccgcccgcgt

SEQ ID NO: 254056 - DNA, 122 bp, Homo sapiens
cattgatgaaagaaaaacttcagctaaattaaatgtaaaggagtttaattgagcaatgaacggttcgccaatcgggcagctcccagaatcacagtggattcacagagactccagcgcagcca

SEQ ID NO: 254057 - DNA, 122 bp, Homo sapiens
agaggttatcatcactttggggtgccaaacttgtgttctccatttggcgagagggactcccgtccgcagcggaaggacagatggagtcaaaggccgatgcatagctggggccaggatggctt

SEQ ID NO: 254058 - DNA, 122 bp, Homo sapiens
caccgcgatctcaggccccggcgtttgtggcagctctcggttaccatgggaaccgcactccgcagcctccctgggccccatctaatctgcgtgtgtgcgtggcggagaattctaagcctctg

SEQ ID NO: 254059 - DNA, 122 bp, Homo sapiens
ctcacccaggggcaacgtgaagaaaacgtgaaattctgtcgcttgttgcagctgacagcacggctgtgaggtcccagtgggcagaggcctcgtgcagggcacctcaccagccgggatgtcag

SEQ ID NO: 254060 - DNA, 122 bp, Homo sapiens
caggattcaaagctttggtccaaagtcattagggggcaactggaagattacagtcccattcgctattttaaatgttgttcaaggaatgcctatgtctttctttaagggactttcactgatga

SEQ ID NO: 254061 - DNA, 122 bp, Homo sapiens
gaggccatgtgggcctgcagctggcccaggctctggctggtggtgggctggctgggctgccggccccgctggtgctggctcagcggctgttgcaggctctgctgccgcatcagggtgcgggg

SEQ ID NO: 254062 - DNA, 122 bp, Homo sapiens
tcacgtcggtgctgaacagccacgagcccctgtgctcggtgctggccgccagcacgccctcgccccccgaggtggtgtacagcgcccacgcattccaccaacctcatgtcagctccccgcgc

SEQ ID NO: 254063 - DNA, 122 bp, Homo sapiens
cttcctctgcgggccagggctgccgggcgccaccgggacgcgagcgcgcacgcctcggcccggcggccgcgctcctcgcaccgccttctccgcaggtctttattcatcatctcatctccctc

SEQ ID NO: 254064 - DNA, 122 bp, Homo sapiens
caaagaaattagtcaagatcccaacatgcaacttgtataccacactaccttggaattcggcggcacaaacaactattccttgtacaaaacctccctgaaaacgactaaatggaaaagtggat

SEQ ID NO: 254065 - DNA, 122 bp, Homo sapiens
cggcactcttcgtagctggagacaatggtgctgaacttgctgtcccaggtcttcatgctccgataccagctctgaatctgctctctcatctctggattgatgggtctcctggtcaaagttga

SEQ ID NO: 254066 - DNA, 122 bp, Homo sapiens
ccaacttgcaggtgtgacagggaagtgtgcgcagcagtgttaggaaagcttcagaaatggcgtacccctgagtgatgcaacagactctgagccaaggtccccctgagctcagccagacagga

SEQ ID NO: 254067 - DNA, 122 bp, Homo sapiens
taactgtccccaatatattgccggtcaggctgacctccgggtaattagaggaggcaccaacgaggacactggctccccgacactgacatcgtgtggtcataaggagcaagggcagcagagac

SEQ ID NO: 254068 - DNA, 122 bp, Homo sapiens
agcaaaacaattcattccttctcctctgctgccaccgcgtggccattttgcattataacccgcatttctgcaaagtaaccaggaggtaacaacctctttggcaaggctgaggatttaacttg

SEQ ID NO: 254069 - DNA, 122 bp, Homo sapiens
tgaagtgcaggctcttccagcggtcctccgggttgatcatgccggcatgcgacactcgctcgatcagcagctcctcttggggaggcggcagagtcagcacaggccagagaaaccagcccggc

SEQ ID NO: 254070 - DNA, 122 bp, Homo sapiens
gctgctgcgtctggcgtgccacagcagtgccccgaaccctcacagacagacaggggagatcgaattgccttgtgggagagcctcttgccaaagccttaactgtttccaggagcagaagtccc

SEQ ID NO: 254071 - DNA, 122 bp, Homo sapiens
agaagggaagcgccgcgccttttatagcgcgtacggcggcccgcaagagtcaatccgccccgcccaagcagcgccccccagcggtccccggccgttcagctccccgcgcccgcacgtgggcg

SEQ ID NO: 254072 - DNA, 122 bp, Homo sapiens
ctgcagccgcccggccagcaccaccgccaccaccacctccacccggtggccgaaaggcggcggctgcaccgtgcgccctcgcccgccagacccttcctcaaggacctgcacgcccggcccgc

SEQ ID NO: 254073 - DNA, 122 bp, Homo sapiens
ataaaataaaataaaattcaagtttcttaccatggacatcagagcctgatatgaggctcccgacttcctctctgcatcctacctcatcttctgccactgcatttccttgcttgctcacttca

SEQ ID NO: 254074 - DNA, 122 bp, Homo sapiens
ctccctacggtcagcctgaggtcgcggtggtccttccattgccaacgcctgctcctttcacgcccagagcgatttcgcctcaaagggcctcacaacctccgggaaattgagtttctaacggt

SEQ ID NO: 254075 - DNA, 122 bp, Homo sapiens
atacacattccagttatcagccagcctcactaagtcaccaagacatcaggttcaagtgatcgttagtcattaattaagctgccataatgtcacaggtactttctagaaatggcataaatcta

SEQ ID NO: 254076 - DNA, 122 bp, Homo sapiens
ccagagaggcagtgggtcccacagtcaggtgcggggattcaacagaaacagaaggagggacgcttctcactctgaccccggaaagaaggaagaaactgcgtgcgagttcagacaagtccgtt

SEQ ID NO: 254077 - DNA, 122 bp, Homo sapiens
ggttctctcacaggcctcctcttgagaggtgcgctggcctcagggagctctcacctgttgcggttgaactggatggcaaagtcggtcatgacctgcaaggccttgttggtcagctgcaggtc

SEQ ID NO: 254078 - DNA, 122 bp, Homo sapiens
tcagcacacactggctgaatgaatgactttgttaaaagaatgaatgaaagtccaaggaggcggggctgccgcacacttcagtctggcctctgaggagcccagttccctctccaaatgggaaa

SEQ ID NO: 254079 - DNA, 122 bp, Homo sapiens
agaggaggaggcaccaagtgctggggtggggcaggcccacggagccaagtcagaagggcacgtaatccagacagtggctgctgatggggaaggtgtcagagaagtctttcttcaggggtgag

SEQ ID NO: 254080 - DNA, 122 bp, Homo sapiens
tgggtgggagccaggcactgtgggtgccagtgccatcttagatctgggcactctgggtgccggtgcgggtgtcgtcttgggtgggagccgggcactgtgggtgcaggtgccatctcggagct

SEQ ID NO: 254081 - DNA, 122 bp, Homo sapiens
agaaaaagatccagaggccctggtgtcattctttccgttccctatctctggctttttgcccgtatctaaacacaggaggtggactaaccagatgatctctaactggttagtctttcgctatg

SEQ ID NO: 254082 - DNA, 122 bp, Homo sapiens
acaagctggcttgctatagccaggcacagcagcctcacctgtcattcccagggcagagaccgggcccaggcgctttcccccaaggagcccgtagagcagaaacttgtatttcttgccaggct

SEQ ID NO: 254083 - DNA, 122 bp, Homo sapiens
tcacctacgcggccttccacgcccacaagaagtaaggccgggctgcatccacagggctggcgctccagggctgctctgctctgtgccctccccaccctcccggtcaggcacaggggtggccc

SEQ ID NO: 254084 - DNA, 122 bp, Homo sapiens
agctaacataattctgaaaaggtctcctcaggcagtggggcaggaacacaggcaggcaggcgagtggctcttcaagatggctggtgaggggcaaggtcctggggtggctccctccaatcctg

SEQ ID NO: 254085 - DNA, 122 bp, Homo sapiens
ccgcactgcctccctcagaacctcccagggactttgctaaaaccagctgcctgggccctgcgccggaggcgtctggggaagccccagaacctgtgtttcatttgttttccccgattttgccg

SEQ ID NO: 254086 - DNA, 122 bp, Homo sapiens
cttcccgcgaagaggtggatgcgggaggtgtggccgccatagctatcggaggcgtagcctcgggctgaagttgaggggggcgtggttaagtggagatgcctcgccccctgcaatcactaagt

SEQ ID NO: 254087 - DNA, 122 bp, Homo sapiens
acaatcagtgcaggggtggggctcccagagccacacctgctcagctacttacgtcctgcccgtctcccctgaaccctgaggaataataaaccctcacacgtgcccgatatttttctaaatgc

SEQ ID NO: 254088 - DNA, 122 bp, Homo sapiens
tatggtctttccagctccctccaccccatcattgttctcctgggggaacacagggtgagacgctttgatgaactgacatcaccagcaaaaaaaatatctagcaacagctgaggctgatttta

SEQ ID NO: 254089 - DNA, 122 bp, Homo sapiens
atctcaggtacagaggcagtgtggggttcaggttagtcacatcccgagaagactttatgtcgttttcctaaataacgtctggactgaagctgctgtttgtcatgatacaggagagggcagga

SEQ ID NO: 254090 - DNA, 122 bp, Homo sapiens
caaaccacttttgagctttccactaattgggcagaggctgcacacaccatcattgcaaatcgataggggttttgaagccctgggtgtttcctgtttctggcacagcatggcaactgtcccag

SEQ ID NO: 254091 - DNA, 122 bp, Homo sapiens
cggccgcttcctcccccagtcctgggaagacaagcagctactgttctgggatcaagaccccgcggggaggggacctcgcagcccggtccccttcccttcaccccggccgcctcctccggcat

SEQ ID NO: 254092 - DNA, 122 bp, Homo sapiens
ctgggctgctcaggctccagccatctctctcttgccgtggctctgcccggaaaccgtgggcggccctgcccctgtccccagaatgttgcagggctttccagcaggagaggggacaccggaag

SEQ ID NO: 254093 - DNA, 122 bp, Homo sapiens
tagctagccagcttcctcacatcttcaccagcagcggagaggaccatgatgagcgtgtgccgccgtccatcacgaacaagatcctcaagtcagtggtggctcgctttgaagctggagaacta

SEQ ID NO: 254094 - DNA, 122 bp, Homo sapiens
gggacccaacattgatccctccctctctgtctcccttggggaccccagctctgtaagccccgtttagggagccgtttcagagaactttctagctggacgaacgcttgaggaaatcaaagctg

SEQ ID NO: 254095 - DNA, 122 bp, Homo sapiens
cagattttaatgtaagaggtgtggagaagaaaagaagaagaaggggtgggggaaagccatcggctcaagtagtcacactgtcatcctggctgacaaatgactgatgtcagagcatggtaccg

SEQ ID NO: 254096 - DNA, 122 bp, Homo sapiens
ggtggccggggggaggcggaggatggagcgcgaaccagaaagcgcagaggaccctcggcccgcgccgcacccgctgtgattagctccagaggcgcgatccgggagggcggactctttcttaa

SEQ ID NO: 254097 - DNA, 122 bp, Homo sapiens
ccaccaggcgggagaggggacgtctgctcaggcaggcctgctgcgcctaagcacaagatgcgtttgctatttggggagaggcaaaccaggccgggggcagcacgtgcaggagcctggcgagg

SEQ ID NO: 254098 - DNA, 122 bp, Homo sapiens
ctcaagcagtccacccgcctcagcctcccaaagtgctgggattacaggcgtaagccaccgcgcccggctgcccttgacttttattcacagtatttctatttaagagcatgcagttctatagg

SEQ ID NO: 254099 - DNA, 122 bp, Homo sapiens
atgccgcccgcggtggaccctgcggagttcttcgtgctgatggagcgttaccagcactaccgccagaccgtgcgcgccctcaggtgtgcggccggggggaggtggccgcccgcgcgcgctgg

SEQ ID NO: 254100 - DNA, 122 bp, Homo sapiens
cggcggaggccccctgggtcagggtggccacctcgctgtcataggatgtcaggctggatgcggtggagtccagggtgggaggggctgcggccacagccgggggtggcacagggggtaacggg

SEQ ID NO: 254101 - DNA, 122 bp, Homo sapiens
agaccatagctctagtatagcactgggggctccataaaagtggtcaacactggaggagatcggcaaggaagctcaaatcttcgtctttataagctaagagtgatcatatacatgcaaaaact

SEQ ID NO: 254102 - DNA, 122 bp, Homo sapiens
agtttaccttctaccacagcgtccacagtacccggcttggcctcaggcctcgggtcccgacgtcctccccagagcacaaacctactacaggttaggccggaggccgccacagcccagggtct

SEQ ID NO: 254103 - DNA, 122 bp, Homo sapiens
ggctgtagatgacccggtcgggagagggccacggtttgttgggggagcggctcgagattgcgttctagagaggaaccagagagagggtctttaacctaaatataaatgaatgactggattcc

SEQ ID NO: 254104 - DNA, 122 bp, Homo sapiens
ctgcagagagtgtccgaatgccagcgtcgtgagcctggaggcctagggtgggcagcttggcgagagagcacgagggcgaaagtcgctggaagagtcattctcacccttacgggcaggagcgg

SEQ ID NO: 254105 - DNA, 122 bp, Homo sapiens
tactcattcccttctcttactttctctcttctgtctcttttgtccctctgacttcttggacgttagccagagagctaccgctgaggctgtggatattctcaggggctgtttcctcttcctcc

SEQ ID NO: 254106 - DNA, 122 bp, Homo sapiens
ccgcctcccaggttcaagcgattctcctgcctcagcctcctgagtagctgggattacaggcgcacgccaccacgactggctaatttttttgtgtgtttagtagagatggggttttgcaatgt

SEQ ID NO: 254107 - DNA, 122 bp, Homo sapiens
caacatggtgagatccagtctctacaaaaaatacaaaaattagccaggcatggtgatgcacgcctatagtcccacctatttgggagggctaagataggagaattacctaagcctggggaggt

SEQ ID NO: 254108 - DNA, 122 bp, Homo sapiens
ctgaggtatttgcaggagaggaatggattatattcttaaggcgacattaactttcgacagcgtggaagccagtgacaaatacatgctgacctcagagtcatcctgtttctaaacagcgtgag

SEQ ID NO: 254109 - DNA, 122 bp, Homo sapiens
cgcgtcagtaccggggcgaggggacggggagggtcgggggaccagtctccccctttccaccgttccaaagaccagactcctagactaggctaccccgtgggagcgaaccgtatggaaaggtg

SEQ ID NO: 254110 - DNA, 122 bp, Homo sapiens
accctggcgacccttatttgagcccagcatgtgcttgggttcactaggggtaccccaaagcgggcagaagacccatgaggggaaggtgacccacctggggcagaggaaaaaaaaacgcgcca

SEQ ID NO: 254111 - DNA, 122 bp, Homo sapiens
cgcccccgcccgcatgcgcgggcgcacacgaatgcgggcgcacacgaatgcgggcgcacacgaatgcgggcgcacccttgagtcccctccacaaccgcggtttgatcccagcggtccagtcg

SEQ ID NO: 254112 - DNA, 122 bp, Homo sapiens
cgtggcagggcagagatagcacacacatctcttgggtacaggtgtggtgtgtggtgaggccggctggatcctggttgagggctgtgcaggaccctgtcgtccttcccctggcgtggcctggg

SEQ ID NO: 254113 - DNA, 122 bp, Homo sapiens
ggagtagtgtcatcaagcatctcgcctgctggggtctcaggggtaccctcaaggttgggccgcggggctgctccgttgtagtgcttagatttctctcacttgatggcctcttgagtgcagag

SEQ ID NO: 254114 - DNA, 122 bp, Homo sapiens
accttgtggacagcagccacagtcctgcacactgtccccctctgtgcccacaggtctgcccgctgtcttcgtggctgtgtgggtcagtgtcagagctaccctggccaacaccgggtaggtcc

SEQ ID NO: 254115 - DNA, 122 bp, Homo sapiens
cccctggaagtgggggacgatccctgagtcctggggtttccaggctaggggttgggggagcgtttcctgggtcgtggggtttccaggccccgggtgcgggcgcctcgaccccagggccccga

SEQ ID NO: 254116 - DNA, 122 bp, Homo sapiens
gtggatgacaggcgccgtttgcgggccccactacagttgttggggatgctgaaggcacagcgcttgtggtagttcagcccgcagcctgcagggggcgccagagagtaagagacatggcgtct

SEQ ID NO: 254117 - DNA, 122 bp, Homo sapiens
aatcacatccgtgcactgtgatttagaggcatattctctgtagctgagaggggagccctgcgctcactgccatatgtttattagttatgaactgaataaaggaaggcttgacttcctgggtc

SEQ ID NO: 254118 - DNA, 122 bp, Homo sapiens
tcctgtcagatcagtggccgcattagattcttatataggtgtgaactctactgtgaactgcgcttgcaagggatttaggttacattctccttatgagaatctaatgcctgatgatccgtcac

SEQ ID NO: 254119 - DNA, 122 bp, Homo sapiens
gttctgtgacctgctttgccctttccctaagccccttcattgaagagtcatcaagaaacacgaattggcctggcacagtggctcatgcctgtaatcccagcactttgggaggctgaggtggg

SEQ ID NO: 254120 - DNA, 122 bp, Homo sapiens
gcctgccttcccactggctggcagagcacgtcctctcgcgcccggggcctttgtaaagagcgcagcggtggcgcggaggttttcaggctccgcccgctccactcgcgctcccgccccttcct

SEQ ID NO: 254121 - DNA, 122 bp, Homo sapiens
tgccactctcgatcgggccaaatgctcgccattgttcctgcacggctaagtgcctgggttcgtcctaatcgagctgaacactagtcactgggttccacggttctcttccgtgacccacggct

SEQ ID NO: 254122 - DNA, 122 bp, Homo sapiens
gctgggttgtactactccggcaccggataaggggtccaggccgggacgtgcgcagggccgcggccaggtttatctcaccagagccattgggtccaatgatggcggtgaacctctgaaatggt

SEQ ID NO: 254123 - DNA, 122 bp, Homo sapiens
gctttgatttgttaattaaatttttactatctgcatttgatatctcagccaaattgtatccgctgcaggaacaacaagaaagtctctcacttcaaaggggcgcccacttggtgacctgtaat

SEQ ID NO: 254124 - DNA, 122 bp, Homo sapiens
cgcgggcctggttgcggcctccagcaaaactgagaatcaaggaggtgctgccgaaagtatcgctcagcgatctacagagaagtctgcgggagtttgacggcggcggcgcagggtagcgcagt

SEQ ID NO: 254125 - DNA, 122 bp, Homo sapiens
ggcgtgtccaaactccccattccatcatggccaggaactcagcttttaaaatttctctggcgcccccttggccaacaaggagtccattcagtcagctcaggggcttaggatgtcatttttct

SEQ ID NO: 254126 - DNA, 122 bp, Homo sapiens
aggaagtgccaaaaaaggtgaagctgatgcccaaggcccccttggtcttgatctgagacacgatgcgtgtggtcaccgtggagcactccacctctgtgggaggggcagccctcagctcacct

SEQ ID NO: 254127 - DNA, 122 bp, Homo sapiens
cctggcggaacctttcagtgctgcgctcgcgttgccaacccggcgcgcctcacgcagttgcgcccgctgttgggactacttccggcttccccgccccgccccgtccccgggcgtctccattt

SEQ ID NO: 254128 - DNA, 122 bp, Homo sapiens
catggtgaggggagggcgactcggggaccgcacgctgtttctgcccgacccctgcgaggccgagaagaaaggggaaactgcgttcgatttggatgtacaaataatgggtcggcaggcgcccc

SEQ ID NO: 254129 - DNA, 122 bp, Homo sapiens
gttctccatatgtaattattgaatgcaacggattgaatgcttatgcccccctcaaatgcacgtgttgaaatcctaattcccaggctgatggtactaggaggtggggcctttgggaggtgatt

SEQ ID NO: 254130 - DNA, 122 bp, Homo sapiens
cagtgtttggtgacctcctgcgttaggttaacgatctgggtccgggcccaggctggataacgagcccgtgaataatggggagcggattgttaaagccttatcatggtgaagctgagaggcag

SEQ ID NO: 254131 - DNA, 122 bp, Homo sapiens
tgctccgccaccccaccgtgcttcttgcccgacagcgtgaagggtgtctcgaagacaaagcggttgatgttgtggtgcatttcgaaatctgtcttccggtcttcgatttccttttcctcaaa

SEQ ID NO: 254132 - DNA, 122 bp, Homo sapiens
caggtgaaataaataacgatgagtgacacccccgcaggttttccgggactccgtgggatccgcggcttacacggcttgccaggcaccaagggctttccaggatccccaggtactctgtgccg

SEQ ID NO: 254133 - DNA, 122 bp, Homo sapiens
agactctctcaaaaaaaaaaaaaaccccaaaaacaaacaaaaaaagatcctgcagcctgccgcaccccaaagagaggatgcacgggcagccatggccctccaccctgtccctctccctccca

SEQ ID NO: 254134 - DNA, 122 bp, Homo sapiens
atgcgggagtgtctagtgggaggattgtgtgggggaccaagaggaggatgaagtcacaaacgcccctgtgaccttcctaggtgtggtgggcagcgtgatggcccccttcccccaagtatcca

SEQ ID NO: 254135 - DNA, 122 bp, Homo sapiens
gccgctgctcctcgtcgggacgcctcggggacacccaggcctgcttcttcctgggctcggcgtccctggagtcccgtgcccacggccggtggcccccttcgcgtgactcccagcgctggggt

SEQ ID NO: 254136 - DNA, 122 bp, Homo sapiens
cccaaagatacaggtgactctgtctcattatatgcttaggtttgatgaaacagggacagtcgtgtagaaatgtgattggacaacaaaggatatgagctaatggtaatagaaaacctagcaag

SEQ ID NO: 254137 - DNA, 122 bp, Homo sapiens
ctgggtgtccccagtaggtccgtggttctaagagggcagctgcttccaccagcgtctgcacgacaagcagaagcttccttccactgtcttaggctttcagccccactcagggcctggactga

SEQ ID NO: 254138 - DNA, 122 bp, Homo sapiens
ttggcggtacctgcgggcgcccggcccggtccggcctgggcagctgcggcgcgccgcccgcggcaggaagtgcttggcgtcccggcgctccggctcccatggactttctccgacctcgccca

SEQ ID NO: 254139 - DNA, 122 bp, Homo sapiens
cagtgagtcattcaaacaaacaaatgaacaattatttttaaagctgcacatggccagactcggcccctggtaccagcctgagacctctgaactggccttcagctagaagagccagaggcagc

SEQ ID NO: 254140 - DNA, 122 bp, Homo sapiens
ccctgtcgcatttcccagcactgtgatgctttgaaggccgacaccgagacccgccgtgcacgacagccacctcgcagccactcagaccggcggaccacgctcccctgtttccagagagatga

SEQ ID NO: 254141 - DNA, 122 bp, Homo sapiens
gcctgtgtgcggcctggagaagcatcgcttgctgcttgctgaatgcggggcagcccgaatcgatgccgtccattcagcctggttagtgttatgaagtcattagtgctgtctgcggaatgtta

SEQ ID NO: 254142 - DNA, 122 bp, Homo sapiens
gcgtgcggggaagcgctctgcggagtctgcagggccgcgccttgcggctcgcagcctccacggttgtggtctccccgcaggtgagctactcctgtaacaggccatgcagtcagcagggggga

SEQ ID NO: 254143 - DNA, 122 bp, Homo sapiens
gagccggtctcccctccgggctgaagtgctccccgaggccgccctggggtcacagatcgccgcgaccagagccccagaccctccggcaaaggagacagccaatctgtcctctcttctcctcc

SEQ ID NO: 254144 - DNA, 122 bp, Homo sapiens
cccacacttgactggaaactcatctttctaatccagtgtagtatctccagctcctgcccccgaggtcaggactcaggaaaagtttgtcacgtgaaggagggagggatgctgtatggcttact

SEQ ID NO: 254145 - DNA, 122 bp, Homo sapiens
gaggtgtggagggagaggcgcaggcgggaactggggctgcgcgcagtgcttgtgggccagcgtgagttccgggtgggcatgggcttggcgggccccacattcagagctgccagcccgccccg

SEQ ID NO: 254146 - DNA, 122 bp, Homo sapiens
aacaaaacccacacatctgagaccaaatcaaagctcttcagaaaaatcccaagaaaatcccgacatgtgcaacttctgcctggagcggatgagtctggcgctgaacaccaagagggagggtg

SEQ ID NO: 254147 - DNA, 122 bp, Homo sapiens
cactgacgtgtgctgccgggtgtctgcagagtggtcgtcctgggtgggggtggcggggagcgggagggagtatggaaaggagcttctaaggcacagtcaatatttcctgagcagggtgctgg

SEQ ID NO: 254148 - DNA, 122 bp, Homo sapiens
atcggtggtatcaacgcaaactacagcccggcagcttccaggcaaactcacttctcaggacgcctgtcctgctgtcttctcaaagaggtggatgaagccaccaccacccggtttacagatga

SEQ ID NO: 254149 - DNA, 122 bp, Homo sapiens
cagtctcagacaagtactgcctccagaaaagccaattcaagcgttgggaagtggcaggatcgatatgggagggccgaatcacctgatctaaggtaaggctatttttaaacattggatactcc

SEQ ID NO: 254150 - DNA, 122 bp, Homo sapiens
cgcacctatcagcgctccaagtttgtttttgttttggccgactttgcaaaacggattgggcgggatgagaggtggggggcgccgcccaaggagggagagtggcgctcccgccgagggtgcac

SEQ ID NO: 254151 - DNA, 122 bp, Homo sapiens
ttttttttgagacggaatctcgctctgttgtccatggagtctcactctgtgccaatggcgcgatctcggctcactgcaacctctatctcccaggttcaggcgattctcctgcctcagccaac

SEQ ID NO: 254152 - DNA, 122 bp, Homo sapiens
aaattcaaatggtctaatatgaaaaacgccaaccttgcttgaaagaataagaaagaggtgcggtttcgttgggccgttgatgtttggaacaggactggttttgtccccttgctcggaaaggg

SEQ ID NO: 254153 - DNA, 122 bp, Homo sapiens
agaacagagcacacttgctggacagtgccagttccagatgggctgaccggctcttctccccgtgtaggggagccccagcatggactcaagggacagagcacttccagtcgaccccccggctc

SEQ ID NO: 254154 - DNA, 122 bp, Homo sapiens
agctcagggcctctgtgacatcaccaagggcctggcaccaggtgcccagtctcccagttgcgagggcaagcaaacccgtcatgagcaactcccttccccatctctgctcaccatgtggacgc

SEQ ID NO: 254155 - DNA, 122 bp, Homo sapiens
agacccccggagtattgagccggcgagctgcacaggcggaaagaacctttcgagaagagccgctgcagcgtcgggctccggaggcgggggcgggaactggggcgcgctgggagctgtagtcc

SEQ ID NO: 254156 - DNA, 122 bp, Homo sapiens
ggggcccacctctcagttggtcgtctctttccggaaaacttcggcgcctctcgagaaaaacgtcggacgcgctttgctctcttcagaagtctcttccgggacagctgtaccctctagtagtc

SEQ ID NO: 254157 - DNA, 122 bp, Homo sapiens
tcctaaacccttgatttatatccgtctatctatatttatacacacatatctacagacatacgcacatgtatataaactacacaggcacgcattggccaggagaaaacattctgcagccatca

SEQ ID NO: 254158 - DNA, 122 bp, Homo sapiens
cattctttggtgagcctactgtgtgccggtctggaaatatctgcttaaacgatcagtcatcgtccaagacccaattcgcctctcacctacgtcccaggcgggattagcccaacttccctggg

SEQ ID NO: 254159 - DNA, 122 bp, Homo sapiens
gcaaaactttggccatcttacgatttcgtgaaaatattttaataacgtgcatttcacattcgaaaagcagggtgatcattattagtaggatctggggtagcccacaacagggaaagtctcga

SEQ ID NO: 254160 - DNA, 122 bp, Homo sapiens
actttcccggtgaaatctgcttttatttgctccgagcaaacctcgggctctcagcgctcccgcctgatggatgcaaatgtaaatgtgcacttatttaattggatcaggccccaagataaaag

SEQ ID NO: 254161 - DNA, 122 bp, Homo sapiens
aaagtgtcctgtgaggacgtgcctttcctatcaaagtgctgagtgcctggaccctctttccggaggaaacagtcccctctggacctcgttcggcctctctccatcagacaccccaaggttcc

SEQ ID NO: 254162 - DNA, 122 bp, Homo sapiens
ccctccgccgagccaggcctgcctgggacaggggtcgtcaccaccgggagcgcccggccgcgctacctggaccacacagtccgactgcagcagacacgcgcccaggtcctccttcaggcccg

SEQ ID NO: 254163 - DNA, 122 bp, Homo sapiens
cttcatcatggatttcgcaccacccccattccggcctctccattgattcctcgatcatcccgccccctacaccgcccactcccgggcatccccattggctgcgtgcttctccggctctcaat

SEQ ID NO: 254164 - DNA, 122 bp, Homo sapiens
agctgctacatgcctacagtgtgccaagcactggggctctccctgtggcacctcgttacacgctagaaggcaggtgctgttcagaaatttctgatgctgttggtgtcctgcactcaagatgc

SEQ ID NO: 254165 - DNA, 122 bp, Homo sapiens
atcaagcccccatcaccagctcccaccttctccccagatcactggcaagtggttttatatcgcatcggcctttcgaaacgaggagtacaataagtcggttcaggagatccaagcaaccttct

SEQ ID NO: 254166 - DNA, 122 bp, Homo sapiens
cctgtcttgttagtgctcatgctggctttaggaaaatatgctaaacagtgctttcagttccgtttttctttaattaagaaaacttttgactctgctacattccgattcttgccttcatcaat

SEQ ID NO: 254167 - DNA, 122 bp, Homo sapiens
tgccggctcttggcacagcactgccaagctgccgtttctcgggtgctgagccacggcgggcgcggggctgggccctgcacgtgcattgtcctgtttctgttcaaagtttgaaaaacccaaac

SEQ ID NO: 254168 - DNA, 122 bp, Homo sapiens
ttgtcttctctgaccctatttatacattctctgtttttatcagatgattcttccccagaacggactgggagagcgaggtccgggtttccttctatttatttgcatcgatgtcgctccgagtc

SEQ ID NO: 254169 - DNA, 122 bp, Homo sapiens
cctcacttccggcggcgcggggcgcggcgtgggtcgtaccaagtgcgtcctgccctggctcgcactgcgccctacgtgggcccatagcaatggtgtcaccaccgtatctggggtgatgtcta

SEQ ID NO: 254170 - DNA, 122 bp, Homo sapiens
gtcttgctttcctttaggctgtgggtcagagtctacacttcactaaacctgggatggaggcgtggaggacttgcttcgcggcgtttgcgtcctcgcaggcgcctcgcagggcttcctgccct

SEQ ID NO: 254171 - DNA, 122 bp, Homo sapiens
gtgctgtgggcgggaaggccccacctgaccacacctcctgctctgtggcacctgtgtccccgccaccccccagcccgagtaaaatcatttctctagactctgcggctgggccctggaagtca

SEQ ID NO: 254172 - DNA, 122 bp, Homo sapiens
gacagccgcagccacttggggagcaaaatggagacttttgcccgggctgggaactgtggtcgtgaagtttatccccggctgtgccccgcgtggtggagggcgctcctctgggacgccggcag

SEQ ID NO: 254173 - DNA, 122 bp, Homo sapiens
ccagggccttgcggttttcaaagtaaaggccacacagctcgcagcaggcctcggtggctgcggggcggagggggtgctgctgagtcacagcccaaagggggcaggtgcacccagatggccct

SEQ ID NO: 254174 - DNA, 122 bp, Homo sapiens
attcatgttttctgagcatccactctcttggttctccctttttctgacctgtcaaacccacgtgttcagacagtcccgcaggcccttggttatgagggagggaggcgctgactcagtttcca

SEQ ID NO: 254175 - DNA, 122 bp, Homo sapiens
tcccgcgccccgtgggccccactgctggctttccgggaccaggctccgctccgcagctcgcgtcctgaggtgatcctccaggctccccactttgggaccccctcctgcgcctcgggtgccgg

SEQ ID NO: 254176 - DNA, 122 bp, Homo sapiens
ggagtgcagagctgagtggtgggccctgaacatccacttaaaggacaataaccaggcatccgaggaaaacactaaaaatggggtgagagaactgaacacaagaatgatgggtttcacagatt

SEQ ID NO: 254177 - DNA, 122 bp, Homo sapiens
gaggtttcccggcctcagacaggccagaggtgtggagcccgcagacccagggccggctcacgggcatctgtgctattttgatttgatttgatttgagttttaggtcacgtttgcacgcagtt

SEQ ID NO: 254178 - DNA, 122 bp, Homo sapiens
ggtggaggaatgagcagggggcgctcatccggaggcagctgctgcgaggcttgtttaccgcggactttgctcggtcacggtttgcaaagacagcacagtcggctggctccactctgtgtact

SEQ ID NO: 254179 - DNA, 122 bp, Homo sapiens
ccactttgcccctttctgctgtgctccttggcttactgaggcttggcaagcctgcaaaatcgaggctggatctctccttcacttgagccaaaccaaattgatttgtttttagcaatatcttt

SEQ ID NO: 254180 - DNA, 122 bp, Homo sapiens
atacaaaatgttacacagatacaatatgtacactggggaagcagggccaccccagcagcccgtgccctcgcctggtctacagttagccccactgtcctgcctcagctgcctctctgtgtaag

SEQ ID NO: 254181 - DNA, 122 bp, Homo sapiens
cctcgcgccgctgttggagactttggaagacccttctgcctcccatggagggcagactgacgcttacctgactctgaccaggtgaggtccgccacggggcgtagcggagagtggggcgctct

SEQ ID NO: 254182 - DNA, 122 bp, Homo sapiens
aatacagactcgcggaggaagtggcactgtcagttcgcggaggaagtggcactgtcagtccgcggcactcgtgggctcctcaacatggagctacaggaggccttgagaagcagcagcaggaa

SEQ ID NO: 254183 - DNA, 122 bp, Homo sapiens
ccaaggcacacactctcctgtttttaatgtttccctaaacaaatgttttccttcccacctcgggatatttttatttgactctaggtgctggaatagctttagcaatcattctggattgaagt

SEQ ID NO: 254184 - DNA, 122 bp, Homo sapiens
cgtgcccacccttaatatccactcgtttccatgtaatggtatcacagccaatattccaggcgagtggtggttgctcacagagtaagttttaaccaagattgtccaacccgcagcctgcaggc

SEQ ID NO: 254185 - DNA, 122 bp, Homo sapiens
cttacccattggagaccttgtttcctggtctccccagatcctatccccttcctggttctgcgccagagaaacgggtactgggtagaaagctgcagtccatactggctatactgctagtgagc

SEQ ID NO: 254186 - DNA, 122 bp, Homo sapiens
ttccttacttcaccacctgtcaagttttaagtttttcctccaactcacactaacctcctgcgcaaccataaacttcagtgcttgccaaagcccagaaaattctaagtaaaaagcagaaaatg

SEQ ID NO: 254187 - DNA, 122 bp, Homo sapiens
cggggccgcatggccctgccccacaaagcaggcgtgctgggggctgcttggccaggaaagcggacgcttgcagggaccacgctgctgcctctcttctgcccttttccccttagttttacaag

SEQ ID NO: 254188 - DNA, 122 bp, Homo sapiens
tcccggggcgccgctggccagccccaaagggttactttggccttggctgtgggccgaatgcgaaggtggggaggtgggcgggggatgactctgccattcctgggtccgctgtgttaggctga

SEQ ID NO: 254189 - DNA, 122 bp, Homo sapiens
gaaaattctttgtgcaggctcaccttcccctcatctcccccactcttcctgatcctgcagcgtcagatcccagcctgcagtatcagacctcaaaaggagcctctggtgtcttgtgagtagtt

SEQ ID NO: 254190 - DNA, 122 bp, Homo sapiens
cctggctggcctccgggaacgtttgccgcgccaggacagggagggacaaccaggtgtacccgagactgggagattaattcctgctaatcttgggacggaagtgttctgtttgttcaaaggaa

SEQ ID NO: 254191 - DNA, 122 bp, Homo sapiens
tgcaccagatcgaactctccttccagagacgcgtctaggagcagtgccagggggttaaaccggactctcagcccgtgccccgtccgctccgagttgggcttcttcaagttggtccgcttgtt

SEQ ID NO: 254192 - DNA, 122 bp, Homo sapiens
gttctgagagagacgcatacggacttggggccgggggtgactcgccgggaactgagggcccgcgaccctcccgcccaagtggcaccaaagggtggaagcccccaaattaggaaaattccttc

SEQ ID NO: 254193 - DNA, 122 bp, Homo sapiens
tcatcattttgcctttcaacccagagggacagacagtaattttacccatccaccccataacgccaaacacacgtcatcatgcagaatttggtgtcagaactggaagggactctatgatcact

SEQ ID NO: 254194 - DNA, 122 bp, Homo sapiens
acatgctatcatacagctcacctatttaaagtgtacaattcagattttgtaaaccgggcacggtggctcacgcctgtaatcctagcactttggggggccaaggcgggcagatcactcgaggt

SEQ ID NO: 254195 - DNA, 122 bp, Homo sapiens
cgccatctttcgttctcccacaatgcaccgcggctcccagggatccctcagccgcgggagcggcaaactaggggaaagctcagtcccggaactgctagaacgaaccattcgcatatggaggg

SEQ ID NO: 254196 - DNA, 122 bp, Homo sapiens
agggttgctccctgcgcttccgagtggcgactgcagcgggtccggtgcaggtgaggggcgcgcgcctgcccagctttgcagcccccgaacgcggcctcgcacaggtgagggcggtgccgggt

SEQ ID NO: 254197 - DNA, 122 bp, Homo sapiens
ggggagataatcatggccccgtgtgatcctaggggaggcaatcatgacaccgtgtgatcccgggaagagataatcatgacaccgtgtgatcctggtgggagataatcatggccccgtgtgat

SEQ ID NO: 254198 - DNA, 122 bp, Homo sapiens
gccacttcataggtgctagaacaaaagagacttgttccaaatgagatgacgcatgtgaagcgcttacccagtgctcggcaaggggaagcactctctaaacgttagcaaataccatggtagga

SEQ ID NO: 254199 - DNA, 122 bp, Homo sapiens
tcaagggttttcttccctttcgagtaatttttaaagccttgctctgttgtgtcctgttgccggctctggccttcctgtgactgactgtgaagtggcttctccgtacgattgtctctgaaaca

SEQ ID NO: 254200 - DNA, 122 bp, Homo sapiens
ctttcctttcaacagcaaaggtatgctgttcaatgtttaataaccagctcttcatggagacggggaagtcctgatctgcagaacttgccaatttctttggtgtgaatattcctgttataggt

SEQ ID NO: 254201 - DNA, 122 bp, Homo sapiens
gcagcccgcggtgctcagggtgacccgggagcgggtctggctcagggggcagtgggagcccgggctcgtcggagggtgcagcgcggggtcccgccgagccatccagacgcaggccccgcggg

SEQ ID NO: 254202 - DNA, 122 bp, Homo sapiens
actggtggctgtcctgtaagaataattcatcagacagcagttggaatattgataagaaagcggaaatcaaattacaagaaagggaaagagaaaggaagagggagtgggacccagagagctgg

SEQ ID NO: 254203 - DNA, 122 bp, Homo sapiens
ctggtagtacatgctcagtcaatatgtggtatgtgaattattaaataattctgcagatgacgagaaatacgcatttctagctctgcgtttgatgtagtgattgatatccatctgcctcccac

SEQ ID NO: 254204 - DNA, 122 bp, Homo sapiens
acatacacactagcaaatatccttgcagttccaggccatgaatttaagaagtcagatgtacggtagcagtcgttaagtgcaggaggcacaggaaaagctgtgattatggaaatcttaggact

SEQ ID NO: 254205 - DNA, 122 bp, Homo sapiens
tcgaccgggtaatcggtgagcagcaccggcgtcttgtcgaaaagctcacccttgtagctgcgccacttgccggcgggcaaatagacgtcgcgctcctgcttgcctggctccagcaccggggc

SEQ ID NO: 254206 - DNA, 122 bp, Homo sapiens
ggctctgggaagcaagtggccaccaagtccaagacaagctccaggtcagcgggaagatctcgtgggccctgagagttgcatccccccaccctgtcctgtcatttccggggacagctgggggc

SEQ ID NO: 254207 - DNA, 122 bp, Homo sapiens
ccctgaggttcccaaaactggcatatcctcatgttacagatacagaaactaagacacagccgggctaagtaattaatctaagcttacacaaatagccgagacagagccaggacttaaatcca

SEQ ID NO: 254208 - DNA, 122 bp, Homo sapiens
acgagcttgagccagttcctgggcctcctggtgcctcagtcctgcatgtaacacggcgagcgcgtgtgcacacggctctgggagttctcgtgcagcactcagagctcagcgtgggcgagggc

SEQ ID NO: 254209 - DNA, 122 bp, Homo sapiens
cagccccaccggaatacacaaatcgccaagccccgtgcagattcaatctaaaatcgcgcccgacagagatataaggacattcaggagaaagcttttaggcacccgcgaatctctcagtgcgc

SEQ ID NO: 254210 - DNA, 122 bp, Homo sapiens
catgcgcgccccaggggccagcaactgccctcctactgtactgacatatacctgcacgtgcgccccaacacacatgctcgaccgtgatgagcaatactgtgcacggagctgtgcttctttgt

SEQ ID NO: 254211 - DNA, 122 bp, Homo sapiens
ttgagagtcactgaggaaaggatatcttcaggaacgcttccttcaccacttttcctggtacgctagtatttctcaaggagcagtaagagggctagtgagattgtcaccattatcacccacct

SEQ ID NO: 254212 - DNA, 122 bp, Homo sapiens
tataaatatactaactttaatatctgttctgcatccaaagcgaaaactaatttaaccctacgggtcatacacatatggaaaggagaattattcctctcttctaaattgggcaaattagtatt

SEQ ID NO: 254213 - DNA, 122 bp, Homo sapiens
caaacaatctcaacggggaaaatgcccaacaagaaaacgaaggaggggagcaggcccccacgcagaatgaagaagaatcccgccatttgggagggggtgaaggccagaagcctggaggaaat

SEQ ID NO: 254214 - DNA, 122 bp, Homo sapiens
ctctggtacctggcggcagcgcaggctcgggtgttaaagttcgggatgtccggcccgggccgcactgctggagggaagggaggaggcccccaaggaggtcggaggtgcccgccagcctccgt

SEQ ID NO: 254215 - DNA, 122 bp, Homo sapiens
tctcgttgcaggcccgtgcagcactgggcaggggtgacctggcccaggctgaggaggcctcgcggaaggcccgctcgctggtgctcttcagcctgctcttcggggtcttcgtgtctaccagc

SEQ ID NO: 254216 - DNA, 122 bp, Homo sapiens
gcaggagcctgctgcctcccgggcccgcccccggccccgcctccgcctccagcctcggtccgccccaccccggccccgcctccagccaggcctggccccgcccccgcctcgtaccggccccg

SEQ ID NO: 254217 - DNA, 122 bp, Homo sapiens
taaccaagaggcttgtccaaggccacacagctggacagaggcgagaagcagcctgacctccggcgtcagactgacctggacccaggctcacccctgcctctgttcagctgtgtgacctgggg

SEQ ID NO: 254218 - DNA, 122 bp, Homo sapiens
aagatcgcaaacccaggttacggcggctggccacgcccctccaccgccaggccacgcccccgcagcgctcagtcggctccctgcaaagcccagctgcttccggctttttctccgcgccagtc

SEQ ID NO: 254219 - DNA, 122 bp, Homo sapiens
aagaaccctttccgtacccaccgctcctcccacccaagtgaccgggcctgcctttccccacgctggaactttgttccgacagcacaggcgtcgcccctccccacacaacgagcgccgtttca

SEQ ID NO: 254220 - DNA, 122 bp, Homo sapiens
caagggggcggggcctggggggtatccgccttctgacccctgggagatgcctcctttctccgagcagcagccgggggcctggccggcgccgccagccgggccccgcccccccggctcccgcc

SEQ ID NO: 254221 - DNA, 122 bp, Homo sapiens
ggcccggcccgggacctccgtctctggctttggtgagcagtggagggggcagctgctgcccggggaaggagcctgctggggcccgagccagagccctgaggggcactttatgtgcatccctc

SEQ ID NO: 254222 - DNA, 122 bp, Homo sapiens
gcgggccagggtgccggcaggggcgtccggggcgctctgaccggcctcgcccgccccccccgcagacacaagatggtgaaggagacccagtactatgacatcctgggcgtgaagcccagcgc

SEQ ID NO: 254223 - DNA, 122 bp, Homo sapiens
gacttcaggaattgctgtctattcaatattttcgctcaaggactcaggcagagggaaggacgactctcagggtcacagtccacattccctaccaagcgctcagcgatataggattcgttccc

SEQ ID NO: 254224 - DNA, 122 bp, Homo sapiens
ggagttgggtggggtagagagtagggggcggtagtcgggggtggtgggagaaggaggaggcggcgaatcacttataaatggcgccgaagcaggacccgaagcctaaattccaggagggtgag

SEQ ID NO: 254225 - DNA, 122 bp, Homo sapiens
cgtggccgcctcggtcatggtgctggggctcttcgtcccgcccgtgttcgtggtgagctacgccaaggacctgggcgtgcccgacaccaaggccgccttcctgctcaccatcctgggcttca

SEQ ID NO: 254226 - DNA, 122 bp, Homo sapiens
aggctggaagggacagggggtgatggcagcctacctggtgtcccctaccccacctgttctcggagaaccaagttgctacacaggaagttctccaaggtccagtttcctttctcccaccagtt

SEQ ID NO: 254227 - DNA, 122 bp, Homo sapiens
cccggcctggcacaccgtcccggaggcccatcccggccgctcctccaggtggggcttcaccgccccccgccccgcccccgagaccagcttctagaggcgccgcccggtttcccctcgcccct

SEQ ID NO: 254228 - DNA, 122 bp, Homo sapiens
ggaggaagtgggaggtagttcttcttttgagatgtgaatgtcaagtgactctgggcaccccggtgactaagaggtaagtaagtgaggcttgtgggtggagccagcaccttaaatagcaggtc

SEQ ID NO: 254229 - DNA, 122 bp, Homo sapiens
tgtgcatgcgtatgtgtgtgcgtgtccatattaattacatatacataataaatcttgttacgctgccaggatcctattcaattcagatgaacaagtgagcatgtacatctacaagaaagaat

SEQ ID NO: 254230 - DNA, 122 bp, Homo sapiens
actgccacacctggctcatttttcaattttttgtagagatgcgatctcactatgttgacccggcttgtctcaaactcctgggctcaagcaatcctccgaccttagcctcccaatgcactggg

SEQ ID NO: 254231 - DNA, 122 bp, Homo sapiens
attccttctcttggaaccgccccctctctggatcccagaaacacatacctgggttgagttcgtgagtttgtgtgtgtctctgttcccttcatgttatcttgattcttaaaaagaaaggaaaa

SEQ ID NO: 254232 - DNA, 122 bp, Homo sapiens
ccgggcggccctgaggctctaagggggctgcgcagggcccagacattggggttatggcagcggcggggagaggctgggactgcacactcgctttcactcctgccaacctgcgaccacagtgg

SEQ ID NO: 254233 - DNA, 122 bp, Homo sapiens
ctcagcctcctcccccttctggatggagaacccctacgtgaaagtggacaccattgcacccgatgagagcttctcgcggctggatgccggccgtgtcaacaccaaggtgcgcagctttgggc

SEQ ID NO: 254234 - DNA, 122 bp, Homo sapiens
ccctgctctgcgcccaccctaaaatgagaaacacggtaatgaggatgaaatataaacgatcgtcaggttcctcacgatcactcagtgaactcctcagagagtcagtgtacgtttgggctggc

SEQ ID NO: 254235 - DNA, 122 bp, Homo sapiens
ccagccgaggaggtgcgcggtgctgagaggccgtgggagcgaccatagagaacgcgcgggcggagcgagcggccggatgcggtcaccatagagacgggtgactgacaggcagcggaagagga

SEQ ID NO: 254236 - DNA, 122 bp, Homo sapiens
aagcccaccctatatgttctccagggcgctccgagtctgggagcgcaaacttttggtgggcggtggggatcacgatactggttgtcgtgggcgtctggacaccaagttctggtcctagctcc

SEQ ID NO: 254237 - DNA, 122 bp, Homo sapiens
agtccttcagccagggctggacctcaaccctgaggagtcacactgagttccagtgaccaccgtggtggtggccatgccactcatggttgctatggccggaaggcctggggcagcctcctcca

SEQ ID NO: 254238 - DNA, 122 bp, Homo sapiens
cttacccgaggcggctccgccatggtccccgcggtcccgcccggccctggcaaacccgaccgtctccggcggctccgcaggaacctgccctgctgcgcactgactcccctccgctccgcccc

SEQ ID NO: 254239 - DNA, 122 bp, Homo sapiens
agaggttacctagggtgcatgagacaacttctttccaatttagtcttatttctcttatctcgccttttcaaaacttgtacacaaccagtgcaggaaaaacaggcaagatttctatccccctt

SEQ ID NO: 254240 - DNA, 122 bp, Homo sapiens
gtgctgagattacaggcctgagccaccgcgactagcctagttttttctgtttagtagagacggggttttgccatgttgcccaggctagtcgcagactcctgagctcaagcagtctgcccacc

SEQ ID NO: 254241 - DNA, 122 bp, Homo sapiens
ttaagaaatgcacacacagtgtgtaccagggtcccaattcccggggaagcgggctggtgccgcgccatggaccaggccacacagcaggagtgagcggcggccgggcgagcgtcacggcctga

SEQ ID NO: 254242 - DNA, 122 bp, Homo sapiens
ttgtttatttttagggggatgtgtacaagtatgtccgactgtgagtgcgtctgtgatcagcggtgtgtgtgtgtgtaatcagatgtgtgtgtactcagatgtgtgtgtctgtgttcagaggt

SEQ ID NO: 254243 - DNA, 122 bp, Homo sapiens
ccacgtccacctcccagcagtggcggccacaggtaaagcgaggggagcccaggatgcaaacggacacgtcaaatctctcggcaaggtcttgccgattctgtctgatgcgcccacttcggacg

SEQ ID NO: 254244 - DNA, 122 bp, Homo sapiens
tcctgggtgtggctgtgagttacatgctcagatgctcagtacacaacccttagtgtcctgcgctcgagtccagtgaaagccaagttatgtcatccctgaatatagatgtgtttagagcatct

SEQ ID NO: 254245 - DNA, 122 bp, Homo sapiens
acttcattgttcaggacagcctggtccccagtgatggcaacacagggtggtgtcaccaaccggttcatatccacgggtggggccagctgatggcgtcgtcccctccactgctgtcgataaga

SEQ ID NO: 254246 - DNA, 122 bp, Homo sapiens
tgtctctttccctgtctctgtctctctcatcgagagagatgctcagatgctagctggggtcgcctctgggtggtgggtgcacagatgatctttttaagtgtgcttttctctgtgtgcttttc

SEQ ID NO: 254247 - DNA, 122 bp, Homo sapiens
agggagtagggtctgcccccttgttgtatctattttccccttctccgccagggctgtggccggcaaggggctcaggaggtgagtcccttgcccacacctccaaccccgctggcccggtttat

SEQ ID NO: 254248 - DNA, 122 bp, Homo sapiens
ttacagtaagttgattgttacagagttcctgagtcagaaattcttgctcccttttctctccgtgcaaatggtgatgagaaatctatctataatctgatatattataattataatccatctta

SEQ ID NO: 254249 - DNA, 122 bp, Homo sapiens
ggagggtatccgccagttctacatcaacgtggaacgagaggtggggcccagtgcaggaggcgggcctggtagtgagttgttgggtatagcccctgactgatttttgtcccccaacctccagg

SEQ ID NO: 254250 - DNA, 122 bp, Homo sapiens
attacagccggaaaggcctctgggaaggccaccttctctgcccttcactgcggggtggggcgtgtccctgagctactgcactcagaggagctgggcctggccccgggcaggcagcaagcact

SEQ ID NO: 254251 - DNA, 122 bp, Homo sapiens
caagggcaggtgcgctaacatcgatttctgtgcttctaggaattactccttctacgtcctcgacaaccagaacttgcagcaactgtgggactgggaccaccgcaacctgaccatcaaagcag

SEQ ID NO: 254252 - DNA, 122 bp, Homo sapiens
actcagggcggatgtctgaggggtctgcgttgggctttctggtcgcttctctgcgaagcgcgcttgttcctgaggcggtgcctgcctgtgtcgtcgtccctgtttgttcttcttcaaacctc

SEQ ID NO: 254253 - DNA, 122 bp, Homo sapiens
tgaaactgtctagcacatatgaggctctcttgaatgttgtaagtaaatccaatcatcttacggatctcacccactgttttccactccagcctcatgtcccataatccccaccaccaccactt

SEQ ID NO: 254254 - DNA, 122 bp, Homo sapiens
cacggcagtctgccgctcgacagcttctccaagttcgtggcgggtgagcgggactgtccgcggctgctgctcagcgccctggcacaggaggacctggcctccgagatcctggggctgcagga

SEQ ID NO: 254255 - DNA, 122 bp, Homo sapiens
tgcagaagatctgaaatcattagacctgttcaaaaaggaaaaaattaatactgaaggacacggcagtggtattgggggggtctttatgcatgtcatcttctaggccaagcatttctagcagt

SEQ ID NO: 254256 - DNA, 122 bp, Homo sapiens
tccacctggcatgctgccaccaaattaaactcctaaagcatcactgggtcgcacccaagacgccaaactcctcaagggcacttctacagtttgacatccaaagccataaaatatctgcccaa

SEQ ID NO: 254257 - DNA, 122 bp, Homo sapiens
acatttttaaagctacagaaatgtcacaagaatagaacattagataaagttgaagctcatcgtactatctatctatctaaccatctctatatataaacttattttgtattacagtattaatt

SEQ ID NO: 254258 - DNA, 122 bp, Homo sapiens
ttcctctgccttagtcacttccccgtgaggcactccgtgtttgtgtacacggttattccacgtgtcagtcagttcatcgggcgcatccggagtcattgaaaacagtaataggaagtcaaaca

SEQ ID NO: 254259 - DNA, 122 bp, Homo sapiens
tgcagctcgcggcagctgtactcggacacgtctgtggagagaggcgcgcgtgagggtggccgcccgcctggccacccctgccctggaccggcccgtctctctccaccccagccctgcttttg

SEQ ID NO: 254260 - DNA, 122 bp, Homo sapiens
catgtaggtggtagcaaaaagcaatggcaaggtgcagccctcgaggacaatgtgcaggctcgagtgagaagaagagccagccaagggggcaccccggaatatcccacaatttgcaggcagac

SEQ ID NO: 254261 - DNA, 122 bp, Homo sapiens
cgtacgtggagtgagcctgcggtccgccccgcgcgctccgattggctctggggcctggcccgccccttcccgacactgtcattggcctaggcaaagccgtaagggtggggaatcctattggc

SEQ ID NO: 254262 - DNA, 122 bp, Homo sapiens
gccgctgcacccctgggacgcccagagtcaaaaaaacagcaaaacacgggtggaagggtgcgcggcacacggggcccctcgcaccgcggcggggagtgagacgcggcagccggggcgggaga

SEQ ID NO: 254263 - DNA, 122 bp, Homo sapiens
aaccaaacttgcacctgcgccattctcttaaaaacagggcagcggctgtgagcgctgggccggtaagtaagggcagagaaaggggctgtcgtgtgcgtcccagctctccgacccgcacgtcc

SEQ ID NO: 254264 - DNA, 122 bp, Homo sapiens
tatcctgctgttgcccggcacatcgatgtccgtcaaacttgcggcccctgcaggtcctcccgcgtgactgctggcccgggatttcttgacagctgatggacttcatgttccgtcggatacag

SEQ ID NO: 254265 - DNA, 122 bp, Homo sapiens
gagacctcaagagagagaatggcaaagtaaatacgaccatcttattcgaacttaactctgcgtttcaagtagggagataagaaggactgctgttccacttcttttctagatgacaagatggg

SEQ ID NO: 254266 - DNA, 122 bp, Homo sapiens
ctgccatcgttggtaagaggacggaggatggggagaaagcaatgaagggtggagaaggggcgtgtctgaagaaggtcggaggtgacacctattgccctgctcagggattggatgtgtgccat

SEQ ID NO: 254267 - DNA, 122 bp, Homo sapiens
ccagccgctttcgccggcagagcattttccgtggggtccatccggctccaaggcggcctgcgctggccacgtggaaagaaacacgcccactgcctacaggccacgcccttcctcccttcgcg

SEQ ID NO: 254268 - DNA, 122 bp, Homo sapiens
gagctcccgcgccctgcttgagctcgggagagatcgctgcggggcagtccggcccgggagcgagagaaagaacgaaaatgcacagctctctccgagtaaggcgaacagatggagaggaagac

SEQ ID NO: 254269 - DNA, 122 bp, Homo sapiens
gggatgtccccctgcctctaagtcagaccccaagaaagatctttgaggacttgagcttcacgttgaaaatcagtgtggaaaatgggggtgtcagtgcggctgggggagacaaaggggcccaa

SEQ ID NO: 254270 - DNA, 122 bp, Homo sapiens
agatgtgactcagactgcctctgggtggggctggctggcccacagatcctgccaccatgccgcagcatcgtcaggaccctccaccagcataagctgggcagagcttcctggccatctgtcca

SEQ ID NO: 254271 - DNA, 122 bp, Homo sapiens
aggagagatgagcaggggtgggtctgactcaggctgacctggcacagcgaggccacccaccgacagggacctcagcgcgtggccaccacacccccagcacacatgtgttcctgtctgctgcc

SEQ ID NO: 254272 - DNA, 122 bp, Homo sapiens
gacatttatctccctcatgaagaaacggtcccaggaccatctcccacccagcatccattgcggttccctgtgcaagatgagtctctgagtgggaatccagcactctctccctcttcttcccc

SEQ ID NO: 254273 - DNA, 122 bp, Homo sapiens
cgcgggtgtatcgaatttgtcctttcttttctctttttctgtttttagtctgagttttgccgagctccccgcccataagctgttaaccaggaaaagaggggaagcgccggggaaagcaagaa

SEQ ID NO: 254274 - DNA, 122 bp, Homo sapiens
ggattacaggcaagagccaccgcgcctggcctactgtttataattcactctagaaccacgcggtagaaaccacaggtagaatctaccacagggtggaaatctacgtagttgaatgtgcaaag

SEQ ID NO: 254275 - DNA, 122 bp, Homo sapiens
gaggtctttacggctggacgatggtcgcctgcatcccacccgccgtgacgacggcgtctccggcacaattagccgagcgggaacgctcccagctaattaattcagctgcgctgggcccggtg

SEQ ID NO: 254276 - DNA, 122 bp, Homo sapiens
acttgtcacattgaactgaagacaccaagagggccggcttcagggacatgagaacgggcacgatcagaaccttccgcaggagtccaggcaactttcccagggcctgcctctgtgcccactga

SEQ ID NO: 254277 - DNA, 122 bp, Homo sapiens
tctgaagacagtgctctccctgccccgctacccaggggagttcctgcaccccgtggtgtacgcgtgcacggccgtcatgctgctctgcctcctggcctccttcgtcacctacatcgtgcacc

SEQ ID NO: 254278 - DNA, 122 bp, Homo sapiens
cctgctgagcgtgtcggtgccgcggtgggagcgggtggcccggtatgcagtgtgcgctgccggaatcctgctctccatctacgcctaccatgtggagaggcagaaggagcgggaccccgagc

SEQ ID NO: 254279 - DNA, 122 bp, Homo sapiens
tggcagagctggggttttgctgtcaatggacaacatttcaacaaatctaaggaccttaaccggcttcattgcaatttgctacacttcattccataaaataggataactgttccaatcagttg

SEQ ID NO: 254280 - DNA, 122 bp, Homo sapiens
cagacccgcagtgaggtctgacgtcatttcctgccgtaagtatacagtgcctccgggtcgcggtcattttgagcccctgtctggatgacttcttgcggctgttctacccctccccctccccg

SEQ ID NO: 254281 - DNA, 122 bp, Homo sapiens
gtccttgggcctgggggatgagagagatccagttctgagggtttcaagaggtacggtccccgaaaagcccagttctgagaggcctggtttggaaatctcgccctgaagattcctggatccca

SEQ ID NO: 254282 - DNA, 122 bp, Homo sapiens
tgggcgcgctggcggccctggaccgccaagcagggagccccctctccggccgcggcccgccgggctgagagaccacagattaagtgcgccttggttctctcagggatgctattttgctccgg

SEQ ID NO: 254283 - DNA, 122 bp, Homo sapiens
gcccccgctgtgagtgccgcggagcgagcgcggcgcgtttcccgtctggccatttgtacccggacttcactttgtaccagcgtcccttcatggaggtttgggcggctcacccccagcacagg

SEQ ID NO: 254284 - DNA, 122 bp, Homo sapiens
cttgaaatcttaaggttttcttattgaggtagtcttggggtgggcctgtctaccagtctgcgttccagcaaaatgaccagaacatgctattgtaaacacaaagtggacttgattactttaaa

SEQ ID NO: 254285 - DNA, 122 bp, Homo sapiens
tcatcggagctctacagcgtgtccccagtaagtctgctgtcaacacgcagacatggggggcgtcagcacagcccttgacctctgcgaggtcacaatccagggtggctgcaagaccaacagta

SEQ ID NO: 254286 - DNA, 122 bp, Homo sapiens
ccaactttggttttagacctttgtttcgtctcagaattagccatccttctctaattcatgcgaaattctctctttaatccatgtgaaattcagaaaaaacaatacaggtttttgaaatgagt

SEQ ID NO: 254287 - DNA, 122 bp, Homo sapiens
tgtggccccaagtgctgtctgaatctctcctgcgtcttgggccccagcaccaacagccgtcgccctggagccaggcagcagccttaagcttccctgggaggctgactggctgggagcaggga

SEQ ID NO: 254288 - DNA, 122 bp, Homo sapiens
cccacttaccgaaaacactgcattctgaagcccaaaaggtatgggtgtcagtctggccagcgccaccactttcaggccgcttcctccctccactacgcgaataaccgcgctcagcttctcgc

SEQ ID NO: 254289 - DNA, 122 bp, Homo sapiens
atctgtttcttttctgaatcgctccttcctcctgttctttgaggttcctgcaccggcccccgagctttctgggcacaccataaatttcagtccagcggactcactctgactaataaacattg

SEQ ID NO: 254290 - DNA, 122 bp, Homo sapiens
gccacagtatgaaaaacagctctgggtctctctttggtaatttcagttcctgattcaaggcgaactgtggttttaaagataacaatttaaagtgcaggaatgccacagagaaactttccctt

SEQ ID NO: 254291 - DNA, 122 bp, Homo sapiens
ggagaccgtgtttccgccagagccacagggcagctccccgcagaagccagtcgtggtccacggttcccgcgtgccggctcccaatctctaacaggagcaccgccatttacttccacatttcc

SEQ ID NO: 254292 - DNA, 122 bp, Homo sapiens
ccgcctgaagagtgactgcagccactactgcgtggagggctgtcactgcgacgctggctacgtcctcaacggcaagagctgcatcctgccccacagctgcggctgctactccgatggcaaat

SEQ ID NO: 254293 - DNA, 122 bp, Homo sapiens
ggaagccaagtttgaaccagttcaaaactcgggggtggtaacggttttaaccgccgcgctcgtttccccgcgcgcggagccgaggcccgggctggccgctcctagtggtgcccggggagggg

SEQ ID NO: 254294 - DNA, 122 bp, Homo sapiens
ctgtagtaccccaggggacgggccgacgggatggactttgtatcttttggctgatctggccggacatccttgcccaataagcacttacccagttgcccaccctccaaaaaaaggagaaaatc

SEQ ID NO: 254295 - DNA, 122 bp, Homo sapiens
cggcgtggtagacctcgtcgccctcgggccagtactggccgctcatcatggcccggagtacgaaggatgacacgttgaaagcgttgccctcctttaacagctgcttctccttggctccttgg

SEQ ID NO: 254296 - DNA, 122 bp, Homo sapiens
aatggtggatgggggaagcctcagggaccaaggccctgccttcccctagactgagcccctcgtcggcttcatcctcacacccgctgtatctcaaacagcttcacgtcggtgtcgtaccagac

SEQ ID NO: 254297 - DNA, 122 bp, Homo sapiens
ctgctagcccatcaagcttaatgaaagcctcttcaggagctgtctggcaagtgatcacagcgtccaagaagtcatagagatagggtgtgaggaacttataaatcaaatgggcattttctgcc

SEQ ID NO: 254298 - DNA, 122 bp, Homo sapiens
agtgtgcccttttggtctgtatagattaacatacaaatagaccaggagatcaagaaggagcgaggctgagaagagtgatccatcagcctggttgcgttgctgtcagttaccctgctctgggt

SEQ ID NO: 254299 - DNA, 122 bp, Homo sapiens
gtgcaggccctgctttatacacggagggtggcacagtgttcacacgggtctagattggcacgtacataacgctcgcttctctgtgtcgatggctgcattgcatggacgcgctgtaactcgag

SEQ ID NO: 254300 - DNA, 122 bp, Homo sapiens
cctgcccttagcaagcttccggacccctgtctctgcacacttcccctccttccccgaggacgccctgacccaattccggtgccttccaacactttccacaaggtctcctggccactcccacc

SEQ ID NO: 254301 - DNA, 122 bp, Homo sapiens
ccaacgcaagcggagaggacgggagcccggagtcatgcagaagccaggctggcaggggctcgggccgcagtggacacaggggctgccccgtcccgcgtctcccgcagccggattgtgcccga

SEQ ID NO: 254302 - DNA, 122 bp, Homo sapiens
gagcactaggaagtatgactcccactctgtcgggtcacagccactctcagacgtcacctgcgagcactggaaaccccactggcagcccttgacagttcatagagttcatgagatcgaagcaa

SEQ ID NO: 254303 - DNA, 122 bp, Homo sapiens
agagttgtaagcccttaagtgggacaggaattgcttactcggggagctcggtttttcagacgttaagtcttgccgatgctcccagccaaataaagcccttccttctttaactgggtgtctaa

SEQ ID NO: 254304 - DNA, 122 bp, Homo sapiens
ttgtggcccactgtgtgaccccaagcatacctccatgttctctgggctgagtctctgagccgccacagctctgcagagcccaggctgtgggctccagcccctgacttccagcttgacttact

SEQ ID NO: 254305 - DNA, 122 bp, Homo sapiens
taattccagcactttaggagcccgagcccgaggcgggcagatcacttgaggtgaggagttcgagaccagccttgccaacatggtgaaaccccgtctctactaaaaacacaaaaattagccag

SEQ ID NO: 254306 - DNA, 122 bp, Homo sapiens
cgaccgcagctccgtggtagacggtgcactgggacccagcaaggctggccgtccctctggcggggtggtcagagccgcttcctggaaggcggatttcagccgaagtgctaatgtcgccagga

SEQ ID NO: 254307 - DNA, 122 bp, Homo sapiens
caggcgccctccctgagggaatccgcgggtcccgatggcctctggggtgagacactgggacgtgcctgcagagcagcaaacactctctgggcctcacaccctcttcccggctgcacagcggc

SEQ ID NO: 254308 - DNA, 122 bp, Homo sapiens
acacctctcttctttcatccctttgggtctatgcctatttttaatttctcgaggagccaccgtactgggttccacagtggccaccccatttcacattcccaccagtgacgcacaagagttcc

SEQ ID NO: 254309 - DNA, 122 bp, Homo sapiens
tagaagtttcatccagtgaggtctacttaggtctctttggccggaacggtgtcatatggccgctactcactgcaaggaagactagggaacagagcttttgagttgggcccgttagcatccca

SEQ ID NO: 254310 - DNA, 122 bp, Homo sapiens
gtctgcagtgtcctaaaagctgaacgaaaggcttctagcttccttagtggcccagaggtccgagtgtcaggcatcaggagctcctggcagtcacactccagcgtgagcctcctctgtgctag

SEQ ID NO: 254311 - DNA, 122 bp, Homo sapiens
cgatggtcagtctattgggccagtaaatgtccaagtccacaatgatcttctgggtgctgtcgtccatccccacctgctcgatccagggcgtctcaccccaatctgcccagtacatgtacctg

SEQ ID NO: 254312 - DNA, 122 bp, Homo sapiens
cccgcgccctgcgtggccggcgcctggcccttggactctgcatggctgcttggctcatggcggccgccctggcactgcccctgacactgcagcggcagaccttccggctggcgcgctccgat

SEQ ID NO: 254313 - DNA, 122 bp, Homo sapiens
gcaagagttatgagagcctaaaggtcctgtcccccggggttcctgacctgcagtggcaggcggaagggacaagggttggagctgagtactacctactgagctcgaaccggtgactgtggcta

SEQ ID NO: 254314 - DNA, 122 bp, Homo sapiens
accgcaccccgaagtgggtgcaaggctgggggcgtggccgcgcggtgaggcagccaggaccgtgagggatgcgccagccgcctccgcaggcggcgcgcgcagccgcccgcagggcgtgaggc

SEQ ID NO: 254315 - DNA, 122 bp, Homo sapiens
ctccgttatacttagtagcatcaaactcattaagcactctagcacaaccaagctcggaaccgttagccgaccctcccagcctcggcacctgaccttggggaagtggcgctccgacacagcta

SEQ ID NO: 254316 - DNA, 122 bp, Homo sapiens
ctgccaggcacagaacctcaggcgcacccaggcagacccacgatggggtgcactcagccccgtatcattcatgctgcaggtcagcctaggaagggatcgtgcagtttggtaggtcaccttct

SEQ ID NO: 254317 - DNA, 122 bp, Homo sapiens
cctgcaccgcaacgcggcttcccgcccacctcgctgctcccggtgcggggagggggcggccggcgctccccaacctacctccgccgtcttcatggtcaggctgaaatgtcacagtctggtta

SEQ ID NO: 254318 - DNA, 122 bp, Homo sapiens
gcttgctgcacagcctgcgtggtcctcgggaacactaagctcatggtgtacaaaagtgagcgcacctgccctccgtccccagctgccgctcccccagaggccccgtctccggtggggccgtc

SEQ ID NO: 254319 - DNA, 122 bp, Homo sapiens
cccgcccctcagcacagccgccggctccttcccctgcctgcagctgcacgggggccctgacgggctctgcccgctgcaggacaaagccccccgggacctaaaggccagcgggcccaccttcg

SEQ ID NO: 254320 - DNA, 122 bp, Homo sapiens
agtgcggggctggggaggccctggaagggatgggaggagcccctcagagcagctagaagccgtggggttgaaaaactggcaccagggcccaggtggatttgggtaacccccatttcctcagt

SEQ ID NO: 254321 - DNA, 122 bp, Homo sapiens
ggccgccccacagcctggcccacccgacccctgcacgccgccaccagccatgcatgtggtcgggtgcgcctgcctgaggccacaaggccagtctggccaacagcgtccatgaccatattgtt

SEQ ID NO: 254322 - DNA, 122 bp, Homo sapiens
aaactgtcatcctctgtggccagttgaattttccaaacccactatgtgacgtctcacagtcgcagatactatcaccagctacagagcatcttcattgcctgagatctatttacttagcattt

SEQ ID NO: 254323 - DNA, 122 bp, Homo sapiens
gtatgaggatgctgtggggccttccctgcaaggtccttgaatccatagaaatcttcaaatcggaagaggatatttccaattccttttcccatttctaccttccctcctcagccagctttatt

SEQ ID NO: 254324 - DNA, 122 bp, Homo sapiens
ccccccaagcattagcatgacaaagacacttcaatcacccgcagcccatccatctgagagcgacatggaagcgtcaaaaacatctttcttcaaagacttttggaaagaagggaccagaggga

SEQ ID NO: 254325 - DNA, 122 bp, Homo sapiens
agaatcccacccattcctgtggcaaagccgagaccctcatttccagtctttctgggacagcggagccctgggcaggggacaccgtgtgactggctctagctctcctaaaacacgggacgcag

SEQ ID NO: 254326 - DNA, 122 bp, Homo sapiens
ggggtcgcctcggttcccacttatgcggtggtctcggtgcccttgggcactttggagatgcgggctctgcccttaggagcccagcccctggtgggagtgggcgggctgggctgagttgttta

SEQ ID NO: 254327 - DNA, 122 bp, Homo sapiens
cttacagctgagaggatgagggggtgtcatcccccaggttcaccactatcagcgggaacccggctcctctcccagttgagctcactgttgggtgacagggagggcagacctctgaggtcaga

SEQ ID NO: 254328 - DNA, 122 bp, Homo sapiens
ccttggggcagtccctttggaaagtcttcgaagtgcagggtactttaagtaccctgtagacgccttttatttaatccgcacaacaaaagaacggggcaggagtggggggaaattgttacttc

SEQ ID NO: 254329 - DNA, 122 bp, Homo sapiens
ggtggaatgacgggagggagtcccggcagctcctacctcccagcgatggcgtcgctgtgccgcgcccagtccccagcctgccggccggtactcaccgctacccggagttcgctcagacggtg

SEQ ID NO: 254330 - DNA, 122 bp, Homo sapiens
gaaaagactgaaattaaacacacaattggggcacaccagactcagaaaatcccaggctaacgggaaaactgaggtctggagctgagcccagtctgcttcttttatgctgctgcaggccacag

SEQ ID NO: 254331 - DNA, 122 bp, Homo sapiens
cagctgtgattctcagtgtaaaatctttcagtttctaggtaaacaaagaatagtttctttcggggcatctaagggctgattgctgtttcctttgactgtgtattagacagagtgttttgggc

SEQ ID NO: 254332 - DNA, 122 bp, Homo sapiens
gagcccgcgttgcagcctgagatccgtaatatggcggggaggaggaggagaaggcggcggcggaccgagctgcgctctgtcagtaccatttgagccattcgcttcctgacaaggcccgtggc

SEQ ID NO: 254333 - DNA, 122 bp, Homo sapiens
gctccagaaatcgcagactgcctccaggaagaacttgctggagtcacagcagcttctcagcgacttgacagcagtgattcagacttcaacttgggcggaggggcgggggaggagaaagagat

SEQ ID NO: 254334 - DNA, 122 bp, Homo sapiens
cgcgtctgtatgctccctagaggcctgagtaatggggcactgaagaagcaagccggtccccgtgtcgcacgccctgcaagggcgacaagtgaacttttcccatttcactaaggtctttcttt

SEQ ID NO: 254335 - DNA, 122 bp, Homo sapiens
gtctctgggccacgcccaatcacaactgcttccaaatgtggaagtctgattcgctggtgccggctgtcctgtctcaccaaccagcacacccgcatcatcactctaagggacaaaacaaaaga

SEQ ID NO: 254336 - DNA, 122 bp, Homo sapiens
atcacgtgcacctggaagtacgtgggtgggacctaaagcgcccacggaagtgacgtcggtcgccccgagtcgcatgatgtggcaaaatgaaaaaaaaaaagtggggggagaaagagaagact

SEQ ID NO: 254337 - DNA, 122 bp, Homo sapiens
aagaccagaagttttttgcttgctggacttttgccacaggtgccagcagacaacatacttcgtgaaatatttctcctatatggtgtatgtccccctacatttcagttctaggaaatatgtaa

SEQ ID NO: 254338 - DNA, 122 bp, Homo sapiens
ctaaagtgctcactattcaaaatgaaatccttaaacacaacatgagtgtcacctggagctcgtttgcaattctgatttcagggccccactcgagaccaactggatcagcatctctgggggta

SEQ ID NO: 254339 - DNA, 122 bp, Homo sapiens
gctttccctgtaagcacacccacacagctctttaatgcaccaagccaaagcagctttgggcgctggattcctgtagccttcctatgagatggttaagttcacggaatccaaggagccctcct

SEQ ID NO: 254340 - DNA, 122 bp, Homo sapiens
tggttctgtcaccagcgtcacctcacaagactttgaagagaggctccctgggccccaggccgacttccagaagagatgttggtgtcagcaccgtccagggtgtgtgactggttgaccagagg

SEQ ID NO: 254341 - DNA, 122 bp, Homo sapiens
cagctcacgcccccccacacccccacctagccttcccaggttcccaacctccccccgggacgtgcacctgcctttccttgggggctacaaccacaagcccctggagagcacggctgcacaga

SEQ ID NO: 254342 - DNA, 122 bp, Homo sapiens
gcttgggcaagaagcccatagcaggttcttgtgctgctcctgttgcctaagagggtggtgcgcactgcgctggctgggctcacaggggcctccagggacacctctgggcactttagccccag

SEQ ID NO: 254343 - DNA, 122 bp, Homo sapiens
gattagtggaagacatcctatctagctgcaaggtataattgatggattcttccatcctgccggatgagtgtgggtgtgatacagcctacataaagactgttatgatcgctttgattttaaag

SEQ ID NO: 254344 - DNA, 122 bp, Homo sapiens
tcagggatgaaaacctgccagtgtctgcaggcggtgcctcaaagcgctcttttggacacacgttcttggtggtggggagtttgctgcctctaaaccaggcctgaccttttgtcttttgacct

SEQ ID NO: 254345 - DNA, 122 bp, Homo sapiens
tgccactgagccccgtgacggcatcaatcaggtcctcttccacctccgtgcagaagcccacgctgctcagcagctgctccatgagcctcccgtcctccacctgggcgtgcgtgcctgtggca

SEQ ID NO: 254346 - DNA, 122 bp, Homo sapiens
tatcaagtttcttttgggaccacaatggtatgaaactggaaatcaataatgggagaaaaacgggaaagttcacagatacatggaaattaaacaacatgcttctaagcaatcaatgggtaaaa

SEQ ID NO: 254347 - DNA, 122 bp, Homo sapiens
cctggtgtaaaagtcccgcatccttttctttcttgtgagacagagtctcactctgtttgtcgcccaagctggtgtgcagtggctcgatcttggctcactgcaacttccacctcccaggttca

SEQ ID NO: 254348 - DNA, 122 bp, Homo sapiens
gagtgtgtgcgtgttagttaaaccccggctcaggtgtcccaaggttgtgcgctggggctgcggggagagcaaagtgcccggggctgccggatttcggccccgcttccccccagccctccaca

SEQ ID NO: 254349 - DNA, 122 bp, Homo sapiens
acgtctggtgggattggtaaggaatatttgcatttaagtggcttccgtgatcacagtatacggaatagcctctgcaaaggtgggcggggaccctataaaatctatttgctctcagccctacc

SEQ ID NO: 254350 - DNA, 122 bp, Homo sapiens
aaccgccccagtacgccggggccctccccaagccctgctcccaagccgaagccccgcccccgcgtctaaggcccacctccaggccccgcccctgaccccgactccgtgagtcaagcctggcc

SEQ ID NO: 254351 - DNA, 122 bp, Homo sapiens
acagtagaacgacctggaagagaattggcagaatagaaggatggtggatgatcaaaagagcgaagcagtgagttcattcctggacactgcccacatgaaaatgggatttgggaaaggttggc

SEQ ID NO: 254352 - DNA, 122 bp, Homo sapiens
ggaaccggtggactaggggtccccggcggctggccgagggttgcaagcagaggggactatcggttgccagcaagtcccaagcagatgccttctggcagggcagtcacattctacagtgccga

SEQ ID NO: 254353 - DNA, 122 bp, Homo sapiens
ggcgcttctgtgcctgcaccgggcacacagagctcgcaggccccctgccttgggagctctcgattcttgtgagcgtttcaccagatttggatgctgcaaaatcgtggcccttctcaattact

SEQ ID NO: 254354 - DNA, 122 bp, Homo sapiens
gaagtgacaggaatctgagtggctcctcatgagaaccttccgacggaagtgacgtcgttacgacgcgcgacccctgtagactcgtccctccggaaggctcagtgcataagtgggcagtcgtt

SEQ ID NO: 254355 - DNA, 122 bp, Homo sapiens
gcgttacactcagaacagattttcgcgcaacccatgcccaccggcccactcataccaacacgcctcacaccttcagttatccttggtggagtagaatgcaaacgagtttgcaaatactgtag

SEQ ID NO: 254356 - DNA, 122 bp, Homo sapiens
cctttcactgaaagagatgcccagagatgcccgctggttcccggatggcgtggctgtgcccgcccacagccctgacccctggtgcccgaggcctcagagcccccacccaggtgcaggtgtcc

SEQ ID NO: 254357 - DNA, 122 bp, Homo sapiens
ccccacctctccctctcggggccagaagactagttagacatcttggattcccctccagggcgggaaaaccaaagtgagctgggagcgtgcctcccacattccaagcccgggccctctgcgtg

SEQ ID NO: 254358 - DNA, 122 bp, Homo sapiens
caaccattaccctagagtcagcctggtgaaacctcaactgaagggaggtgtcgcccaccccggacaagtcacagagattctgaagtgtggggctatttactccaggctttagctacaagcca

SEQ ID NO: 254359 - DNA, 122 bp, Homo sapiens
ttgcgctgggccgcctggacagggcgccgaggatgcccagaggctggtgcccacaaggggcgtctgtctttcgtttttaaccctctggtttcaaagggcatgttctgaggtctgagttttaa

SEQ ID NO: 254360 - DNA, 122 bp, Homo sapiens
ccttagagaccgaccgacaccaagtagcaataaatgagcctgacatgccccacgccaggccgtcactcagaccccagagttcaacagccgttgactggtgagtcaatggcggccctgtagac

SEQ ID NO: 254361 - DNA, 122 bp, Homo sapiens
tgccatcggtcacccctttctttgattaggatagagaactccctgaccccttgcgcttcccgagtgaggcattgcctcaccttgctttggctcgcacacggtgcgtgcacccactgacctgc

SEQ ID NO: 254362 - DNA, 122 bp, Homo sapiens
ggccaggtgcgggcacctggggtgggaacagtggggggaccagggtgggcccctgggctccgaggccgccccaggcccgcccgcctaccggctctcagagaaagaacagggggccgcgcccg

SEQ ID NO: 254363 - DNA, 122 bp, Homo sapiens
cagcagaggcgggacgaagggaaacagcccctgtggctcccagctggtgctcaggatggacgagggagggtgcagaagaccgggaagggactgggcctggcagcttctctccctttcctggc

SEQ ID NO: 254364 - DNA, 122 bp, Homo sapiens
ccctgtcgggcggtggagggcaaggggagggagagcattaggacaaatacctaatgcacgcggagcttaaaacctaaattacaggttgacaggtgcagcaaaccaccatggcacatgtatac

SEQ ID NO: 254365 - DNA, 122 bp, Homo sapiens
acttgggtggtcagggctgaggctgcccccaatttgcctcattgctgatgcatgcgagtgcgacattcccagcgataatgttgttcctaatcaatctgcccttatttacatttgtaagcatt

SEQ ID NO: 254366 - DNA, 122 bp, Homo sapiens
gtgaggcgaggaaggaggggtgttaggccaaattctattttcattggctgtcactgctgccggcctttgtaagggggcgctctgattggtcgataaggtgggggcgtcgagggtctttgagt

SEQ ID NO: 254367 - DNA, 122 bp, Homo sapiens
ttcaaagctcagggcctatctgtctgggctcctcccagcgccacccccagccctgcctggcgagcctggagactccagcagcaaggcttcatgctcccagacgctgcaggtccccctactcc

SEQ ID NO: 254368 - DNA, 122 bp, Homo sapiens
tgcctgggcggcactccaggctccacagctccccacctgtgagctcctgggcaagtcactcggtccggatttccagaggtagtttgggggaactgacagtacacacaccacagggcagtagt

SEQ ID NO: 254369 - DNA, 122 bp, Homo sapiens
cgcggccatcgtgccgtttctgctgctggacaagcgggatgtggtcagctgcttccgggacgagatggcgggtgagggcttctttcctgaccaggcccgcgcggagaacctggccgcgcagc

SEQ ID NO: 254370 - DNA, 122 bp, Homo sapiens
cacgagcgagggagcgtgcgcaataccaagaacttttcagcctccagcggggtggggcttcgattcggctccgcccacccctccaggttgtcatagtgatgccgtatccactgagactccgg

SEQ ID NO: 254371 - DNA, 122 bp, Homo sapiens
tggtcctgttcacctgagcgagagggcgtctgctggctcctttccctgacaaggccaactcggagggcaagctgggagcctggggtggggctggcggggtgaaggggctcagagggacgcct

SEQ ID NO: 254372 - DNA, 122 bp, Homo sapiens
aagtgggcaaggggctctcggaaggacagttggggaacggcgcccagcgtatttagcgaacggacaagcagcaaggaaaaacaagggagcaacaaccgccttcggacattccgaccggttct

SEQ ID NO: 254373 - DNA, 122 bp, Homo sapiens
cacgttccccgacccctttcctggagtccagtgcctttctgcctcttcctccccttcccacggccccgcccattttacagattaggaacctgagctggaaaaggccaggctgtccggccagt

SEQ ID NO: 254374 - DNA, 122 bp, Homo sapiens
tcttatctcccaggagcaagtatcctgtgtgcgcagcgcatgaatgtgtctgggcatctccgcgtatatttatatagtgtgtgatgcgaaaagcaggaccagcaggggaggaagagggggtg

SEQ ID NO: 254375 - DNA, 122 bp, Homo sapiens
gcctgggcaacagggagatagtctgtctcaaaataaaataactttagggagacgacaacccgatttgaaggaagatgtgggacccacatagaacagatgtattcactcaattagtccctact

SEQ ID NO: 254376 - DNA, 122 bp, Homo sapiens
agctcttttggccagaaagaagccatcagcagagcatcttgggtgttcagagtggaggcgcgtgacaacatctgctccagcggcctttttctaacttgcacagaggcaagccctgagagccc

SEQ ID NO: 254377 - DNA, 122 bp, Homo sapiens
gagcccggagccacggccgccggcaggacaggcagccaggcactaatccgggcccggccccgcctccggccatgtcccagagccccaccactgacctctggcccacgaggacctcctgctgt

SEQ ID NO: 254378 - DNA, 122 bp, Homo sapiens
tacagcaattatgaaccatatctactgtttcaggtatggatgttatctctgggtctcactcgccaggctatggcaaaaggccccacaaagctttcatctcccaagcatgtagaaaatccctg

SEQ ID NO: 254379 - DNA, 122 bp, Homo sapiens
cctctccgctcgctgctcccggagtagttggtgccagtgaagtgagggcggcgatgagagcgaaagttgcgctcggctcgtcgctgggggcttgaagcggctccgcgctctgcccgtttggg

SEQ ID NO: 254380 - DNA, 122 bp, Homo sapiens
gaaagggagataaagtcaagcaactacccaagaatcagctttctgggaattccataaatacggaacaaaaagtggtatttcttttagatgggagaagaaaaacaggataagaactatcactt

SEQ ID NO: 254381 - DNA, 122 bp, Homo sapiens
gggactcattccctgccactatgaactgggggtggggatggagtggggataggaacatcccgaaaggggcctcttgtctgaagtgattgtgttgatggcccaagttcgtggcctccctacgt

SEQ ID NO: 254382 - DNA, 122 bp, Homo sapiens
tcgtgcggagcgcacagccgcctcagcccgacccgcagagcctccgggcagcgggcgcggcgcccgcacctgccccgcgccttgctgcagccccgctagcggcttcacccacctggcgccct

SEQ ID NO: 254383 - DNA, 122 bp, Homo sapiens
ccgggcagcctctcatcctggttgagtgcagtttcatctccttagaggctccaaggcacacgccggccagccccagcaatgggttctttcgagcgacaagagctgtaaccagtcacggaaca

SEQ ID NO: 254384 - DNA, 122 bp, Homo sapiens
cagcgccttacaggacctcgctccaggctcttctggctccaatcaaaagcagggctctttcggacttcgcttacgtttaataaagaaaaccggttggccccttcggctccacctggctcaac

SEQ ID NO: 254385 - DNA, 122 bp, Homo sapiens
gccaaccccggctggatggacgggcaccgagacgggaggcggttacgtccaaacggtccccgcgcgcggggatctgaagagtcttcttcaggaggggggccggctcttcaccccttccctcc

SEQ ID NO: 254386 - DNA, 122 bp, Homo sapiens
cgaggctccagaaatctaactccacctacctctgggctggaccagaacacttggatgaaacggccacgtcaccacatcttcacaaagtcaggggacacatttagcaggatcttttctgattg

SEQ ID NO: 254387 - DNA, 122 bp, Homo sapiens
acccctctcccccagcaaagggatctcctgggagattcttgggggaggggttgcagaaatcgacagaggtcttgagtgatggataccaacttagaatgtggtctacttattttattgtgcac

SEQ ID NO: 254388 - DNA, 122 bp, Homo sapiens
gtcttccatgatttggaggtggtgggaaaaccgaggctgctccaaactcgtggagaattccgcctgcaggatgacacgaatgcaccttctctttgctaccaacagatcttttttgagcatca

SEQ ID NO: 254389 - DNA, 122 bp, Homo sapiens
acagaagctgcacagagggccccgtagatgaagggcagactccccatctgaataaagacccgcatggccattcagagcctcagagaggactcagatgagaacagcaccaccgtacgtggtca

SEQ ID NO: 254390 - DNA, 122 bp, Homo sapiens
tgagccgccccgggtggggggtggggccgggcggcgagggctggggacccgggctgccggcgcgctgcgaacttcccaactcgggggcgaggcgcgccggcccgcggggggagggagtcccg

SEQ ID NO: 254391 - DNA, 122 bp, Homo sapiens
ctgggcctcgaggggcggggtcagggggcggaggctcgggcggctatataaggcccgcgccggctcaacttcggacttggtgttatttatttgggaagcgcccggacggcggagcttggcgg

SEQ ID NO: 254392 - DNA, 122 bp, Homo sapiens
atattctaaaatgccctgcaggtaccagaaacgttttatatcttgatggtaggggttacacggggtatacatacgttaaactttatcaagctgtacagttaaggtttgtgtactttactgta

SEQ ID NO: 254393 - DNA, 122 bp, Homo sapiens
agattggaggttcgcgccccctcacccgacacctcccgtccacctcatctttctttttttcgaaaacaggaaagggaagaaaactgaaacgggcctcttggtctgcagttttagcggagtcg

SEQ ID NO: 254394 - DNA, 122 bp, Homo sapiens
tcacttctgttgaacatggccacttttgttttgaataagaaaacctaatcatctcaattacgataataacctcgaagttgcattactgacgagggtgtcatgaaagtgagtcaatagtggaa

SEQ ID NO: 254395 - DNA, 122 bp, Homo sapiens
ttatttaatatttatttaaataaatttatttatttatttatttagacacctcttttttcccgtctaagttataaactaattaagagatggacaaagaataaggtaaaggaaggtcaaaatat

SEQ ID NO: 254396 - DNA, 122 bp, Homo sapiens
ccattctagaacttctttcctagtagaaggctcctgaatccccacatcccagcggcttctcggtttgatggtgaaagtccttttctcctcctttctgatgcctctgttcacacatgtggcgt

SEQ ID NO: 254397 - DNA, 122 bp, Homo sapiens
ttggttggccagtcccaccactgcagtgaccacagttgtgttgggctcacaccagtgaaccgaagctctggattctgagagtctgaggattccgtgaagatctcagacttgggctcagagca

SEQ ID NO: 254398 - DNA, 122 bp, Homo sapiens
ctaatgatagtgtactgacaacccgctaatagtcttgggctccaagaagcccggcaaaaccggctggggcggcaggaggtccggctttggtgttctttcccaccgggagaggttggagccac

SEQ ID NO: 254399 - DNA, 122 bp, Homo sapiens
gacggctcggggcgctaatggaaacacatggctgccggctgcgggcttgtcagcttcccccggcgctgccattcccgtctgataatccggcctgccataaaattagactagcaaatacctcc

SEQ ID NO: 254400 - DNA, 122 bp, Homo sapiens
tggggctgcagctggggcaggggctggtgccggggtgggagtcggaatcggggctgaagccgggctgggtgcaggagtcggagttggggcaggggctggggactgaaggggccggggctgcg

SEQ ID NO: 254401 - DNA, 122 bp, Homo sapiens
gcccacccaaaatatctggataatggttaccccgtcctcagtgcgttggacttgcatagacgcgagttcggtctcgggggccaccacgataatttgggggtctggggaaaccatctcctgga

SEQ ID NO: 254402 - DNA, 122 bp, Homo sapiens
gggatagggcagcttggaggtggctgatgccggatgcagtgcttcagactgaaaggtggtcgtttgctgtgaattgccctctagattgtgtagactaggatgatgggatgtttcttgagctt

SEQ ID NO: 254403 - DNA, 122 bp, Homo sapiens
agatgcttcctgagccccaagatccaatcatgcttgatgtcatctcatacatttccctatcgagccttttggctgtaagtgagccccaactattatgctcctaatactaaacaaaatactac

SEQ ID NO: 254404 - DNA, 122 bp, Homo sapiens
cagctgttggaagccaactcttccctctgaaaacatccaggcagaattaacactggaatgcggatctgcaactgccactcagagtgtcaggaagcacaggagcgtaaatatttagagaaagc

SEQ ID NO: 254405 - DNA, 122 bp, Homo sapiens
gcagccttctgttgtcttctcagacatttccactgtctctttggtggggtttctggaatccgggcctccttctaaaccaataatccacatctgacatgctgttgtgtcagttgctcctgttc

SEQ ID NO: 254406 - DNA, 122 bp, Homo sapiens
caatctcccagactcaatcaatcctccttcttcagctccctaagtagctgggactataggcgtgtgtcactcaagtagcactaaggcctgactaattttttttttgagacagggtcttacta

SEQ ID NO: 254407 - DNA, 122 bp, Homo sapiens
cacaccaccacgctcattcctttacgtattgcccatggctgctttcccacgttagaacaacggggttaagtggttgccacacagtctggtctgcaaagactgaagtatttactctctggccc

SEQ ID NO: 254408 - DNA, 122 bp, Homo sapiens
gaaatgttctgtattttttctttttagtggctagtggtggattggagagacccctttttgcgtgtatgaatttagtgtttcggaaacattgtatacaaagagctcaccattgtatcagggaa

SEQ ID NO: 254409 - DNA, 122 bp, Homo sapiens
gcagtcgaagagcccaggtggctgtagatctctgctggcaggctccttgcagattctccacgtgtgcaggtgctgtctttcaggtaaaggagggatgtaagtcagaaagaagtaaagtgatt

SEQ ID NO: 254410 - DNA, 122 bp, Homo sapiens
atcctgcaacacgagcatggcatggccccgcaggtcttcacccaggccctggagtgcatgcgcaggtgagtgccgcagccaggccgcgcgccccgcctgccccggcccgtgtaaactgcaga

SEQ ID NO: 254411 - DNA, 122 bp, Homo sapiens
gcctgcgttttggtctggtctggccggacggtgtcagctcaaatgttccttttttgcttccgtcctggggtctcaggttaggtcgggtcagcgcctgggggaggcacctcccccgcccccac

SEQ ID NO: 254412 - DNA, 122 bp, Homo sapiens
gagtaacccagacagccaaaggggtaaaagtaggatttccggcatggggaagccaaggaacggttcaggggtgggggaagcagacatctggaggaaaaatgtcctccacccgccaacggtaa

SEQ ID NO: 254413 - DNA, 122 bp, Homo sapiens
tcgtgacccggagctcgcggtgcttggggggcacatagccgtccctcagcgaaatgagcacgggttcggcgtcctggccggatagccattcgtccgcttctagggccggctccgggcctggc

SEQ ID NO: 254414 - DNA, 122 bp, Homo sapiens
gtcctggggctgctgggaggggtacagccacaagagggatgccaagccagggcaatatgacgcccccacagcccaccccactggtctccagagaggcccagagatgtccagctgggcaggca

SEQ ID NO: 254415 - DNA, 122 bp, Homo sapiens
tccagaacagataatcatgccatatttgttctgtttttatttgaaagaattctcacatctcgaacaggatattttgttttgctttagttttggcatctgtacaactggcacggaatcatttt

SEQ ID NO: 254416 - DNA, 122 bp, Homo sapiens
ctgggagatatctcagatccgacctcgccttcctggagcggaagtgcctccgagtgcccacggttcgtggactccacttcccagaattcctaagcggaagcgtctcagagttctctcactcc

SEQ ID NO: 254417 - DNA, 122 bp, Homo sapiens
cctcccaggcagcaacgctgggaagagtaggccccggttccccataccccgccccggtaccgtgtgtatccacagcaaaacatggctcttcccatcgacaactgggcatagctgttggtttt

SEQ ID NO: 254418 - DNA, 122 bp, Homo sapiens
aacgaactcatccgttctttctagtcatttgctgagcacctaccaggagccataaatggccgtgtgcaaaatcagcccctctactggctcccagtcttgctaaggcgactgacacgtggaca

SEQ ID NO: 254419 - DNA, 122 bp, Homo sapiens
gaatgagttaccccacaagaggaaagaaccactcagtgtttggtccgcccaacaccctttcgtcttctggaaacagcagcattccccttggggtactgtgcctggcccattcctacaggtgg

SEQ ID NO: 254420 - DNA, 122 bp, Homo sapiens
ggaacagtgagcaggatcagtccattgcttttgcctacctgctgagcgctgattggtccccgtttaggaaacggaaaaaggggcgtgcacgcgggcgcggctgcgtgagaggcgcgcggcgg

SEQ ID NO: 254421 - DNA, 122 bp, Homo sapiens
aacaccagagctgtggcgcggagtatggccaggctcaccttgtcgtctgcctttatggagcgcagccgcatggtaagctggaagcgcaggaagttgttggtgccgatggactgtagctccag

SEQ ID NO: 254422 - DNA, 122 bp, Homo sapiens
aactccccactctggccacgcggtgctgtggggctgctgccaggggcgttgtggttttcccgttgctgtttggctagagtagggcaggagtcatggagtggttttctgttgttaggtcaccc

SEQ ID NO: 254423 - DNA, 122 bp, Homo sapiens
tgcctcctggcagggcagggctcgggacctgtagcccgccatgcctgagcctccccaccccgcagccatgggctcctgtgcggaccaagcctccccgaccagcgccgctcccggctccacgc

SEQ ID NO: 254424 - DNA, 122 bp, Homo sapiens
gtctttcgccaatggggaggggactgggacacgggcgcttcttctctccagcccttggttcgccggagcaggatgctggtctcaacactagggctatgtcggcttctcaccgaaccgagatt

SEQ ID NO: 254425 - DNA, 122 bp, Homo sapiens
tcaggccgcgtctcagacgctgcggtcggagcacaggggctcgctcggtccggaaaaactcgcaaacccgaccttgcgcggccagcgatcgctcctccagacccgctccgcgcgctccagcc

SEQ ID NO: 254426 - DNA, 122 bp, Homo sapiens
aggtctcccggccagccccagtccacaccccccaggaccccgccccccagccacccctcccggccccttcggaacgccccacccccggcccgctcctaaggttcttgcctgcttggctcccg

SEQ ID NO: 254427 - DNA, 122 bp, Homo sapiens
tcgcagttgtaagaccgcagcgcaggatcgaaaccccgacccggctgcagagtccccctgcggtttggccgggcctcaaaggcctgaaactcctgacccatcgcccagccagaacgagggga

SEQ ID NO: 254428 - DNA, 122 bp, Homo sapiens
tcacaggcggaaagccgcggggacaatggcgagagcgaccgccctagccccgggcggacccgcaaccctcacactcgcgcgcccccgcgttagtgctcgaactggtctccgcctttccgccc

SEQ ID NO: 254429 - DNA, 122 bp, Homo sapiens
cccgatgctggttctgcggccggagggagctggggctggggctggtgctggtgcggtgcccggcggtattgctcagaggaagatgctacagtctagacgctgggcgggttccggctgcaccc

SEQ ID NO: 254430 - DNA, 122 bp, Homo sapiens
ggggcccacacgccatggagcccgactcccttctggaccaagacgactcctacggtaagacggtgccagcaaagtgcagagttgggggtttcagcctctctgctcaacagacttttctctgc

SEQ ID NO: 254431 - DNA, 122 bp, Homo sapiens
aggatgggataagaacgatgcgggttgggagagttaaaagggtcgcgcaaacggtccccgcgggaatgcgaagcggattctcgagttcttgagcctagagcaatgcttggggagcgacacga

SEQ ID NO: 254432 - DNA, 122 bp, Homo sapiens
tttacaaacgagccagaggaccctgggactgtggcacacgccgcttgcatcaaggttttgcgccaggagagggaagctgggcgggtgctccgagggaggagtccagagctgttttctgcagt

SEQ ID NO: 254433 - DNA, 122 bp, Homo sapiens
tgttcctggccactctgcttcttagggtggagttagaggactccccgccctccttgcctgcgaaggaggaggcgtggccacacagataaagctggtctgaaaagagcatggctttatttgtt

SEQ ID NO: 254434 - DNA, 122 bp, Homo sapiens
tctgacgtcttccctgagcccatgtctttcgggtccccgttgcagcatgcatccgagcttcgctcctttctgtggttgaatcacactccactgtgcggatgggccggttttgtttctccatc

SEQ ID NO: 254435 - DNA, 122 bp, Homo sapiens
agagattaagtcagttgctccaagtcacatatacctagcattagaaccaagacagtacaccgggtgagaggtaggtaaggatagataaaggtaaataaagataagggagccaggcaggacct

SEQ ID NO: 254436 - DNA, 122 bp, Homo sapiens
cacccccgggcaggtgccccgcgcgagctcagcgccttccccgcggatccccggcccctgcgggacccaggcccaggacaaaagaaatgaatttgctctgtacctgatcctgtccttctcgg

SEQ ID NO: 254437 - DNA, 122 bp, Homo sapiens
tcccaccctcatctagctctgttcaggagagctgcaaacacagagcccaccacaagcctccggggcgggtcaagaggagaccgaagtcaggccctgaagccggtcctgctctgagctgacag

SEQ ID NO: 254438 - DNA, 122 bp, Homo sapiens
gtcctctgccctctggatcctgtgaggcagctactgtgattgtcctggccaacgccccaccggagagtctcccccaaccccctgagctcagtacatggcatatgccctcttttggagtggtc

SEQ ID NO: 254439 - DNA, 122 bp, Homo sapiens
tggagctccggccagatcccgggctgccgcctctgctgccttccctgagcgggagcggagcgcagagaaaagttcaagccttgcccacccgggctgcagctgcttgttaaccctcagagcgc

SEQ ID NO: 254440 - DNA, 122 bp, Homo sapiens
atgttctattcccaactcaatacagacgtattaatagttttcacccggcattgggatgaacggatgcttcatccctggttgccaagcgcacggccccccgtgagccctgtgccggaggcgag

SEQ ID NO: 254441 - DNA, 122 bp, Homo sapiens
gtcactcaggaagagggccctagactctggagatgtggaaactgatgcacagagggaggccggagtccaggttgcttcccagcaggaacccaggctgtgggtcctcatcccgccccacactg

SEQ ID NO: 254442 - DNA, 122 bp, Homo sapiens
actccagagttggaaggctttctcaatggcatggtccacatctgctcttggcaaatctggcgtgtaattttcaatccttagaatgaaacaaaatagagacacattggacatgacttcttacc

SEQ ID NO: 254443 - DNA, 122 bp, Homo sapiens
ttggaagccttcccacagcttccccaagagcgaagaggctatagtcatgtccacgtcccccgctgaattctctgcagggagaggacttgggcccagatgagccagaccagactccagacaga

SEQ ID NO: 254444 - DNA, 122 bp, Homo sapiens
aagaagaagaagaagaagaagaggcaggaagagcatttcaggcagaggaaccacagcatgcgcagagcccaggatatcgacgatctacaaaggtcccctatctgcaaagcttcccctacagg

SEQ ID NO: 254445 - DNA, 122 bp, Homo sapiens
cctgcagcagcatccaggcacatacaggccagttggctgtcatttttacctggcagggagcggggcaccaggaatgtctggagcagatagtagcttcctgggacacgacaggtggaatcagc

SEQ ID NO: 254446 - DNA, 122 bp, Homo sapiens
ccgcgcagccgcgatgctgaacatgacgggctccgggtacgtgtggctggtcggcgagcgcgagatctcggggaacgccctgcgctacgccccagacggtgagtgctgggccttggcggggt

SEQ ID NO: 254447 - DNA, 122 bp, Homo sapiens
agagttgcagctgaccacacctcaagtactgcttggtacttttatttgatgtgctagttccggaactgctctaaccttctttggtcttctctccacactggagagtgcaatacagatattca

SEQ ID NO: 254448 - DNA, 122 bp, Homo sapiens
ggcagctggaatgtgccagggcagcggaggccctgcaagagccagagaaccagtccaggtcgaagaagggcgcggggggcctcactgactagaggatgagagtggtccctgactggctcttg

SEQ ID NO: 254449 - DNA, 122 bp, Homo sapiens
gccggctgaagaagtgcctgcaggcggggatgaaccaggacggtgaggcgggggctggcccggggggaggtgacaagaaatgggcagcgggactggcgtgtcgtcctgacccttcctgcctc

SEQ ID NO: 254450 - DNA, 122 bp, Homo sapiens
atggcaagaggtgcacacgcaacaaaatggacaattttttaaaaaatttgtggcatcaagcgtacctatatatctgatttgctataggatgggataccttatgcatgagagttggcccttac

SEQ ID NO: 254451 - DNA, 122 bp, Homo sapiens
gaagccacagggcccggccggctccatggcaactggcaccgcgatctacctgcgaacgcacgccggtggtagttcgaaacttccggggcttcttcgattacttccggttcgcagcgcggccg

SEQ ID NO: 254452 - DNA, 122 bp, Homo sapiens
agagactgcataaccaagctggggaggtgggatctctgacaccaggttctcagggctagacggcagctgtggaatcttctggttttgctgcccagaactttcagatcctcctagggactcaa

SEQ ID NO: 254453 - DNA, 122 bp, Homo sapiens
ttacacagccccctccatccaggaccgtgatgagtagttcctcgcagggctccctggaaacgtgggtagtagatgaacaggcctccaagcagctgctgacataatcattgtgggggcactcc

SEQ ID NO: 254454 - DNA, 122 bp, Homo sapiens
tcgacgccggacacggcccgcccctgcttcctactctcacccccaggcctggctgggggccggcagcccccacgcccacggttggtttgttcagggagagaaaacggctttcccagctctac

SEQ ID NO: 254455 - DNA, 122 bp, Homo sapiens
ctcggatggaaatgcagaaatcacgcgttttctgcatagctcacatggggagctgtagaccggagctgttcctattcggccatcttggctcctccccctcattcttataatttttataacct

SEQ ID NO: 254456 - DNA, 122 bp, Homo sapiens
aacttcacccagcagaccccagggagccactggcatgagtgtaggagcagagtgacaatccgatctgagttctggaaaagtcatgctggagacagtaaagctggattggagagtcactaacc

SEQ ID NO: 254457 - DNA, 122 bp, Homo sapiens
ccgggacgcggcgtccccggggatggcccgggcagggacggcggggggatccccggtgcgcgccccaactcgcccccaactcgcttccaaggcggcggtggcgcccgtgcacttggtcgcgg

SEQ ID NO: 254458 - DNA, 122 bp, Homo sapiens
tctccttgagcccaaatcaaatggaataaaaataagagatagttattttaaaatactgtccgagttagccctgttaaccctcctgagggaggacatacccccaaaaaagggaggagtcctct

SEQ ID NO: 254459 - DNA, 122 bp, Homo sapiens
tgcctgtgggaactgtaagtagttcttcagggttacacagcatgtaaaggactaagaaaacgtgaggctggcaaggtagtattcctccctgtaatctatactataccatatgtaggcagtat

SEQ ID NO: 254460 - DNA, 122 bp, Homo sapiens
tcatctgccagaaaggccacctgcgccagcacctcctgagaccggccttcaaagacacgacgcatgccgctctgccgtccggagcacttaatgcctagagccagcagggtcccagtggccgc

SEQ ID NO: 254461 - DNA, 122 bp, Homo sapiens
gacttcacagatacgtcgtctgatgcaatacagatactttttagtatcatatggggttagcgtctagaaaaagtgaagggtatgaaataatgaagaatgaaattccagtgagactctatttc

SEQ ID NO: 254462 - DNA, 122 bp, Homo sapiens
gacacctcggcatttgagaaaacagcagaagcagaaacgtttttctctgggcccttgttccgtgaagcgggccatgaaagctacctgatcttccaattaaagtaggtgataagaccgtcaat

SEQ ID NO: 254463 - DNA, 122 bp, Homo sapiens
taaaggaaccgaacctttatctccttttctgaggggcgttccagcgctacccgtggaacacgtggtggacaggcctttggttccacgctccacagtaagcaggtttttagtgattcctttgt

SEQ ID NO: 254464 - DNA, 122 bp, Homo sapiens
ctgggagatgcttgcgggtggggagcgtccgtacggagccccgggttaacccccaggagccgagctgacctttgtcagtgtaacaagcaagcatggacgctccctgtgcaccaggactcagc

SEQ ID NO: 254465 - DNA, 122 bp, Homo sapiens
gcgcgctcgccctgccctagaccagggttgggcgcagcggcggaggtggcttctgggctgcgcgagctgggagagctgggaggcggcgatcgcagctgggccgggacttccttcctccaccg

SEQ ID NO: 254466 - DNA, 122 bp, Homo sapiens
gacccggcggcgaggggcgggatggggcggcggcgcggggcggtacggccaatggcggggcggggcgcgcgcaggctttgtccggatggtaccaggcgcggtgtgactccccgcccccagcc

SEQ ID NO: 254467 - DNA, 122 bp, Homo sapiens
ctgaggttctgattcaggaggtctcagcagagcccagagctggctttcccagcagggccccggggtgctgatgctgctgcccctaggaccacccctgagagccctggctctccaccagagcc

SEQ ID NO: 254468 - DNA, 122 bp, Homo sapiens
aggcgctgctgcaggagttccagctgctgctgaaaggtgcggtgccgcagggccagagtgcgggatcctgagccctgcatgccagtccttgcgggggccgatcgctgtgagccttactcagg

SEQ ID NO: 254469 - DNA, 122 bp, Homo sapiens
gggaggcctcgcaggaggtagaggtgtttcctaaagctgtggcggcgaggaggtgtcccccgcgggggcggccggggcggccgctgccgctgctgctgctgctggggctggaggctcagcct

SEQ ID NO: 254470 - DNA, 122 bp, Homo sapiens
ctcgtttcgaaagcattgcctctttgatccccttattttctttctcctgtgtttcaccaccggttctcatttggcctgtccggtgggaacgggctgctggctgcatttggtcctcaggggat

SEQ ID NO: 254471 - DNA, 122 bp, Homo sapiens
ttcctccaggtgcatccctgcaggctgagctgctgcataacttgtagctcctccagtttccgagactgcacagaaagcaggagttcctggctttccgtgctgggaccgggcagccctgggct

SEQ ID NO: 254472 - DNA, 122 bp, Homo sapiens
gagcagtgcttactgggggtctggcccagtctggggacaggggaggcttctccaaggagacggccttaatggcagacctccaggacacattgctggagggagccagctaaggcctcaagagg

SEQ ID NO: 254473 - DNA, 122 bp, Homo sapiens
tcttgctgatagcattgctgccaatttctgtgctatgttgccttagtatgggcattgcagcgtccgagaatgtgcacaaagcacatcagaataaaggtgatcccagagctgcagagtgcacg

SEQ ID NO: 254474 - DNA, 122 bp, Homo sapiens
ccccactgtccccgccaggtggtggcctctgccatccccgacgaccagggctggggcgtccgccctcagcagccacaggtgggtttgcggcccctcagacccctgcctggcctcacccagct

SEQ ID NO: 254475 - DNA, 122 bp, Homo sapiens
agcacggcgtggaggacttttccgtgagccagacgatgctggaggaggtgatcacggcgccggggtcgggctgggggaggcaggctgggggccaggcccgtgggctgaccgtccctcttgtc

SEQ ID NO: 254476 - DNA, 122 bp, Homo sapiens
tgcccagtcactggctctgcgccaagaacctgcctggcaggaagactgcttgtggggagacggcagaggcaggatacaaggcccttccttggaattctccccagtgtccctgcctcctcttc

SEQ ID NO: 254477 - DNA, 122 bp, Homo sapiens
gtagagtacctggagaatccccgccaattctcctgcatcccctccttctccactctcaggcgaagctgccatctcatgaattttagaaaagagtgacctttgttaagagtttaccacttcct

SEQ ID NO: 254478 - DNA, 122 bp, Homo sapiens
tggtgctcccgggtcaagcaggcggcaggaagctgagctgcaagttcatcatcatgagtgcgatctgcgtaaaaaatgataggggaaggaaggcgggctacggtgccccaggaaaagaaggg

SEQ ID NO: 254479 - DNA, 122 bp, Homo sapiens
ttcctgggctttgcctcgaggatccccggggacgggacgggccggggcttggaggggggtcggctgccacaggctcacatcacggcctccatatgcaggatcctcagggcctcggagatctg

SEQ ID NO: 254480 - DNA, 122 bp, Homo sapiens
aggcaagaaattgagcacagcaactgctggcccaggtgctaagcccctcactaccccggccgatcggtcgctccgagtgcagggtcctccgagcccactcccacccagaactcgcgctggcc

SEQ ID NO: 254481 - DNA, 122 bp, Homo sapiens
tagccgcgattaaatctcctgccaacacgcctggataagttttgtatattttagtagagacggagtttcaccatgttggccaggctggtctctaactcctgacctcaggtgatcgcccgcct

SEQ ID NO: 254482 - DNA, 122 bp, Homo sapiens
cggagcctggggtgggcggggcttgaggcctgagtggagcgtaaaccctgattggctgtacggaaggcggcgacgtggccgaaggatgcccgtttgtgtctaaacggaggctcggccacaac

SEQ ID NO: 254483 - DNA, 122 bp, Homo sapiens
ataacattttcatttgtgttggtctttttttagtagcactaaagaactttcagggagttacgggctgctccccatttcaatcagccaatttcattcagtaggattgtttcccatcaggaggc

SEQ ID NO: 254484 - DNA, 122 bp, Homo sapiens
cacattcctgactcctgtgtggctatgggccaagcagtctttccttgagcctctgacatccgattctgtgtcatggggttatcagccctgccttcttggtcctgggctgggagtggaggctc

SEQ ID NO: 254485 - DNA, 122 bp, Homo sapiens
acttgaaaaccacacagcacagcccaagcatctgagtcggtacaggagctacacccaggacgtccccaggagaggcagcaggcagggagaaagatcctctagcagcttgggatggagagcca

SEQ ID NO: 254486 - DNA, 122 bp, Homo sapiens
acttcggaacgggtgtcctgctactcctgctggggctcctccaggtaaggggaccgagatcggtctcagacgacagcctgccaggcaacccccagccgcaccagggccccaggctgtgccag

SEQ ID NO: 254487 - DNA, 122 bp, Homo sapiens
gatgcttgcagccggtgcaagtttgcaagcagctggagagcggtggctggagtcggggggcggtgggcgtggccacgctccctcccaggcagtcccgggaatgttctgaaaagtatccgaaa

SEQ ID NO: 254488 - DNA, 122 bp, Homo sapiens
cggggcgagggaatgcagggggcgcgcaaagatcaagggcatcttagggccggttattggcgtctgccggggagatggggaacatagtgatagggaaatcctgctctctctctgaagtcgag

SEQ ID NO: 254489 - DNA, 122 bp, Homo sapiens
tacgtttcttcccagtcgagtcttcctcaagagtaagaactcccggacttaccatagtgacggcaacctgcttctcggactccagtttaagaaacgtttttaagttcatgccctgtgctgga

SEQ ID NO: 254490 - DNA, 122 bp, Homo sapiens
cgccacccacactctccgcaacctgggctcctagggccgcctccaccccgccccgccccccgttgtcctggccccgacccctcagatggtacctcgagtccttggtcgcttctgaccccaga

SEQ ID NO: 254491 - DNA, 122 bp, Homo sapiens
caacccagcctgcttcctagccagggagtggccccgactagggtggcaggcagtgggaaccggagagaggcagaggaagtcaccgtggggacgagcaggtgaccctgggggcttcagcatgt

SEQ ID NO: 254492 - DNA, 122 bp, Homo sapiens
ccagtcctaccactagagggcgcggataacttaaactggccggggacttccctcccgccgcgcctggttaccttcagccaatcatcaaatatttacccaaagcgcagttcaaagccaaagta

SEQ ID NO: 254493 - DNA, 122 bp, Homo sapiens
tctgcagtatcccccacctccagcccgtcctgccctcctgttctccgtctcgcttcccgtcggtgcctccgggatctcacagccctcgcacctcttttgtgacccaggctgtttttctgcac

SEQ ID NO: 254494 - DNA, 122 bp, Homo sapiens
tgcagctcctcggccttgcgggcgtagtccttgctcagctgctggttctccactcgcagccgctgcacctctagcaggacctcctgcatctccgggccctggcctggctccgacttggtttc

SEQ ID NO: 254495 - DNA, 122 bp, Homo sapiens
gaacttggggcgctcagcacagagacccccataccttttcctgtgtgcccacagagtaagcgttctgagggccgaggggaagaggcgacatgcaagttcccacggagaggaagaattgttaa

SEQ ID NO: 254496 - DNA, 122 bp, Homo sapiens
acatcatcgacctcgggctggccaaggggtacactggtctcaggaccaagaagcacatcccgtgcagccagcacaagagcttgacaggtacggcgtgctacatgagcatcaacatgcacctg

SEQ ID NO: 254497 - DNA, 122 bp, Homo sapiens
atggactccagcactagcgcccacaggtccacaaaggtcgtggggtggccctgctcagcccgcagctccagctcccggcggtagctcgccaggcgctctggggaaaagacctccagcttgct

SEQ ID NO: 254498 - DNA, 122 bp, Homo sapiens
acccagagatctggaaccacgggtagtgagtcaggctggccgcccagggtcactgcagcacgtctgccaggaagggctcttaccaccacgcacagagcacaggccaggccatcgaggggcct

SEQ ID NO: 254499 - DNA, 122 bp, Homo sapiens
tttgtaagggtctacaatgagtcagatacctaggtctagaaacattgaaatgaataattccgggtccctactgtcaaggagatcagagctgatccaataaaagaaatagtggtcttacttta

SEQ ID NO: 254500 - DNA, 122 bp, Homo sapiens
taattttttcaatttcagcccaaagccggcctggttcaagcattcctcagaaatttccagcgcacgttccccatctgaaggctcacacctgcgggagtagaacacactccacaccggtgccg

SEQ ID NO: 254501 - DNA, 122 bp, Homo sapiens
gtcatgaaaacggagcgggcgatgctgatcgaggtaagggccatactgaaggctgcttctcgctctgccaccctccggtgcttatagcgtcctcacttgatcgtattttcaatggacggaac

SEQ ID NO: 254502 - DNA, 122 bp, Homo sapiens
gctgatctctggcaagtccttccgctgctgggaccattcagttcttggggcttgtgctggcggtaggaaggggtgtgtattttaagaaatctctgtttgatttctcaacttccctctctccc

SEQ ID NO: 254503 - DNA, 122 bp, Homo sapiens
aatataactcccccccaactccccaaatcaaagctcaaatataagtcattgttcccaaagcgttgaacagggattgaggtgcagagggacggccaagtaagcaaagggcaccgaggaggcag

SEQ ID NO: 254504 - DNA, 122 bp, Homo sapiens
tcgggcgatctccatccaggtcctggggccggcagccgcggcaggggaacctcctgcgctcgggaggaagcacagattccagaggagcagtaaaatggcaaatcatgccaagcttcggggtg

SEQ ID NO: 254505 - DNA, 122 bp, Homo sapiens
ccctgggtctgctcactcattgacgagccggtcacagatctcgctgggcaagaagatgtccggatgtagccgcagggtctccttgtccagcaggtagcccagggtgccatccaggttgcgca

SEQ ID NO: 254506 - DNA, 122 bp, Homo sapiens
atgttcgacgcttgaaaagttgggttctgggggagatccctgggatggaggtgacggtcccgcctctgatcagaggaccgcggctccctggatggatctcatccccacacccggcactccag

SEQ ID NO: 254507 - DNA, 122 bp, Homo sapiens
cctctacctccgcctcaacccttccctctctgttaggagatcctccccctcgtctctgcgcgcccccaccccgccatcccccgctagcgcacacatgcaggagaaccctttttaggctaaac

SEQ ID NO: 254508 - DNA, 122 bp, Homo sapiens
gacacacaacactgagctccgcgggtccggaaacaaacacccagccaggtggtggaaggccgccccttcctccgaggctggcacctgattggacagttccacacaagcgcctctgattggct

SEQ ID NO: 254509 - DNA, 122 bp, Homo sapiens
ccgcctcccgggttcaagcgattctcctacctcaacctcctgagtagctgggactacaggcgtgcgccactatacctagttaattgcagttggagatcgcgccattgcactccaggctgagc

SEQ ID NO: 254510 - DNA, 122 bp, Homo sapiens
tcttccgtaaaaggagagggtggctgtacccacgtggcagggaaaactgaaccgtgaagtcggcggctcagccctttgcacacagaagctgagctgtccctgtgcgaggcagaaaatgtcgg

SEQ ID NO: 254511 - DNA, 122 bp, Homo sapiens
ctccatttaaaaatagtcacattagctgacactggcttggcacttcctagatgccgggtgcgttccgagttctctacgctgttaaccttggatcttcataacagccggaggagacaagcgct

SEQ ID NO: 254512 - DNA, 122 bp, Homo sapiens
ggtctagattggcacgtacataacgctcgcttctctgtgtcgatggctgcattgcatggacgcgctgtaactcgagaggcagtgacaccccaccttctgggggcttcgttcaagtcccagcc

SEQ ID NO: 254513 - DNA, 122 bp, Homo sapiens
aggggactcccagacaatgcaacattcatttaggccaatcaattctgtcaaaaattcattcgatgaaaatagtaccaagtgggtactcaactgcttagccaatttagtctccacagcaactc

SEQ ID NO: 254514 - DNA, 122 bp, Homo sapiens
aatcttctacataatccagggcctagaaaaatggtgggtttctctccatctagattcaggcggtcatctgctgcctaacgcagtctggggtccctcatggtaggggaggcggggtcaggaat

SEQ ID NO: 254515 - DNA, 122 bp, Homo sapiens
cgggcagccagcccagctcaccgtggcagagctggctgcagggcagcacagagggccgctcgacaggcggggcaggctgcgggagaacaggagggtttccccgtcatctgtcactcccaagg

SEQ ID NO: 254516 - DNA, 122 bp, Homo sapiens
ctgggtgctgctgctggtagggtcaccggggacccgtcaggggagggtgatggggaatcccggtgccccggggtccacatgagctccctgccggctgcagcctaaggcacagcactcagaaa

SEQ ID NO: 254517 - DNA, 122 bp, Homo sapiens
catcctgaaccacctggtgctggccattccactgagggtgctggtggttctgtgggccttcgtcttgggcctatccagggtcatgctggggcggcacaatgtcaccgacgtagcttttggct

SEQ ID NO: 254518 - DNA, 122 bp, Homo sapiens
caccagcagccgtcgcagctgcgcaggcaccctcagcaaacaagcctctgagattacagacgtccgcggtctggtgcaggttcgcccgcctcgggatttaagtttccaggcggccttccccg

SEQ ID NO: 254519 - DNA, 122 bp, Homo sapiens
gtcgggagcccgctgatagtgagggccaacccggcgccatccagtttaaagaggcatctgcgcgccacacgcctgacacttcacatttgctagtggctacatttttctaatgaaaaaagaaa

SEQ ID NO: 254520 - DNA, 122 bp, Homo sapiens
gagatctgggggtaatgggaggcgtggagttgggggtggggccggggttcccgccaggagcgacaaaggacacccccattgtctatgcatcgagtatgtgtcgaagggggcggctgggcccg

SEQ ID NO: 254521 - DNA, 122 bp, Homo sapiens
gaagaggtggaaaaagagaaggttaaaccctcacaggattggcccacccccgtcccgccgcgtgctgcgcaggcgcgttttacctaaccaccattttccgtcaagttttagccaatgagttg

SEQ ID NO: 254522 - DNA, 122 bp, Homo sapiens
cccacagacacacagtcacacggtcacagagcagaccggctggagcccccaagtaacccccgcttcccactgtctccgcagggatcgcccggagcccacacccgtcctccgctctgcatttc

SEQ ID NO: 254523 - DNA, 122 bp, Homo sapiens
acaggactgtcctgccaccccacagggctgatttgctgagggtcacaggagagattctcacggctggcccagagcatgagctccagggccctcactgttgtcatctgcacaagtgttaagtg

SEQ ID NO: 254524 - DNA, 122 bp, Homo sapiens
catggggcttgtggtctacactgggagatctgtgcctcagtttattgtggtctacactgccggatccatgcctcagtttatccagtcatgtctctccaagagccccagggcaggcggagaag

SEQ ID NO: 254525 - DNA, 122 bp, Homo sapiens
aaatggaaggtcccaggtgacttgcaaaagcagccctggggatgctggggacagaggtcccgggaagagtgtgggaagaaagcaaggtgggcagtgagagcccagctggagagggagggcag

SEQ ID NO: 254526 - DNA, 122 bp, Homo sapiens
ctgccccgggcagcccgacaatggcggctgcacgacttccttgttgcaagcttgcaacttcggagtcgggaggaagcagggagccaagcgcagacccaagaagccctcaaggcgtatcgagt

SEQ ID NO: 254527 - DNA, 122 bp, Homo sapiens
cacccactcactaataagacataatgccgtcctatttttggtaacaattaaagggcctcccggtgaaagcagaaagctgtttattttctgtgacatcacttcactttgccttcgaaggctgg

SEQ ID NO: 254528 - DNA, 122 bp, Homo sapiens
tatttgagcaaaaactgaaaggaagtgactactatcgccccccatttacattcaagaaaacggaaacttctagctcacagtggaaactgtgccccagcttagggtgtcttgagggaaatcta

SEQ ID NO: 254529 - DNA, 122 bp, Homo sapiens
aggaaggttgtgctctggcagtagggccacgacctgcctgcctgggctggagctcttgcccgaagcctgaagcttccttcggcgccatgcaggggttggggttgggactggagctggccttg

SEQ ID NO: 254530 - DNA, 122 bp, Homo sapiens
gcggcggccggggctgagaggggtcggtgcggcggctctgcctccccgggaagtgggaaccggccaagtcccgagcggggaggggcaggctttctcctgcccgcgcctggggggaccctacg

SEQ ID NO: 254531 - DNA, 122 bp, Homo sapiens
attcattatttattctagggcaaaggaagctgctggagggttttacatagaggagtgactcgtgagcatttttgcaatcactctggctgcatgtggatgctgagttgaagggggctcatttg

SEQ ID NO: 254532 - DNA, 122 bp, Homo sapiens
tgtctgtgtgtgcctaggacaaggccgtggcggagcctgtcagccgcctgctggagagcacgctcaggagcagccacctgcccagcagggttggagccctgcacggcgtcctctatgtgctg

SEQ ID NO: 254533 - DNA, 122 bp, Homo sapiens
accccattttatccttcacccctgtgcctccagtccagcagaccaaacagccacatttcccggctaggtcagatggtgcacgcctgggtttggggataaaattcaaactcctccttggccgg

SEQ ID NO: 254534 - DNA, 122 bp, Homo sapiens
ttattcagagcaggtgcaggtgacctggtgggcagggtgcccaggaggggcaggggtgggcgggcgctccgaaccttgtggtctgaggcaggaactccattaaatcagctcctgcgacacag

SEQ ID NO: 254535 - DNA, 122 bp, Homo sapiens
attatttgacttgcatgaatccaagcagggcctggcatgctcacattttcccaaagcatccgcttctatctataacctcatcatggctccagatcagccatgtgaaaattcccaaagtaact

SEQ ID NO: 254536 - DNA, 122 bp, Homo sapiens
gccccgagccctgagccccggctgtagccccccgctctcctatggtgctcctctgcctaccgcctttcccggggcttttctgggaagggggaatagttatgtctggagccccgagtttacat

SEQ ID NO: 254537 - DNA, 122 bp, Homo sapiens
ggaccgaaccaccacgctgttgtttgcggttttaattcctcccgtgggatcatgaggaaccgaagctggcagagtcccaggaatatgcccgctccccagaagcaggagggaatgtcaagggc

SEQ ID NO: 254538 - DNA, 122 bp, Homo sapiens
ctacctgtgattcggttttcaatctccccctgcatctgaagcgagtccacataaatggtccggttgccaatgaagcgtgcacaggcaattccccggtaaggctggcagaacccatcctcgtg

SEQ ID NO: 254539 - DNA, 122 bp, Homo sapiens
aagccctggacctaaaaatggccaagtggagacatgggctgatgtgactgagaatggaaacggctggcaaggattcagttcacattccctcgctgcacactctctgtaactggcctcatttt

SEQ ID NO: 254540 - DNA, 122 bp, Homo sapiens
gtcacacggtggactgttctggccttactgagctgccgtttggggacatcagattcaggtcgtatggggagaaacgagtgtaactttacaaggtgtgatatggagaccctggcctgttgccc

SEQ ID NO: 254541 - DNA, 122 bp, Homo sapiens
gcagaagcgccagcggcaggagcgtgtcgagggaggttttgtgtctcttctccccatcctcggcctgcttaccgaggcccgctccgtgccagaaaacacactggtgttcatgtgtcacccca

SEQ ID NO: 254542 - DNA, 122 bp, Homo sapiens
tctctttgtatgtaacgctatccatttaaagaacttagaactcagtaagtactaaaggaccgttaattcattcaacaagcattatttgatctaggcacttagaatacatcaatcaactaagc

SEQ ID NO: 254543 - DNA, 122 bp, Homo sapiens
aggtctctttgcacagatctgaaaggatcatctccaagcgtttatatcatgcttgtcattcgtttatcagaggccaaatgtttttctttgtaaacgtgtgtaaaacattctcagaattttaa

SEQ ID NO: 254544 - DNA, 122 bp, Homo sapiens
cgctgccgcaaccacggcgtggtgtcctgcctgaagggccacaagcgcttctgtcgctggcgcgactgccagtgcgccaactgcctgctggtggtggagcggcagcgcgtcatggccgccca

SEQ ID NO: 254545 - DNA, 122 bp, Homo sapiens
ccccaccccagaacaatggcttggtctgagccaagggtgagtcagcctgcagtctgcctccgtctggtgtaaataggaaagggtgtgggttggggtgggaactggggggcggggtaggggga

SEQ ID NO: 254546 - DNA, 122 bp, Homo sapiens
ggccaccaaggggaaagttacttaactaattcaggaaggtgtggtggcctccaagggagacgctgagggcctgcttggggtgggcttgataataatggagagtggaggccaggtgtggtggc

SEQ ID NO: 254547 - DNA, 122 bp, Homo sapiens
tgcagtcgtctgtacttagacatactgagtggccccgccggttggagtacgagtgccacacgggcagctcattgattcccagcaggaaggatcttggaagccagaagggtattgggagcttg

SEQ ID NO: 254548 - DNA, 122 bp, Homo sapiens
cccttcccgcctcacaccactcttgatgacaaaattgaaatgagctgaagaacgtgaggccgccgcccgcggaaggaagcgctgcccgcgtgagggccggggctgcttacgggtggaggagc

SEQ ID NO: 254549 - DNA, 122 bp, Homo sapiens
cgaattatcaattgaaggaagattgcatcgtaaagccctggagcacgagcctcgttagcacgctccttccagcacagccggggctcggtccgtctggccatgtatttggcaaccagtgtgtg

SEQ ID NO: 254550 - DNA, 122 bp, Homo sapiens
gcgtagagtcactcaacacgcactcggcctctttggagggtgagggtttctcatagttggcgtcttctaaaggaaaaacactaaaatgaggaactcagcggaccgggagcgacgcagcttga

SEQ ID NO: 254551 - DNA, 122 bp, Homo sapiens
cgagaatgcctcccgtcagagacctgcgggttcttggagtcgtgtctctttctcacctcccgtgctgtaatggagtaaaaatattctggaaatgattccatgccagcaagtcagccaagtcc

SEQ ID NO: 254552 - DNA, 122 bp, Homo sapiens
gtcacgctctgccaaagctgtccgtgaccctggacagttcggaagctctggggctctccccggaggccgagttacttctgtttgacctttacactggagaaaggacctcttcctaacttctc

SEQ ID NO: 254553 - DNA, 122 bp, Homo sapiens
agtagcctattttctctaggactcttgctgcaacaggatatgggagaagggaaacattaacgttagcagaatgggaggaatcagattatggagacatgatccttgccttctggcacctctcc

SEQ ID NO: 254554 - DNA, 122 bp, Homo sapiens
tttcttctgagggtccgctgctggcagtaccgccagctctctgctcttcacagggctccccgccccacccggcctgataaagcgcgccaactgggctacaaggccaagcaaggttacgttat

SEQ ID NO: 254555 - DNA, 122 bp, Homo sapiens
acacacactcaccctgtcctgccaccattaggtaaagtttcctgccactccttgcacatccgtcattaccaaagagatattaaactagacaactgtaaaaaaataacaccttcagtggcaaa

SEQ ID NO: 254556 - DNA, 122 bp, Homo sapiens
cttattctcttaggcctctggtttctgcctttccagcaggctggatggtttagcatgctgcgtgtgtggccaggggcagcccacatggcttaattagctcttcagccccctggcaggaggtg

SEQ ID NO: 254557 - DNA, 122 bp, Homo sapiens
gggagtcgcactgctggcctagcagccaggctgtggaagggtccaggttgattcacctctcgcctccccaggatcggttgcgttccgactggaatcctcccagccccgcggctcctgcttcg

SEQ ID NO: 254558 - DNA, 122 bp, Homo sapiens
catgagggtgagcagacagcatgacaaaatgtgtaatactgatttaaataaaactatcctcgacattctagtgtgtgagtacctcaaaccataactacaattatattcaaagcacatactgt

SEQ ID NO: 254559 - DNA, 122 bp, Homo sapiens
agcgccgcgggtggggatgcgggaggctgagcgcaccggccagctagcccctttgtgcggcgggggctgcggagtgctccctccaagaccggttgcaccccgctttcctggccaggactctg

SEQ ID NO: 254560 - DNA, 122 bp, Homo sapiens
ctcaggcatggcgggttgcaggtgtggagccctgccctggggtaggcaactaaggcctggcgataaatcaagcgcagcgcggatgggccagcgctgctggggtagccggcgcacactccgca

SEQ ID NO: 254561 - DNA, 122 bp, Homo sapiens
gcagaaactttttttgcacctccttcagctatggtaagtgttaaaccaaagtaattggagcgaagcccaaggtagcagaagctactgatttcctgtcacctgatgtctatcagcgatttcat

SEQ ID NO: 254562 - DNA, 122 bp, Homo sapiens
gggcggcgaccgtgagctccgggagctgcgcaaaccacctggagaccatgtctggggatgcgaccaggaccctggggaaaggtgagtgctctccatggggtccgcgagctgggggcgccgcg

SEQ ID NO: 254563 - DNA, 122 bp, Homo sapiens
acatccaccctgcaaagacacccgtggggaccagtgacagctgaaggactgccagcagcccgcgtggggtccacgcttgacacatccctaaagcaccatgttaacttccattgtgtgacaat

SEQ ID NO: 254564 - DNA, 122 bp, Homo sapiens
tttgcgggaccaagctgctcttccctggagatgccttcccttggagtacagctggggtcacggatgagcacggagatgcctctcacactccgcggcttcaccacccacctggaggggactag

SEQ ID NO: 254565 - DNA, 122 bp, Homo sapiens
ctcccggaggacttgggtttctagtagtaagagtccggggggcattactcacggtctccccgcctcctcttcatcgtgattgggctgtcaaagtgatgttggcaagtagattggctactgcg

SEQ ID NO: 254566 - DNA, 122 bp, Homo sapiens
ggagcaggatgagctgggactgagacttcgggagccccgtcagcctcctcgtcacggctccgacatccaccaaagtcctggcagctgctgggctccagacggtgttcccacaagccggggaa

SEQ ID NO: 254567 - DNA, 122 bp, Homo sapiens
gtgcacaacatcaagttcgacgtggactgcaccgtggacattgagagcctgacgggctaccgcacctaccgctgtgcccaccccctggccacactcttcaagatcctggcgtccttctacat

SEQ ID NO: 254568 - DNA, 122 bp, Homo sapiens
actctcggaaggatctggggaagaaccaagactggcccaggatttgggcttgcctgtctgcgtcggggctgcccgtggagatggggttccggtgaggagcaggaggatccaggccggagggt

SEQ ID NO: 254569 - DNA, 122 bp, Homo sapiens
cggccggacaatacgggcagtggccacagtgcaaggacactgtgctgcgtgctttcaagacgctgtgaaggccagtgcgagagaggccttgagccacggtgccggcgatgggcgtggaccca

SEQ ID NO: 254570 - DNA, 122 bp, Homo sapiens
tcctgtgacaaccacctgtctccttcctgtctctgtggatttgcctattctggacatttacgtggaatcccataagatgtggtctttggtgattttagcttctgccacttaacgttctcgtg

SEQ ID NO: 254571 - DNA, 122 bp, Homo sapiens
cactgcacagcttctgcatgaggacgctcaggctggctgccacagcctgggccagctctccgagcaaaaggaacgggtggggaaaggccccctaacccgccctggcagccccaaggcactgg

SEQ ID NO: 254572 - DNA, 122 bp, Homo sapiens
ggaggctgaggctatgatggcggccatggcgacggctcgagtgcggatggggccgcgatgcgcccaggcgctctggcgcatgccgtggctgccggtgtttttgtcgttggcggcggcggcgg

SEQ ID NO: 254573 - DNA, 122 bp, Homo sapiens
agtgacgaaatgaagttctaaacattccctgcccaagagcgtcttctgattccaggccagcgtattttctcatttgctctttaagcctttctaaaaattctattggtcctcatcttttctct

SEQ ID NO: 254574 - DNA, 122 bp, Homo sapiens
gtggctcaagcctgtagtcccacctactcagaaggccgagatgagaggattgcttgaggccgggaagcagaggttgcattgagccaagtttaccccactacactccagcctgggtgatagag

SEQ ID NO: 254575 - DNA, 122 bp, Homo sapiens
tcaagaataccacctcctcttcctaagggctttttctacttctgactttgtccccgtgtccgatacatttctccagcctggatccaaagttatcttccaaaaacacaaatcagactactgac

SEQ ID NO: 254576 - DNA, 122 bp, Homo sapiens
acctcaggtgatctgcccacctcggcctcccaatgtactgggattacaggtgcaagccaccgcaaccggccacttttgccttttgattggtttagtggatcataattatttttttccttata

SEQ ID NO: 254577 - DNA, 122 bp, Homo sapiens
aaagtcgccgaagtgcaaggctggattgagacagacaggctgaaaaagtcgcagcgcagccgcagcggcagcagccgatggccgactccttccttttccagtccacgtgcccaggcgggtct

SEQ ID NO: 254578 - DNA, 122 bp, Homo sapiens
ttacgcaatgcaggttacgcggaccgcgccgcgagcctccgccagccgcccagtgtcgtccgccgccccaaagggcaccagtcctcacctgagacgctaggccgcacgccgcccccgccggc

SEQ ID NO: 254579 - DNA, 122 bp, Homo sapiens
tttttattttcaagaagcaaatatgtacacataggtttaaaaaaaaaaaaaaagaatggacgcagcacatacagtgaaggtgaaagctcctagtcgtcccaagctccatcccagggcagggc

SEQ ID NO: 254580 - DNA, 122 bp, Homo sapiens
ggacctgcagcccgccatgcctgagtctcccaccccctccctgggctcctgtgcggcccccgcctccccgatgagtgctgccccgtgctccacagcacccagtcccatcgaccacccaaggg

SEQ ID NO: 254581 - DNA, 122 bp, Homo sapiens
tctctctgtctagcttctttggctgcttgcctgagatctttatcagtgcagtcagcattgcgtcaatgaagcttttgttataatttctcttccattgcattttcagtttctttagcccaggg

SEQ ID NO: 254582 - DNA, 122 bp, Homo sapiens
tgggactgggcgccctggagcagggggcggcgctcgtcggggaggctcgcagtggaggggcgggggaagctcaggcatggcgggctgcaggtccggagccctgcccggcggggaggcagcta

SEQ ID NO: 254583 - DNA, 122 bp, Homo sapiens
agaggcgctccttacatcccagatggggcggcagggcagaggcggtccccacatctcagacgatgggcggccgggcagagacgctcctcacctcctagatgtgatggcggctgggaagaggc

SEQ ID NO: 254584 - DNA, 122 bp, Homo sapiens
tacccctgcaaagaccatgtggctcgatgtgacaaggcccccaggctctggggtcctgaccgtggtgaatatgacccaaccctgggtgatctttagagaccccagaccaaaccccaccaaga

SEQ ID NO: 254585 - DNA, 122 bp, Homo sapiens
agcggcgcgatgttggctcactgcagcctcgaactcccgggctcaagcgattctctgcctcggccttccgagtaactgggaccacaatcaagggacactccgcccggctgatttttgtttgt

SEQ ID NO: 254586 - DNA, 122 bp, Homo sapiens
gacaacatgactgcctttacagattgagtctggattcttccacgagagtgacgtcaagatcgtggccaagtccatccgtgaccgcgtggccttgatccagtggcggcgggagaggatctggc

SEQ ID NO: 254587 - DNA, 122 bp, Homo sapiens
ctcccctgggcataaatgaccatggcctagtccatgagggtgccagggaggccccccaaccgcagtcccactgaggagaaggacctgctccccagggaagggaggaccgatgcagtaaccct

SEQ ID NO: 254588 - DNA, 122 bp, Homo sapiens
tcttgcctgatttgagttcatttttctgctcatcaggggaactacccactaggcatataacggcttgaaaagaaaacatgccattttaacttgacattcatttgcacccatcatacatgcct

SEQ ID NO: 254589 - DNA, 122 bp, Homo sapiens
tggcaagcgcggtaacttccttccctgaattaaatgcagggcccaataaacatttcgtggcggaggtacacctaggggtcgcttcagtctttcatgattacagggaccgccgggttcggctc

SEQ ID NO: 254590 - DNA, 122 bp, Homo sapiens
tcccagcatctcgagaccctctgcagaagtattatcagagtagagctgacttccagtacccgggcagccagctctgtctccagggaggcctggcctggaggaggagtccactaacaggaaac

SEQ ID NO: 254591 - DNA, 122 bp, Homo sapiens
cctctgagccggtggtgtccctccccccgacacacaggggccgctttggtgttgtgcgagcgtgccgggagaatgccacggggcgaacgttcgtggccaagatcgtgccctatgctgccgag

SEQ ID NO: 254592 - DNA, 122 bp, Homo sapiens
tgcaagctaaacaacatcagtgaatgccacactagcagatgcagacctcataacgttacccgtctcaacaactttgaagcatagttaaaactcaactaagtgacaaagatagtaccacaaat

SEQ ID NO: 254593 - DNA, 122 bp, Homo sapiens
ggctgtcctgggccaaggccagaagctgcccaagttcacacagccgatgcctgggagtgtcgtagccccggtgccacccggcacagaacattcacccccaatatcccacgacccccgcacag

SEQ ID NO: 254594 - DNA, 122 bp, Homo sapiens
gagatacatagaattctaatttatttaattattctaaaaattccaatcacaatggcgcggcgttagccaccacaactttgcagggcaaaaaaaaaaaaatacttcctgaactaacatatgtt

SEQ ID NO: 254595 - DNA, 122 bp, Homo sapiens
cccccctcatagacaggtagctccctaagggccaaagacttgtcccattcatctctgtatcgccagggtctgcacagacctagcacaacaaaaagaaatctttcaaattactcttactgttc

SEQ ID NO: 254596 - DNA, 122 bp, Homo sapiens
cccagaaatggtctctgggcagtgagctggggcaataggagggctcacctcattcattcccgtctctcagggaccacagtgttttaccgcttggtgtagagccttgcaaacttgtttcgtag

SEQ ID NO: 254597 - DNA, 122 bp, Homo sapiens
tttctcctgggccaggtggctcaggtgctgcgggatcacccagggaaggctcattcctctcgctacaagacgctgactgcggatcaggtggggagcacggtggatggtcttcttgtatcctc

SEQ ID NO: 254598 - DNA, 122 bp, Homo sapiens
ctcgggggccgcttgcgcccagccatggtagggcgtcccccggtgaaatggggtccgaggcgggccccgaccccgcgtcggcgctgcggaccgtccgggagctgcagccgcgggtgcccggt

SEQ ID NO: 254599 - DNA, 122 bp, Homo sapiens
gcagccctcaagaacggccctgaccgcccgcggggtgaggggccctttctgggcaggacccgccccttggtcccgcagagccttggtacttggacctgaaccttgctccgagagggagtcct

SEQ ID NO: 254600 - DNA, 122 bp, Homo sapiens
gatcacccaattcctgcggtaagaattagagtccagtcaccgcctaggcaaaaccctggacgcaaaccccaacttcggacctctgaggaggcacagagccagggggaggggggcggcgtcgt

SEQ ID NO: 254601 - DNA, 122 bp, Homo sapiens
cggggcccttcgggtcagcccggggcggggtccccctggcgggtcagcagagcctgtccccgtctcaccactggccaggctgctctggcacccagagaggtggcccggcgggtgggtgaacc

SEQ ID NO: 254602 - DNA, 122 bp, Homo sapiens
aggctccaaggaagtgtgggatcaggggctccctctccaggcagccacagctttccccgacgccctcctctcgagtggggtgagggcttggaccaaatctgccaccttctgtcatctctgga

SEQ ID NO: 254603 - DNA, 122 bp, Homo sapiens
tgtgtgtgtaagcgtgtgtctgtgtgtatgtgtgtgcatgcatgtgtatgtgtgtgtatgcgtgtgtgctcctgcacgtggcagtagaagcaacacctatattgaggacacaaacaagtggc

SEQ ID NO: 254604 - DNA, 122 bp, Homo sapiens
acgcggtcgggcgttgggtttcgcggcgctcgccgcactggttgttcagcaccttcggtccggttgaggttgtcaagtcggaccaaacaggttgtttctctgcagtttccagtaagtgaccg

SEQ ID NO: 254605 - DNA, 122 bp, Homo sapiens
agcgcggaaaggcgccctctccttccctcagtctgaggctcttgcccgccaggcccttcccgactccgcccaggccacgggctgccccacccacaccggccgcctgaggggaagcggcggca

SEQ ID NO: 254606 - DNA, 122 bp, Homo sapiens
cctaattcccccgagtctggaaaacggagacttccgtagcgtcttcttcagtgcgtgctgcgagtgctgaaggaggacccggtgcctggacgacccggagcaggggaagcactcggccgacg

SEQ ID NO: 254607 - DNA, 122 bp, Homo sapiens
aaaactgatccgtgtcctgcatgttggcagcagacaaccttccttgctgctgagctgtcccgggtggcttcaccgcggctggggaatccgagccattccttccacgtgctaagatgtccctc

SEQ ID NO: 254608 - DNA, 122 bp, Homo sapiens
tccaaccccgctcgttttggtactcaccgtgtggagacgccaccgcagctccgtcagtcgcgagtgaagaacctcagaaaccgccgctgtacctcagctgcagcagcaactgcagttccggg

SEQ ID NO: 254609 - DNA, 122 bp, Homo sapiens
aagagtccacgcctgggggcaccgtgcagtggatgaccttattccagcggggattcttggcgccattgtgtgccgtgggcgtctcgtacaccgcgtagcccaggcgcagtcggcagtagggg

SEQ ID NO: 254610 - DNA, 122 bp, Homo sapiens
attctacaaaactgtactttgatatcacaaacagccagcccatcaaccttattctgattccgtggttctgcttatactcactcgtgtgcgtgtgtattaagccgtgtcacttgtgtgcgtgt

SEQ ID NO: 254611 - DNA, 122 bp, Homo sapiens
cagcactgagttcaatgccttacaactgctgtttactccctccctcagtgcccagagacgcgctccgcaccatgctactgctggggtcaagcgtggaatggaggggtgggggtactttgagg

SEQ ID NO: 254612 - DNA, 122 bp, Homo sapiens
ttgaacactctccagcacttcatttgatgccacagctccctaggaaggaaagcagtccagcgccatttaacagatgaggaatgctcaggcagaaaattaaggacattgttcagcattacaca

SEQ ID NO: 254613 - DNA, 122 bp, Homo sapiens
atgtcctgactctaaggtgtctcggctctctgcgtcctcaggagcacgcgctgctgggggcgcgggcggcagagggtgggccctggagtccgagcccccgggactcgcgggcacgcggtggg

SEQ ID NO: 254614 - DNA, 122 bp, Homo sapiens
tctcctcacttctcagaaggggcggccgggcagagacgctcttcacctcccagacggggtcgcggccgggcagaggcgctcctcacatcccagacggggcggcggggcagaggcgctcccca

SEQ ID NO: 254615 - DNA, 122 bp, Homo sapiens
agcttgcaccctgatatttgcgggggtccgggaagggggagcgggccggagcccataccgcggcacgtaccacgcagagacacatggaggcgaatctgttccgagccgacatggagaagggg

SEQ ID NO: 254616 - DNA, 122 bp, Homo sapiens
ccccgaagcgggaagcagctttctcttcccagcttccatccagtctctgagtagaccagtcgcagcttagatgctgggatcgcctcagaacacatttctttgcccttcacggccactaccgg

SEQ ID NO: 254617 - DNA, 122 bp, Homo sapiens
gtcatcaatgcacatctgagccggtcatcacacacatgatctgagcctgtcgccacacatcgtctgagccggtcatcacgcacatctgagccggtcatcatacacatcatctgagctggtca

SEQ ID NO: 254618 - DNA, 122 bp, Homo sapiens
agcaggagagaggagtccaagtttcttttcagccctttgataccagcggctgcaaatcctcgtccctttccccctgtcactccgcggggcgtgggttccgtgtttctgccaccttctttgcc

SEQ ID NO: 254619 - DNA, 122 bp, Homo sapiens
acagaacagacccccatccctgggctggaggacccgcctcttggcagccagctgagaaggcgccccggggagggggaaactgacatcccatctagagccgtccctcctcttcctcccctccc

SEQ ID NO: 254620 - DNA, 122 bp, Homo sapiens
gtgtggtgtatgttatgtgtgtggtgtgtgtccatatgtgtaatgtgtgttgtgtgtcaacgtgtgtttgtcacgtgtggtgtgtgttgtgtgatatgtgatgtgtgtctgggtgtgtgtgg

SEQ ID NO: 254621 - DNA, 122 bp, Homo sapiens
cagcaggaggatgaagagcatggagggtgtctgagaggggcagctctggctttgctgcggcgtcccctagatgaacctccctgcctggagccactccgtcatagaaagctcatatctcattc

SEQ ID NO: 254622 - DNA, 122 bp, Homo sapiens
ggcggcggggggggggcggaggctccgtggaaatgtgtcggtgacattgaatggggagaccgagcgcgagcgaggcgcgcgcgcgcacacgcgcactcacggccccgctcgctccgagatcc

SEQ ID NO: 254623 - DNA, 122 bp, Homo sapiens
ctcatgagggacagaggtggcgctggcagagttcatgagggacagaggtggcgctggcagcgttcacgggggacagaggtggcgttggcagcgttcacgggggacagaggtggcgttggcag

SEQ ID NO: 254624 - DNA, 122 bp, Homo sapiens
ctcctcacatcccagacggggcggcggggcagaggcgttccccacatctcagacaatgggcggccgggcagagacgctcctcacttcctagacgagatggcggccaggaagagacgctccgc

SEQ ID NO: 254625 - DNA, 122 bp, Homo sapiens
aactttgggactcagtgaccacaggcctcccacaagttattttcctcacgttactgggtccgaggctcctcccctccaaagagtaatagtctctcccctcctcatcctagccgaccccctca

SEQ ID NO: 254626 - DNA, 122 bp, Homo sapiens
cactgcacagcctctcctacaagtgcaatatcaggaaaaacaaatgaatcttaatgtcaccgcaaactagtggaggtaatgctatgtgaagaggggacaagagagaaaggtagaggacattt

SEQ ID NO: 254627 - DNA, 122 bp, Homo sapiens
catgaatgggccatcctgtgcctgcaatcacagggaggtggggccgacagccacgggtcacgtaactgaggccaaacacaagaagctggcctggatcaatgagtcagggagagctctatata

SEQ ID NO: 254628 - DNA, 122 bp, Homo sapiens
ttttttttttttttccaatttctggcggcgggcggctggggaagcagctctgtggtctcccggcgggtgaggccgagacagagaccaacctctaggcggcgccctggcgttgagtccgcgct

SEQ ID NO: 254629 - DNA, 122 bp, Homo sapiens
cagcagtcagcaggaaggacgtcccatcgtccacatcagaccccaacgcagacctggaagcgacaagctcttcctcagtggccacaagcggacccagaccttggagctcaaggaaacatttg

SEQ ID NO: 254630 - DNA, 122 bp, Homo sapiens
cttgcccctactcccgccttacctgacttccttttcggaggaagatccttgagcagccgacgttgggacaaaggatttggagaaacccagggctaaagtcacgtttttcctcctttaagact

SEQ ID NO: 254631 - DNA, 122 bp, Homo sapiens
ggcggcaggcggctggcccgcccggggatggggcagaagctggggcggctgagagcgcagcgcgggctcccgggagacgccggcccactgcccgcccgctcgccgcaggtaggcccggcccc

SEQ ID NO: 254632 - DNA, 122 bp, Homo sapiens
ccttcataagcctctccactgtggtcaatccacaggcctccttcagctctattacctgaacgacaaagcgcactgtttgtggccttcttcagaatgaagagaggcagctgacattctcttgt

SEQ ID NO: 254633 - DNA, 122 bp, Homo sapiens
aggagcactgcgactgtctgcaccgtggccgccccttctcaccaacgatgaggagcactgcgactgtctgcaccatggccgccccttctcaccgacgatgagttgcactgcgactgtctgga

SEQ ID NO: 254634 - DNA, 122 bp, Homo sapiens
ggcctggatttaattcaaactgcctcaggtaagctgagtcacttagggccagtcattccccgcttccaactcttttctatctgtttaacagcaacagcagtagccacctcccccaccatcac

SEQ ID NO: 254635 - DNA, 122 bp, Homo sapiens
gtattattttaaaaagccttttaacgagcttttaacattttttaagtgagtacacttagacgaacataagtgtcagaattgacaaatccaggcctacaggactccagatcgagcacttgtac

SEQ ID NO: 254636 - DNA, 122 bp, Homo sapiens
gcagtacaaaggatgcatgtgatttcgaaatgccacaattgagccaactgcagttgcacgcgtacgtagtatagagaggtgtgatcaaaaaaagaatatagggagcatagggcttcgtctgc

SEQ ID NO: 254637 - DNA, 122 bp, Homo sapiens
gcaggctggggttggtggggcttgtgtttaattaacgcagcacacaaagtcttatgacgtcgttttactcttttctctcaggaaacaattctggtgaaatgtgatcgtcctggccaccctct

SEQ ID NO: 254638 - DNA, 122 bp, Homo sapiens
agcgggccaggggcattgctggggacccagaggatacctggcgccacaggccctgggacacgcagaagtctgctagaccctggtgctctctaagctatggatcctgcagggatacaggtgaa

SEQ ID NO: 254639 - DNA, 122 bp, Homo sapiens
atttcaactctgtgctgagctggcaaaagctctaaatcaacccagctctgcaacccagctcgcttagcttacccttcagatgttccagtagtaggacgactttgcaatattcactggcaacg

SEQ ID NO: 254640 - DNA, 122 bp, Homo sapiens
tcccgcggcctctggtcccccatggtggccctcgctggggtgccatctctccagttcccgcggttcctgatccctgccactctagtcgctaggagaccgcgagccacgcgcagcccaggttc

SEQ ID NO: 254641 - DNA, 122 bp, Homo sapiens
atccgattcccagtaccatagaagtgactcaaaccagcgattcaaccgacaagcaggatccgggccacccaaagccgcgcgagagtttacgtgacgacatcggcgtcagcgtcacggaggcg

SEQ ID NO: 254642 - DNA, 122 bp, Homo sapiens
gtgtgccctttgctctctgtgcctgtcattgcgagggtttctttgagccggtctgctgaccgtcaggcacttgagattgactcggtgaacaatgccgccagcctttctgatgcggctcctgc

SEQ ID NO: 254643 - DNA, 122 bp, Homo sapiens
agcttcgcgcagcaatgaataaataagtgctcttcaggggcacttactgagtgccggctgcgtacacaagaggatactatggtttttgggttttttggttgtttgtttgagatggattctcg

SEQ ID NO: 254644 - DNA, 122 bp, Homo sapiens
aaaaaaaaaagaaaagaaaaaatatgcatttgtaaatagaaagcaggcagagactgcagacgcaacagagatgatgtactggagaacaagaaaggtcctgagggagatgcagaattctgcag

SEQ ID NO: 254645 - DNA, 122 bp, Homo sapiens
tcaggctgatctagagctcctgggctcagacaaccctcccgcctcagcatccccaagtgccgggattaccgatgtaagccactacacccagctgagacttagttttttcatctggaaatgaa

SEQ ID NO: 254646 - DNA, 122 bp, Homo sapiens
taaagatctgagctgaaattaaatggtgggagtcaaaatccaaactggtcacgggtggaacgtacagtggtggtgactttttgctaactggtctttcctgcagcctacacctgtgaagccaa

SEQ ID NO: 254647 - DNA, 122 bp, Homo sapiens
gggaagcgtcgctcctgaaattgacaactttgagtgtggggttccctcccctgaccttgccgcccggctccggctttgctagcccagcggcccgtaggttctgatctgaaacttttcccctg

SEQ ID NO: 254648 - DNA, 122 bp, Homo sapiens
ctactcaaaacaacatttccatcgccccaaaaattccccttgctgcccctttgaagttaacgcccgcatctcatcgatgactattgctgtaggttaggtttgccttttccggaatttcaaat

SEQ ID NO: 254649 - DNA, 122 bp, Homo sapiens
agcaatcccgcttatcttcctacttggagcgccgtggctgcggccaaggccaacagcgggcgccggaaggctggatttccgccgcacgcacgcgctcccgcactcccacgggagactgcttg

SEQ ID NO: 254650 - DNA, 122 bp, Homo sapiens
ctcaggagggagtggcgtggctgttctcaggccccaggctagtggggtttctgggctgggcgggggctcagagcagagcccgcagaatctaacaccgccacccccctcccaccccaatccct

SEQ ID NO: 254651 - DNA, 122 bp, Homo sapiens
tatttttgattgtgaagcctcaaagtgggtaggtgctgctagcatctagtgtgtaaaggccggggatgctcctaaacatcctacaatgcacagaataggcccacatgacaaagagttgtcct

SEQ ID NO: 254652 - DNA, 122 bp, Homo sapiens
gggcctcctgctgcgtgtccacccccagctccatttgctgtgtgtttgtatgtgcacgcacgtgtgtacatagcagcactactggagtgggcagaactggccagcacctcctactcccccta

SEQ ID NO: 254653 - DNA, 122 bp, Homo sapiens
gaattggctttctgatgatcagcatttacaccagctagtctggtccccttaaagaaaccacgtaggtgaaggcctaggccacagcctgttgctgagggtcttcgaggcttcactgattgtct

SEQ ID NO: 254654 - DNA, 122 bp, Homo sapiens
cggtctgagaatccggcttgagtgttaaaggctaagcgtgtctagctggacccgtggccccgaagaagcgagacaaggcgacgcggagctgtccctgacaccccgaggaccgagggacagcg

SEQ ID NO: 254655 - DNA, 122 bp, Homo sapiens
cactgcgcaggctccaggaagaggcgcgcgacctgctggagaggctcgtgcagcgcaaggcgcgcgccgcggccgagcgcaacctgcgcaacgagcgccgggagcggtgagggagcaggccc

SEQ ID NO: 254656 - DNA, 122 bp, Homo sapiens
agaaaaactggtcccatccattgtcttaattgtttcagtgactttattatgaatggtcctcgcctctccttgggcaaacgggtaaatactggatctcggggtttgtactttagtttttcttt

SEQ ID NO: 254657 - DNA, 122 bp, Homo sapiens
ttggccccgcggtgtcctctgcccagacctcagcggattgctcgcttttatagagcttgccgcgttcccattggctggcctcaggtggcgtgatggcccactgctctctgattggcccacag

SEQ ID NO: 254658 - DNA, 122 bp, Homo sapiens
cgccctcctgtgtccctggtccctgctcagaaacctccgtgtgtcgttggcaaagaggagcgtgtcctggtccatgatgcagatgcagacacgggtagaagaggcagcaggtttgatgccgt

SEQ ID NO: 254659 - DNA, 122 bp, Homo sapiens
agaaaccatgcttttcaagatattcctgcctatatcattgtgttatttcttccaccagggcgcagcagtctggaaatagaaacaatggtggtggatcaattcaattgatccagatttggaag

SEQ ID NO: 254660 - DNA, 122 bp, Homo sapiens
ggctgggctggaacatgggggcagggccgcccacgcgggaaaaccaacggagccctgagacgtgtttttacttggatttgttggttgctttgggggtgcttttcgtagcgtcattcctttgt

SEQ ID NO: 254661 - DNA, 122 bp, Homo sapiens
cgggccccacccacgccggagctgctccatttaaggagattgcgcagctggaaagctacacgtgtgagcctagaggcgggtcccggttgcagacttgccatggcctccgaagcttctgtgcg

SEQ ID NO: 254662 - DNA, 122 bp, Homo sapiens
cacctgccccgggcttctccagctcctccaagatctgtttgcgaatggaaggcgcggggacggagtggctcctcttcagcaggggcccagcagctgccgggcggccgcccccgtgatctgct

SEQ ID NO: 254663 - DNA, 122 bp, Homo sapiens
cctagaaaagggcggaggtgaaaggatgcaacgcaacgctaatttcaccagcggaagaagcgggtacagaccttaatgagtccccgttttgatcgactgataagggaatggggaaattgaag

SEQ ID NO: 254664 - DNA, 122 bp, Homo sapiens
ctggaagtcagaaaagggctccagaagccacgaaagggctccggattcagcatccggaggcgagcagggtcccgcctccgtaatccagcgggggccagggagccgcagggggttccggagag

SEQ ID NO: 254665 - DNA, 122 bp, Homo sapiens
tgggttttcctggacccaataaatcagtgggtgctgaggactggagtgtggggcacagaacgtgaaattccaacaggtgccacaagggggcgaaggctctggccgcgggaggcctccagccc

SEQ ID NO: 254666 - DNA, 122 bp, Homo sapiens
gcgggtcagcccccgacgtttccctgttcttcaggcgtctgcaaccctcctgggttgcggcgtctgctcgcccttctgcgtccgcagctcggtccccacgttcccgctcgctgggccccaca

SEQ ID NO: 254667 - DNA, 122 bp, Homo sapiens
aatgggaaaaaaaatggtaaaattcaaattctgtagctagatgaattgatagtattatatcgatgttaatttcctgtgtttgataattatgatgtagaaatgtaagatgtgaacgttagggg

SEQ ID NO: 254668 - DNA, 122 bp, Homo sapiens
agttagcagtttctgaaagtaagtccagacaatatagttacatgaatttgctgaatgtggcgcctgttccaggctttcaccctgttgaaccgacatctcaaatggtgtgtggtcttgtcaga

SEQ ID NO: 254669 - DNA, 122 bp, Homo sapiens
ccaggctggtctcaaactcctggcttgaagtgctcttcccgccttggctttctcaaagtgcgaggattacaggcaagagctactgcacctggccctgccttgtttgagaagtctcttctacc

SEQ ID NO: 254670 - DNA, 122 bp, Homo sapiens
aagcaattaagtacttgcattcttgagggagccacttaaaaataatttgggggccaggcacggtggctcacgtctgtaatctcagcactttgggaggccaaggtggatggatcacgaggtca

SEQ ID NO: 254671 - DNA, 122 bp, Homo sapiens
taacctgtaggaaggtggggcctacgctggatgtgtatacacttggggtcttttcctgggcgtgcgacctgtgacttttgtcagaacctggtggtctgtgactcgccatagatcaagaacca

SEQ ID NO: 254672 - DNA, 122 bp, Homo sapiens
ggggacagagtgaaaccttgccttaaaaagactgctatggcccgagtccctctgctgtgccgggcactgtgctgggcatgtaacaggcatattcttctgatctttacaactctcccatgagg

SEQ ID NO: 254673 - DNA, 122 bp, Homo sapiens
taaagtccgccctccgcatgcatgatcagctctggcttcctgccgggctccatgtggtgccgcaggaagcggaagcccagcagcgtgagtgccaggaccaccttcatctcggccacggcgaa

SEQ ID NO: 254674 - DNA, 122 bp, Homo sapiens
ccttttctctgttgggtagggctagagcagctgtcttgtctcattcaaagccatggaagacgccaccgccagttacgctggtatttccaagcatcatagctttccttccctgtagctcaagt

SEQ ID NO: 254675 - DNA, 122 bp, Homo sapiens
aacaagaatcctctcctgatgcctgtagtctaggttaggaaatctctcttccctagaccccgctctttacccgctcctgctgcacaactgtaatccagtcatgaactgtgtgttttgaggtt

SEQ ID NO: 254676 - DNA, 122 bp, Homo sapiens
acgctgtccagaaaaacggaggcaaccccgagagccgccctgacagccccaagtgtcacgcggagcagaatcacctcctgattgagggcccctcggggactgtttctctgcccttcagcttg

SEQ ID NO: 254677 - DNA, 122 bp, Homo sapiens
ctgaggcagcgtgagttagggcatgcatctcacattttaatgtgcttgcccggaagatgacgatagtaaatctgggatgtctctgaaatgctgctggtctaacaagctcccagatgattcct

SEQ ID NO: 254678 - DNA, 122 bp, Homo sapiens
tcttttagcagcttcatttcatctttgaggtggctgtggttgtttttctcccaacaagggcgtgtgcatttgtgccgcgttctctcacgttcctttgcgttggaggacatcgcccctgtgtc

SEQ ID NO: 254679 - DNA, 122 bp, Homo sapiens
ggtgcccccttaggaggccacgcctggctcctcacagggattcgcaggtacaggagaagtcggtacaggccccacctcccgaggggcgtgggctcctttctcccgcccgtggtctgacgccc

SEQ ID NO: 254680 - DNA, 122 bp, Homo sapiens
tgagggcagcaattttcaaaatcatattcttactggaataatgcagactgccaggagaggcgaaaagatgtgtcaggatggggcaacaggaggaaagggaccgtcataactcttcagaatgt

SEQ ID NO: 254681 - DNA, 122 bp, Homo sapiens
gagctaagtaaaaaccaggtctattagtctattatatttaagacacaatgggaggcactgcgatacaaacataaacaggactcagcccttgcctgcctttagtgagattatgaactactgtt

SEQ ID NO: 254682 - DNA, 122 bp, Homo sapiens
tggagggaccctggaactgccgccggcctcagcccatggcccggaggtacgatgagctgccgcactacccaagcatcgcggatggccccgcagccctggctggcttcccagaggcagtgccc

SEQ ID NO: 254683 - DNA, 122 bp, Homo sapiens
atcttaccgtggtgtcgtcttcaacatcagcatctcattttctctgggaaacttaaaggtcgtcttgttctgtagagtcggaactgtttctggctgtgggctgtgcttgcctgctcagctgc

SEQ ID NO: 254684 - DNA, 122 bp, Homo sapiens
cacgccaaggaaaaccatgcagtcctcatctccctgggcttccgcttcagctgtgtacaacgaaggcaaagatgctaaatcttgctttgctttcaataaagtgtccagtgattaaaaaaaat

SEQ ID NO: 254685 - DNA, 122 bp, Homo sapiens
ggtattagaagtaggtagttcttactatgcttatctgtctttcttggcagttctaatacccgatttacaattacattgaactacaaggatcccctcactggagatgaagagaccttggcttc

SEQ ID NO: 254686 - DNA, 122 bp, Homo sapiens
ccctgcccgcaccccccagggttcctcctgaccgtgggcactagtgtcgctgcagccccccgggcagctgttcagcagcaggaagcagacaagcagctggagcccctcggagctcccaggcc

SEQ ID NO: 254687 - DNA, 122 bp, Homo sapiens
caccagacacagaggcccatgcagaaaggcggtaaggggcccccctggggtctgcacacccgacacagaggccctgcgagagggaggcatggagcgcccgcggtgtcggcacaccaggattc

SEQ ID NO: 254688 - DNA, 122 bp, Homo sapiens
ccgccccgcgggttggggcgcgacccgggttctcttgccactcacaaaaccagctacgaccggcccccaaccgcgagagctttctgggctgcgatctctgcccctgaccctcgctggtgctt

SEQ ID NO: 254689 - DNA, 122 bp, Homo sapiens
taagattagacagactattccctttgcacatgtctgagcaaacagaggggaatccctgaccgctgttggcccggtgaacatgggtgtgtgcagcctccccaacggatgaaatcttgcacaca

SEQ ID NO: 254690 - DNA, 122 bp, Homo sapiens
ctcaagcgctcctcctggctcagcctcccgagtagctaggactataggtgtgcaccaccacgcccaggcaatttttcaaacactgtagagccaggatcttgttacgtttcccaggctggtct

SEQ ID NO: 254691 - DNA, 122 bp, Homo sapiens
aattggcttgaaagtggattcttcccagagcttccagaaaggagtttagcatggccaatacgttggttttagctttgtaaagatcctgaacaaagaagctggctatgctatactcagatgtc

SEQ ID NO: 254692 - DNA, 122 bp, Homo sapiens
aaacaaaaatggatgtgtgctcaggaaaaagggggaaaaaaaccgtgtccagaaaatgtccggccgcacacatttcctggcgaacatttggaatctatagctttaggaaaaaccgatctggg

SEQ ID NO: 254693 - DNA, 122 bp, Homo sapiens
ggacggggctccgagtcgcgtgggctggggtcccgcccaggctcgcccttgtttacaactcggaggctgtctcaatgtcaagtactcctggccacaaactgtttccaagagtttggactccg

SEQ ID NO: 254694 - DNA, 122 bp, Homo sapiens
cttgtctttcggggaaagtagaaaccaaaaagaaaacggcagctggtcctaagaagatggcgtttgctccaaccaaatcagccttgctgcgttagaaaaagaacatgcacggagcgtgcaca

SEQ ID NO: 254695 - DNA, 122 bp, Homo sapiens
gccttgactacctgtttaatgcagcatatcttactctcgctggatacagcccagctggaacgttcatttctgtatgtaattcttcgttttgtgtcatcctctttgtatcaggtagaatgcct

SEQ ID NO: 254696 - DNA, 122 bp, Homo sapiens
aggtgcctaatgagagaactcgttcccctatcaaaaataaccgtgagttgtttcagtgggcgaaaagttctcagataagagagcttacttgaaaaatatttactatattatatatatatatt

SEQ ID NO: 254697 - DNA, 122 bp, Homo sapiens
ctcaggtgcagacaacaggagcacaccgccccttcctcgccgccacgtgctggcggctcccggcgaccaccgatgacctcacggccgccccagtctttagaaaaagggactgcatctcccag

SEQ ID NO: 254698 - DNA, 122 bp, Homo sapiens
aaggaaaaggaaaaaatggtgctaaagtcaccaagtcccacctactgggcagaattaaaacggacacaccacgcacctgcaaaacacacacactcactctcacacatacacacacccggagc

SEQ ID NO: 254699 - DNA, 122 bp, Homo sapiens
gctgcagcttcttggctctctcactcaatcccctacaccttctggggcctcccagattgacgttttcatttcccgggctccacgacacgcagggactgtgagtctgcttttcacacgtggga

SEQ ID NO: 254700 - DNA, 122 bp, Homo sapiens
ccattaagattcataggaagacccacaaaattaagaaacttacactggcaaaaatgccaccggctgtgattgaaagggaaagagacaagacaaaatgaaaaggagccttagaatccccatac

SEQ ID NO: 254701 - DNA, 122 bp, Homo sapiens
gagtctaaagtggttaaaaatcatttgccttccttctgggcggtgactcaaacttgtagccgggaaggaaggcggaggaggggagttcggggtggaactcaacagtagcagaagcgcggccc

SEQ ID NO: 254702 - DNA, 122 bp, Homo sapiens
gggagtggctgctcgccaggatgcttgtctgaagtcagtgtgcccgcctgcgggctgttccgtgtgcttgagcctggacagagcccctgccacgcactcggcagcccctgtgtccctccacc

SEQ ID NO: 254703 - DNA, 122 bp, Homo sapiens
tagtccatccgtccttggcacggtgactgccgggaggccaggaccaaatgtgtctccttccggcttttgcaccacactaactaaccggcgccaggccgcagagccgccctggccttcggcga

SEQ ID NO: 254704 - DNA, 122 bp, Homo sapiens
atgagataaagtgtgcaaatcacttagcagtgcctggcatatgaaaggtccacagctaaacgcagttattgtcatttttacggctgttggtgtttaccagttcataggctgagcattgttta

SEQ ID NO: 254705 - DNA, 122 bp, Homo sapiens
gtggcgtgcttctggttccccgccccatcccctgggtctacacggctaccgtcacgcctgcgctccactgtatcaatactgcacccatgtgacggggtcctgacatcaggtggcgtgtgccc

SEQ ID NO: 254706 - DNA, 122 bp, Homo sapiens
gacctctgtttcctgggccctgagatcatggcactgtcagagcccactgggaaggacaggcgcaggtgattatttatacaagtcttttctttcagtggactatttacgtactcccaacactt

SEQ ID NO: 254707 - DNA, 122 bp, Homo sapiens
tcttgctgagctcaggcctacaaacccaggttctctagattcttagagctaaaagggcctcgaagctatgctttctccatttcacgggtgcagaacccgaggcccagaggcaggatacgact

SEQ ID NO: 254708 - DNA, 122 bp, Homo sapiens
caccgtaggggtggggcaaagtctttctaggcggttggggagtgaggatttttttggtgacgtccaagcccatgtgcttggagagcaaagcctgtaagttctttaaagctgattagtcagcc

SEQ ID NO: 254709 - DNA, 122 bp, Homo sapiens
gggcctatttcagtcgggggacctggactgaactaactcgtgttcatggccgccaaatcccgtgtgacaaatgtattcttttgttgttcatagaaataaaacagtttttcgggccgcttcag

SEQ ID NO: 254710 - DNA, 122 bp, Homo sapiens
cacctgtgttccaggaccaaggggcttgccctcctgcaagcgcgcctgtgaacaagtccccgtggggttctgggaggtgcgcccacatctaagactgtgcgccctgcactccctctggatgg

SEQ ID NO: 254711 - DNA, 122 bp, Homo sapiens
gctctttaaacctgggagacttgtaattgtgtacctgtttgcattgtttagcctatgcatcgcagattattcattttactaacaggactcaaaaacagctgtaattttcaaagatgcacgat

SEQ ID NO: 254712 - DNA, 122 bp, Homo sapiens
ctggatccagtcggctgcaccaggcgagcgagacccttccctggtggaggctcagagttccggcagggtgcatccggcctgtgtgtggcgcgaggcagggaagccggtacccgggtcctggc

SEQ ID NO: 254713 - DNA, 122 bp, Homo sapiens
ggaggtgtgcaggtgagcgtgagcgggcccgggtgcctggtgtgggtgttgcaggcagggcgggtgctgcggggcacgtgggcaagtcccgattcacgtgggcacgctccgagcgtgagtga

SEQ ID NO: 254714 - DNA, 122 bp, Homo sapiens
aaagcagccaacaaagccacagccctatcggctgtactgggctctgccttttgggcagctcgccggccactccccaaaagcagagcattccatcctttctctttttaaacccacgtcatcat

SEQ ID NO: 254715 - DNA, 122 bp, Homo sapiens
gggtccagccaaaagcggacacacctcgaagctggcctcatcaatcctcctctcaccgggcgcccctgctagggggatccgacctccagctgccaagatgtgtgggcaggaggggcgcgagc

SEQ ID NO: 254716 - DNA, 122 bp, Homo sapiens
gatgcagacagaggcagcaggttcggcccagtgctcaggacagagtctgcagccaaaactcgggcttcatccctgcctcttggggctgaccaagagaaggactctctccccctgcatgaggg

SEQ ID NO: 254717 - DNA, 122 bp, Homo sapiens
ccctacgcgaggcactctctaaccaatgggaaacgtggtgggcggagcgagagtgacagacgattacagagtcctcccgccggcgcgaacgggcggtgcagtagcagggccaatcagcagcg

SEQ ID NO: 254718 - DNA, 122 bp, Homo sapiens
taccctggagtctcttgtcctcctccttcagacagagctgccaagagcaatagctttatacgcagaagcccatccacttctggtggctttatgtactggggcccaccctcttctgcagccga

SEQ ID NO: 254719 - DNA, 122 bp, Homo sapiens
acaccttttgcaaagtatcacttgtggtgtacggggaagcagctgtaatgctgattccgccggcatttctcactcaatctactccatgctaaacaggccggttaggaattaagtcatactct

SEQ ID NO: 254720 - DNA, 122 bp, Homo sapiens
caccggccatggcttttctctcctacccttcttgtgtgggctgaaactgaaagtatgtttcgccttcctttttggcagggcgtgtacacatattgggaaacacccactgcacattcatatgc

SEQ ID NO: 254721 - DNA, 122 bp, Homo sapiens
ccctcggcgccgcagacacctgaggaccaccggccatcagcgacccaggccccgccccaacgccggccgccggcccactgccccagtcgcgctctcctcagcacctaggaccaccccgcatt

SEQ ID NO: 254722 - DNA, 122 bp, Homo sapiens
ccccatgaaaggaatgaaacaaaggttcatgtggacccctagcccaaggcctaacgcatacgtgccctcataaatgactggtggtggtggcatcacggcacgatgtcaagggcccagcacag

SEQ ID NO: 254723 - DNA, 122 bp, Homo sapiens
cagacacgggaggagccgcagacagacgcgggaggagccgcagacagacgcgggaggagccgcagacgcagggggagccgcaggcacagggggagccgcaggcacagggggagccgcagaca

SEQ ID NO: 254724 - DNA, 122 bp, Homo sapiens
tgtcatagggcggaattgagcagctgtgacgggcccctccctggggccagcacagtgcaacgttccctctccagccttgacccaggccccgcctgtgccccgcgtcgctgcagccggcaggg

SEQ ID NO: 254725 - DNA, 122 bp, Homo sapiens
ccacgcgcatcctcagctgggcatttccagagggagcaagtctctgagaggcaggtctagcgctaagctttcaacaagtcgcaggctatacttccgaacacaaagaaatgagaatgacttca

SEQ ID NO: 254726 - DNA, 122 bp, Homo sapiens
tctctgggagccacccgtgccctctgctgaaggatctgagggcttttgccctgcggtttccgggatggggaacgtctagaccagggactcaaacggacagcagggggcactgacgcgcggca

SEQ ID NO: 254727 - DNA, 122 bp, Homo sapiens
ctgtgcctgggcaggaaatgtgctggaggctggctccgcttcccgctggagaccccggggcggccagttcccgtgggggacaggacccccctggagcgggggcggccgagagacgcgcagca

SEQ ID NO: 254728 - DNA, 122 bp, Homo sapiens
aggggccccagagggcagaaaagtcatcctcacaccccatatcctgttatctccaaggaccgctgtaatttgctcttgactcccttgaatctgcccccttctctcctttcctgtttccctcc

SEQ ID NO: 254729 - DNA, 122 bp, Homo sapiens
acagcgccgcagaacgccctggcctccccgcccttccccgggcgccgccctgcccgggtccgcgctcgcgcccagcccccaccccgcctcctgggcagtggaggtccctgggggcccggcca

SEQ ID NO: 254730 - DNA, 122 bp, Homo sapiens
cgggagcgggcaggagagacagggtagtgacccccactcacaccagaaaacccctccccccggcgattttgctgccaactcgagtcggctacagacagtccagtgagtccttaattacaagg

SEQ ID NO: 254731 - DNA, 122 bp, Homo sapiens
tctctctacgtcggcagggggcgctgcacagctgcggggcggggtagcttagacacggggcgtccggctaaggccggggacccagggtggtgggcggggtgtcccgcccgcctgtggacccc

SEQ ID NO: 254732 - DNA, 122 bp, Homo sapiens
tgtactgtgctgatggtactaagttgctcactgcatctctcgttccacggcctccgggctcgcccccagaagcctgttcctgagctgattggggttctgggccaggggtctcgaggagtgag

SEQ ID NO: 254733 - DNA, 122 bp, Homo sapiens
tcttttccaccacgagttcggcaaagcgggagccgtcgccgcgcgtcttgatctccaggccgaacagctcgttgggcgtgagctcgtaagtctgcacgccaaagcttcctgagtctggatcg

SEQ ID NO: 254734 - DNA, 122 bp, Homo sapiens
gaacacagatcggtaaaactcgcccggctgcgttgacgtcgcaccggcgcgcgtcgcttgcggccaggaaccacgtgactagcgctggccaaccagcggcctcgtaacgccgcgcccgctcc

SEQ ID NO: 254735 - DNA, 122 bp, Homo sapiens
aaggtgattttcaggctgtgcccactgcgtgctctgcagaaccggaacgcccagcattcccgtgtgtgcaaatctgtgacacagaaacgtgtcagtgggaaaccccaaccccaggtgcctcc

SEQ ID NO: 254736 - DNA, 122 bp, Homo sapiens
cccgtccacccacgtagttcagctcgttccagggcgtggacaggggctcagaggacgcagcggggggcacgaaggggtcgctgcgcatgaaggtgccagggttgctccggtcctggaagcgg

SEQ ID NO: 254737 - DNA, 122 bp, Homo sapiens
ccagaggcaggcgctggagggtgccctcctgtagggcattttcacagagggtgcaggtgccgtcgggccgcaggaacctttgtgtgtccactgggaaggagcccgagcggcggaggctggtc

SEQ ID NO: 254738 - DNA, 122 bp, Homo sapiens
gataagaggtaaataatcaagtggaaatcactcaaagaagcgctttcctcccccaacagacgccgaagtctttgccgtggcacttatggggtgctctaacttctcagcgctggccgtcacca

SEQ ID NO: 254739 - DNA, 122 bp, Homo sapiens
tagcctgccccaggagaagctggttcatttgttgattcaaaaatatttgccaccaagaagcgtgttctgaacatatactccagttaacatttcagaggttcactcaggactagtccaaggtt

SEQ ID NO: 254740 - DNA, 122 bp, Homo sapiens
ggccagtgtgagggaagagctggtatccaagggacagggcagtgccaggctgaaggggcacggaggggatccgtgtccaggagaaggcagtggagggggaacgcgcagcactaagctggagg

SEQ ID NO: 254741 - DNA, 122 bp, Homo sapiens
ctacttgcccgaaggtacggggagccaggacgacccccggtggacagggagagcctgagacgcccttctcttgacccctgagaacatacccacttctggctcctcaaggagtctcccctctc

SEQ ID NO: 254742 - DNA, 122 bp, Homo sapiens
ttggataacttggccgagatggtccatttagcagtagcagaggcatggttagaacccaggcggtctataccagagctggcagatgccccttttatgcacccctgcctccctctcaatgtcca

SEQ ID NO: 254743 - DNA, 122 bp, Homo sapiens
aagagcccgggtgcctagcactcggcagctcacaggagctggcggaggcggaggcgggcccgagctcggaccccggccccgccccccgacccgccgagcccgccccctcctgggcggtgcgt

SEQ ID NO: 254744 - DNA, 122 bp, Homo sapiens
ggctcatctttaagtgaagagtgcgctggcgggactgtgaggcttgaatgaggtgtgacacgcagctctaagcacggcacgcagtagtctccgctcactgcgggtctgtcatcaaaaacact

SEQ ID NO: 254745 - DNA, 122 bp, Homo sapiens
gtttcagaaacacggaccaattaagtggaatctcatcattttgacagttaaataaaaatgcgatgggtacgcaacaggcaagtttaagttggaagttttctaaggatatactaaactactac

SEQ ID NO: 254746 - DNA, 122 bp, Homo sapiens
ccggacggacggactgggccagggtcgggccacagccaagaacagtcggccacggcgtcccggggcccgggccgtcctcctgtctgtcatctgtctgtctgtcagcctttctggccaccctc

SEQ ID NO: 254747 - DNA, 122 bp, Homo sapiens
caccttctggtgtttccccttccaaggtcttagagggcagtggtgcttcacgggactccccgcagcgatcttggctccagcgtgaaggtaaatatttaccacttgcctgggtctgggccaca

SEQ ID NO: 254748 - DNA, 122 bp, Homo sapiens
tgccaaggagttttaggaaagtgactccagctaccggctggccctttttactttttagatcgcaggcacccgcaatcacctgtaagcccgggggcgcgagtgagactcagggcctggtagga

SEQ ID NO: 254749 - DNA, 122 bp, Homo sapiens
gcgccgccgtcctcccgacctgggggcacggggatgagagcgtgaggggagagtgggcctcggaccctcgcccactccccaggtggctgggagtgcccaccctggaactgccggccccgccg

SEQ ID NO: 254750 - DNA, 122 bp, Homo sapiens
agggaagttaagaacggttttccagcttcaggaaactccggctcgcctcacgtcggagctcgctcggcttgctaaatgagaggagctttgcaacggggtcaaccagcttgtctcgtgacccc

SEQ ID NO: 254751 - DNA, 122 bp, Homo sapiens
tattgctaaaatataatgtattgcctgatacacatgaaatgtttagataatatgtgagttcgcctaatgtttggataatatgtgggtttcacagctaggtctagctaccctgatcatctaag

SEQ ID NO: 254752 - DNA, 122 bp, Homo sapiens
gctgcgagaccaggggccggtgaccccccgcgggggaccgagcgaggatggggaagtcagcggctttacctgcgatggaccaggtccagcggtagaactctaccgtgtcgttgagtgccgtg

SEQ ID NO: 254753 - DNA, 122 bp, Homo sapiens
gacgacgacgacgactgatccatgagtatgatggtgacttaacatcagccacggcgatgacgccaacagatccatgagtatgatggtgacttacatcagccacgacggtgacgccgacagat

SEQ ID NO: 254754 - DNA, 122 bp, Homo sapiens
ggctcggagcagacgaggtatccggcggcgcccatttgggggcttctaactctttctccacgcagcccctcttctgtcccctcccctctcgctcccttttaaaatcagtggcaccgaggcgc

SEQ ID NO: 254755 - DNA, 122 bp, Homo sapiens
cactgtgtggaggacactcccctcccagtggccactgtggaggcatttcatagaaatgctcgctggaccattcagttttagagttgggacaaaaccgagaactcatgaggatattggatagg

SEQ ID NO: 254756 - DNA, 122 bp, Homo sapiens
aagtgaaatcatcctttgccctttgcctggccccaaatccagagcttcagccccgagtagcggaggagttgcagcgaagtctgagacgccgcacaaggtgcttttgcaaagtttaggatcct

SEQ ID NO: 254757 - DNA, 122 bp, Homo sapiens
tgtaaagcacccaggagagctggctgcggccctgatagctatcaggacagtttctttgttcgtggcctcaaggtgcagggagtggaagatactccgccctggctcatgctggttgctcagcc

SEQ ID NO: 254758 - DNA, 122 bp, Homo sapiens
tgccctgcagggtgctctccagcagtggctggggcctgcgtggccttggcgggccaagatcgccatcggcctgctggagttcgtggaggagctcttccacggctcttacgggactttctaca

SEQ ID NO: 254759 - DNA, 122 bp, Homo sapiens
ttgttagggaagccagagagaaacttccttctactgagctggagaaacccgtgttcccctcgtttagcatcagaatgtcctgctgtgctatcaaatgttgttgaagttgaaggtcaggcttc

SEQ ID NO: 254760 - DNA, 122 bp, Homo sapiens
agccaagagcagtgcacactcatggcagagatgcatgttgtgcttttgaaagcagttctgcgtgaagaagacacttccaatactacctttggacctgctgatctgaaagatagcgttaattc

SEQ ID NO: 254761 - DNA, 122 bp, Homo sapiens
catgactgtgaattggtaagtcagactggtctgctgacaaaacttcaataattaatagtacgtaacaatttaagtctaggaatacccagaagtctcaacagaagttctcaagaggccacaca

SEQ ID NO: 254762 - DNA, 122 bp, Homo sapiens
cctcttcgatctacaaggtcatgttatgcctatagaggtcgcatttgcagggcctcaccccgggtagagggtcctctccaggtttttacggcctgtccccgctctaagggtcagtgcaggag

SEQ ID NO: 254763 - DNA, 122 bp, Homo sapiens
cacaggcttactgtgatgaccaaggacaataacagagagagctcttagcaaactgtaaagcgctacacaattctagttattactgagaaagaacaccattcctcacctggaagagcagatag

SEQ ID NO: 254764 - DNA, 122 bp, Homo sapiens
tccagggtcgggggtcaggccaggaaagccccttgggaagcccccggggagcagctggagcggggtcgccgggcggcgggaaggagtgggcgcctctatttaagcggcttccccgcggcctc

SEQ ID NO: 254765 - DNA, 122 bp, Homo sapiens
agaggaggtgctgtcgccagagcatgccctcaaggtcatgggagaagtttttccggaggacgagaatgtgggtgtggctcagagaggggggacctggagggaagggtgtcacctggaaggaa

SEQ ID NO: 254766 - DNA, 122 bp, Homo sapiens
cggaaagcgttttctccatttggtacaatcactagtgcaaaggttatgatggaaggtggtcgcagcaaagggtttggttttgtatgtttctcctccccagaagaagccactaaagcagttac

SEQ ID NO: 254767 - DNA, 122 bp, Homo sapiens
gactggaaccggaggagctctaggccaaatggttgggccagccaggatcccaggacccttcgccgctcgagaccggagagaggaaacgaaacaggcgggaacccgtgggggagggagggaac

SEQ ID NO: 254768 - DNA, 122 bp, Homo sapiens
gcactgagcagttgtgttttcccctatacttcagtggaatccaaatttgaaagaatggttcgtcctcttctggtagccttagaaattcttacagtaaggatgcactagtgttcatttttctc

SEQ ID NO: 254769 - DNA, 122 bp, Homo sapiens
ccagtctatcattgttggacatttgggttggttccaagtctttgctattgtgaatagtgccgcaataaacatatgtgtgcatgtttctttatagcaccatgatttatagacctttgggtata

SEQ ID NO: 254770 - DNA, 122 bp, Homo sapiens
caaatccaccaatgggcacacagcttaggctcgaaccagccaatcggaatgcggagtcaccgggaaatttaaatcgcgccggccggctgcacgagccacacggtctttgagctgagtcgagg

SEQ ID NO: 254771 - DNA, 122 bp, Homo sapiens
gttacaagtgatccacccacctcggcctccccaagtgctaggattacgggcgtgagccaccgcgcccggcctggatttatgttttaatttattttgaataaatacctaggtgagaaattctg

SEQ ID NO: 254772 - DNA, 122 bp, Homo sapiens
tcgtactctccatcttgttatcatagcatctgatgtcttcagtccttccaggattctgtgcgcctttcccattccagatacagcagatcgtactgttgctccttgtgaccaaataccatatt

SEQ ID NO: 254773 - DNA, 122 bp, Homo sapiens
ctatatttgaaacataaaccaagtcataacacagtaatccagcccttatcttgttgcagtcgtctgctgtagggtcagccactctctatggagtaggctttctcttgggatagggcttaggc

SEQ ID NO: 254774 - DNA, 122 bp, Homo sapiens
tcgccggggccgggccggcagccatgggcgtaggagcccaggtggtggctctgaggccaacgggctggccctggtgtccggctttaagcggctgccacggcaggacgtgcagatgaagcctg

SEQ ID NO: 254775 - DNA, 122 bp, Homo sapiens
tgagagctcttaacccatgttctgggggtacttacccctgaagttttctgccagtgtgcgcgtgtgcccgcaggtgcacacattcccaagcatctgttcagttcccgagtatgggtgaggtc

SEQ ID NO: 254776 - DNA, 122 bp, Homo sapiens
tgggctgtaaagcacactaaactgggaggatgagacatgtgagggcaagagaggaggcatcgccatgagggcaaagtccaaatcctgtgccaaagtgaatcttccacatttaggccagggtt

SEQ ID NO: 254777 - DNA, 122 bp, Homo sapiens
gtagtctgctgagcggaacggagcttggggagcggcgaggcattaacgattaagtggagccgggaaggcgctggctttggtgatgtgttgggtttggatgtgtcgcgtctgcacagatgagg

SEQ ID NO: 254778 - DNA, 122 bp, Homo sapiens
tgagcgcagccagaagccctggccagtgaggagctcacaggtcctccctggtggtcccgccgcacctctgcatctcctgggcgtcaccaggaaggctctgaagtcccgggctgctctcagca

SEQ ID NO: 254779 - DNA, 122 bp, Homo sapiens
gtccacgctcggcagagccgttccgagagcacagaggctgtcttcagtgcgcgggtgacccgattttggagcagtaggggactggctgccgagggggcatctagattgagataggtgggagg

SEQ ID NO: 254780 - DNA, 122 bp, Homo sapiens
tgaatgggatgtcctctatacacagggcaactccataattcattgtccagctttcactttcgagaacagcagggggtgttttcatgtgtataacaggacaggcttaaacaggtttgtacctg

SEQ ID NO: 254781 - DNA, 122 bp, Homo sapiens
aactccatttttaaacatcttcttctctagaagccatgtgcacatgtgtgcttgcacaggcggaggcacatcccaggcagcccgcccccgccaagcactgtctccgtcacacgccaggcaca

SEQ ID NO: 254782 - DNA, 122 bp, Homo sapiens
acccatcgaagaccgtgaaccaccgcaggtccgatcggggagttccagcccctggcggcgcgctcaaccccaagtcagccctgcactgactacattgccagggccagcggggcctgtttcgg

SEQ ID NO: 254783 - DNA, 122 bp, Homo sapiens
tatggcattttgccatttggccagtttctgtcatgtgcaaatacgagagtccttactgggcgctccagaagtggtgttgtccagagcagaggggcccagccttgcttcttgcccctgggctg

SEQ ID NO: 254784 - DNA, 122 bp, Homo sapiens
gcgtctggcggccagcgtgagcggcagcttcaccctcatgcgcgacgagcgggcggcgctcgcctccgtgggccacctctacggaccctacggcaaggagctgcccgccatggggtcgccgc

SEQ ID NO: 254785 - DNA, 122 bp, Homo sapiens
agactctgcgctgcaaaggagtgtcgggattagggtcccatcacccgggttcttgggtttcgagagtccccaaaatttggtgcaaaatttgtgtgtgtgtaggtggggagtggatattgcct

SEQ ID NO: 254786 - DNA, 122 bp, Homo sapiens
aaaatgtatcttggttgtgggccatgggaacttaacaagtcagcaggccacagtgatacacgcataacagctgagcaggcaggactgtttaaactggccagctatcccaactggccaagcac

SEQ ID NO: 254787 - DNA, 122 bp, Homo sapiens
cggagccggcctgagcagcgctctcggttgcagtacccactggaaggacttaggcgctcgcgtggacaccgcaagcccctcagtagcctcggcccaagaggcctgctttccactcgctagcc

SEQ ID NO: 254788 - DNA, 122 bp, Homo sapiens
atcagcggcttctctgcaccctccagggtgcatggcggtgggcggggggctgcgagggaccggagggtgtggggagaatccgtgggtggggaggagctggccttttgggtacagcggctgca

SEQ ID NO: 254789 - DNA, 122 bp, Homo sapiens
accggtctgcctttaattttacccaggaaggactcacattggggcgaatgaaccaagtttcgccatgctggatgatgaaatggattcccatcccaaagtctgagatggattgcatatacagt

SEQ ID NO: 254790 - DNA, 122 bp, Homo sapiens
ccatggccaccgagcaaagttccaccgcctcccctacgccgaccgccgggctcccggggtcggacagccccgggccacttccgggccttcccggaagtccctgtcacttaacaaccgaagta

SEQ ID NO: 254791 - DNA, 122 bp, Homo sapiens
accagaggcagcctgaggcccagggcaaccaggtggctgcttggtattctgctcaggcaccgctgcatcctgcctcctggcttctctgctagaggggcctcctcccccagcccagcctgggc

SEQ ID NO: 254792 - DNA, 122 bp, Homo sapiens
ggtaaagttggggaatggtaagatagttcgctgcatttttaatggaaggaaaacaaaaagcgactacgcgtaacagtttttacattatatgccttcagtgctgtgtgctgtcaccccacgtg

SEQ ID NO: 254793 - DNA, 122 bp, Homo sapiens
aaatacaaggtatggactaaaatccaaagctcttctgttggccaaactgtaggcaaaacacgtcgccccaaacccggccggtgggaatgcaaaataagaccagttatacgagggaatttggc

SEQ ID NO: 254794 - DNA, 122 bp, Homo sapiens
aggcagaaggcctgcctagaaagccctggaccttgtaccctcatggagcctggttttctccggcaggaagtaggtggtcctcacggaggaggtactgggagctaggagatcctggtgcaccc

SEQ ID NO: 254795 - DNA, 122 bp, Homo sapiens
atgatactcattctcttttcctctgttcataaagtgatcattgcctgagtgaaacagtcacgagagagagagcgagggaagaaaggagggagggaggaaaaagtgagggagtgaaacattag

SEQ ID NO: 254796 - DNA, 122 bp, Homo sapiens
cccggagcttgtgcctcggaggggcagaggccacaggcaggagctctgcgcggctctgcgcgccttcgggaccccctggccccggatggcttcggagcccgcaggaccccctactcgctccc

SEQ ID NO: 254797 - DNA, 122 bp, Homo sapiens
cacgcggatgtggttaatctgctgaagaacgcctacgggcgcattatcctgcaggtattgcgatcaacggagcacgcagctgtgcaaggcagataagtggcatgcaaaaaagattgagcgtc

SEQ ID NO: 254798 - DNA, 122 bp, Homo sapiens
gtgccttaagaaccgtgacctcatcagtcgcccatttagcattgttaagatctgtgaacgcgtgttgtctcaaaccagtcagggccgtcatgactacgcagcagcagcagtttccaagacgg

SEQ ID NO: 254799 - DNA, 122 bp, Homo sapiens
acaccagtgctgtttcctcaccacagaggttcctgaggtcacagtgttttccaagtctcccgtgacactgggtcagcccaacaccctcatttgtcttgtggacaacatctttcctcctgtgg

SEQ ID NO: 254800 - DNA, 122 bp, Homo sapiens
atgctatggattcatctactctcttcttggctgtcgagaccctgggtctgatttacattgcgttctcggcacctagcccagcaccaagtggcccctgcatttgtccacagactagatgtggc

SEQ ID NO: 254801 - DNA, 122 bp, Homo sapiens
ccccctcggcgctcacacgcgctcagccttcccggctgttgatagttgtaagcggagctgcgcactcataggtccaacttgccagaagaggtggagacagcccccggcgaggcgcgcacacc

SEQ ID NO: 254802 - DNA, 122 bp, Homo sapiens
cgggcctgggactactttctacatctggcccttggtctgggccagggaggtcggcgcggccggcggagggagacgctgggagggggccagtggcggccgggtcggagccctgggggaagggt

SEQ ID NO: 254803 - DNA, 122 bp, Homo sapiens
gctggggaccataagtgacttccttctctctcgacagttgctgatggagacggtgggctccgacatccgcagctgccccctctgccagctgggtttccctgtcgggtacccggatgatgccc

SEQ ID NO: 254804 - DNA, 122 bp, Homo sapiens
aggctcagccgtggggaccgcggacgcgcttagcctaggtctggcctcattcatttcactcgcgcgggcttctgggccaggcggcctaaggttctggtcccggcgctgccccttactccgtg

SEQ ID NO: 254805 - DNA, 122 bp, Homo sapiens
tgcggacaccacctgaatcccgtcaaagcccacattgattctcaacatccaccagcaagacgtattccagggcagcctctcaaaactgcctcagtgagacaggacaaggtgtggtggagctc

SEQ ID NO: 254806 - DNA, 122 bp, Homo sapiens
tcctagtgatggaagctggatccagggttctgatgaccctgttaggcctcctatcctaagcgcttctcccctcaacttttcaagcccagtaccaatgccacctcctccaagcagcattcccc

SEQ ID NO: 254807 - DNA, 122 bp, Homo sapiens
gagcgtttgtaaaaccaggactttgaagccaaaaggtgccatccgatgtgaaaccaggcccgcatgtttataaaatccctgatcataaatattaaagctgcaggtggcacggggcagggctg

SEQ ID NO: 254808 - DNA, 122 bp, Homo sapiens
ttgagggccgtgcctataaataccgcatctttcatcctccagttctgtttgtttacttggcgagacttggagctgaggtcatttggagctgtttaatactgaagagctgttgagcactggaa

SEQ ID NO: 254809 - DNA, 122 bp, Homo sapiens
gcctggcccactgggcttttcgcatctggggatctggggccagtggaggtcagccaggtccgcgagcaacctgtgctcaggccagcggaagcctgactccaggattcggtggtgccacagac

SEQ ID NO: 254810 - DNA, 122 bp, Homo sapiens
gcaggccgggggtgtccgggaggtctttgggcatcgcggtctggggttgggacgtgtaagcgcctgggagagcctagaccaggctccgggctgccaataaagaagtgaaatgcgtatctggt

SEQ ID NO: 254811 - DNA, 122 bp, Homo sapiens
atccatctggcttatgagagaggggcgtctggagccgtcatctttaacttccccgggacccgcaatgaggtcatccccatgtctcacccgggtgagtgcagctactagattgcacccctcca

SEQ ID NO: 254812 - DNA, 122 bp, Homo sapiens
gtagtagctatgtttagtggaagccctaagcactctcctcctagcctaccttggaaaagtcgctcggggcaccaagcaagacaaattttccccttgtcgttagtcctcctagtcccgaggca

SEQ ID NO: 254813 - DNA, 122 bp, Homo sapiens
ttaggatttcagagacccagatcttttggcagatagctaggtcctgacgccctttgaaatcggaatatagtacaatgaccctctggggtaaaccttcccattaaatttgcaattcttcaatg

SEQ ID NO: 254814 - DNA, 122 bp, Homo sapiens
agcacctgggacaccatgccggctgcgccccggggctggtgagcgccccgctgcaccctgcgcgccccggccggatctccaggctccctcaggtctaacacccgggcccgcgggccgcgccc

SEQ ID NO: 254815 - DNA, 122 bp, Homo sapiens
tattttaatcttcttccacctttaaaatgaatgcaattatttcaggagcacaagaattcccgaatctacgtttttgtcactctcatcttccaaagcccactgtcttctttcacactcctagc

SEQ ID NO: 254816 - DNA, 122 bp, Homo sapiens
caggcttccggcccgcctggcgcagccttccccatccagctgtggatccgtcctgggatgcgtgtcccggcctgctgtctctccgtcacagaagggaatgttagaatcccgagagagagctg

SEQ ID NO: 254817 - DNA, 122 bp, Homo sapiens
atgacgagcccggggcgtgacggggtggagcatccccaaaaaagtgcatgcctaggatcccgcccagtgtatccctgcgcgcggcgggccgggctgggcagctttataaacagccgtggtgt

SEQ ID NO: 254818 - DNA, 122 bp, Homo sapiens
ggtgagcgtttggaacccaggactcagaccgctagctgagggcctgtgcagctctgggcacgcgagcgcggcgccggcggcggccaggcacggtcctcccgcaagggcagggctgtcgacct

SEQ ID NO: 254819 - DNA, 122 bp, Homo sapiens
actggggaccagggggctttaattgttcatccccggcctggcgaggttgctgggggttggcggggagtgggggagaggcagccgcaccgctcagccgccgcggggtcaccgggcactggagc

SEQ ID NO: 254820 - DNA, 122 bp, Homo sapiens
cggccccacggggagagggggccggcggcgtgcttcacccctccccagacacacacgggccgtgcgaggccagagaccaccacacaggcccggacacgaatggcaagaccgagtccgagggg

SEQ ID NO: 254821 - DNA, 122 bp, Homo sapiens
ttttaaatcaggaagagaagtttctgtcctacttgaacccagcttcactctcctcctgggcgaaagctgagaggcctaggtgtgcccagctctcagttaactgaagtcacgtggtggtggac

SEQ ID NO: 254822 - DNA, 122 bp, Homo sapiens
tcaactgagcgtatagctcccctaaatgcacaatcagaggcaagacgcgggctccagtatcgccgacagcctcaaacccggcaacgcggagcgcgcccggcagactacgctcagaattcagc

SEQ ID NO: 254823 - DNA, 122 bp, Homo sapiens
ctgcatttgagtctcatatatctttaagatgtaaaccccttgaaaacagaggccaggtcacgtggtatataatccctgtccccaatcccatctattcatgtagggctgagtacagaataaga

SEQ ID NO: 254824 - DNA, 122 bp, Homo sapiens
tgcgcactggcgtgcgagactcggcgggcgctgttgagggagtcgggccgcgactgtggtcgtttttataccttcccgcgcggacgccggcgctgccaacggaagggcgggtagggcggtgc

SEQ ID NO: 254825 - DNA, 122 bp, Homo sapiens
ccgccaggcagcctgaccttcttcttctcagacaggtcgttccacattcgggccagcaggcgggtcagctcgctctcggagagctcaggccgctcctcctgcagctgccgccgtttctcctc

SEQ ID NO: 254826 - DNA, 122 bp, Homo sapiens
acctttgccattttagaaccatcttgtaccaaaccctaaatgctccggtggtgacgtgcacgcgcgtgcacacacacagacacacgcgtgcacacatacacagacacgcgtgcagagacacg

SEQ ID NO: 254827 - DNA, 122 bp, Homo sapiens
tttgtgatccctggagctctgtatgactcacaaatgcgtagtaggttaggactgaatctgcggctctagtgccgatggcctcccgcctccaggatgtccccaaggcgggctccagcgaggcc

SEQ ID NO: 254828 - DNA, 122 bp, Homo sapiens
caggttttccagggcagccttgtggattgggaccacttcctttatgatcctggttcttcccgttgtctttgagacggagaagttgcaaatggagcaacagcagcaactgcagcagcggcagg

SEQ ID NO: 254829 - DNA, 122 bp, Homo sapiens
cgaaaggggaggaattggactcaagggggtgctgtctaccgtggtttccgctgtccctcgcgccacagaagaggccggagggggaccggcctgacgcgggtgggcaaagagcgggcagagaa

SEQ ID NO: 254830 - DNA, 122 bp, Homo sapiens
tccagggggtcctcaggaagcaacctgagtaaggaaatcccaccagagctaaaggacagccgcaaggctagccaagcaggtttccttccttcccagagcctccactgtgaagtgggaggttt

SEQ ID NO: 254831 - DNA, 122 bp, Homo sapiens
ggcaggccggggctggagtcgctcttgcgagagtcctgagctctggaagtgagggctgggcgttgggcacctggttcagggtctgcccgcgtttgcgcactgacttcatgatctgtgagccc

SEQ ID NO: 254832 - DNA, 122 bp, Homo sapiens
tctcttccctcaggtgtttaagacacttaatggtccccagcactgggccccggggggcggcgggcaggccgggtgtggcccgcggggcgccgtcccgcccgagctgcccatgtcgctcttgt

SEQ ID NO: 254833 - DNA, 122 bp, Homo sapiens
tttcctctgcagagcaagcgcccctcccagcacaccagacactcacggccgctgctcctgcgtctgcccagcacaagctgtcaccgtctaccaacctgtgccctgcagggacacccccagcc

SEQ ID NO: 254834 - DNA, 122 bp, Homo sapiens
tccctctgctgaccaacggatgagcgctaagaaagagcgtacgcctccgataaggggcgtcgtcctctccgaggagataagttgggggatccctgttgtatcgaggttgaagaggagtctct

SEQ ID NO: 254835 - DNA, 122 bp, Homo sapiens
tatatcacaattgaaaacagatgccctttctgccctttcccttgttgtctgagttactaccgttcaagagattgcaagccatggcaatctctcatgcaccttcagaatgcccagcaagagtc

SEQ ID NO: 254836 - DNA, 122 bp, Homo sapiens
attcaggcagtgtccctgtcctcccagggtgctgctccagccggggaggtgcagaactggcggaaggatgcagagcacatgggggctgaccccatgtttcagctgagaatttcgatttgagg

SEQ ID NO: 254837 - DNA, 122 bp, Homo sapiens
tgaggttgaggtttggggcttggtagcagttgccccagtcatgagatgactcacttaacccgtctcctttaagtgagctgggctgggaggcttcctacaggggaagaggcccctctggggag

SEQ ID NO: 254838 - DNA, 122 bp, Homo sapiens
ttcttccttcagacattcaaggcaaatcctattttagtgtatgttttagcttccttaatacgcataagatcattggggattgacatttcttattcccttcaatgatcctttaaatgtccacc

SEQ ID NO: 254839 - DNA, 122 bp, Homo sapiens
gcgcggtcgccgtcacttccgggggtggggcgggcggagctgcggacaggtgaagcattccgggagcagaaaggcggctccggcccttcgttgcgaggcttccaccgggagaatgagggtgg

SEQ ID NO: 254840 - DNA, 122 bp, Homo sapiens
ataacacgtaatgagtgcccgttatatgcaaggcatttaaattgtctgactggccataatcgggtcacatttaaggtttgttacttcaattccaagtaatgtggtaatacattattccagaa

SEQ ID NO: 254841 - DNA, 122 bp, Homo sapiens
gaggagagcggctcgcggtgcatgccggaactcgtagtctcgggatgctgggtctcagcgcgtgatggggtaatggcacgcaggcctgcgttgaacgctgggactcgtagtcccgccatgct

SEQ ID NO: 254842 - DNA, 122 bp, Homo sapiens
agaaaatcagagcatgcgtactctgaacttaaagtagcgaatcccaggggatgctttaggcgggaaaattagagtctccacccccactttgagaaggttgtgtccctggagccgggactgat

SEQ ID NO: 254843 - DNA, 122 bp, Homo sapiens
ccttcatagcagctttatttgtaacagccccaagctagaaataattcaaatgtctttcaacgggtgaatgaacaaattatgatttctctacacaattgaaaactactcagaaataaaaagga

SEQ ID NO: 254844 - DNA, 122 bp, Homo sapiens
agcctgagacgagcagcagatcgagaaaacgggaagtaatgggagcaaggtaccaggagtcgtttttatataggacctctcatgcaaataaggtgaagagtgaaagtcctgtatctgattgg

SEQ ID NO: 254845 - DNA, 122 bp, Homo sapiens
ccaggctccctcctcctcccctcccgctcctctcctccagggcctcctctgcctggctcccgtcccctcactacagaactatcaatcagcctccagctggttgttgggggcccctggcccca

SEQ ID NO: 254846 - DNA, 122 bp, Homo sapiens
aaactcgggcccggccagtaagcaactttcccgcaggggccgggcggggtcccccccacccggcctcggtgccctcttgtcccgctttggatggttctgattgacgccagtctcccgccttg

SEQ ID NO: 254847 - DNA, 122 bp, Homo sapiens
cacggggcctgggagtggaggacacagtgaacagatggatgacagggaccctgcgctgcccggccccaccccactccccgccagagcctcaacttacccctgcaccgcccggccccacccac

SEQ ID NO: 254848 - DNA, 122 bp, Homo sapiens
agggggcggggcctccggaggctggccagccaattgaggtcgtccggaaaaaagtggtcgcggcgttgccaaggtaggctgcgcagtgtctgggatgatgtcatggctccgtcttaaagggg

SEQ ID NO: 254849 - DNA, 122 bp, Homo sapiens
acggggtcccaggactctggacagcggctgccgctgttgttgttggctgacacgttggagcgccagtgcccgcgctgggcggccctccgcgctcccacctcctctagctcatcctcgccagt

SEQ ID NO: 254850 - DNA, 122 bp, Homo sapiens
tggctacatggggactgttgggcctgtgtgtgtatccgtgtggcccatgagcatgtcacccggcttccccagccctctagtcggcctggcctccgtcagagtccctacctcgccgtcaaaag

SEQ ID NO: 254851 - DNA, 122 bp, Homo sapiens
tcaatcattaataaaaacttttatagtgactgcatatgagcatgaggaatttctctcgggcgttgaaaattttctaaaattggactgtggtgatggccacacaactgtgaatttacaaaaat

SEQ ID NO: 254852 - DNA, 122 bp, Homo sapiens
gcaaatagtagtgtaagctattaacaagaggggaaaatgggtgtgggatatatgggagctcggtagtattggtgcaacattttgtaagtctaaactattctaaaatttaatagtttattttt

SEQ ID NO: 254853 - DNA, 122 bp, Homo sapiens
cggaggtcgaggggcgggcctctgctctagcagtcgggattggggcctgtctttgagtgacgtcaaggctgtgctatgagggcttctttgttgagtccgggttgaaaaacctaccgcggtcg

SEQ ID NO: 254854 - DNA, 122 bp, Homo sapiens
ttcgttgcgtgcccccaggctccttctgagaccctcctcagggcccctcggagcgccgcgcggggctcagcgccccctcaccctacactgggcccagtctggccttcacctcttagccatca

SEQ ID NO: 254855 - DNA, 122 bp, Homo sapiens
atcgcgcctgagtatgattgatcacggccatttatcttgtgttcaatctatttataaagccgggctgagcagccactgcccgaggcgggaggcgcggccagagagagcgttcaaatgtcaca

SEQ ID NO: 254856 - DNA, 122 bp, Homo sapiens
atccccatagtgcccataatgaggtggagaaaggcctattccaggctgaggctgagaatacggaggtgtagccacgtaaccttgttgactcattatgaaaatatcattccataggataattc

SEQ ID NO: 254857 - DNA, 122 bp, Homo sapiens
gcatgaccccacagaacttggccgtgtgcttcgggcctgtgctgctgccggcacgccaggcgcccacaaggcctcgtgcccgcagctccggcccaggccttgccagtgcagtggacttcaag

SEQ ID NO: 254858 - DNA, 122 bp, Homo sapiens
ctggagcctcagcgtcaacgctgtggacgtgggcgaagtgtgagggagtaagcggagaagcgtgggctcatgattcctgagccggaccagaagctgtaggttctcatggccccacgggcatg

SEQ ID NO: 254859 - DNA, 122 bp, Homo sapiens
gttcagagttggctcacactagtgcaaagtatcagagcatgccttaaacgactctgtaaacgtacctacaacagtcgccatcctctggcagagcaggctacgtactaaaatcagcagctaag

SEQ ID NO: 254860 - DNA, 122 bp, Homo sapiens
gctagggtgggagtgagaggcgctcctcgctagggctggccccctccaccgcacaggaaacggggcaggagggcggacccccatctcatgtaggaatgccgtgtccccagggtgagccctca

SEQ ID NO: 254861 - DNA, 122 bp, Homo sapiens
ggctgtggtttttgtcaacccgcatggttgggcagaagcctggtcacagacgctgtgccacggcacctagagaggtcataggccagttaagtgagaacttatctccccactggcaaagaata

SEQ ID NO: 254862 - DNA, 122 bp, Homo sapiens
catcatacattatcttcagtggacgtggagactggttgttcagtgctcacagacccctggcggctgtccagtcctatcacctgctgggcttggttgatgtttcacattgttaagaacaaaag

SEQ ID NO: 254863 - DNA, 122 bp, Homo sapiens
cttaacttgagccagaaattgtccccatattgggtgaactgtatggctcagaggagctaccggtgtcagaaaccacaggtccctgcaatttccatctcctcttaattgttggattaggccat

SEQ ID NO: 254864 - DNA, 122 bp, Homo sapiens
gacgaagccccttctcccgccgccgaagcctctcgcctcacatttcccacaaacccttcgcgccgcctcgctagccgaaacctgcccagccggtgcccggccactgcgcacgcgcgggacga

SEQ ID NO: 254865 - DNA, 122 bp, Homo sapiens
gggggggcggagccggcgcggctgcccgaggtggagccccagtggtgcgagtagctccagcggccacgctgaggcgagggtgacacaccatgctcacggcccctggagaccgtcgtgctggc

SEQ ID NO: 254866 - DNA, 122 bp, Homo sapiens
cccctcggggtctgtgggacgcgcctgcccccaattctgccacccggcggcggtgggaggcgtctttggactccaacgcttcgggccagccctctaggggcagcctgggccctagcatctcg

SEQ ID NO: 254867 - DNA, 122 bp, Homo sapiens
aataataagtgtatgatccattgcacttgccttagagtcttgaaccagtcttggatttcccgccatctgggttctggctggcttgcaatttctcctttgatgttgtaatactttttcattga

SEQ ID NO: 254868 - DNA, 122 bp, Homo sapiens
tgtgcgggatataatctcctggtgcgctgttttttaaccccttcggaaaagcgcagtattcgggtgggagtgacccgattttccaggtgccgtctgtcacccctttctttgactaggaaagg

SEQ ID NO: 254869 - DNA, 122 bp, Homo sapiens
tttccccaatgtggtaggagctgatcccagtttaaagcaagaaagtgctttgattcctcccgagcagagacaaaggggaggaagtgaattagtgaattcgtctagaatacctgtcaagactt

SEQ ID NO: 254870 - DNA, 122 bp, Homo sapiens
aacagacggagcacggaggacttttcgggcaatgaaatcacactctgtctgatgcgctaacggaggagacacgtccagaccggcagacgcgcaacaccaatggggaaccctaatgtgaactg

SEQ ID NO: 254871 - DNA, 122 bp, Homo sapiens
aggcgaccccggccctggcaggcggcgcaccctttgttgatgccaagcggtctcgaggcgcgtttatgcgtgtctcgtgttcccaggctggggtcggactgtccccaagcctttggggtcgt

SEQ ID NO: 254872 - DNA, 122 bp, Homo sapiens
ggacttgggcacaagcagctcaaaacgccaacataaaagaataaaaaatggactgagaggcgaagtaaggaggggggactggaaagcaaccactagaaaaaataaaacatgtcagctgcaga

SEQ ID NO: 254873 - DNA, 122 bp, Homo sapiens
gacctccctcccctccaccctgtcctgactcctttacatggacccttgtcaccccacctgcggccccagaagctcaaaggaagagctgacctggggtacacaacacccccttcccctgtaca

SEQ ID NO: 254874 - DNA, 122 bp, Homo sapiens
tgatgatggatgattgattttgcgtggctctctggccggtctgatgcagtctgtggccagcggcagagcccctcccgagtgccctgagctcacgtgggcccggccctctgtgctcagtccta

SEQ ID NO: 254875 - DNA, 122 bp, Homo sapiens
tcctgccttaaccccaaagaatgaataccgttgactttgaggtcacatattcttggtagacgaggtattttggctcatgggcttcccagcctctcagatccaatcatacacagtgtttcacc

SEQ ID NO: 254876 - DNA, 122 bp, Homo sapiens
ttcaacccacgacccccgcaggcttcccacgctcgagccggggccccgcgcttcaacccacgacccccgcaggcttccgacgctcgagcccgggccccgcacttcaacccacgacctggccc

SEQ ID NO: 254877 - DNA, 122 bp, Homo sapiens
ctgaggaactggattccgagcttgctcgcaaggcgagacgttccgtggaggcggagtttacgatgtatccaagtctgacggccccagaaacgggtgtgcagggcgcccattgggtccgcggt

SEQ ID NO: 254878 - DNA, 122 bp, Homo sapiens
atgccgtctggctttggccatgagaccctcgtgtgaccaggtgcgtgcctaagttagaatcgcccaggctaagttcgtgaaccccctggatgagggaggcccgactcccgcaaggagccctg

SEQ ID NO: 254879 - DNA, 122 bp, Homo sapiens
gggggtggcgggcagcacctgggaacagcgggttctcaggcctgtcctggctggcagcggcgagcgcttagctctgtgggtgggggaccaggaggagaggggctgggactggctaacccgca

SEQ ID NO: 254880 - DNA, 122 bp, Homo sapiens
agctgcctgattgccacacagaagatgggtcagagatgggacctcttgcctctgctgcaccgaaggacagggtgtttattcactgccaagcctctggcttatggtgtgctagtgagagctgg

SEQ ID NO: 254881 - DNA, 122 bp, Homo sapiens
gcagggggatgacccttgcttcctggctcacgaaagccccctgtgggagagccccaggagcgcagggcatgtggggtgcaggaagcgacgttccccacgccccggtgtaggtgaacccgata

SEQ ID NO: 254882 - DNA, 122 bp, Homo sapiens
ccaccttgcccggctcacccggtcgcctgtgcccagtttcaaggagagaaaattgaggctcggagaatgaaaggcagagagttaagcagcttgaaggccacagggcagactgctgcaaagac

SEQ ID NO: 254883 - DNA, 122 bp, Homo sapiens
tggcgagtcccatcctgacaaggcagcaaaagtttatgtaatgaatgccccgcgcgcactcgccgccgctggcgagcccagcttacagcccgaccccgcacacagcgcggcccgcaccccgc

SEQ ID NO: 254884 - DNA, 122 bp, Homo sapiens
agctgaaatgagaagccagatctcctaaccactcccacaccccatcacagtgcctcactgcgtctcttactggtgggcttgattgctttccaaggccagagaaggaagtagctgttcctgta

SEQ ID NO: 254885 - DNA, 122 bp, Homo sapiens
gggatccatatttcaaatatgatctttggaacggcttccaccgcccgccgccgccgccgccgcgctcacaacggcctcggcgcactgtgtttttatttgggtttcgtttgctcaaggtcgcc

SEQ ID NO: 254886 - DNA, 122 bp, Homo sapiens
cacacccctgtctgccgtcccgccagccgccctcacgcggcgcgggaaaacggtcggcctcgccctgggctcaggttctctccgcccgccaggcagtggggtttttttttgttttttttgag

SEQ ID NO: 254887 - DNA, 122 bp, Homo sapiens
gggggtcctttaaggccggccacctccctttaagaggcggccctggctgctgggtggcggcgtgcggcccgggaagggggcgggggcgccgtgcagccccgagcgcggcaatgattggtctc

SEQ ID NO: 254888 - DNA, 122 bp, Homo sapiens
accagatgggacactctaagattttctgcatagcattaatgacattttgtacttcttcaacgcgaagagcagataaatccatttctttctgttccaatgaactttaacacattagaaaaaca

SEQ ID NO: 254889 - DNA, 122 bp, Homo sapiens
gtgccaagcctctggcacatggcacattctatctcatgttgtgatttcgttttctatgcacgtgctctccttctagcctggaggtgagctgcttaagggcaaagagctcatgtgtagccctt

SEQ ID NO: 254890 - DNA, 122 bp, Homo sapiens
agcggctgggcaggggccaaggcggggggcacgaaggcagggacggggcggcaacgacggcgagacaaagccagggaacacctcagacggcgacgactaaccgaccctagcgcctgcagccc

SEQ ID NO: 254891 - DNA, 122 bp, Homo sapiens
caggacttcctacgtgtcctccctgacctcccagtctcaccctctccgccgcgtgcccaacggttaccactgcaccctgggactcagctcgggtggccgagcacggcacagctaccaccacc

SEQ ID NO: 254892 - DNA, 122 bp, Homo sapiens
tcacaagtttggggtgcaggtgcagattgcctactgttgtgtttctgaacacttccctcgcgaggctcctaaccccaccccagtaaactcatcaacatgactccttccagcttctacagctc

SEQ ID NO: 254893 - DNA, 122 bp, Homo sapiens
ggaaggcaccggacttgagcgtgcgccgggagaggacggcgggggaccggactgtgagggcgtatcttgggggacctgtctaggaggaaccgggaggtgaaggcacaactgggggtgaggcg

SEQ ID NO: 254894 - DNA, 122 bp, Homo sapiens
cttagggcaccatattctcagtcagatgactaggtataaaaacagccactaccaggaactcgagactttcagtctcagacatgaatgcatatttgaaaatcagattaatatccagaataaga

SEQ ID NO: 254895 - DNA, 122 bp, Homo sapiens
ccgtggacatctcaggtcttcagggtcttccatctggtgagcctttggccccttggggcccgcggaagcttggccgctttcccattgggcgggggtcgtgaacgtcaagacagtcggtcccg

SEQ ID NO: 254896 - DNA, 122 bp, Homo sapiens
tccaggtaccgcgcgccacagcacctgcctgggcgttcccgcgcttggggcggggcttcccgcgtcccctttaagaggccgcatcacccgcccttgacgtcagagtgtttctccgcaagagc

SEQ ID NO: 254897 - DNA, 122 bp, Homo sapiens
tcccaccaagggaaggatgggttatgtgttagaacattttgagatctcctacattttccccgtagtgactttatatcagcctctgtttataaactgatctagtatttttcttgaaagccctt

SEQ ID NO: 254898 - DNA, 122 bp, Homo sapiens
aaatttagctgggcatggtggtgcctgcctgtagtcctagctacttgggaggctgaggcacgaggatcgctcaaggctacagggagccataatcacaccactgcactccagcctgggtgaca

SEQ ID NO: 254899 - DNA, 122 bp, Homo sapiens
ttttcacatcaaggcacacatagaaagtaatctttctttggcactctgggataaaaccaacgatgctgctcccagctgcaggtgactgcctagaggctccagccctgccaggccacactcaa

SEQ ID NO: 254900 - DNA, 122 bp, Homo sapiens
ttaatctgtcaacatgttaataatttgtgtgggttttggatatggtgggaatcttgtctacgtcttctcaatcataaacgtttttaggcttgtttggaggtgggttttttcgttggctggtt

SEQ ID NO: 254901 - DNA, 122 bp, Homo sapiens
cttacaccgtgagcagcggcggcaggggaggaggcggaacccgcggccggagacacacgccgtgcgaccgacacacactcacgcactcgcacacactccgacgcccggatccttgcgcgtcc

SEQ ID NO: 254902 - DNA, 122 bp, Homo sapiens
gctttcagctgactcctgcaggatgaggagttggctgggcacagtgaaagggggggcgtgcgaagcagccagtggcctttgtggatgcctctcagtgtgggaggactgagttatgcaggaac

SEQ ID NO: 254903 - DNA, 122 bp, Homo sapiens
tgctccctagacatcctctcctcatcccagccaatcccagggcttgcttgggatggattccgggtgtcgtgtcttcctttcctgtttcatgccgccattctgctgaagcatatcctctagta

SEQ ID NO: 254904 - DNA, 122 bp, Homo sapiens
tttccatttgactttgaatcaaacacttgcaatggggggcaggggaaagggacattttggcgtggttgttggcgactttaaagagaactccactcccgcctggatctttggtctcaaagagg

SEQ ID NO: 254905 - DNA, 122 bp, Homo sapiens
tcggttgatggggaggtcaggtctgggaaactaggccctggggttttccctgagcaggagcggtgcccgagggcctcaggtacgcagaagggcggggagacatgggatcagcacctccacct

SEQ ID NO: 254906 - DNA, 122 bp, Homo sapiens
ttgggatggaaaagcatccgcgggagatgccggactgcacgctgctgccgactgcgaccccggccagggcaggcccccgactctgactgtgccgtctgaggctccactgggcctctgccctc

SEQ ID NO: 254907 - DNA, 122 bp, Homo sapiens
cgtgatctgcccacctcggcctcccaaagtgctgggtatacaggcatgagccaccgtgcccggccgcaaaatatattctgaggaataaaaatgattgtagttagttttccacagtccaaagc

SEQ ID NO: 254908 - DNA, 122 bp, Homo sapiens
acaccctgtaccccaactctgggatggcccctcccctgagaaggcttacctgtgcggaggcgggcagcccgctcctcttccacattggcccgaagctcctggatggcctgtttccgttccag

SEQ ID NO: 254909 - DNA, 122 bp, Homo sapiens
cgcgggtcctgcagctgaaggaaggttgcagctgcgccctccttgcaagccgcagcccggcgtcctggttgtcccagcagccaggagatccctacctgttagtgaacagttaggagtcgact

SEQ ID NO: 254910 - DNA, 122 bp, Homo sapiens
agtccgcaggagcgagagccggctcgctccgctgggtcccgcttgggttcaggacgtcaacgtagcgagctctggttcctgctgcaaaggggagggaagcaaattgaggtgaacgcgccagg

SEQ ID NO: 254911 - DNA, 122 bp, Homo sapiens
cccagcagctactctcctagctgtaccagcagcaaagcaccaaggagctctgggccctggcgaggtgagtatagggccctgctgggaaggacccatagggggtcctctcagcctggggttca

SEQ ID NO: 254912 - DNA, 122 bp, Homo sapiens
tgccaggagtcctcacttcctccatggcggataatgaaggtgaccctgcgtgctgatccccggaggcacagactgcacagtgaggagcctgactagggggtcccaaggccaaggccagagcc

SEQ ID NO: 254913 - DNA, 122 bp, Homo sapiens
gggaagggaatgatgtcatgggatttgacagggctctgacattccctcccatttcaaacacgcgcagttcctccatcctcatgtttacatattgtgtttccacatcagatttcacttgaatc

SEQ ID NO: 254914 - DNA, 122 bp, Homo sapiens
catggttagtgtgagggtcaactgacacatatgtaaagaacttggaggaagcactatatacgaattagctattattgttacaatgagcactatttatccaatggatatttattgggcagcac

SEQ ID NO: 254915 - DNA, 122 bp, Homo sapiens
attcagtctctcagactctcagctctctcatttgtaaaaagaaggctaacgggccaggcgcggtatacccaacactttgggaggccaaagtggacagatcgcttgagctcaggagtttgaga

SEQ ID NO: 254916 - DNA, 122 bp, Homo sapiens
tttccactacctcagctagtctcaggatgggaaacagccctccacaggtcagagtcattacgtcactcctcagcagcctctctagctcccctgttggtttcaggataggcaagcaggatagg

SEQ ID NO: 254917 - DNA, 122 bp, Homo sapiens
ttgctaataacttttggtgcctgtaaaaagtcccgagctgagcaggagaaatcctgaccccgaagctctaggatggaggggagaatttctaggagcgacttccccgtcccctccccaagcaa

SEQ ID NO: 254918 - DNA, 122 bp, Homo sapiens
aagctgagtgctactggcttataatgagtacaaagccaggaatgctgccaaacactataacgacaataacagccctcccacccctaagaattatctggtcaaaatgtcaataatgccaaggt

SEQ ID NO: 254919 - DNA, 122 bp, Homo sapiens
gctttcttggggtccgggactggccctcttgaagtagcctgggacgtcccagccccttctcgatctggccctgctcatgcccaaggccctcgcgttttgcaggcccaggctcggggctccag

SEQ ID NO: 254920 - DNA, 122 bp, Homo sapiens
tgatctctttgtcttcatttttagctgtgttttctcctgaggtgactccgttctcaggcccgctgttcccacatggtggcagcctggccacttatctactataatcgcctgcttttccccgg

SEQ ID NO: 254921 - DNA, 122 bp, Homo sapiens
aggagtcattcgacgggccgcggccccacgtgggcggggcaggccacccggcctgggtcccggctgcgctccgctcgcccgcgaccccaattcctcgggacttgagaccccgtggtgaagca

SEQ ID NO: 254922 - DNA, 122 bp, Homo sapiens
ccgccagggcccaaaggagcccttccaggggcgcctcccacctcccaccagtcttccagccgtctgtgccagaacgcccggagtgccgctcttccccgggatttgccagctgggtgcagtct

SEQ ID NO: 254923 - DNA, 122 bp, Homo sapiens
gaggtcagcaagtttggctccctgggtacgcaaggtaaggccactggggtcactaaagatcgggaagtcaaagaggggtcaaatgtcaagaagtcaaagggatccaaggtcactgacctgcc

SEQ ID NO: 254924 - DNA, 122 bp, Homo sapiens
aaacagcctttggggcaagacgggtgacgagtcagaggaacacctgtcccggcggcgaggcggccgcggggtggggcaggcggtgggttgtcaggcctctcctctttccagagcgtgatctt

SEQ ID NO: 254925 - DNA, 122 bp, Homo sapiens
ttcccacccccactccacccacaaacaggctgagctacatcagtacagagcctggcactccggatgctggcggaattgattcactagcatgagcaggaaggtccatttgaagggatcactcc

SEQ ID NO: 254926 - DNA, 122 bp, Homo sapiens
taacgtctcatgcctcagttttcctacctggaaaatggagaaaataatgtctacatcatacgagtgttaagaaacctgcgtgagttagtgcctgtaaagcacttagaaaaaacgttgacaga

SEQ ID NO: 254927 - DNA, 122 bp, Homo sapiens
ttctgccttagaaattaatcataaacttggccctcctctccatccctctggcctttgcctcggtgaagcccccttcccctctctatggccacggtcccccacacatccccacactgcttccc

SEQ ID NO: 254928 - DNA, 122 bp, Homo sapiens
tcccctggagaagacgggcgcgttgtcattgacatcggacacatcgatgttcacggtcgtcgtgttgactctgggtggactgccattatcagaagcttgaaccgtgagcgtgtaacctgaaa

SEQ ID NO: 254929 - DNA, 122 bp, Homo sapiens
cgtgtctccccaggcggagaagcaccggcgggcccgcaactggacggacgccgagatgcgcggcctcatgctggtctgggaggagttcttcgacgagctcaagcagaccaagcgcaacgcca

SEQ ID NO: 254930 - DNA, 122 bp, Homo sapiens
ttgagtgcttgctaggcattgacaattgaatcctttcctcaaagaactttataatttgtgcgacagaacacaagtacttaaatgaaagaaatgtttcctatctgttggatccatttatgcta

SEQ ID NO: 254931 - DNA, 122 bp, Homo sapiens
gatgcggcctcagttctcacttccattgggtgttgggttcctagatcagccaatcagtgtcgccgcggttcctggttctaaagtcctcgccggcccaccgggactcagattctccccagacg

SEQ ID NO: 254932 - DNA, 122 bp, Homo sapiens
tctaagctggggcctggcgggagagtgggtgggcccatgttaaagaaagcgatattctcacgcttcttaaaatggtcaggaaggcttcactggggactcttgcaataggtgtcaggactatc

SEQ ID NO: 254933 - DNA, 122 bp, Homo sapiens
cgctgccgccggagcaagtgggcgttcatctaacctggggtctggctcgggggctgaaagcggtttcaaagagaaccgggaacaaggggcagcgagagcacgagctccaagaatgggttgaa

SEQ ID NO: 254934 - DNA, 122 bp, Homo sapiens
caaaatggagaggagcatccctaaggactaccacgtcagcgaatctgtaggatcgtcccccgcctttcctcgttaatttcgggccactttcacctttccctttcaccctaaatcagacttaa

SEQ ID NO: 254935 - DNA, 122 bp, Homo sapiens
cgagcgagcgccggtctgaggacccctgccgtcgcggtgcactctgggaaatgtggttttcgcggcgctctctggggcttgaccccgaagcgggaggggcggggcccagagaggagggtcgt

SEQ ID NO: 254936 - DNA, 122 bp, Homo sapiens
tacctgcgcggtggtggtagcaccggggagggtggccggtgggcacggcgggctccaccccgcggctggcctggcgctcacctgtcgggctggggaaggggtcgctgccggggctgtccaaa

SEQ ID NO: 254937 - DNA, 122 bp, Homo sapiens
cctgctcctccccaccactgtttccttgactggaaagtgggtgtgatggagaacatgacacgctctcagctctcggagtctagcttctctttgctgtgtccaaagtgagggcttactataga

SEQ ID NO: 254938 - DNA, 122 bp, Homo sapiens
gggtcgggccggggtgggagccggcgcggacagcgaactgagctcggcgtggtcgggcggcggctgctccggactctggccaaggcagcaactcagtaaccgaacaaaaggcgaagagacct

SEQ ID NO: 254939 - DNA, 122 bp, Homo sapiens
aagatgtgccccgggacccccggcaccttccagtggatttccttgcggaaaggatgttggcggtccctgtgacctgtggagacacggccagatctgccctccagtaagttccaattttgtcc

SEQ ID NO: 254940 - DNA, 122 bp, Homo sapiens
ctgaggccccacagtggctccagtgaaggatcgaagcccagatagccaagggcctgggggcgctgctgccacagagacaaaggaaagggagctaggggacagacggagaagatgggggctag

SEQ ID NO: 254941 - DNA, 122 bp, Homo sapiens
ggctatagtttgaagaagcaaccacagaattgctctagttttaataataaactggttgggcgcggtggctcacacctgtaatcccagcactttgggaggctgaggcaggcagatcacctaag

SEQ ID NO: 254942 - DNA, 122 bp, Homo sapiens
cgcttccccgccagtgaaaagcaatcttatttcagcgtcaacgctctatgtcttgcagtccgatttcggctgacacacccgtgccgctgtccccgcgccgggccctcgagtcctgtcacctc

SEQ ID NO: 254943 - DNA, 122 bp, Homo sapiens
acccccggccgccgccagcccccaaacacctcccggcgatgctggccgcccccggtctcgcgttccggatcccctcacctgcgtagcacggtgggctcgggataccgtcctccgggtcccgc

SEQ ID NO: 254944 - DNA, 122 bp, Homo sapiens
atcatgttacttttcttttagttgccggtggcgggatacggtgagctgatgtatctcacacgtggctcaggatgagacacagaggccccgacaggcagggagaacgcagcccctctgctgct

SEQ ID NO: 254945 - DNA, 122 bp, Homo sapiens
aatgttgctttccatagtctgcaggatccatttgaagctctcgtacttcatcatcttggacgtcttccgctccaccatcaccatcttcttcccaattgcaagctagctcagcctgcttgtct

SEQ ID NO: 254946 - DNA, 122 bp, Homo sapiens
cccagaaccaccgtgtgctggggatttgtcacgggtttgtcctgacgtgtgaggtccagccggggtccccatagcctccctgtccccgtccctgtccccgtcaggcctcctgctgcgctgtg

SEQ ID NO: 254947 - DNA, 122 bp, Homo sapiens
tcgatcgagcagctgctatttctgcttcagcgaaagccacgatcccagcacacaggcacgcgctactgtgaggtcaggacgaggaaaagagccaggacctttcacccagatcgcggcggccc

SEQ ID NO: 254948 - DNA, 122 bp, Homo sapiens
ttccacaaatgcttacttactgagcactcattaccatcaaggcacagcatcatcctgctccggctaagtccccacgtacgccattaaacaacggtcaaatggtaacatgttcgtgtgtgtag

SEQ ID NO: 254949 - DNA, 122 bp, Homo sapiens
agcctctcctccgccttgtgatctgcagcgcacgtcttattatggggtgcattatgcagacgccagccctgtgatgggacaggcaaccccgctgtgagaatgcctatcagagcttcttttaa

SEQ ID NO: 254950 - DNA, 122 bp, Homo sapiens
accccaaaatctcggcgatgattggacggaaggcgaatctacctcgcgctgggtggaagtcgtgctggctgtcactgtaaaacgttacctgacagagggggaagctctttcttggggagtta

SEQ ID NO: 254951 - DNA, 122 bp, Homo sapiens
aatcgtcttctttctcactctacccctcatcctctcctgctgtaggggctcaagccagaacggctcagtctggggcccttcgtgatgtctctgaggagctgagccgccaactggaagacata

SEQ ID NO: 254952 - DNA, 122 bp, Homo sapiens
tcttaggacgcatgcgttaggggtttacacttgagcggaagaaggggcggaaactggaggcgggtccaaggcgcagaaagacacatgtgttactcaatcccaatctacctggctcctggcgc

SEQ ID NO: 254953 - DNA, 122 bp, Homo sapiens
cggcccgccggcccgcagggaccgcgccctggaacgctcccgagccgcgccacgcgggagcggccccagcgcccctggccctgccctccgagaaagcccggccgaggctgccccgaggccca

SEQ ID NO: 254954 - DNA, 122 bp, Homo sapiens
aggaaattcaccaggttgtgcagggcagggcaggagagcagagggagacgctcacgcccccgcccccaggcccgcagaagccgtgggtgctgatgaatgcccctcagcccacaaatccctgg

SEQ ID NO: 254955 - DNA, 122 bp, Homo sapiens
gcggaccctggcagcgatgggtctccaggcaagtccccgtccaaaaagaagaagaagttccgtaccccgtcctttctgaagaagagcaagaagaagagtgactcctgaaagccctgcgctaa

SEQ ID NO: 254956 - DNA, 122 bp, Homo sapiens
caggcaggcggggcctggaatgtaggggtggtgactgagggcgggccctggagtgacggtcgccgagcgctggctggcggcatttctgcaccagcagaggtcaagtctctgcccagcgccgg

SEQ ID NO: 254957 - DNA, 122 bp, Homo sapiens
gcgcgccccggggcccaaggagacgaccctgaagaggagcctggctacttttgcctcagacgagtccggagcgccgggttaaccggtctgaagtcccaggggctttctgggactgctcagcc

SEQ ID NO: 254958 - DNA, 122 bp, Homo sapiens
aggagaaggaggtggggccggggcagagtcctcctgtgttgtcaaacactagctaagcatcgcctgtgtgggatctgctgaggctggggctgggctgagtcctgcctgcaaaggggcctcag

SEQ ID NO: 254959 - DNA, 122 bp, Homo sapiens
ccctcctactgggtgatgtctcttcccctgggacccagggaccatcccgttgttgacctccggggtcaggggtgcggatgggggccggcccttcccgcggtcgccgccagggggcggcagga

SEQ ID NO: 254960 - DNA, 122 bp, Homo sapiens
cttaggcaaccgcagcaacactgcctgggcccaacttcccgcgtttctcaggtaactacacgcggaggagccaaaagacacgcccccgccatttacgcagcaacgctttccgaagagcgtgt

SEQ ID NO: 254961 - DNA, 122 bp, Homo sapiens
cacttggctaatttttatattttttttagtagagatggggcttctccatgttgaccaggccggtctccaactcctgatgtcaggtgatccggccagctcggcctcccaaagtgctgggatta

SEQ ID NO: 254962 - DNA, 122 bp, Homo sapiens
ctcattcctccaatcctttcataatgtctacagaagccagctttgcaccaggcctgcacccgggactgagacacacagatgaagaggaatggttccagccctcatgatattaatctgataag

SEQ ID NO: 254963 - DNA, 122 bp, Homo sapiens
cctttaaggcaggccccagctgggccgcctggatattggagcatggacgagattaggtggcggaggcgctggccgggccagatgcgcctgagcgcggcctcgttatgtattcatgagctgtg

SEQ ID NO: 254964 - DNA, 122 bp, Homo sapiens
tccccgagcctggcggacccgcgacgtcacccgccccgcccccgagccgcgtgccgctcgcgcctggccacgcgccccaagctccgccccctgcgcgaagccctcaccttctcgcttccttc

SEQ ID NO: 254965 - DNA, 122 bp, Homo sapiens
cacaagagcttcccagtcttcctccgcccccttgcggaaagaaccgaaggcagagcacggcgccgaagtggagccgcctcaagctcgggcccttccggaccaccccggcctgcgctcggaag

SEQ ID NO: 254966 - DNA, 122 bp, Homo sapiens
gtcccatcatcagcacttgctcttttccatcgctgtgtcgttctggcttttttctcaacccgctctagcaggcttgtagcagcgtctcattcccctaatgggtaatggcgtggagcatcttt

SEQ ID NO: 254967 - DNA, 122 bp, Homo sapiens
tgaatcctgcccgcaaggcgcgctgactcggttccgaaccctttcgcgggccctagaccccgtggagagttcacctgcccggcagccaggccttcacgcttctctgccccacagccgtctat

SEQ ID NO: 254968 - DNA, 122 bp, Homo sapiens
gagggtggattatcagggcatttagaagaaggggaagggaagaaaaagagcgctggagaccgggagaccacacagggagacagtgcacagagctgccgcagccatctgccgcgacttcatat

SEQ ID NO: 254969 - DNA, 122 bp, Homo sapiens
gtgaagacctcagtgcggaaggggctgctgccccagatcctggagaacctgctcagtgcccggaagaggtgagccctggagatcgcctgcttggagctcagacctgttggggcctctgggca

SEQ ID NO: 254970 - DNA, 122 bp, Homo sapiens
cagggctggatgtgcgtgtgctgcatcaggtcatcgaacgcatccagcccctccatcacacgcagcacgccatacaccgcctggggcacgaacagaaacgtgtcaccatagctggtttgaca

SEQ ID NO: 254971 - DNA, 122 bp, Homo sapiens
cagacacagagaacacgtggctcaaacctgccccatcactggaggcatcgatgcacaagacggtgagaagaaacttggtgagaaagaaaaactaggaagacattgagaaagtgagaaaagat

SEQ ID NO: 254972 - DNA, 122 bp, Homo sapiens
ttaattttattttgcacagtgaccttgtagccacatgagaaagcactctgtgtttttgttcggtctcagatttatctggttgagttggtgttttgtttggggtttttaattttgcgtgtttg

SEQ ID NO: 254973 - DNA, 122 bp, Homo sapiens
aacccaagaaagaggcggtgagcaggggacggtcctgcagccctggggcgggcggaaggccgggtggtggggccggcctgagagccctagccaggcgctcccgccacaggtgaagagcttca

SEQ ID NO: 254974 - DNA, 122 bp, Homo sapiens
atccgattggttaattggttgagatacgggtcacctcccgtaacagtcatctttttaaggcgtgcagttcagtgggttttcatccacacacttgcacagccaccaccacagccagctttaga

SEQ ID NO: 254975 - DNA, 122 bp, Homo sapiens
gtcgatcggtgttccccgggacccgctcctcagggctgacccaacttcctccggaaggggcgctctgcctctagtcgctcgccggctcccagccccgaccccagacccctcggacgccccca

SEQ ID NO: 254976 - DNA, 122 bp, Homo sapiens
tctgttctcttcttttgtgacaaagaccctaactttgtagtgttactcaaggaccccttccgtccctacctttggctcattgatggaattagagaatgcccaagaagatatgaaaaaaaaaa

SEQ ID NO: 254977 - DNA, 122 bp, Homo sapiens
gccgtcggggctgcacacggtcatcttgttggtgggacacgtgcagttgtcctgcgcggccgtgtggccggtcaccgccgccagcaccagcagcagcagcggcagccgcagcggtggcggcg

SEQ ID NO: 254978 - DNA, 122 bp, Homo sapiens
cggcaggtgggagacggacactgggtggaggatggagtgcggtaatcagcggttgtaggccgcttaggctttaatccagcgttgttttgtgtaaagaacttaaaatggtattgtcttaagcg

SEQ ID NO: 254979 - DNA, 122 bp, Homo sapiens
ttttgttttcacttggcttacgtcgtagacaggtctctgctgggggacggagatgaccaccggccttcccaaggctgcataagatttcctttgactatgctgtgatccatttacgcggcccc

SEQ ID NO: 254980 - DNA, 122 bp, Homo sapiens
gttctgacatcgcccctaaggatttctcagggaaggcatcccagccacggcttttcctgccgactttgctcttcctaccgccgcgcggggcgacccacgtaccgcgtgctcagagggcggct

SEQ ID NO: 254981 - DNA, 122 bp, Homo sapiens
ggagcacgaaagggatttagaggcgccggtggggccaggtgtatacatgatgcccagccacgctcccagttccgttgatctgaaactcgtctgactgggtgtcctgtggttttgtttgctga

SEQ ID NO: 254982 - DNA, 122 bp, Homo sapiens
aggtcagccagaaagacgtccatcctacttcctgaggtttttcgtgtaatgagacactcacgtgtacccttttccacgagcgttttattcccactctccaaagcgaggtcttcctcccctct

SEQ ID NO: 254983 - DNA, 122 bp, Homo sapiens
ggccggggccgggcaaggggtgaatccaacagggaactgcgaggaggagggcaaggaagtcggtagaggcatgcaccagggaaacttcccagtagctttgtgcagcgataaggactgcacaa

SEQ ID NO: 254984 - DNA, 122 bp, Homo sapiens
gcgactctcactgggccaggcccccaccgaggcccgcccctctctccgctattggccagccgcttacgaaacagccccgccgcagcggtcattgggcagttggtaaagccaaagggaggcag

SEQ ID NO: 254985 - DNA, 122 bp, Homo sapiens
gcgtggccttctggggtgtgcgggctcctggccaatgggtgctgtgaagggcgtggcccgcgggggcaggagcgaggtggcgggggcttctcgcgtcttttcccccagccccgctccaccag

SEQ ID NO: 254986 - DNA, 122 bp, Homo sapiens
gagcatataggccaacatttttgttgtttggcatccctcatccctcgctcctgttgccttcggtctagggagggagcacactgattaggaactaacatgtgcccccagcacagtgcagctgc

SEQ ID NO: 254987 - DNA, 122 bp, Homo sapiens
ggcaggcgagagcagcagagggagttaatactcctacctcagctggtctccggcagccaacgctcagcccccgcctcctctctccattccggaccccgcaaccgcgaggcgagagagcagcg

SEQ ID NO: 254988 - DNA, 122 bp, Homo sapiens
gagaactctcttatagtttctatttactggctgggtgacctgcaacaactcacttctcttcggtccttggtcagtgtgtgtgtgaaagggcacactttcctacttcaccactttctggagga

SEQ ID NO: 254989 - DNA, 122 bp, Homo sapiens
atatggaagtccacaacctttcttcttttcacatgggccctttgccagaggcatttgacacgtggtagaaaggtcatgtgacttaattaatagaccttgtttctggttcaggttctgctact

SEQ ID NO: 254990 - DNA, 122 bp, Homo sapiens
gctcagaagttcaggtaccaacgggagacttacaactggcacctgatgcgggggcaatttcgtggaactgagcctcaatcagtgggatctgatgctaactccaggtagagagtttcagaatt

SEQ ID NO: 254991 - DNA, 122 bp, Homo sapiens
ggaaaggaatggtacatgtgtcctgggcagagactagaagtagccatcagcacagtgacccggtttctgaactgagctctgtgtcacctgcactgaggtttcctgggtcctgccccctgcct

SEQ ID NO: 254992 - DNA, 122 bp, Homo sapiens
taaaattttctaatcctttgtgtccctagaatatgaagctctggtgccctggggtgagcacgagcacttctagaggcaggctttcctcccctcctctcccctgaatcattgctcttcccgtc

SEQ ID NO: 254993 - DNA, 122 bp, Homo sapiens
ctgtttgctgcctgctttggggaaagagcatcagaaaatccttacggtcagaggcgccttcggctgctggtcccgagaagtgccaggtttgcagtccgcccctacagctgctgtctctgtgg

SEQ ID NO: 254994 - DNA, 122 bp, Homo sapiens
ggctgtacccctcaaggatgtgtcctgtgttgagggtagcagggcctgcctgcaaatatccgggtcagcaggccaggagagttcacactgaggggctgggcaggggtgttcaggctttgctc

SEQ ID NO: 254995 - DNA, 122 bp, Homo sapiens
acagcgtggcccacaacctctacccactcctgttcaaagccagctacctgctggagcaggcggaggtgacgcgcgcggtgctggggcgctggcccctggaggagttccggctgggagcgctg

SEQ ID NO: 254996 - DNA, 122 bp, Homo sapiens
cagctcactgaagcaaaatatcctttgtcggaaaactttccgcagggaataacagacctgcgcagtagatttcactttgatatggcccctgtgctggcccagtatggactgcaggtttgact

SEQ ID NO: 254997 - DNA, 122 bp, Homo sapiens
aggccatggcacagtcactgcgagaggaagagacaggaggcctggcggcccggctgtcagcgcagtcgccatcttaaggctgaagggggctgaggccaacctgggcaaggagaacttggggc

SEQ ID NO: 254998 - DNA, 122 bp, Homo sapiens
tctgagaccgcagaacggggctgaggccctgaaccccgtgtgctcgtcctaaaactaggacgaatgtaccagacgacaagcagcctttgtgtgtaggagaggataggttttgttttgtcgtc

SEQ ID NO: 254999 - DNA, 122 bp, Homo sapiens
cttggtatgttgcccaggctggtctcgaactcttgggctcaaatgatcctcccacctcagcgtcagaaagtactggggttatagacatgagccatcacgcccagcctaggatctctcattat

SEQ ID NO: 255000 - DNA, 122 bp, Homo sapiens
gatccggtctgagcgagagcttggcaagcaagctctggcttcagggcttccgtcgggcgccgtcgctcgccaggcacaaagatggcgccgccgggtactgcccagggcgatctcgcgaggct

SEQ ID NO: 255001 - DNA, 122 bp, Homo sapiens
aggatgcacagacctgcatgcatacgttcctgacccttccagcagcagaaccatctgggccgccacccgctgataacaacggaaccgtgggcattggcccttcaacgccgtctcgcccgccc

SEQ ID NO: 255002 - DNA, 122 bp, Homo sapiens
gtttgcgaggtggcgcggatttgccactgggggaagagcaggggaagtggagtccgtggccggctcaggctaaacgtgcctcacctgcacctcaggcatactcccacccactctctgcaact

SEQ ID NO: 255003 - DNA, 122 bp, Homo sapiens
accgccgctttcaaatcgccaatcaaattcttccttggcttcgagtctctcagccggccgcgctctccgatgcccagccctcctggaaccacctcgcctgtgacgtaggtggagcgcgcact

SEQ ID NO: 255004 - DNA, 122 bp, Homo sapiens
accgccccccaggtccgtagggaccaaagaaggggcgggaggaagactgtcacgtggcgccggagttcacgtgactcgtacacatgacttccagtccccgggcgcctcctggagagcaagga

SEQ ID NO: 255005 - DNA, 122 bp, Homo sapiens
agaaacagacagaaagaaaaaataccatcacagtgacaatgcagatgtggcagaagcacacgacaattgtaaataaattgaccaagtccacagcaagacaacagcaaaaactcaagcgacac

SEQ ID NO: 255006 - DNA, 122 bp, Homo sapiens
gaggacagagatggagagggaccaaaagactacatggggccttgaaggatgtcataagaacgttgccttttactgagagatgggaaccatggagggtttcaaactgctgagactggcatgat

SEQ ID NO: 255007 - DNA, 122 bp, Homo sapiens
ctcaccaaagggtttacccggacaggaaattaacccgctagaaaaatctcttgggagaggcgggagcggcaggggtggccgagtggccgtcgccaaaacgcggccccaccctggcagctgat

SEQ ID NO: 255008 - DNA, 122 bp, Homo sapiens
gctgattcccggggttggtggcagcggcggtagcagcaatggactttctcctggggaacccgttcagctctccagtgggacagcgcatcggtgagtccctggagccccccacagctccgccc

SEQ ID NO: 255009 - DNA, 122 bp, Homo sapiens
tgtatggggaggagatgcctccctcaagcctgggcgtccccatggccctgctgtctaccccgagctgctccgaggttgagctaaaccacagaagcacatggccatttggggatctggagccc

SEQ ID NO: 255010 - DNA, 122 bp, Homo sapiens
ctggagcagcatggcgccgggtgggaagtctgctctgctggctgctggccctgcctgggccgcatcctctatctcacgttccttgtctacaaaatagaagtaactttctgctcacggaggag

SEQ ID NO: 255011 - DNA, 122 bp, Homo sapiens
ctaaaaattaaaaaacattaaccgggcttggtggctggcgtgcgcctgtaatcccagttgcgcgggaggctgaggcaggggaattgcttgaaccagggaggtggaggttgcaatgagccgag

SEQ ID NO: 255012 - DNA, 122 bp, Homo sapiens
cgcgggccggctccgggtgtccgcgcacttaactccgggggcggggcaggcgcagacccgcgcgcccgctcgggtttcaggcttggactcccccacctgcccccaccctcaaccttcttaaa

SEQ ID NO: 255013 - DNA, 122 bp, Homo sapiens
tcaaacctccatcagggttgcaacgccacgttgccttggatgcctgcgtgagtggagtcgcgactcggggcccgcgtcctgagagacgcgctcccgcgccgcttctcgcctccggaccgcag

SEQ ID NO: 255014 - DNA, 122 bp, Homo sapiens
aaggagggaggacggcaactggccaatcaggaggcgaggccgagccaggcttcccctcgtcgctcgtgagctgcaaacagtggaaagttgggaacctcagtcgctggcccaggcggagagca

SEQ ID NO: 255015 - DNA, 122 bp, Homo sapiens
ggcgtgcagccaatgacagcccagaaactgggcgtttcctgctgctctgggctgcaggggcgagacttctggcgtcgccgtcgtgacgtatttttcctatgcccggtccgtgcattctggtt

SEQ ID NO: 255016 - DNA, 122 bp, Homo sapiens
ctcgtgagcatcggatccttccagaaaagccattgtgcgatcgggccacacccagattagcgggcacagcacagcggggcagtagacaccctcagaaaaggtgccagggggcggctggggct

SEQ ID NO: 255017 - DNA, 122 bp, Homo sapiens
cagctcaaacccaggaattgtggggtctaatcgaggtggttagatgaggctcctcgttttcgggaatggtggtccgcaaggtcttctcgaggcccctctacacactccccaacttaggtcac

SEQ ID NO: 255018 - DNA, 122 bp, Homo sapiens
cacgaatgccgtgtgggggttccttaaagagaccagagaccggcccggcgcggtggctcacgcctgtaatcccagcactttgggaggccgaggcgggcggatcacggggtcaggagatctag

SEQ ID NO: 255019 - DNA, 122 bp, Homo sapiens
agtgggatagtgcctgtgtagggtcagcacatggtgagtgttgatgtctgtacttaataacgaatagcccctcattttagggtggccattcctgagatttggggatggagggaggcacccct

SEQ ID NO: 255020 - DNA, 122 bp, Homo sapiens
tggatgactgaggaatgcggtcctaagtgaccccgggctggctgtggggccaacagcgtgcgggatctgactaacagcgtgtggcagccgagcgactgcagcagcggcggggaccccattga

SEQ ID NO: 255021 - DNA, 122 bp, Homo sapiens
ctgtgtgcctctgtctttttaattgggatcgaaaactgctacctcaatggtagttgtgcccggcacatactaacagacttataaatgtagctgcctggggcagggatgatcctggaacattc

SEQ ID NO: 255022 - DNA, 122 bp, Homo sapiens
ggacacaccacacacagggaggcgtggagcacatgtggcctgtcccacctgctaacaggccggccatcggggccctcctctggctcataggcagggcatctggaggaagccgtccctgccaa

SEQ ID NO: 255023 - DNA, 122 bp, Homo sapiens
gacgacctcgtcacggagctacgtacccagcgcaccggccggcctgggtaaagaggaggacgccggtcgcttccacagcaccaagaagggcaatttccacgagatcttcaatctgacagaaa

SEQ ID NO: 255024 - DNA, 122 bp, Homo sapiens
atgagcagacacagtacctgatccaacaccacaaggcaaatctatggccatcatgggccccgggaggacagcggccaggacactcctctgggggctgccctgttgcctctccccacctcatg

SEQ ID NO: 255025 - DNA, 122 bp, Homo sapiens
gcatttactagttaattaaaaaatcttaacaactgtatgagatggtactcattttagagacgaagaaatagacacaaatgttcactgaatgatgacgcagtgaaggtaaacaaatattcact

SEQ ID NO: 255026 - DNA, 122 bp, Homo sapiens
gtggaaaaggcttttgttgcaaagaaaccggtctagaggctcaacagggacgtggggcggcgaccacaacagacgtgagcaaccgagcttctccacaggcgggaaagaggggaagggagggt

SEQ ID NO: 255027 - DNA, 122 bp, Homo sapiens
ctgccagtcccgcgctgtgggccggcactcctcaggccttgggtggtccatgggactgggcgccgttgagcagggggcgccgctcgtggggaggctccggccgcacaggagcccacggagtt

SEQ ID NO: 255028 - DNA, 122 bp, Homo sapiens
acgaaaaccaagatgataagaccatacagtccggcagtgtcttactaacagggttgtgggcgtcccactccttctcttcatcctcctccagctcctcctccacgtcttcctccagctcctgc

SEQ ID NO: 255029 - DNA, 122 bp, Homo sapiens
aagcccacctcccactcccctctccccttggtttctcgagggttcctacttgagtgggggcgccagtgctaggcccacccggtcaggatccagattggccccccatgctggggacctggctg

SEQ ID NO: 255030 - DNA, 122 bp, Homo sapiens
gtcacgcggggaagtcccatctgaactggggccttatgaccttcggtacttttattcgaacgtagcctgcgtccctgcctggaacctggttcccgccctgaaggacccttacttagcactcc

SEQ ID NO: 255031 - DNA, 122 bp, Homo sapiens
cggcccgaagcgcagagccggcctccgcgccgccggcgtgcgctcccttcctcagccgaacgcctcgagcccgctcggcttccgtagccccgccccatcatggccccgccccgccgctgcct

SEQ ID NO: 255032 - DNA, 122 bp, Homo sapiens
acccatgattgaacaagtgagttctctcagttcctcttgtcttggggagacctctaaggacgccagggcttacctggtaaggcctatctatcacttatttcgttatacacagcacacatctg

SEQ ID NO: 255033 - DNA, 122 bp, Homo sapiens
tctttacttgaaataactatagggatccacaggagatcaaaaggaatgatgtattttttacgtgttggccaaagtcactggataaaatgagaattgtatatttgttattcattttgcaaatt

SEQ ID NO: 255034 - DNA, 122 bp, Homo sapiens
aactgacccataatctatcctttgggaggcaatataagcaaaaaataaataaaaagaggccggtttttggcatgaaacagtagcctcaggcttgtaaaccagacagtcctaggttcaaactg

SEQ ID NO: 255035 - DNA, 122 bp, Homo sapiens
tttaccctgaaacagttgtgtggaattgcaccctggcagtgtaaattgacagcttgtcttcgcaggtgaggaacagggacagaactcaagtcatccttctgctcacctgagacagatgcatg

SEQ ID NO: 255036 - DNA, 122 bp, Homo sapiens
gttctttacagagggcggctggctctcccttaagaggcccaggaagtgtgggactggcagcgccaccccatgcaggctgctatgcatgtggggcccacagggggcacgcgggggtcactgtc

SEQ ID NO: 255037 - DNA, 122 bp, Homo sapiens
cagggtcggtggcacgtgatgaggcgcaggcctggctcagggggtggtgcccacggccctcggctcctcccccggggccgccccgccccgcgcgggaggggacgggcggggaccggcatggg

SEQ ID NO: 255038 - DNA, 122 bp, Homo sapiens
tcacgctggctcctgataggcagctagagctgtccgttttgacagaaacctttgcgcaggcgcagaaaggcacaggactcgctaagtgttcgctacgcggggctaccggatcggtcggaaat

SEQ ID NO: 255039 - DNA, 122 bp, Homo sapiens
ccggcgccgggaaggtcacccttgcttgttctttgcacttcctgaccttggtggacatcgcgccggctgcggtccgagtgtgggggtgccggctgccggcctcctccgccttcgcggcagtg

SEQ ID NO: 255040 - DNA, 122 bp, Homo sapiens
gcctcaactgcgcctgcgcgagtcaggacgagcgcttgccccagatcttgacgtttcaggcggcccctcctaatccggaacacgactcacattccgttggtcttgccttgacagacgtgacc

SEQ ID NO: 255041 - DNA, 122 bp, Homo sapiens
ggggatgcagttggtcatcaggagcctcgaagcgtcgctcaccatgcctggaaagaccggcggcctctcctgcccaggcgcaggccctcggctcagcagaagccctgcagaagctggagcag

SEQ ID NO: 255042 - DNA, 122 bp, Homo sapiens
ccctgagggccggccgggaacgcccctggaccggaataatttccagggggcaagagctttcgaaccaagtaaaatagaacttgaatgtagcggctgccgttgcctccttgtaccggtagcgg

SEQ ID NO: 255043 - DNA, 122 bp, Homo sapiens
aaaagaactcatagccattaatttctgggaattgcccacaaaatatactaaaatttattccgacccctgactcgttttcctgtttccgaaagccctcctacttactgtcaagtgaacaaagt

SEQ ID NO: 255044 - DNA, 122 bp, Homo sapiens
tttctcagaaagaaacgtgtgatggggacttacgaacagaagccatgtcctgggtggcggcgagacaggataatggttgcccatgctattactccccagactgagggtgtatacacccaggt

SEQ ID NO: 255045 - DNA, 122 bp, Homo sapiens
ccaaattaacattctcattagtagtgtatgaggagtctaatttgtccaaatcctcaccaacgcttgctgttctctgttcttttgattataaccatcctaatgggtatgaattgattctcatt

SEQ ID NO: 255046 - DNA, 122 bp, Homo sapiens
ttgctgagtctcagaatgaaagctagaaaactaagagacctactgtatgttcttcattcccggcaacgttcctatgagaaaaccttattaatgagcttgcaaacgagcacccaacagggaaa

SEQ ID NO: 255047 - DNA, 122 bp, Homo sapiens
cttagggaggggccggagacgcaaacacaggtctcccaggaagcaggcggcgtcacaggtcgctctgcaggcgcccgctgcagcgggcggagtctggctggagagaggaggcgggcgtccgg

SEQ ID NO: 255048 - DNA, 122 bp, Homo sapiens
cccatccacctgagccagcactgcggatgcgcagggtcctgaccaggcccgggaggcttgcggctggacctgtgctggctctactgggagtcaggtactctcttgccacagagctgctaaga

SEQ ID NO: 255049 - DNA, 122 bp, Homo sapiens
tgttgtgaggacaagacgaaatagatgatgtgttgtgtccaacgcatgggacaggcctggcgcacaggaaggtgggggatgcatgttgagtgaatgaatggttacccggctgtaagtagtta

SEQ ID NO: 255050 - DNA, 122 bp, Homo sapiens
gttgagtccccctttcttctcagggagcacggtttgtctcacagtttcctgagcaaccaccgggttgtcttgtgggggagcctaccccttacagagcctgaaaaggagccagtggtcagatg

SEQ ID NO: 255051 - DNA, 122 bp, Homo sapiens
aagagtgggaaatgctggacttaaattcctttctttaggtttacgaacaaaaaaggaaagcgagaagaaaaacagaatcaaggacttatacagcaggaagttgccctgtaagcatttagtcc

SEQ ID NO: 255052 - DNA, 122 bp, Homo sapiens
agctgatgttctttagtaggaatatctggtggaaccccaagatggggtcttcatccgccacgaagcctgtttctatagaaagggatagttctggtggctcttaggtgtggtccctgaacccc

SEQ ID NO: 255053 - DNA, 122 bp, Homo sapiens
caccatccatctccagcactcatcttgcaaaactgaaactctgtacccagtaagtggtaacgcctcattcttcccctccctccttcccagcgactaccattctttctgtctttatgaatttg

SEQ ID NO: 255054 - DNA, 122 bp, Homo sapiens
ccgaggcgctccacaggcagggccgagctgggcgagggggatctcagcccctgcacgggccgccctgagcggcggggacgcaggaagaggtcgctggctccacccgcccctaccccagacgc

SEQ ID NO: 255055 - DNA, 122 bp, Homo sapiens
tctagttccgaaagtaccttttttagaccggactggggctcagaggggtttccatgactacgggactcctccgaccggtaccctgcagatgcttgtcagaaattggcttggaggccgggctc

SEQ ID NO: 255056 - DNA, 122 bp, Homo sapiens
ccaggaacgctgaatgctgctgaggacacaacaggagactcgacagacgggaggttcgcccgcgactcgggggaaagatggggtggggtgggggttcgcccgtgactcaggggaaggatggg

SEQ ID NO: 255057 - DNA, 122 bp, Homo sapiens
ggcgactgggcgtcgcgcgagtcctgcaaaatgtcaactccttgggcgaagagaggcggccgcagccagggccgcgccgcacctccccggtctctccacttttataggcgtaggaagctact

SEQ ID NO: 255058 - DNA, 122 bp, Homo sapiens
tttttttgtcaactcttttggatcctgtctctttgctattaacatgcccagtgtcacatgcgaggcttttctttaaaacaagcccctcattggtgtatctggatacttcttttattattatt

SEQ ID NO: 255059 - DNA, 122 bp, Homo sapiens
agtcaagtaaaaagggctcccaagacaatttacgagcactgggaggatggggtggaaccgcgaaaagttcgcgccatttgcagtgggggaagagcctggcccctcctgttccgggatagtaa

SEQ ID NO: 255060 - DNA, 122 bp, Homo sapiens
attttgcccattcttcatcttcagcggctttgttcaggaggcaacatgactgctcccagacgctgtttccgcacggggccgccattttgagatcccaggcgtctcagtacaagcggaggact

SEQ ID NO: 255061 - DNA, 122 bp, Homo sapiens
gcgagggacccacaagactggcggtctaaaagggacccgcctcacttggaaacggggctgcggtagccacaaccctccggtagcggtagcgtaaccccgttcggtgatccagccgcacagcg

SEQ ID NO: 255062 - DNA, 122 bp, Homo sapiens
gcattcctggaagtttctggggccccacagagctcgcgaaacaaacagtcaacatggtcacgctttcggggggcagaaacttgagcaacaggcacctttacagagggcaaagaaacgtggaa

SEQ ID NO: 255063 - DNA, 122 bp, Homo sapiens
tgtgtcaggggtgtgtgggcaggacctcggggcggggcctggggcccagcctgtcctgggcggcgctctgcggggagggggtgaggggagtggccggggccggggccccccctaaccactgc

SEQ ID NO: 255064 - DNA, 122 bp, Homo sapiens
ggccatggggccccttccaccacaggtctcaggattaaggagctgcagttttcatcgcaacgagtgcccctttccctgcttatagcttggaggacgctagtcctgggctctgggagggatat

SEQ ID NO: 255065 - DNA, 122 bp, Homo sapiens
ggaaattcccagaagcagcattactgggagtggacgggtgccctttgaggtgcctgtgaccgtgctgcagacaccaccgaccagccttcccgctctgctccaattctgaagacttgtgcaga

SEQ ID NO: 255066 - DNA, 122 bp, Homo sapiens
agatttgatatgacccaaccgcaaaagtaggacgtgggccaccttccagctctgagcgcacggatcaggaaagccagccagagggtagccctagggagggcaggcactttttcaccattctg

SEQ ID NO: 255067 - DNA, 122 bp, Homo sapiens
gtccgggacaagaagatgctcagtcacgtgtttgtgctgcaggtgcacccccagcccaggcgacatcaacggccagccccatacgcgtgaggattgcggcaccaggggcgctcaggattggg

SEQ ID NO: 255068 - DNA, 122 bp, Homo sapiens
ccgcggcctcggcgctgcgccagcctcgctgtttcccccgcggagccgccgccgggtccccgatcttgggtccggtacccgcgagtttttaaactaggggttatggcaccgcccagtcctgg

SEQ ID NO: 255069 - DNA, 122 bp, Homo sapiens
caatttgtcagagacaagctaaagaaaacacaagaatgagtaatgtctaacactgcttcgcgtgaaaatgagaacactcacagtacctacctctttagatagccatgtggtttaaatgatat

SEQ ID NO: 255070 - DNA, 122 bp, Homo sapiens
taataaatgttatcttagaagccagactgccaggttcccataaccatttcagccgttcaccggctggctgttgtcatcttggtcaaattatccctctgcgcctcagtttcctcatctgtgca

SEQ ID NO: 255071 - DNA, 122 bp, Homo sapiens
taagttcccagacggggtcacggccgggcagaggcactcttcacatctcagatggggtggcggggcagaggtgctccccacatcccagatgatgggcggccgggcagagacgctcctcactt

SEQ ID NO: 255072 - DNA, 122 bp, Homo sapiens
tgggaccctccagccgctttccccacaaatgagatctttgcaatgagcaaacgaaagtggcgcggatttcggggcgcccagcaggagcgagcgcagccgccagccgcaagtccgcagccgtg

SEQ ID NO: 255073 - DNA, 122 bp, Homo sapiens
cccaacccgaacttcttaagcgctccaagtgcaaaattgcgcagtgtccaccagcacggccggttagaaaacaagattcctgtggtggggacgggaaaggaggcgggccggggagccggcca

SEQ ID NO: 255074 - DNA, 122 bp, Homo sapiens
aagatgaggagttaaaagtgtgggtgatctatgaaaagggtcgattcctttgtgacagttcgtctatgttgaataccctatgacaacagtgcataactaaggcaccatcttttaaaaagatg

SEQ ID NO: 255075 - DNA, 122 bp, Homo sapiens
gtggggcgtccacctgtgtgtccttccccatgggaggcagaaagcatggcgtgcacggggcgcctgtggggcgtccacctgtgtgtccttccccatgggaacccctgtcaatcacaccagca

SEQ ID NO: 255076 - DNA, 122 bp, Homo sapiens
ggccggccgcccgggtaagggcaactactgggcgcttgaccccaacgcggaggacatgttcgagagcggcagcttcctgcgccgccgcaagcgcttcaagcgctcggacctctccacctacc

SEQ ID NO: 255077 - DNA, 122 bp, Homo sapiens
attaactgcatttctctggaatacacattctgtggctccttctggacttgagcgctcggacgtcctgctgacttcccgagagacagcgaggcttcagctctccctccctcccaccctgcaac

SEQ ID NO: 255078 - DNA, 122 bp, Homo sapiens
ccaggccaggcagcggcgaccaatgcctgcccactagccctgtggttggtgaaccaccatcgccatcgcctgaggtccctccacccgcctcagtattgtagaccctggatgaaacgcccctt

SEQ ID NO: 255079 - DNA, 122 bp, Homo sapiens
gataccgtcagctacgtgttccggaacatgatgaaggtctgcaggctctgggctgctgggcggggctccctgtccctcagcgccggggtggatgccagtggccacacctgcagccgctggtc

SEQ ID NO: 255080 - DNA, 122 bp, Homo sapiens
gaggtgtagctgaaagatacgttgttgcatgtcctgtctcctaatagacagaacctataacgcatttttcccagcctaggaagcacctaattcttgtgggcaaaggagccatggaagataga

SEQ ID NO: 255081 - DNA, 122 bp, Homo sapiens
gcgccgcagtgactcatcctgcccctttccggtgaagcccagacaagagaagaaaataaacgcaactttccaaagaaaagtctgacacgggaggctgcaacaggagccagcggccggtccgc

SEQ ID NO: 255082 - DNA, 122 bp, Homo sapiens
ctccacagctactggccccagtgctaagcccctcactgcccggggtggccgccaagcccacgcccacccggaactcgtgctggcctgcaagcgcccgcgcagccctggttcctgcccgcgcc

SEQ ID NO: 255083 - DNA, 122 bp, Homo sapiens
cactacttactgtatatgtgtcataggagttttgcagcatgccagcattggacagcatcccgacttcttagtagcaagctgattaggcatcaatggcacacacaatattgtaagctcactaa

SEQ ID NO: 255084 - DNA, 122 bp, Homo sapiens
aggtacccacggaaaaagtcgaagctgtccccggagagtgaggccttcacgaagcggtggcggaaggagccgaagttctctgatcggaggcgtgagcaagtggcatctccggaaagagccga

SEQ ID NO: 255085 - DNA, 122 bp, Homo sapiens
cggcctcgaggatgtgccagggagtgtgtggaggtcatgtctgtgtccctccctcagacccgcactcccagcctgtgctttacaccagacaactcctggcgaaactgcgctgctgccctgcc

SEQ ID NO: 255086 - DNA, 122 bp, Homo sapiens
tcaatctagtacccattcttagtaggtggtagatttgatagagacgggtccgtaccgttccgttccaagggatatttaggacacagctcatagggaggtaaactgctgaaggccaactcctt

SEQ ID NO: 255087 - DNA, 122 bp, Homo sapiens
gaaggcgcgtgccgggtgcctgcggggaaggcgcgtgccgggtgcctgcgggccgcggcgcgccgacagccttcgcgaaactgggctgccttgccgctgccactcctcccgccgcccgagct

SEQ ID NO: 255088 - DNA, 122 bp, Homo sapiens
tcattttagtgatttccacttcacaacttgttctttgtcttcatttgaatcttcagtcctcggctcatgcatttcttttcatcagttccctcttagctttactttttcccctgtataatctg

SEQ ID NO: 255089 - DNA, 122 bp, Homo sapiens
gctgcgcctgcgcaactcattggcgccaagatggcgatggagatgaggcttccagtggctcgcaagcctcttagcgagagactgggccgcgacactaagaaacatctagtggtgccggggga

SEQ ID NO: 255090 - DNA, 122 bp, Homo sapiens
gcgtgggtccaagacagggcaggaggggcctgatggccacgcgagctctaggaagcttcccgtctgggcagctcagctgcctggagaggtccttgctgggggtcatgcatctcgtggggcag

SEQ ID NO: 255091 - DNA, 122 bp, Homo sapiens
gtaggccgtggtgcgcgtgcgcgagtcttgagccaccccacctcccccctaccccgcattcgctgctgctaagcgacacccgcacccaaaccgaccaatcccggcgcgcctccacagccccc

SEQ ID NO: 255092 - DNA, 122 bp, Homo sapiens
tctgtggttcctcccttgtgtttctctccctgcaccttccaaggtcaccttgcagtgtaacggtgagcctgctctcctctgtccaccgttagcatgcaggcgctccacggcaggcactgcct

SEQ ID NO: 255093 - DNA, 122 bp, Homo sapiens
aataatctagtctagcctttcattttaaagatggggaaaataaagcccaaagagaggaaacggagtcttgaagcaaagctggacctaggacctaagtggccagactcccaactctggtatct

SEQ ID NO: 255094 - DNA, 122 bp, Homo sapiens
cgccctccagctgttgcgcgtcggaagccggaagcagggactgagcgacagactaggaaacgccggtttctccggggctccccagcgccccacctttaccccggaggccgccctcttccatt

SEQ ID NO: 255095 - DNA, 122 bp, Homo sapiens
ctctgcactctcacccgccagggggaaagcgctctacagccaggaaaagtgaagcgaaaacggcttccgtagactccgccaccaccgagtaacagaccaactctgacagcccgaagatcgca

SEQ ID NO: 255096 - DNA, 122 bp, Homo sapiens
agaggcagaaggctgggcgacgtccggagaagaagaaacgggggaagaacttttctcttacgatctggctttactctcacgcgcacagccgagtccctggggacccagcagaggtccgaagc

SEQ ID NO: 255097 - DNA, 122 bp, Homo sapiens
attcccaaggctgaagggaactgtagtcctccttccgagtgcccagggctgcggacgcggcgaaggactacatttcccagaagcgccggtgacatcccgggggcggtgcgggctgcccctct

SEQ ID NO: 255098 - DNA, 122 bp, Homo sapiens
gcccttgggtgccgcccgggacatgctggagttcccacaggtgagttaaagggcgctcggcggcatcgaggtgggtgaattgtacagaacaccctaaattgtcacataacgtcacgtcttcg

SEQ ID NO: 255099 - DNA, 122 bp, Homo sapiens
ccgaagctttagactcataagccgggtcaggccaaattccgctgtgcgtaggggaacaaacggcacaaacggggcacaaaaggggaacaaacggcatacgcaaccgtccccgcgggagcccc

SEQ ID NO: 255100 - DNA, 122 bp, Homo sapiens
gtagaaatctctgatgattatattggctgtccagctcaccggaatcagaacgaagatgcccgtcaggatgaagaggactcctgaagttcccagaaggtatgctttggccctctcgttagagc

SEQ ID NO: 255101 - DNA, 122 bp, Homo sapiens
cattggccctgagtggagactcctgctcagggtcacccctcgattccaacaacccacccacggcagcaggagctggccctgctgtcagaccttcctgggacccactccctctgctgcttttg

SEQ ID NO: 255102 - DNA, 122 bp, Homo sapiens
tctgctccggcccgcggggtctggccgttcctctgacactcagaaggacacacagacagccgcggcctgtcaggagcctcctactcccccggggacagcggcggctggctgataagaaaccc

SEQ ID NO: 255103 - DNA, 122 bp, Homo sapiens
ttgctcctcctgcaagtgtctggggcggggagggcgtaccccacgggtgccctcactccccgcaggcctctgaggaagctgccctctagacaagggtctgggtcttcccagtcgtgcccaag

SEQ ID NO: 255104 - DNA, 122 bp, Homo sapiens
gctgctggcacaggtgctaagcctcttactgctcggggcttgcggattagggggccgctccgagtgcggagcccgccgagcccacgcccacccggaactcgcgctgggcccgcaagcgccgc

SEQ ID NO: 255105 - DNA, 122 bp, Homo sapiens
gggcagggaggaggaagtcgtctggaggtggggcttcagcccggcggggacgcggtggggcgtggccttgctgttgtgggcgtggtccatgggggcggtgggcgtggcagaggctggtgggt

SEQ ID NO: 255106 - DNA, 122 bp, Homo sapiens
atctttcacagagtgtgacttcaatttatctccagcctcatctgacgactctatgtcccacgcattgctatctacacacactaaattcttgcttcctagcctttgcttgttatctccttctc

SEQ ID NO: 255107 - DNA, 122 bp, Homo sapiens
gtgattgtaactatgtagaacccaagttgatttgatgacaagaaatattatatgctactacgttcatttgtcaaattaaaggaagagttaaactttttttatctgtgtctattagcccctct

SEQ ID NO: 255108 - DNA, 122 bp, Homo sapiens
ttaagtagaagctcagttagttctctacacttcaatcactccgttccagttgcctggaaacgtgagttgcttctccaacagtgaactataaagcaccgaagattcctgcatatgtccctgca

SEQ ID NO: 255109 - DNA, 122 bp, Homo sapiens
agggcctgcagccggcctgcaacgagcccgccagggtcagtgcagccagcacgggggctccggctgtagcccaggcacgtgccagtgtgtccctgggcgtctgtattgctatcacttggttt

SEQ ID NO: 255110 - DNA, 122 bp, Homo sapiens
ccacactggtggagctctgcattcaaaaaaagaaaaaaaaaaaaggcaaaaaagcgtggccgcaggcacccgcctttcaacggtcagttctgacattctgactgaacatctctcaattgtcc

SEQ ID NO: 255111 - DNA, 122 bp, Homo sapiens
tttaccacttatttaatgctcacgattctactagaaaatactattaaccccacaacagatcgaaacatttaaattaactgctactaagggatgggctaagggtataaagctaggcctaacta

SEQ ID NO: 255112 - DNA, 122 bp, Homo sapiens
tttataagctcctggagggcagcgacccactgagatctctgtaccgtgacatctgtcactcgctagaccctagtacagtgcgtgacacgggattaagcactttacaaaggttaatggaatga

SEQ ID NO: 255113 - DNA, 122 bp, Homo sapiens
gatgaggataatgagatgcattagcacccattttcttcagtcattcaggcattccgtctgcgggttcttcagagtataatcctagaggccattaggaaccttcaaccctggatccagcagcc

SEQ ID NO: 255114 - DNA, 122 bp, Homo sapiens
cttgggggagggcaggggtggtatctgggtacacagtccccagccacggtcggacaagcccgattcctggtgatggggtaatgcacacgcagctcttgggtggcctagctcagaaatacatt

SEQ ID NO: 255115 - DNA, 122 bp, Homo sapiens
tcagcccattggactgccactgtgttggggctgagcacccggtcccgggcagaatggagacgtccggaagagaacactgacctccaggttgcggtaaatgcaaatgccctgtgaaggagctt

SEQ ID NO: 255116 - DNA, 122 bp, Homo sapiens
gggaactcgagtggccgcgccctgggtcctgcaccgtgaggctggggggaccaggaccggcgggcgcccaccttggtcctgagcccagctgccgacgctgggccagcaccctctccaccgcc

SEQ ID NO: 255117 - DNA, 122 bp, Homo sapiens
acacgccgtccctgctcactaccccatcggtttccttcgggagtcttcaaagccagtgcacgtgctcccaggtctcagggaggcgacccagggggaggggcagagagaagggggtccgagcc

SEQ ID NO: 255118 - DNA, 122 bp, Homo sapiens
agctctgcggcaggtgctggggccacaggaggaaccagcaaagtcctcgtcactggggatcgcgtcctacccgggggcacagaccataaaggaaaactgcagggaccagcatataaggtggt

SEQ ID NO: 255119 - DNA, 122 bp, Homo sapiens
accctggcacagacacacagcagggcggcgcggacccttggcgcagacacagacccaggacgcccaaacaggccacacaacaccttgcactaacagcacaggcgttcggcacagagacacag

SEQ ID NO: 255120 - DNA, 122 bp, Homo sapiens
cgcgcccccggagagcggggacaaaggcgaggctccgcccgagccacacacaaagcggagcgacccccgcccaccaacccctccgaggcccgcagccccgcccgccgccctgcagcaggggg

SEQ ID NO: 255121 - DNA, 122 bp, Homo sapiens
ttggagaatgaggctcaggtggccttctggctgcaggggggcagcccttgcctggaaggccgttctccaggacactgacccgctgggggttaccgggggaccagcagcctccaagggtgctg

SEQ ID NO: 255122 - DNA, 122 bp, Homo sapiens
tccctgcttccagacttattctcctgccttaggtacagtcactatcgtgatattatctatcgctgtgtcaacacaacaccaatccaagcccaaccgcagctctctcactgccgcaccgcttc

SEQ ID NO: 255123 - DNA, 122 bp, Homo sapiens
ccatacggagagtaacatcaccctgctctccccccacctccagcttctttctgctaaggtcgccttgcccctccaggtggctttcttgggcagggcataaaagaaattacgtggttttcttg

SEQ ID NO: 255124 - DNA, 122 bp, Homo sapiens
gaaacattgagaaggtggccacctacaaggtacctctccagaaaccgaacatgctggcaccgatttcagacttccagtctccagaactggaagaaaataaatttctgtgtgtgtcttttttt

SEQ ID NO: 255125 - DNA, 122 bp, Homo sapiens
gctgagtggtcagcccttcatttgtggaccacgctgtgccgaaactgttctgccagtgcccgcctgactgagccgcgtctgggccccccagccactccacggcttcagagtctgtgtcttga

SEQ ID NO: 255126 - DNA, 122 bp, Homo sapiens
cccgggcgccacggaaggaggtgggctttcagggagtggggcggggtttttctacctaggcgggaacccaaatatcgttttgattggcaacagctgagcccagaaacgagacttgctctgat

SEQ ID NO: 255127 - DNA, 122 bp, Homo sapiens
gtttgaagttttcccccaggagctctgtgttctctacaccctggaaatcattgacctggacgagaacaaaataggtgccatcccagaagagatcggacacctgacggggctgcagaagttct

SEQ ID NO: 255128 - DNA, 122 bp, Homo sapiens
gaaaaccgcgtccaaaccaggctgcattccagtggggctcagtgcctggcagctacggagcgaagccccagggaggctccaggctgcgctggtttcctgggtcgctatgacacagctgtgca

SEQ ID NO: 255129 - DNA, 122 bp, Homo sapiens
ttatctcataaaagagataatttataaagtcgctctcaaaagagggacaacagagggttccggaacgttcccgccagccgccacgagaagaccagagaggtgcatcacaacagcccaaagtc

SEQ ID NO: 255130 - DNA, 122 bp, Homo sapiens
ggctggtaggaggggtaaaaatgacgggtctttcatgcgcatgaaagcagggatttagagcgcattgcacggtgttcccaggctccggagtacagttccgatctgtatggatttaaatattc

SEQ ID NO: 255131 - DNA, 122 bp, Homo sapiens
gaggagggtgaaaggagaagcccccgggctgtccccaagggagtgctccctggcagagtgcgctgggccctgccctcctgacgagggagcgcccctacactagtgcatattttccatataga

SEQ ID NO: 255132 - DNA, 122 bp, Homo sapiens
cgcgcccgcactcctcagcctttgggcagtggatgggaccgggcgccgtggagcagggggcggcgcccttcgaggaggctcgggctgggcacgagtccaccgggagaggggagggctcgcgc

SEQ ID NO: 255133 - DNA, 122 bp, Homo sapiens
attcatctctttatattttatgtttactctgacaccatatacaaattccttggcctccttcgttggagatgagcatcaccctgaagttgggatgtatcatcccatccatatattctcatttt

SEQ ID NO: 255134 - DNA, 122 bp, Homo sapiens
gatgagcgctgggctggtgtcagcctcccacccccaccctcccaggggtccctctccagccgccaatgaggaccagagccctggatagatgagggttgagggaacacgtctggtccggccat

SEQ ID NO: 255135 - DNA, 122 bp, Homo sapiens
cctcagcactactgacatattgacattggagctgcacaactgttgtggggggctatcctacgcactacaggctattgagcagcatccctggcctctacccactagataccagtaacactccc

SEQ ID NO: 255136 - DNA, 122 bp, Homo sapiens
atgatattattagagcaattcccttaaagccattacattttctttcgagtgagaggaactcgagctagctgtttaaaattttggatctgcaccttatttctctagaagacattaatggttac

SEQ ID NO: 255137 - DNA, 122 bp, Homo sapiens
agggagagaggtgggtaggaagggaggagttcgagcctaaggagttaagcatcctctctccgccctggctggtcacgctgcccctagcgcgacctagtataaaccagaccgagtcccgaagg

SEQ ID NO: 255138 - DNA, 122 bp, Homo sapiens
ctgtcggtcagaggaggagctgccccagaaggccatgtggggtgaccttggcctcctcgacgttccctgggccagcacaggcacagaacgatactctttttgtaaagagacatgtactcact

SEQ ID NO: 255139 - DNA, 122 bp, Homo sapiens
tgtgacctgctccttcaacccagagaggctccacaggtctttggcaacgttcaaacaatgcgaggccatgtgaaaagtcaatgacttcatcttcagtcccatgaattattaatactggagag

SEQ ID NO: 255140 - DNA, 122 bp, Homo sapiens
cctgaagaccctccagcagcagaccttcaagatagacattgaccccgaggagacggtatgcgcgcgggccgggggcaggggcagccgcgtgcgggccgcggggagcgccaggagctcgtggg

SEQ ID NO: 255141 - DNA, 122 bp, Homo sapiens
aagaagagaatcaagctctgtgggtctggactgagagctccttacctttctcttcttaggcgatggtgagggtgggttgtcacaacggaggtaagagaagtaggggagtaataggaagaaga

SEQ ID NO: 255142 - DNA, 122 bp, Homo sapiens
aaatgatcatacaactaacaaaaacatgtctttcaaatagtgattaaactctgataaatccgtgtgatggaatatatgcaatgaaatgaaacaaaactgctgatatgcacaacgacatggat

SEQ ID NO: 255143 - DNA, 122 bp, Homo sapiens
tgttgttctgccagtggggttccccaagggaaataccagtgccagggtcctgagcacagccgggtgatccaatcacccccaatgagctcagggcttgcccccatgcctagcagctgagcaga

SEQ ID NO: 255144 - DNA, 122 bp, Homo sapiens
ttcctggcgctttcctgggttgcttctggcggccatggtgttgctgctgtactccttctccggtaggaccccggggcgggttcgcgcgtccgcggcgagactagagctctcctcagtcgggc

SEQ ID NO: 255145 - DNA, 122 bp, Homo sapiens
cagcagcgcgggaggcagcagcgtccgcatcccgagctcagcgtgccgggggccgcccagcgcccgccgcctccgtcctaggtccccgcggttccgccgcctccagcatgggccgggagcga

SEQ ID NO: 255146 - DNA, 122 bp, Homo sapiens
ccgggctgctgctgcggagggcaaggccgcccggccgctctctgggcgggagctaagaggcgcccacacggatgcggggaccgcgcccggtgactcgggctggcctctgctctgcgcgctgt

SEQ ID NO: 255147 - DNA, 122 bp, Homo sapiens
acaatattatcttaaatatacctaaggtagagcagctttaaaccctccagcctcagatgacggtactggtactttggtattgaagcatcttggtggattaaggttctgaaaattgtttcaaa

SEQ ID NO: 255148 - DNA, 122 bp, Homo sapiens
gatccccaaggggcggggggtagggagcagccctggagatgatctcgcacctcctgctggcgtcaccaagcccgcggagaggaagcggctgtcactcggaagatgagaaattggagtctgag

SEQ ID NO: 255149 - DNA, 122 bp, Homo sapiens
acacctcgtccacacctgcccgtggaatgctgcaggccaggcgctgggtcacactcttcacgcggattatctcgtgtgacacctggcccacacccgtccgtggaatgctgcaggccaggcgc

SEQ ID NO: 255150 - DNA, 122 bp, Homo sapiens
tacttctcctaaacccagatctgccttgaacttgaactgaggtgtaggctggctgagtagcgagtgaagcacctggtagagccactcaagaagggaccccaagctcattaatttggccccaa

SEQ ID NO: 255151 - DNA, 122 bp, Homo sapiens
tgaagccctcaaggacaacactgtggtgaagacgttcagtctggccaacacgcatgccgacgacagtgcagccatggccattgcagagatgctcaaagtcaatgagcacatcaccaacgtaa

SEQ ID NO: 255152 - DNA, 122 bp, Homo sapiens
tgggctctttcccttagggtctctggccctgttcttgccccagcatgacttttatcgggacgccgttgtggaagcctcacgcaggagccctgcccccgtggagaagatcccactggtgactc

SEQ ID NO: 255153 - DNA, 122 bp, Homo sapiens
cacagcttgagctgtagagacgcctgcttctacagctgggctgcccctgtgttggggcaccgtgggctgctcctgtagggccagggctcaggcccctggaggctctcttgcctggggagaac

SEQ ID NO: 255154 - DNA, 122 bp, Homo sapiens
ttctgttgcctgtgtgttgtctcaagctactgtgggaaatcggttcatttttgcttatttcggcttgctatttaatacagtgctttgttcatggtaagtttaattcagtacatgcttgatta

SEQ ID NO: 255155 - DNA, 122 bp, Homo sapiens
aagaagcaagaacaaggctgggaggctgcagggtgccccacacttgagcaggtactcggccggaaccctaagcctctggagccccaggttggcccctcaaaggaggcctagctgcagcccag

SEQ ID NO: 255156 - DNA, 122 bp, Homo sapiens
gccgccaccgccccgcactgcctttttctaggcatggggtcatctaggccatgcatgattcgcccctgccccacagaagtccctgaggggtcctggccggacagcacggaatagaagaacgg

SEQ ID NO: 255157 - DNA, 122 bp, Homo sapiens
ctgtttggaaggcctttttaatacatattcattccttgggagaaagttcaaatctaaacacgtcagtggctctcatggcaggctgttcccattgcaggtgctctctcctttccctagcaggt

SEQ ID NO: 255158 - DNA, 122 bp, Homo sapiens
ccgccccgctgatgccgctgccccgcgcggggcccgagcgccgctagcagcatgtctcggcgcaagcaggccaagccccagcacctcaagtcggacgaggagctgctgccgcctgacggggc

SEQ ID NO: 255159 - DNA, 122 bp, Homo sapiens
agaaaaagaaattaaatttgaacacagtgaaagctgcaagtatgccagtgggtccgctcacgaccgtcctgtttcttgctcctgttctcagcctgttatctggcttatccatcagtttctga

SEQ ID NO: 255160 - DNA, 122 bp, Homo sapiens
gctggcgggggctgctcagacccggagtctgctccatctgcagggtcgaggtctgggttgcgaccccgagcgcctctgcggcctgagcaggtcggggtggggcgttcccatgccggcggccg

SEQ ID NO: 255161 - DNA, 122 bp, Homo sapiens
gagcggccggctgggtcctgcactcgctcgttcacatgctccctcacgcaaggggctgagcgtggtgggctgagtaaacgtttgcccctgtcacgagtccaaagaaggggctgagaaaaagc

SEQ ID NO: 255162 - DNA, 122 bp, Homo sapiens
cagccggccgagcccaaacgagttctcgcccccgaccccacccaccgcgggagcagggttcggtcactcgcagtgtcagagaggcccacatcctcctaaatttccggccctcccaaaacttc

SEQ ID NO: 255163 - DNA, 122 bp, Homo sapiens
ccaacccgcagtcaccgcgggctacgccactcccacccggcacacgcgacacccgccgcgcgcaggctcctgcttgcaggtccggccgctgctcgggccaagtaaacaccgggctgggaaag

SEQ ID NO: 255164 - DNA, 122 bp, Homo sapiens
ttttcctctacatttcatcctattttctgagtccacaattagaggcattccacccaaagacgaattctcaaaggaacaaattcacaccaagattgaaccacaacctcacctggcctgcacaa

SEQ ID NO: 255165 - DNA, 122 bp, Homo sapiens
cctttagtctgatgggtcatggtgcatcatgaacggtgcctgtactcatgtgccctctcccgcctcttcccccagccgcgacaattccccaagcctgaaggaaatccggaacggctgccagc

SEQ ID NO: 255166 - DNA, 122 bp, Homo sapiens
tctccctgcattttgaagaaagaggactgagcccctcctgaagactcagcctctgtggaccgaggataattatgagtgaccataacttaaagcactggtatttgaaatgctttaagtgcctt

SEQ ID NO: 255167 - DNA, 122 bp, Homo sapiens
gcctggggctgcaggatgctgctgcggatgcagagctgtccgcgggctgggcagcgtcgccgtctcccctgagccgcctcggtccggcaggagcggagccgaagcatcccttgctgcacgca

SEQ ID NO: 255168 - DNA, 122 bp, Homo sapiens
agaaggagaggcccaaagacaggcaaccccatgctgcagggtgatgccacccaggtaatacggccgcagggtgatacggccgcagggtgattacggccgcaaggtgatgccgcccgggtgat

SEQ ID NO: 255169 - DNA, 122 bp, Homo sapiens
gaccggcccgcccctgtcccggcctccctgcgcgccctgccccccacaaccctttgccgtcgctcctcggccggtcccctctgcggcccctcagtcgccggccctgcccctcggcgcggcct

SEQ ID NO: 255170 - DNA, 122 bp, Homo sapiens
gcgtgcacgtgggcgtgtgctgagattgcgttccttacacacacagagtctgtgtgtgtacgagtacatcctcatcatagccttggtggcatgccctgggcccccacagatcctggccaagg

SEQ ID NO: 255171 - DNA, 122 bp, Homo sapiens
acctcgtgatctacccgcctcggcctcccaaagtgctgggattacaggcgtgagccaccgcgcccagcccttcctgggaagttttaaaaatgcactggaagactaactgccccattgtcgtt

SEQ ID NO: 255172 - DNA, 122 bp, Homo sapiens
gccactttttcatgtgtttctccagggtgctgtagacgctgaagggcatctggcagatgtcgcagcggtacacctccttgccgatctgcccgtgcgtcttcatgtggcgcgtgagcttgctg

SEQ ID NO: 255173 - DNA, 122 bp, Homo sapiens
gaagcagcaggaaaccatctctggtgttagaacttcaggcatcttgaaacactctgaagccgggggcaatcttttcaggtaggggaacctgcctagagaaatagctaaaaggtaatattatt

SEQ ID NO: 255174 - DNA, 122 bp, Homo sapiens
ggagaggcccccagcctcacatctgggcccaggcctcccctaggaagggatcctgggatgcggccaccgcccccaaagaagggtccccgcgcctggctttctaaaccccttttcccaaaggc

SEQ ID NO: 255175 - DNA, 122 bp, Homo sapiens
agatcatatgtaaaccttcaaaacaggtctgaggggacatccctgtctgggaggagagagcgggggctccggttcctgccggttcacctgcacgcgcctccccgtccatctccctcccgctg

SEQ ID NO: 255176 - DNA, 122 bp, Homo sapiens
gccagtccttgcccacaacgatgtggagccctgtgaaagtcggattcgaataaagggccacgtgtgcacccagaaagccgagtctgtggttcaggggggtctgtcggcggagcggggccact

SEQ ID NO: 255177 - DNA, 122 bp, Homo sapiens
gactctagcaagtctggaccatgcagttacgtctctccaggcctatctgcaagtgtccctcgcccactctgcccccttgacctctggacagcaagcatcctggggccagttctcccccgacc

SEQ ID NO: 255178 - DNA, 122 bp, Homo sapiens
ccgcaagccgaacccgcactgaggcctctcgcggagctgcctgcagtttctgagggacttcgctctcaggcacgcctgctcccacctaggaagggtctcgggacccctttcaatccccctat

SEQ ID NO: 255179 - DNA, 122 bp, Homo sapiens
cactcttccctacaccaccagcacccagcatcactagtttgtactcccgtgagagcccagcggggctgctacagcagctaccaactgggcgagttccagaatccattgtcctcttggggcct

SEQ ID NO: 255180 - DNA, 122 bp, Homo sapiens
gcaatagagacctggagtgggcacactacatatccccctgcagtgatggaacccacagaccgcaggtcctctgcagtccattctcctgcctgtccagaggatccggatgttttctctttact

SEQ ID NO: 255181 - DNA, 122 bp, Homo sapiens
tcctccgagctctcatctggcgtgcagaaaacagggaccgagtcagagccttggccttggcgagggccaccccccaccgccccctggcccagagtggcctctgggctccagcctagtccctc

SEQ ID NO: 255182 - DNA, 122 bp, Homo sapiens
aggtaagtcaggtgatgagagttgttgtcttggagagtagctctcttcgtggtatggggacgtctttacaagtggagatttccattataaaagtaaatttcctttacaggaggggaaattta

SEQ ID NO: 255183 - DNA, 122 bp, Homo sapiens
cagacatttagcctgacggcagaactgtgttctaaaacctcaaagtcataatttgccacacgctggagaaagaaaacagtcgaaatggaagccacctggcgagctcagggcgccaggtggga

SEQ ID NO: 255184 - DNA, 122 bp, Homo sapiens
agtgatcctcccacctcagcctcccacatatgtgggattacaggcatgtgccaccatgcccggctaatttttatatatttagtagaggtggagttttgccatgttggccaggcccgtcttga

SEQ ID NO: 255185 - DNA, 122 bp, Homo sapiens
ttctgccagaacgcacgggctgtgtgaggggcgtcctactgagggtcgggcttgatggcccgggtcggttatatctgtcccccggctaggagaggctctgaggcaataactgcagctgttcc

SEQ ID NO: 255186 - DNA, 122 bp, Homo sapiens
tcagaggccacgcccacccttcgggggcacttgcgtttctccgcacagtcgcagagtgagcggcaagatgggatggcaccatagcaacctcggacacaacctagggactggagttgcgcgtt

SEQ ID NO: 255187 - DNA, 122 bp, Homo sapiens
ctggctgtgtgtttgggccgggatccttacctgtagacgtcactggctgtggaggccttccggtttacgttaacaaacagttctggggccaagtagcccagggtgccccctggctccccgga

SEQ ID NO: 255188 - DNA, 122 bp, Homo sapiens
ggagccctcccaggggtgtagggcccggtggcggcgcgcttgggcttttctagccattgacgaaccccgtcctgtttttcggagttttgagggctcagagggccgcggcgggagcggatcgc

SEQ ID NO: 255189 - DNA, 122 bp, Homo sapiens
ctccctgggcaccgcgtcccgtctcccctgatgggccacgcagacaccgggccacacacgcgcccacgccagccagacacgtccacccctgtgggcacgcgacccccagaggacacacgagc

SEQ ID NO: 255190 - DNA, 122 bp, Homo sapiens
ctttcggggcattctcccacgatcctctccgcaccaccgtgtctgaattggaagtggaggcgaagaaagatatacatgccatatttacctatatgtagtttgttttcaagtttctggtccta

SEQ ID NO: 255191 - DNA, 122 bp, Homo sapiens
tcctcccctcagcatggcaggtcggatcacgtgcgggttctgtcacgtgacatcaggtcacgtgaggccggtcacgccccgggcagcttggctggggctaggcttccggggctctgcagtcc

SEQ ID NO: 255192 - DNA, 122 bp, Homo sapiens
ccccacatctcagagatgggcggctgggcagagaggctcctcactttctagatgtgatggcggctgggaagaggcgctcctcactgcctagatgggatggcggccgggcagagacgctcctc

SEQ ID NO: 255193 - DNA, 122 bp, Homo sapiens
ccccttattgtaggtccatatacttttgttcagcaacatcttatgattggcacagatcctcgaacaattcttaaagatttattgccggaaacaatacctccacctgagttggatgatatgac

SEQ ID NO: 255194 - DNA, 122 bp, Homo sapiens
gggtgttttctcacaacttctcttcaagtaacagttgaaattaaattctacatgatctgtcggtgtctttggattctcatttatttttcaatttctaaagcacaccagccgtttgtgagatc

SEQ ID NO: 255195 - DNA, 122 bp, Homo sapiens
actggagcgaaccccagcgtccgccgacatggcctggaccaagtaccagctgttcctggccgggctcatgcttgttaccggctccatcaacacgctctcggcaaagtgagtctgggccctgc

SEQ ID NO: 255196 - DNA, 122 bp, Homo sapiens
gcccgggccctggggaccctgccatgtgaggcaggcccgggctgggggcccggccatggccggggaacggcccccactgcggggccctgggcccgggcctggagaggtgccgggggaggggc

SEQ ID NO: 255197 - DNA, 122 bp, Homo sapiens
ggggagcaggcggtgtgtgcgcggctgcgaagtcgaggttgaaactgcaccgccaaggcgcgctcctgctgtgtctggagctccggcgtctcctctgcctcccagctcagcgcctcccaccc

SEQ ID NO: 255198 - DNA, 122 bp, Homo sapiens
cgggaagcgtggaccgagcgggccttggccgcgtcttttccggccaggtttggtttagctcgcgcagcgcccgcgcagcccgccagggggaccccggcccgccgggcggcatctgaggagaa

SEQ ID NO: 255199 - DNA, 122 bp, Homo sapiens
ccaatggcactggccagtcagatgcctcctccgctgaccacaggcctcatgagccatgctcgtttgccacatgtagccaggggtccttgtggatcactatctggagtcagaggtaatcaggc

SEQ ID NO: 255200 - DNA, 122 bp, Homo sapiens
gacgaatgtaccagacgacaagcagcctttgtgtgtaggagaggataggttttgttttgtcgtctgtaaaatgggaatgctatgaaaagttccactatcttagggatgttttgaaaaaaaga

SEQ ID NO: 255201 - DNA, 122 bp, Homo sapiens
agacttttttgaaaagaatctttacattggctcaggtaagcgggagcctgggagaagcagcgcttgggtggctgtgaatggtctgcggcagcctctggtcctcatatcccctgctatctcag

SEQ ID NO: 255202 - DNA, 122 bp, Homo sapiens
taaaataaaactctactctagataccatggaagaacagaggagaaatttctaattcacaccgggaagtcaggaaaagacagctagaagaagtcgtcattactacacatctcaccaggagttg

SEQ ID NO: 255203 - DNA, 122 bp, Homo sapiens
cttggccctggccccgtccacggccgcgaccccggccccggatgccactgccgaaacctccgcggaaggcaccacggttccccatcccagggccaccagggcctccggcacccccccccccc

SEQ ID NO: 255204 - DNA, 122 bp, Homo sapiens
tgtgcagcagagggtcagtgtaaccaccccatgggttcattttgcccgtttcccagacagcggatttatcaagacagaggaattgcaataagagtttaattcatgcagagccggctgaatgg

SEQ ID NO: 255205 - DNA, 122 bp, Homo sapiens
acctattaaagtgtgccttgtttcaagaatgcatgtaggtcacgaacaactgctaaagatcgatccttgccacttctttttgagggaattggagttaatacagaatatccaaagataacagg

SEQ ID NO: 255206 - DNA, 122 bp, Homo sapiens
aataaacatgttaatcaacatgtattagggttaaagcaaagtatagagcataatggtaggcggaagatacttctgaggaggagctctttgaacagagctctctgaggcaagggagctagcca

SEQ ID NO: 255207 - DNA, 122 bp, Homo sapiens
ggggccgagccgcgggtcctgcgctggctcgatcgcccgccggcccgcgggtcgctgcggcggagcactagcccgcccgcagctcgctgggcactcactccccgccgctcacgtgacgcagc

SEQ ID NO: 255208 - DNA, 122 bp, Homo sapiens
agctggagccctgagtggctgagctcaggccttcgcagcattcttgggtgggagcagccacgggtcagccacaagggccacagccatgaatggcacagaaggccctaacttctacgtgccct

SEQ ID NO: 255209 - DNA, 122 bp, Homo sapiens
agtggtgggtggggaggaggcaggctggtgggcatacccagccggcccactctactgatgcggagaccgagccccagggcagcagagccctagcttcgcgctacacggctgtgggcgctgcg

SEQ ID NO: 255210 - DNA, 122 bp, Homo sapiens
ccagccctccccacgagcgcgactcggacgccgcagtcagcagctcggggaccccggccccgcgcccgccacccggccccctgccctgaccggccctcccggctcctggtctcacccagaag

SEQ ID NO: 255211 - DNA, 122 bp, Homo sapiens
ggcttatgctagcttatgggccccaactgttccattttcaggatttgaggagccaggtgacgttatgttgacagcttgaaaccatctctcgtaggagtatttgtgccaaggaaattggcaac

SEQ ID NO: 255212 - DNA, 122 bp, Homo sapiens
tggtgaccgggtgtgtgcctggtcctgtggtagctgttgcgcagcctgggggcgcgcccccggcccaggctttcctacagctgcagcctggactggcggggaggaatccggaagcaggaaga

SEQ ID NO: 255213 - DNA, 122 bp, Homo sapiens
gaattcaccatgtctgtgaatctatttttattagcacaagaagctctcacagctcaagctcggcatttccataattaggtcaggaaccaaaaagaatggcacaaactagctaaattcttgag

SEQ ID NO: 255214 - DNA, 122 bp, Homo sapiens
gaagttcaaggtgaaaagtagacatgaaataaagtgtgagctaagagtattccagaaagacgaagcacatgcatgctgtccttagggagtatggaggtgggacaaaaagacaatgattctgg

SEQ ID NO: 255215 - DNA, 122 bp, Homo sapiens
ccaacgaggtagctttgagggttatatgtgcatggaggtaactcagcaccttacctaacacggggcaggcatatgtcaacaggatttcttctcatgactgtcatggggttccttgtttaaat

SEQ ID NO: 255216 - DNA, 122 bp, Homo sapiens
gtgcacagtactcgatggtcccacaaaaagtataaaataattttcccctttccaagtaggcggccgagccaaagtctatcagcttgattgtgaagtcctcggcgatcacgatgttctcatcc

SEQ ID NO: 255217 - DNA, 122 bp, Homo sapiens
gaggctcaggtcggtacccggggatgggtgggcgccttcagacaggtaccgctggcgactcgggtgcccttaccgggcatcctccagcattctgggcacctgcctaccccttggtgaggagg

SEQ ID NO: 255218 - DNA, 122 bp, Homo sapiens
agcccctaaattttggataaagagcctgaggttcagcgacaacctaggacttgttacaggcggtggcaggtgacaatgagaacctcatcttgctggctccccacctaatgattttgcaggac

SEQ ID NO: 255219 - DNA, 122 bp, Homo sapiens
tgcgctataaactgatgggcgctttatgtgccacaaactgacggatgggcgcttcagtggcgctacaatccagaacgaggagcagcgatataggagctgcagacagaaaactgaattgcgct

SEQ ID NO: 255220 - DNA, 122 bp, Homo sapiens
tgccttatctctttaatcacacctctctttcactttccacggtagtcaggaggcggagatcgctgcttctcacctactttctgaacttggcctccgcagtcgcgacctggcgtgaaggagga

SEQ ID NO: 255221 - DNA, 122 bp, Homo sapiens
tgatgaggtgcttggccagcgcgaactcctcctcatcaagcatgccgtcgcagtcgcagtcggccagcttccagatcttgcccaggacgctgttgggcagcttggaggtcaccatctccttc

SEQ ID NO: 255222 - DNA, 122 bp, Homo sapiens
acacagccatcatccgctcagcccctccctccccgggctccccgcggattcgctcagtcccggggcaaaactacccgaggcgccagcactccggctcgccagctcgctcttgggctgcttag

SEQ ID NO: 255223 - DNA, 122 bp, Homo sapiens
catctgtgtctgagtgcacaaatcctttgctggttttcttatgtccaaatctagttatctcggttaaccacagaatccttcagtgaatccattggagaaatgtatttatacatcacgaagat

SEQ ID NO: 255224 - DNA, 122 bp, Homo sapiens
actgcccgccggcactcgccggctcgcggacagccgctcaccccgctgccgtacctgccccgacgttcgcccgggacccagggtatccaccaatgaccctgcccggagccgaagcctccgtc

SEQ ID NO: 255225 - DNA, 122 bp, Homo sapiens
gagaggctcggctgccggccacagactggattttctgacatcaagtcccacgcgttcttccgcagcatagactgggacttggtaaagcatcacaaagcctatttgcacccccatccccatcc

SEQ ID NO: 255226 - DNA, 122 bp, Homo sapiens
gaccccgagacgctgcccaaggtatggcctttgggggtggacaggaacaggacagggctacgcagaactgctcaggctgtggccaaggaaagcgcctgagggcccaagcttggggcttcctg

SEQ ID NO: 255227 - DNA, 122 bp, Homo sapiens
gaggagcccagtcggtctgactcccgcaaactcccggcaccgtgtcagccacatagtaggcgtctactggagactttgtttagatcagttagtcaacgcaggcagcagctgaatcaggagag

SEQ ID NO: 255228 - DNA, 122 bp, Homo sapiens
ggcggtgccgcccatggagaagccggaagtggtgaagactcacctgcgggacatgatcatcgtgcccgagatggtgggcagcatggtgggcgtctacaacggcaagaccttcaaccaggtgg

SEQ ID NO: 255229 - DNA, 122 bp, Homo sapiens
cgtaccctggacatgccctcctctgtcacaccaatgcctttctacgaagacatgtgaccccgaagcagctcgtcgacgcgcccctcccggactctggggccataacttacatctagtttgcc

SEQ ID NO: 255230 - DNA, 122 bp, Homo sapiens
ctcaagctcagtaggatccttgttgaacaccagctccctctagcgttctcttaggcctctcgccgcgttcagggcctgggagttttcttgcatcactttcctccttccctcttgccgcctcc

SEQ ID NO: 255231 - DNA, 122 bp, Homo sapiens
cctgaaaagctccagctaaatgaactgatgtaatctcagtacagggctagtaggcggtaacggcagggaattctcattactcctgaattttgaggaggaaggaaaaagagtaaagtactcta

SEQ ID NO: 255232 - DNA, 122 bp, Homo sapiens
caggtcctcacagtagctgcctgtgtagcccgcctggcagcggcagtggtgcgtgttgcccgcgtccacacagagccctccatgctggcacaggcgggcaacgtcaacacctgcgggggatg

SEQ ID NO: 255233 - DNA, 122 bp, Homo sapiens
tgccaccttccataggcaactggaagcactggctgtccagcacaatgcatgacttagcctcgcagaaatttcagagtcaaagaccctgggcccagagctctcatggtaagaggctcgaactc

SEQ ID NO: 255234 - DNA, 122 bp, Homo sapiens
ccccctcaacgactgcaaaagagcctaaaccaaaatcccctagtttctattgaacactatcgctgtgtgtaccaattcctggactaggtcggcgtaagagaggaagtaggtgaaaaaaataa

SEQ ID NO: 255235 - DNA, 122 bp, Homo sapiens
cagagcatggcaccaactggggagtctgtcaaacagcccagatgaatgtctttccaaacacgcggtgcctgcgtttccagggacagggacacgtcttatcaatttctatatattacagcttt

SEQ ID NO: 255236 - DNA, 122 bp, Homo sapiens
gattttcttcaacccttcaaaaatgtacaacggttcttagttgaggggctgcacagaaggcggggctgtagtcagctgacccctggcaagaaccaggccgcacagcgtgtactcagccctcc

SEQ ID NO: 255237 - DNA, 122 bp, Homo sapiens
cctgttcccctggggacagctcggccggcagccccagcgtttccttccccatccccgccccgcagattcatgctgatcctggccagctgccaccccgagcagttcgactgggccatcaatgc

SEQ ID NO: 255238 - DNA, 122 bp, Homo sapiens
gcagctggcatcaccagccacagggagtgggccctgggagctgaggccccccaggaaggccggtgctggttagagaccccgtgttgctgcagtcccttgaggctggggcagtgccttgaggc

SEQ ID NO: 255239 - DNA, 122 bp, Homo sapiens
ttcccgggcagcggcgagggggcggggatgtggcggccggaggtcaccggggcgtcactgcgcccgccctggccctcccccggcccgccccctgccccgccccctgccccggcccggctcca

SEQ ID NO: 255240 - DNA, 122 bp, Homo sapiens
ggggactccatgttcctggtttctaatgtctctatttagggaaggtctctggtctcccaacgtctctaactctgaatttccttcacttagcctgctcactgaaagggggccaggagctgtgg

SEQ ID NO: 255241 - DNA, 122 bp, Homo sapiens
gccatcccagggcttgagaaggagctggcctgctgccttcctggacggtgaggacgctgacgacattgttattgcaagttttctggcaatagggagcccccaggggcaggggagggcttgga

SEQ ID NO: 255242 - DNA, 122 bp, Homo sapiens
acgcgcgttcaccctggaccttcctcgcgaccgcgcctgagtcgcaccagcggcagagagcgatttcaccaagcatctaagagttctttagatctttaggaagtctaaggcagcgattgcct

SEQ ID NO: 255243 - DNA, 122 bp, Homo sapiens
tttaaccagtattttttttttgtttccagcagaaccagctgacccctgcctgcagaactccgggtccctcttggagctctctgatggcagctgtagggccatccccagcggcactgtttccc

SEQ ID NO: 255244 - DNA, 122 bp, Homo sapiens
gcctggtgggcgcatcaactgcccttggaaggtgccaccccgggccatcacagaggccaacgtggcagagaggtatctgcttccagccctttcacttcacagaggaatcgggaggcctggct

SEQ ID NO: 255245 - DNA, 122 bp, Homo sapiens
aacttaatactattggctgacctgtaccttcaactgagctgggtgagtaatatttaaatgcggagcctgacagctcataacccacggcggcttactccccctgtggcaagctgctgagccag

SEQ ID NO: 255246 - DNA, 122 bp, Homo sapiens
gtggccgccggtggccggagctgctcctcttcagcatggactcggttagtgttcacgggtcgtaggtccacagctccatggaacttcgtaagatgaacacgtctgtggaactggtaccacaa

SEQ ID NO: 255247 - DNA, 122 bp, Homo sapiens
gccccgcttacctgggccgtgcgccgagagctgagagcgtccccaaatgctgagcagagccggctggcctgggtggggcttttatacccgccacatcctccctaggcgaggcgaggcccgcc

SEQ ID NO: 255248 - DNA, 122 bp, Homo sapiens
gcgatcgcacgtgaagttgtactgcacctccgcagtgtgcttcttcatgtgccagttgagcgacgcgcgctgccggcactggtagccacagatctcgcacctgccgggagcccgtggcggga

SEQ ID NO: 255249 - DNA, 122 bp, Homo sapiens
cccccttcccaggaaattggggatgtggagaactgggctcggagcatcgagctggacatgcgcaccattgccactgcactggaatatgtctacaaagggcagctgcagtctgccccttccta

SEQ ID NO: 255250 - DNA, 122 bp, Homo sapiens
aaggcaggggggtcatgcatgtgtttgggagtggttatcaccccatgaagatagtttccacgccaattttgccttctttaatgtggtatttgctttaaggctgtaccagggccacttgcttc

SEQ ID NO: 255251 - DNA, 122 bp, Homo sapiens
gaactcctgacctcaggtgatccgcccacctctgccttccaaagcgctgggattaacaggcgtgagccaccgcgcctggcccaaggtaaatttttcaccctagcggggagtaaggtacttcc

SEQ ID NO: 255252 - DNA, 122 bp, Homo sapiens
tttcctctgctcccgggtgtgtcgagtaaggctaggaagcagcggacgtgtccggggcgccgcgtggggaaaggagagcctgcggcggacggcaactccgcgattccgggatccccaccgag

SEQ ID NO: 255253 - DNA, 122 bp, Homo sapiens
gcgaatgaaataaacgaaaatagacattttcccgaaggcgaaatagacatcctccttcggcgccggggcttggaggcgggcggcggtgggcgcgggttaacgtccccggggaaactgagacc

SEQ ID NO: 255254 - DNA, 122 bp, Homo sapiens
gaggttgcgcatctttgttcaaagcctttgttttaaacctggagatttttgtgtctgcagcggatctggaggtagctaaagagaaactgaaaaacggttgcaaccccaaattgaggtcttct

SEQ ID NO: 255255 - DNA, 122 bp, Homo sapiens
actttaaaatatatgagtggaactaggaaatgctaatatctaacttctcagcccaactgccggtaattatttcactgggagactttcaagtaaaaattgtgggacattttggccaatgggtt

SEQ ID NO: 255256 - DNA, 122 bp, Homo sapiens
ttttccattttaaaaatagtccccaaaagtggactgatttgttactggtcagaaaatgaacgtatcacccaaaaaaaattctcagcacagatccaatctctcccatgatgcaaacagaaaga

SEQ ID NO: 255257 - DNA, 122 bp, Homo sapiens
tggcgccgctgccccggctgagagtgagcgtggtgtcgacggagggagatggcccgggagcgccggcgccagtaactgggagctgatgagagtcgccgagggcgcgccgggcccaggtgccg

SEQ ID NO: 255258 - DNA, 122 bp, Homo sapiens
cagaaaggcgacagtgcccagtaggagagtccgaggatggaccactgcccagagggcagccgccagagagcccatcgccgcgagcatggctcagacgtcctcctgctcttctgcggtccaag

SEQ ID NO: 255259 - DNA, 122 bp, Homo sapiens
gtgcagccgcatgatcgcagctcactgcaacttctgcctctcgggttcaagtgattatgacgttaaatttctacttatataattcagaatgttgccgggtgcagtggctcatgcctgtaatc

SEQ ID NO: 255260 - DNA, 122 bp, Homo sapiens
aattcacagatgaaaaggtattcgcggcaggaattgtctaggagggcgtagtgctggctgcggaagagggcctcaaatggatactgggagaggaggagtaaagaagaaaaacagaagggatg

SEQ ID NO: 255261 - DNA, 122 bp, Homo sapiens
cccctgcccttggcctgtccccgatggccctgcctgtcccacaggatgtgcgactgccctcggccctgctgactgtacttctcagccctccaccgtctgggccctgctcagggcgttgtgag

SEQ ID NO: 255262 - DNA, 122 bp, Homo sapiens
tttcccaggaatcctttgaccttgactcctcagcctccccagcgagaatcctgcaagtggcgcttgacgtctcccctctcttccccaccatcagtgtgtgtttaattaggtctgggtgtgtc

SEQ ID NO: 255263 - DNA, 122 bp, Homo sapiens
taaagctatctccatttagattgatacccattaaatagcatagtgctcccattaaactagcgacaaattcatttaattgtgagatatctagtacttatgctccatcctgtttatagggatta

SEQ ID NO: 255264 - DNA, 122 bp, Homo sapiens
acctgacctgaattaacacaaggatttgagtctttctcactcacttcaaatattcattatcgtttcaccacaaaaatattcctgtgcttggcaggacacagtggctcatggctatactccca

SEQ ID NO: 255265 - DNA, 122 bp, Homo sapiens
caacaagaagagctggtatggccctggccttaaggataagttagtcaattgcttattgtacgtcacgagatgaatgctgggagagaggaaacacagggtgtgtagggagagggcaaaaacgg

SEQ ID NO: 255266 - DNA, 122 bp, Homo sapiens
gacatggcaccggaaaagcaggctggggggatattaccagcggggccttgaagggcacgtcggtttatacaggtcgaacatcccttatccaaaatgcttcaggaccagaagtgtttctgatg

SEQ ID NO: 255267 - DNA, 122 bp, Homo sapiens
tccgccccactccgctccctgtgtccccaatggctctggtaagacctgccttgttccagtcgcacctctgtcctctctgctgttttcttattgtatccctttcccattctctttttttcctg

SEQ ID NO: 255268 - DNA, 122 bp, Homo sapiens
cctgatctcccttctaggccacaccctgggtggtgggggcgcggtctgtccagctggcaacgtgtgacggtaggaggggcttcaaggacaaacagattctgcaactgaaattatatggatcc

SEQ ID NO: 255269 - DNA, 122 bp, Homo sapiens
acacgctgaagaaaatagcttcagcaggctgaccagactttctgctgaataggccatcctcggggctgagatccaagagctctgaggtattgtttaggacagtctacagagaactgcagatg

SEQ ID NO: 255270 - DNA, 122 bp, Homo sapiens
ggagatgggctgcctcgggctgggactgggatagcagcagcgctggctagacaagccagccgccacccctccctgcagaattggccgccccccgaaactcggcatctggaatggggctgtgg

SEQ ID NO: 255271 - DNA, 122 bp, Homo sapiens
ttccgaggccctgccacgacatactctaattggggtgcagccagagttgcaggaagctggcgaggaaagcggtgcacctgtgagcataaagcgaaaaacatagacaagcacagggtgagggt

SEQ ID NO: 255272 - DNA, 122 bp, Homo sapiens
cgacatcgcaccctccacttgggtcaaagctttatcactgcaggcgagtgtgcgggcgcccgggacaactcgcaaaacgtctggaagttcccaccactccccagaacaacagagaccaaagc

SEQ ID NO: 255273 - DNA, 122 bp, Homo sapiens
ccatttcctgctccacagttgcaggctctgtggtcagctacggggtgacgagagtggagtcggagaaatgcaacaacctctggctcttcctggagaccgggcagctccccaaagacaggagc

SEQ ID NO: 255274 - DNA, 122 bp, Homo sapiens
agaaagataatccattaatccattttgatcactaattctgttctgagcttttgtgctttccgtaattaaaggtaatttgcttaagtatctgacatctccattacaaaatgctctccagttcc

SEQ ID NO: 255275 - DNA, 122 bp, Homo sapiens
tgaagcctaagaaatgacacgcggtaaaatgatactagacacaggccgggctctcaggctcgcggaccgggtctgagcacaagctggccatggccatgcgtcctggtcccggggtgcccggc

SEQ ID NO: 255276 - DNA, 122 bp, Homo sapiens
atgctgctctactcaaaaagcacctcgctgacattccactggaagctttgggggcgccaccggggccggcggcggggcctcgcacaccccaagaaccatctttcaccccagcaagggggtgc

SEQ ID NO: 255277 - DNA, 122 bp, Homo sapiens
gacaagtagctgggaggatggcgtgcctgcagaagacgctgagccctgcctgggcacacacgtccagaggcccccggcagcatgccgggagggcacagacatacttagcgcctccccactgg

SEQ ID NO: 255278 - DNA, 122 bp, Homo sapiens
ggccggcatgacattggggtgcggggcgtgcgcgccgtagtgctgtgtggcgtggagcggcggcccgtggttcaggtggtgaaccggggggatcggccgcggcgcgtgagggtctccgtaca

SEQ ID NO: 255279 - DNA, 122 bp, Homo sapiens
tttgggacgtacccacgatggcagctgtcaggatggccttgatgagaggcagcgagctgtcgtaggcttccaagggaacatgcacgacctgattcctcagccggtttttatgaaggatggac

SEQ ID NO: 255280 - DNA, 122 bp, Homo sapiens
cgtgtgggaaactctgtgctgtgcacacgcgtgcattaaatacacagcctcatttggcctcgtggaaactcagggaggcagacagtgtgttcccatcttagagacgggagcagtgaggctca

SEQ ID NO: 255281 - DNA, 122 bp, Homo sapiens
gccagaccctgccgtgaccaggcccgtctgtgacctgaccaggatgtgaccagagccggccgtgactgaaccgtgtggtgacccaaccgcacacgtgcccacgacgcacagccccgcggggg

SEQ ID NO: 255282 - DNA, 122 bp, Homo sapiens
tgcctagggcaaaggtcaagatctggttgacagggcacgagacataactcgtaaaatactcggtagagaagtctggtagaccttcgtctggttatgcaaatggacacgaacagagaaaacac

SEQ ID NO: 255283 - DNA, 122 bp, Homo sapiens
ttctccttttgtatgagtaaacagacatttaaaatagaaacttgtttggaaatggagagacgtttgttggagaaaatgactgtacagaagcatggcaaatcataacagaaaagttctggtgg

SEQ ID NO: 255284 - DNA, 122 bp, Homo sapiens
ggaacctactctccacgagtttttattgttgttgcttttgtaccccctcgggatccctagcggaggcagtgactctctttccccccaagacgttgttccctgtttgaaggtgttcttcctaa

SEQ ID NO: 255285 - DNA, 122 bp, Homo sapiens
aagtgatgccctcgtccgcctccgtgctcatctctccgggccgggcagcaacggcggcggcgtcccccgcccagccgcaccgcctggccagccacagctcggggctgctccgcgcccgccgg

SEQ ID NO: 255286 - DNA, 122 bp, Homo sapiens
aattgatgcctcctgagctgactgctggcctcggtgtgctcctgcttgagagctgtctgccgggggaggagaatgcccagctctaatagttacatcttcaaaaaggccacctggagaaggaa

SEQ ID NO: 255287 - DNA, 122 bp, Homo sapiens
acagcgcgcgccgtgattagctagtatttcccggcctcggccaaattcgaagggattggccggggccggggcgaggacgacgcgcggtgggaccgacacccgcgcctgcgccctgggccgcg

SEQ ID NO: 255288 - DNA, 122 bp, Homo sapiens
gcatgggtttaaaatcagacggtgggatcggggacgaccccttctcaatcccggaggtctcgggtggcatgggtttaaaatcagacggtgggatcggggacgaccccttcttaatcccagag

SEQ ID NO: 255289 - DNA, 122 bp, Homo sapiens
tctcctcacttctcagacagggcggccgggcagagaagctcctcacctcccagacggggtcgcagccgggcagaggcgctcctcacatcccagatggggtggcagggcagaggcgctcccca

SEQ ID NO: 255290 - DNA, 122 bp, Homo sapiens
tgctccattgttctcattctgataattaactcagcaagccggatgcggcgtctatacacacgtcaggaatcttcggtgcagagcagcatttgtgttcacctgagaaggcgcctgggctggga

SEQ ID NO: 255291 - DNA, 122 bp, Homo sapiens
ttttttggagatggggtcttgctgcattgcccaggcattgcggcctcgaacttctgggctcgactgttcctcctgccttagcctcctgagtagctgggactacaggtgcgtgccaccacgcc

SEQ ID NO: 255292 - DNA, 122 bp, Homo sapiens
acacacgcatatgcacacatgcaagtacatgcacatggacagtgtgtgcacatacacatgcgtgacggacagccgtgtgcgtacacctagagacacatgtacacgcatgggcgcacgtgcgt

SEQ ID NO: 255293 - DNA, 122 bp, Homo sapiens
ctactgtatgctgtgatctcttttgatttctatcctgggggatcaaaaaagcccacagggcgttggtgccagaaatcagctgtgcaagcacagaaagggagcagaggctgttgcctggctca

SEQ ID NO: 255294 - DNA, 122 bp, Homo sapiens
actggggcccaagatcagggctggacaacatcaagcatctttgctgctagagtgcctaagcgttgagtcacagcaacttaatccctcctattaatacctggtttgattctagagactggggt

SEQ ID NO: 255295 - DNA, 122 bp, Homo sapiens
gaggaaacacagcacccaaggtgatcagtcgattggacactgttgatggcacattctcctcgttcccaaccaaccgcacaaaacccgcaacacctcgcgtccccgcggggtctcccgcgccc

SEQ ID NO: 255296 - DNA, 122 bp, Homo sapiens
aggcttctggaaacatccacacggctctggaggacctggctgtggtccctgccatggcgccgctggcactcccacggctggtacgcagcaccatggctgcttttacccagaaacgagcagca

SEQ ID NO: 255297 - DNA, 122 bp, Homo sapiens
agcaggacagcactggggagtccttcctggtaccggagaactcagcgctgaggggacttccggtgggccggccgctccccagcagggaaaccatgggcttggggctgctctccacccactgg

SEQ ID NO: 255298 - DNA, 122 bp, Homo sapiens
accacttccgcccccgctttcacacttgggaatcaatcctaccattttctcttggcttgccgcagaacaaaagattcattcaggcggtggaaagaaagaaggaaggaaggagaaagtgatat

SEQ ID NO: 255299 - DNA, 122 bp, Homo sapiens
ataagcctgggttgtctcacctgcatatgtggggaccggctgattccccaggggcctgggcgcagaacctccgggctgacactgtcactttccttgcccttcccgtgtcccaggccaggcgg

SEQ ID NO: 255300 - DNA, 122 bp, Homo sapiens
gggcaagtatttttgggtgagagatggctttgaaaacagtttgaaaaacaaaagaaaaagcgtagaaataaactttatgccagcctgcctggtcctaaggcctcagaagctgtgggtgctgc

SEQ ID NO: 255301 - DNA, 122 bp, Homo sapiens
ggagggagtgtgggagagttggcaaggagacagcccaaggccaccaacagccttggaagccgatttgttggggcatcaggagggccttgagcagagaagacgaccccacggacaaaccctgc

SEQ ID NO: 255302 - DNA, 122 bp, Homo sapiens
tcccaggcgagatgcgtcccgcactcagtggcagcagccctggggcggtggggttctcaccggcccacccccgggcctggtctggggtctctgttcctggctaagcaggcctgactggcatc

SEQ ID NO: 255303 - DNA, 122 bp, Homo sapiens
gcttgaaccgccggaggggcttgagcattcagcccctggggatggtgttgtagggaccagcgcgacatcgggtctaacccgcccgagggacaagggggtggcaatcagaggggccgacagac

SEQ ID NO: 255304 - DNA, 122 bp, Homo sapiens
catagttctcccggaaacgtcacacgcacccggacacatcgcgcatagttctcccggaaacgtcacacgcacccagacacatcgcgcatagttctcccggaaaccccacactcacccggaca

SEQ ID NO: 255305 - DNA, 122 bp, Homo sapiens
accagacttcttcaggctattgttgctcactgccatcagattcatcgctattatgacgaccggtaaatgtgagaaaacttttctaattttgtggggctgatagggatttttaaccacctcaa

SEQ ID NO: 255306 - DNA, 122 bp, Homo sapiens
cccaaaagaaccgcttcttgcccctcactccaagtctttgcccagcgagccgtgtgcccacgtatgcacagctctggacctgccgtggtttcgccatgttgctttgcaaactccctttggaa

SEQ ID NO: 255307 - DNA, 122 bp, Homo sapiens
gctggcaacctgcaatgttgggctcaagaagtccatgagtagagtgttcacaatgcattccgtttgttcctcaaaagtttgggagctcttcattttagatgtttgctgtcaagttttgcttt

SEQ ID NO: 255308 - DNA, 122 bp, Homo sapiens
ggccgcggcgcgtacctttaaatagcccgtgaggtcggcagaaagggcgcctgcggttggcgcgccgctgcgcgaaggagccttctgattggttgcgctgggggtgccgcggcggccttccc

SEQ ID NO: 255309 - DNA, 122 bp, Homo sapiens
agcaccttctttctaatgtagcacccatgtccatgcttgacattgtcaccctgagccagccgtactctcagcatgctgggtgttgcattaagttttaaaaatctatattatgtatctttcat

SEQ ID NO: 255310 - DNA, 122 bp, Homo sapiens
gcagtttgaacgcacaggggagagaacgccacgtgaacacacagaagggagaatgcagtgcgaacacacagaagggagaacacctggtgaaggcacagaggggagaacgccgagcgaacgca

SEQ ID NO: 255311 - DNA, 122 bp, Homo sapiens
gggctgggctctgcgctggagtccggccctgaggctaggagcggggcgaaggctgcagaacgaacccaaagccaagcaggcgctccagctggagttgaagggaagtgactcgaggggtgtca

SEQ ID NO: 255312 - DNA, 122 bp, Homo sapiens
tctgagtccttggatcaggagcatgccaaagcacaaacagcagtatcagaactgaggcaacgggaagaagagtggcgacagaaagaagaagctctagtacaaagagagaagatgtgtctgtg

SEQ ID NO: 255313 - DNA, 122 bp, Homo sapiens
actgctgttgtgaaatccactcaccttcccactcatgtccagccttaacagctaatatgccgcctactgcagagtaaaggtagagggcctaacccatgaacccttcaactctcttctggaca

SEQ ID NO: 255314 - DNA, 122 bp, Homo sapiens
cggcccgcatacaacgctgtctgcaccgctcccctgccttcttccgggctcccagagcaccgctatggagatgctctcccggcatttgaggaagaattgattgtcctcatcctgcaactgta

SEQ ID NO: 255315 - DNA, 122 bp, Homo sapiens
gacgccgacacctaagtgctgtggagaaaagcaaacttcagatgacacaaaatagggcaccgtttacgtaaaaggttagtcctggaaaaggcttcccgcacctgctgtaaaagtgcgaaagg

SEQ ID NO: 255316 - DNA, 122 bp, Homo sapiens
cagcgcagggagccgggcgctgtcccgatgattggcaggcgctagacagccctcggaaaccgccttggcttcgcccattggcatcctgtgagagtaggcgggattggttcatcgtgtggtgc

SEQ ID NO: 255317 - DNA, 122 bp, Homo sapiens
aggccgaacacgctgctcgcccagctgcggatcattaccgcccttttgttctccgtcgcgcgctcgccccacgctaggaatgcaaactgtaggcgccgccagcccccccttcctgtttccct

SEQ ID NO: 255318 - DNA, 122 bp, Homo sapiens
aaggggcgggggccgcttccgagggccgggggaggtcgggactcaggtgcggagcggggtcggcccggagtaggttccccacccgcgccccgcgcgcccaggacgcgactcccgctgcggtc

SEQ ID NO: 255319 - DNA, 122 bp, Homo sapiens
agagccagaggaagggccactctgctgacaccgtgatcccagatgtctgtcttccagagccggaggaagggccactctgtgacaccgcgagcccagacgtctgtcctccagagccggaggaa

SEQ ID NO: 255320 - DNA, 122 bp, Homo sapiens
cacccttagatggcagttttaactttctccctacacacaaggagctgctatacatggttccggcttgacgcggatacctagtgacacttggcggccaggccgggcagacttccgggtgggtg

SEQ ID NO: 255321 - DNA, 122 bp, Homo sapiens
agaaagccgggaaatcgcgagcggaggcggagttacctcggtgagcgtgaaggcggagcccgctccgaggggcgggctcgaggcggggagaggggcggggctccagggacctgttgatcgca

SEQ ID NO: 255322 - DNA, 122 bp, Homo sapiens
tcagatgtggaaagcttcagcaggccacgctgtgtccatcgcccaggatgacgcgggggccgatgactgggagaccgaccctgattttgtggtaggagccgccagcctttgctttcctcttt

SEQ ID NO: 255323 - DNA, 122 bp, Homo sapiens
aatttaagctaacagcaacctggatttttcctttataacaattattcattgtgatttaaacggtgactttatatttacctgtgtgatcatttaattaatatattctccccaaataggcttca

SEQ ID NO: 255324 - DNA, 122 bp, Homo sapiens
gcaagacgccatctcaaagtaaataaatacatacatacatacatacatacaaaaagtagccgggtgtggtggtgcatgcctgtagtcccagctactcaggaggctgaggcaggagaattgct

SEQ ID NO: 255325 - DNA, 122 bp, Homo sapiens
gaggcaggaggtcagcgtggctagggtccggcggggtgggagcccacctggtagccccagcgctctccacgacccccacgagccagggcgtcagaaaagtttgtgcagaagtgggggacgca

SEQ ID NO: 255326 - DNA, 122 bp, Homo sapiens
actgtgagttgaaaataccaaaagtcaaacatcatagcttagcctaccttaaaagggctccgaacactacattagcctacagttgggcaaaatcgtctaatacaaagcctattttataataa

SEQ ID NO: 255327 - DNA, 122 bp, Homo sapiens
taaacgcgaggtgacgaacccggcggggagggttcgtgtctggctgtgtctgcgtcctggcggcgtgggaggttatagttccagacctggcggctgcggatcgccgggccggtacccgcgag

SEQ ID NO: 255328 - DNA, 122 bp, Homo sapiens
tggacagcctgagtcacctgcagaaccttctggagctgccctagtgctgggcttgtggggcgggggctggcccactctcagccctgccactgccccggcgtgctccatggcaggcgtgggtg

SEQ ID NO: 255329 - DNA, 122 bp, Homo sapiens
tcagcagcgcgatgtccagcatgctctcggctgcgctcttcttgctggcgtaatggttcacgttgatgggcccgtgcctccagccccagcgggccggctgcagggaggggaatggtcagcaa

SEQ ID NO: 255330 - DNA, 122 bp, Homo sapiens
acctgctgcccacctgattccagcacagtagatagctacacatttgaattaaaaggtaatcgtatattgacatgtgttcaaattgcactctttttaatttaaaaaaatattttttatggtga

SEQ ID NO: 255331 - DNA, 122 bp, Homo sapiens
tgtcaggtctaatgtatttatttgactctctcctgttaaaatgatttctctacagcactgcggttatttacgactattgtcagtacaaggcgatgagaaggcagcagcagaggaaaacaaca

SEQ ID NO: 255332 - DNA, 122 bp, Homo sapiens
cagcagctgagtggctgcttggaggggcagacggccgacccctgctgaatgacggtacgacggagctggtcacaagtgcagtgcaacgaccacccacgtggaaactgaatgcaaagatgagc

SEQ ID NO: 255333 - DNA, 122 bp, Homo sapiens
tataactcagctctcctttgaatgcaattctctggaaacatcacaattcttctcaataatcgaatgacttctcaatcctccacccatctgcattatcaatgttgactacctcctcctaactc

SEQ ID NO: 255334 - DNA, 122 bp, Homo sapiens
ttcattcatttaacagatatgtatcagacccccactgtgcaccagggattgttctacagccgggtcacacagcatgtcctcatgggacttaatgttcaagtagagagaggtagaccataaat

SEQ ID NO: 255335 - DNA, 122 bp, Homo sapiens
tgtaactgaggacatcctcaatgtgcattccaaactccaggggcaattgggagtaccccccgggacatggcaggccttcattattcctagcctcaaatccacagagctatttatccatcctt

SEQ ID NO: 255336 - DNA, 122 bp, Homo sapiens
ctgttcagggagcagaaggtttggctccaaggagagtgtagaactgcccccgcccctccccgccatctgacagcccattgtgtccacagagttgggtggagtgattccgaggggaaaaattc

SEQ ID NO: 255337 - DNA, 122 bp, Homo sapiens
acacccgcacctgcatattgttcccactctcaaacaggttgttggcctcaaataggtccacgggatcatgccgtagctgaccattgccttgaggaagttggagaggttttctagctagtgcc

SEQ ID NO: 255338 - DNA, 122 bp, Homo sapiens
aaaagcaccttctaccgctggcggcggcagtcccaggagcaccggcagaaggttgctgcccgcttctccgccaagcacttcctgcaggacagcttccaccgggggggcgtcgtgccacttca

SEQ ID NO: 255339 - DNA, 122 bp, Homo sapiens
ctctgcaatggctgctggggactgtgtctgttgcaaggaggctcccctgcagtgaggagccggggcactgcaagtctgttccatagcagccctttttgcaaatggtagttgatttttgcaga

SEQ ID NO: 255340 - DNA, 122 bp, Homo sapiens
gaaaaacacattttcagttaccaaagttattttctctcttccatcgtgtaaatagaatgtcggggttcttctaatttgggtgtttctaaaatttaaatccacgtgaacagattaggaaagac

SEQ ID NO: 255341 - DNA, 122 bp, Homo sapiens
tttaaaaaccaaacctaacatacagagaaacacgtaggagaatctgtcctcttctgtgaccggcttctttcactcaaattatgtgtgtgagcacttacattcattctctttgctatgtagta

SEQ ID NO: 255342 - DNA, 122 bp, Homo sapiens
cagccccttccaaaactctttcttcccagggacctgttcttggaacagtaaaagactcaccggccatggcttttctctcctcccttcttgtgtgactgaaactgaaagtatgcttcgccttc

SEQ ID NO: 255343 - DNA, 122 bp, Homo sapiens
tctcttgtgtttcttgtgaagttctcttcatcacattttaaaatgggctcaacactgaaacgtctgctgaagcccatcgcactgcctttccgaggaaaagacgtcttggaatcttggccctt

SEQ ID NO: 255344 - DNA, 122 bp, Homo sapiens
ccacggctggcgggcaccgccccccttggccaatccgtggcagctgtgggcggacccgcccggctggcgacccgcccctggcttcgtaacgcggctctccattggacaaaggcgcgtgacgc

SEQ ID NO: 255345 - DNA, 122 bp, Homo sapiens
ctaaaatcgtttggcatggactttcctcggccccttaatcaccacagggtgtgtcctgcccgggctgtcaggagggtcgcaggcgcccggtggtccacgctcaccgtgcgcctggctgagcg

SEQ ID NO: 255346 - DNA, 122 bp, Homo sapiens
cggatcccgacaaccttcgcgtcgcgcgagggcacggagcacgcgcagctctgcggtcgacgccgggccgcccccactccgcttctccgggttttccgtgaagctccagccaacagcggccg

SEQ ID NO: 255347 - DNA, 122 bp, Homo sapiens
caatccgagcgcggccggaggaagcccgcgggccgacccaggcgctcaccttcacgtctccgcggccgcgacgcgagtcccaccactttgatctgcttttggctttagctgaggaccctccc

SEQ ID NO: 255348 - DNA, 122 bp, Homo sapiens
agactgcacagtttactggaaagtctcagctgtgttctaatggtggcaaccttcagagtccgtggcatctcccacccaccccagcatctcccagctgtccatcatgggctgattcatttcat

SEQ ID NO: 255349 - DNA, 122 bp, Homo sapiens
cctggccgacctctagtccctccgccgccgccaccggagcggtgcgtcccggggctcgagcgcagccgagtacccgccgaaggctgtccccatcagtgcgtgtctgctgccgggcagcggca

SEQ ID NO: 255350 - DNA, 122 bp, Homo sapiens
agtgtgtggcgaaggaagtatctgctgctgagctcagctttgcttcgccatgttccttcccgatccgctcatcctaaccctctctccttccgcctccatcctccctgctctccgattgcccc

SEQ ID NO: 255351 - DNA, 122 bp, Homo sapiens
ttcccacctccctggacacggccttaacctcatttttttctctggggcaccgctgcagttcgggcaggctcttggactccgcaggagcccacaccgcattgatgccctgttccctggggcgc

SEQ ID NO: 255352 - DNA, 122 bp, Homo sapiens
gggagaggaaggagagatgctcaggaaggccgaggcctggacagaagaggtggcgaccgccgagtcttctcccgggactctcagtgccgagtcacgccagggagcggagcggccgagggggc

SEQ ID NO: 255353 - DNA, 122 bp, Homo sapiens
ccctcagctcagaagctgagtctcgccgtccaggcagtgctgagttctcctgggcagggccgtgcagccccacaagcccagcctccggcctcaacatgccccacagcaagccaggaaccccg

SEQ ID NO: 255354 - DNA, 122 bp, Homo sapiens
tattaagagacagtgagagttctttcatctccggctgaggagaaatcagaagcaggcaagcgtgatcactgtccattagcagcagcatttgctggcagcaagagggggaaggggtcctctgt

SEQ ID NO: 255355 - DNA, 122 bp, Homo sapiens
agaacaggtccaagacacctgcccctgaagagaggagaggctgggcggggcaggggtgggcggggctgtctacaagaggaggacaataacgcctttcaaaagcacatgaaaaaataaagcaa

SEQ ID NO: 255356 - DNA, 122 bp, Homo sapiens
aacttcatgcctggccttcaagaggcattttccactttccctgggaccatcaatcagacacggaactccttgctcctattaaggcctgagacaagtgccctctgcaatcagtgggcaccagt

SEQ ID NO: 255357 - DNA, 122 bp, Homo sapiens
agtgatctgcccgcctcagcctcccaaagtgctgggattacaggcgtgaaccaccatgcccggcccagagaggtcttttagaagatcttagatattccggccagatggatgcttctaggtgc

SEQ ID NO: 255358 - DNA, 122 bp, Homo sapiens
gaatttaaaaaaatgccacagacttttcaaagcccaactctacttttttgagaatttgtccgtacctactaatatgccttattcttcttcacctagtgttttaaaagtcctgggtagaaaga

SEQ ID NO: 255359 - DNA, 122 bp, Homo sapiens
tctgaggaggagcagcgcctggtgcagcaggccttccagcgcaactttttcagcatggcacggcagctccccatgaagatcaggatcaacggcagggaagacagagcagaggcctcggctgc

SEQ ID NO: 255360 - DNA, 122 bp, Homo sapiens
agagcaagagagcctccgagtaactgccaagatctgtggattgtgctttggttcttgttgcggggtggtgtgtggataccctggcagtcaaggtggacagtaacatctttgctcttgcccag

SEQ ID NO: 255361 - DNA, 122 bp, Homo sapiens
cgccgaagactcaaagccagagtggacataaacgccgtgggcaggaccccggtgaggcctcggtgcccttcttgggggttctcagcgttggcccagaagcctcagcccgggtctaagaactt

SEQ ID NO: 255362 - DNA, 122 bp, Homo sapiens
tgcaccttcaggatccttgtaagagatggcatcttctggtccataaggtgaccctttccacgtccccaggcagccccaagtctccaaaaaagaaacatacttagtggggtgaaaataacagc

SEQ ID NO: 255363 - DNA, 122 bp, Homo sapiens
ggctggaggaaagccctcgcagagcccgagccaggaggcggccggggaggcagtcctgggcgcaaagacaaaagccacgagtctggttgatgctgtgaacagtgacgctgccaagcccagcc

SEQ ID NO: 255364 - DNA, 122 bp, Homo sapiens
atactcctgccaatggcaacaacgcagttcctgttccactcgctgaatgaggtcacgggtcgttcactcattgtagtctttgtgacgctattgttggtgatagaatgataaagttgatggtc

SEQ ID NO: 255365 - DNA, 122 bp, Homo sapiens
acgaacctcaaactgatggtggttttgactaaccctcctgggcacttgactcggccacagcggccccctcccggcgggcgtttgtcatgtgtccagacatgtgcgcgcgcgctgcgggcttc

SEQ ID NO: 255366 - DNA, 122 bp, Homo sapiens
agctgctctcacacaggcttcttgaattcttagcccctcctcccgtactcctgagtcacacgctccaaatcctggcccccatccctcccctccccaccaccagccccgcacctgctgtggct

SEQ ID NO: 255367 - DNA, 122 bp, Homo sapiens
agcatgattgacaaagcaaaggaggacattgtcacagagcagatagatttctctgctgctcgcaaacaatttcagctgatggagaattccaggcaagcggtggccaagggccagagtacacc

SEQ ID NO: 255368 - DNA, 122 bp, Homo sapiens
ggaggaaagtgctgaggtccagagcgtagtccgagggctccgaagtcagattaaagggctcgaggacggcggacacaggggtgggcgccagggatgcggcgttaggggcgtcctctggaggc

SEQ ID NO: 255369 - DNA, 122 bp, Homo sapiens
aggagcccatgcccagcgtcctgagccgttcgaactgatccgagctggcggtgttttgagcggggtttccccatctgtagaggaaatctcctctggctttggctaggaactcgttcacgctc

SEQ ID NO: 255370 - DNA, 122 bp, Homo sapiens
cgccgctgcctggcgctgctgcatctcctgcagctgggttacctgtacaggtgagtgcttcgccccgggaggggaggagtgtcggagcccagcacctccgtcagctgggtcacctgtacagg

SEQ ID NO: 255371 - DNA, 122 bp, Homo sapiens
gcgcttctgagctcctacactcccatgcttgccaagctccaccattgtgccgtgtgctgtcgtccctgttcctaccatgtcttctcacaaaactttcaggattaagcaattcctagccaaga

SEQ ID NO: 255372 - DNA, 122 bp, Homo sapiens
gcctttggaacactcttcccgtctccctctccaagctcacaaccctgggtgactgggtcccgggactttccacactacccctgggccggaatctctgagtgcatggaggttctaggactggg

SEQ ID NO: 255373 - DNA, 122 bp, Homo sapiens
gaggtgtggagggagaggcgcgggtgggaactggggctgtgcacggtgctcgcaggccagcgcgagttctgggtgggcgtgggcttggccggccccacactcggagaggccagccggtgcca

SEQ ID NO: 255374 - DNA, 122 bp, Homo sapiens
tgcggtactggaaagacccaaacatacttggttgtgacctcaggcaagtttcctgacttccgtaacccaaactcctcatatgtaaaatggagatgaaattgttactgctgcatcatacggtt

SEQ ID NO: 255375 - DNA, 122 bp, Homo sapiens
aaaccaagaaataggactggtaaagggtgctgaccaggtccctggagctgcaccccgccccgtgcgcctccccagccccccggccgcaccgtgcccaccccgcgctcgtcgtccccctcgcc

SEQ ID NO: 255376 - DNA, 122 bp, Homo sapiens
aaagttaatctgcatgattaaatgtccacatgagttaaagacaaaagccatagaaatagacgaaatggcaatgtcaacattaagtgaaatggtcaaggaagactttatgaaagagatgaaaa

SEQ ID NO: 255377 - DNA, 122 bp, Homo sapiens
ccccatcgctgtgggtggtgccctggcggggctggtcctcatcgtcctcatcgcctacctcgtcggcaggaagaggagtcacgcaggctaccagactatctagcctggtgcacgcaggcaca

SEQ ID NO: 255378 - DNA, 122 bp, Homo sapiens
accgccctgctgcccacgggtcacagatgaaagatcagaagttggcgcagtgggagaccacgttttattcagtccagttcaggatccccgctatctcagggctctctgggccagtcctcctg

SEQ ID NO: 255379 - DNA, 122 bp, Homo sapiens
cccccagcggctcaccatcgcagccccaggatgaaggcgctggctggctggcgggtgggccggttgaggaatctgttatcgaggctcaggatccattcgcgccaacaacttctcccgcgaag

SEQ ID NO: 255380 - DNA, 122 bp, Homo sapiens
ggagctccttcctggcactgccctgtccatagtctgcccattagagtgggggtggcttctcgcctcccaagctgtctcccctccctgtccatctacctcaaggcagcagcccccatctgctc

SEQ ID NO: 255381 - DNA, 122 bp, Homo sapiens
tggagttccttttatattcctccccaaccaagaaaaaaaaaagtttcatttttaagcacgcgtctgggatggggaaagaccaaccagttggggctttctcccagggctcccgggggctgtgt

SEQ ID NO: 255382 - DNA, 122 bp, Homo sapiens
gaaagagccaatgaaagatgctagaaagctctaacaagtcccagggccacgtgggggtcacgggggctggttctctccagatcctgtaatgcgtttccgatgactgctccttaggaaaggtc

SEQ ID NO: 255383 - DNA, 122 bp, Homo sapiens
tacattttctacagtagcaaccacagtgcacacacacagtcttccagcctgctctgctcgcgtgcctttctgttgtgagcttttttccacgtggctacgttggggacctccgtgatgcttcc

SEQ ID NO: 255384 - DNA, 122 bp, Homo sapiens
gactggtacgctcaggtcagggcacacccgcgacacctctggggtgcagttgggaaactgcggcctaccccgtggcccacacctccctgagcccgttggccaggccaggggcacagccgggg

SEQ ID NO: 255385 - DNA, 122 bp, Homo sapiens
tcggaccctcgagaaccaggggatctcggaagccaagcccccgggcaggcccgggcttgtcgcccgcaccacttcctgcctctggcactggtgggaggggcgggtctcgcctctgccccctc

SEQ ID NO: 255386 - DNA, 122 bp, Homo sapiens
gtccagaaacactggggtttcaggcgctctgtaaatgcgtccgaggtccgcggttctgcccgcaagcccagaccccggcctcacttccgccccgcgccccgcgccccggcctcacttccgcc

SEQ ID NO: 255387 - DNA, 122 bp, Homo sapiens
tatggaacccatgctcctgaaataagtggagaaaacactttctgcatctcagcagcccttcgggattctcttgcatgcatattacacagggtttgaaggtagccctccaaaatattagctga

SEQ ID NO: 255388 - DNA, 122 bp, Homo sapiens
tgtgtggcctggtgtggccgggccgtgtaaccaagctctgagcaatggcagtgagtgtggcgcccccagcaagcttctttagaagcggaggggcccgaaacccgcttttcttcacgtgctgg

SEQ ID NO: 255389 - DNA, 122 bp, Homo sapiens
tctcgcatgctgcaggctctgtcccgactgaggaatagcagcactgccacctggtggatccgcggcgctcagagagcccattcaagcgcatccagttcctcccgcggagaccaagcccggtc

SEQ ID NO: 255390 - DNA, 122 bp, Homo sapiens
ctctgagaatctgatgcactcagtctttgtgatctcacagaataaagaggctgcagcattcggacgaaggcccctcgctctggtgtgtttgcagagctcagggtggtttgctgtgacctgat

SEQ ID NO: 255391 - DNA, 122 bp, Homo sapiens
actccacctatgtcactctctgtctgatatgtttccacactgcccatggtaatttgtacacgcctatctctacaaccatgctcgactttgtatctctgtctttgaacatctatcactctctc

SEQ ID NO: 255392 - DNA, 122 bp, Homo sapiens
gctttcaagatttatgtcatagcagacctcgggagcatcctcagcactgacaccaaagatcgccttgcagagcacattgcgatcagtgcagttcccacgatagcagtagccttcttcagtgc

SEQ ID NO: 255393 - DNA, 122 bp, Homo sapiens
aatgtgagcaaattcctatatatgcatatgatgcgtaggatgcatatgcacggtatgatgcgtgtttctctggagaaccctgataatacagtggcactaagtacctaagaacagaaagtgca

SEQ ID NO: 255394 - DNA, 122 bp, Homo sapiens
tcggaggacctgctctgactgaaccacttcgcctttcagtgaacagagggacttggccaccgaagctccgagacgcccggaggcgcagcgctggacgcgctgacaggcgagcgcccacgggt

SEQ ID NO: 255395 - DNA, 122 bp, Homo sapiens
tgctgtgggcacggcaggttgctgggtccctgtggaagatgcagggagagtcacagagggcggcccccaggaaattcccagcagagggaggtcatgtgttggagatagggagggtcggggga

SEQ ID NO: 255396 - DNA, 122 bp, Homo sapiens
cacagtgcatcattagaatgcaagagagtacgtggaaacacgaaatgcctccaggatcttcgcctggccctgacttaccatcacgtccacacacattttactggccaagccccacatcaatg

SEQ ID NO: 255397 - DNA, 122 bp, Homo sapiens
cggctgatgaaacccagcccaggccagagagcgagagtctaataaggaaacaatttaaatcgacaacatctgccttgtgcttccccgaagagaagagaatacagccgcctgggaggagcctg

SEQ ID NO: 255398 - DNA, 122 bp, Homo sapiens
accgcagggccctgttccaattcctatagattttctcttagtaaattgttgctactgttccgtgcctcctacctacaaaactccgcaatcaaacagtaactgacctcacgtagttcttacag

SEQ ID NO: 255399 - DNA, 122 bp, Homo sapiens
gcagtgggacctggtgggagactttgcctggctggcgctgcgtcgagttctgtgccccgccggtgttctctcaccagggcacatggttttctccgtgggttcagagcagaagctcactttgt

SEQ ID NO: 255400 - DNA, 122 bp, Homo sapiens
gaagcccggggtctacacccgcgtggcagtgttcaaggactggctccaggagcagatgagcggtgagcgccctctttccaatgccccgtccccagtgccccaacggacaaccgtgggacaag

SEQ ID NO: 255401 - DNA, 122 bp, Homo sapiens
gagaagggtcagagggtctgggcagcagggtggacaggaaggctccggaatattcagttgcgtcgccgcgcggaggggacaggtccgcgcctcccggagagcgggacccgagcgtaccgcgc

SEQ ID NO: 255402 - DNA, 122 bp, Homo sapiens
ggggccgcccacaggaccggttggcagctcaaccggaggctcctggtggtcccatcagcccggagggtctgcttcacgtgtgtccctcaaacagtcgggagtcctgacgtccactggggcca

SEQ ID NO: 255403 - DNA, 122 bp, Homo sapiens
ggctgtcaacgaagtgccaagcgactttccaatgactattaaaagtaaaagaatacagcccgggattcagaagacccggccggggaaggactaatcaatgaggtttcatggaagacaaggga

SEQ ID NO: 255404 - DNA, 122 bp, Homo sapiens
atcttttttatttttaatctctgccttctctacttaagagacagacagacagacatatctcgtgatagctgcaggatggttctttgggaggccttgaactgacccagttttccaacctttct

SEQ ID NO: 255405 - DNA, 122 bp, Homo sapiens
ctttctctgcctcttggttgtttcaaggtaccaggcatgagttcccacacagcacaccctcgacctctcctggtcacactctgtcatgagtcacaaccttgattgtgaacacagcaaagagc

SEQ ID NO: 255406 - DNA, 122 bp, Homo sapiens
tgggaaccaagtccagggatccacaaggccctggtgccccatggggctaagctcacaccccggcgctctgttgaaccgagctgtgccgctccccgtctgtacccccactgtccagtcttccc

SEQ ID NO: 255407 - DNA, 122 bp, Homo sapiens
ggtgacaatggacgaggctccctgctggcctctggcacaattattcaacgcttcagaagtcgcaatctttccttctgagacgcagtacctggtacctgcagtgcagccttgaactcagctcc

SEQ ID NO: 255408 - DNA, 122 bp, Homo sapiens
ccggccgccgccgccatggccacccctgtccccgcgatgtcggcccaagcctgaccccctcgtccctgtgctcttcccggcctggcgccctcccgccgcctagccctgaccctccattcctc

SEQ ID NO: 255409 - DNA, 122 bp, Homo sapiens
agctcgccggtcgcccctgcgctgcgcggaccgcagccacagccggactggtgggaacggcggcgacagacggattggctgacagtcccagccctcagaacagccccggcctcgaagcgttg

SEQ ID NO: 255410 - DNA, 122 bp, Homo sapiens
cacgagccttgcccagggggaaggagtgtaggcggtcttttatcggctaggatgtaagaccgaaacccagtcatgggttttgatgacccatgactgatggattttccttatacttccaccaa

SEQ ID NO: 255411 - DNA, 122 bp, Homo sapiens
agcttcagcagttgcttggaactttggttctggcagcagcagcaacatcattaccgctagcggcagttttgtgccgaggcacctacacacctcccgtcctctctgccagatcgcgggcctgt

SEQ ID NO: 255412 - DNA, 122 bp, Homo sapiens
tccatgacccagagaaactggaggaccagctctggattctcggaacatctacagcctcagcgcccacgccgggtggttaggggcgcgttacccgccagggtcctgcctgcaccctgggcttc

SEQ ID NO: 255413 - DNA, 122 bp, Homo sapiens
gactcatccggcagatcggaacacctgcatttctggatgtgtcattcccgtatgtcgaggcgcctccagaacccgaaataatgtgtagacagacctgtgtctaacatcccctcggagggagc

SEQ ID NO: 255414 - DNA, 122 bp, Homo sapiens
tgggcagaagggtcacaaagtacgggtgggattggcaggcagatacacggagggaacgtgcgcatttgagtgcacgtccaccagcaccagccccaggccacaggcagatcccaggagacacg

SEQ ID NO: 255415 - DNA, 122 bp, Homo sapiens
ggcagcgggccggaccgggaagacagcagggtgctgcgagcaggtctggggaaaccgaagcgcgagcccgcgcgtggggcgaggcgggaccgcgcaggcgcagcgggaagcgacgcagaaag

SEQ ID NO: 255416 - DNA, 122 bp, Homo sapiens
catcaccttgctttctcctctaatctctcttcttttgggcactggaattcagcccagcgccgcacacagcgcgacaccaggcccccagccttgttcccgccgtcagggacggctcctgtgcc

SEQ ID NO: 255417 - DNA, 122 bp, Homo sapiens
cacccactggcagttgtgttctgtttcacttcgggagccagcgactccactctgctgagacggcttgcaccaatctctctggaatctatcagctcctgtaatggaatatcaccatggtaact

SEQ ID NO: 255418 - DNA, 122 bp, Homo sapiens
gctgatattctctctctctctctttctgtctgtgcctctttctgtgtgttctgtagaggacgtagcaaatttaacagccagtgatgtcatgaatcgggtaaacctgggatatttgcaaggta

SEQ ID NO: 255419 - DNA, 122 bp, Homo sapiens
agcgggtgggtgggttccagcgtggtcacttctccaggggtgcataattgagcagcttctcgatcaggtccacgtgggccagcagcatccggcggcagcagtagcgcttcaggcccagggca

SEQ ID NO: 255420 - DNA, 122 bp, Homo sapiens
tagcgattcgtgttttaagctctccaggcgattctgatgctcactaatgttgaaccttctcgtaagtctgcagtttacttttcacttccctacctgacagcgcatcctgcattctttcctgc

SEQ ID NO: 255421 - DNA, 122 bp, Homo sapiens
agctctgcgcggctcccagcaaccgcattttgcacgggctcctccggcccaggatgctgtcgatgcagtaggaggagagcaaagttggagatttacttttgcactcgggcctctcggagcag

SEQ ID NO: 255422 - DNA, 122 bp, Homo sapiens
gtgggggactccgatcctagaggccgcaggagttacctcaggtgggctctgagctggcggcgctaccgccctggcccgcctcgagcatgcccgagacgtggacgcagcaaggccgcacctcc

SEQ ID NO: 255423 - DNA, 122 bp, Homo sapiens
aaatctggtttcatctccacgtgcattttcccatcgttcttcagatttaggagaaacccacggaggcgcggcgctctccacagccgtctctaatgaagggaagcgtgcctcgaagtcagtcc

SEQ ID NO: 255424 - DNA, 122 bp, Homo sapiens
tttggatccaggcgctgtaatctttcctcaccctctgtccagtagattcatcaccattctcgatttaggaatgctttaaagatgcttgttatttggaacatatttgagaaagtgacaggaac

SEQ ID NO: 255425 - DNA, 122 bp, Homo sapiens
tccaccgaattgcctgcgtcagaaacgcggttttcctcactctgcacctggagtaaaacgcgatcccaggtcaagctctatggactcgactccggaagagctcgcgaatccatttgcttgtg

SEQ ID NO: 255426 - DNA, 122 bp, Homo sapiens
tgttctactcttcccaggccgcaccaccccccacatttcaacaatgctcgttgaaatccacgaaactgatttcccaatcccctaacggtttatggtcagcaatttggaaaacactggctgaa

SEQ ID NO: 255427 - DNA, 122 bp, Homo sapiens
cttccctcccacccccctggaacattccctcgctcaaggaacctgctctccctgctctcccgcgccgttgtgagacttcagcaagtgacctcaccttcccgcgccttaccggccccacctat

SEQ ID NO: 255428 - DNA, 122 bp, Homo sapiens
gccccgccctgggttatgtaagtgacagcgctgggccgtttctcttttttttccggaccccgcagtggcgcctaaagtctgcaaggaggaggtcgcctctgtgctgtgggtccaggaatcta

SEQ ID NO: 255429 - DNA, 122 bp, Homo sapiens
ccctgtgaatggggtggagtagcgctgtgtggtgtccagtgtcagggcgcacatagaaggcgcatcctcaagtgaatgaagacctccgaggccacagctccccactcctcccagctcctttg

SEQ ID NO: 255430 - DNA, 122 bp, Homo sapiens
cttcagacatcatgcaccggatgggcgctccagtacagaggtggcctgttagacgaggcccgtgctgagcagaaatggctgggccccagaacccccatgcccgtcattggcaggggctgctg

SEQ ID NO: 255431 - DNA, 122 bp, Homo sapiens
gaattcaccaccccagtgtgggagggctgccgcgtgattcgtgccaactggcacagaccccggcaaagatgatcagatgttaaactgtccctcaggcctgtcccccggcccgccatgctcag

SEQ ID NO: 255432 - DNA, 122 bp, Homo sapiens
tggaatgatctggaagtcagtggacatcttgggactgtttggagagacaggctcccccttcgacggtactgttcaggtagtgaggcatgtggaagggacacactagtgggtcctgattagag

SEQ ID NO: 255433 - DNA, 122 bp, Homo sapiens
acctcgtgatctgcccgcctcggcctcccaaagtgctgggattataggtgtgagccatggcgcccggcccctgtattatttatgtatctttttaattgtgttttgagggacagcaaagaaag

SEQ ID NO: 255434 - DNA, 122 bp, Homo sapiens
ccgatgcccacaaccttcatcgttttggtgcaagcctgtccctgagccgctggttctcatcgaagtctttaggatgaggcatctccttgcacccccacggcacctctctgcccctcgccgcg

SEQ ID NO: 255435 - DNA, 122 bp, Homo sapiens
ctcctccttcccaccccttgcgaggcccctccccgggccgcgcgccctggcgcgcgcacacgcgcacacactccccagtcgcctgtaccaaccaccttctcaagttgtagcggtcgctcgcc

SEQ ID NO: 255436 - DNA, 122 bp, Homo sapiens
ccgcgcccccacccgcgtccccgcgtccccgggtcctcgcgccgcacttgatgaagaagacgcggccatcccggcacaccccgtaggaccaatgctcaggtaaagtgtcccgcccgaccgtc

SEQ ID NO: 255437 - DNA, 122 bp, Homo sapiens
agcaggccacacaaggtgtgtctgagtatggccatatgactcctggggccacctccacgacggcccagccccaccgacgctctgctgaaaatcctgcccctcagcaggacgcaagcttgttc

SEQ ID NO: 255438 - DNA, 122 bp, Homo sapiens
tcgtcgtccagtgcatggtcacttgcacgtcttgttaactatttccctctgctgtaagggcgctgggctgggatgtagcggaatctgtgctccctcaagccctggagaagccctgggctggg

SEQ ID NO: 255439 - DNA, 122 bp, Homo sapiens
gtcccggaacctcgaggtctctattcgccgcattcggcaaagggatcgagggccggtctccggggacctggcaggttccactgcccggacccccctggactccccaggccgagaaacgatag

SEQ ID NO: 255440 - DNA, 122 bp, Homo sapiens
ctgatgcccacaagagggcgtctcagggtcatccggaaggcaaaactcaagtccaagatccgcttcccagcagctggaaatgaccaatgagtaggttctggaatatcagcaatgaccctggc

SEQ ID NO: 255441 - DNA, 122 bp, Homo sapiens
atctcactgatttctcacacatgcgaaactcctaggtacatagggagctgcagcatgccccggaagctgaattttgtcatctcacaagctgttctccccatccacaggtatttgggattcaa

SEQ ID NO: 255442 - DNA, 122 bp, Homo sapiens
aaatacaagcaaacacatcgatgtcactgctttagttatcccatccacaggtacatgatacgtgaggcaaaagccactatgaagctactgcacattgaattttagaggaaagagcactttgc

SEQ ID NO: 255443 - DNA, 122 bp, Homo sapiens
cggacactgctgtgatcagtgggaggtcctgggtaggaggcttgttcagggagccatcagcgaggctggtgttgaccgtcagaccctttggggcaaacctatgtttagctatcccatctctt

SEQ ID NO: 255444 - DNA, 122 bp, Homo sapiens
aaattcactgggcacccactatctgcatcttaaaggaggaaatgggcaaagtctgtgattcgaacaccttgaagtatagctggagagacagactgggccagtctgaagaagctctggtactg

SEQ ID NO: 255445 - DNA, 122 bp, Homo sapiens
tcagcatttcccacctttccgactgaagctcagtcaattagcagggtctagcagggtccccggcctggtgcctggggtccctctgcctctcagcttcccgggaagtggctaatgagtgctga

SEQ ID NO: 255446 - DNA, 122 bp, Homo sapiens
ttcccctctcctgccttcgcagtctctctgccacccccgcccccgccccgggatcctgcgcgatccagcgcctgggcccccgccctgccccaggcggacgctcccgaagcccggccggagac

SEQ ID NO: 255447 - DNA, 122 bp, Homo sapiens
tgggctggcgcggcctgggtgagtcggcggggaccggccgggggcggcgggggagcccagcgcgccgcggggcccgctcggcgtcgccctgcatggctggggtccctcgcggggctggcgcg

SEQ ID NO: 255448 - DNA, 122 bp, Homo sapiens
ctgtccaggtcctttagtcagcgtcactccatctgatgtgcagaagctgggctgcacctgcgggggtgggcatagaccgggctgggtctgcagcagcccctggtcctgagcaggcggcagtg

SEQ ID NO: 255449 - DNA, 122 bp, Homo sapiens
ggcaccaccgcggcccctggcaggcctcacctgtagccgctgcgccctccccgcgggcaccgggctctgcatccaggaggctccaggaggcccaggggcctgtgattccccgcagctcggtc

SEQ ID NO: 255450 - DNA, 122 bp, Homo sapiens
aatcctggctgagctccggtgcctaccaccttgtttcccccaaccccgctcccgggagctcggcgcccacccactgctgccagccatcccgaattgacagctgcaaggatatggctctggcc

SEQ ID NO: 255451 - DNA, 122 bp, Homo sapiens
ctccctctcttctcctggaaaccctggggctaggccctacatgactcagggctctttttacgtaggctcatgtaggtgacggctattaatcctttagtcaattccccttctgtgttggtgag

SEQ ID NO: 255452 - DNA, 122 bp, Homo sapiens
gacccagcaaaacacttcagggctaagaagacacgaaacggtggcatttgccatctgacccggcaggcgctggggcagatgaagctccagttggaagggctactgctgaatttttttttttt

SEQ ID NO: 255453 - DNA, 122 bp, Homo sapiens
ggaaagacaagacgagggtggagtgcgatggagacagcaccatcagggcagagcaggccccgccaaattagaagaaagggcagaagctgaaaaggtctgcgcaggccgttcaagccctgcag

SEQ ID NO: 255454 - DNA, 122 bp, Homo sapiens
cattggcttctattctgatatcagggatgctttttgtagtggtattgtttgctccctcttcgcgttttgactacccgtcattcaggggtaactcatcactcttcacacggggatttaaatta

SEQ ID NO: 255455 - DNA, 122 bp, Homo sapiens
ttggacaaacaaaagccttgagttaaacgtcgttggcgggaagagaattgcaggagctctcgacagcaaattaggtaactaaagccaagcgtggtggctttcggagattaaatgcattatag

SEQ ID NO: 255456 - DNA, 122 bp, Homo sapiens
aggtctgggcatcacactttatgtaagttaaacttcagtaaagtgctctcagcacacatccgcagccgcacccacacaaaatcccaggaggctcagtaccagctgtggtccgggccttgccc

SEQ ID NO: 255457 - DNA, 122 bp, Homo sapiens
gctactacatccggcttctagtgacctcccagctccctcaggcaatggggacacgacacacgaactctccgagaattccatgcccctgccagctcatagaagcctacatcctaggcacaggg

SEQ ID NO: 255458 - DNA, 122 bp, Homo sapiens
acgacaggtggagggtgaagagcgggaccaaggcctgccggccaggtgtgcaccaccctacgctaacatagcacgcggggcgcccacccaaccaccccacacccgccccgggccgcctgcca

SEQ ID NO: 255459 - DNA, 122 bp, Homo sapiens
tcctgctgatccctgctggtccctgtgtagccatgcaggtgatgtcctgctgatccctgccggtccctgtgagctcctgccccaggctgctccgcccacatctctcagtctgcaccccagtg

SEQ ID NO: 255460 - DNA, 122 bp, Homo sapiens
cttagggggccctcggcttcccaggtttgtgtttactcaggcgacctgagctggccccgacgtcttttggctttggagaggccacggatgcccaaggacaaagccccagcgggcctgtggga

SEQ ID NO: 255461 - DNA, 122 bp, Homo sapiens
tccgctgggactggtgccagcaaacctccactcactactactgtgtgcctcaggtcactgcgttcatgaacttctctcattatccccagagcacatcccatttcacagatgagaaagctaag

SEQ ID NO: 255462 - DNA, 122 bp, Homo sapiens
cccgcgcggacataaaaggagaaagagcgcccgcggagcggcccgggcggccgggggaagcgcggccccgtgctccgctgaccccggcgtccactcccggctccgcccctcggctttgaggc

SEQ ID NO: 255463 - DNA, 122 bp, Homo sapiens
tcacagatatgaccattaaacatgacaaagttatgccactccaatattattatttgatggcgatggcaggacacagcataatgtttggctaatgccaccagttatttcagttgtgtttgttt

SEQ ID NO: 255464 - DNA, 122 bp, Homo sapiens
gcccggccgtcggtaacctggtttccgagagtgccgggcggtcggcgggtcagggcagcccggggcctgacgccatgtcccggaacctgcgcaccgcgctcattttcggcggcttcatctcc

SEQ ID NO: 255465 - DNA, 122 bp, Homo sapiens
cggccccgaagttgggagctctggctgggccacctccgggctgggggcccggcctggggccgcccctcttttcccgcccggagccgcagtgtccagaggggcgaagtttgcggccaccgccg

SEQ ID NO: 255466 - DNA, 122 bp, Homo sapiens
tttcagcaccgctggccggacccgaagacgcgccctaaggagacgcccggacgcagggcacggggcgagcctctgacccacctcccggctaacccaagccgccccaggagacggcggcggcg

SEQ ID NO: 255467 - DNA, 122 bp, Homo sapiens
cgctcgggtgcccccgctgggacgcccactgtcgtttggtgctggggcttgagacgaccgcgcgggatctcttcctgtgattttgagctgatagctgcttagtgttatttctgcgtctaact

SEQ ID NO: 255468 - DNA, 122 bp, Homo sapiens
actttcttccctgtcacgaattcagcctggcttcctttggcctgagacagcgtcttcaggcgggtcggctcggacctgcccagtggggcgcccacctgcacccgcacccgcacccgcacccg

SEQ ID NO: 255469 - DNA, 122 bp, Homo sapiens
cgatgccacggagcaagtgggccaggtgagttgagtccccgggcggcctgcagggcctggcgctccgcggcctttcgaaagcgcttcccgccgcactccccgggccgagcgggggctgcggc

SEQ ID NO: 255470 - DNA, 122 bp, Homo sapiens
aaaaagaaaaaaaaagtggttcacaaagtcacgtctagtgtgacccctcatcagcacagacgtactcctaggtgtccgtttctgggtgaagtcctggaagcagataaatgtttgcagaggtg

SEQ ID NO: 255471 - DNA, 122 bp, Homo sapiens
acgacttctggtgaaaagttacaaataatttaaatgcctgactacaatattgtgccctctcgaattaacagtgttcccttggcccttccctacatactgaaaatagtgcaggccctcaaatc

SEQ ID NO: 255472 - DNA, 122 bp, Homo sapiens
ctcctctcggtcatctgccaccacggcacggcaggcagtgagtcatgtcccctcccctgccgtccccatccgctaggatccctgtgacccgtctgctctgccgccgcaggtgggcactacat

SEQ ID NO: 255473 - DNA, 122 bp, Homo sapiens
gagaatgcagatgtggcagagctctccttcccctgaagtcacctctcagcaagttccactcggcagatggaagaggccagatggagctccccagagagagacagagatgaaatagcgggctc

SEQ ID NO: 255474 - DNA, 122 bp, Homo sapiens
tccgaggagagggtccctcggtgcccagcacagtgcgtggcacagtcggtgctcagggagcgatagctagatgaaaccgtacttttcgggatcctagtccatccaaagcagccgccttcggg

SEQ ID NO: 255475 - DNA, 122 bp, Homo sapiens
gaggaaaaaaaggaaacaggagttctgccaggtcctttcaggccttggggttgccttcctcgacaacgcaggcaggagccggcttgaccgaagcctccacctcggttgcaggtcctgcgtag

SEQ ID NO: 255476 - DNA, 122 bp, Homo sapiens
ctctccctgccatttggttatttgaacggatccgtatttggtgttcctactcccttccctcggttcacggagcctctggagggagtcgctgctgcagaaacttgcctggaagaaaaaaaaaa

SEQ ID NO: 255477 - DNA, 122 bp, Homo sapiens
cagaccttgagcctccagggagagccctgaggagaaatcaacagaggctgtccaactccacgtggggccatgcccatatctgaccacctggacaccagcactgcccactctgggcacagacc

SEQ ID NO: 255478 - DNA, 122 bp, Homo sapiens
agcctccctgcttatccttccctgccgcctcgtgtgtcctgcatggcatttgttacagcccgcagtcacaggtcttgcggtggacttgctggtcggctgctctgctgattctcgaaggcgga

SEQ ID NO: 255479 - DNA, 122 bp, Homo sapiens
ctccagggctgcctctcaacattcacagaatgttccccacacccaacactccccaacccccgcagcctcaaaaaaacgcgggccttccattgactgtaactgacaaatttattgaagtcttg

SEQ ID NO: 255480 - DNA, 122 bp, Homo sapiens
gtggccacccctacgcccattcctatactccgcggctctccctcccggcccaagcagccgcggcctcaaggaagcactgctcgagcagctgccgcccagtcccggcacagcagtcaggcgag

SEQ ID NO: 255481 - DNA, 122 bp, Homo sapiens
tcactgcgggcttctttgttgccacgaggcagatcacaggtcctcttgtggaggactttacgttcaggtgcagaaagcagccaggattgccacccagggcactcggccttctgtggccctgg

SEQ ID NO: 255482 - DNA, 122 bp, Homo sapiens
gcttatcagcctgctgtggtgcgggggccgaactctgcccaaacgtcttccagatgtggccgcagctactcgatagcctggctccagccggggctctaggccagcaggctcccgttagccta

SEQ ID NO: 255483 - DNA, 122 bp, Homo sapiens
acacccacgcttccctgtggactcacctctgcagccacaacaacaccctcctctccttggcgtggaagccagcgctcctggcccactcccagtaggggatgtcctctgagttgtttttcctg

SEQ ID NO: 255484 - DNA, 122 bp, Homo sapiens
aagaagccctgcctgtaaagggtgcagcttaggctgttatttttgcttcattcagcctagcgtctgatcaaatattccgtcactcagggcgtgaagggtggggcctgaaaccttatcccatc

SEQ ID NO: 255485 - DNA, 122 bp, Homo sapiens
ctagtctttccttgccaggtccctaggttgttcccatggctacaactcccactgcgcagccgcactgctgcggctgggggccctcgctgggctcccgtggcgctattgcctccctttgcacc

SEQ ID NO: 255486 - DNA, 122 bp, Homo sapiens
gccgggcccctctctggattgggcagcaccgacctaggcaggtgtgtctctcagggcaggcgctgaaggctcagcctcaaccaggggaatcctaggcccggctgcgggaagggaagtcggct

SEQ ID NO: 255487 - DNA, 122 bp, Homo sapiens
gggctgctccggcccctagcactgagaaccacgtgtgtgtcccagaagtggtgctgcactcgggaaggacaggcctggcccctcgccggcagcgtggccttgggaggctgcgtcactctcag

SEQ ID NO: 255488 - DNA, 122 bp, Homo sapiens
ctgatgccgggggcttgcacagtgcatgctgggacttgtagtctccgcgggcaagatggccgctgggtcctcagggcaggacacaggggctcctcatcacccgttcctgtgatctcagacac

SEQ ID NO: 255489 - DNA, 122 bp, Homo sapiens
cagatggaggcaacgatacaaactcggaggcagagagggacaagatggctcccctcagttcgggcgaggctgcggaattgccagacagtacttatcagggatacatcttaactagaagcttc

SEQ ID NO: 255490 - DNA, 122 bp, Homo sapiens
tcggcctcgcccactaagaagcagacatttacagaattcctaagacgccgcgttccatttcgtttttaaggagtccgatcacatgcgaagcgcccctgcgtcttaagcccagcttttggaag

SEQ ID NO: 255491 - DNA, 122 bp, Homo sapiens
cagcttggcaaaagtcaccatcaaactatgaaatcctactgaaaccatccctgtgcttctcgtgcacaggtactcgttgatctaaatgttgcatttattgtgttcttgcttttttccccctt

SEQ ID NO: 255492 - DNA, 122 bp, Homo sapiens
ctgttgacattgcaaaatagcagaagaattcgacaacaggccttttcagaatgtgcaccacgactggacaaagggcagtcctaagtgggtcagtggctgccctggagagttttccgggtgag

SEQ ID NO: 255493 - DNA, 122 bp, Homo sapiens
tcgccgaagcgaagaccgagaaactgcggcgaccataccgccgctgcgaccaaagcgccgcgttctcaactcaccccgccgggccgggccgcagcgtctacaacctggggagactgcgcctg

SEQ ID NO: 255494 - DNA, 122 bp, Homo sapiens
ccctgtgttctcccatattcattcatgcacccgtcggctcacccgtccactcacaagcaccgtatggttcacgcacctgtcggctcacccgtccactcacaagcaccgtatcgttcacgcac

SEQ ID NO: 255495 - DNA, 122 bp, Homo sapiens
tcgccctctcatcctaagggggcgggcctagcggaaggcgggtcaggcagaatgcggccccgggcgcgtgtggatgacgtcacccggcgcgtgccggggtagcccgtagtaaccccgagtct

SEQ ID NO: 255496 - DNA, 122 bp, Homo sapiens
gagtttacctcacctcagacgcgactacgacctctctgcgcatgcccctttcgggaagcgcgttccaatcgaggtcgcaatcctgtgcgtgacccttctcggcgacccggaaaaacttgtaa

SEQ ID NO: 255497 - DNA, 122 bp, Homo sapiens
ctgggaaaaggccctccctggaggagaactgaaacttagggtggggactgtagaaaggggcggagagatcagccgcccagccaggagttaagctgaggtcgtctgagccctgcgacagcctg

SEQ ID NO: 255498 - DNA, 122 bp, Homo sapiens
acatgctattttgagcaagtcaacctcaacttttccttcgggtgtggagaatggcaggaacgcaaggatctctggccagcttcaacgatggcgggactttcccgcatttcacctggatgtcc

SEQ ID NO: 255499 - DNA, 122 bp, Homo sapiens
ctcccgcgcgcgcgcgtgcgcgagacccccctttggccccctaccctgcagcaagggtagcgtgacgtaatgcaacctcagcatgtcagcagcaatataaaggagaatgaggcggcgcgcct

SEQ ID NO: 255500 - DNA, 122 bp, Homo sapiens
caagaacccacgaattctggacacacctgctcagcagttcatgctcccagcggccttacccgctcagaagcgcttccgaagtgcttcctccaggctccacagcggccttccccgctcgctcc

SEQ ID NO: 255501 - DNA, 122 bp, Homo sapiens
gacacgccccctttcctacgccccaggcggccccgcccaaattttttcttcttcaccttacggcagagcagggaactcagctttagattctccctgtactggaaagggatgtcgcaaggttg

SEQ ID NO: 255502 - DNA, 122 bp, Homo sapiens
cccgctccaccttcccccgcgcttcctaggcgggagccccgccctctagggcgggtccaacggacagccaggttctaggacaaggattgacacagggggaatccaatcaggaggcggcgact

SEQ ID NO: 255503 - DNA, 122 bp, Homo sapiens
gacgcagcataagaaatcaatttttcaaagatgccgacaaacatcttcccacagcctgagcgactcagggaagcagcggcaggagcggaagggtcgtgggtgaacggggtgcctttctctaa

SEQ ID NO: 255504 - DNA, 122 bp, Homo sapiens
acacacatggaataatttcccactgtgttagaactagtaattacagccacacggtgtgtccgtaaacttttgaatgaagagccttgtcactcagacggccctctccctggcagcttttgctg

SEQ ID NO: 255505 - DNA, 122 bp, Homo sapiens
tgcttatccatggatcacagaccattcctcttgaacggtgcaaagtaacactgaggtgggcggggcagtgggtgtgtagggcatgaaggaggcagacacagcacacccctagacttttcctg

SEQ ID NO: 255506 - DNA, 122 bp, Homo sapiens
ataatactgtagcctgggcaacacagtaaaaactgcacgtttgtgcagcataacatcttccggcttattggctgaggtgttaagtttattccttttatgcagatgtcctgttacagtcagcc

SEQ ID NO: 255507 - DNA, 122 bp, Homo sapiens
atagggatagctttttaaactcacctctcccttctgagaggaggctgctattccttgcaacgtatttttgtgcagctgaggatctggaggggttctgacctgaacaatgggctgggagctga

SEQ ID NO: 255508 - DNA, 122 bp, Homo sapiens
tggtggtcacccagccttggctcactggccacaggatgcagctgtgaacagggccatgtgcggcccctgtcctgaggggctcagggcccaccagaaggcagcctttactgagcagtgctgag

SEQ ID NO: 255509 - DNA, 122 bp, Homo sapiens
ctccccgacccccctggtaggagcgagcccccacgtgctctgctctccggaagtcattggcggctggggttccttgtttatcttggggctccctgaagttacggcacctctggcctccgccc

SEQ ID NO: 255510 - DNA, 122 bp, Homo sapiens
ggtctcgaactcctgacccaccccgcctcccaaagtgttagaatcacaagcgtgagccaccgcgcccggccccacaaatgtaagatttatgcacttctccaagccaagtgctgtgcatcgaa

SEQ ID NO: 255511 - DNA, 122 bp, Homo sapiens
ttgagagtgaggtgtgctgggcggagtgggggaggacctcgaggcgccccggcaaccaaccgtgttctaaccaactggcaagtgggaaaagttgacatgactagagaacaacggagcttatc

SEQ ID NO: 255512 - DNA, 122 bp, Homo sapiens
caaccccagcggggaggggcctgggcacttctgcaccccgccgagctcccctgcttctctcggggtcccaatccacccgcccaggctttccaggacagatgggacgctctctccccgcggcc

SEQ ID NO: 255513 - DNA, 122 bp, Homo sapiens
gcaagggcaaggcggagcccctgtgatgggcaggcagttctaccaatgaggtgccccagccgctgtaagacccggccgccgaggtgggcggggcacgcgcggggcctggccaatggcggcgg

SEQ ID NO: 255514 - DNA, 122 bp, Homo sapiens
cctcccccctccccttctcttcttttctttctagatggggtttcgccacgttgcccaggacggttttgaactcctggggccaagcgatctgccttcctcggcctcccaaagtgctgggattg

SEQ ID NO: 255515 - DNA, 122 bp, Homo sapiens
ggtggcgctaagccacacaatgcttggtttgccgcaggctttggggagcagagggctgaccgggggagagcggagaccgggtaaggggggccttgggagccagggagccctgaaccagaggg

SEQ ID NO: 255516 - DNA, 122 bp, Homo sapiens
gggagatttacataattattcataaaggagcgggaatgggcattactgttaagcatgttacggggtctcccagatgtgcatgtgcgtgctagtacaccacatcacatgtctcattagcattt

SEQ ID NO: 255517 - DNA, 122 bp, Homo sapiens
tgatgactatctattgagtaacacggacaaaggaggaagaggcacatgctgcccattacccgactttctcggtcctggtcttaaggggaggatgttttcatggttcaggtgttcttcccaag

SEQ ID NO: 255518 - DNA, 122 bp, Homo sapiens
tccaggcttctcctggtccccgaagactgcttcagccacaccagctccactgaagaatgacgcaacagcctcatgcgggttttcagaaagaagcagcactccccactgtacgatgccttcgg

SEQ ID NO: 255519 - DNA, 122 bp, Homo sapiens
gacaggaaatgcattgtcaacagatgattccccccccggcccccccgccccaccccgccccgccccaaaaaaaggcagggttgttcttggggcaaactgtggaatctccttttgcagacgaa

SEQ ID NO: 255520 - DNA, 122 bp, Homo sapiens
tcatcgctttcatcaaaggtattttgagcatcaaattggaaatcctgggaaactcctgggcgtggaggacctcagatgtcaccctgcagctttctctgtctctgagaacagatctagagcct

SEQ ID NO: 255521 - DNA, 122 bp, Homo sapiens
ggctgggatttaggattgtgcgagcttatggtccccccaaccccaacatcattgaaattacgtgtctgttcaaagccttgggactgagtctcccagctcaaccagcagggcctgcaagaagg

SEQ ID NO: 255522 - DNA, 122 bp, Homo sapiens
tgctagcagatggttacgttgttatcatcctgtttaggaattttggcccaactgtcaaaacgtttgcctgacaaaatggaaaaacaaaaaagactaagtgtaggaatgtcgcttctggcaat

SEQ ID NO: 255523 - DNA, 122 bp, Homo sapiens
aaccttgagctgcaagagggctccggctctcttcaactcctggcccagtggtcctcagagcgtggttcccggaccagcagcgtccttgtcaacctaggaacttgctagaaaagcacattcat

SEQ ID NO: 255524 - DNA, 122 bp, Homo sapiens
tttgtgccaacagtacatttagaagagatccaatagcaaggacttcacagtcacaagaaccgtttctaaagttaaattctcataccaccaatcctgagcaaacccttcctggaactaatttg

SEQ ID NO: 255525 - DNA, 122 bp, Homo sapiens
tactcactatcacgagaacagcatgggaaagacctgccccatgattcaattacctcccaccgggtccctcccacagcatgtgcaaattcaagatgagatatgggtggggacaaaagacaggc

SEQ ID NO: 255526 - DNA, 122 bp, Homo sapiens
ccgggccccagtcatccacgtcctctcatctcacctgctgccaggccaggccctgatgcccgcctgcggccatagctccactgagcatgctgcccacccccttgcaatgtcccctccatgca

SEQ ID NO: 255527 - DNA, 122 bp, Homo sapiens
gcatattgttctgaatcaggtgtgtgaccttcccagagatctgctcctgctcctggggaccggaaaatggcttccttaggctgactgagaccagggagctaggcagatctgagacggaatgt

SEQ ID NO: 255528 - DNA, 122 bp, Homo sapiens
atctcggctcaccgcaacctccgcctcccaagttcaagcgattcttctgcctcagcctcccgagtagctgagcttacagacatccgccaccacgcccggctcattttttgtatttttagtag

SEQ ID NO: 255529 - DNA, 122 bp, Homo sapiens
agagcctgaggcagctgggctgaggcctgccctatcccattggacggggcaggggagtgacggcgggagctcagggcctgggaaccccagggctcttttttgtcctggtttgcagaagaggc

SEQ ID NO: 255530 - DNA, 122 bp, Homo sapiens
gtcaatttttagggatctcaagttgatataaatatactgatgtttgtgttctcaacctagcgtatgcagaacatcaagagctggctgtttaccaaagaaataattcaaattggtggacaaaa

SEQ ID NO: 255531 - DNA, 122 bp, Homo sapiens
ctctctccaggcaggaggctccccgaggctctgcaactgccctcgccggcatccttcacccgtgcctcagctgactctgaatgggttctgctagctgctcctctggcatctcctaagagact

SEQ ID NO: 255532 - DNA, 122 bp, Homo sapiens
tgaggagcgtctctgcccggccgcccatcctctgagatgagaggcccatcgtctgagaggcgctccccagcgcctctgccccgctgcccatcgtctgagatgtggggagcgcctctgccccg

SEQ ID NO: 255533 - DNA, 122 bp, Homo sapiens
ggttatccacctgccttggcctcccaaagtgctaggattacaggcgtgagtcaccgtgcccggccaggagttaagcttttggaaagtctttagaacagtgcctggcatatagtaggtgctct

SEQ ID NO: 255534 - DNA, 122 bp, Homo sapiens
cgacaagaacgcgctctaatggaacgaagttggcaatacctatcagcaccaggggcagtgcgagagccaagagccggcgctcacgaggagcgggcgcccagcgctgcctggcaagcccggag

SEQ ID NO: 255535 - DNA, 122 bp, Homo sapiens
caaggtatccgcgggcagggagcgggccagggcgtgcgcgaggtcgggggtagctgggaacggaggaggaggggcccgctcgaggctccgcctctcaccggctgcggcctcggctacagcca

SEQ ID NO: 255536 - DNA, 122 bp, Homo sapiens
ccactggcttaccaggactccgactgggcttgccaggcagcggcccttgggaaccggggacgtccaggcagccaaggccttgctctcagccatgcatgccactggccttcaacaggctttcc

SEQ ID NO: 255537 - DNA, 122 bp, Homo sapiens
acactccctctccctcgagcctggaaggtgcactgggctcataggggtggaaacctctaccgcggcagaggcacagcaccagggccaggatgctcgcttttatttcagacgtgaaaaccgag

SEQ ID NO: 255538 - DNA, 122 bp, Homo sapiens
tccaggggcctgctgagtccaggcagccgcgagcgcagacccccgaagcccgcgcgtaggcgcccatggctcagcagcttcctcctggggttccccggccctggaaaggccgggcaaacgcc

SEQ ID NO: 255539 - DNA, 122 bp, Homo sapiens
gggagggggagacctgctggctagagctgggttgggggccggtgggcagtgggcctggctcgagcagggggcgagggattggagagaaaggcagttcctgatggtcccctccccaggggctg

SEQ ID NO: 255540 - DNA, 122 bp, Homo sapiens
agcccagttagaactgctcattggacatgttcacaaagctgcacacactgtttactgagacgatggctttatttggggtggctggggcagagagagctcatgagtgtgggggctgaagccat

SEQ ID NO: 255541 - DNA, 122 bp, Homo sapiens
catcatcaggtttgacctgaagacagagaccatcctcaagacccgcagcctggactatgccggttacaacaacatgtaccactacgcctggggtggccactcggacatcgacctcatggtgg

SEQ ID NO: 255542 - DNA, 122 bp, Homo sapiens
agccgcatcctcccggagcagaaccgctccccgccggctgtccgcaacctccgccagcgtcggtccctgggcaggtgtgggtgagactgctcgttcgtttctttaaatttcgatgccattgg

SEQ ID NO: 255543 - DNA, 122 bp, Homo sapiens
gaggatgtaattcagccctaacagatggtgctgctagggacgttgtgaagctgaaatcagcgtgtacgtgtggatgtggtttcctggcacacagtctacctgggagtattctaatttatttc

SEQ ID NO: 255544 - DNA, 122 bp, Homo sapiens
attagaaagtgagattaatctggggctactgcagtgatctcactaaacagtgttactctgcgtgagtgctggagggcattggggtgggcagggaaagagagcaaaggaggagaaggcatcag

SEQ ID NO: 255545 - DNA, 122 bp, Homo sapiens
acctcacctcccccaacacacacacacacacacacacacacacacacacacacacacacacggccactctcaggcccctggctcctgagtggcccccccagtctgcagccatcccaggcctc

SEQ ID NO: 255546 - DNA, 122 bp, Homo sapiens
cagcgaatgctcactcaggcaagctctgtcctccctggacaccgtcagccccacaggaaccgagctgggaagtgttcttgctgtggttgtgatttttaattgcaacacctctcattcttgtc

SEQ ID NO: 255547 - DNA, 122 bp, Homo sapiens
ccaagcccccaggaaaggccttctgaacacaggcagcaactctgctgacgagctccaggtcgatggcactcccctctcccttgtccggcccagcctagcccagtcagtgctcgggccaggga

SEQ ID NO: 255548 - DNA, 122 bp, Homo sapiens
ctccatctcctgacctcgtgatccgcccgcctatgcctcccaatgtgctgggactacaggcgtgagccaccacacccagccacacctggctaatttttagaaagtctgtagagataaggtct

SEQ ID NO: 255549 - DNA, 122 bp, Homo sapiens
tcctgggcttttttttactgggagactttttctgatggcttcgatctcattacttgttaccgatctgttctggtcttggatgttttcactgttcaaactaggtaggttgtatgcgtctagga

SEQ ID NO: 255550 - DNA, 122 bp, Homo sapiens
tctccaagaccctctcttgctgtaccagacagcaagtcctgtgactccctgtgtgaggagcgcggcacaggcctgcctcctaggtgttcgggtcgagatttacagcggagtctcatcccggg

SEQ ID NO: 255551 - DNA, 122 bp, Homo sapiens
atctcagttcactgcaacctccatctcctgggtgcaagtgattctcctgccccagcctcccgagtaactggaactacaggcaccgccaccatgcccagctagtttttgaatttttagtggag

SEQ ID NO: 255552 - DNA, 122 bp, Homo sapiens
agttgaactcggtcttactgttccacgcgagcaccccatgactcagagcccaaatctcagcggaacagcccaggacgctcctgccgtccacaggaagacgcctctgtctctgtcccccgccg

SEQ ID NO: 255553 - DNA, 122 bp, Homo sapiens
cgaggagggccccgccttgtgctgccacagccagtcttcggccgctacgtcacgcgcgctcgcccactattcagacgagctctctcaggtccttcctgattggatctctgccagagagggct

SEQ ID NO: 255554 - DNA, 122 bp, Homo sapiens
agaaagggaacgtgagaattaggtcaaccagagtgttttcccagtaagtgttgaggcaggcgtttgcaaggagcagtattggaagcgtttccggagttttccagtgtgttcgggtttcacct

SEQ ID NO: 255555 - DNA, 122 bp, Homo sapiens
ggcgggcctgggcctggggggtactggaggtaagtttttagctggaaatgactcttccaacgatgactgctttccttgatacaagaaaactgggggctgttggccattgaaagaataaaagc

SEQ ID NO: 255556 - DNA, 122 bp, Homo sapiens
aaacagtgttattgtatacatcctcaattgtttatttttcttgaaattctaagcaaccttcgtctctccccattctgtgagcatctctctccagctccagtgaccagtggagattctgtgtc

SEQ ID NO: 255557 - DNA, 122 bp, Homo sapiens
attggacgtagaaggcctgcactgcgagggccacggcgcaccacgagtatcggtcccatacggttgcgtggatgctcagcaccactgcaaacactactgccgcctctgccagcaccgatcca

SEQ ID NO: 255558 - DNA, 122 bp, Homo sapiens
gcgccccaggcctcgcggaaccccccgccccggtctcgtccccaggcctgcgcaccgccccgacccgaccccagcctaccccggcctctccgcgggcgcgccacaagcctacgcagccctgg

SEQ ID NO: 255559 - DNA, 122 bp, Homo sapiens
ccaccctccaatcagctctgcagacccctaactcggtgctggtgatgggcctggctctcccgcacccaatcctgcctgcacttctctttcctgaattgagacatgactgtccacctggccct

SEQ ID NO: 255560 - DNA, 122 bp, Homo sapiens
cttactgagaggtgaaaatgtgctagcagccctccctcgctctcagcgcctcctcggcctcggcgtccactctggcctcgctggaggagcccttcagccccccactgcactatgagggcccc

SEQ ID NO: 255561 - DNA, 122 bp, Homo sapiens
gctctagtggaggggattggatggggctgtttgggacccagatgttcattttgtcttagccgctgccagctgaggtcaggtcccttctgtctgcctcagcttccttagggggctcagaatgg

SEQ ID NO: 255562 - DNA, 122 bp, Homo sapiens
ctccaccgccgccgagcccggggtcaaagctgccccatctcacagggccttcccagcgcgcggcaccaagacccccatttctatgcaccctggaaagggtgattaatttaaagtgagtggag

SEQ ID NO: 255563 - DNA, 122 bp, Homo sapiens
aaaccgcgcaccttccaggtatttttcctatgctcattctacagatgaggagctgagactcgcaaagaccaggaacaggtggcataggcagtggggagcagagccagggttagaagtggggt

SEQ ID NO: 255564 - DNA, 122 bp, Homo sapiens
tctgaaggttcgccgttaatgaagccaataatatgtcttctgctcatctagtgttgactgcgggacagctcagacccttcaacagctgagggtgtgttttaggggctttctctgagaataga

SEQ ID NO: 255565 - DNA, 122 bp, Homo sapiens
atttttaagagattaaaaatgacttgaatataatacctttaatttgtaataatggtctgacgggctgcttcctgtctaaagtaaaccttttgatcggcatgtccattttgatctcttctgtc

SEQ ID NO: 255566 - DNA, 122 bp, Homo sapiens
caccaaatctcaagattctaatctatttctcctctctatccccaatgacaggttgccacacgctatcttacaatttcacaatgaccctccaacccttaccatgtttgcctgccctaccgact

SEQ ID NO: 255567 - DNA, 122 bp, Homo sapiens
gcggtggagagctgggcgagtttgtctttggacagaaggcccgaggaagatgcgtgttcccgaccttcctcctcatggtcagcacagaacctcaggaccggtgcggtggagagctgggtaca

SEQ ID NO: 255568 - DNA, 122 bp, Homo sapiens
gtttgggttcttaagtcgtagatttattaaacgtggaggattcttcttaggctttaggtacgtagaggaatctctacacgtactagacatcccttttattatgaggttcatcttatgaggtt

SEQ ID NO: 255569 - DNA, 122 bp, Homo sapiens
cgcgcaccttgtgtcgctggagctgagaacactttgttccttttgtttcactcaacttgccgacatctaactcagggacacgggtatgcagcttgtttgacaaataagccgagatacaccga

SEQ ID NO: 255570 - DNA, 122 bp, Homo sapiens
accgtcaagctggccaagcacaaagagcttcctccctacgttgagaactggttctacacacgagccggttccacagcgcggcacctgtacctccagggtggcgctggggttggctccatgac

SEQ ID NO: 255571 - DNA, 122 bp, Homo sapiens
agagggcgcgggagttggcattcggtggtcctggcagttagctgagcacgccctctgagccgctcggtggacaccaggcactctagtaggcctggcctacccagaaacagcaggagagagaa

SEQ ID NO: 255572 - DNA, 122 bp, Homo sapiens
gattgagtgactggggcggcagcacggggcatacattatgccagcaaaagcaaaaggcggcggcatgagtgcgggcagctggaggaccccgtggccctggatgaatggccgaggggagcgct

SEQ ID NO: 255573 - DNA, 122 bp, Homo sapiens
tggatatatgtatgtaattacatattataaatacaaatgtataaactataaactgaattacggtgatatcattataaaatattgatgtaaagtcttctagggtgagtagtcctttcagggaa

SEQ ID NO: 255574 - DNA, 122 bp, Homo sapiens
tcctaaaactcagggcgtcggttagctgattggcaaatacagtaacgcacacatcccaaacgggacttggcaaaacggtgtgcatctggattaactgtcatacagtctccacgtcactcttc

SEQ ID NO: 255575 - DNA, 122 bp, Homo sapiens
gaatcaaggaatcagaaagtgaggctgttttctctaggtcatccacctggaagtcactagcgcctgtgttcagccctggtcagcctgaccccaaagcctatgctctagctgctgtgctgtgg

SEQ ID NO: 255576 - DNA, 122 bp, Homo sapiens
atacagtctcctcctgcaggctctgctgggtctttttattatcattctccaggtggtgaccgggtccctgatgctgatgtggtgctcacagcttcctgaaatatgacccttggggcccaaca

SEQ ID NO: 255577 - DNA, 122 bp, Homo sapiens
ccggacggccccgcctgggcaaggatgctggtgcggcggggcgctctctcttttgggaaccgtcaggaggcgcgccaggcggtggggtggggggtgtttctggactgcggcctctgcagcct

SEQ ID NO: 255578 - DNA, 122 bp, Homo sapiens
tccggcacaatcgagtagggcagtggggcgggtggcccaagggtgtcagagcaaacttggcgggcactgggcggacagctgggcttggagctccccgaagggtggcctaaggatgaagcccc

SEQ ID NO: 255579 - DNA, 122 bp, Homo sapiens
cgacagcctcagggggcagctgacctagggctgcctaaggcggaagtgggagcccctagccgcccgggcggaactacagctcccagaggcccccgcggcgctgcgcacgcgcgctggcgtgg

SEQ ID NO: 255580 - DNA, 122 bp, Homo sapiens
gacagcgcgatctccggctcctctcaggaaaccgggagagctggcaaggctgggctcctacggctgcagtccccgggcccgatcgagggaactgaggctcgtcaggccggccccaaatcgcc

SEQ ID NO: 255581 - DNA, 122 bp, Homo sapiens
cattcacccttcaaggggctgtcaaggccgtagcatggtgtccctggaagtccaatgtcccggcaacaggagggggcaccagtgatcgacacatttgcatctggaacgtgtgctctggggcc

SEQ ID NO: 255582 - DNA, 122 bp, Homo sapiens
gagaaactgggttgtttatctgacagaattttccaggcactggagctggccgggattcctcgcatggcattgaacatgctcctttatcagtgtttctcctctaaactggcttcctgttgcat

SEQ ID NO: 255583 - DNA, 122 bp, Homo sapiens
cgcggcacggcctacactgtccccttggcggggcgggtccgaggggagccccgcgcctgccgtctcagccctgggagagggggctctgcccactttccgaggcttgggaccgctctccccca

SEQ ID NO: 255584 - DNA, 122 bp, Homo sapiens
gactcagctacctatgttcccaaggcccctctattcttcttgctcacattgctccaaccacgttggccttcacggtgtttcttaagcataaggagcacatttctgcctcagggcttttgttt

SEQ ID NO: 255585 - DNA, 122 bp, Homo sapiens
ggctcaaaggaccgagcgggcggtgcaggttggaacccgcggggcggaccaatcgcggctcggccacagcctcgcccgctgattggtccctccaggccccgcccccgctcgccccgcccctc

SEQ ID NO: 255586 - DNA, 122 bp, Homo sapiens
ggcgtagggtgggcgcggcttgacgacctcgggttcgagccaccaatgcctgaggcctgacgagccgagctgggagaaagactgcgcctggacttagctgatcttctgtttaagtaaaacat

SEQ ID NO: 255587 - DNA, 122 bp, Homo sapiens
ttcgggattcgtggcctgctcccgcagggcacagacactatcttctgtcctttgagtgcccgggcagcattgcgcctgagtatttgtaaacggagggccggtatcccatcccatgtacagcg

SEQ ID NO: 255588 - DNA, 122 bp, Homo sapiens
catcgccatcttacctccaagtcctcaccgctccccgccagtgcagtgttacggtggccccgccacgagccacccctgtgcattcacacccgtgtgtcctcggcctccctcgaatctgggct

SEQ ID NO: 255589 - DNA, 122 bp, Homo sapiens
gggagacactctagaacagtcactttcacctcttggtgatctggctcggctcctgcagatcggggtcgaggtcaaagacctcattatccagcagccttcgcagcgtcacgtcggccagctgc

SEQ ID NO: 255590 - DNA, 122 bp, Homo sapiens
cccgggtcgggggcctgcccgcgggggctactcaagctgtcctgggggcccttaggagaccgcgtcactagctgactgcgcactccaagtccccttcccagggcagctctcacgacactaag

SEQ ID NO: 255591 - DNA, 122 bp, Homo sapiens
gcgagtgcattaaaaatcatctgttttctcgctgtgtaacgcggcccactttggaaaacgcgtggaagtgcccattatgggacgcttaaatgtgagatgcgatcccagggaaaggagaacct

SEQ ID NO: 255592 - DNA, 122 bp, Homo sapiens
tgctgaccctttgttggagcggggtgcattggctctcctccctcaacccgtcttgacacccgcagctgacaaggagaggtaaaatagggcacccaaactactctgcgctttaccctctcaaa

SEQ ID NO: 255593 - DNA, 122 bp, Homo sapiens
cccacctttgcagcacagctggcaggccccaggcatccttgggccaaggtcccccatggccgggtccctggaagggttggcacaggcacgccgcccaccactgcgaacattctctttagcag

SEQ ID NO: 255594 - DNA, 122 bp, Homo sapiens
ggacgcaggataagagacacctgtcctcaaggcgagggttcccggaccccaggtgggctgcgctggaccccaggtggagacgggcacagcggctcccaggggtacaaatcttccttgcctga

SEQ ID NO: 255595 - DNA, 122 bp, Homo sapiens
tccaagaaattctcctgcctcagcctcccaagtagctgggattacaggcgttagccattgcgcctggcacaaaggttttgatttcaattggatgagggttctgtggctacaacacgaatacc

SEQ ID NO: 255596 - DNA, 122 bp, Homo sapiens
agggggaaacgcagcctgccctacaggacttaatgccaccggcggatgagggagcaacaacgtgcccctcgctggcttttgtggctaagtctgttccatcacaaggggtgtttagatgcctc

SEQ ID NO: 255597 - DNA, 122 bp, Homo sapiens
gaggtcacggggggagacaccttctagcggggaagcctgcatgtgggtacgtgtttcattcgcgctctggcagatgagaagcatccgaacatgggggacttacatggggtgtggagaactag

SEQ ID NO: 255598 - DNA, 122 bp, Homo sapiens
agaaccgtgtttccctagaacccagtcagagggcagcttagcaatgtgtcacaggtggggcgcccgcgttccgggcggacgcactggctccccggccggcgtgggtgtggggcgagtgggtg

SEQ ID NO: 255599 - DNA, 122 bp, Homo sapiens
agaattcaccccgttttgaggcatcagacagagctatctacctaaggtgcctctcatttccgcctggaaggtctcatggaggatggggagcgtggggcctgaagggagtagcttcagttctg

SEQ ID NO: 255600 - DNA, 122 bp, Homo sapiens
aagcaaacatcaccaggtgcactcagcaaggctggtgtcatctctggattctcttcataacgctatgggaacacaggaagataaagctcaaagtggagggaaatttttggtggctttgggtg

SEQ ID NO: 255601 - DNA, 122 bp, Homo sapiens
ctgcagaggcacaccagccccagccgcaaggacactcccggcgcaggctcccagggcaggcgccccgccacagcattcaccaggacgagctggaccaggtggctctggggcccttcccgcct

SEQ ID NO: 255602 - DNA, 122 bp, Homo sapiens
tcggcgtagcccatgggaggcgccctgagggcagggcccttctgattccccacctggcctcgagtgaggacgcgctcaacaacatctcgagtaaagcgggggaactcgcttcaacgcgcaga

SEQ ID NO: 255603 - DNA, 122 bp, Homo sapiens
aggtctgcagcttcactcctgagccagcgagaccacgaacccaccagaaggaagaaactccgaacacatttgaacatcagaagggataaactccagacgtgccaccttaggagctgtaaacc

SEQ ID NO: 255604 - DNA, 122 bp, Homo sapiens
atcttgtccccttctctgtcgatctctctctcgggggtcggggggtgctctctcccagggcgggaggtctgtcttccgccgcgtgccccgccccgctcactgtctctctctctctctctctt

SEQ ID NO: 255605 - DNA, 122 bp, Homo sapiens
tttttctttgaggcttcctttcctgagccattccatatttcagcattgttttgtgtcttccgttgtatcttttcctcggcagatatgcaaataatgggtttctttttcccttttccaggagc

SEQ ID NO: 255606 - DNA, 122 bp, Homo sapiens
aagcatttaagaccttttgaacctgggccccaaactggcacactgtcatatgcacagcttcggcctgtgcaaataagtcaagagagattcaagtttgggaaacagaatctgtttcttgatag

SEQ ID NO: 255607 - DNA, 122 bp, Homo sapiens
tgtagaccagctgactgaaggggctccggcgctccgggcccgtctggcccttgacagcggcggcagagagcctctccatggctgcagccacctgctagacagagcccgcacctcccgctgct

SEQ ID NO: 255608 - DNA, 122 bp, Homo sapiens
gcggcgggcagaggtgatgtctgggagcccttccttgacagcccgggccgagaaggtgagcgtcgacgctggtcgtgggggcggaggtaaggggcccggggcggggacgtagaggaggcgcg

SEQ ID NO: 255609 - DNA, 122 bp, Homo sapiens
cgcccgcgacccgagtgctgggaatcgcccagtcccttcccctggaacgctgagagacagcggcgctggccaatcgtgcgggggggatggcgagggggagggagggggcgctcggaggagcc

SEQ ID NO: 255610 - DNA, 122 bp, Homo sapiens
gggaacgggggctgtgcgctgtgcttgcgggccagcacgagttccgggtgggtgtgggctcggggagccccacacttggagctgctggccggccctgccggccccgggcaatgaggggctta

SEQ ID NO: 255611 - DNA, 122 bp, Homo sapiens
gtcacccacgataaccacagacacataccccactctcttcccctttttggtgctgagagccgtttcctgttgagccccgaggtcctcccctcggcccctgcctcgcaccactccctcccctc

SEQ ID NO: 255612 - DNA, 122 bp, Homo sapiens
cgaaggtgcaatgttatgtgctatgagaaaacgcagtcggaggatggcgaggaaggggaacggaattttagatagggcggtctgggatcagaacctccagatgcccgtccatggactccaac

SEQ ID NO: 255613 - DNA, 122 bp, Homo sapiens
cagttcccaccccagagccctgattggatagtagtgcaggcaccgcgacctcaggccttgcgtgtcagaagatgctaccatacactgcacggaatgagccgagagtgacaggctcttggctc

SEQ ID NO: 255614 - DNA, 122 bp, Homo sapiens
accaaaattatgtgggaacagcggtccaggaccttcccctgttcagcggtatccccgggccggtgaccccggggttcagtcgtctccccgaccccaagcggcctctgctttccacccctcgc

SEQ ID NO: 255615 - DNA, 122 bp, Homo sapiens
tcacgtctgactcagatctgcatcttgcgctaccggatctcgacaggaaggtgggcttggcggacagaggctccggcctgtcaccaggctgcggaaggggccggatatattcaccgatcgca

SEQ ID NO: 255616 - DNA, 122 bp, Homo sapiens
aacagattgtctgctttcaggctccttcctttgtaatttcactgtgttgctttctttggacgctgcttgtgcaggacccagcctagctgtttcacaaattgcggagtttgcattcatgattt

SEQ ID NO: 255617 - DNA, 122 bp, Homo sapiens
atgaggatgacatgtggaagtgttctggccactcaggagataaaggaacaagattcaagtcgttagaagcccctcactgaaaaccctaataaggagaggcacaagctttcagattaagtaat

SEQ ID NO: 255618 - DNA, 122 bp, Homo sapiens
cctgaggcctccttcacttctccccacccccaacacatgcagacagatgggagatgtttccggcgtgtgtggggcggggagggggacgggtattgagatttccacgggactctgagtggtgc

SEQ ID NO: 255619 - DNA, 122 bp, Homo sapiens
aaagcttgaatgcatcacctaaacaccacactctcctctgttccattggctcctctaccacgtgtcttcccaagttacctctgggtgctgagccagttaagcaccctgtgctcttgggtgaa

SEQ ID NO: 255620 - DNA, 122 bp, Homo sapiens
ggccctcgctcacaattggaggaaagaattcaggaagtgctcacagctgctcagacatctcggagccaagttccaaccaggacagaggctgcagcacccagggaggaacgccgtggtccctg

SEQ ID NO: 255621 - DNA, 122 bp, Homo sapiens
gccacatggcccacaggaatgggcggtcctgctacatgggaaggagcttagggtttaacacgcctgctccaggagctgcgccacacacccgccttcagattcagcccggcgtgcctgggctt

SEQ ID NO: 255622 - DNA, 122 bp, Homo sapiens
ctaatatctggggctggccttaatttattggcttatctcttgaatagggtcatgttatatcgactcttcatatgttcagtaattttagattgtcccttggattctgtggatgttatattatt

SEQ ID NO: 255623 - DNA, 122 bp, Homo sapiens
ggaagctcgatttccctccagcggccgaactgtggtttcagtgggtttgggagccaagttcgggactgtggagactgcgcacagagaaatacgcaaactactgcctaatgcatggagccgaa

SEQ ID NO: 255624 - DNA, 122 bp, Homo sapiens
ttttgcgccaggctgtgtggtggggacagagcctgggtaaatgaagctttccggctcgaccgctcccaacctgggcacacacgtcctcctgtcctgcaaggggcagttttggggcatcctcc

SEQ ID NO: 255625 - DNA, 122 bp, Homo sapiens
tattatttgcaagtaagtttctttcatcctaacgattctccagctttagttcagaccctccgtgatctctagccagagcctctccatagaattttctctcttaccacttcctttgcctatca

SEQ ID NO: 255626 - DNA, 122 bp, Homo sapiens
gatatgggaaaaaaaggaacaaaactctagcagtgtatttgctacacacttttgtaaccacgataattatatacaaagggtagtttttgccccagtgactctccttgcaaaatcggtggctg

SEQ ID NO: 255627 - DNA, 122 bp, Homo sapiens
gataagggtgtttaaccacctcccaactttcttctttttattctgaataaaggaaaaatgcgcacagcacgcaatttcaagccagtttcagatcaaaaccccaaaagtgttgacgagatgcc

SEQ ID NO: 255628 - DNA, 122 bp, Homo sapiens
tacttggcttttgaattttcgcttttgcagcacaaaggtagggctgggaaaggaggctgccgaaccgtgcttgttttcgctcagataaacgtgagaaaaagtggaggtgaggaagccagtgt

SEQ ID NO: 255629 - DNA, 122 bp, Homo sapiens
ttcaccatcgtgagttctgctgtcccgaagttcaggacacagtgacgggccaccctggagcgtgtggggcctggtgtggctgggccttcagccctccttctaggcagcacaccatgaatccc

SEQ ID NO: 255630 - DNA, 122 bp, Homo sapiens
tccttttattttgcagctggacaacattaagggcctttaaaaccacaagggttgaccccacggcagtttgattaggtcccacttttttttctggagacaggcaaacagtaagtttacttttt

SEQ ID NO: 255631 - DNA, 122 bp, Homo sapiens
cttttagtcaacaagtatttatttagcaccaggcagtaatgctagagtagtgaaacacaacgggcaaaatatatatatttatatataaatataaatatatacatattttatagatttttata

SEQ ID NO: 255632 - DNA, 122 bp, Homo sapiens
agggaagctgagtgtgtcgctccctggtccactgtttctcctataaatgtaaatgggtcacgctctgccgtccgcaccttctcctttcgcaggcactgagcgccgtcccatgccctcggatt

SEQ ID NO: 255633 - DNA, 122 bp, Homo sapiens
gagacgaggtttcaccatgttggttaggctgttctcaaattcctgacctggtgatctgcccgcttcagcctcccaaagtgctgggattacaggcgtgagccaccacgcccggcctactcaac

SEQ ID NO: 255634 - DNA, 122 bp, Homo sapiens
tagcacagtataaaatgtataaaaagttctgaacatctaaagccttctcatcgatgtaggcgccaaaactcatgtggcagcaaaacctgacgtgaactgatgtgagtctatttaaaccttaa

SEQ ID NO: 255635 - DNA, 122 bp, Homo sapiens
ggggccgatgggtggggatctgtaccccgtccccacagtgagggtttgggaagagaattacggagtcccagggacccaggcccagactggccggctgctctgtcctcctctgggcatagtga

SEQ ID NO: 255636 - DNA, 122 bp, Homo sapiens
cggggccaccgggggcgccgccgccgccgcttctccccccgctccaggagggggaggtgccgccgccgccgcgcctcagccggctcccgcccaagcccacggcttccaccttccctttcagg

SEQ ID NO: 255637 - DNA, 122 bp, Homo sapiens
caaggctacaagaaaacctggcctttccctgacactgccttggccttgattgcctcagtgcggagagtaaaacaagctgtcagactcagctcctgccctatccttgagctctaataacctca

SEQ ID NO: 255638 - DNA, 122 bp, Homo sapiens
atgtgggcggctgactttcactcctagagtgctaagcagtgttcagacggctcttacacacgcggcctcaccacctcctctaacccgagccgcacaggggtgtggggcagatttagcacttc

SEQ ID NO: 255639 - DNA, 122 bp, Homo sapiens
ccatccccatccgcgctgcagagtcctggggttgggcagggacgtggttccttcaacccccgtttctgattaagggcttcccagaggctgcctgggcctcgggtgtgcgcgggcagaaccga

SEQ ID NO: 255640 - DNA, 122 bp, Homo sapiens
ttcgcacaagtgtaaagtgatgtactacaccgaggtgatcggctcggaggatttcaggtgcggccaccctcgccacagcaggtgctgcggacagctgggcatggttggagggagcctgcagt

SEQ ID NO: 255641 - DNA, 122 bp, Homo sapiens
agacggagccccaggccccccaccggacgcttcctccccatccattccgggtacctcgggcgggctcatcactccgggtcgccagtacgccctcggctgccgccgccatagcggaccccgcg

SEQ ID NO: 255642 - DNA, 122 bp, Homo sapiens
ttcatgatgccaagaacctggacaccctctgccggacatgaggctgtgctgacctgccctcggctcggccggcgtctgccccacactctccattttcttcttttccatcccagagggttggg

SEQ ID NO: 255643 - DNA, 122 bp, Homo sapiens
gttcgcggtgttcgcgggatgggaagcgtggcgttcacgggatggaaagcgcagcgttcacggtgttcacgggatgggaagcgcagcgttcgtggggtgggaagcctggcattcacggtgtt

SEQ ID NO: 255644 - DNA, 122 bp, Homo sapiens
cgcggccaccgggcggggcggggcgcgggaggccgagtcctggagcagagatcggaaccccgcgggggcgagggccaagagtgggcggcggactcgggaactctaagccccaacagggagtc

SEQ ID NO: 255645 - DNA, 122 bp, Homo sapiens
gacggaggagagagttgcggcagatggtctccatccaggaaggagcagaagagatgctgacgtcaagaaaaaacgggggctgtgactctactgatgactctatttcctgttccaggctactt

SEQ ID NO: 255646 - DNA, 122 bp, Homo sapiens
tgctctcccaggcatgagactgagctccccctcacaggaggcatgtaaccagggcctgtacggctgcacccctaggatgctgcagagaggagtcctgtcctttgagggcctaggtgggataa

SEQ ID NO: 255647 - DNA, 122 bp, Homo sapiens
cccgcctgacacgcgcggcgaaattgaagcagctatattgacacggattcaggcgcctttcgagggccagtcggagggaaacccggagcaaaaagagagcgagatcggggcgaaacgggacc

SEQ ID NO: 255648 - DNA, 122 bp, Homo sapiens
gtgagccgagctcaaggccctctgtctgaaccagtctttttctgtcgccctactgggggccgccatctcccacttcagtgcccccgcccccttaaactcctttgctggctcctccagtctat

SEQ ID NO: 255649 - DNA, 122 bp, Homo sapiens
cacagcgggatcgccgtaggataggaagagggcgtgagggagcactaccgccaccgccaccgccaccgccaccgccaccatctaccgcctgagcctgcaaaagcccaggaggctgaatcaca

SEQ ID NO: 255650 - DNA, 122 bp, Homo sapiens
aggcaccctcccaggccactgttcctaaaccttaggctttccctgcacacagcacttcttcgttgtatacatacaattgcagttatttctaacttgcttctctgtggtttatcctcccattc

SEQ ID NO: 255651 - DNA, 122 bp, Homo sapiens
gagcccaggagccacatcgtgcgagggaaccacacgcagtcggccctgctggcaggcctgcgcaagttcgtgctctacgagctccaggtgctggcgttcacccgcatcgggaacggggtccc

SEQ ID NO: 255652 - DNA, 122 bp, Homo sapiens
tatttagtaacaaagaacaaaagagctgaggagtttgggtgaaaactgccaagttggggacgcggagcctggttttctcacctgatttcgagcttgtccacgtcttcctcctcaaagtcaaa

SEQ ID NO: 255653 - DNA, 122 bp, Homo sapiens
cagctgagctctaagtcttgggaggcatccacagcagacagcccctgctttcaggttcctcgtaagaattcctgcttcctttgggcaggcattatactggccccaggacatagccttatata

SEQ ID NO: 255654 - DNA, 122 bp, Homo sapiens
tacagaattttaagtgcccttccaaaaagcaaagacgtgttcctattgccactgccccaacgagtggtccctgtgtgtgctgcttctccggtgctgggaggaagtatcacagcacatcagtt

SEQ ID NO: 255655 - DNA, 122 bp, Homo sapiens
cacgcactgccaccccagacacaggcatcacaacgattctgcagaaaagctggggcttagcggccccatcactcaatcagccgagcattcgaaaccaggtctgccaggcagcaaaggctaaa

SEQ ID NO: 255656 - DNA, 122 bp, Homo sapiens
gtgcagcgatgtttaatggcaattcgtataaaccaagcccatgcacaagtagaaagtgcccgtggagccggcaggaggcccccgccgcgctagagaaccacaagcccggccgtgcagccctc

SEQ ID NO: 255657 - DNA, 122 bp, Homo sapiens
gaaagggggcgggggatggcgatgggagagagaaagagatctacggaccctctggatggccggagcagacactacagtcttcaccagaggcagccccataaaaatgtcatcgtctcgggctc

SEQ ID NO: 255658 - DNA, 122 bp, Homo sapiens
gtaccctcgcggtgttacagcttttaagatggcacgtctagagttactcgtttctctcggcgagcttgtggtcttgctagcttcaggagtgaagctacagacttccgcggtatcacagctca

SEQ ID NO: 255659 - DNA, 122 bp, Homo sapiens
gagtcgagctccttggggaacgggacggcgtgggttcgcggggtcagcccggctgtggaacgccatgcctccgcgcgcttgtgtccccggggctgtgcccagcaagacctgggatcccgcgg

SEQ ID NO: 255660 - DNA, 122 bp, Homo sapiens
gtaggggtcgcacaccatgcggcaggtgcccagcatctcatagtggccttccgggccgcccgagctcaccagcacggggatgagcaccaccagcaccagcagcatcaccacacccgcggcgg

SEQ ID NO: 255661 - DNA, 122 bp, Homo sapiens
gaagggccaccgcgcccgcctcggacctgcgaaccgggcaggattgccccttgcgtcccacgtcctgaccggctgggcagcgactacctggtctaaagaaaccctctcctatgttccgtgct

SEQ ID NO: 255662 - DNA, 122 bp, Homo sapiens
cgaactctttcacgtaacgggaggaatacagacacgtcttagttaagcgtgcgtgggaaccgcggaattaaggcacctagaggccaagggcttgtgtcaagctctgcattttgccccgcagg

SEQ ID NO: 255663 - DNA, 122 bp, Homo sapiens
aggcggcctggccagcggtgccaggtgaggtagccacagcaggactgatacagccactcgcgcacttgccgggagcactcggtctctcccgcggggctgtgccttgggcacttcggcagccc

SEQ ID NO: 255664 - DNA, 122 bp, Homo sapiens
acctatactgtttgtaggtatggtaaattcattttaccaacctgcgagttgaccacttcccggtgccagggctctgacaccttgccaggcacttacggaaagataattgtaaaaatctaata

SEQ ID NO: 255665 - DNA, 122 bp, Homo sapiens
gggagcggcggagggggcgggaggaagggcgagaggaggaagcgggatttaaacgaaaggcggtgacgccacacaaaagatttctataggctccagggaggttacggccgaggcggcggcgg

SEQ ID NO: 255666 - DNA, 122 bp, Homo sapiens
caagatgaaacactggttggagtttgtaagtgaccaactcagaggagggctattctgagtcgacccgataaagaatgttttcttgtagcagtgtgcatgtatatgcttgtgtatgtgagaga

SEQ ID NO: 255667 - DNA, 122 bp, Homo sapiens
ctgccacggcgcctgctcagaaccggccgggaacgccgcgggcgggtctccccggtcctccgcccctccagccctgctctcaggcctccgcccgggccctctaagctgccagccgcgcccgc

SEQ ID NO: 255668 - DNA, 122 bp, Homo sapiens
ttggttgcctcttcactatgtgtgttagtcaggcttctcctgagaaacagagtcagtgtgcgtgtgtgtgtgtgtgtgtgtgtgtgtgtgtgtgtgtgtagagggagagagatctattttaa

SEQ ID NO: 255669 - DNA, 122 bp, Homo sapiens
tgtttccagacctcagctacctctgtttctgtagcacctgccccagctgatccgctaagacgacaaatctcttagacgtttcagctttacaatctccttctcctcccttttactcaaagcta

SEQ ID NO: 255670 - DNA, 122 bp, Homo sapiens
cgccgtggtagttattaggagagctgtcaaagcccagaggtcactcccttttgtagagcccgagagccagcaggtcttaaaggggcagtacagcgctggtagctccttttcgggctggggaa

SEQ ID NO: 255671 - DNA, 122 bp, Homo sapiens
ataacacagttggaagacttacactacgtgacatcaagatttaccatgggccgggcacggcggctcacgcctgtaaccccagcattttggaaggcaaaggcgggaggacaacgtgagctcag

SEQ ID NO: 255672 - DNA, 122 bp, Homo sapiens
gtaaaacaagagaaggcaatctactgcctactggcttgtcaagggtcacttgagatcggacgacaggaaccacaaagaagtgaggccgggaatttgcggatccacagtaaagcaagtttgtc

SEQ ID NO: 255673 - DNA, 122 bp, Homo sapiens
ccagcagccccaagcccgacaccaaggtgacccaggccaccaccgaggccaaggtacccccggcagccgatgggaaatcccccttgaccgagccctggaagaaggaagccccggcagagaag

SEQ ID NO: 255674 - DNA, 122 bp, Homo sapiens
cctgttggctactacaggtcctggccaatgctcagagttgcgtgtggcctatgagcctcacgttgcggcgggcgcgcgtccccgcacatctgcaggacggcgccatcctcctccttaacccg

SEQ ID NO: 255675 - DNA, 122 bp, Homo sapiens
acctggctagtccgctgggaggcagagacaaggtctgtcaccgcaggcctgggggcagggcgtgcccccagactctgccgcctgctgcgaggccagtgctgatgggagcttgtttgctgtca

SEQ ID NO: 255676 - DNA, 122 bp, Homo sapiens
atttgattcttcgtgagtgttcaggatttctgtttcccaggtccaagcttcatcatccaccgatgcccaattcaaccaccgtgatggaatttctcctcatgaggttttctgatgtgtggaca

SEQ ID NO: 255677 - DNA, 122 bp, Homo sapiens
ttcggtagccgcgccatgacccgcaccgcaggctgcgcgcagcagaggtggggcttcacccggggccttagagagtgcggaacctccggcagctaaggcagccaccctgcctgccatagaca

SEQ ID NO: 255678 - DNA, 122 bp, Homo sapiens
gtccagatccttgtcctctggaaattgggatttcgaggctagtcatagacagggagatttcgcaatagggtaatagagactgcaaaataagctgagtcagcagagccacggaatccgcatga

SEQ ID NO: 255679 - DNA, 122 bp, Homo sapiens
gccacctgcctgggagtctccctgcctcactcctctaggcaggggagtgatgcttcaggacgtgacaggctgttctaacatgtgtctacctgagggctagttgaaggatccaggagtatttt

SEQ ID NO: 255680 - DNA, 122 bp, Homo sapiens
cctggcttggtgcgtgagtgtaaatttttaattgcactgtaatttcttcagtccccagcccgccctcgccccccccccgcaagtatcccccactactcccccccacccccgcggccctagct

SEQ ID NO: 255681 - DNA, 122 bp, Homo sapiens
ccgtttctcctatctctgagcctcagaactgtcttcagtttccgtacaagggtaaaaaggcgctctctgccccatcccccccgacctcgggaacaagggtccgcattgaaccaggtgcgaat

SEQ ID NO: 255682 - DNA, 122 bp, Homo sapiens
tgccttaggagacggagataaacggtggccgagtgcgctgggaaggtgggagagcagacccggcttcaggagaaacccacgcccaggccctgattcccctgagtcacactagccgcgggcca

SEQ ID NO: 255683 - DNA, 122 bp, Homo sapiens
aacaaaatcttaatatacaatccacacccaacttacaagccatttaaaagtgttcttaagcggcaaaaactgactttaaatggctctgatgtttctgaaggctctactgtaacacttccatc

SEQ ID NO: 255684 - DNA, 122 bp, Homo sapiens
tccaccgttctgtccaaagggctcaccataggcataggccacgtccaagagcacatctttcgtcagagagaagggcttctgcaccaggtggtaggagatggcccgcagcaagggcacggacc

SEQ ID NO: 255685 - DNA, 122 bp, Homo sapiens
agcatggtggccacgatggaaggtgatggggttcgcagcgccaggggacccagcagagcccgagcccgggcatcccgcatctccagccagcatcgcgggtaggcctggcgctggtgaagtgg

SEQ ID NO: 255686 - DNA, 122 bp, Homo sapiens
tttcctgggcctttaaaaagctccagggccttaggtattatgcacccaaagacttaagggcgtggtttgtgagtcattcattcattcatccatgcagtgtttactgagcaccgacaatgtgc

SEQ ID NO: 255687 - DNA, 122 bp, Homo sapiens
tcaacacaatcgggctcctttctctgtagcccttgtcctttctctgagtccttgtccactcgcacacagatcctatttgacagcttattgtttcgtttagcatcatccatttccaatcttgc

SEQ ID NO: 255688 - DNA, 122 bp, Homo sapiens
atgctggaacttacaacctgtcatcttttgttgtctgcagagcagagaacatagccaagccggcagggacagtctgttgtatgagtctggatctcattgcaatgatgcaatttatttacaca

SEQ ID NO: 255689 - DNA, 122 bp, Homo sapiens
agatgtgtagaagtccaaccttcttgacttccttgctttgctgtgagcatcacagcagtgcgcgaaggagggggcaggcaggggaaaggggtaggcttgtgtgaatggctgctgtgaatttt

SEQ ID NO: 255690 - DNA, 122 bp, Homo sapiens
cttcacatttcatgggttggagatataaatcacactatcccctctgaattcagtcccttgcgcaaaccaaggagctgaaggtgtggggaccaagcccagatcaggggtctccaactcaagct

SEQ ID NO: 255691 - DNA, 122 bp, Homo sapiens
ccccagccacgtgacgcgcgctcccggccgcgcgccgcgcccccgccgccgagcgccaggcgtgcggcttctcaccgctcccagtccctgggctgcgcgcccgggcccctggccaagtgagg

SEQ ID NO: 255692 - DNA, 122 bp, Homo sapiens
attgcctggaggcggaagtgggtgggaggggccagacgtgcgcccctccccggaagtgggcggtacccatagggctccacagtcgttccgccacctcccagtcgggttgcggcggaggccgt

SEQ ID NO: 255693 - DNA, 122 bp, Homo sapiens
ctggccagagcctgaactaggcattcattcattcaacacatgttcatggaacatccactgcgtgccaggcactgcttccagtgtggggtagtttggactgtggggatggacagaagggcaca

SEQ ID NO: 255694 - DNA, 122 bp, Homo sapiens
gaatctgcacagagagcaggacgccaggtgcgctcccgggaagctgtcctagagaggggccggaccgcacacctggcgctggaagcctccatgactggatgtttgcaagaaacagaaagaaa

SEQ ID NO: 255695 - DNA, 122 bp, Homo sapiens
ttggcactatcagctggccaccacggtgacacaacatcctggggttttcatcagcattctcgcagccactgagaaacaccctgtgttcctgtttgcaggccaaggggaaccctgcagccctc

SEQ ID NO: 255696 - DNA, 122 bp, Homo sapiens
tcattttcaccataatggctcagcgtttgttcctctaacaacgtgcagttaacagctgtgcgctggctcttacattcaaagccaaaaagcaagttcttcacattaaagaaatcgttaaagac

SEQ ID NO: 255697 - DNA, 122 bp, Homo sapiens
acttctgaaggtcaggcagagagaagaatgcacaaggaggctcaagtacagctttggtaacgtagcaagaccctgtctctacaaaaaagtaaaaaaaatagctgggctggtagtgtgtacct

SEQ ID NO: 255698 - DNA, 122 bp, Homo sapiens
ggtaatccgcccgcctcggcctcccaaagtgccgggattacaggcgtgagccaccgcgcccggctgcaaagcccatttttctataggtaacctgtgctgcgcggggtggcactagttttcac

SEQ ID NO: 255699 - DNA, 122 bp, Homo sapiens
caattcaggaaaagagcattttacaagatccaatatcctcctatgattaaaagctatcagcgatgtaagtaattaaaagaaatttcctcaaaaaaagacatctacaaaaaactcacagctat

SEQ ID NO: 255700 - DNA, 122 bp, Homo sapiens
tacgtctaaatctgcagccccagtttgctccaggccccaagctccagcagaggatgttcacggcacattcccaaccaaaaaggaaatgaagcgtcctctccctcaactgatgctcaaataga

SEQ ID NO: 255701 - DNA, 122 bp, Homo sapiens
agccaggtaagcacttaaaaatcatcacatgaaaatgattgtcttgggatggaactgttgcgagaaaacgctggcacattctccttggttttttggcacattttggcaagcttctgctccct

SEQ ID NO: 255702 - DNA, 122 bp, Homo sapiens
gcaggaaccagcgctcctttggcccatgggtcctgcagcgctccgagccctggcgtctgtcggttttgcgctgacactggcgttgtgtgtgttgctctcagattctggacagcagcagccaa

SEQ ID NO: 255703 - DNA, 122 bp, Homo sapiens
cacacacataatgaagggggaagatgatgctttgtcagacaaacatggctgcccagcctacgtgagccctgagatcctcaacaccactgggacctactccggaaaggctgcggacgtttgga

SEQ ID NO: 255704 - DNA, 122 bp, Homo sapiens
ctctgtcctccggggcccccgagggcgccagggccgttagggtcccgggcagcgctcccgcgccctgtcccgtgtgagtccctgtgaagacccccgagcttgagggtgcggggtgggccggt

SEQ ID NO: 255705 - DNA, 122 bp, Homo sapiens
ttgggaggccgaggtgggcagatcatgaggtcagtagatcgagaccatcctggccaatatcgtaaacccgcctctactaaaatacaaaaaattagccgggcatggtggtgcccacctgtagt

SEQ ID NO: 255706 - DNA, 122 bp, Homo sapiens
cagctcttccctagcactactttgtgcggggactgggagggtcgtggcctcaggccggggcggtaaccagctcttccctagctgctccagcactttatgtttgtaaattcatggagtccttg

SEQ ID NO: 255707 - DNA, 122 bp, Homo sapiens
gccctagggcgtctccttcctagagggccacgcatcactgggtggggcctggccctgggacgacctatcccaggagggccttttggcagccgggcaggggctggaaagcggcgggagggcgc

SEQ ID NO: 255708 - DNA, 122 bp, Homo sapiens
atttgcagggcgagcgggggctgacgaaggggcggcggggccgtcccgagccgggaggggcgctctggtcttggcccctggggtccctcgatccccgctgcagggaagccgcccgaagcaga

SEQ ID NO: 255709 - DNA, 122 bp, Homo sapiens
tgcttgcacacgcaagggcctagaactgcaaagcagcggcctctctggaccgcctccctccggccctcctgagccctactgagccctgctgagtcctggaggccctgtgacccggtgtcctt

SEQ ID NO: 255710 - DNA, 122 bp, Homo sapiens
ggaggaacaaaggagactggaagcccgggaaaagatggcgccggtggttggggggcggggcggtctaaaaactaaacaaagaagggcgcagggcacttgatttttcacgtggccctcttggt

SEQ ID NO: 255711 - DNA, 122 bp, Homo sapiens
ccgacttgttggaccccggtcctgctagattccttgtctgaatgggaaatgtcgccctcgcggtttcactcagatcctcactccagactatgtccagccagaaccctgcccagggccaaggg

SEQ ID NO: 255712 - DNA, 122 bp, Homo sapiens
ctgcctgttgagtatgggtgtatccacggctccgtccccaacaccccagcctgcctggatcgtccactgggcgtccgcacgttcttgtctcagatgcctccaattcagcttggctcggcttc

SEQ ID NO: 255713 - DNA, 122 bp, Homo sapiens
caccgccccagcaacgtccgcgggggacgcagacctcggccaggaaagtgtcagagccgccggccacctgcctgggcccccgctcctgggccctgtccattccccttggcagcttgagccat

SEQ ID NO: 255714 - DNA, 122 bp, Homo sapiens
actccgcagacgaataatattttcagggaaggcagcgcagtctgtgccgtcacaatcgggcgactgtgggtgatgagggatgatgattttccaggaggccctggggtcagaggactcctaga

SEQ ID NO: 255715 - DNA, 122 bp, Homo sapiens
agctgagccctgcccacgttgggcacctgtcggcaggacctcctgaggccatgttacaggcgtgtgtccttaaccttggcaaaataaattttctaaattgactgagacctgtctcaggtatt

SEQ ID NO: 255716 - DNA, 122 bp, Homo sapiens
tgacaggatatggggacgaaatgctaaaagaaggggaagaacaaacacttccgttatattcgttaagggactagagaattttgaagccagacaaacttgggttgaagcctcaattctgccac

SEQ ID NO: 255717 - DNA, 122 bp, Homo sapiens
ctctctggggctgggggccggcgctgtgcacatgctcgtgaggggcatgggtggggctggcgctgtgcaagcgcttgtcaggggcatgggcggggggtgccggcgctgtgcgagcgctcgtg

SEQ ID NO: 255718 - DNA, 122 bp, Homo sapiens
gaaagttactagacgccaacggagatgcgaagaggcggggatcgtaggggaaggaagaaccggaggaagcaaggagacaagtcaaggaactcccccaaagacaaattctctttgccccgcct

SEQ ID NO: 255719 - DNA, 122 bp, Homo sapiens
cgccggagagtgggggatgcagggacagggggtgcggaagcggccgggacgcggggtccccgccccgagacctaccctccgggccatgggctgaggccggcggcagctcctgggtccctcca

SEQ ID NO: 255720 - DNA, 122 bp, Homo sapiens
ggccaggagtcttggtgcaggcggactcgggcgcgtgccatgggaccacaactcccggcacgcaccgcggactgcgccgaacacggttggctgggagatccaaccctactgctcccaccggc

SEQ ID NO: 255721 - DNA, 122 bp, Homo sapiens
gagcgcgacttgctcctcttgccctcctggacgtccgggatttccgcccctgggctccagcgctatggtgtggtcgtcctgacgcactcttagaagctcggccacccctctgcgcccctcct

SEQ ID NO: 255722 - DNA, 122 bp, Homo sapiens
cgtaggcagatcggccaaagacctgggagctctgggagtagccactggttatgcttcccacgctggtgaaactgagtcgggtctcctcgccttccaagagtttcctggggatgcagatgcaa

SEQ ID NO: 255723 - DNA, 122 bp, Homo sapiens
ctggggaagcgcagggctgcgggcacaggattctcccatcagacaccgggagagcatctccgcggcagcttgcagggcccgctgtctccactagggggcggcgtacgcgcgtctctcgaagc

SEQ ID NO: 255724 - DNA, 122 bp, Homo sapiens
cgcacatgtgtgttgtgtttacatgtgaatgtgtgactgcctgcgtgcatgtgtggtcatcggcacacatgtggcacacatgtatgcatgtgacatgtgcacacttgcatgctatgcatagt

SEQ ID NO: 255725 - DNA, 122 bp, Homo sapiens
gaggattatgaaggcttaataatttggactggattaaccgagaacactcagcagacaccacggaactttttcatgcctcttcagatggcagcttaccagaagtatgatgagtgatttcatgg

SEQ ID NO: 255726 - DNA, 122 bp, Homo sapiens
cgaacttctgacctcaagtgatcctcccgcctcggcctcccaaagtgctgggattagaggcgtgtgccaccgcgcccggctattatttgatttttattagttatctcaaactcttacttggt

SEQ ID NO: 255727 - DNA, 122 bp, Homo sapiens
cagggtgggagaggagccgggtgggtctgggtggggagtggtagctaccctaggtccgcccgggcccagccgggccccccacgtggccgctgtggcctggctgcgccgggcctggccaggcg

SEQ ID NO: 255728 - DNA, 122 bp, Homo sapiens
ctatagagacccagaaatgcctgtggaaagctacagaggacttgggcaaggcgttagagccggacgttgtggtccctgggggagccaaccggggaggtgcctatgatctttctttccaagtt

SEQ ID NO: 255729 - DNA, 122 bp, Homo sapiens
cacctcctacctcaccggtgcctggcctctcccaccccattaggagtcctccatcagttccgctttgggtaaagcaagctctgttgtgacagtttggaaacggttcaccttcctggcctagg

SEQ ID NO: 255730 - DNA, 122 bp, Homo sapiens
tctctcccctctgatttctgatctctttgcctccctccttcaccattgccaccatttccacgaaatctcttatatttaaaacatgggcggtacggcctctggcacactccttccttccagga

SEQ ID NO: 255731 - DNA, 122 bp, Homo sapiens
agccaggacatcggaggtacccagacattgttatgaaactccgcatgtgcccctggtggacgctgctggacccagcatgcacacttctcggctaagagtcaccctggatgaaccaccattgc

SEQ ID NO: 255732 - DNA, 122 bp, Homo sapiens
ctcaaggacactcgcgatgcggcggcggcggcggcggcggcggctccgggcggggacccgcgccacgcctcctggcggccaagctgagcaccacgcacccggcgccccccgccccacgctgc

SEQ ID NO: 255733 - DNA, 122 bp, Homo sapiens
ctgcctctgcaggttggtgtaatcagctggggagtagtggatgtctgcaaaaaccagaagcggcaaaagcaggtacctgctcacgcccgagactttcacatcaacctctttcaagtgctgcc

SEQ ID NO: 255734 - DNA, 122 bp, Homo sapiens
agccaatagcatatgggatagcgcaaataaactctgcgtctctgttgcttctttgggtctcggagacctcaaccctttcttcagattgcaaaccttcttgccttcaagcctcggctccaaca

SEQ ID NO: 255735 - DNA, 122 bp, Homo sapiens
gaaggggatgtagaggtctttaggacccagcaggcggcggcaggcggcagttgtgtagatcgctgagagactacgagggtccggttcagttttaattctgtctctaatctctgcaacagccg

SEQ ID NO: 255736 - DNA, 122 bp, Homo sapiens
gccttgcggtcgaagcgggcggccagctgctccagcttctcctggcggatgagctcggtgcgcagggccagctcacgctcgtgctccgccttctccagccgctcccaagcctatggggtggg

SEQ ID NO: 255737 - DNA, 122 bp, Homo sapiens
cttgatgttccctcttaactaaaagcaggttatgcatttttgacaggaaaactacttaagcgatcttgtgtcctttataatacttcacattaggagttgcatgatgtcagcttgtcccttta

SEQ ID NO: 255738 - DNA, 122 bp, Homo sapiens
tggccaggccagtgagtggctggcatccacggcagcatctgctgtggtccatggtcatgccgcccctccagggacactggcaccctcgtcaggacacggagcccaggacagcagctgcatgt

SEQ ID NO: 255739 - DNA, 122 bp, Homo sapiens
ccgccagtgagctgtccaggttgacagcagccaagtcgcggatgcctggaagggatgcgccgggtcggcaactccagagggggcatggggacggcctgtatgcggcagggctgacacccagg

SEQ ID NO: 255740 - DNA, 122 bp, Homo sapiens
ggccaagttcttgtcacgaatttagtttgtttcagagcggcaggactcgtagctagagaacgaggacccacgacgcgtacgcgttacagtcctgtttccctagaaacggagctgccggcgcg

SEQ ID NO: 255741 - DNA, 122 bp, Homo sapiens
tggcacaagaaatggcacagcgcctgtgctgcacgtttgcaagtgacctgctcttctgaccgcagaagcgccactgaaggtggtcggctcgagtcaccaggcaacctggtatgattctcagt

SEQ ID NO: 255742 - DNA, 122 bp, Homo sapiens
tttttaatagatgtttcccccctctgttttgtaaagatagtaagggctggtttatgaaaccgatacggagactagggacctaatgttgtcccatagcacatttggcccacttttggcattgc

SEQ ID NO: 255743 - DNA, 122 bp, Homo sapiens
cgagtctcccacagagcaagtcaggcacaccatactctacctggaacagctgctaaactccgctcccacagccaaagataggaggggccaacaggaggaggttcagaggatagtcaataacc

SEQ ID NO: 255744 - DNA, 122 bp, Homo sapiens
aggcccacggtccattgtagggatggaccacattctgtttatccgtcgcgcactgatggacgctggggttgcttctacctttggctgctgtgggtcctgctgctagaaatgtgcatgtacaa

SEQ ID NO: 255745 - DNA, 122 bp, Homo sapiens
tgattaagcctctgggccctacagcctggagaacctggagaatcctacacccacagaacccggctttgtccccaaagaataaaaacacctctctaaaagctgctcttccacctttctttggg

SEQ ID NO: 255746 - DNA, 122 bp, Homo sapiens
gggaggctgctgaagtctcaattcccctcgccctaggcctgcccaagggaagtcaggagccgcgccacgcccccttacatcaccgatagacgtaatccgggtcggccgcaaacgtgccgcag

SEQ ID NO: 255747 - DNA, 122 bp, Homo sapiens
cccgcccccctcaaccccgccccctttcttctttccgcccccctcctcccgctggcaggccgcaagcagtaggtagcccctcagccattcccagccagttgccactaggagaggcggtgctg

SEQ ID NO: 255748 - DNA, 122 bp, Homo sapiens
aatttaccagacattgacagaactttagctcaagcctcactaagaagacgtagcagtgcacgctctgggattattttatacttcactaggatgacttatttatagaacagaatctttttgct

SEQ ID NO: 255749 - DNA, 122 bp, Homo sapiens
ggcgggcggagagaggctgggctgcctggccgggcttgttgggatgagtcggactgggcacgattgcattgtggggagggaggctggggctctgtgagacgtgctcctggcaccgccagctg

SEQ ID NO: 255750 - DNA, 122 bp, Homo sapiens
tcctctcccctccttagagaactgcccactttctccgatctgccacagtgtatatatcttcggaaggcatctaccacacttatttacatgtctgtctctctgctagactgaaaactccttca

SEQ ID NO: 255751 - DNA, 122 bp, Homo sapiens
cttcatggcctgtgcatgtagtgtacagcagagagacatcaagttaagatgataaattgtcgttaggaattttaagcaacatgaggtttctgaaaagtgttcacgctgctttaaagggcttc

SEQ ID NO: 255752 - DNA, 122 bp, Homo sapiens
cagagtggacagcggccgccagaactccgcagccacgggcgcgcggcgcggaggggcgtgcgcccggagaagctcccgcagccctgcccaagcagcgcagaggccgcaagcaactagtgtct

SEQ ID NO: 255753 - DNA, 122 bp, Homo sapiens
tatgaatttgaatgctgtgtgtgtcgcgggggccctgagaaagtccggagactacagcttcgctggtgagctggattgggcatgacctcagtgtaactccacaccacagtatttcactctat

SEQ ID NO: 255754 - DNA, 122 bp, Homo sapiens
ctgagcaagacagaaaagtcatttccggtgtcgcgctttcttggaagctataaagagccacgttaggtgttggcagagcggccggtatagtcctcatacccgctctctcatgcttccggaca

SEQ ID NO: 255755 - DNA, 122 bp, Homo sapiens
aagacagtctgcacccattccacaagcatttgctaagcacctgctatgtgccacacatagcgttgtgcctggagacacaaaggcaaataaaatattggccctcagacagctcagtcagggtg

SEQ ID NO: 255756 - DNA, 122 bp, Homo sapiens
gccacctcccactcacgcacaaagactagctgcattgttggaggcctgccacctcccactcgtgcacaaagactaggagcatgtaggcatgctggcccggtttagtggtattttaaagattg

SEQ ID NO: 255757 - DNA, 122 bp, Homo sapiens
ctatcctgctacagacctcaccactgaggtgtaacttggccaagtcacgggtgaaaggtacgtgagggagcccatatgtgcttgattctgccacatgggtgacggcccaggtgtctgcacac

SEQ ID NO: 255758 - DNA, 122 bp, Homo sapiens
gactctggagccaagcagcctgggttcaactgccttttctaccacttagtagctgtgtgacgttgagcgggtcacttgactgtcgtgtgcattgttttccccatctgtaaaatcttagtgtc

SEQ ID NO: 255759 - DNA, 122 bp, Homo sapiens
agaggaggtgtccctgacccgacgagctcgagggagcggcctggctgggaggcggggggccgcggggcccggggagcgggcgccgccgagggccctggaagcggcggggctgggggagaggg

SEQ ID NO: 255760 - DNA, 122 bp, Homo sapiens
caagaatggtaaggcagctgcgtgttgttctcaccttctctctgctgagaggagtcctctcgtccatgctgagaaaccagttattcttctccacgatcctgctcagacaccttcaatggctc

SEQ ID NO: 255761 - DNA, 122 bp, Homo sapiens
taagccctcggaccctgcctggccccagaatcctgcctaccatccctgcccacaccagtccgggcacagccaggacctgccaagaggaaggagagcacaaagcttcagttccaggcagagct

SEQ ID NO: 255762 - DNA, 122 bp, Homo sapiens
tgtgatttaattcaccgcttgaatctatatttctaaccacagtgacttcagtaaaaataccgtataatgaacatttcagcttcttcttacttactcgagagtttattgcaaatcttaaggat

SEQ ID NO: 255763 - DNA, 122 bp, Homo sapiens
aatgtttcctattaagcagctcttgctcaagctaagaaagaaattagatctctacaccaacgacatgatttccccagacaaaatcagctgatggtctgaatacatttgaaagcatttccaaa

SEQ ID NO: 255764 - DNA, 122 bp, Homo sapiens
gtctgcactcagcccctgtgctgaaacccatgcgcagtgatggttggaaactgctagaagcgaggtctgcactcagcccctgtgctgaaacccacgcgcagtgatggttggaaactgctaga

SEQ ID NO: 255765 - DNA, 122 bp, Homo sapiens
ctcagcctccgagtcacaccagtgtagggaggcgtgataaccaccctcatcaaggacacgcggagctcagcctcgagtcacaccagtgtagggaagcgtgatagctgccttggacatctgtc

SEQ ID NO: 255766 - DNA, 122 bp, Homo sapiens
agattaatccggttcagtggactctgtggttcctcaactccaagtgcccccagcataagtcggacctgcctctcacgcaatggatcccctggcggcaacccgagaccggttctcctacccgc

SEQ ID NO: 255767 - DNA, 122 bp, Homo sapiens
ccggggccccgccccgcagctggagaaggggtgaatgcctttcctacctaacgcctggtccgcggccctgcttgttgcgtctccaagaccacgtgtctgctgcattttaaaaatagttgtga

SEQ ID NO: 255768 - DNA, 122 bp, Homo sapiens
caattgaggcgaggcctttgggagtactttgtgggacggaccctggcgggccctgccagacgcacagggatggcggcggaggcggccgatttggggctgggggccgccgtccccgtggagct

SEQ ID NO: 255769 - DNA, 122 bp, Homo sapiens
cggccctgccaggtaggtggatccagccatccctttccctttggcgggagaggctgggctcgagggacgcccgcggccacagcgctgcgctgcgaagtggcagagcagagatttgattcccg

SEQ ID NO: 255770 - DNA, 122 bp, Homo sapiens
ggagctctggcgggttggccccatctcccttcccgtctttccttggagtcctgatagagccgcccctactttgctccaaagggatattaagaaaggtcaggccggacgccaggggctcttgc

SEQ ID NO: 255771 - DNA, 122 bp, Homo sapiens
aaagacatttcatctacatagttcgctgagcaattttgccaaaaggaaccccatattatacggcttggtcacatcacccctttgattatcggaaagcctgatcactagaaaagcaaactttc

SEQ ID NO: 255772 - DNA, 122 bp, Homo sapiens
gctccacgcatctcaaactcttaacttctacacctttccaaggggaactgagacatgaaccgttttccgggctcactcatttcaacatagaactcccaaatctcatcccacaacaaagagac

SEQ ID NO: 255773 - DNA, 122 bp, Homo sapiens
aagtggtagattgtgcagaatcatagaggccaagtcaaaaattttggttttaatcctaagcggattgggcagctttcaagcgttaacagtaggggaggcacttaaacatacatgaattttta

SEQ ID NO: 255774 - DNA, 122 bp, Homo sapiens
cacttgacaatacagaaggtttctttctccaaagattatcaatatcataccattgcctctcggtggttatacacacacacacagacacacacacacatacacacacacacacacacacacac

SEQ ID NO: 255775 - DNA, 122 bp, Homo sapiens
gagccgtgcactgcggtcccacaggttgaccccgcgttgccagcctcagggccaaggtcacgtttccagacatggccctaagaaaaaggccagcccaggggaagggacatggtcagggcaca

SEQ ID NO: 255776 - DNA, 122 bp, Homo sapiens
gggttcatttggttaaacggaggtgcgcacatgggtgccctgagccttcgcgcggcgccgcgggtccagtatcggccccaggctctgagcagagaacactcaaagccacccttctcccgcct

SEQ ID NO: 255777 - DNA, 122 bp, Homo sapiens
cttgaacaagttatttaatagaccacatttagttttcacatctgtttttcaacttggatacgatattatctacttcatagggttgctttaaggattgaattaagtatgacattataaaacac

SEQ ID NO: 255778 - DNA, 122 bp, Homo sapiens
ggaaggaagcggtttcagttcgaggggagcgggccccggtgaggaccaagagggtgagtgcggctcattgccgccacacagtgctcatcccagctggagaaccaggggttcagacgcctccg

SEQ ID NO: 255779 - DNA, 122 bp, Homo sapiens
aggcaggcggattgcctgagctcaggagttcgagaccagcctgggcaacatggtgaaacccggtctctactaagatacaaaaaattagcccagcatggtagcatgcgcctgtagtcccagct

SEQ ID NO: 255780 - DNA, 122 bp, Homo sapiens
tgcactcacagtgtatctggcagggaaattatttttcagcagcaagtacctgtaaaaagccgcctcctttggaattcagttctgcactaagcactcaggatcctatgttgcttccatggaaa

SEQ ID NO: 255781 - DNA, 122 bp, Homo sapiens
gagacccacgccggggcccgctggccctccgctccgccccgcccgcctctggggcttctgcgccgcaccggtttctgctcctgcgccgccgccgcagccacagccacagccaacccggaagc

SEQ ID NO: 255782 - DNA, 122 bp, Homo sapiens
aaagagaacttgtgagccttaagagctgcccggcgccgtcttaccaggcctcgcccggcccggccctggccctcagttccctgccagggttgggacttaagggagatcttatgacctaggaa

SEQ ID NO: 255783 - DNA, 122 bp, Homo sapiens
ttagagatccgagacttctttaagatgtaagcattttttggtctctgaggacggagctcccgattcttcttgttacgaggaggccctggagaggctccggctgtggtcggaacggtctcttc

SEQ ID NO: 255784 - DNA, 122 bp, Homo sapiens
ccgtcgcgccgcagggaagcctgtgacctcggctgtcggtgccaggatggttcctgcaggcgtgtccggggtgagccctcactctggctgcagagcccgttcgatccaggccctgcgccgcg

SEQ ID NO: 255785 - DNA, 122 bp, Homo sapiens
gcgtctgtccccagggcccgttcgggcgggttaggttagaacgcgggaagcgttcgcgaacgtgacccgagaacttcaccaacctggatttatctaaaagaccacggggcccttgagaacct

SEQ ID NO: 255786 - DNA, 122 bp, Homo sapiens
atgggaggcttggtgtacctcattcccaagatgagggaacaggctctgagaggaccacatcgccagcaagtgacaggctgggaccaaggccaggcctgtctgcctcctagactaggcctgag

SEQ ID NO: 255787 - DNA, 122 bp, Homo sapiens
tgctgaatctccagagccacagaattgcagatttggcagcagggatctgcacacaggattcgccgcacacttctctccagaggaagccagccctggctaggaagggaaacacggcaaaatta

SEQ ID NO: 255788 - DNA, 122 bp, Homo sapiens
gctcatttgtcgatggctgcctttatgctacaaggggcagaacttagttgtgacagagatcgtctggcctacaacgcctaaaatattagctatctgccgctttgcagaaaaatgttgccaac

SEQ ID NO: 255789 - DNA, 122 bp, Homo sapiens
gcctctccactccagcctggacaacagagcaagaccctgtctcttaaaacaaacaaacaacgacaacaacaaaaaccctttggttgtaagcaatggaaacccacaggctggctgaagcattc

SEQ ID NO: 255790 - DNA, 122 bp, Homo sapiens
cagtcatcaatgagcaggtgtgaggttctgaggccttcagacacactgcggtctatgacgcgggtaaccggtggggctcaatgaggcctccagaacccatggaccgccctgggagatgcaca

SEQ ID NO: 255791 - DNA, 122 bp, Homo sapiens
cccggaggagcgagcaacaggcggcgcaggagctggagccggagaacctagtgtgcttagcggtcgcccgctgggttcctcgcgcgcctggccgcccctcccctagcaacggcccggccccg

SEQ ID NO: 255792 - DNA, 122 bp, Homo sapiens
ctgcagcagctgagcagcactttgctggcttggtgtgagcctgggagggctcagacttaacggccggcagggatcccggactgggcctgaaggggagagcgtggtggtcgtcgcggagccgc

SEQ ID NO: 255793 - DNA, 122 bp, Homo sapiens
agtcaggtgacctaggccaggtttcggggaaaggattcgaacttccgacgtccaggaaagcggacagtttaggagacctgggtgggggtcaatggcagtccccaacccagttccctgcccgg

SEQ ID NO: 255794 - DNA, 122 bp, Homo sapiens
acggacgggtccggtgggagtgcgcgaaggacaggctggcagcccagtgcggggtggaggcggccctgaggaccgcacctgcccggacagggtggcccctggcactccagcgcgcaggcccg

SEQ ID NO: 255795 - DNA, 122 bp, Homo sapiens
gctaacgccgccatcaaggcagaggcatggccaggacggccgtgcagccggcgccagaggcggccgaggagaacgcggcgtgagctctcggagtagaggcggccgtagagctgcgcgatctg

SEQ ID NO: 255796 - DNA, 122 bp, Homo sapiens
tgggacctgaccaggcaccaccaggacctatcgttgggtgctgaaggccagggcctgggtcgggagcaaggcagctgggcagctttgaggctctgagccctggcttcaagctgctgggccct

SEQ ID NO: 255797 - DNA, 122 bp, Homo sapiens
gtaaggaacggggttcttttccttccagtttttctggctgctctagtctcagatttaggtcgtggtgtgacagtaggcaggacaggacaagggccaaacgaatgaggcactgccttggatgc

SEQ ID NO: 255798 - DNA, 122 bp, Homo sapiens
cagtagagggcaatctcggtattgccatcgcggagagcgcgacaccaggctgtgtgggtccggactgagagtgcgccggtgctgccggccagcacctgggtacccggccagcacctgggtac

SEQ ID NO: 255799 - DNA, 122 bp, Homo sapiens
tctccaaaacccatctctaacctcttgggtacataccacccttcctcagattttccagtacgtcagttgaccttacacaagtggaatcttgctgcaagatagttaaggatggggacaggaaa

SEQ ID NO: 255800 - DNA, 122 bp, Homo sapiens
gaaaaagacaggaaaattagattctcccctagagcttccaggaggaaatgcagtgtggcccgcccctcgattttagcttaatgcagcccattttgacctccagaactgtaagataataagtt

SEQ ID NO: 255801 - DNA, 122 bp, Homo sapiens
acccgagtgccaggctctactcctgccatcttccttgtcaccaccatcgccccgggcccccgagctcccggtgcagttccaacaaagcctgtggggtccagctggagctccacctctgctcc

SEQ ID NO: 255802 - DNA, 122 bp, Homo sapiens
cagagccaccggtgaccccggcagagtcaggacatgctcaccgtgagggtgcacacccagcgagggcatcactcacagagccatcggtgaccccggcagagtcaggacatgctcacaatgag

SEQ ID NO: 255803 - DNA, 122 bp, Homo sapiens
tcggaactcggacacggtgagtggggcccggccccttggggagccctggctgggtccagccgccaaacccttctccccgttgtacccctcgccccgcgagcccctaccctcgtttcctgggc

SEQ ID NO: 255804 - DNA, 122 bp, Homo sapiens
gagcctgccagatgccttgtgcgcatctatctccagggccggggaggctgggcgaactcccggggaggagactgggtcagggacacctgcggaactcggcgtggccccgacccgccggcctc

SEQ ID NO: 255805 - DNA, 122 bp, Homo sapiens
ctgctccagggcctcagggcccggcctggcagccggggagggccggaggcccaaggagggcgcgccttggccccacaccaacccccagggcctccccgcagtccctgcctagcccctctgcc

SEQ ID NO: 255806 - DNA, 122 bp, Homo sapiens
agcaccgtggtcaggtacatgcccaggaacagggcgaagaacacggcctgctgctctggccggatggggaggcccaggaggaggaactcggacacgctgctctggttctcagggctcatgtt

SEQ ID NO: 255807 - DNA, 122 bp, Homo sapiens
ttactcacagctgttcgtggcacatgcagacggtcggagaagaggcctccgttccttcctcgcctcctaaccaccggtgccctgacagatccgcctccagctcatgaaagggtcaggtgttg

SEQ ID NO: 255808 - DNA, 122 bp, Homo sapiens
ccacttactaggtacatgatttgggtaagttgcttaatttttttccactaagccttggttcgctcatttgtaaaatggaaatacgaattcctcatagggcctgggaaataagataatgtatt

SEQ ID NO: 255809 - DNA, 122 bp, Homo sapiens
cttccccggggtagaagtccagggtgagaaattggttccgaactcaaaggaacccagtgccgggccacagccgggtcacgtggccggcggccccccatgacgtgctggctgcggggcgtcac

SEQ ID NO: 255810 - DNA, 122 bp, Homo sapiens
ggagtctccagactcatccagaaacagccactgcgcggagccgggagcgcgtgtcgaaagcgcacccctagacagctactgtgggaaagctctgggccggacacaattccacatgcttgata

SEQ ID NO: 255811 - DNA, 122 bp, Homo sapiens
cacaaacaccctcttgatggtcccgatggaaaaatggagcatgactgaggcagacacaaccgtcaggctggcatggggggccgtgagacagggtagaggtggggaagcacatctgtaaagaa

SEQ ID NO: 255812 - DNA, 122 bp, Homo sapiens
ccatattgtcgtacggaacacaggcttcctgtggccggaggtgacagtaggcccgccccgcgaacacctccagtgcggcccacatagtcagcggtctcttccaggtcggagtttgtctcccc

SEQ ID NO: 255813 - DNA, 122 bp, Homo sapiens
gcgctggttcagctctcggcactcgtcgatatctgaaggtgagggcgacaggtgcggcttcgctgagcctccaggcggctcctcaccaccggccccgcccctgcccccacccccgaagcccg

SEQ ID NO: 255814 - DNA, 122 bp, Homo sapiens
cctcatttaccccgtaaaagtgcagcccttcgcagaaacatcttgcggtcgctcgggtcccggtgtcctggcccagaaataccctctagagggcgctgtcacgctgagacccgggacaggac

SEQ ID NO: 255815 - DNA, 122 bp, Homo sapiens
ctcaccggcagagaaacgcgacggcggagcggcggaagaacagagtgcgagagctggcagcggcgactgagaccgaccgcggcctcccccgccgttatttaagcggaagcggcgcgcccgcg

SEQ ID NO: 255816 - DNA, 122 bp, Homo sapiens
gggagaggcatcgtggatgctacagcagtggccgcagggtatcggcaggcagcctcgagacggggcacccaacccccaagcctggagccagcacctcctcctgggcaggcccctcccaaacc

SEQ ID NO: 255817 - DNA, 122 bp, Homo sapiens
agcggctagaggttccattgcagacccggaggccgtggctgtggttcgcggcggtgctgtcgcgggcgccctggcgcagcccacgcaggggctcctgagggtccgcgaggccgggaggtccg

SEQ ID NO: 255818 - DNA, 122 bp, Homo sapiens
tatggtttccacaggaagtgactggcaaggaagggcaaacaggtttggtattgatgagttcgagtaatttcagcacgctatgggatctaggggctgtccctagttgtctggtatctgggtct

SEQ ID NO: 255819 - DNA, 122 bp, Homo sapiens
cagctgcggggagcacagggcaggtggctgggtgaggatgccgccctgcagcatgtacaccgagtgtctgcagctggggacacaactgcccgggactctaacttccaggaattaaagactca

SEQ ID NO: 255820 - DNA, 122 bp, Homo sapiens
tccgcctccaaaggctcttgggtagtgacccggccgactgcaggggggcgaacgtctcctcgccccaccttgaccgcctaaagggcggcgtggccgtctgtaacacgtacttgcccacctct

SEQ ID NO: 255821 - DNA, 122 bp, Homo sapiens
gagaatggtgatcacaggaaggaaaagggcggaaaaactcaacaggctctggaagctttccgccagagaggatcttggagattatgtatgtgctaaacctgagcatgtgtcatattccaagc

SEQ ID NO: 255822 - DNA, 122 bp, Homo sapiens
gaggaagaaacgtgccaaaagggttggccttgactattaattatcgttgggagaaagccccggtgttagcgctgaggtctgggtgtctaccttactctggggggaggagttccctctcctac

SEQ ID NO: 255823 - DNA, 122 bp, Homo sapiens
gcggaccccaagacgcctaggagcgccgcctgctgcggacgcaaaacctgcgccccccagcggacgctctgggttcttgctcataaaataaatcaaactcgtgcctgcgcctccttgtggtg

SEQ ID NO: 255824 - DNA, 122 bp, Homo sapiens
ttttttttttgagacagagtctcactgtgttgcccaggctggagtgcagtggtgtgatctcggctaactgcaagctccgcctcccaggttcacgccagtctcctgcctcagcctcctgagta

SEQ ID NO: 255825 - DNA, 122 bp, Homo sapiens
gttttattgtttgcccgcagaggtgtgaatgaagtaatgggccttctccagcactccatccgtctcaggctgacagccgcgctccgagcccaggctgctctgtgtaaacgctgtcaccctgc

SEQ ID NO: 255826 - DNA, 122 bp, Homo sapiens
taatttgaatagataacagatgtgcaagaaagtcacatttgttatgtatgtaggagtaaacgttcggtggatcctctgtctttgtaactgaggttagagctagtgtggttttgaggtctcac

SEQ ID NO: 255827 - DNA, 122 bp, Homo sapiens
ggggctcctgcgaggatcacacaggaactcacttgaagtgtccggcgcagtgcactccgacggggagccctgcccggtccccgcggcgaaccagtctcttcctcgggtccccctctccccaa

SEQ ID NO: 255828 - DNA, 122 bp, Homo sapiens
caccgagaaggcccacagggggcagcactaggaatgactctttccctctagtcctctatgcgctaggggagagagttcttggagatgttgatgcttttcaccaggctttagaagcccctgat

SEQ ID NO: 255829 - DNA, 122 bp, Homo sapiens
gggccataaagcccaccttaacacatttcaaagtataaaaaccatgctatacctgctctccgaaaacactggaacctattatacaaaccagtaatagaatgatagctgggcaatctcaaaat

SEQ ID NO: 255830 - DNA, 122 bp, Homo sapiens
cctaaagaacagcatacgtttagggacataggattaagcagaggatggtgtctccgtctacgagacagctgtgtctctgcttccatgaatttccatttgagtttcaaaaggctgccactcag

SEQ ID NO: 255831 - DNA, 122 bp, Homo sapiens
taaaaaaaattttaataaaataaatagcctaccctattactatacacatcaagcataaaacgggcaacaaaactcaaaaagaactttagattggaacttgaaagtattatttattctaaggc

SEQ ID NO: 255832 - DNA, 122 bp, Homo sapiens
tgatccgatcgacgtagtgaaagcctcactttgctgtctggacaagtactgccaggggcccgcggggaccgggatcgctgtgcagaggccccactggccctcaggagaggtgagggtgcctg

SEQ ID NO: 255833 - DNA, 122 bp, Homo sapiens
cagggtcaggagtcaggaagaagcctaatcatggagccggcatctgaggagggtcttgaacgctgggcaggcttttgcccaatagagatggaggaagctagtcctgtctgatggaggaaaca

SEQ ID NO: 255834 - DNA, 122 bp, Homo sapiens
tggttccgatcaaaacgctcttctgctaacatgggccgctttgatcttcctgaaaaggttcgtccagattgtatcgtttcctgcaaagcccctgtcagctgtaaatgttgtgttgaaggtgg

SEQ ID NO: 255835 - DNA, 122 bp, Homo sapiens
ctcggctctgcctcctgggcgtctgcagcccacgtgcatgcctggcacacccagcgtggacgcaccctaagtggccctggggcagagcggaccacaaaacgcacagccttcagctccggcag

SEQ ID NO: 255836 - DNA, 122 bp, Homo sapiens
aggaagttgtaaaaatagagtcacccagcttcccccagcggtgacaccttacgtaactggcgtacagtatcaaaaccaggaagtcggcttgcacctgggtgtaattttgttaactagactaa

SEQ ID NO: 255837 - DNA, 122 bp, Homo sapiens
cttgatttttagtgtcagaagctgttgaatgcaaaggtctgtggccggggcctggccaggcggtgggtgcgggggttcgggctggaaccaagttggtcctgaaaggctgttgcagaagcctg

SEQ ID NO: 255838 - DNA, 122 bp, Homo sapiens
acagaacaccgcctatcgcttggggctgttgtgaggcctcggtgagataaccgtgccatgcgctgctgaaactggcacttaacgctcagtatgattcttgcgggcgctgggcaccgcggact

SEQ ID NO: 255839 - DNA, 122 bp, Homo sapiens
gacagaacatcaggtcaaagccctggactgaggtattccaccttctcattttgcctcatgcgtctgcctacaaatctgctcgattcaatactcagctgttcttgcatgcactttggaatccc

SEQ ID NO: 255840 - DNA, 122 bp, Homo sapiens
ctggagtgccgagtggctgtggcagccacgattggggtttggaaaccatcctgaaaggcccggggagccagtctcctggaacttctccctccccattcccacaaaaaccaagcgccctctcg

SEQ ID NO: 255841 - DNA, 122 bp, Homo sapiens
ctcttccttttttttagctcctgtgaatagtcaccgtaactatggtagagatggaactttcgaggcttatataagtagcagcgtgcctttgtgtttcggctggtccgagtgcagtggtgttt

SEQ ID NO: 255842 - DNA, 122 bp, Homo sapiens
gctccggtcccctcgccctgtgaaagatcagcaaacaggtggccttgcctggagagagaccgagttaagccaccgattaggaaccaactcttaagctttcaaggcaagagaataatgtgact

SEQ ID NO: 255843 - DNA, 122 bp, Homo sapiens
cagtgatcttctgaaggagtggcaacagaagccgggactaacctggcagtgccacttacacgcggcgccttttccccatccagtcccctgtgtccagttccccagcgtcccctgcagggccc

SEQ ID NO: 255844 - DNA, 122 bp, Homo sapiens
tcaacatactacatgatttgcttacaatacttgtctgtcttgccttcaccagaatgtaagcgctctacaaaggcagagggaaggctatcttgctctctgatgtatcctccagcccttagaac

SEQ ID NO: 255845 - DNA, 122 bp, Homo sapiens
acgtgcaccccctcatttcacaccctcaccaccaaagttttccaggaacctaaaggtcaacggtggagaagaaaaggggagtcgtttcccgcgcgctgcccgctacccctcaaccgcactct

SEQ ID NO: 255846 - DNA, 122 bp, Homo sapiens
tgaaaatatttagcagaaaattccagaaataattcataagttttaaatttagtgctgttccgaatagtgtgatgaaatcataccctggacttggatcatccctttgtccagcatatctatgc

SEQ ID NO: 255847 - DNA, 122 bp, Homo sapiens
accggcccaggtctcggtcagggccagggccgccgagagcagcaggaggacggttcggggcgccatgaccagcatctcggcgtctgaggagactctgagtccgggtgggtgcgtggggactt

SEQ ID NO: 255848 - DNA, 122 bp, Homo sapiens
ctcttcccgccgcccacaatcctcgggcgggcgcgcagccgagccggctcggctggctggcgcaatctcgcgcgctccttgcattgatcaaaaatgggggttgaaacagtaaacgcgaggag

SEQ ID NO: 255849 - DNA, 122 bp, Homo sapiens
ccggcaggacgccggagaccccatctcccagtcccccctgccccagctctctccctcctgcggaggaggcagaaacggaccggcatctaccgcagcccagagtcccaggagtggccgccgaa

SEQ ID NO: 255850 - DNA, 122 bp, Homo sapiens
tgagcggcaggtctgatatgaaagctactcgcacttcccgtctgggcaagagcaggaactcggcaggcagagagctggtggagctttccatgggaaaaccagaaccttcaaagagcccggcc

SEQ ID NO: 255851 - DNA, 122 bp, Homo sapiens
tggtacccgtttggcaacgagcacatttttgggcatagccaaccagggttttcacatgggcgttcaggggcggatgggccaacgtcatggtgggcaacgcaggggtaagtcgatccagtaca

SEQ ID NO: 255852 - DNA, 122 bp, Homo sapiens
cgaaatcctcgaggagctgacttcagggccacacggtcaacaaaaccccgcaggacctggcgggaagttgcacctcctcaatgctgccagaagcagtacaatcctttcttcccccacccccg

SEQ ID NO: 255853 - DNA, 122 bp, Homo sapiens
gaagcagaaggtgtgattgtaggccactgggctcctcccatccacacccatggcctcatccgtgagtacattgtaagtaccttccatgagttggctgtatgtgtgttgggggtgctaggaga

SEQ ID NO: 255854 - DNA, 122 bp, Homo sapiens
cgtgaatgaggcgtccaagtgggaaacccatccagttctacttttttgaactttgcctgtcgtggccaggataattaggtagagatcagaagaacagagtgagacatggaaatcccaattta

SEQ ID NO: 255855 - DNA, 122 bp, Homo sapiens
ataagttggccaagtcaatgtaagttgggatcaggttgggatatgactgtacccagaccccgtaataaccatgctgcacagatctgttataaaacatataacatttgttccctcttcttcct

SEQ ID NO: 255856 - DNA, 122 bp, Homo sapiens
cttgctggttaagtcacacgacgagcggaccggagggtccgagggctccgtcctttgttacgcaggggacacccctggaaggccagcccaacgcccacgggcacatctgggcttttccaggc

SEQ ID NO: 255857 - DNA, 122 bp, Homo sapiens
ccccgcccctcctcctcccactccgcagacccccatttttggactgaatcctggagaccccgtggggctgggttatttgaaacccattgttcaaatggaatctgggctaggcagagacctag

SEQ ID NO: 255858 - DNA, 122 bp, Homo sapiens
cgggaggaccacggacgcagtcacgtgaccaaacgtccacgtgaccggtacggcagcgcacgccaacccggaaaccggaatctgctgggttcgggttctacctagtctggccctagtgtccg

SEQ ID NO: 255859 - DNA, 122 bp, Homo sapiens
tagaaagaatatggttacaaaaaacatttccatgagggctgtgattgagttccgtgttcccgtaaaacacttagagaagcctaactgaagatttctagaaccgactgacaactgatttcagt

SEQ ID NO: 255860 - DNA, 122 bp, Homo sapiens
gcggctgtgttcagtagggcagcattcatagaaagaagccagcagcgaccgacgggccctcgggctgcaggttgcggacccctacttgagagccaggccagtccaaattcccagttgccctt

SEQ ID NO: 255861 - DNA, 122 bp, Homo sapiens
ttcaagcaattctcctgcctcagcctctcgagtggctggaattacaggcacccaccaccacgcctggctaattattatattgttagagagatgaggtttcaccatgctggccaggctagtct

SEQ ID NO: 255862 - DNA, 122 bp, Homo sapiens
cttatcttcttgaaagagagttttctgcttcctggtaacccagcacagtctaacattgttcgcattactttactggaatgctcctttgtgacacagtgacacttgtgccaaatcactggagt

SEQ ID NO: 255863 - DNA, 122 bp, Homo sapiens
cacgcaaaatactccttcagcggagcgaagaggtggcggatgactggcacgctccatgaccggcccagcagtctctgcctcgccaagcggctcatgttggagacgtcagtatagtggactgg

SEQ ID NO: 255864 - DNA, 122 bp, Homo sapiens
gggcctcggctgcaaagttagggtcgctcagatccttactttgttctgacatgtctgcgccgtctggcaagggcagggcctctgcgtccaggagctcttcgagcctgcgctccctccgcgga

SEQ ID NO: 255865 - DNA, 122 bp, Homo sapiens
agcagagtggtgaatttctctgtttttcgaagcgttaggggggctcggccctcctttttgcgggggcaaggatgtgaaagtgggagaagtacctgctgctgtgggcaaggtgtctggaagca

SEQ ID NO: 255866 - DNA, 122 bp, Homo sapiens
tcttcacgttcagcttgtcgtacactagcacattgcgggtggccaggtccttgtgaaccacgtggtggctggataggtactccatccccgccgcgatctgtgccacaaggtgcacgaagtcg

SEQ ID NO: 255867 - DNA, 122 bp, Homo sapiens
cgccgatctccttgtttacatccccagcccggtttcccgctgcccaggcggggaccgcggcgcagctgaccgcggaggaccgcacacacccactgaacacacaaaacccggcgctcccggcg

SEQ ID NO: 255868 - DNA, 122 bp, Homo sapiens
cgcacggaaaaccaggagctccaagactgccgcacactcaacatccaactcgcggggccgcggggacggccacagaagccaatcggctcctgctacatcacagaccccgccctcaaaccttg

SEQ ID NO: 255869 - DNA, 122 bp, Homo sapiens
attttgagtctttttggaaaacccccagttgtttagagataaatgagaataaatactacacgagattgctccagttgatagtacttagcaaaaacaaaatgatacgcagtgttggtaaatca

SEQ ID NO: 255870 - DNA, 122 bp, Homo sapiens
ccctgctctagagagaaacttccatctaattaagaccctcctggaatcttcgctgacccacgcccgggctgggtaggacccttccttgagctgcactgagcacctcactgttggcactgtac

SEQ ID NO: 255871 - DNA, 122 bp, Homo sapiens
ttgacagaataaatgaatgattgacaacacactgtgctttgggtcacggaaggtggagagcgagactgaaatggtaggtaaaaagataccagttccagcctcatcatactttctctcctcta

SEQ ID NO: 255872 - DNA, 122 bp, Homo sapiens
aggaacgccccgctgtcttctgggaatggtagttccttggactgaaaccgtatttgtctgcgccggcgaggaaactaagggactcgtctagtcggcccgcattgttcttctcctttaaggga

SEQ ID NO: 255873 - DNA, 122 bp, Homo sapiens
ccttcctcacctacttcggactcttccaggttcactgaggggccctggtctccccgcagtcgtcccaggctgccggctcccctcgacagctctctgggcacccggtcccctctgccccaccc

SEQ ID NO: 255874 - DNA, 122 bp, Homo sapiens
acatccactgttccccagtagcggggctgtccgggtgaatgtacatcctctttggcatttcggggtcggccttaccagccaccatccaccgagaattgtgaaatttataacgacagtcatca

SEQ ID NO: 255875 - DNA, 122 bp, Homo sapiens
tggggggtcccttcccctcactatccctctgtgccatcccctccagctccacgccttccccgcccccactgccatggagcagggcagtgatgggatgcaaaccagtttgttttaaacacttt

SEQ ID NO: 255876 - DNA, 122 bp, Homo sapiens
ggggtccggtccccagccaggccctcggcgtctggaaggagggtcggggtcgtccccctccgggagcccacacacccttggtcctggtgcgccctggccaggcctgcaggcccggcccctgc

SEQ ID NO: 255877 - DNA, 122 bp, Homo sapiens
caccacacatcaaagccagaggccctgggaggctggccagccgccaaagacgcctgagagcggcaggggagtgtgttgccttaggacaatagcaaactgggacgtggtagagtctgtaaatt

SEQ ID NO: 255878 - DNA, 122 bp, Homo sapiens
gggcgggaagtcgggggagcccggaggaggcggcgaagcgaggggcgcgcagctggaacccgcgtacccgcttcctggagccgagccctctttcccagcccttctctcccctcctcccgcgc

SEQ ID NO: 255879 - DNA, 122 bp, Homo sapiens
gtagatcacaggctgagggacagagcaaagacccctgaggccggacacctggggtcctgccgggcccctccccacgagagttccctgtgtctgtgccaatcgttttcgtctttctttgccgc

SEQ ID NO: 255880 - DNA, 122 bp, Homo sapiens
tcccagcccctctgctgccggacagcgcactccagggcaggacgccgcccccgtggctcccggtctcctgtgggcctgctgtgtgccaaacctgagctacctgcacccgagccctggggctc

SEQ ID NO: 255881 - DNA, 122 bp, Homo sapiens
gggagcagtgggacgtttccgggggtcgggtgggtagcggcgagcgctgtgcggtcagggcggggctcctgtgccctgtcggtggcgcagggagctggacgcggcccgttaccgccacactt

SEQ ID NO: 255882 - DNA, 122 bp, Homo sapiens
ggcacgtgtcttcttaggccgcaggtccaggggcttgtacttcttgccctgggagacagacggcagggtgaatccaaggacccagggctgaggagctactgcagcagctaagggggctgggg

SEQ ID NO: 255883 - DNA, 122 bp, Homo sapiens
ttcatactactccaggcagcgtgtgggggcggaagagttcagtggccccggctggcatcacggcaacactggggagggcgcagatcagacacgcagcaagtacgtgctgagaacctgccagg

SEQ ID NO: 255884 - DNA, 122 bp, Homo sapiens
atgccttcctctacccagatatctgacaccaacttctctgtttttctcctgccaattttgcggcacctctaccttattttcctgaagtagatggagagctccttcatctttctctgccccca

SEQ ID NO: 255885 - DNA, 122 bp, Homo sapiens
gataactgtcagactcatagggtggaaaaacatgcatcataactcattatctttgggtgccgtctgctcaccatggcagcagaccagtgggtatttccctctggcatacatctcttcagacc

SEQ ID NO: 255886 - DNA, 122 bp, Homo sapiens
gtcaccctcggcgcccggagatgacgtcacgagaccccacgtggtccgaactccgccctccgtgttctgcctaacccagcaaggaggcccgagtcgctcttgagcatgcgccaacggggcag

SEQ ID NO: 255887 - DNA, 122 bp, Homo sapiens
gccccgacggccgggggttgggcgagccagtgacaggaggggccgggctggtacttcaggcgcccaggccggcggggcgcgctccggcggctcctgtcagcggcgggtgcggcggatcccag

SEQ ID NO: 255888 - DNA, 122 bp, Homo sapiens
ttcattctgtatttggacagccagttttcccaatacaatttatcaaggacactgtcttttcgccatcatgtgttcttggcccctctgttgaaattcaatctatcatagacaaatgggtttat

SEQ ID NO: 255889 - DNA, 122 bp, Homo sapiens
cagagaggtaaggcaaagcgaggagcctgagaggaacttttcctgggcttgcaaggtgtgcgcgaagagggaaaaggtggctgtacggcgccccgcggctgcagtggccgggattgagcccg

SEQ ID NO: 255890 - DNA, 122 bp, Homo sapiens
gtgtcccactgtcatgtaaatatcccttccaggcagggcggctccagtgcagatttaagccgctggcacctggggcagtctcagtgttcagcctgcttccggacgggcgaggagactcgtgg

SEQ ID NO: 255891 - DNA, 122 bp, Homo sapiens
acgtcaccctttatccccgaacccaggggcccctccacgctgcgctcacctgccctgtttcgtaatgatcatctcagtttggtggcggtggaatttgagccacagaggccggttgcacaggt

SEQ ID NO: 255892 - DNA, 122 bp, Homo sapiens
ccttttagattcgatttatcttagccaaattgaccagggaaaataggtgcctacaaatagcgatcactggcaaacaaggagagttattatcttaaattaaggctggtttctaacaacaaaaa

SEQ ID NO: 255893 - DNA, 122 bp, Homo sapiens
agttggtgctgtctgccccaggcttccctgagcagctggtgagctggcaacatctactttcgctggagcaccaaagtcacgaaagccgctctgccgggcccaaaggttcaggcaccccccag

SEQ ID NO: 255894 - DNA, 122 bp, Homo sapiens
gcgcatgcgctctgccctggcagcggccctgtgcagatccctgagcgtgtggcagcagtgcggtcgtggtccctccctatgcagcctggtttctagcgtgacacgcccttgacttgaggacc

SEQ ID NO: 255895 - DNA, 122 bp, Homo sapiens
ccctgcgcgcgaaataagtcccagggccaatgtggcctccccacccagtgcttccgggggcgccaaaaaacgacctgcccagaccctcagcgtcgacgctgcgcacaagcgcagtcaactgc

SEQ ID NO: 255896 - DNA, 122 bp, Homo sapiens
agtctgtccctctttcccccgtggctcttgggacaaccatcgcaggggtgggaggcacgccgcgggagacggggactgacagccagcccctcttcctccctggttcttaggacccccatcgc

SEQ ID NO: 255897 - DNA, 122 bp, Homo sapiens
gttgcgccagggggacaggtatgttccaggcagtggcaagcccaacccgagcaagacctgcgctgaaacggattggctgccctccgcccggagtccgttctccctgcagcggccagtgcaga

SEQ ID NO: 255898 - DNA, 122 bp, Homo sapiens
cctcagacccccacatgcaggttgacaacagttggtgccctttaccaccaccacacgttccgcaaatctcataaccagcaaacgccatgggtgagagcaacctagcggacggaaatcaacgg

SEQ ID NO: 255899 - DNA, 122 bp, Homo sapiens
acttggcgacgcctccccaagtccggctgcagccttttcaccgggatgggcccggctcggcgttccccggaggctgcgggcccgcccccctgacgtagctgcccatacatggtgtaacttcc

SEQ ID NO: 255900 - DNA, 122 bp, Homo sapiens
ctcgggggtcccggggcccgagcccgcggcaccctgggagtggtagtccacgcgggccgccggcctagccaagaacaatgggaggagcctggggctaggaccacacctcccggagacccggc

SEQ ID NO: 255901 - DNA, 122 bp, Homo sapiens
gaatacaggcttcaggggcatcacacatggatggctccagcctgcacaagcccacatcagcgatctctgggaagtgagagaatctgatttccaccaaagttgccccattacaatgcctagca

SEQ ID NO: 255902 - DNA, 122 bp, Homo sapiens
ggctgcagctgcagcgcccgtgggctgacgtggcttccgggagctgcggccggccacgcccgagggccccacaggctgcgctgcccttgccagctgctcctgactggcacccagagagcagg

SEQ ID NO: 255903 - DNA, 122 bp, Homo sapiens
tttgtcttaaaaaacacctcagaaattctttaccttacagctagtggtgagtcaaaaaggcgagaaattgtaattatgttcagataggcccccaagtttgagaatacattctaaatatgcag

SEQ ID NO: 255904 - DNA, 122 bp, Homo sapiens
gggcggcccctccacctctgtccgcctgccctaaataccgcagaggtgactgctcccccgcgaagcccacccacctgaggtcctggcccccaaggggccatctgcccccggctcaccgcagg

SEQ ID NO: 255905 - DNA, 122 bp, Homo sapiens
atggttcctagattgtctgttaatactatacttacctctataagaaactgtcaagtttaccgggccgcgagggtgcaggctgcgcagatggtgtggtcctgcgccccgagggccgcagcagc

SEQ ID NO: 255906 - DNA, 122 bp, Homo sapiens
cctttgaaacgccggcagctgcgcgcgctgcggcaggcgcggagaggagccacctcgtcacgtggggaggaaatgccttgccggcctccaaacctactggctcttgtttctggggttttatg

SEQ ID NO: 255907 - DNA, 122 bp, Homo sapiens
aagtaggatgcaccacgtccagtcgacgaaaacaggacgagcctcaacattcctgattcccgaatgaccatggttccactcgatgttcaatgaacacgttctgtcctcatgaggcccatgct

SEQ ID NO: 255908 - DNA, 122 bp, Homo sapiens
cgtgccgcccaccccgccccgctcctcgccaggctgctccacccgccccgccgctcgtcacgcttcctcgtccgccccgcccctcgctaggctgcaccgcccgccccgcttccgccccatcc

SEQ ID NO: 255909 - DNA, 122 bp, Homo sapiens
gccagagaggctttctcttcccagtcacagcctttgtggtccccagagaagtcttaggcccggcaccgcctcctcctcctcaaagttaatccctaaatttcacaatgtgttgttctgtgggc

SEQ ID NO: 255910 - DNA, 122 bp, Homo sapiens
tcgagaccagcctggccaacatagtgaaatgccatctctactaaaaatacaaaaattagccgagcatggtggcacacacctgtaatcctggatactcaggaggctgaagcaagagaatcact

SEQ ID NO: 255911 - DNA, 122 bp, Homo sapiens
aaatttctgataataagcaaatggatgaactcacagtagttcagctgtggtagatgctctcgttgctggttagtacttgtagcatccatcagccacggacccgccggttcctactgttggat

SEQ ID NO: 255912 - DNA, 122 bp, Homo sapiens
ttaggtttttgatccattttgagttcattcttgtgtatgatgtgtggtaggttctgacttcgttcttttgcacgtggattttgttcaagcatcatttgtgacaagactgctttttccctatt

SEQ ID NO: 255913 - DNA, 122 bp, Homo sapiens
cgcgcgtatgtgtgcatgtgtgcgtgtgtgtgcgtgcgcgcccgcgcgcccgtgtgtgtgcgtgtagggggttagggactcctgataggaaaattcctaacagagctttgtccagctgacac

SEQ ID NO: 255914 - DNA, 122 bp, Homo sapiens
agtcctcctggctgccgactgcgggggtaaggcagaggtctgctcgcgtgcgggtgtggccggccacgtgtccaggaacttcaggggctgcacgctaataagagtaggacagtgggaccttg

SEQ ID NO: 255915 - DNA, 122 bp, Homo sapiens
ccttgccttgccggcatagctgccttctgtgagggtaagttatgtgacgctttccaagagcgcagaggcatatgggaatacaccccggacagaggccatggaagtgtcaacttcgtgtgtca

SEQ ID NO: 255916 - DNA, 122 bp, Homo sapiens
tgcgctcctcaaattctgagacgcgtggctggagagcgggcggccctggccccggagagccgtgttcccgcgggatctcgtcgcgggcgtgaggcggggccggcctgggccggtcatccctg

SEQ ID NO: 255917 - DNA, 122 bp, Homo sapiens
gatgtaatacagttgccagattcaaagttagcaagctcctcccccgtcccgccaaggggacgccacccagagccctgtgccacccccagccccgcccccgctgcaagggggatggggtcctg

SEQ ID NO: 255918 - DNA, 122 bp, Homo sapiens
aactttggagccaggcacatctgcgttcagttcccagccccttcacatcctaacacttagcgttccgagctgccgtatctctctctgaaatctgtgagtgaaaatactcatctagccaggct

SEQ ID NO: 255919 - DNA, 122 bp, Homo sapiens
gctcagcgatggtttcatactgcgcccgcatatcattgaggagcctggtgaggtccactccgggggcagcgtccatttctacgctgacctcgcctgggccgcccacccggaagctttggagc

SEQ ID NO: 255920 - DNA, 122 bp, Homo sapiens
gggatttccggcttccagaacctgcaccaacaggcgttaggggctgcctggggcttcgctcgctgctgtgctgtggtagccggaggggcccagcatcggaagttccagtaggtggggctcca

SEQ ID NO: 255921 - DNA, 122 bp, Homo sapiens
tccttgacactgtgtgggaacacggtggatttttgtgcgattgaccttgctgacctcactcggttctaggaggggttttgtagagttcttgcaattttgtacctgggcaatgatgttatatg

SEQ ID NO: 255922 - DNA, 122 bp, Homo sapiens
aacaaaaatcaataaacagcaaaatcataaacacaaagcacaaaaatgtgaaaaacatgtcgttaaatagactgtgaacagggcatttatttacagtatgagaactggaaccagaagacagt

SEQ ID NO: 255923 - DNA, 122 bp, Homo sapiens
ggtatcagatggcaaagttgggaccttcataaaggcgtggtggcgattctccgcaatcgccggcagcctatgacatcagacaggaacgcctgggatgccgcgctgctcctggccaacctccg

SEQ ID NO: 255924 - DNA, 122 bp, Homo sapiens
cgctggcgactctgcagaggcgccccaagccttcactgtccccggggcgcgccgagcggacgctggcgaggggccagctcacccccgtaagggtctcctgtgtgctttgtaaaccagcactt

SEQ ID NO: 255925 - DNA, 122 bp, Homo sapiens
caagaccagcttgggcaacacagtgagactttgtctctacacaaaaattttaaagaatagcgggggttggccgggcgcggtagttcatgcctgtaatcccagcactttgggaggccgaggtg

SEQ ID NO: 255926 - DNA, 122 bp, Homo sapiens
ctctcaagcccggcagcagagccgggggtctcatcacgagagcagagccttgggctcccgcggtacccgtcacagaccggaaaggatgtgctggcaggaagccggatatttctgcttccaag

SEQ ID NO: 255927 - DNA, 122 bp, Homo sapiens
cgtcgcctcccagatgtggcagcgtcgcagggagtgggaaaccggcctgtcccagacagccgggaaggaaagcggggtgcgagttctggctccagtcaacacacactgaccagggccttctg

SEQ ID NO: 255928 - DNA, 122 bp, Homo sapiens
cagctggctgcaggctggctgttggcataggcctgatccgggaaggaggcccgggccctgcgggtctgggcacatactgaggcatagagctccggctcggggcccgaggcctgggactttgg

SEQ ID NO: 255929 - DNA, 122 bp, Homo sapiens
aaggtgggttggaggtggggccctacctattctctctgctccttcccttctaggtaaacccgtaggggaagaagccagagggggaaaaaaaacccagaaccagcaattaagaggttaaaacg

SEQ ID NO: 255930 - DNA, 122 bp, Homo sapiens
tattgtgaggattaattgatgccacatatgtgaaagtccttagcaaatgcatgactcatacgtagtaaggcactcaaataaaagttttcatcagactgtaagcttcttgaggatgagttctg

SEQ ID NO: 255931 - DNA, 122 bp, Homo sapiens
gagcagggcacggccaccacactggggagctggggctgcagggcgggagctgtgctcagacggtgagggagatgaagctgttgtaacgctgaatgttcctcttgaggatctcagagcagggc

SEQ ID NO: 255932 - DNA, 122 bp, Homo sapiens
tgacgaggaggaggggtgcagacacttgcctgcggcaaagtgaacctggaaggagcggggcgtgtgtaggacagagcccaggagaacgggcagccgggtggccgggccaggaagcagggcct

SEQ ID NO: 255933 - DNA, 122 bp, Homo sapiens
ggagtaggagcatgttgcatgcacagggtggtaatcgcatttcgagtgtagatcagatggcggtggggcctcgtggtgcgggacatgaatgagttgtcgcaacacaatagcgtgcagccttc

SEQ ID NO: 255934 - DNA, 122 bp, Homo sapiens
agtcaggaccaatgtcaggaaacacttgtagaacaagggggaagactcactgaatgttcacgttgaaatggaccctggtggtttttaagcgcaaatccagggacactaaactcatgaagcag

SEQ ID NO: 255935 - DNA, 122 bp, Homo sapiens
gcgacaggacactcgcgccaaccgagaccccgcccccaggggcccgcccccccagggctccgccgccaaccctgcgtccccgacgcccgtcaccgtatgtccccgcccacccccggcctctg

SEQ ID NO: 255936 - DNA, 122 bp, Homo sapiens
atagaatctacacttaatttttcagatatgcttcagagccttgttggacagcaaaatgcccgccacggtataataaaaatattcaatgcactgcaagaaacaagagccaacaagcatctgtt

SEQ ID NO: 255937 - DNA, 122 bp, Homo sapiens
tcctgccaacttcccaaggggtgcaggccagactgtgcggccactggcccatacaagggccgggctgttccttactcaaagtgcaaccactgggcctcttccacgtggtaggagacgcagaa

SEQ ID NO: 255938 - DNA, 122 bp, Homo sapiens
tcttagtgatatttttttgaaaacttgaatatttcccagaaacggtcatgtttgctttcacgtggcttccatgtgtaggttgacagccgttctgtgtgtgatgtaagatcagactcaaggtt

SEQ ID NO: 255939 - DNA, 122 bp, Homo sapiens
ataccccaacaagccaacaggggtcaggtagaacaggccagtggaggtccctgccaaaaccgcaaactagcccatttgggaccaaagaatcacataagaaacacatgccatcatgtgtaata

SEQ ID NO: 255940 - DNA, 122 bp, Homo sapiens
ggaacctggtaaagagtgtgtgcagcctgccaccaaatcctgctcgttctcggcatgcaccgatgggatttcctggccgtttgtgctgctcataatgcccctggtgatctgggtctatagca

SEQ ID NO: 255941 - DNA, 122 bp, Homo sapiens
acccccgcctcagcctctcaaagtgctgagattacaggcatgagccactgcacctggccgcgaatgtctctatttattcaagccttgcagtaagttagtttcacaggcctcttcacctagta

SEQ ID NO: 255942 - DNA, 122 bp, Homo sapiens
gagctgggaataaggacccctgcccttgaaggtctaatcacgttgctggagacagacagtcgacaaatacagtcagccagtaaactcttcctgcattatgctaacagcataaacatgcaggg

SEQ ID NO: 255943 - DNA, 122 bp, Homo sapiens
cccgaaccataaaattttcccgaacccgaaggggccttggaaaccacgtgtctctgatttcgcccacgcgaagcggccggcccgccgaccccgagatttccagggagaggatggcaaagtgg

SEQ ID NO: 255944 - DNA, 122 bp, Homo sapiens
ccctggagctgggaggatggctggggggacggggtgggctaacacccagctgagtggagccgtcttgcagggctgtgcttgtctgtgcctgggctgaggagggcgccgacgccctgggccct

SEQ ID NO: 255945 - DNA, 122 bp, Homo sapiens
cgaagaacatgcactgattgtagaagcaatgacagccacagcttcgagtctgacggctggcgggcccccggaggggcgcacctccctacaccagccttcgtgcccctggggctagcgctgga

SEQ ID NO: 255946 - DNA, 122 bp, Homo sapiens
ttggagaaacttgttcagtgccgaatggctagggggcgccaaagctccaggcgtccagcccggcctcagggaccacgggacacacgtaaagactaagtcacatttcaactttcaaaggctat

SEQ ID NO: 255947 - DNA, 122 bp, Homo sapiens
gcgcgcgcgcagcatgggctgtggaccttcccaacctgctgaagaccggagacgtgtacgcgcgcccaagaagggctggaaagaggaattcaaggtaataaacaaacaaacaaacaaacaaa

SEQ ID NO: 255948 - DNA, 122 bp, Homo sapiens
acgggggcgggtcccgagggcacggccgttccctgcgcgccccgattggtcttcgtgtgccggccccgcccccgccgtgagtcccacacttaaaagcgccgcctccgcgccgcccgcgtagc

SEQ ID NO: 255949 - DNA, 122 bp, Homo sapiens
agcccccagaagctagaagacgcagggaaggattcctggaaatcacttctaatccaaacacgctggcacaatgacacaccagggaaaaataattttgcatatagttacttatatgtaattcg

SEQ ID NO: 255950 - DNA, 122 bp, Homo sapiens
aaggggaatggagaagggggtacagtaagttttagatagtcgaaggcacgcgcacgacaacgcctgcgcaccacggaacagggcaaaagggtgacaaacatgcgccactgagttttatcgag

SEQ ID NO: 255951 - DNA, 122 bp, Homo sapiens
gggcggcgtggagaccgcctggctcctgggcctgcctgaagcacaggggatgtgaggctccgggaggagacgggctgcaggctgatcctagggctggcgttgaagggctggagggaagggaa

SEQ ID NO: 255952 - DNA, 122 bp, Homo sapiens
aaactcagaaatatgcctgttcactgagtgaaggtgatttgggggctgcagccctgtccccgctaaagcagcacatgggagaggtgggagctgggcctattcaggagcccctctggaggtgg

SEQ ID NO: 255953 - DNA, 122 bp, Homo sapiens
gtaatatacaactaataatccttcctctgtctgcttcataggcttgtcttgggtatccagcgtatatgaaagtatttgaaaaatgtagggcatgtacaaatatctgccagcagtgtcattaa

SEQ ID NO: 255954 - DNA, 122 bp, Homo sapiens
gagacacgtcctctggtgtcagagcgtggctctgagcactgagaccgactcagttgctagcgtccacctggcctgcccgagatctgggaatacagtggtgatccaattgatggtgagaggct

SEQ ID NO: 255955 - DNA, 122 bp, Homo sapiens
atgaacttcattactcctcactggctggaattcaaactgcccatctgtagtggtcccgtgcgttgaccatgcacctgagaatccacgcgagacggagccctcctcgccggccggcctggacg

SEQ ID NO: 255956 - DNA, 122 bp, Homo sapiens
ctcaggtgatccgtccacttcggcctcccaaagtgttgggattacaggcgtgagccaccacgcttggccccaaggggcatccttaaatccaggtgcctgttcattctgcctccatcctgctg

SEQ ID NO: 255957 - DNA, 122 bp, Homo sapiens
ctgctggcctgggtgctaagcccctcactgcctggggccgacggcgccggctggcccctccgagtgcgggcccacccagactgcacccaccggcagctcacgctggcccgcgagcagcctcg

SEQ ID NO: 255958 - DNA, 122 bp, Homo sapiens
gaacgctccccaggacaggttgtttagtaataaaacctagacgcagagccgtgttcaagtcgtttatcaattgtacttaaatggaaaaagcacagagacacacaatttgcttttatatgtgc

SEQ ID NO: 255959 - DNA, 122 bp, Homo sapiens
tggggggcgggggcgggggcgagggctattcctggtgcggtgactgacgcaggcaaggcgcggccaccacatctctccgcccccgactcacctgctccctgcctcagtgatctcggcggaga

SEQ ID NO: 255960 - DNA, 122 bp, Homo sapiens
agctctaagaagacctgttcttttgaatggagagtagcatcaggaaccaggatgtgggtgcgaggcgtgctcctggctgttgcagattgctgcacccgggagctcttagtggacagagctag

SEQ ID NO: 255961 - DNA, 122 bp, Homo sapiens
gcgggggcgggcgagcggctgagagctgagactcctccagccagccagacctgggagcggcgagaagccgcccgaggcgccggcggagaggggaggggcggggccccggcgaaggcgggggc

SEQ ID NO: 255962 - DNA, 122 bp, Homo sapiens
cgtatacagattctccaggaataaggcacacaacggaatgccatcccaagggctgcacttcggagacgtcggagccttctccacgcaccttccgagctgggcccacgggttctgttttgtct

SEQ ID NO: 255963 - DNA, 122 bp, Homo sapiens
caaagtgataaatatgtaataggaatgtcttcccgaggctgtgctggagacttccctggccgcacagtgaccgttcagagcccacgataagcaagccgaaacccggtttggcgcagaggcgc

SEQ ID NO: 255964 - DNA, 122 bp, Homo sapiens
caggcagtgaggcctctggcttgacccaagtggtgggaccccaggcagggcctagagaggcggaggaggctccagggaggggctccagcggggtggttatgtggttccctgtactcaaggtt

SEQ ID NO: 255965 - DNA, 122 bp, Homo sapiens
ggtggtgcagaggtggtgctgaagggacagcacttttcactcagcagagagccccgagctcgccgccacactcccgctcaggaccgggagggggccgtttggaagattcccccgcgcgggat

SEQ ID NO: 255966 - DNA, 122 bp, Homo sapiens
aaagcgcagagacagacaggatctgccaggacagcgcgcagggcggggcggggacaggcgcgccaggagcggggcgggcttccagccgctggttttgctgagggctgagggacggctcagcg

SEQ ID NO: 255967 - DNA, 122 bp, Homo sapiens
gggccctgaggccgggcctgagggagctgcaggtgtggggggcgggaccccgagggccgccgaagccggggaggggcctcggtgcgggaggcggggccggggccgtgcctgcgggtgcccgg

SEQ ID NO: 255968 - DNA, 122 bp, Homo sapiens
ggaggtcagggatgcagtgagctgtgatcacaccaccacactccagcctgggtgacagagcgagaccctgtctcaacaaaaaggggtgatgtaaattttaaaattcatgtaaggaaaacatg

SEQ ID NO: 255969 - DNA, 122 bp, Homo sapiens
caccccatcaaaaaacttctattagtaatggagacctcgccggagaccttccgcggagagcgctgccttcccaattcccagtggaaaaattctgcgcgaaaaactaattctacttttaataa

SEQ ID NO: 255970 - DNA, 122 bp, Homo sapiens
ttagggtggtggcgggccacacttgatagtatttaggtgggggctaaccaccagaaagaccgacaatgtgatttagggtaggggcttttggtcacacatctcaacctcctgagggctggagt

SEQ ID NO: 255971 - DNA, 122 bp, Homo sapiens
ctcccgcctgggcgaccagaggacggaacaggggacgccagctcatccccactccgtattcggtcctgcatccatcccagaggcgaacacaccatgggttttaggaaaccatcgttcctcct

SEQ ID NO: 255972 - DNA, 122 bp, Homo sapiens
ggccagggtggggcgtggcccggggcgggggaggggcggggctgccaggcaggggcgggacggagaacacctgggtccctagcaccaagactggctttttattcattgccaccgcctggccg

SEQ ID NO: 255973 - DNA, 122 bp, Homo sapiens
tgcccagcaacagtatcaggattggcaaccactggcagctccaacttcgagggttccctacgactgtcatccttaaggcagtggaacctgtttgggggaatcctgaggttatagaaaccagg

SEQ ID NO: 255974 - DNA, 122 bp, Homo sapiens
aaaagctggcactgggcgcccgtctcactctccacccagctcccaggctgccccacgggacgtaagtagctcgatctaggccgctgacccccagagacttgatgctgcgctgcagactgccg

SEQ ID NO: 255975 - DNA, 122 bp, Homo sapiens
agtcgctgctgttccactgcccacgggggcgtgggagccagtgtgggcatggtcacgacgcggggctcaggtgctcaggtgaagtcctgtgtgtgggctctgaaggctcagccctgccttgt

SEQ ID NO: 255976 - DNA, 122 bp, Homo sapiens
tcctgcaagtgagtcaaccgctatagacttcaagccataacgactgcttgcaggtcattccgcaggtagaatcttaacagctaaaggggtggacgggttcacagctcagcgctcgggacagg

SEQ ID NO: 255977 - DNA, 122 bp, Homo sapiens
tcctgttcccgaccttcagtggcagcttgcccaggagacaaggctgtccaaggccaaggtcggggctgggctgtctgcaggggctggcggggggcactggctgtctcagggtcactcaggtt

SEQ ID NO: 255978 - DNA, 122 bp, Homo sapiens
ggaggaccccagaggttggaagcccctccaagattaggggcgcagtgctcccctggcctgcggaagagtcagaggagtggggacaacatccaacatcagcctctactaccgctagcgcgact

SEQ ID NO: 255979 - DNA, 122 bp, Homo sapiens
gtgcctggacggcagtgccaacctcaccttcctcgcctttcctttgacccttgtctcagtcggtgataccctaagcctcatactggatgaagcagggactccttctggcccagcccagctca

SEQ ID NO: 255980 - DNA, 122 bp, Homo sapiens
taaaagcccatcagacccttggaactccatccaaatggggggcctgaagcctgggcagcacgcacactcccactgcctggccaacaaggacacagaattaatcgtttctcacaaagtcaaag

SEQ ID NO: 255981 - DNA, 122 bp, Homo sapiens
ttaggaatttgtgctaatagaaataaggacacactttatgtatatgataagggccatcaacgtgattgtttttaaaacactaaaaatggaatttaagccaagtaggtgatctacaaaccatt

SEQ ID NO: 255982 - DNA, 122 bp, Homo sapiens
ataactatccatttttatccatcccggtagtgggaagatatagtctatattaggaagtggcgcactgtagaaggaacaagggtgagactgagcctgttctcatcttggtgacgtggtctctt

SEQ ID NO: 255983 - DNA, 122 bp, Homo sapiens
ttaataactcaaaacactcaatgaggtaggttatatttctatttgtcccattttcagatgcgatttgtgaggctcacagaagataaatgacgtaggtcagttcagaaagttggtgagtagac

SEQ ID NO: 255984 - DNA, 122 bp, Homo sapiens
ccttggcgagacccgcgccatccgcagcttggttcctgcgacctcagccgcagggcggtccggctccggtttcccagcaaccaggcgtcatccttcccagcaagcactgcgtccaacccgcg

SEQ ID NO: 255985 - DNA, 122 bp, Homo sapiens
tccagcctgggcaacagagtgagactccatctcaaaagaaaaaaaaaaaaaagcactggccggaaaggctctgtgggcagaaaccccaaccgtgatgtcaccatgacgtgtcccagcacctc

SEQ ID NO: 255986 - DNA, 122 bp, Homo sapiens
ttaccaatcagaatcttgcactgaaaaaataaaccaatcgtgaatctctacggccacttccggaatttagcaaccgatcactaacagggatcgtccacaatccaatcagagtgattctgttc

SEQ ID NO: 255987 - DNA, 122 bp, Homo sapiens
actcctaagagggactacccatgagagtggggttctgaggctcccctatggggacagttccgttcttgaagtgtcagtgttggggaatatctgtggcctatgaggcccatctcaggtttggg

SEQ ID NO: 255988 - DNA, 122 bp, Homo sapiens
ggagattccaggaaggcttccacgaaagggaaacccccggcgcatttcagcccgcagccccgcgcgcacaccgagcgcacatccccggccctgctcttgtcaagtttgtagcctgattcttc

SEQ ID NO: 255989 - DNA, 122 bp, Homo sapiens
gctcttggcccatggtctggtggccaaggaggcatcagctgctggtcacaggtggcgggccgcttcccagaggatctgcagagccatggaggcgcaggggagctgggccagggtgtaggtca

SEQ ID NO: 255990 - DNA, 122 bp, Homo sapiens
catagcttggatgtcccctggatcatcagatacagactgactcctgcacttgttttcccccgtaagcagatcacgtgtcagtgtgtaaaatgtatatcacgctggtcttcatgtaggtgttg

SEQ ID NO: 255991 - DNA, 122 bp, Homo sapiens
gtggggtcgcgcggcggaggcggctcgagcttcgtgctgcgcgctctctcttgggctcctcgctcgatcttactgccccaaaaatggccccgcacaagtttttctaggcggcgcaccggccc

SEQ ID NO: 255992 - DNA, 122 bp, Homo sapiens
ggggcagacaaccattgagtagataaataaacaaagtgatttcagagagagaagtggaagcggtaaaaacaatcattttatgaacagtgacagggtatctctttggatgaggtggtcaagga

SEQ ID NO: 255993 - DNA, 122 bp, Homo sapiens
ctcccgcgccctagcacagtggggcaagtgggcccacagtgaacagcctggctctggtcccgtctgcctcccgaggtctgacacctccccctgggagcagcaggaaaagacaggcaaggctg

SEQ ID NO: 255994 - DNA, 122 bp, Homo sapiens
accaggaccgggtgaaggagcctggcttctcgggaaggcagcgggaatcgccgcaggctgcgggaatggcggagaaacgaggacgccccccaggaaactcactttcttgctcaggtagaaga

SEQ ID NO: 255995 - DNA, 122 bp, Homo sapiens
ggagggaagctggttagacacctggagaccctggggggcggggtcagaagtgagctgcaccgcccgcccaggccgacaacgactcccggcatgcagtgctttgcgccgggcacgctctgcgc

SEQ ID NO: 255996 - DNA, 122 bp, Homo sapiens
aagctcatctcctagtgctgtcctcattctcagaaagttcctgagtcaacagaaaggggacgcccagggtatggaataaggagatgagagcatgctctgccaactggctgggacctgaatgt

SEQ ID NO: 255997 - DNA, 122 bp, Homo sapiens
tattctgctttccaggatcctcagagttggttataaaatatttaagggcgagaaaaggatcgcaggagccaggccctgagatgagcttggagtccctgtttcagcacatcatcttcaccgag

SEQ ID NO: 255998 - DNA, 122 bp, Homo sapiens
cactcccatgtgtctgtccttgtctttgtagcagtgcttgtgggcagttatgcacatgtgcgttctgcatcctctccctgaactccttcttggacgcctgagctgtgtaagtcttggttcct

SEQ ID NO: 255999 - DNA, 122 bp, Homo sapiens
cctcacaggctgagtggagtgttttgcagtctcaaagccttatcgctggcgtgcgcataccgcagggagtgacatcagatcgaaactacagggtttcgccggggaccaaccactcctccaaa

SEQ ID NO: 256000 - DNA, 122 bp, Homo sapiens
gcgcggcgcggcggagcacccggcgggcacgcctcgcacgccagagcaaactttcacgaccgcgggagaggcaccgcgcacaccgttacctttgcagccgcatccttccctggcccttgccc

SEQ ID NO: 256001 - DNA, 122 bp, Homo sapiens
ccccagctcggatcgagctatgcccgatgctgccttaagccttatgaggtcaccacagaacggcaggtgagggcccactcaaactccgtagctttcgccatggagctacaaactggaagaca

SEQ ID NO: 256002 - DNA, 122 bp, Homo sapiens
ataggaggaggttgaggggtcacccgagtgctgggagtgacgctggaggtatcggcccagcgatgctggagtggtcgggtcggaggcccagcagcgtctggggaggggcgtgggggaggcgt

SEQ ID NO: 256003 - DNA, 122 bp, Homo sapiens
ggaaagcgggggggggggggcggctaagaacgcccctgaacgctgattggcccctgtgggcgcggggcgggacagcgaggtgttcgcggggctgggctccaaggcgcaaggcggcctgacac

SEQ ID NO: 256004 - DNA, 122 bp, Homo sapiens
tgtcacgtgaccatgcagctggacagcgcatgaccgtgcagctggataccacgtggacggcgggtgggaggcatgagttccagctttggcacaaaggagctttgcgtcagtttcattaatcc

SEQ ID NO: 256005 - DNA, 122 bp, Homo sapiens
aagccttaactccctcattcatacaacacagtttggatttggggttcttgcggatccttacggaatcctgacattttctaattctattaggagattcagcttcttgacgttgattcctcctg

SEQ ID NO: 256006 - DNA, 122 bp, Homo sapiens
ctctgtagaccgagggcggccccctaaccatgatgtttcgcgaccaggtcggggtgctggcgggctggtttaagggctggaacgagtgcgagcagactgttgcgctgctgtcgctgctcaag

SEQ ID NO: 256007 - DNA, 122 bp, Homo sapiens
tagttgtgagtgaatgtgtggaggagccagcgggcttaggacaggtcccgtggcacagtccgtggctttgagggaaaagggcctcgcggtggtcctccgccttcccccaggtcctgatgcag

SEQ ID NO: 256008 - DNA, 122 bp, Homo sapiens
gcgttctgtgggtgatggaaagatgggggaggaggagggaccacccagggtgccccccgccgaccgttacccgccctttgccccaaggctgtctttgaggtcggtctttctggggctgtggc

SEQ ID NO: 256009 - DNA, 122 bp, Homo sapiens
cagcatggtgcctggtacataacagtagattagatggaagaatgagaaaaactgttatgacgtcagagttattggctcgagttgctacttaagggaccatgtaaaaactcaaaggacttttt

SEQ ID NO: 256010 - DNA, 122 bp, Homo sapiens
ggatataattgtatgaaatcagggcagtgccagaagatcgcagagttctctgttcagtaacgaacaactgacccaccattgtaaaatccatatttactctcttggttcagtggccaggatta

SEQ ID NO: 256011 - DNA, 122 bp, Homo sapiens
cgctgtgggaaaagtggggccacagcgccctgccccagagaacggcgggtgggctgggtccggctgcggggccccgaggccctttctgcggaggtaaaggagagaaacgagggcagccgggg

SEQ ID NO: 256012 - DNA, 122 bp, Homo sapiens
cccggctgaaggcttggcgctgaggagcagacgcccggccgggggaaacggagcaggagccgccgcgatcaccagtccatggcagcggccgccgcgcccgccagcggcgccccacttgctgc

SEQ ID NO: 256013 - DNA, 122 bp, Homo sapiens
cgagaaaatatctgccatcggctgttttcccaaagttattctagccaccaaggcctccgccgtgtcccagcctctgtccccaggcctagtgcctctccatcagcctggatcagggcaaattc

SEQ ID NO: 256014 - DNA, 122 bp, Homo sapiens
gctcttgagggccatgctgtcccgcgccgagggccccacacccgggtgcccgctggctcccgcagagcagaccctgaaggcgcggagccctgcccagggcccttctaggcactgctgagttt

SEQ ID NO: 256015 - DNA, 122 bp, Homo sapiens
taacttaccaagggcagaacttagagcacagactgtatttgcaccatgacattagatactcggttatagtcatcttaactccaattctgcatatgaggaaaagagactcagaaaagctgagt

SEQ ID NO: 256016 - DNA, 122 bp, Homo sapiens
ttctgaaaacacctgctgaaatctgtattatttctagtttccaaaaaaaatcagtcacaacggggccaaggggatgtttgaatgtcagatactgcatgaggcacattagtgtacagtaattt

SEQ ID NO: 256017 - DNA, 122 bp, Homo sapiens
atgggacaatccaaccaatattttaatgctagtagcaatcacgggacaagcagttccactcgaacgttcagaagccaaggaataatggcatgccggcttcgatgccttctgtccttgtttac

SEQ ID NO: 256018 - DNA, 122 bp, Homo sapiens
gtccccgcgcgacagaggcggtgcgcggactacgcctcccggcgtgcatcgcgcggaccccgccccatgtgtcccattggcttctgggaaaccgagtgcggttgccttcccgccggccttca

SEQ ID NO: 256019 - DNA, 122 bp, Homo sapiens
agccacgcagcacttttataatagcatgacggacctgtttgaaaacctcatgagaaggggcgggaaccacagtcagttcccgcccttctgtgcaattctcccttgctcagactggaggagac

SEQ ID NO: 256020 - DNA, 122 bp, Homo sapiens
tcgctctgtcactggtgccattatgtgctcacgcgcccactccctcaggtttagaaggtgcgttgcccggcaacagaagaatctgctggcttagcctttggccgagttggcagctggacgag

SEQ ID NO: 256021 - DNA, 122 bp, Homo sapiens
ttgtcatgttgttgttttttgttgggcaggaaggcgggctcgactttctctttttgccagcgggagctgaagcccgtccttagcgcccgggccgcggtttccatcttgagctggcggtctcc

SEQ ID NO: 256022 - DNA, 122 bp, Homo sapiens
gatgaccttgagcagaagtgtaagtgtatcttcccaaaacacagggtgctccgcgcttggcgaggaggaactctccttgactgtcctggcagcttcgagctgtccaaggcgacaaggagcac

SEQ ID NO: 256023 - DNA, 122 bp, Homo sapiens
ccacgacgcccaggaaatagcgctgctcgggcccgtccaggatgtgtagggcgttgggggcgtcgggcagcagccggcggttttgggctctcgactcttccgggctctgtgccccttgcaca

SEQ ID NO: 256024 - DNA, 122 bp, Homo sapiens
tgttggggagcatgactattgctttaggggtagaagactattcccatttcacagcagggacggagggcctggcagcctttcactatctccacttgccgtgctagtcttgttcagtactggac

SEQ ID NO: 256025 - DNA, 122 bp, Homo sapiens
ttcgctcctttgtggagctctggcagtaactcccctccctctctgtttctctgcaggcagcgcaccgagttcccgcgaggatccatgacctgacggggccccggagccgcgctgcctctcgg

SEQ ID NO: 256026 - DNA, 122 bp, Homo sapiens
gaataggtgctatttttgcaatctttcacattttcagacttcttttatgtaagagacagacgtcttttagtttacaagatattgtaatttagtttagtttttgttctatgcagctgacccta

SEQ ID NO: 256027 - DNA, 122 bp, Homo sapiens
ctcgcgagacttggcgaaggccttcctttttcgtctgggctgccaacatggtaggtgtttcgtttcttgcctcctcttccttgccggcggagacccctaagctgtattcccattgcccctag

SEQ ID NO: 256028 - DNA, 122 bp, Homo sapiens
gggctggccaaggccggagtcggcttcctcagcttgcgggaaagtgtggcgggaaaggcgcgggcggaaaccggggctgcgcggggtgcttgccggccagcgcgagttccggttcggtgtgg

SEQ ID NO: 256029 - DNA, 122 bp, Homo sapiens
ttgcaacctggaaattctgtgatgctgttgcataagctgttcccaccatctggaatatgccgtttcctcgaattccacctccacactcaagtcaaacctttcctcttgcagggtgtctcccc

SEQ ID NO: 256030 - DNA, 122 bp, Homo sapiens
gtgtaaccccatcatcagcggactgtaccagggtgccggtggtcccgggcctgggggcttcggggctcagggtcccaagggagggtctgggtcaggccccaccattgaggaggtagattagg

SEQ ID NO: 256031 - DNA, 122 bp, Homo sapiens
gtatccagtattttacccacttgatcctggtgcatgtacaggaagacatctcagaccacacgctctgatttgagacggtaggccctatagttagcataattatagagtgagcaagataacta

SEQ ID NO: 256032 - DNA, 122 bp, Homo sapiens
gaagtgcaactacagttcccttccaggcttttaatctggagaaacagtcacacgaatacgcggagccacacatacggcatgtttattacagaaccatttgcaaagggaaagaaagaaaaaag

SEQ ID NO: 256033 - DNA, 122 bp, Homo sapiens
tgatacaaggcaagggggcaggtaagaagtgtgagtcgtctccagcgatacgtaaggtcacgtgagtcacgtgtccaccggacagggggcccttccctatttggtagccgaggcggagagag

SEQ ID NO: 256034 - DNA, 122 bp, Homo sapiens
gacaccgtataagacatcgctaattatgacgctgtatacgacatcgctaatgacaccgtacgaggcacgctaacaaggatgctgtacacaacatcgctaatgaggacagtgtacaagccatc

SEQ ID NO: 256035 - DNA, 122 bp, Homo sapiens
gggaaagacacacagagagaggcaggaagactcggtgacacgcactcttgggcaagaccgcgactcagacccccagacaccccgagagacgccgaagacccagacagagccacgcagccacg

SEQ ID NO: 256036 - DNA, 122 bp, Homo sapiens
gcccggcacaaaccgggagccgccccggccccagcgccttcttccccgcccaggcagacgcgacccgccgaggcaaagccttaggaaaaagccccgccctctggcaggctaccctccggacc

SEQ ID NO: 256037 - DNA, 122 bp, Homo sapiens
ccctcacgcagccgaaattagtgggggcagacccgggctgtaaagcatggtttgaggacacgccagattgaggaggagagccaggggtcggggtctccagaagcggggaggagccagcggag

SEQ ID NO: 256038 - DNA, 122 bp, Homo sapiens
tagacgcgggcctccaggaaacacattctcatttcctaggggctgtttccaacctgcatccgctacctcccgcgcagcaagctgccagtgggtgccaaagaggtgctcccaagcccggacac

SEQ ID NO: 256039 - DNA, 122 bp, Homo sapiens
ctggcatgtggctatgcctgaatgcgtttgttcatttgtgtgtttccatgtggtcatgtgcgaatggtatctcagttgctttttgtgtattttacttggctacgtgtggcgaagggcagcgt

SEQ ID NO: 256040 - DNA, 122 bp, Homo sapiens
ccgccgcgggtcatcagtgtcagcgttgaggggtcccggggagcggttgcagggcggcggcggcggccgggtcatcagaagcacagtggagccgccccctgctttgggaggagcaaaagagc

SEQ ID NO: 256041 - DNA, 122 bp, Homo sapiens
attagaaagtctatcagagaacaagtgtgagggataccaactctgagctgaataaggacacgttctcatcagggaagatttgtttttgcctgcgtcttggtaaagttgctttttaccctctc

SEQ ID NO: 256042 - DNA, 122 bp, Homo sapiens
ccgggaccgggcgtggctccggggctgtgggcaccgggcggcggtgggggcggctgcggacgctgcaggtctgtcatgtacccatttggcagattggccataaagttgctgtccgacaggcg

SEQ ID NO: 256043 - DNA, 122 bp, Homo sapiens
ttagagagcattcgagactctcgacaagcctcagtttcctcctctgtaaaagtaggcaaacgcagggacacatctcacagagttgctaggagctgcctgcatgtgaatgtgctggacccaat

SEQ ID NO: 256044 - DNA, 122 bp, Homo sapiens
ctctgtcgcccaggctggagtgcagtggcgcgatctcggctcactgcaagctctgcctcccgggttcacgccattcaggtgatgatgttttttatttatgtgcccacctgccccactccgta

SEQ ID NO: 256045 - DNA, 122 bp, Homo sapiens
tttttgaagagttagtgcaactctaaactgcacaccacgaaacctggaaatctggaaaggcgcacaaaacacgaactgagattccaactttagcaagaacctaaaatgttaaagaaaaattc

SEQ ID NO: 256046 - DNA, 122 bp, Homo sapiens
gggattacaggcatgagccaccgcgccaggccagtttcctgatctttgaaatgaggagtacgctgggtagctacctatgtctgtgggtctgctgtggagcgctcaggctggctggcagtccc

SEQ ID NO: 256047 - DNA, 122 bp, Homo sapiens
ggctcctaaaaaggtggcagcttttctctcccatgtgggtcgggcaggtggcccggcaggcgtggctgcaaaacgcaaatcagtgggttaagcaggtgggcagttatagggggcatcagggt

SEQ ID NO: 256048 - DNA, 122 bp, Homo sapiens
ggcccaggggaccaggttggggccggcccctgagtgtcccctgaggaggtgtgtgagcagcgggggaggctcctcggtcctttgcaagctcgcggctgagcggggccgtgtccgtccactcc

SEQ ID NO: 256049 - DNA, 122 bp, Homo sapiens
aaatgaccacagggccccctgatcaccaaggggcacagatcatggagccatttgagggtgcggatgtagtcagggaaggcttcctggaagagggaggctcttgggtaaaagggacaagaggc

SEQ ID NO: 256050 - DNA, 122 bp, Homo sapiens
tgttcctttacggtacccgtagttgaccgaaaaaggaagatggaacctccatgttgaacacgcctggtcccccaggtagcactttcctattggcacagctgcaggcattcacccgtgcaagc

SEQ ID NO: 256051 - DNA, 122 bp, Homo sapiens
aatcttcgttgctgaaaatatacaagactcatctccagttgtttgtatggactgggtgggcgagggcaggggatgggcacgatgacctgtgcttgtcctttcccctatgtcctttgaacctt

SEQ ID NO: 256052 - DNA, 122 bp, Homo sapiens
atgcagggaggcaggtcccctgccccacctaagagcaactgttttggcagtagttttgcccgggccacttgacttaggcagaggcggagcgggggcacgtgcctggaggctgcacccggctt

SEQ ID NO: 256053 - DNA, 122 bp, Homo sapiens
aggagtgattacccggtattggagatcacctgcccccccgggagcccacagcgcgtggggcgcccccaccctatttgcaaagtcctgtgctcgcgcctggcacctccctctcttctccccta

SEQ ID NO: 256054 - DNA, 122 bp, Homo sapiens
catttattcattctgtcaatcaagcattaagtcttgaatatatcactgtggcatacttaacgtatgtcagggtaatagatgagaacaagagtcaggtcctttgccttcgtagggctcttaga

SEQ ID NO: 256055 - DNA, 122 bp, Homo sapiens
gcatttcatcttttttattgtttttctgtcaattttcaaaacgaataaccatctaatttgcgtcagtgctgattatgtttgtccctcaatagaggtcggcagctgcgctggggaaacaaatc

SEQ ID NO: 256056 - DNA, 122 bp, Homo sapiens
tgccttattcagtaaggttaaatgagtttgtttgctgaaacattcgccacatgatcccaacgctcctccagctccatcccgtctataatcgcagagcgaacactcactcaccttgggcgtgt

SEQ ID NO: 256057 - DNA, 122 bp, Homo sapiens
cattatttgtgtttgagtatcttatttcatattatagcacctacagacaccactgaaagacgaatgaaggaattgtgaaatattttaaactaagtaggcttattgcattgtcgtgggctaag

SEQ ID NO: 256058 - DNA, 122 bp, Homo sapiens
gccgtcccactggataaggcaggccgagcctgcgctttggcccgggagcagagcagcgagcgccctcctctccgtctttggccttcaactctccagccagccgggggcagggggcggggctc

SEQ ID NO: 256059 - DNA, 122 bp, Homo sapiens
gtcccaatcaaagcgtgtctcgccttctcacagcttgaggctaccgttttgacatggtctcgcttcctgtttacaccacaggaagcgagagagctgctgccactgctgctaccacaggaaga

SEQ ID NO: 256060 - DNA, 122 bp, Homo sapiens
tccctattaccttggcccatttaatccactttttttcctcctagagccccagttaggccacgtggggcctttttactccatcacaatgctaaccactaaagagaacttatttttcacccttt

SEQ ID NO: 256061 - DNA, 122 bp, Homo sapiens
ccagctaatttttgtatttttagtagagacagggtttcagcatgttgaccatgctggtcacgaactcctggccccaaatgacccacctgcctcagcctccgaaagggctgggattacaggcg

SEQ ID NO: 256062 - DNA, 122 bp, Homo sapiens
gccctgggcagccaccttgcctctctgagtttgtcctcatgtgtctctggggctggaactcggtgtccgacctggtgatgggtcaggtgtgatcaggtgtgtggggctcggtctgcatgtgc

SEQ ID NO: 256063 - DNA, 122 bp, Homo sapiens
gctgaaagtggtggggcagggccgcggcaatggagacccggggggtgggatggagaaggacggtccggaatgggacctttgacagcagaccctacaacctgctgcccttccctgtccctttc

SEQ ID NO: 256064 - DNA, 122 bp, Homo sapiens
tcgattaaataaacttagcccagacgtagggctctactgttctgctttagccaaggtgtgcgggaaacgccagctctgccactcactggtcaagtgaacccacacacatgagttaagttttc

SEQ ID NO: 256065 - DNA, 122 bp, Homo sapiens
ttccggacaggagaacatcaaggcggtaaagcacagaaacttcctccctaccgcagcaagcgtggggagagggcgcccacagggctggggcccttcccaggctgctgggtctccagcccacg

SEQ ID NO: 256066 - DNA, 122 bp, Homo sapiens
tccgtgagcgctgggcgggccgggttgtgttcatgttggtgaacccgcttcgttcttgcccgcgtggatggtccgtggactccgggaaaaccttctcgtggctcaaagtccaccccctccct

SEQ ID NO: 256067 - DNA, 122 bp, Homo sapiens
actgccatcactgctgcaccacttgacatgagctgaccttccccacctgggcctggggaacgaacaaggcaactgaagacttggccagattgtgctgagagtcttcccagggctggaatgcc

SEQ ID NO: 256068 - DNA, 122 bp, Homo sapiens
tccttcagggtccgtaagtgggtcaaggagttcagagttggaccttacctgcgggcgtcccgaggggcaggctgggctcaggagctgaccgtgccagggctgggccacagaaggtgaaggcg

SEQ ID NO: 256069 - DNA, 122 bp, Homo sapiens
tcaacagcactttccttctgatattccggggatctcagggtttattattgtgcctttctgcgccgaggaaagttcaacttcatattattgtatgcgactttccggctgagcatgactttggg

SEQ ID NO: 256070 - DNA, 122 bp, Homo sapiens
agatgcttggaggcaagcattatgacaaggatgggcgcgggtgggagtaaggcctttaaacgaagagctacatttcaaagaacttcaaatgtgtatttcaaatgtcacttccaaatgaggtt

SEQ ID NO: 256071 - DNA, 122 bp, Homo sapiens
gggcggggtcaggccggctcctgattgggtgttgacggggtaacgttgtctcggatctcccgccccctcccttctttcgctggccgcgcacgcgtgcaacgccccgcccacctcgccccaca

SEQ ID NO: 256072 - DNA, 122 bp, Homo sapiens
tgtattgcgcccccgccctaggccaggcgtgggcatcacctttgcactcctttctgcagccgtgtgtggtgcccactgtgacctgcacttcacagacgggtcatctgagttgtgcaggccac

SEQ ID NO: 256073 - DNA, 122 bp, Homo sapiens
tgagctttgaaacaactgatgagagcctgaggagccattttgagcagtgagggacactcccggacagtgtggtcatgagagatccaaacccaagcactccaggggctttggatttttcacat

SEQ ID NO: 256074 - DNA, 122 bp, Homo sapiens
tcccctctccacctccggtcactgcgacgagtccccaaactcgcccgcggtcggagaacccgccgctgacccagattccgccgggcgaagggcagagggcggcgcgcgcggcttcccggagg

SEQ ID NO: 256075 - DNA, 122 bp, Homo sapiens
aattgcaagggagctgttctttgaagcctgacgtagagatggtgaacgcctcttagcctgcgtgcaaaaaaggacagaatggaggacagttgtcttctttatctggtgaagccagccttctt

SEQ ID NO: 256076 - DNA, 122 bp, Homo sapiens
gagcggtgtcatggccgccgacagtgacgatggcgcagtttcagctcccgcagcttccgacggtgagcggcttcccagaggtagccttcaaagcctctgcgctctgggagaggggaaggcct

SEQ ID NO: 256077 - DNA, 122 bp, Homo sapiens
catgaaaggtttgtgagaatgttaaaattatatgaaagtctgacttgaaacatgtgcaaacgggagtgcacactctctgggcaagtttatcatattaatatattccttcccaaaataaccct

SEQ ID NO: 256078 - DNA, 122 bp, Homo sapiens
ggtcggtgatgggcctggacccctgagaccgtgtggccccggtgggggttgctcccggctcggctgaggcagcttcttcctgcagatggtgtcagtcctggtgcaagaaggtcacgccgtct

SEQ ID NO: 256079 - DNA, 122 bp, Homo sapiens
tccactcacttcagaagcagccccgttaccttttattgtctcacagaataaccatagcaacggtgcataattagctagagctcctggtaaatcggttttattattgtatttgagaggccgac

SEQ ID NO: 256080 - DNA, 122 bp, Homo sapiens
gatggcctcccgtggacactggggacgcctcccctcctcttggaaaatgcgtgtttctctcgcagtattgttctcagcacccgaacacaagctcttctctgcagatgaaaacttatcatttc

SEQ ID NO: 256081 - DNA, 122 bp, Homo sapiens
ggagggggctgctgccaacactgcgggctctctcagaatgcagaggcttctgctttttcacgaaatttctctttgcaaggctcaagaacatccaatagagatttcccatcacaaagactggg

SEQ ID NO: 256082 - DNA, 122 bp, Homo sapiens
cccgcccgcctccgccccctccccaaattcggaagttgcggcgggaagccgagaacgtctcggatgtgggtcagaaaacgtctggactacttgaggcttcagtttcaaaacggcacaaattt

SEQ ID NO: 256083 - DNA, 122 bp, Homo sapiens
tgcaaggttgaagccctgcagtaccagggcagctgcctgggcccttgcctggatctgccacgcttctgggaaagagtgctgcccaaacgccccttgttcctccgttggggtccaggagctcc

SEQ ID NO: 256084 - DNA, 122 bp, Homo sapiens
cgctgcagatgccgcggcagctgctgcaggtgtggctgcggctgagcgggcagcagtggccgcggagccccggggccgggagcagaggagaagccgccgggggaacccgcagccgctcgccg

SEQ ID NO: 256085 - DNA, 122 bp, Homo sapiens
agctagacaccacatggctgataattaccacttttcttagcaaatctgctacctcactcccgctcccgtgacactgaagataggagcggagcccctcagaggatgagtgtgaggagaggagg

SEQ ID NO: 256086 - DNA, 122 bp, Homo sapiens
ggcagcagtagcagtgggatgctttcctggagagcaaacctcctctcagcagagttaggacggcagctttcacctctgcattcctcaggctgtaaatgatggggttcagcgagggcgtcaca

SEQ ID NO: 256087 - DNA, 122 bp, Homo sapiens
acatgactgttgaaagacggagagtgcggaatctttggagttttaagcttgccaactgtgcggcctagcagaatcctgggagacggaaggacagccaagaggctaggatttacctttaagtg

SEQ ID NO: 256088 - DNA, 122 bp, Homo sapiens
agagccttcccagtgataatttggtctctgagctcatagctttaggcttgatttctctgacgttcatcgtctctgggttgaaaaggatgattaagaagccctttactggacagtacgtcaag

SEQ ID NO: 256089 - DNA, 122 bp, Homo sapiens
atttctccagcccggcgcagaccccggagctcccgaggcactccctccatctttggaacacgccagtaattgattgataacaggtaaaccaaactgagggagggggcagggggctgcaaaga

SEQ ID NO: 256090 - DNA, 122 bp, Homo sapiens
gtcgcagtttgttggccgtgttgccctcgcctgctgcgcttggggaggagccgatgtcaccgcatcgctgagcacagcccatccttgcaccggccttgagagctgggggctgtgctggggcg

SEQ ID NO: 256091 - DNA, 122 bp, Homo sapiens
gacggttccccagacactgacttcggggttccagcgtgcagcaccaagtcacgtgggcgccgtggcctttcacctgcagaacaagccgcccccttcgccagcacctacaggcagcgagaaca

SEQ ID NO: 256092 - DNA, 122 bp, Homo sapiens
tgactgtccaggtagcgctccagcgggtcgccacacccaggcgcgccgtcaggcggctcccgggcaccctcacagagatcaacaggccggagtctcccacgcggaacttcccctccgaggcc

SEQ ID NO: 256093 - DNA, 122 bp, Homo sapiens
acaggagcagggcagaggtaaggaccatggccagaagcatcttgacagcggactggagctcgcttgcagacaccttcaaatcgagtggtatttaaagctccctctcaaacacggaaaaaccc

SEQ ID NO: 256094 - DNA, 122 bp, Homo sapiens
ctgcaaagatttgtatgcagaaactgacctcagtggccatggaatgcagcatattattctcgatcattttacagcccacccactgtgaaagttatgatgaagcatttcttaatgattccttg

SEQ ID NO: 256095 - DNA, 122 bp, Homo sapiens
gcggtttcccccatgttgttctcgtgatggtgagtgagctctcacgagatctgacgggctcggaagcgtctggcctttccccgcttgcactcactctgtcctgccgcccggtgaagaaggta

SEQ ID NO: 256096 - DNA, 122 bp, Homo sapiens
tgtatcgtaacaaccaagtcatgatggataaaacatgcctgcgatcgagaaccacttgcacggcccacgccacagactcgaggcaggtggggaacggctggacagtgatggagaacaggctg

SEQ ID NO: 256097 - DNA, 122 bp, Homo sapiens
tccgagagcaaggctaggggaggtcggaatgtttgcttaccttttcacctctgaggaagtcgaggctttagccctgttcgctgccagccggcggggagcaagttgtgggaacatttaatgcc

SEQ ID NO: 256098 - DNA, 122 bp, Homo sapiens
agcaggctgggggtggtgttttgatcccttcagaactcgtgaatttgcactgcacacgctcgtcttcactgaccagtgggctcacagagtcctctgcatctggggacggactacacggaatg

SEQ ID NO: 256099 - DNA, 122 bp, Homo sapiens
gcagcgtggggactcctcacgctgtctgcgctctcacatcccccggacgctccccgcgtgcgtgcaatcccccgaggaacagggtgcgagaaacgctgggcaccgccactccgccctccagg

SEQ ID NO: 256100 - DNA, 122 bp, Homo sapiens
ggggactttcttctaggtctctcggattaaatcctgagaggtgagtctgcttatctaggccgccccctccgcgggcgcaccgatgcctggcactgcccgccggggcgtgggcgcgcccacac

SEQ ID NO: 256101 - DNA, 122 bp, Homo sapiens
ttagttttcagcatgcctgtctttcctactagagctaaaaggcagggtctgagcgtcttacgcgcctccatcttcaaggcgtagcacagtgactgaaaaaaactgacgttgaacgtgcacta

SEQ ID NO: 256102 - DNA, 122 bp, Homo sapiens
tttttctgtggaatgcaaaagttacactctcaaatccagaacatcccagagccattctcccgagcaaacatctaaacctaagttggaattcatagtttaactgtgactgcctgaaaaggact

SEQ ID NO: 256103 - DNA, 122 bp, Homo sapiens
ggctctggcccgcacgagctggtctgggacccggagcagtgccggccggcgtgcttgtcacggactggtcctagagtctctacttgaaaggccttggcgaaaccagctctggacaggcattt

SEQ ID NO: 256104 - DNA, 122 bp, Homo sapiens
caggccaccctctgtgtcctggagtcaccagccccaaaggggctccctcccttgtgggatcggtaactcccacctccccactccccctgggccctctatctctgaaatccaatactctcacc

SEQ ID NO: 256105 - DNA, 122 bp, Homo sapiens
gttatcttaagacactcatctggtgtctgagtctgcaggtgacactgcttaggtacggagcgcggagtcggagcggggacgcgccgggctgcagctctgggatgcaatccgcctgcctcgca

SEQ ID NO: 256106 - DNA, 122 bp, Homo sapiens
tgctctcgcggagagcgacggggcaggccaatatggcttcctgcacctggtgacgcttggcgaaactgaggtctcatggagaagccccggagtattgaggtgagaaggcgaggacttagcgt

SEQ ID NO: 256107 - DNA, 122 bp, Homo sapiens
gctgcgatggcggcagctgggggaggaggaagataagcgcgtgaggctggggtcctggcgcgtggttggcagaggcagagacataagacgtgcacgactcgccccacagggccctcagaccc

SEQ ID NO: 256108 - DNA, 122 bp, Homo sapiens
ttttcacaggagtgaggcagaagacagaaactgcaacaaaccgccggggggtgggattaacgtccaaagctcacaccggcttcaactgattggcaggaacgaagtgggtggagcctcctgac

SEQ ID NO: 256109 - DNA, 122 bp, Homo sapiens
ggagaggaaattgaagaaggcttgttacagattgaacccagcccaaatggctctcccaaacgccaattacacgcctctgttcaccgtggcagaatagaaaccagacgccaagactccctcct

SEQ ID NO: 256110 - DNA, 122 bp, Homo sapiens
cctgactttatctgactcaagttggcatttgtgaaggtaataatctaacaagctcctctccgtttttcagatccacatcatggtcctatcatgtggggaactggcctctggtccaatgagca

SEQ ID NO: 256111 - DNA, 122 bp, Homo sapiens
ccttgaatcagaattaatttgcctgctgggcacagtgatggacaaagcagctggcagcatcggatccctacacaacgggttttgttttggggagaggagtgagtgcaaatgccttctgcttc

SEQ ID NO: 256112 - DNA, 122 bp, Homo sapiens
agcctcagggggcagctgacctagggctgcctaaggcggaagtgggagcccctagccgcccgggcggaactacagctcccagaggcccccgcggcgctgcgcacgcgcgctggcgtggcggc

SEQ ID NO: 256113 - DNA, 122 bp, Homo sapiens
accgcgacaatgcctcttggccttgggtggataatggcacccctgggcaaaccctaggggcggggcccagaggcgaggggcttccccaatcagtctccgccctagcgccctggacttcggcc

SEQ ID NO: 256114 - DNA, 122 bp, Homo sapiens
atccccgggaaaattcgtttcttttctaggggctcccagcaacggcttccatgaggaaaacgtttgacatactgcattaaaacacacacacacacacacacacacacacacacacacacaaa

SEQ ID NO: 256115 - DNA, 122 bp, Homo sapiens
cacgggttatgttcagatagtaggcctatggcaattcttcacagccatagagtcctaatccgagtatcttcccagagaggaaaaacccaaaaaacttttaaaagggggaaagctgggtagat

SEQ ID NO: 256116 - DNA, 122 bp, Homo sapiens
acacggcactctcaagtttggaatacttcttagccttcccccttgttgatgacattaaatcggctcccaagttctgcagactctacccacttaatacatctcccttgcattccttctcactc

SEQ ID NO: 256117 - DNA, 122 bp, Homo sapiens
taagactttacttccatgattagattatattatgtagtaaagatgaggggattttatgaacgtaattaaggtctacctcaattgattctgagttaatcaaaagggagattatcttgggtgga

SEQ ID NO: 256118 - DNA, 122 bp, Homo sapiens
tgatgaggaagaccaggaagaagctgaacacgatgaagatgtggatgatgaggactggcacgctgcccttctcgtaatgctcaaagcagcgagtgacgttgcctgagccagcactgtcgggc

SEQ ID NO: 256119 - DNA, 122 bp, Homo sapiens
agcccgagacacaggtatgacacagcgagcacatggcatggtgaccctgagacagggttacgacttggtgagcccgcaacatggtgagcccaagacggttacgacatggtgagctcacggca

SEQ ID NO: 256120 - DNA, 122 bp, Homo sapiens
cgctacatctgcgccagctgggctgggtgggaacagcgcagaaatactcccgtgccggggcgtacagggcaggtaggcccagcagagagtcttctcggaaagtttcccacaaaagaagggcc

SEQ ID NO: 256121 - DNA, 122 bp, Homo sapiens
ccagggcttcagcgatggtgcgagggcgaagcgattggcccgaggccacgtcaatcaaggcgacggaggaggcgacaaccccgcctcccgccagcgcctcccttcgggctgggaggccacta

SEQ ID NO: 256122 - DNA, 122 bp, Homo sapiens
ctgtaggatttatggcacactgacccagaaatctcacacttagctgttaaatatattgctcgttttttgcagctgaagcatcatcacttaaggacttttccttgtctgacacatcctttaaa

SEQ ID NO: 256123 - DNA, 122 bp, Homo sapiens
cttctccatggggtggaagggggtatccacccccttctattgcagacccgtgtctccaggcgtctccgtgtgcccacgggggcggcatgattttcacagtacttcagacacctgcatggccc

SEQ ID NO: 256124 - DNA, 122 bp, Homo sapiens
ttcctgaatttattccatacataattatttccttaagttatttaattattaaaggtgccacggtgggacctttgggatgacttaaaaagggttctttgttgggagtcaagtgacagagcaga

SEQ ID NO: 256125 - DNA, 122 bp, Homo sapiens
ttaaattacaattgcacaaaaacagcaaagaagttagcagtagttttgccccttggttctcgagaccatgttcatctgattacaaaagacacagcaagtgctgctcaacctcctgctccctt

SEQ ID NO: 256126 - DNA, 122 bp, Homo sapiens
gagacacgccggttgtgaaacctactgaagtgagcggcggcgccaggattcctgggaccccgacctctttgcagctcgcacagctaagggcgagggcgcccttcggcagaagcagcaaaccg

SEQ ID NO: 256127 - DNA, 122 bp, Homo sapiens
tacacatttcatataaataacatcatacaatatgcagtcttttgtgactggcttctttcacgtagtgtaatgttttcaaggttcacactcaatgtatctgtttaaactaaatgaataaatga

SEQ ID NO: 256128 - DNA, 122 bp, Homo sapiens
cgatgttcctagctccttgggaggctgattcatgaaagtcgcttgagcctgggaggcagacgttgcagtgagcagtgagcatgcctgcgctccaccctgggtgacagagcgagaccttgtct

SEQ ID NO: 256129 - DNA, 122 bp, Homo sapiens
gtggagctgcagagagcagacgaaaggcccactgacttgtgtatcaccaagtggggctaacggggaatcctttcatttgtacagagtgtttcttttcatagtgtgtgtggtcttcacaatca

SEQ ID NO: 256130 - DNA, 122 bp, Homo sapiens
ctcaggtgatccgcccacctcggcctcccaaagtgctgggattacaggcatgagccactgcgcccggccaagcaactccatttttgtttggtttggtctgttggggcctagcgcatgagctc

SEQ ID NO: 256131 - DNA, 122 bp, Homo sapiens
ttcgaagatgacgcgactgatctcatgccgtattatcaacacgttcttaaaaacctcgggcggcatgacggatccagagaaactcatcaggatttatcctggtaggacatttctgttgttca

SEQ ID NO: 256132 - DNA, 122 bp, Homo sapiens
cacattaaagtgcttttgttgtacctttaagcctacaggcagatcattaaatatgcatttcgctagaaagcaactgtctagaaagataaggtggttgaaaatattctacggtggaaaagccc

SEQ ID NO: 256133 - DNA, 122 bp, Homo sapiens
aagaagggaaggagagttagtaactactgtacatggttacccactcacatggccccacttcgaaatgttcatgtttgtcccagtcattagcattggggtctgagatgagatgtaggtaaagt

SEQ ID NO: 256134 - DNA, 122 bp, Homo sapiens
actgcctggcgtctcagccgtgcgactctgtctccctctacccggcgcggtcacgtgacacgcctgactgccctgtggctgcgacccggacctggaatttctagagctcacggttcagggca

SEQ ID NO: 256135 - DNA, 122 bp, Homo sapiens
cacctgtaagtgctgtttgaacaaggaggttgctcctcctattaacagactgaacaaggccgcctccccgccccaccctgctgcaacctgggaagggccaatttgatatctatgagcagagg

SEQ ID NO: 256136 - DNA, 122 bp, Homo sapiens
cactagaatccacaccaccttcaatctcatggaatatctgtgtagtttattttcccagtgcgtgcaaggctttcctcaacagcggagagcttttgcatagcaggagaacaaactaggatagc

SEQ ID NO: 256137 - DNA, 122 bp, Homo sapiens
gcaagtcccattaagccgccgggcgcttgtgttttctcggcttctttagttccactcgctcgcggcactctggtaactttgttttgagatcaccttaccagagacagctctaacctctgaga

SEQ ID NO: 256138 - DNA, 122 bp, Homo sapiens
tcacagtattcaagcataaacagaaaatccaatttacagtccccacatcttaccattttgcgaagtttaaccacccgggtaccgccgttcttgtcaccaccaactggttttgtaacagttgc

SEQ ID NO: 256139 - DNA, 122 bp, Homo sapiens
cccaggaatttaggaaaggagtctggccctcaccttggaatggtggagttacttgttcaacgtttgcctcagctgaaatactgaaataatttctgtttcccacctgtcagtggggcgtttgc

SEQ ID NO: 256140 - DNA, 122 bp, Homo sapiens
cggagaggctggccccagcccgccacgccgcttccccacgctcgcagccacgcggagccgcgtcctggtccagcctcacccacccagagcaagaggcggaggaactggaacagcgccccggc

SEQ ID NO: 256141 - DNA, 122 bp, Homo sapiens
agtttctgggtccctcagagttgacctcccaaggggatcacgaagaggtttcattcaaaccggggcacttctgagagggaaagggtgtgctagcaatggttataccgggacaacaggcgtaa

SEQ ID NO: 256142 - DNA, 122 bp, Homo sapiens
aaggaattctgagtccctgaagacatggaattaaatgtgcctttctgggttgggctcaggcgtcttctctctttatctttttcctggcccttggtctctgtccctctgtcttcaggggcaac

SEQ ID NO: 256143 - DNA, 122 bp, Homo sapiens
ccaggtccgacagcgggcgcgggacgctggattcctatttgccagcttcctgctggggagcgttttccaatggggcgcggcgacccggccgaccgcgtcctcctcccccactgccgcccggg

SEQ ID NO: 256144 - DNA, 122 bp, Homo sapiens
tcacgccacaacaatgtaggataaagccggcggtcaccccaccccagagtgggacaaagtcgcaccaccccttgacaatggggcatcaagatcttatcgccacgggggttgcatcctggtgg

SEQ ID NO: 256145 - DNA, 122 bp, Homo sapiens
ccgagttaagacggtccagacctgcataaacatccacaatccatgaatggataaactgtacgtggtatactcttacaagagaacattactcagcgttagaaaggaatgaagttctggcacct

SEQ ID NO: 256146 - DNA, 122 bp, Homo sapiens
aggcgctgaccggcagagactcctccgggcaagagggccagattttctttccaggtgggacgaacacagaatattgtgagggcaagagaagaagaaaaggaggcaactccagactgggataa

SEQ ID NO: 256147 - DNA, 122 bp, Homo sapiens
cccacacagcagctctgtcggctgggaaggcctgcaggctgcaaggccgcgcgaatgccccgggccagccccaaccactgtccctaggccagcggcgtctcttactgggattcgaagactgg

SEQ ID NO: 256148 - DNA, 122 bp, Homo sapiens
caagtatttatcccagaacaagctgcagaataattacatttgttatttctctccactttccgttctgcttttctccatggccttggggagcaagggagtccttagcatgccaaggaaacagg

SEQ ID NO: 256149 - DNA, 122 bp, Homo sapiens
gcactcccctggaaatgcccccatggaaagagcaatatgcccgggctggtgatgtggcctcgaaggcagcctctgggagtacctggctgatgaccgttctgaatggcccggcctccccggcc

SEQ ID NO: 256150 - DNA, 122 bp, Homo sapiens
agagtaaatgggcactagaccaagcgagcacctgcctcaggccggatgggcccctgccctcggctgggccgctttatagtcctcagccccccagagtccccgcctcctgtcagcctctctca

SEQ ID NO: 256151 - DNA, 122 bp, Homo sapiens
tcgttctcggtctctccaggccgctccctctccatctgtcctgatcgccagcctctcccccgctcctctccgcagcggtcggcccacctggagcactccccgccgccacgtgacccgtgcgt

SEQ ID NO: 256152 - DNA, 122 bp, Homo sapiens
ccctggatcctgaattttagccatctccaggtgctattgattctgttggcccaaggaccacgctgggtagcaacagtttaaaaatccagcgctgattgccttctacagcaacatgtctggag

SEQ ID NO: 256153 - DNA, 122 bp, Homo sapiens
gaaagaaccagcaaatttgaatatatttctttgtaaaatacccgcggaaccctgttccttcgttttacctcctgcttccttagctcaagccttcctcatcttaggcagcctccaaactattc

SEQ ID NO: 256154 - DNA, 122 bp, Homo sapiens
aggtctcgccgccggcgccctggggacctcgtgggtgtggccggcggcgacctcggcaggcgacagcccagcagacgggcaccaggtggacgtgccagtctccagacccccgtcccggtgca

SEQ ID NO: 256155 - DNA, 122 bp, Homo sapiens
tggacaggcaggaaggcgaggctgagaggccgctgcaccttggcaaggtgcccccacatgcgctcggagccgagcccaacaccacagctctgccactgcagcctgtgcgtggctgggaactc

SEQ ID NO: 256156 - DNA, 122 bp, Homo sapiens
tgttacagttcttaaaggcgacgtgtccggagtttgtttcttctgatgttcggatgttttcggagtttcttccttctgatgggttcgtggtctcgctggctcaggagtgaagctgcggacct

SEQ ID NO: 256157 - DNA, 122 bp, Homo sapiens
tctctccaggagcttgcctgtgtgttcttgtgatatggcggctgaatgattccaggggtgcgggcggggtgcaaaagcctagccttgaaatgtcttttataaataagccttgaaagtggcac

SEQ ID NO: 256158 - DNA, 122 bp, Homo sapiens
agcgtcccgcgaggaccaacgctggggccggccttctgggtcacagtgctgggcgcacagcggaagtcagggctcgcctctctgtgtgggccttcttgccagcggaagcactcccctgggtt

SEQ ID NO: 256159 - DNA, 122 bp, Homo sapiens
cgggctggagcactcaccagcgggcagggagggcggcagggcacggcggtggcggtgggtcggcgaccggcgggccgaagactggaagcccgggccgctgaggctccgcagccccctccgcg

SEQ ID NO: 256160 - DNA, 122 bp, Homo sapiens
ctctgtccctggaaagaaggctcgggaggaagccccagggccaccgggtgtcagccgggccgacatgctgaagctgcgctcacttagtgaggggccccccaaggagctgaagatccggctca

SEQ ID NO: 256161 - DNA, 122 bp, Homo sapiens
tttctaacccgcggctcctcggcctctgggtctcacagcgtgtgtggtcggccccgcccccggctctgaatcggtgacccgtgctggcctctgccttcgcctgaagtccgaatcaggcgtgt

SEQ ID NO: 256162 - DNA, 122 bp, Homo sapiens
tatctataggcgcaaacccaagctaggtctcacacagtgcctcacttaataatctgtcaacgtttaattctttttcttttttttttttttttctggagacagggtctcactatgttgcccag

SEQ ID NO: 256163 - DNA, 122 bp, Homo sapiens
ggctgaaatagagaccaggaggtctaagaggtgctatttgttatcaggatgggctgagatcggcgctggggcccctgagcacagccctgactccaggctctctgcacctttccctccagacc

SEQ ID NO: 256164 - DNA, 122 bp, Homo sapiens
ccccacccagcaggaggctctggctgcccagaggaggggctcctgcaaagctggagctgtcggtctgaattctggcggcagccttcagataattccatcaactctaagtgatcaaagccgct

SEQ ID NO: 256165 - DNA, 122 bp, Homo sapiens
cgttctccagcagcgaggagggaactccaccgcaggtcacttctgcggcctgggagctggcgcccggccaccccccacagcctccaacctacggcgtagacgtcgccactctgcagccttcc

SEQ ID NO: 256166 - DNA, 122 bp, Homo sapiens
atggagaggccgggcgagggcaggacgtaggtttttcaccgcccttccagattccactgccgcatctcccggccgaatgctaaccgggcgtgcaggctggggttcgcaggaggctcgcgatc

SEQ ID NO: 256167 - DNA, 122 bp, Homo sapiens
tgtgcagcttgacagataaaaagtgctcaacaattgtctagtcaaagagtaagtgtaaggcggaactggcaggcattttaatgttttggattctgaaggctgaattttggacacaactacaa

SEQ ID NO: 256168 - DNA, 122 bp, Homo sapiens
gatgagtcggccagacaagcggggccagtgagcagctaaaaagtcctctgctaggcttcacgtctgtacttcctgctttcgctttcgcctttacccttcctcaaaggcccgtggcggttttc

SEQ ID NO: 256169 - DNA, 122 bp, Homo sapiens
aggcagccagaaggaggcaagaaccaaaaaaaaaaaaagaaaaaaaaattccgaagcgcccgcagcactgagcccgaaccggctcagtcccgccgtctctagaaagttctgcaccccgcccc

SEQ ID NO: 256170 - DNA, 122 bp, Homo sapiens
tcctgcccgagaagatgctgacgttggaacatggggcctgcgtgcgagggtgcggagcctcgtgtgctcctgtgcaacggggcacgaagtctggccactgtcacgggatgcgacagacattt

SEQ ID NO: 256171 - DNA, 122 bp, Homo sapiens
atgtagagcgccgtgaccagcaggtactggtagtagaaccaggacatctgcttccaggcccgcgccagcgccatccccgccatgcgcctcccgcgatgcagctcacacgtcagtctgtccgg

SEQ ID NO: 256172 - DNA, 122 bp, Homo sapiens
gctccccgggcgatgactgcggtaatggagccgtaggagctccacgaggtgcaggttcagcgtcttagaaggatgagcagcggctcgccacagctcggaggcgggtgggcagcgctccaggc

SEQ ID NO: 256173 - DNA, 122 bp, Homo sapiens
ctttaccgctctcccccgagaccttttaagggttgtttggagtgtaagtggaggaatatacgtagtgttgtcttaatggtaccgttaactaagtaaggaagccacttaatttaaaattatgt

SEQ ID NO: 256174 - DNA, 122 bp, Homo sapiens
gctgcgcgcgcaggcgcaggtcgaggaggcggaggaactcttccgcgacatgcgcttctacggcccgcagcggcgccgcctctggaacctcatggagaagccattctcctcggtggccgcca

SEQ ID NO: 256175 - DNA, 122 bp, Homo sapiens
atgatttcccacgtcccatgttgggatgcatgttaatgaggaaggaaggcctctgcgtggcggggcctgagctaagtatgtctagtcagagtccaaatccgggacagatttgaaaagctttc

SEQ ID NO: 256176 - DNA, 122 bp, Homo sapiens
ctacaaaggcagcccgaagaaatgcagactacagatgtatgtgcttgtgtgtccatgtatcgtggcaacagtcagcaatacagccaggaaaacgtgcctttcggttttccccagcacctgtc

SEQ ID NO: 256177 - DNA, 122 bp, Homo sapiens
cttccgggtcaagcgctttttctttttcctcccggaaacaacggtgtcattctctagttccggatctaaggtgacccagttgcgaagtccagccttctcgtctgctcatggagccttcaggg

SEQ ID NO: 256178 - DNA, 122 bp, Homo sapiens
aagtgaagcctcctcccttctcaatcctccttcctctgacttactcgcagcagcttctaccgcaaaagcagcagcaacagaaaatgtcttacccagagctccctgcagccctttcagctgct

SEQ ID NO: 256179 - DNA, 122 bp, Homo sapiens
tgagaacctggtggggttctgtttgcctggttactcggggcagcgggttccagcctgcagcgcgcccactggttggggttctgggtgttgggggcaagcaggggcagacgttggcagacatg

SEQ ID NO: 256180 - DNA, 122 bp, Homo sapiens
taatcattccgaactcttcccaacaaacagcctcatggctgtcccggacctcctctgtcccggctcaggaaatgatctcggtcggaagtgaaaagaccaaatcggccccaggaggccatttt

SEQ ID NO: 256181 - DNA, 122 bp, Homo sapiens
actctccccatttcacagaccagcaaacagagactcagaggggaagtgacttcccagagccgtgaggtcactctccggcgagcacccctctgccgaggcctgcctgacgccaaggcttgagg

SEQ ID NO: 256182 - DNA, 122 bp, Homo sapiens
ggtgctccaattctctgggagccagagggaacccccaattctccatctttcccaaatgttcgaggccttgcccctctgccccagtaggctctctctggagccaagggacccagctgggaggt

SEQ ID NO: 256183 - DNA, 122 bp, Homo sapiens
caccttctacccatggccggatccccccctgtcaatctgcagtagagacagcagagcccccgggaacccctcccagcagctgagggttcagggggtgcccctcactgtactggggaaatgtg

SEQ ID NO: 256184 - DNA, 122 bp, Homo sapiens
agaaattagtaagtggctacatctgcataattttgcattggtaagagttggcttctttagcgaacatgattttgtatttttggagaggaaaaccttgggcccatcaggttagccttttctga

SEQ ID NO: 256185 - DNA, 122 bp, Homo sapiens
ctttttagtaatagccattctgactggtatgagatggtatctcattgtggttttgatttgcgtttctgtaatgatcaatgatattgagcttttattcatatgcttgttggccgcatgtatct

SEQ ID NO: 256186 - DNA, 122 bp, Homo sapiens
gctgtctggaggatcagcccaagctgcgagggaggtggtcactggtgggaggtccgggcgcggggtctgtcgtcttgccgcccccaccaggctccccgcgcaggccgcgcagcagagggagg

SEQ ID NO: 256187 - DNA, 122 bp, Homo sapiens
ttaccactcgggtggggtggaggtgcggtgggattcgcattttgcaagggatcaaaagagcggctaattatggcatttctagcccaaggcattggccagagatattgcgggtaggcccctta

SEQ ID NO: 256188 - DNA, 122 bp, Homo sapiens
ggtcagcgctgacagaggcagccgtgggagaggtgttgggcacagtgttagtgcttgtctcgctgatataaatcttagaggtggggattttcagagctctactggccacctgcgaaaagaga

SEQ ID NO: 256189 - DNA, 122 bp, Homo sapiens
aactacctagaaacctaccaggacagtgaggctgcatagcaacacgtggaaacaaggaagcgggagcgggaggaagaaacagtgagggaagcccaggcaccaggaaggacgcgtgcatttac

SEQ ID NO: 256190 - DNA, 122 bp, Homo sapiens
aactcctacacttgtaggatgggggcatagaaatcttctagcccagagatcttcaagcctcgcctgctaagccctaagcagagaggtgggagctgagcggatctgctgtgaccacccacact

SEQ ID NO: 256191 - DNA, 122 bp, Homo sapiens
gcattttcaggcttgtggtgataaataagattgaccaatgcaagcgttcataataacttgcgaattggccctgatgttctagcatgtgattacttcactcctggactgtgactttcagtggg

SEQ ID NO: 256192 - DNA, 122 bp, Homo sapiens
caacaggaagccacgagagatacgtgggggcctagggtgagtctagcagtcctgtaggtgcgcctgtggaattgcagcagggagagaagcagctaaagctagagtccaggggataagtaata

SEQ ID NO: 256193 - DNA, 122 bp, Homo sapiens
cgcggcctcaatgccattggcgggatccgagcgcgtttctgagccggatgctgagctccgcgccttacacacgcgattccctttaatgcccccggggatcccggcggatccgtgctgccctt

SEQ ID NO: 256194 - DNA, 122 bp, Homo sapiens
tcctggtacatggcccaagccttctctgtaaagtgggtgatcgtaatgccacaatttgcacgaaccacagtcaaaatgcgtttcttatgattctcatttttggtttctcttaaagtggacaa

SEQ ID NO: 256195 - DNA, 122 bp, Homo sapiens
tttggatctgaacatacaaataaatacaaaaacaacgaagattgcactttactgtagaaacggcatcggattccagtatacccatttatcttgacgtgctctgccatgaaagcttatcacta

SEQ ID NO: 256196 - DNA, 122 bp, Homo sapiens
ggaagacagtttgactcgtccacatttggagggcacaaaagtgagaagccggctctgcctcggaagagggcaggggagaacaggtctgaccaggtgacccgaggcacagtaacgcctccccc

SEQ ID NO: 256197 - DNA, 122 bp, Homo sapiens
gcaactgtgattataaagtttaaccttcccccaaacactgaatgaatgagatttttgctccggaaatactttacctataacaacaccattaaatccaaatctcttctaaacaatggcattcc

SEQ ID NO: 256198 - DNA, 122 bp, Homo sapiens
ttagaccatgtcgtgcctttgggttgggttgccatagtgacacgcaaagcgtgctgggaacgccctgcggcatgtcgcacgcgtacttcatacaccatagagtatggttccgggtctgctgg

SEQ ID NO: 256199 - DNA, 122 bp, Homo sapiens
tttaaaaagacattaacgtgtttgttgagggcagagccaatggccgggaagtgttgttggcgcacgccttccagatcgcagctcttgcggcggccatcgccttcgacttaagggtgttgctt

SEQ ID NO: 256200 - DNA, 122 bp, Homo sapiens
atggacgtggacaaggaccccgggggcatgctgaggcggaacctgcggaaccaatcctaccgggcggccatgaagggcctggggaagccaggtggccagggagatgccatccagctaagccc

SEQ ID NO: 256201 - DNA, 122 bp, Homo sapiens
gcagcggcggggccatggggtcgcaggtgttgcagatcctgcgccagggggtgtgggcctcgctcaccggcggttggttcttcgacccgcaccagagcaccttctccaactgcttccacctc

SEQ ID NO: 256202 - DNA, 122 bp, Homo sapiens
ctgcctgtctaggaggagcctggaaacacccacccattctgccgttctgccgctgagccccgtctctgcctggccatgtggaaggtaggagctgggtcgtgtccccatcacccggcaggcag

SEQ ID NO: 256203 - DNA, 122 bp, Homo sapiens
cttttcttccccgaccagaaccaggagtcctgggctaagacgtaagggttccaactactccgaagctgccatgctagagagaactcatcaggagaccaaatacagacagaaagggaggtgtc

SEQ ID NO: 256204 - DNA, 122 bp, Homo sapiens
agactttgccgcagtaggtcaggtagcggctcagcgccaggttgcagcggctgtcgcggtcgcagcgccgccgggcctcggtgcagcccatgaccccgcccgcgccggggccgcccgcgccg

SEQ ID NO: 256205 - DNA, 122 bp, Homo sapiens
ctccccagaagtagtacactggcgccaccacgccaaacctgtgccagtgacaactgccgccgccgggttcaaaacttcgggttggttttgaaagtccgactttggactggctgccgcagcgc

SEQ ID NO: 256206 - DNA, 122 bp, Homo sapiens
ctacaacgaccccaagtgctgcgacttcgtcaccaaccgggcctacgccatcgcctcgtccgtagtctccttctacgtgcccctgtgcatcatggccttcgtgtacctgcgggtgttccgcg

SEQ ID NO: 256207 - DNA, 122 bp, Homo sapiens
gagtagagtgtgttctgtcaaaatggcatttaagaaactcatttatgagcaccactgggtcgctggacgcgctggccttgcgatcccatcagtccccgtctggcgggatcccggagcgggcc

SEQ ID NO: 256208 - DNA, 122 bp, Homo sapiens
tccttactgcctttacagttctgtcctccatgcctttgctcaggctgttccctcccggaacgccctccctattccatgaaacctatccaactctaaacagtcctcaagtcgccacttcggag

SEQ ID NO: 256209 - DNA, 122 bp, Homo sapiens
gtggccacgcgagggaggcgggggaggggctggccggaagtgaaccgcagagcacgcgcgcgagcccgcccacttcccggccccggcaccggcgcctgcgccgaatcttccggggggggggg

SEQ ID NO: 256210 - DNA, 122 bp, Homo sapiens
ctttttttttttttctaacaacaaaaaaccgtgagacttcacttggggtaaccataacgtcgtcaaggctgtggcgtcacgcctctaagcggatacggcagaagttttggggccagacacaa

SEQ ID NO: 256211 - DNA, 122 bp, Homo sapiens
gaataggcaaaactgttggaatcagttggttcttgctcaaaatcttggtttacacccactcgctgccactattagctggggggtcttgggcaagttctgtaacctctttgggcttcagtttt

SEQ ID NO: 256212 - DNA, 122 bp, Homo sapiens
gcgtcgcgattggccgtcctgcagccgttgagatttgaactcggtatttgtggctttgcccgcgcgttgccagactcagaggcggccctttgcctctgcctgccggggattggccggattct

SEQ ID NO: 256213 - DNA, 122 bp, Homo sapiens
catagccccacaggtgattctgaggcccacgcggcccgcttcccctccctgcgtcaggcccggccctagctctggaggtggttggattggttcaagggctgcagccccacctcgcgtcttcc

SEQ ID NO: 256214 - DNA, 122 bp, Homo sapiens
gtgacttcggtgatgcccactgtatggggtgacggtggtgatgccgaccgcatggggtgacggcggtgatgccgaccgtatggggtgacggcggtgatgcccactgtatggggtgacggcgg

SEQ ID NO: 256215 - DNA, 122 bp, Homo sapiens
gcggtcagggagttccctttccgagtcaaagaaaggggtgacggactcacctggaaaatccggtcactcccacccgaatattgcgcttttcagaccggcttaaaaaccggcgcaccacgaga

SEQ ID NO: 256216 - DNA, 122 bp, Homo sapiens
ggatcgaggaacagcttgctgtccaaaggggatcgcagggccagggaactgacaagcacacgctatttgccaacctttgccttaatagaaagaagcaagcaaacaaaaatcctcggtagctg

SEQ ID NO: 256217 - DNA, 122 bp, Homo sapiens
acagatccaaaaggatgtgaaagaaacaccatagttagagtcacaagggccagaacataccggactaagcatctcatatatttgacaaaaaaggatcatatttattgcattattcaagaaat

SEQ ID NO: 256218 - DNA, 122 bp, Homo sapiens
ggctgcccgttggttccgcccgagccgttctactccaggcagacgggaggagaaacacggcgcgctcagcgtcccctgccccgttggttctgctcgggcccttccactgcaggccgacgggg

SEQ ID NO: 256219 - DNA, 122 bp, Homo sapiens
taggcagagtttcggctgccgggggtgtcggcatcaaaagtgtcttggcgggacagtgcccgtagcgtgcctgcccggcctggtgggtggctgctggggtaaaggcctgggggctggcccag

SEQ ID NO: 256220 - DNA, 122 bp, Homo sapiens
gccatcatcatcatggcccgttctcaatgagctgctgggtacacctcccagagcgggtggcggctgggcagaggggccccccacctcccagacggggcggctgccgggcgggggctgccccc

SEQ ID NO: 256221 - DNA, 122 bp, Homo sapiens
tgggactgggggcttgtggcccactaccaggctccgaggggcagtggtttggtgcagccgcggatccgtctactgcggctccgtctactccggctatgaaccgcagcagcggcggcggcggc

SEQ ID NO: 256222 - DNA, 122 bp, Homo sapiens
tccctcatcaaaaacaactaccaaaattatcaaaagaccaactacaaccctgaggggctgcgatcctgagaactgggacctgccagccctggggtggagcagctgaggcggcagggcctaaa

SEQ ID NO: 256223 - DNA, 122 bp, Homo sapiens
ggcgggagtaccgggctctgcagctgcatctgcactggggggctgcaggtcgtccgggctcggagcacactgtggaaggccaccgtttccctgccgaggtgagcgcggagctggccgagaag

SEQ ID NO: 256224 - DNA, 122 bp, Homo sapiens
acccagggggcttcccggagttgagtcccaggaacccctccttcgcccctccgtcgggcccgcacatggagcgggttactcgatggtgctttctgagactccaccccctgtagatccaaccc

SEQ ID NO: 256225 - DNA, 122 bp, Homo sapiens
cggcaagcggagcagcgaggcagggtagcttcatcacactcgcggcggatgcggattccgcgccgccccggctctagctgctcaggcgaccgccaccctcgcctcgccgccgcccgtgcaca

SEQ ID NO: 256226 - DNA, 122 bp, Homo sapiens
tttttactaccacagaaagaatatttgcagtcagcatgcacggcctgaaagaatctctctcgcctattaatagaacagaaggaacatacacatgtctatgtgggggaaaaacatctcatttg

SEQ ID NO: 256227 - DNA, 122 bp, Homo sapiens
tcttagcaagcccagcatcgcagccaataacgcatcagggggcggagccgtagaggcttgcgccccgcctcgctccgctattggaaggaaagcagccaatgggagagccgaggcggggaggt

SEQ ID NO: 256228 - DNA, 122 bp, Homo sapiens
actggaaacagccccctgtgctctgtgctgggcccctggctgcggagatgggcccaaactcggcacgattctctaagttcggaaaccacgaagcttgcgccttcatgcgtgtctaacattaa

SEQ ID NO: 256229 - DNA, 122 bp, Homo sapiens
atgaaaaatgactgcttttttaaagagacagagtcttgctctgttgctcaggctggagtacgctgacaagattatagctcactccaaccttgaactcctgggctcagtcaatcctttcacgt

SEQ ID NO: 256230 - DNA, 122 bp, Homo sapiens
gcaagggcaagagcagcaggcgtttcccagagcagaagggagctgcatccccttttataacgcccagagactcttctaagtaaaggtggagcttaggatttaaagggctcactccctgccca

SEQ ID NO: 256231 - DNA, 122 bp, Homo sapiens
cgcgggcgcttcgagggtaccacgcactgaaatgatgggcggggcctgccccgaccctcccggcctccacaggcaggccagcctccaggtttcccggcaagctccgaaacccagaggaggtg

SEQ ID NO: 256232 - DNA, 122 bp, Homo sapiens
gtgtgcgagtgtgtgtgcgtgcgggcgtgtgtgtgtgaatgtgattactccaggactcctcgggctccggagacgccattttcccccttgatatctctctccataaatcggtggcgcggcgg

SEQ ID NO: 256233 - DNA, 122 bp, Homo sapiens
tatgatgattaattcagtttacaattcagtaatatttgctaggctaaacactatgatgcacgtgcggggagtggaatgaactcttccaagcaggagactctttttctactccaagtgacaag

SEQ ID NO: 256234 - DNA, 122 bp, Homo sapiens
caggaagcaatgcttcctattctagcgccttgctaaactatgtgtgctgcagactgtgttcgtgattccgaatcctaaaaacaaccgtcctaggcttgtctctcagcctagactctagactg

SEQ ID NO: 256235 - DNA, 122 bp, Homo sapiens
ggcgacaatttgagcacggtgcgggcgggccggcagtgctggggaatctggtgcaccctccgcagctgctggcctgggtgctaagcccctccctgcctggggccggcagtgccggctggctg

SEQ ID NO: 256236 - DNA, 122 bp, Homo sapiens
caatctgtgtgttccaagtcggtagcctcaggggtcccttggtccagggagagttattatcgcacccagaagaggggccaagaaaaagtggggaggatgggagtggggggaacagaactcca

SEQ ID NO: 256237 - DNA, 122 bp, Homo sapiens
tctaatatgacactccccaaaaatgtccgcctctttatcacagtcacctggagttacagccgttaagaaaaacatgcttgaaatcaatgtttcttatgagagactaacgctaataaaactgt

SEQ ID NO: 256238 - DNA, 122 bp, Homo sapiens
caataacgatccaaagaaaccaaatgattgggcgccttctttcggatccgtgacttccagcgccaggagtctctattggctcttataccgttgctctatgggatagcaatgtttttgtcctt

SEQ ID NO: 256239 - DNA, 122 bp, Homo sapiens
agtgactctcccctacgaaggcggggaccgcactttatgagaccaaacaaactgcccgagcgaagcccttggagctctaaatacttggcagcaagtacaaagcaaaggtggcggggtggagg

SEQ ID NO: 256240 - DNA, 122 bp, Homo sapiens
ggacagaaaacccgcagtggggccccggcctgtccccggccctggcgctgtcctggcatccggggaaatcctgtttctggctccaggccagggcctgcccctcaccctggagaggccccgtc

SEQ ID NO: 256241 - DNA, 122 bp, Homo sapiens
acggaagttctcaaaccctctttggaaatcgtgcaggccgcaggtcctactgtgctccttcggacccgcctagcccgcggagcccatccttctcctgaagttgcggatctggtttgccgaca

SEQ ID NO: 256242 - DNA, 122 bp, Homo sapiens
ggtggaagcgacgggttgcacccacccccaagttagtctgatcagattaaactgccagaacgtatattcaactcatcactgtaactacaagccgtcttacttaggaaaccatgagttgctgc

SEQ ID NO: 256243 - DNA, 122 bp, Homo sapiens
acatgttacaagcaaatcaacatagttgctgcaggcggaactgagaccagcctctctgggcgatgaaggacaatggtggtagggccacttagagagcagtagggcccaggctggtgcagcct

SEQ ID NO: 256244 - DNA, 122 bp, Homo sapiens
tgcagagaaagaggcgggggccgcggaggcgcgaggcactggcggactccgcccccgccgcgggttcgagtctccccggctccctgccgattcccccagacttcccgcctcggcttcccctt

SEQ ID NO: 256245 - DNA, 122 bp, Homo sapiens
ttgggcaacatcgtgggaccccgtctctgcaaaaaattaaaaatcatccgggcctggtggcgcgcgcctggggtcccagctactcaggaggctgaggtgggaggatcgcttgagcccaagag

SEQ ID NO: 256246 - DNA, 122 bp, Homo sapiens
ccgcctccttccctggccaaggagccgcccctccggggtagctgtgcgctgggcggcgctcggaccccttggcagccgcaggtgcctccccagcccagcccagctcagtccagcgcagccca

SEQ ID NO: 256247 - DNA, 122 bp, Homo sapiens
agccatcacctccccaggcgcggtgctggcaatccccatggccctcgcagtccgcgagcccggatgcaccaaggccctgccaccgagagcacagtctgggtttcaaagtgtcctctctctcc

SEQ ID NO: 256248 - DNA, 122 bp, Homo sapiens
agacgcggtcctcgccccgcaggtgcgggaggatgtagttgtggaatcggtccagcagcgcgttcatgtccatcaagcacgcgatggcctggaagagctcatgaccggtcagcgccaaggag

SEQ ID NO: 256249 - DNA, 122 bp, Homo sapiens
cactagcacgtgtgggttcagaggtctgagcggccacttcccgcttccagacctcggatgcgacgctcatctgcacggtgtgggcagagataacatcctccccagaacagcatggaaatgtt

SEQ ID NO: 256250 - DNA, 122 bp, Homo sapiens
aggcaccctagccggattcgccctcggacgccccagctgggcacactcacgcggctctcccgcggcttctcgggaattcgcctccagggcaatcagctcttcgcacaaacgttcaaaccaag

SEQ ID NO: 256251 - DNA, 122 bp, Homo sapiens
cccagcacgtagagggaatgagtcaggctccggctccacactggcacgtagtgggcggatcgcgccggcgctgagtaggaaggagcttcagccgccagcccggaacgcagtgagtacagcca

SEQ ID NO: 256252 - DNA, 122 bp, Homo sapiens
cttggagctgaaacagaagcacaggacagccagccagggcagggctctgtgaacagaagccgtaaaagaatcctaccaatgcaatgaatcccaccaatcccaccaccatatccttccaacca

SEQ ID NO: 256253 - DNA, 122 bp, Homo sapiens
agaaatggctttcaggccaaagcctgggatggggttgaggttatagaagccagagattcacggagagaccctaggatcactgcagccggggggttccccaggccccagtgtggggcctggca

SEQ ID NO: 256254 - DNA, 122 bp, Homo sapiens
ttagcgttgggtcctagttttcagcgctttatttgatgcagaggggatacctttcctttacgcataccactctcactgatcctaaataattacttgacagtttgaatgatctcattacactt

SEQ ID NO: 256255 - DNA, 122 bp, Homo sapiens
ctgcggccgcctcacctgacacaattgggcagcgatttctcaggtccaaagagcggaccccgtgggcactttcctgacggaggactcggctcctgggagctccggcaacatcagcgacagtg

SEQ ID NO: 256256 - DNA, 122 bp, Homo sapiens
cacggtggcccaccatgaagtgcttctccgccgtctccaggaacagcttcaggaaagccacgtatctgcaaggcaggcggacgggggctgggggagccgccggccgtgcacccctgggctgc

SEQ ID NO: 256257 - DNA, 122 bp, Homo sapiens
catccccattttacagagggaaaactgaggctctcaagggtgaacaccagacagccgggacgtgacagaggaaaagaggctgactctgagccggaagactcctgccagggctggcaggaaca

SEQ ID NO: 256258 - DNA, 122 bp, Homo sapiens
aaggctccctctgaccgaagcccctggagaagtagggccattaacaccctgcaggtgcatcgcattatgccagaggagtccaaactgtccatcagaaagtctgtgtgatgtgagctagtttt

SEQ ID NO: 256259 - DNA, 122 bp, Homo sapiens
ttgtgtggcgcttgcactgaagatgggacctttcgtcagtatgtgcacacagcttcctcccggcgggtgtgtgactcctcaggttattggaccccagaggaggctgtgggtaaagtaccatg

SEQ ID NO: 256260 - DNA, 122 bp, Homo sapiens
tccatgtctttctgtggtgatgtgtgagaccctaaccaggcactgctgctgcagaagccccgcctcccagttgatctcttgggactctgactggcctgactgtgaatatgtcaatcacaatt

SEQ ID NO: 256261 - DNA, 122 bp, Homo sapiens
gagacagaaccagggtgaagctgtattacctttcccagtctagcctcaggagtcccacagcgtcacttttgcttctttctacttactagaagtaagtcaattactaagcctggcccctattc

SEQ ID NO: 256262 - DNA, 122 bp, Homo sapiens
ggagcaggggtccgagcccgtgcgtcccagagcggagtcctcctgggccgggagggaagccgccccatcctgggcgctcaacgcgtccccaagcaccgccggtcctcgcccctctctgggcc

SEQ ID NO: 256263 - DNA, 122 bp, Homo sapiens
gtggctagtggctactatcttggacagtgcagtcctagaagacacaggggactagctttacgacaacaggacataaaagttaggttagggttaagatggataaatcagacttggtgctgtga

SEQ ID NO: 256264 - DNA, 122 bp, Homo sapiens
atgcctttaccccataccccaggcgcaggctttctctctcctggggcccgcagatcttaccgtctgcactgagcgaagcctccctgctactgcttcccagccatgcggcgagctctttgaag

SEQ ID NO: 256265 - DNA, 122 bp, Homo sapiens
gaggcgtggacttggggaagcctagcagcgcctgaataaaagggcgccggcgcgctgtgccgcgctgagccgcgctgaaaagccgagctgcctcgctcccggcccgggaaagggcatggccc

SEQ ID NO: 256266 - DNA, 122 bp, Homo sapiens
gatgctcatctacctgccccggcactgatggccgctcctccctcacttggcactgggtcacgtggtgatgcactcagggctggtcccaggctctgcaccctccccggccagcccaccctctt

SEQ ID NO: 256267 - DNA, 122 bp, Homo sapiens
gtgggtgagcgcgcatagctgtcctggcacacgcagaaggtggaggcgttttccagggcccggctgtgctctgggcacggtgagcagaggggccgccgcggggacaccttgtaaaaccctgg

SEQ ID NO: 256268 - DNA, 122 bp, Homo sapiens
cccttattgatgtttgtaattgcattatctcataaaggaggatgatcaatgaaaccgagccgtgcattctggggtcagaggaagccaaagtactgtttgtcccctttaatacaacaagtact

SEQ ID NO: 256269 - DNA, 122 bp, Homo sapiens
gcccggctcctccacgtagctcagtggaagctgtggcccagctgctgtgctgtgggcacccggaggcatcggcaggtgtgggacacagtgccaaggtccccctcagctttgctgagcccaga

SEQ ID NO: 256270 - DNA, 122 bp, Homo sapiens
atctctgccacatagagcgccagcagctgctccaaacgctggatctgccgccgggaaccacgggtccttggagactgagaggcagtgttttcagcatttgtggggtccaaggagaggtgtgt

SEQ ID NO: 256271 - DNA, 122 bp, Homo sapiens
tgaaggaacaaaattagtcaagaagtatttcatcaaactaaccaattgtaccaagtttgccgaaacgcttacctgttctgaagattctgcttgtgacggggaaggtagaagctgctgctttt

SEQ ID NO: 256272 - DNA, 122 bp, Homo sapiens
atctagttactagtctccacattatggaatcactgccacctctgggacggagggagcagccgcataacaccttcccccctttaccacacacacacacacacacacacacacacacacacaca

SEQ ID NO: 256273 - DNA, 122 bp, Homo sapiens
ctggaggagagaggctgtggctatcagactgaccccaccttgatgggctggggtgatgctcgggcgagggtcggggagatagacccacgtggctccaggagtgggaggggccctggacccag

SEQ ID NO: 256274 - DNA, 122 bp, Homo sapiens
ttctgtaatacaacaaagcaacggaatccttgggattctggccatcccggaggtacctcccgggtccgtggcggggcaagccctttttccacgacgcctcccacccgcctcgtctgctttgg

SEQ ID NO: 256275 - DNA, 122 bp, Homo sapiens
ggtccacccggtaggcggccgagtggttctcgctgccgcagaaggccaggggcatggcggcgcgggcgcgggctgggctcgggctcagctggctccgctggctccgcgcgcctgccgcgcct

SEQ ID NO: 256276 - DNA, 122 bp, Homo sapiens
ccacctggccccggactgcccctaggcagcttctggtctcgagagggacagagttgggcgcggactcccccggcctcttgtagggggattagtggtgggggacttcaaaagggatagccggg

SEQ ID NO: 256277 - DNA, 122 bp, Homo sapiens
caaccctcttcccacgaacaacagcccacaggctccgcagctcgccttggtctcaacaaccgcgcagtacttgggtgcttaagcgagtcccctaccacatagtccagggttgggggcggggg

SEQ ID NO: 256278 - DNA, 122 bp, Homo sapiens
caccccgcgcagccagagcaagcactggagccccgccccttcccgcaccccacccgcctccggccccgcctggcccacccctggaccgcccccgccccgccccgcccctacccgctcctccg

SEQ ID NO: 256279 - DNA, 122 bp, Homo sapiens
caccagcatcaccaccttgatcacggaggaaagttcagtgcagttcagtggcaagtgcatcgtggtgaacttggcaggcaaacagtgagagcaggaggtatgggagtgctgcgcggctccag

SEQ ID NO: 256280 - DNA, 122 bp, Homo sapiens
acagagtgagactctgtctcaaaacaaaacaacaaaaacaagcaaggcctgcttaaggagcgtgggctgaggtgagaccctttcctgtgtctgttatttagactccccctcccaaagggggt

SEQ ID NO: 256281 - DNA, 122 bp, Homo sapiens
gcctggagaaggccactgccaggcctttagtttccagagacgctgcagttcaacattttccggggaaagtttaccgtttccaaatgtcatcaaaattaaaagaaaacacctccaccatatgg

SEQ ID NO: 256282 - DNA, 122 bp, Homo sapiens
tatcaaactctatgtcctcagtacttagtacagtacatagcacagagcacaggtgttcaccgaatgtctgtggcatgtggagctcatctggatgtccctcatgaaggggaggggtgtggagc

SEQ ID NO: 256283 - DNA, 122 bp, Homo sapiens
agtattagcatgtaaaaggatgtgcccgcctactctccccagtcacacaagattgtcatgcgagctgaagggggctgaaattattccctctgaagaagaagaagaagaagaaaacatactgc

SEQ ID NO: 256284 - DNA, 122 bp, Homo sapiens
ccaagcctcaaagtgcccgcagagcccaccttgagggttttgctagttggttttgttttgcgttttacagccgtggggggaagcacataatcccgccccagggcccactagcatccactgat

SEQ ID NO: 256285 - DNA, 122 bp, Homo sapiens
aagccagctcaccctaggttatgaatgccaattgttacatttgccagagtttttgcaagccgattgtcttgagtttggtagcttgaaattggccatagtttttacacaagagaaaatggtgt

SEQ ID NO: 256286 - DNA, 122 bp, Homo sapiens
agtatggccacagggcactgcccaggggtcctgctccacaggaccccggaagaagaaaaacggcttagcagaagctcaaaatgacacaggtggcccttatctcaacagagcaatgtgcaccg

SEQ ID NO: 256287 - DNA, 122 bp, Homo sapiens
tgcacctggagtaaaacgcgatcccaggtcaagctctatggactcgactccggaagagctcgcgaatccatttgcttgtgcctgcgccttctgccacctcactagttcattcaggccctccc

SEQ ID NO: 256288 - DNA, 122 bp, Homo sapiens
ccaagtctggattgcttccatgtctcctctactgctaaacccatttctgtagtgcagctccgcctcccaatttctccctgtgggggcagtgtgaagctggcagaggggagagctgaaaaggc

SEQ ID NO: 256289 - DNA, 122 bp, Homo sapiens
caggcagggagcagtatattcctctgcttgaaaccttgcaccatgggaacctgcccccaccggttctgtctagtcctgcccacggtctacactggcatcctgccatcccctcaccattgaaa

SEQ ID NO: 256290 - DNA, 122 bp, Homo sapiens
ctccatgccatcctcgtacgagggagctagaagcagaggtagcccttgcgcagcatctcccggcagctcctgcccgccatgccaaacttcctcgggctgcacagggcccgcagcttcacagt

SEQ ID NO: 256291 - DNA, 122 bp, Homo sapiens
gggaaggatggagacgcagctccagaccccagagtgcggccccccagacacacccacggccgtccaccatccaagcataaaccccaacgcagcggctcctggcctggttctgaagacggccc

SEQ ID NO: 256292 - DNA, 122 bp, Homo sapiens
gcctctcctttggagacagtcctcctgctcccttctgcctgtccttgttgcccagagtggcggggccagtgtactgctttacctaatcctctgtgtagaatggactggcagctgggggctct

SEQ ID NO: 256293 - DNA, 122 bp, Homo sapiens
gccccgctgaggagaccgtgtcgggatgcctgtccctgccccagcaggccttggcgacagcgtcaatgtcacagccctcggaggctcccccacagctgggccgtgttgtcttcccacaccac

SEQ ID NO: 256294 - DNA, 122 bp, Homo sapiens
ttcaggacaactaataatctgtattagtcatctactgctgtgcaacaaattatcccaaaacgtagcagcttaaccaatacacatccactgtcccccacagtttccatggtgaggaatgggga

SEQ ID NO: 256295 - DNA, 122 bp, Homo sapiens
ctaggccgggtacccgccgagccaccgccccgttgctaggcaaccgccctcccccgggggcgccccctagaccttcctgagaggaggggcctcgcccccggcggtccgccccagcgcagcca

SEQ ID NO: 256296 - DNA, 122 bp, Homo sapiens
cacgacttactggtagaaggcgtcagagagtcgactccttaaataacccagcacacagtccgccagcctcggctccaccaaaaatcgatgggagcctgccatgggcgaggaccttctcttgt

SEQ ID NO: 256297 - DNA, 122 bp, Homo sapiens
gaagttggggcagaagtaattatgcaaacatctggggctgtcccgcgccgctaccggcaccgtcttattcatcctgagagccgcactccctcatttgcataataatggcttatctagaataa

SEQ ID NO: 256298 - DNA, 122 bp, Homo sapiens
tgtgggccaggcggccggctgagatgcacgagtgacagccaggctttgggaagttgcccccgcccttggccggccctgattttgcatcaggaggggcttcggagaggcacattccggaagtc

SEQ ID NO: 256299 - DNA, 122 bp, Homo sapiens
tctcctccatgaagcctccctgggtcatccagccagaaggtcttctctctcctctgataccgagcaactcagtctctttgcttacagcttaggagccattgaatgtggaatgcagttatgtg

SEQ ID NO: 256300 - DNA, 122 bp, Homo sapiens
ctagtagacaggaaggcagaatgcatcacggtgaggagccaaaggggccccggcacccagcgccaatcttctctccctttcaggcctttgccccagccttaaaaaagcagtgccagacttct

SEQ ID NO: 256301 - DNA, 122 bp, Homo sapiens
catcctgcagctgggcaggcagtgctgggccccggaaatgccctctgcctccctggagcacgtggcctgtgattttccttgagcacagcactttgtgactttgatgtaaacatcaaacacag

SEQ ID NO: 256302 - DNA, 122 bp, Homo sapiens
gggcctgccatgccctaggcattggtacccagagcaaagatttctaggaccaccccccgccgccacctcctggagcgggagatctgcgggtgcaggagaacacaccaggagctcggggcctg

SEQ ID NO: 256303 - DNA, 122 bp, Homo sapiens
tgacctttcaggatactgttttatattaaaacatggacaggagggtagaaaagtaaaattcgcctgcaaaatggcttgtcatccttgggccggcagatctccaaaaccattttcttctaaag

SEQ ID NO: 256304 - DNA, 122 bp, Homo sapiens
gagggggactctgtggtcagggaactgctcgctgagcacagctgcacagtgctgtcagaacggccgatctccagcccaagatgattccagcagtggtcttgctcttactccttttggttgaa

SEQ ID NO: 256305 - DNA, 122 bp, Homo sapiens
tatcatgtcagtatctatgttatgaagaaaaggagacttaggtgagatgtttttatttatcgcaactgctgcattaattgcctaggacctcaacagcttcatgaaagtctgggaaatgttca

SEQ ID NO: 256306 - DNA, 122 bp, Homo sapiens
aaatatcataagggcactctgacgctcgttcatagtctggaattaaaatgcagacagctacgcaagtagtatgagctgattatctttgttttttttttttttcccctaacaacaagcaaaaa

SEQ ID NO: 256307 - DNA, 122 bp, Homo sapiens
tagaaaagcgtgggtgggtgtcccggcctggctccaggcgccctttaagttgtatttcttcgggtaactgggttgccctttaaaatgtggagattgtcctttagaaagaaagaaaatctcac

SEQ ID NO: 256308 - DNA, 122 bp, Homo sapiens
gggtatggaccaagagttattgggaggtcaagccatggagtaagaagagaacagactttgcgtcagacgagcatgagtttgactgctaagccgtggcaggctgatcaatgcctacccaaacc

SEQ ID NO: 256309 - DNA, 122 bp, Homo sapiens
acagatagtcctgaaggcaattctgatgcacgtcagaggaccaggccctaagaagaactgcgctagaggcgtggtacagaatagtgtacatgcatttaatcctcgtagcccccctgtgaagt

SEQ ID NO: 256310 - DNA, 122 bp, Homo sapiens
cctctgtgccctgcaggccatgggtgtgtacctctacggggagctgatggtgagtgaggacgccagacagcagcagctcgcccgtaggtgcttcgagcggaccaaggagcagatggataggt

SEQ ID NO: 256311 - DNA, 122 bp, Homo sapiens
actcgagccgggtaaatgcaagtcagatatgaactgaaccctgaaaccagatcattagcccgggtcatgattggtttagaaatttgtgttgttttccttcctctatttcctgccatagagtg

SEQ ID NO: 256312 - DNA, 122 bp, Homo sapiens
cagaaagggacacttactgcttagtacaacagggtgcatggaagctgagggtgcgcggcccgcaccagctgtcccaaggtggggaggagctgtccaggaacaccgtgatatgtttgggtcca

SEQ ID NO: 256313 - DNA, 122 bp, Homo sapiens
gcagtttgcagaaatccagcaaggtttatggtttatgttgcccagcatgtataaacacaacgctctcaaatgctttttaaaaatctatgaatttgttagatgtcttcacatcctggtcctcc

SEQ ID NO: 256314 - DNA, 122 bp, Homo sapiens
cagatttcctcttgtattcatgtttgtgaatgacccattgggcaaagcaaatcacaccgccgactcccatgcgtagactctacctcttgatggtgcgatctgtaaggtcacattacgggggg

SEQ ID NO: 256315 - DNA, 122 bp, Homo sapiens
ccaccatcctcatcccctgtaactcctgatcctaggagagacctctccagttcccccaagcgagaaacagattttcccaaggggagtgcctggaagactttatgtttatacttagtaacttc

SEQ ID NO: 256316 - DNA, 122 bp, Homo sapiens
gagtcccagctggacttagaaggagcgcgctggccctgccgtctccaggctagggagcaccgactaggaggtgggggggtgcagggaaggcgacttgaagggctggggtcccggctacagcg

SEQ ID NO: 256317 - DNA, 122 bp, Homo sapiens
ccacttactgcttctcgggcaccctagcccaatgcctcagcctccctggcttcagtcctgcggctgagtgaatgttcaaaaattatttttgcagaagcttccattgattgtgctagctccat

SEQ ID NO: 256318 - DNA, 122 bp, Homo sapiens
gcgttcggccgtacggtgatccgtcccggcacccgttccggccaccgcccgcgagccccgcgccgactcccggccctccggcagccagtgcccctccgcaccagtgcgtggaggtgtcaggc

SEQ ID NO: 256319 - DNA, 122 bp, Homo sapiens
gggacgctgactgatacacatagattatctcatttcatcctcgaaacgcccctctgagggcggtattaggatcctcactttgcacaggaggacaccagcgctcagagaaacgaaataatgtg

SEQ ID NO: 256320 - DNA, 122 bp, Homo sapiens
gagagacggttcccaaagcccagagatctgtggcctgagtgtgggtcacccctgctttcccgggtccctgttcctatcacggtggaccttccccaggctgccaccggatttgtttgctccat

SEQ ID NO: 256321 - DNA, 122 bp, Homo sapiens
agaagctggtaatcaataggtaggcagtttcctgccagagaagtggcgcgcagctgttaccgtcgccctattgggcttggtttctgtccgagtcttcagtgtggacccaagtctgtgtggtg

SEQ ID NO: 256322 - DNA, 122 bp, Homo sapiens
tgggctccacccccgtgaggtctccagaggcagggctttccctgtgggatttcctggccccgctcggtctcccgggctcccgggtccaccgttgggaatggcagccagggcttctgctcagc

SEQ ID NO: 256323 - DNA, 122 bp, Homo sapiens
aaggacagaggtagccagcccagaactgagagggagagcggggagcgcagggagaggaatcgcgccgccggtgtagacagctgggctccctgcgcatgctctgtcctccccctcgcggctcc

SEQ ID NO: 256324 - DNA, 122 bp, Homo sapiens
accccaaactgcctcaatacactgacaggtcagtaggtggccaagagatcccaaactgatcgttttatcttggaatgactctgggctttactgtcagaatcctcctaatttacaccattgcc

SEQ ID NO: 256325 - DNA, 122 bp, Homo sapiens
tggcattgcccgccttgtcgaggaatctgcaactgcagtttctgccggcagcgagatggacggtgtgcgactggggtccttgtgtatttagccaaatatcatggctttgggaatgtgcatgc

SEQ ID NO: 256326 - DNA, 122 bp, Homo sapiens
gctggctgtgctgctgactggccgggcgtgtagctgggcacctggacagagcccagggaacggtagtaggtggaaaaggtggagcgagtggtgaagctcatgctgtccggggaagagaacga

SEQ ID NO: 256327 - DNA, 122 bp, Homo sapiens
aataataaataataatgaatccattcttccttcggtcgtgggtctggcaggcataaattccggccgggattccgaccccagggccagagcaggactcgccttggcgtctatgagtgggcggg

SEQ ID NO: 256328 - DNA, 122 bp, Homo sapiens
gccaccctgggtttccttatacttaagcagaggcacctggaactaccttccctccttgatcgtagaacggttttcagttttgctgtagataatgcttagaagctgtgcatctctggccacgg

SEQ ID NO: 256329 - DNA, 122 bp, Homo sapiens
cccttcactgtacaagagaaagagaattagggtaattgactgaagagtacagggaaatttcgtatcatgttttttatctgttttgttttggttttggtaagtcagggactggaaggaaatgt

SEQ ID NO: 256330 - DNA, 122 bp, Homo sapiens
ctttccgtcccgagcaaggtgtgacggacacacacacgcacagtatgctgtgcccacccacgcccatgcctcataggatgcgggggacagggcaggagcaggcagagcccctggaggctggg

SEQ ID NO: 256331 - DNA, 122 bp, Homo sapiens
tggtctgagtcccgaggcagcgcgcacgccttctctgcacttgtgcacagaatgttcttacgtttgcaaacagcgtgcaagccgccgcgcgcggcgggactcaagggggagacacatgcagc

SEQ ID NO: 256332 - DNA, 122 bp, Homo sapiens
aagccaggaccgctatgatccttcttaaaactagttttgaaaatgttcaaactatgtgttcgcgggtcctcgagcagaaacccaagcaactctggggtcagcggcgacaggggaatggggcg

SEQ ID NO: 256333 - DNA, 122 bp, Homo sapiens
tgccgacaccccaccccagacccacgagggatgctctgccgacaccccaccgcggacccccgagggattctctgccgacaccccaccccggacccacgagggatgctctgccgacaccccac

SEQ ID NO: 256334 - DNA, 122 bp, Homo sapiens
cccgtaaccccagccagcacgacattcagacacccctccaggcccaattagcttcacagacgctcaagacttgggaaaacaaaagaggagaagataactgaacccctctccctgtgcccacc

SEQ ID NO: 256335 - DNA, 122 bp, Homo sapiens
ggtgctttctgtttgcagctacggcagtgagtatgtatgtgacggaccccgagtcacccgcggcctgggacccctgcctaccctccgtctcgccagccgagctgtggaactagcgcgtgccc

SEQ ID NO: 256336 - DNA, 122 bp, Homo sapiens
gtccacctgtgtatcgccaatgagtgccttgcaatttgccacagctctgcagttaatacacggcagaacaagtggggcagaggattctgaaacactccaggcccagggaaatcaggtggttg

SEQ ID NO: 256337 - DNA, 122 bp, Homo sapiens
caactcccagcatgccacgccagcggtcaaagcttattggtggtcctgccaggtcgcttgcgttgtggcagtcatggtagccaatggaaataaagaattatcccaagaaaccaatcctggag

SEQ ID NO: 256338 - DNA, 122 bp, Homo sapiens
ggcacagtgtgcgaccagctctgagtcactgctgtgtctccctgggggcgggacggagatcgcggaggtcggtcgggttcttcggggagaacagcagcgtcagggctccaagtgcaagttca

SEQ ID NO: 256339 - DNA, 122 bp, Homo sapiens
atccacctgcctcagcttcccaaagtgctgggattacaggcaagagccaccacccccggccgaagctgccctcttaactgtgatattatcctgctacactgaacaaagaaacgacccccaca

SEQ ID NO: 256340 - DNA, 122 bp, Homo sapiens
gaccacattttgtttcccaaagcaaccagatgatttttgaggtcctttgcagctcgaacacggaatgactttgtggtgatcgagtagccagaagttcacggaatgcactgtcacaattgtga

SEQ ID NO: 256341 - DNA, 122 bp, Homo sapiens
tccagacctctcagagatgtttcattccttgggctgggttgaactgagacatagccctgccgcgagacaggagggagaaggagccagtggacagaatgttctcatgcctggatgcaccagcc

SEQ ID NO: 256342 - DNA, 122 bp, Homo sapiens
ggtcagatactccctgttgcctgggaggagaagccagagagcagatccctaaccccatgtcgctggcatgaggagaggtaagcaccaccagatgccctcagtagcagagactcagagccttg

SEQ ID NO: 256343 - DNA, 122 bp, Homo sapiens
tgccccgcatctccattggtcattggagagcttataatacaagctaaactggggttcgttcggccgttgtctggccacctctcccgggttgacagtatcggctttccacaaaaatgcctgtt

SEQ ID NO: 256344 - DNA, 122 bp, Homo sapiens
ggctggggggatggtggaagatttttggtctcttcggcagcgtcttttcttaagcggcggcggcagcagcagcagcaagagaaggagaagcagccccagctatgactgccgcatgttaatag

SEQ ID NO: 256345 - DNA, 122 bp, Homo sapiens
catcaacacagcccttcctggtgtcatcatctggcttcttacagttacaggtggtagcttcgtaaccagaaaggggtttgacatcaacgtagacatcttgaaaagaaagcaaagaatagttt

SEQ ID NO: 256346 - DNA, 122 bp, Homo sapiens
tctggaggactgtaattttgagttggtctggagataatgtccaggccttctccctgtaaccggttggggaaataaacacgtgcttcctccccagttcagctgcgtctcgttatggggcccga

SEQ ID NO: 256347 - DNA, 122 bp, Homo sapiens
agttcagcgagcagcagggaatggcgcccagtggctttttctctcctactgcttggcgagcgggagggcgtggtacccgcagcttggcgaatgggcgcgtgttacagctttcctgctcccgc

SEQ ID NO: 256348 - DNA, 122 bp, Homo sapiens
ggcacactcacttccacgttcacagttcttggaagcggtcccactgggggcggggctgagcgcgaccgcgccctcaactccccctattgcccgccccggggtggggcataaccacccaacag

SEQ ID NO: 256349 - DNA, 122 bp, Homo sapiens
ttaactcttcacagactttgtttatttttctccaagttggattatagacctaaggccaagcgggtggagacacaggattgccgtagatatttgcattcattcttttctcgtcatcactgttt

SEQ ID NO: 256350 - DNA, 122 bp, Homo sapiens
tcgggctctggagcccgtgcctcagattggagccctagggagcactttcagtcgcatggccgtggtcggcgggaccccacctcaggtctgtggctccacgtctcggatcagtacctccctcc

SEQ ID NO: 256351 - DNA, 122 bp, Homo sapiens
cagaggacggctccttactcgaggaatgcgggcggcggtcgtccagagccgatgatgaaacgggctatttctgccccgggacatcagcagggctctgggctctggctccaaggcacacactc

SEQ ID NO: 256352 - DNA, 122 bp, Homo sapiens
ctgggaagcaagtaatttttttgcggtgcgttgtcttgtgcttaaggggaagacgcagagcgtttccttgagggcagggatcgttgtcacactcttgtttgtgtcttctatcagcagggcct

SEQ ID NO: 256353 - DNA, 122 bp, Homo sapiens
gccacccctcctagggtcctcccagcgcccagccatgggggaactgtgccgcagggactccgcactcacggcactggacgaggagacactgtgggagatgatggagagccaccgccacagga

SEQ ID NO: 256354 - DNA, 122 bp, Homo sapiens
atataaacagtagggaaagagtcagcaacagtgaaaccatctgtttaaaatgggcaaaagcgattaagggaaaaaaaacaggtgaatttgaaaataaaccagggtaaggtaaattctagaaa

SEQ ID NO: 256355 - DNA, 122 bp, Homo sapiens
cagtccttgtgtccgaagactcggagtaaagcgggttcagccagagagcggccctgcgtccgccctcctctcgaacccgggtctgcgcacgtcgagccccctctctgcgttgagggtggccc

SEQ ID NO: 256356 - DNA, 122 bp, Homo sapiens
cacccaagagtgcggatggaccactaggctgtactgcctggggccctttaggagaaaatccgtcctcccagtctccccaggtctcttgcctttggcctgctctggttcctgttatagaatgg

SEQ ID NO: 256357 - DNA, 122 bp, Homo sapiens
atctgccgcttctgcttgagcagctcattgttgagcagctctagctcctgcttatgcactcggttctccagaagcacctcaggctccttggagttgacgcagatggcacccgtgacccgctg

SEQ ID NO: 256358 - DNA, 122 bp, Homo sapiens
tcctcgaactacatagagggagtgagcagagcctgtcagggcagcccggcagcaggtgcccgggagcccaggagcccgggagcctcgcgactcacccggaacttcttggtctccaggtcctc

SEQ ID NO: 256359 - DNA, 122 bp, Homo sapiens
cacatgcaaggcagaagccagtttttttaaaacccaatctgagctagccagctagcctcccgcaaagtgaggtgggtgggtgggtgtgggtgtgtgtgtgtgtgtgtgtgtgagagagagag

SEQ ID NO: 256360 - DNA, 122 bp, Homo sapiens
tcagtagttactcaagtgatagtcgctcttcctgggaggatcttagtgatcattaaggtccgggccacccttaataagtgcctgttaacagcagcagtcattgatttttgaaagtgtgtggt

SEQ ID NO: 256361 - DNA, 122 bp, Homo sapiens
tccggtgggaggcgaggaggtccaagggtccttcgtcaggagcctgtggccagctttccacgcatctgtgatgcccggcctcagcccctgtgtccagcgtgagggctggtggctgtggagac

SEQ ID NO: 256362 - DNA, 122 bp, Homo sapiens
gagtcaggatgcctgcaatgggggaggggcaggcagtgaactagcgacagtgggggtgtgcgcagggatgcaggcagctaggctcccccactggccaggcagttggtatgctccaggatctg

SEQ ID NO: 256363 - DNA, 122 bp, Homo sapiens
tccaattctcattttacagagctagaagttgaagcttagaaagtttccctaggccgggcgcgttggcttacgccagtaatcccagcattttgggaaaacgaggcgggggggatcgcttgggc

SEQ ID NO: 256364 - DNA, 122 bp, Homo sapiens
cggacaagggagagccagagcccgtcctacttcctgccagccatgacccccactcctctacggggacccctagacccaaagcctccagcctgctatgttctccatgctgactggcctcactc

SEQ ID NO: 256365 - DNA, 122 bp, Homo sapiens
agcatgctcggctgggcccccgcactctggaggcttgagaatctctctatttttgaatgacgtccttatcctctgcccccaggctggtaaccaaaggtctgggggtggtgacgtgctgggaa

SEQ ID NO: 256366 - DNA, 122 bp, Homo sapiens
cgctccggaaatgcgtcagagaactgcctcgagcgcgttttccgcgcagatccgagaattcgcgagaatctccgcccagccagttcaggccagggcggtcagagacaaagggcctgggttta

SEQ ID NO: 256367 - DNA, 122 bp, Homo sapiens
agacagacttgatgcagagaatcatgcccaggtgcaggagggcgctaagttagcacgcggcgtgagcggccgggcaggtcttcctgtgggattagcagagagtcgcttcgccctcagagcac

SEQ ID NO: 256368 - DNA, 122 bp, Homo sapiens
tgctttcctcgtggttacagcctcgcctgcaggttcgggcactgtggggtggggcgggaacgtggctggcactatgaagtatccacctttctgcgggctctgccgcctcatccctccaacag

SEQ ID NO: 256369 - DNA, 122 bp, Homo sapiens
caggtaggggactgcgttgctcgctgcggtgcaaccgacccagccggggcgcggaccccgcgtgcgccagggctcccagactcgcctgcctgggctgaaatatacacgctcgcacagctgag

SEQ ID NO: 256370 - DNA, 122 bp, Homo sapiens
cttgggtgtgagtgacttgtgtctctgggtgctgaaggccagagggtgcaagggcctggacgtcgaagtgtgtcctagggacgcagaggctagccaggggcagagtctttgcagtgtgggcc

SEQ ID NO: 256371 - DNA, 122 bp, Homo sapiens
ttaaatattatggattgaaatctaggtgagctcttcttattttacagatggggaaacattcgttcaacaaatatttattgaatgtccagagagtagactaggaatgcatggaatgcatgatg

SEQ ID NO: 256372 - DNA, 122 bp, Homo sapiens
cactgcacagggcaggtgtgagggctcccccgagtctttggcagagaacgcagataacagcgactcccacagcctgacctgggctggggggaagctgaggcacttgtcagtagcacatgggt

SEQ ID NO: 256373 - DNA, 122 bp, Homo sapiens
agagcaagatactcttgacctgactgtgtctgtcacttggctccagctgacttactctgacgtgcctggagaataagtgtccggcacgtgcagagccaagggagaaggaaacccagaccctg

SEQ ID NO: 256374 - DNA, 122 bp, Homo sapiens
accaggtgccttagagtgacagaatctgttctctctggagccgaatgtccaaaatcaagacgctgcagggctggttccctctggcagctccagggaggaccctcccccggcctccctcctgc

SEQ ID NO: 256375 - DNA, 122 bp, Homo sapiens
agctgtgattcaatcccagatgtgtgggtttaaaggcatcccacaccctggcaagaccaccgaggggccccgggccacacggctaggctactgggaaactgccccattaactacccagagga

SEQ ID NO: 256376 - DNA, 122 bp, Homo sapiens
cccctgccccaccccgcgccgggactcgcgcattcagctggaggcggcggcttcctggtgcgcgcccagccctggtgccctgctctggccctcgctccgcaccaccgccccgcctctaacta

SEQ ID NO: 256377 - DNA, 122 bp, Homo sapiens
aagtcctgacctcaagtgatcctcctgccttggcctctcaaagtgctggaattacagacgcgagccacagcgcgcggcctagatggaaacagttttaaaatgtaaacctagagcgagaaata

SEQ ID NO: 256378 - DNA, 122 bp, Homo sapiens
ttcgcaagactttgcttgctcagctcctggcactgcagactggacctgctgcccccaactcggcggctaccgctcttcctggcaaagccttgggaatacttaacttagcaaggtctttctga

SEQ ID NO: 256379 - DNA, 122 bp, Homo sapiens
atcctggaggcggaggttgcagtgagccgagattgtgccattgcactccagcctgggcaacgagcacaaaactcttggctcaaaaaaaaatagaggaagctatgaaaagagtacaagaagca

SEQ ID NO: 256380 - DNA, 122 bp, Homo sapiens
gaatggagtgggcagtctttttccatctctaccgaagttgatgttcatttttaatcttttcgcccctcacgcttttgtaataatggtactaagactgagtgttatttagattttattgttgt

SEQ ID NO: 256381 - DNA, 122 bp, Homo sapiens
ggggagccgcacctcttcctgccaatcagcccagcaaccggcgaccccaagcgcggcgaccgcaaagggagtgcttgcccatccgcgtttgaaagcagactttttctcggcaggaacacagg

SEQ ID NO: 256382 - DNA, 122 bp, Homo sapiens
ttaaaagctttccagatggttgcagtgtttagctaacaggagaaccatggtcttgaatgacggctgttcatgtgggctggtcactccattttgctccttgtgctctggctgcagtgccttct

SEQ ID NO: 256383 - DNA, 122 bp, Homo sapiens
gccgatactcaggccagtgttgtttcccaacctctccactagatacgcacacttagctcacggtctgcctcatgagtcatcccagttgagctttaccaaatgttttgccccacctaacagcc

SEQ ID NO: 256384 - DNA, 122 bp, Homo sapiens
cctgatgtcacaggcacaacttcctgaatctggctcgccgttccgcccgctccaggggctcggcccaggctttccaccctgggccagcccacctcgggtgcctctggccttgggcgcacacg

SEQ ID NO: 256385 - DNA, 122 bp, Homo sapiens
ggcctgctgggtgtcagcagcagctaagctggatgcaggtactacaaaatgaccagcgctcggtctctgcttcctcagccaagtgcacaggtcagccaggtgggcactgaagtgaaaggctg

SEQ ID NO: 256386 - DNA, 122 bp, Homo sapiens
gcccacaatcttagcacttcattataccaggtctcaaatggtttccccaaatgttctattcgaacatatctcaccttctaacaaggcagcaagctcctccagagtggggacaaggctttcta

SEQ ID NO: 256387 - DNA, 122 bp, Homo sapiens
gaatattaagtaagataatgtgaaagggcctggaggtggctagctctccagttagtatctcgcagagcgtaaactgccgaatgagttggggggtaggtcatattttaaagtgttttatcagc

SEQ ID NO: 256388 - DNA, 122 bp, Homo sapiens
gcagtagtcactgctcttcaccacctccagctgccgcacgcaacacacgtaggccaggcgcgtctgaatctctgccatgttcaacacctgctgccgtcacagccgcctgagtctcctgcccc

SEQ ID NO: 256389 - DNA, 122 bp, Homo sapiens
ctcttttttctccgtcaatttcagcatactgcagaagttatgccttttgtatttgtccatcgagaaaacctcagaggttgatgtctgctactagaccggccagaaagtctggtctctcacta

SEQ ID NO: 256390 - DNA, 122 bp, Homo sapiens
ctcacagtcacagagctgctcatccgccggtccacatgacctcccaccactgtggtggtccgcacagtgcgtgtcactcggtattcctcgaggctccgggagctaccactggtgagacctac

SEQ ID NO: 256391 - DNA, 122 bp, Homo sapiens
aaagggcctcctcacacaccctggacccttggcccactcctgccgcgcccccgcctcccacgactggcacccccgggccgccccaatccttcagcaaccggtcccctcccctcgcctccctc

SEQ ID NO: 256392 - DNA, 122 bp, Homo sapiens
agcaagcctggcgtgccggggagcgagaaaagggggagggcagtcttttcccatttgtctcgctggtcgtcagaacaggacaataagaggcttcctggccaaagaacccatgagattttcca

SEQ ID NO: 256393 - DNA, 122 bp, Homo sapiens
ccgtcgttcaacagcgtgttattgaattaccggtagagcctgggctgtttaggtagcacccgggccatggggacctggcagtgaggatgctgtggcacgcacagagacacagcaagtcagtg

SEQ ID NO: 256394 - DNA, 122 bp, Homo sapiens
caaaacaaggtcaggcacggtgatgagaggctttcccaagctcttggtgggcggggagcacgaaccactgagagccacaacaggagaggcagagcagagcagccatcttttggtgaccacag

SEQ ID NO: 256395 - DNA, 122 bp, Homo sapiens
agaacagtcaacacagcactagaaagtctaacgacactgaactagaaaggtattccaaatcgtcctcttctctaagaggctgtgttcgcccaagcacctcgacaagctgaacttcagcttca

SEQ ID NO: 256396 - DNA, 122 bp, Homo sapiens
cgatggtgcgagggcgaagcgattggcccgaggccacgtcaatcaaggcgacggaggaggcgacaaccccgcctcccgccagcgcctcccttcgggctgggaggccactaagggctcgagaa

SEQ ID NO: 256397 - DNA, 122 bp, Homo sapiens
aaataacatgcctgaaggagggtgggttcgctggggaggaggacagaggcgaggctgacgcgtggaggcaaggccagagtttttcatgagcattttcttggaagctgccagcgggcatcttt

SEQ ID NO: 256398 - DNA, 122 bp, Homo sapiens
catctgcgtcagagataggaggtctcaatgccacgggcaggggcaactcggactgtggggcgtggaaaggactggggaagactggatgagaagggtagaagagggtgggtgtgggatgggga

SEQ ID NO: 256399 - DNA, 122 bp, Homo sapiens
tcgctcgcgagcccgtgcgtgcagcagccagagcctgtgaacttcgtggaatgctgtcgacgtgcggatcatcatctttacgttgctattaaaacagctcctggcactacaaagtagctgcg

SEQ ID NO: 256400 - DNA, 122 bp, Homo sapiens
aaatccaaggaagacttttctgtacttaacaaactacaccactcagcagcaatccaaagtcgatcgccccttccttcttcaaaaattccctacttgtgtgaaaacaaatgcttatgccttct

SEQ ID NO: 256401 - DNA, 122 bp, Homo sapiens
caaaggccccgccacatcccggaagccgccctgtcctctcctgccccgtgcctgattggacggtttccagcccagcgtccctgattggataacttctaaggtcctgcccccgcaaaccctga

SEQ ID NO: 256402 - DNA, 122 bp, Homo sapiens
gttctgaacctaggcttcaaggggccttacaagcttccattcttcttcttggaaccctgccgtccccacctgaacaagcctgggctagcctgatggagtatgagaggccacataaaggacag

SEQ ID NO: 256403 - DNA, 122 bp, Homo sapiens
tttttcttactaggttgtttgctacatgaaaagcagactcccagaggtttctgagattgccgacatcctatgcaagatgactgctcccacccacccgcccacccactcactaataagacata

SEQ ID NO: 256404 - DNA, 122 bp, Homo sapiens
cttccgtttggcctttgggctcaagttcctgtggtgtgagggtgtagagtgatttggtgccgggaagggctgtgcccccagcatcatcgtgtctgctcacacccaggacagggctggggcgg

SEQ ID NO: 256405 - DNA, 122 bp, Homo sapiens
aagaggcagcccgcccgagccccaggcagcatgttcctcctgtgccctgggtgcattaggcgagatcaggcacgttcagggtgatatgacgatagacagtgctccaggagcattaggaaagg

SEQ ID NO: 256406 - DNA, 122 bp, Homo sapiens
ggtctaaagagcaaaatgtgagcatccttgccacagggcagaaatgatgctgaacgtgcacgccacatcaaaggacatacgtgcttaagggacttgtgcttaacaattactgtgattagtcc

SEQ ID NO: 256407 - DNA, 122 bp, Homo sapiens
ccatggcttctcttctggggcacacgaggtgaaacgggctgtcctcgtgatgtctgagaccgggcgtcttcaacaggccctgcttaacattatgattaaacagggctttcttaccattatta

SEQ ID NO: 256408 - DNA, 122 bp, Homo sapiens
tactacccatctctctttacctttgaagctgtccaggtctggggacgccttacagatgtgcgagggggcaagggaaacaaggagagtgcctattccaaatctcggaatctgctgtaaactca

SEQ ID NO: 256409 - DNA, 122 bp, Homo sapiens
tgaggcccagagaggggaagtgactggctcaagaggcaccacgaacctgtggcaaagctgcgcttggaggctaatttgccttcctctgggtacctgtttccaggggcctctgggccgggcgc

SEQ ID NO: 256410 - DNA, 122 bp, Homo sapiens
gtgagcagctgataccctgctaggtgctggagagtcagaggtggacatcagggcccacctcgaaaagttgacagtctgtggtgggctgaagccagtagaaagctgctgtaggaaggcagagg

SEQ ID NO: 256411 - DNA, 122 bp, Homo sapiens
ggcgccttgacattaacccacccctctcccggttcagctggtcacctcccagcgctgtttcgagtcaggtaagaggcagctgtttaggagttcagcaaggaggcagaagagcaaagaaggac

SEQ ID NO: 256412 - DNA, 122 bp, Homo sapiens
aggtagtacagcacgtctcccccgtgatgttttttggcttttatcttacatataaacaagcgtacccaggtggacgccttcctcctcgtgcttttgggaacaccctgctctatggagtagcc

SEQ ID NO: 256413 - DNA, 122 bp, Homo sapiens
cacctcagggtggctgctcaggcccaggtagttgttggcacgttaagttgaggattcctccggagacgccgtccacgtggatgtgcggcccctgacgggacgtgatgacccgctcactcttc

SEQ ID NO: 256414 - DNA, 122 bp, Homo sapiens
aaataggctgaaacatctagtcactgtttgtcaactgattggccagtgggtcgaaagaagcgttggcctgatgctttattgtgacaatgtttcactagcccaggaatgaaatcacagaagta

SEQ ID NO: 256415 - DNA, 122 bp, Homo sapiens
tcacagctccggtgagtttccctgggcgacagcactctgtgcaccgtcacacacaatgtgcgggaagacagtcgtgtctgggaatgacggaagcttcgtgtttgggacactcccaggcctca

SEQ ID NO: 256416 - DNA, 122 bp, Homo sapiens
ccacagtattgacaatggcaacaagttgtaggtgttcaataaatgctgaatgaataaaaacggcttggaaaatggaaaaccatggaagaaaaaaatgcatttcaagtattttaaaaagcagt

SEQ ID NO: 256417 - DNA, 122 bp, Homo sapiens
gtgcagcccggccgcgctgcaggagacccaccaggaccccgagctagggtgcagcccggccgcactgcaggagacccaccaggacagaaggctgtctctaagagaaagagatgtggccgggc

SEQ ID NO: 256418 - DNA, 122 bp, Homo sapiens
attggaactgaccaccagtctgctgagactggaccactaggttgtgtgtttgaaagttttcgttggccaaatactaccaaaattatatgatttggaaaaggattatttaaaagctgttattt

SEQ ID NO: 256419 - DNA, 122 bp, Homo sapiens
gtgtcagtgagagagacacttttattttgccgctatccagaagtgctagctggacagtgacgctattaaagcaaagaagcaaactttttatagtaaataacagataaaaacactgcaacaga

SEQ ID NO: 256420 - DNA, 122 bp, Homo sapiens
tgatgccccgtggtcccctcccttccccggccttgccctgactggctctggctgcctgcccgatgccctctctggcagcccctctgcagggatggctgctctcagggcttggcctccggccc

SEQ ID NO: 256421 - DNA, 122 bp, Homo sapiens
gcttgagacctgcagcccgccatgcctgagcctcccccgctccgtgggctcctgtgcggccgaggagcctaccctacgagtgcagccccctgctccacggcgcccagtcccatcgaccaccc

SEQ ID NO: 256422 - DNA, 122 bp, Homo sapiens
ggcccacccccaggaaggccacagtgctgggcggcatccctgcagaggaaagacaggacccggggcccgcctcacaccccagtggatttggagttgcttaaaatagactccggccttcacca

SEQ ID NO: 256423 - DNA, 122 bp, Homo sapiens
gggagcaggctggcagagtgaccgggattgatgagcggcgcagctctggagggacgcgggcgagagggtcgctcctcggggagagggctgggtgagtgaggacctgcgagccacccccgaca

SEQ ID NO: 256424 - DNA, 122 bp, Homo sapiens
tcagccacagaacaggccatgaggaccactacctggtaattttgaaatgacactctagatcgcgaggggtgtgactcagcagggcccaagccggaggcaaaaccttgggcaaaatcttgacc

SEQ ID NO: 256425 - DNA, 122 bp, Homo sapiens
agccccccaccaggataacccagagtggggtgcttgggcggaggctggtcagcacctccacgtggtcatgactgaccagtctggggagggggagggccctgagtatcagtgacagactccag

SEQ ID NO: 256426 - DNA, 122 bp, Homo sapiens
cttaccatcacgttaccgctgcccacagcattcagtgcactaacacgctgcacaggactgcggactgggtgtgtcaggctgtaccagccaagtctgtgcaagcaaactccatgtttacataa

SEQ ID NO: 256427 - DNA, 122 bp, Homo sapiens
gtaggacacggagccgctctgggctttgctttcctctgtcgaatggatgtaccagggcatcggcccctggtgaggaaacgtcccctgcagctccaccgtaactgcgcacacagggaagggct

SEQ ID NO: 256428 - DNA, 122 bp, Homo sapiens
gcacacagcaagtgcgaggctctgggccctgacgcagggctcccaagctcccggaatcggcgttctggctgcaggcctggtctagagtcgcagcttctgtgagaagcaacactgaggcgggc

SEQ ID NO: 256429 - DNA, 122 bp, Homo sapiens
cgaactcctgacctcaactgatcctcctgccttggcctcccaaagtgttgggattacaggcgtgagccaccacgcccaggcttcacacttgattctaatgatgggtttattgcctgcctctt

SEQ ID NO: 256430 - DNA, 122 bp, Homo sapiens
tattcctatggctttgcttctagggctttcttaggcctctttgccggctgcctgggcagccgcgaggtgggctggagtaactgggtaaaagtatagggtggaatcgggcctactaggtaccc

SEQ ID NO: 256431 - DNA, 122 bp, Homo sapiens
tgggacagtggctgggcactttcccttggcctcaggacactggcctacctctgtggcttccgctccccagctccctatcaacgcccctcattgccacacctcacacctcatttctacctcta

SEQ ID NO: 256432 - DNA, 122 bp, Homo sapiens
taggagcaatctgaagaaagctgaggggaggcggcagatgttctgatctactagggaaaacgtggacgttttctgttgttactttgtgaactgtgtgcacttagtcattcttgagtaaatac

SEQ ID NO: 256433 - DNA, 122 bp, Homo sapiens
tggtggggtgggcagctccaggtgccggctccatgtgaggctgtggctggaccagatatacgacaagcagcttctgctgtggatatcagcatccggacaaggggaacatggtggcgcccaaa

SEQ ID NO: 256434 - DNA, 122 bp, Homo sapiens
caagcaccacgcgggggggtaggggcgccccagccctctactggccagtgtccctccagtcgtccagcccttgctgccaggggccccgcccatgtgcctggaatcacaccctggacgcttcc

SEQ ID NO: 256435 - DNA, 122 bp, Homo sapiens
gtccacgtccgccagcttctgtgcttgcaccacgtgttttcctgcgaaagggtcagagcgcgagtcaggtagacgtgcagtgtctgccttccaggagcagacaccagggcaggcctcccagg

SEQ ID NO: 256436 - DNA, 122 bp, Homo sapiens
ctctccaggggagcctgcagagtcagatgccccagcagcaaagctgagcgaagccagaagcgtgagggtcagtgcacgatgctgctctacccatggagctcccggggcgtggcatgtgcctg

SEQ ID NO: 256437 - DNA, 122 bp, Homo sapiens
ttagacttctgttggcatggatttttgcctttattaggagggttttatccaattttaaaacgatatttaagcactcagttgtagaaatgtttcagacttactaatgtttgtctaatttcagg

SEQ ID NO: 256438 - DNA, 122 bp, Homo sapiens
cccgggtcttaccatggcgaactccgctgcttcagcccaacgctacttccagacctcaaccggctgccacagctgctgagcgcccaactgcaatgacctgcccacgcgcgccgcacaggatt

SEQ ID NO: 256439 - DNA, 122 bp, Homo sapiens
tgtttttcaagtactagctcaattttattctctttgtgagccctttcctaatctgcaccccgagtccctcctggcactcatgtctccttgttttatatttgtcttccattctgggacttatt

SEQ ID NO: 256440 - DNA, 122 bp, Homo sapiens
gtacaattgccagggacattttctctttatgtcgattcagtggcacacatagaatgtgaacggttggtaatgacaaggtactgataccaggttgtctgcttagtattaggatgtacaaagct

SEQ ID NO: 256441 - DNA, 122 bp, Homo sapiens
tcgctaatccccgcgcggcttccccgcccatcgcctaatctcaccaatcgctgccctcctcgccccgtccgtcaccaggcgcctcatcccgccgaccactgtgcgcccagtccctgggacgc

SEQ ID NO: 256442 - DNA, 122 bp, Homo sapiens
tgtatggtgaaggggaggtgaaaggttatatttgcatttctgaagggctaagtaggaaaccgggaaccaggggagaggagaagagaagagaggataattttttttaagaaaagcaacatatt

SEQ ID NO: 256443 - DNA, 122 bp, Homo sapiens
gcaaaccacacagtgggcaaaaggaggcgttcctcgggtgtagaaaaaagtacactaggacgtgagtctaaagagctgggtgggtgtgagtatccaaagccatctcctatgggcttcttaaa

SEQ ID NO: 256444 - DNA, 122 bp, Homo sapiens
cttacgccaaacaactgcggtgagaccctggggtggacgctacggaggacgcgcctggggcgacggggagcggtgggagggctgcgggctcagccctcctacctctgtctccccttaggagc

SEQ ID NO: 256445 - DNA, 122 bp, Homo sapiens
agtaggatgtagtttgcccatacgacttttttaaagtatcgcattgactactgtttatctcgatgactgaagggttcttttggcatccctgtagcaaatgcgtctcaccctagtcctggtcc

SEQ ID NO: 256446 - DNA, 122 bp, Homo sapiens
gactggaagcgagggtggttctaatcccgttgatgggcagtagtcagcctgcttgcttcccggcaccggcagggcgagtgggccagctaatggcgcacgcacaggtgtgtttggctggtgca

SEQ ID NO: 256447 - DNA, 122 bp, Homo sapiens
aaaaataaagattgcaagtataggtacacacattaaggtacaagcacatctgttttcatgcgattactggtctctgattcacttctttgttctctatggtgagtcactcagagaatgtgatt

SEQ ID NO: 256448 - DNA, 122 bp, Homo sapiens
gcttatgaccgctttattgccatctgcaaccctctgctctactctgttcaaatgtccacacgtctgtgtactcagttggtggctggttcctatttttgtggctgcattagctcagttattca

SEQ ID NO: 256449 - DNA, 122 bp, Homo sapiens
tcgcatcccagatggggcggcggggcagaggcgctccccatatctcagatgatgggcagccgggcagagatgctcctcacttcctagatgtgatggcggccgggaagaggcgctcctcactt

SEQ ID NO: 256450 - DNA, 122 bp, Homo sapiens
aaaaaagcataaaacatacaaataaaaaaaaaacttcttggttccaagtaaacatgcctacgtataattatgaagatgacagggttgcacagtcaagaataacgtgggctcccagatcgtcc

SEQ ID NO: 256451 - DNA, 122 bp, Homo sapiens
cttcctgtctctatccctcccactacagagcatgattgggttaggttgttactatctaaccgggcacaccccagtagagcctgatttctttctaagctaccccatcgtcaactgatcctctt

SEQ ID NO: 256452 - DNA, 122 bp, Homo sapiens
gcacaaatctttaataatcctgaagtggcattggtcttttccccaaaacccaaatagaaacgtcagactccctccacctgctgctccacaccgcaactcaggtgacctaggacaggtcccac

SEQ ID NO: 256453 - DNA, 122 bp, Homo sapiens
cactcctgtggacttcttcttcgagttctgcgactacaacaaggaggccatcaagatggacgggcgctacctgaagggcgaccacgcaggggtcctaagggcctccgcggagaccgtgcacc

SEQ ID NO: 256454 - DNA, 122 bp, Homo sapiens
tgaaaccattctcgccccggcccgccccggcaccgccccttccaccgccccgtctaggcccgccccgccccggacccagccttggccctgcctgccccacccccgccagactccggcctttg

SEQ ID NO: 256455 - DNA, 122 bp, Homo sapiens
tctatagcaaccaccccaggtccacgcctagacggcgagtggcaagggtcaaaatagattcgcccagtagacgccctcgacctgttcggtcctcgccttcagtgcgatagacctttaagcgt

SEQ ID NO: 256456 - DNA, 122 bp, Homo sapiens
cagcagagccccatccgtcatggaaacgaaccgtcacagtggttctaattgtgctggatgcgagtgtggttctgatcgtgatgggactggaagcgagggtggttctaatcccgttgatgggc

SEQ ID NO: 256457 - DNA, 122 bp, Homo sapiens
gcctctccggggccttgctgactagtggtcgaagccacaggaccaggtgcgggtggccagcgtaacccgggcagccccgctgcttcccctcggccgcgccaggacgctcggcacgcggcgac

SEQ ID NO: 256458 - DNA, 122 bp, Homo sapiens
tcatagccagggcatagagggtgacattatcgaaattatcgccatgagtttacatccgttcggtcatcttcttcctaatatcctgggtgggagcggatgatatgaatcccaatatcgcaggg

SEQ ID NO: 256459 - DNA, 122 bp, Homo sapiens
ctggacacagctttatctcaaggtgctgacaagccccggggccctgttccttaataaatgcgtctttattttcagaaacatcagaagcagttataaagttgggcctccctcctccctcccct

SEQ ID NO: 256460 - DNA, 122 bp, Homo sapiens
gccgcaggcggcacggggctcagcagcccaggggtcctggcccagtgtgggccctgcggccgcccaggccagcaacaggcgcagcagcatcgcgatgcccccggactggtccggccccgggc

SEQ ID NO: 256461 - DNA, 122 bp, Homo sapiens
ctgtatctatgatgtaaagactcttactgtggccaacttcgagtcaccaacaggacatcacggcatgtggattgggaagagatggacacccccggctctctcaagcctgtgtactggctcca

SEQ ID NO: 256462 - DNA, 122 bp, Homo sapiens
cgtgatccgccctcctcggcctcccgaagtgctgggattataggcgtgagccaccgcacccggcccgtcgtcttaattgacagctgttgcctaccacaaaccccactgacaacagggcctgg

SEQ ID NO: 256463 - DNA, 122 bp, Homo sapiens
gcggaggctgggcgcacgtgggtgctgcagtagccggcggacgcccagggcgcacgggggcgcaccgagagacctcaccgaacccaaagagcgtgcggttcgtctcgcccaaaaccacagcg

SEQ ID NO: 256464 - DNA, 122 bp, Homo sapiens
aggttcctttatctaaagcacagcaccctcacatggtgctaaagggaaggacagtcttgccgagaagctggctgagatgccatctatgacagggcccagccctcattctgcaaggattttaa

SEQ ID NO: 256465 - DNA, 122 bp, Homo sapiens
acggccctggagggggtggctgtgatgtcccatcccgtccgtctgtctggccactggccccgccccccagacacctgtctcacctgtctcaccagagccatgcgtgttgcatcttcatgtgg

SEQ ID NO: 256466 - DNA, 122 bp, Homo sapiens
cgctgtgtaacccagtatttaaaaccacacgacaggcgccccacccccccaccccgccctcggattcagttcatctattgtcaagtaagagggtgggttccaagggtggcccaagcccgagt

SEQ ID NO: 256467 - DNA, 122 bp, Homo sapiens
ttggatgggagttcacggaagtcaggggatgtgtttatcacctcctgctccatcacctgtcgctgctcctggcagttggggaatggccaggcctggtcgcggggagaagcaggggtcaataa

SEQ ID NO: 256468 - DNA, 122 bp, Homo sapiens
gggctactcaaatgcaagttcctcgtgggaccacatccatgctagtggctggctgaaaaacggcttcatgactctcatgaggggaataaaaggcatggagtggtggctgtgagcctgtctgc

SEQ ID NO: 256469 - DNA, 122 bp, Homo sapiens
cattttggcacgcacacagggtagaccacaaaacagcagaggccagagcttgagggcaggcgtggagccgaggtaaaaagcacctgggagtttcttaataagcaggctgacgtggtgaaaaa

SEQ ID NO: 256470 - DNA, 122 bp, Homo sapiens
ccagggtctctttttggtccaaaggctagacctatagagttggatcactttttttctttccggtgaaataaatggtttttcaacttagggtatgtgtgctttgcgagacttcttgcttgggc

SEQ ID NO: 256471 - DNA, 122 bp, Homo sapiens
tacgatgggaaggtgggctcccagtggctgtgggaagacagtgggtgaagcgagcctgtccgcggggacagagcacctgatctccccacctcatccctgcagggcatcgggtgctatatgtt

SEQ ID NO: 256472 - DNA, 122 bp, Homo sapiens
tatataaaatttgtaaatttctaaagtgattactcataaaataaggatctggaaaaaagacgggagtttactactgtgaataattgttttgctttttgattaacttacgaatttagcctttg

SEQ ID NO: 256473 - DNA, 122 bp, Homo sapiens
aacccacccagacacagacagcacatgtgcattcccgctgaaggatactgacttacagcccggggaccatatttggctgatagaagttttgctttgttttgttcctggcctgttcatttgtt

SEQ ID NO: 256474 - DNA, 122 bp, Homo sapiens
ggcccatgaccccagagtctgcaccggaggagctgctggccgttcaggtggagctggagccggttaatgcccaagccaggaaggccttttctcggcagcgggaaaagatggagcggaggcgc

SEQ ID NO: 256475 - DNA, 122 bp, Homo sapiens
ctccccgctataatctttgggtccctggatcccaagtcccccgtctccaaaactaggattcgggctgtcttaccgcccccggaccctgagccttcgccccctcccccgtactcaccccaagt

SEQ ID NO: 256476 - DNA, 122 bp, Homo sapiens
tcagagcacgtggtgggtagggatcctaatttctagttactttctgcaaatgaggtgctacggggctccccagtgttacctctgatgctcccaactgtggaactttctctttgtactatgag

SEQ ID NO: 256477 - DNA, 122 bp, Homo sapiens
gtgccctgcggaggtggactctgccctggacagcacagacaactctgacaactgcaggaccgacagtgaggaggcggggacctctcaggctggctgggcgtgtgggcggacccaaggcagca

SEQ ID NO: 256478 - DNA, 122 bp, Homo sapiens
cttggggggccaggggcagggcctgtggggcggggcgggcctggcttgttgggcctgtgccgggtgtccgggaggggccagacggggtcttggaggggcggggccggggcctgtggggcggg

SEQ ID NO: 256479 - DNA, 122 bp, Homo sapiens
ccgccgggccccccgccgcaggcacccctgggctggcctccaggtcaccgtggaagaaggcgatacaccagaagaggaggccgaaaaagagccaggagacaaggaaggccgcggagaagatc

SEQ ID NO: 256480 - DNA, 122 bp, Homo sapiens
gcattaagcaccattattggaatgttgcctacaaaaatgttctgaacctccaagtaaccccgtccctcagcactttctaagctgtgaaattaatctcttctaaccttaacttgatttaatac

SEQ ID NO: 256481 - DNA, 122 bp, Homo sapiens
cagcttgaaacagcctctctatgcactgactcctccgctggactccaggtgtgtggtgtccggatcctactggaagattccacctggattcatgcatctgcatgaattccgtgtggccaaaa

SEQ ID NO: 256482 - DNA, 122 bp, Homo sapiens
gcatggctgccagggccttcctgcagtgaggcccaggtgtagtgtggcccggtggccggccggaccgcctgctgtctcacacccttgtaaggttactatttatctagtgcaaccgaagttgg

SEQ ID NO: 256483 - DNA, 122 bp, Homo sapiens
cggctgcggggagtcagctctcaccgcccacctccttcccagatagtctctgtgcccactcgacggcccggcaagcccagcccctgcctgccacggccacagcagcctcagagagctgccct

SEQ ID NO: 256484 - DNA, 122 bp, Homo sapiens
gccctcacgctcttgtggaagtcgcggaattactgcaggcggaacttgcagcactgtgggcgtcttttccagagaaggacggagttgtggggcgggaggataaggcaaggcccagccacttc

SEQ ID NO: 256485 - DNA, 122 bp, Homo sapiens
actgcatttttcccccctgatgtcaggatccaagagaaagtgaaaacctttctcctgatacggtcaatactggagaactgggaacaatgtcagaatgaccggccaccctgagccagcccctt

SEQ ID NO: 256486 - DNA, 122 bp, Homo sapiens
gaaggctcctcagattgctcttctcccccagtttttggctggtgttcctgtatgtgctcccgctgagctctgattgatagtcccccactaaagcctttgttatgcttctctgtgatcacttg

SEQ ID NO: 256487 - DNA, 122 bp, Homo sapiens
ccaagtactgcctgggcggtggcgggagtctggagcttggctgaaggcgcgagctgccgacgccgtctcctagcaaccaagcggcggtcacgtgacccgctccagcccgtttcacgtggtct

SEQ ID NO: 256488 - DNA, 122 bp, Homo sapiens
ccagcatgcctatgagaagcagcacccctggatcgacctcacttccattggctttagctacgtaattgacttcaacaccatgggccagatcaaccgtcagacccagcgccaacgccgcgtcc

SEQ ID NO: 256489 - DNA, 122 bp, Homo sapiens
ttcctcacctaccttctctgctcaccgctgtgtgctagcaatcggaggacccttggcacacggagcgacaggggcctcccccacagacacctcattttgggaaagaagtgagcaatttattg

SEQ ID NO: 256490 - DNA, 122 bp, Homo sapiens
aggcagcacctggggcaaggggagggactgatactcccggccggagcccaacctgtggcgcgtgcttcagtcctgagccagcggctccctggcttctgggctggcatccgtcctaccctcct

SEQ ID NO: 256491 - DNA, 122 bp, Homo sapiens
tgtaaactaaagttaaaaatatgagtcctcctagttgttatcagtgcctggtgaggatggcggatggtgaacctggccacacaggcacagcggttattgccagcaaccggggcagagggaag

SEQ ID NO: 256492 - DNA, 122 bp, Homo sapiens
caaaggtggtttccaacggactcagccgcacgcggcccctctgtccctccgggggacaggcgagtgtccctggggcctgcagggcagtcctgctggctgcaaaagagagaatcacgcgaccc

SEQ ID NO: 256493 - DNA, 122 bp, Homo sapiens
caaggaagaaagtcaatgtaggtagaggctgatgatgacaaaatagtcatcaagggacagcgtcttcatgagatcagggattaagtatagaagaataaggcagaggaagagatgaaagaaac

SEQ ID NO: 256494 - DNA, 122 bp, Homo sapiens
acagtatcacaggagtgtttctactccctgcgatattgggtgtcatatcctcctctcccacgtggaaattagaaacaatatcagtgggggcgtgtacaccgtctgtgatatttaaagtaata

SEQ ID NO: 256495 - DNA, 122 bp, Homo sapiens
gtggttaataagagtttaggttcattcttttacttcaccctccgcctcctggttttcctccgaggctccaagctacctgtaaaaccccggagccgcaggagagaaaaggaagccgtgagact

SEQ ID NO: 256496 - DNA, 122 bp, Homo sapiens
tcagctgtgttcagggaagtgtcaataccgtgacgggacggtgagcaggtggtgcgcaggcgtttgtggacctgagtgggcacgactgcgtgggcaactgtgtgttactgacttgggctggg

SEQ ID NO: 256497 - DNA, 122 bp, Homo sapiens
agaggctagaaaccaagcttcacctcctcaggcaagagatggtgagtgtggtgcgccagccgcgggggctgggacctgggctgggccaaaagatggggcgatctgagaatggggctgggaga

SEQ ID NO: 256498 - DNA, 122 bp, Homo sapiens
cggcgccgaacaatgagtcctaactttgtagtgggcatttaaagcccttccccacaaaagcggtgtctctctaatgaagcaatttgaatttggattggattttttccctctctctccccctc

SEQ ID NO: 256499 - DNA, 122 bp, Homo sapiens
aaataatgctttgcttgtcatcctgccttcaaaagcccctttagttttcagcaaccaatacgtaagaatcacaactcctacataagtaccttttggtaaacacattcaatcttgacctggaa

SEQ ID NO: 256500 - DNA, 122 bp, Homo sapiens
ggggctgtcggccagggccggccactcctcgggcgtggccccatttcccggggtggaggacgactcactgccagagagggaggaggacaggggctggttatttttaagcaaggattcacctc

SEQ ID NO: 256501 - DNA, 122 bp, Homo sapiens
ataaagcaatcttttcgcaaatgaaattacaaaagactgattgccctcttcctctattagcgtgttccctttacttattttccgtgtcttttttcactttttggcctccaaataactagaat

SEQ ID NO: 256502 - DNA, 122 bp, Homo sapiens
cttcttctatgctcactgcctgcttctttccctcataatgggccaaccgttgggattggccgttcgaatgttgtgtaggggagagactctgtgtcccagtgttgagagtggggattgtctgt

SEQ ID NO: 256503 - DNA, 122 bp, Homo sapiens
gagaagagaggaggtgggttaccaggcttctagcaagaaggacccagactgcctccctgacggggaggcagcacttgcccctctctctgagcctccgttgccttctctgcaaaatgagtaca

SEQ ID NO: 256504 - DNA, 122 bp, Homo sapiens
cttagtttctaagaacagcactcaatggatttaaaacagactggcaggcctgggaggggccgtggcccctaattggagggagcccctggcagttctttgagcctggactgcgggctgctggc

SEQ ID NO: 256505 - DNA, 122 bp, Homo sapiens
caggtccaacaagctcttggcgatggtgaccagtgtgcagtaatccttccaggtgtcccccgggtcaccgtgctccttggtcacctcgcgctcaggtagtcgcagccgctcggcgtccggag

SEQ ID NO: 256506 - DNA, 122 bp, Homo sapiens
ggtcctgggtccgatccagactccaccccttcctggttggtgaccttgaccagccacttacggtctccaaggcttagttcctgagaaagcagatgatgcggaatgaagggcttttaacgccc

SEQ ID NO: 256507 - DNA, 122 bp, Homo sapiens
gtactggcctagccgtaaagggctccgctccgcccctagagcaaccgtttcctcctcagtcggaccagagtgattgattagtttgttgtctaatcatcagtcgagcggccacataattacca

SEQ ID NO: 256508 - DNA, 122 bp, Homo sapiens
atggcccgcgtggcctttccccgggaccacccgtgttctcacacacccgcccagtgtctgcgagtctccgtgtttggttcccgtgtaccagacatgatgtattcagagccaggcagcaggag

SEQ ID NO: 256509 - DNA, 122 bp, Homo sapiens
aatatcttggcaatgttctctgccatttctagcctgatttcatctgcctttttaataccccgtgatttaaatggttgtggagattgaacgatctgaacttgtgtgaaagtacctgtctgaac

SEQ ID NO: 256510 - DNA, 122 bp, Homo sapiens
tggaaagtttgtgaaggatgccccatcagctgcctccaagccagagactcccctctcctgcgtggttggctatttccccgcccacccacagcctcaggcccaacaaggcgggtgggacttct

SEQ ID NO: 256511 - DNA, 122 bp, Homo sapiens
ggggcgggccggggatgattcaccttgaatgtggctccggttggtgcgcggcgcagggcacgcccgtccgggactgcggagacgccgggagccccgcctgcttgcccaacccggccgggtct

SEQ ID NO: 256512 - DNA, 122 bp, Homo sapiens
gattaactggcattctttaaaaaggcatcagttttcttttgcacaggtgtttggagagcccggactggatgcccactagaatcctgtgctggtttgtagatttccttaagaccttaagacat

SEQ ID NO: 256513 - DNA, 122 bp, Homo sapiens
actgactatagcatcagtcatcactgcacaccctacctggaattagtatataaagctacgcggagcgatctctgcccctgaccctggaaaaatctgtctcacccacaaagatgtgggctcag

SEQ ID NO: 256514 - DNA, 122 bp, Homo sapiens
gatcttcctgttcaatccgaggtcacctaactagataacaaagagctgaaactaaaagtccggtctcctgactcccaatccagtactctttctggtgtgctccagcttctggctctgcttag

SEQ ID NO: 256515 - DNA, 122 bp, Homo sapiens
agtggttatggaaacagaaatgcctcaaactggcacccataatgcttattaaacatgttacgggcagctttcacatgcccaacctgctgaggttgcagagcagcccttatgatctttattct

SEQ ID NO: 256516 - DNA, 122 bp, Homo sapiens
tgggattcattttaggtcccttagggaagtggatgttttcatgctgaggaaaagggttatcggaaaacagctgcattttgagaacatgcatactgtgtagcagtgatttacacaacccaacc

SEQ ID NO: 256517 - DNA, 122 bp, Homo sapiens
cagtagtggtttaaagaagggcgacattttctttggtgcttctgagtcctctgatagctccgcctaacttttctggccagggctgataaaggatactccctggaatggtcaagagcctcaat

SEQ ID NO: 256518 - DNA, 122 bp, Homo sapiens
aaccacttcctagtagacacagatggggccttgattggtgtctgtttaggccaatcaagacgggttttaggaaaagagactgtcagacataattctagtcttgagggattatcttcttcctc

SEQ ID NO: 256519 - DNA, 122 bp, Homo sapiens
cacttttcttagttgtgggagctgaatagatgaagtcaagtgaggagtttaacagctgctcgcaaccagtaaagccgtttagtctggaagttcaacctcagattccgctctttttcattgta

SEQ ID NO: 256520 - DNA, 122 bp, Homo sapiens
gcgttcagtcctccaaacgcctgcagggagggagctggctctcgctcgtggagttaatgtcgcttggaaagagactgagagatgaaacttttgctgcaggttataatttgaaattttgacgt

SEQ ID NO: 256521 - DNA, 122 bp, Homo sapiens
actcagacgcacgcgcactggcgcatcgagctcatcttcctggcgcgcggcgacgcggagcgcaacattttcaccagtgagcgcctggtcacgatccatgagatcgagcgcaagatcatgga

SEQ ID NO: 256522 - DNA, 122 bp, Homo sapiens
ttaattgttaagctgcagttgagttgttcaagtgagagttttgataagccacttatgggccgcgttgtgaatcacttgccagttgtactttatggagcttattttatgatttaaaatactgt

SEQ ID NO: 256523 - DNA, 122 bp, Homo sapiens
ccaccacgaagcgccttcaggaggccccaggattccaaaccaattaagggcctcctcttccgaaaacgggaggcgacgcgctgagctaagcgcgcaggctgggttgcgggccgacaccgagg

SEQ ID NO: 256524 - DNA, 122 bp, Homo sapiens
tccgctgcagaggacgggagtgcgaatctgggaagcagggttctggttgaactccagcttcgtctgcaacatactgtgtgacttgggcaaattatttcccccgccccgttcctgccagcttt

SEQ ID NO: 256525 - DNA, 122 bp, Homo sapiens
tttacgtctgtgaagaaacgcggtggcctgcggaagggtgggcgggaaggccggagctcacgttagctcagtgctagtgccacctagtggctgtcccggcgtctgccggtccccgggcactg

SEQ ID NO: 256526 - DNA, 122 bp, Homo sapiens
gacggcagctgtggggatgccacagagaaacatgcactgccactgaagtacatccagctccgcggagctagtgttcatatgatcaagaaaccgccagttgggctctgctagaaacttttagt

SEQ ID NO: 256527 - DNA, 122 bp, Homo sapiens
agatgaggatattacacccattaaattaaacgtctgctctaagatctcacagcatgtcagcggcagagcccacatcaactcatggaaaagccagggggatttccatgccgtcacttaacttg

SEQ ID NO: 256528 - DNA, 122 bp, Homo sapiens
ttcttccttttggtggggttcgcggtctcgctggctcaggagtgaagctgcggaccttcgcggtgagtgttacagctcttaaggtggcgcgtctggagttgctccttcctcccggtgggttc

SEQ ID NO: 256529 - DNA, 122 bp, Homo sapiens
gaggggtcaatccctgcgccacagagagagtcccactcgtccccagctgtgacccacagacgcgtggctgcaccttggaggtccacctggccgctgtccccattgcaggctgcacccatccc

SEQ ID NO: 256530 - DNA, 122 bp, Homo sapiens
agatggctgaggcgtcacaggctggtgggggtgctcgtggcccaggacctctgtggcttccgggaccggcctgagccgcgtggctcctgtccctgtggaagaggagccttctctgctttggg

SEQ ID NO: 256531 - DNA, 122 bp, Homo sapiens
gaggtcctgagagactgtgagagccccaactccattagtattatgggcctcaatacttcccgggttgcaattaccctgaagccccaagaccctatggaacagaacgtagctgagctgttgca

SEQ ID NO: 256532 - DNA, 122 bp, Homo sapiens
ttggggcggagcagctttggtcgggggtccggtgctggggcgggggccaggactgcaggccgcgcctgacgctctcttttcttttcttgcatctgcccgcgatcttctcccagacctttctg

SEQ ID NO: 256533 - DNA, 122 bp, Homo sapiens
agctgtacccactctctctctctttcttccccctgacaggaaagcatcactgagtcctggcgagtacattttagcattctcttaaaccatttatggggcattgaagctctcaggttgattga

SEQ ID NO: 256534 - DNA, 122 bp, Homo sapiens
cgaactcctgacctcaggtgatccgcccgcctcagcctcccaaagtgctgggattacaggcgtgagctaccaagcccggcctggaattcttcttaaattacttgtgttactaaactttactt

SEQ ID NO: 256535 - DNA, 122 bp, Homo sapiens
tattctatatcaacgacagactctcctctgccatttcctttcctgaatctagttaacattcgggtttaatttaaacgaaaatacatcgctgttcatttgaagagactggctttcccacagtt

SEQ ID NO: 256536 - DNA, 122 bp, Homo sapiens
tagccacgcgtgcaacgccccggagtagcaacactttccgctcagccggctgccttggcccgctgggtatttggtctccccaagggcccccgcccacagcccccggccggacctcggcccca

SEQ ID NO: 256537 - DNA, 122 bp, Homo sapiens
gaaattccccggcgcgggcagggagcggctggctgtcagctgagccgcgctgggcggggtcgccaggccgcgcatcagccctaggcaccccagtcccggctgccccctccgccaccgccgcc

SEQ ID NO: 256538 - DNA, 122 bp, Homo sapiens
ctgagagatataaaagagcagtctttccagcacctgcaaatccagagcggcgggcactgacgggcacttgcaccgtgtggacagactctccggttctgtgagtggtttttcttttcccgggt

SEQ ID NO: 256539 - DNA, 122 bp, Homo sapiens
tgctaagcaaccatttccttactcttgggccaatgggctgccagagtgttcctttcaagccggaatgaaggcagctgctggagaatgtaggctgtggaaaggatccactgctattcctctgg

SEQ ID NO: 256540 - DNA, 122 bp, Homo sapiens
tagaaaattacaaggaaatacatatccccaagcttcgtacacttttgttgacttgcaagtcgacttccagcccccaaaatttccaccagcctccatcccctcaattcaaagatggtggcaga

SEQ ID NO: 256541 - DNA, 122 bp, Homo sapiens
gagcctggcctctttcctggggaagctcggaaacatttcttcccagccatttgcacattccgagtgagaaacagagtctgtctccaccgatagcatctgggtgggccagcgctgtcgcaagg

SEQ ID NO: 256542 - DNA, 122 bp, Homo sapiens
cggcccgccacccggaagcagatgccggcggcgcggcgtggcagggttgtggttccgggtcgggccgcgccgcagccagctctcggctcgcagccgcagcgccccgcccccgcgctccggac

SEQ ID NO: 256543 - DNA, 122 bp, Homo sapiens
caaaaaaataaaaaataaaaaaagtggtttgtgtagtatcatcatatttagtgcctttctcggtgaatgatataacttggacgttcttccatgtcagatagctctacctcattctttctggt

SEQ ID NO: 256544 - DNA, 122 bp, Homo sapiens
ggctgcagcgggaagcgcctgtgggtcctcggcgctgactgcagagctgggtggaggcagcggaaccaaaactgctgtgtcactgcacgctgcagctgttgccagggtgaccgggtgagttt

SEQ ID NO: 256545 - DNA, 122 bp, Homo sapiens
ggttgccgtcgatgaccgactggtgcagcgccgtctggccctcgggcccgaacgagttcacgttgaactcgcagttggtcatgttctgcagcagcgactgcagctcctgcgtgttgcccttg

SEQ ID NO: 256546 - DNA, 122 bp, Homo sapiens
ccgccccgcccctccgccccgcccacaggtccagtcctctcttgccaggagctccgttggcgctgcaaccatcttgacttggaatcaaccaccctataggccacgctgtagccttagatact

SEQ ID NO: 256547 - DNA, 122 bp, Homo sapiens
actttcctctagtgctgtcccataaacctgaaggatatacaataacaaaggggacaattccgtgggacgaaaatcttattttaaataacttctctatactgacttcaagccaaatgaaaaaa

SEQ ID NO: 256548 - DNA, 122 bp, Homo sapiens
gttgtgcgtgctggctggcttctggtaagggcaggtctggtgcctctccgcacacaggtgcgaagcatgaacaccgggagggacatctggggcttttgctgctcaagaaataacggaactga

SEQ ID NO: 256549 - DNA, 122 bp, Homo sapiens
cttccgatatcgcaggggttgtccatccaccctgtgatactgttcttaatattcaaaggccgagaggttgatattattcccagcatcgcggaaagtgtgcagccccgtgtgaaattgttcct

SEQ ID NO: 256550 - DNA, 122 bp, Homo sapiens
gaattccgtaacacgcctggaatgtctctgcaggaacgcagccagaggccctctcagaaacgcggcccctcccagggcagcaggcggcgggcacgtgcggggccctcatgtctggtctgtgt

SEQ ID NO: 256551 - DNA, 122 bp, Homo sapiens
cggccccgcaggggtccctcccgggaaccgggggaggcgtcggtgccgcgggcgggtggccggttccgaagccacctcctgctcggaaggagggccaggacccagtctgcgggccaggctgc

SEQ ID NO: 256552 - DNA, 122 bp, Homo sapiens
cggatgctcctggtgaggcggatccggaacggcagttgggggggatctgggtccagggggcgcggtctgggcctgcaggaggcgggatccggcgggccagaggcgggaccaaggccggcagg

SEQ ID NO: 256553 - DNA, 122 bp, Homo sapiens
gattcctcaccttcagaacgagccctgccactgtctccaataaaatgttttctgcagcatcgacaatctctatggtggttttaaaatcctgtctggtgcttgaactcattttatctccctcc

SEQ ID NO: 256554 - DNA, 122 bp, Homo sapiens
cgattaaataccatgccgcagaggcccacgggatttgggggcggggctacggcgagcgcacgcgcatacgttgaccgcatgcgaccccggggagttgtgggtagagagttccagggaaggag

SEQ ID NO: 256555 - DNA, 122 bp, Homo sapiens
aaggagagtgtgttggaaccgtcttacaaatgcatctgttacatcaaaccaaagcctgggcgccttttctctctttcactttatcccatcctcacgctaaaaatacagctggaagataaaca

SEQ ID NO: 256556 - DNA, 122 bp, Homo sapiens
attccccaagaaagtgagcagacatctggagggtttttgctttcatgtaagaatgctgatcgaggacaatgctgaatatcatgtattccacctggacatctgatagaatttcaggggtctgg

SEQ ID NO: 256557 - DNA, 122 bp, Homo sapiens
cctcggccttaagatcttgtcgtttcttaaataagcgaacacgtgtgcacccccacactccgttcaagatgccgcgctctgtgggcgcctctgctcctcgctggttttcatgcagccacact

SEQ ID NO: 256558 - DNA, 122 bp, Homo sapiens
aacccaggcagccacagctgctcccctccctgaaagtgcctgggcaagaacaacagagtgcgtcactgctgttcaagggcagctgccagagatgctgagacaactgcacagcccaggcctgt

SEQ ID NO: 256559 - DNA, 122 bp, Homo sapiens
tgcagccctgccgagtcggaagcatctccattgtgcggatggggaaactgaggcccagagcgcatagttgggctggccacggaggcagggccgccggatgctgtgcggggatggggccctgc

SEQ ID NO: 256560 - DNA, 122 bp, Homo sapiens
tggcaggtgaaatatccacttctttctggagaaactccatattttatctaccaagaggaacgtcacataaaaacaccagggtctgatgtcattcatttttccagatttgggggtttagttga

SEQ ID NO: 256561 - DNA, 122 bp, Homo sapiens
ctttgagaaagagaaggctaaggggtataccagggccccaagtcaagcagtcctttatgacgtaagtccatctgtctttctcatagccagaatgcactggaacatgtggcagggctttggaa

SEQ ID NO: 256562 - DNA, 122 bp, Homo sapiens
gtcttcacagaaatctcttctctcacagttccggaggccagagccaaaacgcaggtgctgcggggcagggcctggctccctccacaggcccggggcggggtctgctccggcctctctctagc

SEQ ID NO: 256563 - DNA, 122 bp, Homo sapiens
tctaaagatccaaatgccaggagtggttctcccatatgtgacaggaaggcagagcagcagcgcattcactccactcccagattgtgctgagaggcaggagggctggagagagggagcctgtg

SEQ ID NO: 256564 - DNA, 122 bp, Homo sapiens
accgcgcgcgggtcagcgacgtcgccgccctccacactgccccccgaaatataagacaagcgaatgatcagaagaaatgagatctaactaggtcacagtatgtaaaagggactagtcttgga

SEQ ID NO: 256565 - DNA, 122 bp, Homo sapiens
gttttagctttgtttagtataacaagagctgcaggactcccaggccaataaacgtgttcacgtaaaactccagacagcttcttttagactggagtcttatcagggagacctcattttccctc

SEQ ID NO: 256566 - DNA, 122 bp, Homo sapiens
atatgtagacagtagaggctagaactggaattgtttttgcctaaacatttgctgcccccacgtgtccctttagaaaactgagtgttaaagctaaatcatgttcattagcaccttctatacag

SEQ ID NO: 256567 - DNA, 122 bp, Homo sapiens
tggggaaggaggcccggccaatgctggtgaaaacagaatcattcctgtaacagagagggccgttcctgcactcagggtgtccctgtgacttctggcttctctggacccacggtagcatttgc

SEQ ID NO: 256568 - DNA, 122 bp, Homo sapiens
tttgtttagaaaaggcgcagagagcggcagggctctctgcatgctgctgagtcagagcttcggaggcaactgggatctgcctcagtttcctggcctgtaaaatggattaatcaggcatgtcc

SEQ ID NO: 256569 - DNA, 122 bp, Homo sapiens
tgcactgtgttttgctggaacaaaatcaggaccttttgcattgatgtgacgaggcaatgacgaacgttaggctaagaatgggaatctgtccccatgggtttcctccaaccccacctcatttc

SEQ ID NO: 256570 - DNA, 122 bp, Homo sapiens
acctgacttctatgtgatctgccaagtggctttgattaaaaaatgcacaaactatgcttccgtgaaagtctggaagggaagcaggttggagaaacgatgagcctatgtatgtactcatgttg

SEQ ID NO: 256571 - DNA, 122 bp, Homo sapiens
ccaagtgcggcatggggttcgcgtgggccccccgccaggtgctgtggagtccgagtgggtcggctcaaggtcctggggtccccagcagccttcactgaactctgaagccagcctgcaggtgt

SEQ ID NO: 256572 - DNA, 122 bp, Homo sapiens
gatgaacttcacttttccttcctagagccatttgacagtcttttgccctgccggtaataccgtctgatttactaagttaccacattttataaacctgtaaagagctcctaggacacctgaaa

SEQ ID NO: 256573 - DNA, 122 bp, Homo sapiens
gcctggtggcttttaagaggagacacccggcgaaatgctctccagagccaaagaacgttccggctggagcgacctgggaggaagaacgagccgactgctggcccactccagcctccctgtct

SEQ ID NO: 256574 - DNA, 122 bp, Homo sapiens
tcccctacctcggcctccacctgccccttgcacgggcggcgccgcctgccatgcgcagcacgagcctcgctaatgcgtttcgcatggcgcgtcagtcaaacgcccttctaatgtccttaaag

SEQ ID NO: 256575 - DNA, 122 bp, Homo sapiens
cgccctccgcctccgctccgcctcccgcccctccgcctttaaaggcacagccgggcaccccgcccgtgccgctgggcaatactcggccgactcggccactttgcctttaaagaaacatcgcc

SEQ ID NO: 256576 - DNA, 122 bp, Homo sapiens
agcttagaaatagaaattaaagataaagatggtcacgtttgaccaaaagaacaatattttcgtactgagctttgatgatacaattattaatgaggaagatgattttaaaattaaattcccct

SEQ ID NO: 256577 - DNA, 122 bp, Homo sapiens
ttgtttctctgaaatgcgaatataactgggcatccagcactgtttggcattgttttgtttcgttcttgctaaatctggcagccctcgtgggaaggagagtgagtgtgagtgaggagggggaa

SEQ ID NO: 256578 - DNA, 122 bp, Homo sapiens
tgtttctttgcagcaccagggaacaagcattctgtttctaaataaacattttccatgtaacgtctcccaaaagcaacctgtctttcttttccttcctttgaaatcaatcttcgcagattatg

SEQ ID NO: 256579 - DNA, 122 bp, Homo sapiens
tgagttaacagcagtgctgggccctccgtcagtctgctacccgcccccaccccacaaccccgtggcgactcaggaatccattctctgtggtgcaaatcacaacacttgggcttcttgctaaa

SEQ ID NO: 256580 - DNA, 122 bp, Homo sapiens
atagcagagaccagtagcttctgtgacattttctgattagtcagatcagaacttgtaattcgtttggtgtcagcctagccacgaatgagagaactttcctgtcattctgcacctctttgaag

SEQ ID NO: 256581 - DNA, 122 bp, Homo sapiens
gcaagaggagacctgtgatggactcctcgacaaagttggggagatctagtcattctcatccgccagcaactgctgaatctccagagccatagcattgcaaatttggcaacagggatctgtac

SEQ ID NO: 256582 - DNA, 122 bp, Homo sapiens
aaatgggctttggtgaagctccaggtctagagaccttcgttcctgggtcccaggtagcttcggatcaaagcaacagcctgtgggaaatgctacctgcacctgcctctagctagccccagtag

SEQ ID NO: 256583 - DNA, 122 bp, Homo sapiens
acacaaggccatggggcgccatcttccctcccaccgcgtggggccgaggaagcccaaacccgcacctacttacatctccgtccatcggcctctggtcgtcacagtccctggtggggctaatg

SEQ ID NO: 256584 - DNA, 122 bp, Homo sapiens
ccacccctcccacggaggttttcctttctggtggctccttccttgggtgtccctttggtacgcccccaccctggcggtgagctgcgaggctggcgcccgcgtggccactgcgcatgcggacc

SEQ ID NO: 256585 - DNA, 122 bp, Homo sapiens
ccgccggccacgcgtcgcctcctctccaggcgcggggacccgggccgcaactgcaggaatcgacgctaggtcggcttccctggagcgccctccccagccctgtccagcctctcgatctttgt

SEQ ID NO: 256586 - DNA, 122 bp, Homo sapiens
ggctgttttctgctggggtccttacccatctgttctctcggctctttctgggttatcaggcgccagtccaagtcctcccaggcagccagcttcatggccagagattacgagcactaaccttc

SEQ ID NO: 256587 - DNA, 122 bp, Homo sapiens
accacagtataatgcttggcttattttcccattcccatcaagtattgttctacagttacacggtgttttctatttgttgttgtctagagcagactgaggatgtagcactgacccagcctgct

SEQ ID NO: 256588 - DNA, 122 bp, Homo sapiens
tcaataacgccagctattgtccccactgtggggaggagagctccaaggccaaagaggtgacgatagctaaagcagacaccacctcgaccgtgacaccagtccccgggcaggagaagggctcg

SEQ ID NO: 256589 - DNA, 122 bp, Homo sapiens
gattttatggctgcaaaggagccgcagacacctgccgtctccacgccctccacgccggtccgcccccagcactctgcaccctacacctggctccccaggcaaagcggccccgccaggacggg

SEQ ID NO: 256590 - DNA, 122 bp, Homo sapiens
cctgctgtgtagacgggacctcaaggagttcccgagggaacagatttgaaagcccagctccgggttccatggacagtgtttgacaggtcagcccctcgctgtcctcctatccccctcctcca

SEQ ID NO: 256591 - DNA, 122 bp, Homo sapiens
ggaggaaaggccctcctgcggcctaccgcaaggaaacgatcgcggcagacccgggactagcgccaaagggcttggaagggcggcgttaagaaaaatgggccgtacctacaacttctttcgca

SEQ ID NO: 256592 - DNA, 122 bp, Homo sapiens
ccttctttctttctcgtgtgctgggatccatatagaaggagatgggctccaccgtctggccggagaaagacctgcagtccaccaattaggctagttgctatagtgacacagccttgtcattt

SEQ ID NO: 256593 - DNA, 122 bp, Homo sapiens
tccccagcggagaagcgcagcagcgtgtggttggcgccctccgagtgggagaccagggcgcggactctcctggcgcccccgccgccgcccgggcgctcgccaaaggagttggagcgcgagct

SEQ ID NO: 256594 - DNA, 122 bp, Homo sapiens
cttcgcttgagaactaccctctcttttcatttttggcctccccgccgggtgagtggaaaccgcttgcacattctatagaacccgattctaatccagacgatccggagaatttgtacggtgac

SEQ ID NO: 256595 - DNA, 122 bp, Homo sapiens
aatcctggagagcttctgagtaccccgtattcattccaacattaactgactgccaggctgcgtgcggtattgctgaggaaagcagggaggcagcagggagaaagacatctctgccactgaag

SEQ ID NO: 256596 - DNA, 122 bp, Homo sapiens
ttttagaattggcagaagatgaaacaaaactacgtgaaaccaatgtgtacacaagaggcacgacgatatgggccatgctctgatcatttttttttcacggcctttgtaacgttggctgatag

SEQ ID NO: 256597 - DNA, 122 bp, Homo sapiens
cgaggtgcccctttctagtcatgagctcctcttaaggaccccaaaatgtctcagtggtaccggattgaaaattggggctggacggtgctctcctgctgaaattcgggagctacttagcagcc

SEQ ID NO: 256598 - DNA, 122 bp, Homo sapiens
cacttgtaaccgcgagtgacgccttctccctgtaaggccaggacgttctggactcgccgccgcctccggctacagaacccccagctttaccctacagacgcctctagggtcgctgcctgatc

SEQ ID NO: 256599 - DNA, 122 bp, Homo sapiens
tgacaaccacagtctgtgctcagcagccacgacgtgagtccgacgccgctggacacccagcgtcaactgctccccccaagcctggggcctccagtaactgatctgctgtgagacagggcggg

SEQ ID NO: 256600 - DNA, 122 bp, Homo sapiens
atttgatctaactccccgctcaccccacaacttctagactcgtctcccacaggtatggtccggctgagaccaggtggggctttttgaaagtgaactttaactggtcttgtagggaaaaccaa

SEQ ID NO: 256601 - DNA, 122 bp, Homo sapiens
ggccgcgcgcagtgcggggagctggaccccgtcccatcctaggtgggggagcggcgcaggcggggccagccgagggtgcagggggggcttttcttctaaacagtggctggtcgttaaaagtt

SEQ ID NO: 256602 - DNA, 122 bp, Homo sapiens
gggagggaggagaggggcaggctcggcgaggccatgtgatgctgggcgagagagagccgccgcgccggagcctccttctttcctgcctctgattccgggctgtcatggcgacccccaacaat

SEQ ID NO: 256603 - DNA, 122 bp, Homo sapiens
ccgggacccgctcctcagggctgacccaacttcctccggaaggggcgctctgcctctagtcgctcgccggctcccagccccgaccccagacccctcggacgcccccataggcctagctggcg

SEQ ID NO: 256604 - DNA, 122 bp, Homo sapiens
tccctcgagttccttgtactgtaactggagtatatctccctcctgagggtagctaaggaacgggttgggacagagggttggttttttgcaccaaaagatctattttggacatggacatgtta

SEQ ID NO: 256605 - DNA, 122 bp, Homo sapiens
gttcatgtgctttgcttcttttatagtttctgatgctctggtattaaagggaattcctgccgaggggcctttatattctggatatcacatatgctataggataggttttgtcctttctgact

SEQ ID NO: 256606 - DNA, 122 bp, Homo sapiens
taaacagcatttcatatgaggagccctcgcacagagcctggcaagagccactccttggtccgtggaccttcccgtcttttctcccttccacagtaaggatggagccgcctcaggaaaacatc

SEQ ID NO: 256607 - DNA, 122 bp, Homo sapiens
gggcagtggagagcaaagcccagctcacgcgccgccggtgcgctccaagtgccccggcggcggcaggagcagcagatccatcaccagccttctaggaaaatgggtctggggacctcctgcag

SEQ ID NO: 256608 - DNA, 122 bp, Homo sapiens
cccacaaagccggcgtggggttcccggggagaatgacattcaggtgtgcacgtgtgagaacgtgtgcgtgtgcaccagtgcttgctcacctgagtccacacgcaggtgtgcaagtgtgtgcc

SEQ ID NO: 256609 - DNA, 122 bp, Homo sapiens
agagtcttctagcggtcaagagcacctcaagccacttctttttacagaggatcccggaaccgctttttaaaaaaaattttgataaatgccaaaaagtcacacaaactgtagaatatcttagg

SEQ ID NO: 256610 - DNA, 122 bp, Homo sapiens
tctctccaacttgaaaccctctgcagctattgctctggccatgagccgggatggctcaagcgggggtgtcatctacctggtcactattacagctgccggtgtggaccatcgagtcatcttgg

SEQ ID NO: 256611 - DNA, 122 bp, Homo sapiens
tgggtaaactgaatggcatgtgaatgacatctcaataaagctgttagttaacccactccccgcttctcctctaaagaaggaagaggaatcaggagcctgtcctcactctgttctgtaggaat

SEQ ID NO: 256612 - DNA, 122 bp, Homo sapiens
caagctaggagctgggagccactgacgcccagggacagaagctggtgctgcagagaggggcggcgcagggagtccctcttcttttcctttttaaaataattgctttactgagatataactca

SEQ ID NO: 256613 - DNA, 122 bp, Homo sapiens
gctccttctgctgctgcttctccagctttcgctccttcatgctgcgcagcttggccttgccgatgcccccagcttggcggatggactctagcagagtggccagccaccggaggggtcaacca

SEQ ID NO: 256614 - DNA, 122 bp, Homo sapiens
actagttacttacatgtatgtttctcctaccagcctgtgcattcattgaaggcagacatacgttttattcatgtttgggtcaccttcacttagcatagcatctggcacattgaagaggggca

SEQ ID NO: 256615 - DNA, 122 bp, Homo sapiens
gatcaggagggaagacagcaggaatcattcattctgctcgtaggaatacagtcaggaggccgactttaaaactccgatcctccgggaaggccacgcggaggtgaggaacaggtcctgccctg

SEQ ID NO: 256616 - DNA, 122 bp, Homo sapiens
cgggtaccgccagagccgggcctgcaagcgcgcccttcggtcccacggtccgccactccacgtggtcaagatcaacagtttgttgagctcatcagtgacaccttgaacttttcataaagaaa

SEQ ID NO: 256617 - DNA, 122 bp, Homo sapiens
tttcaatttctccacatcctcaccagcacttgttattttctgggctgtggttgctgttatcgttgtttttggtagtagccatcctaacaggtgtgaggtgagctctcattgtggttttgatt

SEQ ID NO: 256618 - DNA, 122 bp, Homo sapiens
ctgacttcttgggtcctgttttgcagcaaggaaggacattccctctctgcccctgggccccggggccttctgttcccagcatggaagagctgggcactgtgacttggcagggcccggatcca

SEQ ID NO: 256619 - DNA, 122 bp, Homo sapiens
ccctcaggcctggcgcgcacgcattccagaggccacccagaccatgctccgctgcctgggcgcccaagctgcagtcgccctctgtgtgcaggcagcagcctctaggcaactcctgggcccgc

SEQ ID NO: 256620 - DNA, 122 bp, Homo sapiens
aaatcaattaaagcctaaaacctatgggtaatcatttttttcctccctcctcccccagatcgagaagtgcccgtcccctgtgcccttcatccacactaatttggctgcagtggctctcgttc

SEQ ID NO: 256621 - DNA, 122 bp, Homo sapiens
ggagaaccaaaccatccaacacatcctgggcagcggaaaccgaaatggcaaatgaatgaccgcgccggggcgcaagggaggaaaaacaaagccacctcccgccgtccgctacctgcggcgag

SEQ ID NO: 256622 - DNA, 122 bp, Homo sapiens
agccctgtcccatctcagtggcctgtggtggaccccagatccacagacacaggccctctccgcacaagggctcacgtggtccccagccaaggcccctacagcactttctacggagccctctt

SEQ ID NO: 256623 - DNA, 122 bp, Homo sapiens
aacaagctttctatatgaggctgactcatcccaaaggcagtaacaggcaaagccctgacccgggtgtagtcttgataacattctcaaagaaaccagggctcaaaggatgtgctctggagact

SEQ ID NO: 256624 - DNA, 122 bp, Homo sapiens
agtgaaacgggaaggtcctttctttccttcccaggggccggggccggaacatgtgcctcccgttccagcatctggctgcccgggggaggaaggacacccggggcgggcgccccacgccgatg

SEQ ID NO: 256625 - DNA, 122 bp, Homo sapiens
tctgaacgcccaaggccaacacagaggcctaaaaatagagcccgggaggcccagtcaaaccggaagagagccagaggcctccctggagtcccgaagacgatctgaaccaaggagcccagcgc

SEQ ID NO: 256626 - DNA, 122 bp, Homo sapiens
actcgggcgacagcaccttggcgggcttgtgcagccagaagaacttgttgaggtggctctcgtcgtgccagcgcgcctccaggccgcgcgcgcggtcccagtccaggccccccgcacagtgc

SEQ ID NO: 256627 - DNA, 122 bp, Homo sapiens
ttttttttttttgagacagtctcactctgtcgcccaggctggagtgcagtggcgggatctcggctcactgcagcctatgtcccttgacagtccacgggttaaagagattctcctgcctcagc

SEQ ID NO: 256628 - DNA, 122 bp, Homo sapiens
ttgatttttttaaaggattagaaaaatctaagcaactgcgctgtatgtcatagaattttacgtcagggacaaggagacctccatgaccaccagcagcagaccttaatgcctctttcacttga

SEQ ID NO: 256629 - DNA, 122 bp, Homo sapiens
ttgaatttagcctgcccatctacctgcaggtcaaagacccctgtgaaacatgatactagacgtggcttcagggtgttaggtctgagcccttctgaaaccctactacctccctggactgtccc

SEQ ID NO: 256630 - DNA, 122 bp, Homo sapiens
ggggctgtaccggaagttgcctctacttccgcccgttccggggcggggcttacttcgcagcgactacttgccgcacttccgggctgccaggcagctgctgtggctccaggatgatggagaca

SEQ ID NO: 256631 - DNA, 122 bp, Homo sapiens
aagcccctcctggagctctgaattgaggggagcactccatgccccttcctccaaagagggcgggagtcgcaacactgaagccttgctccaaacaaacccccctaccaaccctctctactcct

SEQ ID NO: 256632 - DNA, 122 bp, Homo sapiens
ctcccattaatcaatctatcatggctctttggagagaaggaatgcccccatttcaccggacggagggaatgctgagcaccaggcatgccagacattccaccggctaaaaaaagtgggggtgg

SEQ ID NO: 256633 - DNA, 122 bp, Homo sapiens
agggcggtggcgggggtgatgcagcggccgctgagggtggcgcaggggccccggccagcccggggctgcagcagtgcagacagctccagaagctcatcggcatctccattggcagcctgcgc

SEQ ID NO: 256634 - DNA, 122 bp, Homo sapiens
ctaagggaggaaaaggaactgctgggtctctgcaaagctctctcttcatgaaggcccaaacgcttgtaaggaaatgccttattaatgctcacaatatcccctaggaagagggtgtgggaaaa

SEQ ID NO: 256635 - DNA, 122 bp, Homo sapiens
aattgatgagatcagaaaaatccaagtaatcctaaatttacagaagccagattactaaaacgcaaggacatttttttgtaatgtagaaaagttatgtttcacagaggtttttgcaatgccct

SEQ ID NO: 256636 - DNA, 122 bp, Homo sapiens
ctcccgggcttcccgggaatccttgccccgggtggcgggggcgctggggactgggaagcgcgcggtgctctccagggtcctgaccgccgagtggccggcccctaggaaccgcgttcgaccgc

SEQ ID NO: 256637 - DNA, 122 bp, Homo sapiens
caggagtcatgggggactgcagccccgcccttagtaaaccgggtaagtccgggctcggctcgcctatgcaggagtgccatctagtggtcagagaatgtcacttcaagctagactacaggagg

SEQ ID NO: 256638 - DNA, 122 bp, Homo sapiens
cagtcctcggcggacagccgggtagcccaacttacccaggggtttgattgtgttctccgtcgcctccttctccttagagccgccgctcgacatgagcgcggcaatggagaaggcgttggccc

SEQ ID NO: 256639 - DNA, 122 bp, Homo sapiens
acaaacgggccgcggcgacacggggaccccgcggtggagagtgggcctgagaccccggcacggttgtgacaggggtcactctgcagacacacctcttggaagaatggaagtccacccgctca

SEQ ID NO: 256640 - DNA, 122 bp, Homo sapiens
gattaacagccggccctgcccagcagaagccctgactgcacaaagactcactcctgagtgcgcggtcggccccggctccgccctgcccgctgccctcggcgacggccgtggtccctgccctg

SEQ ID NO: 256641 - DNA, 122 bp, Homo sapiens
caagcatttgtttcctttattttctggaaagtgacatggtccatagttccagcatgattccgaaaatctcatgatgtgtgtctctttcttctaacctggatcttttacattttccccacact

SEQ ID NO: 256642 - DNA, 122 bp, Homo sapiens
ggaaacagactttggtgtttcatccacctctcagcgcgcttatcagcatcctgtgacggccggtgctgcaccctaacacacacctaatgacagacaccaacgccttcgcttggggagcccgg

SEQ ID NO: 256643 - DNA, 122 bp, Homo sapiens
ctgcacatcaggagatccccgcggcctgcgggacccgccccgccctcctgcccaggcgcccgctaggtggtgcctggctgggcccgactccgcccgcctccccattcactgggaactaacac

SEQ ID NO: 256644 - DNA, 122 bp, Homo sapiens
gttggatcccctcccactttctccccaagcggaagacaaagcgggggtctgagtgccgggcgtgcactgttgtgggtgcccttggcctggcccggtgcctccttcctggtcatgctcaggcc

SEQ ID NO: 256645 - DNA, 122 bp, Homo sapiens
tggcaaagacgatggatgcgctgagtttgaaagatgtcaagtcgaagcgcctgtgagaggcgcggggagagtcgccgggcagggagtttggcagcagcgtctggcgttcaggaaaggggatg

SEQ ID NO: 256646 - DNA, 122 bp, Homo sapiens
aggaaacgtatggactacaagtcccgaaatgcctccggcacttagctacgactgcacgtgcgcgcacagctgcccgccggaagaaccgagcttggctgtgtttatctcgttggggactaagg

SEQ ID NO: 256647 - DNA, 122 bp, Homo sapiens
gggaatgcaaaaactggtaaaaggagagataaaagagcaggtgcagtctagtgaagtacccgctacctcctatcagcaaatatctgtccacctagggtgcagcgagctggagaggaaggggt

SEQ ID NO: 256648 - DNA, 122 bp, Homo sapiens
ggcctcggtcacttctgtctcagctcagaagccatcgatggttccctattaccctctgcccgcagcccgggctccttcgccatgggtccaggccctcccgagaaggattacatgtaggaatg

SEQ ID NO: 256649 - DNA, 122 bp, Homo sapiens
atgaggaaccggactcacaatttctatttccgggactacaggaagggcagagaatactgacggttaccagtattaacccttcatctgttcttgaaactggttggggaatgaggtgataagca

SEQ ID NO: 256650 - DNA, 122 bp, Homo sapiens
tcttccatgttgtgctggtcactacccaccaagggggtcagatgcaggcaccgtgcagggcggttgtctctggacctgcgtcttggttatcatggagccagactgggcctggtgacagggcc

SEQ ID NO: 256651 - DNA, 122 bp, Homo sapiens
gagtctgcttttcccagagattcatagggcacaatggtcctggaatctggtttggccttgcggtctttgcaggtgatgatttcaggccactccacggtggtctcctgcacttctggctggct

SEQ ID NO: 256652 - DNA, 122 bp, Homo sapiens
gtgtgggcttggcgggtgtttgtggagcggagccggaggcaggtaagcagttattatagccgctttcctaataatgtgctcgggaacaaacccacttgaaagcggcagcaggagaaggttat

SEQ ID NO: 256653 - DNA, 122 bp, Homo sapiens
cgatctgtgtagggagcaggtgtggaacggcccgcccagtcagtgggtggtgtggatggccgtggcttagaggcctgaggccggaaggaaaggccttgcctcttacagcccttgtgacccct

SEQ ID NO: 256654 - DNA, 122 bp, Homo sapiens
actgtgtcctcccgcgtcctgccgatgtgagtgctgctgtggcccacagtgtggacaccccgcgcgcacctcccaccactcattccagtcccggccccatctaggccagcaccaccgaccct

SEQ ID NO: 256655 - DNA, 122 bp, Homo sapiens
tttggctgtttgagtggtggctttctcccacttcctcgcgtgggaatgcgatgtcccttgcgccccactcggtggcacatcctctccatttctcctcgcctgcgactgtgacaagcctgcgg

SEQ ID NO: 256656 - DNA, 122 bp, Homo sapiens
agggagctgcacggccagaagctgctggttgcagaagccaccagctggttgtacaagcaccgctcccctggttgtgggtgacagatgagatgcactcacgtgaacacacatgcatgtgcaca

SEQ ID NO: 256657 - DNA, 122 bp, Homo sapiens
gagagcctcaactttggaaggctcttctggaaacaggcactgcttcctgggcagctctgccgaagagagatcataatctcacagcagctgacagtctagcactgactttgtctggcatttct

SEQ ID NO: 256658 - DNA, 122 bp, Homo sapiens
tacggaaaaaagaaaaaatccccttgtcggctgcttcccaggctgtttcgttccatccagcgctggggcttggagaggcaggagccgctggcctgcagacacacgccgccgggcggctgggt

SEQ ID NO: 256659 - DNA, 122 bp, Homo sapiens
gcacagtgacgcgggatcagagtcctttctgtcctgggactgggaccgtgggcggtggctcggctcatggccactggtcaccctgcccggcctcaggctccctgagtgctctctgcctcagg

SEQ ID NO: 256660 - DNA, 122 bp, Homo sapiens
tggggacaaaaggcatggacagcagcacctctcagtgtctgcaggctgcagcgggagagccggcagaaagcagggtggtcccccgacacctagacattgggggagtggggtcaggcagcctc

SEQ ID NO: 256661 - DNA, 122 bp, Homo sapiens
tgctctggtcccctcacccctcaaaactccagatggaccaggcctccggaacggcactgccgcccacacactcaacacgcaggcacgcgggggcactcagttaccacaaagttaaaattaag

SEQ ID NO: 256662 - DNA, 122 bp, Homo sapiens
ttcggtatccagtggcgctgaattggaaaaagaactgggtgggtggggcctgctggccagcgcggaaaaagctcgggcctgcgcattggagctcttgactggcccgccccccaggtgcagcg

SEQ ID NO: 256663 - DNA, 122 bp, Homo sapiens
ctcaggtgatccacccatctcggtctcccaaagcgctgggattacaggcgtgagccactgcgcctggcccagatatggtatcatttctttggtaaaatctcaatatgtgcggtggataaaca

SEQ ID NO: 256664 - DNA, 122 bp, Homo sapiens
ggtgtgtctggggcagggcgcgtgtgcatgctgttgggtgatggtgcgtctggggcagggcgcgtgtgcacacgtgggtgacggtgtgtctggggcagggcgcatgtgcacgcagttaggcg

SEQ ID NO: 256665 - DNA, 122 bp, Homo sapiens
cccctccttaccccagctcagggtgaggggctcttgcagcccctcgtgctgcatatggcacgtgtatctctgctcttgtccagaaggcaccaccacagctgcccacttctggaaggttccat

SEQ ID NO: 256666 - DNA, 122 bp, Homo sapiens
aaagacttcaccgcaagccggagcgtcttagttcgctgcgggaagctggggtccttgctgcgtctgagccggtacacaatgagagggaagagcccggctgagcctgtggagacaaccgattc

SEQ ID NO: 256667 - DNA, 122 bp, Homo sapiens
ttgtttctcttgcacctactcaattccgcctttgtggtgcaaaagcagttatagacaatacgtaaatgaacagacgtggctcatggctgtgttctcataaagctttatttacataacaggca

SEQ ID NO: 256668 - DNA, 122 bp, Homo sapiens
ccattagtggccctctgtaactcaggccccatcctagccctgcagcaccttagggaatgacggccctcctgtttggtttagaatgctcatattctcatttattcaagtatatttcagttgca

SEQ ID NO: 256669 - DNA, 122 bp, Homo sapiens
tcactctgtcggctccaatcggggagtccccaggagttaaagaacctgagccccagccggcgcggtggctcacgcctggaatcccagcactttgggaggccgaggcggacggatcacgaggt

SEQ ID NO: 256670 - DNA, 122 bp, Homo sapiens
actggcctgacaacacccacggattgtctctcagttctgtaaggcaaagtccaggcacagcgtggctcacctgggttctctgctcagggtctcacggggccagaatcaaggtgtcaggaacg

SEQ ID NO: 256671 - DNA, 122 bp, Homo sapiens
accactatttatgtaatatttatgggagaccatgtgtgattcaattgaattgctctgtctcgctatagcagtttttaaaagcttcttcgattgttgaccggtccgttaagacatgctgccca

SEQ ID NO: 256672 - DNA, 122 bp, Homo sapiens
actgcgctgccccttggctgccccttccgctctcgtaggcgcgcggggccactactcacgcgcgcactgcaggcctttgcgcacgacgccccagatgaagtcgccacagaggtcgcaccacg

SEQ ID NO: 256673 - DNA, 122 bp, Homo sapiens
agcagtatgtgggcaagcacatcctcttcgtcaacgtggccacctactgtggtctgacagcgcaatatcctggtaagagaattcatagttacttctctttgggactaaattttccagctgat

SEQ ID NO: 256674 - DNA, 122 bp, Homo sapiens
aagggaaggaaagccgcaaaagggtgatggtccattgagattcttctgcagccccgagctcgtcatctgcctctgaaatctgtgatcggatatcacttttatctcgcttttccattctctgg

SEQ ID NO: 256675 - DNA, 122 bp, Homo sapiens
gggtcgaaaggaccgggaggaggaaacaggttagggaaactgcaggtcgatggcacagagcgtactggtgaaaaaatccagctcttcctcggaaaaagggaccgggctgtcgagagaaccct

SEQ ID NO: 256676 - DNA, 122 bp, Homo sapiens
agccggcgcctcccgcgccccgcggtcgccctggagtaatttcggatgcccagccgcggccgccttccccagtagacccgggagaggagttgcggccaacttgtgtgcctttcttccgcccc

SEQ ID NO: 256677 - DNA, 122 bp, Homo sapiens
atcatggacagtcattacaatgctagccatggttgagcaagattacttttactagtgatccgctgaaggtaacttgagactgcaaaaccagatgccagagtatcatttatttttcagcatgt

SEQ ID NO: 256678 - DNA, 122 bp, Homo sapiens
gcttgtggccctcctccagccttggtagagcagggactgcggagatgttttcctgctgtgcgggtttaggggcttctcggtggtctggccccggcctccccctccaccgtcaggtagcagca

SEQ ID NO: 256679 - DNA, 122 bp, Homo sapiens
gtgcttcataagctctcatttgatcctcaaaacctcatgagtcaaagagagacgacatcccggcaccactcatgttcataggccagctgaggctcagggggctgacttccctgcagctattt

SEQ ID NO: 256680 - DNA, 122 bp, Homo sapiens
tcatcctgcccattgcagggctaccactaccgcctcctgccctcagagagcagcaggcagcgtctgagcttcttcctttcctctcttccccctttcctccctccccatacccttctacagtt

SEQ ID NO: 256681 - DNA, 122 bp, Homo sapiens
tgaccacagcgcaaggcccagatgagaggtcggaagacgcagacccaggccacccaggggcgacacacttgaccaggtgacacctggtcaccgggagtgagagagagtagggctgtgatgga

SEQ ID NO: 256682 - DNA, 122 bp, Homo sapiens
ttgaatcaatcaagaactcttccccaaagagcaaactccttactgaggcctctggggtcccgcatgcctggctgctctctgcctcctactcgaaatctctttcagttccccagtatgctctc

SEQ ID NO: 256683 - DNA, 122 bp, Homo sapiens
gttgtccatgtgtccacagagtcccagtacccgctgttaagggtgaagccaactctgagccggaatgcatgtcagtgcagcccagcacacaggccctgtgaggaggggatgccccacggtgt

SEQ ID NO: 256684 - DNA, 122 bp, Homo sapiens
cacctgcccagggacggctgggaccggccccgcggccgctcgccacccctctgtccccaacgatacctgcgcccccgatagcccgcacctgagtatggggcctgaccgggccgggtcggggt

SEQ ID NO: 256685 - DNA, 122 bp, Homo sapiens
catgactagggaggaaggaaatgttccttctgctgtgtaaatcacacagcgtcagatacacgaaaagacaaacaggatggatctttcttttcccttcatacacatctgcaatgcaatgaagt

SEQ ID NO: 256686 - DNA, 122 bp, Homo sapiens
cagaaaccaccatgaactttgaccccgactgtttccttaataacccaaagcagggccagacgtacgggggtggaggcctgaaagccgagatggtcagctccaacatccggcactcgccaccc

SEQ ID NO: 256687 - DNA, 122 bp, Homo sapiens
caggagtcaagttgcaaaccttcagggtgagtgttacagctcataaaagcagtgtggacccgaagagtaagcagtagaaagagcgaaacaacagagcctccacagcatggaaggacaccgga

SEQ ID NO: 256688 - DNA, 122 bp, Homo sapiens
actgaagtgtcaagatgacttttcaggtggccctggtgtcgggcaatcaaggttcctcttcgccccttcccactcttgctgttagtggccaaactgcacagtgtattattttactctgttag

SEQ ID NO: 256689 - DNA, 122 bp, Homo sapiens
ccgggccgtggaacagcacaatggcaagaccattttcgcctactttacgggttctaaggacgccggggggaaaagctggtgccccgactgcgtgcagggtgaggccgggattcgggggctgc

SEQ ID NO: 256690 - DNA, 122 bp, Homo sapiens
tgccttttaaacccatcccctccgattcccctcctcccccctctctccctggtgtcaactcgattcctgcggtaactctgagccctgaaatcctcagtctccttggcggggaagattggctt

SEQ ID NO: 256691 - DNA, 122 bp, Homo sapiens
attcagatccccactttctgagggtgccctgctggaagataaccctgtttgtaattgtgccggttcttggacccttggttgccttgatcatctgctacaactggctacatcgaagactagca

SEQ ID NO: 256692 - DNA, 122 bp, Homo sapiens
ctgcctgtagctctcctgaacctctggtgcctccaggtcccggctcaggctctcggggctcgtcaggggccgagctccggctgccttagctgcccggctcacagcctctgagagaagcagct

SEQ ID NO: 256693 - DNA, 122 bp, Homo sapiens
aaggggtgacagatggcacctggaaaatcgggtcactcccaccctattactgtgcttttccgatgggcttaaaaaacggcgcagcaggagattatatcccgcacctggctcggagggtccta

SEQ ID NO: 256694 - DNA, 122 bp, Homo sapiens
tctaccgtcggggaggggcgacgaggcgaaagccttgtggaccaggccgggattggtgggcgggacggaaatggagctgggagaggtgacgtcaccttccgcacctggctcagggcggaaat

SEQ ID NO: 256695 - DNA, 122 bp, Homo sapiens
agaagaagccaaaaacattctgggtaaatataaggagcaagggcgcacagagccccagcccggcgccaggcggtggagcagttttccggcactggctccgctgacctacgataattatacga

SEQ ID NO: 256696 - DNA, 122 bp, Homo sapiens
catggacatcaccagtcttcgcaaggatcgtgttcctgaatcttctgcgttaggaataaccgtctcctttgcaagggctgaaccatgcttcccactcgcctgtcctctgccttcaccagctt

SEQ ID NO: 256697 - DNA, 122 bp, Homo sapiens
aggctttgagtctagggcctggggcagccaggactgacgggggtgcagtcctagaagggtcggcagtcacggtggcccaccatggcatctccgtatccttgctgcatgctgcacccactcca

SEQ ID NO: 256698 - DNA, 122 bp, Homo sapiens
cggccccctccccgcccaaacccgcgcgccgccacacactcaggtgagcaaggcgctgcgcgagtgtcaactgccccacctaaggcgcctgccttcctcaagccaaagtcgactcctgggac

SEQ ID NO: 256699 - DNA, 122 bp, Homo sapiens
cctgctcctcaaccccaagcaaccaaaggtaggttcctgccacgtcaggagtgtaggctccggagtcatgcccggtgcataaagatactcctcggcccccaaagaaatctggtttgataaca

SEQ ID NO: 256700 - DNA, 122 bp, Homo sapiens
gatcggcacctggaggggcgcgccgtgcacaatgagggcggggccgtggggctccgggtgcgggcggcggccgagtgcccacgtgggtgcaggctaggccgggctgatttccctggaacccc

SEQ ID NO: 256701 - DNA, 122 bp, Homo sapiens
ctggccccggggcccggccccccgcgcccgcccccatttcaggtgctgtcctctacccagcggccattcagggcctggcgccccacactaccccctggagcccctggctccggcccctccgc

SEQ ID NO: 256702 - DNA, 122 bp, Homo sapiens
ctgtgtccctgccccaaggtccaaggccctggaccttcgggaaggacgcccgatgtcccccgaagagcctcgacacatatgaggggcctccactccgcgcttccgttgtcggctcaattaca

SEQ ID NO: 256703 - DNA, 122 bp, Homo sapiens
acatcttcttgcagctgcagacatccacccaagtctgtttttagctcctcaatcttactgcgcctaaagggaaggaatatgcttattaagacccactgttttactggggcccactgtgtaaa

SEQ ID NO: 256704 - DNA, 122 bp, Homo sapiens
tgattttctcctcctctttgtgtacccgacggtgttgctgtgagctcaggaccatcccggcggctgtggatgggatcatcgtgtgtgtatggccacagccctccgcctcgctcgctcggtga

SEQ ID NO: 256705 - DNA, 122 bp, Homo sapiens
gacggcggtaattagggctttccaaccccaaatgtgggcgtgattgtgcaaaagaccttacgacaaataataataaaaagaaattcttcacaagagggtgaaaaaaatgtaccactactcaa

SEQ ID NO: 256706 - DNA, 122 bp, Homo sapiens
gctactctctgccctgggccggtgctagatgttttacatgcactgttaatcactgttactcgtggagggagattttattattaactttcttttccagatgaggtaactgaggctcagagagg

SEQ ID NO: 256707 - DNA, 122 bp, Homo sapiens
agttttcccctgtcccgtggagtccacaagacaggcggcagcttcaaggccggcaagttccgcgtctggggggctgcgggccgcccctgcgggaccggggggatctgggcgggacagggcgg

SEQ ID NO: 256708 - DNA, 122 bp, Homo sapiens
ctcaaactattggcctcaagtgattcttccatctcagcttcccaaagtgttggcataagccgctgcaccagtgagaacttttttaattatgggattgttttaatagcctttaatatgctaat

SEQ ID NO: 256709 - DNA, 122 bp, Homo sapiens
cggaggccccaggggcaggctgggtggccctttctttcaacctctctgcatttgtttctccgggggcagattgtggcagcttcttagagccccagaaagccgcctgtgggtgtcgtcatctt

SEQ ID NO: 256710 - DNA, 122 bp, Homo sapiens
gaacccacagaacccagtgactagtattgagctcgattaggacgcacccgggcgcttagccgtgcaggaacaatggcaagcctttagcccgatcaggaacggcaatgggcaacttgctggat

SEQ ID NO: 256711 - DNA, 122 bp, Homo sapiens
cctgtcgtgcgttttccttccaaccccatgcacactcattccaacataaagtcgtggaaacgggcgtgcactgggctgttcccgccgaacaccgggcgcgactcaggctgccggaggcttcc

SEQ ID NO: 256712 - DNA, 122 bp, Homo sapiens
caccctctgaaattcccaagaaggaagcatgccaagaaggaagcaccccaagaaggaaggcgcacaggacgctggtctggagccatccggttcccggtctgctcaccacgctcaaggagccc

SEQ ID NO: 256713 - DNA, 122 bp, Homo sapiens
gcagctgcgcgggcttatttattaacaggataacccttgaatgtagcagccccgggagggcggcacaggtcgggcgcaggattcagccggagggaagggacggggaagccgagctccagagc

SEQ ID NO: 256714 - DNA, 122 bp, Homo sapiens
cagtcgatcgaacaaaggcctctcgtcctttccgtacctgggaacgcagggcaggtggggcggggagtggaatgaaacagtctgatcggcggttattggcagaggaaaatgaaagaacaaac

SEQ ID NO: 256715 - DNA, 122 bp, Homo sapiens
tggccgtgcggagagagccggcatttgcgggtcactcgggcgcccctgagtgggcggcggcggcagcagacccctctccagggagtccaggacctgccagcgctggggattcttcccgaaca

SEQ ID NO: 256716 - DNA, 122 bp, Homo sapiens
cattggccctacctgcagtcgctctacgtaaggggcgttccagagtcagccactgggagtcgctggattcgggttttaaaaaacgccggccgtgaagtgggcggagcgagcgatttgaacgc

SEQ ID NO: 256717 - DNA, 122 bp, Homo sapiens
gctgacatcagcagaaagcccacgataagactgtggacaagtctggtgaggcaagtgccacgcaatgataattttccagcgacaccaacaagaggccaacaaaacacaatcaaggaactcac

SEQ ID NO: 256718 - DNA, 122 bp, Homo sapiens
cgaggaaggcagctgcagatgatggaatgccctcccaatggcgggaacaagcaaggcttccgcagctcaaaaggagaaacatgctttgcgctggagtcctcagaaaaggccacttccaaact

SEQ ID NO: 256719 - DNA, 122 bp, Homo sapiens
cctgtggcatttcacacagaagtcttaactgtaaaggcaaccttataaatgctttgtacccgaagaaactggccttttataagtaaatcattatgtagtttcttcctttggagggcagctct

SEQ ID NO: 256720 - DNA, 122 bp, Homo sapiens
tgcggcgccgcttgctcaggaagtagaactgctgccagtggtcgcgctcctcctccacgccgccctcgggcaccagcccctcctgctggcacttgagcagccacagcggggcgccgtccacc

SEQ ID NO: 256721 - DNA, 122 bp, Homo sapiens
cctcttgaagagacttacttccttgttcctggatatagaaccgggcagggtgtacacctacgcctgccctctactgtttgttagctgtattgcagcaccgaaataagaacacacatgtgcca

SEQ ID NO: 256722 - DNA, 122 bp, Homo sapiens
ggaatggttagtgagcccaggcaagaaactcatcagccgcatccttcagaacacactgggcgtcctgaacttaggcttctggggacagacacctaccctcgatattgttattccaacgagcc

SEQ ID NO: 256723 - DNA, 122 bp, Homo sapiens
ctttctccgtcggggtggatgggttggactttaggctccagcaagccccgccccactcggcgggtcggtgccgccgggtcccaggtgcccgctacttcccagaacctccgcctcccgctccg

SEQ ID NO: 256724 - DNA, 122 bp, Homo sapiens
ccctcctcaacctccctctctctccccttcgctgttccacagcaaagcctatagtgaaatcggacactttgcgaggattgcaaaccttagaaatgctccagcatccattttcccccctctaa

SEQ ID NO: 256725 - DNA, 122 bp, Homo sapiens
taagaacccaacttaacattatttcccctggtcaatttctgtggctgtttttgagaattccgaagtggaattctctaattttagtcattttcaacaccaaagttttcaccagagcttgcttt

SEQ ID NO: 256726 - DNA, 122 bp, Homo sapiens
ggctgcttcagcaggagtttgagcaggtgacctttccagttcagctatgctgtatgcctgcgtcagagattcagggttctccaaggcctctttgaatatctggaggctggaaacaggtttga

SEQ ID NO: 256727 - DNA, 122 bp, Homo sapiens
tctgcgactcccaccacttgccctcgtgctcatcaccaccgtcccctcacgtcccagttccgtctgaggagaagcccctgtctccactgggcgccatctccaaattaccttcgggacttctg

SEQ ID NO: 256728 - DNA, 122 bp, Homo sapiens
ctctacctgtaccgcggccccagcgcgccgccgcctgctctccagagacctctggtgccccgcatcctcatccacggactccagggcgccagcgagccgcccccgccgctgccccccctggc

SEQ ID NO: 256729 - DNA, 122 bp, Homo sapiens
gggtttcagtgcttttcactaaaggctttcaccgaggccccgacgccacgggtgttatttcgtcaaaactgaagagcgacgttggacagcaggctttcagtgtcttttctataaataacata

SEQ ID NO: 256730 - DNA, 122 bp, Homo sapiens
cgtggcggaaccggaaggcggcctagggacgcacgcaggctcggctgtctctttaggccacggagctgcgtagatccggaaccctgggcgactgatctgtccccattgggcgagacctacct

SEQ ID NO: 256731 - DNA, 122 bp, Homo sapiens
gaggagggagccagacaggccggggctgtaggcaggagcttggggttttcctctgtgctccgccagtaaagccagcagccgggattcagatgctttccgcgtggacttgatgctgggctccc

SEQ ID NO: 256732 - DNA, 122 bp, Homo sapiens
ggagaggcgtctgagggaccgggattattcagctgacccggtgcggggccgcgttctcagcgcgggcactagggggcggcagaggcggaggcgccagcgccgaggagaggcttccaccctcg

SEQ ID NO: 256733 - DNA, 122 bp, Homo sapiens
tgagaccagcctgagcaacatagttagacaccatctccactcatgacgcttggccactcccgccgtgggtccctctgaataagtggctgaaatctcctgaggggcccacctcagcatggacc

SEQ ID NO: 256734 - DNA, 122 bp, Homo sapiens
gaaaagccgaggacagccggactcaccctgtagttatagtagtgcgtctgcacaagatgccggtggcgcgacttgtggttgccgaagttggatttctcgcaaaccagtaagtgccgcggcgc

SEQ ID NO: 256735 - DNA, 122 bp, Homo sapiens
gcccgaccccctcctcaggccgggtgagcggcctcgcgggtcaccagactcccagaacgacggctgcaggccccagagtccacgagggtgggtacaaatcccctgggcacaaacagcccggg

SEQ ID NO: 256736 - DNA, 122 bp, Homo sapiens
ccggccaacacagtgaaaccccgtctccaccaaaaaaacacgaaaaccagtcaggcgtggcggcgtgcgcctgcaatcgcaggcactcggcaggctgaggcaggagaatcaggcagggaggt

SEQ ID NO: 256737 - DNA, 122 bp, Homo sapiens
cgagactccgtgggcgtaggaccttcggatccaggtgcgggatataatctcgtggtgcgccgttttttaagccggtctgaaaagcgcagtatttgggtgggagtgacccgattttccaggtg

SEQ ID NO: 256738 - DNA, 122 bp, Homo sapiens
taaagagcagattacttgaccctacattttaagagaagacgacgccttccgggcgcacgccgagcagaactccaccgacaccttatccttgtccacatggagacagactcctcccgccgagt

SEQ ID NO: 256739 - DNA, 122 bp, Homo sapiens
ggcccaggcctgggagtgctttctcagagcccttcactctgcacttcagtttccgccccccgccccccgtcccccgcccgctatgacttgactttgagaagagctcaggtgaggtgaaggct

SEQ ID NO: 256740 - DNA, 122 bp, Homo sapiens
tcactcgtccgaacagagtcctatcctacgcggcggaagagtgtgccctttgacttgcatcgtctacctacctctgccatcctctaccagccgcaactgcgagggctggaggtataaaaccg

SEQ ID NO: 256741 - DNA, 122 bp, Homo sapiens
aggggaagatcatctgctggccgtgtgcgtcacgcttgaagaccacgttggtgtgcagcacgcggctgagctcccgcaggaagtggaaggagctgttgcgcagctgctccggcggcatcagc

SEQ ID NO: 256742 - DNA, 122 bp, Homo sapiens
acaggcaagacttgactgttgtggattacatggagcccagggttgcagaaagccaagagccgagcaactggagggaggacatagcacttaggagagctgctctgggcctgaggcatctccgg

SEQ ID NO: 256743 - DNA, 122 bp, Homo sapiens
tcagtcaacccatccctgttgtccttcacccaccgtccctgccccggatggctcctgctccggcccctggtccactgggacaagtgtgcagccagcgagatgagaaatagcagcgtcacagc

SEQ ID NO: 256744 - DNA, 122 bp, Homo sapiens
agttggcttcttctgttgtgttcttagcttccaaaatagtagtctctcctcagagccagacgcgcaatgccatcatgttaatgaggtgcctcatgtgcttcaatagccactgactgatggta

SEQ ID NO: 256745 - DNA, 122 bp, Homo sapiens
aaatgctttatacatgtaaattgcactgtaggttttcagataatctgggtatgtaacttacgtaatatacataaacttgtaatgtaaatagaggtagctttggtgcaaataaattgcttcta

SEQ ID NO: 256746 - DNA, 122 bp, Homo sapiens
ggggactgtcccggcggcaaaggcaagagcatcaactgctcaggtaggaccggtcggagccggccctaggtcttcccacccctccgttgccgcctccctcgtggtccctgcggtcggccggg

SEQ ID NO: 256747 - DNA, 122 bp, Homo sapiens
taacattgtgagtttccgatgccataatctcttaagtaccggcgcctcatggtaccgcggcgcctcagcccagcctccgcgctgacaatcagcgcccggcagcctagagcgtccctcggctt

SEQ ID NO: 256748 - DNA, 122 bp, Homo sapiens
cacttgaattaaatcaaagttaatgatacagagcagcactgtccaagggacattctgtggcgatgggaatgttctgtgtctgtactatccaatatggcagctactacaggtaggaggccatt

SEQ ID NO: 256749 - DNA, 122 bp, Homo sapiens
acctggccaggtttgacatgcgctttaatttgacctcttgttgtttcctagaacaaaggccgagttagatcaagaagccttgatcagtggcaatctggctacagaagcacatttaatcatcc

SEQ ID NO: 256750 - DNA, 122 bp, Homo sapiens
ccagctttcccctgtgaggaattttagtaaacgttctcagggacaccagtccacggggtccggatccaagtgcactgttatcctcaaatccagtccacagggtccagatccgagtgcgctgt

SEQ ID NO: 256751 - DNA, 122 bp, Homo sapiens
cggcaaggatctcatttgttgacggactcctcctgcagacagggtctcgtctgtctcgggcgcctctgtgtccctagttcctgcaggcctggcacgtggaaggtgctccggcaatactcaca

SEQ ID NO: 256752 - DNA, 122 bp, Homo sapiens
tagaagaaagctgcaaagtgctggagggcaggagtcaagaggagaaagaggcccattctgcgcattcttgctggagagaggctttgcaaagggacctgcctgggaaccaagaactgggaagg

SEQ ID NO: 256753 - DNA, 122 bp, Homo sapiens
accggcttatgactggacagcacagacgccatggcggcgagacgcgctactgcgcttgcgcggccagcccagcgcccaggaagcctcttgagccccgccttgctgcttgcttcgcccgcttg

SEQ ID NO: 256754 - DNA, 122 bp, Homo sapiens
ctgtgttttagaggaatcctaaagtcaaaacaccagagacttgaagaacttgcaaactggcgttttaaaataaccggttaatttatttccacacagtttgtttttgaaaaagagctttcata

SEQ ID NO: 256755 - DNA, 122 bp, Homo sapiens
ggccatgctgggaagaacaggagtcctgaactagaaggtggtcttcaaaccatggcgtaccgatttatgtatattacagatagataaattaagaggtctacatgaataaaaaatctctcaaa

SEQ ID NO: 256756 - DNA, 122 bp, Homo sapiens
ccaatagggtgtgctgacccctctcccgttagttagacacatttaatcacactgaaggcacgctctgataggtataacctttcagaactcccatccctagatatgtctgtgatgatctggtc

SEQ ID NO: 256757 - DNA, 122 bp, Homo sapiens
cctacaagcatggaataaatatagcaagcaccattgaaagcttcctctgtagaagagctacgggcttcccattgatggtttcattaaatccttacaatagcaccatgaggtaggtatggtta

SEQ ID NO: 256758 - DNA, 122 bp, Homo sapiens
tgaagcggctgcagcgcgttctttaactttcccagaaagacctacagtttgtaaagcgcgcgatctcatgcatgtcccagccagcccagcagctggggggtgcagggccacgtccagtctgg

SEQ ID NO: 256759 - DNA, 122 bp, Homo sapiens
tccaggcacaagtgctcaattagctgagctaatagctctaacaagaccacttgagataagcgagggaaaggtagctaacatttttactgactccaagtactctttcctgattctccatgctc

SEQ ID NO: 256760 - DNA, 122 bp, Homo sapiens
aaggaattttcaatagtccaacttgtcaagcgaagaccatcttttaaccttcaacagcagcgaaagccatgtgaactcttggtgaaccaagattgaagtcataaatcacgtgtacaaaggcg

SEQ ID NO: 256761 - DNA, 122 bp, Homo sapiens
taaaaaatcgaccaaggaatcaaatgggctcacggatttgcgtcagaaacgttgcttccccgataattggtcaacgtcggtgtaactatgattaaaatgtcagtattcaaacaagggctcca

SEQ ID NO: 256762 - DNA, 122 bp, Homo sapiens
cctaagatagtccttaagtacaaggacatctcactagacttcattgtcttgtgaaaggagcggtatttcaggaattaactactcatttaataaagcaaaaaggctggatgtgatagctcaca

SEQ ID NO: 256763 - DNA, 122 bp, Homo sapiens
ttgacggagaggaggagaggccggaggctgcagaagaaacaccaaggacggtcagaggtccggcttccaggaagggacgtcgggggtggtcagaggtctggtctccaggaagggagatgggg

SEQ ID NO: 256764 - DNA, 122 bp, Homo sapiens
agaggagctgcactgaccaggtgtcaggcagcatctgcagcacctgggctgcatcaaattcggtggcgtggcggttcagcaggtccacggcagccacggccagctcgtgggcagtggggcca

SEQ ID NO: 256765 - DNA, 122 bp, Homo sapiens
gccgcggcctggcgcaggcggtgcggacagagggtatgccatggcgagacgctggcgcggcgcaggccctgccggccgggacacggagggcggggcacaggcgcagcaggaagggggcgtgg

SEQ ID NO: 256766 - DNA, 122 bp, Homo sapiens
gcgggaatgtgacctccggccaggggatctgggcaagccggccaggcctcccccctttggcgcctccgtccagcccaagtcccgcctgggccgcaccccctgactcacttcctttgcataga

SEQ ID NO: 256767 - DNA, 122 bp, Homo sapiens
cctctaagtgcctcaagggccctgtacgtggcagacagagctggggaggagcacggcagccgggaacaggccacacgcttctctccaggctcagggggcacccgctccatgccagccacgag

SEQ ID NO: 256768 - DNA, 122 bp, Homo sapiens
agcagccaatgttttagcataatccagtaataatgagggagatttaaagaatgcaaatcacgtgtagtctaaaatgtaaattgtttcctagggtaatgtaacaggcatgaagattatcttta

SEQ ID NO: 256769 - DNA, 122 bp, Homo sapiens
gttccccaccctcaggcgggagattatcgggtttggccggagggccgaggggccctgtggcgtcgggggtctttccctgcagggtgggtgggggctgtcaccacgtggcttctccttttttt

SEQ ID NO: 256770 - DNA, 122 bp, Homo sapiens
ctagtgccctcccctctaggggcattttagaagaagtgatttaaatccagcttatttcggcggcagctggactattcctttgcttatttggggatgggtgaggggcataccctttaggaaaa

SEQ ID NO: 256771 - DNA, 122 bp, Homo sapiens
aggtgcgcactgctgggccgcttcactccaccgcaggcctacgggagtccagcttagacccgccggctcccacacacacatcccgggaggcccggatcagcctgcctgacagccaagctgca

SEQ ID NO: 256772 - DNA, 122 bp, Homo sapiens
cattgaaagttcacagacacaagggctctgagcggggtcacatcgtggaggaggcagggtcggggagcacagagtgagtcctcccaacctgggacaattttgcataagcccttcctgctagg

SEQ ID NO: 256773 - DNA, 122 bp, Homo sapiens
cgtggccttactcacagcctccacattagagagaatctgactgaagtcttactgctgcctcgtgtgaacataaatgtttgccagaaccatgagcaggaaatgttaatctgccttgtttcctg

SEQ ID NO: 256774 - DNA, 122 bp, Homo sapiens
gacagggtggacgccggcgcgcgggtctccgcttggcccctagggacgcccttttcccggcgtccccgagagacgcctccagatttgaaaatcaattcagcttcgggagtaatttcgccctt

SEQ ID NO: 256775 - DNA, 122 bp, Homo sapiens
aaaggagtgagaacattcagatatccttcaaatggaaagggacaatagtgaattcctgatcgggcaatctggggctggcttagaaagcttctaaagcactcctgctctctataccaacctga

SEQ ID NO: 256776 - DNA, 122 bp, Homo sapiens
accctgcgctcagggcctgggaggcccgcgggaccctgcacttagcaggccttgagcaggcggctgctgaagcgaatgggcgtggagctggggagacccgcaaggccaggccgttttaggga

SEQ ID NO: 256777 - DNA, 122 bp, Homo sapiens
accctggatgccattccaatgactttgaattttctgtaggctgccagcgaaatttccaagcgtgatagagtcatgtctatctatgcacttcagaaagacaacctcagggttaatgaagaaaa

SEQ ID NO: 256778 - DNA, 122 bp, Homo sapiens
gctatttccctatgcccgtcacgctactgctaggtcgttgccaaggtgattgaggaatggcgtttattgcgtcgctgctcaggcaacgcaaactacattatccagaaggaccctcgcggtgc

SEQ ID NO: 256779 - DNA, 122 bp, Homo sapiens
gtaggaggagcggagctgggagcctgggctttgaggccttgcgaaatccccctgtgccaccgcccagccagacacacgagcaacccaccaaggggcgggtggatgcggccttggaattcaga

SEQ ID NO: 256780 - DNA, 122 bp, Homo sapiens
aactgtgagtgtaacctctcctttcagggtggttgtttccgtgtctgtcactctatcatccgagattcaaacaaacccaggtacaggttcccaggtggcaggggtggcccggggtacgtgtc

SEQ ID NO: 256781 - DNA, 122 bp, Homo sapiens
agtgggtgcgcgcaccgtgcgcgagctgaagcagggtgaggcattgcctcattcgggaagcgcaaggggtcagggagttccctttcctagtcaaagaaaggggtgacggagggcacctggaa

SEQ ID NO: 256782 - DNA, 122 bp, Homo sapiens
caccggaacggaggaggcttcggtggctctttgtctacctgctctgggtgttaaagagcccgctcgcagcctgcatcgccggggctcgggacagaagtcagcggcggggaaatggggctctg

SEQ ID NO: 256783 - DNA, 122 bp, Homo sapiens
aggcattgggcagaattccttgtggcaaggagatcgtagcacagagcccagctgggactgcgcacagtaattcagggttgccattgttcctctatgggagtccggagagcccagcctgtgct

SEQ ID NO: 256784 - DNA, 122 bp, Homo sapiens
ccccccgggtttcttggtggagccgcgggcagagcccccgggggcatgggggtagccattcgcgcgggaatcggcctcgccccacgcagagcggtgttcggggcctccccggggcgccggcg

SEQ ID NO: 256785 - DNA, 122 bp, Homo sapiens
agccaggctggcctgccggccggctcatcagggccgacgcgcgggggaggggcgggcaagcgagaagcctactttcatggttttgtataaataagtgctattgtaactttccctgtcctttg

SEQ ID NO: 256786 - DNA, 122 bp, Homo sapiens
ggtgggtggcggcatcctcaagagcaagaccttctctgtggcctacgtgctggtcggggccggggtgatgctgctgctgctttctatctgcctgagtatcagggataagaggaagcagcggc

SEQ ID NO: 256787 - DNA, 122 bp, Homo sapiens
tccgagcctcgggggctcctagcaacgggccggggcgggagttccatggagactggggagcgcgcccgtctcatcctcatccttgtcctccagcttctccttcgcatccgacgcaaccggca

SEQ ID NO: 256788 - DNA, 122 bp, Homo sapiens
aaagcactcatgaagcgtgggaggacacagaactagctacagacaggagtctcgtccttccggagacagacacccaactcattcagctgcacagtgtcacagagaacagatgttaacatgaa

SEQ ID NO: 256789 - DNA, 122 bp, Homo sapiens
agcacagcctgattcatgcttcattataattctattcctgtccaaaatgcttgttaaccccgtgaggactgcttcagtatcacactgtattttacaaataatctatataatgtgcatgccta

SEQ ID NO: 256790 - DNA, 122 bp, Homo sapiens
agcagctacgcatttgtcctgctgcccttctgagtgttgctcaatgcttagatactgctccgtgtggtctcacgcagtgctttgagcaacacatcgaggaggaaggaaactttttttcttga

SEQ ID NO: 256791 - DNA, 122 bp, Homo sapiens
aactgagattcagaagaaactctttctactgcttgcacaggttaagtttctcaaagaccccggagaaaagaagcgggctggaggctcaccttccatgtcgctgccgggccgggctggagctg

SEQ ID NO: 256792 - DNA, 122 bp, Homo sapiens
cgtgctgatcgagtggggcaacaaccccatcgagctgctcatcaacgacaaggtgaggcccgcctgcaccgccaccctccccagaacccatcatgtggtggagggagccacagcccccaccc

SEQ ID NO: 256793 - DNA, 122 bp, Homo sapiens
ttcccgcgcgggatgtaggctttaatttagaaatctccgccccaaaactggcatcttgaacgcgggagggcattatgagttagaggccccggtttttctccatttatccaaatcaggtagcc

SEQ ID NO: 256794 - DNA, 122 bp, Homo sapiens
gtgatactagggccgaaagaagaggaggtgataaggcaggtgacatttcctcctccttcccgtttttaggctcttctgtgggtaactgagccaggggtgctctaattaaagcccataacgtt

SEQ ID NO: 256795 - DNA, 122 bp, Homo sapiens
tccagatgtgaatgggacccagccaggggcaacaggctcactcggaggggaatctgaagacgcaagtggaaaactatgcgctgtccgatcgcaaccctccaatctgtccctgtggccgccgg

SEQ ID NO: 256796 - DNA, 122 bp, Homo sapiens
tgcctggctcttccatccatggtgccgggcccggcctgggaggggctgcacaggccgagccgcagcatgatgtcccctgcgcccagcacttctgccatgcgagccttgaaagggcctccacc

SEQ ID NO: 256797 - DNA, 122 bp, Homo sapiens
cgcagccatagcgcggagaagatggcagcagttacggcgccggaagcagcggtcctcccccgtccttcacttccggcccccggtccgtcaccgacgccgttcccagcgccagcgcggtgtgg

SEQ ID NO: 256798 - DNA, 122 bp, Homo sapiens
tttttactataagcccctgggattttctgcctgagggtgctctctgctcagaaggcactccggcaggctggaggtgccaggaacagctctcaactaatgaagaaatcatcagtgtcatcact

SEQ ID NO: 256799 - DNA, 122 bp, Homo sapiens
agatacacacagtcaaactcttcttcacacactcacccttctacccggagtggaggcaaccgcctgtttcataacacccaagccagccagtgactgtttatttttctggaatttttttctgg

SEQ ID NO: 256800 - DNA, 122 bp, Homo sapiens
aaccacctagtctaggcaggcgctgtggctcacgcctgtaatcccagcactttggcaggtcgagataggaggatttctgggatcaagaagttcgagactagcctgggcaacatggcaaaacc

SEQ ID NO: 256801 - DNA, 122 bp, Homo sapiens
tttgaagcactagggcaggaaaccggaacctggacccagggtagtgaaatttacatggtgcgatccggatggctcagggaaccaggggctgtgtctgggagtgcctctgtgtccacctgtct

SEQ ID NO: 256802 - DNA, 122 bp, Homo sapiens
cgaagcagggcgaggcattgcctcacctgggaagcgcaaggggtcagggagttccctttccgagtcaaagaaaggggtgaaaagaaatgggactatgtgaaaagaccaaatctacgtctgat

SEQ ID NO: 256803 - DNA, 122 bp, Homo sapiens
ggccggagcgctcggggagccgggcttcccgggacgcagcctcggagggcggcgcggcggcggcatcaacagaggctccccatgcgcgctctcgcctcctggtgcgcggtccggcgcggctg

SEQ ID NO: 256804 - DNA, 122 bp, Homo sapiens
acagtccaaacttagaacaaattgtcagcagctgctcttgtttaacgtctgacaccacagcggaggggaaaaccatgcaaacactcacagtttacaaacatcctttttatagagatctttgt

SEQ ID NO: 256805 - DNA, 122 bp, Homo sapiens
ggacacgtaagggaaagcagctattcacttcggtcctgtccgcaagggatccctttctgacgggaaagaaaggtggcgagtcccgttctgttgagtaagcggaagagagatcaaagggaaga

SEQ ID NO: 256806 - DNA, 122 bp, Homo sapiens
tcacaccagagaaagcccggagttcatgtgaccagctcagtgcagcccgggttccagggacgcgggctgtgcttccaaggggagccagggggttgggtgcttttgtgaaatgcccgagtgtt

SEQ ID NO: 256807 - DNA, 122 bp, Homo sapiens
tgtgaggtatggcatttagggataagggtgaaaatcgatctattgggtggacaggggccgcggtaaacagagcaaacccagggtcactgccaattctggggaagatgaagtgggaaagtggg

SEQ ID NO: 256808 - DNA, 122 bp, Homo sapiens
aaattccgtgagaataaaatcatagctaggctggcctacttccctaaagcttggtggaagcgagtaactttattgagtctgggctagagggtgtgtgtgtgtttgtgtgtgtgtgcgtgcgt

SEQ ID NO: 256809 - DNA, 122 bp, Homo sapiens
cgggagggtaaacccagcgtgtcctgtgtgcctgtgagccgcagaatcatccacggacgtcgttagtccttcctggaatttctgcgatttacacaacgtcgaattgtttggcagaaacgcgt

SEQ ID NO: 256810 - DNA, 122 bp, Homo sapiens
tcataaagattcaaaaccacctctgcctgcctcaaaaacatttgctctcagccattggaccgataataaagcaggaggggttgcaggggcacagttgtctaagcacagctcctcccttccct

SEQ ID NO: 256811 - DNA, 122 bp, Homo sapiens
ccaggcagctctgagcgtgacctggagggctgttcagacggtctgggtagccgtgtcctgcgcatgaacatcctccgtcgggagaggaattccccacggattatcagagctgctccctccac

SEQ ID NO: 256812 - DNA, 122 bp, Homo sapiens
caggaagaggcgcatgccagcccccgtcacctcggcagcgccgtgcacgtccaccccacccgcccccctcacctgggcagcaccgggcccacccactgcatctatcattgaaaagcaccaat

SEQ ID NO: 256813 - DNA, 122 bp, Homo sapiens
acgctaaagtgattgaggaatggcacagagacgggagcgaacccccagggaggcaccaggcgagttgccggaaaggaagagttcgctacaggacagacaggtggtttcaaactggaagggat

SEQ ID NO: 256814 - DNA, 122 bp, Homo sapiens
tccctctcatttgagcaccagagaaagagctaataagttgtttactaatgagaaagcagtcgactaagggaaaacattgggcaccacatgtctgcaaaagatgagagcaaagtagatcgctt

SEQ ID NO: 256815 - DNA, 122 bp, Homo sapiens
ttgtccctactgcacttttcagtctgtcacaatcctgggtcgtcgggggactgtaccgagcgcccttggagtgctcgcagcagggaagaaggagcgagcagggaggagctgaggagggtcgg

SEQ ID NO: 256816 - DNA, 122 bp, Homo sapiens
ggaggggagccctagggaggcagcgggggaggctgcgggtgcgcagggaggcaggcaggccgctcccggctgcaggaggagaagttgccaccctttcagctgttccggcctttataaaggag

SEQ ID NO: 256817 - DNA, 122 bp, Homo sapiens
attctggatcagctaaaggctttttccccttagttttctttatgtgtttttctgtaaagccgaaaatttagtcattactctcattattacattatcctcattattacaactttatttccaca

SEQ ID NO: 256818 - DNA, 122 bp, Homo sapiens
aggggagttcacatttaaaatttgatctgtgtatctcaaagcacaggcttttacccaacacgtggtgctcttgcctctattctttatttattttctttggattttataaaagattccacaac

SEQ ID NO: 256819 - DNA, 122 bp, Homo sapiens
tcacgcctgtcatcctagcacttggggaggccgaggcaggcggtcacgaggtcagaaattcgagaccagtctggccaacatagtgaaaccccttctctactaaaaataaaaaaattagccag

SEQ ID NO: 256820 - DNA, 122 bp, Homo sapiens
ggcccgtggccctggccatcccgctcagtcagcctctccacccagacaacacctgcatgccgggttcccaggccaggtgggatcctggggctcacgacactaatcaccaccatgctccctga

SEQ ID NO: 256821 - DNA, 122 bp, Homo sapiens
tcatctggcggggagggccctcaggcctggcaaccccctgcctggtaagccaggggtgagcgcgaggccgaactggggctccggcctgggatggagacaggatcgggaccagcccaggccca

SEQ ID NO: 256822 - DNA, 122 bp, Homo sapiens
tctctctctctcaatcttcatgtgccctctagcttacacagaaacaaaagtttgatttttcggcattgattcagtgttctccattgggggaaaaaagtattatgatcattatcaacagcacc

SEQ ID NO: 256823 - DNA, 122 bp, Homo sapiens
accactgagctggtgaataagttggaggcaagagtaatttgcaggaagatcacttaaagtcgagttttcctaggctaggaacagcctgaaattagggcaatcatctgaataattctctgcct

SEQ ID NO: 256824 - DNA, 122 bp, Homo sapiens
gaaggcaggaccagccttgggctcacctgcggtaggaggtgcccccatgggggtttgctccggtaggcatctttggccctgttctgtaattttagggagaatctttctcttctttgtaaagt

SEQ ID NO: 256825 - DNA, 122 bp, Homo sapiens
actgatccccagctagggagaggagggccactcaccaggatggagaggatcacaggaccacgaatgatccaccagatggatgcgttggcattgatgtcccagcacctaagggagggacagct

SEQ ID NO: 256826 - DNA, 122 bp, Homo sapiens
gagtgcccctattttacacaaaagaatacagagggttcggagacttcagaccaagtcactcgcccaaggtcacaagcaggcagaggcaactcctgaccctgcgggttcccaggagtcccgag

SEQ ID NO: 256827 - DNA, 122 bp, Homo sapiens
ctcgaacccgcatcccggagagcggccgcccgcgcagcccctgccgcgcgccgtcggaggcggcctcagctcgccatgggtactcacttttgccagggagcaaagtctgccacatcagtcga

SEQ ID NO: 256828 - DNA, 122 bp, Homo sapiens
ttttttttttttgagatggagtctcacactctcccaggctgacgtgcagtggcgcgatctcggctcactgcaagctctgcctcccacgttcacgccattctcctgcctcagcctcccgagta

SEQ ID NO: 256829 - DNA, 122 bp, Homo sapiens
tgctgaacggggaggggctttggggctaagggaagtgcccgggaccccacctgaccccaacgctcacgggacaggggcagaggagaaaaacgtgggtggacagagggaggcaggcggtcagg

SEQ ID NO: 256830 - DNA, 122 bp, Homo sapiens
tgtctattcctcatctcagtctataaaatctgattagggtccttcttcctggctctatcccgacccatctgtaccttcactcttcctgcccaagcatgaccaacattaatatttttcacgtt

SEQ ID NO: 256831 - DNA, 122 bp, Homo sapiens
acctcaagtgatccaccagcctcagcctccgaaagtgctgggattataggcatgagccaccgcacccagccagatattaagttttaaagtttaaaaatgtggtttcgaattttacagttttc

SEQ ID NO: 256832 - DNA, 122 bp, Homo sapiens
aaaaatagcttcatagcaacacccagactagtgtccggccaggctgtgcactgcccaccacgtgggtgctggagtcacagtgcaggcccctcacccctcgtcggcctggcctccctgggccg

SEQ ID NO: 256833 - DNA, 122 bp, Homo sapiens
ttggcatgatggtgaaggttgagcttacaagtacagtggactcaagtatccatgatccagcgcactgagcaataaatccaaatgagcagtgaccacaggaaaacaatatgcagggaggcctc

SEQ ID NO: 256834 - DNA, 122 bp, Homo sapiens
aatataaaacatgaaagtgggatgggatctaagtcatatttttttaatgagtttaaaacacgtgtgtgcattagaaaacatttaaacacagatattgggcaaattaattgaaaaatatattg

SEQ ID NO: 256835 - DNA, 122 bp, Homo sapiens
aatctggtacaggtcaatatcagaggttaagtccacttagttaataataggtgaaaggagcgatgataaaggaatctcagaaaggcttctgcacaaatacacatgatatgccactcaccagt

SEQ ID NO: 256836 - DNA, 122 bp, Homo sapiens
ggggaagggtgaaggcagccaggcagggggcagaaatcagacagaaccgctagcagtcagcgggaagaatgtggatttaatggaatgaaggatgagagggcccgaagccagcaagtctcgcc

SEQ ID NO: 256837 - DNA, 122 bp, Homo sapiens
cactgtcaacgttgtgagggaagggtgttttcacgctcactgtcgacgttgcgatggaagcgtgttctcatgctcaccgtcgacactgtaaacctgagtgaagtgtgttctcacgctcactg

SEQ ID NO: 256838 - DNA, 122 bp, Homo sapiens
gcattcttgctggagtagatctagcagaagtagcttgggtctgaagaaatagttctggcacgattcctgacccctagatcataactaatttggtgtgttcgtgaaacaaacaggttccacag

SEQ ID NO: 256839 - DNA, 122 bp, Homo sapiens
ggaaaaaacggaaagacagacataaaggaggcagcacattgggcgtgggctgtggggcgacgtcacatggcctgacacgtagggcaggagtcctggaggcaggctggtggcacttctgaaat

SEQ ID NO: 256840 - DNA, 122 bp, Homo sapiens
ctccaccttttcgcgtcatttaagaacttctaggaggagaaaatcaccacctcaaagcctcgtggcataatgttacactactcggtttccgggctgtcgctgtcccccgcccccagcaagag

SEQ ID NO: 256841 - DNA, 122 bp, Homo sapiens
cttgtcggccgccattcgggccgcgcgctgggaacgcagaagggggcgtggcctgaggagcgcaccaactgcgtgggggggggggaggtgcggtgaccacgtgacctccgctgagctttcgc

SEQ ID NO: 256842 - DNA, 122 bp, Homo sapiens
aagtcactcagcccttttctacagattctcaacctgaagctgcgggaagcagagcagcagcgcgtgaagcaagcagaacaggagcggcttcggaaggaagaaggccagatccgcctgcgggc

SEQ ID NO: 256843 - DNA, 122 bp, Homo sapiens
cccttttcctttgacacctcctggccaaggaaaaccctaaccactggagacttccagagacggccaactcgcacaaacgctgaaaaaaaaaaaatcccaaaagctcctctgtccccactaga

SEQ ID NO: 256844 - DNA, 122 bp, Homo sapiens
attatttgtttcatgtatgttgttttattattcttaaattatctcctttggatttattggcgtcttctccagtgtatgtcatgctaaccacatagtaatttgatggttaaagggatgaggca

SEQ ID NO: 256845 - DNA, 122 bp, Homo sapiens
cttctcctttcggcttgaaatgtttttcccttcctgcttttcaaatctgtaaaaatgttccggggaatgtttccgaagtccagggctccgtccttcggcgggattgctggcattcgggcaag

SEQ ID NO: 256846 - DNA, 122 bp, Homo sapiens
gacagcaggacacgccttcccatgccagccgctttggggcccgtgcggccctttttccctcgcagctgctgcaacaaatagcagttcttttgagggaaggaacagtgtggtcctcaaagttc

SEQ ID NO: 256847 - DNA, 122 bp, Homo sapiens
ggggtcggcgagcaggcagctggagccccaccttcggctcccgggcgctgtccgccgcctcgtggtgctgatcccagccccacggctgagcggccttcgcacctgcctgtctcacctcgcta

SEQ ID NO: 256848 - DNA, 122 bp, Homo sapiens
tggtccccttgccctgcctggtggcagccggacctcacgtctcatgctgtttgtgggcttcgatgctcgtggtctcctcggatgtcccctcacagtcctgtcccgggtccctggccacagcc

SEQ ID NO: 256849 - DNA, 122 bp, Homo sapiens
agaaggagatggctgccacctccgtaggcagcgccgaggaagagagaagggacggtggcgcgcaagggctgatgggtcgtaacccctgggtcctagcagggaaaaaggcaagcacttccggc

SEQ ID NO: 256850 - DNA, 122 bp, Homo sapiens
agtctggccctccattgaaaggaccccaggttacatcatccattcaggctgcccttgccacgatggaattctgtagctcctgccaaatgggtcaaatatcatggttcaggcgcagggagggt

SEQ ID NO: 256851 - DNA, 122 bp, Homo sapiens
tgcgctggctcctccgcaggatgcagggtgccgggaaagcgctgcatgagttgctgctgtcggcgcagcgtcagggctgcctcactgccggcgtctacgagtcagccaaagtcttgaacgtg

SEQ ID NO: 256852 - DNA, 122 bp, Homo sapiens
ccaacatcgctcagaatgaagatcctcagcctacaattttctccttagctacttttctagcgcttccttcgcaaacagaggcagcagactcaggcagccacctgcactgctctgcctccagc

SEQ ID NO: 256853 - DNA, 122 bp, Homo sapiens
tggacaggaatgccaagttagtctctcttcataaaaataatttgcaatttgaggacacttcgtgtttgcccctttgcgtttgcctctttgccagcaccaagtcagcctcgtctgagtctttg

SEQ ID NO: 256854 - DNA, 122 bp, Homo sapiens
aaagtcacaatcataacagctaccactcacatattgtcacctcccaccaacactgttctgcgctgaccaggggacttgaccttcataccttgagatgccagaactctcatcctcatgtaagg

SEQ ID NO: 256855 - DNA, 122 bp, Homo sapiens
gtttgggatcctactggcaggggtcggggaccggctgggctcctccctgcgccatggcatcggtcacattgaagccatcttcttggtgagctgctccatgccctgcctgcccttgtgctggg

SEQ ID NO: 256856 - DNA, 122 bp, Homo sapiens
acatgactcagaattagagtttcagaagattattatatagacattatttccctcaggtcacgggctttagtcaaatttggaggagaatgaaattgccaacagtgaaaagcagacagaaaggt

SEQ ID NO: 256857 - DNA, 122 bp, Homo sapiens
aggccacgctgaaaggcgtcctgggcctctggagtgcgcactcccattgtccatgggttgcgggggtgacaggtcagcgagggtcacgggagggttgcctagcgtctgggaactcccactgc

SEQ ID NO: 256858 - DNA, 122 bp, Homo sapiens
cacggcttaccttagctaggaaagggaaatcccccaatctcttacacttcctgggtgaggcgatgcccccgcctgcttcagctcgccctccttggactgcacccactgtccaaccagtccca

SEQ ID NO: 256859 - DNA, 122 bp, Homo sapiens
gtggccagccgggcaccccttctcccattagaggatgtctttgtgggggtaagtgcccgacgaggaggcctcgccccaacacagtgtgtcaagctggctggtgccacccactacccgctaga

SEQ ID NO: 256860 - DNA, 122 bp, Homo sapiens
cgcatgattctgccgggcagcccagagtcaatcctgccccatccctccaaccctacccttcgcccagggccgcagtgctcgggaatggatgggacccacaacccccaccccacccggaaagt

SEQ ID NO: 256861 - DNA, 122 bp, Homo sapiens
gcccttcccccccccccgtcctttgcccccggtgaccccggagcggcccggccgcccccgcgccaagctgcccgcgcgttctccactgccgccgccccccaccgccctcgccccgttcccgc

SEQ ID NO: 256862 - DNA, 122 bp, Homo sapiens
atggaggggtgctctgctcgcttccacgtggctactattgttatgaacaacaacagccggcgtttactgagcactgctcctacagcttatctcacaactgggtgaaggagcagaggatgcgc

SEQ ID NO: 256863 - DNA, 122 bp, Homo sapiens
ggcagcccctcggcgcccgtttgcagggagcgagctctggctcctcacaggatccagacgcggttcccatccgtccccagccctgcagggcacacgcgcgcgtgcacacgcacgcgcttaca

SEQ ID NO: 256864 - DNA, 122 bp, Homo sapiens
gcccctaatctacagcttttattgcgcccagttaaaagtcgagggaattcgctgtccctccgcgctcggataattacccctaaatggccacggcagccccttgtgtttcctggagattagaa

SEQ ID NO: 256865 - DNA, 122 bp, Homo sapiens
cattttaatatttgaacaaggggctgcatatttttatttttcaaagggcccctcaaattacgtagctagtcctgattctacacacagtcctgattaggtgttagctgcccccattatacaga

SEQ ID NO: 256866 - DNA, 122 bp, Homo sapiens
catcactatcactgtcactgacttggggacccctatgctgataacacagctcaatatgaccgtgctgatcgccgatgtcaatgacaacgctcccgccttcacccaaacctcctacaccctgt

SEQ ID NO: 256867 - DNA, 122 bp, Homo sapiens
tttcttgggcaagaaggatgcatcatggtacgcagggcaactggcctagttcgtaaagcacgctcaccttgaaggaatagaatttgttttttctttagccacctgagtaaatcattttaaaa

SEQ ID NO: 256868 - DNA, 122 bp, Homo sapiens
ctggacagtcaggtccccgccggcccagagggaggctgcagcccgacagggctggaaaggcgctgccccggatctgatctcaccaggccacggcagccacgcttggctgtgcagggtggcgc

SEQ ID NO: 256869 - DNA, 122 bp, Homo sapiens
ataagccccgaacgttcttgacaaacagtttgcccttcggagagggaaagtttcctggaccgtgattcccgacatcctgcaaggtcccttctagctgtggcctgggtgctgaaggggtttcc

SEQ ID NO: 256870 - DNA, 122 bp, Homo sapiens
ccacctccgcagaagcagtgagaagaaaggagcagtcaggcacagctgggttcgtcttcccgggaatgtgatctggaggaaacggtttaacctcccagacctccccacatctgtaaagcaga

SEQ ID NO: 256871 - DNA, 122 bp, Homo sapiens
cccgcgcccgctcagggtgccggggagtgaacggcaggaggcaggagcggcagtgccactcgcgctgaatgccccctccccaaagtcccgtcctgccgggcccgaggcccctcggcgctcac

SEQ ID NO: 256872 - DNA, 122 bp, Homo sapiens
tacatgaagtgccaatgaaaacagatctttagcttccatgatacagaaactacacttgcacgaggaacaatcataatgcccacctgtctatgctgacttttgaaacttgacctgaacaaata

SEQ ID NO: 256873 - DNA, 122 bp, Homo sapiens
tgcctggcagagcctggagagaagtgagccgcggttggtggagtagtcgcagcggcccggcgcgttctcagcccggctctttgtctgctgctttgtgatggtaagtgctgctcctaaatcag

SEQ ID NO: 256874 - DNA, 122 bp, Homo sapiens
tgataagctctctttgacaggtcaccctccttgggcttcagagttataaaaaaatcgatacgtgagattagagatgtgacagtatttctaaatttctgtttccaaccgtttcatgacttttc

SEQ ID NO: 256875 - DNA, 122 bp, Homo sapiens
cttccttctcctcaatgcctgggtgctagcagggtagcatccccagcctcagagctcaagcgtcatgattggggaaatgagactgggcagccattcggaaggccgggcaaagaagagtgtaa

SEQ ID NO: 256876 - DNA, 122 bp, Homo sapiens
cgtgggaagcggccgcggcgggagcctcaatggcgtgaccgggaagtgattgtgacgaggcggggagcaagccaatcagcggcagcggggagccggccagggagcagcgcaggaggcgtcct

SEQ ID NO: 256877 - DNA, 122 bp, Homo sapiens
gaggtagacgcggggagaagggaagggggagggacagcacgggaacaccatcaggctgggcggtattttcagtgcaaccaagaaatggtagactcaagtttttagttttaagactagaaaaa

SEQ ID NO: 256878 - DNA, 122 bp, Homo sapiens
acaggggtcagggcaggaagggcaaggaggtgagactgtcagggaaggtgtgggggcctgcgtgtggcagacgagaccaaattggggaaggggcttgtgtctttaagatggaaaggaaataa

SEQ ID NO: 256879 - DNA, 122 bp, Homo sapiens
aaatggaactgaaaagttgagagttccttctttcttgcccctctgtactgtgcagaaaaacgtatgtgcgcctccccgtctgcagaatgggaataatgaccgaataaaagagctatgaaaat

SEQ ID NO: 256880 - DNA, 122 bp, Homo sapiens
tcccaccccggcgtctgcagaggccgaggcgcaactggtgcgagggctgggtccttgcctcgccgtcagccccagctcgcggccgccggggctcgggccgcgcgcccgccgagtggcttttg

SEQ ID NO: 256881 - DNA, 122 bp, Homo sapiens
ctttatcacccaggctggagtgcagtggtatgatcttggctgtttgcaacctctgcctcccgtgttccaatgattctcctgccgtggcctctctagtagctgggattacgggaatgcaccac

SEQ ID NO: 256882 - DNA, 122 bp, Homo sapiens
acagaatacagaagaatcattacttccagctcttctcttattaggaatactcaggaaatacgaaaagtgggaatgtaacattgaaacctcattttgtatgaaagtgtcatgaatatagcaac

SEQ ID NO: 256883 - DNA, 122 bp, Homo sapiens
ggcaatcactgcagggcaggtcttttgggcatcctcacaggtcacagtttctgagtaagacgctgccaccatactcaggagaaggagagggagtgatggaaacagggacatggtcctcacct

SEQ ID NO: 256884 - DNA, 122 bp, Homo sapiens
caaggtcagccatgcagccccagcttcctttccatggcgccacctcaagggaagacacagcgactctgcctggcgacaggtctagtaacacatacccgagcatcagcccgaaactccctttt

SEQ ID NO: 256885 - DNA, 122 bp, Homo sapiens
aaacatagggctttcaaaaaaactttccagctccttgtaattgctacatatttccaacatcgatccattaaaacaagtatcccagcctgttcaaatcaaagaatttcttatgcctcctagaa

SEQ ID NO: 256886 - DNA, 122 bp, Homo sapiens
ctcgctccgcgcctctcagtttagtggatgaagactactatcccagaagccgtttcgcctcgggctggcgagctcctccccgccctactccctccgcgcgaagaagactgagcatgcgcaac

SEQ ID NO: 256887 - DNA, 122 bp, Homo sapiens
ttgtacacagggcacccccacctttgtcagctcactggtcctccggccagcctctccagacgggcactgtcataaccacattttacagaccgggacactgaggctcagtgacacaagctccg

SEQ ID NO: 256888 - DNA, 122 bp, Homo sapiens
tgtggccgggcttgagacggacgatcacggagggaaggccggggaaggctcggtgggtggcggccttgctgtgagccccaaccctggcgacaagcccatgacccagcgggccctgaccgtgt

SEQ ID NO: 256889 - DNA, 122 bp, Homo sapiens
aaacaccagtccaaaaatatatatccatttccctggtgcagtggtgttgttggacgtgaccgtgaggctcctctggcgtctccccactcagaacaggccttttgctttcttcaggttcacct

SEQ ID NO: 256890 - DNA, 122 bp, Homo sapiens
gtaaccatatataccgtagtgtgtaactagcttttaacgaggctgcagggacctgagttacgcagccagcccttacccaacaatcggaagcttggaattgtaaatgggctcctcgtggaaca

SEQ ID NO: 256891 - DNA, 122 bp, Homo sapiens
aaaagccagcagtcagcgtgggtggagggggcttctggaagccagagtgtggccccggggcgtggaactgctgtgtgtcagcaggaatcccctgcctcctggcctggtgcgcacgtgcctgc

SEQ ID NO: 256892 - DNA, 122 bp, Homo sapiens
tgaagacgccatcgttgttataggaagagccgtgaaggctgtcgagcccacacaaactcccgctggagaaaactgtgtccacaggctgtgtctgacctcacgggatttatgacagagccaat

SEQ ID NO: 256893 - DNA, 122 bp, Homo sapiens
cagggccccagcggtctttactgaaataccagagcctgcactctgataatgaatgaggctcgagggaacattcctttggcatattttaatgcttgacctagttgactggggtgctctgggaa

SEQ ID NO: 256894 - DNA, 122 bp, Homo sapiens
ggtgctgggtgaggttcccccaggtaactgaacaaacggcccccacccctcctcagctcccgggtggagagagacccagttttggtttctccagctccatgaacacacagaggtacacgtcc

SEQ ID NO: 256895 - DNA, 122 bp, Homo sapiens
ttggacaaaggggcattccggtcccaggaatcaagatttcatcctgctacgcagaatggccggaaacttaaaacttaggacttctgtatttctggaattttccatttaatagttatggacaa

SEQ ID NO: 256896 - DNA, 122 bp, Homo sapiens
tctctaggtctcggacagcccgggagacgagccctcggagtccccatacgaaagtgcagacgaaacacaaactgaagtatctgtctcatccaaaaagtctgagcgaggagtgactgccaaaa

SEQ ID NO: 256897 - DNA, 122 bp, Homo sapiens
cctcccctccacccccttccgtttaaccctctcaccgccgcggcgccgtcctgcactgcccggccagctgggctgggagagacccgcgccccaggcatgtccaagcccacctagagggcggg

SEQ ID NO: 256898 - DNA, 122 bp, Homo sapiens
tcattgaccacaaaatctgctctcctactccctacttcttttttgccttttaagaaactacgcttcctttttactggtgtcaggagcacagaagaaagaacagctggtaaggagtagagaag

SEQ ID NO: 256899 - DNA, 122 bp, Homo sapiens
ccccaggacagaccctgtagcctgccagacagcggggcagccgtgaacgtgcagtgggggcgtgggccgcatcaggcacagacacggctgagcggcaggtgctgtggaggcagccaatcaat

SEQ ID NO: 256900 - DNA, 122 bp, Homo sapiens
acctaattacatgttcaggagggaggccatgactcgaagaatgcacagcctgagttacaccggatggtctttggatcaggctgctctaccctgattattcccctagggggagacagaggtct

SEQ ID NO: 256901 - DNA, 122 bp, Homo sapiens
taggacccaaggtggccttactttcaaccctaatagtttccctaagcacaagtcatgtcacgtcgttcctgaatgtttccttatcccccacccttttttttttttttttttttttgagatgg

SEQ ID NO: 256902 - DNA, 122 bp, Homo sapiens
gagcagaattgaatttatttgctctcaaattcccctaaaagctctgaaactgggaaagtccgcgggctgccagggacagtaatcactgtgtccccacccggacgcaggaggtctcgggagga

SEQ ID NO: 256903 - DNA, 122 bp, Homo sapiens
aaggaaagagcatcttcggatcaatgaacacagccctgcagccaggggtgggggtggccgcgggccgcgcctgcttgtcactgccgggtccaggatttgaggggggctcagcgggggaaggc

SEQ ID NO: 256904 - DNA, 122 bp, Homo sapiens
attcctatggcccatgtcccctcacccccgcccccctgccccagcgctgctgaacctcgacgtgtgtgtctgaaggtctccatccgtgcctctccagacgttgcccaccttcccctttgctg

SEQ ID NO: 256905 - DNA, 122 bp, Homo sapiens
tgaaactgaattgattcaatttttatgttacaggagattacctggggcaattgatgttatcggtcagactataactatcagccgagtagaaggcaggcgacgggcaaatgagaacagcaaca

SEQ ID NO: 256906 - DNA, 122 bp, Homo sapiens
ggctcgggtccccgctcccgagcgccctggccggggagggagggcgcaccccgccccctgcgcccgccagcctactcctgccggcggaaaacaacaggagcgggatccctcccgcctcccag

SEQ ID NO: 256907 - DNA, 122 bp, Homo sapiens
tccatgctcgttgcctcgtgctagtttgttcactgatatgctcccagttattccttccatcggctgtggattgactgctccaccacttgtgcatcagtgcatcactgtattcctcggttatt

SEQ ID NO: 256908 - DNA, 122 bp, Homo sapiens
gccctggcgcagtgccatcaacatcctgcctgatggacttaaagtcccattcacacctggcggggactttagggctacctttactttgcagataagggaaccgaggcctggggagggtaagt

SEQ ID NO: 256909 - DNA, 122 bp, Homo sapiens
atgcaaatggaatatataaaactcttctttccggggtagtctttaaagactttttacctccgggtgggcggcaaagactaaagtttcccctcctcccctttcattttccccctgcccataga

SEQ ID NO: 256910 - DNA, 122 bp, Homo sapiens
tggaacatactaaattggttgagtactaaagcaactggctatatcagagaacctcattatcggtgacccaaacttacctttaattatcagatatatgaccatgcaatactgatgttattgtt

SEQ ID NO: 256911 - DNA, 122 bp, Homo sapiens
cctggcatagagcagctcactcccagggattgattagtcctccactgccctgggtgcatgcgtacacaattccctggccaagcctggctcgagcacaggaagctcatctgcgttttggctca

SEQ ID NO: 256912 - DNA, 122 bp, Homo sapiens
aggaacatgagctgtaacagcacttgatccatcctgaaaccagggtttcgatgagaagcacgtgtgatgaaggaagaactagacaactttcagaattggagtctggcaagtgaattaatatg

SEQ ID NO: 256913 - DNA, 122 bp, Homo sapiens
ccccagccatctgggagtcagagagctttatctaagggggtaggtagcctggttgggaggcggggtttgaattccagctccaccgctaaccctctgatatggagcaagtgactctgcctttc

SEQ ID NO: 256914 - DNA, 122 bp, Homo sapiens
ctgccgcgccgcctcagccggtcggagctagacagaaaacgagcgcaggctcccctcccccgccttctcgcgtcctccccgccgtcgcgccctattggctgccagggcttcagcgatggtgc

SEQ ID NO: 256915 - DNA, 122 bp, Homo sapiens
tctcccagcccgcctgccccctcacttaggtacaggtgcaggtacaggtaggcaagcaaacgtctattggctgtggacttaacaggctcgcccacaggtaccttccgagcatgcgtggggaa

SEQ ID NO: 256916 - DNA, 122 bp, Homo sapiens
ggctggctttctcctaccctcttcaaatccactttaggagtttcgtctgggaaaagtatgcgccgagaagtcagccgaaggtcaggcaagtgccaggctagcgtgaccaggaaggctcctgg

SEQ ID NO: 256917 - DNA, 122 bp, Homo sapiens
tagccaaagaggcaaggggtattagcccagttattctcccctatgccttctcttcctaagcgtccactaggtctggccttggaaatctgttacttctacggcttcagatctgatgatatctt

SEQ ID NO: 256918 - DNA, 122 bp, Homo sapiens
gttcagcactttgacaccctaaatctttctcacctgagcaagtccatatctggcttgtggcgcatttcctttttaagatcccccgttatgagacattctggtcttatgtgtgtgtgtgtgtg

SEQ ID NO: 256919 - DNA, 122 bp, Homo sapiens
gggacctagcagacaagcagatagcttaactttgtctactaccaggcagcagaaagtcctcgaacttggaaggtatcctgcatttgcaggaagagcaatcagcacttctcatggctgaaggc

SEQ ID NO: 256920 - DNA, 122 bp, Homo sapiens
tcattgaacaacttttttaggatttttatttttatagacagggtctcactctgtggcccacgctggagcacaacattgagatctcagctcactgcagcctcgacgtcctgcgctcaagcgat

SEQ ID NO: 256921 - DNA, 122 bp, Homo sapiens
atctctggacttttctgccataatcccaaatcaggccaactctccttcctctaggattcgcgtggtgggatgccaggcagtgacacccttagagcaggaagtctgactgtagacccagctac

SEQ ID NO: 256922 - DNA, 122 bp, Homo sapiens
ccacacaagctctccaaggtctgcatccaagtcagaaggttccctttcccctcaacagatcggaacacctggggaaacctgctttcagacacaccctgtggcttgtacattgtttacatctc

SEQ ID NO: 256923 - DNA, 122 bp, Homo sapiens
aagcaaagatttcactgcccgctagtttaaaaatgaatattttaccaagatatcgatcagcgttataaaattcagttaagtacaatgggatcctggcaaaaaaaaaaaaaaaagaataataa

SEQ ID NO: 256924 - DNA, 122 bp, Homo sapiens
gtcacttcagagcaagaggtacagattggggggctgggttccagggcagggggcctacagcgaagagatggcagctgatgaagagagatttgggaagctggttccatgcatctttctcatcg

SEQ ID NO: 256925 - DNA, 122 bp, Homo sapiens
ggaggactgaaaagttaagagagaaatgtgataaaggggctgcagtctgtagtctgtaggcgtcgaattttggcctccacctttgtagtttagtttctggaatagggtgtccggctccacag

SEQ ID NO: 256926 - DNA, 122 bp, Homo sapiens
cctctgaggggctgtcggatgggctgggcgaggacaagtcactgcacctcagcttcccctcgtgaacatggggagaaccacatttcttgctttgaggcatggttgtgaagatcgattgaggc

SEQ ID NO: 256927 - DNA, 122 bp, Homo sapiens
gcctcacccagttggttcttatgcattgttagtctccatttgagctgaatgtggagcacacgcttgccatacacagaatccctcatttctcaaaatgtactgctcttttctcagtcaatcat

SEQ ID NO: 256928 - DNA, 122 bp, Homo sapiens
taacccagtcgggaaatggtgggacccacatgaagcagctcagcaggcgtggagaggcagcgcaggctccggaaatgttgaaatagaggagtcagtgtgtgttggaaggacaacacccatga

SEQ ID NO: 256929 - DNA, 122 bp, Homo sapiens
tccgccggccgcttttgtagccgtgggaggcggggcttcagcccagggcggggtccagcacggcggggcggggcgggacggggcggagccttcccgagctgcgaggtcgctgtctccttgcg

SEQ ID NO: 256930 - DNA, 122 bp, Homo sapiens
gaggtgaagctgcaggtgcagccacgtgtgggagtcttggaaatggaccagtggatggcgcgctgtcacacccaatgccccctttttctaacaaatagtttgtaatgtccatcttattctcc

SEQ ID NO: 256931 - DNA, 122 bp, Homo sapiens
ctctcaagctagtggctgggaggaaaggtggcaatggtggcttctgtgattgcatgacagcggctgggttgctggatccagctgtcctcatggcatccttgagcgtgccggcctgtcatggg

SEQ ID NO: 256932 - DNA, 122 bp, Homo sapiens
attcctataacaattaggtataaattttagaagaaaaatgttgaaatcctttgtcaatgacgcaggttaattctggcttctaattttggatagggtttctagctttgcccttttctctaaaa

SEQ ID NO: 256933 - DNA, 122 bp, Homo sapiens
gcttctcctcccctccccacagaagcagcaaaagaaaaggcacttacttgcaacctagcccgccgatcatccccacccagtgcacctgcagaatctggctccaggagagggcgcgggcctct

SEQ ID NO: 256934 - DNA, 122 bp, Homo sapiens
gctgggaaccggcccgagcaagccccaggcagctacactgggcatgctcagtagagcctgcggcttggggactctgcgctcgcacccagagctaccgctctgccccctcctaccgccccctg

SEQ ID NO: 256935 - DNA, 122 bp, Homo sapiens
cggccgcctccgctgccgcggccgcctcctcttcggggtcattaaagccaatgagccgcgcgcctctgccgagcgcagccaactaaatcggcttggatgattcgcgacctgagcaagatgta

SEQ ID NO: 256936 - DNA, 122 bp, Homo sapiens
catgtactaaaattggaacgatacagagaagattagcatggcccttgtgcaaggatgacacgcaaattcgtgaagcgttccatatttttgaagggattacaaaccaagagatacaagtggct

SEQ ID NO: 256937 - DNA, 122 bp, Homo sapiens
cgccaaatccaccgccgattccaccgccgcctccccggccaaagccactgcctgagccgccgcccgcactgaagccacctcctaaaccaccgcccatgcctccgccgtaacctcctccatag

SEQ ID NO: 256938 - DNA, 122 bp, Homo sapiens
tttctaccgctgcggtggatgattttttaaaggcatctccgcccaaggatgctctgccctcgccctcttcctggctctccaggcaagaaacgagagtccctcgcagcctaggccagctctcc

SEQ ID NO: 256939 - DNA, 122 bp, Homo sapiens
aatcattaatgaaatggaaaacaaacattaatgggaaatttgtgtaaccttaattcttaacgtgtcttatgagttaatttttaaaatgtgaagttttattcttggtgtttggtaattaacta

SEQ ID NO: 256940 - DNA, 122 bp, Homo sapiens
ctgactcttcttctgggaccctcatccttctgttcaggaagccaaaaagcttggtgtcatcgttcactcctttttctcaccccacatccaatccgtcaggaaagccagtgaccaccttcaac

SEQ ID NO: 256941 - DNA, 122 bp, Homo sapiens
catcagctgggctgggtctttaatatttaaagagctctcccggacatttcaagaactccccgacacgattttctgtgatgcgtgggctgtcgggacatctgtcttctatacctaataaagtc

SEQ ID NO: 256942 - DNA, 122 bp, Homo sapiens
ttagccaccatctcacaattgaccgtgcttgtggtccactagacccttcagattgttttccgttgtgataccttggccttgactctgtcctcttttctgtgtgtggcgtgttgtggcgacgg

SEQ ID NO: 256943 - DNA, 122 bp, Homo sapiens
gagctgagtgtcgggcctgccctgccatgcagggttatctctgatttatcagccacattccgggcctctgagatcagggcccgggaatgagcccctccgcgcctgcgacgtgggaggtggag

SEQ ID NO: 256944 - DNA, 122 bp, Homo sapiens
ggctcactacagtaatcaacctacatcaagctggcctagcccaatgccaccacctagtggcgatcagaggaagacatgccacctcctacgctggcattcaagggaaacagggacagctctgc

SEQ ID NO: 256945 - DNA, 122 bp, Homo sapiens
agccttaatctttccaacaaggctctgcagtaggtattattactagcctcattttgtagtcgagagaatggaaggccgggtgctgtggctcatgcctgtaatcccagctctttgggagatgg

SEQ ID NO: 256946 - DNA, 122 bp, Homo sapiens
ggacctctctttaggcctaggccaaactcttcagaagtcacgacacacagatgtgggccccggtcacgcctcatgagctgtctctgggaagaaaatctcccggcatcgctgcaccgtgtcct

SEQ ID NO: 256947 - DNA, 122 bp, Homo sapiens
atttatgtgctcctgaaaattgggcgggtccttctaactcctcctcccgcagctggggagcggttggcagcagcgggctggaaattccgacgattaaacaaagggagtgggtggagacttga

SEQ ID NO: 256948 - DNA, 122 bp, Homo sapiens
cactcgcagatgccccactttctaactgaaccctgaataatggctgtgaaaataattgcccgttattgcatttttggcatgcccactgtgcaccaggcactgttctagatgcatacatccat

SEQ ID NO: 256949 - DNA, 122 bp, Homo sapiens
ttggattctggtggactttaaagacgtgtgcaacaaaaaagcacgatggataatagattccgggagcaagcacaggcggaagcctctctgggaagtacaatccctgagcgtgtgtgtatcat

SEQ ID NO: 256950 - DNA, 122 bp, Homo sapiens
gtgtgagggacagttagaattcccaggaattccaagtctcatgggggagcaatagcctctcggagccccaggtctacggtggacattggacatgttggttttcctgttctcacggacctctt

SEQ ID NO: 256951 - DNA, 122 bp, Homo sapiens
caattagatactttagtctttctttactggcaaggagtgagaatgtgcagacaggcaaagcgtgttaatgctggtgcagccccctctgcttagaaggaggttcaggaatcaggtacaagtat

SEQ ID NO: 256952 - DNA, 122 bp, Homo sapiens
gccgaggctgggggccggtggcggatggagcccgcgatggagccggagactctggaggcgcgaatcagtgagtgtccgggaggggcgcgggccggaccggaaccggaaccgggggcacgagg

SEQ ID NO: 256953 - DNA, 122 bp, Homo sapiens
ctgctttgatcgctccagctctgttgtaattttgtcttcgccagatagattagctggaaccgccagccctagcttggagttccgttccacggagtaccctccctccccacccccagcgtcat

SEQ ID NO: 256954 - DNA, 122 bp, Homo sapiens
ccatgggaaaagctccatgagcgcccaggggacaagtccccacggacaaacatgtcataacgatttcagttttgtcccattacgtgaggttgtaagtttcttcatcattcccccctcccaac

SEQ ID NO: 256955 - DNA, 122 bp, Homo sapiens
acgtcaagcttatgaagcccatttcctggcccccttctaggaatgtcgggaggagggtgtcgcgtgggctttgaagtaggacagacctgggtttgggtttctgttctgccacttgtccttgg

SEQ ID NO: 256956 - DNA, 122 bp, Homo sapiens
cagcatctcccttttcggtcctgccgaatttccagcaggctcctgcctgggcgaggctgtcgggccgcaggggaaagagacctagagggtgtcgggggccaccaggcagtggcggcctggct

SEQ ID NO: 256957 - DNA, 122 bp, Homo sapiens
ttgcatcatccaaaaaagaggagctgtacgaaaaccctaagatgaaattggagcatgcggcggttgcagggtgtgctgcatctaggcctcttgcacctcgctgaatgggcctcgtagtctcc

SEQ ID NO: 256958 - DNA, 122 bp, Homo sapiens
cccttttcgactccacagtgggcttagcttagtggaggagatctgtggtatgttcgcacacgtcagtggaaggaattccagcaaattaattgggtgtcagcagtacttctataatgaagcat

SEQ ID NO: 256959 - DNA, 122 bp, Homo sapiens
attttttcatgatagaattaaaattttttcatgcatattataaagactgcaatatgtacgcggattttgatgctcaattccacagaaagctatgcaagcaaggtgggtgttttagagattag

SEQ ID NO: 256960 - DNA, 122 bp, Homo sapiens
gtctgcagctctgagccccacaccccctatttaaacaaagatagatcctgctccaggagccgggaagccttgccctggccagctgtgctgggcacctcccctgcctgcttcctggcccactt

SEQ ID NO: 256961 - DNA, 122 bp, Homo sapiens
gaacatgttccgagatgctgtagaaaaggtgctttcatggctttagacacagtacacaaccgctgctcagattgagtagtatctttttaatggcagggttgggaaggtgtgttttatttttc

SEQ ID NO: 256962 - DNA, 122 bp, Homo sapiens
ctaggcggaccctttccttcgaaaagtcctcagcccccggctcgggaacttggggtgaggcgaggttttcttttcgttctcatcttttctcatccccccaccccccaattcccagaggaaac

SEQ ID NO: 256963 - DNA, 122 bp, Homo sapiens
ggcggggtgcggcccagcaggaggggccccagccattgacctctcctgacccggatctctcgcaggcgcagccacaacaacctccgcatcacacgcatcctcaagtcgctgggtgagctggg

SEQ ID NO: 256964 - DNA, 122 bp, Homo sapiens
gccacacaccttggcttcatctgcctcctggacttcgagcggcaccttgacaggatagcccgaggcagcacggcgttcccgcagacgctgggcctgccgctgggcctcaactcgcttggctt

SEQ ID NO: 256965 - DNA, 122 bp, Homo sapiens
aatgacatgtcacatttctagactggcaaaactttaaatacgatgtcaaaatgttgtgcccgtatcaaagtttgtcttctaggattatctccaaaaagagcctataatgttctgcttctctc

SEQ ID NO: 256966 - DNA, 122 bp, Homo sapiens
cggtgaacatggtccccttcccccgcctgcacttctttatgcccggctttgccccactcacggcccagggcagccagcagtaccgagccctctccgtggccgagctcacccagcagatgttc

SEQ ID NO: 256967 - DNA, 122 bp, Homo sapiens
gttgctctgatggccgttggtactggtggtggtggtggtgatggttagtgtgatgactgtcgatgaaaaaagtcaaagtctgaaaaatatttaaggagatttattctgagccaagtatgagt

SEQ ID NO: 256968 - DNA, 122 bp, Homo sapiens
tttccaggttttggggtgggtgattgagtaggccgcacctgggacactgtgactggaggacgccggaatttaaggaggggacgagggagacgcagctctgtttctcgctgtaccccctcacc

SEQ ID NO: 256969 - DNA, 122 bp, Homo sapiens
ggtggtccaggtgacagaggccgccagggctgtgctgaggacaagaccatctacacagggcgtgggtcatggcagagctggcgcagccttcccgtcggcagctcctgggagggtgtcagggc

SEQ ID NO: 256970 - DNA, 122 bp, Homo sapiens
acactgaactcatctacctgctgcttgacatctcatctgcataccaagctatttggtggacgtccacaagcgcccccgcccccacgtagacccagttgggtccccgttccgtcggtcccctc

SEQ ID NO: 256971 - DNA, 122 bp, Homo sapiens
gagtctcgctctgtcaccaggctggagtgcagtggtgcggtctcggctcactgcaacccccgactccctggttcaggcagttctgccgccgactccctggttcaagcaattctgcctcaacc

SEQ ID NO: 256972 - DNA, 122 bp, Homo sapiens
ggggaggggcagagtgtgggacaggattgggggagtcctggggaggagagagggtgcagacgcagcctgggcagtggtggacccctagggagactcaccccagagaggaagggctgcttggc

SEQ ID NO: 256973 - DNA, 122 bp, Homo sapiens
gtagctctacatcagattcatgctccagtcctgtatatccaaatgatgactagaggctgccggctctgctctttcaaaggcacaatgagtgtagccggtctacaaaactctcccttttccaa

SEQ ID NO: 256974 - DNA, 122 bp, Homo sapiens
acctcctgatccacccacctcagcctcccaaagtgctgggattacagtcgtgaagcaccacgcccggccccatcacagacttttgagtgcaatgccaacaggttagaggcagacttcaggag

SEQ ID NO: 256975 - DNA, 122 bp, Homo sapiens
cagaattttctggggtttatataccctctagaggtttcccattggttcaccctagtagcccgcaaccagtctgattggttgaagagtaggcccacgaccagtctgatgggttgtgggagggg

SEQ ID NO: 256976 - DNA, 122 bp, Homo sapiens
ctatcttcaggagggctgggtggctgtcaccctcaataggtgccatcagtgtttggtgcccgcctggctccaagggtcagtgacggtcataggcagtggcggctgcaggtggggcggctcct

SEQ ID NO: 256977 - DNA, 122 bp, Homo sapiens
acgtaataataacaataatgaaaagttactcttatccctgacacttcctacaaattatgacggagaaatttccattagatagagattgagtgcagacactctcagatccacattccgtttct

SEQ ID NO: 256978 - DNA, 122 bp, Homo sapiens
caactgtcaggcgaaacgggccggcggatattggctcggcgacacgccgaggctcctccccgagtctggatctttatattttgggagaatttctttgaactcagttaccaagctcggtgaag

SEQ ID NO: 256979 - DNA, 122 bp, Homo sapiens
gttttaaacgagctgtattaccccgcacagtgcaggagaaaagataattggctcaggtctcggctctgccatctaccacctgtggagccttagataagtcagttcttatctctgtcactcaa

SEQ ID NO: 256980 - DNA, 122 bp, Homo sapiens
caagaagccgcacggggacgtgaagaagtccacccagaaggtgctagacaccaagaaggacgcactgactcgcctcaagcacctgcgcatcgtcatcgagttaatggtggaactggctgaag

SEQ ID NO: 256981 - DNA, 122 bp, Homo sapiens
tcctctggtactgtggagaaggtatcaggtgacatggctgcagagcttgttcagccccctcgaggattcctttgggtcctatatcttgagaagtagctgtcgtaacccatctccccatgccc

SEQ ID NO: 256982 - DNA, 122 bp, Homo sapiens
acaagaggctctcttggcttaaagggagcccagcttgggccagatcaggtgttaaggacacgtgagcaccaaattgagcctttctcagtgatgaggtcaaaaaatgaaagcgcgcaggaagg

SEQ ID NO: 256983 - DNA, 122 bp, Homo sapiens
aatgtatgtgtgtgggtattcgtatctgctacggtgtgtacacacagtgtggaggtggctcgggctgggctgaacctcagaggttcccacgaaggcacgctcttcttagcctggtcctggca

SEQ ID NO: 256984 - DNA, 122 bp, Homo sapiens
acctctgaactccttgggggacacgtatatctttgagaatccgatgaaaaccagagattccgcccttgttttcttagaattaaagtaagataatatattttatggcctgttgcaaacggaaa

SEQ ID NO: 256985 - DNA, 122 bp, Homo sapiens
ggtaaaccctttttgttcctacaagttgatttcacaaggagataactcacccccacaaggcggaaattagctctttaaacacaaaccagacccacgggtaggcaagaggagccccgcctgcc

SEQ ID NO: 256986 - DNA, 122 bp, Homo sapiens
caaatggaagccgagggggtgtcccctcccagttgaggcctgggggctggctaccaggtacggatccagagaagggtcggcatcgtcggcaggcgcctcctccaccgacagttggaagctcg

SEQ ID NO: 256987 - DNA, 122 bp, Homo sapiens
tttctctctttggttatctagctgtatgagtgccacagagccgtcataaagctagataaccgaaagtagaaatgattctcacaacttctgcgtgcgagcgcccgccccaccgaccgccccgg

SEQ ID NO: 256988 - DNA, 122 bp, Homo sapiens
actgccattattcagtgtgccagcctgtttccaagcctacaatgtatagttcctctagtacgtaaactcattttttttctcagagagccaagtagagacacaggcagttttcttctcaaaat

SEQ ID NO: 256989 - DNA, 122 bp, Homo sapiens
cagaggccagcgctggaagcccagaccacagcacccgggtttaaacaggagcggaggcgccgggaagggccgggggggccggctagggccggccagcttggaagccgcaccctcgcggcccc

SEQ ID NO: 256990 - DNA, 122 bp, Homo sapiens
ttacagaacgatctagtttcaaactatctatgtttaacttcgactttttcctatcaggctcggtgctgctattccactgagctcatggaaaattaaatctttattaggagccttccaagatc

SEQ ID NO: 256991 - DNA, 122 bp, Homo sapiens
taagtggaggagaggccgggcagccggctagtagaagggtagtggcgcgtcttggagtcacgctggccgagtggaaagaatagcgggcgaggcgcaggagaggggagcccaggtttggattt

SEQ ID NO: 256992 - DNA, 122 bp, Homo sapiens
tccttttctacggtggaatcatattccctcgtgcgcattcgtcagggttcttccggcaagcggagcccataagacgtgccactggagaggttattgcagggaattggccacacgacctcgag

SEQ ID NO: 256993 - DNA, 122 bp, Homo sapiens
cggcttccctgcagcccctggggcgggggccttggagggccccgggcaccctcggagccgcggagccaaatggagcctcagactgctttccatcgctggcaattccccgtctgtagcacttg

SEQ ID NO: 256994 - DNA, 122 bp, Homo sapiens
tagccaacccccaaaataattaaatcacctcaagggactctaggtccaatatccgcagcacgccacacaaacatctctcagctcagccacgcagggccgatgcctgcgcgacccacactcag

SEQ ID NO: 256995 - DNA, 122 bp, Homo sapiens
aagggtctgtctgcagatgagcgggtaaacaaaacgtggtacagtagtcccctttatcggcgcatgacagttccatgacccccggtggatgccggaaaccatggatagcattgaaccctacc

SEQ ID NO: 256996 - DNA, 122 bp, Homo sapiens
gccctctccacctgagtgtccattggccacagtgtctggagcctgcgactgcccctcgcccgtcccgaggttcagcctgacccggtggcctggccggcactgactgaggcaatcccctctct

SEQ ID NO: 256997 - DNA, 122 bp, Homo sapiens
gcccttctgtcccccatccagcctctcctctgccctgctgtccctctgccccatctatcccgcaggagcccccttgagcctgtcatcctgcctggttgtaatagctttcaccaccttctcat

SEQ ID NO: 256998 - DNA, 122 bp, Homo sapiens
gttcatggaggctgcgctttgtgaggataatgaagatgagcaggctgttcccaagaagggcggtgacataggaaatgaagaatgggatagaaatccacatgtgctggtcctgtaggccaggg

SEQ ID NO: 256999 - DNA, 122 bp, Homo sapiens
caggggcaggggagccctctcacagcccaaagcatcccttttccccagggctactaccgccgcacagccgagtacttccccaccaagaaccgccagcgccggggctgcttccgtgtccccat

SEQ ID NO: 257000 - DNA, 122 bp, Homo sapiens
gcagagatttctctcagcttctaccctgcccccatccaaatttcgccaacctccttctctcggatccgagcccttaacctgggtggaaatgtttagacaactgtacgaggatcaaatgtaat

SEQ ID NO: 257001 - DNA, 122 bp, Homo sapiens
tcccactgagcttgtggttagacctggttagaccccacaagcctgggctggggtgaacatcggagggtgttccagattccttagagactgctgggtcccagtcacttacagaacagagggag

SEQ ID NO: 257002 - DNA, 122 bp, Homo sapiens
gcgggggacccgggctgtcccgggcgtggctgggcctcggaggggcgcttgggccgggagcgtgcatccggctcccgggtggggggcgccagcgcaaggaacctgaccccgccctcctcccc

SEQ ID NO: 257003 - DNA, 122 bp, Homo sapiens
cgcaggcgcgctctgcctgcctcctgtgaacccgccatggcggagctgcccctcagagaccgccttccagggtctttgcttgtctgacacccgtggctgcatcaggaccccccagaagcggc

SEQ ID NO: 257004 - DNA, 122 bp, Homo sapiens
cagccaggtttctagggatcaaggtctctacaggactctcccagcaaaagcaggtcccctcgtggaatgggtctctgagtgccctgttgaatatattctccatgcctgctttgaaaaaatcc

SEQ ID NO: 257005 - DNA, 122 bp, Homo sapiens
gcgaggcccctgtggccaatgacaagcccaaaaccttggtggtcaaggtgcagaagaaggcggcagacctccccgaccgggacacgtggaagggccgcttcgacttcctcatgtcctgtgtg

SEQ ID NO: 257006 - DNA, 122 bp, Homo sapiens
tggtcgggtgggcggggccggcgggggtggggcactcactcaggcgcagcatgccctccccgttgggcttgtcgttctcccactgtccctcgtagatgtcgccgttgctgtaatacatgcgg

SEQ ID NO: 257007 - DNA, 122 bp, Homo sapiens
gaggtgacagaatggcctgaaagtgcactgcatgactgcgacagatttcaaacccaggcacgttgctctggccttatgttctttctgtgactctaactgcctctcttgcagcaacagaactg

SEQ ID NO: 257008 - DNA, 122 bp, Homo sapiens
ttgcagttgtgggtgtttaatttggagtgatgaaactgtggtcccacaaaaacttgttcacgaatgtctacaacagcttaatttgttagttgaaaaggtcaataagcccaggtgaatgttta

SEQ ID NO: 257009 - DNA, 122 bp, Homo sapiens
tgggagatatgggagatgatatcatttggatgggtgtccccgttcaaatctcacattgaacgataatccacagtgttggaggtgagccctggtaagaggtgactggatcatgggggcagatt

SEQ ID NO: 257010 - DNA, 122 bp, Homo sapiens
gatgctccctgcaaagctgcctccccccacagatccaaagagcctcttggaatgggcactcgactgttctgacgttgtgattctctcgggagtttgaagacagaaaggaaaggggagaaacc

SEQ ID NO: 257011 - DNA, 122 bp, Homo sapiens
ctcctggggtatcaaactttagatccactgaggacaaaggaggatggttggggtgctaagcgcagccacagaaactttgggggggcagcattccccaatccctgctctctctctcctaccat

SEQ ID NO: 257012 - DNA, 122 bp, Homo sapiens
gccctttgctttacgactggatgcttgatcatttttctcggcctttgatcttcttgaaatcgcaattgtatctgatgcctcagactatataaactaatggatgagttaagtcccagacaaga

SEQ ID NO: 257013 - DNA, 122 bp, Homo sapiens
agctgcaagacacacaccttggagctcacccagtccaatctctgatctgctttcacgatgcgacaagggccaaagctgcagcacgcatctcggcagggcagcaggccactccccccacgagg

SEQ ID NO: 257014 - DNA, 122 bp, Homo sapiens
cgggtcctcgctggcggtgggcgggccagggaggacaagcactggaggtgtgcccgtagccggacttgcttcagctgtcgatagtcgaggccgttaacccttgcggtctcggtcctgtccac

SEQ ID NO: 257015 - DNA, 122 bp, Homo sapiens
aatgtccttaggatgcccacatgtgttcagtcaaggtcggtcgtgatggttgccggcgtccgctgcaggaaaggcccccaggaatcagcttgtagggtgggcgccagccggtactgcacagg

SEQ ID NO: 257016 - DNA, 122 bp, Homo sapiens
ggggcaaggtgcagcgtcaccccctgctttaatactcaccgtgacaaacaccatcataggcggtgacacttaaggacgcataagtcaaccctgcactgggagcttatgctctcaaatgcaga

SEQ ID NO: 257017 - DNA, 122 bp, Homo sapiens
gggcctgtggtgggtctgacagcacatcactatggggagatgctttggtgtcatagacagcgatgtctcttggtgacacacacagctgccaccagggccaggaagtaggttggcccctctca

SEQ ID NO: 257018 - DNA, 122 bp, Homo sapiens
ctccaccctcgggcattccgaaaagtcaaatcgagcttatgcactcaaatccaagtagggcggagccaaacctgtgtcctgggcgcctgccgggcaaggcgcggggactggacgggtcggaa

SEQ ID NO: 257019 - DNA, 122 bp, Homo sapiens
agctgcacacgcccgcttgcggtgggacccgcggccggacccgtactcgcgcacaggacacgcagtgttctgcagccggccgcgggtgctgccagacacacacactctctctctctctctct

SEQ ID NO: 257020 - DNA, 122 bp, Homo sapiens
ctgtccacacaccgccccccctgtcatctgcacgctcctctgtgacgtctgtcctgtccacgcaccactttagtgccacagcacaggcaggaccatagccgggtctataagccagaacgcag

SEQ ID NO: 257021 - DNA, 122 bp, Homo sapiens
aatttcttttaactttgctgtattctcagttttcttcgaaaagcaaagccttgtcccttgcgaacgctccccacgaaggcttgcgggtggttaggccgccatgtcttctgtttcacattctt

SEQ ID NO: 257022 - DNA, 122 bp, Homo sapiens
ccctctggcaaaaagcttttgaaattttctgttcgagagtaatcaaaactatcagcaaaacgatctgttggaaactttccctccagtctattaaggtagagactgattcaaagacagtattt

SEQ ID NO: 257023 - DNA, 122 bp, Homo sapiens
gataaccagatgcagatggaggaatccatgctttcagcgaaattacattaattacttggacggtatgtggctaaataagattccacaaactgacagcctgcagacaggatttgtcctgaagc

SEQ ID NO: 257024 - DNA, 122 bp, Homo sapiens
gtcgtgccagtcttcgtagagacggccacactggcccacagaccccagttcctggggtgacgcagctgggcgcgaccagcacgcagccttccagcgacgaggcggtcgcatggaagttactg

SEQ ID NO: 257025 - DNA, 122 bp, Homo sapiens
gggcaggtcagcagttcatttctctgactgcttccttgactctctctccaggtaggtgcacgtctcatcgcacatgctggcagcctcaccaacctggccaagtatccagcatccacagtgca

SEQ ID NO: 257026 - DNA, 122 bp, Homo sapiens
ccctggcttgtttacgtttaaagctgctgactcttaaagctccagccgttataagcaaaacgcagctagacacttttccacgccttctctgttgcttctgtagccctcttcttagaacatga

SEQ ID NO: 257027 - DNA, 122 bp, Homo sapiens
gtggttgccgcagccgctgcccccattcagggaccgaattgaaatggatatttccctcctcggcccagctgaacgaggctcaatgcctcaaagatgcagagctgcctcggtggacatgctct

SEQ ID NO: 257028 - DNA, 122 bp, Homo sapiens
gtcaaagccgttaaaacagcaccattatgcctaacacagtattagctaagtccatttttgcggactaagctaaagttgttgagttcagcgccaggcttccaagttttcagagaaaatttgta

SEQ ID NO: 257029 - DNA, 122 bp, Homo sapiens
gttatacatttccttttcccccgagccgctctaacaactgctgcatatattagcagcgggcggtgaggaataacagccgaaccagccttaagaaactttgtgtaccgagtcagcagcgagga

SEQ ID NO: 257030 - DNA, 122 bp, Homo sapiens
cgctgaatttgtcattgtccacaagtgtagaaaaatgtggtcacaagtcagtcctcggctcgcgtacgaagaggcggtctgcccagtggggacgcgggacccccctgtttcccctattttta

SEQ ID NO: 257031 - DNA, 122 bp, Homo sapiens
taaccatactggggagaggcgtgggcaactgagaatggaggggacctcggagggagggcccggaaaaaatttttaaaagccagtcccacaactccgcgacacgtcccagccaaggcgcggcg

SEQ ID NO: 257032 - DNA, 122 bp, Homo sapiens
acaataaagacgtcaggacagaagtcctagctgtgaaaagttctcggtcatgaacacgcacgaatgcccggccagctctgcgctccttcgtcaggacagaagtcctctctgtgtgaaaagtt

SEQ ID NO: 257033 - DNA, 122 bp, Homo sapiens
ggcggggcacggggtggcgctccctggtaaagcagcggccagggggagccgtgagtgaggcgctgcctctcccgctgaagcgggttccaaggccaccgtgagggggaccatccatccaggta

SEQ ID NO: 257034 - DNA, 122 bp, Homo sapiens
aacagtcagattcaagatgcggtagattggcaccttaacctcttttggctcttcttcccccgaatcaaaacccactgtaaacaccgcgaagaaccaggaaacttcacggctttaatcatttc

SEQ ID NO: 257035 - DNA, 122 bp, Homo sapiens
ggtctctgcagtgttgggacagtgatagcaaaccttacagcccttgagtgctcccttagacgctaaaatccagaaatgtttccatcaccgtccaaactggccaaggcctggcacaagcatcg

SEQ ID NO: 257036 - DNA, 122 bp, Homo sapiens
gcgcgggcgcattcttcgccttttcttcctcgggctcattccggccgatcgatacctgcgcgggacctgcccccgccgctaatatctttttaatgagttcgccaggcttaaagcgagcgcga

SEQ ID NO: 257037 - DNA, 122 bp, Homo sapiens
ggaaggagagacaatcatgggctgtatacaccttttcccaggtctccactaatctgaaatcggtattagcggaatgaagactttggggccttggaaatttttaaagaggtttactttttttt

SEQ ID NO: 257038 - DNA, 122 bp, Homo sapiens
ccggccggggtgggggacgagcgctgggttccgtccaagcactgttgaagcaggaaaccccgacgactctcggcgaagaatgtctctgctacccacaactttctcactgtgccaaaatcagt

SEQ ID NO: 257039 - DNA, 122 bp, Homo sapiens
gaggaggaaaaggtggaagagaagattgagccgaaagaagagggggcgcggcggcggcgacggggtcccctgactgtgtctccagcccgacccggatgagcagctctggggaggaggaccag

SEQ ID NO: 257040 - DNA, 122 bp, Homo sapiens
ggcggcggggggcaggtgcccggcgaggagtggcgccctcctgtgttcaaagaggggaagcgagcgattctgcggctgcagccgctcagcatcggagaagattgatttgtccgtctgatgtg

SEQ ID NO: 257041 - DNA, 122 bp, Homo sapiens
ccagccgggccccgtcctagttcaatcaatcaagaaaatcaagagtacgaaggccttgtgcggtctggacggtctttccacgtctcaggtgcagttaagccagtcacactccatccacctac

SEQ ID NO: 257042 - DNA, 122 bp, Homo sapiens
ggtccctggggagtgacccaagctcatcactctgtcctcatcctgccctgatcaaggatgcgggggctcagtcttttctcaatcgccagcttcctttcgggtcagaagttatgctttgtgtt

SEQ ID NO: 257043 - DNA, 122 bp, Homo sapiens
gcagtatgaattggctaccaacaaaattcttcatctctttaaaagctttcactttttttgcgcctgccaaaggagatacttagattttgatcactgttaattttatctagactattgataaa

SEQ ID NO: 257044 - DNA, 122 bp, Homo sapiens
caggacatgccgaaccctaacggaagtgatccagatttgcctcagcaaagcagagaaacacgaagccagagcttcccaggtcccccagctgacgccaggatcctgggccaacgcagcgcctc

SEQ ID NO: 257045 - DNA, 122 bp, Homo sapiens
gcatctccctttctcaaacacttttatgcaactcccgagtgtgcaccctaactcactccacgcggtgggaaaggttgactttgacagaggtcgtgagcagttgcggggtcggcggcaagtta

SEQ ID NO: 257046 - DNA, 122 bp, Homo sapiens
aggagcacctcgacagttaaaccactgaccagagggatttcggcagaggagtaacttgatcggatttctgtttataaaagattgccatggctgcacattgcatttgggtcaagagtggaggc

SEQ ID NO: 257047 - DNA, 122 bp, Homo sapiens
taacgttgtgaaggtgtccagcacatagcaaccttcctgccttttccctcgaggatgcagcgccagagggtggaccttagcctttgtatcttgtgcttcctctgactcctgtttttgttttt

SEQ ID NO: 257048 - DNA, 122 bp, Homo sapiens
ctcgcggcgcccaggtgggacccgggcccgggacccgaggcgtgcccgctcggcccctttcggtcttgggtccccgctgccgccccggccccagactcgcgtctcccagcctctgccgcccc

SEQ ID NO: 257049 - DNA, 122 bp, Homo sapiens
ggccctgtcctcagatgtgttcttcaagctgtgcctgctcctggcaaggccagacttccccgcccagggatgctgggagggccatggagggcccgggagagaaaggcagcagccgcagcatg

SEQ ID NO: 257050 - DNA, 122 bp, Homo sapiens
gtgagaacaaccctcaccctcaccctggagttacaataggcgggaaacggggaggggccacgcaaggcactcggccccacccagaccctgggctggaagcttacctcaccaaagccaaagcc

SEQ ID NO: 257051 - DNA, 122 bp, Homo sapiens
acggctccacttctgaaaaggaaaacaggccaacctcacctcggctggcagccatcgggacggcaggcagccgtggtggggagcaggttttacaaccagacatggctgctggtggtaacaag

SEQ ID NO: 257052 - DNA, 122 bp, Homo sapiens
aatcaggtgctgcgcctcggccagtcaagcgggtgtgtggcaccttgtgggcggagaccacgcctctctacgcggggggcggggacacgcggctcgcgcgctgtgggcggtgcccggcgggg

SEQ ID NO: 257053 - DNA, 122 bp, Homo sapiens
ttgcttcccctgctacagggagagcggcaagagcaacgtgggcacttctggagaccacgacgactctgctatgaagacactcaggagcaagatgggcaagtggtgccaccactgcttcccct

SEQ ID NO: 257054 - DNA, 122 bp, Homo sapiens
ccgggccgctgactcgccgacccccgtcccgcccccacccccgcccccgcccctgccggccgccttagcgcaactccccgccccccgaccagcttcggcctggagcacgacggcgcgcccgg

SEQ ID NO: 257055 - DNA, 122 bp, Homo sapiens
caacaatgactcggagctgctcaagttttatcgaagccgctccaggtgcggcatcatcaacgacccctccaacagctccttcctggagtgccatggggtggtgaacgtcactgcctattacc

SEQ ID NO: 257056 - DNA, 122 bp, Homo sapiens
acacgtgtgtgtgggtacacgtatgtgtgttgtgtgtgtgcacgtgtgtgcacgtatgtgcgtgtctcgggtgtgtgcatacgtgtcaggtgtgtccatgtgtgcattgtgggtgtgtgtgt

SEQ ID NO: 257057 - DNA, 122 bp, Homo sapiens
ctctggcagcagcagcatctcagctgggctgcagaagatggtgattgagaacgatctttccgggtaagagctgccagccatgttgggtgtggtgggtgcgtgtgcagactaggcacagccca

SEQ ID NO: 257058 - DNA, 122 bp, Homo sapiens
ttcgccaccgttcggcccccacacgccacacccacaagtcggcgaagcccaggagaccaccgaggagtttaatcgagagatgttctggagaagactcagtgagtgcgcctccttccgggctc

SEQ ID NO: 257059 - DNA, 122 bp, Homo sapiens
tagaaactggaaacaactcaaacaccttcaccatcaatagggcaaactgttgtacatccacgcaatgaaacttctcagcaattaaaaggagcaagctgttgatatgcttaacagcatggatt

SEQ ID NO: 257060 - DNA, 122 bp, Homo sapiens
aggagcctctcactcccgggagcgggcgcctcgcgctccctccctcggccccgccccgcccgccgctcgcccgttgcttcccacctgggcccgaagcgcccagcgccctctcccgggacccc

SEQ ID NO: 257061 - DNA, 122 bp, Homo sapiens
ggggcattcgcgtccccgagagggcgcagcagtggggcctgcgagctggggccgggtggccgcgccgggtcggagtgtggctggagaggggccgccccggaagcggtgctgcgcccaacgtc

SEQ ID NO: 257062 - DNA, 122 bp, Homo sapiens
aatgaatacatcctcagcagagccagttgcctgagggaggttactgaatcttctgggagtcgtttgcaggcctttagacactgggctcctttctggaccatgcccaaactagtgacagatgc

SEQ ID NO: 257063 - DNA, 122 bp, Homo sapiens
tccagactctgtcttggctgctgacttctctttccctctctgggcctcagggtcccattccggccacaagcatacacaggacacagcaaaggtggacttgactaatgcagcagggaacagca

SEQ ID NO: 257064 - DNA, 122 bp, Homo sapiens
gcccgcagccattggatgggggccgtgcaacgcctgatgaaaatcatcatgctcaattatcggcttgtggcacatttcctagttttgtttgcccagaaaaaagcaaaccgtcagcgcactag

SEQ ID NO: 257065 - DNA, 122 bp, Homo sapiens
ctgtccccacaggtgagtacgtcctgaccgtgctggcatctaatgccttcgagaaccggacgcagcaggtgcctgtgagcgtgcgcgcctccctgccctccgaggctgtgggtgtgagtgac

SEQ ID NO: 257066 - DNA, 122 bp, Homo sapiens
gtatctggcaaagggctgtcccaggatggaagggcagaaggtggaagcaaatgagagacacgaaattgggccaaatgtcgtccatccatcaggagccactcccatgataacagtatttatct

SEQ ID NO: 257067 - DNA, 122 bp, Homo sapiens
tggggggaaatccgggatgggacctaagaatgctgtttttaagcacaaaccaaggaatcacgtaatataatattcacatggttagaggaaattaaagatcaatcctaattacactcggcatg

SEQ ID NO: 257068 - DNA, 122 bp, Homo sapiens
ggaaagtcacgaagagagaccgtggagagcgacgacggtgtcctccatctgccctcttggcgtctgaagtccgactcctgaagaccccctgcaggtggcgaacctccgctaggcccccagcg

SEQ ID NO: 257069 - DNA, 122 bp, Homo sapiens
aaaggagggagggaaggaagggatagtgtaactgcactgcaactgaaagaaaccagagaacggaaactcatggtgacctggtgactgcttgagcatttattgcttaacagctacttgtgcga

SEQ ID NO: 257070 - DNA, 122 bp, Homo sapiens
gccaccctccgtcacagcccccaccaccctcacctgctcaggatgcggctccgggctttgcggtagacgatgatgcctgccagggtgaccagcacaactgccaggagcaccagaaccaccac

SEQ ID NO: 257071 - DNA, 122 bp, Homo sapiens
gaacaagtttcaagtgcgtgtgtcgtcgatcaggagggccaggtggcggcgagggcgggtcgttagtggcagccggagcggcagggaggcggcagccccgcttcacgggcggggagacatgc

SEQ ID NO: 257072 - DNA, 122 bp, Homo sapiens
gggatcaccaaaactgccgaagtctggaaaggatgtcctgtcgcctgtctgctgtgcacccgtcttcaggcccctaccctggcactcctgcctctcaaaccggaaggaagggtttgggagca

SEQ ID NO: 257073 - DNA, 122 bp, Homo sapiens
gcgttcctttaaagacgtctttgcccatcccaggtcgtgaaaatattatccaactttcttcgacaggcccgattgcctcatagttaggcctgtgactctccctgggttaactttgtgaccgg

SEQ ID NO: 257074 - DNA, 122 bp, Homo sapiens
ccgtggcttctgatccgtctcttttccccagggctccctccagcagctcaccgtgcaccccgaccccaggactcccgaggagctgtgtgaccctgaagagtcctcggtgagctcccctacta

SEQ ID NO: 257075 - DNA, 122 bp, Homo sapiens
tcacacaataatgtcctttatagtaattcttctcctgccctaggattcaatccaggattacgcagattctgtactcagttgtcatgtctctttagtctcttttaatcaggaacagttccttt

SEQ ID NO: 257076 - DNA, 122 bp, Homo sapiens
cactctgcctttggggatgagaacgtgtaccatactcatattacatatacagattcaggccgggcacggtggctcatgcctgtaatcccagcactttgggaggctgaggcgggtggatcact

SEQ ID NO: 257077 - DNA, 122 bp, Homo sapiens
tctgtgaggttagcaaaggggaagccccgcttctttgcctgaagtccttaagagctaagccgacaaagagctaagagtcaacaaactttgacaagcaccaaaagagaattgagaacaaataa

SEQ ID NO: 257078 - DNA, 122 bp, Homo sapiens
acccataagtactgtgtggaaccatggagcactgttcttgagaagccatttggaaaccaacgttttggtatataaaaaagatacaccaacttatgtcccatacagatggcaactgttagcaa

SEQ ID NO: 257079 - DNA, 122 bp, Homo sapiens
tgagcctccagtgaacccgggcccctgaggtcctgctcctggcacgtgtgggcgacttctcgacatggactccgggtcccgaatccctgctcccagcacagcaggggtcaggcagcaggaga

SEQ ID NO: 257080 - DNA, 122 bp, Homo sapiens
ccataaccgcccaacctctcccagccgagctgatcaccagaacctgcgcgaatctctccacggtcagccccacccagggctcaggctccgcccccgggcctccatagccccgcccaccgccc

SEQ ID NO: 257081 - DNA, 122 bp, Homo sapiens
ttctgcgctcttcccctccccccgccccccggtttcccgaagcacgacccgcgtctctggcggagctgcctcctggagtccctagtgcgccaggagcctcgctctgttctgattcgtatggg

SEQ ID NO: 257082 - DNA, 122 bp, Homo sapiens
cccccacctggcttctgaggagcactcaggggcttccccgaggaacggctcctcctaagacgaggtgtgccgggacgggccgtgttgggccgcgtgactgtctgcataagcagaaaccaact

SEQ ID NO: 257083 - DNA, 122 bp, Homo sapiens
caaaattaaagatcgcaaccactcaaggattgggtcgaacggaggaacccacacgatggacgccgggtccctgcccccggtgggtctcggcgggccgagttctcgccctccagggaaaggag

SEQ ID NO: 257084 - DNA, 122 bp, Homo sapiens
aaagcttgctgtctttgcaaagccaaccactgtggcatcaactccttcaggaagccctcccggattgtccaaggtgctcacctcctttggggagccctcccagattgtccaaggtgcttgag

SEQ ID NO: 257085 - DNA, 122 bp, Homo sapiens
tcatggcgcccggacgtccgttcaccagggacaccacgatctgtgggcagtatgcggtgacgccagtgtggccctagcccctgctcagcactgcccctcccgggcccacctttcccttctcc

SEQ ID NO: 257086 - DNA, 122 bp, Homo sapiens
cgtactcaccgccattgtcggctccctgggttcgaagcccgcgaagactggtggggtcagcgggcggcacggtcacgcgtccgcacccctgctagcatacgcgcttgccgcgctgtctgcgc

SEQ ID NO: 257087 - DNA, 122 bp, Homo sapiens
gacaaacctatgtcctaggagaactgacaattcaaattcaacaagcatgagtttccatcacgtgcaagactcaaatagtactatcagccatatgtaaatgtttaggtcaaagattcacacac

SEQ ID NO: 257088 - DNA, 122 bp, Homo sapiens
aatgaaatgggatcatgtatataaataaaggcttgcctggggttctttctcagcggagatcgctgcctgcaattctcttccttgcttccttttgccccagccagtgggagcagcctggtggt

SEQ ID NO: 257089 - DNA, 122 bp, Homo sapiens
aatttagatactagagaagtatctacatttacaaggcaattggaaatgactaagaaagaacgtatactgttgaaaaccacaagaatttcatgtcaaaaaatgaaggtgccaaggttataaat

SEQ ID NO: 257090 - DNA, 122 bp, Homo sapiens
tggttttagctgttagagctcttcacagccatccaggctcaaactaaacttcagatttaacgggttttctgtgttagaaatcttggaattgtaggagttggaacgctgcagccaccctcccc

SEQ ID NO: 257091 - DNA, 122 bp, Homo sapiens
acgttgtcctcagtaaaaggctccatttggaagcaattgctaaaaaaaatttttaattttcgtgttctaaaactgtgtacttgtgatgaaagaatgaaatcagacttgcagctctttctgtc

SEQ ID NO: 257092 - DNA, 122 bp, Homo sapiens
accggggccagacccgcatgcaggagtgtgcaggcatgtggatgcgtgcacacacactcccgcacatacatgcctgcacacacacacacctgcacacatacacatgcctgcacacacacaca

SEQ ID NO: 257093 - DNA, 122 bp, Homo sapiens
actccgctccggagcctcagccccctggaaagtgatcccggcatccgagagccaagatgccggcccacttgctgcaggacgatgtgagtttcccagcctggccccgtaccgccgggtcgcag

SEQ ID NO: 257094 - DNA, 122 bp, Homo sapiens
ccacaccggggggcatcggctgagaggttcctggctttggggtctgtgctgtgtccccaccgggagtggctggttggtgggaggtgctgttttctgcacccgggggccccccgggtgtggac

SEQ ID NO: 257095 - DNA, 122 bp, Homo sapiens
ccaaacactttaaggcattcatgtggtcgctaggctgcagggttgaaccctggctcaccccgcagggcgccgtgtgctctgtggcctggctgtgcctttgctgacaccgtgcccgtgtgtgt

SEQ ID NO: 257096 - DNA, 122 bp, Homo sapiens
ctacagtccttttttgagtaaagaattcgggggtcaaaaaagtttgaggacctcagactgcgtgatttctgagtattgtaccacgtaccccagtctgcccagatggaccaatgacagtggag

SEQ ID NO: 257097 - DNA, 122 bp, Homo sapiens
ctgaagttttaattccaaaactctgctggtctccaagatttacaaattgccagccatcatcgtcactcatattttccacatcctgtgtgtctaagagagcaacatcaggtttagctgaagca

SEQ ID NO: 257098 - DNA, 122 bp, Homo sapiens
gtcgggggattaggagtaggggtggtttccggttcgacggtcgccatcttagatcgatctcggtcttaaactcttgagctcaagggatcccccttccttggcctcccacagtgctgggatta

SEQ ID NO: 257099 - DNA, 122 bp, Homo sapiens
gagttatcatctacttcctagcacacgtttatcttagggctgtgtttaaacattgcactccgtcatctgtattaggaatttaaaaaatccttaaatcggcattattatgcaaaatatacaaa

SEQ ID NO: 257100 - DNA, 122 bp, Homo sapiens
cttcttgacatctagcaaaagcactaatccaaagtaaatgaatttaaacaatacaaaatacgcaggagtatcagctctgtgtgccatgtgtataactcatgggcaatccacactacatacca

SEQ ID NO: 257101 - DNA, 122 bp, Homo sapiens
gctcacaaaggcaatatagtcccacatagcaaaacaacaaaactcccacaaagcgcgagacgacccgatacacgttcccactaaccagctgggggcagcctgcttttattctcttatctggc

SEQ ID NO: 257102 - DNA, 122 bp, Homo sapiens
cgccgatggcaaggaaagggcgagcaccggcttcagctccgaaacttggcttccccgggccgcgaccccaacccgcagcccctcacgcaggcccgggcccagcggcctccttcggaggaagg

SEQ ID NO: 257103 - DNA, 122 bp, Homo sapiens
cccgaccgcctccccgcggggcccccaaccccggcccccacccccggctctccccgcccccgccccatcccccaccggcgcaggttcaggccatcgctgccaggaccccccgctgtcgccgc

SEQ ID NO: 257104 - DNA, 122 bp, Homo sapiens
ccccccgcccagggtgatctcacacaggagacttccattcacatggaatcagatacacagcgtggcacaccaacaccagatcagatcacacaaggacacctaccgtgttacactgtgcctgc

SEQ ID NO: 257105 - DNA, 122 bp, Homo sapiens
gaagccgggcagctggagcccgagctcgcggaaggtggctcgcgggaggcggctgggaggcgggtcccgggccctcgcgtgtcggccacgagggagccgcgcccataggtctttgagtgcag

SEQ ID NO: 257106 - DNA, 122 bp, Homo sapiens
gccgcgggcccgacgacctgcagcgcctcgtgccgttgctcgactctaaccgcttggaggcgcagtgcatcggggctttctacctctgcgccgaggctgccatcaagagcctgcaaggcaag

SEQ ID NO: 257107 - DNA, 122 bp, Homo sapiens
aaggggaaagaaaaacatcctgctaaaatatgaacatctgagtgtcttattttccaacatcgtcaatagctgtgagcgtcagcattaaatattctcccaaggagtgccatgatattgaagtc

SEQ ID NO: 257108 - DNA, 122 bp, Homo sapiens
caacactcactgcgagggttcgtggcttcgttcttgaagtctgtgaacccaagaaccctccgcaaggaaccagttccaggcccacggctagactttcttattcagcataccgggggcaggga

SEQ ID NO: 257109 - DNA, 122 bp, Homo sapiens
aggaatctctatttttaaagctccccaggtgatcctcacgtttagcaggtttgggaacagcgactctatttctaattccagtggtgaatgtgttcccaaaacctcctggtggttttgttgat

SEQ ID NO: 257110 - DNA, 122 bp, Homo sapiens
cgagccggatgcgccttcctttcctctccagagcaggctgcccgcccgcggaatcccgcacgtagagcaacctcgcagcaccctcagaacagccccgctggggcgcgccgggctgccgcggt

SEQ ID NO: 257111 - DNA, 122 bp, Homo sapiens
gcggggactgtgaggacccgaacggccgcagacgcgggcgggcccgcggggcgctccgctcggctctagactccgcaccggggcatggcccccgccccaagttctctctgcggccgcggctc

SEQ ID NO: 257112 - DNA, 122 bp, Homo sapiens
caggacaaacatctgtttcttatcatggctttttcagagataggaaggagggtggccctacgtacatttcatatttgtagggcaattgcgtcacaacattaacagacaacaaatcaagctgg

SEQ ID NO: 257113 - DNA, 122 bp, Homo sapiens
gctccagtcctggggttgggcccggctccgtgccccgagaggaaatccagcgggcaactgcgcagagctccagccaggacgtgctacccctgagtccctcgatgcgctgggtcccggcctag

SEQ ID NO: 257114 - DNA, 122 bp, Homo sapiens
cgccgccacacaccacatgcaacgcgagcaccgccacccacggccgccctggccgccgcccggcacagctccagccagccctgggccagggttggaaatgcctccctcctcccggctgcagg

SEQ ID NO: 257115 - DNA, 122 bp, Homo sapiens
gctggggggctggtgccccctggggggttccgctggaggtcggcaaaggtcagtgcacaacgtgcagggtggccagctgaggagaggtggccccacacgtggcaggccaagcagctcaggtg

SEQ ID NO: 257116 - DNA, 122 bp, Homo sapiens
ccgaagggattcccacacctgttaactcaactctgtgcatgccaccctcatcctcatacccgctcccaccatagtctgagggaagtggcaccttcagcagagtccagtaagcattccctggg

SEQ ID NO: 257117 - DNA, 122 bp, Homo sapiens
gcaccgtctcggccgcggagaaggcgagcagcgagccctctttggccaggaagcctttgccgtcctccgcgtcagcctgcagcgcctccgccttgtcgaagttaccgccgccgggcagcggc

SEQ ID NO: 257118 - DNA, 122 bp, Homo sapiens
ccctctttctctctttctctctttttccgcgaggcctacacgacgccaggggtttgggtgcgtgttggggagggggagggggagcccatggggctccggagactgcgacaaaaagagggttt

SEQ ID NO: 257119 - DNA, 122 bp, Homo sapiens
aaacaaaacaaaataaaaagcaatgcccagtgattggaggatttgatgagatgatgcccgcgaggtgcttggcacggagtttgacacaagaactcagtgttggtgaatgcacgaatgcaggt

SEQ ID NO: 257120 - DNA, 122 bp, Homo sapiens
tgtcctgatcacagctggaggacctcaccacgcccctccctgtggaaggagggattcttccgcaggaaatggagttttcccacagaacacaggacaggcagggaggaactcactggggctca

SEQ ID NO: 257121 - DNA, 122 bp, Homo sapiens
aaagccagccagcattttgtgaaagtgagagtctccagcctgtccagccctgggtcaccccggcccagctgcgctgcccatcggctgcatggcctcatgttccctcctgttgattctggctc

SEQ ID NO: 257122 - DNA, 122 bp, Homo sapiens
gcggccggtgctgtggccgatcccgcgccgctgcctcgggccttggggggcagcgccacccggccaacccgcctctgcagcgttcctggcgtcagcccctatcctccagcttcctccgcccc

SEQ ID NO: 257123 - DNA, 122 bp, Homo sapiens
cagcttcggggggctcccgacaccggcgccgccctggcttgcgcccccctgggcccgcgccgggcttacctgtcccgccaggtgagccgcctccggctcagcccctcccccgccccctcgcc

SEQ ID NO: 257124 - DNA, 122 bp, Homo sapiens
tcaggaacccggccgtttcctcctctgccaaatggggtttgggacagtaaccaacccctccgccccgtcgagtgtcgggtaaagcatttagcccgggcctgtagcggggtggtaggaggcgg

SEQ ID NO: 257125 - DNA, 122 bp, Homo sapiens
aagagactcgggccccggccaagggtgagccccgcggaaggacgacgacgctcaccttgccgctgcaaggtcgtgcgcagctccgcctcgtagttgtgtctgcacaccttgtccaccgcggc

SEQ ID NO: 257126 - DNA, 122 bp, Homo sapiens
gtcctgcaggcctgtgctgagaggcctggtgctgcctggcagagtgacaaaggctcaggacggctggctctgggggactcaggccaagccccttggcaccatcctggcttttggcagggatg

SEQ ID NO: 257127 - DNA, 122 bp, Homo sapiens
tttgtgtcacagggattgccttgagaaatggaggctctcagagggggcgaatggggacagcgacctggcaaagggcgaaacgccctggagcacagcagacttgcttggtgtttgaaaacaca

SEQ ID NO: 257128 - DNA, 122 bp, Homo sapiens
tgcgtcctctaggccaggtgagaatttacaacccaccctcggccactgttgtgctgtggccgctgatgattaagcatgaggaactcagaaactctgaaccttctgacaaacgggttctcccc

SEQ ID NO: 257129 - DNA, 122 bp, Homo sapiens
cagatcagccaatagagatgagggctggttccggaagtatcttcccgggggcgggcacagcgcctcccccgcgcgggtccccgggcgctggttgggggcgctcccgtccctctcccctctgc

SEQ ID NO: 257130 - DNA, 122 bp, Homo sapiens
gctgggcctgggacagaggtggagaaaggcccagccctgcccctcagggtccagcccgcccgggagagtgcccagtggccactccttgggaaaggatacccagaggctaggggctcccaccg

SEQ ID NO: 257131 - DNA, 122 bp, Homo sapiens
caaaagtccctcttcctactaagccatgaggctccaccaggctagaagccttggtatcctcggggtgtggcacatcatctgacaatgctgggtgctcagtaaattttggttaagtgagtgac

SEQ ID NO: 257132 - DNA, 122 bp, Homo sapiens
ggaaggaactagctgcctgcctgaacctgaaataacgtgaccatagagatgggaaccctccgagtcatttcgtgtaactgcccacccagggattccttactctggctgattctagccacgct

SEQ ID NO: 257133 - DNA, 122 bp, Homo sapiens
tcccggtggcccttctgaagccgagtgggaagctcagaaggaacctctggatttgtttaccggtgtcaggaatggaaactgctggggcacctgtgtactcttgctggtttcttaaactctgt

SEQ ID NO: 257134 - DNA, 122 bp, Homo sapiens
gggggcgggaaaagatcttaacccgtgattgctgggactggctcaagctccaccaggagccgtcgttcttttacaaagaggggtggaggttccagtggaggctgttgttgcctttttttttt

SEQ ID NO: 257135 - DNA, 122 bp, Homo sapiens
acctgcgcgccgggggccgggggcctccctcccgctgccgcgtccccagcgcctcgcggccgccgcggctttcctgccccgcctcgtgttcctgcccgcactcgcctgctgctcccctcccc

SEQ ID NO: 257136 - DNA, 122 bp, Homo sapiens
gtcactagcggtgaggggcagtgggggtgacattgttgccacctggaaaacattgtagcccgccccacccgaggatggcaatattgttcccagttaggcaggtctgggggtggcgttttctg

SEQ ID NO: 257137 - DNA, 122 bp, Homo sapiens
gccctggaacttgaggctctgcaggttgatgtgggccccatgcctgagcagagtctccaccgtctgtgcgtgccggccctgggcggccaggtgcagcgcgctgagcccctgctcgtcgaaca

SEQ ID NO: 257138 - DNA, 122 bp, Homo sapiens
caaactcctgacctcaggtgatccgcctgcctcggcctcccaaagtgctgggattagaggcgtgagccaccgcgcctggccaatacgtttacgtttagtagcataagtaatccagcaatgca

SEQ ID NO: 257139 - DNA, 122 bp, Homo sapiens
tcaggctggccaggttgctgtgctggcggttgttgaacatgttgctcactagaacttgaacgatgatgaggctgctggccctgccactgtggccagacacccacaccctctgctgtccgtgt

SEQ ID NO: 257140 - DNA, 122 bp, Homo sapiens
cgaaggccttattcactcactgcccagcgggcacagccatcatctcctgccctcggacatcgacgctcgtcgttctcaggcctttgggctcagactgggactcacgccatcaggccccttgg

SEQ ID NO: 257141 - DNA, 122 bp, Homo sapiens
agtgaaaaggttgctacacaccattggaaatactcacgtaagttataggcaagtgaaggccggtttgggtaggacctgccctttcaaagcttcctgtgtgagatgcactttgttcactggtt

SEQ ID NO: 257142 - DNA, 122 bp, Homo sapiens
acagaataacgtgacagtggaattgcagaaggtcaggggtggttgtttcaatgagagaatcgtcaaatattaattctggaacgtccagatgagtaggcattgagggggattagctggctgct

SEQ ID NO: 257143 - DNA, 122 bp, Homo sapiens
gggaagtctcattgtgacccctagaaagacaagccttcaggctaacccggtaacacccatcgtcaggaatccttcacggccgccagagggcgcaaggagctgcggctggaagtactcggagg

SEQ ID NO: 257144 - DNA, 122 bp, Homo sapiens
ggaggaatggagtggctggaggcagacctctgtatacagccctgcccttttcaaagttggcgagggaggatgaaggttatgattgaaggaggccacctgtggaggtgaaagacacagactag

SEQ ID NO: 257145 - DNA, 122 bp, Homo sapiens
catccctccaccctcactcatgtagggatgtggggcacacggactggagcccaaggccttcgtgctgggccctggctctgcactcggctcccagagtctcccacccaatgtcagagagggtg

SEQ ID NO: 257146 - DNA, 122 bp, Homo sapiens
ggcgcagtgtctgctgggaactcctcgacccggccagaggggagggctaaggagccagggcgcctgcgccgcagcttccgcccggcctgcctgtcaatcactggggccgttgggcggaggcg

SEQ ID NO: 257147 - DNA, 122 bp, Homo sapiens
ttttgagacagggtctcaaaaacacccaggctgtcacccaggctggaatgaatgcagtggcgcactcatggctcactgcagcctcgacctctcaggctcaagcaatcctcctgcctcagcct

SEQ ID NO: 257148 - DNA, 122 bp, Homo sapiens
tgagctctgggttgactcccagagtgctaccgactgcctcagcccagttgtcagagcagacggctcttgtgtccagagctgctgagggctggagctgaggcctcggcctccctcccctccct

SEQ ID NO: 257149 - DNA, 122 bp, Homo sapiens
atacctgcagcaggcctcctcacaagacgctcctgcacgtcctgcacgtttgcctgtaaccggacttactgcagggaaattcctcaggactgcagtattctagataagcagcttgcacaagg

SEQ ID NO: 257150 - DNA, 122 bp, Homo sapiens
accctcctgggctgcgtgggggctccagcccttgcgcccctccccgcaagcggatcagggcgaggcagccccaggcttacaggtgggcaacagcccagagtctgtctccccaagcccgttct

SEQ ID NO: 257151 - DNA, 122 bp, Homo sapiens
tttccaaggaaattgcgaaactgaagtgcatctcatctctgttccattagatatttctaacgtctcagtttaaaagtccagaataccctacattgctagcttcaagtgttacgaagactgac

SEQ ID NO: 257152 - DNA, 122 bp, Homo sapiens
gattcattgttaaaataaagaggccatgaccctggcactcccaccccggcagcccctgtgcgtggaaacccagccaaggttagcactgggcctcagaaaagaggagctggtagggggaggcc

SEQ ID NO: 257153 - DNA, 122 bp, Homo sapiens
ctcaaatgctctcagttccactttgccttttaagaagttccctaaaatacatttgcaagccgtagtctacacaagggtcagattccctccagttgttgtgtataaatcataccaaattttta

SEQ ID NO: 257154 - DNA, 122 bp, Homo sapiens
ggcatgttttggcatttcatattcaaccaaaaagtaaagttgaaaccctgtaagaccgaccgtatttagtaattgtgttgctgtctgatgggttaagcattcagggatgggcagccggggct

SEQ ID NO: 257155 - DNA, 122 bp, Homo sapiens
gcggggcctgcgagccgggcgcgcaccgaggtagttggcgggaaggtacagcagagacgacgcgggcgcagggccggggtccggggtcccggcgggcatcaccggccgctggccgcgtactt

SEQ ID NO: 257156 - DNA, 122 bp, Homo sapiens
aaggggcttgccatcccctgtgccagtgcgggaagaccagcccaagtgcccaccccactgcgggagcagactcagctgtccccaaacctgaatgcaggtaacaagggcagcagcctgagcat

SEQ ID NO: 257157 - DNA, 122 bp, Homo sapiens
ctgcaccctttcctccgtcctcccccagccaaggcacgttctgagaatccccagcatctgcggggcatggctccagcagctccttggccgcggggccccgtctttcctagtggggcctccaa

SEQ ID NO: 257158 - DNA, 122 bp, Homo sapiens
caataacatatgccccaactaccacagcatatccaatgttatttcctccaagagaattggcgatgattctattctttatcaacacagagtagaacaatttggaagtccccagtcagacccca

SEQ ID NO: 257159 - DNA, 122 bp, Homo sapiens
aggtaacaaaggagcatcaggggcaggctgccctggtggcatcacactggctagtgaggccgtgaatatcttgtcccccagcagggccgacagtttctatcacagaaaacagtgtgttcagt

SEQ ID NO: 257160 - DNA, 122 bp, Homo sapiens
gtctttcaaatagaacccagttattgctaacgcgcctgtatcccttccttccttatctgtcgcctcggtccccacaagaactgcctgaggcctcaaaaggccgattctgctggaattgcccc

SEQ ID NO: 257161 - DNA, 122 bp, Homo sapiens
gttctacctgcaagaagcgggcgcagcccggcccgggcgtccacccccgccagtctcggccgccaccgcccagcctgcctccagagcaggcagcagccgccactgacagagagacaagccgg

SEQ ID NO: 257162 - DNA, 122 bp, Homo sapiens
ctgaagtaatccacctgcctcggcctcccaaagtgctgggattacaggcatgagccaccacgccgggcctattgagttttctacaggacaaaccacaagtagcaacacagtgcaatcacaaa

SEQ ID NO: 257163 - DNA, 122 bp, Homo sapiens
ccaggtgagtctccactgctgtcctccagcacccgccctgtccacaggtctcagcctcgccggagattccgcttagtagccctggggtatcagcctcattttatctcagtttctaaaccaca

SEQ ID NO: 257164 - DNA, 122 bp, Homo sapiens
ggggaactcattagagtttgttccgtcagggttctgctgtttgtttagccaactgacggccgcgtctgttcctgcgacaccgcacacagatgcttggccatgtggggattggccgtgtgggg

SEQ ID NO: 257165 - DNA, 122 bp, Homo sapiens
tacttcggccgggccagggagcgccaccctccttgtcgggctcgggaaggctttgttttccggtccggggggagtgcagatgacctaaggagttgaatgtcacccgggattccacagtcctg

SEQ ID NO: 257166 - DNA, 122 bp, Homo sapiens
gcactcctcagcccttcggtggttgatgggactgggcgccgtggagcagggggtggcgctcgttggggagggtcggccacacaggagcccatggagagggtgggaggctcaggcatggcggg

SEQ ID NO: 257167 - DNA, 122 bp, Homo sapiens
ctctgcaaaaaccccacccaacagcctcaaacttaggagctctgtgattccagaaatctgcgtacagtcctctacacaaaaggcgcatccaggatctctttccatgtcgtcttgcctggagc

SEQ ID NO: 257168 - DNA, 122 bp, Homo sapiens
ccggaggctcctcgggacaggaaatagcggtgagccagtgccagcagaagattgtgctcccgcctgggtgtgtggcttattccctggctccattaattcctctccctgagcctcagctttct

SEQ ID NO: 257169 - DNA, 122 bp, Homo sapiens
gagacttggtttggtgtgaactctccagctcatcaggccgacagtaccattgttccatcccggattgtaggtcagtgtgatcaggcctcagcagcttgggtgttagttttttcttcttcttc

SEQ ID NO: 257170 - DNA, 122 bp, Homo sapiens
ctattatcgccgttccggaaaagtcatggaagacagcccgctgccagacctcagagacatcgagctgaagctggggcgcaaagtacccgagagtctagtgcgctctctccgtggggaggagc

SEQ ID NO: 257171 - DNA, 122 bp, Homo sapiens
ggtgatctgcctgcctcagcctcccaaagtgctgggattacaggcgtgagccaccacgcccggccacgttctgagttttgaggatccagaaacaaaaggctggaaagcgacacttctacagg

SEQ ID NO: 257172 - DNA, 122 bp, Homo sapiens
acgcctggcctcggcctgcccaccgagaagggccttcctgtggaaacctggtggcctgcccgcactggggggccctctgcagggctgggggctgagtccccagcatgtcattcagggccctt

SEQ ID NO: 257173 - DNA, 122 bp, Homo sapiens
ctctgcccttaggtttccgttcagccgcccggagctgctgaaggaatgggtgctgaacatcggccggggcaacttcaagcccaagcagcacacggtcatctgctccgagcacttccggccag

SEQ ID NO: 257174 - DNA, 122 bp, Homo sapiens
ttaagctgctttttaaaaaatacccacctcttggtatatctctggtagaaattttttcagcgttccctctatctgcttaacagtttccaaaagtaaatgtgttgaggtgtgtcccttcaata

SEQ ID NO: 257175 - DNA, 122 bp, Homo sapiens
atatttatgaggcacacgcggccctcccgccctgccagcctcccgccttcccgctcccggcgcatgattaatattcaatgagcccagatccgcggctggttcgccgggttgaggcgggggta

SEQ ID NO: 257176 - DNA, 122 bp, Homo sapiens
tgagaggcctcgccgacccgggccctgcaacggggcggagtcgggagggggccggggctgcgggtcgcctccttagggaagcgctgcctcgcccagtccctcgcaccgcccgctggcggagg

SEQ ID NO: 257177 - DNA, 122 bp, Homo sapiens
ccagccctgagcctgcaggcccttcaggctccccagagcttgtcagctccccggctgcttcgtcctcctcagctactgctttgcagattcagcccccgggtagcccagaccctcctccagct

SEQ ID NO: 257178 - DNA, 122 bp, Homo sapiens
gcacaccaaatattcatagaaacatctttcctcacttccaaggccggaattgtactctcccgtggcgttgcctagtatcgcagatttcgaaagtgagcaggcaacagacttggctttcgagc

SEQ ID NO: 257179 - DNA, 122 bp, Homo sapiens
aggcacagaagacacagcgagaaccgtgagccgttacgaaagcctaaaacactgagctcgcgtcctgccaagcagcaggcgcacaaacctacacctccgagcgctccctggaggtcccgccc

SEQ ID NO: 257180 - DNA, 122 bp, Homo sapiens
cccgcggaccgcggcgaccagcgggagacactccactctctgcgcttccttctgcgtcttcgtctataggatggacctggtttcctgccctgataatttcggagggcggttacgtgtggggg

SEQ ID NO: 257181 - DNA, 122 bp, Homo sapiens
aacatgggccacagggcatctgccaggataaacttgtttcctgtggagggaccctggtcacggatgggacaactggacattaggccttcctccaggtaaaaggggtatcagcaccttcattt

SEQ ID NO: 257182 - DNA, 122 bp, Homo sapiens
ggggatggtgcctggtctgctcccttgcctcttcctgcctcctacggcccccacggtgaccggcttcgcctggccttctacccccagatcgcagcctgcagctgagcgcatgggagagcagc

SEQ ID NO: 257183 - DNA, 122 bp, Homo sapiens
tgttctcagcgtggccgccagggatgtcctttgagctcattcggtcccgtccctcccctgcgggaggttctccaaggtctcgcccttgccgagggtcgaagctcaggtccttgcacaggtcc

SEQ ID NO: 257184 - DNA, 122 bp, Homo sapiens
gcttcctagaatccacagacattgtgtttttgtggaaatctctcctccctccctgccacccgccccagcacctcagccttctgcaaagccccagtggaatgcagaagcagaggtcacctgct

SEQ ID NO: 257185 - DNA, 122 bp, Homo sapiens
atggctgaaaccagcctgcctgccatcgggagatgtgagggaactcaatcacagggagcccggagagaagagagcgagtgaggaggagttggcttagggaggtgcctgtgcttttgaactct

SEQ ID NO: 257186 - DNA, 122 bp, Homo sapiens
cccggcaccaaacctccaccctggtgcgcgcccctccaggctcctgctggtctcagtcgccggtagttaggtctcctgtcagcctgagctcccgagacacccagccccggaaggacacgtag

SEQ ID NO: 257187 - DNA, 122 bp, Homo sapiens
gctctgctcagcagcggatgagctcactgaattttgcgcacttgattggctacttcggggcgctgcggcgggagaccctgaaaagattcgcaaggccggtttctttgtccctccgcctcttc

SEQ ID NO: 257188 - DNA, 122 bp, Homo sapiens
gcctgaccctcgtgccctgtctcaggcgttctctagatcctttcctctgtttccctctctcgctggcaaaagtatgatctaattgaaacaagactgaaggatcaataaacagccatctgccc

SEQ ID NO: 257189 - DNA, 122 bp, Homo sapiens
gggctgaagagacccccccccaacacaccagccccgaaaaccgtctgccgtcccctatagcgctgcatggaaaagaaccaagacaaggacttggagtggagaagacagaaattgtccactga

SEQ ID NO: 257190 - DNA, 122 bp, Homo sapiens
tggctctcatccaatctcctcatgcaaacaccatctttttgccagtgaataccaaatgtacgtatccagccctgacaccccaggcttatatatccaacagcatattgatcatctccattggg

SEQ ID NO: 257191 - DNA, 122 bp, Homo sapiens
tctaagacagaataaactacaaggtgctgtggttagcaaacctgattcagataaggttatcgttagtgaattttcagaggagataattcttaaattgggtcttgaatggtgaacatggggta

SEQ ID NO: 257192 - DNA, 122 bp, Homo sapiens
tcccgcccgggcaaggtccggtggccggagcgtgcgggaagcctgcccagagtccatttccggacgggcgctgcggggctggcagccggcctggagcgggtgcagtgggtcggcgcggcgca

SEQ ID NO: 257193 - DNA, 122 bp, Homo sapiens
tccccaggctccgcgaagaaaagttccgaagcccggaagaacgcaagccagacgtggaggcggtgctacgagcttgcctccgcccccttcaggctgcctcctcccttctctgtttctccagg

SEQ ID NO: 257194 - DNA, 122 bp, Homo sapiens
tttttattacactttgtggatctgtgtccccttccatttttataactaggtagtgtataccgtataataaataggaattattgtcattgctgtattaggcactctcacaacatgtaatagcc

SEQ ID NO: 257195 - DNA, 122 bp, Homo sapiens
atttgcacaacctcttccagctcagaccagcccctgggctgggacacccgtgtggcacgtcgcccacgctgctataaaaggggtcccgcgcgacttccaaactcagcgccaacccgcagaac

SEQ ID NO: 257196 - DNA, 122 bp, Homo sapiens
ggggggggggggcgcgtccccggcgggtccctatcggtccctgtcggtccgtccgccccgcgccgcccccgctgggcactgggcatgccccaggcgtttctatataaagcggcgccgcttgg

SEQ ID NO: 257197 - DNA, 122 bp, Homo sapiens
tcgagggttagaaatgagaattcgaagtcttgtgtcctggaaagttttgataagcaaatacggctgagctcccgcgctctcttcattggctgcttgttcaccgccagattttgacacaaata

SEQ ID NO: 257198 - DNA, 122 bp, Homo sapiens
ggcaggaccctctcgcccaccacacgcggaactcgctggatcctctccacatccaggccgcgtccactggctttccaacctgctcaggtccttaaagaaggattcaaaaggtgttgcggtat

SEQ ID NO: 257199 - DNA, 122 bp, Homo sapiens
aacaaaagcggtttgtgcctgggagttttctgtgggaagccggtccagggctgagggagacgcccgcggccggtcgtctgcgcggctcggagaaggcgggaggcggcgccggcggcgcagag

SEQ ID NO: 257200 - DNA, 122 bp, Homo sapiens
cgaagccctaggggtacaggcgacggggtcaggtgtaaggcctgcctccggtgaaaaccccggatcagaagaggcggagggggagggggacccgaggcagccgggcgtccaaagctcgcttc

SEQ ID NO: 257201 - DNA, 122 bp, Homo sapiens
attaagcaggcgtttcattgaagcattggatgtgcttcagtaggcctcagattctcaaaacgggacggatacttcagtgagacgttagagaacacatttattcctgtacaaggccacaccaa

SEQ ID NO: 257202 - DNA, 122 bp, Homo sapiens
gctgaaaacctctccagggcagaccgaagcagccgaccctcgagacccagtcggagcctgcgatcactcgggcgaccctcgcctaccccgccgtaaaagccgcggcctttccacctaggtgc

SEQ ID NO: 257203 - DNA, 122 bp, Homo sapiens
tgggatatatgtccaggaaattgatggctggctcatggctacgcagctaccgcccctgcccgaaagctttttgtatagtctaggatagacccttgctactcagagtgtggtctctggtccag

SEQ ID NO: 257204 - DNA, 122 bp, Homo sapiens
accaccagccgagggccccaggtatgcacaatgtacagatcccagagggcggacacaagtcggcaccgcctgctcctccctggagcttgagccagaggcggcagccaggacccaggaaaacc

SEQ ID NO: 257205 - DNA, 122 bp, Homo sapiens
ggagccccatctggctctgaggctagctgtgtccgcggcatgcggcctggcgcacctgcacgtggagatcttcggtacacagggcaaaccagccattgcccaccgcgacttcaagagccgca

SEQ ID NO: 257206 - DNA, 122 bp, Homo sapiens
tcaaaccttttgattatgcctttaaacggctttaagataaaatcccaaaggtttctttaccggatgaaatgtgcacgttcaaagaaaacgttgaaacaaataagacatttgtacctttttag

SEQ ID NO: 257207 - DNA, 122 bp, Homo sapiens
gggagtccagtagaattcttgatgtctctcagaagcctgcattggaatgccttcattcaccgagcatatgttgggtgctcacaaggtgtgaagccttgctctaggtgagtagctgcatggtg

SEQ ID NO: 257208 - DNA, 122 bp, Homo sapiens
ctgcacttcactgcgtcttgaaagcacgcagcacagtgtccgtgcactgtggccactgcccgtattgtccggccgccttcacttttcagaagtcccggtcctgggggccccgtccgtgccgg

SEQ ID NO: 257209 - DNA, 122 bp, Homo sapiens
aaagccaggtccctcccttgccttacaacctcctgttacttgttaagcacgtttgttaggcggctggacagaaacttagttaaaagtcctcagcccggtggtgggggacaaccgagtcgtca

SEQ ID NO: 257210 - DNA, 122 bp, Homo sapiens
ttatcctgtatgttcaggcctgtttcagcttgcaagtaatacgggaagtgaacttcacctcgaggatgatctactgaaaaggaagagagtcgcccacacactcccccttcagctcaaaacta

SEQ ID NO: 257211 - DNA, 122 bp, Homo sapiens
taagacgccgctccccggtcccggaaccctcccttcgccaccctccacccacccacctcgcggtccccaggaccactggctgccaactcctgccgccctctgggactgcccctcagtcccag

SEQ ID NO: 257212 - DNA, 122 bp, Homo sapiens
ggctcacgggggcatcgcccgccaccacgggggcagctccgctccgcccgcctgcgctgccggctccgcagcagccaccgttttcagtcgccgccgggtgcaaagcccaagcttgggccggc

SEQ ID NO: 257213 - DNA, 122 bp, Homo sapiens
cctaagagtgagcaccagggggcaccacataccaaaggaaagtggtccagactgcgagaccgcggattagaccaaagagataacgttttttttttcttagactggggccctccaaggcagag

SEQ ID NO: 257214 - DNA, 122 bp, Homo sapiens
aagtaaagattaaaggtagttcgcggtatagcctaggcagggattaacccgtggtcccagcgctcctgctatttgcattccaaagcagacacctcatgcgctcaaccccgcccgcaggcggc

SEQ ID NO: 257215 - DNA, 122 bp, Homo sapiens
cgcccgccctacctgtgccggaaagcttctgcaacgccacgcgcaggcgctgcagggccacgggcgacacctcgtagcggtaaaagtccattgccggaaccttctggcaccttccaaacact

SEQ ID NO: 257216 - DNA, 122 bp, Homo sapiens
tccttaatcatcatttttttgtgccctttgttgcacatactttctgtagcttatagactgcgctcttctaacactcattctccttacttccactaaaaacaatattcaaagcagatgttccc

SEQ ID NO: 257217 - DNA, 122 bp, Homo sapiens
gcgcacgcgcacaagttcctgggcccgcccatcttccggacttgggcggggcgtaaaagccgggcgttcggaggacccagcaattagtctgatttccgcccacctttccgagcgggaaggag

SEQ ID NO: 257218 - DNA, 122 bp, Homo sapiens
agacaagtgagtgggaaaggaatgtggtgaagcactcagctagcgatctgggaacagtggcgagcgccacagactcattcactgaactgtgagactccaggaagcctttgtgtgtctctgtg

SEQ ID NO: 257219 - DNA, 122 bp, Homo sapiens
tgagaactgctgatgatgtaggtctgggctgggtctataaatctccattccggacgggcacgccaggtcatctgagggcaggtggttgcgggaatacattttgagaaacaccgaatgtcggg

SEQ ID NO: 257220 - DNA, 122 bp, Homo sapiens
cgagggcccagggtcacctgcatcctctgcggtttgcgttggtctgggagctggcggggccggaggggaaagcccaggggtatggggaagtggctgcagccctcgaccgctcctccgagtca

SEQ ID NO: 257221 - DNA, 122 bp, Homo sapiens
gctctcgggaacttctccttccgtcgcgggagatgaagtgctttttcctcttgacgttaacggctgccccatctgtcgggcctgggcaaatcacagcccaccgagtgggacttctgtgccat

SEQ ID NO: 257222 - DNA, 122 bp, Homo sapiens
gacgaaccgcctttgatgtgaaagctgggaagctagaatgtagtttcgccttatccttagcgggtcggttctaacaattttgtcacccaaactgaaccactcaccgggtcaactgggctgca

SEQ ID NO: 257223 - DNA, 122 bp, Homo sapiens
agaatgtaccgctcaacggtttttaggcgtgtggcgcggtggtggttcccacgtgcacggcgtggtcctgagctcagcgccggagggacgttaggtggaagcgtctttggcagagctggtag

SEQ ID NO: 257224 - DNA, 122 bp, Homo sapiens
atgtattctccatccctctcaactctctctctgtggactgggccaccctagtctgggagccggcagttaaggttggttacccactgcagtgtctaagtatggggaattcagactcttctctg

SEQ ID NO: 257225 - DNA, 122 bp, Homo sapiens
cactgaccgggccctggtaccggggattcaccctccccggggtgttcctgggccttgggtcgcctgggtccgctccggcgcctggggaggggtctgcggcttcggaaactcgcgggtctccc

SEQ ID NO: 257226 - DNA, 122 bp, Homo sapiens
caaacctttctggttccatcccactggctgaatcatgcatttcttctccccagagggccccggctggggtttctgccagacaatctgacaatctatgcagataactgcagggcactttccca

SEQ ID NO: 257227 - DNA, 122 bp, Homo sapiens
gaggcagggttgagcttagcggaggggccgggccgggacgtggagttggggacgcgggggcgtcgctctgccgattcagcatccccagccacccggctttgctggtgtagcctcacagcctt

SEQ ID NO: 257228 - DNA, 122 bp, Homo sapiens
gtcagagaagagctgtgccagcgaggtgttgaggacgaggcagtccccgtccgtaatcaccgagtccacgcactcaagaacagaccggggcgtggcctcccacttgaggcgccgatggtttc

SEQ ID NO: 257229 - DNA, 122 bp, Homo sapiens
gacttcaagcaggcagtggagtccattgcaccggccgcggcccggcttagggaccaccaccgcccagcgtgcgccggcctttagctttcgccgcgctttttttgattttcggccccaccccc

SEQ ID NO: 257230 - DNA, 122 bp, Homo sapiens
tgggtcactctggagtcacatcctttaaaaaatggggtgtttggcagagcgcatgtaactcgtcacgtattttgattacgtgccaacaacacttcaccccaggcaaaaacattaagtcctta

SEQ ID NO: 257231 - DNA, 122 bp, Homo sapiens
cgcgggcccacacatgaaccgcgcacgcgcgcgttagccgcaccccctccccgtgcgccccgcctcacgccctctagagctggcggctgttcccagtgccttgcccacccctgccgggcccg

SEQ ID NO: 257232 - DNA, 122 bp, Homo sapiens
gctctccgctctctctagctcctcgcgcagtcttaacagcaaaactctactgagctcggacgaaactggcgggctcctgggccaatcaccgtgcagctccccgccagacgctggaccaatgg

SEQ ID NO: 257233 - DNA, 122 bp, Homo sapiens
agcctcgaaatattttaagatggcagcctaggctaagcttgcctttttcaaacagcccagcgtcactttgccagaatctgccaacttctccgaaagtcaatgtagaaaaaaagtcactatgc

SEQ ID NO: 257234 - DNA, 122 bp, Homo sapiens
ctgttgctagtttgattaactcagggttgggctgctgcgtgcgactcttccagctcccggcgcgtccccagaggtccctaccgggtggcacgatctattatctaggaagccaatcgatgtat

SEQ ID NO: 257235 - DNA, 122 bp, Homo sapiens
ggcctggatcctttggggatttgtaattcctcgctgctggttttctcttttaaaccatcacgttttcttgctgagaggaaatcatctgtgatgaaagtctttgtagatgcttggaaacattg

SEQ ID NO: 257236 - DNA, 122 bp, Homo sapiens
tgctcaacgtgtgcgaggacctggcgggctccacgggcctggccaaggagaccttcgggtcgctggaggagacgtctccaccaccctgctggaactcggtgacggactcactgttgctggtg

SEQ ID NO: 257237 - DNA, 122 bp, Homo sapiens
catccctccttcttccctcccatcccttgatctccctcgcattttcctgtttgtattcaacgcgtccctgcttgtgcgagaaaagcaaagaatcccacaaaactcttttctttatcctcttt

SEQ ID NO: 257238 - DNA, 122 bp, Homo sapiens
cgttttcctggggaagcggcgggcggggtggagcagccagctgggtccggggagcgccgccgccgcctcgatggggtgagtgcgcggcacggagttgggaggctcccggcgcggggtcccgg

SEQ ID NO: 257239 - DNA, 122 bp, Homo sapiens
gacgaactccgcacactgcatttgattaatgatttattttgattaacgccgtcacagtgacgccttagagcagtccctgttcacccgggtcccagcctcgaccccgcacggacagcgagggt

SEQ ID NO: 257240 - DNA, 122 bp, Homo sapiens
ccgtcgctgtgaggctggcccgggactctgctggctgaggctaggtaacttgttcctctccgtgtctcccgtcctgacctcacccaggcctgagcccgccttgcatctagaagctgtctggc

SEQ ID NO: 257241 - DNA, 122 bp, Homo sapiens
tgacgacgcgcggacagccaagggggccccgagccagccggagtgctgggctggggcttccggctgcactaggcgcgctgctctggtagcaccaggtgtgtacccggcccggcgaggagaga

SEQ ID NO: 257242 - DNA, 122 bp, Homo sapiens
gcccctgcctcccgagtttgtgctctgatggggaaggcctagcacagacatgggatgtcacggcagggctctgaagagcagaaggctgggaggaggtatagcaggaccagacgactgtcacc

SEQ ID NO: 257243 - DNA, 122 bp, Homo sapiens
ggctccagtgggcgggaccagaggagtcccgcgttcggggagtatgtcaaggccgtgacccgtgtattattgtccgagtggccggaacgggagccaacatggcagcggggttcgggcgatgc

SEQ ID NO: 257244 - DNA, 122 bp, Homo sapiens
aaggggcaagggacctctccttttgcatgcctccctgattgctgctattgtggatggattcgatggaaatgagtcgccagcacctgggtctagcactcctctagctctactggagtgattcc

SEQ ID NO: 257245 - DNA, 122 bp, Homo sapiens
acatgggacccatgtcttcagactcatggttttcgtaaagacagaaggctgcatccatgccgtccccctactcagtgcgtgttactagctagataataagtgtttgcatgtgatcaggaatc

SEQ ID NO: 257246 - DNA, 122 bp, Homo sapiens
tccgagcggctgggtgagcagaacttccacaaggcccggcgcttcgtggagcaggtggcgcggcggctgacgctggcccggagggacgacgaccctctcaacgcacgcgtggcgctgctgca

SEQ ID NO: 257247 - DNA, 122 bp, Homo sapiens
ccaggctctttcctctcctgcagctgtctgtcacctaagcacagcagccacgctactgaccggtgaaggacaatgccacaggagacggcagtaaagcaaaatggaagaccctggacccctca

SEQ ID NO: 257248 - DNA, 122 bp, Homo sapiens
gaaaggacaaaaccactgaaagggttcgtctgggtcacaaacgtcccaaattggcttccgcgtggaaactaaacaagggtaggtcccagcccctgggattcaggtgaaacccgaggcctgtc

SEQ ID NO: 257249 - DNA, 122 bp, Homo sapiens
gtgaggcacggaagggaggtctgaaagtgaatttttcaatgcctagtttacccttgatgtcgcattccatcttaaatggccactatgatgataatctgagcagtaatattagtcgattttcc

SEQ ID NO: 257250 - DNA, 122 bp, Homo sapiens
gacaaggccaagagggccaagggcaaaggccgaggtaaggcggtcggcacctgggctgagcgcgggggggcgtcgagggtgcggccgagggggctctgccgggggtccgcgcgcggcgtgtt

SEQ ID NO: 257251 - DNA, 122 bp, Homo sapiens
cagcagcggcggcgggggctgcgagttcttcttcgacaggcacccgggcgtcttcgcctacgtgctcaactactaccgcaccggcaagctgcactgccccgcggacgtgtgcgggccgctct

SEQ ID NO: 257252 - DNA, 122 bp, Homo sapiens
cagccctgcacctgcagggggtttgcttgcttgccgtctgggctgtgggcagcacgagggcggcaggtgtaaatgggtccgcacctttcatggatccacccctgagctcactctgggagcca

SEQ ID NO: 257253 - DNA, 122 bp, Homo sapiens
ctggccccggccccgcggtcagcccagtcccccgagccccgccccgccccgaccaacccgcggggattttggcctcaactgaaaatgaaaccgggtaaacgcgcctggggctctcgccggtc

SEQ ID NO: 257254 - DNA, 122 bp, Homo sapiens
gtgtcccgggactcgtggccaagatgggtggcaacttttgagaagcgcctctgtgggtggcgcgctgtgtggagtgtggagcttcgcgctccgtggccacaattactgtcaagcgggaaacc

SEQ ID NO: 257255 - DNA, 122 bp, Homo sapiens
accccttgaaccctcccaggacccccgctcagccccttcccgcccccaaccgactcttcccgaacgtcccttaccaaccgcgagagccccctactgcgctttggccacaccccctacgcctc

SEQ ID NO: 257256 - DNA, 122 bp, Homo sapiens
agctgaggccccgcccctgccgccaggcccctcccctgacccggcccggccgggcccgcccgggccccagcctcactagcctttcctggcgagtctgggtcctcagctacgcgggcgtggga

SEQ ID NO: 257257 - DNA, 122 bp, Homo sapiens
aaggaacgcagtcttctgattggtgtgcgtccgctcgccgtgtccatggtaaccagctagcgccctgacccggcccggacctcagctgcggggagactaccggaagctaaggagaacagccc

SEQ ID NO: 257258 - DNA, 122 bp, Homo sapiens
attcgagtccctccgcctccccacactctaacactcttctcctcagcgtgtgtggggtggcgccctgggatctgtttgggttcgtttgccctgagccaggccttgctggggtcacagagctc

SEQ ID NO: 257259 - DNA, 122 bp, Homo sapiens
agcatgtactgtttggtgaaaaaaaaggatggcctggaagagtccacaaggaccagacagcgatctgtgccttaaacctcagaactgcctgcagcccagcgtcactcccagtgtgctgaggc

SEQ ID NO: 257260 - DNA, 122 bp, Homo sapiens
agctagaacctgactccaagttttgagtgttttttcctttctcgaggccatttcccagagcgtgcaaggtcttccctgttaggcctctcactttcttgaggtgtcctgattgttttaccttc

SEQ ID NO: 257261 - DNA, 122 bp, Homo sapiens
taccctgtttggctctgcagaaatcacacttttcattttgcctttaatcctaaaggtcaccgggaaggtcagccccaaacacaaatgatactttgtggtcttactttcagacaattatcaac

SEQ ID NO: 257262 - DNA, 122 bp, Homo sapiens
tgctcagcttctcactttcacaagtaagaaaatggaactttaaggttattgctgggtttccgggattcaaaacccaaagctaaaaatgtggaagaggttggtgttatcagaaatgatctttc

SEQ ID NO: 257263 - DNA, 122 bp, Homo sapiens
cccagagtgagcatcaacaccgtgatcacggttatcacgtgggaggtctgcccaggatcccggcagtgaggctgccctggaggcaggcttgctccgccacaggcgcgcaggcaacagcagcg

SEQ ID NO: 257264 - DNA, 122 bp, Homo sapiens
tttaacttaatggttttttggggggcatgcaaatttcagtgagcagattgcaccgaggcccgggcttggagcggcctccctgggcccggcggccctttccccagaagcccctgagcaccccc

SEQ ID NO: 257265 - DNA, 122 bp, Homo sapiens
ctggaactgccccacactcatcagcttgctggaacatgcgcttggcccttcggaggctaacgcttcaacgactccagctcggaagccgctcccctcaggactcacgagccgatcagtggccc

SEQ ID NO: 257266 - DNA, 122 bp, Homo sapiens
acaccgacacgggagcagggcgcccccgtgtgcacagagccctgttctgcagctggaaaccgaacgggaccctgtggaagtcgcgggtggggaagcgaaaggggagctgagcgtctgtcctc

SEQ ID NO: 257267 - DNA, 122 bp, Homo sapiens
cgctcgagcccagcctctccctgccaaagcccaactcccagggctctggaaatggtgaggcgaggggcttgagaggaacgcccacccacgaaggcccagggcgccagacggccccgaaaagg

SEQ ID NO: 257268 - DNA, 122 bp, Homo sapiens
cggcaggtacacagctgacgctggtccttggacttatgggagtgggaacaactttcaactcggccgcggaccaggaaggcgttctgacccgctagagctcggggacagggaccccatcccgg

SEQ ID NO: 257269 - DNA, 122 bp, Homo sapiens
gagacgactaatgaggtctcaattgtgtgggcgggacttctggcggcgccctcatggttgcgttagcatggctacctagggatctgttcactgatttagagggtcccagagctctgggtcgg

SEQ ID NO: 257270 - DNA, 122 bp, Homo sapiens
ttttacccactacgtctccaactatttatatctgcctcaaatcaaaatgctttggctgaacgcaggcatccgaaggaaggctcatcccagtctagttctgctctcaatgcttgtgacacata

SEQ ID NO: 257271 - DNA, 122 bp, Homo sapiens
ccttagctccgcccccagtgactttccagctttcgtggcgggaggcaagcttaggggaagcgggcgggtccgctgggcgggatttgagcttccctttggtagattcgaagctcctgtaggca

SEQ ID NO: 257272 - DNA, 122 bp, Homo sapiens
cggagcgctgactggggagggaggcggggagcaagggaggcgcgtcggtctgggaagtcgcgcgcactcgctgctcctgggaccgacgtttaactcttgccaagtctcgtcgcagccgccgc

SEQ ID NO: 257273 - DNA, 122 bp, Homo sapiens
cactctcttaccatgtatctattatgtattctcagaatttctctcaaattcccagactcacggaaaaggtgacactcaattatgagcagacactgacattttttgtgagattagttcatcag

SEQ ID NO: 257274 - DNA, 122 bp, Homo sapiens
gagcatgcagggagcctgcaaggacagtcacccccaccttgcctcttacctggctcttgccgcggcgccgatagctccgtctcaccaggctcttatagttctcattcttcttagtcaggtag

SEQ ID NO: 257275 - DNA, 122 bp, Homo sapiens
tacacacagatgacaccaaaatcggaacagcaatgtccacccttctcccgagccctaggtcggtgcctctgtccacctgtgtctcctgaaacttcaacacagacttcaaatggagtggcaga

SEQ ID NO: 257276 - DNA, 122 bp, Homo sapiens
ttgaccggaaagggtggggcaacggcgagaaaggccgcgtcgagcggtaggtgcagtcgtcgctgtggtgaccccaggtcctgatgcgtccggcccagggccagccaatggcggtagaggtc

SEQ ID NO: 257277 - DNA, 122 bp, Homo sapiens
caaaagagggtctgcggtttgtggtggaatgcagtcggttttgtacagaggttgaggaggcggtgattgatttacacagcgctcagggaattggtttgaccagttgtgtcatttacatagcc

SEQ ID NO: 257278 - DNA, 122 bp, Homo sapiens
tgtctacgtgccaaaacggtcgataggactacaaacagcctttttaagcttccctcttgtcgggactaggagttgacaagcggcctctactagaaggttggctagacagcaaagagccaaca

SEQ ID NO: 257279 - DNA, 122 bp, Homo sapiens
ctccagggatcaaaagcatccaaggaattcacccggcgaagaaggtactgcttgttgcctcgcacgcagccctggaaacgcgaaggccggtgtgaggcagtgttcagacgtgctctaatttg

SEQ ID NO: 257280 - DNA, 122 bp, Homo sapiens
tggccgaaccacagctcccacgatgcacccaggttttagagcggtcagaggggcggcttccggtttaggacagcgcggctgcgcacggcgtgtggtcttattggctcgaaccgcctcgtgcg

SEQ ID NO: 257281 - DNA, 122 bp, Homo sapiens
agacgacggctggagcctgggtttggggagcacgggtacagtggctggatcctagggggtcgcggagaccgctgctagagtcccggaggcgcgaagacggcgggggtcgcgaacctggaatc

SEQ ID NO: 257282 - DNA, 122 bp, Homo sapiens
ctggacctccagaaatggtcagtagcagctccctctttcctgcataggttcctgccagagcggacggtggaaacccctccccacaccgccgtgggctcagctgggggttcttgtaccatctg

SEQ ID NO: 257283 - DNA, 122 bp, Homo sapiens
aggaaagcggggcgggtttcttcctcctgaggtaccaggaagatggaggccactgcagaccgcgtgcccctactagtccctgcggccctgggcgctcgaacctcgggccacagctaggatgg

SEQ ID NO: 257284 - DNA, 122 bp, Homo sapiens
gtaggctatattgtccaccatggtatatattcagtgctttgtatagtgctagagacatagcgctaaatacacatttattgaatgaacgaaggagtagcagcagcaggctgactcccctgatc

SEQ ID NO: 257285 - DNA, 122 bp, Homo sapiens
atcttgctgtgttgtccaggcttattttgaactcctggagtcaagggataccttgacccacgtcagcctctcaaagcgttggggttgcaagtgtgagccaccttgcctagcctgtaccatga

SEQ ID NO: 257286 - DNA, 122 bp, Homo sapiens
tggctttgaggtctgacttgtcccaatgactgccgaaacaatacaaaacaagaacagactcgaagagcctactgaattccaaagtcccgagatgtctcagctggcaggcaaactctcccatt

SEQ ID NO: 257287 - DNA, 122 bp, Homo sapiens
cttcgagcggctggagctgaaggagctcatcggcgctgggggcttcgggcaggtgtaccgcgccacctggcagggccaggaggtggccgtgaaggcggcgcgccaggacccggagcaggacg

SEQ ID NO: 257288 - DNA, 122 bp, Homo sapiens
acagattgtaccatctgctatagcaaccactgctacatgtaactatttaaattaaaatctcgatagattaaaattaaataaaatttttaattcctcagtcacactacccacatttcaaatgc

SEQ ID NO: 257289 - DNA, 122 bp, Homo sapiens
aaattcagaccaaagacacgggcaactcaaattctagaagcagaggtccccactccatagcgtttggggctgggccattcacctatttattcattgaacattcatgagtgtttttcataagg

SEQ ID NO: 257290 - DNA, 122 bp, Homo sapiens
agaatgaagccgcagacccttgcagtgagtgttacagttcgttcttaaagatggtgtgtccggagtttgttccttcagatattcaggtgtgtctggagtttcttcctccagttggttcgtgg

SEQ ID NO: 257291 - DNA, 122 bp, Homo sapiens
catgaaatggaaattaagcctttgttctttaaccttaatgctcgaggtggactcaggtgacgtctgggtacaaaaataagaaatgactgggaagggtggagcttctcaaagaacagccaagc

SEQ ID NO: 257292 - DNA, 122 bp, Homo sapiens
gcgttcgattacttagccaattgtagtgcacaactgaagttgcagacctgaagaagccgccgcattgccatggcaacagtacagggactgaatctctggtttatttcaatttcatatctacc

SEQ ID NO: 257293 - DNA, 122 bp, Homo sapiens
tgaggagagaccctcggagccttcaacgcagccaggcggcaagtgggggcagggcgtgggcgcggacacaccccccgcagtgcccccggcgcccggcagggggcgccgccccgccggcccac

SEQ ID NO: 257294 - DNA, 122 bp, Homo sapiens
gtgtgtccccttcaggacggggagcagttacagcccagccatctcagcattgggagggaccgcagggccatgtccctactgtgtgggctcccatgggggaagacagcatatctcaggcagcc

SEQ ID NO: 257295 - DNA, 122 bp, Homo sapiens
ccttcctgtcctgcacctctgtttccaagcagccactgtgtatcatcaacaatgagaaaacgtccctcctgccagatacacagagctcaaatcactccacagacaactttcttgttaggcct

SEQ ID NO: 257296 - DNA, 122 bp, Homo sapiens
gggctcagaccttgaatctcgtggctcctagcctcattcattcactcgaagagcacagcccgcctaggtgcttcccagtcatccgcctgtcaggggctcccacctgcagacctccagccaga

SEQ ID NO: 257297 - DNA, 122 bp, Homo sapiens
cacacatccctattgcttttctccgcgtgggtcgctcggcgatggggttggggattttcacggtgctgtcccccaactcgaacttcacaccttgaccgaggacccccgggaggcggccgcga

SEQ ID NO: 257298 - DNA, 122 bp, Homo sapiens
ccgggtcctccccagcagaggcgctgctgctgccgcgggagctggggcccagcatggccccggaggaccattaccgccggcttgtgtcagcactgagcgaggccagcacctttgaggaccct

SEQ ID NO: 257299 - DNA, 122 bp, Homo sapiens
aagcaaatcaaccctttgaatgcagaataaagtggcagaaggacccggcgaaggtcccagcgtgtctcgaggggcatacagggcggccagctggagccgggtcaacaaaaaagcaggtgatt

SEQ ID NO: 257300 - DNA, 122 bp, Homo sapiens
atgaggcaggaagctgaggagcgtgttcttccaggggagctgcagcttgtgtttcacggacgtaaagggctcccagatttggaggcaacaactggaatttcagacttggagccaaacgccca

SEQ ID NO: 257301 - DNA, 122 bp, Homo sapiens
aggcagggcactccctggcctgactgtgcttgccttgcagagtcggtggctctgaggctgcgaggtgggacctgctgctgtgctgggtggctggacgtgttctacaatgggacctggggcgc

SEQ ID NO: 257302 - DNA, 122 bp, Homo sapiens
gggctcgaagtctcccagcattcattaacaactatctgttcaatgattatctccctggggcgtgttgcagtgagttggcccaaagcataactgaccctggccgtgatccagagacctgcccc

SEQ ID NO: 257303 - DNA, 122 bp, Homo sapiens
cgcgggacacaggctcattcgcactaacgagtccggccgtgcagtgaaagcttcggtctgcgtgaccgtgctgcgctccccgcgccacgcggctccacacaacacgccggcccacgcagaac

SEQ ID NO: 257304 - DNA, 122 bp, Homo sapiens
ccggctatgaggcccagggtgagttccagggttgtgggggggtcttgctccccacaggcacggaccgcatcaggagctgcggaggggtgggatcgaggccaggccagcatggcggaggtggc

SEQ ID NO: 257305 - DNA, 122 bp, Homo sapiens
gacatctgttccaaatgctgggacacgggggtccacctccagccacccagtacttgtgctcgagaggaccccctggtgtttgccggtgttgcttggagccttctgctgtctgggaggccctg

SEQ ID NO: 257306 - DNA, 122 bp, Homo sapiens
actgtaaaccccagcccctcttagttcatgaattcaaagccgtcactcaccttgtgcttacgcaccagggcaaagagaatggctatcttgcctcaaggaagcaattggccctaccaatacta

SEQ ID NO: 257307 - DNA, 122 bp, Homo sapiens
acagggctgttcacagctatgctgcttgagagagcagggctcactgagcaaggagaagggcggtggctacaaccagccacattgaaaagacgcttgcttctcctaaatcacaaactttccct

SEQ ID NO: 257308 - DNA, 122 bp, Homo sapiens
cagacagagtgggggtctccatctgttttctcttctccctcaaatacaggctgttttcatcgtgtctagtccagccctgtctgggccctgtgctaggcaataactcttgcagccctgaagga

SEQ ID NO: 257309 - DNA, 122 bp, Homo sapiens
aggaatgaaagttacacttttagtttgagagtgatgtctatttacttctcttccttctgtcgcagtctctttcccaggtgagttagcaagtggactttgatttttaaaactacctcatttgg

SEQ ID NO: 257310 - DNA, 122 bp, Homo sapiens
acgtgtccccgggagccgcccagaatttgacaggggaccatgtgcgcggcagcgcgggagcgagacaaaggaccgggggaggcggggaacgaagccgggcggaggggtccgcgtggcccggg

SEQ ID NO: 257311 - DNA, 122 bp, Homo sapiens
acccaaagcagtgcatacattttggagccagacaaatcccagtttgcgtttcgactccaccgctcacaaagctgagtaggttatgtaaatttcctgagtctcttcaagaatctgcagaatgg

SEQ ID NO: 257312 - DNA, 122 bp, Homo sapiens
atccatagacactgggaattagagcttcagcatctctttctgggagaacccaattcagtccgtaacccacaggacacttttgggggaggaacacatcttcccctcctagctgggtggtctct

SEQ ID NO: 257313 - DNA, 122 bp, Homo sapiens
ctctggtgggagggtaggcggggcttgacgggcctgggggcggggcggggcttgagggaccggaaggtggggcgagtcatgacgggccggggcgtgggcagggcttgaggggccaggggact

SEQ ID NO: 257314 - DNA, 122 bp, Homo sapiens
gcgagggcgccgcggcagccccagcggtggtcccgggcgccgcctccgccccggacccagcgccaggagccacagactccgcgcaccgcccccaggctcctccgcgccctgcagcacaaaag

SEQ ID NO: 257315 - DNA, 122 bp, Homo sapiens
acactgatggaatcagtcgccgcccttacctttacgtacaggaaaaaatcgccgccgctccgttccctgcatcgctgagtcagaatgagacagccgactaacgccactaagagtcaccaggc

SEQ ID NO: 257316 - DNA, 122 bp, Homo sapiens
aacataatggcaggcccgtcagaaataaatcagtggtactaatttaaagagcaccttgaccgaccctattaacacaagagggttaataagtcctgatgcaagaagagacttgcccaaggtcc

SEQ ID NO: 257317 - DNA, 122 bp, Homo sapiens
tccgctctcccggcgcgatccgggggatggattagcgctgctcacttgggaggaggcctccggagacccccgctagggggaccccgcgggcagggagccggggaggaggttttgcgcagggg

SEQ ID NO: 257318 - DNA, 122 bp, Homo sapiens
aaatcttgccagtaatgggaaaaacaaactgctctttcagatcatttaacaattgtttgacgttaagaattactggagtataaacatgctccaagagattataccagttattgtaattctaa

SEQ ID NO: 257319 - DNA, 122 bp, Homo sapiens
gtaggcaacaaactcaacccaacagagtgttggcagagcctttcctccccgtagcaacatcgtggtggaagcccgggcgtctctgctcccaggcaccctgagcatgttagccgaggaaaggg

SEQ ID NO: 257320 - DNA, 122 bp, Homo sapiens
tccattcaccgtctttccaaccacccgccccacgtccatgctcggccaattatagcacagcgtccaaggtttgagcggtaggcctattggccaatcaggaagagtacagtactgagtgacaa

SEQ ID NO: 257321 - DNA, 122 bp, Homo sapiens
gtcttccatttaacaagaacttatccctttcctgggaaatgagaagtgctatacaaagcacgaattctgaggatgccctcacactattgctttgggaactgtgtgctgtgtgctgaccacag

SEQ ID NO: 257322 - DNA, 122 bp, Homo sapiens
atttcccagcaggtcgcgcgctcctcgacagctctccaggcagtagaaactacatttccccgaaagctttgcagtgcgcaggcgcatcaatgaggtactgcaatgtcccggaccgtatagtt

SEQ ID NO: 257323 - DNA, 122 bp, Homo sapiens
gtcggcagagggcgcggggcggacgcgctgcacctcgccgtagcgcacaccagggggcagcgtggagctgcacgaggcccagggcctgggacagacccaggacaccgatctggggaccccgc

SEQ ID NO: 257324 - DNA, 122 bp, Homo sapiens
cgtgaggtcagcccccacgccctgttgagacacacatgcctaagcgctccgcctgcaacacgctcttgcttaggtatgtgcgtggtgttgtgcctactgcaagctgtaacccagtttcaccg

SEQ ID NO: 257325 - DNA, 122 bp, Homo sapiens
accgcacccggcctgctattctgacttttaaagtagtaatagctcctgttgattgggtaccgattgtgtgcagtccctatcctagcacttcatagacaccaagaaccccatgacaacaccct

SEQ ID NO: 257326 - DNA, 122 bp, Homo sapiens
cctctgggctgcccctctgttggggtgataaagctgataaccctcatgcctatgggctgccgggccagggagaggcaccccctccctctgccctttggcctgaaacaggccctgcgccccaa

SEQ ID NO: 257327 - DNA, 122 bp, Homo sapiens
ggggggagggagggctgaagagatagcttcacgcctgcttttgcttccaggctggaactgcgaagtttcctgtctgattttccaacaatgtaatttctttctagcggaaggaccctcagaaa

SEQ ID NO: 257328 - DNA, 122 bp, Homo sapiens
gggtttcttggctggggctgcagggccggtgcttgccaccggagcggggggggcgggccccgctgtgctcagaagggacctgaagccagggaagccccagggtcgtcctgggccccgccgcc

SEQ ID NO: 257329 - DNA, 122 bp, Homo sapiens
ggcatgagccaccgcgcccggcccatgggtgtgaatttctgcctgtgtgtgtctttttagcgtatgtgtgtctccatatctgccatctgcaggagcacctcagtttcattatcttgctccct

SEQ ID NO: 257330 - DNA, 122 bp, Homo sapiens
cagtgaacaccaccagcttccttgagaagtattcaactcacattctatggtagcgaaaagcgcgcaatcaatatagccaccatccgtttcccaagggaacgccttttggaaactaccacgtg

SEQ ID NO: 257331 - DNA, 122 bp, Homo sapiens
ccaccgccggagactcgcagggctttttccagcgctacattcattaggcggcggggtgaacgggagagacctgccggcaactttccttccagccagttcttacccttgaacgacggcctaaa

SEQ ID NO: 257332 - DNA, 122 bp, Homo sapiens
tgctcggagcaactggcatggcccgagccatggccgccgcgtggccgctgctgctggtggcgctactggtgctgtcctggccacccccaggaaccggtgagtgacccccgcgcagtccggtg

SEQ ID NO: 257333 - DNA, 122 bp, Homo sapiens
cagcctgagactgctgccttccaccccagtacatagatacagtacatacatgttttgacccgtccccgtatgtaaaatatttaaaaccatctcttgagtaagtactaaagcacatatcatga

SEQ ID NO: 257334 - DNA, 122 bp, Homo sapiens
ggagcggggcggatgccctgctgcgggctggagtcgcccatgccctggtgcctcgggcagcggccccctgaccccatgtcaccctccgcgggccttgctgggagctagtaggggacaggacc

SEQ ID NO: 257335 - DNA, 122 bp, Homo sapiens
gccgagccccacgcaaagcacgagaggtagcagcagccgaggacccgggcccatggtgagcggtggcagcggcgctaccggcacgggcgctaccggcacgggcgcgacacaggctctgggac

SEQ ID NO: 257336 - DNA, 122 bp, Homo sapiens
cactgagaaccactcatgacacagtcaggggtccaggaacacgctgggtgggtgagcaatcgcagctttttaacatttcacttgcagaacgacaccgtggtgatgcctcagaaggagtcctt

SEQ ID NO: 257337 - DNA, 122 bp, Homo sapiens
acaggcggtggccccagccacggcgaggtggcagtgtggtcctgcaatctgccaggggggcggccccggccacagtgagatggcagcgtgactcgccagctgcccgaagagcatggtgagtg

SEQ ID NO: 257338 - DNA, 122 bp, Homo sapiens
gggcagccggtggatcttcgggaagttcggggccaaacaggcaccaagagctggtgacctcgcaggcgggagggctgggttggctctgcccgggacctgagggcgccaacagagtgtccaag

SEQ ID NO: 257339 - DNA, 122 bp, Homo sapiens
cctgcatgccctatgctctcttccagcttgtctgaatcctgccctccagtctgagtgccacgtggggggcagcttgctgggatgcccgatgccccacagaactgcagggctgctggcctcag

SEQ ID NO: 257340 - DNA, 122 bp, Homo sapiens
cagtctgaattccagggaattccaagggctggtcaggaagcagggctattgttactcccccggcttattcattgccacagtgttgtaccctgtggcctggtgtggtcacataaaacatttca

SEQ ID NO: 257341 - DNA, 122 bp, Homo sapiens
gcgcccggttccccccctccgcctgctgccaacaggtcagagggcacgcggagtccgcgccgccgcactagcccccgaggccgcctgcgccattttgaataaggtcaccacccggagttcgc

SEQ ID NO: 257342 - DNA, 122 bp, Homo sapiens
agggtcgcgcggcgaggggcggggccggcgggagcagggcggggcctgagcactaggcggcggcggctggcgtggggctgcttagatgcgccacggtttcggtagcgacggtatctctagcc

SEQ ID NO: 257343 - DNA, 122 bp, Homo sapiens
agtttccacatttaaaaatagagccaatgtcactactcattgtacagtgaggcaaataggcgttgaaaaggagggtgaaagtgcactctgagtctgtgtgtggtaggctatgtgtcagggct

SEQ ID NO: 257344 - DNA, 122 bp, Homo sapiens
aaatcgccctgctttgcctctcccttgcattctccacgcatcaaagggacacgtgtaaggcgaaacgggaacacctaaaaagcaactctccctccaccaggtgatccctccatctgaactac

SEQ ID NO: 257345 - DNA, 122 bp, Homo sapiens
aggaatctggggaaggcagtgtatgaccctcagagctgggtctggacttcaaacttggctcgttgatctgctgtgtaaccttggaaaacttattcatctttttgagcttcagttttttcaaa

SEQ ID NO: 257346 - DNA, 122 bp, Homo sapiens
gctgagaccggatccggaagcaagggcaccgcctcccgcgccgcccccgcagcacctgttcgcggcgcctctagcaccaacccaccgcagaagcccttaacattctctagcttgggccaaaa

SEQ ID NO: 257347 - DNA, 122 bp, Homo sapiens
aacttaggccccaaggattaccacggggccgcaatttgggatggatgagccgagcttggacgtacaggttgtgggagggaggaggagcggtagagaggctggagggtcggcacgcatgcgca

SEQ ID NO: 257348 - DNA, 122 bp, Homo sapiens
acgcctggagggcagcgaggtgcagggaggggaagggacgcgcatggcaagctcctgcctcgcatccccacgcaccgagagccctcctgcctgcacgtctaccacaggcggaaggagggaac

SEQ ID NO: 257349 - DNA, 122 bp, Homo sapiens
aggttaggagaattagccattacttctggactaaaccagtatggaaatttagtgcatgagcgcaattaatttttgagactcccttggaccctacaaaaacattaaccaataaacgttttcca

SEQ ID NO: 257350 - DNA, 122 bp, Homo sapiens
aaggtagaaacccatgagcactcagggagcagtgtgccttcagctgcagcagaagcagcccggaggataaaatgagaaccagctgcacacgggccctttaactcccaagccccacccctggg

SEQ ID NO: 257351 - DNA, 122 bp, Homo sapiens
ctcgcgcgcagccaccggggagcgggcgggagtcatgcagcggccttgagcactaggggccggcgctgaggagcgcgcgcggcgggagggcagccgagcatggagctgagcctggagagcct

SEQ ID NO: 257352 - DNA, 122 bp, Homo sapiens
tgcacaggtcccctcgggtggctattcttccatcaacaatgtccaggatcctcagaagcccgagcctagggacaagatggagagcttcttcctgggggagacgctcaagtatctgttcttgc

SEQ ID NO: 257353 - DNA, 122 bp, Homo sapiens
gcggagagaaggaaccaagacttggtttgcaagagcccgcccccgcccggttggccccttcgattggccacagcaaatgcgtgcgtttgtttacacccaggcagggggaggccaggggaggg

SEQ ID NO: 257354 - DNA, 122 bp, Homo sapiens
cagcccgggaaaagttctagaatagaggcgcggcgcaagtcagggggccgccttggaaaccgcagcaagggctccttgtgggctccaggctgttggagagtgagggagcctcctcccctttc

SEQ ID NO: 257355 - DNA, 122 bp, Homo sapiens
tgtatgagactccttaggaaccaggcatcaggccagcttcttagatgaggattgattcctcgctgggatgtgctcatggcattggttagtgtgtgcataggtcctggctgctgctgtcatgt

SEQ ID NO: 257356 - DNA, 122 bp, Homo sapiens
attgccaaatccaattaacacttgtccttatcttatgtgacctcttggtagccctgactgcgttggacctcttctgccttattggagttctttcatcccatgtttccaccacacctgcttta

SEQ ID NO: 257357 - DNA, 122 bp, Homo sapiens
gcgtacagagcaggtgacagcttccaggagaaggtgtgttctggggcttgaaggtgccggcgtgcagggaacagcaggtcacagagcccctggagacccaggcaggaggcagaccccaccta

SEQ ID NO: 257358 - DNA, 122 bp, Homo sapiens
ctgcggcggccgcgcaggcgctgtggtgggctccggtgcactgtgggatggaaaccggagcggcgcgtcctggcaggaccgggcggcggcggcggcggggccggcggcggccagggacccgg

SEQ ID NO: 257359 - DNA, 122 bp, Homo sapiens
ctccatggctggtagcatagcctcccaaccttgggcaagtcactttacatctttgacctgcggttttttctcctgtaaaataggaaaatcatgttgaggaaaggggcctgtctggtgagccg

SEQ ID NO: 257360 - DNA, 122 bp, Homo sapiens
gagctgagcagggcgccttccctccgggctcctgctcccctgccctcccccaggtccgggcggcccccctcgcacaggagtcccgggaaccgcgggcgcccctcctgccctgggctgtgggg

SEQ ID NO: 257361 - DNA, 122 bp, Homo sapiens
ggagaccccacccccgccgacggtgaaaacctatgaaacctgggcggaggcgtgcggagtcgggtagagagcgaaatcacgcctcttcagtcagccacgccctttattcttgctcggcctcg

SEQ ID NO: 257362 - DNA, 122 bp, Homo sapiens
gcccggcttggaggcagggctgaggagtcagcggaggctgaggccagaggacagcttgcccgtcacggagcccgcaggtcacaggatcaggcctggcccccgagctgcgtaagatcagctgg

SEQ ID NO: 257363 - DNA, 122 bp, Homo sapiens
agatgatctctcaaacccaaagtcatcggctcttatccagaacttgctgtttgtgcctcccgtttccattagactaccctctatctagtattaaaatggaagagatcgctaataaaagtaga

SEQ ID NO: 257364 - DNA, 122 bp, Homo sapiens
cacaactcagcaaccagttgggctgcttccctctgacgcacttgcttctcatccggggagcggggagtctccgtcttcacaagtgggcaggcttcactgagcccagaggcccctggggcaga

SEQ ID NO: 257365 - DNA, 122 bp, Homo sapiens
cgagcgcgacttagccttggcgcgcgccttgccaccctgcttaccacgaccggacatttccgagtcaaggaaaaaagacaacggcaaccgaaaagcgagactaaaaacaagagggcagtgaa

SEQ ID NO: 257366 - DNA, 122 bp, Homo sapiens
ctccagccacctgggcagtaagccagcccttgccaccagcacagggagcccaaaacctgtcgcctgggcgcggagctgggaccgccgaaagccgggagcactgggcgcccacgcgtgggctg

SEQ ID NO: 257367 - DNA, 122 bp, Homo sapiens
cattttgaggtgtctgttcagagagccagcaaacagaagtagccctgcaaagttgtctttcgtggggagatttgcatcgtacacaatctgccttgatgcagcctggcttcttctgagccttc

SEQ ID NO: 257368 - DNA, 122 bp, Homo sapiens
gtgataaagcaagacaagacaaaggacacacccacaaggcatagcaacaccctcttctcacgttttatggcctctgcagagccaaatgtgtactaggtcatgatcattactgtatgctagga

SEQ ID NO: 257369 - DNA, 122 bp, Homo sapiens
tctcaatctcggggcccgcgacctgacccccactcacgcgcatcacctctcagataatctcggggcccgcaacctggcccccactcacgcacatcacctctcaatctcagggcccacgacct

SEQ ID NO: 257370 - DNA, 122 bp, Homo sapiens
ctgagcaggagcaggagtggctagcttccccgctctgttggaactatcctgtggagaagccgccctgcagaagccgccctggtggagggatgcagcccctgcagaacccggtgctggaacga

SEQ ID NO: 257371 - DNA, 122 bp, Homo sapiens
tgtctgcaagcaagggtgtgcctgtgaccacatgagcacgtgagtctgtgtccacacccacgggtgccgacatggggcgtgaacaagtgcacacacatgcacgtgagcaaggacgcatcagc

SEQ ID NO: 257372 - DNA, 122 bp, Homo sapiens
acacagcgaaaccccgtctccaccaaaaaaaaacgaaaaccagtcaggcgtggcggcgcgcgcctgcaatcgcacgcactcggcaggctgtcaggagaatcaggcagggaggttgcagtgag

SEQ ID NO: 257373 - DNA, 122 bp, Homo sapiens
catctatgcttttcagttttgaacataaagcagtggctctgagcgcgactcggagggcgacgccgcggccgcagccatgggtgctgggcctgcaggggcgcgggggggagggcgacgctagg

SEQ ID NO: 257374 - DNA, 122 bp, Homo sapiens
tacgataaatcattcttttgttcataatgaagtttacttcatctcacaacaatatccctacgtccaagtctcatccaaattgttaccaatcaacttggagaagcatgtcatgcaacaatgaa

SEQ ID NO: 257375 - DNA, 122 bp, Homo sapiens
tcgtcccttcaagagattctactggataaaaaaaaattataaaagctggatcaagcttggcgtcggaggtctggccctcagctggttcccaccctaaaggactggcctgcccaccctcacgt

SEQ ID NO: 257376 - DNA, 122 bp, Homo sapiens
tgacaactctggggctggaaatggaaaaggctgtgatctggggttggctggcaccgtccccgtgagtcattatggaaacactgtccccggattctgctgagaggactgggttgctggtgagt

SEQ ID NO: 257377 - DNA, 122 bp, Homo sapiens
atgctgttgggaatttaagtagtataatcactttgacagcatctactacagctgaacatacgaatactgtatgatctagcaatcctaccaaaaaacatgaacaaaaatagtcacagtaaaac

SEQ ID NO: 257378 - DNA, 122 bp, Homo sapiens
ggattgtcgcctgcaaatggagaagactgcgcattaggattgactcttcatactcctccccgataattaataaaggttaatgaaattaatgttgccttctacccttctttcgctgctttcct

SEQ ID NO: 257379 - DNA, 122 bp, Homo sapiens
catttgtgaaaaatgaggctggcttatgagctgggtccatttgcacacagcctgcagccacggagtccctcagcttggagatgtgctagctccttctgtcctgtgggctgctggggctttgt

SEQ ID NO: 257380 - DNA, 122 bp, Homo sapiens
gtgtgtgtgttttgttgttgttgttttgagacagagtctctcactgtactcccaggctggcgtacagtgacacgatcatggctccctgcagcctccaccttccaggatccaagcgatcctcc

SEQ ID NO: 257381 - DNA, 122 bp, Homo sapiens
actggagagcaaggaggcacaggggaagcccggctgggcacctgctcaccaaacgctttgcggtaggcggagctgttgatcttgatgccggtgcagagaatcaccaggttggtggccacctc

SEQ ID NO: 257382 - DNA, 122 bp, Homo sapiens
gatagcaatagaagtatctttcttctttcccctttctttttctaaacaagagaagaaaagcgtaatagaggggagaacacataatgcccactaagggtagtgcattaaggaaaaacagtctt

SEQ ID NO: 257383 - DNA, 122 bp, Homo sapiens
gccagtccgagtaggggcagttcccagaaccgcctgaggagcagtgcagcgcccgaccagcgagaacctccgaccctggagtctaaccagctcagtctttggggcagagccgggacagcggg

SEQ ID NO: 257384 - DNA, 122 bp, Homo sapiens
gtccatcttcagggagctcagcacgtgtctcagcctaggcagacacttggcccttgaacccggaagagtgtgtgtgtgagagagagggagagacgggtaggggagagagagggaaaaatgga

SEQ ID NO: 257385 - DNA, 122 bp, Homo sapiens
tggttcccaataagaaagtgggcctgcagttcctgcagagacagtgctgagctgagtctccgccttgctggggcttgtcctagaggctccagctctggcacagtggttcctggctgctgcca

SEQ ID NO: 257386 - DNA, 122 bp, Homo sapiens
gacacggcacctgtcgtggggcttaaacacattctctctattgctacataaactacagagcggaggcagttgcaggcagcggccacccacaggctgcggggcaggctgcttccagccagcaa

SEQ ID NO: 257387 - DNA, 122 bp, Homo sapiens
aaggcgcacctggggtctaggccacagaggccggccgggtgcctgcagacaaaaggtggccgtgtttggctgtgcaggacatcggctgctgacttggatggaaacgtttcagggagctgaga

SEQ ID NO: 257388 - DNA, 122 bp, Homo sapiens
gcaggggagagcatgaaggctgagcgggggcagcgtgaggggccggcggcccaggccacccgagcgcctgtccctccacccccttgcaggcgctgctggtccccgccaggagctcgtgcaga

SEQ ID NO: 257389 - DNA, 122 bp, Homo sapiens
gtgaaggctggggacagtttgagtcgtcctgcttgcaccttaagcgcctacaagagtgcccggctataacaaccacaataccaataataaaatttaaaaacagatgttcagtaaggacttgc

SEQ ID NO: 257390 - DNA, 122 bp, Homo sapiens
gtcagaagcctgggacatttatccacaaactcctgcgaccaattggcagagtattaacaccgctttacttctgggatgagcctgggcatgtctcagtggtcctccaaggcttaggagagagg

SEQ ID NO: 257391 - DNA, 122 bp, Homo sapiens
ggtcctccacactccacggtccccgcctccgggaaggccgcgcgtggcatgggcagagcgcggaatcctggctccactgcccacctgcccgttgactttaggcgacgccaaccccaggctgg

SEQ ID NO: 257392 - DNA, 122 bp, Homo sapiens
tctgctccatagaacactggacatcgattgtagcacctgtcatgtcacatttttctctggcgtactgttcgtttttcttgtaaatacaaaggtgatacatgcttattgtagaaaatttggaa

SEQ ID NO: 257393 - DNA, 122 bp, Homo sapiens
agtgattatgtggagtgcagtcagggcacgttcagatccggaagtggaccccgtgtgccacgtggggacgtggagccaggcgttccggggtgcattcggatccggaagtggaccccgtgtgc

SEQ ID NO: 257394 - DNA, 122 bp, Homo sapiens
acacaccccgggacccaggacctcagggatgaggagccctagaggggcacgtgggagccccggaacccgactcaggccacgggtcagggacaaagcggaggcgaggagacggcagtctggga

SEQ ID NO: 257395 - DNA, 122 bp, Homo sapiens
tattggccaactgccttggagccatttcagtcctccgcaacttagctcaggtggagaggccggcgctaccgagccgggttctttgcccgtcgggggacgctccgccgagacgaggtggggtc

SEQ ID NO: 257396 - DNA, 122 bp, Homo sapiens
acgccatgtgaagacagaggcagccacaggagccaggagagcgccccagaaggaagcagccgggcaacatgggattccagcctttgggcctctagaaccgggaggggatccgcatctgttgt

SEQ ID NO: 257397 - DNA, 122 bp, Homo sapiens
cctggaaccctggcttcccgatttctggctgcgaattcctacaggcgaagggtcattactcggattgttatttccgggccagcgacaggacaatccggggcggggcctgagatgcagtcctg

SEQ ID NO: 257398 - DNA, 122 bp, Homo sapiens
gaattcgcgctggtgccctgggtcgtttgtgcaggcggggtgaggggcagcgcgagtaaacgggttgacatcccctaggtttctctgcagagtgcgctgtgtacttcatcgggcatttactt

SEQ ID NO: 257399 - DNA, 122 bp, Homo sapiens
cgatggtggcactggagtcccccggatggtgcctgaggccagcctttgccaccaagcctgcgctggcattggaggggccctgagaacggtggcttgtccagttggggaaaagagaaagatgg

SEQ ID NO: 257400 - DNA, 122 bp, Homo sapiens
atatttatatagccttctatacttctaaaaacactttttcatttcatcttcattttaggtcgttctgttcttgctgggtaggtaaggcatttatggttgatttacacatttcttctttccag

SEQ ID NO: 257401 - DNA, 122 bp, Homo sapiens
gggagcccctgcccaaaccggttccccctgtctgtgtgggtgccggtcttctgagtcttgcgtttttggccctccctctggtcccccagcaaagccggtttgtgtcttgactttaatgtttt

SEQ ID NO: 257402 - DNA, 122 bp, Homo sapiens
ccaaagtgctgggattacaggcttgagccaccgcgcccgccctaattttttaaatttttacgtagcgacagagtatcattatattgctcaggctggtcttgaacgcctggactcaaatgatc

SEQ ID NO: 257403 - DNA, 122 bp, Homo sapiens
caggaagatgaagtatgaatctactcttaggtccatttacctgcacaggtgaactcttggcgatttagacaggttagacatccatttgtcacatttccccccacagtagcattcttctagct

SEQ ID NO: 257404 - DNA, 122 bp, Homo sapiens
tcccgccggcggatccatggcagccggactgcagccggggccccgcactcgcagccggcgcgaaagttccccgcgagccgcccagcccacatctgggggcagctggagccgcccgcagctgc

SEQ ID NO: 257405 - DNA, 122 bp, Homo sapiens
cctcggttcggaaacggcgaaaggaaaccgcaaggaggccaccacgtcgggtgggagctacgaagttgcccgttcccggttacttccgggcttgcgagcgacgactgctctcaaaggccaaa

SEQ ID NO: 257406 - DNA, 122 bp, Homo sapiens
ccccacaaaaagccacgggggtccagaaaaagagggtggtgctaggcaggcagtaggaagcgaagaggaaaagacataggaaagcagacctgagaaaccagggagggtgcggaagaaactag

SEQ ID NO: 257407 - DNA, 122 bp, Homo sapiens
atcctgcgtcgctccggatccttcctcgctctcagcaccgatttaaaggagcccagtgaacgcccggctaaaaacagggaagaaacaggcgacgtttctttcaggcatatttcaggatgcct

SEQ ID NO: 257408 - DNA, 122 bp, Homo sapiens
agcaggaatcagaacatgatccctttaatgaggaatgaaacaaatccattactataaaatcgcttgaaaatctagaggtgatggccacaaattaaatccaaaataagacaaaattacgaata

SEQ ID NO: 257409 - DNA, 122 bp, Homo sapiens
tacaccagcctaaatgtacagactttgtagccgagcccactcgatcggtctgtgccttcacgtgaccaccatctgtgcctccctcgctccatccaaatttgtgtaggctgctccttggagct

SEQ ID NO: 257410 - DNA, 122 bp, Homo sapiens
tccaaacgatcttatctagtgaggggataattgtctgtcttcccaacctcggctgcccagcgcctgcacatagtaggtgcgcagtaagtatgtgtgggatggacgaacaaatgaatgaatga

SEQ ID NO: 257411 - DNA, 122 bp, Homo sapiens
ctgggggccccagccggggaggcagctggggcgaccgtgcggggtgggggcagggacccgcgaagccaactctgccggagacccaccccccggcggggctgggggctcgtggcgcagtggca

SEQ ID NO: 257412 - DNA, 122 bp, Homo sapiens
gaaactcaccaacatcttggagtctctggatatcacaggtgaacaagttgaagggccttgcgacacagacaagcaaccctttaattctaaatcatctttttttcaacagttggaagttgact

SEQ ID NO: 257413 - DNA, 122 bp, Homo sapiens
actagcccgctcgcgtcatcctatccccttcccccaccagctctggagggcgcctcacctcgaaccaagtctggtcccttgtaaaatggagctaatggagcaggcagccggcgcagccctgg

SEQ ID NO: 257414 - DNA, 122 bp, Homo sapiens
cccatagcagcccaggtccccatagccgaggtcgtcggcaaagatcagcacgatgttgggcggacgggcaacggccaggccagcagccagggccaggaggagggaccgcggtgcccccatgg

SEQ ID NO: 257415 - DNA, 122 bp, Homo sapiens
gaacacgcccacgctcgagatggggaccgcccaggcagggctggattcctcgaaaagggccgccacgccccggcccccccagccacgtgaaccccacaaagtgctgagtaacggtgaccggg

SEQ ID NO: 257416 - DNA, 122 bp, Homo sapiens
gggatgtttgcttcagtcacgattctttgtggtgcaagccaaagaaagccccacccaagccggcctcaacaggaagaaaatgtccactcacaagatgtccccccaggctcaggttcatgtct

SEQ ID NO: 257417 - DNA, 122 bp, Homo sapiens
aaggcgcggcgcgcggaccccgacccggccggaccccggccgcgtcccccggccccggcccgcgcccctggcccccgccccgcgcccctcacccggcccacctcggccgtaggccttggcgc

SEQ ID NO: 257418 - DNA, 122 bp, Homo sapiens
cacccacctcgccagagttgcgaggcggttccacgtggctgggccgtccttgccggttctcgcccttatttaggttgtgtgtcccacttcgggcagcagtcttgcagctttttaaaaaagag

SEQ ID NO: 257419 - DNA, 122 bp, Homo sapiens
agccgagcattcagcgcggttccctacgccctccaggaattttggaaagctatccaagctcggcgctatctttaaaaggaatgagttgtggctcctaactagcttgccgaggagagcgtaga

SEQ ID NO: 257420 - DNA, 122 bp, Homo sapiens
gttagagactttaattcctccttccgagggggtcgtaaggaccccaagattccaatgcctcgggccaactcttcccctgcctgtgggtgttagagcttagcagaccttacccaaatccaggc

SEQ ID NO: 257421 - DNA, 122 bp, Homo sapiens
ttcctgagctgctgagccagaaagccttgatggggttgaaaccatcagatggagcacagccgtagccaatctgggccgggccactgctgcactctgctttaaggaagagtactgcataccac

SEQ ID NO: 257422 - DNA, 122 bp, Homo sapiens
atttgaggtcaccagctctaggcccaggctgagcctaatgttgtttagagtcacagactacgcagaagaaaaccaaggccggggaggggccgtcacttgcccagcgtcgtgctagatctcgg

SEQ ID NO: 257423 - DNA, 122 bp, Homo sapiens
ggagtgggaggatgagtgctattgattctcactcatcagcacccactttgcttttggaggcggctttggaaatgcctttcccaggctcagcccttgcctgcagccatgaccttacctgaaga

SEQ ID NO: 257424 - DNA, 122 bp, Homo sapiens
ggcgagatcacagagacccggcctgaaggaacgtggaaagaccaatgtacctgttttgaccggttgcctggagcaagaagttccagttggggagaattttcagaagataaagtcggagattg

SEQ ID NO: 257425 - DNA, 122 bp, Homo sapiens
ggctgaggcaggagaatcgcttaaaccctcctgggagcggagggtgcagtgagccaagatcgcaccattgcactccagcctgggtgacaagagcgagactctttctgaaaaaaaaaaaaaaa

SEQ ID NO: 257426 - DNA, 122 bp, Homo sapiens
tcccacaaaaccaaaattctctggggggtaaaaacttagctacaacattccctgaaatagcgattagattgaagcttccttggatttgtccaaatccaaacccccatttctgtactttgctt

SEQ ID NO: 257427 - DNA, 122 bp, Homo sapiens
cggcgcctcagaggactatgaggcgggcgccaactgcttgggccgcagggcgggaggcagcgcgggagtggggcgttgaggggccggcctagcttggggctctggccttgcgtcttccgacc

SEQ ID NO: 257428 - DNA, 122 bp, Homo sapiens
ggagtcagaattccaactgtctctgccctccctttgtcttggtttgtctgtctgtctgcccgggtctttgtctctggtgggcgtttgtctatccatccgtcttggtaactgtagctcctccc

SEQ ID NO: 257429 - DNA, 122 bp, Homo sapiens
cctctccatcctctgtctccagggccgcctgctcctgtagccgcagggattcctggagtgcggtgagggagacaaagagtggtcggggttctgtcttacctgaaacctcccctttccctccc

SEQ ID NO: 257430 - DNA, 122 bp, Homo sapiens
cacgggactccgtgcacggctgcaccgccagggcttcaggcgcacagcacaatctggggacgcaggactcttggtgccacagtccccgcctcgccctggagccgccctccaggcccgctatc

SEQ ID NO: 257431 - DNA, 122 bp, Homo sapiens
atacagggcagaaagaagagtaaaatcatctcatattactttccacctgaagctctgagccgaaagagttatttgctcaaacactctgaaatggggagggacagagctctgacccctccgtc

SEQ ID NO: 257432 - DNA, 122 bp, Homo sapiens
tcctagaactgagggtcccacactgcccgcatcaaccatgtagaggcaccaggacggtcgcgtgtcattaggaagaagtgctgtgtcatccttcacagtacactggggagggttctcctcct

SEQ ID NO: 257433 - DNA, 122 bp, Homo sapiens
gcagatgaggctccgatcgcactcctggcgctgtccagcccatggtgggagaagtgcagccgcgtctgaacgtacctcttctgagagccgcgcacgcagatttaggagctgattgtgacgat

SEQ ID NO: 257434 - DNA, 122 bp, Homo sapiens
cctctggattcagccagcaggcccccaaaccagcgaagttcagttaataacagactccttcgaggtccctggcaagccactgacttcctctttctgggcctcagtttctccgcctataacac

SEQ ID NO: 257435 - DNA, 122 bp, Homo sapiens
cccccttttaaagttgttctaaccatttagaggatgctgtagctaccaggccacttggaacgtacacctgtctgagttgagaccgaagttttaaattcagtcagttcttcatttgtttgtga

SEQ ID NO: 257436 - DNA, 122 bp, Homo sapiens
ggcagccgcgccctgcctggcaccccctgcctccgtgacgccccatctctctctctacaacgtagccccgtgctagttcacagcctcgcgacccctcccagagaggccccacagccatggcc

SEQ ID NO: 257437 - DNA, 122 bp, Homo sapiens
gacccattagatttgagaggtgttgtgaaaaattgtgtttgtttcttcatagttttaaatcggcatgcattgtcaaactgtttacaaatcttggaaagtacagagtgtagtaattaaaactg

SEQ ID NO: 257438 - DNA, 122 bp, Homo sapiens
caggacacactcagaaaatgaggagcttctgttagcctcctggctcccctggccaactgccgcacctcttccctatcacccaccctgacttaccccccaatcccttggcacaatgacaaatc

SEQ ID NO: 257439 - DNA, 122 bp, Homo sapiens
tgtaacaaaggaataattaactgtaatagtttttcaataaatcgagttgggtgtttccaccgtaaacagatgtgagtgactctcttcttaagtgtggccaggcccctcccagacaggactgc

SEQ ID NO: 257440 - DNA, 122 bp, Homo sapiens
ctgctgacgtactgtcatatactgcgcggagccagacctcggactgccaccgccgccacccgccccaccctccggccccgcgccccgccccgggctcgtctcattggtcttgttcccttcag

SEQ ID NO: 257441 - DNA, 122 bp, Homo sapiens
acggggtttgctgggtctgtgtggggtcccggagtgggggcactcacttggcctgggcctcgtccaggctctggtcggtgatggtcattatctgctgcagaatgtccccgatgtcttgcttc

SEQ ID NO: 257442 - DNA, 122 bp, Homo sapiens
gccccgccgcggccgcgccggcgggggcagcgccggccgccgattagttttatctcggaacgtcaattgacttagactgattggcttcctgccgccaatgtcaattaaattgcaaatgcttg

SEQ ID NO: 257443 - DNA, 122 bp, Homo sapiens
gtagatactcagtagtgggattgctggatcaaatgtagctctacatttagttctttgagacgtctccatactgttttccatagaggttatactggtttgcattcccaccaacagtgtataag

SEQ ID NO: 257444 - DNA, 122 bp, Homo sapiens
cctccttgtccttaaaacaaaagaactatactagattttttcaaagatccctctgtatcccgggtcctgtgaaatgactatggttaacagtgatgattctgtaatgtgagaagttcgccact

SEQ ID NO: 257445 - DNA, 122 bp, Homo sapiens
gcggccatctttacgaagggcaaaaccctccgcactagcggaagcaaggggctggcagagcggtatcgcaagaaatcaaccaatcagaacaatactaccgcgacgcagcgccgtgtgatccc

SEQ ID NO: 257446 - DNA, 122 bp, Homo sapiens
ggtccatgggtgcaacattctagcattttaaagaccaagagttctgattctgatggcccacgtggagcctgggcatggacctgttgtaaaagccgctcagggggtgctaaggtgcaggcacg

SEQ ID NO: 257447 - DNA, 122 bp, Homo sapiens
ttttttgggagcacattcccctatgacacttagatcctaatgctgactccaattccctcccgggacctcccctctccttacagcatgctgggctttcccttagaaaaccccatgtcatttcc

SEQ ID NO: 257448 - DNA, 122 bp, Homo sapiens
acactcgatactgctggagcgccaagctagtgtcagggcgcctgcggcaagcgagtgcagcgggcacttcattcagctttgggcacgcttagccctggcttgaaacaagatctctactatgt

SEQ ID NO: 257449 - DNA, 122 bp, Homo sapiens
ggggaggagttgagacgggcggggaagagttcgggcctcctttcccacacttcgttaggacgccggctggggcgggccggcagagggcgcggggcggttcctcgctcggcgggcccggcagg

SEQ ID NO: 257450 - DNA, 122 bp, Homo sapiens
gactttctgtttggaagcccagctgaggcaaaagcagcagtgcgtttaaaaattggagctcgccacattctgaaattctttcggttcgtgaaagcagtaacctaggaaacgagactggcacc

SEQ ID NO: 257451 - DNA, 122 bp, Homo sapiens
ggacagtagtctggtagagataccctctcatggctctgaattctctcagtaccacaggcacgaagagaactacctttaggttactaggatacacagcatgcaataatcccttatgccaggat

SEQ ID NO: 257452 - DNA, 122 bp, Homo sapiens
ctcggtcaattttgggaccatctgtggaaccaccatgtgtgatcagacacccaacacacccgaggcacagtggtgcagaggagcgtctaatctttccagggcaggggtggagggattaaagg

SEQ ID NO: 257453 - DNA, 122 bp, Homo sapiens
agacctgattctctcctccgacttggctttcccgctgaaactagcccctccccgcacacccggggagagccgccctcactctctggctcgcccagtttaccccagtttgggtttccccaagt

SEQ ID NO: 257454 - DNA, 122 bp, Homo sapiens
tgttattgtaagttcaagttttgtagtttaaattccttaagaaaactcccaaaaaacagacgtcatatcatgatcttgcccctttctactacttatgaacctccccaaagctattctaagtc

SEQ ID NO: 257455 - DNA, 122 bp, Homo sapiens
agtccgcggaattcttgtatcctgtccagggtatcctgacctttctcatgaagcttctaccgcgctctgatgctggcagtcaccgccaaaaagtgaaactactaatactttgcagttgacgt

SEQ ID NO: 257456 - DNA, 122 bp, Homo sapiens
tcatgaatctccacctataaggggcacagtttttaccctttatttccttcaaagctcttgcgtggagactatgtattcaccagagatttttctatagtaaaatttttaaaaatccagagcat

SEQ ID NO: 257457 - DNA, 122 bp, Homo sapiens
cagaggggccggaaccgtgaattctgccatcagctggcccagggccgagcctgcctctgccgctgaactactgaggtgattcagggcaaggcacccagcagggccacgccgctgtcttcatc

SEQ ID NO: 257458 - DNA, 122 bp, Homo sapiens
cccttgacctaaattacaaatctcttgactcttccctctccacagaaccactagggtgaacggtctaaaatgatgattccctgtgacccacagaaaatgtgaaagttcccaactttactcct

SEQ ID NO: 257459 - DNA, 122 bp, Homo sapiens
ccggcgtgttgagtttccggcgttccgaaggactgagctcttgtcgcggatcccgtccgccgtttccagcccccagtctcagagcggagcccacagagcagggcaccggcatggccaaagcc

SEQ ID NO: 257460 - DNA, 122 bp, Homo sapiens
ccataaagagatgacctccgataacctgaatcaatatttccccattggggctcgggcccccgcagctgtcttcttgatcatctggcagatgccacacccacccttggccctcccctgccttc

SEQ ID NO: 257461 - DNA, 122 bp, Homo sapiens
gaccgacacagggatgaggggttactggggccgcggcttgcggcctgcagaccccggaagcggcgcagaggatcccgcctcctattccttctcatcctatcgcgcgccacaccctttgccct

SEQ ID NO: 257462 - DNA, 122 bp, Homo sapiens
cgcgaagaggatgcggaactcctcgtcgaagctggagaccagctctccttggaacacgtgcgccaggctgcggtggatcttctcaaaggaccacatgaagctgtgggggggtcagggccaga

SEQ ID NO: 257463 - DNA, 122 bp, Homo sapiens
ggatgctccgcagctcccgcaccggcctggcgggttttgtggttagcaagttcctgcttccgtcgcagcgacggcaagtttgccgcgggggaagggcacgttcctgccctgcaacccggagc

SEQ ID NO: 257464 - DNA, 122 bp, Homo sapiens
ggcacaggctgggactttgacatacaggatctcatttaatcctcactgcagcccagggagcggggtattattatccctgtgttaccagatgaaaaagatctcattttctcagtggagatagt

SEQ ID NO: 257465 - DNA, 122 bp, Homo sapiens
gccacttcctcctctgaactgctggaataatcacttctgactagcagagttactgggagccgctgtttgtcagtgttcacattctgactttagcaggagatggagcgagcgaaggagtgaag

SEQ ID NO: 257466 - DNA, 122 bp, Homo sapiens
gggccgggtgagtggccgggccgggaatggttaagcccaccgagctgcggctgcctagagcggcggcggcgacggcggcggcggcggcgggggccggggcgcgggggcgcggcgggcgggca

SEQ ID NO: 257467 - DNA, 122 bp, Homo sapiens
aggaagagggacgggtctagagaacaggaggtaagacagcatcaaatgctcagtaatgtgcgtgtgatgacacagggtgagttgaaaagatccttgaaagacaccatgccggttttgcatca

SEQ ID NO: 257468 - DNA, 122 bp, Homo sapiens
acttgaaaatgtggaacgcagaaattcaccctgatctctcccttttccccctacttctttcgtgaattgaggaatacacttgtccagattattttggtgtacatagcagggggtggggggcg

SEQ ID NO: 257469 - DNA, 122 bp, Homo sapiens
cctgctccgttacaatcaactatgtgttacatggaaggtgggggaaatgatccttcacttcgaatctctccccagcaggaaatggtgccagtggagagtgaagggccctgtggagtcccaag

SEQ ID NO: 257470 - DNA, 122 bp, Homo sapiens
tgaccagctttgcaaagggagcggtgggcgaggctgtggtctctcccaggtgacctccatcgccatgcagagctgctctcacttctcctcgggaaaggccagcgtcaggtattcctaggagg

SEQ ID NO: 257471 - DNA, 122 bp, Homo sapiens
gctgcgaacggaggtgaggaggctcagctgaccgcctgtgtcagctgacaacgtgtgacacgcacaaacgccaggacttggcttggcctctctcttagttatttgcagctctgcccaatcgg

SEQ ID NO: 257472 - DNA, 122 bp, Homo sapiens
gtggcggtggctggccaggtctggggtgctggtggcaggtcgtggccgtgggtaggggggcggtggcctgaagagatagttcttaagcatgtgggccgtgctgtagttatggctgccctgca

SEQ ID NO: 257473 - DNA, 122 bp, Homo sapiens
gcgtgtcctggtccatgatgcagatgcagacacgggtagaagaggcagcaggtttgatgccgtcagcttttccgctaaagtggttaacccgggcttaagaagcgcgcgtattcatctcagaa

SEQ ID NO: 257474 - DNA, 122 bp, Homo sapiens
ccgccccttccggcccgggagatttgattcccttggcgggcggaagcggccacaacccggcgatcgaaaagattcttaggaacgccgtaccagccgcgtctctcaggacagcaggcccctgt

SEQ ID NO: 257475 - DNA, 122 bp, Homo sapiens
gctagagcagcaggatatttctgtatatcctgtttagccaactgtagttcctttcttcagcggcatccctcagctcatgccatgtaccgacacacatatgggacccaaaagttacctctgat

SEQ ID NO: 257476 - DNA, 122 bp, Homo sapiens
gcgtagcgcggcctttattgcgtcactgcgagtccagagcgcacggctggatcatgagcacgcccgcgctggcgcctgcgcgcttgcgcatcttcctctgcccggcgcgcgccgcagccgtc

SEQ ID NO: 257477 - DNA, 122 bp, Homo sapiens
gtcttgactgttagctttcggccctggaaagatagccgggccaggggctctgcctgccgtcgggaggtggagcacttttcttggaaggcccagcggctccccaagctttcagaagtggaacc

SEQ ID NO: 257478 - DNA, 122 bp, Homo sapiens
aaagaaatagatcccttccccatagtcagttcggcatctcgaccctgcagtgggactggccgggcaaagttatgaagcttggactttataagttcccagtgaaaagccggagctccctagag

SEQ ID NO: 257479 - DNA, 122 bp, Homo sapiens
ccacccggagttgacaaccgcggagagacgcagacacccactgacctccaggaagctgagcgtggtggatggaactctacgatctctttctctccaaggacggaaacctcatccaagcagtc

SEQ ID NO: 257480 - DNA, 122 bp, Homo sapiens
cggcggaccaagtcgctgagcggtgggagcttagtgccggtgctaatgacagatgagccgcgtcccggggtgcagggtctgcagggcaaacgcggccgccgcagtcccgcagccggatgcag

SEQ ID NO: 257481 - DNA, 122 bp, Homo sapiens
cttaaagatggggagaggaggaggcaggaagggttgggctctgcaggcctttagaacgatcggaggtctaatgaaaataaataccttgtaaacatgtgggtaccaagtaaccagaagagagc

SEQ ID NO: 257482 - DNA, 122 bp, Homo sapiens
gctggcttaacagaagccctcctaacaacagtaatgaccgctgatatcacccacccaactcgccatgtgtgcatccacaataaccccgcggagaaggcgcttgtcaacatctccacttttca

SEQ ID NO: 257483 - DNA, 122 bp, Homo sapiens
gtcggctccgctcatctgttgggaatgcgtcctgtgggcctagtcctccgctggaagaaacgcgctgttctccccaaccaccgtttatcattcttattcaccgtctccggaatgtccattca

SEQ ID NO: 257484 - DNA, 122 bp, Homo sapiens
acctagagccctaaatcagaatgagagtccaggaaagcttgttccagctcaattaaaggacggtctgagaggttaggctttagctttgctgatcctgttgattgtctccctgtgtattaaag

SEQ ID NO: 257485 - DNA, 122 bp, Homo sapiens
ctgccaggtgttcacccctatcccacggacatcctgcattcctggccgcttggcgccccacggaccgatggacagacagcactgcagccacagagcgtcgcacagtagccaccgcgctggcc

SEQ ID NO: 257486 - DNA, 122 bp, Homo sapiens
aaaaacccccaaacagatgagtaagggaaaccactcagtatgtgtaaaccgtgccaccaacgttccagttcacagcagccagatcacaggaagctgcctggcacaggcgcccacttcctggt

SEQ ID NO: 257487 - DNA, 122 bp, Homo sapiens
cctccccacccccggcccattgcaaaacgccaacagcccattaccacaggcaccgcacagcggcccagagaaacgctccggccaccaggcctgccgaggagccggacacagcctccggccct

SEQ ID NO: 257488 - DNA, 122 bp, Homo sapiens
ctctcccacccccaccccctaccccctcaggctgtggggggtcaggggtcgaggcccgcgcggcgcgcaccttccaggcgcatccccaccgtcaggcatttctggaagcggcagaagggaca

SEQ ID NO: 257489 - DNA, 122 bp, Homo sapiens
catgtgcactctgcagtgggcagacgtcatgatccttcatggagagccattgccggggcacgatcccgggctgctggagggagggaggcgagctctgctctgccattttcagctctgagact

SEQ ID NO: 257490 - DNA, 122 bp, Homo sapiens
cctggaggaacaaaggacgcccgggggcagaggcagcagtagggcccagcctgtcagtgtcggagagccatcctgacagtgccggccaaagaggcttcttgaatgctcaccgcaggccaggg

SEQ ID NO: 257491 - DNA, 122 bp, Homo sapiens
cagtggccacgaggggccccaacagaggaagaaaccaggtgaggtgcggtatagtggactcgactgctttctaaatctcagtggttggccaggcactgtggctcatgcctgtaatcttagca

SEQ ID NO: 257492 - DNA, 122 bp, Homo sapiens
ccgcacaccagacgccgcgtccgccgggtcggcctagggcggggtggtcaagtgcctctgcgacccgcactttcccgcgtctctcccacggcctggccctcccgccgcagtctctcttcccc

SEQ ID NO: 257493 - DNA, 122 bp, Homo sapiens
gactgggggctttgcggttaccgggccctgggctgggtcaggacgcccaggtaaagtaggcgatctcatccaggtcgaccgggtaatcggtgagcagcaccggcgtcttgtcgaaaagctca

SEQ ID NO: 257494 - DNA, 122 bp, Homo sapiens
gtgtcccctggttgtggcatacacacgtgtgggtataaaatcgtaaatcctatgtagtcgcgtagtgcatgcgcagaaggcttagacacgaaatgtcatttcagcaatgtgcctagagaagc

SEQ ID NO: 257495 - DNA, 122 bp, Homo sapiens
gtcttttcacaaacacaaatgcctgagaagaatagggggccacgcttagctgaaatggctcgtttgcaaatgaaaaggagattgggagcccttacattttccaagttttcacctaagaggat

SEQ ID NO: 257496 - DNA, 122 bp, Homo sapiens
tttcactcatctagcctctgactcctgagctcatcaactgacatattctcctctcatgagcgtttgggggcagaaagcctcctcagaccttttggggattatttaatcctcgggtaccagga

SEQ ID NO: 257497 - DNA, 122 bp, Homo sapiens
tcccgtgacattccacaaggccccgctggccggcccctggcctgcccccagagaactgctcgcaggcaatgatgccctgcagcctgagacctgggcaccccggcctttgccccaaggaggct

SEQ ID NO: 257498 - DNA, 122 bp, Homo sapiens
ggggagctcatacacataagtgcttgtggaaagcaaaatgatagagttaacaatgctaaacgtatgttaagacaacaagatgactaacaaacaatatagacacttaaagtcttggaaagtgt

SEQ ID NO: 257499 - DNA, 122 bp, Homo sapiens
gactcgccgccttgccctgggtcgcgatgcccccaccccgctcccacccctctcctttcccgcagcctgagcaagacgccttcggcaacgccccgcatccgggctccttggcctcgaagagc

SEQ ID NO: 257500 - DNA, 122 bp, Homo sapiens
cagagaccatccctgcttaaatgcctcaggtatttaactagccgtacaagcagacaccagcgctgacctcggagaaagtccctcttcagcagccccttctgggtgacttctaaacagaaatc

SEQ ID NO: 257501 - DNA, 122 bp, Homo sapiens
aagaaccagaatgccatatctgtgtcacctgggtagggaccagtcctgatccattaagtccgggtctctgggtaactggactcaactgctggactaaacagaatgtccggcgtgggttccta

SEQ ID NO: 257502 - DNA, 122 bp, Homo sapiens
ttgcagggcactaggggatggggaaaggtgaatcgaggtgctctctggctcattcgcagccggctaacccgccatatcttacacagctaagggctgccgacgccattttgcagggtgggctg

SEQ ID NO: 257503 - DNA, 122 bp, Homo sapiens
ctgccctctgaagacatgggccacttgacagacccccagagcagagaccatggcttcctgcgcaccaagatgaaggtaatgccactcgcgctgtctccgagggccgggggcgtgcatgtaga

SEQ ID NO: 257504 - DNA, 122 bp, Homo sapiens
agtggcgtcgtcgtcctcacataaaatgtgatggataaagtctctcttatttcatgacatcgtggctccctctcaggctgtggtttgtgaggaaaagtgaaaaaagggaaggagaaagactt

SEQ ID NO: 257505 - DNA, 122 bp, Homo sapiens
ggccggagccgactccctcagcttgcagggaggtgtggaaggagaggcgcgggcgggaaccgggactgcccccggcactgcccccggcgcttgctggccagcaagagttccgggtgggcgtg

SEQ ID NO: 257506 - DNA, 122 bp, Homo sapiens
ctgacgaagtgcttttcattccaaattcttcctctcctgtgtttctataaacagtgtcatcgatagagtcatggtctctcttccttgttgcttcattcattctctaaaataatgagtaggcc

SEQ ID NO: 257507 - DNA, 122 bp, Homo sapiens
gaactcccgcctctcccacccggaaagtactgacccagagaggacacacctttgcttctgcgcagcccaacttctgcaagcgctcaagagttaattactccttcaccttcctggggcctaac

SEQ ID NO: 257508 - DNA, 122 bp, Homo sapiens
ggaccaggcatggctggagggccactgtgacggccgcatcggcatcttccccaagtgcttcgtggtccccgccggccctcggatgtcaggagcccccggccgcctgccccgatcccagcagg

SEQ ID NO: 257509 - DNA, 122 bp, Homo sapiens
ccaaggctcggaaatcctcctctccttcttcctcacccttcaaaacccccactgcagcaccgattcgggaaccccccttggaagactccctcccggcaaggcctcatttctgccgttgagga

SEQ ID NO: 257510 - DNA, 122 bp, Homo sapiens
tctgaagtggactgtgtgagcctgggcattcccagagaggaagggccgctgtgcactgcccggccttcagaaagacagaatttcatcacccaatgcagggggagctcttcctggaccaaggg

SEQ ID NO: 257511 - DNA, 122 bp, Homo sapiens
ataagggaactactaaacatctggtcacacgctggcatctaacacaatgccaaagcgtaccgaagtctgagcatggatgtggatgaatggaggtgatttgaacacagtgctggccaggcaca

SEQ ID NO: 257512 - DNA, 122 bp, Homo sapiens
cagctcctgctggaaatgcagccctgctctgccaactcgctgctttctggagctgctgcacgcgccgccgtctcgagccgtccactcagctccctgcgcccggcgcgctccccccatctcca

SEQ ID NO: 257513 - DNA, 122 bp, Homo sapiens
gggacgcggcagcaaggcgtggagagagcccccgggggcgtcccatgaggcgttcgggatcggcgcctcctaggtgcgggctgtgcgggcagtcctgctcccgcccccggggctgagctggc

SEQ ID NO: 257514 - DNA, 122 bp, Homo sapiens
taacttatgatgttaacacgtgtgttaaactaaaattgaaaaattaaatatcaaagtaaacggatatgtggcagataatattttttaaatagccacagcaatatttctagttccacctggtc

SEQ ID NO: 257515 - DNA, 122 bp, Homo sapiens
cacaagaagaggagaaatgatcaagaagctgcacgggagaaggagggagtggggaactcccgcagcaggtaccactttggggcatcctagcacagtgtccctactctcagggattttcagag

SEQ ID NO: 257516 - DNA, 122 bp, Homo sapiens
gcgcaaggccaagatgccggttacgaatgcgagtttgtttctggggagagaccctggtaccgggagaggaggaggaacgcggagacgccgtcgggcggtggggatgttggggactggcaggc

SEQ ID NO: 257517 - DNA, 122 bp, Homo sapiens
gctaggctccagcccacagcggtggccacccagctgacatgccttcggaggagtccatgccgctgactcagcgctttctgtgccgcagggacacctggtcgccatcacatggacacgctatt

SEQ ID NO: 257518 - DNA, 122 bp, Homo sapiens
ccgactggggagcctgggatccagagatgtgacccgaggttgtggtcagagaatgggtctcgggtcgtcttccgtgccgggtccctgtcgtgttccaggcccgggtctccgtccagcatcga

SEQ ID NO: 257519 - DNA, 122 bp, Homo sapiens
tgggcggcatgtgcagccgtgtgcccgcgccgttcctcacgtgcacatgggtggcttgagcgcataagcatgactgccaatatcacggttggttagcttgtggcccaatactgggcggtgtg

SEQ ID NO: 257520 - DNA, 122 bp, Homo sapiens
ttcctgggactgccacgccaccttgctctagaaagcagagcggtgccgtcctcagaatgacggactaaccatggccaacacggctgctcacctgctgtgtcccagatctgtgccaaggattt

SEQ ID NO: 257521 - DNA, 122 bp, Homo sapiens
cgctagcctttcttccccagcaggcactcaccattctctctgcagaggtgtggctgctgtcgtggtggcagggcccagcctcctttatgtctcagccttatcacctgaaggtccaaataagg

SEQ ID NO: 257522 - DNA, 122 bp, Homo sapiens
gtgcatgtacttgagtgtgatgataaatcatagggatgtgtttagttgtgtgtgtgcgtacgtgcgtttatccaaattttcatcagggctgttcggtgtatgtacacatgcatgcacatgtc

SEQ ID NO: 257523 - DNA, 122 bp, Homo sapiens
attaaggaacgaagcaacaaaaggatgaattcaaccaacatttattgaacaccaactgtgcgccacccctgttccaggcactgggaggcagcagtgaacatgacagaacaggaatccctgcc

SEQ ID NO: 257524 - DNA, 122 bp, Homo sapiens
agtcactctgcattacttagagtctcagcttttgtgagtttgcatgtagtgaatttatctcgtatgttattcattcttacagaaattggcttatagggcttgatgacaggggtaactggttc

SEQ ID NO: 257525 - DNA, 122 bp, Homo sapiens
ggtgtccacgtgtgcagggtggcgtctgaggcagcctttctgtcctttttgcagggtgaccggggtttcgacggcctggctgggttgccaggcgagaagggccacagggtgagtatttcctc

SEQ ID NO: 257526 - DNA, 122 bp, Homo sapiens
agagacacggactccttcacaggccttttaattcctagtctatgaagcactccttgaactcgggtttctatttaaactcacactgagggggcgagagctaattcacacagctgccagtgatg

SEQ ID NO: 257527 - DNA, 122 bp, Homo sapiens
tctagttgcttttgtagaggctgtggctggggcaaatcacacagcagcctccctcaccaccgtgcatggactaacaaacatgaaacaccacgagcaccaggcggcctaggggaggagaagaa

SEQ ID NO: 257528 - DNA, 122 bp, Homo sapiens
gctggcagaaacgcttgggtgaaaaagcggaaagcgccacgtgagaacagccccggcgtgcggccctgcagggcctcagggcgggcatcaaggccccatggggatccattcctcctcacgct

SEQ ID NO: 257529 - DNA, 122 bp, Homo sapiens
tgctttgggtgacaacggtcaataatgaaggtggctgcggcgcggcggcaggctcagctgcgccgggcgggggcggcgccggggccgcgcctgtaggactcggggccgacgccgcgggatgg

SEQ ID NO: 257530 - DNA, 122 bp, Homo sapiens
agcagtggtgttacatcactgcaagttgagctctgtgtagattcctaaaaaggaggtgtacgtgtgctgcgggggtgcagtgaagaataatgtcaccctcagtgagactccgtcagggaaag

SEQ ID NO: 257531 - DNA, 122 bp, Homo sapiens
cgtcttgtcacgaagctaacacatttagacggagacagtgacctgtgccaccacagacgccggattttcttggatgaaatccacctgtgtgttcctctgcaggtgaatttgaaggaacaggg

SEQ ID NO: 257532 - DNA, 122 bp, Homo sapiens
ggggcctctcagttcctgtattctctgagccctttgacctagccgctgtttactcctacacggccaccaggaatagccagagaacctcgggccagaggaggcttggcacacacacctcgctc

SEQ ID NO: 257533 - DNA, 122 bp, Homo sapiens
cacaccttctgaacttccccctgtcccatgccagaagtggggcagtgaaggaaaggggcacgggattaggctgttgctcctgggctatctgcagttcttgggcccaaagcccctgaatcccc

SEQ ID NO: 257534 - DNA, 122 bp, Homo sapiens
gcatttggtccaggttggagcatctccgcagcagctgcaacagccgcacgaaggtagctccgggcggggagcgaggcgctgtcctcggtgctgaaaggccgaggcgcgcggtgggcgcgaca

SEQ ID NO: 257535 - DNA, 122 bp, Homo sapiens
ggtgggatgggggtcggtgggggaagttgcatggggtgttatacccgcccggttacaggccgctgccctgtagcataactgcgcgcgcgcgagcgcacacacacacacacacacacacacac

SEQ ID NO: 257536 - DNA, 122 bp, Homo sapiens
agcactctgggcaggttctgtgagataagacaaatcaaagggaggtgtgtacggtgccagcgactgcttcagagaatcttcctccaaaggagggtcaccaccatacaggaagtgttcaggct

SEQ ID NO: 257537 - DNA, 122 bp, Homo sapiens
ggcactggcccagtctgaaaagcaggagcatgaccttcagtgtggtgagcactggactcccgggaagcccaggacccagcagtccccactccaggctgcggccacctgcgagaccagcccac

SEQ ID NO: 257538 - DNA, 122 bp, Homo sapiens
aaggagaggcgggatacgtgtgagaggcggcagcatgctggcagccctgcagcccttgctcgctctcggtgcctcctcggcctcggcgcccattctggccgcgcttgaggagcccttcagcc

SEQ ID NO: 257539 - DNA, 122 bp, Homo sapiens
cgcacagcaaactcgagtggaagggagagagagttcccctgtgcctcctgccctcacacccgcacagcgccccaactatcaacacccctaccagcgtggcgcatttgttagaactgatgaaa

SEQ ID NO: 257540 - DNA, 122 bp, Homo sapiens
tgcttcgctgcctcacacaattgtagggacttcctcaggctgttggatttccccaccttccggggctcaggtccattgacttaggtctagggctccatacatttcacccagagactccggag

SEQ ID NO: 257541 - DNA, 122 bp, Homo sapiens
gcatgtagggtgcttaggacagggccgggctcagcttgccgcctcacagcaacaccagcccggagccctgtcctgagcttgacagggttccgcagttcattctctccatgatcctttgaggt

SEQ ID NO: 257542 - DNA, 122 bp, Homo sapiens
agtgacagaaagagttgatgaggatggagggagttcacgaggggaaagcgcccagtgtggcgttgcgtgcaccagagctgccctgggagatgcctttagctgggcccagggaaggagcaggt

SEQ ID NO: 257543 - DNA, 122 bp, Homo sapiens
tagggacaatcacggtgcccgccgcaggcccggggagaggggggtaaaggcatttgtttgcgttgagcctcgggggtcacagggaaagcgctgtttatacatgtgcagtcttcctccagcac

SEQ ID NO: 257544 - DNA, 122 bp, Homo sapiens
tgcaggccgggccacgacggctcacacctcgctctcctcctgcctccgaggttaagacctcggtgtgttgccactttcggcctcagcccctcgtgtgtgtaattacagccgttcccagagag

SEQ ID NO: 257545 - DNA, 122 bp, Homo sapiens
gtacaaccaggtgaaggtgaaagtgacctgtgccttgggcagcaatgcctgcctaggcatcggtgtcacctgccactcccagagtgttggccctgactcctgctacatcctcacagcctacc

SEQ ID NO: 257546 - DNA, 122 bp, Homo sapiens
tgagtctccctccctctctctttttgctgccaggggtttagtgccctgcgaagagggctccgtggtgtggctccctcctaagacccctcttgaggccgccctccctgctccttcaggaatcg

SEQ ID NO: 257547 - DNA, 122 bp, Homo sapiens
tggtccagagcctgggatgttgccttttgcccactggaattcccatcttggaagagtaagcgcaggggattgtccagacagccaggaggccagcgaagccaagtccttcagtacagcctggg

SEQ ID NO: 257548 - DNA, 122 bp, Homo sapiens
ggccatggacgtgcccgaggagcttggcggtgctggcctcgattacctggcctacgccatcgccatggaggagatcagccgtggctgcgcctccaccggagtcatcatgagtgtcaacaacg

SEQ ID NO: 257549 - DNA, 122 bp, Homo sapiens
tccctccaggtatgaatctggggaccacgtggctgtgtacccagccaacgactctgctctcgtcaaccagctgggcaaaatcctgggtgccgacctggacgtcgtcatgtccctgaacaacc

SEQ ID NO: 257550 - DNA, 122 bp, Homo sapiens
ggaatccacggtcatgccggaacccatggccatgccagaatccgtggtcatgccagaatccgtggtcatgccggaatccactgatggtgcacgtgacccacgatgggaaaagtcacaagaca

SEQ ID NO: 257551 - DNA, 122 bp, Homo sapiens
ctcccgcgcggagccaggggcgggacaggggggcgtggcctggtggcgctgacgtcacctcgcctataaaatgtccggggcgccgctagctgggctttgtggagcgctgcggagggtgcgtg

SEQ ID NO: 257552 - DNA, 122 bp, Homo sapiens
aggggataaagatgaatggtctcaccatcttactttactgagcacctactatgcgagaggcgctgtcttaagcctttttcctgacctatttcatttaagcctcaccctccaatgcagtacca

SEQ ID NO: 257553 - DNA, 122 bp, Homo sapiens
accagcaatgtggagaagctcacataagaagctcagacattagcaatagcaaaatcagagcgtgaaattcagattagccctccccaggctgtgagaggaagggggtattgcaagacttggca

SEQ ID NO: 257554 - DNA, 122 bp, Homo sapiens
tgggagccacgggccacggtgcttcctgagcctgcagaggccgagagctggggctccagccggtgctccgcacaggtaccctgttctcagggcgtgagctcgtgaggcccgtgggggctgtg

SEQ ID NO: 257555 - DNA, 122 bp, Homo sapiens
attcttcaaaacggcgtacagggggattctagggccccatggttacttctttggaccccccggaggcgctgtccagccacttccagtcgccctgatgactcgtcgtgggttcctttaggaga

SEQ ID NO: 257556 - DNA, 122 bp, Homo sapiens
ggcaccgtgtcctccgtccaggctcgctctcagatggcctagcccagcgaggggcaggagcgacagcaaatgggaaaaggacggcccagtggggatgccgagacactcacatagttttctaa

SEQ ID NO: 257557 - DNA, 122 bp, Homo sapiens
gctcgccagggccgccagatacgtcaacagaatccatctttcgaagggcctggaaggcgccgggttttccgggccggggcagaacggcagatccggagactgcccggtgcggtgcctgggcg

SEQ ID NO: 257558 - DNA, 122 bp, Homo sapiens
ataaaaggaatcaaacttatgctattttagaaggtttctttaagaaccccatagtgtggccgggcacagtggctcatgcctgtaatcccagcattttgggaagcgaaggcgggcggatcacg

SEQ ID NO: 257559 - DNA, 122 bp, Homo sapiens
caataaatacaaagggctatagaagctcaggacccttgttcaccagaagcaaggagtccacgaccccttcttccaaatatactcttttgtctttgtctgtattctcgcattcatcctccttt

SEQ ID NO: 257560 - DNA, 122 bp, Homo sapiens
acagcagtgcaaggcagcgtgtcacacctacgcatgagcaagccgggcgctgatggccaccgagcagccacgttttccattcaaatccgcacttgctaaggatgcagcaggaagccagtggt

SEQ ID NO: 257561 - DNA, 122 bp, Homo sapiens
aggccaactgggtatgtctgagctctgaaacctacatccatagccaaggccacctagggtcgcgcctctcccccaacgctgccccaaattaatctcagacctcagtgtcttctcagatctcc

SEQ ID NO: 257562 - DNA, 122 bp, Homo sapiens
ttcacctaccgcgtgctccttcaggaggctgagccggtgggggcccagctctgttagacccgcagggttctgacaccagggtccaggctctcggttgctgcggtctgtccgttgatctctga

SEQ ID NO: 257563 - DNA, 122 bp, Homo sapiens
ctcctgggcagaggagcagcgcctcccggtccccggctcacggtgcttgccccgcaccttcgcctgagctggttccacttaacccgcaccaacctgctggatgtagccagtgggaaacccag

SEQ ID NO: 257564 - DNA, 122 bp, Homo sapiens
aaatgtaaacacatgagaacattccagcagaacaacaaggaaggcaagcgatgcaggtgccgacaaaacgcagtggctccggatgtgccctcgacggaagggaagccatgaggggaagcaga

SEQ ID NO: 257565 - DNA, 122 bp, Homo sapiens
gtgcacctcccgtgtctcctgccacttgcaccggctgcacactcgcgcgcatacaaaccacgcaccacagacccgggtgcctgtagtgcacacactagctgcccctgccccaccactcacca

SEQ ID NO: 257566 - DNA, 122 bp, Homo sapiens
caggcaggctccgccaagggttgtggccggcaaccggcgcctcaaggagagggcgaccaccgccgccatcttggctcctgacgtcagccccaccccttaaccccgaggtcgctctccgccgg

SEQ ID NO: 257567 - DNA, 122 bp, Homo sapiens
actcatttgaaaccctgacaaaacaaactctgtaagctgtgtcagccatgcaaggcaccacgctcggctaatttttgtatttttagaagagacggggtttcgtcttgttggccaggctggtc

SEQ ID NO: 257568 - DNA, 122 bp, Homo sapiens
ggctcactattagttcccctacatccaccccgcagcctgctcttaacctctcctccccggcggctcagacccaattctcagtgtccttagcgcccccttcgggccacagcgttaagccacgc

SEQ ID NO: 257569 - DNA, 122 bp, Homo sapiens
cctgccaggggtggcactgggagggttacctttcagccctgttctcctggggccaagacccgggtctgtctgaccctggggttgctgagcagaaaccgcctggagctacccctaccaccgga

SEQ ID NO: 257570 - DNA, 122 bp, Homo sapiens
ggaagagatggaaaataagatgtttccaagcttgatcataagaatagtatttcctgctggcgtgattgtgtgtgtgtgaatattttggattagttttcaaaacattttacatttgatgagac

SEQ ID NO: 257571 - DNA, 122 bp, Homo sapiens
gtgctggcccccagatgagcaccggggcagcctctcaatggagcctgtgagcaagggcgtcgtcccaagagaagcctgggacacagaggccattgtttctatctcagcacagacagagctcc

SEQ ID NO: 257572 - DNA, 122 bp, Homo sapiens
cctggtagggcttcgacagcgagtgctcccgtttcaagtactcgaacgtttgacccgccccgacttgctgtggcccctgcccagaccccaacaaaagaagaaggagtaacatcctggaccca

SEQ ID NO: 257573 - DNA, 122 bp, Homo sapiens
ttgtcaccctgccagggtgggtcctgatttctccactgtataacttttcccccctccttgcgttgaatacctggtctatgaggagacacctgcagagcatgcaaaaacaccctactccttgt

SEQ ID NO: 257574 - DNA, 122 bp, Homo sapiens
agatatacttcctccagagggtgttccctgacttccctgcccccatggctttgtggcactcggattcagcacttgttccttggctgttgaacttgttcttgtcccaactggagtgggagttt

SEQ ID NO: 257575 - DNA, 122 bp, Homo sapiens
taaacgcataaccaaacattaggaccagacttcagtcctttcctcccttcgggaacccctcggcctctagggatggagctgaacaattggtcagacgtgtcagataacacgtgtgccttgtt

SEQ ID NO: 257576 - DNA, 122 bp, Homo sapiens
gtgtgcacctgtcccatatgtgatgttcaatagcgacaactagccgggtgtggtggctcacgcctgtaatcccagcactttgggaggccgaagtgggtgtatcacttgaggtcaggagttga

SEQ ID NO: 257577 - DNA, 122 bp, Homo sapiens
ataggacatttggctcatgcttctggttggggtatgtccaagaccgggcagctgcctttgcggggggcctcaggctgctttaacccgggtggagagcggaaggcagtggtgtacgcagagag

SEQ ID NO: 257578 - DNA, 122 bp, Homo sapiens
taatacaaataagaagtatatcctgttgtatttcctttctgttacagtagcactgtgtcacggagtgttgggtgcagatcaaatgagatgctgaatgtgtaagcacttagtaggttgcatgc

SEQ ID NO: 257579 - DNA, 122 bp, Homo sapiens
cgtgatctgcccgccttggcctcccaaagttctgggattacaggcgtcagccacccaccgcgcccagcccacatgtggcttcttactatgctaaccaatatgcattattcaggtttctctgt

SEQ ID NO: 257580 - DNA, 122 bp, Homo sapiens
tttctttatggagggggtggcggtgctggagggggggttgttttaaaaataatttcaaggcggccatcttagtgcctcagctctgagaaatatttctgagcgcccccctcagaatttaaata

SEQ ID NO: 257581 - DNA, 122 bp, Homo sapiens
gagttggtaccaaacgtctgggggcaagagctgcaggggatgcggccaatgcctgtgtgtcgggactggtgagcctctaaccggtaccgtctggtggtcgaaaagtcacagaaggggcactg

SEQ ID NO: 257582 - DNA, 122 bp, Homo sapiens
gttgggttaatgaagggcagtttcctcattttaggctactataggagcatggactccacacggtggctcttgagtaacaagctaaccagcccacaggaatactagggaaggaaacagggccc

SEQ ID NO: 257583 - DNA, 122 bp, Homo sapiens
actcttcgctccggccgccgcggccccgcccctgcgcactgggatccctctagcctgccgcgcctctcgctggtcatctgcgcccctccgacctcggaaagagtcctgggtgcgggattcct

SEQ ID NO: 257584 - DNA, 122 bp, Homo sapiens
ctccctttaacaactttctcgccggggcccggcgggcgcccaggaggctgcaggtgccagcgggcggctcggcaggctagtctacacccgccctacccaattagatctcttcctcgcggaag

SEQ ID NO: 257585 - DNA, 122 bp, Homo sapiens
gggactcagtgcggcgccggcgccttcccctcccccgagttcagttctaacagcccagggcggggcttgcttaccatagccagcggcacaactccaatcaagtcctttgggctcacatagat

SEQ ID NO: 257586 - DNA, 122 bp, Homo sapiens
cttcctccagagtcagggagacagagatgatggggcgtctccacggggagtccagcaagccggcattcactgctccctggccttggtgccctttgccggagcctgtgtctgggctgctggtc

SEQ ID NO: 257587 - DNA, 122 bp, Homo sapiens
acagtataagtgagtgactaatgtagaaaacatgaggaaaggtgccaagttcattttcagcgctgatggttgtggtgtgacactctcatgccagccaaagaggtgcctgagggaaaggttta

SEQ ID NO: 257588 - DNA, 122 bp, Homo sapiens
ttggttggcattagtataatggcttcattgcctcttgctcggcttctctctcccacccatcgccaccgcgtccacactccgccgcattccagagaaaaagaaaaggccacggcctcgtaaag

SEQ ID NO: 257589 - DNA, 122 bp, Homo sapiens
tcccagaccagacttcggagcctggcctgaagcccagctctgctgatgcccattaatagccgtggcacacatggctggggcaaggggtggtgtgacctctctgagcctcagtttccccccag

SEQ ID NO: 257590 - DNA, 122 bp, Homo sapiens
ccggcacctcgggaggccaaggctggcggatcactcgtggtaaggagctggagaccagcccggccaacacagcgaaaccccgtctccacccaaaaaatacgaaaaccagtcaggcgtggcgg

SEQ ID NO: 257591 - DNA, 122 bp, Homo sapiens
cgggttcacagctcagcgctcgggacagggcgcagcagccgacacccgacctgaagccgacggccacgcaggtgggcaagagggtgagttcccagctgctggctccagccacgggatgcgcc

SEQ ID NO: 257592 - DNA, 122 bp, Homo sapiens
tagcctaatgattttgccgtcgccatggttgtgcggcagcagtgttgtgaatatgtcatccggcacccgtgaatttggaaagtgtgtcaaaacacaacttcaattagtttgctctaattatg

SEQ ID NO: 257593 - DNA, 122 bp, Homo sapiens
tttctgccaagtgacagtaggcagttgccctttctccctggatttgacttttgattaattcgctttgtcagtgacatagttctaaactctattaagtgtactcaccctcctgtcttcgaatc

SEQ ID NO: 257594 - DNA, 122 bp, Homo sapiens
cgatgctgcgccatgatagggccggcgccgcagtgtcttccgggaaacatagtctttaggcgtaaaggcagcagcccggccttgaagccggatctcgcgatgtttcagggtgagccggacgc

SEQ ID NO: 257595 - DNA, 122 bp, Homo sapiens
aagccgagctcacagcagaataagccaccatgaggctgtcggtgtgtctcctgctgctcacgctggccctttgctgctaccggggtgagtacatcagtcatgagtccagcaccagcccttgg

SEQ ID NO: 257596 - DNA, 122 bp, Homo sapiens
taggaagggagtgtgctgcgtggcggccgtgggtcggcccggagtgtgaagacccgtgcacgcggcaggcaccgagcttgccgactgcatgcccgcgtgggtggccctcccgggctgccggc

SEQ ID NO: 257597 - DNA, 122 bp, Homo sapiens
acagggaggctcttccagttccccgcttcctcccccagtgccctgctggccacttgagcccgctgcctgagtctgatcccacagcactggtgagctttggccaacaggcactgctcggctgc

SEQ ID NO: 257598 - DNA, 122 bp, Homo sapiens
aatttaaaagattaaaattggtacactgtataggacagctccactataatcttataagaccgccattgcatatttggtctgccatagatggaaatgtcattatgcagttaagatactttaac

SEQ ID NO: 257599 - DNA, 122 bp, Homo sapiens
caagggatgaaagtagactccacctctttgggggagaaggaccgcaaactcacagaggaacgggtgtgagaccattcatatcatcagtccaccatagacctgtgtgagttgtcttttatttg

SEQ ID NO: 257600 - DNA, 122 bp, Homo sapiens
ctcaaatctttatgtcctttcaccagcgcagaaaaggagagccagccgctgcaggggcggcgagcacgcagcaggcacttaccgttgctgtacaataactggagtttatagtggatgccgtt

SEQ ID NO: 257601 - DNA, 122 bp, Homo sapiens
ggaagctgaggcggcaggatcacttgaggccagctgttcgaggttgcagtgtgccatgaccgcacctgtgaacagccactccactccagcatgggcaacacagcaagacctcatctcttaaa

SEQ ID NO: 257602 - DNA, 122 bp, Homo sapiens
acgagcctctgttgactctggatcttccactgagtcacttgtggctaaaacgtgaagtggcgatccagacgctgatacctgtggcgcatcacattttcctggatatggaaaatggagggtcc

SEQ ID NO: 257603 - DNA, 122 bp, Homo sapiens
attgatttgtttcgttttacttttttcgtacacctactagaaagttaaaaaattccctagcggcttgcaatctatctccacgggacagcactggcctgggacacaggctccgcacacgtgtc

SEQ ID NO: 257604 - DNA, 122 bp, Homo sapiens
cttggttcggccgaagcatttattcccctttaaagctataagcctgccttttcccattggcgatgggtccaggtatcgttccccaggctccgcctctgagctgtgaccattagctggttggt

SEQ ID NO: 257605 - DNA, 122 bp, Homo sapiens
ccaaagaatcctcactccctgcaggcggaaggagaacaccgtgaatgccccaggcccgtgcgctgtgccctgggcctgtccagccgcacttcccacagaccagctttgggagccactgggga

SEQ ID NO: 257606 - DNA, 122 bp, Homo sapiens
ccgctgggtcgctcggcctgagggctcaggtgatggagaggaggctcgcggcgtcccaaacgggttcggccaagggtttccaccccatcaccacttcccgctgcctccacgcgcgcgcgcgg

SEQ ID NO: 257607 - DNA, 122 bp, Homo sapiens
acccttgttctgcggcagcagaatgccctctcagtttgaccgtgtgtctgttggccaaaacgctgaaagaaatgtctgcaaacagaatgtctcaaaaataggtaggagatacgattcaaggc

SEQ ID NO: 257608 - DNA, 122 bp, Homo sapiens
agagggaaggagagggagaggatggcaattaccgctgctgctctcggaggacccaagacccgctgccgccgccgccgctcgttacctgccaatgtgcctcttacaaagcggcggcggcggca

SEQ ID NO: 257609 - DNA, 122 bp, Homo sapiens
gaggtagctttgaggatggcagggccagcagctgcgattaaggtcctggcagacaggtcacgtggcatcgagagctccctagaggtggcactttctcgtcagaccagttctggggtttggtg

SEQ ID NO: 257610 - DNA, 122 bp, Homo sapiens
cggggcctgagcggcgagaggaggggtccagccggtcggggctagtgcgggtgcggggcccgggaggcactcacacacagtacaggatgaggcccaggaacacgaacacatagttgctctgg

SEQ ID NO: 257611 - DNA, 122 bp, Homo sapiens
cctgggtatttacccaaaagagatatagcacacacccacgcacgatgcgtgtgcccacggcggctttatctgtaatggccccaaactggaaacacccccaggtccacccacaggtgaaggag

SEQ ID NO: 257612 - DNA, 122 bp, Homo sapiens
taagctcctgagtttaagcaatcctcttgctttagcctcccaagtagctgagacaataggcgcatgccaccaacagtggtgctagagatggaggtctcactatgttgctcaggttggtgtca

SEQ ID NO: 257613 - DNA, 122 bp, Homo sapiens
ggagcttcagatttgtgggttgtttttaatgcattccggatgccagatgaaattttggcccgggctcaccagttcctctgctattgggactctccccacctcccctccaggcccaaagccgc

SEQ ID NO: 257614 - DNA, 122 bp, Homo sapiens
acctaaagaaccaaaatggatcccttcccaaaaattagctttcactaaagtccccttgaacgctcagagcctatttattagtattttattcacatttagcccaaagtagattatcaattaga

SEQ ID NO: 257615 - DNA, 122 bp, Homo sapiens
actcctgtctgtgctggtccccacttctcctgactgagtcttccgaccagtcctttcacccgtttatgttacctgcctgcctggcacctgcaggggtttgatttgtaacccccggtaggagt

SEQ ID NO: 257616 - DNA, 122 bp, Homo sapiens
tgtgtctgctgggcccggaactgggtgtctgctcataaattacccccagggacagttacccgcagcagctgtgctcggaacaaccgttgcttcctgggtaggtcattttttgggtcagaata

SEQ ID NO: 257617 - DNA, 122 bp, Homo sapiens
agagtatattcctggaaagatgtccacccatgccggcccagaagctggtccagaaagtaacgatgtccaccatgccaccatgaagtgcagtggtgcaatcatagcttactgcagcctcaaat

SEQ ID NO: 257618 - DNA, 122 bp, Homo sapiens
aaatctgcccgggctcgccccataccacgagccagccccctcctcctgcctgcccccacgcgcgccaggtgacaggcccacagcccagcgagctgggggactgagcctcacattttccaaat

SEQ ID NO: 257619 - DNA, 122 bp, Homo sapiens
tttagagtcgtggttctcaaagcgtgggcctgggagcagcagcatcacaccacgtgggaacgtggtcaaatgtcagtgcatgagctctaccctgcacctgagactctaggcaagaggcccag

SEQ ID NO: 257620 - DNA, 122 bp, Homo sapiens
acctcatgatccgcccgcctcggcctcccaaagtgctgggattacaggcgtgagccacggcgcccggccgacagctaatttcttttagtactggttagtattccattggatggaccacagtt

SEQ ID NO: 257621 - DNA, 122 bp, Homo sapiens
gacattagttatctttcctgatcctctccctcctcccaccttttcaccaacaaatcatttcgtgactcgactctagcttatgctgtttaatgcctttcctgctatgtttacctgacggaaat

SEQ ID NO: 257622 - DNA, 122 bp, Homo sapiens
tgctgaccacgtcgcgctgctgtaaaggaaacctgccccgcgcagcggcggtggctggagcgggagaaaccggactttgtgcaactttggccatagtggccatcccatgaatctgtttacta

SEQ ID NO: 257623 - DNA, 122 bp, Homo sapiens
gaaacacagattttatgagtgtaataaaaatacaatgatctagaccataaactaatcatccggcactcggctccgtgccacccaagtgtgacattacagagccccgtcgactggggggaccc

SEQ ID NO: 257624 - DNA, 122 bp, Homo sapiens
actgcccaaacttgatttcgtggttcacaggctgccctgagtgcacagactgtagaagcccgaggaaggggcgtctcagcccagccacagggccaagctggccccttaccccaacgccccat

SEQ ID NO: 257625 - DNA, 122 bp, Homo sapiens
gaactgaaatgactgttaaagggaatgagactgtaagtcacaccttttaagtgatgcaaacgtggacaggacagaaaagaaaagaaaagcagaggcagataaatctcgtaggctgcaatcta

SEQ ID NO: 257626 - DNA, 122 bp, Homo sapiens
aaacgcttagcagtgggcgggatcggggcaggaacctcgagttttgtgaccaccaccccccgccagcagtttctaggcgtggccgtccttgctgcacctgctgctccctcagcctcaccccg

SEQ ID NO: 257627 - DNA, 122 bp, Homo sapiens
gttgtggccgagtgatgtggacaagctgtcacccactgacaacctgccgcgggggagccgcgcccacatcaccctcggctgtgcagctgacgtagaggccgtgcagacgggccttgacctct

SEQ ID NO: 257628 - DNA, 122 bp, Homo sapiens
tcatggctgcgggcggtgccgccccaggtaaatcagtccaggagcagggcccgggcctggcgtacactctcggaaaaatgggggccagagcaaacaagaagagcgaaagcaagagggctagg

SEQ ID NO: 257629 - DNA, 122 bp, Homo sapiens
gtcgcgcagcccggctgtaatggtggcagatcaaaggcggccccgtgtccccgcggagcccgggacaatcccgcgcctttgtgcgctgttgctaggagcccgagaaactaagagaaagtgtc

SEQ ID NO: 257630 - DNA, 122 bp, Homo sapiens
cacccccgcgcagccccgcactcggtgacagccccccagacaccccttcggccccacccccggtcgccacacacacacaggcccgcgtagacccgcccgcgcttcctctccgcctcccgccg

SEQ ID NO: 257631 - DNA, 122 bp, Homo sapiens
gacttcagaaaacaattctagaaaaggggaatttgggacttcgttctgagagatatgatacgagatgtatgtctttaatagcagggcagttaagccaggactggatctagagatgggaagga

SEQ ID NO: 257632 - DNA, 122 bp, Homo sapiens
gggcactggggagccgggcgcaagggcaggccaggccgggagggcggatggcggtggggacggcggtggcctcgggccgggcgggcgcccagatatagcggctcagggccaatcggcggcgg

SEQ ID NO: 257633 - DNA, 122 bp, Homo sapiens
cgcattgagtggccacaactggatcagaaatgatgtggcagcaggaacgctcttgttccacggagtttgttgagcgtgctggtccctggtttctgttcttagtgtctgcccttgtgggagga

SEQ ID NO: 257634 - DNA, 122 bp, Homo sapiens
agattatttcagatgattcccatatgcaattagggagagccagagcttgcagtaggaccccggagatcatgacttagtagtaaacaccaaacgggtttctcctgcatgggcgcctgatgcaa

SEQ ID NO: 257635 - DNA, 122 bp, Homo sapiens
tggatgggcagccctctccagggagcctgtgacgagctctgcggcagcctggtaaagagccgatgcgggaggcaggctgggcgggtgcatcgtgcagaactggttacgggttatggcaggcg

SEQ ID NO: 257636 - DNA, 122 bp, Homo sapiens
atgatggtgcaagcaaatgctaggggtgtttagaagtgaaatctctcccgagttgatggacgatttcgtgaagaaggtggtggatttttgcttcgttctgatggaaaaggcattccattcat

SEQ ID NO: 257637 - DNA, 122 bp, Homo sapiens
tgccataagttccactaacctgagggtcattgatgatgccagggtaaggaagtgctccaacgacctgaagcggtgcacgtactatgagacgtgtgctatgtatgggctgaacgtggaaaggg

SEQ ID NO: 257638 - DNA, 122 bp, Homo sapiens
ccaggcgggtctttgtgaagctggactctggcacccctctcctgcgtgggcttttggggtcggggccctagcgcccttcgcccacttcatctcgcccctttccttgctcggccaccctcaaa

SEQ ID NO: 257639 - DNA, 122 bp, Homo sapiens
attgtcagccatcaccttgcgcagcacggctttctacttaaagagtgtttattgtgtaggcgaagtgggcacagacaacggacgataatcacaataccagtttaaatactagataaaaggtg

SEQ ID NO: 257640 - DNA, 122 bp, Homo sapiens
accactacagggcttttactttttctctaaaagattctttttccatctccctgcatgtctcgctctccctttaaccgactcactcttcagctgccacctgctcagagaaattgtcagttgct

SEQ ID NO: 257641 - DNA, 122 bp, Homo sapiens
cctggtacgtttggacaacatgacccagctgctgtcacattcgaacgaggctgaagaggacgcggacggaggagccccggaacctggctgccactgcgccccgaggtggagcagggagtcgg

SEQ ID NO: 257642 - DNA, 122 bp, Homo sapiens
agttgctcgccctctattggccgatcggcctcggcgcctccgccccggccgcccctatcccgaactgccattggttttgcctaacgccactcgacgatgcctccgcccactcctccacccat

SEQ ID NO: 257643 - DNA, 122 bp, Homo sapiens
ctgccagatcaatacctttaacccatcctcagctcaaatcataacctaccagtggtattgcgacatcctcataaggcagcttgtcttctcgccaagcatcatcaatcaaatccaagatcctt

SEQ ID NO: 257644 - DNA, 122 bp, Homo sapiens
tgaccccaaattgtgcttttcccaccaagagcaaaagaaagagaaacattagtacagcttcggaactaaaatatagtagagaagcaacataacctcggaaatcccacagctattcagtttca

SEQ ID NO: 257645 - DNA, 122 bp, Homo sapiens
cagaaactctgagccatggcaggcttcgaggggcaaaggggctccaggacccggcctggacggcaggaggccacgctctgctccggggctcttctcaaacttgtctccagggagcgaatgga

SEQ ID NO: 257646 - DNA, 122 bp, Homo sapiens
gagagaaaaaaagtacaagagcgttctgatgaattatctcttactcagagctaacacgggcgtcccaggaacaatggccaagtctaaccagagttgacagcctccattcactgcccagcact

SEQ ID NO: 257647 - DNA, 122 bp, Homo sapiens
aaggggtgggatggacaggtgtaggagcaggaaacaagtgtgtggtccagctggaggagacggtcttggggtcagaacatctgtaccaccttcagaattctccccaactccctgcaaaagtc

SEQ ID NO: 257648 - DNA, 122 bp, Homo sapiens
gggcagcgcgtttgctggaggtcgctttgggctgaaacgcctctcatactcctagaggagcggcgcgtttgcgtcccgcggcttctcactttcagcaggacattaggagggagacgagagtc

SEQ ID NO: 257649 - DNA, 122 bp, Homo sapiens
cgcttcggaccccctggacctgaggcctggtgaccttgcaagcatcccatggggcgggggcgggaccagggagaattaataaagttctggacttttgctatatggtgctttgtggtctctgg

SEQ ID NO: 257650 - DNA, 122 bp, Homo sapiens
ggtcttgcattctcgggcctgacgattggtctttccaagtgccggaagcaacagggatgtcgtctggaaacaaaatctggtattgaagcgcagggagacaaaacgtccacctctagagccga

SEQ ID NO: 257651 - DNA, 122 bp, Homo sapiens
gcgcggacaagaagctctccaagatcgagacgctcacgctggccaagaactacatcaaatcgctgacggccaccatcctgaccatgtccagcagccgcctcccaggcctggaggggccgggc

SEQ ID NO: 257652 - DNA, 122 bp, Homo sapiens
gctctaagggttcctgaggggtggtctggggccatgggaacaggatcaaggccccctgagcgccgggcctggcttctgtggcttcgcaaacttttcagcctgtgtgccacggcgacgcgcag

SEQ ID NO: 257653 - DNA, 122 bp, Homo sapiens
gacatcattgcttcttcatctgaatctccatgaaaatacctaaaacaagcactttctcatcgcattctattatagttattattaatctgtttggtcccttctcattctacagtatacattaa

SEQ ID NO: 257654 - DNA, 122 bp, Homo sapiens
agctccatggttgacttaactgaaccctcatcccactcaccccatctcctcctcagctctcgacagccacaccaccagcctcccataagttgtaggccttacctgtccctccctgcccaccc

SEQ ID NO: 257655 - DNA, 122 bp, Homo sapiens
gttccaagagaaagactgtgaaacagcaggcccacaggagctggagagcgagctttgaaacgatacaaaattaattgtctaaggggcaaataaatggtgcagtacacaaatgcaggaggtga

SEQ ID NO: 257656 - DNA, 122 bp, Homo sapiens
cttccccttgacgttctctcccccatgtgagtgggaggcttgccaagagaaagtccctgacgcaggggtttcccaacacatgatgaagccatcttcaggaaagcaggtcaggcactagcgtg

SEQ ID NO: 257657 - DNA, 122 bp, Homo sapiens
gagcattctcaggagcgcgaggcagccctggaggacaccggagtgccgtggggaaacgcacgcggacctcagagatgttttagcagaaaagatcaactgcaagtacatttgagaaaaatctt

SEQ ID NO: 257658 - DNA, 122 bp, Homo sapiens
ctgcgcacccagcacagctgggagctgatcgaagcgcttggggccgtcagggggcgcgggcgtccctggtggggccagttgtacgctgcggcggtcggcggagatgagcaggcggcggtgtg

SEQ ID NO: 257659 - DNA, 122 bp, Homo sapiens
gacatgatccttatgtgggttaagctgaggcccctgccccagtgacacagaggcctcaaacggcacagtgcaccttctgtccgaagcagccggcgaggcggcccgcgaacctctgacgtgct

SEQ ID NO: 257660 - DNA, 122 bp, Homo sapiens
ccttcacaccctcttccccaaagggcctctggcccgccttccccgcatccccaccgagggcgtctcacctgagggagccctgatgttgctccctcagaggacctgcagaggctggcaccgcg

SEQ ID NO: 257661 - DNA, 122 bp, Homo sapiens
ttggacagggggacttttaaaattctatactgacccaccaggactgacatgagaactactcgcttagtaactgttagaggaggcgccagctgatcaggacctaaagttcatattctttttca

SEQ ID NO: 257662 - DNA, 122 bp, Homo sapiens
ccgccggcctcagcgccacggcccctaggagcagcgcggcccacaagctcgcgccgacgccgttccaccctccgctgggcgccgccatgttggactagggtcctcagggcaggggcgggtag

SEQ ID NO: 257663 - DNA, 122 bp, Homo sapiens
caatggagacacaggtgactatgaggtctggcttcctcagggacgctaaatttgaactttcgccactgaggaatcagtcatttacagtcactcaccctcaatgcagaagagggctcaagaca

SEQ ID NO: 257664 - DNA, 122 bp, Homo sapiens
aacagtgatcatgtaaagcactggaaatactgcttgcagggcaagtgctcaatgcatgatcgctagttgtttttttttcagggaaacagaacaaatatgttagatatagatatatacaaggg

SEQ ID NO: 257665 - DNA, 122 bp, Homo sapiens
taggcgctggcttcgctcttaacatcttccctcatttaatcttcatgacaaccccagaggcggccactattaccgtccccattttacagatggggatgctaaggcacggaaaggtcaactca

SEQ ID NO: 257666 - DNA, 122 bp, Homo sapiens
aggcgcggtcaccctgggcctctcacttccgcccaggtgaggcagggccgacaccgagcccgcccgacccgggctcccacctgctcctccagcgcaccaggtaaagcgtgaggtcccggctg

SEQ ID NO: 257667 - DNA, 122 bp, Homo sapiens
tggttttgtggatggggacgcttgacttggggtggttatgccttgcccaggactgaaccccgggatagagacgggcaggcagcggtgggtcgaagggcccggggactagggcccgggtcggg

SEQ ID NO: 257668 - DNA, 122 bp, Homo sapiens
gccccactcagtctagcctaaatggctgaccatctcaattatgaactaataagttttggacgatttgttatgctacaatagctaactaatacatgcaccccgtgcagataggacaccaggat

SEQ ID NO: 257669 - DNA, 122 bp, Homo sapiens
tcatgtaccagcgccggaagttggtctcgacacctggactagccgggttgtatttggaaacgcggagtgagtttttccgtgctgtgtaggtaagcgaattggcgggttggggtttgtggtgg

SEQ ID NO: 257670 - DNA, 122 bp, Homo sapiens
gctggggagcagaagcggcgcgcaacgactacccgcacgggctccgggagttgcagcccgcgcactggctggagacctgctgcctgggccgacttggtcaatttttcatgaaactggggact

SEQ ID NO: 257671 - DNA, 122 bp, Homo sapiens
gagagttttgtgcccaattccaagagggaaaagagatgtaaaccatcgacgtttgagaggcgtgatcgcctgattcctgtgggaagtaaggggatatgaccaggcctccctaacccaccagt

SEQ ID NO: 257672 - DNA, 122 bp, Homo sapiens
ctctgctcctgctcttctctcctgtgcttccgggctgcaggtctcactccatcgggtaagcgccacagggctgcgtgtggggctttccccactcccttgctgcccctttgctttccagggct

SEQ ID NO: 257673 - DNA, 122 bp, Homo sapiens
atacaggtgcaatccacttgaaatgtggatgtctgcaacttcacagatatgacaagaatacgcacgcgcagacgtcaacatgctccatacacacacccagtaacccttacttcggcttcatg

SEQ ID NO: 257674 - DNA, 122 bp, Homo sapiens
catccccagctgccagagggagactgctgtattccatctcaggccggcgacacgagaccccgcagaccatggtccactgggggagtcctctggcctcctcggatccccccaccccttcacct

SEQ ID NO: 257675 - DNA, 122 bp, Homo sapiens
cggaggggaggcgggaggcgggctctttgcggattagcataaacttggggccgcgccgctcgccgccgccagcccctcgccccagctccgagcggacggccgaggagccgcctgcgaacagg

SEQ ID NO: 257676 - DNA, 122 bp, Homo sapiens
ttaacgacacctggcagaaggagccggccaaggtgccgggcacagaggggcagggccgcacgacacccagaaacccaactggctgatatcacatgccccgccttggagcagactgggactgg

SEQ ID NO: 257677 - DNA, 122 bp, Homo sapiens
ccaaccgtgcggccgctcctggggacccccggccgtcgccaacccccaaacacctcccggcgatgcctgaccgcccccggtctcgcgtcccggagcccctcacctgcgtagcccagtgggct

SEQ ID NO: 257678 - DNA, 122 bp, Homo sapiens
gttgacgaggatatggctagatgggaactctcatattaatacattgcttgggccaggcgtcgtggctcaagcctgttatatcagcactttggaaggccaaggcaggcagatcacgaggtcaa

SEQ ID NO: 257679 - DNA, 122 bp, Homo sapiens
tagagaatgcccttggcaggaggcgggccctgtcagtagttgtcctcagcagctagtgggcgtctccgcagcgagtggcatcggccccgcccccagcccgtgctcgccggtgtcgggtccta

SEQ ID NO: 257680 - DNA, 122 bp, Homo sapiens
tccagttccaaatccttaggagaatactttccatggtccctgggattgtgacaccctcatcgtcacacatttgccaagcgagccttccaggactggcccaggaaagccagttcctttgttcc

SEQ ID NO: 257681 - DNA, 122 bp, Homo sapiens
cttccgccgtagctttctcgaggctgcatccaagcttcttcctccggatcttgcagtgcccgaggtcccgacggtgccaacatcccgttggcccccagcctgccagtctctcatgccctttc

SEQ ID NO: 257682 - DNA, 122 bp, Homo sapiens
ccgcagccgcgagaaaagcagccctggggagtcggggcgggacctggattggaaaagagacggtcactcatgcagaggcgggactcagagcccttcctcaagtctcattggtcaagttgaac

SEQ ID NO: 257683 - DNA, 122 bp, Homo sapiens
actagtttcttgttgagatggcccattccggctcctacccagcatcctttccatccctaacgtctccctctacagttttcctgagggttgaggtagccactgtgtttcaggccaagatagtt

SEQ ID NO: 257684 - DNA, 122 bp, Homo sapiens
agagtttgggggccgcccggaatgggccttgtggggctgggccctggttcctttccctcccgtggccgttagactgggcgtctaacaacgctaatagttatttgaaaaagtatgcaaactgc

SEQ ID NO: 257685 - DNA, 122 bp, Homo sapiens
agttttctttccttgactgtcaacagttattttatacaatttcctcagtttggtttgctccgatgtttccttatgatttgagtcaagtaattcattttgggcaggaattccagagaattgct

SEQ ID NO: 257686 - DNA, 122 bp, Homo sapiens
aatcaatgactcatcagtcaaagatctcaccaagcttcctgctccagcagagaacccttccggagtggttcctcctggataagaataaggtacaaactccatgccatggcatcgcaggctct

SEQ ID NO: 257687 - DNA, 122 bp, Homo sapiens
aaaagatgctgccaaaaaaaaaaaaaaagtttgcttcattgtctctgccatgcagagctgcgagagcctaagggattatcaaagtaaatttccttgaaaagatggggaaactgaggcccaga

SEQ ID NO: 257688 - DNA, 122 bp, Homo sapiens
cctgtgcattgaaggatttttgcagcatcctgggcatctgcctactagatgccagtattgcgataaccggttatatctcccggcattgccagatttcccaggggtaggcagatagacaaaat

SEQ ID NO: 257689 - DNA, 122 bp, Homo sapiens
cagagcagatggcagggacttcaaaagctaagtcaccttgaaagataatggcacaaagggcgattgggggtggggtgggtgggaggcttttgtacccttttgcaacaaggaagcagaaaaga

SEQ ID NO: 257690 - DNA, 122 bp, Homo sapiens
gcttaaccagaagaaaactgcacattccctcctgaagatattgccctgactatatccatccggttgttactcctacataaatgttagcctgctacatgagtgtcctgagactttgatgacat

SEQ ID NO: 257691 - DNA, 122 bp, Homo sapiens
ataagaaataggaatgggtctcataaaaggaaacagcaaaacccccaaactaaaaaacagcgcaggctatttctctcttctctccttttgcttggcactcatgagatgctaggtgtggaagt

SEQ ID NO: 257692 - DNA, 122 bp, Homo sapiens
gtcgcaggcgtctgtgttggatgaaggcagcttcggtgggacccgacggggcagcacctccggctcccgtgctgtaaggcgctttcggtgatacctcctttcccccgtgcctgctgcatggc

SEQ ID NO: 257693 - DNA, 122 bp, Homo sapiens
atggatgccgctgggccccgggatggggatgccggacatggatgccgctgggccccgggacggggctgctggacatggatgccgctgggccccgggacggggatgctggacatggatgctgg

SEQ ID NO: 257694 - DNA, 122 bp, Homo sapiens
cagaaccgtgcaggtcccataacccacctagaccctagcaactccaggctagagggtcaccgcgtctatgcgaggccgggtgggcgggccgtcagctccgccctggggaggggtccgcgctg

SEQ ID NO: 257695 - DNA, 122 bp, Homo sapiens
cgctgtcacgcagcagcaagcttaatcccgcataaaaaacgcatgcgccgagagcgtgcccgcagcagggcccacggaacgatgacagcaggcacctcctatctgcccccgcccccggcgtc

SEQ ID NO: 257696 - DNA, 122 bp, Homo sapiens
tcctccacctgctgaggaccctagcctaagctgcagcgccccagagcctcagcacccccgcgacccagctcccacgaggggcacgggttctagctccgccccgcaagaaggacttccgcgtc

SEQ ID NO: 257697 - DNA, 122 bp, Homo sapiens
gccctcccgactgagcaggggctcccgaggtgactaagcaggctctctgggtagtgctcccgccctcacctattgtccgggtggaggaaccggtatttccggatgggggcctcagacccagt

SEQ ID NO: 257698 - DNA, 122 bp, Homo sapiens
gtggttaccgtgacttgggtgtggctcttgggcggaaagcccccgggcccaaggctgggacggagaggggcagcaggggcagtgaaagagctgctggggattggggtctgcccctgcctgct

SEQ ID NO: 257699 - DNA, 122 bp, Homo sapiens
ctcactctgctgaaatgtctctgattctcagcctccgccttgggggcttctcagttacagcgcatcttgatcttgttcctccgtgactgtccctggctcagcttccacccccagctggggct

SEQ ID NO: 257700 - DNA, 122 bp, Homo sapiens
gtgacattgagagcaggtcataaatctccctgcagcagcggcagctgcgggcccggcggccggctcacctgaatggggagcattgtgtctctgatccccgacctcttatttccctgatggaa

SEQ ID NO: 257701 - DNA, 122 bp, Homo sapiens
gtccttacgcaaccttgacatgtgcgggctactggggtccatcggcagcgggaagagacccggagagatgcatcttctgggcccttctctcctttaggccagcttacccccaaacctggctc

SEQ ID NO: 257702 - DNA, 122 bp, Homo sapiens
aagaacctacagatataaaaaattaagatggttaaaaaaaaccaaaacagcaaaggaacacggtaggcagaatataggcagcctatggtttcaagatggtgtctagaacagcatagtgccat

SEQ ID NO: 257703 - DNA, 122 bp, Homo sapiens
ccgctcttgatggagggagactaaacgcaacggtggtaccagcctgagtgggtccggaaacgatcaggcaaaccagaaaggctgcaaaggacgtcactggcacaatgggtagaacagtaccg

SEQ ID NO: 257704 - DNA, 122 bp, Homo sapiens
aagtctgccgcgctgggagcggactgcacgagacacggcttgtggcagcgcctacatcagcggcgcctgggacacagccgggcccccctgaccccgcgcgccaaggagggctgaggaaggga

SEQ ID NO: 257705 - DNA, 122 bp, Homo sapiens
ggtgagccgccccttgggcttgcgtcttccgacaagagagaggcggtggtccgtgggtagcgcggggttactggaatgggactccctgaggaagtcccctgagaagtcgccggcacgctccg

SEQ ID NO: 257706 - DNA, 122 bp, Homo sapiens
tggtagatgaaagcaaagcaagtaagtttctccgaatccctagtcaactggaggtagagacggactgcgcaggttaactacagctcccagcatgcctgaggggcgggctcagcggctgcgca

SEQ ID NO: 257707 - DNA, 122 bp, Homo sapiens
cacactgacctgcactggtgagctgcttaatgagattgtcttccactatggcgtggctggcgaagttactaccagcatcaataaaggtaggcagtgagccagtggtgagggccttgaggcgc

SEQ ID NO: 257708 - DNA, 122 bp, Homo sapiens
agcaaaagagattccaaggagagccacaggttgaaatcggagcgaaagcctgggcttccccgagccaggtgaagaaagctggcaaggtcacccactcagtcaccaggtggtgcatttaattt

SEQ ID NO: 257709 - DNA, 122 bp, Homo sapiens
gcgacgtgcgcccggccacgcttcctggaagagatgcattgcggagctcgctagttggggcgttggccttccttaggagtgtgagtctagcgttatcccttttttccggctggatcccgggt

SEQ ID NO: 257710 - DNA, 122 bp, Homo sapiens
gaaaagggcatattgagttgccttcatgctttttctattaggttggtgcgaaaataattgcggtttttgccattgggaaaactgcaataacttttgcacccaccaaatagtatgtgattgta

SEQ ID NO: 257711 - DNA, 122 bp, Homo sapiens
agccgcgaaagcctgtagacgacgaagaaccccgcagccttggcctctgcgcggcttccacgccccacggctgcccgcccgagccctgcccccaggcgcgccagccccgcctcccgggtccc

SEQ ID NO: 257712 - DNA, 122 bp, Homo sapiens
ccatgaaccccttgaaactggccatggaggagctcgcttggtgatggtcagggcacacatcggaggcttctcagggggcaggagggtggggacgggctctgggccacgtctgggtagaatgc

SEQ ID NO: 257713 - DNA, 122 bp, Homo sapiens
ttgaacaaaatgaagtcccaccctgggcttcaggctccactgcaggagtcggaaaccacacgtttcagaaatttagaagagatgagtcagttttctcactgtcctcatctgctttgtttaca

SEQ ID NO: 257714 - DNA, 122 bp, Homo sapiens
tgaggggtttgacagaaaagaaatgtcagaaagctctagaggccactgatatcagataatcggggaacaaacatgacctatagcgagagagggatcccaggctgggatcttaatgcagccag

SEQ ID NO: 257715 - DNA, 122 bp, Homo sapiens
caggaccgtgggcattatccctccagcggacgtcggccccacaagcccctcacggaagggcggctccgtgagatctcactgtactgaccagtcctgccactgccaggacgctgggcctctca

SEQ ID NO: 257716 - DNA, 122 bp, Homo sapiens
cacttctttgtccagaatctggactccagatagatgcagtaaaagttgaatcctcctccccgaaataacttctttattaaagtagagcacttaaccactttatacttcacgctgcagtgttc

SEQ ID NO: 257717 - DNA, 122 bp, Homo sapiens
acctgcgagcagagcagccccgaagcgccagctagcgcgcgcggccccgcccctcccggccgcggtcccgccccctgctgccccccgacgcccccgaggctcaccggccccgcccggctccg

SEQ ID NO: 257718 - DNA, 122 bp, Homo sapiens
ccccgcacccctgctcaggcggcgcgcccccactgccggcctccaggcgcctctcccgagcgcctcgctgtggccaccactccgcaggtgctgagcaaaaggtattcttcctgaatacctga

SEQ ID NO: 257719 - DNA, 122 bp, Homo sapiens
cgggtgggaggcatggctaaatgcctaactcttttaagagggatgggaggcccgctcagccgcagcacagcctcactggcataagatcccgggtcccaattgtttggagcgctggtttcggt

SEQ ID NO: 257720 - DNA, 122 bp, Homo sapiens
gaacaatgccagtaagattgtggacctgtacatcccatggaaatgctccagcagccatcacgtcattggtgccaaagaccacacgtccatgcagatgaacatggcgaggttgaccaggttac

SEQ ID NO: 257721 - DNA, 122 bp, Homo sapiens
cagcacacacctgctttttcagacctgccgctcatatgccacagccacgcacaggaccagcgttagcagagtgcaacaccctccgtttggatccctcgttttcagggtaagcagctagggag

SEQ ID NO: 257722 - DNA, 122 bp, Homo sapiens
taactgccatgcagcacccacctccgcctcagctgttcagtactgttcataaaacccaggcgctaggaaggaagttaacccttcgggattttttatcagtgtactgccaagcctgatttctt

SEQ ID NO: 257723 - DNA, 122 bp, Homo sapiens
ctcggctgggccccaccccagatccggcctgagcgccttccgcgctgctcggcctcaaggcgtgagtcaccaagggcaagtcccgtgacttggtcctcagggtctccggcctcggcacatta

SEQ ID NO: 257724 - DNA, 122 bp, Homo sapiens
ttgacttcttttactcactcattcattcaactgcctctgtgccagggccgctaactgggccgttctatgatttccttccctgcctaaagtatggctgggtttgatatacaaagctctgtgtc

SEQ ID NO: 257725 - DNA, 122 bp, Homo sapiens
caagttgagctttgaagcaccgatccccaaagaaaatccagttccccccgaagcaagagtcgctgttccaaaagtgaagcctgtcgtctgtgtggccggagtctgggtggcaagtgagaaca

SEQ ID NO: 257726 - DNA, 122 bp, Homo sapiens
tcagagaccagaccttttgttatgaaagaaaagcagtctggacttccaaagggtctggttcgggtggggtcactggtcaaaaagttaaaccaataaccccacccttgtagaccctccatcaa

SEQ ID NO: 257727 - DNA, 122 bp, Homo sapiens
cccgcccctcgggcagggggcgggcgtggaaacgcctaagaggatgctgagtgacagaggcgcaggccgcgctccgaccctgccatgtctctccccagctgtctctcccgccagccgccgcg

SEQ ID NO: 257728 - DNA, 122 bp, Homo sapiens
ctccctttctacctatttctacagatgaactatacactctaaagccaatttctgcacttacgtattacatctctcctcttgcctaccctaggacactactccagcaatccttctccgcattc

SEQ ID NO: 257729 - DNA, 122 bp, Homo sapiens
caaagatggcggttgtatctgctgttcgctggctgggcctccgcagcaggcttggccagccgctgacgggtcggcgggcgggtttgtgtgaacaggcacgcagctgcaggtaagagacgctt

SEQ ID NO: 257730 - DNA, 122 bp, Homo sapiens
gggccagccagcaccaggtccaggcgcatgcttccacatccgagtgccagcgtcctcacgcgtccccagggctgacacatttgttttgaattactctggtaagaaggtaggggctgtggcat

SEQ ID NO: 257731 - DNA, 122 bp, Homo sapiens
cgtcttggcccccggcaaggagttcctgcagctgccgtccatcgagatcacgccctccagcgacgaggacaccccgtggtccaactgctccacacccagcgcgtccccgcgccgaaaacgct

SEQ ID NO: 257732 - DNA, 122 bp, Homo sapiens
ggcaccgggggttggcatggggaacggctcaaccagtttcactcacaccccagttcccatcgtgtcttgattccacctttagaggctgcccagggtttcacacccgaccccacccttcctgt

SEQ ID NO: 257733 - DNA, 122 bp, Homo sapiens
cccaggatttcgaagagttgtcgtctataaggtccgcggagcccagccagagtttcagcccgaacctcggctccccgagcccgcccgagactccgaacttgtcgcattgcgtttcttgtatc

SEQ ID NO: 257734 - DNA, 122 bp, Homo sapiens
caggtctgcaggccagaggctggctggcctgggaacagagcagcacttgcgcccggccgtcgcgttccttggatgtgctgctccgggtgtgctcgaacttgtattgctgggagtgtgttctt

SEQ ID NO: 257735 - DNA, 122 bp, Homo sapiens
agagcgggcagggttcccactccgggagcggagacggagaacaggttatgtgggagccggcgggggcatttgccggcgacacccgagcgggggccggaagtggggccacagctcgcagcagg

SEQ ID NO: 257736 - DNA, 122 bp, Homo sapiens
cagcaggtccaacatctgcacctggagggttttgtacagaagacagcccttcggtaaccccgagcgctctggggtgttttttcctaccgagaacatcaggggaaaacgagagcatgttgatt

SEQ ID NO: 257737 - DNA, 122 bp, Homo sapiens
tgtttgtaacaaactgatgtatttaacagaagagcacatgcaaatatgccttggcattgccgagattgaatccagcctttgctgctgcagagcaggtctggccattccctttctggggagac

SEQ ID NO: 257738 - DNA, 122 bp, Homo sapiens
ctaggcgactgcctggcgtctcagccgtgcgactctgtctccctctacccggcgcggtcacgtgacacgcctgactgccctgtggctgcgacccggacctggaatttctagagctcacggtt

SEQ ID NO: 257739 - DNA, 122 bp, Homo sapiens
aggggaacagacgggctccggaaaggaggcggggtctggagctcgccgtgaggaatgaggcggggtctcccttcgggttccttcgggcacaatcgggagcttgagttctccggaagcggggc

SEQ ID NO: 257740 - DNA, 122 bp, Homo sapiens
tggggttagatctggggctcaggcagcgctgggctgggcgtagtttgcagagggaccggccgtcctggcaggaaactggggaggaggccgcggctttgtccagggtggaggtaagaacgatg

SEQ ID NO: 257741 - DNA, 122 bp, Homo sapiens
ttactgttggaggcagaggctgcagcaggaggaggcaatggaaaaatcctctgtgatgctcggctccactcagctcagagaaacgtgcatcaccagggaggtgaccccacgtgctgggctgt

SEQ ID NO: 257742 - DNA, 122 bp, Homo sapiens
gttacatagaaagtgctagctccaggagtcgagaaacaaagtccataccttttcttgcaccgcactttcctgaaaaatcacttctcagaaaattacaaattatgaatttgattgctacaatt

SEQ ID NO: 257743 - DNA, 122 bp, Homo sapiens
gcaacgtggaaacccaattcctgtgatggagacaaacgcttcctcaaaatttcctaggttcgaagccctcctcgctgccacaaccaagtcctgcgtgtaaagtggctgagccttggtctcgg

SEQ ID NO: 257744 - DNA, 122 bp, Homo sapiens
ccttgtgccacctggtggggatcactgacctggactcatcttccccgtctgtgacaagcacggccagggtgactgccaaccttctttggttcaagtgacccaaatctgagaaatgtctgtgc

SEQ ID NO: 257745 - DNA, 122 bp, Homo sapiens
aaacattcaactcgatctggagctgtgcctcagcaattctcggtaacctgggcattctcacgggttccccacctcttgctctatgcaggacactttgtctaacatatcctgcagagacagat

SEQ ID NO: 257746 - DNA, 122 bp, Homo sapiens
atctcctgccgagtacgcaagttcaattatcggcagattaggtttctactctccgtgccccgccccgcgccatcctggggagcagcgggaataaatgatccgcccctggccagtgctcaccc

SEQ ID NO: 257747 - DNA, 122 bp, Homo sapiens
gccgggacagggctggctgtcctggccgtggctccagcctgaccactccctgctggtcctcggccatggagatcccacctactgcctcatgtctgggtcctctccgcccccccgcagcttcc

SEQ ID NO: 257748 - DNA, 122 bp, Homo sapiens
gggctgcctcgaaatgtccatgtgctgaaggtcaagcgcaatgagctggctgccttggcacgaggggcgctggtgggcatggctcagctgcgtgagctgtacctcaccagcaaccgactgcg

SEQ ID NO: 257749 - DNA, 122 bp, Homo sapiens
gctggctcctcaggggcccacagctgctgggtgttgcgtcctctcctaggacagataaggcgggcacctcgtggtgcggacaactgccctagccctggggcttctccactcccaggctggcc

SEQ ID NO: 257750 - DNA, 122 bp, Homo sapiens
attccaattacaagggggatatgggaggaggtagaggccccaaagggtaggatcaggggccggctgtggagccagctctgccctgaaggggctgaagcccacccggcctgcagctgcttcct

SEQ ID NO: 257751 - DNA, 122 bp, Homo sapiens
agcaccgtcgggaacaagcgtcgggaacaagccgggagaaagaggaagcgccggcgccaacggtctcccgcccgcagcggtccccccaggactcttcctgcgcttgcaagcgccgcgccgcc

SEQ ID NO: 257752 - DNA, 122 bp, Homo sapiens
cattaaagtagccattgccgccggagcagagccggcttggctgcctgaggaggaggcacgcgccaaacccagcagagtgatgcctgggcaggagttacgcaccctcccccggccgcctggca

SEQ ID NO: 257753 - DNA, 122 bp, Homo sapiens
cgtgatccgcccacctcagcctcccaaagtgctgggattataggcttgaaccaccacacccggccattgttttgttttaaagggaaggataggctggcaattctttttgttttttcctttaa

SEQ ID NO: 257754 - DNA, 122 bp, Homo sapiens
ggatggcggcgtgtgattcagcagggacctggccgccgccgccgagcccggggttggagacgtggagagctgggaccaagatggcggcccctccaaacttccactgctactttggacactca

SEQ ID NO: 257755 - DNA, 122 bp, Homo sapiens
gatccaggtcgggtgcagactggggctgaatccacaaatgtggagatttagccacagcctcggaggcgcggagcggccacctaagcgtctgcccttctcgtctcccggatcactggggtgtg

SEQ ID NO: 257756 - DNA, 122 bp, Homo sapiens
acaaacatagagacacgggtccaagttataagagggctgagtggatcagagggtcagggccgggcaaacaggtgtcagaacagttagcaagagagaggcagatcagaaagggatgcagatga

SEQ ID NO: 257757 - DNA, 122 bp, Homo sapiens
aaaagtaaatatttgaccagtaagtctccaatcgagaggcccctccattccagctatttccgcccggggaccgaggaaatcctcaaaagccgggccacgcattcccagcccgagaggcccca

SEQ ID NO: 257758 - DNA, 122 bp, Homo sapiens
agaagcacagctgacaccctgccagatccagaagggtggaagtcagcggcggatctgcaacgggcaaacagcagtggtggacagcaagcggaagctcagctcagctccagccctgagaaaga

SEQ ID NO: 257759 - DNA, 122 bp, Homo sapiens
ctgtttccctttcgtagacgtcggcagcggctccgtgtgaacctgccgtctcctacatcgcggtacagtttctcaaacagatcgcgcagctggggccaagcccaggctgtcgtgcctgagga

SEQ ID NO: 257760 - DNA, 122 bp, Homo sapiens
ccctcgcgatgagtgttaaagatggtgtgtccggagtttgttccttctgatgttcaaacacgttcggagtttcttttttctgatgggttcatggtctcacaggcttcaagagtgaagctgca

SEQ ID NO: 257761 - DNA, 122 bp, Homo sapiens
cgggggcggcgggaccgggccgtcacctgaggggcgggtttgtggccgtggacagtactccggggactctgaggtgcttgcgtgggagctgcctccaaggtggcccccgtgtcactggatga

SEQ ID NO: 257762 - DNA, 122 bp, Homo sapiens
gaaaattggggaatgcaacaggatctgcaattcgggtgggggcggatggacgcggatggacggcccgcctggatccgcgcgaggcgccactcggggagttgatctgcggtctcgcagtgaca

SEQ ID NO: 257763 - DNA, 122 bp, Homo sapiens
aacctgcatgaagtatctttccttagcaggccaggcacattccctgctgtttttggggagcgggctccaggatcctttccctcttggaaaagagcagaaagtgccaattggatctctggtca

SEQ ID NO: 257764 - DNA, 122 bp, Homo sapiens
gactgcgccccgagtaacacgtgcagggggcactgggtcccctgcaagcggcgagaacgccggcagccctggccagttaagcggggagtgggtccacgcggaccacagcggcaactcagccc

SEQ ID NO: 257765 - DNA, 122 bp, Homo sapiens
ggcttgaaaactggtatcttaatattcagaaccactctgggttgctgccatcgctgccaccgtcgtgccagcccctcaggtctccgcgaggccaggtgacgctcaagaatgggagacaagcc

SEQ ID NO: 257766 - DNA, 122 bp, Homo sapiens
acaaagctgatgtcccttttctgcagaagatacacagtacaggtgagcctgcaggtcacccggcagccctagagcagtagaagtatgtatcatgttattatgtctgtagtccatgctggggc

SEQ ID NO: 257767 - DNA, 122 bp, Homo sapiens
accaaacgagtaaagaatgtttccgcctggtttcaaaccggggacctttcgcgtgtgaggcgaacgtgataaccactccactacggaaacaactgtgggaaagggttacccacatccccccc

SEQ ID NO: 257768 - DNA, 122 bp, Homo sapiens
ttaagccagagctgtgccacgtgcctctcgggagactgtggcctttagccctcacaacagcgtggtcaggcagggacggtaattatccctgtcccagcgcaactggcgtgatctcaggagac

SEQ ID NO: 257769 - DNA, 122 bp, Homo sapiens
ctccccctccactcagggagcgcacgggttctgcgctatcttgccctctgtcgccttgtgcgaaatgtaatccacaaaatgccttcgtggtaaccttatccctgggcagcccgcgatagcat

SEQ ID NO: 257770 - DNA, 122 bp, Homo sapiens
tttgtgtgtgtggtccccatgtgcatgtgtggtgtgtctgatgtgtgtggtttgtgtgtgcggtttaagtgtgtgtgtagtgtgtgatttgtatgtggtttacatgtgcgtgtatggtgcat

SEQ ID NO: 257771 - DNA, 122 bp, Homo sapiens
agagtgtctcccatcaggctgaaatggcccagcctttatgcctctaccctgctcagtcaccggctgtgggctccccagagaatagcatgaccctgggcaaggcagctctccctgcttgaata

SEQ ID NO: 257772 - DNA, 122 bp, Homo sapiens
cctccaacccccgtggactgcagcccccacctctccagtgaggccaggacatctgagcaacgggtgtctgggttgcctgctctggaggcccctctgtgcggccagcttcgtccctttgtccc

SEQ ID NO: 257773 - DNA, 122 bp, Homo sapiens
tcaaaaggatttccccctccttcatggaatattactaccttcaacacggcctttcagatccggagttcaaagcatagttagcattataatttcagcagagaatccagaattggcaggatatc

SEQ ID NO: 257774 - DNA, 122 bp, Homo sapiens
agggagggcgatggggtggagctcccccaaactcccccatgtggccctcagtttggtgtgcgaaggattaatttgttccggctgggaggtagggaggagattggccccgtgggctctcgatg

SEQ ID NO: 257775 - DNA, 122 bp, Homo sapiens
ctgagacccccacagccacgaccacgggccctcgccctgagaccgccacagccacgaccacgggccctcgccctgagacccccacagctatgaccacaagcccccaccctgaaacccccaca

SEQ ID NO: 257776 - DNA, 122 bp, Homo sapiens
caggttgaggggaggccccggcccaggactgggctcttcccgaggtggggactggatgcccgcgctccggactcctgccggagatgccaaccccccagcgctgggcaccttgccttgacccc

SEQ ID NO: 257777 - DNA, 122 bp, Homo sapiens
gcccagagtggcggccctttcctctcctacagacacagaagaagttccatgtgcagaatgcggctgtacataggctacgttctgtcttcgagggggaaaggctgctgaggctgggggacctg

SEQ ID NO: 257778 - DNA, 122 bp, Homo sapiens
gggggtcccaagcatcggcgtttgtgcagctctcggtggttccaaagtcagccaagatctcggttctgggccgccaggggctctggagtcagacacctcgtgtctaagtctccaccagttac

SEQ ID NO: 257779 - DNA, 122 bp, Homo sapiens
cctagattcatttaatccttcagatgagcctgctgtctgtccctgtatatgcagaacatgcgcagaaaaaaagtgagcctcagaaaaattaaatagcttgttcaaggtcatacagcttgtaa

SEQ ID NO: 257780 - DNA, 122 bp, Homo sapiens
gcatcctcggggccgcactgcccaagggggcaatccccgcggccgtccgcaacgggtccccgcgcctgtcggggccagaatcagatcatctccgttgtaaacatttgtccaagtcaatggaa

SEQ ID NO: 257781 - DNA, 122 bp, Homo sapiens
caggctgaacccaggccgagcggacgttgctgtcactcactggctaaggaacgctggccacgtggtgctccagacactcacgggccaagatgaccgccctcctcgtgagtctccacatcttc

SEQ ID NO: 257782 - DNA, 122 bp, Homo sapiens
gcacagcgaggacgtgtctctgggcgcctggctggcgccggtggacgtccagcgggagcacgacccgcgcttcgacaccgaataccggtcccgcggctgcagcaaccagtacctggtgacgc

SEQ ID NO: 257783 - DNA, 122 bp, Homo sapiens
gaaacagcgggagcagcaggcaagggtcttcgttggcttccgcccaaatctcacacagtgcgtctgattcgctgagccttaacgccctcggacccctgaccgcatgggaatctgggaaacgt

SEQ ID NO: 257784 - DNA, 122 bp, Homo sapiens
agatgaggttgtctcattttctcgctggagaactgtcagggaacacggaaaacccacccgcgacccggcttcatgcggcgccgtctcctatggcaaccgggaggaggcgtggttcgaaggtt

SEQ ID NO: 257785 - DNA, 122 bp, Homo sapiens
agcgaggctggtgagtgaacccggccgggggcgcaggtcacgaccaccccccatccgccacggaccgcccgggtccctcagagtctccggatccgaaatctaccccgaggcagcgggacccg

SEQ ID NO: 257786 - DNA, 122 bp, Homo sapiens
aaaatgtgatgtagcatagtgatgcttcctcccctggccaatattcagggaaccacccagcgcacaggaggaaagcctgggtgaaaatcacagctccgcctcctgcagccctgtgacctcag

SEQ ID NO: 257787 - DNA, 122 bp, Homo sapiens
gccgctcggagaagcagggagtcggtgcgccgcagctccggcaggcgtctgggaggtggtcgcctcctcacctgcccaggcggccgtcccccgggagcgggtggcggtgacctcaggactga

SEQ ID NO: 257788 - DNA, 122 bp, Homo sapiens
agtactgggcagccagtcacaccaagccagggcatttacagaggcctgttcaaaacctggcgtacagaagagattctgacacaatgaccaaaatccctatcaacagaacctgcattctgggc

SEQ ID NO: 257789 - DNA, 122 bp, Homo sapiens
aatggtgcaatcacagtttcattatgtcggccacgctgctcttgaactcctgagctcaagcgattcctcttggcctcccaaaatgctgggattacaggtgtgcatcaccaggcccagccatt

SEQ ID NO: 257790 - DNA, 122 bp, Homo sapiens
ccacagagcaagattccgtctcaaaaataaataaaacaaataaaaatacgtagataaatacgggaccgtcgtgaatttgagtgtcacctttgtggagcagccacggtaatctctgtcattcc

SEQ ID NO: 257791 - DNA, 122 bp, Homo sapiens
aatcctgaaaattttacattagacaatgacgtaactaaggcccattttctctttgtatcccgacatcctgtcaacttttcactttacaagcctgtttttcatcacaacaaattttcacatac

SEQ ID NO: 257792 - DNA, 122 bp, Homo sapiens
agcggagcagaatgtagaaagagtatctacttctccggattgttgggaggagggtcgaagcgtagactggccacgcccgggtcccgctctctcgttgcacaactgcaagctagatctgggca

SEQ ID NO: 257793 - DNA, 122 bp, Homo sapiens
ggcccatcagtgtacccccgcccaggctggccagccccacagcccacgtcctgtcagtgccgccgcctcgcccaccgcatgccccctcgtgccagtcgcgctgcctgtgtggtgtcgcgcct

SEQ ID NO: 257794 - DNA, 122 bp, Homo sapiens
ttgcttttttaaacaagcactccagttgattgtggtgctggtgacctgagggccacacttcgacaaactctgcctgaaaacgaatactcctcaggcttcatctgtagccctcagtgctccta

SEQ ID NO: 257795 - DNA, 122 bp, Homo sapiens
ccaggcggatgaccctcaggatggccagagacatggcctgctgtccattgccctgtcgttcggccagctcggtacccagagtgataaaataaggaatgatggccacaatgtcgatcaggttc

SEQ ID NO: 257796 - DNA, 122 bp, Homo sapiens
aggtgatccacccgccttggcctcccaaagtgctgggattacaggctgtgccaccatgcccggccactttggctttttaaattaaaaagtgagggagatcagacacttggagctgtggattc

SEQ ID NO: 257797 - DNA, 122 bp, Homo sapiens
aacactaaaccactggttaccccagcagcacacgaaggtacttctggcttatttaacaaacgtgtgtatactgatttttgaaaatgcaagttacattctaaacgcaattgtcaagctttcta

SEQ ID NO: 257798 - DNA, 122 bp, Homo sapiens
ctgtggcctgttaggaacctggccgcacagcaggagaacgagggcattaccgctgagctccgcctcctgtcagataagtggtggtgcaaaccctattgtgcatgagaggggtctagggtgga

SEQ ID NO: 257799 - DNA, 122 bp, Homo sapiens
acttgaagtgatccgcccacctcagcctcccaaagtgctgggattacaggcatgagccaacgtgcctggccagtttttacattttcaatggttgaagaaagttaaaagaataatatttcatg

SEQ ID NO: 257800 - DNA, 122 bp, Homo sapiens
tgaccttgtgatccgcccacctcagcctcccaaagtgctgggattacaggcgtgagccaccgcgcccagccaggagaaaactgactttgaacttggctctaccacttactagttgtgtgagt

SEQ ID NO: 257801 - DNA, 122 bp, Homo sapiens
gaaaaaagatttaaaggagggggagcgaagtgttagattcgaggatgagccaaggcccggcgtttcaggaatggaaggccagtggctcaccggctttccctgcagaggccaggcactatccg

SEQ ID NO: 257802 - DNA, 122 bp, Homo sapiens
gctttaaggcaggcatgtgccatatctaatgtggaaacaggaaggagatctaaaatgctgcggttggtggtggtcaaagaaggtttctctcagggggaacgattcaacagacatttgtgata

SEQ ID NO: 257803 - DNA, 122 bp, Homo sapiens
agtgggtcactaagaactaggagtgtcactgtcagctcccaccctgtcgagggtccacctcgtgttgaggcacttttttgaggcacccttccttttaaccatttctgtccctacaagtttcc

SEQ ID NO: 257804 - DNA, 122 bp, Homo sapiens
aggcgagccccgtggtctccgggcagccggccctgccccactcacctctcctgcccttcccgctgcaggctaaccttgccgcgggccgagccctgcctcgccatggaccaggactatgagcg

SEQ ID NO: 257805 - DNA, 122 bp, Homo sapiens
taggcaggacggaaggagcgggggaggccccttacgcaaactacaattcccggcggggagcgcggtgaagcgggggtgggatctgaacatggcggcggtggtagctgctacggcgctgaagg

SEQ ID NO: 257806 - DNA, 122 bp, Homo sapiens
ctggaggaaggggttatcattcccatcttccagatgagaaaactgaggaatcagagagctcgtccaggggcacataacctctaagtgacagagccaggatttgaacctagatctgccaggcc

SEQ ID NO: 257807 - DNA, 122 bp, Homo sapiens
cccggtgcaggccggctggctgtgggtcacacgcagacaagatcagcgaccctcgttttgcgagtgcaacactcccagccacagaagttcccgggtccagcctcagagcccagtatttccca

SEQ ID NO: 257808 - DNA, 122 bp, Homo sapiens
ggtgatttgcaaggtgactccgccggtctctttcaagcgggagcgatacacaggtcagcccggatcgtccatggtcactgccgtaagtgacactaacagaatatatcagaaaatcactgcct

SEQ ID NO: 257809 - DNA, 122 bp, Homo sapiens
cttcataacagcccaagacctacctaggtactattattaatatttcctgccacttgacatcggaggaaacagaagctcagcaagtggctccaggttatacagagccctaacctgagccagta

SEQ ID NO: 257810 - DNA, 122 bp, Homo sapiens
ccaatcctcaaaagagtgagtcacacctcctcctactctgcaactgtcagtactggcttccggcaaaaggttggaaacactgcagtcacgtggcttggcttgctgggagagaagaggccatg

SEQ ID NO: 257811 - DNA, 122 bp, Homo sapiens
ggttgccgaggagaacgtggacttccgcatccacgtggagaaccagacgcgggctcgggacgatgtgagccgtaagcagctgcggctgtaccagctctacagccggaccagtgggaaacaca

SEQ ID NO: 257812 - DNA, 122 bp, Homo sapiens
acttgctactggaggtgtaggagtggtagaggcttcctcattaaggcaggggtgctggagcgatcaaccatccctgtttgcctgggactgaggggtttcctgggactcggtcaccctagatg

SEQ ID NO: 257813 - DNA, 122 bp, Homo sapiens
ctggttgccactcaggcactgccgcggacagcctgggggtggggcttgaggcgcgcggggcgggactcgccactccagcctgcagcgtcaggttttgtctctgggaacatcagactttttac

SEQ ID NO: 257814 - DNA, 122 bp, Homo sapiens
tgcacttgactaaatcgccttcatcaaagccgtctctagcagtggcagtggactcggctccggaggtggcagttaaggtaagcacttttgctactaatgcagtgtgggaattgttggcttca

SEQ ID NO: 257815 - DNA, 122 bp, Homo sapiens
ggcagcaatggtcttcaaaaatacacaatcagccccaattctcattttcacattctcactcgaaatcatagtgagggcaagaaatacccagatttggtgcaggacaaaccactggatcgaga

SEQ ID NO: 257816 - DNA, 122 bp, Homo sapiens
gtaaaaggacagcgaataataatctaatttaagcatagttaccatcaactatgggccaggcgctgcactggtttttaaaaaatatattatcttttaaaatctgaagtctaattgtggttgtc

SEQ ID NO: 257817 - DNA, 122 bp, Homo sapiens
agagagtgtgtgtaacgtaaatcacttactggccccagaatctggtgtgaccgcacgtgccgtctttccaccccgttcatactcagctgctgcagctgactcaaagactttatatttttgag

SEQ ID NO: 257818 - DNA, 122 bp, Homo sapiens
gctacgggcatcctccgccgccggcgtaccactccccaagcccaggaagtggcgtgcatacgctgggaccagccctctccagggggccgtggggcttgtgtgttcttctggagaccgggggg

SEQ ID NO: 257819 - DNA, 122 bp, Homo sapiens
gcgggcattttatgtcctaccccaccagtgtggcaggcaccgagcctggtcccaggaagccgctcccaggccacacgggcagggcgctcgggatgctcggcgttggcgagtgcagcgggcgg

SEQ ID NO: 257820 - DNA, 122 bp, Homo sapiens
agccaaggctaatattttgggaatgttcaccactgccctcagctcctaatccccagtaggcggagcagaggatttctgttccttcagccagccagttggtttcactgtggagacgttggtgg

SEQ ID NO: 257821 - DNA, 122 bp, Homo sapiens
cccaggaaatccctgagcttgctcagctggaaaagggggctccatcatgaaccggggcttcgggtttttataaaccccgctcactggagcgcccattgtctgctaagcagctgccttgctgc

SEQ ID NO: 257822 - DNA, 122 bp, Homo sapiens
ttagaccagtgaattcttaaaacaacaacaacaaaggaaaaatccttccttgccttgaaacgtacatccttataatgaccacccatgggccagtttctgcctctgcagctacacagaacaat

SEQ ID NO: 257823 - DNA, 122 bp, Homo sapiens
atcctaggattccacctgagcggaaacatccgcgagccagggagtcctggagagcccgagcgcctctaccatgtctccatcagctttgatcgctgcaagatcacgtccgtgagctgcggctg

SEQ ID NO: 257824 - DNA, 122 bp, Homo sapiens
cggccgccgacctggcggggacggtcccgggaagccgcgggtccgagtgaagggggcctgcgctgcctcgcttcccacacggcccgagggaagggcccgcccccacaggccggggcgggagt

SEQ ID NO: 257825 - DNA, 122 bp, Homo sapiens
ggggagtgatgcgcagcctggtgctcgggccaggaccagacctcccatggacagtgggcacgtgccttagcatctgggcatgctgatctttttctccaagagggcagtgtgggggtagaagg

SEQ ID NO: 257826 - DNA, 122 bp, Homo sapiens
tgtaacctgacgatactgttgtgagcgggaatggaggaagtgcatggaagcccctcagcacgatgcatagtgaacagacaagctgtgaaccttgggagttatcaccatgtgtgatgatgctg

SEQ ID NO: 257827 - DNA, 122 bp, Homo sapiens
actagaagggctccaggatggaggccgacctgacttctccgcctcggtgggctgggtcggcggctggagcattacccctactgcgggtcccgctgctggcagcgctggaaactgggtggacg

SEQ ID NO: 257828 - DNA, 122 bp, Homo sapiens
gcgggtcagtacggggaaaaacggtgagtcccttttataaaatatatagagaggttggtgcgaaaatagcagcttgtttctgcttgcgtatttctactcactgctgggacacaaatctaccc

SEQ ID NO: 257829 - DNA, 122 bp, Homo sapiens
atctgcattcccagaagccggtgggccaacgaggcgagcagcacagggcgcagaggccgccgtcagaggcagaggacgtgctcatcaagctgactcgtgtgctggccaacattgccatccac

SEQ ID NO: 257830 - DNA, 122 bp, Homo sapiens
acccatgaaaacatcagtgttaagagcatgatgaaaggtgtcaataaagccgtaggatcgcgcaaccctttgtgtgtgtggctgctggtacgtgtgatctttgaaaaccttggctttagccc

SEQ ID NO: 257831 - DNA, 122 bp, Homo sapiens
tttcagatcactgacttcttccagtcttgctcctatcagcaaagagggtaagtctctatacgggataaggacatggtgagaaacagagctttggggaagctggggtgggatgagagctgtgg

SEQ ID NO: 257832 - DNA, 122 bp, Homo sapiens
gaccccgccccagcttgtgaggggggcgcctcctccatgaaccgagaattgggacagaaccgtgtcctcaggagctaacacctgggctccatcgccggggaaagggggtcatgggtcagggt

SEQ ID NO: 257833 - DNA, 122 bp, Homo sapiens
aagagcagagagaggccagacccaagggaggaagatggggaccccgagaaatcctggatacggggaaaagcataggagagccacaaattatgaaagcggccacaaaacacccctggtggggt

SEQ ID NO: 257834 - DNA, 122 bp, Homo sapiens
cgtaggcctcatctgcttctgaagcagtggctttccacactgctgctgtcttccggtggacgcgcaggcctggcaggagtctttggacacagcacgcctgctgcctctgccccgcctgcaca

SEQ ID NO: 257835 - DNA, 122 bp, Homo sapiens
cacctgcgccgccgggggtccccacccgcagcgccctggccccgcggcccggggtccgagcgcagcgtgggaagctccagctctggtccagacaggcctggacccccatgcaggtcgcgtcg

SEQ ID NO: 257836 - DNA, 122 bp, Homo sapiens
taggaatcttatattattggtctacacctaattatttataaacattaatggacacaacaccgttccaatccactacaacaattttcttctattttacaagtaagaacttctaacctatcaca

SEQ ID NO: 257837 - DNA, 122 bp, Homo sapiens
ggcctggcctcctagctttagaactcccccagatgttttgttctcagctcaatcaggacccgcccccacctttttaataaagcgacactttgcttttgctttctgacttggcaaccctctta

SEQ ID NO: 257838 - DNA, 122 bp, Homo sapiens
cagcatgtccagagggacctgtggcatcataaggaaagctgcccatgcaactgctgtccccgcccactaagaggggaggggccacccactctgggagaggggaagggctggcttttgcttta

SEQ ID NO: 257839 - DNA, 122 bp, Homo sapiens
gtccaggcgaactggaagcgcctttcccgagcacgggcggggaaaaggggccgagcggagcggaagaacttcctgcagccaagggcgcccgcgttctccgcagacaccacagttcggacccg

SEQ ID NO: 257840 - DNA, 122 bp, Homo sapiens
gagcacagagcatgagacttcgtcatgaggaggtaggattatggattaggcttctggactcgtggtttgtgatgttgtcacattagaaacagatctagcacagttacaagtttagatctgaa

SEQ ID NO: 257841 - DNA, 122 bp, Homo sapiens
gcattcagggtcagtgggccaccatgcctttctgacaccctgtatgtggagctgctggagcgacagctttggacccaagtgatggacgctctgaagagaaaacaaaacattcctgggtgggg

SEQ ID NO: 257842 - DNA, 122 bp, Homo sapiens
ctggtctcaaactcctgggctcaagcgatcctcagcctcccagagtgctgtgattactggcgtgagccaccgcgcccggccaatgtcttcattttctaattggggaatccgttgagggcgca

SEQ ID NO: 257843 - DNA, 122 bp, Homo sapiens
gatgttagctgtgcaggttcttggctgttgcattgttttgttggttatagtaactaaatccggggaacaggctgctgaggaataaaattacatgggggataagaacagagttgacattgcac

SEQ ID NO: 257844 - DNA, 122 bp, Homo sapiens
ggtagtctggcttgatttgcaagagttaggaagaagcaggaagcgttgcgagtcccgaggcgttccagaagctcagtgcattcaggaatgggattaatgagttggggtggggaagttggagc

SEQ ID NO: 257845 - DNA, 122 bp, Homo sapiens
cttcaaggccgccgcgccaaatccctggctgcgacgtgtatgcgaatcgttaggaggaggcgggaggacagccacactgagggcctcttcactaaagaatgaagtctgacggcgggaatggg

SEQ ID NO: 257846 - DNA, 122 bp, Homo sapiens
gagagtaaaatgctaccttatttgattttaatttttggagattatttcatgatgttaaatcgcactggcctggattgtgtgccttctatagtctcattggggacgcaattgtagccccattc

SEQ ID NO: 257847 - DNA, 122 bp, Homo sapiens
tacctcaaagcaaagaagggggactgctggtcccagcagtgaaaggtctcaggaatgggtcgagattcctttcaagggaaaaggaagggcaccctcagattagatgttctccaatctgccct

SEQ ID NO: 257848 - DNA, 122 bp, Homo sapiens
agtccttgtgtaaggctcttctttctgaagaatccaactaaaactggccttggccgggcacggtggctcacgcctgtaatcccagcactttgggaggccgaggcgggcagatcacgaggtca

SEQ ID NO: 257849 - DNA, 122 bp, Homo sapiens
atgtgaatcaattgcatgtaataaaagagaagaaatgactcagagatgacgccaacatgccgggctgggtgcaggggtcccagggatctccactggtctagacaaccacagtcctttcacct

SEQ ID NO: 257850 - DNA, 122 bp, Homo sapiens
aaacaagccacaggatgtgaagctctggtgcttttactctctgtggcaccaggaattttccgagcagaaagaggcttccccctcctgttcccagcaggaaagagagaggaaatagaggaaaa

SEQ ID NO: 257851 - DNA, 122 bp, Homo sapiens
agccagggaagggcgatcccggcccaagaaaccgcagatgcaaaggctctgaggctgaaccggttagggggagaagctgggcgtgtccagaatgtggtgggcggtccagggagaccgcggag

SEQ ID NO: 257852 - DNA, 122 bp, Homo sapiens
tttaagatcttggagcccagcaaaagaacctggtcctgcacaggaaccttggtcttagaccggacatgttctttgatttttttcacgctgtcatatgggttggcatcaaaggtcattaaatc

SEQ ID NO: 257853 - DNA, 122 bp, Homo sapiens
cctcccctcttttcccctggataagataaactcttagcagttttctgagcctagctgatacgtgaatgaagctcggctcctaggaagccctcctggcccctgggctgtgtcccccaccctcc

SEQ ID NO: 257854 - DNA, 122 bp, Homo sapiens
atgtcccagtgttttggggaagtaaatttcccaaagacaaagccactaattgggtcggcacgaaactccaaagtgttgcaggataggtcctttcacgggtcatgttgtgatctgcggggtag

SEQ ID NO: 257855 - DNA, 122 bp, Homo sapiens
ccagctggatgtgattacagctctggaactgcctaagcatgcatccactggtgctgcatgcggcccctggggcacacattttcagtccctttctttacctacaggagaaaaaaagatgcctg

SEQ ID NO: 257856 - DNA, 122 bp, Homo sapiens
ctagtttaaattggcagagttataacaaaggagagcctcaaatattagacaattgcagtgcggctttctgggcacaggtgtcactgctctgccacctatcactattctttttctgttcagtt

SEQ ID NO: 257857 - DNA, 122 bp, Homo sapiens
gagggttcccgaaaggcaggggcgggcgcggcgagcccctgccagatccggggatgataacgtgcctgctccatgtcgcggcttctagctgtccaggctccgccccctgtgagtgtgtaagt

SEQ ID NO: 257858 - DNA, 122 bp, Homo sapiens
attagcaggagaggcacgactcatacccagagagtcaggctctagagccctcatccaagccgctttgtggcactgcctcccagccggggcaggctggccttgcccggcagcctggggcctag

SEQ ID NO: 257859 - DNA, 122 bp, Homo sapiens
gagatgtttactgaagaaccaccagcaagtggggaggcacctaagtatcgaagtgaagagcggcacaggaaacacagcattcagccggcctacacgtgggacatccccgtgtcactactgac

SEQ ID NO: 257860 - DNA, 122 bp, Homo sapiens
ggggcccgcgaatcccggggtctgaggggcgcggcgtcctcaccatcagaactttagccgcgttctccagctgagcgatcacttctgggggccccagcgccgccgccatcatggtctctctt

SEQ ID NO: 257861 - DNA, 122 bp, Homo sapiens
cacaaaatgcatcttccatttttctgttttggtggctctgccttgctggcatcatgaacgcgtcctgggtaaagccatcctcatgagctggcattgcggctctgggagtcacctcccggcca

SEQ ID NO: 257862 - DNA, 122 bp, Homo sapiens
ttcccactttcctcactgaggaaaccaaagcttagacgttaacttggccaagggcaaaaacgctacttaactccaaagtccagcctctgaacccacccgtgtgcggggcctgaggtgtgagt

SEQ ID NO: 257863 - DNA, 122 bp, Homo sapiens
tcaacaacacagctggtgacttcttccctggggtgaggaaggttttccctttccctgccccgagctgcagtggtgcagtctgttaccttggagaccagctaacacattcccgcagggcaagc

SEQ ID NO: 257864 - DNA, 122 bp, Homo sapiens
gcggcgggtcgctagcgggaagtggctgcagctggaggcagctggccgcggaatgtcacccgctgccgggcctgggaagggctgggcctactgctgtggggtggggggcgggtgggagggcc

SEQ ID NO: 257865 - DNA, 122 bp, Homo sapiens
aaggactgcctgggggtgcttttgtactggttggttttctgtgtagagagttcatgcagccgcgggtctgtactgattggagctgaagtcccaggttagcaccaccaacaggggctcccctg

SEQ ID NO: 257866 - DNA, 122 bp, Homo sapiens
aaacattatttcctgggagatccggcagctcttcactcttccgaatcaggctgtgggaaacgtttgtgtgcatctcgctttatttcctctcttgaactattaggataaagtcacagaggtag

SEQ ID NO: 257867 - DNA, 122 bp, Homo sapiens
cggtgtgagctgaagcctcccgccccccacaccccttcctgcagccgccaacgggttacgcgacaacacgctgcaaatgcatgataaagacacaggcagagggcatctgcttccaaccccag

SEQ ID NO: 257868 - DNA, 122 bp, Homo sapiens
agctctcaggagttcagcctgaaacctgaagcttctccccgaggtgccaacggcacagaacgcctttctgcaagcacagaaaagcatacacccctaagctcctgtaggaagactgccttgta

SEQ ID NO: 257869 - DNA, 122 bp, Homo sapiens
gggagggcagcggaggaggcgaggagcgccgggtaccaggccgggggaggcgcgggctcccggggaagagacgggtgatgaacaatctttacatcgggaaccttagccctgcggtcaccgcc

SEQ ID NO: 257870 - DNA, 122 bp, Homo sapiens
catgaagcagctgcctgcaggaacgtttttccctctgtggcaaggataaacagtgaaaggcgtttgctgaagatggaaagagacactgtgcaaaccaatatgcacagctcctgaggcctgtg

SEQ ID NO: 257871 - DNA, 122 bp, Homo sapiens
ttccccgcctcctgcgactcgtttgtgggtgagtgcttgggaattagcgcggcgacttcgcgctagaagagggacagtaattgcttttgctaattttagagcgcagagcccgctgggcacag

SEQ ID NO: 257872 - DNA, 122 bp, Homo sapiens
agcccggcgcaatccctcctcccggcgacccccattcccgtcctggcgatgcgcgagacgcggctgggatacccggcctcgctgctactcgcgccaacctgggctctcccggcgctcggtgc

SEQ ID NO: 257873 - DNA, 122 bp, Homo sapiens
gccgcagccccgggcccctcccgggccacctgtgcgcagactggcgggcccgcgagagcccggatccggagcaccgatccactccgggtttcagactcctgcccctgtccctggagaccccg

SEQ ID NO: 257874 - DNA, 122 bp, Homo sapiens
gattgcccatgatctctccctgcctggaaaaactcgtgcaaacttgcccttcaccaggcacgcacgcacgggtgggctttccccaggagggtcgtttggcggccccggggaccctcctgggc

SEQ ID NO: 257875 - DNA, 122 bp, Homo sapiens
atcaaaaggttttagcccaatattgtggagagagtttcatttagcttcattttttccagccggggctggctccaaagctagtttttcttactaggttgtttgctacatgaaaagcagactcc

SEQ ID NO: 257876 - DNA, 122 bp, Homo sapiens
tccgagttgctctggggacttcgtaggagacagagaggcccgaaaccagtgcccgctgtgcgcggggttggggaagctgcagtgggtggccggcgagccgggaacaatgcccaaattttggg

SEQ ID NO: 257877 - DNA, 122 bp, Homo sapiens
cattggttgccgtgccctccgcttgtctcgctcagctctcgagccacacgccctgggctccgcccactccctgacaacatccctcctgcccattgggcgagcatggacggggctgtccaatg

SEQ ID NO: 257878 - DNA, 122 bp, Homo sapiens
ctttttcccacggtcttcccgttgccgctaacctaactaactctcagccatggcctccaacgaagatttctccatcacacaagacctggagatcccggcagatattgtggagctccacgaca

SEQ ID NO: 257879 - DNA, 122 bp, Homo sapiens
gctccttcaggttgttgacattcatcacatggttgtatgaggtctccgcttgctggctgccggcccggggttgttctcagcttctagaggtcgctcacatcttcaaaaccagcaagactttc

SEQ ID NO: 257880 - DNA, 122 bp, Homo sapiens
ctccacgttcaggggtgccaggaggctcttgttgatggtgacctgatggatacccccgggcgggcacaacgacggacacacggaccccaaggccacactgccaaacatgctgccagcaaagc

SEQ ID NO: 257881 - DNA, 122 bp, Homo sapiens
acagatgaaggtagaggaatgctaacttgcctatgctaacccgcagagctctgaatcctccggatagcgcccccgctgtaatccacccagtgcttccctccagacccttctccctctcgtgc

SEQ ID NO: 257882 - DNA, 122 bp, Homo sapiens
aaataacacatagagagctatgcacatagatttccaaggagccagttctcttcaactacccgcacaaacgttgaatacgcatgagagaggcttgttcagataaaaacaagaatttaaccaaa

SEQ ID NO: 257883 - DNA, 122 bp, Homo sapiens
gcaatgtggtttgccagacgttagcgtccgggaaggaagagtttttcgccaataggctttcggcattaggttctcccgccgagcacccttcttggaatcggctggtcttcctagaaactacg

SEQ ID NO: 257884 - DNA, 122 bp, Homo sapiens
agagagagagaggcaggagaaggggagggagaacgttctcctcccccaggaaacgtagggcgcccatcttctgatgcctgaggctgcagggacccacaccccatcacaggcaggcagcaggg

SEQ ID NO: 257885 - DNA, 122 bp, Homo sapiens
ggctgagaaccaagtttatttatcttactcaaggatggagcaggtgacccagcactacagcggtggcttgatggcggcaaggagccaggctctccaccctgttactccaccttctcctaggg

SEQ ID NO: 257886 - DNA, 122 bp, Homo sapiens
atttcagtaaaagagttagatttattataggatttgggctttggttcggtgattttggggcgagttcaaggaagcaggagctttgctctggatcgggtgttgttaggaagcagtggtaacac

SEQ ID NO: 257887 - DNA, 122 bp, Homo sapiens
aaaccccagtgacggggacccggcgacgcctaaggtgacccagaagggacaatatggcggcgcggccgcatggagggcctctcatcccgccccaagcaggttgacgccacggtacctgcaag

SEQ ID NO: 257888 - DNA, 122 bp, Homo sapiens
tatgaaatctgtttgtgctgcaaatggcatctgaaaactgacaggaaaccatccaagacgcggtttaagaaaacaggaagaataaacacccacggtgcaaacttctgatcaatcattttacc

SEQ ID NO: 257889 - DNA, 122 bp, Homo sapiens
ctcgcacttcctacacacccgggcattcacactgcaaaaggtgctttggaagcattcagccggtatcgcatcctgcagtgaggactcgcacccgggagaaagtcacataaggagaaaccact

SEQ ID NO: 257890 - DNA, 122 bp, Homo sapiens
cagagtggctcacatatttactcacttgtccttaaattgaagatacagataagattgggccgcaccaggtcaaacaaaatctgtttcccaaacttgatgactcagtcagtctcaaaggctgc

SEQ ID NO: 257891 - DNA, 122 bp, Homo sapiens
gtgcggccgccctactcctactcggcgctcatcgccatggccatccagagcgcgccgctgcggaagctgacgctcagccagatctaccagtacgtggctggtaacttccctttctacaagcg

SEQ ID NO: 257892 - DNA, 122 bp, Homo sapiens
aagatgtataataggcaactagctacacaggcagtccctaactaacataagttccacttacgatttttttttttttttttttttttgagatgcagtttcgctcctgctgcccaggctggagt

SEQ ID NO: 257893 - DNA, 122 bp, Homo sapiens
tgcttctcattccgcccagggccagcccgggcccaggggtacctgctgtgcgtctggcgccgaggtgggccccgaagacccccaagcccgcccagggattcccttcccgaggccggagcggg

SEQ ID NO: 257894 - DNA, 122 bp, Homo sapiens
tcccccttcgccctcccccacgcatctactgctcctgtcgggaaggaaggtcgcccaggccggttcagcctctgggcagggtccctgcaccgccctggcccgccacaccccctccccggctc

SEQ ID NO: 257895 - DNA, 122 bp, Homo sapiens
ttgagaacattattggccgggactacaagggcgtgctgcaggctggagggctgcccttggcgtccgtcatgcaccacctgggctaccccgtgcccggccagcttggcaacgtcgtcagctcc

SEQ ID NO: 257896 - DNA, 122 bp, Homo sapiens
gctcactaccaagaagtggacacataaaggaagatgatgatgaccagagaatcacacatgcgagactcaaggtaatccacggagaaaaagactggagtgctccaggaaggcttcataaggtg

SEQ ID NO: 257897 - DNA, 122 bp, Homo sapiens
cggctgcgcaatctgggacttcccagcctccagaaacttgagcccgccgacccctgttcacgatcagttacccagacacggtgccgttacagcagcagcacggagagaggcaggacccggag

SEQ ID NO: 257898 - DNA, 122 bp, Homo sapiens
caagtgctttgagccctgtgtttttacggggcatgaagccctacctgcggttactaatgtcgaattgcgcaccagaggtgtcccagggctggaagaaatggcttgggtgtggggctggcacc

SEQ ID NO: 257899 - DNA, 122 bp, Homo sapiens
ggaactccaggcccttggtggagtgagaagtggcagcaggtaataaagctgttaaaggagcgaggctcttaccttgttctgagcacacggatccagtgcaatcccaggcagtgcgagtgaat

SEQ ID NO: 257900 - DNA, 122 bp, Homo sapiens
ccaagcagcgttccaggcgccagcactgttagcagcagtcctctgcgtacccaagagtaccgcagggccagaacacgagaaagatgcgcgaagaggatttccttctagagagagaataaaga

SEQ ID NO: 257901 - DNA, 122 bp, Homo sapiens
gcccttcagagggtcccgaatcttcccatggggaagaaatgggaagctgaccctggaacccggcactggccctactcaaccaattccttttgtggtaaatgggcagggtctgcctcctgcag

SEQ ID NO: 257902 - DNA, 122 bp, Homo sapiens
gggccccgcgctgcggaaagttcaccgcggcgggcggggggaggccccggccccgctcgccggcgtccccctgcagattccaccattaattagtcctaaggactgtctactggcaacttaaa

SEQ ID NO: 257903 - DNA, 122 bp, Homo sapiens
gcggcggggcccaggcgcgagcgggggcacgggcggggagttggcagcgaaggatgcgcccggcgccccccggcggccgcccggagcccgaggtcggcgcgggaggagcgctgactccgcgg

SEQ ID NO: 257904 - DNA, 122 bp, Homo sapiens
agcctctccctgagcccggtttctggtcctagagccttaagcctggcaagacactcgccccgccgctcctgccccatgcctttgggggtgtcgggatgccccactttaagccgggctgagct

SEQ ID NO: 257905 - DNA, 122 bp, Homo sapiens
gtgctgggattataggcatgagctaccatgcccgagccatgtaactaatttttaaaaaatcgttttgcttagaatatatttattctgtttttctgaatttaggaaaggcacaaaggcaaatg

SEQ ID NO: 257906 - DNA, 122 bp, Homo sapiens
acaacagcaccggcgacttccaaagagcagttcagcattttgagatgagcttccggaagccgacaggcggcggaaaccggatgcccggagcaaccattagttctccgcgtttactgctttcc

SEQ ID NO: 257907 - DNA, 122 bp, Homo sapiens
gaagacgccggctacagaggtcacgtttctcttgtttactggccgtggacatttctgttgcgtagttcttttgttttctctgggtgtaatctctgttgcacatggagttcagacaatgtaga

SEQ ID NO: 257908 - DNA, 122 bp, Homo sapiens
aaagccgcagctaacggtgctatggaattactagagagcacagaggctgggtgcagtcaccggtctgcaccgtaaaaaggggttcaggaagttcctacgagatattagcgtttctaggaccc

SEQ ID NO: 257909 - DNA, 122 bp, Homo sapiens
cccccaatcagttcacctaataccaggtcgaaatctgagcgcagcgggagggcgtggctgcgcctgccgctaggctccagccggctccgggggcggtaccccacagtcgaggtggtctggag

SEQ ID NO: 257910 - DNA, 122 bp, Homo sapiens
caacaagaagaatgaagcacgctactaagataagacagactggaaggttttggggagacacgatcgcaagctcagtttcggatgctctgagtttcagatggctcaaatgcgtggggagggca

SEQ ID NO: 257911 - DNA, 122 bp, Homo sapiens
ctgtccatcgataatgcatgtggggtcccatggggttgagagagcactggccttggagtccgaccttggctctgccactccctgctgtggctgggtgagagaatcaccctctctgggactta

SEQ ID NO: 257912 - DNA, 122 bp, Homo sapiens
aaccaaaaagagggaattgcagttgaatggggatgggaggtggggagggcgatgcgtatgcgtgtatatgtgtgtgtgtgtgtaaggaagagtccatcacatgacagtgaaagaggaccaga

SEQ ID NO: 257913 - DNA, 122 bp, Homo sapiens
aacaatggatagaatatgaaaatgtcttggaaatacgacccgtcaggactaggtaggtctcgcccaactgcgacagagcggtcgcccaggacgtggacctgccggccgcctctggaccgcct

SEQ ID NO: 257914 - DNA, 122 bp, Homo sapiens
tggcacatgatggtcaggaggaagcccacgacgccctcaaccgccatggccaccagtccgcgggtgacaatgtcccactcgaacggggacttcatcttgtcaaactggcctgcggggagaca

SEQ ID NO: 257915 - DNA, 122 bp, Homo sapiens
tctctataggcaggcaccaattcaaaacaccgatactgacaacagtagtaaattccacttcgttttgaggaaatcagagactagcaaatacaaataacaaaagaaaaattaaaaagtcaaac

SEQ ID NO: 257916 - DNA, 122 bp, Homo sapiens
tcagtcaggcaacctgtattgacagtggcctctgctgctacgatgacagctgtgcgcgagcgcccccagattatctgtgtgtagggcggaacagggtgcccgaggagtgtccacccaaatgg

SEQ ID NO: 257917 - DNA, 122 bp, Homo sapiens
agggccaccatggatgtctggggccgaggaggcacacagccacccggggccagggagcaccgaggcctgggtaagggcagaagccgccaagcccccggtttgctccacccctcagtccccat

SEQ ID NO: 257918 - DNA, 122 bp, Homo sapiens
ctcctcagcccttgggtggtcgatgggactgggcatcgtggagcagggggcggcgctcgtcggggaggctcgggccgcacaggagcccacggcgggggcggggggaagctcaggcatggcgg

SEQ ID NO: 257919 - DNA, 122 bp, Homo sapiens
cacacatacttgctgtcttccatgcaaccaatatagtatagtgacataaccagttgctaccgagggtttatgctactatcgttggctatataactgagttgaactgcatattagtattatgt

SEQ ID NO: 257920 - DNA, 122 bp, Homo sapiens
tagaatcaattccttggactcacagccatgcagataagccctggccatctcagcagccaccgcacaacccccctaatgaaagacacgccctcctcccctctggtcacgtaagagaacatctt

SEQ ID NO: 257921 - DNA, 122 bp, Homo sapiens
tctgccagcccacaagatcaattcacgtgatcggaagtgcggaggggcagctgcagagagcgatgctggcagcagcgcggcggcttcagtcacacagggatgtggcgctgttcacccggagc

SEQ ID NO: 257922 - DNA, 122 bp, Homo sapiens
aaacctccctacaatctataacaaagggctttcattgagtgagaattgaatgagtaaccacgtgaggtttgcatatgaagaacatgctcagcttgagagtgacttgggaggggcgagatagt

SEQ ID NO: 257923 - DNA, 122 bp, Homo sapiens
ccccgccgccggccaggatgctggaggaagcgggcgaggtgctggagaacatgctgaaggcgtcttgtctgccgctcggcttcatcgtcttcctgcccgctgtgctgctgctggtggcgccg

SEQ ID NO: 257924 - DNA, 122 bp, Homo sapiens
tgcctcctcttctccgagctgcatgtgatcctcgcctgccccgcggggctgctggggcttcgctgaatcagcgcctgtggaggcgcttctatcaggccatctttctccagccctagccgccc

SEQ ID NO: 257925 - DNA, 122 bp, Homo sapiens
cctcgcgcgatcacattctgtaaggcccaaagcgtgcgcatgtccccctagcccatcccccggacgcagtccacagatccccagtgcgcccaactggcgaaatctgcgagttcccggtgcgc

SEQ ID NO: 257926 - DNA, 122 bp, Homo sapiens
caccacagatgaggccccactgaccaggcctccagggaacaggctgccactgaccaggcccgtattaaccaggccttggtgaccagatgcccctgactgtgaccctagtgagcaggccccac

SEQ ID NO: 257927 - DNA, 122 bp, Homo sapiens
tctgggatcagtttcaaagtctaacgattaacacatgtttattcattccaaatggagccacggctgcagtccctgctgcacacatgttattggggattttttaaattgttgttattattttt

SEQ ID NO: 257928 - DNA, 122 bp, Homo sapiens
ggtgtgaatcacactgcccggtcgggcctttgggaaaaaattaatgaaggacacagtcagcgccgtagaacctgccaaatacacatcagatccagtggagtctgtgaagggggagggggaga

SEQ ID NO: 257929 - DNA, 122 bp, Homo sapiens
gcgctgggagcttcagaaaaagcgcaacaggaaaggtccccaaccccctagcaacgtcgccgagaacctactgcacaaggccactccatagcccatgtttcctgtactgcggggtctggcag

SEQ ID NO: 257930 - DNA, 122 bp, Homo sapiens
cgtgggccctgactcaggcacttgttatcctatgactttaggcaaatgacttaatggtctcgcttctcctccagcattgctggggcttttgtaagattcaagaatgtattcgttatcttttg

SEQ ID NO: 257931 - DNA, 122 bp, Homo sapiens
aaatccacctgctggaccacatgcacgcaggagggcaactgaaggctaacctgtatgcggcgggtcgggggtgggggttgctgtctagccatgagcccagaggacccataaatcatgcaggt

SEQ ID NO: 257932 - DNA, 122 bp, Homo sapiens
ggatgagaattcagaagcttttgactatgctacctgggagagtttttcacctgtttcctccgttgcaaaatgagcatgttagtacctgcctgtgtgcctcccaggggcctggtgaggatagg

SEQ ID NO: 257933 - DNA, 122 bp, Homo sapiens
cacaggaccattccaagggcccagacctgtgatgcagggaaatcaatattttgcttacatcgagtgggggaatttgcatctaaactgaaggcaaaggagcttgtttggagcagagcaggtgg

SEQ ID NO: 257934 - DNA, 122 bp, Homo sapiens
gctttgtctttttatttaggaagggattctgtcaatgcttcacttacatttcactgatcacgacttggtcacaagacatagctgcaagggagtgtaaacagtatttcaactgagcacatagt

SEQ ID NO: 257935 - DNA, 122 bp, Homo sapiens
gtgcgtcggcccaatgggagcggcgcactggcctcccctttaaggaatgttgtgacctgacgtcaccgggcgagttacctcccgcagccgcagccgccgtgctcagcgcgagccccggagcc

SEQ ID NO: 257936 - DNA, 122 bp, Homo sapiens
acatgcccgtaccttccactgcctctgtgttccttttgaggggttcccagcagggtaccccgtcatgggaaggggtgcacatccctgtacaccaggagcccactctgcactctcagtcccag

SEQ ID NO: 257937 - DNA, 122 bp, Homo sapiens
gggagctaagtggcagctatacttcactactatggcagtaaagatgactataaagactggcgggggatggatcctttcaaatgtacctgagctgggatgcccagcttgtggaacgcacagca

SEQ ID NO: 257938 - DNA, 122 bp, Homo sapiens
aggcccctgctgggtggcagaccatctgcggcaccagctgcgggtgtgacggtcgtgtctcggattgaggaaatgaggccggggtccttgtcctcttccaagaagctcttggctttggccaa

SEQ ID NO: 257939 - DNA, 122 bp, Homo sapiens
cctacaaaataaaaagaaacccaagaacatctcagcatttcactctggtgcataagtctccgtgactcacctcagaagcagagacaagtacccaatgtctccacgaatggcctcaggagaga

SEQ ID NO: 257940 - DNA, 122 bp, Homo sapiens
ttaaaatctttttctgacatttgtttctcagctggagttgtaccaaagcgcctaactggtcgtttttctttaatttttttccagacaggatctccctctgttgcacaggctggagtgcagtg

SEQ ID NO: 257941 - DNA, 122 bp, Homo sapiens
tgttcttccacccaagtcctccgcgctgaggagaaggtctagggagtccacacagtccagcggagactaatccgtgagcctgacccacgccgagagggtccaggcacctctgttagcggcat

SEQ ID NO: 257942 - DNA, 122 bp, Homo sapiens
acactggcgaccctctggaccctcgtagcaacagcagcctggtgagggaccctgccttctcggccagcggccctgaggcccagcgctggctgctggcactctgtcaccgggcccggaatcag

SEQ ID NO: 257943 - DNA, 122 bp, Homo sapiens
gtgttggataaccgaacctggtcacaatttttgtctgaacaccatttctggaacatacttcgtcataagaataatgtatgatggttgaggaggagaaaagaggtaaggcagttgggccttca

SEQ ID NO: 257944 - DNA, 122 bp, Homo sapiens
gatataaagatgccaaatgacacctgcacacacagtgggttgtgttacagaaaaatcctgcgcttagggaacccaaatcttttgtaatagtcagtaagcatgccttaccattgctttcttcc

SEQ ID NO: 257945 - DNA, 122 bp, Homo sapiens
aggcactggcccccttgttggagttttgggttaggatcccccctgtgacctggggtgagtcgctgtacctctgtgcctcagtttccccatgtgccccagtttccccactgtatacctgcccc

SEQ ID NO: 257946 - DNA, 122 bp, Homo sapiens
ttgacctttcaccaatggaaagacttgggactccctctgggttggactcaacgagtaaggcggggaacaagggaggagtaaggggcgtggattcttcgtcccgccccttcttaaggaggcgg

SEQ ID NO: 257947 - DNA, 122 bp, Homo sapiens
gcgggcggggcgcacccggaaccccgacagctgtgtcttggtggagctgtggactgcgcccgccgactcccacggccggggcggcgctgaagcagagagaggcctgggtgggagagccggcc

SEQ ID NO: 257948 - DNA, 122 bp, Homo sapiens
agaaaggaaccagaggcagagagacgaggatacccagcgaaagggacgggaggaagcatccgaaacctaggattcgtcctacgattctgaacctgtgccaataataccattatgtgccatgt

SEQ ID NO: 257949 - DNA, 122 bp, Homo sapiens
gagtgggtggttcttttcgttcttggttcgtcctcttcaggtctggttcctattggtgcgcggggagaagggggcggggctccgccacctgctgcagaaagggctgttttagaccctctcac

SEQ ID NO: 257950 - DNA, 122 bp, Homo sapiens
tcaccctcgccataataaaaccagacctgcagccggtaattacgagaaaatacccagtctcgccatcagttttgctaaccggtacttgaaaatgggaaacggggaacttatccaacctccaa

SEQ ID NO: 257951 - DNA, 122 bp, Homo sapiens
caataggcatggggaacaggatcttagactgggctaagccgcctttggtctggcctggtgcgcctgcgaccactcctccgtcagtcatcggtgatgaccaatcggcgcaggaagggggaggc

SEQ ID NO: 257952 - DNA, 122 bp, Homo sapiens
agagatgggtcagtagccctttaagtatcctttaagtatgcctgtcaagacacctacccccgcattccaagcatacttaccaagagttatgacatctacattctgtaatcatgatgtcccta

SEQ ID NO: 257953 - DNA, 122 bp, Homo sapiens
ttggatcctccctccccctctctttgtacatttccctgactccattgcttttgctaatgtcgaatgtggcttttgttccgggccttgggtttgggcctataggaaagtggcaaatagaacat

SEQ ID NO: 257954 - DNA, 122 bp, Homo sapiens
tgagtgccaagcacccttgggcactcagcaccatgctggcagcgggacagtcaatgggagcgaggcagacgtccctgcctggatcatcaggaacgagtcccacggggcggctgtgaggtagg

SEQ ID NO: 257955 - DNA, 122 bp, Homo sapiens
cacctgtaatcccagcactttgggaagctgaggcaggtggatcaccagagatcaggagttcgagaccagcttagccaacagggtgaaaacccgtctctagcaaaaaatacaaaaattagctg

SEQ ID NO: 257956 - DNA, 122 bp, Homo sapiens
tccgtgcctcattttcctcatgtgcaggatagggtaaaactagcacctacctcctagagacgctgaaaaaattaaatgagatactgcatgtaaatcacctaaaacacctaactaggtataga

SEQ ID NO: 257957 - DNA, 122 bp, Homo sapiens
tttttttttttttttttttatttgagacaagatctcgccctgtcgcccaggtcggagtgccgtggtgggttcaggctggagtgcagtggtgggttcaagtgattctcatacctctgcctcct

SEQ ID NO: 257958 - DNA, 122 bp, Homo sapiens
gcggccgcggcgcaagacgggaggactggctgggcgggccgagtatcccggcaggcagcgcgcgccgcccggccgggcgagggctccaggccgggacgcggggacgtggggcggggccaaga

SEQ ID NO: 257959 - DNA, 122 bp, Homo sapiens
gatctccaggagtggccttcgtaggagggaacacgtactggggcctcttccaggcgacgacgtctggagggtgatctctccatcttctttctctcggttcacacgccacgtgtgcaacatcg

SEQ ID NO: 257960 - DNA, 122 bp, Homo sapiens
gcggggctgtagccgccccgggaccgccctgctcaggcgccgtggggttcggcgcggctacgtgcagaatccgtctagctaaaatgtaatttcagattggacaagtactgtaagtgaccctc

SEQ ID NO: 257961 - DNA, 122 bp, Homo sapiens
cagctccttcccgccgccgccgccgccaacgggaggctgggggcactcccgaaataggagcggaagccccgacccacgccgccctccgccgcagggacgcccactcgccaggtgaccgcgtc

SEQ ID NO: 257962 - DNA, 122 bp, Homo sapiens
ctgcctgtggctctctccaaagcccgacttctggccatcctatgatctgcctccctcctccgcctttgttcaattcagcaggtaattgcttcacagccaaagcaaatgtcaggatgataatg

SEQ ID NO: 257963 - DNA, 122 bp, Homo sapiens
ccccaagcctgcctcgacacccagacctgcccaccctgttcccaggcccgggcacccacgcgtcctccaaatgtgcccagcaggtgcagccactgctagaagtgcactagggcaacagtcag

SEQ ID NO: 257964 - DNA, 122 bp, Homo sapiens
aagaaagacatctgctcaaacaagaaagaaactgtccaagtagttgctgtggcattggcccgtgagctgtcatttagtgaggagccctaacattatgaatgggagctggaaaacaatcaggc

SEQ ID NO: 257965 - DNA, 122 bp, Homo sapiens
tagaacccagtcagagggcagcttagcaatgtgtcacaggtggggcgcccgcgttccgggcggacgcactggctccccggccggcgtgggtgtggggcgagtgggtgtgtgcggggtgtgcg

SEQ ID NO: 257966 - DNA, 122 bp, Homo sapiens
cttttgggcatcatcaacataggattcaaaagatactcagcatcagagccgtaacagtctcgtgactgacaaactctaaataagtatagcaaataatgaatccgctagcgagtggcttttca

SEQ ID NO: 257967 - DNA, 122 bp, Homo sapiens
gactattttgcgaaagattctttacattgcaaacactttcgttagggacagtgccaggggcggcagtgagcgggatctcaaacatcctttactttctctttacattgtgtctgtaaactcct

SEQ ID NO: 257968 - DNA, 122 bp, Homo sapiens
tggtaagcttcttgttagttcgttggttcaactatagtacccttcagctaagcacacggccgccggccctccctcctctcctcatccagcactagcccccagctgtctctttcctcccggtg

SEQ ID NO: 257969 - DNA, 122 bp, Homo sapiens
tggacaatcagtggcgaagcccctgagttcagggccctggtctcctgcggggttccccttcgctcctaaaaagcgccagtccaggacagctcggagctgcgcgtcggaccacctagcaggcg

SEQ ID NO: 257970 - DNA, 122 bp, Homo sapiens
gttctctcgtgaatccttgaagcctcactttaaaaaatatatactcactcctttgtccatcgtaaaccttgatatttgtaaatatcgataataggaactttgaaaaaacatacgcccttaga

SEQ ID NO: 257971 - DNA, 122 bp, Homo sapiens
tcagatgttgctctgttccctggtctagaccatcgcaacaaaactgcttggccacttggccgctgtttttctcaagaaacaagtaacttcactgagcaaaaatgtaccagtgtggcatttgc

SEQ ID NO: 257972 - DNA, 122 bp, Homo sapiens
ccaccccaccccacctgctgtgccgcagggcctccctcggagaccgcacccccccccccccggagatccctgaccctgagtctgtcctcggccccactctatgggctgtgcggcagggcctc

SEQ ID NO: 257973 - DNA, 122 bp, Homo sapiens
gtcacacaggctagagtgcagtgccacaatctcagctcatttctcagctcattgaagcctcgacctcctgggctcaagcaatcttcccacctcagcctcagcaataggtgggaccacaaaca

SEQ ID NO: 257974 - DNA, 122 bp, Homo sapiens
ctttatgtgagactggggccacactaataagtattgagcatcttttaaatgctgtggcaccgtgagagatgcagaacgaaatcactacccacagagcttttgcaggttagttgaatttaggt

SEQ ID NO: 257975 - DNA, 122 bp, Homo sapiens
ttccatattttttggcgtttttagaagatggtcacggcccactttcgcttttcagaggaccggaaagccttaacagggagttttgaggaatcactaaggtaattcaatttcattgagttcag

SEQ ID NO: 257976 - DNA, 122 bp, Homo sapiens
tacagttaacatgtttgtcactttcaaaaagccacaaatgaatttctctgaaaaacccaacgtctttataaaaaaaaaaaaaaaaaattccacaaaattggggctctgccaaaacgtgaatg

SEQ ID NO: 257977 - DNA, 122 bp, Homo sapiens
ccggcaatgcaagtgagtcctgtttgacctcgtcaatcatcgcagactgtaaaggtgactcggatgctcaagaaacgagcatacccagcagtgggccccagacttctcgcaggcccaggtcc

SEQ ID NO: 257978 - DNA, 122 bp, Homo sapiens
ccctcgaaccaggctcccttggcgcgtggggctctcccggcgcttggtcccgacccgcgccgcagtcaggataccacggcaatctggggtcgctttgtaaggagctccgacctccgggcagt

SEQ ID NO: 257979 - DNA, 122 bp, Homo sapiens
cggggttgttcctgcctgttcggggttgttcctctctgttctgtgttgttactctctcttcggggttgttcctctctctttggggttgttactctctgttcggggttgttactgcctgtttg

SEQ ID NO: 257980 - DNA, 122 bp, Homo sapiens
ctgaaggaaagagtagacgaaccggcggcggcgcccagcccggggtcctcaaggaggccccgcccactggccggaacccgagcccgcccctctcaagggactctccccgggcccggccattg

SEQ ID NO: 257981 - DNA, 122 bp, Homo sapiens
agcccgtccgacgcgtacgctgcaggggccttcaataggggctgtcgccacctgcacccgcgccgctgcggttcgcaggaaactcctgtggcttttcggaagcacaatgcagaacgcccggt

SEQ ID NO: 257982 - DNA, 122 bp, Homo sapiens
ttgaaagaggtagagaaaagtcaagttgcagtcccacacagagcctctgggcgccgccgtcggccagtgcagagcaagcgctgacgccggggatccctcagcctctagcctgggattccctg

SEQ ID NO: 257983 - DNA, 122 bp, Homo sapiens
cagtgtggcaaaggtcagtcccttaggtagctctgtgcttggggcaaggcagaggggccccgtggcctgggaggaacacatcctctcctctccagcagaggagatctgtggggccaggctgt

SEQ ID NO: 257984 - DNA, 122 bp, Homo sapiens
ctcctgcacagccgctcagcattccccggctgcaggcgcaaataaagcggagggggcgcgcggagctcctgctcaagggtccacttcctactctcgaagctagggaatggggagggatccgt

SEQ ID NO: 257985 - DNA, 122 bp, Homo sapiens
gcccggccgccccagagggctgcgcgcgggctgggcggggcggctgggggcggggcggtgcgcatgcgcgtgggcccctcccgcgccccgactgcgagccgggcggacggcgccgtctgggc

SEQ ID NO: 257986 - DNA, 122 bp, Homo sapiens
cagttacaccatctgtatttggaagtctgtcagacacattctcatggctactacagtgttcgataaatattaatacaacaatcaactattgagcaactaggcaccaagtgccatgctctgcc

SEQ ID NO: 257987 - DNA, 122 bp, Homo sapiens
gcctttccccgcaaaccgcaggtccggcgaggactcgggaccccgaactcacccagctggcgagggagaagacacccagcacagcccccatggtgacgccagtgatggaggtggccggtcct

SEQ ID NO: 257988 - DNA, 122 bp, Homo sapiens
ctcctcctctgctgctcaagcagacaggcctgaaattctactgaaactccagggatgacacgccccgttcacgccctgggtcttctggtcttcagcgcctctcatcctcaccgccggttcca

SEQ ID NO: 257989 - DNA, 122 bp, Homo sapiens
ggacacagttttctattgttttgtttacctttgtctggtttcccttcccacccccatgcacgtgctcatgtgtgtttaattaaacaaagaagagttccaggaagttgggaatgtcaaatggg

SEQ ID NO: 257990 - DNA, 122 bp, Homo sapiens
cgggagggccgagggagaatccgggtggaagtcgagaaatccagccccgatagcagcgctcggtcccgccccggcccccgccccggggcgctcaccgcacgcccgccggccgccccggcctc

SEQ ID NO: 257991 - DNA, 122 bp, Homo sapiens
caggggaggcatcagaagtgggaagagaagctcaggtgagcaaggggaacctcacctccccgtctgtaggcacctgcttgctagtatgtgcttggtctggctctgagtgccacaatgaaggg

SEQ ID NO: 257992 - DNA, 122 bp, Homo sapiens
gccgctgctcgggccccgcgcaggcacacgggacaaggcgaagccccgacgcccagagggcgcttgggcccagcacacccgcgcacagcccaggaaacgggaaaggccactgtctgcttccc

SEQ ID NO: 257993 - DNA, 122 bp, Homo sapiens
tggggagggcgaggtctgctctgaagtcaccaagctcctgatcttagaagagatggtgggcgcaggctctggaggctcaagcggaggaggggaaggaggcgagtccggaaaccctcggccaa

SEQ ID NO: 257994 - DNA, 122 bp, Homo sapiens
acacacggctgtttcttacattggctcaagtttcagggatgagtgtgggcatgagtgccacggggaacgaggtgtgctcgagcctcctgagcactacctgaaggagacagaccgaccagtcc

SEQ ID NO: 257995 - DNA, 122 bp, Homo sapiens
tcatgtttttggagtcatgttatatgccccgagtgctttttcttcttggcttctcagctccgttttagttgggtgtaaaaacaataacccaatttgcttggtcacctttcacaacagtattc

SEQ ID NO: 257996 - DNA, 122 bp, Homo sapiens
tcggttcttcctgcgaggaggagaggagaaggagtgggggaggggaggtgggcaaagggccggtgggggaggaaaggaagaaatgtgcatcagtccttcggtagcctccaaagcgccccact

SEQ ID NO: 257997 - DNA, 122 bp, Homo sapiens
acgctcaggccagagccttgctggatgtgcccttggtgggacttgggatggaaacccagacgttttactccccgctctgagcacatcgctatccctccccgcccctcaccaggctgctgaat

SEQ ID NO: 257998 - DNA, 122 bp, Homo sapiens
tgtacgattacctgcaggagcccctcttccaggctacccctgatctcttccagtactggtcgtgcgttacccaaaagcacacaaaactcgccaagctcgccttctggctcctggcggttccg

SEQ ID NO: 257999 - DNA, 122 bp, Homo sapiens
acgagtgcacctctcgattggagacagggcattccgtggcgctccccaaacggtgacaaacggtgataggacagggacaggccaactgaacctcgcagagaaagcactgggccctatccctt

SEQ ID NO: 258000 - DNA, 122 bp, Homo sapiens
atcgccgaccccggggcctgacacccggagctgcgggcctgggtggggtgaagctccctccgccccagcccggctggtaagaagggaggattccgcccttggagacgacttttaaaacgagc

SEQ ID NO: 258001 - DNA, 122 bp, Homo sapiens
acatctgaatatcagaaggaacagactccagacgcgccacctcaagagctgtaacactcacggcgagggtccgcggcttcattcttgaggtcagtgagaccgagaaccgaccaattccggac

SEQ ID NO: 258002 - DNA, 122 bp, Homo sapiens
gacaaggcttgtggggttcggagctggtcgtcgtctgggctctggcctcctaaatgcgatcgctttcaagcccttcattgtcaattttgctagaatgagccactcgtggggtaggacgtggt

SEQ ID NO: 258003 - DNA, 122 bp, Homo sapiens
ccaccgcaccccgagccgcaccgcctcctgcgcggtagctgccagcccgggccgcggcggcgcgccctgctcaccgtgacaccgtacttgagcgcgatgccctgcagcgtgtcgcccgcgcg

SEQ ID NO: 258004 - DNA, 122 bp, Homo sapiens
ccgctccaggcaccagcccagcagctcccccgaactccccaggagctcgcgggcgagcaacgccacagcccagagcgagctccgcggaacccccagccccggggaaggaagctcgactctcc

SEQ ID NO: 258005 - DNA, 122 bp, Homo sapiens
taccgatgcacaagggaaggctggcttgggtccagattcggcgggagagtggaaacgcgacgctggccgacttcagccacaaaggcaatttctgcccagggctagcgttcctaagagggggc

SEQ ID NO: 258006 - DNA, 122 bp, Homo sapiens
gagaggagaagagccccgagctgccaggagggccagactcacgcatggtgtcctgggagccgtgtcaccccaggcacgagccccacctcccatagggctgcaacccccttgctgctgtgtgt

SEQ ID NO: 258007 - DNA, 122 bp, Homo sapiens
agtgaataaaagatgggtcccttccagcttaatgcttatggtcctgagttttgttcactccggtaaaaatatattattattcccattttgaagatgaggaaaatcgaggcccacgaagagtg

SEQ ID NO: 258008 - DNA, 122 bp, Homo sapiens
gaggctctcgctgaaaccagtcccaggctccacagagtcagatcacggcttcacaccagtcgttctggtcacttaggcgttcgcgtgagcgctcaaccccttaccgccacctcatcgtcact

SEQ ID NO: 258009 - DNA, 122 bp, Homo sapiens
cacacgcccaccttgtccacttcgtcgctgctgctttccaccacctcgtaggcgtcgatgcggctcaccacggccgccagccgctgccgctcctgccgctgccgcatgcacgcgttcacgtg

SEQ ID NO: 258010 - DNA, 122 bp, Homo sapiens
accagtaagttagaaagctcaatagtaattttgttaaggtggtgaggataggagaagagacgttgcaaaaatggatacccaaacaaccagtacatttatgaaagggtattcaattccatttg

SEQ ID NO: 258011 - DNA, 122 bp, Homo sapiens
cgccgctcccgcagccgccccgccgcccgcccggagccccgcgtccctaggcctggctcccgcctgcccgagacccgcccagcctgccccgctcagccgccagagaagatgcggctgctccc

SEQ ID NO: 258012 - DNA, 122 bp, Homo sapiens
aggaggcccacccttattttctcttttcttcacgcaggaatcaggtccctggcctgggggcggcaaaaggagatggcggtgggtcaagtgggcgcgcaggctcagacctggggcttctgagc

SEQ ID NO: 258013 - DNA, 122 bp, Homo sapiens
gcatccatttcataggcttggattgagctcttcctgcttatgagcacttccgaaggcaggcgccatcttggtgaacaccctgtatgttatgtgaggggccatgctcccaatagtgtgtgcat

SEQ ID NO: 258014 - DNA, 122 bp, Homo sapiens
aggctgaggcaggagaattgtttgaacctgggaggcggaggttgcagtgagcctagatcgcgccacttcactccagcctgggcagaagagtgaaactctttgagagttttttttgagacaga

SEQ ID NO: 258015 - DNA, 122 bp, Homo sapiens
atgtttattggaggaaaaaagcactcagttgttccatgagttgttttgtactagactaaccgagtgctggttaaagggagggatgtcagcataaaaatgtcattccctcatcttcagtgtat

SEQ ID NO: 258016 - DNA, 122 bp, Homo sapiens
ggggcggggccaccggggggcgggacttgcgggtcccctggggagggctcacgggaggggcggggctaagagagcacgaccctctccggagaaaacccagccccgacaccctccgggcggcc

SEQ ID NO: 258017 - DNA, 122 bp, Homo sapiens
ggttgcagttcctctgcgtgacgtactcgatggtggtggactccatgagcagcgcgtagtcggccgtcagggccctctggatgccctcctcgttgttcttcaccagcgccgatggcttgctg

SEQ ID NO: 258018 - DNA, 122 bp, Homo sapiens
tcctgagagaaaaacgctcattctgataagaggaaattaacagatggtgaccaaactcaacgcacccaggaaagccatcaaatgatattacttagagaaaggaaatcatgaacatggtttga

SEQ ID NO: 258019 - DNA, 122 bp, Homo sapiens
ccttggttggggggcttggggggaaagaaaattgtagggtagggtacaaagttgcagttacgtctaatacatctagagatttaatgtacaacatgaggactagcgttaataattgtgttagt

SEQ ID NO: 258020 - DNA, 122 bp, Homo sapiens
aaatgaacaagtgtatgatttggtgtaaaatgaaaaatcagcccaaattgcaagccaagccgccggtggttatgaatggctgctgtgactccgccccaaggttccccaggagaatggattta

SEQ ID NO: 258021 - DNA, 122 bp, Homo sapiens
tttaacattcaaggcgcgttatagtcttccagaattcttctggggaattgtaagcaaaaacgttcactgaccactagtttataaaagagggctgttagctagtagtttaaataagtcttggt

SEQ ID NO: 258022 - DNA, 122 bp, Homo sapiens
caacaaaatgccagtgtgggagaaacacccccatcgtcagcaaaatgccagtacaggagacgcaccctgcaccccaagtcagcagattgctaacaggagagacagtgccacagtcagcaaaa

SEQ ID NO: 258023 - DNA, 122 bp, Homo sapiens
cgccgcctcctcccgtcagcggccggggctgtgggggggtgagatgggggcgtttgaagacgaagtggggggggcaggctccccccaaaatccaagaagaacggttgctcagggatttggcg

SEQ ID NO: 258024 - DNA, 122 bp, Homo sapiens
tcaagcgatcctcccatctcagcctcccagtgttgggattacaggcatgagccatcatgccggcccagagcctacattgttaatgacaccatggcacactgcttagaaatacttgggaggcg

SEQ ID NO: 258025 - DNA, 122 bp, Homo sapiens
gagcccgggaggcccagtcaaaccggaagagagccagaggcctccctggagtcccgaagacgatctgaaccaaggagcccagcgccctctagcgggagacaagctgcttcgcggccctggtc

SEQ ID NO: 258026 - DNA, 122 bp, Homo sapiens
cttgcccggactgtctgggaatcccattgacaggtcatctcaggttcaccatcttcctgtcgtgggctcctccagggaggccacccgggagcaattaaactgggccacaccagccacctccc

SEQ ID NO: 258027 - DNA, 122 bp, Homo sapiens
gttcaaaaaataataacaatgtattgggtggttatagtttataatagggcaaatggatgacggtgatgttaaattgggcaggagggaggaatgctgaacactgggttatatgagcattaccc

SEQ ID NO: 258028 - DNA, 122 bp, Homo sapiens
catcagtttcctcatttgcaaagtggtgacagcaccaaacccacagggctttagtgagcacgaagtggaataccaaatgtaaagaacccaggagaatgccagacacatcgctggtccacgat

SEQ ID NO: 258029 - DNA, 122 bp, Homo sapiens
aactactgtttcctgaaacttctgttatagatatttatctttatgcatgtgggtataagccgtattctgacatcacatcggtttttttttttcctgtgagtttcagtcaaagaagtttgagg

SEQ ID NO: 258030 - DNA, 122 bp, Homo sapiens
gcggtcggaagcaccaggctcggagcgggcggcctcgtggctttagggactggctcgggccgcgcccaccggtggtggagcggagggcgcggccaaaggtgcccaacgccgcccacgcgctg

SEQ ID NO: 258031 - DNA, 122 bp, Homo sapiens
tggctgcagcagccgccaccagggctcaccaggcaagggctggaagtggggtggctgtagcgaggacatcgagtttggtgggatggtgtctcgggagttcgccgacgcccgggagaaccggc

SEQ ID NO: 258032 - DNA, 122 bp, Homo sapiens
gcccctgtgggtgagaggcttagaagtcccagaaggcaagtgccagctgtggcttccacacgtgctagtgacacgtgcgcctccgtttcctcttctagcacataggcatcaccacgtttccc

SEQ ID NO: 258033 - DNA, 122 bp, Homo sapiens
tgcaaatacgcatgctgacgttacagatcatgtgggttttggcgtagattccccactgatcgaggcattttttttccctttttttttcctttttttttttcttttaaaaattttggccatcg

SEQ ID NO: 258034 - DNA, 122 bp, Homo sapiens
tactgttatgtccatttcgtgggtaagaaagctgaggcccacagagtcatgtagcatgcccgaggtcgcgcctttaataaacacacaggcagacctcaaatccaggcccatctgagtccaaa

SEQ ID NO: 258035 - DNA, 122 bp, Homo sapiens
cgtgttacaaaatcttgtttccttcattccgtttctattcttcaagttccttaaaagctgcgccattttttgagtgaaaaatgtgcgtaacttctgatatcagcgtagagaggtgagggagg

SEQ ID NO: 258036 - DNA, 122 bp, Homo sapiens
taggatttcagctccacctgactggggcccagccttcccagcccacgtccccacaccggccgctccatgtgaaaccggtcatgtgagcctgtttacagcagagcagctggtgcaaccatcaa

SEQ ID NO: 258037 - DNA, 122 bp, Homo sapiens
gatccccgcgagcagggggtggggccaagccggcagcccctgcctccggggaggccctaacgcgcgtctccgggtccctcctcccaccgcaggcccttcctcgtgctgccgccgctgatgga

SEQ ID NO: 258038 - DNA, 122 bp, Homo sapiens
agggtgccgggacgcaagcccggggcaggctctcaactgcccccgcccttgcttctcagtcgccctgcacacagcctcccccgaaaccaaaatcccccaggagagtgtggtacctccattac

SEQ ID NO: 258039 - DNA, 122 bp, Homo sapiens
ggaaatatcttcatataaaactagaaagaatcattccccaaaactgcatggtggtgtgtgcgtcaactcacagttttacgtttgttttcatagagcagttgggaaacactctgtttgtaaag

SEQ ID NO: 258040 - DNA, 122 bp, Homo sapiens
ctcctcctcaattgttctttgcacaactgacgctcagaccccggcttcaggaagaggccacgtggtcaacagggacattcctccatggcctgtccccagatctgctggcgctgagcaacact

SEQ ID NO: 258041 - DNA, 122 bp, Homo sapiens
gttaagcttttgtacctttaagctcaaattttcattgctggttgtttgatattgtttgtgcgtgtttttgtatatgtgtgtggaaagacagataaatataaatacatgtactagtcagagct

SEQ ID NO: 258042 - DNA, 122 bp, Homo sapiens
ccacgtccaggagggtgaacatttttcgtgcctgggctcccgggatgtccagctcgagctcgccatggcgtgcccctcgggtcacgctgaacagcacctgggatttgcgcagctcagcctcc

SEQ ID NO: 258043 - DNA, 122 bp, Homo sapiens
tctcgaactcctgacctcaggtgatccacccgccttggcctcccaaagtgttgggattaccggcatgagccacccacgcccagcctcagtacttcatgaggttttagatgttcattgcctgt

SEQ ID NO: 258044 - DNA, 122 bp, Homo sapiens
aatgagatcagtcaaaattacttttgaagagggcaaacatgttgttaggtttcttgctgtcgttctggatgttcagcagcaggctcatttgaagtcggactcaaccctgatggaaactcatt

SEQ ID NO: 258045 - DNA, 122 bp, Homo sapiens
atctttagggccgctcgggttaatatatgtcgtcagaggctcctcacgccaatcccggggcggcaggggcggcgcctcgagctctcggcaataaaactttttgatgttcacgttgctaattg

SEQ ID NO: 258046 - DNA, 122 bp, Homo sapiens
ctgagatctgctaagcttccctaaacttgtctacatgaatgatccggaacttccacgcttcggaacactgacttccattctttggaatctgtgcttccctggtggccgtcctggaagaacct

SEQ ID NO: 258047 - DNA, 122 bp, Homo sapiens
gccccctgcccaaccctgcccagcgcgcgggggtcggcgaaggcgccgcggacgcaccgacggctgaagagcggcgatgcacatgcactagcagcaccccctaactcactccctccacatcc

SEQ ID NO: 258048 - DNA, 122 bp, Homo sapiens
ctggatctcctgacctcgtgatccgcccgccttggcctcccaaagtgctgggattacaggcgtgagccaccgcgcccagcctcctagaatgttttcattaccccaaaagaaacctgtgtcta

SEQ ID NO: 258049 - DNA, 122 bp, Homo sapiens
gagacagaggtggagggcttgtttgaatgcaccaagccttgcaggctttcctcctccccgcgctggccgggtaggttctcttcagttcctgatgaggcaaacgagaacaaagcagtcgaaca

SEQ ID NO: 258050 - DNA, 122 bp, Homo sapiens
gagggcagagaagaaatcaggtgggggaggtcgaagggaagtgggaacggcgggcacagacgtccctgagcccggatcctggtgccctcaccctaagccagcagcccacgaccacccagagg

SEQ ID NO: 258051 - DNA, 122 bp, Homo sapiens
gagtaaggttttgctgtctggaaagtaattattcttttcactcatataacctggcattctcgcaatgtatcagcttcaggttttccttgagaaaaatcacaatgtggtgcatagcgttgtga

SEQ ID NO: 258052 - DNA, 122 bp, Homo sapiens
acagacatggacacaaaatagtttctagaacacttgcctgaaaagcaaatagaggccgggcgtggtggcccacgcccgtgatcccagcactttgggaggccaaggagggcggatttcttgag

SEQ ID NO: 258053 - DNA, 122 bp, Homo sapiens
acccgtgtcctgggagtggggtgatatttgactctctagttccccgttaggctgggtcttcgaagctacgtctcagtttccctcttatttccccctcttcccaccgggccacgcaggcgggg

SEQ ID NO: 258054 - DNA, 122 bp, Homo sapiens
cggagggtggggtaagggccgagggtacaggagtggactttattgttcacattaactcaccggtgcttacagaggaccctcgattcgcgaccccctcccccagcaggtgtctgtgcagttcg

SEQ ID NO: 258055 - DNA, 122 bp, Homo sapiens
gagtcattgttgctccacattcccccaggccccgccttttccctccaggcatctgtgaaacgcacagtgcacacccagctgctctggcctggcccccagcctcacctcagcaccatttcctg

SEQ ID NO: 258056 - DNA, 122 bp, Homo sapiens
ttgtggggcagtggtggggtcatggctgagtgagtggcggctgaagcagcccctactctccgcccacgtgaccgtctcctttgctccgaggcgagggtgattcctccttcctggcactctgc

SEQ ID NO: 258057 - DNA, 122 bp, Homo sapiens
cctgggttcccactgggccaccggactctcattcatgaggatatgcaggttggcccagggcgggaggtccaggacagacccgggcccatcagtctcgggctcccttcacagactacacagaa

SEQ ID NO: 258058 - DNA, 122 bp, Homo sapiens
ccattgcctggcgtgtcctgacctgccgtccgcggcctgctgctccttctctctgcaggccgctgctcagccggccctgctgcctgggcggccactgcctgatggaacctccctgctccaaa

SEQ ID NO: 258059 - DNA, 122 bp, Homo sapiens
atgaagagaaaactcacaaggccctgtagggctggaccctacacccctgagccaagcacacgtgactccatgacccagcagccccaacagaaatgtgtacacgctcgtgcagtggacgcaca

SEQ ID NO: 258060 - DNA, 122 bp, Homo sapiens
gaataattttgcgatggttcccatgatttgagggaaacacatttttaccatgattggattcggtggcttctaggaatcttatgtgaattaagcaatcttctcgccttggcctttcgaagtgt

SEQ ID NO: 258061 - DNA, 122 bp, Homo sapiens
gcggtgagaagggcaacctttttctgatcgctttcccaagcaggcaggaatctaagtgtccggaaacgccaggagctggccgccaggtgagcggaggacgaaggggtcctgacttctagggg

SEQ ID NO: 258062 - DNA, 122 bp, Homo sapiens
ccggccggcctctgctcgctttctgcttggattaccaacagccactgggcttggggagatcggccgggccgcaggcctagccctgctgagcaggcgtttagtaaggaccacaggactttagt

SEQ ID NO: 258063 - DNA, 122 bp, Homo sapiens
tggggggaaaaaggattagaaaaataagttatttaacaagttactagctctgtcttcccccggttccatttgttcacaaaatccttttttttcccccccaggtgctccaccccctccccact

SEQ ID NO: 258064 - DNA, 122 bp, Homo sapiens
aagccttcctgccccaggggttgccagaacatgccggggcgggaggttgtggggtctacgcggctttcctaacacgaatctttggtcccccccagtctttttctcatcttcagcaaggccag

SEQ ID NO: 258065 - DNA, 122 bp, Homo sapiens
tctattaaaaatacaaaaattagccgggtttggtggcaggcacctacaatcctagctaatcgggaggcggaggcagagaattgcttgaacccgggaggcggaggttgcagtgagccgagatg

SEQ ID NO: 258066 - DNA, 122 bp, Homo sapiens
agccgcaccggagcagcggctggattgaacgccccagattggggcccgagatgtggccctcggtttcctttcataaaggagttgtgtccccagcccttccactccagtaaagaactgaattg

SEQ ID NO: 258067 - DNA, 122 bp, Homo sapiens
acacagtgggtacgtaactgctttgtttttaaattatcaagtccaacctgcttgttttaccgatgaagataccgacatacaggttgaatgagctgtctaagctcccacagctttcattcaaa

SEQ ID NO: 258068 - DNA, 122 bp, Homo sapiens
ggccccatctcacctgtgaggccgctggtgtggggagagagcacaagtacagtaggcattcgggccatggttcctgcttatttgctgtgcagctttggacaagcttcttagctttctgagcc

SEQ ID NO: 258069 - DNA, 122 bp, Homo sapiens
aggctcgccccccccccccactttatttctaatacgaggtggaaggaggaaggtgggtggcgaaatagagctgcaaaagcgtccagtcctagtctttgcatagtcagccgggtcacattgaa

SEQ ID NO: 258070 - DNA, 122 bp, Homo sapiens
ggtggacgtcatggcaacagccagagggcgtgagacaggttgcaggctcagtgccggcaccggtgggtggcaaaggggtgcacagaccgcactcagtgcctatgctggtgacaaaagaaaca

SEQ ID NO: 258071 - DNA, 122 bp, Homo sapiens
cagccacccgcatcagactcccacgagacccacctgctggccacacgcatcagactcccacgagacccacctgctggccacacagacgtgctgccctttggggtccagctcggacccctgag

SEQ ID NO: 258072 - DNA, 122 bp, Homo sapiens
accccgttcattagctcccatgtatttcactaccaggattgtaaccgcttctcaccttctcgtctctcctctgtgtccccctcttctgccaggcgggtgccccggtgatgactggtgcggga

SEQ ID NO: 258073 - DNA, 122 bp, Homo sapiens
agctgcatgtaattaatgttcacagtttggtgggtttggacaagtgtatacatacactcacgttatcattactacaagccaggtaataaacatatccattacctccaaattttccttgtgtc

SEQ ID NO: 258074 - DNA, 122 bp, Homo sapiens
ccgaaagcttggtggtttgagcccacccagggatgcttattggaacttttaaagcatgcacgtattgtcaatcactacataaatggggaagaattagccactaatttatgactgatccatgt

SEQ ID NO: 258075 - DNA, 122 bp, Homo sapiens
gactgggacagagcccggcatttagcatgggggtcttttcagaaaagctggctgacctcgcgtcgcaccatgccaataccatgaccagtgagactctctagttttgacccacatggttataa

SEQ ID NO: 258076 - DNA, 122 bp, Homo sapiens
aaatcccaggactgagcaatgggaggagcattttaatttacaaggcagaacacagcttagcggggagaagacagagctctcatcctcattgaagcaaaacagcaaatacatgtcaggttatg

SEQ ID NO: 258077 - DNA, 122 bp, Homo sapiens
ccaatgtggcgaaaccctgtctacaaaaaatacaaaaattaggccgggcatggtggctcacgcttgtaatcccagcactttgggaggccaaggtgagtggatcacaaggtcaggagatcaag

SEQ ID NO: 258078 - DNA, 122 bp, Homo sapiens
acttccggcgtgagcgggctggggtcccgcccccctccccaccggaagtggagtcccgatcgtagcaagccaccatcttagtcttaaagggagagtgcaccatttcatgggcggaggtggag

SEQ ID NO: 258079 - DNA, 122 bp, Homo sapiens
ggacgagcagcccggtgaacagcaggggaggccacagcagggcccaagaccccatcttggcggctgtcacctggcaggagggtctgagcgggtctggcgtctaggactggcgcagttcctac

SEQ ID NO: 258080 - DNA, 122 bp, Homo sapiens
tcaaggcccagggctcctggctcctgccctcctgcccatcccatctgaaggaggcagcctcgggacgggcaggctcaactcatggccttacttacacgcagtaagaactcatggccccagct

SEQ ID NO: 258081 - DNA, 122 bp, Homo sapiens
cccggcggccccgggtgggtggcctggcgggacctgaggcgggcgcgccttcccgggaggcgctagacgcaagcccgcggctttaggcccgtcgcgaggggcggaggccgggccagcgcagc

SEQ ID NO: 258082 - DNA, 122 bp, Homo sapiens
ccccgccggcgctcagaccacaattgtgggagccgccatcttgagaccgtcccgcttccccgcccagcgccttagtgcagccgccgctcccgaaacagcctcgacacacctaacgaatggag

SEQ ID NO: 258083 - DNA, 122 bp, Homo sapiens
acaggtgacaggtccgacatgtttacttcttactagcccaaagaggtcttcaaagcaaatcgcatcataacagtcacccgctcctgcctctttagggctgaccagggtcgcctcctggactg

SEQ ID NO: 258084 - DNA, 122 bp, Homo sapiens
aaattcataactgcctggaggcaaagcagaaacagttgcgtgtcgcttgccgagagaaaacgttctgagaaataggtcctcaggtgactctgctgctgtgtgagcatgacggagtgtgcgca

SEQ ID NO: 258085 - DNA, 122 bp, Homo sapiens
ttaccactgtcctttcttaactagatggaacagacttcaaagaaagtaaccatggactatcggcagggctctatctctggggctgggggataaggggttgtctgctcagaggacagtgggtc

SEQ ID NO: 258086 - DNA, 122 bp, Homo sapiens
tgatgaaaatctattgacatatgtattaaaaagaaattttagcttattctgggttaaaatcggtgaatggtgccctcttataacccatgtattgattcaaaggaaatggaacttccttgcgt

SEQ ID NO: 258087 - DNA, 122 bp, Homo sapiens
cagtgagatggttcagcgttgttcccaaggaactcatctccctaaatttccagtctcaagcgccgctttcattccctgccccgagcggcgctccccgctccgtgcacgcatctccgctgagg

SEQ ID NO: 258088 - DNA, 122 bp, Homo sapiens
gtaaacagcactgcttggtgccaaggagcgaggcgcgttggcgggggcttggtgacctggcgtgcgcactcccccagcgcccgccgccccgcccgctgcccgccccttcccacccttcccag

SEQ ID NO: 258089 - DNA, 122 bp, Homo sapiens
tccaagacggcattcctaagagcaaatgagagaatcaagtgttgaagggcaggaccacatcgcacagcactggcatgaaaagtgcctaacagagaactcaggaaagctgctacttgttttca

SEQ ID NO: 258090 - DNA, 122 bp, Homo sapiens
gtggccattttcgaaaatcaagatccttagtgtgaccctatctaactggccttccatagacgcctcccttgccggcttctggaccacacagacattgtccttgcacgcatgcccaagctcct

SEQ ID NO: 258091 - DNA, 122 bp, Homo sapiens
gaggaggacgaggatgaggacaccagcgatgacaactacggagagcgcagtgaggccaagcgcagcagcatgatcgagacgggccagggggctgagggtggcctctcactgcgtgtgcagaa

SEQ ID NO: 258092 - DNA, 122 bp, Homo sapiens
agaagaatattcagcttttgtgacgcttcctcaccactcttatttatgtagtcaaggtaccggatgtcttatctatatttacatagatattttatgtggcccccgctagtttgcaggaaagt

SEQ ID NO: 258093 - DNA, 122 bp, Homo sapiens
cctggtggggaggcagctagtactatactcagccagccagaagtatccagtccctaagaacggattgccccacaattcccaggccctgagttgctatatattcctcttccttactgctgttt

SEQ ID NO: 258094 - DNA, 122 bp, Homo sapiens
gccgctcggtgtctgtgaaggccacgtagctgggggtggtgcggttgccctggtcgttggcgatgatctccaccttgccgtgctggaacacccccacacaggagtaggtggtgcccaggtcg

SEQ ID NO: 258095 - DNA, 122 bp, Homo sapiens
ctcaggatgctgtgttctcggcacattctatagctattccgaaaattacaagtgagatggcggaaagagctgggccagccaaggttagccagagccctgtcctgcaaatcaacatgaggcat

SEQ ID NO: 258096 - DNA, 122 bp, Homo sapiens
caggccagacaggaggcccctgaggcgctccccatctcaccccaggggcaaagccgggtccggggaccacgaaccagaccttcgccctacactgctcatactgccaaggagagaacgggagc

SEQ ID NO: 258097 - DNA, 122 bp, Homo sapiens
acaccctctctgacaccctgtggggacctggtgactctcggctacagctgaacttccgagcgacgcagcctttgaatgggcgagtgattgaggcctccttccctgctggagtggacagcagt

SEQ ID NO: 258098 - DNA, 122 bp, Homo sapiens
gttttttctaattctgccaactgatccctcttctgtgaaaactctcctatccttttacatcgtgtactttttttaaacagtaccatacattgccttttattagatttttttttttttccaga

SEQ ID NO: 258099 - DNA, 122 bp, Homo sapiens
gtctggcttaagatggctggttttttgtatctgcctctgcatttaacctggtccatctcgcgggtcacatagcctctacaaaatgagaaggggttcaataccgttaactccgggcctgggta

SEQ ID NO: 258100 - DNA, 122 bp, Homo sapiens
ttaccatggtcacacagcagcagagctaggtcagtataatccacaagtcattctcttaaccgctccgccgtaccgcccagaatgttcatctgcatctgggccagcctcgtcagtccgtgcaa

SEQ ID NO: 258101 - DNA, 122 bp, Homo sapiens
ctcaaaaaaaaaaaaaagaggcatggtggcatctacctgaagtctgaagtctcagctactcgagaggctgagacagagaattgcttgagcccaggagttcaaggctgcagtgagctatgatc

SEQ ID NO: 258102 - DNA, 122 bp, Homo sapiens
ataaataaattaattaaataaaaatcatttatgctgtgcctggccaggtctggtggctcacgcctgtaatcccagcactttgggaggctgaggcgggtggatcacttgaggtcaggagttgg

SEQ ID NO: 258103 - DNA, 122 bp, Homo sapiens
catcccccaggtacttcaggcacaaccctcctttggcagcgcagaagtcaagctagaggtcgtgaccccctggagtctcggtggtttcgggttggggagcagagcgggtggggcaggaccga

SEQ ID NO: 258104 - DNA, 122 bp, Homo sapiens
ccattacaaatatgcttaacctttaaatatttcatcactgaagaaatcccagccctacaacgttggaacagtaaaatattagtccaaggatccagtgagagacacagaagtgctagaagcca

SEQ ID NO: 258105 - DNA, 122 bp, Homo sapiens
ccaactgaatgcattaaaaaacaaaagtcacacaccactgtaccccttatatgtacacagcggtcggcaaacatgtgacaggtggaggtcctgaggcaccactgggagcttgtgagcggatg

SEQ ID NO: 258106 - DNA, 122 bp, Homo sapiens
cccgccattggctccgccctcaacaaacaagaacgcttggcctgtgcctgggtttgaacccggagacacatgcgcaaaacgggccgcgccgtccaataggaagcaagccgttagtgggctcg

SEQ ID NO: 258107 - DNA, 122 bp, Homo sapiens
cgggcccagaggagctgggagccgggccgcagacttgaccccgacgccacagcccagccacggacgctggctccccaaagggtgtgccctcaccacccacttgatttttttcattttgccaa

SEQ ID NO: 258108 - DNA, 122 bp, Homo sapiens
cgctcatgcctttgaagatttccctgcagccagtggcgcaggaacacaaccccgtggacacggaagggcaccaccgcggcccctggcaggcctcacctgtagccgctgcgccctccccgcgg

SEQ ID NO: 258109 - DNA, 122 bp, Homo sapiens
atttcaagagagttgacatcaacccaattttctgccagcagtgtatataagcgttcatttcgctaaccatcagtagcattatcactggaaaagaattctgtcctttgaagaaaagcaatgtt

SEQ ID NO: 258110 - DNA, 122 bp, Homo sapiens
agtgctttttggcggggtagtgcagtgtgttccgggcggacgggcgtcagtttacgtgtgcgtttctcatccttgcaggtacctggccccgggcactcaggtggcagggacattttgctgtt

SEQ ID NO: 258111 - DNA, 122 bp, Homo sapiens
tcctttttgtctctggggctgcacacctgtggggcttgcactcacctgatcttgcttttccggcccctgcatggtagggagtttgccaaggagcgagagagggtggagaaccgccgcgcctt

SEQ ID NO: 258112 - DNA, 122 bp, Homo sapiens
cggatttttcagtcctgcctccacggaaaaccctgcttccaaaaacaggggcacagatgtcgtcgcaatcaataggtgattgtcgctggggcggattagaaatctggttttatacttgctat

SEQ ID NO: 258113 - DNA, 122 bp, Homo sapiens
gtggcgggcaggtgggggcctgcacacaggggctgctccatagcccaagacctgggctcccggccagagggtctggaacgaggaagtactgcctcttcccccacagaggctggagagggcag

SEQ ID NO: 258114 - DNA, 122 bp, Homo sapiens
cggagccaatcggaactcgcggcggggctgctgggtcttccaggagcgcgcttgagcggacgctgcctaccggtggccgggcgggatgtaacccgctgctgagctggcagctctgtgtcgct

SEQ ID NO: 258115 - DNA, 122 bp, Homo sapiens
ggggatcttctccatccagggtagggtaggggtcctgaggagcgaccctctgcccagagccgaaggagcagcctgggaggaagggttttaggtttccccgtaactctgcctaccccccaccc

SEQ ID NO: 258116 - DNA, 122 bp, Homo sapiens
tttgtctgagaaatacaagttcttttaattatcagacccagagatttgttaaaatgagaccgcagtcctacttttccccacgttgaactatttattttttgaaattccttgctattgctacc

SEQ ID NO: 258117 - DNA, 122 bp, Homo sapiens
acatagcttctctttatatggtaacaaatgctatttgtttggtggcctggcaaacgaaagcgaagattcaaacaataatgttcccaggtatgctgactctttcagaccaaatgcttatttta

SEQ ID NO: 258118 - DNA, 122 bp, Homo sapiens
ctcagcggaatacagaggaaccgcgcagacactaaccgcagacacatgccacacagatgccgcagccacatggcgctgcgggaaggaaccaggcccaggagcacagccatgtgcccctccct

SEQ ID NO: 258119 - DNA, 122 bp, Homo sapiens
ccatacgtaaatcttccgcgtcgctacgtgacgtcagtgcgagcgaccccgggccggctgcgtggagctggcgctgcctctcctgaagccgaggcgctaacttgagtgaagaggtctatagg

SEQ ID NO: 258120 - DNA, 122 bp, Homo sapiens
ccgggtgtccgggatctgcggcggcgccgccttgttgtgcatcgccatgttgggctgaggcgggcggcggcggcgcgaggttgggggcggtccctgcgccgccagggggcgcccccccgctc

SEQ ID NO: 258121 - DNA, 122 bp, Homo sapiens
aagaacaaggcttaacattggctgggatagatggtacctgaaagttgttaggagggtttgcgcagggcgcgaggaacagaagcaaattagaggagctataatgtttggagggaggacaaaaa

SEQ ID NO: 258122 - DNA, 122 bp, Homo sapiens
tagacacactaagccatgcttaccagttactatagtgggaacactcccaaaattcaagttcgcagatgcaaatcaagagccaaccatgcaagcagtcccttctaaggccagcagtctcaggc

SEQ ID NO: 258123 - DNA, 122 bp, Homo sapiens
gtttagcgaatagaaactcttaaacactattcttatttcaaagaagagattcatcttcatcgcttgatggataaatgttcataatatgttgttgaatggaaggcctatttgtaatggtgtca

SEQ ID NO: 258124 - DNA, 122 bp, Homo sapiens
tctccgggagggtgtgtccaccccagcccatctgccaccaggctggcctaaaagaagcggcgtcctcctgtgtgtgtgtgtgtgtgtgtgtgtgtgtgtgtgtgtgtgtgtgtgtgtgtgtg

SEQ ID NO: 258125 - DNA, 122 bp, Homo sapiens
gggggccgctccatggggcgggagggcaagcggcctcaggttccacagttgttccaaggccggttccgggccgccgatgctcgcgcgtctttgttctcgcgagaatgaatgcgtcacttccg

SEQ ID NO: 258126 - DNA, 122 bp, Homo sapiens
catggagatcacgtggacggtaagaggccctcccagccccagtggagcagctcaccttgccgcatgcaccgggagcccctctcccttgatgccccgacactacgaggccatgatgtggttca

SEQ ID NO: 258127 - DNA, 122 bp, Homo sapiens
tcgcgtgcggtcacctgctcttcccgcggcggggtgaggccttggagaagccggggagggcgggtgctggggaaggggcgtcggccgaccccgccccgggtcccccacgcggccccagcctc

SEQ ID NO: 258128 - DNA, 122 bp, Homo sapiens
gccgggcgactccggccgctgccgggcgcgttcgcttgtaatccggctgctggcgggcggcgccgaccccctcccgtgacgtcacggccactaccgccgctccccgcgccgcgccgcgccgg

SEQ ID NO: 258129 - DNA, 122 bp, Homo sapiens
cattttacagagatggagataggtccgcagagaagtgatttaaggcaggggattgagacacgggagaaacttccacctgtgggcttgcatgtgccactctgccgctctgcaacctcctcctt

SEQ ID NO: 258130 - DNA, 122 bp, Homo sapiens
tctgtgctgccttctgctccagctcatgtggggggactcagttgttttatccagaaatctcgtggcttcatgggcatactctgtcattttttcttatctaaccagtatacaaattactgttc

SEQ ID NO: 258131 - DNA, 122 bp, Homo sapiens
gaaaagattacttgtctgtgaattattttctgaagatgaaagtaaatatacaggaacatacggtattcctttaaaagttgccagatcataattgtgtggcaaggcagttatcagaaattaat

SEQ ID NO: 258132 - DNA, 122 bp, Homo sapiens
agtcaggtggccgtgctggggatccctgcgcgggcccagctgggcctggactacatctggcgggaggggtgtgcggggcggcctggggcggctccacgtgctcagatgcccgcgcttccacg

SEQ ID NO: 258133 - DNA, 122 bp, Homo sapiens
acctcagagaactggacctggcgctggttcagagcaccaggttgggtgggtgtgtggcctcgggagaggaggcggtacccggcacccatgaggaccacgtccggccgctgcactggctccag

SEQ ID NO: 258134 - DNA, 122 bp, Homo sapiens
gttgatttgaaggtcttagtactccaggtactttacatatctttgggttaaatatgtatacgttgtcattttaattgccaaagttacttgaacttctacataacacagccacattttaaggg

SEQ ID NO: 258135 - DNA, 122 bp, Homo sapiens
aagatggacatcaaaactgcatccggaggtgcagtctgcacccagaaggaaggggatctccgccagcagagcccaagagtggcgtgcagactgcatgtgcacagcctcagcccggccccctc

SEQ ID NO: 258136 - DNA, 122 bp, Homo sapiens
gctcgccttcaactttgctctgaggacctctcgttagtatcccgcgattgtccttcctaacgcctgactgaatcctgaggctagccttcagcgaacatgtacaccgccttgcccttcacgtg

SEQ ID NO: 258137 - DNA, 122 bp, Homo sapiens
aagaggtttcctgttgcaatcaaagccccgtttgtgtcggcctggagctggagcctgtgccggaggaggagagaccggggaggggaggggaaaagaggcagtcgactggggttttttcctgg

SEQ ID NO: 258138 - DNA, 122 bp, Homo sapiens
aaaagtatatatacgtcaaagactttcaccccactctactttagttccccactctcaggacgtgatcctcaaagctgccttgaccttaaaccaccatatcctattccctaacaaatacatcc

SEQ ID NO: 258139 - DNA, 122 bp, Homo sapiens
cagagcgagactccatctcaaaaaaaaaaaaaaaagaacgcaaacacttttttttcagcacgcaactattgtgggacaaagtttataaacattatactgtttggccaagagttagtgtacct

SEQ ID NO: 258140 - DNA, 122 bp, Homo sapiens
cagcggaggacttttatcacctgtgaaaatccgcgcgagccccttactttggatcctcgccgagctggggaggaacttgcactgaccacaccttctgtccccggccaccccgcaggccagag

SEQ ID NO: 258141 - DNA, 122 bp, Homo sapiens
aaaggctccctccagggtcactccgcggacaaacagaatggtcagcaccacgtaggggaacgtggccgtgaagtacaccacctggcacaagagggctccatggactcttctgggctctcccc

SEQ ID NO: 258142 - DNA, 122 bp, Homo sapiens
aaaacaaacaaaccctggcggcggcggcggcggcggcagtggcggcggcggcggcggcggcggcggcagcggcagcagcaacagcagtagctccagcacagctgcgctccatggcgcaagtt

SEQ ID NO: 258143 - DNA, 122 bp, Homo sapiens
ctgccccgggaggcaggggcccttcctttccccagggaagcacggggactctaagccggccggcctgcgctgtcttacccgccccgtacccccgcccctgtctcgggagcggagtagcggtg

SEQ ID NO: 258144 - DNA, 122 bp, Homo sapiens
gggacggagtcagctacagagcagggagtggggcagggaggtagggaggcaccgtggcgacggaatccagccctgtccctcgcacaggataggacaacgggaggaaggaaaaatgacgctcc

SEQ ID NO: 258145 - DNA, 122 bp, Homo sapiens
tcctgagggcacacagcctggcctggtgctgaaactcgactggcccttggtggccctgagcggccgctgtggttgagtcccaccttgttaggaagctgcccctgtgggctgttcttggttaa

SEQ ID NO: 258146 - DNA, 122 bp, Homo sapiens
attccacggaacacactctccagtggagaagtggaggtcaaaacagagtcatgactgctacgatggtgatgagaaaaagttccatggggccacagagtcacctagggtcgactgaggacagc

SEQ ID NO: 258147 - DNA, 122 bp, Homo sapiens
gtcccttggatttatcttccctgaactcggaaagttatgtaatcatcgggacggttatcccgattctagccagggcaaagttgaacgagcgcgtgcagcagttaaaaggggaatttgcagat

SEQ ID NO: 258148 - DNA, 122 bp, Homo sapiens
gtgggggaaacaaatgaacacacagaaaaaggaaaagaaataaaagactctagagagggacgtaagaaagggttggtgaaagcagctcacgcccatggcaaggcaggggagaagtggggagg

SEQ ID NO: 258149 - DNA, 122 bp, Homo sapiens
tccgttgctgtgcaccctggtcggggagagtccgatgcgcctgggtaggagcaccgactgcggggcctctaccgaccttactagaaagatgaaacctgatgaaactcttatgtttgacccaa

SEQ ID NO: 258150 - DNA, 122 bp, Homo sapiens
ctgaagcagcaagccgacatcgtcttcatcccatacagttagttgttggatgccaagagccgcagagcacacaacattgaccttaaggggacggtcgtgatctttgatgaaactcacaaggt

SEQ ID NO: 258151 - DNA, 122 bp, Homo sapiens
gtcagcgctggggagccaggccggtgctggtgttgctgccttgctgccgccacctgaaggcgtgtgtgccggccagcgcctgtgtgcggggtccttaccactgtgtggtttaacccttgcca

SEQ ID NO: 258152 - DNA, 122 bp, Homo sapiens
agccactgctctatttctttctatgtccctaaaagaaaactcttccaagagtcggctatacgcattgcctttaatgcctctctttaagtttcttcttaaacccactctaattagatttatac

SEQ ID NO: 258153 - DNA, 122 bp, Homo sapiens
cccaggaaccctggatggaggcatccactttggcttctctgatgacaagcacacttcctccggacacttcttctgagtgatggcccagaagcaagtgttcctcttgctggagggcagctgga

SEQ ID NO: 258154 - DNA, 122 bp, Homo sapiens
ggcccaatttcacgcttaggaaggcttcctctggccaccaatggggcagatctgattaggcggctgcagagagtgcttggtcacaattaatcagcagccaggggtgggcagaggcccaccca

SEQ ID NO: 258155 - DNA, 122 bp, Homo sapiens
gtgaacgaatagcaaatatccctttggaaggctgagtggccggctccgcatcgcagaaggcggctcaggggcgctccgcccggactttgcctggtgcggccgcccgcgtttccgcctgcgcc

SEQ ID NO: 258156 - DNA, 122 bp, Homo sapiens
atgtggagtttaatgaggacaacagagtgggggctgccactctgcagggggtgcctgggccggtcccaagggtggtgggcagtgggatgaggccgggagctggtgggcttggctctgactgc

SEQ ID NO: 258157 - DNA, 122 bp, Homo sapiens
ctcatgccacccatttatctaaagggatgagattcaaggcctgtcccggtggctgggggccgtcgaagctgacgagagaggggatgtagagtgaatgtatattccactctaccacttgtatt

SEQ ID NO: 258158 - DNA, 122 bp, Homo sapiens
aggaaggtagtgtggtgtgactaacgggtatttattatatcctcgatggctcgagggccccgtcccctctactcgtcctggtccgggcgcgaacgctatagggcagctaagggcgctccccg

SEQ ID NO: 258159 - DNA, 122 bp, Homo sapiens
tgattatacacacgccttcacagataaaatcacatcgaagagagcggtgcgagtgtgtgccgggaaccagccacgtgtccatctgattctgccgtggaactttctccgccagaggtggcagc

SEQ ID NO: 258160 - DNA, 122 bp, Homo sapiens
ggccaagcccagcctgactcatggcaagccttcaacagatgtcagtaaaaggaactcaaccgtcaaatgcatagaatgaacatggggtcaactctcctccgtagctctcttccgcatgtggg

SEQ ID NO: 258161 - DNA, 122 bp, Homo sapiens
tgggcagggctgggccacagagctaggggtcccacggcaaactgctcctcacggccgccccggccaggtctcccacgctgagtgctgttggaagctttgtctatggccctttaggttggcca

SEQ ID NO: 258162 - DNA, 122 bp, Homo sapiens
gcgcgtgtttcaggggtcctgaggcgcgcgtctgcggggttcccaggcagcaccaagaggcgccggcctaggagaaatccggatcgagacaactgctgtggcggctgggccgaggctgcggt

SEQ ID NO: 258163 - DNA, 122 bp, Homo sapiens
agccatctaggtcccctgtactctttccctggggatggagctgggtgccggtgcaggcatcggaggagcggtgccggggaacccgcctcctcacctcttgcccctagcacggggcggtgact

SEQ ID NO: 258164 - DNA, 122 bp, Homo sapiens
ctcctgcccctctccccatcttcaaggtcatgtgagtgccccacttcctcagtgtagaggcgtttccagtgtccgggagacttggaggaggggtggggtctgagctgggatgtggactcctg

SEQ ID NO: 258165 - DNA, 122 bp, Homo sapiens
cttccacctatgcaagctccttctctcttgtggcttgccgagcctggttagctctgagaccggaagttctgaagtcagctggcatcctacatctgtgcaacctacttctctccccatcccac

SEQ ID NO: 258166 - DNA, 122 bp, Homo sapiens
gcacagatgcaattcaagccaagttcaactggattgaaagctccttgggggttgttactgcgcctcacacagctttgtgtccctcagagtaagcatgtgggtaaggtcaggttccccagaaa

SEQ ID NO: 258167 - DNA, 122 bp, Homo sapiens
ctggctagtttttgtatttttagtagagatggggtttcaccatattggtcaggctggtctcgagctcctgacctcaggtgatacacctgcctcagcatcgcaaagtgatgggattacaggtg

SEQ ID NO: 258168 - DNA, 122 bp, Homo sapiens
gaaattctattaaaccgaaaacgaaataaactatacaaatctgcctagcttttgagggggcggtggcccaggtatccttctcgcttgaggccaggtcaccgtgagatttccccactccggac

SEQ ID NO: 258169 - DNA, 122 bp, Homo sapiens
cacccattgcctactggtttatccgtttttctgagctgcagaagagctgggatgattcagcgtcttggggtggggtggagaggagacccaggacaggcagctattgggagcttaatggtaga

SEQ ID NO: 258170 - DNA, 122 bp, Homo sapiens
gtggccctctgggggtccgggaggcactttccgttttgcttctgttggagatgttcccgtcggatgctgaagaacaagcctgccggctgggccactccgacctgggctgtggcacccgtgtg

SEQ ID NO: 258171 - DNA, 122 bp, Homo sapiens
cgggtcctaaggggcgtgagggacggacagcaggcccagcggagctggattcgagcggatcgcggccggggagtgggagggcttagtggtgggcttcggggggagcagtccggcggcggggc

SEQ ID NO: 258172 - DNA, 122 bp, Homo sapiens
gagctgtgcgcccaccttgatctcactgtccagcagccgtgtgcgctggatgatctcctccgtggacatcttgagcacctcctccccaattccatcttgctgtaaaaaattatttgtttatt

SEQ ID NO: 258173 - DNA, 122 bp, Homo sapiens
ggttttggctaagccaccagggatacttctctgaccctctggatccttactttgactcatcgccctttttttttttttttttctgatccacaggtggctacagccaggttcatagtctggca

SEQ ID NO: 258174 - DNA, 122 bp, Homo sapiens
gtcagctccctactcaccatggctgggccagggtcaggaagtagccccctagctgcacgccggtcaccaggaccatctgcagcagcaggctgctgagcacgggcacgctgagcagcgccccc

SEQ ID NO: 258175 - DNA, 122 bp, Homo sapiens
gcgatgctccgagagcggcgagccgggccctggagttattctgctcggagtttcgaactgcgccccgcgctgcagctactcggccccggcgttggccgccggaacttgccgcccgcggtggc

SEQ ID NO: 258176 - DNA, 122 bp, Homo sapiens
ggagcctccacaggaaggcgggaccggcgggaccaacaggatgtgcaggggcccctccctcgaagcttcgccctcaagtaggacccaaagctccctcaaacgacccctgaacaggccgacct

SEQ ID NO: 258177 - DNA, 122 bp, Homo sapiens
cactgacaaccatgtgacctatcctagattggaagatggtgatgtcagcctgggctctaccgcttcctgctttagtgagcttagaaaagttgcttaacctctgtgaacctcagtttacagat
